United States Patent Application Publication US 2005/0244851 A1 - sequence listing, part 120

SEQ ID NO: 4681910 - DNA, 25 bp, Homo sapien
tgagccatgtgggtaagtagtgtcc

SEQ ID NO: 4681911 - DNA, 25 bp, Homo sapien
taagaattcctgtggccgagaggat

SEQ ID NO: 4681912 - DNA, 25 bp, Homo sapien
aaatcctgtgctccaaccgtgctgg

SEQ ID NO: 4681913 - DNA, 25 bp, Homo sapien
tcccattctaaatcctgtgctccaa

SEQ ID NO: 4681914 - DNA, 25 bp, Homo sapien
ggaccatcccattctaaatcctgtg

SEQ ID NO: 4681915 - DNA, 25 bp, Homo sapien
tgaacccaggaccatcccattctaa

SEQ ID NO: 4681916 - DNA, 25 bp, Homo sapien
aaacaacagacacgaggccccactc

SEQ ID NO: 4681917 - DNA, 25 bp, Homo sapien
gaaacaacagacacgaggccccact

SEQ ID NO: 4681918 - DNA, 25 bp, Homo sapien
gaaacactccatccgatcctgacat

SEQ ID NO: 4681919 - DNA, 25 bp, Homo sapien
tgacatttctcgacgtccgccggta

SEQ ID NO: 4681920 - DNA, 25 bp, Homo sapien
agtagctgccggaagtcctgcctct

SEQ ID NO: 4681921 - DNA, 25 bp, Homo sapien
tcaggtcagcattgaaacactccat

SEQ ID NO: 4681922 - DNA, 25 bp, Homo sapien
ttagaaaccagtcttgttgggcaca

SEQ ID NO: 4681923 - DNA, 25 bp, Homo sapien
agaaaccagtcttgttgggcacact

SEQ ID NO: 4681924 - DNA, 25 bp, Homo sapien
accagtcttgttgggcacactcatt

SEQ ID NO: 4681925 - DNA, 25 bp, Homo sapien
aaaccagtcttgttgggcacactca

SEQ ID NO: 4681926 - DNA, 25 bp, Homo sapien
tgtgcaagggaaacccctgtgagca

SEQ ID NO: 4681927 - DNA, 25 bp, Homo sapien
cagaaagcatggaagacgaatgggc

SEQ ID NO: 4681928 - DNA, 25 bp, Homo sapien
gggcaagggcatgaagcgggagcca

SEQ ID NO: 4681929 - DNA, 25 bp, Homo sapien
cagccacatggttgggcaagggcat

SEQ ID NO: 4681930 - DNA, 25 bp, Homo sapien
tggaggaggagttctgaggaaggag

SEQ ID NO: 4681931 - DNA, 25 bp, Homo sapien
ggagggaggaggaattctgaggagg

SEQ ID NO: 4681932 - DNA, 25 bp, Homo sapien
gaggagttctgaggaaggaggagga

SEQ ID NO: 4681933 - DNA, 25 bp, Homo sapien
gaggagttctgaggagggaggagga

SEQ ID NO: 4681934 - DNA, 25 bp, Homo sapien
ttgtgagaaggtgaaaggagttctg

SEQ ID NO: 4681935 - DNA, 25 bp, Homo sapien
tgtgaggagcgggagttctgaagag

SEQ ID NO: 4681936 - DNA, 25 bp, Homo sapien
ggtactgtacgttaaggacttgcca

SEQ ID NO: 4681937 - DNA, 25 bp, Homo sapien
tgaaatgtcagagcgtcagctgcag

SEQ ID NO: 4681938 - DNA, 25 bp, Homo sapien
tctggcactgcagggacattccggt

SEQ ID NO: 4681939 - DNA, 25 bp, Homo sapien
acattccggtatagggtgccaggcc

SEQ ID NO: 4681940 - DNA, 25 bp, Homo sapien
ttaagtgaccttgacgtgctgcccg

SEQ ID NO: 4681941 - DNA, 25 bp, Homo sapien
tagggagggccttgtattccactgc

SEQ ID NO: 4681942 - DNA, 25 bp, Homo sapien
gaatctggctgcacactgaggagac

SEQ ID NO: 4681943 - DNA, 25 bp, Homo sapien
ttgtcattttcgaggcccgtccagg

SEQ ID NO: 4681944 - DNA, 25 bp, Homo sapien
gataaaacccaatgctaagcctggc

SEQ ID NO: 4681945 - DNA, 25 bp, Homo sapien
tagaatgttcgtgtagatctaccac

SEQ ID NO: 4681946 - DNA, 25 bp, Homo sapien
gggtggtatgttccctccccattga

SEQ ID NO: 4681947 - DNA, 25 bp, Homo sapien
gacgtggtggaatatggagccaatc

SEQ ID NO: 4681948 - DNA, 25 bp, Homo sapien
tcaacaacatctagagcacactctg

SEQ ID NO: 4681949 - DNA, 25 bp, Homo sapien
cagacttagcttacagtcaccatga

SEQ ID NO: 4681950 - DNA, 25 bp, Homo sapien
cctgttatttgatcacaaaaggcag

SEQ ID NO: 4681951 - DNA, 25 bp, Homo sapien
ggtcatcgtgccctcctctaaagca

SEQ ID NO: 4681952 - DNA, 25 bp, Homo sapien
taactctggatgttcctcgggctgc

SEQ ID NO: 4681953 - DNA, 25 bp, Homo sapien
taacgatggcaggaccaagtcacac

SEQ ID NO: 4681954 - DNA, 25 bp, Homo sapien
ggtgtcaaaacagagcccaatgcct

SEQ ID NO: 4681955 - DNA, 25 bp, Homo sapien
gaacgtaaagaatgactgtcccgca

SEQ ID NO: 4681956 - DNA, 25 bp, Homo sapien
gagtccagactggtatgccctgtcc

SEQ ID NO: 4681957 - DNA, 25 bp, Homo sapien
tccacaggtccttaaagtaggtgtc

SEQ ID NO: 4681958 - DNA, 25 bp, Homo sapien
aatttactgatacaggcctcctgcc

SEQ ID NO: 4681959 - DNA, 25 bp, Homo sapien
cacccaacgcaagctgtgaggctgg

SEQ ID NO: 4681960 - DNA, 25 bp, Homo sapien
aaaagctgacaatctacagggtggg

SEQ ID NO: 4681961 - DNA, 25 bp, Homo sapien
gatacatgtaactgtgagaccaggc

SEQ ID NO: 4681962 - DNA, 25 bp, Homo sapien
gatcacaaggcagaacaaggccgaa

SEQ ID NO: 4681963 - DNA, 25 bp, Homo sapien
cacagaaagggttagacagtcatac

SEQ ID NO: 4681964 - DNA, 25 bp, Homo sapien
ggcttgaagataccccccagtatct

SEQ ID NO: 4681965 - DNA, 25 bp, Homo sapien
gaggcttgaagataccccccagtat

SEQ ID NO: 4681966 - DNA, 25 bp, Homo sapien
tctgaggcttgaagataccccccag

SEQ ID NO: 4681967 - DNA, 25 bp, Homo sapien
agataccccccagtatcttcaaaag

SEQ ID NO: 4681968 - DNA, 25 bp, Homo sapien
tttcaacccatagagaatttctatc

SEQ ID NO: 4681969 - DNA, 25 bp, Homo sapien
ccatagagaatttctatctgaaaca

SEQ ID NO: 4681970 - DNA, 25 bp, Homo sapien
caacccatagagaatttctatctga

SEQ ID NO: 4681971 - DNA, 25 bp, Homo sapien
atttcaacccatagagaatttctat

SEQ ID NO: 4681972 - DNA, 25 bp, Homo sapien
aatatgcaatgctcctcgccactgg

SEQ ID NO: 4681973 - DNA, 25 bp, Homo sapien
ggacaaaaacctcgtgccagcatca

SEQ ID NO: 4681974 - DNA, 25 bp, Homo sapien
taaaggccgagatgacagagccact

SEQ ID NO: 4681975 - DNA, 25 bp, Homo sapien
tggtgttaacactaaaggctctgct

SEQ ID NO: 4681976 - DNA, 25 bp, Homo sapien
tggctgtcggcctgcctgccagtca

SEQ ID NO: 4681977 - DNA, 25 bp, Homo sapien
cttcatctccccagattggtgcaga

SEQ ID NO: 4681978 - DNA, 25 bp, Homo sapien
cagtcatgatggctactacactagg

SEQ ID NO: 4681979 - DNA, 25 bp, Homo sapien
gctactacactaggaagtttcttca

SEQ ID NO: 4681980 - DNA, 25 bp, Homo sapien
tgaggcggggggactgcttgggcct

SEQ ID NO: 4681981 - DNA, 25 bp, Homo sapien
agactgaggcggggggactgcttgg

SEQ ID NO: 4681982 - DNA, 25 bp, Homo sapien
gcggggggactgcttgggcctggaa

SEQ ID NO: 4681983 - DNA, 25 bp, Homo sapien
ggcggggggactgcttgggcctgga

SEQ ID NO: 4681984 - DNA, 25 bp, Homo sapien
caggccactgggaaaaaggtagcgc

SEQ ID NO: 4681985 - DNA, 25 bp, Homo sapien
tgtgaagcccttgcagtaaaccagg

SEQ ID NO: 4681986 - DNA, 25 bp, Homo sapien
taagaaacctgcgttccagccagag

SEQ ID NO: 4681987 - DNA, 25 bp, Homo sapien
tatagctaactagtcacctgggtgc

SEQ ID NO: 4681988 - DNA, 25 bp, Homo sapien
tgcaggaactgaaaacatcagccat

SEQ ID NO: 4681989 - DNA, 25 bp, Homo sapien
ctgcaggaactgaaaacatcagcca

SEQ ID NO: 4681990 - DNA, 25 bp, Homo sapien
gctccttttagctagcagctgcagg

SEQ ID NO: 4681991 - DNA, 25 bp, Homo sapien
tggtcaattcttacagcatcgtggc

SEQ ID NO: 4681992 - DNA, 25 bp, Homo sapien
cagggagatgggtcacagtgcacca

SEQ ID NO: 4681993 - DNA, 25 bp, Homo sapien
taattatcattaaccctgtgagggc

SEQ ID NO: 4681994 - DNA, 25 bp, Homo sapien
tggctgcttccaagtcttcactctc

SEQ ID NO: 4681995 - DNA, 25 bp, Homo sapien
caggggtcaaggatcatgtggccct

SEQ ID NO: 4681996 - DNA, 25 bp, Homo sapien
ccacagcaggggtcaaggatcatgt

SEQ ID NO: 4681997 - DNA, 25 bp, Homo sapien
gtcaaggatcatgtggccctgtgct

SEQ ID NO: 4681998 - DNA, 25 bp, Homo sapien
gatgctggccatcgccttgtgcctg

SEQ ID NO: 4681999 - DNA, 25 bp, Homo sapien
catgaagtcagatgctggccatcgc

SEQ ID NO: 4682000 - DNA, 25 bp, Homo sapien
tgactaataagtcagcactgctgac

SEQ ID NO: 4682001 - DNA, 25 bp, Homo sapien
tcagcgctgacttacgctgactaat

SEQ ID NO: 4682002 - DNA, 25 bp, Homo sapien
cgtttaatgaatgcatgccctgtca

SEQ ID NO: 4682003 - DNA, 25 bp, Homo sapien
tcgtttaatgaatgcatgccctgtc

SEQ ID NO: 4682004 - DNA, 25 bp, Homo sapien
ggacctgcctagtagcacatgagga

SEQ ID NO: 4682005 - DNA, 25 bp, Homo sapien
cactgctgccacatgagaaaggaat

SEQ ID NO: 4682006 - DNA, 25 bp, Homo sapien
tctcggcctgaatggaaagttgagc

SEQ ID NO: 4682007 - DNA, 25 bp, Homo sapien
gcttcctaggacaagagccgtcaat

SEQ ID NO: 4682008 - DNA, 25 bp, Homo sapien
tagcagccgaatttgggagcatatc

SEQ ID NO: 4682009 - DNA, 25 bp, Homo sapien
actgcagccagaaagcccttcgatc

SEQ ID NO: 4682010 - DNA, 25 bp, Homo sapien
gccgtagcagccgaatttgggagca

SEQ ID NO: 4682011 - DNA, 25 bp, Homo sapien
ccttcgatccccatcagagaggtca

SEQ ID NO: 4682012 - DNA, 25 bp, Homo sapien
tggactgtcgccagtcctactctgc

SEQ ID NO: 4682013 - DNA, 25 bp, Homo sapien
tactctgcctgaggtggcgagggca

SEQ ID NO: 4682014 - DNA, 25 bp, Homo sapien
aggagccagcactcgcggtgcgctc

SEQ ID NO: 4682015 - DNA, 25 bp, Homo sapien
gctgctgtcacaggcgctgcgtgcc

SEQ ID NO: 4682016 - DNA, 25 bp, Homo sapien
ggttcctgatcatccacgctgccag

SEQ ID NO: 4682017 - DNA, 25 bp, Homo sapien
catgctctgtggtacattttggccc

SEQ ID NO: 4682018 - DNA, 25 bp, Homo sapien
ctgccagagctatagtggattgtgg

SEQ ID NO: 4682019 - DNA, 25 bp, Homo sapien
ctgaccatggaacaggtcatgctct

SEQ ID NO: 4682020 - DNA, 25 bp, Homo sapien
acccctcataggatcaaggtgtttg

SEQ ID NO: 4682021 - DNA, 25 bp, Homo sapien
gatcaaggtgtttggactgtttgct

SEQ ID NO: 4682022 - DNA, 25 bp, Homo sapien
gagtctccacccctcataggatcaa

SEQ ID NO: 4682023 - DNA, 25 bp, Homo sapien
cataggatcaaggtgtttggactgt

SEQ ID NO: 4682024 - DNA, 25 bp, Homo sapien
tatacctcattaacaccttgtagag

SEQ ID NO: 4682025 - DNA, 25 bp, Homo sapien
tgtagagcaggattttggtaagact

SEQ ID NO: 4682026 - DNA, 25 bp, Homo sapien
aaagtttcctctatctgcgtcctga

SEQ ID NO: 4682027 - DNA, 25 bp, Homo sapien
tggtaagacttttgagcccacttag

SEQ ID NO: 4682028 - DNA, 25 bp, Homo sapien
ttaaataccagcttctctacctggg

SEQ ID NO: 4682029 - DNA, 25 bp, Homo sapien
gaacctaataataccagcatgtgaa

SEQ ID NO: 4682030 - DNA, 25 bp, Homo sapien
tattgatggcatacataatgctgaa

SEQ ID NO: 4682031 - DNA, 25 bp, Homo sapien
aatgaaaagcgacagtagcaagaac

SEQ ID NO: 4682032 - DNA, 25 bp, Homo sapien
ccttctccagctcaaagagaggcca

SEQ ID NO: 4682033 - DNA, 25 bp, Homo sapien
ttcttcccagcagccttctccagct

SEQ ID NO: 4682034 - DNA, 25 bp, Homo sapien
agccttctccagctcaaagagaggc

SEQ ID NO: 4682035 - DNA, 25 bp, Homo sapien
ttctccagctcaaagagaggccagc

SEQ ID NO: 4682036 - DNA, 25 bp, Homo sapien
gacttggcaggtatctaaagctgac

SEQ ID NO: 4682037 - DNA, 25 bp, Homo sapien
gaaaagttcctctgacgaccactcc

SEQ ID NO: 4682038 - DNA, 25 bp, Homo sapien
taaagctgaccctttctcaagtagg

SEQ ID NO: 4682039 - DNA, 25 bp, Homo sapien
cataaaaccgctttgtgctctctgg

SEQ ID NO: 4682040 - DNA, 25 bp, Homo sapien
ggtcctctgccatatctacagtcat

SEQ ID NO: 4682041 - DNA, 25 bp, Homo sapien
gatctctatagcttgtcggtcctct

SEQ ID NO: 4682042 - DNA, 25 bp, Homo sapien
aatggatgagggcagatctctatag

SEQ ID NO: 4682043 - DNA, 25 bp, Homo sapien
tgcaacctgacacaagagtccagag

SEQ ID NO: 4682044 - DNA, 25 bp, Homo sapien
tatctccaaacttggatgtttgtcc

SEQ ID NO: 4682045 - DNA, 25 bp, Homo sapien
tctttgatgcttagggcaagatccc

SEQ ID NO: 4682046 - DNA, 25 bp, Homo sapien
ctctgcaggcagaagtatgtttgcc

SEQ ID NO: 4682047 - DNA, 25 bp, Homo sapien
ttgggtgtaatcaaatagaatttcc

SEQ ID NO: 4682048 - DNA, 25 bp, Homo sapien
atgtaggaaagagccttctggagac

SEQ ID NO: 4682049 - DNA, 25 bp, Homo sapien
gacacatgtaggaaagagccttctg

SEQ ID NO: 4682050 - DNA, 25 bp, Homo sapien
cagacacatgtaggaaagagccttc

SEQ ID NO: 4682051 - DNA, 25 bp, Homo sapien
cacatgtaggaaagagccttctgga

SEQ ID NO: 4682052 - DNA, 25 bp, Homo sapien
tagtaaagcaatgcattccagacag

SEQ ID NO: 4682053 - DNA, 25 bp, Homo sapien
tcaatccattgccaactcaggtctt

SEQ ID NO: 4682054 - DNA, 25 bp, Homo sapien
cagacagaggcacttgtgaacacag

SEQ ID NO: 4682055 - DNA, 25 bp, Homo sapien
cttttgtggtcagagacatccctct

SEQ ID NO: 4682056 - DNA, 25 bp, Homo sapien
ctcaatcaacttagagggaggctgc

SEQ ID NO: 4682057 - DNA, 25 bp, Homo sapien
tcacagtcattaaactgctttgctg

SEQ ID NO: 4682058 - DNA, 25 bp, Homo sapien
gtagcaaccctcaatcaacttagag

SEQ ID NO: 4682059 - DNA, 25 bp, Homo sapien
gctgtggggtatagaagtagcaacc

SEQ ID NO: 4682060 - DNA, 25 bp, Homo sapien
tttttgtttatgtggccccaggaca

SEQ ID NO: 4682061 - DNA, 25 bp, Homo sapien
ttttgtttatgtggccccaggacag

SEQ ID NO: 4682062 - DNA, 25 bp, Homo sapien
ctggtgcaaaaatccatcccagtca

SEQ ID NO: 4682063 - DNA, 25 bp, Homo sapien
caggacagatgaaacttgtactggt

SEQ ID NO: 4682064 - DNA, 25 bp, Homo sapien
aaccagcttcaaactgcatcccaag

SEQ ID NO: 4682065 - DNA, 25 bp, Homo sapien
atcccaagctgctgatagaaaatgg

SEQ ID NO: 4682066 - DNA, 25 bp, Homo sapien
aatggagttatgaattcttcccctc

SEQ ID NO: 4682067 - DNA, 25 bp, Homo sapien
gaaaatggagttatgaattcttccc

SEQ ID NO: 4682068 - DNA, 25 bp, Homo sapien
caatagctaatacatgtgagactta

SEQ ID NO: 4682069 - DNA, 25 bp, Homo sapien
tcaatagctaatacatgtgagactt

SEQ ID NO: 4682070 - DNA, 25 bp, Homo sapien
catcccggagtttttggacagtaag

SEQ ID NO: 4682071 - DNA, 25 bp, Homo sapien
catgatcatcccggagtttttggac

SEQ ID NO: 4682072 - DNA, 25 bp, Homo sapien
gatcatcccggagtttttggacagt

SEQ ID NO: 4682073 - DNA, 25 bp, Homo sapien
tcatcccggagtttttggacagtaa

SEQ ID NO: 4682074 - DNA, 25 bp, Homo sapien
gacattggtcgttatgcccttctca

SEQ ID NO: 4682075 - DNA, 25 bp, Homo sapien
ttatgcccttctcagtccagagctg

SEQ ID NO: 4682076 - DNA, 25 bp, Homo sapien
ctgagacattggtcgttatgccctt

SEQ ID NO: 4682077 - DNA, 25 bp, Homo sapien
ggtcgttatgcccttctcagtccag

SEQ ID NO: 4682078 - DNA, 25 bp, Homo sapien
tatccgtatatgtctgggaagtact

SEQ ID NO: 4682079 - DNA, 25 bp, Homo sapien
tcagatataattatccgtatatgtc

SEQ ID NO: 4682080 - DNA, 25 bp, Homo sapien
tataattatccgtatatgtctggga

SEQ ID NO: 4682081 - DNA, 25 bp, Homo sapien
tatatgtctgggaagtacttcctcc

SEQ ID NO: 4682082 - DNA, 25 bp, Homo sapien
tctttgagtaccttaccgagccaca

SEQ ID NO: 4682083 - DNA, 25 bp, Homo sapien
gtgtagagtgtgcagcagtccatga

SEQ ID NO: 4682084 - DNA, 25 bp, Homo sapien
tgtctggttctgacttcctaggatg

SEQ ID NO: 4682085 - DNA, 25 bp, Homo sapien
taggatgaagttccctggattgagc

SEQ ID NO: 4682086 - DNA, 25 bp, Homo sapien
caaaaggaggctcgtgcaggtgcct

SEQ ID NO: 4682087 - DNA, 25 bp, Homo sapien
tcaaaaggaggctcgtgcaggtgcc

SEQ ID NO: 4682088 - DNA, 25 bp, Homo sapien
ttcaaaaggaggctcgtgcaggtgc

SEQ ID NO: 4682089 - DNA, 25 bp, Homo sapien
tagattcctgtcgtgcttgctgtcc

SEQ ID NO: 4682090 - DNA, 25 bp, Homo sapien
gaggaattcccgcaacgcatgagtt

SEQ ID NO: 4682091 - DNA, 25 bp, Homo sapien
gggacctctgattgcctgtgagcag

SEQ ID NO: 4682092 - DNA, 25 bp, Homo sapien
ctttggaccatagacgcagctctga

SEQ ID NO: 4682093 - DNA, 25 bp, Homo sapien
tgcaggatctgccacaccaaaacgt

SEQ ID NO: 4682094 - DNA, 25 bp, Homo sapien
tggccccgggtcccagcagtgggtc

SEQ ID NO: 4682095 - DNA, 25 bp, Homo sapien
ccgggtcccagcagtgggtcctgtt

SEQ ID NO: 4682096 - DNA, 25 bp, Homo sapien
gcaggatctgccacaccaaaacgtc

SEQ ID NO: 4682097 - DNA, 25 bp, Homo sapien
cgtgggtggtaatgcagtgggagcc

SEQ ID NO: 4682098 - DNA, 25 bp, Homo sapien
ccagagccgggtgcccagttccatg

SEQ ID NO: 4682099 - DNA, 25 bp, Homo sapien
tccatgggtcctgatggacagaagg

SEQ ID NO: 4682100 - DNA, 25 bp, Homo sapien
agccgggtgcccagttccatgggtc

SEQ ID NO: 4682101 - DNA, 25 bp, Homo sapien
gtgggacttgagttgagactcaatt

SEQ ID NO: 4682102 - DNA, 25 bp, Homo sapien
tgtgggacttgagttgagactcaat

SEQ ID NO: 4682103 - DNA, 25 bp, Homo sapien
actctgggcatcggtgccctctctg

SEQ ID NO: 4682104 - DNA, 25 bp, Homo sapien
gccctctctggggttggaacaggaa

SEQ ID NO: 4682105 - DNA, 25 bp, Homo sapien
gatgctccacacctggaggtcaagt

SEQ ID NO: 4682106 - DNA, 25 bp, Homo sapien
tcaagtaaccgtcccctcactctgg

SEQ ID NO: 4682107 - DNA, 25 bp, Homo sapien
aggtctaatactgtgttcccagcat

SEQ ID NO: 4682108 - DNA, 25 bp, Homo sapien
ttcctgatccccctctgggcgaggg

SEQ ID NO: 4682109 - DNA, 25 bp, Homo sapien
catggcactggaaactccttcctgt

SEQ ID NO: 4682110 - DNA, 25 bp, Homo sapien
gacatgtggctcgtgccgaggtcta

SEQ ID NO: 4682111 - DNA, 25 bp, Homo sapien
tgtcaagttcagagttacgctgcag

SEQ ID NO: 4682112 - DNA, 25 bp, Homo sapien
cgtgtttgcctgaaaggacattggc

SEQ ID NO: 4682113 - DNA, 25 bp, Homo sapien
ttcctcaaggtatgcactcagcggg

SEQ ID NO: 4682114 - DNA, 25 bp, Homo sapien
gctggtcctctagatgggcacgaat

SEQ ID NO: 4682115 - DNA, 25 bp, Homo sapien
tagacgaaactggaaaatggccttc

SEQ ID NO: 4682116 - DNA, 25 bp, Homo sapien
gatatgtacgcatcttcctgtggcc

SEQ ID NO: 4682117 - DNA, 25 bp, Homo sapien
cagtgatggcaacgctgtaggcacc

SEQ ID NO: 4682118 - DNA, 25 bp, Homo sapien
caaaacacgatcttagggcgggacg

SEQ ID NO: 4682119 - DNA, 25 bp, Homo sapien
gcggcgccgagagtgagtaagaagt

SEQ ID NO: 4682120 - DNA, 25 bp, Homo sapien
cggcgccgagagtgagtaagaagtt

SEQ ID NO: 4682121 - DNA, 25 bp, Homo sapien
taagccatggctccaaggcgtatcc

SEQ ID NO: 4682122 - DNA, 25 bp, Homo sapien
aagccatggctccaaggcgtatccc

SEQ ID NO: 4682123 - DNA, 25 bp, Homo sapien
agccatggctccaaggcgtatccca

SEQ ID NO: 4682124 - DNA, 25 bp, Homo sapien
actattcagatatctactattcagg

SEQ ID NO: 4682125 - DNA, 25 bp, Homo sapien
ttcagatatctactattcaggtatc

SEQ ID NO: 4682126 - DNA, 25 bp, Homo sapien
ctaagaggagatactattcagatat

SEQ ID NO: 4682127 - DNA, 25 bp, Homo sapien
gaggagatactattcagatatctac

SEQ ID NO: 4682128 - DNA, 25 bp, Homo sapien
accaccatggccctccatgtccagc

SEQ ID NO: 4682129 - DNA, 25 bp, Homo sapien
ccctccatgtccagctggttgaagc

SEQ ID NO: 4682130 - DNA, 25 bp, Homo sapien
tcacgcaccaccatggccctccatg

SEQ ID NO: 4682131 - DNA, 25 bp, Homo sapien
acgcaccaccatggccctccatgtc

SEQ ID NO: 4682132 - DNA, 25 bp, Homo sapien
gggatgctccatttacatggattgg

SEQ ID NO: 4682133 - DNA, 25 bp, Homo sapien
gctccatttacatggattggaatag

SEQ ID NO: 4682134 - DNA, 25 bp, Homo sapien
tccatttacatggattggaatagac

SEQ ID NO: 4682135 - DNA, 25 bp, Homo sapien
gatgctccatttacatggattggaa

SEQ ID NO: 4682136 - DNA, 25 bp, Homo sapien
gcaaaatttaatgccgcaacaaagc

SEQ ID NO: 4682137 - DNA, 25 bp, Homo sapien
tcatttttttggaactgaggctgtt

SEQ ID NO: 4682138 - DNA, 25 bp, Homo sapien
ccacgccgggacacatgagttaggg

SEQ ID NO: 4682139 - DNA, 25 bp, Homo sapien
tgccgcaacaaagcgactcattttt

SEQ ID NO: 4682140 - DNA, 25 bp, Homo sapien
gaccgcaggagctctgagtcatcaa

SEQ ID NO: 4682141 - DNA, 25 bp, Homo sapien
gccacaggaagatgcgtacatatcg

SEQ ID NO: 4682142 - DNA, 25 bp, Homo sapien
gccctaagatcgtgttttgaaagtg

SEQ ID NO: 4682143 - DNA, 25 bp, Homo sapien
gctgtaaccgcagagctgacgggat

SEQ ID NO: 4682144 - DNA, 25 bp, Homo sapien
gaaggacttcgtgaaatgtttggct

SEQ ID NO: 4682145 - DNA, 25 bp, Homo sapien
cagaaggacttcgtgaaatgtttgg

SEQ ID NO: 4682146 - DNA, 25 bp, Homo sapien
agcacagaaggacttcgtgaaatgt

SEQ ID NO: 4682147 - DNA, 25 bp, Homo sapien
cacagaaggacttcgtgaaatgttt

SEQ ID NO: 4682148 - DNA, 25 bp, Homo sapien
ggcacactgcactgccagagatggg

SEQ ID NO: 4682149 - DNA, 25 bp, Homo sapien
ggcttttccaatgaaggccattttc

SEQ ID NO: 4682150 - DNA, 25 bp, Homo sapien
atgggggatctgctccccgaggact

SEQ ID NO: 4682151 - DNA, 25 bp, Homo sapien
gcggaatgttccagacagctcccag

SEQ ID NO: 4682152 - DNA, 25 bp, Homo sapien
ctctgggtcatgtggtcaaggccaa

SEQ ID NO: 4682153 - DNA, 25 bp, Homo sapien
ggtgttcccggctctccttagacac

SEQ ID NO: 4682154 - DNA, 25 bp, Homo sapien
ctgcaggaagcgtgcggtgttcccg

SEQ ID NO: 4682155 - DNA, 25 bp, Homo sapien
agtcactccaagcatccaagggagg

SEQ ID NO: 4682156 - DNA, 25 bp, Homo sapien
gggagatccccttcaggcactcttg

SEQ ID NO: 4682157 - DNA, 25 bp, Homo sapien
tgtgcgacggtgctgaatcttgtcc

SEQ ID NO: 4682158 - DNA, 25 bp, Homo sapien
accaggtagcgccacgggagatccc

SEQ ID NO: 4682159 - DNA, 25 bp, Homo sapien
ccaggtagctgttctgtgtgcgacg

SEQ ID NO: 4682160 - DNA, 25 bp, Homo sapien
ggttccatctgagcagaagtgtgtg

SEQ ID NO: 4682161 - DNA, 25 bp, Homo sapien
cagctggtactgacaaggacactga

SEQ ID NO: 4682162 - DNA, 25 bp, Homo sapien
tgagtaggaaagtcaccagctggta

SEQ ID NO: 4682163 - DNA, 25 bp, Homo sapien
tccatctgagcagaagtgtgtgcca

SEQ ID NO: 4682164 - DNA, 25 bp, Homo sapien
tccccgctgagtgcataccttgagg

SEQ ID NO: 4682165 - DNA, 25 bp, Homo sapien
caatgtcctttcaggcaaacacggc

SEQ ID NO: 4682166 - DNA, 25 bp, Homo sapien
gcattcgtgcccatctagaggacca

SEQ ID NO: 4682167 - DNA, 25 bp, Homo sapien
tgtgcagtctgcagcgtaactctga

SEQ ID NO: 4682168 - DNA, 25 bp, Homo sapien
acagtattagacctcggcacgagcc

SEQ ID NO: 4682169 - DNA, 25 bp, Homo sapien
acagtcacagctttctacacggaat

SEQ ID NO: 4682170 - DNA, 25 bp, Homo sapien
ttctacacggaatcctgcatgccac

SEQ ID NO: 4682171 - DNA, 25 bp, Homo sapien
gacaagccccgggtgagcacaggat

SEQ ID NO: 4682172 - DNA, 25 bp, Homo sapien
tgaggggacggttacttgacctcca

SEQ ID NO: 4682173 - DNA, 25 bp, Homo sapien
ggaaagtgagatcctctcctcctct

SEQ ID NO: 4682174 - DNA, 25 bp, Homo sapien
agagagggcaccgatgcccagagtg

SEQ ID NO: 4682175 - DNA, 25 bp, Homo sapien
gtacagggggaaagtgagatcctct

SEQ ID NO: 4682176 - DNA, 25 bp, Homo sapien
tagtgacgccctctgtctggcatca

SEQ ID NO: 4682177 - DNA, 25 bp, Homo sapien
gaagcaacgtctgcatacgccaaga

SEQ ID NO: 4682178 - DNA, 25 bp, Homo sapien
gaatacggtggcatgttcacaagcc

SEQ ID NO: 4682179 - DNA, 25 bp, Homo sapien
tctggcatcagctggacttctgtgt

SEQ ID NO: 4682180 - DNA, 25 bp, Homo sapien
agagtccaggggttcgccacaagct

SEQ ID NO: 4682181 - DNA, 25 bp, Homo sapien
gggtaaaatgcaaaccaggatgagg

SEQ ID NO: 4682182 - DNA, 25 bp, Homo sapien
gccacaagcttcatccgagggtaaa

SEQ ID NO: 4682183 - DNA, 25 bp, Homo sapien
tctctgggtccaggacccgaggtct

SEQ ID NO: 4682184 - DNA, 25 bp, Homo sapien
aatatacaagattggcgggactgcc

SEQ ID NO: 4682185 - DNA, 25 bp, Homo sapien
cactcagagttggaaaggcccagaa

SEQ ID NO: 4682186 - DNA, 25 bp, Homo sapien
caaactcatgcgttgcgggaattcc

SEQ ID NO: 4682187 - DNA, 25 bp, Homo sapien
tgcactttgttagaggagcccaccg

SEQ ID NO: 4682188 - DNA, 25 bp, Homo sapien
ccttgccagctagaaccaggcatgc

SEQ ID NO: 4682189 - DNA, 25 bp, Homo sapien
tttcaggagttgttacagcaacacc

SEQ ID NO: 4682190 - DNA, 25 bp, Homo sapien
ggcctgtccccggacactcaggatg

SEQ ID NO: 4682191 - DNA, 25 bp, Homo sapien
gagcctccttttgaaggtaatttca

SEQ ID NO: 4682192 - DNA, 25 bp, Homo sapien
gaagcctgcacctcaatactcaggg

SEQ ID NO: 4682193 - DNA, 25 bp, Homo sapien
ggctaaactcatgtaccccacctgt

SEQ ID NO: 4682194 - DNA, 25 bp, Homo sapien
gaattagctcgttttccagaccgcc

SEQ ID NO: 4682195 - DNA, 25 bp, Homo sapien
tgttaaggcctcctcccaagtggag

SEQ ID NO: 4682196 - DNA, 25 bp, Homo sapien
ccatggccatcctggcgatgcttgg

SEQ ID NO: 4682197 - DNA, 25 bp, Homo sapien
ctgaatgtgtttcccaggacgtgac

SEQ ID NO: 4682198 - DNA, 25 bp, Homo sapien
tctgtgcatccaaagggtctgaatg

SEQ ID NO: 4682199 - DNA, 25 bp, Homo sapien
tgtcagatgacaattcccatggcca

SEQ ID NO: 4682200 - DNA, 25 bp, Homo sapien
tctgttctttaatgtttccatgtgg

SEQ ID NO: 4682201 - DNA, 25 bp, Homo sapien
gagatccctgtctgaggcagccagt

SEQ ID NO: 4682202 - DNA, 25 bp, Homo sapien
ggcagccagtgtgaatcttcctcat

SEQ ID NO: 4682203 - DNA, 25 bp, Homo sapien
cactccaccagaaactgtctgttct

SEQ ID NO: 4682204 - DNA, 25 bp, Homo sapien
tgatttcatcaccacaaggtctcca

SEQ ID NO: 4682205 - DNA, 25 bp, Homo sapien
cattgtacctattcccacaccagtg

SEQ ID NO: 4682206 - DNA, 25 bp, Homo sapien
gcttcaccattgtacctattcccac

SEQ ID NO: 4682207 - DNA, 25 bp, Homo sapien
gaccaagcagtactggtggcagagc

SEQ ID NO: 4682208 - DNA, 25 bp, Homo sapien
tgtgtctgtccagacctggagccag

SEQ ID NO: 4682209 - DNA, 25 bp, Homo sapien
tcagctcttgaatagtctgttccca

SEQ ID NO: 4682210 - DNA, 25 bp, Homo sapien
ggttcccactctcatatcagctctt

SEQ ID NO: 4682211 - DNA, 25 bp, Homo sapien
ctggagacagctcctttatagacta

SEQ ID NO: 4682212 - DNA, 25 bp, Homo sapien
agggcgggcgccagggccgcgtctg

SEQ ID NO: 4682213 - DNA, 25 bp, Homo sapien
ggtctcctcgctccgagtcagttca

SEQ ID NO: 4682214 - DNA, 25 bp, Homo sapien
tgctcgctcgggtctcctcgctccg

SEQ ID NO: 4682215 - DNA, 25 bp, Homo sapien
tcgctcgggtctcctcgctccgagt

SEQ ID NO: 4682216 - DNA, 25 bp, Homo sapien
gacgaacgagtcttgcaagctgtcg

SEQ ID NO: 4682217 - DNA, 25 bp, Homo sapien
aagctgtcgttctctccagcccagg

SEQ ID NO: 4682218 - DNA, 25 bp, Homo sapien
tatgacttcttcaaagacgaacgag

SEQ ID NO: 4682219 - DNA, 25 bp, Homo sapien
cctacttgggatgaatcttggcctc

SEQ ID NO: 4682220 - DNA, 25 bp, Homo sapien
cctctcaacagttaggaccaaagga

SEQ ID NO: 4682221 - DNA, 25 bp, Homo sapien
ctccccctctcaacagttaggacca

SEQ ID NO: 4682222 - DNA, 25 bp, Homo sapien
cccctctcaacagttaggaccaaag

SEQ ID NO: 4682223 - DNA, 25 bp, Homo sapien
tctcaacagttaggaccaaaggaga

SEQ ID NO: 4682224 - DNA, 25 bp, Homo sapien
gcagatttgattagctgccattttg

SEQ ID NO: 4682225 - DNA, 25 bp, Homo sapien
ggcaaacgtcagtgtgggggtggaa

SEQ ID NO: 4682226 - DNA, 25 bp, Homo sapien
gggtggaaaggtaggcagatttgat

SEQ ID NO: 4682227 - DNA, 25 bp, Homo sapien
gcttgcagacgacagccctaaacca

SEQ ID NO: 4682228 - DNA, 25 bp, Homo sapien
cctcagactatgtggggatgtcccc

SEQ ID NO: 4682229 - DNA, 25 bp, Homo sapien
gctcgggatgtgacagtgtcctcag

SEQ ID NO: 4682230 - DNA, 25 bp, Homo sapien
ctggctcgggatgtgacagtgtcct

SEQ ID NO: 4682231 - DNA, 25 bp, Homo sapien
cagtgtcctcagactatgtggggat

SEQ ID NO: 4682232 - DNA, 25 bp, Homo sapien
aatcaaacagaagcaccgctgtatc

SEQ ID NO: 4682233 - DNA, 25 bp, Homo sapien
acagaagcaccgctgtatctgagaa

SEQ ID NO: 4682234 - DNA, 25 bp, Homo sapien
agaagcaccgctgtatctgagaaga

SEQ ID NO: 4682235 - DNA, 25 bp, Homo sapien
caaacagaagcaccgctgtatctga

SEQ ID NO: 4682236 - DNA, 25 bp, Homo sapien
tgtgaccctgcacgagtctctcttc

SEQ ID NO: 4682237 - DNA, 25 bp, Homo sapien
tgaccctgcacgagtctctcttcct

SEQ ID NO: 4682238 - DNA, 25 bp, Homo sapien
gtgtgaccctgcacgagtctctctt

SEQ ID NO: 4682239 - DNA, 25 bp, Homo sapien
tgtgtgaccctgcacgagtctctct

SEQ ID NO: 4682240 - DNA, 25 bp, Homo sapien
agagaaagatcagttttcttcccac

SEQ ID NO: 4682241 - DNA, 25 bp, Homo sapien
gagaaagatcagttttcttcccacc

SEQ ID NO: 4682242 - DNA, 25 bp, Homo sapien
agatcagttttcttcccaccccaat

SEQ ID NO: 4682243 - DNA, 25 bp, Homo sapien
aagagaaagatcagttttcttccca

SEQ ID NO: 4682244 - DNA, 25 bp, Homo sapien
tctagaacccttggaaacgctgtca

SEQ ID NO: 4682245 - DNA, 25 bp, Homo sapien
ggaggttggcactttcagccccact

SEQ ID NO: 4682246 - DNA, 25 bp, Homo sapien
ggtttcctggcacacgacttctaga

SEQ ID NO: 4682247 - DNA, 25 bp, Homo sapien
taaacaccccagtcaccctgattgg

SEQ ID NO: 4682248 - DNA, 25 bp, Homo sapien
ggagcaccaacaccgaaagggccat

SEQ ID NO: 4682249 - DNA, 25 bp, Homo sapien
gcaggagcaccaacaccgaaagggc

SEQ ID NO: 4682250 - DNA, 25 bp, Homo sapien
aagcaggagcaccaacaccgaaagg

SEQ ID NO: 4682251 - DNA, 25 bp, Homo sapien
agaagcaggagcaccaacaccgaaa

SEQ ID NO: 4682252 - DNA, 25 bp, Homo sapien
ggcaggttcaccagtacctggttga

SEQ ID NO: 4682253 - DNA, 25 bp, Homo sapien
gagcctgcagagtccccgtctgtct

SEQ ID NO: 4682254 - DNA, 25 bp, Homo sapien
gtctctgcgatggtctgctggctga

SEQ ID NO: 4682255 - DNA, 25 bp, Homo sapien
tgccaacagggaatgaatctgagcc

SEQ ID NO: 4682256 - DNA, 25 bp, Homo sapien
gggctaatgctgtctgggccagcct

SEQ ID NO: 4682257 - DNA, 25 bp, Homo sapien
gggcatcaggagacatgagctctag

SEQ ID NO: 4682258 - DNA, 25 bp, Homo sapien
ttcacttggctatgtgtagccactt

SEQ ID NO: 4682259 - DNA, 25 bp, Homo sapien
cctcatttgctagataggggcctgc

SEQ ID NO: 4682260 - DNA, 25 bp, Homo sapien
gacatggattagagactggccaaag

SEQ ID NO: 4682261 - DNA, 25 bp, Homo sapien
tgggtaagctaggtagtagcccaca

SEQ ID NO: 4682262 - DNA, 25 bp, Homo sapien
caccaaggaaaatccaggtgttgta

SEQ ID NO: 4682263 - DNA, 25 bp, Homo sapien
gacattacggccagcatgatgaagt

SEQ ID NO: 4682264 - DNA, 25 bp, Homo sapien
gctgcaatggcttccgaactccagg

SEQ ID NO: 4682265 - DNA, 25 bp, Homo sapien
tcacagagaagcattgtcatgggct

SEQ ID NO: 4682266 - DNA, 25 bp, Homo sapien
gaaattcctggtttgagtcacagag

SEQ ID NO: 4682267 - DNA, 25 bp, Homo sapien
ccctacgtaggctggctgagaagga

SEQ ID NO: 4682268 - DNA, 25 bp, Homo sapien
gaggttcaactatccagagagtccc

SEQ ID NO: 4682269 - DNA, 25 bp, Homo sapien
tctatcagagaataaaccaggagcc

SEQ ID NO: 4682270 - DNA, 25 bp, Homo sapien
ggcattgaggccacgaagagcttcc

SEQ ID NO: 4682271 - DNA, 25 bp, Homo sapien
tgtttccccactagatcattacgag

SEQ ID NO: 4682272 - DNA, 25 bp, Homo sapien
gatatgtctcccgtgtgcggacctg

SEQ ID NO: 4682273 - DNA, 25 bp, Homo sapien
tgttgcttaacaaaaggcggtgctg

SEQ ID NO: 4682274 - DNA, 25 bp, Homo sapien
caaagttacatatctaggaagcctc

SEQ ID NO: 4682275 - DNA, 25 bp, Homo sapien
ttcatctggcctggcatcatccttg

SEQ ID NO: 4682276 - DNA, 25 bp, Homo sapien
tgaggtctccctggtagaactaagg

SEQ ID NO: 4682277 - DNA, 25 bp, Homo sapien
aagccagtcacctgtaagagtcctg

SEQ ID NO: 4682278 - DNA, 25 bp, Homo sapien
gacctggtgaagaggatcataaccc

SEQ ID NO: 4682279 - DNA, 25 bp, Homo sapien
tcagcagcaagttggaagaaggact

SEQ ID NO: 4682280 - DNA, 25 bp, Homo sapien
aaagaacatggccagtatgttgtgt

SEQ ID NO: 4682281 - DNA, 25 bp, Homo sapien
tgaacagcacatcaaggaactagag

SEQ ID NO: 4682282 - DNA, 25 bp, Homo sapien
agtgtttagccctccaggcccaaat

SEQ ID NO: 4682283 - DNA, 25 bp, Homo sapien
ggaactagagaagaacaagtcccag

SEQ ID NO: 4682284 - DNA, 25 bp, Homo sapien
gcattttacgacgtcggcggtgaca

SEQ ID NO: 4682285 - DNA, 25 bp, Homo sapien
tgtgctgaccctgccgatctgaggt

SEQ ID NO: 4682286 - DNA, 25 bp, Homo sapien
tgattgctgatgagacttcctgcct

SEQ ID NO: 4682287 - DNA, 25 bp, Homo sapien
ggtgaaagccaacgcaatgttcggt

SEQ ID NO: 4682288 - DNA, 25 bp, Homo sapien
gtcaagtccagccactagcacctct

SEQ ID NO: 4682289 - DNA, 25 bp, Homo sapien
cctcacgactcttcgaacggcccct

SEQ ID NO: 4682290 - DNA, 25 bp, Homo sapien
tctctctccgaatcttaacccgtca

SEQ ID NO: 4682291 - DNA, 25 bp, Homo sapien
acttctacccggctcgacgtgtcca

SEQ ID NO: 4682292 - DNA, 25 bp, Homo sapien
tcactctggctatgccactgcaggg

SEQ ID NO: 4682293 - DNA, 25 bp, Homo sapien
gaaagcggcgaggaaggtccttgtc

SEQ ID NO: 4682294 - DNA, 25 bp, Homo sapien
tccgcggagctgaggaaagcggcga

SEQ ID NO: 4682295 - DNA, 25 bp, Homo sapien
aaaaggacggtacccatgcacaggg

SEQ ID NO: 4682296 - DNA, 25 bp, Homo sapien
tgtagtaccaacctgactgtgaggg

SEQ ID NO: 4682297 - DNA, 25 bp, Homo sapien
ttgtctaagccaggactaccccagg

SEQ ID NO: 4682298 - DNA, 25 bp, Homo sapien
taccccaggattgtttcgagaatga

SEQ ID NO: 4682299 - DNA, 25 bp, Homo sapien
gaaacattcacgtaagggacacctg

SEQ ID NO: 4682300 - DNA, 25 bp, Homo sapien
cctcctcatactgctaatgagaatc

SEQ ID NO: 4682301 - DNA, 25 bp, Homo sapien
cgtgatgttccaatcaccaaaaagg

SEQ ID NO: 4682302 - DNA, 25 bp, Homo sapien
tctacagtgataatctgcgtatgca

SEQ ID NO: 4682303 - DNA, 25 bp, Homo sapien
tcatactgctaatgagaatcagcag

SEQ ID NO: 4682304 - DNA, 25 bp, Homo sapien
cagttcaaagcctggcaagactcac

SEQ ID NO: 4682305 - DNA, 25 bp, Homo sapien
atggcaaagccccgactctatcaaa

SEQ ID NO: 4682306 - DNA, 25 bp, Homo sapien
ggcaaagccccgactctatcaaaaa

SEQ ID NO: 4682307 - DNA, 25 bp, Homo sapien
catggcaaagccccgactctatcaa

SEQ ID NO: 4682308 - DNA, 25 bp, Homo sapien
tggcaaagccccgactctatcaaaa

SEQ ID NO: 4682309 - DNA, 25 bp, Homo sapien
gttaggtgaatccataacatctgct

SEQ ID NO: 4682310 - DNA, 25 bp, Homo sapien
tagaaggctccataacactagacta

SEQ ID NO: 4682311 - DNA, 25 bp, Homo sapien
acactagactaaccgctttctccag

SEQ ID NO: 4682312 - DNA, 25 bp, Homo sapien
tctccggatggcttgctgggaagca

SEQ ID NO: 4682313 - DNA, 25 bp, Homo sapien
taacatagaaccatgtattctgtgg

SEQ ID NO: 4682314 - DNA, 25 bp, Homo sapien
agtccagtgaggcacctagtttcaa

SEQ ID NO: 4682315 - DNA, 25 bp, Homo sapien
cctaagtgagctgcatgttagacca

SEQ ID NO: 4682316 - DNA, 25 bp, Homo sapien
gatgagttcaaaacgccatcttgaa

SEQ ID NO: 4682317 - DNA, 25 bp, Homo sapien
caggggtgtgcaaatgaatctaacc

SEQ ID NO: 4682318 - DNA, 25 bp, Homo sapien
tctctgctgttcttgatttgggagc

SEQ ID NO: 4682319 - DNA, 25 bp, Homo sapien
tctatgttgaatcaggtggtcagtc

SEQ ID NO: 4682320 - DNA, 25 bp, Homo sapien
cagagatggcctttatctatgttga

SEQ ID NO: 4682321 - DNA, 25 bp, Homo sapien
gtccaaggaccacctggatcagaat

SEQ ID NO: 4682322 - DNA, 25 bp, Homo sapien
acaccactgaatcacctcttaggga

SEQ ID NO: 4682323 - DNA, 25 bp, Homo sapien
taaaaattatggaccctatgccaca

SEQ ID NO: 4682324 - DNA, 25 bp, Homo sapien
tttaggtgcttatcaagttccatgg

SEQ ID NO: 4682325 - DNA, 25 bp, Homo sapien
gtggtctgaaatgctaaaccaaaac

SEQ ID NO: 4682326 - DNA, 25 bp, Homo sapien
ttatgtgaattaagtctctaaggca

SEQ ID NO: 4682327 - DNA, 25 bp, Homo sapien
gctattgacctttaagtggtctgaa

SEQ ID NO: 4682328 - DNA, 25 bp, Homo sapien
agagattatactggctgctattgac

SEQ ID NO: 4682329 - DNA, 25 bp, Homo sapien
gtgatttaattctaatcagaacaag

SEQ ID NO: 4682330 - DNA, 25 bp, Homo sapien
aaagggacgataactcaggagctgc

SEQ ID NO: 4682331 - DNA, 25 bp, Homo sapien
tactcataaactcttggctaaaaat

SEQ ID NO: 4682332 - DNA, 25 bp, Homo sapien
ctttaactgtacttatggaaagata

SEQ ID NO: 4682333 - DNA, 25 bp, Homo sapien
ccatcttcttggatcattaaggaag

SEQ ID NO: 4682334 - DNA, 25 bp, Homo sapien
aaaattaagcaggagtttatgtgga

SEQ ID NO: 4682335 - DNA, 25 bp, Homo sapien
gagaaatggtctaggaattgactat

SEQ ID NO: 4682336 - DNA, 25 bp, Homo sapien
caggagtttatgtggaatttagttc

SEQ ID NO: 4682337 - DNA, 25 bp, Homo sapien
cctgtacaacttggaggattcttgg

SEQ ID NO: 4682338 - DNA, 25 bp, Homo sapien
taacggagtgacaggacttaactac

SEQ ID NO: 4682339 - DNA, 25 bp, Homo sapien
tttgcaatactggagaatcaccttt

SEQ ID NO: 4682340 - DNA, 25 bp, Homo sapien
cacctttgcattagaataacggagt

SEQ ID NO: 4682341 - DNA, 25 bp, Homo sapien
ctagggtagaaagattagaattact

SEQ ID NO: 4682342 - DNA, 25 bp, Homo sapien
ttttcctaacctttaatctatgata

SEQ ID NO: 4682343 - DNA, 25 bp, Homo sapien
tttaccaagttgagcttataactag

SEQ ID NO: 4682344 - DNA, 25 bp, Homo sapien
tcctaacctttaatctatgataaaa

SEQ ID NO: 4682345 - DNA, 25 bp, Homo sapien
ggctggttcaccaggcaacctggtg

SEQ ID NO: 4682346 - DNA, 25 bp, Homo sapien
aggctggttcaccaggcaacctggt

SEQ ID NO: 4682347 - DNA, 25 bp, Homo sapien
aaaagttgagagtcagcagaagatt

SEQ ID NO: 4682348 - DNA, 25 bp, Homo sapien
ggaaaagttgagagtcagcagaaga

SEQ ID NO: 4682349 - DNA, 25 bp, Homo sapien
tttccaggaaaagttgagagtcagc

SEQ ID NO: 4682350 - DNA, 25 bp, Homo sapien
tttttccaggaaaagttgagagtca

SEQ ID NO: 4682351 - DNA, 25 bp, Homo sapien
gtactgttggagtccatatagctca

SEQ ID NO: 4682352 - DNA, 25 bp, Homo sapien
tactgttggagtccatatagctcat

SEQ ID NO: 4682353 - DNA, 25 bp, Homo sapien
ggtactgttggagtccatatagctc

SEQ ID NO: 4682354 - DNA, 25 bp, Homo sapien
ttgggtgatggtgagaaggttgcat

SEQ ID NO: 4682355 - DNA, 25 bp, Homo sapien
catcatcatcatgctgctgtctcct

SEQ ID NO: 4682356 - DNA, 25 bp, Homo sapien
ctgctgtctcctccaccatgggagt

SEQ ID NO: 4682357 - DNA, 25 bp, Homo sapien
ctcctccaccatgggagtgtgaggc

SEQ ID NO: 4682358 - DNA, 25 bp, Homo sapien
ttcttaaagccaaagtagaaggtca

SEQ ID NO: 4682359 - DNA, 25 bp, Homo sapien
tccacattcttaaagccaaagtaga

SEQ ID NO: 4682360 - DNA, 25 bp, Homo sapien
ccacattcttaaagccaaagtagaa

SEQ ID NO: 4682361 - DNA, 25 bp, Homo sapien
taaagccaaagtagaaggtcatagg

SEQ ID NO: 4682362 - DNA, 25 bp, Homo sapien
ctccagctgtattgatcaccaaacc

SEQ ID NO: 4682363 - DNA, 25 bp, Homo sapien
gctgtattgatcaccaaaccggaaa

SEQ ID NO: 4682364 - DNA, 25 bp, Homo sapien
tattgatcaccaaaccggaaaacag

SEQ ID NO: 4682365 - DNA, 25 bp, Homo sapien
ttgatcaccaaaccggaaaacagta

SEQ ID NO: 4682366 - DNA, 25 bp, Homo sapien
ttgtagcgaatgctgacttgtgact

SEQ ID NO: 4682367 - DNA, 25 bp, Homo sapien
ggacaggcatggaattgtagcgaat

SEQ ID NO: 4682368 - DNA, 25 bp, Homo sapien
gtgacttacgcagcaggctctctcg

SEQ ID NO: 4682369 - DNA, 25 bp, Homo sapien
gctctctcgggctatcttgagtcct

SEQ ID NO: 4682370 - DNA, 25 bp, Homo sapien
ccaaggacagttttgatcaaggtca

SEQ ID NO: 4682371 - DNA, 25 bp, Homo sapien
ggtcatacagaactcctaactcaag

SEQ ID NO: 4682372 - DNA, 25 bp, Homo sapien
actgatcgagttctttaggacttca

SEQ ID NO: 4682373 - DNA, 25 bp, Homo sapien
ctttgctgcttaactgatcgagttc

SEQ ID NO: 4682374 - DNA, 25 bp, Homo sapien
tttgcaggaggtgaggaaagctcag

SEQ ID NO: 4682375 - DNA, 25 bp, Homo sapien
aggaggtgaggaaagctcagcatct

SEQ ID NO: 4682376 - DNA, 25 bp, Homo sapien
gaggtgaggaaagctcagcatctgt

SEQ ID NO: 4682377 - DNA, 25 bp, Homo sapien
gcaggaggtgaggaaagctcagcat

SEQ ID NO: 4682378 - DNA, 25 bp, Homo sapien
tgtaggtcatgaagatgagcatgag

SEQ ID NO: 4682379 - DNA, 25 bp, Homo sapien
ttgtaggtcatgaagatgagcatga

SEQ ID NO: 4682380 - DNA, 25 bp, Homo sapien
tccagctgaagaggaagtatcctgt

SEQ ID NO: 4682381 - DNA, 25 bp, Homo sapien
ggcaatgctctgtgatatccactac

SEQ ID NO: 4682382 - DNA, 25 bp, Homo sapien
tcaatggcaatgctctgtgatatcc

SEQ ID NO: 4682383 - DNA, 25 bp, Homo sapien
tgctctgtgatatccactaccactg

SEQ ID NO: 4682384 - DNA, 25 bp, Homo sapien
taacgtatcacatctagagaaaggc

SEQ ID NO: 4682385 - DNA, 25 bp, Homo sapien
gattggagcaggaatcacgtcttca

SEQ ID NO: 4682386 - DNA, 25 bp, Homo sapien
gaaaagacatctcatgggtggcttc

SEQ ID NO: 4682387 - DNA, 25 bp, Homo sapien
tatttagtctcaaaccaccgctctg

SEQ ID NO: 4682388 - DNA, 25 bp, Homo sapien
actggatctagcaccaaggagggca

SEQ ID NO: 4682389 - DNA, 25 bp, Homo sapien
gatttctagagagcaccaatgtcac

SEQ ID NO: 4682390 - DNA, 25 bp, Homo sapien
cactgtctactgcatcaggagggct

SEQ ID NO: 4682391 - DNA, 25 bp, Homo sapien
tcacagactagagacggcacctaag

SEQ ID NO: 4682392 - DNA, 25 bp, Homo sapien
tcaccagctgtgatcataagagcct

SEQ ID NO: 4682393 - DNA, 25 bp, Homo sapien
cggagactcttagcaggactttagc

SEQ ID NO: 4682394 - DNA, 25 bp, Homo sapien
gaatcatcagttctacggagactct

SEQ ID NO: 4682395 - DNA, 25 bp, Homo sapien
tgagctcctgacattaagcagtcct

SEQ ID NO: 4682396 - DNA, 25 bp, Homo sapien
gattatcttgcatgccagagcgctg

SEQ ID NO: 4682397 - DNA, 25 bp, Homo sapien
caagagccgggaacaaatgatcaat

SEQ ID NO: 4682398 - DNA, 25 bp, Homo sapien
gcttagcagtgatcccaagagccgg

SEQ ID NO: 4682399 - DNA, 25 bp, Homo sapien
gcagtcaagcagaatgtacctcctg

SEQ ID NO: 4682400 - DNA, 25 bp, Homo sapien
tcttaccatctagttcatagtaggg

SEQ ID NO: 4682401 - DNA, 25 bp, Homo sapien
caaattccctagcatggcatatgag

SEQ ID NO: 4682402 - DNA, 25 bp, Homo sapien
taactgtggccttgctacatggtat

SEQ ID NO: 4682403 - DNA, 25 bp, Homo sapien
tacattagggacgttgattgcagaa

SEQ ID NO: 4682404 - DNA, 25 bp, Homo sapien
ttgttttccccacagattatgactg

SEQ ID NO: 4682405 - DNA, 25 bp, Homo sapien
gaaggcttgcctgacatccttgtcc

SEQ ID NO: 4682406 - DNA, 25 bp, Homo sapien
gccagtgctagtatcctcatcaggg

SEQ ID NO: 4682407 - DNA, 25 bp, Homo sapien
gaccttcagaagtcaactaagacat

SEQ ID NO: 4682408 - DNA, 25 bp, Homo sapien
cctctgagcttgatggctcggcggt

SEQ ID NO: 4682409 - DNA, 25 bp, Homo sapien
ccccctctgagcttgatggctcggc

SEQ ID NO: 4682410 - DNA, 25 bp, Homo sapien
agcttgatggctcggcggtggattt

SEQ ID NO: 4682411 - DNA, 25 bp, Homo sapien
gagcttgatggctcggcggtggatt

SEQ ID NO: 4682412 - DNA, 25 bp, Homo sapien
ctggagctaggggacgaggactgtt

SEQ ID NO: 4682413 - DNA, 25 bp, Homo sapien
gctaggggacgaggactgttctcct

SEQ ID NO: 4682414 - DNA, 25 bp, Homo sapien
tgggctccgaggtacaggcctggag

SEQ ID NO: 4682415 - DNA, 25 bp, Homo sapien
gagctaggggacgaggactgttctc

SEQ ID NO: 4682416 - DNA, 25 bp, Homo sapien
ttggcttagcagtagtttcgttggg

SEQ ID NO: 4682417 - DNA, 25 bp, Homo sapien
aaaagaggtaggtgagtcgactcgc

SEQ ID NO: 4682418 - DNA, 25 bp, Homo sapien
ggaagtgtagtccagttggcttagc

SEQ ID NO: 4682419 - DNA, 25 bp, Homo sapien
ggctaggccggcttgaaaagaggta

SEQ ID NO: 4682420 - DNA, 25 bp, Homo sapien
gagcggcgcggagcatgatggaagt

SEQ ID NO: 4682421 - DNA, 25 bp, Homo sapien
tagaacctccaggaaaagctcgcgg

SEQ ID NO: 4682422 - DNA, 25 bp, Homo sapien
gcattgaggggcatccctcctagaa

SEQ ID NO: 4682423 - DNA, 25 bp, Homo sapien
aagtcgtagtaggaaatggcgtcgt

SEQ ID NO: 4682424 - DNA, 25 bp, Homo sapien
cgaacactccctttcagaccgtcca

SEQ ID NO: 4682425 - DNA, 25 bp, Homo sapien
tttcagaccgtccaccgcgcgccca

SEQ ID NO: 4682426 - DNA, 25 bp, Homo sapien
tggagccgcgaggccccagcgaaac

SEQ ID NO: 4682427 - DNA, 25 bp, Homo sapien
gccgcgaggccccagcgaaacccga

SEQ ID NO: 4682428 - DNA, 25 bp, Homo sapien
cgtggaagaggctcgcgaggaagcc

SEQ ID NO: 4682429 - DNA, 25 bp, Homo sapien
tggaagaggctcgcgaggaagccat

SEQ ID NO: 4682430 - DNA, 25 bp, Homo sapien
gtggaagaggctcgcgaggaagcca

SEQ ID NO: 4682431 - DNA, 25 bp, Homo sapien
tcttcacgaccggagcaactaagtc

SEQ ID NO: 4682432 - DNA, 25 bp, Homo sapien
gcttcgatccctgctttaagtccgt

SEQ ID NO: 4682433 - DNA, 25 bp, Homo sapien
gcaactaagtcgtcgggtgctttag

SEQ ID NO: 4682434 - DNA, 25 bp, Homo sapien
cataatagatgtgtggtttcttcac

SEQ ID NO: 4682435 - DNA, 25 bp, Homo sapien
caaactcagccaatacttctgcctg

SEQ ID NO: 4682436 - DNA, 25 bp, Homo sapien
gcaggaccctctccaaaaagtgtga

SEQ ID NO: 4682437 - DNA, 25 bp, Homo sapien
gcaagctttgacctctgagtcatct

SEQ ID NO: 4682438 - DNA, 25 bp, Homo sapien
tgtggaaacattgatctgccgggct

SEQ ID NO: 4682439 - DNA, 25 bp, Homo sapien
caaggcatcagtaccgacaactgag

SEQ ID NO: 4682440 - DNA, 25 bp, Homo sapien
tttttcaaggcatcagtaccgacaa

SEQ ID NO: 4682441 - DNA, 25 bp, Homo sapien
tcagtaccgacaactgagaggatat

SEQ ID NO: 4682442 - DNA, 25 bp, Homo sapien
ttctttggactttttagacttctca

SEQ ID NO: 4682443 - DNA, 25 bp, Homo sapien
ggttataccaggaatgccatgattc

SEQ ID NO: 4682444 - DNA, 25 bp, Homo sapien
gaaatcaggcagaggactttctact

SEQ ID NO: 4682445 - DNA, 25 bp, Homo sapien
gcagaaaacgagagacctatcccct

SEQ ID NO: 4682446 - DNA, 25 bp, Homo sapien
ggaaaactcacttagctccattcat

SEQ ID NO: 4682447 - DNA, 25 bp, Homo sapien
ctgggcaacgaataattagcaatcc

SEQ ID NO: 4682448 - DNA, 25 bp, Homo sapien
gtcttgccaccttcaagctatttgg

SEQ ID NO: 4682449 - DNA, 25 bp, Homo sapien
tccttcatgataccaggtttgctga

SEQ ID NO: 4682450 - DNA, 25 bp, Homo sapien
aattagcaatccatagtcttgccac

SEQ ID NO: 4682451 - DNA, 25 bp, Homo sapien
tcaggaatctccttatggagtcggg

SEQ ID NO: 4682452 - DNA, 25 bp, Homo sapien
tctccttatggagtcgggcctcttc

SEQ ID NO: 4682453 - DNA, 25 bp, Homo sapien
gggcctcttccaagcgtttcattgc

SEQ ID NO: 4682454 - DNA, 25 bp, Homo sapien
tggagtcgggcctcttccaagcgtt

SEQ ID NO: 4682455 - DNA, 25 bp, Homo sapien
tgggacaattgctgggagcatctta

SEQ ID NO: 4682456 - DNA, 25 bp, Homo sapien
gggacaattgctgggagcatcttac

SEQ ID NO: 4682457 - DNA, 25 bp, Homo sapien
tgtgcccagatgttttctacagtct

SEQ ID NO: 4682458 - DNA, 25 bp, Homo sapien
tctacagtcttaggatcacaacttc

SEQ ID NO: 4682459 - DNA, 25 bp, Homo sapien
agagaaactctgacatattaacggg

SEQ ID NO: 4682460 - DNA, 25 bp, Homo sapien
cagaaaaccccagagaaactctgac

SEQ ID NO: 4682461 - DNA, 25 bp, Homo sapien
taaagtgacagtaggagataggccg

SEQ ID NO: 4682462 - DNA, 25 bp, Homo sapien
tcttggaattgggactaaagtgaca

SEQ ID NO: 4682463 - DNA, 25 bp, Homo sapien
gccagcatcttggaattgggactaa

SEQ ID NO: 4682464 - DNA, 25 bp, Homo sapien
gataggccgatcatccccaatctga

SEQ ID NO: 4682465 - DNA, 25 bp, Homo sapien
tatcaaatacaaaggaaagcatctc

SEQ ID NO: 4682466 - DNA, 25 bp, Homo sapien
ggaaagcatctcagccagggttggt

SEQ ID NO: 4682467 - DNA, 25 bp, Homo sapien
caaaggaaagcatctcagccagggt

SEQ ID NO: 4682468 - DNA, 25 bp, Homo sapien
atacaaaggaaagcatctcagccag

SEQ ID NO: 4682469 - DNA, 25 bp, Homo sapien
tgtgaaggaggttgcaatcaggaac

SEQ ID NO: 4682470 - DNA, 25 bp, Homo sapien
ctcgaagagtgtgaaggaggttgca

SEQ ID NO: 4682471 - DNA, 25 bp, Homo sapien
ggaggttgcaatcaggaacagacca

SEQ ID NO: 4682472 - DNA, 25 bp, Homo sapien
aagagtgtgaaggaggttgcaatca

SEQ ID NO: 4682473 - DNA, 25 bp, Homo sapien
tggaatacaattgctcctacatttg

SEQ ID NO: 4682474 - DNA, 25 bp, Homo sapien
gacatcttttgggtccaaggagaca

SEQ ID NO: 4682475 - DNA, 25 bp, Homo sapien
tcagccgcacaagaggccaggttga

SEQ ID NO: 4682476 - DNA, 25 bp, Homo sapien
gacagtggatttgggatggaataca

SEQ ID NO: 4682477 - DNA, 25 bp, Homo sapien
atgctattgcgaggagacatctccg

SEQ ID NO: 4682478 - DNA, 25 bp, Homo sapien
tgctaagaaccaacgaactgccaag

SEQ ID NO: 4682479 - DNA, 25 bp, Homo sapien
tactttagtgatggcagtatgggcc

SEQ ID NO: 4682480 - DNA, 25 bp, Homo sapien
gacatctccgtggtaatactgctag

SEQ ID NO: 4682481 - DNA, 25 bp, Homo sapien
ttcaatatctgccactggttcatca

SEQ ID NO: 4682482 - DNA, 25 bp, Homo sapien
gccacacgcactgtatggccttcaa

SEQ ID NO: 4682483 - DNA, 25 bp, Homo sapien
ggtgcccaggaaacgtcctgaagga

SEQ ID NO: 4682484 - DNA, 25 bp, Homo sapien
ggaaacgtcctgaaggatgccacat

SEQ ID NO: 4682485 - DNA, 25 bp, Homo sapien
tgcccaacctagtggctattgtaat

SEQ ID NO: 4682486 - DNA, 25 bp, Homo sapien
aacaggattccccaagaatggccca

SEQ ID NO: 4682487 - DNA, 25 bp, Homo sapien
tggctattgtaataacaggattccc

SEQ ID NO: 4682488 - DNA, 25 bp, Homo sapien
gattccccaagaatggcccagcaaa

SEQ ID NO: 4682489 - DNA, 25 bp, Homo sapien
aaggcaatgtcatacacacccatgc

SEQ ID NO: 4682490 - DNA, 25 bp, Homo sapien
ctccaaatcccataagcgccatgaa

SEQ ID NO: 4682491 - DNA, 25 bp, Homo sapien
ccataagcgccatgaacggtcatag

SEQ ID NO: 4682492 - DNA, 25 bp, Homo sapien
ccaaagagccatcttgatggaaggc

SEQ ID NO: 4682493 - DNA, 25 bp, Homo sapien
taatttagaaatgaacactttgaat

SEQ ID NO: 4682494 - DNA, 25 bp, Homo sapien
aaataatttagaaatgaacactttg

SEQ ID NO: 4682495 - DNA, 25 bp, Homo sapien
aataatttagaaatgaacactttga

SEQ ID NO: 4682496 - DNA, 25 bp, Homo sapien
atttagaaatgaacactttgaatcc

SEQ ID NO: 4682497 - DNA, 25 bp, Homo sapien
tgcgtaggtcccaaactcgaccaaa

SEQ ID NO: 4682498 - DNA, 25 bp, Homo sapien
caaactcgaccaaatgcatccagtc

SEQ ID NO: 4682499 - DNA, 25 bp, Homo sapien
gggagaaatttattccatagatttc

SEQ ID NO: 4682500 - DNA, 25 bp, Homo sapien
gatacaacgtcctgtgcgtaggtcc

SEQ ID NO: 4682501 - DNA, 25 bp, Homo sapien
cactaagttctgatgagcagggatg

SEQ ID NO: 4682502 - DNA, 25 bp, Homo sapien
atggtgtagacgcaacgccgctgtc

SEQ ID NO: 4682503 - DNA, 25 bp, Homo sapien
caccactgccggttgcaatgtgata

SEQ ID NO: 4682504 - DNA, 25 bp, Homo sapien
tgtcggaggtcccacactttgcagg

SEQ ID NO: 4682505 - DNA, 25 bp, Homo sapien
gctgcccatcggaagaaatatctag

SEQ ID NO: 4682506 - DNA, 25 bp, Homo sapien
ggctgtgttatcataggcaccagta

SEQ ID NO: 4682507 - DNA, 25 bp, Homo sapien
gcctgggtgcgtccagatcttggct

SEQ ID NO: 4682508 - DNA, 25 bp, Homo sapien
ggcaccagtaagcaagaagttccca

SEQ ID NO: 4682509 - DNA, 25 bp, Homo sapien
tcactgtataaccatcggcgtggct

SEQ ID NO: 4682510 - DNA, 25 bp, Homo sapien
tagccggaatcacaggcagaagcca

SEQ ID NO: 4682511 - DNA, 25 bp, Homo sapien
cagagtcagtcacaatcctgggtgc

SEQ ID NO: 4682512 - DNA, 25 bp, Homo sapien
tgtctacacagttcgtggcagggcg

SEQ ID NO: 4682513 - DNA, 25 bp, Homo sapien
tgaaaagaggtgcatgacagacaag

SEQ ID NO: 4682514 - DNA, 25 bp, Homo sapien
aaagagacctctatggaccaatggc

SEQ ID NO: 4682515 - DNA, 25 bp, Homo sapien
aagaattgtaattgagtccaggcct

SEQ ID NO: 4682516 - DNA, 25 bp, Homo sapien
caaggtgctaaggagacataaatca

SEQ ID NO: 4682517 - DNA, 25 bp, Homo sapien
taaaaacagtatgtttaggtcaggc

SEQ ID NO: 4682518 - DNA, 25 bp, Homo sapien
cagggtccacagaatagagctgacc

SEQ ID NO: 4682519 - DNA, 25 bp, Homo sapien
ggtagtcctgagaattcagaagctg

SEQ ID NO: 4682520 - DNA, 25 bp, Homo sapien
tgaagtgagcaacagagggtagtcc

SEQ ID NO: 4682521 - DNA, 25 bp, Homo sapien
gagtgctgttcccagacaagaaacc

SEQ ID NO: 4682522 - DNA, 25 bp, Homo sapien
gactagcccaaatagcaagttgcat

SEQ ID NO: 4682523 - DNA, 25 bp, Homo sapien
tccagggattgttcaggccatgtgt

SEQ ID NO: 4682524 - DNA, 25 bp, Homo sapien
caaagggctgcacagtggtatccag

SEQ ID NO: 4682525 - DNA, 25 bp, Homo sapien
gaagcttccaccgtggcagtaggca

SEQ ID NO: 4682526 - DNA, 25 bp, Homo sapien
caattcgttcttgtgggaactaata

SEQ ID NO: 4682527 - DNA, 25 bp, Homo sapien
tatgaaaagtgtgacgcaggcttct

SEQ ID NO: 4682528 - DNA, 25 bp, Homo sapien
catgaccgaaacacctccaactaag

SEQ ID NO: 4682529 - DNA, 25 bp, Homo sapien
tgcgctccacctgtcgcaggtggcg

SEQ ID NO: 4682530 - DNA, 25 bp, Homo sapien
cgtgcgctccacctgtcgcaggtgg

SEQ ID NO: 4682531 - DNA, 25 bp, Homo sapien
cccgtgcgctccacctgtcgcaggt

SEQ ID NO: 4682532 - DNA, 25 bp, Homo sapien
gccccgtgcgctccacctgtcgcag

SEQ ID NO: 4682533 - DNA, 25 bp, Homo sapien
ggccgtgttcggggcagagtggccc

SEQ ID NO: 4682534 - DNA, 25 bp, Homo sapien
ctggccgtgttcggggcagagtggc

SEQ ID NO: 4682535 - DNA, 25 bp, Homo sapien
gtgttcggggcagagtggccccggc

SEQ ID NO: 4682536 - DNA, 25 bp, Homo sapien
ccgtgttcggggcagagtggccccg

SEQ ID NO: 4682537 - DNA, 25 bp, Homo sapien
cgcacacgggccgtcgctcggagcc

SEQ ID NO: 4682538 - DNA, 25 bp, Homo sapien
gcgaccgcccaaccccgcgcaggcg

SEQ ID NO: 4682539 - DNA, 25 bp, Homo sapien
ctccgcccggcggatgcggtgcccc

SEQ ID NO: 4682540 - DNA, 25 bp, Homo sapien
ctcggagccgcagaaccagctcaga

SEQ ID NO: 4682541 - DNA, 25 bp, Homo sapien
gatggcagcactctgtaactgcagc

SEQ ID NO: 4682542 - DNA, 25 bp, Homo sapien
ctctcacactggtccacaatcttgt

SEQ ID NO: 4682543 - DNA, 25 bp, Homo sapien
atacttggtgatggcagcactctgt

SEQ ID NO: 4682544 - DNA, 25 bp, Homo sapien
tctcacactggtccacaatcttgtt

SEQ ID NO: 4682545 - DNA, 25 bp, Homo sapien
tgctctttgattcttccccggcagg

SEQ ID NO: 4682546 - DNA, 25 bp, Homo sapien
ctctttgattcttccccggcaggac

SEQ ID NO: 4682547 - DNA, 25 bp, Homo sapien
gctctttgattcttccccggcagga

SEQ ID NO: 4682548 - DNA, 25 bp, Homo sapien
ctgctctttgattcttccccggcag

SEQ ID NO: 4682549 - DNA, 25 bp, Homo sapien
ggtgtcaagtttctgcagcgcctcg

SEQ ID NO: 4682550 - DNA, 25 bp, Homo sapien
tcatccaggtgagtaagcatgccca

SEQ ID NO: 4682551 - DNA, 25 bp, Homo sapien
tgcacctgttccagtaaccgctgct

SEQ ID NO: 4682552 - DNA, 25 bp, Homo sapien
cagactcaaccgctggataaccagt

SEQ ID NO: 4682553 - DNA, 25 bp, Homo sapien
cctgttagagcacagtaaggcagac

SEQ ID NO: 4682554 - DNA, 25 bp, Homo sapien
ttcttgctgcagacagaacacagtg

SEQ ID NO: 4682555 - DNA, 25 bp, Homo sapien
caactctgaatacagcgtgggcagg

SEQ ID NO: 4682556 - DNA, 25 bp, Homo sapien
tattcccttgcctcatgtcagagaa

SEQ ID NO: 4682557 - DNA, 25 bp, Homo sapien
gtttcgagcagtcatagaaactgcc

SEQ ID NO: 4682558 - DNA, 25 bp, Homo sapien
taaatgaatgcacagtttcgagcag

SEQ ID NO: 4682559 - DNA, 25 bp, Homo sapien
gactgttagctcctggacggctgcg

SEQ ID NO: 4682560 - DNA, 25 bp, Homo sapien
gcatgctctgtccatggatgctgtg

SEQ ID NO: 4682561 - DNA, 25 bp, Homo sapien
ctctcgaaaatctcttgctccttct

SEQ ID NO: 4682562 - DNA, 25 bp, Homo sapien
tctcgaaaatctcttgctccttctg

SEQ ID NO: 4682563 - DNA, 25 bp, Homo sapien
ctccctctcagacctgttggggcag

SEQ ID NO: 4682564 - DNA, 25 bp, Homo sapien
tccctctcagacctgttggggcagt

SEQ ID NO: 4682565 - DNA, 25 bp, Homo sapien
cctctcagacctgttggggcagtca

SEQ ID NO: 4682566 - DNA, 25 bp, Homo sapien
ccctctcagacctgttggggcagtc

SEQ ID NO: 4682567 - DNA, 25 bp, Homo sapien
gggatccaaaatgccctctgcttct

SEQ ID NO: 4682568 - DNA, 25 bp, Homo sapien
agaaccgccgttgcccagagttggg

SEQ ID NO: 4682569 - DNA, 25 bp, Homo sapien
gagttgggtcagtagtgggctccga

SEQ ID NO: 4682570 - DNA, 25 bp, Homo sapien
gggctccgagtgcacttctcattaa

SEQ ID NO: 4682571 - DNA, 25 bp, Homo sapien
tcatcgatccgtatgtcctctgtgc

SEQ ID NO: 4682572 - DNA, 25 bp, Homo sapien
attgggccagtggtcgaagcgctcc

SEQ ID NO: 4682573 - DNA, 25 bp, Homo sapien
tagaaatggtctgatcggccacagc

SEQ ID NO: 4682574 - DNA, 25 bp, Homo sapien
ccgggaaggacacatgatgggcaca

SEQ ID NO: 4682575 - DNA, 25 bp, Homo sapien
gaaacgaaactcctgatcatagcga

SEQ ID NO: 4682576 - DNA, 25 bp, Homo sapien
ggtacccagcactcaaagcagcaat

SEQ ID NO: 4682577 - DNA, 25 bp, Homo sapien
gctctaagagaaaaggccgtccctg

SEQ ID NO: 4682578 - DNA, 25 bp, Homo sapien
taataatgcccacgtgccctaaggt

SEQ ID NO: 4682579 - DNA, 25 bp, Homo sapien
cacactgagtagaaacatggcctga

SEQ ID NO: 4682580 - DNA, 25 bp, Homo sapien
tgtaatcccagctacttgggaggct

SEQ ID NO: 4682581 - DNA, 25 bp, Homo sapien
aaggagccggggatggtggcgcatg

SEQ ID NO: 4682582 - DNA, 25 bp, Homo sapien
aaaaggagccggggatggtggcgca

SEQ ID NO: 4682583 - DNA, 25 bp, Homo sapien
ggagccggggatggtggcgcatgcc

SEQ ID NO: 4682584 - DNA, 25 bp, Homo sapien
caacaagtttgtggcagaactggat

SEQ ID NO: 4682585 - DNA, 25 bp, Homo sapien
tgaacccatgtagtccaactccaag

SEQ ID NO: 4682586 - DNA, 25 bp, Homo sapien
gcctacagtgggcaaaactatccaa

SEQ ID NO: 4682587 - DNA, 25 bp, Homo sapien
gaactggattagaactgcacagaaa

SEQ ID NO: 4682588 - DNA, 25 bp, Homo sapien
taactcttgtaactcgcagctgcat

SEQ ID NO: 4682589 - DNA, 25 bp, Homo sapien
tgaggcctagatcgatatccctggg

SEQ ID NO: 4682590 - DNA, 25 bp, Homo sapien
gccttggaacgcttctggcagcaga

SEQ ID NO: 4682591 - DNA, 25 bp, Homo sapien
aatttgccgcaattccactggaagg

SEQ ID NO: 4682592 - DNA, 25 bp, Homo sapien
gacaggtagtgacgtgtagtttgac

SEQ ID NO: 4682593 - DNA, 25 bp, Homo sapien
aatatctctgttggcctttcttagc

SEQ ID NO: 4682594 - DNA, 25 bp, Homo sapien
tgatggtgctcaggaatctaactct

SEQ ID NO: 4682595 - DNA, 25 bp, Homo sapien
cctaaaccatcctctttaactgctt

SEQ ID NO: 4682596 - DNA, 25 bp, Homo sapien
tcggcctgctggtgtggtagtaatc

SEQ ID NO: 4682597 - DNA, 25 bp, Homo sapien
ggatttgtcatcacctcccggaagg

SEQ ID NO: 4682598 - DNA, 25 bp, Homo sapien
tattgcctgtagatgatcggcctgc

SEQ ID NO: 4682599 - DNA, 25 bp, Homo sapien
cagatggcatagtgtcagatgtacc

SEQ ID NO: 4682600 - DNA, 25 bp, Homo sapien
ccggacggtgtcaacatctccaagg

SEQ ID NO: 4682601 - DNA, 25 bp, Homo sapien
tcccggacggtgtcaacatctccaa

SEQ ID NO: 4682602 - DNA, 25 bp, Homo sapien
ggagcgccatctcccgcgccgccag

SEQ ID NO: 4682603 - DNA, 25 bp, Homo sapien
cagctcccggacggtgtcaacatct

SEQ ID NO: 4682604 - DNA, 25 bp, Homo sapien
tgcctcgggtcctaaagggatccgc

SEQ ID NO: 4682605 - DNA, 25 bp, Homo sapien
gaacatcaacttcggtagagatgga

SEQ ID NO: 4682606 - DNA, 25 bp, Homo sapien
tgggagaatctgatcacgacgggct

SEQ ID NO: 4682607 - DNA, 25 bp, Homo sapien
aaagcagattccaaaccgcttaggg

SEQ ID NO: 4682608 - DNA, 25 bp, Homo sapien
gactcctgagacctaatcaggcgca

SEQ ID NO: 4682609 - DNA, 25 bp, Homo sapien
caggcgcatctctatatggccagca

SEQ ID NO: 4682610 - DNA, 25 bp, Homo sapien
tgcccagtccgaattgactcctgag

SEQ ID NO: 4682611 - DNA, 25 bp, Homo sapien
cctgggctgcctaaatagttcgcgt

SEQ ID NO: 4682612 - DNA, 25 bp, Homo sapien
aaggctgcttctcgccctttcgtta

SEQ ID NO: 4682613 - DNA, 25 bp, Homo sapien
agtgaaaaggctgcttctcgccctt

SEQ ID NO: 4682614 - DNA, 25 bp, Homo sapien
tgaaaaggctgcttctcgccctttc

SEQ ID NO: 4682615 - DNA, 25 bp, Homo sapien
aaaaggctgcttctcgccctttcgt

SEQ ID NO: 4682616 - DNA, 25 bp, Homo sapien
tagaaatggtttaggccaaaggcca

SEQ ID NO: 4682617 - DNA, 25 bp, Homo sapien
gatagttgcccagcattgtgggtgc

SEQ ID NO: 4682618 - DNA, 25 bp, Homo sapien
ttttgcaggatgagccgaggattcg

SEQ ID NO: 4682619 - DNA, 25 bp, Homo sapien
gatggcccctctcaatgcggcggat

SEQ ID NO: 4682620 - DNA, 25 bp, Homo sapien
aacagccaagccacaggtggtttcg

SEQ ID NO: 4682621 - DNA, 25 bp, Homo sapien
gccttagtaaaggtacattctggta

SEQ ID NO: 4682622 - DNA, 25 bp, Homo sapien
atgtctaccacggtgagcactggga

SEQ ID NO: 4682623 - DNA, 25 bp, Homo sapien
gctgcaaagccggaatctaagatgt

SEQ ID NO: 4682624 - DNA, 25 bp, Homo sapien
ctggtaaatgatgagctgcaaagcc

SEQ ID NO: 4682625 - DNA, 25 bp, Homo sapien
agtctgttagtacagttgatcaaac

SEQ ID NO: 4682626 - DNA, 25 bp, Homo sapien
acagttgatcaaacttttgtcaggt

SEQ ID NO: 4682627 - DNA, 25 bp, Homo sapien
ggaagtctgttagtacagttgatca

SEQ ID NO: 4682628 - DNA, 25 bp, Homo sapien
tgatcaaacttttgtcaggtaaacc

SEQ ID NO: 4682629 - DNA, 25 bp, Homo sapien
ctgggtctgccattccagcattcca

SEQ ID NO: 4682630 - DNA, 25 bp, Homo sapien
gggtctgccattccagcattccagt

SEQ ID NO: 4682631 - DNA, 25 bp, Homo sapien
ctgccattccagcattccagtttcc

SEQ ID NO: 4682632 - DNA, 25 bp, Homo sapien
gtctgccattccagcattccagttt

SEQ ID NO: 4682633 - DNA, 25 bp, Homo sapien
atatttctaacatcttcagggcagg

SEQ ID NO: 4682634 - DNA, 25 bp, Homo sapien
gggcagggaagttgcgtctcattca

SEQ ID NO: 4682635 - DNA, 25 bp, Homo sapien
ggaagttgcgtctcattcaaattca

SEQ ID NO: 4682636 - DNA, 25 bp, Homo sapien
caatacaaccatatttctaacatct

SEQ ID NO: 4682637 - DNA, 25 bp, Homo sapien
tctttcttttcttcttcccatgctg

SEQ ID NO: 4682638 - DNA, 25 bp, Homo sapien
ctttcttttcttcttcccatgctgg

SEQ ID NO: 4682639 - DNA, 25 bp, Homo sapien
agttctttcttttcttcttcccatg

SEQ ID NO: 4682640 - DNA, 25 bp, Homo sapien
cactgccgagttctttcttttcttc

SEQ ID NO: 4682641 - DNA, 25 bp, Homo sapien
gaggcacgatcatccctggtgttcc

SEQ ID NO: 4682642 - DNA, 25 bp, Homo sapien
gtaacgcttcggattgagcccagag

SEQ ID NO: 4682643 - DNA, 25 bp, Homo sapien
tcctactcgtgttcctgcggactga

SEQ ID NO: 4682644 - DNA, 25 bp, Homo sapien
tgcggactgatttccagagagaccc

SEQ ID NO: 4682645 - DNA, 25 bp, Homo sapien
gccagacagtcagcaacagctcttc

SEQ ID NO: 4682646 - DNA, 25 bp, Homo sapien
cagaggacagccagacagtcagcaa

SEQ ID NO: 4682647 - DNA, 25 bp, Homo sapien
cagtcagcaacagctcttcccggaa

SEQ ID NO: 4682648 - DNA, 25 bp, Homo sapien
agacagtcagcaacagctcttcccg

SEQ ID NO: 4682649 - DNA, 25 bp, Homo sapien
tcttcatctctggacagagcatggt

SEQ ID NO: 4682650 - DNA, 25 bp, Homo sapien
catctctggacagagcatggtttgc

SEQ ID NO: 4682651 - DNA, 25 bp, Homo sapien
agagcatggtttgctttccacctgg

SEQ ID NO: 4682652 - DNA, 25 bp, Homo sapien
tggacagagcatggtttgctttcca

SEQ ID NO: 4682653 - DNA, 25 bp, Homo sapien
cacactgtcaggtcggttcttttcc

SEQ ID NO: 4682654 - DNA, 25 bp, Homo sapien
tcacactgtcaggtcggttcttttc

SEQ ID NO: 4682655 - DNA, 25 bp, Homo sapien
acactgtcaggtcggttcttttcca

SEQ ID NO: 4682656 - DNA, 25 bp, Homo sapien
agggtgaggcggtgtatagatagaa

SEQ ID NO: 4682657 - DNA, 25 bp, Homo sapien
ttctgtcttcaggttatgtaatttc

SEQ ID NO: 4682658 - DNA, 25 bp, Homo sapien
gtcttcaggttatgtaatttcttca

SEQ ID NO: 4682659 - DNA, 25 bp, Homo sapien
cgttcaggatatcgcagtgctggtc

SEQ ID NO: 4682660 - DNA, 25 bp, Homo sapien
taatttcttcaaacgttcaggatat

SEQ ID NO: 4682661 - DNA, 25 bp, Homo sapien
tagagatccagcagcaacagcaaat

SEQ ID NO: 4682662 - DNA, 25 bp, Homo sapien
ttagagatccagcagcaacagcaaa

SEQ ID NO: 4682663 - DNA, 25 bp, Homo sapien
gagatccagcagcaacagcaaatct

SEQ ID NO: 4682664 - DNA, 25 bp, Homo sapien
gatccagcagcaacagcaaatctac

SEQ ID NO: 4682665 - DNA, 25 bp, Homo sapien
tgccttccttcacaatggtgactcc

SEQ ID NO: 4682666 - DNA, 25 bp, Homo sapien
tctctcccactggaatgcctgctgt

SEQ ID NO: 4682667 - DNA, 25 bp, Homo sapien
ttgatcctcttctaacagccccctc

SEQ ID NO: 4682668 - DNA, 25 bp, Homo sapien
agagagccagcttgatcctcttcta

SEQ ID NO: 4682669 - DNA, 25 bp, Homo sapien
cttcttctgttgctgctgctgctgc

SEQ ID NO: 4682670 - DNA, 25 bp, Homo sapien
tgccgctgctgctgtttcctgtaac

SEQ ID NO: 4682671 - DNA, 25 bp, Homo sapien
taataggtgttttcaccttcttctg

SEQ ID NO: 4682672 - DNA, 25 bp, Homo sapien
tgctgccgctgctgctgtttcctgt

SEQ ID NO: 4682673 - DNA, 25 bp, Homo sapien
catagagacggtcatgaacggtggt

SEQ ID NO: 4682674 - DNA, 25 bp, Homo sapien
gtaactggatgtttatgtgaagtgc

SEQ ID NO: 4682675 - DNA, 25 bp, Homo sapien
tgtgaagtgctctggatccctggat

SEQ ID NO: 4682676 - DNA, 25 bp, Homo sapien
ggatccctggatcactcttggcttt

SEQ ID NO: 4682677 - DNA, 25 bp, Homo sapien
tgctgcttcatgtcactgttctgac

SEQ ID NO: 4682678 - DNA, 25 bp, Homo sapien
catgtcactgttctgacctggcaga

SEQ ID NO: 4682679 - DNA, 25 bp, Homo sapien
gcttcatgtcactgttctgacctgg

SEQ ID NO: 4682680 - DNA, 25 bp, Homo sapien
gctgctgcttcatgtcactgttctg

SEQ ID NO: 4682681 - DNA, 25 bp, Homo sapien
tggtcatagtagttcatctttggtc

SEQ ID NO: 4682682 - DNA, 25 bp, Homo sapien
ggtggaaatccgcatggtcatagta

SEQ ID NO: 4682683 - DNA, 25 bp, Homo sapien
tttttacactgtggtggaaatccgc

SEQ ID NO: 4682684 - DNA, 25 bp, Homo sapien
catggtcatagtagttcatctttgg

SEQ ID NO: 4682685 - DNA, 25 bp, Homo sapien
taatgtccttgttagtgggttctgt

SEQ ID NO: 4682686 - DNA, 25 bp, Homo sapien
ggcacagcgtccactggagcactaa

SEQ ID NO: 4682687 - DNA, 25 bp, Homo sapien
gctcagagttccagcctgtgctagc

SEQ ID NO: 4682688 - DNA, 25 bp, Homo sapien
cagtgtcctgaagaatcctaagtag

SEQ ID NO: 4682689 - DNA, 25 bp, Homo sapien
caggccctggtaaaggctccagaga

SEQ ID NO: 4682690 - DNA, 25 bp, Homo sapien
aatggaatccctaagctcagagctc

SEQ ID NO: 4682691 - DNA, 25 bp, Homo sapien
ggataccagccatcccgctttggaa

SEQ ID NO: 4682692 - DNA, 25 bp, Homo sapien
gatgccttcagtctattcctccaga

SEQ ID NO: 4682693 - DNA, 25 bp, Homo sapien
tcctcctctctcagaacattgggag

SEQ ID NO: 4682694 - DNA, 25 bp, Homo sapien
ctaagggtatcccagtctcagctgt

SEQ ID NO: 4682695 - DNA, 25 bp, Homo sapien
gaagcaaggggttcacgagtactcc

SEQ ID NO: 4682696 - DNA, 25 bp, Homo sapien
cagtcaattcttttctacatagccg

SEQ ID NO: 4682697 - DNA, 25 bp, Homo sapien
tctgcttccttaggcccagatggtg

SEQ ID NO: 4682698 - DNA, 25 bp, Homo sapien
ttctgcttccttaggcccagatggt

SEQ ID NO: 4682699 - DNA, 25 bp, Homo sapien
tattcctgggaatgactctccacca

SEQ ID NO: 4682700 - DNA, 25 bp, Homo sapien
ctatattcctgggaatgactctcca

SEQ ID NO: 4682701 - DNA, 25 bp, Homo sapien
agctatattcctgggaatgactctc

SEQ ID NO: 4682702 - DNA, 25 bp, Homo sapien
aaagctatattcctgggaatgactc

SEQ ID NO: 4682703 - DNA, 25 bp, Homo sapien
ctcacactgctggattataagtaca

SEQ ID NO: 4682704 - DNA, 25 bp, Homo sapien
gcaaaggtcatggcatccagggatc

SEQ ID NO: 4682705 - DNA, 25 bp, Homo sapien
ggcaaaggtcatggcatccagggat

SEQ ID NO: 4682706 - DNA, 25 bp, Homo sapien
caaaggtcatggcatccagggatcc

SEQ ID NO: 4682707 - DNA, 25 bp, Homo sapien
aaaggtcatggcatccagggatccc

SEQ ID NO: 4682708 - DNA, 25 bp, Homo sapien
ttgcactcaggtttgaatataaggc

SEQ ID NO: 4682709 - DNA, 25 bp, Homo sapien
ctgtttctggatccatgtactgtga

SEQ ID NO: 4682710 - DNA, 25 bp, Homo sapien
gatcagctggattgcactcaggttt

SEQ ID NO: 4682711 - DNA, 25 bp, Homo sapien
cttccagtggacatagcagaccata

SEQ ID NO: 4682712 - DNA, 25 bp, Homo sapien
tgaccttgcgatctgcccatctcaa

SEQ ID NO: 4682713 - DNA, 25 bp, Homo sapien
ttgcgatctgcccatctcaacctcc

SEQ ID NO: 4682714 - DNA, 25 bp, Homo sapien
cttgcgatctgcccatctcaacctc

SEQ ID NO: 4682715 - DNA, 25 bp, Homo sapien
accttgcgatctgcccatctcaacc

SEQ ID NO: 4682716 - DNA, 25 bp, Homo sapien
ggcaggagagttggaccaagcctgg

SEQ ID NO: 4682717 - DNA, 25 bp, Homo sapien
caggagagttggaccaagcctggct

SEQ ID NO: 4682718 - DNA, 25 bp, Homo sapien
tgctgtccaaaagcaacatccagaa

SEQ ID NO: 4682719 - DNA, 25 bp, Homo sapien
gtccaaaagcaacatccagaaaggc

SEQ ID NO: 4682720 - DNA, 25 bp, Homo sapien
cagttggaagattgcaaggccagcc

SEQ ID NO: 4682721 - DNA, 25 bp, Homo sapien
tcctttactcagtagcgtgctggaa

SEQ ID NO: 4682722 - DNA, 25 bp, Homo sapien
tgctttgtaggtcccctcctgactc

SEQ ID NO: 4682723 - DNA, 25 bp, Homo sapien
actctgcagctaacatattcagttg

SEQ ID NO: 4682724 - DNA, 25 bp, Homo sapien
acaacttcgccagggaccactgtag

SEQ ID NO: 4682725 - DNA, 25 bp, Homo sapien
caaaggggagactatcttgggctcc

SEQ ID NO: 4682726 - DNA, 25 bp, Homo sapien
tgtgagcaacctgcaggtacaacac

SEQ ID NO: 4682727 - DNA, 25 bp, Homo sapien
caacactcaggacggtgagatccag

SEQ ID NO: 4682728 - DNA, 25 bp, Homo sapien
atatgggcaagctcaggctcaagcc

SEQ ID NO: 4682729 - DNA, 25 bp, Homo sapien
gaatatgggcaagctcaggctcaag

SEQ ID NO: 4682730 - DNA, 25 bp, Homo sapien
gccacaggatgtagagaggacactg

SEQ ID NO: 4682731 - DNA, 25 bp, Homo sapien
aagccacaggatgtagagaggacac

SEQ ID NO: 4682732 - DNA, 25 bp, Homo sapien
ggactttggcatgcgtgatcctctt

SEQ ID NO: 4682733 - DNA, 25 bp, Homo sapien
cgatatcagggcttagccactccat

SEQ ID NO: 4682734 - DNA, 25 bp, Homo sapien
tcttctgggcagagcgatatcaggg

SEQ ID NO: 4682735 - DNA, 25 bp, Homo sapien
actttggcatgcgtgatcctcttcc

SEQ ID NO: 4682736 - DNA, 25 bp, Homo sapien
gaaagaggaacgcacaggaaacgga

SEQ ID NO: 4682737 - DNA, 25 bp, Homo sapien
ctgagaaagaggaacgcacaggaaa

SEQ ID NO: 4682738 - DNA, 25 bp, Homo sapien
aagaggaacgcacaggaaacggagt

SEQ ID NO: 4682739 - DNA, 25 bp, Homo sapien
gagaaagaggaacgcacaggaaacg

SEQ ID NO: 4682740 - DNA, 25 bp, Homo sapien
cctcttgaacaagtgctgcctgaca

SEQ ID NO: 4682741 - DNA, 25 bp, Homo sapien
cttgagcctcctcttgaacaagtgc

SEQ ID NO: 4682742 - DNA, 25 bp, Homo sapien
agcttgctccaaccaacctgatggc

SEQ ID NO: 4682743 - DNA, 25 bp, Homo sapien
cctgacacaggtccggatgggagca

SEQ ID NO: 4682744 - DNA, 25 bp, Homo sapien
gcgctcccggttggaaatgccagtc

SEQ ID NO: 4682745 - DNA, 25 bp, Homo sapien
tggaaatgccagtcccacgagaagg

SEQ ID NO: 4682746 - DNA, 25 bp, Homo sapien
cagcaccgcgctcccggttggaaat

SEQ ID NO: 4682747 - DNA, 25 bp, Homo sapien
agtcccacgagaaggcccagtccgg

SEQ ID NO: 4682748 - DNA, 25 bp, Homo sapien
aatggggagagttccacctgccgga

SEQ ID NO: 4682749 - DNA, 25 bp, Homo sapien
gtagggctgccccaagcgttggaac

SEQ ID NO: 4682750 - DNA, 25 bp, Homo sapien
gccctgattggcccgcgcgggtttg

SEQ ID NO: 4682751 - DNA, 25 bp, Homo sapien
tgccccaagcgttggaacggccagg

SEQ ID NO: 4682752 - DNA, 25 bp, Homo sapien
acaggagcgtctgcaacccgaggcg

SEQ ID NO: 4682753 - DNA, 25 bp, Homo sapien
cggacaggagcgtctgcaacccgag

SEQ ID NO: 4682754 - DNA, 25 bp, Homo sapien
ctgcgacccggacaggagcgtctgc

SEQ ID NO: 4682755 - DNA, 25 bp, Homo sapien
gacccggacaggagcgtctgcaacc

SEQ ID NO: 4682756 - DNA, 25 bp, Homo sapien
tgggcacgccggctcccgagggaga

SEQ ID NO: 4682757 - DNA, 25 bp, Homo sapien
ggctcccgagggagacgcggtgcag

SEQ ID NO: 4682758 - DNA, 25 bp, Homo sapien
gtagaaggacaagtccgggtgggca

SEQ ID NO: 4682759 - DNA, 25 bp, Homo sapien
tagaaggacaagtccgggtgggcac

SEQ ID NO: 4682760 - DNA, 25 bp, Homo sapien
tgagatctccagttgctataacaag

SEQ ID NO: 4682761 - DNA, 25 bp, Homo sapien
gagaaactccgtggtgacaacccag

SEQ ID NO: 4682762 - DNA, 25 bp, Homo sapien
cgctccctgagccaaaggaaagtgg

SEQ ID NO: 4682763 - DNA, 25 bp, Homo sapien
accttgatttaacctgagctgcttg

SEQ ID NO: 4682764 - DNA, 25 bp, Homo sapien
aaattgcagcctccccacaaggcag

SEQ ID NO: 4682765 - DNA, 25 bp, Homo sapien
ccacaaggcagcagggccaaagggc

SEQ ID NO: 4682766 - DNA, 25 bp, Homo sapien
aggcagcagggccaaagggcccagc

SEQ ID NO: 4682767 - DNA, 25 bp, Homo sapien
tcaaattgcagcctccccacaaggc

SEQ ID NO: 4682768 - DNA, 25 bp, Homo sapien
ttatcgtccaccaactagaccagtg

SEQ ID NO: 4682769 - DNA, 25 bp, Homo sapien
cagacgtcaggcaatttcagaggcc

SEQ ID NO: 4682770 - DNA, 25 bp, Homo sapien
ccaccaactagaccagtgaattcct

SEQ ID NO: 4682771 - DNA, 25 bp, Homo sapien
tcctgctgccagacgtcaggcaatt

SEQ ID NO: 4682772 - DNA, 25 bp, Homo sapien
tggtcccaattgctaccaaaactga

SEQ ID NO: 4682773 - DNA, 25 bp, Homo sapien
tgaatccatagcttccaaacctgga

SEQ ID NO: 4682774 - DNA, 25 bp, Homo sapien
tcatctggttctaccaaggcaaagc

SEQ ID NO: 4682775 - DNA, 25 bp, Homo sapien
caggggctacctactttgctaagga

SEQ ID NO: 4682776 - DNA, 25 bp, Homo sapien
ggatcagccggaatgtgtcccagtg

SEQ ID NO: 4682777 - DNA, 25 bp, Homo sapien
ctttgctagactcagggatcagccg

SEQ ID NO: 4682778 - DNA, 25 bp, Homo sapien
ggaatgtgtcccagtgggagcccat

SEQ ID NO: 4682779 - DNA, 25 bp, Homo sapien
gactcagggatcagccggaatgtgt

SEQ ID NO: 4682780 - DNA, 25 bp, Homo sapien
gagcagtcaggctaaagggcttgaa

SEQ ID NO: 4682781 - DNA, 25 bp, Homo sapien
gggcatgtcccctgttcccatgaga

SEQ ID NO: 4682782 - DNA, 25 bp, Homo sapien
catgagatcgcagttgggcaccaac

SEQ ID NO: 4682783 - DNA, 25 bp, Homo sapien
tcctcatcgaggttgggcagggcct

SEQ ID NO: 4682784 - DNA, 25 bp, Homo sapien
ctggcagggacctcagaagccacag

SEQ ID NO: 4682785 - DNA, 25 bp, Homo sapien
ctggctggcagggacctcagaagcc

SEQ ID NO: 4682786 - DNA, 25 bp, Homo sapien
gggacctcagaagccacagggttca

SEQ ID NO: 4682787 - DNA, 25 bp, Homo sapien
tggctggcagggacctcagaagcca

SEQ ID NO: 4682788 - DNA, 25 bp, Homo sapien
cggtcctgggcatcaatggacagcc

SEQ ID NO: 4682789 - DNA, 25 bp, Homo sapien
agaacccggtcctgggcatcaatgg

SEQ ID NO: 4682790 - DNA, 25 bp, Homo sapien
tgtgaagcagcagaacccggtcctg

SEQ ID NO: 4682791 - DNA, 25 bp, Homo sapien
gggcatcaatggacagcctcagctg

SEQ ID NO: 4682792 - DNA, 25 bp, Homo sapien
agccctgtgcatgaagtgctagcca

SEQ ID NO: 4682793 - DNA, 25 bp, Homo sapien
caaaaacttacacaggattgactac

SEQ ID NO: 4682794 - DNA, 25 bp, Homo sapien
ttcaggataccgtgtgggcatcacc

SEQ ID NO: 4682795 - DNA, 25 bp, Homo sapien
ccagccatgctagacagctcttcaa

SEQ ID NO: 4682796 - DNA, 25 bp, Homo sapien
tctggttttcattgagccctagggt

SEQ ID NO: 4682797 - DNA, 25 bp, Homo sapien
cccagtagtctgaggtgcaaggcct

SEQ ID NO: 4682798 - DNA, 25 bp, Homo sapien
aatgcacccagccttacgtctggtt

SEQ ID NO: 4682799 - DNA, 25 bp, Homo sapien
gggtgaagccaaagcaaactgtgca

SEQ ID NO: 4682800 - DNA, 25 bp, Homo sapien
acacatagacatatccatccacacg

SEQ ID NO: 4682801 - DNA, 25 bp, Homo sapien
atatccatccacacgaataaagaga

SEQ ID NO: 4682802 - DNA, 25 bp, Homo sapien
tatccatccacacgaataaagagac

SEQ ID NO: 4682803 - DNA, 25 bp, Homo sapien
tagacatatccatccacacgaataa

SEQ ID NO: 4682804 - DNA, 25 bp, Homo sapien
ctgtttgctgatcaggcctttacct

SEQ ID NO: 4682805 - DNA, 25 bp, Homo sapien
tgtttgctgatcaggcctttacctt

SEQ ID NO: 4682806 - DNA, 25 bp, Homo sapien
gaagcatgattagcggatctcatgg

SEQ ID NO: 4682807 - DNA, 25 bp, Homo sapien
ttcccagggtccttcaagtcagcct

SEQ ID NO: 4682808 - DNA, 25 bp, Homo sapien
gatctcatggcccacctaagcccag

SEQ ID NO: 4682809 - DNA, 25 bp, Homo sapien
tagagtcccctgtcagatgctgcaa

SEQ ID NO: 4682810 - DNA, 25 bp, Homo sapien
ctactatcttcagggatcaaagaaa

SEQ ID NO: 4682811 - DNA, 25 bp, Homo sapien
ggtggcgtagtctactatcttcagg

SEQ ID NO: 4682812 - DNA, 25 bp, Homo sapien
cgtagtctactatcttcagggatca

SEQ ID NO: 4682813 - DNA, 25 bp, Homo sapien
tcttctggtggcgtagtctactatc

SEQ ID NO: 4682814 - DNA, 25 bp, Homo sapien
tgctcgtggaaagccgggtctctgc

SEQ ID NO: 4682815 - DNA, 25 bp, Homo sapien
gtggaaagccgggtctctgcagtct

SEQ ID NO: 4682816 - DNA, 25 bp, Homo sapien
gaaagccgggtctctgcagtctgga

SEQ ID NO: 4682817 - DNA, 25 bp, Homo sapien
agaagtgctcgtggaaagccgggtc

SEQ ID NO: 4682818 - DNA, 25 bp, Homo sapien
catagatctagttctagatttggca

SEQ ID NO: 4682819 - DNA, 25 bp, Homo sapien
tgtttccagataaacactccttccc

SEQ ID NO: 4682820 - DNA, 25 bp, Homo sapien
tgcatagatctagttctagatttgg

SEQ ID NO: 4682821 - DNA, 25 bp, Homo sapien
gagctgtttccagataaacactcct

SEQ ID NO: 4682822 - DNA, 25 bp, Homo sapien
tggccctgttccacacagtaaccaa

SEQ ID NO: 4682823 - DNA, 25 bp, Homo sapien
cacagtaaccaagagacgcttctga

SEQ ID NO: 4682824 - DNA, 25 bp, Homo sapien
ccaagagacgcttctgatcatcctc

SEQ ID NO: 4682825 - DNA, 25 bp, Homo sapien
tgttccacacagtaaccaagagacg

SEQ ID NO: 4682826 - DNA, 25 bp, Homo sapien
tgatagatctagaatgtgcatccat

SEQ ID NO: 4682827 - DNA, 25 bp, Homo sapien
gtgatagatctagaatgtgcatcca

SEQ ID NO: 4682828 - DNA, 25 bp, Homo sapien
aagtgatagatctagaatgtgcatc

SEQ ID NO: 4682829 - DNA, 25 bp, Homo sapien
caaagtgatagatctagaatgtgca

SEQ ID NO: 4682830 - DNA, 25 bp, Homo sapien
tcaggaccttcccttcattggcctg

SEQ ID NO: 4682831 - DNA, 25 bp, Homo sapien
ttcaggaccttcccttcattggcct

SEQ ID NO: 4682832 - DNA, 25 bp, Homo sapien
caggaccttcccttcattggcctgt

SEQ ID NO: 4682833 - DNA, 25 bp, Homo sapien
cttcaggaccttcccttcattggcc

SEQ ID NO: 4682834 - DNA, 25 bp, Homo sapien
tgcctccacccaaagggctttctgg

SEQ ID NO: 4682835 - DNA, 25 bp, Homo sapien
ttttccaaaagccatgaagggcatg

SEQ ID NO: 4682836 - DNA, 25 bp, Homo sapien
tgaagggcatgaccggctccttctc

SEQ ID NO: 4682837 - DNA, 25 bp, Homo sapien
cccaaagggctttctgggcgtccat

SEQ ID NO: 4682838 - DNA, 25 bp, Homo sapien
cgtggagacactgccccatgacgct

SEQ ID NO: 4682839 - DNA, 25 bp, Homo sapien
aacacgtggagacactgccccatga

SEQ ID NO: 4682840 - DNA, 25 bp, Homo sapien
taggcaacacgtggagacactgccc

SEQ ID NO: 4682841 - DNA, 25 bp, Homo sapien
cccaaaataggcaacacgtggagac

SEQ ID NO: 4682842 - DNA, 25 bp, Homo sapien
aaggccctgatcctcctgagcttcg

SEQ ID NO: 4682843 - DNA, 25 bp, Homo sapien
cctgatcctcctgagcttcgggctg

SEQ ID NO: 4682844 - DNA, 25 bp, Homo sapien
cttcgggctgggactgtgaccgtga

SEQ ID NO: 4682845 - DNA, 25 bp, Homo sapien
tgaccgtgagtttggctgtagtttg

SEQ ID NO: 4682846 - DNA, 25 bp, Homo sapien
tccaggcttggtgcacttagtgaag

SEQ ID NO: 4682847 - DNA, 25 bp, Homo sapien
caagccttggttaattctgactacc

SEQ ID NO: 4682848 - DNA, 25 bp, Homo sapien
gatgaatccatcacgtccacggttg

SEQ ID NO: 4682849 - DNA, 25 bp, Homo sapien
ctctcactagatgcaaagtctccgg

SEQ ID NO: 4682850 - DNA, 25 bp, Homo sapien
tgcaaacccatgctctgccccatgg

SEQ ID NO: 4682851 - DNA, 25 bp, Homo sapien
ctctcaacagctgctctcagttcat

SEQ ID NO: 4682852 - DNA, 25 bp, Homo sapien
tctcagttcatcactcctgctccca

SEQ ID NO: 4682853 - DNA, 25 bp, Homo sapien
gcttctggctgtctctcaacagctg

SEQ ID NO: 4682854 - DNA, 25 bp, Homo sapien
gcaggtaggcatgggccagggtcag

SEQ ID NO: 4682855 - DNA, 25 bp, Homo sapien
caccagcagggcaggtaggcatggg

SEQ ID NO: 4682856 - DNA, 25 bp, Homo sapien
taggcatgggccagggtcaggcctc

SEQ ID NO: 4682857 - DNA, 25 bp, Homo sapien
cagcagggcaggtaggcatgggcca

SEQ ID NO: 4682858 - DNA, 25 bp, Homo sapien
catgcagccaatgagtccactctgt

SEQ ID NO: 4682859 - DNA, 25 bp, Homo sapien
agacttggggctgcctaacaaactg

SEQ ID NO: 4682860 - DNA, 25 bp, Homo sapien
acttggggctgcctaacaaactgct

SEQ ID NO: 4682861 - DNA, 25 bp, Homo sapien
ggaagacttggggctgcctaacaaa

SEQ ID NO: 4682862 - DNA, 25 bp, Homo sapien
ttggggctgcctaacaaactgctct

SEQ ID NO: 4682863 - DNA, 25 bp, Homo sapien
aaatatcaggcctggtagacacatg

SEQ ID NO: 4682864 - DNA, 25 bp, Homo sapien
tgggccccaagggatctgccaatgt

SEQ ID NO: 4682865 - DNA, 25 bp, Homo sapien
acatgaagaggacccctggaacgga

SEQ ID NO: 4682866 - DNA, 25 bp, Homo sapien
ctggaacggaccacgggtgcacctg

SEQ ID NO: 4682867 - DNA, 25 bp, Homo sapien
aattgataagggaccagtgacccag

SEQ ID NO: 4682868 - DNA, 25 bp, Homo sapien
ggagtccagtgcagcgtagaaattg

SEQ ID NO: 4682869 - DNA, 25 bp, Homo sapien
cagcgtagaaattgataagggacca

SEQ ID NO: 4682870 - DNA, 25 bp, Homo sapien
acccagagctaggagtcttgggtcc

SEQ ID NO: 4682871 - DNA, 25 bp, Homo sapien
aatctgcgtggcaggccatgccaca

SEQ ID NO: 4682872 - DNA, 25 bp, Homo sapien
ggatgtgcaaaaggagtgctcccca

SEQ ID NO: 4682873 - DNA, 25 bp, Homo sapien
aggacaaaaatctgcgtggcaggcc

SEQ ID NO: 4682874 - DNA, 25 bp, Homo sapien
atttccagggatgtgcaaaaggagt

SEQ ID NO: 4682875 - DNA, 25 bp, Homo sapien
ccctaggaggtagtaccaaccactg

SEQ ID NO: 4682876 - DNA, 25 bp, Homo sapien
caccttcaagtgcttggtccggccc

SEQ ID NO: 4682877 - DNA, 25 bp, Homo sapien
ccaccttcaagtgcttggtccggcc

SEQ ID NO: 4682878 - DNA, 25 bp, Homo sapien
taggaggtagtaccaaccactgatc

SEQ ID NO: 4682879 - DNA, 25 bp, Homo sapien
gggccaccaaataccagtactgatg

SEQ ID NO: 4682880 - DNA, 25 bp, Homo sapien
ccaccaaataccagtactgatgccg

SEQ ID NO: 4682881 - DNA, 25 bp, Homo sapien
gtagcaggggccaccaaataccagt

SEQ ID NO: 4682882 - DNA, 25 bp, Homo sapien
agtagcaggggccaccaaataccag

SEQ ID NO: 4682883 - DNA, 25 bp, Homo sapien
ctttagtttcttcccattctcagtg

SEQ ID NO: 4682884 - DNA, 25 bp, Homo sapien
cctcctggcattctcagcagcgggt

SEQ ID NO: 4682885 - DNA, 25 bp, Homo sapien
ctcagtgtccccacctcctggcatt

SEQ ID NO: 4682886 - DNA, 25 bp, Homo sapien
tccccacctcctggcattctcagca

SEQ ID NO: 4682887 - DNA, 25 bp, Homo sapien
aagcccgccccacagaagaatggca

SEQ ID NO: 4682888 - DNA, 25 bp, Homo sapien
gaagcccgccccacagaagaatggc

SEQ ID NO: 4682889 - DNA, 25 bp, Homo sapien
agcccgccccacagaagaatggcag

SEQ ID NO: 4682890 - DNA, 25 bp, Homo sapien
ctggacccgtcagcctggcatgagc

SEQ ID NO: 4682891 - DNA, 25 bp, Homo sapien
cctcggctgccgccccatgaaaacc

SEQ ID NO: 4682892 - DNA, 25 bp, Homo sapien
cggctgccgccccatgaaaacccag

SEQ ID NO: 4682893 - DNA, 25 bp, Homo sapien
ccatgaaaacccagctctcccccag

SEQ ID NO: 4682894 - DNA, 25 bp, Homo sapien
tcggctgccgccccatgaaaaccca

SEQ ID NO: 4682895 - DNA, 25 bp, Homo sapien
agcggcgctccgagcacaccttgca

SEQ ID NO: 4682896 - DNA, 25 bp, Homo sapien
gcggtagcggcgctccgagcacacc

SEQ ID NO: 4682897 - DNA, 25 bp, Homo sapien
cggcgctccgagcacaccttgcaga

SEQ ID NO: 4682898 - DNA, 25 bp, Homo sapien
ggtagcggcgctccgagcacacctt

SEQ ID NO: 4682899 - DNA, 25 bp, Homo sapien
ctgtctctatcctcctccccatatc

SEQ ID NO: 4682900 - DNA, 25 bp, Homo sapien
ccatacagagctgggccctaaaggg

SEQ ID NO: 4682901 - DNA, 25 bp, Homo sapien
agccagtggttaggactccatacag

SEQ ID NO: 4682902 - DNA, 25 bp, Homo sapien
tatcctcctccccatatccaagtga

SEQ ID NO: 4682903 - DNA, 25 bp, Homo sapien
gcaggaaaagttagcaaaaatacaa

SEQ ID NO: 4682904 - DNA, 25 bp, Homo sapien
agcaggaaaagttagcaaaaataca

SEQ ID NO: 4682905 - DNA, 25 bp, Homo sapien
ggcattttcaatctcacacccacag

SEQ ID NO: 4682906 - DNA, 25 bp, Homo sapien
cttcctgcgggtggttctcgctctt

SEQ ID NO: 4682907 - DNA, 25 bp, Homo sapien
gccccgaggccttggcggcttctga

SEQ ID NO: 4682908 - DNA, 25 bp, Homo sapien
tcctgcgggtggttctcgctctttc

SEQ ID NO: 4682909 - DNA, 25 bp, Homo sapien
ctgccccgaggccttggcggcttct

SEQ ID NO: 4682910 - DNA, 25 bp, Homo sapien
gccaggcataaggaaggtgagtggg

SEQ ID NO: 4682911 - DNA, 25 bp, Homo sapien
ggcctggattcaaagcaagtttgta

SEQ ID NO: 4682912 - DNA, 25 bp, Homo sapien
ttcaaagcaagtttgtaaaacagga

SEQ ID NO: 4682913 - DNA, 25 bp, Homo sapien
gccccgggcctggattcaaagcaag

SEQ ID NO: 4682914 - DNA, 25 bp, Homo sapien
cctcagtgtccctatctcagcccag

SEQ ID NO: 4682915 - DNA, 25 bp, Homo sapien
agcccctcagtgtccctatctcagc

SEQ ID NO: 4682916 - DNA, 25 bp, Homo sapien
agtgtccctatctcagcccagacaa

SEQ ID NO: 4682917 - DNA, 25 bp, Homo sapien
aggagctagccagcccctcagtgtc

SEQ ID NO: 4682918 - DNA, 25 bp, Homo sapien
gactcgaactggagagtcgcagcag

SEQ ID NO: 4682919 - DNA, 25 bp, Homo sapien
cctggactcgaactggagagtcgca

SEQ ID NO: 4682920 - DNA, 25 bp, Homo sapien
tcgaactggagagtcgcagcagatg

SEQ ID NO: 4682921 - DNA, 25 bp, Homo sapien
cggaatccacggcctggactcgaac

SEQ ID NO: 4682922 - DNA, 25 bp, Homo sapien
ctcattcagctgcagcaccgtgtcc

SEQ ID NO: 4682923 - DNA, 25 bp, Homo sapien
tctcattcagctgcagcaccgtgtc

SEQ ID NO: 4682924 - DNA, 25 bp, Homo sapien
acacgagtaggatgatctcactggg

SEQ ID NO: 4682925 - DNA, 25 bp, Homo sapien
gcgccacacgagtaggatgatctca

SEQ ID NO: 4682926 - DNA, 25 bp, Homo sapien
gccacacgagtaggatgatctcact

SEQ ID NO: 4682927 - DNA, 25 bp, Homo sapien
cacacgagtaggatgatctcactgg

SEQ ID NO: 4682928 - DNA, 25 bp, Homo sapien
cctggaccccatgggtgcagttctt

SEQ ID NO: 4682929 - DNA, 25 bp, Homo sapien
ctgtggcgctgctcaggccgtgcct

SEQ ID NO: 4682930 - DNA, 25 bp, Homo sapien
gcttggccacctcggtgtagcgctc

SEQ ID NO: 4682931 - DNA, 25 bp, Homo sapien
tcatgtgtcgacttgcaggaggccc

SEQ ID NO: 4682932 - DNA, 25 bp, Homo sapien
ggggatggtatcctcctggtacaca

SEQ ID NO: 4682933 - DNA, 25 bp, Homo sapien
cggggatggtatcctcctggtacac

SEQ ID NO: 4682934 - DNA, 25 bp, Homo sapien
tcggggatggtatcctcctggtaca

SEQ ID NO: 4682935 - DNA, 25 bp, Homo sapien
cttcggggatggtatcctcctggta

SEQ ID NO: 4682936 - DNA, 25 bp, Homo sapien
ttgtatgttctcaacgatacatggg

SEQ ID NO: 4682937 - DNA, 25 bp, Homo sapien
tctcaacgatacatgggagctaagc

SEQ ID NO: 4682938 - DNA, 25 bp, Homo sapien
actacgaatggggtgcagtatattc

SEQ ID NO: 4682939 - DNA, 25 bp, Homo sapien
agataaaagactacgaatggggtgc

SEQ ID NO: 4682940 - DNA, 25 bp, Homo sapien
tgcggcctcacaaccgggcagtttt

SEQ ID NO: 4682941 - DNA, 25 bp, Homo sapien
ctgtcttcatcagccgggacttctt

SEQ ID NO: 4682942 - DNA, 25 bp, Homo sapien
caggcctgtgtaggacttcccttta

SEQ ID NO: 4682943 - DNA, 25 bp, Homo sapien
aacaaagacagggaacaccaggact

SEQ ID NO: 4682944 - DNA, 25 bp, Homo sapien
gtgcagggttatgatcacagctcat

SEQ ID NO: 4682945 - DNA, 25 bp, Homo sapien
gaaggagagataaatggggaggaaa

SEQ ID NO: 4682946 - DNA, 25 bp, Homo sapien
tatttttaaagagaaggagagataa

SEQ ID NO: 4682947 - DNA, 25 bp, Homo sapien
cacacctggcccaataaaggttatt

SEQ ID NO: 4682948 - DNA, 25 bp, Homo sapien
agcagcttgtcaaagccagccacag

SEQ ID NO: 4682949 - DNA, 25 bp, Homo sapien
ctggaaataaagcaggctgagtggg

SEQ ID NO: 4682950 - DNA, 25 bp, Homo sapien
agcaggctgagtgggcagttcaaaa

SEQ ID NO: 4682951 - DNA, 25 bp, Homo sapien
ataaagcaggctgagtgggcagttc

SEQ ID NO: 4682952 - DNA, 25 bp, Homo sapien
aaagcaggctgagtgggcagttcaa

SEQ ID NO: 4682953 - DNA, 25 bp, Homo sapien
tgttcctcccttcatacagcagcag

SEQ ID NO: 4682954 - DNA, 25 bp, Homo sapien
caggagggtccgggcaggattacag

SEQ ID NO: 4682955 - DNA, 25 bp, Homo sapien
ttcctcccttcatacagcagcagct

SEQ ID NO: 4682956 - DNA, 25 bp, Homo sapien
aggagggtccgggcaggattacaga

SEQ ID NO: 4682957 - DNA, 25 bp, Homo sapien
gaatgaagttctcccaattagagaa

SEQ ID NO: 4682958 - DNA, 25 bp, Homo sapien
tttaagctcagagactgaactgacc

SEQ ID NO: 4682959 - DNA, 25 bp, Homo sapien
tgtagatgaatgaagttctcccaat

SEQ ID NO: 4682960 - DNA, 25 bp, Homo sapien
ctccaacttctgtacccaagtagtt

SEQ ID NO: 4682961 - DNA, 25 bp, Homo sapien
ggtctcttggttctaagtctccaga

SEQ ID NO: 4682962 - DNA, 25 bp, Homo sapien
ttccttcaatcttcaaggctaaggg

SEQ ID NO: 4682963 - DNA, 25 bp, Homo sapien
ttcaatcttcaaggctaagggagag

SEQ ID NO: 4682964 - DNA, 25 bp, Homo sapien
gagaggggtctcttggttctaagtc

SEQ ID NO: 4682965 - DNA, 25 bp, Homo sapien
atcacctgtcgccttccacaggcca

SEQ ID NO: 4682966 - DNA, 25 bp, Homo sapien
ggccacggcagcccatgggagagtg

SEQ ID NO: 4682967 - DNA, 25 bp, Homo sapien
atggcccaatcacctgtcgccttcc

SEQ ID NO: 4682968 - DNA, 25 bp, Homo sapien
gccacggcagcccatgggagagtga

SEQ ID NO: 4682969 - DNA, 25 bp, Homo sapien
caggtccgaataggcaaacagtgtc

SEQ ID NO: 4682970 - DNA, 25 bp, Homo sapien
ggccaggctcgtcctccttggtgaa

SEQ ID NO: 4682971 - DNA, 25 bp, Homo sapien
aagagcagcaggtccgaataggcaa

SEQ ID NO: 4682972 - DNA, 25 bp, Homo sapien
ggttcctcaggacgtcgcagcggcc

SEQ ID NO: 4682973 - DNA, 25 bp, Homo sapien
cggagatgttccaattgttagcgcc

SEQ ID NO: 4682974 - DNA, 25 bp, Homo sapien
tgttcccattacactgccattcagc

SEQ ID NO: 4682975 - DNA, 25 bp, Homo sapien
tgttccaattgttagcgccagctct

SEQ ID NO: 4682976 - DNA, 25 bp, Homo sapien
tgttagcgccagctctccgcctgtt

SEQ ID NO: 4682977 - DNA, 25 bp, Homo sapien
ggccagaaagacacactatgggcat

SEQ ID NO: 4682978 - DNA, 25 bp, Homo sapien
acactatgggcatgacgctggccac

SEQ ID NO: 4682979 - DNA, 25 bp, Homo sapien
gactggagagcctaataatcagcaa

SEQ ID NO: 4682980 - DNA, 25 bp, Homo sapien
tctgagacaccagagcaggccagaa

SEQ ID NO: 4682981 - DNA, 25 bp, Homo sapien
tgctagatagagcacgcagaatttc

SEQ ID NO: 4682982 - DNA, 25 bp, Homo sapien
ctctgctagatagagcacgcagaat

SEQ ID NO: 4682983 - DNA, 25 bp, Homo sapien
ctagatagagcacgcagaatttcag

SEQ ID NO: 4682984 - DNA, 25 bp, Homo sapien
gatagagcacgcagaatttcaggtc

SEQ ID NO: 4682985 - DNA, 25 bp, Homo sapien
caggtacaggaatcagggcgatctc

SEQ ID NO: 4682986 - DNA, 25 bp, Homo sapien
aaatctcaagggtctgttctaagca

SEQ ID NO: 4682987 - DNA, 25 bp, Homo sapien
gaggtcctgcacagaaaatctcaag

SEQ ID NO: 4682988 - DNA, 25 bp, Homo sapien
ctggaaaacgtggaagcaagaggca

SEQ ID NO: 4682989 - DNA, 25 bp, Homo sapien
catggacccaactgacttcagagcc

SEQ ID NO: 4682990 - DNA, 25 bp, Homo sapien
gcatctgtccagtgtatttgcagga

SEQ ID NO: 4682991 - DNA, 25 bp, Homo sapien
aatgtgcccatggacccaactgact

SEQ ID NO: 4682992 - DNA, 25 bp, Homo sapien
ctgaagccaattgtgggctgcatct

SEQ ID NO: 4682993 - DNA, 25 bp, Homo sapien
gtctcaacagcagagtgtagggctg

SEQ ID NO: 4682994 - DNA, 25 bp, Homo sapien
tggctctcagagcttgaagctgtaa

SEQ ID NO: 4682995 - DNA, 25 bp, Homo sapien
gctctcagagcttgaagctgtaata

SEQ ID NO: 4682996 - DNA, 25 bp, Homo sapien
tgaccgtattgcctgtctcaacagc

SEQ ID NO: 4682997 - DNA, 25 bp, Homo sapien
tcagagcagctgcagagttcgctgg

SEQ ID NO: 4682998 - DNA, 25 bp, Homo sapien
gagaaattctgtaggtagctgggtc

SEQ ID NO: 4682999 - DNA, 25 bp, Homo sapien
ttgcagactggaccaagaggcgacc

SEQ ID NO: 4683000 - DNA, 25 bp, Homo sapien
gctggcaggaatgctccctcttgca

SEQ ID NO: 4683001 - DNA, 25 bp, Homo sapien
ttggtctaatctgtgactgttcagc

SEQ ID NO: 4683002 - DNA, 25 bp, Homo sapien
ctgcccagcacatgatcttggtcta

SEQ ID NO: 4683003 - DNA, 25 bp, Homo sapien
tggtctaatctgtgactgttcagct

SEQ ID NO: 4683004 - DNA, 25 bp, Homo sapien
gcccagcacatgatcttggtctaat

SEQ ID NO: 4683005 - DNA, 25 bp, Homo sapien
caaggccaaggctgaacgggtggtt

SEQ ID NO: 4683006 - DNA, 25 bp, Homo sapien
tcctttggaaagtctttgacgggca

SEQ ID NO: 4683007 - DNA, 25 bp, Homo sapien
gacgggcagagtcatgtggccctct

SEQ ID NO: 4683008 - DNA, 25 bp, Homo sapien
ggcataccaacagaacccaaacagc

SEQ ID NO: 4683009 - DNA, 25 bp, Homo sapien
ctaatccccagtgacattgaggcag

SEQ ID NO: 4683010 - DNA, 25 bp, Homo sapien
gtgtccgccaaaagccgcaaatgca

SEQ ID NO: 4683011 - DNA, 25 bp, Homo sapien
aagtgggttcaagggccagctggcg

SEQ ID NO: 4683012 - DNA, 25 bp, Homo sapien
aatagagaaacggacggtcagggct

SEQ ID NO: 4683013 - DNA, 25 bp, Homo sapien
atgttctccgacaggcaccagcaca

SEQ ID NO: 4683014 - DNA, 25 bp, Homo sapien
ccccctgcataggcctgctgcccat

SEQ ID NO: 4683015 - DNA, 25 bp, Homo sapien
tgccccctgcataggcctgctgccc

SEQ ID NO: 4683016 - DNA, 25 bp, Homo sapien
ctgccccctgcataggcctgctgcc

SEQ ID NO: 4683017 - DNA, 25 bp, Homo sapien
gccccctgcataggcctgctgccca

SEQ ID NO: 4683018 - DNA, 25 bp, Homo sapien
gatttgaagaggtgtccaaactgct

SEQ ID NO: 4683019 - DNA, 25 bp, Homo sapien
ggtgtccaaactgctctgctcagga

SEQ ID NO: 4683020 - DNA, 25 bp, Homo sapien
cttgggccgttccagggtcagccag

SEQ ID NO: 4683021 - DNA, 25 bp, Homo sapien
catggaacacgcgtttgaagagttt

SEQ ID NO: 4683022 - DNA, 25 bp, Homo sapien
gcaagtggacaatgctgtggaccag

SEQ ID NO: 4683023 - DNA, 25 bp, Homo sapien
gaactgagcgcaagtggacaatgct

SEQ ID NO: 4683024 - DNA, 25 bp, Homo sapien
ccttagtggccagcccttggtaaag

SEQ ID NO: 4683025 - DNA, 25 bp, Homo sapien
gaactgacggaactgagcgcaagtg

SEQ ID NO: 4683026 - DNA, 25 bp, Homo sapien
cccctggaatatggcagatgtctac

SEQ ID NO: 4683027 - DNA, 25 bp, Homo sapien
tctgggagaagtcttagagccagag

SEQ ID NO: 4683028 - DNA, 25 bp, Homo sapien
tgtcatatgtgctccgagcaccagc

SEQ ID NO: 4683029 - DNA, 25 bp, Homo sapien
tatgtgctccgagcaccagcagcag

SEQ ID NO: 4683030 - DNA, 25 bp, Homo sapien
cattggttgagttgaccggccccat

SEQ ID NO: 4683031 - DNA, 25 bp, Homo sapien
caggtccagttgaggtgaggttact

SEQ ID NO: 4683032 - DNA, 25 bp, Homo sapien
gatgcccaagaaagggttaagttgc

SEQ ID NO: 4683033 - DNA, 25 bp, Homo sapien
ggtaaagcttctatcctgggtggca

SEQ ID NO: 4683034 - DNA, 25 bp, Homo sapien
ggcaggtccgggagccaccactgga

SEQ ID NO: 4683035 - DNA, 25 bp, Homo sapien
ctggaagcccagatgtggaatgtcc

SEQ ID NO: 4683036 - DNA, 25 bp, Homo sapien
gatgagagcgagaccatatccgact

SEQ ID NO: 4683037 - DNA, 25 bp, Homo sapien
ggcattgttcttcatcagggtgacc

SEQ ID NO: 4683038 - DNA, 25 bp, Homo sapien
taaagtagatgcacccgaaatatcc

SEQ ID NO: 4683039 - DNA, 25 bp, Homo sapien
cagcccacaagtctcggtttaaaag

SEQ ID NO: 4683040 - DNA, 25 bp, Homo sapien
tcacctagagaactgaacgagcccc

SEQ ID NO: 4683041 - DNA, 25 bp, Homo sapien
gatgccgaggtcttacacaacacaa

SEQ ID NO: 4683042 - DNA, 25 bp, Homo sapien
tgggcccctcctatgtgtaaacgga

SEQ ID NO: 4683043 - DNA, 25 bp, Homo sapien
tagataagagtatgagagctgccca

SEQ ID NO: 4683044 - DNA, 25 bp, Homo sapien
gctgtgtgctgcattcagactgtcc

SEQ ID NO: 4683045 - DNA, 25 bp, Homo sapien
gaccctgatgtgagcatctgctcga

SEQ ID NO: 4683046 - DNA, 25 bp, Homo sapien
tctgctcgactcagcagcttgtcag

SEQ ID NO: 4683047 - DNA, 25 bp, Homo sapien
gcccaccaggaactgatgtccactt

SEQ ID NO: 4683048 - DNA, 25 bp, Homo sapien
tgtttcatcttctcgagcctgtgga

SEQ ID NO: 4683049 - DNA, 25 bp, Homo sapien
gttcgatcgatttgagaggcagagc

SEQ ID NO: 4683050 - DNA, 25 bp, Homo sapien
gacagcagtggccatcaggtcatgt

SEQ ID NO: 4683051 - DNA, 25 bp, Homo sapien
tgttcatcatcctggacagctagga

SEQ ID NO: 4683052 - DNA, 25 bp, Homo sapien
tacaggatagatgaagagttttaaa

SEQ ID NO: 4683053 - DNA, 25 bp, Homo sapien
gcttacaggatagatgaagagtttt

SEQ ID NO: 4683054 - DNA, 25 bp, Homo sapien
tgatggcttacaggatagatgaaga

SEQ ID NO: 4683055 - DNA, 25 bp, Homo sapien
caaaaggtctgcaatgtcccaaccc

SEQ ID NO: 4683056 - DNA, 25 bp, Homo sapien
gaagagaaggcgaagacaggataga

SEQ ID NO: 4683057 - DNA, 25 bp, Homo sapien
acaggatagagggtaaggttgcact

SEQ ID NO: 4683058 - DNA, 25 bp, Homo sapien
cagagaaagtcttcgaggaagagaa

SEQ ID NO: 4683059 - DNA, 25 bp, Homo sapien
tagagggtaaggttgcactgtcttc

SEQ ID NO: 4683060 - DNA, 25 bp, Homo sapien
agaggagccactaagccttgaaggt

SEQ ID NO: 4683061 - DNA, 25 bp, Homo sapien
ccaaggagggcagtcaacgtcaggc

SEQ ID NO: 4683062 - DNA, 25 bp, Homo sapien
gaaggttgaggattgcatccagcag

SEQ ID NO: 4683063 - DNA, 25 bp, Homo sapien
acgtcaggcagatcaaacaccctaa

SEQ ID NO: 4683064 - DNA, 25 bp, Homo sapien
gaacaacatttgcatagggccatac

SEQ ID NO: 4683065 - DNA, 25 bp, Homo sapien
tccacgcggaaattagcctgatggc

SEQ ID NO: 4683066 - DNA, 25 bp, Homo sapien
ggaccacctatgtgtctcaagacag

SEQ ID NO: 4683067 - DNA, 25 bp, Homo sapien
tattagagtaccgaggctttgcagt

SEQ ID NO: 4683068 - DNA, 25 bp, Homo sapien
tccacctaagtattgattacaggcc

SEQ ID NO: 4683069 - DNA, 25 bp, Homo sapien
gccatgctcctagctgcaggtaaaa

SEQ ID NO: 4683070 - DNA, 25 bp, Homo sapien
tgagtgagacaaccctaagaccgtc

SEQ ID NO: 4683071 - DNA, 25 bp, Homo sapien
gaatttacagataagccagaggact

SEQ ID NO: 4683072 - DNA, 25 bp, Homo sapien
gactctcccagatggaattatgtga

SEQ ID NO: 4683073 - DNA, 25 bp, Homo sapien
tcccagatggaattatgtgactcca

SEQ ID NO: 4683074 - DNA, 25 bp, Homo sapien
tctcccagatggaattatgtgactc

SEQ ID NO: 4683075 - DNA, 25 bp, Homo sapien
aggactctcccagatggaattatgt

SEQ ID NO: 4683076 - DNA, 25 bp, Homo sapien
ccactgtgctgaaacagccagggaa

SEQ ID NO: 4683077 - DNA, 25 bp, Homo sapien
tgccaggcgactctcaggaagcctg

SEQ ID NO: 4683078 - DNA, 25 bp, Homo sapien
tgaccacatccggtcccaggagttc

SEQ ID NO: 4683079 - DNA, 25 bp, Homo sapien
cagtctctgtgcgcccaaaggcagt

SEQ ID NO: 4683080 - DNA, 25 bp, Homo sapien
cgcctgccaggcgactctcaggaag

SEQ ID NO: 4683081 - DNA, 25 bp, Homo sapien
ttcccatgcctcatgagtggaggcc

SEQ ID NO: 4683082 - DNA, 25 bp, Homo sapien
tgtataaacgaatgcctgacaggac

SEQ ID NO: 4683083 - DNA, 25 bp, Homo sapien
aaatggaaacatggatacactacgc

SEQ ID NO: 4683084 - DNA, 25 bp, Homo sapien
tagaaaaattgcaccagtaacccca

SEQ ID NO: 4683085 - DNA, 25 bp, Homo sapien
cccttcctggctccggtccaaccag

SEQ ID NO: 4683086 - DNA, 25 bp, Homo sapien
tcccttcctggctccggtccaacca

SEQ ID NO: 4683087 - DNA, 25 bp, Homo sapien
aaggtcacactctagtaagttcagg

SEQ ID NO: 4683088 - DNA, 25 bp, Homo sapien
ccatggaacagatgagcccatcagt

SEQ ID NO: 4683089 - DNA, 25 bp, Homo sapien
cccattttatggatgtgtaagcaga

SEQ ID NO: 4683090 - DNA, 25 bp, Homo sapien
gaggcatagagagactaaggtcaca

SEQ ID NO: 4683091 - DNA, 25 bp, Homo sapien
aacaatcaccaatgaggctggctgg

SEQ ID NO: 4683092 - DNA, 25 bp, Homo sapien
gaaaagcaggattcacccttggcct

SEQ ID NO: 4683093 - DNA, 25 bp, Homo sapien
gagtctcaagagatggccaattctg

SEQ ID NO: 4683094 - DNA, 25 bp, Homo sapien
taggattccttcacgtcagaggtgc

SEQ ID NO: 4683095 - DNA, 25 bp, Homo sapien
gatggagtccgggatgtctcaaaga

SEQ ID NO: 4683096 - DNA, 25 bp, Homo sapien
ctggctcccgggttacatgctcaca

SEQ ID NO: 4683097 - DNA, 25 bp, Homo sapien
tcaaagcactttcatccgagatgga

SEQ ID NO: 4683098 - DNA, 25 bp, Homo sapien
catgctcacacgcataggctgtggg

SEQ ID NO: 4683099 - DNA, 25 bp, Homo sapien
cccaggggagcgatacctgctagga

SEQ ID NO: 4683100 - DNA, 25 bp, Homo sapien
aaagcagaaccaaatgaccaggttc

SEQ ID NO: 4683101 - DNA, 25 bp, Homo sapien
gcggccgtgtcaagcggctgccttc

SEQ ID NO: 4683102 - DNA, 25 bp, Homo sapien
taggtagcgctttcaaaacccttgc

SEQ ID NO: 4683103 - DNA, 25 bp, Homo sapien
cctggcactagattaaagattgggc

SEQ ID NO: 4683104 - DNA, 25 bp, Homo sapien
gattgggccttttagatctatgcca

SEQ ID NO: 4683105 - DNA, 25 bp, Homo sapien
tttgtaagtacatggcacacagtag

SEQ ID NO: 4683106 - DNA, 25 bp, Homo sapien
taggtgcttaacacacatggaagga

SEQ ID NO: 4683107 - DNA, 25 bp, Homo sapien
tccctagacaaggaggagcatgtgg

SEQ ID NO: 4683108 - DNA, 25 bp, Homo sapien
gatagactgggatggagacctgctc

SEQ ID NO: 4683109 - DNA, 25 bp, Homo sapien
ttaactcgaggaggctagaccactg

SEQ ID NO: 4683110 - DNA, 25 bp, Homo sapien
cacctatgagatgggcgctagtggc

SEQ ID NO: 4683111 - DNA, 25 bp, Homo sapien
ggagtatattcctgtcacactttgg

SEQ ID NO: 4683112 - DNA, 25 bp, Homo sapien
ggtacagacatggaataataggctc

SEQ ID NO: 4683113 - DNA, 25 bp, Homo sapien
caaaattcaaggataggctacgctc

SEQ ID NO: 4683114 - DNA, 25 bp, Homo sapien
tgaaaaagggactcgacctcaccag

SEQ ID NO: 4683115 - DNA, 25 bp, Homo sapien
tggcacacagtagcccatggtggtg

SEQ ID NO: 4683116 - DNA, 25 bp, Homo sapien
tcacggctgctacggggcatatgga

SEQ ID NO: 4683117 - DNA, 25 bp, Homo sapien
cttcctcacggctgctacggggcat

SEQ ID NO: 4683118 - DNA, 25 bp, Homo sapien
tcctcacggctgctacggggcatat

SEQ ID NO: 4683119 - DNA, 25 bp, Homo sapien
ggtggactcgtagtctttgtcccca

SEQ ID NO: 4683120 - DNA, 25 bp, Homo sapien
aaacaccccttctactcctccagct

SEQ ID NO: 4683121 - DNA, 25 bp, Homo sapien
gcttcaacatgggtggactcgtagt

SEQ ID NO: 4683122 - DNA, 25 bp, Homo sapien
aggtcccttctcctctcgcctccat

SEQ ID NO: 4683123 - DNA, 25 bp, Homo sapien
ccgcgcagggactctcaggacaaag

SEQ ID NO: 4683124 - DNA, 25 bp, Homo sapien
cgcgcagggactctcaggacaaagc

SEQ ID NO: 4683125 - DNA, 25 bp, Homo sapien
cccgcgcagggactctcaggacaaa

SEQ ID NO: 4683126 - DNA, 25 bp, Homo sapien
ccccgcgcagggactctcaggacaa

SEQ ID NO: 4683127 - DNA, 25 bp, Homo sapien
cattcacgttccctaaacagaggcc

SEQ ID NO: 4683128 - DNA, 25 bp, Homo sapien
aaaggaagaattcgaccacagactg

SEQ ID NO: 4683129 - DNA, 25 bp, Homo sapien
ggaggtggcaagttccctggaggca

SEQ ID NO: 4683130 - DNA, 25 bp, Homo sapien
tgcccattcacgttccctaaacaga

SEQ ID NO: 4683131 - DNA, 25 bp, Homo sapien
actgatgactcgcagtccactctgc

SEQ ID NO: 4683132 - DNA, 25 bp, Homo sapien
ggccactgatgactcgcagtccact

SEQ ID NO: 4683133 - DNA, 25 bp, Homo sapien
ctccccaggccacaatcgctatctg

SEQ ID NO: 4683134 - DNA, 25 bp, Homo sapien
acaatcgctatctgcaccatctggc

SEQ ID NO: 4683135 - DNA, 25 bp, Homo sapien
tatgaacagggactgcgtgcaggtt

SEQ ID NO: 4683136 - DNA, 25 bp, Homo sapien
gagctcatggttctttctgtgctcc

SEQ ID NO: 4683137 - DNA, 25 bp, Homo sapien
catcccacatcagcagatgctggcg

SEQ ID NO: 4683138 - DNA, 25 bp, Homo sapien
ccaggcaggtctgtatgaacaggga

SEQ ID NO: 4683139 - DNA, 25 bp, Homo sapien
ccaggcctgtcccagtggtgactgt

SEQ ID NO: 4683140 - DNA, 25 bp, Homo sapien
ccaaccctgttctaaatcgaggcca

SEQ ID NO: 4683141 - DNA, 25 bp, Homo sapien
agagggcacctacccagagagatca

SEQ ID NO: 4683142 - DNA, 25 bp, Homo sapien
tggtgactgtcagtcagagcccgcc

SEQ ID NO: 4683143 - DNA, 25 bp, Homo sapien
gaggactctagcgtgatctggccaa

SEQ ID NO: 4683144 - DNA, 25 bp, Homo sapien
gctgagggcccagtctagacagtga

SEQ ID NO: 4683145 - DNA, 25 bp, Homo sapien
cacacagaggtgtcaggtagagcca

SEQ ID NO: 4683146 - DNA, 25 bp, Homo sapien
caattgtaatgtcagggcctccagt

SEQ ID NO: 4683147 - DNA, 25 bp, Homo sapien
ctgggagtgtgaaagtgaaagtgga

SEQ ID NO: 4683148 - DNA, 25 bp, Homo sapien
tgggagtgtgaaagtgaaagtggag

SEQ ID NO: 4683149 - DNA, 25 bp, Homo sapien
ggagtgtgaaagtgaaagtggagcc

SEQ ID NO: 4683150 - DNA, 25 bp, Homo sapien
gggagtgtgaaagtgaaagtggagc

SEQ ID NO: 4683151 - DNA, 25 bp, Homo sapien
gatgtgaaagctcggcacgggtaag

SEQ ID NO: 4683152 - DNA, 25 bp, Homo sapien
cagatgtgagcggatgtgaaagctc

SEQ ID NO: 4683153 - DNA, 25 bp, Homo sapien
agctcggcacgggtaagagccacag

SEQ ID NO: 4683154 - DNA, 25 bp, Homo sapien
gcacagatgtgagcggatgtgaaag

SEQ ID NO: 4683155 - DNA, 25 bp, Homo sapien
tgcacacacgtgtcaggggtcacgc

SEQ ID NO: 4683156 - DNA, 25 bp, Homo sapien
gctgcacacacgtgtcaggggtcac

SEQ ID NO: 4683157 - DNA, 25 bp, Homo sapien
cacgtgtcaggggtcacgctggcat

SEQ ID NO: 4683158 - DNA, 25 bp, Homo sapien
acacacgtgtcaggggtcacgctgg

SEQ ID NO: 4683159 - DNA, 25 bp, Homo sapien
gctgagaagtctttgaagccctggg

SEQ ID NO: 4683160 - DNA, 25 bp, Homo sapien
ctggggagtctgtaatggtgaagcc

SEQ ID NO: 4683161 - DNA, 25 bp, Homo sapien
aagccatgctcgaagctgagaagtc

SEQ ID NO: 4683162 - DNA, 25 bp, Homo sapien
cagccaaaagccatgctcgaagctg

SEQ ID NO: 4683163 - DNA, 25 bp, Homo sapien
cttctcatctgcctccgtctcaaac

SEQ ID NO: 4683164 - DNA, 25 bp, Homo sapien
catccttgctgggcggagcatctgg

SEQ ID NO: 4683165 - DNA, 25 bp, Homo sapien
tctttggtgagtagagggtcctggt

SEQ ID NO: 4683166 - DNA, 25 bp, Homo sapien
tggtgtcctcagtaagggccttggc

SEQ ID NO: 4683167 - DNA, 25 bp, Homo sapien
agtagctgctagtaggtccccggag

SEQ ID NO: 4683168 - DNA, 25 bp, Homo sapien
tggcccgtctcgatcatgctgctgc

SEQ ID NO: 4683169 - DNA, 25 bp, Homo sapien
ctcactgcgctctccgtagttgtca

SEQ ID NO: 4683170 - DNA, 25 bp, Homo sapien
agttgtcatcgctggtgtcctcatc

SEQ ID NO: 4683171 - DNA, 25 bp, Homo sapien
ccttctggctgtaggtgctatccag

SEQ ID NO: 4683172 - DNA, 25 bp, Homo sapien
gcggcccagctctttcttgagggtg

SEQ ID NO: 4683173 - DNA, 25 bp, Homo sapien
gcaaggtggtgtcggaggcaaagca

SEQ ID NO: 4683174 - DNA, 25 bp, Homo sapien
cttgagggtgctgggcgaaggcatg

SEQ ID NO: 4683175 - DNA, 25 bp, Homo sapien
gccctcaccgtctgagcagtgcaag

SEQ ID NO: 4683176 - DNA, 25 bp, Homo sapien
tgtcctgtgaagaagagggaaaggt

SEQ ID NO: 4683177 - DNA, 25 bp, Homo sapien
cttcctgtgtcctgtgaagaagagg

SEQ ID NO: 4683178 - DNA, 25 bp, Homo sapien
ctgtgtcctgtgaagaagagggaaa

SEQ ID NO: 4683179 - DNA, 25 bp, Homo sapien
tcctgtgtcctgtgaagaagaggga

SEQ ID NO: 4683180 - DNA, 25 bp, Homo sapien
taaatattcacgagaggcaaacggt

SEQ ID NO: 4683181 - DNA, 25 bp, Homo sapien
ccagtggagctataagaacacagca

SEQ ID NO: 4683182 - DNA, 25 bp, Homo sapien
tggcctgggctaagctacacctgct

SEQ ID NO: 4683183 - DNA, 25 bp, Homo sapien
taaatccaaatacacaatggcctgg

SEQ ID NO: 4683184 - DNA, 25 bp, Homo sapien
tttggcaagatcatgatccctcggg

SEQ ID NO: 4683185 - DNA, 25 bp, Homo sapien
tgagaaccacacacgcttacagatg

SEQ ID NO: 4683186 - DNA, 25 bp, Homo sapien
tgattccggagcacaccacagtgtg

SEQ ID NO: 4683187 - DNA, 25 bp, Homo sapien
ctgatctgaatgagcctgaggcctt

SEQ ID NO: 4683188 - DNA, 25 bp, Homo sapien
tgtttacacatccgaaataattctt

SEQ ID NO: 4683189 - DNA, 25 bp, Homo sapien
tttacacatccgaaataattcttta

SEQ ID NO: 4683190 - DNA, 25 bp, Homo sapien
tacacatccgaaataattctttagg

SEQ ID NO: 4683191 - DNA, 25 bp, Homo sapien
ttgtttacacatccgaaataattct

SEQ ID NO: 4683192 - DNA, 25 bp, Homo sapien
atccccaacggtgtcagccccgctc

SEQ ID NO: 4683193 - DNA, 25 bp, Homo sapien
tttctcttccgggaggcttcgtcat

SEQ ID NO: 4683194 - DNA, 25 bp, Homo sapien
tcttccgggaggcttcgtcatcatc

SEQ ID NO: 4683195 - DNA, 25 bp, Homo sapien
ggaggcttcgtcatcatccccaacg

SEQ ID NO: 4683196 - DNA, 25 bp, Homo sapien
gaggaagaggagcgcagaagccagg

SEQ ID NO: 4683197 - DNA, 25 bp, Homo sapien
ttgtgggcgggaccaggcacaacct

SEQ ID NO: 4683198 - DNA, 25 bp, Homo sapien
ggttgtgggcgggaccaggcacaac

SEQ ID NO: 4683199 - DNA, 25 bp, Homo sapien
ggcgggaccaggcacaacctcttct

SEQ ID NO: 4683200 - DNA, 25 bp, Homo sapien
cactttggggtcactgcaaagttcc

SEQ ID NO: 4683201 - DNA, 25 bp, Homo sapien
ggtactgaatcagcactttgcctca

SEQ ID NO: 4683202 - DNA, 25 bp, Homo sapien
ttggctcagaagctgggctaaagcc

SEQ ID NO: 4683203 - DNA, 25 bp, Homo sapien
cagggcaaacgggctggttgcttct

SEQ ID NO: 4683204 - DNA, 25 bp, Homo sapien
gttcactgtggcttccgggtactga

SEQ ID NO: 4683205 - DNA, 25 bp, Homo sapien
tgaaatacacacagaacagtgcggg

SEQ ID NO: 4683206 - DNA, 25 bp, Homo sapien
cctagtggtgggtgctacaggacct

SEQ ID NO: 4683207 - DNA, 25 bp, Homo sapien
tatagcccaattcctgcctagtggt

SEQ ID NO: 4683208 - DNA, 25 bp, Homo sapien
gggcttcaggcaattcaaaaggcag

SEQ ID NO: 4683209 - DNA, 25 bp, Homo sapien
ttgtgactggcctcctcgttaccat

SEQ ID NO: 4683210 - DNA, 25 bp, Homo sapien
ggccgccccggcaggaagccagtcc

SEQ ID NO: 4683211 - DNA, 25 bp, Homo sapien
ctatttgtgactggcctcctcgtta

SEQ ID NO: 4683212 - DNA, 25 bp, Homo sapien
tcccagctatttgtgactggcctcc

SEQ ID NO: 4683213 - DNA, 25 bp, Homo sapien
aaaattccttctggccaaccctgag

SEQ ID NO: 4683214 - DNA, 25 bp, Homo sapien
aaattccttctggccaaccctgaga

SEQ ID NO: 4683215 - DNA, 25 bp, Homo sapien
aattccttctggccaaccctgagag

SEQ ID NO: 4683216 - DNA, 25 bp, Homo sapien
cttggggccgcagattggtctgtag

SEQ ID NO: 4683217 - DNA, 25 bp, Homo sapien
tgtaggaggcaccactctggctcct

SEQ ID NO: 4683218 - DNA, 25 bp, Homo sapien
cacgctctctggaatcctggcctga

SEQ ID NO: 4683219 - DNA, 25 bp, Homo sapien
gcagcgggcagcaacggtgcaggct

SEQ ID NO: 4683220 - DNA, 25 bp, Homo sapien
ttcccgttgcgagtgaggtacatgc

SEQ ID NO: 4683221 - DNA, 25 bp, Homo sapien
gtgtgtcgcctctgcaggttcccgt

SEQ ID NO: 4683222 - DNA, 25 bp, Homo sapien
caggttcccgttgcgagtgaggtac

SEQ ID NO: 4683223 - DNA, 25 bp, Homo sapien
tgtgtcgcctctgcaggttcccgtt

SEQ ID NO: 4683224 - DNA, 25 bp, Homo sapien
aggggactcattccgccgtctgaag

SEQ ID NO: 4683225 - DNA, 25 bp, Homo sapien
gactcattccgccgtctgaagatcc

SEQ ID NO: 4683226 - DNA, 25 bp, Homo sapien
tccaggggactcattccgccgtctg

SEQ ID NO: 4683227 - DNA, 25 bp, Homo sapien
ttccgccgtctgaagatccccagct

SEQ ID NO: 4683228 - DNA, 25 bp, Homo sapien
tctccaaggactcgccccacttgag

SEQ ID NO: 4683229 - DNA, 25 bp, Homo sapien
tccaaggactcgccccacttgaggg

SEQ ID NO: 4683230 - DNA, 25 bp, Homo sapien
ttctccaaggactcgccccacttga

SEQ ID NO: 4683231 - DNA, 25 bp, Homo sapien
gcttctccaaggactcgccccactt

SEQ ID NO: 4683232 - DNA, 25 bp, Homo sapien
caggactttaaagatgggcgtgctg

SEQ ID NO: 4683233 - DNA, 25 bp, Homo sapien
tgcccttaagatgcctcagcttacc

SEQ ID NO: 4683234 - DNA, 25 bp, Homo sapien
tcagcttacccctacaggactttaa

SEQ ID NO: 4683235 - DNA, 25 bp, Homo sapien
tcctgcccttaagatgcctcagctt

SEQ ID NO: 4683236 - DNA, 25 bp, Homo sapien
tggactgtgacttgaccttcttgaa

SEQ ID NO: 4683237 - DNA, 25 bp, Homo sapien
caagccaaccagaactccagattct

SEQ ID NO: 4683238 - DNA, 25 bp, Homo sapien
actgaactcagtgcgaaggaaggct

SEQ ID NO: 4683239 - DNA, 25 bp, Homo sapien
gcatgcctggatcgcgatgtattca

SEQ ID NO: 4683240 - DNA, 25 bp, Homo sapien
cggagggtctgccctgaggtcctac

SEQ ID NO: 4683241 - DNA, 25 bp, Homo sapien
cttgcagctgaagggccactgggcc

SEQ ID NO: 4683242 - DNA, 25 bp, Homo sapien
ccctggggattggaggagcggaggg

SEQ ID NO: 4683243 - DNA, 25 bp, Homo sapien
gaggagcggagggtctgccctgagg

SEQ ID NO: 4683244 - DNA, 25 bp, Homo sapien
cccgcgtgtaggagtccaggttgac

SEQ ID NO: 4683245 - DNA, 25 bp, Homo sapien
ttccatgagcccgaagatgcgcttc

SEQ ID NO: 4683246 - DNA, 25 bp, Homo sapien
gagggtacgagtccttttccatgag

SEQ ID NO: 4683247 - DNA, 25 bp, Homo sapien
gatgcgcttctgtgccaggtcgaag

SEQ ID NO: 4683248 - DNA, 25 bp, Homo sapien
tgtgaacgctgagctcgactccagt

SEQ ID NO: 4683249 - DNA, 25 bp, Homo sapien
ggacgagcatatcccctgaagctgg

SEQ ID NO: 4683250 - DNA, 25 bp, Homo sapien
tattacaggacgacgtgccaagcat

SEQ ID NO: 4683251 - DNA, 25 bp, Homo sapien
tgcaagctccaatggccctctagga

SEQ ID NO: 4683252 - DNA, 25 bp, Homo sapien
tgtcctccagcaaaactgttcctgg

SEQ ID NO: 4683253 - DNA, 25 bp, Homo sapien
ctgttcctggaaggacaaggatctg

SEQ ID NO: 4683254 - DNA, 25 bp, Homo sapien
ctccagcaaaactgttcctggaagg

SEQ ID NO: 4683255 - DNA, 25 bp, Homo sapien
aaggatctggggtctgagaccaaag

SEQ ID NO: 4683256 - DNA, 25 bp, Homo sapien
aggtccattgcttgagggcctgaga

SEQ ID NO: 4683257 - DNA, 25 bp, Homo sapien
gtccattgcttgagggcctgagagc

SEQ ID NO: 4683258 - DNA, 25 bp, Homo sapien
caggtccattgcttgagggcctgag

SEQ ID NO: 4683259 - DNA, 25 bp, Homo sapien
tcaggtccattgcttgagggcctga

SEQ ID NO: 4683260 - DNA, 25 bp, Homo sapien
tccaagatctagagaagtcactcct

SEQ ID NO: 4683261 - DNA, 25 bp, Homo sapien
gctccaatgaggtaaccagcatccc

SEQ ID NO: 4683262 - DNA, 25 bp, Homo sapien
gcatgagccagagtaccaggaaact

SEQ ID NO: 4683263 - DNA, 25 bp, Homo sapien
taagggactccttgacaaagctctc

SEQ ID NO: 4683264 - DNA, 25 bp, Homo sapien
ccagggccatggaagagttggtcca

SEQ ID NO: 4683265 - DNA, 25 bp, Homo sapien
ctccagaaacactgggtgacaccca

SEQ ID NO: 4683266 - DNA, 25 bp, Homo sapien
tgccaggcagcgggcaccactcaga

SEQ ID NO: 4683267 - DNA, 25 bp, Homo sapien
gacacccagggccatggaagagttg

SEQ ID NO: 4683268 - DNA, 25 bp, Homo sapien
ccaggtaggatattggaagacagca

SEQ ID NO: 4683269 - DNA, 25 bp, Homo sapien
gagaggtcgaggacttttcccactc

SEQ ID NO: 4683270 - DNA, 25 bp, Homo sapien
atcctgtcgggcagcgccttccaca

SEQ ID NO: 4683271 - DNA, 25 bp, Homo sapien
aagacagagaggtcgaggacttttc

SEQ ID NO: 4683272 - DNA, 25 bp, Homo sapien
cacatagggtagagcatggaagagc

SEQ ID NO: 4683273 - DNA, 25 bp, Homo sapien
tgcctgcaccctcatcaagaacaga

SEQ ID NO: 4683274 - DNA, 25 bp, Homo sapien
cagcaggatgacaattccctctgct

SEQ ID NO: 4683275 - DNA, 25 bp, Homo sapien
cagaattacctttcagacccgttgc

SEQ ID NO: 4683276 - DNA, 25 bp, Homo sapien
gatttcagttggatcaaggacccca

SEQ ID NO: 4683277 - DNA, 25 bp, Homo sapien
tgttcctaaccagaaggagggcctg

SEQ ID NO: 4683278 - DNA, 25 bp, Homo sapien
tctttcatgtcaagcctcggagggc

SEQ ID NO: 4683279 - DNA, 25 bp, Homo sapien
taggtaacacatggcgaaagactgc

SEQ ID NO: 4683280 - DNA, 25 bp, Homo sapien
ctgccggctgcacgcaggttacatc

SEQ ID NO: 4683281 - DNA, 25 bp, Homo sapien
ccggctgcacgcaggttacatccca

SEQ ID NO: 4683282 - DNA, 25 bp, Homo sapien
tgccggctgcacgcaggttacatcc

SEQ ID NO: 4683283 - DNA, 25 bp, Homo sapien
cggctgcacgcaggttacatcccaa

SEQ ID NO: 4683284 - DNA, 25 bp, Homo sapien
tcaggtctgctgacgaatgtcctcc

SEQ ID NO: 4683285 - DNA, 25 bp, Homo sapien
tccacaacgtcagaagagttcaagc

SEQ ID NO: 4683286 - DNA, 25 bp, Homo sapien
cctagtcgggatctggcttgagaaa

SEQ ID NO: 4683287 - DNA, 25 bp, Homo sapien
tccccaggtttaaagatgctccaga

SEQ ID NO: 4683288 - DNA, 25 bp, Homo sapien
gcacatatgtaagaggagcgcatca

SEQ ID NO: 4683289 - DNA, 25 bp, Homo sapien
agcgcatcattcagagtgggtggcc

SEQ ID NO: 4683290 - DNA, 25 bp, Homo sapien
tgcgggagggctgaatacattgaca

SEQ ID NO: 4683291 - DNA, 25 bp, Homo sapien
gcagacggtccagtgatttattaaa

SEQ ID NO: 4683292 - DNA, 25 bp, Homo sapien
tatctagtggtctccaagcctccag

SEQ ID NO: 4683293 - DNA, 25 bp, Homo sapien
gccagtctcagagaatagagggtca

SEQ ID NO: 4683294 - DNA, 25 bp, Homo sapien
gaatgtcaggtatctagtggtctcc

SEQ ID NO: 4683295 - DNA, 25 bp, Homo sapien
tccagccagtctcagagaatagagg

SEQ ID NO: 4683296 - DNA, 25 bp, Homo sapien
ggccttttagggaaatgctctgagc

SEQ ID NO: 4683297 - DNA, 25 bp, Homo sapien
catgcttctttgagccagtccgtca

SEQ ID NO: 4683298 - DNA, 25 bp, Homo sapien
ggaaatcgaatcagacctccacgac

SEQ ID NO: 4683299 - DNA, 25 bp, Homo sapien
tcagaggtatgggaccagctgttct

SEQ ID NO: 4683300 - DNA, 25 bp, Homo sapien
gaactggaaattcgatctccgtggg

SEQ ID NO: 4683301 - DNA, 25 bp, Homo sapien
gaatctggttgttagtgggcggctg

SEQ ID NO: 4683302 - DNA, 25 bp, Homo sapien
cagctgcggtggcttcggaatctgg

SEQ ID NO: 4683303 - DNA, 25 bp, Homo sapien
tggagccagacgcaatcagagtgga

SEQ ID NO: 4683304 - DNA, 25 bp, Homo sapien
gtctcctacatagtcgtgctcagta

SEQ ID NO: 4683305 - DNA, 25 bp, Homo sapien
atgtctcctacatagtcgtgctcag

SEQ ID NO: 4683306 - DNA, 25 bp, Homo sapien
ctatgtctcctacatagtcgtgctc

SEQ ID NO: 4683307 - DNA, 25 bp, Homo sapien
ctcctacatagtcgtgctcagtaaa

SEQ ID NO: 4683308 - DNA, 25 bp, Homo sapien
gatgattgtagagcgtgtcctccac

SEQ ID NO: 4683309 - DNA, 25 bp, Homo sapien
tgtagagcgtgtcctccacaccact

SEQ ID NO: 4683310 - DNA, 25 bp, Homo sapien
cactctttgaaacctcttagatgat

SEQ ID NO: 4683311 - DNA, 25 bp, Homo sapien
ttagatgattgtagagcgtgtcctc

SEQ ID NO: 4683312 - DNA, 25 bp, Homo sapien
gagagtgcatgtcaagtgactcagg

SEQ ID NO: 4683313 - DNA, 25 bp, Homo sapien
tgtcaagtgactcaggtgttctgac

SEQ ID NO: 4683314 - DNA, 25 bp, Homo sapien
tctccaaggcttttactgcaacctc

SEQ ID NO: 4683315 - DNA, 25 bp, Homo sapien
cagctcatctgagagtgcatgtcaa

SEQ ID NO: 4683316 - DNA, 25 bp, Homo sapien
aacctgcattccaatgactccaggg

SEQ ID NO: 4683317 - DNA, 25 bp, Homo sapien
ccaggcctccgagtaggaacctgca

SEQ ID NO: 4683318 - DNA, 25 bp, Homo sapien
ggcctccgagtaggaacctgcattc

SEQ ID NO: 4683319 - DNA, 25 bp, Homo sapien
ggagattgttggaaacccaggcctc

SEQ ID NO: 4683320 - DNA, 25 bp, Homo sapien
ctggatgcctgcaacagctccccag

SEQ ID NO: 4683321 - DNA, 25 bp, Homo sapien
tggatgcctgcaacagctccccagc

SEQ ID NO: 4683322 - DNA, 25 bp, Homo sapien
tgccccctgtagacctggattgagg

SEQ ID NO: 4683323 - DNA, 25 bp, Homo sapien
ccccctgtagacctggattgaggcc

SEQ ID NO: 4683324 - DNA, 25 bp, Homo sapien
agctgccccctgtagacctggattg

SEQ ID NO: 4683325 - DNA, 25 bp, Homo sapien
acagctgccccctgtagacctggat

SEQ ID NO: 4683326 - DNA, 25 bp, Homo sapien
gggcttttacgatcttgctgggctg

SEQ ID NO: 4683327 - DNA, 25 bp, Homo sapien
tgagactgcagcgttaccatgaagg

SEQ ID NO: 4683328 - DNA, 25 bp, Homo sapien
gctgagagaacagatcctcttgctg

SEQ ID NO: 4683329 - DNA, 25 bp, Homo sapien
aggctgagtccttactgtgccgggc

SEQ ID NO: 4683330 - DNA, 25 bp, Homo sapien
gcagtggaaatggtgtcagctcctc

SEQ ID NO: 4683331 - DNA, 25 bp, Homo sapien
tgacacccacgcttaagtgcttttg

SEQ ID NO: 4683332 - DNA, 25 bp, Homo sapien
tcacggtttttgacacccacgctta

SEQ ID NO: 4683333 - DNA, 25 bp, Homo sapien
gggcattcacggtttttgacaccca

SEQ ID NO: 4683334 - DNA, 25 bp, Homo sapien
taactcaacctagcaggcagcagga

SEQ ID NO: 4683335 - DNA, 25 bp, Homo sapien
gcatttccgcaaaacatgttggcga

SEQ ID NO: 4683336 - DNA, 25 bp, Homo sapien
ttttgccttccggatgaccctgaga

SEQ ID NO: 4683337 - DNA, 25 bp, Homo sapien
caattctgagctcgtgaaggagggt

SEQ ID NO: 4683338 - DNA, 25 bp, Homo sapien
cagttgcatcccactaggcagagag

SEQ ID NO: 4683339 - DNA, 25 bp, Homo sapien
actggccttgggaggtgcaaatgac

SEQ ID NO: 4683340 - DNA, 25 bp, Homo sapien
tcaagatgattgcttcaggcccagt

SEQ ID NO: 4683341 - DNA, 25 bp, Homo sapien
caaagagggagtgccacatcttgat

SEQ ID NO: 4683342 - DNA, 25 bp, Homo sapien
ttgataaacacgcttgtgttctctg

SEQ ID NO: 4683343 - DNA, 25 bp, Homo sapien
ggttttgataaacacgcttgtgttc

SEQ ID NO: 4683344 - DNA, 25 bp, Homo sapien
gataaacacgcttgtgttctctggg

SEQ ID NO: 4683345 - DNA, 25 bp, Homo sapien
ttttgataaacacgcttgtgttctc

SEQ ID NO: 4683346 - DNA, 25 bp, Homo sapien
tgcaggtggtcctgcgctccaggag

SEQ ID NO: 4683347 - DNA, 25 bp, Homo sapien
ggacccatgaaatagaggcttccag

SEQ ID NO: 4683348 - DNA, 25 bp, Homo sapien
gcagggacccatgaaatagaggctt

SEQ ID NO: 4683349 - DNA, 25 bp, Homo sapien
cagggacccatgaaatagaggcttc

SEQ ID NO: 4683350 - DNA, 25 bp, Homo sapien
taaagagccaacattccagtggaag

SEQ ID NO: 4683351 - DNA, 25 bp, Homo sapien
tgttggtgccctgaggaatgaaacc

SEQ ID NO: 4683352 - DNA, 25 bp, Homo sapien
cacaggataaggacaatttgagctg

SEQ ID NO: 4683353 - DNA, 25 bp, Homo sapien
aatgaaaccacgtgggacattcagg

SEQ ID NO: 4683354 - DNA, 25 bp, Homo sapien
aggcctgtggtcaagtgtcaagatg

SEQ ID NO: 4683355 - DNA, 25 bp, Homo sapien
caagtgtcaagatgattccatcaga

SEQ ID NO: 4683356 - DNA, 25 bp, Homo sapien
tgattccatcagagctgggaacccc

SEQ ID NO: 4683357 - DNA, 25 bp, Homo sapien
tcaagatgattccatcagagctggg

SEQ ID NO: 4683358 - DNA, 25 bp, Homo sapien
caggcagtaggcagctgccagaggt

SEQ ID NO: 4683359 - DNA, 25 bp, Homo sapien
ttaagggactaggactttattctgc

SEQ ID NO: 4683360 - DNA, 25 bp, Homo sapien
tctgcaggcagtaggcagctgccag

SEQ ID NO: 4683361 - DNA, 25 bp, Homo sapien
aagggactaggactttattctgcag

SEQ ID NO: 4683362 - DNA, 25 bp, Homo sapien
aagcccaaaggtactgccaaggagg

SEQ ID NO: 4683363 - DNA, 25 bp, Homo sapien
gaagcccaaaggtactgccaaggag

SEQ ID NO: 4683364 - DNA, 25 bp, Homo sapien
aagtgaaggactcagtgaaagcagc

SEQ ID NO: 4683365 - DNA, 25 bp, Homo sapien
caagtgaaggactcagtgaaagcag

SEQ ID NO: 4683366 - DNA, 25 bp, Homo sapien
agaggaagccttcgtagtggaactt

SEQ ID NO: 4683367 - DNA, 25 bp, Homo sapien
gaggaagccttcgtagtggaacttg

SEQ ID NO: 4683368 - DNA, 25 bp, Homo sapien
tcagaggaagccttcgtagtggaac

SEQ ID NO: 4683369 - DNA, 25 bp, Homo sapien
cagaggaagccttcgtagtggaact

SEQ ID NO: 4683370 - DNA, 25 bp, Homo sapien
ccaggaagagcagctctgtgatagc

SEQ ID NO: 4683371 - DNA, 25 bp, Homo sapien
tagaaggggccagggaagctttcca

SEQ ID NO: 4683372 - DNA, 25 bp, Homo sapien
gccagggaagctttccaggaagagc

SEQ ID NO: 4683373 - DNA, 25 bp, Homo sapien
gggccagggaagctttccaggaaga

SEQ ID NO: 4683374 - DNA, 25 bp, Homo sapien
cctgcaagcagctgggtatgtctgg

SEQ ID NO: 4683375 - DNA, 25 bp, Homo sapien
aggtatacagcacagcatagataca

SEQ ID NO: 4683376 - DNA, 25 bp, Homo sapien
gatacaggtatagaagctggatgaa

SEQ ID NO: 4683377 - DNA, 25 bp, Homo sapien
agacctgcaagcagctgggtatgtc

SEQ ID NO: 4683378 - DNA, 25 bp, Homo sapien
agaggcagcagcgttgacaaggtcc

SEQ ID NO: 4683379 - DNA, 25 bp, Homo sapien
cgttgacaaggtccccaggtagcat

SEQ ID NO: 4683380 - DNA, 25 bp, Homo sapien
cgtgaaacgtcctggtaaagagatt

SEQ ID NO: 4683381 - DNA, 25 bp, Homo sapien
gcttcctgctctgacgtgaaacgtc

SEQ ID NO: 4683382 - DNA, 25 bp, Homo sapien
catgtgtcacctgaaaagatggatg

SEQ ID NO: 4683383 - DNA, 25 bp, Homo sapien
ggttttgccttatgactttcctcga

SEQ ID NO: 4683384 - DNA, 25 bp, Homo sapien
ctttcctcgaagttaatgggagcca

SEQ ID NO: 4683385 - DNA, 25 bp, Homo sapien
cacgttcatcttaatccatgtgtca

SEQ ID NO: 4683386 - DNA, 25 bp, Homo sapien
tattataactcaagcccactgctgg

SEQ ID NO: 4683387 - DNA, 25 bp, Homo sapien
cgggatctgttaaaaagcgtagcac

SEQ ID NO: 4683388 - DNA, 25 bp, Homo sapien
cctacagaatcgtgagtgaaccaaa

SEQ ID NO: 4683389 - DNA, 25 bp, Homo sapien
gatagagctcattctcacgggatct

SEQ ID NO: 4683390 - DNA, 25 bp, Homo sapien
acacgtgtggcgtgccacagtggcc

SEQ ID NO: 4683391 - DNA, 25 bp, Homo sapien
tgtggcgtgccacagtggccgggtg

SEQ ID NO: 4683392 - DNA, 25 bp, Homo sapien
catcttacacgtgtggcgtgccaca

SEQ ID NO: 4683393 - DNA, 25 bp, Homo sapien
tcttacacgtgtggcgtgccacagt

SEQ ID NO: 4683394 - DNA, 25 bp, Homo sapien
tgtacctaccggcaaccaatgaagc

SEQ ID NO: 4683395 - DNA, 25 bp, Homo sapien
gccttttgaagaactgtgataccgt

SEQ ID NO: 4683396 - DNA, 25 bp, Homo sapien
ccatcctagtggacatgaagtgcta

SEQ ID NO: 4683397 - DNA, 25 bp, Homo sapien
caaagtgactgcgacattgtaccta

SEQ ID NO: 4683398 - DNA, 25 bp, Homo sapien
ctctggtttaaagagttttatatgg

SEQ ID NO: 4683399 - DNA, 25 bp, Homo sapien
gctttccttccagcccgaggtggat

SEQ ID NO: 4683400 - DNA, 25 bp, Homo sapien
ttccttccagcccgaggtggatgct

SEQ ID NO: 4683401 - DNA, 25 bp, Homo sapien
tccttccagcccgaggtggatgctc

SEQ ID NO: 4683402 - DNA, 25 bp, Homo sapien
ttccagcccgaggtggatgctcgtg

SEQ ID NO: 4683403 - DNA, 25 bp, Homo sapien
gagaatggtggttgttcatcccaga

SEQ ID NO: 4683404 - DNA, 25 bp, Homo sapien
tgggacatgtggagcccacactcag

SEQ ID NO: 4683405 - DNA, 25 bp, Homo sapien
ggtaacaccattggacataaaggag

SEQ ID NO: 4683406 - DNA, 25 bp, Homo sapien
gctgagcacggtcatatttaccctt

SEQ ID NO: 4683407 - DNA, 25 bp, Homo sapien
gaccatataattccagaccacgact

SEQ ID NO: 4683408 - DNA, 25 bp, Homo sapien
tcaagaccctagaccggagattggc

SEQ ID NO: 4683409 - DNA, 25 bp, Homo sapien
tactcagagattatagggagcatgg

SEQ ID NO: 4683410 - DNA, 25 bp, Homo sapien
catgggtgaggcacttgaagaagaa

SEQ ID NO: 4683411 - DNA, 25 bp, Homo sapien
ctgctgctgagagccgccgtgctgt

SEQ ID NO: 4683412 - DNA, 25 bp, Homo sapien
ttcctcttctgctgctgagagccgc

SEQ ID NO: 4683413 - DNA, 25 bp, Homo sapien
tcttctgctgctgagagccgccgtg

SEQ ID NO: 4683414 - DNA, 25 bp, Homo sapien
tgctgccccgccgcgccgacgcctt

SEQ ID NO: 4683415 - DNA, 25 bp, Homo sapien
cgggctgctggtgcgcgcacaatgc

SEQ ID NO: 4683416 - DNA, 25 bp, Homo sapien
tgctggtgcgcgcacaatgccgccg

SEQ ID NO: 4683417 - DNA, 25 bp, Homo sapien
gctgctggtgcgcgcacaatgccgc

SEQ ID NO: 4683418 - DNA, 25 bp, Homo sapien
gggccgggctgctggtgcgcgcaca

SEQ ID NO: 4683419 - DNA, 25 bp, Homo sapien
cgtgcgggaggaggcggccccggcg

SEQ ID NO: 4683420 - DNA, 25 bp, Homo sapien
ggagccgccgcgccgcccggctggt

SEQ ID NO: 4683421 - DNA, 25 bp, Homo sapien
agccgccgcgccgcccggctggttc

SEQ ID NO: 4683422 - DNA, 25 bp, Homo sapien
ctgcggagccgccgcgccgcccggc

SEQ ID NO: 4683423 - DNA, 25 bp, Homo sapien
ccgccgcgccgcccggctggttcat

SEQ ID NO: 4683424 - DNA, 25 bp, Homo sapien
ggccaaaacctccacatgaaatatt

SEQ ID NO: 4683425 - DNA, 25 bp, Homo sapien
agtaagtgttctaccaaggaagatg

SEQ ID NO: 4683426 - DNA, 25 bp, Homo sapien
ttcttcagcaaagtaagtgttctac

SEQ ID NO: 4683427 - DNA, 25 bp, Homo sapien
gctgagttggtgttatatcacattt

SEQ ID NO: 4683428 - DNA, 25 bp, Homo sapien
cttacatctgtctgggcataaattt

SEQ ID NO: 4683429 - DNA, 25 bp, Homo sapien
ttacatctgtctgggcataaatttg

SEQ ID NO: 4683430 - DNA, 25 bp, Homo sapien
gcctgttactgtcccatcagggcag

SEQ ID NO: 4683431 - DNA, 25 bp, Homo sapien
ctctcacggcctgttactgtcccat

SEQ ID NO: 4683432 - DNA, 25 bp, Homo sapien
ctgttactgtcccatcagggcagtg

SEQ ID NO: 4683433 - DNA, 25 bp, Homo sapien
tcacggcctgttactgtcccatcag

SEQ ID NO: 4683434 - DNA, 25 bp, Homo sapien
tagtcagacagattgatgggcacac

SEQ ID NO: 4683435 - DNA, 25 bp, Homo sapien
gctgacacgcctccatagacagatg

SEQ ID NO: 4683436 - DNA, 25 bp, Homo sapien
cctgaccctgacattagttggctga

SEQ ID NO: 4683437 - DNA, 25 bp, Homo sapien
gaatggcgcacacctttgtaactgc

SEQ ID NO: 4683438 - DNA, 25 bp, Homo sapien
cataaaagtataataacttggaagt

SEQ ID NO: 4683439 - DNA, 25 bp, Homo sapien
aataacttggaagtagttagaattg

SEQ ID NO: 4683440 - DNA, 25 bp, Homo sapien
ggaagtagttagaattgacaagtaa

SEQ ID NO: 4683441 - DNA, 25 bp, Homo sapien
cttggaagtagttagaattgacaag

SEQ ID NO: 4683442 - DNA, 25 bp, Homo sapien
ctcgggttcgcgggagaggacggtg

SEQ ID NO: 4683443 - DNA, 25 bp, Homo sapien
gcgcgagaggacggtgctaggagac

SEQ ID NO: 4683444 - DNA, 25 bp, Homo sapien
gattgttgttacctctggtgagcga

SEQ ID NO: 4683445 - DNA, 25 bp, Homo sapien
ggcaggtgggtattcttattcttaa

SEQ ID NO: 4683446 - DNA, 25 bp, Homo sapien
atctcttgggatagttatggtttca

SEQ ID NO: 4683447 - DNA, 25 bp, Homo sapien
cacgaaaaagtaagtgtgggaacag

SEQ ID NO: 4683448 - DNA, 25 bp, Homo sapien
tacgtaaatgtccttgtttgtagga

SEQ ID NO: 4683449 - DNA, 25 bp, Homo sapien
taaatgtccttgtttgtaggaaaca

SEQ ID NO: 4683450 - DNA, 25 bp, Homo sapien
tccttgtttgtaggaaacatttctg

SEQ ID NO: 4683451 - DNA, 25 bp, Homo sapien
ggaaacatttctgaagtattcaggg

SEQ ID NO: 4683452 - DNA, 25 bp, Homo sapien
gatacccacgaggaattacagaaaa

SEQ ID NO: 4683453 - DNA, 25 bp, Homo sapien
tccaccttcaaagtcctgctcaaaa

SEQ ID NO: 4683454 - DNA, 25 bp, Homo sapien
ctccgtctctgatacccacgaggaa

SEQ ID NO: 4683455 - DNA, 25 bp, Homo sapien
ccacgaggaattacagaaaaaacag

SEQ ID NO: 4683456 - DNA, 25 bp, Homo sapien
cgtttaggcccaagagtgtatttat

SEQ ID NO: 4683457 - DNA, 25 bp, Homo sapien
gcccaagagtgtatttatctggccc

SEQ ID NO: 4683458 - DNA, 25 bp, Homo sapien
cacatcaagggctcgtttaggccca

SEQ ID NO: 4683459 - DNA, 25 bp, Homo sapien
ggcagaaaagcccacatcaagggct

SEQ ID NO: 4683460 - DNA, 25 bp, Homo sapien
tagcagagactccagatcagggact

SEQ ID NO: 4683461 - DNA, 25 bp, Homo sapien
agggactggatcaagagcataagcg

SEQ ID NO: 4683462 - DNA, 25 bp, Homo sapien
gatcaagagcataagcgtgaggctg

SEQ ID NO: 4683463 - DNA, 25 bp, Homo sapien
tatatcacgcctttcatccccaaat

SEQ ID NO: 4683464 - DNA, 25 bp, Homo sapien
gaggtcctctttgtccccgatggag

SEQ ID NO: 4683465 - DNA, 25 bp, Homo sapien
ccccgatggagcctcaaagctcaaa

SEQ ID NO: 4683466 - DNA, 25 bp, Homo sapien
ttggcgaggtcctctttgtccccga

SEQ ID NO: 4683467 - DNA, 25 bp, Homo sapien
tggagcctcaaagctcaaatttgcc

SEQ ID NO: 4683468 - DNA, 25 bp, Homo sapien
gcaattacagccatcccatggtgca

SEQ ID NO: 4683469 - DNA, 25 bp, Homo sapien
tgcagaagtcagacgcaaggtgatg

SEQ ID NO: 4683470 - DNA, 25 bp, Homo sapien
tgatgtcacgggcaattacagccat

SEQ ID NO: 4683471 - DNA, 25 bp, Homo sapien
tggaagatgtgaagctccaatgcag

SEQ ID NO: 4683472 - DNA, 25 bp, Homo sapien
cagctggacatccatctttcccagg

SEQ ID NO: 4683473 - DNA, 25 bp, Homo sapien
ggctgtgcctctggattccccagtg

SEQ ID NO: 4683474 - DNA, 25 bp, Homo sapien
agcccagcacagagagtgtgtctac

SEQ ID NO: 4683475 - DNA, 25 bp, Homo sapien
acagagagtgtgtctacatagcatc

SEQ ID NO: 4683476 - DNA, 25 bp, Homo sapien
atcatcatcgttgtctttgacatca

SEQ ID NO: 4683477 - DNA, 25 bp, Homo sapien
gattggatccagaccctaatacagt

SEQ ID NO: 4683478 - DNA, 25 bp, Homo sapien
ttctctctctgataggcagccatgc

SEQ ID NO: 4683479 - DNA, 25 bp, Homo sapien
gataggcagccatgcagattggatc

SEQ ID NO: 4683480 - DNA, 25 bp, Homo sapien
cctgagatacgtgctctgaagggaa

SEQ ID NO: 4683481 - DNA, 25 bp, Homo sapien
gaggatccaacagacttcagggtca

SEQ ID NO: 4683482 - DNA, 25 bp, Homo sapien
gaaaagtctgggttccgtcagcatc

SEQ ID NO: 4683483 - DNA, 25 bp, Homo sapien
caggaagagcttctatgaagaggga

SEQ ID NO: 4683484 - DNA, 25 bp, Homo sapien
agtgcttttccttccggctgcactg

SEQ ID NO: 4683485 - DNA, 25 bp, Homo sapien
gcttttccttccggctgcactggct

SEQ ID NO: 4683486 - DNA, 25 bp, Homo sapien
ctgctcgcagtgcttttccttccgg

SEQ ID NO: 4683487 - DNA, 25 bp, Homo sapien
gctcgcagtgcttttccttccggct

SEQ ID NO: 4683488 - DNA, 25 bp, Homo sapien
tacaggtcatgtggccgttccagcc

SEQ ID NO: 4683489 - DNA, 25 bp, Homo sapien
caaatacaggtcatgtggccgttcc

SEQ ID NO: 4683490 - DNA, 25 bp, Homo sapien
gtcatgtggccgttccagccttgct

SEQ ID NO: 4683491 - DNA, 25 bp, Homo sapien
cccaaatacaggtcatgtggccgtt

SEQ ID NO: 4683492 - DNA, 25 bp, Homo sapien
cagtggatctgaagcccaaagagat

SEQ ID NO: 4683493 - DNA, 25 bp, Homo sapien
gaagcccaaagagatgccatttcag

SEQ ID NO: 4683494 - DNA, 25 bp, Homo sapien
ggatctgaagcccaaagagatgcca

SEQ ID NO: 4683495 - DNA, 25 bp, Homo sapien
ctgaagcccaaagagatgccatttc

SEQ ID NO: 4683496 - DNA, 25 bp, Homo sapien
tgggggataatatcatgagcaagag

SEQ ID NO: 4683497 - DNA, 25 bp, Homo sapien
cagaggggagcacgggcccgcctag

SEQ ID NO: 4683498 - DNA, 25 bp, Homo sapien
gataatatcatgagcaagagtcccc

SEQ ID NO: 4683499 - DNA, 25 bp, Homo sapien
tttgtgggggataatatcatgagca

SEQ ID NO: 4683500 - DNA, 25 bp, Homo sapien
gcaggaggacagtaggttccctggc

SEQ ID NO: 4683501 - DNA, 25 bp, Homo sapien
gtgagcaggaggacagtaggttccc

SEQ ID NO: 4683502 - DNA, 25 bp, Homo sapien
gaggacagtaggttccctggctttc

SEQ ID NO: 4683503 - DNA, 25 bp, Homo sapien
tgagcaggaggacagtaggttccct

SEQ ID NO: 4683504 - DNA, 25 bp, Homo sapien
taaacagagcctcctatgtgcccgg

SEQ ID NO: 4683505 - DNA, 25 bp, Homo sapien
gaacgaaatcttggtattagctcca

SEQ ID NO: 4683506 - DNA, 25 bp, Homo sapien
tagcaatgactctaggaacgaaatc

SEQ ID NO: 4683507 - DNA, 25 bp, Homo sapien
tgtgcccggcagtgttctaacatac

SEQ ID NO: 4683508 - DNA, 25 bp, Homo sapien
ttctgacaagggaagcatccccatg

SEQ ID NO: 4683509 - DNA, 25 bp, Homo sapien
aaagcagagctgtgacttgctcagg

SEQ ID NO: 4683510 - DNA, 25 bp, Homo sapien
ggcttgcacatactgggaaatcgag

SEQ ID NO: 4683511 - DNA, 25 bp, Homo sapien
tgctcaggccagacataaaattggg

SEQ ID NO: 4683512 - DNA, 25 bp, Homo sapien
cgttcaataccttcttcctccagat

SEQ ID NO: 4683513 - DNA, 25 bp, Homo sapien
ccttcttcctccagatcaacacagg

SEQ ID NO: 4683514 - DNA, 25 bp, Homo sapien
cttcctccagatcaacacaggagcc

SEQ ID NO: 4683515 - DNA, 25 bp, Homo sapien
tcctccagatcaacacaggagccca

SEQ ID NO: 4683516 - DNA, 25 bp, Homo sapien
gatctcggcaggcacgtcgctggtc

SEQ ID NO: 4683517 - DNA, 25 bp, Homo sapien
ggatgtagtcatcgggcagctctgt

SEQ ID NO: 4683518 - DNA, 25 bp, Homo sapien
tcatcgttccttgctcggcactcag

SEQ ID NO: 4683519 - DNA, 25 bp, Homo sapien
tgctcttctggctgcgcttcaagcg

SEQ ID NO: 4683520 - DNA, 25 bp, Homo sapien
ttccaggcatttgacttaaacaggg

SEQ ID NO: 4683521 - DNA, 25 bp, Homo sapien
agcagaaacagaagcgctctccagc

SEQ ID NO: 4683522 - DNA, 25 bp, Homo sapien
atggatggatagggttctgctgccc

SEQ ID NO: 4683523 - DNA, 25 bp, Homo sapien
gaaggttccaggcatttgacttaaa

SEQ ID NO: 4683524 - DNA, 25 bp, Homo sapien
ctgtgggagaccccccaggggtatg

SEQ ID NO: 4683525 - DNA, 25 bp, Homo sapien
caccggcactgggatctccagcaga

SEQ ID NO: 4683526 - DNA, 25 bp, Homo sapien
tccaatcctgatggggtactgctct

SEQ ID NO: 4683527 - DNA, 25 bp, Homo sapien
tcactgatccaatcctgatggggta

SEQ ID NO: 4683528 - DNA, 25 bp, Homo sapien
tgctctgagcagcaccggcactggg

SEQ ID NO: 4683529 - DNA, 25 bp, Homo sapien
taagaactgagacagacagggcctg

SEQ ID NO: 4683530 - DNA, 25 bp, Homo sapien
cattgaatactcagatagcctgatg

SEQ ID NO: 4683531 - DNA, 25 bp, Homo sapien
tactaagcacaatgttgagcacttc

SEQ ID NO: 4683532 - DNA, 25 bp, Homo sapien
caatgactatcccttcctcttgaag

SEQ ID NO: 4683533 - DNA, 25 bp, Homo sapien
agtccctgaattggagggaagcagt

SEQ ID NO: 4683534 - DNA, 25 bp, Homo sapien
tgcccaaagcagattacaagatcct

SEQ ID NO: 4683535 - DNA, 25 bp, Homo sapien
gattacaagatcctcaaagtccctg

SEQ ID NO: 4683536 - DNA, 25 bp, Homo sapien
aattggagggaagcagtactagaag

SEQ ID NO: 4683537 - DNA, 25 bp, Homo sapien
aaagcctgacttccagcatgcaaga

SEQ ID NO: 4683538 - DNA, 25 bp, Homo sapien
agctccacacgtcccttgtcactgg

SEQ ID NO: 4683539 - DNA, 25 bp, Homo sapien
tccgtagggctacaccatggcagct

SEQ ID NO: 4683540 - DNA, 25 bp, Homo sapien
catgcaagatgagctgccgtgacag

SEQ ID NO: 4683541 - DNA, 25 bp, Homo sapien
gagaactccttacagccagtagcaa

SEQ ID NO: 4683542 - DNA, 25 bp, Homo sapien
tggtaggcccttcataacacgaaag

SEQ ID NO: 4683543 - DNA, 25 bp, Homo sapien
gggcagacaccaacaatcaatcatg

SEQ ID NO: 4683544 - DNA, 25 bp, Homo sapien
taaaataaggaggtcatgggtacca

SEQ ID NO: 4683545 - DNA, 25 bp, Homo sapien
caagtgccccaggaacacgttaact

SEQ ID NO: 4683546 - DNA, 25 bp, Homo sapien
cggtgaccaggacaacgaatgcaca

SEQ ID NO: 4683547 - DNA, 25 bp, Homo sapien
ggttagcgaagtactcaggaggccc

SEQ ID NO: 4683548 - DNA, 25 bp, Homo sapien
ttctactcagcaacagagcccgtct

SEQ ID NO: 4683549 - DNA, 25 bp, Homo sapien
gcacagggaattctctgggcagcag

SEQ ID NO: 4683550 - DNA, 25 bp, Homo sapien
tctttctcggagtgagagacaccct

SEQ ID NO: 4683551 - DNA, 25 bp, Homo sapien
tgcaccagctccaatggcagtgact

SEQ ID NO: 4683552 - DNA, 25 bp, Homo sapien
gaggagcccctgaaacctcaagtgt

SEQ ID NO: 4683553 - DNA, 25 bp, Homo sapien
catgcgcaccttgcaaaatgctgta

SEQ ID NO: 4683554 - DNA, 25 bp, Homo sapien
tagctgactggcagagacctcttgg

SEQ ID NO: 4683555 - DNA, 25 bp, Homo sapien
gatgcgggcatccttatctctcaga

SEQ ID NO: 4683556 - DNA, 25 bp, Homo sapien
ccgtattggctaggacaccctggaa

SEQ ID NO: 4683557 - DNA, 25 bp, Homo sapien
tatgtccagttaccaaacagttccc

SEQ ID NO: 4683558 - DNA, 25 bp, Homo sapien
gttcccatgatcacacgaagtcctt

SEQ ID NO: 4683559 - DNA, 25 bp, Homo sapien
agtgaccctccctgatcacctatgt

SEQ ID NO: 4683560 - DNA, 25 bp, Homo sapien
cttgactcccgctcctgcactttgt

SEQ ID NO: 4683561 - DNA, 25 bp, Homo sapien
gtgagaacacctctgtacctcggtc

SEQ ID NO: 4683562 - DNA, 25 bp, Homo sapien
tgaatgactgtcaagctcttctgct

SEQ ID NO: 4683563 - DNA, 25 bp, Homo sapien
tgtgtctgaatgactgtcaagctct

SEQ ID NO: 4683564 - DNA, 25 bp, Homo sapien
tgtctgaatgactgtcaagctcttc

SEQ ID NO: 4683565 - DNA, 25 bp, Homo sapien
ggctgtgtctgaatgactgtcaagc

SEQ ID NO: 4683566 - DNA, 25 bp, Homo sapien
accccaagaggaagcgtcagtagca

SEQ ID NO: 4683567 - DNA, 25 bp, Homo sapien
gaaacgaactatcagctggcacgat

SEQ ID NO: 4683568 - DNA, 25 bp, Homo sapien
gaggccctgccaacaacctattgaa

SEQ ID NO: 4683569 - DNA, 25 bp, Homo sapien
tttccgagtggctgcagcaaagagc

SEQ ID NO: 4683570 - DNA, 25 bp, Homo sapien
ttccagctaatagcagtggtactgg

SEQ ID NO: 4683571 - DNA, 25 bp, Homo sapien
aaccccagaggcatcaatgtcctga

SEQ ID NO: 4683572 - DNA, 25 bp, Homo sapien
tttaggttcctgtcactctagaggt

SEQ ID NO: 4683573 - DNA, 25 bp, Homo sapien
aattcttttaggaggtattgagcaa

SEQ ID NO: 4683574 - DNA, 25 bp, Homo sapien
cattttgaaaattggttcacagttt

SEQ ID NO: 4683575 - DNA, 25 bp, Homo sapien
tttttacacaatatcctggaaatta

SEQ ID NO: 4683576 - DNA, 25 bp, Homo sapien
cctttgcaatgatttaaactttgga

SEQ ID NO: 4683577 - DNA, 25 bp, Homo sapien
ctggaaattatatcctttgcaatga

SEQ ID NO: 4683578 - DNA, 25 bp, Homo sapien
gccaattgagaaagaaatgaagccc

SEQ ID NO: 4683579 - DNA, 25 bp, Homo sapien
gcagtggactggaaatatgagctca

SEQ ID NO: 4683580 - DNA, 25 bp, Homo sapien
gaagccctatccatttcattaagag

SEQ ID NO: 4683581 - DNA, 25 bp, Homo sapien
gaatgtagagctttatgatcccagg

SEQ ID NO: 4683582 - DNA, 25 bp, Homo sapien
ctgaattacgtaagaaatcagaaag

SEQ ID NO: 4683583 - DNA, 25 bp, Homo sapien
gaattacgtaagaaatcagaaagag

SEQ ID NO: 4683584 - DNA, 25 bp, Homo sapien
aattacgtaagaaatcagaaagagc

SEQ ID NO: 4683585 - DNA, 25 bp, Homo sapien
attacgtaagaaatcagaaagagcc

SEQ ID NO: 4683586 - DNA, 25 bp, Homo sapien
gcttggtcaaaaatccaggtccctg

SEQ ID NO: 4683587 - DNA, 25 bp, Homo sapien
acagatccaccgtgggggctgcctt

SEQ ID NO: 4683588 - DNA, 25 bp, Homo sapien
tgaataccggcttcgcacagatcca

SEQ ID NO: 4683589 - DNA, 25 bp, Homo sapien
gggctgccttcgggcgcttttccat

SEQ ID NO: 4683590 - DNA, 25 bp, Homo sapien
tgtacttcttgccacagattccgca

SEQ ID NO: 4683591 - DNA, 25 bp, Homo sapien
tcggtgcgcccgcacgtgggtctgg

SEQ ID NO: 4683592 - DNA, 25 bp, Homo sapien
cccgcacgtgggtctggaagcagtt

SEQ ID NO: 4683593 - DNA, 25 bp, Homo sapien
ccacagattccgcattcgtaagacc

SEQ ID NO: 4683594 - DNA, 25 bp, Homo sapien
ggctccctcccctgaggtggcttcg

SEQ ID NO: 4683595 - DNA, 25 bp, Homo sapien
ttgggaggctccctcccctgaggtg

SEQ ID NO: 4683596 - DNA, 25 bp, Homo sapien
tgctttgggaggctccctcccctga

SEQ ID NO: 4683597 - DNA, 25 bp, Homo sapien
tccctcccctgaggtggcttcggtg

SEQ ID NO: 4683598 - DNA, 25 bp, Homo sapien
tgttggcgacatacctacacgtgga

SEQ ID NO: 4683599 - DNA, 25 bp, Homo sapien
gatatacacccgtttctgttggcga

SEQ ID NO: 4683600 - DNA, 25 bp, Homo sapien
cagtgctgtcgcagatgtcaaggcc

SEQ ID NO: 4683601 - DNA, 25 bp, Homo sapien
aataagcaattagtgcccctggctg

SEQ ID NO: 4683602 - DNA, 25 bp, Homo sapien
cttcttcccgcagatatcacatgtg

SEQ ID NO: 4683603 - DNA, 25 bp, Homo sapien
gaaacagctgtagtatttgtacttc

SEQ ID NO: 4683604 - DNA, 25 bp, Homo sapien
ctgcgtgcaggtctcggtgctcttg

SEQ ID NO: 4683605 - DNA, 25 bp, Homo sapien
tcttcccgcagatatcacatgtgta

SEQ ID NO: 4683606 - DNA, 25 bp, Homo sapien
ttctcaggggccccttccacactaa

SEQ ID NO: 4683607 - DNA, 25 bp, Homo sapien
gttctcaggggccccttccacacta

SEQ ID NO: 4683608 - DNA, 25 bp, Homo sapien
tcaggggccccttccacactaaaca

SEQ ID NO: 4683609 - DNA, 25 bp, Homo sapien
tctcaggggccccttccacactaaa

SEQ ID NO: 4683610 - DNA, 25 bp, Homo sapien
acctcgtccgtggccacgacacctt

SEQ ID NO: 4683611 - DNA, 25 bp, Homo sapien
gtccgtggccacgacaccttggtcg

SEQ ID NO: 4683612 - DNA, 25 bp, Homo sapien
ccgtggccacgacaccttggtcgaa

SEQ ID NO: 4683613 - DNA, 25 bp, Homo sapien
tcgtccgtggccacgacaccttggt

SEQ ID NO: 4683614 - DNA, 25 bp, Homo sapien
ttggccccagagggaatcccgcata

SEQ ID NO: 4683615 - DNA, 25 bp, Homo sapien
cttggccccagagggaatcccgcat

SEQ ID NO: 4683616 - DNA, 25 bp, Homo sapien
tggccccagagggaatcccgcatac

SEQ ID NO: 4683617 - DNA, 25 bp, Homo sapien
ctctcttttggcactgcctaacttc

SEQ ID NO: 4683618 - DNA, 25 bp, Homo sapien
tcttttggcactgcctaacttcttt

SEQ ID NO: 4683619 - DNA, 25 bp, Homo sapien
tttggcactgcctaacttctttctt

SEQ ID NO: 4683620 - DNA, 25 bp, Homo sapien
ttttggcactgcctaacttctttct

SEQ ID NO: 4683621 - DNA, 25 bp, Homo sapien
ggcgtgtaaggccacatgctcctgg

SEQ ID NO: 4683622 - DNA, 25 bp, Homo sapien
gcagaattcacaggtgtaattgcca

SEQ ID NO: 4683623 - DNA, 25 bp, Homo sapien
gtacttgtactgtttgccgcagaat

SEQ ID NO: 4683624 - DNA, 25 bp, Homo sapien
cctggtagggagtgtagtacttgta

SEQ ID NO: 4683625 - DNA, 25 bp, Homo sapien
tgggcatcagcaccacaagtgggtc

SEQ ID NO: 4683626 - DNA, 25 bp, Homo sapien
tagcggtacctagaagagggccaca

SEQ ID NO: 4683627 - DNA, 25 bp, Homo sapien
aaatcagtaaggtaggctcacgggc

SEQ ID NO: 4683628 - DNA, 25 bp, Homo sapien
actggagttctcacccacgggaaga

SEQ ID NO: 4683629 - DNA, 25 bp, Homo sapien
ttggcaagaacatggagcaagtgga

SEQ ID NO: 4683630 - DNA, 25 bp, Homo sapien
ttaaacagaccaataccatcgaatg

SEQ ID NO: 4683631 - DNA, 25 bp, Homo sapien
ccctcactagaatagctgaattaaa

SEQ ID NO: 4683632 - DNA, 25 bp, Homo sapien
gagcaagtggaactcacaggcacag

SEQ ID NO: 4683633 - DNA, 25 bp, Homo sapien
caaagaataatcatccccaggttgt

SEQ ID NO: 4683634 - DNA, 25 bp, Homo sapien
tactctataaactaaccttggatcg

SEQ ID NO: 4683635 - DNA, 25 bp, Homo sapien
tttagatgcctaagcaagaacttga

SEQ ID NO: 4683636 - DNA, 25 bp, Homo sapien
tatgaccttcattaacacaccactg

SEQ ID NO: 4683637 - DNA, 25 bp, Homo sapien
taagcaaattacaaaagggcatgag

SEQ ID NO: 4683638 - DNA, 25 bp, Homo sapien
gcatgcataggtcaaaacttatcaa

SEQ ID NO: 4683639 - DNA, 25 bp, Homo sapien
gtggtaagcaaattacaaaagggca

SEQ ID NO: 4683640 - DNA, 25 bp, Homo sapien
tagattgtggtgaccgtttcatggg

SEQ ID NO: 4683641 - DNA, 25 bp, Homo sapien
tgaggactggggctgcccattctcc

SEQ ID NO: 4683642 - DNA, 25 bp, Homo sapien
gcccattctcccccgtggagggtca

SEQ ID NO: 4683643 - DNA, 25 bp, Homo sapien
cctcgcctacagtggtggccacgtg

SEQ ID NO: 4683644 - DNA, 25 bp, Homo sapien
gagggtcacccactcctcgcctaca

SEQ ID NO: 4683645 - DNA, 25 bp, Homo sapien
tctgaattggttaacccaggcccaa

SEQ ID NO: 4683646 - DNA, 25 bp, Homo sapien
cacctgaaaagtccgtagaagctgg

SEQ ID NO: 4683647 - DNA, 25 bp, Homo sapien
cacgcttagttatctggaggccacc

SEQ ID NO: 4683648 - DNA, 25 bp, Homo sapien
tgggacacctgacgctttaattgaa

SEQ ID NO: 4683649 - DNA, 25 bp, Homo sapien
ctcccagccggcagagtgagtggcc

SEQ ID NO: 4683650 - DNA, 25 bp, Homo sapien
gggtcacgctctcagtccccgaggg

SEQ ID NO: 4683651 - DNA, 25 bp, Homo sapien
agagggtcacgctctcagtccccga

SEQ ID NO: 4683652 - DNA, 25 bp, Homo sapien
gagagggtcacgctctcagtccccg

SEQ ID NO: 4683653 - DNA, 25 bp, Homo sapien
ctgagagggtcacgctctcagtccc

SEQ ID NO: 4683654 - DNA, 25 bp, Homo sapien
tcagagcccgtgtctggatcatccg

SEQ ID NO: 4683655 - DNA, 25 bp, Homo sapien
cttcgctgccacgaagcgtggagat

SEQ ID NO: 4683656 - DNA, 25 bp, Homo sapien
tctggatgtgaacactcagagcccg

SEQ ID NO: 4683657 - DNA, 25 bp, Homo sapien
tgtctggatcatccggtggctccca

SEQ ID NO: 4683658 - DNA, 25 bp, Homo sapien
aacgtctgggtttgggtggctggag

SEQ ID NO: 4683659 - DNA, 25 bp, Homo sapien
tgcggttgccttgctcgccggagat

SEQ ID NO: 4683660 - DNA, 25 bp, Homo sapien
cccgaatttggagtgcggaacgtct

SEQ ID NO: 4683661 - DNA, 25 bp, Homo sapien
gtaagagggtggcacatcggaccac

SEQ ID NO: 4683662 - DNA, 25 bp, Homo sapien
tcagatttgtcccagatcactacgg

SEQ ID NO: 4683663 - DNA, 25 bp, Homo sapien
tcactacgggactgccactcttgct

SEQ ID NO: 4683664 - DNA, 25 bp, Homo sapien
ctcttgctcttgcaaggcaacaaca

SEQ ID NO: 4683665 - DNA, 25 bp, Homo sapien
ttgctcttgcaaggcaacaacaacc

SEQ ID NO: 4683666 - DNA, 25 bp, Homo sapien
atgtcaaaacaggcccctcaggcca

SEQ ID NO: 4683667 - DNA, 25 bp, Homo sapien
tcaaaacaggcccctcaggccatga

SEQ ID NO: 4683668 - DNA, 25 bp, Homo sapien
ccctcaggccatgatttgggaaaaa

SEQ ID NO: 4683669 - DNA, 25 bp, Homo sapien
gcaaacctccttgtacaaccctctg

SEQ ID NO: 4683670 - DNA, 25 bp, Homo sapien
ctcttacactgctcagctgataatg

SEQ ID NO: 4683671 - DNA, 25 bp, Homo sapien
aggctgcaaactcttacactgctca

SEQ ID NO: 4683672 - DNA, 25 bp, Homo sapien
gaatagctttccttgccacaagtac

SEQ ID NO: 4683673 - DNA, 25 bp, Homo sapien
ctttccttgccacaagtacctctgg

SEQ ID NO: 4683674 - DNA, 25 bp, Homo sapien
catcttcatccttgtgtacgttggg

SEQ ID NO: 4683675 - DNA, 25 bp, Homo sapien
tgaaaaaggccttgtgtggagaagt

SEQ ID NO: 4683676 - DNA, 25 bp, Homo sapien
gaagtgactgcctactccatcttca

SEQ ID NO: 4683677 - DNA, 25 bp, Homo sapien
tccaagacggcagaatcagacttca

SEQ ID NO: 4683678 - DNA, 25 bp, Homo sapien
tgattccagctccatcagctaggtg

SEQ ID NO: 4683679 - DNA, 25 bp, Homo sapien
cgggccccaccgaagtgcatagatg

SEQ ID NO: 4683680 - DNA, 25 bp, Homo sapien
ctgtcagattctgctgccacgggcc

SEQ ID NO: 4683681 - DNA, 25 bp, Homo sapien
cagcatgttttctggtgattccagc

SEQ ID NO: 4683682 - DNA, 25 bp, Homo sapien
cgctggagttctgcgaactgctgtt

SEQ ID NO: 4683683 - DNA, 25 bp, Homo sapien
tctactctccgactgaaagcgcttt

SEQ ID NO: 4683684 - DNA, 25 bp, Homo sapien
gagttctgcgaactgctgttcgtct

SEQ ID NO: 4683685 - DNA, 25 bp, Homo sapien
tggttttgtgctttgccttctactc

SEQ ID NO: 4683686 - DNA, 25 bp, Homo sapien
agggttggaaatcaggggacttgca

SEQ ID NO: 4683687 - DNA, 25 bp, Homo sapien
tctgtaggagagggaaagggttgga

SEQ ID NO: 4683688 - DNA, 25 bp, Homo sapien
ttggaaatcaggggacttgcagttt

SEQ ID NO: 4683689 - DNA, 25 bp, Homo sapien
ggttggaaatcaggggacttgcagt

SEQ ID NO: 4683690 - DNA, 25 bp, Homo sapien
atgtgctccaacaggttgttgtaga

SEQ ID NO: 4683691 - DNA, 25 bp, Homo sapien
ctccaacaggttgttgtagaactgg

SEQ ID NO: 4683692 - DNA, 25 bp, Homo sapien
caggttgttgtagaactggaactgg

SEQ ID NO: 4683693 - DNA, 25 bp, Homo sapien
caacaggttgttgtagaactggaac

SEQ ID NO: 4683694 - DNA, 25 bp, Homo sapien
ggcgatcgggactggttggaggcaa

SEQ ID NO: 4683695 - DNA, 25 bp, Homo sapien
tacaacagcaggtggcgatcgggac

SEQ ID NO: 4683696 - DNA, 25 bp, Homo sapien
acaacagcaggtggcgatcgggact

SEQ ID NO: 4683697 - DNA, 25 bp, Homo sapien
ctggttggaggcaatgttgttttca

SEQ ID NO: 4683698 - DNA, 25 bp, Homo sapien
caaggtcaccgctgtcgcgaatgtc

SEQ ID NO: 4683699 - DNA, 25 bp, Homo sapien
gagtcagggccaacactctgggagt

SEQ ID NO: 4683700 - DNA, 25 bp, Homo sapien
gatcatgctgttgggtgttaaacca

SEQ ID NO: 4683701 - DNA, 25 bp, Homo sapien
ggatttcagtgaccgagaaggcccc

SEQ ID NO: 4683702 - DNA, 25 bp, Homo sapien
tgcttttgggtaacgcacgaccagt

SEQ ID NO: 4683703 - DNA, 25 bp, Homo sapien
ttggccttggccgtgaacagcttct

SEQ ID NO: 4683704 - DNA, 25 bp, Homo sapien
catatcttctggactgagcagccgc

SEQ ID NO: 4683705 - DNA, 25 bp, Homo sapien
catatttacacacccgcttctggcg

SEQ ID NO: 4683706 - DNA, 25 bp, Homo sapien
taaagcatgttggatttcagaaaca

SEQ ID NO: 4683707 - DNA, 25 bp, Homo sapien
ttaaagcatgttggatttcagaaac

SEQ ID NO: 4683708 - DNA, 25 bp, Homo sapien
aaagcatgttggatttcagaaacat

SEQ ID NO: 4683709 - DNA, 25 bp, Homo sapien
agcatgttggatttcagaaacatga

SEQ ID NO: 4683710 - DNA, 25 bp, Homo sapien
ccttgtgtgggtcaaagtgccggtc

SEQ ID NO: 4683711 - DNA, 25 bp, Homo sapien
tggtgacaccagtttccggagggaa

SEQ ID NO: 4683712 - DNA, 25 bp, Homo sapien
tatctaactggacaaggcagcccca

SEQ ID NO: 4683713 - DNA, 25 bp, Homo sapien
tgacagaaccgcctcttgtgaaggg

SEQ ID NO: 4683714 - DNA, 25 bp, Homo sapien
gagggacaaccctcaacgctgcagt

SEQ ID NO: 4683715 - DNA, 25 bp, Homo sapien
tggacctgagattccttgggctact

SEQ ID NO: 4683716 - DNA, 25 bp, Homo sapien
taccaatgctcttggtggacctgag

SEQ ID NO: 4683717 - DNA, 25 bp, Homo sapien
ccgtggcccagatggtaccaatgct

SEQ ID NO: 4683718 - DNA, 25 bp, Homo sapien
taaatcatcggccttgttaggagcc

SEQ ID NO: 4683719 - DNA, 25 bp, Homo sapien
caaagctatgaacttcgggcggctc

SEQ ID NO: 4683720 - DNA, 25 bp, Homo sapien
catgagctcgtttcaccgcgtagga

SEQ ID NO: 4683721 - DNA, 25 bp, Homo sapien
tgactctttaaagcgacacccgtgg

SEQ ID NO: 4683722 - DNA, 25 bp, Homo sapien
aaagctttgcagtcccctgggtcag

SEQ ID NO: 4683723 - DNA, 25 bp, Homo sapien
gctagttcagtcctgggttcgcccc

SEQ ID NO: 4683724 - DNA, 25 bp, Homo sapien
tagctcattggcttgagggaccagg

SEQ ID NO: 4683725 - DNA, 25 bp, Homo sapien
tcctaagggccggtggctagttcag

SEQ ID NO: 4683726 - DNA, 25 bp, Homo sapien
agatattgctctgggacttctgtcg

SEQ ID NO: 4683727 - DNA, 25 bp, Homo sapien
ttcctgtagcatggaaactgcactt

SEQ ID NO: 4683728 - DNA, 25 bp, Homo sapien
ggagctcttccctaattttgcctga

SEQ ID NO: 4683729 - DNA, 25 bp, Homo sapien
ggttatatcatacggccagtggctt

SEQ ID NO: 4683730 - DNA, 25 bp, Homo sapien
cctgtttttgtggatatgatctgaa

SEQ ID NO: 4683731 - DNA, 25 bp, Homo sapien
ttaatccagatgtcaactaaatctg

SEQ ID NO: 4683732 - DNA, 25 bp, Homo sapien
taatgactccccttgcaaaagagtg

SEQ ID NO: 4683733 - DNA, 25 bp, Homo sapien
caccatgttcatcctttcagatttt

SEQ ID NO: 4683734 - DNA, 25 bp, Homo sapien
ccaggctacagggatcgattggagc

SEQ ID NO: 4683735 - DNA, 25 bp, Homo sapien
tggcccttctgttgctagaccgagc

SEQ ID NO: 4683736 - DNA, 25 bp, Homo sapien
tataccaaggcagaggagcccatag

SEQ ID NO: 4683737 - DNA, 25 bp, Homo sapien
tagaccgagcctgtgggatatacca

SEQ ID NO: 4683738 - DNA, 25 bp, Homo sapien
gagccagccacgattttccagtttc

SEQ ID NO: 4683739 - DNA, 25 bp, Homo sapien
ttccagagagagtcgtaggactcga

SEQ ID NO: 4683740 - DNA, 25 bp, Homo sapien
gtttggatgattcccgctggagcca

SEQ ID NO: 4683741 - DNA, 25 bp, Homo sapien
agttcacactccagctcggcaaaac

SEQ ID NO: 4683742 - DNA, 25 bp, Homo sapien
ttagaggttttcaacagtggtggct

SEQ ID NO: 4683743 - DNA, 25 bp, Homo sapien
agtggtggcttcctggaaggccaga

SEQ ID NO: 4683744 - DNA, 25 bp, Homo sapien
tggtggcttcctggaaggccagaat

SEQ ID NO: 4683745 - DNA, 25 bp, Homo sapien
acagtggtggcttcctggaaggcca

SEQ ID NO: 4683746 - DNA, 25 bp, Homo sapien
tgctagagggtcctataaccaaaag

SEQ ID NO: 4683747 - DNA, 25 bp, Homo sapien
caagagaagccaagactgtggcaag

SEQ ID NO: 4683748 - DNA, 25 bp, Homo sapien
gggcagtggttattagttctacaga

SEQ ID NO: 4683749 - DNA, 25 bp, Homo sapien
ctccagcagggtggctttgatagtt

SEQ ID NO: 4683750 - DNA, 25 bp, Homo sapien
gaaggcttggagtatgatcccccca

SEQ ID NO: 4683751 - DNA, 25 bp, Homo sapien
tgaaggcttggagtatgatcccccc

SEQ ID NO: 4683752 - DNA, 25 bp, Homo sapien
aaggcttggagtatgatccccccat

SEQ ID NO: 4683753 - DNA, 25 bp, Homo sapien
cctccatgcagataaggcgggtggg

SEQ ID NO: 4683754 - DNA, 25 bp, Homo sapien
ttagctgccagagcggcaagtcagc

SEQ ID NO: 4683755 - DNA, 25 bp, Homo sapien
tgccagagcggcaagtcagcagccg

SEQ ID NO: 4683756 - DNA, 25 bp, Homo sapien
cagataaggcgggtggggcttccca

SEQ ID NO: 4683757 - DNA, 25 bp, Homo sapien
caatgagtcacttgcagagtgaggg

SEQ ID NO: 4683758 - DNA, 25 bp, Homo sapien
cctgctctgttagagggtgactgtc

SEQ ID NO: 4683759 - DNA, 25 bp, Homo sapien
tagagggtgactgtcttattccaac

SEQ ID NO: 4683760 - DNA, 25 bp, Homo sapien
caacaaggagccacccctagggtgg

SEQ ID NO: 4683761 - DNA, 25 bp, Homo sapien
gacccaatgagcaccagaatagcca

SEQ ID NO: 4683762 - DNA, 25 bp, Homo sapien
gagcaccagaatagccatatctggg

SEQ ID NO: 4683763 - DNA, 25 bp, Homo sapien
tcagaggccctttcggcctcaaaat

SEQ ID NO: 4683764 - DNA, 25 bp, Homo sapien
cgttttcatcctgatggacccaatg

SEQ ID NO: 4683765 - DNA, 25 bp, Homo sapien
ctgtgctgggcattttgaccagggc

SEQ ID NO: 4683766 - DNA, 25 bp, Homo sapien
tgtgctgggcattttgaccagggct

SEQ ID NO: 4683767 - DNA, 25 bp, Homo sapien
gaccagggctgatctgcagacgcct

SEQ ID NO: 4683768 - DNA, 25 bp, Homo sapien
gggctgatctgcagacgcctccagc

SEQ ID NO: 4683769 - DNA, 25 bp, Homo sapien
gccttttaaaccctggctgcacgcg

SEQ ID NO: 4683770 - DNA, 25 bp, Homo sapien
cgagcaaggtgtctggtttcaacaa

SEQ ID NO: 4683771 - DNA, 25 bp, Homo sapien
catttgtattcatgggtccccgcag

SEQ ID NO: 4683772 - DNA, 25 bp, Homo sapien
tcctccggcgcctaacggcatttgt

SEQ ID NO: 4683773 - DNA, 25 bp, Homo sapien
cgcggagggcggtggaagctgcctc

SEQ ID NO: 4683774 - DNA, 25 bp, Homo sapien
gaggcagagcaaggccgggtgaggg

SEQ ID NO: 4683775 - DNA, 25 bp, Homo sapien
gcccatggtcccaggagtccgggcg

SEQ ID NO: 4683776 - DNA, 25 bp, Homo sapien
agatgatcaaacttttggaggcggg

SEQ ID NO: 4683777 - DNA, 25 bp, Homo sapien
gccccccgcgccgatcccgctccca

SEQ ID NO: 4683778 - DNA, 25 bp, Homo sapien
ccccccgcgccgatcccgctcccat

SEQ ID NO: 4683779 - DNA, 25 bp, Homo sapien
caaacgagactaagatccaggagaa

SEQ ID NO: 4683780 - DNA, 25 bp, Homo sapien
caggcaaacgagactaagatccagg

SEQ ID NO: 4683781 - DNA, 25 bp, Homo sapien
caggtgacaggcaaacgagactaag

SEQ ID NO: 4683782 - DNA, 25 bp, Homo sapien
tgacaggcaaacgagactaagatcc

SEQ ID NO: 4683783 - DNA, 25 bp, Homo sapien
tgggactgcagtcttgagcctggcc

SEQ ID NO: 4683784 - DNA, 25 bp, Homo sapien
tcaccagagcttggtaaagatgtcc

SEQ ID NO: 4683785 - DNA, 25 bp, Homo sapien
cagagcttggtaaagatgtcctagg

SEQ ID NO: 4683786 - DNA, 25 bp, Homo sapien
ctgtcaccagagcttggtaaagatg

SEQ ID NO: 4683787 - DNA, 25 bp, Homo sapien
tcctaggggtctgacaggtttcacc

SEQ ID NO: 4683788 - DNA, 25 bp, Homo sapien
gctgcgtaaagatgaagcccgactg

SEQ ID NO: 4683789 - DNA, 25 bp, Homo sapien
gcccgtcgtgcatgtcgaggtcgaa

SEQ ID NO: 4683790 - DNA, 25 bp, Homo sapien
tcaaactggactgcatgcgggttca

SEQ ID NO: 4683791 - DNA, 25 bp, Homo sapien
cagtaattgtgagcgacctgcgtca

SEQ ID NO: 4683792 - DNA, 25 bp, Homo sapien
gcagggcgaggtcggactggaaggt

SEQ ID NO: 4683793 - DNA, 25 bp, Homo sapien
gcctagcagggcgaggtcggactgg

SEQ ID NO: 4683794 - DNA, 25 bp, Homo sapien
actggtacgtgtcagcctgtccaca

SEQ ID NO: 4683795 - DNA, 25 bp, Homo sapien
gggactggtacgtgtcagcctgtcc

SEQ ID NO: 4683796 - DNA, 25 bp, Homo sapien
cgttactggctgacagcttggcagg

SEQ ID NO: 4683797 - DNA, 25 bp, Homo sapien
tcaagtgcgttactggctgacagct

SEQ ID NO: 4683798 - DNA, 25 bp, Homo sapien
ggagcatgggatcaagtgcgttact

SEQ ID NO: 4683799 - DNA, 25 bp, Homo sapien
tggtagagccgccaacagaggctgg

SEQ ID NO: 4683800 - DNA, 25 bp, Homo sapien
tggttgagcggccgcagggcgaggc

SEQ ID NO: 4683801 - DNA, 25 bp, Homo sapien
ttgagcggccgcagggcgaggcgtt

SEQ ID NO: 4683802 - DNA, 25 bp, Homo sapien
tgtgatggttgagcggccgcagggc

SEQ ID NO: 4683803 - DNA, 25 bp, Homo sapien
ctgtgatggttgagcggccgcaggg

SEQ ID NO: 4683804 - DNA, 25 bp, Homo sapien
tttgatgggcacaattgaagtagaa

SEQ ID NO: 4683805 - DNA, 25 bp, Homo sapien
cttttgatgggcacaattgaagtag

SEQ ID NO: 4683806 - DNA, 25 bp, Homo sapien
gcttttgatgggcacaattgaagta

SEQ ID NO: 4683807 - DNA, 25 bp, Homo sapien
gggcttttgatgggcacaattgaag

SEQ ID NO: 4683808 - DNA, 25 bp, Homo sapien
gcctcagtccgagctagtgtgggaa

SEQ ID NO: 4683809 - DNA, 25 bp, Homo sapien
cgaagttggaggtaccatcgtggct

SEQ ID NO: 4683810 - DNA, 25 bp, Homo sapien
tggtggccgagtactcctggtagaa

SEQ ID NO: 4683811 - DNA, 25 bp, Homo sapien
cagaggccggcttactggcatggct

SEQ ID NO: 4683812 - DNA, 25 bp, Homo sapien
cttgggtccggctttctttgaggct

SEQ ID NO: 4683813 - DNA, 25 bp, Homo sapien
tgggtccggctttctttgaggcttc

SEQ ID NO: 4683814 - DNA, 25 bp, Homo sapien
ttctttgaggcttccgatccaatgg

SEQ ID NO: 4683815 - DNA, 25 bp, Homo sapien
ggcttccgatccaatgggcttcttg

SEQ ID NO: 4683816 - DNA, 25 bp, Homo sapien
gctgtctggggctaggcctggttgt

SEQ ID NO: 4683817 - DNA, 25 bp, Homo sapien
tcagatcgctcaaggggacatccct

SEQ ID NO: 4683818 - DNA, 25 bp, Homo sapien
ttgcgccggggccaataccagggcc

SEQ ID NO: 4683819 - DNA, 25 bp, Homo sapien
gaggacaggaattgcgccggggcca

SEQ ID NO: 4683820 - DNA, 25 bp, Homo sapien
aaaggcgtagatcctgccaggtgga

SEQ ID NO: 4683821 - DNA, 25 bp, Homo sapien
ctgccaggtggaagatcgaatagcc

SEQ ID NO: 4683822 - DNA, 25 bp, Homo sapien
agagggaaaggcgtagatcctgcca

SEQ ID NO: 4683823 - DNA, 25 bp, Homo sapien
cgaatagccactgctcgtgggccgg

SEQ ID NO: 4683824 - DNA, 25 bp, Homo sapien
agtcccccactggagctccaagcag

SEQ ID NO: 4683825 - DNA, 25 bp, Homo sapien
tactaggggcaaccacttgaccaat

SEQ ID NO: 4683826 - DNA, 25 bp, Homo sapien
ggcaaccacttgaccaatgccccag

SEQ ID NO: 4683827 - DNA, 25 bp, Homo sapien
tctttactaggggcaaccacttgac

SEQ ID NO: 4683828 - DNA, 25 bp, Homo sapien
ggcaatgatgcatttagcagagcca

SEQ ID NO: 4683829 - DNA, 25 bp, Homo sapien
caggctcagcatggatcagtcacag

SEQ ID NO: 4683830 - DNA, 25 bp, Homo sapien
ccttcaggaacacgctgggagcctt

SEQ ID NO: 4683831 - DNA, 25 bp, Homo sapien
gaagtcagggaccacaagttgcatc

SEQ ID NO: 4683832 - DNA, 25 bp, Homo sapien
gacaaagattctaccagcttccggg

SEQ ID NO: 4683833 - DNA, 25 bp, Homo sapien
ccagggccaagctcaatttttccat

SEQ ID NO: 4683834 - DNA, 25 bp, Homo sapien
tcaggacgacctgcatttcgtaagg

SEQ ID NO: 4683835 - DNA, 25 bp, Homo sapien
caaaggtcatacagcaccaggcatc

SEQ ID NO: 4683836 - DNA, 25 bp, Homo sapien
gccagtggcctgatcgtgaataaat

SEQ ID NO: 4683837 - DNA, 25 bp, Homo sapien
gatagatagtcacagagcacgtggt

SEQ ID NO: 4683838 - DNA, 25 bp, Homo sapien
ctctgggatgattcacgaggccggg

SEQ ID NO: 4683839 - DNA, 25 bp, Homo sapien
cctgaagcctgagcgggtgactctg

SEQ ID NO: 4683840 - DNA, 25 bp, Homo sapien
gtggaaaaacgctgccatttctttc

SEQ ID NO: 4683841 - DNA, 25 bp, Homo sapien
tgcctgttctctccgcagtggaaaa

SEQ ID NO: 4683842 - DNA, 25 bp, Homo sapien
tgctcgtggcgagcacgggtgcccc

SEQ ID NO: 4683843 - DNA, 25 bp, Homo sapien
tttgctcgtggcgagcacgggtgcc

SEQ ID NO: 4683844 - DNA, 25 bp, Homo sapien
cactttgctcgtggcgagcacgggt

SEQ ID NO: 4683845 - DNA, 25 bp, Homo sapien
cccactttgctcgtggcgagcacgg

SEQ ID NO: 4683846 - DNA, 25 bp, Homo sapien
gaggcccacgtgcaccagggattcc

SEQ ID NO: 4683847 - DNA, 25 bp, Homo sapien
ccgaggcccacgtgcaccagggatt

SEQ ID NO: 4683848 - DNA, 25 bp, Homo sapien
aggcccacgtgcaccagggattcca

SEQ ID NO: 4683849 - DNA, 25 bp, Homo sapien
cgaggcccacgtgcaccagggattc

SEQ ID NO: 4683850 - DNA, 25 bp, Homo sapien
gattcatcgggctaactgtgtgtga

SEQ ID NO: 4683851 - DNA, 25 bp, Homo sapien
tgaggagaggcaccctcaagggtcc

SEQ ID NO: 4683852 - DNA, 25 bp, Homo sapien
aatataaatagagccctaagagccg

SEQ ID NO: 4683853 - DNA, 25 bp, Homo sapien
tagagtcttccagcacagtaatata

SEQ ID NO: 4683854 - DNA, 25 bp, Homo sapien
ggatttccataaggcccaggaggac

SEQ ID NO: 4683855 - DNA, 25 bp, Homo sapien
tggatttccataaggcccaggagga

SEQ ID NO: 4683856 - DNA, 25 bp, Homo sapien
agacctggatttccataaggcccag

SEQ ID NO: 4683857 - DNA, 25 bp, Homo sapien
cctggatttccataaggcccaggag

SEQ ID NO: 4683858 - DNA, 25 bp, Homo sapien
tggcacatctgttagcaagattggg

SEQ ID NO: 4683859 - DNA, 25 bp, Homo sapien
gctaccatgggcctggtactgaggt

SEQ ID NO: 4683860 - DNA, 25 bp, Homo sapien
catggcacatctgttagcaagattg

SEQ ID NO: 4683861 - DNA, 25 bp, Homo sapien
cctggtactgaggttccacagtgct

SEQ ID NO: 4683862 - DNA, 25 bp, Homo sapien
tgagtctagcagagggatcgtcttc

SEQ ID NO: 4683863 - DNA, 25 bp, Homo sapien
gagtctagcagagggatcgtcttcc

SEQ ID NO: 4683864 - DNA, 25 bp, Homo sapien
cctcaaaccacccatctctcccacc

SEQ ID NO: 4683865 - DNA, 25 bp, Homo sapien
atctctcccacccttgagtctagca

SEQ ID NO: 4683866 - DNA, 25 bp, Homo sapien
ttggaacatgggatatgtgggtagc

SEQ ID NO: 4683867 - DNA, 25 bp, Homo sapien
tgtgctggagctgacaagctccctt

SEQ ID NO: 4683868 - DNA, 25 bp, Homo sapien
ccctgctggattggaacatgggata

SEQ ID NO: 4683869 - DNA, 25 bp, Homo sapien
tgctggagctgacaagctcccttcc

SEQ ID NO: 4683870 - DNA, 25 bp, Homo sapien
gggcctttcctggtgagagccctgg

SEQ ID NO: 4683871 - DNA, 25 bp, Homo sapien
tggtgagagccctgggtcccctttc

SEQ ID NO: 4683872 - DNA, 25 bp, Homo sapien
ctggtgagagccctgggtccccttt

SEQ ID NO: 4683873 - DNA, 25 bp, Homo sapien
cctttcctggtgagagccctgggtc

SEQ ID NO: 4683874 - DNA, 25 bp, Homo sapien
tcatccactcccctcttccctgaga

SEQ ID NO: 4683875 - DNA, 25 bp, Homo sapien
ctcttccctgagaactggggtccct

SEQ ID NO: 4683876 - DNA, 25 bp, Homo sapien
actcccctcttccctgagaactggg

SEQ ID NO: 4683877 - DNA, 25 bp, Homo sapien
tcttccctgagaactggggtccctg

SEQ ID NO: 4683878 - DNA, 25 bp, Homo sapien
aggtcctggattcccggagagccca

SEQ ID NO: 4683879 - DNA, 25 bp, Homo sapien
tagcttcaaatgacagggccccaga

SEQ ID NO: 4683880 - DNA, 25 bp, Homo sapien
taaaccattatcttgtgcagcgccc

SEQ ID NO: 4683881 - DNA, 25 bp, Homo sapien
tgctgaccgcaagaagtgggcccgt

SEQ ID NO: 4683882 - DNA, 25 bp, Homo sapien
gactttccagtttgcgatcggtgcc

SEQ ID NO: 4683883 - DNA, 25 bp, Homo sapien
cctgccggtccaggatagcccttgt

SEQ ID NO: 4683884 - DNA, 25 bp, Homo sapien
tgccggtccaggatagcccttgtgt

SEQ ID NO: 4683885 - DNA, 25 bp, Homo sapien
gccggtccaggatagcccttgtgtc

SEQ ID NO: 4683886 - DNA, 25 bp, Homo sapien
ccggtccaggatagcccttgtgtcc

SEQ ID NO: 4683887 - DNA, 25 bp, Homo sapien
aggaacagagagaaacataaggaaa

SEQ ID NO: 4683888 - DNA, 25 bp, Homo sapien
ctgcaaaggaacagagagaaacata

SEQ ID NO: 4683889 - DNA, 25 bp, Homo sapien
aggaaaagaaagaccctgcccagct

SEQ ID NO: 4683890 - DNA, 25 bp, Homo sapien
acagagagaaacataaggaaaagaa

SEQ ID NO: 4683891 - DNA, 25 bp, Homo sapien
tgggctgccctcaggtcctggctgc

SEQ ID NO: 4683892 - DNA, 25 bp, Homo sapien
ctttggcccctgggctgccctcagg

SEQ ID NO: 4683893 - DNA, 25 bp, Homo sapien
ccctgggctgccctcaggtcctggc

SEQ ID NO: 4683894 - DNA, 25 bp, Homo sapien
ttggcccctgggctgccctcaggtc

SEQ ID NO: 4683895 - DNA, 25 bp, Homo sapien
cacagagcttccagaagccatatac

SEQ ID NO: 4683896 - DNA, 25 bp, Homo sapien
cagagcttccagaagccatatactg

SEQ ID NO: 4683897 - DNA, 25 bp, Homo sapien
catggccacagagcttccagaagcc

SEQ ID NO: 4683898 - DNA, 25 bp, Homo sapien
gagcttccagaagccatatactgca

SEQ ID NO: 4683899 - DNA, 25 bp, Homo sapien
tgcctttggggccgggatctcctac

SEQ ID NO: 4683900 - DNA, 25 bp, Homo sapien
ctgcctttggggccgggatctccta

SEQ ID NO: 4683901 - DNA, 25 bp, Homo sapien
gacgacaggcaattcaagtggccca

SEQ ID NO: 4683902 - DNA, 25 bp, Homo sapien
gtggcccatactggctcccttgtaa

SEQ ID NO: 4683903 - DNA, 25 bp, Homo sapien
ggaggcctctgaagattcgacgaca

SEQ ID NO: 4683904 - DNA, 25 bp, Homo sapien
gcttgggcagcattcccacaccagg

SEQ ID NO: 4683905 - DNA, 25 bp, Homo sapien
tccggtggctcctcgatgacatagg

SEQ ID NO: 4683906 - DNA, 25 bp, Homo sapien
gcaagtgtatatgcccatggactgc

SEQ ID NO: 4683907 - DNA, 25 bp, Homo sapien
ggccttgaggcaagtgtatatgccc

SEQ ID NO: 4683908 - DNA, 25 bp, Homo sapien
gtggctcctcgatgacataggcctt

SEQ ID NO: 4683909 - DNA, 25 bp, Homo sapien
ccctggcaggccgaagagccctggg

SEQ ID NO: 4683910 - DNA, 25 bp, Homo sapien
ggcaggccgaagagccctgggagcc

SEQ ID NO: 4683911 - DNA, 25 bp, Homo sapien
gcaggccgaagagccctgggagccc

SEQ ID NO: 4683912 - DNA, 25 bp, Homo sapien
agaccctggcaggccgaagagccct

SEQ ID NO: 4683913 - DNA, 25 bp, Homo sapien
cggcatacccatcttgcccctcttg

SEQ ID NO: 4683914 - DNA, 25 bp, Homo sapien
gcgtaatagacacggaaaatcttta

SEQ ID NO: 4683915 - DNA, 25 bp, Homo sapien
gctagagtctgcgtaatagacacgg

SEQ ID NO: 4683916 - DNA, 25 bp, Homo sapien
ttccccgctagagtctgcgtaatag

SEQ ID NO: 4683917 - DNA, 25 bp, Homo sapien
cccacactcaaagcagggggagaag

SEQ ID NO: 4683918 - DNA, 25 bp, Homo sapien
agacaggagctaccccagaggggtc

SEQ ID NO: 4683919 - DNA, 25 bp, Homo sapien
agccaggccccagtcacgccgtgtg

SEQ ID NO: 4683920 - DNA, 25 bp, Homo sapien
agggagacaggagctaccccagagg

SEQ ID NO: 4683921 - DNA, 25 bp, Homo sapien
aggccccagtcacgccgtgtgccag

SEQ ID NO: 4683922 - DNA, 25 bp, Homo sapien
cactgcccataaaccccattgtcct

SEQ ID NO: 4683923 - DNA, 25 bp, Homo sapien
tcctctggctttgcgtgtgcatgag

SEQ ID NO: 4683924 - DNA, 25 bp, Homo sapien
tggacagagccggatgacaccaaga

SEQ ID NO: 4683925 - DNA, 25 bp, Homo sapien
gatgacaccaagacgatgtggagac

SEQ ID NO: 4683926 - DNA, 25 bp, Homo sapien
agacaccgggaacaaaccaactgag

SEQ ID NO: 4683927 - DNA, 25 bp, Homo sapien
cagccactgagatcaaagacaccgg

SEQ ID NO: 4683928 - DNA, 25 bp, Homo sapien
tccaggcgaagagtctagggaacct

SEQ ID NO: 4683929 - DNA, 25 bp, Homo sapien
gcagagggaccctggtatctcattc

SEQ ID NO: 4683930 - DNA, 25 bp, Homo sapien
tctggcctctgaactttggggtaga

SEQ ID NO: 4683931 - DNA, 25 bp, Homo sapien
gcctctgaactttggggtagaagga

SEQ ID NO: 4683932 - DNA, 25 bp, Homo sapien
tggcctctgaactttggggtagaag

SEQ ID NO: 4683933 - DNA, 25 bp, Homo sapien
ctctggcctctgaactttggggtag

SEQ ID NO: 4683934 - DNA, 25 bp, Homo sapien
tgtagaagctgctcaaacgcgtgtc

SEQ ID NO: 4683935 - DNA, 25 bp, Homo sapien
tagatcgtctcacctcctgggacaa

SEQ ID NO: 4683936 - DNA, 25 bp, Homo sapien
gactcggttaggcaacatcacatgg

SEQ ID NO: 4683937 - DNA, 25 bp, Homo sapien
catatgagctatgcacgggcaaagc

SEQ ID NO: 4683938 - DNA, 25 bp, Homo sapien
aatatcagctgtaaggacgccttcg

SEQ ID NO: 4683939 - DNA, 25 bp, Homo sapien
gattgtggcacgttcttcaaaagcc

SEQ ID NO: 4683940 - DNA, 25 bp, Homo sapien
tccccactggtcaaggaggagaagg

SEQ ID NO: 4683941 - DNA, 25 bp, Homo sapien
gcagacagtgcggtcctgaggtcac

SEQ ID NO: 4683942 - DNA, 25 bp, Homo sapien
ccatccagtccaggagggcctcttt

SEQ ID NO: 4683943 - DNA, 25 bp, Homo sapien
aggatttccatccagtccaggaggg

SEQ ID NO: 4683944 - DNA, 25 bp, Homo sapien
gcctctttccccaaagactccagga

SEQ ID NO: 4683945 - DNA, 25 bp, Homo sapien
ttccatccagtccaggagggcctct

SEQ ID NO: 4683946 - DNA, 25 bp, Homo sapien
tgtggaactgaattagcgcctaatc

SEQ ID NO: 4683947 - DNA, 25 bp, Homo sapien
ggtgctggttatgaacgcagcagcc

SEQ ID NO: 4683948 - DNA, 25 bp, Homo sapien
cccaggtccgcagggttctgaggtc

SEQ ID NO: 4683949 - DNA, 25 bp, Homo sapien
ccggcctcaggctggaattctgatc

SEQ ID NO: 4683950 - DNA, 25 bp, Homo sapien
agaccaaggtggttacttgtcccat

SEQ ID NO: 4683951 - DNA, 25 bp, Homo sapien
ccaggggggcctggcaggcccagtt

SEQ ID NO: 4683952 - DNA, 25 bp, Homo sapien
cggggactccaggggggcctggcag

SEQ ID NO: 4683953 - DNA, 25 bp, Homo sapien
aggggggcctggcaggcccagttct

SEQ ID NO: 4683954 - DNA, 25 bp, Homo sapien
gggggcctggcaggcccagttctcc

SEQ ID NO: 4683955 - DNA, 25 bp, Homo sapien
ctgtgacatacttagccactgacat

SEQ ID NO: 4683956 - DNA, 25 bp, Homo sapien
tagctgtgacatacttagccactga

SEQ ID NO: 4683957 - DNA, 25 bp, Homo sapien
gctgtgacatacttagccactgaca

SEQ ID NO: 4683958 - DNA, 25 bp, Homo sapien
cttagctgtgacatacttagccact

SEQ ID NO: 4683959 - DNA, 25 bp, Homo sapien
taaacttcataaagatccctgccca

SEQ ID NO: 4683960 - DNA, 25 bp, Homo sapien
gcccaagctcatttctagactgctg

SEQ ID NO: 4683961 - DNA, 25 bp, Homo sapien
tgggcttccaaagacgcaactctgt

SEQ ID NO: 4683962 - DNA, 25 bp, Homo sapien
catttgactattttggaccctcatg

SEQ ID NO: 4683963 - DNA, 25 bp, Homo sapien
atcggacccaacactcctaagtcac

SEQ ID NO: 4683964 - DNA, 25 bp, Homo sapien
aatcggacccaacactcctaagtca

SEQ ID NO: 4683965 - DNA, 25 bp, Homo sapien
tcggacccaacactcctaagtcacc

SEQ ID NO: 4683966 - DNA, 25 bp, Homo sapien
caatcggacccaacactcctaagtc

SEQ ID NO: 4683967 - DNA, 25 bp, Homo sapien
gcctgaatcgggggaacatcccttg

SEQ ID NO: 4683968 - DNA, 25 bp, Homo sapien
gaatcgggggaacatcccttgctta

SEQ ID NO: 4683969 - DNA, 25 bp, Homo sapien
ctgaatcgggggaacatcccttgct

SEQ ID NO: 4683970 - DNA, 25 bp, Homo sapien
aggcctgaatcgggggaacatccct

SEQ ID NO: 4683971 - DNA, 25 bp, Homo sapien
taaatgacatacagatgatgcctgg

SEQ ID NO: 4683972 - DNA, 25 bp, Homo sapien
agcatcatctaaggtcacccttcct

SEQ ID NO: 4683973 - DNA, 25 bp, Homo sapien
ctcagctagaggaggatgtctggcc

SEQ ID NO: 4683974 - DNA, 25 bp, Homo sapien
cttccttctgggctgaaatgggtcg

SEQ ID NO: 4683975 - DNA, 25 bp, Homo sapien
ttcagtccgggctcccccacgctgc

SEQ ID NO: 4683976 - DNA, 25 bp, Homo sapien
tttcagtccgggctcccccacgctg

SEQ ID NO: 4683977 - DNA, 25 bp, Homo sapien
cagtccgggctcccccacgctgccc

SEQ ID NO: 4683978 - DNA, 25 bp, Homo sapien
ctttcagtccgggctcccccacgct

SEQ ID NO: 4683979 - DNA, 25 bp, Homo sapien
gctgaggttttcgggctcccagaac

SEQ ID NO: 4683980 - DNA, 25 bp, Homo sapien
tgctgaggttttcgggctcccagaa

SEQ ID NO: 4683981 - DNA, 25 bp, Homo sapien
tgctcctgcactatctgctgaggtt

SEQ ID NO: 4683982 - DNA, 25 bp, Homo sapien
ctgctcctgcactatctgctgaggt

SEQ ID NO: 4683983 - DNA, 25 bp, Homo sapien
aactttctacttaccagctgcgtgg

SEQ ID NO: 4683984 - DNA, 25 bp, Homo sapien
ctttctacttaccagctgcgtggcc

SEQ ID NO: 4683985 - DNA, 25 bp, Homo sapien
ggtaactttctacttaccagctgcg

SEQ ID NO: 4683986 - DNA, 25 bp, Homo sapien
taactttctacttaccagctgcgtg

SEQ ID NO: 4683987 - DNA, 25 bp, Homo sapien
gcgctgatgtctcaaaccttgggat

SEQ ID NO: 4683988 - DNA, 25 bp, Homo sapien
tgatcggaacacagccttaaggctc

SEQ ID NO: 4683989 - DNA, 25 bp, Homo sapien
tgttcctgaagcaacgctgagctga

SEQ ID NO: 4683990 - DNA, 25 bp, Homo sapien
aaatctgggatttgaggcaggagca

SEQ ID NO: 4683991 - DNA, 25 bp, Homo sapien
gacattactgacactctgtcagccc

SEQ ID NO: 4683992 - DNA, 25 bp, Homo sapien
ccaggattccgaaaacatttacatc

SEQ ID NO: 4683993 - DNA, 25 bp, Homo sapien
tcagccccaggattccgaaaacatt

SEQ ID NO: 4683994 - DNA, 25 bp, Homo sapien
tatccagccctccacgttggacatt

SEQ ID NO: 4683995 - DNA, 25 bp, Homo sapien
tgtttcccaagtcggatccggccag

SEQ ID NO: 4683996 - DNA, 25 bp, Homo sapien
gctgtttcccaagtcggatccggcc

SEQ ID NO: 4683997 - DNA, 25 bp, Homo sapien
ttcccaagtcggatccggccagcag

SEQ ID NO: 4683998 - DNA, 25 bp, Homo sapien
tttcccaagtcggatccggccagca

SEQ ID NO: 4683999 - DNA, 25 bp, Homo sapien
caccagcaaagaaggttacaatgga

SEQ ID NO: 4684000 - DNA, 25 bp, Homo sapien
agcaaagaaggttacaatggaggcc

SEQ ID NO: 4684001 - DNA, 25 bp, Homo sapien
cacaccagcaaagaaggttacaatg

SEQ ID NO: 4684002 - DNA, 25 bp, Homo sapien
gtacacaccagcaaagaaggttaca

SEQ ID NO: 4684003 - DNA, 25 bp, Homo sapien
tctccttggaatccgggatctcctg

SEQ ID NO: 4684004 - DNA, 25 bp, Homo sapien
cttggaatccgggatctcctgacac

SEQ ID NO: 4684005 - DNA, 25 bp, Homo sapien
cttgtctccttggaatccgggatct

SEQ ID NO: 4684006 - DNA, 25 bp, Homo sapien
tggaatccgggatctcctgacacac

SEQ ID NO: 4684007 - DNA, 25 bp, Homo sapien
aggccctggcttcccccgtgcaccg

SEQ ID NO: 4684008 - DNA, 25 bp, Homo sapien
agaggccctggcttcccccgtgcac

SEQ ID NO: 4684009 - DNA, 25 bp, Homo sapien
gaggccctggcttcccccgtgcacc

SEQ ID NO: 4684010 - DNA, 25 bp, Homo sapien
cagaggccctggcttcccccgtgca

SEQ ID NO: 4684011 - DNA, 25 bp, Homo sapien
ggaaacccaatggatcctttgtctc

SEQ ID NO: 4684012 - DNA, 25 bp, Homo sapien
tggatcctttgtctccgactttgcc

SEQ ID NO: 4684013 - DNA, 25 bp, Homo sapien
cccaatggatcctttgtctccgact

SEQ ID NO: 4684014 - DNA, 25 bp, Homo sapien
aacccaatggatcctttgtctccga

SEQ ID NO: 4684015 - DNA, 25 bp, Homo sapien
ttgctccccatacccggaagctctg

SEQ ID NO: 4684016 - DNA, 25 bp, Homo sapien
ggaactctgagtggagaatgtggga

SEQ ID NO: 4684017 - DNA, 25 bp, Homo sapien
ccctgaaccgttccagagtggctgt

SEQ ID NO: 4684018 - DNA, 25 bp, Homo sapien
ctgtgggtggctaggaaagttccag

SEQ ID NO: 4684019 - DNA, 25 bp, Homo sapien
gccttctgggccattgtcgccaggg

SEQ ID NO: 4684020 - DNA, 25 bp, Homo sapien
cttcatgccttctgggccattgtcg

SEQ ID NO: 4684021 - DNA, 25 bp, Homo sapien
tgtcgccaggggggccgatgtctcc

SEQ ID NO: 4684022 - DNA, 25 bp, Homo sapien
atgccttctgggccattgtcgccag

SEQ ID NO: 4684023 - DNA, 25 bp, Homo sapien
ctcgggccccagctgcccacggggt

SEQ ID NO: 4684024 - DNA, 25 bp, Homo sapien
cagctgcccacggggtcccggcagg

SEQ ID NO: 4684025 - DNA, 25 bp, Homo sapien
tgcccacggggtcccggcaggcctc

SEQ ID NO: 4684026 - DNA, 25 bp, Homo sapien
gctgcccacggggtcccggcaggcc

SEQ ID NO: 4684027 - DNA, 25 bp, Homo sapien
gggggctgcaatcaggccaggatgg

SEQ ID NO: 4684028 - DNA, 25 bp, Homo sapien
tgggggctgcaatcaggccaggatg

SEQ ID NO: 4684029 - DNA, 25 bp, Homo sapien
ggggctgcaatcaggccaggatggg

SEQ ID NO: 4684030 - DNA, 25 bp, Homo sapien
gggctgcaatcaggccaggatgggc

SEQ ID NO: 4684031 - DNA, 25 bp, Homo sapien
caggggcccctggcggccccatggg

SEQ ID NO: 4684032 - DNA, 25 bp, Homo sapien
ccctggcggccccatgggtccctca

SEQ ID NO: 4684033 - DNA, 25 bp, Homo sapien
tccaagccaggggcccctggcggcc

SEQ ID NO: 4684034 - DNA, 25 bp, Homo sapien
gcggccccatgggtccctcatctcc

SEQ ID NO: 4684035 - DNA, 25 bp, Homo sapien
tcaaagtgtggcctgaggactacag

SEQ ID NO: 4684036 - DNA, 25 bp, Homo sapien
ccagctgcgtgaactcagggaagcc

SEQ ID NO: 4684037 - DNA, 25 bp, Homo sapien
gaacagtttatgcaagtggtcctca

SEQ ID NO: 4684038 - DNA, 25 bp, Homo sapien
gagagccacataccctggtggacag

SEQ ID NO: 4684039 - DNA, 25 bp, Homo sapien
tcacgccatccaggccgggcctccc

SEQ ID NO: 4684040 - DNA, 25 bp, Homo sapien
acgccatccaggccgggcctcccag

SEQ ID NO: 4684041 - DNA, 25 bp, Homo sapien
gccatccaggccgggcctcccagga

SEQ ID NO: 4684042 - DNA, 25 bp, Homo sapien
catccaggccgggcctcccaggaaa

SEQ ID NO: 4684043 - DNA, 25 bp, Homo sapien
gatgaaccagggatcttatctccag

SEQ ID NO: 4684044 - DNA, 25 bp, Homo sapien
tgctggccttagctgccattagtgg

SEQ ID NO: 4684045 - DNA, 25 bp, Homo sapien
gagatgaaagtctagacctcctggg

SEQ ID NO: 4684046 - DNA, 25 bp, Homo sapien
gaacctcaggcagacatgactctag

SEQ ID NO: 4684047 - DNA, 25 bp, Homo sapien
cacaggccccggccgaccaggatcc

SEQ ID NO: 4684048 - DNA, 25 bp, Homo sapien
tgctctcccacaggccccggccgac

SEQ ID NO: 4684049 - DNA, 25 bp, Homo sapien
ctgctctcccacaggccccggccga

SEQ ID NO: 4684050 - DNA, 25 bp, Homo sapien
tcccacaggccccggccgaccagga

SEQ ID NO: 4684051 - DNA, 25 bp, Homo sapien
tctataagctgatgggaacacgagc

SEQ ID NO: 4684052 - DNA, 25 bp, Homo sapien
ttagggatgcctagaccaagggacc

SEQ ID NO: 4684053 - DNA, 25 bp, Homo sapien
gaatgcgctcgaatgacactggaaa

SEQ ID NO: 4684054 - DNA, 25 bp, Homo sapien
tgggcaaatgcaccaaaaacctgtg

SEQ ID NO: 4684055 - DNA, 25 bp, Homo sapien
gctggcactacgcatggtggatcct

SEQ ID NO: 4684056 - DNA, 25 bp, Homo sapien
accacgctggcactacgcatggtgg

SEQ ID NO: 4684057 - DNA, 25 bp, Homo sapien
gggcccggatctcccgtacatccca

SEQ ID NO: 4684058 - DNA, 25 bp, Homo sapien
ggcactacgcatggtggatcctgca

SEQ ID NO: 4684059 - DNA, 25 bp, Homo sapien
ctgaactccgctgggtgacaacttg

SEQ ID NO: 4684060 - DNA, 25 bp, Homo sapien
tgctgaactccgctgggtgacaact

SEQ ID NO: 4684061 - DNA, 25 bp, Homo sapien
ggtggccccagtccttgccgtctcc

SEQ ID NO: 4684062 - DNA, 25 bp, Homo sapien
taggtggccccagtccttgccgtct

SEQ ID NO: 4684063 - DNA, 25 bp, Homo sapien
ccagaccaatgaatcccataaatcc

SEQ ID NO: 4684064 - DNA, 25 bp, Homo sapien
ttttctcccacgattcctggctccc

SEQ ID NO: 4684065 - DNA, 25 bp, Homo sapien
ccgaccagaccaatgaatcccataa

SEQ ID NO: 4684066 - DNA, 25 bp, Homo sapien
tggctccccgaccagaccaatgaat

SEQ ID NO: 4684067 - DNA, 25 bp, Homo sapien
tgacagtagggcagggatagaaccc

SEQ ID NO: 4684068 - DNA, 25 bp, Homo sapien
tctgaaatccccaggtcaaagggcc

SEQ ID NO: 4684069 - DNA, 25 bp, Homo sapien
gatagaaccccaagggatgccagga

SEQ ID NO: 4684070 - DNA, 25 bp, Homo sapien
tgccaggaaagggaacaatgtctct

SEQ ID NO: 4684071 - DNA, 25 bp, Homo sapien
tgagcaaagtgtagctaacctttgg

SEQ ID NO: 4684072 - DNA, 25 bp, Homo sapien
gctaacctttggcaatgaacctggt

SEQ ID NO: 4684073 - DNA, 25 bp, Homo sapien
agtcacctcccctatttgagcctct

SEQ ID NO: 4684074 - DNA, 25 bp, Homo sapien
aaagtgtagctaacctttggcaatg

SEQ ID NO: 4684075 - DNA, 25 bp, Homo sapien
aagacaagtgcctccaaggcccttg

SEQ ID NO: 4684076 - DNA, 25 bp, Homo sapien
aaaggaagacaagtgcctccaaggc

SEQ ID NO: 4684077 - DNA, 25 bp, Homo sapien
aggaagacaagtgcctccaaggccc

SEQ ID NO: 4684078 - DNA, 25 bp, Homo sapien
acaaaggaagacaagtgcctccaag

SEQ ID NO: 4684079 - DNA, 25 bp, Homo sapien
tattggaggacttgacccacttggg

SEQ ID NO: 4684080 - DNA, 25 bp, Homo sapien
aagggacatgggtcatttgagcaac

SEQ ID NO: 4684081 - DNA, 25 bp, Homo sapien
gatgctaccactggaagaaacaggg

SEQ ID NO: 4684082 - DNA, 25 bp, Homo sapien
ggaatggcgcagtcaatggtttgta

SEQ ID NO: 4684083 - DNA, 25 bp, Homo sapien
gctctgttttcgtgaggctctgttt

SEQ ID NO: 4684084 - DNA, 25 bp, Homo sapien
tatgtgtctgacactatctgcgaga

SEQ ID NO: 4684085 - DNA, 25 bp, Homo sapien
tgtttcttgtatccacccagccagc

SEQ ID NO: 4684086 - DNA, 25 bp, Homo sapien
aatatacaatggtgagcagccctgc

SEQ ID NO: 4684087 - DNA, 25 bp, Homo sapien
cagagttggcagtgtagcagacagc

SEQ ID NO: 4684088 - DNA, 25 bp, Homo sapien
gaatcagagacataactcattccct

SEQ ID NO: 4684089 - DNA, 25 bp, Homo sapien
tggcagtgtagcagacagctccagc

SEQ ID NO: 4684090 - DNA, 25 bp, Homo sapien
ttccctctcgaccaatccagacaca

SEQ ID NO: 4684091 - DNA, 25 bp, Homo sapien
gcaggcaggtcacggctatggctgt

SEQ ID NO: 4684092 - DNA, 25 bp, Homo sapien
aatgcaggcaggtcacggctatggc

SEQ ID NO: 4684093 - DNA, 25 bp, Homo sapien
ggcaggtcacggctatggctgtggg

SEQ ID NO: 4684094 - DNA, 25 bp, Homo sapien
gcaatgcaggcaggtcacggctatg

SEQ ID NO: 4684095 - DNA, 25 bp, Homo sapien
ccccttgggtccaggcacgcctggg

SEQ ID NO: 4684096 - DNA, 25 bp, Homo sapien
catcgaccccttgggtccaggcacg

SEQ ID NO: 4684097 - DNA, 25 bp, Homo sapien
tgggggtcccatcatgccacgatca

SEQ ID NO: 4684098 - DNA, 25 bp, Homo sapien
tcgaccccttgggtccaggcacgcc

SEQ ID NO: 4684099 - DNA, 25 bp, Homo sapien
tccccataccacctggcattccagg

SEQ ID NO: 4684100 - DNA, 25 bp, Homo sapien
taccacctggcattccaggatgacc

SEQ ID NO: 4684101 - DNA, 25 bp, Homo sapien
cataccacctggcattccaggatga

SEQ ID NO: 4684102 - DNA, 25 bp, Homo sapien
aggggtccccataccacctggcatt

SEQ ID NO: 4684103 - DNA, 25 bp, Homo sapien
cgtccctttgctcccctcatgcctg

SEQ ID NO: 4684104 - DNA, 25 bp, Homo sapien
gtccctttgctcccctcatgcctgg

SEQ ID NO: 4684105 - DNA, 25 bp, Homo sapien
tccctttgctcccctcatgcctggt

SEQ ID NO: 4684106 - DNA, 25 bp, Homo sapien
acgtccctttgctcccctcatgcct

SEQ ID NO: 4684107 - DNA, 25 bp, Homo sapien
tccccagctggtccgtccggtcctc

SEQ ID NO: 4684108 - DNA, 25 bp, Homo sapien
cccagctggtccgtccggtcctcgg

SEQ ID NO: 4684109 - DNA, 25 bp, Homo sapien
ccagctggtccgtccggtcctcggg

SEQ ID NO: 4684110 - DNA, 25 bp, Homo sapien
gctccccagctggtccgtccggtcc

SEQ ID NO: 4684111 - DNA, 25 bp, Homo sapien
gtccaggccggcccggtctgccctg

SEQ ID NO: 4684112 - DNA, 25 bp, Homo sapien
gctgtccaggccggcccggtctgcc

SEQ ID NO: 4684113 - DNA, 25 bp, Homo sapien
tgtccaggccggcccggtctgccct

SEQ ID NO: 4684114 - DNA, 25 bp, Homo sapien
ccaggccggcccggtctgccctggg

SEQ ID NO: 4684115 - DNA, 25 bp, Homo sapien
aagtggcctcgctcaccagccacac

SEQ ID NO: 4684116 - DNA, 25 bp, Homo sapien
aaagcctctcgagcccaagtggcct

SEQ ID NO: 4684117 - DNA, 25 bp, Homo sapien
aggaaagcctctcgagcccaagtgg

SEQ ID NO: 4684118 - DNA, 25 bp, Homo sapien
caagtggcctcgctcaccagccaca

SEQ ID NO: 4684119 - DNA, 25 bp, Homo sapien
cggttctcctgggaggcccttggtg

SEQ ID NO: 4684120 - DNA, 25 bp, Homo sapien
ggttctcctgggaggcccttggtgc

SEQ ID NO: 4684121 - DNA, 25 bp, Homo sapien
cctggaggcccaattggcccctggg

SEQ ID NO: 4684122 - DNA, 25 bp, Homo sapien
tctcctggaggcccaattggcccct

SEQ ID NO: 4684123 - DNA, 25 bp, Homo sapien
cttgggtcccatctctcctggaggc

SEQ ID NO: 4684124 - DNA, 25 bp, Homo sapien
ttgggtcccatctctcctggaggcc

SEQ ID NO: 4684125 - DNA, 25 bp, Homo sapien
gaaggcccggttctcccactgcacc

SEQ ID NO: 4684126 - DNA, 25 bp, Homo sapien
tcatcccggcttccccaggaaggcc

SEQ ID NO: 4684127 - DNA, 25 bp, Homo sapien
cttcatcccggcttccccaggaagg

SEQ ID NO: 4684128 - DNA, 25 bp, Homo sapien
caggaaggcccggttctcccactgc

SEQ ID NO: 4684129 - DNA, 25 bp, Homo sapien
gagctcctgttccaagtaagccttg

SEQ ID NO: 4684130 - DNA, 25 bp, Homo sapien
tcccagggaccacagagaaatcgta

SEQ ID NO: 4684131 - DNA, 25 bp, Homo sapien
agaaatcgtaaaacaccaaccagag

SEQ ID NO: 4684132 - DNA, 25 bp, Homo sapien
gacaggaggacaattagcaccaaca

SEQ ID NO: 4684133 - DNA, 25 bp, Homo sapien
aggagtgcccaggggtccaaggtca

SEQ ID NO: 4684134 - DNA, 25 bp, Homo sapien
cgttgcccaatgaggccctgctccc

SEQ ID NO: 4684135 - DNA, 25 bp, Homo sapien
gagtgcccaggggtccaaggtcacc

SEQ ID NO: 4684136 - DNA, 25 bp, Homo sapien
ccgttgcccaatgaggccctgctcc

SEQ ID NO: 4684137 - DNA, 25 bp, Homo sapien
actgtcaccctcaaggcctggctct

SEQ ID NO: 4684138 - DNA, 25 bp, Homo sapien
ccactgtcaccctcaaggcctggct

SEQ ID NO: 4684139 - DNA, 25 bp, Homo sapien
ttcagcccatcaggtcccatggggc

SEQ ID NO: 4684140 - DNA, 25 bp, Homo sapien
ggccactgtcaccctcaaggcctgg

SEQ ID NO: 4684141 - DNA, 25 bp, Homo sapien
caaccctcgggttatgctgcctaag

SEQ ID NO: 4684142 - DNA, 25 bp, Homo sapien
caggtggctagtcgggttttcaaca

SEQ ID NO: 4684143 - DNA, 25 bp, Homo sapien
gattttccaatggagcggtccagag

SEQ ID NO: 4684144 - DNA, 25 bp, Homo sapien
gaaaatgggtctctcctgggattca

SEQ ID NO: 4684145 - DNA, 25 bp, Homo sapien
caccagtgacgccaggggggccggg

SEQ ID NO: 4684146 - DNA, 25 bp, Homo sapien
tggcctttctcgccatgttctccat

SEQ ID NO: 4684147 - DNA, 25 bp, Homo sapien
tttctcgccatgttctccatcaggc

SEQ ID NO: 4684148 - DNA, 25 bp, Homo sapien
ttcctggcctttctcgccatgttct

SEQ ID NO: 4684149 - DNA, 25 bp, Homo sapien
tcagactgtcggctctggaggcaga

SEQ ID NO: 4684150 - DNA, 25 bp, Homo sapien
cacatgaccttgagcctgacctaat

SEQ ID NO: 4684151 - DNA, 25 bp, Homo sapien
acagaacttagggattcgacctggc

SEQ ID NO: 4684152 - DNA, 25 bp, Homo sapien
tcgacctggcgatgtaagaacgtgc

SEQ ID NO: 4684153 - DNA, 25 bp, Homo sapien
cttctcgccttgcttccctgatttt

SEQ ID NO: 4684154 - DNA, 25 bp, Homo sapien
ttctcgccttgcttccctgattttc

SEQ ID NO: 4684155 - DNA, 25 bp, Homo sapien
agtgcggcccttctcgccttgcttc

SEQ ID NO: 4684156 - DNA, 25 bp, Homo sapien
ggctccagtgcggcccttctcgcct

SEQ ID NO: 4684157 - DNA, 25 bp, Homo sapien
gctgtccttgatagcccttggcacc

SEQ ID NO: 4684158 - DNA, 25 bp, Homo sapien
agggtctccagggacgcccatctca

SEQ ID NO: 4684159 - DNA, 25 bp, Homo sapien
accctttagggcctggagtgccagg

SEQ ID NO: 4684160 - DNA, 25 bp, Homo sapien
agggacgcccatctcacccagctgt

SEQ ID NO: 4684161 - DNA, 25 bp, Homo sapien
ttgggcccccatgcgtcccggagca

SEQ ID NO: 4684162 - DNA, 25 bp, Homo sapien
ccttgggcccccatgcgtcccggag

SEQ ID NO: 4684163 - DNA, 25 bp, Homo sapien
cttgggcccccatgcgtcccggagc

SEQ ID NO: 4684164 - DNA, 25 bp, Homo sapien
gggcccccatgcgtcccggagcacc

SEQ ID NO: 4684165 - DNA, 25 bp, Homo sapien
gaggtccaaggggtcccacaatgcc

SEQ ID NO: 4684166 - DNA, 25 bp, Homo sapien
aggtccaaggggtcccacaatgcct

SEQ ID NO: 4684167 - DNA, 25 bp, Homo sapien
ggaggtccaaggggtcccacaatgc

SEQ ID NO: 4684168 - DNA, 25 bp, Homo sapien
ctcagcctcagacacgagggtgcag

SEQ ID NO: 4684169 - DNA, 25 bp, Homo sapien
tcagacacgagggtgcagctgcttt

SEQ ID NO: 4684170 - DNA, 25 bp, Homo sapien
gacacgagggtgcagctgctttccc

SEQ ID NO: 4684171 - DNA, 25 bp, Homo sapien
agcctcagacacgagggtgcagctg

SEQ ID NO: 4684172 - DNA, 25 bp, Homo sapien
cccagggggcccctcagccttgccg

SEQ ID NO: 4684173 - DNA, 25 bp, Homo sapien
ctcagccttgccgtcctcgccctgc

SEQ ID NO: 4684174 - DNA, 25 bp, Homo sapien
gggcccctcagccttgccgtcctcg

SEQ ID NO: 4684175 - DNA, 25 bp, Homo sapien
agccttgccgtcctcgccctgctcc

SEQ ID NO: 4684176 - DNA, 25 bp, Homo sapien
cctctccatgcagcgggaggctcag

SEQ ID NO: 4684177 - DNA, 25 bp, Homo sapien
ctccatgcagcgggaggctcagatt

SEQ ID NO: 4684178 - DNA, 25 bp, Homo sapien
ctggcccctgatcggcccacccctc

SEQ ID NO: 4684179 - DNA, 25 bp, Homo sapien
catgcagcgggaggctcagattcca

SEQ ID NO: 4684180 - DNA, 25 bp, Homo sapien
aacagcaaaatttgggccaccaggt

SEQ ID NO: 4684181 - DNA, 25 bp, Homo sapien
gaatgacaaagacaacagcaaaatt

SEQ ID NO: 4684182 - DNA, 25 bp, Homo sapien
acaacagcaaaatttgggccaccag

SEQ ID NO: 4684183 - DNA, 25 bp, Homo sapien
tgaatgacaaagacaacagcaaaat

SEQ ID NO: 4684184 - DNA, 25 bp, Homo sapien
cccgcggtctcctcgatcacccaca

SEQ ID NO: 4684185 - DNA, 25 bp, Homo sapien
tccccgcggtctcctcgatcaccca

SEQ ID NO: 4684186 - DNA, 25 bp, Homo sapien
gttccccgcggtctcctcgatcacc

SEQ ID NO: 4684187 - DNA, 25 bp, Homo sapien
ttccccgcggtctcctcgatcaccc

SEQ ID NO: 4684188 - DNA, 25 bp, Homo sapien
tggctttccacggaggccttgcaca

SEQ ID NO: 4684189 - DNA, 25 bp, Homo sapien
cctggctttccacggaggccttgca

SEQ ID NO: 4684190 - DNA, 25 bp, Homo sapien
tggcctggctttccacggaggcctt

SEQ ID NO: 4684191 - DNA, 25 bp, Homo sapien
ggctttccacggaggccttgcacac

SEQ ID NO: 4684192 - DNA, 25 bp, Homo sapien
aaaccaaggtgagatgacgcaaggc

SEQ ID NO: 4684193 - DNA, 25 bp, Homo sapien
aaggtgagatgacgcaaggcagccc

SEQ ID NO: 4684194 - DNA, 25 bp, Homo sapien
aaccaaggtgagatgacgcaaggca

SEQ ID NO: 4684195 - DNA, 25 bp, Homo sapien
ccaaggtgagatgacgcaaggcagc

SEQ ID NO: 4684196 - DNA, 25 bp, Homo sapien
ctctgcgcctttcgatcctttgggt

SEQ ID NO: 4684197 - DNA, 25 bp, Homo sapien
tgcgcctttcgatcctttgggtccc

SEQ ID NO: 4684198 - DNA, 25 bp, Homo sapien
tctgcgcctttcgatcctttgggtc

SEQ ID NO: 4684199 - DNA, 25 bp, Homo sapien
ctgcgcctttcgatcctttgggtcc

SEQ ID NO: 4684200 - DNA, 25 bp, Homo sapien
tgtcccctcactggcattgacaatt

SEQ ID NO: 4684201 - DNA, 25 bp, Homo sapien
gtgtcccctcactggcattgacaat

SEQ ID NO: 4684202 - DNA, 25 bp, Homo sapien
gtcccctcactggcattgacaattt

SEQ ID NO: 4684203 - DNA, 25 bp, Homo sapien
ggtgtcccctcactggcattgacaa

SEQ ID NO: 4684204 - DNA, 25 bp, Homo sapien
tgcctggtagaggtgtgggacccta

SEQ ID NO: 4684205 - DNA, 25 bp, Homo sapien
atcaagggccacatgatggaggctg

SEQ ID NO: 4684206 - DNA, 25 bp, Homo sapien
cctggtagaggtgtgggaccctagg

SEQ ID NO: 4684207 - DNA, 25 bp, Homo sapien
aaaatcaagggccacatgatggagg

SEQ ID NO: 4684208 - DNA, 25 bp, Homo sapien
ctgccttgccttgctttccctttgg

SEQ ID NO: 4684209 - DNA, 25 bp, Homo sapien
ctggggcccctgccttgccttgctt

SEQ ID NO: 4684210 - DNA, 25 bp, Homo sapien
ggcccctgccttgccttgctttccc

SEQ ID NO: 4684211 - DNA, 25 bp, Homo sapien
gccttgccttgctttccctttggtc

SEQ ID NO: 4684212 - DNA, 25 bp, Homo sapien
gcttgcccgtccctgccaggaagcc

SEQ ID NO: 4684213 - DNA, 25 bp, Homo sapien
cagcgatgccctcgaggccctgtct

SEQ ID NO: 4684214 - DNA, 25 bp, Homo sapien
ctgcttgcccgtccctgccaggaag

SEQ ID NO: 4684215 - DNA, 25 bp, Homo sapien
aagcccatctggtccagcgatgccc

SEQ ID NO: 4684216 - DNA, 25 bp, Homo sapien
ggtaagccggccacacctggatttc

SEQ ID NO: 4684217 - DNA, 25 bp, Homo sapien
caggtaagccggccacacctggatt

SEQ ID NO: 4684218 - DNA, 25 bp, Homo sapien
taagccggccacacctggatttcct

SEQ ID NO: 4684219 - DNA, 25 bp, Homo sapien
tccaggtaagccggccacacctgga

SEQ ID NO: 4684220 - DNA, 25 bp, Homo sapien
cctgggagagccagaacagtgattc

SEQ ID NO: 4684221 - DNA, 25 bp, Homo sapien
gggtgacaagactttcacctcccaa

SEQ ID NO: 4684222 - DNA, 25 bp, Homo sapien
ggtacccgagattgcagaatgctgg

SEQ ID NO: 4684223 - DNA, 25 bp, Homo sapien
cacagggtacccgagattgcagaat

SEQ ID NO: 4684224 - DNA, 25 bp, Homo sapien
tgccctctgttcctcgcttgccagg

SEQ ID NO: 4684225 - DNA, 25 bp, Homo sapien
ccagggagccccgttctgccctctg

SEQ ID NO: 4684226 - DNA, 25 bp, Homo sapien
tgttcctcgcttgccagggggaccc

SEQ ID NO: 4684227 - DNA, 25 bp, Homo sapien
agctgtccgggtaacccactctcac

SEQ ID NO: 4684228 - DNA, 25 bp, Homo sapien
tgtttgtacatgtaggtgtatgtga

SEQ ID NO: 4684229 - DNA, 25 bp, Homo sapien
tgtgtattctttggcgctcactcac

SEQ ID NO: 4684230 - DNA, 25 bp, Homo sapien
tgtacatgtaggtgtatgtgagtgt

SEQ ID NO: 4684231 - DNA, 25 bp, Homo sapien
atgtgtattctttggcgctcactca

SEQ ID NO: 4684232 - DNA, 25 bp, Homo sapien
cttctggttgtgatcaccctctcct

SEQ ID NO: 4684233 - DNA, 25 bp, Homo sapien
ctttttccaggcaagggtgagttga

SEQ ID NO: 4684234 - DNA, 25 bp, Homo sapien
gaaggaaccactcaggtctctttcc

SEQ ID NO: 4684235 - DNA, 25 bp, Homo sapien
ggatgaatgttagcacagtatgtct

SEQ ID NO: 4684236 - DNA, 25 bp, Homo sapien
gataatgcagttcaagacatcctta

SEQ ID NO: 4684237 - DNA, 25 bp, Homo sapien
cagtttcttaagacggaatccgaga

SEQ ID NO: 4684238 - DNA, 25 bp, Homo sapien
gtttgcttctgttctacccattagg

SEQ ID NO: 4684239 - DNA, 25 bp, Homo sapien
gaccatttatttgagacctgtcttc

SEQ ID NO: 4684240 - DNA, 25 bp, Homo sapien
tatcctgcaactttggtttattagt

SEQ ID NO: 4684241 - DNA, 25 bp, Homo sapien
gggggaagtgttcagtcctctacca

SEQ ID NO: 4684242 - DNA, 25 bp, Homo sapien
tgcaactttggtttattagttctac

SEQ ID NO: 4684243 - DNA, 25 bp, Homo sapien
ttagttctactaattttgttcagta

SEQ ID NO: 4684244 - DNA, 25 bp, Homo sapien
gtccgaagagacctgccattcctgg

SEQ ID NO: 4684245 - DNA, 25 bp, Homo sapien
tgggtccgaagagacctgccattcc

SEQ ID NO: 4684246 - DNA, 25 bp, Homo sapien
ggtccgaagagacctgccattcctg

SEQ ID NO: 4684247 - DNA, 25 bp, Homo sapien
cttgggtccgaagagacctgccatt

SEQ ID NO: 4684248 - DNA, 25 bp, Homo sapien
tcagtgctgtgtggcatatgcccct

SEQ ID NO: 4684249 - DNA, 25 bp, Homo sapien
agcaggtaccagcagtgtgttggct

SEQ ID NO: 4684250 - DNA, 25 bp, Homo sapien
gccaatgttttcagtgctccataaa

SEQ ID NO: 4684251 - DNA, 25 bp, Homo sapien
agactaagtgactttgcaaggcaca

SEQ ID NO: 4684252 - DNA, 25 bp, Homo sapien
ctttgaagccaatgtctccaggcgg

SEQ ID NO: 4684253 - DNA, 25 bp, Homo sapien
ttgaagccaatgtctccaggcgggc

SEQ ID NO: 4684254 - DNA, 25 bp, Homo sapien
tttgaagccaatgtctccaggcggg

SEQ ID NO: 4684255 - DNA, 25 bp, Homo sapien
tgaagccaatgtctccaggcgggcc

SEQ ID NO: 4684256 - DNA, 25 bp, Homo sapien
gagacagaaaggctcatgtgtcctt

SEQ ID NO: 4684257 - DNA, 25 bp, Homo sapien
acagaaaggctcatgtgtccttgtt

SEQ ID NO: 4684258 - DNA, 25 bp, Homo sapien
aggagacagaaaggctcatgtgtcc

SEQ ID NO: 4684259 - DNA, 25 bp, Homo sapien
ctaaaggagacagaaaggctcatgt

SEQ ID NO: 4684260 - DNA, 25 bp, Homo sapien
caggattccgaggggcccgacgatg

SEQ ID NO: 4684261 - DNA, 25 bp, Homo sapien
ccaggattccgaggggcccgacgat

SEQ ID NO: 4684262 - DNA, 25 bp, Homo sapien
ccagtccccacggctgcctttgtca

SEQ ID NO: 4684263 - DNA, 25 bp, Homo sapien
gtccccacggctgcctttgtcaccc

SEQ ID NO: 4684264 - DNA, 25 bp, Homo sapien
cagtccccacggctgcctttgtcac

SEQ ID NO: 4684265 - DNA, 25 bp, Homo sapien
ccccacggctgcctttgtcaccctt

SEQ ID NO: 4684266 - DNA, 25 bp, Homo sapien
caattggataggaccccctggagga

SEQ ID NO: 4684267 - DNA, 25 bp, Homo sapien
aggaaaagacagggtatgtatcgtg

SEQ ID NO: 4684268 - DNA, 25 bp, Homo sapien
gaaaagacagggtatgtatcgtggc

SEQ ID NO: 4684269 - DNA, 25 bp, Homo sapien
ttctccacacccatcaagtgggagc

SEQ ID NO: 4684270 - DNA, 25 bp, Homo sapien
aagacagggtatgtatcgtggcccc

SEQ ID NO: 4684271 - DNA, 25 bp, Homo sapien
tgtccatccacgtctggaaagctgc

SEQ ID NO: 4684272 - DNA, 25 bp, Homo sapien
tggtgtccatccacgtctggaaagc

SEQ ID NO: 4684273 - DNA, 25 bp, Homo sapien
tccactggtgtccatccacgtctgg

SEQ ID NO: 4684274 - DNA, 25 bp, Homo sapien
gaaagctgccccaagatcatcttgt

SEQ ID NO: 4684275 - DNA, 25 bp, Homo sapien
tctatttgcgtttctcccaggaagg

SEQ ID NO: 4684276 - DNA, 25 bp, Homo sapien
ctatttgcgtttctcccaggaaggg

SEQ ID NO: 4684277 - DNA, 25 bp, Homo sapien
tttgcgtttctcccaggaagggatc

SEQ ID NO: 4684278 - DNA, 25 bp, Homo sapien
tatttgcgtttctcccaggaaggga

SEQ ID NO: 4684279 - DNA, 25 bp, Homo sapien
tgtaaggttttaaagatctctcctc

SEQ ID NO: 4684280 - DNA, 25 bp, Homo sapien
tgaggttgctgaggtagtgtaaggt

SEQ ID NO: 4684281 - DNA, 25 bp, Homo sapien
ctgcagacccgggcggggttctctt

SEQ ID NO: 4684282 - DNA, 25 bp, Homo sapien
gggcgtcttaatgctctggatgagg

SEQ ID NO: 4684283 - DNA, 25 bp, Homo sapien
tacttgcctatgttgctactgggat

SEQ ID NO: 4684284 - DNA, 25 bp, Homo sapien
aagggattcctccaaccgagatgga

SEQ ID NO: 4684285 - DNA, 25 bp, Homo sapien
tggttctgtagatggaccctgcatc

SEQ ID NO: 4684286 - DNA, 25 bp, Homo sapien
cttctgggcagagctcacaactggc

SEQ ID NO: 4684287 - DNA, 25 bp, Homo sapien
ccatgagtgaagttgcaggagacct

SEQ ID NO: 4684288 - DNA, 25 bp, Homo sapien
gatgggcttgagacacgtctgtcca

SEQ ID NO: 4684289 - DNA, 25 bp, Homo sapien
aagttgcaggagacctcgatggtgt

SEQ ID NO: 4684290 - DNA, 25 bp, Homo sapien
caaggtttggatccacccagtaggt

SEQ ID NO: 4684291 - DNA, 25 bp, Homo sapien
agagcttcaaagatcttggtgccat

SEQ ID NO: 4684292 - DNA, 25 bp, Homo sapien
aaactgaggtctgcgtgagctggtc

SEQ ID NO: 4684293 - DNA, 25 bp, Homo sapien
tatagagaagcaacggcagtgagcg

SEQ ID NO: 4684294 - DNA, 25 bp, Homo sapien
tcctgatatgctcccagacatgtgc

SEQ ID NO: 4684295 - DNA, 25 bp, Homo sapien
cacacggtcatgttaaggcagtgga

SEQ ID NO: 4684296 - DNA, 25 bp, Homo sapien
ggtgcaggaaattcatctggacccg

SEQ ID NO: 4684297 - DNA, 25 bp, Homo sapien
cctcggagcttagcaggtgcaggaa

SEQ ID NO: 4684298 - DNA, 25 bp, Homo sapien
aggcccggaagcgtacggcctgctt

SEQ ID NO: 4684299 - DNA, 25 bp, Homo sapien
gtccggaaggtgaagagtgtctgat

SEQ ID NO: 4684300 - DNA, 25 bp, Homo sapien
gtgtctgatgccagcggccatcttg

SEQ ID NO: 4684301 - DNA, 25 bp, Homo sapien
tgatgggcagctgttgggggtcttg

SEQ ID NO: 4684302 - DNA, 25 bp, Homo sapien
aaggtgaagagtgtctgatgccagc

SEQ ID NO: 4684303 - DNA, 25 bp, Homo sapien
ttctactgggcagacaacagctggg

SEQ ID NO: 4684304 - DNA, 25 bp, Homo sapien
tgcatcttgcaaggacaggctcctg

SEQ ID NO: 4684305 - DNA, 25 bp, Homo sapien
cacaagggcgatgctaggaaaattc

SEQ ID NO: 4684306 - DNA, 25 bp, Homo sapien
gatgcggcttcctgagatggttcca

SEQ ID NO: 4684307 - DNA, 25 bp, Homo sapien
acttccacgcagagcgtccaggctg

SEQ ID NO: 4684308 - DNA, 25 bp, Homo sapien
gggcggcagggcgaggatacagaag

SEQ ID NO: 4684309 - DNA, 25 bp, Homo sapien
gagctgctacaaacacgcacttcca

SEQ ID NO: 4684310 - DNA, 25 bp, Homo sapien
cagggcgaggatacagaagtgttgg

SEQ ID NO: 4684311 - DNA, 25 bp, Homo sapien
gacatgtggacagagacgtaaacga

SEQ ID NO: 4684312 - DNA, 25 bp, Homo sapien
gacagagacgtaaacgaagacagca

SEQ ID NO: 4684313 - DNA, 25 bp, Homo sapien
caggagggatccgagcgctgagatg

SEQ ID NO: 4684314 - DNA, 25 bp, Homo sapien
taatacactgacatgtggacagaga

SEQ ID NO: 4684315 - DNA, 25 bp, Homo sapien
tgggaaatgcctcgcacaaaacctc

SEQ ID NO: 4684316 - DNA, 25 bp, Homo sapien
gtgacacaatcctgccagcacttgg

SEQ ID NO: 4684317 - DNA, 25 bp, Homo sapien
gcacttgggaaatgcctcgcacaaa

SEQ ID NO: 4684318 - DNA, 25 bp, Homo sapien
tgtgtctgtgacacaatcctgccag

SEQ ID NO: 4684319 - DNA, 25 bp, Homo sapien
tggcgttggtgatgggcaccggtac

SEQ ID NO: 4684320 - DNA, 25 bp, Homo sapien
accggtactaggttggcacacaatg

SEQ ID NO: 4684321 - DNA, 25 bp, Homo sapien
ttggcacacaatgggatctgggctt

SEQ ID NO: 4684322 - DNA, 25 bp, Homo sapien
ggaggctcaggactgtaagaaccca

SEQ ID NO: 4684323 - DNA, 25 bp, Homo sapien
tactctctgagaaagatcgtgtcct

SEQ ID NO: 4684324 - DNA, 25 bp, Homo sapien
tgaaccgacttattgtactcctcgt

SEQ ID NO: 4684325 - DNA, 25 bp, Homo sapien
gttgcttggatctcctgaaccgact

SEQ ID NO: 4684326 - DNA, 25 bp, Homo sapien
cgaaaggccgatgcgatataaaacc

SEQ ID NO: 4684327 - DNA, 25 bp, Homo sapien
ttttcccgctggacattcaggtagg

SEQ ID NO: 4684328 - DNA, 25 bp, Homo sapien
cccgctggacattcaggtaggtggt

SEQ ID NO: 4684329 - DNA, 25 bp, Homo sapien
ctggacattcaggtaggtggtgtta

SEQ ID NO: 4684330 - DNA, 25 bp, Homo sapien
ttcaggtaggtggtgttatagatgc

SEQ ID NO: 4684331 - DNA, 25 bp, Homo sapien
ttcttctcatcgttcacgtcaaaag

SEQ ID NO: 4684332 - DNA, 25 bp, Homo sapien
tgaggatcagcaagtgagcgaaatg

SEQ ID NO: 4684333 - DNA, 25 bp, Homo sapien
aagtgagcgaaatgctcttggcctc

SEQ ID NO: 4684334 - DNA, 25 bp, Homo sapien
tcacgtcaaaagcaagcatgtaggt

SEQ ID NO: 4684335 - DNA, 25 bp, Homo sapien
aatcggtgtacacgacatctgactt

SEQ ID NO: 4684336 - DNA, 25 bp, Homo sapien
caatcggtgtacacgacatctgact

SEQ ID NO: 4684337 - DNA, 25 bp, Homo sapien
gccatggacaaggtgggcactgtcc

SEQ ID NO: 4684338 - DNA, 25 bp, Homo sapien
tgggcactgtccaatcccttgcgtt

SEQ ID NO: 4684339 - DNA, 25 bp, Homo sapien
ggcactgtccaatcccttgcgttta

SEQ ID NO: 4684340 - DNA, 25 bp, Homo sapien
ccaagttgggccatggacaaggtgg

SEQ ID NO: 4684341 - DNA, 25 bp, Homo sapien
ggaggtagttcacaccactggtggt

SEQ ID NO: 4684342 - DNA, 25 bp, Homo sapien
gacgcgtctgtaggtggtaactccc

SEQ ID NO: 4684343 - DNA, 25 bp, Homo sapien
aaaattggaaccagctcatcggtgc

SEQ ID NO: 4684344 - DNA, 25 bp, Homo sapien
atttcacaggtattgggcacagggc

SEQ ID NO: 4684345 - DNA, 25 bp, Homo sapien
gcctgtggaaccagctcaaccaggg

SEQ ID NO: 4684346 - DNA, 25 bp, Homo sapien
tctggcctgtggaaccagctcaacc

SEQ ID NO: 4684347 - DNA, 25 bp, Homo sapien
gacagggtgggaggtcttccaggga

SEQ ID NO: 4684348 - DNA, 25 bp, Homo sapien
gagggcagaatgagctctggcctgt

SEQ ID NO: 4684349 - DNA, 25 bp, Homo sapien
gctgcttctccagtggctcacactt

SEQ ID NO: 4684350 - DNA, 25 bp, Homo sapien
tctcgtgctgcttctccagtggctc

SEQ ID NO: 4684351 - DNA, 25 bp, Homo sapien
tccttctcgtgctgcttctccagtg

SEQ ID NO: 4684352 - DNA, 25 bp, Homo sapien
cgtgctgcttctccagtggctcaca

SEQ ID NO: 4684353 - DNA, 25 bp, Homo sapien
gaggtacacatgtcgggttggaggg

SEQ ID NO: 4684354 - DNA, 25 bp, Homo sapien
cacatgtcgggttggaggggcagga

SEQ ID NO: 4684355 - DNA, 25 bp, Homo sapien
tacacatgtcgggttggaggggcag

SEQ ID NO: 4684356 - DNA, 25 bp, Homo sapien
gctgaggtacacatgtcgggttgga

SEQ ID NO: 4684357 - DNA, 25 bp, Homo sapien
aaacacagaagctttattgatgcaa

SEQ ID NO: 4684358 - DNA, 25 bp, Homo sapien
aacacagaagctttattgatgcaag

SEQ ID NO: 4684359 - DNA, 25 bp, Homo sapien
caaacacagaagctttattgatgca

SEQ ID NO: 4684360 - DNA, 25 bp, Homo sapien
ccaaacacagaagctttattgatgc

SEQ ID NO: 4684361 - DNA, 25 bp, Homo sapien
tggtggaaatgaccccgatttgatc

SEQ ID NO: 4684362 - DNA, 25 bp, Homo sapien
tctagattggttcagatgccccttc

SEQ ID NO: 4684363 - DNA, 25 bp, Homo sapien
catcacacattgtacacagaacagc

SEQ ID NO: 4684364 - DNA, 25 bp, Homo sapien
acagcaggttgtattatgctcctca

SEQ ID NO: 4684365 - DNA, 25 bp, Homo sapien
cgcaggcttcagaggaagcatggct

SEQ ID NO: 4684366 - DNA, 25 bp, Homo sapien
agttccgcaggcttcagaggaagca

SEQ ID NO: 4684367 - DNA, 25 bp, Homo sapien
ttccgcaggcttcagaggaagcatg

SEQ ID NO: 4684368 - DNA, 25 bp, Homo sapien
caggcttcagaggaagcatggctgg

SEQ ID NO: 4684369 - DNA, 25 bp, Homo sapien
gaggcacgtggagccaggcagtgct

SEQ ID NO: 4684370 - DNA, 25 bp, Homo sapien
tttataataaactatgggcggtcac

SEQ ID NO: 4684371 - DNA, 25 bp, Homo sapien
tatgggcggtcacttggagcccagc

SEQ ID NO: 4684372 - DNA, 25 bp, Homo sapien
gcagggtgcagtcacctttataata

SEQ ID NO: 4684373 - DNA, 25 bp, Homo sapien
ctgtaagaacccaggacagcgccat

SEQ ID NO: 4684374 - DNA, 25 bp, Homo sapien
tggcgttggtgatgggcaccggtac

SEQ ID NO: 4684375 - DNA, 25 bp, Homo sapien
tactaggttggcacacaatgggatc

SEQ ID NO: 4684376 - DNA, 25 bp, Homo sapien
ttggcacacaatgggatctgggctt

SEQ ID NO: 4684377 - DNA, 25 bp, Homo sapien
accggtactaggttggcacacaatg

SEQ ID NO: 4684378 - DNA, 25 bp, Homo sapien
tactctctgagaaagatcgtgtcct

SEQ ID NO: 4684379 - DNA, 25 bp, Homo sapien
tgaaccgacttattgtactcctcgt

SEQ ID NO: 4684380 - DNA, 25 bp, Homo sapien
gttgcttggatctcctgaaccgact

SEQ ID NO: 4684381 - DNA, 25 bp, Homo sapien
cgaaaggccgatgcgatataaaacc

SEQ ID NO: 4684382 - DNA, 25 bp, Homo sapien
ctggagttatagaagcactggttct

SEQ ID NO: 4684383 - DNA, 25 bp, Homo sapien
tggagttatagaagcactggttctg

SEQ ID NO: 4684384 - DNA, 25 bp, Homo sapien
catcgtccaggtaggaaccaaacat

SEQ ID NO: 4684385 - DNA, 25 bp, Homo sapien
tgagcaacatgttctcggcctccct

SEQ ID NO: 4684386 - DNA, 25 bp, Homo sapien
cagcaggtgagcaacatgttctcgg

SEQ ID NO: 4684387 - DNA, 25 bp, Homo sapien
tcaaggtcttggtgtccctaaggaa

SEQ ID NO: 4684388 - DNA, 25 bp, Homo sapien
catgacatctgacctgggaatgcac

SEQ ID NO: 4684389 - DNA, 25 bp, Homo sapien
acatgacatctgacctgggaatgca

SEQ ID NO: 4684390 - DNA, 25 bp, Homo sapien
tgacatctgacctgggaatgcacaa

SEQ ID NO: 4684391 - DNA, 25 bp, Homo sapien
atgacatctgacctgggaatgcaca

SEQ ID NO: 4684392 - DNA, 25 bp, Homo sapien
gcctctacaatgggagctcagaccc

SEQ ID NO: 4684393 - DNA, 25 bp, Homo sapien
agcacatagtacctgcagggccctt

SEQ ID NO: 4684394 - DNA, 25 bp, Homo sapien
gagcacatagtacctgcagggccct

SEQ ID NO: 4684395 - DNA, 25 bp, Homo sapien
tgcctctacaatgggagctcagacc

SEQ ID NO: 4684396 - DNA, 25 bp, Homo sapien
gctgcttctccagtggctcacactt

SEQ ID NO: 4684397 - DNA, 25 bp, Homo sapien
tctcgtgctgcttctccagtggctc

SEQ ID NO: 4684398 - DNA, 25 bp, Homo sapien
tccttctcgtgctgcttctccagtg

SEQ ID NO: 4684399 - DNA, 25 bp, Homo sapien
cgtgctgcttctccagtggctcaca

SEQ ID NO: 4684400 - DNA, 25 bp, Homo sapien
ctctgtcctgatccaaggctgtgtc

SEQ ID NO: 4684401 - DNA, 25 bp, Homo sapien
ccaagtctctgtcctgatccaaggc

SEQ ID NO: 4684402 - DNA, 25 bp, Homo sapien
caagtctctgtcctgatccaaggct

SEQ ID NO: 4684403 - DNA, 25 bp, Homo sapien
tgtcctgatccaaggctgtgtcctg

SEQ ID NO: 4684404 - DNA, 25 bp, Homo sapien
acagaagctttattgatgcaagtga

SEQ ID NO: 4684405 - DNA, 25 bp, Homo sapien
tattgatgcaagtgagggaaaaagc

SEQ ID NO: 4684406 - DNA, 25 bp, Homo sapien
aagctttattgatgcaagtgaggga

SEQ ID NO: 4684407 - DNA, 25 bp, Homo sapien
gctgaggtacacatgtcgggttgga

SEQ ID NO: 4684408 - DNA, 25 bp, Homo sapien
tggtggaaatgaccccgatttgatc

SEQ ID NO: 4684409 - DNA, 25 bp, Homo sapien
tctagattggttcagatgccccttc

SEQ ID NO: 4684410 - DNA, 25 bp, Homo sapien
catcacacattgtacacagaacagc

SEQ ID NO: 4684411 - DNA, 25 bp, Homo sapien
acagcaggttgtattatgctcctca

SEQ ID NO: 4684412 - DNA, 25 bp, Homo sapien
gcgtttatcagtggccagctacctg

SEQ ID NO: 4684413 - DNA, 25 bp, Homo sapien
gagacctttctcctagtgactggta

SEQ ID NO: 4684414 - DNA, 25 bp, Homo sapien
gcttctcctaggatcccagtggcgt

SEQ ID NO: 4684415 - DNA, 25 bp, Homo sapien
gaaaggcctacggtttctggagcaa

SEQ ID NO: 4684416 - DNA, 25 bp, Homo sapien
agcacagcaggaacattagcccagc

SEQ ID NO: 4684417 - DNA, 25 bp, Homo sapien
ggaacattagcccagccctttgctg

SEQ ID NO: 4684418 - DNA, 25 bp, Homo sapien
cccaagtgggcctctccggcagagg

SEQ ID NO: 4684419 - DNA, 25 bp, Homo sapien
gggatggagcttcctaccccaaggc

SEQ ID NO: 4684420 - DNA, 25 bp, Homo sapien
cacggtccaattcagaagctgctgg

SEQ ID NO: 4684421 - DNA, 25 bp, Homo sapien
gggccttagctgacccctcatgtct

SEQ ID NO: 4684422 - DNA, 25 bp, Homo sapien
gacccctcatgtctagtgctgcacg

SEQ ID NO: 4684423 - DNA, 25 bp, Homo sapien
tagtgctgcacggtccaattcagaa

SEQ ID NO: 4684424 - DNA, 25 bp, Homo sapien
ccattcttggttccgtagccggaga

SEQ ID NO: 4684425 - DNA, 25 bp, Homo sapien
tccgtagccggagacacatttcttc

SEQ ID NO: 4684426 - DNA, 25 bp, Homo sapien
tcttggttccgtagccggagacaca

SEQ ID NO: 4684427 - DNA, 25 bp, Homo sapien
accaccattcttggttccgtagccg

SEQ ID NO: 4684428 - DNA, 25 bp, Homo sapien
gtctcatagcaatagattcacgcaa

SEQ ID NO: 4684429 - DNA, 25 bp, Homo sapien
atagattcacgcaatatttgtcctg

SEQ ID NO: 4684430 - DNA, 25 bp, Homo sapien
tataggcttgcctattgtggatgtc

SEQ ID NO: 4684431 - DNA, 25 bp, Homo sapien
taatccttgttggagtagcacatac

SEQ ID NO: 4684432 - DNA, 25 bp, Homo sapien
tcttttactctcttagtccgtcctc

SEQ ID NO: 4684433 - DNA, 25 bp, Homo sapien
tgtcctgcagagtcgtccgcagtct

SEQ ID NO: 4684434 - DNA, 25 bp, Homo sapien
catttgttgcggaaatcagtctgtc

SEQ ID NO: 4684435 - DNA, 25 bp, Homo sapien
cttcttacttctgccgtgcaattca

SEQ ID NO: 4684436 - DNA, 25 bp, Homo sapien
atggcttattcgttcccgtccatgg

SEQ ID NO: 4684437 - DNA, 25 bp, Homo sapien
cacccgcattcagatctctctgtgt

SEQ ID NO: 4684438 - DNA, 25 bp, Homo sapien
tcaggatccaaacatggcttgtata

SEQ ID NO: 4684439 - DNA, 25 bp, Homo sapien
tctgtgtctcataaatggcttattc

SEQ ID NO: 4684440 - DNA, 25 bp, Homo sapien
tagtgtgtgtatgtctaaagataaa

SEQ ID NO: 4684441 - DNA, 25 bp, Homo sapien
tgtgtatgtctaaagataaagacct

SEQ ID NO: 4684442 - DNA, 25 bp, Homo sapien
taaccacataccatggtcacctaaa

SEQ ID NO: 4684443 - DNA, 25 bp, Homo sapien
agaccttatattaaacataaccaca

SEQ ID NO: 4684444 - DNA, 25 bp, Homo sapien
ccttcccgattcattggctccatca

SEQ ID NO: 4684445 - DNA, 25 bp, Homo sapien
ttcccgattcattggctccatcagc

SEQ ID NO: 4684446 - DNA, 25 bp, Homo sapien
actcccttcccgattcattggctcc

SEQ ID NO: 4684447 - DNA, 25 bp, Homo sapien
ctaagccactcccttcccgattcat

SEQ ID NO: 4684448 - DNA, 25 bp, Homo sapien
gcgtgaccttagacgacacttccaa

SEQ ID NO: 4684449 - DNA, 25 bp, Homo sapien
gttagatacatacagggacttccca

SEQ ID NO: 4684450 - DNA, 25 bp, Homo sapien
ggctgcagtgaaaagagacattgtt

SEQ ID NO: 4684451 - DNA, 25 bp, Homo sapien
gacctgcttctgagatagtcggaag

SEQ ID NO: 4684452 - DNA, 25 bp, Homo sapien
tgaacgggctgcaaaaataagtcca

SEQ ID NO: 4684453 - DNA, 25 bp, Homo sapien
gggactcagtttctccgtcgggaga

SEQ ID NO: 4684454 - DNA, 25 bp, Homo sapien
gcctttcggtgattggtgcgctccc

SEQ ID NO: 4684455 - DNA, 25 bp, Homo sapien
cacctgcggaggagaatgaggtcca

SEQ ID NO: 4684456 - DNA, 25 bp, Homo sapien
tactgttactaagcaggccgtttca

SEQ ID NO: 4684457 - DNA, 25 bp, Homo sapien
ctaagcaggccgtttcagccatgga

SEQ ID NO: 4684458 - DNA, 25 bp, Homo sapien
ttattactgttactaagcaggccgt

SEQ ID NO: 4684459 - DNA, 25 bp, Homo sapien
tgttactaagcaggccgtttcagcc

SEQ ID NO: 4684460 - DNA, 25 bp, Homo sapien
gaagggcagagtgctggtttctcca

SEQ ID NO: 4684461 - DNA, 25 bp, Homo sapien
ggaactggtgctgtactgggtacac

SEQ ID NO: 4684462 - DNA, 25 bp, Homo sapien
cctttgtccaaagtgaggtcactcg

SEQ ID NO: 4684463 - DNA, 25 bp, Homo sapien
cccaggacaagtgggttgcaagaca

SEQ ID NO: 4684464 - DNA, 25 bp, Homo sapien
ggaaggcagtcggtgtccaccaaga

SEQ ID NO: 4684465 - DNA, 25 bp, Homo sapien
agtagcaaggagctgcctcggaacg

SEQ ID NO: 4684466 - DNA, 25 bp, Homo sapien
cagcgggcagactctaagcgaggac

SEQ ID NO: 4684467 - DNA, 25 bp, Homo sapien
cacatctgtgggctaggtttgcctc

SEQ ID NO: 4684468 - DNA, 25 bp, Homo sapien
ggagcagatggaccgtgtcgtggca

SEQ ID NO: 4684469 - DNA, 25 bp, Homo sapien
cgcacagagccggagcagatggacc

SEQ ID NO: 4684470 - DNA, 25 bp, Homo sapien
aggaagcgaggtggccgcacagagc

SEQ ID NO: 4684471 - DNA, 25 bp, Homo sapien
ctgggatgcagcagcgcaaggaagc

SEQ ID NO: 4684472 - DNA, 25 bp, Homo sapien
catactcttctggtggggagctctt

SEQ ID NO: 4684473 - DNA, 25 bp, Homo sapien
ccttaaccgaggcgcgctctgcttt

SEQ ID NO: 4684474 - DNA, 25 bp, Homo sapien
tttcccttaaccgaggcgcgctctg

SEQ ID NO: 4684475 - DNA, 25 bp, Homo sapien
gacgtgggcatggtgggactggctc

SEQ ID NO: 4684476 - DNA, 25 bp, Homo sapien
aaagcgatcctggtgtcggcactcg

SEQ ID NO: 4684477 - DNA, 25 bp, Homo sapien
gaatttgtcatgtcagggcgcgtgc

SEQ ID NO: 4684478 - DNA, 25 bp, Homo sapien
gaagaaaaccgagactgaagtgccc

SEQ ID NO: 4684479 - DNA, 25 bp, Homo sapien
cgaattgtgaattagctagccggct

SEQ ID NO: 4684480 - DNA, 25 bp, Homo sapien
taaaatccacccaccttactcagat

SEQ ID NO: 4684481 - DNA, 25 bp, Homo sapien
gattgtagatccaaatgcagttcta

SEQ ID NO: 4684482 - DNA, 25 bp, Homo sapien
taatacatagacatgccatgtaccc

SEQ ID NO: 4684483 - DNA, 25 bp, Homo sapien
gatgttgacacgatggcaaccagga

SEQ ID NO: 4684484 - DNA, 25 bp, Homo sapien
ttgatctctgaggtccttgacctct

SEQ ID NO: 4684485 - DNA, 25 bp, Homo sapien
cttgatctctgaggtccttgacctc

SEQ ID NO: 4684486 - DNA, 25 bp, Homo sapien
acctctatagtgtccttgcaatcca

SEQ ID NO: 4684487 - DNA, 25 bp, Homo sapien
gacctctatagtgtccttgcaatcc

SEQ ID NO: 4684488 - DNA, 25 bp, Homo sapien
caggacttatggctggcgtcccaag

SEQ ID NO: 4684489 - DNA, 25 bp, Homo sapien
tcatgggaatcagagacagtccatc

SEQ ID NO: 4684490 - DNA, 25 bp, Homo sapien
cccctctagaagacaaatggtctgg

SEQ ID NO: 4684491 - DNA, 25 bp, Homo sapien
gaataggatcggattgttgtacacc

SEQ ID NO: 4684492 - DNA, 25 bp, Homo sapien
atttgcagcacagtcagctcttagg

SEQ ID NO: 4684493 - DNA, 25 bp, Homo sapien
taagtcatcttatagtggaactgac

SEQ ID NO: 4684494 - DNA, 25 bp, Homo sapien
cccagggtaatggcactgcacaact

SEQ ID NO: 4684495 - DNA, 25 bp, Homo sapien
tggcctaccctgtgatttttaatca

SEQ ID NO: 4684496 - DNA, 25 bp, Homo sapien
aatagttcctgtcttttggttgcca

SEQ ID NO: 4684497 - DNA, 25 bp, Homo sapien
tggcatctacaaatagttcctgtct

SEQ ID NO: 4684498 - DNA, 25 bp, Homo sapien
gatactggcatctacaaatagttcc

SEQ ID NO: 4684499 - DNA, 25 bp, Homo sapien
ttctgcagatactggcatctacaaa

SEQ ID NO: 4684500 - DNA, 25 bp, Homo sapien
aaagtacctgaacatagttgaacca

SEQ ID NO: 4684501 - DNA, 25 bp, Homo sapien
cttgcagggaagatgtctgacattc

SEQ ID NO: 4684502 - DNA, 25 bp, Homo sapien
tgtctgacattcacaggacaatcct

SEQ ID NO: 4684503 - DNA, 25 bp, Homo sapien
gggtaggttgtgtgaagtctggatt

SEQ ID NO: 4684504 - DNA, 25 bp, Homo sapien
gctgaccgctcttgaacttctgtga

SEQ ID NO: 4684505 - DNA, 25 bp, Homo sapien
agagcaaggcaagcggcctaaggca

SEQ ID NO: 4684506 - DNA, 25 bp, Homo sapien
cacagcgtagcatcagctgaccgct

SEQ ID NO: 4684507 - DNA, 25 bp, Homo sapien
gttgtcacgtgaccgcacagcgtag

SEQ ID NO: 4684508 - DNA, 25 bp, Homo sapien
cgggcctcggacaccttctcggctg

SEQ ID NO: 4684509 - DNA, 25 bp, Homo sapien
gcgggcctcggacaccttctcggct

SEQ ID NO: 4684510 - DNA, 25 bp, Homo sapien
ttgcgggcctcggacaccttctcgg

SEQ ID NO: 4684511 - DNA, 25 bp, Homo sapien
ttttgcgggcctcggacaccttctc

SEQ ID NO: 4684512 - DNA, 25 bp, Homo sapien
tgaggcccagcggtctttcttcgac

SEQ ID NO: 4684513 - DNA, 25 bp, Homo sapien
caggcgatccgcaagccttccagag

SEQ ID NO: 4684514 - DNA, 25 bp, Homo sapien
gctcctcaaagcttcgaaacacaca

SEQ ID NO: 4684515 - DNA, 25 bp, Homo sapien
catctcacatcgtggcttccaggcg

SEQ ID NO: 4684516 - DNA, 25 bp, Homo sapien
cctctgcaggcggtactgttcaatt

SEQ ID NO: 4684517 - DNA, 25 bp, Homo sapien
ctctgcaggcggtactgttcaattt

SEQ ID NO: 4684518 - DNA, 25 bp, Homo sapien
gttacctgcacccaagagtcctgat

SEQ ID NO: 4684519 - DNA, 25 bp, Homo sapien
cctgaccactggatggtaagctaca

SEQ ID NO: 4684520 - DNA, 25 bp, Homo sapien
tacctggcgcatgttaactgcttaa

SEQ ID NO: 4684521 - DNA, 25 bp, Homo sapien
taagctacactccatgagggaaggg

SEQ ID NO: 4684522 - DNA, 25 bp, Homo sapien
ttaagcctagaagctccaggtcacc

SEQ ID NO: 4684523 - DNA, 25 bp, Homo sapien
caagaacaaagatgatccagcactt

SEQ ID NO: 4684524 - DNA, 25 bp, Homo sapien
tgcccagccacgttttaatggcact

SEQ ID NO: 4684525 - DNA, 25 bp, Homo sapien
gagcatgatggatcatgcctacagt

SEQ ID NO: 4684526 - DNA, 25 bp, Homo sapien
tcgtagtgaactgagatgacgccac

SEQ ID NO: 4684527 - DNA, 25 bp, Homo sapien
agagcaagactacatctcggacagg

SEQ ID NO: 4684528 - DNA, 25 bp, Homo sapien
ggtcgtagtgaactgagatgacgcc

SEQ ID NO: 4684529 - DNA, 25 bp, Homo sapien
aagactacatctcggacaggaaaaa

SEQ ID NO: 4684530 - DNA, 25 bp, Homo sapien
ctataacgttctggaagacgtaact

SEQ ID NO: 4684531 - DNA, 25 bp, Homo sapien
tttattcacctaacctgttcttgcc

SEQ ID NO: 4684532 - DNA, 25 bp, Homo sapien
tgtgccttctttattagaacttaac

SEQ ID NO: 4684533 - DNA, 25 bp, Homo sapien
gacctataaggaggctatcactcca

SEQ ID NO: 4684534 - DNA, 25 bp, Homo sapien
tattctcagagttaacaggagccac

SEQ ID NO: 4684535 - DNA, 25 bp, Homo sapien
tgtcacggagggattatcagaacaa

SEQ ID NO: 4684536 - DNA, 25 bp, Homo sapien
agaatctgctatataggccgggcgc

SEQ ID NO: 4684537 - DNA, 25 bp, Homo sapien
acaatgctctggttggtcaggtaca

SEQ ID NO: 4684538 - DNA, 25 bp, Homo sapien
tcagtgctgcaactgccacgggatc

SEQ ID NO: 4684539 - DNA, 25 bp, Homo sapien
tgctgcaactgccacgggatcccaa

SEQ ID NO: 4684540 - DNA, 25 bp, Homo sapien
ctgcaactgccacgggatcccaatg

SEQ ID NO: 4684541 - DNA, 25 bp, Homo sapien
cacttcagtgctgcaactgccacgg

SEQ ID NO: 4684542 - DNA, 25 bp, Homo sapien
catccctgttctgccggaagtatgt

SEQ ID NO: 4684543 - DNA, 25 bp, Homo sapien
tcatccctgttctgccggaagtatg

SEQ ID NO: 4684544 - DNA, 25 bp, Homo sapien
cataagaatgtaactagagctgtgc

SEQ ID NO: 4684545 - DNA, 25 bp, Homo sapien
aactagagctgtgctaagcttcata

SEQ ID NO: 4684546 - DNA, 25 bp, Homo sapien
atctaaaatgccactccacagcaca

SEQ ID NO: 4684547 - DNA, 25 bp, Homo sapien
tgctaagcttcatattcgtgagggc

SEQ ID NO: 4684548 - DNA, 25 bp, Homo sapien
gactttcggctaagatggccacagg

SEQ ID NO: 4684549 - DNA, 25 bp, Homo sapien
cactggttgtcacggagacagggaa

SEQ ID NO: 4684550 - DNA, 25 bp, Homo sapien
tgtcccaggacaaggatctctagag

SEQ ID NO: 4684551 - DNA, 25 bp, Homo sapien
gaccatctgggtcaaaatgcatttc

SEQ ID NO: 4684552 - DNA, 25 bp, Homo sapien
tagcagttgtagcagaaacatggtt

SEQ ID NO: 4684553 - DNA, 25 bp, Homo sapien
tgttgggtcgggacacgtgacctac

SEQ ID NO: 4684554 - DNA, 25 bp, Homo sapien
cgtgacctacaccaatatgctgaga

SEQ ID NO: 4684555 - DNA, 25 bp, Homo sapien
tatgctgagaacaagtgtcatttga

SEQ ID NO: 4684556 - DNA, 25 bp, Homo sapien
cgctcggtcgcccaaccccgaggag

SEQ ID NO: 4684557 - DNA, 25 bp, Homo sapien
gtcgggggcgccgagcccctaatgc

SEQ ID NO: 4684558 - DNA, 25 bp, Homo sapien
cgctgcgccgccttcacgggcccgc

SEQ ID NO: 4684559 - DNA, 25 bp, Homo sapien
ctgcgccgccttcacgggcccgccc

SEQ ID NO: 4684560 - DNA, 25 bp, Homo sapien
acgcaggccaaggcggaggcgccca

SEQ ID NO: 4684561 - DNA, 25 bp, Homo sapien
cgcaggccaaggcggaggcgcccag

SEQ ID NO: 4684562 - DNA, 25 bp, Homo sapien
aacgcaggccaaggcggaggcgccc

SEQ ID NO: 4684563 - DNA, 25 bp, Homo sapien
cagggcgcacgaaggaccccccgca

SEQ ID NO: 4684564 - DNA, 25 bp, Homo sapien
gcacgaaggaccccccgcaggctgc

SEQ ID NO: 4684565 - DNA, 25 bp, Homo sapien
agggcgcacgaaggaccccccgcag

SEQ ID NO: 4684566 - DNA, 25 bp, Homo sapien
gcgcacgaaggaccccccgcaggct

SEQ ID NO: 4684567 - DNA, 25 bp, Homo sapien
ccttctccccataaatcagtctggc

SEQ ID NO: 4684568 - DNA, 25 bp, Homo sapien
tccccataaatcagtctggccctcc

SEQ ID NO: 4684569 - DNA, 25 bp, Homo sapien
ttctccccataaatcagtctggccc

SEQ ID NO: 4684570 - DNA, 25 bp, Homo sapien
tctccccataaatcagtctggccct

SEQ ID NO: 4684571 - DNA, 25 bp, Homo sapien
ggccttgggcagctgtctcgtccca

SEQ ID NO: 4684572 - DNA, 25 bp, Homo sapien
cccagtctcagtctccgccctctgg

SEQ ID NO: 4684573 - DNA, 25 bp, Homo sapien
cttgggcagctgtctcgtcccagtc

SEQ ID NO: 4684574 - DNA, 25 bp, Homo sapien
gggcagctgtctcgtcccagtctca

SEQ ID NO: 4684575 - DNA, 25 bp, Homo sapien
ggcccctgaggcagatataattctg

SEQ ID NO: 4684576 - DNA, 25 bp, Homo sapien
aaacgaagggacatcgtagctaggg

SEQ ID NO: 4684577 - DNA, 25 bp, Homo sapien
gttccagacaagaaacgaagggaca

SEQ ID NO: 4684578 - DNA, 25 bp, Homo sapien
cctccttcatttgatcatctcttag

SEQ ID NO: 4684579 - DNA, 25 bp, Homo sapien
taccaacaaaaatagccacaaggat

SEQ ID NO: 4684580 - DNA, 25 bp, Homo sapien
catcacgccttactttcttcctgta

SEQ ID NO: 4684581 - DNA, 25 bp, Homo sapien
tctcatcacgccttactttcttcct

SEQ ID NO: 4684582 - DNA, 25 bp, Homo sapien
ttcttcctgtaccaacaaaaatagc

SEQ ID NO: 4684583 - DNA, 25 bp, Homo sapien
cagagctgtggttcattctggagca

SEQ ID NO: 4684584 - DNA, 25 bp, Homo sapien
ggcagggcgccagctgtttctactt

SEQ ID NO: 4684585 - DNA, 25 bp, Homo sapien
cgggtccacctgtggttcacaggcc

SEQ ID NO: 4684586 - DNA, 25 bp, Homo sapien
ccccgggtccacctgtggttcacag

SEQ ID NO: 4684587 - DNA, 25 bp, Homo sapien
cccgggtccacctgtggttcacagg

SEQ ID NO: 4684588 - DNA, 25 bp, Homo sapien
ggtccacctgtggttcacaggccat

SEQ ID NO: 4684589 - DNA, 25 bp, Homo sapien
aaaaggatcgagatctccttgcacc

SEQ ID NO: 4684590 - DNA, 25 bp, Homo sapien
gatcgagatctccttgcaccacagt

SEQ ID NO: 4684591 - DNA, 25 bp, Homo sapien
gaaactggacaaaaggatcgagatc

SEQ ID NO: 4684592 - DNA, 25 bp, Homo sapien
gatctccttgcaccacagtacaagg

SEQ ID NO: 4684593 - DNA, 25 bp, Homo sapien
tctggccatgagaacctcctcgcaa

SEQ ID NO: 4684594 - DNA, 25 bp, Homo sapien
gaacctcctcgcaacaaggagggac

SEQ ID NO: 4684595 - DNA, 25 bp, Homo sapien
tgagcccgaagcctggcggcatcac

SEQ ID NO: 4684596 - DNA, 25 bp, Homo sapien
gccatgagaacctcctcgcaacaag

SEQ ID NO: 4684597 - DNA, 25 bp, Homo sapien
cttcatctggctgagtgataaccat

SEQ ID NO: 4684598 - DNA, 25 bp, Homo sapien
tggatgccccaagtttgcagttgct

SEQ ID NO: 4684599 - DNA, 25 bp, Homo sapien
gatgggtgcacaggtattgtcaatc

SEQ ID NO: 4684600 - DNA, 25 bp, Homo sapien
tctgcggctcccaggtcgaaggaga

SEQ ID NO: 4684601 - DNA, 25 bp, Homo sapien
ttgtcaatccggagaacagtgagga

SEQ ID NO: 4684602 - DNA, 25 bp, Homo sapien
cagcaaaggccagccgcataggcct

SEQ ID NO: 4684603 - DNA, 25 bp, Homo sapien
gccgcataggcctcgagttgtagat

SEQ ID NO: 4684604 - DNA, 25 bp, Homo sapien
tatatcttctcacttggggctccaa

SEQ ID NO: 4684605 - DNA, 25 bp, Homo sapien
ggcctcgagttgtagatgatatatc

SEQ ID NO: 4684606 - DNA, 25 bp, Homo sapien
gtcaaggtcaggctcaccgcggcca

SEQ ID NO: 4684607 - DNA, 25 bp, Homo sapien
cgagcagcatgccagcccagtggtt

SEQ ID NO: 4684608 - DNA, 25 bp, Homo sapien
ggtagagtagatattggcccacacc

SEQ ID NO: 4684609 - DNA, 25 bp, Homo sapien
ggttccccaaggcaaacatctgact

SEQ ID NO: 4684610 - DNA, 25 bp, Homo sapien
ccagcctcaggtccgtgttggtgtt

SEQ ID NO: 4684611 - DNA, 25 bp, Homo sapien
tcaggagggctccattggcagctgc

SEQ ID NO: 4684612 - DNA, 25 bp, Homo sapien
cagcagcacccggtgtctcaggagg

SEQ ID NO: 4684613 - DNA, 25 bp, Homo sapien
tgaatcacactctggcatccttcca

SEQ ID NO: 4684614 - DNA, 25 bp, Homo sapien
tctccaggtcgaagtagacaaacca

SEQ ID NO: 4684615 - DNA, 25 bp, Homo sapien
gcacacagttctccaggtcgaagta

SEQ ID NO: 4684616 - DNA, 25 bp, Homo sapien
cagttctccaggtcgaagtagacaa

SEQ ID NO: 4684617 - DNA, 25 bp, Homo sapien
ccaggtcgaagtagacaaaccaaag

SEQ ID NO: 4684618 - DNA, 25 bp, Homo sapien
gatgaagctcagtctgcatgagtgg

SEQ ID NO: 4684619 - DNA, 25 bp, Homo sapien
tcagcctcaggaacaagctgatgaa

SEQ ID NO: 4684620 - DNA, 25 bp, Homo sapien
ttaggacaagaattgccgggcagga

SEQ ID NO: 4684621 - DNA, 25 bp, Homo sapien
gctgttgcagggctcaccccagtct

SEQ ID NO: 4684622 - DNA, 25 bp, Homo sapien
agtactacttgcaggcttcctactg

SEQ ID NO: 4684623 - DNA, 25 bp, Homo sapien
gcacaaaagagtaagcctggactgg

SEQ ID NO: 4684624 - DNA, 25 bp, Homo sapien
tggactggtttggaccttgaatccc

SEQ ID NO: 4684625 - DNA, 25 bp, Homo sapien
tctgaagtttcaaatgtcacctgag

SEQ ID NO: 4684626 - DNA, 25 bp, Homo sapien
agattttaatagaggccgggcatgg

SEQ ID NO: 4684627 - DNA, 25 bp, Homo sapien
agataaaagattttaatagaggccg

SEQ ID NO: 4684628 - DNA, 25 bp, Homo sapien
gggaggatgaagcgggtggatcgct

SEQ ID NO: 4684629 - DNA, 25 bp, Homo sapien
tgggaggatgaagcgggtggatcgc

SEQ ID NO: 4684630 - DNA, 25 bp, Homo sapien
gaggcacctagagtaatcagttcac

SEQ ID NO: 4684631 - DNA, 25 bp, Homo sapien
taacgatgtgaatgtacctcatgct

SEQ ID NO: 4684632 - DNA, 25 bp, Homo sapien
taaagacacagtacagccgggtaca

SEQ ID NO: 4684633 - DNA, 25 bp, Homo sapien
ggcgctaggccttaatgcacattct

SEQ ID NO: 4684634 - DNA, 25 bp, Homo sapien
tgtagtagccgccaaacactgccag

SEQ ID NO: 4684635 - DNA, 25 bp, Homo sapien
gatgtaggcttctatgagctggcag

SEQ ID NO: 4684636 - DNA, 25 bp, Homo sapien
gaggtcactagaagccggatgtagt

SEQ ID NO: 4684637 - DNA, 25 bp, Homo sapien
ggagagttcgtgtgtcgtgtcccca

SEQ ID NO: 4684638 - DNA, 25 bp, Homo sapien
gaagatgagtaccttcatccctagg

SEQ ID NO: 4684639 - DNA, 25 bp, Homo sapien
gggctccccattggccatcttgggc

SEQ ID NO: 4684640 - DNA, 25 bp, Homo sapien
ggaagatgagtaccttcatccctag

SEQ ID NO: 4684641 - DNA, 25 bp, Homo sapien
tggggctccccattggccatcttgg

SEQ ID NO: 4684642 - DNA, 25 bp, Homo sapien
agcacaacaccccagtggctgacat

SEQ ID NO: 4684643 - DNA, 25 bp, Homo sapien
ctgaagtgagcacaacaccccagtg

SEQ ID NO: 4684644 - DNA, 25 bp, Homo sapien
gctgacatcacaggccccttttgga

SEQ ID NO: 4684645 - DNA, 25 bp, Homo sapien
cccttttggagtgcccccagatgct

SEQ ID NO: 4684646 - DNA, 25 bp, Homo sapien
ggtcagcatgagatgtcaaacaagg

SEQ ID NO: 4684647 - DNA, 25 bp, Homo sapien
ccagggggtcagcatgagatgtcaa

SEQ ID NO: 4684648 - DNA, 25 bp, Homo sapien
tagctctgtaaccatcagcttctgc

SEQ ID NO: 4684649 - DNA, 25 bp, Homo sapien
agagtagctttggtgggactagctc

SEQ ID NO: 4684650 - DNA, 25 bp, Homo sapien
tcttctgcagcctgtgtactggtag

SEQ ID NO: 4684651 - DNA, 25 bp, Homo sapien
aaccacaagcgtgcatgcctgtgaa

SEQ ID NO: 4684652 - DNA, 25 bp, Homo sapien
tagacaacacgtacacataccactg

SEQ ID NO: 4684653 - DNA, 25 bp, Homo sapien
tcaaggcaatgccacatagagcagt

SEQ ID NO: 4684654 - DNA, 25 bp, Homo sapien
tcattccaggacaatgttcatgtcg

SEQ ID NO: 4684655 - DNA, 25 bp, Homo sapien
tgttcatgtcgggaaacataaccat

SEQ ID NO: 4684656 - DNA, 25 bp, Homo sapien
cgggaaacataaccattgttctaca

SEQ ID NO: 4684657 - DNA, 25 bp, Homo sapien
caggacaatgttcatgtcgggaaac

SEQ ID NO: 4684658 - DNA, 25 bp, Homo sapien
aaaatccaggtctgctaggtaggcc

SEQ ID NO: 4684659 - DNA, 25 bp, Homo sapien
cagtccaggaaagagcgtgaactca

SEQ ID NO: 4684660 - DNA, 25 bp, Homo sapien
tcaaacttgttcaggagcagatcac

SEQ ID NO: 4684661 - DNA, 25 bp, Homo sapien
ccaaaatcgcagacaaaggctaggt

SEQ ID NO: 4684662 - DNA, 25 bp, Homo sapien
tgaatggcaagccacgtgtttatta

SEQ ID NO: 4684663 - DNA, 25 bp, Homo sapien
tggcaagccacgtgtttattacatt

SEQ ID NO: 4684664 - DNA, 25 bp, Homo sapien
aatggcaagccacgtgtttattaca

SEQ ID NO: 4684665 - DNA, 25 bp, Homo sapien
ggcaagccacgtgtttattacattt

SEQ ID NO: 4684666 - DNA, 25 bp, Homo sapien
ctttctattggtcacattcacagcc

SEQ ID NO: 4684667 - DNA, 25 bp, Homo sapien
gagaaatacgggcttctttctattg

SEQ ID NO: 4684668 - DNA, 25 bp, Homo sapien
gggttctaggactgactgagaaata

SEQ ID NO: 4684669 - DNA, 25 bp, Homo sapien
aggtcagaaagacagtggtcacctt

SEQ ID NO: 4684670 - DNA, 25 bp, Homo sapien
tgtagtatgcgatcttcacagcaac

SEQ ID NO: 4684671 - DNA, 25 bp, Homo sapien
ggcacagatgccgagaaatgtacat

SEQ ID NO: 4684672 - DNA, 25 bp, Homo sapien
gaatccatgcaatgagttaccacct

SEQ ID NO: 4684673 - DNA, 25 bp, Homo sapien
aatgtacattgtgggcataccctga

SEQ ID NO: 4684674 - DNA, 25 bp, Homo sapien
ggtatctacaatatgcgagacaaaa

SEQ ID NO: 4684675 - DNA, 25 bp, Homo sapien
tatacatcaggtatctacaatatgc

SEQ ID NO: 4684676 - DNA, 25 bp, Homo sapien
catcaggtatctacaatatgcgaga

SEQ ID NO: 4684677 - DNA, 25 bp, Homo sapien
aaatatacatcaggtatctacaata

SEQ ID NO: 4684678 - DNA, 25 bp, Homo sapien
ctgaaatagctgaggtctgaggcag

SEQ ID NO: 4684679 - DNA, 25 bp, Homo sapien
tattgacataaatataccccatggc

SEQ ID NO: 4684680 - DNA, 25 bp, Homo sapien
tgacataaatataccccatggcact

SEQ ID NO: 4684681 - DNA, 25 bp, Homo sapien
tctttattgacataaatatacccca

SEQ ID NO: 4684682 - DNA, 25 bp, Homo sapien
gaatgttccctcttaccactactct

SEQ ID NO: 4684683 - DNA, 25 bp, Homo sapien
aaatagtgagacactagaaactccc

SEQ ID NO: 4684684 - DNA, 25 bp, Homo sapien
tactggaagtccaagccaatgaaat

SEQ ID NO: 4684685 - DNA, 25 bp, Homo sapien
cactacaatcataaacaaggcaaga

SEQ ID NO: 4684686 - DNA, 25 bp, Homo sapien
tttaactcaagaaacccaactgcag

SEQ ID NO: 4684687 - DNA, 25 bp, Homo sapien
tatgcggcccctcgataatggtaga

SEQ ID NO: 4684688 - DNA, 25 bp, Homo sapien
tcagtagcacttggcaactagcagc

SEQ ID NO: 4684689 - DNA, 25 bp, Homo sapien
tgcaggcaacttttccagaacagga

SEQ ID NO: 4684690 - DNA, 25 bp, Homo sapien
cctgttcctcatagagggcgcttct

SEQ ID NO: 4684691 - DNA, 25 bp, Homo sapien
atagagggcgcttcttgctgtgttc

SEQ ID NO: 4684692 - DNA, 25 bp, Homo sapien
gaccataacaaacaaggcgagttgg

SEQ ID NO: 4684693 - DNA, 25 bp, Homo sapien
gaccacaattcttataccatcacct

SEQ ID NO: 4684694 - DNA, 25 bp, Homo sapien
ccatttgacgctcagggccataggg

SEQ ID NO: 4684695 - DNA, 25 bp, Homo sapien
tcataaacgtccagagcttcagggc

SEQ ID NO: 4684696 - DNA, 25 bp, Homo sapien
gcctactgtgcgactccatttgacg

SEQ ID NO: 4684697 - DNA, 25 bp, Homo sapien
tatgcaatgcgtagccagtgctgat

SEQ ID NO: 4684698 - DNA, 25 bp, Homo sapien
ccttaaacacaagcttgtctgtgtg

SEQ ID NO: 4684699 - DNA, 25 bp, Homo sapien
ttagccagatacggtgtcacacacc

SEQ ID NO: 4684700 - DNA, 25 bp, Homo sapien
tagccagatacggtgtcacacacct

SEQ ID NO: 4684701 - DNA, 25 bp, Homo sapien
aattagccagatacggtgtcacaca

SEQ ID NO: 4684702 - DNA, 25 bp, Homo sapien
agccagatacggtgtcacacacctg

SEQ ID NO: 4684703 - DNA, 25 bp, Homo sapien
tgggcagaatagcaagatccggtct

SEQ ID NO: 4684704 - DNA, 25 bp, Homo sapien
ctgggcagaatagcaagatccggtc

SEQ ID NO: 4684705 - DNA, 25 bp, Homo sapien
aggatctcttgaggcgaagagttta

SEQ ID NO: 4684706 - DNA, 25 bp, Homo sapien
gcagaaggatctcttgaggcgaaga

SEQ ID NO: 4684707 - DNA, 25 bp, Homo sapien
tccagataagaaagggaggccagtg

SEQ ID NO: 4684708 - DNA, 25 bp, Homo sapien
ttccagataagaaagggaggccagt

SEQ ID NO: 4684709 - DNA, 25 bp, Homo sapien
gatgaggccatggagtgaacccagt

SEQ ID NO: 4684710 - DNA, 25 bp, Homo sapien
gccgttgcaataatccaagtaggag

SEQ ID NO: 4684711 - DNA, 25 bp, Homo sapien
gacacacgaccaccgatgatggaaa

SEQ ID NO: 4684712 - DNA, 25 bp, Homo sapien
tgctgatgcttaggagccgttgcaa

SEQ ID NO: 4684713 - DNA, 25 bp, Homo sapien
ctcatttagggccataggtccaggc

SEQ ID NO: 4684714 - DNA, 25 bp, Homo sapien
ttctgactgtccatagccaaactcc

SEQ ID NO: 4684715 - DNA, 25 bp, Homo sapien
tggagttcagccgtcccaggatgaa

SEQ ID NO: 4684716 - DNA, 25 bp, Homo sapien
tcctcaccacgttcagatgcttctt

SEQ ID NO: 4684717 - DNA, 25 bp, Homo sapien
caccagtctgattgtcagcaggtca

SEQ ID NO: 4684718 - DNA, 25 bp, Homo sapien
ggcaccagtctgattgtcagcaggt

SEQ ID NO: 4684719 - DNA, 25 bp, Homo sapien
ccagtctgattgtcagcaggtcatt

SEQ ID NO: 4684720 - DNA, 25 bp, Homo sapien
gtgggcaccagtctgattgtcagca

SEQ ID NO: 4684721 - DNA, 25 bp, Homo sapien
ccagggtcaccaagcaaccctgtga

SEQ ID NO: 4684722 - DNA, 25 bp, Homo sapien
tgtagacatcgctgtaaatacgact

SEQ ID NO: 4684723 - DNA, 25 bp, Homo sapien
gagttgctgcccttgcgaggcttta

SEQ ID NO: 4684724 - DNA, 25 bp, Homo sapien
caagctcagagtccatgtagacatc

SEQ ID NO: 4684725 - DNA, 25 bp, Homo sapien
tcattctttcaatcaccaggtggtt

SEQ ID NO: 4684726 - DNA, 25 bp, Homo sapien
ccagggaaccatgaagcaccatcac

SEQ ID NO: 4684727 - DNA, 25 bp, Homo sapien
tggctgctccggaggaaagatactt

SEQ ID NO: 4684728 - DNA, 25 bp, Homo sapien
catcaccaaagcttttcccagtaag

SEQ ID NO: 4684729 - DNA, 25 bp, Homo sapien
agcttttcccagtaagctctgctgt

SEQ ID NO: 4684730 - DNA, 25 bp, Homo sapien
gaattatcagcatcttccatctctg

SEQ ID NO: 4684731 - DNA, 25 bp, Homo sapien
gcaactgggtctcagtggcggccat

SEQ ID NO: 4684732 - DNA, 25 bp, Homo sapien
tggctgttcctgcagcaactgggtc

SEQ ID NO: 4684733 - DNA, 25 bp, Homo sapien
tcttttcagaattatcagcatcttc

SEQ ID NO: 4684734 - DNA, 25 bp, Homo sapien
tcagcttcagactgtgttgattttc

SEQ ID NO: 4684735 - DNA, 25 bp, Homo sapien
ccatgtggttttgaagacaaacttc

SEQ ID NO: 4684736 - DNA, 25 bp, Homo sapien
gaaacagtgtttgagagggagattt

SEQ ID NO: 4684737 - DNA, 25 bp, Homo sapien
gacctacttcttgatttaccatgtg

SEQ ID NO: 4684738 - DNA, 25 bp, Homo sapien
tcctccacatcaaaatcttcaagct

SEQ ID NO: 4684739 - DNA, 25 bp, Homo sapien
gacatggacatattgctatcttcag

SEQ ID NO: 4684740 - DNA, 25 bp, Homo sapien
tcttcaagcttatcatcagacaaag

SEQ ID NO: 4684741 - DNA, 25 bp, Homo sapien
tatttctggacaattgcctgccttt

SEQ ID NO: 4684742 - DNA, 25 bp, Homo sapien
cagctttaatacgaaaaccaatatc

SEQ ID NO: 4684743 - DNA, 25 bp, Homo sapien
tacagctttaatacgaaaaccaata

SEQ ID NO: 4684744 - DNA, 25 bp, Homo sapien
taatacgaaaaccaatatctttatc

SEQ ID NO: 4684745 - DNA, 25 bp, Homo sapien
tacgaaaaccaatatctttatcata

SEQ ID NO: 4684746 - DNA, 25 bp, Homo sapien
agcatgtgaagccaacccaaaattg

SEQ ID NO: 4684747 - DNA, 25 bp, Homo sapien
atgatttcaagagcatgataaaatc

SEQ ID NO: 4684748 - DNA, 25 bp, Homo sapien
tctataccatagtcacaacatttac

SEQ ID NO: 4684749 - DNA, 25 bp, Homo sapien
ccttttgaatcatctcatttggcat

SEQ ID NO: 4684750 - DNA, 25 bp, Homo sapien
agtttaaggtgcaacctactgacca

SEQ ID NO: 4684751 - DNA, 25 bp, Homo sapien
ttgagattcatcacaagcttcaaca

SEQ ID NO: 4684752 - DNA, 25 bp, Homo sapien
ggcacccaatcaagttggccaatag

SEQ ID NO: 4684753 - DNA, 25 bp, Homo sapien
cccaatcaagttggccaataggtcc

SEQ ID NO: 4684754 - DNA, 25 bp, Homo sapien
gttggccaataggtccttagttgga

SEQ ID NO: 4684755 - DNA, 25 bp, Homo sapien
tcaagttggccaataggtccttagt

SEQ ID NO: 4684756 - DNA, 25 bp, Homo sapien
gaaacagacccctcttggcactgac

SEQ ID NO: 4684757 - DNA, 25 bp, Homo sapien
tacatcaacggcatgctgctgtggc

SEQ ID NO: 4684758 - DNA, 25 bp, Homo sapien
gacccctcttggcactgactacatc

SEQ ID NO: 4684759 - DNA, 25 bp, Homo sapien
tggcactgactacatcaacggcatg

SEQ ID NO: 4684760 - DNA, 25 bp, Homo sapien
gtgaatgctgtacacaacctgcttt

SEQ ID NO: 4684761 - DNA, 25 bp, Homo sapien
gtagtgaatgctgtacacaacctgc

SEQ ID NO: 4684762 - DNA, 25 bp, Homo sapien
cttcagtgtagtgaatgctgtacac

SEQ ID NO: 4684763 - DNA, 25 bp, Homo sapien
ttcagtgtagtgaatgctgtacaca

SEQ ID NO: 4684764 - DNA, 25 bp, Homo sapien
cacgtagtgcacatggtacccaata

SEQ ID NO: 4684765 - DNA, 25 bp, Homo sapien
tcacccacgtagtgcacatggtacc

SEQ ID NO: 4684766 - DNA, 25 bp, Homo sapien
catgtacagatgtattatgggtaaa

SEQ ID NO: 4684767 - DNA, 25 bp, Homo sapien
ttcatcacccacgtagtgcacatgg

SEQ ID NO: 4684768 - DNA, 25 bp, Homo sapien
tttgggaaaccatctgacgaggcct

SEQ ID NO: 4684769 - DNA, 25 bp, Homo sapien
tctggtcaggaaagcattgtgcctt

SEQ ID NO: 4684770 - DNA, 25 bp, Homo sapien
tctcagaaaaccagttccgcgaggg

SEQ ID NO: 4684771 - DNA, 25 bp, Homo sapien
gagagacaatgatgaccctggaagt

SEQ ID NO: 4684772 - DNA, 25 bp, Homo sapien
tttttcaacacccacagcttccatt

SEQ ID NO: 4684773 - DNA, 25 bp, Homo sapien
tatttttcaacacccacagcttcca

SEQ ID NO: 4684774 - DNA, 25 bp, Homo sapien
tcaggaagacccgaacttcaagcaa

SEQ ID NO: 4684775 - DNA, 25 bp, Homo sapien
gaagacccgaacttcaagcaaagcc

SEQ ID NO: 4684776 - DNA, 25 bp, Homo sapien
ggaaaatgactatggagtaacctta

SEQ ID NO: 4684777 - DNA, 25 bp, Homo sapien
ccccgataaaggtggaatggcattg

SEQ ID NO: 4684778 - DNA, 25 bp, Homo sapien
gctacttagggcactgagctggtat

SEQ ID NO: 4684779 - DNA, 25 bp, Homo sapien
cttatagcactattccctggaagct

SEQ ID NO: 4684780 - DNA, 25 bp, Homo sapien
tattgaagactcctggctttgttca

SEQ ID NO: 4684781 - DNA, 25 bp, Homo sapien
ttcccttggatctacccagccatga

SEQ ID NO: 4684782 - DNA, 25 bp, Homo sapien
taatgtcccacaattgcccacagca

SEQ ID NO: 4684783 - DNA, 25 bp, Homo sapien
tactctgaaagtgataggtctgtgt

SEQ ID NO: 4684784 - DNA, 25 bp, Homo sapien
agtgcatggaacatttttgtaatgt

SEQ ID NO: 4684785 - DNA, 25 bp, Homo sapien
tagacaagctcccctccagtactta

SEQ ID NO: 4684786 - DNA, 25 bp, Homo sapien
caagctcccctccagtacttattaa

SEQ ID NO: 4684787 - DNA, 25 bp, Homo sapien
gacaagctcccctccagtacttatt

SEQ ID NO: 4684788 - DNA, 25 bp, Homo sapien
tctccaggctgtagacaagctcccc

SEQ ID NO: 4684789 - DNA, 25 bp, Homo sapien
aaactccaaacccactgtcataatt

SEQ ID NO: 4684790 - DNA, 25 bp, Homo sapien
agaaactccaaacccactgtcataa

SEQ ID NO: 4684791 - DNA, 25 bp, Homo sapien
gagaaactccaaacccactgtcata

SEQ ID NO: 4684792 - DNA, 25 bp, Homo sapien
gaaactccaaacccactgtcataat

SEQ ID NO: 4684793 - DNA, 25 bp, Homo sapien
cactgaacactcaaattaacagatt

SEQ ID NO: 4684794 - DNA, 25 bp, Homo sapien
tgtaggcagcttcattgaatagaac

SEQ ID NO: 4684795 - DNA, 25 bp, Homo sapien
aactgagacagagcattggacttcg

SEQ ID NO: 4684796 - DNA, 25 bp, Homo sapien
cattgtctcaaaacagtgagagggc

SEQ ID NO: 4684797 - DNA, 25 bp, Homo sapien
atggaagaccaaagcctgcagattt

SEQ ID NO: 4684798 - DNA, 25 bp, Homo sapien
catggaagaccaaagcctgcagatt

SEQ ID NO: 4684799 - DNA, 25 bp, Homo sapien
tcatggaagaccaaagcctgcagat

SEQ ID NO: 4684800 - DNA, 25 bp, Homo sapien
agacatgaggatgagtggtcaacat

SEQ ID NO: 4684801 - DNA, 25 bp, Homo sapien
ctgtggtagacatgaggatgagtgg

SEQ ID NO: 4684802 - DNA, 25 bp, Homo sapien
gtagacatgaggatgagtggtcaac

SEQ ID NO: 4684803 - DNA, 25 bp, Homo sapien
tggtagacatgaggatgagtggtca

SEQ ID NO: 4684804 - DNA, 25 bp, Homo sapien
aaatactggatattctgaagcacag

SEQ ID NO: 4684805 - DNA, 25 bp, Homo sapien
atactggatattctgaagcacagaa

SEQ ID NO: 4684806 - DNA, 25 bp, Homo sapien
ctggatattctgaagcacagaaatc

SEQ ID NO: 4684807 - DNA, 25 bp, Homo sapien
actggatattctgaagcacagaaat

SEQ ID NO: 4684808 - DNA, 25 bp, Homo sapien
ggttgccaggtctacactgaaagtc

SEQ ID NO: 4684809 - DNA, 25 bp, Homo sapien
caacaagcctttccacggttctgaa

SEQ ID NO: 4684810 - DNA, 25 bp, Homo sapien
catcaaaggctaaggttgggttgcc

SEQ ID NO: 4684811 - DNA, 25 bp, Homo sapien
gggaccaggtactttcctgaagaga

SEQ ID NO: 4684812 - DNA, 25 bp, Homo sapien
agggagcagaggcttcagctccttg

SEQ ID NO: 4684813 - DNA, 25 bp, Homo sapien
ggaagagggagcagaggcttcagct

SEQ ID NO: 4684814 - DNA, 25 bp, Homo sapien
gagggagcagaggcttcagctcctt

SEQ ID NO: 4684815 - DNA, 25 bp, Homo sapien
ctaggaagagggagcagaggcttca

SEQ ID NO: 4684816 - DNA, 25 bp, Homo sapien
tcaggggtaaagaaggtacttctga

SEQ ID NO: 4684817 - DNA, 25 bp, Homo sapien
ggtaaagaaggtacttctgactgga

SEQ ID NO: 4684818 - DNA, 25 bp, Homo sapien
aaagaaggtacttctgactggaggc

SEQ ID NO: 4684819 - DNA, 25 bp, Homo sapien
taaagaaggtacttctgactggagg

SEQ ID NO: 4684820 - DNA, 25 bp, Homo sapien
aggcatccggccaggcaagcacaga

SEQ ID NO: 4684821 - DNA, 25 bp, Homo sapien
agagagtttcaggtggacagaatgc

SEQ ID NO: 4684822 - DNA, 25 bp, Homo sapien
gacagaatgcgttgtaaaggcatcc

SEQ ID NO: 4684823 - DNA, 25 bp, Homo sapien
gacataggtcttaaatgaagggtac

SEQ ID NO: 4684824 - DNA, 25 bp, Homo sapien
aatgttcttatcactgaagatgatc

SEQ ID NO: 4684825 - DNA, 25 bp, Homo sapien
cattttccaatgttcttatcactga

SEQ ID NO: 4684826 - DNA, 25 bp, Homo sapien
gttcttatcactgaagatgatctgt

SEQ ID NO: 4684827 - DNA, 25 bp, Homo sapien
tccaatgttcttatcactgaagatg

SEQ ID NO: 4684828 - DNA, 25 bp, Homo sapien
ttatgaggaatgtttctcaaatttg

SEQ ID NO: 4684829 - DNA, 25 bp, Homo sapien
tcaaatttgtcttctactttcaaag

SEQ ID NO: 4684830 - DNA, 25 bp, Homo sapien
ttctcaaatttgtcttctactttca

SEQ ID NO: 4684831 - DNA, 25 bp, Homo sapien
gaatgtttctcaaatttgtcttcta

SEQ ID NO: 4684832 - DNA, 25 bp, Homo sapien
cacctgggcatttggtgagagtcaa

SEQ ID NO: 4684833 - DNA, 25 bp, Homo sapien
gaaccagccgtattttacatgaagc

SEQ ID NO: 4684834 - DNA, 25 bp, Homo sapien
ttgattcagcaaaaatctcccagtg

SEQ ID NO: 4684835 - DNA, 25 bp, Homo sapien
ttacttctcttaggtggctctggga

SEQ ID NO: 4684836 - DNA, 25 bp, Homo sapien
tgcccagggcagtagaaagggcagt

SEQ ID NO: 4684837 - DNA, 25 bp, Homo sapien
ccagggcagtagaaagggcagtggg

SEQ ID NO: 4684838 - DNA, 25 bp, Homo sapien
ggtacctctccatagcacaagctgc

SEQ ID NO: 4684839 - DNA, 25 bp, Homo sapien
tcactcacaaggtacctctccatag

SEQ ID NO: 4684840 - DNA, 25 bp, Homo sapien
aggtctcagagaggctactgaatac

SEQ ID NO: 4684841 - DNA, 25 bp, Homo sapien
ccagacagtcagtgctatagcaaca

SEQ ID NO: 4684842 - DNA, 25 bp, Homo sapien
cgaaattgaactctatggaataagc

SEQ ID NO: 4684843 - DNA, 25 bp, Homo sapien
taagcaaaggaaggcgatcccagac

SEQ ID NO: 4684844 - DNA, 25 bp, Homo sapien
tactggagagaagattgcacggact

SEQ ID NO: 4684845 - DNA, 25 bp, Homo sapien
tacatattgatacccctactggaga

SEQ ID NO: 4684846 - DNA, 25 bp, Homo sapien
gtttcagatgccaccccagacggtt

SEQ ID NO: 4684847 - DNA, 25 bp, Homo sapien
tatttaataatatgtgggacgggcc

SEQ ID NO: 4684848 - DNA, 25 bp, Homo sapien
ttgtctcaaaatacagaaggtcgga

SEQ ID NO: 4684849 - DNA, 25 bp, Homo sapien
gaagctcagagcatcgctaacatag

SEQ ID NO: 4684850 - DNA, 25 bp, Homo sapien
gagggccaccccattatgatgcaag

SEQ ID NO: 4684851 - DNA, 25 bp, Homo sapien
gaaggtcggacagctcaaaccaaga

SEQ ID NO: 4684852 - DNA, 25 bp, Homo sapien
catctgtgttctaggcagcataagg

SEQ ID NO: 4684853 - DNA, 25 bp, Homo sapien
caaaactcccaaagaggagcacctt

SEQ ID NO: 4684854 - DNA, 25 bp, Homo sapien
atggctgctgtaatacagccattcc

SEQ ID NO: 4684855 - DNA, 25 bp, Homo sapien
tgttctaggcagcataagggaggaa

SEQ ID NO: 4684856 - DNA, 25 bp, Homo sapien
tactcggtggctaaactgaagagac

SEQ ID NO: 4684857 - DNA, 25 bp, Homo sapien
tgttcactgaacctgaggccatggt

SEQ ID NO: 4684858 - DNA, 25 bp, Homo sapien
ccaaggttacccctgaagagtggca

SEQ ID NO: 4684859 - DNA, 25 bp, Homo sapien
ggcacacggccctttgagacttcca

SEQ ID NO: 4684860 - DNA, 25 bp, Homo sapien
gactagccacgtttcaatgcctaat

SEQ ID NO: 4684861 - DNA, 25 bp, Homo sapien
actagccacgtttcaatgcctaata

SEQ ID NO: 4684862 - DNA, 25 bp, Homo sapien
ggcataagttagtttatcttccact

SEQ ID NO: 4684863 - DNA, 25 bp, Homo sapien
gccaaaatattggtttttcagcctg

SEQ ID NO: 4684864 - DNA, 25 bp, Homo sapien
cagtaggagtaatgctaagtagtca

SEQ ID NO: 4684865 - DNA, 25 bp, Homo sapien
atgcagatgagaatacacagtagga

SEQ ID NO: 4684866 - DNA, 25 bp, Homo sapien
catctgcatttctaaacaataggaa

SEQ ID NO: 4684867 - DNA, 25 bp, Homo sapien
aattcatctgcatttctaaacaata

SEQ ID NO: 4684868 - DNA, 25 bp, Homo sapien
caaaatgatgtggaaacaaattcat

SEQ ID NO: 4684869 - DNA, 25 bp, Homo sapien
acaataggaattctcctcgtcctcc

SEQ ID NO: 4684870 - DNA, 25 bp, Homo sapien
tgttcacctctaaccctaaagctgg

SEQ ID NO: 4684871 - DNA, 25 bp, Homo sapien
gagagagggctagacacagcaaagc

SEQ ID NO: 4684872 - DNA, 25 bp, Homo sapien
cagttcccagtcctgagaggctagt

SEQ ID NO: 4684873 - DNA, 25 bp, Homo sapien
tcagtaaggaagtcatgctcagctc

SEQ ID NO: 4684874 - DNA, 25 bp, Homo sapien
tttgggtctgcacccctagaagtga

SEQ ID NO: 4684875 - DNA, 25 bp, Homo sapien
agttttgggtctgcacccctagaag

SEQ ID NO: 4684876 - DNA, 25 bp, Homo sapien
ccctagaagtgagtagctctgcttc

SEQ ID NO: 4684877 - DNA, 25 bp, Homo sapien
ggcagatatcctcagttttgggtct

SEQ ID NO: 4684878 - DNA, 25 bp, Homo sapien
atggcctagaacatttaggaaccag

SEQ ID NO: 4684879 - DNA, 25 bp, Homo sapien
ggaaccagttgcatgccccattcct

SEQ ID NO: 4684880 - DNA, 25 bp, Homo sapien
tttaggaaccagttgcatgccccat

SEQ ID NO: 4684881 - DNA, 25 bp, Homo sapien
ctagaacatttaggaaccagttgca

SEQ ID NO: 4684882 - DNA, 25 bp, Homo sapien
ggccagcgtgggtctcccccagcat

SEQ ID NO: 4684883 - DNA, 25 bp, Homo sapien
cgcaggccagcgtgggtctccccca

SEQ ID NO: 4684884 - DNA, 25 bp, Homo sapien
tgggtctcccccagcatgacatcat

SEQ ID NO: 4684885 - DNA, 25 bp, Homo sapien
cagcgtgggtctcccccagcatgac

SEQ ID NO: 4684886 - DNA, 25 bp, Homo sapien
atctgctgcgaggtttccctgggtt

SEQ ID NO: 4684887 - DNA, 25 bp, Homo sapien
gctgcgaggtttccctgggttccca

SEQ ID NO: 4684888 - DNA, 25 bp, Homo sapien
ctgcagagaatgtgactaaacgaaa

SEQ ID NO: 4684889 - DNA, 25 bp, Homo sapien
gagaatgtgactaaacgaaacccca

SEQ ID NO: 4684890 - DNA, 25 bp, Homo sapien
gtccttttgagagatagaaccacaa

SEQ ID NO: 4684891 - DNA, 25 bp, Homo sapien
gctgctggcgatgtaatccaatctg

SEQ ID NO: 4684892 - DNA, 25 bp, Homo sapien
gcccagagctcatcaagcaactttg

SEQ ID NO: 4684893 - DNA, 25 bp, Homo sapien
cctggaaggtgaaaggccagcccag

SEQ ID NO: 4684894 - DNA, 25 bp, Homo sapien
tatcaaattgcacagagatcaaatg

SEQ ID NO: 4684895 - DNA, 25 bp, Homo sapien
agatgagtaatcagtggcttgtatg

SEQ ID NO: 4684896 - DNA, 25 bp, Homo sapien
cctttggagagggaactaagaccat

SEQ ID NO: 4684897 - DNA, 25 bp, Homo sapien
tcttcataattgacggcccattccc

SEQ ID NO: 4684898 - DNA, 25 bp, Homo sapien
aacagacctttacagagcctctagg

SEQ ID NO: 4684899 - DNA, 25 bp, Homo sapien
agcctctaggagaagcaaaggctct

SEQ ID NO: 4684900 - DNA, 25 bp, Homo sapien
gcaatcaatctatcgtctactcagt

SEQ ID NO: 4684901 - DNA, 25 bp, Homo sapien
caacagaggaactatattgcaatca

SEQ ID NO: 4684902 - DNA, 25 bp, Homo sapien
gacaaaaaaggactcgagacttagc

SEQ ID NO: 4684903 - DNA, 25 bp, Homo sapien
gactcgagacttagcaatggcttac

SEQ ID NO: 4684904 - DNA, 25 bp, Homo sapien
gaaggtgaaaggctttatagaccaa

SEQ ID NO: 4684905 - DNA, 25 bp, Homo sapien
gcagtattgttcactgaaatgaagg

SEQ ID NO: 4684906 - DNA, 25 bp, Homo sapien
attttcagttcctgtcaaggaaggt

SEQ ID NO: 4684907 - DNA, 25 bp, Homo sapien
tagagatgatgaacagctgcaattc

SEQ ID NO: 4684908 - DNA, 25 bp, Homo sapien
gttcctgtcaaggaaggtggatgca

SEQ ID NO: 4684909 - DNA, 25 bp, Homo sapien
gagtaagaaattggtcccctccata

SEQ ID NO: 4684910 - DNA, 25 bp, Homo sapien
tacaggttagttcagaatctgtgcc

SEQ ID NO: 4684911 - DNA, 25 bp, Homo sapien
tacctgttacagcatggccttttaa

SEQ ID NO: 4684912 - DNA, 25 bp, Homo sapien
agcctataaactcttcttgccattc

SEQ ID NO: 4684913 - DNA, 25 bp, Homo sapien
cctccctctacaacccattattctg

SEQ ID NO: 4684914 - DNA, 25 bp, Homo sapien
gataacggataacagttccaaagag

SEQ ID NO: 4684915 - DNA, 25 bp, Homo sapien
atgataacggataacagttccaaag

SEQ ID NO: 4684916 - DNA, 25 bp, Homo sapien
taacggataacagttccaaagagaa

SEQ ID NO: 4684917 - DNA, 25 bp, Homo sapien
tgataacggataacagttccaaaga

SEQ ID NO: 4684918 - DNA, 25 bp, Homo sapien
cagttccacaacagaatcccatcac

SEQ ID NO: 4684919 - DNA, 25 bp, Homo sapien
tcagttccacaacagaatcccatca

SEQ ID NO: 4684920 - DNA, 25 bp, Homo sapien
agttccacaacagaatcccatcacc

SEQ ID NO: 4684921 - DNA, 25 bp, Homo sapien
catagcagctagtgtacttccagag

SEQ ID NO: 4684922 - DNA, 25 bp, Homo sapien
cattcacctgtgagttggtgctggc

SEQ ID NO: 4684923 - DNA, 25 bp, Homo sapien
catgacatagcagctagtgtacttc

SEQ ID NO: 4684924 - DNA, 25 bp, Homo sapien
ccacagtgttgcttaagtgtcctca

SEQ ID NO: 4684925 - DNA, 25 bp, Homo sapien
gacaatctgatccttccagggttcc

SEQ ID NO: 4684926 - DNA, 25 bp, Homo sapien
tccagtcttgtgttccaggaccttt

SEQ ID NO: 4684927 - DNA, 25 bp, Homo sapien
cagggttccagtcttgtgttccagg

SEQ ID NO: 4684928 - DNA, 25 bp, Homo sapien
gcttggtctcctcttgtgcctcagt

SEQ ID NO: 4684929 - DNA, 25 bp, Homo sapien
agaaagtaatgaggagcctgcacag

SEQ ID NO: 4684930 - DNA, 25 bp, Homo sapien
tagaaagtaatgaggagcctgcaca

SEQ ID NO: 4684931 - DNA, 25 bp, Homo sapien
ctagaaagtaatgaggagcctgcac

SEQ ID NO: 4684932 - DNA, 25 bp, Homo sapien
ggtgtatgagccctgcctctgttct

SEQ ID NO: 4684933 - DNA, 25 bp, Homo sapien
gatgcccctgggtctatgtctctga

SEQ ID NO: 4684934 - DNA, 25 bp, Homo sapien
cccgtagagccgatccatgtgctga

SEQ ID NO: 4684935 - DNA, 25 bp, Homo sapien
tcactgagtctgacaccccgtagag

SEQ ID NO: 4684936 - DNA, 25 bp, Homo sapien
tgtctacctccatacctccatacct

SEQ ID NO: 4684937 - DNA, 25 bp, Homo sapien
gtgtgctcagctggctatgtctacc

SEQ ID NO: 4684938 - DNA, 25 bp, Homo sapien
tggtcactaagtgtgctcagctggc

SEQ ID NO: 4684939 - DNA, 25 bp, Homo sapien
cactaagtgtgctcagctggctatg

SEQ ID NO: 4684940 - DNA, 25 bp, Homo sapien
tatatcagccacctaccacgggtgc

SEQ ID NO: 4684941 - DNA, 25 bp, Homo sapien
tgcccgagcacaagacaacaagttg

SEQ ID NO: 4684942 - DNA, 25 bp, Homo sapien
taaactcaaagccaatgtgtagatg

SEQ ID NO: 4684943 - DNA, 25 bp, Homo sapien
atagcatactgccttgaacagcacc

SEQ ID NO: 4684944 - DNA, 25 bp, Homo sapien
ctttttatatatccagccctaaggt

SEQ ID NO: 4684945 - DNA, 25 bp, Homo sapien
tttatatatccagccctaaggttga

SEQ ID NO: 4684946 - DNA, 25 bp, Homo sapien
ttttatatatccagccctaaggttg

SEQ ID NO: 4684947 - DNA, 25 bp, Homo sapien
gatgtattgcaaccatgccagctgt

SEQ ID NO: 4684948 - DNA, 25 bp, Homo sapien
tgtaatagctagtcagagcccacct

SEQ ID NO: 4684949 - DNA, 25 bp, Homo sapien
taaatatagcagtggcagaggccat

SEQ ID NO: 4684950 - DNA, 25 bp, Homo sapien
gataatgttatcagaatgccaccca

SEQ ID NO: 4684951 - DNA, 25 bp, Homo sapien
tgatgcggggtcctattttatggac

SEQ ID NO: 4684952 - DNA, 25 bp, Homo sapien
acttcttagatgatgcggggtccta

SEQ ID NO: 4684953 - DNA, 25 bp, Homo sapien
gggtcctattttatggactatggtc

SEQ ID NO: 4684954 - DNA, 25 bp, Homo sapien
cctattttatggactatggtcaatg

SEQ ID NO: 4684955 - DNA, 25 bp, Homo sapien
ctgtggggatgagtaaaagagaagt

SEQ ID NO: 4684956 - DNA, 25 bp, Homo sapien
cttgtcactatcagagaagtctaac

SEQ ID NO: 4684957 - DNA, 25 bp, Homo sapien
ctcttgtcactatcagagaagtcta

SEQ ID NO: 4684958 - DNA, 25 bp, Homo sapien
cctgtggggatgagtaaaagagaag

SEQ ID NO: 4684959 - DNA, 25 bp, Homo sapien
gggattccacatccccttcgatagg

SEQ ID NO: 4684960 - DNA, 25 bp, Homo sapien
tttcccaaggtcatgcggcgagttg

SEQ ID NO: 4684961 - DNA, 25 bp, Homo sapien
cggcgagttgatagcaagagtagct

SEQ ID NO: 4684962 - DNA, 25 bp, Homo sapien
tccccttcgatagggtttctcagag

SEQ ID NO: 4684963 - DNA, 25 bp, Homo sapien
catggcttactagtagtaaatgtgg

SEQ ID NO: 4684964 - DNA, 25 bp, Homo sapien
tactagtagtaaatgtgggctgagg

SEQ ID NO: 4684965 - DNA, 25 bp, Homo sapien
aatgtgggctgagggttttcgctct

SEQ ID NO: 4684966 - DNA, 25 bp, Homo sapien
gctgagggttttcgctctgtcccct

SEQ ID NO: 4684967 - DNA, 25 bp, Homo sapien
tcagactgtagcaatcccttgtgcc

SEQ ID NO: 4684968 - DNA, 25 bp, Homo sapien
atgatctagtcacttcccagacgcc

SEQ ID NO: 4684969 - DNA, 25 bp, Homo sapien
taagggctccaccttaatgatctag

SEQ ID NO: 4684970 - DNA, 25 bp, Homo sapien
cctgagtcctcacatagtagtgggg

SEQ ID NO: 4684971 - DNA, 25 bp, Homo sapien
tattacaaaatttagactagctgac

SEQ ID NO: 4684972 - DNA, 25 bp, Homo sapien
ctgcaagacttgatggacagaacat

SEQ ID NO: 4684973 - DNA, 25 bp, Homo sapien
gactagctgaccctgtattatagaa

SEQ ID NO: 4684974 - DNA, 25 bp, Homo sapien
tcttcctctatcatcccatggaaaa

SEQ ID NO: 4684975 - DNA, 25 bp, Homo sapien
attggcttcgtcttgattcttccat

SEQ ID NO: 4684976 - DNA, 25 bp, Homo sapien
aaattggcttcgtcttgattcttcc

SEQ ID NO: 4684977 - DNA, 25 bp, Homo sapien
tccaaattggcttcgtcttgattct

SEQ ID NO: 4684978 - DNA, 25 bp, Homo sapien
ctccaaattggcttcgtcttgattc

SEQ ID NO: 4684979 - DNA, 25 bp, Homo sapien
tgttgcttagccacagttagtgcgt

SEQ ID NO: 4684980 - DNA, 25 bp, Homo sapien
tggctgacaggaagttaagggttcc

SEQ ID NO: 4684981 - DNA, 25 bp, Homo sapien
taagggttccaattctgttgccagt

SEQ ID NO: 4684982 - DNA, 25 bp, Homo sapien
ccagtagagagtaggtcttgttgct

SEQ ID NO: 4684983 - DNA, 25 bp, Homo sapien
tcaagcagtcatccagccatctaga

SEQ ID NO: 4684984 - DNA, 25 bp, Homo sapien
taactctcctcaagcagtcatccag

SEQ ID NO: 4684985 - DNA, 25 bp, Homo sapien
gacatcagctaagtagcagtcttga

SEQ ID NO: 4684986 - DNA, 25 bp, Homo sapien
catctagaccccttccatcttatgt

SEQ ID NO: 4684987 - DNA, 25 bp, Homo sapien
cagtgttcttgggaccttctctttc

SEQ ID NO: 4684988 - DNA, 25 bp, Homo sapien
tcctcagtttcagggccccaatcaa

SEQ ID NO: 4684989 - DNA, 25 bp, Homo sapien
cacagtgttcttgggaccttctctt

SEQ ID NO: 4684990 - DNA, 25 bp, Homo sapien
tctttccccttgcttctcgtcctca

SEQ ID NO: 4684991 - DNA, 25 bp, Homo sapien
tgattttttctgcaagcctcaccca

SEQ ID NO: 4684992 - DNA, 25 bp, Homo sapien
ctagctgattttttctgcaagcctc

SEQ ID NO: 4684993 - DNA, 25 bp, Homo sapien
ctacccccaaggctgttctagctga

SEQ ID NO: 4684994 - DNA, 25 bp, Homo sapien
ccccaaggctgttctagctgatttt

SEQ ID NO: 4684995 - DNA, 25 bp, Homo sapien
agccctgggatttggtttggccaga

SEQ ID NO: 4684996 - DNA, 25 bp, Homo sapien
gctcttggctttgggtacattgggt

SEQ ID NO: 4684997 - DNA, 25 bp, Homo sapien
cagatcctctagataggccctttgg

SEQ ID NO: 4684998 - DNA, 25 bp, Homo sapien
ggacagtaagtagcggcagcgaggt

SEQ ID NO: 4684999 - DNA, 25 bp, Homo sapien
ctgttcggcagtagtgatcattgcc

SEQ ID NO: 4685000 - DNA, 25 bp, Homo sapien
aagagttgtcttcttattcaggtac

SEQ ID NO: 4685001 - DNA, 25 bp, Homo sapien
ttcaggtacattggcagtagcatca

SEQ ID NO: 4685002 - DNA, 25 bp, Homo sapien
tttccagaaagagttgtcttcttat

SEQ ID NO: 4685003 - DNA, 25 bp, Homo sapien
tattcaggtacattggcagtagcat

SEQ ID NO: 4685004 - DNA, 25 bp, Homo sapien
gagattctgccccagtattgatggc

SEQ ID NO: 4685005 - DNA, 25 bp, Homo sapien
ccaggtgaatggtctataagcagta

SEQ ID NO: 4685006 - DNA, 25 bp, Homo sapien
tccaccactgacgtcttgaacaaag

SEQ ID NO: 4685007 - DNA, 25 bp, Homo sapien
tatgtaaacagacgtgcagtcatcc

SEQ ID NO: 4685008 - DNA, 25 bp, Homo sapien
aacactttgctcttgtcaacacagg

SEQ ID NO: 4685009 - DNA, 25 bp, Homo sapien
tgtctcttacaggaatacagctctc

SEQ ID NO: 4685010 - DNA, 25 bp, Homo sapien
caaaattcggcagactgcataacca

SEQ ID NO: 4685011 - DNA, 25 bp, Homo sapien
agttcagggccttacaattctctcc

SEQ ID NO: 4685012 - DNA, 25 bp, Homo sapien
agtcaggtttagggaaataactgtg

SEQ ID NO: 4685013 - DNA, 25 bp, Homo sapien
aactggataatctatctcccatacc

SEQ ID NO: 4685014 - DNA, 25 bp, Homo sapien
gtttttaactggataatctatctcc

SEQ ID NO: 4685015 - DNA, 25 bp, Homo sapien
taatctatctcccataccttcagga

SEQ ID NO: 4685016 - DNA, 25 bp, Homo sapien
tacagggaacatagggaaaagccca

SEQ ID NO: 4685017 - DNA, 25 bp, Homo sapien
tacttgcacgaaatgaaagccagct

SEQ ID NO: 4685018 - DNA, 25 bp, Homo sapien
ggttcatgctgctaaaagtctctca

SEQ ID NO: 4685019 - DNA, 25 bp, Homo sapien
tgcacagcaagcctggataaacctt

SEQ ID NO: 4685020 - DNA, 25 bp, Homo sapien
gaagggggtcttggcaggatctccc

SEQ ID NO: 4685021 - DNA, 25 bp, Homo sapien
ggggtcttggcaggatctcccccca

SEQ ID NO: 4685022 - DNA, 25 bp, Homo sapien
gggtcttggcaggatctccccccat

SEQ ID NO: 4685023 - DNA, 25 bp, Homo sapien
taatgctctgttgaggcccaaatcc

SEQ ID NO: 4685024 - DNA, 25 bp, Homo sapien
cacacgaagtgggaggcaagactat

SEQ ID NO: 4685025 - DNA, 25 bp, Homo sapien
tgatttctccggatacaccaagggt

SEQ ID NO: 4685026 - DNA, 25 bp, Homo sapien
tatgacaagactttcagggcgtccc

SEQ ID NO: 4685027 - DNA, 25 bp, Homo sapien
caatgacgtgtttgtggtcagcaaa

SEQ ID NO: 4685028 - DNA, 25 bp, Homo sapien
gacgtgtttgtggtcagcaaattcc

SEQ ID NO: 4685029 - DNA, 25 bp, Homo sapien
tattaacaatgacgtgtttgtggtc

SEQ ID NO: 4685030 - DNA, 25 bp, Homo sapien
cgtgtttgtggtcagcaaattcctc

SEQ ID NO: 4685031 - DNA, 25 bp, Homo sapien
cattgggtgtttccctacagaaata

SEQ ID NO: 4685032 - DNA, 25 bp, Homo sapien
taaacaagggacaaaagattggctc

SEQ ID NO: 4685033 - DNA, 25 bp, Homo sapien
ctcctgcattgggtgtttccctaca

SEQ ID NO: 4685034 - DNA, 25 bp, Homo sapien
ctcggacagtgaaaggagtaagact

SEQ ID NO: 4685035 - DNA, 25 bp, Homo sapien
tcaatgacaaattccagagctatca

SEQ ID NO: 4685036 - DNA, 25 bp, Homo sapien
caatgacaaattccagagctatcac

SEQ ID NO: 4685037 - DNA, 25 bp, Homo sapien
aagagtctgcggacaaatgtgtcag

SEQ ID NO: 4685038 - DNA, 25 bp, Homo sapien
aacaaagagtctgcggacaaatgtg

SEQ ID NO: 4685039 - DNA, 25 bp, Homo sapien
tgaacaaagagtctgcggacaaatg

SEQ ID NO: 4685040 - DNA, 25 bp, Homo sapien
ctttgaacaaagagtctgcggacaa

SEQ ID NO: 4685041 - DNA, 25 bp, Homo sapien
aactgggctgctttcaggtttctcc

SEQ ID NO: 4685042 - DNA, 25 bp, Homo sapien
ttctctcccacatccaaagttcctt

SEQ ID NO: 4685043 - DNA, 25 bp, Homo sapien
tttctctcccacatccaaagttcct

SEQ ID NO: 4685044 - DNA, 25 bp, Homo sapien
gtctttctctcccacatccaaagtt

SEQ ID NO: 4685045 - DNA, 25 bp, Homo sapien
ggaagcttgtattcattccagggct

SEQ ID NO: 4685046 - DNA, 25 bp, Homo sapien
gatatggatagatgtgagtagcctt

SEQ ID NO: 4685047 - DNA, 25 bp, Homo sapien
cagatcctagcagaaggaagcttgt

SEQ ID NO: 4685048 - DNA, 25 bp, Homo sapien
cttctttgggaataggatatggata

SEQ ID NO: 4685049 - DNA, 25 bp, Homo sapien
ggaaaagatgaaactgtgtcctgat

SEQ ID NO: 4685050 - DNA, 25 bp, Homo sapien
aaaagatgaaactgtgtcctgatcc

SEQ ID NO: 4685051 - DNA, 25 bp, Homo sapien
gaaaagatgaaactgtgtcctgatc

SEQ ID NO: 4685052 - DNA, 25 bp, Homo sapien
gcaacatgcacccagaaatgtgctt

SEQ ID NO: 4685053 - DNA, 25 bp, Homo sapien
taagaatggcaaacaaagatgtatt

SEQ ID NO: 4685054 - DNA, 25 bp, Homo sapien
tatttgaatccatgtctctaggcac

SEQ ID NO: 4685055 - DNA, 25 bp, Homo sapien
ttggataaccttgaataagaatggc

SEQ ID NO: 4685056 - DNA, 25 bp, Homo sapien
ggtgctggcacaatgctcttccact

SEQ ID NO: 4685057 - DNA, 25 bp, Homo sapien
tgtgtaacacggcaagaaggccctc

SEQ ID NO: 4685058 - DNA, 25 bp, Homo sapien
catcatgtgtaacacggcaagaagg

SEQ ID NO: 4685059 - DNA, 25 bp, Homo sapien
ccaggtgctggcacaatgctcttcc

SEQ ID NO: 4685060 - DNA, 25 bp, Homo sapien
gcaattccgggaaagagttgttcag

SEQ ID NO: 4685061 - DNA, 25 bp, Homo sapien
gcaggaaaagcaattccgggaaaga

SEQ ID NO: 4685062 - DNA, 25 bp, Homo sapien
tcctttcacactaggttgggcagga

SEQ ID NO: 4685063 - DNA, 25 bp, Homo sapien
ttccgggaaagagttgttcagagcc

SEQ ID NO: 4685064 - DNA, 25 bp, Homo sapien
tggcaagagatacagcaaaatcctt

SEQ ID NO: 4685065 - DNA, 25 bp, Homo sapien
ttgccactttacagacctctctctg

SEQ ID NO: 4685066 - DNA, 25 bp, Homo sapien
cagactcctgcttgccactttacag

SEQ ID NO: 4685067 - DNA, 25 bp, Homo sapien
cctgcttgccactttacagacctct

SEQ ID NO: 4685068 - DNA, 25 bp, Homo sapien
agctgtcaagtcttctactgacatt

SEQ ID NO: 4685069 - DNA, 25 bp, Homo sapien
aagctgtcaagtcttctactgacat

SEQ ID NO: 4685070 - DNA, 25 bp, Homo sapien
caagctgtcaagtcttctactgaca

SEQ ID NO: 4685071 - DNA, 25 bp, Homo sapien
tcaagctgtcaagtcttctactgac

SEQ ID NO: 4685072 - DNA, 25 bp, Homo sapien
ctcagggacacagcacttctaggac

SEQ ID NO: 4685073 - DNA, 25 bp, Homo sapien
taggacgtggtcttccgtagctcca

SEQ ID NO: 4685074 - DNA, 25 bp, Homo sapien
taagtaatcttcgtaggcacaagcc

SEQ ID NO: 4685075 - DNA, 25 bp, Homo sapien
aaagaagcccggttgaatgctccga

SEQ ID NO: 4685076 - DNA, 25 bp, Homo sapien
ttattctctttacaggacaccccca

SEQ ID NO: 4685077 - DNA, 25 bp, Homo sapien
tctttattctctttacaggacaccc

SEQ ID NO: 4685078 - DNA, 25 bp, Homo sapien
tattctctttacaggacacccccat

SEQ ID NO: 4685079 - DNA, 25 bp, Homo sapien
ttctctttattctctttacaggaca

SEQ ID NO: 4685080 - DNA, 25 bp, Homo sapien
ccttttgccgttcagatccttagct

SEQ ID NO: 4685081 - DNA, 25 bp, Homo sapien
ctccttttgccgttcagatccttag

SEQ ID NO: 4685082 - DNA, 25 bp, Homo sapien
tccttttgccgttcagatccttagc

SEQ ID NO: 4685083 - DNA, 25 bp, Homo sapien
cttttgccgttcagatccttagctt

SEQ ID NO: 4685084 - DNA, 25 bp, Homo sapien
tctgcttctgagagacctcccgtgt

SEQ ID NO: 4685085 - DNA, 25 bp, Homo sapien
gacctcccgtgtgagactgatgtcc

SEQ ID NO: 4685086 - DNA, 25 bp, Homo sapien
gagacctcccgtgtgagactgatgt

SEQ ID NO: 4685087 - DNA, 25 bp, Homo sapien
ttctgcttctgagagacctcccgtg

SEQ ID NO: 4685088 - DNA, 25 bp, Homo sapien
gagcaaattcatctcttcggatgag

SEQ ID NO: 4685089 - DNA, 25 bp, Homo sapien
tcatctcttcggatgagaatcacag

SEQ ID NO: 4685090 - DNA, 25 bp, Homo sapien
gcaaattcatctcttcggatgagaa

SEQ ID NO: 4685091 - DNA, 25 bp, Homo sapien
ttaagagcaaattcatctcttcgga

SEQ ID NO: 4685092 - DNA, 25 bp, Homo sapien
tgcttggcttagcttcaagatgtag

SEQ ID NO: 4685093 - DNA, 25 bp, Homo sapien
tttctggagagtttcaggcacatct

SEQ ID NO: 4685094 - DNA, 25 bp, Homo sapien
cttgcatccattgggctctagaagg

SEQ ID NO: 4685095 - DNA, 25 bp, Homo sapien
acatcttcttgcatccattgggctc

SEQ ID NO: 4685096 - DNA, 25 bp, Homo sapien
agcaccagacatggccacgtgaatt

SEQ ID NO: 4685097 - DNA, 25 bp, Homo sapien
gacatggccacgtgaatttgttggg

SEQ ID NO: 4685098 - DNA, 25 bp, Homo sapien
accagacatggccacgtgaatttgt

SEQ ID NO: 4685099 - DNA, 25 bp, Homo sapien
catggccacgtgaatttgttgggcc

SEQ ID NO: 4685100 - DNA, 25 bp, Homo sapien
catgagggagttgtaagaatgaata

SEQ ID NO: 4685101 - DNA, 25 bp, Homo sapien
tgtgactccaaccaatagtgcacca

SEQ ID NO: 4685102 - DNA, 25 bp, Homo sapien
gactccaaccaatagtgcaccaaca

SEQ ID NO: 4685103 - DNA, 25 bp, Homo sapien
actgtgactccaaccaatagtgcac

SEQ ID NO: 4685104 - DNA, 25 bp, Homo sapien
aactgtgactccaaccaatagtgca

SEQ ID NO: 4685105 - DNA, 25 bp, Homo sapien
attatctccccaagcctaacctgag

SEQ ID NO: 4685106 - DNA, 25 bp, Homo sapien
ctccaagaatgcacagataccaaat

SEQ ID NO: 4685107 - DNA, 25 bp, Homo sapien
ctaacctgagcctttcgattcgacc

SEQ ID NO: 4685108 - DNA, 25 bp, Homo sapien
tcctctgtggagtgaactccaagaa

SEQ ID NO: 4685109 - DNA, 25 bp, Homo sapien
ccaaatttcatgcacgtccgtgtga

SEQ ID NO: 4685110 - DNA, 25 bp, Homo sapien
ctttgtgtgagcaatgaagctgttt

SEQ ID NO: 4685111 - DNA, 25 bp, Homo sapien
caccaaatttcatgcacgtccgtgt

SEQ ID NO: 4685112 - DNA, 25 bp, Homo sapien
agcaatgaagctgtttatttcacca

SEQ ID NO: 4685113 - DNA, 25 bp, Homo sapien
gagagttacctaaagcttggcatcc

SEQ ID NO: 4685114 - DNA, 25 bp, Homo sapien
cgctaagccgagaaggagtcagaga

SEQ ID NO: 4685115 - DNA, 25 bp, Homo sapien
gttacctaaagcttggcatccgtga

SEQ ID NO: 4685116 - DNA, 25 bp, Homo sapien
tccgaggcgatccagcagcgtcagt

SEQ ID NO: 4685117 - DNA, 25 bp, Homo sapien
agcactgaaccctgtccctggtgtc

SEQ ID NO: 4685118 - DNA, 25 bp, Homo sapien
gacgggcttggtagttctctctccc

SEQ ID NO: 4685119 - DNA, 25 bp, Homo sapien
tcccttgttcttggttgctagagca

SEQ ID NO: 4685120 - DNA, 25 bp, Homo sapien
ttgttcttggttgctagagcactga

SEQ ID NO: 4685121 - DNA, 25 bp, Homo sapien
ctagcgggtctctgaatgttagcct

SEQ ID NO: 4685122 - DNA, 25 bp, Homo sapien
caaattcatcctcagctagcgggtc

SEQ ID NO: 4685123 - DNA, 25 bp, Homo sapien
gggtcgttcgagactgaaggaagcc

SEQ ID NO: 4685124 - DNA, 25 bp, Homo sapien
cagccagcgtactcatgcatacaaa

SEQ ID NO: 4685125 - DNA, 25 bp, Homo sapien
tgtgaagctaaccttggaatgagat

SEQ ID NO: 4685126 - DNA, 25 bp, Homo sapien
agagtcgtgggtcgagaagaccatc

SEQ ID NO: 4685127 - DNA, 25 bp, Homo sapien
gatttgctgtcctgtaactgtgggt

SEQ ID NO: 4685128 - DNA, 25 bp, Homo sapien
gcagcatatcagagagtcgtgggtc

SEQ ID NO: 4685129 - DNA, 25 bp, Homo sapien
gaaaatgtgagttgttactatggaa

SEQ ID NO: 4685130 - DNA, 25 bp, Homo sapien
caaacaccgcatttcaaacagtaca

SEQ ID NO: 4685131 - DNA, 25 bp, Homo sapien
gctttatatggactgattgttctga

SEQ ID NO: 4685132 - DNA, 25 bp, Homo sapien
taatgaacattgagtttaaccccca

SEQ ID NO: 4685133 - DNA, 25 bp, Homo sapien
ttctgagccaatcaaagtaggagcc

SEQ ID NO: 4685134 - DNA, 25 bp, Homo sapien
tcagcaggctctaataagtcaggga

SEQ ID NO: 4685135 - DNA, 25 bp, Homo sapien
tattcatgcattggtcctgctccag

SEQ ID NO: 4685136 - DNA, 25 bp, Homo sapien
tgtaaagttagttctgcagccagtt

SEQ ID NO: 4685137 - DNA, 25 bp, Homo sapien
ggccttcagaacaggtctggggaaa

SEQ ID NO: 4685138 - DNA, 25 bp, Homo sapien
tgttcccaatttgtctgaatagatc

SEQ ID NO: 4685139 - DNA, 25 bp, Homo sapien
gcaatgatataagatttgtgtaggc

SEQ ID NO: 4685140 - DNA, 25 bp, Homo sapien
tatctatcagtcctctggggccttc

SEQ ID NO: 4685141 - DNA, 25 bp, Homo sapien
gagccagtttggttccgaggaaaga

SEQ ID NO: 4685142 - DNA, 25 bp, Homo sapien
gctatggttaatctctggccccttg

SEQ ID NO: 4685143 - DNA, 25 bp, Homo sapien
tgtggtcagactcataaaggcatta

SEQ ID NO: 4685144 - DNA, 25 bp, Homo sapien
caagatctattcctacatggctcca

SEQ ID NO: 4685145 - DNA, 25 bp, Homo sapien
tcttctgacccaacagagcaataaa

SEQ ID NO: 4685146 - DNA, 25 bp, Homo sapien
tttgaaggaccctgctgagaatgaa

SEQ ID NO: 4685147 - DNA, 25 bp, Homo sapien
aaaatttgaaggaccctgctgagaa

SEQ ID NO: 4685148 - DNA, 25 bp, Homo sapien
cattttgcaagatggagcaccatct

SEQ ID NO: 4685149 - DNA, 25 bp, Homo sapien
acagaccttcaattctttcacctga

SEQ ID NO: 4685150 - DNA, 25 bp, Homo sapien
tcacctgaggcaccaatgccactgg

SEQ ID NO: 4685151 - DNA, 25 bp, Homo sapien
aacacagaccttcaattctttcacc

SEQ ID NO: 4685152 - DNA, 25 bp, Homo sapien
ccaaacacagaccttcaattctttc

SEQ ID NO: 4685153 - DNA, 25 bp, Homo sapien
gcaagccaggtttcatgggacccca

SEQ ID NO: 4685154 - DNA, 25 bp, Homo sapien
gattaattacaatcagcaagccagg

SEQ ID NO: 4685155 - DNA, 25 bp, Homo sapien
tgcaaatgtgaattgttggaactcc

SEQ ID NO: 4685156 - DNA, 25 bp, Homo sapien
gggtgttctaacagcttgggctcct

SEQ ID NO: 4685157 - DNA, 25 bp, Homo sapien
tatccaaaaggacaaggctcccaag

SEQ ID NO: 4685158 - DNA, 25 bp, Homo sapien
tgagctctggagtttccaaagctcc

SEQ ID NO: 4685159 - DNA, 25 bp, Homo sapien
ggagtttccaaagctccagtctctt

SEQ ID NO: 4685160 - DNA, 25 bp, Homo sapien
taaggtatccaaaaggacaaggctc

SEQ ID NO: 4685161 - DNA, 25 bp, Homo sapien
tcattcaattatggggccagaggga

SEQ ID NO: 4685162 - DNA, 25 bp, Homo sapien
gcggcccagagctctgacaatcccc

SEQ ID NO: 4685163 - DNA, 25 bp, Homo sapien
caaaagtcacaacagatttttgaaa

SEQ ID NO: 4685164 - DNA, 25 bp, Homo sapien
gaaaggcagtgtctgcaaaagtcac

SEQ ID NO: 4685165 - DNA, 25 bp, Homo sapien
gttgccatttccagatggagtggcc

SEQ ID NO: 4685166 - DNA, 25 bp, Homo sapien
cctttccagcaggaaatgtaatgtt

SEQ ID NO: 4685167 - DNA, 25 bp, Homo sapien
tccagcaggaaatgtaatgttgcca

SEQ ID NO: 4685168 - DNA, 25 bp, Homo sapien
gatggagtggcctggcttgagggca

SEQ ID NO: 4685169 - DNA, 25 bp, Homo sapien
gcaagcagttgtgcccagaggcctg

SEQ ID NO: 4685170 - DNA, 25 bp, Homo sapien
ctcctgcaagcagttgtgcccagag

SEQ ID NO: 4685171 - DNA, 25 bp, Homo sapien
tcctgcaagcagttgtgcccagagg

SEQ ID NO: 4685172 - DNA, 25 bp, Homo sapien
ctgcaagcagttgtgcccagaggcc

SEQ ID NO: 4685173 - DNA, 25 bp, Homo sapien
ggctgctgagctccaagtctcacat

SEQ ID NO: 4685174 - DNA, 25 bp, Homo sapien
gagtagaaaacaacctcagacaagg

SEQ ID NO: 4685175 - DNA, 25 bp, Homo sapien
tcagacaaggtactatgtccaaacg

SEQ ID NO: 4685176 - DNA, 25 bp, Homo sapien
aaatttagaacagacggacagcctg

SEQ ID NO: 4685177 - DNA, 25 bp, Homo sapien
ctggttctaaactcgtttcaatttg

SEQ ID NO: 4685178 - DNA, 25 bp, Homo sapien
catccaattctggaagccctggttc

SEQ ID NO: 4685179 - DNA, 25 bp, Homo sapien
tcctcctcccatagacctggcagtg

SEQ ID NO: 4685180 - DNA, 25 bp, Homo sapien
ttctaaactcgtttcaatttgtgga

SEQ ID NO: 4685181 - DNA, 25 bp, Homo sapien
gaatgtctcagagacccagccagag

SEQ ID NO: 4685182 - DNA, 25 bp, Homo sapien
cccagaagaatgtctcagagaccca

SEQ ID NO: 4685183 - DNA, 25 bp, Homo sapien
gtctcagagacccagccagaggctt

SEQ ID NO: 4685184 - DNA, 25 bp, Homo sapien
gaagaatgtctcagagacccagcca

SEQ ID NO: 4685185 - DNA, 25 bp, Homo sapien
tagataacgcaggaatgggaaagtc

SEQ ID NO: 4685186 - DNA, 25 bp, Homo sapien
tttctgtctcatgggctatgctggc

SEQ ID NO: 4685187 - DNA, 25 bp, Homo sapien
taattgcggctttcgatgaatgcta

SEQ ID NO: 4685188 - DNA, 25 bp, Homo sapien
caaacgggccagtgaaatgaggtaa

SEQ ID NO: 4685189 - DNA, 25 bp, Homo sapien
gctctgtttgctggacttttggccc

SEQ ID NO: 4685190 - DNA, 25 bp, Homo sapien
agctctgtttgctggacttttggcc

SEQ ID NO: 4685191 - DNA, 25 bp, Homo sapien
gaaatccccaggagttttcagacac

SEQ ID NO: 4685192 - DNA, 25 bp, Homo sapien
cccaggagttttcagacactgtttc

SEQ ID NO: 4685193 - DNA, 25 bp, Homo sapien
tgggaaatccccaggagttttcaga

SEQ ID NO: 4685194 - DNA, 25 bp, Homo sapien
tccccaggagttttcagacactgtt

SEQ ID NO: 4685195 - DNA, 25 bp, Homo sapien
tcactctagcactagctgtttgatt

SEQ ID NO: 4685196 - DNA, 25 bp, Homo sapien
ttcccctggactgccttctgcgtga

SEQ ID NO: 4685197 - DNA, 25 bp, Homo sapien
agctgtttgatttcccgcaatcgtg

SEQ ID NO: 4685198 - DNA, 25 bp, Homo sapien
caatcgtgctaaagcttcccctgga

SEQ ID NO: 4685199 - DNA, 25 bp, Homo sapien
ctctgtgtagttaggcatatattct

SEQ ID NO: 4685200 - DNA, 25 bp, Homo sapien
tctgtgtagttaggcatatattctg

SEQ ID NO: 4685201 - DNA, 25 bp, Homo sapien
gcctttaccatcagctctgtgtagt

SEQ ID NO: 4685202 - DNA, 25 bp, Homo sapien
ctgagcctttaccatcagctctgtg

SEQ ID NO: 4685203 - DNA, 25 bp, Homo sapien
tagactccaaatatgtgaaccacca

SEQ ID NO: 4685204 - DNA, 25 bp, Homo sapien
ccacatgtgggttggctgttcctaa

SEQ ID NO: 4685205 - DNA, 25 bp, Homo sapien
aagctgcaggctcattagactccaa

SEQ ID NO: 4685206 - DNA, 25 bp, Homo sapien
cactggaatcggagccttgatgaag

SEQ ID NO: 4685207 - DNA, 25 bp, Homo sapien
ttggggagaatccaataccttctcc

SEQ ID NO: 4685208 - DNA, 25 bp, Homo sapien
tggggagaatccaataccttctccc

SEQ ID NO: 4685209 - DNA, 25 bp, Homo sapien
gggagaatccaataccttctcccat

SEQ ID NO: 4685210 - DNA, 25 bp, Homo sapien
tttggggagaatccaataccttctc

SEQ ID NO: 4685211 - DNA, 25 bp, Homo sapien
aattgtgtatgatgtcttcctttct

SEQ ID NO: 4685212 - DNA, 25 bp, Homo sapien
ctaatgtaattgtgtatgatgtctt

SEQ ID NO: 4685213 - DNA, 25 bp, Homo sapien
ttcaacataatcaaacactaatgta

SEQ ID NO: 4685214 - DNA, 25 bp, Homo sapien
caaacactaatgtaattgtgtatga

SEQ ID NO: 4685215 - DNA, 25 bp, Homo sapien
tcaggaatgacaaaccaggtcacag

SEQ ID NO: 4685216 - DNA, 25 bp, Homo sapien
tctgagtatctgatacacctgctcc

SEQ ID NO: 4685217 - DNA, 25 bp, Homo sapien
gaataagaccatataattaatacct

SEQ ID NO: 4685218 - DNA, 25 bp, Homo sapien
ttttagctatttcaggaatgacaaa

SEQ ID NO: 4685219 - DNA, 25 bp, Homo sapien
tagctccaaagcatggacagccatg

SEQ ID NO: 4685220 - DNA, 25 bp, Homo sapien
atcttcctttgcattgtagatgccc

SEQ ID NO: 4685221 - DNA, 25 bp, Homo sapien
tgcattgtagatgccctagctccaa

SEQ ID NO: 4685222 - DNA, 25 bp, Homo sapien
tagatgccctagctccaaagcatgg

SEQ ID NO: 4685223 - DNA, 25 bp, Homo sapien
ggaaaattcaatgctgttcccataa

SEQ ID NO: 4685224 - DNA, 25 bp, Homo sapien
aggaaaattcaatgctgttcccata

SEQ ID NO: 4685225 - DNA, 25 bp, Homo sapien
aaatatcgaggaataatattcccac

SEQ ID NO: 4685226 - DNA, 25 bp, Homo sapien
caaatatcgaggaataatattccca

SEQ ID NO: 4685227 - DNA, 25 bp, Homo sapien
tccttatgacttagatgttctatgg

SEQ ID NO: 4685228 - DNA, 25 bp, Homo sapien
atcttcttgtcccatagttttcagg

SEQ ID NO: 4685229 - DNA, 25 bp, Homo sapien
agatgttctatggaggcacctgagg

SEQ ID NO: 4685230 - DNA, 25 bp, Homo sapien
tcccatagttttcaggttctgttcc

SEQ ID NO: 4685231 - DNA, 25 bp, Homo sapien
gccagcaggaggataaataccaagg

SEQ ID NO: 4685232 - DNA, 25 bp, Homo sapien
caaggcagagtatggagctgcccct

SEQ ID NO: 4685233 - DNA, 25 bp, Homo sapien
caaggaagcgatgtaaacacagccc

SEQ ID NO: 4685234 - DNA, 25 bp, Homo sapien
tttcccctgcgagtaagagaatgag

SEQ ID NO: 4685235 - DNA, 25 bp, Homo sapien
gtaaatctgataagaacagattcta

SEQ ID NO: 4685236 - DNA, 25 bp, Homo sapien
ttagccaaaagactgagaagcaata

SEQ ID NO: 4685237 - DNA, 25 bp, Homo sapien
aaatctgataagaacagattctaca

SEQ ID NO: 4685238 - DNA, 25 bp, Homo sapien
gaagtaaatctgataagaacagatt

SEQ ID NO: 4685239 - DNA, 25 bp, Homo sapien
tctaaggcctgagtcaggtacctcc

SEQ ID NO: 4685240 - DNA, 25 bp, Homo sapien
acttcatgaagaattccacagtcat

SEQ ID NO: 4685241 - DNA, 25 bp, Homo sapien
taaggcctgagtcaggtacctccac

SEQ ID NO: 4685242 - DNA, 25 bp, Homo sapien
ggcctgagtcaggtacctccacttc

SEQ ID NO: 4685243 - DNA, 25 bp, Homo sapien
tcacagagcctagaatagcccttga

SEQ ID NO: 4685244 - DNA, 25 bp, Homo sapien
cattgccagttggagctctttgaag

SEQ ID NO: 4685245 - DNA, 25 bp, Homo sapien
tcattgccagttggagctctttgaa

SEQ ID NO: 4685246 - DNA, 25 bp, Homo sapien
tagaatagcccttgagccactgcag

SEQ ID NO: 4685247 - DNA, 25 bp, Homo sapien
caaagacatgtgaggctaaatagca

SEQ ID NO: 4685248 - DNA, 25 bp, Homo sapien
tggaggcacaaagctcaacaaagac

SEQ ID NO: 4685249 - DNA, 25 bp, Homo sapien
gtttctgtgaaccacttgccatgtt

SEQ ID NO: 4685250 - DNA, 25 bp, Homo sapien
tataatcctcctatcgtggaggcac

SEQ ID NO: 4685251 - DNA, 25 bp, Homo sapien
ctttgtggatttgacaatctttgtg

SEQ ID NO: 4685252 - DNA, 25 bp, Homo sapien
tatatggcaaaccagactttgccaa

SEQ ID NO: 4685253 - DNA, 25 bp, Homo sapien
cagactttgccaaacaacaattctg

SEQ ID NO: 4685254 - DNA, 25 bp, Homo sapien
ctgaaatccgcagagtctttgtgga

SEQ ID NO: 4685255 - DNA, 25 bp, Homo sapien
gacacatgggattctgcaagctaca

SEQ ID NO: 4685256 - DNA, 25 bp, Homo sapien
tactcaaatctagctcagaaggagg

SEQ ID NO: 4685257 - DNA, 25 bp, Homo sapien
tgggtttaaaacacacctagtgatc

SEQ ID NO: 4685258 - DNA, 25 bp, Homo sapien
gtctaaatactgtgaccaaagagct

SEQ ID NO: 4685259 - DNA, 25 bp, Homo sapien
ggcttctcatgcttgcactcttcag

SEQ ID NO: 4685260 - DNA, 25 bp, Homo sapien
gtctttattaagtgcaccctcttca

SEQ ID NO: 4685261 - DNA, 25 bp, Homo sapien
tctgaactctcactgacactcggtc

SEQ ID NO: 4685262 - DNA, 25 bp, Homo sapien
cactcggtctacaaaaggcttctca

SEQ ID NO: 4685263 - DNA, 25 bp, Homo sapien
ttccttcgtacacactgtttgtcct

SEQ ID NO: 4685264 - DNA, 25 bp, Homo sapien
tttccttcgtacacactgtttgtcc

SEQ ID NO: 4685265 - DNA, 25 bp, Homo sapien
gatggaggtggggtttatgacgcat

SEQ ID NO: 4685266 - DNA, 25 bp, Homo sapien
tctgaaggggtcaaacaggaaagac

SEQ ID NO: 4685267 - DNA, 25 bp, Homo sapien
gtgctgcaggtgactttaaggtaaa

SEQ ID NO: 4685268 - DNA, 25 bp, Homo sapien
gtagtgggataagggttttctgctg

SEQ ID NO: 4685269 - DNA, 25 bp, Homo sapien
caagacttcaaaccaggcagtaggt

SEQ ID NO: 4685270 - DNA, 25 bp, Homo sapien
tgtgagccacttgacgtcatgttga

SEQ ID NO: 4685271 - DNA, 25 bp, Homo sapien
cagtgttgcatagaaatccttggta

SEQ ID NO: 4685272 - DNA, 25 bp, Homo sapien
cacatgccttgagtggtgtgctgaa

SEQ ID NO: 4685273 - DNA, 25 bp, Homo sapien
tagcttgaaaacgaacatggtggga

SEQ ID NO: 4685274 - DNA, 25 bp, Homo sapien
gtttcacgatatatttcctaagctg

SEQ ID NO: 4685275 - DNA, 25 bp, Homo sapien
cacaagtgggtttcacgatatattt

SEQ ID NO: 4685276 - DNA, 25 bp, Homo sapien
agctccttgcctatccacgggtctg

SEQ ID NO: 4685277 - DNA, 25 bp, Homo sapien
ccttgcctatccacgggtctgattt

SEQ ID NO: 4685278 - DNA, 25 bp, Homo sapien
tccttggcagcaggacatgccgatg

SEQ ID NO: 4685279 - DNA, 25 bp, Homo sapien
tctgggcagccaggtatactgatgc

SEQ ID NO: 4685280 - DNA, 25 bp, Homo sapien
ccttggcagcaggacatgccgatgc

SEQ ID NO: 4685281 - DNA, 25 bp, Homo sapien
tgggatgggccccaagtgtctccca

SEQ ID NO: 4685282 - DNA, 25 bp, Homo sapien
tcccactagactcagccagaaagct

SEQ ID NO: 4685283 - DNA, 25 bp, Homo sapien
ggactgaccccagtgatcagccaac

SEQ ID NO: 4685284 - DNA, 25 bp, Homo sapien
ctggtgaaacagagggaaaacactt

SEQ ID NO: 4685285 - DNA, 25 bp, Homo sapien
gttgtcttactacttccagctgttt

SEQ ID NO: 4685286 - DNA, 25 bp, Homo sapien
tcacattctctattggacctgaagg

SEQ ID NO: 4685287 - DNA, 25 bp, Homo sapien
tggacctgaaggagtctccaattaa

SEQ ID NO: 4685288 - DNA, 25 bp, Homo sapien
tcacgttgtcttactacttccagct

SEQ ID NO: 4685289 - DNA, 25 bp, Homo sapien
tagcaggctgcctctggtcatccct

SEQ ID NO: 4685290 - DNA, 25 bp, Homo sapien
tactgataatgacctctcactcctg

SEQ ID NO: 4685291 - DNA, 25 bp, Homo sapien
acttcatggtccagatgatcactat

SEQ ID NO: 4685292 - DNA, 25 bp, Homo sapien
tcctgatgtagcaggctgcctctgg

SEQ ID NO: 4685293 - DNA, 25 bp, Homo sapien
ttgtagaagagctcctcaaaaacac

SEQ ID NO: 4685294 - DNA, 25 bp, Homo sapien
tttgtagaagagctcctcaaaaaca

SEQ ID NO: 4685295 - DNA, 25 bp, Homo sapien
ttttgtagaagagctcctcaaaaac

SEQ ID NO: 4685296 - DNA, 25 bp, Homo sapien
tgttttgtagaagagctcctcaaaa

SEQ ID NO: 4685297 - DNA, 25 bp, Homo sapien
cagtgcagcaattggacactcattg

SEQ ID NO: 4685298 - DNA, 25 bp, Homo sapien
gcagcaattggacactcattgttcc

SEQ ID NO: 4685299 - DNA, 25 bp, Homo sapien
agtgcagcaattggacactcattgt

SEQ ID NO: 4685300 - DNA, 25 bp, Homo sapien
agcaattggacactcattgttcctg

SEQ ID NO: 4685301 - DNA, 25 bp, Homo sapien
gtgggtccttgtaaccaccctcaga

SEQ ID NO: 4685302 - DNA, 25 bp, Homo sapien
catcctgtcccaagctgaaactttc

SEQ ID NO: 4685303 - DNA, 25 bp, Homo sapien
cagattcatctgcagtgtttttttc

SEQ ID NO: 4685304 - DNA, 25 bp, Homo sapien
tccctgatgttagaatgggtaccac

SEQ ID NO: 4685305 - DNA, 25 bp, Homo sapien
tgttgtagccactctgattccagag

SEQ ID NO: 4685306 - DNA, 25 bp, Homo sapien
ccaatagcgtttccccaggtcatgt

SEQ ID NO: 4685307 - DNA, 25 bp, Homo sapien
gagacaagaccttaaaccaatagcg

SEQ ID NO: 4685308 - DNA, 25 bp, Homo sapien
tagaaaatctatctttatgtcctcc

SEQ ID NO: 4685309 - DNA, 25 bp, Homo sapien
ggtcacagcaatcatggatgtcctc

SEQ ID NO: 4685310 - DNA, 25 bp, Homo sapien
aggtctctctggcacggccaggacc

SEQ ID NO: 4685311 - DNA, 25 bp, Homo sapien
cggccaggacctttactgcctggtt

SEQ ID NO: 4685312 - DNA, 25 bp, Homo sapien
gctatgaatatagctccttgttcca

SEQ ID NO: 4685313 - DNA, 25 bp, Homo sapien
cttgtagccccaattcacagggttg

SEQ ID NO: 4685314 - DNA, 25 bp, Homo sapien
ggtctgagactatcaatttcttgta

SEQ ID NO: 4685315 - DNA, 25 bp, Homo sapien
agagctcaaggtctgagactatcaa

SEQ ID NO: 4685316 - DNA, 25 bp, Homo sapien
gacaaatccatagagtgttgagagc

SEQ ID NO: 4685317 - DNA, 25 bp, Homo sapien
ataaaatgtcctgagtagttaaatc

SEQ ID NO: 4685318 - DNA, 25 bp, Homo sapien
gctattgtaataattggctgggtca

SEQ ID NO: 4685319 - DNA, 25 bp, Homo sapien
taccatgtggaattctgtggcagca

SEQ ID NO: 4685320 - DNA, 25 bp, Homo sapien
tggcagcattggaatcccactggat

SEQ ID NO: 4685321 - DNA, 25 bp, Homo sapien
ctgggtcagtcagatacttggatac

SEQ ID NO: 4685322 - DNA, 25 bp, Homo sapien
ggtgcgcagacaagccaagagcatt

SEQ ID NO: 4685323 - DNA, 25 bp, Homo sapien
caatttgatgtgttgcgtgtgatcc

SEQ ID NO: 4685324 - DNA, 25 bp, Homo sapien
tggtgtttctcagagctactcctgg

SEQ ID NO: 4685325 - DNA, 25 bp, Homo sapien
gaacaagtcccaaacatgatgcagc

SEQ ID NO: 4685326 - DNA, 25 bp, Homo sapien
cagtcctgagtattctgcacttggc

SEQ ID NO: 4685327 - DNA, 25 bp, Homo sapien
tgcacttggcttccgttctctgtgt

SEQ ID NO: 4685328 - DNA, 25 bp, Homo sapien
tacaagacttccgttctcaggaaga

SEQ ID NO: 4685329 - DNA, 25 bp, Homo sapien
tctctgtgtcgattaggcctttcaa

SEQ ID NO: 4685330 - DNA, 25 bp, Homo sapien
actaaagctggtggcttaattcctt

SEQ ID NO: 4685331 - DNA, 25 bp, Homo sapien
aactaaagctggtggcttaattcct

SEQ ID NO: 4685332 - DNA, 25 bp, Homo sapien
ctaaagctggtggcttaattccttg

SEQ ID NO: 4685333 - DNA, 25 bp, Homo sapien
taaactaaagctggtggcttaattc

SEQ ID NO: 4685334 - DNA, 25 bp, Homo sapien
tctttccagactgcaagggcaagcc

SEQ ID NO: 4685335 - DNA, 25 bp, Homo sapien
gcaagcccgtgaccaagaactgttt

SEQ ID NO: 4685336 - DNA, 25 bp, Homo sapien
gaggccagaagcaagatgcagaagt

SEQ ID NO: 4685337 - DNA, 25 bp, Homo sapien
ttgcactgcatctcatgctgctctg

SEQ ID NO: 4685338 - DNA, 25 bp, Homo sapien
gacccgtgtttgtgtacttaatgac

SEQ ID NO: 4685339 - DNA, 25 bp, Homo sapien
tgaaaccaagcaatctggacccgtg

SEQ ID NO: 4685340 - DNA, 25 bp, Homo sapien
gagtagcttttcttggatcacacag

SEQ ID NO: 4685341 - DNA, 25 bp, Homo sapien
ggattatacatccttgtagaggagc

SEQ ID NO: 4685342 - DNA, 25 bp, Homo sapien
tgtcacatttccaacggctccacaa

SEQ ID NO: 4685343 - DNA, 25 bp, Homo sapien
gaaattaatcaatcccctcaggcct

SEQ ID NO: 4685344 - DNA, 25 bp, Homo sapien
caatgctgattttgcaagcttgcct

SEQ ID NO: 4685345 - DNA, 25 bp, Homo sapien
tattgcgtggctgcaggcactagga

SEQ ID NO: 4685346 - DNA, 25 bp, Homo sapien
gtgccagtgctattctgaacatttg

SEQ ID NO: 4685347 - DNA, 25 bp, Homo sapien
tgtgagtgccagtgctattctgaac

SEQ ID NO: 4685348 - DNA, 25 bp, Homo sapien
ggagttgttatctgtgtgagtgcca

SEQ ID NO: 4685349 - DNA, 25 bp, Homo sapien
tatctgtgtgagtgccagtgctatt

SEQ ID NO: 4685350 - DNA, 25 bp, Homo sapien
catcatcccatgtgcactgttgaaa

SEQ ID NO: 4685351 - DNA, 25 bp, Homo sapien
aaattccttcccagatagctgtcct

SEQ ID NO: 4685352 - DNA, 25 bp, Homo sapien
ttcccagatagctgtcctgcctctg

SEQ ID NO: 4685353 - DNA, 25 bp, Homo sapien
tcccatgtgcactgttgaaattcct

SEQ ID NO: 4685354 - DNA, 25 bp, Homo sapien
tggtgaaggaaaatccgattggtcc

SEQ ID NO: 4685355 - DNA, 25 bp, Homo sapien
agcaatcagtgatggccaggaagca

SEQ ID NO: 4685356 - DNA, 25 bp, Homo sapien
taggtgaagtgtctagcagtgaagc

SEQ ID NO: 4685357 - DNA, 25 bp, Homo sapien
caggaagcagtatccctcagtggaa

SEQ ID NO: 4685358 - DNA, 25 bp, Homo sapien
tgtctccaaaaggtttacagagtag

SEQ ID NO: 4685359 - DNA, 25 bp, Homo sapien
cattctcttgattgggttgataaac

SEQ ID NO: 4685360 - DNA, 25 bp, Homo sapien
ttacagagtagggttggtcattctc

SEQ ID NO: 4685361 - DNA, 25 bp, Homo sapien
agtcatctgaatacaatggacaacc

SEQ ID NO: 4685362 - DNA, 25 bp, Homo sapien
tgtgcctgcctcgaagtaatgtccc

SEQ ID NO: 4685363 - DNA, 25 bp, Homo sapien
cctgcctcgaagtaatgtccctttc

SEQ ID NO: 4685364 - DNA, 25 bp, Homo sapien
tgtctttcaatgtctgtgcctgcct

SEQ ID NO: 4685365 - DNA, 25 bp, Homo sapien
ttccactaagggcatcagatgcttc

SEQ ID NO: 4685366 - DNA, 25 bp, Homo sapien
gcatgttcactcttgcagtgagagt

SEQ ID NO: 4685367 - DNA, 25 bp, Homo sapien
gcgatgtcctggacccatagtgata

SEQ ID NO: 4685368 - DNA, 25 bp, Homo sapien
tcctgaggggtctagatttatttac

SEQ ID NO: 4685369 - DNA, 25 bp, Homo sapien
tcttgcagtgagagtagcgatgtcc

SEQ ID NO: 4685370 - DNA, 25 bp, Homo sapien
aactcgagtataagcaagtctgacc

SEQ ID NO: 4685371 - DNA, 25 bp, Homo sapien
ctccaaaaacctggtctgaactcga

SEQ ID NO: 4685372 - DNA, 25 bp, Homo sapien
tgtatgggggagtatcatcagagcc

SEQ ID NO: 4685373 - DNA, 25 bp, Homo sapien
gcaagtctgaccttgtgtttcccta

SEQ ID NO: 4685374 - DNA, 25 bp, Homo sapien
atatttccttattagaagaacatca

SEQ ID NO: 4685375 - DNA, 25 bp, Homo sapien
tatttccttattagaagaacatcat

SEQ ID NO: 4685376 - DNA, 25 bp, Homo sapien
gatatttccttattagaagaacatc

SEQ ID NO: 4685377 - DNA, 25 bp, Homo sapien
atcctcccaccagcaattcaggaag

SEQ ID NO: 4685378 - DNA, 25 bp, Homo sapien
cagtcatggctttcccaccattttg

SEQ ID NO: 4685379 - DNA, 25 bp, Homo sapien
tgctgctgtgttgcttctggtccag

SEQ ID NO: 4685380 - DNA, 25 bp, Homo sapien
atggctttcccaccattttgctgct

SEQ ID NO: 4685381 - DNA, 25 bp, Homo sapien
ttaatttgtgtatcgagcccctgac

SEQ ID NO: 4685382 - DNA, 25 bp, Homo sapien
tttaatttgtgtatcgagcccctga

SEQ ID NO: 4685383 - DNA, 25 bp, Homo sapien
gaacttatttatggttgcacagcca

SEQ ID NO: 4685384 - DNA, 25 bp, Homo sapien
tgctgccaacaatcctctaaagtag

SEQ ID NO: 4685385 - DNA, 25 bp, Homo sapien
tgagtgaataacgtatgctgccaac

SEQ ID NO: 4685386 - DNA, 25 bp, Homo sapien
caggctcccctgattgcaaatagtt

SEQ ID NO: 4685387 - DNA, 25 bp, Homo sapien
aggagctctcgactcactgttgagg

SEQ ID NO: 4685388 - DNA, 25 bp, Homo sapien
tggaatgtaacttgggtctgatgca

SEQ ID NO: 4685389 - DNA, 25 bp, Homo sapien
tcataaagatcatgcagagttgagg

SEQ ID NO: 4685390 - DNA, 25 bp, Homo sapien
tggtgttgggagcatgtgatgagtg

SEQ ID NO: 4685391 - DNA, 25 bp, Homo sapien
accagctgttccctgattaaaaaag

SEQ ID NO: 4685392 - DNA, 25 bp, Homo sapien
agctgttccctgattaaaaaagcct

SEQ ID NO: 4685393 - DNA, 25 bp, Homo sapien
cacaaccagctgttccctgattaaa

SEQ ID NO: 4685394 - DNA, 25 bp, Homo sapien
caaccagctgttccctgattaaaaa

SEQ ID NO: 4685395 - DNA, 25 bp, Homo sapien
gaatgcaagggctggctactgctcc

SEQ ID NO: 4685396 - DNA, 25 bp, Homo sapien
gaaatgtgacagctccagatggtgg

SEQ ID NO: 4685397 - DNA, 25 bp, Homo sapien
gccctggtagaaaggactgccactg

SEQ ID NO: 4685398 - DNA, 25 bp, Homo sapien
ccatcaaaggctgaatatgctcctg

SEQ ID NO: 4685399 - DNA, 25 bp, Homo sapien
cattgctacacgcttcaggaagaga

SEQ ID NO: 4685400 - DNA, 25 bp, Homo sapien
tatgacgatttgtcggatgagcaaa

SEQ ID NO: 4685401 - DNA, 25 bp, Homo sapien
ctccagatctttcttgagagctagg

SEQ ID NO: 4685402 - DNA, 25 bp, Homo sapien
gaatagcgtgctgaaagtctgcgat

SEQ ID NO: 4685403 - DNA, 25 bp, Homo sapien
tccctgttaaaactgcggggatcat

SEQ ID NO: 4685404 - DNA, 25 bp, Homo sapien
attgaatgagtccctgttaaaactg

SEQ ID NO: 4685405 - DNA, 25 bp, Homo sapien
aatgagtccctgttaaaactgcggg

SEQ ID NO: 4685406 - DNA, 25 bp, Homo sapien
tgaatgagtccctgttaaaactgcg

SEQ ID NO: 4685407 - DNA, 25 bp, Homo sapien
ttctcgctttcctcctcaaggtgtg

SEQ ID NO: 4685408 - DNA, 25 bp, Homo sapien
aaaaagctcctcttaagactgatcc

SEQ ID NO: 4685409 - DNA, 25 bp, Homo sapien
aagactgatccgctgaattccctcc

SEQ ID NO: 4685410 - DNA, 25 bp, Homo sapien
tgatttctcgctccaaaaaaaagct

SEQ ID NO: 4685411 - DNA, 25 bp, Homo sapien
cccctgcaccgccacccggagctgc

SEQ ID NO: 4685412 - DNA, 25 bp, Homo sapien
ctgcaccgccacccggagctgccag

SEQ ID NO: 4685413 - DNA, 25 bp, Homo sapien
cccttcgcccctgcaccgccacccg

SEQ ID NO: 4685414 - DNA, 25 bp, Homo sapien
ttcgcccctgcaccgccacccggag

SEQ ID NO: 4685415 - DNA, 25 bp, Homo sapien
gcggggacgctcggccagcccgcag

SEQ ID NO: 4685416 - DNA, 25 bp, Homo sapien
cgggggacgcgcacggcttcccagg

SEQ ID NO: 4685417 - DNA, 25 bp, Homo sapien
gccgggggacgcgcacggcttccca

SEQ ID NO: 4685418 - DNA, 25 bp, Homo sapien
ggacgcgcacggcttcccaggcacc

SEQ ID NO: 4685419 - DNA, 25 bp, Homo sapien
ctgaaatagagcgcccggctcggcg

SEQ ID NO: 4685420 - DNA, 25 bp, Homo sapien
tcggcgggctcggctcctcggtggc

SEQ ID NO: 4685421 - DNA, 25 bp, Homo sapien
cgggctcggctcctcggtggcgccc

SEQ ID NO: 4685422 - DNA, 25 bp, Homo sapien
ggctcggcgggctcggctcctcggt

SEQ ID NO: 4685423 - DNA, 25 bp, Homo sapien
ccctccgctcgcagccacacttgca

SEQ ID NO: 4685424 - DNA, 25 bp, Homo sapien
agctcgaggtcggcccggaggcgca

SEQ ID NO: 4685425 - DNA, 25 bp, Homo sapien
tgatcactgccggagacctctggcc

SEQ ID NO: 4685426 - DNA, 25 bp, Homo sapien
acacttgcagcgtgaacgcgtcccg

SEQ ID NO: 4685427 - DNA, 25 bp, Homo sapien
tgcaatcctcgcaaagtgtccgatt

SEQ ID NO: 4685428 - DNA, 25 bp, Homo sapien
ggagcatttctaaggtttgcaatcc

SEQ ID NO: 4685429 - DNA, 25 bp, Homo sapien
gtgtccgatttcactataggctttg

SEQ ID NO: 4685430 - DNA, 25 bp, Homo sapien
cgctccccagttttattaaaggcat

SEQ ID NO: 4685431 - DNA, 25 bp, Homo sapien
caagattgtttgtgcagaaagggaa

SEQ ID NO: 4685432 - DNA, 25 bp, Homo sapien
attgtttgtgcagaaagggaatctc

SEQ ID NO: 4685433 - DNA, 25 bp, Homo sapien
agattgtttgtgcagaaagggaatc

SEQ ID NO: 4685434 - DNA, 25 bp, Homo sapien
ggcaagattgtttgtgcagaaaggg

SEQ ID NO: 4685435 - DNA, 25 bp, Homo sapien
tggctgcagtgaagggggaacccct

SEQ ID NO: 4685436 - DNA, 25 bp, Homo sapien
tcacacgtttcctggctgcagtgaa

SEQ ID NO: 4685437 - DNA, 25 bp, Homo sapien
tgcagtgaagggggaacccctactc

SEQ ID NO: 4685438 - DNA, 25 bp, Homo sapien
gctgcagtgaagggggaacccctac

SEQ ID NO: 4685439 - DNA, 25 bp, Homo sapien
gagacgtattcttgggatagcagca

SEQ ID NO: 4685440 - DNA, 25 bp, Homo sapien
tctcctttgatagctggaaagcggg

SEQ ID NO: 4685441 - DNA, 25 bp, Homo sapien
ggatagtcagtgctacatctgtgaa

SEQ ID NO: 4685442 - DNA, 25 bp, Homo sapien
tctgtgaaagtccaagccatggaaa

SEQ ID NO: 4685443 - DNA, 25 bp, Homo sapien
cactggtactaggtaaagactagga

SEQ ID NO: 4685444 - DNA, 25 bp, Homo sapien
caaatcactggtactaggtaaagac

SEQ ID NO: 4685445 - DNA, 25 bp, Homo sapien
ttccaaatcactggtactaggtaaa

SEQ ID NO: 4685446 - DNA, 25 bp, Homo sapien
aatcactggtactaggtaaagacta

SEQ ID NO: 4685447 - DNA, 25 bp, Homo sapien
tggaccaggcattttatacaagcaa

SEQ ID NO: 4685448 - DNA, 25 bp, Homo sapien
agcagtctcctgtggaatcccaggt

SEQ ID NO: 4685449 - DNA, 25 bp, Homo sapien
tacaagcaataataacctaacgccc

SEQ ID NO: 4685450 - DNA, 25 bp, Homo sapien
tttctacacataaaatggaccaggc

SEQ ID NO: 4685451 - DNA, 25 bp, Homo sapien
caggtgtttacacgccgccaaatct

SEQ ID NO: 4685452 - DNA, 25 bp, Homo sapien
agccaggtgtttacacgccgccaaa

SEQ ID NO: 4685453 - DNA, 25 bp, Homo sapien
tacacgccgccaaatctggctccaa

SEQ ID NO: 4685454 - DNA, 25 bp, Homo sapien
tgtttacacgccgccaaatctggct

SEQ ID NO: 4685455 - DNA, 25 bp, Homo sapien
cctgcctggtgtggtacaaaagcaa

SEQ ID NO: 4685456 - DNA, 25 bp, Homo sapien
ggatgtgtcagaaacaacccctcat

SEQ ID NO: 4685457 - DNA, 25 bp, Homo sapien
gacacattctctcagcggtgcaggg

SEQ ID NO: 4685458 - DNA, 25 bp, Homo sapien
ggaaactggcttgggtaacctctga

SEQ ID NO: 4685459 - DNA, 25 bp, Homo sapien
caatattctagatcccaggtaggac

SEQ ID NO: 4685460 - DNA, 25 bp, Homo sapien
ggcgacgatacacacttctcagggt

SEQ ID NO: 4685461 - DNA, 25 bp, Homo sapien
cgaggacttgggttcacatctaggc

SEQ ID NO: 4685462 - DNA, 25 bp, Homo sapien
tgttccccagtccagaaagccaaga

SEQ ID NO: 4685463 - DNA, 25 bp, Homo sapien
acttctacttgttcactgagtggca

SEQ ID NO: 4685464 - DNA, 25 bp, Homo sapien
ctgagtggcagctcaacggaaggtg

SEQ ID NO: 4685465 - DNA, 25 bp, Homo sapien
agctcaacggaaggtgagagtttga

SEQ ID NO: 4685466 - DNA, 25 bp, Homo sapien
ttatcacttctacttgttcactgag

SEQ ID NO: 4685467 - DNA, 25 bp, Homo sapien
gcacagtgagctgtttgacccagat

SEQ ID NO: 4685468 - DNA, 25 bp, Homo sapien
catgtccaggctggccatacacaac

SEQ ID NO: 4685469 - DNA, 25 bp, Homo sapien
atacacaacccacactcccgagttc

SEQ ID NO: 4685470 - DNA, 25 bp, Homo sapien
acactcccgagttccatatctctgg

SEQ ID NO: 4685471 - DNA, 25 bp, Homo sapien
aatggtgaatgccttagagctgagc

SEQ ID NO: 4685472 - DNA, 25 bp, Homo sapien
ggaccaccatggttccacacaggaa

SEQ ID NO: 4685473 - DNA, 25 bp, Homo sapien
tactacccagctcagtaagcaggga

SEQ ID NO: 4685474 - DNA, 25 bp, Homo sapien
tctttctaaaggactagcccagggc

SEQ ID NO: 4685475 - DNA, 25 bp, Homo sapien
cacaggtagataagatacaagttgc

SEQ ID NO: 4685476 - DNA, 25 bp, Homo sapien
gagggagtcctctagtacctggaga

SEQ ID NO: 4685477 - DNA, 25 bp, Homo sapien
tcctctagtacctggagattttctc

SEQ ID NO: 4685478 - DNA, 25 bp, Homo sapien
caagttgcccatagagggagtcctc

SEQ ID NO: 4685479 - DNA, 25 bp, Homo sapien
gagaagcggtaaatggtcaaggtca

SEQ ID NO: 4685480 - DNA, 25 bp, Homo sapien
caacatcaaagaactccagtgaggt

SEQ ID NO: 4685481 - DNA, 25 bp, Homo sapien
gaaagtcgctattttacccctgaca

SEQ ID NO: 4685482 - DNA, 25 bp, Homo sapien
cagtaagtggcaggatttggcagac

SEQ ID NO: 4685483 - DNA, 25 bp, Homo sapien
tacttagcaagaaggtgtaccatct

SEQ ID NO: 4685484 - DNA, 25 bp, Homo sapien
tgtgtccacacttggcccctgaggg

SEQ ID NO: 4685485 - DNA, 25 bp, Homo sapien
cccctgagggtgacaggcacaggca

SEQ ID NO: 4685486 - DNA, 25 bp, Homo sapien
ggtgtggaagccgaaaatgtgtcca

SEQ ID NO: 4685487 - DNA, 25 bp, Homo sapien
cttcagagatgacagttccagggat

SEQ ID NO: 4685488 - DNA, 25 bp, Homo sapien
gataagcaatactacaaggccggtg

SEQ ID NO: 4685489 - DNA, 25 bp, Homo sapien
gaccagggttctctacaatctaaag

SEQ ID NO: 4685490 - DNA, 25 bp, Homo sapien
caacaggaatggatacgggacaggc

SEQ ID NO: 4685491 - DNA, 25 bp, Homo sapien
tagcacaaagcctggtaaatggaag

SEQ ID NO: 4685492 - DNA, 25 bp, Homo sapien
catttatccaagaatggaaggatgg

SEQ ID NO: 4685493 - DNA, 25 bp, Homo sapien
acaagaattggaacctcctaactct

SEQ ID NO: 4685494 - DNA, 25 bp, Homo sapien
agatggatggatagcagaaaagaag

SEQ ID NO: 4685495 - DNA, 25 bp, Homo sapien
acacagcctagggtgagcctttcag

SEQ ID NO: 4685496 - DNA, 25 bp, Homo sapien
ccacatgggcaagtcaaatgatgta

SEQ ID NO: 4685497 - DNA, 25 bp, Homo sapien
gatgcaggcctacagcaagttgtat

SEQ ID NO: 4685498 - DNA, 25 bp, Homo sapien
gaggcactgaacacctgtacccatt

SEQ ID NO: 4685499 - DNA, 25 bp, Homo sapien
tagtatgcctgagggttcctgaaac

SEQ ID NO: 4685500 - DNA, 25 bp, Homo sapien
tatccagatgtgaggcaagcttgag

SEQ ID NO: 4685501 - DNA, 25 bp, Homo sapien
gatggcaaactgtaattccctctgg

SEQ ID NO: 4685502 - DNA, 25 bp, Homo sapien
ataaatatctttccggccaggcaag

SEQ ID NO: 4685503 - DNA, 25 bp, Homo sapien
ttatggaaccagttgagagcagagg

SEQ ID NO: 4685504 - DNA, 25 bp, Homo sapien
tcaaaagcctaagatccaactccag

SEQ ID NO: 4685505 - DNA, 25 bp, Homo sapien
atctgttgctgcctgttatggaacc

SEQ ID NO: 4685506 - DNA, 25 bp, Homo sapien
tttgaagtgagttgcgccagatcta

SEQ ID NO: 4685507 - DNA, 25 bp, Homo sapien
ttatcccctctctgccgaactgttt

SEQ ID NO: 4685508 - DNA, 25 bp, Homo sapien
tcttctcgagagcaatggttgtgtc

SEQ ID NO: 4685509 - DNA, 25 bp, Homo sapien
tgtgtcattccagtaacctctccag

SEQ ID NO: 4685510 - DNA, 25 bp, Homo sapien
tgtcattccagtaacctctccagca

SEQ ID NO: 4685511 - DNA, 25 bp, Homo sapien
tgtgctcttcggttttggagttgcc

SEQ ID NO: 4685512 - DNA, 25 bp, Homo sapien
taggaaacttgacatgtgctcttcg

SEQ ID NO: 4685513 - DNA, 25 bp, Homo sapien
gaaacttgacatgtgctcttcggtt

SEQ ID NO: 4685514 - DNA, 25 bp, Homo sapien
tgacatgtgctcttcggttttggag

SEQ ID NO: 4685515 - DNA, 25 bp, Homo sapien
ccttagtgaagcaccaaatgcctcc

SEQ ID NO: 4685516 - DNA, 25 bp, Homo sapien
ggacaaccttagtgaagcaccaaat

SEQ ID NO: 4685517 - DNA, 25 bp, Homo sapien
catcaggacaaccttagtgaagcac

SEQ ID NO: 4685518 - DNA, 25 bp, Homo sapien
caaccttagtgaagcaccaaatgcc

SEQ ID NO: 4685519 - DNA, 25 bp, Homo sapien
catcaggcatctgggctatgccacc

SEQ ID NO: 4685520 - DNA, 25 bp, Homo sapien
aatcatcaggcatctgggctatgcc

SEQ ID NO: 4685521 - DNA, 25 bp, Homo sapien
aaaatcatcaggcatctgggctatg

SEQ ID NO: 4685522 - DNA, 25 bp, Homo sapien
tcatcaggcatctgggctatgccac

SEQ ID NO: 4685523 - DNA, 25 bp, Homo sapien
tcttcatagaggttgaccacgcggt

SEQ ID NO: 4685524 - DNA, 25 bp, Homo sapien
cataggtggcagctaggtataccca

SEQ ID NO: 4685525 - DNA, 25 bp, Homo sapien
tcgtgtccagcagaaagccgtgggc

SEQ ID NO: 4685526 - DNA, 25 bp, Homo sapien
tgaagtgctcgatgtagccccggta

SEQ ID NO: 4685527 - DNA, 25 bp, Homo sapien
aatctggttatttagcatgaatccc

SEQ ID NO: 4685528 - DNA, 25 bp, Homo sapien
ttagagctattcttgaagaccttgc

SEQ ID NO: 4685529 - DNA, 25 bp, Homo sapien
ccctgatatagtcaagctgcaaatc

SEQ ID NO: 4685530 - DNA, 25 bp, Homo sapien
tctctttgatcatctagggcactcc

SEQ ID NO: 4685531 - DNA, 25 bp, Homo sapien
ctgtgtgttggacagaatagaaaag

SEQ ID NO: 4685532 - DNA, 25 bp, Homo sapien
tgttggacagaatagaaaagttcag

SEQ ID NO: 4685533 - DNA, 25 bp, Homo sapien
tgtgttggacagaatagaaaagttc

SEQ ID NO: 4685534 - DNA, 25 bp, Homo sapien
acagaatagaaaagttcagtgtgaa

SEQ ID NO: 4685535 - DNA, 25 bp, Homo sapien
aaatgtgctcgagccatcagcaagt

SEQ ID NO: 4685536 - DNA, 25 bp, Homo sapien
tgcagaggtcggcaaatgtgctcga

SEQ ID NO: 4685537 - DNA, 25 bp, Homo sapien
aagagtcagcagaaaacctgcagag

SEQ ID NO: 4685538 - DNA, 25 bp, Homo sapien
ggcccttgctcttttgagagagaca

SEQ ID NO: 4685539 - DNA, 25 bp, Homo sapien
tctatggattgcatcaacaggttcc

SEQ ID NO: 4685540 - DNA, 25 bp, Homo sapien
gaaggaacagaggattaagcctaac

SEQ ID NO: 4685541 - DNA, 25 bp, Homo sapien
ttccgtgagataaactgaacttttc

SEQ ID NO: 4685542 - DNA, 25 bp, Homo sapien
cttcagttggatccaccaaatggga

SEQ ID NO: 4685543 - DNA, 25 bp, Homo sapien
cacaggatacaagcaccttgaagac

SEQ ID NO: 4685544 - DNA, 25 bp, Homo sapien
taagctggtgtctaaggtgtctata

SEQ ID NO: 4685545 - DNA, 25 bp, Homo sapien
tctatagggtgtagttgaaaaagca

SEQ ID NO: 4685546 - DNA, 25 bp, Homo sapien
gagattatatcttggacccctacag

SEQ ID NO: 4685547 - DNA, 25 bp, Homo sapien
tctattattacaaagcctgcttatg

SEQ ID NO: 4685548 - DNA, 25 bp, Homo sapien
tgaagccccaaccagactcacatct

SEQ ID NO: 4685549 - DNA, 25 bp, Homo sapien
cctattatcactacatgtctggcca

SEQ ID NO: 4685550 - DNA, 25 bp, Homo sapien
gctaaaagcctattgcatcccttct

SEQ ID NO: 4685551 - DNA, 25 bp, Homo sapien
tgtgcacacaagaatggaggagact

SEQ ID NO: 4685552 - DNA, 25 bp, Homo sapien
gccatgacatgccacaggatagctg

SEQ ID NO: 4685553 - DNA, 25 bp, Homo sapien
gtaccataccaggtgtctcacacag

SEQ ID NO: 4685554 - DNA, 25 bp, Homo sapien
ggaggatatggtgtccacatgtgca

SEQ ID NO: 4685555 - DNA, 25 bp, Homo sapien
tttgaatcaaacacatcagaagctc

SEQ ID NO: 4685556 - DNA, 25 bp, Homo sapien
cacatcagaagctcgatgtggagac

SEQ ID NO: 4685557 - DNA, 25 bp, Homo sapien
caaacacatcagaagctcgatgtgg

SEQ ID NO: 4685558 - DNA, 25 bp, Homo sapien
cagaagctcgatgtggagacagtgc

SEQ ID NO: 4685559 - DNA, 25 bp, Homo sapien
tcccaagggccctaacaatctggac

SEQ ID NO: 4685560 - DNA, 25 bp, Homo sapien
tctccaagctgtgaccagtacaaaa

SEQ ID NO: 4685561 - DNA, 25 bp, Homo sapien
tccaaataacaagctttctccaagc

SEQ ID NO: 4685562 - DNA, 25 bp, Homo sapien
tattgcatccatatccttgttccaa

SEQ ID NO: 4685563 - DNA, 25 bp, Homo sapien
tcaaaatcccagactcacgcagagt

SEQ ID NO: 4685564 - DNA, 25 bp, Homo sapien
tctgtgtggcttaatctgcgtagaa

SEQ ID NO: 4685565 - DNA, 25 bp, Homo sapien
gaagctttgctactcagaattggac

SEQ ID NO: 4685566 - DNA, 25 bp, Homo sapien
tagacctatatctatgggcaagttg

SEQ ID NO: 4685567 - DNA, 25 bp, Homo sapien
ttattcagtggtaattgcagaagcc

SEQ ID NO: 4685568 - DNA, 25 bp, Homo sapien
ttttgctgcccgaggtattcccact

SEQ ID NO: 4685569 - DNA, 25 bp, Homo sapien
ggaagactccacagcagcaatccag

SEQ ID NO: 4685570 - DNA, 25 bp, Homo sapien
ggtattcatcctagcccaaagcaga

SEQ ID NO: 4685571 - DNA, 25 bp, Homo sapien
ctcctctgaggattttgcaaagaaa

SEQ ID NO: 4685572 - DNA, 25 bp, Homo sapien
tgtgttgatccatccaatttaagaa

SEQ ID NO: 4685573 - DNA, 25 bp, Homo sapien
tcccatggccaagttgctactcctg

SEQ ID NO: 4685574 - DNA, 25 bp, Homo sapien
tattgagatgtgttgatccatccaa

SEQ ID NO: 4685575 - DNA, 25 bp, Homo sapien
gagatgcctcggaagacgtgataga

SEQ ID NO: 4685576 - DNA, 25 bp, Homo sapien
tgtgcccaggcatgccatagaaaga

SEQ ID NO: 4685577 - DNA, 25 bp, Homo sapien
cctgggtcaccacaggacttgtgtt

SEQ ID NO: 4685578 - DNA, 25 bp, Homo sapien
tccagtctcgaaggagggctctgtc

SEQ ID NO: 4685579 - DNA, 25 bp, Homo sapien
tcaatcgttcagttaccacatgggt

SEQ ID NO: 4685580 - DNA, 25 bp, Homo sapien
taaagcaacgagaagaagttgaccc

SEQ ID NO: 4685581 - DNA, 25 bp, Homo sapien
taccctaccagtgatcaggcctgag

SEQ ID NO: 4685582 - DNA, 25 bp, Homo sapien
tctgctgttaatgggtcactgagct

SEQ ID NO: 4685583 - DNA, 25 bp, Homo sapien
agtcctcagaccgaaaagggccaga

SEQ ID NO: 4685584 - DNA, 25 bp, Homo sapien
agggccagataattggacacttttt

SEQ ID NO: 4685585 - DNA, 25 bp, Homo sapien
tctatggctccctattgcaaggaaa

SEQ ID NO: 4685586 - DNA, 25 bp, Homo sapien
catgtaactcctgaataccaaacat

SEQ ID NO: 4685587 - DNA, 25 bp, Homo sapien
cattctggcgacttgattgggcgtg

SEQ ID NO: 4685588 - DNA, 25 bp, Homo sapien
cagagtccgttgtgtggcccagaac

SEQ ID NO: 4685589 - DNA, 25 bp, Homo sapien
gggaaccactccagtgtcacagagt

SEQ ID NO: 4685590 - DNA, 25 bp, Homo sapien
aaatggccatctataggtgggaacc

SEQ ID NO: 4685591 - DNA, 25 bp, Homo sapien
cacaaaagccaggtgacgtgggcag

SEQ ID NO: 4685592 - DNA, 25 bp, Homo sapien
gactatggtcaacgtagctgctaac

SEQ ID NO: 4685593 - DNA, 25 bp, Homo sapien
gctgaggacgggaaatgtatgacct

SEQ ID NO: 4685594 - DNA, 25 bp, Homo sapien
tgagatggctttgctcaaggtccca

SEQ ID NO: 4685595 - DNA, 25 bp, Homo sapien
ggatgaggtcgcaaagacttcagac

SEQ ID NO: 4685596 - DNA, 25 bp, Homo sapien
ccatggccaattgtcagataactga

SEQ ID NO: 4685597 - DNA, 25 bp, Homo sapien
ccccagttggctaatggctataatc

SEQ ID NO: 4685598 - DNA, 25 bp, Homo sapien
ctagaacatctttggcttacacatc

SEQ ID NO: 4685599 - DNA, 25 bp, Homo sapien
gaggccaaggaaagagggaaaatgc

SEQ ID NO: 4685600 - DNA, 25 bp, Homo sapien
ggccaaggaaagagggaaaatgcac

SEQ ID NO: 4685601 - DNA, 25 bp, Homo sapien
gccaaggaaagagggaaaatgcacc

SEQ ID NO: 4685602 - DNA, 25 bp, Homo sapien
caaggaaagagggaaaatgcaccga

SEQ ID NO: 4685603 - DNA, 25 bp, Homo sapien
caaagatgacatgctgatcccaatt

SEQ ID NO: 4685604 - DNA, 25 bp, Homo sapien
gaagcatactgcaccaggattctcc

SEQ ID NO: 4685605 - DNA, 25 bp, Homo sapien
gaggaagcgttggaagcatactgca

SEQ ID NO: 4685606 - DNA, 25 bp, Homo sapien
gcgttggaagcatactgcaccagga

SEQ ID NO: 4685607 - DNA, 25 bp, Homo sapien
ccagtgactgctggcatgagctaac

SEQ ID NO: 4685608 - DNA, 25 bp, Homo sapien
cagtcagtggagacaaaggtcaccc

SEQ ID NO: 4685609 - DNA, 25 bp, Homo sapien
gatgtcattgacagctccactagag

SEQ ID NO: 4685610 - DNA, 25 bp, Homo sapien
gaatttgggctccaggtgcggacac

SEQ ID NO: 4685611 - DNA, 25 bp, Homo sapien
gaggaactccagctcgaggtagcag

SEQ ID NO: 4685612 - DNA, 25 bp, Homo sapien
ggcttatgaggcttaaggtcacaca

SEQ ID NO: 4685613 - DNA, 25 bp, Homo sapien
tcaactctgccatgttaagacaaat

SEQ ID NO: 4685614 - DNA, 25 bp, Homo sapien
taaactccctattcagagaatgcac

SEQ ID NO: 4685615 - DNA, 25 bp, Homo sapien
tacaatccatagagtgagtcttgac

SEQ ID NO: 4685616 - DNA, 25 bp, Homo sapien
tcaaacttatcaacccatggcagct

SEQ ID NO: 4685617 - DNA, 25 bp, Homo sapien
cagtggcttaggagtcagaacgaaa

SEQ ID NO: 4685618 - DNA, 25 bp, Homo sapien
gaagaattaatccagtgcaacctcc

SEQ ID NO: 4685619 - DNA, 25 bp, Homo sapien
cacccaagttagatggcgaagactc

SEQ ID NO: 4685620 - DNA, 25 bp, Homo sapien
tggagatgggatacaagtgagaccc

SEQ ID NO: 4685621 - DNA, 25 bp, Homo sapien
aggtgatactgatgccattggtctg

SEQ ID NO: 4685622 - DNA, 25 bp, Homo sapien
tagcatccaaattacctggagaggc

SEQ ID NO: 4685623 - DNA, 25 bp, Homo sapien
taaaagttctaatggtcaggcctta

SEQ ID NO: 4685624 - DNA, 25 bp, Homo sapien
aatgtgtgaagtgacctaaatgccc

SEQ ID NO: 4685625 - DNA, 25 bp, Homo sapien
tgagtatgcccttctgacatgcagt

SEQ ID NO: 4685626 - DNA, 25 bp, Homo sapien
taaatgcccaccattaagggtatgg

SEQ ID NO: 4685627 - DNA, 25 bp, Homo sapien
aaaaaggcccatagcttatcaccgg

SEQ ID NO: 4685628 - DNA, 25 bp, Homo sapien
taagaggcacaaggttgaagtggct

SEQ ID NO: 4685629 - DNA, 25 bp, Homo sapien
tagactctgatcatttctgaggaga

SEQ ID NO: 4685630 - DNA, 25 bp, Homo sapien
tctaactcttccagagggaagtttc

SEQ ID NO: 4685631 - DNA, 25 bp, Homo sapien
ttctaaccaatagtcttgcatgcca

SEQ ID NO: 4685632 - DNA, 25 bp, Homo sapien
gggacccacctgatcaaggacacaa

SEQ ID NO: 4685633 - DNA, 25 bp, Homo sapien
gaatttcagagctatgacctacccc

SEQ ID NO: 4685634 - DNA, 25 bp, Homo sapien
cactgaagcatagcaactcctggta

SEQ ID NO: 4685635 - DNA, 25 bp, Homo sapien
tgcaggtgagagctaaaggataatc

SEQ ID NO: 4685636 - DNA, 25 bp, Homo sapien
taacatggcagatattacacagccc

SEQ ID NO: 4685637 - DNA, 25 bp, Homo sapien
aaatgccatccaggaaaaatgcacc

SEQ ID NO: 4685638 - DNA, 25 bp, Homo sapien
tttctttagatctagatggccagcc

SEQ ID NO: 4685639 - DNA, 25 bp, Homo sapien
tatctcagtgtcaagttaaaatgcc

SEQ ID NO: 4685640 - DNA, 25 bp, Homo sapien
gaccttacagcaatgaactctggga

SEQ ID NO: 4685641 - DNA, 25 bp, Homo sapien
aggatgaagtccagaccttacagca

SEQ ID NO: 4685642 - DNA, 25 bp, Homo sapien
tcaccactctcaggatgaagtccag

SEQ ID NO: 4685643 - DNA, 25 bp, Homo sapien
gaactctgggatcatcatgatctaa

SEQ ID NO: 4685644 - DNA, 25 bp, Homo sapien
ggtagagaacaatcgtttcaacgca

SEQ ID NO: 4685645 - DNA, 25 bp, Homo sapien
agataaaacaagcttccctttatgg

SEQ ID NO: 4685646 - DNA, 25 bp, Homo sapien
caacgcaaacatatctttagaatgg

SEQ ID NO: 4685647 - DNA, 25 bp, Homo sapien
tcaaattccattatcctgagacagc

SEQ ID NO: 4685648 - DNA, 25 bp, Homo sapien
caatacactaccttgcagagttgca

SEQ ID NO: 4685649 - DNA, 25 bp, Homo sapien
ggcattttcacaccatactgagcag

SEQ ID NO: 4685650 - DNA, 25 bp, Homo sapien
caaatttagatccagggtttacctg

SEQ ID NO: 4685651 - DNA, 25 bp, Homo sapien
taaggtaggtagctagacatatgca

SEQ ID NO: 4685652 - DNA, 25 bp, Homo sapien
catattgctacaagtagatctggcg

SEQ ID NO: 4685653 - DNA, 25 bp, Homo sapien
ttccctgattactaacaagcctgag

SEQ ID NO: 4685654 - DNA, 25 bp, Homo sapien
tcaagtaggtttctagtcatgcata

SEQ ID NO: 4685655 - DNA, 25 bp, Homo sapien
tgtcagcacttgattctgccaaata

SEQ ID NO: 4685656 - DNA, 25 bp, Homo sapien
tcatagcattcgtttatcattgtct

SEQ ID NO: 4685657 - DNA, 25 bp, Homo sapien
gtcccataccactgtgaaggtcaaa

SEQ ID NO: 4685658 - DNA, 25 bp, Homo sapien
aaatagtctctataactaaactgtg

SEQ ID NO: 4685659 - DNA, 25 bp, Homo sapien
gatcctattgtttctatatcatagc

SEQ ID NO: 4685660 - DNA, 25 bp, Homo sapien
agtaatgtaaccttggtgaggcaaa

SEQ ID NO: 4685661 - DNA, 25 bp, Homo sapien
gagatggagagacaaataagtaatg

SEQ ID NO: 4685662 - DNA, 25 bp, Homo sapien
tgaagatgcagccatcatctaccat

SEQ ID NO: 4685663 - DNA, 25 bp, Homo sapien
tgaggcaaacccgtgaagatgcagc

SEQ ID NO: 4685664 - DNA, 25 bp, Homo sapien
agatttccaacttgcctagactgca

SEQ ID NO: 4685665 - DNA, 25 bp, Homo sapien
tgcttcctgccagatttccaacttg

SEQ ID NO: 4685666 - DNA, 25 bp, Homo sapien
gaatcgcaattccaaggactgcttc

SEQ ID NO: 4685667 - DNA, 25 bp, Homo sapien
gcaaagttgggtcatgtcctgggaa

SEQ ID NO: 4685668 - DNA, 25 bp, Homo sapien
gacccaatactggtacacactgcca

SEQ ID NO: 4685669 - DNA, 25 bp, Homo sapien
tgtataatgccatcgccacagtacc

SEQ ID NO: 4685670 - DNA, 25 bp, Homo sapien
tccatggatgtatgtgacagcaggt

SEQ ID NO: 4685671 - DNA, 25 bp, Homo sapien
ggtgatggctcactctcttcagttc

SEQ ID NO: 4685672 - DNA, 25 bp, Homo sapien
tgtcgtcgcattgttcaccttggtc

SEQ ID NO: 4685673 - DNA, 25 bp, Homo sapien
cttcttgtcggcagaaaagggagca

SEQ ID NO: 4685674 - DNA, 25 bp, Homo sapien
cattgatcttattcatgtcgtcgca

SEQ ID NO: 4685675 - DNA, 25 bp, Homo sapien
caatacaattgaaggagacttcttg

SEQ ID NO: 4685676 - DNA, 25 bp, Homo sapien
ttcatgaaggccacaagaaatgaaa

SEQ ID NO: 4685677 - DNA, 25 bp, Homo sapien
tcccgatattgaaaacagtgcctgg

SEQ ID NO: 4685678 - DNA, 25 bp, Homo sapien
gaagttacccgtcattggcatcatc

SEQ ID NO: 4685679 - DNA, 25 bp, Homo sapien
taatacccatcctggacagttagtg

SEQ ID NO: 4685680 - DNA, 25 bp, Homo sapien
cacttttgacctgtataactctgga

SEQ ID NO: 4685681 - DNA, 25 bp, Homo sapien
ggaccttggtggttcctgcatcacg

SEQ ID NO: 4685682 - DNA, 25 bp, Homo sapien
gggaccttggtggttcctgcatcac

SEQ ID NO: 4685683 - DNA, 25 bp, Homo sapien
gaccttggtggttcctgcatcacgg

SEQ ID NO: 4685684 - DNA, 25 bp, Homo sapien
gactgcccaaggttctgagtctgca

SEQ ID NO: 4685685 - DNA, 25 bp, Homo sapien
taatgcactgcagatgcgaggatgc

SEQ ID NO: 4685686 - DNA, 25 bp, Homo sapien
tgtgttgctcaacccctactgggtg

SEQ ID NO: 4685687 - DNA, 25 bp, Homo sapien
gaatgtctaaatgcacccctgtaat

SEQ ID NO: 4685688 - DNA, 25 bp, Homo sapien
tactagggaccggaccatattcaaa

SEQ ID NO: 4685689 - DNA, 25 bp, Homo sapien
tctgctgggagtaaagattcactgt

SEQ ID NO: 4685690 - DNA, 25 bp, Homo sapien
cactgaggcttagccaaagttacac

SEQ ID NO: 4685691 - DNA, 25 bp, Homo sapien
aagtcatggtatgcctgatctcctg

SEQ ID NO: 4685692 - DNA, 25 bp, Homo sapien
ttcagctgttcctttcggaggaaga

SEQ ID NO: 4685693 - DNA, 25 bp, Homo sapien
ctggcaccttgggaatacttccgga

SEQ ID NO: 4685694 - DNA, 25 bp, Homo sapien
ggtgttgcataataacacactggca

SEQ ID NO: 4685695 - DNA, 25 bp, Homo sapien
gtccccagggtgttgcataataaca

SEQ ID NO: 4685696 - DNA, 25 bp, Homo sapien
cttgggaatacttccggatgtgtgg

SEQ ID NO: 4685697 - DNA, 25 bp, Homo sapien
tctaaagtctcatcggaacctccac

SEQ ID NO: 4685698 - DNA, 25 bp, Homo sapien
taactatatatcagcgtcaggcagg

SEQ ID NO: 4685699 - DNA, 25 bp, Homo sapien
caccaagaagacgtggcgattcatc

SEQ ID NO: 4685700 - DNA, 25 bp, Homo sapien
agggaatgcctccacgtctgggaaa

SEQ ID NO: 4685701 - DNA, 25 bp, Homo sapien
tgtggtccatacaagatttctgttg

SEQ ID NO: 4685702 - DNA, 25 bp, Homo sapien
gacacctggtctgtgcaagcatgca

SEQ ID NO: 4685703 - DNA, 25 bp, Homo sapien
tggaatgactcaactccacctttgt

SEQ ID NO: 4685704 - DNA, 25 bp, Homo sapien
taggatctgaggatatgacaggcca

SEQ ID NO: 4685705 - DNA, 25 bp, Homo sapien
gggtttgaaatgagctactgcagca

SEQ ID NO: 4685706 - DNA, 25 bp, Homo sapien
aatacagtcccttctactggtcagg

SEQ ID NO: 4685707 - DNA, 25 bp, Homo sapien
ggatcctggatgctgcctaaaccgt

SEQ ID NO: 4685708 - DNA, 25 bp, Homo sapien
tggtgttaacaatacctggtagcca

SEQ ID NO: 4685709 - DNA, 25 bp, Homo sapien
ttttggtgttcacagaggtcctggc

SEQ ID NO: 4685710 - DNA, 25 bp, Homo sapien
gagcctgaacttctcctcgtgtaaa

SEQ ID NO: 4685711 - DNA, 25 bp, Homo sapien
gcagaaatcgcccaaggatactgag

SEQ ID NO: 4685712 - DNA, 25 bp, Homo sapien
tatgcagtctatgcagttggccctc

SEQ ID NO: 4685713 - DNA, 25 bp, Homo sapien
taggctgttcagctcttgagagtac

SEQ ID NO: 4685714 - DNA, 25 bp, Homo sapien
taaattagtagttaagcctgagggc

SEQ ID NO: 4685715 - DNA, 25 bp, Homo sapien
cctgagggcttaagagccagagact

SEQ ID NO: 4685716 - DNA, 25 bp, Homo sapien
cagggctagaatcccttactgggaa

SEQ ID NO: 4685717 - DNA, 25 bp, Homo sapien
taaaagcctatgtgatgaatgaata

SEQ ID NO: 4685718 - DNA, 25 bp, Homo sapien
catgaacctggcacataagaggtgc

SEQ ID NO: 4685719 - DNA, 25 bp, Homo sapien
cactctctacttgtgagtaagaact

SEQ ID NO: 4685720 - DNA, 25 bp, Homo sapien
aacacaggcatccttggtgtctagc

SEQ ID NO: 4685721 - DNA, 25 bp, Homo sapien
ggaaccatgaatctgctaacaagct

SEQ ID NO: 4685722 - DNA, 25 bp, Homo sapien
tagtgagggctcctaaggaaccatg

SEQ ID NO: 4685723 - DNA, 25 bp, Homo sapien
gcttcgtgtcaaacccacattgctg

SEQ ID NO: 4685724 - DNA, 25 bp, Homo sapien
gagacctgaatctgaggagcttaag

SEQ ID NO: 4685725 - DNA, 25 bp, Homo sapien
cttctaagtaggtgtgacctatgca

SEQ ID NO: 4685726 - DNA, 25 bp, Homo sapien
caaggataacagaagcacaaagcta

SEQ ID NO: 4685727 - DNA, 25 bp, Homo sapien
agctagcagtaggatgccttctaag

SEQ ID NO: 4685728 - DNA, 25 bp, Homo sapien
gccttctaagtaggtgtgacctatg

SEQ ID NO: 4685729 - DNA, 25 bp, Homo sapien
tggaaatagcaccggctgggttcat

SEQ ID NO: 4685730 - DNA, 25 bp, Homo sapien
catggaaatagcaccggctgggttc

SEQ ID NO: 4685731 - DNA, 25 bp, Homo sapien
atggaaatagcaccggctgggttca

SEQ ID NO: 4685732 - DNA, 25 bp, Homo sapien
aatccctggggcgtgtagacaccac

SEQ ID NO: 4685733 - DNA, 25 bp, Homo sapien
tagacaccacagtccttaatgctgg

SEQ ID NO: 4685734 - DNA, 25 bp, Homo sapien
agatactgaagcattggatgcccac

SEQ ID NO: 4685735 - DNA, 25 bp, Homo sapien
tgcccactgatccaggaatccctgg

SEQ ID NO: 4685736 - DNA, 25 bp, Homo sapien
ctaagaactggatgctagtgttgaa

SEQ ID NO: 4685737 - DNA, 25 bp, Homo sapien
tgttctcttgctggccccagcactg

SEQ ID NO: 4685738 - DNA, 25 bp, Homo sapien
gcactgttgtttctgaagcaggaca

SEQ ID NO: 4685739 - DNA, 25 bp, Homo sapien
actggatgctagtgttgaatttgga

SEQ ID NO: 4685740 - DNA, 25 bp, Homo sapien
gattcccagaagagtaacttactca

SEQ ID NO: 4685741 - DNA, 25 bp, Homo sapien
tacccatcaagttaacaaacccagc

SEQ ID NO: 4685742 - DNA, 25 bp, Homo sapien
gacatgaacaagacagagaattaac

SEQ ID NO: 4685743 - DNA, 25 bp, Homo sapien
tactcaaggtttccatgtcagaatg

SEQ ID NO: 4685744 - DNA, 25 bp, Homo sapien
tgttctgtgtgggtccctagagcca

SEQ ID NO: 4685745 - DNA, 25 bp, Homo sapien
gcagcaaacgtttgctgacgcaact

SEQ ID NO: 4685746 - DNA, 25 bp, Homo sapien
ttctgtgtgggtccctagagccagc

SEQ ID NO: 4685747 - DNA, 25 bp, Homo sapien
cgtttgctgacgcaactgtgtttaa

SEQ ID NO: 4685748 - DNA, 25 bp, Homo sapien
tggctctcatcactactggctgagt

SEQ ID NO: 4685749 - DNA, 25 bp, Homo sapien
tgaaaacacccttctgatgacatgg

SEQ ID NO: 4685750 - DNA, 25 bp, Homo sapien
ctcactcttgggtctttggctacta

SEQ ID NO: 4685751 - DNA, 25 bp, Homo sapien
agctgatagcagtgtggtttcttcc

SEQ ID NO: 4685752 - DNA, 25 bp, Homo sapien
taatttttacatgcaagggttggca

SEQ ID NO: 4685753 - DNA, 25 bp, Homo sapien
cttgtgacaaaactgtaaattgagc

SEQ ID NO: 4685754 - DNA, 25 bp, Homo sapien
taaaagatgcaaaagacactagctc

SEQ ID NO: 4685755 - DNA, 25 bp, Homo sapien
gatcttagcagcaggcaaaaattgt

SEQ ID NO: 4685756 - DNA, 25 bp, Homo sapien
tccttccaccaccattggcaaaggc

SEQ ID NO: 4685757 - DNA, 25 bp, Homo sapien
tttcactaatgagaggagatgaatg

SEQ ID NO: 4685758 - DNA, 25 bp, Homo sapien
attggcaaaggctctctcatttcac

SEQ ID NO: 4685759 - DNA, 25 bp, Homo sapien
tcagcatgttcccttcgcctttcct

SEQ ID NO: 4685760 - DNA, 25 bp, Homo sapien
catggagaaccagtagatgcagccc

SEQ ID NO: 4685761 - DNA, 25 bp, Homo sapien
ggaatcttcctagatgggccatgga

SEQ ID NO: 4685762 - DNA, 25 bp, Homo sapien
aggatctcaccgttccacgtggcac

SEQ ID NO: 4685763 - DNA, 25 bp, Homo sapien
aatgaagactcgctattcaaagcag

SEQ ID NO: 4685764 - DNA, 25 bp, Homo sapien
gacaacttttttggactgccctggc

SEQ ID NO: 4685765 - DNA, 25 bp, Homo sapien
acaacttttttggactgccctggca

SEQ ID NO: 4685766 - DNA, 25 bp, Homo sapien
caacttttttggactgccctggcac

SEQ ID NO: 4685767 - DNA, 25 bp, Homo sapien
cagtcagttgcactgcagacatggg

SEQ ID NO: 4685768 - DNA, 25 bp, Homo sapien
gcagtatcttgccagtagaccagat

SEQ ID NO: 4685769 - DNA, 25 bp, Homo sapien
tagctccctggtgcatgtcagttta

SEQ ID NO: 4685770 - DNA, 25 bp, Homo sapien
gacatgggcattacccaggtggcat

SEQ ID NO: 4685771 - DNA, 25 bp, Homo sapien
cataggtggctagaggctactgaac

SEQ ID NO: 4685772 - DNA, 25 bp, Homo sapien
catgtgaagtactctagacctgctc

SEQ ID NO: 4685773 - DNA, 25 bp, Homo sapien
ttctactggacagatagtctggagc

SEQ ID NO: 4685774 - DNA, 25 bp, Homo sapien
agtttcatgaaccacattcctaggg

SEQ ID NO: 4685775 - DNA, 25 bp, Homo sapien
tctgagtattgtccacacagcaggt

SEQ ID NO: 4685776 - DNA, 25 bp, Homo sapien
ttttctgagtattgtccacacagca

SEQ ID NO: 4685777 - DNA, 25 bp, Homo sapien
tgagtattgtccacacagcaggtcc

SEQ ID NO: 4685778 - DNA, 25 bp, Homo sapien
cattttctgagtattgtccacacag

SEQ ID NO: 4685779 - DNA, 25 bp, Homo sapien
ttaacttcagtcaggatgaacactc

SEQ ID NO: 4685780 - DNA, 25 bp, Homo sapien
cagagctattgccagcagtagaaaa

SEQ ID NO: 4685781 - DNA, 25 bp, Homo sapien
cactcaactctagacaggagcacag

SEQ ID NO: 4685782 - DNA, 25 bp, Homo sapien
taaaaccagtgtagactctggatca

SEQ ID NO: 4685783 - DNA, 25 bp, Homo sapien
caataactcttggtccatacccttg

SEQ ID NO: 4685784 - DNA, 25 bp, Homo sapien
tcttggtccatacccttgaggtaat

SEQ ID NO: 4685785 - DNA, 25 bp, Homo sapien
ggtccatacccttgaggtaatacac

SEQ ID NO: 4685786 - DNA, 25 bp, Homo sapien
tacccttgaggtaatacacttgcat

SEQ ID NO: 4685787 - DNA, 25 bp, Homo sapien
gtggactccccctccatgatgctgg

SEQ ID NO: 4685788 - DNA, 25 bp, Homo sapien
cccacgcccaccaccgctgcattgc

SEQ ID NO: 4685789 - DNA, 25 bp, Homo sapien
atgttgtggactccccctccatgat

SEQ ID NO: 4685790 - DNA, 25 bp, Homo sapien
ctccatgatgctggagcccagaacc

SEQ ID NO: 4685791 - DNA, 25 bp, Homo sapien
cccctggtacagatttaatggtgtc

SEQ ID NO: 4685792 - DNA, 25 bp, Homo sapien
ttgacattcaatgttgatccactgg

SEQ ID NO: 4685793 - DNA, 25 bp, Homo sapien
tgtatttgactctttgaacccctgg

SEQ ID NO: 4685794 - DNA, 25 bp, Homo sapien
tgtctacattggcagaaaaccttct

SEQ ID NO: 4685795 - DNA, 25 bp, Homo sapien
ttccatccttccagtgatgccaagg

SEQ ID NO: 4685796 - DNA, 25 bp, Homo sapien
cactggctccggtgacattcccaat

SEQ ID NO: 4685797 - DNA, 25 bp, Homo sapien
cagtgatgccaaggttcttcccagc

SEQ ID NO: 4685798 - DNA, 25 bp, Homo sapien
taccccgtgcagagccatactgttt

SEQ ID NO: 4685799 - DNA, 25 bp, Homo sapien
gatatatcctcaacaagatcaaaca

SEQ ID NO: 4685800 - DNA, 25 bp, Homo sapien
gtgatatatcctcaacaagatcaaa

SEQ ID NO: 4685801 - DNA, 25 bp, Homo sapien
tgatatatcctcaacaagatcaaac

SEQ ID NO: 4685802 - DNA, 25 bp, Homo sapien
tggagagccctgaggatctcatatg

SEQ ID NO: 4685803 - DNA, 25 bp, Homo sapien
ctggagagccctgaggatctcatat

SEQ ID NO: 4685804 - DNA, 25 bp, Homo sapien
ttcactgagatctatcaccttggtt

SEQ ID NO: 4685805 - DNA, 25 bp, Homo sapien
ccagctgggaatatgggtagctgat

SEQ ID NO: 4685806 - DNA, 25 bp, Homo sapien
ctgatggtgcaagggtaccaggcat

SEQ ID NO: 4685807 - DNA, 25 bp, Homo sapien
gatctatcaccttggttcgacacac

SEQ ID NO: 4685808 - DNA, 25 bp, Homo sapien
gtcacatgtgcactcagtcatgtgg

SEQ ID NO: 4685809 - DNA, 25 bp, Homo sapien
tgaaattgtgaagacgtaggagggt

SEQ ID NO: 4685810 - DNA, 25 bp, Homo sapien
ttgtgaagacgtaggagggtcacat

SEQ ID NO: 4685811 - DNA, 25 bp, Homo sapien
gggtcacatgtgcactcagtcatgt

SEQ ID NO: 4685812 - DNA, 25 bp, Homo sapien
tcctgcttttggtccccataatatg

SEQ ID NO: 4685813 - DNA, 25 bp, Homo sapien
ataatatgtcccatccgtcaccagg

SEQ ID NO: 4685814 - DNA, 25 bp, Homo sapien
gcagctgcacgctgatggtctcctg

SEQ ID NO: 4685815 - DNA, 25 bp, Homo sapien
tctgatctttggtatcaagcagctg

SEQ ID NO: 4685816 - DNA, 25 bp, Homo sapien
tgtacaacggggaaatggctcttac

SEQ ID NO: 4685817 - DNA, 25 bp, Homo sapien
ggaaatggctcttactcagtctctc

SEQ ID NO: 4685818 - DNA, 25 bp, Homo sapien
caacggggaaatggctcttactcag

SEQ ID NO: 4685819 - DNA, 25 bp, Homo sapien
tgacatgtacaacggggaaatggct

SEQ ID NO: 4685820 - DNA, 25 bp, Homo sapien
taatcctaaccatgtcctggcgggc

SEQ ID NO: 4685821 - DNA, 25 bp, Homo sapien
cctgggctgtgcaacgacaactatg

SEQ ID NO: 4685822 - DNA, 25 bp, Homo sapien
tctgcagaatggtgtgggcacaact

SEQ ID NO: 4685823 - DNA, 25 bp, Homo sapien
tagggcccgatcttgtgctaggcat

SEQ ID NO: 4685824 - DNA, 25 bp, Homo sapien
gcagggctgtaggtctcccctctct

SEQ ID NO: 4685825 - DNA, 25 bp, Homo sapien
tcatggaccacagggataatcaggg

SEQ ID NO: 4685826 - DNA, 25 bp, Homo sapien
gggcgaactgaagctcacacgtacc

SEQ ID NO: 4685827 - DNA, 25 bp, Homo sapien
cacgtaccgcctggctgtggtagaa

SEQ ID NO: 4685828 - DNA, 25 bp, Homo sapien
gactcacggtgtaactgctgtgccc

SEQ ID NO: 4685829 - DNA, 25 bp, Homo sapien
taggtgatgcaagctcagtagcctg

SEQ ID NO: 4685830 - DNA, 25 bp, Homo sapien
ctggagagtgctggaacccggataa

SEQ ID NO: 4685831 - DNA, 25 bp, Homo sapien
ggattccagtcacacataacagagg

SEQ ID NO: 4685832 - DNA, 25 bp, Homo sapien
taccaatcagggaaatctgggctcc

SEQ ID NO: 4685833 - DNA, 25 bp, Homo sapien
tgatgcatgcagttaggccgttaaa

SEQ ID NO: 4685834 - DNA, 25 bp, Homo sapien
tctgcacgctcagaaggtacctggg

SEQ ID NO: 4685835 - DNA, 25 bp, Homo sapien
aacacctggcctatcgtatgcaccg

SEQ ID NO: 4685836 - DNA, 25 bp, Homo sapien
tcatgcaaatttccataggaagctt

SEQ ID NO: 4685837 - DNA, 25 bp, Homo sapien
gcaccctcatgggtattctaccctt

SEQ ID NO: 4685838 - DNA, 25 bp, Homo sapien
tccacccgttctttaggtctaagca

SEQ ID NO: 4685839 - DNA, 25 bp, Homo sapien
tctcttgtgtccctcggcaagcacc

SEQ ID NO: 4685840 - DNA, 25 bp, Homo sapien
caagttatggcaacagacaaaccag

SEQ ID NO: 4685841 - DNA, 25 bp, Homo sapien
tatagccacgagactcaactgaggt

SEQ ID NO: 4685842 - DNA, 25 bp, Homo sapien
tgctggctagggtgaagatgactct

SEQ ID NO: 4685843 - DNA, 25 bp, Homo sapien
aaaacgcatagcagaactcctggca

SEQ ID NO: 4685844 - DNA, 25 bp, Homo sapien
gaagaaggagtctcctcacaggaca

SEQ ID NO: 4685845 - DNA, 25 bp, Homo sapien
ctcagttggaagataaaggctaaga

SEQ ID NO: 4685846 - DNA, 25 bp, Homo sapien
caggacagctatgctcagttggaag

SEQ ID NO: 4685847 - DNA, 25 bp, Homo sapien
ggaagaaggagtctcctcacaggac

SEQ ID NO: 4685848 - DNA, 25 bp, Homo sapien
tagcctgtccggcagctcacagtac

SEQ ID NO: 4685849 - DNA, 25 bp, Homo sapien
tcatcccgccgtatctggagcacgt

SEQ ID NO: 4685850 - DNA, 25 bp, Homo sapien
ctggctcttgatcagctcatcatcc

SEQ ID NO: 4685851 - DNA, 25 bp, Homo sapien
ccagctctggacagtcagttttctc

SEQ ID NO: 4685852 - DNA, 25 bp, Homo sapien
ttcttagagattccagactgcttgc

SEQ ID NO: 4685853 - DNA, 25 bp, Homo sapien
gaacactactctgcacaggaaccct

SEQ ID NO: 4685854 - DNA, 25 bp, Homo sapien
gcagagaacatggttaacacccagt

SEQ ID NO: 4685855 - DNA, 25 bp, Homo sapien
gagggctcaccttgtcataaagcag

SEQ ID NO: 4685856 - DNA, 25 bp, Homo sapien
gaaggaacattgactgccaaaggtg

SEQ ID NO: 4685857 - DNA, 25 bp, Homo sapien
gatgctgcagtcgactggctcacag

SEQ ID NO: 4685858 - DNA, 25 bp, Homo sapien
caggtcactgtgacgctgggtcccg

SEQ ID NO: 4685859 - DNA, 25 bp, Homo sapien
cacttgccctctgtacaggtcactg

SEQ ID NO: 4685860 - DNA, 25 bp, Homo sapien
gactcagaaagaggtgacttgacca

SEQ ID NO: 4685861 - DNA, 25 bp, Homo sapien
cgtatgatcagcagggcccttatta

SEQ ID NO: 4685862 - DNA, 25 bp, Homo sapien
ggaagttggctactacgtatgatca

SEQ ID NO: 4685863 - DNA, 25 bp, Homo sapien
tattcattccggagccatcaaatct

SEQ ID NO: 4685864 - DNA, 25 bp, Homo sapien
attctctcggcaccgggcggtctgg

SEQ ID NO: 4685865 - DNA, 25 bp, Homo sapien
gcccaccttgtgcttattctctcgg

SEQ ID NO: 4685866 - DNA, 25 bp, Homo sapien
gtggagcgaggcacatgagctcaca

SEQ ID NO: 4685867 - DNA, 25 bp, Homo sapien
ccaggcacatggtatccaggcttgc

SEQ ID NO: 4685868 - DNA, 25 bp, Homo sapien
tacactcactgttgaactggaagcc

SEQ ID NO: 4685869 - DNA, 25 bp, Homo sapien
tgtcttcacacttgatcctacactc

SEQ ID NO: 4685870 - DNA, 25 bp, Homo sapien
actggtagagcccatggaattttgg

SEQ ID NO: 4685871 - DNA, 25 bp, Homo sapien
ggtacactgagtcttgaaggcccgt

SEQ ID NO: 4685872 - DNA, 25 bp, Homo sapien
ccttttgggcatgtgtaggatttga

SEQ ID NO: 4685873 - DNA, 25 bp, Homo sapien
cttgattcccgtaccatccttttgg

SEQ ID NO: 4685874 - DNA, 25 bp, Homo sapien
cacaggacttgggttatcaactctg

SEQ ID NO: 4685875 - DNA, 25 bp, Homo sapien
tgggttatcaactctgcatggttgc

SEQ ID NO: 4685876 - DNA, 25 bp, Homo sapien
ctgctgatgcatcttccaaagaccc

SEQ ID NO: 4685877 - DNA, 25 bp, Homo sapien
tgatgcatcttccaaagaccccgtc

SEQ ID NO: 4685878 - DNA, 25 bp, Homo sapien
caagactggccactccctgactcac

SEQ ID NO: 4685879 - DNA, 25 bp, Homo sapien
catcccaagactggccactccctga

SEQ ID NO: 4685880 - DNA, 25 bp, Homo sapien
catcattaggtgcatcactttgccc

SEQ ID NO: 4685881 - DNA, 25 bp, Homo sapien
ggtgcatcactttgcccacaaagca

SEQ ID NO: 4685882 - DNA, 25 bp, Homo sapien
cattaggtgcatcactttgcccaca

SEQ ID NO: 4685883 - DNA, 25 bp, Homo sapien
tgaaatccatcattaggtgcatcac

SEQ ID NO: 4685884 - DNA, 25 bp, Homo sapien
atggcagggctcacaaatggagagt

SEQ ID NO: 4685885 - DNA, 25 bp, Homo sapien
tacaccccttatggcagaaaggctt

SEQ ID NO: 4685886 - DNA, 25 bp, Homo sapien
gggctcacaaatggagagtgcagct

SEQ ID NO: 4685887 - DNA, 25 bp, Homo sapien
gagtgcagctctacaccccttatgg

SEQ ID NO: 4685888 - DNA, 25 bp, Homo sapien
agtcaattattgctgactgagtctg

SEQ ID NO: 4685889 - DNA, 25 bp, Homo sapien
tattgctgactgagtctggtttgac

SEQ ID NO: 4685890 - DNA, 25 bp, Homo sapien
gcagaaattcatagtcaattattgc

SEQ ID NO: 4685891 - DNA, 25 bp, Homo sapien
actgagtctggtttgaccagagaag

SEQ ID NO: 4685892 - DNA, 25 bp, Homo sapien
tgctgttgagctcgtttggaaccga

SEQ ID NO: 4685893 - DNA, 25 bp, Homo sapien
agcactggccttgcatctcctggca

SEQ ID NO: 4685894 - DNA, 25 bp, Homo sapien
tccaggtgccatctttccggcaatg

SEQ ID NO: 4685895 - DNA, 25 bp, Homo sapien
tcagggcactgcagtttgaggttgc

SEQ ID NO: 4685896 - DNA, 25 bp, Homo sapien
actgctcccctctcgggcccatcat

SEQ ID NO: 4685897 - DNA, 25 bp, Homo sapien
ctactgctcccctctcgggcccatc

SEQ ID NO: 4685898 - DNA, 25 bp, Homo sapien
tgctcccctctcgggcccatcatac

SEQ ID NO: 4685899 - DNA, 25 bp, Homo sapien
ctgctcccctctcgggcccatcata

SEQ ID NO: 4685900 - DNA, 25 bp, Homo sapien
tagtgcctacgcaggaactcatgtg

SEQ ID NO: 4685901 - DNA, 25 bp, Homo sapien
gcaatagcatttcttccccgacaag

SEQ ID NO: 4685902 - DNA, 25 bp, Homo sapien
gcattagccctgcattgctggaagg

SEQ ID NO: 4685903 - DNA, 25 bp, Homo sapien
tggccagggtgttcaatgacccacc

SEQ ID NO: 4685904 - DNA, 25 bp, Homo sapien
gaagatcatgttggctctatgcaca

SEQ ID NO: 4685905 - DNA, 25 bp, Homo sapien
catgcagtgataactctctgtttgc

SEQ ID NO: 4685906 - DNA, 25 bp, Homo sapien
ttcagataaccttctacaccagaca

SEQ ID NO: 4685907 - DNA, 25 bp, Homo sapien
tgcttctggacatgcagtgataact

SEQ ID NO: 4685908 - DNA, 25 bp, Homo sapien
tgccacagaagcctccccaggtggc

SEQ ID NO: 4685909 - DNA, 25 bp, Homo sapien
aactgccacagaagcctccccaggt

SEQ ID NO: 4685910 - DNA, 25 bp, Homo sapien
ctgccacagaagcctccccaggtgg

SEQ ID NO: 4685911 - DNA, 25 bp, Homo sapien
actgccacagaagcctccccaggtg

SEQ ID NO: 4685912 - DNA, 25 bp, Homo sapien
cagcagcaactttctgagggctcat

SEQ ID NO: 4685913 - DNA, 25 bp, Homo sapien
caggcctccgcgtctccttcccggg

SEQ ID NO: 4685914 - DNA, 25 bp, Homo sapien
tccgcgtctccttcccgggaggcgc

SEQ ID NO: 4685915 - DNA, 25 bp, Homo sapien
cagcagcagcaactttctgagggct

SEQ ID NO: 4685916 - DNA, 25 bp, Homo sapien
ttcattggcaggatgatggactcgc

SEQ ID NO: 4685917 - DNA, 25 bp, Homo sapien
gggatgtcacgcacggtcacgttca

SEQ ID NO: 4685918 - DNA, 25 bp, Homo sapien
tgatggactcgctgttgtggtccag

SEQ ID NO: 4685919 - DNA, 25 bp, Homo sapien
ctctacccgtgtggggttcagccag

SEQ ID NO: 4685920 - DNA, 25 bp, Homo sapien
agaatgaactcagaaccgggacata

SEQ ID NO: 4685921 - DNA, 25 bp, Homo sapien
atatcatttccctcccccttagctg

SEQ ID NO: 4685922 - DNA, 25 bp, Homo sapien
tgggtagatgtccctggtcactcac

SEQ ID NO: 4685923 - DNA, 25 bp, Homo sapien
ttagctgcaggtgggtagatgtccc

SEQ ID NO: 4685924 - DNA, 25 bp, Homo sapien
cttggtgctggagaaattgcctggc

SEQ ID NO: 4685925 - DNA, 25 bp, Homo sapien
ggacaggtccacatcctaatatgag

SEQ ID NO: 4685926 - DNA, 25 bp, Homo sapien
aaccaattcgtagtgatagggacca

SEQ ID NO: 4685927 - DNA, 25 bp, Homo sapien
tttccatagtttgccatagtcccca

SEQ ID NO: 4685928 - DNA, 25 bp, Homo sapien
catctaaaagatgaaggcccaagaa

SEQ ID NO: 4685929 - DNA, 25 bp, Homo sapien
tgttatcagccactgagtttctggc

SEQ ID NO: 4685930 - DNA, 25 bp, Homo sapien
gaacgaatgtatgagcgtgtccata

SEQ ID NO: 4685931 - DNA, 25 bp, Homo sapien
tctgggacctgctatgagtgaatca

SEQ ID NO: 4685932 - DNA, 25 bp, Homo sapien
ataacaggagccacaagattaaaat

SEQ ID NO: 4685933 - DNA, 25 bp, Homo sapien
gcttttacatggagaacttgcccgg

SEQ ID NO: 4685934 - DNA, 25 bp, Homo sapien
gttcaccgcatgtgtcatggttctg

SEQ ID NO: 4685935 - DNA, 25 bp, Homo sapien
ttgcccgggtacttgcaataacagg

SEQ ID NO: 4685936 - DNA, 25 bp, Homo sapien
tcttctgggaccttccaattcctga

SEQ ID NO: 4685937 - DNA, 25 bp, Homo sapien
ctcttctgggaccttccaattcctg

SEQ ID NO: 4685938 - DNA, 25 bp, Homo sapien
cttctgggaccttccaattcctgac

SEQ ID NO: 4685939 - DNA, 25 bp, Homo sapien
agcctttgacacagtgaatcagagc

SEQ ID NO: 4685940 - DNA, 25 bp, Homo sapien
ctcacagcctttgacacagtgaatc

SEQ ID NO: 4685941 - DNA, 25 bp, Homo sapien
cacagcctttgacacagtgaatcag

SEQ ID NO: 4685942 - DNA, 25 bp, Homo sapien
cagcctttgacacagtgaatcagag

SEQ ID NO: 4685943 - DNA, 25 bp, Homo sapien
agagatttggccatccacctggaag

SEQ ID NO: 4685944 - DNA, 25 bp, Homo sapien
catccacctggaagggatttggggc

SEQ ID NO: 4685945 - DNA, 25 bp, Homo sapien
agtgggctctggatgaaccacagag

SEQ ID NO: 4685946 - DNA, 25 bp, Homo sapien
cacctggaagggatttggggccgct

SEQ ID NO: 4685947 - DNA, 25 bp, Homo sapien
cagaccgccaactcagcagaatgag

SEQ ID NO: 4685948 - DNA, 25 bp, Homo sapien
aagacagaagtaagcaacagccaca

SEQ ID NO: 4685949 - DNA, 25 bp, Homo sapien
gtgcccaggtaactcaagctttctt

SEQ ID NO: 4685950 - DNA, 25 bp, Homo sapien
acactggttgcccagaccgccaact

SEQ ID NO: 4685951 - DNA, 25 bp, Homo sapien
tgcagcaatccccaccgtcatagtt

SEQ ID NO: 4685952 - DNA, 25 bp, Homo sapien
gcaatccccaccgtcatagttgcaa

SEQ ID NO: 4685953 - DNA, 25 bp, Homo sapien
gaggtgcagcaatccccaccgtcat

SEQ ID NO: 4685954 - DNA, 25 bp, Homo sapien
aatccccaccgtcatagttgcaaaa

SEQ ID NO: 4685955 - DNA, 25 bp, Homo sapien
ggatgcccacgggaaactcctctct

SEQ ID NO: 4685956 - DNA, 25 bp, Homo sapien
atgcccacgggaaactcctctctgg

SEQ ID NO: 4685957 - DNA, 25 bp, Homo sapien
tgcccacgggaaactcctctctggg

SEQ ID NO: 4685958 - DNA, 25 bp, Homo sapien
gtggatgcccacgggaaactcctct

SEQ ID NO: 4685959 - DNA, 25 bp, Homo sapien
acctaaacaggtccagcaggtaagg

SEQ ID NO: 4685960 - DNA, 25 bp, Homo sapien
taaacaggtccagcaggtaagggca

SEQ ID NO: 4685961 - DNA, 25 bp, Homo sapien
aggtaagggcagaggcatgaaagga

SEQ ID NO: 4685962 - DNA, 25 bp, Homo sapien
gtgggacctaaacaggtccagcagg

SEQ ID NO: 4685963 - DNA, 25 bp, Homo sapien
tttctctgagcgctagcctgggtgt

SEQ ID NO: 4685964 - DNA, 25 bp, Homo sapien
tagcctgggtgtgtaagggaaggga

SEQ ID NO: 4685965 - DNA, 25 bp, Homo sapien
gattgtctcttgatatgggactggg

SEQ ID NO: 4685966 - DNA, 25 bp, Homo sapien
tgtgtaagggaagggattgtctctt

SEQ ID NO: 4685967 - DNA, 25 bp, Homo sapien
gagtttcctgcaccgtcttgctctt

SEQ ID NO: 4685968 - DNA, 25 bp, Homo sapien
ttggacacccctgtcagacagagtt

SEQ ID NO: 4685969 - DNA, 25 bp, Homo sapien
agacagagtttcctgcaccgtcttg

SEQ ID NO: 4685970 - DNA, 25 bp, Homo sapien
tgtctgggtgggaaattggacaccc

SEQ ID NO: 4685971 - DNA, 25 bp, Homo sapien
taaactgacatcctgagaggctgag

SEQ ID NO: 4685972 - DNA, 25 bp, Homo sapien
gaaaccactggagcaaccattctgg

SEQ ID NO: 4685973 - DNA, 25 bp, Homo sapien
aaaccactggagcaaccattctgga

SEQ ID NO: 4685974 - DNA, 25 bp, Homo sapien
ataataaactgacatcctgagaggc

SEQ ID NO: 4685975 - DNA, 25 bp, Homo sapien
ttagccatggctgtatccccggagg

SEQ ID NO: 4685976 - DNA, 25 bp, Homo sapien
aggtctttccggctgtgttcttggg

SEQ ID NO: 4685977 - DNA, 25 bp, Homo sapien
ggtcccgacaagcacagtcaccttg

SEQ ID NO: 4685978 - DNA, 25 bp, Homo sapien
ctgggggtcccgacaagcacagtca

SEQ ID NO: 4685979 - DNA, 25 bp, Homo sapien
gaggccattccgttgagcagctgac

SEQ ID NO: 4685980 - DNA, 25 bp, Homo sapien
cagatgggcacactctagatataga

SEQ ID NO: 4685981 - DNA, 25 bp, Homo sapien
cagaccggttgggtgctaaggatcc

SEQ ID NO: 4685982 - DNA, 25 bp, Homo sapien
cctggcgttgggaattctttgacaa

SEQ ID NO: 4685983 - DNA, 25 bp, Homo sapien
aatagggcttagaggactgtccacc

SEQ ID NO: 4685984 - DNA, 25 bp, Homo sapien
aagtagcagcaaatgtggtcccaag

SEQ ID NO: 4685985 - DNA, 25 bp, Homo sapien
cagcaaggttctcaggatcaaagcc

SEQ ID NO: 4685986 - DNA, 25 bp, Homo sapien
taattcaaagggagtggacaggtcc

SEQ ID NO: 4685987 - DNA, 25 bp, Homo sapien
ttcacacaggtaagacctataacaa

SEQ ID NO: 4685988 - DNA, 25 bp, Homo sapien
ctcacttgaagtagttccagaaaaa

SEQ ID NO: 4685989 - DNA, 25 bp, Homo sapien
tcaaaactgttaacttgaccttata

SEQ ID NO: 4685990 - DNA, 25 bp, Homo sapien
ttattttctcacttgaagtagttcc

SEQ ID NO: 4685991 - DNA, 25 bp, Homo sapien
tgtcttctattatctctatctgtac

SEQ ID NO: 4685992 - DNA, 25 bp, Homo sapien
taatctctttgtcttctattatctc

SEQ ID NO: 4685993 - DNA, 25 bp, Homo sapien
ctattatctctatctgtacagcttt

SEQ ID NO: 4685994 - DNA, 25 bp, Homo sapien
ttctattatctctatctgtacagct

SEQ ID NO: 4685995 - DNA, 25 bp, Homo sapien
gtttctcaaaactcactcagtggga

SEQ ID NO: 4685996 - DNA, 25 bp, Homo sapien
tatgtttgtgtctacctactgaggc

SEQ ID NO: 4685997 - DNA, 25 bp, Homo sapien
acaatatgtccccttaatagctgga

SEQ ID NO: 4685998 - DNA, 25 bp, Homo sapien
gattacctgtctgtcatgtagcagc

SEQ ID NO: 4685999 - DNA, 25 bp, Homo sapien
gaaactgatgcaaatgtagaggcaa

SEQ ID NO: 4686000 - DNA, 25 bp, Homo sapien
tgttcaagatcactgagcaaactgc

SEQ ID NO: 4686001 - DNA, 25 bp, Homo sapien
aaaattctaacttctgtacaacagg

SEQ ID NO: 4686002 - DNA, 25 bp, Homo sapien
tgctgcctggagtcaaaaattctaa

SEQ ID NO: 4686003 - DNA, 25 bp, Homo sapien
tgtctttctaaaaggccgatgggcc

SEQ ID NO: 4686004 - DNA, 25 bp, Homo sapien
tgaaatatcaaacaagcactccctg

SEQ ID NO: 4686005 - DNA, 25 bp, Homo sapien
taacccatggactttgtgtcaagcg

SEQ ID NO: 4686006 - DNA, 25 bp, Homo sapien
ggagctccggctttattccttgaaa

SEQ ID NO: 4686007 - DNA, 25 bp, Homo sapien
tatgtacaactatatatacatgtgc

SEQ ID NO: 4686008 - DNA, 25 bp, Homo sapien
acaactatatatacatgtgcatata

SEQ ID NO: 4686009 - DNA, 25 bp, Homo sapien
tgtacaactatatatacatgtgcat

SEQ ID NO: 4686010 - DNA, 25 bp, Homo sapien
gtacaactatatatacatgtgcata

SEQ ID NO: 4686011 - DNA, 25 bp, Homo sapien
tttacaataggccagaagaattctt

SEQ ID NO: 4686012 - DNA, 25 bp, Homo sapien
tacattttctctagacgagatcaca

SEQ ID NO: 4686013 - DNA, 25 bp, Homo sapien
gcttccagaaggtgccaaacaggtt

SEQ ID NO: 4686014 - DNA, 25 bp, Homo sapien
cagcaaatttatgcgcgtgaggtac

SEQ ID NO: 4686015 - DNA, 25 bp, Homo sapien
tattatttgtgagatccaacctgta

SEQ ID NO: 4686016 - DNA, 25 bp, Homo sapien
ttaacttagatccataaaaacacat

SEQ ID NO: 4686017 - DNA, 25 bp, Homo sapien
ccaacctgtaattgagatcagagaa

SEQ ID NO: 4686018 - DNA, 25 bp, Homo sapien
tgtctgagtatttaaaactgtatag

SEQ ID NO: 4686019 - DNA, 25 bp, Homo sapien
agcgtacaagctattatatattttc

SEQ ID NO: 4686020 - DNA, 25 bp, Homo sapien
gcgtacaagctattatatattttca

SEQ ID NO: 4686021 - DNA, 25 bp, Homo sapien
gaagcgtacaagctattatatattt

SEQ ID NO: 4686022 - DNA, 25 bp, Homo sapien
cgtacaagctattatatattttcat

SEQ ID NO: 4686023 - DNA, 25 bp, Homo sapien
cattattgagtttgtgggaccctgc

SEQ ID NO: 4686024 - DNA, 25 bp, Homo sapien
ttcaggtggagaccaagcggccttt

SEQ ID NO: 4686025 - DNA, 25 bp, Homo sapien
cagttttgacctgacccctagagga

SEQ ID NO: 4686026 - DNA, 25 bp, Homo sapien
tatggatggctgtcaatcccgaggc

SEQ ID NO: 4686027 - DNA, 25 bp, Homo sapien
aaataacactttatggtagatacag

SEQ ID NO: 4686028 - DNA, 25 bp, Homo sapien
gaaatctttcaataactctcccact

SEQ ID NO: 4686029 - DNA, 25 bp, Homo sapien
gtggtaaagcacttcactcagtatc

SEQ ID NO: 4686030 - DNA, 25 bp, Homo sapien
actcagtatcacacagagtgagtgg

SEQ ID NO: 4686031 - DNA, 25 bp, Homo sapien
atcagtgagtggttgatgggaagaa

SEQ ID NO: 4686032 - DNA, 25 bp, Homo sapien
ttatcagtgagtggttgatgggaag

SEQ ID NO: 4686033 - DNA, 25 bp, Homo sapien
tatcagtgagtggttgatgggaaga

SEQ ID NO: 4686034 - DNA, 25 bp, Homo sapien
agttgggttgaagaggcaccttctt

SEQ ID NO: 4686035 - DNA, 25 bp, Homo sapien
tcatatagtctgcaacagttgggtt

SEQ ID NO: 4686036 - DNA, 25 bp, Homo sapien
ctgagcctcttcatatagtctgcaa

SEQ ID NO: 4686037 - DNA, 25 bp, Homo sapien
tagtctgcaacagttgggttgaaga

SEQ ID NO: 4686038 - DNA, 25 bp, Homo sapien
gcaaagggagccggttggtggctgg

SEQ ID NO: 4686039 - DNA, 25 bp, Homo sapien
ggcaaagggagccggttggtggctg

SEQ ID NO: 4686040 - DNA, 25 bp, Homo sapien
caaagggagccggttggtggctggg

SEQ ID NO: 4686041 - DNA, 25 bp, Homo sapien
agggagccggttggtggctggggct

SEQ ID NO: 4686042 - DNA, 25 bp, Homo sapien
gccagttgctcccattctggtaact

SEQ ID NO: 4686043 - DNA, 25 bp, Homo sapien
tgtccagtcgaccagaaaggcttat

SEQ ID NO: 4686044 - DNA, 25 bp, Homo sapien
ccattctggtaactcaaggtttcta

SEQ ID NO: 4686045 - DNA, 25 bp, Homo sapien
tctaaggctgatgtgtccagtcgac

SEQ ID NO: 4686046 - DNA, 25 bp, Homo sapien
gcaataaaccctgctttgtcttgct

SEQ ID NO: 4686047 - DNA, 25 bp, Homo sapien
ggttatttgtgcaatacgctttgca

SEQ ID NO: 4686048 - DNA, 25 bp, Homo sapien
tttcaaggttatttgtgcaatacgc

SEQ ID NO: 4686049 - DNA, 25 bp, Homo sapien
gctttgtcttgctttcaaggttatt

SEQ ID NO: 4686050 - DNA, 25 bp, Homo sapien
tatgcgtccttgattcaaaagcccg

SEQ ID NO: 4686051 - DNA, 25 bp, Homo sapien
tatcactcttccactatgcgtcctt

SEQ ID NO: 4686052 - DNA, 25 bp, Homo sapien
gaccagcagttgattaagtaccagc

SEQ ID NO: 4686053 - DNA, 25 bp, Homo sapien
aaggtgaatgcagcataaggagccc

SEQ ID NO: 4686054 - DNA, 25 bp, Homo sapien
tgcatatcatgctccagggaccgtg

SEQ ID NO: 4686055 - DNA, 25 bp, Homo sapien
caggggaaccctccgctgcaagtct

SEQ ID NO: 4686056 - DNA, 25 bp, Homo sapien
acaccaaggaagagccactagccca

SEQ ID NO: 4686057 - DNA, 25 bp, Homo sapien
ctgacactgcatatcatgctccagg

SEQ ID NO: 4686058 - DNA, 25 bp, Homo sapien
tgcgctggagggctaagccttgaat

SEQ ID NO: 4686059 - DNA, 25 bp, Homo sapien
ccttgaatactgagcagaggagctg

SEQ ID NO: 4686060 - DNA, 25 bp, Homo sapien
gacagtgaggctcctaaaacctgct

SEQ ID NO: 4686061 - DNA, 25 bp, Homo sapien
gacagggcacagactgctcatgtga

SEQ ID NO: 4686062 - DNA, 25 bp, Homo sapien
catgccaaaaatcagcacagaattt

SEQ ID NO: 4686063 - DNA, 25 bp, Homo sapien
cagaatttactggaaacagcatgaa

SEQ ID NO: 4686064 - DNA, 25 bp, Homo sapien
aatcagcacagaatttactggaaac

SEQ ID NO: 4686065 - DNA, 25 bp, Homo sapien
ttcttcatgccaaaaatcagcacag

SEQ ID NO: 4686066 - DNA, 25 bp, Homo sapien
ttgccccagacccgccctcacctcc

SEQ ID NO: 4686067 - DNA, 25 bp, Homo sapien
agcagccaggcctgattcctggggt

SEQ ID NO: 4686068 - DNA, 25 bp, Homo sapien
ggtgggggatgcattcccacacatt

SEQ ID NO: 4686069 - DNA, 25 bp, Homo sapien
ctgccaaagggtcctcagcaagcat

SEQ ID NO: 4686070 - DNA, 25 bp, Homo sapien
ggaggaactggtccttatcaggcaa

SEQ ID NO: 4686071 - DNA, 25 bp, Homo sapien
cctgactcttctcagtcgctggtta

SEQ ID NO: 4686072 - DNA, 25 bp, Homo sapien
tatctttggaaggaacgaccatcca

SEQ ID NO: 4686073 - DNA, 25 bp, Homo sapien
tctcagtcgctggttatcagtgtct

SEQ ID NO: 4686074 - DNA, 25 bp, Homo sapien
cccatcctggcgatgtcagatgcag

SEQ ID NO: 4686075 - DNA, 25 bp, Homo sapien
gggcccccatcctggcgatgtcaga

SEQ ID NO: 4686076 - DNA, 25 bp, Homo sapien
atgtcagatgcagtcgcacaggttt

SEQ ID NO: 4686077 - DNA, 25 bp, Homo sapien
tgtcagatgcagtcgcacaggtttt

SEQ ID NO: 4686078 - DNA, 25 bp, Homo sapien
tattcattcctatcagatgagctac

SEQ ID NO: 4686079 - DNA, 25 bp, Homo sapien
gaggcattgttgtatagtgggttca

SEQ ID NO: 4686080 - DNA, 25 bp, Homo sapien
caggcagcctaagcatcaactagga

SEQ ID NO: 4686081 - DNA, 25 bp, Homo sapien
gggttcaacacttaatttggattca

SEQ ID NO: 4686082 - DNA, 25 bp, Homo sapien
tgagattcagagaggattaagaagt

SEQ ID NO: 4686083 - DNA, 25 bp, Homo sapien
ttcagagaggattaagaagtgaaac

SEQ ID NO: 4686084 - DNA, 25 bp, Homo sapien
gattcagagaggattaagaagtgaa

SEQ ID NO: 4686085 - DNA, 25 bp, Homo sapien
tcagagaggattaagaagtgaaact

SEQ ID NO: 4686086 - DNA, 25 bp, Homo sapien
tgaacacattttgaccacaggcccg

SEQ ID NO: 4686087 - DNA, 25 bp, Homo sapien
gagaattcatccagaggccaaagct

SEQ ID NO: 4686088 - DNA, 25 bp, Homo sapien
tgggacgattgctcgccaaggagaa

SEQ ID NO: 4686089 - DNA, 25 bp, Homo sapien
cagttgtctgccgtggtgaacacat

SEQ ID NO: 4686090 - DNA, 25 bp, Homo sapien
gttggatggaacttagcagcagcca

SEQ ID NO: 4686091 - DNA, 25 bp, Homo sapien
tccctgggtaagctctctttgagat

SEQ ID NO: 4686092 - DNA, 25 bp, Homo sapien
ttggatggaacttagcagcagccat

SEQ ID NO: 4686093 - DNA, 25 bp, Homo sapien
cctgtccctgggtaagctctctttg

SEQ ID NO: 4686094 - DNA, 25 bp, Homo sapien
tctgtggatgaggacgacttttcaa

SEQ ID NO: 4686095 - DNA, 25 bp, Homo sapien
tggatgaggacgacttttcaaaaga

SEQ ID NO: 4686096 - DNA, 25 bp, Homo sapien
tggggccagcgggtttgtcagtgag

SEQ ID NO: 4686097 - DNA, 25 bp, Homo sapien
tgtcacaagtagttctggggccagc

SEQ ID NO: 4686098 - DNA, 25 bp, Homo sapien
caaccaaggtctatttagatgctag

SEQ ID NO: 4686099 - DNA, 25 bp, Homo sapien
tatttagatgctagaattgtgtttc

SEQ ID NO: 4686100 - DNA, 25 bp, Homo sapien
ccaaggtctatttagatgctagaat

SEQ ID NO: 4686101 - DNA, 25 bp, Homo sapien
ttagatgctagaattgtgtttcatc

SEQ ID NO: 4686102 - DNA, 25 bp, Homo sapien
gaagagtccatatgacaataatcat

SEQ ID NO: 4686103 - DNA, 25 bp, Homo sapien
aaaatgaagagtccatatgacaata

SEQ ID NO: 4686104 - DNA, 25 bp, Homo sapien
aatgaagagtccatatgacaataat

SEQ ID NO: 4686105 - DNA, 25 bp, Homo sapien
ctttagtgtaaaatgaagagtccat

SEQ ID NO: 4686106 - DNA, 25 bp, Homo sapien
tcttctcctataactgcagtcaggg

SEQ ID NO: 4686107 - DNA, 25 bp, Homo sapien
tcttcccgaggcactctcatcttta

SEQ ID NO: 4686108 - DNA, 25 bp, Homo sapien
agaagtgaagtctgggccttgagtc

SEQ ID NO: 4686109 - DNA, 25 bp, Homo sapien
tcagggaagctgcaacactgttcac

SEQ ID NO: 4686110 - DNA, 25 bp, Homo sapien
gatggtacaggtgtatgctccataa

SEQ ID NO: 4686111 - DNA, 25 bp, Homo sapien
tgcattttgatatgatggtacaggt

SEQ ID NO: 4686112 - DNA, 25 bp, Homo sapien
ccaagaggcaatagctgtgttgcat

SEQ ID NO: 4686113 - DNA, 25 bp, Homo sapien
cattctattataatgttccaagagg

SEQ ID NO: 4686114 - DNA, 25 bp, Homo sapien
tgagtttgactctccactactttta

SEQ ID NO: 4686115 - DNA, 25 bp, Homo sapien
ctgtaaattgatgcttgtcttgcca

SEQ ID NO: 4686116 - DNA, 25 bp, Homo sapien
tacttttatgtcaggccatgtgact

SEQ ID NO: 4686117 - DNA, 25 bp, Homo sapien
tcctcctctgtaaattgatgcttgt

SEQ ID NO: 4686118 - DNA, 25 bp, Homo sapien
caggcactgcgataagttctttaac

SEQ ID NO: 4686119 - DNA, 25 bp, Homo sapien
tgtataactgatacaggttcttcac

SEQ ID NO: 4686120 - DNA, 25 bp, Homo sapien
tgaagtccaccaccgcaggtacata

SEQ ID NO: 4686121 - DNA, 25 bp, Homo sapien
gttctttaactttctgtataactga

SEQ ID NO: 4686122 - DNA, 25 bp, Homo sapien
agttgggagtgtatgcctcccgcag

SEQ ID NO: 4686123 - DNA, 25 bp, Homo sapien
tgagttgggagtgtatgcctcccgc

SEQ ID NO: 4686124 - DNA, 25 bp, Homo sapien
gggtgagttgggagtgtatgcctcc

SEQ ID NO: 4686125 - DNA, 25 bp, Homo sapien
ttgggagtgtatgcctcccgcagct

SEQ ID NO: 4686126 - DNA, 25 bp, Homo sapien
ctgaggacgcaggtttgctgctttt

SEQ ID NO: 4686127 - DNA, 25 bp, Homo sapien
gaggacgcaggtttgctgcttttct

SEQ ID NO: 4686128 - DNA, 25 bp, Homo sapien
tgaggacgcaggtttgctgcttttc

SEQ ID NO: 4686129 - DNA, 25 bp, Homo sapien
aggacgcaggtttgctgcttttctc

SEQ ID NO: 4686130 - DNA, 25 bp, Homo sapien
tcgctcctggctccggcttagaaaa

SEQ ID NO: 4686131 - DNA, 25 bp, Homo sapien
ggctccggcttagaaaacagagtgc

SEQ ID NO: 4686132 - DNA, 25 bp, Homo sapien
cctggctccggcttagaaaacagag

SEQ ID NO: 4686133 - DNA, 25 bp, Homo sapien
gggaatcgctcctggctccggctta

SEQ ID NO: 4686134 - DNA, 25 bp, Homo sapien
gaaaccaactgattgttttcaccaa

SEQ ID NO: 4686135 - DNA, 25 bp, Homo sapien
aaaccaactgattgttttcaccaag

SEQ ID NO: 4686136 - DNA, 25 bp, Homo sapien
aaccaactgattgttttcaccaagg

SEQ ID NO: 4686137 - DNA, 25 bp, Homo sapien
aaggaagcaaagtcttcatggatgc

SEQ ID NO: 4686138 - DNA, 25 bp, Homo sapien
ggaagcaaagtcttcatggatgcct

SEQ ID NO: 4686139 - DNA, 25 bp, Homo sapien
ctagaagaaggaagcaaagtcttca

SEQ ID NO: 4686140 - DNA, 25 bp, Homo sapien
agaaggaagcaaagtcttcatggat

SEQ ID NO: 4686141 - DNA, 25 bp, Homo sapien
gctgtgtgccaactttggtctctgt

SEQ ID NO: 4686142 - DNA, 25 bp, Homo sapien
tgctgtgtgccaactttggtctctg

SEQ ID NO: 4686143 - DNA, 25 bp, Homo sapien
agtgctgtgtgccaactttggtctc

SEQ ID NO: 4686144 - DNA, 25 bp, Homo sapien
ctgtgtgccaactttggtctctgtg

SEQ ID NO: 4686145 - DNA, 25 bp, Homo sapien
ggaggagattttgcctaagcctaac

SEQ ID NO: 4686146 - DNA, 25 bp, Homo sapien
aggttgtgcacgtccactgactgtg

SEQ ID NO: 4686147 - DNA, 25 bp, Homo sapien
tgtgcccatgcagcttagatcagag

SEQ ID NO: 4686148 - DNA, 25 bp, Homo sapien
ttttaccccagaacacatagcagag

SEQ ID NO: 4686149 - DNA, 25 bp, Homo sapien
acactgtcctggacacatcgtttct

SEQ ID NO: 4686150 - DNA, 25 bp, Homo sapien
gtcctggacacatcgtttctgtgca

SEQ ID NO: 4686151 - DNA, 25 bp, Homo sapien
actgtcctggacacatcgtttctgt

SEQ ID NO: 4686152 - DNA, 25 bp, Homo sapien
ccattgcaaagcctaacactgtcct

SEQ ID NO: 4686153 - DNA, 25 bp, Homo sapien
taaacattttgagagtggaatattt

SEQ ID NO: 4686154 - DNA, 25 bp, Homo sapien
acattttgagagtggaatatttttc

SEQ ID NO: 4686155 - DNA, 25 bp, Homo sapien
aaacattttgagagtggaatatttt

SEQ ID NO: 4686156 - DNA, 25 bp, Homo sapien
attttgagagtggaatatttttctc

SEQ ID NO: 4686157 - DNA, 25 bp, Homo sapien
caatagctttcccagaggtcagctt

SEQ ID NO: 4686158 - DNA, 25 bp, Homo sapien
ctatccaatagctttcccagaggtc

SEQ ID NO: 4686159 - DNA, 25 bp, Homo sapien
tccaatagctttcccagaggtcagc

SEQ ID NO: 4686160 - DNA, 25 bp, Homo sapien
ttcagccagaggtcttctgtgagct

SEQ ID NO: 4686161 - DNA, 25 bp, Homo sapien
aatttccaagcagccatgtctccat

SEQ ID NO: 4686162 - DNA, 25 bp, Homo sapien
cctttaaggacaatttccaagcagc

SEQ ID NO: 4686163 - DNA, 25 bp, Homo sapien
tgttctttggtttaacctcagccaa

SEQ ID NO: 4686164 - DNA, 25 bp, Homo sapien
cctgtggcagccaccctggttttga

SEQ ID NO: 4686165 - DNA, 25 bp, Homo sapien
tcctaaatgtgcttgactatgatgc

SEQ ID NO: 4686166 - DNA, 25 bp, Homo sapien
aaaatttgttgggattctcccatct

SEQ ID NO: 4686167 - DNA, 25 bp, Homo sapien
ctcccagtttcaagcaatttttctg

SEQ ID NO: 4686168 - DNA, 25 bp, Homo sapien
ctgagtaactgggattacaggcacc

SEQ ID NO: 4686169 - DNA, 25 bp, Homo sapien
cccagtttcaagcaatttttctgcc

SEQ ID NO: 4686170 - DNA, 25 bp, Homo sapien
cagtttcaagcaatttttctgcctc

SEQ ID NO: 4686171 - DNA, 25 bp, Homo sapien
gcaatccagagacaccattcactca

SEQ ID NO: 4686172 - DNA, 25 bp, Homo sapien
cattcactcagctctaaaagatgat

SEQ ID NO: 4686173 - DNA, 25 bp, Homo sapien
caggcactggtatcagcagttaacc

SEQ ID NO: 4686174 - DNA, 25 bp, Homo sapien
tggaacgtcaggttgcagatgcaat

SEQ ID NO: 4686175 - DNA, 25 bp, Homo sapien
aggatgggtctctcattcagcaaga

SEQ ID NO: 4686176 - DNA, 25 bp, Homo sapien
gaagatttatctggcattacgtagc

SEQ ID NO: 4686177 - DNA, 25 bp, Homo sapien
gaactgaatatatgtccctgggcct

SEQ ID NO: 4686178 - DNA, 25 bp, Homo sapien
gagatttggctaccgattcaggttc

SEQ ID NO: 4686179 - DNA, 25 bp, Homo sapien
tttttgtaatactggaaagtggcat

SEQ ID NO: 4686180 - DNA, 25 bp, Homo sapien
taaaggatatttttgtaatactgga

SEQ ID NO: 4686181 - DNA, 25 bp, Homo sapien
cctaaaggatatttttgtaatactg

SEQ ID NO: 4686182 - DNA, 25 bp, Homo sapien
cttgcctaaaggatatttttgtaat

SEQ ID NO: 4686183 - DNA, 25 bp, Homo sapien
cagttcacatggtctggagcacaca

SEQ ID NO: 4686184 - DNA, 25 bp, Homo sapien
ttgccatgggttgcacggctagcca

SEQ ID NO: 4686185 - DNA, 25 bp, Homo sapien
tattgtgccaggaactacgttaagc

SEQ ID NO: 4686186 - DNA, 25 bp, Homo sapien
cattggcatgcaaacgaggcccgtc

SEQ ID NO: 4686187 - DNA, 25 bp, Homo sapien
cgtatggacataactccacatggat

SEQ ID NO: 4686188 - DNA, 25 bp, Homo sapien
tatggacataactccacatggatca

SEQ ID NO: 4686189 - DNA, 25 bp, Homo sapien
aaagcacttgtaattcagtaaatgt

SEQ ID NO: 4686190 - DNA, 25 bp, Homo sapien
atcaaaagcacttgtaattcagtaa

SEQ ID NO: 4686191 - DNA, 25 bp, Homo sapien
agacacagacacattagatggcatc

SEQ ID NO: 4686192 - DNA, 25 bp, Homo sapien
tagatggcatccactcacgtagcac

SEQ ID NO: 4686193 - DNA, 25 bp, Homo sapien
gacacattagatggcatccactcac

SEQ ID NO: 4686194 - DNA, 25 bp, Homo sapien
ggatccacccagcacaaacagacac

SEQ ID NO: 4686195 - DNA, 25 bp, Homo sapien
ccagagcagcggaggtgtcagctga

SEQ ID NO: 4686196 - DNA, 25 bp, Homo sapien
gggttgccagagcagcggaggtgtc

SEQ ID NO: 4686197 - DNA, 25 bp, Homo sapien
caggctgttcttgggttgccagagc

SEQ ID NO: 4686198 - DNA, 25 bp, Homo sapien
gttgccagagcagcggaggtgtcag

SEQ ID NO: 4686199 - DNA, 25 bp, Homo sapien
caacactggggtccaaggatccagg

SEQ ID NO: 4686200 - DNA, 25 bp, Homo sapien
ctttcttctcacaagagtgcctttg

SEQ ID NO: 4686201 - DNA, 25 bp, Homo sapien
tctcacaagagtgcctttgacctct

SEQ ID NO: 4686202 - DNA, 25 bp, Homo sapien
tgacctctttctgttaaatccccta

SEQ ID NO: 4686203 - DNA, 25 bp, Homo sapien
agtgcctttgacctctttctgttaa

SEQ ID NO: 4686204 - DNA, 25 bp, Homo sapien
acaccggcctcctggatataggatg

SEQ ID NO: 4686205 - DNA, 25 bp, Homo sapien
cacaccggcctcctggatataggat

SEQ ID NO: 4686206 - DNA, 25 bp, Homo sapien
tcttgagaacaaatacctgtgaatg

SEQ ID NO: 4686207 - DNA, 25 bp, Homo sapien
cccctcttcctctaagtgcggaatt

SEQ ID NO: 4686208 - DNA, 25 bp, Homo sapien
tattttgagaatcacaggtgcctca

SEQ ID NO: 4686209 - DNA, 25 bp, Homo sapien
tttcctttcgactctactattttga

SEQ ID NO: 4686210 - DNA, 25 bp, Homo sapien
catgaggtctggaagcaatttagct

SEQ ID NO: 4686211 - DNA, 25 bp, Homo sapien
aatacctttcatgaggtctggaagc

SEQ ID NO: 4686212 - DNA, 25 bp, Homo sapien
caaaatacctttcatgaggtctgga

SEQ ID NO: 4686213 - DNA, 25 bp, Homo sapien
tcgtttgcacaaaatacctttcatg

SEQ ID NO: 4686214 - DNA, 25 bp, Homo sapien
catgactatgtacttcctgggctgg

SEQ ID NO: 4686215 - DNA, 25 bp, Homo sapien
taaggtaaggatctatgtctgccac

SEQ ID NO: 4686216 - DNA, 25 bp, Homo sapien
tcagaatgccccagatagtacctag

SEQ ID NO: 4686217 - DNA, 25 bp, Homo sapien
tatctgagtccttgcccttaacggt

SEQ ID NO: 4686218 - DNA, 25 bp, Homo sapien
gatgtgggtcagctacccatataaa

SEQ ID NO: 4686219 - DNA, 25 bp, Homo sapien
ctaagatgtgggtcagctacccata

SEQ ID NO: 4686220 - DNA, 25 bp, Homo sapien
gggtcagctacccatataaaagtgg

SEQ ID NO: 4686221 - DNA, 25 bp, Homo sapien
cagctacccatataaaagtggataa

SEQ ID NO: 4686222 - DNA, 25 bp, Homo sapien
ccattgcaattgaggctgaaatcag

SEQ ID NO: 4686223 - DNA, 25 bp, Homo sapien
aatcagaggctaaggatgtgcggcc

SEQ ID NO: 4686224 - DNA, 25 bp, Homo sapien
ttggaactgtccattgcaattgagg

SEQ ID NO: 4686225 - DNA, 25 bp, Homo sapien
gatgtgcggcctttgtgaataaagt

SEQ ID NO: 4686226 - DNA, 25 bp, Homo sapien
gggcagcgcaaagtgagtttgaact

SEQ ID NO: 4686227 - DNA, 25 bp, Homo sapien
cagcgcaaagtgagtttgaactcac

SEQ ID NO: 4686228 - DNA, 25 bp, Homo sapien
ctggcatatattcaaggaggtaggt

SEQ ID NO: 4686229 - DNA, 25 bp, Homo sapien
ggcatatattcaaggaggtaggtct

SEQ ID NO: 4686230 - DNA, 25 bp, Homo sapien
tctgttgtccacttagacggatggc

SEQ ID NO: 4686231 - DNA, 25 bp, Homo sapien
tggtctgaacacagccattaaatag

SEQ ID NO: 4686232 - DNA, 25 bp, Homo sapien
gatggctgaccttggtctgaacaca

SEQ ID NO: 4686233 - DNA, 25 bp, Homo sapien
cacttagacggatggctgaccttgg

SEQ ID NO: 4686234 - DNA, 25 bp, Homo sapien
tccgggacgctgttaggaaagccaa

SEQ ID NO: 4686235 - DNA, 25 bp, Homo sapien
gaaagccaagcataagtagtctcct

SEQ ID NO: 4686236 - DNA, 25 bp, Homo sapien
cccgcacgctaatctgtcatcagta

SEQ ID NO: 4686237 - DNA, 25 bp, Homo sapien
catggcctcatcagaacaattggca

SEQ ID NO: 4686238 - DNA, 25 bp, Homo sapien
gagtccatgacctgcttaataatgt

SEQ ID NO: 4686239 - DNA, 25 bp, Homo sapien
ccaagccttatgcagtttttgtcat

SEQ ID NO: 4686240 - DNA, 25 bp, Homo sapien
tgtcagttagtgatgcatgctttct

SEQ ID NO: 4686241 - DNA, 25 bp, Homo sapien
cagggtttacagcatgaatatctaa

SEQ ID NO: 4686242 - DNA, 25 bp, Homo sapien
aaaggtggaggccagattccaggcc

SEQ ID NO: 4686243 - DNA, 25 bp, Homo sapien
gcctgagggcccagagagtaatgaa

SEQ ID NO: 4686244 - DNA, 25 bp, Homo sapien
ctgacagccagacagaaaaggtgga

SEQ ID NO: 4686245 - DNA, 25 bp, Homo sapien
tctttaatccctgtgaaggattggt

SEQ ID NO: 4686246 - DNA, 25 bp, Homo sapien
caatgcttgggacttctcgtaagac

SEQ ID NO: 4686247 - DNA, 25 bp, Homo sapien
tcgtaagacctggaacagtgccatt

SEQ ID NO: 4686248 - DNA, 25 bp, Homo sapien
gcttttcagcggtccccaatgcttg

SEQ ID NO: 4686249 - DNA, 25 bp, Homo sapien
tggtcctggcatctttataaagctg

SEQ ID NO: 4686250 - DNA, 25 bp, Homo sapien
gcatgcctagttttgaccaactgaa

SEQ ID NO: 4686251 - DNA, 25 bp, Homo sapien
tatgaagttcagaccgcatccattc

SEQ ID NO: 4686252 - DNA, 25 bp, Homo sapien
gcatccattccattaccaccttgga

SEQ ID NO: 4686253 - DNA, 25 bp, Homo sapien
ttgtgtaactatacaaagagggcct

SEQ ID NO: 4686254 - DNA, 25 bp, Homo sapien
ctgaccgcccgcggctccgacgagt

SEQ ID NO: 4686255 - DNA, 25 bp, Homo sapien
gcggctccgacgagtccaccgccgg

SEQ ID NO: 4686256 - DNA, 25 bp, Homo sapien
gctccgacgagtccaccgccggcag

SEQ ID NO: 4686257 - DNA, 25 bp, Homo sapien
gcccgcggctccgacgagtccaccg

SEQ ID NO: 4686258 - DNA, 25 bp, Homo sapien
gagatgctgcaaccgcaaatctctt

SEQ ID NO: 4686259 - DNA, 25 bp, Homo sapien
tcatacctcccgagatgctgcaacc

SEQ ID NO: 4686260 - DNA, 25 bp, Homo sapien
ctcccgagatgctgcaaccgcaaat

SEQ ID NO: 4686261 - DNA, 25 bp, Homo sapien
tgcaaccgcaaatctcttcagagcc

SEQ ID NO: 4686262 - DNA, 25 bp, Homo sapien
tgcatgaccataaggaattaactca

SEQ ID NO: 4686263 - DNA, 25 bp, Homo sapien
ttagctgcatgaccataaggaatta

SEQ ID NO: 4686264 - DNA, 25 bp, Homo sapien
gctgcatgaccataaggaattaact

SEQ ID NO: 4686265 - DNA, 25 bp, Homo sapien
tgaccataaggaattaactcaaact

SEQ ID NO: 4686266 - DNA, 25 bp, Homo sapien
tgaagggtattgctagcacagctca

SEQ ID NO: 4686267 - DNA, 25 bp, Homo sapien
cagaactgaacagcacagtattcat

SEQ ID NO: 4686268 - DNA, 25 bp, Homo sapien
tattcatgccctagagggtcaaatt

SEQ ID NO: 4686269 - DNA, 25 bp, Homo sapien
tcctttgaagggtattgctagcaca

SEQ ID NO: 4686270 - DNA, 25 bp, Homo sapien
tatacgatagttaccacggtcagcg

SEQ ID NO: 4686271 - DNA, 25 bp, Homo sapien
tgtgaagaacttccgagagcgagcc

SEQ ID NO: 4686272 - DNA, 25 bp, Homo sapien
gaagaagtggctaatctggcgaccc

SEQ ID NO: 4686273 - DNA, 25 bp, Homo sapien
ccgctgtttagcaggtgaggcccta

SEQ ID NO: 4686274 - DNA, 25 bp, Homo sapien
gctggaatcaggacataggctgagt

SEQ ID NO: 4686275 - DNA, 25 bp, Homo sapien
gaagttctagaactacccagctgga

SEQ ID NO: 4686276 - DNA, 25 bp, Homo sapien
tctactaaagccttggaagtgccta

SEQ ID NO: 4686277 - DNA, 25 bp, Homo sapien
tcgtgtgtcctatttgggcagtgca

SEQ ID NO: 4686278 - DNA, 25 bp, Homo sapien
ggccctggcctatgttgtacaattc

SEQ ID NO: 4686279 - DNA, 25 bp, Homo sapien
tgaaaaatgatgagccctagagact

SEQ ID NO: 4686280 - DNA, 25 bp, Homo sapien
aagatggcacagatcctccaggcga

SEQ ID NO: 4686281 - DNA, 25 bp, Homo sapien
tactggtaaagacgatcagactgag

SEQ ID NO: 4686282 - DNA, 25 bp, Homo sapien
ttacatcaaagtaaggcagttgctc

SEQ ID NO: 4686283 - DNA, 25 bp, Homo sapien
caaaatggcatagcgcaggttatcc

SEQ ID NO: 4686284 - DNA, 25 bp, Homo sapien
tcagccctgcacctagagtaagata

SEQ ID NO: 4686285 - DNA, 25 bp, Homo sapien
cagcagaagctcagaatagggtatt

SEQ ID NO: 4686286 - DNA, 25 bp, Homo sapien
gatggcacctctttcaaaagcacag

SEQ ID NO: 4686287 - DNA, 25 bp, Homo sapien
cactgttattgcctcagcaagtccc

SEQ ID NO: 4686288 - DNA, 25 bp, Homo sapien
cacagacagctggaggattcctggc

SEQ ID NO: 4686289 - DNA, 25 bp, Homo sapien
tctctccactgcaaactgtgtgcca

SEQ ID NO: 4686290 - DNA, 25 bp, Homo sapien
tacagactcaagtccggagtgtaca

SEQ ID NO: 4686291 - DNA, 25 bp, Homo sapien
gcattacttgccttacccagaggaa

SEQ ID NO: 4686292 - DNA, 25 bp, Homo sapien
taagaggccattaattagcactaga

SEQ ID NO: 4686293 - DNA, 25 bp, Homo sapien
ggagtgtacactggcccacagtagg

SEQ ID NO: 4686294 - DNA, 25 bp, Homo sapien
agagtacattgccagacccagagct

SEQ ID NO: 4686295 - DNA, 25 bp, Homo sapien
tcagccttagcttgggtcccgtgaa

SEQ ID NO: 4686296 - DNA, 25 bp, Homo sapien
tgcaaatcagcatcctagtcaagtg

SEQ ID NO: 4686297 - DNA, 25 bp, Homo sapien
taccaaggaaaactctagctcagca

SEQ ID NO: 4686298 - DNA, 25 bp, Homo sapien
ttctagccagcaagagtcagttagc

SEQ ID NO: 4686299 - DNA, 25 bp, Homo sapien
tcagtgaacgcagtacaaagcagca

SEQ ID NO: 4686300 - DNA, 25 bp, Homo sapien
cagcgagttctcaagcaggtccaga

SEQ ID NO: 4686301 - DNA, 25 bp, Homo sapien
aaaaggtttatcactcacacgaggc

SEQ ID NO: 4686302 - DNA, 25 bp, Homo sapien
tcgggttgagtctagaaaggaacgc

SEQ ID NO: 4686303 - DNA, 25 bp, Homo sapien
gctgatgctaattgtgacccagagt

SEQ ID NO: 4686304 - DNA, 25 bp, Homo sapien
tgcagctagacttaatgattcaggg

SEQ ID NO: 4686305 - DNA, 25 bp, Homo sapien
aagcaaatcagagggaaccactcct

SEQ ID NO: 4686306 - DNA, 25 bp, Homo sapien
tggaacacacagccaatgtccaagg

SEQ ID NO: 4686307 - DNA, 25 bp, Homo sapien
gttggaacacacagccaatgtccaa

SEQ ID NO: 4686308 - DNA, 25 bp, Homo sapien
agaagcaatgtgttggaacacacag

SEQ ID NO: 4686309 - DNA, 25 bp, Homo sapien
tggatggtcttgggtagttttttga

SEQ ID NO: 4686310 - DNA, 25 bp, Homo sapien
caaatgtgttcttgtggatccttgc

SEQ ID NO: 4686311 - DNA, 25 bp, Homo sapien
gatccttgctggtatttgctatgtg

SEQ ID NO: 4686312 - DNA, 25 bp, Homo sapien
gagcttggctctgagcgctggcact

SEQ ID NO: 4686313 - DNA, 25 bp, Homo sapien
ccttaacttggcctcagagaaggca

SEQ ID NO: 4686314 - DNA, 25 bp, Homo sapien
catcagatgtgattagagtggaccc

SEQ ID NO: 4686315 - DNA, 25 bp, Homo sapien
acagtaatgcttatcatttctagga

SEQ ID NO: 4686316 - DNA, 25 bp, Homo sapien
gccatggtccttgaaacaccctgga

SEQ ID NO: 4686317 - DNA, 25 bp, Homo sapien
ctggataggccagtaaagcaacttt

SEQ ID NO: 4686318 - DNA, 25 bp, Homo sapien
ggacagaagtcaccaaaagcaaggt

SEQ ID NO: 4686319 - DNA, 25 bp, Homo sapien
gaggacagaagtcaccaaaagcaag

SEQ ID NO: 4686320 - DNA, 25 bp, Homo sapien
acagaagtcaccaaaagcaaggtcc

SEQ ID NO: 4686321 - DNA, 25 bp, Homo sapien
tgtggaggacagaagtcaccaaaag

SEQ ID NO: 4686322 - DNA, 25 bp, Homo sapien
tagtacaccaagaggttatatccct

SEQ ID NO: 4686323 - DNA, 25 bp, Homo sapien
catcattgttaagagggctctcagc

SEQ ID NO: 4686324 - DNA, 25 bp, Homo sapien
caaggatggatctgctagttctggc

SEQ ID NO: 4686325 - DNA, 25 bp, Homo sapien
cacgagggttctgagcatagtacac

SEQ ID NO: 4686326 - DNA, 25 bp, Homo sapien
tcataagaatcacgtggggctgcac

SEQ ID NO: 4686327 - DNA, 25 bp, Homo sapien
ctgatcataagaatcacgtggggct

SEQ ID NO: 4686328 - DNA, 25 bp, Homo sapien
cataagaatcacgtggggctgcacc

SEQ ID NO: 4686329 - DNA, 25 bp, Homo sapien
gatcataagaatcacgtggggctgc

SEQ ID NO: 4686330 - DNA, 25 bp, Homo sapien
cttgggaatggggactgagcaaatt

SEQ ID NO: 4686331 - DNA, 25 bp, Homo sapien
gagctattattgaacctggtgtctc

SEQ ID NO: 4686332 - DNA, 25 bp, Homo sapien
ctgagcaaattacagtggtagattt

SEQ ID NO: 4686333 - DNA, 25 bp, Homo sapien
ggcatttgccaataggccctcaaga

SEQ ID NO: 4686334 - DNA, 25 bp, Homo sapien
caattcacagttgctttgataaaaa

SEQ ID NO: 4686335 - DNA, 25 bp, Homo sapien
ggaggcatccttgtgatgtcttaaa

SEQ ID NO: 4686336 - DNA, 25 bp, Homo sapien
aaggctctcagccagttaaagacca

SEQ ID NO: 4686337 - DNA, 25 bp, Homo sapien
tagtcaagcaggtttggaggcatcc

SEQ ID NO: 4686338 - DNA, 25 bp, Homo sapien
agcctggtcagcataagactccata

SEQ ID NO: 4686339 - DNA, 25 bp, Homo sapien
gcctggtcagcataagactccatat

SEQ ID NO: 4686340 - DNA, 25 bp, Homo sapien
cactcacttatatgccaggaagcac

SEQ ID NO: 4686341 - DNA, 25 bp, Homo sapien
tccttgtgagcaccgaagtccagca

SEQ ID NO: 4686342 - DNA, 25 bp, Homo sapien
caggtgctgcctggtagtgcctaag

SEQ ID NO: 4686343 - DNA, 25 bp, Homo sapien
taatagacgggctagctggcctggt

SEQ ID NO: 4686344 - DNA, 25 bp, Homo sapien
tagcatagcctagcagtgtgtctgg

SEQ ID NO: 4686345 - DNA, 25 bp, Homo sapien
ccaggtgaagacagttagagcctct

SEQ ID NO: 4686346 - DNA, 25 bp, Homo sapien
tccaagcatctatggtgaggacctg

SEQ ID NO: 4686347 - DNA, 25 bp, Homo sapien
tgatctgtagcaaaattccctcggc

SEQ ID NO: 4686348 - DNA, 25 bp, Homo sapien
gtttccagagagtagaacacatggg

SEQ ID NO: 4686349 - DNA, 25 bp, Homo sapien
gaaattgccacacacttcttggtga

SEQ ID NO: 4686350 - DNA, 25 bp, Homo sapien
ggtgtctgctgaaagatctcccaga

SEQ ID NO: 4686351 - DNA, 25 bp, Homo sapien
agacagggcatggaaactccgtgcc

SEQ ID NO: 4686352 - DNA, 25 bp, Homo sapien
aacatatatggcatctgtctccatt

SEQ ID NO: 4686353 - DNA, 25 bp, Homo sapien
acgtccgtccccagaacactggact

SEQ ID NO: 4686354 - DNA, 25 bp, Homo sapien
tgctgtgggtgttgcagttgatcct

SEQ ID NO: 4686355 - DNA, 25 bp, Homo sapien
ttttcaatcccctgagggtccaaca

SEQ ID NO: 4686356 - DNA, 25 bp, Homo sapien
tgtcacctccaaatagctactacta

SEQ ID NO: 4686357 - DNA, 25 bp, Homo sapien
caatatcacccatagtcatgtcacc

SEQ ID NO: 4686358 - DNA, 25 bp, Homo sapien
taaaccatcacccatgtcaagaaat

SEQ ID NO: 4686359 - DNA, 25 bp, Homo sapien
tattgcctgcattccataagccctc

SEQ ID NO: 4686360 - DNA, 25 bp, Homo sapien
ctgaggaaagctgtctagagctctt

SEQ ID NO: 4686361 - DNA, 25 bp, Homo sapien
gtcagctagtttttccagcctccag

SEQ ID NO: 4686362 - DNA, 25 bp, Homo sapien
acaaggtcatttaaggccagctggc

SEQ ID NO: 4686363 - DNA, 25 bp, Homo sapien
agttccacctggaggatctgaggaa

SEQ ID NO: 4686364 - DNA, 25 bp, Homo sapien
tctgaccggcaggtggattcctcgg

SEQ ID NO: 4686365 - DNA, 25 bp, Homo sapien
tccaagggaagaagcgatgctgtcc

SEQ ID NO: 4686366 - DNA, 25 bp, Homo sapien
tcctcgggatgtgtggtaagtgccc

SEQ ID NO: 4686367 - DNA, 25 bp, Homo sapien
ccattggcccgggaacatggcagtg

SEQ ID NO: 4686368 - DNA, 25 bp, Homo sapien
ccaacaactgtaagccccagaggga

SEQ ID NO: 4686369 - DNA, 25 bp, Homo sapien
caacaactgtaagccccagagggac

SEQ ID NO: 4686370 - DNA, 25 bp, Homo sapien
tcccaacaactgtaagccccagagg

SEQ ID NO: 4686371 - DNA, 25 bp, Homo sapien
ttgtcccaacaactgtaagccccag

SEQ ID NO: 4686372 - DNA, 25 bp, Homo sapien
ccatcttaatgagcctcttctgttt

SEQ ID NO: 4686373 - DNA, 25 bp, Homo sapien
ttctgagcaatcacacctgagaccc

SEQ ID NO: 4686374 - DNA, 25 bp, Homo sapien
tcttaatgagcctcttctgtttgag

SEQ ID NO: 4686375 - DNA, 25 bp, Homo sapien
ttcccatcttaatgagcctcttctg

SEQ ID NO: 4686376 - DNA, 25 bp, Homo sapien
gcacctatggcagccatggatggct

SEQ ID NO: 4686377 - DNA, 25 bp, Homo sapien
tcatccccatcatggcacctatggc

SEQ ID NO: 4686378 - DNA, 25 bp, Homo sapien
ccatcatggcacctatggcagccat

SEQ ID NO: 4686379 - DNA, 25 bp, Homo sapien
tatggcagccatggatggctgcaat

SEQ ID NO: 4686380 - DNA, 25 bp, Homo sapien
acattctgtgactctgtttgtgctg

SEQ ID NO: 4686381 - DNA, 25 bp, Homo sapien
tccacattctgtgactctgtttgtg

SEQ ID NO: 4686382 - DNA, 25 bp, Homo sapien
ccacattctgtgactctgtttgtgc

SEQ ID NO: 4686383 - DNA, 25 bp, Homo sapien
cacattctgtgactctgtttgtgct

SEQ ID NO: 4686384 - DNA, 25 bp, Homo sapien
ctccttttctgcctccactgttgtc

SEQ ID NO: 4686385 - DNA, 25 bp, Homo sapien
tctgcctccactgttgtcacctttt

SEQ ID NO: 4686386 - DNA, 25 bp, Homo sapien
tccttttctgcctccactgttgtca

SEQ ID NO: 4686387 - DNA, 25 bp, Homo sapien
ttttctgcctccactgttgtcacct

SEQ ID NO: 4686388 - DNA, 25 bp, Homo sapien
gactgttctcagtccatgaccctct

SEQ ID NO: 4686389 - DNA, 25 bp, Homo sapien
tcatgacactagctcaaacataatg

SEQ ID NO: 4686390 - DNA, 25 bp, Homo sapien
tagctcaaacataatgactgttctc

SEQ ID NO: 4686391 - DNA, 25 bp, Homo sapien
gacactagctcaaacataatgactg

SEQ ID NO: 4686392 - DNA, 25 bp, Homo sapien
agcagagaaggacttgaatcccctt

SEQ ID NO: 4686393 - DNA, 25 bp, Homo sapien
gaaggacttgaatccccttctcttg

SEQ ID NO: 4686394 - DNA, 25 bp, Homo sapien
tgctaggcagcataagtccccaagt

SEQ ID NO: 4686395 - DNA, 25 bp, Homo sapien
tggcctgctaggcagcataagtccc

SEQ ID NO: 4686396 - DNA, 25 bp, Homo sapien
aaatgttaagttcatcaagtgactc

SEQ ID NO: 4686397 - DNA, 25 bp, Homo sapien
ttcgtggactagaggccaaatgtta

SEQ ID NO: 4686398 - DNA, 25 bp, Homo sapien
gtgactctgactcatcaaagcccat

SEQ ID NO: 4686399 - DNA, 25 bp, Homo sapien
aagtgactctgactcatcaaagccc

SEQ ID NO: 4686400 - DNA, 25 bp, Homo sapien
tgcttgagaaagagacgttagactg

SEQ ID NO: 4686401 - DNA, 25 bp, Homo sapien
taaatgctggtatataagactggca

SEQ ID NO: 4686402 - DNA, 25 bp, Homo sapien
tcagtgcaatctgaccgggaccagc

SEQ ID NO: 4686403 - DNA, 25 bp, Homo sapien
tggcatctacaccttaaaaccgttc

SEQ ID NO: 4686404 - DNA, 25 bp, Homo sapien
catcaggcagccctttgagactgtc

SEQ ID NO: 4686405 - DNA, 25 bp, Homo sapien
gactgtctgccacgaggacatagga

SEQ ID NO: 4686406 - DNA, 25 bp, Homo sapien
agccctttgagactgtctgccacga

SEQ ID NO: 4686407 - DNA, 25 bp, Homo sapien
tgccacgaggacataggagccttct

SEQ ID NO: 4686408 - DNA, 25 bp, Homo sapien
tgcaaccttccctggtcatctcgag

SEQ ID NO: 4686409 - DNA, 25 bp, Homo sapien
tggtcatctcgagccccaagcactg

SEQ ID NO: 4686410 - DNA, 25 bp, Homo sapien
ttccctggtcatctcgagccccaag

SEQ ID NO: 4686411 - DNA, 25 bp, Homo sapien
tgggggcagggtccttgcaaccttc

SEQ ID NO: 4686412 - DNA, 25 bp, Homo sapien
tgatgtgctagtctgcaaaagcctc

SEQ ID NO: 4686413 - DNA, 25 bp, Homo sapien
aagtcaactttgagaccttgtgctg

SEQ ID NO: 4686414 - DNA, 25 bp, Homo sapien
cctcaggagtaaacagtgaaaagtc

SEQ ID NO: 4686415 - DNA, 25 bp, Homo sapien
ccatggccatgagaactttttggtc

SEQ ID NO: 4686416 - DNA, 25 bp, Homo sapien
tgagaacaggctcatgcaggtctgg

SEQ ID NO: 4686417 - DNA, 25 bp, Homo sapien
tttaagagcatcccccttgatactg

SEQ ID NO: 4686418 - DNA, 25 bp, Homo sapien
tgtgagaacaggctcatgcaggtct

SEQ ID NO: 4686419 - DNA, 25 bp, Homo sapien
agaacaggctcatgcaggtctggtg

SEQ ID NO: 4686420 - DNA, 25 bp, Homo sapien
aatggaaccactctgcctaaggcag

SEQ ID NO: 4686421 - DNA, 25 bp, Homo sapien
tcaaatggaaccactctgcctaagg

SEQ ID NO: 4686422 - DNA, 25 bp, Homo sapien
tctgcctaaggcagaagtctggttt

SEQ ID NO: 4686423 - DNA, 25 bp, Homo sapien
ataacttcaaatggaaccactctgc

SEQ ID NO: 4686424 - DNA, 25 bp, Homo sapien
cagcataaccctggttacataagga

SEQ ID NO: 4686425 - DNA, 25 bp, Homo sapien
taggtcattcagagtccaggtcagg

SEQ ID NO: 4686426 - DNA, 25 bp, Homo sapien
gggtcttaagaagtcttctgactgc

SEQ ID NO: 4686427 - DNA, 25 bp, Homo sapien
ttcaaaacatcttctggagcctggg

SEQ ID NO: 4686428 - DNA, 25 bp, Homo sapien
tcgaagatgtcacttggcagagggt

SEQ ID NO: 4686429 - DNA, 25 bp, Homo sapien
gtgggaggtgtagattcagcaataa

SEQ ID NO: 4686430 - DNA, 25 bp, Homo sapien
atgttggagagctgcataagctggg

SEQ ID NO: 4686431 - DNA, 25 bp, Homo sapien
gggtcagtaacccagaagttgatgg

SEQ ID NO: 4686432 - DNA, 25 bp, Homo sapien
tagtttaattccttaagtgctcctg

SEQ ID NO: 4686433 - DNA, 25 bp, Homo sapien
acttctctgcgggaagggactgcct

SEQ ID NO: 4686434 - DNA, 25 bp, Homo sapien
ctcataaacatgaggcagaatctcc

SEQ ID NO: 4686435 - DNA, 25 bp, Homo sapien
tcatactcaccttcactccggctcc

SEQ ID NO: 4686436 - DNA, 25 bp, Homo sapien
gatgcttttgatgtccacagaatct

SEQ ID NO: 4686437 - DNA, 25 bp, Homo sapien
acagaatcttccacaggatgtctct

SEQ ID NO: 4686438 - DNA, 25 bp, Homo sapien
gaatcttccacaggatgtctctgca

SEQ ID NO: 4686439 - DNA, 25 bp, Homo sapien
gttccaggatgcttttgatgtccac

SEQ ID NO: 4686440 - DNA, 25 bp, Homo sapien
caggagcattttcaaacctcagaga

SEQ ID NO: 4686441 - DNA, 25 bp, Homo sapien
tgccagacttggttgaccttggatc

SEQ ID NO: 4686442 - DNA, 25 bp, Homo sapien
gccgggatatattttgagaagtact

SEQ ID NO: 4686443 - DNA, 25 bp, Homo sapien
ctacatactagagctctttgggtgg

SEQ ID NO: 4686444 - DNA, 25 bp, Homo sapien
tggaaacatgggccatacatcttca

SEQ ID NO: 4686445 - DNA, 25 bp, Homo sapien
ctagtcagatacagtgcattctgga

SEQ ID NO: 4686446 - DNA, 25 bp, Homo sapien
tcaggtgcaatcctcaacaaatgca

SEQ ID NO: 4686447 - DNA, 25 bp, Homo sapien
ctgtgtaatgaacattgtgctaggc

SEQ ID NO: 4686448 - DNA, 25 bp, Homo sapien
caccttctgactagagttcaactcg

SEQ ID NO: 4686449 - DNA, 25 bp, Homo sapien
tctgaattctaggataccctggtct

SEQ ID NO: 4686450 - DNA, 25 bp, Homo sapien
caaagaataatacaagcaggaagga

SEQ ID NO: 4686451 - DNA, 25 bp, Homo sapien
gatctagaaaaactgggtcgccaac

SEQ ID NO: 4686452 - DNA, 25 bp, Homo sapien
tttcatcctcctggacttcggaaac

SEQ ID NO: 4686453 - DNA, 25 bp, Homo sapien
gctttcatcctcctggacttcggaa

SEQ ID NO: 4686454 - DNA, 25 bp, Homo sapien
tcatcctcctggacttcggaaacaa

SEQ ID NO: 4686455 - DNA, 25 bp, Homo sapien
ttcatcctcctggacttcggaaaca

SEQ ID NO: 4686456 - DNA, 25 bp, Homo sapien
gaagtttctgccaggtccggttgcc

SEQ ID NO: 4686457 - DNA, 25 bp, Homo sapien
tgggcatctggcttagtgaaggctt

SEQ ID NO: 4686458 - DNA, 25 bp, Homo sapien
tgctccatgggcatctggcttagtg

SEQ ID NO: 4686459 - DNA, 25 bp, Homo sapien
gatttgagtcccactgtgaagtttc

SEQ ID NO: 4686460 - DNA, 25 bp, Homo sapien
gtagccccattccatgtcagctgcc

SEQ ID NO: 4686461 - DNA, 25 bp, Homo sapien
aaatagccagccgtttgtagcccca

SEQ ID NO: 4686462 - DNA, 25 bp, Homo sapien
ggcagccacaatctaggcctgcact

SEQ ID NO: 4686463 - DNA, 25 bp, Homo sapien
agtggctttaacttcaccaggcagc

SEQ ID NO: 4686464 - DNA, 25 bp, Homo sapien
gttgatgtgtgaacataggggcttc

SEQ ID NO: 4686465 - DNA, 25 bp, Homo sapien
atttcaccaacttccagggttgatg

SEQ ID NO: 4686466 - DNA, 25 bp, Homo sapien
gatgtgtgaacataggggcttccag

SEQ ID NO: 4686467 - DNA, 25 bp, Homo sapien
ttcaccaacttccagggttgatgtg

SEQ ID NO: 4686468 - DNA, 25 bp, Homo sapien
tctaccttaatgatgccttggcaca

SEQ ID NO: 4686469 - DNA, 25 bp, Homo sapien
gcagaaataatctgtggccttccat

SEQ ID NO: 4686470 - DNA, 25 bp, Homo sapien
gtctctgtcatctctaccttaatga

SEQ ID NO: 4686471 - DNA, 25 bp, Homo sapien
catttcagcgcaaggagctgagagt

SEQ ID NO: 4686472 - DNA, 25 bp, Homo sapien
tcatggaagtcagacaagctatggg

SEQ ID NO: 4686473 - DNA, 25 bp, Homo sapien
tcagacaagctatgggctctctcca

SEQ ID NO: 4686474 - DNA, 25 bp, Homo sapien
gaagtcagacaagctatgggctctc

SEQ ID NO: 4686475 - DNA, 25 bp, Homo sapien
ggttaagatcatggaagtcagacaa

SEQ ID NO: 4686476 - DNA, 25 bp, Homo sapien
ccaatgtctggagctttaaatccat

SEQ ID NO: 4686477 - DNA, 25 bp, Homo sapien
agagagatagcacttgatagtctgt

SEQ ID NO: 4686478 - DNA, 25 bp, Homo sapien
tcagagaagagagatagcacttgat

SEQ ID NO: 4686479 - DNA, 25 bp, Homo sapien
cataggtgacagataaaggataagg

SEQ ID NO: 4686480 - DNA, 25 bp, Homo sapien
gcaaccctctattgttgaccattat

SEQ ID NO: 4686481 - DNA, 25 bp, Homo sapien
aactttgcaaccctctattgttgac

SEQ ID NO: 4686482 - DNA, 25 bp, Homo sapien
ttagaggttctggtagggtagtgca

SEQ ID NO: 4686483 - DNA, 25 bp, Homo sapien
aaagaccagtcatcctctgtcagag

SEQ ID NO: 4686484 - DNA, 25 bp, Homo sapien
ccaactgtgagttcttcaagggcat

SEQ ID NO: 4686485 - DNA, 25 bp, Homo sapien
aaccaactgtgagttcttcaagggc

SEQ ID NO: 4686486 - DNA, 25 bp, Homo sapien
ctgttgccacaaaccaactgtgagt

SEQ ID NO: 4686487 - DNA, 25 bp, Homo sapien
tgccacaaaccaactgtgagttctt

SEQ ID NO: 4686488 - DNA, 25 bp, Homo sapien
accaaaagggaactaacagcaatgt

SEQ ID NO: 4686489 - DNA, 25 bp, Homo sapien
cagccttttcggtcctcgggtatag

SEQ ID NO: 4686490 - DNA, 25 bp, Homo sapien
tttattcactacatatcttccagcc

SEQ ID NO: 4686491 - DNA, 25 bp, Homo sapien
caaaagggaactaacagcaatgttt

SEQ ID NO: 4686492 - DNA, 25 bp, Homo sapien
atgatgcatgcactgtccgctccct

SEQ ID NO: 4686493 - DNA, 25 bp, Homo sapien
catgatgcatgcactgtccgctccc

SEQ ID NO: 4686494 - DNA, 25 bp, Homo sapien
tgtggaatctttcgtcattgctgat

SEQ ID NO: 4686495 - DNA, 25 bp, Homo sapien
ctgtggaatctttcgtcattgctga

SEQ ID NO: 4686496 - DNA, 25 bp, Homo sapien
tggcagggtgaagacagttactcca

SEQ ID NO: 4686497 - DNA, 25 bp, Homo sapien
acagatcttctaatccccttctggg

SEQ ID NO: 4686498 - DNA, 25 bp, Homo sapien
ggtgaagacagttactccagctctg

SEQ ID NO: 4686499 - DNA, 25 bp, Homo sapien
ttttgttatacagccccatggaggt

SEQ ID NO: 4686500 - DNA, 25 bp, Homo sapien
tccagggagttgagctagcctgaga

SEQ ID NO: 4686501 - DNA, 25 bp, Homo sapien
tcagctatgaccaatggcagcccca

SEQ ID NO: 4686502 - DNA, 25 bp, Homo sapien
gtgtctccagggagttgagctagcc

SEQ ID NO: 4686503 - DNA, 25 bp, Homo sapien
gctatgaccaatggcagccccagtg

SEQ ID NO: 4686504 - DNA, 25 bp, Homo sapien
tgttctgcatcgcttgcaatagcca

SEQ ID NO: 4686505 - DNA, 25 bp, Homo sapien
tcattgtggtacttgccccggtggc

SEQ ID NO: 4686506 - DNA, 25 bp, Homo sapien
cagccaaatatgtctcctccgtgtt

SEQ ID NO: 4686507 - DNA, 25 bp, Homo sapien
ccccggtggcttctagaaagcttct

SEQ ID NO: 4686508 - DNA, 25 bp, Homo sapien
ccttggatagatgattatctctaga

SEQ ID NO: 4686509 - DNA, 25 bp, Homo sapien
gatgattatctctagatgtgtgctt

SEQ ID NO: 4686510 - DNA, 25 bp, Homo sapien
ggatagatgattatctctagatgtg

SEQ ID NO: 4686511 - DNA, 25 bp, Homo sapien
ttcccttggatagatgattatctct

SEQ ID NO: 4686512 - DNA, 25 bp, Homo sapien
agtgtatgtgctaccctactttccc

SEQ ID NO: 4686513 - DNA, 25 bp, Homo sapien
atgtgctaccctactttcccagcag

SEQ ID NO: 4686514 - DNA, 25 bp, Homo sapien
catttctgaggactgcaccagctgc

SEQ ID NO: 4686515 - DNA, 25 bp, Homo sapien
ggaagcacagggtataaggcgagtc

SEQ ID NO: 4686516 - DNA, 25 bp, Homo sapien
acttcaaagccaaaattttctgtgg

SEQ ID NO: 4686517 - DNA, 25 bp, Homo sapien
ttcaaagccaaaattttctgtggtg

SEQ ID NO: 4686518 - DNA, 25 bp, Homo sapien
tcaaagccaaaattttctgtggtgg

SEQ ID NO: 4686519 - DNA, 25 bp, Homo sapien
tcacttcaaagccaaaattttctgt

SEQ ID NO: 4686520 - DNA, 25 bp, Homo sapien
cgttctctgattcctaaatgataga

SEQ ID NO: 4686521 - DNA, 25 bp, Homo sapien
tgaagtcctggaaattactaggctc

SEQ ID NO: 4686522 - DNA, 25 bp, Homo sapien
actcttttgtttatgtcgttctctg

SEQ ID NO: 4686523 - DNA, 25 bp, Homo sapien
tcctggaaattactaggctcagatt

SEQ ID NO: 4686524 - DNA, 25 bp, Homo sapien
ccatcctcttcaacggagcatacag

SEQ ID NO: 4686525 - DNA, 25 bp, Homo sapien
ggccatcctcttcaacggagcatac

SEQ ID NO: 4686526 - DNA, 25 bp, Homo sapien
atggccatcctcttcaacggagcat

SEQ ID NO: 4686527 - DNA, 25 bp, Homo sapien
gggaagaggacacctcccttgccag

SEQ ID NO: 4686528 - DNA, 25 bp, Homo sapien
gatgtggctgttcagctctgttggc

SEQ ID NO: 4686529 - DNA, 25 bp, Homo sapien
agaggatgtggctgttcagctctgt

SEQ ID NO: 4686530 - DNA, 25 bp, Homo sapien
aggatgtggctgttcagctctgttg

SEQ ID NO: 4686531 - DNA, 25 bp, Homo sapien
tgtggctgttcagctctgttggccc

SEQ ID NO: 4686532 - DNA, 25 bp, Homo sapien
tgttaagcactatactggatacatg

SEQ ID NO: 4686533 - DNA, 25 bp, Homo sapien
ttgtgctcttgccaagaatggatga

SEQ ID NO: 4686534 - DNA, 25 bp, Homo sapien
gatacatgtatggaaattatctcat

SEQ ID NO: 4686535 - DNA, 25 bp, Homo sapien
gaatggatgaggtccagcgaatcac

SEQ ID NO: 4686536 - DNA, 25 bp, Homo sapien
tgtcaggtgttttaacccttgcaac

SEQ ID NO: 4686537 - DNA, 25 bp, Homo sapien
tcaggtgttttaacccttgcaacaa

SEQ ID NO: 4686538 - DNA, 25 bp, Homo sapien
tgtgtcaggtgttttaacccttgca

SEQ ID NO: 4686539 - DNA, 25 bp, Homo sapien
atgtgtcaggtgttttaacccttgc

SEQ ID NO: 4686540 - DNA, 25 bp, Homo sapien
tgtacttccacgtctccatgagcag

SEQ ID NO: 4686541 - DNA, 25 bp, Homo sapien
tgttgaggagcagatgcacatcctc

SEQ ID NO: 4686542 - DNA, 25 bp, Homo sapien
cagtgcctcgggtcttgtcttgcag

SEQ ID NO: 4686543 - DNA, 25 bp, Homo sapien
tggctggagaatggcaccttgtact

SEQ ID NO: 4686544 - DNA, 25 bp, Homo sapien
ggcctttctggctccgaggtttggc

SEQ ID NO: 4686545 - DNA, 25 bp, Homo sapien
gaggtttggccatgagtacttccag

SEQ ID NO: 4686546 - DNA, 25 bp, Homo sapien
agtacttccagctcaacttctaaag

SEQ ID NO: 4686547 - DNA, 25 bp, Homo sapien
tctggctccgaggtttggccatgag

SEQ ID NO: 4686548 - DNA, 25 bp, Homo sapien
tcctctctgagggacatgaatctgt

SEQ ID NO: 4686549 - DNA, 25 bp, Homo sapien
agcttcatgcccctgcgatgaccag

SEQ ID NO: 4686550 - DNA, 25 bp, Homo sapien
tgacattctgctccactccgacata

SEQ ID NO: 4686551 - DNA, 25 bp, Homo sapien
gatgaccagctgatctctatgcctt

SEQ ID NO: 4686552 - DNA, 25 bp, Homo sapien
gggtgacctcccaaacctagcatac

SEQ ID NO: 4686553 - DNA, 25 bp, Homo sapien
caccttctgtccccacgggtgacct

SEQ ID NO: 4686554 - DNA, 25 bp, Homo sapien
ccaaacctagcataccattggcatt

SEQ ID NO: 4686555 - DNA, 25 bp, Homo sapien
cacgggtgacctcccaaacctagca

SEQ ID NO: 4686556 - DNA, 25 bp, Homo sapien
gtcccaggacttctcgtgtctgacc

SEQ ID NO: 4686557 - DNA, 25 bp, Homo sapien
gtctggcatcttgcactgaattaaa

SEQ ID NO: 4686558 - DNA, 25 bp, Homo sapien
cggagaggggcttgatctgtcataa

SEQ ID NO: 4686559 - DNA, 25 bp, Homo sapien
tctcgtgtctgaccccatcggagag

SEQ ID NO: 4686560 - DNA, 25 bp, Homo sapien
aacgctctctggaaacatttgctga

SEQ ID NO: 4686561 - DNA, 25 bp, Homo sapien
gcttggtgcaggaaacgctctctgg

SEQ ID NO: 4686562 - DNA, 25 bp, Homo sapien
tggtgcaggaaacgctctctggaaa

SEQ ID NO: 4686563 - DNA, 25 bp, Homo sapien
gcaggaaacgctctctggaaacatt

SEQ ID NO: 4686564 - DNA, 25 bp, Homo sapien
gagcttctagctccttcatggtcac

SEQ ID NO: 4686565 - DNA, 25 bp, Homo sapien
tctagctccttcatggtcacttata

SEQ ID NO: 4686566 - DNA, 25 bp, Homo sapien
gcttctagctccttcatggtcactt

SEQ ID NO: 4686567 - DNA, 25 bp, Homo sapien
gctccttcatggtcacttatatata

SEQ ID NO: 4686568 - DNA, 25 bp, Homo sapien
caggtgtgtgaccaccttaggcatc

SEQ ID NO: 4686569 - DNA, 25 bp, Homo sapien
tcagggacctgccagtgcactgacc

SEQ ID NO: 4686570 - DNA, 25 bp, Homo sapien
tgtgtgaccaccttaggcatctcag

SEQ ID NO: 4686571 - DNA, 25 bp, Homo sapien
accttaggcatctcagtcctgccag

SEQ ID NO: 4686572 - DNA, 25 bp, Homo sapien
ttggatctgatacccttgctgagtt

SEQ ID NO: 4686573 - DNA, 25 bp, Homo sapien
tctcttggatctgatacccttgctg

SEQ ID NO: 4686574 - DNA, 25 bp, Homo sapien
ttgctgagttcccagctcctctgac

SEQ ID NO: 4686575 - DNA, 25 bp, Homo sapien
tggatctcttggatctgataccctt

SEQ ID NO: 4686576 - DNA, 25 bp, Homo sapien
tcccactgtggtttcaacaggagtt

SEQ ID NO: 4686577 - DNA, 25 bp, Homo sapien
catcccactgtggtttcaacaggag

SEQ ID NO: 4686578 - DNA, 25 bp, Homo sapien
tggtttcaacaggagttcaaaagaa

SEQ ID NO: 4686579 - DNA, 25 bp, Homo sapien
cactgtggtttcaacaggagttcaa

SEQ ID NO: 4686580 - DNA, 25 bp, Homo sapien
gaagaggctctatctaaggccggag

SEQ ID NO: 4686581 - DNA, 25 bp, Homo sapien
taaagccattgccagagatattggg

SEQ ID NO: 4686582 - DNA, 25 bp, Homo sapien
aagatccatgttccctgaagaggct

SEQ ID NO: 4686583 - DNA, 25 bp, Homo sapien
taaacctttcggaagctaagatcca

SEQ ID NO: 4686584 - DNA, 25 bp, Homo sapien
ctctgaatcccagtagaagtccagg

SEQ ID NO: 4686585 - DNA, 25 bp, Homo sapien
ctccagctgcaggttaacctgacag

SEQ ID NO: 4686586 - DNA, 25 bp, Homo sapien
cagctgcaggttaacctgacagaag

SEQ ID NO: 4686587 - DNA, 25 bp, Homo sapien
tctgaatcccagtagaagtccaggc

SEQ ID NO: 4686588 - DNA, 25 bp, Homo sapien
cctgagaattgttccctctttggca

SEQ ID NO: 4686589 - DNA, 25 bp, Homo sapien
gcatccaggttgacttgggcaggct

SEQ ID NO: 4686590 - DNA, 25 bp, Homo sapien
aatgctcagggagtccctccaggaa

SEQ ID NO: 4686591 - DNA, 25 bp, Homo sapien
cattatctggagtgtcctggtggga

SEQ ID NO: 4686592 - DNA, 25 bp, Homo sapien
gcctctgcggcacacagatcatgtg

SEQ ID NO: 4686593 - DNA, 25 bp, Homo sapien
caaatctcagctccaatgcggtgtg

SEQ ID NO: 4686594 - DNA, 25 bp, Homo sapien
aaagagcgctcgtggagttagacac

SEQ ID NO: 4686595 - DNA, 25 bp, Homo sapien
cctcatgggctagatgtgaaatact

SEQ ID NO: 4686596 - DNA, 25 bp, Homo sapien
ggagtgccacacaaacgttatctat

SEQ ID NO: 4686597 - DNA, 25 bp, Homo sapien
tgttagttatcacaatgcctgagtc

SEQ ID NO: 4686598 - DNA, 25 bp, Homo sapien
tctagggcatgttactcagtctctc

SEQ ID NO: 4686599 - DNA, 25 bp, Homo sapien
gaaagctcagcctttaaaacatgca

SEQ ID NO: 4686600 - DNA, 25 bp, Homo sapien
gtgatgatcaatgggcctcccggca

SEQ ID NO: 4686601 - DNA, 25 bp, Homo sapien
tcctgtctgctgtgcgtgtgcatga

SEQ ID NO: 4686602 - DNA, 25 bp, Homo sapien
cctttttgacccaggtccgtgatga

SEQ ID NO: 4686603 - DNA, 25 bp, Homo sapien
catgagcataccgtttggatttgag

SEQ ID NO: 4686604 - DNA, 25 bp, Homo sapien
tcataatcattcatgggcttccaag

SEQ ID NO: 4686605 - DNA, 25 bp, Homo sapien
tagggccaacctgtagcttcccgct

SEQ ID NO: 4686606 - DNA, 25 bp, Homo sapien
gaggtgggtaatatacctggactta

SEQ ID NO: 4686607 - DNA, 25 bp, Homo sapien
tatacctggacttagggccaacctg

SEQ ID NO: 4686608 - DNA, 25 bp, Homo sapien
gaaaggcacacgcatactattggag

SEQ ID NO: 4686609 - DNA, 25 bp, Homo sapien
cacagtaaggattagttaaacattc

SEQ ID NO: 4686610 - DNA, 25 bp, Homo sapien
ttctgtttggcttgagatccagatc

SEQ ID NO: 4686611 - DNA, 25 bp, Homo sapien
tctttaatccttgctcaggttgaag

SEQ ID NO: 4686612 - DNA, 25 bp, Homo sapien
atccatgagcatttgcctctattcc

SEQ ID NO: 4686613 - DNA, 25 bp, Homo sapien
ccatgagcatttgcctctattccct

SEQ ID NO: 4686614 - DNA, 25 bp, Homo sapien
atgagcatttgcctctattcccttt

SEQ ID NO: 4686615 - DNA, 25 bp, Homo sapien
tccatgagcatttgcctctattccc

SEQ ID NO: 4686616 - DNA, 25 bp, Homo sapien
tgtgccaatttgtccatgaccttga

SEQ ID NO: 4686617 - DNA, 25 bp, Homo sapien
agagacctgagtgtcttattcctgt

SEQ ID NO: 4686618 - DNA, 25 bp, Homo sapien
tgctcttgcactattcatcaccagc

SEQ ID NO: 4686619 - DNA, 25 bp, Homo sapien
tctttttctgtaactctggtgggct

SEQ ID NO: 4686620 - DNA, 25 bp, Homo sapien
ccatttcataccagagcctgcccat

SEQ ID NO: 4686621 - DNA, 25 bp, Homo sapien
cagtaggaattctggacccttgatg

SEQ ID NO: 4686622 - DNA, 25 bp, Homo sapien
cccttgatgggcctgttctcagcca

SEQ ID NO: 4686623 - DNA, 25 bp, Homo sapien
agtaggaattctggacccttgatgg

SEQ ID NO: 4686624 - DNA, 25 bp, Homo sapien
tggacccttgatgggcctgttctca

SEQ ID NO: 4686625 - DNA, 25 bp, Homo sapien
gatgccattcttgttgtgggagaaa

SEQ ID NO: 4686626 - DNA, 25 bp, Homo sapien
tcagggatctgcctttcacagtgat

SEQ ID NO: 4686627 - DNA, 25 bp, Homo sapien
gcctctgaaaagacattggctcagg

SEQ ID NO: 4686628 - DNA, 25 bp, Homo sapien
cctttcttggatgattctgcctctg

SEQ ID NO: 4686629 - DNA, 25 bp, Homo sapien
cctccccacaaaaggacagcaggtg

SEQ ID NO: 4686630 - DNA, 25 bp, Homo sapien
ttccaggagggaacagacgttctgt

SEQ ID NO: 4686631 - DNA, 25 bp, Homo sapien
gggaacagacgttctgtcctcccca

SEQ ID NO: 4686632 - DNA, 25 bp, Homo sapien
tgtcctccccacaaaaggacagcag

SEQ ID NO: 4686633 - DNA, 25 bp, Homo sapien
ctcctagacttagctctagcatctg

SEQ ID NO: 4686634 - DNA, 25 bp, Homo sapien
ttagctctagcatctgctctaaggg

SEQ ID NO: 4686635 - DNA, 25 bp, Homo sapien
tagacttagctctagcatctgctct

SEQ ID NO: 4686636 - DNA, 25 bp, Homo sapien
gacttagctctagcatctgctctaa

SEQ ID NO: 4686637 - DNA, 25 bp, Homo sapien
cagcagtaaagagatttccagtcac

SEQ ID NO: 4686638 - DNA, 25 bp, Homo sapien
ttagcagaatcagcagtaaagagat

SEQ ID NO: 4686639 - DNA, 25 bp, Homo sapien
gctttgcaagcagccgaaaagggaa

SEQ ID NO: 4686640 - DNA, 25 bp, Homo sapien
acatttccattagcagaatcagcag

SEQ ID NO: 4686641 - DNA, 25 bp, Homo sapien
taggaacttcaggtgtgacagcctc

SEQ ID NO: 4686642 - DNA, 25 bp, Homo sapien
tgcaggcgtttcttatataggaact

SEQ ID NO: 4686643 - DNA, 25 bp, Homo sapien
tcatgaccaagaagctgcaggcgtt

SEQ ID NO: 4686644 - DNA, 25 bp, Homo sapien
gagcaccttgttctgtgctgccagg

SEQ ID NO: 4686645 - DNA, 25 bp, Homo sapien
atactggaatatgtaagcatccaag

SEQ ID NO: 4686646 - DNA, 25 bp, Homo sapien
tactggaatatgtaagcatccaagt

SEQ ID NO: 4686647 - DNA, 25 bp, Homo sapien
tcggcgtccgccgtctccgcagctg

SEQ ID NO: 4686648 - DNA, 25 bp, Homo sapien
cgctccttagctcgggcgtcctggt

SEQ ID NO: 4686649 - DNA, 25 bp, Homo sapien
ggctctctccgctccttagctcggg

SEQ ID NO: 4686650 - DNA, 25 bp, Homo sapien
ggcgtcctggttcgcttcggcgtcc

SEQ ID NO: 4686651 - DNA, 25 bp, Homo sapien
tctggtgcccacagacatgtgctct

SEQ ID NO: 4686652 - DNA, 25 bp, Homo sapien
tctgtgtagctgtccactcctgatt

SEQ ID NO: 4686653 - DNA, 25 bp, Homo sapien
cttctttaggtacaagcctctctgt

SEQ ID NO: 4686654 - DNA, 25 bp, Homo sapien
gacatgtgctctgcatttggctcgt

SEQ ID NO: 4686655 - DNA, 25 bp, Homo sapien
tgttcagtgctaaaaagaaaatatt

SEQ ID NO: 4686656 - DNA, 25 bp, Homo sapien
tttgttcagtgctaaaaagaaaata

SEQ ID NO: 4686657 - DNA, 25 bp, Homo sapien
ctttgttcagtgctaaaaagaaaat

SEQ ID NO: 4686658 - DNA, 25 bp, Homo sapien
ttcagtgctaaaaagaaaatatttc

SEQ ID NO: 4686659 - DNA, 25 bp, Homo sapien
gcctcctgtttgtggacacccttgc

SEQ ID NO: 4686660 - DNA, 25 bp, Homo sapien
tctccactgattattccacactata

SEQ ID NO: 4686661 - DNA, 25 bp, Homo sapien
tcacctgttgctcagtgggttgcat

SEQ ID NO: 4686662 - DNA, 25 bp, Homo sapien
tgcctggcaccgatcaagaattctc

SEQ ID NO: 4686663 - DNA, 25 bp, Homo sapien
agcagttagtgtttttgatgctgag

SEQ ID NO: 4686664 - DNA, 25 bp, Homo sapien
tttttgatgctgagcccccttggtc

SEQ ID NO: 4686665 - DNA, 25 bp, Homo sapien
taagaccccattcgaaaattgcttc

SEQ ID NO: 4686666 - DNA, 25 bp, Homo sapien
tgcttctgaacttgtctattgttaa

SEQ ID NO: 4686667 - DNA, 25 bp, Homo sapien
accccattcgaaaattgcttctgaa

SEQ ID NO: 4686668 - DNA, 25 bp, Homo sapien
agaccccattcgaaaattgcttctg

SEQ ID NO: 4686669 - DNA, 25 bp, Homo sapien
ccagcaggcgggcatagcaaaaaag

SEQ ID NO: 4686670 - DNA, 25 bp, Homo sapien
caacctgggcaggtgtgaccagcag

SEQ ID NO: 4686671 - DNA, 25 bp, Homo sapien
caggcgggcatagcaaaaaagccat

SEQ ID NO: 4686672 - DNA, 25 bp, Homo sapien
cagcaggctctctgatggcctctgc

SEQ ID NO: 4686673 - DNA, 25 bp, Homo sapien
cagtatgactacaagccagttggtc

SEQ ID NO: 4686674 - DNA, 25 bp, Homo sapien
tgactacaagccagttggtcattag

SEQ ID NO: 4686675 - DNA, 25 bp, Homo sapien
ttctctgaagctactgttcttttcc

SEQ ID NO: 4686676 - DNA, 25 bp, Homo sapien
tgatattcccagtatgactacaagc

SEQ ID NO: 4686677 - DNA, 25 bp, Homo sapien
tggccataccctctcaggccacagg

SEQ ID NO: 4686678 - DNA, 25 bp, Homo sapien
ggccataccctctcaggccacaggg

SEQ ID NO: 4686679 - DNA, 25 bp, Homo sapien
attgggtctgactgtgcagaggcct

SEQ ID NO: 4686680 - DNA, 25 bp, Homo sapien
ttcagattgggtctgactgtgcaga

SEQ ID NO: 4686681 - DNA, 25 bp, Homo sapien
gggctataggcacaaccaccttctg

SEQ ID NO: 4686682 - DNA, 25 bp, Homo sapien
cagctgccctcaatgacaagatgtc

SEQ ID NO: 4686683 - DNA, 25 bp, Homo sapien
aagatgtcgttcacccagggccaag

SEQ ID NO: 4686684 - DNA, 25 bp, Homo sapien
caatgacaagatgtcgttcacccag

SEQ ID NO: 4686685 - DNA, 25 bp, Homo sapien
ttccacacagagaggccgctaagct

SEQ ID NO: 4686686 - DNA, 25 bp, Homo sapien
tgcgagtgtcgtggacagcatttcc

SEQ ID NO: 4686687 - DNA, 25 bp, Homo sapien
tggttccattaagccagtctggtct

SEQ ID NO: 4686688 - DNA, 25 bp, Homo sapien
agcatttcctatgacggaggctgcc

SEQ ID NO: 4686689 - DNA, 25 bp, Homo sapien
ttcgatgactcaacgaccggctgag

SEQ ID NO: 4686690 - DNA, 25 bp, Homo sapien
cagggcattcgatgactcaacgacc

SEQ ID NO: 4686691 - DNA, 25 bp, Homo sapien
ctgagtgcctctgaaatagggctgg

SEQ ID NO: 4686692 - DNA, 25 bp, Homo sapien
tcaacgaccggctgagtgcctctga

SEQ ID NO: 4686693 - DNA, 25 bp, Homo sapien
tcactcgttggagtaagaataaggg

SEQ ID NO: 4686694 - DNA, 25 bp, Homo sapien
gaactaagtaggctgcgttaaatgt

SEQ ID NO: 4686695 - DNA, 25 bp, Homo sapien
taagtaggctgcgttaaatgtcttc

SEQ ID NO: 4686696 - DNA, 25 bp, Homo sapien
agtaggctgcgttaaatgtcttccc

SEQ ID NO: 4686697 - DNA, 25 bp, Homo sapien
atgactcagattcatacataatctt

SEQ ID NO: 4686698 - DNA, 25 bp, Homo sapien
tgactcagattcatacataatcttt

SEQ ID NO: 4686699 - DNA, 25 bp, Homo sapien
gactcagattcatacataatctttt

SEQ ID NO: 4686700 - DNA, 25 bp, Homo sapien
tagagtccccattgcatagctggga

SEQ ID NO: 4686701 - DNA, 25 bp, Homo sapien
catagctgggatattctttgagcca

SEQ ID NO: 4686702 - DNA, 25 bp, Homo sapien
cattgcatagctgggatattctttg

SEQ ID NO: 4686703 - DNA, 25 bp, Homo sapien
gactggtggtagagtccccattgca

SEQ ID NO: 4686704 - DNA, 25 bp, Homo sapien
cttcctgttgtagggtgagtgataa

SEQ ID NO: 4686705 - DNA, 25 bp, Homo sapien
tgttgtagggtgagtgataatttga

SEQ ID NO: 4686706 - DNA, 25 bp, Homo sapien
tttccttcctgttgtagggtgagtg

SEQ ID NO: 4686707 - DNA, 25 bp, Homo sapien
tttatcttcatcaagtcttcctcct

SEQ ID NO: 4686708 - DNA, 25 bp, Homo sapien
ctgattttagcacccgttttaattg

SEQ ID NO: 4686709 - DNA, 25 bp, Homo sapien
agctgattttagcacccgttttaat

SEQ ID NO: 4686710 - DNA, 25 bp, Homo sapien
gggactcatcaaaggatacctaact

SEQ ID NO: 4686711 - DNA, 25 bp, Homo sapien
tttctgcattctgggacttttactt

SEQ ID NO: 4686712 - DNA, 25 bp, Homo sapien
aaggatacctaactatcattttgac

SEQ ID NO: 4686713 - DNA, 25 bp, Homo sapien
gtgggcatagaagggactcatcaaa

SEQ ID NO: 4686714 - DNA, 25 bp, Homo sapien
attttgtgtgatgggtattctggcc

SEQ ID NO: 4686715 - DNA, 25 bp, Homo sapien
caactttagcagtcaatttggcata

SEQ ID NO: 4686716 - DNA, 25 bp, Homo sapien
gcattgtagaaatcataacctgtag

SEQ ID NO: 4686717 - DNA, 25 bp, Homo sapien
cctgtaggggcagttggaagcttat

SEQ ID NO: 4686718 - DNA, 25 bp, Homo sapien
tatttcttgattgtaaggctatgtc

SEQ ID NO: 4686719 - DNA, 25 bp, Homo sapien
gggctttgtctatttcttgattgta

SEQ ID NO: 4686720 - DNA, 25 bp, Homo sapien
tcagtaggggctttgtctatttctt

SEQ ID NO: 4686721 - DNA, 25 bp, Homo sapien
tgattgtaaggctatgtctgtttcc

SEQ ID NO: 4686722 - DNA, 25 bp, Homo sapien
gacagctgctgtgctgattacatca

SEQ ID NO: 4686723 - DNA, 25 bp, Homo sapien
cagatggaggaatttggtcacagtg

SEQ ID NO: 4686724 - DNA, 25 bp, Homo sapien
tgtgtttgattatccaccaaggaaa

SEQ ID NO: 4686725 - DNA, 25 bp, Homo sapien
ggtcacagtgactgaaggcactttg

SEQ ID NO: 4686726 - DNA, 25 bp, Homo sapien
gtgattagagaaatagcagggacca

SEQ ID NO: 4686727 - DNA, 25 bp, Homo sapien
gttgcactggtgattttggagctct

SEQ ID NO: 4686728 - DNA, 25 bp, Homo sapien
ttagagaaatagcagggaccaggac

SEQ ID NO: 4686729 - DNA, 25 bp, Homo sapien
gctctcgtcccacagaggaatacct

SEQ ID NO: 4686730 - DNA, 25 bp, Homo sapien
catattggcagttaaaaccacatac

SEQ ID NO: 4686731 - DNA, 25 bp, Homo sapien
tattggcagttaaaaccacatacac

SEQ ID NO: 4686732 - DNA, 25 bp, Homo sapien
attggcagttaaaaccacatacacc

SEQ ID NO: 4686733 - DNA, 25 bp, Homo sapien
gtcatattggcagttaaaaccacat

SEQ ID NO: 4686734 - DNA, 25 bp, Homo sapien
tgggagccactttcctaaatgtgaa

SEQ ID NO: 4686735 - DNA, 25 bp, Homo sapien
tgatacagaatcgacaaggtcttgc

SEQ ID NO: 4686736 - DNA, 25 bp, Homo sapien
catggctgccagagctttaatgtta

SEQ ID NO: 4686737 - DNA, 25 bp, Homo sapien
aatttggcagcctggtctgagaagg

SEQ ID NO: 4686738 - DNA, 25 bp, Homo sapien
tagccaacagcatcgcctccactcc

SEQ ID NO: 4686739 - DNA, 25 bp, Homo sapien
taatcaagatgggtcgctggagtca

SEQ ID NO: 4686740 - DNA, 25 bp, Homo sapien
tggcaacagtgctgtttccatggtg

SEQ ID NO: 4686741 - DNA, 25 bp, Homo sapien
cacagctggcaacagtgctgtttcc

SEQ ID NO: 4686742 - DNA, 25 bp, Homo sapien
catgaagtttatcagcttttgattc

SEQ ID NO: 4686743 - DNA, 25 bp, Homo sapien
gaagtttatcagcttttgattcata

SEQ ID NO: 4686744 - DNA, 25 bp, Homo sapien
tgtcatgaagtttatcagcttttga

SEQ ID NO: 4686745 - DNA, 25 bp, Homo sapien
gtcatgaagtttatcagcttttgat

SEQ ID NO: 4686746 - DNA, 25 bp, Homo sapien
tgctgtgtgtagaattatgtgttga

SEQ ID NO: 4686747 - DNA, 25 bp, Homo sapien
tttatcaacctgaaagttcatggtt

SEQ ID NO: 4686748 - DNA, 25 bp, Homo sapien
tatacttctcatatctcgcatatct

SEQ ID NO: 4686749 - DNA, 25 bp, Homo sapien
tggatattcgtcctttgttgtcata

SEQ ID NO: 4686750 - DNA, 25 bp, Homo sapien
cttgggtttttgatcatctcttgta

SEQ ID NO: 4686751 - DNA, 25 bp, Homo sapien
tttgatcatctcttgtacttgctac

SEQ ID NO: 4686752 - DNA, 25 bp, Homo sapien
ttgtacttgctactttcaggttctc

SEQ ID NO: 4686753 - DNA, 25 bp, Homo sapien
attcttttgaattccggtcttgaat

SEQ ID NO: 4686754 - DNA, 25 bp, Homo sapien
gtgcgggcgcaagtcgcgggactgg

SEQ ID NO: 4686755 - DNA, 25 bp, Homo sapien
aggagtgcgggcgcaagtcgcggga

SEQ ID NO: 4686756 - DNA, 25 bp, Homo sapien
gcgggcgcaagtcgcgggactggca

SEQ ID NO: 4686757 - DNA, 25 bp, Homo sapien
gagtgcgggcgcaagtcgcgggact

SEQ ID NO: 4686758 - DNA, 25 bp, Homo sapien
agctgaattccggttctgcgatacg

SEQ ID NO: 4686759 - DNA, 25 bp, Homo sapien
tacgctggaatgtccaagtcctcag

SEQ ID NO: 4686760 - DNA, 25 bp, Homo sapien
tctgcgatacgctggaatgtccaag

SEQ ID NO: 4686761 - DNA, 25 bp, Homo sapien
gaattccggttctgcgatacgctgg

SEQ ID NO: 4686762 - DNA, 25 bp, Homo sapien
gctgagttacgaagggatcatttct

SEQ ID NO: 4686763 - DNA, 25 bp, Homo sapien
ttgcccatttgtgtgggatgcattg

SEQ ID NO: 4686764 - DNA, 25 bp, Homo sapien
ctcttgatttgggaaaacgatggac

SEQ ID NO: 4686765 - DNA, 25 bp, Homo sapien
ttatcactgtatatgagctgctgag

SEQ ID NO: 4686766 - DNA, 25 bp, Homo sapien
tcctgaaggttcaaagatagggaga

SEQ ID NO: 4686767 - DNA, 25 bp, Homo sapien
gattcttaaggcatcaggaattcga

SEQ ID NO: 4686768 - DNA, 25 bp, Homo sapien
tagtaaatagtagatctgaggctca

SEQ ID NO: 4686769 - DNA, 25 bp, Homo sapien
gaagacatgggtgtaaaccttgaca

SEQ ID NO: 4686770 - DNA, 25 bp, Homo sapien
caggagactgtgtcactctgctcag

SEQ ID NO: 4686771 - DNA, 25 bp, Homo sapien
tcacttttgcctcatcctttagacg

SEQ ID NO: 4686772 - DNA, 25 bp, Homo sapien
ccgttgtaatcaatgctctagatca

SEQ ID NO: 4686773 - DNA, 25 bp, Homo sapien
tcaatgatcctcaactgcaggagac

SEQ ID NO: 4686774 - DNA, 25 bp, Homo sapien
tattcatcacctatctcattgcaca

SEQ ID NO: 4686775 - DNA, 25 bp, Homo sapien
tttccttagggctctgtctgctctt

SEQ ID NO: 4686776 - DNA, 25 bp, Homo sapien
tcatctaatgcgtggattcatccat

SEQ ID NO: 4686777 - DNA, 25 bp, Homo sapien
caaaaggtttgtggtggcttacagg

SEQ ID NO: 4686778 - DNA, 25 bp, Homo sapien
aatcctctgaagtatggttttcagg

SEQ ID NO: 4686779 - DNA, 25 bp, Homo sapien
cataatcctctgaagtatggttttc

SEQ ID NO: 4686780 - DNA, 25 bp, Homo sapien
tcctctgaagtatggttttcaggat

SEQ ID NO: 4686781 - DNA, 25 bp, Homo sapien
tctgaagtatggttttcaggattcc

SEQ ID NO: 4686782 - DNA, 25 bp, Homo sapien
tcactaagatatgcccagaggtaca

SEQ ID NO: 4686783 - DNA, 25 bp, Homo sapien
gcagttattacctccctgtcaccta

SEQ ID NO: 4686784 - DNA, 25 bp, Homo sapien
ctctgtagatacagagacagctggc

SEQ ID NO: 4686785 - DNA, 25 bp, Homo sapien
gtctgtgtgttctcaacctggctcc

SEQ ID NO: 4686786 - DNA, 25 bp, Homo sapien
catcctccccttccaaaggtcgaag

SEQ ID NO: 4686787 - DNA, 25 bp, Homo sapien
agtgaaagcggcaaccttagcattc

SEQ ID NO: 4686788 - DNA, 25 bp, Homo sapien
gaaagcggcaaccttagcattctgg

SEQ ID NO: 4686789 - DNA, 25 bp, Homo sapien
gcaaccttagcattctggacttttg

SEQ ID NO: 4686790 - DNA, 25 bp, Homo sapien
gcggcaaccttagcattctggactt

SEQ ID NO: 4686791 - DNA, 25 bp, Homo sapien
ccgtctgaccgagcagtttctgagg

SEQ ID NO: 4686792 - DNA, 25 bp, Homo sapien
cagtggccctgtgaatgcgtggctc

SEQ ID NO: 4686793 - DNA, 25 bp, Homo sapien
gaatgcgtggctcgctatcaccgtc

SEQ ID NO: 4686794 - DNA, 25 bp, Homo sapien
gagccgccccacagcaattggtgta

SEQ ID NO: 4686795 - DNA, 25 bp, Homo sapien
ccagccaggcgcgaggcagacatca

SEQ ID NO: 4686796 - DNA, 25 bp, Homo sapien
agctttctggtctcacgcaggagag

SEQ ID NO: 4686797 - DNA, 25 bp, Homo sapien
cagccaggcgcgaggcagacatcat

SEQ ID NO: 4686798 - DNA, 25 bp, Homo sapien
tttctggtctcacgcaggagaggaa

SEQ ID NO: 4686799 - DNA, 25 bp, Homo sapien
cagaagtgagggaaagttcagagga

SEQ ID NO: 4686800 - DNA, 25 bp, Homo sapien
ggaaagttcagaggagctgactcca

SEQ ID NO: 4686801 - DNA, 25 bp, Homo sapien
aaataaacaaaccagggcacacagt

SEQ ID NO: 4686802 - DNA, 25 bp, Homo sapien
cacacagtgagaagttctgggcaga

SEQ ID NO: 4686803 - DNA, 25 bp, Homo sapien
gctcttctgtgtggtttagggccaa

SEQ ID NO: 4686804 - DNA, 25 bp, Homo sapien
gccagctcttctgtgtggtttaggg

SEQ ID NO: 4686805 - DNA, 25 bp, Homo sapien
tcttctgtgtggtttagggccaagt

SEQ ID NO: 4686806 - DNA, 25 bp, Homo sapien
cagctcttctgtgtggtttagggcc

SEQ ID NO: 4686807 - DNA, 25 bp, Homo sapien
ctccgtgataaaacggcagcattta

SEQ ID NO: 4686808 - DNA, 25 bp, Homo sapien
caagaagcaatggaatcggggtgaa

SEQ ID NO: 4686809 - DNA, 25 bp, Homo sapien
gataaaacggcagcatttagcaaga

SEQ ID NO: 4686810 - DNA, 25 bp, Homo sapien
gtgataaaacggcagcatttagcaa

SEQ ID NO: 4686811 - DNA, 25 bp, Homo sapien
gcattgataagtaatattaggaacc

SEQ ID NO: 4686812 - DNA, 25 bp, Homo sapien
cattgataagtaatattaggaacca

SEQ ID NO: 4686813 - DNA, 25 bp, Homo sapien
gggaaactgaagaagctatagctgc

SEQ ID NO: 4686814 - DNA, 25 bp, Homo sapien
aatgcctcaggggattaaagctcag

SEQ ID NO: 4686815 - DNA, 25 bp, Homo sapien
ctatagctgcctaaatgcctcaggg

SEQ ID NO: 4686816 - DNA, 25 bp, Homo sapien
caggggattaaagctcaggtccagg

SEQ ID NO: 4686817 - DNA, 25 bp, Homo sapien
tgtgcagtatgtaaaagtggattca

SEQ ID NO: 4686818 - DNA, 25 bp, Homo sapien
caaaccaagctttccagtccaataa

SEQ ID NO: 4686819 - DNA, 25 bp, Homo sapien
acaggacaatgaacacctcaccttg

SEQ ID NO: 4686820 - DNA, 25 bp, Homo sapien
gagaatagaggtagcttgctcaagg

SEQ ID NO: 4686821 - DNA, 25 bp, Homo sapien
aacttgatagtccagaaaaggctcc

SEQ ID NO: 4686822 - DNA, 25 bp, Homo sapien
gatgctagatttgtctccacagcca

SEQ ID NO: 4686823 - DNA, 25 bp, Homo sapien
aaaaggctcccagggctaaactctg

SEQ ID NO: 4686824 - DNA, 25 bp, Homo sapien
tgtagaacccgcaagtctgtgcaat

SEQ ID NO: 4686825 - DNA, 25 bp, Homo sapien
tagtcacactcaccagggaaaatga

SEQ ID NO: 4686826 - DNA, 25 bp, Homo sapien
agttcatagggttcagggacaggtc

SEQ ID NO: 4686827 - DNA, 25 bp, Homo sapien
tggtcaaattgcacaggccctctag

SEQ ID NO: 4686828 - DNA, 25 bp, Homo sapien
ggacttctaaaccagccagaccttg

SEQ ID NO: 4686829 - DNA, 25 bp, Homo sapien
ggtaataacaccattgaagctcaga

SEQ ID NO: 4686830 - DNA, 25 bp, Homo sapien
gatgttctagttgttctaagcccaa

SEQ ID NO: 4686831 - DNA, 25 bp, Homo sapien
taagcccaagaagtttgaactcatg

SEQ ID NO: 4686832 - DNA, 25 bp, Homo sapien
taggctggttgtcccaaaatcactt

SEQ ID NO: 4686833 - DNA, 25 bp, Homo sapien
gttttcctggaaagaattgccagcc

SEQ ID NO: 4686834 - DNA, 25 bp, Homo sapien
gacaactgctccagttgacactgag

SEQ ID NO: 4686835 - DNA, 25 bp, Homo sapien
ctgtaatcaagaacctggagggagt

SEQ ID NO: 4686836 - DNA, 25 bp, Homo sapien
tgccagccattttcaagacttcgag

SEQ ID NO: 4686837 - DNA, 25 bp, Homo sapien
gacaggtgatattcaaactcagcac

SEQ ID NO: 4686838 - DNA, 25 bp, Homo sapien
cctgcttatctgaaggtgttgcaca

SEQ ID NO: 4686839 - DNA, 25 bp, Homo sapien
ttcacaagtacaagcaaagtcattc

SEQ ID NO: 4686840 - DNA, 25 bp, Homo sapien
tgcaggaaactctggtgttcacaag

SEQ ID NO: 4686841 - DNA, 25 bp, Homo sapien
tgaagatgataccagcacgactgct

SEQ ID NO: 4686842 - DNA, 25 bp, Homo sapien
gatactacaagcacactgaggaccg

SEQ ID NO: 4686843 - DNA, 25 bp, Homo sapien
tgaggaccgacacaccaatgatggt

SEQ ID NO: 4686844 - DNA, 25 bp, Homo sapien
tattcaaagatacaccagcggctct

SEQ ID NO: 4686845 - DNA, 25 bp, Homo sapien
atccagcagggcttttctgagtcgt

SEQ ID NO: 4686846 - DNA, 25 bp, Homo sapien
tccagcagggcttttctgagtcgtc

SEQ ID NO: 4686847 - DNA, 25 bp, Homo sapien
ccagcagggcttttctgagtcgtct

SEQ ID NO: 4686848 - DNA, 25 bp, Homo sapien
catccagcagggcttttctgagtcg

SEQ ID NO: 4686849 - DNA, 25 bp, Homo sapien
tagatgttgcttcctgccaattgca

SEQ ID NO: 4686850 - DNA, 25 bp, Homo sapien
tgcttcctgccaattgcatcctgta

SEQ ID NO: 4686851 - DNA, 25 bp, Homo sapien
gttgcttcctgccaattgcatcctg

SEQ ID NO: 4686852 - DNA, 25 bp, Homo sapien
tcagatagatgttgcttcctgccaa

SEQ ID NO: 4686853 - DNA, 25 bp, Homo sapien
tagcataaggcctgacatgtggcag

SEQ ID NO: 4686854 - DNA, 25 bp, Homo sapien
gctccttgagattagcagccctgca

SEQ ID NO: 4686855 - DNA, 25 bp, Homo sapien
gagttggttgaaatgcccacctgga

SEQ ID NO: 4686856 - DNA, 25 bp, Homo sapien
tagtgcaccatggaattactcaccc

SEQ ID NO: 4686857 - DNA, 25 bp, Homo sapien
tagaacatgctcgagaatgaccagg

SEQ ID NO: 4686858 - DNA, 25 bp, Homo sapien
tgtccatgataagaccaggaagcgg

SEQ ID NO: 4686859 - DNA, 25 bp, Homo sapien
gcatcttgcatcaggagccccttga

SEQ ID NO: 4686860 - DNA, 25 bp, Homo sapien
ggtcaaggagcattgcccaacagga

SEQ ID NO: 4686861 - DNA, 25 bp, Homo sapien
ggatgttcaatcaccctagacctgc

SEQ ID NO: 4686862 - DNA, 25 bp, Homo sapien
tacagatatgatcatgcggacacac

SEQ ID NO: 4686863 - DNA, 25 bp, Homo sapien
gaacgtatccaccaagcataaggga

SEQ ID NO: 4686864 - DNA, 25 bp, Homo sapien
tatatgaggtttggtaccatctgcg

SEQ ID NO: 4686865 - DNA, 25 bp, Homo sapien
gtgagtacagtacagtaagatattt

SEQ ID NO: 4686866 - DNA, 25 bp, Homo sapien
agagaaagaaagagatcacattcac

SEQ ID NO: 4686867 - DNA, 25 bp, Homo sapien
agtacagtacagtaagatattttga

SEQ ID NO: 4686868 - DNA, 25 bp, Homo sapien
agaaagaaagagatcacattcacat

SEQ ID NO: 4686869 - DNA, 25 bp, Homo sapien
tgtatgttagttcctcacttatcca

SEQ ID NO: 4686870 - DNA, 25 bp, Homo sapien
tagttcctcacttatccacagtttc

SEQ ID NO: 4686871 - DNA, 25 bp, Homo sapien
ttcccaggtttcatggtcagttatg

SEQ ID NO: 4686872 - DNA, 25 bp, Homo sapien
ttcatggtcagttatggtctgaaaa

SEQ ID NO: 4686873 - DNA, 25 bp, Homo sapien
gacctgagcctcaaagcacttgaat

SEQ ID NO: 4686874 - DNA, 25 bp, Homo sapien
cactggcttagactttggttttcac

SEQ ID NO: 4686875 - DNA, 25 bp, Homo sapien
taaccaagtgaggtctgccaacaag

SEQ ID NO: 4686876 - DNA, 25 bp, Homo sapien
ctgacaatcccgtgagtagagaatg

SEQ ID NO: 4686877 - DNA, 25 bp, Homo sapien
tctcagtgctgccaccaatgagcag

SEQ ID NO: 4686878 - DNA, 25 bp, Homo sapien
tagaacagtatttagaagccctgct

SEQ ID NO: 4686879 - DNA, 25 bp, Homo sapien
tttgtgagagcagggtgctcttgcc

SEQ ID NO: 4686880 - DNA, 25 bp, Homo sapien
ctgcttctgcggtgaagtggactta

SEQ ID NO: 4686881 - DNA, 25 bp, Homo sapien
cacaagtctgtgatgcccgtcagga

SEQ ID NO: 4686882 - DNA, 25 bp, Homo sapien
gaaaagttcggtgatctccataagg

SEQ ID NO: 4686883 - DNA, 25 bp, Homo sapien
tagatggcatgggagttactgacct

SEQ ID NO: 4686884 - DNA, 25 bp, Homo sapien
tagacatgatagagcaaccctaggc

SEQ ID NO: 4686885 - DNA, 25 bp, Homo sapien
tcaagactattaggacaggacaatt

SEQ ID NO: 4686886 - DNA, 25 bp, Homo sapien
tttgtgccaaaaagcgcatttacac

SEQ ID NO: 4686887 - DNA, 25 bp, Homo sapien
cactgtcacaggagggatcatcttt

SEQ ID NO: 4686888 - DNA, 25 bp, Homo sapien
ctcagaattgtcacttagcactgtc

SEQ ID NO: 4686889 - DNA, 25 bp, Homo sapien
tatagcatcatcaggtttagaacgc

SEQ ID NO: 4686890 - DNA, 25 bp, Homo sapien
tgactaacagtgtaggagcctggga

SEQ ID NO: 4686891 - DNA, 25 bp, Homo sapien
tcacatatggtaagaggcacaaggg

SEQ ID NO: 4686892 - DNA, 25 bp, Homo sapien
caacagcctgttagtggtggagcca

SEQ ID NO: 4686893 - DNA, 25 bp, Homo sapien
gaaagacaggcacattaatggtcac

SEQ ID NO: 4686894 - DNA, 25 bp, Homo sapien
ttttaagccgagacaaacaagacag

SEQ ID NO: 4686895 - DNA, 25 bp, Homo sapien
tatttccgtgtactgaactgccaac

SEQ ID NO: 4686896 - DNA, 25 bp, Homo sapien
catgcagaagcggttaatggagttc

SEQ ID NO: 4686897 - DNA, 25 bp, Homo sapien
tattttttaatctggagccattcaa

SEQ ID NO: 4686898 - DNA, 25 bp, Homo sapien
cttattttttaatctggagccattc

SEQ ID NO: 4686899 - DNA, 25 bp, Homo sapien
ttattttttaatctggagccattca

SEQ ID NO: 4686900 - DNA, 25 bp, Homo sapien
ttttttaatctggagccattcaacc

SEQ ID NO: 4686901 - DNA, 25 bp, Homo sapien
attaatgtccctgttataaggctac

SEQ ID NO: 4686902 - DNA, 25 bp, Homo sapien
ggctacagtcgaagagagaactata

SEQ ID NO: 4686903 - DNA, 25 bp, Homo sapien
tataatttaatgatatctcctgtac

SEQ ID NO: 4686904 - DNA, 25 bp, Homo sapien
ctgttaattctattaatgtccctgt

SEQ ID NO: 4686905 - DNA, 25 bp, Homo sapien
cagaatttcctagctttcctcttgg

SEQ ID NO: 4686906 - DNA, 25 bp, Homo sapien
agctttcctcttggcctcaaactca

SEQ ID NO: 4686907 - DNA, 25 bp, Homo sapien
cccagaatttcctagctttcctctt

SEQ ID NO: 4686908 - DNA, 25 bp, Homo sapien
tccccagaatttcctagctttcctc

SEQ ID NO: 4686909 - DNA, 25 bp, Homo sapien
gactcatactccagtaatgagatct

SEQ ID NO: 4686910 - DNA, 25 bp, Homo sapien
ttctgggattcagcactttgctgct

SEQ ID NO: 4686911 - DNA, 25 bp, Homo sapien
catactccagtaatgagatctctct

SEQ ID NO: 4686912 - DNA, 25 bp, Homo sapien
catgactcatactccagtaatgaga

SEQ ID NO: 4686913 - DNA, 25 bp, Homo sapien
ctagagtcagaagatctgttgcaaa

SEQ ID NO: 4686914 - DNA, 25 bp, Homo sapien
gaatttgcctcctccaatgcttgca

SEQ ID NO: 4686915 - DNA, 25 bp, Homo sapien
ttggagctgaaagaaggcgtccagt

SEQ ID NO: 4686916 - DNA, 25 bp, Homo sapien
cagtggtagaattaggaacataggg

SEQ ID NO: 4686917 - DNA, 25 bp, Homo sapien
cgtctttctgtgccacttgtatctt

SEQ ID NO: 4686918 - DNA, 25 bp, Homo sapien
gtctttctgtgccacttgtatcttt

SEQ ID NO: 4686919 - DNA, 25 bp, Homo sapien
gcttaccactaaatgcaggaccccg

SEQ ID NO: 4686920 - DNA, 25 bp, Homo sapien
gggaattggcttaccactaaatgca

SEQ ID NO: 4686921 - DNA, 25 bp, Homo sapien
accccgaggaatagcgcggctctct

SEQ ID NO: 4686922 - DNA, 25 bp, Homo sapien
atgcaggaccccgaggaatagcgcg

SEQ ID NO: 4686923 - DNA, 25 bp, Homo sapien
tcctgccgctaacacagatggaaac

SEQ ID NO: 4686924 - DNA, 25 bp, Homo sapien
gaaacccaacttcaatcacatccat

SEQ ID NO: 4686925 - DNA, 25 bp, Homo sapien
atagtaacacttcctgccgctaaca

SEQ ID NO: 4686926 - DNA, 25 bp, Homo sapien
taagttcttggaggtgcagataaga

SEQ ID NO: 4686927 - DNA, 25 bp, Homo sapien
tgggctctccaacgtgtcatgttct

SEQ ID NO: 4686928 - DNA, 25 bp, Homo sapien
gctggaactcagactttcaagaccc

SEQ ID NO: 4686929 - DNA, 25 bp, Homo sapien
caatattcattagctggcagtgcac

SEQ ID NO: 4686930 - DNA, 25 bp, Homo sapien
cacatatttgtcatgggctgcttgc

SEQ ID NO: 4686931 - DNA, 25 bp, Homo sapien
ccgaggtttccaaccattaatcctg

SEQ ID NO: 4686932 - DNA, 25 bp, Homo sapien
tgggcaggtgaccacgggcccccga

SEQ ID NO: 4686933 - DNA, 25 bp, Homo sapien
ggtttccaaccattaatcctgagag

SEQ ID NO: 4686934 - DNA, 25 bp, Homo sapien
ggcccccgattcatgcttattgaag

SEQ ID NO: 4686935 - DNA, 25 bp, Homo sapien
ttattagcagagtctacaatttgac

SEQ ID NO: 4686936 - DNA, 25 bp, Homo sapien
tggctttatattaattcggttttca

SEQ ID NO: 4686937 - DNA, 25 bp, Homo sapien
caaagttgtagcattttctttggct

SEQ ID NO: 4686938 - DNA, 25 bp, Homo sapien
cctgatggtggccaatgccattaga

SEQ ID NO: 4686939 - DNA, 25 bp, Homo sapien
catttggaagtttgttccctgagcc

SEQ ID NO: 4686940 - DNA, 25 bp, Homo sapien
aacaattctgcactgtctttgagag

SEQ ID NO: 4686941 - DNA, 25 bp, Homo sapien
taaaatggaagatgtgtttcacgga

SEQ ID NO: 4686942 - DNA, 25 bp, Homo sapien
ttaactccacgtgccagacctctta

SEQ ID NO: 4686943 - DNA, 25 bp, Homo sapien
tctccatagctagctctatttttga

SEQ ID NO: 4686944 - DNA, 25 bp, Homo sapien
tccatagctagctctatttttgaca

SEQ ID NO: 4686945 - DNA, 25 bp, Homo sapien
catagctagctctatttttgacaaa

SEQ ID NO: 4686946 - DNA, 25 bp, Homo sapien
ctctccatagctagctctatttttg

SEQ ID NO: 4686947 - DNA, 25 bp, Homo sapien
ggccctgccttgagcgaagattgct

SEQ ID NO: 4686948 - DNA, 25 bp, Homo sapien
gagccagagcagtttgtccccgttg

SEQ ID NO: 4686949 - DNA, 25 bp, Homo sapien
tgacagccctctcggcataatgccg

SEQ ID NO: 4686950 - DNA, 25 bp, Homo sapien
cataatgccggcttgaacagaggtt

SEQ ID NO: 4686951 - DNA, 25 bp, Homo sapien
cctgtaggtagttaacaatgccgtt

SEQ ID NO: 4686952 - DNA, 25 bp, Homo sapien
gatctacaaacttttgcagaatgag

SEQ ID NO: 4686953 - DNA, 25 bp, Homo sapien
gttctccttgcagaagatctacaaa

SEQ ID NO: 4686954 - DNA, 25 bp, Homo sapien
gcaagtgaaggagtagcagtggcat

SEQ ID NO: 4686955 - DNA, 25 bp, Homo sapien
tgtcaagattgatcgcagaaagcgc

SEQ ID NO: 4686956 - DNA, 25 bp, Homo sapien
ttggagaggcaaaggacacctgaga

SEQ ID NO: 4686957 - DNA, 25 bp, Homo sapien
gtataagtacaagggtcatatctgg

SEQ ID NO: 4686958 - DNA, 25 bp, Homo sapien
tgggaggagttgatcactaaggaac

SEQ ID NO: 4686959 - DNA, 25 bp, Homo sapien
ctcctgttgtagtctgaagtgaaac

SEQ ID NO: 4686960 - DNA, 25 bp, Homo sapien
tgtgtgggcccctccatgtatttaa

SEQ ID NO: 4686961 - DNA, 25 bp, Homo sapien
gacagagtaggttttcagactcaat

SEQ ID NO: 4686962 - DNA, 25 bp, Homo sapien
tgctgaagggcagatattaatgctc

SEQ ID NO: 4686963 - DNA, 25 bp, Homo sapien
tgaggtctggcagctcagttgggag

SEQ ID NO: 4686964 - DNA, 25 bp, Homo sapien
aagtacatccctgcaggctagtcat

SEQ ID NO: 4686965 - DNA, 25 bp, Homo sapien
gaagtacatccctgcaggctagtca

SEQ ID NO: 4686966 - DNA, 25 bp, Homo sapien
ctcagttgggagttggctaaggcta

SEQ ID NO: 4686967 - DNA, 25 bp, Homo sapien
ctctctccaaacctgctatttattt

SEQ ID NO: 4686968 - DNA, 25 bp, Homo sapien
gctatttatttcatactcactgctc

SEQ ID NO: 4686969 - DNA, 25 bp, Homo sapien
tatttatttcatactcactgctcat

SEQ ID NO: 4686970 - DNA, 25 bp, Homo sapien
ctctccaaacctgctatttatttca

SEQ ID NO: 4686971 - DNA, 25 bp, Homo sapien
gtccattgatggacctatggcacat

SEQ ID NO: 4686972 - DNA, 25 bp, Homo sapien
gtgttcctctgaacctaatggtcca

SEQ ID NO: 4686973 - DNA, 25 bp, Homo sapien
tctacagtgttcctctgaacctaat

SEQ ID NO: 4686974 - DNA, 25 bp, Homo sapien
tctgaacctaatggtccattgatgg

SEQ ID NO: 4686975 - DNA, 25 bp, Homo sapien
aggtgtgagtaactgaaaccgaagt

SEQ ID NO: 4686976 - DNA, 25 bp, Homo sapien
gaacgttcttctcatactcctacag

SEQ ID NO: 4686977 - DNA, 25 bp, Homo sapien
aatgtctttacagactccaccaaag

SEQ ID NO: 4686978 - DNA, 25 bp, Homo sapien
gattcttatcatctaccacctgaac

SEQ ID NO: 4686979 - DNA, 25 bp, Homo sapien
ggtaatatgtctattgtgccacctg

SEQ ID NO: 4686980 - DNA, 25 bp, Homo sapien
catttagtgaggatagaaaagcgac

SEQ ID NO: 4686981 - DNA, 25 bp, Homo sapien
gaaaagcgactctcattaaacccaa

SEQ ID NO: 4686982 - DNA, 25 bp, Homo sapien
tctccgcactatatctgaggcagtg

SEQ ID NO: 4686983 - DNA, 25 bp, Homo sapien
gctgaagtcttatgcagagtgtcaa

SEQ ID NO: 4686984 - DNA, 25 bp, Homo sapien
tggtgacaggtcagcccttttgcaa

SEQ ID NO: 4686985 - DNA, 25 bp, Homo sapien
ctaggcctgctgcagccgagcagat

SEQ ID NO: 4686986 - DNA, 25 bp, Homo sapien
gcagattggtgacaggtcagccctt

SEQ ID NO: 4686987 - DNA, 25 bp, Homo sapien
tgctgcagccgagcagattggtgac

SEQ ID NO: 4686988 - DNA, 25 bp, Homo sapien
tgaattaagagaagagatattgctt

SEQ ID NO: 4686989 - DNA, 25 bp, Homo sapien
cctgtggaacccttctgagttgttg

SEQ ID NO: 4686990 - DNA, 25 bp, Homo sapien
aagagaagagatattgcttttaaca

SEQ ID NO: 4686991 - DNA, 25 bp, Homo sapien
tccacttatgttctaaattattggg

SEQ ID NO: 4686992 - DNA, 25 bp, Homo sapien
taacagtaggccatggagtgtcact

SEQ ID NO: 4686993 - DNA, 25 bp, Homo sapien
tctgtcctgcacttagaacgagttg

SEQ ID NO: 4686994 - DNA, 25 bp, Homo sapien
gcagactttcagaatggccccataa

SEQ ID NO: 4686995 - DNA, 25 bp, Homo sapien
tctgagatatgaaacaggctgtcct

SEQ ID NO: 4686996 - DNA, 25 bp, Homo sapien
ggtctcttctgagcctacacatttc

SEQ ID NO: 4686997 - DNA, 25 bp, Homo sapien
gagaagggcagtggccgtttaaatc

SEQ ID NO: 4686998 - DNA, 25 bp, Homo sapien
gaatgccctggtctttaatgtgcgg

SEQ ID NO: 4686999 - DNA, 25 bp, Homo sapien
tccctgggcatgacttgtcacttcc

SEQ ID NO: 4687000 - DNA, 25 bp, Homo sapien
gaggccactacaacactagctcgct

SEQ ID NO: 4687001 - DNA, 25 bp, Homo sapien
tggaggccactacaacactagctcg

SEQ ID NO: 4687002 - DNA, 25 bp, Homo sapien
ttgatggaggccactacaacactag

SEQ ID NO: 4687003 - DNA, 25 bp, Homo sapien
gatggaggccactacaacactagct

SEQ ID NO: 4687004 - DNA, 25 bp, Homo sapien
gagttcttagatttgtccaccttgg

SEQ ID NO: 4687005 - DNA, 25 bp, Homo sapien
cactctctgagtgcaaaaactagcc

SEQ ID NO: 4687006 - DNA, 25 bp, Homo sapien
aaaactagccataggtatcccttgc

SEQ ID NO: 4687007 - DNA, 25 bp, Homo sapien
tgctgatccaggtgcctcggtaggt

SEQ ID NO: 4687008 - DNA, 25 bp, Homo sapien
tgttgactgcattcttactatcctc

SEQ ID NO: 4687009 - DNA, 25 bp, Homo sapien
gacagatcgtctttctagtgaactg

SEQ ID NO: 4687010 - DNA, 25 bp, Homo sapien
tagtgaactgtctaagctccttccc

SEQ ID NO: 4687011 - DNA, 25 bp, Homo sapien
cattttgacctatggaagtatacca

SEQ ID NO: 4687012 - DNA, 25 bp, Homo sapien
gatcctgtgaatgccagattcctgg

SEQ ID NO: 4687013 - DNA, 25 bp, Homo sapien
cctgtgaatgccagattcctggatt

SEQ ID NO: 4687014 - DNA, 25 bp, Homo sapien
tcctgtgaatgccagattcctggat

SEQ ID NO: 4687015 - DNA, 25 bp, Homo sapien
ggatcctgtgaatgccagattcctg

SEQ ID NO: 4687016 - DNA, 25 bp, Homo sapien
caacatcggaaaagtctgaaactga

SEQ ID NO: 4687017 - DNA, 25 bp, Homo sapien
accagctgcctttggatagaaaatg

SEQ ID NO: 4687018 - DNA, 25 bp, Homo sapien
cgtggcaaccagctgcctttggata

SEQ ID NO: 4687019 - DNA, 25 bp, Homo sapien
tctcgtaacccgtggcaaccagctg

SEQ ID NO: 4687020 - DNA, 25 bp, Homo sapien
cagaaaaggctctcgtaacccgtgg

SEQ ID NO: 4687021 - DNA, 25 bp, Homo sapien
gctgggatttgatccgcagcctcac

SEQ ID NO: 4687022 - DNA, 25 bp, Homo sapien
caacacagcatctccagagccgtat

SEQ ID NO: 4687023 - DNA, 25 bp, Homo sapien
acacagcatctccagagccgtatgt

SEQ ID NO: 4687024 - DNA, 25 bp, Homo sapien
tttggaagtggcatcccaacacagc

SEQ ID NO: 4687025 - DNA, 25 bp, Homo sapien
ctgggctttggaagtggcatcccaa

SEQ ID NO: 4687026 - DNA, 25 bp, Homo sapien
agatgcgttcgtattccctgctagg

SEQ ID NO: 4687027 - DNA, 25 bp, Homo sapien
tgcgttcgtattccctgctaggcct

SEQ ID NO: 4687028 - DNA, 25 bp, Homo sapien
gatgcgttcgtattccctgctaggc

SEQ ID NO: 4687029 - DNA, 25 bp, Homo sapien
tcagatgcgttcgtattccctgcta

SEQ ID NO: 4687030 - DNA, 25 bp, Homo sapien
cataggctcccttgaggacacaggc

SEQ ID NO: 4687031 - DNA, 25 bp, Homo sapien
caaatatatcataggctcccttgag

SEQ ID NO: 4687032 - DNA, 25 bp, Homo sapien
tgaccctggagcctagcacgttgat

SEQ ID NO: 4687033 - DNA, 25 bp, Homo sapien
tagcacgttgatcaacaaattgttg

SEQ ID NO: 4687034 - DNA, 25 bp, Homo sapien
cttgcctttctagataattccctgg

SEQ ID NO: 4687035 - DNA, 25 bp, Homo sapien
cctttctagataattccctggcatg

SEQ ID NO: 4687036 - DNA, 25 bp, Homo sapien
tgcctttctagataattccctggca

SEQ ID NO: 4687037 - DNA, 25 bp, Homo sapien
ctttctagataattccctggcatgt

SEQ ID NO: 4687038 - DNA, 25 bp, Homo sapien
tgccactgtacaaccttgctgtgtg

SEQ ID NO: 4687039 - DNA, 25 bp, Homo sapien
aaagggctgtgcctgtccaataaga

SEQ ID NO: 4687040 - DNA, 25 bp, Homo sapien
gagatgttgcattaactacaactcc

SEQ ID NO: 4687041 - DNA, 25 bp, Homo sapien
ttaactacaactcccttgccactgt

SEQ ID NO: 4687042 - DNA, 25 bp, Homo sapien
ttcattccagcgggtagaaggatgg

SEQ ID NO: 4687043 - DNA, 25 bp, Homo sapien
gtagaaggatggttataaaactcca

SEQ ID NO: 4687044 - DNA, 25 bp, Homo sapien
tcattccagcgggtagaaggatggt

SEQ ID NO: 4687045 - DNA, 25 bp, Homo sapien
gaaggatggttataaaactccagct

SEQ ID NO: 4687046 - DNA, 25 bp, Homo sapien
tctcccagtgggtactcatatcttg

SEQ ID NO: 4687047 - DNA, 25 bp, Homo sapien
gccagactccgcattctagcaggat

SEQ ID NO: 4687048 - DNA, 25 bp, Homo sapien
tgagacgtcaagacctgagagcaaa

SEQ ID NO: 4687049 - DNA, 25 bp, Homo sapien
tgagagcaaattcagagccagactc

SEQ ID NO: 4687050 - DNA, 25 bp, Homo sapien
gaaagctaatgacagggaacacttc

SEQ ID NO: 4687051 - DNA, 25 bp, Homo sapien
cagtcacatctgatgcaaaagtttc

SEQ ID NO: 4687052 - DNA, 25 bp, Homo sapien
ttctcatgagcaagtgtgcgctttg

SEQ ID NO: 4687053 - DNA, 25 bp, Homo sapien
tcctgatgggaagcttgactgaaag

SEQ ID NO: 4687054 - DNA, 25 bp, Homo sapien
cagcaccattacagctttatttaga

SEQ ID NO: 4687055 - DNA, 25 bp, Homo sapien
tatttagatgtgtgtgaaggaacca

SEQ ID NO: 4687056 - DNA, 25 bp, Homo sapien
tttagatgtgtgtgaaggaaccatc

SEQ ID NO: 4687057 - DNA, 25 bp, Homo sapien
tttatttagatgtgtgtgaaggaac

SEQ ID NO: 4687058 - DNA, 25 bp, Homo sapien
gggctgtccgtatttacattgggta

SEQ ID NO: 4687059 - DNA, 25 bp, Homo sapien
tgctgtactttggacgtgtgctgca

SEQ ID NO: 4687060 - DNA, 25 bp, Homo sapien
tacattgggtacacaacagctgtgg

SEQ ID NO: 4687061 - DNA, 25 bp, Homo sapien
tgtactttggacgtgtgctgcagaa

SEQ ID NO: 4687062 - DNA, 25 bp, Homo sapien
ggtcctcgtggttcaacaagaatga

SEQ ID NO: 4687063 - DNA, 25 bp, Homo sapien
gggtccaccacctactgcatttgtg

SEQ ID NO: 4687064 - DNA, 25 bp, Homo sapien
acaagaatgatatccagattgtgct

SEQ ID NO: 4687065 - DNA, 25 bp, Homo sapien
ttctgctaaatagggtaagttcttc

SEQ ID NO: 4687066 - DNA, 25 bp, Homo sapien
tttgtctgttgatagcatactatcc

SEQ ID NO: 4687067 - DNA, 25 bp, Homo sapien
atcctctttagttgtatatgtctgc

SEQ ID NO: 4687068 - DNA, 25 bp, Homo sapien
tcctctttagttgtatatgtctgca

SEQ ID NO: 4687069 - DNA, 25 bp, Homo sapien
gatagcatactatcctctttagttg

SEQ ID NO: 4687070 - DNA, 25 bp, Homo sapien
gctgccagagactttagaactttgc

SEQ ID NO: 4687071 - DNA, 25 bp, Homo sapien
cagagactttagaactttgcattgg

SEQ ID NO: 4687072 - DNA, 25 bp, Homo sapien
gccagagactttagaactttgcatt

SEQ ID NO: 4687073 - DNA, 25 bp, Homo sapien
ctgccagagactttagaactttgca

SEQ ID NO: 4687074 - DNA, 25 bp, Homo sapien
tccacttgagaaccatgcaggtaat

SEQ ID NO: 4687075 - DNA, 25 bp, Homo sapien
tcaataaagtgtcttctacttttct

SEQ ID NO: 4687076 - DNA, 25 bp, Homo sapien
gtttcacctccacttgagaaccatg

SEQ ID NO: 4687077 - DNA, 25 bp, Homo sapien
tgagaaccatgcaggtaatgtcttc

SEQ ID NO: 4687078 - DNA, 25 bp, Homo sapien
agtggagctttacgcatttcatcac

SEQ ID NO: 4687079 - DNA, 25 bp, Homo sapien
aaaaatcaaaggttttgattgtgtg

SEQ ID NO: 4687080 - DNA, 25 bp, Homo sapien
ttgattgtgtgttgcaataaaggga

SEQ ID NO: 4687081 - DNA, 25 bp, Homo sapien
tgaagtggagctttacgcatttcat

SEQ ID NO: 4687082 - DNA, 25 bp, Homo sapien
gtcatgtaggttgtctaaaaataaa

SEQ ID NO: 4687083 - DNA, 25 bp, Homo sapien
ttaaactaaattcatcctgttgtgt

SEQ ID NO: 4687084 - DNA, 25 bp, Homo sapien
cattttaactcatttgagagaatac

SEQ ID NO: 4687085 - DNA, 25 bp, Homo sapien
tcgtttaatgcatatttaaactaaa

SEQ ID NO: 4687086 - DNA, 25 bp, Homo sapien
ccataatttattcggagtggaggca

SEQ ID NO: 4687087 - DNA, 25 bp, Homo sapien
aactcgcttctaattgtcatccaca

SEQ ID NO: 4687088 - DNA, 25 bp, Homo sapien
ggttgctctactggactacggtgag

SEQ ID NO: 4687089 - DNA, 25 bp, Homo sapien
tagtttggatctattacctgtcatc

SEQ ID NO: 4687090 - DNA, 25 bp, Homo sapien
tcatcagtcacaatgagatgttctc

SEQ ID NO: 4687091 - DNA, 25 bp, Homo sapien
caggacctcatcagtcacaatgaga

SEQ ID NO: 4687092 - DNA, 25 bp, Homo sapien
agtcacaatgagatgttctccgaca

SEQ ID NO: 4687093 - DNA, 25 bp, Homo sapien
gacctcatcagtcacaatgagatgt

SEQ ID NO: 4687094 - DNA, 25 bp, Homo sapien
ctgctttgatgcgttgttcccgatc

SEQ ID NO: 4687095 - DNA, 25 bp, Homo sapien
gctgcgcaacatcttttttatgtca

SEQ ID NO: 4687096 - DNA, 25 bp, Homo sapien
tcatatttgatatagctgcgcaaca

SEQ ID NO: 4687097 - DNA, 25 bp, Homo sapien
gcgttgttcccgatcatatttgata

SEQ ID NO: 4687098 - DNA, 25 bp, Homo sapien
gaaccagtgctttcaatgtatctag

SEQ ID NO: 4687099 - DNA, 25 bp, Homo sapien
tctagcagatgggaacttcacaggc

SEQ ID NO: 4687100 - DNA, 25 bp, Homo sapien
ccactcagaccacactgatactgaa

SEQ ID NO: 4687101 - DNA, 25 bp, Homo sapien
ttggtgcatgaaggagaaccagtgc

SEQ ID NO: 4687102 - DNA, 25 bp, Homo sapien
caagccagaataagaattcttgttt

SEQ ID NO: 4687103 - DNA, 25 bp, Homo sapien
tcaagccagaataagaattcttgtt

SEQ ID NO: 4687104 - DNA, 25 bp, Homo sapien
aagccagaataagaattcttgtttt

SEQ ID NO: 4687105 - DNA, 25 bp, Homo sapien
catccgaaaacaattagctggacca

SEQ ID NO: 4687106 - DNA, 25 bp, Homo sapien
atccgaaaacaattagctggaccaa

SEQ ID NO: 4687107 - DNA, 25 bp, Homo sapien
tcatccgaaaacaattagctggacc

SEQ ID NO: 4687108 - DNA, 25 bp, Homo sapien
ggactggcctcgttgattatttttg

SEQ ID NO: 4687109 - DNA, 25 bp, Homo sapien
agtggactggcctcgttgattattt

SEQ ID NO: 4687110 - DNA, 25 bp, Homo sapien
tacattgccaactttccaactaaca

SEQ ID NO: 4687111 - DNA, 25 bp, Homo sapien
caactttccaactaacagctatcat

SEQ ID NO: 4687112 - DNA, 25 bp, Homo sapien
gctcttgtcttcctggtgctggcat

SEQ ID NO: 4687113 - DNA, 25 bp, Homo sapien
ttgtcttcctggtgctggcatatac

SEQ ID NO: 4687114 - DNA, 25 bp, Homo sapien
ttatagctcttgtcttcctggtgct

SEQ ID NO: 4687115 - DNA, 25 bp, Homo sapien
cttgtcttcctggtgctggcatata

SEQ ID NO: 4687116 - DNA, 25 bp, Homo sapien
gtctttacggtttgccaagaagcca

SEQ ID NO: 4687117 - DNA, 25 bp, Homo sapien
tcttcagacaagtcctgctttgagt

SEQ ID NO: 4687118 - DNA, 25 bp, Homo sapien
gaagccagcctggtatcttttaaca

SEQ ID NO: 4687119 - DNA, 25 bp, Homo sapien
gtgtgatttcagtctagctgtgtct

SEQ ID NO: 4687120 - DNA, 25 bp, Homo sapien
tgtacattgtgcaaagacctgaagg

SEQ ID NO: 4687121 - DNA, 25 bp, Homo sapien
tgtgaatatctagcagaagagcctt

SEQ ID NO: 4687122 - DNA, 25 bp, Homo sapien
tcagacagcttgtccctgggacttt

SEQ ID NO: 4687123 - DNA, 25 bp, Homo sapien
aatggtcaaggaagacctcattgag

SEQ ID NO: 4687124 - DNA, 25 bp, Homo sapien
tggaggcttttggacctattgggca

SEQ ID NO: 4687125 - DNA, 25 bp, Homo sapien
tgccaactgtcagggtacaccaacg

SEQ ID NO: 4687126 - DNA, 25 bp, Homo sapien
caaaatctcatctgctattgggtcg

SEQ ID NO: 4687127 - DNA, 25 bp, Homo sapien
tgaaaagctttcaactaatgcagca

SEQ ID NO: 4687128 - DNA, 25 bp, Homo sapien
tatttctcctcgtcagtattattaa

SEQ ID NO: 4687129 - DNA, 25 bp, Homo sapien
atttctcctcgtcagtattattaac

SEQ ID NO: 4687130 - DNA, 25 bp, Homo sapien
ctatttctcctcgtcagtattatta

SEQ ID NO: 4687131 - DNA, 25 bp, Homo sapien
tctgttatccatgacacttttggca

SEQ ID NO: 4687132 - DNA, 25 bp, Homo sapien
tggcatatctatctaatgcagatgc

SEQ ID NO: 4687133 - DNA, 25 bp, Homo sapien
ccatgacacttttggcatatctatc

SEQ ID NO: 4687134 - DNA, 25 bp, Homo sapien
ttatctgttatccatgacacttttg

SEQ ID NO: 4687135 - DNA, 25 bp, Homo sapien
tcattccataacaatcagagcctgg

SEQ ID NO: 4687136 - DNA, 25 bp, Homo sapien
caagctaggccatagctggcaagat

SEQ ID NO: 4687137 - DNA, 25 bp, Homo sapien
tggccatttgatgcccaagctaggc

SEQ ID NO: 4687138 - DNA, 25 bp, Homo sapien
gaattcagcagggtagcttgtgaca

SEQ ID NO: 4687139 - DNA, 25 bp, Homo sapien
gacagatgcatacagcattcttagg

SEQ ID NO: 4687140 - DNA, 25 bp, Homo sapien
tcagccagacgattataataacttc

SEQ ID NO: 4687141 - DNA, 25 bp, Homo sapien
gactgaaaagcacgtggacagatgc

SEQ ID NO: 4687142 - DNA, 25 bp, Homo sapien
ttgaagtattgaagtcgcaaagccc

SEQ ID NO: 4687143 - DNA, 25 bp, Homo sapien
tctctgctcattctgtctaattaca

SEQ ID NO: 4687144 - DNA, 25 bp, Homo sapien
tgctcattctgtctaattacatgtg

SEQ ID NO: 4687145 - DNA, 25 bp, Homo sapien
ggtggcatgctcaccaccttttctc

SEQ ID NO: 4687146 - DNA, 25 bp, Homo sapien
cattctgtctaattacatgtggcat

SEQ ID NO: 4687147 - DNA, 25 bp, Homo sapien
tctgttcctgggagacttctgccag

SEQ ID NO: 4687148 - DNA, 25 bp, Homo sapien
cttctgttcctgggagacttctgcc

SEQ ID NO: 4687149 - DNA, 25 bp, Homo sapien
gttcctgggagacttctgccagcat

SEQ ID NO: 4687150 - DNA, 25 bp, Homo sapien
tgttcctgggagacttctgccagca

SEQ ID NO: 4687151 - DNA, 25 bp, Homo sapien
ccaaagagtaaggacccattaagtg

SEQ ID NO: 4687152 - DNA, 25 bp, Homo sapien
ggcagcagatgccaccaagtgaagg

SEQ ID NO: 4687153 - DNA, 25 bp, Homo sapien
tgaaggcagcaataccatgaagaga

SEQ ID NO: 4687154 - DNA, 25 bp, Homo sapien
gattgatagcagtgggaaacctcat

SEQ ID NO: 4687155 - DNA, 25 bp, Homo sapien
ggaaattgacatagcagtcgctgac

SEQ ID NO: 4687156 - DNA, 25 bp, Homo sapien
aaattgacatagcagtcgctgactc

SEQ ID NO: 4687157 - DNA, 25 bp, Homo sapien
gaaattgacatagcagtcgctgact

SEQ ID NO: 4687158 - DNA, 25 bp, Homo sapien
caggaaattgacatagcagtcgctg

SEQ ID NO: 4687159 - DNA, 25 bp, Homo sapien
gatgcagtcgcaccagggtagaaca

SEQ ID NO: 4687160 - DNA, 25 bp, Homo sapien
gactgattggaacgatttgaaactt

SEQ ID NO: 4687161 - DNA, 25 bp, Homo sapien
gaacactgttaataactctgctgga

SEQ ID NO: 4687162 - DNA, 25 bp, Homo sapien
ctctgctggattaggactgattgga

SEQ ID NO: 4687163 - DNA, 25 bp, Homo sapien
cttggagtaattcaaagtcctattt

SEQ ID NO: 4687164 - DNA, 25 bp, Homo sapien
agtaattcaaagtcctatttctagg

SEQ ID NO: 4687165 - DNA, 25 bp, Homo sapien
tatttctaggcactagttgtccttc

SEQ ID NO: 4687166 - DNA, 25 bp, Homo sapien
tctaggcactagttgtccttcagca

SEQ ID NO: 4687167 - DNA, 25 bp, Homo sapien
tattctacgttttctggtcccattc

SEQ ID NO: 4687168 - DNA, 25 bp, Homo sapien
aatgcttgaatagacaaagttagtc

SEQ ID NO: 4687169 - DNA, 25 bp, Homo sapien
cacagagtaaattgtcccgttcacc

SEQ ID NO: 4687170 - DNA, 25 bp, Homo sapien
tatactagcgtaaagaccaacacag

SEQ ID NO: 4687171 - DNA, 25 bp, Homo sapien
aagtgctcagaggaatggtagggtt

SEQ ID NO: 4687172 - DNA, 25 bp, Homo sapien
tcccttgtctgatataagcagaaca

SEQ ID NO: 4687173 - DNA, 25 bp, Homo sapien
caggtcaacacgcattaaggcttta

SEQ ID NO: 4687174 - DNA, 25 bp, Homo sapien
gctgacatcttcaagcaggtcaaca

SEQ ID NO: 4687175 - DNA, 25 bp, Homo sapien
tgtctggacatagaaggctgagtca

SEQ ID NO: 4687176 - DNA, 25 bp, Homo sapien
tagagggcctatttagtaagagcag

SEQ ID NO: 4687177 - DNA, 25 bp, Homo sapien
acggactgtcacgtaggcaggttga

SEQ ID NO: 4687178 - DNA, 25 bp, Homo sapien
cactgggagtgaatcatttgtctgg

SEQ ID NO: 4687179 - DNA, 25 bp, Homo sapien
agtgaggacatattgattatttcca

SEQ ID NO: 4687180 - DNA, 25 bp, Homo sapien
agcaggatggagttgacatgcagat

SEQ ID NO: 4687181 - DNA, 25 bp, Homo sapien
aatgaatctgtagggagactgccag

SEQ ID NO: 4687182 - DNA, 25 bp, Homo sapien
tggagttgacatgcagatgagattt

SEQ ID NO: 4687183 - DNA, 25 bp, Homo sapien
ctgtagggccaaaatcttcctatct

SEQ ID NO: 4687184 - DNA, 25 bp, Homo sapien
agggccaaaatcttcctatctccag

SEQ ID NO: 4687185 - DNA, 25 bp, Homo sapien
aaaatcttcctatctccaggatcca

SEQ ID NO: 4687186 - DNA, 25 bp, Homo sapien
gccaaaatcttcctatctccaggat

SEQ ID NO: 4687187 - DNA, 25 bp, Homo sapien
ggtatgggtgagtccaaagtctgca

SEQ ID NO: 4687188 - DNA, 25 bp, Homo sapien
atgggtgagtccaaagtctgcagcc

SEQ ID NO: 4687189 - DNA, 25 bp, Homo sapien
cagagggtatgggtgagtccaaagt

SEQ ID NO: 4687190 - DNA, 25 bp, Homo sapien
ctgcagccacctacatattttatgg

SEQ ID NO: 4687191 - DNA, 25 bp, Homo sapien
tgcatgggtccctctagtcatgcac

SEQ ID NO: 4687192 - DNA, 25 bp, Homo sapien
agagccccaggggtcgccacatcat

SEQ ID NO: 4687193 - DNA, 25 bp, Homo sapien
gggtccctctagtcatgcactggag

SEQ ID NO: 4687194 - DNA, 25 bp, Homo sapien
gggtcgccacatcatcccatcatct

SEQ ID NO: 4687195 - DNA, 25 bp, Homo sapien
tgtaagattcacagggatggagcct

SEQ ID NO: 4687196 - DNA, 25 bp, Homo sapien
ggattcatctgtaagattcacaggg

SEQ ID NO: 4687197 - DNA, 25 bp, Homo sapien
aatcatagaggacatcatctgatgc

SEQ ID NO: 4687198 - DNA, 25 bp, Homo sapien
gcctgtgccaactgcctccaggaaa

SEQ ID NO: 4687199 - DNA, 25 bp, Homo sapien
ccatcttcaagtattgctccagatt

SEQ ID NO: 4687200 - DNA, 25 bp, Homo sapien
tgctccagattctgatgtcatccct

SEQ ID NO: 4687201 - DNA, 25 bp, Homo sapien
ttgccatcttcaagtattgctccag

SEQ ID NO: 4687202 - DNA, 25 bp, Homo sapien
gctccagattctgatgtcatccctg

SEQ ID NO: 4687203 - DNA, 25 bp, Homo sapien
tttgattgcctgttgtatccctggg

SEQ ID NO: 4687204 - DNA, 25 bp, Homo sapien
gattgcctgttgtatccctgggttt

SEQ ID NO: 4687205 - DNA, 25 bp, Homo sapien
tgggttttgattgcctgttgtatcc

SEQ ID NO: 4687206 - DNA, 25 bp, Homo sapien
gttttgattgcctgttgtatccctg

SEQ ID NO: 4687207 - DNA, 25 bp, Homo sapien
atctggccaacctcccttcgtccgc

SEQ ID NO: 4687208 - DNA, 25 bp, Homo sapien
cttcgtccgctttcctccaattgac

SEQ ID NO: 4687209 - DNA, 25 bp, Homo sapien
ctcaagctccgctaagccctcatca

SEQ ID NO: 4687210 - DNA, 25 bp, Homo sapien
tttcctccaattgacctgctgtgtt

SEQ ID NO: 4687211 - DNA, 25 bp, Homo sapien
tgaggcctcctcctagaaagaatcc

SEQ ID NO: 4687212 - DNA, 25 bp, Homo sapien
ggtgaataactagttcagtgtgaat

SEQ ID NO: 4687213 - DNA, 25 bp, Homo sapien
gaaagaatccctggtgaataactag

SEQ ID NO: 4687214 - DNA, 25 bp, Homo sapien
ttctcctaagtgtgaggcctcctcc

SEQ ID NO: 4687215 - DNA, 25 bp, Homo sapien
tccacatccctttccgtggcttgag

SEQ ID NO: 4687216 - DNA, 25 bp, Homo sapien
cttgagtgttttcccacaaggaaga

SEQ ID NO: 4687217 - DNA, 25 bp, Homo sapien
tttccgtggcttgagtgttttccca

SEQ ID NO: 4687218 - DNA, 25 bp, Homo sapien
caagtaggaaggtgttcttaatggc

SEQ ID NO: 4687219 - DNA, 25 bp, Homo sapien
tttgatcgccaaatggatgtacctc

SEQ ID NO: 4687220 - DNA, 25 bp, Homo sapien
ttttcctatttgatcgccaaatgga

SEQ ID NO: 4687221 - DNA, 25 bp, Homo sapien
gggcctgtctccagtacaaagcaaa

SEQ ID NO: 4687222 - DNA, 25 bp, Homo sapien
cctctccaaacctgactgtgttttt

SEQ ID NO: 4687223 - DNA, 25 bp, Homo sapien
ttcacacttctataactctgataaa

SEQ ID NO: 4687224 - DNA, 25 bp, Homo sapien
tcacacttctataactctgataaat

SEQ ID NO: 4687225 - DNA, 25 bp, Homo sapien
tttctatggcacttttcacacttct

SEQ ID NO: 4687226 - DNA, 25 bp, Homo sapien
aagtgatgactcctccccgggcttt

SEQ ID NO: 4687227 - DNA, 25 bp, Homo sapien
gtgatgactcctccccgggctttag

SEQ ID NO: 4687228 - DNA, 25 bp, Homo sapien
tgagaagtgatgactcctccccggg

SEQ ID NO: 4687229 - DNA, 25 bp, Homo sapien
agaagtgatgactcctccccgggct

SEQ ID NO: 4687230 - DNA, 25 bp, Homo sapien
taccaagatgtgctatgttctgcat

SEQ ID NO: 4687231 - DNA, 25 bp, Homo sapien
tctgggccaaaggtttccgattcca

SEQ ID NO: 4687232 - DNA, 25 bp, Homo sapien
gagcaccctgggattagcaccagaa

SEQ ID NO: 4687233 - DNA, 25 bp, Homo sapien
gcaccagaaacgaaatctgggccaa

SEQ ID NO: 4687234 - DNA, 25 bp, Homo sapien
tagttgtcccatgctcccttattaa

SEQ ID NO: 4687235 - DNA, 25 bp, Homo sapien
gtgtagaactgcaaggacctgctgc

SEQ ID NO: 4687236 - DNA, 25 bp, Homo sapien
tagagacatgacaatctgagtgtag

SEQ ID NO: 4687237 - DNA, 25 bp, Homo sapien
tggttaaatgctagattaaatggct

SEQ ID NO: 4687238 - DNA, 25 bp, Homo sapien
tgtgctccttctgtaggcaacgcta

SEQ ID NO: 4687239 - DNA, 25 bp, Homo sapien
ctgtaggcaacgctatcatttttct

SEQ ID NO: 4687240 - DNA, 25 bp, Homo sapien
aaacatgcaacttggagttttctac

SEQ ID NO: 4687241 - DNA, 25 bp, Homo sapien
ccttctgtaggcaacgctatcattt

SEQ ID NO: 4687242 - DNA, 25 bp, Homo sapien
gaacagctgtgtattacatcctgtg

SEQ ID NO: 4687243 - DNA, 25 bp, Homo sapien
tgcagaggttagtggaaagtgccat

SEQ ID NO: 4687244 - DNA, 25 bp, Homo sapien
taagatgcacaatactctcctggaa

SEQ ID NO: 4687245 - DNA, 25 bp, Homo sapien
tcatgaattagaaggatggttgaac

SEQ ID NO: 4687246 - DNA, 25 bp, Homo sapien
tagtgactttttgctcatgggtctg

SEQ ID NO: 4687247 - DNA, 25 bp, Homo sapien
gaatcttgagtgttgtagttggaat

SEQ ID NO: 4687248 - DNA, 25 bp, Homo sapien
tacgtgaacatctattcgcccaaca

SEQ ID NO: 4687249 - DNA, 25 bp, Homo sapien
tgttaacacagaaacgtgggcatat

SEQ ID NO: 4687250 - DNA, 25 bp, Homo sapien
agaactaaacaggaatagaagcatg

SEQ ID NO: 4687251 - DNA, 25 bp, Homo sapien
aactaaacaggaatagaagcatgtt

SEQ ID NO: 4687252 - DNA, 25 bp, Homo sapien
aaagaactaaacaggaatagaagca

SEQ ID NO: 4687253 - DNA, 25 bp, Homo sapien
tctgagagctgtccatagggagaaa

SEQ ID NO: 4687254 - DNA, 25 bp, Homo sapien
gatccaggtaagacacagtcttgat

SEQ ID NO: 4687255 - DNA, 25 bp, Homo sapien
agtcttgatgcctgcatcaaacact

SEQ ID NO: 4687256 - DNA, 25 bp, Homo sapien
ttatggatccaggtaagacacagtc

SEQ ID NO: 4687257 - DNA, 25 bp, Homo sapien
gtcttgatgcctgcatcaaacacta

SEQ ID NO: 4687258 - DNA, 25 bp, Homo sapien
atcttcaccaccttcttctaacaat

SEQ ID NO: 4687259 - DNA, 25 bp, Homo sapien
tgttcattaccatcttcaccacctt

SEQ ID NO: 4687260 - DNA, 25 bp, Homo sapien
ttcaccaccttcttctaacaatttc

SEQ ID NO: 4687261 - DNA, 25 bp, Homo sapien
ctgttcattaccatcttcaccacct

SEQ ID NO: 4687262 - DNA, 25 bp, Homo sapien
tccatccctgtgtaattggctcctg

SEQ ID NO: 4687263 - DNA, 25 bp, Homo sapien
tcaaggccagaagggtgctcttgct

SEQ ID NO: 4687264 - DNA, 25 bp, Homo sapien
ctgatcagctgtccatcaaggccag

SEQ ID NO: 4687265 - DNA, 25 bp, Homo sapien
tgcttgtcaagtgtctgttccatcc

SEQ ID NO: 4687266 - DNA, 25 bp, Homo sapien
gggccactctacattccacaagcag

SEQ ID NO: 4687267 - DNA, 25 bp, Homo sapien
gtggtcacttggcattccagaggca

SEQ ID NO: 4687268 - DNA, 25 bp, Homo sapien
tacattccacaagcagggagctgtg

SEQ ID NO: 4687269 - DNA, 25 bp, Homo sapien
ttggcattccagaggcattccaaag

SEQ ID NO: 4687270 - DNA, 25 bp, Homo sapien
tttgtcagtcacagctctttcctct

SEQ ID NO: 4687271 - DNA, 25 bp, Homo sapien
atttctcacatctagtattctaaag

SEQ ID NO: 4687272 - DNA, 25 bp, Homo sapien
ggtttgtcagtcacagctctttcct

SEQ ID NO: 4687273 - DNA, 25 bp, Homo sapien
tcatttctcacatctagtattctaa

SEQ ID NO: 4687274 - DNA, 25 bp, Homo sapien
tgctttctgctaccattttccacca

SEQ ID NO: 4687275 - DNA, 25 bp, Homo sapien
ccttgtgatgctgacagaatattgg

SEQ ID NO: 4687276 - DNA, 25 bp, Homo sapien
ccaccatagaggtgctaatgttcct

SEQ ID NO: 4687277 - DNA, 25 bp, Homo sapien
tctgccaatcctaccaatccttgtg

SEQ ID NO: 4687278 - DNA, 25 bp, Homo sapien
actttagctcttggatcttctttta

SEQ ID NO: 4687279 - DNA, 25 bp, Homo sapien
ggatcttcttttagagctctgccaa

SEQ ID NO: 4687280 - DNA, 25 bp, Homo sapien
gtcagggcagatcccagaacctcag

SEQ ID NO: 4687281 - DNA, 25 bp, Homo sapien
aactggatggaacaatcttcaatct

SEQ ID NO: 4687282 - DNA, 25 bp, Homo sapien
ggaaatactgctcctttccttggaa

SEQ ID NO: 4687283 - DNA, 25 bp, Homo sapien
tactgctcctttccttggaagtcat

SEQ ID NO: 4687284 - DNA, 25 bp, Homo sapien
ctgctcctttccttggaagtcatgg

SEQ ID NO: 4687285 - DNA, 25 bp, Homo sapien
ctggaaatactgctcctttccttgg

SEQ ID NO: 4687286 - DNA, 25 bp, Homo sapien
tgcttttcctcactattccagctta

SEQ ID NO: 4687287 - DNA, 25 bp, Homo sapien
cactattccagcttaaacattcctt

SEQ ID NO: 4687288 - DNA, 25 bp, Homo sapien
tatccaaacttactccctgcttttc

SEQ ID NO: 4687289 - DNA, 25 bp, Homo sapien
tcccatctttctcatacactgtgct

SEQ ID NO: 4687290 - DNA, 25 bp, Homo sapien
cattctagtatacggtgacttcact

SEQ ID NO: 4687291 - DNA, 25 bp, Homo sapien
ggtgactggattccaagacagggat

SEQ ID NO: 4687292 - DNA, 25 bp, Homo sapien
tacggtgacttcacttgcttgggct

SEQ ID NO: 4687293 - DNA, 25 bp, Homo sapien
atggtgactggattccaagacaggg

SEQ ID NO: 4687294 - DNA, 25 bp, Homo sapien
ttacaaaggaaaccatcttcttctc

SEQ ID NO: 4687295 - DNA, 25 bp, Homo sapien
gctgtgcttacaaaggaaaccatct

SEQ ID NO: 4687296 - DNA, 25 bp, Homo sapien
tgaagggccatttgcggggattgaa

SEQ ID NO: 4687297 - DNA, 25 bp, Homo sapien
gtctgaaatggcaggatgctgtgct

SEQ ID NO: 4687298 - DNA, 25 bp, Homo sapien
gcatgtccaaagagggttatagaga

SEQ ID NO: 4687299 - DNA, 25 bp, Homo sapien
gatactagtatacctaaaaacttca

SEQ ID NO: 4687300 - DNA, 25 bp, Homo sapien
ctggtgaatgcagatatccaaagag

SEQ ID NO: 4687301 - DNA, 25 bp, Homo sapien
tgtgtccattacctggatactagta

SEQ ID NO: 4687302 - DNA, 25 bp, Homo sapien
gcatcacacgttcagaattccaagc

SEQ ID NO: 4687303 - DNA, 25 bp, Homo sapien
cacgttcagaattccaagctgtatt

SEQ ID NO: 4687304 - DNA, 25 bp, Homo sapien
tttcctcgacggcacaatgccaaag

SEQ ID NO: 4687305 - DNA, 25 bp, Homo sapien
tgccaaaggatctttgcagttggtc

SEQ ID NO: 4687306 - DNA, 25 bp, Homo sapien
tattattgagttgaccctcactgca

SEQ ID NO: 4687307 - DNA, 25 bp, Homo sapien
gggattgtaaagacatattattgag

SEQ ID NO: 4687308 - DNA, 25 bp, Homo sapien
gctggtgcacaatcccaccaggact

SEQ ID NO: 4687309 - DNA, 25 bp, Homo sapien
gaagaggcatataaatttacctcag

SEQ ID NO: 4687310 - DNA, 25 bp, Homo sapien
tgcaggaaatgaagcgcagccagtg

SEQ ID NO: 4687311 - DNA, 25 bp, Homo sapien
gcaggaaatgaagcgcagccagtgg

SEQ ID NO: 4687312 - DNA, 25 bp, Homo sapien
gagggagacttctgatcatgcctct

SEQ ID NO: 4687313 - DNA, 25 bp, Homo sapien
cagattgcctaacagctgctcctga

SEQ ID NO: 4687314 - DNA, 25 bp, Homo sapien
aagacctctgaatgcctccactgcc

SEQ ID NO: 4687315 - DNA, 25 bp, Homo sapien
tttctccctccataagcagccctcc

SEQ ID NO: 4687316 - DNA, 25 bp, Homo sapien
tatttgaggagtacgaatgtgggcc

SEQ ID NO: 4687317 - DNA, 25 bp, Homo sapien
cacctctggaacgaagaatcattct

SEQ ID NO: 4687318 - DNA, 25 bp, Homo sapien
ggtgatcccaatgacctggtgtttc

SEQ ID NO: 4687319 - DNA, 25 bp, Homo sapien
ggcctctagacctgggcagatcaca

SEQ ID NO: 4687320 - DNA, 25 bp, Homo sapien
ggtgggatgtcacaagcagctcttt

SEQ ID NO: 4687321 - DNA, 25 bp, Homo sapien
tcagcgaactccacgtcatgcatgc

SEQ ID NO: 4687322 - DNA, 25 bp, Homo sapien
ctgagtaccagcttaggaaggcctt

SEQ ID NO: 4687323 - DNA, 25 bp, Homo sapien
catgcatgcccttgcctgagtacca

SEQ ID NO: 4687324 - DNA, 25 bp, Homo sapien
taacagcaatgttaagctataaggc

SEQ ID NO: 4687325 - DNA, 25 bp, Homo sapien
tataaactgtatgattgggtgctta

SEQ ID NO: 4687326 - DNA, 25 bp, Homo sapien
tccattatggcctttcaatctgtgg

SEQ ID NO: 4687327 - DNA, 25 bp, Homo sapien
tactgaagcagttaaagtcatacct

SEQ ID NO: 4687328 - DNA, 25 bp, Homo sapien
taagtctttagtcaaggacataaac

SEQ ID NO: 4687329 - DNA, 25 bp, Homo sapien
aagacttgacgtttgtgtgtatggg

SEQ ID NO: 4687330 - DNA, 25 bp, Homo sapien
aagaaacttctggatgagaaagact

SEQ ID NO: 4687331 - DNA, 25 bp, Homo sapien
tgtgtatgggatctttgggtgggat

SEQ ID NO: 4687332 - DNA, 25 bp, Homo sapien
cgtttcaagggctgtacagagatgc

SEQ ID NO: 4687333 - DNA, 25 bp, Homo sapien
ttcaagggctgtacagagatgcagg

SEQ ID NO: 4687334 - DNA, 25 bp, Homo sapien
ttcccgtttcaagggctgtacagag

SEQ ID NO: 4687335 - DNA, 25 bp, Homo sapien
gctgttcccgtttcaagggctgtac

SEQ ID NO: 4687336 - DNA, 25 bp, Homo sapien
taatgatgccgtgaaaagcaagatt

SEQ ID NO: 4687337 - DNA, 25 bp, Homo sapien
caaagccgccgtgccgggtaatagc

SEQ ID NO: 4687338 - DNA, 25 bp, Homo sapien
gagctctttgtgaagcgcgctccca

SEQ ID NO: 4687339 - DNA, 25 bp, Homo sapien
tcatgttaacatgtgctgctgcaca

SEQ ID NO: 4687340 - DNA, 25 bp, Homo sapien
aaaccaatatggcacgggtgctccc

SEQ ID NO: 4687341 - DNA, 25 bp, Homo sapien
aatatggcacgggtgctccctcttt

SEQ ID NO: 4687342 - DNA, 25 bp, Homo sapien
gctcctcttattgattttccaaacc

SEQ ID NO: 4687343 - DNA, 25 bp, Homo sapien
tggcacgggtgctccctctttgtgc

SEQ ID NO: 4687344 - DNA, 25 bp, Homo sapien
ttccttgtaatagttgtcctcaacg

SEQ ID NO: 4687345 - DNA, 25 bp, Homo sapien
tgtaatagttgtcctcaacggccat

SEQ ID NO: 4687346 - DNA, 25 bp, Homo sapien
ccttgtaatagttgtcctcaacggc

SEQ ID NO: 4687347 - DNA, 25 bp, Homo sapien
tagtaaaggggcattttgtcaagct

SEQ ID NO: 4687348 - DNA, 25 bp, Homo sapien
cagtgttcagtgctgtcttgtcggt

SEQ ID NO: 4687349 - DNA, 25 bp, Homo sapien
tgtgcaagtactacataatcatgtg

SEQ ID NO: 4687350 - DNA, 25 bp, Homo sapien
tcttgtcggtagattgtaatgagcc

SEQ ID NO: 4687351 - DNA, 25 bp, Homo sapien
ccgagtggtgtatcagggacagcct

SEQ ID NO: 4687352 - DNA, 25 bp, Homo sapien
gagcatgttgcattgctacagctct

SEQ ID NO: 4687353 - DNA, 25 bp, Homo sapien
ggctctgtgcacacagccagttaca

SEQ ID NO: 4687354 - DNA, 25 bp, Homo sapien
agctctatgcagagccgtgctggct

SEQ ID NO: 4687355 - DNA, 25 bp, Homo sapien
ttactgagcatgttgcattgctaca

SEQ ID NO: 4687356 - DNA, 25 bp, Homo sapien
ttgtttaatgccacacctggtcctt

SEQ ID NO: 4687357 - DNA, 25 bp, Homo sapien
tcattgtctgccacatgattaatat

SEQ ID NO: 4687358 - DNA, 25 bp, Homo sapien
cttgtttaatgccacacctggtcct

SEQ ID NO: 4687359 - DNA, 25 bp, Homo sapien
gtccttgatcattgtctgccacatg

SEQ ID NO: 4687360 - DNA, 25 bp, Homo sapien
gcagatacaaagttagggttgatgg

SEQ ID NO: 4687361 - DNA, 25 bp, Homo sapien
gatgggaccagcagatgagaaataa

SEQ ID NO: 4687362 - DNA, 25 bp, Homo sapien
tgggaccagcagatgagaaataaga

SEQ ID NO: 4687363 - DNA, 25 bp, Homo sapien
caaagttagggttgatgggaccagc

SEQ ID NO: 4687364 - DNA, 25 bp, Homo sapien
gcagatctgttcattggtcccaaag

SEQ ID NO: 4687365 - DNA, 25 bp, Homo sapien
tgtcagtttgtcttcagacgcaggc

SEQ ID NO: 4687366 - DNA, 25 bp, Homo sapien
tttccaatgtggtaagcaagacacc

SEQ ID NO: 4687367 - DNA, 25 bp, Homo sapien
gacgcaggcaaggtcattaatcgca

SEQ ID NO: 4687368 - DNA, 25 bp, Homo sapien
attagaggaccttttatttagctga

SEQ ID NO: 4687369 - DNA, 25 bp, Homo sapien
gatttgttgtccaagcatagagata

SEQ ID NO: 4687370 - DNA, 25 bp, Homo sapien
gagatacaatgtgtacatcattttc

SEQ ID NO: 4687371 - DNA, 25 bp, Homo sapien
tgataagttccgctcattagaggac

SEQ ID NO: 4687372 - DNA, 25 bp, Homo sapien
gaatactctggtcaggctgaactgc

SEQ ID NO: 4687373 - DNA, 25 bp, Homo sapien
ccagcacctttggagtaactgatga

SEQ ID NO: 4687374 - DNA, 25 bp, Homo sapien
gagagtgaatcagtcgtatacaacc

SEQ ID NO: 4687375 - DNA, 25 bp, Homo sapien
cttagtaactgataaggaacactgc

SEQ ID NO: 4687376 - DNA, 25 bp, Homo sapien
cattggtctataagcaattctgaaa

SEQ ID NO: 4687377 - DNA, 25 bp, Homo sapien
tgatcctgtcctctggagttcttcc

SEQ ID NO: 4687378 - DNA, 25 bp, Homo sapien
ctcctgggagtagaaatgttcccat

SEQ ID NO: 4687379 - DNA, 25 bp, Homo sapien
cctatggagagatgtaacaaggtcc

SEQ ID NO: 4687380 - DNA, 25 bp, Homo sapien
gatccccgggcatggaattagtaga

SEQ ID NO: 4687381 - DNA, 25 bp, Homo sapien
cactttgaaattaggcatgccaggt

SEQ ID NO: 4687382 - DNA, 25 bp, Homo sapien
ctatgaacgagagtgcacatgtcac

SEQ ID NO: 4687383 - DNA, 25 bp, Homo sapien
tcaggcacaaaggagaacatatccc

SEQ ID NO: 4687384 - DNA, 25 bp, Homo sapien
ggtctctttgcatctactgtatccg

SEQ ID NO: 4687385 - DNA, 25 bp, Homo sapien
tcttacgtctgcacgaccttatcat

SEQ ID NO: 4687386 - DNA, 25 bp, Homo sapien
ttagttcacctgcaactttcttacg

SEQ ID NO: 4687387 - DNA, 25 bp, Homo sapien
tcttccatagcatacactcagacct

SEQ ID NO: 4687388 - DNA, 25 bp, Homo sapien
gctcttcatggttgctatttgatcc

SEQ ID NO: 4687389 - DNA, 25 bp, Homo sapien
tgttggcttctgtggagaggccaga

SEQ ID NO: 4687390 - DNA, 25 bp, Homo sapien
tggggctcttcatggttgctatttg

SEQ ID NO: 4687391 - DNA, 25 bp, Homo sapien
ttggcttctgtggagaggccagagt

SEQ ID NO: 4687392 - DNA, 25 bp, Homo sapien
agattcattgattctggaagaaccc

SEQ ID NO: 4687393 - DNA, 25 bp, Homo sapien
tctttgtgagattcattgattctgg

SEQ ID NO: 4687394 - DNA, 25 bp, Homo sapien
tctggaagaacccacaatttctctc

SEQ ID NO: 4687395 - DNA, 25 bp, Homo sapien
tcctgtccttgatatcctttcctgt

SEQ ID NO: 4687396 - DNA, 25 bp, Homo sapien
tgcatacgaggaaggggccttgcca

SEQ ID NO: 4687397 - DNA, 25 bp, Homo sapien
tatgcatacgaggaaggggccttgc

SEQ ID NO: 4687398 - DNA, 25 bp, Homo sapien
ctatgcatacgaggaaggggccttg

SEQ ID NO: 4687399 - DNA, 25 bp, Homo sapien
atacgaggaaggggccttgccagga

SEQ ID NO: 4687400 - DNA, 25 bp, Homo sapien
aatgcagagctgtccacgtccagtc

SEQ ID NO: 4687401 - DNA, 25 bp, Homo sapien
ctctgagtggcttgcagccaaatgc

SEQ ID NO: 4687402 - DNA, 25 bp, Homo sapien
ccaaatgcagagctgtccacgtcca

SEQ ID NO: 4687403 - DNA, 25 bp, Homo sapien
ttattgagctctgagtggcttgcag

SEQ ID NO: 4687404 - DNA, 25 bp, Homo sapien
aagttcacaggacgaaatgcaatag

SEQ ID NO: 4687405 - DNA, 25 bp, Homo sapien
cagtcacaaagttcacaggacgaaa

SEQ ID NO: 4687406 - DNA, 25 bp, Homo sapien
ctcagtcacaaagttcacaggacga

SEQ ID NO: 4687407 - DNA, 25 bp, Homo sapien
cacaaagttcacaggacgaaatgca

SEQ ID NO: 4687408 - DNA, 25 bp, Homo sapien
cctttagaaatgctctttgtgagga

SEQ ID NO: 4687409 - DNA, 25 bp, Homo sapien
catttgcagaaagagcgctcataaa

SEQ ID NO: 4687410 - DNA, 25 bp, Homo sapien
acctttagaaatgctctttgtgagg

SEQ ID NO: 4687411 - DNA, 25 bp, Homo sapien
gaaagagcgctcataaagaaatgtg

SEQ ID NO: 4687412 - DNA, 25 bp, Homo sapien
ctgttcacatcaacatctgaagctg

SEQ ID NO: 4687413 - DNA, 25 bp, Homo sapien
tgttcacatcaacatctgaagctgc

SEQ ID NO: 4687414 - DNA, 25 bp, Homo sapien
tcctgttcacatcaacatctgaagc

SEQ ID NO: 4687415 - DNA, 25 bp, Homo sapien
ccttcctgttcacatcaacatctga

SEQ ID NO: 4687416 - DNA, 25 bp, Homo sapien
ctgcttggctgtgcattgtgtcaca

SEQ ID NO: 4687417 - DNA, 25 bp, Homo sapien
tgcttggctgtgcattgtgtcacat

SEQ ID NO: 4687418 - DNA, 25 bp, Homo sapien
tctcccttttgggtgtagagttcat

SEQ ID NO: 4687419 - DNA, 25 bp, Homo sapien
ttctcccttttgggtgtagagttca

SEQ ID NO: 4687420 - DNA, 25 bp, Homo sapien
gacaccctttttgactagcacactg

SEQ ID NO: 4687421 - DNA, 25 bp, Homo sapien
tttgactagcacactgattcctaac

SEQ ID NO: 4687422 - DNA, 25 bp, Homo sapien
acttgacaccctttttgactagcac

SEQ ID NO: 4687423 - DNA, 25 bp, Homo sapien
cctttttgactagcacactgattcc

SEQ ID NO: 4687424 - DNA, 25 bp, Homo sapien
tattttcataatccagatcttctga

SEQ ID NO: 4687425 - DNA, 25 bp, Homo sapien
tcagccatgtagcatattttcataa

SEQ ID NO: 4687426 - DNA, 25 bp, Homo sapien
ttctgactttacactgaggtcttct

SEQ ID NO: 4687427 - DNA, 25 bp, Homo sapien
tcttccattagctgtagcaggcttg

SEQ ID NO: 4687428 - DNA, 25 bp, Homo sapien
attatcccagaagagtctgctgtcg

SEQ ID NO: 4687429 - DNA, 25 bp, Homo sapien
ttatcccagaagagtctgctgtcgt

SEQ ID NO: 4687430 - DNA, 25 bp, Homo sapien
ctccccaatgcattatcccagaaga

SEQ ID NO: 4687431 - DNA, 25 bp, Homo sapien
cccaatgcattatcccagaagagtc

SEQ ID NO: 4687432 - DNA, 25 bp, Homo sapien
cgtgcatcagctctagtatttccct

SEQ ID NO: 4687433 - DNA, 25 bp, Homo sapien
agccttttgacctgaaaccttcctg

SEQ ID NO: 4687434 - DNA, 25 bp, Homo sapien
acacatagttgaaggaagtgtgaac

SEQ ID NO: 4687435 - DNA, 25 bp, Homo sapien
tatttccctgaacactagccttttg

SEQ ID NO: 4687436 - DNA, 25 bp, Homo sapien
tttcctttgtgactttgatgtagcc

SEQ ID NO: 4687437 - DNA, 25 bp, Homo sapien
tgtgactttgatgtagccagctata

SEQ ID NO: 4687438 - DNA, 25 bp, Homo sapien
tatagttctgccaataatacagtaa

SEQ ID NO: 4687439 - DNA, 25 bp, Homo sapien
tgtagccagctatagttctgccaat

SEQ ID NO: 4687440 - DNA, 25 bp, Homo sapien
tgtcataactggctctagtaggaca

SEQ ID NO: 4687441 - DNA, 25 bp, Homo sapien
ggacaggatctggaagcaaacgagc

SEQ ID NO: 4687442 - DNA, 25 bp, Homo sapien
aacgagcctgccagcctcataggca

SEQ ID NO: 4687443 - DNA, 25 bp, Homo sapien
cataactggctctagtaggacagga

SEQ ID NO: 4687444 - DNA, 25 bp, Homo sapien
tacaaggcgtgggattctgttcatg

SEQ ID NO: 4687445 - DNA, 25 bp, Homo sapien
tacactcgcaattggctgcaaaacc

SEQ ID NO: 4687446 - DNA, 25 bp, Homo sapien
tcacccaccaaggatgtacaaggcg

SEQ ID NO: 4687447 - DNA, 25 bp, Homo sapien
agatccctgtggatgtcacccacca

SEQ ID NO: 4687448 - DNA, 25 bp, Homo sapien
aatgctggcaatacaggcttttctg

SEQ ID NO: 4687449 - DNA, 25 bp, Homo sapien
tcatctaagctgcaggcactctgct

SEQ ID NO: 4687450 - DNA, 25 bp, Homo sapien
ccaggtgaaccagatgcattgattt

SEQ ID NO: 4687451 - DNA, 25 bp, Homo sapien
tctccagtaatgctggcaatacagg

SEQ ID NO: 4687452 - DNA, 25 bp, Homo sapien
tcagcagccaactgtgttgacctgg

SEQ ID NO: 4687453 - DNA, 25 bp, Homo sapien
tatttgccttttaacgatgtgcccc

SEQ ID NO: 4687454 - DNA, 25 bp, Homo sapien
tggatgttggtcctgattatttgcc

SEQ ID NO: 4687455 - DNA, 25 bp, Homo sapien
gcccctgcacatgttgcttgactga

SEQ ID NO: 4687456 - DNA, 25 bp, Homo sapien
gtattactccacctttttgcccata

SEQ ID NO: 4687457 - DNA, 25 bp, Homo sapien
tgaagctttcttggacgcaaatggg

SEQ ID NO: 4687458 - DNA, 25 bp, Homo sapien
cacctttttgcccatattgccaaca

SEQ ID NO: 4687459 - DNA, 25 bp, Homo sapien
gacgcaaatgggtttcacttcttca

SEQ ID NO: 4687460 - DNA, 25 bp, Homo sapien
cataagtttgttgctagagccgctc

SEQ ID NO: 4687461 - DNA, 25 bp, Homo sapien
gatttgacccgtctcttgggcacag

SEQ ID NO: 4687462 - DNA, 25 bp, Homo sapien
cagtgcccaccacagagacagtggt

SEQ ID NO: 4687463 - DNA, 25 bp, Homo sapien
gaatgatcagctggtaaaatctctg

SEQ ID NO: 4687464 - DNA, 25 bp, Homo sapien
tgcctgttacaagactatcagtcat

SEQ ID NO: 4687465 - DNA, 25 bp, Homo sapien
tctttgcctgttacaagactatcag

SEQ ID NO: 4687466 - DNA, 25 bp, Homo sapien
tttgcctgttacaagactatcagtc

SEQ ID NO: 4687467 - DNA, 25 bp, Homo sapien
tgtctttgcctgttacaagactatc

SEQ ID NO: 4687468 - DNA, 25 bp, Homo sapien
gacaccagcaaattggaggcaactg

SEQ ID NO: 4687469 - DNA, 25 bp, Homo sapien
ctgtcctagtagcattaagggttgc

SEQ ID NO: 4687470 - DNA, 25 bp, Homo sapien
gctactgcagtcctgaaaaggacca

SEQ ID NO: 4687471 - DNA, 25 bp, Homo sapien
cagtggagtgagttctgtcctagta

SEQ ID NO: 4687472 - DNA, 25 bp, Homo sapien
caatcagggatgttgcttagcaacc

SEQ ID NO: 4687473 - DNA, 25 bp, Homo sapien
tttcaaggcaatcagggatgttgct

SEQ ID NO: 4687474 - DNA, 25 bp, Homo sapien
aaggcaatcagggatgttgcttagc

SEQ ID NO: 4687475 - DNA, 25 bp, Homo sapien
cccatttcaaggcaatcagggatgt

SEQ ID NO: 4687476 - DNA, 25 bp, Homo sapien
cttctcaaacacctcagggaagcct

SEQ ID NO: 4687477 - DNA, 25 bp, Homo sapien
tctggcaaagcagtattgactgtgc

SEQ ID NO: 4687478 - DNA, 25 bp, Homo sapien
ttctcaaacacctcagggaagcctg

SEQ ID NO: 4687479 - DNA, 25 bp, Homo sapien
cagtattgactgtgcatcactcttg

SEQ ID NO: 4687480 - DNA, 25 bp, Homo sapien
tgccttctttgatacagcccacaac

SEQ ID NO: 4687481 - DNA, 25 bp, Homo sapien
ttctttgatacagcccacaacctca

SEQ ID NO: 4687482 - DNA, 25 bp, Homo sapien
ttaatgccttctttgatacagccca

SEQ ID NO: 4687483 - DNA, 25 bp, Homo sapien
aatgccttctttgatacagcccaca

SEQ ID NO: 4687484 - DNA, 25 bp, Homo sapien
actaggaatttccagacacatgatg

SEQ ID NO: 4687485 - DNA, 25 bp, Homo sapien
caatgtgtacctatgatccacagaa

SEQ ID NO: 4687486 - DNA, 25 bp, Homo sapien
ccaaattctgtctcctctatgaagg

SEQ ID NO: 4687487 - DNA, 25 bp, Homo sapien
gctattttctacagcacgagcacct

SEQ ID NO: 4687488 - DNA, 25 bp, Homo sapien
gagatccaacttgagggtcccctaa

SEQ ID NO: 4687489 - DNA, 25 bp, Homo sapien
caaagtcagcgatgaagattgggct

SEQ ID NO: 4687490 - DNA, 25 bp, Homo sapien
gcctcacagagcatggtcagttgat

SEQ ID NO: 4687491 - DNA, 25 bp, Homo sapien
cagttgatccaagtgcctgctagca

SEQ ID NO: 4687492 - DNA, 25 bp, Homo sapien
tccttcctgatcgtttgctgtgtga

SEQ ID NO: 4687493 - DNA, 25 bp, Homo sapien
tggagcacatccacactcagttgta

SEQ ID NO: 4687494 - DNA, 25 bp, Homo sapien
tatttcaccaggtggccctatggtc

SEQ ID NO: 4687495 - DNA, 25 bp, Homo sapien
ggtacctgtggctgaaaaatctaaa

SEQ ID NO: 4687496 - DNA, 25 bp, Homo sapien
aaacgcagccagtgccctcagggca

SEQ ID NO: 4687497 - DNA, 25 bp, Homo sapien
aacgcagccagtgccctcagggcag

SEQ ID NO: 4687498 - DNA, 25 bp, Homo sapien
gaaagattaaggctccaaacgcagc

SEQ ID NO: 4687499 - DNA, 25 bp, Homo sapien
ctcagaaagattaaggctccaaacg

SEQ ID NO: 4687500 - DNA, 25 bp, Homo sapien
cagccaactaggacatgctcactgg

SEQ ID NO: 4687501 - DNA, 25 bp, Homo sapien
cagagacatgcgctcatccagatgc

SEQ ID NO: 4687502 - DNA, 25 bp, Homo sapien
gaaacattgacgtttcagcaaagca

SEQ ID NO: 4687503 - DNA, 25 bp, Homo sapien
gcaaagcatgtccataggcagtttc

SEQ ID NO: 4687504 - DNA, 25 bp, Homo sapien
cttgagcacctgtgtagtgcctgtt

SEQ ID NO: 4687505 - DNA, 25 bp, Homo sapien
tttctttattgagtcgctgtatctt

SEQ ID NO: 4687506 - DNA, 25 bp, Homo sapien
tttattgagtcgctgtatcttgagc

SEQ ID NO: 4687507 - DNA, 25 bp, Homo sapien
gctgtatcttgagcacctgtgtagt

SEQ ID NO: 4687508 - DNA, 25 bp, Homo sapien
gttccttggcagcatgaagttttac

SEQ ID NO: 4687509 - DNA, 25 bp, Homo sapien
gagctcagttccttggcagcatgaa

SEQ ID NO: 4687510 - DNA, 25 bp, Homo sapien
ctgagagatcaaatgggagctcagt

SEQ ID NO: 4687511 - DNA, 25 bp, Homo sapien
ctgtgtatgttaaaagtggctgaga

SEQ ID NO: 4687512 - DNA, 25 bp, Homo sapien
agcgtgattgctctcggagtaatga

SEQ ID NO: 4687513 - DNA, 25 bp, Homo sapien
gagtaatgagaagccgaatttggga

SEQ ID NO: 4687514 - DNA, 25 bp, Homo sapien
gagaagccgaatttgggaagttgac

SEQ ID NO: 4687515 - DNA, 25 bp, Homo sapien
gctctcggagtaatgagaagccgaa

SEQ ID NO: 4687516 - DNA, 25 bp, Homo sapien
atttactgacctgattaggaaacac

SEQ ID NO: 4687517 - DNA, 25 bp, Homo sapien
tttactgacctgattaggaaacacc

SEQ ID NO: 4687518 - DNA, 25 bp, Homo sapien
tgatttactgacctgattaggaaac

SEQ ID NO: 4687519 - DNA, 25 bp, Homo sapien
gatttactgacctgattaggaaaca

SEQ ID NO: 4687520 - DNA, 25 bp, Homo sapien
tcttttatttgtcttcgtgcagaga

SEQ ID NO: 4687521 - DNA, 25 bp, Homo sapien
ttcttgctgattttcagaagtttgt

SEQ ID NO: 4687522 - DNA, 25 bp, Homo sapien
caagatgttacatgcattcttgctg

SEQ ID NO: 4687523 - DNA, 25 bp, Homo sapien
agaagtttgtcaacaatgtctttta

SEQ ID NO: 4687524 - DNA, 25 bp, Homo sapien
agttgtagcaaggaatgcagtgcag

SEQ ID NO: 4687525 - DNA, 25 bp, Homo sapien
taagttgtagcaaggaatgcagtgc

SEQ ID NO: 4687526 - DNA, 25 bp, Homo sapien
aagttgtagcaaggaatgcagtgca

SEQ ID NO: 4687527 - DNA, 25 bp, Homo sapien
cttaagttgtagcaaggaatgcagt

SEQ ID NO: 4687528 - DNA, 25 bp, Homo sapien
aacatttgcagaaatctctcggctt

SEQ ID NO: 4687529 - DNA, 25 bp, Homo sapien
taacgcatctcggtttctgctccat

SEQ ID NO: 4687530 - DNA, 25 bp, Homo sapien
caagtgtaccgcaccaatccatctt

SEQ ID NO: 4687531 - DNA, 25 bp, Homo sapien
tttattgttacaagtgtaccgcacc

SEQ ID NO: 4687532 - DNA, 25 bp, Homo sapien
gagacggcttttaaccgttgctgta

SEQ ID NO: 4687533 - DNA, 25 bp, Homo sapien
tgaggcctgctctgtctaaatagtg

SEQ ID NO: 4687534 - DNA, 25 bp, Homo sapien
gaacagcagggtctcaattatctca

SEQ ID NO: 4687535 - DNA, 25 bp, Homo sapien
caatttgtcgtaggaacaggagtca

SEQ ID NO: 4687536 - DNA, 25 bp, Homo sapien
gatgtatacattccctggaccctca

SEQ ID NO: 4687537 - DNA, 25 bp, Homo sapien
agcaaaaatgctgagttttactgct

SEQ ID NO: 4687538 - DNA, 25 bp, Homo sapien
cagcaaaaatgctgagttttactgc

SEQ ID NO: 4687539 - DNA, 25 bp, Homo sapien
tcagcaaaaatgctgagttttactg

SEQ ID NO: 4687540 - DNA, 25 bp, Homo sapien
cggcacccttgtccgctcttcacct

SEQ ID NO: 4687541 - DNA, 25 bp, Homo sapien
cgcattcggggcgtccccgcgctcc

SEQ ID NO: 4687542 - DNA, 25 bp, Homo sapien
cctaccggcacccttgtccgctctt

SEQ ID NO: 4687543 - DNA, 25 bp, Homo sapien
ttgtccgctcttcacctggccgccc

SEQ ID NO: 4687544 - DNA, 25 bp, Homo sapien
gaataaaaagcgtcctcccgcagct

SEQ ID NO: 4687545 - DNA, 25 bp, Homo sapien
gcagctctccgccaaagacggacat

SEQ ID NO: 4687546 - DNA, 25 bp, Homo sapien
ccaaagacggacattgactccaggt

SEQ ID NO: 4687547 - DNA, 25 bp, Homo sapien
tgcccggaatgcgagctgcacgcag

SEQ ID NO: 4687548 - DNA, 25 bp, Homo sapien
cggctgagtatgagccaggctgcta

SEQ ID NO: 4687549 - DNA, 25 bp, Homo sapien
ttacggctgagtatgagccaggctg

SEQ ID NO: 4687550 - DNA, 25 bp, Homo sapien
tacggctgagtatgagccaggctgc

SEQ ID NO: 4687551 - DNA, 25 bp, Homo sapien
ctgagtatgagccaggctgctagga

SEQ ID NO: 4687552 - DNA, 25 bp, Homo sapien
tcccggaccccacggctgcaaactg

SEQ ID NO: 4687553 - DNA, 25 bp, Homo sapien
gagaccgcggcgcacttggacttcc

SEQ ID NO: 4687554 - DNA, 25 bp, Homo sapien
ttggacttccctctccattcgccag

SEQ ID NO: 4687555 - DNA, 25 bp, Homo sapien
tcattttcggccgtcgccggctaag

SEQ ID NO: 4687556 - DNA, 25 bp, Homo sapien
caaatgaactaagacctggaaaggt

SEQ ID NO: 4687557 - DNA, 25 bp, Homo sapien
gctcgagtgagccttaaatctgtcc

SEQ ID NO: 4687558 - DNA, 25 bp, Homo sapien
ttcggtggaaatagcaaacagctgc

SEQ ID NO: 4687559 - DNA, 25 bp, Homo sapien
tgatgaccaaggtgtcttcggagac

SEQ ID NO: 4687560 - DNA, 25 bp, Homo sapien
acagacttgacttgtgtagggcaca

SEQ ID NO: 4687561 - DNA, 25 bp, Homo sapien
ccttcccagtcggacttcttcattg

SEQ ID NO: 4687562 - DNA, 25 bp, Homo sapien
gaaagcgattggtttgtagagttaa

SEQ ID NO: 4687563 - DNA, 25 bp, Homo sapien
tagggcacagggcttactagaggta

SEQ ID NO: 4687564 - DNA, 25 bp, Homo sapien
gaaattaacgggtcatctagggctg

SEQ ID NO: 4687565 - DNA, 25 bp, Homo sapien
ccttttaggctagctggagcacatc

SEQ ID NO: 4687566 - DNA, 25 bp, Homo sapien
gggacacctgtcagcatctagaagc

SEQ ID NO: 4687567 - DNA, 25 bp, Homo sapien
tagatgtccagaagcagagtgactg

SEQ ID NO: 4687568 - DNA, 25 bp, Homo sapien
tcttaagccaaaataaccgtgtcat

SEQ ID NO: 4687569 - DNA, 25 bp, Homo sapien
taataagcaattcttccagtcaggt

SEQ ID NO: 4687570 - DNA, 25 bp, Homo sapien
gtggctatatcattgtgccagcacc

SEQ ID NO: 4687571 - DNA, 25 bp, Homo sapien
ggattaccttggatcctttgccaca

SEQ ID NO: 4687572 - DNA, 25 bp, Homo sapien
tttcccagacgaaccaagagtttgc

SEQ ID NO: 4687573 - DNA, 25 bp, Homo sapien
taatcgtcgccaagctaagccaggc

SEQ ID NO: 4687574 - DNA, 25 bp, Homo sapien
tgcagctctgttgggttcaaaccag

SEQ ID NO: 4687575 - DNA, 25 bp, Homo sapien
catgtgattactgggagaccatgca

SEQ ID NO: 4687576 - DNA, 25 bp, Homo sapien
gaatatgctaccctgagactgggtc

SEQ ID NO: 4687577 - DNA, 25 bp, Homo sapien
ggacagcctagagatctgggtagat

SEQ ID NO: 4687578 - DNA, 25 bp, Homo sapien
tctctgaagagaattagtgtacata

SEQ ID NO: 4687579 - DNA, 25 bp, Homo sapien
atctgggtagattggtggcagctgc

SEQ ID NO: 4687580 - DNA, 25 bp, Homo sapien
catggcaggtggctaattcagggac

SEQ ID NO: 4687581 - DNA, 25 bp, Homo sapien
caggtggctaattcagggactgcca

SEQ ID NO: 4687582 - DNA, 25 bp, Homo sapien
aggtggctaattcagggactgccat

SEQ ID NO: 4687583 - DNA, 25 bp, Homo sapien
ggcaggtggctaattcagggactgc

SEQ ID NO: 4687584 - DNA, 25 bp, Homo sapien
ttgccgttaaacaggaagatctgtg

SEQ ID NO: 4687585 - DNA, 25 bp, Homo sapien
aatacaatatctaggaaggctctcg

SEQ ID NO: 4687586 - DNA, 25 bp, Homo sapien
tcttctcacataacccagatttggt

SEQ ID NO: 4687587 - DNA, 25 bp, Homo sapien
aaggctctcgaaaagggcatcccct

SEQ ID NO: 4687588 - DNA, 25 bp, Homo sapien
cacatgttctgatagaagctcagca

SEQ ID NO: 4687589 - DNA, 25 bp, Homo sapien
tcagcctggtatgctccctggcagg

SEQ ID NO: 4687590 - DNA, 25 bp, Homo sapien
gacctgaggaactttagatatgctt

SEQ ID NO: 4687591 - DNA, 25 bp, Homo sapien
catttagggagtagccattgcattt

SEQ ID NO: 4687592 - DNA, 25 bp, Homo sapien
ggtaacgataatatgttctcttatt

SEQ ID NO: 4687593 - DNA, 25 bp, Homo sapien
cgataatatgttctcttattatgga

SEQ ID NO: 4687594 - DNA, 25 bp, Homo sapien
tgaaatggtaacgataatatgttct

SEQ ID NO: 4687595 - DNA, 25 bp, Homo sapien
aaatggtaacgataatatgttctct

SEQ ID NO: 4687596 - DNA, 25 bp, Homo sapien
ctggagccatttggcgatgatttgt

SEQ ID NO: 4687597 - DNA, 25 bp, Homo sapien
agccatttggcgatgatttgtaaat

SEQ ID NO: 4687598 - DNA, 25 bp, Homo sapien
gagccatttggcgatgatttgtaaa

SEQ ID NO: 4687599 - DNA, 25 bp, Homo sapien
ggagccatttggcgatgatttgtaa

SEQ ID NO: 4687600 - DNA, 25 bp, Homo sapien
tgcccatggaagcttgcaggaatag

SEQ ID NO: 4687601 - DNA, 25 bp, Homo sapien
gtttccaattagcttcttgtatctg

SEQ ID NO: 4687602 - DNA, 25 bp, Homo sapien
ggaagcttgcaggaatagctggaat

SEQ ID NO: 4687603 - DNA, 25 bp, Homo sapien
atctgcacagttaaccttttctgag

SEQ ID NO: 4687604 - DNA, 25 bp, Homo sapien
tattggccactggaacaagaaggaa

SEQ ID NO: 4687605 - DNA, 25 bp, Homo sapien
agaaagcgcttgatattcccaaaag

SEQ ID NO: 4687606 - DNA, 25 bp, Homo sapien
ctaggatatgacagagcaggatgca

SEQ ID NO: 4687607 - DNA, 25 bp, Homo sapien
cacttatatgtgagggcaactttcc

SEQ ID NO: 4687608 - DNA, 25 bp, Homo sapien
tccaaccacatttgaagtctatgag

SEQ ID NO: 4687609 - DNA, 25 bp, Homo sapien
tcctctgctgggattgtgtattccg

SEQ ID NO: 4687610 - DNA, 25 bp, Homo sapien
tttcatgcttattccctgccacttt

SEQ ID NO: 4687611 - DNA, 25 bp, Homo sapien
tatgagcacttgcagatcctgtttc

SEQ ID NO: 4687612 - DNA, 25 bp, Homo sapien
ttctctcgtggcaataaggaggtga

SEQ ID NO: 4687613 - DNA, 25 bp, Homo sapien
agcaccttcagttctctcgtggcaa

SEQ ID NO: 4687614 - DNA, 25 bp, Homo sapien
ttcagttctctcgtggcaataagga

SEQ ID NO: 4687615 - DNA, 25 bp, Homo sapien
tagggcagcaccttcagttctctcg

SEQ ID NO: 4687616 - DNA, 25 bp, Homo sapien
tgctctattcttggggaagccaccg

SEQ ID NO: 4687617 - DNA, 25 bp, Homo sapien
tccttggaggagatatctggcccac

SEQ ID NO: 4687618 - DNA, 25 bp, Homo sapien
caccgaagccaatcacagggcattg

SEQ ID NO: 4687619 - DNA, 25 bp, Homo sapien
gaagccaccgaagccaatcacaggg

SEQ ID NO: 4687620 - DNA, 25 bp, Homo sapien
tgaggtctcactgggcacaccaggg

SEQ ID NO: 4687621 - DNA, 25 bp, Homo sapien
gaccatggaaatagatggtgagttg

SEQ ID NO: 4687622 - DNA, 25 bp, Homo sapien
aatagatggtgagttgaggtctcac

SEQ ID NO: 4687623 - DNA, 25 bp, Homo sapien
caggctgaccagcatctaaggacca

SEQ ID NO: 4687624 - DNA, 25 bp, Homo sapien
ggtatatctgggttgtagggacact

SEQ ID NO: 4687625 - DNA, 25 bp, Homo sapien
caagccttgtgtaaagggtatatct

SEQ ID NO: 4687626 - DNA, 25 bp, Homo sapien
gacacttggaatctgggacttcact

SEQ ID NO: 4687627 - DNA, 25 bp, Homo sapien
cagaattgcacctttctttatgtct

SEQ ID NO: 4687628 - DNA, 25 bp, Homo sapien
gaactgtggtttccgcctcagagcc

SEQ ID NO: 4687629 - DNA, 25 bp, Homo sapien
tctgctggtcggtagccgcattggc

SEQ ID NO: 4687630 - DNA, 25 bp, Homo sapien
gacctggaactgtggtttccgcctc

SEQ ID NO: 4687631 - DNA, 25 bp, Homo sapien
tgccctctgctggtcggtagccgca

SEQ ID NO: 4687632 - DNA, 25 bp, Homo sapien
cgcgctcgcctcttgcatctcgcgg

SEQ ID NO: 4687633 - DNA, 25 bp, Homo sapien
cacgcgctcgcctcttgcatctcgc

SEQ ID NO: 4687634 - DNA, 25 bp, Homo sapien
gcgctcgcctcttgcatctcgcggc

SEQ ID NO: 4687635 - DNA, 25 bp, Homo sapien
acgcgctcgcctcttgcatctcgcg

SEQ ID NO: 4687636 - DNA, 25 bp, Homo sapien
catctcttgatatgtctgggtttgt

SEQ ID NO: 4687637 - DNA, 25 bp, Homo sapien
tccgtctgctccacaacatctccct

SEQ ID NO: 4687638 - DNA, 25 bp, Homo sapien
cctgtttcgtgagcacgcgctttgg

SEQ ID NO: 4687639 - DNA, 25 bp, Homo sapien
tctcttgatatgtctgggtttgttt

SEQ ID NO: 4687640 - DNA, 25 bp, Homo sapien
cactctgaatgtgtgtgtgtttcac

SEQ ID NO: 4687641 - DNA, 25 bp, Homo sapien
tcactctgaatgtgtgtgtgtttca

SEQ ID NO: 4687642 - DNA, 25 bp, Homo sapien
gatcatcttgttttggaaaccagcg

SEQ ID NO: 4687643 - DNA, 25 bp, Homo sapien
ctgaagatcatcttgttttggaaac

SEQ ID NO: 4687644 - DNA, 25 bp, Homo sapien
tcatcttgttttggaaaccagcggg

SEQ ID NO: 4687645 - DNA, 25 bp, Homo sapien
gattctgaagatcatcttgttttgg

SEQ ID NO: 4687646 - DNA, 25 bp, Homo sapien
ccagaggtgggccaacaaattcact

SEQ ID NO: 4687647 - DNA, 25 bp, Homo sapien
tagttctccagagaccaatacatcg

SEQ ID NO: 4687648 - DNA, 25 bp, Homo sapien
cattgttccctgcatatatgttccc

SEQ ID NO: 4687649 - DNA, 25 bp, Homo sapien
ttctgaaatgatctggaaaaggact

SEQ ID NO: 4687650 - DNA, 25 bp, Homo sapien
tctgctatctcttctctattgagct

SEQ ID NO: 4687651 - DNA, 25 bp, Homo sapien
gctatctcttctctattgagcttag

SEQ ID NO: 4687652 - DNA, 25 bp, Homo sapien
ctcttctctattgagcttagtgtgt

SEQ ID NO: 4687653 - DNA, 25 bp, Homo sapien
tctctgctatctcttctctattgag

SEQ ID NO: 4687654 - DNA, 25 bp, Homo sapien
caagccgccttggtctaggagaacc

SEQ ID NO: 4687655 - DNA, 25 bp, Homo sapien
gcaacaagccgccttggtctaggag

SEQ ID NO: 4687656 - DNA, 25 bp, Homo sapien
tgcagcagcaacaagccgccttggt

SEQ ID NO: 4687657 - DNA, 25 bp, Homo sapien
ttggtctaggagaaccccattccat

SEQ ID NO: 4687658 - DNA, 25 bp, Homo sapien
tgtacaccaattaagggcaggttcc

SEQ ID NO: 4687659 - DNA, 25 bp, Homo sapien
ccaggaaaagattctgatcagtccc

SEQ ID NO: 4687660 - DNA, 25 bp, Homo sapien
agtagtctgtggctgtgtacaccaa

SEQ ID NO: 4687661 - DNA, 25 bp, Homo sapien
tggagagtggaatcaaaccctcatt

SEQ ID NO: 4687662 - DNA, 25 bp, Homo sapien
gacagggaccgtatcaatacttgtt

SEQ ID NO: 4687663 - DNA, 25 bp, Homo sapien
aacacgtagacgatggagtgattgc

SEQ ID NO: 4687664 - DNA, 25 bp, Homo sapien
gtttggttgtgagaacacgtagacg

SEQ ID NO: 4687665 - DNA, 25 bp, Homo sapien
tatcaatacttgtttggttgtgaga

SEQ ID NO: 4687666 - DNA, 25 bp, Homo sapien
gagttaatttgacccgaagctcaga

SEQ ID NO: 4687667 - DNA, 25 bp, Homo sapien
taatcagggaacaggtgggtacaga

SEQ ID NO: 4687668 - DNA, 25 bp, Homo sapien
cacagcggttatcggtgggaacagc

SEQ ID NO: 4687669 - DNA, 25 bp, Homo sapien
tgggcctcctggtaatagacgaaac

SEQ ID NO: 4687670 - DNA, 25 bp, Homo sapien
tgctactgcttgtgagagggaatgg

SEQ ID NO: 4687671 - DNA, 25 bp, Homo sapien
cctgctactgcttgtgagagggaat

SEQ ID NO: 4687672 - DNA, 25 bp, Homo sapien
ctgctactgcttgtgagagggaatg

SEQ ID NO: 4687673 - DNA, 25 bp, Homo sapien
tcctgctactgcttgtgagagggaa

SEQ ID NO: 4687674 - DNA, 25 bp, Homo sapien
ctagacttgtgacactcgaaagact

SEQ ID NO: 4687675 - DNA, 25 bp, Homo sapien
tagacttgtgacactcgaaagactt

SEQ ID NO: 4687676 - DNA, 25 bp, Homo sapien
caaacaccctctggtcatggagagc

SEQ ID NO: 4687677 - DNA, 25 bp, Homo sapien
cttgtggctctaattggtgccaaac

SEQ ID NO: 4687678 - DNA, 25 bp, Homo sapien
taaaataaatgcgttgcagaagaac

SEQ ID NO: 4687679 - DNA, 25 bp, Homo sapien
ggttcaagtcattgatcatagctct

SEQ ID NO: 4687680 - DNA, 25 bp, Homo sapien
aagatgattagatgtgtactccggg

SEQ ID NO: 4687681 - DNA, 25 bp, Homo sapien
gagtgcaatcagacacccatctggg

SEQ ID NO: 4687682 - DNA, 25 bp, Homo sapien
actgaatcttgatttgagtgcaatc

SEQ ID NO: 4687683 - DNA, 25 bp, Homo sapien
cctttgggcactgaagactgaatct

SEQ ID NO: 4687684 - DNA, 25 bp, Homo sapien
tgctgcatatgtttgctctttacac

SEQ ID NO: 4687685 - DNA, 25 bp, Homo sapien
gctgcatatgtttgctctttacaca

SEQ ID NO: 4687686 - DNA, 25 bp, Homo sapien
tcaagttgctgcatatgtttgctct

SEQ ID NO: 4687687 - DNA, 25 bp, Homo sapien
agttgctgcatatgtttgctcttta

SEQ ID NO: 4687688 - DNA, 25 bp, Homo sapien
gtctccaagaaattgacatctgatg

SEQ ID NO: 4687689 - DNA, 25 bp, Homo sapien
tgtgagcaggaagtgtgagtggatg

SEQ ID NO: 4687690 - DNA, 25 bp, Homo sapien
agctccccactgtagacgctgacgg

SEQ ID NO: 4687691 - DNA, 25 bp, Homo sapien
acatctgatgtgggctggagcagcc

SEQ ID NO: 4687692 - DNA, 25 bp, Homo sapien
cttgcataacagagtcacagaatgt

SEQ ID NO: 4687693 - DNA, 25 bp, Homo sapien
ccttgcataacagagtcacagaatg

SEQ ID NO: 4687694 - DNA, 25 bp, Homo sapien
cccttgcataacagagtcacagaat

SEQ ID NO: 4687695 - DNA, 25 bp, Homo sapien
cctctgtacctcccttgcataacag

SEQ ID NO: 4687696 - DNA, 25 bp, Homo sapien
gaatcatccccataggtccactgga

SEQ ID NO: 4687697 - DNA, 25 bp, Homo sapien
ataggtccactggaccttcttttgg

SEQ ID NO: 4687698 - DNA, 25 bp, Homo sapien
tcctgccagaatcatccccataggt

SEQ ID NO: 4687699 - DNA, 25 bp, Homo sapien
aactaaaaagtgaatcctgccagaa

SEQ ID NO: 4687700 - DNA, 25 bp, Homo sapien
tgtggccctccattgattcctgtga

SEQ ID NO: 4687701 - DNA, 25 bp, Homo sapien
gacagtcttgtcctttgtggccctc

SEQ ID NO: 4687702 - DNA, 25 bp, Homo sapien
tctaaactgttgtgacaccactggt

SEQ ID NO: 4687703 - DNA, 25 bp, Homo sapien
cactggtcccttcatgtgttcatgt

SEQ ID NO: 4687704 - DNA, 25 bp, Homo sapien
gatagagacaaacgaccaattcgca

SEQ ID NO: 4687705 - DNA, 25 bp, Homo sapien
tagagacaaacgaccaattcgcact

SEQ ID NO: 4687706 - DNA, 25 bp, Homo sapien
caaacgaccaattcgcacttgttct

SEQ ID NO: 4687707 - DNA, 25 bp, Homo sapien
gagacaaacgaccaattcgcacttg

SEQ ID NO: 4687708 - DNA, 25 bp, Homo sapien
agaaaaattgtggaagactcctgag

SEQ ID NO: 4687709 - DNA, 25 bp, Homo sapien
tgcttccagaggagtgagcgaatga

SEQ ID NO: 4687710 - DNA, 25 bp, Homo sapien
aagaatgacagtgggccactttatt

SEQ ID NO: 4687711 - DNA, 25 bp, Homo sapien
ggagacagcgtgtaagaatgacagt

SEQ ID NO: 4687712 - DNA, 25 bp, Homo sapien
taaccatgttacagcctttattgtt

SEQ ID NO: 4687713 - DNA, 25 bp, Homo sapien
aactcaatcgtatttaagtctctgg

SEQ ID NO: 4687714 - DNA, 25 bp, Homo sapien
ttatcctcggaatttagaatgcaaa

SEQ ID NO: 4687715 - DNA, 25 bp, Homo sapien
gaatgcaaaagggagcagtagctct

SEQ ID NO: 4687716 - DNA, 25 bp, Homo sapien
tctttttctgtcctaactagctctg

SEQ ID NO: 4687717 - DNA, 25 bp, Homo sapien
gacctgagcattcaagttgcccttt

SEQ ID NO: 4687718 - DNA, 25 bp, Homo sapien
ttggctccagagacctcttctccta

SEQ ID NO: 4687719 - DNA, 25 bp, Homo sapien
tcctaactagctctgcccttttcag

SEQ ID NO: 4687720 - DNA, 25 bp, Homo sapien
ggaagtccacgacaaagatctcccc

SEQ ID NO: 4687721 - DNA, 25 bp, Homo sapien
gggaagtccacgacaaagatctccc

SEQ ID NO: 4687722 - DNA, 25 bp, Homo sapien
aaagatctcccctagtttgcttctc

SEQ ID NO: 4687723 - DNA, 25 bp, Homo sapien
cccctagtttgcttctctaaaacag

SEQ ID NO: 4687724 - DNA, 25 bp, Homo sapien
tgaaggaagcgagtggaacccagac

SEQ ID NO: 4687725 - DNA, 25 bp, Homo sapien
cactccatcctcaccagatgaagga

SEQ ID NO: 4687726 - DNA, 25 bp, Homo sapien
tggggtgaagccaaacaacactgaa

SEQ ID NO: 4687727 - DNA, 25 bp, Homo sapien
gaaatgaaggaagcgagtggaaccc

SEQ ID NO: 4687728 - DNA, 25 bp, Homo sapien
aggcctgaacctctatctctggtag

SEQ ID NO: 4687729 - DNA, 25 bp, Homo sapien
caggcctgaacctctatctctggta

SEQ ID NO: 4687730 - DNA, 25 bp, Homo sapien
ggcctgaacctctatctctggtagc

SEQ ID NO: 4687731 - DNA, 25 bp, Homo sapien
cctgaacctctatctctggtagctc

SEQ ID NO: 4687732 - DNA, 25 bp, Homo sapien
actgcagcctcctggtttccggctg

SEQ ID NO: 4687733 - DNA, 25 bp, Homo sapien
agcctcctggtttccggctgccact

SEQ ID NO: 4687734 - DNA, 25 bp, Homo sapien
gcctcctggtttccggctgccactg

SEQ ID NO: 4687735 - DNA, 25 bp, Homo sapien
gcagcctcctggtttccggctgcca

SEQ ID NO: 4687736 - DNA, 25 bp, Homo sapien
caccataaactctgcaggatgtctc

SEQ ID NO: 4687737 - DNA, 25 bp, Homo sapien
acaccataaactctgcaggatgtct

SEQ ID NO: 4687738 - DNA, 25 bp, Homo sapien
taattgccgctcgagattcctcctg

SEQ ID NO: 4687739 - DNA, 25 bp, Homo sapien
tctgttggcataacttgcaataatg

SEQ ID NO: 4687740 - DNA, 25 bp, Homo sapien
aattagcaccgccaactctgtctta

SEQ ID NO: 4687741 - DNA, 25 bp, Homo sapien
tgcagattgcatccttccagggcca

SEQ ID NO: 4687742 - DNA, 25 bp, Homo sapien
tacactgtaaccacaatttgaggct

SEQ ID NO: 4687743 - DNA, 25 bp, Homo sapien
gatgctggacaccacttcctgaagc

SEQ ID NO: 4687744 - DNA, 25 bp, Homo sapien
gaggctccccggaacttgaagtcca

SEQ ID NO: 4687745 - DNA, 25 bp, Homo sapien
gcacaaatttgccactacactgtaa

SEQ ID NO: 4687746 - DNA, 25 bp, Homo sapien
cctgtggatccccttgtgtcctgct

SEQ ID NO: 4687747 - DNA, 25 bp, Homo sapien
agcattatccggtgctgactctgag

SEQ ID NO: 4687748 - DNA, 25 bp, Homo sapien
aagggcatgattctttgtcctgtgg

SEQ ID NO: 4687749 - DNA, 25 bp, Homo sapien
tctgagacaggtgtggcagcattat

SEQ ID NO: 4687750 - DNA, 25 bp, Homo sapien
gaacattctgcaaatcctcatctgg

SEQ ID NO: 4687751 - DNA, 25 bp, Homo sapien
cctcatctgggagttggttgtagaa

SEQ ID NO: 4687752 - DNA, 25 bp, Homo sapien
tgctgagagtttggcctcatcccaa

SEQ ID NO: 4687753 - DNA, 25 bp, Homo sapien
tgagttcccacaagctaagaacatt

SEQ ID NO: 4687754 - DNA, 25 bp, Homo sapien
ccttggattgcccaggaatagttca

SEQ ID NO: 4687755 - DNA, 25 bp, Homo sapien
gaataaactgagcacatcactcggc

SEQ ID NO: 4687756 - DNA, 25 bp, Homo sapien
tctcatacttgaacattgctttgca

SEQ ID NO: 4687757 - DNA, 25 bp, Homo sapien
catcactcggcatttcatattttcc

SEQ ID NO: 4687758 - DNA, 25 bp, Homo sapien
actaaggatacaactgaccataccc

SEQ ID NO: 4687759 - DNA, 25 bp, Homo sapien
catactaaggatacaactgaccata

SEQ ID NO: 4687760 - DNA, 25 bp, Homo sapien
ccataccctttaatcgattgtccat

SEQ ID NO: 4687761 - DNA, 25 bp, Homo sapien
ggccatactaaggatacaactgacc

SEQ ID NO: 4687762 - DNA, 25 bp, Homo sapien
ttgattaattccagcccagcaccca

SEQ ID NO: 4687763 - DNA, 25 bp, Homo sapien
cttcaacttgattaattccagccca

SEQ ID NO: 4687764 - DNA, 25 bp, Homo sapien
ccagagatcatctgactgcctctat

SEQ ID NO: 4687765 - DNA, 25 bp, Homo sapien
agatcatctgactgcctctattgcc

SEQ ID NO: 4687766 - DNA, 25 bp, Homo sapien
tgtggggctttacaattcctctgta

SEQ ID NO: 4687767 - DNA, 25 bp, Homo sapien
gaaaatgaccatggacaggaaactt

SEQ ID NO: 4687768 - DNA, 25 bp, Homo sapien
caatcagcacaaccagacatcgtct

SEQ ID NO: 4687769 - DNA, 25 bp, Homo sapien
gggacaaacagatgtttgttatatg

SEQ ID NO: 4687770 - DNA, 25 bp, Homo sapien
ctttttggatagattaggccttcca

SEQ ID NO: 4687771 - DNA, 25 bp, Homo sapien
tggatagattaggccttccatacaa

SEQ ID NO: 4687772 - DNA, 25 bp, Homo sapien
ttttggatagattaggccttccata

SEQ ID NO: 4687773 - DNA, 25 bp, Homo sapien
ttggatagattaggccttccataca

SEQ ID NO: 4687774 - DNA, 25 bp, Homo sapien
caacagtcctgcttacagagtaaca

SEQ ID NO: 4687775 - DNA, 25 bp, Homo sapien
tgtgccttggttcatccctaagcct

SEQ ID NO: 4687776 - DNA, 25 bp, Homo sapien
tccaattggttgtatccaacagtcc

SEQ ID NO: 4687777 - DNA, 25 bp, Homo sapien
atgctgtctttctatccctgtgcct

SEQ ID NO: 4687778 - DNA, 25 bp, Homo sapien
ctgaaagcacagtacagctcagcca

SEQ ID NO: 4687779 - DNA, 25 bp, Homo sapien
aaacactgaaagcacagtacagctc

SEQ ID NO: 4687780 - DNA, 25 bp, Homo sapien
cactgaaagcacagtacagctcagc

SEQ ID NO: 4687781 - DNA, 25 bp, Homo sapien
tgaaagcacagtacagctcagccat

SEQ ID NO: 4687782 - DNA, 25 bp, Homo sapien
cttgagggcctagggagtcacgaat

SEQ ID NO: 4687783 - DNA, 25 bp, Homo sapien
cacgaatttttgaatgacatgattc

SEQ ID NO: 4687784 - DNA, 25 bp, Homo sapien
gggagtcacgaatttttgaatgaca

SEQ ID NO: 4687785 - DNA, 25 bp, Homo sapien
ggcctagggagtcacgaatttttga

SEQ ID NO: 4687786 - DNA, 25 bp, Homo sapien
actggtgaaaaacatgcaggacatt

SEQ ID NO: 4687787 - DNA, 25 bp, Homo sapien
caatgggcagaatttgatgaactgg

SEQ ID NO: 4687788 - DNA, 25 bp, Homo sapien
gcagaatttgatgaactggtgaaaa

SEQ ID NO: 4687789 - DNA, 25 bp, Homo sapien
ttcaatgggcagaatttgatgaact

SEQ ID NO: 4687790 - DNA, 25 bp, Homo sapien
tgagaaggagtttacccaggtgaca

SEQ ID NO: 4687791 - DNA, 25 bp, Homo sapien
caggtgacaaggtcccatgcttggc

SEQ ID NO: 4687792 - DNA, 25 bp, Homo sapien
gaaccacatgtctcccatagaatga

SEQ ID NO: 4687793 - DNA, 25 bp, Homo sapien
cattcagcgtcagaataatcacagc

SEQ ID NO: 4687794 - DNA, 25 bp, Homo sapien
gtttatgtgttgaagactgtctgta

SEQ ID NO: 4687795 - DNA, 25 bp, Homo sapien
tatgggatgatgtgttccaaactcc

SEQ ID NO: 4687796 - DNA, 25 bp, Homo sapien
cgaaggcacttttggcagcataacc

SEQ ID NO: 4687797 - DNA, 25 bp, Homo sapien
caaacatctgagttacgaaggcact

SEQ ID NO: 4687798 - DNA, 25 bp, Homo sapien
ggaactttgttatcatggccattgg

SEQ ID NO: 4687799 - DNA, 25 bp, Homo sapien
agcatctggcccgaggttttccctg

SEQ ID NO: 4687800 - DNA, 25 bp, Homo sapien
actttgttatcatggccattggtct

SEQ ID NO: 4687801 - DNA, 25 bp, Homo sapien
gctgagcatctggcccgaggttttc

SEQ ID NO: 4687802 - DNA, 25 bp, Homo sapien
ctgtgtcatgcccatgttgggtgct

SEQ ID NO: 4687803 - DNA, 25 bp, Homo sapien
gtgtcatgcccatgttgggtgctga

SEQ ID NO: 4687804 - DNA, 25 bp, Homo sapien
gaggacaatgactgtaacagccatg

SEQ ID NO: 4687805 - DNA, 25 bp, Homo sapien
caatgactgtaacagccatgctctt

SEQ ID NO: 4687806 - DNA, 25 bp, Homo sapien
ggttctatggtcaggtctggcttca

SEQ ID NO: 4687807 - DNA, 25 bp, Homo sapien
tatgaccacgtgcttaagatgctgg

SEQ ID NO: 4687808 - DNA, 25 bp, Homo sapien
tgagtgccagggatctcagagcaca

SEQ ID NO: 4687809 - DNA, 25 bp, Homo sapien
cagagcagccaagggttgagtgcca

SEQ ID NO: 4687810 - DNA, 25 bp, Homo sapien
tagacttgggcttgcaaagggtgat

SEQ ID NO: 4687811 - DNA, 25 bp, Homo sapien
tgggcttgcaaagggtgatccttgc

SEQ ID NO: 4687812 - DNA, 25 bp, Homo sapien
gatggtatcattagacttgggcttg

SEQ ID NO: 4687813 - DNA, 25 bp, Homo sapien
tatcattagacttgggcttgcaaag

SEQ ID NO: 4687814 - DNA, 25 bp, Homo sapien
gccttataaaacttgtaacaacaga

SEQ ID NO: 4687815 - DNA, 25 bp, Homo sapien
caatttctttcagccttataaaact

SEQ ID NO: 4687816 - DNA, 25 bp, Homo sapien
tataaaacttgtaacaacagaatct

SEQ ID NO: 4687817 - DNA, 25 bp, Homo sapien
gcaactcataccatgataatctgca

SEQ ID NO: 4687818 - DNA, 25 bp, Homo sapien
tgataatctgcatttgactgaatgt

SEQ ID NO: 4687819 - DNA, 25 bp, Homo sapien
cacttgcagcaactcataccatgat

SEQ ID NO: 4687820 - DNA, 25 bp, Homo sapien
cagaacctccaatgtacacttgcag

SEQ ID NO: 4687821 - DNA, 25 bp, Homo sapien
ataactgacgttgacttccctctgc

SEQ ID NO: 4687822 - DNA, 25 bp, Homo sapien
gctgtaaattcaagtgggtgtagtt

SEQ ID NO: 4687823 - DNA, 25 bp, Homo sapien
taagatgtactctggagctagatcc

SEQ ID NO: 4687824 - DNA, 25 bp, Homo sapien
tagtcatctgtgaatccgcagtccc

SEQ ID NO: 4687825 - DNA, 25 bp, Homo sapien
atttcttccgattgactgtccctgg

SEQ ID NO: 4687826 - DNA, 25 bp, Homo sapien
gtatgggtcagaatagtggcctcca

SEQ ID NO: 4687827 - DNA, 25 bp, Homo sapien
gctataagtctgagtggcatcaccc

SEQ ID NO: 4687828 - DNA, 25 bp, Homo sapien
tcagtaagcgatgcaatgtctcagg

SEQ ID NO: 4687829 - DNA, 25 bp, Homo sapien
aagtctgccggcatcataatgagca

SEQ ID NO: 4687830 - DNA, 25 bp, Homo sapien
aatgagctggcttgaaaagtctgcc

SEQ ID NO: 4687831 - DNA, 25 bp, Homo sapien
tgtaaaaggccctagtaagaggcag

SEQ ID NO: 4687832 - DNA, 25 bp, Homo sapien
gaactgctctctcggaaatcttgtg

SEQ ID NO: 4687833 - DNA, 25 bp, Homo sapien
taaaagctctgaccggcattgtcca

SEQ ID NO: 4687834 - DNA, 25 bp, Homo sapien
gccagtggatttggaggtcctcttg

SEQ ID NO: 4687835 - DNA, 25 bp, Homo sapien
tgtccaaaacctccacaccttgtgg

SEQ ID NO: 4687836 - DNA, 25 bp, Homo sapien
aaactatccctcaataaaagctctg

SEQ ID NO: 4687837 - DNA, 25 bp, Homo sapien
cttaagcttcactgtctggtgcttc

SEQ ID NO: 4687838 - DNA, 25 bp, Homo sapien
tggcttaagcttcactgtctggtgc

SEQ ID NO: 4687839 - DNA, 25 bp, Homo sapien
ctctgtggcttaagcttcactgtct

SEQ ID NO: 4687840 - DNA, 25 bp, Homo sapien
tgtggcttaagcttcactgtctggt

SEQ ID NO: 4687841 - DNA, 25 bp, Homo sapien
aaccgtggtcatagcctcctgatgg

SEQ ID NO: 4687842 - DNA, 25 bp, Homo sapien
tcccagtggtgagcctgatgacctg

SEQ ID NO: 4687843 - DNA, 25 bp, Homo sapien
gactgagagccattgaactaactga

SEQ ID NO: 4687844 - DNA, 25 bp, Homo sapien
tgccttatcatgagtgtgccacaac

SEQ ID NO: 4687845 - DNA, 25 bp, Homo sapien
ttcaaatgattctggtagaacaccc

SEQ ID NO: 4687846 - DNA, 25 bp, Homo sapien
aatgattctggtagaacacccagca

SEQ ID NO: 4687847 - DNA, 25 bp, Homo sapien
ccttgcttcaaatgattctggtaga

SEQ ID NO: 4687848 - DNA, 25 bp, Homo sapien
tgattctggtagaacacccagcatt

SEQ ID NO: 4687849 - DNA, 25 bp, Homo sapien
cctctagtgcccaccttgagcccag

SEQ ID NO: 4687850 - DNA, 25 bp, Homo sapien
ttctggggacatgcatgcaatatgt

SEQ ID NO: 4687851 - DNA, 25 bp, Homo sapien
aaggacagcccccatacctctagtg

SEQ ID NO: 4687852 - DNA, 25 bp, Homo sapien
ggacatgcatgcaatatgtctcctt

SEQ ID NO: 4687853 - DNA, 25 bp, Homo sapien
gatggagaagctggcaaacaggtct

SEQ ID NO: 4687854 - DNA, 25 bp, Homo sapien
ctgcctgagcttgtaggagcaagcc

SEQ ID NO: 4687855 - DNA, 25 bp, Homo sapien
tgatggagaagctggcaaacaggtc

SEQ ID NO: 4687856 - DNA, 25 bp, Homo sapien
caggtctgcctgagcttgtaggagc

SEQ ID NO: 4687857 - DNA, 25 bp, Homo sapien
tccgtgggaaagaggcttctctgtc

SEQ ID NO: 4687858 - DNA, 25 bp, Homo sapien
gagaggcccaaaggcatgtgatcaa

SEQ ID NO: 4687859 - DNA, 25 bp, Homo sapien
gcccaaaggcatgtgatcaatttag

SEQ ID NO: 4687860 - DNA, 25 bp, Homo sapien
ggtataggtagaggtacagggagcc

SEQ ID NO: 4687861 - DNA, 25 bp, Homo sapien
tcataggagggaggatttagggccc

SEQ ID NO: 4687862 - DNA, 25 bp, Homo sapien
tgtcataggagggaggatttagggc

SEQ ID NO: 4687863 - DNA, 25 bp, Homo sapien
agagtgaagctgtgtcataggaggg

SEQ ID NO: 4687864 - DNA, 25 bp, Homo sapien
ctgccccagagtgaagctgtgtcat

SEQ ID NO: 4687865 - DNA, 25 bp, Homo sapien
acaagggatccctaggaccatgaga

SEQ ID NO: 4687866 - DNA, 25 bp, Homo sapien
ccatgagaaacatctgggtccagct

SEQ ID NO: 4687867 - DNA, 25 bp, Homo sapien
ctggagagagccagtacaagggatc

SEQ ID NO: 4687868 - DNA, 25 bp, Homo sapien
gagagccagtacaagggatccctag

SEQ ID NO: 4687869 - DNA, 25 bp, Homo sapien
ctttgatagattaaagccgtttcct

SEQ ID NO: 4687870 - DNA, 25 bp, Homo sapien
actgtctctcgatgcctccaaggta

SEQ ID NO: 4687871 - DNA, 25 bp, Homo sapien
tccttattggaatgggcgttttgtc

SEQ ID NO: 4687872 - DNA, 25 bp, Homo sapien
gagtcgctcttggtaaagcaatttc

SEQ ID NO: 4687873 - DNA, 25 bp, Homo sapien
actggagggaaggtgaaatctcagc

SEQ ID NO: 4687874 - DNA, 25 bp, Homo sapien
agacacacagaccactcggactaag

SEQ ID NO: 4687875 - DNA, 25 bp, Homo sapien
acacagaccactcggactaagtgtg

SEQ ID NO: 4687876 - DNA, 25 bp, Homo sapien
tcggactaagtgtgaagattggagc

SEQ ID NO: 4687877 - DNA, 25 bp, Homo sapien
ttgccaatagcggacaaacaggaag

SEQ ID NO: 4687878 - DNA, 25 bp, Homo sapien
gccaactgccatcgcttgccaatag

SEQ ID NO: 4687879 - DNA, 25 bp, Homo sapien
aacaggaagcgacatcttgggtgcc

SEQ ID NO: 4687880 - DNA, 25 bp, Homo sapien
cagggtgccagctactaagccaact

SEQ ID NO: 4687881 - DNA, 25 bp, Homo sapien
ctgagttggaagaggggtgtttctg

SEQ ID NO: 4687882 - DNA, 25 bp, Homo sapien
tgagttggaagaggggtgtttctgg

SEQ ID NO: 4687883 - DNA, 25 bp, Homo sapien
aactccacgttgagcctctacactg

SEQ ID NO: 4687884 - DNA, 25 bp, Homo sapien
tgggctctggttatctctccctgaa

SEQ ID NO: 4687885 - DNA, 25 bp, Homo sapien
agttcactcttctcgtagctacctg

SEQ ID NO: 4687886 - DNA, 25 bp, Homo sapien
cactggctgcagactaaaggtcaca

SEQ ID NO: 4687887 - DNA, 25 bp, Homo sapien
gtgtccaccacaaatataactctgc

SEQ ID NO: 4687888 - DNA, 25 bp, Homo sapien
gagtgaagactcaaatctaagcaat

SEQ ID NO: 4687889 - DNA, 25 bp, Homo sapien
cataatcgaggccatcagtatctct

SEQ ID NO: 4687890 - DNA, 25 bp, Homo sapien
tctctctcaattcagttcgattctg

SEQ ID NO: 4687891 - DNA, 25 bp, Homo sapien
tgaaaccaggccttaaatgccttct

SEQ ID NO: 4687892 - DNA, 25 bp, Homo sapien
aataattgaaaagtcctgtagattc

SEQ ID NO: 4687893 - DNA, 25 bp, Homo sapien
acttctcgatgtgcatgagtgagtg

SEQ ID NO: 4687894 - DNA, 25 bp, Homo sapien
tgtgcatgagtgagtgtagaaatcc

SEQ ID NO: 4687895 - DNA, 25 bp, Homo sapien
tagatgcagtatgtgtaaagcccca

SEQ ID NO: 4687896 - DNA, 25 bp, Homo sapien
tctgccccagagtaggtgcctttgt

SEQ ID NO: 4687897 - DNA, 25 bp, Homo sapien
gagctttagtttttcatcggcaggg

SEQ ID NO: 4687898 - DNA, 25 bp, Homo sapien
tattgggacctattaaagagctctc

SEQ ID NO: 4687899 - DNA, 25 bp, Homo sapien
aacagcaagtggtggaattgaggca

SEQ ID NO: 4687900 - DNA, 25 bp, Homo sapien
ctttgttcttagcagagaaaaggtc

SEQ ID NO: 4687901 - DNA, 25 bp, Homo sapien
tcacccctccttagaggtgcaatgg

SEQ ID NO: 4687902 - DNA, 25 bp, Homo sapien
ggtcaagcatcttgtgtcctggtca

SEQ ID NO: 4687903 - DNA, 25 bp, Homo sapien
tttcctgaatcctgacttaaaatct

SEQ ID NO: 4687904 - DNA, 25 bp, Homo sapien
ttcctgaatcctgacttaaaatctc

SEQ ID NO: 4687905 - DNA, 25 bp, Homo sapien
ctttcctgaatcctgacttaaaatc

SEQ ID NO: 4687906 - DNA, 25 bp, Homo sapien
gaatgctaagctgtttattttggga

SEQ ID NO: 4687907 - DNA, 25 bp, Homo sapien
ttttgggagtctttaagcttagtca

SEQ ID NO: 4687908 - DNA, 25 bp, Homo sapien
caggtctctggtaactttccggaat

SEQ ID NO: 4687909 - DNA, 25 bp, Homo sapien
ggagtctttaagcttagtcagttgg

SEQ ID NO: 4687910 - DNA, 25 bp, Homo sapien
tactgagtacaagccccttttgtag

SEQ ID NO: 4687911 - DNA, 25 bp, Homo sapien
cagagccattactgagtacaagccc

SEQ ID NO: 4687912 - DNA, 25 bp, Homo sapien
tgagctattgggctataaaccttga

SEQ ID NO: 4687913 - DNA, 25 bp, Homo sapien
ggcttctataacagaacaatccaga

SEQ ID NO: 4687914 - DNA, 25 bp, Homo sapien
cagaggggacgagagagtggggatg

SEQ ID NO: 4687915 - DNA, 25 bp, Homo sapien
gcagaggggacgagagagtggggat

SEQ ID NO: 4687916 - DNA, 25 bp, Homo sapien
ctagcagaggggacgagagagtggg

SEQ ID NO: 4687917 - DNA, 25 bp, Homo sapien
tagcagaggggacgagagagtgggg

SEQ ID NO: 4687918 - DNA, 25 bp, Homo sapien
gctgtgggtttcaaggacaaggtac

SEQ ID NO: 4687919 - DNA, 25 bp, Homo sapien
ggctgtgggtttcaaggacaaggta

SEQ ID NO: 4687920 - DNA, 25 bp, Homo sapien
agctgcaatcaaagcctgcaaccac

SEQ ID NO: 4687921 - DNA, 25 bp, Homo sapien
agcctgcaaccactcagctttcagt

SEQ ID NO: 4687922 - DNA, 25 bp, Homo sapien
aatcaaagcctgcaaccactcagct

SEQ ID NO: 4687923 - DNA, 25 bp, Homo sapien
gcaatcaaagcctgcaaccactcag

SEQ ID NO: 4687924 - DNA, 25 bp, Homo sapien
gacgccagtaatggcataattctcc

SEQ ID NO: 4687925 - DNA, 25 bp, Homo sapien
tcattggctaactgagcattgacgc

SEQ ID NO: 4687926 - DNA, 25 bp, Homo sapien
aaccatgactccacagtaactggga

SEQ ID NO: 4687927 - DNA, 25 bp, Homo sapien
taactgggacatgaagatctgactg

SEQ ID NO: 4687928 - DNA, 25 bp, Homo sapien
ttcatcctgactcctgtgatgcttg

SEQ ID NO: 4687929 - DNA, 25 bp, Homo sapien
ccaaggaagaagatctcaagtcact

SEQ ID NO: 4687930 - DNA, 25 bp, Homo sapien
gaagatctcaagtcactgactgtgt

SEQ ID NO: 4687931 - DNA, 25 bp, Homo sapien
ttgtctggtttcatcctgactcctg

SEQ ID NO: 4687932 - DNA, 25 bp, Homo sapien
tatggtcatggacccccccatatct

SEQ ID NO: 4687933 - DNA, 25 bp, Homo sapien
gaaatttaagcctctatggtcatgg

SEQ ID NO: 4687934 - DNA, 25 bp, Homo sapien
aatttaagcctctatggtcatggac

SEQ ID NO: 4687935 - DNA, 25 bp, Homo sapien
ttaagcctctatggtcatggacccc

SEQ ID NO: 4687936 - DNA, 25 bp, Homo sapien
gatgcaatctgaccacttcactcgt

SEQ ID NO: 4687937 - DNA, 25 bp, Homo sapien
gggctcactaggaccactgcaactt

SEQ ID NO: 4687938 - DNA, 25 bp, Homo sapien
cttagaatccttcagcagcttccca

SEQ ID NO: 4687939 - DNA, 25 bp, Homo sapien
gcaccagttggcgacctctttgtga

SEQ ID NO: 4687940 - DNA, 25 bp, Homo sapien
gagagcttcgagggccaagtctgca

SEQ ID NO: 4687941 - DNA, 25 bp, Homo sapien
ctgagcaatagtgcaggacaccggc

SEQ ID NO: 4687942 - DNA, 25 bp, Homo sapien
tgcttcctcctgaaatcaacgtggg

SEQ ID NO: 4687943 - DNA, 25 bp, Homo sapien
tgttgccgctgttgccctctagatg

SEQ ID NO: 4687944 - DNA, 25 bp, Homo sapien
tgtctctctttgcataataattctg

SEQ ID NO: 4687945 - DNA, 25 bp, Homo sapien
ctgtaatgtgtagcacgtgattctg

SEQ ID NO: 4687946 - DNA, 25 bp, Homo sapien
tgtgtagcacgtgattctggcatgt

SEQ ID NO: 4687947 - DNA, 25 bp, Homo sapien
aatgtgtagcacgtgattctggcat

SEQ ID NO: 4687948 - DNA, 25 bp, Homo sapien
cagagggatcgctgtgccatctctt

SEQ ID NO: 4687949 - DNA, 25 bp, Homo sapien
agggcagagggatcgctgtgccatc

SEQ ID NO: 4687950 - DNA, 25 bp, Homo sapien
gagggatcgctgtgccatctcttta

SEQ ID NO: 4687951 - DNA, 25 bp, Homo sapien
ggcagagggatcgctgtgccatctc

SEQ ID NO: 4687952 - DNA, 25 bp, Homo sapien
tcgtactggagttttgatgatgacc

SEQ ID NO: 4687953 - DNA, 25 bp, Homo sapien
caactcaatatacatggatttcagg

SEQ ID NO: 4687954 - DNA, 25 bp, Homo sapien
ccacctcttgggagtagtcaggaca

SEQ ID NO: 4687955 - DNA, 25 bp, Homo sapien
tctgaggcagaacatgatccacctc

SEQ ID NO: 4687956 - DNA, 25 bp, Homo sapien
gagactggactcaccacaaatgggt

SEQ ID NO: 4687957 - DNA, 25 bp, Homo sapien
aacaagtccgaactctgtgccagga

SEQ ID NO: 4687958 - DNA, 25 bp, Homo sapien
gaatcggtcctgtgtttggagactg

SEQ ID NO: 4687959 - DNA, 25 bp, Homo sapien
agagttgaggctttggaatcggtcc

SEQ ID NO: 4687960 - DNA, 25 bp, Homo sapien
tcacaatctgacaccattgcttcat

SEQ ID NO: 4687961 - DNA, 25 bp, Homo sapien
tttcctctctcacaatctgacacca

SEQ ID NO: 4687962 - DNA, 25 bp, Homo sapien
tctcacaatctgacaccattgcttc

SEQ ID NO: 4687963 - DNA, 25 bp, Homo sapien
tctctcacaatctgacaccattgct

SEQ ID NO: 4687964 - DNA, 25 bp, Homo sapien
ttctgcaagggaatccacgggaggc

SEQ ID NO: 4687965 - DNA, 25 bp, Homo sapien
tccaaagtgcgttgtgctgcgggtc

SEQ ID NO: 4687966 - DNA, 25 bp, Homo sapien
catgagctcgcatctattgctgcaa

SEQ ID NO: 4687967 - DNA, 25 bp, Homo sapien
tgaatctgcgaggttgttaccaccg

SEQ ID NO: 4687968 - DNA, 25 bp, Homo sapien
tcatattggtctgcctggagaatct

SEQ ID NO: 4687969 - DNA, 25 bp, Homo sapien
tccttcatattggtctgcctggaga

SEQ ID NO: 4687970 - DNA, 25 bp, Homo sapien
attggtctgcctggagaatcttaga

SEQ ID NO: 4687971 - DNA, 25 bp, Homo sapien
ccttcatattggtctgcctggagaa

SEQ ID NO: 4687972 - DNA, 25 bp, Homo sapien
tcttccttgatgatcaagcctggcg

SEQ ID NO: 4687973 - DNA, 25 bp, Homo sapien
cggtggactgcgttctttctgtcct

SEQ ID NO: 4687974 - DNA, 25 bp, Homo sapien
tggcggtggactgcgttctttctgt

SEQ ID NO: 4687975 - DNA, 25 bp, Homo sapien
tgatgatcaagcctggcggtggact

SEQ ID NO: 4687976 - DNA, 25 bp, Homo sapien
cagggtgtgattcctcatggaagac

SEQ ID NO: 4687977 - DNA, 25 bp, Homo sapien
cctgcagggtgtgattcctcatgga

SEQ ID NO: 4687978 - DNA, 25 bp, Homo sapien
gtgtcctgcagggtgtgattcctca

SEQ ID NO: 4687979 - DNA, 25 bp, Homo sapien
tgcagggtgtgattcctcatggaag

SEQ ID NO: 4687980 - DNA, 25 bp, Homo sapien
tactgatttgcaagatgttcacaaa

SEQ ID NO: 4687981 - DNA, 25 bp, Homo sapien
tctctgagggttttgtcgtgagctc

SEQ ID NO: 4687982 - DNA, 25 bp, Homo sapien
agggttttgtcgtgagctccaaggt

SEQ ID NO: 4687983 - DNA, 25 bp, Homo sapien
ttagagttgtaattgatgatactga

SEQ ID NO: 4687984 - DNA, 25 bp, Homo sapien
tagtcatcagtgtaggagaagaggt

SEQ ID NO: 4687985 - DNA, 25 bp, Homo sapien
cagtgtaggagaagaggtcctcttc

SEQ ID NO: 4687986 - DNA, 25 bp, Homo sapien
ttcagagggttggagaagtagtcat

SEQ ID NO: 4687987 - DNA, 25 bp, Homo sapien
catcagtgtaggagaagaggtcctc

SEQ ID NO: 4687988 - DNA, 25 bp, Homo sapien
aattggtaacctgctgaatacaggg

SEQ ID NO: 4687989 - DNA, 25 bp, Homo sapien
aaatcatccgaacctccaattggta

SEQ ID NO: 4687990 - DNA, 25 bp, Homo sapien
gaacctccaattggtaacctgctga

SEQ ID NO: 4687991 - DNA, 25 bp, Homo sapien
cctccaattggtaacctgctgaata

SEQ ID NO: 4687992 - DNA, 25 bp, Homo sapien
gtgcagttctctctttgttttgtca

SEQ ID NO: 4687993 - DNA, 25 bp, Homo sapien
cattggctttgtgcagttctctctt

SEQ ID NO: 4687994 - DNA, 25 bp, Homo sapien
ggctttgtgcagttctctctttgtt

SEQ ID NO: 4687995 - DNA, 25 bp, Homo sapien
gtgtgctggggaccccattggcttt

SEQ ID NO: 4687996 - DNA, 25 bp, Homo sapien
cttccattgctttcatctgcacagc

SEQ ID NO: 4687997 - DNA, 25 bp, Homo sapien
atctcctctatgtttcccatcactt

SEQ ID NO: 4687998 - DNA, 25 bp, Homo sapien
gggacagaggccatgccatctcctc

SEQ ID NO: 4687999 - DNA, 25 bp, Homo sapien
tcacttccattgctttcatctgcac

SEQ ID NO: 4688000 - DNA, 25 bp, Homo sapien
tcttgctcttctgggacatcacact

SEQ ID NO: 4688001 - DNA, 25 bp, Homo sapien
agactgcttggaccctaatttccac

SEQ ID NO: 4688002 - DNA, 25 bp, Homo sapien
gcttggaccctaatttccacacagc

SEQ ID NO: 4688003 - DNA, 25 bp, Homo sapien
tgggacatcacacttatccaaggca

SEQ ID NO: 4688004 - DNA, 25 bp, Homo sapien
gggaatgaagattctctcctgattc

SEQ ID NO: 4688005 - DNA, 25 bp, Homo sapien
gagttggggaatgaagattctctcc

SEQ ID NO: 4688006 - DNA, 25 bp, Homo sapien
ttctggcaaccctgcacaaacagaa

SEQ ID NO: 4688007 - DNA, 25 bp, Homo sapien
aacatggcagcctttggtggagttg

SEQ ID NO: 4688008 - DNA, 25 bp, Homo sapien
ctctgcgtggtccaaggctgcaaaa

SEQ ID NO: 4688009 - DNA, 25 bp, Homo sapien
tggtgtgctgttcatcgtctctgct

SEQ ID NO: 4688010 - DNA, 25 bp, Homo sapien
tggtccaaggctgcaaaaatgcctt

SEQ ID NO: 4688011 - DNA, 25 bp, Homo sapien
aaatgccttgctgccatgagccttg

SEQ ID NO: 4688012 - DNA, 25 bp, Homo sapien
ctaaaaaggcctttcatgtctagcc

SEQ ID NO: 4688013 - DNA, 25 bp, Homo sapien
gtcctgaaattgggcactgagtggc

SEQ ID NO: 4688014 - DNA, 25 bp, Homo sapien
atgtcctgaaattgggcactgagtg

SEQ ID NO: 4688015 - DNA, 25 bp, Homo sapien
tgtcctgaaattgggcactgagtgg

SEQ ID NO: 4688016 - DNA, 25 bp, Homo sapien
ctggctattctgcttggacatcggg

SEQ ID NO: 4688017 - DNA, 25 bp, Homo sapien
gctattctgcttggacatcgggctg

SEQ ID NO: 4688018 - DNA, 25 bp, Homo sapien
tattctgcttggacatcgggctgtg

SEQ ID NO: 4688019 - DNA, 25 bp, Homo sapien
tcagtcctgcccatcgttcccctga

SEQ ID NO: 4688020 - DNA, 25 bp, Homo sapien
cagtaacgtggtgtacaggtttaca

SEQ ID NO: 4688021 - DNA, 25 bp, Homo sapien
ttcagcacagtaacgtggtgtacag

SEQ ID NO: 4688022 - DNA, 25 bp, Homo sapien
agcacagtaacgtggtgtacaggtt

SEQ ID NO: 4688023 - DNA, 25 bp, Homo sapien
taacgtggtgtacaggtttacagcc

SEQ ID NO: 4688024 - DNA, 25 bp, Homo sapien
ttcttaatgccttcacattggcaac

SEQ ID NO: 4688025 - DNA, 25 bp, Homo sapien
aaggtggtttgaacaggtaagcagt

SEQ ID NO: 4688026 - DNA, 25 bp, Homo sapien
tttgaacaggtaagcagtggaggct

SEQ ID NO: 4688027 - DNA, 25 bp, Homo sapien
ttaaggtggtttgaacaggtaagca

SEQ ID NO: 4688028 - DNA, 25 bp, Homo sapien
ccagaggccacaaattaaggtggtt

SEQ ID NO: 4688029 - DNA, 25 bp, Homo sapien
gggttggcaaagacactgccatctt

SEQ ID NO: 4688030 - DNA, 25 bp, Homo sapien
tgaaacacagcctaggagatgtagt

SEQ ID NO: 4688031 - DNA, 25 bp, Homo sapien
ggttgccttgagcatcaatgtccag

SEQ ID NO: 4688032 - DNA, 25 bp, Homo sapien
tcttcaacacatgacctccaaggtt

SEQ ID NO: 4688033 - DNA, 25 bp, Homo sapien
gcttcttgttcatgttacaatattt

SEQ ID NO: 4688034 - DNA, 25 bp, Homo sapien
ctgggccaccgtgttctgctaccat

SEQ ID NO: 4688035 - DNA, 25 bp, Homo sapien
ctctgggccaccgtgttctgctacc

SEQ ID NO: 4688036 - DNA, 25 bp, Homo sapien
tggcttcttgttcatgttacaatat

SEQ ID NO: 4688037 - DNA, 25 bp, Homo sapien
gatgggttcatcatcacaactcaag

SEQ ID NO: 4688038 - DNA, 25 bp, Homo sapien
tcacagcgagtcatcccataattct

SEQ ID NO: 4688039 - DNA, 25 bp, Homo sapien
tctgcataaggacttggctacttcc

SEQ ID NO: 4688040 - DNA, 25 bp, Homo sapien
gataatgcagtctctgatgggttca

SEQ ID NO: 4688041 - DNA, 25 bp, Homo sapien
cccctgttgcaaaatctccagaagc

SEQ ID NO: 4688042 - DNA, 25 bp, Homo sapien
tccagaagcaacttctgtgagttgt

SEQ ID NO: 4688043 - DNA, 25 bp, Homo sapien
tgcaaaatctccagaagcaacttct

SEQ ID NO: 4688044 - DNA, 25 bp, Homo sapien
aatctccagaagcaacttctgtgag

SEQ ID NO: 4688045 - DNA, 25 bp, Homo sapien
gagatgcttgaccttcccaagggat

SEQ ID NO: 4688046 - DNA, 25 bp, Homo sapien
agagatgcttgaccttcccaaggga

SEQ ID NO: 4688047 - DNA, 25 bp, Homo sapien
gaagacgaggtgagaccaggggtcc

SEQ ID NO: 4688048 - DNA, 25 bp, Homo sapien
ctgagcagaagacgaggtgagacca

SEQ ID NO: 4688049 - DNA, 25 bp, Homo sapien
aaggctttacataagcagatgtaag

SEQ ID NO: 4688050 - DNA, 25 bp, Homo sapien
aaccacaaaaggctttacataagca

SEQ ID NO: 4688051 - DNA, 25 bp, Homo sapien
gatggaagaatgacacccacatttc

SEQ ID NO: 4688052 - DNA, 25 bp, Homo sapien
tggaagaatgacacccacatttctc

SEQ ID NO: 4688053 - DNA, 25 bp, Homo sapien
gcagagctggctccactggtagcct

SEQ ID NO: 4688054 - DNA, 25 bp, Homo sapien
ccagtcttgtggttgaatcggaatc

SEQ ID NO: 4688055 - DNA, 25 bp, Homo sapien
gaatcggaatctacctgtcctctca

SEQ ID NO: 4688056 - DNA, 25 bp, Homo sapien
ctcatcaagtgaaaggagcacagga

SEQ ID NO: 4688057 - DNA, 25 bp, Homo sapien
ctgtagcccagcagttggtaatggc

SEQ ID NO: 4688058 - DNA, 25 bp, Homo sapien
agcccagcagttggtaatggccaga

SEQ ID NO: 4688059 - DNA, 25 bp, Homo sapien
tgtagcccagcagttggtaatggcc

SEQ ID NO: 4688060 - DNA, 25 bp, Homo sapien
tagcccagcagttggtaatggccag

SEQ ID NO: 4688061 - DNA, 25 bp, Homo sapien
gaacaaaggaggtaggacaagttca

SEQ ID NO: 4688062 - DNA, 25 bp, Homo sapien
gagattaaggcacaaagggaaaggc

SEQ ID NO: 4688063 - DNA, 25 bp, Homo sapien
ctgccaattaaagggctccctgctg

SEQ ID NO: 4688064 - DNA, 25 bp, Homo sapien
cgcagctgagcgttggcaacgtcgc

SEQ ID NO: 4688065 - DNA, 25 bp, Homo sapien
aatgcagagtcaggagaataatctt

SEQ ID NO: 4688066 - DNA, 25 bp, Homo sapien
aggagaataatcttctattagccag

SEQ ID NO: 4688067 - DNA, 25 bp, Homo sapien
attagcagggcgcactttggcctca

SEQ ID NO: 4688068 - DNA, 25 bp, Homo sapien
cgcactttggcctcaggttaatgga

SEQ ID NO: 4688069 - DNA, 25 bp, Homo sapien
gttaatggatgatctcacactgtgg

SEQ ID NO: 4688070 - DNA, 25 bp, Homo sapien
cctcaggttaatggatgatctcaca

SEQ ID NO: 4688071 - DNA, 25 bp, Homo sapien
tggctgagacatcgcctatggcaac

SEQ ID NO: 4688072 - DNA, 25 bp, Homo sapien
tatggcaacccatggtgacctctct

SEQ ID NO: 4688073 - DNA, 25 bp, Homo sapien
taaggtccgtaatcagtccagctgc

SEQ ID NO: 4688074 - DNA, 25 bp, Homo sapien
ccagctgcttgatggaatccgaact

SEQ ID NO: 4688075 - DNA, 25 bp, Homo sapien
ctgccttgatgagaactagaggctg

SEQ ID NO: 4688076 - DNA, 25 bp, Homo sapien
gccttgatgagaactagaggctggc

SEQ ID NO: 4688077 - DNA, 25 bp, Homo sapien
ttgatgagaactagaggctggctgt

SEQ ID NO: 4688078 - DNA, 25 bp, Homo sapien
cttgatgagaactagaggctggctg

SEQ ID NO: 4688079 - DNA, 25 bp, Homo sapien
tgacatgtatgggaagggcagtact

SEQ ID NO: 4688080 - DNA, 25 bp, Homo sapien
catgtgacatgtatgggaagggcag

SEQ ID NO: 4688081 - DNA, 25 bp, Homo sapien
tcactggggaaattggtcacccatg

SEQ ID NO: 4688082 - DNA, 25 bp, Homo sapien
catgtatgggaagggcagtactcta

SEQ ID NO: 4688083 - DNA, 25 bp, Homo sapien
cctgaatcatgtctgttcttttctc

SEQ ID NO: 4688084 - DNA, 25 bp, Homo sapien
cccgaggtactcattgcatcaataa

SEQ ID NO: 4688085 - DNA, 25 bp, Homo sapien
agttgtcctccaagagtatcatggg

SEQ ID NO: 4688086 - DNA, 25 bp, Homo sapien
ccgtgatgagcaaacgcatgaagta

SEQ ID NO: 4688087 - DNA, 25 bp, Homo sapien
atgaagtagtcatctgtccggcccc

SEQ ID NO: 4688088 - DNA, 25 bp, Homo sapien
tcaatggtgcctgatgacacctttg

SEQ ID NO: 4688089 - DNA, 25 bp, Homo sapien
tgtccaagaatagactttaggaaaa

SEQ ID NO: 4688090 - DNA, 25 bp, Homo sapien
tgacacctttgtccaagaatagact

SEQ ID NO: 4688091 - DNA, 25 bp, Homo sapien
cacaaaactatagtctggtgatatt

SEQ ID NO: 4688092 - DNA, 25 bp, Homo sapien
ctcccgtgtttccagggttgactgg

SEQ ID NO: 4688093 - DNA, 25 bp, Homo sapien
tccagggttgactgggtggtgctgg

SEQ ID NO: 4688094 - DNA, 25 bp, Homo sapien
gcacattacttctcccgtgtttcca

SEQ ID NO: 4688095 - DNA, 25 bp, Homo sapien
ctgcagtataacaaacagcacatta

SEQ ID NO: 4688096 - DNA, 25 bp, Homo sapien
tgaggcctggctgttgcattctttt

SEQ ID NO: 4688097 - DNA, 25 bp, Homo sapien
caatacctagtgtttcagttagctg

SEQ ID NO: 4688098 - DNA, 25 bp, Homo sapien
tctaacttttagttgaaattgccca

SEQ ID NO: 4688099 - DNA, 25 bp, Homo sapien
tggtgtctctgcttgttcgctgctc

SEQ ID NO: 4688100 - DNA, 25 bp, Homo sapien
gagtttattatcactagcagacctg

SEQ ID NO: 4688101 - DNA, 25 bp, Homo sapien
acctgaggttgagagctgcgcgaaa

SEQ ID NO: 4688102 - DNA, 25 bp, Homo sapien
ctgttgctgtgtcggaatggagttt

SEQ ID NO: 4688103 - DNA, 25 bp, Homo sapien
gaaaattgtgacaagaaatttctga

SEQ ID NO: 4688104 - DNA, 25 bp, Homo sapien
tagggaccgagtgaaaatttgtctc

SEQ ID NO: 4688105 - DNA, 25 bp, Homo sapien
aacagtctcagagttcccacgcatg

SEQ ID NO: 4688106 - DNA, 25 bp, Homo sapien
tgataaactccttgaaataggcctc

SEQ ID NO: 4688107 - DNA, 25 bp, Homo sapien
ttgcaacctcagtggccagcaaggg

SEQ ID NO: 4688108 - DNA, 25 bp, Homo sapien
ttcccgcatcttagccatcataggg

SEQ ID NO: 4688109 - DNA, 25 bp, Homo sapien
ccatcataggggtgacaattgctgc

SEQ ID NO: 4688110 - DNA, 25 bp, Homo sapien
caggctttgttcccgcatcttagcc

SEQ ID NO: 4688111 - DNA, 25 bp, Homo sapien
cataggggtgacaattgctgctgct

SEQ ID NO: 4688112 - DNA, 25 bp, Homo sapien
ctggtgacatgatgaaacatccaag

SEQ ID NO: 4688113 - DNA, 25 bp, Homo sapien
tggccagagttggagacttgtagtc

SEQ ID NO: 4688114 - DNA, 25 bp, Homo sapien
cactgtatgctgtctttctggatct

SEQ ID NO: 4688115 - DNA, 25 bp, Homo sapien
tccgtagacagcaaggttgaaggcc

SEQ ID NO: 4688116 - DNA, 25 bp, Homo sapien
gagacttgtagtcattccgtagaca

SEQ ID NO: 4688117 - DNA, 25 bp, Homo sapien
tgagccctgattgtcgccttgagga

SEQ ID NO: 4688118 - DNA, 25 bp, Homo sapien
agtagtggggaagtcctgtcctcaa

SEQ ID NO: 4688119 - DNA, 25 bp, Homo sapien
ttgaggaccactgtattttcagagc

SEQ ID NO: 4688120 - DNA, 25 bp, Homo sapien
tcaggagtgggagaacttggatctg

SEQ ID NO: 4688121 - DNA, 25 bp, Homo sapien
ctggagatgtaccagggtcctgagc

SEQ ID NO: 4688122 - DNA, 25 bp, Homo sapien
tgtgcagagcaaaccagtatggtcc

SEQ ID NO: 4688123 - DNA, 25 bp, Homo sapien
cagtatggtcctgccagaaaccttc

SEQ ID NO: 4688124 - DNA, 25 bp, Homo sapien
gcatgggattaggatgtactgtgca

SEQ ID NO: 4688125 - DNA, 25 bp, Homo sapien
ttgcccccagggatgtcttccaggc

SEQ ID NO: 4688126 - DNA, 25 bp, Homo sapien
gctgccttgcccccagggatgtctt

SEQ ID NO: 4688127 - DNA, 25 bp, Homo sapien
cagggatgtcttccaggccctcctg

SEQ ID NO: 4688128 - DNA, 25 bp, Homo sapien
tgccttgcccccagggatgtcttcc

SEQ ID NO: 4688129 - DNA, 25 bp, Homo sapien
tcttcttgtgtgacctgctgctcgg

SEQ ID NO: 4688130 - DNA, 25 bp, Homo sapien
atcttcttgtgtgacctgctgctcg

SEQ ID NO: 4688131 - DNA, 25 bp, Homo sapien
catcttcttgtgtgacctgctgctc

SEQ ID NO: 4688132 - DNA, 25 bp, Homo sapien
cacaaggtgcgtccttggaagaagc

SEQ ID NO: 4688133 - DNA, 25 bp, Homo sapien
gaagaagctctcctgaacatgtaag

SEQ ID NO: 4688134 - DNA, 25 bp, Homo sapien
taagtgttggtcaggacaagcccca

SEQ ID NO: 4688135 - DNA, 25 bp, Homo sapien
cacataagccttggatacacaaggt

SEQ ID NO: 4688136 - DNA, 25 bp, Homo sapien
tactgaaccttagaatccggaagac

SEQ ID NO: 4688137 - DNA, 25 bp, Homo sapien
atggatgggacggtttgtccctgga

SEQ ID NO: 4688138 - DNA, 25 bp, Homo sapien
agcatggatgggacggtttgtccct

SEQ ID NO: 4688139 - DNA, 25 bp, Homo sapien
tgaaccttagaatccggaagacctc

SEQ ID NO: 4688140 - DNA, 25 bp, Homo sapien
tccacacgataaatccacagactgg

SEQ ID NO: 4688141 - DNA, 25 bp, Homo sapien
tccaacctcttagttgatccacacg

SEQ ID NO: 4688142 - DNA, 25 bp, Homo sapien
tgtatgggctactgtaccacccctt

SEQ ID NO: 4688143 - DNA, 25 bp, Homo sapien
tcactgttgggtataaggacaatat

SEQ ID NO: 4688144 - DNA, 25 bp, Homo sapien
ggtgttgtatagcacactgtgttag

SEQ ID NO: 4688145 - DNA, 25 bp, Homo sapien
tatagcacactgtgttaggattcct

SEQ ID NO: 4688146 - DNA, 25 bp, Homo sapien
tacccctggtgttgtatagcacact

SEQ ID NO: 4688147 - DNA, 25 bp, Homo sapien
cctggtgttgtatagcacactgtgt

SEQ ID NO: 4688148 - DNA, 25 bp, Homo sapien
ctagaaggaaacggatggcacccat

SEQ ID NO: 4688149 - DNA, 25 bp, Homo sapien
aacaggaggcacacgctttgccaag

SEQ ID NO: 4688150 - DNA, 25 bp, Homo sapien
taattgcagccagagctaaagacgg

SEQ ID NO: 4688151 - DNA, 25 bp, Homo sapien
taacagggccgaatgatgctcttcg

SEQ ID NO: 4688152 - DNA, 25 bp, Homo sapien
aatttgatggtttccctggtgggct

SEQ ID NO: 4688153 - DNA, 25 bp, Homo sapien
cctgagcttgtcaccctcaaagaca

SEQ ID NO: 4688154 - DNA, 25 bp, Homo sapien
tccctgagcttgtcaccctcaaaga

SEQ ID NO: 4688155 - DNA, 25 bp, Homo sapien
ggcagagtccactgactggtctctg

SEQ ID NO: 4688156 - DNA, 25 bp, Homo sapien
caccctcaaagacaatatggaaggc

SEQ ID NO: 4688157 - DNA, 25 bp, Homo sapien
cctcattgtatctgatcatcgacat

SEQ ID NO: 4688158 - DNA, 25 bp, Homo sapien
cattgtatctgatcatcgacatctc

SEQ ID NO: 4688159 - DNA, 25 bp, Homo sapien
tgtatctgatcatcgacatctccct

SEQ ID NO: 4688160 - DNA, 25 bp, Homo sapien
cacctcattgtatctgatcatcgac

SEQ ID NO: 4688161 - DNA, 25 bp, Homo sapien
ggtgattttctcagtgcaagcagtt

SEQ ID NO: 4688162 - DNA, 25 bp, Homo sapien
caggacatggatagagtgaggggaa

SEQ ID NO: 4688163 - DNA, 25 bp, Homo sapien
tgcaagcagttgtggccaagacact

SEQ ID NO: 4688164 - DNA, 25 bp, Homo sapien
tccggtgattttctcagtgcaagca

SEQ ID NO: 4688165 - DNA, 25 bp, Homo sapien
cattgtagtcctcattgtctgttat

SEQ ID NO: 4688166 - DNA, 25 bp, Homo sapien
cttcattgtagtcctcattgtctgt

SEQ ID NO: 4688167 - DNA, 25 bp, Homo sapien
gtagtcctcattgtctgttattgtc

SEQ ID NO: 4688168 - DNA, 25 bp, Homo sapien
tagtcctcattgtctgttattgtct

SEQ ID NO: 4688169 - DNA, 25 bp, Homo sapien
gtgactgtcccatagcaagtcagca

SEQ ID NO: 4688170 - DNA, 25 bp, Homo sapien
tagaaaagtgactgtcccatagcaa

SEQ ID NO: 4688171 - DNA, 25 bp, Homo sapien
tcctgttaggtcaaagtcattattc

SEQ ID NO: 4688172 - DNA, 25 bp, Homo sapien
cctgttaggtcaaagtcattattct

SEQ ID NO: 4688173 - DNA, 25 bp, Homo sapien
ggaggctggatccagtcctttgggt

SEQ ID NO: 4688174 - DNA, 25 bp, Homo sapien
aggctggatccagtcctttgggttg

SEQ ID NO: 4688175 - DNA, 25 bp, Homo sapien
taggcaggatgtcagcatcccagcc

SEQ ID NO: 4688176 - DNA, 25 bp, Homo sapien
ggtggctggccatcattaggcagga

SEQ ID NO: 4688177 - DNA, 25 bp, Homo sapien
gggtcgttgcagacttccagcttca

SEQ ID NO: 4688178 - DNA, 25 bp, Homo sapien
agggtcgttgcagacttccagcttc

SEQ ID NO: 4688179 - DNA, 25 bp, Homo sapien
ggtcgttgcagacttccagcttcat

SEQ ID NO: 4688180 - DNA, 25 bp, Homo sapien
gacttggtccccttatgtgggtgac

SEQ ID NO: 4688181 - DNA, 25 bp, Homo sapien
tgacactgagttgtgagcaagcccg

SEQ ID NO: 4688182 - DNA, 25 bp, Homo sapien
cacattgttgagaatgagtttcccc

SEQ ID NO: 4688183 - DNA, 25 bp, Homo sapien
gggcctcacgagagtctgacactga

SEQ ID NO: 4688184 - DNA, 25 bp, Homo sapien
cggagccatcgttgactatattacc

SEQ ID NO: 4688185 - DNA, 25 bp, Homo sapien
gagccatcgttgactatattaccct

SEQ ID NO: 4688186 - DNA, 25 bp, Homo sapien
catcgttgactatattaccctccag

SEQ ID NO: 4688187 - DNA, 25 bp, Homo sapien
ttgactatattaccctccagtttct

SEQ ID NO: 4688188 - DNA, 25 bp, Homo sapien
tctgtctgactttggcgggggttcc

SEQ ID NO: 4688189 - DNA, 25 bp, Homo sapien
tgcattcgcattcggccagtggtct

SEQ ID NO: 4688190 - DNA, 25 bp, Homo sapien
ggttccccaggatgcattcgcattc

SEQ ID NO: 4688191 - DNA, 25 bp, Homo sapien
ccaggatgcattcgcattcggccag

SEQ ID NO: 4688192 - DNA, 25 bp, Homo sapien
ctttgaggatgctgatgccacctcc

SEQ ID NO: 4688193 - DNA, 25 bp, Homo sapien
tcattctcatcgacaggattctgtg

SEQ ID NO: 4688194 - DNA, 25 bp, Homo sapien
tttccggaagctcattctcatcgac

SEQ ID NO: 4688195 - DNA, 25 bp, Homo sapien
ggattctgtgtcctccggcccaact

SEQ ID NO: 4688196 - DNA, 25 bp, Homo sapien
gctcctgatatttggttgtgtgccc

SEQ ID NO: 4688197 - DNA, 25 bp, Homo sapien
tgaggcaggaaacgcggcaggggag

SEQ ID NO: 4688198 - DNA, 25 bp, Homo sapien
tgatatttggttgtgtgcccatggg

SEQ ID NO: 4688199 - DNA, 25 bp, Homo sapien
gggagttgctcttgactgccagctc

SEQ ID NO: 4688200 - DNA, 25 bp, Homo sapien
tggtgtcctccatggtaagggcagt

SEQ ID NO: 4688201 - DNA, 25 bp, Homo sapien
cctccatggtaagggcagtgaatga

SEQ ID NO: 4688202 - DNA, 25 bp, Homo sapien
tgtcctccatggtaagggcagtgaa

SEQ ID NO: 4688203 - DNA, 25 bp, Homo sapien
atggtgtcctccatggtaagggcag

SEQ ID NO: 4688204 - DNA, 25 bp, Homo sapien
actggtagacataaaggcctttgct

SEQ ID NO: 4688205 - DNA, 25 bp, Homo sapien
agcggagactctggggcatatgcca

SEQ ID NO: 4688206 - DNA, 25 bp, Homo sapien
ggtggactggtagacataaaggcct

SEQ ID NO: 4688207 - DNA, 25 bp, Homo sapien
tcacaagggcaagcgcccctggagc

SEQ ID NO: 4688208 - DNA, 25 bp, Homo sapien
gagaactgcttttcgtacagaaaca

SEQ ID NO: 4688209 - DNA, 25 bp, Homo sapien
agaaacagatggttcagtggcagcg

SEQ ID NO: 4688210 - DNA, 25 bp, Homo sapien
agtggcagcggctgaacaacacagc

SEQ ID NO: 4688211 - DNA, 25 bp, Homo sapien
tgtacagcccatgtcccatgagacg

SEQ ID NO: 4688212 - DNA, 25 bp, Homo sapien
ggcaccaggttcaaggggcctgaga

SEQ ID NO: 4688213 - DNA, 25 bp, Homo sapien
cctgagaagagacccacagagccag

SEQ ID NO: 4688214 - DNA, 25 bp, Homo sapien
caccaggttcaaggggcctgagaag

SEQ ID NO: 4688215 - DNA, 25 bp, Homo sapien
tattaacctcagtaggggaggcacc

SEQ ID NO: 4688216 - DNA, 25 bp, Homo sapien
cctacagtggaatattagcgcagac

SEQ ID NO: 4688217 - DNA, 25 bp, Homo sapien
tctgagacccttcctaaagaaataa

SEQ ID NO: 4688218 - DNA, 25 bp, Homo sapien
gcaaaattgtggtaatgcatgccta

SEQ ID NO: 4688219 - DNA, 25 bp, Homo sapien
tcctagttttaatcctgcttctgag

SEQ ID NO: 4688220 - DNA, 25 bp, Homo sapien
taggtatctcacacgtacaacatgc

SEQ ID NO: 4688221 - DNA, 25 bp, Homo sapien
tgaacatgttctgaccctgggaagt

SEQ ID NO: 4688222 - DNA, 25 bp, Homo sapien
gcaccttcggtgcagactcttttgt

SEQ ID NO: 4688223 - DNA, 25 bp, Homo sapien
aacttgagctagaaccgtaggtatc

SEQ ID NO: 4688224 - DNA, 25 bp, Homo sapien
cctctctctacacagtgggatgggt

SEQ ID NO: 4688225 - DNA, 25 bp, Homo sapien
attacaagtgttggtcacctctctc

SEQ ID NO: 4688226 - DNA, 25 bp, Homo sapien
ggtacagctgaaaggatatgatgtc

SEQ ID NO: 4688227 - DNA, 25 bp, Homo sapien
acacagtgggatgggtacagctgaa

SEQ ID NO: 4688228 - DNA, 25 bp, Homo sapien
tatttgaacaggagcacagcttggc

SEQ ID NO: 4688229 - DNA, 25 bp, Homo sapien
gaaattagtagtccactgctgttgg

SEQ ID NO: 4688230 - DNA, 25 bp, Homo sapien
gaattctgacgcttaatctcctacc

SEQ ID NO: 4688231 - DNA, 25 bp, Homo sapien
gctagagtccagaagctcagagttg

SEQ ID NO: 4688232 - DNA, 25 bp, Homo sapien
tgcttcaggatacaagagggaaaaa

SEQ ID NO: 4688233 - DNA, 25 bp, Homo sapien
tattattgagaggagcatttcttct

SEQ ID NO: 4688234 - DNA, 25 bp, Homo sapien
tggaaattatggtgactctttggaa

SEQ ID NO: 4688235 - DNA, 25 bp, Homo sapien
tagaattgttcagtcattatcttaa

SEQ ID NO: 4688236 - DNA, 25 bp, Homo sapien
tgacaggctttattgcatttgatca

SEQ ID NO: 4688237 - DNA, 25 bp, Homo sapien
tgcatttgatcagttatgtgggcag

SEQ ID NO: 4688238 - DNA, 25 bp, Homo sapien
cacatcctgcatctggcgcttgaca

SEQ ID NO: 4688239 - DNA, 25 bp, Homo sapien
ccttctttgttccacatcctgcatc

SEQ ID NO: 4688240 - DNA, 25 bp, Homo sapien
tcaccgaggatcctagccagaagct

SEQ ID NO: 4688241 - DNA, 25 bp, Homo sapien
gtatttcgagtctaacatctgcccg

SEQ ID NO: 4688242 - DNA, 25 bp, Homo sapien
tccaagagctcatcagagactggtg

SEQ ID NO: 4688243 - DNA, 25 bp, Homo sapien
actttccagggttgcctcaccgagg

SEQ ID NO: 4688244 - DNA, 25 bp, Homo sapien
tctgaccactgttagttctgcctgt

SEQ ID NO: 4688245 - DNA, 25 bp, Homo sapien
tcacaagcaaacacacctgtggagc

SEQ ID NO: 4688246 - DNA, 25 bp, Homo sapien
gatataccatgcttatagaaaaatg

SEQ ID NO: 4688247 - DNA, 25 bp, Homo sapien
taaagataactaccattctgaccac

SEQ ID NO: 4688248 - DNA, 25 bp, Homo sapien
tagaaagtctgaagcgggaactcca

SEQ ID NO: 4688249 - DNA, 25 bp, Homo sapien
aaagcctcgtgagtaccatcatccg

SEQ ID NO: 4688250 - DNA, 25 bp, Homo sapien
gttgaaagcttgcaagtcgcccaca

SEQ ID NO: 4688251 - DNA, 25 bp, Homo sapien
tgggaaaaacacaccgcagaattgc

SEQ ID NO: 4688252 - DNA, 25 bp, Homo sapien
tagttaagatggcacctatccccgc

SEQ ID NO: 4688253 - DNA, 25 bp, Homo sapien
tgtggtttgaattccagcggcgccg

SEQ ID NO: 4688254 - DNA, 25 bp, Homo sapien
agcggcgccgccagagtctgaacaa

SEQ ID NO: 4688255 - DNA, 25 bp, Homo sapien
ctcgtttccgtaggaagaagcgccg

SEQ ID NO: 4688256 - DNA, 25 bp, Homo sapien
cacctattttgtgtaaattctatct

SEQ ID NO: 4688257 - DNA, 25 bp, Homo sapien
gaatgtatacttgaagtgggtacac

SEQ ID NO: 4688258 - DNA, 25 bp, Homo sapien
cactacagtgaaacgctgtttctac

SEQ ID NO: 4688259 - DNA, 25 bp, Homo sapien
ctggccactacagtgaaacgctgtt

SEQ ID NO: 4688260 - DNA, 25 bp, Homo sapien
aagttgtaatgctaggcataagcac

SEQ ID NO: 4688261 - DNA, 25 bp, Homo sapien
tataggccgagcaattagggaatgt

SEQ ID NO: 4688262 - DNA, 25 bp, Homo sapien
taatacattaaattataggccgagc

SEQ ID NO: 4688263 - DNA, 25 bp, Homo sapien
tatgctgtactaggcttcatcatgc

SEQ ID NO: 4688264 - DNA, 25 bp, Homo sapien
gttctctagcgccaatattcccagg

SEQ ID NO: 4688265 - DNA, 25 bp, Homo sapien
catttctgatggttaggtgccctag

SEQ ID NO: 4688266 - DNA, 25 bp, Homo sapien
tgttaagtatgtccgtgtcctccct

SEQ ID NO: 4688267 - DNA, 25 bp, Homo sapien
tatattaatactaaggtcctgtggg

SEQ ID NO: 4688268 - DNA, 25 bp, Homo sapien
tctttcctctaaaggcatgggcccc

SEQ ID NO: 4688269 - DNA, 25 bp, Homo sapien
gaaattgtgcaaaatggcatacctg

SEQ ID NO: 4688270 - DNA, 25 bp, Homo sapien
tgggccccataaactgtggcatctg

SEQ ID NO: 4688271 - DNA, 25 bp, Homo sapien
tctaggaaactagcatgggatgcac

SEQ ID NO: 4688272 - DNA, 25 bp, Homo sapien
ggaccaatagtactgtcttccacct

SEQ ID NO: 4688273 - DNA, 25 bp, Homo sapien
tttgggatacctcatgaagaaactg

SEQ ID NO: 4688274 - DNA, 25 bp, Homo sapien
gcctacacaaagtcaggaccaatag

SEQ ID NO: 4688275 - DNA, 25 bp, Homo sapien
tgtcatccatgataacagtgctttc

SEQ ID NO: 4688276 - DNA, 25 bp, Homo sapien
actacaaggaggatatcatatttcc

SEQ ID NO: 4688277 - DNA, 25 bp, Homo sapien
tacatgtgagcaaaaagaagagatg

SEQ ID NO: 4688278 - DNA, 25 bp, Homo sapien
taggaatgttgtcagcctggctgga

SEQ ID NO: 4688279 - DNA, 25 bp, Homo sapien
gagaagtagtagcattgttaactac

SEQ ID NO: 4688280 - DNA, 25 bp, Homo sapien
tgctggcggcacctttgatggacaa

SEQ ID NO: 4688281 - DNA, 25 bp, Homo sapien
acatgctggcggcacctttgatgga

SEQ ID NO: 4688282 - DNA, 25 bp, Homo sapien
gcggcacctttgatggacaagggca

SEQ ID NO: 4688283 - DNA, 25 bp, Homo sapien
cacctttgatggacaagggcaaagg

SEQ ID NO: 4688284 - DNA, 25 bp, Homo sapien
gaggccgagtaaagctcctgcatgc

SEQ ID NO: 4688285 - DNA, 25 bp, Homo sapien
gagtaaagctcctgcatgcccatca

SEQ ID NO: 4688286 - DNA, 25 bp, Homo sapien
ggcctggaggccgagtaaagctcct

SEQ ID NO: 4688287 - DNA, 25 bp, Homo sapien
cctggaggccgagtaaagctcctgc

SEQ ID NO: 4688288 - DNA, 25 bp, Homo sapien
cagggagaaaagggtctcaatgagg

SEQ ID NO: 4688289 - DNA, 25 bp, Homo sapien
cccagggagaaaagggtctcaatga

SEQ ID NO: 4688290 - DNA, 25 bp, Homo sapien
atgaggatggccgtctccacagtta

SEQ ID NO: 4688291 - DNA, 25 bp, Homo sapien
gaggatggccgtctccacagttatt

SEQ ID NO: 4688292 - DNA, 25 bp, Homo sapien
agatgctgcagctagaccactgctc

SEQ ID NO: 4688293 - DNA, 25 bp, Homo sapien
aagatgctgcagctagaccactgct

SEQ ID NO: 4688294 - DNA, 25 bp, Homo sapien
gcccttccaggtgaacactggcatg

SEQ ID NO: 4688295 - DNA, 25 bp, Homo sapien
tacagtgtctgttcaatgcaccacg

SEQ ID NO: 4688296 - DNA, 25 bp, Homo sapien
tgttcaatgcaccacgggtacccct

SEQ ID NO: 4688297 - DNA, 25 bp, Homo sapien
agcctcggcaaagacagccactgca

SEQ ID NO: 4688298 - DNA, 25 bp, Homo sapien
tggtaggcaccttcaggattgcact

SEQ ID NO: 4688299 - DNA, 25 bp, Homo sapien
caatcatcacgtcttggtccacttg

SEQ ID NO: 4688300 - DNA, 25 bp, Homo sapien
gcaatcatcacgtcttggtccactt

SEQ ID NO: 4688301 - DNA, 25 bp, Homo sapien
tcatcacgtcttggtccacttggtg

SEQ ID NO: 4688302 - DNA, 25 bp, Homo sapien
aatcatcacgtcttggtccacttgg

SEQ ID NO: 4688303 - DNA, 25 bp, Homo sapien
cggtgatgattatgcaggccccaaa

SEQ ID NO: 4688304 - DNA, 25 bp, Homo sapien
gtgatgattatgcaggccccaaaac

SEQ ID NO: 4688305 - DNA, 25 bp, Homo sapien
tcggtgatgattatgcaggccccaa

SEQ ID NO: 4688306 - DNA, 25 bp, Homo sapien
ctcggtgatgattatgcaggcccca

SEQ ID NO: 4688307 - DNA, 25 bp, Homo sapien
tattgacacaggttgtggtggtgac

SEQ ID NO: 4688308 - DNA, 25 bp, Homo sapien
gtattacataagatggcatcatcct

SEQ ID NO: 4688309 - DNA, 25 bp, Homo sapien
gatctccacgtcaaattgttcagta

SEQ ID NO: 4688310 - DNA, 25 bp, Homo sapien
agtgccggccaaggatgatattgac

SEQ ID NO: 4688311 - DNA, 25 bp, Homo sapien
gccagtaccagtccgcctgggcttg

SEQ ID NO: 4688312 - DNA, 25 bp, Homo sapien
cagccagtaccagtccgcctgggct

SEQ ID NO: 4688313 - DNA, 25 bp, Homo sapien
ctccacagcattgttgttgaggcac

SEQ ID NO: 4688314 - DNA, 25 bp, Homo sapien
cttcagccagtaccagtccgcctgg

SEQ ID NO: 4688315 - DNA, 25 bp, Homo sapien
cggcccatagcacagcccaggttga

SEQ ID NO: 4688316 - DNA, 25 bp, Homo sapien
ccctcagccagcacgatgatgtggc

SEQ ID NO: 4688317 - DNA, 25 bp, Homo sapien
ccagcacgatgatgtggcacccatt

SEQ ID NO: 4688318 - DNA, 25 bp, Homo sapien
gggcggcccatagcacagcccaggt

SEQ ID NO: 4688319 - DNA, 25 bp, Homo sapien
catcttgcccaggggggcgcctcag

SEQ ID NO: 4688320 - DNA, 25 bp, Homo sapien
tggttgaaggagttactccccacaa

SEQ ID NO: 4688321 - DNA, 25 bp, Homo sapien
ctggttgaaggagttactccccaca

SEQ ID NO: 4688322 - DNA, 25 bp, Homo sapien
ccaggggggcgcctcagccactgcc

SEQ ID NO: 4688323 - DNA, 25 bp, Homo sapien
tcagttagcttggtcaatttcacgt

SEQ ID NO: 4688324 - DNA, 25 bp, Homo sapien
cttctcagttagcttggtcaatttc

SEQ ID NO: 4688325 - DNA, 25 bp, Homo sapien
ttgcttctcagttagcttggtcaat

SEQ ID NO: 4688326 - DNA, 25 bp, Homo sapien
ctactgggcttgcttctcagttagc

SEQ ID NO: 4688327 - DNA, 25 bp, Homo sapien
cacaatttgggaatcatggcataaa

SEQ ID NO: 4688328 - DNA, 25 bp, Homo sapien
tgcaacgacgatgccaggcaaattt

SEQ ID NO: 4688329 - DNA, 25 bp, Homo sapien
gtagctcaaactacaggtgcaacga

SEQ ID NO: 4688330 - DNA, 25 bp, Homo sapien
ctcaaactacaggtgcaacgacgat

SEQ ID NO: 4688331 - DNA, 25 bp, Homo sapien
agctcactgagctcattggtcactg

SEQ ID NO: 4688332 - DNA, 25 bp, Homo sapien
tgagctcattggtcactggaactgc

SEQ ID NO: 4688333 - DNA, 25 bp, Homo sapien
gagctcattggtcactggaactgct

SEQ ID NO: 4688334 - DNA, 25 bp, Homo sapien
cactgagctcattggtcactggaac

SEQ ID NO: 4688335 - DNA, 25 bp, Homo sapien
ttacagtggagttgccccagtgggc

SEQ ID NO: 4688336 - DNA, 25 bp, Homo sapien
gaactgactgagctgcagttacagt

SEQ ID NO: 4688337 - DNA, 25 bp, Homo sapien
ggtgtttcctgttggattggagaac

SEQ ID NO: 4688338 - DNA, 25 bp, Homo sapien
gggcatctggccttcacagttagca

SEQ ID NO: 4688339 - DNA, 25 bp, Homo sapien
gatgggataggcccactctctcccc

SEQ ID NO: 4688340 - DNA, 25 bp, Homo sapien
aggcccactctctcccccgaagagg

SEQ ID NO: 4688341 - DNA, 25 bp, Homo sapien
tgtgttcattctttccctgcagatg

SEQ ID NO: 4688342 - DNA, 25 bp, Homo sapien
ccgaagaggtgataagggggcaggt

SEQ ID NO: 4688343 - DNA, 25 bp, Homo sapien
cctggaagactgattcaggtggcct

SEQ ID NO: 4688344 - DNA, 25 bp, Homo sapien
aagactgattcaggtggcctggcta

SEQ ID NO: 4688345 - DNA, 25 bp, Homo sapien
actgattcaggtggcctggctatgc

SEQ ID NO: 4688346 - DNA, 25 bp, Homo sapien
gaagactgattcaggtggcctggct

SEQ ID NO: 4688347 - DNA, 25 bp, Homo sapien
ttgctcttgttcaatcttggtaact

SEQ ID NO: 4688348 - DNA, 25 bp, Homo sapien
tggtaactctccgttaccatcaggg

SEQ ID NO: 4688349 - DNA, 25 bp, Homo sapien
tgttcaatcttggtaactctccgtt

SEQ ID NO: 4688350 - DNA, 25 bp, Homo sapien
gtaactctccgttaccatcagggca

SEQ ID NO: 4688351 - DNA, 25 bp, Homo sapien
agtgtttctgatcaaaggttcccca

SEQ ID NO: 4688352 - DNA, 25 bp, Homo sapien
ggtttagacaaccaagacacttgag

SEQ ID NO: 4688353 - DNA, 25 bp, Homo sapien
tactcatgatgcagtccgggcaggg

SEQ ID NO: 4688354 - DNA, 25 bp, Homo sapien
taatcagactgaatggtcacgctca

SEQ ID NO: 4688355 - DNA, 25 bp, Homo sapien
taaaggccatcataacaacttcagg

SEQ ID NO: 4688356 - DNA, 25 bp, Homo sapien
tggtggaagccagcggcttctttca

SEQ ID NO: 4688357 - DNA, 25 bp, Homo sapien
atttcttgggtgacactgtggtgtg

SEQ ID NO: 4688358 - DNA, 25 bp, Homo sapien
ctgactgtaacctgacattttagac

SEQ ID NO: 4688359 - DNA, 25 bp, Homo sapien
gcagccgactgcatgaaccaaagtt

SEQ ID NO: 4688360 - DNA, 25 bp, Homo sapien
cctaatggtatcatcacgcagtgca

SEQ ID NO: 4688361 - DNA, 25 bp, Homo sapien
tgggcacaatgacacgggcttggtc

SEQ ID NO: 4688362 - DNA, 25 bp, Homo sapien
tttattgacatacaacgcagcatgc

SEQ ID NO: 4688363 - DNA, 25 bp, Homo sapien
ctacaagcgagcaaccctatgcctg

SEQ ID NO: 4688364 - DNA, 25 bp, Homo sapien
actacaagcgagcaaccctatgcct

SEQ ID NO: 4688365 - DNA, 25 bp, Homo sapien
gactacaagcgagcaaccctatgcc

SEQ ID NO: 4688366 - DNA, 25 bp, Homo sapien
tgaagcaactggaggaccatgaagc

SEQ ID NO: 4688367 - DNA, 25 bp, Homo sapien
tagagactctcctcaagcgggactt

SEQ ID NO: 4688368 - DNA, 25 bp, Homo sapien
gctgcctcgtctctaaacagtggaa

SEQ ID NO: 4688369 - DNA, 25 bp, Homo sapien
tgttaaaatggctcgatcctcagac

SEQ ID NO: 4688370 - DNA, 25 bp, Homo sapien
cacgattccgagagcaagggacctg

SEQ ID NO: 4688371 - DNA, 25 bp, Homo sapien
ccttagctgcgaaatgagttaacag

SEQ ID NO: 4688372 - DNA, 25 bp, Homo sapien
tgcctagtagctgtgaacccggcgc

SEQ ID NO: 4688373 - DNA, 25 bp, Homo sapien
tgtcccagggctaccaaacgtttga

SEQ ID NO: 4688374 - DNA, 25 bp, Homo sapien
gacataagcgcgctgtgcaaacctg

SEQ ID NO: 4688375 - DNA, 25 bp, Homo sapien
tgcaaacctggatgtacggtacgaa

SEQ ID NO: 4688376 - DNA, 25 bp, Homo sapien
tcctcctaatagatgtaaggcccag

SEQ ID NO: 4688377 - DNA, 25 bp, Homo sapien
aacagcgttcgggataaagaggtgc

SEQ ID NO: 4688378 - DNA, 25 bp, Homo sapien
tacatcattcgagccacatcttggg

SEQ ID NO: 4688379 - DNA, 25 bp, Homo sapien
tagttaccgaaacaggcattcccag

SEQ ID NO: 4688380 - DNA, 25 bp, Homo sapien
tatggtccccatgtgaaaacgttta

SEQ ID NO: 4688381 - DNA, 25 bp, Homo sapien
ttctgggtactcactaagagggaca

SEQ ID NO: 4688382 - DNA, 25 bp, Homo sapien
tgtccaccagtgcatgaataaagaa

SEQ ID NO: 4688383 - DNA, 25 bp, Homo sapien
tgtgtactggccaggtacggttcct

SEQ ID NO: 4688384 - DNA, 25 bp, Homo sapien
gcagatatggccaagagatccaaca

SEQ ID NO: 4688385 - DNA, 25 bp, Homo sapien
tacagccattatggaggttcctcac

SEQ ID NO: 4688386 - DNA, 25 bp, Homo sapien
tgtcctagctaaccaaaagacagag

SEQ ID NO: 4688387 - DNA, 25 bp, Homo sapien
ctcaaactgcatagaaaacctgttc

SEQ ID NO: 4688388 - DNA, 25 bp, Homo sapien
tgaaaagtgcaatagaggccaggtg

SEQ ID NO: 4688389 - DNA, 25 bp, Homo sapien
tgcaatgagccgctgcactctatcc

SEQ ID NO: 4688390 - DNA, 25 bp, Homo sapien
ttcaatgtggtgcaatatatacaat

SEQ ID NO: 4688391 - DNA, 25 bp, Homo sapien
taagtaaacacctgttgactgccta

SEQ ID NO: 4688392 - DNA, 25 bp, Homo sapien
catatgttcataagttgtacaacca

SEQ ID NO: 4688393 - DNA, 25 bp, Homo sapien
gccctctctcctatgtatggtctac

SEQ ID NO: 4688394 - DNA, 25 bp, Homo sapien
tgagcatatttcttttaggccgtgg

SEQ ID NO: 4688395 - DNA, 25 bp, Homo sapien
gcacaccaaatcacctgttcagagg

SEQ ID NO: 4688396 - DNA, 25 bp, Homo sapien
taccaatgaactttgccctgttgtg

SEQ ID NO: 4688397 - DNA, 25 bp, Homo sapien
cagcaaagccaaagcactctgcaca

SEQ ID NO: 4688398 - DNA, 25 bp, Homo sapien
ccacgggctagagtcagaaaggtct

SEQ ID NO: 4688399 - DNA, 25 bp, Homo sapien
ggcataacaactgcttctcagggtt

SEQ ID NO: 4688400 - DNA, 25 bp, Homo sapien
tgtttcctgtttcccctctatgatg

SEQ ID NO: 4688401 - DNA, 25 bp, Homo sapien
tttcatggtacaaagaccacgggct

SEQ ID NO: 4688402 - DNA, 25 bp, Homo sapien
cctagatgacgccagactgagggag

SEQ ID NO: 4688403 - DNA, 25 bp, Homo sapien
gacgaggctgtttaacttcccgtga

SEQ ID NO: 4688404 - DNA, 25 bp, Homo sapien
gcggtaaacacgtaagcctactggc

SEQ ID NO: 4688405 - DNA, 25 bp, Homo sapien
tttccctgagcagcgacctagatga

SEQ ID NO: 4688406 - DNA, 25 bp, Homo sapien
tccgcctcctcttgacaggtggctg

SEQ ID NO: 4688407 - DNA, 25 bp, Homo sapien
tggctggcccaggatcaagattccc

SEQ ID NO: 4688408 - DNA, 25 bp, Homo sapien
gtcttccagaggcatgacgctccgc

SEQ ID NO: 4688409 - DNA, 25 bp, Homo sapien
ctggagaatattcatccagtcttcc

SEQ ID NO: 4688410 - DNA, 25 bp, Homo sapien
cagcttagagcagatgggcgaccaa

SEQ ID NO: 4688411 - DNA, 25 bp, Homo sapien
ttttatcactaccaaagcatcggca

SEQ ID NO: 4688412 - DNA, 25 bp, Homo sapien
ttcaatacagtcagcaaagtggtca

SEQ ID NO: 4688413 - DNA, 25 bp, Homo sapien
catgcactgcaaaagatgggtcatc

SEQ ID NO: 4688414 - DNA, 25 bp, Homo sapien
aatagactctcagtgatgaccaaag

SEQ ID NO: 4688415 - DNA, 25 bp, Homo sapien
agctcattaatttcactttccctaa

SEQ ID NO: 4688416 - DNA, 25 bp, Homo sapien
cagaaacttgagtagctcattaatt

SEQ ID NO: 4688417 - DNA, 25 bp, Homo sapien
taatatcaataaatcttaaacccac

SEQ ID NO: 4688418 - DNA, 25 bp, Homo sapien
caggaaaggatccatatgaattgta

SEQ ID NO: 4688419 - DNA, 25 bp, Homo sapien
tgcatctcttcataggtataagcaa

SEQ ID NO: 4688420 - DNA, 25 bp, Homo sapien
aattgtagcatcagacagcattcaa

SEQ ID NO: 4688421 - DNA, 25 bp, Homo sapien
tttaaaagtcaggcttcaatccagg

SEQ ID NO: 4688422 - DNA, 25 bp, Homo sapien
gaggtggcatgcaaacacaggcaga

SEQ ID NO: 4688423 - DNA, 25 bp, Homo sapien
tgcaagccctcagagtgtagcaggc

SEQ ID NO: 4688424 - DNA, 25 bp, Homo sapien
gatttgtagatacccatgtgaccgc

SEQ ID NO: 4688425 - DNA, 25 bp, Homo sapien
taggatctctaaaaactgcagccat

SEQ ID NO: 4688426 - DNA, 25 bp, Homo sapien
gcacattccataactatcaggcaca

SEQ ID NO: 4688427 - DNA, 25 bp, Homo sapien
tctagtaagaagtattcaagcacct

SEQ ID NO: 4688428 - DNA, 25 bp, Homo sapien
caacttgaatctcctattggtacaa

SEQ ID NO: 4688429 - DNA, 25 bp, Homo sapien
caggcacaaaacctctgaagataag

SEQ ID NO: 4688430 - DNA, 25 bp, Homo sapien
gatgccttgagtaggatgttcacag

SEQ ID NO: 4688431 - DNA, 25 bp, Homo sapien
agatgccttgagtaggatgttcaca

SEQ ID NO: 4688432 - DNA, 25 bp, Homo sapien
tgccttgagtaggatgttcacagag

SEQ ID NO: 4688433 - DNA, 25 bp, Homo sapien
gaagatgccttgagtaggatgttca

SEQ ID NO: 4688434 - DNA, 25 bp, Homo sapien
tttgcttttgttggacaacatccca

SEQ ID NO: 4688435 - DNA, 25 bp, Homo sapien
tcgatcgatctctgaataaaaacac

SEQ ID NO: 4688436 - DNA, 25 bp, Homo sapien
gcttttgttggacaacatcccactg

SEQ ID NO: 4688437 - DNA, 25 bp, Homo sapien
caacatcccactgatcgatcgatct

SEQ ID NO: 4688438 - DNA, 25 bp, Homo sapien
ggccctacgttagagtcaacctcag

SEQ ID NO: 4688439 - DNA, 25 bp, Homo sapien
cgccctggccaaattaagtcgaaat

SEQ ID NO: 4688440 - DNA, 25 bp, Homo sapien
catataggtggtttgcatctctggc

SEQ ID NO: 4688441 - DNA, 25 bp, Homo sapien
gaaggttcaggtgaccacgttagag

SEQ ID NO: 4688442 - DNA, 25 bp, Homo sapien
tagagctagtttgagacccagggga

SEQ ID NO: 4688443 - DNA, 25 bp, Homo sapien
catgagggcctcctctagagctagt

SEQ ID NO: 4688444 - DNA, 25 bp, Homo sapien
gggaacggtgtattcacagaatctt

SEQ ID NO: 4688445 - DNA, 25 bp, Homo sapien
ctgaggtggtatcatgagggcctcc

SEQ ID NO: 4688446 - DNA, 25 bp, Homo sapien
tgaagctgtccctcaccagttaaat

SEQ ID NO: 4688447 - DNA, 25 bp, Homo sapien
cagtactggctctaccaatggttcc

SEQ ID NO: 4688448 - DNA, 25 bp, Homo sapien
ggaggtccaactctcttaaccctga

SEQ ID NO: 4688449 - DNA, 25 bp, Homo sapien
tccatatgcataacaacccattagt

SEQ ID NO: 4688450 - DNA, 25 bp, Homo sapien
gagcaattacatcctaggcacctga

SEQ ID NO: 4688451 - DNA, 25 bp, Homo sapien
gcacttgcgagtccccataggagga

SEQ ID NO: 4688452 - DNA, 25 bp, Homo sapien
gacttactcccaacccatgaggctg

SEQ ID NO: 4688453 - DNA, 25 bp, Homo sapien
aatcctgctgatccacgaaatgcca

SEQ ID NO: 4688454 - DNA, 25 bp, Homo sapien
atctctgtgcagttcagttccctga

SEQ ID NO: 4688455 - DNA, 25 bp, Homo sapien
tctggatctctgtgcagttcagttc

SEQ ID NO: 4688456 - DNA, 25 bp, Homo sapien
tggatctctgtgcagttcagttccc

SEQ ID NO: 4688457 - DNA, 25 bp, Homo sapien
gatctctgtgcagttcagttccctg

SEQ ID NO: 4688458 - DNA, 25 bp, Homo sapien
gaagagattcctgccaaccacggaa

SEQ ID NO: 4688459 - DNA, 25 bp, Homo sapien
ttaagaacctaggacaatgcgtggc

SEQ ID NO: 4688460 - DNA, 25 bp, Homo sapien
tcattgttggctacggcagcttctc

SEQ ID NO: 4688461 - DNA, 25 bp, Homo sapien
gaagccaggccatacaaaggagcaa

SEQ ID NO: 4688462 - DNA, 25 bp, Homo sapien
gatcctagagatcagtgaactcctg

SEQ ID NO: 4688463 - DNA, 25 bp, Homo sapien
tgaactcctgcagatctgtggtgag

SEQ ID NO: 4688464 - DNA, 25 bp, Homo sapien
tagcagctgatatggccagatatac

SEQ ID NO: 4688465 - DNA, 25 bp, Homo sapien
tgtaagttggagttaaggcagatcc

SEQ ID NO: 4688466 - DNA, 25 bp, Homo sapien
gaagatgccagggaacatatattgg

SEQ ID NO: 4688467 - DNA, 25 bp, Homo sapien
tatagaatcaatcgtgtccagactg

SEQ ID NO: 4688468 - DNA, 25 bp, Homo sapien
cctagagcaaggtaaacagaatata

SEQ ID NO: 4688469 - DNA, 25 bp, Homo sapien
caaagaactgtagcgtacagagaat

SEQ ID NO: 4688470 - DNA, 25 bp, Homo sapien
ttcattcataccagataatagctgc

SEQ ID NO: 4688471 - DNA, 25 bp, Homo sapien
ggcctaatgaggtcaccctgactcc

SEQ ID NO: 4688472 - DNA, 25 bp, Homo sapien
accacctgggaagatagcacaaggc

SEQ ID NO: 4688473 - DNA, 25 bp, Homo sapien
aactgaccttataaccctctgcacc

SEQ ID NO: 4688474 - DNA, 25 bp, Homo sapien
gatagcctgggatgagcaatcctgt

SEQ ID NO: 4688475 - DNA, 25 bp, Homo sapien
cagcaaccttctaggcctgctttcc

SEQ ID NO: 4688476 - DNA, 25 bp, Homo sapien
tcctgttatagtacatctggacctt

SEQ ID NO: 4688477 - DNA, 25 bp, Homo sapien
tccaatttgtagcttcctgcctggc

SEQ ID NO: 4688478 - DNA, 25 bp, Homo sapien
ccaggcatagacgagctggcgttgg

SEQ ID NO: 4688479 - DNA, 25 bp, Homo sapien
gcatagacgagctggcgttggaccc

SEQ ID NO: 4688480 - DNA, 25 bp, Homo sapien
agacgagctggcgttggacccagtt

SEQ ID NO: 4688481 - DNA, 25 bp, Homo sapien
cgagctggcgttggacccagttctt

SEQ ID NO: 4688482 - DNA, 25 bp, Homo sapien
aaatggacaaaagtgccttgacgtg

SEQ ID NO: 4688483 - DNA, 25 bp, Homo sapien
acaaaagtgccttgacgtggagggt

SEQ ID NO: 4688484 - DNA, 25 bp, Homo sapien
tggctggttttgcaggccgccagca

SEQ ID NO: 4688485 - DNA, 25 bp, Homo sapien
tggtagtacagcaagaggcactggc

SEQ ID NO: 4688486 - DNA, 25 bp, Homo sapien
tcagtcgccatagagctgggcctgg

SEQ ID NO: 4688487 - DNA, 25 bp, Homo sapien
ggactacagagttccctgaccttga

SEQ ID NO: 4688488 - DNA, 25 bp, Homo sapien
cttgaggcccttgcaaaagtagaat

SEQ ID NO: 4688489 - DNA, 25 bp, Homo sapien
cagtacaactggtctggcaacagct

SEQ ID NO: 4688490 - DNA, 25 bp, Homo sapien
agagccgtttatttagaagcctgac

SEQ ID NO: 4688491 - DNA, 25 bp, Homo sapien
ccactgggatgaaggatgcatgtta

SEQ ID NO: 4688492 - DNA, 25 bp, Homo sapien
ggcaggaacttgctgggccgggcca

SEQ ID NO: 4688493 - DNA, 25 bp, Homo sapien
ttcttctcagatgtcgactccaccg

SEQ ID NO: 4688494 - DNA, 25 bp, Homo sapien
aagctcagctgtgggaagacgggcc

SEQ ID NO: 4688495 - DNA, 25 bp, Homo sapien
ctgcctgagataccctttgccttgc

SEQ ID NO: 4688496 - DNA, 25 bp, Homo sapien
catctttgctcgtattgctccctct

SEQ ID NO: 4688497 - DNA, 25 bp, Homo sapien
gctcatctttgctcgtattgctccc

SEQ ID NO: 4688498 - DNA, 25 bp, Homo sapien
tccctctgcctgagataccctttgc

SEQ ID NO: 4688499 - DNA, 25 bp, Homo sapien
tcacaggagtacacacacgcaccac

SEQ ID NO: 4688500 - DNA, 25 bp, Homo sapien
ctgcccagtctcacaggagtacaca

SEQ ID NO: 4688501 - DNA, 25 bp, Homo sapien
ccagtctcacaggagtacacacacg

SEQ ID NO: 4688502 - DNA, 25 bp, Homo sapien
agtctcacaggagtacacacacgca

SEQ ID NO: 4688503 - DNA, 25 bp, Homo sapien
gcgggctccaatggcgaggccggcg

SEQ ID NO: 4688504 - DNA, 25 bp, Homo sapien
ccgcgggctccaatggcgaggccgg

SEQ ID NO: 4688505 - DNA, 25 bp, Homo sapien
gggctccaatggcgaggccggcgcg

SEQ ID NO: 4688506 - DNA, 25 bp, Homo sapien
gcggccgcgggctccaatggcgagg

SEQ ID NO: 4688507 - DNA, 25 bp, Homo sapien
ccgtgtgcgccgcggtgtggccgct

SEQ ID NO: 4688508 - DNA, 25 bp, Homo sapien
tgtggccgctcctcggcggggggcc

SEQ ID NO: 4688509 - DNA, 25 bp, Homo sapien
tgtgcgccgcggtgtggccgctcct

SEQ ID NO: 4688510 - DNA, 25 bp, Homo sapien
gtctccgtgtgcgccgcggtgtggc

SEQ ID NO: 4688511 - DNA, 25 bp, Homo sapien
tgcctgcgcgcagagctgtgtttcc

SEQ ID NO: 4688512 - DNA, 25 bp, Homo sapien
gaacgcctgtgctgttagtgcaagg

SEQ ID NO: 4688513 - DNA, 25 bp, Homo sapien
tttcctcaacaagtgtgcgagcggt

SEQ ID NO: 4688514 - DNA, 25 bp, Homo sapien
tgtgtctgcgccaagggtccgcgcc

SEQ ID NO: 4688515 - DNA, 25 bp, Homo sapien
tgtggtgtgttctgacctgtgtcgg

SEQ ID NO: 4688516 - DNA, 25 bp, Homo sapien
gtggtgtgttctgacctgtgtcgga

SEQ ID NO: 4688517 - DNA, 25 bp, Homo sapien
tgtacagtgtgttcccccttgtgta

SEQ ID NO: 4688518 - DNA, 25 bp, Homo sapien
gtccgtctaccttacatgcatgttc

SEQ ID NO: 4688519 - DNA, 25 bp, Homo sapien
tgtctcttgcccgtctgtgttgtga

SEQ ID NO: 4688520 - DNA, 25 bp, Homo sapien
tgtatctatgcctatggctggtgtg

SEQ ID NO: 4688521 - DNA, 25 bp, Homo sapien
gtgtgccctttatttacatgacatg

SEQ ID NO: 4688522 - DNA, 25 bp, Homo sapien
tgtctttcattgtgtgccctttatt

SEQ ID NO: 4688523 - DNA, 25 bp, Homo sapien
tttacatgacatgttgtgcgtgtgg

SEQ ID NO: 4688524 - DNA, 25 bp, Homo sapien
ttacatgacatgttgtgcgtgtggt

SEQ ID NO: 4688525 - DNA, 25 bp, Homo sapien
cacagatcatgctccaaggccagga

SEQ ID NO: 4688526 - DNA, 25 bp, Homo sapien
agtgctaggttctgctgaggcgcca

SEQ ID NO: 4688527 - DNA, 25 bp, Homo sapien
ctgacagtgaacagggaaggctctg

SEQ ID NO: 4688528 - DNA, 25 bp, Homo sapien
gtccctatgattggagctctgccca

SEQ ID NO: 4688529 - DNA, 25 bp, Homo sapien
caccttctcttggcagaacatggtt

SEQ ID NO: 4688530 - DNA, 25 bp, Homo sapien
cacaccttctcttggcagaacatgg

SEQ ID NO: 4688531 - DNA, 25 bp, Homo sapien
gacacaccttctcttggcagaacat

SEQ ID NO: 4688532 - DNA, 25 bp, Homo sapien
ggacacaccttctcttggcagaaca

SEQ ID NO: 4688533 - DNA, 25 bp, Homo sapien
agacccagccagcttagaagctagt

SEQ ID NO: 4688534 - DNA, 25 bp, Homo sapien
gagcacttcgctctatcatctctgt

SEQ ID NO: 4688535 - DNA, 25 bp, Homo sapien
agaagctagtgggagtgttctgctc

SEQ ID NO: 4688536 - DNA, 25 bp, Homo sapien
cccatggccagtaatgggtggagct

SEQ ID NO: 4688537 - DNA, 25 bp, Homo sapien
tttaggtgaggacacggaggcttaa

SEQ ID NO: 4688538 - DNA, 25 bp, Homo sapien
tcccaataactctatttaggtgagg

SEQ ID NO: 4688539 - DNA, 25 bp, Homo sapien
gggcaatcaagattctgaatacaga

SEQ ID NO: 4688540 - DNA, 25 bp, Homo sapien
taatacaatgatcacttactgcaca

SEQ ID NO: 4688541 - DNA, 25 bp, Homo sapien
gaacatttatgcaacagccccacga

SEQ ID NO: 4688542 - DNA, 25 bp, Homo sapien
taggagggtctagctaacccaagac

SEQ ID NO: 4688543 - DNA, 25 bp, Homo sapien
gacaattcaattccacgtgcagctc

SEQ ID NO: 4688544 - DNA, 25 bp, Homo sapien
tggtgacaccgtacctttcttgtgg

SEQ ID NO: 4688545 - DNA, 25 bp, Homo sapien
taactgattgctactttttccggga

SEQ ID NO: 4688546 - DNA, 25 bp, Homo sapien
gcacacccacctccctatttccaca

SEQ ID NO: 4688547 - DNA, 25 bp, Homo sapien
cctatttccacaacctaactgattg

SEQ ID NO: 4688548 - DNA, 25 bp, Homo sapien
tccacaacctaactgattgctactt

SEQ ID NO: 4688549 - DNA, 25 bp, Homo sapien
tccaaaggtagtgggtgatcagtct

SEQ ID NO: 4688550 - DNA, 25 bp, Homo sapien
ctgacagagaacagcgccaggcggt

SEQ ID NO: 4688551 - DNA, 25 bp, Homo sapien
tcctttctgctggagcccttatctt

SEQ ID NO: 4688552 - DNA, 25 bp, Homo sapien
ccttatcttgggttccatgactgac

SEQ ID NO: 4688553 - DNA, 25 bp, Homo sapien
ggaggtgacggagcatcgtggcacg

SEQ ID NO: 4688554 - DNA, 25 bp, Homo sapien
tcgtggcacggcagtctcaatgggt

SEQ ID NO: 4688555 - DNA, 25 bp, Homo sapien
acggagcatcgtggcacggcagtct

SEQ ID NO: 4688556 - DNA, 25 bp, Homo sapien
gcacggcagtctcaatgggtcagaa

SEQ ID NO: 4688557 - DNA, 25 bp, Homo sapien
gactccattgctcaaatcgttaggg

SEQ ID NO: 4688558 - DNA, 25 bp, Homo sapien
gctttcctgacagcttactcttcct

SEQ ID NO: 4688559 - DNA, 25 bp, Homo sapien
tgctgagcctgtgccagactccatt

SEQ ID NO: 4688560 - DNA, 25 bp, Homo sapien
aatactgcccgcctgtcatggcctg

SEQ ID NO: 4688561 - DNA, 25 bp, Homo sapien
gaatcccgtaacacctgattaactg

SEQ ID NO: 4688562 - DNA, 25 bp, Homo sapien
taaacaccacgtcacttcatgcagg

SEQ ID NO: 4688563 - DNA, 25 bp, Homo sapien
tcagcagactgatcaggacctccaa

SEQ ID NO: 4688564 - DNA, 25 bp, Homo sapien
aaacccagtcactgtgagctcccag

SEQ ID NO: 4688565 - DNA, 25 bp, Homo sapien
ggcgccgaggttggctgccctacac

SEQ ID NO: 4688566 - DNA, 25 bp, Homo sapien
cttcacactccaccggaagctccgg

SEQ ID NO: 4688567 - DNA, 25 bp, Homo sapien
actcctcgggtgcagccggggacct

SEQ ID NO: 4688568 - DNA, 25 bp, Homo sapien
tgccttgccggtttccgccggtgcg

SEQ ID NO: 4688569 - DNA, 25 bp, Homo sapien
tgaccacgagtgtcattggcacttc

SEQ ID NO: 4688570 - DNA, 25 bp, Homo sapien
ctgaccacgagtgtcattggcactt

SEQ ID NO: 4688571 - DNA, 25 bp, Homo sapien
agaggaggtttttcacatagcttcc

SEQ ID NO: 4688572 - DNA, 25 bp, Homo sapien
cagaggaggtttttcacatagcttc

SEQ ID NO: 4688573 - DNA, 25 bp, Homo sapien
tcagaggaggtttttcacatagctt

SEQ ID NO: 4688574 - DNA, 25 bp, Homo sapien
gcagactcggactctttcatgggca

SEQ ID NO: 4688575 - DNA, 25 bp, Homo sapien
aaagcagactcggactctttcatgg

SEQ ID NO: 4688576 - DNA, 25 bp, Homo sapien
aagatggctttcaagggctttaaag

SEQ ID NO: 4688577 - DNA, 25 bp, Homo sapien
cagactcggactctttcatgggcat

SEQ ID NO: 4688578 - DNA, 25 bp, Homo sapien
tgaagacagatactcctccaaggtt

SEQ ID NO: 4688579 - DNA, 25 bp, Homo sapien
ccttgacctggattgaatactggcc

SEQ ID NO: 4688580 - DNA, 25 bp, Homo sapien
tacagtttgcacttatggactcctg

SEQ ID NO: 4688581 - DNA, 25 bp, Homo sapien
tactggcctagagacacaacatgtt

SEQ ID NO: 4688582 - DNA, 25 bp, Homo sapien
taaagaaggcgattattttcacagt

SEQ ID NO: 4688583 - DNA, 25 bp, Homo sapien
atttaatctttaccagagcctggta

SEQ ID NO: 4688584 - DNA, 25 bp, Homo sapien
tgctcttaaaggaccatcatcacta

SEQ ID NO: 4688585 - DNA, 25 bp, Homo sapien
tattgagtactaagagtgctagacc

SEQ ID NO: 4688586 - DNA, 25 bp, Homo sapien
tgcaaagtacgaataatgatagtac

SEQ ID NO: 4688587 - DNA, 25 bp, Homo sapien
accacttgcaaagtacgaataatga

SEQ ID NO: 4688588 - DNA, 25 bp, Homo sapien
aatgatagtaccagcatcattggct

SEQ ID NO: 4688589 - DNA, 25 bp, Homo sapien
atgatagtaccagcatcattggctt

SEQ ID NO: 4688590 - DNA, 25 bp, Homo sapien
ttaatgagctgagcttgattcatta

SEQ ID NO: 4688591 - DNA, 25 bp, Homo sapien
aatgagctgagcttgattcattaga

SEQ ID NO: 4688592 - DNA, 25 bp, Homo sapien
tgagctgagcttgattcattagaag

SEQ ID NO: 4688593 - DNA, 25 bp, Homo sapien
gagctgagcttgattcattagaagg

SEQ ID NO: 4688594 - DNA, 25 bp, Homo sapien
gagaagttcgggctctttcctcagg

SEQ ID NO: 4688595 - DNA, 25 bp, Homo sapien
tgtggccttcgctgagacaaagctg

SEQ ID NO: 4688596 - DNA, 25 bp, Homo sapien
tgaaacacggacacgcttctcaggg

SEQ ID NO: 4688597 - DNA, 25 bp, Homo sapien
tcttttgcagccagcgcgctaggat

SEQ ID NO: 4688598 - DNA, 25 bp, Homo sapien
aacgggctcggccaggtctgacgct

SEQ ID NO: 4688599 - DNA, 25 bp, Homo sapien
cgaatccatcccaagccggcccaca

SEQ ID NO: 4688600 - DNA, 25 bp, Homo sapien
ccccactgctcgggccggatgccgg

SEQ ID NO: 4688601 - DNA, 25 bp, Homo sapien
cccgtccaatcccaattcccagaca

SEQ ID NO: 4688602 - DNA, 25 bp, Homo sapien
gctgcactggcattctccttctaaa

SEQ ID NO: 4688603 - DNA, 25 bp, Homo sapien
gctaagaggcatgtgcttaggtaaa

SEQ ID NO: 4688604 - DNA, 25 bp, Homo sapien
gcctgtagtttttacatcctaatga

SEQ ID NO: 4688605 - DNA, 25 bp, Homo sapien
tagtatgtatagtacgtagttggcg

SEQ ID NO: 4688606 - DNA, 25 bp, Homo sapien
tattgtgatatttcgtcaggcacgg

SEQ ID NO: 4688607 - DNA, 25 bp, Homo sapien
aggagctccaggctacaatgtgcta

SEQ ID NO: 4688608 - DNA, 25 bp, Homo sapien
cacggtatgtatacttgcagtccca

SEQ ID NO: 4688609 - DNA, 25 bp, Homo sapien
gatcaaccttgtgactggccactgc

SEQ ID NO: 4688610 - DNA, 25 bp, Homo sapien
aataaagccaggtgttcatcaaaac

SEQ ID NO: 4688611 - DNA, 25 bp, Homo sapien
gaataaagccaggtgttcatcaaaa

SEQ ID NO: 4688612 - DNA, 25 bp, Homo sapien
caagaataaagccaggtgttcatca

SEQ ID NO: 4688613 - DNA, 25 bp, Homo sapien
tgcaagaataaagccaggtgttcat

SEQ ID NO: 4688614 - DNA, 25 bp, Homo sapien
agatgatgatggtatctttgctttg

SEQ ID NO: 4688615 - DNA, 25 bp, Homo sapien
gatgatgggataggagagtgagatg

SEQ ID NO: 4688616 - DNA, 25 bp, Homo sapien
tagatgatgggataggagagtgaga

SEQ ID NO: 4688617 - DNA, 25 bp, Homo sapien
acatagatgatgggataggagagtg

SEQ ID NO: 4688618 - DNA, 25 bp, Homo sapien
tctcaacttgctcacaccactgtcc

SEQ ID NO: 4688619 - DNA, 25 bp, Homo sapien
caaaggtgaaagtgacctagatctc

SEQ ID NO: 4688620 - DNA, 25 bp, Homo sapien
ttttcatctgcaatctcaacttgct

SEQ ID NO: 4688621 - DNA, 25 bp, Homo sapien
tgtcctccagaatgaaaaggtagag

SEQ ID NO: 4688622 - DNA, 25 bp, Homo sapien
ctttatggtcttgatagtccaaaag

SEQ ID NO: 4688623 - DNA, 25 bp, Homo sapien
ttatggtcttgatagtccaaaagca

SEQ ID NO: 4688624 - DNA, 25 bp, Homo sapien
tttatggtcttgatagtccaaaagc

SEQ ID NO: 4688625 - DNA, 25 bp, Homo sapien
tatggtcttgatagtccaaaagcat

SEQ ID NO: 4688626 - DNA, 25 bp, Homo sapien
caggaaacaaagcttcctctttctg

SEQ ID NO: 4688627 - DNA, 25 bp, Homo sapien
tgaaaactccctctttgaatccact

SEQ ID NO: 4688628 - DNA, 25 bp, Homo sapien
tttctgaaaactccctctttgaatc

SEQ ID NO: 4688629 - DNA, 25 bp, Homo sapien
tctttctgaaaactccctctttgaa

SEQ ID NO: 4688630 - DNA, 25 bp, Homo sapien
gtaatatatctaactcctgcatgtg

SEQ ID NO: 4688631 - DNA, 25 bp, Homo sapien
caaagccaaattatcctgtttagta

SEQ ID NO: 4688632 - DNA, 25 bp, Homo sapien
ttaatgagggcctctgtaatatatc

SEQ ID NO: 4688633 - DNA, 25 bp, Homo sapien
tcttgccaccgtctttagaaagtga

SEQ ID NO: 4688634 - DNA, 25 bp, Homo sapien
taacagcttgtccaacttttcaatc

SEQ ID NO: 4688635 - DNA, 25 bp, Homo sapien
tcaatcttccctattagattatagc

SEQ ID NO: 4688636 - DNA, 25 bp, Homo sapien
tgagttcacgtaattttaacagctt

SEQ ID NO: 4688637 - DNA, 25 bp, Homo sapien
gattatagctgagattcagtacttc

SEQ ID NO: 4688638 - DNA, 25 bp, Homo sapien
tccctaaccatactggaatatgctc

SEQ ID NO: 4688639 - DNA, 25 bp, Homo sapien
gttgcctttcaaattgaggactcgc

SEQ ID NO: 4688640 - DNA, 25 bp, Homo sapien
gaggactcgcaaagattttaacttc

SEQ ID NO: 4688641 - DNA, 25 bp, Homo sapien
ggttaagcttttgcagattacacat

SEQ ID NO: 4688642 - DNA, 25 bp, Homo sapien
ctgaaatgatataacattagtattg

SEQ ID NO: 4688643 - DNA, 25 bp, Homo sapien
aaatgatataacattagtattggta

SEQ ID NO: 4688644 - DNA, 25 bp, Homo sapien
tgatataacattagtattggtataa

SEQ ID NO: 4688645 - DNA, 25 bp, Homo sapien
gatataacattagtattggtataat

SEQ ID NO: 4688646 - DNA, 25 bp, Homo sapien
ttcaactaggatcagagaaatcaaa

SEQ ID NO: 4688647 - DNA, 25 bp, Homo sapien
caaactttccaatgaacggaggtgg

SEQ ID NO: 4688648 - DNA, 25 bp, Homo sapien
aatcttgaagcggtttcaacttgct

SEQ ID NO: 4688649 - DNA, 25 bp, Homo sapien
ggtcacaactggattttcaactagg

SEQ ID NO: 4688650 - DNA, 25 bp, Homo sapien
aatctctcaaaagcctcctgtctat

SEQ ID NO: 4688651 - DNA, 25 bp, Homo sapien
aaagcctcctgtctatcctgagtgg

SEQ ID NO: 4688652 - DNA, 25 bp, Homo sapien
aaactgaatctctcaaaagcctcct

SEQ ID NO: 4688653 - DNA, 25 bp, Homo sapien
tctatcctgagtggttactggctga

SEQ ID NO: 4688654 - DNA, 25 bp, Homo sapien
aggggtctacctattttgttgatct

SEQ ID NO: 4688655 - DNA, 25 bp, Homo sapien
cagtttggctctgattttagttgta

SEQ ID NO: 4688656 - DNA, 25 bp, Homo sapien
tggctctgattttagttgtatcttg

SEQ ID NO: 4688657 - DNA, 25 bp, Homo sapien
tcttgctaggggtctacctattttg

SEQ ID NO: 4688658 - DNA, 25 bp, Homo sapien
ccttgtgacagtttgcaaagaatga

SEQ ID NO: 4688659 - DNA, 25 bp, Homo sapien
tccttgaggaatcacacacagtctt

SEQ ID NO: 4688660 - DNA, 25 bp, Homo sapien
cacacacagtcttccacaaaggttg

SEQ ID NO: 4688661 - DNA, 25 bp, Homo sapien
tcccctctagccccaccccatgaca

SEQ ID NO: 4688662 - DNA, 25 bp, Homo sapien
aagtgttaaccagggctgactctgc

SEQ ID NO: 4688663 - DNA, 25 bp, Homo sapien
gcatgttaactacaggccataaacg

SEQ ID NO: 4688664 - DNA, 25 bp, Homo sapien
ttacttacttgagccaaaagcctgg

SEQ ID NO: 4688665 - DNA, 25 bp, Homo sapien
gatggtatggcatagactccagcct

SEQ ID NO: 4688666 - DNA, 25 bp, Homo sapien
aaggtaagaatatttctcaaacaat

SEQ ID NO: 4688667 - DNA, 25 bp, Homo sapien
taaaattagccaccatggttttgga

SEQ ID NO: 4688668 - DNA, 25 bp, Homo sapien
tcaaacaatagtgaaaaaagtctaa

SEQ ID NO: 4688669 - DNA, 25 bp, Homo sapien
tattgtaaatacaattctactttta

SEQ ID NO: 4688670 - DNA, 25 bp, Homo sapien
agtcactcttgagttcctcacagct

SEQ ID NO: 4688671 - DNA, 25 bp, Homo sapien
aagtcactcttgagttcctcacagc

SEQ ID NO: 4688672 - DNA, 25 bp, Homo sapien
tcctcaaggaaccttgtttgtttgc

SEQ ID NO: 4688673 - DNA, 25 bp, Homo sapien
gaagccatatcatctagcacacagt

SEQ ID NO: 4688674 - DNA, 25 bp, Homo sapien
ttcaatgggctgagtaacgtgcacc

SEQ ID NO: 4688675 - DNA, 25 bp, Homo sapien
acagcattagtcttttgggaagcca

SEQ ID NO: 4688676 - DNA, 25 bp, Homo sapien
gacccaagggcaaagaattatctgt

SEQ ID NO: 4688677 - DNA, 25 bp, Homo sapien
catgctgccttcgatgtactgctgc

SEQ ID NO: 4688678 - DNA, 25 bp, Homo sapien
tgaatgatcataagtctccgagtct

SEQ ID NO: 4688679 - DNA, 25 bp, Homo sapien
tgtccagcacattacccacattgat

SEQ ID NO: 4688680 - DNA, 25 bp, Homo sapien
ccaatttcacagctggtagtggaag

SEQ ID NO: 4688681 - DNA, 25 bp, Homo sapien
tcctgttccagctcatattgcttct

SEQ ID NO: 4688682 - DNA, 25 bp, Homo sapien
tcgtgttaattctatggtcttctgt

SEQ ID NO: 4688683 - DNA, 25 bp, Homo sapien
tataaaaggccaattcctgttccag

SEQ ID NO: 4688684 - DNA, 25 bp, Homo sapien
tggataataatttagtggctcaaat

SEQ ID NO: 4688685 - DNA, 25 bp, Homo sapien
cctgagcactgtcaataatataact

SEQ ID NO: 4688686 - DNA, 25 bp, Homo sapien
gtgtccagtggtgtgtggcctctca

SEQ ID NO: 4688687 - DNA, 25 bp, Homo sapien
tcttgatctgtactgcctgagcact

SEQ ID NO: 4688688 - DNA, 25 bp, Homo sapien
ggatttgccaatgtaagggctttca

SEQ ID NO: 4688689 - DNA, 25 bp, Homo sapien
gtagctctcaaaatttgttgttctg

SEQ ID NO: 4688690 - DNA, 25 bp, Homo sapien
tttctatttcatcatgcagttctga

SEQ ID NO: 4688691 - DNA, 25 bp, Homo sapien
tatttcatcatgcagttctgatagt

SEQ ID NO: 4688692 - DNA, 25 bp, Homo sapien
ttaaattcttcagtagctctcaaaa

SEQ ID NO: 4688693 - DNA, 25 bp, Homo sapien
ccaggatcttaaaggtggagagtgc

SEQ ID NO: 4688694 - DNA, 25 bp, Homo sapien
tcattccataattaactaggcagct

SEQ ID NO: 4688695 - DNA, 25 bp, Homo sapien
gaagcaacttctcaagactacacct

SEQ ID NO: 4688696 - DNA, 25 bp, Homo sapien
tagaagagatagatcaggaagcaac

SEQ ID NO: 4688697 - DNA, 25 bp, Homo sapien
tgcttgtaaagaaggtctttccctg

SEQ ID NO: 4688698 - DNA, 25 bp, Homo sapien
cttgtaaagaaggtctttccctgct

SEQ ID NO: 4688699 - DNA, 25 bp, Homo sapien
gcttgtaaagaaggtctttccctgc

SEQ ID NO: 4688700 - DNA, 25 bp, Homo sapien
ctgcttgtaaagaaggtctttccct

SEQ ID NO: 4688701 - DNA, 25 bp, Homo sapien
tttacaagttgtagtctaccactca

SEQ ID NO: 4688702 - DNA, 25 bp, Homo sapien
ttacaagttgtagtctaccactcaa

SEQ ID NO: 4688703 - DNA, 25 bp, Homo sapien
ttggaatccaggctatctatggcta

SEQ ID NO: 4688704 - DNA, 25 bp, Homo sapien
atctgcagttctagatccagagctt

SEQ ID NO: 4688705 - DNA, 25 bp, Homo sapien
ttaatctccttctgctttccggcaa

SEQ ID NO: 4688706 - DNA, 25 bp, Homo sapien
tatggctatttgcaggtccttaatc

SEQ ID NO: 4688707 - DNA, 25 bp, Homo sapien
gactctggactctgatgctaacaat

SEQ ID NO: 4688708 - DNA, 25 bp, Homo sapien
gatgagacatgtaatatgtagacag

SEQ ID NO: 4688709 - DNA, 25 bp, Homo sapien
tgtagacagaacaagtcaaaatttc

SEQ ID NO: 4688710 - DNA, 25 bp, Homo sapien
taaatttgtacatcaaactaaaaca

SEQ ID NO: 4688711 - DNA, 25 bp, Homo sapien
gaaagctaccttcttcaagccctag

SEQ ID NO: 4688712 - DNA, 25 bp, Homo sapien
catgcggccatcatttactgaaagc

SEQ ID NO: 4688713 - DNA, 25 bp, Homo sapien
aaggtaaggagcaaatctcccttgc

SEQ ID NO: 4688714 - DNA, 25 bp, Homo sapien
gctctgcaatacaatgaaattcaac

SEQ ID NO: 4688715 - DNA, 25 bp, Homo sapien
ctggctgtatccagccacctgacca

SEQ ID NO: 4688716 - DNA, 25 bp, Homo sapien
gccatatctcaggaagaaacattcc

SEQ ID NO: 4688717 - DNA, 25 bp, Homo sapien
tgaccatatctagccatatctcagg

SEQ ID NO: 4688718 - DNA, 25 bp, Homo sapien
agccacctgaccatatctagccata

SEQ ID NO: 4688719 - DNA, 25 bp, Homo sapien
tattaatccagagatcttaaagttc

SEQ ID NO: 4688720 - DNA, 25 bp, Homo sapien
acaacttgtcaagtacttaaagcaa

SEQ ID NO: 4688721 - DNA, 25 bp, Homo sapien
ttgaaattagctggcccacaaaaaa

SEQ ID NO: 4688722 - DNA, 25 bp, Homo sapien
cctattattcaaggtataccaggag

SEQ ID NO: 4688723 - DNA, 25 bp, Homo sapien
aactgagccgttgagaacagagaaa

SEQ ID NO: 4688724 - DNA, 25 bp, Homo sapien
aactgtgggcggaacgctttctaat

SEQ ID NO: 4688725 - DNA, 25 bp, Homo sapien
aaattcatgtgcacttccctctctg

SEQ ID NO: 4688726 - DNA, 25 bp, Homo sapien
aatttatcctgttaaaactgagccg

SEQ ID NO: 4688727 - DNA, 25 bp, Homo sapien
ctttgtacagagagagaaaaaatat

SEQ ID NO: 4688728 - DNA, 25 bp, Homo sapien
tacagagagagaaaaaatatcatac

SEQ ID NO: 4688729 - DNA, 25 bp, Homo sapien
tgtacagagagagaaaaaatatcat

SEQ ID NO: 4688730 - DNA, 25 bp, Homo sapien
ttgtacagagagagaaaaaatatca

SEQ ID NO: 4688731 - DNA, 25 bp, Homo sapien
atctctgactcctcctccttttaag

SEQ ID NO: 4688732 - DNA, 25 bp, Homo sapien
ctctgactcctcctccttttaagtc

SEQ ID NO: 4688733 - DNA, 25 bp, Homo sapien
tctctgactcctcctccttttaagt

SEQ ID NO: 4688734 - DNA, 25 bp, Homo sapien
tgttcataatgtcaagctgttgttc

SEQ ID NO: 4688735 - DNA, 25 bp, Homo sapien
catccaaacgactttcaagttgttg

SEQ ID NO: 4688736 - DNA, 25 bp, Homo sapien
tctcttccgtttccttagcaattct

SEQ ID NO: 4688737 - DNA, 25 bp, Homo sapien
gctgttgttctttaccgctcttttg

SEQ ID NO: 4688738 - DNA, 25 bp, Homo sapien
tgcatccatggcaactatttccagc

SEQ ID NO: 4688739 - DNA, 25 bp, Homo sapien
tggtccccaggtattcttgcaaccc

SEQ ID NO: 4688740 - DNA, 25 bp, Homo sapien
gctcgacttctgtcaatctctgcaa

SEQ ID NO: 4688741 - DNA, 25 bp, Homo sapien
gagttgcctggcctttaatggtccc

SEQ ID NO: 4688742 - DNA, 25 bp, Homo sapien
aaagatgcattcacctcatgctgct

SEQ ID NO: 4688743 - DNA, 25 bp, Homo sapien
tagctcagcttcataggcactgaga

SEQ ID NO: 4688744 - DNA, 25 bp, Homo sapien
ggttggcttcagcatcccttaggtt

SEQ ID NO: 4688745 - DNA, 25 bp, Homo sapien
ttaggtttagccgagcctctagctc

SEQ ID NO: 4688746 - DNA, 25 bp, Homo sapien
cacttaagaaggagtaagcatcaga

SEQ ID NO: 4688747 - DNA, 25 bp, Homo sapien
gctcagcccaaatacaccaaatcag

SEQ ID NO: 4688748 - DNA, 25 bp, Homo sapien
taaaagttctgcaagtgatccaaca

SEQ ID NO: 4688749 - DNA, 25 bp, Homo sapien
gcatcacaagtgagttcatgcaact

SEQ ID NO: 4688750 - DNA, 25 bp, Homo sapien
tccaagggcattcttgagggcttgc

SEQ ID NO: 4688751 - DNA, 25 bp, Homo sapien
ttcttgagggcttgcctttccttct

SEQ ID NO: 4688752 - DNA, 25 bp, Homo sapien
tttccaagggcattcttgagggctt

SEQ ID NO: 4688753 - DNA, 25 bp, Homo sapien
caagggcattcttgagggcttgcct

SEQ ID NO: 4688754 - DNA, 25 bp, Homo sapien
ttcttagctcatccacacgagctgc

SEQ ID NO: 4688755 - DNA, 25 bp, Homo sapien
ccacatggttaaggtgattctggaa

SEQ ID NO: 4688756 - DNA, 25 bp, Homo sapien
tctggacgaaccaaaccatcaacca

SEQ ID NO: 4688757 - DNA, 25 bp, Homo sapien
aatctttaagttgctgttttaacag

SEQ ID NO: 4688758 - DNA, 25 bp, Homo sapien
aactcttcttgtccagttgccagtt

SEQ ID NO: 4688759 - DNA, 25 bp, Homo sapien
agacttttccctaagacatctgaag

SEQ ID NO: 4688760 - DNA, 25 bp, Homo sapien
ttggagcgtgcaagaatttcactga

SEQ ID NO: 4688761 - DNA, 25 bp, Homo sapien
tttcccacttggagcgtgcaagaat

SEQ ID NO: 4688762 - DNA, 25 bp, Homo sapien
ccaggtgcctcttgcccttgtctta

SEQ ID NO: 4688763 - DNA, 25 bp, Homo sapien
caggtgcctcttgcccttgtcttac

SEQ ID NO: 4688764 - DNA, 25 bp, Homo sapien
tccaggtgcctcttgcccttgtctt

SEQ ID NO: 4688765 - DNA, 25 bp, Homo sapien
ctccaggtgcctcttgcccttgtct

SEQ ID NO: 4688766 - DNA, 25 bp, Homo sapien
tttctctaactctcggagttgggcc

SEQ ID NO: 4688767 - DNA, 25 bp, Homo sapien
ctttttctctaactctcggagttgg

SEQ ID NO: 4688768 - DNA, 25 bp, Homo sapien
ttttcttgcaaatagtgaatttcat

SEQ ID NO: 4688769 - DNA, 25 bp, Homo sapien
ttcttgcaaatagtgaatttcattc

SEQ ID NO: 4688770 - DNA, 25 bp, Homo sapien
cagaggtggccacggctttctttag

SEQ ID NO: 4688771 - DNA, 25 bp, Homo sapien
ctgtggctagcttatcagaggtggc

SEQ ID NO: 4688772 - DNA, 25 bp, Homo sapien
aaaaacttgctcctgagatttggca

SEQ ID NO: 4688773 - DNA, 25 bp, Homo sapien
ctggtctttggcaatggtgagctca

SEQ ID NO: 4688774 - DNA, 25 bp, Homo sapien
tagaacgcagtatccatggcagcac

SEQ ID NO: 4688775 - DNA, 25 bp, Homo sapien
cctttcagggctcagtagaacgcag

SEQ ID NO: 4688776 - DNA, 25 bp, Homo sapien
cattttcacatgactgcacgagatg

SEQ ID NO: 4688777 - DNA, 25 bp, Homo sapien
cttcaggaacccttgtccaggtaga

SEQ ID NO: 4688778 - DNA, 25 bp, Homo sapien
ctgcaggagttcgatctcagcttct

SEQ ID NO: 4688779 - DNA, 25 bp, Homo sapien
agattctgcaggagttcgatctcag

SEQ ID NO: 4688780 - DNA, 25 bp, Homo sapien
gcaggagttcgatctcagcttctgc

SEQ ID NO: 4688781 - DNA, 25 bp, Homo sapien
ttctgcaggagttcgatctcagctt

SEQ ID NO: 4688782 - DNA, 25 bp, Homo sapien
gagtttgctccagtacctacacctg

SEQ ID NO: 4688783 - DNA, 25 bp, Homo sapien
taggacctgtgagtttgctccagta

SEQ ID NO: 4688784 - DNA, 25 bp, Homo sapien
cacttccagtgaggtctagtacatt

SEQ ID NO: 4688785 - DNA, 25 bp, Homo sapien
tgtcctttgtcgttccattgtctca

SEQ ID NO: 4688786 - DNA, 25 bp, Homo sapien
ggtggtggtggcataaagtaccaat

SEQ ID NO: 4688787 - DNA, 25 bp, Homo sapien
gaaacttcacgtcgaagttcagcaa

SEQ ID NO: 4688788 - DNA, 25 bp, Homo sapien
gccatgctgcttatgtaatcattct

SEQ ID NO: 4688789 - DNA, 25 bp, Homo sapien
ccaatagcctcgtcttttgaaagga

SEQ ID NO: 4688790 - DNA, 25 bp, Homo sapien
tgtctttgctaagccaataactctc

SEQ ID NO: 4688791 - DNA, 25 bp, Homo sapien
aacaaaagcatgaccccaatctact

SEQ ID NO: 4688792 - DNA, 25 bp, Homo sapien
ccaacgctcactgcttgctaagtgc

SEQ ID NO: 4688793 - DNA, 25 bp, Homo sapien
taagtgctgacttcacatccctgct

SEQ ID NO: 4688794 - DNA, 25 bp, Homo sapien
cgtggttttctaacaggagttgagg

SEQ ID NO: 4688795 - DNA, 25 bp, Homo sapien
ggctgagtacttaaggccaacacca

SEQ ID NO: 4688796 - DNA, 25 bp, Homo sapien
tatgtaacccactcctgatgggaga

SEQ ID NO: 4688797 - DNA, 25 bp, Homo sapien
aataaacccagtatcctgaggcagg

SEQ ID NO: 4688798 - DNA, 25 bp, Homo sapien
tacatcatgtatccaggaggaggca

SEQ ID NO: 4688799 - DNA, 25 bp, Homo sapien
ctcactctcttcctgactatctcct

SEQ ID NO: 4688800 - DNA, 25 bp, Homo sapien
agcacagtatacatcatgtatccag

SEQ ID NO: 4688801 - DNA, 25 bp, Homo sapien
cagtatacatcatgtatccaggagg

SEQ ID NO: 4688802 - DNA, 25 bp, Homo sapien
tgagaggtcggctattgtttggcaa

SEQ ID NO: 4688803 - DNA, 25 bp, Homo sapien
gacgttgcaatgcagcacacccata

SEQ ID NO: 4688804 - DNA, 25 bp, Homo sapien
gttatggtgttcagggacgttgcaa

SEQ ID NO: 4688805 - DNA, 25 bp, Homo sapien
tgcagcacacccatagggatgaagg

SEQ ID NO: 4688806 - DNA, 25 bp, Homo sapien
gagagttgtatgtctttccacttac

SEQ ID NO: 4688807 - DNA, 25 bp, Homo sapien
taataagagaatgcttgcacagttc

SEQ ID NO: 4688808 - DNA, 25 bp, Homo sapien
tccagtcataaataggtcaactcat

SEQ ID NO: 4688809 - DNA, 25 bp, Homo sapien
taaccttatcagtcacccatggaag

SEQ ID NO: 4688810 - DNA, 25 bp, Homo sapien
aacatttgccaagcctcttgtggat

SEQ ID NO: 4688811 - DNA, 25 bp, Homo sapien
gaagtaacacatgcaaacgaaggga

SEQ ID NO: 4688812 - DNA, 25 bp, Homo sapien
tggttaaagtggtatcaatggccca

SEQ ID NO: 4688813 - DNA, 25 bp, Homo sapien
catgggagaaaagttctgagaaggc

SEQ ID NO: 4688814 - DNA, 25 bp, Homo sapien
tatgtcttctaatctagaaacttca

SEQ ID NO: 4688815 - DNA, 25 bp, Homo sapien
tgtcttctaatctagaaacttcatt

SEQ ID NO: 4688816 - DNA, 25 bp, Homo sapien
cttctaatctagaaacttcattctc

SEQ ID NO: 4688817 - DNA, 25 bp, Homo sapien
gtcttctaatctagaaacttcattc

SEQ ID NO: 4688818 - DNA, 25 bp, Homo sapien
tccgactgccgcttggatgctctca

SEQ ID NO: 4688819 - DNA, 25 bp, Homo sapien
tctttctccgactgccgcttggatg

SEQ ID NO: 4688820 - DNA, 25 bp, Homo sapien
tccatttctttctccgactgccgct

SEQ ID NO: 4688821 - DNA, 25 bp, Homo sapien
gactgccgcttggatgctctcatcc

SEQ ID NO: 4688822 - DNA, 25 bp, Homo sapien
gacagttctatgtaattcttctact

SEQ ID NO: 4688823 - DNA, 25 bp, Homo sapien
gacgtttctggacagttctatgtaa

SEQ ID NO: 4688824 - DNA, 25 bp, Homo sapien
tggacagttctatgtaattcttcta

SEQ ID NO: 4688825 - DNA, 25 bp, Homo sapien
ttgacgtttctggacagttctatgt

SEQ ID NO: 4688826 - DNA, 25 bp, Homo sapien
aggagtcggtcagcttccctgagct

SEQ ID NO: 4688827 - DNA, 25 bp, Homo sapien
ttctttagtgcatgaaagttcactc

SEQ ID NO: 4688828 - DNA, 25 bp, Homo sapien
tccctgagctctgagcgacgtttca

SEQ ID NO: 4688829 - DNA, 25 bp, Homo sapien
taagactctcaacatttccatcaat

SEQ ID NO: 4688830 - DNA, 25 bp, Homo sapien
agctcacaccccaaaccacaagaag

SEQ ID NO: 4688831 - DNA, 25 bp, Homo sapien
gagctcacaccccaaaccacaagaa

SEQ ID NO: 4688832 - DNA, 25 bp, Homo sapien
actgagctcacaccccaaaccacaa

SEQ ID NO: 4688833 - DNA, 25 bp, Homo sapien
cacactgagctcacaccccaaacca

SEQ ID NO: 4688834 - DNA, 25 bp, Homo sapien
tgctgatcagctttgacgaggttaa

SEQ ID NO: 4688835 - DNA, 25 bp, Homo sapien
cagcatctgactcagtttgcaataa

SEQ ID NO: 4688836 - DNA, 25 bp, Homo sapien
gagctctcctttctaattcctcagc

SEQ ID NO: 4688837 - DNA, 25 bp, Homo sapien
cagctttgacgaggttaacagcagt

SEQ ID NO: 4688838 - DNA, 25 bp, Homo sapien
cacattgctttattccccccaggtc

SEQ ID NO: 4688839 - DNA, 25 bp, Homo sapien
agcacattgctttattccccccagg

SEQ ID NO: 4688840 - DNA, 25 bp, Homo sapien
gcacattgctttattccccccaggt

SEQ ID NO: 4688841 - DNA, 25 bp, Homo sapien
tgctgctacaattttgtttatttct

SEQ ID NO: 4688842 - DNA, 25 bp, Homo sapien
aatcctttgcatcagcctggagcga

SEQ ID NO: 4688843 - DNA, 25 bp, Homo sapien
aagtctgagtcttttgctgctacaa

SEQ ID NO: 4688844 - DNA, 25 bp, Homo sapien
tcttgcttaaacattggaagtctga

SEQ ID NO: 4688845 - DNA, 25 bp, Homo sapien
caaagcaccagcaacactagagcag

SEQ ID NO: 4688846 - DNA, 25 bp, Homo sapien
aacactagagcagatcctaagggac

SEQ ID NO: 4688847 - DNA, 25 bp, Homo sapien
taagggactcggaaccccagagctg

SEQ ID NO: 4688848 - DNA, 25 bp, Homo sapien
caaaccccttgtagccctacagagg

SEQ ID NO: 4688849 - DNA, 25 bp, Homo sapien
tctctatgtctttctgtagtttctg

SEQ ID NO: 4688850 - DNA, 25 bp, Homo sapien
tctatgtctttctgtagtttctgaa

SEQ ID NO: 4688851 - DNA, 25 bp, Homo sapien
catctctatgtctttctgtagtttc

SEQ ID NO: 4688852 - DNA, 25 bp, Homo sapien
tatgtctttctgtagtttctgaagc

SEQ ID NO: 4688853 - DNA, 25 bp, Homo sapien
ggtggtgatcctcattgcgttctgc

SEQ ID NO: 4688854 - DNA, 25 bp, Homo sapien
tcagattctttaaggacctgcaggt

SEQ ID NO: 4688855 - DNA, 25 bp, Homo sapien
ctgaagaagcacctcagattcttta

SEQ ID NO: 4688856 - DNA, 25 bp, Homo sapien
taaggacctgcaggtggtgatcctc

SEQ ID NO: 4688857 - DNA, 25 bp, Homo sapien
tttcagcttttccagctcggctctt

SEQ ID NO: 4688858 - DNA, 25 bp, Homo sapien
ttttcagcttttccagctcggctct

SEQ ID NO: 4688859 - DNA, 25 bp, Homo sapien
cagcttttccagctcggctcttttg

SEQ ID NO: 4688860 - DNA, 25 bp, Homo sapien
gcttttcagcttttccagctcggct

SEQ ID NO: 4688861 - DNA, 25 bp, Homo sapien
catccctcaggttacagttttccaa

SEQ ID NO: 4688862 - DNA, 25 bp, Homo sapien
gaaatgcctaatgaaaaccttgagc

SEQ ID NO: 4688863 - DNA, 25 bp, Homo sapien
tacagccctcagtgctaacctggag

SEQ ID NO: 4688864 - DNA, 25 bp, Homo sapien
aatcaggagctaatatcctagcccc

SEQ ID NO: 4688865 - DNA, 25 bp, Homo sapien
ctgtccaagacagccatctcctgct

SEQ ID NO: 4688866 - DNA, 25 bp, Homo sapien
tgtccaagacagccatctcctgctg

SEQ ID NO: 4688867 - DNA, 25 bp, Homo sapien
cagccatctcctgctgctgacttgt

SEQ ID NO: 4688868 - DNA, 25 bp, Homo sapien
ccatctcctgctgctgacttgtcac

SEQ ID NO: 4688869 - DNA, 25 bp, Homo sapien
gcttccttggagtagatgcagctcc

SEQ ID NO: 4688870 - DNA, 25 bp, Homo sapien
accatgcttccttggagtagatgca

SEQ ID NO: 4688871 - DNA, 25 bp, Homo sapien
ctggaccatgcttccttggagtaga

SEQ ID NO: 4688872 - DNA, 25 bp, Homo sapien
catgcttccttggagtagatgcagc

SEQ ID NO: 4688873 - DNA, 25 bp, Homo sapien
tcccagtctcagagcttcctggagg

SEQ ID NO: 4688874 - DNA, 25 bp, Homo sapien
cagagggggaactacacatgacagc

SEQ ID NO: 4688875 - DNA, 25 bp, Homo sapien
tagcactgtcctacgactcttcaga

SEQ ID NO: 4688876 - DNA, 25 bp, Homo sapien
cagccactgcatggatatgtaacaa

SEQ ID NO: 4688877 - DNA, 25 bp, Homo sapien
gaagaaatggtatgagaaaggtaca

SEQ ID NO: 4688878 - DNA, 25 bp, Homo sapien
cctgctttataagtgtaagttgagt

SEQ ID NO: 4688879 - DNA, 25 bp, Homo sapien
tttcaatttcctgctttataagtgt

SEQ ID NO: 4688880 - DNA, 25 bp, Homo sapien
cggttttatgtttagacatctgcct

SEQ ID NO: 4688881 - DNA, 25 bp, Homo sapien
tttcactaatctgaacatttagttc

SEQ ID NO: 4688882 - DNA, 25 bp, Homo sapien
tttttctgatcatagagatacttgc

SEQ ID NO: 4688883 - DNA, 25 bp, Homo sapien
gagatacttgcttactgtagaaaag

SEQ ID NO: 4688884 - DNA, 25 bp, Homo sapien
tctgatcatagagatacttgcttac

SEQ ID NO: 4688885 - DNA, 25 bp, Homo sapien
tgaaatacagactgagatttatata

SEQ ID NO: 4688886 - DNA, 25 bp, Homo sapien
gaaacaaagcatggtccatgatatt

SEQ ID NO: 4688887 - DNA, 25 bp, Homo sapien
tagaaacaaagcatggtccatgata

SEQ ID NO: 4688888 - DNA, 25 bp, Homo sapien
aacaaagcatggtccatgatattaa

SEQ ID NO: 4688889 - DNA, 25 bp, Homo sapien
agaaacaaagcatggtccatgatat

SEQ ID NO: 4688890 - DNA, 25 bp, Homo sapien
agctcatggttttcaagttgcaaca

SEQ ID NO: 4688891 - DNA, 25 bp, Homo sapien
ctaattcagataccctttggtcatg

SEQ ID NO: 4688892 - DNA, 25 bp, Homo sapien
gtagcttcaaaccttgtagctcatg

SEQ ID NO: 4688893 - DNA, 25 bp, Homo sapien
ttggtcatgttgtagcttcaaacct

SEQ ID NO: 4688894 - DNA, 25 bp, Homo sapien
acttcagtttcttaagggtacactg

SEQ ID NO: 4688895 - DNA, 25 bp, Homo sapien
ttcagtttcttaagggtacactggc

SEQ ID NO: 4688896 - DNA, 25 bp, Homo sapien
tcttaagggtacactggctttgttc

SEQ ID NO: 4688897 - DNA, 25 bp, Homo sapien
taagggtacactggctttgttcatt

SEQ ID NO: 4688898 - DNA, 25 bp, Homo sapien
tatccctctcaaggagctgcttctg

SEQ ID NO: 4688899 - DNA, 25 bp, Homo sapien
gctgctgggatatctgctgcaaatt

SEQ ID NO: 4688900 - DNA, 25 bp, Homo sapien
cgggactcagcagtcattcgttcta

SEQ ID NO: 4688901 - DNA, 25 bp, Homo sapien
tcaacacacgattgtaaagctcggg

SEQ ID NO: 4688902 - DNA, 25 bp, Homo sapien
ttggcctgaagaagtgatcctgcaa

SEQ ID NO: 4688903 - DNA, 25 bp, Homo sapien
aagtgatcctgcaagcttatttgtt

SEQ ID NO: 4688904 - DNA, 25 bp, Homo sapien
ctttggcctgaagaagtgatcctgc

SEQ ID NO: 4688905 - DNA, 25 bp, Homo sapien
gtgatcctgcaagcttatttgttct

SEQ ID NO: 4688906 - DNA, 25 bp, Homo sapien
tctttacactaataccacagtgttt

SEQ ID NO: 4688907 - DNA, 25 bp, Homo sapien
tatattatacatagtgaggtatgaa

SEQ ID NO: 4688908 - DNA, 25 bp, Homo sapien
catagtgaggtatgaattgagattc

SEQ ID NO: 4688909 - DNA, 25 bp, Homo sapien
tatccaattgtttcagccaacattt

SEQ ID NO: 4688910 - DNA, 25 bp, Homo sapien
gttttctgacattcaattccaactt

SEQ ID NO: 4688911 - DNA, 25 bp, Homo sapien
ctctgtttagttggtctagttcctg

SEQ ID NO: 4688912 - DNA, 25 bp, Homo sapien
tgaaatgtcgttatgcagtgacaac

SEQ ID NO: 4688913 - DNA, 25 bp, Homo sapien
tgacaacttgtctctgtttagttgg

SEQ ID NO: 4688914 - DNA, 25 bp, Homo sapien
tattccaagttgtgcaaacattacc

SEQ ID NO: 4688915 - DNA, 25 bp, Homo sapien
tctatgaggagtgaggtcaacagca

SEQ ID NO: 4688916 - DNA, 25 bp, Homo sapien
accaaactgttactaggaatctatg

SEQ ID NO: 4688917 - DNA, 25 bp, Homo sapien
catatcatgtcctatttaaagtgta

SEQ ID NO: 4688918 - DNA, 25 bp, Homo sapien
ttttgctaggttcaaatggtcttgg

SEQ ID NO: 4688919 - DNA, 25 bp, Homo sapien
cattagctagttcctcctgcagtga

SEQ ID NO: 4688920 - DNA, 25 bp, Homo sapien
tggtcttggacattagctagttcct

SEQ ID NO: 4688921 - DNA, 25 bp, Homo sapien
cctgcagtgagtttactgcttctcg

SEQ ID NO: 4688922 - DNA, 25 bp, Homo sapien
aggtggtcagtgccaatccagtatc

SEQ ID NO: 4688923 - DNA, 25 bp, Homo sapien
atctttactagaggtggtcagtgcc

SEQ ID NO: 4688924 - DNA, 25 bp, Homo sapien
ggtggtcagtgccaatccagtatct

SEQ ID NO: 4688925 - DNA, 25 bp, Homo sapien
tcactgagcaacacatcctgatgct

SEQ ID NO: 4688926 - DNA, 25 bp, Homo sapien
aacctatttgcccattcactgatgt

SEQ ID NO: 4688927 - DNA, 25 bp, Homo sapien
gactagtttgagcttgttttcttca

SEQ ID NO: 4688928 - DNA, 25 bp, Homo sapien
ttctggagtcgggtctgctcactga

SEQ ID NO: 4688929 - DNA, 25 bp, Homo sapien
ctggtctgttaattccttttccagc

SEQ ID NO: 4688930 - DNA, 25 bp, Homo sapien
cagtgtcactttactggtttctaat

SEQ ID NO: 4688931 - DNA, 25 bp, Homo sapien
cttcagtgtcactttactggtttct

SEQ ID NO: 4688932 - DNA, 25 bp, Homo sapien
gtcactttactggtttctaatttgc

SEQ ID NO: 4688933 - DNA, 25 bp, Homo sapien
tgcagagtcctaacacgctcttcag

SEQ ID NO: 4688934 - DNA, 25 bp, Homo sapien
ctgcagagtcctaacacgctcttca

SEQ ID NO: 4688935 - DNA, 25 bp, Homo sapien
tcctgcagagtcctaacacgctctt

SEQ ID NO: 4688936 - DNA, 25 bp, Homo sapien
cagagtcctaacacgctcttcagct

SEQ ID NO: 4688937 - DNA, 25 bp, Homo sapien
tagtttgggagagtgtcttctccag

SEQ ID NO: 4688938 - DNA, 25 bp, Homo sapien
tttgggagagtgtcttctccaggct

SEQ ID NO: 4688939 - DNA, 25 bp, Homo sapien
gagagtgtcttctccaggctctcac

SEQ ID NO: 4688940 - DNA, 25 bp, Homo sapien
ggagagtgtcttctccaggctctca

SEQ ID NO: 4688941 - DNA, 25 bp, Homo sapien
aacagctcacctgatttctccacca

SEQ ID NO: 4688942 - DNA, 25 bp, Homo sapien
ctgccctcatagaatctgcctcttt

SEQ ID NO: 4688943 - DNA, 25 bp, Homo sapien
ggctccgctggatcttaagtgcttc

SEQ ID NO: 4688944 - DNA, 25 bp, Homo sapien
caagaactggttccgcagaaggctg

SEQ ID NO: 4688945 - DNA, 25 bp, Homo sapien
tctctgtgttgaagtggtgttgcag

SEQ ID NO: 4688946 - DNA, 25 bp, Homo sapien
ctgtgttgaagtggtgttgcagttt

SEQ ID NO: 4688947 - DNA, 25 bp, Homo sapien
ctctgtgttgaagtggtgttgcagt

SEQ ID NO: 4688948 - DNA, 25 bp, Homo sapien
tctgtgttgaagtggtgttgcagtt

SEQ ID NO: 4688949 - DNA, 25 bp, Homo sapien
tgagctccgtgtactcatactgcat

SEQ ID NO: 4688950 - DNA, 25 bp, Homo sapien
cctgggctaccagttcaattgttgc

SEQ ID NO: 4688951 - DNA, 25 bp, Homo sapien
catactgcatctggttgagctcctt

SEQ ID NO: 4688952 - DNA, 25 bp, Homo sapien
gcctggcccgctcatggttgtcctg

SEQ ID NO: 4688953 - DNA, 25 bp, Homo sapien
tggcccagatgctctaaaggacacc

SEQ ID NO: 4688954 - DNA, 25 bp, Homo sapien
tacagcagcccgactagagttcagg

SEQ ID NO: 4688955 - DNA, 25 bp, Homo sapien
gattagagactctaccagtccaggc

SEQ ID NO: 4688956 - DNA, 25 bp, Homo sapien
gatgaaactagaatggccacgtggg

SEQ ID NO: 4688957 - DNA, 25 bp, Homo sapien
ctgattaagattcttcaagctggtt

SEQ ID NO: 4688958 - DNA, 25 bp, Homo sapien
ttaagtgtcctcattgcatcactga

SEQ ID NO: 4688959 - DNA, 25 bp, Homo sapien
tttcttcaaaaggtccctcattcat

SEQ ID NO: 4688960 - DNA, 25 bp, Homo sapien
tagcttctagatctgctggtagttc

SEQ ID NO: 4688961 - DNA, 25 bp, Homo sapien
gaggtggtcaatcctacgaacccag

SEQ ID NO: 4688962 - DNA, 25 bp, Homo sapien
tttctcagagggaaaatagagatat

SEQ ID NO: 4688963 - DNA, 25 bp, Homo sapien
cacatctgtgttttagcttagctgg

SEQ ID NO: 4688964 - DNA, 25 bp, Homo sapien
catctgctgctacaaatggaagcca

SEQ ID NO: 4688965 - DNA, 25 bp, Homo sapien
cttgagtcggtcttcccggtgacgc

SEQ ID NO: 4688966 - DNA, 25 bp, Homo sapien
gagtgcttctccacgccagtgttca

SEQ ID NO: 4688967 - DNA, 25 bp, Homo sapien
cggagtgcttctccacgccagtgtt

SEQ ID NO: 4688968 - DNA, 25 bp, Homo sapien
cccggtgacgcagtttctcccggag

SEQ ID NO: 4688969 - DNA, 25 bp, Homo sapien
caaagtctatagcagcgctgtccaa

SEQ ID NO: 4688970 - DNA, 25 bp, Homo sapien
tattgttggacatcacagggctcca

SEQ ID NO: 4688971 - DNA, 25 bp, Homo sapien
gatgggaatgttctacctctggcta

SEQ ID NO: 4688972 - DNA, 25 bp, Homo sapien
tggagtcaacacaagaagtcatggt

SEQ ID NO: 4688973 - DNA, 25 bp, Homo sapien
gtaaagtgccctctgtctgccgctt

SEQ ID NO: 4688974 - DNA, 25 bp, Homo sapien
gcttgcttggacatacagtgtcgga

SEQ ID NO: 4688975 - DNA, 25 bp, Homo sapien
gactgggtgatgacgctgaatctgc

SEQ ID NO: 4688976 - DNA, 25 bp, Homo sapien
caagttgagagtcctctgtgaggga

SEQ ID NO: 4688977 - DNA, 25 bp, Homo sapien
gacatatttgagtacctctttggaa

SEQ ID NO: 4688978 - DNA, 25 bp, Homo sapien
cagtcttaactaagtgatggcatga

SEQ ID NO: 4688979 - DNA, 25 bp, Homo sapien
aaccagtgtacaaaattctgagaga

SEQ ID NO: 4688980 - DNA, 25 bp, Homo sapien
gcatgatggcttataggtaaatgac

SEQ ID NO: 4688981 - DNA, 25 bp, Homo sapien
taccagtttgtaggttcaaatatgc

SEQ ID NO: 4688982 - DNA, 25 bp, Homo sapien
aaggctcagccacatgttggtttaa

SEQ ID NO: 4688983 - DNA, 25 bp, Homo sapien
gacattccaattatgaagtcagtga

SEQ ID NO: 4688984 - DNA, 25 bp, Homo sapien
caggcaaagtaaactacagtggagt

SEQ ID NO: 4688985 - DNA, 25 bp, Homo sapien
agtataatgtacttcagcctccagg

SEQ ID NO: 4688986 - DNA, 25 bp, Homo sapien
gggtcacattctccaaggtacaaag

SEQ ID NO: 4688987 - DNA, 25 bp, Homo sapien
ttgacggcttttccatagaatgacc

SEQ ID NO: 4688988 - DNA, 25 bp, Homo sapien
tgtgaagtgtaaagtcagaggacag

SEQ ID NO: 4688989 - DNA, 25 bp, Homo sapien
tatgccagactgtgagagcagttgc

SEQ ID NO: 4688990 - DNA, 25 bp, Homo sapien
gtagtgatctagaaaagagttcccg

SEQ ID NO: 4688991 - DNA, 25 bp, Homo sapien
tgtgactcaaaagctgtctagtagt

SEQ ID NO: 4688992 - DNA, 25 bp, Homo sapien
ccccttgggaataattatgccagac

SEQ ID NO: 4688993 - DNA, 25 bp, Homo sapien
accacccattgggatataaggtagc

SEQ ID NO: 4688994 - DNA, 25 bp, Homo sapien
gcggcttgttgaggtgcaataccct

SEQ ID NO: 4688995 - DNA, 25 bp, Homo sapien
tgcatcacaagggactcacccaggg

SEQ ID NO: 4688996 - DNA, 25 bp, Homo sapien
ccctgactcccaaagttagttacag

SEQ ID NO: 4688997 - DNA, 25 bp, Homo sapien
gccactgaattaatactgtatagca

SEQ ID NO: 4688998 - DNA, 25 bp, Homo sapien
catctttctgggttgtaaacatgtg

SEQ ID NO: 4688999 - DNA, 25 bp, Homo sapien
tttgaaatagaataggtaacacctc

SEQ ID NO: 4689000 - DNA, 25 bp, Homo sapien
cagcgtactatagaaaatgcactca

SEQ ID NO: 4689001 - DNA, 25 bp, Homo sapien
gatttaaaccgagcactgatgctgg

SEQ ID NO: 4689002 - DNA, 25 bp, Homo sapien
ggcaaggctttgtctcactgtacgg

SEQ ID NO: 4689003 - DNA, 25 bp, Homo sapien
gctgctagtgacctctttgctgtgg

SEQ ID NO: 4689004 - DNA, 25 bp, Homo sapien
ccttgtcctcgtgataagtatgtca

SEQ ID NO: 4689005 - DNA, 25 bp, Homo sapien
gaatctaagagaagacgacagagct

SEQ ID NO: 4689006 - DNA, 25 bp, Homo sapien
cgatgtcctggttttggtgcgttcc

SEQ ID NO: 4689007 - DNA, 25 bp, Homo sapien
tacggccctgaacctacagagcatc

SEQ ID NO: 4689008 - DNA, 25 bp, Homo sapien
ttgtacctatttatcttgccccgcg

SEQ ID NO: 4689009 - DNA, 25 bp, Homo sapien
cgtaggccgcgtctggctctgagta

SEQ ID NO: 4689010 - DNA, 25 bp, Homo sapien
tgagtacaaaggcagctcttcgcag

SEQ ID NO: 4689011 - DNA, 25 bp, Homo sapien
cagacgtggcggtcccgtcccgtag

SEQ ID NO: 4689012 - DNA, 25 bp, Homo sapien
ttcgcagccctcttggcgtctcggg

SEQ ID NO: 4689013 - DNA, 25 bp, Homo sapien
cccgtcaggccgtggctagcccgtg

SEQ ID NO: 4689014 - DNA, 25 bp, Homo sapien
tcctcgcgccgggttcttcagaggg

SEQ ID NO: 4689015 - DNA, 25 bp, Homo sapien
gccaggccccgtcaggccgtggcta

SEQ ID NO: 4689016 - DNA, 25 bp, Homo sapien
ctcctcgcgccgggttcttcagagg

SEQ ID NO: 4689017 - DNA, 25 bp, Homo sapien
cggcccattgcgagggtgacaggaa

SEQ ID NO: 4689018 - DNA, 25 bp, Homo sapien
ccttcttttgtggtccggcccattg

SEQ ID NO: 4689019 - DNA, 25 bp, Homo sapien
cctcttccgggctccgccagctgcg

SEQ ID NO: 4689020 - DNA, 25 bp, Homo sapien
acaggaaaccctgtgcagggagcgc

SEQ ID NO: 4689021 - DNA, 25 bp, Homo sapien
gacactctatctagtgacacagtgc

SEQ ID NO: 4689022 - DNA, 25 bp, Homo sapien
gcagggccaccttatccattaggca

SEQ ID NO: 4689023 - DNA, 25 bp, Homo sapien
taaaaggtcctgaacgctaagagaa

SEQ ID NO: 4689024 - DNA, 25 bp, Homo sapien
tatagagcaggaattcgaacccagg

SEQ ID NO: 4689025 - DNA, 25 bp, Homo sapien
cattaggcacagtacagtatgcaca

SEQ ID NO: 4689026 - DNA, 25 bp, Homo sapien
gtagaaaccccaatggatgtttggc

SEQ ID NO: 4689027 - DNA, 25 bp, Homo sapien
tattacagctttctagtgatagaca

SEQ ID NO: 4689028 - DNA, 25 bp, Homo sapien
gcagtgactattccatgtatacatc

SEQ ID NO: 4689029 - DNA, 25 bp, Homo sapien
tttggcacccaatggacagtccctc

SEQ ID NO: 4689030 - DNA, 25 bp, Homo sapien
ggagttgtcagtcccatcttcctgc

SEQ ID NO: 4689031 - DNA, 25 bp, Homo sapien
tttgtgcaggaagcaatagggcaga

SEQ ID NO: 4689032 - DNA, 25 bp, Homo sapien
tcactggtgattcttttggagcccc

SEQ ID NO: 4689033 - DNA, 25 bp, Homo sapien
gacattacaatttccctaaaggctg

SEQ ID NO: 4689034 - DNA, 25 bp, Homo sapien
ggtgacccctcacacatttgctata

SEQ ID NO: 4689035 - DNA, 25 bp, Homo sapien
tccagcagatggttagcttgtgtca

SEQ ID NO: 4689036 - DNA, 25 bp, Homo sapien
gactttaattgtttaggctctggga

SEQ ID NO: 4689037 - DNA, 25 bp, Homo sapien
ttctttgccgtactccaatctggga

SEQ ID NO: 4689038 - DNA, 25 bp, Homo sapien
ttctggtcgtcagccaaaggaatgc

SEQ ID NO: 4689039 - DNA, 25 bp, Homo sapien
taatgtcatgccctcataagctgtg

SEQ ID NO: 4689040 - DNA, 25 bp, Homo sapien
tttcatacccagagacgaatgagtc

SEQ ID NO: 4689041 - DNA, 25 bp, Homo sapien
aataaatgagtctccggtagggtgc

SEQ ID NO: 4689042 - DNA, 25 bp, Homo sapien
ggaggcttcagtgagctgatatcgt

SEQ ID NO: 4689043 - DNA, 25 bp, Homo sapien
gcttcagtgagctgatatcgtgcca

SEQ ID NO: 4689044 - DNA, 25 bp, Homo sapien
cttcagtgagctgatatcgtgccat

SEQ ID NO: 4689045 - DNA, 25 bp, Homo sapien
aggcttcagtgagctgatatcgtgc

SEQ ID NO: 4689046 - DNA, 25 bp, Homo sapien
acattcttggttcctctccgtgctt

SEQ ID NO: 4689047 - DNA, 25 bp, Homo sapien
tcttggttcctctccgtgctttatc

SEQ ID NO: 4689048 - DNA, 25 bp, Homo sapien
attcttggttcctctccgtgcttta

SEQ ID NO: 4689049 - DNA, 25 bp, Homo sapien
ggttcctctccgtgctttatccatt

SEQ ID NO: 4689050 - DNA, 25 bp, Homo sapien
cctccgccgtgacatctgacaacgt

SEQ ID NO: 4689051 - DNA, 25 bp, Homo sapien
agagaaacggagagacacagacagg

SEQ ID NO: 4689052 - DNA, 25 bp, Homo sapien
cagacaggcagcgtgctccgtcagc

SEQ ID NO: 4689053 - DNA, 25 bp, Homo sapien
gcagcgtgctccgtcagcctgagtc

SEQ ID NO: 4689054 - DNA, 25 bp, Homo sapien
cacagtgcctggttatgggctaaaa

SEQ ID NO: 4689055 - DNA, 25 bp, Homo sapien
cttgtggtataattgcaaagactga

SEQ ID NO: 4689056 - DNA, 25 bp, Homo sapien
gggctaaaaattcggcaagtcattc

SEQ ID NO: 4689057 - DNA, 25 bp, Homo sapien
gactgaatgaggtaaagcggtttac

SEQ ID NO: 4689058 - DNA, 25 bp, Homo sapien
ctaatctgtactgaagcaatgccca

SEQ ID NO: 4689059 - DNA, 25 bp, Homo sapien
cttgaaggctgtattgtaagcctcc

SEQ ID NO: 4689060 - DNA, 25 bp, Homo sapien
taatctgtactgaagcaatgcccag

SEQ ID NO: 4689061 - DNA, 25 bp, Homo sapien
cccagagtcaaccttgaaggctgta

SEQ ID NO: 4689062 - DNA, 25 bp, Homo sapien
tcagccacatcccaattgaattgaa

SEQ ID NO: 4689063 - DNA, 25 bp, Homo sapien
gctgaattgtgccactcagccacat

SEQ ID NO: 4689064 - DNA, 25 bp, Homo sapien
aaagaaatggctgttgtgggctgaa

SEQ ID NO: 4689065 - DNA, 25 bp, Homo sapien
acccccaggacagaagtttgcttct

SEQ ID NO: 4689066 - DNA, 25 bp, Homo sapien
tttagcgttaggaatgtgattaccc

SEQ ID NO: 4689067 - DNA, 25 bp, Homo sapien
tttggttttagcgttaggaatgtga

SEQ ID NO: 4689068 - DNA, 25 bp, Homo sapien
ttaggaatgtgattaccctgcacgt

SEQ ID NO: 4689069 - DNA, 25 bp, Homo sapien
aatgtgattaccctgcacgtagtag

SEQ ID NO: 4689070 - DNA, 25 bp, Homo sapien
tccatggaaggaatgccgtttgctg

SEQ ID NO: 4689071 - DNA, 25 bp, Homo sapien
gcgtttttcacagcgagctcttctt

SEQ ID NO: 4689072 - DNA, 25 bp, Homo sapien
tgccgtttgctgatgagagtactct

SEQ ID NO: 4689073 - DNA, 25 bp, Homo sapien
ttcacaaggctctgcagcattgtgg

SEQ ID NO: 4689074 - DNA, 25 bp, Homo sapien
tctggccagatggaaactgttcact

SEQ ID NO: 4689075 - DNA, 25 bp, Homo sapien
cagtgacagccaacggcatgacttt

SEQ ID NO: 4689076 - DNA, 25 bp, Homo sapien
ccatgggtgcgagattgctaaagcc

SEQ ID NO: 4689077 - DNA, 25 bp, Homo sapien
tgctaaagccaaactcggattcggg

SEQ ID NO: 4689078 - DNA, 25 bp, Homo sapien
ccacaactctgcgttttccagatga

SEQ ID NO: 4689079 - DNA, 25 bp, Homo sapien
atagagctgcagtggctagccttgc

SEQ ID NO: 4689080 - DNA, 25 bp, Homo sapien
tcttgtcccttgtagtagctgcata

SEQ ID NO: 4689081 - DNA, 25 bp, Homo sapien
tatcctggagatcacacatagtagt

SEQ ID NO: 4689082 - DNA, 25 bp, Homo sapien
tgggattactataccactgcctacc

SEQ ID NO: 4689083 - DNA, 25 bp, Homo sapien
tctctctcataggtatctctaagtc

SEQ ID NO: 4689084 - DNA, 25 bp, Homo sapien
tctctcataggtatctctaagtcct

SEQ ID NO: 4689085 - DNA, 25 bp, Homo sapien
ctctctcataggtatctctaagtcc

SEQ ID NO: 4689086 - DNA, 25 bp, Homo sapien
catctctctcataggtatctctaag

SEQ ID NO: 4689087 - DNA, 25 bp, Homo sapien
gcatcgaatgccttgtagtttgtcc

SEQ ID NO: 4689088 - DNA, 25 bp, Homo sapien
gagaagttatcagcacaagtatttg

SEQ ID NO: 4689089 - DNA, 25 bp, Homo sapien
tcctggagctggcttcagaaagaga

SEQ ID NO: 4689090 - DNA, 25 bp, Homo sapien
gggctcttctgattacagacctctc

SEQ ID NO: 4689091 - DNA, 25 bp, Homo sapien
gataaggatctcctctgatggaaga

SEQ ID NO: 4689092 - DNA, 25 bp, Homo sapien
ctcagagtgaatgtcttgctgataa

SEQ ID NO: 4689093 - DNA, 25 bp, Homo sapien
cctctgatggaagaactttgatatc

SEQ ID NO: 4689094 - DNA, 25 bp, Homo sapien
gtcttgctgataaggatctcctctg

SEQ ID NO: 4689095 - DNA, 25 bp, Homo sapien
tgcgctcagctggttccgggcggcg

SEQ ID NO: 4689096 - DNA, 25 bp, Homo sapien
ctgctgcggcactggagacagcggc

SEQ ID NO: 4689097 - DNA, 25 bp, Homo sapien
gcactggagacagcggctgctgggt

SEQ ID NO: 4689098 - DNA, 25 bp, Homo sapien
cgggggcgttgtggtgcgcgcggcc

SEQ ID NO: 4689099 - DNA, 25 bp, Homo sapien
tccaagtcagtgcttctaacttctc

SEQ ID NO: 4689100 - DNA, 25 bp, Homo sapien
gtggtctctgataagcaaatataca

SEQ ID NO: 4689101 - DNA, 25 bp, Homo sapien
ggagcatcccagcacgtattttcag

SEQ ID NO: 4689102 - DNA, 25 bp, Homo sapien
ggcttaagccatcaacccaactcgg

SEQ ID NO: 4689103 - DNA, 25 bp, Homo sapien
ccctgaaatggaggggagattgacc

SEQ ID NO: 4689104 - DNA, 25 bp, Homo sapien
ggagcctggattccctgaaatggag

SEQ ID NO: 4689105 - DNA, 25 bp, Homo sapien
gaccttgctgggcaagtcctgtgtc

SEQ ID NO: 4689106 - DNA, 25 bp, Homo sapien
tttggagcctggattccctgaaatg

SEQ ID NO: 4689107 - DNA, 25 bp, Homo sapien
ccggctgcctaaacactggtctctt

SEQ ID NO: 4689108 - DNA, 25 bp, Homo sapien
ggcttcgccagatagatttccagag

SEQ ID NO: 4689109 - DNA, 25 bp, Homo sapien
ggctgaaatatgacacacgctcact

SEQ ID NO: 4689110 - DNA, 25 bp, Homo sapien
cacgctcactccgttgaaagcgagg

SEQ ID NO: 4689111 - DNA, 25 bp, Homo sapien
gcaaaaggtgaacatacatagtaag

SEQ ID NO: 4689112 - DNA, 25 bp, Homo sapien
gattaaagcagatagtgaaagcaaa

SEQ ID NO: 4689113 - DNA, 25 bp, Homo sapien
tctcccctcgtagatctgttaaaag

SEQ ID NO: 4689114 - DNA, 25 bp, Homo sapien
tattattgttgcttgtagagcaggg

SEQ ID NO: 4689115 - DNA, 25 bp, Homo sapien
cctgaagtgaagctcaggacaccaa

SEQ ID NO: 4689116 - DNA, 25 bp, Homo sapien
tccgttctgaacgatacagttcctt

SEQ ID NO: 4689117 - DNA, 25 bp, Homo sapien
tgaagctcaggacaccaagaaacat

SEQ ID NO: 4689118 - DNA, 25 bp, Homo sapien
tttggactaccagttcctgaagtga

SEQ ID NO: 4689119 - DNA, 25 bp, Homo sapien
gaaattcacttgctctctcagggca

SEQ ID NO: 4689120 - DNA, 25 bp, Homo sapien
caagtcattcggtcctttgtgagga

SEQ ID NO: 4689121 - DNA, 25 bp, Homo sapien
tctcagggcacaagtatctgtagcc

SEQ ID NO: 4689122 - DNA, 25 bp, Homo sapien
tagagccaggcgattcctaaagccc

SEQ ID NO: 4689123 - DNA, 25 bp, Homo sapien
tgggaaggcgctgggaccaaggccg

SEQ ID NO: 4689124 - DNA, 25 bp, Homo sapien
ggacaaagagagctatgagcactac

SEQ ID NO: 4689125 - DNA, 25 bp, Homo sapien
gcgctgggaccaaggccgaagcact

SEQ ID NO: 4689126 - DNA, 25 bp, Homo sapien
aaggccgaagcactggacaaagaga

SEQ ID NO: 4689127 - DNA, 25 bp, Homo sapien
tacagaatagcaaccaaggccttga

SEQ ID NO: 4689128 - DNA, 25 bp, Homo sapien
gaagacctcagggactcccactgaa

SEQ ID NO: 4689129 - DNA, 25 bp, Homo sapien
gagacgcactctgagccttattagg

SEQ ID NO: 4689130 - DNA, 25 bp, Homo sapien
tgaatccactgtggctacagcggct

SEQ ID NO: 4689131 - DNA, 25 bp, Homo sapien
cacagcagacgcgtaagtcctgtat

SEQ ID NO: 4689132 - DNA, 25 bp, Homo sapien
agacgcgtaagtcctgtattcattc

SEQ ID NO: 4689133 - DNA, 25 bp, Homo sapien
gccacagcagacgcgtaagtcctgt

SEQ ID NO: 4689134 - DNA, 25 bp, Homo sapien
cagcagacgcgtaagtcctgtattc

SEQ ID NO: 4689135 - DNA, 25 bp, Homo sapien
ggctgtgggtggctcatgtcaccat

SEQ ID NO: 4689136 - DNA, 25 bp, Homo sapien
acagctccggctgtgggtggctcat

SEQ ID NO: 4689137 - DNA, 25 bp, Homo sapien
gagctttgggaaagaggaacagctc

SEQ ID NO: 4689138 - DNA, 25 bp, Homo sapien
aagaggaacagctccggctgtgggt

SEQ ID NO: 4689139 - DNA, 25 bp, Homo sapien
gaatccctggcttttggggcacaac

SEQ ID NO: 4689140 - DNA, 25 bp, Homo sapien
cagaacctttggatagccgctgatg

SEQ ID NO: 4689141 - DNA, 25 bp, Homo sapien
ttgggaatccctggcttttggggca

SEQ ID NO: 4689142 - DNA, 25 bp, Homo sapien
tctgggcccggcagaccttttggga

SEQ ID NO: 4689143 - DNA, 25 bp, Homo sapien
tcccagaggtctagcataaaatcca

SEQ ID NO: 4689144 - DNA, 25 bp, Homo sapien
gcctacggtgccttcttgcctggaa

SEQ ID NO: 4689145 - DNA, 25 bp, Homo sapien
ccgtcttggattagagtggatctca

SEQ ID NO: 4689146 - DNA, 25 bp, Homo sapien
aattgcaccctcatggcttatcagg

SEQ ID NO: 4689147 - DNA, 25 bp, Homo sapien
gactgggccattacaatcaacaagg

SEQ ID NO: 4689148 - DNA, 25 bp, Homo sapien
ggcagattacaacatggactgggcc

SEQ ID NO: 4689149 - DNA, 25 bp, Homo sapien
cagtgggtaacagcatgtccaatcc

SEQ ID NO: 4689150 - DNA, 25 bp, Homo sapien
caagtcagggctacggtgatgtttc

SEQ ID NO: 4689151 - DNA, 25 bp, Homo sapien
cttcctcggccatcgcgaggctggg

SEQ ID NO: 4689152 - DNA, 25 bp, Homo sapien
gggcttcttcctcggccatcgcgag

SEQ ID NO: 4689153 - DNA, 25 bp, Homo sapien
catgggtcagaattgcccctgaggg

SEQ ID NO: 4689154 - DNA, 25 bp, Homo sapien
ccatgggtcagaattgcccctgagg

SEQ ID NO: 4689155 - DNA, 25 bp, Homo sapien
taacccaaacagaggtatagtactg

SEQ ID NO: 4689156 - DNA, 25 bp, Homo sapien
tagccagccggaagatttaaacaag

SEQ ID NO: 4689157 - DNA, 25 bp, Homo sapien
tgtccccgggtgtgctttaggcctc

SEQ ID NO: 4689158 - DNA, 25 bp, Homo sapien
tctgggatacccttggaggcaggac

SEQ ID NO: 4689159 - DNA, 25 bp, Homo sapien
gaatccacgaatgaggatatggagg

SEQ ID NO: 4689160 - DNA, 25 bp, Homo sapien
caagtgtagagagcttgtgcctgta

SEQ ID NO: 4689161 - DNA, 25 bp, Homo sapien
gcagatacgtggaatgaacaagtgt

SEQ ID NO: 4689162 - DNA, 25 bp, Homo sapien
cactaatgtgcaacatgaggactat

SEQ ID NO: 4689163 - DNA, 25 bp, Homo sapien
tgagcaagggacacaacctctctga

SEQ ID NO: 4689164 - DNA, 25 bp, Homo sapien
tcctagcacttacaactgagtgatg

SEQ ID NO: 4689165 - DNA, 25 bp, Homo sapien
ggctctggatcccagtcctagcact

SEQ ID NO: 4689166 - DNA, 25 bp, Homo sapien
gaatggccatattatctcacggact

SEQ ID NO: 4689167 - DNA, 25 bp, Homo sapien
gaaattttcttagctgcccagcccc

SEQ ID NO: 4689168 - DNA, 25 bp, Homo sapien
gaatgagctacgtctgattgtgcct

SEQ ID NO: 4689169 - DNA, 25 bp, Homo sapien
tgactctgacctgcatagttggtga

SEQ ID NO: 4689170 - DNA, 25 bp, Homo sapien
tcatcctcaaacattgccgtggctg

SEQ ID NO: 4689171 - DNA, 25 bp, Homo sapien
gcagctaggtaaatgtgagttctcc

SEQ ID NO: 4689172 - DNA, 25 bp, Homo sapien
tatctaatgaggctgaagtttgccc

SEQ ID NO: 4689173 - DNA, 25 bp, Homo sapien
gggtatgaaaatagcctggccagca

SEQ ID NO: 4689174 - DNA, 25 bp, Homo sapien
ggtactattcattgactcccctggg

SEQ ID NO: 4689175 - DNA, 25 bp, Homo sapien
acccagtcggcagccgcggcctcgg

SEQ ID NO: 4689176 - DNA, 25 bp, Homo sapien
caggggacccagtcggcagccgcgg

SEQ ID NO: 4689177 - DNA, 25 bp, Homo sapien
ggacccagtcggcagccgcggcctc

SEQ ID NO: 4689178 - DNA, 25 bp, Homo sapien
aggggacccagtcggcagccgcggc

SEQ ID NO: 4689179 - DNA, 25 bp, Homo sapien
agcgccagggacagcgcgcaaagca

SEQ ID NO: 4689180 - DNA, 25 bp, Homo sapien
acagcgccagggacagcgcgcaaag

SEQ ID NO: 4689181 - DNA, 25 bp, Homo sapien
gggacagcgcgcaaagcagcgcggg

SEQ ID NO: 4689182 - DNA, 25 bp, Homo sapien
cagcgcgcaaagcagcgcgggcgcg

SEQ ID NO: 4689183 - DNA, 25 bp, Homo sapien
cgcgcctcgggcacccgcccctggg

SEQ ID NO: 4689184 - DNA, 25 bp, Homo sapien
acgccccccgcgacgcagtggccgc

SEQ ID NO: 4689185 - DNA, 25 bp, Homo sapien
ccccccgcgacgcagtggccgcgcg

SEQ ID NO: 4689186 - DNA, 25 bp, Homo sapien
cgcctgggacgccccccgcgacgca

SEQ ID NO: 4689187 - DNA, 25 bp, Homo sapien
cttacaatagagagttactccggga

SEQ ID NO: 4689188 - DNA, 25 bp, Homo sapien
caatagagagttactccgggagccc

SEQ ID NO: 4689189 - DNA, 25 bp, Homo sapien
atagagagttactccgggagccccg

SEQ ID NO: 4689190 - DNA, 25 bp, Homo sapien
tacaatagagagttactccgggagc

SEQ ID NO: 4689191 - DNA, 25 bp, Homo sapien
acagtttttccattctagacctgaa

SEQ ID NO: 4689192 - DNA, 25 bp, Homo sapien
tactccccttttcctagcgctgtat

SEQ ID NO: 4689193 - DNA, 25 bp, Homo sapien
cattctagacctgaattactcccct

SEQ ID NO: 4689194 - DNA, 25 bp, Homo sapien
tttccattctagacctgaattactc

SEQ ID NO: 4689195 - DNA, 25 bp, Homo sapien
aataatgaccataagcagacaggcg

SEQ ID NO: 4689196 - DNA, 25 bp, Homo sapien
gaaaaacacgaaaccagacagggca

SEQ ID NO: 4689197 - DNA, 25 bp, Homo sapien
cagacaggcgaggtcatacaagaaa

SEQ ID NO: 4689198 - DNA, 25 bp, Homo sapien
gaaatccggccaaggtgaggttagc

SEQ ID NO: 4689199 - DNA, 25 bp, Homo sapien
ctggagtcgaggacaaaaatcagca

SEQ ID NO: 4689200 - DNA, 25 bp, Homo sapien
tgcaggagggttaggctggagtcga

SEQ ID NO: 4689201 - DNA, 25 bp, Homo sapien
gggaggctattacacatgcactggg

SEQ ID NO: 4689202 - DNA, 25 bp, Homo sapien
caggtcacctctggccggagaagag

SEQ ID NO: 4689203 - DNA, 25 bp, Homo sapien
gctagctctgtgcacgctaagtggg

SEQ ID NO: 4689204 - DNA, 25 bp, Homo sapien
tctgagagctcattatccaacccca

SEQ ID NO: 4689205 - DNA, 25 bp, Homo sapien
taagtgggtgcactcgcaaatcgag

SEQ ID NO: 4689206 - DNA, 25 bp, Homo sapien
tcttgaaaccaaagggccctctgag

SEQ ID NO: 4689207 - DNA, 25 bp, Homo sapien
cagggacctccagctaggaaacagt

SEQ ID NO: 4689208 - DNA, 25 bp, Homo sapien
tctcaacgagtcagcaaacagggca

SEQ ID NO: 4689209 - DNA, 25 bp, Homo sapien
caattggatgtgataaccgaggcac

SEQ ID NO: 4689210 - DNA, 25 bp, Homo sapien
ctctgggatgatgggtagacccctc

SEQ ID NO: 4689211 - DNA, 25 bp, Homo sapien
taggcgtcgcccgtgaagaagtctc

SEQ ID NO: 4689212 - DNA, 25 bp, Homo sapien
tgtcttcaggatgacgtaggcgtcg

SEQ ID NO: 4689213 - DNA, 25 bp, Homo sapien
ggcacgggcaccagatcgaacttct

SEQ ID NO: 4689214 - DNA, 25 bp, Homo sapien
catactgcagatttccgttcctcag

SEQ ID NO: 4689215 - DNA, 25 bp, Homo sapien
tctgtataacaggacgatggacctc

SEQ ID NO: 4689216 - DNA, 25 bp, Homo sapien
tgagcgtaaactcaggactgggagc

SEQ ID NO: 4689217 - DNA, 25 bp, Homo sapien
tacgggacatcagagcaatatgagc

SEQ ID NO: 4689218 - DNA, 25 bp, Homo sapien
gcactgccctgacctagctgtagaa

SEQ ID NO: 4689219 - DNA, 25 bp, Homo sapien
acggcccggccgttcaggtagtcat

SEQ ID NO: 4689220 - DNA, 25 bp, Homo sapien
aaggtggccgactcgaagccctgga

SEQ ID NO: 4689221 - DNA, 25 bp, Homo sapien
acttgaagtagcctaggaaggtggc

SEQ ID NO: 4689222 - DNA, 25 bp, Homo sapien
tagtcatccagctgcacggtaaaga

SEQ ID NO: 4689223 - DNA, 25 bp, Homo sapien
gagctttcctcgagtgtgatccaag

SEQ ID NO: 4689224 - DNA, 25 bp, Homo sapien
caggccatatccgagcgaggatcaa

SEQ ID NO: 4689225 - DNA, 25 bp, Homo sapien
taaatgagtaaagcacccagaagag

SEQ ID NO: 4689226 - DNA, 25 bp, Homo sapien
gaagagtccctgacacacagaaagt

SEQ ID NO: 4689227 - DNA, 25 bp, Homo sapien
aatgaattgatcaggcttgggcccc

SEQ ID NO: 4689228 - DNA, 25 bp, Homo sapien
cattaggtgagcaagattggcatca

SEQ ID NO: 4689229 - DNA, 25 bp, Homo sapien
ggtccaagggctcctaggtctctgc

SEQ ID NO: 4689230 - DNA, 25 bp, Homo sapien
tacctatatacgttcagagagacag

SEQ ID NO: 4689231 - DNA, 25 bp, Homo sapien
ccagagcaaggcgttcaggagagct

SEQ ID NO: 4689232 - DNA, 25 bp, Homo sapien
cccaaggtggtggagctagaattca

SEQ ID NO: 4689233 - DNA, 25 bp, Homo sapien
taattctagccgcacagactcgagg

SEQ ID NO: 4689234 - DNA, 25 bp, Homo sapien
gactgttatacaacgcgcatgtgca

SEQ ID NO: 4689235 - DNA, 25 bp, Homo sapien
gaagcagtcgccattgttgaagctc

SEQ ID NO: 4689236 - DNA, 25 bp, Homo sapien
gacacaggtacctcggtggcacgga

SEQ ID NO: 4689237 - DNA, 25 bp, Homo sapien
tggaagagtctctgcaccaccacct

SEQ ID NO: 4689238 - DNA, 25 bp, Homo sapien
tgggtaccacgtgcttgaatcctga

SEQ ID NO: 4689239 - DNA, 25 bp, Homo sapien
tgggaaagaggaaagcaggactcac

SEQ ID NO: 4689240 - DNA, 25 bp, Homo sapien
ctgggaaagaggaaagcaggactca

SEQ ID NO: 4689241 - DNA, 25 bp, Homo sapien
cacgtggatgtacccaagtccctga

SEQ ID NO: 4689242 - DNA, 25 bp, Homo sapien
acccaagtccctgatcagaccagga

SEQ ID NO: 4689243 - DNA, 25 bp, Homo sapien
gtccctgtggtttgcccacctgcat

SEQ ID NO: 4689244 - DNA, 25 bp, Homo sapien
gcatctatgcatttgttcacgtgga

SEQ ID NO: 4689245 - DNA, 25 bp, Homo sapien
aaagcccagagtgtttgcccatgac

SEQ ID NO: 4689246 - DNA, 25 bp, Homo sapien
caaggttccgtgtctataaagttca

SEQ ID NO: 4689247 - DNA, 25 bp, Homo sapien
caagtacgcactatacccgtggtgt

SEQ ID NO: 4689248 - DNA, 25 bp, Homo sapien
tcacacatctataaggtgggcctgg

SEQ ID NO: 4689249 - DNA, 25 bp, Homo sapien
tggagcatcgcctcgggctcagtgc

SEQ ID NO: 4689250 - DNA, 25 bp, Homo sapien
cggccactccgctcgttgtcccgga

SEQ ID NO: 4689251 - DNA, 25 bp, Homo sapien
ttcataccgattgctgttggaacca

SEQ ID NO: 4689252 - DNA, 25 bp, Homo sapien
ccctcctcagacacgtgcactcggg

SEQ ID NO: 4689253 - DNA, 25 bp, Homo sapien
caggtgatggtttgaccccagaagt

SEQ ID NO: 4689254 - DNA, 25 bp, Homo sapien
aaagtcatgagcagcgtgtccccat

SEQ ID NO: 4689255 - DNA, 25 bp, Homo sapien
gatacgtcctcaacgcacaatggct

SEQ ID NO: 4689256 - DNA, 25 bp, Homo sapien
ccagagaagcaggaaccaagtgaca

SEQ ID NO: 4689257 - DNA, 25 bp, Homo sapien
tcctcggtacctgcaggcagagccg

SEQ ID NO: 4689258 - DNA, 25 bp, Homo sapien
cttggccagcttgcggttggccgca

SEQ ID NO: 4689259 - DNA, 25 bp, Homo sapien
gccagcttgcggttggccgcatcct

SEQ ID NO: 4689260 - DNA, 25 bp, Homo sapien
tcctccttggcggtgtcctcggtac

SEQ ID NO: 4689261 - DNA, 25 bp, Homo sapien
ggatgaagcagtcctctgacttcag

SEQ ID NO: 4689262 - DNA, 25 bp, Homo sapien
catcagccacgagggagacggacat

SEQ ID NO: 4689263 - DNA, 25 bp, Homo sapien
gagacggacatggtccctgcaccat

SEQ ID NO: 4689264 - DNA, 25 bp, Homo sapien
catctttgccgtggtccaggatgaa

SEQ ID NO: 4689265 - DNA, 25 bp, Homo sapien
ggatgccaattagcctctcagagaa

SEQ ID NO: 4689266 - DNA, 25 bp, Homo sapien
ttataatgcacttgggaaacaccca

SEQ ID NO: 4689267 - DNA, 25 bp, Homo sapien
gagaattcccacaagatagtaccga

SEQ ID NO: 4689268 - DNA, 25 bp, Homo sapien
ccattttagcccagatcaggaatct

SEQ ID NO: 4689269 - DNA, 25 bp, Homo sapien
ctgagtctgcttggggtagtccatc

SEQ ID NO: 4689270 - DNA, 25 bp, Homo sapien
gtgatgaagtcagaggctgttttga

SEQ ID NO: 4689271 - DNA, 25 bp, Homo sapien
tcctctcctccgtgtttgcctgctt

SEQ ID NO: 4689272 - DNA, 25 bp, Homo sapien
ctgcttggggtagtccatcttggtg

SEQ ID NO: 4689273 - DNA, 25 bp, Homo sapien
ccacgttggcgatatggctggaaag

SEQ ID NO: 4689274 - DNA, 25 bp, Homo sapien
tgggtcccgccagttcttgaagaac

SEQ ID NO: 4689275 - DNA, 25 bp, Homo sapien
tctggcctgtgccatcgtcatccat

SEQ ID NO: 4689276 - DNA, 25 bp, Homo sapien
catcgtcatccatgccgtgctgggc

SEQ ID NO: 4689277 - DNA, 25 bp, Homo sapien
gcctgccaggaatttcataggtcac

SEQ ID NO: 4689278 - DNA, 25 bp, Homo sapien
agggacaccacgaggcaacctcagt

SEQ ID NO: 4689279 - DNA, 25 bp, Homo sapien
gctggcaggtctccgcagcgttctg

SEQ ID NO: 4689280 - DNA, 25 bp, Homo sapien
ggaatttcataggtcacctgcagag

SEQ ID NO: 4689281 - DNA, 25 bp, Homo sapien
cctggcggccaccatggcggtagtt

SEQ ID NO: 4689282 - DNA, 25 bp, Homo sapien
aactgtccatatgtggcagggtcca

SEQ ID NO: 4689283 - DNA, 25 bp, Homo sapien
tgtagctgtcgcctccatagaactg

SEQ ID NO: 4689284 - DNA, 25 bp, Homo sapien
cacgggcaccttgttggaaccttcg

SEQ ID NO: 4689285 - DNA, 25 bp, Homo sapien
aattgtgctatggttatgtaagggt

SEQ ID NO: 4689286 - DNA, 25 bp, Homo sapien
cattgggtaatggatatatgagaac

SEQ ID NO: 4689287 - DNA, 25 bp, Homo sapien
tgtgtcaatgttcacttcctggctt

SEQ ID NO: 4689288 - DNA, 25 bp, Homo sapien
taggtaaagcctatagattagtaag

SEQ ID NO: 4689289 - DNA, 25 bp, Homo sapien
cctcatcctgggtagactgggcacc

SEQ ID NO: 4689290 - DNA, 25 bp, Homo sapien
tggacaggggtacctcccagctcct

SEQ ID NO: 4689291 - DNA, 25 bp, Homo sapien
ctgagcagtcaggatggcagatgca

SEQ ID NO: 4689292 - DNA, 25 bp, Homo sapien
ggatggcagatgcagcgacctcatc

SEQ ID NO: 4689293 - DNA, 25 bp, Homo sapien
gggcaggcttcagtccttctatgtc

SEQ ID NO: 4689294 - DNA, 25 bp, Homo sapien
gtccttctatgtcgcactgggccca

SEQ ID NO: 4689295 - DNA, 25 bp, Homo sapien
ggcttcagtccttctatgtcgcact

SEQ ID NO: 4689296 - DNA, 25 bp, Homo sapien
gacaggagagcaagtcagggacctt

SEQ ID NO: 4689297 - DNA, 25 bp, Homo sapien
gatgatcatgggcttcccaccaaac

SEQ ID NO: 4689298 - DNA, 25 bp, Homo sapien
gctccagcgctgttggcgcggacct

SEQ ID NO: 4689299 - DNA, 25 bp, Homo sapien
caaacaggctcatgaggtgggcggg

SEQ ID NO: 4689300 - DNA, 25 bp, Homo sapien
cctcgcgggaggtgccgcccttgta

SEQ ID NO: 4689301 - DNA, 25 bp, Homo sapien
ctggtcattgagctgggaggtttca

SEQ ID NO: 4689302 - DNA, 25 bp, Homo sapien
ttcagggaggccaatcccttctgtg

SEQ ID NO: 4689303 - DNA, 25 bp, Homo sapien
ttcctgtgcctggagatctggtcat

SEQ ID NO: 4689304 - DNA, 25 bp, Homo sapien
tttcagggaggccaatcccttctgt

SEQ ID NO: 4689305 - DNA, 25 bp, Homo sapien
cagaacaaaggcatcgttggagttc

SEQ ID NO: 4689306 - DNA, 25 bp, Homo sapien
ggagttcagtgcaccagccttaggc

SEQ ID NO: 4689307 - DNA, 25 bp, Homo sapien
tacccacccacaggtaggcggctga

SEQ ID NO: 4689308 - DNA, 25 bp, Homo sapien
acctgcacaggttgggcccgcagca

SEQ ID NO: 4689309 - DNA, 25 bp, Homo sapien
accacgcccaggctaggctctcctt

SEQ ID NO: 4689310 - DNA, 25 bp, Homo sapien
gctcctctgacgctatcagccctgc

SEQ ID NO: 4689311 - DNA, 25 bp, Homo sapien
tggagagtctagagatgcaaggaga

SEQ ID NO: 4689312 - DNA, 25 bp, Homo sapien
ttcaaggcttcctagcgagggaccg

SEQ ID NO: 4689313 - DNA, 25 bp, Homo sapien
cactattggcttgaggctgacgaca

SEQ ID NO: 4689314 - DNA, 25 bp, Homo sapien
taatggctgtcaaattggactcggc

SEQ ID NO: 4689315 - DNA, 25 bp, Homo sapien
tggactcggcagatacagaacatgt

SEQ ID NO: 4689316 - DNA, 25 bp, Homo sapien
cagcattgcgggatgaggaccatta

SEQ ID NO: 4689317 - DNA, 25 bp, Homo sapien
cgaggaggatgggcatccatcttct

SEQ ID NO: 4689318 - DNA, 25 bp, Homo sapien
tccaatcttgttggagcaggcaaag

SEQ ID NO: 4689319 - DNA, 25 bp, Homo sapien
atgtgcggtaggcagccttcccgcc

SEQ ID NO: 4689320 - DNA, 25 bp, Homo sapien
cacaaaacgtccaatcttgttggag

SEQ ID NO: 4689321 - DNA, 25 bp, Homo sapien
tgctgccggccagtcctgtggaact

SEQ ID NO: 4689322 - DNA, 25 bp, Homo sapien
tcctttatctgccccctgagggagt

SEQ ID NO: 4689323 - DNA, 25 bp, Homo sapien
ggaacgaaagagcatcagtgagatg

SEQ ID NO: 4689324 - DNA, 25 bp, Homo sapien
tgggaaggaacgaaagagcatcagt

SEQ ID NO: 4689325 - DNA, 25 bp, Homo sapien
acgtcatccgttgccaggtcttcct

SEQ ID NO: 4689326 - DNA, 25 bp, Homo sapien
tgtccagaagcatgacgtcatccgt

SEQ ID NO: 4689327 - DNA, 25 bp, Homo sapien
cagaagcatgacgtcatccgttgcc

SEQ ID NO: 4689328 - DNA, 25 bp, Homo sapien
gcatgacgtcatccgttgccaggtc

SEQ ID NO: 4689329 - DNA, 25 bp, Homo sapien
ggtccttctagcaactgatcataga

SEQ ID NO: 4689330 - DNA, 25 bp, Homo sapien
tagaactggaagtctagtttctccc

SEQ ID NO: 4689331 - DNA, 25 bp, Homo sapien
acttttctggcaacacctggcactg

SEQ ID NO: 4689332 - DNA, 25 bp, Homo sapien
cccctttaggtccttctagcaactg

SEQ ID NO: 4689333 - DNA, 25 bp, Homo sapien
gatgcaacaggaaaggtacatgagg

SEQ ID NO: 4689334 - DNA, 25 bp, Homo sapien
gctgatcaaattcacggctggagga

SEQ ID NO: 4689335 - DNA, 25 bp, Homo sapien
cagaggttgaaaactggcaacctac

SEQ ID NO: 4689336 - DNA, 25 bp, Homo sapien
ggccaggtatcagaccagacaaagc

SEQ ID NO: 4689337 - DNA, 25 bp, Homo sapien
cttcttcttgagaatcctttccaac

SEQ ID NO: 4689338 - DNA, 25 bp, Homo sapien
catcagtcccctggaaagatgctca

SEQ ID NO: 4689339 - DNA, 25 bp, Homo sapien
gcctcagggtttctgaaggaactga

SEQ ID NO: 4689340 - DNA, 25 bp, Homo sapien
tgtgttcttcactatcccaggcagg

SEQ ID NO: 4689341 - DNA, 25 bp, Homo sapien
cattcccagacctgtacaggagcca

SEQ ID NO: 4689342 - DNA, 25 bp, Homo sapien
caaagaagagggtctatggtcctac

SEQ ID NO: 4689343 - DNA, 25 bp, Homo sapien
cacgtgcaagaaaaggaaaccccag

SEQ ID NO: 4689344 - DNA, 25 bp, Homo sapien
ggaacagggctacggcttaatctcc

SEQ ID NO: 4689345 - DNA, 25 bp, Homo sapien
tgcagtcccctactggaagatatgg

SEQ ID NO: 4689346 - DNA, 25 bp, Homo sapien
acggtgatgggcgtccgccgatccc

SEQ ID NO: 4689347 - DNA, 25 bp, Homo sapien
taatcatcatcccagccaaggaacc

SEQ ID NO: 4689348 - DNA, 25 bp, Homo sapien
tcccgattggctgggtccgtctcga

SEQ ID NO: 4689349 - DNA, 25 bp, Homo sapien
gggtccgtctcgatgtaccgcttag

SEQ ID NO: 4689350 - DNA, 25 bp, Homo sapien
tctgctcgctctaaggcctctttga

SEQ ID NO: 4689351 - DNA, 25 bp, Homo sapien
aaaaggcactgaccggtgacatggg

SEQ ID NO: 4689352 - DNA, 25 bp, Homo sapien
gctctgctcgctctaaggcctcttt

SEQ ID NO: 4689353 - DNA, 25 bp, Homo sapien
ggacagttccaaaaggcactgaccg

SEQ ID NO: 4689354 - DNA, 25 bp, Homo sapien
cacacacacacactcatagcagagc

SEQ ID NO: 4689355 - DNA, 25 bp, Homo sapien
acacacacacactcatagcagagct

SEQ ID NO: 4689356 - DNA, 25 bp, Homo sapien
tgcagggctatttttggatactgta

SEQ ID NO: 4689357 - DNA, 25 bp, Homo sapien
tagacaattttgcaaggactctgaa

SEQ ID NO: 4689358 - DNA, 25 bp, Homo sapien
gatttaatttcccaaacactgacat

SEQ ID NO: 4689359 - DNA, 25 bp, Homo sapien
tttttgcagggctatttttggatac

SEQ ID NO: 4689360 - DNA, 25 bp, Homo sapien
gaaggagctctaggaacacagtgcc

SEQ ID NO: 4689361 - DNA, 25 bp, Homo sapien
gagactctgagttcacctagagaag

SEQ ID NO: 4689362 - DNA, 25 bp, Homo sapien
tattagaggtatggagcagtgcaac

SEQ ID NO: 4689363 - DNA, 25 bp, Homo sapien
tgaattcgtagtccaatcagctgaa

SEQ ID NO: 4689364 - DNA, 25 bp, Homo sapien
ttaactgtggtacactgtgaaatat

SEQ ID NO: 4689365 - DNA, 25 bp, Homo sapien
gttaactgtggtacactgtgaaata

SEQ ID NO: 4689366 - DNA, 25 bp, Homo sapien
cactgtgaaatatgttgattacaaa

SEQ ID NO: 4689367 - DNA, 25 bp, Homo sapien
taactgtggtacactgtgaaatatg

SEQ ID NO: 4689368 - DNA, 25 bp, Homo sapien
gctttgcagaaagtgatgaccttac

SEQ ID NO: 4689369 - DNA, 25 bp, Homo sapien
ggtcatatgtgccttacctccagag

SEQ ID NO: 4689370 - DNA, 25 bp, Homo sapien
tgacaccgctgactggctaaatgct

SEQ ID NO: 4689371 - DNA, 25 bp, Homo sapien
ccacacctggtttggagagtcttaa

SEQ ID NO: 4689372 - DNA, 25 bp, Homo sapien
ggttattgcagccgaaggagaaatg

SEQ ID NO: 4689373 - DNA, 25 bp, Homo sapien
gttattgcagccgaaggagaaatga

SEQ ID NO: 4689374 - DNA, 25 bp, Homo sapien
tattgcagccgaaggagaaatgaat

SEQ ID NO: 4689375 - DNA, 25 bp, Homo sapien
taggttattgcagccgaaggagaaa

SEQ ID NO: 4689376 - DNA, 25 bp, Homo sapien
gatgtgaaactacctgtgcagctcc

SEQ ID NO: 4689377 - DNA, 25 bp, Homo sapien
ccagagagctatggctgcagaagca

SEQ ID NO: 4689378 - DNA, 25 bp, Homo sapien
cgcgaggcccgcgccaaggtaactt

SEQ ID NO: 4689379 - DNA, 25 bp, Homo sapien
agcgtgtggaaattaaggatgtgaa

SEQ ID NO: 4689380 - DNA, 25 bp, Homo sapien
agagccatcatctttagattgggtc

SEQ ID NO: 4689381 - DNA, 25 bp, Homo sapien
gattgggtcgcattttacaaggagg

SEQ ID NO: 4689382 - DNA, 25 bp, Homo sapien
aaggacctggtcagtactgggattc

SEQ ID NO: 4689383 - DNA, 25 bp, Homo sapien
ctgggattctagattgtttatctga

SEQ ID NO: 4689384 - DNA, 25 bp, Homo sapien
acaatgttaacagctgaggagtgag

SEQ ID NO: 4689385 - DNA, 25 bp, Homo sapien
tgtccttcctaaatttatacagtga

SEQ ID NO: 4689386 - DNA, 25 bp, Homo sapien
gtctcatcctcccttgtagcttgga

SEQ ID NO: 4689387 - DNA, 25 bp, Homo sapien
tttgtttctgtatactattctgtcc

SEQ ID NO: 4689388 - DNA, 25 bp, Homo sapien
tcctccagagatagagtccccaagc

SEQ ID NO: 4689389 - DNA, 25 bp, Homo sapien
gttttatctccacaacaactgagtg

SEQ ID NO: 4689390 - DNA, 25 bp, Homo sapien
tgaaaacgatgttaccctccaaaga

SEQ ID NO: 4689391 - DNA, 25 bp, Homo sapien
tagaactctgacttactgccccaag

SEQ ID NO: 4689392 - DNA, 25 bp, Homo sapien
ctgtctgctgggactactaaagaaa

SEQ ID NO: 4689393 - DNA, 25 bp, Homo sapien
tgtctgctgggactactaaagaaac

SEQ ID NO: 4689394 - DNA, 25 bp, Homo sapien
gtccttcttcactgtagtagcccag

SEQ ID NO: 4689395 - DNA, 25 bp, Homo sapien
gaaaatagagattgtgtccttcttc

SEQ ID NO: 4689396 - DNA, 25 bp, Homo sapien
gccttagccttatgttggtggagca

SEQ ID NO: 4689397 - DNA, 25 bp, Homo sapien
gctgttgattttagggcatggccat

SEQ ID NO: 4689398 - DNA, 25 bp, Homo sapien
tgtttggcagactgaggtcacgatg

SEQ ID NO: 4689399 - DNA, 25 bp, Homo sapien
tttggcagactgaggtcacgatgga

SEQ ID NO: 4689400 - DNA, 25 bp, Homo sapien
ggcagactgaggtcacgatggaggg

SEQ ID NO: 4689401 - DNA, 25 bp, Homo sapien
cctgtttggcagactgaggtcacga

SEQ ID NO: 4689402 - DNA, 25 bp, Homo sapien
tcacttgcacttttgcctcgggtca

SEQ ID NO: 4689403 - DNA, 25 bp, Homo sapien
tctgcccggcaaggcgacttttctt

SEQ ID NO: 4689404 - DNA, 25 bp, Homo sapien
ttcacttcggctgcggcgtgatctg

SEQ ID NO: 4689405 - DNA, 25 bp, Homo sapien
gaggcgccttggtcccgtacctctg

SEQ ID NO: 4689406 - DNA, 25 bp, Homo sapien
ggtgaatctcttgtgatgattcaaa

SEQ ID NO: 4689407 - DNA, 25 bp, Homo sapien
tctggtgaatctcttgtgatgattc

SEQ ID NO: 4689408 - DNA, 25 bp, Homo sapien
gccacagcccaagtgtataaaatcc

SEQ ID NO: 4689409 - DNA, 25 bp, Homo sapien
caagtgtataaaatcctctggtgaa

SEQ ID NO: 4689410 - DNA, 25 bp, Homo sapien
gagagctggtttttgtcagatgctt

SEQ ID NO: 4689411 - DNA, 25 bp, Homo sapien
tgctgagagttctgatcatgaatga

SEQ ID NO: 4689412 - DNA, 25 bp, Homo sapien
agagttctgatcatgaatgagagct

SEQ ID NO: 4689413 - DNA, 25 bp, Homo sapien
atgagagctggtttttgtcagatgc

SEQ ID NO: 4689414 - DNA, 25 bp, Homo sapien
ggtatagcatgcagtggtggtccca

SEQ ID NO: 4689415 - DNA, 25 bp, Homo sapien
tcatgacattgagcaactacccctg

SEQ ID NO: 4689416 - DNA, 25 bp, Homo sapien
cttgatgaagagtacacaggaactc

SEQ ID NO: 4689417 - DNA, 25 bp, Homo sapien
tacccctgcagaagactagaactgg

SEQ ID NO: 4689418 - DNA, 25 bp, Homo sapien
tggtaagagtgctgcatggctcctc

SEQ ID NO: 4689419 - DNA, 25 bp, Homo sapien
taaggctgctacttctgaatggtgc

SEQ ID NO: 4689420 - DNA, 25 bp, Homo sapien
caagttcaggattattgtgccagtc

SEQ ID NO: 4689421 - DNA, 25 bp, Homo sapien
tctacagtgggtcgaggcagtgtca

SEQ ID NO: 4689422 - DNA, 25 bp, Homo sapien
cagagaggatagctaggtgaagaca

SEQ ID NO: 4689423 - DNA, 25 bp, Homo sapien
gagggaaattttgacagacacacag

SEQ ID NO: 4689424 - DNA, 25 bp, Homo sapien
tgtctaccccaaaccttatgaatgg

SEQ ID NO: 4689425 - DNA, 25 bp, Homo sapien
caattagttaaggtgaggtcatcaa

SEQ ID NO: 4689426 - DNA, 25 bp, Homo sapien
tcatcagagggcctcatctgatggc

SEQ ID NO: 4689427 - DNA, 25 bp, Homo sapien
aatgccatcaacacacgaatttggg

SEQ ID NO: 4689428 - DNA, 25 bp, Homo sapien
ttcaaaccacagcatgccaaaagtc

SEQ ID NO: 4689429 - DNA, 25 bp, Homo sapien
tcacatggcaagaggtcaagagctt

SEQ ID NO: 4689430 - DNA, 25 bp, Homo sapien
cacaaaagtagttctctatactgga

SEQ ID NO: 4689431 - DNA, 25 bp, Homo sapien
taaccctgttatcctaagcgactgc

SEQ ID NO: 4689432 - DNA, 25 bp, Homo sapien
cctggttgtccgctaacattcacag

SEQ ID NO: 4689433 - DNA, 25 bp, Homo sapien
tctatactggacacgagagggcagg

SEQ ID NO: 4689434 - DNA, 25 bp, Homo sapien
gatgatgtctccaagctgccgttta

SEQ ID NO: 4689435 - DNA, 25 bp, Homo sapien
taataggtacttcatggttggccac

SEQ ID NO: 4689436 - DNA, 25 bp, Homo sapien
ttggcccacatccaacacgaggtcg

SEQ ID NO: 4689437 - DNA, 25 bp, Homo sapien
tgcatggatgtggaccaggtcttcc

SEQ ID NO: 4689438 - DNA, 25 bp, Homo sapien
tgtcaaaacatttgtgtggagactc

SEQ ID NO: 4689439 - DNA, 25 bp, Homo sapien
cactgtcaaaacatttgtgtggaga

SEQ ID NO: 4689440 - DNA, 25 bp, Homo sapien
gagactcctgaactgatggaagcca

SEQ ID NO: 4689441 - DNA, 25 bp, Homo sapien
tgtggagactcctgaactgatggaa

SEQ ID NO: 4689442 - DNA, 25 bp, Homo sapien
tgaaatcccggcttttgtgcccaca

SEQ ID NO: 4689443 - DNA, 25 bp, Homo sapien
tgtgcccttggaaatttgctgaaat

SEQ ID NO: 4689444 - DNA, 25 bp, Homo sapien
aatccacccagccagtatctcagct

SEQ ID NO: 4689445 - DNA, 25 bp, Homo sapien
gatatactttatcccctggtgtgaa

SEQ ID NO: 4689446 - DNA, 25 bp, Homo sapien
tctgcagcttccgtagacttatctg

SEQ ID NO: 4689447 - DNA, 25 bp, Homo sapien
cagccatggtgttcggccaaagtcg

SEQ ID NO: 4689448 - DNA, 25 bp, Homo sapien
gacttatctgtatagaaccatggct

SEQ ID NO: 4689449 - DNA, 25 bp, Homo sapien
aaccatggcttgtatcttgccctca

SEQ ID NO: 4689450 - DNA, 25 bp, Homo sapien
ggttgctgatgctaaactgggcagc

SEQ ID NO: 4689451 - DNA, 25 bp, Homo sapien
ggcagccacaagaccactgatgcca

SEQ ID NO: 4689452 - DNA, 25 bp, Homo sapien
accttgtagtgccacagaattctgc

SEQ ID NO: 4689453 - DNA, 25 bp, Homo sapien
cccgttgtgctctggtggtgagtga

SEQ ID NO: 4689454 - DNA, 25 bp, Homo sapien
gatctatctgcatagtacactgcag

SEQ ID NO: 4689455 - DNA, 25 bp, Homo sapien
tgatctatctgcatagtacactgca

SEQ ID NO: 4689456 - DNA, 25 bp, Homo sapien
gatctcattaccaatcagcacggga

SEQ ID NO: 4689457 - DNA, 25 bp, Homo sapien
tctcattaccaatcagcacgggagt

SEQ ID NO: 4689458 - DNA, 25 bp, Homo sapien
tcccctaaatcataggctaggagct

SEQ ID NO: 4689459 - DNA, 25 bp, Homo sapien
ctgtcccctaaatcataggctagga

SEQ ID NO: 4689460 - DNA, 25 bp, Homo sapien
tgtcccctaaatcataggctaggag

SEQ ID NO: 4689461 - DNA, 25 bp, Homo sapien
gtcccctaaatcataggctaggagc

SEQ ID NO: 4689462 - DNA, 25 bp, Homo sapien
gggacacaggatgcgaccaagtaag

SEQ ID NO: 4689463 - DNA, 25 bp, Homo sapien
gaccaagtaagtcgcagtgagtgag

SEQ ID NO: 4689464 - DNA, 25 bp, Homo sapien
cacaggatgcgaccaagtaagtcgc

SEQ ID NO: 4689465 - DNA, 25 bp, Homo sapien
gatgcgaccaagtaagtcgcagtga

SEQ ID NO: 4689466 - DNA, 25 bp, Homo sapien
gtgccaaatcggacccagtttctgt

SEQ ID NO: 4689467 - DNA, 25 bp, Homo sapien
ggtgccaaatcggacccagtttctg

SEQ ID NO: 4689468 - DNA, 25 bp, Homo sapien
ctcggtgccaaatcggacccagttt

SEQ ID NO: 4689469 - DNA, 25 bp, Homo sapien
tcggtgccaaatcggacccagtttc

SEQ ID NO: 4689470 - DNA, 25 bp, Homo sapien
ctgctccggcgctgcccggtgtctg

SEQ ID NO: 4689471 - DNA, 25 bp, Homo sapien
ggtgagggagtggaggcgggccgct

SEQ ID NO: 4689472 - DNA, 25 bp, Homo sapien
tgctccggcgctgcccggtgtctgc

SEQ ID NO: 4689473 - DNA, 25 bp, Homo sapien
gagggagtggaggcgggccgctgct

SEQ ID NO: 4689474 - DNA, 25 bp, Homo sapien
tcggcgccctggttctgcggatcag

SEQ ID NO: 4689475 - DNA, 25 bp, Homo sapien
tctgcggatcaggtgggtcccgcgg

SEQ ID NO: 4689476 - DNA, 25 bp, Homo sapien
ctggttctgcggatcaggtgggtcc

SEQ ID NO: 4689477 - DNA, 25 bp, Homo sapien
ccctcggcgccctggttctgcggat

SEQ ID NO: 4689478 - DNA, 25 bp, Homo sapien
cttccagctgtctgtgtccggggcg

SEQ ID NO: 4689479 - DNA, 25 bp, Homo sapien
accggcttggcgcagcccgctgtca

SEQ ID NO: 4689480 - DNA, 25 bp, Homo sapien
gctgtcagcgctcgccggctcctcg

SEQ ID NO: 4689481 - DNA, 25 bp, Homo sapien
gcactcgctcgccggccttccagct

SEQ ID NO: 4689482 - DNA, 25 bp, Homo sapien
tgaatttcccgagaggcctgagatg

SEQ ID NO: 4689483 - DNA, 25 bp, Homo sapien
tggatagtcgggtctctgaatttcc

SEQ ID NO: 4689484 - DNA, 25 bp, Homo sapien
tctggtttgttcctggatagtcggg

SEQ ID NO: 4689485 - DNA, 25 bp, Homo sapien
tgttcctggatagtcgggtctctga

SEQ ID NO: 4689486 - DNA, 25 bp, Homo sapien
catcctctggaattgtgcagtgtgg

SEQ ID NO: 4689487 - DNA, 25 bp, Homo sapien
tagtcctgcaacatcctctggaatt

SEQ ID NO: 4689488 - DNA, 25 bp, Homo sapien
agtgtggtggccttcatggtgttct

SEQ ID NO: 4689489 - DNA, 25 bp, Homo sapien
tttcctgtgccaaaaatcaaggcgt

SEQ ID NO: 4689490 - DNA, 25 bp, Homo sapien
cgtatgtcaaactcagtcagcagct

SEQ ID NO: 4689491 - DNA, 25 bp, Homo sapien
cagtcagcagctgcttccgctgcat

SEQ ID NO: 4689492 - DNA, 25 bp, Homo sapien
actcagtcagcagctgcttccgctg

SEQ ID NO: 4689493 - DNA, 25 bp, Homo sapien
gtatgtcaaactcagtcagcagctg

SEQ ID NO: 4689494 - DNA, 25 bp, Homo sapien
cagcttatacaaaataattgttctg

SEQ ID NO: 4689495 - DNA, 25 bp, Homo sapien
aattgaaatgcaaggctttgtaaga

SEQ ID NO: 4689496 - DNA, 25 bp, Homo sapien
gtatggttaacacactaccaaatgt

SEQ ID NO: 4689497 - DNA, 25 bp, Homo sapien
gacactaaccttgcctggtacacta

SEQ ID NO: 4689498 - DNA, 25 bp, Homo sapien
aagagatgtggaatgacattgctgc

SEQ ID NO: 4689499 - DNA, 25 bp, Homo sapien
gaagagatgtggaatgacattgctg

SEQ ID NO: 4689500 - DNA, 25 bp, Homo sapien
agatgggctctcacttgcatttttt

SEQ ID NO: 4689501 - DNA, 25 bp, Homo sapien
gccaaatttccaatgggcctgccat

SEQ ID NO: 4689502 - DNA, 25 bp, Homo sapien
tccaatgggcctgccattaaatcac

SEQ ID NO: 4689503 - DNA, 25 bp, Homo sapien
tgccattaaatcaccaacagcatct

SEQ ID NO: 4689504 - DNA, 25 bp, Homo sapien
ccaagccaaatttccaatgggcctg

SEQ ID NO: 4689505 - DNA, 25 bp, Homo sapien
tgcctgagttcccacgaaaagtggc

SEQ ID NO: 4689506 - DNA, 25 bp, Homo sapien
ggtctgacgattcacacttcctcct

SEQ ID NO: 4689507 - DNA, 25 bp, Homo sapien
tcctggcctgggtcccggtctgacg

SEQ ID NO: 4689508 - DNA, 25 bp, Homo sapien
gagttcccacgaaaagtggcctcca

SEQ ID NO: 4689509 - DNA, 25 bp, Homo sapien
aatagtcaatatgcccagatgggcc

SEQ ID NO: 4689510 - DNA, 25 bp, Homo sapien
cagaaagtcacggaagaatgggata

SEQ ID NO: 4689511 - DNA, 25 bp, Homo sapien
tcatcttcagagtttaggaggctcc

SEQ ID NO: 4689512 - DNA, 25 bp, Homo sapien
agtagcgcactcatggttcaccaca

SEQ ID NO: 4689513 - DNA, 25 bp, Homo sapien
tgtctaaaataggaagacgccggga

SEQ ID NO: 4689514 - DNA, 25 bp, Homo sapien
cctgatttatgaaccgaggctgtct

SEQ ID NO: 4689515 - DNA, 25 bp, Homo sapien
aacattagaagggactgaggcagcg

SEQ ID NO: 4689516 - DNA, 25 bp, Homo sapien
tgactgggtattcctgcaagcaggc

SEQ ID NO: 4689517 - DNA, 25 bp, Homo sapien
gtaggagtcgtcttggtccagaagg

SEQ ID NO: 4689518 - DNA, 25 bp, Homo sapien
cgtaggagtcgtcttggtccagaag

SEQ ID NO: 4689519 - DNA, 25 bp, Homo sapien
atggctggccagcagaaccgaggcc

SEQ ID NO: 4689520 - DNA, 25 bp, Homo sapien
gcagcccaaagtggagaaagctcac

SEQ ID NO: 4689521 - DNA, 25 bp, Homo sapien
tgttcctcctgattgcgcctcttcc

SEQ ID NO: 4689522 - DNA, 25 bp, Homo sapien
tgtggctctaccactcatccagctg

SEQ ID NO: 4689523 - DNA, 25 bp, Homo sapien
cttgctgccgggcacggtaggccct

SEQ ID NO: 4689524 - DNA, 25 bp, Homo sapien
tgttccccattctgctggggaaggg

SEQ ID NO: 4689525 - DNA, 25 bp, Homo sapien
taggccctcagccaagtctgtgttc

SEQ ID NO: 4689526 - DNA, 25 bp, Homo sapien
gggaaggggagctttgcaggagtca

SEQ ID NO: 4689527 - DNA, 25 bp, Homo sapien
ctgcagttggtattccactggtggg

SEQ ID NO: 4689528 - DNA, 25 bp, Homo sapien
tattccactggtgggcccgttcaga

SEQ ID NO: 4689529 - DNA, 25 bp, Homo sapien
agaggactggtaagatggtgcccca

SEQ ID NO: 4689530 - DNA, 25 bp, Homo sapien
tggtaagatggtgccccaagagaaa

SEQ ID NO: 4689531 - DNA, 25 bp, Homo sapien
ggctggcaaaggtgtgggtggcaga

SEQ ID NO: 4689532 - DNA, 25 bp, Homo sapien
ggtggtaccggcaaggcagaaggtc

SEQ ID NO: 4689533 - DNA, 25 bp, Homo sapien
tggtctgggtggtaccggcaaggca

SEQ ID NO: 4689534 - DNA, 25 bp, Homo sapien
tggtaccggcaaggcagaaggtcca

SEQ ID NO: 4689535 - DNA, 25 bp, Homo sapien
aatccacgtatgtccacttgtcgag

SEQ ID NO: 4689536 - DNA, 25 bp, Homo sapien
gcactatatctgcaaaatccacgta

SEQ ID NO: 4689537 - DNA, 25 bp, Homo sapien
tgatttgccaaaggcatcgtctgca

SEQ ID NO: 4689538 - DNA, 25 bp, Homo sapien
cagggattccaatctggacccgtct

SEQ ID NO: 4689539 - DNA, 25 bp, Homo sapien
gctatttttagcgagagctgctctc

SEQ ID NO: 4689540 - DNA, 25 bp, Homo sapien
tgctctcccagtcgtacagacagaa

SEQ ID NO: 4689541 - DNA, 25 bp, Homo sapien
gacagaaccagttaattcggccgct

SEQ ID NO: 4689542 - DNA, 25 bp, Homo sapien
gtcccggctcagaatccaacggcgg

SEQ ID NO: 4689543 - DNA, 25 bp, Homo sapien
cagtgcctcggccagcgggcctgcc

SEQ ID NO: 4689544 - DNA, 25 bp, Homo sapien
caccctccgcggcacctgtggggcc

SEQ ID NO: 4689545 - DNA, 25 bp, Homo sapien
tgccaccctccgcggcacctgtggg

SEQ ID NO: 4689546 - DNA, 25 bp, Homo sapien
ctcggacggcctcggcagtgcctcg

SEQ ID NO: 4689547 - DNA, 25 bp, Homo sapien
ccgcagcagagcgtgtcctcgcaga

SEQ ID NO: 4689548 - DNA, 25 bp, Homo sapien
gcgagggcgcggaaggaggcaccgc

SEQ ID NO: 4689549 - DNA, 25 bp, Homo sapien
ggcgcggaaggaggcaccgccagct

SEQ ID NO: 4689550 - DNA, 25 bp, Homo sapien
cgtgtcctcgcagagcgcgcaggct

SEQ ID NO: 4689551 - DNA, 25 bp, Homo sapien
cgggcaagtgcccgcgtagggcgag

SEQ ID NO: 4689552 - DNA, 25 bp, Homo sapien
cccgggcaagtgcccgcgtagggcg

SEQ ID NO: 4689553 - DNA, 25 bp, Homo sapien
gcaagtgcccgcgtagggcgagggc

SEQ ID NO: 4689554 - DNA, 25 bp, Homo sapien
ggcaagtgcccgcgtagggcgaggg

SEQ ID NO: 4689555 - DNA, 25 bp, Homo sapien
gagtcgcggtgtcgccgggcggctg

SEQ ID NO: 4689556 - DNA, 25 bp, Homo sapien
catcccaaaggctccggagcctgag

SEQ ID NO: 4689557 - DNA, 25 bp, Homo sapien
gcgctgccatcccaaaggctccgga

SEQ ID NO: 4689558 - DNA, 25 bp, Homo sapien
cagggccagggttgcgaagcggcgg

SEQ ID NO: 4689559 - DNA, 25 bp, Homo sapien
ctgagccgcggcccccagcttttac

SEQ ID NO: 4689560 - DNA, 25 bp, Homo sapien
agaatttgggcagtaagcagtggca

SEQ ID NO: 4689561 - DNA, 25 bp, Homo sapien
gcaggaagaatttgggcagtaagca

SEQ ID NO: 4689562 - DNA, 25 bp, Homo sapien
ccttaggggggcaatgagaacaaat

SEQ ID NO: 4689563 - DNA, 25 bp, Homo sapien
tggaagtcacaggccaagtccaggc

SEQ ID NO: 4689564 - DNA, 25 bp, Homo sapien
tctctgtccccctattaagccaggt

SEQ ID NO: 4689565 - DNA, 25 bp, Homo sapien
ttctctgtccccctattaagccagg

SEQ ID NO: 4689566 - DNA, 25 bp, Homo sapien
ccttctctgtccccctattaagcca

SEQ ID NO: 4689567 - DNA, 25 bp, Homo sapien
ctgaggtccacccttcatgaccttc

SEQ ID NO: 4689568 - DNA, 25 bp, Homo sapien
agtaaacaggtggaagcaaacagcc

SEQ ID NO: 4689569 - DNA, 25 bp, Homo sapien
cagaaagtaaacaggtggaagcaaa

SEQ ID NO: 4689570 - DNA, 25 bp, Homo sapien
gaaagtaaacaggtggaagcaaaca

SEQ ID NO: 4689571 - DNA, 25 bp, Homo sapien
aagccagaaagtaaacaggtggaag

SEQ ID NO: 4689572 - DNA, 25 bp, Homo sapien
gagcagggggatggtcggcgtttgt

SEQ ID NO: 4689573 - DNA, 25 bp, Homo sapien
gatggtcggcgtttgtggaccggtc

SEQ ID NO: 4689574 - DNA, 25 bp, Homo sapien
tcggcgtttgtggaccggtcagtgg

SEQ ID NO: 4689575 - DNA, 25 bp, Homo sapien
tgtggaccggtcagtggctggcatt

SEQ ID NO: 4689576 - DNA, 25 bp, Homo sapien
atcagatccacaggcaggcaccggg

SEQ ID NO: 4689577 - DNA, 25 bp, Homo sapien
ggctttgtgaatgtgatcagatcca

SEQ ID NO: 4689578 - DNA, 25 bp, Homo sapien
atcccttgcaggctttgtgaatgtg

SEQ ID NO: 4689579 - DNA, 25 bp, Homo sapien
gtgatcagatccacaggcaggcacc

SEQ ID NO: 4689580 - DNA, 25 bp, Homo sapien
ctcactctcgtaccagccacctcct

SEQ ID NO: 4689581 - DNA, 25 bp, Homo sapien
tcactctcgtaccagccacctcctg

SEQ ID NO: 4689582 - DNA, 25 bp, Homo sapien
ctgctcccgagagcacagatcccag

SEQ ID NO: 4689583 - DNA, 25 bp, Homo sapien
ctcctgctcccgagagcacagatcc

SEQ ID NO: 4689584 - DNA, 25 bp, Homo sapien
gggcctgagttcatctggcccattt

SEQ ID NO: 4689585 - DNA, 25 bp, Homo sapien
cccaggaagtcctactcaggacggg

SEQ ID NO: 4689586 - DNA, 25 bp, Homo sapien
cctgagttcatctggcccattttgt

SEQ ID NO: 4689587 - DNA, 25 bp, Homo sapien
tccgtagccaggtccacgggttctg

SEQ ID NO: 4689588 - DNA, 25 bp, Homo sapien
cacgggccccatcggccgctccgga

SEQ ID NO: 4689589 - DNA, 25 bp, Homo sapien
gggccccatcggccgctccggacag

SEQ ID NO: 4689590 - DNA, 25 bp, Homo sapien
acacgggccccatcggccgctccgg

SEQ ID NO: 4689591 - DNA, 25 bp, Homo sapien
tcacacgggccccatcggccgctcc

SEQ ID NO: 4689592 - DNA, 25 bp, Homo sapien
gctgccgcccgccgggcaccgggcc

SEQ ID NO: 4689593 - DNA, 25 bp, Homo sapien
ctgccgcccgccgggcaccgggccg

SEQ ID NO: 4689594 - DNA, 25 bp, Homo sapien
agtagtaggaggacctcccggtgct

SEQ ID NO: 4689595 - DNA, 25 bp, Homo sapien
tggcaggccgggtccggctgcggga

SEQ ID NO: 4689596 - DNA, 25 bp, Homo sapien
cctcagcagccggtagtagtaggag

SEQ ID NO: 4689597 - DNA, 25 bp, Homo sapien
cgcctcagcagccggtagtagtagg

SEQ ID NO: 4689598 - DNA, 25 bp, Homo sapien
ctatgtcggcacatcgcctccaaag

SEQ ID NO: 4689599 - DNA, 25 bp, Homo sapien
ccagatgccgatagtactctcctgt

SEQ ID NO: 4689600 - DNA, 25 bp, Homo sapien
atgtcggcacatcgcctccaaaggc

SEQ ID NO: 4689601 - DNA, 25 bp, Homo sapien
cacagcccagatgccgatagtactc

SEQ ID NO: 4689602 - DNA, 25 bp, Homo sapien
tgtgaacaggtttctagataccagg

SEQ ID NO: 4689603 - DNA, 25 bp, Homo sapien
ttaccccaccctgtgtgctgctaaa

SEQ ID NO: 4689604 - DNA, 25 bp, Homo sapien
aatgggaaatccaagcttctcttgc

SEQ ID NO: 4689605 - DNA, 25 bp, Homo sapien
aggtggaaccatgactgtattgaca

SEQ ID NO: 4689606 - DNA, 25 bp, Homo sapien
atttccccgacacacaggagccgga

SEQ ID NO: 4689607 - DNA, 25 bp, Homo sapien
tccataacttctggaagagagcctc

SEQ ID NO: 4689608 - DNA, 25 bp, Homo sapien
gtttggcccaaactggtggtctgtc

SEQ ID NO: 4689609 - DNA, 25 bp, Homo sapien
ggagccggagcactccctgtgctag

SEQ ID NO: 4689610 - DNA, 25 bp, Homo sapien
taaaagcagaaagcacatgtaggca

SEQ ID NO: 4689611 - DNA, 25 bp, Homo sapien
ccacctttaggtggccagttatgcc

SEQ ID NO: 4689612 - DNA, 25 bp, Homo sapien
gtaggcaggatacccaccaccttta

SEQ ID NO: 4689613 - DNA, 25 bp, Homo sapien
tctagtaatttgagtcggcagtgtc

SEQ ID NO: 4689614 - DNA, 25 bp, Homo sapien
ccccacaacagcgtggcaccagctg

SEQ ID NO: 4689615 - DNA, 25 bp, Homo sapien
tgacccggaacggcgtggcggccga

SEQ ID NO: 4689616 - DNA, 25 bp, Homo sapien
aggctgcgccgagagcccggccttt

SEQ ID NO: 4689617 - DNA, 25 bp, Homo sapien
tcttctcggaaaggctgccaggcag

SEQ ID NO: 4689618 - DNA, 25 bp, Homo sapien
gagcccggcctttcttgaggcgact

SEQ ID NO: 4689619 - DNA, 25 bp, Homo sapien
tggcggtgttggtgacgcagagata

SEQ ID NO: 4689620 - DNA, 25 bp, Homo sapien
gtgttggtgacgcagagatagttac

SEQ ID NO: 4689621 - DNA, 25 bp, Homo sapien
gtggcggtgttggtgacgcagagat

SEQ ID NO: 4689622 - DNA, 25 bp, Homo sapien
cggtgttggtgacgcagagatagtt

SEQ ID NO: 4689623 - DNA, 25 bp, Homo sapien
ccgggcaggtgggactgcgagttga

SEQ ID NO: 4689624 - DNA, 25 bp, Homo sapien
ctggctctgactgaaggtggtttct

SEQ ID NO: 4689625 - DNA, 25 bp, Homo sapien
ggctctgactgaaggtggtttctac

SEQ ID NO: 4689626 - DNA, 25 bp, Homo sapien
gtgggactgcgagttgagtcccagg

SEQ ID NO: 4689627 - DNA, 25 bp, Homo sapien
catcatccactgtggttcttgtatc

SEQ ID NO: 4689628 - DNA, 25 bp, Homo sapien
tagctccactcacagccatcatcca

SEQ ID NO: 4689629 - DNA, 25 bp, Homo sapien
acagccatcatccactgtggttctt

SEQ ID NO: 4689630 - DNA, 25 bp, Homo sapien
gccatcatccactgtggttcttgta

SEQ ID NO: 4689631 - DNA, 25 bp, Homo sapien
tgtcccaagtgaacgaccatctgag

SEQ ID NO: 4689632 - DNA, 25 bp, Homo sapien
taataccaatcagcctccgtgaagg

SEQ ID NO: 4689633 - DNA, 25 bp, Homo sapien
atacacgccggatgctgggtcagga

SEQ ID NO: 4689634 - DNA, 25 bp, Homo sapien
tcaggagactgactcacagagcaga

SEQ ID NO: 4689635 - DNA, 25 bp, Homo sapien
agatccaggcccatgagaggagcca

SEQ ID NO: 4689636 - DNA, 25 bp, Homo sapien
ggagaagttactcatcccgatgcag

SEQ ID NO: 4689637 - DNA, 25 bp, Homo sapien
gcactgactagcaaagactgggctg

SEQ ID NO: 4689638 - DNA, 25 bp, Homo sapien
tggctttggaaacaacaattgccgc

SEQ ID NO: 4689639 - DNA, 25 bp, Homo sapien
gggcatcagcgaacagaaaccagtt

SEQ ID NO: 4689640 - DNA, 25 bp, Homo sapien
cactgagagtctaacggaggaaaaa

SEQ ID NO: 4689641 - DNA, 25 bp, Homo sapien
gcagactcacagcataagcagaggt

SEQ ID NO: 4689642 - DNA, 25 bp, Homo sapien
gagcctgggcttgtaatcccttccc

SEQ ID NO: 4689643 - DNA, 25 bp, Homo sapien
tgggaaggaagactctccacaccct

SEQ ID NO: 4689644 - DNA, 25 bp, Homo sapien
ggccatggcaacctgggtctccagt

SEQ ID NO: 4689645 - DNA, 25 bp, Homo sapien
gacgcctggcaggtattctctcaat

SEQ ID NO: 4689646 - DNA, 25 bp, Homo sapien
ggactgtaaagcctccagagcaggg

SEQ ID NO: 4689647 - DNA, 25 bp, Homo sapien
cagctgtgccacgacgctgaggtca

SEQ ID NO: 4689648 - DNA, 25 bp, Homo sapien
caagcagcctacacagtctgcaggg

SEQ ID NO: 4689649 - DNA, 25 bp, Homo sapien
gaggcctcagctttcattcactgga

SEQ ID NO: 4689650 - DNA, 25 bp, Homo sapien
catctacttgtcaggcagctgtgcc

SEQ ID NO: 4689651 - DNA, 25 bp, Homo sapien
tgtggcggaagctgtggttgcggtc

SEQ ID NO: 4689652 - DNA, 25 bp, Homo sapien
cttgatggagcccttgaggcggcgg

SEQ ID NO: 4689653 - DNA, 25 bp, Homo sapien
gctgtggttgcggtccagcttgggc

SEQ ID NO: 4689654 - DNA, 25 bp, Homo sapien
tgggctggctcttggtgcgcttgat

SEQ ID NO: 4689655 - DNA, 25 bp, Homo sapien
ctcattgtccgcggcggcggcggcg

SEQ ID NO: 4689656 - DNA, 25 bp, Homo sapien
tctcattgtccgcggcggcggcggc

SEQ ID NO: 4689657 - DNA, 25 bp, Homo sapien
ctctcattgtccgcggcggcggcgg

SEQ ID NO: 4689658 - DNA, 25 bp, Homo sapien
ctgctgcataagcattgctcccttt

SEQ ID NO: 4689659 - DNA, 25 bp, Homo sapien
ctgcataagcattgctccctttggg

SEQ ID NO: 4689660 - DNA, 25 bp, Homo sapien
gctgcataagcattgctccctttgg

SEQ ID NO: 4689661 - DNA, 25 bp, Homo sapien
tgctgcataagcattgctccctttg

SEQ ID NO: 4689662 - DNA, 25 bp, Homo sapien
cagcaacagagcaattaggcagacc

SEQ ID NO: 4689663 - DNA, 25 bp, Homo sapien
ttggtctttggccaatctgggaaac

SEQ ID NO: 4689664 - DNA, 25 bp, Homo sapien
ggaaacttgtttccccatcacattc

SEQ ID NO: 4689665 - DNA, 25 bp, Homo sapien
ctttggccaatctgggaaacttgtt

SEQ ID NO: 4689666 - DNA, 25 bp, Homo sapien
tccccatcacattcctgggcctcag

SEQ ID NO: 4689667 - DNA, 25 bp, Homo sapien
gggtgaatctatggtgaaaagtgct

SEQ ID NO: 4689668 - DNA, 25 bp, Homo sapien
tgagacttgccttcgctgaaacagt

SEQ ID NO: 4689669 - DNA, 25 bp, Homo sapien
agaccccggcccatcttcatgagtg

SEQ ID NO: 4689670 - DNA, 25 bp, Homo sapien
tatgacacatgcgtgcacaaggccc

SEQ ID NO: 4689671 - DNA, 25 bp, Homo sapien
ggcccaatctttccatggacgcctg

SEQ ID NO: 4689672 - DNA, 25 bp, Homo sapien
ggctgtgtcgagaatcacaggagat

SEQ ID NO: 4689673 - DNA, 25 bp, Homo sapien
tccatggacgcctgacaatggctgt

SEQ ID NO: 4689674 - DNA, 25 bp, Homo sapien
tgaagtcatcgctcccagaaatagg

SEQ ID NO: 4689675 - DNA, 25 bp, Homo sapien
catggcatgtgatccggctgagctc

SEQ ID NO: 4689676 - DNA, 25 bp, Homo sapien
caagcatccccaaggtttgacaagg

SEQ ID NO: 4689677 - DNA, 25 bp, Homo sapien
tcctggagccgaatgcatctggtgc

SEQ ID NO: 4689678 - DNA, 25 bp, Homo sapien
catttagcaactgtggaaccctgga

SEQ ID NO: 4689679 - DNA, 25 bp, Homo sapien
ttctgacacaacacgaaagaagagg

SEQ ID NO: 4689680 - DNA, 25 bp, Homo sapien
gcttctgacacaacacgaaagaaga

SEQ ID NO: 4689681 - DNA, 25 bp, Homo sapien
tcatggcttctgacacaacacgaaa

SEQ ID NO: 4689682 - DNA, 25 bp, Homo sapien
tggcttctgacacaacacgaaagaa

SEQ ID NO: 4689683 - DNA, 25 bp, Homo sapien
agtggccgggcgagccttcctgctg

SEQ ID NO: 4689684 - DNA, 25 bp, Homo sapien
agcatagccaccaggctcgggaagc

SEQ ID NO: 4689685 - DNA, 25 bp, Homo sapien
gtggccgggcgagccttcctgctgt

SEQ ID NO: 4689686 - DNA, 25 bp, Homo sapien
tgtcaggactaaaaaggtgcaccca

SEQ ID NO: 4689687 - DNA, 25 bp, Homo sapien
ccgagtcagatgtgaacccagttca

SEQ ID NO: 4689688 - DNA, 25 bp, Homo sapien
catgcatagcaagtggccgagtcag

SEQ ID NO: 4689689 - DNA, 25 bp, Homo sapien
cccagttcagcggagttcaagacta

SEQ ID NO: 4689690 - DNA, 25 bp, Homo sapien
tagaccaaagcagcaccctccactg

SEQ ID NO: 4689691 - DNA, 25 bp, Homo sapien
cctggactccgctgctacagaggag

SEQ ID NO: 4689692 - DNA, 25 bp, Homo sapien
ggctagggtgacctgccctggactc

SEQ ID NO: 4689693 - DNA, 25 bp, Homo sapien
tggccttctcctgtctagaccaaag

SEQ ID NO: 4689694 - DNA, 25 bp, Homo sapien
gtggcaccatgacatccaggtcaca

SEQ ID NO: 4689695 - DNA, 25 bp, Homo sapien
aggtcacacacgggacagccaaggc

SEQ ID NO: 4689696 - DNA, 25 bp, Homo sapien
gaggtggcaccatgacatccaggtc

SEQ ID NO: 4689697 - DNA, 25 bp, Homo sapien
gaaggaggtggcaccatgacatcca

SEQ ID NO: 4689698 - DNA, 25 bp, Homo sapien
ctgtcctccatggcatggaatcctt

SEQ ID NO: 4689699 - DNA, 25 bp, Homo sapien
tgtcctccatggcatggaatcctta

SEQ ID NO: 4689700 - DNA, 25 bp, Homo sapien
gtcctccatggcatggaatccttac

SEQ ID NO: 4689701 - DNA, 25 bp, Homo sapien
ccatctttgatctagtgttgctgcg

SEQ ID NO: 4689702 - DNA, 25 bp, Homo sapien
ttgggccatgcgtcacatgaaccac

SEQ ID NO: 4689703 - DNA, 25 bp, Homo sapien
gaatctccacgagcccaagaggcag

SEQ ID NO: 4689704 - DNA, 25 bp, Homo sapien
tgctgcgacacccaaacctcttggg

SEQ ID NO: 4689705 - DNA, 25 bp, Homo sapien
gtaaagcagaggctgcatccatccc

SEQ ID NO: 4689706 - DNA, 25 bp, Homo sapien
aagcagaggctgcatccatccctgc

SEQ ID NO: 4689707 - DNA, 25 bp, Homo sapien
gatgtaaagcagaggctgcatccat

SEQ ID NO: 4689708 - DNA, 25 bp, Homo sapien
tctccacggggtgggatgtaaagca

SEQ ID NO: 4689709 - DNA, 25 bp, Homo sapien
agcagacccacacgagggaaagcca

SEQ ID NO: 4689710 - DNA, 25 bp, Homo sapien
cagcagacccacacgagggaaagcc

SEQ ID NO: 4689711 - DNA, 25 bp, Homo sapien
gctgctgtgcacgggcttgatgacc

SEQ ID NO: 4689712 - DNA, 25 bp, Homo sapien
tccagcgcctccaccgcactgctgg

SEQ ID NO: 4689713 - DNA, 25 bp, Homo sapien
ggactcgtgggagcgagactccttc

SEQ ID NO: 4689714 - DNA, 25 bp, Homo sapien
ctgtgcacgggcttgatgaccacct

SEQ ID NO: 4689715 - DNA, 25 bp, Homo sapien
caacctctggtccagcttagacatc

SEQ ID NO: 4689716 - DNA, 25 bp, Homo sapien
cccagcagcagacccgggtctctgc

SEQ ID NO: 4689717 - DNA, 25 bp, Homo sapien
ctgcaggggaagcacactcctcaca

SEQ ID NO: 4689718 - DNA, 25 bp, Homo sapien
aagggagccagtccgggcaattcct

SEQ ID NO: 4689719 - DNA, 25 bp, Homo sapien
cacttgcttcctgatgacgtcgtca

SEQ ID NO: 4689720 - DNA, 25 bp, Homo sapien
gaaaagcacttgcttcctgatgacg

SEQ ID NO: 4689721 - DNA, 25 bp, Homo sapien
ccacttatcccgctcagctgcagac

SEQ ID NO: 4689722 - DNA, 25 bp, Homo sapien
gctgcagaccggcaggaaaagcact

SEQ ID NO: 4689723 - DNA, 25 bp, Homo sapien
ggatgcaccgctcgccggaggttct

SEQ ID NO: 4689724 - DNA, 25 bp, Homo sapien
cttgttgggatgcaccgctcgccgg

SEQ ID NO: 4689725 - DNA, 25 bp, Homo sapien
ttgttgggatgcaccgctcgccgga

SEQ ID NO: 4689726 - DNA, 25 bp, Homo sapien
ttgggatgcaccgctcgccggaggt

SEQ ID NO: 4689727 - DNA, 25 bp, Homo sapien
tgtgctccacacgccggctgttgtc

SEQ ID NO: 4689728 - DNA, 25 bp, Homo sapien
caggtccttggcctcgatcacccac

SEQ ID NO: 4689729 - DNA, 25 bp, Homo sapien
tcaggatgtgctccacacgccggct

SEQ ID NO: 4689730 - DNA, 25 bp, Homo sapien
tgctcgccccagaaaacattgtccg

SEQ ID NO: 4689731 - DNA, 25 bp, Homo sapien
gatgtgctcagcgaactctttgtac

SEQ ID NO: 4689732 - DNA, 25 bp, Homo sapien
caagttgtggaactcgaagtgctcg

SEQ ID NO: 4689733 - DNA, 25 bp, Homo sapien
acattgtccgtcttgagcttgcccg

SEQ ID NO: 4689734 - DNA, 25 bp, Homo sapien
ggaggtggagagagcaggacctgag

SEQ ID NO: 4689735 - DNA, 25 bp, Homo sapien
caggaggtggagagagcaggacctg

SEQ ID NO: 4689736 - DNA, 25 bp, Homo sapien
gaggcaggaggtggagagagcagga

SEQ ID NO: 4689737 - DNA, 25 bp, Homo sapien
ggcaggaggtggagagagcaggacc

SEQ ID NO: 4689738 - DNA, 25 bp, Homo sapien
tagggcgtcctgcaggtacttctgg

SEQ ID NO: 4689739 - DNA, 25 bp, Homo sapien
atgaggtgctcgttgtccccgcagc

SEQ ID NO: 4689740 - DNA, 25 bp, Homo sapien
tgacatcatcaggtctgtcaggaag

SEQ ID NO: 4689741 - DNA, 25 bp, Homo sapien
tggcccactagcttgaggtactcct

SEQ ID NO: 4689742 - DNA, 25 bp, Homo sapien
tctgccctgctgctggcccactccc

SEQ ID NO: 4689743 - DNA, 25 bp, Homo sapien
gccctgctgctggcccactccctac

SEQ ID NO: 4689744 - DNA, 25 bp, Homo sapien
tgccctgctgctggcccactcccta

SEQ ID NO: 4689745 - DNA, 25 bp, Homo sapien
cctctgccctgctgctggcccactc

SEQ ID NO: 4689746 - DNA, 25 bp, Homo sapien
ggccgagcacttgctgggatccact

SEQ ID NO: 4689747 - DNA, 25 bp, Homo sapien
agctcgcagcacatcttgaggttgc

SEQ ID NO: 4689748 - DNA, 25 bp, Homo sapien
tgctctgggaggtcagcggccgagc

SEQ ID NO: 4689749 - DNA, 25 bp, Homo sapien
cagttctcatctgactcatacagcg

SEQ ID NO: 4689750 - DNA, 25 bp, Homo sapien
gagcagtcaatacagggtggctgga

SEQ ID NO: 4689751 - DNA, 25 bp, Homo sapien
atgaggagctggctctccgtcctaa

SEQ ID NO: 4689752 - DNA, 25 bp, Homo sapien
accggaattaactgccaagggccag

SEQ ID NO: 4689753 - DNA, 25 bp, Homo sapien
gctcccatcgggcagtgggttctca

SEQ ID NO: 4689754 - DNA, 25 bp, Homo sapien
ccgccagctgcgtgaggtcagcccc

SEQ ID NO: 4689755 - DNA, 25 bp, Homo sapien
tgcgtgaggtcagccccgctgtctg

SEQ ID NO: 4689756 - DNA, 25 bp, Homo sapien
cagctgcgtgaggtcagccccgctg

SEQ ID NO: 4689757 - DNA, 25 bp, Homo sapien
aggtcagccccgctgtctgagctct

SEQ ID NO: 4689758 - DNA, 25 bp, Homo sapien
ccaggacaggagtgcacagagcagg

SEQ ID NO: 4689759 - DNA, 25 bp, Homo sapien
cccaggacaggagtgcacagagcag

SEQ ID NO: 4689760 - DNA, 25 bp, Homo sapien
acctgcattccaaccttggctctac

SEQ ID NO: 4689761 - DNA, 25 bp, Homo sapien
gaacctgcattccaaccttggctct

SEQ ID NO: 4689762 - DNA, 25 bp, Homo sapien
tgtgtagggacagacaaaggtgggc

SEQ ID NO: 4689763 - DNA, 25 bp, Homo sapien
ctgtgtagggacagacaaaggtggg

SEQ ID NO: 4689764 - DNA, 25 bp, Homo sapien
tgtagggacagacaaaggtgggctt

SEQ ID NO: 4689765 - DNA, 25 bp, Homo sapien
tagggacagacaaaggtgggcttgg

SEQ ID NO: 4689766 - DNA, 25 bp, Homo sapien
agggtgcgggcagtgcggtcatcag

SEQ ID NO: 4689767 - DNA, 25 bp, Homo sapien
gcaggttgaagagtgagggcgacat

SEQ ID NO: 4689768 - DNA, 25 bp, Homo sapien
tgatgagccgctcactgatgtccgg

SEQ ID NO: 4689769 - DNA, 25 bp, Homo sapien
ctctttcaactcccgtgggaagaca

SEQ ID NO: 4689770 - DNA, 25 bp, Homo sapien
ctgcatgttggtccactcatgctct

SEQ ID NO: 4689771 - DNA, 25 bp, Homo sapien
taggaactggttcatgaaggacatg

SEQ ID NO: 4689772 - DNA, 25 bp, Homo sapien
cactcatgctctaggaactggttca

SEQ ID NO: 4689773 - DNA, 25 bp, Homo sapien
cctcgaagccggctgtattggagag

SEQ ID NO: 4689774 - DNA, 25 bp, Homo sapien
gtttatgcacaagcttccacagagg

SEQ ID NO: 4689775 - DNA, 25 bp, Homo sapien
tatgcacaagcttccacagaggtct

SEQ ID NO: 4689776 - DNA, 25 bp, Homo sapien
ctgtttatgcacaagcttccacaga

SEQ ID NO: 4689777 - DNA, 25 bp, Homo sapien
ttatgcacaagcttccacagaggtc

SEQ ID NO: 4689778 - DNA, 25 bp, Homo sapien
cggaaagatcgttctcaatcaccat

SEQ ID NO: 4689779 - DNA, 25 bp, Homo sapien
gcccggtgtggaggccaggtcattg

SEQ ID NO: 4689780 - DNA, 25 bp, Homo sapien
caggtcattggtccctgggagctgc

SEQ ID NO: 4689781 - DNA, 25 bp, Homo sapien
tggacgtccctcaggatccgaggca

SEQ ID NO: 4689782 - DNA, 25 bp, Homo sapien
taagccctaagccacaactcagtgg

SEQ ID NO: 4689783 - DNA, 25 bp, Homo sapien
gaaaagaagaactgtgagtgcagcc

SEQ ID NO: 4689784 - DNA, 25 bp, Homo sapien
gctgcatcttgggacaatgggtact

SEQ ID NO: 4689785 - DNA, 25 bp, Homo sapien
tccacggatcctgcattgagaaccc

SEQ ID NO: 4689786 - DNA, 25 bp, Homo sapien
cggtaaccgggtgaaatctatcaga

SEQ ID NO: 4689787 - DNA, 25 bp, Homo sapien
acggtaaccgggtgaaatctatcag

SEQ ID NO: 4689788 - DNA, 25 bp, Homo sapien
gacggtaaccgggtgaaatctatca

SEQ ID NO: 4689789 - DNA, 25 bp, Homo sapien
tggagaggctcttgccaccgttggc

SEQ ID NO: 4689790 - DNA, 25 bp, Homo sapien
gaggctcttgccaccgttggccatc

SEQ ID NO: 4689791 - DNA, 25 bp, Homo sapien
tccgagtaactcgagctgcgggcag

SEQ ID NO: 4689792 - DNA, 25 bp, Homo sapien
ctgaagatcaggctcgttggcttcc

SEQ ID NO: 4689793 - DNA, 25 bp, Homo sapien
tccccatccagcgtgcgggcgtcct

SEQ ID NO: 4689794 - DNA, 25 bp, Homo sapien
cccatccagcgtgcgggcgtcctgg

SEQ ID NO: 4689795 - DNA, 25 bp, Homo sapien
gcctccccatccagcgtgcgggcgt

SEQ ID NO: 4689796 - DNA, 25 bp, Homo sapien
cctccccatccagcgtgcgggcgtc

SEQ ID NO: 4689797 - DNA, 25 bp, Homo sapien
tcactggggttgcccgggccggcca

SEQ ID NO: 4689798 - DNA, 25 bp, Homo sapien
ccatctgtggggaggacgtcggggc

SEQ ID NO: 4689799 - DNA, 25 bp, Homo sapien
cccatctgtggggaggacgtcgggg

SEQ ID NO: 4689800 - DNA, 25 bp, Homo sapien
catctgtggggaggacgtcggggcc

SEQ ID NO: 4689801 - DNA, 25 bp, Homo sapien
gaaggagagcggtgccaacagctgg

SEQ ID NO: 4689802 - DNA, 25 bp, Homo sapien
tggttggtgtctggcctgcccgccg

SEQ ID NO: 4689803 - DNA, 25 bp, Homo sapien
ggaaggagagcggtgccaacagctg

SEQ ID NO: 4689804 - DNA, 25 bp, Homo sapien
gccaactcctcgctgttgctgtgtg

SEQ ID NO: 4689805 - DNA, 25 bp, Homo sapien
tcctcgctgttgctgtgtgagctca

SEQ ID NO: 4689806 - DNA, 25 bp, Homo sapien
gctcctccgcggcagtgctgaaact

SEQ ID NO: 4689807 - DNA, 25 bp, Homo sapien
ccgcggcagtgctgaaacttcccag

SEQ ID NO: 4689808 - DNA, 25 bp, Homo sapien
gcccgcctttttcagtcagtgacat

SEQ ID NO: 4689809 - DNA, 25 bp, Homo sapien
ccgcctttttcagtcagtgacatct

SEQ ID NO: 4689810 - DNA, 25 bp, Homo sapien
cccgcctttttcagtcagtgacatc

SEQ ID NO: 4689811 - DNA, 25 bp, Homo sapien
aggctggtcgatcctcctctggggg

SEQ ID NO: 4689812 - DNA, 25 bp, Homo sapien
ggcggaggctggtcgatcctcctct

SEQ ID NO: 4689813 - DNA, 25 bp, Homo sapien
gaggctggtcgatcctcctctgggg

SEQ ID NO: 4689814 - DNA, 25 bp, Homo sapien
cggaggctggtcgatcctcctctgg

SEQ ID NO: 4689815 - DNA, 25 bp, Homo sapien
tactggggcccacccaatcaggtga

SEQ ID NO: 4689816 - DNA, 25 bp, Homo sapien
tgaggccgacgccagggttccgctt

SEQ ID NO: 4689817 - DNA, 25 bp, Homo sapien
cactgcccgtggcttcagttctggg

SEQ ID NO: 4689818 - DNA, 25 bp, Homo sapien
actgctgcctcaggcgggtactggg

SEQ ID NO: 4689819 - DNA, 25 bp, Homo sapien
gaactgtctctcagacggcagccaa

SEQ ID NO: 4689820 - DNA, 25 bp, Homo sapien
gcagagctgacaggtgccaggtggc

SEQ ID NO: 4689821 - DNA, 25 bp, Homo sapien
cacccgggaactgtctctcagacgg

SEQ ID NO: 4689822 - DNA, 25 bp, Homo sapien
ctctcagacggcagccaaaggcaga

SEQ ID NO: 4689823 - DNA, 25 bp, Homo sapien
gggcattggggctcacaggtgaagg

SEQ ID NO: 4689824 - DNA, 25 bp, Homo sapien
cattggggctcacaggtgaagggcc

SEQ ID NO: 4689825 - DNA, 25 bp, Homo sapien
cagggcattggggctcacaggtgaa

SEQ ID NO: 4689826 - DNA, 25 bp, Homo sapien
ctgtgcggtccagggcattggggct

SEQ ID NO: 4689827 - DNA, 25 bp, Homo sapien
ttttctgcttggctgagctcgtcct

SEQ ID NO: 4689828 - DNA, 25 bp, Homo sapien
gcgttcatggtcaagagccaagcgg

SEQ ID NO: 4689829 - DNA, 25 bp, Homo sapien
aggccctcgtcttctaacaactgcg

SEQ ID NO: 4689830 - DNA, 25 bp, Homo sapien
ttactccttagcctatccctgtggg

SEQ ID NO: 4689831 - DNA, 25 bp, Homo sapien
tgtcccgagccgccagggtccagtt

SEQ ID NO: 4689832 - DNA, 25 bp, Homo sapien
ctgtcccgagccgccagggtccagt

SEQ ID NO: 4689833 - DNA, 25 bp, Homo sapien
aaggagttctgccattctgacccca

SEQ ID NO: 4689834 - DNA, 25 bp, Homo sapien
gacatgtgacagcaccctgagaggt

SEQ ID NO: 4689835 - DNA, 25 bp, Homo sapien
tacccttgctcgagaggttgccaca

SEQ ID NO: 4689836 - DNA, 25 bp, Homo sapien
gactgactagcagggtaagatccca

SEQ ID NO: 4689837 - DNA, 25 bp, Homo sapien
tgcgtcgtctcctcctggcacttga

SEQ ID NO: 4689838 - DNA, 25 bp, Homo sapien
agcttcttggtggagattcgcagct

SEQ ID NO: 4689839 - DNA, 25 bp, Homo sapien
tggcacttgaacagggtctcatact

SEQ ID NO: 4689840 - DNA, 25 bp, Homo sapien
gtggagattcgcagcttgtcctgca

SEQ ID NO: 4689841 - DNA, 25 bp, Homo sapien
gaaaccaacaaggagagcccagtga

SEQ ID NO: 4689842 - DNA, 25 bp, Homo sapien
ggtcaggaaggtcaagaggtgtggg

SEQ ID NO: 4689843 - DNA, 25 bp, Homo sapien
agaaaccaacaaggagagcccagtg

SEQ ID NO: 4689844 - DNA, 25 bp, Homo sapien
caggtcaggaaggtcaagaggtgtg

SEQ ID NO: 4689845 - DNA, 25 bp, Homo sapien
tggtggaaagacgaaggccctgaaa

SEQ ID NO: 4689846 - DNA, 25 bp, Homo sapien
gtaactaactacaccctgcacggag

SEQ ID NO: 4689847 - DNA, 25 bp, Homo sapien
tcacaaagttgtacgcgaggtgcca

SEQ ID NO: 4689848 - DNA, 25 bp, Homo sapien
tcaaggagttcacaaggcaggaggc

SEQ ID NO: 4689849 - DNA, 25 bp, Homo sapien
gagagcccctccttgggtcagagac

SEQ ID NO: 4689850 - DNA, 25 bp, Homo sapien
actcccagcaactgacactgctggg

SEQ ID NO: 4689851 - DNA, 25 bp, Homo sapien
ggcagaggccctccagccgactccc

SEQ ID NO: 4689852 - DNA, 25 bp, Homo sapien
tcagagacttgcctcccatacttgc

SEQ ID NO: 4689853 - DNA, 25 bp, Homo sapien
agccagagacagagacagtcagact

SEQ ID NO: 4689854 - DNA, 25 bp, Homo sapien
ctatagccagagacagagacagtca

SEQ ID NO: 4689855 - DNA, 25 bp, Homo sapien
agagacagagacagtcagactggcc

SEQ ID NO: 4689856 - DNA, 25 bp, Homo sapien
cagagacagagacagtcagactggc

SEQ ID NO: 4689857 - DNA, 25 bp, Homo sapien
cagttcttcctccacggacatcaac

SEQ ID NO: 4689858 - DNA, 25 bp, Homo sapien
gcatcaatgatcttctgtttggagt

SEQ ID NO: 4689859 - DNA, 25 bp, Homo sapien
cacagccgcttgcatctctgcgtgg

SEQ ID NO: 4689860 - DNA, 25 bp, Homo sapien
gcatctctgcgtggtccttcttcag

SEQ ID NO: 4689861 - DNA, 25 bp, Homo sapien
catgggacaggctccttagggctgt

SEQ ID NO: 4689862 - DNA, 25 bp, Homo sapien
agcgggggtcatgggacaggctcct

SEQ ID NO: 4689863 - DNA, 25 bp, Homo sapien
acaatggggatgtgagcgggggtca

SEQ ID NO: 4689864 - DNA, 25 bp, Homo sapien
acaggctccttagggctgtgtatac

SEQ ID NO: 4689865 - DNA, 25 bp, Homo sapien
tcatgaggcgggcattggcggcatc

SEQ ID NO: 4689866 - DNA, 25 bp, Homo sapien
gcattggcggcatccaacgaggcaa

SEQ ID NO: 4689867 - DNA, 25 bp, Homo sapien
catccaacgaggcaatgcgcttctc

SEQ ID NO: 4689868 - DNA, 25 bp, Homo sapien
agggcactcatgaggcgggcattgg

SEQ ID NO: 4689869 - DNA, 25 bp, Homo sapien
gccgttacgggcttgcatgctgtac

SEQ ID NO: 4689870 - DNA, 25 bp, Homo sapien
gagatgccgttacgggcttgcatgc

SEQ ID NO: 4689871 - DNA, 25 bp, Homo sapien
gggagatgccgttacgggcttgcat

SEQ ID NO: 4689872 - DNA, 25 bp, Homo sapien
aatctgcaatttggtggggttggtg

SEQ ID NO: 4689873 - DNA, 25 bp, Homo sapien
tatctggcaatacaactaaggcagg

SEQ ID NO: 4689874 - DNA, 25 bp, Homo sapien
ggcagatacagtgctcagagccatc

SEQ ID NO: 4689875 - DNA, 25 bp, Homo sapien
tcacagttatccaccttctcagggc

SEQ ID NO: 4689876 - DNA, 25 bp, Homo sapien
gggcctgcaggcgttagaatctttt

SEQ ID NO: 4689877 - DNA, 25 bp, Homo sapien
cccgagctcagggtggacgcagtat

SEQ ID NO: 4689878 - DNA, 25 bp, Homo sapien
tctgtggcacattccagctgcaggg

SEQ ID NO: 4689879 - DNA, 25 bp, Homo sapien
gcctagagctgaggaaaaccggccc

SEQ ID NO: 4689880 - DNA, 25 bp, Homo sapien
ttccagcaagcgagcaagcgggctt

SEQ ID NO: 4689881 - DNA, 25 bp, Homo sapien
cgggagcctccctgtattgctaggg

SEQ ID NO: 4689882 - DNA, 25 bp, Homo sapien
tcactgggcaatgggaggatgagac

SEQ ID NO: 4689883 - DNA, 25 bp, Homo sapien
cgaggtcactctacgaggcagcggt

SEQ ID NO: 4689884 - DNA, 25 bp, Homo sapien
tggcaccggccacagcgggtagcct

SEQ ID NO: 4689885 - DNA, 25 bp, Homo sapien
catttacaaaatcggcagacttgca

SEQ ID NO: 4689886 - DNA, 25 bp, Homo sapien
gcagcaccaggaccaaaggatatgt

SEQ ID NO: 4689887 - DNA, 25 bp, Homo sapien
ttgcactaggtaaataaggctctcg

SEQ ID NO: 4689888 - DNA, 25 bp, Homo sapien
cagctcccgggaactcaggttctct

SEQ ID NO: 4689889 - DNA, 25 bp, Homo sapien
ggcagtcggaaagagtcctcactga

SEQ ID NO: 4689890 - DNA, 25 bp, Homo sapien
cacccagaacatggaagttaagcaa

SEQ ID NO: 4689891 - DNA, 25 bp, Homo sapien
cgtgtggagctgtagcctcggtcct

SEQ ID NO: 4689892 - DNA, 25 bp, Homo sapien
catagttaaaagtcgcagctggagg

SEQ ID NO: 4689893 - DNA, 25 bp, Homo sapien
aaatgagaggttctatgaggcaggc

SEQ ID NO: 4689894 - DNA, 25 bp, Homo sapien
gttctatgaggcaggctagtggctt

SEQ ID NO: 4689895 - DNA, 25 bp, Homo sapien
ttctatgaggcaggctagtggcttg

SEQ ID NO: 4689896 - DNA, 25 bp, Homo sapien
gagaggttctatgaggcaggctagt

SEQ ID NO: 4689897 - DNA, 25 bp, Homo sapien
accacctccgctcttgcaagtggtt

SEQ ID NO: 4689898 - DNA, 25 bp, Homo sapien
gctcttgtgaactccttcatggctc

SEQ ID NO: 4689899 - DNA, 25 bp, Homo sapien
cccatgtgggcttgttggtgtacac

SEQ ID NO: 4689900 - DNA, 25 bp, Homo sapien
cccttggtgtgtctctttaagccac

SEQ ID NO: 4689901 - DNA, 25 bp, Homo sapien
gctgtgtggcctgggtgccgctcag

SEQ ID NO: 4689902 - DNA, 25 bp, Homo sapien
gagtccaaagccaactgacattttc

SEQ ID NO: 4689903 - DNA, 25 bp, Homo sapien
tgggtgccgctcagctccaaactcc

SEQ ID NO: 4689904 - DNA, 25 bp, Homo sapien
actgagtccaaagccaactgacatt

SEQ ID NO: 4689905 - DNA, 25 bp, Homo sapien
gacatctaaaacgtgacagatggca

SEQ ID NO: 4689906 - DNA, 25 bp, Homo sapien
gagtcatcagtcatcggacatatga

SEQ ID NO: 4689907 - DNA, 25 bp, Homo sapien
cctggtgatacaccctgtttctgag

SEQ ID NO: 4689908 - DNA, 25 bp, Homo sapien
caccttctattctgggctcacagga

SEQ ID NO: 4689909 - DNA, 25 bp, Homo sapien
tcctggaaaacggaagacgagagca

SEQ ID NO: 4689910 - DNA, 25 bp, Homo sapien
ctgtcctcctggaaaacggaagacg

SEQ ID NO: 4689911 - DNA, 25 bp, Homo sapien
tttcagggctggagcgccccaggca

SEQ ID NO: 4689912 - DNA, 25 bp, Homo sapien
gaaaacggaagacgagagcagcttt

SEQ ID NO: 4689913 - DNA, 25 bp, Homo sapien
aaacagcttgcaaagaatagttcat

SEQ ID NO: 4689914 - DNA, 25 bp, Homo sapien
atttttctcatgcaaaacagcttgc

SEQ ID NO: 4689915 - DNA, 25 bp, Homo sapien
gcaaaacagcttgcaaagaatagtt

SEQ ID NO: 4689916 - DNA, 25 bp, Homo sapien
tttttctcatgcaaaacagcttgca

SEQ ID NO: 4689917 - DNA, 25 bp, Homo sapien
tgtgagtcctgacttatgtcccgac

SEQ ID NO: 4689918 - DNA, 25 bp, Homo sapien
tgcacgcccatctatgcaacctcgg

SEQ ID NO: 4689919 - DNA, 25 bp, Homo sapien
cctgacttatgtcccgacccgggag

SEQ ID NO: 4689920 - DNA, 25 bp, Homo sapien
aacctcggacccagaagtgtgagtc

SEQ ID NO: 4689921 - DNA, 25 bp, Homo sapien
atgatggccggagcactgatgaggc

SEQ ID NO: 4689922 - DNA, 25 bp, Homo sapien
cagagatgatggccggagcactgat

SEQ ID NO: 4689923 - DNA, 25 bp, Homo sapien
tgatggccggagcactgatgaggct

SEQ ID NO: 4689924 - DNA, 25 bp, Homo sapien
gatggccggagcactgatgaggctg

SEQ ID NO: 4689925 - DNA, 25 bp, Homo sapien
tgcctggcccatcggtggacacacg

SEQ ID NO: 4689926 - DNA, 25 bp, Homo sapien
ttaggaccctgcattgccagagccc

SEQ ID NO: 4689927 - DNA, 25 bp, Homo sapien
tggacacacggccatcaagcacttg

SEQ ID NO: 4689928 - DNA, 25 bp, Homo sapien
ctctgtggtgggagcgttaggaccc

SEQ ID NO: 4689929 - DNA, 25 bp, Homo sapien
aaatgaactttaagcctggaacact

SEQ ID NO: 4689930 - DNA, 25 bp, Homo sapien
aatgaactttaagcctggaacacta

SEQ ID NO: 4689931 - DNA, 25 bp, Homo sapien
gaactttaagcctggaacactaaga

SEQ ID NO: 4689932 - DNA, 25 bp, Homo sapien
tgaactttaagcctggaacactaag

SEQ ID NO: 4689933 - DNA, 25 bp, Homo sapien
gttgttggtgttcccagacacatga

SEQ ID NO: 4689934 - DNA, 25 bp, Homo sapien
gtttggagttggaattcacattatc

SEQ ID NO: 4689935 - DNA, 25 bp, Homo sapien
gcccaatctcacaagagtttggagt

SEQ ID NO: 4689936 - DNA, 25 bp, Homo sapien
tcaaagctgttctaagttgttggtg

SEQ ID NO: 4689937 - DNA, 25 bp, Homo sapien
tcatttgagataagagtcccagggg

SEQ ID NO: 4689938 - DNA, 25 bp, Homo sapien
gatatagtctatagtgtagaacctg

SEQ ID NO: 4689939 - DNA, 25 bp, Homo sapien
gtcccaggggtagatgatatagtct

SEQ ID NO: 4689940 - DNA, 25 bp, Homo sapien
gtagaacctgcagatatcccccatc

SEQ ID NO: 4689941 - DNA, 25 bp, Homo sapien
gttcgttgctcatgaaacaccagct

SEQ ID NO: 4689942 - DNA, 25 bp, Homo sapien
cgtggcaggatctttcacaaaagta

SEQ ID NO: 4689943 - DNA, 25 bp, Homo sapien
tttctgttcgttgctcatgaaacac

SEQ ID NO: 4689944 - DNA, 25 bp, Homo sapien
gatggttttctgttcgttgctcatg

SEQ ID NO: 4689945 - DNA, 25 bp, Homo sapien
atttcattagaaggccctgcctaca

SEQ ID NO: 4689946 - DNA, 25 bp, Homo sapien
ggactgtatcttcatcaaccgtcat

SEQ ID NO: 4689947 - DNA, 25 bp, Homo sapien
attttaagctccttgaaactgtgga

SEQ ID NO: 4689948 - DNA, 25 bp, Homo sapien
gaaactgtggactgtatcttcatca

SEQ ID NO: 4689949 - DNA, 25 bp, Homo sapien
tggtcactagtgtggaatccttggc

SEQ ID NO: 4689950 - DNA, 25 bp, Homo sapien
gtcactagtgtggaatccttggcca

SEQ ID NO: 4689951 - DNA, 25 bp, Homo sapien
tccagtggtcactagtgtggaatcc

SEQ ID NO: 4689952 - DNA, 25 bp, Homo sapien
ttatgtccagtggtcactagtgtgg

SEQ ID NO: 4689953 - DNA, 25 bp, Homo sapien
gttgctatgatgggtaaatacccag

SEQ ID NO: 4689954 - DNA, 25 bp, Homo sapien
tgttgctatgatgggtaaataccca

SEQ ID NO: 4689955 - DNA, 25 bp, Homo sapien
tccttccccgatcttgcttggccaa

SEQ ID NO: 4689956 - DNA, 25 bp, Homo sapien
tccccgatcttgcttggccaagtct

SEQ ID NO: 4689957 - DNA, 25 bp, Homo sapien
tgctccttccccgatcttgcttggc

SEQ ID NO: 4689958 - DNA, 25 bp, Homo sapien
cttccccgatcttgcttggccaagt

SEQ ID NO: 4689959 - DNA, 25 bp, Homo sapien
acatgtagcaggattgactgatcca

SEQ ID NO: 4689960 - DNA, 25 bp, Homo sapien
gattgactgatccaaaaagctggat

SEQ ID NO: 4689961 - DNA, 25 bp, Homo sapien
gcaggattgactgatccaaaaagct

SEQ ID NO: 4689962 - DNA, 25 bp, Homo sapien
tagcaggattgactgatccaaaaag

SEQ ID NO: 4689963 - DNA, 25 bp, Homo sapien
tgggaggacgagcattctcaggtgc

SEQ ID NO: 4689964 - DNA, 25 bp, Homo sapien
ctgggaggacgagcattctcaggtg

SEQ ID NO: 4689965 - DNA, 25 bp, Homo sapien
aggacgagcattctcaggtgctgat

SEQ ID NO: 4689966 - DNA, 25 bp, Homo sapien
ggaggacgagcattctcaggtgctg

SEQ ID NO: 4689967 - DNA, 25 bp, Homo sapien
tggccccgggtgagccatttcttct

SEQ ID NO: 4689968 - DNA, 25 bp, Homo sapien
ggctggccccgggtgagccatttct

SEQ ID NO: 4689969 - DNA, 25 bp, Homo sapien
ctggccccgggtgagccatttcttc

SEQ ID NO: 4689970 - DNA, 25 bp, Homo sapien
gctggccccgggtgagccatttctt

SEQ ID NO: 4689971 - DNA, 25 bp, Homo sapien
gggagagctcatactaatcattagg

SEQ ID NO: 4689972 - DNA, 25 bp, Homo sapien
gttagatcattacccagcgcttcgg

SEQ ID NO: 4689973 - DNA, 25 bp, Homo sapien
catcttctaactgagagaggtctgc

SEQ ID NO: 4689974 - DNA, 25 bp, Homo sapien
tttgacaaatgggacaggtgccact

SEQ ID NO: 4689975 - DNA, 25 bp, Homo sapien
gagcgttctctttcccggcatctat

SEQ ID NO: 4689976 - DNA, 25 bp, Homo sapien
cggcatctatggtacccactcgcat

SEQ ID NO: 4689977 - DNA, 25 bp, Homo sapien
cgggagagcgttctctttcccggca

SEQ ID NO: 4689978 - DNA, 25 bp, Homo sapien
tctttcccggcatctatggtaccca

SEQ ID NO: 4689979 - DNA, 25 bp, Homo sapien
catttttggtggtatcactccagtc

SEQ ID NO: 4689980 - DNA, 25 bp, Homo sapien
ctctaaattggtggagcatggcttc

SEQ ID NO: 4689981 - DNA, 25 bp, Homo sapien
tatagtaccccagacaaagatctct

SEQ ID NO: 4689982 - DNA, 25 bp, Homo sapien
tatgacgtgctcatttgaagttgtg

SEQ ID NO: 4689983 - DNA, 25 bp, Homo sapien
tcgtaggtgtcacatatattgcttg

SEQ ID NO: 4689984 - DNA, 25 bp, Homo sapien
ccatggtggtggagggcctttatgg

SEQ ID NO: 4689985 - DNA, 25 bp, Homo sapien
cctttatgggcaggctgtttctgga

SEQ ID NO: 4689986 - DNA, 25 bp, Homo sapien
tggctagccggtttgaggaagacct

SEQ ID NO: 4689987 - DNA, 25 bp, Homo sapien
tccctgggcagtggtagaaggcgcc

SEQ ID NO: 4689988 - DNA, 25 bp, Homo sapien
gctggatcggtgatgcccgtagcct

SEQ ID NO: 4689989 - DNA, 25 bp, Homo sapien
tagaggctggatcggtgatgcccgt

SEQ ID NO: 4689990 - DNA, 25 bp, Homo sapien
ctagaggctggatcggtgatgcccg

SEQ ID NO: 4689991 - DNA, 25 bp, Homo sapien
gaggctggatcggtgatgcccgtag

SEQ ID NO: 4689992 - DNA, 25 bp, Homo sapien
cttgtctccaagcacatctcttggg

SEQ ID NO: 4689993 - DNA, 25 bp, Homo sapien
ccaagcacatctcttgggccctgtg

SEQ ID NO: 4689994 - DNA, 25 bp, Homo sapien
tccaagcacatctcttgggccctgt

SEQ ID NO: 4689995 - DNA, 25 bp, Homo sapien
gtctccaagcacatctcttgggccc

SEQ ID NO: 4689996 - DNA, 25 bp, Homo sapien
aaagtggctgtgatcagagacactc

SEQ ID NO: 4689997 - DNA, 25 bp, Homo sapien
gaaaatgtccccagcctcgttgatg

SEQ ID NO: 4689998 - DNA, 25 bp, Homo sapien
tcagagacactctgcgcctcatgga

SEQ ID NO: 4689999 - DNA, 25 bp, Homo sapien
tcgttgatgaagaagtgaaagtggc

SEQ ID NO: 4690000 - DNA, 25 bp, Homo sapien
tctggagcccaagagaggtacgctc

SEQ ID NO: 4690001 - DNA, 25 bp, Homo sapien
gcatcacccaggattagcgtttgaa

SEQ ID NO: 4690002 - DNA, 25 bp, Homo sapien
ggtgggttcccataagcatttactg

SEQ ID NO: 4690003 - DNA, 25 bp, Homo sapien
tccaggaagtggttggcatcaccca

SEQ ID NO: 4690004 - DNA, 25 bp, Homo sapien
ttcttttcatgagtgccaggtgtgc

SEQ ID NO: 4690005 - DNA, 25 bp, Homo sapien
gagcacccttttacttctgccacaa

SEQ ID NO: 4690006 - DNA, 25 bp, Homo sapien
ggactcagccaattctccaagaaag

SEQ ID NO: 4690007 - DNA, 25 bp, Homo sapien
tctgccacaacaagacattccaggc

SEQ ID NO: 4690008 - DNA, 25 bp, Homo sapien
tattataaactccagactacattgt

SEQ ID NO: 4690009 - DNA, 25 bp, Homo sapien
tatagtatgagaaccttataacact

SEQ ID NO: 4690010 - DNA, 25 bp, Homo sapien
tataacactcatagtacttccattt

SEQ ID NO: 4690011 - DNA, 25 bp, Homo sapien
ttcatgcagtgagggtcttttggtg

SEQ ID NO: 4690012 - DNA, 25 bp, Homo sapien
tcgggtccatccaggtgtatactct

SEQ ID NO: 4690013 - DNA, 25 bp, Homo sapien
agtgcatgggccttgaaactgcgca

SEQ ID NO: 4690014 - DNA, 25 bp, Homo sapien
gagggttacagttattcatgcgtga

SEQ ID NO: 4690015 - DNA, 25 bp, Homo sapien
tagcacttggtaccctcatttgcaa

SEQ ID NO: 4690016 - DNA, 25 bp, Homo sapien
gccccgtgctaggtggtccaaacat

SEQ ID NO: 4690017 - DNA, 25 bp, Homo sapien
gaggttacgtgcctacccatgaaga

SEQ ID NO: 4690018 - DNA, 25 bp, Homo sapien
tgttcccatcgaggaaacagacttg

SEQ ID NO: 4690019 - DNA, 25 bp, Homo sapien
aataccctgattgtaccatgtgcac

SEQ ID NO: 4690020 - DNA, 25 bp, Homo sapien
tgcctgacactgagttgatgcataa

SEQ ID NO: 4690021 - DNA, 25 bp, Homo sapien
ccagagggagaggtgtgtttataaa

SEQ ID NO: 4690022 - DNA, 25 bp, Homo sapien
gggcttgaatgagagactaagttca

SEQ ID NO: 4690023 - DNA, 25 bp, Homo sapien
cctgctagaacgtgggtgaatttgc

SEQ ID NO: 4690024 - DNA, 25 bp, Homo sapien
tatatccctggtactaacaaagtgc

SEQ ID NO: 4690025 - DNA, 25 bp, Homo sapien
cccagcgctgttttaggagcaagaa

SEQ ID NO: 4690026 - DNA, 25 bp, Homo sapien
cattactgcatgaagtcctgagggc

SEQ ID NO: 4690027 - DNA, 25 bp, Homo sapien
caacagtatctcttgcagcccatgc

SEQ ID NO: 4690028 - DNA, 25 bp, Homo sapien
aagctgcaagcggagctcgggccac

SEQ ID NO: 4690029 - DNA, 25 bp, Homo sapien
gtgcaccacgctcgggcctgcttgt

SEQ ID NO: 4690030 - DNA, 25 bp, Homo sapien
tggacaggacgacctcagaggtctc

SEQ ID NO: 4690031 - DNA, 25 bp, Homo sapien
tccgccagctcaagtggaaggaggt

SEQ ID NO: 4690032 - DNA, 25 bp, Homo sapien
cccgcttctcctcgccactccgagt

SEQ ID NO: 4690033 - DNA, 25 bp, Homo sapien
tcccgcttctcctcgccactccgag

SEQ ID NO: 4690034 - DNA, 25 bp, Homo sapien
tctcctcgccactccgagttctgcg

SEQ ID NO: 4690035 - DNA, 25 bp, Homo sapien
gcttctcctcgccactccgagttct

SEQ ID NO: 4690036 - DNA, 25 bp, Homo sapien
gggactgagcctcctgcttgaggta

SEQ ID NO: 4690037 - DNA, 25 bp, Homo sapien
agagttatcccagcgagtgttggcg

SEQ ID NO: 4690038 - DNA, 25 bp, Homo sapien
tcctcctccgtcctatcgagagtta

SEQ ID NO: 4690039 - DNA, 25 bp, Homo sapien
cctgcttgaggtagttgtttttact

SEQ ID NO: 4690040 - DNA, 25 bp, Homo sapien
catcccatcgggagctccctgagaa

SEQ ID NO: 4690041 - DNA, 25 bp, Homo sapien
ctcaactcgagtgggaatctatagg

SEQ ID NO: 4690042 - DNA, 25 bp, Homo sapien
tatagggggcttacccatgcccatg

SEQ ID NO: 4690043 - DNA, 25 bp, Homo sapien
ggaaaagtgcctcccctcttatctg

SEQ ID NO: 4690044 - DNA, 25 bp, Homo sapien
gaggtcataaaagcagatccaagag

SEQ ID NO: 4690045 - DNA, 25 bp, Homo sapien
tgtaaaacctaaggcaacaatgccc

SEQ ID NO: 4690046 - DNA, 25 bp, Homo sapien
tagagaatcataaagccaagaggga

SEQ ID NO: 4690047 - DNA, 25 bp, Homo sapien
tcaggaaagcaattaccctagggtg

SEQ ID NO: 4690048 - DNA, 25 bp, Homo sapien
gggtactcggtgcacagatatcata

SEQ ID NO: 4690049 - DNA, 25 bp, Homo sapien
tacgttccctagttcacctgtcagg

SEQ ID NO: 4690050 - DNA, 25 bp, Homo sapien
ctgagtgatcggttctgccaggcgc

SEQ ID NO: 4690051 - DNA, 25 bp, Homo sapien
ttgttctgaccctgagcttgccagc

SEQ ID NO: 4690052 - DNA, 25 bp, Homo sapien
ccctagaagaatatgtagagcaggc

SEQ ID NO: 4690053 - DNA, 25 bp, Homo sapien
cctgtctgtgggaccttgaggagcc

SEQ ID NO: 4690054 - DNA, 25 bp, Homo sapien
gtgctgtcccttcccgctgtctgga

SEQ ID NO: 4690055 - DNA, 25 bp, Homo sapien
gagtctaagctcgtggaaaacttcc

SEQ ID NO: 4690056 - DNA, 25 bp, Homo sapien
gtcacgacagttgattcctggctct

SEQ ID NO: 4690057 - DNA, 25 bp, Homo sapien
tgcagtcctttggtgccagttggtg

SEQ ID NO: 4690058 - DNA, 25 bp, Homo sapien
caatgtgagggtcacgacagttgat

SEQ ID NO: 4690059 - DNA, 25 bp, Homo sapien
tgggccgccatcagatcttcagagg

SEQ ID NO: 4690060 - DNA, 25 bp, Homo sapien
gcccatgcggtttgcatcgactgat

SEQ ID NO: 4690061 - DNA, 25 bp, Homo sapien
gacaacgactgatgaaaacgcccat

SEQ ID NO: 4690062 - DNA, 25 bp, Homo sapien
catggcagccgcttttatttctgga

SEQ ID NO: 4690063 - DNA, 25 bp, Homo sapien
cactcggtcatgtgctcagacaacg

SEQ ID NO: 4690064 - DNA, 25 bp, Homo sapien
ctctctaccccaccctgtcgcatct

SEQ ID NO: 4690065 - DNA, 25 bp, Homo sapien
accccaccctgtcgcatcttgcagt

SEQ ID NO: 4690066 - DNA, 25 bp, Homo sapien
tctaccccaccctgtcgcatcttgc

SEQ ID NO: 4690067 - DNA, 25 bp, Homo sapien
cccaccctgtcgcatcttgcagtgg

SEQ ID NO: 4690068 - DNA, 25 bp, Homo sapien
ggctgcggcttctcgggcctgggcc

SEQ ID NO: 4690069 - DNA, 25 bp, Homo sapien
cggaggacaggcaagggagacatgg

SEQ ID NO: 4690070 - DNA, 25 bp, Homo sapien
gggagacatggggctgcggcttctc

SEQ ID NO: 4690071 - DNA, 25 bp, Homo sapien
gagacatggggctgcggcttctcgg

SEQ ID NO: 4690072 - DNA, 25 bp, Homo sapien
ctgcagccgtcatgccggggatagt

SEQ ID NO: 4690073 - DNA, 25 bp, Homo sapien
ccggggatagtggagctgcccactc

SEQ ID NO: 4690074 - DNA, 25 bp, Homo sapien
gtcatgccggggatagtggagctgc

SEQ ID NO: 4690075 - DNA, 25 bp, Homo sapien
ggctgcagccgtcatgccggggata

SEQ ID NO: 4690076 - DNA, 25 bp, Homo sapien
tgttaggatccggagtctcagtgga

SEQ ID NO: 4690077 - DNA, 25 bp, Homo sapien
ttccagctgttaggatccggagtct

SEQ ID NO: 4690078 - DNA, 25 bp, Homo sapien
gatccggagtctcagtggatacggc

SEQ ID NO: 4690079 - DNA, 25 bp, Homo sapien
cggagtctcagtggatacggcatca

SEQ ID NO: 4690080 - DNA, 25 bp, Homo sapien
catattccccgatatatttgctccc

SEQ ID NO: 4690081 - DNA, 25 bp, Homo sapien
gatatatttgctccctgtgtactcc

SEQ ID NO: 4690082 - DNA, 25 bp, Homo sapien
ccccgatatatttgctccctgtgta

SEQ ID NO: 4690083 - DNA, 25 bp, Homo sapien
tcccatctacatattccccgatata

SEQ ID NO: 4690084 - DNA, 25 bp, Homo sapien
gctgatggtccaacttgctgaatac

SEQ ID NO: 4690085 - DNA, 25 bp, Homo sapien
caacacagattcaacagtgatcaag

SEQ ID NO: 4690086 - DNA, 25 bp, Homo sapien
gattcaacagtgatcaaggcagatg

SEQ ID NO: 4690087 - DNA, 25 bp, Homo sapien
ttttgtcagggactatgctgatggt

SEQ ID NO: 4690088 - DNA, 25 bp, Homo sapien
aggatgtacttggctttgccctcca

SEQ ID NO: 4690089 - DNA, 25 bp, Homo sapien
catatattgtttcggtagggaggat

SEQ ID NO: 4690090 - DNA, 25 bp, Homo sapien
tattgtttcggtagggaggatgtac

SEQ ID NO: 4690091 - DNA, 25 bp, Homo sapien
tccccaacatatattgtttcggtag

SEQ ID NO: 4690092 - DNA, 25 bp, Homo sapien
tatggccaatccgttttcccaaatg

SEQ ID NO: 4690093 - DNA, 25 bp, Homo sapien
gttccctcgccgtgaaacatgccat

SEQ ID NO: 4690094 - DNA, 25 bp, Homo sapien
aatggcgtcgtattggcttccgctg

SEQ ID NO: 4690095 - DNA, 25 bp, Homo sapien
acagggttccctcgccgtgaaacat

SEQ ID NO: 4690096 - DNA, 25 bp, Homo sapien
catcatagtgcagcccatctgagaa

SEQ ID NO: 4690097 - DNA, 25 bp, Homo sapien
gaggatctctgtgtaaaacctccga

SEQ ID NO: 4690098 - DNA, 25 bp, Homo sapien
catagccgtcgcagtaatgccagtt

SEQ ID NO: 4690099 - DNA, 25 bp, Homo sapien
caggcttcaagccattgaggatctc

SEQ ID NO: 4690100 - DNA, 25 bp, Homo sapien
tccatattggtgagttgagccatac

SEQ ID NO: 4690101 - DNA, 25 bp, Homo sapien
tccttgactaccctcgtgactgggt

SEQ ID NO: 4690102 - DNA, 25 bp, Homo sapien
gaaagcggttcctatagtccttgac

SEQ ID NO: 4690103 - DNA, 25 bp, Homo sapien
gaagccgtctccacaatcgtaatag

SEQ ID NO: 4690104 - DNA, 25 bp, Homo sapien
tcaagtgtgtgcatacatttgtaca

SEQ ID NO: 4690105 - DNA, 25 bp, Homo sapien
tgaagagaaaacgtgctgcagtgtc

SEQ ID NO: 4690106 - DNA, 25 bp, Homo sapien
catcaagtgtgtgcatacatttgta

SEQ ID NO: 4690107 - DNA, 25 bp, Homo sapien
gtgctgcagtgtcggaagaaaccta

SEQ ID NO: 4690108 - DNA, 25 bp, Homo sapien
tcaggatgccaacaggaagcactgt

SEQ ID NO: 4690109 - DNA, 25 bp, Homo sapien
ttgtgggggtagattggaatgcagc

SEQ ID NO: 4690110 - DNA, 25 bp, Homo sapien
cactgtttgtgggggtagattggaa

SEQ ID NO: 4690111 - DNA, 25 bp, Homo sapien
attggaatgcagcagaaagaggtcc

SEQ ID NO: 4690112 - DNA, 25 bp, Homo sapien
ggatattctttgaggatggtactga

SEQ ID NO: 4690113 - DNA, 25 bp, Homo sapien
gaatcttgacggcatttctgatgat

SEQ ID NO: 4690114 - DNA, 25 bp, Homo sapien
tgcttgattcgacatttcagacaac

SEQ ID NO: 4690115 - DNA, 25 bp, Homo sapien
tctgatgatcaggatattctttgag

SEQ ID NO: 4690116 - DNA, 25 bp, Homo sapien
taatgactttgcagggttactgtgg

SEQ ID NO: 4690117 - DNA, 25 bp, Homo sapien
actttgcagggttactgtggagatt

SEQ ID NO: 4690118 - DNA, 25 bp, Homo sapien
taacaaggataatgactttgcaggg

SEQ ID NO: 4690119 - DNA, 25 bp, Homo sapien
ggataatgactttgcagggttactg

SEQ ID NO: 4690120 - DNA, 25 bp, Homo sapien
gataaagcatggatgtccccgcgtg

SEQ ID NO: 4690121 - DNA, 25 bp, Homo sapien
taacaacaccgcagataaagcatgg

SEQ ID NO: 4690122 - DNA, 25 bp, Homo sapien
ttcattacggtgctgctaacaacac

SEQ ID NO: 4690123 - DNA, 25 bp, Homo sapien
cagcctccaggtgattataacattt

SEQ ID NO: 4690124 - DNA, 25 bp, Homo sapien
tgaggaacttttctgcaactcccgt

SEQ ID NO: 4690125 - DNA, 25 bp, Homo sapien
cagaggtgaaggtgtcttcccgagc

SEQ ID NO: 4690126 - DNA, 25 bp, Homo sapien
gagcttacccagctcatgtgagtgg

SEQ ID NO: 4690127 - DNA, 25 bp, Homo sapien
tgggtgcagagtgatagccaagtct

SEQ ID NO: 4690128 - DNA, 25 bp, Homo sapien
tgcttcttttggcccctaatccctg

SEQ ID NO: 4690129 - DNA, 25 bp, Homo sapien
tgcaagtggacgatggaccgaaggg

SEQ ID NO: 4690130 - DNA, 25 bp, Homo sapien
ggctgcaagtggacgatggaccgaa

SEQ ID NO: 4690131 - DNA, 25 bp, Homo sapien
agcctctgcgttgaccctctgcttc

SEQ ID NO: 4690132 - DNA, 25 bp, Homo sapien
gaggaaccaagtgccatggccaagg

SEQ ID NO: 4690133 - DNA, 25 bp, Homo sapien
gaaccaagtgccatggccaaggtca

SEQ ID NO: 4690134 - DNA, 25 bp, Homo sapien
tcagaggaaccaagtgccatggcca

SEQ ID NO: 4690135 - DNA, 25 bp, Homo sapien
accaagtgccatggccaaggtcact

SEQ ID NO: 4690136 - DNA, 25 bp, Homo sapien
tgtagcaaggtgctccccggacagg

SEQ ID NO: 4690137 - DNA, 25 bp, Homo sapien
atgctagaatcatcctctgtagcaa

SEQ ID NO: 4690138 - DNA, 25 bp, Homo sapien
gatggagaggactgatgcagtgtcc

SEQ ID NO: 4690139 - DNA, 25 bp, Homo sapien
aatgctagaatcatcctctgtagca

SEQ ID NO: 4690140 - DNA, 25 bp, Homo sapien
tctcttaggaaggtcccatgctgga

SEQ ID NO: 4690141 - DNA, 25 bp, Homo sapien
gactctcaggaaatcatggccaatt

SEQ ID NO: 4690142 - DNA, 25 bp, Homo sapien
taacatctctgtgtatggacagctg

SEQ ID NO: 4690143 - DNA, 25 bp, Homo sapien
gcctcatattaggaagcacttccgt

SEQ ID NO: 4690144 - DNA, 25 bp, Homo sapien
tgaagctgcgagtgtgtgcacagac

SEQ ID NO: 4690145 - DNA, 25 bp, Homo sapien
gtgtgtgtgtattcccatccaactg

SEQ ID NO: 4690146 - DNA, 25 bp, Homo sapien
tggcaccagagttacgctcagtgaa

SEQ ID NO: 4690147 - DNA, 25 bp, Homo sapien
ggagaaatgatttgccccaattcct

SEQ ID NO: 4690148 - DNA, 25 bp, Homo sapien
caaactgggtgtattgtgctgaacc

SEQ ID NO: 4690149 - DNA, 25 bp, Homo sapien
gctattcgaatcagtgcagctgcaa

SEQ ID NO: 4690150 - DNA, 25 bp, Homo sapien
cagcagtaacccctgaaaccagaca

SEQ ID NO: 4690151 - DNA, 25 bp, Homo sapien
agttaagcgctggtggagcccactt

SEQ ID NO: 4690152 - DNA, 25 bp, Homo sapien
gtacgggtgatccactcatgctcgt

SEQ ID NO: 4690153 - DNA, 25 bp, Homo sapien
tttcgacaggtacgggtgatccact

SEQ ID NO: 4690154 - DNA, 25 bp, Homo sapien
ctagccctttcgacaggtacgggtg

SEQ ID NO: 4690155 - DNA, 25 bp, Homo sapien
caggtacgggtgatccactcatgct

SEQ ID NO: 4690156 - DNA, 25 bp, Homo sapien
taaaatcaggttctagaactacagc

SEQ ID NO: 4690157 - DNA, 25 bp, Homo sapien
tcgggcctgtgacccacgatctcat

SEQ ID NO: 4690158 - DNA, 25 bp, Homo sapien
ggcagccacagagttcacggctcgg

SEQ ID NO: 4690159 - DNA, 25 bp, Homo sapien
ccccagggcagccaatgctagtagg

SEQ ID NO: 4690160 - DNA, 25 bp, Homo sapien
catttccagtgcgttcgggcttcga

SEQ ID NO: 4690161 - DNA, 25 bp, Homo sapien
tgggttcgagtctggtccagcccaa

SEQ ID NO: 4690162 - DNA, 25 bp, Homo sapien
tcactggagtgtcgcattctgagcc

SEQ ID NO: 4690163 - DNA, 25 bp, Homo sapien
cctactcggacgtcattcatggtgg

SEQ ID NO: 4690164 - DNA, 25 bp, Homo sapien
ggcgcagcgctgagaatcccgacgc

SEQ ID NO: 4690165 - DNA, 25 bp, Homo sapien
taggcgctgatagcgccgatgcgcc

SEQ ID NO: 4690166 - DNA, 25 bp, Homo sapien
acacaggcgaatcaagaggaggcga

SEQ ID NO: 4690167 - DNA, 25 bp, Homo sapien
tattgtccgtctgaataggcgctga

SEQ ID NO: 4690168 - DNA, 25 bp, Homo sapien
actacttaagtcatctttccaaatc

SEQ ID NO: 4690169 - DNA, 25 bp, Homo sapien
tcttcaaaccaactacttaagtcat

SEQ ID NO: 4690170 - DNA, 25 bp, Homo sapien
aatctatcttcaaaccaactactta

SEQ ID NO: 4690171 - DNA, 25 bp, Homo sapien
accaactacttaagtcatctttcca

SEQ ID NO: 4690172 - DNA, 25 bp, Homo sapien
cgtggggtgcttcttctaagtgcct

SEQ ID NO: 4690173 - DNA, 25 bp, Homo sapien
gccagcatgtccacgtggggtgctt

SEQ ID NO: 4690174 - DNA, 25 bp, Homo sapien
ttctctcgttcacttactggcatag

SEQ ID NO: 4690175 - DNA, 25 bp, Homo sapien
cttactggcatagactgcagttctc

SEQ ID NO: 4690176 - DNA, 25 bp, Homo sapien
tctagaacagcatggaaatctcgaa

SEQ ID NO: 4690177 - DNA, 25 bp, Homo sapien
tggtctccacacctaaaatcgtctg

SEQ ID NO: 4690178 - DNA, 25 bp, Homo sapien
tattcaacggagcacaatcacatgt

SEQ ID NO: 4690179 - DNA, 25 bp, Homo sapien
tgatgcagagtatccagcagcgcct

SEQ ID NO: 4690180 - DNA, 25 bp, Homo sapien
gagtaatgacccttcgcctgtagga

SEQ ID NO: 4690181 - DNA, 25 bp, Homo sapien
ttcgcagccagaaatcgggaagcca

SEQ ID NO: 4690182 - DNA, 25 bp, Homo sapien
ttcgcctgtaggaattcgcagccag

SEQ ID NO: 4690183 - DNA, 25 bp, Homo sapien
ctggcccggaaataacaatccgagt

SEQ ID NO: 4690184 - DNA, 25 bp, Homo sapien
cacgaggtgagttcggccgcgacat

SEQ ID NO: 4690185 - DNA, 25 bp, Homo sapien
tttccgggcatgagctgagagcacc

SEQ ID NO: 4690186 - DNA, 25 bp, Homo sapien
ggacgcgtctagaggtccgtctgac

SEQ ID NO: 4690187 - DNA, 25 bp, Homo sapien
aggcggcgcaggcttaacgcgtcac

SEQ ID NO: 4690188 - DNA, 25 bp, Homo sapien
caggttactaaggaaagactcgtgc

SEQ ID NO: 4690189 - DNA, 25 bp, Homo sapien
aaagactcgtgcgacggcggcgacc

SEQ ID NO: 4690190 - DNA, 25 bp, Homo sapien
ctaaggaaagactcgtgcgacggcg

SEQ ID NO: 4690191 - DNA, 25 bp, Homo sapien
accgcagctgcgcggacgtcgtgac

SEQ ID NO: 4690192 - DNA, 25 bp, Homo sapien
gcacttcctaggcacgtgaccttaa

SEQ ID NO: 4690193 - DNA, 25 bp, Homo sapien
gaaaactccgagtcttggttccagc

SEQ ID NO: 4690194 - DNA, 25 bp, Homo sapien
cttaaatcggtcaaactctcaggac

SEQ ID NO: 4690195 - DNA, 25 bp, Homo sapien
ggtcaaactctcaggacttccgtct

SEQ ID NO: 4690196 - DNA, 25 bp, Homo sapien
aagcatttgcggcagctctaccact

SEQ ID NO: 4690197 - DNA, 25 bp, Homo sapien
ggtcagatcaggttttcattctttc

SEQ ID NO: 4690198 - DNA, 25 bp, Homo sapien
cataatcacacgtattcaaaaagca

SEQ ID NO: 4690199 - DNA, 25 bp, Homo sapien
caagtgatttctcctacgtagattt

SEQ ID NO: 4690200 - DNA, 25 bp, Homo sapien
cctagctccattactgactaaatat

SEQ ID NO: 4690201 - DNA, 25 bp, Homo sapien
gctttgccgtcaggaagacctggaa

SEQ ID NO: 4690202 - DNA, 25 bp, Homo sapien
tcttagggttaggaataattaatga

SEQ ID NO: 4690203 - DNA, 25 bp, Homo sapien
tgaggttatgcaagtaaagcccttg

SEQ ID NO: 4690204 - DNA, 25 bp, Homo sapien
taaaagatctaagtacaaagcttgc

SEQ ID NO: 4690205 - DNA, 25 bp, Homo sapien
cactgattaccaattaggatgccct

SEQ ID NO: 4690206 - DNA, 25 bp, Homo sapien
ggcagagcactagaagaggacttta

SEQ ID NO: 4690207 - DNA, 25 bp, Homo sapien
tcgtaccaattatcaagcaactcct

SEQ ID NO: 4690208 - DNA, 25 bp, Homo sapien
ctgaagacaatccttggaaacatcc

SEQ ID NO: 4690209 - DNA, 25 bp, Homo sapien
actgaagacaatccttggaaacatc

SEQ ID NO: 4690210 - DNA, 25 bp, Homo sapien
gactgaagacaatccttggaaacat

SEQ ID NO: 4690211 - DNA, 25 bp, Homo sapien
tgaagacaatccttggaaacatcca

SEQ ID NO: 4690212 - DNA, 25 bp, Homo sapien
aaggtagggtggaccatgcggaagc

SEQ ID NO: 4690213 - DNA, 25 bp, Homo sapien
caagataattgcgaaaggtagggtg

SEQ ID NO: 4690214 - DNA, 25 bp, Homo sapien
ctgcaagataattgcgaaaggtagg

SEQ ID NO: 4690215 - DNA, 25 bp, Homo sapien
accatgcggaagcactttaatccca

SEQ ID NO: 4690216 - DNA, 25 bp, Homo sapien
ttcagtgtaacttctgaaacgggtc

SEQ ID NO: 4690217 - DNA, 25 bp, Homo sapien
tcagtgtaacttctgaaacgggtct

SEQ ID NO: 4690218 - DNA, 25 bp, Homo sapien
gcaaaatggcggactggtacagctg

SEQ ID NO: 4690219 - DNA, 25 bp, Homo sapien
tcttggtagcaaaatggcggactgg

SEQ ID NO: 4690220 - DNA, 25 bp, Homo sapien
gcggactggtacagctgaataggcc

SEQ ID NO: 4690221 - DNA, 25 bp, Homo sapien
tggtagcaaaatggcggactggtac

SEQ ID NO: 4690222 - DNA, 25 bp, Homo sapien
gaagtaggagagaacgtcacatgtc

SEQ ID NO: 4690223 - DNA, 25 bp, Homo sapien
taatccaatgaaatagctgaggcac

SEQ ID NO: 4690224 - DNA, 25 bp, Homo sapien
tacctgccagctataattcaagggc

SEQ ID NO: 4690225 - DNA, 25 bp, Homo sapien
tcagtacatctgagatacctgccag

SEQ ID NO: 4690226 - DNA, 25 bp, Homo sapien
gactgcagtactgtaggcatcagga

SEQ ID NO: 4690227 - DNA, 25 bp, Homo sapien
gctgcttatgcactgtaactgtcta

SEQ ID NO: 4690228 - DNA, 25 bp, Homo sapien
cattaactatataggaacatgggca

SEQ ID NO: 4690229 - DNA, 25 bp, Homo sapien
tgtctattacactagaagactgcag

SEQ ID NO: 4690230 - DNA, 25 bp, Homo sapien
gaaaacttgacactatgatcataaa

SEQ ID NO: 4690231 - DNA, 25 bp, Homo sapien
gtgcaagagctgtctggagaaaact

SEQ ID NO: 4690232 - DNA, 25 bp, Homo sapien
gccttgtgcaagagctgtctggaga

SEQ ID NO: 4690233 - DNA, 25 bp, Homo sapien
gagaaaacttgacactatgatcata

SEQ ID NO: 4690234 - DNA, 25 bp, Homo sapien
tatattgagagtcttattgaaatta

SEQ ID NO: 4690235 - DNA, 25 bp, Homo sapien
ttgagagtcttattgaaattatcct

SEQ ID NO: 4690236 - DNA, 25 bp, Homo sapien
gagagtcttattgaaattatccttg

SEQ ID NO: 4690237 - DNA, 25 bp, Homo sapien
gcttctatcacagacttcatttctt

SEQ ID NO: 4690238 - DNA, 25 bp, Homo sapien
aacagttggcctagacagttctgac

SEQ ID NO: 4690239 - DNA, 25 bp, Homo sapien
aaagcctaatttaacagcaactgga

SEQ ID NO: 4690240 - DNA, 25 bp, Homo sapien
tgatgacaatttgcaaaagcctaat

SEQ ID NO: 4690241 - DNA, 25 bp, Homo sapien
gcctgcttgcaccatcagctgacaa

SEQ ID NO: 4690242 - DNA, 25 bp, Homo sapien
tccctcaatctgtccccagcgagaa

SEQ ID NO: 4690243 - DNA, 25 bp, Homo sapien
tcaatctgtccccagcgagaatctc

SEQ ID NO: 4690244 - DNA, 25 bp, Homo sapien
tatcgacataatgcatcaaatcctt

SEQ ID NO: 4690245 - DNA, 25 bp, Homo sapien
attcctaaatccgtatcgacataat

SEQ ID NO: 4690246 - DNA, 25 bp, Homo sapien
ctggtttaaagcaagcttcccgtca

SEQ ID NO: 4690247 - DNA, 25 bp, Homo sapien
gcgacttcatggagatctggctaat

SEQ ID NO: 4690248 - DNA, 25 bp, Homo sapien
ttaaagcaagcttcccgtcagcagt

SEQ ID NO: 4690249 - DNA, 25 bp, Homo sapien
ctgtggcgacttcatggagatctgg

SEQ ID NO: 4690250 - DNA, 25 bp, Homo sapien
agagccttttcacgctggccaagca

SEQ ID NO: 4690251 - DNA, 25 bp, Homo sapien
cacggagagagattttagcaaggcc

SEQ ID NO: 4690252 - DNA, 25 bp, Homo sapien
gaacacttcctcctgatatgaccca

SEQ ID NO: 4690253 - DNA, 25 bp, Homo sapien
gaggcattccactcacacaaggtac

SEQ ID NO: 4690254 - DNA, 25 bp, Homo sapien
ccacatttggcccattaaagtattg

SEQ ID NO: 4690255 - DNA, 25 bp, Homo sapien
tcaggccacatttggcccattaaag

SEQ ID NO: 4690256 - DNA, 25 bp, Homo sapien
catttggcccattaaagtattgttt

SEQ ID NO: 4690257 - DNA, 25 bp, Homo sapien
caggccacatttggcccattaaagt

SEQ ID NO: 4690258 - DNA, 25 bp, Homo sapien
ttggaagcactgtgctccatgcaat

SEQ ID NO: 4690259 - DNA, 25 bp, Homo sapien
actgtgctccatgcaatattctgca

SEQ ID NO: 4690260 - DNA, 25 bp, Homo sapien
tgcagaggtcacaaattggtggccc

SEQ ID NO: 4690261 - DNA, 25 bp, Homo sapien
caatggtcagtctagtataaaagga

SEQ ID NO: 4690262 - DNA, 25 bp, Homo sapien
gattccaggtactctaagactccta

SEQ ID NO: 4690263 - DNA, 25 bp, Homo sapien
gagatgggaccggattccaggtact

SEQ ID NO: 4690264 - DNA, 25 bp, Homo sapien
tggtggtagagatgggaccggattc

SEQ ID NO: 4690265 - DNA, 25 bp, Homo sapien
taagactcctaatccaggccaattc

SEQ ID NO: 4690266 - DNA, 25 bp, Homo sapien
tacaacagacgagataaaggaattc

SEQ ID NO: 4690267 - DNA, 25 bp, Homo sapien
gcaagtttatggaaggcagcaacta

SEQ ID NO: 4690268 - DNA, 25 bp, Homo sapien
gggtactctacggtcagcttcgaag

SEQ ID NO: 4690269 - DNA, 25 bp, Homo sapien
catcattaactctagctgcaggcaa

SEQ ID NO: 4690270 - DNA, 25 bp, Homo sapien
cagtggcataatcacggctcactgc

SEQ ID NO: 4690271 - DNA, 25 bp, Homo sapien
cccaagtagctgcaggaggaaaaaa

SEQ ID NO: 4690272 - DNA, 25 bp, Homo sapien
actcaggcttgagggcagtggcata

SEQ ID NO: 4690273 - DNA, 25 bp, Homo sapien
cccaggctcaggtgactctccacct

SEQ ID NO: 4690274 - DNA, 25 bp, Homo sapien
ttctcttatagccttgatagctgca

SEQ ID NO: 4690275 - DNA, 25 bp, Homo sapien
ctttctcttatagccttgatagctg

SEQ ID NO: 4690276 - DNA, 25 bp, Homo sapien
tttctcttatagccttgatagctgc

SEQ ID NO: 4690277 - DNA, 25 bp, Homo sapien
aggtatgctgctcagatcaccctcc

SEQ ID NO: 4690278 - DNA, 25 bp, Homo sapien
tgctgctcagatcaccctccaggag

SEQ ID NO: 4690279 - DNA, 25 bp, Homo sapien
tcaaaaccataaatactactccagt

SEQ ID NO: 4690280 - DNA, 25 bp, Homo sapien
ccataaatactactccagttttaca

SEQ ID NO: 4690281 - DNA, 25 bp, Homo sapien
ctatgatatgccaggcttcacacta

SEQ ID NO: 4690282 - DNA, 25 bp, Homo sapien
tgagcttcacatataatatcctatt

SEQ ID NO: 4690283 - DNA, 25 bp, Homo sapien
atgctaggctctgtttgagggccta

SEQ ID NO: 4690284 - DNA, 25 bp, Homo sapien
gctaggctctgtttgagggcctagg

SEQ ID NO: 4690285 - DNA, 25 bp, Homo sapien
acatgctaggctctgtttgagggcc

SEQ ID NO: 4690286 - DNA, 25 bp, Homo sapien
tacatgctaggctctgtttgagggc

SEQ ID NO: 4690287 - DNA, 25 bp, Homo sapien
gaacacagcatagtggctacaagcc

SEQ ID NO: 4690288 - DNA, 25 bp, Homo sapien
ccctgtcgccacagaaggatggaaa

SEQ ID NO: 4690289 - DNA, 25 bp, Homo sapien
gagggaggccatacaggatttttcc

SEQ ID NO: 4690290 - DNA, 25 bp, Homo sapien
taaatggcacctggaacaacagttg

SEQ ID NO: 4690291 - DNA, 25 bp, Homo sapien
cctggttaaaccagacataccattc

SEQ ID NO: 4690292 - DNA, 25 bp, Homo sapien
aaccagacataccattctgaaatac

SEQ ID NO: 4690293 - DNA, 25 bp, Homo sapien
tgctttcaaaggaccattctgtgac

SEQ ID NO: 4690294 - DNA, 25 bp, Homo sapien
aaaggaccattctgtgactgatgcc

SEQ ID NO: 4690295 - DNA, 25 bp, Homo sapien
ttttccgctagggtcagagagcctc

SEQ ID NO: 4690296 - DNA, 25 bp, Homo sapien
caccaggcagatcttccagtaacat

SEQ ID NO: 4690297 - DNA, 25 bp, Homo sapien
agagagcctctagcacaaggcaggg

SEQ ID NO: 4690298 - DNA, 25 bp, Homo sapien
tgtttgtacaagctccaccaggcag

SEQ ID NO: 4690299 - DNA, 25 bp, Homo sapien
cagaaagctcttcacagtcagtaat

SEQ ID NO: 4690300 - DNA, 25 bp, Homo sapien
cagtaatatgaagcttgggactgaa

SEQ ID NO: 4690301 - DNA, 25 bp, Homo sapien
atcaagagcccatgcttcatttaag

SEQ ID NO: 4690302 - DNA, 25 bp, Homo sapien
tgaaaaggacaaaaccatcaagagc

SEQ ID NO: 4690303 - DNA, 25 bp, Homo sapien
cattgagttggtgcgaaccttccgt

SEQ ID NO: 4690304 - DNA, 25 bp, Homo sapien
tgagttggtgcgaaccttccgtaaa

SEQ ID NO: 4690305 - DNA, 25 bp, Homo sapien
ctctattagcctaatggtgtcctct

SEQ ID NO: 4690306 - DNA, 25 bp, Homo sapien
ttgttcattgagttggtgcgaacct

SEQ ID NO: 4690307 - DNA, 25 bp, Homo sapien
ggtccataggcttaccaccaagaag

SEQ ID NO: 4690308 - DNA, 25 bp, Homo sapien
gaaaggcccgcctaatctctgaacc

SEQ ID NO: 4690309 - DNA, 25 bp, Homo sapien
ggagccagggcccagactattaatg

SEQ ID NO: 4690310 - DNA, 25 bp, Homo sapien
tccccaaggtcataggacatcaagt

SEQ ID NO: 4690311 - DNA, 25 bp, Homo sapien
gaagcgacaatcagccataaccttg

SEQ ID NO: 4690312 - DNA, 25 bp, Homo sapien
gagcggttgcctctccaatgtggga

SEQ ID NO: 4690313 - DNA, 25 bp, Homo sapien
tatctttaaaacatgcacgcacacg

SEQ ID NO: 4690314 - DNA, 25 bp, Homo sapien
gaagtatatataaggctctctactg

SEQ ID NO: 4690315 - DNA, 25 bp, Homo sapien
tagcaacagctgtgcattttttcag

SEQ ID NO: 4690316 - DNA, 25 bp, Homo sapien
catagcaacagctgtgcattttttc

SEQ ID NO: 4690317 - DNA, 25 bp, Homo sapien
atagcaacagctgtgcattttttca

SEQ ID NO: 4690318 - DNA, 25 bp, Homo sapien
ggtttcaccgtgctcaccagaatgg

SEQ ID NO: 4690319 - DNA, 25 bp, Homo sapien
caccgtgctcaccagaatggtctca

SEQ ID NO: 4690320 - DNA, 25 bp, Homo sapien
tttcaccgtgctcaccagaatggtc

SEQ ID NO: 4690321 - DNA, 25 bp, Homo sapien
tggggtttcaccgtgctcaccagaa

SEQ ID NO: 4690322 - DNA, 25 bp, Homo sapien
tctgccactgtgtcatcggccattt

SEQ ID NO: 4690323 - DNA, 25 bp, Homo sapien
ccactgtgtcatcggccatttggct

SEQ ID NO: 4690324 - DNA, 25 bp, Homo sapien
gccactgtgtcatcggccatttggc

SEQ ID NO: 4690325 - DNA, 25 bp, Homo sapien
tgccactgtgtcatcggccatttgg

SEQ ID NO: 4690326 - DNA, 25 bp, Homo sapien
gaaaatgggcctctagtaaagtgtc

SEQ ID NO: 4690327 - DNA, 25 bp, Homo sapien
aggtggtactaagcctgccaatggc

SEQ ID NO: 4690328 - DNA, 25 bp, Homo sapien
aactgggctctggagtattgctggc

SEQ ID NO: 4690329 - DNA, 25 bp, Homo sapien
tgggccttacaaggacaggcttctg

SEQ ID NO: 4690330 - DNA, 25 bp, Homo sapien
aaaactactgttatgggtgcctcac

SEQ ID NO: 4690331 - DNA, 25 bp, Homo sapien
tgatgataaacaggactggccaggt

SEQ ID NO: 4690332 - DNA, 25 bp, Homo sapien
gacgtgatatccaagacaaggcctg

SEQ ID NO: 4690333 - DNA, 25 bp, Homo sapien
ctatgagagccggtaatgagggtcc

SEQ ID NO: 4690334 - DNA, 25 bp, Homo sapien
ttgtctgtcaacaatgggcaggccc

SEQ ID NO: 4690335 - DNA, 25 bp, Homo sapien
gtatgtcactaccaagtaaatgttg

SEQ ID NO: 4690336 - DNA, 25 bp, Homo sapien
gaactatacctaactcataatggct

SEQ ID NO: 4690337 - DNA, 25 bp, Homo sapien
aacccagtatccgaagataagccac

SEQ ID NO: 4690338 - DNA, 25 bp, Homo sapien
tctgctacttgctaggtgtgtaacc

SEQ ID NO: 4690339 - DNA, 25 bp, Homo sapien
gcacatcaggcctcaatttgaatgc

SEQ ID NO: 4690340 - DNA, 25 bp, Homo sapien
tgtgtaaccctgcacaagaaacttc

SEQ ID NO: 4690341 - DNA, 25 bp, Homo sapien
cacctctatgtaaatgacgctgaca

SEQ ID NO: 4690342 - DNA, 25 bp, Homo sapien
gatttcggccactcatgaaagactg

SEQ ID NO: 4690343 - DNA, 25 bp, Homo sapien
tgtggaacccaagtacagaaaatct

SEQ ID NO: 4690344 - DNA, 25 bp, Homo sapien
tgtggcttaccccaaaagaggctcc

SEQ ID NO: 4690345 - DNA, 25 bp, Homo sapien
tgatcatgtgatgaccacttagggc

SEQ ID NO: 4690346 - DNA, 25 bp, Homo sapien
aattatatatggccaggcagagtgg

SEQ ID NO: 4690347 - DNA, 25 bp, Homo sapien
aaaattatatatggccaggcagagt

SEQ ID NO: 4690348 - DNA, 25 bp, Homo sapien
aaaaattatatatggccaggcagag

SEQ ID NO: 4690349 - DNA, 25 bp, Homo sapien
aaaaaaattatatatggccaggcag

SEQ ID NO: 4690350 - DNA, 25 bp, Homo sapien
gaacacgtgtaaagggtctagcatg

SEQ ID NO: 4690351 - DNA, 25 bp, Homo sapien
tcagcgaagacttgggaaccaaagc

SEQ ID NO: 4690352 - DNA, 25 bp, Homo sapien
tctagcatggaacctggccgactgt

SEQ ID NO: 4690353 - DNA, 25 bp, Homo sapien
gaacagcgcgaggtcccttttgagt

SEQ ID NO: 4690354 - DNA, 25 bp, Homo sapien
taagggagcatacactaggcaaaga

SEQ ID NO: 4690355 - DNA, 25 bp, Homo sapien
caagcgcttaataggcataggcagg

SEQ ID NO: 4690356 - DNA, 25 bp, Homo sapien
gagaaagggatcttcgggcacagct

SEQ ID NO: 4690357 - DNA, 25 bp, Homo sapien
taacttaacagcgtaggatggactg

SEQ ID NO: 4690358 - DNA, 25 bp, Homo sapien
tctgagccaagtgtctagagacccg

SEQ ID NO: 4690359 - DNA, 25 bp, Homo sapien
ggcaggccccttagaattagacaaa

SEQ ID NO: 4690360 - DNA, 25 bp, Homo sapien
taagatgtctagaaacgcctgaggc

SEQ ID NO: 4690361 - DNA, 25 bp, Homo sapien
tatctagggttagccatgttctgcc

SEQ ID NO: 4690362 - DNA, 25 bp, Homo sapien
tcattggaaaccagagaacttgccc

SEQ ID NO: 4690363 - DNA, 25 bp, Homo sapien
taacagctagctccttgagttgcct

SEQ ID NO: 4690364 - DNA, 25 bp, Homo sapien
ggctgcctagttgcgggtcagacaa

SEQ ID NO: 4690365 - DNA, 25 bp, Homo sapien
gaaaataatgtatgaggctgcctag

SEQ ID NO: 4690366 - DNA, 25 bp, Homo sapien
tgggtgttggaaccgagaaatggtc

SEQ ID NO: 4690367 - DNA, 25 bp, Homo sapien
ttggaaccgagaaatggtcagcacc

SEQ ID NO: 4690368 - DNA, 25 bp, Homo sapien
aaccgagaaatggtcagcaccttcc

SEQ ID NO: 4690369 - DNA, 25 bp, Homo sapien
ctccccacatcgtagtggattgtgg

SEQ ID NO: 4690370 - DNA, 25 bp, Homo sapien
aagtctggccccctgtaaccatatc

SEQ ID NO: 4690371 - DNA, 25 bp, Homo sapien
ttcagcagtcgtattcatcaaggcc

SEQ ID NO: 4690372 - DNA, 25 bp, Homo sapien
aaggcctctgctctaacccggggca

SEQ ID NO: 4690373 - DNA, 25 bp, Homo sapien
tcctcaggcccgatccaccttcggc

SEQ ID NO: 4690374 - DNA, 25 bp, Homo sapien
gaccacaagaaagaactgggtggtg

SEQ ID NO: 4690375 - DNA, 25 bp, Homo sapien
cacaagaaagaactgggtggtgagt

SEQ ID NO: 4690376 - DNA, 25 bp, Homo sapien
aactgggtggtgagtaggacgtgca

SEQ ID NO: 4690377 - DNA, 25 bp, Homo sapien
tggtgagtaggacgtgcagccggct

SEQ ID NO: 4690378 - DNA, 25 bp, Homo sapien
accagcaccacagatctcaacacag

SEQ ID NO: 4690379 - DNA, 25 bp, Homo sapien
tctgtgaccagcaccacagatctca

SEQ ID NO: 4690380 - DNA, 25 bp, Homo sapien
gtgaccagcaccacagatctcaaca

SEQ ID NO: 4690381 - DNA, 25 bp, Homo sapien
tgtgaccagcaccacagatctcaac

SEQ ID NO: 4690382 - DNA, 25 bp, Homo sapien
agggagacagagcaagccagggcag

SEQ ID NO: 4690383 - DNA, 25 bp, Homo sapien
ctagggagacagagcaagccagggc

SEQ ID NO: 4690384 - DNA, 25 bp, Homo sapien
ggagacagagcaagccagggcagac

SEQ ID NO: 4690385 - DNA, 25 bp, Homo sapien
tagggagacagagcaagccagggca

SEQ ID NO: 4690386 - DNA, 25 bp, Homo sapien
ccatgctcccctgggacaaaagcca

SEQ ID NO: 4690387 - DNA, 25 bp, Homo sapien
ttcccatgctcccctgggacaaaag

SEQ ID NO: 4690388 - DNA, 25 bp, Homo sapien
ccaagctgttcccatgctcccctgg

SEQ ID NO: 4690389 - DNA, 25 bp, Homo sapien
tgctcccctgggacaaaagccagct

SEQ ID NO: 4690390 - DNA, 25 bp, Homo sapien
gctcagagacgatgctcaatgctga

SEQ ID NO: 4690391 - DNA, 25 bp, Homo sapien
tgaggctcagagacgatgctcaatg

SEQ ID NO: 4690392 - DNA, 25 bp, Homo sapien
cactagatatagacaggaaactgag

SEQ ID NO: 4690393 - DNA, 25 bp, Homo sapien
ggcactagatatagacaggaaactg

SEQ ID NO: 4690394 - DNA, 25 bp, Homo sapien
gtgcgtgcgcctcgcacactgcccg

SEQ ID NO: 4690395 - DNA, 25 bp, Homo sapien
cgtgcgcctcgcacactgcccggag

SEQ ID NO: 4690396 - DNA, 25 bp, Homo sapien
gctggggtgcgggacgcagagtgca

SEQ ID NO: 4690397 - DNA, 25 bp, Homo sapien
cggctgctggggtgcgggacgcaga

SEQ ID NO: 4690398 - DNA, 25 bp, Homo sapien
cagcaagaaccagagcaagagactc

SEQ ID NO: 4690399 - DNA, 25 bp, Homo sapien
aggaacagcaagaaccagagcaaga

SEQ ID NO: 4690400 - DNA, 25 bp, Homo sapien
gcgtgggcgcccctgggtccgcgag

SEQ ID NO: 4690401 - DNA, 25 bp, Homo sapien
ggcgcccctgggtccgcgagcagga

SEQ ID NO: 4690402 - DNA, 25 bp, Homo sapien
tccactggcaatgggaatcaggatg

SEQ ID NO: 4690403 - DNA, 25 bp, Homo sapien
catgttctcccgaagtcttcaccag

SEQ ID NO: 4690404 - DNA, 25 bp, Homo sapien
ttaaaccccagatgaagcatcccgg

SEQ ID NO: 4690405 - DNA, 25 bp, Homo sapien
tcaggatgggttcccagacggttag

SEQ ID NO: 4690406 - DNA, 25 bp, Homo sapien
ggacctgtataccaagagtgcctgg

SEQ ID NO: 4690407 - DNA, 25 bp, Homo sapien
gacaagtggcttcactccctctggg

SEQ ID NO: 4690408 - DNA, 25 bp, Homo sapien
ggtctaacgcatctctctggcaggg

SEQ ID NO: 4690409 - DNA, 25 bp, Homo sapien
acaagatgggtcagcgaggcaacct

SEQ ID NO: 4690410 - DNA, 25 bp, Homo sapien
gtgggtgagaaatggaggtcagaga

SEQ ID NO: 4690411 - DNA, 25 bp, Homo sapien
gtgagaaatggaggtcagagaccat

SEQ ID NO: 4690412 - DNA, 25 bp, Homo sapien
gggtgagaaatggaggtcagagacc

SEQ ID NO: 4690413 - DNA, 25 bp, Homo sapien
ctgtgggtgagaaatggaggtcaga

SEQ ID NO: 4690414 - DNA, 25 bp, Homo sapien
gcatggatagtaacaacagggattc

SEQ ID NO: 4690415 - DNA, 25 bp, Homo sapien
ctggcatggatagtaacaacaggga

SEQ ID NO: 4690416 - DNA, 25 bp, Homo sapien
catggatagtaacaacagggattca

SEQ ID NO: 4690417 - DNA, 25 bp, Homo sapien
ggcatggatagtaacaacagggatt

SEQ ID NO: 4690418 - DNA, 25 bp, Homo sapien
cgaagcggacacagatgccctggtg

SEQ ID NO: 4690419 - DNA, 25 bp, Homo sapien
tgcagtcacactggtagcggtcaag

SEQ ID NO: 4690420 - DNA, 25 bp, Homo sapien
ggtcaaggccgaagcggacacagat

SEQ ID NO: 4690421 - DNA, 25 bp, Homo sapien
aatagcccgtgcgggtgcagtcaca

SEQ ID NO: 4690422 - DNA, 25 bp, Homo sapien
ctgggccgcagtgaattccggagcc

SEQ ID NO: 4690423 - DNA, 25 bp, Homo sapien
aaggtggcattgacaaactcccaga

SEQ ID NO: 4690424 - DNA, 25 bp, Homo sapien
aaccagcgcccgtgagtgagcagga

SEQ ID NO: 4690425 - DNA, 25 bp, Homo sapien
agtgaattccggagccaggtccaca

SEQ ID NO: 4690426 - DNA, 25 bp, Homo sapien
gggactggggataaggttggagcgc

SEQ ID NO: 4690427 - DNA, 25 bp, Homo sapien
ggactggggataaggttggagcgca

SEQ ID NO: 4690428 - DNA, 25 bp, Homo sapien
ccagctgatgtagtcatgtgctgag

SEQ ID NO: 4690429 - DNA, 25 bp, Homo sapien
ctcccagctgatgtagtcatgtgct

SEQ ID NO: 4690430 - DNA, 25 bp, Homo sapien
cagagggcagaatacgagtgtaata

SEQ ID NO: 4690431 - DNA, 25 bp, Homo sapien
ggggcaatctttaggcacagagggc

SEQ ID NO: 4690432 - DNA, 25 bp, Homo sapien
gcacagagggcagaatacgagtgta

SEQ ID NO: 4690433 - DNA, 25 bp, Homo sapien
gcagaatacgagtgtaatagctcac

SEQ ID NO: 4690434 - DNA, 25 bp, Homo sapien
tatcaggcatcatagactctcccca

SEQ ID NO: 4690435 - DNA, 25 bp, Homo sapien
gcttgctccccttaaaataggtgtg

SEQ ID NO: 4690436 - DNA, 25 bp, Homo sapien
catggcagagaaccagtgggtagaa

SEQ ID NO: 4690437 - DNA, 25 bp, Homo sapien
gtccaaaaggactagcaggcttgct

SEQ ID NO: 4690438 - DNA, 25 bp, Homo sapien
aggcaaacatgaggttggtgccttg

SEQ ID NO: 4690439 - DNA, 25 bp, Homo sapien
tgggggtcaggtatgaacttcctcc

SEQ ID NO: 4690440 - DNA, 25 bp, Homo sapien
gccttgggggtcaggtatgaacttc

SEQ ID NO: 4690441 - DNA, 25 bp, Homo sapien
aaagaaggcaaacatgaggttggtg

SEQ ID NO: 4690442 - DNA, 25 bp, Homo sapien
cccaaggccttggtgaagccaggac

SEQ ID NO: 4690443 - DNA, 25 bp, Homo sapien
ccttggtgaagccaggacccatctt

SEQ ID NO: 4690444 - DNA, 25 bp, Homo sapien
aagccaggacccatcttgccagaag

SEQ ID NO: 4690445 - DNA, 25 bp, Homo sapien
gacccatcttgccagaagttttgaa

SEQ ID NO: 4690446 - DNA, 25 bp, Homo sapien
taaagagccgcagttgatactgacg

SEQ ID NO: 4690447 - DNA, 25 bp, Homo sapien
gtttcccatccttaaagagccgcag

SEQ ID NO: 4690448 - DNA, 25 bp, Homo sapien
gatactgacgctccagattgtctcc

SEQ ID NO: 4690449 - DNA, 25 bp, Homo sapien
tctccataaatgtggccgaggtcta

SEQ ID NO: 4690450 - DNA, 25 bp, Homo sapien
ctgtgggatggggccacctggcaac

SEQ ID NO: 4690451 - DNA, 25 bp, Homo sapien
gcgggtcgtctggaaaagctgctca

SEQ ID NO: 4690452 - DNA, 25 bp, Homo sapien
cacacggttgtgctcacgtagccag

SEQ ID NO: 4690453 - DNA, 25 bp, Homo sapien
taccgagggcgggtacatttctcca

SEQ ID NO: 4690454 - DNA, 25 bp, Homo sapien
ggtagtgcatcaacacaggcgcctc

SEQ ID NO: 4690455 - DNA, 25 bp, Homo sapien
cagggcagggcaggtctggagtcct

SEQ ID NO: 4690456 - DNA, 25 bp, Homo sapien
tccagggcagggcaggtctggagtc

SEQ ID NO: 4690457 - DNA, 25 bp, Homo sapien
gggcagggcaggtctggagtcctca

SEQ ID NO: 4690458 - DNA, 25 bp, Homo sapien
ggcagggcaggtctggagtcctcac

SEQ ID NO: 4690459 - DNA, 25 bp, Homo sapien
gtgagagctgtcatcatgctgacac

SEQ ID NO: 4690460 - DNA, 25 bp, Homo sapien
tggtgagagctgtcatcatgctgac

SEQ ID NO: 4690461 - DNA, 25 bp, Homo sapien
tgagagctgtcatcatgctgacacc

SEQ ID NO: 4690462 - DNA, 25 bp, Homo sapien
ggtgagagctgtcatcatgctgaca

SEQ ID NO: 4690463 - DNA, 25 bp, Homo sapien
tgctgcacgtactcctcgatgacaa

SEQ ID NO: 4690464 - DNA, 25 bp, Homo sapien
ccagtggtagagatggttgaactcc

SEQ ID NO: 4690465 - DNA, 25 bp, Homo sapien
ttggaactggacaccgaacagcagc

SEQ ID NO: 4690466 - DNA, 25 bp, Homo sapien
gttgaactccatggcaatgcggttg

SEQ ID NO: 4690467 - DNA, 25 bp, Homo sapien
caagaactgctcgtagctgtactcc

SEQ ID NO: 4690468 - DNA, 25 bp, Homo sapien
gcgagagaaggcatccaccagggcc

SEQ ID NO: 4690469 - DNA, 25 bp, Homo sapien
cccatagtccaccaacatggaggtg

SEQ ID NO: 4690470 - DNA, 25 bp, Homo sapien
catggaggtgttgaacaagaactgc

SEQ ID NO: 4690471 - DNA, 25 bp, Homo sapien
catcactttctagggtgggagcact

SEQ ID NO: 4690472 - DNA, 25 bp, Homo sapien
ccataggcgggcactgttacataca

SEQ ID NO: 4690473 - DNA, 25 bp, Homo sapien
tgtagaagtgacatcagccccattt

SEQ ID NO: 4690474 - DNA, 25 bp, Homo sapien
cagtaagggccctaatgctgtcagc

SEQ ID NO: 4690475 - DNA, 25 bp, Homo sapien
atgccaaacctcttgcggtactcat

SEQ ID NO: 4690476 - DNA, 25 bp, Homo sapien
aggaggtgtagggtttcatgccaaa

SEQ ID NO: 4690477 - DNA, 25 bp, Homo sapien
tgtagggtttcatgccaaacctctt

SEQ ID NO: 4690478 - DNA, 25 bp, Homo sapien
gccaaacctcttgcggtactcattg

SEQ ID NO: 4690479 - DNA, 25 bp, Homo sapien
agcaactgagcatgtgccctagaat

SEQ ID NO: 4690480 - DNA, 25 bp, Homo sapien
gcatgtgccctagaatttggcatgg

SEQ ID NO: 4690481 - DNA, 25 bp, Homo sapien
tgagcatgtgccctagaatttggca

SEQ ID NO: 4690482 - DNA, 25 bp, Homo sapien
gccctagaatttggcatggttggca

SEQ ID NO: 4690483 - DNA, 25 bp, Homo sapien
gggtagaactccaacgcatcaatgt

SEQ ID NO: 4690484 - DNA, 25 bp, Homo sapien
gcttccagtactccggagaacagat

SEQ ID NO: 4690485 - DNA, 25 bp, Homo sapien
cgccaaatgtgctcggcttccagta

SEQ ID NO: 4690486 - DNA, 25 bp, Homo sapien
gatgggattccctaggagacccttg

SEQ ID NO: 4690487 - DNA, 25 bp, Homo sapien
tctggtagcttccaaccaatggcgt

SEQ ID NO: 4690488 - DNA, 25 bp, Homo sapien
gagaaccactcctaacaatctgaag

SEQ ID NO: 4690489 - DNA, 25 bp, Homo sapien
gagcatttaagaccatcagccctgg

SEQ ID NO: 4690490 - DNA, 25 bp, Homo sapien
tgacagatttgggatacgagccact

SEQ ID NO: 4690491 - DNA, 25 bp, Homo sapien
tggagacttccagcacccgaaggat

SEQ ID NO: 4690492 - DNA, 25 bp, Homo sapien
ggaattcctggaataggccaccgga

SEQ ID NO: 4690493 - DNA, 25 bp, Homo sapien
cgaaggatctttctacgtcagagca

SEQ ID NO: 4690494 - DNA, 25 bp, Homo sapien
gcatgtctatacagtgatgggccca

SEQ ID NO: 4690495 - DNA, 25 bp, Homo sapien
tgtagagatcctgaaacaaatcccc

SEQ ID NO: 4690496 - DNA, 25 bp, Homo sapien
tatacaggagattgcacataggtta

SEQ ID NO: 4690497 - DNA, 25 bp, Homo sapien
attttggtatctgtagagatcctga

SEQ ID NO: 4690498 - DNA, 25 bp, Homo sapien
gttatacaggagattgcacataggt

SEQ ID NO: 4690499 - DNA, 25 bp, Homo sapien
caggatggagtggaaagaatattct

SEQ ID NO: 4690500 - DNA, 25 bp, Homo sapien
ggatggagtggaaagaatattcttt

SEQ ID NO: 4690501 - DNA, 25 bp, Homo sapien
tcaggatggagtggaaagaatattc

SEQ ID NO: 4690502 - DNA, 25 bp, Homo sapien
cttcaggatggagtggaaagaatat

SEQ ID NO: 4690503 - DNA, 25 bp, Homo sapien
ggctgtagagagttgcgatcacaca

SEQ ID NO: 4690504 - DNA, 25 bp, Homo sapien
gtcaaggctgtagagagttgcgatc

SEQ ID NO: 4690505 - DNA, 25 bp, Homo sapien
agagttgcgatcacacacctctgca

SEQ ID NO: 4690506 - DNA, 25 bp, Homo sapien
gtagagagttgcgatcacacacctc

SEQ ID NO: 4690507 - DNA, 25 bp, Homo sapien
tgcaggacattacccagaagaactt

SEQ ID NO: 4690508 - DNA, 25 bp, Homo sapien
cactctgcaggacattacccagaag

SEQ ID NO: 4690509 - DNA, 25 bp, Homo sapien
aacactctgcaggacattacccaga

SEQ ID NO: 4690510 - DNA, 25 bp, Homo sapien
tctgcaggacattacccagaagaac

SEQ ID NO: 4690511 - DNA, 25 bp, Homo sapien
ctttcagaaagtagaggtgtggcat

SEQ ID NO: 4690512 - DNA, 25 bp, Homo sapien
tttcagaaagtagaggtgtggcatt

SEQ ID NO: 4690513 - DNA, 25 bp, Homo sapien
ttcagaaagtagaggtgtggcattt

SEQ ID NO: 4690514 - DNA, 25 bp, Homo sapien
gattgcatgattgtactctagcatg

SEQ ID NO: 4690515 - DNA, 25 bp, Homo sapien
attgcatgattgtactctagcatgg

SEQ ID NO: 4690516 - DNA, 25 bp, Homo sapien
gagatacttgagtatgcttcccagt

SEQ ID NO: 4690517 - DNA, 25 bp, Homo sapien
tctttgaccaaaagacagaggtgct

SEQ ID NO: 4690518 - DNA, 25 bp, Homo sapien
cttcccagtatccatagggccagga

SEQ ID NO: 4690519 - DNA, 25 bp, Homo sapien
agatgactccatgcccagtaacaga

SEQ ID NO: 4690520 - DNA, 25 bp, Homo sapien
ggctcaattgtggttacctacccag

SEQ ID NO: 4690521 - DNA, 25 bp, Homo sapien
tagaaataaactcgctgctgctggc

SEQ ID NO: 4690522 - DNA, 25 bp, Homo sapien
gcttggagcctgcagaacattctca

SEQ ID NO: 4690523 - DNA, 25 bp, Homo sapien
ggaagcttagattgccaagggctca

SEQ ID NO: 4690524 - DNA, 25 bp, Homo sapien
caatctcaaaggaagtcacgactgc

SEQ ID NO: 4690525 - DNA, 25 bp, Homo sapien
cataggaggttagtccgctagcaga

SEQ ID NO: 4690526 - DNA, 25 bp, Homo sapien
tgtccacaggaattgctcccaagga

SEQ ID NO: 4690527 - DNA, 25 bp, Homo sapien
tgtaaaacggcttccatggcatgag

SEQ ID NO: 4690528 - DNA, 25 bp, Homo sapien
ctcagaatcacagtgggaggtaaaa

SEQ ID NO: 4690529 - DNA, 25 bp, Homo sapien
agaatcacagtgggaggtaaaaggc

SEQ ID NO: 4690530 - DNA, 25 bp, Homo sapien
aatcacagtgggaggtaaaaggcat

SEQ ID NO: 4690531 - DNA, 25 bp, Homo sapien
tcacagtgggaggtaaaaggcattt

SEQ ID NO: 4690532 - DNA, 25 bp, Homo sapien
atggaggagggtgtagcccaggctg

SEQ ID NO: 4690533 - DNA, 25 bp, Homo sapien
cttccctgccaagctggatggagga

SEQ ID NO: 4690534 - DNA, 25 bp, Homo sapien
caggctgctccttgtctgcctgttg

SEQ ID NO: 4690535 - DNA, 25 bp, Homo sapien
tgcctgttgtcctgccaagtattca

SEQ ID NO: 4690536 - DNA, 25 bp, Homo sapien
tatcttgttctgatgatcacaggaa

SEQ ID NO: 4690537 - DNA, 25 bp, Homo sapien
caggaagagggagtagtgtgtgtca

SEQ ID NO: 4690538 - DNA, 25 bp, Homo sapien
acagatgagaactatccagacacac

SEQ ID NO: 4690539 - DNA, 25 bp, Homo sapien
tggaagtttcaactgaggcaccaag

SEQ ID NO: 4690540 - DNA, 25 bp, Homo sapien
cagataagccaatttaaactgttca

SEQ ID NO: 4690541 - DNA, 25 bp, Homo sapien
tatctagttattggctattgaacaa

SEQ ID NO: 4690542 - DNA, 25 bp, Homo sapien
tccttctggagaattgtgagcaatt

SEQ ID NO: 4690543 - DNA, 25 bp, Homo sapien
tgaacgatttaaatcgatgaacctt

SEQ ID NO: 4690544 - DNA, 25 bp, Homo sapien
taagcctaaagatatggttactcct

SEQ ID NO: 4690545 - DNA, 25 bp, Homo sapien
taaagattccactaagcctaaagat

SEQ ID NO: 4690546 - DNA, 25 bp, Homo sapien
ggttactccttaatcatttgaattc

SEQ ID NO: 4690547 - DNA, 25 bp, Homo sapien
gaaacacagtaaagattccactaag

SEQ ID NO: 4690548 - DNA, 25 bp, Homo sapien
gtttctggtatcttgaactttttgc

SEQ ID NO: 4690549 - DNA, 25 bp, Homo sapien
ggcatttatgtttctggtatcttga

SEQ ID NO: 4690550 - DNA, 25 bp, Homo sapien
ctggtatcttgaactttttgctctg

SEQ ID NO: 4690551 - DNA, 25 bp, Homo sapien
catttatgtttctggtatcttgaac

SEQ ID NO: 4690552 - DNA, 25 bp, Homo sapien
cagggtgaagaacacagcctgctgc

SEQ ID NO: 4690553 - DNA, 25 bp, Homo sapien
agcaccgtggtcaggtacatgccca

SEQ ID NO: 4690554 - DNA, 25 bp, Homo sapien
gaaggaggaactcggacacgctgct

SEQ ID NO: 4690555 - DNA, 25 bp, Homo sapien
tgtgaaggtgagagtccagctggat

SEQ ID NO: 4690556 - DNA, 25 bp, Homo sapien
gaaatgcattcctcatagaggatcg

SEQ ID NO: 4690557 - DNA, 25 bp, Homo sapien
cattgatgtaataaggaagctgtcc

SEQ ID NO: 4690558 - DNA, 25 bp, Homo sapien
cgatttgtacttagtccgcatgtcc

SEQ ID NO: 4690559 - DNA, 25 bp, Homo sapien
tagtccgcatgtccatcagcatctt

SEQ ID NO: 4690560 - DNA, 25 bp, Homo sapien
gaatggcagggtaatgaccaccacc

SEQ ID NO: 4690561 - DNA, 25 bp, Homo sapien
taccaggatacacatgaatggcagg

SEQ ID NO: 4690562 - DNA, 25 bp, Homo sapien
caatgtagccatatgataccaggat

SEQ ID NO: 4690563 - DNA, 25 bp, Homo sapien
ggacaatgctttgtggatccctttg

SEQ ID NO: 4690564 - DNA, 25 bp, Homo sapien
aaggtactggccaaatattgaccca

SEQ ID NO: 4690565 - DNA, 25 bp, Homo sapien
tacatgagagccacaatgacatcct

SEQ ID NO: 4690566 - DNA, 25 bp, Homo sapien
tcaatagaactgcttacagtcggga

SEQ ID NO: 4690567 - DNA, 25 bp, Homo sapien
ctggccaaatattgacccataatag

SEQ ID NO: 4690568 - DNA, 25 bp, Homo sapien
aatgttgctctactgaagagtttcc

SEQ ID NO: 4690569 - DNA, 25 bp, Homo sapien
atgttgctctactgaagagtttccc

SEQ ID NO: 4690570 - DNA, 25 bp, Homo sapien
gaaaaatgttgctctactgaagagt

SEQ ID NO: 4690571 - DNA, 25 bp, Homo sapien
agagaaaaatgttgctctactgaag

SEQ ID NO: 4690572 - DNA, 25 bp, Homo sapien
taattccttagtgtctgcggcttgc

SEQ ID NO: 4690573 - DNA, 25 bp, Homo sapien
tattatagctcacgtgaacctgccc

SEQ ID NO: 4690574 - DNA, 25 bp, Homo sapien
tacagcattgttgcatgtggcagct

SEQ ID NO: 4690575 - DNA, 25 bp, Homo sapien
caaatgaccggttgatacatgcagc

SEQ ID NO: 4690576 - DNA, 25 bp, Homo sapien
tgctggaaatagagggacattgaaa

SEQ ID NO: 4690577 - DNA, 25 bp, Homo sapien
ctgctggaaatagagggacattgaa

SEQ ID NO: 4690578 - DNA, 25 bp, Homo sapien
gaagatgcccttagtagatggagcc

SEQ ID NO: 4690579 - DNA, 25 bp, Homo sapien
caattacgtccttgtcactggaggc

SEQ ID NO: 4690580 - DNA, 25 bp, Homo sapien
gttacacaccctgcataaagaatgg

SEQ ID NO: 4690581 - DNA, 25 bp, Homo sapien
cccaatgtggccataagagatcaag

SEQ ID NO: 4690582 - DNA, 25 bp, Homo sapien
gttccttaggctataaatgaaggga

SEQ ID NO: 4690583 - DNA, 25 bp, Homo sapien
ttccttaggctataaatgaagggat

SEQ ID NO: 4690584 - DNA, 25 bp, Homo sapien
aagactgttgccctgttgaagagtc

SEQ ID NO: 4690585 - DNA, 25 bp, Homo sapien
ccctgttgaagagtctctccagggc

SEQ ID NO: 4690586 - DNA, 25 bp, Homo sapien
cactcactatcccttaacctctttc

SEQ ID NO: 4690587 - DNA, 25 bp, Homo sapien
tgccatgactcggatcaggggacct

SEQ ID NO: 4690588 - DNA, 25 bp, Homo sapien
ttttgctccgtgagaaagatccacc

SEQ ID NO: 4690589 - DNA, 25 bp, Homo sapien
tcccttgggagatcccctgtcctcc

SEQ ID NO: 4690590 - DNA, 25 bp, Homo sapien
gtgatctgcgcagataaaaaccttc

SEQ ID NO: 4690591 - DNA, 25 bp, Homo sapien
cccttgtagttcgtgtgatctgcgc

SEQ ID NO: 4690592 - DNA, 25 bp, Homo sapien
tagttcgtgtgatctgcgcagataa

SEQ ID NO: 4690593 - DNA, 25 bp, Homo sapien
gtgtgatctgcgcagataaaaacct

SEQ ID NO: 4690594 - DNA, 25 bp, Homo sapien
cagtggtttggttcactctgcctgg

SEQ ID NO: 4690595 - DNA, 25 bp, Homo sapien
ctgaaacagtggtttggttcactct

SEQ ID NO: 4690596 - DNA, 25 bp, Homo sapien
gtggtttggttcactctgcctggtt

SEQ ID NO: 4690597 - DNA, 25 bp, Homo sapien
aaacagtggtttggttcactctgcc

SEQ ID NO: 4690598 - DNA, 25 bp, Homo sapien
gccactcagagagtcctagaaggag

SEQ ID NO: 4690599 - DNA, 25 bp, Homo sapien
gtgaccaggtacatgccaaggaaga

SEQ ID NO: 4690600 - DNA, 25 bp, Homo sapien
gaccaggtacatgccaaggaagatg

SEQ ID NO: 4690601 - DNA, 25 bp, Homo sapien
actcagagagtcctagaaggaggaa

SEQ ID NO: 4690602 - DNA, 25 bp, Homo sapien
cgtttacatgggtatctgagcaggc

SEQ ID NO: 4690603 - DNA, 25 bp, Homo sapien
tgcaagacacccagaatacgagatg

SEQ ID NO: 4690604 - DNA, 25 bp, Homo sapien
gcaagcccatggtgatgatcatcag

SEQ ID NO: 4690605 - DNA, 25 bp, Homo sapien
ggacagttggttagcacccagcaca

SEQ ID NO: 4690606 - DNA, 25 bp, Homo sapien
taatcaccatatagagaacagcagc

SEQ ID NO: 4690607 - DNA, 25 bp, Homo sapien
aaatgaatgggtttagcgtgggaat

SEQ ID NO: 4690608 - DNA, 25 bp, Homo sapien
gttgatggaggaagtaaatacacac

SEQ ID NO: 4690609 - DNA, 25 bp, Homo sapien
aagtttacccaaagcctccttcatg

SEQ ID NO: 4690610 - DNA, 25 bp, Homo sapien
ccccggatgaacttgatctcagaga

SEQ ID NO: 4690611 - DNA, 25 bp, Homo sapien
tggccccggatgaacttgatctcag

SEQ ID NO: 4690612 - DNA, 25 bp, Homo sapien
aatttggccccggatgaacttgatc

SEQ ID NO: 4690613 - DNA, 25 bp, Homo sapien
gatgaacttgatctcagagatctgt

SEQ ID NO: 4690614 - DNA, 25 bp, Homo sapien
taaatcctcatgacaatgtggatat

SEQ ID NO: 4690615 - DNA, 25 bp, Homo sapien
tgaaaattctggtgtattaaggccc

SEQ ID NO: 4690616 - DNA, 25 bp, Homo sapien
tatcagataagggacgatgacgctg

SEQ ID NO: 4690617 - DNA, 25 bp, Homo sapien
gagacagtgagggatatgatatttt

SEQ ID NO: 4690618 - DNA, 25 bp, Homo sapien
gaattaagaagtcataaccaccatc

SEQ ID NO: 4690619 - DNA, 25 bp, Homo sapien
ctagccaacccagtttggcactttc

SEQ ID NO: 4690620 - DNA, 25 bp, Homo sapien
taagaagtcataaccaccatctgac

SEQ ID NO: 4690621 - DNA, 25 bp, Homo sapien
tcatgaattaagaagtcataaccac

SEQ ID NO: 4690622 - DNA, 25 bp, Homo sapien
gctgattcctgatagttgggctgca

SEQ ID NO: 4690623 - DNA, 25 bp, Homo sapien
tttaggagcggcagctgaagtccac

SEQ ID NO: 4690624 - DNA, 25 bp, Homo sapien
gcagttgcaccgataagctcttgaa

SEQ ID NO: 4690625 - DNA, 25 bp, Homo sapien
tgtgaccaattacccagttagtgag

SEQ ID NO: 4690626 - DNA, 25 bp, Homo sapien
gaagaaattcatagatgcaggtctg

SEQ ID NO: 4690627 - DNA, 25 bp, Homo sapien
gccaatatccaaaaaggacaggttg

SEQ ID NO: 4690628 - DNA, 25 bp, Homo sapien
attgggaattattgtagagataaag

SEQ ID NO: 4690629 - DNA, 25 bp, Homo sapien
gaaaagcccaaacaaaagagcctgc

SEQ ID NO: 4690630 - DNA, 25 bp, Homo sapien
tcagacactccccataagaaatcag

SEQ ID NO: 4690631 - DNA, 25 bp, Homo sapien
taagaaatcagcttaattcctgagc

SEQ ID NO: 4690632 - DNA, 25 bp, Homo sapien
agaaatagagttgtgtcagacactc

SEQ ID NO: 4690633 - DNA, 25 bp, Homo sapien
gaaatagagttgtgtcagacactcc

SEQ ID NO: 4690634 - DNA, 25 bp, Homo sapien
cacagcgttgggagttcatggttag

SEQ ID NO: 4690635 - DNA, 25 bp, Homo sapien
agttcatggttagggcataatggag

SEQ ID NO: 4690636 - DNA, 25 bp, Homo sapien
aggacacagcgttgggagttcatgg

SEQ ID NO: 4690637 - DNA, 25 bp, Homo sapien
ttgggagttcatggttagggcataa

SEQ ID NO: 4690638 - DNA, 25 bp, Homo sapien
caaagggcgcaatcagcagtgttcc

SEQ ID NO: 4690639 - DNA, 25 bp, Homo sapien
gaatcaattctcaggatggccaatg

SEQ ID NO: 4690640 - DNA, 25 bp, Homo sapien
aaatagtgatcacccatgacacagc

SEQ ID NO: 4690641 - DNA, 25 bp, Homo sapien
cactaggagggtatgcactagggca

SEQ ID NO: 4690642 - DNA, 25 bp, Homo sapien
gcagctggagaaggccctttgctta

SEQ ID NO: 4690643 - DNA, 25 bp, Homo sapien
cagctggagaaggccctttgcttac

SEQ ID NO: 4690644 - DNA, 25 bp, Homo sapien
agaggtgggaagtgcagctggagaa

SEQ ID NO: 4690645 - DNA, 25 bp, Homo sapien
ctacagagaggtgggaagtgcagct

SEQ ID NO: 4690646 - DNA, 25 bp, Homo sapien
agacaccgatagctgtgctatagaa

SEQ ID NO: 4690647 - DNA, 25 bp, Homo sapien
cataaatagacaccgatagctgtgc

SEQ ID NO: 4690648 - DNA, 25 bp, Homo sapien
ggacataaatagacaccgatagctg

SEQ ID NO: 4690649 - DNA, 25 bp, Homo sapien
aatagacaccgatagctgtgctata

SEQ ID NO: 4690650 - DNA, 25 bp, Homo sapien
ccaccgtgtacatgactgagaagac

SEQ ID NO: 4690651 - DNA, 25 bp, Homo sapien
gtcaccaccgtgtacatgactgaga

SEQ ID NO: 4690652 - DNA, 25 bp, Homo sapien
ccgtgtacatgactgagaagactct

SEQ ID NO: 4690653 - DNA, 25 bp, Homo sapien
tacatgactgagaagactctgtcct

SEQ ID NO: 4690654 - DNA, 25 bp, Homo sapien
tctgcatggattccatggttctcac

SEQ ID NO: 4690655 - DNA, 25 bp, Homo sapien
ttctcactagcatggagtcccaaat

SEQ ID NO: 4690656 - DNA, 25 bp, Homo sapien
catggattccatggttctcactagc

SEQ ID NO: 4690657 - DNA, 25 bp, Homo sapien
ctagcatggagtcccaaatgtgtca

SEQ ID NO: 4690658 - DNA, 25 bp, Homo sapien
tctgtcatcatgtcttgttttgaca

SEQ ID NO: 4690659 - DNA, 25 bp, Homo sapien
cagcgtggagctgaccactcagcga

SEQ ID NO: 4690660 - DNA, 25 bp, Homo sapien
cctggctctcccaatccgcctcagg

SEQ ID NO: 4690661 - DNA, 25 bp, Homo sapien
gaccactcagcgaagacagaggaaa

SEQ ID NO: 4690662 - DNA, 25 bp, Homo sapien
cctgacctatagtgcagcgtatgag

SEQ ID NO: 4690663 - DNA, 25 bp, Homo sapien
gacctatagtgcagcgtatgagccc

SEQ ID NO: 4690664 - DNA, 25 bp, Homo sapien
atcttgcctgacctatagtgcagcg

SEQ ID NO: 4690665 - DNA, 25 bp, Homo sapien
tgcctgacctatagtgcagcgtatg

SEQ ID NO: 4690666 - DNA, 25 bp, Homo sapien
tgttgtgccccagtgtaaactacac

SEQ ID NO: 4690667 - DNA, 25 bp, Homo sapien
actgttgtgccccagtgtaaactac

SEQ ID NO: 4690668 - DNA, 25 bp, Homo sapien
gttgtgccccagtgtaaactacaca

SEQ ID NO: 4690669 - DNA, 25 bp, Homo sapien
ctgttgtgccccagtgtaaactaca

SEQ ID NO: 4690670 - DNA, 25 bp, Homo sapien
ggtggaaatgcccaagagaacaaaa

SEQ ID NO: 4690671 - DNA, 25 bp, Homo sapien
aatgcccaagagaacaaaatgggac

SEQ ID NO: 4690672 - DNA, 25 bp, Homo sapien
aaatgggacacactggtccagttgc

SEQ ID NO: 4690673 - DNA, 25 bp, Homo sapien
gaacaaaatgggacacactggtcca

SEQ ID NO: 4690674 - DNA, 25 bp, Homo sapien
acaaggaagagtgggatttgctctt

SEQ ID NO: 4690675 - DNA, 25 bp, Homo sapien
aaacaaggaagagtgggatttgctc

SEQ ID NO: 4690676 - DNA, 25 bp, Homo sapien
gaaaacaaggaagagtgggatttgc

SEQ ID NO: 4690677 - DNA, 25 bp, Homo sapien
agaaaacaaggaagagtgggatttg

SEQ ID NO: 4690678 - DNA, 25 bp, Homo sapien
gatggccaagttgccagaaatattg

SEQ ID NO: 4690679 - DNA, 25 bp, Homo sapien
tgccagaaatattgattgcgtacat

SEQ ID NO: 4690680 - DNA, 25 bp, Homo sapien
cagagagaatcagtgtgatgatggc

SEQ ID NO: 4690681 - DNA, 25 bp, Homo sapien
gatgtctgtcaaggccaagttactg

SEQ ID NO: 4690682 - DNA, 25 bp, Homo sapien
cacacagcattctagtcaggatcat

SEQ ID NO: 4690683 - DNA, 25 bp, Homo sapien
taagtttgggctaaacagcctgtgt

SEQ ID NO: 4690684 - DNA, 25 bp, Homo sapien
gaagttttccatgacggcgaagcaa

SEQ ID NO: 4690685 - DNA, 25 bp, Homo sapien
tatgagaaaggtatgcagcatggca

SEQ ID NO: 4690686 - DNA, 25 bp, Homo sapien
tacacgactgttataatgcgaccct

SEQ ID NO: 4690687 - DNA, 25 bp, Homo sapien
gaagtagacccaactgagggtgcca

SEQ ID NO: 4690688 - DNA, 25 bp, Homo sapien
ggcagtaatgaaggccagagctcca

SEQ ID NO: 4690689 - DNA, 25 bp, Homo sapien
tcatcagagcgtagaggtcacagaa

SEQ ID NO: 4690690 - DNA, 25 bp, Homo sapien
tccatttcatgaagcctcccttgac

SEQ ID NO: 4690691 - DNA, 25 bp, Homo sapien
tgcattctgctcatccatttcatga

SEQ ID NO: 4690692 - DNA, 25 bp, Homo sapien
agtctgcattctgctcatccatttc

SEQ ID NO: 4690693 - DNA, 25 bp, Homo sapien
cattctgctcatccatttcatgaag

SEQ ID NO: 4690694 - DNA, 25 bp, Homo sapien
ctgcatcaattaatgttcaacataa

SEQ ID NO: 4690695 - DNA, 25 bp, Homo sapien
taaccagctaacatgtagttgttta

SEQ ID NO: 4690696 - DNA, 25 bp, Homo sapien
cattttaacagactcttgatgcttg

SEQ ID NO: 4690697 - DNA, 25 bp, Homo sapien
catgcccagtattgattggtcagaa

SEQ ID NO: 4690698 - DNA, 25 bp, Homo sapien
aactttgtaataattctggaaatag

SEQ ID NO: 4690699 - DNA, 25 bp, Homo sapien
agtgtaggttctacaaatttgttca

SEQ ID NO: 4690700 - DNA, 25 bp, Homo sapien
ataggaaagtgtaggttctacaaat

SEQ ID NO: 4690701 - DNA, 25 bp, Homo sapien
gttttggctactcattgtttctggc

SEQ ID NO: 4690702 - DNA, 25 bp, Homo sapien
aacactgcaatagccagagacagaa

SEQ ID NO: 4690703 - DNA, 25 bp, Homo sapien
gcaaagatgaagacagtcgcatccc

SEQ ID NO: 4690704 - DNA, 25 bp, Homo sapien
cagaaaaggatggataagatggtgc

SEQ ID NO: 4690705 - DNA, 25 bp, Homo sapien
ttccctaatgcaggtttctggatga

SEQ ID NO: 4690706 - DNA, 25 bp, Homo sapien
ttcccatgtccactttatggttgag

SEQ ID NO: 4690707 - DNA, 25 bp, Homo sapien
tcccatgtccactttatggttgagg

SEQ ID NO: 4690708 - DNA, 25 bp, Homo sapien
ttcttccaacaactttgtgaaagta

SEQ ID NO: 4690709 - DNA, 25 bp, Homo sapien
tccaacaactttgtgaaagtagttc

SEQ ID NO: 4690710 - DNA, 25 bp, Homo sapien
tgtgggttcacctaaagataaacta

SEQ ID NO: 4690711 - DNA, 25 bp, Homo sapien
gatacaatctgtccaaaatttctcc

SEQ ID NO: 4690712 - DNA, 25 bp, Homo sapien
gataaactaacactgtaacagattc

SEQ ID NO: 4690713 - DNA, 25 bp, Homo sapien
aacatctgatacaatctgtccaaaa

SEQ ID NO: 4690714 - DNA, 25 bp, Homo sapien
ggatgaattcagagggtcttgttag

SEQ ID NO: 4690715 - DNA, 25 bp, Homo sapien
atgaattcagagggtcttgttaggt

SEQ ID NO: 4690716 - DNA, 25 bp, Homo sapien
ctcaggtcgagaggagagtccaagg

SEQ ID NO: 4690717 - DNA, 25 bp, Homo sapien
tcaggtcgagaggagagtccaagga

SEQ ID NO: 4690718 - DNA, 25 bp, Homo sapien
taatgcttccataaaacagggtcac

SEQ ID NO: 4690719 - DNA, 25 bp, Homo sapien
gataagcaggtttcctatcactgtg

SEQ ID NO: 4690720 - DNA, 25 bp, Homo sapien
aattttagcactggttgatcatcgc

SEQ ID NO: 4690721 - DNA, 25 bp, Homo sapien
ggtcattatgacagccaagccttct

SEQ ID NO: 4690722 - DNA, 25 bp, Homo sapien
atcctgtgcatcaactttgccaaac

SEQ ID NO: 4690723 - DNA, 25 bp, Homo sapien
atttcatcctgtgcatcaactttgc

SEQ ID NO: 4690724 - DNA, 25 bp, Homo sapien
tcatcctgtgcatcaactttgccaa

SEQ ID NO: 4690725 - DNA, 25 bp, Homo sapien
ttcatcctgtgcatcaactttgcca

SEQ ID NO: 4690726 - DNA, 25 bp, Homo sapien
cggttgatggccatagccgccagga

SEQ ID NO: 4690727 - DNA, 25 bp, Homo sapien
cagcatctgcggttcataacagtga

SEQ ID NO: 4690728 - DNA, 25 bp, Homo sapien
caaatggctacacagcggttgatgg

SEQ ID NO: 4690729 - DNA, 25 bp, Homo sapien
tcttcagaccgagaggagagtccca

SEQ ID NO: 4690730 - DNA, 25 bp, Homo sapien
tcatttgagacttaatcttgtttat

SEQ ID NO: 4690731 - DNA, 25 bp, Homo sapien
ataaatgggttcaacactgatgtca

SEQ ID NO: 4690732 - DNA, 25 bp, Homo sapien
tgtaagccccgtttcatgtctttgt

SEQ ID NO: 4690733 - DNA, 25 bp, Homo sapien
agataaatgggttcaacactgatgt

SEQ ID NO: 4690734 - DNA, 25 bp, Homo sapien
ttattggtctttgtagagaacctac

SEQ ID NO: 4690735 - DNA, 25 bp, Homo sapien
tttattggtctttgtagagaaccta

SEQ ID NO: 4690736 - DNA, 25 bp, Homo sapien
tcttggattcagactacaaagctca

SEQ ID NO: 4690737 - DNA, 25 bp, Homo sapien
ttggattcagactacaaagctcatc

SEQ ID NO: 4690738 - DNA, 25 bp, Homo sapien
gattcagactacaaagctcatccat

SEQ ID NO: 4690739 - DNA, 25 bp, Homo sapien
cttcttggattcagactacaaagct

SEQ ID NO: 4690740 - DNA, 25 bp, Homo sapien
ctggacttgagccatttccaccctg

SEQ ID NO: 4690741 - DNA, 25 bp, Homo sapien
tggttgtacaatagggtggtcccca

SEQ ID NO: 4690742 - DNA, 25 bp, Homo sapien
aatgctaatgcagtaggagaagggc

SEQ ID NO: 4690743 - DNA, 25 bp, Homo sapien
ggaggtatgcctcttactggacttg

SEQ ID NO: 4690744 - DNA, 25 bp, Homo sapien
gacgcaatcaatcttgcatactctt

SEQ ID NO: 4690745 - DNA, 25 bp, Homo sapien
catctgagatcacggttagccctga

SEQ ID NO: 4690746 - DNA, 25 bp, Homo sapien
gtaaagtgcctgagacgcaatcaat

SEQ ID NO: 4690747 - DNA, 25 bp, Homo sapien
ttgccatctgagatcacggttagcc

SEQ ID NO: 4690748 - DNA, 25 bp, Homo sapien
taaatttggtctaacaaagggatca

SEQ ID NO: 4690749 - DNA, 25 bp, Homo sapien
ctttgctgattcacccattcttgtt

SEQ ID NO: 4690750 - DNA, 25 bp, Homo sapien
tttgctgattcacccattcttgttg

SEQ ID NO: 4690751 - DNA, 25 bp, Homo sapien
aatttggtctaacaaagggatcatt

SEQ ID NO: 4690752 - DNA, 25 bp, Homo sapien
ctaccaagcagatgaagtaataaat

SEQ ID NO: 4690753 - DNA, 25 bp, Homo sapien
agctcacgtatgtgaagatttctga

SEQ ID NO: 4690754 - DNA, 25 bp, Homo sapien
ctctaccaagcagatgaagtaataa

SEQ ID NO: 4690755 - DNA, 25 bp, Homo sapien
gctcacgtatgtgaagatttctgac

SEQ ID NO: 4690756 - DNA, 25 bp, Homo sapien
tattaagttgatgtagcttcacaga

SEQ ID NO: 4690757 - DNA, 25 bp, Homo sapien
cttgtgttgcttcagatagaaatcc

SEQ ID NO: 4690758 - DNA, 25 bp, Homo sapien
gtgttgcttcagatagaaatccaag

SEQ ID NO: 4690759 - DNA, 25 bp, Homo sapien
tgtgttgcttcagatagaaatccaa

SEQ ID NO: 4690760 - DNA, 25 bp, Homo sapien
ttgtgttgcttcagatagaaatcca

SEQ ID NO: 4690761 - DNA, 25 bp, Homo sapien
tgatctcattgggatatcttagtgc

SEQ ID NO: 4690762 - DNA, 25 bp, Homo sapien
cataatgtataatgggggttgatct

SEQ ID NO: 4690763 - DNA, 25 bp, Homo sapien
taatgtataatgggggttgatctca

SEQ ID NO: 4690764 - DNA, 25 bp, Homo sapien
cattgggatatcttagtgcatttac

SEQ ID NO: 4690765 - DNA, 25 bp, Homo sapien
agatgactccaactgaccacacatt

SEQ ID NO: 4690766 - DNA, 25 bp, Homo sapien
gaaatcggaaatctttgctgcctct

SEQ ID NO: 4690767 - DNA, 25 bp, Homo sapien
cttgttggaaatcggaaatctttgc

SEQ ID NO: 4690768 - DNA, 25 bp, Homo sapien
ttaatcttgttggaaatcggaaatc

SEQ ID NO: 4690769 - DNA, 25 bp, Homo sapien
gaaccggtctgcatttggtacatac

SEQ ID NO: 4690770 - DNA, 25 bp, Homo sapien
tgcatttggtacatactgtcacctg

SEQ ID NO: 4690771 - DNA, 25 bp, Homo sapien
atagaaccggtctgcatttggtaca

SEQ ID NO: 4690772 - DNA, 25 bp, Homo sapien
ggtctgcatttggtacatactgtca

SEQ ID NO: 4690773 - DNA, 25 bp, Homo sapien
gcattattaatgagacagcaaagaa

SEQ ID NO: 4690774 - DNA, 25 bp, Homo sapien
cattattaatgagacagcaaagaaa

SEQ ID NO: 4690775 - DNA, 25 bp, Homo sapien
gagaatccatggtaagtataacctc

SEQ ID NO: 4690776 - DNA, 25 bp, Homo sapien
atccatggtaagtataacctccttt

SEQ ID NO: 4690777 - DNA, 25 bp, Homo sapien
aaacaaaatggcttgcaacatcaga

SEQ ID NO: 4690778 - DNA, 25 bp, Homo sapien
ctgtcattgtttattactgttttgg

SEQ ID NO: 4690779 - DNA, 25 bp, Homo sapien
aaaatggcttgcaacatcagaaata

SEQ ID NO: 4690780 - DNA, 25 bp, Homo sapien
caaaatggcttgcaacatcagaaat

SEQ ID NO: 4690781 - DNA, 25 bp, Homo sapien
gtgatgacctttgacatccctaagg

SEQ ID NO: 4690782 - DNA, 25 bp, Homo sapien
tgacatccctaaggttctgtgtttg

SEQ ID NO: 4690783 - DNA, 25 bp, Homo sapien
ggaaggagaagtgatgacctttgac

SEQ ID NO: 4690784 - DNA, 25 bp, Homo sapien
catccctaaggttctgtgtttgcat

SEQ ID NO: 4690785 - DNA, 25 bp, Homo sapien
cctcttgaagtgcagatatagcctc

SEQ ID NO: 4690786 - DNA, 25 bp, Homo sapien
tgtgggcgtgacaggagattcagag

SEQ ID NO: 4690787 - DNA, 25 bp, Homo sapien
gattcagaggcctgaataggcttgg

SEQ ID NO: 4690788 - DNA, 25 bp, Homo sapien
tcttgaagtgcagatatagcctcag

SEQ ID NO: 4690789 - DNA, 25 bp, Homo sapien
tagaacaggaccactacagtgaggt

SEQ ID NO: 4690790 - DNA, 25 bp, Homo sapien
ggcccttcatcactgagtacatgga

SEQ ID NO: 4690791 - DNA, 25 bp, Homo sapien
taaaatagacatagatgacactccc

SEQ ID NO: 4690792 - DNA, 25 bp, Homo sapien
ccggcccttcatcactgagtacatg

SEQ ID NO: 4690793 - DNA, 25 bp, Homo sapien
tatgagtaaattctgtgtcttaatt

SEQ ID NO: 4690794 - DNA, 25 bp, Homo sapien
tctgatatcgctgaggttttgtgtc

SEQ ID NO: 4690795 - DNA, 25 bp, Homo sapien
taatggcctctgatatcgctgaggt

SEQ ID NO: 4690796 - DNA, 25 bp, Homo sapien
gaggtaatggcctctgatatcgctg

SEQ ID NO: 4690797 - DNA, 25 bp, Homo sapien
gaaggagaggtaatggcctctgata

SEQ ID NO: 4690798 - DNA, 25 bp, Homo sapien
tgccatggggttaagatcaggctct

SEQ ID NO: 4690799 - DNA, 25 bp, Homo sapien
cctcagaaatgtgatagttcttcct

SEQ ID NO: 4690800 - DNA, 25 bp, Homo sapien
aaaagacttcgggatctgccatggg

SEQ ID NO: 4690801 - DNA, 25 bp, Homo sapien
tcttgaagtacagatcgagcctcag

SEQ ID NO: 4690802 - DNA, 25 bp, Homo sapien
atgtaaagggcagtttgaccaagac

SEQ ID NO: 4690803 - DNA, 25 bp, Homo sapien
ttctttcataagcttaagcctgtaa

SEQ ID NO: 4690804 - DNA, 25 bp, Homo sapien
ctctggacttcctggatagggtttg

SEQ ID NO: 4690805 - DNA, 25 bp, Homo sapien
gacttcctggatagggtttggagaa

SEQ ID NO: 4690806 - DNA, 25 bp, Homo sapien
ggagatgctgcaagaacccaatagc

SEQ ID NO: 4690807 - DNA, 25 bp, Homo sapien
gatatccatgaaagacaagttgctg

SEQ ID NO: 4690808 - DNA, 25 bp, Homo sapien
gacataagtagcacgcggaacaggg

SEQ ID NO: 4690809 - DNA, 25 bp, Homo sapien
ggtagctgtcagtgttcccaaatgc

SEQ ID NO: 4690810 - DNA, 25 bp, Homo sapien
ggtccctaaccactgagtacatgga

SEQ ID NO: 4690811 - DNA, 25 bp, Homo sapien
gacataaataatactcccatagaaa

SEQ ID NO: 4690812 - DNA, 25 bp, Homo sapien
taatactcccatagaaaagggctac

SEQ ID NO: 4690813 - DNA, 25 bp, Homo sapien
tggctacccggtccctaaccactga

SEQ ID NO: 4690814 - DNA, 25 bp, Homo sapien
cggtaaattctgtcctgtaatttct

SEQ ID NO: 4690815 - DNA, 25 bp, Homo sapien
attctgtcctgtaatttcttcaaac

SEQ ID NO: 4690816 - DNA, 25 bp, Homo sapien
aaattctgtcctgtaatttcttcaa

SEQ ID NO: 4690817 - DNA, 25 bp, Homo sapien
gtaaattctgtcctgtaatttcttc

SEQ ID NO: 4690818 - DNA, 25 bp, Homo sapien
cttcttgatctctgtgcaaaaatta

SEQ ID NO: 4690819 - DNA, 25 bp, Homo sapien
tcttgatctctgtgcaaaaattatt

SEQ ID NO: 4690820 - DNA, 25 bp, Homo sapien
tttcttcttgatctctgtgcaaaaa

SEQ ID NO: 4690821 - DNA, 25 bp, Homo sapien
tgatctctgtgcaaaaattatttct

SEQ ID NO: 4690822 - DNA, 25 bp, Homo sapien
tgaatgtaatccagatcagactcag

SEQ ID NO: 4690823 - DNA, 25 bp, Homo sapien
gaatgtaatccagatcagactcagc

SEQ ID NO: 4690824 - DNA, 25 bp, Homo sapien
attgaatgtaatccagatcagactc

SEQ ID NO: 4690825 - DNA, 25 bp, Homo sapien
aatgtaatccagatcagactcagct

SEQ ID NO: 4690826 - DNA, 25 bp, Homo sapien
taaagcgggcatacaaagtttgata

SEQ ID NO: 4690827 - DNA, 25 bp, Homo sapien
caacagcaactggtttaaagcgggc

SEQ ID NO: 4690828 - DNA, 25 bp, Homo sapien
gagactttatcactgacaattcctt

SEQ ID NO: 4690829 - DNA, 25 bp, Homo sapien
cacttgctgaatcaggatgattagt

SEQ ID NO: 4690830 - DNA, 25 bp, Homo sapien
gccacataccgaatgactgaaatgt

SEQ ID NO: 4690831 - DNA, 25 bp, Homo sapien
tctagacatcaagggttaacaagac

SEQ ID NO: 4690832 - DNA, 25 bp, Homo sapien
tctggcctgaaattacaagactaag

SEQ ID NO: 4690833 - DNA, 25 bp, Homo sapien
taaacattcttttatgatagaccag

SEQ ID NO: 4690834 - DNA, 25 bp, Homo sapien
gagtgtcccgtacatcatggccacg

SEQ ID NO: 4690835 - DNA, 25 bp, Homo sapien
gctattgatcttccgggagcggcag

SEQ ID NO: 4690836 - DNA, 25 bp, Homo sapien
tgaagccataagacaccgtgatagc

SEQ ID NO: 4690837 - DNA, 25 bp, Homo sapien
tcgaccgagcgcatgtggatcacag

SEQ ID NO: 4690838 - DNA, 25 bp, Homo sapien
actgggacccctgccctggacagtg

SEQ ID NO: 4690839 - DNA, 25 bp, Homo sapien
ctggacagtggaatcggctccaggt

SEQ ID NO: 4690840 - DNA, 25 bp, Homo sapien
cagtggaatcggctccaggtctgcc

SEQ ID NO: 4690841 - DNA, 25 bp, Homo sapien
ggacagtggaatcggctccaggtct

SEQ ID NO: 4690842 - DNA, 25 bp, Homo sapien
aggaggggtgatttatctctcttca

SEQ ID NO: 4690843 - DNA, 25 bp, Homo sapien
tcaggaggggtgatttatctctctt

SEQ ID NO: 4690844 - DNA, 25 bp, Homo sapien
ttcaggaggggtgatttatctctct

SEQ ID NO: 4690845 - DNA, 25 bp, Homo sapien
caggaggggtgatttatctctcttc

SEQ ID NO: 4690846 - DNA, 25 bp, Homo sapien
caatgagtccattacccaggaggct

SEQ ID NO: 4690847 - DNA, 25 bp, Homo sapien
caagcgagccatgagcaggatatac

SEQ ID NO: 4690848 - DNA, 25 bp, Homo sapien
tgtcagagcacgagagccttaagag

SEQ ID NO: 4690849 - DNA, 25 bp, Homo sapien
tgtacatcgcgattccagaggctgt

SEQ ID NO: 4690850 - DNA, 25 bp, Homo sapien
caaggatctgcttccgggcaggtgc

SEQ ID NO: 4690851 - DNA, 25 bp, Homo sapien
tgtgcctggctggaaagtcacttct

SEQ ID NO: 4690852 - DNA, 25 bp, Homo sapien
tgtaaaaccggatcataatatctgc

SEQ ID NO: 4690853 - DNA, 25 bp, Homo sapien
tgacagctgttatgatttttgagca

SEQ ID NO: 4690854 - DNA, 25 bp, Homo sapien
ctggaagatcatgagacgcacaagg

SEQ ID NO: 4690855 - DNA, 25 bp, Homo sapien
ggaagatcatgagacgcacaaggcc

SEQ ID NO: 4690856 - DNA, 25 bp, Homo sapien
aagatcatgagacgcacaaggccac

SEQ ID NO: 4690857 - DNA, 25 bp, Homo sapien
tggaagatcatgagacgcacaaggc

SEQ ID NO: 4690858 - DNA, 25 bp, Homo sapien
aggtctgtggtgatgtgatttcgtg

SEQ ID NO: 4690859 - DNA, 25 bp, Homo sapien
tctgtggtgatgtgatttcgtgatg

SEQ ID NO: 4690860 - DNA, 25 bp, Homo sapien
atttcgtgatgtgtgtgggatggtc

SEQ ID NO: 4690861 - DNA, 25 bp, Homo sapien
gatgtgtgtgggatggtcttggtca

SEQ ID NO: 4690862 - DNA, 25 bp, Homo sapien
tcacgtttggaatgaaagtctcagg

SEQ ID NO: 4690863 - DNA, 25 bp, Homo sapien
cctgggccacagatcagtatcgttc

SEQ ID NO: 4690864 - DNA, 25 bp, Homo sapien
tcatgtatggcatagagcagcggtc

SEQ ID NO: 4690865 - DNA, 25 bp, Homo sapien
gatgtaggttgtccgctgcttatga

SEQ ID NO: 4690866 - DNA, 25 bp, Homo sapien
ttgggaggcttagtcaggaggatct

SEQ ID NO: 4690867 - DNA, 25 bp, Homo sapien
gcagtgaaccatgattgcactccaa

SEQ ID NO: 4690868 - DNA, 25 bp, Homo sapien
gaggcttagtcaggaggatctcttg

SEQ ID NO: 4690869 - DNA, 25 bp, Homo sapien
agcctgggaggtcaaggctgcagtg

SEQ ID NO: 4690870 - DNA, 25 bp, Homo sapien
tgagtacttactgaatttagttctg

SEQ ID NO: 4690871 - DNA, 25 bp, Homo sapien
cttccttatttagtgttgtatcata

SEQ ID NO: 4690872 - DNA, 25 bp, Homo sapien
aaagctcgttgtagtagaaagggtg

SEQ ID NO: 4690873 - DNA, 25 bp, Homo sapien
agcagggaagtattgttagtctagc

SEQ ID NO: 4690874 - DNA, 25 bp, Homo sapien
tgtagctagcaataaggtgacttac

SEQ ID NO: 4690875 - DNA, 25 bp, Homo sapien
tttacaaagcatcctaaagacaggg

SEQ ID NO: 4690876 - DNA, 25 bp, Homo sapien
taagattctgtggtgtgacatctct

SEQ ID NO: 4690877 - DNA, 25 bp, Homo sapien
tcagaatgctgaataaccttgtagc

SEQ ID NO: 4690878 - DNA, 25 bp, Homo sapien
tcctcttaagaaagtgctccattcc

SEQ ID NO: 4690879 - DNA, 25 bp, Homo sapien
agctgctggcccaaagggatccgga

SEQ ID NO: 4690880 - DNA, 25 bp, Homo sapien
gcagctgcggactacgggagggagt

SEQ ID NO: 4690881 - DNA, 25 bp, Homo sapien
aactgcattggggtccaccgggaag

SEQ ID NO: 4690882 - DNA, 25 bp, Homo sapien
cccagggactggtagttggtggaga

SEQ ID NO: 4690883 - DNA, 25 bp, Homo sapien
cgtagctgggcggctggacggagcc

SEQ ID NO: 4690884 - DNA, 25 bp, Homo sapien
ggcggctggacggagcccagggact

SEQ ID NO: 4690885 - DNA, 25 bp, Homo sapien
cagggactggtagttggtggagaag

SEQ ID NO: 4690886 - DNA, 25 bp, Homo sapien
agaaaccagagctcccgccaccagc

SEQ ID NO: 4690887 - DNA, 25 bp, Homo sapien
ctcccgccaccagctggcctctctc

SEQ ID NO: 4690888 - DNA, 25 bp, Homo sapien
gcgggacatggagatccagaaacca

SEQ ID NO: 4690889 - DNA, 25 bp, Homo sapien
cagagctcccgccaccagctggcct

SEQ ID NO: 4690890 - DNA, 25 bp, Homo sapien
tgtggccacaacccggaccccaagc

SEQ ID NO: 4690891 - DNA, 25 bp, Homo sapien
tggccacaacccggaccccaagcca

SEQ ID NO: 4690892 - DNA, 25 bp, Homo sapien
ggtggccgttcagctttgcatgggc

SEQ ID NO: 4690893 - DNA, 25 bp, Homo sapien
gtggccgttcagctttgcatgggct

SEQ ID NO: 4690894 - DNA, 25 bp, Homo sapien
tggccgttcagctttgcatgggctc

SEQ ID NO: 4690895 - DNA, 25 bp, Homo sapien
aggtggccgttcagctttgcatggg

SEQ ID NO: 4690896 - DNA, 25 bp, Homo sapien
atttgactctaaagtaaccagcagc

SEQ ID NO: 4690897 - DNA, 25 bp, Homo sapien
acctcggcggactgcatcatgacca

SEQ ID NO: 4690898 - DNA, 25 bp, Homo sapien
gctccgacctcggcggactgcatca

SEQ ID NO: 4690899 - DNA, 25 bp, Homo sapien
ccgacctcggcggactgcatcatga

SEQ ID NO: 4690900 - DNA, 25 bp, Homo sapien
gacctcggcggactgcatcatgacc

SEQ ID NO: 4690901 - DNA, 25 bp, Homo sapien
cttgatgttcagcagggcttcgtac

SEQ ID NO: 4690902 - DNA, 25 bp, Homo sapien
gcaggcggcagtaggtggcaatctc

SEQ ID NO: 4690903 - DNA, 25 bp, Homo sapien
ccagcaggcggcagtaggtggcaat

SEQ ID NO: 4690904 - DNA, 25 bp, Homo sapien
agcaggcggcagtaggtggcaatct

SEQ ID NO: 4690905 - DNA, 25 bp, Homo sapien
ttccagcaggcggcagtaggtggca

SEQ ID NO: 4690906 - DNA, 25 bp, Homo sapien
cttttggatgttttgcatggaattc

SEQ ID NO: 4690907 - DNA, 25 bp, Homo sapien
gatgttttgcatggaattcctgctg

SEQ ID NO: 4690908 - DNA, 25 bp, Homo sapien
tggatgttttgcatggaattcctgc

SEQ ID NO: 4690909 - DNA, 25 bp, Homo sapien
tgccatccacaatctggggggtggt

SEQ ID NO: 4690910 - DNA, 25 bp, Homo sapien
tcagttctttatgccctttggaatg

SEQ ID NO: 4690911 - DNA, 25 bp, Homo sapien
gactataataaggtcttaacttgga

SEQ ID NO: 4690912 - DNA, 25 bp, Homo sapien
tgacttaaataggtcctctgcttca

SEQ ID NO: 4690913 - DNA, 25 bp, Homo sapien
gctgtaatctagctgttggctggca

SEQ ID NO: 4690914 - DNA, 25 bp, Homo sapien
atgattttcagtgtttgagagaaaa

SEQ ID NO: 4690915 - DNA, 25 bp, Homo sapien
agaaaattgatggaaaaagtttgca

SEQ ID NO: 4690916 - DNA, 25 bp, Homo sapien
ctgttcacaaaatagagcatcatga

SEQ ID NO: 4690917 - DNA, 25 bp, Homo sapien
cacaaaatagagcatcatgattttc

SEQ ID NO: 4690918 - DNA, 25 bp, Homo sapien
gcatgcattctcttagctgggcaaa

SEQ ID NO: 4690919 - DNA, 25 bp, Homo sapien
tacaaccgattgtgaagctctagtg

SEQ ID NO: 4690920 - DNA, 25 bp, Homo sapien
caacctgtcgagaattaggcctcac

SEQ ID NO: 4690921 - DNA, 25 bp, Homo sapien
gagtatcgtggttagcttgcagcaa

SEQ ID NO: 4690922 - DNA, 25 bp, Homo sapien
gagtaaatactggtgtttgatacct

SEQ ID NO: 4690923 - DNA, 25 bp, Homo sapien
aatgagtaaatactggtgtttgata

SEQ ID NO: 4690924 - DNA, 25 bp, Homo sapien
agtaaatactggtgtttgatacctg

SEQ ID NO: 4690925 - DNA, 25 bp, Homo sapien
tgagtaaatactggtgtttgatacc

SEQ ID NO: 4690926 - DNA, 25 bp, Homo sapien
taaccaagtgcctaagtctttcagc

SEQ ID NO: 4690927 - DNA, 25 bp, Homo sapien
tgacttggcaaaagaatcaggtgct

SEQ ID NO: 4690928 - DNA, 25 bp, Homo sapien
caagtcatgcatcagatttgtggga

SEQ ID NO: 4690929 - DNA, 25 bp, Homo sapien
gcgtttgcactgactaacaagatgg

SEQ ID NO: 4690930 - DNA, 25 bp, Homo sapien
cagtactagccagtggccacatgtg

SEQ ID NO: 4690931 - DNA, 25 bp, Homo sapien
tgatattttgtataaactgggataa

SEQ ID NO: 4690932 - DNA, 25 bp, Homo sapien
taagtgtgagttttacctcaatttc

SEQ ID NO: 4690933 - DNA, 25 bp, Homo sapien
tatgatcagcgtctctaattttact

SEQ ID NO: 4690934 - DNA, 25 bp, Homo sapien
caaaggcccggcttcactctccctt

SEQ ID NO: 4690935 - DNA, 25 bp, Homo sapien
cttccttcgacactggccgagcgga

SEQ ID NO: 4690936 - DNA, 25 bp, Homo sapien
caagtcttctcctagcttttcagct

SEQ ID NO: 4690937 - DNA, 25 bp, Homo sapien
tggaagaggtcctcgaaaccaagtc

SEQ ID NO: 4690938 - DNA, 25 bp, Homo sapien
ctccgtcgccaagccgcgccgtcgc

SEQ ID NO: 4690939 - DNA, 25 bp, Homo sapien
gagacgaggcgcctccgtcgccaag

SEQ ID NO: 4690940 - DNA, 25 bp, Homo sapien
tctgccccggcgagacgaggcgcct

SEQ ID NO: 4690941 - DNA, 25 bp, Homo sapien
gccgagctctgccccggcgagacga

SEQ ID NO: 4690942 - DNA, 25 bp, Homo sapien
gcagatctataaatggaaggtgacc

SEQ ID NO: 4690943 - DNA, 25 bp, Homo sapien
tatggatccccaggagaactaaaaa

SEQ ID NO: 4690944 - DNA, 25 bp, Homo sapien
taaactccaaactgaagtggctctg

SEQ ID NO: 4690945 - DNA, 25 bp, Homo sapien
gagatgactctctaccatagtttgg

SEQ ID NO: 4690946 - DNA, 25 bp, Homo sapien
cacgggttcaaataagattggtctc

SEQ ID NO: 4690947 - DNA, 25 bp, Homo sapien
aggtaagattgatatagtccctgcc

SEQ ID NO: 4690948 - DNA, 25 bp, Homo sapien
tagtgagactctaccctgtcaacca

SEQ ID NO: 4690949 - DNA, 25 bp, Homo sapien
ggagtgcttcgtttgctcacattca

SEQ ID NO: 4690950 - DNA, 25 bp, Homo sapien
gagccacagacgcttacgagctaag

SEQ ID NO: 4690951 - DNA, 25 bp, Homo sapien
caaagtttaagtgcagaggagccct

SEQ ID NO: 4690952 - DNA, 25 bp, Homo sapien
aagctagtgcccagagtacggtgcc

SEQ ID NO: 4690953 - DNA, 25 bp, Homo sapien
ggcccagctacagaagagccgctga

SEQ ID NO: 4690954 - DNA, 25 bp, Homo sapien
tagctgcctgggttgtgaatggtca

SEQ ID NO: 4690955 - DNA, 25 bp, Homo sapien
cagcatgaagtaggtaacggaagcc

SEQ ID NO: 4690956 - DNA, 25 bp, Homo sapien
ggatcctcaagttttccggtctgga

SEQ ID NO: 4690957 - DNA, 25 bp, Homo sapien
ggtactttcacatcaggacagctgg

SEQ ID NO: 4690958 - DNA, 25 bp, Homo sapien
gaggacaaagttcgtatcgcccacc

SEQ ID NO: 4690959 - DNA, 25 bp, Homo sapien
gatacagctgcgtgctacagggtta

SEQ ID NO: 4690960 - DNA, 25 bp, Homo sapien
taagtaacactgcatgagtagctgg

SEQ ID NO: 4690961 - DNA, 25 bp, Homo sapien
tcaacaaccagagtgtcgacagcca

SEQ ID NO: 4690962 - DNA, 25 bp, Homo sapien
gaagtcattgagcttgttcctgcaa

SEQ ID NO: 4690963 - DNA, 25 bp, Homo sapien
gactagtatacctcacaagtgacag

SEQ ID NO: 4690964 - DNA, 25 bp, Homo sapien
gaagttcactctatagacacacggg

SEQ ID NO: 4690965 - DNA, 25 bp, Homo sapien
tgttcactgtagaaatcaggccact

SEQ ID NO: 4690966 - DNA, 25 bp, Homo sapien
tacaatagatgtgggtgtacccctg

SEQ ID NO: 4690967 - DNA, 25 bp, Homo sapien
gtgttctgttgcaatccctctgtga

SEQ ID NO: 4690968 - DNA, 25 bp, Homo sapien
taatgcatcccgatcaaccagagaa

SEQ ID NO: 4690969 - DNA, 25 bp, Homo sapien
gcacctggctcataagacttgataa

SEQ ID NO: 4690970 - DNA, 25 bp, Homo sapien
gattattaaagtgctagttaagtct

SEQ ID NO: 4690971 - DNA, 25 bp, Homo sapien
tattcacagacgatcatatcacact

SEQ ID NO: 4690972 - DNA, 25 bp, Homo sapien
taaagagaccctatcttgtccagga

SEQ ID NO: 4690973 - DNA, 25 bp, Homo sapien
aacacagcaacagcaatataatgaa

SEQ ID NO: 4690974 - DNA, 25 bp, Homo sapien
gccgctcgccgtcccggaggctccg

SEQ ID NO: 4690975 - DNA, 25 bp, Homo sapien
ccgccgctcgccgtcccggaggctc

SEQ ID NO: 4690976 - DNA, 25 bp, Homo sapien
cgccgctcgccgtcccggaggctcc

SEQ ID NO: 4690977 - DNA, 25 bp, Homo sapien
cgctcgccgtcccggaggctccgcc

SEQ ID NO: 4690978 - DNA, 25 bp, Homo sapien
tcagaatattatggttgatttggaa

SEQ ID NO: 4690979 - DNA, 25 bp, Homo sapien
gattccacgtccacaatagaagcta

SEQ ID NO: 4690980 - DNA, 25 bp, Homo sapien
ggattccacgtccacaatagaagct

SEQ ID NO: 4690981 - DNA, 25 bp, Homo sapien
tccacgtccacaatagaagctatcc

SEQ ID NO: 4690982 - DNA, 25 bp, Homo sapien
ttccacgtccacaatagaagctatc

SEQ ID NO: 4690983 - DNA, 25 bp, Homo sapien
tttaaaatcacatcatcgtccttct

SEQ ID NO: 4690984 - DNA, 25 bp, Homo sapien
acatcatcgtccttcttttcactgg

SEQ ID NO: 4690985 - DNA, 25 bp, Homo sapien
tcttttcactggctatctcattagc

SEQ ID NO: 4690986 - DNA, 25 bp, Homo sapien
tcactggctatctcattagctaaca

SEQ ID NO: 4690987 - DNA, 25 bp, Homo sapien
ggcaaaaccacctcccagtaagtga

SEQ ID NO: 4690988 - DNA, 25 bp, Homo sapien
gaagtaacagtgacatgcagtggca

SEQ ID NO: 4690989 - DNA, 25 bp, Homo sapien
gctagtgcctcatccaaagcttggt

SEQ ID NO: 4690990 - DNA, 25 bp, Homo sapien
taattgaacctgacatgcttgagac

SEQ ID NO: 4690991 - DNA, 25 bp, Homo sapien
tactactactctggactcaaaaaca

SEQ ID NO: 4690992 - DNA, 25 bp, Homo sapien
taccagttggatgccagagggcctg

SEQ ID NO: 4690993 - DNA, 25 bp, Homo sapien
gctcaatcaattaagtcttttatcc

SEQ ID NO: 4690994 - DNA, 25 bp, Homo sapien
tgtactttggtaattacactaagga

SEQ ID NO: 4690995 - DNA, 25 bp, Homo sapien
aagaatgagtctcaacacatgaatg

SEQ ID NO: 4690996 - DNA, 25 bp, Homo sapien
aactcaagaatgagtctcaacacat

SEQ ID NO: 4690997 - DNA, 25 bp, Homo sapien
tcaagaatgagtctcaacacatgaa

SEQ ID NO: 4690998 - DNA, 25 bp, Homo sapien
actcaagaatgagtctcaacacatg

SEQ ID NO: 4690999 - DNA, 25 bp, Homo sapien
tagatactgagtctgaagagacact

SEQ ID NO: 4691000 - DNA, 25 bp, Homo sapien
catcacttccattatttgtagatgg

SEQ ID NO: 4691001 - DNA, 25 bp, Homo sapien
cactattaagagtagatactgagtc

SEQ ID NO: 4691002 - DNA, 25 bp, Homo sapien
ctgagtctgaagagacactgatttt

SEQ ID NO: 4691003 - DNA, 25 bp, Homo sapien
ggcattggaaaataagtaatagtgg

SEQ ID NO: 4691004 - DNA, 25 bp, Homo sapien
gcagggagttttgcctgtgttgttc

SEQ ID NO: 4691005 - DNA, 25 bp, Homo sapien
agtagaacaataatagggcattgga

SEQ ID NO: 4691006 - DNA, 25 bp, Homo sapien
caataattggcatatagtcattact

SEQ ID NO: 4691007 - DNA, 25 bp, Homo sapien
cacagccccagcttcgcacaggctc

SEQ ID NO: 4691008 - DNA, 25 bp, Homo sapien
cccagcttcgcacaggctcctggag

SEQ ID NO: 4691009 - DNA, 25 bp, Homo sapien
ccccagcttcgcacaggctcctgga

SEQ ID NO: 4691010 - DNA, 25 bp, Homo sapien
aggctcaagtgattcatttgccaag

SEQ ID NO: 4691011 - DNA, 25 bp, Homo sapien
caacacctggcaagttttcaaaatt

SEQ ID NO: 4691012 - DNA, 25 bp, Homo sapien
cacaacacctggcaagttttcaaaa

SEQ ID NO: 4691013 - DNA, 25 bp, Homo sapien
aagtgattcatttgccaaggcctcc

SEQ ID NO: 4691014 - DNA, 25 bp, Homo sapien
gctctaacccctgtcctagcaaggg

SEQ ID NO: 4691015 - DNA, 25 bp, Homo sapien
tccacagggttctacacaatccagc

SEQ ID NO: 4691016 - DNA, 25 bp, Homo sapien
ggatctcatcctttactgcttttta

SEQ ID NO: 4691017 - DNA, 25 bp, Homo sapien
tctcctcatggtctatttgctgctc

SEQ ID NO: 4691018 - DNA, 25 bp, Homo sapien
ttcaaggatttttgtgtccatatgc

SEQ ID NO: 4691019 - DNA, 25 bp, Homo sapien
tattctatagatacggtgtattaca

SEQ ID NO: 4691020 - DNA, 25 bp, Homo sapien
cagggtaatggtgttctcatagagt

SEQ ID NO: 4691021 - DNA, 25 bp, Homo sapien
taccagctgaattcactttgctagt

SEQ ID NO: 4691022 - DNA, 25 bp, Homo sapien
gttcaagaccagcctggccaacatg

SEQ ID NO: 4691023 - DNA, 25 bp, Homo sapien
gcaggtggaccacttgaggccaaga

SEQ ID NO: 4691024 - DNA, 25 bp, Homo sapien
ccaacatggcaaaaccccatctcta

SEQ ID NO: 4691025 - DNA, 25 bp, Homo sapien
ggccaacatggcaaaaccccatctc

SEQ ID NO: 4691026 - DNA, 25 bp, Homo sapien
aaagttggttttttgctgggtgcag

SEQ ID NO: 4691027 - DNA, 25 bp, Homo sapien
gaatgagactctatcaaacaagaac

SEQ ID NO: 4691028 - DNA, 25 bp, Homo sapien
tgtaatacacagcatggcatctgtc

SEQ ID NO: 4691029 - DNA, 25 bp, Homo sapien
agtcccaactacacaggagaattgc

SEQ ID NO: 4691030 - DNA, 25 bp, Homo sapien
agtgcagcaacacaatctcggctta

SEQ ID NO: 4691031 - DNA, 25 bp, Homo sapien
caggcaattcttctgcctcaacctc

SEQ ID NO: 4691032 - DNA, 25 bp, Homo sapien
tactgcaacctctgcctcccaggtt

SEQ ID NO: 4691033 - DNA, 25 bp, Homo sapien
gggatcacaggcgcgtgccaacaca

SEQ ID NO: 4691034 - DNA, 25 bp, Homo sapien
ctgctgttcacttccattccctaca

SEQ ID NO: 4691035 - DNA, 25 bp, Homo sapien
atcagtacatctgctagctcttttt

SEQ ID NO: 4691036 - DNA, 25 bp, Homo sapien
cagtacatctgctagctctttttgc

SEQ ID NO: 4691037 - DNA, 25 bp, Homo sapien
gctgttcacttccattccctacaat

SEQ ID NO: 4691038 - DNA, 25 bp, Homo sapien
tttcacaagctccttttcccctggc

SEQ ID NO: 4691039 - DNA, 25 bp, Homo sapien
cttttcacaagctccttttcccctg

SEQ ID NO: 4691040 - DNA, 25 bp, Homo sapien
agctccttttcccctggctggtcgt

SEQ ID NO: 4691041 - DNA, 25 bp, Homo sapien
ccttttcccctggctggtcgtccat

SEQ ID NO: 4691042 - DNA, 25 bp, Homo sapien
taatggcacagggttaatggtggat

SEQ ID NO: 4691043 - DNA, 25 bp, Homo sapien
gtttcactggtaggctcatctctgg

SEQ ID NO: 4691044 - DNA, 25 bp, Homo sapien
ttttggagccctactaatggcacag

SEQ ID NO: 4691045 - DNA, 25 bp, Homo sapien
gagagctgattagaaagaggcccat

SEQ ID NO: 4691046 - DNA, 25 bp, Homo sapien
gttacgcaagcaatgcagcaatcct

SEQ ID NO: 4691047 - DNA, 25 bp, Homo sapien
tcagttacgcaagcaatgcagcaat

SEQ ID NO: 4691048 - DNA, 25 bp, Homo sapien
taaccttcagttacgcaagcaatgc

SEQ ID NO: 4691049 - DNA, 25 bp, Homo sapien
aaacaataaccttcagttacgcaag

SEQ ID NO: 4691050 - DNA, 25 bp, Homo sapien
taacatctatagttttagcacctgc

SEQ ID NO: 4691051 - DNA, 25 bp, Homo sapien
tataggtctggagcaaacatctgtt

SEQ ID NO: 4691052 - DNA, 25 bp, Homo sapien
tgttcacccagaattatccctccat

SEQ ID NO: 4691053 - DNA, 25 bp, Homo sapien
aaacctagtacagggtggacactca

SEQ ID NO: 4691054 - DNA, 25 bp, Homo sapien
ggagcatttaccgaggcacagccta

SEQ ID NO: 4691055 - DNA, 25 bp, Homo sapien
tgaaaactacgctgtcctcatcggc

SEQ ID NO: 4691056 - DNA, 25 bp, Homo sapien
cacattcggcactgaaagggtaaca

SEQ ID NO: 4691057 - DNA, 25 bp, Homo sapien
tcatcggccactggtgtgaaaggac

SEQ ID NO: 4691058 - DNA, 25 bp, Homo sapien
aggagttccatcatgccctctgaca

SEQ ID NO: 4691059 - DNA, 25 bp, Homo sapien
ttcttgtatttcacaccggaagacg

SEQ ID NO: 4691060 - DNA, 25 bp, Homo sapien
ctgaagagctctgcattgtaatgac

SEQ ID NO: 4691061 - DNA, 25 bp, Homo sapien
gatagggtagtttgctatttcagtg

SEQ ID NO: 4691062 - DNA, 25 bp, Homo sapien
aaaagtagccaacagatctcctctg

SEQ ID NO: 4691063 - DNA, 25 bp, Homo sapien
tatattttggcccatgaggctagaa

SEQ ID NO: 4691064 - DNA, 25 bp, Homo sapien
taatcatttcaacctagtgagggca

SEQ ID NO: 4691065 - DNA, 25 bp, Homo sapien
gaagattacctactttggagggcaa

SEQ ID NO: 4691066 - DNA, 25 bp, Homo sapien
agagaaggtaaagatgtcactgtca

SEQ ID NO: 4691067 - DNA, 25 bp, Homo sapien
ctaaaataacctttaccatcatctt

SEQ ID NO: 4691068 - DNA, 25 bp, Homo sapien
tgcttggcagaacggcggaaggcag

SEQ ID NO: 4691069 - DNA, 25 bp, Homo sapien
gggtctgcttggcagaacggcggaa

SEQ ID NO: 4691070 - DNA, 25 bp, Homo sapien
tagaatttcccctgaaccacagcat

SEQ ID NO: 4691071 - DNA, 25 bp, Homo sapien
gagcagttagccacttggtatctga

SEQ ID NO: 4691072 - DNA, 25 bp, Homo sapien
ggtagcaacatgttcccaatatgac

SEQ ID NO: 4691073 - DNA, 25 bp, Homo sapien
cagcgcctggcggtttggccatatt

SEQ ID NO: 4691074 - DNA, 25 bp, Homo sapien
ctttcaatggcaagttctttattag

SEQ ID NO: 4691075 - DNA, 25 bp, Homo sapien
tcttcttatcaattccttggcgtag

SEQ ID NO: 4691076 - DNA, 25 bp, Homo sapien
tgtttgctgcacatagatgacaatc

SEQ ID NO: 4691077 - DNA, 25 bp, Homo sapien
tagtttaaagcactgtctgtcctta

SEQ ID NO: 4691078 - DNA, 25 bp, Homo sapien
gcactgacttcagtaaacaaaataa

SEQ ID NO: 4691079 - DNA, 25 bp, Homo sapien
aagcactgacttcagtaaacaaaat

SEQ ID NO: 4691080 - DNA, 25 bp, Homo sapien
tttaatacagtgtaaaactatgcca

SEQ ID NO: 4691081 - DNA, 25 bp, Homo sapien
tatgccattagattgataaaagcca

SEQ ID NO: 4691082 - DNA, 25 bp, Homo sapien
actatttcgtacatcttttcctgga

SEQ ID NO: 4691083 - DNA, 25 bp, Homo sapien
caaatctaataagtgcatgtcacta

SEQ ID NO: 4691084 - DNA, 25 bp, Homo sapien
agtgcatgtcactatttcgtacatc

SEQ ID NO: 4691085 - DNA, 25 bp, Homo sapien
tgtcactatttcgtacatcttttcc

SEQ ID NO: 4691086 - DNA, 25 bp, Homo sapien
aaatgtggggattttggattccagc

SEQ ID NO: 4691087 - DNA, 25 bp, Homo sapien
taacatacgactttccatctgaact

SEQ ID NO: 4691088 - DNA, 25 bp, Homo sapien
ggattttggattccagctccccgta

SEQ ID NO: 4691089 - DNA, 25 bp, Homo sapien
tccagctccccgtaataacatacga

SEQ ID NO: 4691090 - DNA, 25 bp, Homo sapien
tagtactacgtttgctgaagggcca

SEQ ID NO: 4691091 - DNA, 25 bp, Homo sapien
ggagaaatcgaacaggctcctgtac

SEQ ID NO: 4691092 - DNA, 25 bp, Homo sapien
tttcattaggtgagcaaacgcggac

SEQ ID NO: 4691093 - DNA, 25 bp, Homo sapien
tacagctgtggtcataaacaggact

SEQ ID NO: 4691094 - DNA, 25 bp, Homo sapien
catgctggcatacactttagtccca

SEQ ID NO: 4691095 - DNA, 25 bp, Homo sapien
atgctggcatacactttagtcccag

SEQ ID NO: 4691096 - DNA, 25 bp, Homo sapien
gaataggaaggacatcttgaaagaa

SEQ ID NO: 4691097 - DNA, 25 bp, Homo sapien
agaagaataggaaggacatcttgaa

SEQ ID NO: 4691098 - DNA, 25 bp, Homo sapien
ctaaatccccgcacaaacacaaaga

SEQ ID NO: 4691099 - DNA, 25 bp, Homo sapien
tgctttaagacagcgaaaagttgtt

SEQ ID NO: 4691100 - DNA, 25 bp, Homo sapien
tgtttttggctggtttaccctgtca

SEQ ID NO: 4691101 - DNA, 25 bp, Homo sapien
taaaagattatcatcgggaatttcc

SEQ ID NO: 4691102 - DNA, 25 bp, Homo sapien
agtggtcaccaccttaattaagtga

SEQ ID NO: 4691103 - DNA, 25 bp, Homo sapien
tagcgagccgtgcttttgacactgc

SEQ ID NO: 4691104 - DNA, 25 bp, Homo sapien
ccaaagattacttgctaagtgtcaa

SEQ ID NO: 4691105 - DNA, 25 bp, Homo sapien
caaaaaagacgttgttgagatacag

SEQ ID NO: 4691106 - DNA, 25 bp, Homo sapien
gcctaggcaagtagattacttgagg

SEQ ID NO: 4691107 - DNA, 25 bp, Homo sapien
ctaggcaagtagattacttgaggcc

SEQ ID NO: 4691108 - DNA, 25 bp, Homo sapien
aaaaaagccaggctcagtagctcac

SEQ ID NO: 4691109 - DNA, 25 bp, Homo sapien
gaggcctaggcaagtagattacttg

SEQ ID NO: 4691110 - DNA, 25 bp, Homo sapien
tgtttaaccagtgtcaactaaagag

SEQ ID NO: 4691111 - DNA, 25 bp, Homo sapien
tcccaaattagtgaaggcatccttc

SEQ ID NO: 4691112 - DNA, 25 bp, Homo sapien
gggcatttactaagcagtactctag

SEQ ID NO: 4691113 - DNA, 25 bp, Homo sapien
gtcaagtatccaactaccaatgttt

SEQ ID NO: 4691114 - DNA, 25 bp, Homo sapien
tccaagcatacaacttcatataaag

SEQ ID NO: 4691115 - DNA, 25 bp, Homo sapien
tccagactgtggcaggcgaactgaa

SEQ ID NO: 4691116 - DNA, 25 bp, Homo sapien
gtgtcagtattattctttctctccc

SEQ ID NO: 4691117 - DNA, 25 bp, Homo sapien
tgaaggactggctgtagttttcctc

SEQ ID NO: 4691118 - DNA, 25 bp, Homo sapien
ccagatccactcaggagaggttcat

SEQ ID NO: 4691119 - DNA, 25 bp, Homo sapien
ccactcaggagaggttcatcattat

SEQ ID NO: 4691120 - DNA, 25 bp, Homo sapien
gatacatcaccagatccactcagga

SEQ ID NO: 4691121 - DNA, 25 bp, Homo sapien
gcacattctttggatacatcaccag

SEQ ID NO: 4691122 - DNA, 25 bp, Homo sapien
agaagatgctgtggctatcagacgt

SEQ ID NO: 4691123 - DNA, 25 bp, Homo sapien
tctgtgacactggtgccctaatgca

SEQ ID NO: 4691124 - DNA, 25 bp, Homo sapien
caggatcctgacattaagaagatgc

SEQ ID NO: 4691125 - DNA, 25 bp, Homo sapien
tatcagacgtaagcagaagttactg

SEQ ID NO: 4691126 - DNA, 25 bp, Homo sapien
ctttgtgataagaatgcggtatttc

SEQ ID NO: 4691127 - DNA, 25 bp, Homo sapien
ggacaccgtttcttactaaggatga

SEQ ID NO: 4691128 - DNA, 25 bp, Homo sapien
acaactgcttcggtctcacattcaa

SEQ ID NO: 4691129 - DNA, 25 bp, Homo sapien
gcggtatttctctaccaggtggtca

SEQ ID NO: 4691130 - DNA, 25 bp, Homo sapien
aagagaatatggtttagattaaaga

SEQ ID NO: 4691131 - DNA, 25 bp, Homo sapien
gagaatatggtttagattaaagaat

SEQ ID NO: 4691132 - DNA, 25 bp, Homo sapien
aaagagaatatggtttagattaaag

SEQ ID NO: 4691133 - DNA, 25 bp, Homo sapien
ctaaaagagaatatggtttagatta

SEQ ID NO: 4691134 - DNA, 25 bp, Homo sapien
tgttttgcttgcaaaactttgagga

SEQ ID NO: 4691135 - DNA, 25 bp, Homo sapien
gcaaaactttgaggaatgcatgaac

SEQ ID NO: 4691136 - DNA, 25 bp, Homo sapien
gcctaacattgcagaaaattacttt

SEQ ID NO: 4691137 - DNA, 25 bp, Homo sapien
tcagaaggggaacaccatacaaatg

SEQ ID NO: 4691138 - DNA, 25 bp, Homo sapien
tttgcatactattggagaaactgct

SEQ ID NO: 4691139 - DNA, 25 bp, Homo sapien
aatacattcacgacccaggtttggg

SEQ ID NO: 4691140 - DNA, 25 bp, Homo sapien
cccaggtttgggatttgcatactat

SEQ ID NO: 4691141 - DNA, 25 bp, Homo sapien
tctgagcaatacattcacgacccag

SEQ ID NO: 4691142 - DNA, 25 bp, Homo sapien
tacagagagatatcattcataattt

SEQ ID NO: 4691143 - DNA, 25 bp, Homo sapien
acagagagatatcattcataattta

SEQ ID NO: 4691144 - DNA, 25 bp, Homo sapien
ttacagagagatatcattcataatt

SEQ ID NO: 4691145 - DNA, 25 bp, Homo sapien
acactgtggttgtaacagttactca

SEQ ID NO: 4691146 - DNA, 25 bp, Homo sapien
ggtgaaggtcctatctcatgtttga

SEQ ID NO: 4691147 - DNA, 25 bp, Homo sapien
cagttactcaacgataaatactagc

SEQ ID NO: 4691148 - DNA, 25 bp, Homo sapien
tctgtctggatataggatgatggga

SEQ ID NO: 4691149 - DNA, 25 bp, Homo sapien
tgtaaaatgtcatggagctatgcac

SEQ ID NO: 4691150 - DNA, 25 bp, Homo sapien
tatgcaaactttgacagctcagctg

SEQ ID NO: 4691151 - DNA, 25 bp, Homo sapien
tgagatacaaatgagcacgtgctgt

SEQ ID NO: 4691152 - DNA, 25 bp, Homo sapien
gctcagctggtagagtagactgtaa

SEQ ID NO: 4691153 - DNA, 25 bp, Homo sapien
ggtaatccaccagcctcggtcttcg

SEQ ID NO: 4691154 - DNA, 25 bp, Homo sapien
atccaccagcctcggtcttcgaaag

SEQ ID NO: 4691155 - DNA, 25 bp, Homo sapien
caccagcctcggtcttcgaaagtgc

SEQ ID NO: 4691156 - DNA, 25 bp, Homo sapien
taatccaccagcctcggtcttcgaa

SEQ ID NO: 4691157 - DNA, 25 bp, Homo sapien
aagctcaataccttgtcttgtttga

SEQ ID NO: 4691158 - DNA, 25 bp, Homo sapien
gggacaagctcaataccttgtcttg

SEQ ID NO: 4691159 - DNA, 25 bp, Homo sapien
agttagggacaagctcaataccttg

SEQ ID NO: 4691160 - DNA, 25 bp, Homo sapien
tagggacaagctcaataccttgtct

SEQ ID NO: 4691161 - DNA, 25 bp, Homo sapien
tgctctccgagcttcacgatgccac

SEQ ID NO: 4691162 - DNA, 25 bp, Homo sapien
cgagcttcacgatgccacccaagga

SEQ ID NO: 4691163 - DNA, 25 bp, Homo sapien
actgctctccgagcttcacgatgcc

SEQ ID NO: 4691164 - DNA, 25 bp, Homo sapien
gtgttcgccactgctctccgagctt

SEQ ID NO: 4691165 - DNA, 25 bp, Homo sapien
aatgtgcttcaacccgcgtactgca

SEQ ID NO: 4691166 - DNA, 25 bp, Homo sapien
aggaatgtgcttcaacccgcgtact

SEQ ID NO: 4691167 - DNA, 25 bp, Homo sapien
gccacaatacatccttagcagaaag

SEQ ID NO: 4691168 - DNA, 25 bp, Homo sapien
caaacaaaagccacaatacatcctt

SEQ ID NO: 4691169 - DNA, 25 bp, Homo sapien
tcagcaggagttgtaatgagtctcc

SEQ ID NO: 4691170 - DNA, 25 bp, Homo sapien
gacgcggccatagtgccaggttcac

SEQ ID NO: 4691171 - DNA, 25 bp, Homo sapien
ttcctggaataaggagagccagcag

SEQ ID NO: 4691172 - DNA, 25 bp, Homo sapien
gttcaccatacacatagcaccaggg

SEQ ID NO: 4691173 - DNA, 25 bp, Homo sapien
gatggttcaacaaaggtgcacagtg

SEQ ID NO: 4691174 - DNA, 25 bp, Homo sapien
caataatcaatacttccaaaaggca

SEQ ID NO: 4691175 - DNA, 25 bp, Homo sapien
taacttgtagtgtgatggttcaaca

SEQ ID NO: 4691176 - DNA, 25 bp, Homo sapien
gctctgattaccatccaaggtggag

SEQ ID NO: 4691177 - DNA, 25 bp, Homo sapien
gcagctcaccccaacaaaaaggtca

SEQ ID NO: 4691178 - DNA, 25 bp, Homo sapien
gagtgataaagaagggaccacgcag

SEQ ID NO: 4691179 - DNA, 25 bp, Homo sapien
cccaacaaaaaggtcagcatatgcc

SEQ ID NO: 4691180 - DNA, 25 bp, Homo sapien
ataaagaagggaccacgcagctcac

SEQ ID NO: 4691181 - DNA, 25 bp, Homo sapien
caaatatctggcaagtcaaggactc

SEQ ID NO: 4691182 - DNA, 25 bp, Homo sapien
gagacgctcttcagaactgatacta

SEQ ID NO: 4691183 - DNA, 25 bp, Homo sapien
ctacaaaaccaaatatctggcaagt

SEQ ID NO: 4691184 - DNA, 25 bp, Homo sapien
ggagacgctcttcagaactgatact

SEQ ID NO: 4691185 - DNA, 25 bp, Homo sapien
caagaagtacacatagcccctgaga

SEQ ID NO: 4691186 - DNA, 25 bp, Homo sapien
tggcatagcgcttatcaggacaggc

SEQ ID NO: 4691187 - DNA, 25 bp, Homo sapien
tactaatagcaagccaggtggtcaa

SEQ ID NO: 4691188 - DNA, 25 bp, Homo sapien
aaatacacaggcgtagtctccaggg

SEQ ID NO: 4691189 - DNA, 25 bp, Homo sapien
ccattaagagggcctttgcttctaa

SEQ ID NO: 4691190 - DNA, 25 bp, Homo sapien
tccattaagagggcctttgcttcta

SEQ ID NO: 4691191 - DNA, 25 bp, Homo sapien
atccattaagagggcctttgcttct

SEQ ID NO: 4691192 - DNA, 25 bp, Homo sapien
tcctagtgaattaggaatacttaga

SEQ ID NO: 4691193 - DNA, 25 bp, Homo sapien
cacacacgggaaccccgtaactgag

SEQ ID NO: 4691194 - DNA, 25 bp, Homo sapien
gcatatgaagcccaaatagctggaa

SEQ ID NO: 4691195 - DNA, 25 bp, Homo sapien
gacataacacaaaggcatgggcaaa

SEQ ID NO: 4691196 - DNA, 25 bp, Homo sapien
cagttgcttatgaccgacacccttc

SEQ ID NO: 4691197 - DNA, 25 bp, Homo sapien
aatgctgacgcttttcacactcagg

SEQ ID NO: 4691198 - DNA, 25 bp, Homo sapien
gaaaggccaaatgactcgtttacag

SEQ ID NO: 4691199 - DNA, 25 bp, Homo sapien
tcctataccaagtcaacatgcagat

SEQ ID NO: 4691200 - DNA, 25 bp, Homo sapien
tattatctaacgcaagccccaaact

SEQ ID NO: 4691201 - DNA, 25 bp, Homo sapien
tgggccatctgggagtctaaccctg

SEQ ID NO: 4691202 - DNA, 25 bp, Homo sapien
gaaaacacgtatctttcagcactgg

SEQ ID NO: 4691203 - DNA, 25 bp, Homo sapien
catagttgctttcgtagagctttcc

SEQ ID NO: 4691204 - DNA, 25 bp, Homo sapien
tgtgggttggaaatcacttctcctc

SEQ ID NO: 4691205 - DNA, 25 bp, Homo sapien
gttagtcagctattgggttccctga

SEQ ID NO: 4691206 - DNA, 25 bp, Homo sapien
gagaggcccaagaagcaggaaatac

SEQ ID NO: 4691207 - DNA, 25 bp, Homo sapien
cggtcccaaatcatgtataaataag

SEQ ID NO: 4691208 - DNA, 25 bp, Homo sapien
taagacataaatgctaactgcactg

SEQ ID NO: 4691209 - DNA, 25 bp, Homo sapien
cagcaatccatcatggagaggccca

SEQ ID NO: 4691210 - DNA, 25 bp, Homo sapien
tataccttactgtgagaattggctc

SEQ ID NO: 4691211 - DNA, 25 bp, Homo sapien
caagatggtcctacaaaagtctgca

SEQ ID NO: 4691212 - DNA, 25 bp, Homo sapien
tccaataaagcagtggtgaagctct

SEQ ID NO: 4691213 - DNA, 25 bp, Homo sapien
tatttccagagtagcttgctgccca

SEQ ID NO: 4691214 - DNA, 25 bp, Homo sapien
cacttgaaccatgtagtaagtaggg

SEQ ID NO: 4691215 - DNA, 25 bp, Homo sapien
aaggcacccaggacattttgttctc

SEQ ID NO: 4691216 - DNA, 25 bp, Homo sapien
catgtagtaagtagggtcactgctg

SEQ ID NO: 4691217 - DNA, 25 bp, Homo sapien
gtcactgctgacaaaggcacccagg

SEQ ID NO: 4691218 - DNA, 25 bp, Homo sapien
tttctctagccttttgggtaatcat

SEQ ID NO: 4691219 - DNA, 25 bp, Homo sapien
atttctctagccttttgggtaatca

SEQ ID NO: 4691220 - DNA, 25 bp, Homo sapien
ggctgggaatgttcggttaatatcc

SEQ ID NO: 4691221 - DNA, 25 bp, Homo sapien
cctcctgtgtccttaaagtagtcat

SEQ ID NO: 4691222 - DNA, 25 bp, Homo sapien
ttaatatcccgggtgatagcactgt

SEQ ID NO: 4691223 - DNA, 25 bp, Homo sapien
tcctcctgtgtccttaaagtagtca

SEQ ID NO: 4691224 - DNA, 25 bp, Homo sapien
catgcgctcacgaaacactgttaat

SEQ ID NO: 4691225 - DNA, 25 bp, Homo sapien
tcttggcagcaaatgattactaccc

SEQ ID NO: 4691226 - DNA, 25 bp, Homo sapien
gcacctcatatacagcatgcgctca

SEQ ID NO: 4691227 - DNA, 25 bp, Homo sapien
ggacagggtgatgttctattcaacc

SEQ ID NO: 4691228 - DNA, 25 bp, Homo sapien
ggcaataaccaatctcttcatcata

SEQ ID NO: 4691229 - DNA, 25 bp, Homo sapien
tggccctggcaataaccaatctctt

SEQ ID NO: 4691230 - DNA, 25 bp, Homo sapien
agaaatgactggccctggcaataac

SEQ ID NO: 4691231 - DNA, 25 bp, Homo sapien
gactggccctggcaataaccaatct

SEQ ID NO: 4691232 - DNA, 25 bp, Homo sapien
tgactaccaatagcaacaagctggg

SEQ ID NO: 4691233 - DNA, 25 bp, Homo sapien
ccaggcttgtgggactttgagatat

SEQ ID NO: 4691234 - DNA, 25 bp, Homo sapien
caagcacttataacactctggcaag

SEQ ID NO: 4691235 - DNA, 25 bp, Homo sapien
ctgaaggtgagaacgaagataaatc

SEQ ID NO: 4691236 - DNA, 25 bp, Homo sapien
gagcccatagtcaaacatgatcttg

SEQ ID NO: 4691237 - DNA, 25 bp, Homo sapien
tgcatgaggcgctccaactggtaaa

SEQ ID NO: 4691238 - DNA, 25 bp, Homo sapien
agaacactgaatgcctgttcttcag

SEQ ID NO: 4691239 - DNA, 25 bp, Homo sapien
tgcaatgcaaatcttcgaagttttg

SEQ ID NO: 4691240 - DNA, 25 bp, Homo sapien
actctttttgtcaaacacaagctgg

SEQ ID NO: 4691241 - DNA, 25 bp, Homo sapien
agtcctgtactctttttgtcaaaca

SEQ ID NO: 4691242 - DNA, 25 bp, Homo sapien
tcctgtactctttttgtcaaacaca

SEQ ID NO: 4691243 - DNA, 25 bp, Homo sapien
ttagtcctgtactctttttgtcaaa

SEQ ID NO: 4691244 - DNA, 25 bp, Homo sapien
gcaaaccaattagttctgggcacat

SEQ ID NO: 4691245 - DNA, 25 bp, Homo sapien
atagcaaaccaattagttctgggca

SEQ ID NO: 4691246 - DNA, 25 bp, Homo sapien
ccaattagttctgggcacatatgca

SEQ ID NO: 4691247 - DNA, 25 bp, Homo sapien
aaccaattagttctgggcacatatg

SEQ ID NO: 4691248 - DNA, 25 bp, Homo sapien
gaccatgtagagagggaattttgca

SEQ ID NO: 4691249 - DNA, 25 bp, Homo sapien
aaagcaggtcgatgatatggaagac

SEQ ID NO: 4691250 - DNA, 25 bp, Homo sapien
accactgggaggcatacatgtgtgc

SEQ ID NO: 4691251 - DNA, 25 bp, Homo sapien
gcttatatccaggaagtggttgtac

SEQ ID NO: 4691252 - DNA, 25 bp, Homo sapien
tccaagggcgacattaaaaataaca

SEQ ID NO: 4691253 - DNA, 25 bp, Homo sapien
taatccaagggcgacattaaaaata

SEQ ID NO: 4691254 - DNA, 25 bp, Homo sapien
ctttaataatccaagggcgacatta

SEQ ID NO: 4691255 - DNA, 25 bp, Homo sapien
ttaataatccaagggcgacattaaa

SEQ ID NO: 4691256 - DNA, 25 bp, Homo sapien
gaaaatacaaacacatatagaaaaa

SEQ ID NO: 4691257 - DNA, 25 bp, Homo sapien
aaacacatatagaaaaaatgtgttg

SEQ ID NO: 4691258 - DNA, 25 bp, Homo sapien
cttgaagaaaatacaaacacatata

SEQ ID NO: 4691259 - DNA, 25 bp, Homo sapien
tacaaacacatatagaaaaaatgtg

SEQ ID NO: 4691260 - DNA, 25 bp, Homo sapien
gctgaaccctaaagaacttcaaggc

SEQ ID NO: 4691261 - DNA, 25 bp, Homo sapien
tctgagcggtatctcttaggaagct

SEQ ID NO: 4691262 - DNA, 25 bp, Homo sapien
tcaaagtctgtcaacagcaggtcat

SEQ ID NO: 4691263 - DNA, 25 bp, Homo sapien
tcatgttgcaggctaattccattag

SEQ ID NO: 4691264 - DNA, 25 bp, Homo sapien
gtattataaatgatcaggaatagtg

SEQ ID NO: 4691265 - DNA, 25 bp, Homo sapien
gatcaggaatagtgagacactaagt

SEQ ID NO: 4691266 - DNA, 25 bp, Homo sapien
taaatgttaacactaatatgtatta

SEQ ID NO: 4691267 - DNA, 25 bp, Homo sapien
aatagtgagacactaagtgaaaaac

SEQ ID NO: 4691268 - DNA, 25 bp, Homo sapien
catgaaccgccctttcgaggtctaa

SEQ ID NO: 4691269 - DNA, 25 bp, Homo sapien
aagtggacccatgcggttcatacca

SEQ ID NO: 4691270 - DNA, 25 bp, Homo sapien
tggactcaaaccacagatcctcatg

SEQ ID NO: 4691271 - DNA, 25 bp, Homo sapien
tacctcacgcaagccacagaatgca

SEQ ID NO: 4691272 - DNA, 25 bp, Homo sapien
gaattcctacaatataacaagctag

SEQ ID NO: 4691273 - DNA, 25 bp, Homo sapien
tcctacaatataacaagctagagaa

SEQ ID NO: 4691274 - DNA, 25 bp, Homo sapien
tacattataggtattatgtactgaa

SEQ ID NO: 4691275 - DNA, 25 bp, Homo sapien
ctgaattcctacaatataacaagct

SEQ ID NO: 4691276 - DNA, 25 bp, Homo sapien
cagataaggactaagggagaccagc

SEQ ID NO: 4691277 - DNA, 25 bp, Homo sapien
gcaaaatttagggttcattacagag

SEQ ID NO: 4691278 - DNA, 25 bp, Homo sapien
tgattctaaaaggtaggaacaagca

SEQ ID NO: 4691279 - DNA, 25 bp, Homo sapien
tacagagagagcatccattcagaag

SEQ ID NO: 4691280 - DNA, 25 bp, Homo sapien
tctcatgggttcacggctgatgctg

SEQ ID NO: 4691281 - DNA, 25 bp, Homo sapien
tcacggctgatgctgacttttgcag

SEQ ID NO: 4691282 - DNA, 25 bp, Homo sapien
gatgctgacttttgcagcatgggtg

SEQ ID NO: 4691283 - DNA, 25 bp, Homo sapien
taaaaacaccatagcttctcatggg

SEQ ID NO: 4691284 - DNA, 25 bp, Homo sapien
tcttacattctcatgataggatatg

SEQ ID NO: 4691285 - DNA, 25 bp, Homo sapien
tagaacttttacacggaccaacatc

SEQ ID NO: 4691286 - DNA, 25 bp, Homo sapien
tctcatgataggatatgggtgtttc

SEQ ID NO: 4691287 - DNA, 25 bp, Homo sapien
caagtattctgcattgagtatgaat

SEQ ID NO: 4691288 - DNA, 25 bp, Homo sapien
agggttgattctccctcagtatcat

SEQ ID NO: 4691289 - DNA, 25 bp, Homo sapien
acaagagttggtgtgtgataagtac

SEQ ID NO: 4691290 - DNA, 25 bp, Homo sapien
gctgcctcaccctcatagtaatagg

SEQ ID NO: 4691291 - DNA, 25 bp, Homo sapien
cattaacccttattatagctgcctc

SEQ ID NO: 4691292 - DNA, 25 bp, Homo sapien
tgcactgaagaccaagacttctggt

SEQ ID NO: 4691293 - DNA, 25 bp, Homo sapien
gaagtattagaaagtagtgggtgct

SEQ ID NO: 4691294 - DNA, 25 bp, Homo sapien
ggcctgggcaatctcagtcattatg

SEQ ID NO: 4691295 - DNA, 25 bp, Homo sapien
aatcatcagagtagggtataagccc

SEQ ID NO: 4691296 - DNA, 25 bp, Homo sapien
tcaaatcgctcgatggggtcttctt

SEQ ID NO: 4691297 - DNA, 25 bp, Homo sapien
ctcaaatcgctcgatggggtcttct

SEQ ID NO: 4691298 - DNA, 25 bp, Homo sapien
gtagtgcaatcttgctggtcaccag

SEQ ID NO: 4691299 - DNA, 25 bp, Homo sapien
caacctcatgttagcttcttgtaga

SEQ ID NO: 4691300 - DNA, 25 bp, Homo sapien
ccagctcatgggctaagtcatcgtt

SEQ ID NO: 4691301 - DNA, 25 bp, Homo sapien
tatccaggtccttccgtagtgcaat

SEQ ID NO: 4691302 - DNA, 25 bp, Homo sapien
tttgcaccgtaaggaggaaactcaa

SEQ ID NO: 4691303 - DNA, 25 bp, Homo sapien
taggcagaaatacccgaacagggag

SEQ ID NO: 4691304 - DNA, 25 bp, Homo sapien
caagcagacaagcagagggcgctaa

SEQ ID NO: 4691305 - DNA, 25 bp, Homo sapien
tcaaccctgatgagcagactgtggt

SEQ ID NO: 4691306 - DNA, 25 bp, Homo sapien
tgtccagaaccaggcaatgatgtcc

SEQ ID NO: 4691307 - DNA, 25 bp, Homo sapien
caggtctgcgtgacttcactaggga

SEQ ID NO: 4691308 - DNA, 25 bp, Homo sapien
gatgctagtcagtgcagtgagacaa

SEQ ID NO: 4691309 - DNA, 25 bp, Homo sapien
tacgaggccagcattccctaatgac

SEQ ID NO: 4691310 - DNA, 25 bp, Homo sapien
gaatacaaacaaccttatatcaaca

SEQ ID NO: 4691311 - DNA, 25 bp, Homo sapien
gatcaacacaactgataaacttcta

SEQ ID NO: 4691312 - DNA, 25 bp, Homo sapien
cttctagctaagttggttatggaaa

SEQ ID NO: 4691313 - DNA, 25 bp, Homo sapien
aaagaaatgacgtacatcaggaatg

SEQ ID NO: 4691314 - DNA, 25 bp, Homo sapien
agaaaggtccagagttattcaaact

SEQ ID NO: 4691315 - DNA, 25 bp, Homo sapien
gcctggctgagattaataactttaa

SEQ ID NO: 4691316 - DNA, 25 bp, Homo sapien
ggtccagagttattcaaacttcctc

SEQ ID NO: 4691317 - DNA, 25 bp, Homo sapien
aagaagaaaggtccagagttattca

SEQ ID NO: 4691318 - DNA, 25 bp, Homo sapien
tcatcagcagctccttattcagagc

SEQ ID NO: 4691319 - DNA, 25 bp, Homo sapien
gtcatcagcagctccttattcagag

SEQ ID NO: 4691320 - DNA, 25 bp, Homo sapien
tcttctgcatcaatcaacttctgtt

SEQ ID NO: 4691321 - DNA, 25 bp, Homo sapien
gccttgtcgagttcccgacggcaca

SEQ ID NO: 4691322 - DNA, 25 bp, Homo sapien
agattctgccttgtcgagttcccga

SEQ ID NO: 4691323 - DNA, 25 bp, Homo sapien
tcgagttcccgacggcacatttctt

SEQ ID NO: 4691324 - DNA, 25 bp, Homo sapien
aatctcagattctgccttgtcgagt

SEQ ID NO: 4691325 - DNA, 25 bp, Homo sapien
tctcaatttccaccttattggctgt

SEQ ID NO: 4691326 - DNA, 25 bp, Homo sapien
caccttattggctgtctgctgcttc

SEQ ID NO: 4691327 - DNA, 25 bp, Homo sapien
gtctgctgcttctccaatctttcac

SEQ ID NO: 4691328 - DNA, 25 bp, Homo sapien
aatttccaccttattggctgtctgc

SEQ ID NO: 4691329 - DNA, 25 bp, Homo sapien
cactgtagaactggagacaggcaaa

SEQ ID NO: 4691330 - DNA, 25 bp, Homo sapien
cattggaaaatggatgcatgctggt

SEQ ID NO: 4691331 - DNA, 25 bp, Homo sapien
tttgaggaacttttataacattgga

SEQ ID NO: 4691332 - DNA, 25 bp, Homo sapien
aggaagtacacagcctctaaaaggt

SEQ ID NO: 4691333 - DNA, 25 bp, Homo sapien
tatgccttttacacgcccttctttg

SEQ ID NO: 4691334 - DNA, 25 bp, Homo sapien
aacctccttggttgagcttatgcct

SEQ ID NO: 4691335 - DNA, 25 bp, Homo sapien
tgttgaaaaattcccggcaccgctc

SEQ ID NO: 4691336 - DNA, 25 bp, Homo sapien
ggtctgtgccagttctagctccatt

SEQ ID NO: 4691337 - DNA, 25 bp, Homo sapien
cattgagggcaagccctaaatggtg

SEQ ID NO: 4691338 - DNA, 25 bp, Homo sapien
gaaccccggttgctgtctttatgga

SEQ ID NO: 4691339 - DNA, 25 bp, Homo sapien
gagctcagtgttcggttaaaccacg

SEQ ID NO: 4691340 - DNA, 25 bp, Homo sapien
ctttatggagctcagtgttcggtta

SEQ ID NO: 4691341 - DNA, 25 bp, Homo sapien
tacagtttaacagaaccaggtggct

SEQ ID NO: 4691342 - DNA, 25 bp, Homo sapien
tcagtagtcttaccccagaggttgc

SEQ ID NO: 4691343 - DNA, 25 bp, Homo sapien
tttctagagtgtccagagcgtcggc

SEQ ID NO: 4691344 - DNA, 25 bp, Homo sapien
ggatggagacctcgcagcatgtgca

SEQ ID NO: 4691345 - DNA, 25 bp, Homo sapien
ttaatcaatatgctgttaaaataaa

SEQ ID NO: 4691346 - DNA, 25 bp, Homo sapien
aatatttaatcaatatgctgttaaa

SEQ ID NO: 4691347 - DNA, 25 bp, Homo sapien
accaaaatatttaatcaatatgctg

SEQ ID NO: 4691348 - DNA, 25 bp, Homo sapien
caaaatatttaatcaatatgctgtt

SEQ ID NO: 4691349 - DNA, 25 bp, Homo sapien
gcagccaccctgctggttactgaca

SEQ ID NO: 4691350 - DNA, 25 bp, Homo sapien
tactgacagaagtacgagtcaacat

SEQ ID NO: 4691351 - DNA, 25 bp, Homo sapien
tggttactgacagaagtacgagtca

SEQ ID NO: 4691352 - DNA, 25 bp, Homo sapien
agccaccctgctggttactgacaga

SEQ ID NO: 4691353 - DNA, 25 bp, Homo sapien
gccctgacgagccaggcaccagacc

SEQ ID NO: 4691354 - DNA, 25 bp, Homo sapien
ggaaaagagccaagggcgtcacagg

SEQ ID NO: 4691355 - DNA, 25 bp, Homo sapien
agccaagggcgtcacaggagaaccc

SEQ ID NO: 4691356 - DNA, 25 bp, Homo sapien
acccagcagccctgacgagccaggc

SEQ ID NO: 4691357 - DNA, 25 bp, Homo sapien
tcaaatttgggaataacatcactga

SEQ ID NO: 4691358 - DNA, 25 bp, Homo sapien
gggaataacatcactgaactcaggg

SEQ ID NO: 4691359 - DNA, 25 bp, Homo sapien
ttcactttcaaatttgggaataaca

SEQ ID NO: 4691360 - DNA, 25 bp, Homo sapien
tgggaataacatcactgaactcagg

SEQ ID NO: 4691361 - DNA, 25 bp, Homo sapien
gcattgtctttcttgctcttgggcc

SEQ ID NO: 4691362 - DNA, 25 bp, Homo sapien
gagcattgtctttcttgctcttggg

SEQ ID NO: 4691363 - DNA, 25 bp, Homo sapien
ggagggagcattgtctttcttgctc

SEQ ID NO: 4691364 - DNA, 25 bp, Homo sapien
ggagggagggagcattgtctttctt

SEQ ID NO: 4691365 - DNA, 25 bp, Homo sapien
tgttcacaattgccacaggcctcag

SEQ ID NO: 4691366 - DNA, 25 bp, Homo sapien
tgcacaggagacaggttgttgaggt

SEQ ID NO: 4691367 - DNA, 25 bp, Homo sapien
acaggagacaggttgttgaggtgga

SEQ ID NO: 4691368 - DNA, 25 bp, Homo sapien
cacaggagacaggttgttgaggtgg

SEQ ID NO: 4691369 - DNA, 25 bp, Homo sapien
caaaatgaaagctggtccacgtggg

SEQ ID NO: 4691370 - DNA, 25 bp, Homo sapien
aaattagggcaatcgtacttccagg

SEQ ID NO: 4691371 - DNA, 25 bp, Homo sapien
ggacgtcctttccagcataccaggg

SEQ ID NO: 4691372 - DNA, 25 bp, Homo sapien
cataccagggcttatggaggcaaaa

SEQ ID NO: 4691373 - DNA, 25 bp, Homo sapien
catgctgaggccttttgcttggcaa

SEQ ID NO: 4691374 - DNA, 25 bp, Homo sapien
taacctaagcaagggttggagcttg

SEQ ID NO: 4691375 - DNA, 25 bp, Homo sapien
tagcccatgggaagacgtggacatt

SEQ ID NO: 4691376 - DNA, 25 bp, Homo sapien
tctgtggaacacagtctgtagccca

SEQ ID NO: 4691377 - DNA, 25 bp, Homo sapien
cctttctgagtttccgccgggctgg

SEQ ID NO: 4691378 - DNA, 25 bp, Homo sapien
tcagtgggcaatagagggaacaatg

SEQ ID NO: 4691379 - DNA, 25 bp, Homo sapien
tagaatggagcgagggccatctcca

SEQ ID NO: 4691380 - DNA, 25 bp, Homo sapien
tttggtgggccacactccattgtgc

SEQ ID NO: 4691381 - DNA, 25 bp, Homo sapien
agctgtgtcggttccttggtgctga

SEQ ID NO: 4691382 - DNA, 25 bp, Homo sapien
gataggcgtcagctgctgccaggct

SEQ ID NO: 4691383 - DNA, 25 bp, Homo sapien
tcagggtggagctgtgtcggttcct

SEQ ID NO: 4691384 - DNA, 25 bp, Homo sapien
tccttggtgctgataggcgtcagct

SEQ ID NO: 4691385 - DNA, 25 bp, Homo sapien
tttttcattgacagcccctattgcc

SEQ ID NO: 4691386 - DNA, 25 bp, Homo sapien
tcacttgggccctcaagatttcttc

SEQ ID NO: 4691387 - DNA, 25 bp, Homo sapien
tcttggcttcaccaaattgcctgag

SEQ ID NO: 4691388 - DNA, 25 bp, Homo sapien
gcctctgagcgtcgcaccatttatt

SEQ ID NO: 4691389 - DNA, 25 bp, Homo sapien
tgtttcattgatgcgttttgctgac

SEQ ID NO: 4691390 - DNA, 25 bp, Homo sapien
catgtttcattgatgcgttttgctg

SEQ ID NO: 4691391 - DNA, 25 bp, Homo sapien
atgtttcattgatgcgttttgctga

SEQ ID NO: 4691392 - DNA, 25 bp, Homo sapien
tcatgtttcattgatgcgttttgct

SEQ ID NO: 4691393 - DNA, 25 bp, Homo sapien
gctagacataaacaagagggcccat

SEQ ID NO: 4691394 - DNA, 25 bp, Homo sapien
tggctagacataaacaagagggccc

SEQ ID NO: 4691395 - DNA, 25 bp, Homo sapien
gacataaacaagagggcccatttca

SEQ ID NO: 4691396 - DNA, 25 bp, Homo sapien
ttagtggctagacataaacaagagg

SEQ ID NO: 4691397 - DNA, 25 bp, Homo sapien
aaaacttgctcttcgattgtcccag

SEQ ID NO: 4691398 - DNA, 25 bp, Homo sapien
ttcgattgtcccagttcttgttgag

SEQ ID NO: 4691399 - DNA, 25 bp, Homo sapien
gcagcaacagggtccccataaaaac

SEQ ID NO: 4691400 - DNA, 25 bp, Homo sapien
ttacatcagaatctaaagcagcaac

SEQ ID NO: 4691401 - DNA, 25 bp, Homo sapien
gggttgccatgagactacgaaatta

SEQ ID NO: 4691402 - DNA, 25 bp, Homo sapien
cctccggacttattggacaggcaga

SEQ ID NO: 4691403 - DNA, 25 bp, Homo sapien
tgtttcgatgaaagatcctccggac

SEQ ID NO: 4691404 - DNA, 25 bp, Homo sapien
gcagaaatgcctgaacgccttggcg

SEQ ID NO: 4691405 - DNA, 25 bp, Homo sapien
ctcattaagagaaataatcgtgtcc

SEQ ID NO: 4691406 - DNA, 25 bp, Homo sapien
tcattaagagaaataatcgtgtcca

SEQ ID NO: 4691407 - DNA, 25 bp, Homo sapien
cattaagagaaataatcgtgtccat

SEQ ID NO: 4691408 - DNA, 25 bp, Homo sapien
atgccaggcaaaggattaggaaggg

SEQ ID NO: 4691409 - DNA, 25 bp, Homo sapien
tgccaggcaaaggattaggaagggg

SEQ ID NO: 4691410 - DNA, 25 bp, Homo sapien
catgccaggcaaaggattaggaagg

SEQ ID NO: 4691411 - DNA, 25 bp, Homo sapien
gggtagcggtacaggtcaagatgag

SEQ ID NO: 4691412 - DNA, 25 bp, Homo sapien
gaatatatatgggataattaaccaa

SEQ ID NO: 4691413 - DNA, 25 bp, Homo sapien
cacccctgcaccttatataggaaat

SEQ ID NO: 4691414 - DNA, 25 bp, Homo sapien
ggcacatggttaatcataattccag

SEQ ID NO: 4691415 - DNA, 25 bp, Homo sapien
tgtatgttagtattcaccctgatgc

SEQ ID NO: 4691416 - DNA, 25 bp, Homo sapien
tacaatgtacagtggtcccatgaga

SEQ ID NO: 4691417 - DNA, 25 bp, Homo sapien
tcaatgacagactgcttgtacaatg

SEQ ID NO: 4691418 - DNA, 25 bp, Homo sapien
catttaagcccacaagtttagtcat

SEQ ID NO: 4691419 - DNA, 25 bp, Homo sapien
tttagtcattcaccgcacaatgaag

SEQ ID NO: 4691420 - DNA, 25 bp, Homo sapien
actttgaaaggaagtggcattgtac

SEQ ID NO: 4691421 - DNA, 25 bp, Homo sapien
ctactttgaaaggaagtggcattgt

SEQ ID NO: 4691422 - DNA, 25 bp, Homo sapien
tcagttatttggaggttagttatac

SEQ ID NO: 4691423 - DNA, 25 bp, Homo sapien
tatacagtcctgttagtgggtttct

SEQ ID NO: 4691424 - DNA, 25 bp, Homo sapien
gaatcaccatctggaggtaggcgct

SEQ ID NO: 4691425 - DNA, 25 bp, Homo sapien
ggttgaatcgccaataccatcaggg

SEQ ID NO: 4691426 - DNA, 25 bp, Homo sapien
gaacaagattctaggcacagacgag

SEQ ID NO: 4691427 - DNA, 25 bp, Homo sapien
tgaacagggtgttaggtggctcaca

SEQ ID NO: 4691428 - DNA, 25 bp, Homo sapien
catcatgatgttcacaaatgacgcc

SEQ ID NO: 4691429 - DNA, 25 bp, Homo sapien
tgtcatcatgatgttcacaaatgac

SEQ ID NO: 4691430 - DNA, 25 bp, Homo sapien
tcatgatgttcacaaatgacgccat

SEQ ID NO: 4691431 - DNA, 25 bp, Homo sapien
tcatcatgatgttcacaaatgacgc

SEQ ID NO: 4691432 - DNA, 25 bp, Homo sapien
tcagcgcacagtagttgagagcagg

SEQ ID NO: 4691433 - DNA, 25 bp, Homo sapien
caggcatttggggacgtaggtgaat

SEQ ID NO: 4691434 - DNA, 25 bp, Homo sapien
tatcatctcgaatgcacagctttca

SEQ ID NO: 4691435 - DNA, 25 bp, Homo sapien
gggactgtatcatctcgaatgcaca

SEQ ID NO: 4691436 - DNA, 25 bp, Homo sapien
gcctaggcattccatattaagaaga

SEQ ID NO: 4691437 - DNA, 25 bp, Homo sapien
gaggaaagcccgataggcattccat

SEQ ID NO: 4691438 - DNA, 25 bp, Homo sapien
gatttggatagacaagaggaaagcc

SEQ ID NO: 4691439 - DNA, 25 bp, Homo sapien
cccagatggcattctaacgtggaat

SEQ ID NO: 4691440 - DNA, 25 bp, Homo sapien
tgttttaggcaccagaatacagtgg

SEQ ID NO: 4691441 - DNA, 25 bp, Homo sapien
tatgaacttctgttatgggccaggc

SEQ ID NO: 4691442 - DNA, 25 bp, Homo sapien
gatctgaatgtcaagaaagagccag

SEQ ID NO: 4691443 - DNA, 25 bp, Homo sapien
tgcagataatcgaaacaggttgacc

SEQ ID NO: 4691444 - DNA, 25 bp, Homo sapien
tgtggctatataataagtctttaaa

SEQ ID NO: 4691445 - DNA, 25 bp, Homo sapien
taccacgcaatcttgattactgtgg

SEQ ID NO: 4691446 - DNA, 25 bp, Homo sapien
gatctctgtgtctgtccgtctacca

SEQ ID NO: 4691447 - DNA, 25 bp, Homo sapien
tggcttctctgttctactccatcga

SEQ ID NO: 4691448 - DNA, 25 bp, Homo sapien
cattcaatttcagactcaaactcca

SEQ ID NO: 4691449 - DNA, 25 bp, Homo sapien
attcaatttcagactcaaactccat

SEQ ID NO: 4691450 - DNA, 25 bp, Homo sapien
ttccaggtgccaggatttttcacaa

SEQ ID NO: 4691451 - DNA, 25 bp, Homo sapien
tccaggtgccaggatttttcacaat

SEQ ID NO: 4691452 - DNA, 25 bp, Homo sapien
caatatcctattgggcagatcagca

SEQ ID NO: 4691453 - DNA, 25 bp, Homo sapien
ggatttttcacaatatcctattggg

SEQ ID NO: 4691454 - DNA, 25 bp, Homo sapien
tacacctagctcctaaaagtggcag

SEQ ID NO: 4691455 - DNA, 25 bp, Homo sapien
ggcccagtggccagtagcattcaag

SEQ ID NO: 4691456 - DNA, 25 bp, Homo sapien
gtaatgggtcagtattcaggcagca

SEQ ID NO: 4691457 - DNA, 25 bp, Homo sapien
ctaaacataatgagggcggagcaga

SEQ ID NO: 4691458 - DNA, 25 bp, Homo sapien
cccgggccccgcattgtttgttgtg

SEQ ID NO: 4691459 - DNA, 25 bp, Homo sapien
ttgttgtgcgtccttagcagcggcg

SEQ ID NO: 4691460 - DNA, 25 bp, Homo sapien
agagcagggagcaatcccggccccg

SEQ ID NO: 4691461 - DNA, 25 bp, Homo sapien
gttgaggcggttggcggagccggcc

SEQ ID NO: 4691462 - DNA, 25 bp, Homo sapien
gcgcagctcccaggttcggaagtta

SEQ ID NO: 4691463 - DNA, 25 bp, Homo sapien
gcagtgcgacgcctactccatttgt

SEQ ID NO: 4691464 - DNA, 25 bp, Homo sapien
tcggaagttacgaagtttccgtgca

SEQ ID NO: 4691465 - DNA, 25 bp, Homo sapien
ctcgggaggcagtgcgacgcctact

SEQ ID NO: 4691466 - DNA, 25 bp, Homo sapien
aactgaggctcagaacggttcttgg

SEQ ID NO: 4691467 - DNA, 25 bp, Homo sapien
aaagtctgacccaaccataaggagg

SEQ ID NO: 4691468 - DNA, 25 bp, Homo sapien
tcccagcgaggttcattataggcag

SEQ ID NO: 4691469 - DNA, 25 bp, Homo sapien
ggtaggtgttcagccaaagtctgac

SEQ ID NO: 4691470 - DNA, 25 bp, Homo sapien
gaatgctgggcaccaagaacttgag

SEQ ID NO: 4691471 - DNA, 25 bp, Homo sapien
cctgggctgttcaaggtcctctgtc

SEQ ID NO: 4691472 - DNA, 25 bp, Homo sapien
cctctgtcttggcactgagtggtca

SEQ ID NO: 4691473 - DNA, 25 bp, Homo sapien
gagtggtcaggtcgtttctgctcca

SEQ ID NO: 4691474 - DNA, 25 bp, Homo sapien
ttaatgctaaaagggcacacagcat

SEQ ID NO: 4691475 - DNA, 25 bp, Homo sapien
taattatgtccttgggataaatttc

SEQ ID NO: 4691476 - DNA, 25 bp, Homo sapien
gctgaaactctgtgcacatccttaa

SEQ ID NO: 4691477 - DNA, 25 bp, Homo sapien
gctaggataaaggatatgcagattt

SEQ ID NO: 4691478 - DNA, 25 bp, Homo sapien
attgtcaaattgctccctagaaggc

SEQ ID NO: 4691479 - DNA, 25 bp, Homo sapien
tgtgcttttgtgaaaagtcgatttc

SEQ ID NO: 4691480 - DNA, 25 bp, Homo sapien
gcattttgtctcgacttgaggtggt

SEQ ID NO: 4691481 - DNA, 25 bp, Homo sapien
ctggcagcctgaagatttcacagcg

SEQ ID NO: 4691482 - DNA, 25 bp, Homo sapien
ctcagggtgagcgtgaagcagcctc

SEQ ID NO: 4691483 - DNA, 25 bp, Homo sapien
tgtttgctttggctcccactgtctc

SEQ ID NO: 4691484 - DNA, 25 bp, Homo sapien
tcctgcggttagtgttggatactca

SEQ ID NO: 4691485 - DNA, 25 bp, Homo sapien
ctgacttcagaatgtttgctttggc

SEQ ID NO: 4691486 - DNA, 25 bp, Homo sapien
tctccttcctacaagccagcgcaga

SEQ ID NO: 4691487 - DNA, 25 bp, Homo sapien
tctggtagttactgagcatgcgtcc

SEQ ID NO: 4691488 - DNA, 25 bp, Homo sapien
gaagtggagaaaatagtcccacaag

SEQ ID NO: 4691489 - DNA, 25 bp, Homo sapien
tggccagccccagattagacattga

SEQ ID NO: 4691490 - DNA, 25 bp, Homo sapien
ccatccttctggctactggattcgt

SEQ ID NO: 4691491 - DNA, 25 bp, Homo sapien
gctctcttgctatttgcgagacatg

SEQ ID NO: 4691492 - DNA, 25 bp, Homo sapien
cagcagcccaaggaatcgatagtct

SEQ ID NO: 4691493 - DNA, 25 bp, Homo sapien
acatgcaattctgcgaggcctccca

SEQ ID NO: 4691494 - DNA, 25 bp, Homo sapien
agtcgctaggccacggctctcttgc

SEQ ID NO: 4691495 - DNA, 25 bp, Homo sapien
tttggggaccgaagagctctttgta

SEQ ID NO: 4691496 - DNA, 25 bp, Homo sapien
gtaggggctttctagactgttgagt

SEQ ID NO: 4691497 - DNA, 25 bp, Homo sapien
ccgggtacaggagtcccacgtgacg

SEQ ID NO: 4691498 - DNA, 25 bp, Homo sapien
ccccgacagcaccgggtacaggagt

SEQ ID NO: 4691499 - DNA, 25 bp, Homo sapien
cctggaagtgtcttgtgaggtctgg

SEQ ID NO: 4691500 - DNA, 25 bp, Homo sapien
agcaccgggtacaggagtcccacgt

SEQ ID NO: 4691501 - DNA, 25 bp, Homo sapien
tcagtaaccgtggatacagcccacg

SEQ ID NO: 4691502 - DNA, 25 bp, Homo sapien
gtaaccgtggatacagcccacgcag

SEQ ID NO: 4691503 - DNA, 25 bp, Homo sapien
aaccgtggatacagcccacgcaggc

SEQ ID NO: 4691504 - DNA, 25 bp, Homo sapien
cagtaaccgtggatacagcccacgc

SEQ ID NO: 4691505 - DNA, 25 bp, Homo sapien
tggctccgcacccccctcgtccctc

SEQ ID NO: 4691506 - DNA, 25 bp, Homo sapien
ggcagcccgctctgcgctctgctcg

SEQ ID NO: 4691507 - DNA, 25 bp, Homo sapien
agcccgctctgcgctctgctcggct

SEQ ID NO: 4691508 - DNA, 25 bp, Homo sapien
gcagcccgctctgcgctctgctcgg

SEQ ID NO: 4691509 - DNA, 25 bp, Homo sapien
gcccgctctgcgctctgctcggctg

SEQ ID NO: 4691510 - DNA, 25 bp, Homo sapien
gagcagcagtagcaggacagaggcc

SEQ ID NO: 4691511 - DNA, 25 bp, Homo sapien
aggggcccagagcagcagtagcagg

SEQ ID NO: 4691512 - DNA, 25 bp, Homo sapien
caggggcccagagcagcagtagcag

SEQ ID NO: 4691513 - DNA, 25 bp, Homo sapien
cagcagtagcaggacagaggccagg

SEQ ID NO: 4691514 - DNA, 25 bp, Homo sapien
gccgcgcactcctgtgcaccccaca

SEQ ID NO: 4691515 - DNA, 25 bp, Homo sapien
gtctgggggccacagccgcgcactc

SEQ ID NO: 4691516 - DNA, 25 bp, Homo sapien
gcttggggtatctgtcttgggggac

SEQ ID NO: 4691517 - DNA, 25 bp, Homo sapien
aggcctgcacccacgcggaccagcc

SEQ ID NO: 4691518 - DNA, 25 bp, Homo sapien
gatccacatgtgtctgtagcacctg

SEQ ID NO: 4691519 - DNA, 25 bp, Homo sapien
catgccatgtgtgtaggtaggtgca

SEQ ID NO: 4691520 - DNA, 25 bp, Homo sapien
ggtgcatgtgctggtagatccacat

SEQ ID NO: 4691521 - DNA, 25 bp, Homo sapien
gagcaccgatccacagaccgggatc

SEQ ID NO: 4691522 - DNA, 25 bp, Homo sapien
aaccagccgggcctttgtggcaaat

SEQ ID NO: 4691523 - DNA, 25 bp, Homo sapien
ggtggatatgagagcccaacgtgcc

SEQ ID NO: 4691524 - DNA, 25 bp, Homo sapien
cagccgggcctttgtggcaaattgg

SEQ ID NO: 4691525 - DNA, 25 bp, Homo sapien
ccccattgtactccaagatgcttgg

SEQ ID NO: 4691526 - DNA, 25 bp, Homo sapien
cagagcacagttccagggagttacc

SEQ ID NO: 4691527 - DNA, 25 bp, Homo sapien
tgataacagtaattgcaacaatagc

SEQ ID NO: 4691528 - DNA, 25 bp, Homo sapien
gtaattgcaacaatagctgtcaggg

SEQ ID NO: 4691529 - DNA, 25 bp, Homo sapien
taaaagacataattttgataacagt

SEQ ID NO: 4691530 - DNA, 25 bp, Homo sapien
atagctgtcagggacggagcaccta

SEQ ID NO: 4691531 - DNA, 25 bp, Homo sapien
ggtgaagccccccagataaggctgg

SEQ ID NO: 4691532 - DNA, 25 bp, Homo sapien
ggctggcagcctctcaggcgtcatc

SEQ ID NO: 4691533 - DNA, 25 bp, Homo sapien
tggcctgacccgcatccttccagct

SEQ ID NO: 4691534 - DNA, 25 bp, Homo sapien
ggcatcgggcagtcctggtttgtat

SEQ ID NO: 4691535 - DNA, 25 bp, Homo sapien
ctcttctgccaggggtctggtaact

SEQ ID NO: 4691536 - DNA, 25 bp, Homo sapien
tgccaggggtctggtaactccatcc

SEQ ID NO: 4691537 - DNA, 25 bp, Homo sapien
cttctgccaggggtctggtaactcc

SEQ ID NO: 4691538 - DNA, 25 bp, Homo sapien
tctgccaggggtctggtaactccat

SEQ ID NO: 4691539 - DNA, 25 bp, Homo sapien
actctcggtagcctggcactcggtc

SEQ ID NO: 4691540 - DNA, 25 bp, Homo sapien
ggcaatggcactcgtagcgatcggc

SEQ ID NO: 4691541 - DNA, 25 bp, Homo sapien
ctggaaacccggcacgcagtagcag

SEQ ID NO: 4691542 - DNA, 25 bp, Homo sapien
tgtccagctcgcagcgtgggccctg

SEQ ID NO: 4691543 - DNA, 25 bp, Homo sapien
cctcccagggcggcccaggctgtta

SEQ ID NO: 4691544 - DNA, 25 bp, Homo sapien
ctcctcccagggcggcccaggctgt

SEQ ID NO: 4691545 - DNA, 25 bp, Homo sapien
tcctcccagggcggcccaggctgtt

SEQ ID NO: 4691546 - DNA, 25 bp, Homo sapien
ctcccagggcggcccaggctgttac

SEQ ID NO: 4691547 - DNA, 25 bp, Homo sapien
agcagggcggaagaggtcgcgccag

SEQ ID NO: 4691548 - DNA, 25 bp, Homo sapien
cagggcggaagaggtcgcgccaggc

SEQ ID NO: 4691549 - DNA, 25 bp, Homo sapien
acccagagcagggcggaagaggtcg

SEQ ID NO: 4691550 - DNA, 25 bp, Homo sapien
cagagcagggcggaagaggtcgcgc

SEQ ID NO: 4691551 - DNA, 25 bp, Homo sapien
gcgcgcacacacagcggaaggagcc

SEQ ID NO: 4691552 - DNA, 25 bp, Homo sapien
ctcgtcgaggtccagctggcaacgg

SEQ ID NO: 4691553 - DNA, 25 bp, Homo sapien
cacggctggctctggcactcgtcga

SEQ ID NO: 4691554 - DNA, 25 bp, Homo sapien
ccgttgaccaggtcgtggcacgtgc

SEQ ID NO: 4691555 - DNA, 25 bp, Homo sapien
cctcgaggcaggacgcgttgtgctc

SEQ ID NO: 4691556 - DNA, 25 bp, Homo sapien
gttgtgctcgcagggcgccgatgcg

SEQ ID NO: 4691557 - DNA, 25 bp, Homo sapien
cggtgcccgcgcagtcgcaccggaa

SEQ ID NO: 4691558 - DNA, 25 bp, Homo sapien
agtgcgtgccctcgtagccggtgcc

SEQ ID NO: 4691559 - DNA, 25 bp, Homo sapien
tctcacggggttgccgggcagcacc

SEQ ID NO: 4691560 - DNA, 25 bp, Homo sapien
gcagcacctcttcactatgaccagg

SEQ ID NO: 4691561 - DNA, 25 bp, Homo sapien
gggcacacacacgcggacatcaggt

SEQ ID NO: 4691562 - DNA, 25 bp, Homo sapien
acacgcggacatcaggtctcacggg

SEQ ID NO: 4691563 - DNA, 25 bp, Homo sapien
agggcagtggcacaggaaacccgca

SEQ ID NO: 4691564 - DNA, 25 bp, Homo sapien
gggctcgatgcacactcgtcctcgt

SEQ ID NO: 4691565 - DNA, 25 bp, Homo sapien
gtcagagcgctgcaggcatcggccc

SEQ ID NO: 4691566 - DNA, 25 bp, Homo sapien
aacccgcagcatggcggaagctgaa

SEQ ID NO: 4691567 - DNA, 25 bp, Homo sapien
ctggcagtggcctccgttgaggcat

SEQ ID NO: 4691568 - DNA, 25 bp, Homo sapien
ccgttgaggcatggccgtgaggcac

SEQ ID NO: 4691569 - DNA, 25 bp, Homo sapien
acactggaagccattgggcaggtcc

SEQ ID NO: 4691570 - DNA, 25 bp, Homo sapien
cagtggcctccgttgaggcatggcc

SEQ ID NO: 4691571 - DNA, 25 bp, Homo sapien
accaattctgatggtcccagggccc

SEQ ID NO: 4691572 - DNA, 25 bp, Homo sapien
ctgaggaccaccaattctgatggtc

SEQ ID NO: 4691573 - DNA, 25 bp, Homo sapien
gaccaccaattctgatggtcccagg

SEQ ID NO: 4691574 - DNA, 25 bp, Homo sapien
gaggaccaccaattctgatggtccc

SEQ ID NO: 4691575 - DNA, 25 bp, Homo sapien
ttcgggacccccaggagtgtcagcc

SEQ ID NO: 4691576 - DNA, 25 bp, Homo sapien
gggacccccaggagtgtcagccatc

SEQ ID NO: 4691577 - DNA, 25 bp, Homo sapien
gccttcgggacccccaggagtgtca

SEQ ID NO: 4691578 - DNA, 25 bp, Homo sapien
ccaccatcttcaggcgagtgagaga

SEQ ID NO: 4691579 - DNA, 25 bp, Homo sapien
ccctccagacaggttgagagtggtg

SEQ ID NO: 4691580 - DNA, 25 bp, Homo sapien
catgccctccagacaggttgagagt

SEQ ID NO: 4691581 - DNA, 25 bp, Homo sapien
gagcccccggctccattgccatgcc

SEQ ID NO: 4691582 - DNA, 25 bp, Homo sapien
cattgccatgccctccagacaggtt

SEQ ID NO: 4691583 - DNA, 25 bp, Homo sapien
agacaaagccaaggttcagtaatgt

SEQ ID NO: 4691584 - DNA, 25 bp, Homo sapien
ctttgggagagacaaagccaaggtt

SEQ ID NO: 4691585 - DNA, 25 bp, Homo sapien
tgggagagacaaagccaaggttcag

SEQ ID NO: 4691586 - DNA, 25 bp, Homo sapien
gagagacaaagccaaggttcagtaa

SEQ ID NO: 4691587 - DNA, 25 bp, Homo sapien
tccagggtcgctagatggagcacaa

SEQ ID NO: 4691588 - DNA, 25 bp, Homo sapien
cagtgtggtgcgaaacctcagtgcc

SEQ ID NO: 4691589 - DNA, 25 bp, Homo sapien
tgtggaccccagactcgaagatagg

SEQ ID NO: 4691590 - DNA, 25 bp, Homo sapien
cagtcgcaacggaaatgagtccaca

SEQ ID NO: 4691591 - DNA, 25 bp, Homo sapien
tggtcaggcccgaagctgagcatca

SEQ ID NO: 4691592 - DNA, 25 bp, Homo sapien
ccagctgcggagtcattggcaaact

SEQ ID NO: 4691593 - DNA, 25 bp, Homo sapien
cactcaggaatactgttaggccagc

SEQ ID NO: 4691594 - DNA, 25 bp, Homo sapien
tcgctgggctggcttgagttatcca

SEQ ID NO: 4691595 - DNA, 25 bp, Homo sapien
ccgtgaaattggcagggcaggtaca

SEQ ID NO: 4691596 - DNA, 25 bp, Homo sapien
ggtacagtggaagtcattccaggtg

SEQ ID NO: 4691597 - DNA, 25 bp, Homo sapien
tgggcacacgtaggccccgtgaaat

SEQ ID NO: 4691598 - DNA, 25 bp, Homo sapien
cattccaggtgacgaggcaagtccc

SEQ ID NO: 4691599 - DNA, 25 bp, Homo sapien
ccagcacgggagctgcccaggacac

SEQ ID NO: 4691600 - DNA, 25 bp, Homo sapien
acgggagctgcccaggacacacact

SEQ ID NO: 4691601 - DNA, 25 bp, Homo sapien
gggagctgcccaggacacacactca

SEQ ID NO: 4691602 - DNA, 25 bp, Homo sapien
agcacgggagctgcccaggacacac

SEQ ID NO: 4691603 - DNA, 25 bp, Homo sapien
gaccctcgcggaacgtggcctccgc

SEQ ID NO: 4691604 - DNA, 25 bp, Homo sapien
cgagcaagcgccctgacgacgcgtt

SEQ ID NO: 4691605 - DNA, 25 bp, Homo sapien
acgacgcgttgtgcccgctgaacgc

SEQ ID NO: 4691606 - DNA, 25 bp, Homo sapien
tcgcgcgtgcgaaaggccagcgaca

SEQ ID NO: 4691607 - DNA, 25 bp, Homo sapien
ccccccgccagcgagccattgcgca

SEQ ID NO: 4691608 - DNA, 25 bp, Homo sapien
gccccccgccagcgagccattgcgc

SEQ ID NO: 4691609 - DNA, 25 bp, Homo sapien
cccccgccagcgagccattgcgcac

SEQ ID NO: 4691610 - DNA, 25 bp, Homo sapien
gcggtgccaggcaccatcggccacg

SEQ ID NO: 4691611 - DNA, 25 bp, Homo sapien
gcgcggccccggtatgggcagcaca

SEQ ID NO: 4691612 - DNA, 25 bp, Homo sapien
ggtatgggcagcacagcgccgggca

SEQ ID NO: 4691613 - DNA, 25 bp, Homo sapien
catggccagacgcacgcggtgccag

SEQ ID NO: 4691614 - DNA, 25 bp, Homo sapien
cgcagcgccaccggggtggcggcac

SEQ ID NO: 4691615 - DNA, 25 bp, Homo sapien
agcgccaccggggtggcggcaccat

SEQ ID NO: 4691616 - DNA, 25 bp, Homo sapien
cgccaccggggtggcggcaccatcc

SEQ ID NO: 4691617 - DNA, 25 bp, Homo sapien
cagcgccaccggggtggcggcacca

SEQ ID NO: 4691618 - DNA, 25 bp, Homo sapien
agcagccggtgaagttctcagccag

SEQ ID NO: 4691619 - DNA, 25 bp, Homo sapien
cagccggtgaagttctcagccagca

SEQ ID NO: 4691620 - DNA, 25 bp, Homo sapien
ccaagcagccggtgaagttctcagc

SEQ ID NO: 4691621 - DNA, 25 bp, Homo sapien
caagcagccggtgaagttctcagcc

SEQ ID NO: 4691622 - DNA, 25 bp, Homo sapien
ctcgggcgccaggggccgcgccggg

SEQ ID NO: 4691623 - DNA, 25 bp, Homo sapien
ggcaggggcaggccgcccagcgcca

SEQ ID NO: 4691624 - DNA, 25 bp, Homo sapien
cgggccggggccgcgccaagggcag

SEQ ID NO: 4691625 - DNA, 25 bp, Homo sapien
cggggccgcgccaagggcaggggca

SEQ ID NO: 4691626 - DNA, 25 bp, Homo sapien
aagaggtcacggcaggcaccgtcgt

SEQ ID NO: 4691627 - DNA, 25 bp, Homo sapien
gtcgacgtgggcttcgcagcgcggg

SEQ ID NO: 4691628 - DNA, 25 bp, Homo sapien
caggcaaaggcgtcgaagaggtcac

SEQ ID NO: 4691629 - DNA, 25 bp, Homo sapien
ggcgtcccaggccaagacgcgaagt

SEQ ID NO: 4691630 - DNA, 25 bp, Homo sapien
gaccagggaagggaagcgactcatc

SEQ ID NO: 4691631 - DNA, 25 bp, Homo sapien
taaactgtcctcctcatgtcacaga

SEQ ID NO: 4691632 - DNA, 25 bp, Homo sapien
accatagccccagggggcattcgca

SEQ ID NO: 4691633 - DNA, 25 bp, Homo sapien
ggaagcgactcatccacagacctgg

SEQ ID NO: 4691634 - DNA, 25 bp, Homo sapien
tgtattttatcaggaaatttatcaa

SEQ ID NO: 4691635 - DNA, 25 bp, Homo sapien
gtattttatcaggaaatttatcaaa

SEQ ID NO: 4691636 - DNA, 25 bp, Homo sapien
ctgtattttatcaggaaatttatca

SEQ ID NO: 4691637 - DNA, 25 bp, Homo sapien
ctgccatcgaggcaggtgacattca

SEQ ID NO: 4691638 - DNA, 25 bp, Homo sapien
gagagccaccctcacatgggctgcc

SEQ ID NO: 4691639 - DNA, 25 bp, Homo sapien
tgcactccttggatgggacaggcaa

SEQ ID NO: 4691640 - DNA, 25 bp, Homo sapien
gcactccttggatgggacaggcaac

SEQ ID NO: 4691641 - DNA, 25 bp, Homo sapien
caggggttggcttcacaggggagag

SEQ ID NO: 4691642 - DNA, 25 bp, Homo sapien
caagcaggggttggcttcacagggg

SEQ ID NO: 4691643 - DNA, 25 bp, Homo sapien
agcaggggttggcttcacaggggag

SEQ ID NO: 4691644 - DNA, 25 bp, Homo sapien
tcaagcaggggttggcttcacaggg

SEQ ID NO: 4691645 - DNA, 25 bp, Homo sapien
gcattgcagatacattcagacaccc

SEQ ID NO: 4691646 - DNA, 25 bp, Homo sapien
ggcattgcagatacattcagacacc

SEQ ID NO: 4691647 - DNA, 25 bp, Homo sapien
ccacttcacagaactggccggagaa

SEQ ID NO: 4691648 - DNA, 25 bp, Homo sapien
cagaactggccggagaatctggcat

SEQ ID NO: 4691649 - DNA, 25 bp, Homo sapien
ctccagcagtgggaatggcagcggc

SEQ ID NO: 4691650 - DNA, 25 bp, Homo sapien
tgcaggtacggccacctccagcagt

SEQ ID NO: 4691651 - DNA, 25 bp, Homo sapien
gcacaggctgcaggtacggccacct

SEQ ID NO: 4691652 - DNA, 25 bp, Homo sapien
tccagcagtgggaatggcagcggca

SEQ ID NO: 4691653 - DNA, 25 bp, Homo sapien
gactggcggcgctttcgggctgcca

SEQ ID NO: 4691654 - DNA, 25 bp, Homo sapien
tggcggcgctttcgggctgccagga

SEQ ID NO: 4691655 - DNA, 25 bp, Homo sapien
ctggcttgggctgtaggtgccctca

SEQ ID NO: 4691656 - DNA, 25 bp, Homo sapien
ctgtaggtgccctcagactggcggc

SEQ ID NO: 4691657 - DNA, 25 bp, Homo sapien
gagaagtccgcagcctctctaggcc

SEQ ID NO: 4691658 - DNA, 25 bp, Homo sapien
actcctgaacacactgtgaacccac

SEQ ID NO: 4691659 - DNA, 25 bp, Homo sapien
ctgccaaggcggaaccccgagggtg

SEQ ID NO: 4691660 - DNA, 25 bp, Homo sapien
gacacttccgtagcaatgtcccgag

SEQ ID NO: 4691661 - DNA, 25 bp, Homo sapien
aaacacggcagacacgccctggagc

SEQ ID NO: 4691662 - DNA, 25 bp, Homo sapien
cacagtcatagacacacagtaaaca

SEQ ID NO: 4691663 - DNA, 25 bp, Homo sapien
gccctaggactgtaatggttgaccc

SEQ ID NO: 4691664 - DNA, 25 bp, Homo sapien
atcagctacacccatcacagtcata

SEQ ID NO: 4691665 - DNA, 25 bp, Homo sapien
tacaggataaggaccaagcaagccc

SEQ ID NO: 4691666 - DNA, 25 bp, Homo sapien
gctgactgtcgacccaaaagtgtaa

SEQ ID NO: 4691667 - DNA, 25 bp, Homo sapien
tcagacggcagttgaagacttccag

SEQ ID NO: 4691668 - DNA, 25 bp, Homo sapien
aacggatctactggcctgggaagca

SEQ ID NO: 4691669 - DNA, 25 bp, Homo sapien
actgcaggcctccaacgacgttgag

SEQ ID NO: 4691670 - DNA, 25 bp, Homo sapien
tagattccagtttcgcaccctgggc

SEQ ID NO: 4691671 - DNA, 25 bp, Homo sapien
tgggactctgcctctgttggacgct

SEQ ID NO: 4691672 - DNA, 25 bp, Homo sapien
tgagcgtggaacatgcccagtcaca

SEQ ID NO: 4691673 - DNA, 25 bp, Homo sapien
ccaagttaaagtatggcccgaccat

SEQ ID NO: 4691674 - DNA, 25 bp, Homo sapien
tcctatttgtgaagggtcagacaca

SEQ ID NO: 4691675 - DNA, 25 bp, Homo sapien
aaattgtgagcatttcgacccgagc

SEQ ID NO: 4691676 - DNA, 25 bp, Homo sapien
gcacatggctcttcctgggtcaacc

SEQ ID NO: 4691677 - DNA, 25 bp, Homo sapien
gcgtgacgtgctgctgatttgtcca

SEQ ID NO: 4691678 - DNA, 25 bp, Homo sapien
tccacgcgatgtgacacatgaaaaa

SEQ ID NO: 4691679 - DNA, 25 bp, Homo sapien
ttcattttgggccagcgtgacgtgc

SEQ ID NO: 4691680 - DNA, 25 bp, Homo sapien
aaaaaactcccgagatgcagatctt

SEQ ID NO: 4691681 - DNA, 25 bp, Homo sapien
tcacgatgatactcgcagcgtcatt

SEQ ID NO: 4691682 - DNA, 25 bp, Homo sapien
cagcacgtgttgactgaatgtgagc

SEQ ID NO: 4691683 - DNA, 25 bp, Homo sapien
tctcagattccgagcagcaacattc

SEQ ID NO: 4691684 - DNA, 25 bp, Homo sapien
tgagcaaccatgacataccaggcag

SEQ ID NO: 4691685 - DNA, 25 bp, Homo sapien
tcagaattccccttcgaggcttggg

SEQ ID NO: 4691686 - DNA, 25 bp, Homo sapien
gagacagctacagtggactctgtgt

SEQ ID NO: 4691687 - DNA, 25 bp, Homo sapien
aagtcagcagcaggtagctctcaga

SEQ ID NO: 4691688 - DNA, 25 bp, Homo sapien
gatgacaggcctgatgataagtcct

SEQ ID NO: 4691689 - DNA, 25 bp, Homo sapien
tcatatggatacaggtaccgctgcc

SEQ ID NO: 4691690 - DNA, 25 bp, Homo sapien
tatgtccagggagtatggagccagc

SEQ ID NO: 4691691 - DNA, 25 bp, Homo sapien
tcctcacaaacgaagcagaagtccg

SEQ ID NO: 4691692 - DNA, 25 bp, Homo sapien
cagatcagagccataggtagcaagg

SEQ ID NO: 4691693 - DNA, 25 bp, Homo sapien
tgactaaacctccagagtttggacc

SEQ ID NO: 4691694 - DNA, 25 bp, Homo sapien
ttctccctcagcctgactaaacctc

SEQ ID NO: 4691695 - DNA, 25 bp, Homo sapien
tcagcctgactaaacctccagagtt

SEQ ID NO: 4691696 - DNA, 25 bp, Homo sapien
ccccacctaacactgcctgagccat

SEQ ID NO: 4691697 - DNA, 25 bp, Homo sapien
caggtgctgcggcttttcttcccgg

SEQ ID NO: 4691698 - DNA, 25 bp, Homo sapien
tctgtgagaccccgcggcaggtgct

SEQ ID NO: 4691699 - DNA, 25 bp, Homo sapien
ggacccccttcgatcctgagcaccc

SEQ ID NO: 4691700 - DNA, 25 bp, Homo sapien
tcccggacccccttcgatcctgagc

SEQ ID NO: 4691701 - DNA, 25 bp, Homo sapien
atcctgagcgcgctctctccggaga

SEQ ID NO: 4691702 - DNA, 25 bp, Homo sapien
tgcccggacccagccggagagagtc

SEQ ID NO: 4691703 - DNA, 25 bp, Homo sapien
agtcgttgacaggactggcgagccc

SEQ ID NO: 4691704 - DNA, 25 bp, Homo sapien
tgagcgcgctctctccggagatcat

SEQ ID NO: 4691705 - DNA, 25 bp, Homo sapien
acagaggtaggagtgcccgactttt

SEQ ID NO: 4691706 - DNA, 25 bp, Homo sapien
aggagtgcccgacttttgtgggcca

SEQ ID NO: 4691707 - DNA, 25 bp, Homo sapien
gtaggagtgcccgacttttgtgggc

SEQ ID NO: 4691708 - DNA, 25 bp, Homo sapien
agaggtaggagtgcccgacttttgt

SEQ ID NO: 4691709 - DNA, 25 bp, Homo sapien
cagggagctgtgtgcagtccgtaca

SEQ ID NO: 4691710 - DNA, 25 bp, Homo sapien
taaaaatgtcacacgttttcccatc

SEQ ID NO: 4691711 - DNA, 25 bp, Homo sapien
ctgtcaaacacacattgcagggagc

SEQ ID NO: 4691712 - DNA, 25 bp, Homo sapien
gcagtacaaaatgtcagtcctgtca

SEQ ID NO: 4691713 - DNA, 25 bp, Homo sapien
ctgcggtaagcacatcgaccagagc

SEQ ID NO: 4691714 - DNA, 25 bp, Homo sapien
cagagctgatcattacaagggcgta

SEQ ID NO: 4691715 - DNA, 25 bp, Homo sapien
taagcacatcgaccagagctgatca

SEQ ID NO: 4691716 - DNA, 25 bp, Homo sapien
ccagagctgatcattacaagggcgt

SEQ ID NO: 4691717 - DNA, 25 bp, Homo sapien
tggcaccttgggttcctgtttgttc

SEQ ID NO: 4691718 - DNA, 25 bp, Homo sapien
cagtcgaactgctggcaccttgggt

SEQ ID NO: 4691719 - DNA, 25 bp, Homo sapien
tggcggtgtttaataaggcagtcga

SEQ ID NO: 4691720 - DNA, 25 bp, Homo sapien
tcctgtttgttctccgagggctcag

SEQ ID NO: 4691721 - DNA, 25 bp, Homo sapien
tgtccttgaggatttgacagtgaga

SEQ ID NO: 4691722 - DNA, 25 bp, Homo sapien
ccagcagttggtcttcgttaggatc

SEQ ID NO: 4691723 - DNA, 25 bp, Homo sapien
tagctgtgcgctgacaatgtccttg

SEQ ID NO: 4691724 - DNA, 25 bp, Homo sapien
tgaggatttgacagtgagattttcc

SEQ ID NO: 4691725 - DNA, 25 bp, Homo sapien
gcccctccccttggttgtaatggca

SEQ ID NO: 4691726 - DNA, 25 bp, Homo sapien
cagctgacagaatggccgctggagt

SEQ ID NO: 4691727 - DNA, 25 bp, Homo sapien
ctagcatctggagcttggaagaagc

SEQ ID NO: 4691728 - DNA, 25 bp, Homo sapien
tgtaatggcacaatgctggatttca

SEQ ID NO: 4691729 - DNA, 25 bp, Homo sapien
caaccacggaaagctttgagggcct

SEQ ID NO: 4691730 - DNA, 25 bp, Homo sapien
gcagatgtcttaaggtctaccgcca

SEQ ID NO: 4691731 - DNA, 25 bp, Homo sapien
tgtgcaccagcattagaaatgaccg

SEQ ID NO: 4691732 - DNA, 25 bp, Homo sapien
caagcagaaggctgatgagcgccga

SEQ ID NO: 4691733 - DNA, 25 bp, Homo sapien
atggagacctctgacggcagctctg

SEQ ID NO: 4691734 - DNA, 25 bp, Homo sapien
ccacctggcaaagccggtgcctgtg

SEQ ID NO: 4691735 - DNA, 25 bp, Homo sapien
taagaagatttagcttgccagtggg

SEQ ID NO: 4691736 - DNA, 25 bp, Homo sapien
gagacggttgccttcatctcaccac

SEQ ID NO: 4691737 - DNA, 25 bp, Homo sapien
atttttttattgccatagcctttgg

SEQ ID NO: 4691738 - DNA, 25 bp, Homo sapien
taatttatagtgttggtgctcacat

SEQ ID NO: 4691739 - DNA, 25 bp, Homo sapien
cccagccaagcgatgagactcttaa

SEQ ID NO: 4691740 - DNA, 25 bp, Homo sapien
taccttgtcctctattgcagagatg

SEQ ID NO: 4691741 - DNA, 25 bp, Homo sapien
tctggtgtctggcaaagccttcctg

SEQ ID NO: 4691742 - DNA, 25 bp, Homo sapien
tcctgggatccctggtaacccaggc

SEQ ID NO: 4691743 - DNA, 25 bp, Homo sapien
ctagtatgcatgaataccaccttca

SEQ ID NO: 4691744 - DNA, 25 bp, Homo sapien
gctagtatgcatgaataccaccttc

SEQ ID NO: 4691745 - DNA, 25 bp, Homo sapien
tagtatgcatgaataccaccttcat

SEQ ID NO: 4691746 - DNA, 25 bp, Homo sapien
aaggaaatgggagcaactcagtggc

SEQ ID NO: 4691747 - DNA, 25 bp, Homo sapien
aggaaatgggagcaactcagtggct

SEQ ID NO: 4691748 - DNA, 25 bp, Homo sapien
ggcttctccccaactccatactctg

SEQ ID NO: 4691749 - DNA, 25 bp, Homo sapien
actccatactctgcttgcttctgca

SEQ ID NO: 4691750 - DNA, 25 bp, Homo sapien
tggggggcttctccccaactccata

SEQ ID NO: 4691751 - DNA, 25 bp, Homo sapien
ccccaactccatactctgcttgctt

SEQ ID NO: 4691752 - DNA, 25 bp, Homo sapien
tgtgtaataccaccaaagcaagtgg

SEQ ID NO: 4691753 - DNA, 25 bp, Homo sapien
gaagcaagaagcaagaggctcccaa

SEQ ID NO: 4691754 - DNA, 25 bp, Homo sapien
agcaagtggaagattcgtttgatcc

SEQ ID NO: 4691755 - DNA, 25 bp, Homo sapien
gaagattcgtttgatccttgtaggg

SEQ ID NO: 4691756 - DNA, 25 bp, Homo sapien
agattcaaaagaggcgcttctctgc

SEQ ID NO: 4691757 - DNA, 25 bp, Homo sapien
tcaaaagaggcgcttctctgcatga

SEQ ID NO: 4691758 - DNA, 25 bp, Homo sapien
caaaagaggcgcttctctgcatgaa

SEQ ID NO: 4691759 - DNA, 25 bp, Homo sapien
tggagattcaaaagaggcgcttctc

SEQ ID NO: 4691760 - DNA, 25 bp, Homo sapien
ctgatgccagcccctacccccttta

SEQ ID NO: 4691761 - DNA, 25 bp, Homo sapien
ctctgctctccatagagagagtttc

SEQ ID NO: 4691762 - DNA, 25 bp, Homo sapien
tctgctctccatagagagagtttcc

SEQ ID NO: 4691763 - DNA, 25 bp, Homo sapien
gatgccagcccctaccccctttaca

SEQ ID NO: 4691764 - DNA, 25 bp, Homo sapien
taaccctgtgaacatctggggaggg

SEQ ID NO: 4691765 - DNA, 25 bp, Homo sapien
tctcaggctttctatgtagaattca

SEQ ID NO: 4691766 - DNA, 25 bp, Homo sapien
ggagtccctcggaaatcttctcttc

SEQ ID NO: 4691767 - DNA, 25 bp, Homo sapien
tagagttacgtgtccctctcccgta

SEQ ID NO: 4691768 - DNA, 25 bp, Homo sapien
catgtcgcactgtctttgggatgca

SEQ ID NO: 4691769 - DNA, 25 bp, Homo sapien
gatgcagagatgatttgccagctcc

SEQ ID NO: 4691770 - DNA, 25 bp, Homo sapien
cctggtcattcctgctaacgggctt

SEQ ID NO: 4691771 - DNA, 25 bp, Homo sapien
taacgggcttagctgcgcttcacag

SEQ ID NO: 4691772 - DNA, 25 bp, Homo sapien
caagagcctcaatgggtaagcacag

SEQ ID NO: 4691773 - DNA, 25 bp, Homo sapien
taatttctcaatgggtaacacagcc

SEQ ID NO: 4691774 - DNA, 25 bp, Homo sapien
tagtagaccactgggcaagtcagct

SEQ ID NO: 4691775 - DNA, 25 bp, Homo sapien
tagtgatcctcaaacaaagagacga

SEQ ID NO: 4691776 - DNA, 25 bp, Homo sapien
cattaatatgatttgagcggacaac

SEQ ID NO: 4691777 - DNA, 25 bp, Homo sapien
caattacagatatgcattcaggaca

SEQ ID NO: 4691778 - DNA, 25 bp, Homo sapien
caacattaagctgctgtcgggtcct

SEQ ID NO: 4691779 - DNA, 25 bp, Homo sapien
taatgtgcttgatcgtaatgctctg

SEQ ID NO: 4691780 - DNA, 25 bp, Homo sapien
acaggatatttgcgcagttccgcag

SEQ ID NO: 4691781 - DNA, 25 bp, Homo sapien
tggacggcagctttggtaattaaca

SEQ ID NO: 4691782 - DNA, 25 bp, Homo sapien
agttctaatttgtggacggcagctt

SEQ ID NO: 4691783 - DNA, 25 bp, Homo sapien
tcacaggatatttgcgcagttccgc

SEQ ID NO: 4691784 - DNA, 25 bp, Homo sapien
tgatttcagcactatgtgagcagcc

SEQ ID NO: 4691785 - DNA, 25 bp, Homo sapien
aatgacagtgggcagtatgaccagt

SEQ ID NO: 4691786 - DNA, 25 bp, Homo sapien
tatcacagtcctgaatgcaccgctg

SEQ ID NO: 4691787 - DNA, 25 bp, Homo sapien
caataacggtgtcccaatagcagct

SEQ ID NO: 4691788 - DNA, 25 bp, Homo sapien
gcacttgtctaagggaggccacgtt

SEQ ID NO: 4691789 - DNA, 25 bp, Homo sapien
cacgttgttgaagagaagaaatagc

SEQ ID NO: 4691790 - DNA, 25 bp, Homo sapien
acagggcacttgtctaagggaggcc

SEQ ID NO: 4691791 - DNA, 25 bp, Homo sapien
gaggccacgttgttgaagagaagaa

SEQ ID NO: 4691792 - DNA, 25 bp, Homo sapien
aggcagaagcgtagcatgggcacac

SEQ ID NO: 4691793 - DNA, 25 bp, Homo sapien
acacaggggagctggatgaaatttc

SEQ ID NO: 4691794 - DNA, 25 bp, Homo sapien
acaggggagctggatgaaatttcat

SEQ ID NO: 4691795 - DNA, 25 bp, Homo sapien
aaggcagaagcgtagcatgggcaca

SEQ ID NO: 4691796 - DNA, 25 bp, Homo sapien
tgggagagagggctccgccaatttt

SEQ ID NO: 4691797 - DNA, 25 bp, Homo sapien
tcataaacctctgggcattgtgcag

SEQ ID NO: 4691798 - DNA, 25 bp, Homo sapien
gccaattttccctgtgtgaatgagc

SEQ ID NO: 4691799 - DNA, 25 bp, Homo sapien
ctggcagagggcacaagaagcagct

SEQ ID NO: 4691800 - DNA, 25 bp, Homo sapien
tgcgtttgcagcctttctttctaga

SEQ ID NO: 4691801 - DNA, 25 bp, Homo sapien
ttgtggacccatgaaggcttttgcg

SEQ ID NO: 4691802 - DNA, 25 bp, Homo sapien
catccaacccgcagatatcattgaa

SEQ ID NO: 4691803 - DNA, 25 bp, Homo sapien
gacttattcctatcataagcccgac

SEQ ID NO: 4691804 - DNA, 25 bp, Homo sapien
tattgatcagtgagaaacggatccg

SEQ ID NO: 4691805 - DNA, 25 bp, Homo sapien
tttgtgaggagaaagtggactttcc

SEQ ID NO: 4691806 - DNA, 25 bp, Homo sapien
tagagcagggtcatagtgccagccg

SEQ ID NO: 4691807 - DNA, 25 bp, Homo sapien
tgccagccggtattgttcagtgagt

SEQ ID NO: 4691808 - DNA, 25 bp, Homo sapien
cagcagcatgtagctgtttctttcg

SEQ ID NO: 4691809 - DNA, 25 bp, Homo sapien
aaacatttttgccgtactccctgct

SEQ ID NO: 4691810 - DNA, 25 bp, Homo sapien
catgtagctgtttctttcgtctctc

SEQ ID NO: 4691811 - DNA, 25 bp, Homo sapien
gctgtcagcagcatgtagctgtttc

SEQ ID NO: 4691812 - DNA, 25 bp, Homo sapien
aggaagtagcacatgcagaggcaag

SEQ ID NO: 4691813 - DNA, 25 bp, Homo sapien
gccttgacagcatgtggcacggtcg

SEQ ID NO: 4691814 - DNA, 25 bp, Homo sapien
gcacggtcgggtactgtgagtgccc

SEQ ID NO: 4691815 - DNA, 25 bp, Homo sapien
cacatgcagaggcaagcggccttga

SEQ ID NO: 4691816 - DNA, 25 bp, Homo sapien
tgtagcagtatggttctaaaatttg

SEQ ID NO: 4691817 - DNA, 25 bp, Homo sapien
taggccgagggtcctttctctgcat

SEQ ID NO: 4691818 - DNA, 25 bp, Homo sapien
tttggaggatatgtgtagcagtatg

SEQ ID NO: 4691819 - DNA, 25 bp, Homo sapien
tctctgcatggtagaagattgcaac

SEQ ID NO: 4691820 - DNA, 25 bp, Homo sapien
cacgtgagactgttgacttcataaa

SEQ ID NO: 4691821 - DNA, 25 bp, Homo sapien
actccttgcaagtgattaggggcgg

SEQ ID NO: 4691822 - DNA, 25 bp, Homo sapien
gttgacttcataaactccttgcaag

SEQ ID NO: 4691823 - DNA, 25 bp, Homo sapien
gcccggccacgtgagactgttgact

SEQ ID NO: 4691824 - DNA, 25 bp, Homo sapien
tcagaggaagagaatgcccacactg

SEQ ID NO: 4691825 - DNA, 25 bp, Homo sapien
cagaggaagagaatgcccacactga

SEQ ID NO: 4691826 - DNA, 25 bp, Homo sapien
aggaagagaatgcccacactgaaac

SEQ ID NO: 4691827 - DNA, 25 bp, Homo sapien
gaggaagagaatgcccacactgaaa

SEQ ID NO: 4691828 - DNA, 25 bp, Homo sapien
gactggcgaatagcccttttggtac

SEQ ID NO: 4691829 - DNA, 25 bp, Homo sapien
tttcctttcagcttaagtactgagt

SEQ ID NO: 4691830 - DNA, 25 bp, Homo sapien
accaagaggactggcgaatagccct

SEQ ID NO: 4691831 - DNA, 25 bp, Homo sapien
cctggaaccaagaggactggcgaat

SEQ ID NO: 4691832 - DNA, 25 bp, Homo sapien
acaagacaatctgtgtttacacgtt

SEQ ID NO: 4691833 - DNA, 25 bp, Homo sapien
caggctcattatttcgagcagaatt

SEQ ID NO: 4691834 - DNA, 25 bp, Homo sapien
tcattcgcattctccagcaagatat

SEQ ID NO: 4691835 - DNA, 25 bp, Homo sapien
tctccagcaagatatgttctctggt

SEQ ID NO: 4691836 - DNA, 25 bp, Homo sapien
gtgttagccaccactgggcaatctg

SEQ ID NO: 4691837 - DNA, 25 bp, Homo sapien
agctcagaggcacttcagggaccag

SEQ ID NO: 4691838 - DNA, 25 bp, Homo sapien
agatgagctcagaggcacttcaggg

SEQ ID NO: 4691839 - DNA, 25 bp, Homo sapien
ccaccactgggcaatctgagaggca

SEQ ID NO: 4691840 - DNA, 25 bp, Homo sapien
tcctggtctcctcatggatcgtcat

SEQ ID NO: 4691841 - DNA, 25 bp, Homo sapien
tctgttgttgctcataaatcggaga

SEQ ID NO: 4691842 - DNA, 25 bp, Homo sapien
gttgttgctcataaatcggagaggg

SEQ ID NO: 4691843 - DNA, 25 bp, Homo sapien
tggtctcctcatggatcgtcatcct

SEQ ID NO: 4691844 - DNA, 25 bp, Homo sapien
ccattttgcagcaagtgcttatgaa

SEQ ID NO: 4691845 - DNA, 25 bp, Homo sapien
tatgtatgccaaactctgggctttc

SEQ ID NO: 4691846 - DNA, 25 bp, Homo sapien
gatggatagttgtggccaaaattct

SEQ ID NO: 4691847 - DNA, 25 bp, Homo sapien
agataggtggacatagatggttctg

SEQ ID NO: 4691848 - DNA, 25 bp, Homo sapien
gagctttgaaatcctggagcagagc

SEQ ID NO: 4691849 - DNA, 25 bp, Homo sapien
gagccaaggcctctttgcctgcaca

SEQ ID NO: 4691850 - DNA, 25 bp, Homo sapien
cagagatgagagtggcagttgaagg

SEQ ID NO: 4691851 - DNA, 25 bp, Homo sapien
ttatctgccgcccttgaagcagaga

SEQ ID NO: 4691852 - DNA, 25 bp, Homo sapien
taacaacatgttgcatctgtacgcc

SEQ ID NO: 4691853 - DNA, 25 bp, Homo sapien
tgtggctgtggatgttaacaacatg

SEQ ID NO: 4691854 - DNA, 25 bp, Homo sapien
tatgctgtacgaacgccggatactc

SEQ ID NO: 4691855 - DNA, 25 bp, Homo sapien
actcagcactgtgagtagacagtct

SEQ ID NO: 4691856 - DNA, 25 bp, Homo sapien
gcagactcttgaggccacgttttgg

SEQ ID NO: 4691857 - DNA, 25 bp, Homo sapien
gctgtgtctccctatttggacggca

SEQ ID NO: 4691858 - DNA, 25 bp, Homo sapien
ggatctgtcaaaagtgctaatgggc

SEQ ID NO: 4691859 - DNA, 25 bp, Homo sapien
tggacggcaagctgtgtaacatatt

SEQ ID NO: 4691860 - DNA, 25 bp, Homo sapien
ttgtgtagcttccagtggcagttct

SEQ ID NO: 4691861 - DNA, 25 bp, Homo sapien
cagtggcagttctttttctgcgggt

SEQ ID NO: 4691862 - DNA, 25 bp, Homo sapien
cagttctttttctgcgggttcttca

SEQ ID NO: 4691863 - DNA, 25 bp, Homo sapien
tgtgtagcttccagtggcagttctt

SEQ ID NO: 4691864 - DNA, 25 bp, Homo sapien
gcctgttagttgactgtcctgcctc

SEQ ID NO: 4691865 - DNA, 25 bp, Homo sapien
gtctaattcatcgtcaagtcctgtg

SEQ ID NO: 4691866 - DNA, 25 bp, Homo sapien
tagggtcatgtcaggatccttcagc

SEQ ID NO: 4691867 - DNA, 25 bp, Homo sapien
ctttcccagaatatggcagcagcct

SEQ ID NO: 4691868 - DNA, 25 bp, Homo sapien
gataacacatgtaggagtgaatttt

SEQ ID NO: 4691869 - DNA, 25 bp, Homo sapien
ctgaaaaactatcactctgtaattg

SEQ ID NO: 4691870 - DNA, 25 bp, Homo sapien
tgaaaaactatcactctgtaattgc

SEQ ID NO: 4691871 - DNA, 25 bp, Homo sapien
tatcaagataacacatgtaggagtg

SEQ ID NO: 4691872 - DNA, 25 bp, Homo sapien
tcagttggcttttgggccaatttgt

SEQ ID NO: 4691873 - DNA, 25 bp, Homo sapien
ccatctttaattggccggcaccaag

SEQ ID NO: 4691874 - DNA, 25 bp, Homo sapien
caatcccatctttaattggccggca

SEQ ID NO: 4691875 - DNA, 25 bp, Homo sapien
tccgttcctgcttgccattgtcttc

SEQ ID NO: 4691876 - DNA, 25 bp, Homo sapien
gccatggctacgctgaccttctctg

SEQ ID NO: 4691877 - DNA, 25 bp, Homo sapien
ttcctggtttttcgcattgaggctc

SEQ ID NO: 4691878 - DNA, 25 bp, Homo sapien
tggtttttcgcattgaggctccaag

SEQ ID NO: 4691879 - DNA, 25 bp, Homo sapien
ctggggttcctggtttttcgcattg

SEQ ID NO: 4691880 - DNA, 25 bp, Homo sapien
ggttcctggtttttcgcattgaggc

SEQ ID NO: 4691881 - DNA, 25 bp, Homo sapien
aagtgagaagttgtggggatctgca

SEQ ID NO: 4691882 - DNA, 25 bp, Homo sapien
tgaagtgagaagttgtggggatctg

SEQ ID NO: 4691883 - DNA, 25 bp, Homo sapien
agtgagaagttgtggggatctgcat

SEQ ID NO: 4691884 - DNA, 25 bp, Homo sapien
aggtgaagtgagaagttgtggggat

SEQ ID NO: 4691885 - DNA, 25 bp, Homo sapien
tggctgctaagacccctggaaagag

SEQ ID NO: 4691886 - DNA, 25 bp, Homo sapien
accccctttgaagtgctgctgatgg

SEQ ID NO: 4691887 - DNA, 25 bp, Homo sapien
ccccctttgaagtgctgctgatggc

SEQ ID NO: 4691888 - DNA, 25 bp, Homo sapien
tgatggctgctaagacccctggaaa

SEQ ID NO: 4691889 - DNA, 25 bp, Homo sapien
gaacagctctctaggcagtgagaac

SEQ ID NO: 4691890 - DNA, 25 bp, Homo sapien
gacagtgcccatctctaacttgaga

SEQ ID NO: 4691891 - DNA, 25 bp, Homo sapien
gatctcaagactggaatgaccattg

SEQ ID NO: 4691892 - DNA, 25 bp, Homo sapien
ttggaggtagcacccagatttagac

SEQ ID NO: 4691893 - DNA, 25 bp, Homo sapien
gggtaaggcatgttctgaggtggga

SEQ ID NO: 4691894 - DNA, 25 bp, Homo sapien
cctcctgagggggaagtaaaggcat

SEQ ID NO: 4691895 - DNA, 25 bp, Homo sapien
gtggaaatccgattttggagctgct

SEQ ID NO: 4691896 - DNA, 25 bp, Homo sapien
agagccacacttgcttaaggctctg

SEQ ID NO: 4691897 - DNA, 25 bp, Homo sapien
tcttcaggagcgaagagctgcttct

SEQ ID NO: 4691898 - DNA, 25 bp, Homo sapien
gaacttcacattcgtgctcactgac

SEQ ID NO: 4691899 - DNA, 25 bp, Homo sapien
caaacagagattcgggttctgccgc

SEQ ID NO: 4691900 - DNA, 25 bp, Homo sapien
gttagccaagttggccagaacttca

SEQ ID NO: 4691901 - DNA, 25 bp, Homo sapien
aagtaggtggtagccttagccgcca

SEQ ID NO: 4691902 - DNA, 25 bp, Homo sapien
taggtggtagccttagccgccataa

SEQ ID NO: 4691903 - DNA, 25 bp, Homo sapien
ctcctagaagagtacccacgatttc

SEQ ID NO: 4691904 - DNA, 25 bp, Homo sapien
ttcttaatgactcttcaccacaatg

SEQ ID NO: 4691905 - DNA, 25 bp, Homo sapien
tgtctgcgtgggatgataatccatt

SEQ ID NO: 4691906 - DNA, 25 bp, Homo sapien
aatgggcagtaaaagttcatcagtt

SEQ ID NO: 4691907 - DNA, 25 bp, Homo sapien
tgttgggccagttgtctgcgtggga

SEQ ID NO: 4691908 - DNA, 25 bp, Homo sapien
tgtctgctaaagacaaatgggcagt

SEQ ID NO: 4691909 - DNA, 25 bp, Homo sapien
tgtgctcatcaacatagcagcctca

SEQ ID NO: 4691910 - DNA, 25 bp, Homo sapien
taatgggagtgccttgccgagtcct

SEQ ID NO: 4691911 - DNA, 25 bp, Homo sapien
ctgctatcatcttctgatcaaatat

SEQ ID NO: 4691912 - DNA, 25 bp, Homo sapien
tctggaggagggtaatgggagtgcc

SEQ ID NO: 4691913 - DNA, 25 bp, Homo sapien
catctttcaagatggtaaagtggtg

SEQ ID NO: 4691914 - DNA, 25 bp, Homo sapien
gcatctttcaagatggtaaagtggt

SEQ ID NO: 4691915 - DNA, 25 bp, Homo sapien
tccagtctccaaggatgcataaatt

SEQ ID NO: 4691916 - DNA, 25 bp, Homo sapien
gctgctgcattattgtgtccacagg

SEQ ID NO: 4691917 - DNA, 25 bp, Homo sapien
tccacagggatggtatttgtgtgct

SEQ ID NO: 4691918 - DNA, 25 bp, Homo sapien
ggaactagatcctgtcctccgcaaa

SEQ ID NO: 4691919 - DNA, 25 bp, Homo sapien
gctgaatcctcattaactttacatt

SEQ ID NO: 4691920 - DNA, 25 bp, Homo sapien
atgatgtccagggcaaattacacca

SEQ ID NO: 4691921 - DNA, 25 bp, Homo sapien
agctgaatcctcattaactttacat

SEQ ID NO: 4691922 - DNA, 25 bp, Homo sapien
atgtccagggcaaattacaccattt

SEQ ID NO: 4691923 - DNA, 25 bp, Homo sapien
cctggacaatacaagattgtatatt

SEQ ID NO: 4691924 - DNA, 25 bp, Homo sapien
ctcctggacaatacaagattgtata

SEQ ID NO: 4691925 - DNA, 25 bp, Homo sapien
acaaatcaacagtttctgagaaatt

SEQ ID NO: 4691926 - DNA, 25 bp, Homo sapien
aaacaaactatgcccatacaaatca

SEQ ID NO: 4691927 - DNA, 25 bp, Homo sapien
ggtgctctgacacctcacaccagat

SEQ ID NO: 4691928 - DNA, 25 bp, Homo sapien
gtgctctgacacctcacaccagatc

SEQ ID NO: 4691929 - DNA, 25 bp, Homo sapien
gctctgacacctcacaccagatcat

SEQ ID NO: 4691930 - DNA, 25 bp, Homo sapien
tgctctgacacctcacaccagatca

SEQ ID NO: 4691931 - DNA, 25 bp, Homo sapien
gttgttccctgcataatcctcctca

SEQ ID NO: 4691932 - DNA, 25 bp, Homo sapien
gatctgacaccctatcaggtggccc

SEQ ID NO: 4691933 - DNA, 25 bp, Homo sapien
aggatctgacaccctatcaggtggc

SEQ ID NO: 4691934 - DNA, 25 bp, Homo sapien
gttccctgcataatcctcctcagga

SEQ ID NO: 4691935 - DNA, 25 bp, Homo sapien
tctgtgtgggtgctctcttcacttt

SEQ ID NO: 4691936 - DNA, 25 bp, Homo sapien
cgctctgcctcttctgcctgaatgc

SEQ ID NO: 4691937 - DNA, 25 bp, Homo sapien
cctgtgtcgctctgcctcttctgcc

SEQ ID NO: 4691938 - DNA, 25 bp, Homo sapien
ctgcctcttctgcctgaatgcccac

SEQ ID NO: 4691939 - DNA, 25 bp, Homo sapien
tctgcctcttctgcctgaatgccca

SEQ ID NO: 4691940 - DNA, 25 bp, Homo sapien
aaattaactgccaaattgaaacttg

SEQ ID NO: 4691941 - DNA, 25 bp, Homo sapien
aagcatgaaagttccagaattggtt

SEQ ID NO: 4691942 - DNA, 25 bp, Homo sapien
gccttttaactgcagactgaaatta

SEQ ID NO: 4691943 - DNA, 25 bp, Homo sapien
ttttgtgcagcaagaacagatcttt

SEQ ID NO: 4691944 - DNA, 25 bp, Homo sapien
tgttttgtgcagcaagaacagatct

SEQ ID NO: 4691945 - DNA, 25 bp, Homo sapien
ttgtaaatccacaatatggtcattg

SEQ ID NO: 4691946 - DNA, 25 bp, Homo sapien
cacaatatggtcattgtctggtggt

SEQ ID NO: 4691947 - DNA, 25 bp, Homo sapien
tcggatatagttcttgtgcccatac

SEQ ID NO: 4691948 - DNA, 25 bp, Homo sapien
gatatagttcttgtgcccatactca

SEQ ID NO: 4691949 - DNA, 25 bp, Homo sapien
tatagttcttgtgcccatactcagc

SEQ ID NO: 4691950 - DNA, 25 bp, Homo sapien
agttcttgtgcccatactcagcttc

SEQ ID NO: 4691951 - DNA, 25 bp, Homo sapien
tgagactcaaagaggtttacttgcc

SEQ ID NO: 4691952 - DNA, 25 bp, Homo sapien
tccttgagtccttattatgccccag

SEQ ID NO: 4691953 - DNA, 25 bp, Homo sapien
ggttggacaaccacaaagtcgtaga

SEQ ID NO: 4691954 - DNA, 25 bp, Homo sapien
aaatagctggtgaggccagccacgg

SEQ ID NO: 4691955 - DNA, 25 bp, Homo sapien
caatatctgcgtatcttcattaatc

SEQ ID NO: 4691956 - DNA, 25 bp, Homo sapien
tatggaaggtaaacctttgtgactc

SEQ ID NO: 4691957 - DNA, 25 bp, Homo sapien
gaatcttcccgtagggatatatgga

SEQ ID NO: 4691958 - DNA, 25 bp, Homo sapien
gactcttttcgtagcaatatctgcg

SEQ ID NO: 4691959 - DNA, 25 bp, Homo sapien
gagcagggcaggtatatatcttgac

SEQ ID NO: 4691960 - DNA, 25 bp, Homo sapien
ggttaaatggcttgtcctaatccca

SEQ ID NO: 4691961 - DNA, 25 bp, Homo sapien
tagaaccacatgtcattcctgtgag

SEQ ID NO: 4691962 - DNA, 25 bp, Homo sapien
taacaagtaagggatctacctggga

SEQ ID NO: 4691963 - DNA, 25 bp, Homo sapien
caatccatcccttgttcttaaaatc

SEQ ID NO: 4691964 - DNA, 25 bp, Homo sapien
tgcacaatccatcccttgttcttaa

SEQ ID NO: 4691965 - DNA, 25 bp, Homo sapien
gactgcacaatccatcccttgttct

SEQ ID NO: 4691966 - DNA, 25 bp, Homo sapien
ctgactgcacaatccatcccttgtt

SEQ ID NO: 4691967 - DNA, 25 bp, Homo sapien
tcttgcaagctcatcaatgtattta

SEQ ID NO: 4691968 - DNA, 25 bp, Homo sapien
cttgcaagctcatcaatgtatttat

SEQ ID NO: 4691969 - DNA, 25 bp, Homo sapien
cctgtgtcagactcaatgcctggca

SEQ ID NO: 4691970 - DNA, 25 bp, Homo sapien
tctctgtcaggtaccgtggaaatcc

SEQ ID NO: 4691971 - DNA, 25 bp, Homo sapien
tgtctgtgtcccgtaccatgctgga

SEQ ID NO: 4691972 - DNA, 25 bp, Homo sapien
taaagcacgtgagttgctaggcaca

SEQ ID NO: 4691973 - DNA, 25 bp, Homo sapien
tgctcttgataatcgttggaaaggc

SEQ ID NO: 4691974 - DNA, 25 bp, Homo sapien
tctgtgttgtaaccgagcacctgct

SEQ ID NO: 4691975 - DNA, 25 bp, Homo sapien
actcaatctggcgaattccctcact

SEQ ID NO: 4691976 - DNA, 25 bp, Homo sapien
ttggaaaggctttgtaactcaatct

SEQ ID NO: 4691977 - DNA, 25 bp, Homo sapien
gagggagcgagcctcgagcgggcgg

SEQ ID NO: 4691978 - DNA, 25 bp, Homo sapien
cgagcctcgagcgggcgggccccag

SEQ ID NO: 4691979 - DNA, 25 bp, Homo sapien
agcgagcctcgagcgggcgggcccc

SEQ ID NO: 4691980 - DNA, 25 bp, Homo sapien
gcgagcctcgagcgggcgggcccca

SEQ ID NO: 4691981 - DNA, 25 bp, Homo sapien
agcaagggtcttcctaaccctcagc

SEQ ID NO: 4691982 - DNA, 25 bp, Homo sapien
caagggtcttcctaaccctcagctc

SEQ ID NO: 4691983 - DNA, 25 bp, Homo sapien
gcaagggtcttcctaaccctcagct

SEQ ID NO: 4691984 - DNA, 25 bp, Homo sapien
tgtgatgacatcgaagctgagacct

SEQ ID NO: 4691985 - DNA, 25 bp, Homo sapien
tacgataagaccagatatccaggga

SEQ ID NO: 4691986 - DNA, 25 bp, Homo sapien
gaaacagcaattcacgaggcaggca

SEQ ID NO: 4691987 - DNA, 25 bp, Homo sapien
tatccagggaaactgacctggtctg

SEQ ID NO: 4691988 - DNA, 25 bp, Homo sapien
ccagatgtagaaactcccggaggag

SEQ ID NO: 4691989 - DNA, 25 bp, Homo sapien
gcttttcagtagcaggtattaatat

SEQ ID NO: 4691990 - DNA, 25 bp, Homo sapien
cgaagtgtgaatttcaggtttgaac

SEQ ID NO: 4691991 - DNA, 25 bp, Homo sapien
gaggaatgtgctcagatgcaatttt

SEQ ID NO: 4691992 - DNA, 25 bp, Homo sapien
tcattgtgcgcgctggttttatgtc

SEQ ID NO: 4691993 - DNA, 25 bp, Homo sapien
tgtgcgcgctggttttatgtcttca

SEQ ID NO: 4691994 - DNA, 25 bp, Homo sapien
ggtgattgacaaggtgtaattagtc

SEQ ID NO: 4691995 - DNA, 25 bp, Homo sapien
tatgtcttcatagccggtgattgac

SEQ ID NO: 4691996 - DNA, 25 bp, Homo sapien
caccgtgactaactcagaacaaaag

SEQ ID NO: 4691997 - DNA, 25 bp, Homo sapien
tgcggagctgccgcgcgcaaacttc

SEQ ID NO: 4691998 - DNA, 25 bp, Homo sapien
tcaggtctggccactctcgccgctg

SEQ ID NO: 4691999 - DNA, 25 bp, Homo sapien
gcagacccggcgcataatgaggtag

SEQ ID NO: 4692000 - DNA, 25 bp, Homo sapien
acaggcctattctctgcccactggg

SEQ ID NO: 4692001 - DNA, 25 bp, Homo sapien
caagacacattcgatatcagtgagg

SEQ ID NO: 4692002 - DNA, 25 bp, Homo sapien
tataatgggcgacaagaagctctcc

SEQ ID NO: 4692003 - DNA, 25 bp, Homo sapien
cctccgcatggacgtgttgattgaa

SEQ ID NO: 4692004 - DNA, 25 bp, Homo sapien
agaccggcgagagctgtgactcccg

SEQ ID NO: 4692005 - DNA, 25 bp, Homo sapien
aagcccgctagggcccaatctgcag

SEQ ID NO: 4692006 - DNA, 25 bp, Homo sapien
atctgcagcccagcgtgtagcttct

SEQ ID NO: 4692007 - DNA, 25 bp, Homo sapien
cagagcctgagtggcgagaccggcg

SEQ ID NO: 4692008 - DNA, 25 bp, Homo sapien
gggttcaccctgaagccgctaggtg

SEQ ID NO: 4692009 - DNA, 25 bp, Homo sapien
aaagcaagggcgcaaactctgcccg

SEQ ID NO: 4692010 - DNA, 25 bp, Homo sapien
ccagggtcacaagggcacgggacaa

SEQ ID NO: 4692011 - DNA, 25 bp, Homo sapien
cctcttgggcgctgagtcggcgact

SEQ ID NO: 4692012 - DNA, 25 bp, Homo sapien
agctgatggcgggagcctcgctctt

SEQ ID NO: 4692013 - DNA, 25 bp, Homo sapien
ggagcctcgctcttggccctgcggt

SEQ ID NO: 4692014 - DNA, 25 bp, Homo sapien
ggtgtcgccgcggtcgatggcggag

SEQ ID NO: 4692015 - DNA, 25 bp, Homo sapien
cggtcgatggcggagctgatggcgg

SEQ ID NO: 4692016 - DNA, 25 bp, Homo sapien
ttctgcgtcccagcagccgggtttc

SEQ ID NO: 4692017 - DNA, 25 bp, Homo sapien
ggagccaccggccttgcattctgac

SEQ ID NO: 4692018 - DNA, 25 bp, Homo sapien
gcattctgaccgaggatccccagca

SEQ ID NO: 4692019 - DNA, 25 bp, Homo sapien
acccagtcccgtgcggcacgaagga

SEQ ID NO: 4692020 - DNA, 25 bp, Homo sapien
ccagcaggtagtagcggtccgagat

SEQ ID NO: 4692021 - DNA, 25 bp, Homo sapien
gtcttccttgcagtagatgctaccg

SEQ ID NO: 4692022 - DNA, 25 bp, Homo sapien
gatgctaccgtccttgctgaaacag

SEQ ID NO: 4692023 - DNA, 25 bp, Homo sapien
cagcacttgaggcagcgcatgtgcc

SEQ ID NO: 4692024 - DNA, 25 bp, Homo sapien
cagtgcccacgccattgtagtaggg

SEQ ID NO: 4692025 - DNA, 25 bp, Homo sapien
cctcgaagtgcaagcggcagtagac

SEQ ID NO: 4692026 - DNA, 25 bp, Homo sapien
agcatcttgttacacgtggtgcacg

SEQ ID NO: 4692027 - DNA, 25 bp, Homo sapien
gaggtgataaaccaagtcccgagcg

SEQ ID NO: 4692028 - DNA, 25 bp, Homo sapien
tgaggcccgtcttttgcgcgagctg

SEQ ID NO: 4692029 - DNA, 25 bp, Homo sapien
ctcgggtatggctggtcacggtcca

SEQ ID NO: 4692030 - DNA, 25 bp, Homo sapien
taagacttcatggtccgaagctggt

SEQ ID NO: 4692031 - DNA, 25 bp, Homo sapien
gcgtcgttttcgttgcagcttagcg

SEQ ID NO: 4692032 - DNA, 25 bp, Homo sapien
aggcagaagataaatctagagagat

SEQ ID NO: 4692033 - DNA, 25 bp, Homo sapien
gcagaagataaatctagagagatgc

SEQ ID NO: 4692034 - DNA, 25 bp, Homo sapien
gaaagcaactcagagagacttctat

SEQ ID NO: 4692035 - DNA, 25 bp, Homo sapien
tccccaagcttagggcatcttaata

SEQ ID NO: 4692036 - DNA, 25 bp, Homo sapien
tcacaccagggaacccctatggaga

SEQ ID NO: 4692037 - DNA, 25 bp, Homo sapien
cacccagactgaaagatggttttta

SEQ ID NO: 4692038 - DNA, 25 bp, Homo sapien
ttcacatgcctcaagttctctggac

SEQ ID NO: 4692039 - DNA, 25 bp, Homo sapien
tttcacatgcctcaagttctctgga

SEQ ID NO: 4692040 - DNA, 25 bp, Homo sapien
tcacatgcctcaagttctctggact

SEQ ID NO: 4692041 - DNA, 25 bp, Homo sapien
tgccggctgtttgctatttctcagg

SEQ ID NO: 4692042 - DNA, 25 bp, Homo sapien
tgttgcccctaacagtgggcttgta

SEQ ID NO: 4692043 - DNA, 25 bp, Homo sapien
taaacaatgacaccatcgtccacaa

SEQ ID NO: 4692044 - DNA, 25 bp, Homo sapien
cctaacagtgggcttgtaaacaatg

SEQ ID NO: 4692045 - DNA, 25 bp, Homo sapien
gtccactcccatatctttgcacaca

SEQ ID NO: 4692046 - DNA, 25 bp, Homo sapien
gcgtccactcccatatctttgcaca

SEQ ID NO: 4692047 - DNA, 25 bp, Homo sapien
cacacacgcgtccactcccatatct

SEQ ID NO: 4692048 - DNA, 25 bp, Homo sapien
acacgcgtccactcccatatctttg

SEQ ID NO: 4692049 - DNA, 25 bp, Homo sapien
cccgtatcgacttatgagggacgtg

SEQ ID NO: 4692050 - DNA, 25 bp, Homo sapien
tgcatcccgtatcgacttatgaggg

SEQ ID NO: 4692051 - DNA, 25 bp, Homo sapien
ctgctgcatcccgtatcgacttatg

SEQ ID NO: 4692052 - DNA, 25 bp, Homo sapien
tatcgacttatgagggacgtgcggc

SEQ ID NO: 4692053 - DNA, 25 bp, Homo sapien
gaagtgaaagacacggaacctatcc

SEQ ID NO: 4692054 - DNA, 25 bp, Homo sapien
gaacctatccccatcatcggttggg

SEQ ID NO: 4692055 - DNA, 25 bp, Homo sapien
gaacggcagccaaattaaagtgagg

SEQ ID NO: 4692056 - DNA, 25 bp, Homo sapien
agttgaaacccgcagagtctctctc

SEQ ID NO: 4692057 - DNA, 25 bp, Homo sapien
tgtactcccgaatatcacagccacg

SEQ ID NO: 4692058 - DNA, 25 bp, Homo sapien
tgaaaacacacaacctatctgaagg

SEQ ID NO: 4692059 - DNA, 25 bp, Homo sapien
caaccagtctgcaggtgaaaacaca

SEQ ID NO: 4692060 - DNA, 25 bp, Homo sapien
ttctgataggtggttccagagctga

SEQ ID NO: 4692061 - DNA, 25 bp, Homo sapien
tgtcgacttgtccacgcccgtgttt

SEQ ID NO: 4692062 - DNA, 25 bp, Homo sapien
taagacggacgtcacagttggcagg

SEQ ID NO: 4692063 - DNA, 25 bp, Homo sapien
tggctcgggcgttctggaaccagac

SEQ ID NO: 4692064 - DNA, 25 bp, Homo sapien
ttttcctgccgtaagaggttgcgcc

SEQ ID NO: 4692065 - DNA, 25 bp, Homo sapien
ttccaggcgagatcctaaaatgtgg

SEQ ID NO: 4692066 - DNA, 25 bp, Homo sapien
tgtggttagttagttgctcaaagcc

SEQ ID NO: 4692067 - DNA, 25 bp, Homo sapien
tgaaaatacagaagctctagccaac

SEQ ID NO: 4692068 - DNA, 25 bp, Homo sapien
tattcctaaggcacgtggcagtctt

SEQ ID NO: 4692069 - DNA, 25 bp, Homo sapien
aggacacacagtcgggaagtagcat

SEQ ID NO: 4692070 - DNA, 25 bp, Homo sapien
cggaagatgagagagatcgaatgac

SEQ ID NO: 4692071 - DNA, 25 bp, Homo sapien
gtcgggaagtagcatctcccaggta

SEQ ID NO: 4692072 - DNA, 25 bp, Homo sapien
tgagtcattgccgactctttgcaga

SEQ ID NO: 4692073 - DNA, 25 bp, Homo sapien
ttgcgttggctcctgggctgaagac

SEQ ID NO: 4692074 - DNA, 25 bp, Homo sapien
atacacaagtgagccatggatgatc

SEQ ID NO: 4692075 - DNA, 25 bp, Homo sapien
aagactggggatacacaagtgagcc

SEQ ID NO: 4692076 - DNA, 25 bp, Homo sapien
cttgcgttggctcctgggctgaaga

SEQ ID NO: 4692077 - DNA, 25 bp, Homo sapien
ctagccgtcatgcttgggattcttg

SEQ ID NO: 4692078 - DNA, 25 bp, Homo sapien
tagccgtcatgcttgggattcttgc

SEQ ID NO: 4692079 - DNA, 25 bp, Homo sapien
gagcatcatctgaagctgcaagtgg

SEQ ID NO: 4692080 - DNA, 25 bp, Homo sapien
aagctgcaagtggtttgaggtcctg

SEQ ID NO: 4692081 - DNA, 25 bp, Homo sapien
agctgcaagtggtttgaggtcctga

SEQ ID NO: 4692082 - DNA, 25 bp, Homo sapien
agcatcatctgaagctgcaagtggt

SEQ ID NO: 4692083 - DNA, 25 bp, Homo sapien
aaaggcttttctttgcgttggctct

SEQ ID NO: 4692084 - DNA, 25 bp, Homo sapien
ccagtatcatccttggggctcaagt

SEQ ID NO: 4692085 - DNA, 25 bp, Homo sapien
tttgcgttggctctgcttccagcag

SEQ ID NO: 4692086 - DNA, 25 bp, Homo sapien
tcaagtggaacccaagctgctcctg

SEQ ID NO: 4692087 - DNA, 25 bp, Homo sapien
ggcctctgccaagagttgttgacaa

SEQ ID NO: 4692088 - DNA, 25 bp, Homo sapien
gttgttgacaagattgggcaccttg

SEQ ID NO: 4692089 - DNA, 25 bp, Homo sapien
aagattgggcaccttggagtccttg

SEQ ID NO: 4692090 - DNA, 25 bp, Homo sapien
cctctgccaagagttgttgacaaga

SEQ ID NO: 4692091 - DNA, 25 bp, Homo sapien
ggctgtctgacatctggctggaaag

SEQ ID NO: 4692092 - DNA, 25 bp, Homo sapien
tgacatcagatgctccccctccggg

SEQ ID NO: 4692093 - DNA, 25 bp, Homo sapien
tgtctgacatctggctggaaagacc

SEQ ID NO: 4692094 - DNA, 25 bp, Homo sapien
aatgtgacatcagatgctccccctc

SEQ ID NO: 4692095 - DNA, 25 bp, Homo sapien
catctccctttagggcaggcagctc

SEQ ID NO: 4692096 - DNA, 25 bp, Homo sapien
gggcagatcccgaaattctccttgt

SEQ ID NO: 4692097 - DNA, 25 bp, Homo sapien
gaaattctccttgtttgacatctcc

SEQ ID NO: 4692098 - DNA, 25 bp, Homo sapien
ggagggattctgcatcagcgatggg

SEQ ID NO: 4692099 - DNA, 25 bp, Homo sapien
actgcccgagggaccttcctggcaa

SEQ ID NO: 4692100 - DNA, 25 bp, Homo sapien
tgcccgagggaccttcctggcaagc

SEQ ID NO: 4692101 - DNA, 25 bp, Homo sapien
ggactgcccgagggaccttcctggc

SEQ ID NO: 4692102 - DNA, 25 bp, Homo sapien
gactgcccgagggaccttcctggca

SEQ ID NO: 4692103 - DNA, 25 bp, Homo sapien
tagcatttctgtttgcctggaatgc

SEQ ID NO: 4692104 - DNA, 25 bp, Homo sapien
ctagcatttctgtttgcctggaatg

SEQ ID NO: 4692105 - DNA, 25 bp, Homo sapien
tgacaaccaagatgggatcgtttat

SEQ ID NO: 4692106 - DNA, 25 bp, Homo sapien
tactgtctgtatttctatcgttgaa

SEQ ID NO: 4692107 - DNA, 25 bp, Homo sapien
gggatcgtttattgttgtattaata

SEQ ID NO: 4692108 - DNA, 25 bp, Homo sapien
tgaagttggaggagtataaagggaa

SEQ ID NO: 4692109 - DNA, 25 bp, Homo sapien
taaaagtgcaactaggtcttgatcc

SEQ ID NO: 4692110 - DNA, 25 bp, Homo sapien
gattcctgattgtactgaggtgagc

SEQ ID NO: 4692111 - DNA, 25 bp, Homo sapien
cacctcgattcctgattgtactgag

SEQ ID NO: 4692112 - DNA, 25 bp, Homo sapien
ggtcttgatccacctcgattcctga

SEQ ID NO: 4692113 - DNA, 25 bp, Homo sapien
tccttgttccatgttgcagcaatct

SEQ ID NO: 4692114 - DNA, 25 bp, Homo sapien
ggctgctgcgagattccccgtgcaa

SEQ ID NO: 4692115 - DNA, 25 bp, Homo sapien
gggctgtagctaaaacattggtctg

SEQ ID NO: 4692116 - DNA, 25 bp, Homo sapien
cgtgcaaccctgacacggggctgta

SEQ ID NO: 4692117 - DNA, 25 bp, Homo sapien
tatcccctaggaaccagagtatctc

SEQ ID NO: 4692118 - DNA, 25 bp, Homo sapien
atatcccctaggaaccagagtatct

SEQ ID NO: 4692119 - DNA, 25 bp, Homo sapien
aatatcccctaggaaccagagtatc

SEQ ID NO: 4692120 - DNA, 25 bp, Homo sapien
tcttctcaggggcttccaaggctat

SEQ ID NO: 4692121 - DNA, 25 bp, Homo sapien
cttccaaggctatagggggcggcca

SEQ ID NO: 4692122 - DNA, 25 bp, Homo sapien
cctgctgcagccttgaggtccaggc

SEQ ID NO: 4692123 - DNA, 25 bp, Homo sapien
cttcttctccagaggaggcgtctga

SEQ ID NO: 4692124 - DNA, 25 bp, Homo sapien
ctgcaaaagtccggctgctgagaga

SEQ ID NO: 4692125 - DNA, 25 bp, Homo sapien
cagcttctgcaaaagtccggctgct

SEQ ID NO: 4692126 - DNA, 25 bp, Homo sapien
tgcaaaagtccggctgctgagagat

SEQ ID NO: 4692127 - DNA, 25 bp, Homo sapien
cctcaatcgtgtcccgcttccgcct

SEQ ID NO: 4692128 - DNA, 25 bp, Homo sapien
tccctcctcaatcgtgtcccgcttc

SEQ ID NO: 4692129 - DNA, 25 bp, Homo sapien
atccctcctcaatcgtgtcccgctt

SEQ ID NO: 4692130 - DNA, 25 bp, Homo sapien
cctcctcaatcgtgtcccgcttccg

SEQ ID NO: 4692131 - DNA, 25 bp, Homo sapien
gaggcattaaagttggaggaatgca

SEQ ID NO: 4692132 - DNA, 25 bp, Homo sapien
cattaaagttggaggaatgcaggcc

SEQ ID NO: 4692133 - DNA, 25 bp, Homo sapien
ctgcaccggctggttggtcatctca

SEQ ID NO: 4692134 - DNA, 25 bp, Homo sapien
ggcctgcaccggctggttggtcatc

SEQ ID NO: 4692135 - DNA, 25 bp, Homo sapien
ttgggggttgtgcttgctgttttgg

SEQ ID NO: 4692136 - DNA, 25 bp, Homo sapien
tcaaatggtattctgagggacctgg

SEQ ID NO: 4692137 - DNA, 25 bp, Homo sapien
aatggtattctgagggacctggttg

SEQ ID NO: 4692138 - DNA, 25 bp, Homo sapien
ctggttgggggttgtgcttgctgtt

SEQ ID NO: 4692139 - DNA, 25 bp, Homo sapien
gtcagccaacccttggactcctgtg

SEQ ID NO: 4692140 - DNA, 25 bp, Homo sapien
tctagacttatgatgagggtctgca

SEQ ID NO: 4692141 - DNA, 25 bp, Homo sapien
tcctgtgcgtcttcggattccccat

SEQ ID NO: 4692142 - DNA, 25 bp, Homo sapien
catcttctccggctctagacttatg

SEQ ID NO: 4692143 - DNA, 25 bp, Homo sapien
ggtgcgtcccacacgagtttgcggc

SEQ ID NO: 4692144 - DNA, 25 bp, Homo sapien
ccacacgagtttgcggcgcagcggc

SEQ ID NO: 4692145 - DNA, 25 bp, Homo sapien
cgcacgcccgtcagctcggttccgc

SEQ ID NO: 4692146 - DNA, 25 bp, Homo sapien
cgggcggctggagcggtgcgtccca

SEQ ID NO: 4692147 - DNA, 25 bp, Homo sapien
gggacgcgcacaccccgggacacgc

SEQ ID NO: 4692148 - DNA, 25 bp, Homo sapien
cccaacaacgccaccagacgctccg

SEQ ID NO: 4692149 - DNA, 25 bp, Homo sapien
agacgctccggggtgcacacgcaca

SEQ ID NO: 4692150 - DNA, 25 bp, Homo sapien
caccccgggacacgcggacacgccg

SEQ ID NO: 4692151 - DNA, 25 bp, Homo sapien
tcagtaataaacacgctcgcacggc

SEQ ID NO: 4692152 - DNA, 25 bp, Homo sapien
tccgtctacttagcagggcaggcag

SEQ ID NO: 4692153 - DNA, 25 bp, Homo sapien
gattcacacttggagcctaggagag

SEQ ID NO: 4692154 - DNA, 25 bp, Homo sapien
taggaaaacacacgtcctcgggtgc

SEQ ID NO: 4692155 - DNA, 25 bp, Homo sapien
gaaaagtcagaccaactagggagct

SEQ ID NO: 4692156 - DNA, 25 bp, Homo sapien
tttcaacagttagagagcacgcaca

SEQ ID NO: 4692157 - DNA, 25 bp, Homo sapien
caagcccgctgtgatcaatttgtta

SEQ ID NO: 4692158 - DNA, 25 bp, Homo sapien
tactgtacaccaaactaaggcgaca

SEQ ID NO: 4692159 - DNA, 25 bp, Homo sapien
tcccaaatgtttgcccgtcaggctc

SEQ ID NO: 4692160 - DNA, 25 bp, Homo sapien
cattcggtaagctcaaactcgctga

SEQ ID NO: 4692161 - DNA, 25 bp, Homo sapien
gaagacgtccaaagttcattcggta

SEQ ID NO: 4692162 - DNA, 25 bp, Homo sapien
tcatttccgaagcagacgggacagc

SEQ ID NO: 4692163 - DNA, 25 bp, Homo sapien
gtattagcacatggtctttggcgca

SEQ ID NO: 4692164 - DNA, 25 bp, Homo sapien
aacctacttggctttgcagcatgca

SEQ ID NO: 4692165 - DNA, 25 bp, Homo sapien
gaatcccgactctgccatttgtggg

SEQ ID NO: 4692166 - DNA, 25 bp, Homo sapien
gtaaatgggcatcgtgacagcttcc

SEQ ID NO: 4692167 - DNA, 25 bp, Homo sapien
tggctgagccttcgcacaagatcta

SEQ ID NO: 4692168 - DNA, 25 bp, Homo sapien
gaagggaccagctcagacaggaatg

SEQ ID NO: 4692169 - DNA, 25 bp, Homo sapien
tttcaacaccgaaggacactggcag

SEQ ID NO: 4692170 - DNA, 25 bp, Homo sapien
gaatgcatttcagatctcggccacc

SEQ ID NO: 4692171 - DNA, 25 bp, Homo sapien
ccagtgggtgtgtgcgaagctctct

SEQ ID NO: 4692172 - DNA, 25 bp, Homo sapien
aacattttcctgaggcgccacaggg

SEQ ID NO: 4692173 - DNA, 25 bp, Homo sapien
tccgttttgggagccatgatcctag

SEQ ID NO: 4692174 - DNA, 25 bp, Homo sapien
tgccttgcttcataacacaccgtgg

SEQ ID NO: 4692175 - DNA, 25 bp, Homo sapien
tcaaaacttttcacccgcagtccag

SEQ ID NO: 4692176 - DNA, 25 bp, Homo sapien
cacttagcccataggacaatggacg

SEQ ID NO: 4692177 - DNA, 25 bp, Homo sapien
tagcagaagggagtccacttagccc

SEQ ID NO: 4692178 - DNA, 25 bp, Homo sapien
cacaaccagagccttgacctgaaag

SEQ ID NO: 4692179 - DNA, 25 bp, Homo sapien
cggttcctggggcatctggattgtt

SEQ ID NO: 4692180 - DNA, 25 bp, Homo sapien
ggttcctggggcatctggattgttt

SEQ ID NO: 4692181 - DNA, 25 bp, Homo sapien
gttcctggggcatctggattgtttc

SEQ ID NO: 4692182 - DNA, 25 bp, Homo sapien
gtcggttcctggggcatctggattg

SEQ ID NO: 4692183 - DNA, 25 bp, Homo sapien
atttatgtatttagccaaccacgcg

SEQ ID NO: 4692184 - DNA, 25 bp, Homo sapien
aaccacgcgatctcacattctgtct

SEQ ID NO: 4692185 - DNA, 25 bp, Homo sapien
catatgatctatagcactgatgtgc

SEQ ID NO: 4692186 - DNA, 25 bp, Homo sapien
tatttagccaaccacgcgatctcac

SEQ ID NO: 4692187 - DNA, 25 bp, Homo sapien
gatgtctgatcaacctttcgaggcc

SEQ ID NO: 4692188 - DNA, 25 bp, Homo sapien
cacagagaagtaacgcaacaggcag

SEQ ID NO: 4692189 - DNA, 25 bp, Homo sapien
cagaatgggaagacaccactaggtc

SEQ ID NO: 4692190 - DNA, 25 bp, Homo sapien
tcattgccgtcttgtgtgccaggcc

SEQ ID NO: 4692191 - DNA, 25 bp, Homo sapien
tcaccctgaaagtatcttgtgtcca

SEQ ID NO: 4692192 - DNA, 25 bp, Homo sapien
tctggtggaataatggagcacatgc

SEQ ID NO: 4692193 - DNA, 25 bp, Homo sapien
gctggcagcacagagtctcagctgc

SEQ ID NO: 4692194 - DNA, 25 bp, Homo sapien
tccccaggacgggtattcagctgcc

SEQ ID NO: 4692195 - DNA, 25 bp, Homo sapien
caagaacaaggatggactgctcagg

SEQ ID NO: 4692196 - DNA, 25 bp, Homo sapien
tcacggccaggtgtgcctaactctg

SEQ ID NO: 4692197 - DNA, 25 bp, Homo sapien
ccacaatagattgggaaaactgccc

SEQ ID NO: 4692198 - DNA, 25 bp, Homo sapien
tattaccccttgctccacaaatggg

SEQ ID NO: 4692199 - DNA, 25 bp, Homo sapien
tgttccagatgctataaaaccccat

SEQ ID NO: 4692200 - DNA, 25 bp, Homo sapien
taaggactgcttgccaacggtggga

SEQ ID NO: 4692201 - DNA, 25 bp, Homo sapien
tgtttctttgccgtttaaggactgc

SEQ ID NO: 4692202 - DNA, 25 bp, Homo sapien
ttataaaaggcttgcctgttccaga

SEQ ID NO: 4692203 - DNA, 25 bp, Homo sapien
atgaggagactaagaccagggcccc

SEQ ID NO: 4692204 - DNA, 25 bp, Homo sapien
gccctccttgactgatgaggagact

SEQ ID NO: 4692205 - DNA, 25 bp, Homo sapien
cttaggctgaccctatggcttctgt

SEQ ID NO: 4692206 - DNA, 25 bp, Homo sapien
ccagatccaggtatgaagggccagg

SEQ ID NO: 4692207 - DNA, 25 bp, Homo sapien
gcatctgcggcttggacacagtgga

SEQ ID NO: 4692208 - DNA, 25 bp, Homo sapien
cagcgggcctgtgtttggagatcct

SEQ ID NO: 4692209 - DNA, 25 bp, Homo sapien
caatagaggtgggaaaactgggatc

SEQ ID NO: 4692210 - DNA, 25 bp, Homo sapien
aaactatagcctgggagactctcgg

SEQ ID NO: 4692211 - DNA, 25 bp, Homo sapien
gaggtggccacagatccatgtcccc

SEQ ID NO: 4692212 - DNA, 25 bp, Homo sapien
cagggcctcctgagagtcaccgtga

SEQ ID NO: 4692213 - DNA, 25 bp, Homo sapien
gtgggcgttaccagcctcatttcac

SEQ ID NO: 4692214 - DNA, 25 bp, Homo sapien
ccctacaaccctgctagtgggcgtt

SEQ ID NO: 4692215 - DNA, 25 bp, Homo sapien
cttttgaagtggctcctgagaagct

SEQ ID NO: 4692216 - DNA, 25 bp, Homo sapien
tttgaagtggctcctgagaagctcc

SEQ ID NO: 4692217 - DNA, 25 bp, Homo sapien
ggttgagggcagacatgaggtgcct

SEQ ID NO: 4692218 - DNA, 25 bp, Homo sapien
ctccagggaaggtctgctccactct

SEQ ID NO: 4692219 - DNA, 25 bp, Homo sapien
cttcctggactcaccccgtcactcc

SEQ ID NO: 4692220 - DNA, 25 bp, Homo sapien
ccccgtgctgtctctaattcatgtg

SEQ ID NO: 4692221 - DNA, 25 bp, Homo sapien
tcctcctgccggaaatgagctgcct

SEQ ID NO: 4692222 - DNA, 25 bp, Homo sapien
gcctgctcccccgtgctgtctctaa

SEQ ID NO: 4692223 - DNA, 25 bp, Homo sapien
aaagaaacttagcacaagcccaggg

SEQ ID NO: 4692224 - DNA, 25 bp, Homo sapien
gggctggaaggactaccacgcccag

SEQ ID NO: 4692225 - DNA, 25 bp, Homo sapien
ggaggaactgacacactactcaggc

SEQ ID NO: 4692226 - DNA, 25 bp, Homo sapien
tggaaggactaccacgcccaggcag

SEQ ID NO: 4692227 - DNA, 25 bp, Homo sapien
gtgccctcaaaggcaccctgaggct

SEQ ID NO: 4692228 - DNA, 25 bp, Homo sapien
tggcctcccaagttgtgccctcaaa

SEQ ID NO: 4692229 - DNA, 25 bp, Homo sapien
tgtgccctcaaaggcaccctgaggc

SEQ ID NO: 4692230 - DNA, 25 bp, Homo sapien
tgccctcaaaggcaccctgaggctc

SEQ ID NO: 4692231 - DNA, 25 bp, Homo sapien
tgcatgccagcctcacgagggcacg

SEQ ID NO: 4692232 - DNA, 25 bp, Homo sapien
catgccagcctcacgagggcacgaa

SEQ ID NO: 4692233 - DNA, 25 bp, Homo sapien
gcatgccagcctcacgagggcacga

SEQ ID NO: 4692234 - DNA, 25 bp, Homo sapien
gcagaggttgttggaactccctcca

SEQ ID NO: 4692235 - DNA, 25 bp, Homo sapien
cagaggttgttggaactccctccat

SEQ ID NO: 4692236 - DNA, 25 bp, Homo sapien
tggcacatcccaactggctttgcaa

SEQ ID NO: 4692237 - DNA, 25 bp, Homo sapien
gcaagtatgttcagctttcctaagt

SEQ ID NO: 4692238 - DNA, 25 bp, Homo sapien
gaagttctctcggaagagcacccaa

SEQ ID NO: 4692239 - DNA, 25 bp, Homo sapien
tccagatggaagacacattagccgg

SEQ ID NO: 4692240 - DNA, 25 bp, Homo sapien
agccaccgccatcccaatcccacct

SEQ ID NO: 4692241 - DNA, 25 bp, Homo sapien
ccgagccaccgccatcccaatccca

SEQ ID NO: 4692242 - DNA, 25 bp, Homo sapien
ccacctcccaagaaatgtcgctggc

SEQ ID NO: 4692243 - DNA, 25 bp, Homo sapien
cctcccaagaaatgtcgctggcatt

SEQ ID NO: 4692244 - DNA, 25 bp, Homo sapien
tggaggaaccgctggaacaagggcc

SEQ ID NO: 4692245 - DNA, 25 bp, Homo sapien
cctgcggtgtcaccactcgctgtgc

SEQ ID NO: 4692246 - DNA, 25 bp, Homo sapien
tgcggtgtcaccactcgctgtgctg

SEQ ID NO: 4692247 - DNA, 25 bp, Homo sapien
gtggaggaaccgctggaacaagggc

SEQ ID NO: 4692248 - DNA, 25 bp, Homo sapien
gggaccatgctaggcaagagctgcc

SEQ ID NO: 4692249 - DNA, 25 bp, Homo sapien
tgtgggcaggtaagagacacaacct

SEQ ID NO: 4692250 - DNA, 25 bp, Homo sapien
ccaggaccatttgtcaagggaccat

SEQ ID NO: 4692251 - DNA, 25 bp, Homo sapien
ggcaacaccataggaggccacctct

SEQ ID NO: 4692252 - DNA, 25 bp, Homo sapien
gttgatatcatcaccctgccgttcc

SEQ ID NO: 4692253 - DNA, 25 bp, Homo sapien
ggggttcttggctgttgatatcatc

SEQ ID NO: 4692254 - DNA, 25 bp, Homo sapien
ccctcggcggctggcggtaaccttg

SEQ ID NO: 4692255 - DNA, 25 bp, Homo sapien
gacggcctgagcagtggacaagccc

SEQ ID NO: 4692256 - DNA, 25 bp, Homo sapien
tctcatggtgggtcctgccagagga

SEQ ID NO: 4692257 - DNA, 25 bp, Homo sapien
cctgccagaggacccgatctggagg

SEQ ID NO: 4692258 - DNA, 25 bp, Homo sapien
gggtcctgccagaggacccgatctg

SEQ ID NO: 4692259 - DNA, 25 bp, Homo sapien
gtcctgccagaggacccgatctgga

SEQ ID NO: 4692260 - DNA, 25 bp, Homo sapien
ctgctggccggaccagctgcgtctc

SEQ ID NO: 4692261 - DNA, 25 bp, Homo sapien
tgctggccggaccagctgcgtctca

SEQ ID NO: 4692262 - DNA, 25 bp, Homo sapien
actgctggccggaccagctgcgtct

SEQ ID NO: 4692263 - DNA, 25 bp, Homo sapien
gaggcgtctttaggagccagcaccc

SEQ ID NO: 4692264 - DNA, 25 bp, Homo sapien
ccgagaactacaggactggcccttc

SEQ ID NO: 4692265 - DNA, 25 bp, Homo sapien
ggcatcaagaccaaaccgagaacta

SEQ ID NO: 4692266 - DNA, 25 bp, Homo sapien
agcaccctggcggaaggcatcaaga

SEQ ID NO: 4692267 - DNA, 25 bp, Homo sapien
gggggacagagggcctccgtgagca

SEQ ID NO: 4692268 - DNA, 25 bp, Homo sapien
gggacagagggcctccgtgagcagc

SEQ ID NO: 4692269 - DNA, 25 bp, Homo sapien
gacagagggcctccgtgagcagcca

SEQ ID NO: 4692270 - DNA, 25 bp, Homo sapien
acgggggacagagggcctccgtgag

SEQ ID NO: 4692271 - DNA, 25 bp, Homo sapien
cgctgaactgtcctcggcctatctt

SEQ ID NO: 4692272 - DNA, 25 bp, Homo sapien
tggccttgtacacctcgctgaactg

SEQ ID NO: 4692273 - DNA, 25 bp, Homo sapien
tcttttcgatctggaagtccgccag

SEQ ID NO: 4692274 - DNA, 25 bp, Homo sapien
gaaaagacagcgtgttgggatgcct

SEQ ID NO: 4692275 - DNA, 25 bp, Homo sapien
gaggccgatctccttgacacagtcc

SEQ ID NO: 4692276 - DNA, 25 bp, Homo sapien
ggccgatctccttgacacagtcctg

SEQ ID NO: 4692277 - DNA, 25 bp, Homo sapien
cttcaagaggccgatctccttgaca

SEQ ID NO: 4692278 - DNA, 25 bp, Homo sapien
aagaggccgatctccttgacacagt

SEQ ID NO: 4692279 - DNA, 25 bp, Homo sapien
cgttgtcttcgataaacgagtccaa

SEQ ID NO: 4692280 - DNA, 25 bp, Homo sapien
gcacaatgttcagctcgttgtcttc

SEQ ID NO: 4692281 - DNA, 25 bp, Homo sapien
ttcagctcgttgtcttcgataaacg

SEQ ID NO: 4692282 - DNA, 25 bp, Homo sapien
taaacgagtccaaatacttgatgat

SEQ ID NO: 4692283 - DNA, 25 bp, Homo sapien
tgtcctctccgggatgagccgcttc

SEQ ID NO: 4692284 - DNA, 25 bp, Homo sapien
ctcggtgcatcacccggcgtgaatg

SEQ ID NO: 4692285 - DNA, 25 bp, Homo sapien
gctgcacaaagtacttccatactgt

SEQ ID NO: 4692286 - DNA, 25 bp, Homo sapien
atcacccggcgtgaatgcatgtgct

SEQ ID NO: 4692287 - DNA, 25 bp, Homo sapien
gaagaagcggcccagaccaaggtca

SEQ ID NO: 4692288 - DNA, 25 bp, Homo sapien
agaccaaggtcaccgagcttcacga

SEQ ID NO: 4692289 - DNA, 25 bp, Homo sapien
gagtgggctgcggtggtctcagagc

SEQ ID NO: 4692290 - DNA, 25 bp, Homo sapien
cacgacgcccgtggctgtgatgaac

SEQ ID NO: 4692291 - DNA, 25 bp, Homo sapien
tggggcacagacaggtcccccttac

SEQ ID NO: 4692292 - DNA, 25 bp, Homo sapien
gggctgctggggcacagacaggtcc

SEQ ID NO: 4692293 - DNA, 25 bp, Homo sapien
tgctggggcacagacaggtccccct

SEQ ID NO: 4692294 - DNA, 25 bp, Homo sapien
gctgctggggcacagacaggtcccc

SEQ ID NO: 4692295 - DNA, 25 bp, Homo sapien
gtggggagaatgtttgcgtctccct

SEQ ID NO: 4692296 - DNA, 25 bp, Homo sapien
gagaatgtttgcgtctccctgcatg

SEQ ID NO: 4692297 - DNA, 25 bp, Homo sapien
gggagaatgtttgcgtctccctgca

SEQ ID NO: 4692298 - DNA, 25 bp, Homo sapien
aatgtttgcgtctccctgcatggtc

SEQ ID NO: 4692299 - DNA, 25 bp, Homo sapien
aatatgatctgctgcctggtaattc

SEQ ID NO: 4692300 - DNA, 25 bp, Homo sapien
tcgtctgacgctcattctgttccgc

SEQ ID NO: 4692301 - DNA, 25 bp, Homo sapien
taattacggctcctatttctgacac

SEQ ID NO: 4692302 - DNA, 25 bp, Homo sapien
cgaccatggcactgactaatgccct

SEQ ID NO: 4692303 - DNA, 25 bp, Homo sapien
gcctggccatgaaggtcgtccatcc

SEQ ID NO: 4692304 - DNA, 25 bp, Homo sapien
cagcatggtgtgatccccggcaagg

SEQ ID NO: 4692305 - DNA, 25 bp, Homo sapien
gcaaggcagcgctgacacacaccat

SEQ ID NO: 4692306 - DNA, 25 bp, Homo sapien
atgaaggtcgtccatccactcagca

SEQ ID NO: 4692307 - DNA, 25 bp, Homo sapien
tcactctttcagacgctcggtgagc

SEQ ID NO: 4692308 - DNA, 25 bp, Homo sapien
actctttcagacgctcggtgagcat

SEQ ID NO: 4692309 - DNA, 25 bp, Homo sapien
cactctttcagacgctcggtgagca

SEQ ID NO: 4692310 - DNA, 25 bp, Homo sapien
ctcactctttcagacgctcggtgag

SEQ ID NO: 4692311 - DNA, 25 bp, Homo sapien
tattgaaagcctgggcacgtgggca

SEQ ID NO: 4692312 - DNA, 25 bp, Homo sapien
taactgagccttgaccctgctggga

SEQ ID NO: 4692313 - DNA, 25 bp, Homo sapien
tgctcagcaggacccaaacgttagg

SEQ ID NO: 4692314 - DNA, 25 bp, Homo sapien
ccaggaccatcggaaagcaagggct

SEQ ID NO: 4692315 - DNA, 25 bp, Homo sapien
agctggagtcccagcgtggcaaagg

SEQ ID NO: 4692316 - DNA, 25 bp, Homo sapien
ctggagtcccagcgtggcaaaggct

SEQ ID NO: 4692317 - DNA, 25 bp, Homo sapien
agtcccagcgtggcaaaggctggct

SEQ ID NO: 4692318 - DNA, 25 bp, Homo sapien
tggagtcccagcgtggcaaaggctg

SEQ ID NO: 4692319 - DNA, 25 bp, Homo sapien
cagatgtcggacttgaagttgtagc

SEQ ID NO: 4692320 - DNA, 25 bp, Homo sapien
gatcctctccggtgacatgtagtag

SEQ ID NO: 4692321 - DNA, 25 bp, Homo sapien
ggtgacatgtagtagggcgtcccca

SEQ ID NO: 4692322 - DNA, 25 bp, Homo sapien
aagttgtagccgttctcatggatcc

SEQ ID NO: 4692323 - DNA, 25 bp, Homo sapien
tactgtgcagcgtagaagggacatt

SEQ ID NO: 4692324 - DNA, 25 bp, Homo sapien
aaacctcgctgctgggaactccaaa

SEQ ID NO: 4692325 - DNA, 25 bp, Homo sapien
gattaaggtggattttcctggactg

SEQ ID NO: 4692326 - DNA, 25 bp, Homo sapien
tggtcctgtgaacgcaggccctggt

SEQ ID NO: 4692327 - DNA, 25 bp, Homo sapien
gacgcatgtccaggaattaaaatga

SEQ ID NO: 4692328 - DNA, 25 bp, Homo sapien
tgccaaatgcaccacccaggtgacg

SEQ ID NO: 4692329 - DNA, 25 bp, Homo sapien
gttaatcgggcattttcaaaggaca

SEQ ID NO: 4692330 - DNA, 25 bp, Homo sapien
gactctcgggtgcaaagggttaatc

SEQ ID NO: 4692331 - DNA, 25 bp, Homo sapien
tgaacaggtctggtgaccccaaggg

SEQ ID NO: 4692332 - DNA, 25 bp, Homo sapien
gtgtttagggacagcatcacctctg

SEQ ID NO: 4692333 - DNA, 25 bp, Homo sapien
tgccccattctgtgttcgtccatga

SEQ ID NO: 4692334 - DNA, 25 bp, Homo sapien
aggttcagcaccctcgggaccagga

SEQ ID NO: 4692335 - DNA, 25 bp, Homo sapien
ttctgccctgaaggccggccacagc

SEQ ID NO: 4692336 - DNA, 25 bp, Homo sapien
ccacagccacgggggagcgaaaggc

SEQ ID NO: 4692337 - DNA, 25 bp, Homo sapien
gcctttgatgaggtgaggcctgcgg

SEQ ID NO: 4692338 - DNA, 25 bp, Homo sapien
tgaggcctgcggcaccggttctgcc

SEQ ID NO: 4692339 - DNA, 25 bp, Homo sapien
cccctggatagaggtgcgcagcagc

SEQ ID NO: 4692340 - DNA, 25 bp, Homo sapien
gcctcctgcccctggatagaggtgc

SEQ ID NO: 4692341 - DNA, 25 bp, Homo sapien
gaagccagctgccggtatcagggca

SEQ ID NO: 4692342 - DNA, 25 bp, Homo sapien
gaagggtgaggcatttcactgtggc

SEQ ID NO: 4692343 - DNA, 25 bp, Homo sapien
gaagagattcatcttatctccatag

SEQ ID NO: 4692344 - DNA, 25 bp, Homo sapien
gctcgatcttctggcacagggagaa

SEQ ID NO: 4692345 - DNA, 25 bp, Homo sapien
ggtagtcacactgctcgatcttctg

SEQ ID NO: 4692346 - DNA, 25 bp, Homo sapien
ttctcggagtagtgctccccgggga

SEQ ID NO: 4692347 - DNA, 25 bp, Homo sapien
tgcacatgctgaccagttctcgtaa

SEQ ID NO: 4692348 - DNA, 25 bp, Homo sapien
ctggtgcacgtatccgatgtcaggt

SEQ ID NO: 4692349 - DNA, 25 bp, Homo sapien
gggcagatgcacatgctgaccagtt

SEQ ID NO: 4692350 - DNA, 25 bp, Homo sapien
tatccgatgtcaggtctctggtggg

SEQ ID NO: 4692351 - DNA, 25 bp, Homo sapien
gaaccgccagcattcaaggaggtga

SEQ ID NO: 4692352 - DNA, 25 bp, Homo sapien
tggctttgataaggcacggtgcatc

SEQ ID NO: 4692353 - DNA, 25 bp, Homo sapien
gctgttctaggctaccaggtggcca

SEQ ID NO: 4692354 - DNA, 25 bp, Homo sapien
caaagtcacgctaggaagttgcaga

SEQ ID NO: 4692355 - DNA, 25 bp, Homo sapien
ctgcatatggagagactgtcgggct

SEQ ID NO: 4692356 - DNA, 25 bp, Homo sapien
aattctcgacttccgtggtccatgg

SEQ ID NO: 4692357 - DNA, 25 bp, Homo sapien
gcagatccgagtccacgtgtggaaa

SEQ ID NO: 4692358 - DNA, 25 bp, Homo sapien
gacgacagctcagacaattggaagg

SEQ ID NO: 4692359 - DNA, 25 bp, Homo sapien
tgagtggctgagatcgtgcgcctcc

SEQ ID NO: 4692360 - DNA, 25 bp, Homo sapien
aacgatggaattacctcatgagggc

SEQ ID NO: 4692361 - DNA, 25 bp, Homo sapien
tcaagaaattgtgctgcagacgctg

SEQ ID NO: 4692362 - DNA, 25 bp, Homo sapien
cagtggtaagcactaggcaggcgac

SEQ ID NO: 4692363 - DNA, 25 bp, Homo sapien
tccttgagcactggcctaggctcag

SEQ ID NO: 4692364 - DNA, 25 bp, Homo sapien
gagagcgtaggagccatgcgcccct

SEQ ID NO: 4692365 - DNA, 25 bp, Homo sapien
tcctgaggacagataggttctgtct

SEQ ID NO: 4692366 - DNA, 25 bp, Homo sapien
tctgtctgctgtcagaagtcagagt

SEQ ID NO: 4692367 - DNA, 25 bp, Homo sapien
cactcctctggagattgaggtgctg

SEQ ID NO: 4692368 - DNA, 25 bp, Homo sapien
cactcatgtggctagtgtttgccga

SEQ ID NO: 4692369 - DNA, 25 bp, Homo sapien
tgtgagaaagggactactgcagtcc

SEQ ID NO: 4692370 - DNA, 25 bp, Homo sapien
gcattgaggcccagtaagacactca

SEQ ID NO: 4692371 - DNA, 25 bp, Homo sapien
ataagtatggttctccccgcacgtg

SEQ ID NO: 4692372 - DNA, 25 bp, Homo sapien
aaacttgaggttagcggatctgccc

SEQ ID NO: 4692373 - DNA, 25 bp, Homo sapien
tacattgcggatgtcagagcaggcc

SEQ ID NO: 4692374 - DNA, 25 bp, Homo sapien
gattattctgggcaagaggtcccgc

SEQ ID NO: 4692375 - DNA, 25 bp, Homo sapien
cactatagtggatgccgaggtaatc

SEQ ID NO: 4692376 - DNA, 25 bp, Homo sapien
gatgctgaactgtccagagtgccca

SEQ ID NO: 4692377 - DNA, 25 bp, Homo sapien
tagctgaacagtcaaatgaagaggg

SEQ ID NO: 4692378 - DNA, 25 bp, Homo sapien
gcctccagtgtaagtaaagcagtgt

SEQ ID NO: 4692379 - DNA, 25 bp, Homo sapien
tttccagcccattgtggccgtgcag

SEQ ID NO: 4692380 - DNA, 25 bp, Homo sapien
tttcgtgaacatgagcaccccttcc

SEQ ID NO: 4692381 - DNA, 25 bp, Homo sapien
tcagtgacctaggacagacctggct

SEQ ID NO: 4692382 - DNA, 25 bp, Homo sapien
gacaggcatcactcagtgacctagg

SEQ ID NO: 4692383 - DNA, 25 bp, Homo sapien
acccgctgtccagggctgtcctcat

SEQ ID NO: 4692384 - DNA, 25 bp, Homo sapien
tcagagagtgacccgctgtccaggg

SEQ ID NO: 4692385 - DNA, 25 bp, Homo sapien
tgacccgctgtccagggctgtcctc

SEQ ID NO: 4692386 - DNA, 25 bp, Homo sapien
agtgacccgctgtccagggctgtcc

SEQ ID NO: 4692387 - DNA, 25 bp, Homo sapien
cagtggagatcaaggaagactatcc

SEQ ID NO: 4692388 - DNA, 25 bp, Homo sapien
gactatccgtgtttagccgaagcac

SEQ ID NO: 4692389 - DNA, 25 bp, Homo sapien
gactccataggaaggtgaccactcg

SEQ ID NO: 4692390 - DNA, 25 bp, Homo sapien
catctgtgcgactctgagctcagga

SEQ ID NO: 4692391 - DNA, 25 bp, Homo sapien
agaggatcagatctgcagtggcagc

SEQ ID NO: 4692392 - DNA, 25 bp, Homo sapien
caagttgagagctgccaaaagctga

SEQ ID NO: 4692393 - DNA, 25 bp, Homo sapien
gagccatgccacagcagatagtgca

SEQ ID NO: 4692394 - DNA, 25 bp, Homo sapien
tctggcgtcccatgagagccatgcc

SEQ ID NO: 4692395 - DNA, 25 bp, Homo sapien
gatgttttcatttggcctagtgaga

SEQ ID NO: 4692396 - DNA, 25 bp, Homo sapien
tgatacctggaaatatggcattagc

SEQ ID NO: 4692397 - DNA, 25 bp, Homo sapien
gaaaactagtgataaccatgctggg

SEQ ID NO: 4692398 - DNA, 25 bp, Homo sapien
taaggagtttgatcatgatacctgg

SEQ ID NO: 4692399 - DNA, 25 bp, Homo sapien
gatttgtgtctgtaaatctgctgtt

SEQ ID NO: 4692400 - DNA, 25 bp, Homo sapien
tctataattggacctccttaaatgg

SEQ ID NO: 4692401 - DNA, 25 bp, Homo sapien
taaggtagtctgtattttctcaatg

SEQ ID NO: 4692402 - DNA, 25 bp, Homo sapien
cttaaatggttcagataaggtagtc

SEQ ID NO: 4692403 - DNA, 25 bp, Homo sapien
ttgcagagctcggagtgatatgccc

SEQ ID NO: 4692404 - DNA, 25 bp, Homo sapien
gcagttgcttgtgcctcctggagca

SEQ ID NO: 4692405 - DNA, 25 bp, Homo sapien
cggtttccggttgcatcattcacgc

SEQ ID NO: 4692406 - DNA, 25 bp, Homo sapien
tgatatgcccagctagggagcgcca

SEQ ID NO: 4692407 - DNA, 25 bp, Homo sapien
ccttggctgcttaaaatggaccgct

SEQ ID NO: 4692408 - DNA, 25 bp, Homo sapien
gatgagtggccagttgactaacaat

SEQ ID NO: 4692409 - DNA, 25 bp, Homo sapien
caagtgtgagtaagcgctctgtcag

SEQ ID NO: 4692410 - DNA, 25 bp, Homo sapien
tgtgtgactctgttatcgccgcata

SEQ ID NO: 4692411 - DNA, 25 bp, Homo sapien
tggatttcagcaagcgatgcaagat

SEQ ID NO: 4692412 - DNA, 25 bp, Homo sapien
gcttttggccaggacttataatgaa

SEQ ID NO: 4692413 - DNA, 25 bp, Homo sapien
tcagtgcttactcaggagtgaaaac

SEQ ID NO: 4692414 - DNA, 25 bp, Homo sapien
tgattgcttggcttgcctcgccggg

SEQ ID NO: 4692415 - DNA, 25 bp, Homo sapien
tatggtgccactgccatggaaaggg

SEQ ID NO: 4692416 - DNA, 25 bp, Homo sapien
gcagggttaccctcttaggcagagt

SEQ ID NO: 4692417 - DNA, 25 bp, Homo sapien
ccatctctgaatggaggcctgcctt

SEQ ID NO: 4692418 - DNA, 25 bp, Homo sapien
gctttattgaagtggcggcgttaca

SEQ ID NO: 4692419 - DNA, 25 bp, Homo sapien
tgtgatgtcactcccctctagttcc

SEQ ID NO: 4692420 - DNA, 25 bp, Homo sapien
gcactctgatcttggcggctgtgat

SEQ ID NO: 4692421 - DNA, 25 bp, Homo sapien
cactctttgcccactcggtctttgc

SEQ ID NO: 4692422 - DNA, 25 bp, Homo sapien
tgatggccccatggacacagttctg

SEQ ID NO: 4692423 - DNA, 25 bp, Homo sapien
gcttctgagagaaggcactaccaat

SEQ ID NO: 4692424 - DNA, 25 bp, Homo sapien
catttctgtggctcatgtgattcct

SEQ ID NO: 4692425 - DNA, 25 bp, Homo sapien
gaaggcactaccaatgtccacacag

SEQ ID NO: 4692426 - DNA, 25 bp, Homo sapien
ggatctggagttgaggcgtcatttc

SEQ ID NO: 4692427 - DNA, 25 bp, Homo sapien
gtgctggccacttagcatggccgca

SEQ ID NO: 4692428 - DNA, 25 bp, Homo sapien
ttagcatggccgcaccgccaattac

SEQ ID NO: 4692429 - DNA, 25 bp, Homo sapien
gaggataccgggtcggtgctggcca

SEQ ID NO: 4692430 - DNA, 25 bp, Homo sapien
gcaccgccaattactgcccggcctg

SEQ ID NO: 4692431 - DNA, 25 bp, Homo sapien
gcatggagccactcaaaggcgactg

SEQ ID NO: 4692432 - DNA, 25 bp, Homo sapien
ttcggcaggaagtccccgcaggcct

SEQ ID NO: 4692433 - DNA, 25 bp, Homo sapien
agctggctcggcgttcggcaggaag

SEQ ID NO: 4692434 - DNA, 25 bp, Homo sapien
gaataagtaatttgttcctggagct

SEQ ID NO: 4692435 - DNA, 25 bp, Homo sapien
aggaaacaactggcgccttgtaggg

SEQ ID NO: 4692436 - DNA, 25 bp, Homo sapien
acaggaaacaactggcgccttgtag

SEQ ID NO: 4692437 - DNA, 25 bp, Homo sapien
caggaaacaactggcgccttgtagg

SEQ ID NO: 4692438 - DNA, 25 bp, Homo sapien
cgaagatggcgagaagagttggggg

SEQ ID NO: 4692439 - DNA, 25 bp, Homo sapien
aagccgaagatggcgagaagagttg

SEQ ID NO: 4692440 - DNA, 25 bp, Homo sapien
ccgaagatggcgagaagagttgggg

SEQ ID NO: 4692441 - DNA, 25 bp, Homo sapien
aagaagccgaagatggcgagaagag

SEQ ID NO: 4692442 - DNA, 25 bp, Homo sapien
tgaaagtttacacggaacctgcacc

SEQ ID NO: 4692443 - DNA, 25 bp, Homo sapien
tttctggacacctgagtagtggggt

SEQ ID NO: 4692444 - DNA, 25 bp, Homo sapien
tacacggaacctgcaccctgtcagg

SEQ ID NO: 4692445 - DNA, 25 bp, Homo sapien
gattgctgaaagtttacacggaacc

SEQ ID NO: 4692446 - DNA, 25 bp, Homo sapien
tcctgccgccacttccagggattct

SEQ ID NO: 4692447 - DNA, 25 bp, Homo sapien
tgccgccacttccagggattctgct

SEQ ID NO: 4692448 - DNA, 25 bp, Homo sapien
gccacttccagggattctgctccat

SEQ ID NO: 4692449 - DNA, 25 bp, Homo sapien
cctcctgccgccacttccagggatt

SEQ ID NO: 4692450 - DNA, 25 bp, Homo sapien
gtaggcgatagccactgcggacctc

SEQ ID NO: 4692451 - DNA, 25 bp, Homo sapien
gagccatctatccactttacagcgg

SEQ ID NO: 4692452 - DNA, 25 bp, Homo sapien
cattgtccagttggcagccaagagc

SEQ ID NO: 4692453 - DNA, 25 bp, Homo sapien
tggtttgggccacggctggcctaat

SEQ ID NO: 4692454 - DNA, 25 bp, Homo sapien
gcctgtggccgttcaccgtctgcga

SEQ ID NO: 4692455 - DNA, 25 bp, Homo sapien
tggccgttcaccgtctgcgaggcat

SEQ ID NO: 4692456 - DNA, 25 bp, Homo sapien
ccgctatggctggcctggcgcctgt

SEQ ID NO: 4692457 - DNA, 25 bp, Homo sapien
tggcgcctgtggccgttcaccgtct

SEQ ID NO: 4692458 - DNA, 25 bp, Homo sapien
cttgctctccaaacactcgttgagg

SEQ ID NO: 4692459 - DNA, 25 bp, Homo sapien
gcgaggcgccaatgggcctgagtca

SEQ ID NO: 4692460 - DNA, 25 bp, Homo sapien
aaacactcgttgaggcccgagaggg

SEQ ID NO: 4692461 - DNA, 25 bp, Homo sapien
gagatgcgaagtttgcccaccactg

SEQ ID NO: 4692462 - DNA, 25 bp, Homo sapien
agtttccctcctctggacctgtgac

SEQ ID NO: 4692463 - DNA, 25 bp, Homo sapien
tgagtttccctcctctggacctgtg

SEQ ID NO: 4692464 - DNA, 25 bp, Homo sapien
tctgagtttccctcctctggacctg

SEQ ID NO: 4692465 - DNA, 25 bp, Homo sapien
ttctgagtttccctcctctggacct

SEQ ID NO: 4692466 - DNA, 25 bp, Homo sapien
tcccctgctccccaaggtgcgtcca

SEQ ID NO: 4692467 - DNA, 25 bp, Homo sapien
tccgtgcagccacctttcccctgct

SEQ ID NO: 4692468 - DNA, 25 bp, Homo sapien
ctgtccaccgctgctccgtgcagcc

SEQ ID NO: 4692469 - DNA, 25 bp, Homo sapien
ctttcccctgctccccaaggtgcgt

SEQ ID NO: 4692470 - DNA, 25 bp, Homo sapien
gttggagggggtcccagagagactc

SEQ ID NO: 4692471 - DNA, 25 bp, Homo sapien
agggggtcccagagagactcctgat

SEQ ID NO: 4692472 - DNA, 25 bp, Homo sapien
tggagggggtcccagagagactcct

SEQ ID NO: 4692473 - DNA, 25 bp, Homo sapien
gagttggagggggtcccagagagac

SEQ ID NO: 4692474 - DNA, 25 bp, Homo sapien
tggggcccaagggttccttgattca

SEQ ID NO: 4692475 - DNA, 25 bp, Homo sapien
tcttcaccacctcgccggcggccac

SEQ ID NO: 4692476 - DNA, 25 bp, Homo sapien
ttcaccacctcgccggcggccacgg

SEQ ID NO: 4692477 - DNA, 25 bp, Homo sapien
agtcttcaccacctcgccggcggcc

SEQ ID NO: 4692478 - DNA, 25 bp, Homo sapien
gcagtcttcaccacctcgccggcgg

SEQ ID NO: 4692479 - DNA, 25 bp, Homo sapien
ccaaactgctgctcgcaggactctt

SEQ ID NO: 4692480 - DNA, 25 bp, Homo sapien
atcgcgcagccgtgaagcaagaacc

SEQ ID NO: 4692481 - DNA, 25 bp, Homo sapien
gctcgcaggactcttgggcctgcca

SEQ ID NO: 4692482 - DNA, 25 bp, Homo sapien
cagctcagtcgctgtccagagaact

SEQ ID NO: 4692483 - DNA, 25 bp, Homo sapien
ccactgcacgtgagtacacgcggtc

SEQ ID NO: 4692484 - DNA, 25 bp, Homo sapien
gccgcccggtcagccgtcctctcgt

SEQ ID NO: 4692485 - DNA, 25 bp, Homo sapien
ggtcagccgtcctctcgtcgaacac

SEQ ID NO: 4692486 - DNA, 25 bp, Homo sapien
cacgtgagtacacgcggtcagcgct

SEQ ID NO: 4692487 - DNA, 25 bp, Homo sapien
cggcaacggagaagagcgctgcggg

SEQ ID NO: 4692488 - DNA, 25 bp, Homo sapien
gcggccgtcggcgcggaaggctgcg

SEQ ID NO: 4692489 - DNA, 25 bp, Homo sapien
gaaggctgcgaggaagggcgcgtgc

SEQ ID NO: 4692490 - DNA, 25 bp, Homo sapien
gcgcgggcgcggcaacggagaagag

SEQ ID NO: 4692491 - DNA, 25 bp, Homo sapien
gccgcctcccatcggagaacagcgc

SEQ ID NO: 4692492 - DNA, 25 bp, Homo sapien
cagcaccaggatgccgccggacggc

SEQ ID NO: 4692493 - DNA, 25 bp, Homo sapien
gatgccgccggacggcaccgggtgg

SEQ ID NO: 4692494 - DNA, 25 bp, Homo sapien
gcgccgcctcccatcggagaacagc

SEQ ID NO: 4692495 - DNA, 25 bp, Homo sapien
ctgagggcgtgacgcaccgagaagc

SEQ ID NO: 4692496 - DNA, 25 bp, Homo sapien
gagggcgtgacgcaccgagaagcca

SEQ ID NO: 4692497 - DNA, 25 bp, Homo sapien
gggcgtgacgcaccgagaagccacc

SEQ ID NO: 4692498 - DNA, 25 bp, Homo sapien
agccaccgcccagagagtcctgatc

SEQ ID NO: 4692499 - DNA, 25 bp, Homo sapien
gggtcccagcggaagagcaggccct

SEQ ID NO: 4692500 - DNA, 25 bp, Homo sapien
gagcaggccctctgagggcggcgcg

SEQ ID NO: 4692501 - DNA, 25 bp, Homo sapien
gggcagcagcgagggcgtgacgtcc

SEQ ID NO: 4692502 - DNA, 25 bp, Homo sapien
agagaaggcgcacccacacagtggg

SEQ ID NO: 4692503 - DNA, 25 bp, Homo sapien
agagccctcactgcgaggtcccggg

SEQ ID NO: 4692504 - DNA, 25 bp, Homo sapien
cgggttccacgtagggcactcctcg

SEQ ID NO: 4692505 - DNA, 25 bp, Homo sapien
cacgtagggcactcctcggagggca

SEQ ID NO: 4692506 - DNA, 25 bp, Homo sapien
tcactgcgaggtcccgggttccacg

SEQ ID NO: 4692507 - DNA, 25 bp, Homo sapien
gttggccaaggcattgactcggctg

SEQ ID NO: 4692508 - DNA, 25 bp, Homo sapien
cattgactcggctgataacatcctg

SEQ ID NO: 4692509 - DNA, 25 bp, Homo sapien
gcatcctgcagccgacgatagggct

SEQ ID NO: 4692510 - DNA, 25 bp, Homo sapien
tcggctgataacatcctggccaggc

SEQ ID NO: 4692511 - DNA, 25 bp, Homo sapien
caggaagctggaggcctccgctggg

SEQ ID NO: 4692512 - DNA, 25 bp, Homo sapien
catctccatcgccaggacatgctcc

SEQ ID NO: 4692513 - DNA, 25 bp, Homo sapien
cctcttcaggaagcggacaacagcc

SEQ ID NO: 4692514 - DNA, 25 bp, Homo sapien
gacaacagccagcagtgcggccggc

SEQ ID NO: 4692515 - DNA, 25 bp, Homo sapien
ccacagatacaacgccttggctcag

SEQ ID NO: 4692516 - DNA, 25 bp, Homo sapien
gcctgtcaacaacagctctgggtcc

SEQ ID NO: 4692517 - DNA, 25 bp, Homo sapien
ccaggggcctgtcaacaacagctct

SEQ ID NO: 4692518 - DNA, 25 bp, Homo sapien
caggctggccacagatacaacgcct

SEQ ID NO: 4692519 - DNA, 25 bp, Homo sapien
cggagggagagccatgtgtcagcca

SEQ ID NO: 4692520 - DNA, 25 bp, Homo sapien
cacggagggagagccatgtgtcagc

SEQ ID NO: 4692521 - DNA, 25 bp, Homo sapien
ggagggagagccatgtgtcagccac

SEQ ID NO: 4692522 - DNA, 25 bp, Homo sapien
ttcacggagggagagccatgtgtca

SEQ ID NO: 4692523 - DNA, 25 bp, Homo sapien
cgctgcacactcgccaccagggcca

SEQ ID NO: 4692524 - DNA, 25 bp, Homo sapien
accagggccataggcccaccaatca

SEQ ID NO: 4692525 - DNA, 25 bp, Homo sapien
gtgctggatgcgcattcggggccgc

SEQ ID NO: 4692526 - DNA, 25 bp, Homo sapien
ctggatgcgcattcggggccgctct

SEQ ID NO: 4692527 - DNA, 25 bp, Homo sapien
cagctgtggatcacggtgactccag

SEQ ID NO: 4692528 - DNA, 25 bp, Homo sapien
tggaagactctggaggtgaaccagc

SEQ ID NO: 4692529 - DNA, 25 bp, Homo sapien
tccggtccctctagggtgtgctgga

SEQ ID NO: 4692530 - DNA, 25 bp, Homo sapien
ctctaggtccggtccctctagggtg

SEQ ID NO: 4692531 - DNA, 25 bp, Homo sapien
tgaccccacctgggtgcttaggaac

SEQ ID NO: 4692532 - DNA, 25 bp, Homo sapien
tcatggccacgttgacctctccagt

SEQ ID NO: 4692533 - DNA, 25 bp, Homo sapien
tccagtgacgtcccacacttcagag

SEQ ID NO: 4692534 - DNA, 25 bp, Homo sapien
ctgggcccggtgctggagatgaaag

SEQ ID NO: 4692535 - DNA, 25 bp, Homo sapien
cttttgtgtgcattattaggccttg

SEQ ID NO: 4692536 - DNA, 25 bp, Homo sapien
aaccaggacacgtgcgccaggatgg

SEQ ID NO: 4692537 - DNA, 25 bp, Homo sapien
tgtgcattattaggccttggttgtc

SEQ ID NO: 4692538 - DNA, 25 bp, Homo sapien
gggaactgaaccaggacacgtgcgc

SEQ ID NO: 4692539 - DNA, 25 bp, Homo sapien
tccaccagcttatgacggaaggtct

SEQ ID NO: 4692540 - DNA, 25 bp, Homo sapien
accagcttatgacggaaggtctgga

SEQ ID NO: 4692541 - DNA, 25 bp, Homo sapien
tgcatgagcgtggattgaggggcat

SEQ ID NO: 4692542 - DNA, 25 bp, Homo sapien
gcttatgacggaaggtctggaggca

SEQ ID NO: 4692543 - DNA, 25 bp, Homo sapien
tgtgtaagtcttgcctcatccccaa

SEQ ID NO: 4692544 - DNA, 25 bp, Homo sapien
cctggagtcaccctgaaaggcagat

SEQ ID NO: 4692545 - DNA, 25 bp, Homo sapien
gccccggcctcagatagatcaagtt

SEQ ID NO: 4692546 - DNA, 25 bp, Homo sapien
tcttcctaggcacctcacagagtga

SEQ ID NO: 4692547 - DNA, 25 bp, Homo sapien
tatatgggcttgggggatggggagg

SEQ ID NO: 4692548 - DNA, 25 bp, Homo sapien
tgtatatgggcttgggggatgggga

SEQ ID NO: 4692549 - DNA, 25 bp, Homo sapien
gtatatgggcttgggggatggggag

SEQ ID NO: 4692550 - DNA, 25 bp, Homo sapien
ctgtatatgggcttgggggatgggg

SEQ ID NO: 4692551 - DNA, 25 bp, Homo sapien
aggtacagggcagccacggagcagc

SEQ ID NO: 4692552 - DNA, 25 bp, Homo sapien
ccaggtacagggcagccacggagca

SEQ ID NO: 4692553 - DNA, 25 bp, Homo sapien
acttcatagatttgcagcaggatgg

SEQ ID NO: 4692554 - DNA, 25 bp, Homo sapien
gtacttcatagatttgcagcaggat

SEQ ID NO: 4692555 - DNA, 25 bp, Homo sapien
ccctcctgacatcctcttagagttt

SEQ ID NO: 4692556 - DNA, 25 bp, Homo sapien
aacatgtttttgtagtgtgcccctc

SEQ ID NO: 4692557 - DNA, 25 bp, Homo sapien
tgttccttgtagtgaccccagcgtt

SEQ ID NO: 4692558 - DNA, 25 bp, Homo sapien
cttctcagcaagtaaccactccggg

SEQ ID NO: 4692559 - DNA, 25 bp, Homo sapien
acagcccacaaatgacagagtcctc

SEQ ID NO: 4692560 - DNA, 25 bp, Homo sapien
agggcgcagaaggacacgccacagc

SEQ ID NO: 4692561 - DNA, 25 bp, Homo sapien
gttcttgtggactgtggttcgctct

SEQ ID NO: 4692562 - DNA, 25 bp, Homo sapien
cttgtggactgtggttcgctctgac

SEQ ID NO: 4692563 - DNA, 25 bp, Homo sapien
aggttcttgtggactgtggttcgct

SEQ ID NO: 4692564 - DNA, 25 bp, Homo sapien
gtggactgtggttcgctctgacttg

SEQ ID NO: 4692565 - DNA, 25 bp, Homo sapien
tggccttggcccactcgctggtcat

SEQ ID NO: 4692566 - DNA, 25 bp, Homo sapien
ttggccttggcccactcgctggtca

SEQ ID NO: 4692567 - DNA, 25 bp, Homo sapien
tcattggccttggcccactcgctgg

SEQ ID NO: 4692568 - DNA, 25 bp, Homo sapien
cattggccttggcccactcgctggt

SEQ ID NO: 4692569 - DNA, 25 bp, Homo sapien
gaggaagtgcattgcgactgtgaca

SEQ ID NO: 4692570 - DNA, 25 bp, Homo sapien
agaaagaggaagtgcattgcgactg

SEQ ID NO: 4692571 - DNA, 25 bp, Homo sapien
aagaggaagtgcattgcgactgtga

SEQ ID NO: 4692572 - DNA, 25 bp, Homo sapien
aggaagtgcattgcgactgtgacag

SEQ ID NO: 4692573 - DNA, 25 bp, Homo sapien
tggcgtggtagagccgcatgcctgg

SEQ ID NO: 4692574 - DNA, 25 bp, Homo sapien
gtggtagagccgcatgcctgggccc

SEQ ID NO: 4692575 - DNA, 25 bp, Homo sapien
ggcccgggtgcatgctcacagctac

SEQ ID NO: 4692576 - DNA, 25 bp, Homo sapien
gcctgggcccgggtgcatgctcaca

SEQ ID NO: 4692577 - DNA, 25 bp, Homo sapien
ggctgctttggaggctacagctggg

SEQ ID NO: 4692578 - DNA, 25 bp, Homo sapien
cagtagtttgggagtcgggagagct

SEQ ID NO: 4692579 - DNA, 25 bp, Homo sapien
tttggaggctacagctgggcgtctc

SEQ ID NO: 4692580 - DNA, 25 bp, Homo sapien
acagtagtttgggagtcgggagagc

SEQ ID NO: 4692581 - DNA, 25 bp, Homo sapien
gcatggccagggtgaccgccacgat

SEQ ID NO: 4692582 - DNA, 25 bp, Homo sapien
ccagcaatgtccgggggccacgtag

SEQ ID NO: 4692583 - DNA, 25 bp, Homo sapien
gggccacgtagtcatgggggagcat

SEQ ID NO: 4692584 - DNA, 25 bp, Homo sapien
agcatggccagggtgaccgccacga

SEQ ID NO: 4692585 - DNA, 25 bp, Homo sapien
aggcccagatggcatttgtgtgcac

SEQ ID NO: 4692586 - DNA, 25 bp, Homo sapien
gggcaagaggacttccccatcccca

SEQ ID NO: 4692587 - DNA, 25 bp, Homo sapien
ctgtgggctcaacatgcgggcacgg

SEQ ID NO: 4692588 - DNA, 25 bp, Homo sapien
cacgggccaggatgcaggtgttggc

SEQ ID NO: 4692589 - DNA, 25 bp, Homo sapien
gcactggacacggtgatcattacca

SEQ ID NO: 4692590 - DNA, 25 bp, Homo sapien
tgatcattaccacacgggccaggat

SEQ ID NO: 4692591 - DNA, 25 bp, Homo sapien
caggcagggctgacgggggttggga

SEQ ID NO: 4692592 - DNA, 25 bp, Homo sapien
cctggggagctccccgcagggctcc

SEQ ID NO: 4692593 - DNA, 25 bp, Homo sapien
cagggagagcagcacctgtacgtgc

SEQ ID NO: 4692594 - DNA, 25 bp, Homo sapien
agggctccagggagagcagcacctg

SEQ ID NO: 4692595 - DNA, 25 bp, Homo sapien
aggcctaggacgggcagcaggacca

SEQ ID NO: 4692596 - DNA, 25 bp, Homo sapien
gtcaggcctaggacgggcagcagga

SEQ ID NO: 4692597 - DNA, 25 bp, Homo sapien
aggtcaggcctaggacgggcagcag

SEQ ID NO: 4692598 - DNA, 25 bp, Homo sapien
ccaggtcaggcctaggacgggcagc

SEQ ID NO: 4692599 - DNA, 25 bp, Homo sapien
tgaggcccacggcagcgtaggccca

SEQ ID NO: 4692600 - DNA, 25 bp, Homo sapien
ccacggcagcgtaggcccaggcggg

SEQ ID NO: 4692601 - DNA, 25 bp, Homo sapien
agttgaggcccacggcagcgtaggc

SEQ ID NO: 4692602 - DNA, 25 bp, Homo sapien
tggagttgaggcccacggcagcgta

SEQ ID NO: 4692603 - DNA, 25 bp, Homo sapien
ctagtcccagaaggttggggctgga

SEQ ID NO: 4692604 - DNA, 25 bp, Homo sapien
agtcccagaaggttggggctggagg

SEQ ID NO: 4692605 - DNA, 25 bp, Homo sapien
tagtcccagaaggttggggctggag

SEQ ID NO: 4692606 - DNA, 25 bp, Homo sapien
tcccagaaggttggggctggaggta

SEQ ID NO: 4692607 - DNA, 25 bp, Homo sapien
tgcctgctctaccaagggcagctcc

SEQ ID NO: 4692608 - DNA, 25 bp, Homo sapien
catttcttcatcgtggccatggtct

SEQ ID NO: 4692609 - DNA, 25 bp, Homo sapien
tctgcctgctctaccaagggcagct

SEQ ID NO: 4692610 - DNA, 25 bp, Homo sapien
cttcatttcttcatcgtggccatgg

SEQ ID NO: 4692611 - DNA, 25 bp, Homo sapien
tcagcccggagcctcctaccccatc

SEQ ID NO: 4692612 - DNA, 25 bp, Homo sapien
tgggcacgaagtcggccctgccctc

SEQ ID NO: 4692613 - DNA, 25 bp, Homo sapien
tacccagagacaggctgatgggcac

SEQ ID NO: 4692614 - DNA, 25 bp, Homo sapien
acacttgcagagatacccagagaca

SEQ ID NO: 4692615 - DNA, 25 bp, Homo sapien
ctcctcattgcaggcagcataaacc

SEQ ID NO: 4692616 - DNA, 25 bp, Homo sapien
ggcagcataaaccaggaagatgtac

SEQ ID NO: 4692617 - DNA, 25 bp, Homo sapien
cataaaccaggaagatgtacagccc

SEQ ID NO: 4692618 - DNA, 25 bp, Homo sapien
cattgcaggcagcataaaccaggaa

SEQ ID NO: 4692619 - DNA, 25 bp, Homo sapien
gccatcctctgcagggcgctccgca

SEQ ID NO: 4692620 - DNA, 25 bp, Homo sapien
agccatcctctgcagggcgctccgc

SEQ ID NO: 4692621 - DNA, 25 bp, Homo sapien
ccatcctctgcagggcgctccgcac

SEQ ID NO: 4692622 - DNA, 25 bp, Homo sapien
ccacgtgtctccggggtggagccaa

SEQ ID NO: 4692623 - DNA, 25 bp, Homo sapien
gagagccacgtgtctccggggtgga

SEQ ID NO: 4692624 - DNA, 25 bp, Homo sapien
ctgagagccacgtgtctccggggtg

SEQ ID NO: 4692625 - DNA, 25 bp, Homo sapien
gagccacgtgtctccggggtggagc

SEQ ID NO: 4692626 - DNA, 25 bp, Homo sapien
ctccgggtttgcaatggaggagaat

SEQ ID NO: 4692627 - DNA, 25 bp, Homo sapien
ctgagggagttctagggccataggt

SEQ ID NO: 4692628 - DNA, 25 bp, Homo sapien
gagggagttctagggccataggtcc

SEQ ID NO: 4692629 - DNA, 25 bp, Homo sapien
ctgtctctccgggtttgcaatggag

SEQ ID NO: 4692630 - DNA, 25 bp, Homo sapien
ggacccttggctataggggcctctg

SEQ ID NO: 4692631 - DNA, 25 bp, Homo sapien
cccttggctataggggcctctgcca

SEQ ID NO: 4692632 - DNA, 25 bp, Homo sapien
gacccttggctataggggcctctgc

SEQ ID NO: 4692633 - DNA, 25 bp, Homo sapien
cagcttgccgccagcagctccccct

SEQ ID NO: 4692634 - DNA, 25 bp, Homo sapien
gctttgaacgctgtcagttccacag

SEQ ID NO: 4692635 - DNA, 25 bp, Homo sapien
tgaagctttgaacgctgtcagttcc

SEQ ID NO: 4692636 - DNA, 25 bp, Homo sapien
aagctttgaacgctgtcagttccac

SEQ ID NO: 4692637 - DNA, 25 bp, Homo sapien
ctgaagctttgaacgctgtcagttc

SEQ ID NO: 4692638 - DNA, 25 bp, Homo sapien
ggcaggctgtgctccttggcagcgc

SEQ ID NO: 4692639 - DNA, 25 bp, Homo sapien
aggccggggccttcagagggtgacg

SEQ ID NO: 4692640 - DNA, 25 bp, Homo sapien
ggtgctgggcttagggggcagaaag

SEQ ID NO: 4692641 - DNA, 25 bp, Homo sapien
ccttcagagggtgacggggggtgct

SEQ ID NO: 4692642 - DNA, 25 bp, Homo sapien
gtcacttgagcgcagaggcgccgcc

SEQ ID NO: 4692643 - DNA, 25 bp, Homo sapien
attcagcggagacaaaggcgccgtc

SEQ ID NO: 4692644 - DNA, 25 bp, Homo sapien
tagcaacgcacccattcagcggaga

SEQ ID NO: 4692645 - DNA, 25 bp, Homo sapien
tctgttgctacgagcggccctagca

SEQ ID NO: 4692646 - DNA, 25 bp, Homo sapien
ggcccgtcctcgctgtgagtctcag

SEQ ID NO: 4692647 - DNA, 25 bp, Homo sapien
tcggaacatccgcatgccctgaggg

SEQ ID NO: 4692648 - DNA, 25 bp, Homo sapien
gcagggtttggcgacgagtttccca

SEQ ID NO: 4692649 - DNA, 25 bp, Homo sapien
tagaaacctggtgggaaagtgcgcc

SEQ ID NO: 4692650 - DNA, 25 bp, Homo sapien
caagccaagcagacttgagcctggg

SEQ ID NO: 4692651 - DNA, 25 bp, Homo sapien
gctcatcgaaatgctgcaagccaag

SEQ ID NO: 4692652 - DNA, 25 bp, Homo sapien
gagcatgcaggccaaggagtacctg

SEQ ID NO: 4692653 - DNA, 25 bp, Homo sapien
tcgacgtcccttggatcagaggtca

SEQ ID NO: 4692654 - DNA, 25 bp, Homo sapien
ccaacggggagaccatgttgcatgg

SEQ ID NO: 4692655 - DNA, 25 bp, Homo sapien
tagggaaggtggtattggtgatgct

SEQ ID NO: 4692656 - DNA, 25 bp, Homo sapien
tgtttgtcaaccagggtgacagcaa

SEQ ID NO: 4692657 - DNA, 25 bp, Homo sapien
aatggtgatggcgacacggtgccaa

SEQ ID NO: 4692658 - DNA, 25 bp, Homo sapien
gcagaaggggttcgccccagatctc

SEQ ID NO: 4692659 - DNA, 25 bp, Homo sapien
aaaatgggatttccacgagtcccat

SEQ ID NO: 4692660 - DNA, 25 bp, Homo sapien
cagaggggcgccactgagcgcttcc

SEQ ID NO: 4692661 - DNA, 25 bp, Homo sapien
agcgacctgaggctagcgagcagaa

SEQ ID NO: 4692662 - DNA, 25 bp, Homo sapien
tcccgctagcaggtttgtgaggcag

SEQ ID NO: 4692663 - DNA, 25 bp, Homo sapien
gtcagtatccttagatgtggcccca

SEQ ID NO: 4692664 - DNA, 25 bp, Homo sapien
tgtactattttaagccagggccaga

SEQ ID NO: 4692665 - DNA, 25 bp, Homo sapien
gggcccagcaccattacaggaggaa

SEQ ID NO: 4692666 - DNA, 25 bp, Homo sapien
gagacagacaaacccactgtgggca

SEQ ID NO: 4692667 - DNA, 25 bp, Homo sapien
tacctgccatggtcactgttaccag

SEQ ID NO: 4692668 - DNA, 25 bp, Homo sapien
tgtgggcagcatctaagccatgtcc

SEQ ID NO: 4692669 - DNA, 25 bp, Homo sapien
aagaatccagtctttcagaccagcc

SEQ ID NO: 4692670 - DNA, 25 bp, Homo sapien
gcaaggtttggtggtctcgtcgtta

SEQ ID NO: 4692671 - DNA, 25 bp, Homo sapien
tacattgaaacatgcaagcctttcc

SEQ ID NO: 4692672 - DNA, 25 bp, Homo sapien
tacgactctgaaagctacatggaaa

SEQ ID NO: 4692673 - DNA, 25 bp, Homo sapien
gaatctgtctcaaagcgctcaacct

SEQ ID NO: 4692674 - DNA, 25 bp, Homo sapien
taggaggtgaggattgagccacgtc

SEQ ID NO: 4692675 - DNA, 25 bp, Homo sapien
acagggtaggaggtgaggattgagc

SEQ ID NO: 4692676 - DNA, 25 bp, Homo sapien
aacagggtaggaggtgaggattgag

SEQ ID NO: 4692677 - DNA, 25 bp, Homo sapien
gggtaggaggtgaggattgagccac

SEQ ID NO: 4692678 - DNA, 25 bp, Homo sapien
aatagagagaattgcattaaaccag

SEQ ID NO: 4692679 - DNA, 25 bp, Homo sapien
tcttggcaatagagagaattgcatt

SEQ ID NO: 4692680 - DNA, 25 bp, Homo sapien
tctcatccgaagttagcaagccctg

SEQ ID NO: 4692681 - DNA, 25 bp, Homo sapien
agttagcaagccctgtgaaatcttg

SEQ ID NO: 4692682 - DNA, 25 bp, Homo sapien
gaagtactgctgacacccaattaat

SEQ ID NO: 4692683 - DNA, 25 bp, Homo sapien
gaattccttccactgacgtgtgcga

SEQ ID NO: 4692684 - DNA, 25 bp, Homo sapien
tggaaatgcttcattatagaagtac

SEQ ID NO: 4692685 - DNA, 25 bp, Homo sapien
tgtgcgaacataccacagatctcct

SEQ ID NO: 4692686 - DNA, 25 bp, Homo sapien
aattgtttgtcttttagtagaggca

SEQ ID NO: 4692687 - DNA, 25 bp, Homo sapien
tgtccagctaattgtttgtctttta

SEQ ID NO: 4692688 - DNA, 25 bp, Homo sapien
agctcagacagtctgcccgccttag

SEQ ID NO: 4692689 - DNA, 25 bp, Homo sapien
gagctcagacagtctgcccgcctta

SEQ ID NO: 4692690 - DNA, 25 bp, Homo sapien
tctgctatcctcgactcttttattc

SEQ ID NO: 4692691 - DNA, 25 bp, Homo sapien
tgctatcctcgactcttttattcga

SEQ ID NO: 4692692 - DNA, 25 bp, Homo sapien
aaatctgctatcctcgactctttta

SEQ ID NO: 4692693 - DNA, 25 bp, Homo sapien
agaaaatctgctatcctcgactctt

SEQ ID NO: 4692694 - DNA, 25 bp, Homo sapien
gaacttagtgtggaacaccggattg

SEQ ID NO: 4692695 - DNA, 25 bp, Homo sapien
ggaatccagtggctacggacaggca

SEQ ID NO: 4692696 - DNA, 25 bp, Homo sapien
ctcgtgagtggctgggaccgtaggg

SEQ ID NO: 4692697 - DNA, 25 bp, Homo sapien
cggattggcgtagtgtactatagcc

SEQ ID NO: 4692698 - DNA, 25 bp, Homo sapien
agctatcatgcgcagccccatttaa

SEQ ID NO: 4692699 - DNA, 25 bp, Homo sapien
catgagctatcatgcgcagccccat

SEQ ID NO: 4692700 - DNA, 25 bp, Homo sapien
tgagctatcatgcgcagccccattt

SEQ ID NO: 4692701 - DNA, 25 bp, Homo sapien
gctatcatgcgcagccccatttaac

SEQ ID NO: 4692702 - DNA, 25 bp, Homo sapien
ccctgatcggtgaaatgtgaagccc

SEQ ID NO: 4692703 - DNA, 25 bp, Homo sapien
aagaaagcggatttgctggtccctg

SEQ ID NO: 4692704 - DNA, 25 bp, Homo sapien
catttagtcatgtgcacactggaag

SEQ ID NO: 4692705 - DNA, 25 bp, Homo sapien
tttgtcttctgattgggctgtgccc

SEQ ID NO: 4692706 - DNA, 25 bp, Homo sapien
tgggagaaagcagcaacgacaatca

SEQ ID NO: 4692707 - DNA, 25 bp, Homo sapien
tcaaaaaagttcgagctgctgtggc

SEQ ID NO: 4692708 - DNA, 25 bp, Homo sapien
tagacgaggtattgaaccgcgccag

SEQ ID NO: 4692709 - DNA, 25 bp, Homo sapien
tactggaacccaggctagacgaggt

SEQ ID NO: 4692710 - DNA, 25 bp, Homo sapien
aactctctccagctgcgttatggga

SEQ ID NO: 4692711 - DNA, 25 bp, Homo sapien
tgttctgagaacaaaggagcacgtg

SEQ ID NO: 4692712 - DNA, 25 bp, Homo sapien
gattttagtcaagcccctcaacaga

SEQ ID NO: 4692713 - DNA, 25 bp, Homo sapien
ggagcacgtgcagaaatgagacgaa

SEQ ID NO: 4692714 - DNA, 25 bp, Homo sapien
catgtctggcttagttcctctctgt

SEQ ID NO: 4692715 - DNA, 25 bp, Homo sapien
ccaggcggcacaagtgtttggccac

SEQ ID NO: 4692716 - DNA, 25 bp, Homo sapien
cgccccaggcggcacaagtgtttgg

SEQ ID NO: 4692717 - DNA, 25 bp, Homo sapien
tcctctctgtctatgcttgcctcta

SEQ ID NO: 4692718 - DNA, 25 bp, Homo sapien
ttccagatcactaaaaaatttccac

SEQ ID NO: 4692719 - DNA, 25 bp, Homo sapien
cagttcccggtattttctgattcca

SEQ ID NO: 4692720 - DNA, 25 bp, Homo sapien
gattccatatgttgtggtatttacc

SEQ ID NO: 4692721 - DNA, 25 bp, Homo sapien
gcaggcgcgactgagaagagttggt

SEQ ID NO: 4692722 - DNA, 25 bp, Homo sapien
tgtgaataacgtctgctcggcatga

SEQ ID NO: 4692723 - DNA, 25 bp, Homo sapien
gaaggattaactcgtaggctgacca

SEQ ID NO: 4692724 - DNA, 25 bp, Homo sapien
ccctgtagtgagaaaagcgagcaca

SEQ ID NO: 4692725 - DNA, 25 bp, Homo sapien
taacaaatcgctattgtccagtggg

SEQ ID NO: 4692726 - DNA, 25 bp, Homo sapien
actgtattggacaacgcactttggg

SEQ ID NO: 4692727 - DNA, 25 bp, Homo sapien
cacatgaggctattgagtgcttgaa

SEQ ID NO: 4692728 - DNA, 25 bp, Homo sapien
tcacaccgtattatcatgggaccaa

SEQ ID NO: 4692729 - DNA, 25 bp, Homo sapien
taaatctggcacgtgttcagcttca

SEQ ID NO: 4692730 - DNA, 25 bp, Homo sapien
aagcaggcataagataggctgagaa

SEQ ID NO: 4692731 - DNA, 25 bp, Homo sapien
tacaagatcctgtagtaaataaggg

SEQ ID NO: 4692732 - DNA, 25 bp, Homo sapien
gctgagaatggcatccgaatttaag

SEQ ID NO: 4692733 - DNA, 25 bp, Homo sapien
gcctggcaggaagggattgatattt

SEQ ID NO: 4692734 - DNA, 25 bp, Homo sapien
aattataccttacattattgaagtc

SEQ ID NO: 4692735 - DNA, 25 bp, Homo sapien
caagttatttgtgcagtgttgacag

SEQ ID NO: 4692736 - DNA, 25 bp, Homo sapien
cttacattattgaagtctgacattc

SEQ ID NO: 4692737 - DNA, 25 bp, Homo sapien
tggagaatggcctgtgctatgaacc

SEQ ID NO: 4692738 - DNA, 25 bp, Homo sapien
aatatatttggtcaacctgtgtcta

SEQ ID NO: 4692739 - DNA, 25 bp, Homo sapien
ctgtgtctaatactgtacatgatac

SEQ ID NO: 4692740 - DNA, 25 bp, Homo sapien
tatagcttgttagctccatgaaggc

SEQ ID NO: 4692741 - DNA, 25 bp, Homo sapien
gattagcattcagtaagaacccagt

SEQ ID NO: 4692742 - DNA, 25 bp, Homo sapien
tagagaataattggaaaccatccag

SEQ ID NO: 4692743 - DNA, 25 bp, Homo sapien
tgcgagcttaggatgagacagatac

SEQ ID NO: 4692744 - DNA, 25 bp, Homo sapien
gcttgtaagtgaacaaatgattgtg

SEQ ID NO: 4692745 - DNA, 25 bp, Homo sapien
tgggtagcagctaattatgtatagc

SEQ ID NO: 4692746 - DNA, 25 bp, Homo sapien
aactctttctgacaactttgagtct

SEQ ID NO: 4692747 - DNA, 25 bp, Homo sapien
agaactctttctgacaactttgagt

SEQ ID NO: 4692748 - DNA, 25 bp, Homo sapien
gaactctttctgacaactttgagtc

SEQ ID NO: 4692749 - DNA, 25 bp, Homo sapien
aagaactctttctgacaactttgag

SEQ ID NO: 4692750 - DNA, 25 bp, Homo sapien
cagtaagtatttatcgagggcctac

SEQ ID NO: 4692751 - DNA, 25 bp, Homo sapien
ggcatgaaccgctctgccaggctaa

SEQ ID NO: 4692752 - DNA, 25 bp, Homo sapien
gccaggctaagaagtatgttgacca

SEQ ID NO: 4692753 - DNA, 25 bp, Homo sapien
cctatgagtcaagaaaataaggctg

SEQ ID NO: 4692754 - DNA, 25 bp, Homo sapien
gcctctcttggagaacgcttgaagc

SEQ ID NO: 4692755 - DNA, 25 bp, Homo sapien
tctggattgagtttggcaccttcaa

SEQ ID NO: 4692756 - DNA, 25 bp, Homo sapien
caagagcgtactttttcctagcctc

SEQ ID NO: 4692757 - DNA, 25 bp, Homo sapien
tgagtttggcaccttcaattgagaa

SEQ ID NO: 4692758 - DNA, 25 bp, Homo sapien
gccagagtttgcagctcaatatttt

SEQ ID NO: 4692759 - DNA, 25 bp, Homo sapien
tgccagagtttgcagctcaatattt

SEQ ID NO: 4692760 - DNA, 25 bp, Homo sapien
cagagtaatgatgtaagaatctgag

SEQ ID NO: 4692761 - DNA, 25 bp, Homo sapien
tacatagtgcagctgccaaagctca

SEQ ID NO: 4692762 - DNA, 25 bp, Homo sapien
gcagctgccaaagctcataatgttt

SEQ ID NO: 4692763 - DNA, 25 bp, Homo sapien
gaatctgagagtacatagtgcagct

SEQ ID NO: 4692764 - DNA, 25 bp, Homo sapien
ctgtagccaaaatacttatgattga

SEQ ID NO: 4692765 - DNA, 25 bp, Homo sapien
tagccaaaatacttatgattgaaat

SEQ ID NO: 4692766 - DNA, 25 bp, Homo sapien
tgtagccaaaatacttatgattgaa

SEQ ID NO: 4692767 - DNA, 25 bp, Homo sapien
gtagccaaaatacttatgattgaaa

SEQ ID NO: 4692768 - DNA, 25 bp, Homo sapien
caagagtggcaccaggaatcaaggg

SEQ ID NO: 4692769 - DNA, 25 bp, Homo sapien
gcaccaggaatcaagggctgacaca

SEQ ID NO: 4692770 - DNA, 25 bp, Homo sapien
tgagttgacaggcaagagtggcacc

SEQ ID NO: 4692771 - DNA, 25 bp, Homo sapien
ggaatcaagggctgacacatgtcat

SEQ ID NO: 4692772 - DNA, 25 bp, Homo sapien
aaaagccaaaggcattacagaagcc

SEQ ID NO: 4692773 - DNA, 25 bp, Homo sapien
tcctcaggagagagttggtgtcagc

SEQ ID NO: 4692774 - DNA, 25 bp, Homo sapien
ttgggctcctggccaagtgtccatc

SEQ ID NO: 4692775 - DNA, 25 bp, Homo sapien
gctgctgccttgtgtcttgaaggta

SEQ ID NO: 4692776 - DNA, 25 bp, Homo sapien
gacttcttgatatacttggaagaaa

SEQ ID NO: 4692777 - DNA, 25 bp, Homo sapien
gggacttcttgatatacttggaaga

SEQ ID NO: 4692778 - DNA, 25 bp, Homo sapien
ctgggacttcttgatatacttggaa

SEQ ID NO: 4692779 - DNA, 25 bp, Homo sapien
taagcataaactcaataaaacaatg

SEQ ID NO: 4692780 - DNA, 25 bp, Homo sapien
ccaataatataaagcgatgtcaagc

SEQ ID NO: 4692781 - DNA, 25 bp, Homo sapien
aattgtgtatcatggcataatggcc

SEQ ID NO: 4692782 - DNA, 25 bp, Homo sapien
ggtgttgcccactgtatttgaaata

SEQ ID NO: 4692783 - DNA, 25 bp, Homo sapien
caagcaagtttgagcacacatttgg

SEQ ID NO: 4692784 - DNA, 25 bp, Homo sapien
ctacttgtttgcctataataatagc

SEQ ID NO: 4692785 - DNA, 25 bp, Homo sapien
tcaaacatgtaaatttcttctactt

SEQ ID NO: 4692786 - DNA, 25 bp, Homo sapien
tacttgtttgcctataataatagca

SEQ ID NO: 4692787 - DNA, 25 bp, Homo sapien
tgttgatatctaggagtagacccat

SEQ ID NO: 4692788 - DNA, 25 bp, Homo sapien
gctgatggatgctcttacattcctc

SEQ ID NO: 4692789 - DNA, 25 bp, Homo sapien
gcagtgagaccaccgctgatggatg

SEQ ID NO: 4692790 - DNA, 25 bp, Homo sapien
gaaccagtgagcagtgagaccaccg

SEQ ID NO: 4692791 - DNA, 25 bp, Homo sapien
catccacatcccaagaaccagtgag

SEQ ID NO: 4692792 - DNA, 25 bp, Homo sapien
gaatgttccttggagtcctctgaag

SEQ ID NO: 4692793 - DNA, 25 bp, Homo sapien
cagtcaacggtcagtggttttttca

SEQ ID NO: 4692794 - DNA, 25 bp, Homo sapien
aggtacagtcaacggtcagtggttt

SEQ ID NO: 4692795 - DNA, 25 bp, Homo sapien
aaggtacagtcaacggtcagtggtt

SEQ ID NO: 4692796 - DNA, 25 bp, Homo sapien
gcattcattgatcagtgagttgatt

SEQ ID NO: 4692797 - DNA, 25 bp, Homo sapien
caaacccaccgacagcaatgaatgt

SEQ ID NO: 4692798 - DNA, 25 bp, Homo sapien
tgtttggtccgcagtttgcattcat

SEQ ID NO: 4692799 - DNA, 25 bp, Homo sapien
caatgaatgttgagtgcagccatca

SEQ ID NO: 4692800 - DNA, 25 bp, Homo sapien
caactctagatgattctggtgtaca

SEQ ID NO: 4692801 - DNA, 25 bp, Homo sapien
cctcgtctagagtagggctcaggaa

SEQ ID NO: 4692802 - DNA, 25 bp, Homo sapien
cactcagcagaatagtggcgatttc

SEQ ID NO: 4692803 - DNA, 25 bp, Homo sapien
caggaagccgatgttaagctagtga

SEQ ID NO: 4692804 - DNA, 25 bp, Homo sapien
tggcatatttaaagactatgtaata

SEQ ID NO: 4692805 - DNA, 25 bp, Homo sapien
ataattgtctcccttcttgtagtac

SEQ ID NO: 4692806 - DNA, 25 bp, Homo sapien
gaaatatataattgtttcattggca

SEQ ID NO: 4692807 - DNA, 25 bp, Homo sapien
cttgtagtacttagttttatccaag

SEQ ID NO: 4692808 - DNA, 25 bp, Homo sapien
tctttcttagtacactccaggctcc

SEQ ID NO: 4692809 - DNA, 25 bp, Homo sapien
ctaatctagtcaggaaagtttggca

SEQ ID NO: 4692810 - DNA, 25 bp, Homo sapien
cagtccaggtatacactaggtgtcc

SEQ ID NO: 4692811 - DNA, 25 bp, Homo sapien
ggaaggtggttctgatatatcgata

SEQ ID NO: 4692812 - DNA, 25 bp, Homo sapien
tatcagccagtcatgcttggcagcg

SEQ ID NO: 4692813 - DNA, 25 bp, Homo sapien
gcagccctgtgaagcaaatactatt

SEQ ID NO: 4692814 - DNA, 25 bp, Homo sapien
gaaaccagagtagaaagacatgatt

SEQ ID NO: 4692815 - DNA, 25 bp, Homo sapien
gagatcacagttgttaacgtctttg

SEQ ID NO: 4692816 - DNA, 25 bp, Homo sapien
tatgagatcacaaagtccagttgga

SEQ ID NO: 4692817 - DNA, 25 bp, Homo sapien
tgaggtacagcctgagaggagaaca

SEQ ID NO: 4692818 - DNA, 25 bp, Homo sapien
tgccaggccccttgacaggttatga

SEQ ID NO: 4692819 - DNA, 25 bp, Homo sapien
cacggatcgagagcctgttactttc

SEQ ID NO: 4692820 - DNA, 25 bp, Homo sapien
gaaaagggcatacgattttgattgg

SEQ ID NO: 4692821 - DNA, 25 bp, Homo sapien
gggcatacgattttgattggttgtg

SEQ ID NO: 4692822 - DNA, 25 bp, Homo sapien
agaaaagggcatacgattttgattg

SEQ ID NO: 4692823 - DNA, 25 bp, Homo sapien
aagggcatacgattttgattggttg

SEQ ID NO: 4692824 - DNA, 25 bp, Homo sapien
tttgggtagtgagaggatcttgtct

SEQ ID NO: 4692825 - DNA, 25 bp, Homo sapien
tcttgtctgaactacttgtctgtac

SEQ ID NO: 4692826 - DNA, 25 bp, Homo sapien
tgacaagtaggcaagagtttgggta

SEQ ID NO: 4692827 - DNA, 25 bp, Homo sapien
acacatatactgctggttgacaagt

SEQ ID NO: 4692828 - DNA, 25 bp, Homo sapien
ggtaactcaaatccataagaagaaa

SEQ ID NO: 4692829 - DNA, 25 bp, Homo sapien
tcttcaagctgaaagggagtgatac

SEQ ID NO: 4692830 - DNA, 25 bp, Homo sapien
ggagtgataccagatggtaactcaa

SEQ ID NO: 4692831 - DNA, 25 bp, Homo sapien
gaatttattgtgagtggacctgctt

SEQ ID NO: 4692832 - DNA, 25 bp, Homo sapien
ttgatttggaatgttgtcagttaaa

SEQ ID NO: 4692833 - DNA, 25 bp, Homo sapien
ggccagcaaatctgctactctgagg

SEQ ID NO: 4692834 - DNA, 25 bp, Homo sapien
ctgcaggagggagctttcttgattt

SEQ ID NO: 4692835 - DNA, 25 bp, Homo sapien
tctttgtggcaagtgaaacagggcc

SEQ ID NO: 4692836 - DNA, 25 bp, Homo sapien
tggtcttaaatttagggccacaagc

SEQ ID NO: 4692837 - DNA, 25 bp, Homo sapien
tttagggccacaagctaccctctca

SEQ ID NO: 4692838 - DNA, 25 bp, Homo sapien
ccatacccagtcaataatattgagt

SEQ ID NO: 4692839 - DNA, 25 bp, Homo sapien
taatattgagtcttgagtcttcttt

SEQ ID NO: 4692840 - DNA, 25 bp, Homo sapien
gaagctgattcaagctctgaggtgg

SEQ ID NO: 4692841 - DNA, 25 bp, Homo sapien
ggtggtggaccttctcacatattcg

SEQ ID NO: 4692842 - DNA, 25 bp, Homo sapien
gtatagccccagtataccagcagct

SEQ ID NO: 4692843 - DNA, 25 bp, Homo sapien
taggtgtatatagtacggttgaccc

SEQ ID NO: 4692844 - DNA, 25 bp, Homo sapien
tgttacggctggctctttgccacca

SEQ ID NO: 4692845 - DNA, 25 bp, Homo sapien
gcgtgcaccattctgggacacatag

SEQ ID NO: 4692846 - DNA, 25 bp, Homo sapien
tagaaataggacatgggagtatcca

SEQ ID NO: 4692847 - DNA, 25 bp, Homo sapien
ccaccagtctgctgttgagatcagt

SEQ ID NO: 4692848 - DNA, 25 bp, Homo sapien
tcctaagctcaggtgatctctacct

SEQ ID NO: 4692849 - DNA, 25 bp, Homo sapien
gcatcctcgacctcctaagctcagg

SEQ ID NO: 4692850 - DNA, 25 bp, Homo sapien
cctaagctcaggtgatctctacctc

SEQ ID NO: 4692851 - DNA, 25 bp, Homo sapien
acctcctaagctcaggtgatctcta

SEQ ID NO: 4692852 - DNA, 25 bp, Homo sapien
tgaattctgggagccacgatgtact

SEQ ID NO: 4692853 - DNA, 25 bp, Homo sapien
catgtgtaaaggaattgaggccaaa

SEQ ID NO: 4692854 - DNA, 25 bp, Homo sapien
tggttggcaaatcatgagagacaca

SEQ ID NO: 4692855 - DNA, 25 bp, Homo sapien
taagggccttaatcttacatatggg

SEQ ID NO: 4692856 - DNA, 25 bp, Homo sapien
tcaggttctagtggtcctgatcatg

SEQ ID NO: 4692857 - DNA, 25 bp, Homo sapien
catgatatggttgtggtgtgtaaag

SEQ ID NO: 4692858 - DNA, 25 bp, Homo sapien
tcctgatcatgatatggttgtggtg

SEQ ID NO: 4692859 - DNA, 25 bp, Homo sapien
tctagtggtcctgatcatgatatgg

SEQ ID NO: 4692860 - DNA, 25 bp, Homo sapien
tatataattcttgctcggtgacact

SEQ ID NO: 4692861 - DNA, 25 bp, Homo sapien
tcagggtaaggaggtttgtcagcat

SEQ ID NO: 4692862 - DNA, 25 bp, Homo sapien
gacttccagccaggagtttcgaatg

SEQ ID NO: 4692863 - DNA, 25 bp, Homo sapien
tgcagatgggaggaacaacttaagt

SEQ ID NO: 4692864 - DNA, 25 bp, Homo sapien
aaagtctctctctggaggtctctaa

SEQ ID NO: 4692865 - DNA, 25 bp, Homo sapien
tctctctctggaggtctctaaaaag

SEQ ID NO: 4692866 - DNA, 25 bp, Homo sapien
ctctctggaggtctctaaaaaggtt

SEQ ID NO: 4692867 - DNA, 25 bp, Homo sapien
aagtctctctctggaggtctctaaa

SEQ ID NO: 4692868 - DNA, 25 bp, Homo sapien
tcctctggtcgaagaatatcctttc

SEQ ID NO: 4692869 - DNA, 25 bp, Homo sapien
ttagagttgtgatttcggtaatgca

SEQ ID NO: 4692870 - DNA, 25 bp, Homo sapien
aaagtctgtataggagaggcatctc

SEQ ID NO: 4692871 - DNA, 25 bp, Homo sapien
gagttgtgatttcggtaatgcagtt

SEQ ID NO: 4692872 - DNA, 25 bp, Homo sapien
gaggctctcagagatcagtgcctcc

SEQ ID NO: 4692873 - DNA, 25 bp, Homo sapien
catttccgaataaagggaggctctc

SEQ ID NO: 4692874 - DNA, 25 bp, Homo sapien
ctcgctgcgccataaactcgcagtt

SEQ ID NO: 4692875 - DNA, 25 bp, Homo sapien
gcgccataaactcgcagttctctga

SEQ ID NO: 4692876 - DNA, 25 bp, Homo sapien
tcctcccggcttctgcccggcaggt

SEQ ID NO: 4692877 - DNA, 25 bp, Homo sapien
cccgcgcgctctggccggtctccgc

SEQ ID NO: 4692878 - DNA, 25 bp, Homo sapien
tcccctctccgccaggcaacggctt

SEQ ID NO: 4692879 - DNA, 25 bp, Homo sapien
caacggctttccctggccgagggct

SEQ ID NO: 4692880 - DNA, 25 bp, Homo sapien
cggcggacgacgaccacggcgacta

SEQ ID NO: 4692881 - DNA, 25 bp, Homo sapien
ccacggcgactagggcgccggtcat

SEQ ID NO: 4692882 - DNA, 25 bp, Homo sapien
gacgaccacggcgactagggcgccg

SEQ ID NO: 4692883 - DNA, 25 bp, Homo sapien
ctcccctcggcggacgacgaccacg

SEQ ID NO: 4692884 - DNA, 25 bp, Homo sapien
tgagcggactccaacttccagcgtg

SEQ ID NO: 4692885 - DNA, 25 bp, Homo sapien
ggttcttgatattgacagactttag

SEQ ID NO: 4692886 - DNA, 25 bp, Homo sapien
ccccttcagttggtgcggtcggcgt

SEQ ID NO: 4692887 - DNA, 25 bp, Homo sapien
tacatagacatcaaacgctttgtca

SEQ ID NO: 4692888 - DNA, 25 bp, Homo sapien
gagaggcccacgtgagtaccttcaa

SEQ ID NO: 4692889 - DNA, 25 bp, Homo sapien
ttcgttgcacgtgctcacccggctg

SEQ ID NO: 4692890 - DNA, 25 bp, Homo sapien
ctcctcgcaaagactcattgttggg

SEQ ID NO: 4692891 - DNA, 25 bp, Homo sapien
ggctgggcttcgttgcacgtgctca

SEQ ID NO: 4692892 - DNA, 25 bp, Homo sapien
gggtttgcgatcttccaacttgatc

SEQ ID NO: 4692893 - DNA, 25 bp, Homo sapien
ccaatggcccggagcttagtttgcc

SEQ ID NO: 4692894 - DNA, 25 bp, Homo sapien
tccatttgcatacgaacgcagtcac

SEQ ID NO: 4692895 - DNA, 25 bp, Homo sapien
ggctttctttaatagccccaatggc

SEQ ID NO: 4692896 - DNA, 25 bp, Homo sapien
cagcgggtggattcggccgggagcc

SEQ ID NO: 4692897 - DNA, 25 bp, Homo sapien
gtaggccttagacccttggcggcag

SEQ ID NO: 4692898 - DNA, 25 bp, Homo sapien
ccgggagccgctgcaaaattcggga

SEQ ID NO: 4692899 - DNA, 25 bp, Homo sapien
agcagcgaaatcctttcccgatggg

SEQ ID NO: 4692900 - DNA, 25 bp, Homo sapien
gaggaagctgcagcataatccggca

SEQ ID NO: 4692901 - DNA, 25 bp, Homo sapien
gcaggagagggcgaatgagcggcca

SEQ ID NO: 4692902 - DNA, 25 bp, Homo sapien
agcataatccggcagagcagaagtg

SEQ ID NO: 4692903 - DNA, 25 bp, Homo sapien
ccaccgaggaagctgcagcataatc

SEQ ID NO: 4692904 - DNA, 25 bp, Homo sapien
caggacgaggacttaaaattaggca

SEQ ID NO: 4692905 - DNA, 25 bp, Homo sapien
tcaggccaagcagggatgcgaatgc

SEQ ID NO: 4692906 - DNA, 25 bp, Homo sapien
caactttcgtagcaggtgagggacg

SEQ ID NO: 4692907 - DNA, 25 bp, Homo sapien
gcagagcgttaatgtaagtctccca

SEQ ID NO: 4692908 - DNA, 25 bp, Homo sapien
ggatctagttgtccctcggtggaag

SEQ ID NO: 4692909 - DNA, 25 bp, Homo sapien
gaagtcagccgcgttccagcttgaa

SEQ ID NO: 4692910 - DNA, 25 bp, Homo sapien
caggccgtcctctcttagtcacagg

SEQ ID NO: 4692911 - DNA, 25 bp, Homo sapien
ttcatcaactaccaaaactccaggg

SEQ ID NO: 4692912 - DNA, 25 bp, Homo sapien
ttcttctataactagagatcccctg

SEQ ID NO: 4692913 - DNA, 25 bp, Homo sapien
catccacaaataagcttcttctata

SEQ ID NO: 4692914 - DNA, 25 bp, Homo sapien
cctgggaggcatcaaaaccggggct

SEQ ID NO: 4692915 - DNA, 25 bp, Homo sapien
agcttcttctataactagagatccc

SEQ ID NO: 4692916 - DNA, 25 bp, Homo sapien
acggacgctgggaagcgcgggctgc

SEQ ID NO: 4692917 - DNA, 25 bp, Homo sapien
ggcggccgggcacggacgctgggaa

SEQ ID NO: 4692918 - DNA, 25 bp, Homo sapien
ggcacggtaggcacaggcggccggg

SEQ ID NO: 4692919 - DNA, 25 bp, Homo sapien
ggcgccacgggcacggtaggcacag

SEQ ID NO: 4692920 - DNA, 25 bp, Homo sapien
cagcactagcggcagaaggagcagc

SEQ ID NO: 4692921 - DNA, 25 bp, Homo sapien
gcgtggggcggccgctcagcagcag

SEQ ID NO: 4692922 - DNA, 25 bp, Homo sapien
ttactgtcggcgcgcgtggggcggc

SEQ ID NO: 4692923 - DNA, 25 bp, Homo sapien
gcagcactagcggcagaaggagcag

SEQ ID NO: 4692924 - DNA, 25 bp, Homo sapien
tgggtaacagttgccaggagcttcc

SEQ ID NO: 4692925 - DNA, 25 bp, Homo sapien
ctgggagtcgttgggtaacagttgc

SEQ ID NO: 4692926 - DNA, 25 bp, Homo sapien
tcgttgggtaacagttgccaggagc

SEQ ID NO: 4692927 - DNA, 25 bp, Homo sapien
agtcgttgggtaacagttgccagga

SEQ ID NO: 4692928 - DNA, 25 bp, Homo sapien
gcgttcatcgggtagagaagacccc

SEQ ID NO: 4692929 - DNA, 25 bp, Homo sapien
ggccaggcgagtggccagcgcggct

SEQ ID NO: 4692930 - DNA, 25 bp, Homo sapien
agcgcggctgcgttcatcgggtaga

SEQ ID NO: 4692931 - DNA, 25 bp, Homo sapien
gcgggccgtgaaagccgtggcccag

SEQ ID NO: 4692932 - DNA, 25 bp, Homo sapien
ggctccagtgagttgctgctaggca

SEQ ID NO: 4692933 - DNA, 25 bp, Homo sapien
ttgcggggggcaagaggggctccag

SEQ ID NO: 4692934 - DNA, 25 bp, Homo sapien
agaggggctccagtgagttgctgct

SEQ ID NO: 4692935 - DNA, 25 bp, Homo sapien
tccagtgagttgctgctaggcagtg

SEQ ID NO: 4692936 - DNA, 25 bp, Homo sapien
tcacctggtccaggtccccaaacac

SEQ ID NO: 4692937 - DNA, 25 bp, Homo sapien
ctcacctggtccaggtccccaaaca

SEQ ID NO: 4692938 - DNA, 25 bp, Homo sapien
tcggctacacgcgtccttgctcagg

SEQ ID NO: 4692939 - DNA, 25 bp, Homo sapien
agtcagtgcccgagctcacagtctc

SEQ ID NO: 4692940 - DNA, 25 bp, Homo sapien
gagctcgggcgcctgctttttgagt

SEQ ID NO: 4692941 - DNA, 25 bp, Homo sapien
gatgcacttgcaacggcagtcggag

SEQ ID NO: 4692942 - DNA, 25 bp, Homo sapien
tgacttgcgtgcagaggcactgact

SEQ ID NO: 4692943 - DNA, 25 bp, Homo sapien
ttctgcatgacttgcgtgcagaggc

SEQ ID NO: 4692944 - DNA, 25 bp, Homo sapien
gccatctagctgtagagtgaacagc

SEQ ID NO: 4692945 - DNA, 25 bp, Homo sapien
tgtgctgagccatctagctgtagag

SEQ ID NO: 4692946 - DNA, 25 bp, Homo sapien
catctgggaggccaccttgtggacg

SEQ ID NO: 4692947 - DNA, 25 bp, Homo sapien
cgtaggcgtgcaccttcatcaagtc

SEQ ID NO: 4692948 - DNA, 25 bp, Homo sapien
gtgccctccaggagatccaccatgg

SEQ ID NO: 4692949 - DNA, 25 bp, Homo sapien
ggacgtaggcgtgcaccttcatcaa

SEQ ID NO: 4692950 - DNA, 25 bp, Homo sapien
aggcccaggcgggacagctccttct

SEQ ID NO: 4692951 - DNA, 25 bp, Homo sapien
caactgctcactgaggtggcgcacg

SEQ ID NO: 4692952 - DNA, 25 bp, Homo sapien
acctcattctcccggctcaggttgg

SEQ ID NO: 4692953 - DNA, 25 bp, Homo sapien
gtgattctcatagtgcctcaactgc

SEQ ID NO: 4692954 - DNA, 25 bp, Homo sapien
tttagcactgaaagtgctgcatcct

SEQ ID NO: 4692955 - DNA, 25 bp, Homo sapien
ggagaggttcttaggcacctaggca

SEQ ID NO: 4692956 - DNA, 25 bp, Homo sapien
ttggtcacccaacctctaggatatg

SEQ ID NO: 4692957 - DNA, 25 bp, Homo sapien
tggaacattcctagttttagcactg

SEQ ID NO: 4692958 - DNA, 25 bp, Homo sapien
ttcccagccttgtctctcttactca

SEQ ID NO: 4692959 - DNA, 25 bp, Homo sapien
tcccagccttgtctctcttactcat

SEQ ID NO: 4692960 - DNA, 25 bp, Homo sapien
cttcccagccttgtctctcttactc

SEQ ID NO: 4692961 - DNA, 25 bp, Homo sapien
ggaggttttgggaggcctctgtctg

SEQ ID NO: 4692962 - DNA, 25 bp, Homo sapien
tgcacactgccatacttgctgatgt

SEQ ID NO: 4692963 - DNA, 25 bp, Homo sapien
ttgtagtaggtgaagccccggatca

SEQ ID NO: 4692964 - DNA, 25 bp, Homo sapien
ctgcttgcctgccttgtagtaggtg

SEQ ID NO: 4692965 - DNA, 25 bp, Homo sapien
tgtagtaggtgaagccccggatcac

SEQ ID NO: 4692966 - DNA, 25 bp, Homo sapien
cttgggcggcagttgctccagccag

SEQ ID NO: 4692967 - DNA, 25 bp, Homo sapien
gcggcagttgctccagccaggaagt

SEQ ID NO: 4692968 - DNA, 25 bp, Homo sapien
tgctccagccaggaagtgccctgga

SEQ ID NO: 4692969 - DNA, 25 bp, Homo sapien
caggaagtgccctggagggtgttgt

SEQ ID NO: 4692970 - DNA, 25 bp, Homo sapien
tgctctgcggagttgggctctgcgg

SEQ ID NO: 4692971 - DNA, 25 bp, Homo sapien
ggctctgcggagttggacctgccct

SEQ ID NO: 4692972 - DNA, 25 bp, Homo sapien
agaagccaggtccactcgctcggag

SEQ ID NO: 4692973 - DNA, 25 bp, Homo sapien
tccactcgctcggaggacctgggct

SEQ ID NO: 4692974 - DNA, 25 bp, Homo sapien
ctcggtgggcaggagactggtggtg

SEQ ID NO: 4692975 - DNA, 25 bp, Homo sapien
gtggtggtggcagggattgaagtgg

SEQ ID NO: 4692976 - DNA, 25 bp, Homo sapien
gcaggagactggtggtgggggttgg

SEQ ID NO: 4692977 - DNA, 25 bp, Homo sapien
ggtggtggtggcagggattgaagtg

SEQ ID NO: 4692978 - DNA, 25 bp, Homo sapien
ttggctggagacttctggacctgaa

SEQ ID NO: 4692979 - DNA, 25 bp, Homo sapien
cttggctggagacttctggacctga

SEQ ID NO: 4692980 - DNA, 25 bp, Homo sapien
tggctggagacttctggacctgaag

SEQ ID NO: 4692981 - DNA, 25 bp, Homo sapien
ttcttaacttgagggcttcacagaa

SEQ ID NO: 4692982 - DNA, 25 bp, Homo sapien
ggctacagtgtgctgactcctgtga

SEQ ID NO: 4692983 - DNA, 25 bp, Homo sapien
gctagatttgggcacaggctacagt

SEQ ID NO: 4692984 - DNA, 25 bp, Homo sapien
tgggcacaggctacagtgtgctgac

SEQ ID NO: 4692985 - DNA, 25 bp, Homo sapien
ccttcggaaggacgggatcaatgac

SEQ ID NO: 4692986 - DNA, 25 bp, Homo sapien
tgccatgatgcaaccacttaagctg

SEQ ID NO: 4692987 - DNA, 25 bp, Homo sapien
gatgtgatttcaaggttctgccagg

SEQ ID NO: 4692988 - DNA, 25 bp, Homo sapien
cagagagccaagatcccttcggaag

SEQ ID NO: 4692989 - DNA, 25 bp, Homo sapien
tagtagttggtgacatagatcctgt

SEQ ID NO: 4692990 - DNA, 25 bp, Homo sapien
tagatcctgtcgtctcgagctgcag

SEQ ID NO: 4692991 - DNA, 25 bp, Homo sapien
ccaggttgcggaactccaccaggct

SEQ ID NO: 4692992 - DNA, 25 bp, Homo sapien
cctcgtggcgcccatagctgtggtg

SEQ ID NO: 4692993 - DNA, 25 bp, Homo sapien
caaagtcaatgtccgagtgtccgcg

SEQ ID NO: 4692994 - DNA, 25 bp, Homo sapien
ggtgtcctcatataccacgtcgggc

SEQ ID NO: 4692995 - DNA, 25 bp, Homo sapien
tgcccgtgtgcgtgtcgaaagcgta

SEQ ID NO: 4692996 - DNA, 25 bp, Homo sapien
gaagcagttcccgtaggagttccgc

SEQ ID NO: 4692997 - DNA, 25 bp, Homo sapien
ccaagggaggtgctaggagaatcaa

SEQ ID NO: 4692998 - DNA, 25 bp, Homo sapien
caataaatatttgcggactgggtca

SEQ ID NO: 4692999 - DNA, 25 bp, Homo sapien
tgaggaagctcaatcctggtgacca

SEQ ID NO: 4693000 - DNA, 25 bp, Homo sapien
ggaagcaagtattacccactgggtg

SEQ ID NO: 4693001 - DNA, 25 bp, Homo sapien
gggacccaaggcctgactatgtgaa

SEQ ID NO: 4693002 - DNA, 25 bp, Homo sapien
ttctggaaggagatcggctgtgccc

SEQ ID NO: 4693003 - DNA, 25 bp, Homo sapien
gtacactggccctaaagacctctgg

SEQ ID NO: 4693004 - DNA, 25 bp, Homo sapien
tattcatggcagacccggaggtatc

SEQ ID NO: 4693005 - DNA, 25 bp, Homo sapien
gagagaacttgaccaaacctgtggc

SEQ ID NO: 4693006 - DNA, 25 bp, Homo sapien
tatgtgacgagcgacctaactgttc

SEQ ID NO: 4693007 - DNA, 25 bp, Homo sapien
tgctatcccagagttaaagacgctt

SEQ ID NO: 4693008 - DNA, 25 bp, Homo sapien
tgttctaggcgccaatgtgaccata

SEQ ID NO: 4693009 - DNA, 25 bp, Homo sapien
taagagcttactcacaatcgcccgg

SEQ ID NO: 4693010 - DNA, 25 bp, Homo sapien
agcacatgacatgcagacctgccag

SEQ ID NO: 4693011 - DNA, 25 bp, Homo sapien
tgctctgagcagagaaccacctggt

SEQ ID NO: 4693012 - DNA, 25 bp, Homo sapien
tctgagcctggcacacggaaggtat

SEQ ID NO: 4693013 - DNA, 25 bp, Homo sapien
ccgtggctcctgtgcggattcccat

SEQ ID NO: 4693014 - DNA, 25 bp, Homo sapien
aggtgtgggccgctccgtggctcct

SEQ ID NO: 4693015 - DNA, 25 bp, Homo sapien
aggggaggctcccttgccctgatcc

SEQ ID NO: 4693016 - DNA, 25 bp, Homo sapien
gtgggccgctccgtggctcctgtgc

SEQ ID NO: 4693017 - DNA, 25 bp, Homo sapien
taagtacaggcaacttgtgggttcc

SEQ ID NO: 4693018 - DNA, 25 bp, Homo sapien
gctggggctaagtacaggcaacttg

SEQ ID NO: 4693019 - DNA, 25 bp, Homo sapien
ggcagtttctgcttgccgtgtgacc

SEQ ID NO: 4693020 - DNA, 25 bp, Homo sapien
cagtttctgcttgccgtgtgacctt

SEQ ID NO: 4693021 - DNA, 25 bp, Homo sapien
aagaatttcactctccgcacggcca

SEQ ID NO: 4693022 - DNA, 25 bp, Homo sapien
ccgggaccccgctgttcatgggcac

SEQ ID NO: 4693023 - DNA, 25 bp, Homo sapien
tggccgaagaatttcactctccgca

SEQ ID NO: 4693024 - DNA, 25 bp, Homo sapien
cgtgctggccgaagaatttcactct

SEQ ID NO: 4693025 - DNA, 25 bp, Homo sapien
tgcccactccgggtctcccagccat

SEQ ID NO: 4693026 - DNA, 25 bp, Homo sapien
tcccagccatacacgcagccatctt

SEQ ID NO: 4693027 - DNA, 25 bp, Homo sapien
ccactccgggtctcccagccataca

SEQ ID NO: 4693028 - DNA, 25 bp, Homo sapien
gccatacacgcagccatcttctgag

SEQ ID NO: 4693029 - DNA, 25 bp, Homo sapien
cttcaggacccgcagacacttcgct

SEQ ID NO: 4693030 - DNA, 25 bp, Homo sapien
gggagaagcggcagaacttcacggg

SEQ ID NO: 4693031 - DNA, 25 bp, Homo sapien
aggcgctggcgaagaggtggccatc

SEQ ID NO: 4693032 - DNA, 25 bp, Homo sapien
cttcgctcttgccacatcccacagg

SEQ ID NO: 4693033 - DNA, 25 bp, Homo sapien
acaggacacagcaccatctgaaagg

SEQ ID NO: 4693034 - DNA, 25 bp, Homo sapien
gaaaggtgacgtgacacaggacaca

SEQ ID NO: 4693035 - DNA, 25 bp, Homo sapien
gggaaggtggaaaggtgacgtgaca

SEQ ID NO: 4693036 - DNA, 25 bp, Homo sapien
tctgaaagggaacgctggcctggct

SEQ ID NO: 4693037 - DNA, 25 bp, Homo sapien
agctgtctcgagtcagggctgaagc

SEQ ID NO: 4693038 - DNA, 25 bp, Homo sapien
tgaccgtctccacactccgttggtg

SEQ ID NO: 4693039 - DNA, 25 bp, Homo sapien
gaccgtctccacactccgttggtga

SEQ ID NO: 4693040 - DNA, 25 bp, Homo sapien
accgtctccacactccgttggtgac

SEQ ID NO: 4693041 - DNA, 25 bp, Homo sapien
ctcgtgcaaaaagcctgagggctgc

SEQ ID NO: 4693042 - DNA, 25 bp, Homo sapien
ttgaatcccagactggtggccccag

SEQ ID NO: 4693043 - DNA, 25 bp, Homo sapien
agccggctacctggccttgacagtc

SEQ ID NO: 4693044 - DNA, 25 bp, Homo sapien
ggagggcaagactggtgacatcctc

SEQ ID NO: 4693045 - DNA, 25 bp, Homo sapien
aggcagttcaccgtgggtgagaagt

SEQ ID NO: 4693046 - DNA, 25 bp, Homo sapien
ctaagaggcgcagcatctggccgga

SEQ ID NO: 4693047 - DNA, 25 bp, Homo sapien
tgggtgagaagtcgctgctctggat

SEQ ID NO: 4693048 - DNA, 25 bp, Homo sapien
tctggatggagtcacggtgcccaac

SEQ ID NO: 4693049 - DNA, 25 bp, Homo sapien
actctgcatctaggcgggacccaga

SEQ ID NO: 4693050 - DNA, 25 bp, Homo sapien
acccactctgcatctaggcgggacc

SEQ ID NO: 4693051 - DNA, 25 bp, Homo sapien
atccccttcccaccactcagctcca

SEQ ID NO: 4693052 - DNA, 25 bp, Homo sapien
tcagctccaagtgggtatggggcca

SEQ ID NO: 4693053 - DNA, 25 bp, Homo sapien
cccagatgtgtacggtggagtccca

SEQ ID NO: 4693054 - DNA, 25 bp, Homo sapien
tagcacaggcagctgatgttggcac

SEQ ID NO: 4693055 - DNA, 25 bp, Homo sapien
ctctagcgcctggtgggagactgct

SEQ ID NO: 4693056 - DNA, 25 bp, Homo sapien
caggaggccggatgctgaatagcac

SEQ ID NO: 4693057 - DNA, 25 bp, Homo sapien
tcacccaggtgacatggcccttcag

SEQ ID NO: 4693058 - DNA, 25 bp, Homo sapien
cagccacagctcgtcgggagagaag

SEQ ID NO: 4693059 - DNA, 25 bp, Homo sapien
ccttcagttggataagcaggctgct

SEQ ID NO: 4693060 - DNA, 25 bp, Homo sapien
catgcgggaatagccggcgctggcc

SEQ ID NO: 4693061 - DNA, 25 bp, Homo sapien
ggtgaggatgggtaggtaggagcag

SEQ ID NO: 4693062 - DNA, 25 bp, Homo sapien
gtgaggatgggtaggtaggagcagg

SEQ ID NO: 4693063 - DNA, 25 bp, Homo sapien
ggtctcaaggcactttcctgtgttg

SEQ ID NO: 4693064 - DNA, 25 bp, Homo sapien
ttcagggtctcaaggcactttcctg

SEQ ID NO: 4693065 - DNA, 25 bp, Homo sapien
tcctgtgttgcagtcccagactttg

SEQ ID NO: 4693066 - DNA, 25 bp, Homo sapien
ctgtgttgcagtcccagactttgac

SEQ ID NO: 4693067 - DNA, 25 bp, Homo sapien
gagtagaaggtggggctcgaggcaa

SEQ ID NO: 4693068 - DNA, 25 bp, Homo sapien
aggtggggctcgaggcaagtcctgc

SEQ ID NO: 4693069 - DNA, 25 bp, Homo sapien
gaaggtggggctcgaggcaagtcct

SEQ ID NO: 4693070 - DNA, 25 bp, Homo sapien
tagaaggtggggctcgaggcaagtc

SEQ ID NO: 4693071 - DNA, 25 bp, Homo sapien
cgtgcgggatatttgacgtctagtc

SEQ ID NO: 4693072 - DNA, 25 bp, Homo sapien
gggtccctgggtgatttggacgtgc

SEQ ID NO: 4693073 - DNA, 25 bp, Homo sapien
tgatttggacgtgcgggatatttga

SEQ ID NO: 4693074 - DNA, 25 bp, Homo sapien
cgtctagtctgatcggcagctccag

SEQ ID NO: 4693075 - DNA, 25 bp, Homo sapien
agcgggtgaggtcggcaccatctaa

SEQ ID NO: 4693076 - DNA, 25 bp, Homo sapien
tggcacttccactgattgggtggag

SEQ ID NO: 4693077 - DNA, 25 bp, Homo sapien
tgatgggttccagcaagcgtcctgc

SEQ ID NO: 4693078 - DNA, 25 bp, Homo sapien
tgccagcacagtcactttgcgtctg

SEQ ID NO: 4693079 - DNA, 25 bp, Homo sapien
cacgtagctgctgacattaaaggtt

SEQ ID NO: 4693080 - DNA, 25 bp, Homo sapien
gggttctagaccatggcagctctca

SEQ ID NO: 4693081 - DNA, 25 bp, Homo sapien
tgcctgtatgaacgtccagcctcag

SEQ ID NO: 4693082 - DNA, 25 bp, Homo sapien
tgaacaggtaacaagtggcccatgg

SEQ ID NO: 4693083 - DNA, 25 bp, Homo sapien
tctgtccatctgtatgcagggccca

SEQ ID NO: 4693084 - DNA, 25 bp, Homo sapien
tgctggcatcggctgggcattcgtc

SEQ ID NO: 4693085 - DNA, 25 bp, Homo sapien
catgggccacttgttacctgttcag

SEQ ID NO: 4693086 - DNA, 25 bp, Homo sapien
catacagatggacagagtactgcct

SEQ ID NO: 4693087 - DNA, 25 bp, Homo sapien
tgagagctgccatggtctagaaccc

SEQ ID NO: 4693088 - DNA, 25 bp, Homo sapien
tgaggctggacgttcatacaggcag

SEQ ID NO: 4693089 - DNA, 25 bp, Homo sapien
taaacctttaatgtcagcagctacg

SEQ ID NO: 4693090 - DNA, 25 bp, Homo sapien
ccaatgtgaaaaggacgaatgccca

SEQ ID NO: 4693091 - DNA, 25 bp, Homo sapien
agttgcccagattgggagatctgca

SEQ ID NO: 4693092 - DNA, 25 bp, Homo sapien
cgtgacgccgacctcgctatcaggg

SEQ ID NO: 4693093 - DNA, 25 bp, Homo sapien
gacgaatttgagtcctccgtgtgcc

SEQ ID NO: 4693094 - DNA, 25 bp, Homo sapien
gagcctcggttaatcgtctttgaaa

SEQ ID NO: 4693095 - DNA, 25 bp, Homo sapien
cttggtgtgggtcaaggttcattaa

SEQ ID NO: 4693096 - DNA, 25 bp, Homo sapien
aggttctgtccccagagaacttcta

SEQ ID NO: 4693097 - DNA, 25 bp, Homo sapien
attaattcagttgtccgccaaggtt

SEQ ID NO: 4693098 - DNA, 25 bp, Homo sapien
taattcagttgtccgccaaggttct

SEQ ID NO: 4693099 - DNA, 25 bp, Homo sapien
gaagaaaccttcgagctgatgactg

SEQ ID NO: 4693100 - DNA, 25 bp, Homo sapien
aatacgtttagtgcgatcacgggac

SEQ ID NO: 4693101 - DNA, 25 bp, Homo sapien
acacttagtacgaggaggccgcctg

SEQ ID NO: 4693102 - DNA, 25 bp, Homo sapien
gggattctgcgaccccacgtgtgta

SEQ ID NO: 4693103 - DNA, 25 bp, Homo sapien
gagctcggcgcccgctcagccggct

SEQ ID NO: 4693104 - DNA, 25 bp, Homo sapien
agctcggcgcccgctcagccggctc

SEQ ID NO: 4693105 - DNA, 25 bp, Homo sapien
gggagctcggcgcccgctcagccgg

SEQ ID NO: 4693106 - DNA, 25 bp, Homo sapien
ggcgggagctcggcgcccgctcagc

SEQ ID NO: 4693107 - DNA, 25 bp, Homo sapien
ggaagcgcgaggacagcgtgttccg

SEQ ID NO: 4693108 - DNA, 25 bp, Homo sapien
tttgttctcgtcaaattcgtcgatg

SEQ ID NO: 4693109 - DNA, 25 bp, Homo sapien
tctcgtcaaattcgtcgatgtccac

SEQ ID NO: 4693110 - DNA, 25 bp, Homo sapien
aaatttgttctcgtcaaattcgtcg

SEQ ID NO: 4693111 - DNA, 25 bp, Homo sapien
tgttctcgtcaaattcgtcgatgtc

SEQ ID NO: 4693112 - DNA, 25 bp, Homo sapien
ctcgctcgggtccgggcctggctcc

SEQ ID NO: 4693113 - DNA, 25 bp, Homo sapien
ggaagccgggtcggcagggagctgg

SEQ ID NO: 4693114 - DNA, 25 bp, Homo sapien
gggaagccgggtcggcagggagctg

SEQ ID NO: 4693115 - DNA, 25 bp, Homo sapien
gaagccgggtcggcagggagctgga

SEQ ID NO: 4693116 - DNA, 25 bp, Homo sapien
aggggcctgcgggacggcgctgcag

SEQ ID NO: 4693117 - DNA, 25 bp, Homo sapien
ccaggggcctgcgggacggcgctgc

SEQ ID NO: 4693118 - DNA, 25 bp, Homo sapien
gggcctgcgggacggcgctgcagaa

SEQ ID NO: 4693119 - DNA, 25 bp, Homo sapien
ctgcgggggtgccgagggagcccgt

SEQ ID NO: 4693120 - DNA, 25 bp, Homo sapien
ctgcaagggagggacggagtgctgg

SEQ ID NO: 4693121 - DNA, 25 bp, Homo sapien
ctatcttcacgccatgcagcaatcg

SEQ ID NO: 4693122 - DNA, 25 bp, Homo sapien
ccatgcagcaatcgggccccggagg

SEQ ID NO: 4693123 - DNA, 25 bp, Homo sapien
tccccgatcactcggttactcagat

SEQ ID NO: 4693124 - DNA, 25 bp, Homo sapien
ggttactcagatgcggctcacctcc

SEQ ID NO: 4693125 - DNA, 25 bp, Homo sapien
tttctcagcattaagcgggagggtt

SEQ ID NO: 4693126 - DNA, 25 bp, Homo sapien
gcattaagcgggagggttagactga

SEQ ID NO: 4693127 - DNA, 25 bp, Homo sapien
tctcagcattaagcgggagggttag

SEQ ID NO: 4693128 - DNA, 25 bp, Homo sapien
cctttctcagcattaagcgggaggg

SEQ ID NO: 4693129 - DNA, 25 bp, Homo sapien
accaaggtgtccaggggaaccacag

SEQ ID NO: 4693130 - DNA, 25 bp, Homo sapien
ccaaggtgtccaggggaaccacagg

SEQ ID NO: 4693131 - DNA, 25 bp, Homo sapien
ctgagaccaccaaggtgtccagggg

SEQ ID NO: 4693132 - DNA, 25 bp, Homo sapien
caccaaggtgtccaggggaaccaca

SEQ ID NO: 4693133 - DNA, 25 bp, Homo sapien
gcaccagaagggtactggggggagc

SEQ ID NO: 4693134 - DNA, 25 bp, Homo sapien
tgcaccagaagggtactggggggag

SEQ ID NO: 4693135 - DNA, 25 bp, Homo sapien
cagaagggtactggggggagccaag

SEQ ID NO: 4693136 - DNA, 25 bp, Homo sapien
ctgcaccagaagggtactgggggga

SEQ ID NO: 4693137 - DNA, 25 bp, Homo sapien
ggtttttcttagctctgaactacta

SEQ ID NO: 4693138 - DNA, 25 bp, Homo sapien
cacacttcgcttcaaggtgtctggt

SEQ ID NO: 4693139 - DNA, 25 bp, Homo sapien
tgaactactagttttctccgctgct

SEQ ID NO: 4693140 - DNA, 25 bp, Homo sapien
ggcgtggggctccactttcacactt

SEQ ID NO: 4693141 - DNA, 25 bp, Homo sapien
tgtccgccacgtaacagaagatgct

SEQ ID NO: 4693142 - DNA, 25 bp, Homo sapien
catcttgagtgagctgggtctgcgc

SEQ ID NO: 4693143 - DNA, 25 bp, Homo sapien
ttttaaatcgccacaaggtctcgga

SEQ ID NO: 4693144 - DNA, 25 bp, Homo sapien
gatttatgtacagcatgggcctcca

SEQ ID NO: 4693145 - DNA, 25 bp, Homo sapien
cgggtctctactcctcttcatgcag

SEQ ID NO: 4693146 - DNA, 25 bp, Homo sapien
aactgaattacatcagccaactttc

SEQ ID NO: 4693147 - DNA, 25 bp, Homo sapien
caaaggtgacacctattttaaactg

SEQ ID NO: 4693148 - DNA, 25 bp, Homo sapien
gtatgaaacactggcttcagccaaa

SEQ ID NO: 4693149 - DNA, 25 bp, Homo sapien
cctgacaacacattctttgctgagt

SEQ ID NO: 4693150 - DNA, 25 bp, Homo sapien
aacctcagttgcaatcctgacaaca

SEQ ID NO: 4693151 - DNA, 25 bp, Homo sapien
tgcaatcctgacaacacattctttg

SEQ ID NO: 4693152 - DNA, 25 bp, Homo sapien
cagttgcaatcctgacaacacattc

SEQ ID NO: 4693153 - DNA, 25 bp, Homo sapien
gaagcttttgccaacaatgagccag

SEQ ID NO: 4693154 - DNA, 25 bp, Homo sapien
cagcacccgtacatgtgaactggag

SEQ ID NO: 4693155 - DNA, 25 bp, Homo sapien
gagacggtttacagcctgcacaggg

SEQ ID NO: 4693156 - DNA, 25 bp, Homo sapien
gatctatcgggatcaatgaggtccc

SEQ ID NO: 4693157 - DNA, 25 bp, Homo sapien
gtgcatcaccaccagttaaggatag

SEQ ID NO: 4693158 - DNA, 25 bp, Homo sapien
gagagttccgcaaggctgcatggaa

SEQ ID NO: 4693159 - DNA, 25 bp, Homo sapien
gttccgcaaggctgcatggaatgcc

SEQ ID NO: 4693160 - DNA, 25 bp, Homo sapien
aaggctgcatggaatgcccgaagca

SEQ ID NO: 4693161 - DNA, 25 bp, Homo sapien
ttcttggtgttgacgggagagttcc

SEQ ID NO: 4693162 - DNA, 25 bp, Homo sapien
tatttatgccaacaagttaccctac

SEQ ID NO: 4693163 - DNA, 25 bp, Homo sapien
tgcccagtttctaattcgtccagga

SEQ ID NO: 4693164 - DNA, 25 bp, Homo sapien
ctcccacctcagttagggctacagg

SEQ ID NO: 4693165 - DNA, 25 bp, Homo sapien
taggacaagtatcaactctgagaga

SEQ ID NO: 4693166 - DNA, 25 bp, Homo sapien
ctgcagacgaaaaagagcaagtgag

SEQ ID NO: 4693167 - DNA, 25 bp, Homo sapien
gaaaaagagcaagtgagtcccagag

SEQ ID NO: 4693168 - DNA, 25 bp, Homo sapien
gacgaaaaagagcaagtgagtccca

SEQ ID NO: 4693169 - DNA, 25 bp, Homo sapien
cagacgaaaaagagcaagtgagtcc

SEQ ID NO: 4693170 - DNA, 25 bp, Homo sapien
tgctcttgaagtttgtgagcacttt

SEQ ID NO: 4693171 - DNA, 25 bp, Homo sapien
acgccgtttctgtccagtgactgca

SEQ ID NO: 4693172 - DNA, 25 bp, Homo sapien
tgtacttcattaacaagtcaacgcc

SEQ ID NO: 4693173 - DNA, 25 bp, Homo sapien
actggagtaacactgcgctgctatt

SEQ ID NO: 4693174 - DNA, 25 bp, Homo sapien
ggggcgcgtggcagcgttcacatac

SEQ ID NO: 4693175 - DNA, 25 bp, Homo sapien
actggggcgcgtggcagcgttcaca

SEQ ID NO: 4693176 - DNA, 25 bp, Homo sapien
tcactggggcgcgtggcagcgttca

SEQ ID NO: 4693177 - DNA, 25 bp, Homo sapien
tggggcgcgtggcagcgttcacata

SEQ ID NO: 4693178 - DNA, 25 bp, Homo sapien
gcctgctgatcgaaccccaaggcaa

SEQ ID NO: 4693179 - DNA, 25 bp, Homo sapien
agagggaagtgatgacatgtcccag

SEQ ID NO: 4693180 - DNA, 25 bp, Homo sapien
tgcaattaccacagacagcaggtcc

SEQ ID NO: 4693181 - DNA, 25 bp, Homo sapien
gcctatcagaccgtcctacgtttgt

SEQ ID NO: 4693182 - DNA, 25 bp, Homo sapien
tgccttaaagggacgagaggtcctg

SEQ ID NO: 4693183 - DNA, 25 bp, Homo sapien
gaaggcaggcaggttagtaactcct

SEQ ID NO: 4693184 - DNA, 25 bp, Homo sapien
cactgcaagtatcatgaagccccaa

SEQ ID NO: 4693185 - DNA, 25 bp, Homo sapien
tcacctggacgaaggccatattaag

SEQ ID NO: 4693186 - DNA, 25 bp, Homo sapien
tcacagatcctcgaaagaggattcc

SEQ ID NO: 4693187 - DNA, 25 bp, Homo sapien
gggacattccctgacctagatcccg

SEQ ID NO: 4693188 - DNA, 25 bp, Homo sapien
cctgagatagagcacattctaggga

SEQ ID NO: 4693189 - DNA, 25 bp, Homo sapien
gaaaacgtgtcagatgagacctggc

SEQ ID NO: 4693190 - DNA, 25 bp, Homo sapien
cagtctttcttgctgtaagaactct

SEQ ID NO: 4693191 - DNA, 25 bp, Homo sapien
gtctttcttgctgtaagaactctta

SEQ ID NO: 4693192 - DNA, 25 bp, Homo sapien
cttgctgtaagaactcttataatgg

SEQ ID NO: 4693193 - DNA, 25 bp, Homo sapien
ctcttataatggagcctagtcctcc

SEQ ID NO: 4693194 - DNA, 25 bp, Homo sapien
ttacaatgagcccaagagtgtccac

SEQ ID NO: 4693195 - DNA, 25 bp, Homo sapien
gccacgctggtagaccgtcaaaatg

SEQ ID NO: 4693196 - DNA, 25 bp, Homo sapien
ggagacaaaggcatagactatcaga

SEQ ID NO: 4693197 - DNA, 25 bp, Homo sapien
cagttctgcagtactcggagacaaa

SEQ ID NO: 4693198 - DNA, 25 bp, Homo sapien
tgtggattgccatgctcgctcccag

SEQ ID NO: 4693199 - DNA, 25 bp, Homo sapien
tttacatacacgaaacacaccgcaa

SEQ ID NO: 4693200 - DNA, 25 bp, Homo sapien
tccacatcgggtttccggaacaaca

SEQ ID NO: 4693201 - DNA, 25 bp, Homo sapien
gggacacaggtctactccttccaca

SEQ ID NO: 4693202 - DNA, 25 bp, Homo sapien
taaataagctccaaaattaattaca

SEQ ID NO: 4693203 - DNA, 25 bp, Homo sapien
aaataagctccaaaattaattacat

SEQ ID NO: 4693204 - DNA, 25 bp, Homo sapien
cctgagtcaccatgtagcgctgcta

SEQ ID NO: 4693205 - DNA, 25 bp, Homo sapien
taacttcacggtagcacttacagct

SEQ ID NO: 4693206 - DNA, 25 bp, Homo sapien
cacctagaactttagaggatccatc

SEQ ID NO: 4693207 - DNA, 25 bp, Homo sapien
gatccatctttaagggtcggtgtgg

SEQ ID NO: 4693208 - DNA, 25 bp, Homo sapien
ttgtaggtctttgggccacttttca

SEQ ID NO: 4693209 - DNA, 25 bp, Homo sapien
aaggtgtcactctcattatgtcttt

SEQ ID NO: 4693210 - DNA, 25 bp, Homo sapien
cctgtgtaagtgttgttgtaggtct

SEQ ID NO: 4693211 - DNA, 25 bp, Homo sapien
tacacagctcccattatatcctttg

SEQ ID NO: 4693212 - DNA, 25 bp, Homo sapien
tatatgaatacgaccttccttgtgt

SEQ ID NO: 4693213 - DNA, 25 bp, Homo sapien
ggcttccgatggaagcagctccaga

SEQ ID NO: 4693214 - DNA, 25 bp, Homo sapien
ttccttgtgtctacctcaacaggct

SEQ ID NO: 4693215 - DNA, 25 bp, Homo sapien
cacatatatgaatacgaccttcctt

SEQ ID NO: 4693216 - DNA, 25 bp, Homo sapien
gcacactgtagacttcttggatttc

SEQ ID NO: 4693217 - DNA, 25 bp, Homo sapien
taaagcataaagtaaatctatcact

SEQ ID NO: 4693218 - DNA, 25 bp, Homo sapien
cactcatctgaagagatagaacact

SEQ ID NO: 4693219 - DNA, 25 bp, Homo sapien
ccaatttaggatagcataaccacta

SEQ ID NO: 4693220 - DNA, 25 bp, Homo sapien
gcacgcgcccctgttaaaatagaaa

SEQ ID NO: 4693221 - DNA, 25 bp, Homo sapien
aatagaaaaagaccgagaggcctcg

SEQ ID NO: 4693222 - DNA, 25 bp, Homo sapien
ctgcacgcgcccctgttaaaataga

SEQ ID NO: 4693223 - DNA, 25 bp, Homo sapien
gaggcctcggagactcagtcatcat

SEQ ID NO: 4693224 - DNA, 25 bp, Homo sapien
cagagcggattcagtaggctttcca

SEQ ID NO: 4693225 - DNA, 25 bp, Homo sapien
tacattcatcaggtgtgaactcttg

SEQ ID NO: 4693226 - DNA, 25 bp, Homo sapien
aacactgtgattctgcagagcggat

SEQ ID NO: 4693227 - DNA, 25 bp, Homo sapien
ccttgagggcacttcagtactagag

SEQ ID NO: 4693228 - DNA, 25 bp, Homo sapien
ccaagtgctgctaatctgtcgtgca

SEQ ID NO: 4693229 - DNA, 25 bp, Homo sapien
tgtaacaattcttatccaagtgctg

SEQ ID NO: 4693230 - DNA, 25 bp, Homo sapien
tcctcaagagactgaagcacaatat

SEQ ID NO: 4693231 - DNA, 25 bp, Homo sapien
gattattaggcagaaatgcacttgt

SEQ ID NO: 4693232 - DNA, 25 bp, Homo sapien
acattgtgaatgtgacctctgaccc

SEQ ID NO: 4693233 - DNA, 25 bp, Homo sapien
taaaattcatggaactgactcaggc

SEQ ID NO: 4693234 - DNA, 25 bp, Homo sapien
tgaaaacatccataggatctgatgg

SEQ ID NO: 4693235 - DNA, 25 bp, Homo sapien
ttttgcactggagagtagtagagca

SEQ ID NO: 4693236 - DNA, 25 bp, Homo sapien
tagctaagggatggcctaacctaag

SEQ ID NO: 4693237 - DNA, 25 bp, Homo sapien
tactggacttgcatatcaaaggtga

SEQ ID NO: 4693238 - DNA, 25 bp, Homo sapien
gtcttggcatttccggctacagatt

SEQ ID NO: 4693239 - DNA, 25 bp, Homo sapien
taaaatgccttcactcgtattgctg

SEQ ID NO: 4693240 - DNA, 25 bp, Homo sapien
tattctagccaggatgtattcttca

SEQ ID NO: 4693241 - DNA, 25 bp, Homo sapien
catctcagcccagtcttctcagtag

SEQ ID NO: 4693242 - DNA, 25 bp, Homo sapien
gagacccaaaaagctattcatagtg

SEQ ID NO: 4693243 - DNA, 25 bp, Homo sapien
gagctagaactaaaactcagatctc

SEQ ID NO: 4693244 - DNA, 25 bp, Homo sapien
agtgtagattatggtaaggtaaatc

SEQ ID NO: 4693245 - DNA, 25 bp, Homo sapien
aaagagtgatcaagcagggcatggt

SEQ ID NO: 4693246 - DNA, 25 bp, Homo sapien
catggtggcatgaccctattagtcc

SEQ ID NO: 4693247 - DNA, 25 bp, Homo sapien
aagtaggatggaaaagtgtagatta

SEQ ID NO: 4693248 - DNA, 25 bp, Homo sapien
taaactgggtagagatctagcaacc

SEQ ID NO: 4693249 - DNA, 25 bp, Homo sapien
ggtagagatctagcaacctacgtga

SEQ ID NO: 4693250 - DNA, 25 bp, Homo sapien
tcttaactggtaaactgggtagaga

SEQ ID NO: 4693251 - DNA, 25 bp, Homo sapien
aacctacgtgatcaacaagcagaca

SEQ ID NO: 4693252 - DNA, 25 bp, Homo sapien
gcagacaagccatacacgtttgagg

SEQ ID NO: 4693253 - DNA, 25 bp, Homo sapien
aagactagcggaggaatcactggac

SEQ ID NO: 4693254 - DNA, 25 bp, Homo sapien
cacccaggctctgtagatgagacca

SEQ ID NO: 4693255 - DNA, 25 bp, Homo sapien
tgagaccacctatgaaagactagcg

SEQ ID NO: 4693256 - DNA, 25 bp, Homo sapien
caacaggactttgtgatggactagg

SEQ ID NO: 4693257 - DNA, 25 bp, Homo sapien
gatagcacaatgactagtagccagc

SEQ ID NO: 4693258 - DNA, 25 bp, Homo sapien
acttcgtgtttagacttgggacctg

SEQ ID NO: 4693259 - DNA, 25 bp, Homo sapien
taatgtcctagagaatgaacttggg

SEQ ID NO: 4693260 - DNA, 25 bp, Homo sapien
tacacgtgtgaattcatccaccagt

SEQ ID NO: 4693261 - DNA, 25 bp, Homo sapien
tacctacacgtgtgaattcatccac

SEQ ID NO: 4693262 - DNA, 25 bp, Homo sapien
cactacctacacgtgtgaattcatc

SEQ ID NO: 4693263 - DNA, 25 bp, Homo sapien
gcacactacctacacgtgtgaattc

SEQ ID NO: 4693264 - DNA, 25 bp, Homo sapien
ctttcacatgtagttcctttctcat

SEQ ID NO: 4693265 - DNA, 25 bp, Homo sapien
tgttctcataatggctgactgtgct

SEQ ID NO: 4693266 - DNA, 25 bp, Homo sapien
tgctttctcgtgaatccatattggc

SEQ ID NO: 4693267 - DNA, 25 bp, Homo sapien
ttcactggtccatgaggtgttccca

SEQ ID NO: 4693268 - DNA, 25 bp, Homo sapien
tgtctcctccaacatagatgctaat

SEQ ID NO: 4693269 - DNA, 25 bp, Homo sapien
catttgatacctgcatctatgggag

SEQ ID NO: 4693270 - DNA, 25 bp, Homo sapien
catgataaccctgggaaacagtttc

SEQ ID NO: 4693271 - DNA, 25 bp, Homo sapien
catatgtcctagtttgcctgataca

SEQ ID NO: 4693272 - DNA, 25 bp, Homo sapien
gcaggctgtttgacaccagtgctct

SEQ ID NO: 4693273 - DNA, 25 bp, Homo sapien
actttctgcctgataaccattagca

SEQ ID NO: 4693274 - DNA, 25 bp, Homo sapien
ctttctgcctgataaccattagcat

SEQ ID NO: 4693275 - DNA, 25 bp, Homo sapien
aactttctgcctgataaccattagc

SEQ ID NO: 4693276 - DNA, 25 bp, Homo sapien
cttcttgagggcaaggaccaagtct

SEQ ID NO: 4693277 - DNA, 25 bp, Homo sapien
tcttaactggtggtgagcttcttga

SEQ ID NO: 4693278 - DNA, 25 bp, Homo sapien
tttcttaactggtggtgagcttctt

SEQ ID NO: 4693279 - DNA, 25 bp, Homo sapien
cttgagggcaaggaccaagtcttac

SEQ ID NO: 4693280 - DNA, 25 bp, Homo sapien
cagggagtagctgatggtgaagttg

SEQ ID NO: 4693281 - DNA, 25 bp, Homo sapien
gcagggagtagctgatggtgaagtt

SEQ ID NO: 4693282 - DNA, 25 bp, Homo sapien
agctgatctttatgaaagaggagga

SEQ ID NO: 4693283 - DNA, 25 bp, Homo sapien
aggagcagctgatctttatgaaaga

SEQ ID NO: 4693284 - DNA, 25 bp, Homo sapien
gagaagggacatgagacaggtaaca

SEQ ID NO: 4693285 - DNA, 25 bp, Homo sapien
aagggacatgagacaggtaacatta

SEQ ID NO: 4693286 - DNA, 25 bp, Homo sapien
gaagggacatgagacaggtaacatt

SEQ ID NO: 4693287 - DNA, 25 bp, Homo sapien
gggacatgagacaggtaacattaaa

SEQ ID NO: 4693288 - DNA, 25 bp, Homo sapien
ctgccacaaaatattggctgttcat

SEQ ID NO: 4693289 - DNA, 25 bp, Homo sapien
ttgttcacgctgaaactatttgaca

SEQ ID NO: 4693290 - DNA, 25 bp, Homo sapien
gttcacgctgaaactatttgacact

SEQ ID NO: 4693291 - DNA, 25 bp, Homo sapien
gaaactatttgacactatttcactt

SEQ ID NO: 4693292 - DNA, 25 bp, Homo sapien
cacgctgaaactatttgacactatt

SEQ ID NO: 4693293 - DNA, 25 bp, Homo sapien
aattcttttctagacggggagtgca

SEQ ID NO: 4693294 - DNA, 25 bp, Homo sapien
tttactctaaggctaggcaccactg

SEQ ID NO: 4693295 - DNA, 25 bp, Homo sapien
tctgtcatgaaatggctatcttcat

SEQ ID NO: 4693296 - DNA, 25 bp, Homo sapien
ggagaggtgcttgggttttcataaa

SEQ ID NO: 4693297 - DNA, 25 bp, Homo sapien
tctgctccaccttattgggtcccat

SEQ ID NO: 4693298 - DNA, 25 bp, Homo sapien
tccctctgctccaccttattgggtc

SEQ ID NO: 4693299 - DNA, 25 bp, Homo sapien
cctctgctccaccttattgggtccc

SEQ ID NO: 4693300 - DNA, 25 bp, Homo sapien
cctccctctgctccaccttattggg

SEQ ID NO: 4693301 - DNA, 25 bp, Homo sapien
tgtcgttggacactgtgtagttaac

SEQ ID NO: 4693302 - DNA, 25 bp, Homo sapien
ttatcttttgtcgttggacactgtg

SEQ ID NO: 4693303 - DNA, 25 bp, Homo sapien
ggacactgtgtagttaactcgaatg

SEQ ID NO: 4693304 - DNA, 25 bp, Homo sapien
gtgtagttaactcgaatggttgaac

SEQ ID NO: 4693305 - DNA, 25 bp, Homo sapien
actgtgcctaaagaacataactgcc

SEQ ID NO: 4693306 - DNA, 25 bp, Homo sapien
caaagttgttattcagtgggcacga

SEQ ID NO: 4693307 - DNA, 25 bp, Homo sapien
tgggcacgatggactccaaatgcct

SEQ ID NO: 4693308 - DNA, 25 bp, Homo sapien
aagttatgtatacctgtcccagatg

SEQ ID NO: 4693309 - DNA, 25 bp, Homo sapien
cacatcaactagtgcacgaaggcta

SEQ ID NO: 4693310 - DNA, 25 bp, Homo sapien
gaacgtgttattcctcccagaacga

SEQ ID NO: 4693311 - DNA, 25 bp, Homo sapien
tattccgggcagttccagattcaga

SEQ ID NO: 4693312 - DNA, 25 bp, Homo sapien
cctaattactgctatcgttgtggaa

SEQ ID NO: 4693313 - DNA, 25 bp, Homo sapien
tccaggcccaggcgatcggcagttt

SEQ ID NO: 4693314 - DNA, 25 bp, Homo sapien
ggcccaggcgatcggcagttttctg

SEQ ID NO: 4693315 - DNA, 25 bp, Homo sapien
caggcccaggcgatcggcagttttc

SEQ ID NO: 4693316 - DNA, 25 bp, Homo sapien
ccaggcccaggcgatcggcagtttt

SEQ ID NO: 4693317 - DNA, 25 bp, Homo sapien
ctgagattgtcacctgactctttat

SEQ ID NO: 4693318 - DNA, 25 bp, Homo sapien
gattgtcacctgactctttattatc

SEQ ID NO: 4693319 - DNA, 25 bp, Homo sapien
gagattgtcacctgactctttatta

SEQ ID NO: 4693320 - DNA, 25 bp, Homo sapien
tgagattgtcacctgactctttatt

SEQ ID NO: 4693321 - DNA, 25 bp, Homo sapien
gcatacagatagtccactgggttat

SEQ ID NO: 4693322 - DNA, 25 bp, Homo sapien
tcagatgaaacaatagtgcagttct

SEQ ID NO: 4693323 - DNA, 25 bp, Homo sapien
tgcgcctgccacagatagcatgttt

SEQ ID NO: 4693324 - DNA, 25 bp, Homo sapien
acacctggctctgcatacagatagt

SEQ ID NO: 4693325 - DNA, 25 bp, Homo sapien
ttcagcctgtctgcaatggaggtca

SEQ ID NO: 4693326 - DNA, 25 bp, Homo sapien
tcagcctgtctgcaatggaggtcac

SEQ ID NO: 4693327 - DNA, 25 bp, Homo sapien
attcagcctgtctgcaatggaggtc

SEQ ID NO: 4693328 - DNA, 25 bp, Homo sapien
atagctggaccagagaagattctgt

SEQ ID NO: 4693329 - DNA, 25 bp, Homo sapien
actttggtgactccagctgagagaa

SEQ ID NO: 4693330 - DNA, 25 bp, Homo sapien
ttcattgtgaattttcctgatggct

SEQ ID NO: 4693331 - DNA, 25 bp, Homo sapien
taaactttggtgactccagctgaga

SEQ ID NO: 4693332 - DNA, 25 bp, Homo sapien
atacttaaattaatcaaaaggcact

SEQ ID NO: 4693333 - DNA, 25 bp, Homo sapien
tgaaaagccaaatagatccaaagaa

SEQ ID NO: 4693334 - DNA, 25 bp, Homo sapien
aattaatcaaaaggcactatgatac

SEQ ID NO: 4693335 - DNA, 25 bp, Homo sapien
aatctctgttcatttgaaaagccaa

SEQ ID NO: 4693336 - DNA, 25 bp, Homo sapien
tttcctctacaagagacaataacat

SEQ ID NO: 4693337 - DNA, 25 bp, Homo sapien
cggacgtgacgcagggaaagttccg

SEQ ID NO: 4693338 - DNA, 25 bp, Homo sapien
tgacgcagggaaagttccggcttcg

SEQ ID NO: 4693339 - DNA, 25 bp, Homo sapien
aggcgccactcacgggccggacgtg

SEQ ID NO: 4693340 - DNA, 25 bp, Homo sapien
actcacgggccggacgtgacgcagg

SEQ ID NO: 4693341 - DNA, 25 bp, Homo sapien
gacttctagatggaacagtacatct

SEQ ID NO: 4693342 - DNA, 25 bp, Homo sapien
caatcttgacttctagatggaacag

SEQ ID NO: 4693343 - DNA, 25 bp, Homo sapien
agtggcaccaatcttgacttctaga

SEQ ID NO: 4693344 - DNA, 25 bp, Homo sapien
gtgatggcatctacatcataaatct

SEQ ID NO: 4693345 - DNA, 25 bp, Homo sapien
cggcgacttaggccagtcgcgagcc

SEQ ID NO: 4693346 - DNA, 25 bp, Homo sapien
tgcggcgacttaggccagtcgcgag

SEQ ID NO: 4693347 - DNA, 25 bp, Homo sapien
ctgcggcgacttaggccagtcgcga

SEQ ID NO: 4693348 - DNA, 25 bp, Homo sapien
ggcgacttaggccagtcgcgagccg

SEQ ID NO: 4693349 - DNA, 25 bp, Homo sapien
caggctgattcggtcaaagtggccg

SEQ ID NO: 4693350 - DNA, 25 bp, Homo sapien
gttctttgcacccggcttgggccca

SEQ ID NO: 4693351 - DNA, 25 bp, Homo sapien
gagaccgtgatagacccggtatccg

SEQ ID NO: 4693352 - DNA, 25 bp, Homo sapien
actccctgcccgagaccgtgataga

SEQ ID NO: 4693353 - DNA, 25 bp, Homo sapien
acgtgggcgggacctcccgcagcag

SEQ ID NO: 4693354 - DNA, 25 bp, Homo sapien
ctggcttcacgtgggcgggacctcc

SEQ ID NO: 4693355 - DNA, 25 bp, Homo sapien
agctcagttaggctggcttcacgtg

SEQ ID NO: 4693356 - DNA, 25 bp, Homo sapien
ctcagttaggctggcttcacgtggg

SEQ ID NO: 4693357 - DNA, 25 bp, Homo sapien
aggttccaagactggcagttgcttc

SEQ ID NO: 4693358 - DNA, 25 bp, Homo sapien
ggttccaagactggcagttgcttca

SEQ ID NO: 4693359 - DNA, 25 bp, Homo sapien
gttccaagactggcagttgcttcat

SEQ ID NO: 4693360 - DNA, 25 bp, Homo sapien
tgccagatggtcagtgccttactct

SEQ ID NO: 4693361 - DNA, 25 bp, Homo sapien
tctgctctgtgataattactgcccc

SEQ ID NO: 4693362 - DNA, 25 bp, Homo sapien
gaagacacagcattggagctgagga

SEQ ID NO: 4693363 - DNA, 25 bp, Homo sapien
cagacagtttgagtctaattaccag

SEQ ID NO: 4693364 - DNA, 25 bp, Homo sapien
tctcttggcattaccaactgggggt

SEQ ID NO: 4693365 - DNA, 25 bp, Homo sapien
gtgtgcacgtctgagaagcttctgt

SEQ ID NO: 4693366 - DNA, 25 bp, Homo sapien
gatttgctcccccaacaatgaagac

SEQ ID NO: 4693367 - DNA, 25 bp, Homo sapien
tggccaactcgagcacaggggctgt

SEQ ID NO: 4693368 - DNA, 25 bp, Homo sapien
ctggaaaacatttcacccagttcct

SEQ ID NO: 4693369 - DNA, 25 bp, Homo sapien
aaacatttcacccagttcctagatt

SEQ ID NO: 4693370 - DNA, 25 bp, Homo sapien
tggaaaacatttcacccagttccta

SEQ ID NO: 4693371 - DNA, 25 bp, Homo sapien
atttcacccagttcctagattgggg

SEQ ID NO: 4693372 - DNA, 25 bp, Homo sapien
tcctgattggttggcacctccaaat

SEQ ID NO: 4693373 - DNA, 25 bp, Homo sapien
gaggcccttgcaggtatctaagtcc

SEQ ID NO: 4693374 - DNA, 25 bp, Homo sapien
aatgaagctagcatgttcataccgg

SEQ ID NO: 4693375 - DNA, 25 bp, Homo sapien
aatacccagatacggtcaggtgtgc

SEQ ID NO: 4693376 - DNA, 25 bp, Homo sapien
gcccggcctcttgtgactttaggaa

SEQ ID NO: 4693377 - DNA, 25 bp, Homo sapien
tttctatgtcagcaaagttaaatgg

SEQ ID NO: 4693378 - DNA, 25 bp, Homo sapien
tgagtagcccacttgatatagctgt

SEQ ID NO: 4693379 - DNA, 25 bp, Homo sapien
tgcccttgataaacctgagtagccc

SEQ ID NO: 4693380 - DNA, 25 bp, Homo sapien
cttaggatttgccaagacagtccaa

SEQ ID NO: 4693381 - DNA, 25 bp, Homo sapien
ttaggatttgccaagacagtccaaa

SEQ ID NO: 4693382 - DNA, 25 bp, Homo sapien
tccccaagatttaaaagctgtaagc

SEQ ID NO: 4693383 - DNA, 25 bp, Homo sapien
gatctcatactcacaaacatcaagg

SEQ ID NO: 4693384 - DNA, 25 bp, Homo sapien
ggcagggatctcatactcacaaaca

SEQ ID NO: 4693385 - DNA, 25 bp, Homo sapien
agggatctcatactcacaaacatca

SEQ ID NO: 4693386 - DNA, 25 bp, Homo sapien
ccaggggggccagcatagttttggg

SEQ ID NO: 4693387 - DNA, 25 bp, Homo sapien
cagcttcgtgtcctgcacgggctgg

SEQ ID NO: 4693388 - DNA, 25 bp, Homo sapien
tgcgtcaaacacatgcagcttcgtg

SEQ ID NO: 4693389 - DNA, 25 bp, Homo sapien
caatggctgccgatgatgtgtggaa

SEQ ID NO: 4693390 - DNA, 25 bp, Homo sapien
ctggtcacttctggcgtggtccacg

SEQ ID NO: 4693391 - DNA, 25 bp, Homo sapien
caaagaagtctagaagtgagacact

SEQ ID NO: 4693392 - DNA, 25 bp, Homo sapien
gagacacttagtcaggctttccttt

SEQ ID NO: 4693393 - DNA, 25 bp, Homo sapien
tcagctaagagatataacaaagaag

SEQ ID NO: 4693394 - DNA, 25 bp, Homo sapien
tcctatattaggtaatgtgtaaact

SEQ ID NO: 4693395 - DNA, 25 bp, Homo sapien
ctagaaaagtaaattcaataacatc

SEQ ID NO: 4693396 - DNA, 25 bp, Homo sapien
tagaaaagtaaattcaataacatca

SEQ ID NO: 4693397 - DNA, 25 bp, Homo sapien
taaattcaataacatcaaatggcaa

SEQ ID NO: 4693398 - DNA, 25 bp, Homo sapien
aagtaaattcaataacatcaaatgg

SEQ ID NO: 4693399 - DNA, 25 bp, Homo sapien
caccatcacatgaccatgccgggga

SEQ ID NO: 4693400 - DNA, 25 bp, Homo sapien
tgccggggagatggaggatttccaa

SEQ ID NO: 4693401 - DNA, 25 bp, Homo sapien
ttatatcaatgcagtggaggtcatc

SEQ ID NO: 4693402 - DNA, 25 bp, Homo sapien
catcacatgaccatgccggggagat

SEQ ID NO: 4693403 - DNA, 25 bp, Homo sapien
ctgtgtgatactggtacattgtgtc

SEQ ID NO: 4693404 - DNA, 25 bp, Homo sapien
agtgctcctgcaggagtcattccac

SEQ ID NO: 4693405 - DNA, 25 bp, Homo sapien
ccccagtgggatttagcttctgcca

SEQ ID NO: 4693406 - DNA, 25 bp, Homo sapien
aggagtcattccaccaaagatgtac

SEQ ID NO: 4693407 - DNA, 25 bp, Homo sapien
ggagggaaaaggcttcatgttaaga

SEQ ID NO: 4693408 - DNA, 25 bp, Homo sapien
gagggaaaaggcttcatgttaagaa

SEQ ID NO: 4693409 - DNA, 25 bp, Homo sapien
acatggaatggtccaatcgtccagg

SEQ ID NO: 4693410 - DNA, 25 bp, Homo sapien
cagggggtagaagagtatcaaattt

SEQ ID NO: 4693411 - DNA, 25 bp, Homo sapien
aatggtccaatcgtccagggggtag

SEQ ID NO: 4693412 - DNA, 25 bp, Homo sapien
gtccaatcgtccagggggtagaaga

SEQ ID NO: 4693413 - DNA, 25 bp, Homo sapien
tcagcttcatggttcagagtgagag

SEQ ID NO: 4693414 - DNA, 25 bp, Homo sapien
agtctggctttcctcatgtgagtca

SEQ ID NO: 4693415 - DNA, 25 bp, Homo sapien
aaacagagcagtgtagcagtctggc

SEQ ID NO: 4693416 - DNA, 25 bp, Homo sapien
cactgtggctcattactttgtcagc

SEQ ID NO: 4693417 - DNA, 25 bp, Homo sapien
gatattttggaggtataaaacagct

SEQ ID NO: 4693418 - DNA, 25 bp, Homo sapien
gcaatatagcaaggtttagtgcaca

SEQ ID NO: 4693419 - DNA, 25 bp, Homo sapien
gcattagtttcttcacctaccaaag

SEQ ID NO: 4693420 - DNA, 25 bp, Homo sapien
cagatatataatgcagaagatattt

SEQ ID NO: 4693421 - DNA, 25 bp, Homo sapien
attgagaccacaggcttgttaccac

SEQ ID NO: 4693422 - DNA, 25 bp, Homo sapien
tattgtgaaccctagctgtgtcaga

SEQ ID NO: 4693423 - DNA, 25 bp, Homo sapien
caataaaggacaggctggtgctaac

SEQ ID NO: 4693424 - DNA, 25 bp, Homo sapien
cactatgaatgggttgttaaaggca

SEQ ID NO: 4693425 - DNA, 25 bp, Homo sapien
aatcaccaatgaccagaatcgcctg

SEQ ID NO: 4693426 - DNA, 25 bp, Homo sapien
ctgaagacaagggtacagggaacaa

SEQ ID NO: 4693427 - DNA, 25 bp, Homo sapien
gcctgacacctgaagaaatcgaaag

SEQ ID NO: 4693428 - DNA, 25 bp, Homo sapien
aatggtattcttcgagtgacagctg

SEQ ID NO: 4693429 - DNA, 25 bp, Homo sapien
tgaaactgtgggaggtgtcatgacc

SEQ ID NO: 4693430 - DNA, 25 bp, Homo sapien
tatgtccccttacacttggtattga

SEQ ID NO: 4693431 - DNA, 25 bp, Homo sapien
tcaaccaactgttacaatcaaggtc

SEQ ID NO: 4693432 - DNA, 25 bp, Homo sapien
tggtactgcttgatgtatgtcccct

SEQ ID NO: 4693433 - DNA, 25 bp, Homo sapien
tcaatggcaaggaaccatcccgtgg

SEQ ID NO: 4693434 - DNA, 25 bp, Homo sapien
tggagaagactttgaccagcgtgtc

SEQ ID NO: 4693435 - DNA, 25 bp, Homo sapien
tatgaagcccgtccagaaagtgttg

SEQ ID NO: 4693436 - DNA, 25 bp, Homo sapien
tgttcttgttggtggctcgactcga

SEQ ID NO: 4693437 - DNA, 25 bp, Homo sapien
tcaatctaatagtacggcagctgct

SEQ ID NO: 4693438 - DNA, 25 bp, Homo sapien
ttaatgatgcccaacgccaagcaac

SEQ ID NO: 4693439 - DNA, 25 bp, Homo sapien
aattcagggatacggcatatttgcc

SEQ ID NO: 4693440 - DNA, 25 bp, Homo sapien
taggttacccatgcagttgttactg

SEQ ID NO: 4693441 - DNA, 25 bp, Homo sapien
tgctccactgttggacagctctaaa

SEQ ID NO: 4693442 - DNA, 25 bp, Homo sapien
taaaggtcactagtgcaactgttgc

SEQ ID NO: 4693443 - DNA, 25 bp, Homo sapien
ctgcctggagcaatacagaatgtct

SEQ ID NO: 4693444 - DNA, 25 bp, Homo sapien
ggagctcactccctcaagtaatgca

SEQ ID NO: 4693445 - DNA, 25 bp, Homo sapien
aatcgtcttccggaaggctgttcac

SEQ ID NO: 4693446 - DNA, 25 bp, Homo sapien
cggaatcgtcttccggaaggctgtt

SEQ ID NO: 4693447 - DNA, 25 bp, Homo sapien
cgtcttccggaaggctgttcaccag

SEQ ID NO: 4693448 - DNA, 25 bp, Homo sapien
tccggaatcgtcttccggaaggctg

SEQ ID NO: 4693449 - DNA, 25 bp, Homo sapien
agctgtagttccgcccgggcggcta

SEQ ID NO: 4693450 - DNA, 25 bp, Homo sapien
gagccgtcgccctagccggtgactg

SEQ ID NO: 4693451 - DNA, 25 bp, Homo sapien
aggactctgtcggaccgccactcgg

SEQ ID NO: 4693452 - DNA, 25 bp, Homo sapien
tgttggcttccctgcgtcctgcagc

SEQ ID NO: 4693453 - DNA, 25 bp, Homo sapien
ccagttgagacggatttggtcgtgg

SEQ ID NO: 4693454 - DNA, 25 bp, Homo sapien
ccaaattccagttgagacggatttg

SEQ ID NO: 4693455 - DNA, 25 bp, Homo sapien
cagccaaattccagttgagacggat

SEQ ID NO: 4693456 - DNA, 25 bp, Homo sapien
aattccagttgagacggatttggtc

SEQ ID NO: 4693457 - DNA, 25 bp, Homo sapien
taaccaactctctccagtacactta

SEQ ID NO: 4693458 - DNA, 25 bp, Homo sapien
ctttgagattcctagaatgtataac

SEQ ID NO: 4693459 - DNA, 25 bp, Homo sapien
tcctagaatgtataaccaactctct

SEQ ID NO: 4693460 - DNA, 25 bp, Homo sapien
aatgtataaccaactctctccagta

SEQ ID NO: 4693461 - DNA, 25 bp, Homo sapien
tctggcctacagaatagttggtata

SEQ ID NO: 4693462 - DNA, 25 bp, Homo sapien
gaatgggcttactaccaactaacgc

SEQ ID NO: 4693463 - DNA, 25 bp, Homo sapien
gttttgttttgaactctggcctaca

SEQ ID NO: 4693464 - DNA, 25 bp, Homo sapien
gcctggcacaagtacaaggaattga

SEQ ID NO: 4693465 - DNA, 25 bp, Homo sapien
ctcacattccaatgagcatatctga

SEQ ID NO: 4693466 - DNA, 25 bp, Homo sapien
ctgcaactaaatttagttgaaaata

SEQ ID NO: 4693467 - DNA, 25 bp, Homo sapien
cctgcaactaaatttagttgaaaat

SEQ ID NO: 4693468 - DNA, 25 bp, Homo sapien
ttctcacattccaatgagcatatct

SEQ ID NO: 4693469 - DNA, 25 bp, Homo sapien
cctggcctaatgtgaacattttact

SEQ ID NO: 4693470 - DNA, 25 bp, Homo sapien
tacaagcatgtactaccgcatccag

SEQ ID NO: 4693471 - DNA, 25 bp, Homo sapien
ctacaagcatgtactaccgcatcca

SEQ ID NO: 4693472 - DNA, 25 bp, Homo sapien
actacaagcatgtactaccgcatcc

SEQ ID NO: 4693473 - DNA, 25 bp, Homo sapien
tgggagggtcagatgggaggatcgc

SEQ ID NO: 4693474 - DNA, 25 bp, Homo sapien
tccagcctgggtgacagagccagac

SEQ ID NO: 4693475 - DNA, 25 bp, Homo sapien
ttacagtgagctgagatcgtgtcac

SEQ ID NO: 4693476 - DNA, 25 bp, Homo sapien
atcgcttgaacccgggaggcggagg

SEQ ID NO: 4693477 - DNA, 25 bp, Homo sapien
ttcaatgtgggaaaggctcaaaggc

SEQ ID NO: 4693478 - DNA, 25 bp, Homo sapien
tgttgcttcgcaatccatgctgtac

SEQ ID NO: 4693479 - DNA, 25 bp, Homo sapien
gagtttacatataagcgttcctgct

SEQ ID NO: 4693480 - DNA, 25 bp, Homo sapien
catgctgtacgatacaacttttcag

SEQ ID NO: 4693481 - DNA, 25 bp, Homo sapien
taagccgatccaaattgattctctg

SEQ ID NO: 4693482 - DNA, 25 bp, Homo sapien
caagaacgctttcacgtgccctttc

SEQ ID NO: 4693483 - DNA, 25 bp, Homo sapien
aatcaccactcagattaagacatgg

SEQ ID NO: 4693484 - DNA, 25 bp, Homo sapien
cctctcaagcccaaaaagtaaccat

SEQ ID NO: 4693485 - DNA, 25 bp, Homo sapien
tgcacaaatgtcaagtgttcagctt

SEQ ID NO: 4693486 - DNA, 25 bp, Homo sapien
ggattttccctcaatcgactcaaga

SEQ ID NO: 4693487 - DNA, 25 bp, Homo sapien
gcagtctcctgaaatcccaattgct

SEQ ID NO: 4693488 - DNA, 25 bp, Homo sapien
caaccaaagaggaggcaataagacg

SEQ ID NO: 4693489 - DNA, 25 bp, Homo sapien
gatgcaattgccatacagggaggta

SEQ ID NO: 4693490 - DNA, 25 bp, Homo sapien
caagtatcgcaaaacctgaaggagg

SEQ ID NO: 4693491 - DNA, 25 bp, Homo sapien
tctcctcaaaagtcgcctagggttg

SEQ ID NO: 4693492 - DNA, 25 bp, Homo sapien
aacaggagatcagtacacattgccc

SEQ ID NO: 4693493 - DNA, 25 bp, Homo sapien
gacaaatgaagcaggccaacaggag

SEQ ID NO: 4693494 - DNA, 25 bp, Homo sapien
caaggctgctctttgttcggggatc

SEQ ID NO: 4693495 - DNA, 25 bp, Homo sapien
tcattgctaactgctgcaaaaggcg

SEQ ID NO: 4693496 - DNA, 25 bp, Homo sapien
cagagccagtcattgctaactgctg

SEQ ID NO: 4693497 - DNA, 25 bp, Homo sapien
gctgctctttgttcggggatctccc

SEQ ID NO: 4693498 - DNA, 25 bp, Homo sapien
ccccaatcacaacatcaaggaaagc

SEQ ID NO: 4693499 - DNA, 25 bp, Homo sapien
tccagaagattgacggaagacaatg

SEQ ID NO: 4693500 - DNA, 25 bp, Homo sapien
acatcaaggaaagcggcaacacagc

SEQ ID NO: 4693501 - DNA, 25 bp, Homo sapien
taaaccacagttctgctcaatcctt

SEQ ID NO: 4693502 - DNA, 25 bp, Homo sapien
ctggagatagctgaggtgtattgta

SEQ ID NO: 4693503 - DNA, 25 bp, Homo sapien
tatcttctctcagttgatctccaga

SEQ ID NO: 4693504 - DNA, 25 bp, Homo sapien
aattgtcaagagccattctatcttc

SEQ ID NO: 4693505 - DNA, 25 bp, Homo sapien
gaggtgtattgtagggagtcatttc

SEQ ID NO: 4693506 - DNA, 25 bp, Homo sapien
gttgcaaaagcattaaatagaaaga

SEQ ID NO: 4693507 - DNA, 25 bp, Homo sapien
tgggttgcaaaagcattaaatagaa

SEQ ID NO: 4693508 - DNA, 25 bp, Homo sapien
gggttgcaaaagcattaaatagaaa

SEQ ID NO: 4693509 - DNA, 25 bp, Homo sapien
ctgggttgcaaaagcattaaataga

SEQ ID NO: 4693510 - DNA, 25 bp, Homo sapien
actgtaatatgagaggtaatattgg

SEQ ID NO: 4693511 - DNA, 25 bp, Homo sapien
taatattggtagctgaggaatccca

SEQ ID NO: 4693512 - DNA, 25 bp, Homo sapien
tatgagaggtaatattggtagctga

SEQ ID NO: 4693513 - DNA, 25 bp, Homo sapien
agaggtaatattggtagctgaggaa

SEQ ID NO: 4693514 - DNA, 25 bp, Homo sapien
ctgaaaattcagagcacacatcaat

SEQ ID NO: 4693515 - DNA, 25 bp, Homo sapien
tatttgctcaccctatcttttactg

SEQ ID NO: 4693516 - DNA, 25 bp, Homo sapien
ttccaagtctaaaataggcctactc

SEQ ID NO: 4693517 - DNA, 25 bp, Homo sapien
tctatgaatcataacaaactctgta

SEQ ID NO: 4693518 - DNA, 25 bp, Homo sapien
cacattgtatgaaagctgacccact

SEQ ID NO: 4693519 - DNA, 25 bp, Homo sapien
tagtagcagcaaaagtcaacttcac

SEQ ID NO: 4693520 - DNA, 25 bp, Homo sapien
taaaattcagtacaaccagaatact

SEQ ID NO: 4693521 - DNA, 25 bp, Homo sapien
agcaaaaacaactatagtagcagca

SEQ ID NO: 4693522 - DNA, 25 bp, Homo sapien
gagatgatccttcatggtccatatg

SEQ ID NO: 4693523 - DNA, 25 bp, Homo sapien
gacatcatccctggagtaagctggg

SEQ ID NO: 4693524 - DNA, 25 bp, Homo sapien
ggtccattagcatattggtgcggct

SEQ ID NO: 4693525 - DNA, 25 bp, Homo sapien
taagctggggacctgtacctaagga

SEQ ID NO: 4693526 - DNA, 25 bp, Homo sapien
ctcaccataacctctacatcccaag

SEQ ID NO: 4693527 - DNA, 25 bp, Homo sapien
ccaccgcccggccatcaaggacgtt

SEQ ID NO: 4693528 - DNA, 25 bp, Homo sapien
caccgcccggccatcaaggacgttt

SEQ ID NO: 4693529 - DNA, 25 bp, Homo sapien
tcaccataacctctacatcccaagt

SEQ ID NO: 4693530 - DNA, 25 bp, Homo sapien
agattatcactgcagagggaaaagc

SEQ ID NO: 4693531 - DNA, 25 bp, Homo sapien
agggaaaagcgcaaggttttatcag

SEQ ID NO: 4693532 - DNA, 25 bp, Homo sapien
tgttttcatcaacagggacatctcc

SEQ ID NO: 4693533 - DNA, 25 bp, Homo sapien
tatcaggtttaccatggagtttgtt

SEQ ID NO: 4693534 - DNA, 25 bp, Homo sapien
cactgaattggagcgatttgaagga

SEQ ID NO: 4693535 - DNA, 25 bp, Homo sapien
gaggacactgaattggagcgatttg

SEQ ID NO: 4693536 - DNA, 25 bp, Homo sapien
gacactgaattggagcgatttgaag

SEQ ID NO: 4693537 - DNA, 25 bp, Homo sapien
agggaggacactgaattggagcgat

SEQ ID NO: 4693538 - DNA, 25 bp, Homo sapien
taacagctgtagagcttcaactcca

SEQ ID NO: 4693539 - DNA, 25 bp, Homo sapien
tgctccaagttctgacacagactct

SEQ ID NO: 4693540 - DNA, 25 bp, Homo sapien
gagcttcaactccattactgccaga

SEQ ID NO: 4693541 - DNA, 25 bp, Homo sapien
tcatgttctaacagctgtagagctt

SEQ ID NO: 4693542 - DNA, 25 bp, Homo sapien
caatttcttgcaagcgatcttcatc

SEQ ID NO: 4693543 - DNA, 25 bp, Homo sapien
agcttatcatcaaggttatcctgtg

SEQ ID NO: 4693544 - DNA, 25 bp, Homo sapien
tctgttaatcccatcatgtcacgaa

SEQ ID NO: 4693545 - DNA, 25 bp, Homo sapien
gatatgtccctatcatctgttaatc

SEQ ID NO: 4693546 - DNA, 25 bp, Homo sapien
ctgcctaacatgttctctgctgcag

SEQ ID NO: 4693547 - DNA, 25 bp, Homo sapien
actgcctaacatgttctctgctgca

SEQ ID NO: 4693548 - DNA, 25 bp, Homo sapien
ctgggaggcacagcaaactgcctaa

SEQ ID NO: 4693549 - DNA, 25 bp, Homo sapien
ggaggcacagcaaactgcctaacat

SEQ ID NO: 4693550 - DNA, 25 bp, Homo sapien
agaaccagtgcaggggtcaagaagc

SEQ ID NO: 4693551 - DNA, 25 bp, Homo sapien
gtagaaccagtgcaggggtcaagaa

SEQ ID NO: 4693552 - DNA, 25 bp, Homo sapien
ctgatatggtagaaccagtgcaggg

SEQ ID NO: 4693553 - DNA, 25 bp, Homo sapien
tatggtagaaccagtgcaggggtca

SEQ ID NO: 4693554 - DNA, 25 bp, Homo sapien
tacactccaagcttcacttgttgtc

SEQ ID NO: 4693555 - DNA, 25 bp, Homo sapien
ctctacactccaagcttcacttgtt

SEQ ID NO: 4693556 - DNA, 25 bp, Homo sapien
acactccaagcttcacttgttgtct

SEQ ID NO: 4693557 - DNA, 25 bp, Homo sapien
tggcaatacctctacactccaagct

SEQ ID NO: 4693558 - DNA, 25 bp, Homo sapien
cctatgaatactcaacagctggtaa

SEQ ID NO: 4693559 - DNA, 25 bp, Homo sapien
gattaacatgtgaactggacaagag

SEQ ID NO: 4693560 - DNA, 25 bp, Homo sapien
gctaccagggcatgaataaaatcag

SEQ ID NO: 4693561 - DNA, 25 bp, Homo sapien
caagagagtatggaatagcctggta

SEQ ID NO: 4693562 - DNA, 25 bp, Homo sapien
gatgtgctacccagtccagaacagc

SEQ ID NO: 4693563 - DNA, 25 bp, Homo sapien
gacgctcctcctgctttaggtctgg

SEQ ID NO: 4693564 - DNA, 25 bp, Homo sapien
tccctgacatccgtatcatcagatg

SEQ ID NO: 4693565 - DNA, 25 bp, Homo sapien
ctggggcgggaactgacctccctga

SEQ ID NO: 4693566 - DNA, 25 bp, Homo sapien
catgtctggactagtgacagaatct

SEQ ID NO: 4693567 - DNA, 25 bp, Homo sapien
tacccccaaaatcagagctgcactc

SEQ ID NO: 4693568 - DNA, 25 bp, Homo sapien
catccatgtctggactagtgacaga

SEQ ID NO: 4693569 - DNA, 25 bp, Homo sapien
caggtcttcaatcttattgggaata

SEQ ID NO: 4693570 - DNA, 25 bp, Homo sapien
aatagctacataaattccaataagc

SEQ ID NO: 4693571 - DNA, 25 bp, Homo sapien
taagtcatttcatattccttaatgc

SEQ ID NO: 4693572 - DNA, 25 bp, Homo sapien
taaattccatgtagtatgttctagt

SEQ ID NO: 4693573 - DNA, 25 bp, Homo sapien
taaattccaataagcagttacatca

SEQ ID NO: 4693574 - DNA, 25 bp, Homo sapien
gcaccgtaagtacaaatgtcgacac

SEQ ID NO: 4693575 - DNA, 25 bp, Homo sapien
taaagggcatatactactggtaggg

SEQ ID NO: 4693576 - DNA, 25 bp, Homo sapien
tcgacacggtgaaaatggacagtta

SEQ ID NO: 4693577 - DNA, 25 bp, Homo sapien
tgtggtgcccttgcatcctgctagg

SEQ ID NO: 4693578 - DNA, 25 bp, Homo sapien
tcaaataatccataagtgcttcttg

SEQ ID NO: 4693579 - DNA, 25 bp, Homo sapien
ctcaaataatccataagtgcttctt

SEQ ID NO: 4693580 - DNA, 25 bp, Homo sapien
tattagttgcttctctaagaaacag

SEQ ID NO: 4693581 - DNA, 25 bp, Homo sapien
gaaaaggaacaatatgttagtagcc

SEQ ID NO: 4693582 - DNA, 25 bp, Homo sapien
ctcatgcaggtagacacacgtttcc

SEQ ID NO: 4693583 - DNA, 25 bp, Homo sapien
tagctacaaggtagaatttgaaacc

SEQ ID NO: 4693584 - DNA, 25 bp, Homo sapien
ctgcttcaatgtgttgaaaatgttg

SEQ ID NO: 4693585 - DNA, 25 bp, Homo sapien
gcttcaatgtgttgaaaatgttgtt

SEQ ID NO: 4693586 - DNA, 25 bp, Homo sapien
tgcttcaatgtgttgaaaatgttgt

SEQ ID NO: 4693587 - DNA, 25 bp, Homo sapien
gaagagaatgacacattttttgcaa

SEQ ID NO: 4693588 - DNA, 25 bp, Homo sapien
aaatgaagagaatgacacatttttt

SEQ ID NO: 4693589 - DNA, 25 bp, Homo sapien
atgaagagaatgacacattttttgc

SEQ ID NO: 4693590 - DNA, 25 bp, Homo sapien
ttaatggtaacacaaaaaagcatta

SEQ ID NO: 4693591 - DNA, 25 bp, Homo sapien
tggtaatacaagagtctctctgaac

SEQ ID NO: 4693592 - DNA, 25 bp, Homo sapien
tacccattaaatggtaatacaagag

SEQ ID NO: 4693593 - DNA, 25 bp, Homo sapien
tgagagtactattatgccttttgat

SEQ ID NO: 4693594 - DNA, 25 bp, Homo sapien
tgttctatagttagatcattataaa

SEQ ID NO: 4693595 - DNA, 25 bp, Homo sapien
gacagtggatcaaacatggccagca

SEQ ID NO: 4693596 - DNA, 25 bp, Homo sapien
agacagtggatcaaacatggccagc

SEQ ID NO: 4693597 - DNA, 25 bp, Homo sapien
gcgatggcctagcatagtgaacctt

SEQ ID NO: 4693598 - DNA, 25 bp, Homo sapien
catgggaaccaaagtttggcaacct

SEQ ID NO: 4693599 - DNA, 25 bp, Homo sapien
tggtggatgcgatggcctagcatag

SEQ ID NO: 4693600 - DNA, 25 bp, Homo sapien
cctagcatagtgaacctttggcctt

SEQ ID NO: 4693601 - DNA, 25 bp, Homo sapien
caaagaagtagcaccaatggctgca

SEQ ID NO: 4693602 - DNA, 25 bp, Homo sapien
ggagttctcgctcttcatttcctgg

SEQ ID NO: 4693603 - DNA, 25 bp, Homo sapien
ggtcactcatgggtctccggacaga

SEQ ID NO: 4693604 - DNA, 25 bp, Homo sapien
tgcttcgaactagtctctcagggta

SEQ ID NO: 4693605 - DNA, 25 bp, Homo sapien
catcgctatctttgcgttcttcagt

SEQ ID NO: 4693606 - DNA, 25 bp, Homo sapien
tctcatcatcgctatctttgcgttc

SEQ ID NO: 4693607 - DNA, 25 bp, Homo sapien
ggcatggctgaaacaaaacgttttc

SEQ ID NO: 4693608 - DNA, 25 bp, Homo sapien
tgatttctcatcatcgctatctttg

SEQ ID NO: 4693609 - DNA, 25 bp, Homo sapien
tcctgagtgccaccgtgctgagaag

SEQ ID NO: 4693610 - DNA, 25 bp, Homo sapien
tactcggaagttaactggtgtgcca

SEQ ID NO: 4693611 - DNA, 25 bp, Homo sapien
agtatggcgtgaaagcagctctccc

SEQ ID NO: 4693612 - DNA, 25 bp, Homo sapien
tataacatactgcactactcggaag

SEQ ID NO: 4693613 - DNA, 25 bp, Homo sapien
tctttctttctaaatggtataggag

SEQ ID NO: 4693614 - DNA, 25 bp, Homo sapien
caggccccagatcatctttgtcttt

SEQ ID NO: 4693615 - DNA, 25 bp, Homo sapien
tctgtcaggccccagatcatctttg

SEQ ID NO: 4693616 - DNA, 25 bp, Homo sapien
ctgtgagtgttgagaatctgtcagg

SEQ ID NO: 4693617 - DNA, 25 bp, Homo sapien
cacatggtattcatgtctccgtgaa

SEQ ID NO: 4693618 - DNA, 25 bp, Homo sapien
tctccgtgaaattgtagtaaactgc

SEQ ID NO: 4693619 - DNA, 25 bp, Homo sapien
taagtagcatgctcatcggctcttc

SEQ ID NO: 4693620 - DNA, 25 bp, Homo sapien
tacagaagacgaaatcaagacatag

SEQ ID NO: 4693621 - DNA, 25 bp, Homo sapien
ccagtagcataatcccaaaggcaga

SEQ ID NO: 4693622 - DNA, 25 bp, Homo sapien
gaaattgggaagagtagctccacct

SEQ ID NO: 4693623 - DNA, 25 bp, Homo sapien
ggtctgagagccttgccaaagcagg

SEQ ID NO: 4693624 - DNA, 25 bp, Homo sapien
gagagtgagagaattagccccttgg

SEQ ID NO: 4693625 - DNA, 25 bp, Homo sapien
gggctggtccgtttaatggcattcc

SEQ ID NO: 4693626 - DNA, 25 bp, Homo sapien
tcagccacctgagcttgtgcactga

SEQ ID NO: 4693627 - DNA, 25 bp, Homo sapien
actttcatagtttgccattgctcca

SEQ ID NO: 4693628 - DNA, 25 bp, Homo sapien
tgagcttgtgcactgagtctagggc

SEQ ID NO: 4693629 - DNA, 25 bp, Homo sapien
taaaagtttactactcaaatctctg

SEQ ID NO: 4693630 - DNA, 25 bp, Homo sapien
ctcaaatctctgtcatgattatcac

SEQ ID NO: 4693631 - DNA, 25 bp, Homo sapien
gtttactactcaaatctctgtcatg

SEQ ID NO: 4693632 - DNA, 25 bp, Homo sapien
tatcactatgatataaaagtttact

SEQ ID NO: 4693633 - DNA, 25 bp, Homo sapien
tttggaatattatggcactagtagg

SEQ ID NO: 4693634 - DNA, 25 bp, Homo sapien
ccaagaaacggatacccaggttcat

SEQ ID NO: 4693635 - DNA, 25 bp, Homo sapien
tgtatcaagagactagttgctgaga

SEQ ID NO: 4693636 - DNA, 25 bp, Homo sapien
tagtaggtattcagagcaactcaag

SEQ ID NO: 4693637 - DNA, 25 bp, Homo sapien
gggagaatcatgtgcactttcacca

SEQ ID NO: 4693638 - DNA, 25 bp, Homo sapien
gatgttctgcagtgcttcgtcacgg

SEQ ID NO: 4693639 - DNA, 25 bp, Homo sapien
gaaagctgaatcctgcgggtgggct

SEQ ID NO: 4693640 - DNA, 25 bp, Homo sapien
cagagtctgggagatcatcagccga

SEQ ID NO: 4693641 - DNA, 25 bp, Homo sapien
tgggctccagcgatccacctgtctt

SEQ ID NO: 4693642 - DNA, 25 bp, Homo sapien
gggctccagcgatccacctgtcttg

SEQ ID NO: 4693643 - DNA, 25 bp, Homo sapien
acctgtcttggcctcctaaagtgct

SEQ ID NO: 4693644 - DNA, 25 bp, Homo sapien
tgtcttggcctcctaaagtgctggg

SEQ ID NO: 4693645 - DNA, 25 bp, Homo sapien
tgggaaggcaacagagtccgcagag

SEQ ID NO: 4693646 - DNA, 25 bp, Homo sapien
ctgggaaggcaacagagtccgcaga

SEQ ID NO: 4693647 - DNA, 25 bp, Homo sapien
gggaaggcaacagagtccgcagagc

SEQ ID NO: 4693648 - DNA, 25 bp, Homo sapien
ccattccttgttgaatgggtcagca

SEQ ID NO: 4693649 - DNA, 25 bp, Homo sapien
tctgtgtggtctggtaaaccattcc

SEQ ID NO: 4693650 - DNA, 25 bp, Homo sapien
gtctggtaaaccattccttgttgaa

SEQ ID NO: 4693651 - DNA, 25 bp, Homo sapien
taaaccattccttgttgaatgggtc

SEQ ID NO: 4693652 - DNA, 25 bp, Homo sapien
tttaagaagcatacaatttcattgt

SEQ ID NO: 4693653 - DNA, 25 bp, Homo sapien
cttttaagaagcatacaatttcatt

SEQ ID NO: 4693654 - DNA, 25 bp, Homo sapien
ttttaagaagcatacaatttcattg

SEQ ID NO: 4693655 - DNA, 25 bp, Homo sapien
tacaagtcctattatcaaaacggca

SEQ ID NO: 4693656 - DNA, 25 bp, Homo sapien
gaagttgagccattagattcttatc

SEQ ID NO: 4693657 - DNA, 25 bp, Homo sapien
cacacagcgcattgtttcttgaagt

SEQ ID NO: 4693658 - DNA, 25 bp, Homo sapien
gtagtcctcagcaatcgaagccagc

SEQ ID NO: 4693659 - DNA, 25 bp, Homo sapien
taagcccctctgcatacttggtgta

SEQ ID NO: 4693660 - DNA, 25 bp, Homo sapien
catggtagagactgatcatggtgcc

SEQ ID NO: 4693661 - DNA, 25 bp, Homo sapien
tagagtgcccattccctaagccttg

SEQ ID NO: 4693662 - DNA, 25 bp, Homo sapien
caaagtagcatgtcaggctgcagac

SEQ ID NO: 4693663 - DNA, 25 bp, Homo sapien
tcgacaacgagtgagataagcaata

SEQ ID NO: 4693664 - DNA, 25 bp, Homo sapien
cacacagacagtggtaaagtatcga

SEQ ID NO: 4693665 - DNA, 25 bp, Homo sapien
tttgctctcaagcagtaatctcaca

SEQ ID NO: 4693666 - DNA, 25 bp, Homo sapien
ggtctgtagtccttgtcgacaacga

SEQ ID NO: 4693667 - DNA, 25 bp, Homo sapien
gcagacaccatgatcttaaagccaa

SEQ ID NO: 4693668 - DNA, 25 bp, Homo sapien
atcactagctatgcagacaccatga

SEQ ID NO: 4693669 - DNA, 25 bp, Homo sapien
tcactagctatgcagacaccatgat

SEQ ID NO: 4693670 - DNA, 25 bp, Homo sapien
cagacaccatgatcttaaagccaaa

SEQ ID NO: 4693671 - DNA, 25 bp, Homo sapien
gttttgccatatgacatcctgggcc

SEQ ID NO: 4693672 - DNA, 25 bp, Homo sapien
tcgcgttttgccatatgacatcctg

SEQ ID NO: 4693673 - DNA, 25 bp, Homo sapien
gaaactgcagaaaatcttctacctg

SEQ ID NO: 4693674 - DNA, 25 bp, Homo sapien
tctacctgagcagttttatcgtcag

SEQ ID NO: 4693675 - DNA, 25 bp, Homo sapien
gctcaatggccagctgtgcatcttg

SEQ ID NO: 4693676 - DNA, 25 bp, Homo sapien
cagctgtgcatcttgaagctgttct

SEQ ID NO: 4693677 - DNA, 25 bp, Homo sapien
aatggccagctgtgcatcttgaagc

SEQ ID NO: 4693678 - DNA, 25 bp, Homo sapien
gcttcgctcaatggccagctgtgca

SEQ ID NO: 4693679 - DNA, 25 bp, Homo sapien
gaagtatgtccccatcttgattagg

SEQ ID NO: 4693680 - DNA, 25 bp, Homo sapien
tggtcgcgaagtatgtccccatctt

SEQ ID NO: 4693681 - DNA, 25 bp, Homo sapien
cgagcttgaaaatccggttcatcac

SEQ ID NO: 4693682 - DNA, 25 bp, Homo sapien
tcttgattagggtagaaggcgagct

SEQ ID NO: 4693683 - DNA, 25 bp, Homo sapien
tcaaaagccagaaaccaaagatatt

SEQ ID NO: 4693684 - DNA, 25 bp, Homo sapien
gaggaagtagaaggatcaaaagcca

SEQ ID NO: 4693685 - DNA, 25 bp, Homo sapien
gcttgcctaagctacacaggtgtca

SEQ ID NO: 4693686 - DNA, 25 bp, Homo sapien
ggctgctcgtgttccttccaattcc

SEQ ID NO: 4693687 - DNA, 25 bp, Homo sapien
ctctggtatctgaagagctctgtga

SEQ ID NO: 4693688 - DNA, 25 bp, Homo sapien
ctgtgatttgcagtcactactttag

SEQ ID NO: 4693689 - DNA, 25 bp, Homo sapien
gatttgcagtcactactttagacaa

SEQ ID NO: 4693690 - DNA, 25 bp, Homo sapien
tctctggatatgttcatgaagaacc

SEQ ID NO: 4693691 - DNA, 25 bp, Homo sapien
tcttcaggaacttcgcagttagact

SEQ ID NO: 4693692 - DNA, 25 bp, Homo sapien
ggctttctactatttcataccaggg

SEQ ID NO: 4693693 - DNA, 25 bp, Homo sapien
cacgcagcatttagttaacattacc

SEQ ID NO: 4693694 - DNA, 25 bp, Homo sapien
cagttccttgaacacgtggtaacat

SEQ ID NO: 4693695 - DNA, 25 bp, Homo sapien
ggccatggtgcttctcgaagataaa

SEQ ID NO: 4693696 - DNA, 25 bp, Homo sapien
caggctcaggaggttcataatcgta

SEQ ID NO: 4693697 - DNA, 25 bp, Homo sapien
aggatgcactgcactttgtcccggg

SEQ ID NO: 4693698 - DNA, 25 bp, Homo sapien
cataatcgtagagcacattctcagg

SEQ ID NO: 4693699 - DNA, 25 bp, Homo sapien
agtagacagcaaacagggtggattt

SEQ ID NO: 4693700 - DNA, 25 bp, Homo sapien
acagtagacagcaaacagggtggat

SEQ ID NO: 4693701 - DNA, 25 bp, Homo sapien
cagtagacagcaaacagggtggatt

SEQ ID NO: 4693702 - DNA, 25 bp, Homo sapien
tagacagcaaacagggtggatttgc

SEQ ID NO: 4693703 - DNA, 25 bp, Homo sapien
tgctgtgaactgcatccaccaatag

SEQ ID NO: 4693704 - DNA, 25 bp, Homo sapien
cagctagcataaaagctactgatat

SEQ ID NO: 4693705 - DNA, 25 bp, Homo sapien
gtgaactgcatccaccaataggact

SEQ ID NO: 4693706 - DNA, 25 bp, Homo sapien
ggttttaatgaattctactgctgct

SEQ ID NO: 4693707 - DNA, 25 bp, Homo sapien
cccaaagacgagagaacctgcttgt

SEQ ID NO: 4693708 - DNA, 25 bp, Homo sapien
tctgattaacagtctgctgccttgg

SEQ ID NO: 4693709 - DNA, 25 bp, Homo sapien
caagaatggaggtctagacatttcc

SEQ ID NO: 4693710 - DNA, 25 bp, Homo sapien
tatagataatgccactaacgcacca

SEQ ID NO: 4693711 - DNA, 25 bp, Homo sapien
caaaggctgaagtaaatggactctc

SEQ ID NO: 4693712 - DNA, 25 bp, Homo sapien
taatcagtctatctcctaatgcagg

SEQ ID NO: 4693713 - DNA, 25 bp, Homo sapien
aatgcaggctcacaaacttccacgg

SEQ ID NO: 4693714 - DNA, 25 bp, Homo sapien
ggaatagacttagcaaccattgcag

SEQ ID NO: 4693715 - DNA, 25 bp, Homo sapien
cacaggtgtcacagatgtcaaatct

SEQ ID NO: 4693716 - DNA, 25 bp, Homo sapien
tccgccagctatggagtcatgagca

SEQ ID NO: 4693717 - DNA, 25 bp, Homo sapien
ttttcagaggaaaccttagctgccc

SEQ ID NO: 4693718 - DNA, 25 bp, Homo sapien
taactagtggctgctgaatgtttcc

SEQ ID NO: 4693719 - DNA, 25 bp, Homo sapien
caccaattgaggaagtgaaccccac

SEQ ID NO: 4693720 - DNA, 25 bp, Homo sapien
ggtgaattcccctagtgcatggccg

SEQ ID NO: 4693721 - DNA, 25 bp, Homo sapien
tgaattgaacccttgctgagctcag

SEQ ID NO: 4693722 - DNA, 25 bp, Homo sapien
caaacaataggaaaaagagtgcccg

SEQ ID NO: 4693723 - DNA, 25 bp, Homo sapien
tataaaatagatgacagaaacataa

SEQ ID NO: 4693724 - DNA, 25 bp, Homo sapien
ctgaatataaaatagatgacagaaa

SEQ ID NO: 4693725 - DNA, 25 bp, Homo sapien
aatagatgacagaaacataaaaccc

SEQ ID NO: 4693726 - DNA, 25 bp, Homo sapien
tagatgacagaaacataaaaccctg

SEQ ID NO: 4693727 - DNA, 25 bp, Homo sapien
ttccttcttgtgccatacttagcaa

SEQ ID NO: 4693728 - DNA, 25 bp, Homo sapien
gaacatcagaacattcggaagtcaa

SEQ ID NO: 4693729 - DNA, 25 bp, Homo sapien
gatgtgtgtgaattcacggagaaca

SEQ ID NO: 4693730 - DNA, 25 bp, Homo sapien
gcaaacacccttattgttcagataa

SEQ ID NO: 4693731 - DNA, 25 bp, Homo sapien
tagggtcgccagtgatcaaaatgta

SEQ ID NO: 4693732 - DNA, 25 bp, Homo sapien
gccagtgatcaaaatgtaaagggac

SEQ ID NO: 4693733 - DNA, 25 bp, Homo sapien
aaggaaaatagggtcgccagtgatc

SEQ ID NO: 4693734 - DNA, 25 bp, Homo sapien
tgtcaccgccacagccacacgaaaa

SEQ ID NO: 4693735 - DNA, 25 bp, Homo sapien
caaatgcctcagtcagacgcagata

SEQ ID NO: 4693736 - DNA, 25 bp, Homo sapien
gcagtcctggaaacctctagaacaa

SEQ ID NO: 4693737 - DNA, 25 bp, Homo sapien
tcttgcctttgcaggtcgctgtgcg

SEQ ID NO: 4693738 - DNA, 25 bp, Homo sapien
ctctagaacaaggatcacagaagca

SEQ ID NO: 4693739 - DNA, 25 bp, Homo sapien
gatttctagcagaacggggcgctgt

SEQ ID NO: 4693740 - DNA, 25 bp, Homo sapien
gccgcagaggcagcgtgctgcagtg

SEQ ID NO: 4693741 - DNA, 25 bp, Homo sapien
aggaaactggccgacggcagactcg

SEQ ID NO: 4693742 - DNA, 25 bp, Homo sapien
gaggacgccgatttgtagatgccac

SEQ ID NO: 4693743 - DNA, 25 bp, Homo sapien
tggcactacagatgcccgggtgtct

SEQ ID NO: 4693744 - DNA, 25 bp, Homo sapien
tgcccttgacggactcgagtgcaca

SEQ ID NO: 4693745 - DNA, 25 bp, Homo sapien
gaagtaaacaccaggatcaggataa

SEQ ID NO: 4693746 - DNA, 25 bp, Homo sapien
tcaggataataaggacctgctgtgg

SEQ ID NO: 4693747 - DNA, 25 bp, Homo sapien
ccttgacactgggaagtggccctgg

SEQ ID NO: 4693748 - DNA, 25 bp, Homo sapien
tgatctgctgatgccggctgggcac

SEQ ID NO: 4693749 - DNA, 25 bp, Homo sapien
tgaccttgacactgggaagtggccc

SEQ ID NO: 4693750 - DNA, 25 bp, Homo sapien
catgaccttgacactgggaagtggc

SEQ ID NO: 4693751 - DNA, 25 bp, Homo sapien
tcttgattacccacatgttttccag

SEQ ID NO: 4693752 - DNA, 25 bp, Homo sapien
taatattcccctgctccgggcaggt

SEQ ID NO: 4693753 - DNA, 25 bp, Homo sapien
ggcaccggtagccttcttgattacc

SEQ ID NO: 4693754 - DNA, 25 bp, Homo sapien
catcatgggctcagtctgtgcacag

SEQ ID NO: 4693755 - DNA, 25 bp, Homo sapien
gacatattgagaaaaattgggattt

SEQ ID NO: 4693756 - DNA, 25 bp, Homo sapien
ctgccgtggacatattgagaaaaat

SEQ ID NO: 4693757 - DNA, 25 bp, Homo sapien
gccgtggacatattgagaaaaattg

SEQ ID NO: 4693758 - DNA, 25 bp, Homo sapien
cgtggacatattgagaaaaattggg

SEQ ID NO: 4693759 - DNA, 25 bp, Homo sapien
tgcatgcgaccaaataatcacgtat

SEQ ID NO: 4693760 - DNA, 25 bp, Homo sapien
tcattgactcagcaaacctctcttc

SEQ ID NO: 4693761 - DNA, 25 bp, Homo sapien
tcttcctggtccaccgtgcatgcga

SEQ ID NO: 4693762 - DNA, 25 bp, Homo sapien
cccctgcaaacttgtcgacagtatt

SEQ ID NO: 4693763 - DNA, 25 bp, Homo sapien
catcgtgcgaatgcttccagagcac

SEQ ID NO: 4693764 - DNA, 25 bp, Homo sapien
tagccatcgtgcgaatgcttccaga

SEQ ID NO: 4693765 - DNA, 25 bp, Homo sapien
gccatcgtgcgaatgcttccagagc

SEQ ID NO: 4693766 - DNA, 25 bp, Homo sapien
ttagccatcgtgcgaatgcttccag

SEQ ID NO: 4693767 - DNA, 25 bp, Homo sapien
cctctgacagtccagtgaattcatc

SEQ ID NO: 4693768 - DNA, 25 bp, Homo sapien
tgctggctcagcaccctctgacagt

SEQ ID NO: 4693769 - DNA, 25 bp, Homo sapien
acgggcctggcgaagcctctccttg

SEQ ID NO: 4693770 - DNA, 25 bp, Homo sapien
tctggaagggaggttcatgcagcct

SEQ ID NO: 4693771 - DNA, 25 bp, Homo sapien
gctgagcccacggtacggtcaccat

SEQ ID NO: 4693772 - DNA, 25 bp, Homo sapien
ggggatcagaaaggacttggcgcac

SEQ ID NO: 4693773 - DNA, 25 bp, Homo sapien
gatcagaaaggacttggcgcacagc

SEQ ID NO: 4693774 - DNA, 25 bp, Homo sapien
tcaaggggatcagaaaggacttggc

SEQ ID NO: 4693775 - DNA, 25 bp, Homo sapien
tgcagcagacagcccggcccggctc

SEQ ID NO: 4693776 - DNA, 25 bp, Homo sapien
cccggcccggctcaggcctcggact

SEQ ID NO: 4693777 - DNA, 25 bp, Homo sapien
ctgcagcagacagcccggcccggct

SEQ ID NO: 4693778 - DNA, 25 bp, Homo sapien
cccggctcaggcctcggactcggtc

SEQ ID NO: 4693779 - DNA, 25 bp, Homo sapien
tctggctcccggttcgtctcttcct

SEQ ID NO: 4693780 - DNA, 25 bp, Homo sapien
ggcgccccgtgagtcccgcggtgta

SEQ ID NO: 4693781 - DNA, 25 bp, Homo sapien
gattccgtagctagattcccggccc

SEQ ID NO: 4693782 - DNA, 25 bp, Homo sapien
gtgagtcccgcggtgtacccggctc

SEQ ID NO: 4693783 - DNA, 25 bp, Homo sapien
tcggctccctcgcacgcccgcgcgg

SEQ ID NO: 4693784 - DNA, 25 bp, Homo sapien
gggacccgtttctggagccttcgca

SEQ ID NO: 4693785 - DNA, 25 bp, Homo sapien
tggagccttcgcagccgaggcccag

SEQ ID NO: 4693786 - DNA, 25 bp, Homo sapien
gcgcggctgggaaggcccgagggta

SEQ ID NO: 4693787 - DNA, 25 bp, Homo sapien
ctgtgacagggggtcatgcttgggt

SEQ ID NO: 4693788 - DNA, 25 bp, Homo sapien
ggtcatgcttgggtttcaagccggg

SEQ ID NO: 4693789 - DNA, 25 bp, Homo sapien
catgcttgggtttcaagccggggca

SEQ ID NO: 4693790 - DNA, 25 bp, Homo sapien
acagggggtcatgcttgggtttcaa

SEQ ID NO: 4693791 - DNA, 25 bp, Homo sapien
gcagccctgaaggtggtttaggaac

SEQ ID NO: 4693792 - DNA, 25 bp, Homo sapien
gttcacccagcacatgggatcaggg

SEQ ID NO: 4693793 - DNA, 25 bp, Homo sapien
tttaggaactcaggacttggtccag

SEQ ID NO: 4693794 - DNA, 25 bp, Homo sapien
ggctcggaagaacccagttcaccca

SEQ ID NO: 4693795 - DNA, 25 bp, Homo sapien
accatgttgcccagccggtctggaa

SEQ ID NO: 4693796 - DNA, 25 bp, Homo sapien
cgcctggctaactttttttcatatt

SEQ ID NO: 4693797 - DNA, 25 bp, Homo sapien
catgttgcccagccggtctggaact

SEQ ID NO: 4693798 - DNA, 25 bp, Homo sapien
tggaattacaggcacgcggacgcct

SEQ ID NO: 4693799 - DNA, 25 bp, Homo sapien
tccctcctctccactgaaaacccaa

SEQ ID NO: 4693800 - DNA, 25 bp, Homo sapien
cctcctctccactgaaaacccaaca

SEQ ID NO: 4693801 - DNA, 25 bp, Homo sapien
ctcctctccactgaaaacccaacac

SEQ ID NO: 4693802 - DNA, 25 bp, Homo sapien
cctctccactgaaaacccaacacca

SEQ ID NO: 4693803 - DNA, 25 bp, Homo sapien
ctgggtacctggcagtgccgcctga

SEQ ID NO: 4693804 - DNA, 25 bp, Homo sapien
gggtacctggcagtgccgcctgaag

SEQ ID NO: 4693805 - DNA, 25 bp, Homo sapien
tgggtacctggcagtgccgcctgaa

SEQ ID NO: 4693806 - DNA, 25 bp, Homo sapien
gcacaaactgttccacgaggtgcaa

SEQ ID NO: 4693807 - DNA, 25 bp, Homo sapien
acaaactgttccacgaggtgcaaga

SEQ ID NO: 4693808 - DNA, 25 bp, Homo sapien
acggcactcgcctcagagcggccgg

SEQ ID NO: 4693809 - DNA, 25 bp, Homo sapien
acagccagcgctgctccacggcact

SEQ ID NO: 4693810 - DNA, 25 bp, Homo sapien
ttacaagacctgaagagcaaaccaa

SEQ ID NO: 4693811 - DNA, 25 bp, Homo sapien
tttacaagacctgaagagcaaacca

SEQ ID NO: 4693812 - DNA, 25 bp, Homo sapien
atttacaagacctgaagagcaaacc

SEQ ID NO: 4693813 - DNA, 25 bp, Homo sapien
catggcctggcagaggcgtctgttc

SEQ ID NO: 4693814 - DNA, 25 bp, Homo sapien
cctggcagaggcgtctgttctcgga

SEQ ID NO: 4693815 - DNA, 25 bp, Homo sapien
cacatggcctggcagaggcgtctgt

SEQ ID NO: 4693816 - DNA, 25 bp, Homo sapien
tggcctggcagaggcgtctgttctc

SEQ ID NO: 4693817 - DNA, 25 bp, Homo sapien
gggttcttagcatcatttcactacg

SEQ ID NO: 4693818 - DNA, 25 bp, Homo sapien
tcttagcatcatttcactacggcaa

SEQ ID NO: 4693819 - DNA, 25 bp, Homo sapien
aaagcaggggttcttagcatcattt

SEQ ID NO: 4693820 - DNA, 25 bp, Homo sapien
tagcatcatttcactacggcaagac

SEQ ID NO: 4693821 - DNA, 25 bp, Homo sapien
atggtcagggacctcagcagccacc

SEQ ID NO: 4693822 - DNA, 25 bp, Homo sapien
tccatggtcagggacctcagcagcc

SEQ ID NO: 4693823 - DNA, 25 bp, Homo sapien
cttccatggtcagggacctcagcag

SEQ ID NO: 4693824 - DNA, 25 bp, Homo sapien
ccatggtcagggacctcagcagcca

SEQ ID NO: 4693825 - DNA, 25 bp, Homo sapien
acctcccagacatggaggccagctc

SEQ ID NO: 4693826 - DNA, 25 bp, Homo sapien
cacagcgccgcacctcccagacatg

SEQ ID NO: 4693827 - DNA, 25 bp, Homo sapien
tggaggccagctcgccacccatgtg

SEQ ID NO: 4693828 - DNA, 25 bp, Homo sapien
atggaggccagctcgccacccatgt

SEQ ID NO: 4693829 - DNA, 25 bp, Homo sapien
ccagcctcggcatcgcctgagagac

SEQ ID NO: 4693830 - DNA, 25 bp, Homo sapien
atcgcctgagagacctgacaccact

SEQ ID NO: 4693831 - DNA, 25 bp, Homo sapien
acagcaacccgccagcagctgactc

SEQ ID NO: 4693832 - DNA, 25 bp, Homo sapien
tgacaccactctggcggggcaggtt

SEQ ID NO: 4693833 - DNA, 25 bp, Homo sapien
tgtccctcctgcggtgatgtcctta

SEQ ID NO: 4693834 - DNA, 25 bp, Homo sapien
gtccctcctgcggtgatgtccttac

SEQ ID NO: 4693835 - DNA, 25 bp, Homo sapien
tccctcctgcggtgatgtccttact

SEQ ID NO: 4693836 - DNA, 25 bp, Homo sapien
ctttttcaagcaggcggaaagctgc

SEQ ID NO: 4693837 - DNA, 25 bp, Homo sapien
agggagacctgtgtccgtgccgtcc

SEQ ID NO: 4693838 - DNA, 25 bp, Homo sapien
caagtgtaggtttcagctggcagtt

SEQ ID NO: 4693839 - DNA, 25 bp, Homo sapien
gctgctgtttctcacgtttcaggga

SEQ ID NO: 4693840 - DNA, 25 bp, Homo sapien
aaaagctatggttcgatttctcaga

SEQ ID NO: 4693841 - DNA, 25 bp, Homo sapien
tggtgtgtccaaggccgtgtcactt

SEQ ID NO: 4693842 - DNA, 25 bp, Homo sapien
cccatattgaacaggcagattggaa

SEQ ID NO: 4693843 - DNA, 25 bp, Homo sapien
catttgcttcgagggtagtgtctta

SEQ ID NO: 4693844 - DNA, 25 bp, Homo sapien
cctgcgattgcaggcgcgtgccgcc

SEQ ID NO: 4693845 - DNA, 25 bp, Homo sapien
gcgcgtgccgccacgcctgactggc

SEQ ID NO: 4693846 - DNA, 25 bp, Homo sapien
gccacgcctgactggctttcgtatt

SEQ ID NO: 4693847 - DNA, 25 bp, Homo sapien
cgagtgcctgcgattgcaggcgcgt

SEQ ID NO: 4693848 - DNA, 25 bp, Homo sapien
caatagtgtgattgatgaggtgcac

SEQ ID NO: 4693849 - DNA, 25 bp, Homo sapien
ggctcgcctttcaagcagacaatag

SEQ ID NO: 4693850 - DNA, 25 bp, Homo sapien
cattcagtgaaggaggcgaatgcct

SEQ ID NO: 4693851 - DNA, 25 bp, Homo sapien
gatatgacatttacaaggctcgcct

SEQ ID NO: 4693852 - DNA, 25 bp, Homo sapien
cattttgattgatgttggtacacga

SEQ ID NO: 4693853 - DNA, 25 bp, Homo sapien
tcagtctttcccattgaattccaca

SEQ ID NO: 4693854 - DNA, 25 bp, Homo sapien
agctgccagggaagtcgacattttg

SEQ ID NO: 4693855 - DNA, 25 bp, Homo sapien
tgttggtacacgagtcagtctttcc

SEQ ID NO: 4693856 - DNA, 25 bp, Homo sapien
cattatacgtcttgctatcgagcgg

SEQ ID NO: 4693857 - DNA, 25 bp, Homo sapien
gcggtaataggcacagggccttccc

SEQ ID NO: 4693858 - DNA, 25 bp, Homo sapien
taagagaatgttaacgcggtaatag

SEQ ID NO: 4693859 - DNA, 25 bp, Homo sapien
agggccttccccattatacgtcttg

SEQ ID NO: 4693860 - DNA, 25 bp, Homo sapien
tatggtgttcctgaaataggtctaa

SEQ ID NO: 4693861 - DNA, 25 bp, Homo sapien
caaattccagcgttcgattagtaaa

SEQ ID NO: 4693862 - DNA, 25 bp, Homo sapien
actgaccagggtacagcagccatct

SEQ ID NO: 4693863 - DNA, 25 bp, Homo sapien
ctttaccaaagaccacacgtactga

SEQ ID NO: 4693864 - DNA, 25 bp, Homo sapien
cctgtggcaacatcttttaagtgga

SEQ ID NO: 4693865 - DNA, 25 bp, Homo sapien
ggtccttcctgacactgatggatgg

SEQ ID NO: 4693866 - DNA, 25 bp, Homo sapien
gattccacagaaaaccactcatcca

SEQ ID NO: 4693867 - DNA, 25 bp, Homo sapien
cctgtccatcctgtgtcaatcagaa

SEQ ID NO: 4693868 - DNA, 25 bp, Homo sapien
caaagggagtcctcattgctggaga

SEQ ID NO: 4693869 - DNA, 25 bp, Homo sapien
gctactctttgactagggccccaga

SEQ ID NO: 4693870 - DNA, 25 bp, Homo sapien
cacaccggcctaggatgctactctt

SEQ ID NO: 4693871 - DNA, 25 bp, Homo sapien
tgtccccacagtctgcaaccagtta

SEQ ID NO: 4693872 - DNA, 25 bp, Homo sapien
gataacagcactttgtagcaaagat

SEQ ID NO: 4693873 - DNA, 25 bp, Homo sapien
tgcttgtcagcagaaagagagatag

SEQ ID NO: 4693874 - DNA, 25 bp, Homo sapien
caaagataaaagttggaatgggcct

SEQ ID NO: 4693875 - DNA, 25 bp, Homo sapien
tcctgacatcaagccaagataacag

SEQ ID NO: 4693876 - DNA, 25 bp, Homo sapien
tttgccattaggctggggctgaatg

SEQ ID NO: 4693877 - DNA, 25 bp, Homo sapien
tgatttggttgaggccaaatgtctg

SEQ ID NO: 4693878 - DNA, 25 bp, Homo sapien
tgatggtgatttggttgaggccaaa

SEQ ID NO: 4693879 - DNA, 25 bp, Homo sapien
ggctgaatgatggtgatttggttga

SEQ ID NO: 4693880 - DNA, 25 bp, Homo sapien
ttaatggtctagtgcaagctttctg

SEQ ID NO: 4693881 - DNA, 25 bp, Homo sapien
cagtaaaatcaggtcagtgcggcac

SEQ ID NO: 4693882 - DNA, 25 bp, Homo sapien
tcagcagtgaattgagtcttgcagc

SEQ ID NO: 4693883 - DNA, 25 bp, Homo sapien
ctttctgtcgacttgaagactgctg

SEQ ID NO: 4693884 - DNA, 25 bp, Homo sapien
tagtagagaaggaatttcttcatgt

SEQ ID NO: 4693885 - DNA, 25 bp, Homo sapien
ctgcccacctcagcctcccaaagtg

SEQ ID NO: 4693886 - DNA, 25 bp, Homo sapien
ttttagtagagaaggaatttcttca

SEQ ID NO: 4693887 - DNA, 25 bp, Homo sapien
tgcccacctcagcctcccaaagtgc

SEQ ID NO: 4693888 - DNA, 25 bp, Homo sapien
ggttgatagccttaactgtggagct

SEQ ID NO: 4693889 - DNA, 25 bp, Homo sapien
tagccttaactgtggagcttagtta

SEQ ID NO: 4693890 - DNA, 25 bp, Homo sapien
gatagccttaactgtggagcttagt

SEQ ID NO: 4693891 - DNA, 25 bp, Homo sapien
tgatagccttaactgtggagcttag

SEQ ID NO: 4693892 - DNA, 25 bp, Homo sapien
ttccactgaagagattgtggagtac

SEQ ID NO: 4693893 - DNA, 25 bp, Homo sapien
tgaagagattgtggagtaccacccc

SEQ ID NO: 4693894 - DNA, 25 bp, Homo sapien
actgaagagattgtggagtaccacc

SEQ ID NO: 4693895 - DNA, 25 bp, Homo sapien
aagagattgtggagtaccaccccat

SEQ ID NO: 4693896 - DNA, 25 bp, Homo sapien
aaccctgtgatgagacccttctgtg

SEQ ID NO: 4693897 - DNA, 25 bp, Homo sapien
ctgtgccaagaacataaggtctgta

SEQ ID NO: 4693898 - DNA, 25 bp, Homo sapien
agcaagcctgaatctcggcagccag

SEQ ID NO: 4693899 - DNA, 25 bp, Homo sapien
cataaggtctgtaagggcctggcag

SEQ ID NO: 4693900 - DNA, 25 bp, Homo sapien
gcataagctattagctggatactct

SEQ ID NO: 4693901 - DNA, 25 bp, Homo sapien
ggaaggatgactaatatctcaaata

SEQ ID NO: 4693902 - DNA, 25 bp, Homo sapien
ccatattttccgtaggttaaagcat

SEQ ID NO: 4693903 - DNA, 25 bp, Homo sapien
tgtcccattggaaggatgactaata

SEQ ID NO: 4693904 - DNA, 25 bp, Homo sapien
tatcagagattaaactcccttggag

SEQ ID NO: 4693905 - DNA, 25 bp, Homo sapien
gaaaggcgatgcatatccgttgaaa

SEQ ID NO: 4693906 - DNA, 25 bp, Homo sapien
cgtaatgatgtggatctcttctgag

SEQ ID NO: 4693907 - DNA, 25 bp, Homo sapien
tgccgcccagattcccgtaatgatg

SEQ ID NO: 4693908 - DNA, 25 bp, Homo sapien
tagagtcttggctacatttcaggta

SEQ ID NO: 4693909 - DNA, 25 bp, Homo sapien
acattctaatagaggagatggctaa

SEQ ID NO: 4693910 - DNA, 25 bp, Homo sapien
taacttatccttcagtagagtcttg

SEQ ID NO: 4693911 - DNA, 25 bp, Homo sapien
agtgtgtctgaaacctaacttatcc

SEQ ID NO: 4693912 - DNA, 25 bp, Homo sapien
cataagtgtggattcgattaatgaa

SEQ ID NO: 4693913 - DNA, 25 bp, Homo sapien
tcattcatatcatctgggcagtcat

SEQ ID NO: 4693914 - DNA, 25 bp, Homo sapien
ctgggcagtcataagtgtggattcg

SEQ ID NO: 4693915 - DNA, 25 bp, Homo sapien
tggattcgattaatgaaaaagcaga

SEQ ID NO: 4693916 - DNA, 25 bp, Homo sapien
cagtcaactattttatctagaaagc

SEQ ID NO: 4693917 - DNA, 25 bp, Homo sapien
tccctgtctggagtgctctgaggct

SEQ ID NO: 4693918 - DNA, 25 bp, Homo sapien
ttcccaaatatagagtacagcacgt

SEQ ID NO: 4693919 - DNA, 25 bp, Homo sapien
tacagcacgttgaagatagtggcat

SEQ ID NO: 4693920 - DNA, 25 bp, Homo sapien
ccctgtggtgactctggatataaag

SEQ ID NO: 4693921 - DNA, 25 bp, Homo sapien
ttttgtaattgcacaatttgtctgt

SEQ ID NO: 4693922 - DNA, 25 bp, Homo sapien
tctttttgtaattgcacaatttgtc

SEQ ID NO: 4693923 - DNA, 25 bp, Homo sapien
ttgtaattgcacaatttgtctgtat

SEQ ID NO: 4693924 - DNA, 25 bp, Homo sapien
atatatcctgaatccatttagttgt

SEQ ID NO: 4693925 - DNA, 25 bp, Homo sapien
tatatcctgaatccatttagttgtc

SEQ ID NO: 4693926 - DNA, 25 bp, Homo sapien
aatatatcctgaatccatttagttg

SEQ ID NO: 4693927 - DNA, 25 bp, Homo sapien
atatcctgaatccatttagttgtct

SEQ ID NO: 4693928 - DNA, 25 bp, Homo sapien
ggatgattgaagaggcacagccact

SEQ ID NO: 4693929 - DNA, 25 bp, Homo sapien
gatacagctgagcaagtatctttcc

SEQ ID NO: 4693930 - DNA, 25 bp, Homo sapien
cattcccagcgtttatcatacacac

SEQ ID NO: 4693931 - DNA, 25 bp, Homo sapien
tccaggtgccaatctaatagctttt

SEQ ID NO: 4693932 - DNA, 25 bp, Homo sapien
caatttggatgcttgccaggagtca

SEQ ID NO: 4693933 - DNA, 25 bp, Homo sapien
tcactggccgcagagatagaattaa

SEQ ID NO: 4693934 - DNA, 25 bp, Homo sapien
tagatgagacctgctagcgtctgca

SEQ ID NO: 4693935 - DNA, 25 bp, Homo sapien
gccgtttgataaccagctctctgga

SEQ ID NO: 4693936 - DNA, 25 bp, Homo sapien
ggaagatggagagccaagttacctc

SEQ ID NO: 4693937 - DNA, 25 bp, Homo sapien
tcatgaaccttgctaccctggcttc

SEQ ID NO: 4693938 - DNA, 25 bp, Homo sapien
gatcactatcgttaacattcacggg

SEQ ID NO: 4693939 - DNA, 25 bp, Homo sapien
ggttcacttatcattcctgactgca

SEQ ID NO: 4693940 - DNA, 25 bp, Homo sapien
ttgggttcagacagtcctcctgagt

SEQ ID NO: 4693941 - DNA, 25 bp, Homo sapien
tattaatattagctgagactctggc

SEQ ID NO: 4693942 - DNA, 25 bp, Homo sapien
tggaactagaggctcacatcaccgt

SEQ ID NO: 4693943 - DNA, 25 bp, Homo sapien
tcttgaacctcaggaaatgctgctg

SEQ ID NO: 4693944 - DNA, 25 bp, Homo sapien
ctcagtcgtctgatgaaatagtaca

SEQ ID NO: 4693945 - DNA, 25 bp, Homo sapien
cactatgaaccctgccttctggaga

SEQ ID NO: 4693946 - DNA, 25 bp, Homo sapien
tagcagtcttttgaaccagaagtcc

SEQ ID NO: 4693947 - DNA, 25 bp, Homo sapien
gggcatctaagactacacagtgttt

SEQ ID NO: 4693948 - DNA, 25 bp, Homo sapien
caccaaagcccaagtaatgagagtt

SEQ ID NO: 4693949 - DNA, 25 bp, Homo sapien
tatctggtcatcatacttaagtgtg

SEQ ID NO: 4693950 - DNA, 25 bp, Homo sapien
gctatactggcctttgaacataaaa

SEQ ID NO: 4693951 - DNA, 25 bp, Homo sapien
tatatgggctacaggcttctgtcgc

SEQ ID NO: 4693952 - DNA, 25 bp, Homo sapien
gagagaaagatgttaccagacccca

SEQ ID NO: 4693953 - DNA, 25 bp, Homo sapien
tatttcctttgcgtcggagggtctc

SEQ ID NO: 4693954 - DNA, 25 bp, Homo sapien
gagtcagggttttctcactatagtc

SEQ ID NO: 4693955 - DNA, 25 bp, Homo sapien
aaagttagcttttgttggatcaggg

SEQ ID NO: 4693956 - DNA, 25 bp, Homo sapien
tgagcggccccagtgatccagcttg

SEQ ID NO: 4693957 - DNA, 25 bp, Homo sapien
cctgagcggccccagtgatccagct

SEQ ID NO: 4693958 - DNA, 25 bp, Homo sapien
agcggccccagtgatccagcttgca

SEQ ID NO: 4693959 - DNA, 25 bp, Homo sapien
tgatccagcttgcagcaccattgcc

SEQ ID NO: 4693960 - DNA, 25 bp, Homo sapien
attcagagtagacaggagctcagtg

SEQ ID NO: 4693961 - DNA, 25 bp, Homo sapien
gcatcagtatggtaaggtccattca

SEQ ID NO: 4693962 - DNA, 25 bp, Homo sapien
tcagagtagacaggagctcagtgag

SEQ ID NO: 4693963 - DNA, 25 bp, Homo sapien
aaagcatcagtatggtaaggtccat

SEQ ID NO: 4693964 - DNA, 25 bp, Homo sapien
cttgtgcagctctaatggttgtatc

SEQ ID NO: 4693965 - DNA, 25 bp, Homo sapien
tacagaacgccatctagttggaatc

SEQ ID NO: 4693966 - DNA, 25 bp, Homo sapien
ccagcagttatacattagggttcac

SEQ ID NO: 4693967 - DNA, 25 bp, Homo sapien
taatggactgcatggatttaccaca

SEQ ID NO: 4693968 - DNA, 25 bp, Homo sapien
cttgcacgcccttaatccattcaac

SEQ ID NO: 4693969 - DNA, 25 bp, Homo sapien
tttttccaacagcctgtcacagcac

SEQ ID NO: 4693970 - DNA, 25 bp, Homo sapien
tttccaacagcctgtcacagcacat

SEQ ID NO: 4693971 - DNA, 25 bp, Homo sapien
ttttccaacagcctgtcacagcaca

SEQ ID NO: 4693972 - DNA, 25 bp, Homo sapien
gagattccttagctgttccggctct

SEQ ID NO: 4693973 - DNA, 25 bp, Homo sapien
caatggctcctcttgctctcattgg

SEQ ID NO: 4693974 - DNA, 25 bp, Homo sapien
aagagattccttagctgttccggct

SEQ ID NO: 4693975 - DNA, 25 bp, Homo sapien
tgaagagattccttagctgttccgg

SEQ ID NO: 4693976 - DNA, 25 bp, Homo sapien
aacgcttggtgttggaatctttcat

SEQ ID NO: 4693977 - DNA, 25 bp, Homo sapien
cccggaacgcttggtgttggaatct

SEQ ID NO: 4693978 - DNA, 25 bp, Homo sapien
gaacgcttggtgttggaatctttca

SEQ ID NO: 4693979 - DNA, 25 bp, Homo sapien
cggaacgcttggtgttggaatcttt

SEQ ID NO: 4693980 - DNA, 25 bp, Homo sapien
ctttggttccacaactccgatccac

SEQ ID NO: 4693981 - DNA, 25 bp, Homo sapien
gagaatcttctcttgagacagctct

SEQ ID NO: 4693982 - DNA, 25 bp, Homo sapien
ctttttcacagttaagtgggcacct

SEQ ID NO: 4693983 - DNA, 25 bp, Homo sapien
ctttgagaatcttctcttgagacag

SEQ ID NO: 4693984 - DNA, 25 bp, Homo sapien
ttcacagttaagtgggcacctggtc

SEQ ID NO: 4693985 - DNA, 25 bp, Homo sapien
ctttcgctggatgaagtattagcca

SEQ ID NO: 4693986 - DNA, 25 bp, Homo sapien
tctttcgctggatgaagtattagcc

SEQ ID NO: 4693987 - DNA, 25 bp, Homo sapien
cctctttcgctggatgaagtattag

SEQ ID NO: 4693988 - DNA, 25 bp, Homo sapien
tcgctggatgaagtattagccatct

SEQ ID NO: 4693989 - DNA, 25 bp, Homo sapien
ttcacgaccaccaccaaagtttcca

SEQ ID NO: 4693990 - DNA, 25 bp, Homo sapien
cacgaccaccaccaaagtttccaga

SEQ ID NO: 4693991 - DNA, 25 bp, Homo sapien
tcacgaccaccaccaaagtttccag

SEQ ID NO: 4693992 - DNA, 25 bp, Homo sapien
aagttgtcattcctaccgaagtcac

SEQ ID NO: 4693993 - DNA, 25 bp, Homo sapien
catggttgccaccaaaggcaccaca

SEQ ID NO: 4693994 - DNA, 25 bp, Homo sapien
tggttgccaccaaaggcaccacaac

SEQ ID NO: 4693995 - DNA, 25 bp, Homo sapien
caaagttgtcattcctaccgaagtc

SEQ ID NO: 4693996 - DNA, 25 bp, Homo sapien
tgggaaagtactggcttccaccacc

SEQ ID NO: 4693997 - DNA, 25 bp, Homo sapien
aaagtttcctttcatcatgggttca

SEQ ID NO: 4693998 - DNA, 25 bp, Homo sapien
caaagtttcctttcatcatgggttc

SEQ ID NO: 4693999 - DNA, 25 bp, Homo sapien
tggtttgggaaagtactggcttcca

SEQ ID NO: 4694000 - DNA, 25 bp, Homo sapien
cctttgttggaatgctttacatttt

SEQ ID NO: 4694001 - DNA, 25 bp, Homo sapien
gctttacattttccacagaagaaaa

SEQ ID NO: 4694002 - DNA, 25 bp, Homo sapien
atgctttacattttccacagaagaa

SEQ ID NO: 4694003 - DNA, 25 bp, Homo sapien
aatcctttgttggaatgctttacat

SEQ ID NO: 4694004 - DNA, 25 bp, Homo sapien
tggcctggaagttggtgcttgacca

SEQ ID NO: 4694005 - DNA, 25 bp, Homo sapien
ctgtggcctggaagttggtgcttga

SEQ ID NO: 4694006 - DNA, 25 bp, Homo sapien
tggaagttggtgcttgaccactgct

SEQ ID NO: 4694007 - DNA, 25 bp, Homo sapien
aatccgagtacagattgtctgtggc

SEQ ID NO: 4694008 - DNA, 25 bp, Homo sapien
caattgggtactgccacctgggtag

SEQ ID NO: 4694009 - DNA, 25 bp, Homo sapien
ctctccaaggaccacattgttattt

SEQ ID NO: 4694010 - DNA, 25 bp, Homo sapien
cctgggtagccagatttagtaacag

SEQ ID NO: 4694011 - DNA, 25 bp, Homo sapien
taacagatacacctcacgattactg

SEQ ID NO: 4694012 - DNA, 25 bp, Homo sapien
tgatgtcatgtgcttgctcgcccat

SEQ ID NO: 4694013 - DNA, 25 bp, Homo sapien
tgttggagctcgatgccatgttgat

SEQ ID NO: 4694014 - DNA, 25 bp, Homo sapien
gccatgttgatgtcatgtgcttgct

SEQ ID NO: 4694015 - DNA, 25 bp, Homo sapien
cctttgcttgtgttggagctcgatg

SEQ ID NO: 4694016 - DNA, 25 bp, Homo sapien
cagaggaggttggactgactaagac

SEQ ID NO: 4694017 - DNA, 25 bp, Homo sapien
gactaagactcaagatgaacacaag

SEQ ID NO: 4694018 - DNA, 25 bp, Homo sapien
tgaacaggtcttgtgctgcccattt

SEQ ID NO: 4694019 - DNA, 25 bp, Homo sapien
ccggagactttgatacatgagtgac

SEQ ID NO: 4694020 - DNA, 25 bp, Homo sapien
cataactgccgttgcctactggagc

SEQ ID NO: 4694021 - DNA, 25 bp, Homo sapien
cagtgttcctgctaaagcaagttta

SEQ ID NO: 4694022 - DNA, 25 bp, Homo sapien
tgagtatgttaatgcagcctggagc

SEQ ID NO: 4694023 - DNA, 25 bp, Homo sapien
aaattgtgcagctcttaggattgtg

SEQ ID NO: 4694024 - DNA, 25 bp, Homo sapien
ttcaggtctgcgttggacttcgttt

SEQ ID NO: 4694025 - DNA, 25 bp, Homo sapien
cttcaggtctgcgttggacttcgtt

SEQ ID NO: 4694026 - DNA, 25 bp, Homo sapien
gttgtttatgttatcgctgccacca

SEQ ID NO: 4694027 - DNA, 25 bp, Homo sapien
ctgccaccaccatagtacttgtcat

SEQ ID NO: 4694028 - DNA, 25 bp, Homo sapien
caccaccatagtacttgtcattaag

SEQ ID NO: 4694029 - DNA, 25 bp, Homo sapien
attgctgttgtttatgttatcgctg

SEQ ID NO: 4694030 - DNA, 25 bp, Homo sapien
ttcagagcttcgttcccacatatcc

SEQ ID NO: 4694031 - DNA, 25 bp, Homo sapien
gctttcagagcttcgttcccacata

SEQ ID NO: 4694032 - DNA, 25 bp, Homo sapien
tttcagagcttcgttcccacatatc

SEQ ID NO: 4694033 - DNA, 25 bp, Homo sapien
atgctttcagagcttcgttcccaca

SEQ ID NO: 4694034 - DNA, 25 bp, Homo sapien
cagtgatctctgttggcaaaggtgc

SEQ ID NO: 4694035 - DNA, 25 bp, Homo sapien
tcttgtggcaaaaggtagggcgcat

SEQ ID NO: 4694036 - DNA, 25 bp, Homo sapien
ggctgcttcatgaacggtcttgtgg

SEQ ID NO: 4694037 - DNA, 25 bp, Homo sapien
aaaggtgccagatcagcctgaacat

SEQ ID NO: 4694038 - DNA, 25 bp, Homo sapien
ttcagggaagcaatggtgagactca

SEQ ID NO: 4694039 - DNA, 25 bp, Homo sapien
cagtcgatattacctcaagttggga

SEQ ID NO: 4694040 - DNA, 25 bp, Homo sapien
ccagtgatgacacgggaatgtgtga

SEQ ID NO: 4694041 - DNA, 25 bp, Homo sapien
tgagactcagggctatgtatatgcc

SEQ ID NO: 4694042 - DNA, 25 bp, Homo sapien
agtacatctcatggtaagagctcag

SEQ ID NO: 4694043 - DNA, 25 bp, Homo sapien
tgtttctgcctaatgaaagcatagc

SEQ ID NO: 4694044 - DNA, 25 bp, Homo sapien
tagctatccttaaatacttctgcct

SEQ ID NO: 4694045 - DNA, 25 bp, Homo sapien
tattaatgcctacctcctgaagtgg

SEQ ID NO: 4694046 - DNA, 25 bp, Homo sapien
acacaggtcacgaaggtatatgaca

SEQ ID NO: 4694047 - DNA, 25 bp, Homo sapien
cacaggtcacgaaggtatatgacag

SEQ ID NO: 4694048 - DNA, 25 bp, Homo sapien
caggtcacgaaggtatatgacagtt

SEQ ID NO: 4694049 - DNA, 25 bp, Homo sapien
tacacaggtcacgaaggtatatgac

SEQ ID NO: 4694050 - DNA, 25 bp, Homo sapien
ttgatattgcactctttgcaatgac

SEQ ID NO: 4694051 - DNA, 25 bp, Homo sapien
catatttcatttcggcatccctctg

SEQ ID NO: 4694052 - DNA, 25 bp, Homo sapien
ttcatttcggcatccctctgcaaag

SEQ ID NO: 4694053 - DNA, 25 bp, Homo sapien
gtgccatataaagaggtgaccatgt

SEQ ID NO: 4694054 - DNA, 25 bp, Homo sapien
ttttccctatgggaggtgccctgac

SEQ ID NO: 4694055 - DNA, 25 bp, Homo sapien
cagagctaatgtgtgatagagccac

SEQ ID NO: 4694056 - DNA, 25 bp, Homo sapien
agtggtctccaagtccgatgcctgt

SEQ ID NO: 4694057 - DNA, 25 bp, Homo sapien
cttgatgaactggagagcacgggcc

SEQ ID NO: 4694058 - DNA, 25 bp, Homo sapien
gtagccctttcccattcatctgtgt

SEQ ID NO: 4694059 - DNA, 25 bp, Homo sapien
tggtagccctttcccattcatctgt

SEQ ID NO: 4694060 - DNA, 25 bp, Homo sapien
agccctttcccattcatctgtgtgc

SEQ ID NO: 4694061 - DNA, 25 bp, Homo sapien
gctggtagccctttcccattcatct

SEQ ID NO: 4694062 - DNA, 25 bp, Homo sapien
agtaaacacggaaagagttcttgat

SEQ ID NO: 4694063 - DNA, 25 bp, Homo sapien
tagtaaacacggaaagagttcttga

SEQ ID NO: 4694064 - DNA, 25 bp, Homo sapien
ctagtaaacacggaaagagttcttg

SEQ ID NO: 4694065 - DNA, 25 bp, Homo sapien
gcgccggtccccgtggatcccgaga

SEQ ID NO: 4694066 - DNA, 25 bp, Homo sapien
ggaggagcgccggtccccgtggatc

SEQ ID NO: 4694067 - DNA, 25 bp, Homo sapien
gaggagcgccggtccccgtggatcc

SEQ ID NO: 4694068 - DNA, 25 bp, Homo sapien
gagcgccggtccccgtggatcccga

SEQ ID NO: 4694069 - DNA, 25 bp, Homo sapien
cttgcgcactacgtccccagccaga

SEQ ID NO: 4694070 - DNA, 25 bp, Homo sapien
agctctggggcttgcgcactacgtc

SEQ ID NO: 4694071 - DNA, 25 bp, Homo sapien
tggttccgggtcgtgtgcggctcgg

SEQ ID NO: 4694072 - DNA, 25 bp, Homo sapien
gctcggggtaatagggctgctgctc

SEQ ID NO: 4694073 - DNA, 25 bp, Homo sapien
gggagcacgtctggtttccttttca

SEQ ID NO: 4694074 - DNA, 25 bp, Homo sapien
agtgctgttcctcagttgcagatgc

SEQ ID NO: 4694075 - DNA, 25 bp, Homo sapien
tgttcctcagttgcagatgccatgg

SEQ ID NO: 4694076 - DNA, 25 bp, Homo sapien
tcagttgcagatgccatggggagca

SEQ ID NO: 4694077 - DNA, 25 bp, Homo sapien
tgtgtgttgtaggacttatagctca

SEQ ID NO: 4694078 - DNA, 25 bp, Homo sapien
caaatgaacaaatacggtattcctg

SEQ ID NO: 4694079 - DNA, 25 bp, Homo sapien
ttacatgtagacacaagctcccttt

SEQ ID NO: 4694080 - DNA, 25 bp, Homo sapien
gacacaagctcccttttcaggcaca

SEQ ID NO: 4694081 - DNA, 25 bp, Homo sapien
aaagaagaacccccttcatgttcat

SEQ ID NO: 4694082 - DNA, 25 bp, Homo sapien
ctctgctcttctataccccattgat

SEQ ID NO: 4694083 - DNA, 25 bp, Homo sapien
ccccattgatatgtcaagtttccaa

SEQ ID NO: 4694084 - DNA, 25 bp, Homo sapien
ttctataccccattgatatgtcaag

SEQ ID NO: 4694085 - DNA, 25 bp, Homo sapien
atgagtcctttggttcggtggttcg

SEQ ID NO: 4694086 - DNA, 25 bp, Homo sapien
tagatgagtcctttggttcggtggt

SEQ ID NO: 4694087 - DNA, 25 bp, Homo sapien
gatgagtcctttggttcggtggttc

SEQ ID NO: 4694088 - DNA, 25 bp, Homo sapien
cctagatgagtcctttggttcggtg

SEQ ID NO: 4694089 - DNA, 25 bp, Homo sapien
cgtgagcttcacgcctcggacagct

SEQ ID NO: 4694090 - DNA, 25 bp, Homo sapien
tgggacagtgggcaactcgctgcaa

SEQ ID NO: 4694091 - DNA, 25 bp, Homo sapien
catgcttttggcagtcatgggagcg

SEQ ID NO: 4694092 - DNA, 25 bp, Homo sapien
caactcgctgcaaagccaaccgtgt

SEQ ID NO: 4694093 - DNA, 25 bp, Homo sapien
gccgccgcgcgccccgccgggcggc

SEQ ID NO: 4694094 - DNA, 25 bp, Homo sapien
gcgccccgccgggcggccccgcgca

SEQ ID NO: 4694095 - DNA, 25 bp, Homo sapien
gccgcctcctcgccgccgcgcgccc

SEQ ID NO: 4694096 - DNA, 25 bp, Homo sapien
ccgcgccgcctcctcgccgccgcgc

SEQ ID NO: 4694097 - DNA, 25 bp, Homo sapien
cggcggcgacgagggaggagaagaa

SEQ ID NO: 4694098 - DNA, 25 bp, Homo sapien
gggcggcggctgaggcgaaggctga

SEQ ID NO: 4694099 - DNA, 25 bp, Homo sapien
cgccgcgcgcgggcgggagcgggcg

SEQ ID NO: 4694100 - DNA, 25 bp, Homo sapien
ggcggctgaggcgaaggctgaggcg

SEQ ID NO: 4694101 - DNA, 25 bp, Homo sapien
ggatgtcgccgatgtcctgcttcct

SEQ ID NO: 4694102 - DNA, 25 bp, Homo sapien
cgtccgccccttcgtggccgtgcgg

SEQ ID NO: 4694103 - DNA, 25 bp, Homo sapien
tggccagccaggttcaccccggcca

SEQ ID NO: 4694104 - DNA, 25 bp, Homo sapien
cctgcaccgagtggccagccaggtt

SEQ ID NO: 4694105 - DNA, 25 bp, Homo sapien
tagacccaagatttaattccagccc

SEQ ID NO: 4694106 - DNA, 25 bp, Homo sapien
actccagttgactagttcccgacag

SEQ ID NO: 4694107 - DNA, 25 bp, Homo sapien
cacaaaggtattagcatcacctatg

SEQ ID NO: 4694108 - DNA, 25 bp, Homo sapien
cctatggaataatatggcgccttcc

SEQ ID NO: 4694109 - DNA, 25 bp, Homo sapien
ctctttgatctcacacaggacgctg

SEQ ID NO: 4694110 - DNA, 25 bp, Homo sapien
tctgtgacagttcagggcatgtttc

SEQ ID NO: 4694111 - DNA, 25 bp, Homo sapien
gctgaagagcgctggtttcattctg

SEQ ID NO: 4694112 - DNA, 25 bp, Homo sapien
tctcacacaggacgctgaagagcgc

SEQ ID NO: 4694113 - DNA, 25 bp, Homo sapien
cccactgcggggcgcagcgtcttac

SEQ ID NO: 4694114 - DNA, 25 bp, Homo sapien
tcgggggtctccaggcccactgcgg

SEQ ID NO: 4694115 - DNA, 25 bp, Homo sapien
cgggggtctccaggcccactgcggg

SEQ ID NO: 4694116 - DNA, 25 bp, Homo sapien
ctccaggcccactgcggggcgcagc

SEQ ID NO: 4694117 - DNA, 25 bp, Homo sapien
tcaactggagagtcgaaggagtagc

SEQ ID NO: 4694118 - DNA, 25 bp, Homo sapien
cacaaacaaggcgaaaggagaggga

SEQ ID NO: 4694119 - DNA, 25 bp, Homo sapien
gaaattgactccagatttattgcag

SEQ ID NO: 4694120 - DNA, 25 bp, Homo sapien
tctcaagatcaggacgtgggaagga

SEQ ID NO: 4694121 - DNA, 25 bp, Homo sapien
taaaacaaagttcgggcgatgcttc

SEQ ID NO: 4694122 - DNA, 25 bp, Homo sapien
gattctctaaagtagccttcccacc

SEQ ID NO: 4694123 - DNA, 25 bp, Homo sapien
gcagctgaagcttaagactgtctaa

SEQ ID NO: 4694124 - DNA, 25 bp, Homo sapien
acactaattcaagcatgctactggg

SEQ ID NO: 4694125 - DNA, 25 bp, Homo sapien
gagcagttacctcacgtcaagactg

SEQ ID NO: 4694126 - DNA, 25 bp, Homo sapien
tctgacaagaaagttaaactgaaac

SEQ ID NO: 4694127 - DNA, 25 bp, Homo sapien
tctctgcttcagtttgagcagttac

SEQ ID NO: 4694128 - DNA, 25 bp, Homo sapien
agaccttcaattaataaagtctgac

SEQ ID NO: 4694129 - DNA, 25 bp, Homo sapien
cctgtttcaaagaaggctgactcgc

SEQ ID NO: 4694130 - DNA, 25 bp, Homo sapien
taaatagcctcccttggatagtgct

SEQ ID NO: 4694131 - DNA, 25 bp, Homo sapien
ccctgatagcaggaaaacccttgga

SEQ ID NO: 4694132 - DNA, 25 bp, Homo sapien
tttagttctcaagctagctaggcca

SEQ ID NO: 4694133 - DNA, 25 bp, Homo sapien
catgtggttgactatactttccttt

SEQ ID NO: 4694134 - DNA, 25 bp, Homo sapien
ctttgacatgtggttgactatactt

SEQ ID NO: 4694135 - DNA, 25 bp, Homo sapien
ttgacatgtggttgactatactttc

SEQ ID NO: 4694136 - DNA, 25 bp, Homo sapien
gacatgtggttgactatactttcct

SEQ ID NO: 4694137 - DNA, 25 bp, Homo sapien
aatcccagactttgaaaagatttgt

SEQ ID NO: 4694138 - DNA, 25 bp, Homo sapien
taaagcatgaccgactatggaagca

SEQ ID NO: 4694139 - DNA, 25 bp, Homo sapien
gcttggaatttgcagccccgctttc

SEQ ID NO: 4694140 - DNA, 25 bp, Homo sapien
tagcaggaagatgcctctacccaga

SEQ ID NO: 4694141 - DNA, 25 bp, Homo sapien
taacgtgcaaatgtggatccactgg

SEQ ID NO: 4694142 - DNA, 25 bp, Homo sapien
caggtgagcagaccttgtggcatca

SEQ ID NO: 4694143 - DNA, 25 bp, Homo sapien
taaactcgcacaattaagggctttg

SEQ ID NO: 4694144 - DNA, 25 bp, Homo sapien
gcatacaccaaaagaggtatgcagg

SEQ ID NO: 4694145 - DNA, 25 bp, Homo sapien
gattaagatgaccaaaaagaggtgg

SEQ ID NO: 4694146 - DNA, 25 bp, Homo sapien
tgccctctaattagcatatcaaagt

SEQ ID NO: 4694147 - DNA, 25 bp, Homo sapien
aattaatacttctagggcattagca

SEQ ID NO: 4694148 - DNA, 25 bp, Homo sapien
ccaggctcacaatagcagttaagag

SEQ ID NO: 4694149 - DNA, 25 bp, Homo sapien
tcatgctgccacttaatctcatttc

SEQ ID NO: 4694150 - DNA, 25 bp, Homo sapien
catggatggctgtcagttggtggca

SEQ ID NO: 4694151 - DNA, 25 bp, Homo sapien
agtaatgtctgtgaacaattatcac

SEQ ID NO: 4694152 - DNA, 25 bp, Homo sapien
ggcagagttcttgctttcataataa

SEQ ID NO: 4694153 - DNA, 25 bp, Homo sapien
tataaataatctggaccaactacag

SEQ ID NO: 4694154 - DNA, 25 bp, Homo sapien
tatgtttatagagtccatcatttca

SEQ ID NO: 4694155 - DNA, 25 bp, Homo sapien
aaattagttcatgcaatacattgac

SEQ ID NO: 4694156 - DNA, 25 bp, Homo sapien
caatacattgacagaacagaattta

SEQ ID NO: 4694157 - DNA, 25 bp, Homo sapien
cagaatttatgtttatagagtccat

SEQ ID NO: 4694158 - DNA, 25 bp, Homo sapien
taggaagtacatttggcagtgccag

SEQ ID NO: 4694159 - DNA, 25 bp, Homo sapien
gaaaggctcaccgaataatggcagg

SEQ ID NO: 4694160 - DNA, 25 bp, Homo sapien
tgtaaatggcaggatcctcgcagca

SEQ ID NO: 4694161 - DNA, 25 bp, Homo sapien
ctagctacggatgagagggccacaa

SEQ ID NO: 4694162 - DNA, 25 bp, Homo sapien
catttacaagaacctgttaccaggg

SEQ ID NO: 4694163 - DNA, 25 bp, Homo sapien
ccatgtctacaaaactaggcagagg

SEQ ID NO: 4694164 - DNA, 25 bp, Homo sapien
ttcttagatggctagactctgcagc

SEQ ID NO: 4694165 - DNA, 25 bp, Homo sapien
cagaatatctagacaaaccagtgca

SEQ ID NO: 4694166 - DNA, 25 bp, Homo sapien
gcagatccactaggcttctcagaag

SEQ ID NO: 4694167 - DNA, 25 bp, Homo sapien
tctcagaagaaagtggattgcagtt

SEQ ID NO: 4694168 - DNA, 25 bp, Homo sapien
tacactcagaaacgactggtggtct

SEQ ID NO: 4694169 - DNA, 25 bp, Homo sapien
tagtcctactagcacctgagtctca

SEQ ID NO: 4694170 - DNA, 25 bp, Homo sapien
gatttgcctgaacacaaactgcatc

SEQ ID NO: 4694171 - DNA, 25 bp, Homo sapien
tttaacggactttgacactgtgctg

SEQ ID NO: 4694172 - DNA, 25 bp, Homo sapien
agcttccaagtctgatttgcctgaa

SEQ ID NO: 4694173 - DNA, 25 bp, Homo sapien
tgctaatgttgtcaaatatttccaa

SEQ ID NO: 4694174 - DNA, 25 bp, Homo sapien
gacagcagcgcctgaagatatcatt

SEQ ID NO: 4694175 - DNA, 25 bp, Homo sapien
tattatttgaataacacttgacagc

SEQ ID NO: 4694176 - DNA, 25 bp, Homo sapien
atgtgaggctggtattatttgaata

SEQ ID NO: 4694177 - DNA, 25 bp, Homo sapien
gctgctgctgcataactgatgatag

SEQ ID NO: 4694178 - DNA, 25 bp, Homo sapien
tccctgatgatcttaaacacccttg

SEQ ID NO: 4694179 - DNA, 25 bp, Homo sapien
tcatatgtgtagctcaaatctcctc

SEQ ID NO: 4694180 - DNA, 25 bp, Homo sapien
gcattttccatgataagcaggtgac

SEQ ID NO: 4694181 - DNA, 25 bp, Homo sapien
gaactcatctatggtggtatgccct

SEQ ID NO: 4694182 - DNA, 25 bp, Homo sapien
gtattttatctatgcttttatattg

SEQ ID NO: 4694183 - DNA, 25 bp, Homo sapien
cttaaatgccaggaacattagtgtt

SEQ ID NO: 4694184 - DNA, 25 bp, Homo sapien
tcttaaatgccaggaacattagtgt

SEQ ID NO: 4694185 - DNA, 25 bp, Homo sapien
aagcgcatgctgccgcaaccagcta

SEQ ID NO: 4694186 - DNA, 25 bp, Homo sapien
ggtaaagtaactcagagaccaaatc

SEQ ID NO: 4694187 - DNA, 25 bp, Homo sapien
aagtaactcagagaccaaatccatg

SEQ ID NO: 4694188 - DNA, 25 bp, Homo sapien
taaagtaactcagagaccaaatcca

SEQ ID NO: 4694189 - DNA, 25 bp, Homo sapien
gtaactcagagaccaaatccatgag

SEQ ID NO: 4694190 - DNA, 25 bp, Homo sapien
gacaccgaacctggcagcatcttga

SEQ ID NO: 4694191 - DNA, 25 bp, Homo sapien
gacactgagcttaatatgatctgca

SEQ ID NO: 4694192 - DNA, 25 bp, Homo sapien
gaacagacagcatgcaaggtgccat

SEQ ID NO: 4694193 - DNA, 25 bp, Homo sapien
tttggaaggtgatgaggccacacag

SEQ ID NO: 4694194 - DNA, 25 bp, Homo sapien
aaaataattctcatcaaggctgagt

SEQ ID NO: 4694195 - DNA, 25 bp, Homo sapien
aaaaataattctcatcaaggctgag

SEQ ID NO: 4694196 - DNA, 25 bp, Homo sapien
tatggatgatccataaaatcccaaa

SEQ ID NO: 4694197 - DNA, 25 bp, Homo sapien
taaggttgagggtatcataatgtat

SEQ ID NO: 4694198 - DNA, 25 bp, Homo sapien
gggtgtttcacaagtatgaagtact

SEQ ID NO: 4694199 - DNA, 25 bp, Homo sapien
caactactcattatggggtgtttca

SEQ ID NO: 4694200 - DNA, 25 bp, Homo sapien
taaaccaagttgcatgctacagcgg

SEQ ID NO: 4694201 - DNA, 25 bp, Homo sapien
gagctgaggcaatctacctctctcg

SEQ ID NO: 4694202 - DNA, 25 bp, Homo sapien
tcttagcatattgcaggaactcagt

SEQ ID NO: 4694203 - DNA, 25 bp, Homo sapien
taattagcacccaagaataaagctc

SEQ ID NO: 4694204 - DNA, 25 bp, Homo sapien
tcacatcaatgtatcaccttaaaaa

SEQ ID NO: 4694205 - DNA, 25 bp, Homo sapien
ttgaaaggtgacatctttagagttt

SEQ ID NO: 4694206 - DNA, 25 bp, Homo sapien
aatgtatcaccttaaaaacttgttg

SEQ ID NO: 4694207 - DNA, 25 bp, Homo sapien
gatccattcttagttttagccacta

SEQ ID NO: 4694208 - DNA, 25 bp, Homo sapien
cttcctaaaagtactgtgagagtta

SEQ ID NO: 4694209 - DNA, 25 bp, Homo sapien
taaataaagcacacatgaggacatc

SEQ ID NO: 4694210 - DNA, 25 bp, Homo sapien
aaagccctttggaatcagaaggact

SEQ ID NO: 4694211 - DNA, 25 bp, Homo sapien
gctgattaacatcttggagcttcca

SEQ ID NO: 4694212 - DNA, 25 bp, Homo sapien
cacagtatgcttgcactctatcaca

SEQ ID NO: 4694213 - DNA, 25 bp, Homo sapien
aacttcttgtgtattgacatgaccc

SEQ ID NO: 4694214 - DNA, 25 bp, Homo sapien
tagggattctgaaccagtaacacaa

SEQ ID NO: 4694215 - DNA, 25 bp, Homo sapien
gagaagggacttatctgcatcctga

SEQ ID NO: 4694216 - DNA, 25 bp, Homo sapien
tgaggtaccatggaaatcaccaaag

SEQ ID NO: 4694217 - DNA, 25 bp, Homo sapien
gatgtcacaagaccctagatttgcc

SEQ ID NO: 4694218 - DNA, 25 bp, Homo sapien
gaagatccctactaacagatgtcac

SEQ ID NO: 4694219 - DNA, 25 bp, Homo sapien
tctatggtgaatggtcctaacgaca

SEQ ID NO: 4694220 - DNA, 25 bp, Homo sapien
catcctcatctccgcattgagtagg

SEQ ID NO: 4694221 - DNA, 25 bp, Homo sapien
tcatcctcatctccgcattgagtag

SEQ ID NO: 4694222 - DNA, 25 bp, Homo sapien
ctttctctgtaacattagatttcta

SEQ ID NO: 4694223 - DNA, 25 bp, Homo sapien
gtaacattagatttctaaaactgaa

SEQ ID NO: 4694224 - DNA, 25 bp, Homo sapien
tttcattgctgaattacatctgtaa

SEQ ID NO: 4694225 - DNA, 25 bp, Homo sapien
gtaatccaaaaactgtagtctggaa

SEQ ID NO: 4694226 - DNA, 25 bp, Homo sapien
catctacaaaatgagctgtccgcca

SEQ ID NO: 4694227 - DNA, 25 bp, Homo sapien
ttatgactgctcatacattctgact

SEQ ID NO: 4694228 - DNA, 25 bp, Homo sapien
gccacaagctatatctgtcagcatt

SEQ ID NO: 4694229 - DNA, 25 bp, Homo sapien
tacattctgactatcatttgccaca

SEQ ID NO: 4694230 - DNA, 25 bp, Homo sapien
catagggtgcatcacaatccaaagg

SEQ ID NO: 4694231 - DNA, 25 bp, Homo sapien
tgagaatagtagcttccaactgata

SEQ ID NO: 4694232 - DNA, 25 bp, Homo sapien
gagaaatggcaaccttactggtgag

SEQ ID NO: 4694233 - DNA, 25 bp, Homo sapien
tgcaaaaccactgcttcatgagctc

SEQ ID NO: 4694234 - DNA, 25 bp, Homo sapien
caaatctggatactctctgctgaag

SEQ ID NO: 4694235 - DNA, 25 bp, Homo sapien
tgcatgggttttacaagaggacact

SEQ ID NO: 4694236 - DNA, 25 bp, Homo sapien
gagtcattgtctacgatcccaaagg

SEQ ID NO: 4694237 - DNA, 25 bp, Homo sapien
taatcacccctaagtaaggcaggta

SEQ ID NO: 4694238 - DNA, 25 bp, Homo sapien
gaatcaccctgtcaatacccagtgg

SEQ ID NO: 4694239 - DNA, 25 bp, Homo sapien
tagaggatggataagctccaggacc

SEQ ID NO: 4694240 - DNA, 25 bp, Homo sapien
tcccagttacttagagggcaatgtg

SEQ ID NO: 4694241 - DNA, 25 bp, Homo sapien
tctgctgactgataccctggaatca

SEQ ID NO: 4694242 - DNA, 25 bp, Homo sapien
ttctcaaagcatagtccagatctca

SEQ ID NO: 4694243 - DNA, 25 bp, Homo sapien
taagtgtctaaaaagcataaccacc

SEQ ID NO: 4694244 - DNA, 25 bp, Homo sapien
tagtgcttctcatggtagtatatcc

SEQ ID NO: 4694245 - DNA, 25 bp, Homo sapien
acattctagtgcaagtgtattcaca

SEQ ID NO: 4694246 - DNA, 25 bp, Homo sapien
gagtgttcaatagagttatctgaag

SEQ ID NO: 4694247 - DNA, 25 bp, Homo sapien
tccagttctgtgtgatagatttgtc

SEQ ID NO: 4694248 - DNA, 25 bp, Homo sapien
cagtctcattagctggggatcggga

SEQ ID NO: 4694249 - DNA, 25 bp, Homo sapien
ctgtaatctgagtgttcaatagagt

SEQ ID NO: 4694250 - DNA, 25 bp, Homo sapien
cttgtaacgccaaagcatgtctctg

SEQ ID NO: 4694251 - DNA, 25 bp, Homo sapien
tagtccttcttgtaacgccaaagca

SEQ ID NO: 4694252 - DNA, 25 bp, Homo sapien
ggaccatccagataaagcccttgta

SEQ ID NO: 4694253 - DNA, 25 bp, Homo sapien
cagataaagcccttgtaccctaaag

SEQ ID NO: 4694254 - DNA, 25 bp, Homo sapien
gaaactatctactatcacacgaaga

SEQ ID NO: 4694255 - DNA, 25 bp, Homo sapien
tatctactatcacacgaagacattc

SEQ ID NO: 4694256 - DNA, 25 bp, Homo sapien
tggaaactatctactatcacacgaa

SEQ ID NO: 4694257 - DNA, 25 bp, Homo sapien
tactatcacacgaagacattcactc

SEQ ID NO: 4694258 - DNA, 25 bp, Homo sapien
cacatgtgtagtaaattcattacat

SEQ ID NO: 4694259 - DNA, 25 bp, Homo sapien
catgtgtagtaaattcattacatgc

SEQ ID NO: 4694260 - DNA, 25 bp, Homo sapien
acatgtgtagtaaattcattacatg

SEQ ID NO: 4694261 - DNA, 25 bp, Homo sapien
gagaaatgggacgtgttctactctg

SEQ ID NO: 4694262 - DNA, 25 bp, Homo sapien
ctactctgttctcggagaaggttca

SEQ ID NO: 4694263 - DNA, 25 bp, Homo sapien
ttctactctgttctcggagaaggtt

SEQ ID NO: 4694264 - DNA, 25 bp, Homo sapien
cttttggagaaatgggacgtgttct

SEQ ID NO: 4694265 - DNA, 25 bp, Homo sapien
aattttcgatggatgatgcccacca

SEQ ID NO: 4694266 - DNA, 25 bp, Homo sapien
taaattttcgatggatgatgcccac

SEQ ID NO: 4694267 - DNA, 25 bp, Homo sapien
aaattttcgatggatgatgcccacc

SEQ ID NO: 4694268 - DNA, 25 bp, Homo sapien
attttcgatggatgatgcccaccat

SEQ ID NO: 4694269 - DNA, 25 bp, Homo sapien
ccttgatcttaaaatcataactgct

SEQ ID NO: 4694270 - DNA, 25 bp, Homo sapien
aagtgctttgtttgagctgcatctg

SEQ ID NO: 4694271 - DNA, 25 bp, Homo sapien
aggaaccttgatcttaaaatcataa

SEQ ID NO: 4694272 - DNA, 25 bp, Homo sapien
caagtgctttgtttgagctgcatct

SEQ ID NO: 4694273 - DNA, 25 bp, Homo sapien
gttgctgaggtgtgagtaaaaatat

SEQ ID NO: 4694274 - DNA, 25 bp, Homo sapien
tgtggcctgtttactgaagttacgc

SEQ ID NO: 4694275 - DNA, 25 bp, Homo sapien
cactgtgatgctgcatttcttggcc

SEQ ID NO: 4694276 - DNA, 25 bp, Homo sapien
tcattcaagatttctgtggcctgtt

SEQ ID NO: 4694277 - DNA, 25 bp, Homo sapien
cataaagtgaacatacccatggaac

SEQ ID NO: 4694278 - DNA, 25 bp, Homo sapien
caaaaaagggccacacatcataggt

SEQ ID NO: 4694279 - DNA, 25 bp, Homo sapien
tttctatcaggtaggacatgggtct

SEQ ID NO: 4694280 - DNA, 25 bp, Homo sapien
tcctcttgatggacgtttgcattgt

SEQ ID NO: 4694281 - DNA, 25 bp, Homo sapien
ttgaactcctgagctcaggcgatcc

SEQ ID NO: 4694282 - DNA, 25 bp, Homo sapien
tagagacgaggttgcccaggtggtc

SEQ ID NO: 4694283 - DNA, 25 bp, Homo sapien
agcctcccaaagcactgggattaca

SEQ ID NO: 4694284 - DNA, 25 bp, Homo sapien
agctcaggcgatccacccgcctcag

SEQ ID NO: 4694285 - DNA, 25 bp, Homo sapien
aaatgtaggttgaatggatgacaac

SEQ ID NO: 4694286 - DNA, 25 bp, Homo sapien
gtactaggcactcttcatacatgat

SEQ ID NO: 4694287 - DNA, 25 bp, Homo sapien
gccaggccctgtactaggcactctt

SEQ ID NO: 4694288 - DNA, 25 bp, Homo sapien
tgtatgcccggcaagaaaatgtagg

SEQ ID NO: 4694289 - DNA, 25 bp, Homo sapien
atgtcagaacctttgctccctcttt

SEQ ID NO: 4694290 - DNA, 25 bp, Homo sapien
ggatgtcagaacctttgctccctct

SEQ ID NO: 4694291 - DNA, 25 bp, Homo sapien
gatgtcagaacctttgctccctctt

SEQ ID NO: 4694292 - DNA, 25 bp, Homo sapien
cctggctcataccttcagggagcct

SEQ ID NO: 4694293 - DNA, 25 bp, Homo sapien
ccttcagggagcctgtgaatactta

SEQ ID NO: 4694294 - DNA, 25 bp, Homo sapien
ctccctggctcataccttcagggag

SEQ ID NO: 4694295 - DNA, 25 bp, Homo sapien
cttcagggagcctgtgaatacttac

SEQ ID NO: 4694296 - DNA, 25 bp, Homo sapien
tgggagacacacaattcctagcctg

SEQ ID NO: 4694297 - DNA, 25 bp, Homo sapien
ggcaataggcagatttcatcacacg

SEQ ID NO: 4694298 - DNA, 25 bp, Homo sapien
tgtcagccggtgcaaatggaagaga

SEQ ID NO: 4694299 - DNA, 25 bp, Homo sapien
cagtaataccaaaacggcagggagc

SEQ ID NO: 4694300 - DNA, 25 bp, Homo sapien
tcttgtacctgattcgtttgttgcc

SEQ ID NO: 4694301 - DNA, 25 bp, Homo sapien
cgaattggtctggttgttctgcaca

SEQ ID NO: 4694302 - DNA, 25 bp, Homo sapien
tctttgcagcatagaggttggcttc

SEQ ID NO: 4694303 - DNA, 25 bp, Homo sapien
tactgcgtgtgcagctgtcacggcc

SEQ ID NO: 4694304 - DNA, 25 bp, Homo sapien
tagtcatgagcgatagcactctgcc

SEQ ID NO: 4694305 - DNA, 25 bp, Homo sapien
cataatctactagtgagtggcattc

SEQ ID NO: 4694306 - DNA, 25 bp, Homo sapien
ctactgaccctaaagtggtatctgg

SEQ ID NO: 4694307 - DNA, 25 bp, Homo sapien
gcactctgcctaattactgaactga

SEQ ID NO: 4694308 - DNA, 25 bp, Homo sapien
gaaacgcccctggaattgctactga

SEQ ID NO: 4694309 - DNA, 25 bp, Homo sapien
cggacgaggatccaagaatcttgca

SEQ ID NO: 4694310 - DNA, 25 bp, Homo sapien
catctgtttggactagctgcacatc

SEQ ID NO: 4694311 - DNA, 25 bp, Homo sapien
gcagccaaaatgtaccggacgagga

SEQ ID NO: 4694312 - DNA, 25 bp, Homo sapien
tccaggatttagtcattacacgagc

SEQ ID NO: 4694313 - DNA, 25 bp, Homo sapien
gagaagagacttttccaggagctct

SEQ ID NO: 4694314 - DNA, 25 bp, Homo sapien
taacagagagctacacacataatcc

SEQ ID NO: 4694315 - DNA, 25 bp, Homo sapien
ttacacgagcttgtcaacatggctg

SEQ ID NO: 4694316 - DNA, 25 bp, Homo sapien
gtgattgcacattggctccgacttg

SEQ ID NO: 4694317 - DNA, 25 bp, Homo sapien
tgcacattggctccgacttgggacc

SEQ ID NO: 4694318 - DNA, 25 bp, Homo sapien
tggctccgacttgggacccttggta

SEQ ID NO: 4694319 - DNA, 25 bp, Homo sapien
ttcatgaacatgtccccagaatttg

SEQ ID NO: 4694320 - DNA, 25 bp, Homo sapien
tgctagaaaggccccactggggcat

SEQ ID NO: 4694321 - DNA, 25 bp, Homo sapien
cctgctagaaaggccccactggggc

SEQ ID NO: 4694322 - DNA, 25 bp, Homo sapien
ctagaaaggccccactggggcattt

SEQ ID NO: 4694323 - DNA, 25 bp, Homo sapien
tagaaaggccccactggggcatttc

SEQ ID NO: 4694324 - DNA, 25 bp, Homo sapien
catctacagcaaccaaatggatgtg

SEQ ID NO: 4694325 - DNA, 25 bp, Homo sapien
tgacaaaagtaagatgcacccaacc

SEQ ID NO: 4694326 - DNA, 25 bp, Homo sapien
tgtgtgccacaagggtttaacatct

SEQ ID NO: 4694327 - DNA, 25 bp, Homo sapien
gagctcaagccagagccgaatgcat

SEQ ID NO: 4694328 - DNA, 25 bp, Homo sapien
ttgataacatgacggagggtatcca

SEQ ID NO: 4694329 - DNA, 25 bp, Homo sapien
gcctcccgtctgattgataacatga

SEQ ID NO: 4694330 - DNA, 25 bp, Homo sapien
tctgattgataacatgacggagggt

SEQ ID NO: 4694331 - DNA, 25 bp, Homo sapien
cccgtctgattgataacatgacgga

SEQ ID NO: 4694332 - DNA, 25 bp, Homo sapien
gtggactgtacagtgaatttcctcc

SEQ ID NO: 4694333 - DNA, 25 bp, Homo sapien
ttatgtggactgtacagtgaatttc

SEQ ID NO: 4694334 - DNA, 25 bp, Homo sapien
tatgtggactgtacagtgaatttcc

SEQ ID NO: 4694335 - DNA, 25 bp, Homo sapien
attatgtggactgtacagtgaattt

SEQ ID NO: 4694336 - DNA, 25 bp, Homo sapien
cactgtttacctgacactgttctcc

SEQ ID NO: 4694337 - DNA, 25 bp, Homo sapien
tccctacctgccaagaagatgagaa

SEQ ID NO: 4694338 - DNA, 25 bp, Homo sapien
taaaagtgcagcaaagacgctgcct

SEQ ID NO: 4694339 - DNA, 25 bp, Homo sapien
ctagacggcatcaagcatttaggtt

SEQ ID NO: 4694340 - DNA, 25 bp, Homo sapien
ggacaccagccatttctgggcatct

SEQ ID NO: 4694341 - DNA, 25 bp, Homo sapien
ttctgggcatctatgaggacttcta

SEQ ID NO: 4694342 - DNA, 25 bp, Homo sapien
aggacaccagccatttctgggcatc

SEQ ID NO: 4694343 - DNA, 25 bp, Homo sapien
taaatgacctgttttctaccgtctc

SEQ ID NO: 4694344 - DNA, 25 bp, Homo sapien
tggcgtcttaatgggctgatgctta

SEQ ID NO: 4694345 - DNA, 25 bp, Homo sapien
ccttcacctgagttctgtttgggaa

SEQ ID NO: 4694346 - DNA, 25 bp, Homo sapien
atggtaggaaatggcgtcttaatgg

SEQ ID NO: 4694347 - DNA, 25 bp, Homo sapien
cagcaagatgcttttaataacacaa

SEQ ID NO: 4694348 - DNA, 25 bp, Homo sapien
ttgtgcatcccacattgacaataca

SEQ ID NO: 4694349 - DNA, 25 bp, Homo sapien
aattgtcaaatatgttgtgcatccc

SEQ ID NO: 4694350 - DNA, 25 bp, Homo sapien
taacacaattatttgtttagcttgg

SEQ ID NO: 4694351 - DNA, 25 bp, Homo sapien
agaaccccagactccatccaccaca

SEQ ID NO: 4694352 - DNA, 25 bp, Homo sapien
ctagaaccccagactccatccacca

SEQ ID NO: 4694353 - DNA, 25 bp, Homo sapien
tagaaccccagactccatccaccac

SEQ ID NO: 4694354 - DNA, 25 bp, Homo sapien
gaaccccagactccatccaccacac

SEQ ID NO: 4694355 - DNA, 25 bp, Homo sapien
aaaggagaaatgcaactaaaaggct

SEQ ID NO: 4694356 - DNA, 25 bp, Homo sapien
tttactctcgtagcaagccaaggcc

SEQ ID NO: 4694357 - DNA, 25 bp, Homo sapien
tcttcctgagtctactaccgtgagc

SEQ ID NO: 4694358 - DNA, 25 bp, Homo sapien
tgagttatttataagcccaaaaaga

SEQ ID NO: 4694359 - DNA, 25 bp, Homo sapien
taaggatatcgcacattctctgaag

SEQ ID NO: 4694360 - DNA, 25 bp, Homo sapien
tacaacagcgccttatcaagcctca

SEQ ID NO: 4694361 - DNA, 25 bp, Homo sapien
actctggtggtttgagattatgcac

SEQ ID NO: 4694362 - DNA, 25 bp, Homo sapien
ggagaggttgtcagcaagcattctt

SEQ ID NO: 4694363 - DNA, 25 bp, Homo sapien
gtattttctaaacccactgtggcag

SEQ ID NO: 4694364 - DNA, 25 bp, Homo sapien
taaaacacccggatgacaacatgag

SEQ ID NO: 4694365 - DNA, 25 bp, Homo sapien
aaacacagttcaacgggtgcacgtc

SEQ ID NO: 4694366 - DNA, 25 bp, Homo sapien
tcaacacgccgaagaagggcttcag

SEQ ID NO: 4694367 - DNA, 25 bp, Homo sapien
tgtaggagaagtcacagaagatgga

SEQ ID NO: 4694368 - DNA, 25 bp, Homo sapien
tagttagaggtatccgagtgcacac

SEQ ID NO: 4694369 - DNA, 25 bp, Homo sapien
aagatggagttgttgcgtcctgcca

SEQ ID NO: 4694370 - DNA, 25 bp, Homo sapien
tcctgggccttctgtaggagaagtc

SEQ ID NO: 4694371 - DNA, 25 bp, Homo sapien
taccaagttctcgaataagacaagg

SEQ ID NO: 4694372 - DNA, 25 bp, Homo sapien
tgtagctcagggaaaagtgtggcca

SEQ ID NO: 4694373 - DNA, 25 bp, Homo sapien
gatggtgggctacaaaaacgctttc

SEQ ID NO: 4694374 - DNA, 25 bp, Homo sapien
ccaagtaattggcaactgtgaaacc

SEQ ID NO: 4694375 - DNA, 25 bp, Homo sapien
gacaatccaagtcagtaatggaaat

SEQ ID NO: 4694376 - DNA, 25 bp, Homo sapien
tccaactccattagtgatatgaaag

SEQ ID NO: 4694377 - DNA, 25 bp, Homo sapien
gatatgaaagaaagacaatccaagt

SEQ ID NO: 4694378 - DNA, 25 bp, Homo sapien
caagaagttcaatttaggtgaggtg

SEQ ID NO: 4694379 - DNA, 25 bp, Homo sapien
caatccagggtgtaatccagttaga

SEQ ID NO: 4694380 - DNA, 25 bp, Homo sapien
ttttattaccgagcagactctgggc

SEQ ID NO: 4694381 - DNA, 25 bp, Homo sapien
taaaaccccagacggatcaatctcg

SEQ ID NO: 4694382 - DNA, 25 bp, Homo sapien
gatgcccagaggacgtagcaaacct

SEQ ID NO: 4694383 - DNA, 25 bp, Homo sapien
cccaagagtacacagctggtaggag

SEQ ID NO: 4694384 - DNA, 25 bp, Homo sapien
gagatggtgcagaaggacgttccaa

SEQ ID NO: 4694385 - DNA, 25 bp, Homo sapien
ggtgcagaaggacgttccaagaaca

SEQ ID NO: 4694386 - DNA, 25 bp, Homo sapien
ctcttgcccaagagtacacagctgg

SEQ ID NO: 4694387 - DNA, 25 bp, Homo sapien
tgttcaactgttcattgactaagtg

SEQ ID NO: 4694388 - DNA, 25 bp, Homo sapien
tgtggctttggaccggtgactgccc

SEQ ID NO: 4694389 - DNA, 25 bp, Homo sapien
gacttggcaccccatggtgcagcga

SEQ ID NO: 4694390 - DNA, 25 bp, Homo sapien
ctctctgtaagatggactttcaact

SEQ ID NO: 4694391 - DNA, 25 bp, Homo sapien
tccaaacccatgtgcaaggggctga

SEQ ID NO: 4694392 - DNA, 25 bp, Homo sapien
gtggtgactgagagttgttggcagc

SEQ ID NO: 4694393 - DNA, 25 bp, Homo sapien
tctgggcccaggcttaggctgttct

SEQ ID NO: 4694394 - DNA, 25 bp, Homo sapien
ggcatccacgggagagccgctgtcc

SEQ ID NO: 4694395 - DNA, 25 bp, Homo sapien
ttcattaagctgcacactccgcatg

SEQ ID NO: 4694396 - DNA, 25 bp, Homo sapien
gcttcattaagctgcacactccgca

SEQ ID NO: 4694397 - DNA, 25 bp, Homo sapien
cttcattaagctgcacactccgcat

SEQ ID NO: 4694398 - DNA, 25 bp, Homo sapien
gctgcaccctgtcattcttaagcat

SEQ ID NO: 4694399 - DNA, 25 bp, Homo sapien
cctgcaggcccaggtacaaaccctc

SEQ ID NO: 4694400 - DNA, 25 bp, Homo sapien
tacaaaccctcagccacaaacagag

SEQ ID NO: 4694401 - DNA, 25 bp, Homo sapien
ctcagccacaaacagagaccctgtc

SEQ ID NO: 4694402 - DNA, 25 bp, Homo sapien
tgcaggcccaggtacaaaccctcag

SEQ ID NO: 4694403 - DNA, 25 bp, Homo sapien
gagcagtactcgctgttgactccgg

SEQ ID NO: 4694404 - DNA, 25 bp, Homo sapien
gcagtactcgctgttgactccggga

SEQ ID NO: 4694405 - DNA, 25 bp, Homo sapien
tactcgctgttgactccgggaaacc

SEQ ID NO: 4694406 - DNA, 25 bp, Homo sapien
tcgctgttgactccgggaaaccctc

SEQ ID NO: 4694407 - DNA, 25 bp, Homo sapien
gagccgaggaaaatgggtccataac

SEQ ID NO: 4694408 - DNA, 25 bp, Homo sapien
ttgccagagccgaggaaaatgggtc

SEQ ID NO: 4694409 - DNA, 25 bp, Homo sapien
ccagagccgaggaaaatgggtccat

SEQ ID NO: 4694410 - DNA, 25 bp, Homo sapien
tgccagagccgaggaaaatgggtcc

SEQ ID NO: 4694411 - DNA, 25 bp, Homo sapien
tacgagcctattgctgaagcccaaa

SEQ ID NO: 4694412 - DNA, 25 bp, Homo sapien
caaaccggcgcgagcagatggtaaa

SEQ ID NO: 4694413 - DNA, 25 bp, Homo sapien
tatgaaattattacgccggcgaggt

SEQ ID NO: 4694414 - DNA, 25 bp, Homo sapien
gaaggagatgggacgttataaacac

SEQ ID NO: 4694415 - DNA, 25 bp, Homo sapien
gacaacggacagcagcaagcctctg

SEQ ID NO: 4694416 - DNA, 25 bp, Homo sapien
cgaaggtgatcaggacaacggacag

SEQ ID NO: 4694417 - DNA, 25 bp, Homo sapien
tgatcaggacaacggacagcagcaa

SEQ ID NO: 4694418 - DNA, 25 bp, Homo sapien
aggctgccccgaaggtgatcaggac

SEQ ID NO: 4694419 - DNA, 25 bp, Homo sapien
gaacattcattgaagtaagtgagga

SEQ ID NO: 4694420 - DNA, 25 bp, Homo sapien
cactgtcgttagaacattcattgaa

SEQ ID NO: 4694421 - DNA, 25 bp, Homo sapien
taagtgaggaatccatcacaggctg

SEQ ID NO: 4694422 - DNA, 25 bp, Homo sapien
gtgattttatcactgtcgttagaac

SEQ ID NO: 4694423 - DNA, 25 bp, Homo sapien
cttctcccaggctctgcacccacat

SEQ ID NO: 4694424 - DNA, 25 bp, Homo sapien
ctggtgtcggttaatgataatctat

SEQ ID NO: 4694425 - DNA, 25 bp, Homo sapien
aaatgggcgcgtgctccggcactga

SEQ ID NO: 4694426 - DNA, 25 bp, Homo sapien
ccggcactgagcgtgttttatggct

SEQ ID NO: 4694427 - DNA, 25 bp, Homo sapien
taaaacgatagtccatcaaagtggg

SEQ ID NO: 4694428 - DNA, 25 bp, Homo sapien
tcgcttttgcgaacatgctgaaacc

SEQ ID NO: 4694429 - DNA, 25 bp, Homo sapien
tgattagagtgacaagcactgactg

SEQ ID NO: 4694430 - DNA, 25 bp, Homo sapien
tataaatgacgcttcgcttttgcga

SEQ ID NO: 4694431 - DNA, 25 bp, Homo sapien
cattatgagggcttatccttataaa

SEQ ID NO: 4694432 - DNA, 25 bp, Homo sapien
cagtggggccaaaagttgagcaaag

SEQ ID NO: 4694433 - DNA, 25 bp, Homo sapien
caacctcatccgaacaatgtcatga

SEQ ID NO: 4694434 - DNA, 25 bp, Homo sapien
atccccaacctcatccgaacaatgt

SEQ ID NO: 4694435 - DNA, 25 bp, Homo sapien
ttcataaaggaacagtggggccaaa

SEQ ID NO: 4694436 - DNA, 25 bp, Homo sapien
caggctccagttctgatggatggaa

SEQ ID NO: 4694437 - DNA, 25 bp, Homo sapien
ttccaggctccagttctgatggatg

SEQ ID NO: 4694438 - DNA, 25 bp, Homo sapien
ggtgggactgccctcagagacccca

SEQ ID NO: 4694439 - DNA, 25 bp, Homo sapien
gctggggtgggactgccctcagaga

SEQ ID NO: 4694440 - DNA, 25 bp, Homo sapien
ggtgtaatgtccacgatcactggga

SEQ ID NO: 4694441 - DNA, 25 bp, Homo sapien
tcatgggcacttgtacttaaccggc

SEQ ID NO: 4694442 - DNA, 25 bp, Homo sapien
gctccagtccctgcaaaaaccaggt

SEQ ID NO: 4694443 - DNA, 25 bp, Homo sapien
ggcttcgtcagaggaccacacatct

SEQ ID NO: 4694444 - DNA, 25 bp, Homo sapien
acacagcggctaccatggttgagga

SEQ ID NO: 4694445 - DNA, 25 bp, Homo sapien
caggtgcatgagacagtggtacgca

SEQ ID NO: 4694446 - DNA, 25 bp, Homo sapien
tgaactggtctcactcaaaatggct

SEQ ID NO: 4694447 - DNA, 25 bp, Homo sapien
ccactgaaaagacggaatggtgacc

SEQ ID NO: 4694448 - DNA, 25 bp, Homo sapien
tgttgattcctttatgagaactgct

SEQ ID NO: 4694449 - DNA, 25 bp, Homo sapien
aaatgtaacagttgcacttttcagc

SEQ ID NO: 4694450 - DNA, 25 bp, Homo sapien
cttaatgggcacacaaattggagat

SEQ ID NO: 4694451 - DNA, 25 bp, Homo sapien
tctatatttgtccatccctgagggt

SEQ ID NO: 4694452 - DNA, 25 bp, Homo sapien
catgtgactcggtaattgctgtgga

SEQ ID NO: 4694453 - DNA, 25 bp, Homo sapien
gaagccacgtcaatctgagcggtaa

SEQ ID NO: 4694454 - DNA, 25 bp, Homo sapien
tctgagcggtaaaaggtttgggcaa

SEQ ID NO: 4694455 - DNA, 25 bp, Homo sapien
gaaaagcagctgtcgctgaagccac

SEQ ID NO: 4694456 - DNA, 25 bp, Homo sapien
tctctgccacagaatgcttctggca

SEQ ID NO: 4694457 - DNA, 25 bp, Homo sapien
aaatttgccggcttctcacagacat

SEQ ID NO: 4694458 - DNA, 25 bp, Homo sapien
ataaaatttgccggcttctcacaga

SEQ ID NO: 4694459 - DNA, 25 bp, Homo sapien
cataataaaatttgccggcttctca

SEQ ID NO: 4694460 - DNA, 25 bp, Homo sapien
ataataaaatttgccggcttctcac

SEQ ID NO: 4694461 - DNA, 25 bp, Homo sapien
gcatagcatgaccttcacacagata

SEQ ID NO: 4694462 - DNA, 25 bp, Homo sapien
ctgcatagcatgaccttcacacaga

SEQ ID NO: 4694463 - DNA, 25 bp, Homo sapien
agcctgcatagcatgaccttcacac

SEQ ID NO: 4694464 - DNA, 25 bp, Homo sapien
ttcacacagatagagcctagcagcc

SEQ ID NO: 4694465 - DNA, 25 bp, Homo sapien
aaggtaacctcgcacactagcagcg

SEQ ID NO: 4694466 - DNA, 25 bp, Homo sapien
actagcagcgggtctcataggcagg

SEQ ID NO: 4694467 - DNA, 25 bp, Homo sapien
agcgctctgtaggatgaatgcccca

SEQ ID NO: 4694468 - DNA, 25 bp, Homo sapien
cagagacttggccaacaggacctga

SEQ ID NO: 4694469 - DNA, 25 bp, Homo sapien
ctgggcaaaaccgtgcctgcctcag

SEQ ID NO: 4694470 - DNA, 25 bp, Homo sapien
gggcaaaaccgtgcctgcctcagca

SEQ ID NO: 4694471 - DNA, 25 bp, Homo sapien
tgggcaaaaccgtgcctgcctcagc

SEQ ID NO: 4694472 - DNA, 25 bp, Homo sapien
gagacagcaggcggtccggccggcc

SEQ ID NO: 4694473 - DNA, 25 bp, Homo sapien
tgtgagacagcaggcggtccggccg

SEQ ID NO: 4694474 - DNA, 25 bp, Homo sapien
ggtgtgagacagcaggcggtccggc

SEQ ID NO: 4694475 - DNA, 25 bp, Homo sapien
acagcaggcggtccggccggccacc

SEQ ID NO: 4694476 - DNA, 25 bp, Homo sapien
aatcagttactgcattacaaggccg

SEQ ID NO: 4694477 - DNA, 25 bp, Homo sapien
tacaaggccggcgatgagcttttaa

SEQ ID NO: 4694478 - DNA, 25 bp, Homo sapien
agatgtgtgcgccaacttcggttgc

SEQ ID NO: 4694479 - DNA, 25 bp, Homo sapien
ttgcactaagtaccaggccccagat

SEQ ID NO: 4694480 - DNA, 25 bp, Homo sapien
acccacgctgcttgtctggggcttg

SEQ ID NO: 4694481 - DNA, 25 bp, Homo sapien
gaacccacgctgcttgtctggggct

SEQ ID NO: 4694482 - DNA, 25 bp, Homo sapien
aacccacgctgcttgtctggggctt

SEQ ID NO: 4694483 - DNA, 25 bp, Homo sapien
tgtctggggcttgagccgccttcat

SEQ ID NO: 4694484 - DNA, 25 bp, Homo sapien
ctgtctgtaaaacccgtttatggag

SEQ ID NO: 4694485 - DNA, 25 bp, Homo sapien
ttgctccgcacgctctaacagctgt

SEQ ID NO: 4694486 - DNA, 25 bp, Homo sapien
tatggagcctccataaatttcccag

SEQ ID NO: 4694487 - DNA, 25 bp, Homo sapien
ggctgtaagcctgcgactgggtccc

SEQ ID NO: 4694488 - DNA, 25 bp, Homo sapien
cagacccactatcgccttcacagcc

SEQ ID NO: 4694489 - DNA, 25 bp, Homo sapien
cctcagcctgagtttggcccaattt

SEQ ID NO: 4694490 - DNA, 25 bp, Homo sapien
ctcagcctgagtttggcccaatttc

SEQ ID NO: 4694491 - DNA, 25 bp, Homo sapien
tcaccccagacccactatcgccttc

SEQ ID NO: 4694492 - DNA, 25 bp, Homo sapien
ctgttctgaaagagatgggttaagg

SEQ ID NO: 4694493 - DNA, 25 bp, Homo sapien
gagagccgtgcaaagcaggccttca

SEQ ID NO: 4694494 - DNA, 25 bp, Homo sapien
tgaaagagatgggttaagggtggag

SEQ ID NO: 4694495 - DNA, 25 bp, Homo sapien
ggttaagggtggagagccgtgcaaa

SEQ ID NO: 4694496 - DNA, 25 bp, Homo sapien
ccctcaggctagaagttggaccctt

SEQ ID NO: 4694497 - DNA, 25 bp, Homo sapien
gagctcagccagtcgtctcaaacta

SEQ ID NO: 4694498 - DNA, 25 bp, Homo sapien
tctcgtaggcctcgctgtacgcaag

SEQ ID NO: 4694499 - DNA, 25 bp, Homo sapien
gccattctaggcttcactgaaccct

SEQ ID NO: 4694500 - DNA, 25 bp, Homo sapien
tgcgcccacccgggcctccccgagc

SEQ ID NO: 4694501 - DNA, 25 bp, Homo sapien
ggagagggagccctggcgtcccgag

SEQ ID NO: 4694502 - DNA, 25 bp, Homo sapien
aggagggagagggagccctggcgtc

SEQ ID NO: 4694503 - DNA, 25 bp, Homo sapien
agggagagggagccctggcgtcccg

SEQ ID NO: 4694504 - DNA, 25 bp, Homo sapien
ggagggagagggagccctggcgtcc

SEQ ID NO: 4694505 - DNA, 25 bp, Homo sapien
gcgagcctcaccgagagcggcggcg

SEQ ID NO: 4694506 - DNA, 25 bp, Homo sapien
cgagcgcgagcctcaccgagagcgg

SEQ ID NO: 4694507 - DNA, 25 bp, Homo sapien
tcgagcgcgagcctcaccgagagcg

SEQ ID NO: 4694508 - DNA, 25 bp, Homo sapien
agcgcgagcctcaccgagagcggcg

SEQ ID NO: 4694509 - DNA, 25 bp, Homo sapien
caggcggcaggagccggcgccgcag

SEQ ID NO: 4694510 - DNA, 25 bp, Homo sapien
gcccggggcccaggcggcaggagcc

SEQ ID NO: 4694511 - DNA, 25 bp, Homo sapien
ccaggcggcaggagccggcgccgca

SEQ ID NO: 4694512 - DNA, 25 bp, Homo sapien
gggcccaggcggcaggagccggcgc

SEQ ID NO: 4694513 - DNA, 25 bp, Homo sapien
tcccggctccgtctcacgcagaagc

SEQ ID NO: 4694514 - DNA, 25 bp, Homo sapien
cgggtcccggctccgtctcacgcag

SEQ ID NO: 4694515 - DNA, 25 bp, Homo sapien
ggtcccggctccgtctcacgcagaa

SEQ ID NO: 4694516 - DNA, 25 bp, Homo sapien
ccggctccgtctcacgcagaagcag

SEQ ID NO: 4694517 - DNA, 25 bp, Homo sapien
gcctctcgccgccaggccgagcccg

SEQ ID NO: 4694518 - DNA, 25 bp, Homo sapien
tgcccgggccttgggggcgctgctg

SEQ ID NO: 4694519 - DNA, 25 bp, Homo sapien
gtcccccagcttctcccgcctctcg

SEQ ID NO: 4694520 - DNA, 25 bp, Homo sapien
tgctggcactcgggtcccccagctt

SEQ ID NO: 4694521 - DNA, 25 bp, Homo sapien
aatgagggtagtccatgtccactcc

SEQ ID NO: 4694522 - DNA, 25 bp, Homo sapien
tgtccactcccatcaggttttgctg

SEQ ID NO: 4694523 - DNA, 25 bp, Homo sapien
ttgctgggtggtgccatattgtccc

SEQ ID NO: 4694524 - DNA, 25 bp, Homo sapien
ttactgcaaatgagggtagtccatg

SEQ ID NO: 4694525 - DNA, 25 bp, Homo sapien
tgaactttggacagattacctggtg

SEQ ID NO: 4694526 - DNA, 25 bp, Homo sapien
tgtggagcctcaggatagcatcctg

SEQ ID NO: 4694527 - DNA, 25 bp, Homo sapien
cacccgtgggggacagtgcacagac

SEQ ID NO: 4694528 - DNA, 25 bp, Homo sapien
gcccagttaaatgggcagctggctt

SEQ ID NO: 4694529 - DNA, 25 bp, Homo sapien
attctgacctctcccctaagcgggc

SEQ ID NO: 4694530 - DNA, 25 bp, Homo sapien
aagcgggcatacagcctctgtgaga

SEQ ID NO: 4694531 - DNA, 25 bp, Homo sapien
gcaggtcatcaggtccagatggttc

SEQ ID NO: 4694532 - DNA, 25 bp, Homo sapien
tcacctcgcaggtcatcaggtccag

SEQ ID NO: 4694533 - DNA, 25 bp, Homo sapien
caccgcacaggagggaataggttga

SEQ ID NO: 4694534 - DNA, 25 bp, Homo sapien
ctaatgagggagatccaagcaccgc

SEQ ID NO: 4694535 - DNA, 25 bp, Homo sapien
taaaaatgagctaaggccatgtttg

SEQ ID NO: 4694536 - DNA, 25 bp, Homo sapien
ccatgtttgtgtaggatggaggtaa

SEQ ID NO: 4694537 - DNA, 25 bp, Homo sapien
cccgactcccgtgatgggatccatt

SEQ ID NO: 4694538 - DNA, 25 bp, Homo sapien
cattgacgtttctggcaaggcttct

SEQ ID NO: 4694539 - DNA, 25 bp, Homo sapien
tcggggctcggttccgagaagccac

SEQ ID NO: 4694540 - DNA, 25 bp, Homo sapien
tacgtcatagcctgtcggggctcgg

SEQ ID NO: 4694541 - DNA, 25 bp, Homo sapien
aaatgtacaaactagtatcttgact

SEQ ID NO: 4694542 - DNA, 25 bp, Homo sapien
gccagaaggtcttggacacaggaga

SEQ ID NO: 4694543 - DNA, 25 bp, Homo sapien
tgtacaaactagtatcttgacttac

SEQ ID NO: 4694544 - DNA, 25 bp, Homo sapien
aatgtacaaactagtatcttgactt

SEQ ID NO: 4694545 - DNA, 25 bp, Homo sapien
aatatagtgttgcagcttcagtctc

SEQ ID NO: 4694546 - DNA, 25 bp, Homo sapien
cataaatatagtgttgcagcttcag

SEQ ID NO: 4694547 - DNA, 25 bp, Homo sapien
tctcataaatatagtgttgcagctt

SEQ ID NO: 4694548 - DNA, 25 bp, Homo sapien
gaaaaagagtcatctcataaatata

SEQ ID NO: 4694549 - DNA, 25 bp, Homo sapien
agtaaatctcagcttaatgtatttt

SEQ ID NO: 4694550 - DNA, 25 bp, Homo sapien
tacctgcgaattgacccacacattt

SEQ ID NO: 4694551 - DNA, 25 bp, Homo sapien
tgtgcctatacatctacgatcagct

SEQ ID NO: 4694552 - DNA, 25 bp, Homo sapien
ataaaacagagtctagcaatgtgcc

SEQ ID NO: 4694553 - DNA, 25 bp, Homo sapien
tgttaagatgtcaactacctgcgaa

SEQ ID NO: 4694554 - DNA, 25 bp, Homo sapien
cagggagctgtgtctttaacgttcc

SEQ ID NO: 4694555 - DNA, 25 bp, Homo sapien
taacgttccaagagacaagggcgtc

SEQ ID NO: 4694556 - DNA, 25 bp, Homo sapien
aaactgtctgcaggacgctccaagg

SEQ ID NO: 4694557 - DNA, 25 bp, Homo sapien
tgccaatgatggttctctccaccca

SEQ ID NO: 4694558 - DNA, 25 bp, Homo sapien
taaataagccgtctttccagaggtc

SEQ ID NO: 4694559 - DNA, 25 bp, Homo sapien
aaataagccgtctttccagaggtca

SEQ ID NO: 4694560 - DNA, 25 bp, Homo sapien
atttaaataagccgtctttccagag

SEQ ID NO: 4694561 - DNA, 25 bp, Homo sapien
tggatttaaataagccgtctttcca

SEQ ID NO: 4694562 - DNA, 25 bp, Homo sapien
tcttggtttggactacagggccagc

SEQ ID NO: 4694563 - DNA, 25 bp, Homo sapien
ggaagcaatgtcactccaaagccag

SEQ ID NO: 4694564 - DNA, 25 bp, Homo sapien
gaatctgtccagtcttgagacccca

SEQ ID NO: 4694565 - DNA, 25 bp, Homo sapien
taatacagtgggtctgcgacaccat

SEQ ID NO: 4694566 - DNA, 25 bp, Homo sapien
gcttcatatctactaacacgttccc

SEQ ID NO: 4694567 - DNA, 25 bp, Homo sapien
cctgaattgggatgaagcccacagg

SEQ ID NO: 4694568 - DNA, 25 bp, Homo sapien
tgagcttcatatctactaacacgtt

SEQ ID NO: 4694569 - DNA, 25 bp, Homo sapien
gtgtgtccaccgtctcctgaattgg

SEQ ID NO: 4694570 - DNA, 25 bp, Homo sapien
tggtccggcccatgatccgaatgtc

SEQ ID NO: 4694571 - DNA, 25 bp, Homo sapien
caataaacgtgtactgaggcggggc

SEQ ID NO: 4694572 - DNA, 25 bp, Homo sapien
aaatcgcagcttccgttgaatcccg

SEQ ID NO: 4694573 - DNA, 25 bp, Homo sapien
gaatcccgtggaataaatttaatgc

SEQ ID NO: 4694574 - DNA, 25 bp, Homo sapien
gctgatgactgggaaggcgttgtgg

SEQ ID NO: 4694575 - DNA, 25 bp, Homo sapien
atttcttggtactctgcccattcga

SEQ ID NO: 4694576 - DNA, 25 bp, Homo sapien
tactctgcccattcgataccagatc

SEQ ID NO: 4694577 - DNA, 25 bp, Homo sapien
tgtgggttgagatgagtcatgattt

SEQ ID NO: 4694578 - DNA, 25 bp, Homo sapien
cattcttccaagtgagacggaggct

SEQ ID NO: 4694579 - DNA, 25 bp, Homo sapien
tcaaatgagttgctggccaagacag

SEQ ID NO: 4694580 - DNA, 25 bp, Homo sapien
gacacacctgatatagccttgagca

SEQ ID NO: 4694581 - DNA, 25 bp, Homo sapien
tgaccttaaggccagtgatcccaac

SEQ ID NO: 4694582 - DNA, 25 bp, Homo sapien
ctcaccaccacacgggctcgagatg

SEQ ID NO: 4694583 - DNA, 25 bp, Homo sapien
ccgggagagaagtcctctgcgctga

SEQ ID NO: 4694584 - DNA, 25 bp, Homo sapien
gcttcccgggagagaagtcctctgc

SEQ ID NO: 4694585 - DNA, 25 bp, Homo sapien
ccccggaagcgctcacagaagaaga

SEQ ID NO: 4694586 - DNA, 25 bp, Homo sapien
ctccaaagccggtgacaccacagca

SEQ ID NO: 4694587 - DNA, 25 bp, Homo sapien
tctgcaataacggagcttctgcggg

SEQ ID NO: 4694588 - DNA, 25 bp, Homo sapien
ggacaactccaaagccggtgacacc

SEQ ID NO: 4694589 - DNA, 25 bp, Homo sapien
ttctgcaataacggagcttctgcgg

SEQ ID NO: 4694590 - DNA, 25 bp, Homo sapien
gcagaaacaggtgacgccctgcatg

SEQ ID NO: 4694591 - DNA, 25 bp, Homo sapien
cgccctgcatgtgacagacggtgga

SEQ ID NO: 4694592 - DNA, 25 bp, Homo sapien
ctgctctgatagaggccaggaaggt

SEQ ID NO: 4694593 - DNA, 25 bp, Homo sapien
caggtgacgccctgcatgtgacaga

SEQ ID NO: 4694594 - DNA, 25 bp, Homo sapien
atacagaagcagcatcgacgacggc

SEQ ID NO: 4694595 - DNA, 25 bp, Homo sapien
cctgaagttctctggacaaggtgtc

SEQ ID NO: 4694596 - DNA, 25 bp, Homo sapien
gaccctaacacgtagttctgccgaa

SEQ ID NO: 4694597 - DNA, 25 bp, Homo sapien
cgacgacggcttgaggacctctgaa

SEQ ID NO: 4694598 - DNA, 25 bp, Homo sapien
ttccgaacctgtgactgacaacttg

SEQ ID NO: 4694599 - DNA, 25 bp, Homo sapien
agtacaattatgtctgtcactaaga

SEQ ID NO: 4694600 - DNA, 25 bp, Homo sapien
gataacatccatgcaaaaagttaag

SEQ ID NO: 4694601 - DNA, 25 bp, Homo sapien
aagaaacatacttccgaacctgtga

SEQ ID NO: 4694602 - DNA, 25 bp, Homo sapien
caaaagttgtgactgaatcctggtg

SEQ ID NO: 4694603 - DNA, 25 bp, Homo sapien
tcaaaacctgacatcgacatgcaaa

SEQ ID NO: 4694604 - DNA, 25 bp, Homo sapien
tccctgagaggaagactaaatgcat

SEQ ID NO: 4694605 - DNA, 25 bp, Homo sapien
gatcttctgcaatcaaaatgcccca

SEQ ID NO: 4694606 - DNA, 25 bp, Homo sapien
ttgccactatggaagtggagctcaa

SEQ ID NO: 4694607 - DNA, 25 bp, Homo sapien
cttgccactatggaagtggagctca

SEQ ID NO: 4694608 - DNA, 25 bp, Homo sapien
ctatggaagtggagctcaaaatcca

SEQ ID NO: 4694609 - DNA, 25 bp, Homo sapien
ttgaacgtgacaggaaatgccggcc

SEQ ID NO: 4694610 - DNA, 25 bp, Homo sapien
taatgacgccctcctctaaagtgac

SEQ ID NO: 4694611 - DNA, 25 bp, Homo sapien
tgtgctgtaccaataagtgagacct

SEQ ID NO: 4694612 - DNA, 25 bp, Homo sapien
cagttactgttggtgactacgggca

SEQ ID NO: 4694613 - DNA, 25 bp, Homo sapien
tttccaaattcacgggtgccggatg

SEQ ID NO: 4694614 - DNA, 25 bp, Homo sapien
catggcgacggcaaaatcattaggc

SEQ ID NO: 4694615 - DNA, 25 bp, Homo sapien
tgacatattcacaacactgctgccg

SEQ ID NO: 4694616 - DNA, 25 bp, Homo sapien
gaatggcatcgggaactttgaaact

SEQ ID NO: 4694617 - DNA, 25 bp, Homo sapien
gcacagaccccggatccggatccat

SEQ ID NO: 4694618 - DNA, 25 bp, Homo sapien
gctccatttgcagtggccactttca

SEQ ID NO: 4694619 - DNA, 25 bp, Homo sapien
agaccccggatccggatccatcagg

SEQ ID NO: 4694620 - DNA, 25 bp, Homo sapien
tcagcaggaagtggatcgccaggca

SEQ ID NO: 4694621 - DNA, 25 bp, Homo sapien
aaaccagttgtagtggttgagggca

SEQ ID NO: 4694622 - DNA, 25 bp, Homo sapien
agtgcccccgagtccgctggatgtg

SEQ ID NO: 4694623 - DNA, 25 bp, Homo sapien
ttgtagtggttgagggcagtgcccc

SEQ ID NO: 4694624 - DNA, 25 bp, Homo sapien
cgccagcaccagggagtcacatggc

SEQ ID NO: 4694625 - DNA, 25 bp, Homo sapien
cacttgcttacaagtgtgatcattt

SEQ ID NO: 4694626 - DNA, 25 bp, Homo sapien
aacacttgcttacaagtgtgatcat

SEQ ID NO: 4694627 - DNA, 25 bp, Homo sapien
gaacacttgcttacaagtgtgatca

SEQ ID NO: 4694628 - DNA, 25 bp, Homo sapien
ctgaacacttgcttacaagtgtgat

SEQ ID NO: 4694629 - DNA, 25 bp, Homo sapien
tggagtgctggtactcgtagtccgt

SEQ ID NO: 4694630 - DNA, 25 bp, Homo sapien
tactcgtagtccgtccgggtgctgt

SEQ ID NO: 4694631 - DNA, 25 bp, Homo sapien
tatggcatacaaattggagtgctgg

SEQ ID NO: 4694632 - DNA, 25 bp, Homo sapien
tagtccgtccgggtgctgttcctgc

SEQ ID NO: 4694633 - DNA, 25 bp, Homo sapien
gagccacgagaacatatccactgaa

SEQ ID NO: 4694634 - DNA, 25 bp, Homo sapien
ctctgtggagcgaagaacctcaggg

SEQ ID NO: 4694635 - DNA, 25 bp, Homo sapien
cggtgattacgaaaatcctctgtgg

SEQ ID NO: 4694636 - DNA, 25 bp, Homo sapien
caccaccgcttgagccagttgtcgg

SEQ ID NO: 4694637 - DNA, 25 bp, Homo sapien
gaaggtttaatcaagaaagcaggca

SEQ ID NO: 4694638 - DNA, 25 bp, Homo sapien
acaaggcagtgtgcgtgcgcctgac

SEQ ID NO: 4694639 - DNA, 25 bp, Homo sapien
ttgtgtacggagcaaacctggccac

SEQ ID NO: 4694640 - DNA, 25 bp, Homo sapien
aagcaggcaattcatcaatcgaaac

SEQ ID NO: 4694641 - DNA, 25 bp, Homo sapien
tgtccaaacaagacaggtggcttcg

SEQ ID NO: 4694642 - DNA, 25 bp, Homo sapien
gatgcttgagctcggcaatgctggc

SEQ ID NO: 4694643 - DNA, 25 bp, Homo sapien
caagttctggcaccgcatgtatcca

SEQ ID NO: 4694644 - DNA, 25 bp, Homo sapien
tagcaggccatcgagagtttacccc

SEQ ID NO: 4694645 - DNA, 25 bp, Homo sapien
ccagtagcaagctaacatctccagc

SEQ ID NO: 4694646 - DNA, 25 bp, Homo sapien
attacacatttctgaactagaaggg

SEQ ID NO: 4694647 - DNA, 25 bp, Homo sapien
gagggtttgccttctattatgccaa

SEQ ID NO: 4694648 - DNA, 25 bp, Homo sapien
taaagggttgagtgccgatatgatc

SEQ ID NO: 4694649 - DNA, 25 bp, Homo sapien
gctatgttctatacacaggagttcc

SEQ ID NO: 4694650 - DNA, 25 bp, Homo sapien
gggtacacaccacctggacttggat

SEQ ID NO: 4694651 - DNA, 25 bp, Homo sapien
cctggacgaggatcagcctacatga

SEQ ID NO: 4694652 - DNA, 25 bp, Homo sapien
tggtcattaaaagaaggctcctccc

SEQ ID NO: 4694653 - DNA, 25 bp, Homo sapien
tgcatcaaggtgacagtccctcagt

SEQ ID NO: 4694654 - DNA, 25 bp, Homo sapien
taaaataccgcatatccaaacagga

SEQ ID NO: 4694655 - DNA, 25 bp, Homo sapien
cccattttggagtgagtcggctgag

SEQ ID NO: 4694656 - DNA, 25 bp, Homo sapien
tcctcccaaaggacggaaactgcat

SEQ ID NO: 4694657 - DNA, 25 bp, Homo sapien
cagaggcatcaacgcaggcctgctt

SEQ ID NO: 4694658 - DNA, 25 bp, Homo sapien
cccctgtatgaagagcaatcagtgt

SEQ ID NO: 4694659 - DNA, 25 bp, Homo sapien
caaggacgtgttctcaagcctgtgg

SEQ ID NO: 4694660 - DNA, 25 bp, Homo sapien
tcaagtctgttcaaacaaggacgtg

SEQ ID NO: 4694661 - DNA, 25 bp, Homo sapien
tgggtttctaacagaatctgtgttt

SEQ ID NO: 4694662 - DNA, 25 bp, Homo sapien
taacagaatctgtgtttcaggtccc

SEQ ID NO: 4694663 - DNA, 25 bp, Homo sapien
ctaacagaatctgtgtttcaggtcc

SEQ ID NO: 4694664 - DNA, 25 bp, Homo sapien
gtttctaacagaatctgtgtttcag

SEQ ID NO: 4694665 - DNA, 25 bp, Homo sapien
tgaaagatgaaagcacacccatgtg

SEQ ID NO: 4694666 - DNA, 25 bp, Homo sapien
gagaacaactgtttcacgcgtgtga

SEQ ID NO: 4694667 - DNA, 25 bp, Homo sapien
gaaacaaggctccatacagcaaggg

SEQ ID NO: 4694668 - DNA, 25 bp, Homo sapien
aaaagacagtactcaggctggccga

SEQ ID NO: 4694669 - DNA, 25 bp, Homo sapien
ggagtggcttcttatcggttaagaa

SEQ ID NO: 4694670 - DNA, 25 bp, Homo sapien
aacgatagccccagaaatcttgcag

SEQ ID NO: 4694671 - DNA, 25 bp, Homo sapien
caaattaggtctgattaatcaagtc

SEQ ID NO: 4694672 - DNA, 25 bp, Homo sapien
tatcagtctcatttgcgaatgcaaa

SEQ ID NO: 4694673 - DNA, 25 bp, Homo sapien
tccagagaaaggaatcacggtccca

SEQ ID NO: 4694674 - DNA, 25 bp, Homo sapien
gaggcaaaacctctcaaggcacctg

SEQ ID NO: 4694675 - DNA, 25 bp, Homo sapien
tgcagctaggcaaactgagttccag

SEQ ID NO: 4694676 - DNA, 25 bp, Homo sapien
tatcaggctcttaccggaaatgacg

SEQ ID NO: 4694677 - DNA, 25 bp, Homo sapien
aacaggagggctctctttggtggaa

SEQ ID NO: 4694678 - DNA, 25 bp, Homo sapien
cagcaaaggtggaaaacccctggag

SEQ ID NO: 4694679 - DNA, 25 bp, Homo sapien
ttggtggaagagacaaccacagcaa

SEQ ID NO: 4694680 - DNA, 25 bp, Homo sapien
gtggggaacaggagggctctctttg

SEQ ID NO: 4694681 - DNA, 25 bp, Homo sapien
tagtagaacaatcagctctttaata

SEQ ID NO: 4694682 - DNA, 25 bp, Homo sapien
cagcatatgtgtggtctctcaaggg

SEQ ID NO: 4694683 - DNA, 25 bp, Homo sapien
gctgtggtgctcacaggatccagca

SEQ ID NO: 4694684 - DNA, 25 bp, Homo sapien
ataacaaggtgattatttggcaaag

SEQ ID NO: 4694685 - DNA, 25 bp, Homo sapien
gggtcttctctacagccgttgccat

SEQ ID NO: 4694686 - DNA, 25 bp, Homo sapien
ggttctgtggactgcaatacgtgct

SEQ ID NO: 4694687 - DNA, 25 bp, Homo sapien
caggttgtatttgtaccggtggcag

SEQ ID NO: 4694688 - DNA, 25 bp, Homo sapien
gtaactgcccagtgaacgaatgccc

SEQ ID NO: 4694689 - DNA, 25 bp, Homo sapien
gctttgggcataggcgagaccagac

SEQ ID NO: 4694690 - DNA, 25 bp, Homo sapien
actgcagagctctcacggttaactc

SEQ ID NO: 4694691 - DNA, 25 bp, Homo sapien
gaccagactgcgacatgaacttgac

SEQ ID NO: 4694692 - DNA, 25 bp, Homo sapien
cggttaactctgatgttagatgtga

SEQ ID NO: 4694693 - DNA, 25 bp, Homo sapien
gtgaccagaggctgtgggttcaggg

SEQ ID NO: 4694694 - DNA, 25 bp, Homo sapien
gctgtgggttcaggggcatctttaa

SEQ ID NO: 4694695 - DNA, 25 bp, Homo sapien
gaggctgtgggttcaggggcatctt

SEQ ID NO: 4694696 - DNA, 25 bp, Homo sapien
cagaggctgtgggttcaggggcatc

SEQ ID NO: 4694697 - DNA, 25 bp, Homo sapien
cgcatgagctgaaggcacggactca

SEQ ID NO: 4694698 - DNA, 25 bp, Homo sapien
aacttgcacataactggtgagcggg

SEQ ID NO: 4694699 - DNA, 25 bp, Homo sapien
catgaaatttacacagagactcggc

SEQ ID NO: 4694700 - DNA, 25 bp, Homo sapien
ggatcagtcacacggctaacctaat

SEQ ID NO: 4694701 - DNA, 25 bp, Homo sapien
gctgggtctattgtttaaaatgcac

SEQ ID NO: 4694702 - DNA, 25 bp, Homo sapien
tgaccagcaagtagttggggctcag

SEQ ID NO: 4694703 - DNA, 25 bp, Homo sapien
agattcaagtagaatgaccagcaag

SEQ ID NO: 4694704 - DNA, 25 bp, Homo sapien
ggctggctgaatggcctccacgtga

SEQ ID NO: 4694705 - DNA, 25 bp, Homo sapien
ccaggcaaccccgtgggcccgcagg

SEQ ID NO: 4694706 - DNA, 25 bp, Homo sapien
cagggtctgcacacgtctggagctg

SEQ ID NO: 4694707 - DNA, 25 bp, Homo sapien
tctgcacacgtctggagctgagtcc

SEQ ID NO: 4694708 - DNA, 25 bp, Homo sapien
cccgcagggtctgcacacgtctgga

SEQ ID NO: 4694709 - DNA, 25 bp, Homo sapien
gggcccatacgtagactcccaagag

SEQ ID NO: 4694710 - DNA, 25 bp, Homo sapien
gacactgcttcaggacgaagccggg

SEQ ID NO: 4694711 - DNA, 25 bp, Homo sapien
tgagcagacggcacaggactcttga

SEQ ID NO: 4694712 - DNA, 25 bp, Homo sapien
tccagaattgtaagacgcttacttt

SEQ ID NO: 4694713 - DNA, 25 bp, Homo sapien
cagagatgaactcgtgggtcccgct

SEQ ID NO: 4694714 - DNA, 25 bp, Homo sapien
gatggaagaatcaagagacctggcc

SEQ ID NO: 4694715 - DNA, 25 bp, Homo sapien
taaagagctgggagaatgaaatgcc

SEQ ID NO: 4694716 - DNA, 25 bp, Homo sapien
gaatgttaacgttccaagctggcaa

SEQ ID NO: 4694717 - DNA, 25 bp, Homo sapien
taggttttaacagcgtctccctggc

SEQ ID NO: 4694718 - DNA, 25 bp, Homo sapien
catcatagctgtgtgtagccccgaa

SEQ ID NO: 4694719 - DNA, 25 bp, Homo sapien
caattcttagagctctgtgtctcag

SEQ ID NO: 4694720 - DNA, 25 bp, Homo sapien
tgaaggacatcatgaggtccctggg

SEQ ID NO: 4694721 - DNA, 25 bp, Homo sapien
caatgaggcttattggcaggtagtc

SEQ ID NO: 4694722 - DNA, 25 bp, Homo sapien
tgaactcgggtaatagtacctcaaa

SEQ ID NO: 4694723 - DNA, 25 bp, Homo sapien
tcaagcggtgttaagtgaactcggg

SEQ ID NO: 4694724 - DNA, 25 bp, Homo sapien
gactctattaccagcacctcaattg

SEQ ID NO: 4694725 - DNA, 25 bp, Homo sapien
gaagtgccagtacatagaaatcagc

SEQ ID NO: 4694726 - DNA, 25 bp, Homo sapien
catgtcaggcctgtcaccagagtgt

SEQ ID NO: 4694727 - DNA, 25 bp, Homo sapien
tgaaagcaaggatgtgccgctggct

SEQ ID NO: 4694728 - DNA, 25 bp, Homo sapien
tacaatcaggcactacaagtcaagg

SEQ ID NO: 4694729 - DNA, 25 bp, Homo sapien
acacaacctactgagagaggcaggc

SEQ ID NO: 4694730 - DNA, 25 bp, Homo sapien
tatgaatccgtcactggatggagcc

SEQ ID NO: 4694731 - DNA, 25 bp, Homo sapien
gacatgctctaaggtgctgttggac

SEQ ID NO: 4694732 - DNA, 25 bp, Homo sapien
tgagatgaaggcagtaagcacgtgc

SEQ ID NO: 4694733 - DNA, 25 bp, Homo sapien
tgaaatcataaaaggcacaccatcc

SEQ ID NO: 4694734 - DNA, 25 bp, Homo sapien
aatcataaaaggcacaccatccatt

SEQ ID NO: 4694735 - DNA, 25 bp, Homo sapien
atcataaaaggcacaccatccattg

SEQ ID NO: 4694736 - DNA, 25 bp, Homo sapien
gaaatcataaaaggcacaccatcca

SEQ ID NO: 4694737 - DNA, 25 bp, Homo sapien
tctgctagagatttgatggtgattc

SEQ ID NO: 4694738 - DNA, 25 bp, Homo sapien
ctctttttcgatttctgctagagat

SEQ ID NO: 4694739 - DNA, 25 bp, Homo sapien
tcgatttctgctagagatttgatgg

SEQ ID NO: 4694740 - DNA, 25 bp, Homo sapien
gctagagatttgatggtgattccca

SEQ ID NO: 4694741 - DNA, 25 bp, Homo sapien
aagaaatacagctgaccttggtcca

SEQ ID NO: 4694742 - DNA, 25 bp, Homo sapien
agaaatacagctgaccttggtccac

SEQ ID NO: 4694743 - DNA, 25 bp, Homo sapien
cgagcaatgccgagttcagtggcta

SEQ ID NO: 4694744 - DNA, 25 bp, Homo sapien
ggcagccagacctgttataaatgga

SEQ ID NO: 4694745 - DNA, 25 bp, Homo sapien
tttacagtgagcaaagcaaattctg

SEQ ID NO: 4694746 - DNA, 25 bp, Homo sapien
tgcagagtccaagagtgacagccag

SEQ ID NO: 4694747 - DNA, 25 bp, Homo sapien
tgtaagctcccttagatttataact

SEQ ID NO: 4694748 - DNA, 25 bp, Homo sapien
cattaaatatgtctgcaaacagcag

SEQ ID NO: 4694749 - DNA, 25 bp, Homo sapien
ttccacgtgactacactcttgagga

SEQ ID NO: 4694750 - DNA, 25 bp, Homo sapien
ctgactacaaacatgagaacaagga

SEQ ID NO: 4694751 - DNA, 25 bp, Homo sapien
tgtttcctgaagatgaggaatgcag

SEQ ID NO: 4694752 - DNA, 25 bp, Homo sapien
gtttcctgaagatgaggaatgcagc

SEQ ID NO: 4694753 - DNA, 25 bp, Homo sapien
tggacccggatctgtttactcaaga

SEQ ID NO: 4694754 - DNA, 25 bp, Homo sapien
ccttgggcaaacagcgagtaccttt

SEQ ID NO: 4694755 - DNA, 25 bp, Homo sapien
cctgtgatagaaggtgccaactgca

SEQ ID NO: 4694756 - DNA, 25 bp, Homo sapien
taaaaagcatttggtccgcacagcc

SEQ ID NO: 4694757 - DNA, 25 bp, Homo sapien
gctgcgctctgctctgtgcggaagc

SEQ ID NO: 4694758 - DNA, 25 bp, Homo sapien
gagcctggcggctgcgctctgctct

SEQ ID NO: 4694759 - DNA, 25 bp, Homo sapien
gctctgtgcggaagctgtactcgta

SEQ ID NO: 4694760 - DNA, 25 bp, Homo sapien
gctctgctctgtgcggaagctgtac

SEQ ID NO: 4694761 - DNA, 25 bp, Homo sapien
tcaggactgcgggatctgctgacac

SEQ ID NO: 4694762 - DNA, 25 bp, Homo sapien
gctggtcactacagcacacacagat

SEQ ID NO: 4694763 - DNA, 25 bp, Homo sapien
cagcccctgccgtcagtagtctggg

SEQ ID NO: 4694764 - DNA, 25 bp, Homo sapien
cagacacgttaggagccgctggtca

SEQ ID NO: 4694765 - DNA, 25 bp, Homo sapien
caactggtcatcacacagacacgtt

SEQ ID NO: 4694766 - DNA, 25 bp, Homo sapien
tgttcccgtcagcagataccgtcaa

SEQ ID NO: 4694767 - DNA, 25 bp, Homo sapien
ctggagagtcctaggcaaagctgcc

SEQ ID NO: 4694768 - DNA, 25 bp, Homo sapien
tcttccaggaagagactcaacggct

SEQ ID NO: 4694769 - DNA, 25 bp, Homo sapien
gaggcacctggagctattgttggca

SEQ ID NO: 4694770 - DNA, 25 bp, Homo sapien
caccagtgggcactcggaagtgcca

SEQ ID NO: 4694771 - DNA, 25 bp, Homo sapien
ctcggaagtgccagttctggcccaa

SEQ ID NO: 4694772 - DNA, 25 bp, Homo sapien
tttgaggacgccagcaccagtgggc

SEQ ID NO: 4694773 - DNA, 25 bp, Homo sapien
gggctgaacttggcgcccggcactt

SEQ ID NO: 4694774 - DNA, 25 bp, Homo sapien
ggcttccacggacgcaggtagtgca

SEQ ID NO: 4694775 - DNA, 25 bp, Homo sapien
ttatgtgaacggagcatcggcagcc

SEQ ID NO: 4694776 - DNA, 25 bp, Homo sapien
ggtccccatactctgaggaatcagg

SEQ ID NO: 4694777 - DNA, 25 bp, Homo sapien
ggaagatgggtccacaaagaggcct

SEQ ID NO: 4694778 - DNA, 25 bp, Homo sapien
caaccagggcacgaaaagaggtgaa

SEQ ID NO: 4694779 - DNA, 25 bp, Homo sapien
aataaatggtgggttaggagcagcc

SEQ ID NO: 4694780 - DNA, 25 bp, Homo sapien
ttagaggcaatctcacaaccagggc

SEQ ID NO: 4694781 - DNA, 25 bp, Homo sapien
tattctgcgtccttgcagacagggc

SEQ ID NO: 4694782 - DNA, 25 bp, Homo sapien
caggtgggcttatacacacgcatgt

SEQ ID NO: 4694783 - DNA, 25 bp, Homo sapien
tcaggtgggcttatacacacgcatg

SEQ ID NO: 4694784 - DNA, 25 bp, Homo sapien
tgggcttatacacacgcatgtgcgt

SEQ ID NO: 4694785 - DNA, 25 bp, Homo sapien
ggtgggcttatacacacgcatgtgc

SEQ ID NO: 4694786 - DNA, 25 bp, Homo sapien
gatgaggccaagacccttcacattt

SEQ ID NO: 4694787 - DNA, 25 bp, Homo sapien
atgcctcagttctcctgcacgagcc

SEQ ID NO: 4694788 - DNA, 25 bp, Homo sapien
caaaagacagaaacgctctcaattc

SEQ ID NO: 4694789 - DNA, 25 bp, Homo sapien
aacgctctcaattcctaggtttgag

SEQ ID NO: 4694790 - DNA, 25 bp, Homo sapien
tcatctctccaagtggcggaggacg

SEQ ID NO: 4694791 - DNA, 25 bp, Homo sapien
cagtgggccaagtcagcctcttcaa

SEQ ID NO: 4694792 - DNA, 25 bp, Homo sapien
tctggttagccgttctggagggaca

SEQ ID NO: 4694793 - DNA, 25 bp, Homo sapien
caggtgcttagaacatgggagtccc

SEQ ID NO: 4694794 - DNA, 25 bp, Homo sapien
tgaccatgctctgcgcccactgcac

SEQ ID NO: 4694795 - DNA, 25 bp, Homo sapien
catgctctgcgcccactgcacagtg

SEQ ID NO: 4694796 - DNA, 25 bp, Homo sapien
atgctctgcgcccactgcacagtgg

SEQ ID NO: 4694797 - DNA, 25 bp, Homo sapien
tcctgaccatgctctgcgcccactg

SEQ ID NO: 4694798 - DNA, 25 bp, Homo sapien
gcaggctgcgaaccaagttcatgag

SEQ ID NO: 4694799 - DNA, 25 bp, Homo sapien
ttcatgagctcagccgctgcgtggc

SEQ ID NO: 4694800 - DNA, 25 bp, Homo sapien
tcatccttaggttcacctgcttctc

SEQ ID NO: 4694801 - DNA, 25 bp, Homo sapien
ggcaaggcaggctgcgaaccaagtt

SEQ ID NO: 4694802 - DNA, 25 bp, Homo sapien
aacccccggacatgtgctcagagtg

SEQ ID NO: 4694803 - DNA, 25 bp, Homo sapien
cagctccacggccttagctgggaga

SEQ ID NO: 4694804 - DNA, 25 bp, Homo sapien
cttagctgggagaacaaagccgtct

SEQ ID NO: 4694805 - DNA, 25 bp, Homo sapien
acaaagccgtctctggtggcaaccc

SEQ ID NO: 4694806 - DNA, 25 bp, Homo sapien
cacagtggacttcccttgccaagta

SEQ ID NO: 4694807 - DNA, 25 bp, Homo sapien
gaataaatatgcagcggggacgtca

SEQ ID NO: 4694808 - DNA, 25 bp, Homo sapien
gaatacagacaatcacacagtggac

SEQ ID NO: 4694809 - DNA, 25 bp, Homo sapien
acgtcatccctaagggtcttccttg

SEQ ID NO: 4694810 - DNA, 25 bp, Homo sapien
gcaacaagtttgagccaagacccca

SEQ ID NO: 4694811 - DNA, 25 bp, Homo sapien
tgaattctctgacaggcccaggtgg

SEQ ID NO: 4694812 - DNA, 25 bp, Homo sapien
gaaccgtgagatcatccgagtcctt

SEQ ID NO: 4694813 - DNA, 25 bp, Homo sapien
gcccaggtggagttccgaaccgtga

SEQ ID NO: 4694814 - DNA, 25 bp, Homo sapien
aagtcctggagtggtcccattgggc

SEQ ID NO: 4694815 - DNA, 25 bp, Homo sapien
cccattgggcaaggtctctcggttt

SEQ ID NO: 4694816 - DNA, 25 bp, Homo sapien
gaaatatgtcattaggcgtccaaga

SEQ ID NO: 4694817 - DNA, 25 bp, Homo sapien
tggctgcccacgctgaatttatagg

SEQ ID NO: 4694818 - DNA, 25 bp, Homo sapien
tacaacttgttatattctcagagcc

SEQ ID NO: 4694819 - DNA, 25 bp, Homo sapien
gccggagcctccataaaagaataag

SEQ ID NO: 4694820 - DNA, 25 bp, Homo sapien
tgcaataaatgtgagcggctggaaa

SEQ ID NO: 4694821 - DNA, 25 bp, Homo sapien
tctgacccgaagcttcggaggcctc

SEQ ID NO: 4694822 - DNA, 25 bp, Homo sapien
gcacacacgcgcagagacagtgaga

SEQ ID NO: 4694823 - DNA, 25 bp, Homo sapien
cctaattgtcccagggatgtgcacg

SEQ ID NO: 4694824 - DNA, 25 bp, Homo sapien
tgcacggcggcctggcttttcatca

SEQ ID NO: 4694825 - DNA, 25 bp, Homo sapien
gaactctctaatgaggctgtggcct

SEQ ID NO: 4694826 - DNA, 25 bp, Homo sapien
ttgtagagaacgtagcagtgccggc

SEQ ID NO: 4694827 - DNA, 25 bp, Homo sapien
aggcagcctcgtgatctccggtttc

SEQ ID NO: 4694828 - DNA, 25 bp, Homo sapien
gaattatttatcagggaaatacggc

SEQ ID NO: 4694829 - DNA, 25 bp, Homo sapien
aaatacggcattttcgagtttgctg

SEQ ID NO: 4694830 - DNA, 25 bp, Homo sapien
ttagattccgcagtcgtggtccaaa

SEQ ID NO: 4694831 - DNA, 25 bp, Homo sapien
tggtccaaaggcactctcccggctt

SEQ ID NO: 4694832 - DNA, 25 bp, Homo sapien
tccgcagtcgtggtccaaaggcact

SEQ ID NO: 4694833 - DNA, 25 bp, Homo sapien
agtcgtggtccaaaggcactctccc

SEQ ID NO: 4694834 - DNA, 25 bp, Homo sapien
gctggtaatgctgcctgtctcaggc

SEQ ID NO: 4694835 - DNA, 25 bp, Homo sapien
ttaatgcacgtaaagaaccgggcac

SEQ ID NO: 4694836 - DNA, 25 bp, Homo sapien
accgggcacagcgtaagtactcaat

SEQ ID NO: 4694837 - DNA, 25 bp, Homo sapien
tagctaagtgatcatggcgagcgcc

SEQ ID NO: 4694838 - DNA, 25 bp, Homo sapien
ccaggagtctgctgccgtcaacagc

SEQ ID NO: 4694839 - DNA, 25 bp, Homo sapien
gaggcatcatcactggtgggcatcc

SEQ ID NO: 4694840 - DNA, 25 bp, Homo sapien
tgctgccgtcaacagctgaggcatc

SEQ ID NO: 4694841 - DNA, 25 bp, Homo sapien
ccgtcaacagctgaggcatcatcac

SEQ ID NO: 4694842 - DNA, 25 bp, Homo sapien
caccaagttcactccaggccgggtt

SEQ ID NO: 4694843 - DNA, 25 bp, Homo sapien
aagttcactccaggccgggtttcag

SEQ ID NO: 4694844 - DNA, 25 bp, Homo sapien
actccaggccgggtttcagacgctg

SEQ ID NO: 4694845 - DNA, 25 bp, Homo sapien
tgcgcaccaagttcactccaggccg

SEQ ID NO: 4694846 - DNA, 25 bp, Homo sapien
atttcacttgtccaggatatacagc

SEQ ID NO: 4694847 - DNA, 25 bp, Homo sapien
gtgaaatttcacttgtccaggatat

SEQ ID NO: 4694848 - DNA, 25 bp, Homo sapien
tgtccaggatatacagccatggtaa

SEQ ID NO: 4694849 - DNA, 25 bp, Homo sapien
ttgtccaggatatacagccatggta

SEQ ID NO: 4694850 - DNA, 25 bp, Homo sapien
ccgtgtgctgtagacacaacctgca

SEQ ID NO: 4694851 - DNA, 25 bp, Homo sapien
tcctctcagggccatgggtgcgatc

SEQ ID NO: 4694852 - DNA, 25 bp, Homo sapien
tgtgccatagctacttggagttccg

SEQ ID NO: 4694853 - DNA, 25 bp, Homo sapien
ccatttctgtggagcggacatcctc

SEQ ID NO: 4694854 - DNA, 25 bp, Homo sapien
gccggacttgccaggtcaatgatga

SEQ ID NO: 4694855 - DNA, 25 bp, Homo sapien
atgaacacgccggttagaccagcgt

SEQ ID NO: 4694856 - DNA, 25 bp, Homo sapien
gacttgccaggtcaatgatgaacac

SEQ ID NO: 4694857 - DNA, 25 bp, Homo sapien
caggtcaatgatgaacacgccggtt

SEQ ID NO: 4694858 - DNA, 25 bp, Homo sapien
tagggacaagcgatgctgcttctgt

SEQ ID NO: 4694859 - DNA, 25 bp, Homo sapien
tggccatgccagaactcgcagcttg

SEQ ID NO: 4694860 - DNA, 25 bp, Homo sapien
cacttggcctgctgtccatgtggag

SEQ ID NO: 4694861 - DNA, 25 bp, Homo sapien
tgatggctgccactaatccacatgg

SEQ ID NO: 4694862 - DNA, 25 bp, Homo sapien
tttcacagaaagtggagagccccgc

SEQ ID NO: 4694863 - DNA, 25 bp, Homo sapien
catgcacccatagatgagtcctggt

SEQ ID NO: 4694864 - DNA, 25 bp, Homo sapien
caagctggatgtggctcgctctgaa

SEQ ID NO: 4694865 - DNA, 25 bp, Homo sapien
cacaggagggactgcgattcccaga

SEQ ID NO: 4694866 - DNA, 25 bp, Homo sapien
tggcccaggttattcttaatctcac

SEQ ID NO: 4694867 - DNA, 25 bp, Homo sapien
taaagatatatctgtacagcacagc

SEQ ID NO: 4694868 - DNA, 25 bp, Homo sapien
catagcattccatgttttcgttggc

SEQ ID NO: 4694869 - DNA, 25 bp, Homo sapien
ggtctcaaacgatcttcatgtcttg

SEQ ID NO: 4694870 - DNA, 25 bp, Homo sapien
agggcaggcgaagcttagctccagg

SEQ ID NO: 4694871 - DNA, 25 bp, Homo sapien
ctccagggcaggcgaagcttagctc

SEQ ID NO: 4694872 - DNA, 25 bp, Homo sapien
tccagggcaggcgaagcttagctcc

SEQ ID NO: 4694873 - DNA, 25 bp, Homo sapien
cagggcaggcgaagcttagctccag

SEQ ID NO: 4694874 - DNA, 25 bp, Homo sapien
tgtgatccgtgacccgcagattctc

SEQ ID NO: 4694875 - DNA, 25 bp, Homo sapien
gcttcgggatgctctcccgctcaga

SEQ ID NO: 4694876 - DNA, 25 bp, Homo sapien
atttcagcggcagaaacagcctcgg

SEQ ID NO: 4694877 - DNA, 25 bp, Homo sapien
tccgccaggcccctgcgggtgtgat

SEQ ID NO: 4694878 - DNA, 25 bp, Homo sapien
ggaccccgccggccgggctgctcgc

SEQ ID NO: 4694879 - DNA, 25 bp, Homo sapien
ctgcggaccccgccggccgggctgc

SEQ ID NO: 4694880 - DNA, 25 bp, Homo sapien
ccgccggccgggctgctcgcccgcc

SEQ ID NO: 4694881 - DNA, 25 bp, Homo sapien
ccccgccggccgggctgctcgcccg

SEQ ID NO: 4694882 - DNA, 25 bp, Homo sapien
ttggcgcagtccgtctgcccgcgag

SEQ ID NO: 4694883 - DNA, 25 bp, Homo sapien
ctctccagcgactcgggacctgttg

SEQ ID NO: 4694884 - DNA, 25 bp, Homo sapien
gtctgcccgcgagggaagcacctct

SEQ ID NO: 4694885 - DNA, 25 bp, Homo sapien
tgttgctatatccatgggacgcggg

SEQ ID NO: 4694886 - DNA, 25 bp, Homo sapien
gcccggggcgcagggcgtgctcctc

SEQ ID NO: 4694887 - DNA, 25 bp, Homo sapien
cctccatcttgatgccgtccaacat

SEQ ID NO: 4694888 - DNA, 25 bp, Homo sapien
ggcccggggcgcagggcgtgctcct

SEQ ID NO: 4694889 - DNA, 25 bp, Homo sapien
caggacgactcgttgactcgcatca

SEQ ID NO: 4694890 - DNA, 25 bp, Homo sapien
tttgcagtacagtttccgatcccgg

SEQ ID NO: 4694891 - DNA, 25 bp, Homo sapien
actcgcatcaggaagcggtcggaga

SEQ ID NO: 4694892 - DNA, 25 bp, Homo sapien
aaacactcctcgtgccaggacgact

SEQ ID NO: 4694893 - DNA, 25 bp, Homo sapien
caggacggttttctggcatcactaa

SEQ ID NO: 4694894 - DNA, 25 bp, Homo sapien
aatacacactaccagaaaggaggcc

SEQ ID NO: 4694895 - DNA, 25 bp, Homo sapien
tgggagccccaaattgtaacttgcc

SEQ ID NO: 4694896 - DNA, 25 bp, Homo sapien
taaagttttcgcaggcacccgctgt

SEQ ID NO: 4694897 - DNA, 25 bp, Homo sapien
ccccatgtgttgtcgtaaaggctgg

SEQ ID NO: 4694898 - DNA, 25 bp, Homo sapien
tgagctgggtgtaagtggcactgcc

SEQ ID NO: 4694899 - DNA, 25 bp, Homo sapien
caaatgatttggaggccggttttag

SEQ ID NO: 4694900 - DNA, 25 bp, Homo sapien
ggtgtaagtggcactgccagagctc

SEQ ID NO: 4694901 - DNA, 25 bp, Homo sapien
cggcctaacgcagatacctaattgg

SEQ ID NO: 4694902 - DNA, 25 bp, Homo sapien
cacaggatccagactgagtgaggtc

SEQ ID NO: 4694903 - DNA, 25 bp, Homo sapien
tcaacacaccggactgcactgaaga

SEQ ID NO: 4694904 - DNA, 25 bp, Homo sapien
ctgagattcgccctgtgccaaaaat

SEQ ID NO: 4694905 - DNA, 25 bp, Homo sapien
ccccgtggtgcgtaagacaacttgg

SEQ ID NO: 4694906 - DNA, 25 bp, Homo sapien
tatcaaattcggctcaatgtgcccc

SEQ ID NO: 4694907 - DNA, 25 bp, Homo sapien
gctctgcccgccaaggatgtacaag

SEQ ID NO: 4694908 - DNA, 25 bp, Homo sapien
tctttttaaggacggagccctgcaa

SEQ ID NO: 4694909 - DNA, 25 bp, Homo sapien
tagtcccagggatccaacgaaatct

SEQ ID NO: 4694910 - DNA, 25 bp, Homo sapien
acgtcgaagggccagtcggcagaca

SEQ ID NO: 4694911 - DNA, 25 bp, Homo sapien
gaaagccctgcaaacggtgggacga

SEQ ID NO: 4694912 - DNA, 25 bp, Homo sapien
gcgagcgctgcgacattagtcccag

SEQ ID NO: 4694913 - DNA, 25 bp, Homo sapien
ggccgtttgatgcttgcagggtcac

SEQ ID NO: 4694914 - DNA, 25 bp, Homo sapien
ttaggccgcccttcggcccactgtc

SEQ ID NO: 4694915 - DNA, 25 bp, Homo sapien
cggttcccgcgggccgtttgatgct

SEQ ID NO: 4694916 - DNA, 25 bp, Homo sapien
cccgcgggccgtttgatgcttgcag

SEQ ID NO: 4694917 - DNA, 25 bp, Homo sapien
gtttcgcagcgtagagattccatcg

SEQ ID NO: 4694918 - DNA, 25 bp, Homo sapien
ggatggcaactttagacctatggca

SEQ ID NO: 4694919 - DNA, 25 bp, Homo sapien
cgtcgcaagcagagatgtgtcattc

SEQ ID NO: 4694920 - DNA, 25 bp, Homo sapien
cagaacaactatcagtcaaggcggg

SEQ ID NO: 4694921 - DNA, 25 bp, Homo sapien
taattgcatttagtggcagccgtcc

SEQ ID NO: 4694922 - DNA, 25 bp, Homo sapien
gcatttagtggcagccgtccctgga

SEQ ID NO: 4694923 - DNA, 25 bp, Homo sapien
tcatcacagccccacatatgagaag

SEQ ID NO: 4694924 - DNA, 25 bp, Homo sapien
tggagaggccctgctaaagatcatc

SEQ ID NO: 4694925 - DNA, 25 bp, Homo sapien
tccagcttgctctgggacgccagca

SEQ ID NO: 4694926 - DNA, 25 bp, Homo sapien
ggaaagcaggaagcttagcttgggg

SEQ ID NO: 4694927 - DNA, 25 bp, Homo sapien
agcttgctctgggacgccagcatcc

SEQ ID NO: 4694928 - DNA, 25 bp, Homo sapien
aactgcccgaagaggtgggagcctc

SEQ ID NO: 4694929 - DNA, 25 bp, Homo sapien
tctgtgcctcgtggagaaactcggt

SEQ ID NO: 4694930 - DNA, 25 bp, Homo sapien
tccaggcaggtcacttggaagtgct

SEQ ID NO: 4694931 - DNA, 25 bp, Homo sapien
tgccaggttgcctactcagctctgt

SEQ ID NO: 4694932 - DNA, 25 bp, Homo sapien
tatgactatcatctcagaggcctgg

SEQ ID NO: 4694933 - DNA, 25 bp, Homo sapien
ttctttttgtctcgatggccctggc

SEQ ID NO: 4694934 - DNA, 25 bp, Homo sapien
tttgggtttcaatcgggagagctgc

SEQ ID NO: 4694935 - DNA, 25 bp, Homo sapien
tgtgatcagataagcaggccgggaa

SEQ ID NO: 4694936 - DNA, 25 bp, Homo sapien
tgccaggtgcagttatcgttccaaa

SEQ ID NO: 4694937 - DNA, 25 bp, Homo sapien
aatactgtcccgctgtgagtctggc

SEQ ID NO: 4694938 - DNA, 25 bp, Homo sapien
tcccgctgtgagtctggcaaaatgc

SEQ ID NO: 4694939 - DNA, 25 bp, Homo sapien
acttggaatactgtcccgctgtgag

SEQ ID NO: 4694940 - DNA, 25 bp, Homo sapien
cgctgtgagtctggcaaaatgcttc

SEQ ID NO: 4694941 - DNA, 25 bp, Homo sapien
aaaacgcctttgttgctcacccttg

SEQ ID NO: 4694942 - DNA, 25 bp, Homo sapien
gtgtgtgcccaaaacgcctttgttg

SEQ ID NO: 4694943 - DNA, 25 bp, Homo sapien
tgttgctcacccttgctagagtctc

SEQ ID NO: 4694944 - DNA, 25 bp, Homo sapien
atttcttttgttcggtgtgtgccca

SEQ ID NO: 4694945 - DNA, 25 bp, Homo sapien
gcgcccgcatcacgaactcggtggg

SEQ ID NO: 4694946 - DNA, 25 bp, Homo sapien
ccttgagcacgaattcgtcgccctt

SEQ ID NO: 4694947 - DNA, 25 bp, Homo sapien
aagcagcccaggtggtacacgcact

SEQ ID NO: 4694948 - DNA, 25 bp, Homo sapien
gcgtagctgccgttcacacacgcag

SEQ ID NO: 4694949 - DNA, 25 bp, Homo sapien
gacgagacctcgaaggaggccttga

SEQ ID NO: 4694950 - DNA, 25 bp, Homo sapien
tttcggcaaggcttcgacgagacct

SEQ ID NO: 4694951 - DNA, 25 bp, Homo sapien
tgctgcgtggtgaggatggtccggg

SEQ ID NO: 4694952 - DNA, 25 bp, Homo sapien
ggaggccttgaaggctcttcgctgc

SEQ ID NO: 4694953 - DNA, 25 bp, Homo sapien
actgaggcccgtctcagctgccagt

SEQ ID NO: 4694954 - DNA, 25 bp, Homo sapien
agacctggaccacgcgcacactgag

SEQ ID NO: 4694955 - DNA, 25 bp, Homo sapien
tctcagctgccagtgtctctcggac

SEQ ID NO: 4694956 - DNA, 25 bp, Homo sapien
gttctgaaaccagacctggaccacg

SEQ ID NO: 4694957 - DNA, 25 bp, Homo sapien
ggtgccgccgcgccagcttcttcat

SEQ ID NO: 4694958 - DNA, 25 bp, Homo sapien
cccagccgctgggagttctgctgct

SEQ ID NO: 4694959 - DNA, 25 bp, Homo sapien
gccgctgggagttctgctgctcctg

SEQ ID NO: 4694960 - DNA, 25 bp, Homo sapien
tggcccagccgctgggagttctgct

SEQ ID NO: 4694961 - DNA, 25 bp, Homo sapien
gccgtaggggctctgttccatggcc

SEQ ID NO: 4694962 - DNA, 25 bp, Homo sapien
atcatgccctccatgcggctggaca

SEQ ID NO: 4694963 - DNA, 25 bp, Homo sapien
gccagcggcgtgtaggaagccatca

SEQ ID NO: 4694964 - DNA, 25 bp, Homo sapien
tcgctgctgccgtaggggctctgtt

SEQ ID NO: 4694965 - DNA, 25 bp, Homo sapien
gccgaggaagcagtcgctgaggctg

SEQ ID NO: 4694966 - DNA, 25 bp, Homo sapien
ctgtcgatgtcatggaagatggagt

SEQ ID NO: 4694967 - DNA, 25 bp, Homo sapien
tctgcatggagtagagccggtcgat

SEQ ID NO: 4694968 - DNA, 25 bp, Homo sapien
ctggttaaggaggtatcgctgtcga

SEQ ID NO: 4694969 - DNA, 25 bp, Homo sapien
tcacggagtaggcagatgaggctct

SEQ ID NO: 4694970 - DNA, 25 bp, Homo sapien
tctgtgtggcctccctgtgcgtttc

SEQ ID NO: 4694971 - DNA, 25 bp, Homo sapien
tcaggaagcctcctaagatgcccag

SEQ ID NO: 4694972 - DNA, 25 bp, Homo sapien
cgtttcccaggatagcagagtacct

SEQ ID NO: 4694973 - DNA, 25 bp, Homo sapien
tggtggtgtggtaaacgctaataaa

SEQ ID NO: 4694974 - DNA, 25 bp, Homo sapien
gtatgggtccgcaagcctccgtgtg

SEQ ID NO: 4694975 - DNA, 25 bp, Homo sapien
acatgtgcctgtgagtatgggtccg

SEQ ID NO: 4694976 - DNA, 25 bp, Homo sapien
acaaggaaaacaggaatggccggtg

SEQ ID NO: 4694977 - DNA, 25 bp, Homo sapien
tcatggccctccctccgggctcgag

SEQ ID NO: 4694978 - DNA, 25 bp, Homo sapien
gagctgcgggtaagcgccgtaggca

SEQ ID NO: 4694979 - DNA, 25 bp, Homo sapien
caggcttttagccttcctgatcctc

SEQ ID NO: 4694980 - DNA, 25 bp, Homo sapien
acggagctgcgggtaagcagcgccc

SEQ ID NO: 4694981 - DNA, 25 bp, Homo sapien
gagccactcctaaaatgcaaggacg

SEQ ID NO: 4694982 - DNA, 25 bp, Homo sapien
cagcttaggctcctaaagagcaggc

SEQ ID NO: 4694983 - DNA, 25 bp, Homo sapien
tatagattgcctacaagagccactc

SEQ ID NO: 4694984 - DNA, 25 bp, Homo sapien
ggacataatgtaattctcagccagg

SEQ ID NO: 4694985 - DNA, 25 bp, Homo sapien
tccttatgacagacaatccctggtc

SEQ ID NO: 4694986 - DNA, 25 bp, Homo sapien
cctggctcaggtaagcgggaacaag

SEQ ID NO: 4694987 - DNA, 25 bp, Homo sapien
taaagaacaatcacctaaggccctg

SEQ ID NO: 4694988 - DNA, 25 bp, Homo sapien
ggaacaagcctttacctgcctagca

SEQ ID NO: 4694989 - DNA, 25 bp, Homo sapien
cacaggggaccagggagatttatcc

SEQ ID NO: 4694990 - DNA, 25 bp, Homo sapien
tgctgtccgcttgtcgatcaggcct

SEQ ID NO: 4694991 - DNA, 25 bp, Homo sapien
tgtccgcttgtcgatcaggcctctc

SEQ ID NO: 4694992 - DNA, 25 bp, Homo sapien
ctttgctgtccgcttgtcgatcagg

SEQ ID NO: 4694993 - DNA, 25 bp, Homo sapien
gatcagtatttatatggtttaacct

SEQ ID NO: 4694994 - DNA, 25 bp, Homo sapien
tatgtagagagcatgtattgggtct

SEQ ID NO: 4694995 - DNA, 25 bp, Homo sapien
tttatccctggtaatattgcttgtt

SEQ ID NO: 4694996 - DNA, 25 bp, Homo sapien
taatattgcttgttttgaaggctac

SEQ ID NO: 4694997 - DNA, 25 bp, Homo sapien
tgtgcctctgcttcagcggcagatt

SEQ ID NO: 4694998 - DNA, 25 bp, Homo sapien
gcttcagcggcagattgctgtctcc

SEQ ID NO: 4694999 - DNA, 25 bp, Homo sapien
gcctctgcttcagcggcagattgct

SEQ ID NO: 4695000 - DNA, 25 bp, Homo sapien
ctgcttcagcggcagattgctgtct

SEQ ID NO: 4695001 - DNA, 25 bp, Homo sapien
gatgcgcccttcttgttcaacatct

SEQ ID NO: 4695002 - DNA, 25 bp, Homo sapien
taagaattcacctcgaagtatgatg

SEQ ID NO: 4695003 - DNA, 25 bp, Homo sapien
ttctacagggcagtactggaactgc

SEQ ID NO: 4695004 - DNA, 25 bp, Homo sapien
ttcaacatctcctgttaagtagtgt

SEQ ID NO: 4695005 - DNA, 25 bp, Homo sapien
ttcaccctgatgtggcatccagtga

SEQ ID NO: 4695006 - DNA, 25 bp, Homo sapien
tggttctccacttcaccctgatgtg

SEQ ID NO: 4695007 - DNA, 25 bp, Homo sapien
cacttcaccctgatgtggcatccag

SEQ ID NO: 4695008 - DNA, 25 bp, Homo sapien
ttctccacttcaccctgatgtggca

SEQ ID NO: 4695009 - DNA, 25 bp, Homo sapien
gcccaagatatcctctctgccgccg

SEQ ID NO: 4695010 - DNA, 25 bp, Homo sapien
ctgccaagggctcagcgctcacatc

SEQ ID NO: 4695011 - DNA, 25 bp, Homo sapien
tgccgcaacagattcagcctgtgcc

SEQ ID NO: 4695012 - DNA, 25 bp, Homo sapien
ctgttgtagcctcagctgccgcaac

SEQ ID NO: 4695013 - DNA, 25 bp, Homo sapien
gtgcattagaattcaggataagaag

SEQ ID NO: 4695014 - DNA, 25 bp, Homo sapien
aagaagaacccatttcagttttgct

SEQ ID NO: 4695015 - DNA, 25 bp, Homo sapien
tccttatgccatggccatcaaaaag

SEQ ID NO: 4695016 - DNA, 25 bp, Homo sapien
ctaatgcaaagctgtattcctggga

SEQ ID NO: 4695017 - DNA, 25 bp, Homo sapien
tgtattcctgggatagagttcctta

SEQ ID NO: 4695018 - DNA, 25 bp, Homo sapien
tgatagatgtgacaacacggctggc

SEQ ID NO: 4695019 - DNA, 25 bp, Homo sapien
cagtgtgacagcacctcagggagtt

SEQ ID NO: 4695020 - DNA, 25 bp, Homo sapien
cacggctggcacttgaaaacgttat

SEQ ID NO: 4695021 - DNA, 25 bp, Homo sapien
caaaaggccgtatcttgtatgactc

SEQ ID NO: 4695022 - DNA, 25 bp, Homo sapien
aatctcttgcgggtttggtacatca

SEQ ID NO: 4695023 - DNA, 25 bp, Homo sapien
tatacgtggctacagagaacatcaa

SEQ ID NO: 4695024 - DNA, 25 bp, Homo sapien
tctccaaagcggaaatgcacagggc

SEQ ID NO: 4695025 - DNA, 25 bp, Homo sapien
tgcacagggcacatttgattacatg

SEQ ID NO: 4695026 - DNA, 25 bp, Homo sapien
aaacactcaagaagctaggcgtggt

SEQ ID NO: 4695027 - DNA, 25 bp, Homo sapien
aacactcaagaagctaggcgtggtg

SEQ ID NO: 4695028 - DNA, 25 bp, Homo sapien
gatagggttttgtatgctgctcagg

SEQ ID NO: 4695029 - DNA, 25 bp, Homo sapien
ggtcttggacccctaggcttaagca

SEQ ID NO: 4695030 - DNA, 25 bp, Homo sapien
gattttgggaatggtacctgagcag

SEQ ID NO: 4695031 - DNA, 25 bp, Homo sapien
aatgttgtggttggtatgaccttcc

SEQ ID NO: 4695032 - DNA, 25 bp, Homo sapien
gattctctgctagatctcaccactg

SEQ ID NO: 4695033 - DNA, 25 bp, Homo sapien
aattctggaaactacatctgggtga

SEQ ID NO: 4695034 - DNA, 25 bp, Homo sapien
tagggcttgatcgtctgaagttcag

SEQ ID NO: 4695035 - DNA, 25 bp, Homo sapien
tccaggtctggatgactctaaagtc

SEQ ID NO: 4695036 - DNA, 25 bp, Homo sapien
ctatgggccccactgggtaagggat

SEQ ID NO: 4695037 - DNA, 25 bp, Homo sapien
tgcaggtgcgtgtttgccaaaggca

SEQ ID NO: 4695038 - DNA, 25 bp, Homo sapien
gattcaatccctagagcaaagcttg

SEQ ID NO: 4695039 - DNA, 25 bp, Homo sapien
taagagaactgaatccatagggaca

SEQ ID NO: 4695040 - DNA, 25 bp, Homo sapien
caagaacggctttgtgtgcccggaa

SEQ ID NO: 4695041 - DNA, 25 bp, Homo sapien
caaaagtagggtgaactggcagcaa

SEQ ID NO: 4695042 - DNA, 25 bp, Homo sapien
tagtacaagaagtcacatgccggtg

SEQ ID NO: 4695043 - DNA, 25 bp, Homo sapien
taacaatttctggagcgggcattac

SEQ ID NO: 4695044 - DNA, 25 bp, Homo sapien
ttttgtgcatgccactcaagggcca

SEQ ID NO: 4695045 - DNA, 25 bp, Homo sapien
agggaactctcagccacaacttgtg

SEQ ID NO: 4695046 - DNA, 25 bp, Homo sapien
gtttcgatcacaaccagtcagaagg

SEQ ID NO: 4695047 - DNA, 25 bp, Homo sapien
ccagctgggcggtgggttaactcac

SEQ ID NO: 4695048 - DNA, 25 bp, Homo sapien
aatcccctcagtatacgtgtgtcag

SEQ ID NO: 4695049 - DNA, 25 bp, Homo sapien
gaaaatgctctgctaataccatggg

SEQ ID NO: 4695050 - DNA, 25 bp, Homo sapien
gaatcagaggccattgccagcaatg

SEQ ID NO: 4695051 - DNA, 25 bp, Homo sapien
caagggcactatgctgatttcagca

SEQ ID NO: 4695052 - DNA, 25 bp, Homo sapien
aacctggactcgttgtgatggcgcc

SEQ ID NO: 4695053 - DNA, 25 bp, Homo sapien
gactattcctccaactcaacgtggg

SEQ ID NO: 4695054 - DNA, 25 bp, Homo sapien
tgtaggccattgacgtgatccctga

SEQ ID NO: 4695055 - DNA, 25 bp, Homo sapien
gctaagcagctttccccggtggtta

SEQ ID NO: 4695056 - DNA, 25 bp, Homo sapien
aaccatgctgtacactgaagacagc

SEQ ID NO: 4695057 - DNA, 25 bp, Homo sapien
gcaacataggcataacatttcacaa

SEQ ID NO: 4695058 - DNA, 25 bp, Homo sapien
tgtggcctaagagtcacctgacttg

SEQ ID NO: 4695059 - DNA, 25 bp, Homo sapien
caataagatatgcacctaatgataa

SEQ ID NO: 4695060 - DNA, 25 bp, Homo sapien
ttggcagtggatggcctcttcttca

SEQ ID NO: 4695061 - DNA, 25 bp, Homo sapien
tcccacctccgtacctttcttcata

SEQ ID NO: 4695062 - DNA, 25 bp, Homo sapien
tactgtatttccacagctacctcca

SEQ ID NO: 4695063 - DNA, 25 bp, Homo sapien
tcttcttcactccaatccacatttc

SEQ ID NO: 4695064 - DNA, 25 bp, Homo sapien
ctgggaactatcacactgagcctgg

SEQ ID NO: 4695065 - DNA, 25 bp, Homo sapien
tgggaactatcacactgagcctgga

SEQ ID NO: 4695066 - DNA, 25 bp, Homo sapien
ggaactatcacactgagcctggaca

SEQ ID NO: 4695067 - DNA, 25 bp, Homo sapien
gaactatcacactgagcctggacat

SEQ ID NO: 4695068 - DNA, 25 bp, Homo sapien
catcagagccatcaattgcaaagtt

SEQ ID NO: 4695069 - DNA, 25 bp, Homo sapien
tggtcaaaaagcgtgccttcaacag

SEQ ID NO: 4695070 - DNA, 25 bp, Homo sapien
aagtttcataaccacactcacagta

SEQ ID NO: 4695071 - DNA, 25 bp, Homo sapien
gcaattgcctctcaattttcatcag

SEQ ID NO: 4695072 - DNA, 25 bp, Homo sapien
agcgccgcgctcacatcgcccgccc

SEQ ID NO: 4695073 - DNA, 25 bp, Homo sapien
gcgccgcgctcacatcgcccgcccg

SEQ ID NO: 4695074 - DNA, 25 bp, Homo sapien
caaggctgattacttttgaccaaaa

SEQ ID NO: 4695075 - DNA, 25 bp, Homo sapien
tctagagtagaaagatgggctgcaa

SEQ ID NO: 4695076 - DNA, 25 bp, Homo sapien
gaactacaaggaacaatacaaggct

SEQ ID NO: 4695077 - DNA, 25 bp, Homo sapien
caagcagacagttataaaggcagaa

SEQ ID NO: 4695078 - DNA, 25 bp, Homo sapien
ttcaaagcagcattgagaccggcgc

SEQ ID NO: 4695079 - DNA, 25 bp, Homo sapien
ttttggtgtttgaaggtgaaagtca

SEQ ID NO: 4695080 - DNA, 25 bp, Homo sapien
tgctgccaagaagacacagggttca

SEQ ID NO: 4695081 - DNA, 25 bp, Homo sapien
aagttcaacagaattcaaagcagca

SEQ ID NO: 4695082 - DNA, 25 bp, Homo sapien
gacctggatgggctggaattactca

SEQ ID NO: 4695083 - DNA, 25 bp, Homo sapien
taatcgggagcatcagacactgtgt

SEQ ID NO: 4695084 - DNA, 25 bp, Homo sapien
tgtcacatagtttcccctgcaggcg

SEQ ID NO: 4695085 - DNA, 25 bp, Homo sapien
gctgtactcgggcacatcaaactga

SEQ ID NO: 4695086 - DNA, 25 bp, Homo sapien
ttgctgctgcccgatctgaatggag

SEQ ID NO: 4695087 - DNA, 25 bp, Homo sapien
gaatgctctggaaacctcgctggag

SEQ ID NO: 4695088 - DNA, 25 bp, Homo sapien
taagacggacaatgccaagagccag

SEQ ID NO: 4695089 - DNA, 25 bp, Homo sapien
cactggttgtgcgtctcagagccca

SEQ ID NO: 4695090 - DNA, 25 bp, Homo sapien
agacgtgaagtgaacttcagggaga

SEQ ID NO: 4695091 - DNA, 25 bp, Homo sapien
ttcgtctgcggagacgtgaagtgaa

SEQ ID NO: 4695092 - DNA, 25 bp, Homo sapien
gagaatgtttcggttctgtggtcat

SEQ ID NO: 4695093 - DNA, 25 bp, Homo sapien
ttacacagcgtacttcgtctgcgga

SEQ ID NO: 4695094 - DNA, 25 bp, Homo sapien
aagcaggttctcttccgggccgaga

SEQ ID NO: 4695095 - DNA, 25 bp, Homo sapien
tcttacaatagtcagggcagcaacc

SEQ ID NO: 4695096 - DNA, 25 bp, Homo sapien
tatctctagaaaaggacgctgtcac

SEQ ID NO: 4695097 - DNA, 25 bp, Homo sapien
gactgaatctgctacaaggagagcc

SEQ ID NO: 4695098 - DNA, 25 bp, Homo sapien
ggtaaggagcaggtcacctcgcagc

SEQ ID NO: 4695099 - DNA, 25 bp, Homo sapien
tcccctgaccactgtcggaagtggg

SEQ ID NO: 4695100 - DNA, 25 bp, Homo sapien
cactgtcggaagtggggcctttcaa

SEQ ID NO: 4695101 - DNA, 25 bp, Homo sapien
atcccctgaccactgtcggaagtgg

SEQ ID NO: 4695102 - DNA, 25 bp, Homo sapien
cccctgaccactgtcggaagtgggg

SEQ ID NO: 4695103 - DNA, 25 bp, Homo sapien
cctccgagctcatctgcagacgccc

SEQ ID NO: 4695104 - DNA, 25 bp, Homo sapien
ccgctgcatccgcggtcctcccggg

SEQ ID NO: 4695105 - DNA, 25 bp, Homo sapien
cagtgcgcagccgctgcatccgcgg

SEQ ID NO: 4695106 - DNA, 25 bp, Homo sapien
gcctcggcctccgagctcatctgca

SEQ ID NO: 4695107 - DNA, 25 bp, Homo sapien
ggtgcccagccgcagtaggaaccgt

SEQ ID NO: 4695108 - DNA, 25 bp, Homo sapien
cggcagcggcgccttcgcttggagg

SEQ ID NO: 4695109 - DNA, 25 bp, Homo sapien
aggcgcagctggagcgcgggcagac

SEQ ID NO: 4695110 - DNA, 25 bp, Homo sapien
gcagacgcgggagcggagccggtgc

SEQ ID NO: 4695111 - DNA, 25 bp, Homo sapien
cttgacgcgggccgcagtggctgcc

SEQ ID NO: 4695112 - DNA, 25 bp, Homo sapien
gccgcagtggctgccgccgcttcct

SEQ ID NO: 4695113 - DNA, 25 bp, Homo sapien
ttgacgcgggccgcagtggctgccg

SEQ ID NO: 4695114 - DNA, 25 bp, Homo sapien
tggctgccgccgcttcctcatggcc

SEQ ID NO: 4695115 - DNA, 25 bp, Homo sapien
ccgccgccgcagtcccggccggtca

SEQ ID NO: 4695116 - DNA, 25 bp, Homo sapien
cgccgccgcagtcccggccggtcac

SEQ ID NO: 4695117 - DNA, 25 bp, Homo sapien
gccgctctccccgccgccgcagtcc

SEQ ID NO: 4695118 - DNA, 25 bp, Homo sapien
tctccccgccgccgcagtcccggcc

SEQ ID NO: 4695119 - DNA, 25 bp, Homo sapien
gacagggaagaataaggaataagac

SEQ ID NO: 4695120 - DNA, 25 bp, Homo sapien
tagcactggcactcagtagaccctg

SEQ ID NO: 4695121 - DNA, 25 bp, Homo sapien
gttctgacttaagcctcataacaca

SEQ ID NO: 4695122 - DNA, 25 bp, Homo sapien
tagtaggcaagtagttacggaggac

SEQ ID NO: 4695123 - DNA, 25 bp, Homo sapien
cctctgccccccaggttccagtgat

SEQ ID NO: 4695124 - DNA, 25 bp, Homo sapien
agtgattctcctgcctaggcctccc

SEQ ID NO: 4695125 - DNA, 25 bp, Homo sapien
actctgtctcccagggcctgaatgc

SEQ ID NO: 4695126 - DNA, 25 bp, Homo sapien
gtggtgccatctcagctcactgcaa

SEQ ID NO: 4695127 - DNA, 25 bp, Homo sapien
ggctgcctcctgtggacaggaagac

SEQ ID NO: 4695128 - DNA, 25 bp, Homo sapien
gcctcctgtggacaggaagactcat

SEQ ID NO: 4695129 - DNA, 25 bp, Homo sapien
tgcctcctgtggacaggaagactca

SEQ ID NO: 4695130 - DNA, 25 bp, Homo sapien
agcagtggggagcctcctgggctgc

SEQ ID NO: 4695131 - DNA, 25 bp, Homo sapien
gaatggcacaggcactttgaaagat

SEQ ID NO: 4695132 - DNA, 25 bp, Homo sapien
accctcacgcgttgctggtgggaag

SEQ ID NO: 4695133 - DNA, 25 bp, Homo sapien
tggcacaggcactttgaaagatcgt

SEQ ID NO: 4695134 - DNA, 25 bp, Homo sapien
ggcagaatggcacaggcactttgaa

SEQ ID NO: 4695135 - DNA, 25 bp, Homo sapien
ccaggccacagggagcttcagggca

SEQ ID NO: 4695136 - DNA, 25 bp, Homo sapien
gcagcctctgcaggtaacataacct

SEQ ID NO: 4695137 - DNA, 25 bp, Homo sapien
agcctctgcaggtaacataacctgt

SEQ ID NO: 4695138 - DNA, 25 bp, Homo sapien
agtctccaggccacagggagcttca

SEQ ID NO: 4695139 - DNA, 25 bp, Homo sapien
gctagccatcagaccattcctcttg

SEQ ID NO: 4695140 - DNA, 25 bp, Homo sapien
gtgaccaacacgctagccatcagac

SEQ ID NO: 4695141 - DNA, 25 bp, Homo sapien
ggcagaggtgaccaacacgctagcc

SEQ ID NO: 4695142 - DNA, 25 bp, Homo sapien
gccatcagaccattcctcttgtaca

SEQ ID NO: 4695143 - DNA, 25 bp, Homo sapien
tctcaaggcttatttatcatgcggg

SEQ ID NO: 4695144 - DNA, 25 bp, Homo sapien
tgcatgtatatgaaagagtctccca

SEQ ID NO: 4695145 - DNA, 25 bp, Homo sapien
tgaggtgagaggtaaccaactggct

SEQ ID NO: 4695146 - DNA, 25 bp, Homo sapien
tctcagctcacgaagaaggattttg

SEQ ID NO: 4695147 - DNA, 25 bp, Homo sapien
aactcctctggggtcactttcaaga

SEQ ID NO: 4695148 - DNA, 25 bp, Homo sapien
agctctggccctccagagagtccga

SEQ ID NO: 4695149 - DNA, 25 bp, Homo sapien
caagacatcgaagacaacggcatca

SEQ ID NO: 4695150 - DNA, 25 bp, Homo sapien
tcatagctcttgctggcatagtcgc

SEQ ID NO: 4695151 - DNA, 25 bp, Homo sapien
gctggatagctttaaacacaggtat

SEQ ID NO: 4695152 - DNA, 25 bp, Homo sapien
ccggctggatagctttaaacacagg

SEQ ID NO: 4695153 - DNA, 25 bp, Homo sapien
ctccggctggatagctttaaacaca

SEQ ID NO: 4695154 - DNA, 25 bp, Homo sapien
ttaaacacaggtatatccattaatg

SEQ ID NO: 4695155 - DNA, 25 bp, Homo sapien
tatagagcctgcaagagagaaactg

SEQ ID NO: 4695156 - DNA, 25 bp, Homo sapien
gagtaggccagacgggagacattct

SEQ ID NO: 4695157 - DNA, 25 bp, Homo sapien
aacagtggctggctaaatcctcgct

SEQ ID NO: 4695158 - DNA, 25 bp, Homo sapien
taagacctgactctcaggcgtggag

SEQ ID NO: 4695159 - DNA, 25 bp, Homo sapien
ccaccagaatttgggatgaacaaaa

SEQ ID NO: 4695160 - DNA, 25 bp, Homo sapien
tatgtacatgtttgcttcggcaact

SEQ ID NO: 4695161 - DNA, 25 bp, Homo sapien
gttccctcacatcacttcttgaaag

SEQ ID NO: 4695162 - DNA, 25 bp, Homo sapien
tgcttcggcaactggtttcaaaaat

SEQ ID NO: 4695163 - DNA, 25 bp, Homo sapien
ttcttcagagcaggcaaacggcatc

SEQ ID NO: 4695164 - DNA, 25 bp, Homo sapien
gggtttgtccgacgtccaacattga

SEQ ID NO: 4695165 - DNA, 25 bp, Homo sapien
caaacactgattccaaggagcagca

SEQ ID NO: 4695166 - DNA, 25 bp, Homo sapien
caacgtgtcatgtggcctggaggaa

SEQ ID NO: 4695167 - DNA, 25 bp, Homo sapien
gaggagacatgaaaaggctgctgcc

SEQ ID NO: 4695168 - DNA, 25 bp, Homo sapien
tgctggcctatttcacagagcctgg

SEQ ID NO: 4695169 - DNA, 25 bp, Homo sapien
catcctaggagcagtgggtagccac

SEQ ID NO: 4695170 - DNA, 25 bp, Homo sapien
gagagatggtctgagaaaactgccc

SEQ ID NO: 4695171 - DNA, 25 bp, Homo sapien
gttgtagatacgaagcattgtttct

SEQ ID NO: 4695172 - DNA, 25 bp, Homo sapien
agttgtagatacgaagcattgtttc

SEQ ID NO: 4695173 - DNA, 25 bp, Homo sapien
tagttgtagatacgaagcattgttt

SEQ ID NO: 4695174 - DNA, 25 bp, Homo sapien
atagttgtagatacgaagcattgtt

SEQ ID NO: 4695175 - DNA, 25 bp, Homo sapien
tcctttgcagatgtcgtgcaaccac

SEQ ID NO: 4695176 - DNA, 25 bp, Homo sapien
cactaaagattatgtaagcttcaca

SEQ ID NO: 4695177 - DNA, 25 bp, Homo sapien
caagaagcctatcattgcaggctaa

SEQ ID NO: 4695178 - DNA, 25 bp, Homo sapien
caggctaaatgtctgcttatgaaag

SEQ ID NO: 4695179 - DNA, 25 bp, Homo sapien
acggtggcccaatgaaggaaaggca

SEQ ID NO: 4695180 - DNA, 25 bp, Homo sapien
agcacggtggcccaatgaaggaaag

SEQ ID NO: 4695181 - DNA, 25 bp, Homo sapien
cggtggcccaatgaaggaaaggcaa

SEQ ID NO: 4695182 - DNA, 25 bp, Homo sapien
cacggtggcccaatgaaggaaaggc

SEQ ID NO: 4695183 - DNA, 25 bp, Homo sapien
ccaggggtggaatccaggcagtcat

SEQ ID NO: 4695184 - DNA, 25 bp, Homo sapien
tcaaccccagccaggggtggaatcc

SEQ ID NO: 4695185 - DNA, 25 bp, Homo sapien
ccccagccaggggtggaatccaggc

SEQ ID NO: 4695186 - DNA, 25 bp, Homo sapien
ccagccaggggtggaatccaggcag

SEQ ID NO: 4695187 - DNA, 25 bp, Homo sapien
caatcaccttgtggtgtcacccggg

SEQ ID NO: 4695188 - DNA, 25 bp, Homo sapien
tcacaatcaccttgtggtgtcaccc

SEQ ID NO: 4695189 - DNA, 25 bp, Homo sapien
gtctcacaatcaccttgtggtgtca

SEQ ID NO: 4695190 - DNA, 25 bp, Homo sapien
tccacagtctcacaatcaccttgtg

SEQ ID NO: 4695191 - DNA, 25 bp, Homo sapien
gaagccccatcaataagggctggag

SEQ ID NO: 4695192 - DNA, 25 bp, Homo sapien
tatctccatcgcttgaagtctgtcc

SEQ ID NO: 4695193 - DNA, 25 bp, Homo sapien
gatgacactgcgtatgactgaccta

SEQ ID NO: 4695194 - DNA, 25 bp, Homo sapien
aagctaagaaccagagggcaaggtc

SEQ ID NO: 4695195 - DNA, 25 bp, Homo sapien
cctggctagacaaaccacaagaggg

SEQ ID NO: 4695196 - DNA, 25 bp, Homo sapien
ccctgatgccatgagggagagcacg

SEQ ID NO: 4695197 - DNA, 25 bp, Homo sapien
aaccctcacatggagtgtttggtag

SEQ ID NO: 4695198 - DNA, 25 bp, Homo sapien
gaatcaagtttggtaagtgcacggg

SEQ ID NO: 4695199 - DNA, 25 bp, Homo sapien
ctgtcctacaggagagctgttaagg

SEQ ID NO: 4695200 - DNA, 25 bp, Homo sapien
gctgttaaggctagaatcaagtgca

SEQ ID NO: 4695201 - DNA, 25 bp, Homo sapien
caggagagctgttaaggctagaatc

SEQ ID NO: 4695202 - DNA, 25 bp, Homo sapien
ctagaatcaagtgcatgcaggtccc

SEQ ID NO: 4695203 - DNA, 25 bp, Homo sapien
cccaggaatcgggctgccatagcca

SEQ ID NO: 4695204 - DNA, 25 bp, Homo sapien
agcccaggaatcgggctgccatagc

SEQ ID NO: 4695205 - DNA, 25 bp, Homo sapien
ccatagccagaatggggcacagtgc

SEQ ID NO: 4695206 - DNA, 25 bp, Homo sapien
ggctgccatagccagaatggggcac

SEQ ID NO: 4695207 - DNA, 25 bp, Homo sapien
ccctgactacgtggctgagctgact

SEQ ID NO: 4695208 - DNA, 25 bp, Homo sapien
tgtctgtgctaaacaagtactgggc

SEQ ID NO: 4695209 - DNA, 25 bp, Homo sapien
gaagatgctatagctaaccccacag

SEQ ID NO: 4695210 - DNA, 25 bp, Homo sapien
agtactgggcctgaccgctttggcg

SEQ ID NO: 4695211 - DNA, 25 bp, Homo sapien
cacaacgttaggggcaagactgtgt

SEQ ID NO: 4695212 - DNA, 25 bp, Homo sapien
aggccacaacgttaggggcaagact

SEQ ID NO: 4695213 - DNA, 25 bp, Homo sapien
gccacaacgttaggggcaagactgt

SEQ ID NO: 4695214 - DNA, 25 bp, Homo sapien
caacgttaggggcaagactgtgttt

SEQ ID NO: 4695215 - DNA, 25 bp, Homo sapien
aaggattgaagccacacactcattc

SEQ ID NO: 4695216 - DNA, 25 bp, Homo sapien
tctgaaaatctagccgagtgcggtg

SEQ ID NO: 4695217 - DNA, 25 bp, Homo sapien
gaaccagacgtaactgtccaagagt

SEQ ID NO: 4695218 - DNA, 25 bp, Homo sapien
tagctgacaatatcagttgctggca

SEQ ID NO: 4695219 - DNA, 25 bp, Homo sapien
gctgaatgcccttgtacctttatca

SEQ ID NO: 4695220 - DNA, 25 bp, Homo sapien
tcaaattgcagttcctcattgctgg

SEQ ID NO: 4695221 - DNA, 25 bp, Homo sapien
tttatcagctccatcgacctatggg

SEQ ID NO: 4695222 - DNA, 25 bp, Homo sapien
gggattgcactggatctattgatca

SEQ ID NO: 4695223 - DNA, 25 bp, Homo sapien
tgtaccaagagcatgtagacattgg

SEQ ID NO: 4695224 - DNA, 25 bp, Homo sapien
catgttgtgagtcatatattgtacc

SEQ ID NO: 4695225 - DNA, 25 bp, Homo sapien
tacattgtttggaggaatcgaaatc

SEQ ID NO: 4695226 - DNA, 25 bp, Homo sapien
gaactatctttctactgggacatct

SEQ ID NO: 4695227 - DNA, 25 bp, Homo sapien
tgctgttagaatttctcgtacaacc

SEQ ID NO: 4695228 - DNA, 25 bp, Homo sapien
gtgctgttagaatttctcgtacaac

SEQ ID NO: 4695229 - DNA, 25 bp, Homo sapien
ctgttagaatttctcgtacaaccca

SEQ ID NO: 4695230 - DNA, 25 bp, Homo sapien
gctgttagaatttctcgtacaaccc

SEQ ID NO: 4695231 - DNA, 25 bp, Homo sapien
gtaatgctgataccacagacatgag

SEQ ID NO: 4695232 - DNA, 25 bp, Homo sapien
cactttgtaatgctgataccacaga

SEQ ID NO: 4695233 - DNA, 25 bp, Homo sapien
tgggagcactttgtaatgctgatac

SEQ ID NO: 4695234 - DNA, 25 bp, Homo sapien
tgaagatgggagcactttgtaatgc

SEQ ID NO: 4695235 - DNA, 25 bp, Homo sapien
catcactcatgacatcgtggtgtcc

SEQ ID NO: 4695236 - DNA, 25 bp, Homo sapien
ccggtcatcactcatgacatcgtgg

SEQ ID NO: 4695237 - DNA, 25 bp, Homo sapien
gcttctgaccccagccacgtcagca

SEQ ID NO: 4695238 - DNA, 25 bp, Homo sapien
catgacatcgtggtgtccaggaaga

SEQ ID NO: 4695239 - DNA, 25 bp, Homo sapien
ccgtgtccgcttgtaattatcttct

SEQ ID NO: 4695240 - DNA, 25 bp, Homo sapien
ttggaaccatcttcaggcttcggat

SEQ ID NO: 4695241 - DNA, 25 bp, Homo sapien
tcttctttcgacatcaggtagtcca

SEQ ID NO: 4695242 - DNA, 25 bp, Homo sapien
caggtagtccaatttctcaaaggta

SEQ ID NO: 4695243 - DNA, 25 bp, Homo sapien
ctacgggccatgtcgcttcctggaa

SEQ ID NO: 4695244 - DNA, 25 bp, Homo sapien
ttatctacgggccatgtcgcttcct

SEQ ID NO: 4695245 - DNA, 25 bp, Homo sapien
gccatgtcgcttcctggaaattttt

SEQ ID NO: 4695246 - DNA, 25 bp, Homo sapien
gggccatgtcgcttcctggaaattt

SEQ ID NO: 4695247 - DNA, 25 bp, Homo sapien
taagcccactctccatccgtggaaa

SEQ ID NO: 4695248 - DNA, 25 bp, Homo sapien
ggagagcagattcgagtttgacaaa

SEQ ID NO: 4695249 - DNA, 25 bp, Homo sapien
gggctgctgccttaaatggtcaata

SEQ ID NO: 4695250 - DNA, 25 bp, Homo sapien
ccatctgatgggaatgagtcatagc

SEQ ID NO: 4695251 - DNA, 25 bp, Homo sapien
ccatgagtcaatgtgcttctccagg

SEQ ID NO: 4695252 - DNA, 25 bp, Homo sapien
gacctcccaccaggaagtctccttg

SEQ ID NO: 4695253 - DNA, 25 bp, Homo sapien
ctcaggtgtggttttacccagaggt

SEQ ID NO: 4695254 - DNA, 25 bp, Homo sapien
aggaagtctccttgttccacacagg

SEQ ID NO: 4695255 - DNA, 25 bp, Homo sapien
gaatttgggcatgtcttagctgggt

SEQ ID NO: 4695256 - DNA, 25 bp, Homo sapien
aaggtctgtgatgagacttcagtca

SEQ ID NO: 4695257 - DNA, 25 bp, Homo sapien
gaaggctcgcctttttagcagaatc

SEQ ID NO: 4695258 - DNA, 25 bp, Homo sapien
cttcacacgactgccaaacacagag

SEQ ID NO: 4695259 - DNA, 25 bp, Homo sapien
ctagcacctcaaagaccaaaggacc

SEQ ID NO: 4695260 - DNA, 25 bp, Homo sapien
gaccaaaggacctgctaagttctca

SEQ ID NO: 4695261 - DNA, 25 bp, Homo sapien
ggacctgctaagttctcagctttga

SEQ ID NO: 4695262 - DNA, 25 bp, Homo sapien
tcaaagaccaaaggacctgctaagt

SEQ ID NO: 4695263 - DNA, 25 bp, Homo sapien
taagctcagttcaaggaggcgtcct

SEQ ID NO: 4695264 - DNA, 25 bp, Homo sapien
gaattaatcaaagccactcaggtgt

SEQ ID NO: 4695265 - DNA, 25 bp, Homo sapien
cagtgtttgttcctagaagagccca

SEQ ID NO: 4695266 - DNA, 25 bp, Homo sapien
taccgatgcatggaagggatgccca

SEQ ID NO: 4695267 - DNA, 25 bp, Homo sapien
ggaaaaggacggcaagaatcctgaa

SEQ ID NO: 4695268 - DNA, 25 bp, Homo sapien
tgctgcctgcaaatcttgctctcac

SEQ ID NO: 4695269 - DNA, 25 bp, Homo sapien
ttgctgcccctctcagggagtgact

SEQ ID NO: 4695270 - DNA, 25 bp, Homo sapien
atcctgaaatggctcatgggaccaa

SEQ ID NO: 4695271 - DNA, 25 bp, Homo sapien
tctgagcaaggaaagcgagatggct

SEQ ID NO: 4695272 - DNA, 25 bp, Homo sapien
actggcctgagatcacacgtggttc

SEQ ID NO: 4695273 - DNA, 25 bp, Homo sapien
tattggcaaccctgtgagagtctct

SEQ ID NO: 4695274 - DNA, 25 bp, Homo sapien
gaaatccaaagtctgggacccactg

SEQ ID NO: 4695275 - DNA, 25 bp, Homo sapien
tgaaaaagcatgcaaccgccttgag

SEQ ID NO: 4695276 - DNA, 25 bp, Homo sapien
taccacgagctcaggaagacaagtc

SEQ ID NO: 4695277 - DNA, 25 bp, Homo sapien
taaacagggctaacaacggtgcctc

SEQ ID NO: 4695278 - DNA, 25 bp, Homo sapien
tgaactagactcagaaccaggaggc

SEQ ID NO: 4695279 - DNA, 25 bp, Homo sapien
ctgggaatggtgaccgtggtcacaa

SEQ ID NO: 4695280 - DNA, 25 bp, Homo sapien
caaatgaggctcctgggtcaaggga

SEQ ID NO: 4695281 - DNA, 25 bp, Homo sapien
accgtggtcacaagctctgggctga

SEQ ID NO: 4695282 - DNA, 25 bp, Homo sapien
ctcaaatgaggctcctgggtcaagg

SEQ ID NO: 4695283 - DNA, 25 bp, Homo sapien
tgcaatgggtactggtctgggaaaa

SEQ ID NO: 4695284 - DNA, 25 bp, Homo sapien
gaaagaggagtaatttgaagtgttc

SEQ ID NO: 4695285 - DNA, 25 bp, Homo sapien
aaaggctgcaatgggtactggtctg

SEQ ID NO: 4695286 - DNA, 25 bp, Homo sapien
tttgaagtgttctattcaaaggctg

SEQ ID NO: 4695287 - DNA, 25 bp, Homo sapien
actctgcacaggctgcacctgatgc

SEQ ID NO: 4695288 - DNA, 25 bp, Homo sapien
gccatgaagggcatacaaatgccca

SEQ ID NO: 4695289 - DNA, 25 bp, Homo sapien
gaagcaggagcttatacttggccat

SEQ ID NO: 4695290 - DNA, 25 bp, Homo sapien
gagcacgagcatctcaaatgcagga

SEQ ID NO: 4695291 - DNA, 25 bp, Homo sapien
tcttaatggatcacacccactgtag

SEQ ID NO: 4695292 - DNA, 25 bp, Homo sapien
tcacggttgcatcccatctggtgag

SEQ ID NO: 4695293 - DNA, 25 bp, Homo sapien
tgtagccacactccctcatcagtgg

SEQ ID NO: 4695294 - DNA, 25 bp, Homo sapien
gcagaaagcaagcacttgggtggct

SEQ ID NO: 4695295 - DNA, 25 bp, Homo sapien
cagcagcagctgtcaacttctgaat

SEQ ID NO: 4695296 - DNA, 25 bp, Homo sapien
gtttcaccatcacagaccggcggca

SEQ ID NO: 4695297 - DNA, 25 bp, Homo sapien
gccataaaattctggtcaacgcact

SEQ ID NO: 4695298 - DNA, 25 bp, Homo sapien
caaagagataggattttggatgcca

SEQ ID NO: 4695299 - DNA, 25 bp, Homo sapien
catactcgatggcccagagcctgct

SEQ ID NO: 4695300 - DNA, 25 bp, Homo sapien
acccatactcgatggcccagagcct

SEQ ID NO: 4695301 - DNA, 25 bp, Homo sapien
cccatactcgatggcccagagcctg

SEQ ID NO: 4695302 - DNA, 25 bp, Homo sapien
acacccatactcgatggcccagagc

SEQ ID NO: 4695303 - DNA, 25 bp, Homo sapien
ctccctcatgtccactgtggtcagt

SEQ ID NO: 4695304 - DNA, 25 bp, Homo sapien
cactgtggtcagtctggtcagcccc

SEQ ID NO: 4695305 - DNA, 25 bp, Homo sapien
ggtcagtctggtcagccccaggtcc

SEQ ID NO: 4695306 - DNA, 25 bp, Homo sapien
catgtccactgtggtcagtctggtc

SEQ ID NO: 4695307 - DNA, 25 bp, Homo sapien
cacagaattagtcacgtgtggtggt

SEQ ID NO: 4695308 - DNA, 25 bp, Homo sapien
ttcaaaaccagctcggctaacacgg

SEQ ID NO: 4695309 - DNA, 25 bp, Homo sapien
ggtacccatggagtacaaaaattga

SEQ ID NO: 4695310 - DNA, 25 bp, Homo sapien
atatagttcttttcaggtacccatg

SEQ ID NO: 4695311 - DNA, 25 bp, Homo sapien
aacttgtaaatcagcaattattcga

SEQ ID NO: 4695312 - DNA, 25 bp, Homo sapien
tattgttcatctgattggatctttg

SEQ ID NO: 4695313 - DNA, 25 bp, Homo sapien
cagaatcaatgtagattaaatccag

SEQ ID NO: 4695314 - DNA, 25 bp, Homo sapien
tattcgaagaatattgttcatctga

SEQ ID NO: 4695315 - DNA, 25 bp, Homo sapien
tgtagttgtcgtcttccacaaactt

SEQ ID NO: 4695316 - DNA, 25 bp, Homo sapien
tcaggtacttctgcacatggggcag

SEQ ID NO: 4695317 - DNA, 25 bp, Homo sapien
ggagctcttcaatgtagcgtacgga

SEQ ID NO: 4695318 - DNA, 25 bp, Homo sapien
caatgtagcgtacggacttcaggta

SEQ ID NO: 4695319 - DNA, 25 bp, Homo sapien
aagagactagtcttggagagctgct

SEQ ID NO: 4695320 - DNA, 25 bp, Homo sapien
tgcttcctggttcgattctgagcga

SEQ ID NO: 4695321 - DNA, 25 bp, Homo sapien
tcctggttcgattctgagcgacagt

SEQ ID NO: 4695322 - DNA, 25 bp, Homo sapien
caagatcttccttggaagagactag

SEQ ID NO: 4695323 - DNA, 25 bp, Homo sapien
ccagctttctattggatttggccaa

SEQ ID NO: 4695324 - DNA, 25 bp, Homo sapien
tcagctgcattttttgccctgccca

SEQ ID NO: 4695325 - DNA, 25 bp, Homo sapien
atttggccaatgaaaggctctggtg

SEQ ID NO: 4695326 - DNA, 25 bp, Homo sapien
gcctcgccatgctttattggttctg

SEQ ID NO: 4695327 - DNA, 25 bp, Homo sapien
tatgaccctatgctccaattacgac

SEQ ID NO: 4695328 - DNA, 25 bp, Homo sapien
ccttgcctggatgtggctcatatga

SEQ ID NO: 4695329 - DNA, 25 bp, Homo sapien
gctccaattacgactgtatcctctc

SEQ ID NO: 4695330 - DNA, 25 bp, Homo sapien
tgtggctcatatgaccctatgctcc

SEQ ID NO: 4695331 - DNA, 25 bp, Homo sapien
gaggccaaacggctgtgccagaaga

SEQ ID NO: 4695332 - DNA, 25 bp, Homo sapien
tcacaggtctgttagaatgaggaca

SEQ ID NO: 4695333 - DNA, 25 bp, Homo sapien
caggcaggtctgttgtgctcacagg

SEQ ID NO: 4695334 - DNA, 25 bp, Homo sapien
tgccagaagacagcggtggccacag

SEQ ID NO: 4695335 - DNA, 25 bp, Homo sapien
actgcacctggttgaccttgatcat

SEQ ID NO: 4695336 - DNA, 25 bp, Homo sapien
atttcttagattcctaggccacggg

SEQ ID NO: 4695337 - DNA, 25 bp, Homo sapien
gtgggtttgagtcttgcctcttctg

SEQ ID NO: 4695338 - DNA, 25 bp, Homo sapien
gaccttgatgtgacaggctgctgag

SEQ ID NO: 4695339 - DNA, 25 bp, Homo sapien
atcaagcgatctcgcctaagccctg

SEQ ID NO: 4695340 - DNA, 25 bp, Homo sapien
tgggatcaagcgatctcgcctaagc

SEQ ID NO: 4695341 - DNA, 25 bp, Homo sapien
agcgatctcgcctaagccctgagga

SEQ ID NO: 4695342 - DNA, 25 bp, Homo sapien
aagcgatctcgcctaagccctgagg

SEQ ID NO: 4695343 - DNA, 25 bp, Homo sapien
tgaggagtaagccatacagcatccc

SEQ ID NO: 4695344 - DNA, 25 bp, Homo sapien
tgactgacagcctccctgtgaggag

SEQ ID NO: 4695345 - DNA, 25 bp, Homo sapien
ctgccatttgcaggatgagtgacct

SEQ ID NO: 4695346 - DNA, 25 bp, Homo sapien
gagctggagatactacactggatta

SEQ ID NO: 4695347 - DNA, 25 bp, Homo sapien
ctcgcagaaccggagccagcagagg

SEQ ID NO: 4695348 - DNA, 25 bp, Homo sapien
gggcctccggctgaacctcgcagaa

SEQ ID NO: 4695349 - DNA, 25 bp, Homo sapien
gaggctgccagcaacagatgtgtca

SEQ ID NO: 4695350 - DNA, 25 bp, Homo sapien
tgtcaggacaggtgggcctccggct

SEQ ID NO: 4695351 - DNA, 25 bp, Homo sapien
ggctgcgggactctaggacactgtc

SEQ ID NO: 4695352 - DNA, 25 bp, Homo sapien
gaatgtcgcacttttactctcaact

SEQ ID NO: 4695353 - DNA, 25 bp, Homo sapien
actgtcgtccagtaggtgccttgct

SEQ ID NO: 4695354 - DNA, 25 bp, Homo sapien
ggtgccttgctttctccgatgggaa

SEQ ID NO: 4695355 - DNA, 25 bp, Homo sapien
ccagcaggatgacgacagatccagg

SEQ ID NO: 4695356 - DNA, 25 bp, Homo sapien
tgaagcccacgaggctaggagacaa

SEQ ID NO: 4695357 - DNA, 25 bp, Homo sapien
caggatgacgacagatccagggctc

SEQ ID NO: 4695358 - DNA, 25 bp, Homo sapien
cttcatgaagcccacgaggctagga

SEQ ID NO: 4695359 - DNA, 25 bp, Homo sapien
ctttccagccctgaagacatctctt

SEQ ID NO: 4695360 - DNA, 25 bp, Homo sapien
ctaaactctgagctctcactactgc

SEQ ID NO: 4695361 - DNA, 25 bp, Homo sapien
tctcttcactaaactctgagctctc

SEQ ID NO: 4695362 - DNA, 25 bp, Homo sapien
tgaagacatctcttcactaaactct

SEQ ID NO: 4695363 - DNA, 25 bp, Homo sapien
tgttcttacggcatctgcagggaac

SEQ ID NO: 4695364 - DNA, 25 bp, Homo sapien
cctctgtctgctcgagcggtgcggc

SEQ ID NO: 4695365 - DNA, 25 bp, Homo sapien
gcagagaaagctgtgttcttacggc

SEQ ID NO: 4695366 - DNA, 25 bp, Homo sapien
tctgtctgctcgagcggtgcggcct

SEQ ID NO: 4695367 - DNA, 25 bp, Homo sapien
cattcccaccgagggcagtacagca

SEQ ID NO: 4695368 - DNA, 25 bp, Homo sapien
aagaggagacatctatgtgcataaa

SEQ ID NO: 4695369 - DNA, 25 bp, Homo sapien
tggaagctctttatggccgaacact

SEQ ID NO: 4695370 - DNA, 25 bp, Homo sapien
gccgaacactatggggacctactgg

SEQ ID NO: 4695371 - DNA, 25 bp, Homo sapien
gtttgactaagatccctctcaggga

SEQ ID NO: 4695372 - DNA, 25 bp, Homo sapien
ccagaccaggagcttgtgggaacct

SEQ ID NO: 4695373 - DNA, 25 bp, Homo sapien
caattgaggcttgcccagaccagga

SEQ ID NO: 4695374 - DNA, 25 bp, Homo sapien
agaaggaggactgcaacaggcaatt

SEQ ID NO: 4695375 - DNA, 25 bp, Homo sapien
tggctttgtctgctatccagggatg

SEQ ID NO: 4695376 - DNA, 25 bp, Homo sapien
tcctcacctgggctggattccagct

SEQ ID NO: 4695377 - DNA, 25 bp, Homo sapien
tttgccacttttcttctcgtgagtc

SEQ ID NO: 4695378 - DNA, 25 bp, Homo sapien
gactttcttgcagtgagatcctttg

SEQ ID NO: 4695379 - DNA, 25 bp, Homo sapien
gtgtcagggtggtaataggctgacc

SEQ ID NO: 4695380 - DNA, 25 bp, Homo sapien
cagggtggtaataggctgaccccac

SEQ ID NO: 4695381 - DNA, 25 bp, Homo sapien
ggtggtaataggctgaccccaccac

SEQ ID NO: 4695382 - DNA, 25 bp, Homo sapien
tcagggtggtaataggctgacccca

SEQ ID NO: 4695383 - DNA, 25 bp, Homo sapien
cttgatggccatctcgggtccactg

SEQ ID NO: 4695384 - DNA, 25 bp, Homo sapien
gatggtataccatagcatgtgcttg

SEQ ID NO: 4695385 - DNA, 25 bp, Homo sapien
tgtccaggggcccaatttcagggct

SEQ ID NO: 4695386 - DNA, 25 bp, Homo sapien
tctgatggttagctgggacggctgc

SEQ ID NO: 4695387 - DNA, 25 bp, Homo sapien
catggtcagccgttgctctgtgaca

SEQ ID NO: 4695388 - DNA, 25 bp, Homo sapien
gaggcccagagttcctttgtaagat

SEQ ID NO: 4695389 - DNA, 25 bp, Homo sapien
tgcccgttggccagacaacaatgta

SEQ ID NO: 4695390 - DNA, 25 bp, Homo sapien
tctgtgacatcagtacctgtgggta

SEQ ID NO: 4695391 - DNA, 25 bp, Homo sapien
caagagtccatgctccaagcttgct

SEQ ID NO: 4695392 - DNA, 25 bp, Homo sapien
tgattaaaatccaggcacgcccact

SEQ ID NO: 4695393 - DNA, 25 bp, Homo sapien
gatagtccacggcaagtccacgtga

SEQ ID NO: 4695394 - DNA, 25 bp, Homo sapien
gtcattcaccaggacacaaccggag

SEQ ID NO: 4695395 - DNA, 25 bp, Homo sapien
gccccagggtggcatagagacgtcc

SEQ ID NO: 4695396 - DNA, 25 bp, Homo sapien
attcctaactggaacccgccagttg

SEQ ID NO: 4695397 - DNA, 25 bp, Homo sapien
ctgtagacacagctccgggttctgg

SEQ ID NO: 4695398 - DNA, 25 bp, Homo sapien
ctggaacccgccagttgggccccag

SEQ ID NO: 4695399 - DNA, 25 bp, Homo sapien
gagaacagatgcacgggccggtggg

SEQ ID NO: 4695400 - DNA, 25 bp, Homo sapien
ctgcggagttccccagagaacagat

SEQ ID NO: 4695401 - DNA, 25 bp, Homo sapien
cagagaacagatgcacgggccggtg

SEQ ID NO: 4695402 - DNA, 25 bp, Homo sapien
cggagttccccagagaacagatgca

SEQ ID NO: 4695403 - DNA, 25 bp, Homo sapien
cttccgcccttccttgagcagggtt

SEQ ID NO: 4695404 - DNA, 25 bp, Homo sapien
aggcttccgcccttccttgagcagg

SEQ ID NO: 4695405 - DNA, 25 bp, Homo sapien
ctcagaggcccctccatggtgggca

SEQ ID NO: 4695406 - DNA, 25 bp, Homo sapien
cagaggcccctccatggtgggcaca

SEQ ID NO: 4695407 - DNA, 25 bp, Homo sapien
gagagtatgacccagtacctggtcc

SEQ ID NO: 4695408 - DNA, 25 bp, Homo sapien
gtctgtgccccgcaaggacttggct

SEQ ID NO: 4695409 - DNA, 25 bp, Homo sapien
tccgtagtacaggagggtggatcct

SEQ ID NO: 4695410 - DNA, 25 bp, Homo sapien
gggtggatcctgagagtatgaccca

SEQ ID NO: 4695411 - DNA, 25 bp, Homo sapien
cactccacaagggaggccgacgtgg

SEQ ID NO: 4695412 - DNA, 25 bp, Homo sapien
tccacagttcacagaggtcccttcc

SEQ ID NO: 4695413 - DNA, 25 bp, Homo sapien
cttccccactagaggaagtcccagc

SEQ ID NO: 4695414 - DNA, 25 bp, Homo sapien
ggagagcaacaacacatccggagac

SEQ ID NO: 4695415 - DNA, 25 bp, Homo sapien
ctttgtcagggttgttcagctggaa

SEQ ID NO: 4695416 - DNA, 25 bp, Homo sapien
cagctggaagatatctgggtgctcg

SEQ ID NO: 4695417 - DNA, 25 bp, Homo sapien
gttgttcagctggaagatatctggg

SEQ ID NO: 4695418 - DNA, 25 bp, Homo sapien
cagggttgttcagctggaagatatc

SEQ ID NO: 4695419 - DNA, 25 bp, Homo sapien
ccagtctgaaacttgtaaacattgc

SEQ ID NO: 4695420 - DNA, 25 bp, Homo sapien
tgtgccacagtattgcatgaaatcg

SEQ ID NO: 4695421 - DNA, 25 bp, Homo sapien
tattgcatgaaatcgggaaccagtc

SEQ ID NO: 4695422 - DNA, 25 bp, Homo sapien
tgaaatcgggaaccagtctgaaact

SEQ ID NO: 4695423 - DNA, 25 bp, Homo sapien
acagctgctcataatcatcccccag

SEQ ID NO: 4695424 - DNA, 25 bp, Homo sapien
cacagctgctcataatcatccccca

SEQ ID NO: 4695425 - DNA, 25 bp, Homo sapien
cagctgctcataatcatcccccagt

SEQ ID NO: 4695426 - DNA, 25 bp, Homo sapien
agctgctcataatcatcccccagtg

SEQ ID NO: 4695427 - DNA, 25 bp, Homo sapien
cataacacccttcgtgggacggctg

SEQ ID NO: 4695428 - DNA, 25 bp, Homo sapien
ccaagatgggctaggagaggactcc

SEQ ID NO: 4695429 - DNA, 25 bp, Homo sapien
aaacacactgagaagctagggaccc

SEQ ID NO: 4695430 - DNA, 25 bp, Homo sapien
tcaggaccctcagcataaaacggag

SEQ ID NO: 4695431 - DNA, 25 bp, Homo sapien
gtcttcctgtcatacggatggccaa

SEQ ID NO: 4695432 - DNA, 25 bp, Homo sapien
gagagcggccctcagagctactgag

SEQ ID NO: 4695433 - DNA, 25 bp, Homo sapien
tcagtgtgctatgctcttaagagag

SEQ ID NO: 4695434 - DNA, 25 bp, Homo sapien
caatggatcaccttgagatggctgc

SEQ ID NO: 4695435 - DNA, 25 bp, Homo sapien
gctgtcagttcctgttggacctgga

SEQ ID NO: 4695436 - DNA, 25 bp, Homo sapien
ccgcaccgccctccaggtggtccac

SEQ ID NO: 4695437 - DNA, 25 bp, Homo sapien
ggtggtccacctcgtggctgtcagt

SEQ ID NO: 4695438 - DNA, 25 bp, Homo sapien
gttcctgttggacctggagctgctc

SEQ ID NO: 4695439 - DNA, 25 bp, Homo sapien
ctggggccaccatggtgcccaggct

SEQ ID NO: 4695440 - DNA, 25 bp, Homo sapien
ttattacatatagcacatagtggga

SEQ ID NO: 4695441 - DNA, 25 bp, Homo sapien
tactcagggctaccactgttgctcc

SEQ ID NO: 4695442 - DNA, 25 bp, Homo sapien
catctgccaatacatgaaactgacc

SEQ ID NO: 4695443 - DNA, 25 bp, Homo sapien
aagagggacaatgggttttactcag

SEQ ID NO: 4695444 - DNA, 25 bp, Homo sapien
cctggcattccatcacacggatgta

SEQ ID NO: 4695445 - DNA, 25 bp, Homo sapien
aacaagtttaggacatgcagttcca

SEQ ID NO: 4695446 - DNA, 25 bp, Homo sapien
cctggtggctctgctgttaggctca

SEQ ID NO: 4695447 - DNA, 25 bp, Homo sapien
gaaggaatcaagtacgtgacctgca

SEQ ID NO: 4695448 - DNA, 25 bp, Homo sapien
taacaatagccaccccatgtgaagt

SEQ ID NO: 4695449 - DNA, 25 bp, Homo sapien
ggttcagtacacagcaagtaagcag

SEQ ID NO: 4695450 - DNA, 25 bp, Homo sapien
catgcactgcgttcttgagtcctca

SEQ ID NO: 4695451 - DNA, 25 bp, Homo sapien
taaagttccgacctcagagaaggac

SEQ ID NO: 4695452 - DNA, 25 bp, Homo sapien
caaatgacataaggtttgcaggtac

SEQ ID NO: 4695453 - DNA, 25 bp, Homo sapien
ctcaaatgacataaggtttgcaggt

SEQ ID NO: 4695454 - DNA, 25 bp, Homo sapien
ttactcaaatgacataaggtttgca

SEQ ID NO: 4695455 - DNA, 25 bp, Homo sapien
tactcaaatgacataaggtttgcag

SEQ ID NO: 4695456 - DNA, 25 bp, Homo sapien
tgatcactatgagcacgtcggttgg

SEQ ID NO: 4695457 - DNA, 25 bp, Homo sapien
gaaagcactgagaacccaacgtggg

SEQ ID NO: 4695458 - DNA, 25 bp, Homo sapien
tgaattttcgcagaccaagaggcca

SEQ ID NO: 4695459 - DNA, 25 bp, Homo sapien
gagaatgaggtgcaacatccgcgtg

SEQ ID NO: 4695460 - DNA, 25 bp, Homo sapien
cattggaaaacacatttaatttcaa

SEQ ID NO: 4695461 - DNA, 25 bp, Homo sapien
cgacgtccggtctgcgttggctccg

SEQ ID NO: 4695462 - DNA, 25 bp, Homo sapien
gcgttccgacgtccggtctgcgttg

SEQ ID NO: 4695463 - DNA, 25 bp, Homo sapien
aagcggcgttccgacgtccggtctg

SEQ ID NO: 4695464 - DNA, 25 bp, Homo sapien
gtctgcgttggctccgggatcccgc

SEQ ID NO: 4695465 - DNA, 25 bp, Homo sapien
agttcggcctctcctcgcctcagca

SEQ ID NO: 4695466 - DNA, 25 bp, Homo sapien
aaacctctgcttccgcgagcgtcgt

SEQ ID NO: 4695467 - DNA, 25 bp, Homo sapien
cgtcgtcccttggagttcggcctct

SEQ ID NO: 4695468 - DNA, 25 bp, Homo sapien
gcttccgcgagcgtcgtcccttgga

SEQ ID NO: 4695469 - DNA, 25 bp, Homo sapien
ctcttctgccgcaggagcgcagcgg

SEQ ID NO: 4695470 - DNA, 25 bp, Homo sapien
ttgggctctcgaagctgcaccccct

SEQ ID NO: 4695471 - DNA, 25 bp, Homo sapien
agctgcaccccctgcgccgcagcgc

SEQ ID NO: 4695472 - DNA, 25 bp, Homo sapien
gagcgcagcggccaccccgccgggc

SEQ ID NO: 4695473 - DNA, 25 bp, Homo sapien
catgagagactctgacttggaactg

SEQ ID NO: 4695474 - DNA, 25 bp, Homo sapien
agttagtcaaggtgccaggatctcc

SEQ ID NO: 4695475 - DNA, 25 bp, Homo sapien
tcagcttcttgacatgatgcggcag

SEQ ID NO: 4695476 - DNA, 25 bp, Homo sapien
tttagattccacaagtcagatgcac

SEQ ID NO: 4695477 - DNA, 25 bp, Homo sapien
taagcagtgctctcaagataccgat

SEQ ID NO: 4695478 - DNA, 25 bp, Homo sapien
cacattattagtgggtacacgaccc

SEQ ID NO: 4695479 - DNA, 25 bp, Homo sapien
cacaggacctatgagaaacgcagca

SEQ ID NO: 4695480 - DNA, 25 bp, Homo sapien
aatgacctggcgtgtcctgaaggcc

SEQ ID NO: 4695481 - DNA, 25 bp, Homo sapien
tgaaacagaagagttgggaaaggca

SEQ ID NO: 4695482 - DNA, 25 bp, Homo sapien
ctgaaacagaagagttgggaaaggc

SEQ ID NO: 4695483 - DNA, 25 bp, Homo sapien
tcgttaacgggtccatcagtgggcc

SEQ ID NO: 4695484 - DNA, 25 bp, Homo sapien
gatgccgaaggagagagacgacttt

SEQ ID NO: 4695485 - DNA, 25 bp, Homo sapien
tctagttcagggtctttcgttggcc

SEQ ID NO: 4695486 - DNA, 25 bp, Homo sapien
aggttgacctgggactctagttcag

SEQ ID NO: 4695487 - DNA, 25 bp, Homo sapien
aaccagagaactgactctctgccag

SEQ ID NO: 4695488 - DNA, 25 bp, Homo sapien
tttctaaattacagccctcttggca

SEQ ID NO: 4695489 - DNA, 25 bp, Homo sapien
ttacagccctcttggcacatgcaga

SEQ ID NO: 4695490 - DNA, 25 bp, Homo sapien
tgtttagcaaccagagaactgactc

SEQ ID NO: 4695491 - DNA, 25 bp, Homo sapien
caactaccatttgcaaaaagggctg

SEQ ID NO: 4695492 - DNA, 25 bp, Homo sapien
catggagccctcaataaaaagcaaa

SEQ ID NO: 4695493 - DNA, 25 bp, Homo sapien
aagccctgcagtaaacttgaggcaa

SEQ ID NO: 4695494 - DNA, 25 bp, Homo sapien
gagtcatccctggaagtataggcaa

SEQ ID NO: 4695495 - DNA, 25 bp, Homo sapien
tacatagcgatctggccacaaacct

SEQ ID NO: 4695496 - DNA, 25 bp, Homo sapien
cagtattatacatagcgatctggcc

SEQ ID NO: 4695497 - DNA, 25 bp, Homo sapien
gtattatacatagcgatctggccac

SEQ ID NO: 4695498 - DNA, 25 bp, Homo sapien
tatacatagcgatctggccacaaac

SEQ ID NO: 4695499 - DNA, 25 bp, Homo sapien
gctccacagatccataatgtttcct

SEQ ID NO: 4695500 - DNA, 25 bp, Homo sapien
gaaatccccacgtctacagcctagg

SEQ ID NO: 4695501 - DNA, 25 bp, Homo sapien
aaatccccacgtctacagcctaggt

SEQ ID NO: 4695502 - DNA, 25 bp, Homo sapien
agatccataatgtttcctactgaaa

SEQ ID NO: 4695503 - DNA, 25 bp, Homo sapien
tcgagaaacgtatttggtgtctggc

SEQ ID NO: 4695504 - DNA, 25 bp, Homo sapien
gccaatggagaagaatcgagaaacg

SEQ ID NO: 4695505 - DNA, 25 bp, Homo sapien
acgtatttggtgtctggctttgttg

SEQ ID NO: 4695506 - DNA, 25 bp, Homo sapien
gagaagaatcgagaaacgtatttgg

SEQ ID NO: 4695507 - DNA, 25 bp, Homo sapien
cataacccactcgggctctttttgg

SEQ ID NO: 4695508 - DNA, 25 bp, Homo sapien
tcataacccactcgggctctttttg

SEQ ID NO: 4695509 - DNA, 25 bp, Homo sapien
taacccactcgggctctttttggca

SEQ ID NO: 4695510 - DNA, 25 bp, Homo sapien
aacccactcgggctctttttggcat

SEQ ID NO: 4695511 - DNA, 25 bp, Homo sapien
tccagccctttggatggctccatca

SEQ ID NO: 4695512 - DNA, 25 bp, Homo sapien
gaagagccattttccactctgaatc

SEQ ID NO: 4695513 - DNA, 25 bp, Homo sapien
agccctttggatggctccatcagca

SEQ ID NO: 4695514 - DNA, 25 bp, Homo sapien
tgaagagccattttccactctgaat

SEQ ID NO: 4695515 - DNA, 25 bp, Homo sapien
atgtgataatcttgagataggtgag

SEQ ID NO: 4695516 - DNA, 25 bp, Homo sapien
aatcttgagataggtgagaatctaa

SEQ ID NO: 4695517 - DNA, 25 bp, Homo sapien
tttgcttcactgttagcaagtcgac

SEQ ID NO: 4695518 - DNA, 25 bp, Homo sapien
aatttgcttcactgttagcaagtcg

SEQ ID NO: 4695519 - DNA, 25 bp, Homo sapien
caccatggattcgttttacctgctc

SEQ ID NO: 4695520 - DNA, 25 bp, Homo sapien
gctcttgagcgttacgaaaatgaaa

SEQ ID NO: 4695521 - DNA, 25 bp, Homo sapien
tgtcattcggtctgcaacattcacc

SEQ ID NO: 4695522 - DNA, 25 bp, Homo sapien
caggcgtttatcctttgtcattcgg

SEQ ID NO: 4695523 - DNA, 25 bp, Homo sapien
tttgttccttgtaggactttcgcat

SEQ ID NO: 4695524 - DNA, 25 bp, Homo sapien
ttttgttccttgtaggactttcgca

SEQ ID NO: 4695525 - DNA, 25 bp, Homo sapien
cttttggtgaaagcatatcattgga

SEQ ID NO: 4695526 - DNA, 25 bp, Homo sapien
catatcattggattttgttccttgt

SEQ ID NO: 4695527 - DNA, 25 bp, Homo sapien
tgttcttcgccaagtaccaggcagg

SEQ ID NO: 4695528 - DNA, 25 bp, Homo sapien
ctctaagtgcacgtctgttcttcgc

SEQ ID NO: 4695529 - DNA, 25 bp, Homo sapien
tcgccaagtaccaggcagggcagtt

SEQ ID NO: 4695530 - DNA, 25 bp, Homo sapien
cacgtctgttcttcgccaagtacca

SEQ ID NO: 4695531 - DNA, 25 bp, Homo sapien
acagtgagaatgcaactgatcctgc

SEQ ID NO: 4695532 - DNA, 25 bp, Homo sapien
aaaggtttagaacagtgagaatgca

SEQ ID NO: 4695533 - DNA, 25 bp, Homo sapien
cagtgagaatgcaactgatcctgcc

SEQ ID NO: 4695534 - DNA, 25 bp, Homo sapien
gaaaggtttagaacagtgagaatgc

SEQ ID NO: 4695535 - DNA, 25 bp, Homo sapien
gaattgcacggtattgagggacacg

SEQ ID NO: 4695536 - DNA, 25 bp, Homo sapien
tcagaaagggtcacggacaagaaga

SEQ ID NO: 4695537 - DNA, 25 bp, Homo sapien
ggcatcgtttccaatgtagttctga

SEQ ID NO: 4695538 - DNA, 25 bp, Homo sapien
gagggacacgttgattgttttggtc

SEQ ID NO: 4695539 - DNA, 25 bp, Homo sapien
taagatggacttcacagaaagagtt

SEQ ID NO: 4695540 - DNA, 25 bp, Homo sapien
tgtgggactgtagggaaggcatatt

SEQ ID NO: 4695541 - DNA, 25 bp, Homo sapien
tttttgtgggactgtagggaaggca

SEQ ID NO: 4695542 - DNA, 25 bp, Homo sapien
gatggacttcacagaaagagttttt

SEQ ID NO: 4695543 - DNA, 25 bp, Homo sapien
gggcctttctcaaatttgtccagat

SEQ ID NO: 4695544 - DNA, 25 bp, Homo sapien
tcaggatgaaaaatttccctggggc

SEQ ID NO: 4695545 - DNA, 25 bp, Homo sapien
tgtatttcaggatgaaaaatttccc

SEQ ID NO: 4695546 - DNA, 25 bp, Homo sapien
ctcaaatttgtccagattcatggca

SEQ ID NO: 4695547 - DNA, 25 bp, Homo sapien
tcttgttcttcaagaaccagcaagt

SEQ ID NO: 4695548 - DNA, 25 bp, Homo sapien
ctcttgttcttcaagaaccagcaag

SEQ ID NO: 4695549 - DNA, 25 bp, Homo sapien
cttgttcttcaagaaccagcaagtc

SEQ ID NO: 4695550 - DNA, 25 bp, Homo sapien
caagtttggcctgagcaacaagaca

SEQ ID NO: 4695551 - DNA, 25 bp, Homo sapien
caccaggatgtgctgataggttaga

SEQ ID NO: 4695552 - DNA, 25 bp, Homo sapien
tattttatgaagaggtgtcaccagg

SEQ ID NO: 4695553 - DNA, 25 bp, Homo sapien
agcagagagatgacccgattccaca

SEQ ID NO: 4695554 - DNA, 25 bp, Homo sapien
tatctcactcttgcactatgggtgc

SEQ ID NO: 4695555 - DNA, 25 bp, Homo sapien
ttatagtctccgctctcatggtgct

SEQ ID NO: 4695556 - DNA, 25 bp, Homo sapien
tctaggatctgggaacacaaaatta

SEQ ID NO: 4695557 - DNA, 25 bp, Homo sapien
tattttttctaatggcatcatagca

SEQ ID NO: 4695558 - DNA, 25 bp, Homo sapien
ttagggtcagacaagagcaaagtct

SEQ ID NO: 4695559 - DNA, 25 bp, Homo sapien
ttaagtacctgtgcacccaagggtg

SEQ ID NO: 4695560 - DNA, 25 bp, Homo sapien
agtttgccaagacagccctagctta

SEQ ID NO: 4695561 - DNA, 25 bp, Homo sapien
cttcaaggtagggagatcatgtgtc

SEQ ID NO: 4695562 - DNA, 25 bp, Homo sapien
cacactcatcactaacagtggtttt

SEQ ID NO: 4695563 - DNA, 25 bp, Homo sapien
tgcacactcatcactaacagtggtt

SEQ ID NO: 4695564 - DNA, 25 bp, Homo sapien
gcacactcatcactaacagtggttt

SEQ ID NO: 4695565 - DNA, 25 bp, Homo sapien
gatgcacactcatcactaacagtgg

SEQ ID NO: 4695566 - DNA, 25 bp, Homo sapien
agaaccccaaacttgaaattcacag

SEQ ID NO: 4695567 - DNA, 25 bp, Homo sapien
aaccccaaacttgaaattcacagag

SEQ ID NO: 4695568 - DNA, 25 bp, Homo sapien
gaaccccaaacttgaaattcacaga

SEQ ID NO: 4695569 - DNA, 25 bp, Homo sapien
ccccaaacttgaaattcacagagcc

SEQ ID NO: 4695570 - DNA, 25 bp, Homo sapien
tcatcagtgagctgcccatctttgg

SEQ ID NO: 4695571 - DNA, 25 bp, Homo sapien
cattgctgaacatctcatcatcagt

SEQ ID NO: 4695572 - DNA, 25 bp, Homo sapien
tcatcatcagtgagctgcccatctt

SEQ ID NO: 4695573 - DNA, 25 bp, Homo sapien
catctcatcatcagtgagctgccca

SEQ ID NO: 4695574 - DNA, 25 bp, Homo sapien
tttggtatccagaccgccacggtag

SEQ ID NO: 4695575 - DNA, 25 bp, Homo sapien
atttttgaaaaggctcgcttccaat

SEQ ID NO: 4695576 - DNA, 25 bp, Homo sapien
gtagcccgtccagccctttagagtg

SEQ ID NO: 4695577 - DNA, 25 bp, Homo sapien
tagagtgattgtgtcacccagaaga

SEQ ID NO: 4695578 - DNA, 25 bp, Homo sapien
tgttctctttggaatatggcaacat

SEQ ID NO: 4695579 - DNA, 25 bp, Homo sapien
aaactgaatgtatccctgtggtatc

SEQ ID NO: 4695580 - DNA, 25 bp, Homo sapien
tttggaatatggcaacatggtggaa

SEQ ID NO: 4695581 - DNA, 25 bp, Homo sapien
acagtataaactgaatgtatccctg

SEQ ID NO: 4695582 - DNA, 25 bp, Homo sapien
gatatcgtttccaatgtggcgtttc

SEQ ID NO: 4695583 - DNA, 25 bp, Homo sapien
gtgggagcggatcatggaaggctta

SEQ ID NO: 4695584 - DNA, 25 bp, Homo sapien
tcctctccttcttggaacacaatgg

SEQ ID NO: 4695585 - DNA, 25 bp, Homo sapien
cacaatggtgacgatatcgtttcca

SEQ ID NO: 4695586 - DNA, 25 bp, Homo sapien
tttgttgattgtatctcactaaggc

SEQ ID NO: 4695587 - DNA, 25 bp, Homo sapien
ttgtatctcactaaggcaaaaatat

SEQ ID NO: 4695588 - DNA, 25 bp, Homo sapien
tgattgtatctcactaaggcaaaaa

SEQ ID NO: 4695589 - DNA, 25 bp, Homo sapien
tgttgattgtatctcactaaggcaa

SEQ ID NO: 4695590 - DNA, 25 bp, Homo sapien
tttcactagcaaaaagtccctgaat

SEQ ID NO: 4695591 - DNA, 25 bp, Homo sapien
aagagtggtacgctctcttctgaaa

SEQ ID NO: 4695592 - DNA, 25 bp, Homo sapien
agggccaaagagtggtacgctctct

SEQ ID NO: 4695593 - DNA, 25 bp, Homo sapien
gaattcctggtggtctgtaaacact

SEQ ID NO: 4695594 - DNA, 25 bp, Homo sapien
cctggtgtaaagatctaatcaacat

SEQ ID NO: 4695595 - DNA, 25 bp, Homo sapien
cgccgacgtttctgggcaaatgttg

SEQ ID NO: 4695596 - DNA, 25 bp, Homo sapien
catatccagggtacgccgacgtttc

SEQ ID NO: 4695597 - DNA, 25 bp, Homo sapien
gatctaatcaacatatccagggtac

SEQ ID NO: 4695598 - DNA, 25 bp, Homo sapien
ctaaaagatcgtctattaagcatgt

SEQ ID NO: 4695599 - DNA, 25 bp, Homo sapien
ttccgcgctgacttgggtgactctg

SEQ ID NO: 4695600 - DNA, 25 bp, Homo sapien
attctaacaaactccgcctggcggg

SEQ ID NO: 4695601 - DNA, 25 bp, Homo sapien
ggtgactctggtaagacatcactaa

SEQ ID NO: 4695602 - DNA, 25 bp, Homo sapien
tgatgtgtgatcaaggcagacagct

SEQ ID NO: 4695603 - DNA, 25 bp, Homo sapien
tgtcgcctcccggaactgagaaata

SEQ ID NO: 4695604 - DNA, 25 bp, Homo sapien
aataccagtgtcacatgcgagcggg

SEQ ID NO: 4695605 - DNA, 25 bp, Homo sapien
caaagtctttgcacatgggccatct

SEQ ID NO: 4695606 - DNA, 25 bp, Homo sapien
ggagcatcccctctcacaatggatt

SEQ ID NO: 4695607 - DNA, 25 bp, Homo sapien
agatccctgaagctgccaagcttga

SEQ ID NO: 4695608 - DNA, 25 bp, Homo sapien
ctgccaagcttgatggagcatcccc

SEQ ID NO: 4695609 - DNA, 25 bp, Homo sapien
tggagcatcccctctcacaatggat

SEQ ID NO: 4695610 - DNA, 25 bp, Homo sapien
gggagccttcatgtggattccacca

SEQ ID NO: 4695611 - DNA, 25 bp, Homo sapien
cacagttgctctggtctgacgacag

SEQ ID NO: 4695612 - DNA, 25 bp, Homo sapien
aaagccgggttctctgggcacagaa

SEQ ID NO: 4695613 - DNA, 25 bp, Homo sapien
tctctgaggtggtctacggcctgcg

SEQ ID NO: 4695614 - DNA, 25 bp, Homo sapien
cacttttactctcaatcaggcatca

SEQ ID NO: 4695615 - DNA, 25 bp, Homo sapien
taggtgtgttcttaagtacccaagc

SEQ ID NO: 4695616 - DNA, 25 bp, Homo sapien
cactggataagcctcagtttgtgga

SEQ ID NO: 4695617 - DNA, 25 bp, Homo sapien
gttccatgatcttagtcacaccaga

SEQ ID NO: 4695618 - DNA, 25 bp, Homo sapien
cgccagcatcagtggaaaccagcaa

SEQ ID NO: 4695619 - DNA, 25 bp, Homo sapien
acggcttcatgagggaaattactgc

SEQ ID NO: 4695620 - DNA, 25 bp, Homo sapien
tagcaagacgccagcatcagtggaa

SEQ ID NO: 4695621 - DNA, 25 bp, Homo sapien
agggatctgcacacacggcttcatg

SEQ ID NO: 4695622 - DNA, 25 bp, Homo sapien
tctgcttgccctggaaacaagggtt

SEQ ID NO: 4695623 - DNA, 25 bp, Homo sapien
tctctgcagatcacacatttatggc

SEQ ID NO: 4695624 - DNA, 25 bp, Homo sapien
gagaactgactaactccccaggaag

SEQ ID NO: 4695625 - DNA, 25 bp, Homo sapien
gctctgaagttgcaccctctctggg

SEQ ID NO: 4695626 - DNA, 25 bp, Homo sapien
agttctgtcaaacacgggcactgat

SEQ ID NO: 4695627 - DNA, 25 bp, Homo sapien
aacacgggcactgatggaaggtcat

SEQ ID NO: 4695628 - DNA, 25 bp, Homo sapien
gtcaaacacgggcactgatggaagg

SEQ ID NO: 4695629 - DNA, 25 bp, Homo sapien
ttctgtcaaacacgggcactgatgg

SEQ ID NO: 4695630 - DNA, 25 bp, Homo sapien
gcccttttgcagagcacttagcctg

SEQ ID NO: 4695631 - DNA, 25 bp, Homo sapien
aggcccttttgcagagcacttagcc

SEQ ID NO: 4695632 - DNA, 25 bp, Homo sapien
gcagagcacttagcctgaagacaaa

SEQ ID NO: 4695633 - DNA, 25 bp, Homo sapien
cttttgcagagcacttagcctgaag

SEQ ID NO: 4695634 - DNA, 25 bp, Homo sapien
tgatgtactggaattcttcaacagg

SEQ ID NO: 4695635 - DNA, 25 bp, Homo sapien
tggtgaccccgcttggcttgttgtg

SEQ ID NO: 4695636 - DNA, 25 bp, Homo sapien
gaagcagtttattccgaattgcaac

SEQ ID NO: 4695637 - DNA, 25 bp, Homo sapien
gtgttaatagcatacaggtggcagc

SEQ ID NO: 4695638 - DNA, 25 bp, Homo sapien
ccagtagaaatactccatcttagtg

SEQ ID NO: 4695639 - DNA, 25 bp, Homo sapien
tcttagtggccaatgctagatatat

SEQ ID NO: 4695640 - DNA, 25 bp, Homo sapien
tattccataccttaatgtaccctag

SEQ ID NO: 4695641 - DNA, 25 bp, Homo sapien
ctccatcttagtggccaatgctaga

SEQ ID NO: 4695642 - DNA, 25 bp, Homo sapien
gatacaagagacaggggtgagaaca

SEQ ID NO: 4695643 - DNA, 25 bp, Homo sapien
gttggtgaggatacaagagacaggg

SEQ ID NO: 4695644 - DNA, 25 bp, Homo sapien
ctgtgtggttggtgaggatacaaga

SEQ ID NO: 4695645 - DNA, 25 bp, Homo sapien
ccagctccatgccaagccccactgc

SEQ ID NO: 4695646 - DNA, 25 bp, Homo sapien
gatgagattgtcactctcttcagct

SEQ ID NO: 4695647 - DNA, 25 bp, Homo sapien
tgtgctctcattcaccacatcaaat

SEQ ID NO: 4695648 - DNA, 25 bp, Homo sapien
tggtgtcgataagccacacagatga

SEQ ID NO: 4695649 - DNA, 25 bp, Homo sapien
tcagctggcccatccactaaggtca

SEQ ID NO: 4695650 - DNA, 25 bp, Homo sapien
cacatgataatagatagaaccattc

SEQ ID NO: 4695651 - DNA, 25 bp, Homo sapien
cacatggctcagtctaaatagtgaa

SEQ ID NO: 4695652 - DNA, 25 bp, Homo sapien
gcaaatgggacagtcacatgataat

SEQ ID NO: 4695653 - DNA, 25 bp, Homo sapien
ttttattcggaaggatggaatggca

SEQ ID NO: 4695654 - DNA, 25 bp, Homo sapien
tgtcagtgctgaacgctctccagtg

SEQ ID NO: 4695655 - DNA, 25 bp, Homo sapien
tagctgaacaggactggaggtagcc

SEQ ID NO: 4695656 - DNA, 25 bp, Homo sapien
tacatacgtgggctgaaaagctctg

SEQ ID NO: 4695657 - DNA, 25 bp, Homo sapien
ggtttcctcagtacctaggccagaa

SEQ ID NO: 4695658 - DNA, 25 bp, Homo sapien
cacaggcagtggtatattttcaaac

SEQ ID NO: 4695659 - DNA, 25 bp, Homo sapien
tataccagggattcccaacttggct

SEQ ID NO: 4695660 - DNA, 25 bp, Homo sapien
tattggttctcaagtaccacacccc

SEQ ID NO: 4695661 - DNA, 25 bp, Homo sapien
tgacagccagggttgcaaagcaatg

SEQ ID NO: 4695662 - DNA, 25 bp, Homo sapien
tcatgacgcaaaggcctgtctgtgc

SEQ ID NO: 4695663 - DNA, 25 bp, Homo sapien
caaccaaaagttgcaggagctcagc

SEQ ID NO: 4695664 - DNA, 25 bp, Homo sapien
gcttatgacatgctctgacccaggg

SEQ ID NO: 4695665 - DNA, 25 bp, Homo sapien
tcaggcagccttttagaccaagatc

SEQ ID NO: 4695666 - DNA, 25 bp, Homo sapien
tggcaaatggcttagcctctggcct

SEQ ID NO: 4695667 - DNA, 25 bp, Homo sapien
tggtgtgtggcaaatggcttagcct

SEQ ID NO: 4695668 - DNA, 25 bp, Homo sapien
ccttaggtcttcgtctgtaaagcag

SEQ ID NO: 4695669 - DNA, 25 bp, Homo sapien
gccttaggtcttcgtctgtaaagca

SEQ ID NO: 4695670 - DNA, 25 bp, Homo sapien
tgcagcccctagactatgtcgtttg

SEQ ID NO: 4695671 - DNA, 25 bp, Homo sapien
tattctcaacccttagagcctggcc

SEQ ID NO: 4695672 - DNA, 25 bp, Homo sapien
gagggcactcaacctgatggtgtcc

SEQ ID NO: 4695673 - DNA, 25 bp, Homo sapien
aaccctaaattcacgggctcaggca

SEQ ID NO: 4695674 - DNA, 25 bp, Homo sapien
cagcatggtgcaatgaaaagggtgt

SEQ ID NO: 4695675 - DNA, 25 bp, Homo sapien
aaagtctgtgcaccttaaaatcgcc

SEQ ID NO: 4695676 - DNA, 25 bp, Homo sapien
agaacacctagttccgtggtctggg

SEQ ID NO: 4695677 - DNA, 25 bp, Homo sapien
gcaccttaaaatcgccacggcatgt

SEQ ID NO: 4695678 - DNA, 25 bp, Homo sapien
ctgcaatgataacgggcaacggtag

SEQ ID NO: 4695679 - DNA, 25 bp, Homo sapien
gtcccttgactggtacacgccacag

SEQ ID NO: 4695680 - DNA, 25 bp, Homo sapien
gatgctgaccctgtgaaaagacttt

SEQ ID NO: 4695681 - DNA, 25 bp, Homo sapien
tctgtcatgcaggtgccatagggtc

SEQ ID NO: 4695682 - DNA, 25 bp, Homo sapien
catcttcgtacacatcaatagctgc

SEQ ID NO: 4695683 - DNA, 25 bp, Homo sapien
ccatcttcgtacacatcaatagctg

SEQ ID NO: 4695684 - DNA, 25 bp, Homo sapien
acatcaatagctgcaacaaaattaa

SEQ ID NO: 4695685 - DNA, 25 bp, Homo sapien
tgtgcataaaatgtccccaaagagc

SEQ ID NO: 4695686 - DNA, 25 bp, Homo sapien
gactgggcagctttatctaggaaaa

SEQ ID NO: 4695687 - DNA, 25 bp, Homo sapien
cattaaagacctgctgttctgagga

SEQ ID NO: 4695688 - DNA, 25 bp, Homo sapien
taatccaaactaggccaactgaggc

SEQ ID NO: 4695689 - DNA, 25 bp, Homo sapien
gagtggcagtggcctggcccatggg

SEQ ID NO: 4695690 - DNA, 25 bp, Homo sapien
caggagtggcagtggcctggcccat

SEQ ID NO: 4695691 - DNA, 25 bp, Homo sapien
gcaggagtggcagtggcctggccca

SEQ ID NO: 4695692 - DNA, 25 bp, Homo sapien
aggagtggcagtggcctggcccatg

SEQ ID NO: 4695693 - DNA, 25 bp, Homo sapien
tgagatgaagtcagagcctgaagcc

SEQ ID NO: 4695694 - DNA, 25 bp, Homo sapien
taaacaggcaaattccacgtgtgct

SEQ ID NO: 4695695 - DNA, 25 bp, Homo sapien
gactgaagctatgggaacctctgag

SEQ ID NO: 4695696 - DNA, 25 bp, Homo sapien
gtgttgttcaccagatgcctcccaa

SEQ ID NO: 4695697 - DNA, 25 bp, Homo sapien
aagataccgtgttgccgtggaaggc

SEQ ID NO: 4695698 - DNA, 25 bp, Homo sapien
ggaaagctgcacgaagataccgtgt

SEQ ID NO: 4695699 - DNA, 25 bp, Homo sapien
gtagtgtaaacaggaaagctgcacg

SEQ ID NO: 4695700 - DNA, 25 bp, Homo sapien
agcagtagtgtaaacaggaaagctg

SEQ ID NO: 4695701 - DNA, 25 bp, Homo sapien
gggttctaggaagctgactccagca

SEQ ID NO: 4695702 - DNA, 25 bp, Homo sapien
gcagggagaagtccattgtgccaac

SEQ ID NO: 4695703 - DNA, 25 bp, Homo sapien
gaaattccgtgcgtgctacaccgac

SEQ ID NO: 4695704 - DNA, 25 bp, Homo sapien
gtgactggtccataaaagataggcc

SEQ ID NO: 4695705 - DNA, 25 bp, Homo sapien
attaggtaacacaaaactttctatg

SEQ ID NO: 4695706 - DNA, 25 bp, Homo sapien
tcaggctcacaaattatctattagg

SEQ ID NO: 4695707 - DNA, 25 bp, Homo sapien
ggcttttgaatgacatcaggctcac

SEQ ID NO: 4695708 - DNA, 25 bp, Homo sapien
ggacagccttcaaaatttaattcag

SEQ ID NO: 4695709 - DNA, 25 bp, Homo sapien
tgtactgtttttctggcaaaagtaa

SEQ ID NO: 4695710 - DNA, 25 bp, Homo sapien
ttaaaatgttaagaggctggcccag

SEQ ID NO: 4695711 - DNA, 25 bp, Homo sapien
gctgtccactataattataagatgc

SEQ ID NO: 4695712 - DNA, 25 bp, Homo sapien
tcattgaatctaggatgtcactgaa

SEQ ID NO: 4695713 - DNA, 25 bp, Homo sapien
gagtggcttgtctattcttgcacca

SEQ ID NO: 4695714 - DNA, 25 bp, Homo sapien
aatcacttagcagatatttatggag

SEQ ID NO: 4695715 - DNA, 25 bp, Homo sapien
tttgtccaattgtcctaacgttatc

SEQ ID NO: 4695716 - DNA, 25 bp, Homo sapien
gaaatgctactttcatcgtatacat

SEQ ID NO: 4695717 - DNA, 25 bp, Homo sapien
actggaaatctgacgcagaaggttg

SEQ ID NO: 4695718 - DNA, 25 bp, Homo sapien
gaactggaaatctgacgcagaaggt

SEQ ID NO: 4695719 - DNA, 25 bp, Homo sapien
caattgcatagggagcctggttcca

SEQ ID NO: 4695720 - DNA, 25 bp, Homo sapien
gcctggttccaacagaactggaaat

SEQ ID NO: 4695721 - DNA, 25 bp, Homo sapien
tgcagctgcggcacgactgcagtgt

SEQ ID NO: 4695722 - DNA, 25 bp, Homo sapien
cacgactgcagtgtggaccaggttc

SEQ ID NO: 4695723 - DNA, 25 bp, Homo sapien
aaggccaggagatacgggaaagcac

SEQ ID NO: 4695724 - DNA, 25 bp, Homo sapien
gtgtggaccaggttcccgttcacca

SEQ ID NO: 4695725 - DNA, 25 bp, Homo sapien
tgcagggactctttacaccatggaa

SEQ ID NO: 4695726 - DNA, 25 bp, Homo sapien
tggtacagaagctgaaagaagtttc

SEQ ID NO: 4695727 - DNA, 25 bp, Homo sapien
cttacagtgatggagaaagtactag

SEQ ID NO: 4695728 - DNA, 25 bp, Homo sapien
tgcagtggcgtcacgctggcagctt

SEQ ID NO: 4695729 - DNA, 25 bp, Homo sapien
agagagagcattaccgggctgcctg

SEQ ID NO: 4695730 - DNA, 25 bp, Homo sapien
agagcattaccgggctgcctggtgt

SEQ ID NO: 4695731 - DNA, 25 bp, Homo sapien
gaagagagagcattaccgggctgcc

SEQ ID NO: 4695732 - DNA, 25 bp, Homo sapien
agcattaccgggctgcctggtgttc

SEQ ID NO: 4695733 - DNA, 25 bp, Homo sapien
aaatactggagtatctcggcccggg

SEQ ID NO: 4695734 - DNA, 25 bp, Homo sapien
tgtctgaggagaatttcgggcactg

SEQ ID NO: 4695735 - DNA, 25 bp, Homo sapien
tgaggagaatttcgggcactggccc

SEQ ID NO: 4695736 - DNA, 25 bp, Homo sapien
aggaaatactggagtatctcggccc

SEQ ID NO: 4695737 - DNA, 25 bp, Homo sapien
ccaggagcactgatttgagggtgcc

SEQ ID NO: 4695738 - DNA, 25 bp, Homo sapien
ggaagacgttatgtcacacactgat

SEQ ID NO: 4695739 - DNA, 25 bp, Homo sapien
tgatctgtaatgtcccactgggagg

SEQ ID NO: 4695740 - DNA, 25 bp, Homo sapien
ccttaacatagcatgaaggaagacg

SEQ ID NO: 4695741 - DNA, 25 bp, Homo sapien
tcagaggtcgttcgatgcttctgcc

SEQ ID NO: 4695742 - DNA, 25 bp, Homo sapien
tgtacagattttttgattgaatttc

SEQ ID NO: 4695743 - DNA, 25 bp, Homo sapien
cccacgaggtttctaagtggaatct

SEQ ID NO: 4695744 - DNA, 25 bp, Homo sapien
gatgcttctgcccacgaggtttcta

SEQ ID NO: 4695745 - DNA, 25 bp, Homo sapien
ggcagcaaggcccacactgatggga

SEQ ID NO: 4695746 - DNA, 25 bp, Homo sapien
ccagtagttccctgcgggtcctgct

SEQ ID NO: 4695747 - DNA, 25 bp, Homo sapien
tccatgcgagacagggacaaggagt

SEQ ID NO: 4695748 - DNA, 25 bp, Homo sapien
caaggagtgcgtgactggaatggca

SEQ ID NO: 4695749 - DNA, 25 bp, Homo sapien
aaagataaaaccagctggtctgttc

SEQ ID NO: 4695750 - DNA, 25 bp, Homo sapien
tctgaggacaattcatatccaaaga

SEQ ID NO: 4695751 - DNA, 25 bp, Homo sapien
tcatatccaaagataaaaccagctg

SEQ ID NO: 4695752 - DNA, 25 bp, Homo sapien
gaggacaattcatatccaaagataa

SEQ ID NO: 4695753 - DNA, 25 bp, Homo sapien
ccagtcccatagttatactgagaga

SEQ ID NO: 4695754 - DNA, 25 bp, Homo sapien
gagcccagtcccatagttatactga

SEQ ID NO: 4695755 - DNA, 25 bp, Homo sapien
gtcccatagttatactgagagaaat

SEQ ID NO: 4695756 - DNA, 25 bp, Homo sapien
tgagctcaacacatatcttgcatct

SEQ ID NO: 4695757 - DNA, 25 bp, Homo sapien
tggcctttggcgctccttctgactt

SEQ ID NO: 4695758 - DNA, 25 bp, Homo sapien
cctttggcgctccttctgacttggg

SEQ ID NO: 4695759 - DNA, 25 bp, Homo sapien
ttttgatttggcctttggcgctcct

SEQ ID NO: 4695760 - DNA, 25 bp, Homo sapien
gatttggcctttggcgctccttctg

SEQ ID NO: 4695761 - DNA, 25 bp, Homo sapien
ctcagggttggcttcggaagtagaa

SEQ ID NO: 4695762 - DNA, 25 bp, Homo sapien
gaagcactttccaaggagcctgatg

SEQ ID NO: 4695763 - DNA, 25 bp, Homo sapien
tgtcttcatcggagaaagccgtgag

SEQ ID NO: 4695764 - DNA, 25 bp, Homo sapien
agctggctgagtgcccctcagggtt

SEQ ID NO: 4695765 - DNA, 25 bp, Homo sapien
ttggtccaatagatcactgacaggc

SEQ ID NO: 4695766 - DNA, 25 bp, Homo sapien
aaaggtcaggaaagatggcaccgga

SEQ ID NO: 4695767 - DNA, 25 bp, Homo sapien
cgagtgtgcagaaggtttggtccaa

SEQ ID NO: 4695768 - DNA, 25 bp, Homo sapien
taaagagtataaacctccataagaa

SEQ ID NO: 4695769 - DNA, 25 bp, Homo sapien
aagaatgagtatttttgatttattc

SEQ ID NO: 4695770 - DNA, 25 bp, Homo sapien
agaaacacattatgtgacataaatc

SEQ ID NO: 4695771 - DNA, 25 bp, Homo sapien
aaacacattatgtgacataaatcaa

SEQ ID NO: 4695772 - DNA, 25 bp, Homo sapien
gaaacacattatgtgacataaatca

SEQ ID NO: 4695773 - DNA, 25 bp, Homo sapien
tttctcaaaagtctacaggcaggaa

SEQ ID NO: 4695774 - DNA, 25 bp, Homo sapien
ggaggagcttctaagatctaaccat

SEQ ID NO: 4695775 - DNA, 25 bp, Homo sapien
ttttaaccacaaggagtagctgttc

SEQ ID NO: 4695776 - DNA, 25 bp, Homo sapien
gaagacttttgacaagctcctatgc

SEQ ID NO: 4695777 - DNA, 25 bp, Homo sapien
cacattaaagcagaccaatgggagc

SEQ ID NO: 4695778 - DNA, 25 bp, Homo sapien
aagcgcgctggaaccgcccctaggg

SEQ ID NO: 4695779 - DNA, 25 bp, Homo sapien
gctagcgaatcagctaggacccgcc

SEQ ID NO: 4695780 - DNA, 25 bp, Homo sapien
catagaaccgattagcgaagcgcgc

SEQ ID NO: 4695781 - DNA, 25 bp, Homo sapien
cggccaacgccgatcggccagctct

SEQ ID NO: 4695782 - DNA, 25 bp, Homo sapien
gtcggcggccaacgccgatcggcca

SEQ ID NO: 4695783 - DNA, 25 bp, Homo sapien
gccaacgccgatcggccagctctgg

SEQ ID NO: 4695784 - DNA, 25 bp, Homo sapien
ggcggccaacgccgatcggccagct

SEQ ID NO: 4695785 - DNA, 25 bp, Homo sapien
tttcctctgggtcctcgggcgtcat

SEQ ID NO: 4695786 - DNA, 25 bp, Homo sapien
gccccagaagcggctgggtttcctc

SEQ ID NO: 4695787 - DNA, 25 bp, Homo sapien
ctgccgccaggaggccccagaagcg

SEQ ID NO: 4695788 - DNA, 25 bp, Homo sapien
ccagaagcggctgggtttcctctgg

SEQ ID NO: 4695789 - DNA, 25 bp, Homo sapien
agggtgagcggagcggacgcggagg

SEQ ID NO: 4695790 - DNA, 25 bp, Homo sapien
acagggccgagggtgagcggagcgg

SEQ ID NO: 4695791 - DNA, 25 bp, Homo sapien
gggacagggccgagggtgagcggag

SEQ ID NO: 4695792 - DNA, 25 bp, Homo sapien
ggccgagggtgagcggagcggacgc

SEQ ID NO: 4695793 - DNA, 25 bp, Homo sapien
ggcgaaggcggcgaggaagacgcgg

SEQ ID NO: 4695794 - DNA, 25 bp, Homo sapien
cggcgcgctgcaggctagggatggc

SEQ ID NO: 4695795 - DNA, 25 bp, Homo sapien
gggcgcggcgcgctgcaggctaggg

SEQ ID NO: 4695796 - DNA, 25 bp, Homo sapien
gcgctgcaggctagggatggccggg

SEQ ID NO: 4695797 - DNA, 25 bp, Homo sapien
gaggagggggcgccgaagccgcagc

SEQ ID NO: 4695798 - DNA, 25 bp, Homo sapien
ggaggcgggcggctgctgaggaggg

SEQ ID NO: 4695799 - DNA, 25 bp, Homo sapien
agggggcgccgaagccgcagcccat

SEQ ID NO: 4695800 - DNA, 25 bp, Homo sapien
ggagggggcgccgaagccgcagccc

SEQ ID NO: 4695801 - DNA, 25 bp, Homo sapien
cactagggaggcaacaccgcaggcc

SEQ ID NO: 4695802 - DNA, 25 bp, Homo sapien
caccgcaggccaggccggtgaggag

SEQ ID NO: 4695803 - DNA, 25 bp, Homo sapien
agcaagaggctcagcttgcgcccgg

SEQ ID NO: 4695804 - DNA, 25 bp, Homo sapien
cctgggccgcggtgatgacggcaaa

SEQ ID NO: 4695805 - DNA, 25 bp, Homo sapien
gcgagataacgcagggacttcaagc

SEQ ID NO: 4695806 - DNA, 25 bp, Homo sapien
ctttccgagactgcatgtcatgacc

SEQ ID NO: 4695807 - DNA, 25 bp, Homo sapien
catgacctcagtgtaaaatggagag

SEQ ID NO: 4695808 - DNA, 25 bp, Homo sapien
tggcacccagaaggtcccgccaggg

SEQ ID NO: 4695809 - DNA, 25 bp, Homo sapien
ggatgccgacgacgaccattagctg

SEQ ID NO: 4695810 - DNA, 25 bp, Homo sapien
ttagctgcacacaggagccgagcaa

SEQ ID NO: 4695811 - DNA, 25 bp, Homo sapien
cccccggactgctgggtaggcgatt

SEQ ID NO: 4695812 - DNA, 25 bp, Homo sapien
ccaggtaggccaggaggatgccgac

SEQ ID NO: 4695813 - DNA, 25 bp, Homo sapien
aaagacctgtgtatcatccgccctg

SEQ ID NO: 4695814 - DNA, 25 bp, Homo sapien
tctcccaaggtagccagatcgctgg

SEQ ID NO: 4695815 - DNA, 25 bp, Homo sapien
gatcgctggcaggattctgaatttg

SEQ ID NO: 4695816 - DNA, 25 bp, Homo sapien
gatgaatgtcaacacctgcacacag

SEQ ID NO: 4695817 - DNA, 25 bp, Homo sapien
tgtccgcatggtatgatgtggcacc

SEQ ID NO: 4695818 - DNA, 25 bp, Homo sapien
tgaggtgcttgctgcgtgtccgcat

SEQ ID NO: 4695819 - DNA, 25 bp, Homo sapien
tgcatgtccctcatatgaacagact

SEQ ID NO: 4695820 - DNA, 25 bp, Homo sapien
cggaggaagcttttcactggacatc

SEQ ID NO: 4695821 - DNA, 25 bp, Homo sapien
tcatgttcgctactgacattgccat

SEQ ID NO: 4695822 - DNA, 25 bp, Homo sapien
gctactgacattgccattatcacaa

SEQ ID NO: 4695823 - DNA, 25 bp, Homo sapien
atcacaactgttcatgaaggcacat

SEQ ID NO: 4695824 - DNA, 25 bp, Homo sapien
tgcacatctgccctcatgttcgcta

SEQ ID NO: 4695825 - DNA, 25 bp, Homo sapien
aggaagcgcggggtctcgggcatga

SEQ ID NO: 4695826 - DNA, 25 bp, Homo sapien
tcgggcatgaagcacatgagaagca

SEQ ID NO: 4695827 - DNA, 25 bp, Homo sapien
gggcatgaagcacatgagaagcagc

SEQ ID NO: 4695828 - DNA, 25 bp, Homo sapien
gtctcgggcatgaagcacatgagaa

SEQ ID NO: 4695829 - DNA, 25 bp, Homo sapien
tgctcagccccgatgggggggtctt

SEQ ID NO: 4695830 - DNA, 25 bp, Homo sapien
ctgctcagccccgatgggggggtct

SEQ ID NO: 4695831 - DNA, 25 bp, Homo sapien
gctcagccccgatgggggggtcttc

SEQ ID NO: 4695832 - DNA, 25 bp, Homo sapien
catgtgtcaggtgagatgaccctca

SEQ ID NO: 4695833 - DNA, 25 bp, Homo sapien
caggtgtgcagacaagtcccagcct

SEQ ID NO: 4695834 - DNA, 25 bp, Homo sapien
ggagcgctgactcccacgtcttggc

SEQ ID NO: 4695835 - DNA, 25 bp, Homo sapien
gagccacaaagaggtaatctgggca

SEQ ID NO: 4695836 - DNA, 25 bp, Homo sapien
tgccgcagcagggccaggtgaaagc

SEQ ID NO: 4695837 - DNA, 25 bp, Homo sapien
gccgcagcagggccaggtgaaagct

SEQ ID NO: 4695838 - DNA, 25 bp, Homo sapien
ctgccgcagcagggccaggtgaaag

SEQ ID NO: 4695839 - DNA, 25 bp, Homo sapien
ctggaaggccatcagggagacgccg

SEQ ID NO: 4695840 - DNA, 25 bp, Homo sapien
agacgccgatgatgaagggcttgta

SEQ ID NO: 4695841 - DNA, 25 bp, Homo sapien
ccatcagggagacgccgatgatgaa

SEQ ID NO: 4695842 - DNA, 25 bp, Homo sapien
tgatgaagggcttgtagatgccggg

SEQ ID NO: 4695843 - DNA, 25 bp, Homo sapien
catagaacatgacggcgttgacccc

SEQ ID NO: 4695844 - DNA, 25 bp, Homo sapien
tgcatagaacatgacggcgttgacc

SEQ ID NO: 4695845 - DNA, 25 bp, Homo sapien
tctgcatagaacatgacggcgttga

SEQ ID NO: 4695846 - DNA, 25 bp, Homo sapien
gtctctgcatagaacatgacggcgt

SEQ ID NO: 4695847 - DNA, 25 bp, Homo sapien
gggggctggacgaggcaggccaggc

SEQ ID NO: 4695848 - DNA, 25 bp, Homo sapien
tggatgacacccacgacgaccgagg

SEQ ID NO: 4695849 - DNA, 25 bp, Homo sapien
tccgccctgctctgtccatgatgag

SEQ ID NO: 4695850 - DNA, 25 bp, Homo sapien
tccatgatgagagccgccacagctg

SEQ ID NO: 4695851 - DNA, 25 bp, Homo sapien
tgctctgtccatgatgagagccgcc

SEQ ID NO: 4695852 - DNA, 25 bp, Homo sapien
gggtaccaaatgtccgtgggccgca

SEQ ID NO: 4695853 - DNA, 25 bp, Homo sapien
gccttggacctcagcgaactgcaaa

SEQ ID NO: 4695854 - DNA, 25 bp, Homo sapien
tgctgtcaaatcatggccgcattag

SEQ ID NO: 4695855 - DNA, 25 bp, Homo sapien
agaagcagcagcgagtaaccctcag

SEQ ID NO: 4695856 - DNA, 25 bp, Homo sapien
cccacgctggcatcaacaggctgtg

SEQ ID NO: 4695857 - DNA, 25 bp, Homo sapien
aaggcactcgtgctgaacaccatga

SEQ ID NO: 4695858 - DNA, 25 bp, Homo sapien
tcagcttgaagtaggcgccgaaggc

SEQ ID NO: 4695859 - DNA, 25 bp, Homo sapien
gagatggccacgtgcgaggagttgc

SEQ ID NO: 4695860 - DNA, 25 bp, Homo sapien
tccttggtcacgagaaaggccatga

SEQ ID NO: 4695861 - DNA, 25 bp, Homo sapien
ccagttggtgaggacgcagatgcct

SEQ ID NO: 4695862 - DNA, 25 bp, Homo sapien
tgtcgccacgcccttgacatgcaga

SEQ ID NO: 4695863 - DNA, 25 bp, Homo sapien
ccttgacatgcagagggaagatctc

SEQ ID NO: 4695864 - DNA, 25 bp, Homo sapien
aagatgcagaaagcggaggcaagcc

SEQ ID NO: 4695865 - DNA, 25 bp, Homo sapien
tgcagaaagcggaggcaagccagaa

SEQ ID NO: 4695866 - DNA, 25 bp, Homo sapien
gacactgaagatgcagaaagcggag

SEQ ID NO: 4695867 - DNA, 25 bp, Homo sapien
ctgaagatgcagaaagcggaggcaa

SEQ ID NO: 4695868 - DNA, 25 bp, Homo sapien
aggcagtgagcctcctagccccggg

SEQ ID NO: 4695869 - DNA, 25 bp, Homo sapien
aggcttgctccatcccctagtgagt

SEQ ID NO: 4695870 - DNA, 25 bp, Homo sapien
ttgctccatcccctagtgagtggct

SEQ ID NO: 4695871 - DNA, 25 bp, Homo sapien
tcctagccccgggtcatgggctgga

SEQ ID NO: 4695872 - DNA, 25 bp, Homo sapien
cgaaggtgttcctgagtcctcagag

SEQ ID NO: 4695873 - DNA, 25 bp, Homo sapien
tagtcttgcgcatggagggctgacc

SEQ ID NO: 4695874 - DNA, 25 bp, Homo sapien
tcctcttccgctgctttagtcttgc

SEQ ID NO: 4695875 - DNA, 25 bp, Homo sapien
caggtctgcaaagctcgaaggtgtt

SEQ ID NO: 4695876 - DNA, 25 bp, Homo sapien
gagcgactgaatgcccagcacccaa

SEQ ID NO: 4695877 - DNA, 25 bp, Homo sapien
cgtgagaggagcgactgaatgccca

SEQ ID NO: 4695878 - DNA, 25 bp, Homo sapien
ctgtgtcagtctttatttggcaaac

SEQ ID NO: 4695879 - DNA, 25 bp, Homo sapien
ttccttcccgataaggcagccgcgt

SEQ ID NO: 4695880 - DNA, 25 bp, Homo sapien
tgagcaagtaaagccacagggtgtc

SEQ ID NO: 4695881 - DNA, 25 bp, Homo sapien
tgaccatgagcaagtaaagccacag

SEQ ID NO: 4695882 - DNA, 25 bp, Homo sapien
acttctcagtgtgaagggtaagctt

SEQ ID NO: 4695883 - DNA, 25 bp, Homo sapien
ggtaagcttggctgaccatgagcaa

SEQ ID NO: 4695884 - DNA, 25 bp, Homo sapien
gaacaaaatcccaacagagatgtta

SEQ ID NO: 4695885 - DNA, 25 bp, Homo sapien
gacttctggctccattaaagtcaac

SEQ ID NO: 4695886 - DNA, 25 bp, Homo sapien
taatttccctacaatgaacacatat

SEQ ID NO: 4695887 - DNA, 25 bp, Homo sapien
agtgcttaggacagtgcatagcagc

SEQ ID NO: 4695888 - DNA, 25 bp, Homo sapien
caagcactggtaatgcggatgccga

SEQ ID NO: 4695889 - DNA, 25 bp, Homo sapien
aatatggttctcacccgattagtgg

SEQ ID NO: 4695890 - DNA, 25 bp, Homo sapien
tggactgccacgcaagcactggtaa

SEQ ID NO: 4695891 - DNA, 25 bp, Homo sapien
catacaattttataccagtctggaa

SEQ ID NO: 4695892 - DNA, 25 bp, Homo sapien
tgaaatggaatccaagaggccgggc

SEQ ID NO: 4695893 - DNA, 25 bp, Homo sapien
ggtgtagccctgcaaattgaaatgg

SEQ ID NO: 4695894 - DNA, 25 bp, Homo sapien
aaatggattccatgcaacagctagc

SEQ ID NO: 4695895 - DNA, 25 bp, Homo sapien
gaaacgaaaacagctttgccgcagg

SEQ ID NO: 4695896 - DNA, 25 bp, Homo sapien
aaaattgagggaggatactgtgcca

SEQ ID NO: 4695897 - DNA, 25 bp, Homo sapien
gttgcggtaaagaaggcagcccaaa

SEQ ID NO: 4695898 - DNA, 25 bp, Homo sapien
ggtggcatgaataatccgcctcttg

SEQ ID NO: 4695899 - DNA, 25 bp, Homo sapien
gctgcactgccaatgccaatggtga

SEQ ID NO: 4695900 - DNA, 25 bp, Homo sapien
ccctacaggatggtcaatgggggct

SEQ ID NO: 4695901 - DNA, 25 bp, Homo sapien
ctctgggtccgcgaagcattctgtg

SEQ ID NO: 4695902 - DNA, 25 bp, Homo sapien
tcctttactgatggcgccaggctgg

SEQ ID NO: 4695903 - DNA, 25 bp, Homo sapien
tccataatcctttactgatggcgcc

SEQ ID NO: 4695904 - DNA, 25 bp, Homo sapien
gagagctcaagaaccgctgtccaag

SEQ ID NO: 4695905 - DNA, 25 bp, Homo sapien
gcagaacccggtgaaaaagccgctg

SEQ ID NO: 4695906 - DNA, 25 bp, Homo sapien
ggcaactggcaacaatctaccggca

SEQ ID NO: 4695907 - DNA, 25 bp, Homo sapien
aaacgactggcaactggcaactggc

SEQ ID NO: 4695908 - DNA, 25 bp, Homo sapien
gcgtaagggtctatctacagcagcc

SEQ ID NO: 4695909 - DNA, 25 bp, Homo sapien
cagcagttctctgggcgtaagggtc

SEQ ID NO: 4695910 - DNA, 25 bp, Homo sapien
tgcggtgctgggtcgcgggagctgt

SEQ ID NO: 4695911 - DNA, 25 bp, Homo sapien
cagaggcacggtctgatcctgcggt

SEQ ID NO: 4695912 - DNA, 25 bp, Homo sapien
gggcccagctgtgaggagaccagca

SEQ ID NO: 4695913 - DNA, 25 bp, Homo sapien
gaggagaccagcagccattccttcc

SEQ ID NO: 4695914 - DNA, 25 bp, Homo sapien
ccggggcccagctgtgaggagacca

SEQ ID NO: 4695915 - DNA, 25 bp, Homo sapien
ctgtgaggagaccagcagccattcc

SEQ ID NO: 4695916 - DNA, 25 bp, Homo sapien
cagtggccttaggatctagggtgat

SEQ ID NO: 4695917 - DNA, 25 bp, Homo sapien
cttgccagtggccttaggatctagg

SEQ ID NO: 4695918 - DNA, 25 bp, Homo sapien
atttcatcttgccagtggccttagg

SEQ ID NO: 4695919 - DNA, 25 bp, Homo sapien
agcacatttcatcttgccagtggcc

SEQ ID NO: 4695920 - DNA, 25 bp, Homo sapien
tgtgcaaaagctaccgtcacactgc

SEQ ID NO: 4695921 - DNA, 25 bp, Homo sapien
cctgtcccgtggagtagacacgagg

SEQ ID NO: 4695922 - DNA, 25 bp, Homo sapien
ctagtaggacaaggctcctggactt

SEQ ID NO: 4695923 - DNA, 25 bp, Homo sapien
tcctggactttcctggtatcccctc

SEQ ID NO: 4695924 - DNA, 25 bp, Homo sapien
caagtaggccagttggactgttcat

SEQ ID NO: 4695925 - DNA, 25 bp, Homo sapien
gaactcaggagagagcaagtaggcc

SEQ ID NO: 4695926 - DNA, 25 bp, Homo sapien
agtatgaacagccacccagaactca

SEQ ID NO: 4695927 - DNA, 25 bp, Homo sapien
ctcttacttagtgcctacaccaggg

SEQ ID NO: 4695928 - DNA, 25 bp, Homo sapien
tgcgccttccctttgttccaactgg

SEQ ID NO: 4695929 - DNA, 25 bp, Homo sapien
gagagggacttcgcaggtcttcgcc

SEQ ID NO: 4695930 - DNA, 25 bp, Homo sapien
ccatgcgccttccctttgttccaac

SEQ ID NO: 4695931 - DNA, 25 bp, Homo sapien
atgcgccttccctttgttccaactg

SEQ ID NO: 4695932 - DNA, 25 bp, Homo sapien
taatagcgcctacctcacagttgtt

SEQ ID NO: 4695933 - DNA, 25 bp, Homo sapien
gacagagcttgcttcaaatcccagc

SEQ ID NO: 4695934 - DNA, 25 bp, Homo sapien
tacactcatgcgtgatttaaaggcg

SEQ ID NO: 4695935 - DNA, 25 bp, Homo sapien
ctgtgaagctttgaaccagtgagcc

SEQ ID NO: 4695936 - DNA, 25 bp, Homo sapien
taaggtctcaacatacgctgtggcc

SEQ ID NO: 4695937 - DNA, 25 bp, Homo sapien
caggtcttctaatccttaagcaagc

SEQ ID NO: 4695938 - DNA, 25 bp, Homo sapien
ctaggtctcctccaaacagctggct

SEQ ID NO: 4695939 - DNA, 25 bp, Homo sapien
ttcctcgtgtttactaagctctggc

SEQ ID NO: 4695940 - DNA, 25 bp, Homo sapien
gaagagtgacaagaagccatgggaa

SEQ ID NO: 4695941 - DNA, 25 bp, Homo sapien
tctgatgacatctcaggcctgacac

SEQ ID NO: 4695942 - DNA, 25 bp, Homo sapien
aaacctagggtcatccttaatgcca

SEQ ID NO: 4695943 - DNA, 25 bp, Homo sapien
tcagaggaccacatgatgctcacaa

SEQ ID NO: 4695944 - DNA, 25 bp, Homo sapien
gactggtctcagattgaagctcttc

SEQ ID NO: 4695945 - DNA, 25 bp, Homo sapien
tgtctcacatttgcgaggtctcgct

SEQ ID NO: 4695946 - DNA, 25 bp, Homo sapien
actggtcccgtggtctgaatcccca

SEQ ID NO: 4695947 - DNA, 25 bp, Homo sapien
gggcatctctacacatgggtcttgg

SEQ ID NO: 4695948 - DNA, 25 bp, Homo sapien
tgtttggtgaggttggcgttctggc

SEQ ID NO: 4695949 - DNA, 25 bp, Homo sapien
tcgtgaggtttgcactgtgacggaa

SEQ ID NO: 4695950 - DNA, 25 bp, Homo sapien
tttgcactgtgacggaaggccttcc

SEQ ID NO: 4695951 - DNA, 25 bp, Homo sapien
tggttcgtgaggtttgcactgtgac

SEQ ID NO: 4695952 - DNA, 25 bp, Homo sapien
gcacttgtagggcttctccccggtg

SEQ ID NO: 4695953 - DNA, 25 bp, Homo sapien
cttgtagggcttctccccggtgtga

SEQ ID NO: 4695954 - DNA, 25 bp, Homo sapien
ttcccacactcgctgcacttgtagg

SEQ ID NO: 4695955 - DNA, 25 bp, Homo sapien
cttcccacactcgctgcacttgtag

SEQ ID NO: 4695956 - DNA, 25 bp, Homo sapien
tgaatgaacgctgcgcagtaactga

SEQ ID NO: 4695957 - DNA, 25 bp, Homo sapien
tggtgctgaatgaacgctgcgcagt

SEQ ID NO: 4695958 - DNA, 25 bp, Homo sapien
tgaacgctgcgcagtaactgaaggc

SEQ ID NO: 4695959 - DNA, 25 bp, Homo sapien
gctgaatgaacgctgcgcagtaact

SEQ ID NO: 4695960 - DNA, 25 bp, Homo sapien
ttttggtggattatgagattggtac

SEQ ID NO: 4695961 - DNA, 25 bp, Homo sapien
atgagctctggttaaacgctttacc

SEQ ID NO: 4695962 - DNA, 25 bp, Homo sapien
tctccggtgtggattatatgatgcc

SEQ ID NO: 4695963 - DNA, 25 bp, Homo sapien
ttatgagattggtactctggctgaa

SEQ ID NO: 4695964 - DNA, 25 bp, Homo sapien
atgtctaacgaaggcagagctgcac

SEQ ID NO: 4695965 - DNA, 25 bp, Homo sapien
ctgatgtctaacgaaggcagagctg

SEQ ID NO: 4695966 - DNA, 25 bp, Homo sapien
taacgaaggcagagctgcaccggaa

SEQ ID NO: 4695967 - DNA, 25 bp, Homo sapien
tctaacgaaggcagagctgcaccgg

SEQ ID NO: 4695968 - DNA, 25 bp, Homo sapien
tgcagactctaagttagatgtcttc

SEQ ID NO: 4695969 - DNA, 25 bp, Homo sapien
tagtggctgtttattgaaggtgttt

SEQ ID NO: 4695970 - DNA, 25 bp, Homo sapien
ttcagatgctttcaagcctttagca

SEQ ID NO: 4695971 - DNA, 25 bp, Homo sapien
tgagtcggcatgtccgggactctct

SEQ ID NO: 4695972 - DNA, 25 bp, Homo sapien
aggaatgttccccacctcaaggaga

SEQ ID NO: 4695973 - DNA, 25 bp, Homo sapien
tctcagttttggaacatcaaggaat

SEQ ID NO: 4695974 - DNA, 25 bp, Homo sapien
tcaatcatttctggccaatgcgctg

SEQ ID NO: 4695975 - DNA, 25 bp, Homo sapien
tttcataggtggctctagaatccct

SEQ ID NO: 4695976 - DNA, 25 bp, Homo sapien
ctccatggaaaaggatgtgcctctt

SEQ ID NO: 4695977 - DNA, 25 bp, Homo sapien
gtgcctcttggttcattagcagcaa

SEQ ID NO: 4695978 - DNA, 25 bp, Homo sapien
acacaactgttctccatgagggaga

SEQ ID NO: 4695979 - DNA, 25 bp, Homo sapien
gatctgcctgggtgggctcttaaca

SEQ ID NO: 4695980 - DNA, 25 bp, Homo sapien
gctctaacaaaaccggaacacatgg

SEQ ID NO: 4695981 - DNA, 25 bp, Homo sapien
gatgaaccctaaagcactcctgagc

SEQ ID NO: 4695982 - DNA, 25 bp, Homo sapien
gaacctgtggagaagtaacaagcac

SEQ ID NO: 4695983 - DNA, 25 bp, Homo sapien
tacaggcacgtgctaaaagacaggg

SEQ ID NO: 4695984 - DNA, 25 bp, Homo sapien
cagattgtgagggactgagccagca

SEQ ID NO: 4695985 - DNA, 25 bp, Homo sapien
tcaaggacccatggaagctttgcat

SEQ ID NO: 4695986 - DNA, 25 bp, Homo sapien
gagaactctctggtaagagcaggac

SEQ ID NO: 4695987 - DNA, 25 bp, Homo sapien
tgtgtttaatctgggcatcaaggac

SEQ ID NO: 4695988 - DNA, 25 bp, Homo sapien
cccaatcagtgcatgtgggaggaag

SEQ ID NO: 4695989 - DNA, 25 bp, Homo sapien
ggcagtttaactccctggcaattta

SEQ ID NO: 4695990 - DNA, 25 bp, Homo sapien
cagtggtgagctgatagtaaacccc

SEQ ID NO: 4695991 - DNA, 25 bp, Homo sapien
gaaggcttggttttgccctcagcca

SEQ ID NO: 4695992 - DNA, 25 bp, Homo sapien
tgatttttgagagccagcgtgcatg

SEQ ID NO: 4695993 - DNA, 25 bp, Homo sapien
cggacctagggcaaagacttggaca

SEQ ID NO: 4695994 - DNA, 25 bp, Homo sapien
cagacaggcccaggtatttgcttgt

SEQ ID NO: 4695995 - DNA, 25 bp, Homo sapien
gaagagtatttctgccaccagtggt

SEQ ID NO: 4695996 - DNA, 25 bp, Homo sapien
tctctagcttcagcgcaccgcggtg

SEQ ID NO: 4695997 - DNA, 25 bp, Homo sapien
agacttctccggagcgaactacccg

SEQ ID NO: 4695998 - DNA, 25 bp, Homo sapien
gggatcaccggagccacccttctca

SEQ ID NO: 4695999 - DNA, 25 bp, Homo sapien
gaaacagctagggctgggatcaccg

SEQ ID NO: 4696000 - DNA, 25 bp, Homo sapien
tctcataaagtcacgcagaccggga

SEQ ID NO: 4696001 - DNA, 25 bp, Homo sapien
tctgaggctctaggaatcgcggact

SEQ ID NO: 4696002 - DNA, 25 bp, Homo sapien
cacaacaagtgctcgagggagcagg

SEQ ID NO: 4696003 - DNA, 25 bp, Homo sapien
gaagagcgggactggatttccacat

SEQ ID NO: 4696004 - DNA, 25 bp, Homo sapien
gccgatcactcggagggcttggtca

SEQ ID NO: 4696005 - DNA, 25 bp, Homo sapien
actcggagggcttggtcacggactc

SEQ ID NO: 4696006 - DNA, 25 bp, Homo sapien
ctggctttgcggatggagggatccc

SEQ ID NO: 4696007 - DNA, 25 bp, Homo sapien
gctttgcggatggagggatccccca

SEQ ID NO: 4696008 - DNA, 25 bp, Homo sapien
tgctccccaatcactaaccctcttg

SEQ ID NO: 4696009 - DNA, 25 bp, Homo sapien
ttctgctccccaatcactaaccctc

SEQ ID NO: 4696010 - DNA, 25 bp, Homo sapien
cccaatcactaaccctcttgcaccc

SEQ ID NO: 4696011 - DNA, 25 bp, Homo sapien
ccccaatcactaaccctcttgcacc

SEQ ID NO: 4696012 - DNA, 25 bp, Homo sapien
gacctcagggagctcaactacatca

SEQ ID NO: 4696013 - DNA, 25 bp, Homo sapien
tatttgccaccgacccatagtgagg

SEQ ID NO: 4696014 - DNA, 25 bp, Homo sapien
tgactaaacattgagcagcaggatg

SEQ ID NO: 4696015 - DNA, 25 bp, Homo sapien
ctttctagcgagttccatggagcca

SEQ ID NO: 4696016 - DNA, 25 bp, Homo sapien
ccttttcccagagcgatctttagga

SEQ ID NO: 4696017 - DNA, 25 bp, Homo sapien
cccttttcccagagcgatctttagg

SEQ ID NO: 4696018 - DNA, 25 bp, Homo sapien
ttttcccagagcgatctttaggacc

SEQ ID NO: 4696019 - DNA, 25 bp, Homo sapien
cttttcccagagcgatctttaggac

SEQ ID NO: 4696020 - DNA, 25 bp, Homo sapien
gcgtttccgagcctcctcactgggt

SEQ ID NO: 4696021 - DNA, 25 bp, Homo sapien
cgtttccgagcctcctcactgggtt

SEQ ID NO: 4696022 - DNA, 25 bp, Homo sapien
tggtactccaggcgtttccgagcct

SEQ ID NO: 4696023 - DNA, 25 bp, Homo sapien
catctggtactccaggcgtttccga

SEQ ID NO: 4696024 - DNA, 25 bp, Homo sapien
cacatttagagatgtcgagaatgtc

SEQ ID NO: 4696025 - DNA, 25 bp, Homo sapien
acatttagagatgtcgagaatgtca

SEQ ID NO: 4696026 - DNA, 25 bp, Homo sapien
catttagagatgtcgagaatgtcat

SEQ ID NO: 4696027 - DNA, 25 bp, Homo sapien
atgttgcaaaagctccaaatggaat

SEQ ID NO: 4696028 - DNA, 25 bp, Homo sapien
cttcttctgcagaactttgcatgtt

SEQ ID NO: 4696029 - DNA, 25 bp, Homo sapien
tcttctgcagaactttgcatgttgc

SEQ ID NO: 4696030 - DNA, 25 bp, Homo sapien
ttgcatgttgcaaaagctccaaatg

SEQ ID NO: 4696031 - DNA, 25 bp, Homo sapien
gtggagagatgtgcggccatgctgg

SEQ ID NO: 4696032 - DNA, 25 bp, Homo sapien
tggagagatgtgcggccatgctggg

SEQ ID NO: 4696033 - DNA, 25 bp, Homo sapien
ttgatggttgccagactcaggaggc

SEQ ID NO: 4696034 - DNA, 25 bp, Homo sapien
ggtgattcgtgtggacgatcagcac

SEQ ID NO: 4696035 - DNA, 25 bp, Homo sapien
caggaggctgcaggatttgggaagc

SEQ ID NO: 4696036 - DNA, 25 bp, Homo sapien
gaagtgaggtgattcgtgtggacga

SEQ ID NO: 4696037 - DNA, 25 bp, Homo sapien
caagcacaagccaacatgctctgct

SEQ ID NO: 4696038 - DNA, 25 bp, Homo sapien
cacaagccaacatgctctgctggtg

SEQ ID NO: 4696039 - DNA, 25 bp, Homo sapien
agccaacatgctctgctggtgtttt

SEQ ID NO: 4696040 - DNA, 25 bp, Homo sapien
acaagcacaagccaacatgctctgc

SEQ ID NO: 4696041 - DNA, 25 bp, Homo sapien
gctgattatcgtggagatctagaac

SEQ ID NO: 4696042 - DNA, 25 bp, Homo sapien
gtcagctgccccagatcgtcaggaa

SEQ ID NO: 4696043 - DNA, 25 bp, Homo sapien
gaagggctgtcagctgattatcgtg

SEQ ID NO: 4696044 - DNA, 25 bp, Homo sapien
cagatcgtcaggaagggctgtcagc

SEQ ID NO: 4696045 - DNA, 25 bp, Homo sapien
gttcccaatggaacgtgggagctgc

SEQ ID NO: 4696046 - DNA, 25 bp, Homo sapien
aggttcccaatggaacgtgggagct

SEQ ID NO: 4696047 - DNA, 25 bp, Homo sapien
cccaatggaacgtgggagctgcatc

SEQ ID NO: 4696048 - DNA, 25 bp, Homo sapien
tcccaatggaacgtgggagctgcat

SEQ ID NO: 4696049 - DNA, 25 bp, Homo sapien
gggtaaggcgcctgtgcagtggtct

SEQ ID NO: 4696050 - DNA, 25 bp, Homo sapien
cctcaggaggcttggtgcgtcgctg

SEQ ID NO: 4696051 - DNA, 25 bp, Homo sapien
catcccacggggtggtcttgagcaa

SEQ ID NO: 4696052 - DNA, 25 bp, Homo sapien
ccttgttttcctcgtgtgtaaactg

SEQ ID NO: 4696053 - DNA, 25 bp, Homo sapien
gttcgaacgtgagccagcatctgcg

SEQ ID NO: 4696054 - DNA, 25 bp, Homo sapien
catctgcggcaatctctggatctcg

SEQ ID NO: 4696055 - DNA, 25 bp, Homo sapien
atgttgagggtacgcaggcttcgaa

SEQ ID NO: 4696056 - DNA, 25 bp, Homo sapien
tggatctcgtttccactgatgttga

SEQ ID NO: 4696057 - DNA, 25 bp, Homo sapien
cctcctccgacaggcctcactgtgt

SEQ ID NO: 4696058 - DNA, 25 bp, Homo sapien
ataattacgaatgttcacacattgg

SEQ ID NO: 4696059 - DNA, 25 bp, Homo sapien
atataattacgaatgttcacacatt

SEQ ID NO: 4696060 - DNA, 25 bp, Homo sapien
aattacgaatgttcacacattggcc

SEQ ID NO: 4696061 - DNA, 25 bp, Homo sapien
agatggccgcagtgccggcaccaca

SEQ ID NO: 4696062 - DNA, 25 bp, Homo sapien
acctcccgcggcgggtagaccatgg

SEQ ID NO: 4696063 - DNA, 25 bp, Homo sapien
cagaggaactgcaagatggccgcag

SEQ ID NO: 4696064 - DNA, 25 bp, Homo sapien
tagaccatggccgaggcgtcaaggc

SEQ ID NO: 4696065 - DNA, 25 bp, Homo sapien
catatgcacctactggcggaacagc

SEQ ID NO: 4696066 - DNA, 25 bp, Homo sapien
gtggagccacactctcaaagacagg

SEQ ID NO: 4696067 - DNA, 25 bp, Homo sapien
gctaagaacttccagcctgacaggg

SEQ ID NO: 4696068 - DNA, 25 bp, Homo sapien
tagatcttaaccatgactccgtgtc

SEQ ID NO: 4696069 - DNA, 25 bp, Homo sapien
tctggccattttagtgggtttgtca

SEQ ID NO: 4696070 - DNA, 25 bp, Homo sapien
gccataggatatttgaatgttcagc

SEQ ID NO: 4696071 - DNA, 25 bp, Homo sapien
ggtatcaccagttcaattttggcca

SEQ ID NO: 4696072 - DNA, 25 bp, Homo sapien
cacctgcagtatatggaagttcctg

SEQ ID NO: 4696073 - DNA, 25 bp, Homo sapien
tggactggcataaatagtgctgcta

SEQ ID NO: 4696074 - DNA, 25 bp, Homo sapien
tgactgataagagcacatattcctt

SEQ ID NO: 4696075 - DNA, 25 bp, Homo sapien
cagaatcttcatgcagagcttgatg

SEQ ID NO: 4696076 - DNA, 25 bp, Homo sapien
aacacactctcatgaccaggaacca

SEQ ID NO: 4696077 - DNA, 25 bp, Homo sapien
tggaacaaggccttaaatctgtaac

SEQ ID NO: 4696078 - DNA, 25 bp, Homo sapien
caagtgcagcggtgagaagaggaga

SEQ ID NO: 4696079 - DNA, 25 bp, Homo sapien
aagagtggaacaaggccttaaatct

SEQ ID NO: 4696080 - DNA, 25 bp, Homo sapien
gagtggaacaaggccttaaatctgt

SEQ ID NO: 4696081 - DNA, 25 bp, Homo sapien
catcagggctgtcccgagagttctc

SEQ ID NO: 4696082 - DNA, 25 bp, Homo sapien
gagagttctcgattccatcttgctc

SEQ ID NO: 4696083 - DNA, 25 bp, Homo sapien
ttgagaatctgtccgtgggcccatc

SEQ ID NO: 4696084 - DNA, 25 bp, Homo sapien
ctccagaattggcagcaagtactga

SEQ ID NO: 4696085 - DNA, 25 bp, Homo sapien
tcttctcatagtctgagaacctgtt

SEQ ID NO: 4696086 - DNA, 25 bp, Homo sapien
tcaaactcgagtttctccagcatct

SEQ ID NO: 4696087 - DNA, 25 bp, Homo sapien
ctccttgaccgtctgaaggatctca

SEQ ID NO: 4696088 - DNA, 25 bp, Homo sapien
ttgaccgtctgaaggatctcatcct

SEQ ID NO: 4696089 - DNA, 25 bp, Homo sapien
gttccaggcgccgttcaaactcgag

SEQ ID NO: 4696090 - DNA, 25 bp, Homo sapien
cgctctgcgttgaggtggcgctggt

SEQ ID NO: 4696091 - DNA, 25 bp, Homo sapien
cagccgctgccgctctgcgttgagg

SEQ ID NO: 4696092 - DNA, 25 bp, Homo sapien
aaatgttctgttccgtctgcttcag

SEQ ID NO: 4696093 - DNA, 25 bp, Homo sapien
ttctggatccggctggaaatgttct

SEQ ID NO: 4696094 - DNA, 25 bp, Homo sapien
cattttccagcgatttcaaaatctc

SEQ ID NO: 4696095 - DNA, 25 bp, Homo sapien
gcgatttcaaaatctcggagctttt

SEQ ID NO: 4696096 - DNA, 25 bp, Homo sapien
caaaatctcggagcttttcttttgt

SEQ ID NO: 4696097 - DNA, 25 bp, Homo sapien
ttccagcgatttcaaaatctcggag

SEQ ID NO: 4696098 - DNA, 25 bp, Homo sapien
cctgggttatggacatcaactgttc

SEQ ID NO: 4696099 - DNA, 25 bp, Homo sapien
ctcctcctgggttatggacatcaac

SEQ ID NO: 4696100 - DNA, 25 bp, Homo sapien
gggttatggacatcaactgttccat

SEQ ID NO: 4696101 - DNA, 25 bp, Homo sapien
aggcaacgtcacgtcgccgcaggct

SEQ ID NO: 4696102 - DNA, 25 bp, Homo sapien
gtgggaacatgaggtggggacagct

SEQ ID NO: 4696103 - DNA, 25 bp, Homo sapien
atgagccggttcttacagctctcag

SEQ ID NO: 4696104 - DNA, 25 bp, Homo sapien
ctgcctctgagattcgtaggccatc

SEQ ID NO: 4696105 - DNA, 25 bp, Homo sapien
tggatgagccggttcttacagctct

SEQ ID NO: 4696106 - DNA, 25 bp, Homo sapien
tcgtaggccatctggatgagccggt

SEQ ID NO: 4696107 - DNA, 25 bp, Homo sapien
agcacagtgtcacatatcaggaaag

SEQ ID NO: 4696108 - DNA, 25 bp, Homo sapien
atccaggtctgtttgacccctgcgc

SEQ ID NO: 4696109 - DNA, 25 bp, Homo sapien
ccgcacagtccaggcgccctggagg

SEQ ID NO: 4696110 - DNA, 25 bp, Homo sapien
tgtttgacccctgcgcttgcaactc

SEQ ID NO: 4696111 - DNA, 25 bp, Homo sapien
actgctacgtttggctaattgtttg

SEQ ID NO: 4696112 - DNA, 25 bp, Homo sapien
gcccactgctacgtttggctaattg

SEQ ID NO: 4696113 - DNA, 25 bp, Homo sapien
ggcgcccactgctacgtttggctaa

SEQ ID NO: 4696114 - DNA, 25 bp, Homo sapien
acaggcgcccactgctacgtttggc

SEQ ID NO: 4696115 - DNA, 25 bp, Homo sapien
tccatttgctgccacgacagaatct

SEQ ID NO: 4696116 - DNA, 25 bp, Homo sapien
ggaatcgttcatccatttcggccat

SEQ ID NO: 4696117 - DNA, 25 bp, Homo sapien
tgccacgacagaatctgctggaatc

SEQ ID NO: 4696118 - DNA, 25 bp, Homo sapien
cagaatctgctggaatcgttcatcc

SEQ ID NO: 4696119 - DNA, 25 bp, Homo sapien
tgccgatgcatcaggtctttcttca

SEQ ID NO: 4696120 - DNA, 25 bp, Homo sapien
ggctcctgatctgccgatgcatcag

SEQ ID NO: 4696121 - DNA, 25 bp, Homo sapien
ctggagtgcctcgaacgcagccttc

SEQ ID NO: 4696122 - DNA, 25 bp, Homo sapien
gtgcctcgaacgcagccttctgcat

SEQ ID NO: 4696123 - DNA, 25 bp, Homo sapien
tgtgtcagctgcaataactcagttt

SEQ ID NO: 4696124 - DNA, 25 bp, Homo sapien
ctgtgtcagctgcaataactcagtt

SEQ ID NO: 4696125 - DNA, 25 bp, Homo sapien
ggtgtcctctggtgtcacagccaca

SEQ ID NO: 4696126 - DNA, 25 bp, Homo sapien
aggagctctgccctctgtctgctgg

SEQ ID NO: 4696127 - DNA, 25 bp, Homo sapien
cccttgactcccaggggctggtgag

SEQ ID NO: 4696128 - DNA, 25 bp, Homo sapien
ctggggaagcccttgactcccaggg

SEQ ID NO: 4696129 - DNA, 25 bp, Homo sapien
agggcccagcgctgctccgagatca

SEQ ID NO: 4696130 - DNA, 25 bp, Homo sapien
cccagcgctgctccgagatcatctc

SEQ ID NO: 4696131 - DNA, 25 bp, Homo sapien
aggatttcccggagctcttcctctc

SEQ ID NO: 4696132 - DNA, 25 bp, Homo sapien
caggatttcccggagctcttcctct

SEQ ID NO: 4696133 - DNA, 25 bp, Homo sapien
aggcagacagatcgtttgagcccgg

SEQ ID NO: 4696134 - DNA, 25 bp, Homo sapien
caaggcagacagatcgtttgagccc

SEQ ID NO: 4696135 - DNA, 25 bp, Homo sapien
gcagacagatcgtttgagcccggga

SEQ ID NO: 4696136 - DNA, 25 bp, Homo sapien
ccaaggcagacagatcgtttgagcc

SEQ ID NO: 4696137 - DNA, 25 bp, Homo sapien
tatgcagcatgccacgtttaaaagg

SEQ ID NO: 4696138 - DNA, 25 bp, Homo sapien
cacggtgacaacaggcgtagctgac

SEQ ID NO: 4696139 - DNA, 25 bp, Homo sapien
tttaaaaggcgcatacacgaacagc

SEQ ID NO: 4696140 - DNA, 25 bp, Homo sapien
gaatgtgcggaaacaggctgctcga

SEQ ID NO: 4696141 - DNA, 25 bp, Homo sapien
gtaataaaacctgtaataacaatga

SEQ ID NO: 4696142 - DNA, 25 bp, Homo sapien
gcaatgttagtcacaaaatggtaat

SEQ ID NO: 4696143 - DNA, 25 bp, Homo sapien
gaatgaagcaggcaatgttagtcac

SEQ ID NO: 4696144 - DNA, 25 bp, Homo sapien
taaaacctgtaataacaatgatggt

SEQ ID NO: 4696145 - DNA, 25 bp, Homo sapien
caagggcttctggttcaaaagccgt

SEQ ID NO: 4696146 - DNA, 25 bp, Homo sapien
tctggttcaaaagccgttgatactg

SEQ ID NO: 4696147 - DNA, 25 bp, Homo sapien
aagccgttgatactgaatcagccag

SEQ ID NO: 4696148 - DNA, 25 bp, Homo sapien
gatactgaatcagccagtaattttc

SEQ ID NO: 4696149 - DNA, 25 bp, Homo sapien
caaaaactcataggtaggcacacag

SEQ ID NO: 4696150 - DNA, 25 bp, Homo sapien
gaatgtactcgggatttttcctaca

SEQ ID NO: 4696151 - DNA, 25 bp, Homo sapien
agcaacttgaacatccaccaagagg

SEQ ID NO: 4696152 - DNA, 25 bp, Homo sapien
gatagatagataggcccaggggttc

SEQ ID NO: 4696153 - DNA, 25 bp, Homo sapien
tggctcagcaggtccagtgagaggc

SEQ ID NO: 4696154 - DNA, 25 bp, Homo sapien
agggccaccagctggcgctccatcc

SEQ ID NO: 4696155 - DNA, 25 bp, Homo sapien
tgagaggcggtggtgcgcaaagatg

SEQ ID NO: 4696156 - DNA, 25 bp, Homo sapien
gggcaggtagtgctcagccgacagc

SEQ ID NO: 4696157 - DNA, 25 bp, Homo sapien
ctctccggaggatctcgtgctgcag

SEQ ID NO: 4696158 - DNA, 25 bp, Homo sapien
tcctggactctccggaggatctcgt

SEQ ID NO: 4696159 - DNA, 25 bp, Homo sapien
tggactctccggaggatctcgtgct

SEQ ID NO: 4696160 - DNA, 25 bp, Homo sapien
gcaggccagcttctgagacgcccac

SEQ ID NO: 4696161 - DNA, 25 bp, Homo sapien
tcaacgtggttcatgcacagcggtg

SEQ ID NO: 4696162 - DNA, 25 bp, Homo sapien
cattgggtatactgcaggccctggg

SEQ ID NO: 4696163 - DNA, 25 bp, Homo sapien
gggacatgctaacctctttgcgctt

SEQ ID NO: 4696164 - DNA, 25 bp, Homo sapien
aacagtgcctcctcacgggatggat

SEQ ID NO: 4696165 - DNA, 25 bp, Homo sapien
tattctacggcttgaattacaagca

SEQ ID NO: 4696166 - DNA, 25 bp, Homo sapien
cactttattctacggcttgaattac

SEQ ID NO: 4696167 - DNA, 25 bp, Homo sapien
cgtgcccggctgctaagtctctttt

SEQ ID NO: 4696168 - DNA, 25 bp, Homo sapien
ttctatcatgcaacgtgagccaccc

SEQ ID NO: 4696169 - DNA, 25 bp, Homo sapien
gacctcacccattggtggtttcagc

SEQ ID NO: 4696170 - DNA, 25 bp, Homo sapien
gggtgacgacctcacccattggtgg

SEQ ID NO: 4696171 - DNA, 25 bp, Homo sapien
gacgacctcacccattggtggtttc

SEQ ID NO: 4696172 - DNA, 25 bp, Homo sapien
gccgtaggggtgacgacctcaccca

SEQ ID NO: 4696173 - DNA, 25 bp, Homo sapien
gttccaggcacacgacacactctga

SEQ ID NO: 4696174 - DNA, 25 bp, Homo sapien
tctgcagggggagcggatggcctca

SEQ ID NO: 4696175 - DNA, 25 bp, Homo sapien
cccgttccaggcacacgacacactc

SEQ ID NO: 4696176 - DNA, 25 bp, Homo sapien
ctctgcagggggagcggatggcctc

SEQ ID NO: 4696177 - DNA, 25 bp, Homo sapien
gatgcggaggcgctgggcgatgtcc

SEQ ID NO: 4696178 - DNA, 25 bp, Homo sapien
tcagctgctgtggtagatgcggagg

SEQ ID NO: 4696179 - DNA, 25 bp, Homo sapien
cgggcaggtgcgcagtggctggcag

SEQ ID NO: 4696180 - DNA, 25 bp, Homo sapien
tggccacagttgaggaagatcatct

SEQ ID NO: 4696181 - DNA, 25 bp, Homo sapien
ggttgctggtgccactgtgagcaca

SEQ ID NO: 4696182 - DNA, 25 bp, Homo sapien
tcatacgagtctggctggcacaagg

SEQ ID NO: 4696183 - DNA, 25 bp, Homo sapien
ggtttattgacactcctgcttcgga

SEQ ID NO: 4696184 - DNA, 25 bp, Homo sapien
gcccagacatgcttggagcttagga

SEQ ID NO: 4696185 - DNA, 25 bp, Homo sapien
tcaataacccgataggatgcagccc

SEQ ID NO: 4696186 - DNA, 25 bp, Homo sapien
tagccatgtgacactcactgagtgc

SEQ ID NO: 4696187 - DNA, 25 bp, Homo sapien
tctgtcagatgggatactaatacct

SEQ ID NO: 4696188 - DNA, 25 bp, Homo sapien
gataggcacctatccctggcaaact

SEQ ID NO: 4696189 - DNA, 25 bp, Homo sapien
tttggcagtacgtcccagtgagggt

SEQ ID NO: 4696190 - DNA, 25 bp, Homo sapien
tctggctaagattgtgaactgtgga

SEQ ID NO: 4696191 - DNA, 25 bp, Homo sapien
caggagcctcagatcccttatccat

SEQ ID NO: 4696192 - DNA, 25 bp, Homo sapien
ggcacagaactaactgttacatgca

SEQ ID NO: 4696193 - DNA, 25 bp, Homo sapien
cagcgccatgttaggtaccagggat

SEQ ID NO: 4696194 - DNA, 25 bp, Homo sapien
catgcagccctatcctggtgttagc

SEQ ID NO: 4696195 - DNA, 25 bp, Homo sapien
gcaacaaaagccaacatctcctgag

SEQ ID NO: 4696196 - DNA, 25 bp, Homo sapien
taagcatggctccagaaatacccgt

SEQ ID NO: 4696197 - DNA, 25 bp, Homo sapien
ggaatccttcatagtgctgatgact

SEQ ID NO: 4696198 - DNA, 25 bp, Homo sapien
tcaaaagtaacaaggggacatcaaa

SEQ ID NO: 4696199 - DNA, 25 bp, Homo sapien
agtaacaaggggacatcaaaatggc

SEQ ID NO: 4696200 - DNA, 25 bp, Homo sapien
aacaaggggacatcaaaatggcctc

SEQ ID NO: 4696201 - DNA, 25 bp, Homo sapien
tgaggcaggcagatggcttgagtct

SEQ ID NO: 4696202 - DNA, 25 bp, Homo sapien
caggcagatggcttgagtctaggag

SEQ ID NO: 4696203 - DNA, 25 bp, Homo sapien
ggcaggcagatggcttgagtctagg

SEQ ID NO: 4696204 - DNA, 25 bp, Homo sapien
ttcaagaccagcctgggcaattaca

SEQ ID NO: 4696205 - DNA, 25 bp, Homo sapien
gtggaagtgttcctcattgatggag

SEQ ID NO: 4696206 - DNA, 25 bp, Homo sapien
tggaagtgttcctcattgatggagc

SEQ ID NO: 4696207 - DNA, 25 bp, Homo sapien
tgaggctccgatatggctcagcaca

SEQ ID NO: 4696208 - DNA, 25 bp, Homo sapien
attttccagaatcaggcgccacctg

SEQ ID NO: 4696209 - DNA, 25 bp, Homo sapien
cagtactgccatctcaccagaggac

SEQ ID NO: 4696210 - DNA, 25 bp, Homo sapien
ctggaaaacggacccagcgggagat

SEQ ID NO: 4696211 - DNA, 25 bp, Homo sapien
gagaaacaggatcaagtcctctgat

SEQ ID NO: 4696212 - DNA, 25 bp, Homo sapien
accctcattatgctaagagtgtctg

SEQ ID NO: 4696213 - DNA, 25 bp, Homo sapien
ggcccaacttttgaccctcattatg

SEQ ID NO: 4696214 - DNA, 25 bp, Homo sapien
tgatagtgctatgtccatcagcatt

SEQ ID NO: 4696215 - DNA, 25 bp, Homo sapien
tgagaagagaaaggggttcaaatcc

SEQ ID NO: 4696216 - DNA, 25 bp, Homo sapien
tttggcatttcagctgagcctggag

SEQ ID NO: 4696217 - DNA, 25 bp, Homo sapien
cattccaactggggaaactgttttg

SEQ ID NO: 4696218 - DNA, 25 bp, Homo sapien
gggaaactgttttgttcatatatgt

SEQ ID NO: 4696219 - DNA, 25 bp, Homo sapien
tgagccaaggttgcatcatggtgct

SEQ ID NO: 4696220 - DNA, 25 bp, Homo sapien
gccaaggttgcatcatggtgctcca

SEQ ID NO: 4696221 - DNA, 25 bp, Homo sapien
caaggttgcatcatggtgctccagc

SEQ ID NO: 4696222 - DNA, 25 bp, Homo sapien
agccaaggttgcatcatggtgctcc

SEQ ID NO: 4696223 - DNA, 25 bp, Homo sapien
cctcgtcccgcgacgcctgcggacc

SEQ ID NO: 4696224 - DNA, 25 bp, Homo sapien
ctccgatctcctcgtcccgcgacgc

SEQ ID NO: 4696225 - DNA, 25 bp, Homo sapien
cgatctcctcgtcccgcgacgcctg

SEQ ID NO: 4696226 - DNA, 25 bp, Homo sapien
gtcccgcgacgcctgcggaccccgc

SEQ ID NO: 4696227 - DNA, 25 bp, Homo sapien
cagctttgaggccaatgggggccat

SEQ ID NO: 4696228 - DNA, 25 bp, Homo sapien
tctccgacaacagctttgaggccaa

SEQ ID NO: 4696229 - DNA, 25 bp, Homo sapien
tctctccgacaacagctttgaggcc

SEQ ID NO: 4696230 - DNA, 25 bp, Homo sapien
tccgacaacagctttgaggccaatg

SEQ ID NO: 4696231 - DNA, 25 bp, Homo sapien
gccccgcaaccagggagattgcaga

SEQ ID NO: 4696232 - DNA, 25 bp, Homo sapien
gtggtctgagctcccgaagcgttcg

SEQ ID NO: 4696233 - DNA, 25 bp, Homo sapien
cctcatctcccgagtgatttcaggg

SEQ ID NO: 4696234 - DNA, 25 bp, Homo sapien
ttcaggatcctgataagtccccgcc

SEQ ID NO: 4696235 - DNA, 25 bp, Homo sapien
ggactacagatcggggacactatgc

SEQ ID NO: 4696236 - DNA, 25 bp, Homo sapien
gggactacagatcggggacactatg

SEQ ID NO: 4696237 - DNA, 25 bp, Homo sapien
ctacagatcggggacactatgcctg

SEQ ID NO: 4696238 - DNA, 25 bp, Homo sapien
gactacagatcggggacactatgcc

SEQ ID NO: 4696239 - DNA, 25 bp, Homo sapien
gactcaaaacagtcgcccacactgg

SEQ ID NO: 4696240 - DNA, 25 bp, Homo sapien
ggcaggcaacaaatagctctgtgga

SEQ ID NO: 4696241 - DNA, 25 bp, Homo sapien
tctcaggtcccagactgttacaggt

SEQ ID NO: 4696242 - DNA, 25 bp, Homo sapien
tttgccattccccatagtgcctaga

SEQ ID NO: 4696243 - DNA, 25 bp, Homo sapien
tgcccacactctggcaccgggtgac

SEQ ID NO: 4696244 - DNA, 25 bp, Homo sapien
gcccacactctggcaccgggtgact

SEQ ID NO: 4696245 - DNA, 25 bp, Homo sapien
cccacactctggcaccgggtgactg

SEQ ID NO: 4696246 - DNA, 25 bp, Homo sapien
ggagctgtgacgttacaaaatacac

SEQ ID NO: 4696247 - DNA, 25 bp, Homo sapien
gtatatgttagaggcagcagtcacc

SEQ ID NO: 4696248 - DNA, 25 bp, Homo sapien
agtcacctcccctcagttctaaagg

SEQ ID NO: 4696249 - DNA, 25 bp, Homo sapien
gcctgaaacaacgttccttggataa

SEQ ID NO: 4696250 - DNA, 25 bp, Homo sapien
tcggcctccgaaggttcaatctact

SEQ ID NO: 4696251 - DNA, 25 bp, Homo sapien
tctggagcaacatgtctaggtagtc

SEQ ID NO: 4696252 - DNA, 25 bp, Homo sapien
caatctactgctggaaattctgctc

SEQ ID NO: 4696253 - DNA, 25 bp, Homo sapien
gagggctcactctttaccagtttac

SEQ ID NO: 4696254 - DNA, 25 bp, Homo sapien
ggagcaacttgaagggcaagagctg

SEQ ID NO: 4696255 - DNA, 25 bp, Homo sapien
gagcaacttgaagggcaagagctgt

SEQ ID NO: 4696256 - DNA, 25 bp, Homo sapien
agcaacttgaagggcaagagctgtt

SEQ ID NO: 4696257 - DNA, 25 bp, Homo sapien
gaccttctttatcacatcatgcata

SEQ ID NO: 4696258 - DNA, 25 bp, Homo sapien
ttcttgaccttctttatcacatcat

SEQ ID NO: 4696259 - DNA, 25 bp, Homo sapien
ttgaccttctttatcacatcatgca

SEQ ID NO: 4696260 - DNA, 25 bp, Homo sapien
tcttgaccttctttatcacatcatg

SEQ ID NO: 4696261 - DNA, 25 bp, Homo sapien
tcatgcttaactgatccaccaccag

SEQ ID NO: 4696262 - DNA, 25 bp, Homo sapien
atcctcatgcttaactgatccacca

SEQ ID NO: 4696263 - DNA, 25 bp, Homo sapien
ccctcggtcatgatgtctgtcatct

SEQ ID NO: 4696264 - DNA, 25 bp, Homo sapien
gacagcatcctcatgcttaactgat

SEQ ID NO: 4696265 - DNA, 25 bp, Homo sapien
gctctgcggtctgaactctgtggaa

SEQ ID NO: 4696266 - DNA, 25 bp, Homo sapien
catacctgaggttgtctaggacaca

SEQ ID NO: 4696267 - DNA, 25 bp, Homo sapien
gggaacctatgagcaacactgcaca

SEQ ID NO: 4696268 - DNA, 25 bp, Homo sapien
gcattcatgttactgtgagcgctca

SEQ ID NO: 4696269 - DNA, 25 bp, Homo sapien
gatgggtgaccataaaaccagaagc

SEQ ID NO: 4696270 - DNA, 25 bp, Homo sapien
caggctaccttcagactgttgcaga

SEQ ID NO: 4696271 - DNA, 25 bp, Homo sapien
ccttgggagtgaattccatggtctc

SEQ ID NO: 4696272 - DNA, 25 bp, Homo sapien
ccagaagcaatatagacaggctacc

SEQ ID NO: 4696273 - DNA, 25 bp, Homo sapien
tctcggatggagtgatgagatacac

SEQ ID NO: 4696274 - DNA, 25 bp, Homo sapien
gtgatgagatacacagcctccaggc

SEQ ID NO: 4696275 - DNA, 25 bp, Homo sapien
gggagcggctctctgcgcttattga

SEQ ID NO: 4696276 - DNA, 25 bp, Homo sapien
tctgcgcttattgatatcttccaca

SEQ ID NO: 4696277 - DNA, 25 bp, Homo sapien
tcagtgaagaagacgtgtgcagccc

SEQ ID NO: 4696278 - DNA, 25 bp, Homo sapien
gaagacgtgtgcagcccggtattta

SEQ ID NO: 4696279 - DNA, 25 bp, Homo sapien
cggtatttagcagtcggcgggtcct

SEQ ID NO: 4696280 - DNA, 25 bp, Homo sapien
cttaaagtcactgatgagagagtgg

SEQ ID NO: 4696281 - DNA, 25 bp, Homo sapien
cagttcattaaacagggcatctgga

SEQ ID NO: 4696282 - DNA, 25 bp, Homo sapien
gactttggctgctcgggattttacc

SEQ ID NO: 4696283 - DNA, 25 bp, Homo sapien
ttcatacgggagaaatgcaatattg

SEQ ID NO: 4696284 - DNA, 25 bp, Homo sapien
tgcaatattgatttccgtcagagtt

SEQ ID NO: 4696285 - DNA, 25 bp, Homo sapien
ggttattcaaggagtcggccgacag

SEQ ID NO: 4696286 - DNA, 25 bp, Homo sapien
tggcacctgaagtgttaacggctaa

SEQ ID NO: 4696287 - DNA, 25 bp, Homo sapien
cacatgacaagctgaggttatctcc

SEQ ID NO: 4696288 - DNA, 25 bp, Homo sapien
taacggctaatgacgaaggctgcca

SEQ ID NO: 4696289 - DNA, 25 bp, Homo sapien
tctaagaataggtcactctctggtg

SEQ ID NO: 4696290 - DNA, 25 bp, Homo sapien
tctggtgtctcgaagctgatctgta

SEQ ID NO: 4696291 - DNA, 25 bp, Homo sapien
tagctccgtaaaatgcatcaaagtc

SEQ ID NO: 4696292 - DNA, 25 bp, Homo sapien
gattgttcaatatgctaaagctgga

SEQ ID NO: 4696293 - DNA, 25 bp, Homo sapien
gtggcacaaagggtcgcgatctgct

SEQ ID NO: 4696294 - DNA, 25 bp, Homo sapien
tggaaagagtcagcagagtccaagg

SEQ ID NO: 4696295 - DNA, 25 bp, Homo sapien
tccagtataggattcttcatctgag

SEQ ID NO: 4696296 - DNA, 25 bp, Homo sapien
tctgccaggcgctccagtataggat

SEQ ID NO: 4696297 - DNA, 25 bp, Homo sapien
agtaagagatgctcaaatcctgatc

SEQ ID NO: 4696298 - DNA, 25 bp, Homo sapien
aaaacggtaggcagcctgagttgca

SEQ ID NO: 4696299 - DNA, 25 bp, Homo sapien
tcctgatcttcttgagacaactgtc

SEQ ID NO: 4696300 - DNA, 25 bp, Homo sapien
cattgagaagataacaaaaccactg

SEQ ID NO: 4696301 - DNA, 25 bp, Homo sapien
ccccattgttggatcatcagcttta

SEQ ID NO: 4696302 - DNA, 25 bp, Homo sapien
catcgagcttgtcctggattagctg

SEQ ID NO: 4696303 - DNA, 25 bp, Homo sapien
gctttataggcatcgagcttgtcct

SEQ ID NO: 4696304 - DNA, 25 bp, Homo sapien
gatcatcagctttataggcatcgag

SEQ ID NO: 4696305 - DNA, 25 bp, Homo sapien
gagctggggtcaaagcctcgatcca

SEQ ID NO: 4696306 - DNA, 25 bp, Homo sapien
tatacatcattttcgataggcagca

SEQ ID NO: 4696307 - DNA, 25 bp, Homo sapien
tcataactcatagcctgaaaagtca

SEQ ID NO: 4696308 - DNA, 25 bp, Homo sapien
aaaagtcaattcatggagcacaggg

SEQ ID NO: 4696309 - DNA, 25 bp, Homo sapien
cgcagtgctatccacaggtcgtcgt

SEQ ID NO: 4696310 - DNA, 25 bp, Homo sapien
gtgcctccccgatgccgctggtctc

SEQ ID NO: 4696311 - DNA, 25 bp, Homo sapien
cgatgtgcttgtggcgcagtgctat

SEQ ID NO: 4696312 - DNA, 25 bp, Homo sapien
tgcttgtggcgcagtgctatccaca

SEQ ID NO: 4696313 - DNA, 25 bp, Homo sapien
ggtagaggcgcctcgctggagaagg

SEQ ID NO: 4696314 - DNA, 25 bp, Homo sapien
cattacgggttagcatgttggtgac

SEQ ID NO: 4696315 - DNA, 25 bp, Homo sapien
gagtgaacgcatcatcaatagcagc

SEQ ID NO: 4696316 - DNA, 25 bp, Homo sapien
gccaagaaaacgaattcacacagtg

SEQ ID NO: 4696317 - DNA, 25 bp, Homo sapien
aaaatctttcagagaccgggtgact

SEQ ID NO: 4696318 - DNA, 25 bp, Homo sapien
aaatctttcagagaccgggtgactt

SEQ ID NO: 4696319 - DNA, 25 bp, Homo sapien
tattcattctcttgctagaagaaaa

SEQ ID NO: 4696320 - DNA, 25 bp, Homo sapien
tctgggacaggtcccgcatggtggt

SEQ ID NO: 4696321 - DNA, 25 bp, Homo sapien
catctgggacaggtcccgcatggtg

SEQ ID NO: 4696322 - DNA, 25 bp, Homo sapien
agcatctgggacaggtcccgcatgg

SEQ ID NO: 4696323 - DNA, 25 bp, Homo sapien
tttctggtactgaggcatcttcttc

SEQ ID NO: 4696324 - DNA, 25 bp, Homo sapien
ttcatacagtcctcagcaaggtgca

SEQ ID NO: 4696325 - DNA, 25 bp, Homo sapien
cagagtttgtctacggtgccttggt

SEQ ID NO: 4696326 - DNA, 25 bp, Homo sapien
tgctccactcggcagagtttgtcta

SEQ ID NO: 4696327 - DNA, 25 bp, Homo sapien
tctacggtgccttggtaatgcttca

SEQ ID NO: 4696328 - DNA, 25 bp, Homo sapien
gatgcggattttgtcataagtgctg

SEQ ID NO: 4696329 - DNA, 25 bp, Homo sapien
cataagtgctgacattggcatccag

SEQ ID NO: 4696330 - DNA, 25 bp, Homo sapien
aaaagatgtagagaaggatgatgcg

SEQ ID NO: 4696331 - DNA, 25 bp, Homo sapien
gacgatggctcgcatagggtccttg

SEQ ID NO: 4696332 - DNA, 25 bp, Homo sapien
tgatctcactatcctccgggggtat

SEQ ID NO: 4696333 - DNA, 25 bp, Homo sapien
cacgccgaggtgagccatgttggtg

SEQ ID NO: 4696334 - DNA, 25 bp, Homo sapien
gcgtgctggatcagtttgttcaggt

SEQ ID NO: 4696335 - DNA, 25 bp, Homo sapien
atcggtgacgatgggcacgccgagg

SEQ ID NO: 4696336 - DNA, 25 bp, Homo sapien
gataatcggagtccaccgtgagagc

SEQ ID NO: 4696337 - DNA, 25 bp, Homo sapien
gcttgctccggcgacgcagcgtgga

SEQ ID NO: 4696338 - DNA, 25 bp, Homo sapien
agagctggtaggtctgctcgctgat

SEQ ID NO: 4696339 - DNA, 25 bp, Homo sapien
gatgcgttccttccgctccggcttg

SEQ ID NO: 4696340 - DNA, 25 bp, Homo sapien
gtagtgtttggtgtcaagtttgtcc

SEQ ID NO: 4696341 - DNA, 25 bp, Homo sapien
aaggaggcagaggaacgggtagaga

SEQ ID NO: 4696342 - DNA, 25 bp, Homo sapien
cgggtagagatataagggtagtgtt

SEQ ID NO: 4696343 - DNA, 25 bp, Homo sapien
tgtcaagtttgtcctcaatagtgtc

SEQ ID NO: 4696344 - DNA, 25 bp, Homo sapien
tcccactttccgttggcctgggtca

SEQ ID NO: 4696345 - DNA, 25 bp, Homo sapien
cgcatctcattcaggctcacacccc

SEQ ID NO: 4696346 - DNA, 25 bp, Homo sapien
tcttatgccagtgcccatagcgggc

SEQ ID NO: 4696347 - DNA, 25 bp, Homo sapien
gtcacctcgtaggcgcagcgcatct

SEQ ID NO: 4696348 - DNA, 25 bp, Homo sapien
tcggggtgtctcaggtccatgagaa

SEQ ID NO: 4696349 - DNA, 25 bp, Homo sapien
tgagaaatttggtgggagtaagaat

SEQ ID NO: 4696350 - DNA, 25 bp, Homo sapien
tcaaaagataccctagaggactccc

SEQ ID NO: 4696351 - DNA, 25 bp, Homo sapien
ctagaggactccctgaagtcggggt

SEQ ID NO: 4696352 - DNA, 25 bp, Homo sapien
gcgcacgtgccagagaaaatgtccc

SEQ ID NO: 4696353 - DNA, 25 bp, Homo sapien
gattcgcttgggagcttcctcgtta

SEQ ID NO: 4696354 - DNA, 25 bp, Homo sapien
tcgttacaagcaacagcaaggagcg

SEQ ID NO: 4696355 - DNA, 25 bp, Homo sapien
gacaatcagtgaagcctcgaagacc

SEQ ID NO: 4696356 - DNA, 25 bp, Homo sapien
tttcttcagtgtgtccagcagtttc

SEQ ID NO: 4696357 - DNA, 25 bp, Homo sapien
cttcagtgtgtccagcagtttctgt

SEQ ID NO: 4696358 - DNA, 25 bp, Homo sapien
agtttcttcagtgtgtccagcagtt

SEQ ID NO: 4696359 - DNA, 25 bp, Homo sapien
tcagtgtgtccagcagtttctgtgg

SEQ ID NO: 4696360 - DNA, 25 bp, Homo sapien
gtctgtgtgagtccaacgggccaag

SEQ ID NO: 4696361 - DNA, 25 bp, Homo sapien
tatatttcacgacaacagcagcagc

SEQ ID NO: 4696362 - DNA, 25 bp, Homo sapien
gcaatgtgcacgtcacccagggtta

SEQ ID NO: 4696363 - DNA, 25 bp, Homo sapien
catgagcactgtttggtccgaggga

SEQ ID NO: 4696364 - DNA, 25 bp, Homo sapien
ttagactcaagtgctttagtacaga

SEQ ID NO: 4696365 - DNA, 25 bp, Homo sapien
aaggaaagccagactggagccccct

SEQ ID NO: 4696366 - DNA, 25 bp, Homo sapien
gacctgggtccagaagactccatgc

SEQ ID NO: 4696367 - DNA, 25 bp, Homo sapien
gctagtccccagtgtaaggcggcta

SEQ ID NO: 4696368 - DNA, 25 bp, Homo sapien
ctacagatctaacgcaagcaacggg

SEQ ID NO: 4696369 - DNA, 25 bp, Homo sapien
tgccacagccggaggtggtcgcctc

SEQ ID NO: 4696370 - DNA, 25 bp, Homo sapien
cctgcagtgcctgcgttagaaaagc

SEQ ID NO: 4696371 - DNA, 25 bp, Homo sapien
catgattggagagggagcatctgca

SEQ ID NO: 4696372 - DNA, 25 bp, Homo sapien
tctcactgcatgccctaaatacaca

SEQ ID NO: 4696373 - DNA, 25 bp, Homo sapien
cgttagaaaagcattctaaggctga

SEQ ID NO: 4696374 - DNA, 25 bp, Homo sapien
gcttggactcatcgtcaacagcagc

SEQ ID NO: 4696375 - DNA, 25 bp, Homo sapien
aagcccgtggctcatttggaattga

SEQ ID NO: 4696376 - DNA, 25 bp, Homo sapien
ccacggttactacgggactgaatga

SEQ ID NO: 4696377 - DNA, 25 bp, Homo sapien
tataagacgacaataataaccatcc

SEQ ID NO: 4696378 - DNA, 25 bp, Homo sapien
caatgaagtacttttaagcccgtgg

SEQ ID NO: 4696379 - DNA, 25 bp, Homo sapien
ccttgctcacagtgtttcggcctcg

SEQ ID NO: 4696380 - DNA, 25 bp, Homo sapien
ctgatccgccgcgtgaccggtgttg

SEQ ID NO: 4696381 - DNA, 25 bp, Homo sapien
ccctggcggcaactccgggtggagt

SEQ ID NO: 4696382 - DNA, 25 bp, Homo sapien
cctcgagtgtcggttccgcgttggt

SEQ ID NO: 4696383 - DNA, 25 bp, Homo sapien
tgggtgccggtaccaggtcccactc

SEQ ID NO: 4696384 - DNA, 25 bp, Homo sapien
gtacatagcaacaggccgagggagt

SEQ ID NO: 4696385 - DNA, 25 bp, Homo sapien
gctgggtgccggtaccaggtcccac

SEQ ID NO: 4696386 - DNA, 25 bp, Homo sapien
ctggtcccgtacatagcaacaggcc

SEQ ID NO: 4696387 - DNA, 25 bp, Homo sapien
ggagccatggctgatggcaaccagg

SEQ ID NO: 4696388 - DNA, 25 bp, Homo sapien
tgggagccatggctgatggcaacca

SEQ ID NO: 4696389 - DNA, 25 bp, Homo sapien
gccatggctgatggcaaccagggct

SEQ ID NO: 4696390 - DNA, 25 bp, Homo sapien
tttgggagccatggctgatggcaac

SEQ ID NO: 4696391 - DNA, 25 bp, Homo sapien
cgggctagccggtcctccaggtctc

SEQ ID NO: 4696392 - DNA, 25 bp, Homo sapien
ggctagccggtcctccaggtctcgg

SEQ ID NO: 4696393 - DNA, 25 bp, Homo sapien
ccaggtctcggatctggatgtggta

SEQ ID NO: 4696394 - DNA, 25 bp, Homo sapien
gtctcggatctggatgtggtagaac

SEQ ID NO: 4696395 - DNA, 25 bp, Homo sapien
tgcgcttgaggaaggccacaatctc

SEQ ID NO: 4696396 - DNA, 25 bp, Homo sapien
tctccgtggtgagctggtccttggt

SEQ ID NO: 4696397 - DNA, 25 bp, Homo sapien
cttcttgttattggccagctgctca

SEQ ID NO: 4696398 - DNA, 25 bp, Homo sapien
catctctttggctagctgcaagttc

SEQ ID NO: 4696399 - DNA, 25 bp, Homo sapien
gggaccttggtcacgacacttcatc

SEQ ID NO: 4696400 - DNA, 25 bp, Homo sapien
gggctaggttctaatgccatctgac

SEQ ID NO: 4696401 - DNA, 25 bp, Homo sapien
taaggaagacagtgtgtgccaagca

SEQ ID NO: 4696402 - DNA, 25 bp, Homo sapien
cagcttcgtaggattgctgggacaa

SEQ ID NO: 4696403 - DNA, 25 bp, Homo sapien
ctccagcaatgtgaacttgtccgtg

SEQ ID NO: 4696404 - DNA, 25 bp, Homo sapien
caggttgtatgcatagtccctgaac

SEQ ID NO: 4696405 - DNA, 25 bp, Homo sapien
tccaggttgtatgcatagtccctga

SEQ ID NO: 4696406 - DNA, 25 bp, Homo sapien
ccaggttgtatgcatagtccctgaa

SEQ ID NO: 4696407 - DNA, 25 bp, Homo sapien
tctccaggttgtatgcatagtccct

SEQ ID NO: 4696408 - DNA, 25 bp, Homo sapien
ttggttgtctcccacatccggttcg

SEQ ID NO: 4696409 - DNA, 25 bp, Homo sapien
ttgttctctttgatggcccgcttgg

SEQ ID NO: 4696410 - DNA, 25 bp, Homo sapien
actcattggccacgaggttcacgcg

SEQ ID NO: 4696411 - DNA, 25 bp, Homo sapien
tggccatctgcagggtaatgccgtt

SEQ ID NO: 4696412 - DNA, 25 bp, Homo sapien
cctggcacttcttagtcagcatgag

SEQ ID NO: 4696413 - DNA, 25 bp, Homo sapien
tgctcctggcacttcttagtcagca

SEQ ID NO: 4696414 - DNA, 25 bp, Homo sapien
tcctggcacttcttagtcagcatga

SEQ ID NO: 4696415 - DNA, 25 bp, Homo sapien
tggcacttcttagtcagcatgagga

SEQ ID NO: 4696416 - DNA, 25 bp, Homo sapien
tggaccccaactgggatgagtcaac

SEQ ID NO: 4696417 - DNA, 25 bp, Homo sapien
ctgggtcgtgggatcggaaagagct

SEQ ID NO: 4696418 - DNA, 25 bp, Homo sapien
ctggaccccaactgggatgagtcaa

SEQ ID NO: 4696419 - DNA, 25 bp, Homo sapien
gaagtcactggcctgggtcgtggga

SEQ ID NO: 4696420 - DNA, 25 bp, Homo sapien
tgctgtagccgctgcaaatccacct

SEQ ID NO: 4696421 - DNA, 25 bp, Homo sapien
gttctgtaggaaggaggtggcctgg

SEQ ID NO: 4696422 - DNA, 25 bp, Homo sapien
gcccgaaccttctgctcattagcca

SEQ ID NO: 4696423 - DNA, 25 bp, Homo sapien
cagaatgttctgtaggaaggaggtg

SEQ ID NO: 4696424 - DNA, 25 bp, Homo sapien
cagcgaaggacagactttccaggag

SEQ ID NO: 4696425 - DNA, 25 bp, Homo sapien
cagcttccatcttgcgctcactccc

SEQ ID NO: 4696426 - DNA, 25 bp, Homo sapien
gccagaatcagcgaaggacagactt

SEQ ID NO: 4696427 - DNA, 25 bp, Homo sapien
ttgaaggccagaatcagcgaaggac

SEQ ID NO: 4696428 - DNA, 25 bp, Homo sapien
tccctgtctgtggtgggatacccat

SEQ ID NO: 4696429 - DNA, 25 bp, Homo sapien
ctcgtccaggaaattccaacctcag

SEQ ID NO: 4696430 - DNA, 25 bp, Homo sapien
tctgtggtgggatacccattcttca

SEQ ID NO: 4696431 - DNA, 25 bp, Homo sapien
cagtgcccatttccacgaagttttc

SEQ ID NO: 4696432 - DNA, 25 bp, Homo sapien
tggaacgtcacgtcaacgtcactgt

SEQ ID NO: 4696433 - DNA, 25 bp, Homo sapien
ctccttgtgccatggctggaacgtc

SEQ ID NO: 4696434 - DNA, 25 bp, Homo sapien
tgccatggctggaacgtcacgtcaa

SEQ ID NO: 4696435 - DNA, 25 bp, Homo sapien
gtcacgtcaacgtcactgtcctctt

SEQ ID NO: 4696436 - DNA, 25 bp, Homo sapien
cacgcagccttctgaggtctcgtgg

SEQ ID NO: 4696437 - DNA, 25 bp, Homo sapien
gccttctgaggtctcgtggccacag

SEQ ID NO: 4696438 - DNA, 25 bp, Homo sapien
actgtgactcctggtggggacacgc

SEQ ID NO: 4696439 - DNA, 25 bp, Homo sapien
gcagccttctgaggtctcgtggcca

SEQ ID NO: 4696440 - DNA, 25 bp, Homo sapien
gacccagtcctgggcagctggatgc

SEQ ID NO: 4696441 - DNA, 25 bp, Homo sapien
cccagtcctgggcagctggatgctg

SEQ ID NO: 4696442 - DNA, 25 bp, Homo sapien
gagacccagtcctgggcagctggat

SEQ ID NO: 4696443 - DNA, 25 bp, Homo sapien
ctgcggcagcagagacccagtcctg

SEQ ID NO: 4696444 - DNA, 25 bp, Homo sapien
atcccccggctggtagggggtgatg

SEQ ID NO: 4696445 - DNA, 25 bp, Homo sapien
aggcctagatcccccggctggtagg

SEQ ID NO: 4696446 - DNA, 25 bp, Homo sapien
caggcctagatcccccggctggtag

SEQ ID NO: 4696447 - DNA, 25 bp, Homo sapien
gtgatatatgacagcagcctgaggt

SEQ ID NO: 4696448 - DNA, 25 bp, Homo sapien
cggaaggtccccacacgggtgatat

SEQ ID NO: 4696449 - DNA, 25 bp, Homo sapien
tgggtgggatgtggacctggcgagg

SEQ ID NO: 4696450 - DNA, 25 bp, Homo sapien
ctgctgtgtgcccggaaggtcccca

SEQ ID NO: 4696451 - DNA, 25 bp, Homo sapien
tcagggggatcccactctttccctg

SEQ ID NO: 4696452 - DNA, 25 bp, Homo sapien
ctgtaagattaaagatgctggcttg

SEQ ID NO: 4696453 - DNA, 25 bp, Homo sapien
cgaggctgggggattgcttgacgtc

SEQ ID NO: 4696454 - DNA, 25 bp, Homo sapien
gatgctggcttggaagctgaggcct

SEQ ID NO: 4696455 - DNA, 25 bp, Homo sapien
tacctggtgcatgatgagctggaca

SEQ ID NO: 4696456 - DNA, 25 bp, Homo sapien
tgatcttggaccacatccgtgagcg

SEQ ID NO: 4696457 - DNA, 25 bp, Homo sapien
gatcgagccaccgacctgatcttgg

SEQ ID NO: 4696458 - DNA, 25 bp, Homo sapien
tcatcatgggagtcgggacagtgcc

SEQ ID NO: 4696459 - DNA, 25 bp, Homo sapien
agctccagttgctgcatggctttgg

SEQ ID NO: 4696460 - DNA, 25 bp, Homo sapien
tgcatggctttgggtacttcggggg

SEQ ID NO: 4696461 - DNA, 25 bp, Homo sapien
gagctccagttgctgcatggctttg

SEQ ID NO: 4696462 - DNA, 25 bp, Homo sapien
cactggctgtgacagatccgcgggt

SEQ ID NO: 4696463 - DNA, 25 bp, Homo sapien
cagatccgcgggttcacctccaagt

SEQ ID NO: 4696464 - DNA, 25 bp, Homo sapien
gctgtgacagatccgcgggttcacc

SEQ ID NO: 4696465 - DNA, 25 bp, Homo sapien
acagatccgcgggttcacctccaag

SEQ ID NO: 4696466 - DNA, 25 bp, Homo sapien
ccggcacgcgacacagcgtgggcat

SEQ ID NO: 4696467 - DNA, 25 bp, Homo sapien
ttggacgcgcgaccggcactgtgcc

SEQ ID NO: 4696468 - DNA, 25 bp, Homo sapien
ctgctccggccacggcggcttatga

SEQ ID NO: 4696469 - DNA, 25 bp, Homo sapien
agtttccctggtgccgcccgcaggt

SEQ ID NO: 4696470 - DNA, 25 bp, Homo sapien
aaaggacttgccagattttcgccgc

SEQ ID NO: 4696471 - DNA, 25 bp, Homo sapien
ttttcgccgcaagtcagggccatag

SEQ ID NO: 4696472 - DNA, 25 bp, Homo sapien
catgagccgatgtgttttggagcct

SEQ ID NO: 4696473 - DNA, 25 bp, Homo sapien
ccaaccgaaggtcaagcaagagctc

SEQ ID NO: 4696474 - DNA, 25 bp, Homo sapien
gccctgacgttgctaggcaccatca

SEQ ID NO: 4696475 - DNA, 25 bp, Homo sapien
gaggcctctgccaactacctcgcgg

SEQ ID NO: 4696476 - DNA, 25 bp, Homo sapien
ccctggccctgacgttgctaggcac

SEQ ID NO: 4696477 - DNA, 25 bp, Homo sapien
tctgccaactacctcgcggccctgg

SEQ ID NO: 4696478 - DNA, 25 bp, Homo sapien
gcctttgcgttagtcttctcccaag

SEQ ID NO: 4696479 - DNA, 25 bp, Homo sapien
tctgcctttgcgttagtcttctccc

SEQ ID NO: 4696480 - DNA, 25 bp, Homo sapien
ctggccctctgcctttgcgttagtc

SEQ ID NO: 4696481 - DNA, 25 bp, Homo sapien
tcctgcgaacccagcctcggtctct

SEQ ID NO: 4696482 - DNA, 25 bp, Homo sapien
gccccaggttctcccattttggtga

SEQ ID NO: 4696483 - DNA, 25 bp, Homo sapien
aagcagccgccgagccttacaagga

SEQ ID NO: 4696484 - DNA, 25 bp, Homo sapien
gccttacaaggatctttcacatgcc

SEQ ID NO: 4696485 - DNA, 25 bp, Homo sapien
ttccccaccagctacccaagccaga

SEQ ID NO: 4696486 - DNA, 25 bp, Homo sapien
tcaggcctggtcccaagtctcaggc

SEQ ID NO: 4696487 - DNA, 25 bp, Homo sapien
ctacagtcccttgggtaaccttcag

SEQ ID NO: 4696488 - DNA, 25 bp, Homo sapien
ggcctggtcccaagtctcaggcctt

SEQ ID NO: 4696489 - DNA, 25 bp, Homo sapien
agtctcaggccttgggggtcctaca

SEQ ID NO: 4696490 - DNA, 25 bp, Homo sapien
gatgctttggaacacgtggctggtc

SEQ ID NO: 4696491 - DNA, 25 bp, Homo sapien
gggccctggtcaaccttcagggcat

SEQ ID NO: 4696492 - DNA, 25 bp, Homo sapien
gctggaatcacccatggctttggga

SEQ ID NO: 4696493 - DNA, 25 bp, Homo sapien
gacctttggttttacatcacagatg

SEQ ID NO: 4696494 - DNA, 25 bp, Homo sapien
ggaagagccccattagacagttgag

SEQ ID NO: 4696495 - DNA, 25 bp, Homo sapien
gtggccctgactgtggaccagccca

SEQ ID NO: 4696496 - DNA, 25 bp, Homo sapien
cagcctcgttcccactgaggtggaa

SEQ ID NO: 4696497 - DNA, 25 bp, Homo sapien
gagagtaagtggctcaaagctgcac

SEQ ID NO: 4696498 - DNA, 25 bp, Homo sapien
agtgcgcgggagaagagcagcacag

SEQ ID NO: 4696499 - DNA, 25 bp, Homo sapien
gctccaagcactgctggcctctgga

SEQ ID NO: 4696500 - DNA, 25 bp, Homo sapien
tgctccaagcactgctggcctctgg

SEQ ID NO: 4696501 - DNA, 25 bp, Homo sapien
gggtccaggtggagtgcgcgggaga

SEQ ID NO: 4696502 - DNA, 25 bp, Homo sapien
tagagcacaaaggtgaggcgctcca

SEQ ID NO: 4696503 - DNA, 25 bp, Homo sapien
tgggcggccgaggagaagtcacaga

SEQ ID NO: 4696504 - DNA, 25 bp, Homo sapien
tgagtaggcccttcgcaggttctgg

SEQ ID NO: 4696505 - DNA, 25 bp, Homo sapien
cagcccgtaaggcatagaagtccac

SEQ ID NO: 4696506 - DNA, 25 bp, Homo sapien
atcggtaacggaagcatggtttctc

SEQ ID NO: 4696507 - DNA, 25 bp, Homo sapien
tcggtaacggaagcatggtttctca

SEQ ID NO: 4696508 - DNA, 25 bp, Homo sapien
catcggtaacggaagcatggtttct

SEQ ID NO: 4696509 - DNA, 25 bp, Homo sapien
cttcagctcgttggtgatgagcgtg

SEQ ID NO: 4696510 - DNA, 25 bp, Homo sapien
aggcctgatgctgcttgagggccag

SEQ ID NO: 4696511 - DNA, 25 bp, Homo sapien
tagacatcggcgttggtggtgtcct

SEQ ID NO: 4696512 - DNA, 25 bp, Homo sapien
aagttgtagagtctggcccggaaga

SEQ ID NO: 4696513 - DNA, 25 bp, Homo sapien
aacagcaaggcgctgtgcaggtccc

SEQ ID NO: 4696514 - DNA, 25 bp, Homo sapien
ctgcgggtgcttgggattcaacagc

SEQ ID NO: 4696515 - DNA, 25 bp, Homo sapien
tgcagtgcgtgctgcagcttgccct

SEQ ID NO: 4696516 - DNA, 25 bp, Homo sapien
atcttggcgcgcctgctgggcctgg

SEQ ID NO: 4696517 - DNA, 25 bp, Homo sapien
gagactggggtccagagggttgttc

SEQ ID NO: 4696518 - DNA, 25 bp, Homo sapien
agagactggggtccagagggttgtt

SEQ ID NO: 4696519 - DNA, 25 bp, Homo sapien
tcctggtcctcggtcaccatgtcca

SEQ ID NO: 4696520 - DNA, 25 bp, Homo sapien
tggtaggcgccctgcctgtagcagt

SEQ ID NO: 4696521 - DNA, 25 bp, Homo sapien
gcacggcaaagtcgttgtaggtcag

SEQ ID NO: 4696522 - DNA, 25 bp, Homo sapien
tcgtcccggagggccttgttcagca

SEQ ID NO: 4696523 - DNA, 25 bp, Homo sapien
tgttcctgggatactgagactatta

SEQ ID NO: 4696524 - DNA, 25 bp, Homo sapien
ggccttagagatggcgaggctcccc

SEQ ID NO: 4696525 - DNA, 25 bp, Homo sapien
tgagcattttaaggagtctggagcc

SEQ ID NO: 4696526 - DNA, 25 bp, Homo sapien
ttttctgggcgtctgggcactgttc

SEQ ID NO: 4696527 - DNA, 25 bp, Homo sapien
ggtagtccgcctcggcaaaggccag

SEQ ID NO: 4696528 - DNA, 25 bp, Homo sapien
cgtgttggcgccctcgtcctgaggg

SEQ ID NO: 4696529 - DNA, 25 bp, Homo sapien
tctgctcgcagaagcccatcttctc

SEQ ID NO: 4696530 - DNA, 25 bp, Homo sapien
aggcccatgcgcgtgttggcgccct

SEQ ID NO: 4696531 - DNA, 25 bp, Homo sapien
acagtgggtcccaagctgctatgag

SEQ ID NO: 4696532 - DNA, 25 bp, Homo sapien
cagtgggtcccaagctgctatgagc

SEQ ID NO: 4696533 - DNA, 25 bp, Homo sapien
agtgggtcccaagctgctatgagct

SEQ ID NO: 4696534 - DNA, 25 bp, Homo sapien
acacagtgggtcccaagctgctatg

SEQ ID NO: 4696535 - DNA, 25 bp, Homo sapien
gctcttggcccggtacaggtagtac

SEQ ID NO: 4696536 - DNA, 25 bp, Homo sapien
acatcctggcgggccccaaaaatgt

SEQ ID NO: 4696537 - DNA, 25 bp, Homo sapien
ggtacaggtagtactgggccttctg

SEQ ID NO: 4696538 - DNA, 25 bp, Homo sapien
cggatggccgtggagaagtggttct

SEQ ID NO: 4696539 - DNA, 25 bp, Homo sapien
ctccaccgacatgcccgggaagagg

SEQ ID NO: 4696540 - DNA, 25 bp, Homo sapien
atgcccgggaagaggttggtcatca

SEQ ID NO: 4696541 - DNA, 25 bp, Homo sapien
ctcctccaccgacatgcccgggaag

SEQ ID NO: 4696542 - DNA, 25 bp, Homo sapien
cgacatgcccgggaagaggttggtc

SEQ ID NO: 4696543 - DNA, 25 bp, Homo sapien
cctcggaggtcgcaatcaaaggctc

SEQ ID NO: 4696544 - DNA, 25 bp, Homo sapien
gctccaactcgtgccgtttaagcat

SEQ ID NO: 4696545 - DNA, 25 bp, Homo sapien
tgcggaatctcaggggtggccttca

SEQ ID NO: 4696546 - DNA, 25 bp, Homo sapien
ttctggcgctccaactcgtgccgtt

SEQ ID NO: 4696547 - DNA, 25 bp, Homo sapien
ctcctcaggggcctcagcctctccc

SEQ ID NO: 4696548 - DNA, 25 bp, Homo sapien
ctcaggggcctcagcctctccctct

SEQ ID NO: 4696549 - DNA, 25 bp, Homo sapien
tctccctctgagcttcccggtttta

SEQ ID NO: 4696550 - DNA, 25 bp, Homo sapien
ctctccctctgagcttcccggtttt

SEQ ID NO: 4696551 - DNA, 25 bp, Homo sapien
catgacagtgaccatgagcagggct

SEQ ID NO: 4696552 - DNA, 25 bp, Homo sapien
ccagcagtagaacagaggaacacac

SEQ ID NO: 4696553 - DNA, 25 bp, Homo sapien
gcgaggtacaccatagtgctccagg

SEQ ID NO: 4696554 - DNA, 25 bp, Homo sapien
ggaacacactgtgggactgtcaagg

SEQ ID NO: 4696555 - DNA, 25 bp, Homo sapien
gggagagctgctaatgaccatttca

SEQ ID NO: 4696556 - DNA, 25 bp, Homo sapien
tgttgaaggagctgctagcgccttg

SEQ ID NO: 4696557 - DNA, 25 bp, Homo sapien
gggccactcggctaagaagcagaga

SEQ ID NO: 4696558 - DNA, 25 bp, Homo sapien
tcccaatacaagtgaagacggaggg

SEQ ID NO: 4696559 - DNA, 25 bp, Homo sapien
ccaccttgctaggtatgagctctga

SEQ ID NO: 4696560 - DNA, 25 bp, Homo sapien
ctgaagaggtctggtcaaggtagct

SEQ ID NO: 4696561 - DNA, 25 bp, Homo sapien
tctggtcaaggtagctgtcagacag

SEQ ID NO: 4696562 - DNA, 25 bp, Homo sapien
agacagggacgccaccttgctaggt

SEQ ID NO: 4696563 - DNA, 25 bp, Homo sapien
gaggcttcgcatcaccaaagggaaa

SEQ ID NO: 4696564 - DNA, 25 bp, Homo sapien
catgaagtgcctggagcaagcctca

SEQ ID NO: 4696565 - DNA, 25 bp, Homo sapien
gcaacagtgttactcccgctctaga

SEQ ID NO: 4696566 - DNA, 25 bp, Homo sapien
taaaaggcgctaaatgcacccacac

SEQ ID NO: 4696567 - DNA, 25 bp, Homo sapien
gcctcagtcttggtggaacttcgga

SEQ ID NO: 4696568 - DNA, 25 bp, Homo sapien
gagtccgaggattgcgtcttcaaca

SEQ ID NO: 4696569 - DNA, 25 bp, Homo sapien
gatagccgacatctcagtctctgag

SEQ ID NO: 4696570 - DNA, 25 bp, Homo sapien
gaggtgctcctgtattcctggcaga

SEQ ID NO: 4696571 - DNA, 25 bp, Homo sapien
caagaagggagggtctggatggtcc

SEQ ID NO: 4696572 - DNA, 25 bp, Homo sapien
ggtagaactcgtcccctccccagca

SEQ ID NO: 4696573 - DNA, 25 bp, Homo sapien
ctaagacttttaattgctctggaag

SEQ ID NO: 4696574 - DNA, 25 bp, Homo sapien
gactgttgctaagacttttaattgc

SEQ ID NO: 4696575 - DNA, 25 bp, Homo sapien
gtataataaactcagctgtgggacc

SEQ ID NO: 4696576 - DNA, 25 bp, Homo sapien
aataaactcagctgtgggaccagag

SEQ ID NO: 4696577 - DNA, 25 bp, Homo sapien
tataataaactcagctgtgggacca

SEQ ID NO: 4696578 - DNA, 25 bp, Homo sapien
aacaagtataataaactcagctgtg

SEQ ID NO: 4696579 - DNA, 25 bp, Homo sapien
ctgtgtccatatcaagccaggtgga

SEQ ID NO: 4696580 - DNA, 25 bp, Homo sapien
cttgcctccttggtcgggcaccata

SEQ ID NO: 4696581 - DNA, 25 bp, Homo sapien
actgtggctcgtggcggtgctccct

SEQ ID NO: 4696582 - DNA, 25 bp, Homo sapien
aaatggagggactcaagctgccact

SEQ ID NO: 4696583 - DNA, 25 bp, Homo sapien
cttccggcccgacttgccgggtgag

SEQ ID NO: 4696584 - DNA, 25 bp, Homo sapien
tgcaatctagaggaccgcctggtgg

SEQ ID NO: 4696585 - DNA, 25 bp, Homo sapien
gaccccgttgacagctcgcatttag

SEQ ID NO: 4696586 - DNA, 25 bp, Homo sapien
ccttttgcgaatgcgacttccggcc

SEQ ID NO: 4696587 - DNA, 25 bp, Homo sapien
tgcagaccccgtgctggctgctaga

SEQ ID NO: 4696588 - DNA, 25 bp, Homo sapien
cctcatcactgggtagggagagcct

SEQ ID NO: 4696589 - DNA, 25 bp, Homo sapien
gggtaacacgttcatgtgcagaatg

SEQ ID NO: 4696590 - DNA, 25 bp, Homo sapien
tacagatgggaaacttgaggtccag

SEQ ID NO: 4696591 - DNA, 25 bp, Homo sapien
ccatcgcgcccatcccttccctcgc

SEQ ID NO: 4696592 - DNA, 25 bp, Homo sapien
cccatcgcgcccatcccttccctcg

SEQ ID NO: 4696593 - DNA, 25 bp, Homo sapien
ccccatcgcgcccatcccttccctc

SEQ ID NO: 4696594 - DNA, 25 bp, Homo sapien
cccccatcgcgcccatcccttccct

SEQ ID NO: 4696595 - DNA, 25 bp, Homo sapien
tctggcgcccgatccggggccagcc

SEQ ID NO: 4696596 - DNA, 25 bp, Homo sapien
gccgctctggcgcccgatccggggc

SEQ ID NO: 4696597 - DNA, 25 bp, Homo sapien
cgctctggcgcccgatccggggcca

SEQ ID NO: 4696598 - DNA, 25 bp, Homo sapien
ctctggcgcccgatccggggccagc

SEQ ID NO: 4696599 - DNA, 25 bp, Homo sapien
ggctcggggtggcgcgtcccgctgc

SEQ ID NO: 4696600 - DNA, 25 bp, Homo sapien
ctcggggtggcgcgtcccgctgcat

SEQ ID NO: 4696601 - DNA, 25 bp, Homo sapien
tggggctcggggtggcgcgtcccgc

SEQ ID NO: 4696602 - DNA, 25 bp, Homo sapien
agctggggctcggggtggcgcgtcc

SEQ ID NO: 4696603 - DNA, 25 bp, Homo sapien
ggacttgtagttcccgagaggccag

SEQ ID NO: 4696604 - DNA, 25 bp, Homo sapien
acttgtagttcccgagaggccaggg

SEQ ID NO: 4696605 - DNA, 25 bp, Homo sapien
gggacttgtagttcccgagaggcca

SEQ ID NO: 4696606 - DNA, 25 bp, Homo sapien
tgtagttcccgagaggccaggggga

SEQ ID NO: 4696607 - DNA, 25 bp, Homo sapien
cgccgccgcccccagtcgctgctgc

SEQ ID NO: 4696608 - DNA, 25 bp, Homo sapien
cgccgctcctgctccgggtcccgcc

SEQ ID NO: 4696609 - DNA, 25 bp, Homo sapien
ccgcccccagtcgctgctgccgccg

SEQ ID NO: 4696610 - DNA, 25 bp, Homo sapien
ccgccgctcctgctccgggtcccgc

SEQ ID NO: 4696611 - DNA, 25 bp, Homo sapien
tcacaaaaagggcactccaccgagt

SEQ ID NO: 4696612 - DNA, 25 bp, Homo sapien
atcacaaaaagggcactccaccgag

SEQ ID NO: 4696613 - DNA, 25 bp, Homo sapien
atcttggcgagcttctcgtatttgg

SEQ ID NO: 4696614 - DNA, 25 bp, Homo sapien
aaggtgccttggccgatcttggcga

SEQ ID NO: 4696615 - DNA, 25 bp, Homo sapien
ccgaaggtgccttggccgatcttgg

SEQ ID NO: 4696616 - DNA, 25 bp, Homo sapien
tgccttggccgatcttggcgagctt

SEQ ID NO: 4696617 - DNA, 25 bp, Homo sapien
ccagggcacgcggctaccccgccac

SEQ ID NO: 4696618 - DNA, 25 bp, Homo sapien
gccggtcttgcggtgcctggccttg

SEQ ID NO: 4696619 - DNA, 25 bp, Homo sapien
tccttctcgttttccatcagcacct

SEQ ID NO: 4696620 - DNA, 25 bp, Homo sapien
gtcttgcggtgcctggccttgaaca

SEQ ID NO: 4696621 - DNA, 25 bp, Homo sapien
tctggccggtcttgcggtgcctggc

SEQ ID NO: 4696622 - DNA, 25 bp, Homo sapien
ctttggttcgacaaatctcaatcaa

SEQ ID NO: 4696623 - DNA, 25 bp, Homo sapien
gaccacattctcgtgttttagaagc

SEQ ID NO: 4696624 - DNA, 25 bp, Homo sapien
gaaggatcttgatctcccgcaaggc

SEQ ID NO: 4696625 - DNA, 25 bp, Homo sapien
caatcaagttgaccacattctcgtg

SEQ ID NO: 4696626 - DNA, 25 bp, Homo sapien
gaagcaccagctacgatgaaagagg

SEQ ID NO: 4696627 - DNA, 25 bp, Homo sapien
caccagctacgatgaaagaggacca

SEQ ID NO: 4696628 - DNA, 25 bp, Homo sapien
cagctacgatgaaagaggaccagaa

SEQ ID NO: 4696629 - DNA, 25 bp, Homo sapien
cgaggaagcaccagctacgatgaaa

SEQ ID NO: 4696630 - DNA, 25 bp, Homo sapien
caggtatatactacccttgcagcgg

SEQ ID NO: 4696631 - DNA, 25 bp, Homo sapien
gcaaggtcatgctcgcagaagtcga

SEQ ID NO: 4696632 - DNA, 25 bp, Homo sapien
tctcagacagcgtgaacttgaccaa

SEQ ID NO: 4696633 - DNA, 25 bp, Homo sapien
tagaggccgttaagcagcatctgca

SEQ ID NO: 4696634 - DNA, 25 bp, Homo sapien
ggccggtaccagagtgtcaccacac

SEQ ID NO: 4696635 - DNA, 25 bp, Homo sapien
gtgataagcacattagcagccttca

SEQ ID NO: 4696636 - DNA, 25 bp, Homo sapien
tagcggttgggctggctgttcttgg

SEQ ID NO: 4696637 - DNA, 25 bp, Homo sapien
tgtcaccacacggttggtgtagcgg

SEQ ID NO: 4696638 - DNA, 25 bp, Homo sapien
ccggcagctcaagaagccctggcag

SEQ ID NO: 4696639 - DNA, 25 bp, Homo sapien
cagggccggcagctcaagaagccct

SEQ ID NO: 4696640 - DNA, 25 bp, Homo sapien
ctgaggctcaatgccccagggccgg

SEQ ID NO: 4696641 - DNA, 25 bp, Homo sapien
ggccggcagctcaagaagccctggc

SEQ ID NO: 4696642 - DNA, 25 bp, Homo sapien
ctgggaagaagagcgcaccaggagg

SEQ ID NO: 4696643 - DNA, 25 bp, Homo sapien
ggaagaagagcgcaccaggagggcc

SEQ ID NO: 4696644 - DNA, 25 bp, Homo sapien
gagttggtgctgctccgtgttgccc

SEQ ID NO: 4696645 - DNA, 25 bp, Homo sapien
ccgtgttgccctgcatgatggggct

SEQ ID NO: 4696646 - DNA, 25 bp, Homo sapien
actgatgagggcgagttggtgctgc

SEQ ID NO: 4696647 - DNA, 25 bp, Homo sapien
atggagccgcagagctgactgatga

SEQ ID NO: 4696648 - DNA, 25 bp, Homo sapien
tgcgtatgggtcacgcacataggcc

SEQ ID NO: 4696649 - DNA, 25 bp, Homo sapien
cttgtcgatgaggtccagtgcgtat

SEQ ID NO: 4696650 - DNA, 25 bp, Homo sapien
tcatagttgtccacgtttggccaca

SEQ ID NO: 4696651 - DNA, 25 bp, Homo sapien
tcatcgctgtcgatgcgctgggcag

SEQ ID NO: 4696652 - DNA, 25 bp, Homo sapien
cttccggcgcggtggtgccaagtac

SEQ ID NO: 4696653 - DNA, 25 bp, Homo sapien
tggtggtggcgggattgcgactctg

SEQ ID NO: 4696654 - DNA, 25 bp, Homo sapien
attgcgactctggttggtggactgc

SEQ ID NO: 4696655 - DNA, 25 bp, Homo sapien
tcagaagacgcgctcaaactccgtc

SEQ ID NO: 4696656 - DNA, 25 bp, Homo sapien
aaaccaagagtttgtgccagcccca

SEQ ID NO: 4696657 - DNA, 25 bp, Homo sapien
tgtctccacgatgcaagtcacatag

SEQ ID NO: 4696658 - DNA, 25 bp, Homo sapien
tctcagcccgagaataggattgtgg

SEQ ID NO: 4696659 - DNA, 25 bp, Homo sapien
gaaaccctctgggaaccatccagaa

SEQ ID NO: 4696660 - DNA, 25 bp, Homo sapien
caaggtctccgcctgtaagaggatg

SEQ ID NO: 4696661 - DNA, 25 bp, Homo sapien
tacccagcagtctgagggaccatcc

SEQ ID NO: 4696662 - DNA, 25 bp, Homo sapien
catgagatgcgttctggaaggcacc

SEQ ID NO: 4696663 - DNA, 25 bp, Homo sapien
cagaatgtgccgctcctcaaaggtt

SEQ ID NO: 4696664 - DNA, 25 bp, Homo sapien
gactagcctggccaagactgcgaaa

SEQ ID NO: 4696665 - DNA, 25 bp, Homo sapien
ccatctttactaaacatacaattag

SEQ ID NO: 4696666 - DNA, 25 bp, Homo sapien
ccaagactgcgaaaccccatcttta

SEQ ID NO: 4696667 - DNA, 25 bp, Homo sapien
cccatctttactaaacatacaatta

SEQ ID NO: 4696668 - DNA, 25 bp, Homo sapien
catgcttgtagcaattagttataga

SEQ ID NO: 4696669 - DNA, 25 bp, Homo sapien
ctgttaatttaagctagcatgcttg

SEQ ID NO: 4696670 - DNA, 25 bp, Homo sapien
caattagttatagaagtctcaggaa

SEQ ID NO: 4696671 - DNA, 25 bp, Homo sapien
aagctagcatgcttgtagcaattag

SEQ ID NO: 4696672 - DNA, 25 bp, Homo sapien
tggcccctaaatccagactggtgtc

SEQ ID NO: 4696673 - DNA, 25 bp, Homo sapien
tgaggtcaaactgggttagggtggc

SEQ ID NO: 4696674 - DNA, 25 bp, Homo sapien
tttggatttatttgactacttatac

SEQ ID NO: 4696675 - DNA, 25 bp, Homo sapien
tgactacttatactgggttgaagtg

SEQ ID NO: 4696676 - DNA, 25 bp, Homo sapien
gctgtcaggacagcacacaacagct

SEQ ID NO: 4696677 - DNA, 25 bp, Homo sapien
ctgtcaggacagcacacaacagctt

SEQ ID NO: 4696678 - DNA, 25 bp, Homo sapien
cccagagactcatgtgtgccaggca

SEQ ID NO: 4696679 - DNA, 25 bp, Homo sapien
cagctgtattaagtcccgaatggga

SEQ ID NO: 4696680 - DNA, 25 bp, Homo sapien
tgggatgacccttggaagacacacc

SEQ ID NO: 4696681 - DNA, 25 bp, Homo sapien
agaaaatacaattaggccagccctg

SEQ ID NO: 4696682 - DNA, 25 bp, Homo sapien
tatacaaagtacagcgtggacacac

SEQ ID NO: 4696683 - DNA, 25 bp, Homo sapien
tgatttgggagacgccaaggcctcc

SEQ ID NO: 4696684 - DNA, 25 bp, Homo sapien
ttaaaggtaagcacgcagacaggca

SEQ ID NO: 4696685 - DNA, 25 bp, Homo sapien
ggactggtcagaaccttaccgcgag

SEQ ID NO: 4696686 - DNA, 25 bp, Homo sapien
tcaccctccaagcatgctgggtgct

SEQ ID NO: 4696687 - DNA, 25 bp, Homo sapien
cgcacctggccgtcttaccaaaatt

SEQ ID NO: 4696688 - DNA, 25 bp, Homo sapien
aggccacctgcctggtcaccgggtt

SEQ ID NO: 4696689 - DNA, 25 bp, Homo sapien
ggctggcagcatcgcccccaagaaa

SEQ ID NO: 4696690 - DNA, 25 bp, Homo sapien
ctggagttcagggacctgatctcgg

SEQ ID NO: 4696691 - DNA, 25 bp, Homo sapien
ggctggagttcagggacctgatctc

SEQ ID NO: 4696692 - DNA, 25 bp, Homo sapien
ggagttcagggacctgatctcggct

SEQ ID NO: 4696693 - DNA, 25 bp, Homo sapien
caggctggagttcagggacctgatc

SEQ ID NO: 4696694 - DNA, 25 bp, Homo sapien
tctgctgtcgaactgctgtgtgacc

SEQ ID NO: 4696695 - DNA, 25 bp, Homo sapien
tgtttggcacctggaatctcatgaa

SEQ ID NO: 4696696 - DNA, 25 bp, Homo sapien
gagaggttaatcaactcacccagga

SEQ ID NO: 4696697 - DNA, 25 bp, Homo sapien
catggacgtggcaaagccgattcaa

SEQ ID NO: 4696698 - DNA, 25 bp, Homo sapien
cggcgcccccggcagcgctctaggc

SEQ ID NO: 4696699 - DNA, 25 bp, Homo sapien
ctgggtcgttatgccgcgcgcagac

SEQ ID NO: 4696700 - DNA, 25 bp, Homo sapien
gccgcgccgcgacctgggtcgttat

SEQ ID NO: 4696701 - DNA, 25 bp, Homo sapien
gccaggaatagagcggcgcgcaggt

SEQ ID NO: 4696702 - DNA, 25 bp, Homo sapien
agacgccgctgccaggaatagagcg

SEQ ID NO: 4696703 - DNA, 25 bp, Homo sapien
cccggatgttctgcggctcagcgca

SEQ ID NO: 4696704 - DNA, 25 bp, Homo sapien
gatgttctgcggctcagcgcaggcc

SEQ ID NO: 4696705 - DNA, 25 bp, Homo sapien
tagcggagcccggatgttctgcggc

SEQ ID NO: 4696706 - DNA, 25 bp, Homo sapien
aggcccacgtgtcgtcgcgcccagg

SEQ ID NO: 4696707 - DNA, 25 bp, Homo sapien
ttctggatcctagctcctgtgccac

SEQ ID NO: 4696708 - DNA, 25 bp, Homo sapien
ccagaagcaccgctgagcctctggg

SEQ ID NO: 4696709 - DNA, 25 bp, Homo sapien
ttcagactccgggatcactggaact

SEQ ID NO: 4696710 - DNA, 25 bp, Homo sapien
gacgctatagtctccgaattcccag

SEQ ID NO: 4696711 - DNA, 25 bp, Homo sapien
gggtattgagcatgcgcacggcatc

SEQ ID NO: 4696712 - DNA, 25 bp, Homo sapien
gtctgcagggtattgagcatgcgca

SEQ ID NO: 4696713 - DNA, 25 bp, Homo sapien
tgtgtctgagggtcaccccgctggc

SEQ ID NO: 4696714 - DNA, 25 bp, Homo sapien
gtctgagggtcaccccgctggcgct

SEQ ID NO: 4696715 - DNA, 25 bp, Homo sapien
atgttcagccggtccaagtcctcca

SEQ ID NO: 4696716 - DNA, 25 bp, Homo sapien
tccccttcgtcccagtgacgtggat

SEQ ID NO: 4696717 - DNA, 25 bp, Homo sapien
cccttcgtcccagtgacgtggatga

SEQ ID NO: 4696718 - DNA, 25 bp, Homo sapien
tggatgatgttcagccggtccaagt

SEQ ID NO: 4696719 - DNA, 25 bp, Homo sapien
catagcttcggaggatacattccgt

SEQ ID NO: 4696720 - DNA, 25 bp, Homo sapien
taaagaatcccgtcttcaggccata

SEQ ID NO: 4696721 - DNA, 25 bp, Homo sapien
gatacattccgtgaaggcacaggtg

SEQ ID NO: 4696722 - DNA, 25 bp, Homo sapien
cgtcttcaggccatagcttcggagg

SEQ ID NO: 4696723 - DNA, 25 bp, Homo sapien
ggggtgaccctggtcctgaagcact

SEQ ID NO: 4696724 - DNA, 25 bp, Homo sapien
ggtgaccctggtcctgaagcactgg

SEQ ID NO: 4696725 - DNA, 25 bp, Homo sapien
tcctgaagcactggctggttccata

SEQ ID NO: 4696726 - DNA, 25 bp, Homo sapien
ggtcctgaagcactggctggttcca

SEQ ID NO: 4696727 - DNA, 25 bp, Homo sapien
ctgggcagagagacatgcagctgac

SEQ ID NO: 4696728 - DNA, 25 bp, Homo sapien
cttatcgtttaagcccttgcaaggc

SEQ ID NO: 4696729 - DNA, 25 bp, Homo sapien
taggagaccttaacgtggatggcac

SEQ ID NO: 4696730 - DNA, 25 bp, Homo sapien
tgcgtggcacaggaagagtgatccc

SEQ ID NO: 4696731 - DNA, 25 bp, Homo sapien
tgggcttagaagacatgcgtggcac

SEQ ID NO: 4696732 - DNA, 25 bp, Homo sapien
tggctcaccctattcaccacgttgg

SEQ ID NO: 4696733 - DNA, 25 bp, Homo sapien
aaccaatgttcaagctgcagccctg

SEQ ID NO: 4696734 - DNA, 25 bp, Homo sapien
cacgttggtctcaactaagacagcc

SEQ ID NO: 4696735 - DNA, 25 bp, Homo sapien
tgtccctcggtttgttcctggtgcc

SEQ ID NO: 4696736 - DNA, 25 bp, Homo sapien
cattgatgcggatccgctcccgaac

SEQ ID NO: 4696737 - DNA, 25 bp, Homo sapien
gtagaggcgccagaagtacttggtg

SEQ ID NO: 4696738 - DNA, 25 bp, Homo sapien
tcctccagccggtggtagaggcgcc

SEQ ID NO: 4696739 - DNA, 25 bp, Homo sapien
gtgaagagctcaggactgatgggct

SEQ ID NO: 4696740 - DNA, 25 bp, Homo sapien
gaagtaggggggcatggagacacag

SEQ ID NO: 4696741 - DNA, 25 bp, Homo sapien
tcaggaagcggaagtaggggggcat

SEQ ID NO: 4696742 - DNA, 25 bp, Homo sapien
gaagcggaagtaggggggcatggag

SEQ ID NO: 4696743 - DNA, 25 bp, Homo sapien
taggggggcatggagacacagctgc

SEQ ID NO: 4696744 - DNA, 25 bp, Homo sapien
cttctcttggaggaagacgtggaag

SEQ ID NO: 4696745 - DNA, 25 bp, Homo sapien
aggaagacgtggaaggccatgagtg

SEQ ID NO: 4696746 - DNA, 25 bp, Homo sapien
tctcttggaggaagacgtggaaggc

SEQ ID NO: 4696747 - DNA, 25 bp, Homo sapien
tcttggaggaagacgtggaaggcca

SEQ ID NO: 4696748 - DNA, 25 bp, Homo sapien
aaggcctcagatgcagggttctagg

SEQ ID NO: 4696749 - DNA, 25 bp, Homo sapien
tgaggttcccgttcccaaggcctca

SEQ ID NO: 4696750 - DNA, 25 bp, Homo sapien
tcccaaggcctcagatgcagggttc

SEQ ID NO: 4696751 - DNA, 25 bp, Homo sapien
agggttctagggagagggcacacac

SEQ ID NO: 4696752 - DNA, 25 bp, Homo sapien
tgatgatgttggtgcagtcataagc

SEQ ID NO: 4696753 - DNA, 25 bp, Homo sapien
tgatgttggtgcagtcataagcccc

SEQ ID NO: 4696754 - DNA, 25 bp, Homo sapien
ttggtgcagtcataagccccgccaa

SEQ ID NO: 4696755 - DNA, 25 bp, Homo sapien
gtgcagtcataagccccgccaatgc

SEQ ID NO: 4696756 - DNA, 25 bp, Homo sapien
gtgaggctgtgctcctggctgccac

SEQ ID NO: 4696757 - DNA, 25 bp, Homo sapien
tgccctgagccaccaggcggcaggt

SEQ ID NO: 4696758 - DNA, 25 bp, Homo sapien
aaaaggccatgaggccctgccctga

SEQ ID NO: 4696759 - DNA, 25 bp, Homo sapien
tgcaggggaggaaaaggccatgagg

SEQ ID NO: 4696760 - DNA, 25 bp, Homo sapien
tgccaagagaggagactccgcacac

SEQ ID NO: 4696761 - DNA, 25 bp, Homo sapien
gaggctggtgtggtcgatgccaaga

SEQ ID NO: 4696762 - DNA, 25 bp, Homo sapien
aggagactccgcacaccacaggctt

SEQ ID NO: 4696763 - DNA, 25 bp, Homo sapien
tggtcgatgccaagagaggagactc

SEQ ID NO: 4696764 - DNA, 25 bp, Homo sapien
agccaggatgaaaacgtagactccc

SEQ ID NO: 4696765 - DNA, 25 bp, Homo sapien
caggatgaaaacgtagactcccagg

SEQ ID NO: 4696766 - DNA, 25 bp, Homo sapien
tgaaaacgtagactcccaggccttc

SEQ ID NO: 4696767 - DNA, 25 bp, Homo sapien
gatgaaaacgtagactcccaggcct

SEQ ID NO: 4696768 - DNA, 25 bp, Homo sapien
gcatcctccacactcctatctctgg

SEQ ID NO: 4696769 - DNA, 25 bp, Homo sapien
agagaaagggctacctagcatcctc

SEQ ID NO: 4696770 - DNA, 25 bp, Homo sapien
tcctccacactcctatctctggccc

SEQ ID NO: 4696771 - DNA, 25 bp, Homo sapien
gagagagaaagggctacctagcatc

SEQ ID NO: 4696772 - DNA, 25 bp, Homo sapien
caggggaccttcaggttggagcaca

SEQ ID NO: 4696773 - DNA, 25 bp, Homo sapien
ccaggggaccttcaggttggagcac

SEQ ID NO: 4696774 - DNA, 25 bp, Homo sapien
gccaggggaccttcaggttggagca

SEQ ID NO: 4696775 - DNA, 25 bp, Homo sapien
aggggaccttcaggttggagcacag

SEQ ID NO: 4696776 - DNA, 25 bp, Homo sapien
tcgagggcctccagcatcggacaca

SEQ ID NO: 4696777 - DNA, 25 bp, Homo sapien
aaggcggcgttggaccgctggtgct

SEQ ID NO: 4696778 - DNA, 25 bp, Homo sapien
cagctgcaaggccaaggcggcgttg

SEQ ID NO: 4696779 - DNA, 25 bp, Homo sapien
tccagcatcggacacaggtatagag

SEQ ID NO: 4696780 - DNA, 25 bp, Homo sapien
agtgtgtccgggaccctcctaggca

SEQ ID NO: 4696781 - DNA, 25 bp, Homo sapien
ggtgtgtgagaccaagtgtgtccgg

SEQ ID NO: 4696782 - DNA, 25 bp, Homo sapien
tgagaccaagtgtgtccgggaccct

SEQ ID NO: 4696783 - DNA, 25 bp, Homo sapien
gtgtgtccgggaccctcctaggcag

SEQ ID NO: 4696784 - DNA, 25 bp, Homo sapien
ctggcctggatgcctttggctcccc

SEQ ID NO: 4696785 - DNA, 25 bp, Homo sapien
cgagccgcatgtgggatgtgggctg

SEQ ID NO: 4696786 - DNA, 25 bp, Homo sapien
tgcgcaccgtccaggtaccaggtga

SEQ ID NO: 4696787 - DNA, 25 bp, Homo sapien
tggcggaaccagcgcacgcaggcct

SEQ ID NO: 4696788 - DNA, 25 bp, Homo sapien
ctgctggcggtgtgcgcaccgtcca

SEQ ID NO: 4696789 - DNA, 25 bp, Homo sapien
gccctgcagcgcctggcggaaccag

SEQ ID NO: 4696790 - DNA, 25 bp, Homo sapien
ttgaagagcaagactcgaacctcgg

SEQ ID NO: 4696791 - DNA, 25 bp, Homo sapien
tcccggtccccggtagcattgaaga

SEQ ID NO: 4696792 - DNA, 25 bp, Homo sapien
gcattgaagagcaagactcgaacct

SEQ ID NO: 4696793 - DNA, 25 bp, Homo sapien
gtagcattgaagagcaagactcgaa

SEQ ID NO: 4696794 - DNA, 25 bp, Homo sapien
tgcctgtggatgacacctctgtcag

SEQ ID NO: 4696795 - DNA, 25 bp, Homo sapien
cctctgtcaggttagggcagaagac

SEQ ID NO: 4696796 - DNA, 25 bp, Homo sapien
cagaagacggcatagtcaaactggc

SEQ ID NO: 4696797 - DNA, 25 bp, Homo sapien
tagggcagaagacggcatagtcaaa

SEQ ID NO: 4696798 - DNA, 25 bp, Homo sapien
cctgctcttcgtccaggtggttcca

SEQ ID NO: 4696799 - DNA, 25 bp, Homo sapien
ggtgcaggctgccagtgactagcac

SEQ ID NO: 4696800 - DNA, 25 bp, Homo sapien
gggtctcggccttggctgatccatt

SEQ ID NO: 4696801 - DNA, 25 bp, Homo sapien
gctgatccattgcaaggcatgtgaa

SEQ ID NO: 4696802 - DNA, 25 bp, Homo sapien
tggcagcagcctcacggagtatgct

SEQ ID NO: 4696803 - DNA, 25 bp, Homo sapien
taggccagtctagacagaaccagga

SEQ ID NO: 4696804 - DNA, 25 bp, Homo sapien
gcagcgcacacaataagctgggcct

SEQ ID NO: 4696805 - DNA, 25 bp, Homo sapien
ggcacagagccttaaaaaagacatc

SEQ ID NO: 4696806 - DNA, 25 bp, Homo sapien
caaaaggcacctagtatgtaagttc

SEQ ID NO: 4696807 - DNA, 25 bp, Homo sapien
aaaggctttaattcactccagccac

SEQ ID NO: 4696808 - DNA, 25 bp, Homo sapien
tccagccaccctctgtcccgcagtg

SEQ ID NO: 4696809 - DNA, 25 bp, Homo sapien
aaggctttaattcactccagccacc

SEQ ID NO: 4696810 - DNA, 25 bp, Homo sapien
agccaccctctgtcccgcagtgtcc

SEQ ID NO: 4696811 - DNA, 25 bp, Homo sapien
tccatggcttcttgaaaccagccac

SEQ ID NO: 4696812 - DNA, 25 bp, Homo sapien
gggtctgcagaaagcactgcctggc

SEQ ID NO: 4696813 - DNA, 25 bp, Homo sapien
aggcttcagtctggtcttcttctca

SEQ ID NO: 4696814 - DNA, 25 bp, Homo sapien
cctggcatatggtgaacaggcttca

SEQ ID NO: 4696815 - DNA, 25 bp, Homo sapien
ggagtagccaagctgcttgtcctgg

SEQ ID NO: 4696816 - DNA, 25 bp, Homo sapien
agaacagtgggcgttgggagcctag

SEQ ID NO: 4696817 - DNA, 25 bp, Homo sapien
gaacttgcctaactaactggcaggg

SEQ ID NO: 4696818 - DNA, 25 bp, Homo sapien
ggagacaggagcctagcggagccca

SEQ ID NO: 4696819 - DNA, 25 bp, Homo sapien
caggaagggagaacttgaaacagat

SEQ ID NO: 4696820 - DNA, 25 bp, Homo sapien
tggatccagcactggtgaactgagc

SEQ ID NO: 4696821 - DNA, 25 bp, Homo sapien
cagcactggtgaactgagctgggca

SEQ ID NO: 4696822 - DNA, 25 bp, Homo sapien
agggagaacttgaaacagattcagg

SEQ ID NO: 4696823 - DNA, 25 bp, Homo sapien
cttgccacgctgttgtaaaaaccca

SEQ ID NO: 4696824 - DNA, 25 bp, Homo sapien
gctgcccaggagacagaccacttgc

SEQ ID NO: 4696825 - DNA, 25 bp, Homo sapien
gagcactggtgtgaactcaccctgg

SEQ ID NO: 4696826 - DNA, 25 bp, Homo sapien
ccacagaaccttcaacccagtgggt

SEQ ID NO: 4696827 - DNA, 25 bp, Homo sapien
gcatggcatagccccggccccccgc

SEQ ID NO: 4696828 - DNA, 25 bp, Homo sapien
agcagcatggcatagccccggcccc

SEQ ID NO: 4696829 - DNA, 25 bp, Homo sapien
cagcatggcatagccccggcccccc

SEQ ID NO: 4696830 - DNA, 25 bp, Homo sapien
ccagcagcatggcatagccccggcc

SEQ ID NO: 4696831 - DNA, 25 bp, Homo sapien
tgataaccccatgacacagaatcgg

SEQ ID NO: 4696832 - DNA, 25 bp, Homo sapien
ggtggacagtcctagcaaccatggc

SEQ ID NO: 4696833 - DNA, 25 bp, Homo sapien
cagaatcggatgtcagaggctcaag

SEQ ID NO: 4696834 - DNA, 25 bp, Homo sapien
tcagagaagtcgagggtccatggct

SEQ ID NO: 4696835 - DNA, 25 bp, Homo sapien
gctgacctggctcatagctccaaag

SEQ ID NO: 4696836 - DNA, 25 bp, Homo sapien
tctctggtcataggaagctagggaa

SEQ ID NO: 4696837 - DNA, 25 bp, Homo sapien
gctccaaagtgttcacaagggtgag

SEQ ID NO: 4696838 - DNA, 25 bp, Homo sapien
ggcggacaaaggacacacactcctg

SEQ ID NO: 4696839 - DNA, 25 bp, Homo sapien
gtatggtcaccagtgtaatctcaaa

SEQ ID NO: 4696840 - DNA, 25 bp, Homo sapien
acccaggaatctaaccacccgcaca

SEQ ID NO: 4696841 - DNA, 25 bp, Homo sapien
taaccacccgcacatccatgtagta

SEQ ID NO: 4696842 - DNA, 25 bp, Homo sapien
ccatgtagtatggtcaccagtgtaa

SEQ ID NO: 4696843 - DNA, 25 bp, Homo sapien
agggtgacccgcgcttcagcttcct

SEQ ID NO: 4696844 - DNA, 25 bp, Homo sapien
tgtgtgagcctgctgtccccaagcc

SEQ ID NO: 4696845 - DNA, 25 bp, Homo sapien
ctcagctgcacggtagccctgcgtc

SEQ ID NO: 4696846 - DNA, 25 bp, Homo sapien
agggaggcaccgtggaactcatcca

SEQ ID NO: 4696847 - DNA, 25 bp, Homo sapien
ctccagttagacagctgccacctgg

SEQ ID NO: 4696848 - DNA, 25 bp, Homo sapien
gtccccatccgtctccgagttcctg

SEQ ID NO: 4696849 - DNA, 25 bp, Homo sapien
ctgctccagttagacagctgccacc

SEQ ID NO: 4696850 - DNA, 25 bp, Homo sapien
agttcctgctccagttagacagctg

SEQ ID NO: 4696851 - DNA, 25 bp, Homo sapien
tcctggaacttcctctccgcctttc

SEQ ID NO: 4696852 - DNA, 25 bp, Homo sapien
tggcatgcctgtcacccctcgggcc

SEQ ID NO: 4696853 - DNA, 25 bp, Homo sapien
gaggagatgagactcccagagtcag

SEQ ID NO: 4696854 - DNA, 25 bp, Homo sapien
ggagatgagactcccagagtcagga

SEQ ID NO: 4696855 - DNA, 25 bp, Homo sapien
ggtctcgaacttctggcctcctgtg

SEQ ID NO: 4696856 - DNA, 25 bp, Homo sapien
tctcgaacttctggcctcctgtgat

SEQ ID NO: 4696857 - DNA, 25 bp, Homo sapien
tcgaacttctggcctcctgtgatct

SEQ ID NO: 4696858 - DNA, 25 bp, Homo sapien
cgaacttctggcctcctgtgatctg

SEQ ID NO: 4696859 - DNA, 25 bp, Homo sapien
tttcttgttttagagacgaggtctc

SEQ ID NO: 4696860 - DNA, 25 bp, Homo sapien
gccactgcaactggccttctttttc

SEQ ID NO: 4696861 - DNA, 25 bp, Homo sapien
ctgcaactggccttctttttcttgt

SEQ ID NO: 4696862 - DNA, 25 bp, Homo sapien
cactgcaactggccttctttttctt

SEQ ID NO: 4696863 - DNA, 25 bp, Homo sapien
gagaacacctcaacctcttcgctgt

SEQ ID NO: 4696864 - DNA, 25 bp, Homo sapien
attactgggtcaaaatgaatgaagt

SEQ ID NO: 4696865 - DNA, 25 bp, Homo sapien
aagtttcaatacatgttgccaaccc

SEQ ID NO: 4696866 - DNA, 25 bp, Homo sapien
tcaccactgatttacgagaacacct

SEQ ID NO: 4696867 - DNA, 25 bp, Homo sapien
atcctgagggtcctgccgggccact

SEQ ID NO: 4696868 - DNA, 25 bp, Homo sapien
acttggaaggcgtggccggccacaa

SEQ ID NO: 4696869 - DNA, 25 bp, Homo sapien
gccactcggccgggtatggctctcg

SEQ ID NO: 4696870 - DNA, 25 bp, Homo sapien
caaggaggcgcacatcctgagggtc

SEQ ID NO: 4696871 - DNA, 25 bp, Homo sapien
cccagctacttgggaggctgaggca

SEQ ID NO: 4696872 - DNA, 25 bp, Homo sapien
ggacaattgcttgaacccaggaggc

SEQ ID NO: 4696873 - DNA, 25 bp, Homo sapien
gggcatggtggcgcacgcctgtagt

SEQ ID NO: 4696874 - DNA, 25 bp, Homo sapien
tccatctcaaaaatatatatataca

SEQ ID NO: 4696875 - DNA, 25 bp, Homo sapien
gtcactccagcatgaacttatctga

SEQ ID NO: 4696876 - DNA, 25 bp, Homo sapien
tggccactgtagtgtgagcacagct

SEQ ID NO: 4696877 - DNA, 25 bp, Homo sapien
ccatctcaatcacacatggctggtg

SEQ ID NO: 4696878 - DNA, 25 bp, Homo sapien
tatttacacgtacagcccatctcaa

SEQ ID NO: 4696879 - DNA, 25 bp, Homo sapien
ttcacggcatttgggggctcacccc

SEQ ID NO: 4696880 - DNA, 25 bp, Homo sapien
tggtgccacacttctcaggctggcc

SEQ ID NO: 4696881 - DNA, 25 bp, Homo sapien
cagccgctcctaccaccttttggtg

SEQ ID NO: 4696882 - DNA, 25 bp, Homo sapien
tgccggggccgtatcaggaacgtac

SEQ ID NO: 4696883 - DNA, 25 bp, Homo sapien
cttcatcactgagaaggcggtcttc

SEQ ID NO: 4696884 - DNA, 25 bp, Homo sapien
ccggctagatgagtgtcagatgtac

SEQ ID NO: 4696885 - DNA, 25 bp, Homo sapien
taccactactttgagaagggccggc

SEQ ID NO: 4696886 - DNA, 25 bp, Homo sapien
gactgagtagcttccgtcgtcctgc

SEQ ID NO: 4696887 - DNA, 25 bp, Homo sapien
tgatcctcgcgctggagctgtgtga

SEQ ID NO: 4696888 - DNA, 25 bp, Homo sapien
tatgggatggtcagcgacagctact

SEQ ID NO: 4696889 - DNA, 25 bp, Homo sapien
gttcaccatgatcctcgcgctggag

SEQ ID NO: 4696890 - DNA, 25 bp, Homo sapien
gctgtgtgaggagatcgtggtctat

SEQ ID NO: 4696891 - DNA, 25 bp, Homo sapien
tgcgaccagatcttccaggacgaga

SEQ ID NO: 4696892 - DNA, 25 bp, Homo sapien
tgtcacacagatctagaatcccaga

SEQ ID NO: 4696893 - DNA, 25 bp, Homo sapien
cctgatgggaagcactagccagtgt

SEQ ID NO: 4696894 - DNA, 25 bp, Homo sapien
ttcacggagcgcatgatggcctact

SEQ ID NO: 4696895 - DNA, 25 bp, Homo sapien
agtaggtgtggccgccgagcacccc

SEQ ID NO: 4696896 - DNA, 25 bp, Homo sapien
tgtgcagtaggtgtggccgccgagc

SEQ ID NO: 4696897 - DNA, 25 bp, Homo sapien
cgccaccggttcttgcctgtctcgt

SEQ ID NO: 4696898 - DNA, 25 bp, Homo sapien
cagtgtgcagtaggtgtggccgccg

SEQ ID NO: 4696899 - DNA, 25 bp, Homo sapien
cgaccaaggtcttggcttcacagac

SEQ ID NO: 4696900 - DNA, 25 bp, Homo sapien
cgtggtccgaccaaggtcttggctt

SEQ ID NO: 4696901 - DNA, 25 bp, Homo sapien
tccgtggtccgaccaaggtcttggc

SEQ ID NO: 4696902 - DNA, 25 bp, Homo sapien
ggtccgaccaaggtcttggcttcac

SEQ ID NO: 4696903 - DNA, 25 bp, Homo sapien
taactaataccgtaaccgcgcagtc

SEQ ID NO: 4696904 - DNA, 25 bp, Homo sapien
gattccggagcctgtattcttaacc

SEQ ID NO: 4696905 - DNA, 25 bp, Homo sapien
cctggcctgatactctagggatgca

SEQ ID NO: 4696906 - DNA, 25 bp, Homo sapien
caaccatggcttttggattccggag

SEQ ID NO: 4696907 - DNA, 25 bp, Homo sapien
ctgagcctcacttttcccatctgaa

SEQ ID NO: 4696908 - DNA, 25 bp, Homo sapien
ctttctctgagcctcacttttccca

SEQ ID NO: 4696909 - DNA, 25 bp, Homo sapien
ctctgagcctcacttttcccatctg

SEQ ID NO: 4696910 - DNA, 25 bp, Homo sapien
gagcctcacttttcccatctgaaaa

SEQ ID NO: 4696911 - DNA, 25 bp, Homo sapien
tcgttacctgccagcctcatacgga

SEQ ID NO: 4696912 - DNA, 25 bp, Homo sapien
tcagggccaagttctaaccactgct

SEQ ID NO: 4696913 - DNA, 25 bp, Homo sapien
tcatacggagcaaaagctctgtcct

SEQ ID NO: 4696914 - DNA, 25 bp, Homo sapien
gaaaactgagaagatcgttacctgc

SEQ ID NO: 4696915 - DNA, 25 bp, Homo sapien
ttatcatattgactttagggtcaaa

SEQ ID NO: 4696916 - DNA, 25 bp, Homo sapien
gttactttatcatattgactttagg

SEQ ID NO: 4696917 - DNA, 25 bp, Homo sapien
cacaggcacaatcatcaccttcatc

SEQ ID NO: 4696918 - DNA, 25 bp, Homo sapien
tccagggttctcccggtcttggcca

SEQ ID NO: 4696919 - DNA, 25 bp, Homo sapien
gttaggggaactcaggctagtgtca

SEQ ID NO: 4696920 - DNA, 25 bp, Homo sapien
caggctagtgtcagcgtcttggttt

SEQ ID NO: 4696921 - DNA, 25 bp, Homo sapien
aactcaggctagtgtcagcgtcttg

SEQ ID NO: 4696922 - DNA, 25 bp, Homo sapien
gggaactcaggctagtgtcagcgtc

SEQ ID NO: 4696923 - DNA, 25 bp, Homo sapien
aataaaggtctacaatatctttagg

SEQ ID NO: 4696924 - DNA, 25 bp, Homo sapien
aggatggagggtgtccatgttctcc

SEQ ID NO: 4696925 - DNA, 25 bp, Homo sapien
tttaccgcacaaactgaccacatgg

SEQ ID NO: 4696926 - DNA, 25 bp, Homo sapien
catggcatgtctatcaggatggagg

SEQ ID NO: 4696927 - DNA, 25 bp, Homo sapien
cacagtgtccagacgaattggcccc

SEQ ID NO: 4696928 - DNA, 25 bp, Homo sapien
cagagtgttcgctcgcgctggagaa

SEQ ID NO: 4696929 - DNA, 25 bp, Homo sapien
aatgaatgttagaaggtgcctgccg

SEQ ID NO: 4696930 - DNA, 25 bp, Homo sapien
taaaaaggaagctgaccgcacagtg

SEQ ID NO: 4696931 - DNA, 25 bp, Homo sapien
cccgctggtgagagttgggcttctt

SEQ ID NO: 4696932 - DNA, 25 bp, Homo sapien
tttcttcttgagttcacggttcaat

SEQ ID NO: 4696933 - DNA, 25 bp, Homo sapien
ccctggcattgggaacagagcattt

SEQ ID NO: 4696934 - DNA, 25 bp, Homo sapien
tgagttcacggttcaatattgcctc

SEQ ID NO: 4696935 - DNA, 25 bp, Homo sapien
tgaaaggcgggaaggcttattccaa

SEQ ID NO: 4696936 - DNA, 25 bp, Homo sapien
tacagaagtccacagagcaaaaggg

SEQ ID NO: 4696937 - DNA, 25 bp, Homo sapien
ttctgccacaagcaagaggcactca

SEQ ID NO: 4696938 - DNA, 25 bp, Homo sapien
catgggacaggcacaagggaagcct

SEQ ID NO: 4696939 - DNA, 25 bp, Homo sapien
gctaggaccaccttttcttgattat

SEQ ID NO: 4696940 - DNA, 25 bp, Homo sapien
tttgtgtctgtcctaatgctaggac

SEQ ID NO: 4696941 - DNA, 25 bp, Homo sapien
tcctaatgctaggaccaccttttct

SEQ ID NO: 4696942 - DNA, 25 bp, Homo sapien
tgtctgtcctaatgctaggaccacc

SEQ ID NO: 4696943 - DNA, 25 bp, Homo sapien
tgagcagcaggattcagacctagat

SEQ ID NO: 4696944 - DNA, 25 bp, Homo sapien
gagtggcttggcttccagaaacttc

SEQ ID NO: 4696945 - DNA, 25 bp, Homo sapien
gactctgggatcctttcacctaacc

SEQ ID NO: 4696946 - DNA, 25 bp, Homo sapien
caaggttgctgcttgaccggtgagc

SEQ ID NO: 4696947 - DNA, 25 bp, Homo sapien
cccttcgtgggcaggagtagtcctt

SEQ ID NO: 4696948 - DNA, 25 bp, Homo sapien
tagctcattccgcagactgtgggcc

SEQ ID NO: 4696949 - DNA, 25 bp, Homo sapien
atcaggctggcctcgtcggcttcca

SEQ ID NO: 4696950 - DNA, 25 bp, Homo sapien
caggcccgaggtgtcagtctgtgtc

SEQ ID NO: 4696951 - DNA, 25 bp, Homo sapien
tttacatgccggtgaggtccccggc

SEQ ID NO: 4696952 - DNA, 25 bp, Homo sapien
gagctgactgcggttcccttcgtga

SEQ ID NO: 4696953 - DNA, 25 bp, Homo sapien
gactcagggaactcgctcatggctt

SEQ ID NO: 4696954 - DNA, 25 bp, Homo sapien
gcccgcgaactggactggtggatct

SEQ ID NO: 4696955 - DNA, 25 bp, Homo sapien
agcctccgatttgttgggaccacag

SEQ ID NO: 4696956 - DNA, 25 bp, Homo sapien
attgcctaatgtcccctggcggggg

SEQ ID NO: 4696957 - DNA, 25 bp, Homo sapien
ttttgccagctgtcctacaaagaca

SEQ ID NO: 4696958 - DNA, 25 bp, Homo sapien
gcaagatcacaccagttgttttgcc

SEQ ID NO: 4696959 - DNA, 25 bp, Homo sapien
tatattcagacattgcctaatgtcc

SEQ ID NO: 4696960 - DNA, 25 bp, Homo sapien
tcccggttgacgtcgagcgtctgaa

SEQ ID NO: 4696961 - DNA, 25 bp, Homo sapien
agctcgccctcggtgcggtgcagtc

SEQ ID NO: 4696962 - DNA, 25 bp, Homo sapien
tctgaaagagtctccacaggcgcag

SEQ ID NO: 4696963 - DNA, 25 bp, Homo sapien
accgccaggtcgttgacacacaggc

SEQ ID NO: 4696964 - DNA, 25 bp, Homo sapien
ggctggctgccaacggtttctctgc

SEQ ID NO: 4696965 - DNA, 25 bp, Homo sapien
cacactggtttcatatgggccatag

SEQ ID NO: 4696966 - DNA, 25 bp, Homo sapien
caaagaaaatttccctggctggctg

SEQ ID NO: 4696967 - DNA, 25 bp, Homo sapien
ggactaacttgtgctcctttacagg

SEQ ID NO: 4696968 - DNA, 25 bp, Homo sapien
tttcaagtcaatagggattgcctca

SEQ ID NO: 4696969 - DNA, 25 bp, Homo sapien
tcttgaaacctatactttgggagca

SEQ ID NO: 4696970 - DNA, 25 bp, Homo sapien
gattgcctcatgtgcactgctcggg

SEQ ID NO: 4696971 - DNA, 25 bp, Homo sapien
gagccagggaccgattatgcaacaa

SEQ ID NO: 4696972 - DNA, 25 bp, Homo sapien
aaaaaattcatctagttgaagctcc

SEQ ID NO: 4696973 - DNA, 25 bp, Homo sapien
aaaaaaattcatctagttgaagctc

SEQ ID NO: 4696974 - DNA, 25 bp, Homo sapien
aagtctgtactataaaccccatggg

SEQ ID NO: 4696975 - DNA, 25 bp, Homo sapien
tcacaatagaaagggcggatgacca

SEQ ID NO: 4696976 - DNA, 25 bp, Homo sapien
ccccatgggttattgtctcagctaa

SEQ ID NO: 4696977 - DNA, 25 bp, Homo sapien
caatcagcgtaacatttccgaggaa

SEQ ID NO: 4696978 - DNA, 25 bp, Homo sapien
tcacattagactccagccaacaggg

SEQ ID NO: 4696979 - DNA, 25 bp, Homo sapien
cactgaaagcttcaggcaccggcag

SEQ ID NO: 4696980 - DNA, 25 bp, Homo sapien
tgtacttaggaaagacgatccacgg

SEQ ID NO: 4696981 - DNA, 25 bp, Homo sapien
tgtgcaccaccagggccttaaaatg

SEQ ID NO: 4696982 - DNA, 25 bp, Homo sapien
gctgcttgctctgctttgcacaagg

SEQ ID NO: 4696983 - DNA, 25 bp, Homo sapien
agctgcttgctctgctttgcacaag

SEQ ID NO: 4696984 - DNA, 25 bp, Homo sapien
ctgcttgctctgctttgcacaagga

SEQ ID NO: 4696985 - DNA, 25 bp, Homo sapien
cagctgcttgctctgctttgcacaa

SEQ ID NO: 4696986 - DNA, 25 bp, Homo sapien
tacacattggttcagcccggtaagg

SEQ ID NO: 4696987 - DNA, 25 bp, Homo sapien
gaccaaggcccatgatacagcccca

SEQ ID NO: 4696988 - DNA, 25 bp, Homo sapien
caatacatgtaaggtgtacacattg

SEQ ID NO: 4696989 - DNA, 25 bp, Homo sapien
ctgggtgacaggttgatttatacat

SEQ ID NO: 4696990 - DNA, 25 bp, Homo sapien
tctagacaatagaggctgatggtgt

SEQ ID NO: 4696991 - DNA, 25 bp, Homo sapien
aggttaatacctgcagaaataacca

SEQ ID NO: 4696992 - DNA, 25 bp, Homo sapien
tgttctaagaatctagacaatagag

SEQ ID NO: 4696993 - DNA, 25 bp, Homo sapien
gtgtcaatgaaaagaatcgaattct

SEQ ID NO: 4696994 - DNA, 25 bp, Homo sapien
ctctgcccggcccaatatatatttt

SEQ ID NO: 4696995 - DNA, 25 bp, Homo sapien
gatagactgccaagtgtaaccctct

SEQ ID NO: 4696996 - DNA, 25 bp, Homo sapien
catgtagctttcttgggtaggatga

SEQ ID NO: 4696997 - DNA, 25 bp, Homo sapien
gatgaatcacccatatccaaggata

SEQ ID NO: 4696998 - DNA, 25 bp, Homo sapien
ggatgtgaccacagtaccaacgctc

SEQ ID NO: 4696999 - DNA, 25 bp, Homo sapien
aaaggaaaacgcgacagccaagcag

SEQ ID NO: 4697000 - DNA, 25 bp, Homo sapien
gcaagcaacttcgagctcccagtta

SEQ ID NO: 4697001 - DNA, 25 bp, Homo sapien
aaatgtgctagcactgctgtcgtgc

SEQ ID NO: 4697002 - DNA, 25 bp, Homo sapien
ccaaacgcctctgatggcgactgtt

SEQ ID NO: 4697003 - DNA, 25 bp, Homo sapien
ctccaaacgcctctgatggcgactg

SEQ ID NO: 4697004 - DNA, 25 bp, Homo sapien
tctcctccaaacgcctctgatggcg

SEQ ID NO: 4697005 - DNA, 25 bp, Homo sapien
tcctccaaacgcctctgatggcgac

SEQ ID NO: 4697006 - DNA, 25 bp, Homo sapien
gccctggggaaaaagctagctagga

SEQ ID NO: 4697007 - DNA, 25 bp, Homo sapien
aaagcttgccatctggtctctccag

SEQ ID NO: 4697008 - DNA, 25 bp, Homo sapien
aaagctagctaggaaatgccacagc

SEQ ID NO: 4697009 - DNA, 25 bp, Homo sapien
gggtgcctctgacttcacgatcgtc

SEQ ID NO: 4697010 - DNA, 25 bp, Homo sapien
ggcacctcccactccagagtaatgg

SEQ ID NO: 4697011 - DNA, 25 bp, Homo sapien
gacagcccctcaggatttgaaagct

SEQ ID NO: 4697012 - DNA, 25 bp, Homo sapien
tctgtgcttccgagaagacagcccc

SEQ ID NO: 4697013 - DNA, 25 bp, Homo sapien
tttgaaagcttgaatgccgctgagg

SEQ ID NO: 4697014 - DNA, 25 bp, Homo sapien
taaatcatccatcctactgagtttc

SEQ ID NO: 4697015 - DNA, 25 bp, Homo sapien
catcctactgagtttcacaggtaac

SEQ ID NO: 4697016 - DNA, 25 bp, Homo sapien
gaatgtcttcattggataaacttca

SEQ ID NO: 4697017 - DNA, 25 bp, Homo sapien
ggtaactcaagactccatgttcata

SEQ ID NO: 4697018 - DNA, 25 bp, Homo sapien
gaaggtggcatcaggttgctcaagt

SEQ ID NO: 4697019 - DNA, 25 bp, Homo sapien
tcccgggaaacttgcataagacaag

SEQ ID NO: 4697020 - DNA, 25 bp, Homo sapien
tgtcattggctgcttaagccctgcc

SEQ ID NO: 4697021 - DNA, 25 bp, Homo sapien
caagttccctaaatgctgccggtcc

SEQ ID NO: 4697022 - DNA, 25 bp, Homo sapien
cagggagccccttcgactcaaagta

SEQ ID NO: 4697023 - DNA, 25 bp, Homo sapien
agcttgaaaatggacttcagctcgg

SEQ ID NO: 4697024 - DNA, 25 bp, Homo sapien
tgggcttccccgatgaccggcacat

SEQ ID NO: 4697025 - DNA, 25 bp, Homo sapien
caaagtactggaactcggtctgggc

SEQ ID NO: 4697026 - DNA, 25 bp, Homo sapien
cctgggaagtcacatgaaaaccggt

SEQ ID NO: 4697027 - DNA, 25 bp, Homo sapien
ctgtgacgtacacgtgccggccata

SEQ ID NO: 4697028 - DNA, 25 bp, Homo sapien
aactgattaaccgagaagccgaggt

SEQ ID NO: 4697029 - DNA, 25 bp, Homo sapien
tccacagcgatgtctgagagtcgag

SEQ ID NO: 4697030 - DNA, 25 bp, Homo sapien
tcttggagataatggacaaattctt

SEQ ID NO: 4697031 - DNA, 25 bp, Homo sapien
gctgcccatcaaggtccttatctcc

SEQ ID NO: 4697032 - DNA, 25 bp, Homo sapien
tggagataatggacaaattcttcaa

SEQ ID NO: 4697033 - DNA, 25 bp, Homo sapien
tgcccatcaaggtccttatctccag

SEQ ID NO: 4697034 - DNA, 25 bp, Homo sapien
gcctgctgttcagatatcttgactc

SEQ ID NO: 4697035 - DNA, 25 bp, Homo sapien
gcatgatctcctgcgcgtcaatgcg

SEQ ID NO: 4697036 - DNA, 25 bp, Homo sapien
ttgactcccaagtcccgcagggact

SEQ ID NO: 4697037 - DNA, 25 bp, Homo sapien
cagggactgcatgatctcctgcgcg

SEQ ID NO: 4697038 - DNA, 25 bp, Homo sapien
gtgacagggccccagaaatggcccg

SEQ ID NO: 4697039 - DNA, 25 bp, Homo sapien
taggtgacagggccccagaaatggc

SEQ ID NO: 4697040 - DNA, 25 bp, Homo sapien
cagggccccagaaatggcccgttcg

SEQ ID NO: 4697041 - DNA, 25 bp, Homo sapien
tgacagggccccagaaatggcccgt

SEQ ID NO: 4697042 - DNA, 25 bp, Homo sapien
ggtcatcgtgccgtttttatccatg

SEQ ID NO: 4697043 - DNA, 25 bp, Homo sapien
tccactcgttccagtcaatggtcat

SEQ ID NO: 4697044 - DNA, 25 bp, Homo sapien
ggaggtggtagtctctccactcgtt

SEQ ID NO: 4697045 - DNA, 25 bp, Homo sapien
tccagtcaatggtcatcgtgccgtt

SEQ ID NO: 4697046 - DNA, 25 bp, Homo sapien
gccgtgcaggttctggatacggccc

SEQ ID NO: 4697047 - DNA, 25 bp, Homo sapien
gcaggttctggatacggcccctgcc

SEQ ID NO: 4697048 - DNA, 25 bp, Homo sapien
cactgtgaactcatccgggaccgtt

SEQ ID NO: 4697049 - DNA, 25 bp, Homo sapien
catccgggaccgttagattctcacc

SEQ ID NO: 4697050 - DNA, 25 bp, Homo sapien
tttgaggacgttgatgccattgccc

SEQ ID NO: 4697051 - DNA, 25 bp, Homo sapien
cccatgttgttgctgcgggaggcat

SEQ ID NO: 4697052 - DNA, 25 bp, Homo sapien
tctgagtgaagccaccaacgatgcc

SEQ ID NO: 4697053 - DNA, 25 bp, Homo sapien
cctccttctcgaatcatctgagtga

SEQ ID NO: 4697054 - DNA, 25 bp, Homo sapien
ctcagagtctcctggtcactaccaa

SEQ ID NO: 4697055 - DNA, 25 bp, Homo sapien
ctccattgggtagatgctgctctgg

SEQ ID NO: 4697056 - DNA, 25 bp, Homo sapien
gagtctcctggtcactaccaacaag

SEQ ID NO: 4697057 - DNA, 25 bp, Homo sapien
cacaagcctctcgtgaatcctcaga

SEQ ID NO: 4697058 - DNA, 25 bp, Homo sapien
ggagcagcgggacgcgtgagcacag

SEQ ID NO: 4697059 - DNA, 25 bp, Homo sapien
tgcacaacaggagcagcgggacgcg

SEQ ID NO: 4697060 - DNA, 25 bp, Homo sapien
acaacaggagcagcgggacgcgtga

SEQ ID NO: 4697061 - DNA, 25 bp, Homo sapien
caggagcagcgggacgcgtgagcac

SEQ ID NO: 4697062 - DNA, 25 bp, Homo sapien
gcagcgccatccgggtcttcaggac

SEQ ID NO: 4697063 - DNA, 25 bp, Homo sapien
tgagtactggcctgtcttccgcagc

SEQ ID NO: 4697064 - DNA, 25 bp, Homo sapien
gactgcaaggtcgatgccggcatag

SEQ ID NO: 4697065 - DNA, 25 bp, Homo sapien
tggcgcagtccagcattcctgagta

SEQ ID NO: 4697066 - DNA, 25 bp, Homo sapien
gccaggagcacaaacacgccggggt

SEQ ID NO: 4697067 - DNA, 25 bp, Homo sapien
tgcatccgggtcctgactagggcca

SEQ ID NO: 4697068 - DNA, 25 bp, Homo sapien
caggtactggacatggtgccacagg

SEQ ID NO: 4697069 - DNA, 25 bp, Homo sapien
agctggccacaggtactggacatgg

SEQ ID NO: 4697070 - DNA, 25 bp, Homo sapien
acctccggagcgccctcaatagagg

SEQ ID NO: 4697071 - DNA, 25 bp, Homo sapien
ttcaggttctcgtagaccacgtagc

SEQ ID NO: 4697072 - DNA, 25 bp, Homo sapien
tccgcaggatatgtttgaagaggct

SEQ ID NO: 4697073 - DNA, 25 bp, Homo sapien
tagaccacgtagctgatgctcacag

SEQ ID NO: 4697074 - DNA, 25 bp, Homo sapien
tgaaataaagaaaccctcgcagcgc

SEQ ID NO: 4697075 - DNA, 25 bp, Homo sapien
aagctcgctattggcaggcactgca

SEQ ID NO: 4697076 - DNA, 25 bp, Homo sapien
ccggcattgttaagcaagggcagca

SEQ ID NO: 4697077 - DNA, 25 bp, Homo sapien
taggttccaagcagtgacacaagtg

SEQ ID NO: 4697078 - DNA, 25 bp, Homo sapien
ggttcatgttgatgcctggagtttc

SEQ ID NO: 4697079 - DNA, 25 bp, Homo sapien
gagtagcactgcaacacatgcaggc

SEQ ID NO: 4697080 - DNA, 25 bp, Homo sapien
taattccctcccattcgttgctgag

SEQ ID NO: 4697081 - DNA, 25 bp, Homo sapien
ggattgcaggccggccttacctggt

SEQ ID NO: 4697082 - DNA, 25 bp, Homo sapien
catctcttcccctaaaggcaaccac

SEQ ID NO: 4697083 - DNA, 25 bp, Homo sapien
ctgatttctctcaccaaagactgga

SEQ ID NO: 4697084 - DNA, 25 bp, Homo sapien
gcaaccaccattctgatttctctca

SEQ ID NO: 4697085 - DNA, 25 bp, Homo sapien
tgaatgtgtcctgcttcttcccagg

SEQ ID NO: 4697086 - DNA, 25 bp, Homo sapien
ggtctacagttgtggcttcccggca

SEQ ID NO: 4697087 - DNA, 25 bp, Homo sapien
tagactccaggctgaaacaggaaga

SEQ ID NO: 4697088 - DNA, 25 bp, Homo sapien
ttcccggcatgaacgtgcagcaggc

SEQ ID NO: 4697089 - DNA, 25 bp, Homo sapien
ggcccagctgccttgagacacttta

SEQ ID NO: 4697090 - DNA, 25 bp, Homo sapien
cctgcagctctcacgggactggtta

SEQ ID NO: 4697091 - DNA, 25 bp, Homo sapien
caaaacccatatgggcgagtgtccc

SEQ ID NO: 4697092 - DNA, 25 bp, Homo sapien
cattttgatggagttagaatccgga

SEQ ID NO: 4697093 - DNA, 25 bp, Homo sapien
tgcatccgagacagcacctacaact

SEQ ID NO: 4697094 - DNA, 25 bp, Homo sapien
gtgcaactggttgctctgtaagctg

SEQ ID NO: 4697095 - DNA, 25 bp, Homo sapien
cctgtatgaaacatgtaatgatcaa

SEQ ID NO: 4697096 - DNA, 25 bp, Homo sapien
tcggcagcttaagcacgtgcaactg

SEQ ID NO: 4697097 - DNA, 25 bp, Homo sapien
ggctggaccctacagcgccctgtgt

SEQ ID NO: 4697098 - DNA, 25 bp, Homo sapien
tctagcgtgtaacgaggtgccacag

SEQ ID NO: 4697099 - DNA, 25 bp, Homo sapien
gaagcatcttgagtgcaggacacca

SEQ ID NO: 4697100 - DNA, 25 bp, Homo sapien
tgtgagcatcaggaaaccctctgtg

SEQ ID NO: 4697101 - DNA, 25 bp, Homo sapien
tggcacactgtaggcatgtagcagc

SEQ ID NO: 4697102 - DNA, 25 bp, Homo sapien
ccctgtatgtgggccggtggcctgt

SEQ ID NO: 4697103 - DNA, 25 bp, Homo sapien
cggtggcctgtgagccggaagagct

SEQ ID NO: 4697104 - DNA, 25 bp, Homo sapien
tctggcagggacaacgactccctct

SEQ ID NO: 4697105 - DNA, 25 bp, Homo sapien
ggtggggtatgtgccctgtggtccc

SEQ ID NO: 4697106 - DNA, 25 bp, Homo sapien
aggaggtggcgagtgagaggctcac

SEQ ID NO: 4697107 - DNA, 25 bp, Homo sapien
gaggtggcgagtgagaggctcacct

SEQ ID NO: 4697108 - DNA, 25 bp, Homo sapien
gaagaggaggtggcgagtgagaggc

SEQ ID NO: 4697109 - DNA, 25 bp, Homo sapien
agaggaggtggcgagtgagaggctc

SEQ ID NO: 4697110 - DNA, 25 bp, Homo sapien
ggaagcaggcgctgtggtggctgct

SEQ ID NO: 4697111 - DNA, 25 bp, Homo sapien
gatttcagggccgaggaagcaggcg

SEQ ID NO: 4697112 - DNA, 25 bp, Homo sapien
gaggaagcaggcgctgtggtggctg

SEQ ID NO: 4697113 - DNA, 25 bp, Homo sapien
tttcagggccgaggaagcaggcgct

SEQ ID NO: 4697114 - DNA, 25 bp, Homo sapien
acagggctaggcccagccacaggag

SEQ ID NO: 4697115 - DNA, 25 bp, Homo sapien
gaagttctgctgcagagggaccttg

SEQ ID NO: 4697116 - DNA, 25 bp, Homo sapien
ctgcagagggaccttgctcagaggt

SEQ ID NO: 4697117 - DNA, 25 bp, Homo sapien
ggctgggatcaggtctgaggtggag

SEQ ID NO: 4697118 - DNA, 25 bp, Homo sapien
tggttgtcctggaagttctgctgca

SEQ ID NO: 4697119 - DNA, 25 bp, Homo sapien
caagggactgataagaggcacaacc

SEQ ID NO: 4697120 - DNA, 25 bp, Homo sapien
acaacccaggaatggccctaggagc

SEQ ID NO: 4697121 - DNA, 25 bp, Homo sapien
cagcttggaaccatgagcccctcta

SEQ ID NO: 4697122 - DNA, 25 bp, Homo sapien
gccatcagtccagaagggagtcctg

SEQ ID NO: 4697123 - DNA, 25 bp, Homo sapien
tctctgagaattgcattccctgcca

SEQ ID NO: 4697124 - DNA, 25 bp, Homo sapien
aggcctaccacataccacttcccct

SEQ ID NO: 4697125 - DNA, 25 bp, Homo sapien
gcctaccacataccacttcccctgg

SEQ ID NO: 4697126 - DNA, 25 bp, Homo sapien
ctaccacataccacttcccctggaa

SEQ ID NO: 4697127 - DNA, 25 bp, Homo sapien
gacggaggtgacattgtagctcttg

SEQ ID NO: 4697128 - DNA, 25 bp, Homo sapien
ctaaacaggacggaggtgacattgt

SEQ ID NO: 4697129 - DNA, 25 bp, Homo sapien
aacaggacggaggtgacattgtagc

SEQ ID NO: 4697130 - DNA, 25 bp, Homo sapien
ggtgacattgtagctcttgtcttct

SEQ ID NO: 4697131 - DNA, 25 bp, Homo sapien
aacagcgaggtgaacgacaggatcc

SEQ ID NO: 4697132 - DNA, 25 bp, Homo sapien
tttggccatcccttgcctgtgacgt

SEQ ID NO: 4697133 - DNA, 25 bp, Homo sapien
catggaaatgtgctataaacgttgc

SEQ ID NO: 4697134 - DNA, 25 bp, Homo sapien
cacagatgaattccgggcagaacag

SEQ ID NO: 4697135 - DNA, 25 bp, Homo sapien
gcagcagcagggttctgttgctctc

SEQ ID NO: 4697136 - DNA, 25 bp, Homo sapien
cagggttctgttgctctcagtccgg

SEQ ID NO: 4697137 - DNA, 25 bp, Homo sapien
cccagccgagatgggcctgggcctt

SEQ ID NO: 4697138 - DNA, 25 bp, Homo sapien
gttctgttgctctcagtccggccca

SEQ ID NO: 4697139 - DNA, 25 bp, Homo sapien
tgttgcccagcgtgaactcgccggg

SEQ ID NO: 4697140 - DNA, 25 bp, Homo sapien
tggaacaaaagtcctgatccagtag

SEQ ID NO: 4697141 - DNA, 25 bp, Homo sapien
ccagcgtgaactcgccgggctggca

SEQ ID NO: 4697142 - DNA, 25 bp, Homo sapien
acaaaagtcctgatccagtagtcac

SEQ ID NO: 4697143 - DNA, 25 bp, Homo sapien
tgcaggcgtggacggtgaggggtca

SEQ ID NO: 4697144 - DNA, 25 bp, Homo sapien
cccagcccatcaacgtgggcttctc

SEQ ID NO: 4697145 - DNA, 25 bp, Homo sapien
cctccccagcccatcaacgtgggct

SEQ ID NO: 4697146 - DNA, 25 bp, Homo sapien
aacgtgggcttctccccatacaaca

SEQ ID NO: 4697147 - DNA, 25 bp, Homo sapien
gaaactttcttgaagaacaccatag

SEQ ID NO: 4697148 - DNA, 25 bp, Homo sapien
tagagggtgatcttgaagtactccc

SEQ ID NO: 4697149 - DNA, 25 bp, Homo sapien
tggtgctcaccactcggacgaggta

SEQ ID NO: 4697150 - DNA, 25 bp, Homo sapien
catagcatgctggttgtagttggtg

SEQ ID NO: 4697151 - DNA, 25 bp, Homo sapien
ggagaagcggatgaagttctccttt

SEQ ID NO: 4697152 - DNA, 25 bp, Homo sapien
gttctcctttagttccgaagtcagc

SEQ ID NO: 4697153 - DNA, 25 bp, Homo sapien
gacgatgtggttttcagggaggccc

SEQ ID NO: 4697154 - DNA, 25 bp, Homo sapien
tttagttccgaagtcagctccttgg

SEQ ID NO: 4697155 - DNA, 25 bp, Homo sapien
tccctgatccctggtagggaagcat

SEQ ID NO: 4697156 - DNA, 25 bp, Homo sapien
ctccctgatccctggtagggaagca

SEQ ID NO: 4697157 - DNA, 25 bp, Homo sapien
aagctgaggacggagtccctcctct

SEQ ID NO: 4697158 - DNA, 25 bp, Homo sapien
agctgaggacggagtccctcctctc

SEQ ID NO: 4697159 - DNA, 25 bp, Homo sapien
gaaagtccgtcagaacaggcagctg

SEQ ID NO: 4697160 - DNA, 25 bp, Homo sapien
tagggagaaagtccgtcagaacagg

SEQ ID NO: 4697161 - DNA, 25 bp, Homo sapien
ctgttagggagaaagtccgtcagaa

SEQ ID NO: 4697162 - DNA, 25 bp, Homo sapien
gagaaagtccgtcagaacaggcagc

SEQ ID NO: 4697163 - DNA, 25 bp, Homo sapien
ggatgagcaaaggcaggcccaagac

SEQ ID NO: 4697164 - DNA, 25 bp, Homo sapien
tggacagaggtggatatgagggtga

SEQ ID NO: 4697165 - DNA, 25 bp, Homo sapien
cagaataaagacagcagcagtgctg

SEQ ID NO: 4697166 - DNA, 25 bp, Homo sapien
acccgagatggggacagcagaataa

SEQ ID NO: 4697167 - DNA, 25 bp, Homo sapien
ccagctccctcaatggtgttcgggc

SEQ ID NO: 4697168 - DNA, 25 bp, Homo sapien
ccctcaatggtgttcgggctggtgc

SEQ ID NO: 4697169 - DNA, 25 bp, Homo sapien
tcccagctccctcaatggtgttcgg

SEQ ID NO: 4697170 - DNA, 25 bp, Homo sapien
gctccctcaatggtgttcgggctgg

SEQ ID NO: 4697171 - DNA, 25 bp, Homo sapien
aagccggcgccggatggaaggtgga

SEQ ID NO: 4697172 - DNA, 25 bp, Homo sapien
gtagaacgcggcagcagatctccgc

SEQ ID NO: 4697173 - DNA, 25 bp, Homo sapien
gaggcggcggatagaacacgggccg

SEQ ID NO: 4697174 - DNA, 25 bp, Homo sapien
aacgcggcgaccgtcgcgccgaaag

SEQ ID NO: 4697175 - DNA, 25 bp, Homo sapien
ctcccgcctccaccggcatccccag

SEQ ID NO: 4697176 - DNA, 25 bp, Homo sapien
gcttccccgaagccgtcctcctcgc

SEQ ID NO: 4697177 - DNA, 25 bp, Homo sapien
tcctcgccttccgctcccgcctcca

SEQ ID NO: 4697178 - DNA, 25 bp, Homo sapien
cccgcctccaccggcatccccaggt

SEQ ID NO: 4697179 - DNA, 25 bp, Homo sapien
gcaaggcccacaagggcgagtgtcc

SEQ ID NO: 4697180 - DNA, 25 bp, Homo sapien
tgcagcagacactaatcgttattcc

SEQ ID NO: 4697181 - DNA, 25 bp, Homo sapien
ggagccgatggttctcttcacaccc

SEQ ID NO: 4697182 - DNA, 25 bp, Homo sapien
cctgcactcgtaagcacgcaaaagg

SEQ ID NO: 4697183 - DNA, 25 bp, Homo sapien
tgtgatggatgtacaaccctgggaa

SEQ ID NO: 4697184 - DNA, 25 bp, Homo sapien
tgaactcttgcatgctagaacctgc

SEQ ID NO: 4697185 - DNA, 25 bp, Homo sapien
tgggaatacacaaaagcctactgaa

SEQ ID NO: 4697186 - DNA, 25 bp, Homo sapien
tgcccaatgcagagctacctgaaac

SEQ ID NO: 4697187 - DNA, 25 bp, Homo sapien
gccgaaactcaggattggacttggg

SEQ ID NO: 4697188 - DNA, 25 bp, Homo sapien
tcagggtcacttgggtttgaatttc

SEQ ID NO: 4697189 - DNA, 25 bp, Homo sapien
ccaggttggtaacagccgaaactca

SEQ ID NO: 4697190 - DNA, 25 bp, Homo sapien
tctgctttaccccagcaagttgtac

SEQ ID NO: 4697191 - DNA, 25 bp, Homo sapien
tatatagctagggaaaccgaggcct

SEQ ID NO: 4697192 - DNA, 25 bp, Homo sapien
aaagggcacccgttgcctagagcca

SEQ ID NO: 4697193 - DNA, 25 bp, Homo sapien
cgtcctgggaaatcggctgcatctt

SEQ ID NO: 4697194 - DNA, 25 bp, Homo sapien
tatgggtgcatatgtgcctgtgttc

SEQ ID NO: 4697195 - DNA, 25 bp, Homo sapien
tccccatgaaagatgaacggtcctg

SEQ ID NO: 4697196 - DNA, 25 bp, Homo sapien
cagtatggatgtcaccaccgggagc

SEQ ID NO: 4697197 - DNA, 25 bp, Homo sapien
gagtgctgttatgtttccccatgaa

SEQ ID NO: 4697198 - DNA, 25 bp, Homo sapien
aacggtcctgtgttcgctgctggct

SEQ ID NO: 4697199 - DNA, 25 bp, Homo sapien
ggcgaaagacagagcccagatcctg

SEQ ID NO: 4697200 - DNA, 25 bp, Homo sapien
ctgggaggaaggcgaaagacagagc

SEQ ID NO: 4697201 - DNA, 25 bp, Homo sapien
gaaggcgaaagacagagcccagatc

SEQ ID NO: 4697202 - DNA, 25 bp, Homo sapien
aggaaggcgaaagacagagcccaga

SEQ ID NO: 4697203 - DNA, 25 bp, Homo sapien
tccagcatggagttgatggcagcgt

SEQ ID NO: 4697204 - DNA, 25 bp, Homo sapien
tgctggaactccaggcgtgtctgcc

SEQ ID NO: 4697205 - DNA, 25 bp, Homo sapien
gacaggagttgatctggtccagcat

SEQ ID NO: 4697206 - DNA, 25 bp, Homo sapien
cgtgtctgccggttggactccagca

SEQ ID NO: 4697207 - DNA, 25 bp, Homo sapien
tgggtgggttgcaggcccactcttg

SEQ ID NO: 4697208 - DNA, 25 bp, Homo sapien
ccttgagaaggtgtctaagccaggg

SEQ ID NO: 4697209 - DNA, 25 bp, Homo sapien
cagacccaccaggggtccctgaagg

SEQ ID NO: 4697210 - DNA, 25 bp, Homo sapien
tggggagcgcccaggagttgggtgg

SEQ ID NO: 4697211 - DNA, 25 bp, Homo sapien
catttaatgtggacactcaaggcct

SEQ ID NO: 4697212 - DNA, 25 bp, Homo sapien
gacccatttaatgtggacactcaag

SEQ ID NO: 4697213 - DNA, 25 bp, Homo sapien
gggagacccatttaatgtggacact

SEQ ID NO: 4697214 - DNA, 25 bp, Homo sapien
ccatttaatgtggacactcaaggcc

SEQ ID NO: 4697215 - DNA, 25 bp, Homo sapien
aaacacccagcaaggtgacggctcg

SEQ ID NO: 4697216 - DNA, 25 bp, Homo sapien
acctgatagagggacctccctgtcc

SEQ ID NO: 4697217 - DNA, 25 bp, Homo sapien
tcaacccgcctcaaaacctgataga

SEQ ID NO: 4697218 - DNA, 25 bp, Homo sapien
cctggaaactttgacatggttcatg

SEQ ID NO: 4697219 - DNA, 25 bp, Homo sapien
agttcttcttgtgatcctttctgga

SEQ ID NO: 4697220 - DNA, 25 bp, Homo sapien
tacattttgacctagttcttcttgt

SEQ ID NO: 4697221 - DNA, 25 bp, Homo sapien
gacctagttcttcttgtgatccttt

SEQ ID NO: 4697222 - DNA, 25 bp, Homo sapien
tttgacctagttcttcttgtgatcc

SEQ ID NO: 4697223 - DNA, 25 bp, Homo sapien
caggaccacatgtcggagcctcagc

SEQ ID NO: 4697224 - DNA, 25 bp, Homo sapien
tccaggaccacatgtcggagcctca

SEQ ID NO: 4697225 - DNA, 25 bp, Homo sapien
ccaggaccacatgtcggagcctcag

SEQ ID NO: 4697226 - DNA, 25 bp, Homo sapien
cctgaaggtcaccattctgcagagc

SEQ ID NO: 4697227 - DNA, 25 bp, Homo sapien
agagcagtgacagccgggcctttag

SEQ ID NO: 4697228 - DNA, 25 bp, Homo sapien
ggcctttagcactgtacccctgaca

SEQ ID NO: 4697229 - DNA, 25 bp, Homo sapien
gctaccagcactccctctaagcagg

SEQ ID NO: 4697230 - DNA, 25 bp, Homo sapien
gagtcggcctgtggcctagatgtgg

SEQ ID NO: 4697231 - DNA, 25 bp, Homo sapien
aatgagtcggcctgtggcctagatg

SEQ ID NO: 4697232 - DNA, 25 bp, Homo sapien
gtgggcacccaagtcagcatggaag

SEQ ID NO: 4697233 - DNA, 25 bp, Homo sapien
cggcctgtggcctagatgtgggaga

SEQ ID NO: 4697234 - DNA, 25 bp, Homo sapien
cagcctcacacccagccgcaggtgt

SEQ ID NO: 4697235 - DNA, 25 bp, Homo sapien
gatgccacctgatgcagtagaagct

SEQ ID NO: 4697236 - DNA, 25 bp, Homo sapien
tcatgtctgcgggctggagatgcca

SEQ ID NO: 4697237 - DNA, 25 bp, Homo sapien
cagagcaaacaccagttgtggttca

SEQ ID NO: 4697238 - DNA, 25 bp, Homo sapien
acatatccacaggtccacacacagg

SEQ ID NO: 4697239 - DNA, 25 bp, Homo sapien
gacatatccacaggtccacacacag

SEQ ID NO: 4697240 - DNA, 25 bp, Homo sapien
agacatatccacaggtccacacaca

SEQ ID NO: 4697241 - DNA, 25 bp, Homo sapien
gcacttagtgctgcaacagaagcag

SEQ ID NO: 4697242 - DNA, 25 bp, Homo sapien
cagaagcaggcgcaaacacagacct

SEQ ID NO: 4697243 - DNA, 25 bp, Homo sapien
ggcgcaaacacagacctctccagag

SEQ ID NO: 4697244 - DNA, 25 bp, Homo sapien
ccagagcacttagtgctgcaacaga

SEQ ID NO: 4697245 - DNA, 25 bp, Homo sapien
tgctgccacgattccagccacgggt

SEQ ID NO: 4697246 - DNA, 25 bp, Homo sapien
aagcccaagtgctgccacgattcca

SEQ ID NO: 4697247 - DNA, 25 bp, Homo sapien
gacagtaccgaaacagacacagaca

SEQ ID NO: 4697248 - DNA, 25 bp, Homo sapien
gccgcaggcccggatgacagtaccg

SEQ ID NO: 4697249 - DNA, 25 bp, Homo sapien
gactctgatctccaacatgtcctct

SEQ ID NO: 4697250 - DNA, 25 bp, Homo sapien
gtcagaactccgagatgagttcccc

SEQ ID NO: 4697251 - DNA, 25 bp, Homo sapien
gagttccccttcatctcgctggctt

SEQ ID NO: 4697252 - DNA, 25 bp, Homo sapien
ggcttctatccctagatcctgactc

SEQ ID NO: 4697253 - DNA, 25 bp, Homo sapien
gcgatccggctgccgctagcgctcc

SEQ ID NO: 4697254 - DNA, 25 bp, Homo sapien
ctgcgatccggctgccgctagcgct

SEQ ID NO: 4697255 - DNA, 25 bp, Homo sapien
atccggctgccgctagcgctcccgg

SEQ ID NO: 4697256 - DNA, 25 bp, Homo sapien
gatccggctgccgctagcgctcccg

SEQ ID NO: 4697257 - DNA, 25 bp, Homo sapien
tgcggcaggtcgaggtccgcgttct

SEQ ID NO: 4697258 - DNA, 25 bp, Homo sapien
cttgcagccggttgaccagcgggat

SEQ ID NO: 4697259 - DNA, 25 bp, Homo sapien
tccgcgttctggccgatggcagaga

SEQ ID NO: 4697260 - DNA, 25 bp, Homo sapien
gatgagatcttccatgccgcggttg

SEQ ID NO: 4697261 - DNA, 25 bp, Homo sapien
agacgctgagtaatgcgggctctct

SEQ ID NO: 4697262 - DNA, 25 bp, Homo sapien
tctctccatgcccatgttgggggcg

SEQ ID NO: 4697263 - DNA, 25 bp, Homo sapien
ggcttctggcagagcgttgtctgcc

SEQ ID NO: 4697264 - DNA, 25 bp, Homo sapien
gatgtcccccattgagcccggtgtg

SEQ ID NO: 4697265 - DNA, 25 bp, Homo sapien
ttccccttctccaggctccatatgg

SEQ ID NO: 4697266 - DNA, 25 bp, Homo sapien
ttgcattgaccagctgcaagaccag

SEQ ID NO: 4697267 - DNA, 25 bp, Homo sapien
ggacgtcgggtgacaatgccagatc

SEQ ID NO: 4697268 - DNA, 25 bp, Homo sapien
gggtgacaatgccagatcctcgagg

SEQ ID NO: 4697269 - DNA, 25 bp, Homo sapien
gccagatcctcgaggcaagaagtcc

SEQ ID NO: 4697270 - DNA, 25 bp, Homo sapien
agcgggcaggggaagggcagtaggc

SEQ ID NO: 4697271 - DNA, 25 bp, Homo sapien
ctccagaagcgggcaggggaagggc

SEQ ID NO: 4697272 - DNA, 25 bp, Homo sapien
cgggcaggggaagggcagtaggcat

SEQ ID NO: 4697273 - DNA, 25 bp, Homo sapien
ctgctccagaagcgggcaggggaag

SEQ ID NO: 4697274 - DNA, 25 bp, Homo sapien
taggcaccggcgagatgcccttgtt

SEQ ID NO: 4697275 - DNA, 25 bp, Homo sapien
tgcccttgttggtgccggtgaccct

SEQ ID NO: 4697276 - DNA, 25 bp, Homo sapien
tcctcgaagtcggtgaatttctttc

SEQ ID NO: 4697277 - DNA, 25 bp, Homo sapien
gtcggtctcggcctcgatctcaagg

SEQ ID NO: 4697278 - DNA, 25 bp, Homo sapien
accttggtcattccgggcaggtcca

SEQ ID NO: 4697279 - DNA, 25 bp, Homo sapien
gatgaggcagttctccttggtgaca

SEQ ID NO: 4697280 - DNA, 25 bp, Homo sapien
accttgagggcgtcagaattggcca

SEQ ID NO: 4697281 - DNA, 25 bp, Homo sapien
cataagcatgtctcggatctggaac

SEQ ID NO: 4697282 - DNA, 25 bp, Homo sapien
gcgcagggggagcagcttgttctcc

SEQ ID NO: 4697283 - DNA, 25 bp, Homo sapien
acatcacgggcatctgtgccctcgt

SEQ ID NO: 4697284 - DNA, 25 bp, Homo sapien
ttggtgatgaccccgatggtgcgct

SEQ ID NO: 4697285 - DNA, 25 bp, Homo sapien
gtgatgaccccgatggtgcgctggc

SEQ ID NO: 4697286 - DNA, 25 bp, Homo sapien
ctccggttcaccactccaatgtagc

SEQ ID NO: 4697287 - DNA, 25 bp, Homo sapien
cagccaaggcggcggtaatgtcctt

SEQ ID NO: 4697288 - DNA, 25 bp, Homo sapien
cccatacggtcagccaagtggcgat

SEQ ID NO: 4697289 - DNA, 25 bp, Homo sapien
gagaggaagaactttcgttcagcag

SEQ ID NO: 4697290 - DNA, 25 bp, Homo sapien
gaccttctgcaggtagggcgtgccc

SEQ ID NO: 4697291 - DNA, 25 bp, Homo sapien
tccttctcaatggacagtagctggc

SEQ ID NO: 4697292 - DNA, 25 bp, Homo sapien
cagtgtgtcccggatgtggttcgtc

SEQ ID NO: 4697293 - DNA, 25 bp, Homo sapien
ccttggtcttgcgagctgggtcatc

SEQ ID NO: 4697294 - DNA, 25 bp, Homo sapien
cagggcggaagttcttgtattcctc

SEQ ID NO: 4697295 - DNA, 25 bp, Homo sapien
tcaatgcgcttctcaaagtctacgg

SEQ ID NO: 4697296 - DNA, 25 bp, Homo sapien
aaagggaagcgctcgtggaagattc

SEQ ID NO: 4697297 - DNA, 25 bp, Homo sapien
gaagattcggttaatgcgggctccc

SEQ ID NO: 4697298 - DNA, 25 bp, Homo sapien
aagtctacggcgaactgctggacca

SEQ ID NO: 4697299 - DNA, 25 bp, Homo sapien
cccttcggagttccttctcatcaaa

SEQ ID NO: 4697300 - DNA, 25 bp, Homo sapien
gctgatctcccttcggagttccttc

SEQ ID NO: 4697301 - DNA, 25 bp, Homo sapien
gatctcccttcggagttccttctca

SEQ ID NO: 4697302 - DNA, 25 bp, Homo sapien
catagctgatctcccttcggagttc

SEQ ID NO: 4697303 - DNA, 25 bp, Homo sapien
cagccaccctcccaggccccaatac

SEQ ID NO: 4697304 - DNA, 25 bp, Homo sapien
ggttcagccaccctcccaggcccca

SEQ ID NO: 4697305 - DNA, 25 bp, Homo sapien
ttcagccaccctcccaggccccaat

SEQ ID NO: 4697306 - DNA, 25 bp, Homo sapien
ttctggggttcagccaccctcccag

SEQ ID NO: 4697307 - DNA, 25 bp, Homo sapien
caagttgcagtaggcggggtggccc

SEQ ID NO: 4697308 - DNA, 25 bp, Homo sapien
ggctgtgcccagttggcccagcaag

SEQ ID NO: 4697309 - DNA, 25 bp, Homo sapien
ggcccagcaagttgcagtaggcggg

SEQ ID NO: 4697310 - DNA, 25 bp, Homo sapien
cagagggtgtttccccggccacctg

SEQ ID NO: 4697311 - DNA, 25 bp, Homo sapien
tgggtggcactgggggagctatctc

SEQ ID NO: 4697312 - DNA, 25 bp, Homo sapien
gggtggcactgggggagctatctca

SEQ ID NO: 4697313 - DNA, 25 bp, Homo sapien
gtggcactgggggagctatctcacc

SEQ ID NO: 4697314 - DNA, 25 bp, Homo sapien
ggtggcactgggggagctatctcac

SEQ ID NO: 4697315 - DNA, 25 bp, Homo sapien
agataaccatgtccacacacttgag

SEQ ID NO: 4697316 - DNA, 25 bp, Homo sapien
cttcttggtgcactgtctaacggtg

SEQ ID NO: 4697317 - DNA, 25 bp, Homo sapien
agacacggttctcggatcttcttca

SEQ ID NO: 4697318 - DNA, 25 bp, Homo sapien
tgtctaacggtgctgattagctccg

SEQ ID NO: 4697319 - DNA, 25 bp, Homo sapien
tctacgtttcccagtgtcccagaat

SEQ ID NO: 4697320 - DNA, 25 bp, Homo sapien
tccattcccgtaaaccgtggcgcag

SEQ ID NO: 4697321 - DNA, 25 bp, Homo sapien
cctatctctagggttgccgcatcca

SEQ ID NO: 4697322 - DNA, 25 bp, Homo sapien
tcctagggttgcagtatagcagcct

SEQ ID NO: 4697323 - DNA, 25 bp, Homo sapien
catatccacacacttgatactgggc

SEQ ID NO: 4697324 - DNA, 25 bp, Homo sapien
ttcgctacactttctgatggtggct

SEQ ID NO: 4697325 - DNA, 25 bp, Homo sapien
tgatactgggctctttgagcttctg

SEQ ID NO: 4697326 - DNA, 25 bp, Homo sapien
tgtgagctcactgactaccatatcc

SEQ ID NO: 4697327 - DNA, 25 bp, Homo sapien
gaaacttaaatgtccgtcaagagga

SEQ ID NO: 4697328 - DNA, 25 bp, Homo sapien
cattgtaacatcgtttgtgaaggca

SEQ ID NO: 4697329 - DNA, 25 bp, Homo sapien
gtagttaaagagcatgagactggct

SEQ ID NO: 4697330 - DNA, 25 bp, Homo sapien
tgtggtggttagtgcttgaagtccc

SEQ ID NO: 4697331 - DNA, 25 bp, Homo sapien
gcctggccagatagtttccagtttt

SEQ ID NO: 4697332 - DNA, 25 bp, Homo sapien
taacctgacaatgaatatctctgtg

SEQ ID NO: 4697333 - DNA, 25 bp, Homo sapien
ggtggtgtgatcacaatcagagctc

SEQ ID NO: 4697334 - DNA, 25 bp, Homo sapien
cagggtctctaaaataacccaggag

SEQ ID NO: 4697335 - DNA, 25 bp, Homo sapien
caccacgcctggccacccaccctcc

SEQ ID NO: 4697336 - DNA, 25 bp, Homo sapien
ccacgcctggccacccaccctccct

SEQ ID NO: 4697337 - DNA, 25 bp, Homo sapien
cctatggtgaatacgcctttgagat

SEQ ID NO: 4697338 - DNA, 25 bp, Homo sapien
cccaacaatatgctgtggagggaca

SEQ ID NO: 4697339 - DNA, 25 bp, Homo sapien
tttcccaacaatatgctgtggaggg

SEQ ID NO: 4697340 - DNA, 25 bp, Homo sapien
aaaagattcctatggtgaatacgcc

SEQ ID NO: 4697341 - DNA, 25 bp, Homo sapien
gcaggagtgacttgataaccttaga

SEQ ID NO: 4697342 - DNA, 25 bp, Homo sapien
caagtctaatcccagcagggctggc

SEQ ID NO: 4697343 - DNA, 25 bp, Homo sapien
cccaccgggttagcagtcagggaca

SEQ ID NO: 4697344 - DNA, 25 bp, Homo sapien
gacaccttccctcctagagttgttg

SEQ ID NO: 4697345 - DNA, 25 bp, Homo sapien
tccacccctttgagaagttctgtcc

SEQ ID NO: 4697346 - DNA, 25 bp, Homo sapien
cgcctggatgtcacatgtctcaagt

SEQ ID NO: 4697347 - DNA, 25 bp, Homo sapien
gcagcctccacccctttgagaagtt

SEQ ID NO: 4697348 - DNA, 25 bp, Homo sapien
ggatgtcacatgtctcaagttttcc

SEQ ID NO: 4697349 - DNA, 25 bp, Homo sapien
caggctgggacaggcaatgctcctt

SEQ ID NO: 4697350 - DNA, 25 bp, Homo sapien
cttgactacaaggttctgccggact

SEQ ID NO: 4697351 - DNA, 25 bp, Homo sapien
tccaggatgccaacacgagggatgc

SEQ ID NO: 4697352 - DNA, 25 bp, Homo sapien
cacaagcaaaagcatgcgagggctg

SEQ ID NO: 4697353 - DNA, 25 bp, Homo sapien
caaggtgttccctcatactcagggc

SEQ ID NO: 4697354 - DNA, 25 bp, Homo sapien
cgcagactggttaggttaaggcctc

SEQ ID NO: 4697355 - DNA, 25 bp, Homo sapien
aggccatgggaatgagcctgccccg

SEQ ID NO: 4697356 - DNA, 25 bp, Homo sapien
tgccttcctaaaggcgtggagggac

SEQ ID NO: 4697357 - DNA, 25 bp, Homo sapien
caggagggcagaaagccacgtacac

SEQ ID NO: 4697358 - DNA, 25 bp, Homo sapien
gtcccaggacgctgatggcaccaag

SEQ ID NO: 4697359 - DNA, 25 bp, Homo sapien
cccaagtgtgggttccaaatggtga

SEQ ID NO: 4697360 - DNA, 25 bp, Homo sapien
aatggtgattcaagggtcttcctgg

SEQ ID NO: 4697361 - DNA, 25 bp, Homo sapien
ctgctccttagtgcggccctcgcgc

SEQ ID NO: 4697362 - DNA, 25 bp, Homo sapien
tcccgtagccgcgggtactgctgga

SEQ ID NO: 4697363 - DNA, 25 bp, Homo sapien
tcgcgctcccggatgtgggtggtca

SEQ ID NO: 4697364 - DNA, 25 bp, Homo sapien
tgggtggtcacgatgcgctccatct

SEQ ID NO: 4697365 - DNA, 25 bp, Homo sapien
gttcatgtaagccagctcgatatcg

SEQ ID NO: 4697366 - DNA, 25 bp, Homo sapien
tgtaagccagctcgatatcgatgag

SEQ ID NO: 4697367 - DNA, 25 bp, Homo sapien
taagccagctcgatatcgatgagaa

SEQ ID NO: 4697368 - DNA, 25 bp, Homo sapien
ccagctcgatatcgatgagaagcat

SEQ ID NO: 4697369 - DNA, 25 bp, Homo sapien
ctggttccctgaagtcttcttcttg

SEQ ID NO: 4697370 - DNA, 25 bp, Homo sapien
tgttcatctggttgctcctctgctg

SEQ ID NO: 4697371 - DNA, 25 bp, Homo sapien
cttgttcatctggttgctcctctgc

SEQ ID NO: 4697372 - DNA, 25 bp, Homo sapien
ttccctgaagtcttcttcttgttca

SEQ ID NO: 4697373 - DNA, 25 bp, Homo sapien
cttagctgggccctaccagcaggcc

SEQ ID NO: 4697374 - DNA, 25 bp, Homo sapien
caccctaacttgtagtctttgtcct

SEQ ID NO: 4697375 - DNA, 25 bp, Homo sapien
cttcctgatcaggcgaggatcccca

SEQ ID NO: 4697376 - DNA, 25 bp, Homo sapien
acgatgtgaccagcagatcttgcca

SEQ ID NO: 4697377 - DNA, 25 bp, Homo sapien
tattgatagtcagccagcccttgcg

SEQ ID NO: 4697378 - DNA, 25 bp, Homo sapien
catgatgccaatattattgatagtc

SEQ ID NO: 4697379 - DNA, 25 bp, Homo sapien
ccaggacagattctcagcagtcagc

SEQ ID NO: 4697380 - DNA, 25 bp, Homo sapien
gtaccaggacagattctcagcagtc

SEQ ID NO: 4697381 - DNA, 25 bp, Homo sapien
ctgccatcccagaaccggagcctgg

SEQ ID NO: 4697382 - DNA, 25 bp, Homo sapien
atcccagaaccggagcctggagcca

SEQ ID NO: 4697383 - DNA, 25 bp, Homo sapien
gccatcccagaaccggagcctggag

SEQ ID NO: 4697384 - DNA, 25 bp, Homo sapien
tgcctgccatcccagaaccggagcc

SEQ ID NO: 4697385 - DNA, 25 bp, Homo sapien
aggggaccacgggctggctggtctg

SEQ ID NO: 4697386 - DNA, 25 bp, Homo sapien
ccctgccacgtcaaaggaggcagaa

SEQ ID NO: 4697387 - DNA, 25 bp, Homo sapien
cagagaggggaccacgggctggctg

SEQ ID NO: 4697388 - DNA, 25 bp, Homo sapien
cctgccacgtcaaaggaggcagaag

SEQ ID NO: 4697389 - DNA, 25 bp, Homo sapien
gagggcaaagatatgcttgctcgac

SEQ ID NO: 4697390 - DNA, 25 bp, Homo sapien
gcttgctcgacataaagcccttctc

SEQ ID NO: 4697391 - DNA, 25 bp, Homo sapien
gtcccgcagcttgaggttgtccaca

SEQ ID NO: 4697392 - DNA, 25 bp, Homo sapien
tctgctccgtgttaaagagggcaaa

SEQ ID NO: 4697393 - DNA, 25 bp, Homo sapien
tctgatggccgctggactgaactct

SEQ ID NO: 4697394 - DNA, 25 bp, Homo sapien
ggaaggaagaggactagtactgcca

SEQ ID NO: 4697395 - DNA, 25 bp, Homo sapien
tctcatctccgagtagcagagggcc

SEQ ID NO: 4697396 - DNA, 25 bp, Homo sapien
gagggcccactagagtcagccttgg

SEQ ID NO: 4697397 - DNA, 25 bp, Homo sapien
cagctgccgataatccttgtagaca

SEQ ID NO: 4697398 - DNA, 25 bp, Homo sapien
cccaacacgctcagggtacacgcca

SEQ ID NO: 4697399 - DNA, 25 bp, Homo sapien
tcctgtgtctcacaggctagctcca

SEQ ID NO: 4697400 - DNA, 25 bp, Homo sapien
aacacgctcagggtacacgccagcc

SEQ ID NO: 4697401 - DNA, 25 bp, Homo sapien
gtccacaagattccggatggtctcc

SEQ ID NO: 4697402 - DNA, 25 bp, Homo sapien
ttgggcatgaggtccctcacggtct

SEQ ID NO: 4697403 - DNA, 25 bp, Homo sapien
ctccacttgccgttccagctgtggg

SEQ ID NO: 4697404 - DNA, 25 bp, Homo sapien
atgtatgagtccacaagattccgga

SEQ ID NO: 4697405 - DNA, 25 bp, Homo sapien
tatcttccaatgtcagcctctccag

SEQ ID NO: 4697406 - DNA, 25 bp, Homo sapien
gagtacagtggggagattaccactc

SEQ ID NO: 4697407 - DNA, 25 bp, Homo sapien
tggggagattaccactcactgtagc

SEQ ID NO: 4697408 - DNA, 25 bp, Homo sapien
ggctcaaagttatcttccaatgtca

SEQ ID NO: 4697409 - DNA, 25 bp, Homo sapien
gcagccaggagtcgtccacgggcgg

SEQ ID NO: 4697410 - DNA, 25 bp, Homo sapien
gggcatgggcgtgctgacggtggtc

SEQ ID NO: 4697411 - DNA, 25 bp, Homo sapien
tccccacacgagtacaggttggcca

SEQ ID NO: 4697412 - DNA, 25 bp, Homo sapien
gcgtgttctggtccccacacgagta

SEQ ID NO: 4697413 - DNA, 25 bp, Homo sapien
ctgcgtccggccggtacgctctgca

SEQ ID NO: 4697414 - DNA, 25 bp, Homo sapien
tgcgtccggccggtacgctctgcac

SEQ ID NO: 4697415 - DNA, 25 bp, Homo sapien
gcgggcgcgccactgcccggtcccg

SEQ ID NO: 4697416 - DNA, 25 bp, Homo sapien
tgcccggtcccggcattcctcccgc

SEQ ID NO: 4697417 - DNA, 25 bp, Homo sapien
gaggcccaggagcagggccccgcga

SEQ ID NO: 4697418 - DNA, 25 bp, Homo sapien
ggcgggggctcggcgctgcggcgtg

SEQ ID NO: 4697419 - DNA, 25 bp, Homo sapien
cccagggcggacccagcaggcggag

SEQ ID NO: 4697420 - DNA, 25 bp, Homo sapien
gcgctgcggcgtggggctggacgtg

SEQ ID NO: 4697421 - DNA, 25 bp, Homo sapien
gggcgcggttggggcgcgagggcac

SEQ ID NO: 4697422 - DNA, 25 bp, Homo sapien
ggggcgcggttggggcgcgagggca

SEQ ID NO: 4697423 - DNA, 25 bp, Homo sapien
tcatcagagcatcatagggcaagcc

SEQ ID NO: 4697424 - DNA, 25 bp, Homo sapien
aaaaaagccatcagtttgcccacgg

SEQ ID NO: 4697425 - DNA, 25 bp, Homo sapien
aagagacgtgtctaaaggcccaggg

SEQ ID NO: 4697426 - DNA, 25 bp, Homo sapien
agtcatgggtcaagaaggtcaagcc

SEQ ID NO: 4697427 - DNA, 25 bp, Homo sapien
ccatagacctgggtgccaaataccc

SEQ ID NO: 4697428 - DNA, 25 bp, Homo sapien
tctgaactcacgttggcagttagca

SEQ ID NO: 4697429 - DNA, 25 bp, Homo sapien
gatctcacaccgcaccatagacctg

SEQ ID NO: 4697430 - DNA, 25 bp, Homo sapien
gtgccaaataccctgaagaatctga

SEQ ID NO: 4697431 - DNA, 25 bp, Homo sapien
tgtgcttagaggatcacccgtgctg

SEQ ID NO: 4697432 - DNA, 25 bp, Homo sapien
cccaaggtagggtcatgatttgcca

SEQ ID NO: 4697433 - DNA, 25 bp, Homo sapien
gatagggcttgctcgctaaagtcca

SEQ ID NO: 4697434 - DNA, 25 bp, Homo sapien
ccgtgctgctcatggagatagggct

SEQ ID NO: 4697435 - DNA, 25 bp, Homo sapien
gacagcacgaaatcaacatggcagt

SEQ ID NO: 4697436 - DNA, 25 bp, Homo sapien
catggcagttcacacgcacgggtgg

SEQ ID NO: 4697437 - DNA, 25 bp, Homo sapien
atcaacatggcagttcacacgcacg

SEQ ID NO: 4697438 - DNA, 25 bp, Homo sapien
ctgaaagacagcacgaaatcaacat

SEQ ID NO: 4697439 - DNA, 25 bp, Homo sapien
cacggtgtgcccaggataacgttcc

SEQ ID NO: 4697440 - DNA, 25 bp, Homo sapien
tcagactgcacaccacgcacggtgt

SEQ ID NO: 4697441 - DNA, 25 bp, Homo sapien
tctacggtggatttggctctcagca

SEQ ID NO: 4697442 - DNA, 25 bp, Homo sapien
agagagcacccatgtctgccagctt

SEQ ID NO: 4697443 - DNA, 25 bp, Homo sapien
ttggctgaatggcacaagtgaccct

SEQ ID NO: 4697444 - DNA, 25 bp, Homo sapien
agcaggcacggtcgtccccttggct

SEQ ID NO: 4697445 - DNA, 25 bp, Homo sapien
ccgctggctggctacggtgcttcag

SEQ ID NO: 4697446 - DNA, 25 bp, Homo sapien
gtcacactagcagctatgacggtac

SEQ ID NO: 4697447 - DNA, 25 bp, Homo sapien
ggctgcaggtctcgtaggtgaggct

SEQ ID NO: 4697448 - DNA, 25 bp, Homo sapien
gggctgcaggtctcgtaggtgaggc

SEQ ID NO: 4697449 - DNA, 25 bp, Homo sapien
gcaggtctcgtaggtgaggctgggc

SEQ ID NO: 4697450 - DNA, 25 bp, Homo sapien
tgcaggtctcgtaggtgaggctggg

SEQ ID NO: 4697451 - DNA, 25 bp, Homo sapien
cagggcacccgcaattcaggctgat

SEQ ID NO: 4697452 - DNA, 25 bp, Homo sapien
agctggtaaggcaagcgcagcacac

SEQ ID NO: 4697453 - DNA, 25 bp, Homo sapien
gcttgaaccaggagggtgaaactaa

SEQ ID NO: 4697454 - DNA, 25 bp, Homo sapien
tagcttcacagatagcgcctggggg

SEQ ID NO: 4697455 - DNA, 25 bp, Homo sapien
ctctcaggacgggatggacttgcct

SEQ ID NO: 4697456 - DNA, 25 bp, Homo sapien
cgggatggacttgcctgacccgatc

SEQ ID NO: 4697457 - DNA, 25 bp, Homo sapien
tggggctctcaggacgggatggact

SEQ ID NO: 4697458 - DNA, 25 bp, Homo sapien
gggctctcaggacgggatggacttg

SEQ ID NO: 4697459 - DNA, 25 bp, Homo sapien
tcaccaacggtcacacctgaatgta

SEQ ID NO: 4697460 - DNA, 25 bp, Homo sapien
gacagcgttctctggtagttgggcc

SEQ ID NO: 4697461 - DNA, 25 bp, Homo sapien
ggcggttggccatgtgtaggtgtgt

SEQ ID NO: 4697462 - DNA, 25 bp, Homo sapien
agcgctagaggcgaggcggttggcc

SEQ ID NO: 4697463 - DNA, 25 bp, Homo sapien
ggccgggcatgacaaggaggctcac

SEQ ID NO: 4697464 - DNA, 25 bp, Homo sapien
actggaggtggcacactttggagtg

SEQ ID NO: 4697465 - DNA, 25 bp, Homo sapien
gtggcacactttggagtgggatgtc

SEQ ID NO: 4697466 - DNA, 25 bp, Homo sapien
gccgggcatgacaaggaggctcact

SEQ ID NO: 4697467 - DNA, 25 bp, Homo sapien
tgcttccccagtgtacatattgtat

SEQ ID NO: 4697468 - DNA, 25 bp, Homo sapien
ccctggtgatgcgactcctgtttat

SEQ ID NO: 4697469 - DNA, 25 bp, Homo sapien
tatttattgatagcataggacagag

SEQ ID NO: 4697470 - DNA, 25 bp, Homo sapien
tgtgtagacccttagccaccttggc

SEQ ID NO: 4697471 - DNA, 25 bp, Homo sapien
ttaccgggctgacgagaatgatgag

SEQ ID NO: 4697472 - DNA, 25 bp, Homo sapien
cagtgtggagcctgcccaaggagag

SEQ ID NO: 4697473 - DNA, 25 bp, Homo sapien
tcgtgagatgcagaacccccgggag

SEQ ID NO: 4697474 - DNA, 25 bp, Homo sapien
ctttgcgaggtgagcctcgccggca

SEQ ID NO: 4697475 - DNA, 25 bp, Homo sapien
tggagaccatgcagaacgaccgcac

SEQ ID NO: 4697476 - DNA, 25 bp, Homo sapien
tgagcacctgcggaaggagctggag

SEQ ID NO: 4697477 - DNA, 25 bp, Homo sapien
gagggtctggcaggacagcttcaag

SEQ ID NO: 4697478 - DNA, 25 bp, Homo sapien
cttgagtcgcctgaaccgggagcag

SEQ ID NO: 4697479 - DNA, 25 bp, Homo sapien
ggcactatttggaacggcctgggct

SEQ ID NO: 4697480 - DNA, 25 bp, Homo sapien
caggtaatggagtcggttagacaac

SEQ ID NO: 4697481 - DNA, 25 bp, Homo sapien
gagttgcacattgagcctagcccta

SEQ ID NO: 4697482 - DNA, 25 bp, Homo sapien
catccagttttcaagccggtgtgaa

SEQ ID NO: 4697483 - DNA, 25 bp, Homo sapien
gcggtcccctcccccatcgcggagc

SEQ ID NO: 4697484 - DNA, 25 bp, Homo sapien
ctgcggtcccctcccccatcgcgga

SEQ ID NO: 4697485 - DNA, 25 bp, Homo sapien
tgcggtcccctcccccatcgcggag

SEQ ID NO: 4697486 - DNA, 25 bp, Homo sapien
cggtcccctcccccatcgcggagcg

SEQ ID NO: 4697487 - DNA, 25 bp, Homo sapien
tctttggtctcgggtctccaaggac

SEQ ID NO: 4697488 - DNA, 25 bp, Homo sapien
ggccaggaactctgacccggagtgt

SEQ ID NO: 4697489 - DNA, 25 bp, Homo sapien
tgtgaactggcgcacagaaagctgc

SEQ ID NO: 4697490 - DNA, 25 bp, Homo sapien
tcggagagcgacctctcaggtgcac

SEQ ID NO: 4697491 - DNA, 25 bp, Homo sapien
ttcaatggcgcaagagggtccagcg

SEQ ID NO: 4697492 - DNA, 25 bp, Homo sapien
taggagcgccagggactggatccat

SEQ ID NO: 4697493 - DNA, 25 bp, Homo sapien
gagcagttgggaagtaggagcgcca

SEQ ID NO: 4697494 - DNA, 25 bp, Homo sapien
aatccgaggggaaagtctgattgga

SEQ ID NO: 4697495 - DNA, 25 bp, Homo sapien
gattggacccacagcccgctgtgag

SEQ ID NO: 4697496 - DNA, 25 bp, Homo sapien
atcggaaggccccgcggcaacttcg

SEQ ID NO: 4697497 - DNA, 25 bp, Homo sapien
gatcggaaggccccgcggcaacttc

SEQ ID NO: 4697498 - DNA, 25 bp, Homo sapien
gcaacttcgggtaagtcttggttca

SEQ ID NO: 4697499 - DNA, 25 bp, Homo sapien
ccgcggcaacttcgggtaagtcttg

SEQ ID NO: 4697500 - DNA, 25 bp, Homo sapien
cagtaaagcgtcttctcaaaggttg

SEQ ID NO: 4697501 - DNA, 25 bp, Homo sapien
atggggacagtaaagcgtcttctca

SEQ ID NO: 4697502 - DNA, 25 bp, Homo sapien
agtaaagcgtcttctcaaaggttgc

SEQ ID NO: 4697503 - DNA, 25 bp, Homo sapien
ggacagtaaagcgtcttctcaaagg

SEQ ID NO: 4697504 - DNA, 25 bp, Homo sapien
agagcagagccacccggaaatgtgt

SEQ ID NO: 4697505 - DNA, 25 bp, Homo sapien
gagtgtgatttcagacttggcaagt

SEQ ID NO: 4697506 - DNA, 25 bp, Homo sapien
agagagataggagggttgtgggcac

SEQ ID NO: 4697507 - DNA, 25 bp, Homo sapien
gatgcaaccatgagtagtgctatta

SEQ ID NO: 4697508 - DNA, 25 bp, Homo sapien
tgtcaaggtgcagagactcctcgct

SEQ ID NO: 4697509 - DNA, 25 bp, Homo sapien
ctgaatgtcaaggtgcagagactcc

SEQ ID NO: 4697510 - DNA, 25 bp, Homo sapien
aggtgcagagactcctcgctggtcc

SEQ ID NO: 4697511 - DNA, 25 bp, Homo sapien
aatgtcaaggtgcagagactcctcg

SEQ ID NO: 4697512 - DNA, 25 bp, Homo sapien
cagatacgaactgggagatctcctt

SEQ ID NO: 4697513 - DNA, 25 bp, Homo sapien
tcagatacgaactgggagatctcct

SEQ ID NO: 4697514 - DNA, 25 bp, Homo sapien
ctccagttcatccacactgtagcct

SEQ ID NO: 4697515 - DNA, 25 bp, Homo sapien
atgtcattgtactcgtgaagctggg

SEQ ID NO: 4697516 - DNA, 25 bp, Homo sapien
ttgtactcgtgaagctgggtaatgt

SEQ ID NO: 4697517 - DNA, 25 bp, Homo sapien
tcattgtactcgtgaagctgggtaa

SEQ ID NO: 4697518 - DNA, 25 bp, Homo sapien
tgatgtcattgtactcgtgaagctg

SEQ ID NO: 4697519 - DNA, 25 bp, Homo sapien
aatgccccgagccagtgtcactgcc

SEQ ID NO: 4697520 - DNA, 25 bp, Homo sapien
gaaggcaggctgaatgtgcagtggg

SEQ ID NO: 4697521 - DNA, 25 bp, Homo sapien
cctctggcttcaagccagtccccac

SEQ ID NO: 4697522 - DNA, 25 bp, Homo sapien
tacagccaatgccccgagccagtgt

SEQ ID NO: 4697523 - DNA, 25 bp, Homo sapien
tccagcccaaactctggatacaact

SEQ ID NO: 4697524 - DNA, 25 bp, Homo sapien
ctctggatacaactctttggtggtg

SEQ ID NO: 4697525 - DNA, 25 bp, Homo sapien
tcatgtccagcccaaactctggata

SEQ ID NO: 4697526 - DNA, 25 bp, Homo sapien
tctggatacaactctttggtggtga

SEQ ID NO: 4697527 - DNA, 25 bp, Homo sapien
cttgggctctctagaaaagtgcttc

SEQ ID NO: 4697528 - DNA, 25 bp, Homo sapien
gtacccctacacaagtatcactgcg

SEQ ID NO: 4697529 - DNA, 25 bp, Homo sapien
cattgtctcgctggaaactctgtag

SEQ ID NO: 4697530 - DNA, 25 bp, Homo sapien
tcaggaaccttggagctgggaacgc

SEQ ID NO: 4697531 - DNA, 25 bp, Homo sapien
gcttgctccttactgcccctggttg

SEQ ID NO: 4697532 - DNA, 25 bp, Homo sapien
ggaatccacatctcgcagctgcttg

SEQ ID NO: 4697533 - DNA, 25 bp, Homo sapien
tgtatgtgtacacaccaggcagagt

SEQ ID NO: 4697534 - DNA, 25 bp, Homo sapien
agagtaacctctgccacctgttttc

SEQ ID NO: 4697535 - DNA, 25 bp, Homo sapien
aaggagctcctatctcggtgactct

SEQ ID NO: 4697536 - DNA, 25 bp, Homo sapien
ttaggagacaagcatcgcaggtagg

SEQ ID NO: 4697537 - DNA, 25 bp, Homo sapien
ggtgactctgtatccggatgctgct

SEQ ID NO: 4697538 - DNA, 25 bp, Homo sapien
gaaatcagaagcgagaagagcccta

SEQ ID NO: 4697539 - DNA, 25 bp, Homo sapien
taccagcctggcctatgtctacatg

SEQ ID NO: 4697540 - DNA, 25 bp, Homo sapien
catccccagagtttagagcagtgcc

SEQ ID NO: 4697541 - DNA, 25 bp, Homo sapien
caaagtgtcagtcgtactaatgagc

SEQ ID NO: 4697542 - DNA, 25 bp, Homo sapien
taaggccaggtaaggtgaagctacc

SEQ ID NO: 4697543 - DNA, 25 bp, Homo sapien
tggcttctttgctgttcccgatcac

SEQ ID NO: 4697544 - DNA, 25 bp, Homo sapien
ccactgcactgatgccttctcactt

SEQ ID NO: 4697545 - DNA, 25 bp, Homo sapien
gcttctttgctgttcccgatcacac

SEQ ID NO: 4697546 - DNA, 25 bp, Homo sapien
ttctttgctgttcccgatcacacct

SEQ ID NO: 4697547 - DNA, 25 bp, Homo sapien
cgcccagccctagcttcttttttct

SEQ ID NO: 4697548 - DNA, 25 bp, Homo sapien
ttacagacgtcccaccaccatgccc

SEQ ID NO: 4697549 - DNA, 25 bp, Homo sapien
accgcgcccagccctagcttctttt

SEQ ID NO: 4697550 - DNA, 25 bp, Homo sapien
cgcgcccagccctagcttctttttt

SEQ ID NO: 4697551 - DNA, 25 bp, Homo sapien
cctggctaattaagaccctcaactc

SEQ ID NO: 4697552 - DNA, 25 bp, Homo sapien
ggctaattaagaccctcaactctta

SEQ ID NO: 4697553 - DNA, 25 bp, Homo sapien
cattatgcacattttatcacaccca

SEQ ID NO: 4697554 - DNA, 25 bp, Homo sapien
tatgcacattttatcacacccacat

SEQ ID NO: 4697555 - DNA, 25 bp, Homo sapien
tgagctccgcccacaattgtggtgg

SEQ ID NO: 4697556 - DNA, 25 bp, Homo sapien
tgtggtggataatcagcgtgactca

SEQ ID NO: 4697557 - DNA, 25 bp, Homo sapien
gactcaaagtctacccattgactga

SEQ ID NO: 4697558 - DNA, 25 bp, Homo sapien
tcagtttattgaatgagctccgccc

SEQ ID NO: 4697559 - DNA, 25 bp, Homo sapien
caatggacttgacccaactgagaag

SEQ ID NO: 4697560 - DNA, 25 bp, Homo sapien
gctgtaacagaaaggtcaatggact

SEQ ID NO: 4697561 - DNA, 25 bp, Homo sapien
tagaagaactgctatgagctggacc

SEQ ID NO: 4697562 - DNA, 25 bp, Homo sapien
gctggacctgatagctgtgcagaaa

SEQ ID NO: 4697563 - DNA, 25 bp, Homo sapien
tacagatgacttccgtgaggacggg

SEQ ID NO: 4697564 - DNA, 25 bp, Homo sapien
attacacagtgcgtggcctcctggg

SEQ ID NO: 4697565 - DNA, 25 bp, Homo sapien
ggcaaagctacagatgacttccgtg

SEQ ID NO: 4697566 - DNA, 25 bp, Homo sapien
tccttgaaggattacacagtgcgtg

SEQ ID NO: 4697567 - DNA, 25 bp, Homo sapien
ggctcctcaccgatatgtacaatgc

SEQ ID NO: 4697568 - DNA, 25 bp, Homo sapien
gcttttcagtgctcggcgtgggaca

SEQ ID NO: 4697569 - DNA, 25 bp, Homo sapien
tgggacatggatgcaggctcctcac

SEQ ID NO: 4697570 - DNA, 25 bp, Homo sapien
tcatcttaccaaggtacgagggtct

SEQ ID NO: 4697571 - DNA, 25 bp, Homo sapien
tgtctccccacgagtgaatgcagag

SEQ ID NO: 4697572 - DNA, 25 bp, Homo sapien
ggtctggacacacaaagccctagtc

SEQ ID NO: 4697573 - DNA, 25 bp, Homo sapien
gagttattctgtccctcagccagag

SEQ ID NO: 4697574 - DNA, 25 bp, Homo sapien
cagtgaatacccctggtccggagaa

SEQ ID NO: 4697575 - DNA, 25 bp, Homo sapien
agcgtgttcgcttcttgctgggccc

SEQ ID NO: 4697576 - DNA, 25 bp, Homo sapien
taaacagcgtgttcgcttcttgctg

SEQ ID NO: 4697577 - DNA, 25 bp, Homo sapien
ccgctcctaaacagcgtgttcgctt

SEQ ID NO: 4697578 - DNA, 25 bp, Homo sapien
ggaagcctcccgctcctaaacagcg

SEQ ID NO: 4697579 - DNA, 25 bp, Homo sapien
tcgaaccagacccacgttcccgctc

SEQ ID NO: 4697580 - DNA, 25 bp, Homo sapien
gaaccagacccacgttcccgctctc

SEQ ID NO: 4697581 - DNA, 25 bp, Homo sapien
accagacccacgttcccgctctcgt

SEQ ID NO: 4697582 - DNA, 25 bp, Homo sapien
cagacccacgttcccgctctcgttc

SEQ ID NO: 4697583 - DNA, 25 bp, Homo sapien
gctaaaatggaagcacctgcgggat

SEQ ID NO: 4697584 - DNA, 25 bp, Homo sapien
cctgcgggatacagtggagctacaa

SEQ ID NO: 4697585 - DNA, 25 bp, Homo sapien
tataaaatgcgaacctcttccggct

SEQ ID NO: 4697586 - DNA, 25 bp, Homo sapien
tcttccggctgtggaacatggcggc

SEQ ID NO: 4697587 - DNA, 25 bp, Homo sapien
catgtaggccaagtaggcgaaggaa

SEQ ID NO: 4697588 - DNA, 25 bp, Homo sapien
tgtctgcaaaggacacgcaaccacg

SEQ ID NO: 4697589 - DNA, 25 bp, Homo sapien
cttcacgggcagaaggcatgtaggc

SEQ ID NO: 4697590 - DNA, 25 bp, Homo sapien
gaaacgcacgcgaactgtctaccgt

SEQ ID NO: 4697591 - DNA, 25 bp, Homo sapien
aaccgattctgacggcgtagcctac

SEQ ID NO: 4697592 - DNA, 25 bp, Homo sapien
tctgacggcgtagcctacggccttt

SEQ ID NO: 4697593 - DNA, 25 bp, Homo sapien
cggcgtagcctacggcctttcgagg

SEQ ID NO: 4697594 - DNA, 25 bp, Homo sapien
tgaaaaaccgattctgacggcgtag

SEQ ID NO: 4697595 - DNA, 25 bp, Homo sapien
ctgtcaggcgacggagcgtcggagg

SEQ ID NO: 4697596 - DNA, 25 bp, Homo sapien
gagcgtcggaggggtcaaaactcac

SEQ ID NO: 4697597 - DNA, 25 bp, Homo sapien
gcgacggagcgtcggaggggtcaaa

SEQ ID NO: 4697598 - DNA, 25 bp, Homo sapien
tgtcaggcgacggagcgtcggaggg

SEQ ID NO: 4697599 - DNA, 25 bp, Homo sapien
gaggatgggcgggtacgaagaacgc

SEQ ID NO: 4697600 - DNA, 25 bp, Homo sapien
cgggcgtccgcggaggatgggcggg

SEQ ID NO: 4697601 - DNA, 25 bp, Homo sapien
tgggcgggtacgaagaacgccgcga

SEQ ID NO: 4697602 - DNA, 25 bp, Homo sapien
gtccgcggaggatgggcgggtacga

SEQ ID NO: 4697603 - DNA, 25 bp, Homo sapien
gcaggccgctgtaggcccgggagcc

SEQ ID NO: 4697604 - DNA, 25 bp, Homo sapien
cccgggagcccgcagagccgacgga

SEQ ID NO: 4697605 - DNA, 25 bp, Homo sapien
ggacagggcgcagcagagtcgccat

SEQ ID NO: 4697606 - DNA, 25 bp, Homo sapien
agccgacggaggacagggcgcagca

SEQ ID NO: 4697607 - DNA, 25 bp, Homo sapien
gctccttcccgcctgcgcccagaac

SEQ ID NO: 4697608 - DNA, 25 bp, Homo sapien
gagccgggcgccctcaggctccttc

SEQ ID NO: 4697609 - DNA, 25 bp, Homo sapien
ctgcggggcaagaaaaaggccgagg

SEQ ID NO: 4697610 - DNA, 25 bp, Homo sapien
gccgaggtcagaggagccgggcgcc

SEQ ID NO: 4697611 - DNA, 25 bp, Homo sapien
gcggagccggcggccaacagccctt

SEQ ID NO: 4697612 - DNA, 25 bp, Homo sapien
gtggtgcgagtatagcgggccggcg

SEQ ID NO: 4697613 - DNA, 25 bp, Homo sapien
taggggttatagagcgccatcgccg

SEQ ID NO: 4697614 - DNA, 25 bp, Homo sapien
cggcgccgtcgctcctagcccggag

SEQ ID NO: 4697615 - DNA, 25 bp, Homo sapien
gacctaggctatgttccagttaccc

SEQ ID NO: 4697616 - DNA, 25 bp, Homo sapien
ttacccacaggaaacggctccaagc

SEQ ID NO: 4697617 - DNA, 25 bp, Homo sapien
gcattttcataaacgttccgagtgg

SEQ ID NO: 4697618 - DNA, 25 bp, Homo sapien
gagtggttacgagctgcaaccaggt

SEQ ID NO: 4697619 - DNA, 25 bp, Homo sapien
gacctcggagttgactttctagtag

SEQ ID NO: 4697620 - DNA, 25 bp, Homo sapien
ttcagtgcgtttaggtgggatccag

SEQ ID NO: 4697621 - DNA, 25 bp, Homo sapien
gcagacatggtcctcgacctcggag

SEQ ID NO: 4697622 - DNA, 25 bp, Homo sapien
acagactttcggtttcacgcccatt

SEQ ID NO: 4697623 - DNA, 25 bp, Homo sapien
gtctcccctagaactgcgaccatgt

SEQ ID NO: 4697624 - DNA, 25 bp, Homo sapien
ctcatctggtccctgaggaccttca

SEQ ID NO: 4697625 - DNA, 25 bp, Homo sapien
tgtggtctcccctagaactgcgacc

SEQ ID NO: 4697626 - DNA, 25 bp, Homo sapien
gtcctgtggtctcccctagaactgc

SEQ ID NO: 4697627 - DNA, 25 bp, Homo sapien
tcacatccaggaaacggagatactc

SEQ ID NO: 4697628 - DNA, 25 bp, Homo sapien
tggatgtcgaaatccggggacgctc

SEQ ID NO: 4697629 - DNA, 25 bp, Homo sapien
cccaggtcgagggtggatgtcgaaa

SEQ ID NO: 4697630 - DNA, 25 bp, Homo sapien
atactcgcgaccgagggagccttcc

SEQ ID NO: 4697631 - DNA, 25 bp, Homo sapien
gattcagcaagatcacggatgaggc

SEQ ID NO: 4697632 - DNA, 25 bp, Homo sapien
ggcatgagcctgaagagcactcctg

SEQ ID NO: 4697633 - DNA, 25 bp, Homo sapien
catgcagtgcgaggttaatgaacac

SEQ ID NO: 4697634 - DNA, 25 bp, Homo sapien
gagtttgccaatagtcgggacaccc

SEQ ID NO: 4697635 - DNA, 25 bp, Homo sapien
catgagccaacacgcatggaccagt

SEQ ID NO: 4697636 - DNA, 25 bp, Homo sapien
tgtatcccaactgctgacaatagtg

SEQ ID NO: 4697637 - DNA, 25 bp, Homo sapien
cacccagtcagaagtggctgtaccc

SEQ ID NO: 4697638 - DNA, 25 bp, Homo sapien
aatacagactcctccttctggtggc

SEQ ID NO: 4697639 - DNA, 25 bp, Homo sapien
agccagactggctcgccatttggca

SEQ ID NO: 4697640 - DNA, 25 bp, Homo sapien
cagactggctcgccatttggcaggg

SEQ ID NO: 4697641 - DNA, 25 bp, Homo sapien
tcagccagactggctcgccatttgg

SEQ ID NO: 4697642 - DNA, 25 bp, Homo sapien
gccagactggctcgccatttggcag

SEQ ID NO: 4697643 - DNA, 25 bp, Homo sapien
tgagcaaggtgtcctagcagtcctg

SEQ ID NO: 4697644 - DNA, 25 bp, Homo sapien
tgatcgccccgtcaaggtagctgtg

SEQ ID NO: 4697645 - DNA, 25 bp, Homo sapien
ttaaaatagtgcaggtgatcgcccc

SEQ ID NO: 4697646 - DNA, 25 bp, Homo sapien
taaacattaacatgcccggcttgag

SEQ ID NO: 4697647 - DNA, 25 bp, Homo sapien
acaaaggtgctccttcacattccat

SEQ ID NO: 4697648 - DNA, 25 bp, Homo sapien
aaaggtgctccttcacattccatga

SEQ ID NO: 4697649 - DNA, 25 bp, Homo sapien
aaggtgctccttcacattccatgag

SEQ ID NO: 4697650 - DNA, 25 bp, Homo sapien
aggtgctccttcacattccatgagc

SEQ ID NO: 4697651 - DNA, 25 bp, Homo sapien
tactagaaaactctggcgactggcc

SEQ ID NO: 4697652 - DNA, 25 bp, Homo sapien
cacatgtggccaagaaagttgtcca

SEQ ID NO: 4697653 - DNA, 25 bp, Homo sapien
tatggacagtatccagacagcctgt

SEQ ID NO: 4697654 - DNA, 25 bp, Homo sapien
tcatagagtatccaccaggtgccgg

SEQ ID NO: 4697655 - DNA, 25 bp, Homo sapien
gaatcacatacgctagctcctcatc

SEQ ID NO: 4697656 - DNA, 25 bp, Homo sapien
ccccagcagggtgtgaagcatgtcg

SEQ ID NO: 4697657 - DNA, 25 bp, Homo sapien
tcatcatccacgaagcgggtgggtg

SEQ ID NO: 4697658 - DNA, 25 bp, Homo sapien
tcccggtaccgctgaatcacatacg

SEQ ID NO: 4697659 - DNA, 25 bp, Homo sapien
ggtggagataggcaagccctgccct

SEQ ID NO: 4697660 - DNA, 25 bp, Homo sapien
gcttggagtacaggagagagcccaa

SEQ ID NO: 4697661 - DNA, 25 bp, Homo sapien
gggacatgtggcaaagatgctacta

SEQ ID NO: 4697662 - DNA, 25 bp, Homo sapien
gttcctgcaggccttagggagctac

SEQ ID NO: 4697663 - DNA, 25 bp, Homo sapien
tcggatcggtccaaagaatgcaccc

SEQ ID NO: 4697664 - DNA, 25 bp, Homo sapien
tcaaaccatttcaccacgatctccc

SEQ ID NO: 4697665 - DNA, 25 bp, Homo sapien
tgagcgccaagtcggatcggtccaa

SEQ ID NO: 4697666 - DNA, 25 bp, Homo sapien
gcgccaagtcggatcggtccaaaga

SEQ ID NO: 4697667 - DNA, 25 bp, Homo sapien
cagaggaaaaagaaaacatcaagtc

SEQ ID NO: 4697668 - DNA, 25 bp, Homo sapien
tgtggggcagcagaggaaaaagaaa

SEQ ID NO: 4697669 - DNA, 25 bp, Homo sapien
ctgtggggcagcagaggaaaaagaa

SEQ ID NO: 4697670 - DNA, 25 bp, Homo sapien
cagcagaggaaaaagaaaacatcaa

SEQ ID NO: 4697671 - DNA, 25 bp, Homo sapien
ggatcaactccgagaccagcacttg

SEQ ID NO: 4697672 - DNA, 25 bp, Homo sapien
tgcatgggtggtgctgtaatgccca

SEQ ID NO: 4697673 - DNA, 25 bp, Homo sapien
tcccagcgccgctcatagtacaggt

SEQ ID NO: 4697674 - DNA, 25 bp, Homo sapien
gcccgttctgaacggcccatgggat

SEQ ID NO: 4697675 - DNA, 25 bp, Homo sapien
cagcatgagcccagacgactgatac

SEQ ID NO: 4697676 - DNA, 25 bp, Homo sapien
gagttgcaacaggagcactgcgaca

SEQ ID NO: 4697677 - DNA, 25 bp, Homo sapien
caaaggtagtcaagggagccctctg

SEQ ID NO: 4697678 - DNA, 25 bp, Homo sapien
gaattgggtgtagccctcactcctg

SEQ ID NO: 4697679 - DNA, 25 bp, Homo sapien
cacggagccgggtctcagcagggtt

SEQ ID NO: 4697680 - DNA, 25 bp, Homo sapien
tagccgcccctggacgcacggagcc

SEQ ID NO: 4697681 - DNA, 25 bp, Homo sapien
tctcagcagggtttagccggctctg

SEQ ID NO: 4697682 - DNA, 25 bp, Homo sapien
caccttccccgaagccggcaagcca

SEQ ID NO: 4697683 - DNA, 25 bp, Homo sapien
gccccgtccagatgcggcccggttg

SEQ ID NO: 4697684 - DNA, 25 bp, Homo sapien
tgcagcagcgtagacagcgtgaggg

SEQ ID NO: 4697685 - DNA, 25 bp, Homo sapien
ggttgcagcagcgtagacagcgtga

SEQ ID NO: 4697686 - DNA, 25 bp, Homo sapien
tccagatgcggcccggttgcagcag

SEQ ID NO: 4697687 - DNA, 25 bp, Homo sapien
gaggaaaagcggagcgaggcatgcg

SEQ ID NO: 4697688 - DNA, 25 bp, Homo sapien
cggagcgaggcatgcgagaacgagc

SEQ ID NO: 4697689 - DNA, 25 bp, Homo sapien
aaagcggagcgaggcatgcgagaac

SEQ ID NO: 4697690 - DNA, 25 bp, Homo sapien
cgaggcatgcgagaacgagcgaagt

SEQ ID NO: 4697691 - DNA, 25 bp, Homo sapien
ctcaatctcagccatatcgggtttg

SEQ ID NO: 4697692 - DNA, 25 bp, Homo sapien
gtttcgacttatcgaatttctcaat

SEQ ID NO: 4697693 - DNA, 25 bp, Homo sapien
cttgcttgcttctcctgttcaatcg

SEQ ID NO: 4697694 - DNA, 25 bp, Homo sapien
tgttcaatcgtttctttggaaggca

SEQ ID NO: 4697695 - DNA, 25 bp, Homo sapien
gcaggcgcagccttcgttgtcagta

SEQ ID NO: 4697696 - DNA, 25 bp, Homo sapien
aaggcaatacttgtggaatgtacaa

SEQ ID NO: 4697697 - DNA, 25 bp, Homo sapien
gtacaatgcatattggcggtgcacg

SEQ ID NO: 4697698 - DNA, 25 bp, Homo sapien
caatacttgtggaatgtacaatgca

SEQ ID NO: 4697699 - DNA, 25 bp, Homo sapien
gatgaagcgccagccgccagatccc

SEQ ID NO: 4697700 - DNA, 25 bp, Homo sapien
agacccggatgaagcgccagccgcc

SEQ ID NO: 4697701 - DNA, 25 bp, Homo sapien
ggtcttgatgaagacccggatgaag

SEQ ID NO: 4697702 - DNA, 25 bp, Homo sapien
atggtcttgatgaagacccggatga

SEQ ID NO: 4697703 - DNA, 25 bp, Homo sapien
tactcatccagctggcggaaggtcc

SEQ ID NO: 4697704 - DNA, 25 bp, Homo sapien
cataggcccacgaactcattgcggt

SEQ ID NO: 4697705 - DNA, 25 bp, Homo sapien
gtatctgtgccctcgaagatcaggg

SEQ ID NO: 4697706 - DNA, 25 bp, Homo sapien
gcatcccgccgcaggttggtgttga

SEQ ID NO: 4697707 - DNA, 25 bp, Homo sapien
agcccttgtcagggcaactgggaag

SEQ ID NO: 4697708 - DNA, 25 bp, Homo sapien
gtgcttggaggcaccgcaccgggct

SEQ ID NO: 4697709 - DNA, 25 bp, Homo sapien
tgcttggaggcaccgcaccgggctc

SEQ ID NO: 4697710 - DNA, 25 bp, Homo sapien
tgaagcccttgtcagggcaactggg

SEQ ID NO: 4697711 - DNA, 25 bp, Homo sapien
ctgtggtgccggatgtgtagatgta

SEQ ID NO: 4697712 - DNA, 25 bp, Homo sapien
tggtgccggatgtgtagatgtagaa

SEQ ID NO: 4697713 - DNA, 25 bp, Homo sapien
tgccggatgtgtagatgtagaacag

SEQ ID NO: 4697714 - DNA, 25 bp, Homo sapien
accacgatggcggccttgggcagcc

SEQ ID NO: 4697715 - DNA, 25 bp, Homo sapien
tcgttgggccgcatgcggaatccat

SEQ ID NO: 4697716 - DNA, 25 bp, Homo sapien
ggaggcagtcatagacgatgtcgtt

SEQ ID NO: 4697717 - DNA, 25 bp, Homo sapien
atgcggaatccatagtacaccaggg

SEQ ID NO: 4697718 - DNA, 25 bp, Homo sapien
tagacgatgtcgttgggccgcatgc

SEQ ID NO: 4697719 - DNA, 25 bp, Homo sapien
gtacttgatacaatcgtcccagaac

SEQ ID NO: 4697720 - DNA, 25 bp, Homo sapien
ccagaaccgggaggctgagaacttc

SEQ ID NO: 4697721 - DNA, 25 bp, Homo sapien
ggcactggccgattcccacgatgtt

SEQ ID NO: 4697722 - DNA, 25 bp, Homo sapien
tcttccgaatcaccaccgtcatgcc

SEQ ID NO: 4697723 - DNA, 25 bp, Homo sapien
caggctacagttgcactctgtggcc

SEQ ID NO: 4697724 - DNA, 25 bp, Homo sapien
tgcctagtgccatgcgaacctggtg

SEQ ID NO: 4697725 - DNA, 25 bp, Homo sapien
gaggtagcggcacagttcaccaatg

SEQ ID NO: 4697726 - DNA, 25 bp, Homo sapien
tctgtggccccgtagaactcagcca

SEQ ID NO: 4697727 - DNA, 25 bp, Homo sapien
cgttgacacgtaccaaccggatggg

SEQ ID NO: 4697728 - DNA, 25 bp, Homo sapien
ggcccccggatcagctccatggtgt

SEQ ID NO: 4697729 - DNA, 25 bp, Homo sapien
cagctccatggtgtcctcgttgaca

SEQ ID NO: 4697730 - DNA, 25 bp, Homo sapien
cgaaggacaggatgcggctattgaa

SEQ ID NO: 4697731 - DNA, 25 bp, Homo sapien
aatcttcttgttgttggcgccctgg

SEQ ID NO: 4697732 - DNA, 25 bp, Homo sapien
ccctggttgaggtagccatcgaagc

SEQ ID NO: 4697733 - DNA, 25 bp, Homo sapien
cttgaagacatccttggcaatcttc

SEQ ID NO: 4697734 - DNA, 25 bp, Homo sapien
cttggcaatcttcttgttgttggcg

SEQ ID NO: 4697735 - DNA, 25 bp, Homo sapien
ccccagtgcggtctcggaagtacag

SEQ ID NO: 4697736 - DNA, 25 bp, Homo sapien
ggacacgttctcacctttccagcgg

SEQ ID NO: 4697737 - DNA, 25 bp, Homo sapien
tgagtgtgccttccacctcggtggt

SEQ ID NO: 4697738 - DNA, 25 bp, Homo sapien
tttccagcggaacgtgtccccagtg

SEQ ID NO: 4697739 - DNA, 25 bp, Homo sapien
gcagggtagacactgagtagctggt

SEQ ID NO: 4697740 - DNA, 25 bp, Homo sapien
gggtagacactgagtagctggtggt

SEQ ID NO: 4697741 - DNA, 25 bp, Homo sapien
cctacccacacctcgcgcctgcctg

SEQ ID NO: 4697742 - DNA, 25 bp, Homo sapien
tagacactgagtagctggtggtgcc

SEQ ID NO: 4697743 - DNA, 25 bp, Homo sapien
gcgcaggaagatggggcgcgcatac

SEQ ID NO: 4697744 - DNA, 25 bp, Homo sapien
caagacctgagcaaagcgctccagg

SEQ ID NO: 4697745 - DNA, 25 bp, Homo sapien
tggggcgcgcatacaggggcagttc

SEQ ID NO: 4697746 - DNA, 25 bp, Homo sapien
ggccacagcagccattccggcccgg

SEQ ID NO: 4697747 - DNA, 25 bp, Homo sapien
caaccaccagtactgaggaaggcag

SEQ ID NO: 4697748 - DNA, 25 bp, Homo sapien
gggacagctgctagttacccaccca

SEQ ID NO: 4697749 - DNA, 25 bp, Homo sapien
gcaggtgctcaaccgtattctctgg

SEQ ID NO: 4697750 - DNA, 25 bp, Homo sapien
tctggattctaacacggacgtgctt

SEQ ID NO: 4697751 - DNA, 25 bp, Homo sapien
tccttccgtagctctgtcttctgga

SEQ ID NO: 4697752 - DNA, 25 bp, Homo sapien
caaagccctccttccgtagctctgt

SEQ ID NO: 4697753 - DNA, 25 bp, Homo sapien
tctttcacaatagccgggtcaaagc

SEQ ID NO: 4697754 - DNA, 25 bp, Homo sapien
acagcgggtctttcacaatagccgg

SEQ ID NO: 4697755 - DNA, 25 bp, Homo sapien
gtaggcctcttggtccagcgggacg

SEQ ID NO: 4697756 - DNA, 25 bp, Homo sapien
gggacgtagcggcccttctgggcat

SEQ ID NO: 4697757 - DNA, 25 bp, Homo sapien
ccagcgggacgtagcggcccttctg

SEQ ID NO: 4697758 - DNA, 25 bp, Homo sapien
gtccagcgggacgtagcggcccttc

SEQ ID NO: 4697759 - DNA, 25 bp, Homo sapien
gctacgattctctttggccaccaga

SEQ ID NO: 4697760 - DNA, 25 bp, Homo sapien
ggccaccagatggatgctaccactg

SEQ ID NO: 4697761 - DNA, 25 bp, Homo sapien
tgagggataatcaggcagccaccca

SEQ ID NO: 4697762 - DNA, 25 bp, Homo sapien
caaggcagagtttattggcccctga

SEQ ID NO: 4697763 - DNA, 25 bp, Homo sapien
gctacaccctcagcttagataagtg

SEQ ID NO: 4697764 - DNA, 25 bp, Homo sapien
gggctgcggcatcttacctgctaca

SEQ ID NO: 4697765 - DNA, 25 bp, Homo sapien
ccttgccagattcacatgggcactg

SEQ ID NO: 4697766 - DNA, 25 bp, Homo sapien
cggctgaaccagcacattggaggca

SEQ ID NO: 4697767 - DNA, 25 bp, Homo sapien
ccatagatgaacttacagggtgctc

SEQ ID NO: 4697768 - DNA, 25 bp, Homo sapien
cacctgctgcatgcacggagatgac

SEQ ID NO: 4697769 - DNA, 25 bp, Homo sapien
gctatttttgtcagttaacctcaca

SEQ ID NO: 4697770 - DNA, 25 bp, Homo sapien
taacctcacaagcatgtattaagca

SEQ ID NO: 4697771 - DNA, 25 bp, Homo sapien
tttttcagatgagagcaccgagact

SEQ ID NO: 4697772 - DNA, 25 bp, Homo sapien
actccgaatgggtggcttgcctgag

SEQ ID NO: 4697773 - DNA, 25 bp, Homo sapien
gactctttgtgatccctttttcaga

SEQ ID NO: 4697774 - DNA, 25 bp, Homo sapien
tccctttgggtccacacagaacagg

SEQ ID NO: 4697775 - DNA, 25 bp, Homo sapien
aggaagccgagctcgcaggaaactc

SEQ ID NO: 4697776 - DNA, 25 bp, Homo sapien
ttgaggaagccgagctcgcaggaaa

SEQ ID NO: 4697777 - DNA, 25 bp, Homo sapien
gttgaggaagccgagctcgcaggaa

SEQ ID NO: 4697778 - DNA, 25 bp, Homo sapien
gctcgcaggaaactcccctcaactt

SEQ ID NO: 4697779 - DNA, 25 bp, Homo sapien
acctccactgacaagggcgcagcca

SEQ ID NO: 4697780 - DNA, 25 bp, Homo sapien
cctccactgacaagggcgcagccat

SEQ ID NO: 4697781 - DNA, 25 bp, Homo sapien
tctcagactctcctaggcgggtagc

SEQ ID NO: 4697782 - DNA, 25 bp, Homo sapien
tgggacacccagtgattcggccgtg

SEQ ID NO: 4697783 - DNA, 25 bp, Homo sapien
tgcgcctctatttccggacagacgg

SEQ ID NO: 4697784 - DNA, 25 bp, Homo sapien
tctaggttctaggagctcagatgcc

SEQ ID NO: 4697785 - DNA, 25 bp, Homo sapien
tgctgaacgctgtagggcacggaca

SEQ ID NO: 4697786 - DNA, 25 bp, Homo sapien
aaatgctgaacgctgtagggcacgg

SEQ ID NO: 4697787 - DNA, 25 bp, Homo sapien
cgctgtagggcacggacagacttct

SEQ ID NO: 4697788 - DNA, 25 bp, Homo sapien
gcagaaatgctgaacgctgtagggc

SEQ ID NO: 4697789 - DNA, 25 bp, Homo sapien
ctgcaaaggaggaccagagaaaaag

SEQ ID NO: 4697790 - DNA, 25 bp, Homo sapien
gagaaaaagacagccaggtgagctc

SEQ ID NO: 4697791 - DNA, 25 bp, Homo sapien
aggaggaccagagaaaaagacagcc

SEQ ID NO: 4697792 - DNA, 25 bp, Homo sapien
ccagagaaaaagacagccaggtgag

SEQ ID NO: 4697793 - DNA, 25 bp, Homo sapien
gcaaagtgactcgatgtttcttaat

SEQ ID NO: 4697794 - DNA, 25 bp, Homo sapien
agtgactcgatgtttcttaataccg

SEQ ID NO: 4697795 - DNA, 25 bp, Homo sapien
tttcttaataccgtcaaacaggagc

SEQ ID NO: 4697796 - DNA, 25 bp, Homo sapien
aataccgtcaaacaggagctccgca

SEQ ID NO: 4697797 - DNA, 25 bp, Homo sapien
gcctcccaggttccggttcaagcaa

SEQ ID NO: 4697798 - DNA, 25 bp, Homo sapien
cgcctcccaggttccggttcaagca

SEQ ID NO: 4697799 - DNA, 25 bp, Homo sapien
ctcccaggttccggttcaagcaatt

SEQ ID NO: 4697800 - DNA, 25 bp, Homo sapien
taccgcatcgccactcgtattgttc

SEQ ID NO: 4697801 - DNA, 25 bp, Homo sapien
gagagggggaactcatggctccctt

SEQ ID NO: 4697802 - DNA, 25 bp, Homo sapien
ttcgcaggatgcaagggccactcgg

SEQ ID NO: 4697803 - DNA, 25 bp, Homo sapien
atggtgaggctaccgcatcgccact

SEQ ID NO: 4697804 - DNA, 25 bp, Homo sapien
tgtggctgctcgatagagccaccgg

SEQ ID NO: 4697805 - DNA, 25 bp, Homo sapien
ggcctccatcttggtactgtctggt

SEQ ID NO: 4697806 - DNA, 25 bp, Homo sapien
tggtgggccgccaacccatacatct

SEQ ID NO: 4697807 - DNA, 25 bp, Homo sapien
gagccaccggggtctgacacatcca

SEQ ID NO: 4697808 - DNA, 25 bp, Homo sapien
ctctggccgctcttttagcaaattc

SEQ ID NO: 4697809 - DNA, 25 bp, Homo sapien
aattcttcttgatccagatgagcag

SEQ ID NO: 4697810 - DNA, 25 bp, Homo sapien
tggatgaacaactctggccgctctt

SEQ ID NO: 4697811 - DNA, 25 bp, Homo sapien
tctccctggatgaacaactctggcc

SEQ ID NO: 4697812 - DNA, 25 bp, Homo sapien
gactccttggaattctagacccgtg

SEQ ID NO: 4697813 - DNA, 25 bp, Homo sapien
caacatttggtcaggcagcttagcc

SEQ ID NO: 4697814 - DNA, 25 bp, Homo sapien
gaagtaagtcgcctaaggtcccaca

SEQ ID NO: 4697815 - DNA, 25 bp, Homo sapien
taacttcgtggcaactggaacctgg

SEQ ID NO: 4697816 - DNA, 25 bp, Homo sapien
ggcatcgttaatcagcaccagaatt

SEQ ID NO: 4697817 - DNA, 25 bp, Homo sapien
gctcccagtcggcatcgttaatcag

SEQ ID NO: 4697818 - DNA, 25 bp, Homo sapien
cagtagctcccagtcggcatcgtta

SEQ ID NO: 4697819 - DNA, 25 bp, Homo sapien
gtcggcatcgttaatcagcaccaga

SEQ ID NO: 4697820 - DNA, 25 bp, Homo sapien
ccagccactctatatgtgcctgagg

SEQ ID NO: 4697821 - DNA, 25 bp, Homo sapien
tgctctggaagagacagactctacc

SEQ ID NO: 4697822 - DNA, 25 bp, Homo sapien
ggtatcctatacctcaacctgcaaa

SEQ ID NO: 4697823 - DNA, 25 bp, Homo sapien
tgaggagaggcccaacgctttccca

SEQ ID NO: 4697824 - DNA, 25 bp, Homo sapien
agatgaagaggacgctgtcctggtc

SEQ ID NO: 4697825 - DNA, 25 bp, Homo sapien
tgaagaggacgctgtcctggtcctg

SEQ ID NO: 4697826 - DNA, 25 bp, Homo sapien
tcagccgccgtgcagagtggagatg

SEQ ID NO: 4697827 - DNA, 25 bp, Homo sapien
ggagatgaagaggacgctgtcctgg

SEQ ID NO: 4697828 - DNA, 25 bp, Homo sapien
ttctcccctctaagggtgcccaggc

SEQ ID NO: 4697829 - DNA, 25 bp, Homo sapien
gcccaaggggatgtctgattgcttc

SEQ ID NO: 4697830 - DNA, 25 bp, Homo sapien
gattgcttcgttctcccctctaagg

SEQ ID NO: 4697831 - DNA, 25 bp, Homo sapien
gatgtctgattgcttcgttctcccc

SEQ ID NO: 4697832 - DNA, 25 bp, Homo sapien
gctgctggaaaagggagtgctgggc

SEQ ID NO: 4697833 - DNA, 25 bp, Homo sapien
ggagtgctgggctctggcgcctgtc

SEQ ID NO: 4697834 - DNA, 25 bp, Homo sapien
gctgctcacgtgcttgagaaaggct

SEQ ID NO: 4697835 - DNA, 25 bp, Homo sapien
cacgtgcttgagaaaggctcatttt

SEQ ID NO: 4697836 - DNA, 25 bp, Homo sapien
gagtcggcactcaataggggacccc

SEQ ID NO: 4697837 - DNA, 25 bp, Homo sapien
tgagaagcctccagtctttgggtag

SEQ ID NO: 4697838 - DNA, 25 bp, Homo sapien
tccttcagctactcaggtccattca

SEQ ID NO: 4697839 - DNA, 25 bp, Homo sapien
ctggagcgccttgtcagcggccact

SEQ ID NO: 4697840 - DNA, 25 bp, Homo sapien
ctgtggagcggggcaggccagccag

SEQ ID NO: 4697841 - DNA, 25 bp, Homo sapien
gcaggccagccagggtcaagggcta

SEQ ID NO: 4697842 - DNA, 25 bp, Homo sapien
ggcaggccagccagggtcaagggct

SEQ ID NO: 4697843 - DNA, 25 bp, Homo sapien
ggccagccagggtcaagggctaggg

SEQ ID NO: 4697844 - DNA, 25 bp, Homo sapien
ttatttgcccaaggccggctgttgc

SEQ ID NO: 4697845 - DNA, 25 bp, Homo sapien
caggcttctacttgctagtccaagg

SEQ ID NO: 4697846 - DNA, 25 bp, Homo sapien
ggagagaaaacggacattcgcgcca

SEQ ID NO: 4697847 - DNA, 25 bp, Homo sapien
ccagcagaatgagctgtaagcagcc

SEQ ID NO: 4697848 - DNA, 25 bp, Homo sapien
tagtcctggagaaaagcccaccagc

SEQ ID NO: 4697849 - DNA, 25 bp, Homo sapien
tgcagccagggaaacggatcctagc

SEQ ID NO: 4697850 - DNA, 25 bp, Homo sapien
ccaggttacaagaatcggacaggct

SEQ ID NO: 4697851 - DNA, 25 bp, Homo sapien
gaaatcgtctggtgtgccttggaca

SEQ ID NO: 4697852 - DNA, 25 bp, Homo sapien
atttcctcaaaagcagggatcagga

SEQ ID NO: 4697853 - DNA, 25 bp, Homo sapien
tttatttcctcaaaagcagggatca

SEQ ID NO: 4697854 - DNA, 25 bp, Homo sapien
ttatttgtttatttcctcaaaagca

SEQ ID NO: 4697855 - DNA, 25 bp, Homo sapien
tatttgtttatttcctcaaaagcag

SEQ ID NO: 4697856 - DNA, 25 bp, Homo sapien
ctccgagctgtcctggactggcgct

SEQ ID NO: 4697857 - DNA, 25 bp, Homo sapien
tggactggcgctttttaggagcgaa

SEQ ID NO: 4697858 - DNA, 25 bp, Homo sapien
ctgagcgcctgctaggtggtccgac

SEQ ID NO: 4697859 - DNA, 25 bp, Homo sapien
gcttcgccactgattgtccaaacgc

SEQ ID NO: 4697860 - DNA, 25 bp, Homo sapien
cttccggattcccggagatcccagg

SEQ ID NO: 4697861 - DNA, 25 bp, Homo sapien
ccttccggattcccggagatcccag

SEQ ID NO: 4697862 - DNA, 25 bp, Homo sapien
gccttccggattcccggagatccca

SEQ ID NO: 4697863 - DNA, 25 bp, Homo sapien
tgccttccggattcccggagatccc

SEQ ID NO: 4697864 - DNA, 25 bp, Homo sapien
tggtttccatgcagctgggagacag

SEQ ID NO: 4697865 - DNA, 25 bp, Homo sapien
tcttggagagctcagccaaggccgg

SEQ ID NO: 4697866 - DNA, 25 bp, Homo sapien
tgggccgtaaaagactctggggtgc

SEQ ID NO: 4697867 - DNA, 25 bp, Homo sapien
tgagtcaggtccacgggagagcagg

SEQ ID NO: 4697868 - DNA, 25 bp, Homo sapien
ttctcatccccggaacaagggccca

SEQ ID NO: 4697869 - DNA, 25 bp, Homo sapien
cagggcccggagtggacactgagga

SEQ ID NO: 4697870 - DNA, 25 bp, Homo sapien
agcctggctctgcaccggtcacggc

SEQ ID NO: 4697871 - DNA, 25 bp, Homo sapien
gggccgtcactaaccagtccagggc

SEQ ID NO: 4697872 - DNA, 25 bp, Homo sapien
tcggcagatgggaatccaggagctc

SEQ ID NO: 4697873 - DNA, 25 bp, Homo sapien
gagcagaggcttgtccccaatatcc

SEQ ID NO: 4697874 - DNA, 25 bp, Homo sapien
tcatctttcctatttgagggaagac

SEQ ID NO: 4697875 - DNA, 25 bp, Homo sapien
gctccaagcccggttccaagaggac

SEQ ID NO: 4697876 - DNA, 25 bp, Homo sapien
ctagcctccaaaccttccacctctg

SEQ ID NO: 4697877 - DNA, 25 bp, Homo sapien
ttctagcctccaaaccttccacctc

SEQ ID NO: 4697878 - DNA, 25 bp, Homo sapien
ctgggaactctcatttctagcctcc

SEQ ID NO: 4697879 - DNA, 25 bp, Homo sapien
agcctccaaaccttccacctctgcc

SEQ ID NO: 4697880 - DNA, 25 bp, Homo sapien
acgtgcgcactgaaccctggagtcc

SEQ ID NO: 4697881 - DNA, 25 bp, Homo sapien
aggggcagcacgtgcgcactgaacc

SEQ ID NO: 4697882 - DNA, 25 bp, Homo sapien
agcttccatttgaggccatttctag

SEQ ID NO: 4697883 - DNA, 25 bp, Homo sapien
gtcctgatctctagcctagctcaaa

SEQ ID NO: 4697884 - DNA, 25 bp, Homo sapien
gaactctgcagcctctcgggagagg

SEQ ID NO: 4697885 - DNA, 25 bp, Homo sapien
tccgtcctccaaagcaggggatgtt

SEQ ID NO: 4697886 - DNA, 25 bp, Homo sapien
gaggagcagaaaagggagcggcctg

SEQ ID NO: 4697887 - DNA, 25 bp, Homo sapien
gcggcctggcggcaccacagatggg

SEQ ID NO: 4697888 - DNA, 25 bp, Homo sapien
tcatggaacccctgggcgttgaacc

SEQ ID NO: 4697889 - DNA, 25 bp, Homo sapien
tgtgcgtcacctccttgcgtcggtc

SEQ ID NO: 4697890 - DNA, 25 bp, Homo sapien
tgcgtggatgctcaagttttctctc

SEQ ID NO: 4697891 - DNA, 25 bp, Homo sapien
tgcaccctcagagtgggatcctgct

SEQ ID NO: 4697892 - DNA, 25 bp, Homo sapien
gggcagcgagtgttcggcattgcgg

SEQ ID NO: 4697893 - DNA, 25 bp, Homo sapien
catcctggcccgggggtagtccagc

SEQ ID NO: 4697894 - DNA, 25 bp, Homo sapien
cgagtgttcggcattgcgggccagg

SEQ ID NO: 4697895 - DNA, 25 bp, Homo sapien
gccaggatggcaaggaccacggcgg

SEQ ID NO: 4697896 - DNA, 25 bp, Homo sapien
gggttaggtgcccactcggtgccaa

SEQ ID NO: 4697897 - DNA, 25 bp, Homo sapien
ggaggggcctgtctaggtggtgtct

SEQ ID NO: 4697898 - DNA, 25 bp, Homo sapien
atctgcgaagctgggggttaggtgc

SEQ ID NO: 4697899 - DNA, 25 bp, Homo sapien
actcggtgccaatgcccgggtctct

SEQ ID NO: 4697900 - DNA, 25 bp, Homo sapien
gctgggcccaacctacacccaggga

SEQ ID NO: 4697901 - DNA, 25 bp, Homo sapien
ccaagaggaaggagtaggggaccag

SEQ ID NO: 4697902 - DNA, 25 bp, Homo sapien
ggtgtcccgcgtcggcctgtggcct

SEQ ID NO: 4697903 - DNA, 25 bp, Homo sapien
tcggggtcctctctggcggctcggg

SEQ ID NO: 4697904 - DNA, 25 bp, Homo sapien
agcgtggtcgatccctgccacgttg

SEQ ID NO: 4697905 - DNA, 25 bp, Homo sapien
cgttgggccccagtggacttcagag

SEQ ID NO: 4697906 - DNA, 25 bp, Homo sapien
ctgtgcccggaagcctccagcgtgg

SEQ ID NO: 4697907 - DNA, 25 bp, Homo sapien
cacgttgggccccagtggacttcag

SEQ ID NO: 4697908 - DNA, 25 bp, Homo sapien
tacctacctatgtgacctgtggctg

SEQ ID NO: 4697909 - DNA, 25 bp, Homo sapien
taccttcgttaggtgggcagatacc

SEQ ID NO: 4697910 - DNA, 25 bp, Homo sapien
caaactgtggtaattgtgggcggcc

SEQ ID NO: 4697911 - DNA, 25 bp, Homo sapien
gactttaaggatcacacctggtgca

SEQ ID NO: 4697912 - DNA, 25 bp, Homo sapien
tgttgtccacattgtggtccgtggc

SEQ ID NO: 4697913 - DNA, 25 bp, Homo sapien
ggtgttgtccacattgtggtccgtg

SEQ ID NO: 4697914 - DNA, 25 bp, Homo sapien
gtccacattgtggtccgtggcacac

SEQ ID NO: 4697915 - DNA, 25 bp, Homo sapien
tgtggtgttgtccacattgtggtcc

SEQ ID NO: 4697916 - DNA, 25 bp, Homo sapien
agcagcatagtcatcgcccacagcc

SEQ ID NO: 4697917 - DNA, 25 bp, Homo sapien
atatagtcggccccccagttcctgg

SEQ ID NO: 4697918 - DNA, 25 bp, Homo sapien
ggtccagtgcttgggaccctcttca

SEQ ID NO: 4697919 - DNA, 25 bp, Homo sapien
gaaactggtgcctttctttggtcca

SEQ ID NO: 4697920 - DNA, 25 bp, Homo sapien
caggatatagtcggccccccagttc

SEQ ID NO: 4697921 - DNA, 25 bp, Homo sapien
gattgttggtcagaatgttgtctgt

SEQ ID NO: 4697922 - DNA, 25 bp, Homo sapien
tctgggagtccagcattggggccac

SEQ ID NO: 4697923 - DNA, 25 bp, Homo sapien
tgccccatgagaagccgcagagtct

SEQ ID NO: 4697924 - DNA, 25 bp, Homo sapien
ccgcagagtctgattgttggtcaga

SEQ ID NO: 4697925 - DNA, 25 bp, Homo sapien
gatgtcgtcgaaaggccaagtgtag

SEQ ID NO: 4697926 - DNA, 25 bp, Homo sapien
cttcagcccgcagggatgcaaggaa

SEQ ID NO: 4697927 - DNA, 25 bp, Homo sapien
gatgtggcgggtagaaagcaagctg

SEQ ID NO: 4697928 - DNA, 25 bp, Homo sapien
cagcctggcaggcataggcgaagac

SEQ ID NO: 4697929 - DNA, 25 bp, Homo sapien
tctgtctcccaggtttgagcaattc

SEQ ID NO: 4697930 - DNA, 25 bp, Homo sapien
ctgtctcccaggtttgagcaattct

SEQ ID NO: 4697931 - DNA, 25 bp, Homo sapien
cattcatgtacccataacggtgctc

SEQ ID NO: 4697932 - DNA, 25 bp, Homo sapien
ctagtgcttctaagatcaggtggat

SEQ ID NO: 4697933 - DNA, 25 bp, Homo sapien
gaagttgaccctctcgtcttccagc

SEQ ID NO: 4697934 - DNA, 25 bp, Homo sapien
agcccctggtgggatttcaccggca

SEQ ID NO: 4697935 - DNA, 25 bp, Homo sapien
tcaaaccctatcttgctgggcctct

SEQ ID NO: 4697936 - DNA, 25 bp, Homo sapien
tcacatgagctgaggcctgcatgcg

SEQ ID NO: 4697937 - DNA, 25 bp, Homo sapien
gggcctcttagagggccgagtcaca

SEQ ID NO: 4697938 - DNA, 25 bp, Homo sapien
ctcgtcaaaccctatcttgctgggc

SEQ ID NO: 4697939 - DNA, 25 bp, Homo sapien
tgcgagccaggctgatgacaaagac

SEQ ID NO: 4697940 - DNA, 25 bp, Homo sapien
atgcgttcccgacggtcaggcctgc

SEQ ID NO: 4697941 - DNA, 25 bp, Homo sapien
cagagcgaggcgagcatgcgttccc

SEQ ID NO: 4697942 - DNA, 25 bp, Homo sapien
cgttcccgacggtcaggcctgcgag

SEQ ID NO: 4697943 - DNA, 25 bp, Homo sapien
tctacgccgaggttcctgatggcac

SEQ ID NO: 4697944 - DNA, 25 bp, Homo sapien
tcgcccttggtcagagtgcggcccg

SEQ ID NO: 4697945 - DNA, 25 bp, Homo sapien
tagcccgggagcaggtctacgccga

SEQ ID NO: 4697946 - DNA, 25 bp, Homo sapien
tgcggcccgagtaagggtcctggta

SEQ ID NO: 4697947 - DNA, 25 bp, Homo sapien
ctcttcccagatggagtaatggctg

SEQ ID NO: 4697948 - DNA, 25 bp, Homo sapien
tcttcccagatggagtaatggctga

SEQ ID NO: 4697949 - DNA, 25 bp, Homo sapien
tactgagcacatgctaagccccagg

SEQ ID NO: 4697950 - DNA, 25 bp, Homo sapien
cacaaacaaggaatccatgtcccat

SEQ ID NO: 4697951 - DNA, 25 bp, Homo sapien
acgaggcacctctcaaagtggccca

SEQ ID NO: 4697952 - DNA, 25 bp, Homo sapien
ttctcccggcccctcaatggtgagg

SEQ ID NO: 4697953 - DNA, 25 bp, Homo sapien
aagttgctctcaaagcgcacgtcat

SEQ ID NO: 4697954 - DNA, 25 bp, Homo sapien
tcaaacaccaggacccgggccaggc

SEQ ID NO: 4697955 - DNA, 25 bp, Homo sapien
gcgcacgtcatcctcaaacaccagg

SEQ ID NO: 4697956 - DNA, 25 bp, Homo sapien
gttgctctcaaagcgcacgtcatcc

SEQ ID NO: 4697957 - DNA, 25 bp, Homo sapien
cagacgcagggcataggccagcgtc

SEQ ID NO: 4697958 - DNA, 25 bp, Homo sapien
agcgtccagtaggagtacccagcca

SEQ ID NO: 4697959 - DNA, 25 bp, Homo sapien
ggtgctggtcgaacatgatgggcag

SEQ ID NO: 4697960 - DNA, 25 bp, Homo sapien
agggttcacctgcttccgtccgagg

SEQ ID NO: 4697961 - DNA, 25 bp, Homo sapien
cgcagggtcttttgggagccgctcc

SEQ ID NO: 4697962 - DNA, 25 bp, Homo sapien
aggatgtctccgtgtcactgagcca

SEQ ID NO: 4697963 - DNA, 25 bp, Homo sapien
ccagaagtgtgccttgtactgctcg

SEQ ID NO: 4697964 - DNA, 25 bp, Homo sapien
ctccagctgatgaggcggccgctgt

SEQ ID NO: 4697965 - DNA, 25 bp, Homo sapien
ccatgcccaaggtggtggccaggtc

SEQ ID NO: 4697966 - DNA, 25 bp, Homo sapien
tctgagtggtttctcccgatgaaag

SEQ ID NO: 4697967 - DNA, 25 bp, Homo sapien
tttagggaatgggatccatctctga

SEQ ID NO: 4697968 - DNA, 25 bp, Homo sapien
cacaaggccctgaatcaggccaggc

SEQ ID NO: 4697969 - DNA, 25 bp, Homo sapien
ggcccctcagctgagtccttaggga

SEQ ID NO: 4697970 - DNA, 25 bp, Homo sapien
ctcagctgagtccttagggagggaa

SEQ ID NO: 4697971 - DNA, 25 bp, Homo sapien
gggtctgcccagcttgaaacagaag

SEQ ID NO: 4697972 - DNA, 25 bp, Homo sapien
tggggagacccaaacatcaagctgg

SEQ ID NO: 4697973 - DNA, 25 bp, Homo sapien
gtctgcaagggtcctgctttacctc

SEQ ID NO: 4697974 - DNA, 25 bp, Homo sapien
ctttacctccctgtactttgcaccg

SEQ ID NO: 4697975 - DNA, 25 bp, Homo sapien
ctccctgtactttgcaccggccagg

SEQ ID NO: 4697976 - DNA, 25 bp, Homo sapien
tctgcaagggtcctgctttacctcc

SEQ ID NO: 4697977 - DNA, 25 bp, Homo sapien
agtgcaaatggcttttattgagggc

SEQ ID NO: 4697978 - DNA, 25 bp, Homo sapien
aaagtgcaaatggcttttattgagg

SEQ ID NO: 4697979 - DNA, 25 bp, Homo sapien
gcaaatggcttttattgagggccta

SEQ ID NO: 4697980 - DNA, 25 bp, Homo sapien
tgcaaatggcttttattgagggcct

SEQ ID NO: 4697981 - DNA, 25 bp, Homo sapien
ttagaacgaataaagcaccgagtcc

SEQ ID NO: 4697982 - DNA, 25 bp, Homo sapien
agtgagtcgctcaaggtcatagcca

SEQ ID NO: 4697983 - DNA, 25 bp, Homo sapien
cacaagagatgatccaaagggccgg

SEQ ID NO: 4697984 - DNA, 25 bp, Homo sapien
gcggcccatgggaggtgcttaataa

SEQ ID NO: 4697985 - DNA, 25 bp, Homo sapien
ccaataaatcacactgagtgcccat

SEQ ID NO: 4697986 - DNA, 25 bp, Homo sapien
ttgccaataaatcacactgagtgcc

SEQ ID NO: 4697987 - DNA, 25 bp, Homo sapien
tgccaataaatcacactgagtgccc

SEQ ID NO: 4697988 - DNA, 25 bp, Homo sapien
gccaataaatcacactgagtgccca

SEQ ID NO: 4697989 - DNA, 25 bp, Homo sapien
gcttgggtcctccaccgacttggga

SEQ ID NO: 4697990 - DNA, 25 bp, Homo sapien
gtgcttcccgccagtcatcatcaat

SEQ ID NO: 4697991 - DNA, 25 bp, Homo sapien
atcaattgcacctgacccgaatgtc

SEQ ID NO: 4697992 - DNA, 25 bp, Homo sapien
cgaatgtcttatcactgaattgttc

SEQ ID NO: 4697993 - DNA, 25 bp, Homo sapien
cctgacccgaatgtcttatcactga

SEQ ID NO: 4697994 - DNA, 25 bp, Homo sapien
ctggtttgcactgccctcatgatag

SEQ ID NO: 4697995 - DNA, 25 bp, Homo sapien
gcactgccctcatgatagctggatc

SEQ ID NO: 4697996 - DNA, 25 bp, Homo sapien
catgatagctggatcttctagttca

SEQ ID NO: 4697997 - DNA, 25 bp, Homo sapien
ttctagttcattttcaatcaccatc

SEQ ID NO: 4697998 - DNA, 25 bp, Homo sapien
gccgccttggtaatgcatgttcaga

SEQ ID NO: 4697999 - DNA, 25 bp, Homo sapien
tacatccagactgtagcgggacaca

SEQ ID NO: 4698000 - DNA, 25 bp, Homo sapien
ggtgagattggatacagccatctgc

SEQ ID NO: 4698001 - DNA, 25 bp, Homo sapien
gcttgatgtcctgtcactataggga

SEQ ID NO: 4698002 - DNA, 25 bp, Homo sapien
taatccagggatcagtgctttgcag

SEQ ID NO: 4698003 - DNA, 25 bp, Homo sapien
cagcagctgactgtttttccaagta

SEQ ID NO: 4698004 - DNA, 25 bp, Homo sapien
agttgcatcatctggaatttaggga

SEQ ID NO: 4698005 - DNA, 25 bp, Homo sapien
catctggaatttagggacccaatcc

SEQ ID NO: 4698006 - DNA, 25 bp, Homo sapien
ggtgcgctcctttttcgggccatca

SEQ ID NO: 4698007 - DNA, 25 bp, Homo sapien
gcttggtgcgctcctttttcgggcc

SEQ ID NO: 4698008 - DNA, 25 bp, Homo sapien
ggtgatgagcttggtgcgctccttt

SEQ ID NO: 4698009 - DNA, 25 bp, Homo sapien
gagcttggtgcgctcctttttcggg

SEQ ID NO: 4698010 - DNA, 25 bp, Homo sapien
caaagagcccgcaaattgcactgga

SEQ ID NO: 4698011 - DNA, 25 bp, Homo sapien
aattgcactggattataggcgcgct

SEQ ID NO: 4698012 - DNA, 25 bp, Homo sapien
cactggattataggcgcgctccagt

SEQ ID NO: 4698013 - DNA, 25 bp, Homo sapien
attataggcgcgctccagtttagcc

SEQ ID NO: 4698014 - DNA, 25 bp, Homo sapien
tcaaacttttgtttcatcatcctca

SEQ ID NO: 4698015 - DNA, 25 bp, Homo sapien
caaacttttgtttcatcatcctcac

SEQ ID NO: 4698016 - DNA, 25 bp, Homo sapien
ctattctgatgaggtccttgctggt

SEQ ID NO: 4698017 - DNA, 25 bp, Homo sapien
tattctgatgaggtccttgctggtc

SEQ ID NO: 4698018 - DNA, 25 bp, Homo sapien
attctgatgaggtccttgctggtcc

SEQ ID NO: 4698019 - DNA, 25 bp, Homo sapien
tatgaagtcgttgaagtcggaggcc

SEQ ID NO: 4698020 - DNA, 25 bp, Homo sapien
gaggccagggtcgtgccatggagac

SEQ ID NO: 4698021 - DNA, 25 bp, Homo sapien
gcagctcgcccattggccagttcaa

SEQ ID NO: 4698022 - DNA, 25 bp, Homo sapien
ggagcgacacggctgcgcccagaaa

SEQ ID NO: 4698023 - DNA, 25 bp, Homo sapien
agccccgtggtagccaagagaggaa

SEQ ID NO: 4698024 - DNA, 25 bp, Homo sapien
gggcagagccccgtggtagccaaga

SEQ ID NO: 4698025 - DNA, 25 bp, Homo sapien
cagagccccgtggtagccaagagag

SEQ ID NO: 4698026 - DNA, 25 bp, Homo sapien
gcagagccccgtggtagccaagaga

SEQ ID NO: 4698027 - DNA, 25 bp, Homo sapien
gagggtaccggtttctgcccataga

SEQ ID NO: 4698028 - DNA, 25 bp, Homo sapien
ggtttctgcccatagagagaaaggt

SEQ ID NO: 4698029 - DNA, 25 bp, Homo sapien
gcaggagggtaccggtttctgccca

SEQ ID NO: 4698030 - DNA, 25 bp, Homo sapien
gtaccggtttctgcccatagagaga

SEQ ID NO: 4698031 - DNA, 25 bp, Homo sapien
tctgtcggcggagagaagggacggc

SEQ ID NO: 4698032 - DNA, 25 bp, Homo sapien
gagcgagggagagcctctgtcggcg

SEQ ID NO: 4698033 - DNA, 25 bp, Homo sapien
actgccatgtggaggcccgaggaga

SEQ ID NO: 4698034 - DNA, 25 bp, Homo sapien
gagggcgtacaagtgactgccatgt

SEQ ID NO: 4698035 - DNA, 25 bp, Homo sapien
gtgagaaccgctcggccccaagtgg

SEQ ID NO: 4698036 - DNA, 25 bp, Homo sapien
ggcgggtgagaaccgctcggcccca

SEQ ID NO: 4698037 - DNA, 25 bp, Homo sapien
cccagagggccagaaccgcgcaggg

SEQ ID NO: 4698038 - DNA, 25 bp, Homo sapien
ggcggacgtgcggagagggcgggtg

SEQ ID NO: 4698039 - DNA, 25 bp, Homo sapien
ctgccaaagtagggggaaatagtag

SEQ ID NO: 4698040 - DNA, 25 bp, Homo sapien
tgccaaagtagggggaaatagtaga

SEQ ID NO: 4698041 - DNA, 25 bp, Homo sapien
gctaggcatcaaagccgcaaaggtg

SEQ ID NO: 4698042 - DNA, 25 bp, Homo sapien
ttggcagttggatgaaaacttggga

SEQ ID NO: 4698043 - DNA, 25 bp, Homo sapien
cttgggaggcgctcctctactgtcc

SEQ ID NO: 4698044 - DNA, 25 bp, Homo sapien
tactgtccaagtcgcacagcaactg

SEQ ID NO: 4698045 - DNA, 25 bp, Homo sapien
tgggggagccgcctgaggatgaggc

SEQ ID NO: 4698046 - DNA, 25 bp, Homo sapien
agccgcctgaggatgaggcagacat

SEQ ID NO: 4698047 - DNA, 25 bp, Homo sapien
gggagccgcctgaggatgaggcaga

SEQ ID NO: 4698048 - DNA, 25 bp, Homo sapien
ctgggggagccgcctgaggatgagg

SEQ ID NO: 4698049 - DNA, 25 bp, Homo sapien
gttacactgggtgcgccacaaggtg

SEQ ID NO: 4698050 - DNA, 25 bp, Homo sapien
tactccgttcttcccacacgatgga

SEQ ID NO: 4698051 - DNA, 25 bp, Homo sapien
ggtgctctcaagacctttttctgcg

SEQ ID NO: 4698052 - DNA, 25 bp, Homo sapien
tctgcgtgagactcgttactccgtt

SEQ ID NO: 4698053 - DNA, 25 bp, Homo sapien
tcctccttggatttagtgaagcaca

SEQ ID NO: 4698054 - DNA, 25 bp, Homo sapien
ttagtgaagcacagcggaaagcagg

SEQ ID NO: 4698055 - DNA, 25 bp, Homo sapien
gggttcttagggctggatctcctct

SEQ ID NO: 4698056 - DNA, 25 bp, Homo sapien
aagcaggcggatccttctacacagt

SEQ ID NO: 4698057 - DNA, 25 bp, Homo sapien
ataaaaacagagctcacagcctctg

SEQ ID NO: 4698058 - DNA, 25 bp, Homo sapien
cagcctctgggggccaccaaaaagc

SEQ ID NO: 4698059 - DNA, 25 bp, Homo sapien
acagcctctgggggccaccaaaaag

SEQ ID NO: 4698060 - DNA, 25 bp, Homo sapien
ctgggcataaaaacagagctcacag

SEQ ID NO: 4698061 - DNA, 25 bp, Homo sapien
ggaggacaacacaaaaatggttgat

SEQ ID NO: 4698062 - DNA, 25 bp, Homo sapien
gggaggacaacacaaaaatggttga

SEQ ID NO: 4698063 - DNA, 25 bp, Homo sapien
gagtttttttatgtggacgtggaca

SEQ ID NO: 4698064 - DNA, 25 bp, Homo sapien
gacgtggacaggggtgttctcatcc

SEQ ID NO: 4698065 - DNA, 25 bp, Homo sapien
tcatccacgtgaacatgtaaggggg

SEQ ID NO: 4698066 - DNA, 25 bp, Homo sapien
ggctgctggtcgctgatggtttcgg

SEQ ID NO: 4698067 - DNA, 25 bp, Homo sapien
gttttcacccggacactccgccgca

SEQ ID NO: 4698068 - DNA, 25 bp, Homo sapien
actccgccgcacattcacagtgtcc

SEQ ID NO: 4698069 - DNA, 25 bp, Homo sapien
gacactccgccgcacattcacagtg

SEQ ID NO: 4698070 - DNA, 25 bp, Homo sapien
tcacccggacactccgccgcacatt

SEQ ID NO: 4698071 - DNA, 25 bp, Homo sapien
tcccacaggccgggcagatgatttt

SEQ ID NO: 4698072 - DNA, 25 bp, Homo sapien
cccacaggccgggcagatgattttc

SEQ ID NO: 4698073 - DNA, 25 bp, Homo sapien
atcccacaggccgggcagatgattt

SEQ ID NO: 4698074 - DNA, 25 bp, Homo sapien
tgttaggacattccagtagctatag

SEQ ID NO: 4698075 - DNA, 25 bp, Homo sapien
gctaggatctgagcagtccgagaag

SEQ ID NO: 4698076 - DNA, 25 bp, Homo sapien
gaatcataccgaggctgaggcctgc

SEQ ID NO: 4698077 - DNA, 25 bp, Homo sapien
caagaagattcacatagtttcaggg

SEQ ID NO: 4698078 - DNA, 25 bp, Homo sapien
tcagaggcaatcactgcttaccact

SEQ ID NO: 4698079 - DNA, 25 bp, Homo sapien
ttctgcacaaatagggccggccaaa

SEQ ID NO: 4698080 - DNA, 25 bp, Homo sapien
gtttatacatggacacagacgccca

SEQ ID NO: 4698081 - DNA, 25 bp, Homo sapien
ttaaaccttgccatacctcagaggc

SEQ ID NO: 4698082 - DNA, 25 bp, Homo sapien
ccaaccgcattcattagactatcaa

SEQ ID NO: 4698083 - DNA, 25 bp, Homo sapien
tcagacttcagacaaccaaccgcat

SEQ ID NO: 4698084 - DNA, 25 bp, Homo sapien
tcatcatcttctgtagagaggtcac

SEQ ID NO: 4698085 - DNA, 25 bp, Homo sapien
cacttaaccgcatcactgagaccag

SEQ ID NO: 4698086 - DNA, 25 bp, Homo sapien
gccatctggcgctcacctttttgca

SEQ ID NO: 4698087 - DNA, 25 bp, Homo sapien
accgtgttctcgtgctcagtctcag

SEQ ID NO: 4698088 - DNA, 25 bp, Homo sapien
tcatgcgctcgatgttgtgcctcaa

SEQ ID NO: 4698089 - DNA, 25 bp, Homo sapien
gtctcagccagttcgtgggccacct

SEQ ID NO: 4698090 - DNA, 25 bp, Homo sapien
gatggtatccttcaaggccatgacc

SEQ ID NO: 4698091 - DNA, 25 bp, Homo sapien
tccttcaaggccatgacctgcttgg

SEQ ID NO: 4698092 - DNA, 25 bp, Homo sapien
cagcttcccgatggtatccttcaag

SEQ ID NO: 4698093 - DNA, 25 bp, Homo sapien
gccatgacctgcttggcagccgcag

SEQ ID NO: 4698094 - DNA, 25 bp, Homo sapien
gtgatcccaggagacccatgatgag

SEQ ID NO: 4698095 - DNA, 25 bp, Homo sapien
tcactgtgatcccaggagacccatg

SEQ ID NO: 4698096 - DNA, 25 bp, Homo sapien
gactcactgtgatcccaggagaccc

SEQ ID NO: 4698097 - DNA, 25 bp, Homo sapien
catgatgaggtctcctcagaggccc

SEQ ID NO: 4698098 - DNA, 25 bp, Homo sapien
gatgtccgtgcaggtcatttgtttc

SEQ ID NO: 4698099 - DNA, 25 bp, Homo sapien
ttctgcaggagaagttccttctgcc

SEQ ID NO: 4698100 - DNA, 25 bp, Homo sapien
ctgttccctcaggaggtctcggagg

SEQ ID NO: 4698101 - DNA, 25 bp, Homo sapien
gagggtgcggttggtctcctcaaat

SEQ ID NO: 4698102 - DNA, 25 bp, Homo sapien
gtattgaaatactgtttctctgtaa

SEQ ID NO: 4698103 - DNA, 25 bp, Homo sapien
gcattttgctgcatcaagagaaata

SEQ ID NO: 4698104 - DNA, 25 bp, Homo sapien
tagtttgaggagtatccttcccatc

SEQ ID NO: 4698105 - DNA, 25 bp, Homo sapien
cctactgctattagtttgaggagta

SEQ ID NO: 4698106 - DNA, 25 bp, Homo sapien
tccttgttgctccattagtctttca

SEQ ID NO: 4698107 - DNA, 25 bp, Homo sapien
tccgccagccgtttcagcagtgctc

SEQ ID NO: 4698108 - DNA, 25 bp, Homo sapien
gccgtttcagcagtgctccttgttg

SEQ ID NO: 4698109 - DNA, 25 bp, Homo sapien
tttcagcagtgctccttgttgctcc

SEQ ID NO: 4698110 - DNA, 25 bp, Homo sapien
tctcacattgtatttcctgaaggag

SEQ ID NO: 4698111 - DNA, 25 bp, Homo sapien
ccttgtccttgtcttgcagcagtaa

SEQ ID NO: 4698112 - DNA, 25 bp, Homo sapien
tgtcttgcagcagtaacagcaggcg

SEQ ID NO: 4698113 - DNA, 25 bp, Homo sapien
tccttgtcttgcagcagtaacagca

SEQ ID NO: 4698114 - DNA, 25 bp, Homo sapien
tgttctcagcctctttggaccgaag

SEQ ID NO: 4698115 - DNA, 25 bp, Homo sapien
cttaatctgcatgcacaggcgactg

SEQ ID NO: 4698116 - DNA, 25 bp, Homo sapien
aaatgcccacgcatggactccatgg

SEQ ID NO: 4698117 - DNA, 25 bp, Homo sapien
tggaccgaagctgtgcctgcaaatg

SEQ ID NO: 4698118 - DNA, 25 bp, Homo sapien
ctttccccacttgtggggccaatag

SEQ ID NO: 4698119 - DNA, 25 bp, Homo sapien
ctctttccccacttgtggggccaat

SEQ ID NO: 4698120 - DNA, 25 bp, Homo sapien
tctttccccacttgtggggccaata

SEQ ID NO: 4698121 - DNA, 25 bp, Homo sapien
tccccacttgtggggccaataggta

SEQ ID NO: 4698122 - DNA, 25 bp, Homo sapien
tccttctgggctcggatggccttct

SEQ ID NO: 4698123 - DNA, 25 bp, Homo sapien
aagctctctttgtctcggtctccct

SEQ ID NO: 4698124 - DNA, 25 bp, Homo sapien
gtagctgctcagcatactcctcgct

SEQ ID NO: 4698125 - DNA, 25 bp, Homo sapien
cttgtcagcgagttgcacgtgtagc

SEQ ID NO: 4698126 - DNA, 25 bp, Homo sapien
gataaagcttcagcgacataaagat

SEQ ID NO: 4698127 - DNA, 25 bp, Homo sapien
gtggataaagcttcagcgacataaa

SEQ ID NO: 4698128 - DNA, 25 bp, Homo sapien
caacttggttgtagcggctcctcca

SEQ ID NO: 4698129 - DNA, 25 bp, Homo sapien
tcttttacaacttggttgtagcggc

SEQ ID NO: 4698130 - DNA, 25 bp, Homo sapien
taccactgacctactgactggcagg

SEQ ID NO: 4698131 - DNA, 25 bp, Homo sapien
cctgacctgggagattaaatgagct

SEQ ID NO: 4698132 - DNA, 25 bp, Homo sapien
tcgccagtggcaagaaaggtgtcag

SEQ ID NO: 4698133 - DNA, 25 bp, Homo sapien
aacccggagagtacaaacagcagcc

SEQ ID NO: 4698134 - DNA, 25 bp, Homo sapien
tctccagcttgaatgcggaatactc

SEQ ID NO: 4698135 - DNA, 25 bp, Homo sapien
ggtgtagtctctccaccaggctatc

SEQ ID NO: 4698136 - DNA, 25 bp, Homo sapien
tgcggaatactcagcagtctgacgg

SEQ ID NO: 4698137 - DNA, 25 bp, Homo sapien
ggctatcccggtcttcccgcatctt

SEQ ID NO: 4698138 - DNA, 25 bp, Homo sapien
ttcaggtggacctcctaccctcaac

SEQ ID NO: 4698139 - DNA, 25 bp, Homo sapien
tggaagggatggctcatgagtaacc

SEQ ID NO: 4698140 - DNA, 25 bp, Homo sapien
agggatggctcatgagtaacccaca

SEQ ID NO: 4698141 - DNA, 25 bp, Homo sapien
gatggctcatgagtaacccacagga

SEQ ID NO: 4698142 - DNA, 25 bp, Homo sapien
tggacctcgaggtgtgcctggttga

SEQ ID NO: 4698143 - DNA, 25 bp, Homo sapien
gcctggttgagtttgtcctccattg

SEQ ID NO: 4698144 - DNA, 25 bp, Homo sapien
ttgtcctccattggagcaaagctgg

SEQ ID NO: 4698145 - DNA, 25 bp, Homo sapien
tagttgtcaatcatcccctcatagt

SEQ ID NO: 4698146 - DNA, 25 bp, Homo sapien
gctgggcagctacttcatcagcctc

SEQ ID NO: 4698147 - DNA, 25 bp, Homo sapien
tctctttgtcacagcgttctagctg

SEQ ID NO: 4698148 - DNA, 25 bp, Homo sapien
ttcatcagcctccaatctggtcttc

SEQ ID NO: 4698149 - DNA, 25 bp, Homo sapien
catctcatctttaaggatcttgttc

SEQ ID NO: 4698150 - DNA, 25 bp, Homo sapien
gtcttggcactcagccagcttcgcc

SEQ ID NO: 4698151 - DNA, 25 bp, Homo sapien
cgctcatagccctgcagttggtctt

SEQ ID NO: 4698152 - DNA, 25 bp, Homo sapien
tatgatggctgtgaggtcgatgttc

SEQ ID NO: 4698153 - DNA, 25 bp, Homo sapien
agccagcttcgcctccgtgatcttc

SEQ ID NO: 4698154 - DNA, 25 bp, Homo sapien
ggcccctgctcgggtcagttcgtgg

SEQ ID NO: 4698155 - DNA, 25 bp, Homo sapien
ttcgtgggaccctttctgccagtcc

SEQ ID NO: 4698156 - DNA, 25 bp, Homo sapien
tcatcttggtatgcgggcccctgct

SEQ ID NO: 4698157 - DNA, 25 bp, Homo sapien
gtcagttcgtgggaccctttctgcc

SEQ ID NO: 4698158 - DNA, 25 bp, Homo sapien
tttcacagcactgatgatagctcac

SEQ ID NO: 4698159 - DNA, 25 bp, Homo sapien
gcactgatgatagctcactcctttt

SEQ ID NO: 4698160 - DNA, 25 bp, Homo sapien
ctgatgatagctcactccttttaaa

SEQ ID NO: 4698161 - DNA, 25 bp, Homo sapien
tagtcctcccttggggggcgtgcag

SEQ ID NO: 4698162 - DNA, 25 bp, Homo sapien
gcttgggaaccagacagagctggct

SEQ ID NO: 4698163 - DNA, 25 bp, Homo sapien
tcagcaggtgtccaagtctcaacgc

SEQ ID NO: 4698164 - DNA, 25 bp, Homo sapien
aaacagctggcagggctaactggcc

SEQ ID NO: 4698165 - DNA, 25 bp, Homo sapien
agagacccagctaggatccaggaca

SEQ ID NO: 4698166 - DNA, 25 bp, Homo sapien
tcagactcagctgtttattttcctt

SEQ ID NO: 4698167 - DNA, 25 bp, Homo sapien
cagctaagtggctgaaagtctcagg

SEQ ID NO: 4698168 - DNA, 25 bp, Homo sapien
tcaacacttccgcacactaagcaaa

SEQ ID NO: 4698169 - DNA, 25 bp, Homo sapien
gaggtctgcctagtaccttccaggg

SEQ ID NO: 4698170 - DNA, 25 bp, Homo sapien
cagagatgggaccaagtgcctctaa

SEQ ID NO: 4698171 - DNA, 25 bp, Homo sapien
caaggcgaccaaagaactgtgcagc

SEQ ID NO: 4698172 - DNA, 25 bp, Homo sapien
catcttgtgtgaccagccatagggc

SEQ ID NO: 4698173 - DNA, 25 bp, Homo sapien
ggttgtagcctccttgcaagtgcac

SEQ ID NO: 4698174 - DNA, 25 bp, Homo sapien
cctctgaaactaaggctgggaccag

SEQ ID NO: 4698175 - DNA, 25 bp, Homo sapien
ctgggcactggtcgcctccagtttc

SEQ ID NO: 4698176 - DNA, 25 bp, Homo sapien
tctgggcactggtcgcctccagttt

SEQ ID NO: 4698177 - DNA, 25 bp, Homo sapien
taggaactcgatattctgggcactg

SEQ ID NO: 4698178 - DNA, 25 bp, Homo sapien
ctgtaggaactcgatattctgggca

SEQ ID NO: 4698179 - DNA, 25 bp, Homo sapien
ccagccgcagctgggactggtggat

SEQ ID NO: 4698180 - DNA, 25 bp, Homo sapien
ctcctcgcatcttcaatggcactct

SEQ ID NO: 4698181 - DNA, 25 bp, Homo sapien
ctcgcatcttcaatggcactctcca

SEQ ID NO: 4698182 - DNA, 25 bp, Homo sapien
ccgcagctgggactggtggattgcc

SEQ ID NO: 4698183 - DNA, 25 bp, Homo sapien
cacattcaaaggcccagacatgaga

SEQ ID NO: 4698184 - DNA, 25 bp, Homo sapien
tgcacattcaaaggcccagacatga

SEQ ID NO: 4698185 - DNA, 25 bp, Homo sapien
gcacattcaaaggcccagacatgag

SEQ ID NO: 4698186 - DNA, 25 bp, Homo sapien
ctgcacattcaaaggcccagacatg

SEQ ID NO: 4698187 - DNA, 25 bp, Homo sapien
gccgcagctggctcaattccgtttt

SEQ ID NO: 4698188 - DNA, 25 bp, Homo sapien
ctcaattccgttttggttctgctca

SEQ ID NO: 4698189 - DNA, 25 bp, Homo sapien
agagtgcgtgctccttggtttgttc

SEQ ID NO: 4698190 - DNA, 25 bp, Homo sapien
gctgggtctcaaggtccaggatttt

SEQ ID NO: 4698191 - DNA, 25 bp, Homo sapien
gaaggtggaatagggaccatcccca

SEQ ID NO: 4698192 - DNA, 25 bp, Homo sapien
cccaaacacgttggcgtatgatgat

SEQ ID NO: 4698193 - DNA, 25 bp, Homo sapien
ctccaggcgatctttcaggtcttgc

SEQ ID NO: 4698194 - DNA, 25 bp, Homo sapien
actggacgtagttctgcatgctgcg

SEQ ID NO: 4698195 - DNA, 25 bp, Homo sapien
gctagtagctaaggacaagaccctg

SEQ ID NO: 4698196 - DNA, 25 bp, Homo sapien
gagagattcctaaaacaatgagggc

SEQ ID NO: 4698197 - DNA, 25 bp, Homo sapien
tgcttacagcccaggacgacttcct

SEQ ID NO: 4698198 - DNA, 25 bp, Homo sapien
aaatggacacaagccctcgagggtc

SEQ ID NO: 4698199 - DNA, 25 bp, Homo sapien
gatatatatacatgctggtggaagt

SEQ ID NO: 4698200 - DNA, 25 bp, Homo sapien
tccagatgcctaggtggattcaaga

SEQ ID NO: 4698201 - DNA, 25 bp, Homo sapien
cacaccagagttacatagcagtgcc

SEQ ID NO: 4698202 - DNA, 25 bp, Homo sapien
gtagctggaattaccttcattggaa

SEQ ID NO: 4698203 - DNA, 25 bp, Homo sapien
atcagccgccgggaaggccacacag

SEQ ID NO: 4698204 - DNA, 25 bp, Homo sapien
gggcagcttctctgacgcccccctt

SEQ ID NO: 4698205 - DNA, 25 bp, Homo sapien
ctgaccaaacaagccctcgaatcag

SEQ ID NO: 4698206 - DNA, 25 bp, Homo sapien
ggcttctgcttccgggacgcgcgcg

SEQ ID NO: 4698207 - DNA, 25 bp, Homo sapien
ccgcagcagccagtcgcggtagtag

SEQ ID NO: 4698208 - DNA, 25 bp, Homo sapien
tgcgtagggccttcaaggtctccca

SEQ ID NO: 4698209 - DNA, 25 bp, Homo sapien
cgcggtagtagcaaaggcgaccttt

SEQ ID NO: 4698210 - DNA, 25 bp, Homo sapien
aaaggcgacctttgtcggaactgcg

SEQ ID NO: 4698211 - DNA, 25 bp, Homo sapien
tagcaatgaagccttcagagcgcgg

SEQ ID NO: 4698212 - DNA, 25 bp, Homo sapien
gggccgagattgctttgacaacagc

SEQ ID NO: 4698213 - DNA, 25 bp, Homo sapien
agcagaacggagaaggcgcccaact

SEQ ID NO: 4698214 - DNA, 25 bp, Homo sapien
ccaactggcggagggtagcaatgaa

SEQ ID NO: 4698215 - DNA, 25 bp, Homo sapien
taagacagggaaacttgcacctggg

SEQ ID NO: 4698216 - DNA, 25 bp, Homo sapien
actcaactcccagatcttggtttgc

SEQ ID NO: 4698217 - DNA, 25 bp, Homo sapien
caatggtacccaatcaagaatctca

SEQ ID NO: 4698218 - DNA, 25 bp, Homo sapien
tggaaatatgtcacaggaacacagg

SEQ ID NO: 4698219 - DNA, 25 bp, Homo sapien
tacaaacatggatggggtaagatta

SEQ ID NO: 4698220 - DNA, 25 bp, Homo sapien
ccaaacttctcactgctaggtaaca

SEQ ID NO: 4698221 - DNA, 25 bp, Homo sapien
cagtatgaagtcatggttttataat

SEQ ID NO: 4698222 - DNA, 25 bp, Homo sapien
aacatattgagaataacaggagcca

SEQ ID NO: 4698223 - DNA, 25 bp, Homo sapien
cctggctcccagcttgaactggcct

SEQ ID NO: 4698224 - DNA, 25 bp, Homo sapien
tggctcccagcttgaactggcctca

SEQ ID NO: 4698225 - DNA, 25 bp, Homo sapien
gtgagacaccaagcctggctcccag

SEQ ID NO: 4698226 - DNA, 25 bp, Homo sapien
gtgtgagacaccaagcctggctccc

SEQ ID NO: 4698227 - DNA, 25 bp, Homo sapien
agaagatagcttgggaagagacata

SEQ ID NO: 4698228 - DNA, 25 bp, Homo sapien
agaataagaagatagcttgggaaga

SEQ ID NO: 4698229 - DNA, 25 bp, Homo sapien
ataagaagatagcttgggaagagac

SEQ ID NO: 4698230 - DNA, 25 bp, Homo sapien
taagaagatagcttgggaagagaca

SEQ ID NO: 4698231 - DNA, 25 bp, Homo sapien
gatggcgaagtctcagacagaggtt

SEQ ID NO: 4698232 - DNA, 25 bp, Homo sapien
aaaaggcagagcttgcgtcaggaga

SEQ ID NO: 4698233 - DNA, 25 bp, Homo sapien
caaatgagggttgatctagggctga

SEQ ID NO: 4698234 - DNA, 25 bp, Homo sapien
tagggctgaagctgacgtagaggat

SEQ ID NO: 4698235 - DNA, 25 bp, Homo sapien
gttccatttggtgttgcaggggagg

SEQ ID NO: 4698236 - DNA, 25 bp, Homo sapien
gagccaggaatagggtaaaatctcc

SEQ ID NO: 4698237 - DNA, 25 bp, Homo sapien
cacaaaaagggagaccatatcagtt

SEQ ID NO: 4698238 - DNA, 25 bp, Homo sapien
ttcccctagggtatggtcactgtca

SEQ ID NO: 4698239 - DNA, 25 bp, Homo sapien
cagacgcagcgttcatcagaaaaaa

SEQ ID NO: 4698240 - DNA, 25 bp, Homo sapien
catacagtcgtgctatctaggctca

SEQ ID NO: 4698241 - DNA, 25 bp, Homo sapien
cttactctatcacccgtgctggcat

SEQ ID NO: 4698242 - DNA, 25 bp, Homo sapien
aaagtcctgggattccacacccagc

SEQ ID NO: 4698243 - DNA, 25 bp, Homo sapien
ttaacacacctgacatggatatctt

SEQ ID NO: 4698244 - DNA, 25 bp, Homo sapien
agctactgaggaggcaggctaaggc

SEQ ID NO: 4698245 - DNA, 25 bp, Homo sapien
tggatggagtatccccaacctacat

SEQ ID NO: 4698246 - DNA, 25 bp, Homo sapien
catccctaagcttccatcctcctgg

SEQ ID NO: 4698247 - DNA, 25 bp, Homo sapien
aagctggctatcaaagtactctatc

SEQ ID NO: 4698248 - DNA, 25 bp, Homo sapien
ctgaagtaccatagattctgtgtgc

SEQ ID NO: 4698249 - DNA, 25 bp, Homo sapien
gaagtaccatagattctgtgtgctg

SEQ ID NO: 4698250 - DNA, 25 bp, Homo sapien
agtaccatagattctgtgtgctggg

SEQ ID NO: 4698251 - DNA, 25 bp, Homo sapien
taccatagattctgtgtgctgggac

SEQ ID NO: 4698252 - DNA, 25 bp, Homo sapien
tcggacgcagccttccactttgatc

SEQ ID NO: 4698253 - DNA, 25 bp, Homo sapien
taccagttcgtacattcggacgcag

SEQ ID NO: 4698254 - DNA, 25 bp, Homo sapien
ttcgtacattcggacgcagccttcc

SEQ ID NO: 4698255 - DNA, 25 bp, Homo sapien
cattctgtgtaccagttcgtacatt

SEQ ID NO: 4698256 - DNA, 25 bp, Homo sapien
aaaatttaaaaattatctggctgtg

SEQ ID NO: 4698257 - DNA, 25 bp, Homo sapien
gggcaacagagagacccccgtctct

SEQ ID NO: 4698258 - DNA, 25 bp, Homo sapien
aatttaaaaattatctggctgtggt

SEQ ID NO: 4698259 - DNA, 25 bp, Homo sapien
tggtggtgcacacctgcagtcccag

SEQ ID NO: 4698260 - DNA, 25 bp, Homo sapien
gatggtctagagctcccgatctcaa

SEQ ID NO: 4698261 - DNA, 25 bp, Homo sapien
gagtactcacatatggttaaaggca

SEQ ID NO: 4698262 - DNA, 25 bp, Homo sapien
ccttaaagatgacgagatgccagct

SEQ ID NO: 4698263 - DNA, 25 bp, Homo sapien
ccagctagcatggagatatgtcaaa

SEQ ID NO: 4698264 - DNA, 25 bp, Homo sapien
atcggcccctaacaccatcagagat

SEQ ID NO: 4698265 - DNA, 25 bp, Homo sapien
cctgctctctggagcgccttcaaca

SEQ ID NO: 4698266 - DNA, 25 bp, Homo sapien
gatcatttacccctgcgggctacct

SEQ ID NO: 4698267 - DNA, 25 bp, Homo sapien
aacaccttgatcatttacccctgcg

SEQ ID NO: 4698268 - DNA, 25 bp, Homo sapien
accgcttcagttgttcagatgccat

SEQ ID NO: 4698269 - DNA, 25 bp, Homo sapien
aaccgcttcagttgttcagatgcca

SEQ ID NO: 4698270 - DNA, 25 bp, Homo sapien
tctgtgacggtgctcagcttttagc

SEQ ID NO: 4698271 - DNA, 25 bp, Homo sapien
gctctgtgacggtgctcagctttta

SEQ ID NO: 4698272 - DNA, 25 bp, Homo sapien
tttgctctgtgacggtgctcagctt

SEQ ID NO: 4698273 - DNA, 25 bp, Homo sapien
ttggtgtcccaaggcttctctggag

SEQ ID NO: 4698274 - DNA, 25 bp, Homo sapien
ccaggtcgaccttaagcagggcttt

SEQ ID NO: 4698275 - DNA, 25 bp, Homo sapien
ttgtgctgctcagaggcatccagct

SEQ ID NO: 4698276 - DNA, 25 bp, Homo sapien
acagctggttgcctcgggtctggaa

SEQ ID NO: 4698277 - DNA, 25 bp, Homo sapien
tgaagaggcccggatgatccctgag

SEQ ID NO: 4698278 - DNA, 25 bp, Homo sapien
tcttcgcaggctctggtgatctcct

SEQ ID NO: 4698279 - DNA, 25 bp, Homo sapien
tgcctcctcttgtcttcgcaggctc

SEQ ID NO: 4698280 - DNA, 25 bp, Homo sapien
tcttgcagctttacctgggcctctt

SEQ ID NO: 4698281 - DNA, 25 bp, Homo sapien
ttcatcaggaggtcccgcatttccc

SEQ ID NO: 4698282 - DNA, 25 bp, Homo sapien
gctggtaccactgcattgtaatgtc

SEQ ID NO: 4698283 - DNA, 25 bp, Homo sapien
ggccctcaaaggtcaacacacactg

SEQ ID NO: 4698284 - DNA, 25 bp, Homo sapien
ccttgctgttggtcaggccctcaaa

SEQ ID NO: 4698285 - DNA, 25 bp, Homo sapien
cacacactgcatggaagcatcctgc

SEQ ID NO: 4698286 - DNA, 25 bp, Homo sapien
gccttctggaggtccatctttatct

SEQ ID NO: 4698287 - DNA, 25 bp, Homo sapien
gatggtagcagccttctggaggtcc

SEQ ID NO: 4698288 - DNA, 25 bp, Homo sapien
gatttggctcactgggatggtagca

SEQ ID NO: 4698289 - DNA, 25 bp, Homo sapien
caatggtagagatttggctcactgg

SEQ ID NO: 4698290 - DNA, 25 bp, Homo sapien
tgaagccctgtaagtagagagaacg

SEQ ID NO: 4698291 - DNA, 25 bp, Homo sapien
ttgaacacattaaacttgaggcagc

SEQ ID NO: 4698292 - DNA, 25 bp, Homo sapien
ggataagagtagatcccagccgggc

SEQ ID NO: 4698293 - DNA, 25 bp, Homo sapien
tgaggcagctaagagacatataggc

SEQ ID NO: 4698294 - DNA, 25 bp, Homo sapien
aatctcgctctttcacccaggacgg

SEQ ID NO: 4698295 - DNA, 25 bp, Homo sapien
gtgatctcagatcaccgcaacttct

SEQ ID NO: 4698296 - DNA, 25 bp, Homo sapien
atctcgctctttcacccaggacgga

SEQ ID NO: 4698297 - DNA, 25 bp, Homo sapien
ggcgtgatctcagatcaccgcaact

SEQ ID NO: 4698298 - DNA, 25 bp, Homo sapien
gccatgaagaccaaagaacggcaat

SEQ ID NO: 4698299 - DNA, 25 bp, Homo sapien
ctgccatgaagaccaaagaacggca

SEQ ID NO: 4698300 - DNA, 25 bp, Homo sapien
tgccatgaagaccaaagaacggcaa

SEQ ID NO: 4698301 - DNA, 25 bp, Homo sapien
ggctgtggatcttgtcaaagatctc

SEQ ID NO: 4698302 - DNA, 25 bp, Homo sapien
tattgaacaaagtccagcccctgtg

SEQ ID NO: 4698303 - DNA, 25 bp, Homo sapien
tctctgccagtttgtattgaacaaa

SEQ ID NO: 4698304 - DNA, 25 bp, Homo sapien
tccagcccctgtgggttaagtgtga

SEQ ID NO: 4698305 - DNA, 25 bp, Homo sapien
gcttcccatacctctagcaacaagg

SEQ ID NO: 4698306 - DNA, 25 bp, Homo sapien
catagaggtgggtacaattttaact

SEQ ID NO: 4698307 - DNA, 25 bp, Homo sapien
aaaaggctgaaatcttgtacaccag

SEQ ID NO: 4698308 - DNA, 25 bp, Homo sapien
gctgaaatcttgtacaccagcctct

SEQ ID NO: 4698309 - DNA, 25 bp, Homo sapien
gagaggccacttcctcctcgccttg

SEQ ID NO: 4698310 - DNA, 25 bp, Homo sapien
ttcatggtgagaggccacttcctcc

SEQ ID NO: 4698311 - DNA, 25 bp, Homo sapien
cttcatggtgagaggccacttcctc

SEQ ID NO: 4698312 - DNA, 25 bp, Homo sapien
aggccacttcctcctcgccttgttt

SEQ ID NO: 4698313 - DNA, 25 bp, Homo sapien
gaaaggaacagagtaaggacacttc

SEQ ID NO: 4698314 - DNA, 25 bp, Homo sapien
gacacttcttatgtagatgagcaag

SEQ ID NO: 4698315 - DNA, 25 bp, Homo sapien
gatcccggatgccacaactgcaatg

SEQ ID NO: 4698316 - DNA, 25 bp, Homo sapien
ccctccttgaaagtgggatagaaag

SEQ ID NO: 4698317 - DNA, 25 bp, Homo sapien
ggatcatccctgacatgcgttttag

SEQ ID NO: 4698318 - DNA, 25 bp, Homo sapien
tagcagcgtagagacggatcatccc

SEQ ID NO: 4698319 - DNA, 25 bp, Homo sapien
accggagctggatgatagcagcgta

SEQ ID NO: 4698320 - DNA, 25 bp, Homo sapien
tgtcggtttccatatggccaccgga

SEQ ID NO: 4698321 - DNA, 25 bp, Homo sapien
gccaaccagcgccatccatgattta

SEQ ID NO: 4698322 - DNA, 25 bp, Homo sapien
gctgtcacatctgacaagggctcca

SEQ ID NO: 4698323 - DNA, 25 bp, Homo sapien
ctccatgtttaagatctgtgccaac

SEQ ID NO: 4698324 - DNA, 25 bp, Homo sapien
catgatttaagccatgagggtgaat

SEQ ID NO: 4698325 - DNA, 25 bp, Homo sapien
taaggtaactaggaactattggcac

SEQ ID NO: 4698326 - DNA, 25 bp, Homo sapien
tcaacactttggcagggttaggtgg

SEQ ID NO: 4698327 - DNA, 25 bp, Homo sapien
tgacgtcaggagctattaaggtaac

SEQ ID NO: 4698328 - DNA, 25 bp, Homo sapien
cagatttgttatggcatgtacccca

SEQ ID NO: 4698329 - DNA, 25 bp, Homo sapien
tattgcttcatgagggcattcccac

SEQ ID NO: 4698330 - DNA, 25 bp, Homo sapien
tcctctttgatgagaattagcatct

SEQ ID NO: 4698331 - DNA, 25 bp, Homo sapien
tcttccagaactgaacctggtattg

SEQ ID NO: 4698332 - DNA, 25 bp, Homo sapien
agtagtcctctttgatgagaattag

SEQ ID NO: 4698333 - DNA, 25 bp, Homo sapien
ttcaaatatcaacgagagggactgg

SEQ ID NO: 4698334 - DNA, 25 bp, Homo sapien
aaccagcaggtaatagcacccttgg

SEQ ID NO: 4698335 - DNA, 25 bp, Homo sapien
tgagttacttaatcccctgctgtct

SEQ ID NO: 4698336 - DNA, 25 bp, Homo sapien
gcacccttgggtatctgaggcctgg

SEQ ID NO: 4698337 - DNA, 25 bp, Homo sapien
tgggcaatgatatttaagacagact

SEQ ID NO: 4698338 - DNA, 25 bp, Homo sapien
gtttttgtttgggcaatgatattta

SEQ ID NO: 4698339 - DNA, 25 bp, Homo sapien
gcaattataggcataattataggca

SEQ ID NO: 4698340 - DNA, 25 bp, Homo sapien
gtgctcagcccctaatttgtgtttt

SEQ ID NO: 4698341 - DNA, 25 bp, Homo sapien
aagaactgcttgaggcgtatgaagg

SEQ ID NO: 4698342 - DNA, 25 bp, Homo sapien
actgcttgaggcgtatgaaggagcc

SEQ ID NO: 4698343 - DNA, 25 bp, Homo sapien
tgcttgaggcgtatgaaggagccca

SEQ ID NO: 4698344 - DNA, 25 bp, Homo sapien
tgaggcgtatgaaggagcccatctg

SEQ ID NO: 4698345 - DNA, 25 bp, Homo sapien
aaggaggaagtcagaaagcccttgg

SEQ ID NO: 4698346 - DNA, 25 bp, Homo sapien
aagcccttggggacaggaatgtcct

SEQ ID NO: 4698347 - DNA, 25 bp, Homo sapien
agaaggaggaagtcagaaagccctt

SEQ ID NO: 4698348 - DNA, 25 bp, Homo sapien
gaatgtccttgtgttgcaaacattt

SEQ ID NO: 4698349 - DNA, 25 bp, Homo sapien
catttattttatcacgtggatctct

SEQ ID NO: 4698350 - DNA, 25 bp, Homo sapien
tctcttaaggaactaccaaatctac

SEQ ID NO: 4698351 - DNA, 25 bp, Homo sapien
ccaaatctactaagggacctccaag

SEQ ID NO: 4698352 - DNA, 25 bp, Homo sapien
ctccaagaattttgtgacccatgaa

SEQ ID NO: 4698353 - DNA, 25 bp, Homo sapien
gagccttagtccatgtgtatatcac

SEQ ID NO: 4698354 - DNA, 25 bp, Homo sapien
gaaagacactagagacaagggagga

SEQ ID NO: 4698355 - DNA, 25 bp, Homo sapien
gtgtttccagtcctaatcccagatg

SEQ ID NO: 4698356 - DNA, 25 bp, Homo sapien
tcatggatccctagccatccaggga

SEQ ID NO: 4698357 - DNA, 25 bp, Homo sapien
catagaatgggtcacttcaggccac

SEQ ID NO: 4698358 - DNA, 25 bp, Homo sapien
cactgcctctgcagtatcaaagaga

SEQ ID NO: 4698359 - DNA, 25 bp, Homo sapien
ttcaggccactcaagagtaccagtg

SEQ ID NO: 4698360 - DNA, 25 bp, Homo sapien
cacagaggaacagatccatggccac

SEQ ID NO: 4698361 - DNA, 25 bp, Homo sapien
aaggaccgaggagcctccgcggcct

SEQ ID NO: 4698362 - DNA, 25 bp, Homo sapien
cgcggcctccgctccacaccgttca

SEQ ID NO: 4698363 - DNA, 25 bp, Homo sapien
tgggtgcgtcgggccgaggggtgct

SEQ ID NO: 4698364 - DNA, 25 bp, Homo sapien
cggcctccgctccacaccgttcact

SEQ ID NO: 4698365 - DNA, 25 bp, Homo sapien
tcggaagaacgagctgcagaagtcg

SEQ ID NO: 4698366 - DNA, 25 bp, Homo sapien
aattaaggtcagagagccgtttacg

SEQ ID NO: 4698367 - DNA, 25 bp, Homo sapien
cagagattcgccatgcaggatgaaa

SEQ ID NO: 4698368 - DNA, 25 bp, Homo sapien
tcagacccttctgcgttcagagaga

SEQ ID NO: 4698369 - DNA, 25 bp, Homo sapien
caagaggaatatgcaaaaaaggtgg

SEQ ID NO: 4698370 - DNA, 25 bp, Homo sapien
tcttctacagtacagccgcagctga

SEQ ID NO: 4698371 - DNA, 25 bp, Homo sapien
ccccagtgatgagctatgcagtcct

SEQ ID NO: 4698372 - DNA, 25 bp, Homo sapien
tggagtcagcatttgccactagggc

SEQ ID NO: 4698373 - DNA, 25 bp, Homo sapien
tctgcgtttacgaaacgatgacaac

SEQ ID NO: 4698374 - DNA, 25 bp, Homo sapien
gaaacgatgacaacatgatggagga

SEQ ID NO: 4698375 - DNA, 25 bp, Homo sapien
ctggactctgcgtttacgaaacgat

SEQ ID NO: 4698376 - DNA, 25 bp, Homo sapien
ttacgaaacgatgacaacatgatgg

SEQ ID NO: 4698377 - DNA, 25 bp, Homo sapien
tctttgaaagaactggaatcgatag

SEQ ID NO: 4698378 - DNA, 25 bp, Homo sapien
tccttgaagcggtggtatcggtcta

SEQ ID NO: 4698379 - DNA, 25 bp, Homo sapien
tatcggtctaggacctgctgccgcc

SEQ ID NO: 4698380 - DNA, 25 bp, Homo sapien
tgacgcctaagggttgagagttcct

SEQ ID NO: 4698381 - DNA, 25 bp, Homo sapien
cagcttaacaatggctcctgagttg

SEQ ID NO: 4698382 - DNA, 25 bp, Homo sapien
tcctgagttggcctgcacttcagct

SEQ ID NO: 4698383 - DNA, 25 bp, Homo sapien
caaaatgcccttctgagatcatcag

SEQ ID NO: 4698384 - DNA, 25 bp, Homo sapien
atgcaaaatgcccttctgagatcat

SEQ ID NO: 4698385 - DNA, 25 bp, Homo sapien
gggcgccacgctgtccggtatggtg

SEQ ID NO: 4698386 - DNA, 25 bp, Homo sapien
ccacgctgtccggtatggtgtgaaa

SEQ ID NO: 4698387 - DNA, 25 bp, Homo sapien
gggacccgatgtgggtggcggtgac

SEQ ID NO: 4698388 - DNA, 25 bp, Homo sapien
actatggggcgccacgctgtccggt

SEQ ID NO: 4698389 - DNA, 25 bp, Homo sapien
aagtaattcccactggcggtgcagc

SEQ ID NO: 4698390 - DNA, 25 bp, Homo sapien
ggcggtgcagctccatcaaacgggt

SEQ ID NO: 4698391 - DNA, 25 bp, Homo sapien
gattcctttttctcgcatcttctcc

SEQ ID NO: 4698392 - DNA, 25 bp, Homo sapien
gtcctcacattctcgtaagtactgc

SEQ ID NO: 4698393 - DNA, 25 bp, Homo sapien
ttcatgagcagccatatctgtttga

SEQ ID NO: 4698394 - DNA, 25 bp, Homo sapien
tgagcagccatatctgtttgaaact

SEQ ID NO: 4698395 - DNA, 25 bp, Homo sapien
tcttctgtaaaacctctacatgctc

SEQ ID NO: 4698396 - DNA, 25 bp, Homo sapien
gtttggcagcaaactggttcacttc

SEQ ID NO: 4698397 - DNA, 25 bp, Homo sapien
tgccaggctgcattgacttcatcct

SEQ ID NO: 4698398 - DNA, 25 bp, Homo sapien
cgctgccaggctgcattgacttcat

SEQ ID NO: 4698399 - DNA, 25 bp, Homo sapien
acttcatcctgcttagtcttgatca

SEQ ID NO: 4698400 - DNA, 25 bp, Homo sapien
tgcttagtcttgatcagttcctcct

SEQ ID NO: 4698401 - DNA, 25 bp, Homo sapien
ccaggtctcggccaaaatcatcaga

SEQ ID NO: 4698402 - DNA, 25 bp, Homo sapien
taatccaactgatagtctcatccac

SEQ ID NO: 4698403 - DNA, 25 bp, Homo sapien
cgtgcttccgaagcagagcctgaac

SEQ ID NO: 4698404 - DNA, 25 bp, Homo sapien
tcttctagagcagcaagatctctct

SEQ ID NO: 4698405 - DNA, 25 bp, Homo sapien
ctgtgttgcactcagagggtgggac

SEQ ID NO: 4698406 - DNA, 25 bp, Homo sapien
tgcaggcggtcagcctcagcacaca

SEQ ID NO: 4698407 - DNA, 25 bp, Homo sapien
tgggactgttgcaggcggtcagcct

SEQ ID NO: 4698408 - DNA, 25 bp, Homo sapien
cactcagagggtgggactgttgcag

SEQ ID NO: 4698409 - DNA, 25 bp, Homo sapien
ctgtatgaatcattgagccgtgcat

SEQ ID NO: 4698410 - DNA, 25 bp, Homo sapien
ggatctgctcccagtttgtaatcag

SEQ ID NO: 4698411 - DNA, 25 bp, Homo sapien
ttgtaatcagttcctctcgcttcac

SEQ ID NO: 4698412 - DNA, 25 bp, Homo sapien
tctctctgccgccaaggtgcggatc

SEQ ID NO: 4698413 - DNA, 25 bp, Homo sapien
tgtctatctagcagggcttcagccc

SEQ ID NO: 4698414 - DNA, 25 bp, Homo sapien
tgaggtcacggaagtcagcaaggaa

SEQ ID NO: 4698415 - DNA, 25 bp, Homo sapien
tgtgctcttggtgtctatctagcag

SEQ ID NO: 4698416 - DNA, 25 bp, Homo sapien
gagggctttcatctcagtcacccag

SEQ ID NO: 4698417 - DNA, 25 bp, Homo sapien
tgaagctgtcttcatgggcatcaat

SEQ ID NO: 4698418 - DNA, 25 bp, Homo sapien
ggcatagtgaccagcagcaagcagt

SEQ ID NO: 4698419 - DNA, 25 bp, Homo sapien
agctgtcttcatgggcatcaatttc

SEQ ID NO: 4698420 - DNA, 25 bp, Homo sapien
cttcatctgaggcatagtgaccagc

SEQ ID NO: 4698421 - DNA, 25 bp, Homo sapien
cacctgctcagtgtcccggtagaag

SEQ ID NO: 4698422 - DNA, 25 bp, Homo sapien
gctctctcctcggaaaggacggtca

SEQ ID NO: 4698423 - DNA, 25 bp, Homo sapien
gagctgcaggtccatgcactgctcg

SEQ ID NO: 4698424 - DNA, 25 bp, Homo sapien
catgcactgctcgtactgctgcctg

SEQ ID NO: 4698425 - DNA, 25 bp, Homo sapien
cattttacatcacactaatctgaaa

SEQ ID NO: 4698426 - DNA, 25 bp, Homo sapien
tttacatcacactaatctgaaaagc

SEQ ID NO: 4698427 - DNA, 25 bp, Homo sapien
catcacactaatctgaaaagctggg

SEQ ID NO: 4698428 - DNA, 25 bp, Homo sapien
aaacattttacatcacactaatctg

SEQ ID NO: 4698429 - DNA, 25 bp, Homo sapien
cacactatccaaggaatctcccaag

SEQ ID NO: 4698430 - DNA, 25 bp, Homo sapien
cgtgcttcttaagaagcgcttccac

SEQ ID NO: 4698431 - DNA, 25 bp, Homo sapien
ccaagtcttcattcaacaggaacgc

SEQ ID NO: 4698432 - DNA, 25 bp, Homo sapien
gcttcttaagaagcgcttccacact

SEQ ID NO: 4698433 - DNA, 25 bp, Homo sapien
aaagcactgacaagaaggggtctta

SEQ ID NO: 4698434 - DNA, 25 bp, Homo sapien
aagcactgacaagaaggggtcttac

SEQ ID NO: 4698435 - DNA, 25 bp, Homo sapien
tgttctgaattagcttggttgcaaa

SEQ ID NO: 4698436 - DNA, 25 bp, Homo sapien
atctcggcgagtggccacatcttcc

SEQ ID NO: 4698437 - DNA, 25 bp, Homo sapien
ttagcttggttgcaaattcatctaa

SEQ ID NO: 4698438 - DNA, 25 bp, Homo sapien
agcatctcggcgagtggccacatct

SEQ ID NO: 4698439 - DNA, 25 bp, Homo sapien
actgctgcagatggaaagaatcggc

SEQ ID NO: 4698440 - DNA, 25 bp, Homo sapien
tttataagcttcatctgtggcagtt

SEQ ID NO: 4698441 - DNA, 25 bp, Homo sapien
cagaatcacggaaaaactgctgcag

SEQ ID NO: 4698442 - DNA, 25 bp, Homo sapien
ctctctcgtgaagggcattgcggcg

SEQ ID NO: 4698443 - DNA, 25 bp, Homo sapien
aattcggctctggtttgctgagagc

SEQ ID NO: 4698444 - DNA, 25 bp, Homo sapien
gcatcaattcggctctggtttgctg

SEQ ID NO: 4698445 - DNA, 25 bp, Homo sapien
ctttctccaaggcatcaattcggct

SEQ ID NO: 4698446 - DNA, 25 bp, Homo sapien
caaggcatcaattcggctctggttt

SEQ ID NO: 4698447 - DNA, 25 bp, Homo sapien
gcatagtggttgacatcaatcagct

SEQ ID NO: 4698448 - DNA, 25 bp, Homo sapien
ttcatacgagctgccacttcatcct

SEQ ID NO: 4698449 - DNA, 25 bp, Homo sapien
tgatcacctcattcatacgagctgc

SEQ ID NO: 4698450 - DNA, 25 bp, Homo sapien
tcatccttggcatagtggttgacat

SEQ ID NO: 4698451 - DNA, 25 bp, Homo sapien
tctagcagtgcatgtttcttctgga

SEQ ID NO: 4698452 - DNA, 25 bp, Homo sapien
tttgccgtaatcatccgaagccaag

SEQ ID NO: 4698453 - DNA, 25 bp, Homo sapien
tgctgttgctggttggcttcacgaa

SEQ ID NO: 4698454 - DNA, 25 bp, Homo sapien
cctcaacattgcgattaaattgctg

SEQ ID NO: 4698455 - DNA, 25 bp, Homo sapien
tccttgagtgcctcatagcgagcca

SEQ ID NO: 4698456 - DNA, 25 bp, Homo sapien
tcaacatcccggaagagctgctgca

SEQ ID NO: 4698457 - DNA, 25 bp, Homo sapien
ggcaatgggctctttctctcgaatc

SEQ ID NO: 4698458 - DNA, 25 bp, Homo sapien
tgctgcaaccgcagagaatcggcca

SEQ ID NO: 4698459 - DNA, 25 bp, Homo sapien
cttctgtgtaactgctttgatgcgt

SEQ ID NO: 4698460 - DNA, 25 bp, Homo sapien
tgctttgatgcgtggttcatgtcca

SEQ ID NO: 4698461 - DNA, 25 bp, Homo sapien
gcagattctggaccccaattaaatc

SEQ ID NO: 4698462 - DNA, 25 bp, Homo sapien
ttctgcttgtaaggcttgatgtttc

SEQ ID NO: 4698463 - DNA, 25 bp, Homo sapien
ccacttttggttcagctcgtgaagc

SEQ ID NO: 4698464 - DNA, 25 bp, Homo sapien
tcctgccgacgctgggaagctttgg

SEQ ID NO: 4698465 - DNA, 25 bp, Homo sapien
ggattcagcctcgttagcatcagca

SEQ ID NO: 4698466 - DNA, 25 bp, Homo sapien
tcagcaaagtactgctgggcctgca

SEQ ID NO: 4698467 - DNA, 25 bp, Homo sapien
tgacatcaaagcttcgtgtttcttc

SEQ ID NO: 4698468 - DNA, 25 bp, Homo sapien
tgttctcgcaaagcctggatgctgc

SEQ ID NO: 4698469 - DNA, 25 bp, Homo sapien
ccggcaggactgtgcttgttctcgc

SEQ ID NO: 4698470 - DNA, 25 bp, Homo sapien
ctgccgtaggcactgagatctgaca

SEQ ID NO: 4698471 - DNA, 25 bp, Homo sapien
aaaatctcattttgtctgggcacgg

SEQ ID NO: 4698472 - DNA, 25 bp, Homo sapien
tagtcgtagagagccaagaccagct

SEQ ID NO: 4698473 - DNA, 25 bp, Homo sapien
tcctgatagtcgtagagagccaaga

SEQ ID NO: 4698474 - DNA, 25 bp, Homo sapien
tcttctcctgatagtcgtagagagc

SEQ ID NO: 4698475 - DNA, 25 bp, Homo sapien
tagagagccaagaccagctccttcc

SEQ ID NO: 4698476 - DNA, 25 bp, Homo sapien
ttggtgctgttgagtaaggtaagga

SEQ ID NO: 4698477 - DNA, 25 bp, Homo sapien
tgttggtgctgttgagtaaggtaag

SEQ ID NO: 4698478 - DNA, 25 bp, Homo sapien
tggtgctgttgagtaaggtaaggat

SEQ ID NO: 4698479 - DNA, 25 bp, Homo sapien
agtaaggtaaggatatctcccttct

SEQ ID NO: 4698480 - DNA, 25 bp, Homo sapien
agaaacccaactgagcatacgtgga

SEQ ID NO: 4698481 - DNA, 25 bp, Homo sapien
aaacccaactgagcatacgtggagg

SEQ ID NO: 4698482 - DNA, 25 bp, Homo sapien
cccaactgagcatacgtggaggtgc

SEQ ID NO: 4698483 - DNA, 25 bp, Homo sapien
actgagcatacgtggaggtgccagc

SEQ ID NO: 4698484 - DNA, 25 bp, Homo sapien
cgtagctagtagttactgcagaagc

SEQ ID NO: 4698485 - DNA, 25 bp, Homo sapien
taagggcttactatcacacgtagct

SEQ ID NO: 4698486 - DNA, 25 bp, Homo sapien
catgcccggcttcatcgagttataa

SEQ ID NO: 4698487 - DNA, 25 bp, Homo sapien
cagaagcagcacagacacttacatt

SEQ ID NO: 4698488 - DNA, 25 bp, Homo sapien
ggcacaaaaccctgacgatcgttca

SEQ ID NO: 4698489 - DNA, 25 bp, Homo sapien
aatttcttcacgtacgcagccggca

SEQ ID NO: 4698490 - DNA, 25 bp, Homo sapien
ctccaggagattctcccgggaggct

SEQ ID NO: 4698491 - DNA, 25 bp, Homo sapien
ttgtcaatctgctcctgccgcagtg

SEQ ID NO: 4698492 - DNA, 25 bp, Homo sapien
gcagagatacactgccggcctcctt

SEQ ID NO: 4698493 - DNA, 25 bp, Homo sapien
tgcttcatacgcagagatacactgc

SEQ ID NO: 4698494 - DNA, 25 bp, Homo sapien
gccggcctccttagttatgcgtgtc

SEQ ID NO: 4698495 - DNA, 25 bp, Homo sapien
tcttccacctgcttcatacgcagag

SEQ ID NO: 4698496 - DNA, 25 bp, Homo sapien
taacataaaggcaaaccacgaggtg

SEQ ID NO: 4698497 - DNA, 25 bp, Homo sapien
cacagcctgagagatatgcgcacac

SEQ ID NO: 4698498 - DNA, 25 bp, Homo sapien
tgaagacgaggatcccaagtaccca

SEQ ID NO: 4698499 - DNA, 25 bp, Homo sapien
gataagcagtcatcgaccgacacag

SEQ ID NO: 4698500 - DNA, 25 bp, Homo sapien
gtagttcattcgcttcacggaacaa

SEQ ID NO: 4698501 - DNA, 25 bp, Homo sapien
atgcctttacgcttctcacccagtt

SEQ ID NO: 4698502 - DNA, 25 bp, Homo sapien
ccttctcattgatccattgctgtag

SEQ ID NO: 4698503 - DNA, 25 bp, Homo sapien
cctcacttgtcagagcggcttcctt

SEQ ID NO: 4698504 - DNA, 25 bp, Homo sapien
aaagtgacataacgtgattccattt

SEQ ID NO: 4698505 - DNA, 25 bp, Homo sapien
gaataggtaaatctggaggcaagca

SEQ ID NO: 4698506 - DNA, 25 bp, Homo sapien
gcaagctgggcagacggcctgagct

SEQ ID NO: 4698507 - DNA, 25 bp, Homo sapien
aaaaagtgacataacgtgattccat

SEQ ID NO: 4698508 - DNA, 25 bp, Homo sapien
ggagtactggtatgtgctacaaaaa

SEQ ID NO: 4698509 - DNA, 25 bp, Homo sapien
aggaatggagtactggtatgtgcta

SEQ ID NO: 4698510 - DNA, 25 bp, Homo sapien
atggagtactggtatgtgctacaaa

SEQ ID NO: 4698511 - DNA, 25 bp, Homo sapien
cccaaaaacaatgtgtagtgtatca

SEQ ID NO: 4698512 - DNA, 25 bp, Homo sapien
aatgtgtagtatattaggccgggcg

SEQ ID NO: 4698513 - DNA, 25 bp, Homo sapien
aacaatgtgtagtatattaggccgg

SEQ ID NO: 4698514 - DNA, 25 bp, Homo sapien
taaacaatgtgtagtatattaggcc

SEQ ID NO: 4698515 - DNA, 25 bp, Homo sapien
ggataaacaatgtgtagtatattag

SEQ ID NO: 4698516 - DNA, 25 bp, Homo sapien
tgtccttcaaccgtgactcattggc

SEQ ID NO: 4698517 - DNA, 25 bp, Homo sapien
ttcaaccgtgactcattggccttca

SEQ ID NO: 4698518 - DNA, 25 bp, Homo sapien
ccttcaaccgtgactcattggcctt

SEQ ID NO: 4698519 - DNA, 25 bp, Homo sapien
tccttcaaccgtgactcattggcct

SEQ ID NO: 4698520 - DNA, 25 bp, Homo sapien
tgttgttgcacagcctgcacctcct

SEQ ID NO: 4698521 - DNA, 25 bp, Homo sapien
ctgttgttgcacagcctgcacctcc

SEQ ID NO: 4698522 - DNA, 25 bp, Homo sapien
tgcacctcctctgccatgagacctt

SEQ ID NO: 4698523 - DNA, 25 bp, Homo sapien
ctcctctgccatgagaccttcagac

SEQ ID NO: 4698524 - DNA, 25 bp, Homo sapien
tgtggtgccacatgcgtggaattcc

SEQ ID NO: 4698525 - DNA, 25 bp, Homo sapien
cttggcttgatattcttcccaagat

SEQ ID NO: 4698526 - DNA, 25 bp, Homo sapien
cttcccaagatttaagtccttctca

SEQ ID NO: 4698527 - DNA, 25 bp, Homo sapien
ccttctcatgttcaagatccacaca

SEQ ID NO: 4698528 - DNA, 25 bp, Homo sapien
tccagcgaatgactctagtttcccc

SEQ ID NO: 4698529 - DNA, 25 bp, Homo sapien
gaaagaggaatttaggcagccaagc

SEQ ID NO: 4698530 - DNA, 25 bp, Homo sapien
gcaattgaccatgaaacaaagcacc

SEQ ID NO: 4698531 - DNA, 25 bp, Homo sapien
aaagcacctggcctttccagcgaat

SEQ ID NO: 4698532 - DNA, 25 bp, Homo sapien
gggaggctgtcttggaatcagtttc

SEQ ID NO: 4698533 - DNA, 25 bp, Homo sapien
cttccacggggaggctgtcttggaa

SEQ ID NO: 4698534 - DNA, 25 bp, Homo sapien
tccacggggaggctgtcttggaatc

SEQ ID NO: 4698535 - DNA, 25 bp, Homo sapien
gaggctgtcttggaatcagtttcat

SEQ ID NO: 4698536 - DNA, 25 bp, Homo sapien
aggtggccacggtgtgaaccatcag

SEQ ID NO: 4698537 - DNA, 25 bp, Homo sapien
tgatggaattaaaggtggccacggt

SEQ ID NO: 4698538 - DNA, 25 bp, Homo sapien
ttaaaggtggccacggtgtgaacca

SEQ ID NO: 4698539 - DNA, 25 bp, Homo sapien
atggaattaaaggtggccacggtgt

SEQ ID NO: 4698540 - DNA, 25 bp, Homo sapien
atgggcgctgcccaagagctggctc

SEQ ID NO: 4698541 - DNA, 25 bp, Homo sapien
ctgctgtagggaccgccagcgctca

SEQ ID NO: 4698542 - DNA, 25 bp, Homo sapien
gaacctctgtacttcatgggcgctg

SEQ ID NO: 4698543 - DNA, 25 bp, Homo sapien
tcctcggccagctgctgtagggacc

SEQ ID NO: 4698544 - DNA, 25 bp, Homo sapien
cttgtcaccgagagccgcaaggtcc

SEQ ID NO: 4698545 - DNA, 25 bp, Homo sapien
gagatcatgtccataattgtctgtg

SEQ ID NO: 4698546 - DNA, 25 bp, Homo sapien
tctgtgtttagagcttgattcttct

SEQ ID NO: 4698547 - DNA, 25 bp, Homo sapien
cagggcctggacactggcgagatca

SEQ ID NO: 4698548 - DNA, 25 bp, Homo sapien
gctccaggcctggtttaactctgtg

SEQ ID NO: 4698549 - DNA, 25 bp, Homo sapien
gaaatcgctaaggaagcgctgcagg

SEQ ID NO: 4698550 - DNA, 25 bp, Homo sapien
gcgctgatctgcacgtttccccagg

SEQ ID NO: 4698551 - DNA, 25 bp, Homo sapien
atgggactggatcaggcgctctgct

SEQ ID NO: 4698552 - DNA, 25 bp, Homo sapien
tggtgtcgctccagcaatgcctcag

SEQ ID NO: 4698553 - DNA, 25 bp, Homo sapien
aatgcctcagctccggtgacatcct

SEQ ID NO: 4698554 - DNA, 25 bp, Homo sapien
tccattgatccaagacatgaggtcc

SEQ ID NO: 4698555 - DNA, 25 bp, Homo sapien
gacatccttggctagctcatctgag

SEQ ID NO: 4698556 - DNA, 25 bp, Homo sapien
ggctggcatagtgtccgtgagccaa

SEQ ID NO: 4698557 - DNA, 25 bp, Homo sapien
aagtttctgcttgatctcagggctg

SEQ ID NO: 4698558 - DNA, 25 bp, Homo sapien
gccctggcatcgatttctgtccggt

SEQ ID NO: 4698559 - DNA, 25 bp, Homo sapien
cacgctcctggtcaagaatatcaag

SEQ ID NO: 4698560 - DNA, 25 bp, Homo sapien
gcaggtgagaaaatgaggcccttca

SEQ ID NO: 4698561 - DNA, 25 bp, Homo sapien
caagaggcaggtgagaaaatgaggc

SEQ ID NO: 4698562 - DNA, 25 bp, Homo sapien
gaggcaggtgagaaaatgaggccct

SEQ ID NO: 4698563 - DNA, 25 bp, Homo sapien
agggcaagaggcaggtgagaaaatg

SEQ ID NO: 4698564 - DNA, 25 bp, Homo sapien
tttgatcagagcctctacgctgtcc

SEQ ID NO: 4698565 - DNA, 25 bp, Homo sapien
ctggacgttaatcgctttgtcaaag

SEQ ID NO: 4698566 - DNA, 25 bp, Homo sapien
cttcggtattcaagaaggcctcccg

SEQ ID NO: 4698567 - DNA, 25 bp, Homo sapien
agcttgctcacagtcccgatggaac

SEQ ID NO: 4698568 - DNA, 25 bp, Homo sapien
ccggctagaaatgtctcccttggca

SEQ ID NO: 4698569 - DNA, 25 bp, Homo sapien
tctcccttggcataatggccggcag

SEQ ID NO: 4698570 - DNA, 25 bp, Homo sapien
cagcgatgagctggtcggcaaaggc

SEQ ID NO: 4698571 - DNA, 25 bp, Homo sapien
gtccaagacctcattgcgccggcta

SEQ ID NO: 4698572 - DNA, 25 bp, Homo sapien
ttggtgggatccttgtacgactcat

SEQ ID NO: 4698573 - DNA, 25 bp, Homo sapien
acgactcatcactcgctgtttgcaa

SEQ ID NO: 4698574 - DNA, 25 bp, Homo sapien
cctagctttgaccttttctcaatca

SEQ ID NO: 4698575 - DNA, 25 bp, Homo sapien
catcccggctgaactgttggagggt

SEQ ID NO: 4698576 - DNA, 25 bp, Homo sapien
caaaatctactcaataacataaggc

SEQ ID NO: 4698577 - DNA, 25 bp, Homo sapien
aaacttgactagggctttcccactg

SEQ ID NO: 4698578 - DNA, 25 bp, Homo sapien
ctgacttcccatgggtgcaaggaga

SEQ ID NO: 4698579 - DNA, 25 bp, Homo sapien
ggaaggcaacttttaaatggctctg

SEQ ID NO: 4698580 - DNA, 25 bp, Homo sapien
tgtactagctcaggagtagatgaac

SEQ ID NO: 4698581 - DNA, 25 bp, Homo sapien
agaaggcaattggagtttgtatgaa

SEQ ID NO: 4698582 - DNA, 25 bp, Homo sapien
cagggagtggcagcaaacataaaga

SEQ ID NO: 4698583 - DNA, 25 bp, Homo sapien
ttccaaaccagttcctgctaggtta

SEQ ID NO: 4698584 - DNA, 25 bp, Homo sapien
tccggtcagcgttggcatgcagctc

SEQ ID NO: 4698585 - DNA, 25 bp, Homo sapien
gcagctctgcttcaaaagcctggtg

SEQ ID NO: 4698586 - DNA, 25 bp, Homo sapien
ggcacaggctccacgttcaatgagg

SEQ ID NO: 4698587 - DNA, 25 bp, Homo sapien
gagttgcccatgtcgataaccccac

SEQ ID NO: 4698588 - DNA, 25 bp, Homo sapien
cctctcctaaagctcaatttgagaa

SEQ ID NO: 4698589 - DNA, 25 bp, Homo sapien
gaaaacactcataggagccattctc

SEQ ID NO: 4698590 - DNA, 25 bp, Homo sapien
tccccatctgtaattcagcctaaag

SEQ ID NO: 4698591 - DNA, 25 bp, Homo sapien
gaaatctatgaagaatcgtccctct

SEQ ID NO: 4698592 - DNA, 25 bp, Homo sapien
ctcttttccgctgacttttgcacca

SEQ ID NO: 4698593 - DNA, 25 bp, Homo sapien
aagaactgccactggtcagctaagg

SEQ ID NO: 4698594 - DNA, 25 bp, Homo sapien
actggtcagctaaggcagccaggcg

SEQ ID NO: 4698595 - DNA, 25 bp, Homo sapien
ggctcttttccgctgacttttgcac

SEQ ID NO: 4698596 - DNA, 25 bp, Homo sapien
tccagcagttgatgctttttcagca

SEQ ID NO: 4698597 - DNA, 25 bp, Homo sapien
acagaagctaggtctttgccataat

SEQ ID NO: 4698598 - DNA, 25 bp, Homo sapien
cataatcttcggatgccagcagggc

SEQ ID NO: 4698599 - DNA, 25 bp, Homo sapien
agcaggttgttcacagaagctaggt

SEQ ID NO: 4698600 - DNA, 25 bp, Homo sapien
cacttacccgaatcaaaatattcct

SEQ ID NO: 4698601 - DNA, 25 bp, Homo sapien
aatggtgagcattgataaaacctac

SEQ ID NO: 4698602 - DNA, 25 bp, Homo sapien
acaccacaacctgaattcagcattt

SEQ ID NO: 4698603 - DNA, 25 bp, Homo sapien
aaattattcacacttacccgaatca

SEQ ID NO: 4698604 - DNA, 25 bp, Homo sapien
cctcgtcatccatgtcccggaagaa

SEQ ID NO: 4698605 - DNA, 25 bp, Homo sapien
tttacttgggaggtgtcgaaggcac

SEQ ID NO: 4698606 - DNA, 25 bp, Homo sapien
gattcattcagcttggctcgccggg

SEQ ID NO: 4698607 - DNA, 25 bp, Homo sapien
gatcttctggaagcgcccgttgatg

SEQ ID NO: 4698608 - DNA, 25 bp, Homo sapien
ctgaatagccggctcatgcgcagcc

SEQ ID NO: 4698609 - DNA, 25 bp, Homo sapien
gttctgcttccagccgcttgtgctt

SEQ ID NO: 4698610 - DNA, 25 bp, Homo sapien
taggtcccggccgtagtcctctgag

SEQ ID NO: 4698611 - DNA, 25 bp, Homo sapien
tcaggttctgcacgccggttaggtc

SEQ ID NO: 4698612 - DNA, 25 bp, Homo sapien
tgttgtcatcggacagcttcttgcc

SEQ ID NO: 4698613 - DNA, 25 bp, Homo sapien
tggatctcctctttcccgatggtgt

SEQ ID NO: 4698614 - DNA, 25 bp, Homo sapien
acagcttcttgccagtgtccaggac

SEQ ID NO: 4698615 - DNA, 25 bp, Homo sapien
tcccgatggtgttgtcatcggacag

SEQ ID NO: 4698616 - DNA, 25 bp, Homo sapien
ccaaggactcttccagccgctgacc

SEQ ID NO: 4698617 - DNA, 25 bp, Homo sapien
gagtgtcgccataatcttcgctggc

SEQ ID NO: 4698618 - DNA, 25 bp, Homo sapien
gatggcggcaagagtgtcgccataa

SEQ ID NO: 4698619 - DNA, 25 bp, Homo sapien
ccataatcttcgctggccaccaggg

SEQ ID NO: 4698620 - DNA, 25 bp, Homo sapien
tgaggtcttgtccattggtgcagac

SEQ ID NO: 4698621 - DNA, 25 bp, Homo sapien
cattcacgcgatccttgtggacggt

SEQ ID NO: 4698622 - DNA, 25 bp, Homo sapien
tggtgcagacatcattcacgcgatc

SEQ ID NO: 4698623 - DNA, 25 bp, Homo sapien
cggtgaagtctgtctcaaaagcttc

SEQ ID NO: 4698624 - DNA, 25 bp, Homo sapien
aggaaacaggctgtcgctgaggaca

SEQ ID NO: 4698625 - DNA, 25 bp, Homo sapien
acaggctgtcgctgaggacaaagca

SEQ ID NO: 4698626 - DNA, 25 bp, Homo sapien
gaaacaggctgtcgctgaggacaaa

SEQ ID NO: 4698627 - DNA, 25 bp, Homo sapien
actacaagtcacattgaatttaaag

SEQ ID NO: 4698628 - DNA, 25 bp, Homo sapien
aaggaaggccgagttctcatccagc

SEQ ID NO: 4698629 - DNA, 25 bp, Homo sapien
tgacactttcccgttcaggcccttc

SEQ ID NO: 4698630 - DNA, 25 bp, Homo sapien
cacgtccgccttccagttgaactga

SEQ ID NO: 4698631 - DNA, 25 bp, Homo sapien
atccagcttcgcctttctctgggct

SEQ ID NO: 4698632 - DNA, 25 bp, Homo sapien
cagtcagtggtctgccctggtagta

SEQ ID NO: 4698633 - DNA, 25 bp, Homo sapien
cgtgcagcagcgtttacaggctttt

SEQ ID NO: 4698634 - DNA, 25 bp, Homo sapien
ggtagtaggttctctgccatgccca

SEQ ID NO: 4698635 - DNA, 25 bp, Homo sapien
ccaatgacacggaaggagacaaaga

SEQ ID NO: 4698636 - DNA, 25 bp, Homo sapien
taaatcccaatcttcctaactacag

SEQ ID NO: 4698637 - DNA, 25 bp, Homo sapien
atctgtgccatgacgagctccctgc

SEQ ID NO: 4698638 - DNA, 25 bp, Homo sapien
acatcaaaacccagacaaaccattt

SEQ ID NO: 4698639 - DNA, 25 bp, Homo sapien
tgtggaaaatatactgccctcctca

SEQ ID NO: 4698640 - DNA, 25 bp, Homo sapien
tctcggccataatcatctgtcttca

SEQ ID NO: 4698641 - DNA, 25 bp, Homo sapien
gacaggtctcggccataatcatctg

SEQ ID NO: 4698642 - DNA, 25 bp, Homo sapien
ggtctcggccataatcatctgtctt

SEQ ID NO: 4698643 - DNA, 25 bp, Homo sapien
caggtctcggccataatcatctgtc

SEQ ID NO: 4698644 - DNA, 25 bp, Homo sapien
tttggcggcgagaagctgatctttg

SEQ ID NO: 4698645 - DNA, 25 bp, Homo sapien
tggctccacctcttcatgagggagg

SEQ ID NO: 4698646 - DNA, 25 bp, Homo sapien
ccgggcctcgatggccttggactga

SEQ ID NO: 4698647 - DNA, 25 bp, Homo sapien
ggcctgcagcccagcgtcaaaagtt

SEQ ID NO: 4698648 - DNA, 25 bp, Homo sapien
cagaagagactgagttggcggagtc

SEQ ID NO: 4698649 - DNA, 25 bp, Homo sapien
gactgagttggcggagtcgccaggg

SEQ ID NO: 4698650 - DNA, 25 bp, Homo sapien
agagactgagttggcggagtcgcca

SEQ ID NO: 4698651 - DNA, 25 bp, Homo sapien
gaagagactgagttggcggagtcgc

SEQ ID NO: 4698652 - DNA, 25 bp, Homo sapien
gaagctcttgatctggcggtccagc

SEQ ID NO: 4698653 - DNA, 25 bp, Homo sapien
cttccaaggagttgcagcgcacggg

SEQ ID NO: 4698654 - DNA, 25 bp, Homo sapien
gtgggcctcgcgcaaagctttgatt

SEQ ID NO: 4698655 - DNA, 25 bp, Homo sapien
agctcggccagctggttgaagtcag

SEQ ID NO: 4698656 - DNA, 25 bp, Homo sapien
tcttggatccactggtggaaggcgt

SEQ ID NO: 4698657 - DNA, 25 bp, Homo sapien
ctggtctcttggatccactggtgga

SEQ ID NO: 4698658 - DNA, 25 bp, Homo sapien
ggcgcagcttgtcgttctcctcctg

SEQ ID NO: 4698659 - DNA, 25 bp, Homo sapien
gcgttggcgtgctgggcaaactcct

SEQ ID NO: 4698660 - DNA, 25 bp, Homo sapien
tgtggacttactgtaccctgcctga

SEQ ID NO: 4698661 - DNA, 25 bp, Homo sapien
catcagaatgtgtggcccggctgga

SEQ ID NO: 4698662 - DNA, 25 bp, Homo sapien
caggcagctcacactaggaatgggc

SEQ ID NO: 4698663 - DNA, 25 bp, Homo sapien
aaagtgagcccttggaatcgcccag

SEQ ID NO: 4698664 - DNA, 25 bp, Homo sapien
tccagacagatcatccccaacttca

SEQ ID NO: 4698665 - DNA, 25 bp, Homo sapien
tagacacgaatgacccgacgatatg

SEQ ID NO: 4698666 - DNA, 25 bp, Homo sapien
gacccgacgatatgctatgctattc

SEQ ID NO: 4698667 - DNA, 25 bp, Homo sapien
cccaacttcatactgatagacacga

SEQ ID NO: 4698668 - DNA, 25 bp, Homo sapien
cacagtgaggtaagaagagaaataa

SEQ ID NO: 4698669 - DNA, 25 bp, Homo sapien
gtgcatcagtaaagccacagtgagg

SEQ ID NO: 4698670 - DNA, 25 bp, Homo sapien
gttagtcagggtggagccgcctggg

SEQ ID NO: 4698671 - DNA, 25 bp, Homo sapien
gcagccgagggcggcaggttagtca

SEQ ID NO: 4698672 - DNA, 25 bp, Homo sapien
agagcacgaccctgcagacaaagga

SEQ ID NO: 4698673 - DNA, 25 bp, Homo sapien
gatggctgtgactaaaccccagatc

SEQ ID NO: 4698674 - DNA, 25 bp, Homo sapien
actcgtcttgctcccaaggccagga

SEQ ID NO: 4698675 - DNA, 25 bp, Homo sapien
tgctgggagatcacgaccaactgtg

SEQ ID NO: 4698676 - DNA, 25 bp, Homo sapien
gctgggattcgagggtccccgactc

SEQ ID NO: 4698677 - DNA, 25 bp, Homo sapien
tagcttcaagctgggattcgagggt

SEQ ID NO: 4698678 - DNA, 25 bp, Homo sapien
ttcaagctgggattcgagggtcccc

SEQ ID NO: 4698679 - DNA, 25 bp, Homo sapien
gtccccgactcttccaccatacagg

SEQ ID NO: 4698680 - DNA, 25 bp, Homo sapien
gctggaactaacaggtgcccatcac

SEQ ID NO: 4698681 - DNA, 25 bp, Homo sapien
ccaaggacaagtacggcgaggactc

SEQ ID NO: 4698682 - DNA, 25 bp, Homo sapien
tggcctgagacctcgtaaaacaaga

SEQ ID NO: 4698683 - DNA, 25 bp, Homo sapien
tgtgagggttccaaagcagctggta

SEQ ID NO: 4698684 - DNA, 25 bp, Homo sapien
ggcccacggtgctgtgctccgtgta

SEQ ID NO: 4698685 - DNA, 25 bp, Homo sapien
ggtcccactgctgggcgaggcccac

SEQ ID NO: 4698686 - DNA, 25 bp, Homo sapien
tttgagctgacttctcatggctcgg

SEQ ID NO: 4698687 - DNA, 25 bp, Homo sapien
tccaggttgtgctgcatgcgcatgc

SEQ ID NO: 4698688 - DNA, 25 bp, Homo sapien
ggcctcctcagtcacacctgttgtg

SEQ ID NO: 4698689 - DNA, 25 bp, Homo sapien
tcatgctgaattctttgagggcctc

SEQ ID NO: 4698690 - DNA, 25 bp, Homo sapien
gggcctcctcagtcacacctgttgt

SEQ ID NO: 4698691 - DNA, 25 bp, Homo sapien
taaacatcatgctgaattctttgag

SEQ ID NO: 4698692 - DNA, 25 bp, Homo sapien
gtccaggattgcctcgaactcaggg

SEQ ID NO: 4698693 - DNA, 25 bp, Homo sapien
ctgttcggatccaccgtgtccagga

SEQ ID NO: 4698694 - DNA, 25 bp, Homo sapien
tgatggttcagcctgccagacttgt

SEQ ID NO: 4698695 - DNA, 25 bp, Homo sapien
ccagggagcgcaggcaagatttgaa

SEQ ID NO: 4698696 - DNA, 25 bp, Homo sapien
cccgggcagaggctcacagcacctg

SEQ ID NO: 4698697 - DNA, 25 bp, Homo sapien
cagcacctggccttaattaatttac

SEQ ID NO: 4698698 - DNA, 25 bp, Homo sapien
caggtgggtgccccgggcagaggct

SEQ ID NO: 4698699 - DNA, 25 bp, Homo sapien
taggagcgggggaagcaagagcctg

SEQ ID NO: 4698700 - DNA, 25 bp, Homo sapien
cgcggctgatcatgaaagccatgta

SEQ ID NO: 4698701 - DNA, 25 bp, Homo sapien
ggaaggcgctctcaatctcctcgct

SEQ ID NO: 4698702 - DNA, 25 bp, Homo sapien
ggtcacgtaaggctttccctctgag

SEQ ID NO: 4698703 - DNA, 25 bp, Homo sapien
gacttgacgttctcagtttcgcggc

SEQ ID NO: 4698704 - DNA, 25 bp, Homo sapien
taaatggggagaatacccagcgcag

SEQ ID NO: 4698705 - DNA, 25 bp, Homo sapien
agcgcagggcctgttaccccagact

SEQ ID NO: 4698706 - DNA, 25 bp, Homo sapien
tttccaaaggacacctcttcaccca

SEQ ID NO: 4698707 - DNA, 25 bp, Homo sapien
gctcggagctgcttctacaagcaga

SEQ ID NO: 4698708 - DNA, 25 bp, Homo sapien
tagtcgaacgcggtggggagctcgc

SEQ ID NO: 4698709 - DNA, 25 bp, Homo sapien
ccacgtagggcttcatgtgggagac

SEQ ID NO: 4698710 - DNA, 25 bp, Homo sapien
tcagttcacgaaaagcgagcgggtg

SEQ ID NO: 4698711 - DNA, 25 bp, Homo sapien
ccttgccgtccacgtagggcttcat

SEQ ID NO: 4698712 - DNA, 25 bp, Homo sapien
gttacagtggaaagtgagagcacac

SEQ ID NO: 4698713 - DNA, 25 bp, Homo sapien
ccggaagcgggttagtgaagcacca

SEQ ID NO: 4698714 - DNA, 25 bp, Homo sapien
catgatgattgtgactggaccggaa

SEQ ID NO: 4698715 - DNA, 25 bp, Homo sapien
tttctgaagtcggaatgagggcagc

SEQ ID NO: 4698716 - DNA, 25 bp, Homo sapien
tttatttgtcttttacatgaaaaca

SEQ ID NO: 4698717 - DNA, 25 bp, Homo sapien
tacatgaaaacagatttgggggagg

SEQ ID NO: 4698718 - DNA, 25 bp, Homo sapien
ggggaagtcatcatttatttgtctt

SEQ ID NO: 4698719 - DNA, 25 bp, Homo sapien
gagagagaacaaggggaggagccag

SEQ ID NO: 4698720 - DNA, 25 bp, Homo sapien
cccagagagccttggtttggtgaag

SEQ ID NO: 4698721 - DNA, 25 bp, Homo sapien
accatgattgcttccgcccagagag

SEQ ID NO: 4698722 - DNA, 25 bp, Homo sapien
gctcgaatcccgcatgagatgggaa

SEQ ID NO: 4698723 - DNA, 25 bp, Homo sapien
tgtcattgtcccttgagcagccacc

SEQ ID NO: 4698724 - DNA, 25 bp, Homo sapien
tggagaacttgctccggcttctcca

SEQ ID NO: 4698725 - DNA, 25 bp, Homo sapien
ctggagaacttgctccggcttctcc

SEQ ID NO: 4698726 - DNA, 25 bp, Homo sapien
tctggagaacttgctccggcttctc

SEQ ID NO: 4698727 - DNA, 25 bp, Homo sapien
gggcccggcccaggagattctctag

SEQ ID NO: 4698728 - DNA, 25 bp, Homo sapien
ctctagcatatggcaccccctgctg

SEQ ID NO: 4698729 - DNA, 25 bp, Homo sapien
attctctagcatatggcaccccctg

SEQ ID NO: 4698730 - DNA, 25 bp, Homo sapien
ggcccggcccaggagattctctagc

SEQ ID NO: 4698731 - DNA, 25 bp, Homo sapien
ccttgtaggccttcatagagacagt

SEQ ID NO: 4698732 - DNA, 25 bp, Homo sapien
gcttcccgacatgctccgaggaggg

SEQ ID NO: 4698733 - DNA, 25 bp, Homo sapien
gaaagatctcatgccgcttcccgac

SEQ ID NO: 4698734 - DNA, 25 bp, Homo sapien
ggtgcttgggcactccttgtaggcc

SEQ ID NO: 4698735 - DNA, 25 bp, Homo sapien
agtttcctcgcccaggagtagcgcg

SEQ ID NO: 4698736 - DNA, 25 bp, Homo sapien
cagggtatgcaaaaccggtcatgct

SEQ ID NO: 4698737 - DNA, 25 bp, Homo sapien
tctctggccgagaagaatcgttact

SEQ ID NO: 4698738 - DNA, 25 bp, Homo sapien
taaccacatttaggatctccgtagg

SEQ ID NO: 4698739 - DNA, 25 bp, Homo sapien
ggaagggatatttacatgacagtgg

SEQ ID NO: 4698740 - DNA, 25 bp, Homo sapien
cgccctgcctggaagggatatttac

SEQ ID NO: 4698741 - DNA, 25 bp, Homo sapien
cagcggcttaaatctgcactggagc

SEQ ID NO: 4698742 - DNA, 25 bp, Homo sapien
caccctccaatcaggagaaatttct

SEQ ID NO: 4698743 - DNA, 25 bp, Homo sapien
tttgaggcgggagtggagactggcg

SEQ ID NO: 4698744 - DNA, 25 bp, Homo sapien
cgggagtggagactggcgtttaggg

SEQ ID NO: 4698745 - DNA, 25 bp, Homo sapien
tcccttcttcggcaagcctgcagag

SEQ ID NO: 4698746 - DNA, 25 bp, Homo sapien
tgcagaggccgatgtctcctccggt

SEQ ID NO: 4698747 - DNA, 25 bp, Homo sapien
ccacgtgattggctatgctcaggct

SEQ ID NO: 4698748 - DNA, 25 bp, Homo sapien
tcagagggtagagtcccaagaggtc

SEQ ID NO: 4698749 - DNA, 25 bp, Homo sapien
ggctcacagattgcccacaggaagt

SEQ ID NO: 4698750 - DNA, 25 bp, Homo sapien
tgtctaggccccgagatcagagggt

SEQ ID NO: 4698751 - DNA, 25 bp, Homo sapien
cccagtaaaagtgccaacaggtcca

SEQ ID NO: 4698752 - DNA, 25 bp, Homo sapien
agtaaaagtgccaacaggtccacac

SEQ ID NO: 4698753 - DNA, 25 bp, Homo sapien
tcccatgtggaggaaaagggactga

SEQ ID NO: 4698754 - DNA, 25 bp, Homo sapien
tgcatcccatgtggaggaaaaggga

SEQ ID NO: 4698755 - DNA, 25 bp, Homo sapien
gcctgacgccgagggacgggctggg

SEQ ID NO: 4698756 - DNA, 25 bp, Homo sapien
gcgggcaagcggcttcccctcacgc

SEQ ID NO: 4698757 - DNA, 25 bp, Homo sapien
ggctccctcactcgcgctcggcgat

SEQ ID NO: 4698758 - DNA, 25 bp, Homo sapien
cggcccgggctcctgttcgcggagg

SEQ ID NO: 4698759 - DNA, 25 bp, Homo sapien
tttactgactttggccgccggcgcc

SEQ ID NO: 4698760 - DNA, 25 bp, Homo sapien
ctgaggtctcgtcggccccgtcgtg

SEQ ID NO: 4698761 - DNA, 25 bp, Homo sapien
tggttggagttgagctcctttttac

SEQ ID NO: 4698762 - DNA, 25 bp, Homo sapien
tctcgtcggccccgtcgtggttgga

SEQ ID NO: 4698763 - DNA, 25 bp, Homo sapien
aagacccccgatacactggtcgcgg

SEQ ID NO: 4698764 - DNA, 25 bp, Homo sapien
tgaaagggccagatcgcgcggttca

SEQ ID NO: 4698765 - DNA, 25 bp, Homo sapien
cgatacactggtcgcggcgccaggt

SEQ ID NO: 4698766 - DNA, 25 bp, Homo sapien
tccggtaaccatcccggattggcag

SEQ ID NO: 4698767 - DNA, 25 bp, Homo sapien
gaataggtgcccttttgtcctgtaa

SEQ ID NO: 4698768 - DNA, 25 bp, Homo sapien
ttacgatgaagataccaggcacgcc

SEQ ID NO: 4698769 - DNA, 25 bp, Homo sapien
cacgactttggagcacttactggga

SEQ ID NO: 4698770 - DNA, 25 bp, Homo sapien
cttactgggagcaactatgagatcg

SEQ ID NO: 4698771 - DNA, 25 bp, Homo sapien
tgtgttcaatcgcttcttgctgttc

SEQ ID NO: 4698772 - DNA, 25 bp, Homo sapien
caatgtgttcaatcgcttcttgctg

SEQ ID NO: 4698773 - DNA, 25 bp, Homo sapien
tcatcaatgtgttcaatcgcttctt

SEQ ID NO: 4698774 - DNA, 25 bp, Homo sapien
gtgttcaatcgcttcttgctgttct

SEQ ID NO: 4698775 - DNA, 25 bp, Homo sapien
gaaaagagatgttgacaatgatagt

SEQ ID NO: 4698776 - DNA, 25 bp, Homo sapien
tagcttgagtcatgcaaaataacca

SEQ ID NO: 4698777 - DNA, 25 bp, Homo sapien
tacagagtgtatttacttactagct

SEQ ID NO: 4698778 - DNA, 25 bp, Homo sapien
tttagacactcaaaactaagatggc

SEQ ID NO: 4698779 - DNA, 25 bp, Homo sapien
caaaaatttgggattttggcgatca

SEQ ID NO: 4698780 - DNA, 25 bp, Homo sapien
aaatggttggcggagtttgttatat

SEQ ID NO: 4698781 - DNA, 25 bp, Homo sapien
tctgacctcttctgaaaaaatggtt

SEQ ID NO: 4698782 - DNA, 25 bp, Homo sapien
tttggcgatcaattctgacctcttc

SEQ ID NO: 4698783 - DNA, 25 bp, Homo sapien
taacaatgccctgtccaaaacatac

SEQ ID NO: 4698784 - DNA, 25 bp, Homo sapien
gcatgctggactaagtcttcaccaa

SEQ ID NO: 4698785 - DNA, 25 bp, Homo sapien
ttgttgcacgcaacccagcatgctg

SEQ ID NO: 4698786 - DNA, 25 bp, Homo sapien
taagtcttcaccaagcttcctccat

SEQ ID NO: 4698787 - DNA, 25 bp, Homo sapien
ggtcaaataatgcagtgcctcttca

SEQ ID NO: 4698788 - DNA, 25 bp, Homo sapien
catcttcctccccaagcagtgcaga

SEQ ID NO: 4698789 - DNA, 25 bp, Homo sapien
tgtcacttcaactctggtcaaataa

SEQ ID NO: 4698790 - DNA, 25 bp, Homo sapien
tcttcatcttcctccccaagcagtg

SEQ ID NO: 4698791 - DNA, 25 bp, Homo sapien
caaacaagattaagttagagatact

SEQ ID NO: 4698792 - DNA, 25 bp, Homo sapien
ttaatttccacagtggcaaacaaga

SEQ ID NO: 4698793 - DNA, 25 bp, Homo sapien
tccacagtggcaaacaagattaagt

SEQ ID NO: 4698794 - DNA, 25 bp, Homo sapien
gcaaacaagattaagttagagatac

SEQ ID NO: 4698795 - DNA, 25 bp, Homo sapien
gaaagattagaaatatgaacaggtc

SEQ ID NO: 4698796 - DNA, 25 bp, Homo sapien
tagaaatatgaacaggtcttccaac

SEQ ID NO: 4698797 - DNA, 25 bp, Homo sapien
gaaatatgaacaggtcttccaacca

SEQ ID NO: 4698798 - DNA, 25 bp, Homo sapien
gattagaaatatgaacaggtcttcc

SEQ ID NO: 4698799 - DNA, 25 bp, Homo sapien
tggacttcgaagatggatcaccact

SEQ ID NO: 4698800 - DNA, 25 bp, Homo sapien
tttcggtggacttcgaagatggatc

SEQ ID NO: 4698801 - DNA, 25 bp, Homo sapien
tccatttgatttcggtggacttcga

SEQ ID NO: 4698802 - DNA, 25 bp, Homo sapien
ttgatttcggtggacttcgaagatg

SEQ ID NO: 4698803 - DNA, 25 bp, Homo sapien
tcagcacactggaacgttttatatt

SEQ ID NO: 4698804 - DNA, 25 bp, Homo sapien
ttaacagccactagcacaacacagt

SEQ ID NO: 4698805 - DNA, 25 bp, Homo sapien
gagctcagtcaccactgcagaaaac

SEQ ID NO: 4698806 - DNA, 25 bp, Homo sapien
tgagaaccctaaactactgtaatac

SEQ ID NO: 4698807 - DNA, 25 bp, Homo sapien
gcgtttgactcgaacgtttcgtcaa

SEQ ID NO: 4698808 - DNA, 25 bp, Homo sapien
tctgcgtttgactcgaacgtttcgt

SEQ ID NO: 4698809 - DNA, 25 bp, Homo sapien
tattctgcgtttgactcgaacgttt

SEQ ID NO: 4698810 - DNA, 25 bp, Homo sapien
ctttattctgcgtttgactcgaacg

SEQ ID NO: 4698811 - DNA, 25 bp, Homo sapien
agtagtactgtaatgggtttggcca

SEQ ID NO: 4698812 - DNA, 25 bp, Homo sapien
ctaactcatcagcacctgcatcaga

SEQ ID NO: 4698813 - DNA, 25 bp, Homo sapien
tatcatctttgatgacctctcctaa

SEQ ID NO: 4698814 - DNA, 25 bp, Homo sapien
agtaaaccaggtaaagaagctctct

SEQ ID NO: 4698815 - DNA, 25 bp, Homo sapien
tcatccccttcttcgtcaatatctt

SEQ ID NO: 4698816 - DNA, 25 bp, Homo sapien
tcctcatccccttcttcgtcaatat

SEQ ID NO: 4698817 - DNA, 25 bp, Homo sapien
cttcttcgtcaatatcttctaatcc

SEQ ID NO: 4698818 - DNA, 25 bp, Homo sapien
ccccttcttcgtcaatatcttctaa

SEQ ID NO: 4698819 - DNA, 25 bp, Homo sapien
ccccaaataaattgagaaccatgga

SEQ ID NO: 4698820 - DNA, 25 bp, Homo sapien
gagacctcaagaacagggcgactga

SEQ ID NO: 4698821 - DNA, 25 bp, Homo sapien
caaataaattgagaaccatggagta

SEQ ID NO: 4698822 - DNA, 25 bp, Homo sapien
gggataaaaatgaacttcgaacaga

SEQ ID NO: 4698823 - DNA, 25 bp, Homo sapien
caagggcacaatgtactcagagagt

SEQ ID NO: 4698824 - DNA, 25 bp, Homo sapien
gaacccacgtttcccagctatggag

SEQ ID NO: 4698825 - DNA, 25 bp, Homo sapien
gaggtcatcctgcaaagtgcgtatc

SEQ ID NO: 4698826 - DNA, 25 bp, Homo sapien
gggacagttactgctcaccatcaga

SEQ ID NO: 4698827 - DNA, 25 bp, Homo sapien
tttatgttcctttattggagcaaga

SEQ ID NO: 4698828 - DNA, 25 bp, Homo sapien
ttatgttcctttattggagcaagat

SEQ ID NO: 4698829 - DNA, 25 bp, Homo sapien
tcaggaggcacatcgcccgcgccca

SEQ ID NO: 4698830 - DNA, 25 bp, Homo sapien
caggaggcacatcgcccgcgcccag

SEQ ID NO: 4698831 - DNA, 25 bp, Homo sapien
ggcacatcgcccgcgcccaggtcct

SEQ ID NO: 4698832 - DNA, 25 bp, Homo sapien
ggaggcacatcgcccgcgcccaggt

SEQ ID NO: 4698833 - DNA, 25 bp, Homo sapien
gcttcggcgcctgcggttcccgctg

SEQ ID NO: 4698834 - DNA, 25 bp, Homo sapien
ctgcggttcccgctgggcgtgaccg

SEQ ID NO: 4698835 - DNA, 25 bp, Homo sapien
ggcgcctgcggttcccgctgggcgt

SEQ ID NO: 4698836 - DNA, 25 bp, Homo sapien
ttcccgctgggcgtgaccgcgcctc

SEQ ID NO: 4698837 - DNA, 25 bp, Homo sapien
aaattccgcgggattctgggcccag

SEQ ID NO: 4698838 - DNA, 25 bp, Homo sapien
ctctcagccactccggtcccggaag

SEQ ID NO: 4698839 - DNA, 25 bp, Homo sapien
cagcgcctccctcggatccaaaatt

SEQ ID NO: 4698840 - DNA, 25 bp, Homo sapien
cagaccctccgccaggactttcaaa

SEQ ID NO: 4698841 - DNA, 25 bp, Homo sapien
taaacgactggcttgggcgctcaag

SEQ ID NO: 4698842 - DNA, 25 bp, Homo sapien
cagttcacacggtaaatgggtgcca

SEQ ID NO: 4698843 - DNA, 25 bp, Homo sapien
gagaaccgacttaaggacactctgg

SEQ ID NO: 4698844 - DNA, 25 bp, Homo sapien
tacaagctacgtctggaacaggcgg

SEQ ID NO: 4698845 - DNA, 25 bp, Homo sapien
atggcccaagtggcggcggtctgtg

SEQ ID NO: 4698846 - DNA, 25 bp, Homo sapien
tctgtggccacgcgccgcaggttct

SEQ ID NO: 4698847 - DNA, 25 bp, Homo sapien
ttctggatggcccggcggatcacct

SEQ ID NO: 4698848 - DNA, 25 bp, Homo sapien
atggcccggcggatcacctccttct

SEQ ID NO: 4698849 - DNA, 25 bp, Homo sapien
cagggccgggcagcaggattcgggc

SEQ ID NO: 4698850 - DNA, 25 bp, Homo sapien
gggcagcaggattcgggcgtgcagc

SEQ ID NO: 4698851 - DNA, 25 bp, Homo sapien
ccgcagctcgccatgcagctgctcc

SEQ ID NO: 4698852 - DNA, 25 bp, Homo sapien
cggttggaggaccgcagcagctgct

SEQ ID NO: 4698853 - DNA, 25 bp, Homo sapien
tgccactggcgcacgtgtgggtcat

SEQ ID NO: 4698854 - DNA, 25 bp, Homo sapien
cacgtgtgggtcatgttctcagccc

SEQ ID NO: 4698855 - DNA, 25 bp, Homo sapien
ctgagctgctctgcccacggccggg

SEQ ID NO: 4698856 - DNA, 25 bp, Homo sapien
ctccggagagcctctaggtgccgag

SEQ ID NO: 4698857 - DNA, 25 bp, Homo sapien
ctggctgtcccgcagcatctgctgg

SEQ ID NO: 4698858 - DNA, 25 bp, Homo sapien
tgctgatcttcatccgcagcagggc

SEQ ID NO: 4698859 - DNA, 25 bp, Homo sapien
ccaggctgctgatcttcatccgcag

SEQ ID NO: 4698860 - DNA, 25 bp, Homo sapien
gccaccttcagctggctgtcccgca

SEQ ID NO: 4698861 - DNA, 25 bp, Homo sapien
agtttcaccacgttcttggcgccct

SEQ ID NO: 4698862 - DNA, 25 bp, Homo sapien
aacgtgcagtcgatgctgtagctcc

SEQ ID NO: 4698863 - DNA, 25 bp, Homo sapien
cagccagtgccttgcggtcctgtgt

SEQ ID NO: 4698864 - DNA, 25 bp, Homo sapien
ggtcctgtgttctccggctactaag

SEQ ID NO: 4698865 - DNA, 25 bp, Homo sapien
caggaggtccagtttctgagaggac

SEQ ID NO: 4698866 - DNA, 25 bp, Homo sapien
tcgggtcactctgctgcgcaaaggg

SEQ ID NO: 4698867 - DNA, 25 bp, Homo sapien
tctgagaggactcctgtagctgggc

SEQ ID NO: 4698868 - DNA, 25 bp, Homo sapien
ctgggggtatccaggcaccgcagcc

SEQ ID NO: 4698869 - DNA, 25 bp, Homo sapien
ttggtccgaagccagccctcggagg

SEQ ID NO: 4698870 - DNA, 25 bp, Homo sapien
gctgctggccagtgcggccgctggg

SEQ ID NO: 4698871 - DNA, 25 bp, Homo sapien
tggcaagctcgcctcggccacgctg

SEQ ID NO: 4698872 - DNA, 25 bp, Homo sapien
gagcgcccaggcacggctgtcagca

SEQ ID NO: 4698873 - DNA, 25 bp, Homo sapien
ggccagagccgggactcagggcagg

SEQ ID NO: 4698874 - DNA, 25 bp, Homo sapien
gccagagccgggactcagggcaggc

SEQ ID NO: 4698875 - DNA, 25 bp, Homo sapien
ccagagccgggactcagggcaggcc

SEQ ID NO: 4698876 - DNA, 25 bp, Homo sapien
cagagccgggactcagggcaggcct

SEQ ID NO: 4698877 - DNA, 25 bp, Homo sapien
cacaacacggttgtccacctttagc

SEQ ID NO: 4698878 - DNA, 25 bp, Homo sapien
tccagtgggatgacaaaggtctggt

SEQ ID NO: 4698879 - DNA, 25 bp, Homo sapien
ggtcccaggactgttcggccacctg

SEQ ID NO: 4698880 - DNA, 25 bp, Homo sapien
cggttgtccacctttagcacagcca

SEQ ID NO: 4698881 - DNA, 25 bp, Homo sapien
ccagtgtaccccaatctccagctca

SEQ ID NO: 4698882 - DNA, 25 bp, Homo sapien
cgccacatagctgccgccagtcccg

SEQ ID NO: 4698883 - DNA, 25 bp, Homo sapien
tgagggacagttggtgacaggcatt

SEQ ID NO: 4698884 - DNA, 25 bp, Homo sapien
cagtcccgccagtgtaccccaatct

SEQ ID NO: 4698885 - DNA, 25 bp, Homo sapien
gggcaaaaagcagtccctgcggtac

SEQ ID NO: 4698886 - DNA, 25 bp, Homo sapien
tcaatgacaggatcgcagaaggtca

SEQ ID NO: 4698887 - DNA, 25 bp, Homo sapien
tctgcgtttagagaagatgcgttcc

SEQ ID NO: 4698888 - DNA, 25 bp, Homo sapien
gagaagatgcgttcctgcctctgca

SEQ ID NO: 4698889 - DNA, 25 bp, Homo sapien
gcctctcaatgacaggatcgcagaa

SEQ ID NO: 4698890 - DNA, 25 bp, Homo sapien
cagaggcctctcgcagtgttgttgg

SEQ ID NO: 4698891 - DNA, 25 bp, Homo sapien
tgccgaggttcatctgcgaagccct

SEQ ID NO: 4698892 - DNA, 25 bp, Homo sapien
tgttggggtccgagggcatccttta

SEQ ID NO: 4698893 - DNA, 25 bp, Homo sapien
gcagcaggttcatgacgaggcgccc

SEQ ID NO: 4698894 - DNA, 25 bp, Homo sapien
cggagtctcctcggatgttggctcc

SEQ ID NO: 4698895 - DNA, 25 bp, Homo sapien
gtctcctcggatgttggctcctggg

SEQ ID NO: 4698896 - DNA, 25 bp, Homo sapien
catctcttcacccaagggggtcttc

SEQ ID NO: 4698897 - DNA, 25 bp, Homo sapien
gagtctcctcggatgttggctcctg

SEQ ID NO: 4698898 - DNA, 25 bp, Homo sapien
cgtcgagtcctaggctccatatggg

SEQ ID NO: 4698899 - DNA, 25 bp, Homo sapien
gatggcccacgtcgagtcctaggct

SEQ ID NO: 4698900 - DNA, 25 bp, Homo sapien
ggagatggcccacgtcgagtcctag

SEQ ID NO: 4698901 - DNA, 25 bp, Homo sapien
ccacgtcgagtcctaggctccatat

SEQ ID NO: 4698902 - DNA, 25 bp, Homo sapien
caaatgttcaagcaagcagacgaac

SEQ ID NO: 4698903 - DNA, 25 bp, Homo sapien
cagacgaacgtctcaaacatgaagg

SEQ ID NO: 4698904 - DNA, 25 bp, Homo sapien
tcaaacatgaaggtgcgcaggatgg

SEQ ID NO: 4698905 - DNA, 25 bp, Homo sapien
gaatggatacacaaatgttcaagca

SEQ ID NO: 4698906 - DNA, 25 bp, Homo sapien
ggtatatgaagtcccctagggcact

SEQ ID NO: 4698907 - DNA, 25 bp, Homo sapien
gagggtatatgaagtcccctagggc

SEQ ID NO: 4698908 - DNA, 25 bp, Homo sapien
gccactccaagcctcccatgcccag

SEQ ID NO: 4698909 - DNA, 25 bp, Homo sapien
tccaagcctcccatgcccagtcctg

SEQ ID NO: 4698910 - DNA, 25 bp, Homo sapien
gcacagctaagcagcggaagtcctg

SEQ ID NO: 4698911 - DNA, 25 bp, Homo sapien
agctaagcagcggaagtcctgaagc

SEQ ID NO: 4698912 - DNA, 25 bp, Homo sapien
aagcagcggaagtcctgaagccgag

SEQ ID NO: 4698913 - DNA, 25 bp, Homo sapien
ctaagcagcggaagtcctgaagccg

SEQ ID NO: 4698914 - DNA, 25 bp, Homo sapien
aggtcctcccggctcatgtgatgag

SEQ ID NO: 4698915 - DNA, 25 bp, Homo sapien
atgaggcccccaatcccgtcccata

SEQ ID NO: 4698916 - DNA, 25 bp, Homo sapien
gtgatgaggcccccaatcccgtccc

SEQ ID NO: 4698917 - DNA, 25 bp, Homo sapien
ccataccaccctcttcagcccacta

SEQ ID NO: 4698918 - DNA, 25 bp, Homo sapien
ctctctatctcgtcccggctgagca

SEQ ID NO: 4698919 - DNA, 25 bp, Homo sapien
cagtgctttgatggcgtagtatttc

SEQ ID NO: 4698920 - DNA, 25 bp, Homo sapien
gatggcgtagtatttccctgtcccc

SEQ ID NO: 4698921 - DNA, 25 bp, Homo sapien
ccctgtccccttgaactggaccagg

SEQ ID NO: 4698922 - DNA, 25 bp, Homo sapien
gggaagacatcctcgtggatctgca

SEQ ID NO: 4698923 - DNA, 25 bp, Homo sapien
caggatccgcttctcgcagtacagg

SEQ ID NO: 4698924 - DNA, 25 bp, Homo sapien
ggaaagggtgccctgtgcagcccac

SEQ ID NO: 4698925 - DNA, 25 bp, Homo sapien
accaccaggcacaaactcagtcaca

SEQ ID NO: 4698926 - DNA, 25 bp, Homo sapien
ctgtaaatgatcttcttctcgtgta

SEQ ID NO: 4698927 - DNA, 25 bp, Homo sapien
caggacaacacaagccacgtagaag

SEQ ID NO: 4698928 - DNA, 25 bp, Homo sapien
cccaggacaacacaagccacgtaga

SEQ ID NO: 4698929 - DNA, 25 bp, Homo sapien
cttcttctcgtgtaagaactgcagc

SEQ ID NO: 4698930 - DNA, 25 bp, Homo sapien
gcatccagcagaaggttatccaact

SEQ ID NO: 4698931 - DNA, 25 bp, Homo sapien
cagcagaaggttatccaacttcagg

SEQ ID NO: 4698932 - DNA, 25 bp, Homo sapien
agtctgcgatcttcaggaatccctg

SEQ ID NO: 4698933 - DNA, 25 bp, Homo sapien
gcgatcttcaggaatccctgggcat

SEQ ID NO: 4698934 - DNA, 25 bp, Homo sapien
gtgctagtccggtccccgaagccga

SEQ ID NO: 4698935 - DNA, 25 bp, Homo sapien
ggggctcagcaggatgcacgggcca

SEQ ID NO: 4698936 - DNA, 25 bp, Homo sapien
gctcagcaggatgcacgggccaccc

SEQ ID NO: 4698937 - DNA, 25 bp, Homo sapien
gggggctcagcaggatgcacgggcc

SEQ ID NO: 4698938 - DNA, 25 bp, Homo sapien
gcgtccatgttgacgatgcagtcaa

SEQ ID NO: 4698939 - DNA, 25 bp, Homo sapien
gggcgtccatgttgacgatgcagtc

SEQ ID NO: 4698940 - DNA, 25 bp, Homo sapien
actcaagcccttgcaccgacagaaa

SEQ ID NO: 4698941 - DNA, 25 bp, Homo sapien
tcaagcccttgcaccgacagaaagc

SEQ ID NO: 4698942 - DNA, 25 bp, Homo sapien
gccccgaggcgcttctccgggcact

SEQ ID NO: 4698943 - DNA, 25 bp, Homo sapien
ccccgaggcgcttctccgggcactt

SEQ ID NO: 4698944 - DNA, 25 bp, Homo sapien
gctggaccttgatctcctcggcatc

SEQ ID NO: 4698945 - DNA, 25 bp, Homo sapien
ggaccttgatctcctcggcatcctg

SEQ ID NO: 4698946 - DNA, 25 bp, Homo sapien
tggaccttgatctcctcggcatcct

SEQ ID NO: 4698947 - DNA, 25 bp, Homo sapien
tggctggaccttgatctcctcggca

SEQ ID NO: 4698948 - DNA, 25 bp, Homo sapien
gcagctccaggagtcactccatgcc

SEQ ID NO: 4698949 - DNA, 25 bp, Homo sapien
gagggcaaaggagaggcgcctgaga

SEQ ID NO: 4698950 - DNA, 25 bp, Homo sapien
tccaggagtcactccatgccaccta

SEQ ID NO: 4698951 - DNA, 25 bp, Homo sapien
gaggcgcctgagacggcaggaacag

SEQ ID NO: 4698952 - DNA, 25 bp, Homo sapien
tgtgaactcgccctcaaagtagcgc

SEQ ID NO: 4698953 - DNA, 25 bp, Homo sapien
aaagtagcgcaggtccgcagggcca

SEQ ID NO: 4698954 - DNA, 25 bp, Homo sapien
cagggttccaggaatcgctctgaca

SEQ ID NO: 4698955 - DNA, 25 bp, Homo sapien
ctctgacacaaagtcgaagtcccgg

SEQ ID NO: 4698956 - DNA, 25 bp, Homo sapien
aaagcccacaacagtggccccatgg

SEQ ID NO: 4698957 - DNA, 25 bp, Homo sapien
acgggtgaacgagcagaggctctaa

SEQ ID NO: 4698958 - DNA, 25 bp, Homo sapien
aagggacacactttgcccagtgaca

SEQ ID NO: 4698959 - DNA, 25 bp, Homo sapien
aaccatatcactccttgctgcggca

SEQ ID NO: 4698960 - DNA, 25 bp, Homo sapien
ccttggtgggcagttctgccttcca

SEQ ID NO: 4698961 - DNA, 25 bp, Homo sapien
gaaaaggacctgtgggtggctcagg

SEQ ID NO: 4698962 - DNA, 25 bp, Homo sapien
gccttggtgggcagttctgccttcc

SEQ ID NO: 4698963 - DNA, 25 bp, Homo sapien
gaagaaaaggacctgtgggtggctc

SEQ ID NO: 4698964 - DNA, 25 bp, Homo sapien
cagagcaaccttgggcgagccttgg

SEQ ID NO: 4698965 - DNA, 25 bp, Homo sapien
tgaaatgggtacaattttgcctccc

SEQ ID NO: 4698966 - DNA, 25 bp, Homo sapien
tctctcgtccgtttgcaatatctga

SEQ ID NO: 4698967 - DNA, 25 bp, Homo sapien
gcaaggaggtaaagctgtcaccaca

SEQ ID NO: 4698968 - DNA, 25 bp, Homo sapien
acacctcattgctttaccccctggg

SEQ ID NO: 4698969 - DNA, 25 bp, Homo sapien
tgtgttcccccagcttggcagatgg

SEQ ID NO: 4698970 - DNA, 25 bp, Homo sapien
gatgggctgcatgcggcgctccctt

SEQ ID NO: 4698971 - DNA, 25 bp, Homo sapien
caggcaggacggcaggggtgagcag

SEQ ID NO: 4698972 - DNA, 25 bp, Homo sapien
gaaagtgagccattcctaggctgag

SEQ ID NO: 4698973 - DNA, 25 bp, Homo sapien
actgggtctcccaaaagccttggtg

SEQ ID NO: 4698974 - DNA, 25 bp, Homo sapien
gccttggacagcgtatcgagcatcc

SEQ ID NO: 4698975 - DNA, 25 bp, Homo sapien
tataacgctgtgagtgtccagtcct

SEQ ID NO: 4698976 - DNA, 25 bp, Homo sapien
aatgtcaccgcctccagttctcgag

SEQ ID NO: 4698977 - DNA, 25 bp, Homo sapien
gttgatcaggacacgagagactctc

SEQ ID NO: 4698978 - DNA, 25 bp, Homo sapien
caaacatggtggagtctcggccttc

SEQ ID NO: 4698979 - DNA, 25 bp, Homo sapien
tatcactgggtattagcaagtcagg

SEQ ID NO: 4698980 - DNA, 25 bp, Homo sapien
gctcggaacggagcatcagggccct

SEQ ID NO: 4698981 - DNA, 25 bp, Homo sapien
agctcggaacggagcatcagggccc

SEQ ID NO: 4698982 - DNA, 25 bp, Homo sapien
aagctcggaacggagcatcagggcc

SEQ ID NO: 4698983 - DNA, 25 bp, Homo sapien
aatgagctctggaaataaatgcagc

SEQ ID NO: 4698984 - DNA, 25 bp, Homo sapien
tgggcctcgggctgataagaagacc

SEQ ID NO: 4698985 - DNA, 25 bp, Homo sapien
tatcccacagcggacaagtactgcc

SEQ ID NO: 4698986 - DNA, 25 bp, Homo sapien
gacaccaggatagtcctcacagaca

SEQ ID NO: 4698987 - DNA, 25 bp, Homo sapien
tccatagaatgagcgctggaggcca

SEQ ID NO: 4698988 - DNA, 25 bp, Homo sapien
taggagccactggtttcactggttt

SEQ ID NO: 4698989 - DNA, 25 bp, Homo sapien
tttcactggtttgggtgacatcttc

SEQ ID NO: 4698990 - DNA, 25 bp, Homo sapien
aaggatcaccatctttaggagccac

SEQ ID NO: 4698991 - DNA, 25 bp, Homo sapien
ggaacacttgcatggcctggaaggt

SEQ ID NO: 4698992 - DNA, 25 bp, Homo sapien
gggaggaacacttgcatggcctgga

SEQ ID NO: 4698993 - DNA, 25 bp, Homo sapien
gaacacttgcatggcctggaaggtc

SEQ ID NO: 4698994 - DNA, 25 bp, Homo sapien
tgggaggaacacttgcatggcctgg

SEQ ID NO: 4698995 - DNA, 25 bp, Homo sapien
ctgaggtcaggagttcgaaaccagc

SEQ ID NO: 4698996 - DNA, 25 bp, Homo sapien
tgggaggctgaggcaggcggatcac

SEQ ID NO: 4698997 - DNA, 25 bp, Homo sapien
gctcacacctgtaatcccagcactt

SEQ ID NO: 4698998 - DNA, 25 bp, Homo sapien
aaacaaaacagggccgggcacagtg

SEQ ID NO: 4698999 - DNA, 25 bp, Homo sapien
tgaagacctaatcatcactcttata

SEQ ID NO: 4699000 - DNA, 25 bp, Homo sapien
tcagatgggcaatatgccaacgtcc

SEQ ID NO: 4699001 - DNA, 25 bp, Homo sapien
gacctaatcatcactcttataaact

SEQ ID NO: 4699002 - DNA, 25 bp, Homo sapien
caatatgccaacgtcctaacatggt

SEQ ID NO: 4699003 - DNA, 25 bp, Homo sapien
ccctccaccagagttaactaggact

SEQ ID NO: 4699004 - DNA, 25 bp, Homo sapien
cctctccttgcagcttaggtacttc

SEQ ID NO: 4699005 - DNA, 25 bp, Homo sapien
tctccttgcagcttaggtacttctt

SEQ ID NO: 4699006 - DNA, 25 bp, Homo sapien
ccagagttaactaggacttatcttt

SEQ ID NO: 4699007 - DNA, 25 bp, Homo sapien
gcctcctgcctacggggcctaagca

SEQ ID NO: 4699008 - DNA, 25 bp, Homo sapien
cctccttcgcctcctgcctacgggg

SEQ ID NO: 4699009 - DNA, 25 bp, Homo sapien
ctgcgtcctcctccttcgcctcctg

SEQ ID NO: 4699010 - DNA, 25 bp, Homo sapien
ttcgcctcctgcctacggggcctaa

SEQ ID NO: 4699011 - DNA, 25 bp, Homo sapien
cacccgtggagaacgcaagacatgt

SEQ ID NO: 4699012 - DNA, 25 bp, Homo sapien
ggaacccgatcgctgttgctaaggg

SEQ ID NO: 4699013 - DNA, 25 bp, Homo sapien
gttgacacgcgagtgtgagccaccc

SEQ ID NO: 4699014 - DNA, 25 bp, Homo sapien
aatgacgcgttctctcgggtggcct

SEQ ID NO: 4699015 - DNA, 25 bp, Homo sapien
taagagctatatcttaccccaaggg

SEQ ID NO: 4699016 - DNA, 25 bp, Homo sapien
gggcattatctgctccttgtatctg

SEQ ID NO: 4699017 - DNA, 25 bp, Homo sapien
gctactcccatattctgtagagttt

SEQ ID NO: 4699018 - DNA, 25 bp, Homo sapien
ttctaacaaggtctggatctctggg

SEQ ID NO: 4699019 - DNA, 25 bp, Homo sapien
ttccacacggtactggcggctacgg

SEQ ID NO: 4699020 - DNA, 25 bp, Homo sapien
gggcgtggcaatcgcgggccgggag

SEQ ID NO: 4699021 - DNA, 25 bp, Homo sapien
ttgagcggggcaacctcgggtctgg

SEQ ID NO: 4699022 - DNA, 25 bp, Homo sapien
gcttccacacggtactggcggctac

SEQ ID NO: 4699023 - DNA, 25 bp, Homo sapien
gcgcaaaagcctccggcgggaaaca

SEQ ID NO: 4699024 - DNA, 25 bp, Homo sapien
gggctctgcgcaaaagcctccggcg

SEQ ID NO: 4699025 - DNA, 25 bp, Homo sapien
gacgcggggctctgcgcaaaagcct

SEQ ID NO: 4699026 - DNA, 25 bp, Homo sapien
ctctgcgcaaaagcctccggcggga

SEQ ID NO: 4699027 - DNA, 25 bp, Homo sapien
gaagcatgctgatatcggctcagtg

SEQ ID NO: 4699028 - DNA, 25 bp, Homo sapien
gacctcaggaaccaggagtaatttg

SEQ ID NO: 4699029 - DNA, 25 bp, Homo sapien
taatttgatatgcagacaatggacc

SEQ ID NO: 4699030 - DNA, 25 bp, Homo sapien
taaccattacaagacctctgggcct

SEQ ID NO: 4699031 - DNA, 25 bp, Homo sapien
ccaatgcaattgagggctccttcag

SEQ ID NO: 4699032 - DNA, 25 bp, Homo sapien
tgcaattgagggctccttcaggaca

SEQ ID NO: 4699033 - DNA, 25 bp, Homo sapien
caatgcaattgagggctccttcagg

SEQ ID NO: 4699034 - DNA, 25 bp, Homo sapien
aattgagggctccttcaggacatcc

SEQ ID NO: 4699035 - DNA, 25 bp, Homo sapien
accaccatgtcatcctaattcaggt

SEQ ID NO: 4699036 - DNA, 25 bp, Homo sapien
ggagcagcctttaccaccaccatgt

SEQ ID NO: 4699037 - DNA, 25 bp, Homo sapien
tcatcctaattcaggtcagttcccc

SEQ ID NO: 4699038 - DNA, 25 bp, Homo sapien
gatattccttcctcaggagcagcct

SEQ ID NO: 4699039 - DNA, 25 bp, Homo sapien
ccccagcccttcaccgtggagccaa

SEQ ID NO: 4699040 - DNA, 25 bp, Homo sapien
gacacagcaggcaaaggtcatgccc

SEQ ID NO: 4699041 - DNA, 25 bp, Homo sapien
ctgtggacacagcaggcaaaggtca

SEQ ID NO: 4699042 - DNA, 25 bp, Homo sapien
gcaggcaaaggtcatgccccaggcc

SEQ ID NO: 4699043 - DNA, 25 bp, Homo sapien
ccagcagaggcaccgcagtccgccc

SEQ ID NO: 4699044 - DNA, 25 bp, Homo sapien
ccgcagtccgccctcacaggggatg

SEQ ID NO: 4699045 - DNA, 25 bp, Homo sapien
aggcaccgcagtccgccctcacagg

SEQ ID NO: 4699046 - DNA, 25 bp, Homo sapien
gcagaggcaccgcagtccgccctca

SEQ ID NO: 4699047 - DNA, 25 bp, Homo sapien
ccaggatggaggtccatgaggctct

SEQ ID NO: 4699048 - DNA, 25 bp, Homo sapien
tctctccaagggaaggtagttcaag

SEQ ID NO: 4699049 - DNA, 25 bp, Homo sapien
gatggaggtccatgaggctctctcc

SEQ ID NO: 4699050 - DNA, 25 bp, Homo sapien
ccaagggaaggtagttcaagagaat

SEQ ID NO: 4699051 - DNA, 25 bp, Homo sapien
gtgagaaggatgattcccaacggtc

SEQ ID NO: 4699052 - DNA, 25 bp, Homo sapien
gacaagtgagaaggatgattcccaa

SEQ ID NO: 4699053 - DNA, 25 bp, Homo sapien
caagtgagaaggatgattcccaacg

SEQ ID NO: 4699054 - DNA, 25 bp, Homo sapien
caggagacaagtgagaaggatgatt

SEQ ID NO: 4699055 - DNA, 25 bp, Homo sapien
tcatttccctcaggaactgggcata

SEQ ID NO: 4699056 - DNA, 25 bp, Homo sapien
atttccctcaggaactgggcataca

SEQ ID NO: 4699057 - DNA, 25 bp, Homo sapien
catttccctcaggaactgggcatac

SEQ ID NO: 4699058 - DNA, 25 bp, Homo sapien
tgtccttgaagtacgtgttccaccg

SEQ ID NO: 4699059 - DNA, 25 bp, Homo sapien
agtacgtgttccaccggctgtcagg

SEQ ID NO: 4699060 - DNA, 25 bp, Homo sapien
cggacatctttgtcgatctgcagca

SEQ ID NO: 4699061 - DNA, 25 bp, Homo sapien
agcacctcgttgtccttgaagtacg

SEQ ID NO: 4699062 - DNA, 25 bp, Homo sapien
agttttcgccatcccatctgccagg

SEQ ID NO: 4699063 - DNA, 25 bp, Homo sapien
ggaaataatcttgttactcaaggtg

SEQ ID NO: 4699064 - DNA, 25 bp, Homo sapien
aaggtggaagttttcgccatcccat

SEQ ID NO: 4699065 - DNA, 25 bp, Homo sapien
acaggaaataatcttgttactcaag

SEQ ID NO: 4699066 - DNA, 25 bp, Homo sapien
aagggtagtcagtggccctctggaa

SEQ ID NO: 4699067 - DNA, 25 bp, Homo sapien
tccgggccaccgtctgagatttcag

SEQ ID NO: 4699068 - DNA, 25 bp, Homo sapien
tacgaagggtttcaaactcattctg

SEQ ID NO: 4699069 - DNA, 25 bp, Homo sapien
gtctgttccactctcttacgaaggg

SEQ ID NO: 4699070 - DNA, 25 bp, Homo sapien
cctcatgacaaaggccccaagtggc

SEQ ID NO: 4699071 - DNA, 25 bp, Homo sapien
actgctgtaaaggattctccccacc

SEQ ID NO: 4699072 - DNA, 25 bp, Homo sapien
cctcttgcctagacaactgcagtgg

SEQ ID NO: 4699073 - DNA, 25 bp, Homo sapien
cacagtgcctaaagcatttccgaca

SEQ ID NO: 4699074 - DNA, 25 bp, Homo sapien
gcttggcgtagatgaacaggatccg

SEQ ID NO: 4699075 - DNA, 25 bp, Homo sapien
cacataagcgatgccagggttgagc

SEQ ID NO: 4699076 - DNA, 25 bp, Homo sapien
tactcatttagggatgatggcacag

SEQ ID NO: 4699077 - DNA, 25 bp, Homo sapien
cccagtgggcctcacagccattggg

SEQ ID NO: 4699078 - DNA, 25 bp, Homo sapien
gagtcatccaggctcttgataaagt

SEQ ID NO: 4699079 - DNA, 25 bp, Homo sapien
tgataaagttgtcccggatctcggc

SEQ ID NO: 4699080 - DNA, 25 bp, Homo sapien
taggtgatgccacactgcgagtcat

SEQ ID NO: 4699081 - DNA, 25 bp, Homo sapien
gaaaaaggtgtctgcctcggcgtgc

SEQ ID NO: 4699082 - DNA, 25 bp, Homo sapien
cagtgtcagccagcggaaggcaaag

SEQ ID NO: 4699083 - DNA, 25 bp, Homo sapien
atgagcatggcgcagcagacgagga

SEQ ID NO: 4699084 - DNA, 25 bp, Homo sapien
caaagcggttgtcatcggcgaagag

SEQ ID NO: 4699085 - DNA, 25 bp, Homo sapien
cggatgacgtcaggcagcaagaact

SEQ ID NO: 4699086 - DNA, 25 bp, Homo sapien
atattcacagtgaagtccccttcca

SEQ ID NO: 4699087 - DNA, 25 bp, Homo sapien
ctgcagcagccgcatattcacagtg

SEQ ID NO: 4699088 - DNA, 25 bp, Homo sapien
cttccagcaactgctcccggatcag

SEQ ID NO: 4699089 - DNA, 25 bp, Homo sapien
gcatattcacagtgaagtccccttc

SEQ ID NO: 4699090 - DNA, 25 bp, Homo sapien
agtcttggagctccttggctttctg

SEQ ID NO: 4699091 - DNA, 25 bp, Homo sapien
tttgagtcttggagctccttggctt

SEQ ID NO: 4699092 - DNA, 25 bp, Homo sapien
gcaggatctggcagacatctgtgat

SEQ ID NO: 4699093 - DNA, 25 bp, Homo sapien
tctgcaggatctggcagacatctgt

SEQ ID NO: 4699094 - DNA, 25 bp, Homo sapien
caggtttctatgtgtcccgggagcc

SEQ ID NO: 4699095 - DNA, 25 bp, Homo sapien
ttctctccggaacatgggcctcttg

SEQ ID NO: 4699096 - DNA, 25 bp, Homo sapien
tcagaaccctctaagtgaggcacgg

SEQ ID NO: 4699097 - DNA, 25 bp, Homo sapien
tgagacagacggcaggactcagctt

SEQ ID NO: 4699098 - DNA, 25 bp, Homo sapien
ggcttccggacgcaaaccttgtaca

SEQ ID NO: 4699099 - DNA, 25 bp, Homo sapien
tccaggcggcatcaaaggaaaagcc

SEQ ID NO: 4699100 - DNA, 25 bp, Homo sapien
aagcaaacgttctgaccctctggag

SEQ ID NO: 4699101 - DNA, 25 bp, Homo sapien
cctggaagccgagggaatgacaact

SEQ ID NO: 4699102 - DNA, 25 bp, Homo sapien
gttgaatgaaagtagagagtgggca

SEQ ID NO: 4699103 - DNA, 25 bp, Homo sapien
tgttgaatgaaagtagagagtgggc

SEQ ID NO: 4699104 - DNA, 25 bp, Homo sapien
gaatgaaagtagagagtgggcatcc

SEQ ID NO: 4699105 - DNA, 25 bp, Homo sapien
tgaatgaaagtagagagtgggcatc

SEQ ID NO: 4699106 - DNA, 25 bp, Homo sapien
gcgcatttaagacgccggtatgagg

SEQ ID NO: 4699107 - DNA, 25 bp, Homo sapien
tgggcctcggaacccagaagggagc

SEQ ID NO: 4699108 - DNA, 25 bp, Homo sapien
ccggcgtcctttctttgcgcattta

SEQ ID NO: 4699109 - DNA, 25 bp, Homo sapien
agcagcagagcccaaccgggtgtcc

SEQ ID NO: 4699110 - DNA, 25 bp, Homo sapien
ggacgatagcgtgacctcccttcca

SEQ ID NO: 4699111 - DNA, 25 bp, Homo sapien
cgtcgcgggatccaacgagggcaca

SEQ ID NO: 4699112 - DNA, 25 bp, Homo sapien
cgacccgcgaggctcttaaaggagc

SEQ ID NO: 4699113 - DNA, 25 bp, Homo sapien
taaaggagccgcgtcgcgggatcca

SEQ ID NO: 4699114 - DNA, 25 bp, Homo sapien
ccagccccgcgcccgacgccagggt

SEQ ID NO: 4699115 - DNA, 25 bp, Homo sapien
cagccccgcgcccgacgccagggtc

SEQ ID NO: 4699116 - DNA, 25 bp, Homo sapien
gccgccgccagccctcgacgaccgc

SEQ ID NO: 4699117 - DNA, 25 bp, Homo sapien
cgccgccagccctcgacgaccgcac

SEQ ID NO: 4699118 - DNA, 25 bp, Homo sapien
ccgccgccagccctcgacgaccgca

SEQ ID NO: 4699119 - DNA, 25 bp, Homo sapien
gcgggtcgtagcacagcacgtacga

SEQ ID NO: 4699120 - DNA, 25 bp, Homo sapien
ggtagaacgtgtcgtccatggcctt

SEQ ID NO: 4699121 - DNA, 25 bp, Homo sapien
gtggtacgcgtgcaccgagtcgtcc

SEQ ID NO: 4699122 - DNA, 25 bp, Homo sapien
tacgactcgcggctcttgagctgcg

SEQ ID NO: 4699123 - DNA, 25 bp, Homo sapien
acgttttggtagctgcgggtcaagc

SEQ ID NO: 4699124 - DNA, 25 bp, Homo sapien
tgcggctatatttctccaggttgtt

SEQ ID NO: 4699125 - DNA, 25 bp, Homo sapien
gctgcgggtcaagctgcggctatat

SEQ ID NO: 4699126 - DNA, 25 bp, Homo sapien
gccctgtgcagacatagacgttttg

SEQ ID NO: 4699127 - DNA, 25 bp, Homo sapien
tgggtcaggcagatctagattcaaa

SEQ ID NO: 4699128 - DNA, 25 bp, Homo sapien
gaactaggtgatgaggcctggactc

SEQ ID NO: 4699129 - DNA, 25 bp, Homo sapien
tagattcaaactcccgagaagggtg

SEQ ID NO: 4699130 - DNA, 25 bp, Homo sapien
tgacatcaaccaagaggtcacaggt

SEQ ID NO: 4699131 - DNA, 25 bp, Homo sapien
ggaggcacctgctaatgaaatttga

SEQ ID NO: 4699132 - DNA, 25 bp, Homo sapien
caacaagtgggcaaggaccatgaca

SEQ ID NO: 4699133 - DNA, 25 bp, Homo sapien
tatgcccaacactgggtcaggcaga

SEQ ID NO: 4699134 - DNA, 25 bp, Homo sapien
cagagtgggcgacaataaacgctgc

SEQ ID NO: 4699135 - DNA, 25 bp, Homo sapien
gcactgccacgtggttcttgccgat

SEQ ID NO: 4699136 - DNA, 25 bp, Homo sapien
ttacgtaggatttcccatcagcctc

SEQ ID NO: 4699137 - DNA, 25 bp, Homo sapien
gtaggtgcggagctcaatttgccca

SEQ ID NO: 4699138 - DNA, 25 bp, Homo sapien
cacgtggttcttgccgatgacctgg

SEQ ID NO: 4699139 - DNA, 25 bp, Homo sapien
ctcatccacaggtgcgttgggcatc

SEQ ID NO: 4699140 - DNA, 25 bp, Homo sapien
caggaagcgctccagtgggatggcc

SEQ ID NO: 4699141 - DNA, 25 bp, Homo sapien
tcatccacaggtgcgttgggcatca

SEQ ID NO: 4699142 - DNA, 25 bp, Homo sapien
aagcgctccagtgggatggcctcat

SEQ ID NO: 4699143 - DNA, 25 bp, Homo sapien
cctgcccgcgccaggatgtttggca

SEQ ID NO: 4699144 - DNA, 25 bp, Homo sapien
ccgccgtgatggccttgaggctgcc

SEQ ID NO: 4699145 - DNA, 25 bp, Homo sapien
gcccgccgtgatggccttgaggctg

SEQ ID NO: 4699146 - DNA, 25 bp, Homo sapien
gcccgcgccaggatgtttggcacaa

SEQ ID NO: 4699147 - DNA, 25 bp, Homo sapien
cccacagtctcactgggctccaccc

SEQ ID NO: 4699148 - DNA, 25 bp, Homo sapien
acccacagtctcactgggctccacc

SEQ ID NO: 4699149 - DNA, 25 bp, Homo sapien
gcctgcacacacccacagtctcact

SEQ ID NO: 4699150 - DNA, 25 bp, Homo sapien
tgcacacacccacagtctcactggg

SEQ ID NO: 4699151 - DNA, 25 bp, Homo sapien
tggcagtatgcaattggttcacggc

SEQ ID NO: 4699152 - DNA, 25 bp, Homo sapien
aagatccgctctcaatgtgggtggc

SEQ ID NO: 4699153 - DNA, 25 bp, Homo sapien
gaattatcccagtggcgtccctggt

SEQ ID NO: 4699154 - DNA, 25 bp, Homo sapien
cagctggactggagtaaggaatacc

SEQ ID NO: 4699155 - DNA, 25 bp, Homo sapien
cttttgtttgtccctcactgcacca

SEQ ID NO: 4699156 - DNA, 25 bp, Homo sapien
tccttttgtttgtccctcactgcac

SEQ ID NO: 4699157 - DNA, 25 bp, Homo sapien
ccttttgtttgtccctcactgcacc

SEQ ID NO: 4699158 - DNA, 25 bp, Homo sapien
gagcatctactccatatgcgccaga

SEQ ID NO: 4699159 - DNA, 25 bp, Homo sapien
caaaggatcagcaggagttacccag

SEQ ID NO: 4699160 - DNA, 25 bp, Homo sapien
gagagagtacatggcatctggagaa

SEQ ID NO: 4699161 - DNA, 25 bp, Homo sapien
tgatcactacgacacgggtttcggg

SEQ ID NO: 4699162 - DNA, 25 bp, Homo sapien
ctatctgcgcgtcggctgtcggtgc

SEQ ID NO: 4699163 - DNA, 25 bp, Homo sapien
tggcccgcgtctgcctgtgcaggat

SEQ ID NO: 4699164 - DNA, 25 bp, Homo sapien
tggcattccttttgctccatggacg

SEQ ID NO: 4699165 - DNA, 25 bp, Homo sapien
cccaaggatggctctgctatctgcg

SEQ ID NO: 4699166 - DNA, 25 bp, Homo sapien
aaatcagaaatgacccacatgttca

SEQ ID NO: 4699167 - DNA, 25 bp, Homo sapien
taatgattgtatctagggagggaag

SEQ ID NO: 4699168 - DNA, 25 bp, Homo sapien
ccaagtataccgaagatacaaaagc

SEQ ID NO: 4699169 - DNA, 25 bp, Homo sapien
tctacaaggtgtatacccaagtata

SEQ ID NO: 4699170 - DNA, 25 bp, Homo sapien
taaatgcctgtgtcaaatgtgtctg

SEQ ID NO: 4699171 - DNA, 25 bp, Homo sapien
ggtgcccagatgatgggccaccttt

SEQ ID NO: 4699172 - DNA, 25 bp, Homo sapien
tgtctctcttaggagaggaacaggg

SEQ ID NO: 4699173 - DNA, 25 bp, Homo sapien
atgcctgtgtcaaatgtgtctgtct

SEQ ID NO: 4699174 - DNA, 25 bp, Homo sapien
ttggtgacccacttacaaggcaggc

SEQ ID NO: 4699175 - DNA, 25 bp, Homo sapien
gataccctgctcgatccgtgacttg

SEQ ID NO: 4699176 - DNA, 25 bp, Homo sapien
cacgtagttgtactggtgccggtcc

SEQ ID NO: 4699177 - DNA, 25 bp, Homo sapien
aaagtagcggagctctgtcaccgga

SEQ ID NO: 4699178 - DNA, 25 bp, Homo sapien
caggctctcaatgtccacggtgcag

SEQ ID NO: 4699179 - DNA, 25 bp, Homo sapien
ttcaggctatagatccacagcggga

SEQ ID NO: 4699180 - DNA, 25 bp, Homo sapien
tcggtgaacttgatgtgcagcgccc

SEQ ID NO: 4699181 - DNA, 25 bp, Homo sapien
aacgagtacttcttgagggagcgcc

SEQ ID NO: 4699182 - DNA, 25 bp, Homo sapien
ctcacctgatggctaatcgtggtct

SEQ ID NO: 4699183 - DNA, 25 bp, Homo sapien
cccgtggcctcacctgatggctaat

SEQ ID NO: 4699184 - DNA, 25 bp, Homo sapien
aggccccgtggcctcacctgatggc

SEQ ID NO: 4699185 - DNA, 25 bp, Homo sapien
tggcctcacctgatggctaatcgtg

SEQ ID NO: 4699186 - DNA, 25 bp, Homo sapien
gacacatgcagtggtcagggacagt

SEQ ID NO: 4699187 - DNA, 25 bp, Homo sapien
tgaccaactgcaggaaagccgctgt

SEQ ID NO: 4699188 - DNA, 25 bp, Homo sapien
tctgctggattgtcggattgtcgcc

SEQ ID NO: 4699189 - DNA, 25 bp, Homo sapien
cagagacttcagtgggtccccatcg

SEQ ID NO: 4699190 - DNA, 25 bp, Homo sapien
ggttgccccgcagctcgatctgcgt

SEQ ID NO: 4699191 - DNA, 25 bp, Homo sapien
cccgcagcttccggcactggaagag

SEQ ID NO: 4699192 - DNA, 25 bp, Homo sapien
ggttggtcagctcgcccaccctgga

SEQ ID NO: 4699193 - DNA, 25 bp, Homo sapien
gccgctgcgcttgagcagtgggcac

SEQ ID NO: 4699194 - DNA, 25 bp, Homo sapien
ggcctgctccttgtcagccctccac

SEQ ID NO: 4699195 - DNA, 25 bp, Homo sapien
ctgctccttgtcagccctccacagc

SEQ ID NO: 4699196 - DNA, 25 bp, Homo sapien
ttgtcagccctccacagccgctcct

SEQ ID NO: 4699197 - DNA, 25 bp, Homo sapien
ccttgtcagccctccacagccgctc

SEQ ID NO: 4699198 - DNA, 25 bp, Homo sapien
actgggcagcggtcctgctgcttgc

SEQ ID NO: 4699199 - DNA, 25 bp, Homo sapien
gcttgctgtgctgggccggcctcgc

SEQ ID NO: 4699200 - DNA, 25 bp, Homo sapien
tgaggactgggcagcggtcctgctg

SEQ ID NO: 4699201 - DNA, 25 bp, Homo sapien
ctgcttgctgtgctgggccggcctc

SEQ ID NO: 4699202 - DNA, 25 bp, Homo sapien
tgactcacaagcggccccaggctcc

SEQ ID NO: 4699203 - DNA, 25 bp, Homo sapien
ctgactcacaagcggccccaggctc

SEQ ID NO: 4699204 - DNA, 25 bp, Homo sapien
ggctgtccgggagttctgggagaag

SEQ ID NO: 4699205 - DNA, 25 bp, Homo sapien
ctggctgtccgggagttctgggaga

SEQ ID NO: 4699206 - DNA, 25 bp, Homo sapien
gggaggagaccctgattatccaaat

SEQ ID NO: 4699207 - DNA, 25 bp, Homo sapien
ccaagaactaaagtgagggtcccag

SEQ ID NO: 4699208 - DNA, 25 bp, Homo sapien
ccatctgggctgaactttcttggga

SEQ ID NO: 4699209 - DNA, 25 bp, Homo sapien
aaatactgcgctcttgagacttgct

SEQ ID NO: 4699210 - DNA, 25 bp, Homo sapien
tgctgaagtccaggtgggtgttaaa

SEQ ID NO: 4699211 - DNA, 25 bp, Homo sapien
tgggtgttaaatgcccggcggcatc

SEQ ID NO: 4699212 - DNA, 25 bp, Homo sapien
tcgccccggaccactctgctgaagt

SEQ ID NO: 4699213 - DNA, 25 bp, Homo sapien
ggtgaccgtcccatggctggttcgc

SEQ ID NO: 4699214 - DNA, 25 bp, Homo sapien
ccttaacactgtgcgtggagaggca

SEQ ID NO: 4699215 - DNA, 25 bp, Homo sapien
tgcgaatggagcaccgttcatccgg

SEQ ID NO: 4699216 - DNA, 25 bp, Homo sapien
tggccgacagccacagaaatgagtg

SEQ ID NO: 4699217 - DNA, 25 bp, Homo sapien
tgagtgcctgccaagacacatggag

SEQ ID NO: 4699218 - DNA, 25 bp, Homo sapien
gaaaacacaaatggacggacagacg

SEQ ID NO: 4699219 - DNA, 25 bp, Homo sapien
gattatatccaatgacacgacgcag

SEQ ID NO: 4699220 - DNA, 25 bp, Homo sapien
tgtccacgtgattgatctaaggcgg

SEQ ID NO: 4699221 - DNA, 25 bp, Homo sapien
caagttcagacccacatgtaacgga

SEQ ID NO: 4699222 - DNA, 25 bp, Homo sapien
gagaataacacttgcacaccaccac

SEQ ID NO: 4699223 - DNA, 25 bp, Homo sapien
gaaaaaccggctgctgccttcccca

SEQ ID NO: 4699224 - DNA, 25 bp, Homo sapien
agggccactcgctggctctgaaaaa

SEQ ID NO: 4699225 - DNA, 25 bp, Homo sapien
caagagccttggcctcgagtcaagt

SEQ ID NO: 4699226 - DNA, 25 bp, Homo sapien
cgagattgggccactgcactagagc

SEQ ID NO: 4699227 - DNA, 25 bp, Homo sapien
tgggcgacagagcgagactcggtct

SEQ ID NO: 4699228 - DNA, 25 bp, Homo sapien
ccgagattgggccactgcactagag

SEQ ID NO: 4699229 - DNA, 25 bp, Homo sapien
gagattgggccactgcactagagcc

SEQ ID NO: 4699230 - DNA, 25 bp, Homo sapien
tctcaagtcgggctggcacagtgga

SEQ ID NO: 4699231 - DNA, 25 bp, Homo sapien
cggtcctgggaggattatggaaggg

SEQ ID NO: 4699232 - DNA, 25 bp, Homo sapien
cgatctgaaaccctctcggtcctgg

SEQ ID NO: 4699233 - DNA, 25 bp, Homo sapien
tagaatgggatgcagggttggtctg

SEQ ID NO: 4699234 - DNA, 25 bp, Homo sapien
tctgggggatgtgcggcacccccct

SEQ ID NO: 4699235 - DNA, 25 bp, Homo sapien
aggcgccgccattccctgtgactct

SEQ ID NO: 4699236 - DNA, 25 bp, Homo sapien
caggtgccgggaaattatgctgtga

SEQ ID NO: 4699237 - DNA, 25 bp, Homo sapien
ctgtgactctgaggaacgcctgcct

SEQ ID NO: 4699238 - DNA, 25 bp, Homo sapien
gactctgaggaacgcctgcctctct

SEQ ID NO: 4699239 - DNA, 25 bp, Homo sapien
ctgggcggcttctaagcgcggcctc

SEQ ID NO: 4699240 - DNA, 25 bp, Homo sapien
cactgggcggcttctaagcgcggcc

SEQ ID NO: 4699241 - DNA, 25 bp, Homo sapien
ggcactgggcggcttctaagcgcgg

SEQ ID NO: 4699242 - DNA, 25 bp, Homo sapien
agggcactgggcggcttctaagcgc

SEQ ID NO: 4699243 - DNA, 25 bp, Homo sapien
cttctggagctgcgaggggctcagg

SEQ ID NO: 4699244 - DNA, 25 bp, Homo sapien
ggagctgcgaggggctcaggcaggc

SEQ ID NO: 4699245 - DNA, 25 bp, Homo sapien
ctggagctgcgaggggctcaggcag

SEQ ID NO: 4699246 - DNA, 25 bp, Homo sapien
gctgcgaggggctcaggcaggccat

SEQ ID NO: 4699247 - DNA, 25 bp, Homo sapien
gagtctggcacccagcaaagagcaa

SEQ ID NO: 4699248 - DNA, 25 bp, Homo sapien
tcaaccttgcagctgtgtgaaggtg

SEQ ID NO: 4699249 - DNA, 25 bp, Homo sapien
ccaaccccaggcatggagtctggca

SEQ ID NO: 4699250 - DNA, 25 bp, Homo sapien
cccagtctgcaaatgctcctgtctg

SEQ ID NO: 4699251 - DNA, 25 bp, Homo sapien
ggagaattctgtgcggcagtggaga

SEQ ID NO: 4699252 - DNA, 25 bp, Homo sapien
actatctcgccaatcctttgttgca

SEQ ID NO: 4699253 - DNA, 25 bp, Homo sapien
cagacaagaatccttccagcaccag

SEQ ID NO: 4699254 - DNA, 25 bp, Homo sapien
ggaacatccatttcagccactatct

SEQ ID NO: 4699255 - DNA, 25 bp, Homo sapien
aaacgcctttctcaaagaagaatcg

SEQ ID NO: 4699256 - DNA, 25 bp, Homo sapien
gcctttctcaaagaagaatcgaatc

SEQ ID NO: 4699257 - DNA, 25 bp, Homo sapien
gaagaatcgaatcttgtcaccactg

SEQ ID NO: 4699258 - DNA, 25 bp, Homo sapien
tctcaaagaagaatcgaatcttgtc

SEQ ID NO: 4699259 - DNA, 25 bp, Homo sapien
caattttgttgatggatttctccgg

SEQ ID NO: 4699260 - DNA, 25 bp, Homo sapien
ccaattttgttgatggatttctccg

SEQ ID NO: 4699261 - DNA, 25 bp, Homo sapien
tggatttctccggagggaccaggaa

SEQ ID NO: 4699262 - DNA, 25 bp, Homo sapien
tgttgatggatttctccggagggac

SEQ ID NO: 4699263 - DNA, 25 bp, Homo sapien
tgctcttgaagacggggtcgtgggc

SEQ ID NO: 4699264 - DNA, 25 bp, Homo sapien
aagacggggtcgtgggcgtgcagag

SEQ ID NO: 4699265 - DNA, 25 bp, Homo sapien
tgaagacggggtcgtgggcgtgcag

SEQ ID NO: 4699266 - DNA, 25 bp, Homo sapien
tgtgtgatgctcttgaagacggggt

SEQ ID NO: 4699267 - DNA, 25 bp, Homo sapien
aaagatgtacatgctctgcaccacc

SEQ ID NO: 4699268 - DNA, 25 bp, Homo sapien
cttaaagatgtacatgctctgcacc

SEQ ID NO: 4699269 - DNA, 25 bp, Homo sapien
ttaaagatgtacatgctctgcacca

SEQ ID NO: 4699270 - DNA, 25 bp, Homo sapien
taaagatgtacatgctctgcaccac

SEQ ID NO: 4699271 - DNA, 25 bp, Homo sapien
ctgtcttagatgtcccacccatggc

SEQ ID NO: 4699272 - DNA, 25 bp, Homo sapien
acagacaggagcaagcgctttccct

SEQ ID NO: 4699273 - DNA, 25 bp, Homo sapien
tgtcttagatgtcccacccatggcc

SEQ ID NO: 4699274 - DNA, 25 bp, Homo sapien
tttccctccttctgaagatctgaga

SEQ ID NO: 4699275 - DNA, 25 bp, Homo sapien
gaaaagtgcttagggcccaacaatg

SEQ ID NO: 4699276 - DNA, 25 bp, Homo sapien
ccagatggttcacccagtggcctaa

SEQ ID NO: 4699277 - DNA, 25 bp, Homo sapien
taaggcaagcgatttcacctctcaa

SEQ ID NO: 4699278 - DNA, 25 bp, Homo sapien
tcctaaaccgtgaagtggctccaac

SEQ ID NO: 4699279 - DNA, 25 bp, Homo sapien
atgaaccagagacagccgttctcca

SEQ ID NO: 4699280 - DNA, 25 bp, Homo sapien
gcgtggcatcctccactgcgatcca

SEQ ID NO: 4699281 - DNA, 25 bp, Homo sapien
agacagccgttctccagcgtggcat

SEQ ID NO: 4699282 - DNA, 25 bp, Homo sapien
caggggctccgtgtacaggaaggag

SEQ ID NO: 4699283 - DNA, 25 bp, Homo sapien
ctgcaggccaagatggagagcctta

SEQ ID NO: 4699284 - DNA, 25 bp, Homo sapien
actcctcctttctcaaggtccctct

SEQ ID NO: 4699285 - DNA, 25 bp, Homo sapien
caggccaagatggagagccttaaac

SEQ ID NO: 4699286 - DNA, 25 bp, Homo sapien
tgcaggccaagatggagagccttaa

SEQ ID NO: 4699287 - DNA, 25 bp, Homo sapien
acaggggcccggaccatccttcttg

SEQ ID NO: 4699288 - DNA, 25 bp, Homo sapien
aagaggctgttatcccgggctggct

SEQ ID NO: 4699289 - DNA, 25 bp, Homo sapien
gaagctggtaccaggcgctgagcca

SEQ ID NO: 4699290 - DNA, 25 bp, Homo sapien
gctctgacccaaggaagctggtacc

SEQ ID NO: 4699291 - DNA, 25 bp, Homo sapien
gcgcgagcggtcagagaggttctgc

SEQ ID NO: 4699292 - DNA, 25 bp, Homo sapien
tgctcttgtgtaccacttctccatg

SEQ ID NO: 4699293 - DNA, 25 bp, Homo sapien
gcttgctcttgtgtaccacttctcc

SEQ ID NO: 4699294 - DNA, 25 bp, Homo sapien
tccatgaggtggaaagtgtaggcct

SEQ ID NO: 4699295 - DNA, 25 bp, Homo sapien
tagaggagaaacaaccttgaggtgc

SEQ ID NO: 4699296 - DNA, 25 bp, Homo sapien
aacaaccttgaggtgcagggtcact

SEQ ID NO: 4699297 - DNA, 25 bp, Homo sapien
ggtgcagggtcactgttcccagcct

SEQ ID NO: 4699298 - DNA, 25 bp, Homo sapien
ccaggggactgtcgggcacacacac

SEQ ID NO: 4699299 - DNA, 25 bp, Homo sapien
aggtgtacagttggggaaagggcag

SEQ ID NO: 4699300 - DNA, 25 bp, Homo sapien
taggtgtacagttggggaaagggca

SEQ ID NO: 4699301 - DNA, 25 bp, Homo sapien
ggggaaagggcagttcagctgttgg

SEQ ID NO: 4699302 - DNA, 25 bp, Homo sapien
gaaagggcagttcagctgttggctg

SEQ ID NO: 4699303 - DNA, 25 bp, Homo sapien
cgagggctcctgccctgcgagagcc

SEQ ID NO: 4699304 - DNA, 25 bp, Homo sapien
ctgaagtcgtttttattcgataact

SEQ ID NO: 4699305 - DNA, 25 bp, Homo sapien
gacaagacctccctgttgcaaccag

SEQ ID NO: 4699306 - DNA, 25 bp, Homo sapien
ataactaacaccataataaccagag

SEQ ID NO: 4699307 - DNA, 25 bp, Homo sapien
ggccagaaccctttggtggctgaga

SEQ ID NO: 4699308 - DNA, 25 bp, Homo sapien
ttctggatgaacgagacagtggacc

SEQ ID NO: 4699309 - DNA, 25 bp, Homo sapien
tatgtagccgccactgtatgcctgg

SEQ ID NO: 4699310 - DNA, 25 bp, Homo sapien
aagcctttgggtcacactctacgga

SEQ ID NO: 4699311 - DNA, 25 bp, Homo sapien
gaatgccaagcggtcatcttccgag

SEQ ID NO: 4699312 - DNA, 25 bp, Homo sapien
tctagagatatgacccgagagtgcc

SEQ ID NO: 4699313 - DNA, 25 bp, Homo sapien
gactagtcatgaaggagcggtgcca

SEQ ID NO: 4699314 - DNA, 25 bp, Homo sapien
tccaatacaagtgggaccggctgct

SEQ ID NO: 4699315 - DNA, 25 bp, Homo sapien
ttctcatcagtgttggcgctcggca

SEQ ID NO: 4699316 - DNA, 25 bp, Homo sapien
ctcacacacggcccgccggcggccg

SEQ ID NO: 4699317 - DNA, 25 bp, Homo sapien
cacacggcccgccggcggccgccgc

SEQ ID NO: 4699318 - DNA, 25 bp, Homo sapien
tcacacacggcccgccggcggccgc

SEQ ID NO: 4699319 - DNA, 25 bp, Homo sapien
cggcccgccggcggccgccgccatc

SEQ ID NO: 4699320 - DNA, 25 bp, Homo sapien
catagccattttgtctgctctctaa

SEQ ID NO: 4699321 - DNA, 25 bp, Homo sapien
atataataatattgttagggccggg

SEQ ID NO: 4699322 - DNA, 25 bp, Homo sapien
aacttgtacactgcctcatagccat

SEQ ID NO: 4699323 - DNA, 25 bp, Homo sapien
aatctcaatatacaaaacgatttgt

SEQ ID NO: 4699324 - DNA, 25 bp, Homo sapien
acagaggtaattttgctctttctga

SEQ ID NO: 4699325 - DNA, 25 bp, Homo sapien
tgcaaaatgagagaacagaggtaat

SEQ ID NO: 4699326 - DNA, 25 bp, Homo sapien
aggtaattttgctctttctgatcat

SEQ ID NO: 4699327 - DNA, 25 bp, Homo sapien
ctgcaaaatgagagaacagaggtaa

SEQ ID NO: 4699328 - DNA, 25 bp, Homo sapien
gaatagtccacagttctctactgct

SEQ ID NO: 4699329 - DNA, 25 bp, Homo sapien
agcagaatagtccacagttctctac

SEQ ID NO: 4699330 - DNA, 25 bp, Homo sapien
gaccttccaagcagaatagtccaca

SEQ ID NO: 4699331 - DNA, 25 bp, Homo sapien
gctgaccttccaagcagaatagtcc

SEQ ID NO: 4699332 - DNA, 25 bp, Homo sapien
caatcgccgccaatgtttattcagt

SEQ ID NO: 4699333 - DNA, 25 bp, Homo sapien
ttgtagtaagaaagcccctctaaca

SEQ ID NO: 4699334 - DNA, 25 bp, Homo sapien
aacaatcgccgccaatgtttattca

SEQ ID NO: 4699335 - DNA, 25 bp, Homo sapien
aagaaagcccctctaacaatcgccg

SEQ ID NO: 4699336 - DNA, 25 bp, Homo sapien
aaccagacacccggaactgccatac

SEQ ID NO: 4699337 - DNA, 25 bp, Homo sapien
taaccagacacccggaactgccata

SEQ ID NO: 4699338 - DNA, 25 bp, Homo sapien
aaaacttgctgattcttaaacccag

SEQ ID NO: 4699339 - DNA, 25 bp, Homo sapien
cagttccttcaatggtgaagctaca

SEQ ID NO: 4699340 - DNA, 25 bp, Homo sapien
gctgattcttaaacccagttccttc

SEQ ID NO: 4699341 - DNA, 25 bp, Homo sapien
tggtgaagctacatctttattagct

SEQ ID NO: 4699342 - DNA, 25 bp, Homo sapien
ttactgagtcccgagtacccctgta

SEQ ID NO: 4699343 - DNA, 25 bp, Homo sapien
taactgcacactctgttcttcatca

SEQ ID NO: 4699344 - DNA, 25 bp, Homo sapien
ctgtagtcctcttgcaggtaacact

SEQ ID NO: 4699345 - DNA, 25 bp, Homo sapien
cactggagtaactgcacactctgtt

SEQ ID NO: 4699346 - DNA, 25 bp, Homo sapien
ttcaggattaaggcctggctctgcc

SEQ ID NO: 4699347 - DNA, 25 bp, Homo sapien
catcttggaagtaagtgagaaggtg

SEQ ID NO: 4699348 - DNA, 25 bp, Homo sapien
caacgaagaatacaggttctttctt

SEQ ID NO: 4699349 - DNA, 25 bp, Homo sapien
gagaaggtgtaagacacaacgaaga

SEQ ID NO: 4699350 - DNA, 25 bp, Homo sapien
gacacaacgaagaatacaggttctt

SEQ ID NO: 4699351 - DNA, 25 bp, Homo sapien
aaagctcttcgaactgctgtctgta

SEQ ID NO: 4699352 - DNA, 25 bp, Homo sapien
tcagttttataaagctcttcgaact

SEQ ID NO: 4699353 - DNA, 25 bp, Homo sapien
ttccttctccaatttatcaacacag

SEQ ID NO: 4699354 - DNA, 25 bp, Homo sapien
tatcaacacagtctgcatattcaac

SEQ ID NO: 4699355 - DNA, 25 bp, Homo sapien
gagtacacccagagtacacccacag

SEQ ID NO: 4699356 - DNA, 25 bp, Homo sapien
cagccaaccaatgtatcttttcttt

SEQ ID NO: 4699357 - DNA, 25 bp, Homo sapien
acacccagagtacacccacagctca

SEQ ID NO: 4699358 - DNA, 25 bp, Homo sapien
cagagtacacccagagtacacccac

SEQ ID NO: 4699359 - DNA, 25 bp, Homo sapien
gactgttcccgaaggcactgaacaa

SEQ ID NO: 4699360 - DNA, 25 bp, Homo sapien
aacaaaccagcgagacacttggcgc

SEQ ID NO: 4699361 - DNA, 25 bp, Homo sapien
agcatggactgttcccgaaggcact

SEQ ID NO: 4699362 - DNA, 25 bp, Homo sapien
aaccagcgagacacttggcgctctg

SEQ ID NO: 4699363 - DNA, 25 bp, Homo sapien
gcctattggtctgcctactaccaaa

SEQ ID NO: 4699364 - DNA, 25 bp, Homo sapien
gtctgcctactaccaaatccttgct

SEQ ID NO: 4699365 - DNA, 25 bp, Homo sapien
tccaccaggtgcctattggtctgcc

SEQ ID NO: 4699366 - DNA, 25 bp, Homo sapien
caggtgcctattggtctgcctacta

SEQ ID NO: 4699367 - DNA, 25 bp, Homo sapien
catccaaagcacacttatgcaagga

SEQ ID NO: 4699368 - DNA, 25 bp, Homo sapien
aaagcacacttatgcaaggactcga

SEQ ID NO: 4699369 - DNA, 25 bp, Homo sapien
aactgatgcagttctcttctgtcat

SEQ ID NO: 4699370 - DNA, 25 bp, Homo sapien
cacttatgcaaggactcgatatcca

SEQ ID NO: 4699371 - DNA, 25 bp, Homo sapien
ttcagagtgtgacggaggagagccc

SEQ ID NO: 4699372 - DNA, 25 bp, Homo sapien
tggagcaatcgggtcaagtactgaa

SEQ ID NO: 4699373 - DNA, 25 bp, Homo sapien
tggctgtgccacctatcttccggac

SEQ ID NO: 4699374 - DNA, 25 bp, Homo sapien
gatgtggaatgtccccaaaggtcaa

SEQ ID NO: 4699375 - DNA, 25 bp, Homo sapien
caacgaggtcagaacgaaagagagc

SEQ ID NO: 4699376 - DNA, 25 bp, Homo sapien
gagagcagtccatagacacacatgc

SEQ ID NO: 4699377 - DNA, 25 bp, Homo sapien
ggtcagaacgaaagagagcagtcca

SEQ ID NO: 4699378 - DNA, 25 bp, Homo sapien
ggtgtgcagctccaacgaggtcaga

SEQ ID NO: 4699379 - DNA, 25 bp, Homo sapien
tgttccccagaacagttccggaaga

SEQ ID NO: 4699380 - DNA, 25 bp, Homo sapien
cttcacatgctgtatcaattatatc

SEQ ID NO: 4699381 - DNA, 25 bp, Homo sapien
agaagggtcggccaatacttcacat

SEQ ID NO: 4699382 - DNA, 25 bp, Homo sapien
ccccagaacagttccggaagagaag

SEQ ID NO: 4699383 - DNA, 25 bp, Homo sapien
gacttccctgataccagggctcgga

SEQ ID NO: 4699384 - DNA, 25 bp, Homo sapien
cttccctgataccagggctcggagc

SEQ ID NO: 4699385 - DNA, 25 bp, Homo sapien
acttccctgataccagggctcggag

SEQ ID NO: 4699386 - DNA, 25 bp, Homo sapien
ccacacacactgtccagaatgatcc

SEQ ID NO: 4699387 - DNA, 25 bp, Homo sapien
gaaagacatcttatccaagaagcta

SEQ ID NO: 4699388 - DNA, 25 bp, Homo sapien
aagagttccatcttcatgggagatc

SEQ ID NO: 4699389 - DNA, 25 bp, Homo sapien
ccatcttcatgggagatcacatcat

SEQ ID NO: 4699390 - DNA, 25 bp, Homo sapien
cacatcatgaggcttgtgtttataa

SEQ ID NO: 4699391 - DNA, 25 bp, Homo sapien
taggagtattcccagcgtaccaggt

SEQ ID NO: 4699392 - DNA, 25 bp, Homo sapien
gagggtccagctgctataggagtat

SEQ ID NO: 4699393 - DNA, 25 bp, Homo sapien
gcaacatttcaatctcgcaggtaaa

SEQ ID NO: 4699394 - DNA, 25 bp, Homo sapien
cagtgccttgaggtatgcgaaggtt

SEQ ID NO: 4699395 - DNA, 25 bp, Homo sapien
tctgtactgatgaccttatggacga

SEQ ID NO: 4699396 - DNA, 25 bp, Homo sapien
cagtctgctatcgacaggtctgtac

SEQ ID NO: 4699397 - DNA, 25 bp, Homo sapien
caatgatgggtttgactcgctggca

SEQ ID NO: 4699398 - DNA, 25 bp, Homo sapien
tgcagcagcatgtagatgcgagatg

SEQ ID NO: 4699399 - DNA, 25 bp, Homo sapien
gcagttgacacaagaagcaatgaca

SEQ ID NO: 4699400 - DNA, 25 bp, Homo sapien
tgacacaagaagcaatgacatccac

SEQ ID NO: 4699401 - DNA, 25 bp, Homo sapien
caggtggggagatcactgtcgttaa

SEQ ID NO: 4699402 - DNA, 25 bp, Homo sapien
ccacaggtggggagatcactgtcgt

SEQ ID NO: 4699403 - DNA, 25 bp, Homo sapien
cctgtgtgacgaagatcagtccaga

SEQ ID NO: 4699404 - DNA, 25 bp, Homo sapien
ctgtgtgacgaagatcagtccagac

SEQ ID NO: 4699405 - DNA, 25 bp, Homo sapien
aacctgtgtgacgaagatcagtcca

SEQ ID NO: 4699406 - DNA, 25 bp, Homo sapien
acctgtgtgacgaagatcagtccag

SEQ ID NO: 4699407 - DNA, 25 bp, Homo sapien
atagtaaccccatactcgccctgag

SEQ ID NO: 4699408 - DNA, 25 bp, Homo sapien
caagggtggtgatcaagcgcagaaa

SEQ ID NO: 4699409 - DNA, 25 bp, Homo sapien
ggtttccgtaccctccagcattcat

SEQ ID NO: 4699410 - DNA, 25 bp, Homo sapien
gaaaggcaatagtaaccccatactc

SEQ ID NO: 4699411 - DNA, 25 bp, Homo sapien
caagatgactattctgcctacagac

SEQ ID NO: 4699412 - DNA, 25 bp, Homo sapien
cataattaagcacctaatagagtac

SEQ ID NO: 4699413 - DNA, 25 bp, Homo sapien
cagagtcatctgacaagactggacc

SEQ ID NO: 4699414 - DNA, 25 bp, Homo sapien
agacaagaagattacagcaccaggg

SEQ ID NO: 4699415 - DNA, 25 bp, Homo sapien
tatggtagctgggaagcatctcctt

SEQ ID NO: 4699416 - DNA, 25 bp, Homo sapien
ttggctctgggtactaccaagttgc

SEQ ID NO: 4699417 - DNA, 25 bp, Homo sapien
cttcagcacaaacattacacagggt

SEQ ID NO: 4699418 - DNA, 25 bp, Homo sapien
cactccatgagagttgtagcgccac

SEQ ID NO: 4699419 - DNA, 25 bp, Homo sapien
caggttcagtatcgcatgaatcagc

SEQ ID NO: 4699420 - DNA, 25 bp, Homo sapien
tgcaggtctgtctcgtggcacaggt

SEQ ID NO: 4699421 - DNA, 25 bp, Homo sapien
tcgcatgaatcagctccaagatcag

SEQ ID NO: 4699422 - DNA, 25 bp, Homo sapien
gtctcgtggcacaggttcagtatcg

SEQ ID NO: 4699423 - DNA, 25 bp, Homo sapien
gcagccatcaccatgtcaatggtgt

SEQ ID NO: 4699424 - DNA, 25 bp, Homo sapien
tggtgtccacgccaatgcccatgat

SEQ ID NO: 4699425 - DNA, 25 bp, Homo sapien
aatgcccatgatattgataactgtc

SEQ ID NO: 4699426 - DNA, 25 bp, Homo sapien
accatgtcaatggtgtccacgccaa

SEQ ID NO: 4699427 - DNA, 25 bp, Homo sapien
gattccaacaataatcccagagttc

SEQ ID NO: 4699428 - DNA, 25 bp, Homo sapien
caacagcttctgttagaggccccag

SEQ ID NO: 4699429 - DNA, 25 bp, Homo sapien
gacttcattcgcaatatatgtgctc

SEQ ID NO: 4699430 - DNA, 25 bp, Homo sapien
ggaaaccaaagatgattcagacagt

SEQ ID NO: 4699431 - DNA, 25 bp, Homo sapien
cagtttcactgtcttgatcagcagc

SEQ ID NO: 4699432 - DNA, 25 bp, Homo sapien
ggacaccacattagaaggaggtttc

SEQ ID NO: 4699433 - DNA, 25 bp, Homo sapien
taacattgttggtgacggagaatgc

SEQ ID NO: 4699434 - DNA, 25 bp, Homo sapien
ggtttcagccgaataacattgttgg

SEQ ID NO: 4699435 - DNA, 25 bp, Homo sapien
aacagcaatgaggttgtttccatga

SEQ ID NO: 4699436 - DNA, 25 bp, Homo sapien
gcaatgaggttgtttccatgagcac

SEQ ID NO: 4699437 - DNA, 25 bp, Homo sapien
cagcaatgaggttgtttccatgagc

SEQ ID NO: 4699438 - DNA, 25 bp, Homo sapien
ctagaacagcaatgaggttgtttcc

SEQ ID NO: 4699439 - DNA, 25 bp, Homo sapien
cgtggccagacgtttcagcagctga

SEQ ID NO: 4699440 - DNA, 25 bp, Homo sapien
agctgaatggcaagacgtggcaaag

SEQ ID NO: 4699441 - DNA, 25 bp, Homo sapien
tggccagacgtttcagcagctgaat

SEQ ID NO: 4699442 - DNA, 25 bp, Homo sapien
gcaagacgtggcaaagcagggtcat

SEQ ID NO: 4699443 - DNA, 25 bp, Homo sapien
cagaaacagttcgatgaggcctggc

SEQ ID NO: 4699444 - DNA, 25 bp, Homo sapien
tctgcaatcgggtcaggaaggcatc

SEQ ID NO: 4699445 - DNA, 25 bp, Homo sapien
ggctgggtctctactgcaacagtga

SEQ ID NO: 4699446 - DNA, 25 bp, Homo sapien
ggcatcacgaatggcagccgcatca

SEQ ID NO: 4699447 - DNA, 25 bp, Homo sapien
aggcaatggcggcacgatgcagcag

SEQ ID NO: 4699448 - DNA, 25 bp, Homo sapien
tcttgctgttgggaatcaatcagct

SEQ ID NO: 4699449 - DNA, 25 bp, Homo sapien
gggtgggcaccagtatcgatcttgc

SEQ ID NO: 4699450 - DNA, 25 bp, Homo sapien
tggcactgtccctccgatcctgcca

SEQ ID NO: 4699451 - DNA, 25 bp, Homo sapien
tcagagggaggagaaagggttccaa

SEQ ID NO: 4699452 - DNA, 25 bp, Homo sapien
agaaagggttccaaacagcggactg

SEQ ID NO: 4699453 - DNA, 25 bp, Homo sapien
atgtttcagagggaggagaaagggt

SEQ ID NO: 4699454 - DNA, 25 bp, Homo sapien
ctctgatgtttcagagggaggagaa

SEQ ID NO: 4699455 - DNA, 25 bp, Homo sapien
ctacatagtatatctccaagcaaat

SEQ ID NO: 4699456 - DNA, 25 bp, Homo sapien
tacatagtatatctccaagcaaatt

SEQ ID NO: 4699457 - DNA, 25 bp, Homo sapien
tcatgattagggcacaggtttccag

SEQ ID NO: 4699458 - DNA, 25 bp, Homo sapien
atcttcatgattagggcacaggttt

SEQ ID NO: 4699459 - DNA, 25 bp, Homo sapien
tgacaatcataaatgccatcggtgg

SEQ ID NO: 4699460 - DNA, 25 bp, Homo sapien
gagaaaacgaccttgcatgggctta

SEQ ID NO: 4699461 - DNA, 25 bp, Homo sapien
ccatcggtggattggccaggaacac

SEQ ID NO: 4699462 - DNA, 25 bp, Homo sapien
tccaggacacctccaacgtgtgggt

SEQ ID NO: 4699463 - DNA, 25 bp, Homo sapien
tgatgagaagcatcctccaggcgga

SEQ ID NO: 4699464 - DNA, 25 bp, Homo sapien
tctgtttcggccacgtgaactgcca

SEQ ID NO: 4699465 - DNA, 25 bp, Homo sapien
tctggtactctaacaaggaggtgca

SEQ ID NO: 4699466 - DNA, 25 bp, Homo sapien
cataccctgaccagtaggcaaagcg

SEQ ID NO: 4699467 - DNA, 25 bp, Homo sapien
tcaaagctccaagcatgtgggcagt

SEQ ID NO: 4699468 - DNA, 25 bp, Homo sapien
ctagggcctaaaaggcaggtgacat

SEQ ID NO: 4699469 - DNA, 25 bp, Homo sapien
gctacaattcaagaactgctgccta

SEQ ID NO: 4699470 - DNA, 25 bp, Homo sapien
tgccacagcaagagtagccacaaac

SEQ ID NO: 4699471 - DNA, 25 bp, Homo sapien
gagtcagtcaggtgcattatatctg

SEQ ID NO: 4699472 - DNA, 25 bp, Homo sapien
tttggttccatcaagcacgtcaaga

SEQ ID NO: 4699473 - DNA, 25 bp, Homo sapien
gcgacgcaccacagagtcagtcagg

SEQ ID NO: 4699474 - DNA, 25 bp, Homo sapien
gcacgtcaagaaagagctggcgacg

SEQ ID NO: 4699475 - DNA, 25 bp, Homo sapien
cagagtgcacttcatggagccaagg

SEQ ID NO: 4699476 - DNA, 25 bp, Homo sapien
aaggcgaaggcagttcactgaggct

SEQ ID NO: 4699477 - DNA, 25 bp, Homo sapien
cttccactgccggaggaggataagc

SEQ ID NO: 4699478 - DNA, 25 bp, Homo sapien
cactgccggaggaggataagcagca

SEQ ID NO: 4699479 - DNA, 25 bp, Homo sapien
agggtccaaggatttcatccacaga

SEQ ID NO: 4699480 - DNA, 25 bp, Homo sapien
catgagttgctggtcggcctgcagc

SEQ ID NO: 4699481 - DNA, 25 bp, Homo sapien
tctccgtcaagggtccaaggatttc

SEQ ID NO: 4699482 - DNA, 25 bp, Homo sapien
ccaggatctccgtcaagggtccaag

SEQ ID NO: 4699483 - DNA, 25 bp, Homo sapien
tcctcttggagggtctcacagacat

SEQ ID NO: 4699484 - DNA, 25 bp, Homo sapien
agactgtggcgggtctggtcgaaga

SEQ ID NO: 4699485 - DNA, 25 bp, Homo sapien
ggtcgaagagtgcaatcacttcctc

SEQ ID NO: 4699486 - DNA, 25 bp, Homo sapien
cacttcctcttggagggtctcacag

SEQ ID NO: 4699487 - DNA, 25 bp, Homo sapien
tggtccctgtgccgggaccgagaac

SEQ ID NO: 4699488 - DNA, 25 bp, Homo sapien
ctggtccctgtgccgggaccgagaa

SEQ ID NO: 4699489 - DNA, 25 bp, Homo sapien
aaggctcacctctagagtggtgagg

SEQ ID NO: 4699490 - DNA, 25 bp, Homo sapien
aggttctgcttcatgcgaaggctca

SEQ ID NO: 4699491 - DNA, 25 bp, Homo sapien
ggagtcaccatcctcgtctacctca

SEQ ID NO: 4699492 - DNA, 25 bp, Homo sapien
agcagatgcaatgtggcctcagtga

SEQ ID NO: 4699493 - DNA, 25 bp, Homo sapien
acccaggcaagcaaggacgctccct

SEQ ID NO: 4699494 - DNA, 25 bp, Homo sapien
ctgcctagggtaggtagggctctca

SEQ ID NO: 4699495 - DNA, 25 bp, Homo sapien
ctcaggctagatcacagcttctggg

SEQ ID NO: 4699496 - DNA, 25 bp, Homo sapien
ccctgcctagggtaggtagggctct

SEQ ID NO: 4699497 - DNA, 25 bp, Homo sapien
tgtgctgtgccgttggtgctcagct

SEQ ID NO: 4699498 - DNA, 25 bp, Homo sapien
actcagaaggggcaaacaaatgctc

SEQ ID NO: 4699499 - DNA, 25 bp, Homo sapien
ggcaaacaaatgctctgggtgatgc

SEQ ID NO: 4699500 - DNA, 25 bp, Homo sapien
tgctcagctggtacacactcagaag

SEQ ID NO: 4699501 - DNA, 25 bp, Homo sapien
ggacaggcggtagactcctggccaa

SEQ ID NO: 4699502 - DNA, 25 bp, Homo sapien
tagcgcagagttttgagcagctgct

SEQ ID NO: 4699503 - DNA, 25 bp, Homo sapien
tcctggtggacacccacgaagtcca

SEQ ID NO: 4699504 - DNA, 25 bp, Homo sapien
ctcaggcaggaagttgtagcgcaga

SEQ ID NO: 4699505 - DNA, 25 bp, Homo sapien
tatcacgcatgagctgaggcaggtg

SEQ ID NO: 4699506 - DNA, 25 bp, Homo sapien
ctccttcatgaagttagagagctgc

SEQ ID NO: 4699507 - DNA, 25 bp, Homo sapien
gctgcagaataaaacccacggtgtg

SEQ ID NO: 4699508 - DNA, 25 bp, Homo sapien
aggtggaagtgccactccttcatga

SEQ ID NO: 4699509 - DNA, 25 bp, Homo sapien
aagcattaccccagactccaagaca

SEQ ID NO: 4699510 - DNA, 25 bp, Homo sapien
catggctgcccttgactatggaagg

SEQ ID NO: 4699511 - DNA, 25 bp, Homo sapien
gccccaagtgtattcttaagggatc

SEQ ID NO: 4699512 - DNA, 25 bp, Homo sapien
tgtaatggttcgatcctagctcact

SEQ ID NO: 4699513 - DNA, 25 bp, Homo sapien
tgtgcaggagagaggtacatgcctg

SEQ ID NO: 4699514 - DNA, 25 bp, Homo sapien
ctgcagcatctttcgactgtgcagg

SEQ ID NO: 4699515 - DNA, 25 bp, Homo sapien
gcagcatctttcgactgtgcaggag

SEQ ID NO: 4699516 - DNA, 25 bp, Homo sapien
agcatctttcgactgtgcaggagag

SEQ ID NO: 4699517 - DNA, 25 bp, Homo sapien
aacagctgaggggaggccatcccca

SEQ ID NO: 4699518 - DNA, 25 bp, Homo sapien
tgaggggaggccatccccatttttg

SEQ ID NO: 4699519 - DNA, 25 bp, Homo sapien
agcagaagcagcagacggtggcctc

SEQ ID NO: 4699520 - DNA, 25 bp, Homo sapien
ctctggactcgctgggcaacagctg

SEQ ID NO: 4699521 - DNA, 25 bp, Homo sapien
cagacatctggggtgaagtggcgca

SEQ ID NO: 4699522 - DNA, 25 bp, Homo sapien
gatccagcagaatctggcagacatc

SEQ ID NO: 4699523 - DNA, 25 bp, Homo sapien
tcttgagaaggccatactggactgt

SEQ ID NO: 4699524 - DNA, 25 bp, Homo sapien
cgcagggctgccagcgtcttgctga

SEQ ID NO: 4699525 - DNA, 25 bp, Homo sapien
tctccaagcatgttgagggccacat

SEQ ID NO: 4699526 - DNA, 25 bp, Homo sapien
tcactgtggccagaagggtcccgaa

SEQ ID NO: 4699527 - DNA, 25 bp, Homo sapien
gagtggtaaagctcagggcaaacag

SEQ ID NO: 4699528 - DNA, 25 bp, Homo sapien
ggccacttcggagtcaaaggtggga

SEQ ID NO: 4699529 - DNA, 25 bp, Homo sapien
gtgaggggctcctttttcttgtcca

SEQ ID NO: 4699530 - DNA, 25 bp, Homo sapien
tgctgagccccactgcctgggtgag

SEQ ID NO: 4699531 - DNA, 25 bp, Homo sapien
ctgtgtgctgagccccactgcctgg

SEQ ID NO: 4699532 - DNA, 25 bp, Homo sapien
ttaacgtcctggtcccttctgcctg

SEQ ID NO: 4699533 - DNA, 25 bp, Homo sapien
cagccgggtccctaaggtaccgcat

SEQ ID NO: 4699534 - DNA, 25 bp, Homo sapien
ctgcttcatccgctgtttgtcccgg

SEQ ID NO: 4699535 - DNA, 25 bp, Homo sapien
tgagctcctgcttcatccgctgttt

SEQ ID NO: 4699536 - DNA, 25 bp, Homo sapien
gtaccgcatcgcctgagagatgagc

SEQ ID NO: 4699537 - DNA, 25 bp, Homo sapien
ggacaaacgcctgcaccaactggat

SEQ ID NO: 4699538 - DNA, 25 bp, Homo sapien
ttgcatatgccggacaaacgcctgc

SEQ ID NO: 4699539 - DNA, 25 bp, Homo sapien
aggtggacttgccctgcggcgaggg

SEQ ID NO: 4699540 - DNA, 25 bp, Homo sapien
gaagtagcgcgagaggctggacagc

SEQ ID NO: 4699541 - DNA, 25 bp, Homo sapien
tgagcacagaagactcggctcccca

SEQ ID NO: 4699542 - DNA, 25 bp, Homo sapien
tggtggctggagtcgtggctactcc

SEQ ID NO: 4699543 - DNA, 25 bp, Homo sapien
ggaggtgccctccattgtataggcc

SEQ ID NO: 4699544 - DNA, 25 bp, Homo sapien
agtataaaaataacgtcagtgggtg

SEQ ID NO: 4699545 - DNA, 25 bp, Homo sapien
caaagacagagtgtggaaaacaggt

SEQ ID NO: 4699546 - DNA, 25 bp, Homo sapien
aaacaggtttgaaacccgtgcatag

SEQ ID NO: 4699547 - DNA, 25 bp, Homo sapien
tgtataaatagaccacagaattacc

SEQ ID NO: 4699548 - DNA, 25 bp, Homo sapien
gtgcatagagccctctgctgggctg

SEQ ID NO: 4699549 - DNA, 25 bp, Homo sapien
gggaatatctgacagcgcccaccca

SEQ ID NO: 4699550 - DNA, 25 bp, Homo sapien
tgaactagccatccatcagtacctg

SEQ ID NO: 4699551 - DNA, 25 bp, Homo sapien
aaccctcagcccaaggacaggaatg

SEQ ID NO: 4699552 - DNA, 25 bp, Homo sapien
tgagagccacgttgtcatccctggg

SEQ ID NO: 4699553 - DNA, 25 bp, Homo sapien
caagcacaagaagtgggtagcggtc

SEQ ID NO: 4699554 - DNA, 25 bp, Homo sapien
aataaaccgtccttgtgtgcgagtc

SEQ ID NO: 4699555 - DNA, 25 bp, Homo sapien
gacatgaagccgcacaaggaacgtt

SEQ ID NO: 4699556 - DNA, 25 bp, Homo sapien
tgctgtctgcaggtcgggcgtttca

SEQ ID NO: 4699557 - DNA, 25 bp, Homo sapien
caggtgcactcagcgagagccctgc

SEQ ID NO: 4699558 - DNA, 25 bp, Homo sapien
cagcatcttccggtgctatcctccc

SEQ ID NO: 4699559 - DNA, 25 bp, Homo sapien
tgccaaaagctgcatcaggggaatg

SEQ ID NO: 4699560 - DNA, 25 bp, Homo sapien
gggaatgcggcaaggcacacagggc

SEQ ID NO: 4699561 - DNA, 25 bp, Homo sapien
cctggccgtgcctttctggagttca

SEQ ID NO: 4699562 - DNA, 25 bp, Homo sapien
tggagttcacagacccctaaagaca

SEQ ID NO: 4699563 - DNA, 25 bp, Homo sapien
tgcttaaggcccagaggtcctggag

SEQ ID NO: 4699564 - DNA, 25 bp, Homo sapien
caggatcgtggaggcttcgcatgtc

SEQ ID NO: 4699565 - DNA, 25 bp, Homo sapien
tagtatagccacgttaactctctcg

SEQ ID NO: 4699566 - DNA, 25 bp, Homo sapien
cctgatgaattgactctttcattat

SEQ ID NO: 4699567 - DNA, 25 bp, Homo sapien
tctggtagtagtatagccacgttaa

SEQ ID NO: 4699568 - DNA, 25 bp, Homo sapien
tctcgtggttactgcatacatggtg

SEQ ID NO: 4699569 - DNA, 25 bp, Homo sapien
gatgccatcgctgcggaagggcagc

SEQ ID NO: 4699570 - DNA, 25 bp, Homo sapien
atcgctgcggaagggcagcgtctcc

SEQ ID NO: 4699571 - DNA, 25 bp, Homo sapien
ccatcgctgcggaagggcagcgtct

SEQ ID NO: 4699572 - DNA, 25 bp, Homo sapien
ccgggatgccatcgctgcggaaggg

SEQ ID NO: 4699573 - DNA, 25 bp, Homo sapien
ctctggcgccgctcacggcccgcac

SEQ ID NO: 4699574 - DNA, 25 bp, Homo sapien
taccctctggcgccgctcacggccc

SEQ ID NO: 4699575 - DNA, 25 bp, Homo sapien
accctctggcgccgctcacggcccg

SEQ ID NO: 4699576 - DNA, 25 bp, Homo sapien
cctctggcgccgctcacggcccgca

SEQ ID NO: 4699577 - DNA, 25 bp, Homo sapien
ttccaaggagaacgtcttcaactgg

SEQ ID NO: 4699578 - DNA, 25 bp, Homo sapien
aggcaccatccacgccccagaagga

SEQ ID NO: 4699579 - DNA, 25 bp, Homo sapien
cttcaactggttgccagctgggtcc

SEQ ID NO: 4699580 - DNA, 25 bp, Homo sapien
agggacacacataccagagggcccc

SEQ ID NO: 4699581 - DNA, 25 bp, Homo sapien
ctgcccaaacgtcgtgtacaggaac

SEQ ID NO: 4699582 - DNA, 25 bp, Homo sapien
caggaacacggggatctcggccacc

SEQ ID NO: 4699583 - DNA, 25 bp, Homo sapien
ggcctggatcatagacgtgccctcg

SEQ ID NO: 4699584 - DNA, 25 bp, Homo sapien
cagggcctggatcatagacgtgccc

SEQ ID NO: 4699585 - DNA, 25 bp, Homo sapien
aggagacgctgccggttacacctcc

SEQ ID NO: 4699586 - DNA, 25 bp, Homo sapien
agaggagacgctgccggttacacct

SEQ ID NO: 4699587 - DNA, 25 bp, Homo sapien
aagaggagacgctgccggttacacc

SEQ ID NO: 4699588 - DNA, 25 bp, Homo sapien
gaggagacgctgccggttacacctc

SEQ ID NO: 4699589 - DNA, 25 bp, Homo sapien
ctcctccgtcgcctcttcagctggt

SEQ ID NO: 4699590 - DNA, 25 bp, Homo sapien
cgcaggcctggcgtcaaccgtagct

SEQ ID NO: 4699591 - DNA, 25 bp, Homo sapien
tcaaccgtagctgggagaatgcaga

SEQ ID NO: 4699592 - DNA, 25 bp, Homo sapien
tccccagggccgtggcaaagaggac

SEQ ID NO: 4699593 - DNA, 25 bp, Homo sapien
agaggatagggaggggcaccgtgcc

SEQ ID NO: 4699594 - DNA, 25 bp, Homo sapien
ccaagaggatagggaggggcaccgt

SEQ ID NO: 4699595 - DNA, 25 bp, Homo sapien
agggaccttcctggccaagaggata

SEQ ID NO: 4699596 - DNA, 25 bp, Homo sapien
aagggaccttcctggccaagaggat

SEQ ID NO: 4699597 - DNA, 25 bp, Homo sapien
atcggtcccgaccttctaagtcagg

SEQ ID NO: 4699598 - DNA, 25 bp, Homo sapien
ctcaggagaaaagcgcggggccctc

SEQ ID NO: 4699599 - DNA, 25 bp, Homo sapien
tccatgtcctgctcatgaccacatc

SEQ ID NO: 4699600 - DNA, 25 bp, Homo sapien
cccaagggcgtgcactcaggagaaa

SEQ ID NO: 4699601 - DNA, 25 bp, Homo sapien
tgggaggagcccgagtgcttgctgg

SEQ ID NO: 4699602 - DNA, 25 bp, Homo sapien
ggaggagcccgagtgcttgctgggc

SEQ ID NO: 4699603 - DNA, 25 bp, Homo sapien
gctgggctcaatggaagagatgcca

SEQ ID NO: 4699604 - DNA, 25 bp, Homo sapien
gagatgccactcagggtgtcgttgc

SEQ ID NO: 4699605 - DNA, 25 bp, Homo sapien
ttgccgtcgctggtggtcagagact

SEQ ID NO: 4699606 - DNA, 25 bp, Homo sapien
ctggcatcccatagtcccgagcacg

SEQ ID NO: 4699607 - DNA, 25 bp, Homo sapien
catagtcccgagcacgcggctgtgg

SEQ ID NO: 4699608 - DNA, 25 bp, Homo sapien
ctctgcattgccgtcgctggtggtc

SEQ ID NO: 4699609 - DNA, 25 bp, Homo sapien
tggcccacgcttagtgcctgctccc

SEQ ID NO: 4699610 - DNA, 25 bp, Homo sapien
cagtctctgggttccggaggccgtc

SEQ ID NO: 4699611 - DNA, 25 bp, Homo sapien
cgctggcccacgcttagtgcctgct

SEQ ID NO: 4699612 - DNA, 25 bp, Homo sapien
ccccgctggcccacgcttagtgcct

SEQ ID NO: 4699613 - DNA, 25 bp, Homo sapien
ctagcagcatgctgtctgcggggaa

SEQ ID NO: 4699614 - DNA, 25 bp, Homo sapien
aggtggagccgaactcctcctgcag

SEQ ID NO: 4699615 - DNA, 25 bp, Homo sapien
cgaggtctagcagcatgctgtctgc

SEQ ID NO: 4699616 - DNA, 25 bp, Homo sapien
tggtaggcacggtgcagcagggact

SEQ ID NO: 4699617 - DNA, 25 bp, Homo sapien
ggagaagaaggaatcctctgaagtc

SEQ ID NO: 4699618 - DNA, 25 bp, Homo sapien
cgcagcgagccctcggtcaggggca

SEQ ID NO: 4699619 - DNA, 25 bp, Homo sapien
tggcggagaagaaggaatcctctga

SEQ ID NO: 4699620 - DNA, 25 bp, Homo sapien
ctcggtggcggagaagaaggaatcc

SEQ ID NO: 4699621 - DNA, 25 bp, Homo sapien
ctgagggtccggcaaggcactctcc

SEQ ID NO: 4699622 - DNA, 25 bp, Homo sapien
tctggagagtgggatcgggtaatct

SEQ ID NO: 4699623 - DNA, 25 bp, Homo sapien
ggatcgggtaatctccagtctgcag

SEQ ID NO: 4699624 - DNA, 25 bp, Homo sapien
cagggcctcctcataggcagcggcg

SEQ ID NO: 4699625 - DNA, 25 bp, Homo sapien
taaatctgcatgttatccttatgcc

SEQ ID NO: 4699626 - DNA, 25 bp, Homo sapien
atggaatgcttagtaaatctgcatg

SEQ ID NO: 4699627 - DNA, 25 bp, Homo sapien
cagtgtatgtgctgtagaagcatac

SEQ ID NO: 4699628 - DNA, 25 bp, Homo sapien
gccgggaccacgttcatcttctctg

SEQ ID NO: 4699629 - DNA, 25 bp, Homo sapien
tggtccctgcccagcgatgccccgg

SEQ ID NO: 4699630 - DNA, 25 bp, Homo sapien
acagacggcgtcacacaacctggtc

SEQ ID NO: 4699631 - DNA, 25 bp, Homo sapien
aggacagacggcgtcacacaacctg

SEQ ID NO: 4699632 - DNA, 25 bp, Homo sapien
gggaggacagacggcgtcacacaac

SEQ ID NO: 4699633 - DNA, 25 bp, Homo sapien
tcctggtcactgtagcagcccagca

SEQ ID NO: 4699634 - DNA, 25 bp, Homo sapien
agaaagtcctggtcactgtagcagc

SEQ ID NO: 4699635 - DNA, 25 bp, Homo sapien
gaaggcctgccgcacacagtgcagc

SEQ ID NO: 4699636 - DNA, 25 bp, Homo sapien
gcctgccgcacacagtgcagcttgg

SEQ ID NO: 4699637 - DNA, 25 bp, Homo sapien
aaaagctggttactcttgtcttcca

SEQ ID NO: 4699638 - DNA, 25 bp, Homo sapien
gaaaagctggttactcttgtcttcc

SEQ ID NO: 4699639 - DNA, 25 bp, Homo sapien
ccgaagaaaagctggttactcttgt

SEQ ID NO: 4699640 - DNA, 25 bp, Homo sapien
cccgaagaaaagctggttactcttg

SEQ ID NO: 4699641 - DNA, 25 bp, Homo sapien
ccttggtcatcaggcctgtcaccat

SEQ ID NO: 4699642 - DNA, 25 bp, Homo sapien
ttctcagccttggtcatcaggcctg

SEQ ID NO: 4699643 - DNA, 25 bp, Homo sapien
tcagccttggtcatcaggcctgtca

SEQ ID NO: 4699644 - DNA, 25 bp, Homo sapien
gccttggtcatcaggcctgtcacca

SEQ ID NO: 4699645 - DNA, 25 bp, Homo sapien
tggggtttgggatgctcttttcaga

SEQ ID NO: 4699646 - DNA, 25 bp, Homo sapien
gatgtgggtctgcatttacgatgta

SEQ ID NO: 4699647 - DNA, 25 bp, Homo sapien
ggaggctctcggcacacatccttca

SEQ ID NO: 4699648 - DNA, 25 bp, Homo sapien
ctgcatttacgatgtagaaaaacac

SEQ ID NO: 4699649 - DNA, 25 bp, Homo sapien
ggcccatcctggtcactggacaaga

SEQ ID NO: 4699650 - DNA, 25 bp, Homo sapien
gagagaagcacggcccatcctggtc

SEQ ID NO: 4699651 - DNA, 25 bp, Homo sapien
tggagagaagcacggcccatcctgg

SEQ ID NO: 4699652 - DNA, 25 bp, Homo sapien
ggtcactggacaagacccacaggga

SEQ ID NO: 4699653 - DNA, 25 bp, Homo sapien
cagctccagccgtgttgtggcccag

SEQ ID NO: 4699654 - DNA, 25 bp, Homo sapien
tctcgggccgcagggcatagctcag

SEQ ID NO: 4699655 - DNA, 25 bp, Homo sapien
gctccagccgtgttgtggcccaggt

SEQ ID NO: 4699656 - DNA, 25 bp, Homo sapien
cccaggtctcgggccgcagggcata

SEQ ID NO: 4699657 - DNA, 25 bp, Homo sapien
actgagctagagctcggcacaagaa

SEQ ID NO: 4699658 - DNA, 25 bp, Homo sapien
tgagcagtgatggaaccgtctcagc

SEQ ID NO: 4699659 - DNA, 25 bp, Homo sapien
tgagctagagctcggcacaagaacc

SEQ ID NO: 4699660 - DNA, 25 bp, Homo sapien
tctcagccgcttggaactgagctag

SEQ ID NO: 4699661 - DNA, 25 bp, Homo sapien
tcccgctctgctgtgcaacgggtgt

SEQ ID NO: 4699662 - DNA, 25 bp, Homo sapien
gggggacacgtctttcccgctctgc

SEQ ID NO: 4699663 - DNA, 25 bp, Homo sapien
caacgggtgtagctgaggccattcc

SEQ ID NO: 4699664 - DNA, 25 bp, Homo sapien
ggtccagggcatgagcacacgtggg

SEQ ID NO: 4699665 - DNA, 25 bp, Homo sapien
gaaggcgtccatgaggatgaagtcc

SEQ ID NO: 4699666 - DNA, 25 bp, Homo sapien
agcaccgaggccggagggttctcca

SEQ ID NO: 4699667 - DNA, 25 bp, Homo sapien
tgtcgaagaagctcatgcataccac

SEQ ID NO: 4699668 - DNA, 25 bp, Homo sapien
aagtccagcacgatgtcgaagaagc

SEQ ID NO: 4699669 - DNA, 25 bp, Homo sapien
gccaggcaaccacacgggctgatgt

SEQ ID NO: 4699670 - DNA, 25 bp, Homo sapien
ctgtaaaccacctcgcagaagcctg

SEQ ID NO: 4699671 - DNA, 25 bp, Homo sapien
cacacaataggaagaaagcgcacac

SEQ ID NO: 4699672 - DNA, 25 bp, Homo sapien
cccggctgctggagcgttactgctt

SEQ ID NO: 4699673 - DNA, 25 bp, Homo sapien
gctttcaggaccgaccagcaagcag

SEQ ID NO: 4699674 - DNA, 25 bp, Homo sapien
aggaccgaccagcaagcagtggcca

SEQ ID NO: 4699675 - DNA, 25 bp, Homo sapien
ttcaggaccgaccagcaagcagtgg

SEQ ID NO: 4699676 - DNA, 25 bp, Homo sapien
ttggctttcaggaccgaccagcaag

SEQ ID NO: 4699677 - DNA, 25 bp, Homo sapien
tggtatcagctaggcaacagagcct

SEQ ID NO: 4699678 - DNA, 25 bp, Homo sapien
aggaagtgggtctacacgagcctcc

SEQ ID NO: 4699679 - DNA, 25 bp, Homo sapien
cttctgcagacagggtaaccatggg

SEQ ID NO: 4699680 - DNA, 25 bp, Homo sapien
accatgggccgctgtgagtactgca

SEQ ID NO: 4699681 - DNA, 25 bp, Homo sapien
tcacatgctccgatacggagtagaa

SEQ ID NO: 4699682 - DNA, 25 bp, Homo sapien
cttcagcaagctgaggcttgggtcc

SEQ ID NO: 4699683 - DNA, 25 bp, Homo sapien
gggctcacatgctccgatacggagt

SEQ ID NO: 4699684 - DNA, 25 bp, Homo sapien
ccgatacggagtagaaatgggagat

SEQ ID NO: 4699685 - DNA, 25 bp, Homo sapien
cgggcagtgacgtgtagcgcacatt

SEQ ID NO: 4699686 - DNA, 25 bp, Homo sapien
gcgcacattgtccaggtcgaacatg

SEQ ID NO: 4699687 - DNA, 25 bp, Homo sapien
ggtcgaacatgtccctcaggtactg

SEQ ID NO: 4699688 - DNA, 25 bp, Homo sapien
ctgcaggatgtcgtctgccagcgcg

SEQ ID NO: 4699689 - DNA, 25 bp, Homo sapien
taccatccaaaagtcgaagctgtga

SEQ ID NO: 4699690 - DNA, 25 bp, Homo sapien
cagctgtcagataccaacccaggga

SEQ ID NO: 4699691 - DNA, 25 bp, Homo sapien
gatgctgagaccatatagccacagg

SEQ ID NO: 4699692 - DNA, 25 bp, Homo sapien
tgtgacaatcgactgctacaggcag

SEQ ID NO: 4699693 - DNA, 25 bp, Homo sapien
aagcggggagcgagcactgtccgtc

SEQ ID NO: 4699694 - DNA, 25 bp, Homo sapien
cggccgccatgaagcggggagcgag

SEQ ID NO: 4699695 - DNA, 25 bp, Homo sapien
ccatgaagcggggagcgagcactgt

SEQ ID NO: 4699696 - DNA, 25 bp, Homo sapien
ggagcgagcactgtccgtccgctgc

SEQ ID NO: 4699697 - DNA, 25 bp, Homo sapien
gatattcgacgtgggtgagggtcac

SEQ ID NO: 4699698 - DNA, 25 bp, Homo sapien
caggatattcgacgtgggtgagggt

SEQ ID NO: 4699699 - DNA, 25 bp, Homo sapien
ctgcaggatattcgacgtgggtgag

SEQ ID NO: 4699700 - DNA, 25 bp, Homo sapien
tgcaggatattcgacgtgggtgagg

SEQ ID NO: 4699701 - DNA, 25 bp, Homo sapien
gtgcagctcccgcttaaatatgatg

SEQ ID NO: 4699702 - DNA, 25 bp, Homo sapien
ccgcttaaatatgatgagggtcacg

SEQ ID NO: 4699703 - DNA, 25 bp, Homo sapien
tgagggtcacgaaaccgacgatgac

SEQ ID NO: 4699704 - DNA, 25 bp, Homo sapien
ccgacgatgacaaatacagggctga

SEQ ID NO: 4699705 - DNA, 25 bp, Homo sapien
ctggggaagacgcatggtcagctgg

SEQ ID NO: 4699706 - DNA, 25 bp, Homo sapien
cgcatggtcagctgggcctctgtgc

SEQ ID NO: 4699707 - DNA, 25 bp, Homo sapien
cctctgtgcacctgttggctgctac

SEQ ID NO: 4699708 - DNA, 25 bp, Homo sapien
gaagacgcatggtcagctgggcctc

SEQ ID NO: 4699709 - DNA, 25 bp, Homo sapien
cgtttttgatcagccagttgacccc

SEQ ID NO: 4699710 - DNA, 25 bp, Homo sapien
gttgaccccctcgttcagtgccagg

SEQ ID NO: 4699711 - DNA, 25 bp, Homo sapien
gtggctcctggatgacgtttttgat

SEQ ID NO: 4699712 - DNA, 25 bp, Homo sapien
tcctggatgacgtttttgatcagcc

SEQ ID NO: 4699713 - DNA, 25 bp, Homo sapien
ttggtgcccactgctgtgtgggggc

SEQ ID NO: 4699714 - DNA, 25 bp, Homo sapien
cttggtgcccactgctgtgtggggg

SEQ ID NO: 4699715 - DNA, 25 bp, Homo sapien
gtacttggtgcccactgctgtgtgg

SEQ ID NO: 4699716 - DNA, 25 bp, Homo sapien
cccgtacttggtgcccactgctgtg

SEQ ID NO: 4699717 - DNA, 25 bp, Homo sapien
gaatagacggagaagaaccacataa

SEQ ID NO: 4699718 - DNA, 25 bp, Homo sapien
ggaatagacggagaagaaccacata

SEQ ID NO: 4699719 - DNA, 25 bp, Homo sapien
gagtcccagggagagcacgtgcctc

SEQ ID NO: 4699720 - DNA, 25 bp, Homo sapien
gtgcctccacagcaagtccaggaac

SEQ ID NO: 4699721 - DNA, 25 bp, Homo sapien
ctgctgtaggagactaggaaggcca

SEQ ID NO: 4699722 - DNA, 25 bp, Homo sapien
aacctggcgttgtttgtttggtgca

SEQ ID NO: 4699723 - DNA, 25 bp, Homo sapien
ggctgctatcctggggaacagcggg

SEQ ID NO: 4699724 - DNA, 25 bp, Homo sapien
gaagatgaaccaggcgatggccatg

SEQ ID NO: 4699725 - DNA, 25 bp, Homo sapien
ggccatgaggcctccagcgatgcct

SEQ ID NO: 4699726 - DNA, 25 bp, Homo sapien
gctccaggtgtggtacagcaggtag

SEQ ID NO: 4699727 - DNA, 25 bp, Homo sapien
ttctgcccgggttaccgtgtactca

SEQ ID NO: 4699728 - DNA, 25 bp, Homo sapien
ccagagtacgttgggaatgaggctt

SEQ ID NO: 4699729 - DNA, 25 bp, Homo sapien
ttgtgtctcggattaggaagaactc

SEQ ID NO: 4699730 - DNA, 25 bp, Homo sapien
aatgaggcttgtgtctcggattagg

SEQ ID NO: 4699731 - DNA, 25 bp, Homo sapien
gttcagtgacctacagctgtcccca

SEQ ID NO: 4699732 - DNA, 25 bp, Homo sapien
tagtcccaactaagtaggcaaatgc

SEQ ID NO: 4699733 - DNA, 25 bp, Homo sapien
ggaatggcacctagacagggctgat

SEQ ID NO: 4699734 - DNA, 25 bp, Homo sapien
tagccagcgattgacctgaactggg

SEQ ID NO: 4699735 - DNA, 25 bp, Homo sapien
cgtccccagcttgcgttgtctgttc

SEQ ID NO: 4699736 - DNA, 25 bp, Homo sapien
gtttcgtccccagcttgcgttgtct

SEQ ID NO: 4699737 - DNA, 25 bp, Homo sapien
ttcgtccccagcttgcgttgtctgt

SEQ ID NO: 4699738 - DNA, 25 bp, Homo sapien
agtttcgtccccagcttgcgttgtc

SEQ ID NO: 4699739 - DNA, 25 bp, Homo sapien
gattcgaacacagatcccgagtgac

SEQ ID NO: 4699740 - DNA, 25 bp, Homo sapien
catactcggcttgtctcaggcaaaa

SEQ ID NO: 4699741 - DNA, 25 bp, Homo sapien
tgtaaacagcttgggtctgctcacc

SEQ ID NO: 4699742 - DNA, 25 bp, Homo sapien
cagcagcaggttaggaaactccaca

SEQ ID NO: 4699743 - DNA, 25 bp, Homo sapien
ctccaacagcttagaagacatgtgg

SEQ ID NO: 4699744 - DNA, 25 bp, Homo sapien
tccaacagcttagaagacatgtggg

SEQ ID NO: 4699745 - DNA, 25 bp, Homo sapien
gagagacagctggacggtgacctcc

SEQ ID NO: 4699746 - DNA, 25 bp, Homo sapien
acagctggacggtgacctcctcctt

SEQ ID NO: 4699747 - DNA, 25 bp, Homo sapien
caaggacaccagacggagttggaaa

SEQ ID NO: 4699748 - DNA, 25 bp, Homo sapien
ctaacccaaggaatattagaggaca

SEQ ID NO: 4699749 - DNA, 25 bp, Homo sapien
acattccccggtcaacatggttgtg

SEQ ID NO: 4699750 - DNA, 25 bp, Homo sapien
tttcctatcactctaagagttaggc

SEQ ID NO: 4699751 - DNA, 25 bp, Homo sapien
ctgccacgattgtgcggggcgtcaa

SEQ ID NO: 4699752 - DNA, 25 bp, Homo sapien
cgcccgaacgtcgggcgccgcgact

SEQ ID NO: 4699753 - DNA, 25 bp, Homo sapien
cgccgcgactgccacgattgtgcgg

SEQ ID NO: 4699754 - DNA, 25 bp, Homo sapien
gtcgggcgccgcgactgccacgatt

SEQ ID NO: 4699755 - DNA, 25 bp, Homo sapien
agcaagcctattaacggccggcgcg

SEQ ID NO: 4699756 - DNA, 25 bp, Homo sapien
ggaaccgggcgacggccatgtcagt

SEQ ID NO: 4699757 - DNA, 25 bp, Homo sapien
aagacggccgccatgtcggtgcggg

SEQ ID NO: 4699758 - DNA, 25 bp, Homo sapien
taaagtcaccacagcgaagacggcc

SEQ ID NO: 4699759 - DNA, 25 bp, Homo sapien
accaaaggctccgagcttcctgaag

SEQ ID NO: 4699760 - DNA, 25 bp, Homo sapien
ttgcagtcccctctcgcctttcact

SEQ ID NO: 4699761 - DNA, 25 bp, Homo sapien
ggagccgacccggatgcttgcagtc

SEQ ID NO: 4699762 - DNA, 25 bp, Homo sapien
gctccgagcttcctgaagacaagtg

SEQ ID NO: 4699763 - DNA, 25 bp, Homo sapien
ctggcggcggctgccgctcgccctc

SEQ ID NO: 4699764 - DNA, 25 bp, Homo sapien
gcggctgccgctcgccctcagccat

SEQ ID NO: 4699765 - DNA, 25 bp, Homo sapien
cggcggctgccgctcgccctcagcc

SEQ ID NO: 4699766 - DNA, 25 bp, Homo sapien
ggcggcggctgccgctcgccctcag

SEQ ID NO: 4699767 - DNA, 25 bp, Homo sapien
cccatgtctggaactgtgtggatct

SEQ ID NO: 4699768 - DNA, 25 bp, Homo sapien
ctgagaacgcttccatttgcccatg

SEQ ID NO: 4699769 - DNA, 25 bp, Homo sapien
gcccatgtctggaactgtgtggatc

SEQ ID NO: 4699770 - DNA, 25 bp, Homo sapien
tgaatccgatgtagtcagcgtatgc

SEQ ID NO: 4699771 - DNA, 25 bp, Homo sapien
cttcgttgagggtaaggatgaatcc

SEQ ID NO: 4699772 - DNA, 25 bp, Homo sapien
gagactctgtactcgaaggtcagct

SEQ ID NO: 4699773 - DNA, 25 bp, Homo sapien
ccttcacaccttcgttgagggtaag

SEQ ID NO: 4699774 - DNA, 25 bp, Homo sapien
atggtatgcattcatcgcaggacac

SEQ ID NO: 4699775 - DNA, 25 bp, Homo sapien
ttttcctcatgaacctcattccaca

SEQ ID NO: 4699776 - DNA, 25 bp, Homo sapien
tgcattcatcgcaggacacactctg

SEQ ID NO: 4699777 - DNA, 25 bp, Homo sapien
caggacacactctgctttgcagcct

SEQ ID NO: 4699778 - DNA, 25 bp, Homo sapien
caagtttggcataccaggtcctgta

SEQ ID NO: 4699779 - DNA, 25 bp, Homo sapien
cctgtccagcgtgttgagaagagcg

SEQ ID NO: 4699780 - DNA, 25 bp, Homo sapien
aaaccgagagggctggtccactgga

SEQ ID NO: 4699781 - DNA, 25 bp, Homo sapien
gagtctcatcaatccacctgtccag

SEQ ID NO: 4699782 - DNA, 25 bp, Homo sapien
ctgtgccgtagtcaatgcgcgtgga

SEQ ID NO: 4699783 - DNA, 25 bp, Homo sapien
cactgactcctttaggtaaacagcc

SEQ ID NO: 4699784 - DNA, 25 bp, Homo sapien
tggagttccccactgactcctttag

SEQ ID NO: 4699785 - DNA, 25 bp, Homo sapien
ctgccagatgggtagggaccactgt

SEQ ID NO: 4699786 - DNA, 25 bp, Homo sapien
caccttgaagacaatagctatttgg

SEQ ID NO: 4699787 - DNA, 25 bp, Homo sapien
ccggagcaccccaatcttgcagaga

SEQ ID NO: 4699788 - DNA, 25 bp, Homo sapien
gctatttggtcatccacccggagca

SEQ ID NO: 4699789 - DNA, 25 bp, Homo sapien
gaaagcagcgaaggctgcctcatgc

SEQ ID NO: 4699790 - DNA, 25 bp, Homo sapien
tgcgaactgccccagatgaagggca

SEQ ID NO: 4699791 - DNA, 25 bp, Homo sapien
gcgaactgccccagatgaagggcag

SEQ ID NO: 4699792 - DNA, 25 bp, Homo sapien
cgaactgccccagatgaagggcaga

SEQ ID NO: 4699793 - DNA, 25 bp, Homo sapien
tcacggccttctcatccacaaagtg

SEQ ID NO: 4699794 - DNA, 25 bp, Homo sapien
tcattcacggccttctcatccacaa

SEQ ID NO: 4699795 - DNA, 25 bp, Homo sapien
agtccttgtggttctcattcacggc

SEQ ID NO: 4699796 - DNA, 25 bp, Homo sapien
gtccttgtggttctcattcacggcc

SEQ ID NO: 4699797 - DNA, 25 bp, Homo sapien
aactgggcggaggacctgacagtca

SEQ ID NO: 4699798 - DNA, 25 bp, Homo sapien
ccaaggccagttagtgaccaagtct

SEQ ID NO: 4699799 - DNA, 25 bp, Homo sapien
tcagcagcggctctttcggaagagg

SEQ ID NO: 4699800 - DNA, 25 bp, Homo sapien
gaccctcatctcaagactcctgtgg

SEQ ID NO: 4699801 - DNA, 25 bp, Homo sapien
tactgttgaacaccatgcccaagag

SEQ ID NO: 4699802 - DNA, 25 bp, Homo sapien
ggaacagccaacaactctaggcacg

SEQ ID NO: 4699803 - DNA, 25 bp, Homo sapien
actcctcctagggtctactgttgaa

SEQ ID NO: 4699804 - DNA, 25 bp, Homo sapien
aacacaacgtgtgctgcaaccagcg

SEQ ID NO: 4699805 - DNA, 25 bp, Homo sapien
tctgcacagcgccttcctgtcagct

SEQ ID NO: 4699806 - DNA, 25 bp, Homo sapien
aatggctcctctgtcagtaactggg

SEQ ID NO: 4699807 - DNA, 25 bp, Homo sapien
gaatcggccttttgtaaatggctcc

SEQ ID NO: 4699808 - DNA, 25 bp, Homo sapien
cactccccagagaatcggccttttg

SEQ ID NO: 4699809 - DNA, 25 bp, Homo sapien
gcaggcacaaggacggctccattcc

SEQ ID NO: 4699810 - DNA, 25 bp, Homo sapien
caaggacggctccattcctggtcct

SEQ ID NO: 4699811 - DNA, 25 bp, Homo sapien
tgaccaaacccaggtatccgacagc

SEQ ID NO: 4699812 - DNA, 25 bp, Homo sapien
tttgcaagaggaccaaggtgggtat

SEQ ID NO: 4699813 - DNA, 25 bp, Homo sapien
gagcttctggtgtcgttcccaccga

SEQ ID NO: 4699814 - DNA, 25 bp, Homo sapien
ctgagcttctggtgtcgttcccacc

SEQ ID NO: 4699815 - DNA, 25 bp, Homo sapien
tggtgtcgttcccaccgactcccca

SEQ ID NO: 4699816 - DNA, 25 bp, Homo sapien
gcttctggtgtcgttcccaccgact

SEQ ID NO: 4699817 - DNA, 25 bp, Homo sapien
attcctatcgcccaccaaatccagc

SEQ ID NO: 4699818 - DNA, 25 bp, Homo sapien
agcctcaggaagataagatctccac

SEQ ID NO: 4699819 - DNA, 25 bp, Homo sapien
aagggggcctgattcctatcgccca

SEQ ID NO: 4699820 - DNA, 25 bp, Homo sapien
gcagcctcaggaagataagatctcc

SEQ ID NO: 4699821 - DNA, 25 bp, Homo sapien
ggccttatacatgcggatgagaccc

SEQ ID NO: 4699822 - DNA, 25 bp, Homo sapien
acagctggttggagtgctctgcaaa

SEQ ID NO: 4699823 - DNA, 25 bp, Homo sapien
aagggacggcgctgatgttccacag

SEQ ID NO: 4699824 - DNA, 25 bp, Homo sapien
cctggttcactttggaccaggaagg

SEQ ID NO: 4699825 - DNA, 25 bp, Homo sapien
agcccaggaccaagtgcggcagcag

SEQ ID NO: 4699826 - DNA, 25 bp, Homo sapien
ccaggaccaagtgcggcagcaggga

SEQ ID NO: 4699827 - DNA, 25 bp, Homo sapien
cggcagcagggacgggcacactggc

SEQ ID NO: 4699828 - DNA, 25 bp, Homo sapien
gcagcagggacgggcacactggcca

SEQ ID NO: 4699829 - DNA, 25 bp, Homo sapien
gggagattccgaggccccaagtgtc

SEQ ID NO: 4699830 - DNA, 25 bp, Homo sapien
agctggactgcagcttttcggggct

SEQ ID NO: 4699831 - DNA, 25 bp, Homo sapien
cagatgggagattccgaggccccaa

SEQ ID NO: 4699832 - DNA, 25 bp, Homo sapien
tgccccagatgggagattccgaggc

SEQ ID NO: 4699833 - DNA, 25 bp, Homo sapien
gagatgcctccaaagggtaagaccc

SEQ ID NO: 4699834 - DNA, 25 bp, Homo sapien
catgggagagccagactcagactgc

SEQ ID NO: 4699835 - DNA, 25 bp, Homo sapien
tttggccacttgataaaggagaagg

SEQ ID NO: 4699836 - DNA, 25 bp, Homo sapien
tcagactgcccgagctttgaggagc

SEQ ID NO: 4699837 - DNA, 25 bp, Homo sapien
cccggcctgacttggtgatcttaaa

SEQ ID NO: 4699838 - DNA, 25 bp, Homo sapien
ttttcagattactagagagctcccc

SEQ ID NO: 4699839 - DNA, 25 bp, Homo sapien
ggagttccagcgtcaccctatacag

SEQ ID NO: 4699840 - DNA, 25 bp, Homo sapien
gcgccggcctcaactagggctagaa

SEQ ID NO: 4699841 - DNA, 25 bp, Homo sapien
gacctctgtgtaggcaacatgccag

SEQ ID NO: 4699842 - DNA, 25 bp, Homo sapien
caggaggctgactcccctcaatcaa

SEQ ID NO: 4699843 - DNA, 25 bp, Homo sapien
ctgagaaaacaagccctctccttgg

SEQ ID NO: 4699844 - DNA, 25 bp, Homo sapien
gttgaacactgcaaagacttggtga

SEQ ID NO: 4699845 - DNA, 25 bp, Homo sapien
tggatctgccaagactgaccagggc

SEQ ID NO: 4699846 - DNA, 25 bp, Homo sapien
tggaaagaaccctcctgatcactgg

SEQ ID NO: 4699847 - DNA, 25 bp, Homo sapien
gaacaagacttatggcctcagagag

SEQ ID NO: 4699848 - DNA, 25 bp, Homo sapien
catcttggcacttcagagcgagaca

SEQ ID NO: 4699849 - DNA, 25 bp, Homo sapien
ggctcccgaacttgaagtgctggat

SEQ ID NO: 4699850 - DNA, 25 bp, Homo sapien
cagcaggctcccgaacttgaagtgc

SEQ ID NO: 4699851 - DNA, 25 bp, Homo sapien
ctagcccgacgtgacaggatggatg

SEQ ID NO: 4699852 - DNA, 25 bp, Homo sapien
cccgaacttgaagtgctggatcaca

SEQ ID NO: 4699853 - DNA, 25 bp, Homo sapien
tcatcaaacgggacgaacagaggga

SEQ ID NO: 4699854 - DNA, 25 bp, Homo sapien
tagaaaggcatcgactccaggaagg

SEQ ID NO: 4699855 - DNA, 25 bp, Homo sapien
taagactgccaagaggaatccaggc

SEQ ID NO: 4699856 - DNA, 25 bp, Homo sapien
tagcacacgggaactcagaaaactg

SEQ ID NO: 4699857 - DNA, 25 bp, Homo sapien
gacagccttggtcaacgggaatcca

SEQ ID NO: 4699858 - DNA, 25 bp, Homo sapien
gaaaaacgaacagtacgccagagaa

SEQ ID NO: 4699859 - DNA, 25 bp, Homo sapien
cactgcggagggagtctcgttcctt

SEQ ID NO: 4699860 - DNA, 25 bp, Homo sapien
gacaggtgctacaatcgatgtccag

SEQ ID NO: 4699861 - DNA, 25 bp, Homo sapien
tcagccttcggttgcatttcatgaa

SEQ ID NO: 4699862 - DNA, 25 bp, Homo sapien
ggaccgccgactgcgttggagactt

SEQ ID NO: 4699863 - DNA, 25 bp, Homo sapien
tgtgcttctaagttgcactgccttg

SEQ ID NO: 4699864 - DNA, 25 bp, Homo sapien
tttgcactaagttcctggtcagctg

SEQ ID NO: 4699865 - DNA, 25 bp, Homo sapien
ccggacctgggaagccgattccaat

SEQ ID NO: 4699866 - DNA, 25 bp, Homo sapien
tgtttagcgaggagcctaccacgtg

SEQ ID NO: 4699867 - DNA, 25 bp, Homo sapien
aatcagttgtcagacccgggaagcc

SEQ ID NO: 4699868 - DNA, 25 bp, Homo sapien
cagagagaaaaagcgcctatttaag

SEQ ID NO: 4699869 - DNA, 25 bp, Homo sapien
gacgcgtccaacatctcaaacttga

SEQ ID NO: 4699870 - DNA, 25 bp, Homo sapien
ttcgaggacttctgcccggactcgt

SEQ ID NO: 4699871 - DNA, 25 bp, Homo sapien
acttgatctccatctttggctccgg

SEQ ID NO: 4699872 - DNA, 25 bp, Homo sapien
gcctggactcgagccattgtcgcct

SEQ ID NO: 4699873 - DNA, 25 bp, Homo sapien
tcattgctttggcgccgtctgggga

SEQ ID NO: 4699874 - DNA, 25 bp, Homo sapien
tggcgcgcggcgcatggtggcggct

SEQ ID NO: 4699875 - DNA, 25 bp, Homo sapien
tttcggagcgcagccgaacctctga

SEQ ID NO: 4699876 - DNA, 25 bp, Homo sapien
tggcggctcctttcggagcgcagcc

SEQ ID NO: 4699877 - DNA, 25 bp, Homo sapien
aaaaatccatattcctggctgagca

SEQ ID NO: 4699878 - DNA, 25 bp, Homo sapien
taaaaatccatattcctggctgagc

SEQ ID NO: 4699879 - DNA, 25 bp, Homo sapien
tactgtgcactaggctccgggctag

SEQ ID NO: 4699880 - DNA, 25 bp, Homo sapien
tgtagcaagttcaccagccaagcag

SEQ ID NO: 4699881 - DNA, 25 bp, Homo sapien
gactactctaaacacctcacatggg

SEQ ID NO: 4699882 - DNA, 25 bp, Homo sapien
tgcaggtatccaaagggcacaagcc

SEQ ID NO: 4699883 - DNA, 25 bp, Homo sapien
ctctctttccgtagcaattcctttt

SEQ ID NO: 4699884 - DNA, 25 bp, Homo sapien
gcaggtgaaattgactgggttcctc

SEQ ID NO: 4699885 - DNA, 25 bp, Homo sapien
cccacctctctttccgtagcaattc

SEQ ID NO: 4699886 - DNA, 25 bp, Homo sapien
gagcaggtgaaattgactgggttcc

SEQ ID NO: 4699887 - DNA, 25 bp, Homo sapien
cgaggtcccctacgatgccttgggt

SEQ ID NO: 4699888 - DNA, 25 bp, Homo sapien
tgcagtcgctgctgtaggatggata

SEQ ID NO: 4699889 - DNA, 25 bp, Homo sapien
tgccttgggtctcatgattcgaata

SEQ ID NO: 4699890 - DNA, 25 bp, Homo sapien
tctggctgccgcacctgagggagca

SEQ ID NO: 4699891 - DNA, 25 bp, Homo sapien
tgtgggcggcctctatacttggaaa

SEQ ID NO: 4699892 - DNA, 25 bp, Homo sapien
cacagcgatgctagggaggaaagac

SEQ ID NO: 4699893 - DNA, 25 bp, Homo sapien
taaacgcgtgggatgggagtccaca

SEQ ID NO: 4699894 - DNA, 25 bp, Homo sapien
gaaaactgatacaactggcgatggg

SEQ ID NO: 4699895 - DNA, 25 bp, Homo sapien
tagtcatttgtacgtgttccgtgaa

SEQ ID NO: 4699896 - DNA, 25 bp, Homo sapien
gttccgtgaacgtggctttaagcat

SEQ ID NO: 4699897 - DNA, 25 bp, Homo sapien
aatgaacctcctgccgcatatcctg

SEQ ID NO: 4699898 - DNA, 25 bp, Homo sapien
aaacgcacactctgtccccgtgaga

SEQ ID NO: 4699899 - DNA, 25 bp, Homo sapien
ctgccagccacggacaggtttgagg

SEQ ID NO: 4699900 - DNA, 25 bp, Homo sapien
cacttctacctctatctcggattct

SEQ ID NO: 4699901 - DNA, 25 bp, Homo sapien
tcactttcgttgcagagaggagggt

SEQ ID NO: 4699902 - DNA, 25 bp, Homo sapien
gttgcagaatgtggcgaggtatcac

SEQ ID NO: 4699903 - DNA, 25 bp, Homo sapien
tttctcttgtcagccgcaagtcagt

SEQ ID NO: 4699904 - DNA, 25 bp, Homo sapien
ccgcaagtcagtgggcttcaaagtc

SEQ ID NO: 4699905 - DNA, 25 bp, Homo sapien
ggcttcaaagtcaggcggtggctcc

SEQ ID NO: 4699906 - DNA, 25 bp, Homo sapien
cggtggctcccgtgaccctttgtgg

SEQ ID NO: 4699907 - DNA, 25 bp, Homo sapien
tagtgacgtcatccttcattcattc

SEQ ID NO: 4699908 - DNA, 25 bp, Homo sapien
aacagggatggattctagtgacgtc

SEQ ID NO: 4699909 - DNA, 25 bp, Homo sapien
cagagggaagttcttggacccctgg

SEQ ID NO: 4699910 - DNA, 25 bp, Homo sapien
ctgggtgccacgctgggagtgtgag

SEQ ID NO: 4699911 - DNA, 25 bp, Homo sapien
aaaagagacaacactgaccaggagg

SEQ ID NO: 4699912 - DNA, 25 bp, Homo sapien
tggtacccgagaaaatgcacatgat

SEQ ID NO: 4699913 - DNA, 25 bp, Homo sapien
tagaccatccgacctagcatgtagt

SEQ ID NO: 4699914 - DNA, 25 bp, Homo sapien
ggtggtaggcccctgagatacccat

SEQ ID NO: 4699915 - DNA, 25 bp, Homo sapien
tttttgggatacagtctcactcttt

SEQ ID NO: 4699916 - DNA, 25 bp, Homo sapien
atttttgggatacagtctcactctt

SEQ ID NO: 4699917 - DNA, 25 bp, Homo sapien
tatttttgggatacagtctcactct

SEQ ID NO: 4699918 - DNA, 25 bp, Homo sapien
ttatttttgggatacagtctcactc

SEQ ID NO: 4699919 - DNA, 25 bp, Homo sapien
tcagcagtttctcccggctttgcct

SEQ ID NO: 4699920 - DNA, 25 bp, Homo sapien
tctcagcagtttctcccggctttgc

SEQ ID NO: 4699921 - DNA, 25 bp, Homo sapien
gtctcagcagtttctcccggctttg

SEQ ID NO: 4699922 - DNA, 25 bp, Homo sapien
ctcgtctcagcagtttctcccggct

SEQ ID NO: 4699923 - DNA, 25 bp, Homo sapien
agccaagcgaatgtccccttagggc

SEQ ID NO: 4699924 - DNA, 25 bp, Homo sapien
ggtttatcgctcaaggccacatacg

SEQ ID NO: 4699925 - DNA, 25 bp, Homo sapien
aaggttgcatcctctcttacatggg

SEQ ID NO: 4699926 - DNA, 25 bp, Homo sapien
catggccaagatggctctacctggc

SEQ ID NO: 4699927 - DNA, 25 bp, Homo sapien
catggacggacattcgctcaggaca

SEQ ID NO: 4699928 - DNA, 25 bp, Homo sapien
ttattgactagctgctccatgcggg

SEQ ID NO: 4699929 - DNA, 25 bp, Homo sapien
aaactctaatatccacgtgcagggc

SEQ ID NO: 4699930 - DNA, 25 bp, Homo sapien
tccttatcagagaggtgggagcgct

SEQ ID NO: 4699931 - DNA, 25 bp, Homo sapien
gacacaccgccaggagacttttgag

SEQ ID NO: 4699932 - DNA, 25 bp, Homo sapien
tgtctagtagctggacacccaggtt

SEQ ID NO: 4699933 - DNA, 25 bp, Homo sapien
gccttgctgaagaccaggactccat

SEQ ID NO: 4699934 - DNA, 25 bp, Homo sapien
tgaacgacctgaactctgatgcgga

SEQ ID NO: 4699935 - DNA, 25 bp, Homo sapien
cagcctggtgagacttccaaaggaa

SEQ ID NO: 4699936 - DNA, 25 bp, Homo sapien
caaacgtagccggagttcctctaag

SEQ ID NO: 4699937 - DNA, 25 bp, Homo sapien
tccctctgttgaaaatcatgcccca

SEQ ID NO: 4699938 - DNA, 25 bp, Homo sapien
ctggtctatttgttgggacagcaaa

SEQ ID NO: 4699939 - DNA, 25 bp, Homo sapien
gtttcactctcgttgaagactcaga

SEQ ID NO: 4699940 - DNA, 25 bp, Homo sapien
ttcactctcgttgaagactcagaga

SEQ ID NO: 4699941 - DNA, 25 bp, Homo sapien
tttcactctcgttgaagactcagag

SEQ ID NO: 4699942 - DNA, 25 bp, Homo sapien
gagcagagggagagagttccaggca

SEQ ID NO: 4699943 - DNA, 25 bp, Homo sapien
agttccaggcagaggaggcagcaag

SEQ ID NO: 4699944 - DNA, 25 bp, Homo sapien
gagagttccaggcagaggaggcagc

SEQ ID NO: 4699945 - DNA, 25 bp, Homo sapien
agagcagagggagagagttccaggc

SEQ ID NO: 4699946 - DNA, 25 bp, Homo sapien
tgagcctgagcacaaactaaagtgg

SEQ ID NO: 4699947 - DNA, 25 bp, Homo sapien
ggcatgaaaatccaagagcggcccc

SEQ ID NO: 4699948 - DNA, 25 bp, Homo sapien
tggaggaagcgacacttagggaacc

SEQ ID NO: 4699949 - DNA, 25 bp, Homo sapien
ctaaagtggctcaactcatcaggga

SEQ ID NO: 4699950 - DNA, 25 bp, Homo sapien
agaaccagctcaagtttggccttca

SEQ ID NO: 4699951 - DNA, 25 bp, Homo sapien
ttcaagaaccagctcaagtttggcc

SEQ ID NO: 4699952 - DNA, 25 bp, Homo sapien
accgtgccagtttggtccttccttg

SEQ ID NO: 4699953 - DNA, 25 bp, Homo sapien
tgccagtttggtccttccttgaaaa

SEQ ID NO: 4699954 - DNA, 25 bp, Homo sapien
gagcctgccaggaaatcaatcttct

SEQ ID NO: 4699955 - DNA, 25 bp, Homo sapien
gcaaaccatttggacgggctcctcg

SEQ ID NO: 4699956 - DNA, 25 bp, Homo sapien
gcatacatattaaacggagcagtaa

SEQ ID NO: 4699957 - DNA, 25 bp, Homo sapien
gagcccgtcgcctcgaatgaggcgc

SEQ ID NO: 4699958 - DNA, 25 bp, Homo sapien
catctgcacaatgggtgtgaacccg

SEQ ID NO: 4699959 - DNA, 25 bp, Homo sapien
gccatgtggcctaaaatcctgacaa

SEQ ID NO: 4699960 - DNA, 25 bp, Homo sapien
tgtctccgccagaaggtgactgtgg

SEQ ID NO: 4699961 - DNA, 25 bp, Homo sapien
cagcagtgtgtaactctgggtctcc

SEQ ID NO: 4699962 - DNA, 25 bp, Homo sapien
ggtacacacttgtcagaggcgttcg

SEQ ID NO: 4699963 - DNA, 25 bp, Homo sapien
ttgagtgagggctggaaaacgaggc

SEQ ID NO: 4699964 - DNA, 25 bp, Homo sapien
taccagaaaggtgggtattccgagc

SEQ ID NO: 4699965 - DNA, 25 bp, Homo sapien
ctgacacgtaggtacacacttgtca

SEQ ID NO: 4699966 - DNA, 25 bp, Homo sapien
cacatcagcatcactgttgctactg

SEQ ID NO: 4699967 - DNA, 25 bp, Homo sapien
agtcacacatcagcatcactgttgc

SEQ ID NO: 4699968 - DNA, 25 bp, Homo sapien
atcagcatcactgttgctactgtgg

SEQ ID NO: 4699969 - DNA, 25 bp, Homo sapien
cacacatcagcatcactgttgctac

SEQ ID NO: 4699970 - DNA, 25 bp, Homo sapien
tagggctctgcattcgtccccaggc

SEQ ID NO: 4699971 - DNA, 25 bp, Homo sapien
tccacacggtcatgtgagcaggctc

SEQ ID NO: 4699972 - DNA, 25 bp, Homo sapien
cactccagatggtcctcagggaaag

SEQ ID NO: 4699973 - DNA, 25 bp, Homo sapien
ggtagtgcacgcgtccactccagat

SEQ ID NO: 4699974 - DNA, 25 bp, Homo sapien
tatttcaacagttatttagtgagca

SEQ ID NO: 4699975 - DNA, 25 bp, Homo sapien
ggaagcctagtgaagaccccaggtc

SEQ ID NO: 4699976 - DNA, 25 bp, Homo sapien
tcctgaccaagcaatttacacaaac

SEQ ID NO: 4699977 - DNA, 25 bp, Homo sapien
ccttgcttatctatttcaacagtta

SEQ ID NO: 4699978 - DNA, 25 bp, Homo sapien
tgtacaggacatgcaggacgagcgt

SEQ ID NO: 4699979 - DNA, 25 bp, Homo sapien
gcttggcacgcggtaagaactcagt

SEQ ID NO: 4699980 - DNA, 25 bp, Homo sapien
ttggcttccgcatccagacaaaggg

SEQ ID NO: 4699981 - DNA, 25 bp, Homo sapien
gatgttgtgggagtcctcgagcccc

SEQ ID NO: 4699982 - DNA, 25 bp, Homo sapien
aggtgacgtctcatccgggttttca

SEQ ID NO: 4699983 - DNA, 25 bp, Homo sapien
ttctggttcctgatagtagccatcc

SEQ ID NO: 4699984 - DNA, 25 bp, Homo sapien
gaggccttgctttcaacgcgtttgg

SEQ ID NO: 4699985 - DNA, 25 bp, Homo sapien
catgaatatgtcttcgaggccttgc

SEQ ID NO: 4699986 - DNA, 25 bp, Homo sapien
catccgggggactgatgatgaacac

SEQ ID NO: 4699987 - DNA, 25 bp, Homo sapien
gctggtaaaaatacctgcctgaggc

SEQ ID NO: 4699988 - DNA, 25 bp, Homo sapien
cacagtgcaagagtattcggctggt

SEQ ID NO: 4699989 - DNA, 25 bp, Homo sapien
gatgaacacgaagagtgcacagtgc

SEQ ID NO: 4699990 - DNA, 25 bp, Homo sapien
ggcacagtgccatgcacctatggtc

SEQ ID NO: 4699991 - DNA, 25 bp, Homo sapien
cagctgtatgcattcagacagtgcc

SEQ ID NO: 4699992 - DNA, 25 bp, Homo sapien
aagtgacaacgatagctaacattta

SEQ ID NO: 4699993 - DNA, 25 bp, Homo sapien
tttgcagatgtgagaactgaggctc

SEQ ID NO: 4699994 - DNA, 25 bp, Homo sapien
cgggtgttcttaccacgatgctacg

SEQ ID NO: 4699995 - DNA, 25 bp, Homo sapien
aactcctgcgatgcccaaagatgcg

SEQ ID NO: 4699996 - DNA, 25 bp, Homo sapien
ccgccagcgctgttttgtcttttaa

SEQ ID NO: 4699997 - DNA, 25 bp, Homo sapien
taatattttgccctgacgacaagag

SEQ ID NO: 4699998 - DNA, 25 bp, Homo sapien
gacgacaagagctgtatgtgctcat

SEQ ID NO: 4699999 - DNA, 25 bp, Homo sapien
agtccaaccgccagcgctgttttgt

SEQ ID NO: 4700000 - DNA, 25 bp, Homo sapien
aaggatggaaaaatcgatgcccgca

SEQ ID NO: 4700001 - DNA, 25 bp, Homo sapien
cagggctgtgttcattgatccgaag

SEQ ID NO: 4700002 - DNA, 25 bp, Homo sapien
atcgatgcccgcagaagcacaggtg

SEQ ID NO: 4700003 - DNA, 25 bp, Homo sapien
ttccttttcctcaggcgcttctctg

SEQ ID NO: 4700004 - DNA, 25 bp, Homo sapien
cccttgcctgcgtatgtggtgctca

SEQ ID NO: 4700005 - DNA, 25 bp, Homo sapien
cccagggcctgatgtttgtccagat

SEQ ID NO: 4700006 - DNA, 25 bp, Homo sapien
tagtggctctacatgctgactcttg

SEQ ID NO: 4700007 - DNA, 25 bp, Homo sapien
gcagtgtttcagtgaaccttaacca

SEQ ID NO: 4700008 - DNA, 25 bp, Homo sapien
agaatccaaccagagcccgcagttt

SEQ ID NO: 4700009 - DNA, 25 bp, Homo sapien
cattgtgaaccggaggagccttctc

SEQ ID NO: 4700010 - DNA, 25 bp, Homo sapien
cggaggagccttctcgcccagggca

SEQ ID NO: 4700011 - DNA, 25 bp, Homo sapien
gcagtttgtcattgcgcacattgtg

SEQ ID NO: 4700012 - DNA, 25 bp, Homo sapien
gatcctgttgtgagtggctgtctct

SEQ ID NO: 4700013 - DNA, 25 bp, Homo sapien
ggcagcactagacccaggcatggag

SEQ ID NO: 4700014 - DNA, 25 bp, Homo sapien
aggctcagtcacctccaagggtgca

SEQ ID NO: 4700015 - DNA, 25 bp, Homo sapien
cccctcagatcctgttgtgagtggc

SEQ ID NO: 4700016 - DNA, 25 bp, Homo sapien
ggcactttatacaggttcacgtgtt

SEQ ID NO: 4700017 - DNA, 25 bp, Homo sapien
gcagcagatcccaggcatggccggt

SEQ ID NO: 4700018 - DNA, 25 bp, Homo sapien
aagggcggctacagagacatgaagc

SEQ ID NO: 4700019 - DNA, 25 bp, Homo sapien
atgaagccacttatcccggatccca

SEQ ID NO: 4700020 - DNA, 25 bp, Homo sapien
ctaaagagcagagactcttatgttc

SEQ ID NO: 4700021 - DNA, 25 bp, Homo sapien
ctctaaagagcagagactcttatgt

SEQ ID NO: 4700022 - DNA, 25 bp, Homo sapien
gtgtgggtcaccatatctggctcta

SEQ ID NO: 4700023 - DNA, 25 bp, Homo sapien
aaagagcagagactcttatgttcat

SEQ ID NO: 4700024 - DNA, 25 bp, Homo sapien
tgtcccttgacctctaagacagctt

SEQ ID NO: 4700025 - DNA, 25 bp, Homo sapien
catcgtcatcaactcctgtcccttg

SEQ ID NO: 4700026 - DNA, 25 bp, Homo sapien
ctttcacagccttcaccatcgtcat

SEQ ID NO: 4700027 - DNA, 25 bp, Homo sapien
gacagctttcaaacccgctcttctc

SEQ ID NO: 4700028 - DNA, 25 bp, Homo sapien
ggtcccacataaacggagctgtcgt

SEQ ID NO: 4700029 - DNA, 25 bp, Homo sapien
agcatagctgggcaagcagtaggtc

SEQ ID NO: 4700030 - DNA, 25 bp, Homo sapien
tcgttgttggtgtcacaccatctcc

SEQ ID NO: 4700031 - DNA, 25 bp, Homo sapien
gagctgtcgttgttggtgtcacacc

SEQ ID NO: 4700032 - DNA, 25 bp, Homo sapien
tgctggccgcgttacacaaactgcc

SEQ ID NO: 4700033 - DNA, 25 bp, Homo sapien
cggacagtcaagctcaactcatgga

SEQ ID NO: 4700034 - DNA, 25 bp, Homo sapien
catgggccataggaatgccgtggtc

SEQ ID NO: 4700035 - DNA, 25 bp, Homo sapien
caagtacctgctagaggtggctcca

SEQ ID NO: 4700036 - DNA, 25 bp, Homo sapien
tcgtgcctaaccacgcacaagtgga

SEQ ID NO: 4700037 - DNA, 25 bp, Homo sapien
ggttcaaaccctgtcggcctgattg

SEQ ID NO: 4700038 - DNA, 25 bp, Homo sapien
gcctgattgcaaaggccctgtcgcc

SEQ ID NO: 4700039 - DNA, 25 bp, Homo sapien
tggatttggtcctggaagcacacac

SEQ ID NO: 4700040 - DNA, 25 bp, Homo sapien
catcatcacaatgaccgggggtggg

SEQ ID NO: 4700041 - DNA, 25 bp, Homo sapien
aaccatcatcacaatgaccgggggt

SEQ ID NO: 4700042 - DNA, 25 bp, Homo sapien
gcattaactcggggacccctgacca

SEQ ID NO: 4700043 - DNA, 25 bp, Homo sapien
tctgccaaggaattcactggcatta

SEQ ID NO: 4700044 - DNA, 25 bp, Homo sapien
cactagaggctgaggttacgtggat

SEQ ID NO: 4700045 - DNA, 25 bp, Homo sapien
ccaaccctgaatgtgctaattaccc

SEQ ID NO: 4700046 - DNA, 25 bp, Homo sapien
tcctccttggcatgggcgctacacg

SEQ ID NO: 4700047 - DNA, 25 bp, Homo sapien
aaaaataggacgctgcactagaggc

SEQ ID NO: 4700048 - DNA, 25 bp, Homo sapien
cactgcgccggtggagatttcattt

SEQ ID NO: 4700049 - DNA, 25 bp, Homo sapien
aaagcctcggagtgccatggtcaga

SEQ ID NO: 4700050 - DNA, 25 bp, Homo sapien
ctctttgcatcagccgagggtccct

SEQ ID NO: 4700051 - DNA, 25 bp, Homo sapien
catttcttggagataaaagcctcgg

SEQ ID NO: 4700052 - DNA, 25 bp, Homo sapien
ttccagggttcaagcaattctcctg

SEQ ID NO: 4700053 - DNA, 25 bp, Homo sapien
ctgttgcccagttggagtgtggtgg

SEQ ID NO: 4700054 - DNA, 25 bp, Homo sapien
atctctgctcactgcaacctctgct

SEQ ID NO: 4700055 - DNA, 25 bp, Homo sapien
tgcccagttggagtgtggtggtgcg

SEQ ID NO: 4700056 - DNA, 25 bp, Homo sapien
gagagatgaagattgcccagagtcc

SEQ ID NO: 4700057 - DNA, 25 bp, Homo sapien
gaatagagccttatccccaaagaca

SEQ ID NO: 4700058 - DNA, 25 bp, Homo sapien
ctctggtcctatgaagcaggtgcaa

SEQ ID NO: 4700059 - DNA, 25 bp, Homo sapien
tacacaaggtagcagactttctggg

SEQ ID NO: 4700060 - DNA, 25 bp, Homo sapien
ttgctgggcctcacggaaccttccg

SEQ ID NO: 4700061 - DNA, 25 bp, Homo sapien
ggagtctcctcctcggatactctga

SEQ ID NO: 4700062 - DNA, 25 bp, Homo sapien
gtctcgcggactgctcctaactggg

SEQ ID NO: 4700063 - DNA, 25 bp, Homo sapien
gcactgttaccaactgtctcgcgga

SEQ ID NO: 4700064 - DNA, 25 bp, Homo sapien
gagcgggcttcacccgcctgcaaag

SEQ ID NO: 4700065 - DNA, 25 bp, Homo sapien
aattaccgccgtattaatattcatg

SEQ ID NO: 4700066 - DNA, 25 bp, Homo sapien
atcctgctgcgtccctgcattttaa

SEQ ID NO: 4700067 - DNA, 25 bp, Homo sapien
atattcatgagccgggactcgaggg

SEQ ID NO: 4700068 - DNA, 25 bp, Homo sapien
gaaagctctcttaggtaacacgtgg

SEQ ID NO: 4700069 - DNA, 25 bp, Homo sapien
tgtaattccgggtggctgtacgacc

SEQ ID NO: 4700070 - DNA, 25 bp, Homo sapien
gatttgctgagcgtctgccaactgg

SEQ ID NO: 4700071 - DNA, 25 bp, Homo sapien
aattcgccccgtgagtctaggaaga

SEQ ID NO: 4700072 - DNA, 25 bp, Homo sapien
actgcgatggttgtgctctcctttg

SEQ ID NO: 4700073 - DNA, 25 bp, Homo sapien
cccatgggcttccaactgcgatggt

SEQ ID NO: 4700074 - DNA, 25 bp, Homo sapien
tacggtaattatattgttactgcgc

SEQ ID NO: 4700075 - DNA, 25 bp, Homo sapien
tcctgggggactgcatacggtaatt

SEQ ID NO: 4700076 - DNA, 25 bp, Homo sapien
tccgggtccaagcaacaactgggag

SEQ ID NO: 4700077 - DNA, 25 bp, Homo sapien
gcaaggttctttcagtgttagccca

SEQ ID NO: 4700078 - DNA, 25 bp, Homo sapien
gatgtgagcttaagcctctggccca

SEQ ID NO: 4700079 - DNA, 25 bp, Homo sapien
gcatgaagatggagcctggagcact

SEQ ID NO: 4700080 - DNA, 25 bp, Homo sapien
ttattcgcctgtggtcactgtggac

SEQ ID NO: 4700081 - DNA, 25 bp, Homo sapien
aaggctcagcactaagtgtcccagg

SEQ ID NO: 4700082 - DNA, 25 bp, Homo sapien
catgtgttcatacccatgagcatgg

SEQ ID NO: 4700083 - DNA, 25 bp, Homo sapien
caagttctctcaacaagctgggcag

SEQ ID NO: 4700084 - DNA, 25 bp, Homo sapien
atgtctattgtatgctcactgtgtc

SEQ ID NO: 4700085 - DNA, 25 bp, Homo sapien
tgtctattgtatgctcactgtgtcc

SEQ ID NO: 4700086 - DNA, 25 bp, Homo sapien
taatgtctattgtatgctcactgtg

SEQ ID NO: 4700087 - DNA, 25 bp, Homo sapien
accacagcagctaatgtctattgta

SEQ ID NO: 4700088 - DNA, 25 bp, Homo sapien
cactgaagtttcgtaagtcagatgc

SEQ ID NO: 4700089 - DNA, 25 bp, Homo sapien
gtaagtcagatgcatctgcactggg

SEQ ID NO: 4700090 - DNA, 25 bp, Homo sapien
gacaggctgggtcagtgctgttcac

SEQ ID NO: 4700091 - DNA, 25 bp, Homo sapien
aggtgtcactgaagtttcgtaagtc

SEQ ID NO: 4700092 - DNA, 25 bp, Homo sapien
aaggacagcccaatgcggcggagcc

SEQ ID NO: 4700093 - DNA, 25 bp, Homo sapien
acagtggttagagcacaggtcagac

SEQ ID NO: 4700094 - DNA, 25 bp, Homo sapien
cccaagcggctttcaggcgctggag

SEQ ID NO: 4700095 - DNA, 25 bp, Homo sapien
caggtcagacaactacgtcttcggc

SEQ ID NO: 4700096 - DNA, 25 bp, Homo sapien
tctgagtccttctccctcgcctcct

SEQ ID NO: 4700097 - DNA, 25 bp, Homo sapien
tctctgagtccttctccctcgcctc

SEQ ID NO: 4700098 - DNA, 25 bp, Homo sapien
tttctctgagtccttctccctcgcc

SEQ ID NO: 4700099 - DNA, 25 bp, Homo sapien
ctgagtccttctccctcgcctcctt

SEQ ID NO: 4700100 - DNA, 25 bp, Homo sapien
tggaagattccggcatgtcccacca

SEQ ID NO: 4700101 - DNA, 25 bp, Homo sapien
atgtcccaccatgtcacatgtggtt

SEQ ID NO: 4700102 - DNA, 25 bp, Homo sapien
catgtcccaccatgtcacatgtggt

SEQ ID NO: 4700103 - DNA, 25 bp, Homo sapien
ggaagattccggcatgtcccaccat

SEQ ID NO: 4700104 - DNA, 25 bp, Homo sapien
gacacagctgcttaagtttctctag

SEQ ID NO: 4700105 - DNA, 25 bp, Homo sapien
tagttcttctagattaccctgttct

SEQ ID NO: 4700106 - DNA, 25 bp, Homo sapien
cccactgtttgacctgacacagctg

SEQ ID NO: 4700107 - DNA, 25 bp, Homo sapien
gttctcccactttgagaccttctta

SEQ ID NO: 4700108 - DNA, 25 bp, Homo sapien
acacaactggctgcccaccggctgg

SEQ ID NO: 4700109 - DNA, 25 bp, Homo sapien
gctgttgctcctacttgcttccaaa

SEQ ID NO: 4700110 - DNA, 25 bp, Homo sapien
tcctcctcccggaacacaactggct

SEQ ID NO: 4700111 - DNA, 25 bp, Homo sapien
tgagccagcaaaccttcgctgttgc

SEQ ID NO: 4700112 - DNA, 25 bp, Homo sapien
gaatgggcggtgagcatcctccttc

SEQ ID NO: 4700113 - DNA, 25 bp, Homo sapien
cgatggatctgccagtgtcagtccc

SEQ ID NO: 4700114 - DNA, 25 bp, Homo sapien
cagaagtgttcaggcgtggactcgc

SEQ ID NO: 4700115 - DNA, 25 bp, Homo sapien
aaatgactcaggctgggctctgtgg

SEQ ID NO: 4700116 - DNA, 25 bp, Homo sapien
cacaacattgcacggtctaaagaca

SEQ ID NO: 4700117 - DNA, 25 bp, Homo sapien
ttgtctgcagttgccgacgaggcct

SEQ ID NO: 4700118 - DNA, 25 bp, Homo sapien
caggctcaccagtgcaatgggaggc

SEQ ID NO: 4700119 - DNA, 25 bp, Homo sapien
tcagactaacaggagcacaacattg

SEQ ID NO: 4700120 - DNA, 25 bp, Homo sapien
catagcccacaaccgaacaaagtct

SEQ ID NO: 4700121 - DNA, 25 bp, Homo sapien
tgcaggcactgtccgaggggttggg

SEQ ID NO: 4700122 - DNA, 25 bp, Homo sapien
ggcatagcccacaaccgaacaaagt

SEQ ID NO: 4700123 - DNA, 25 bp, Homo sapien
gggggcatagcccacaaccgaacaa

SEQ ID NO: 4700124 - DNA, 25 bp, Homo sapien
tccatgaagatgcaatgaggcaacg

SEQ ID NO: 4700125 - DNA, 25 bp, Homo sapien
gaaccaagggctggtatagctcagg

SEQ ID NO: 4700126 - DNA, 25 bp, Homo sapien
catttcacaggctggagaaccaagg

SEQ ID NO: 4700127 - DNA, 25 bp, Homo sapien
aataacaataatagagcgccaccag

SEQ ID NO: 4700128 - DNA, 25 bp, Homo sapien
acaatcattgtagattcctgtacag

SEQ ID NO: 4700129 - DNA, 25 bp, Homo sapien
ctcgcagaactactgggcgccatca

SEQ ID NO: 4700130 - DNA, 25 bp, Homo sapien
caatggtaacatctcgcagaactac

SEQ ID NO: 4700131 - DNA, 25 bp, Homo sapien
ggccatgtgcctagagtggccttaa

SEQ ID NO: 4700132 - DNA, 25 bp, Homo sapien
caaggtcacatgtagggaagggcca

SEQ ID NO: 4700133 - DNA, 25 bp, Homo sapien
tcttgttcaaccacacggaatggga

SEQ ID NO: 4700134 - DNA, 25 bp, Homo sapien
gcaagaagtacagtccacagtggag

SEQ ID NO: 4700135 - DNA, 25 bp, Homo sapien
tcatcagcctggaagaccctaaagg

SEQ ID NO: 4700136 - DNA, 25 bp, Homo sapien
tgtctaggatggagatgagactcct

SEQ ID NO: 4700137 - DNA, 25 bp, Homo sapien
ggagatgcccttcttctctaggtaa

SEQ ID NO: 4700138 - DNA, 25 bp, Homo sapien
ttagctcaatcatcccttctctggg

SEQ ID NO: 4700139 - DNA, 25 bp, Homo sapien
tcatttaaggcaacagtgagggccc

SEQ ID NO: 4700140 - DNA, 25 bp, Homo sapien
ggtggcagggtttcagacaaaaggc

SEQ ID NO: 4700141 - DNA, 25 bp, Homo sapien
cataattgcactgtgggtggtggca

SEQ ID NO: 4700142 - DNA, 25 bp, Homo sapien
catgcatgcacgtgtttaaaaggcc

SEQ ID NO: 4700143 - DNA, 25 bp, Homo sapien
ctgatttgaatcgattttgtacgtg

SEQ ID NO: 4700144 - DNA, 25 bp, Homo sapien
accttccgggttcaatcaatctgca

SEQ ID NO: 4700145 - DNA, 25 bp, Homo sapien
cacaattaaaccttacggatgcttt

SEQ ID NO: 4700146 - DNA, 25 bp, Homo sapien
tggcgagatcacaattcactgtagc

SEQ ID NO: 4700147 - DNA, 25 bp, Homo sapien
gcacaggttacatcttttgatgaac

SEQ ID NO: 4700148 - DNA, 25 bp, Homo sapien
caaggtggcacgcacatgtaatctc

SEQ ID NO: 4700149 - DNA, 25 bp, Homo sapien
tgtggacctccaacgtcatgccaga

SEQ ID NO: 4700150 - DNA, 25 bp, Homo sapien
gaaaaaccatgcctagagctgagac

SEQ ID NO: 4700151 - DNA, 25 bp, Homo sapien
catatgaaaggactaggcactgcca

SEQ ID NO: 4700152 - DNA, 25 bp, Homo sapien
ggaaaacaacgctgcaaaagactgc

SEQ ID NO: 4700153 - DNA, 25 bp, Homo sapien
gtgggaggagacaattatacatagg

SEQ ID NO: 4700154 - DNA, 25 bp, Homo sapien
gctgcaaaagactgcagacttctca

SEQ ID NO: 4700155 - DNA, 25 bp, Homo sapien
atacataggaaaacaacgctgcaaa

SEQ ID NO: 4700156 - DNA, 25 bp, Homo sapien
aagaaagtcctatttaggcacatca

SEQ ID NO: 4700157 - DNA, 25 bp, Homo sapien
aagaaaattaatctacagattcaga

SEQ ID NO: 4700158 - DNA, 25 bp, Homo sapien
taggcacatcatgggcagactgctg

SEQ ID NO: 4700159 - DNA, 25 bp, Homo sapien
atttaggcacatcatgggcagactg

SEQ ID NO: 4700160 - DNA, 25 bp, Homo sapien
cagggtgccctaaacaacagacact

SEQ ID NO: 4700161 - DNA, 25 bp, Homo sapien
agcaaggtgccatggacagggtgcc

SEQ ID NO: 4700162 - DNA, 25 bp, Homo sapien
tcctggggctatcggagcaaggtgc

SEQ ID NO: 4700163 - DNA, 25 bp, Homo sapien
attcgtttcctggggctatcggagc

SEQ ID NO: 4700164 - DNA, 25 bp, Homo sapien
tagcgttgctgggtttctctgggtc

SEQ ID NO: 4700165 - DNA, 25 bp, Homo sapien
gcaggaggctcaggattccaaatga

SEQ ID NO: 4700166 - DNA, 25 bp, Homo sapien
agttgccctgggtgccaattctcag

SEQ ID NO: 4700167 - DNA, 25 bp, Homo sapien
gcagtgacaagctcaggatggactc

SEQ ID NO: 4700168 - DNA, 25 bp, Homo sapien
ttaaggccaccaggtcacacggagc

SEQ ID NO: 4700169 - DNA, 25 bp, Homo sapien
gggagcttcttaaggccaccaggtc

SEQ ID NO: 4700170 - DNA, 25 bp, Homo sapien
gcttcttaaggccaccaggtcacac

SEQ ID NO: 4700171 - DNA, 25 bp, Homo sapien
gaaaatagatgctctgtgtggccct

SEQ ID NO: 4700172 - DNA, 25 bp, Homo sapien
gcaagaggaaatggatgcaggctgt

SEQ ID NO: 4700173 - DNA, 25 bp, Homo sapien
agcaagaggaaatggatgcaggctg

SEQ ID NO: 4700174 - DNA, 25 bp, Homo sapien
tttgcccatcactgtccaagctggt

SEQ ID NO: 4700175 - DNA, 25 bp, Homo sapien
gaggatggacccattttagccacaa

SEQ ID NO: 4700176 - DNA, 25 bp, Homo sapien
tctccctatcctctgggcagcagtg

SEQ ID NO: 4700177 - DNA, 25 bp, Homo sapien
acaagctaaggaacgcaggtggcct

SEQ ID NO: 4700178 - DNA, 25 bp, Homo sapien
cactatagagtggatgacgcaacct

SEQ ID NO: 4700179 - DNA, 25 bp, Homo sapien
ttcatgcagaaagaggaggtcacag

SEQ ID NO: 4700180 - DNA, 25 bp, Homo sapien
aatttgctcttgtccgtatgggccc

SEQ ID NO: 4700181 - DNA, 25 bp, Homo sapien
gaaacgaggacctttccagggcaga

SEQ ID NO: 4700182 - DNA, 25 bp, Homo sapien
cacgggccgattgccattctgcagg

SEQ ID NO: 4700183 - DNA, 25 bp, Homo sapien
tcatatgctggaaccccaggtctga

SEQ ID NO: 4700184 - DNA, 25 bp, Homo sapien
ccctgagtgggtaactgcctgggca

SEQ ID NO: 4700185 - DNA, 25 bp, Homo sapien
tctattgcttcggagctgcctaggc

SEQ ID NO: 4700186 - DNA, 25 bp, Homo sapien
gttggagtgggcattcgcactcagc

SEQ ID NO: 4700187 - DNA, 25 bp, Homo sapien
ggcgcacacaggagctctctcctaa

SEQ ID NO: 4700188 - DNA, 25 bp, Homo sapien
gaactggtcctacagatgtcctgag

SEQ ID NO: 4700189 - DNA, 25 bp, Homo sapien
gatcacacagtgaccaggtgttgga

SEQ ID NO: 4700190 - DNA, 25 bp, Homo sapien
cctgctgtcggccggcgcgtcccgg

SEQ ID NO: 4700191 - DNA, 25 bp, Homo sapien
cccctgctgtcggccggcgcgtccc

SEQ ID NO: 4700192 - DNA, 25 bp, Homo sapien
ccctgctgtcggccggcgcgtcccg

SEQ ID NO: 4700193 - DNA, 25 bp, Homo sapien
tcccctgctgtcggccggcgcgtcc

SEQ ID NO: 4700194 - DNA, 25 bp, Homo sapien
cggcggagacgccacaagccaaccg

SEQ ID NO: 4700195 - DNA, 25 bp, Homo sapien
gaccacgaccagacgcgacagctcg

SEQ ID NO: 4700196 - DNA, 25 bp, Homo sapien
acaagccaaccgcagctccgccaga

SEQ ID NO: 4700197 - DNA, 25 bp, Homo sapien
agctccgccagaccacgaccagacg

SEQ ID NO: 4700198 - DNA, 25 bp, Homo sapien
cttcgcaccgcctcgcgctactcac

SEQ ID NO: 4700199 - DNA, 25 bp, Homo sapien
ccttcgcaccgcctcgcgctactca

SEQ ID NO: 4700200 - DNA, 25 bp, Homo sapien
ctgggctttgagtgccttgactttc

SEQ ID NO: 4700201 - DNA, 25 bp, Homo sapien
ctcctgtaccccgacccatggactg

SEQ ID NO: 4700202 - DNA, 25 bp, Homo sapien
ggctttgagtgccttgactttcctc

SEQ ID NO: 4700203 - DNA, 25 bp, Homo sapien
ggactgctccgtagtccctgcccag

SEQ ID NO: 4700204 - DNA, 25 bp, Homo sapien
gtgcctgataccaggtgggcattga

SEQ ID NO: 4700205 - DNA, 25 bp, Homo sapien
ttgtacaccattagcccagtgcctg

SEQ ID NO: 4700206 - DNA, 25 bp, Homo sapien
aggctggactccatccgtctcctct

SEQ ID NO: 4700207 - DNA, 25 bp, Homo sapien
gagacattaccttgtacaccattag

SEQ ID NO: 4700208 - DNA, 25 bp, Homo sapien
ccttcaggacagcgatgacagttgg

SEQ ID NO: 4700209 - DNA, 25 bp, Homo sapien
ttcaggacagcgatgacagttgggc

SEQ ID NO: 4700210 - DNA, 25 bp, Homo sapien
acagttgggcggctccgtgctccac

SEQ ID NO: 4700211 - DNA, 25 bp, Homo sapien
acagcgatgacagttgggcggctcc

SEQ ID NO: 4700212 - DNA, 25 bp, Homo sapien
agtggcccgggaagaccgatgcttc

SEQ ID NO: 4700213 - DNA, 25 bp, Homo sapien
acggttgccacggtagaaggagaga

SEQ ID NO: 4700214 - DNA, 25 bp, Homo sapien
gggaagaccgatgcttctgaagact

SEQ ID NO: 4700215 - DNA, 25 bp, Homo sapien
cttctgaagactgctggcggcggtg

SEQ ID NO: 4700216 - DNA, 25 bp, Homo sapien
cacggctctactcaagcaccacgat

SEQ ID NO: 4700217 - DNA, 25 bp, Homo sapien
accacgatcagcaaccgcgactctc

SEQ ID NO: 4700218 - DNA, 25 bp, Homo sapien
caccaaccacggctctactcaagca

SEQ ID NO: 4700219 - DNA, 25 bp, Homo sapien
tctactcaagcaccacgatcagcaa

SEQ ID NO: 4700220 - DNA, 25 bp, Homo sapien
atgccgtccaccgtgggtgggattt

SEQ ID NO: 4700221 - DNA, 25 bp, Homo sapien
ccaagcatgccgtccaccgtgggtg

SEQ ID NO: 4700222 - DNA, 25 bp, Homo sapien
cttggaatagaattgcttctcgtct

SEQ ID NO: 4700223 - DNA, 25 bp, Homo sapien
ttgcttctcgtcttctatcacctcg

SEQ ID NO: 4700224 - DNA, 25 bp, Homo sapien
ctgttgatgtcgatgctggagatgt

SEQ ID NO: 4700225 - DNA, 25 bp, Homo sapien
aaacctctgcagaaacttccgggag

SEQ ID NO: 4700226 - DNA, 25 bp, Homo sapien
ttccgggagctgttgatgtcgatgc

SEQ ID NO: 4700227 - DNA, 25 bp, Homo sapien
tctgcagaaacttccgggagctgtt

SEQ ID NO: 4700228 - DNA, 25 bp, Homo sapien
gagcaagggtttcgtccctggcaaa

SEQ ID NO: 4700229 - DNA, 25 bp, Homo sapien
gaagagaggtttgcccaattcaggc

SEQ ID NO: 4700230 - DNA, 25 bp, Homo sapien
gagtctccaggtaaacaacggcaga

SEQ ID NO: 4700231 - DNA, 25 bp, Homo sapien
taaaaggtggcaccccacatggact

SEQ ID NO: 4700232 - DNA, 25 bp, Homo sapien
tgaaaagcagaggcatataacctat

SEQ ID NO: 4700233 - DNA, 25 bp, Homo sapien
aaaagcagaggcatataacctatca

SEQ ID NO: 4700234 - DNA, 25 bp, Homo sapien
aaagcagaggcatataacctatcag

SEQ ID NO: 4700235 - DNA, 25 bp, Homo sapien
gaaaagcagaggcatataacctatc

SEQ ID NO: 4700236 - DNA, 25 bp, Homo sapien
ccaggaagtcctccgttatgtcgac

SEQ ID NO: 4700237 - DNA, 25 bp, Homo sapien
acctctctgaacagcggcaggagca

SEQ ID NO: 4700238 - DNA, 25 bp, Homo sapien
tatgtcgaccatatccacctctctg

SEQ ID NO: 4700239 - DNA, 25 bp, Homo sapien
caggacgttcctgtcttgttcgggc

SEQ ID NO: 4700240 - DNA, 25 bp, Homo sapien
acccactggatccagatcacgtcgt

SEQ ID NO: 4700241 - DNA, 25 bp, Homo sapien
atcacgtcgtaagagtccggctccg

SEQ ID NO: 4700242 - DNA, 25 bp, Homo sapien
gatccagatcacgtcgtaagagtcc

SEQ ID NO: 4700243 - DNA, 25 bp, Homo sapien
cctggagcccacaacagaagtagtt

SEQ ID NO: 4700244 - DNA, 25 bp, Homo sapien
tggtagcaggtattcaactgaaaca

SEQ ID NO: 4700245 - DNA, 25 bp, Homo sapien
ctttgaatgcagtaagttattggcc

SEQ ID NO: 4700246 - DNA, 25 bp, Homo sapien
gggaatcctcactggcccacttgct

SEQ ID NO: 4700247 - DNA, 25 bp, Homo sapien
aaatctaccttttaggccgagcctg

SEQ ID NO: 4700248 - DNA, 25 bp, Homo sapien
gccatgttgtctttgatgacgatga

SEQ ID NO: 4700249 - DNA, 25 bp, Homo sapien
tgcggaccacgtcaaggtcccggca

SEQ ID NO: 4700250 - DNA, 25 bp, Homo sapien
gctgtccacgtcgtccagaatcacg

SEQ ID NO: 4700251 - DNA, 25 bp, Homo sapien
gcctgcactgcagatgatcctgcgg

SEQ ID NO: 4700252 - DNA, 25 bp, Homo sapien
cagcgtggcgcctggatcttgccca

SEQ ID NO: 4700253 - DNA, 25 bp, Homo sapien
tagtggtgcctcgacactcacgaac

SEQ ID NO: 4700254 - DNA, 25 bp, Homo sapien
tatatttagtggtgcctcgacactc

SEQ ID NO: 4700255 - DNA, 25 bp, Homo sapien
tgagtggacggcagacagctatatt

SEQ ID NO: 4700256 - DNA, 25 bp, Homo sapien
gctgcaggctgttgtaacactttaa

SEQ ID NO: 4700257 - DNA, 25 bp, Homo sapien
gaggcccagggaatcggttactgat

SEQ ID NO: 4700258 - DNA, 25 bp, Homo sapien
ttcaagtccccagcaaccaagttgg

SEQ ID NO: 4700259 - DNA, 25 bp, Homo sapien
agctctgtccctcccctaggtaaag

SEQ ID NO: 4700260 - DNA, 25 bp, Homo sapien
gaaaacaggctgcattaggcataaa

SEQ ID NO: 4700261 - DNA, 25 bp, Homo sapien
tccccatccgaagacgggcttggag

SEQ ID NO: 4700262 - DNA, 25 bp, Homo sapien
cagggctgccttgtgacctaatagg

SEQ ID NO: 4700263 - DNA, 25 bp, Homo sapien
tctgaagccagtgacttggagacca

SEQ ID NO: 4700264 - DNA, 25 bp, Homo sapien
ggcccagttatgtcgccagcgagga

SEQ ID NO: 4700265 - DNA, 25 bp, Homo sapien
ttttaccaggaaggcgtgagcaacg

SEQ ID NO: 4700266 - DNA, 25 bp, Homo sapien
tcaactttgaaggtcagcgagagcc

SEQ ID NO: 4700267 - DNA, 25 bp, Homo sapien
gcaacgccctgctcaagatggctga

SEQ ID NO: 4700268 - DNA, 25 bp, Homo sapien
tccagggactctggtggaaacgtag

SEQ ID NO: 4700269 - DNA, 25 bp, Homo sapien
tggtaatgatgagtctcgccatcca

SEQ ID NO: 4700270 - DNA, 25 bp, Homo sapien
tttccaacacgtggtaatgatgagt

SEQ ID NO: 4700271 - DNA, 25 bp, Homo sapien
gggtcctgcgggtttgaggatggaa

SEQ ID NO: 4700272 - DNA, 25 bp, Homo sapien
taccagccgctggtggatgcgattc

SEQ ID NO: 4700273 - DNA, 25 bp, Homo sapien
cacggcttccggaggatcatcttcg

SEQ ID NO: 4700274 - DNA, 25 bp, Homo sapien
ggcaggagtctctggaccggtaact

SEQ ID NO: 4700275 - DNA, 25 bp, Homo sapien
cggcgatgccgttcctgcacggctt

SEQ ID NO: 4700276 - DNA, 25 bp, Homo sapien
tgaatgcatgggagtaggacacact

SEQ ID NO: 4700277 - DNA, 25 bp, Homo sapien
ggacacactcgagcagagaccacag

SEQ ID NO: 4700278 - DNA, 25 bp, Homo sapien
gagaccacagttgctgccgattggc

SEQ ID NO: 4700279 - DNA, 25 bp, Homo sapien
gaccacagttgctgccgattggcca

SEQ ID NO: 4700280 - DNA, 25 bp, Homo sapien
tctctcctagactctgacaccagag

SEQ ID NO: 4700281 - DNA, 25 bp, Homo sapien
tgtcgcgatgaactgatgagacttg

SEQ ID NO: 4700282 - DNA, 25 bp, Homo sapien
cagccatctctcctagactctgaca

SEQ ID NO: 4700283 - DNA, 25 bp, Homo sapien
cacttcctggggtgtcgcgatgaac

SEQ ID NO: 4700284 - DNA, 25 bp, Homo sapien
cttggaccaagcaccaggaaccacc

SEQ ID NO: 4700285 - DNA, 25 bp, Homo sapien
acctggcagtgtctgtgccggagta

SEQ ID NO: 4700286 - DNA, 25 bp, Homo sapien
ccgcccttggaccaagcaccaggaa

SEQ ID NO: 4700287 - DNA, 25 bp, Homo sapien
ggccccgcccttggaccaagcacca

SEQ ID NO: 4700288 - DNA, 25 bp, Homo sapien
ggattggacatcagtcaccctggca

SEQ ID NO: 4700289 - DNA, 25 bp, Homo sapien
gaatgcaggtgccacggcagaagca

SEQ ID NO: 4700290 - DNA, 25 bp, Homo sapien
ccagctttgaagcaggtagcaaggg

SEQ ID NO: 4700291 - DNA, 25 bp, Homo sapien
aggtgccacggcagaagcaggattg

SEQ ID NO: 4700292 - DNA, 25 bp, Homo sapien
tgcagactgaactcggacaggcttg

SEQ ID NO: 4700293 - DNA, 25 bp, Homo sapien
cgtgaaccccagtgggcctcttgag

SEQ ID NO: 4700294 - DNA, 25 bp, Homo sapien
cctcttgaggagatgctacggtcca

SEQ ID NO: 4700295 - DNA, 25 bp, Homo sapien
gtgcaccgggccgtgaaccccagtg

SEQ ID NO: 4700296 - DNA, 25 bp, Homo sapien
ctgcagccacagacccaagagcctg

SEQ ID NO: 4700297 - DNA, 25 bp, Homo sapien
tcagttgatcagcccctgcagccac

SEQ ID NO: 4700298 - DNA, 25 bp, Homo sapien
agttgatcagcccctgcagccacag

SEQ ID NO: 4700299 - DNA, 25 bp, Homo sapien
gcagccacagacccaagagcctgtt

SEQ ID NO: 4700300 - DNA, 25 bp, Homo sapien
ggagccgctggtgcacgcgctgcgc

SEQ ID NO: 4700301 - DNA, 25 bp, Homo sapien
gcgcgggtcggagcgagagccccgg

SEQ ID NO: 4700302 - DNA, 25 bp, Homo sapien
gccgctcgctccggagccgctggtg

SEQ ID NO: 4700303 - DNA, 25 bp, Homo sapien
gggtcggagcgagagccccggccgc

SEQ ID NO: 4700304 - DNA, 25 bp, Homo sapien
agcgccggcttgtccagggcgaagg

SEQ ID NO: 4700305 - DNA, 25 bp, Homo sapien
ccagcgccggcttgtccagggcgaa

SEQ ID NO: 4700306 - DNA, 25 bp, Homo sapien
cgccggcttgtccagggcgaaggcg

SEQ ID NO: 4700307 - DNA, 25 bp, Homo sapien
gcccagcgccggcttgtccagggcg

SEQ ID NO: 4700308 - DNA, 25 bp, Homo sapien
ggctcccgtgctgcgccctcccgcg

SEQ ID NO: 4700309 - DNA, 25 bp, Homo sapien
tccaggaggtggctcaccgagaagt

SEQ ID NO: 4700310 - DNA, 25 bp, Homo sapien
ggctcaccgagaagttcttgcgcgc

SEQ ID NO: 4700311 - DNA, 25 bp, Homo sapien
ccccggacggctcccgtgctgcgcc

SEQ ID NO: 4700312 - DNA, 25 bp, Homo sapien
agaagtcctgccgccgaccacgcgc

SEQ ID NO: 4700313 - DNA, 25 bp, Homo sapien
cccagaagtcctgccgccgaccacg

SEQ ID NO: 4700314 - DNA, 25 bp, Homo sapien
ctgccgccgaccacgcgccctgcat

SEQ ID NO: 4700315 - DNA, 25 bp, Homo sapien
agtcctgccgccgaccacgcgccct

SEQ ID NO: 4700316 - DNA, 25 bp, Homo sapien
agagacctccaacaccgtgtccggg

SEQ ID NO: 4700317 - DNA, 25 bp, Homo sapien
ggaaacccgccaccagagacctcca

SEQ ID NO: 4700318 - DNA, 25 bp, Homo sapien
tccaacaccgtgtccgggagaagca

SEQ ID NO: 4700319 - DNA, 25 bp, Homo sapien
agacctccaacaccgtgtccgggag

SEQ ID NO: 4700320 - DNA, 25 bp, Homo sapien
gggatgctgaccgccgggcacccca

SEQ ID NO: 4700321 - DNA, 25 bp, Homo sapien
ggatgctgaccgccgggcaccccat

SEQ ID NO: 4700322 - DNA, 25 bp, Homo sapien
ctgcgggatgctgaccgccgggcac

SEQ ID NO: 4700323 - DNA, 25 bp, Homo sapien
gcgggatgctgaccgccgggcaccc

SEQ ID NO: 4700324 - DNA, 25 bp, Homo sapien
ttttatacgggaggcccgcgcagag

SEQ ID NO: 4700325 - DNA, 25 bp, Homo sapien
tcccgctttgattccgaggtttgca

SEQ ID NO: 4700326 - DNA, 25 bp, Homo sapien
ctttcaagacctcggcgttctgcgg

SEQ ID NO: 4700327 - DNA, 25 bp, Homo sapien
aggaggtgcactggctttcaagacc

SEQ ID NO: 4700328 - DNA, 25 bp, Homo sapien
gctcatagtcagaggaacaggcaca

SEQ ID NO: 4700329 - DNA, 25 bp, Homo sapien
ctggctttgctggtgctcatagtca

SEQ ID NO: 4700330 - DNA, 25 bp, Homo sapien
acagggaaatgcttcagcctggctt

SEQ ID NO: 4700331 - DNA, 25 bp, Homo sapien
acaggcacagcggccttcctgtggg

SEQ ID NO: 4700332 - DNA, 25 bp, Homo sapien
tgggcacggggccatcttcgacatc

SEQ ID NO: 4700333 - DNA, 25 bp, Homo sapien
gggccatcttcgacatctccagcat

SEQ ID NO: 4700334 - DNA, 25 bp, Homo sapien
acggggccatcttcgacatctccag

SEQ ID NO: 4700335 - DNA, 25 bp, Homo sapien
tcagagtctgggcacggggccatct

SEQ ID NO: 4700336 - DNA, 25 bp, Homo sapien
gctgctaagggtcccatgtgggaaa

SEQ ID NO: 4700337 - DNA, 25 bp, Homo sapien
gtcccatgtgggaaatgagctcttc

SEQ ID NO: 4700338 - DNA, 25 bp, Homo sapien
ttaaccatttccagaccaggcgaag

SEQ ID NO: 4700339 - DNA, 25 bp, Homo sapien
caggcgaagttgctgctaagggtcc

SEQ ID NO: 4700340 - DNA, 25 bp, Homo sapien
caccaggccctagtgaatgatttct

SEQ ID NO: 4700341 - DNA, 25 bp, Homo sapien
tgatgctaaatcaaagcagccagcc

SEQ ID NO: 4700342 - DNA, 25 bp, Homo sapien
ccagccagaagggaatatatagtgc

SEQ ID NO: 4700343 - DNA, 25 bp, Homo sapien
ccagaagggaatatatagtgcatga

SEQ ID NO: 4700344 - DNA, 25 bp, Homo sapien
aagaatggtggctagtgtggcctcc

SEQ ID NO: 4700345 - DNA, 25 bp, Homo sapien
gtggctgcaagaatggtggctagtg

SEQ ID NO: 4700346 - DNA, 25 bp, Homo sapien
tgcaagaatggtggctagtgtggcc

SEQ ID NO: 4700347 - DNA, 25 bp, Homo sapien
aatggtggctagtgtggcctccgca

SEQ ID NO: 4700348 - DNA, 25 bp, Homo sapien
ggcttaacagtgtatggatcaacaa

SEQ ID NO: 4700349 - DNA, 25 bp, Homo sapien
caagatcctcgtggtgctgggattc

SEQ ID NO: 4700350 - DNA, 25 bp, Homo sapien
gcagggcagcgaggattaaggatgt

SEQ ID NO: 4700351 - DNA, 25 bp, Homo sapien
ttctgggggtctccctggtggctta

SEQ ID NO: 4700352 - DNA, 25 bp, Homo sapien
tgaacgcgcgcctcgctgaggttga

SEQ ID NO: 4700353 - DNA, 25 bp, Homo sapien
tagtgcgtgcgctcgaacacgcgct

SEQ ID NO: 4700354 - DNA, 25 bp, Homo sapien
gggcaagctcctcgcgcacaaaggc

SEQ ID NO: 4700355 - DNA, 25 bp, Homo sapien
ctgttgaacgtggtgcggttccgcc

SEQ ID NO: 4700356 - DNA, 25 bp, Homo sapien
ccacgggaggcccgggactgagcgc

SEQ ID NO: 4700357 - DNA, 25 bp, Homo sapien
acgggaggcccgggactgagcgctc

SEQ ID NO: 4700358 - DNA, 25 bp, Homo sapien
gcgcacgctcccacgggaggcccgg

SEQ ID NO: 4700359 - DNA, 25 bp, Homo sapien
gggaggcccgggactgagcgctcac

SEQ ID NO: 4700360 - DNA, 25 bp, Homo sapien
ctgtagggggacgaggctgtccagg

SEQ ID NO: 4700361 - DNA, 25 bp, Homo sapien
gggagccacgggctgctcgatggcg

SEQ ID NO: 4700362 - DNA, 25 bp, Homo sapien
cacgggctgctcgatggcggcctcc

SEQ ID NO: 4700363 - DNA, 25 bp, Homo sapien
gagagataatctggactcagggcgg

SEQ ID NO: 4700364 - DNA, 25 bp, Homo sapien
agacacaggtcacatgggtgcggtt

SEQ ID NO: 4700365 - DNA, 25 bp, Homo sapien
ttggcttctgggtatcagtgctcga

SEQ ID NO: 4700366 - DNA, 25 bp, Homo sapien
gggtgcggttggcttctgggtatca

SEQ ID NO: 4700367 - DNA, 25 bp, Homo sapien
gggtatcagtgctcgaccccagcct

SEQ ID NO: 4700368 - DNA, 25 bp, Homo sapien
cccagggctgtagggtggcactgtg

SEQ ID NO: 4700369 - DNA, 25 bp, Homo sapien
tgacccctggggttgcggggcctga

SEQ ID NO: 4700370 - DNA, 25 bp, Homo sapien
gagctcccagggctgtagggtggca

SEQ ID NO: 4700371 - DNA, 25 bp, Homo sapien
ctggggttgcggggcctgagctccc

SEQ ID NO: 4700372 - DNA, 25 bp, Homo sapien
aactccttggccttgagacggaggc

SEQ ID NO: 4700373 - DNA, 25 bp, Homo sapien
gaactccttggccttgagacggagg

SEQ ID NO: 4700374 - DNA, 25 bp, Homo sapien
gaaggtcacttcctgggcgtctgcc

SEQ ID NO: 4700375 - DNA, 25 bp, Homo sapien
ccttttctattgctgtccacccagg

SEQ ID NO: 4700376 - DNA, 25 bp, Homo sapien
gctgcagtctctggtggccaaggac

SEQ ID NO: 4700377 - DNA, 25 bp, Homo sapien
ctcaacagcctcgtgggctcgggag

SEQ ID NO: 4700378 - DNA, 25 bp, Homo sapien
ccagtgtcgagtgagaggacaatgc

SEQ ID NO: 4700379 - DNA, 25 bp, Homo sapien
ttagcccagtgtcgagtgagaggac

SEQ ID NO: 4700380 - DNA, 25 bp, Homo sapien
cctctgtgattagcccagtgtcgag

SEQ ID NO: 4700381 - DNA, 25 bp, Homo sapien
gtgagaggacaatgcccagtgaccc

SEQ ID NO: 4700382 - DNA, 25 bp, Homo sapien
tcagccaggaaatgctccttgtgtg

SEQ ID NO: 4700383 - DNA, 25 bp, Homo sapien
gccaggaaatgctccttgtgtgtcc

SEQ ID NO: 4700384 - DNA, 25 bp, Homo sapien
cacatcagcagtgggatgagaggcc

SEQ ID NO: 4700385 - DNA, 25 bp, Homo sapien
gcagatgggttccatcaggggctgc

SEQ ID NO: 4700386 - DNA, 25 bp, Homo sapien
ggacatgtgtctacctcggggcgat

SEQ ID NO: 4700387 - DNA, 25 bp, Homo sapien
agtagccgaaggcttcttccctagg

SEQ ID NO: 4700388 - DNA, 25 bp, Homo sapien
agcatgtgacttgcacgtgaggagt

SEQ ID NO: 4700389 - DNA, 25 bp, Homo sapien
gacttgcacgtgaggagtagccgaa

SEQ ID NO: 4700390 - DNA, 25 bp, Homo sapien
cacatcgggctgttgatttcattgg

SEQ ID NO: 4700391 - DNA, 25 bp, Homo sapien
tgctggctggcctcgccattggctg

SEQ ID NO: 4700392 - DNA, 25 bp, Homo sapien
gcccacatcgggctgttgatttcat

SEQ ID NO: 4700393 - DNA, 25 bp, Homo sapien
gcccaggcccacatcgggctgttga

SEQ ID NO: 4700394 - DNA, 25 bp, Homo sapien
tacacattcttgtggccgctcctgc

SEQ ID NO: 4700395 - DNA, 25 bp, Homo sapien
ccgtgaagagccgaagtggatttca

SEQ ID NO: 4700396 - DNA, 25 bp, Homo sapien
gtgcactgaggaccccgggataaag

SEQ ID NO: 4700397 - DNA, 25 bp, Homo sapien
ttcattgccgttgctgggccagacg

SEQ ID NO: 4700398 - DNA, 25 bp, Homo sapien
accctggctcttggtcttaggactg

SEQ ID NO: 4700399 - DNA, 25 bp, Homo sapien
cattccaatggctgttctgccaggg

SEQ ID NO: 4700400 - DNA, 25 bp, Homo sapien
gcgccatctggggacactccggcat

SEQ ID NO: 4700401 - DNA, 25 bp, Homo sapien
ccggcatcccattccaatggctgtt

SEQ ID NO: 4700402 - DNA, 25 bp, Homo sapien
ttgcctgatgagctcaggcagaggc

SEQ ID NO: 4700403 - DNA, 25 bp, Homo sapien
gcctgatgagctcaggcagaggcgc

SEQ ID NO: 4700404 - DNA, 25 bp, Homo sapien
cattgcctgatgagctcaggcagag

SEQ ID NO: 4700405 - DNA, 25 bp, Homo sapien
tcattgcctgatgagctcaggcaga

SEQ ID NO: 4700406 - DNA, 25 bp, Homo sapien
tccctggatttcaagctggccgtgg

SEQ ID NO: 4700407 - DNA, 25 bp, Homo sapien
cctggatttcaagctggccgtggcc

SEQ ID NO: 4700408 - DNA, 25 bp, Homo sapien
tggatttcaagctggccgtggcctc

SEQ ID NO: 4700409 - DNA, 25 bp, Homo sapien
ctggatttcaagctggccgtggcct

SEQ ID NO: 4700410 - DNA, 25 bp, Homo sapien
gattccaggtatttaggcccacatt

SEQ ID NO: 4700411 - DNA, 25 bp, Homo sapien
ccgagtctgtgctggctgtcgtcct

SEQ ID NO: 4700412 - DNA, 25 bp, Homo sapien
cacgggggtgattccaggtatttag

SEQ ID NO: 4700413 - DNA, 25 bp, Homo sapien
aaattgtccgagtctgtgctggctg

SEQ ID NO: 4700414 - DNA, 25 bp, Homo sapien
ttctctagatgtcattaggtgccag

SEQ ID NO: 4700415 - DNA, 25 bp, Homo sapien
agagctcttgcaggaccacgttgaa

SEQ ID NO: 4700416 - DNA, 25 bp, Homo sapien
tctagatgtcattaggtgccagagc

SEQ ID NO: 4700417 - DNA, 25 bp, Homo sapien
tctctagatgtcattaggtgccaga

SEQ ID NO: 4700418 - DNA, 25 bp, Homo sapien
tcctcgaagcccgcagaagccactg

SEQ ID NO: 4700419 - DNA, 25 bp, Homo sapien
gaagcccgcagaagccactgagcca

SEQ ID NO: 4700420 - DNA, 25 bp, Homo sapien
ccgctcctcgaagcccgcagaagcc

SEQ ID NO: 4700421 - DNA, 25 bp, Homo sapien
tcgaagcccgcagaagccactgagc

SEQ ID NO: 4700422 - DNA, 25 bp, Homo sapien
cgaagcgttgagcggccgctcctcg

SEQ ID NO: 4700423 - DNA, 25 bp, Homo sapien
cattgtaggacaggtagccggtgat

SEQ ID NO: 4700424 - DNA, 25 bp, Homo sapien
ctaggcccacggtgatgggctcgaa

SEQ ID NO: 4700425 - DNA, 25 bp, Homo sapien
tcggcgaagcggcagtagatgtcat

SEQ ID NO: 4700426 - DNA, 25 bp, Homo sapien
gcactttcttagctggccaaagcaa

SEQ ID NO: 4700427 - DNA, 25 bp, Homo sapien
tagggccgaggcagtcaaacgatgc

SEQ ID NO: 4700428 - DNA, 25 bp, Homo sapien
gagatgaaccatcgcttgactgagc

SEQ ID NO: 4700429 - DNA, 25 bp, Homo sapien
caagaagcacagattatccagggac

SEQ ID NO: 4700430 - DNA, 25 bp, Homo sapien
tcagcgccttgaaaatcacttccgt

SEQ ID NO: 4700431 - DNA, 25 bp, Homo sapien
gtgccagcccagccgtgtaaggaaa

SEQ ID NO: 4700432 - DNA, 25 bp, Homo sapien
aaatcacttccgtggctagatgctg

SEQ ID NO: 4700433 - DNA, 25 bp, Homo sapien
cagcccagccgtgtaaggaaagggt

SEQ ID NO: 4700434 - DNA, 25 bp, Homo sapien
tatcttctgctcatgagggaagtgc

SEQ ID NO: 4700435 - DNA, 25 bp, Homo sapien
aacaggtggacaaagttactcttca

SEQ ID NO: 4700436 - DNA, 25 bp, Homo sapien
tcagaccttttgggtgaagattttc

SEQ ID NO: 4700437 - DNA, 25 bp, Homo sapien
cagagtcgatacaaacaggtggaca

SEQ ID NO: 4700438 - DNA, 25 bp, Homo sapien
cctgcagacgagataatagcgggtt

SEQ ID NO: 4700439 - DNA, 25 bp, Homo sapien
actggcctgcagacgagataatagc

SEQ ID NO: 4700440 - DNA, 25 bp, Homo sapien
cggaccagtccgactggcctgcaga

SEQ ID NO: 4700441 - DNA, 25 bp, Homo sapien
gacgagataatagcgggttctcttg

SEQ ID NO: 4700442 - DNA, 25 bp, Homo sapien
agccgggggctacagcaacacaaag

SEQ ID NO: 4700443 - DNA, 25 bp, Homo sapien
gcagaggccagagttagtgagcagg

SEQ ID NO: 4700444 - DNA, 25 bp, Homo sapien
tgtgccttaactcagtggagccggg

SEQ ID NO: 4700445 - DNA, 25 bp, Homo sapien
ctggactaagtgtgccttaactcag

SEQ ID NO: 4700446 - DNA, 25 bp, Homo sapien
ttggaaccaagtaagagaaatgttg

SEQ ID NO: 4700447 - DNA, 25 bp, Homo sapien
tgttgtaggagagctttgtaactac

SEQ ID NO: 4700448 - DNA, 25 bp, Homo sapien
accaagtaagagaaatgttgtagga

SEQ ID NO: 4700449 - DNA, 25 bp, Homo sapien
cttggctccccatcttttaatggaa

SEQ ID NO: 4700450 - DNA, 25 bp, Homo sapien
tgaatgaagccacaccggagcaaat

SEQ ID NO: 4700451 - DNA, 25 bp, Homo sapien
aggtgggcagcattgaatgaagcca

SEQ ID NO: 4700452 - DNA, 25 bp, Homo sapien
ttgaagactgactgccccttctcac

SEQ ID NO: 4700453 - DNA, 25 bp, Homo sapien
gccacaccggagcaaatccttgaag

SEQ ID NO: 4700454 - DNA, 25 bp, Homo sapien
tgttgggcaaacacttctacttcct

SEQ ID NO: 4700455 - DNA, 25 bp, Homo sapien
gagaaacagtctcaaggttcagttc

SEQ ID NO: 4700456 - DNA, 25 bp, Homo sapien
taaatgagaactaaccctcctagac

SEQ ID NO: 4700457 - DNA, 25 bp, Homo sapien
catggttcattgtaggctcagcctc

SEQ ID NO: 4700458 - DNA, 25 bp, Homo sapien
cattaccgcggatccacttctgtaa

SEQ ID NO: 4700459 - DNA, 25 bp, Homo sapien
aacagagttcgcacatgcactcaca

SEQ ID NO: 4700460 - DNA, 25 bp, Homo sapien
cacatgcactcacattaccgcggat

SEQ ID NO: 4700461 - DNA, 25 bp, Homo sapien
caaatatgaaaacagagttcgcaca

SEQ ID NO: 4700462 - DNA, 25 bp, Homo sapien
tggctttgcggtaagacactccgtc

SEQ ID NO: 4700463 - DNA, 25 bp, Homo sapien
tgatcccggggtgcaatttatccat

SEQ ID NO: 4700464 - DNA, 25 bp, Homo sapien
aacggcttgattgcgtcaatgatcc

SEQ ID NO: 4700465 - DNA, 25 bp, Homo sapien
gtcaacctgctcgtagtagtctaga

SEQ ID NO: 4700466 - DNA, 25 bp, Homo sapien
taaagcagtaggtaagtgccttgtg

SEQ ID NO: 4700467 - DNA, 25 bp, Homo sapien
cccacactgtgtgccatgctgagac

SEQ ID NO: 4700468 - DNA, 25 bp, Homo sapien
gaatgaagggcttgtgtgccccaaa

SEQ ID NO: 4700469 - DNA, 25 bp, Homo sapien
caggcactttcgtcctggtaaacaa

SEQ ID NO: 4700470 - DNA, 25 bp, Homo sapien
tagttataaggtccccgcctgcatt

SEQ ID NO: 4700471 - DNA, 25 bp, Homo sapien
cttccggcccgccaaaagtcaagag

SEQ ID NO: 4700472 - DNA, 25 bp, Homo sapien
caagagccgtcttagttataaggtc

SEQ ID NO: 4700473 - DNA, 25 bp, Homo sapien
tattattgaagactccgacagacag

SEQ ID NO: 4700474 - DNA, 25 bp, Homo sapien
tcagtggaaatccagccgcgactgc

SEQ ID NO: 4700475 - DNA, 25 bp, Homo sapien
tccagccgcgactgcacagtcttgc

SEQ ID NO: 4700476 - DNA, 25 bp, Homo sapien
ttgtctgagtagattttctcgtctc

SEQ ID NO: 4700477 - DNA, 25 bp, Homo sapien
tctgagtagattttctcgtctctgg

SEQ ID NO: 4700478 - DNA, 25 bp, Homo sapien
tagattctatatcccagctgggcac

SEQ ID NO: 4700479 - DNA, 25 bp, Homo sapien
gattcacgtgttttccacaatcaac

SEQ ID NO: 4700480 - DNA, 25 bp, Homo sapien
caaatgcgcgcaatagattcacgtg

SEQ ID NO: 4700481 - DNA, 25 bp, Homo sapien
caaaagtctaaggtgcaaacaggca

SEQ ID NO: 4700482 - DNA, 25 bp, Homo sapien
acttctgtctcggtcagtacattaa

SEQ ID NO: 4700483 - DNA, 25 bp, Homo sapien
aggtacttctgtctcggtcagtaca

SEQ ID NO: 4700484 - DNA, 25 bp, Homo sapien
tgtctcggtcagtacattaagtgtg

SEQ ID NO: 4700485 - DNA, 25 bp, Homo sapien
ttcaggtacttctgtctcggtcagt

SEQ ID NO: 4700486 - DNA, 25 bp, Homo sapien
cctggactcctttagttgtgaccgt

SEQ ID NO: 4700487 - DNA, 25 bp, Homo sapien
ttgtgaccgtagcttctgaggcgcg

SEQ ID NO: 4700488 - DNA, 25 bp, Homo sapien
gtaaagaacgagacagagcaaaagg

SEQ ID NO: 4700489 - DNA, 25 bp, Homo sapien
ctgtgtaaagaacgagacagagcaa

SEQ ID NO: 4700490 - DNA, 25 bp, Homo sapien
aagctaagtctcacgtcccagggat

SEQ ID NO: 4700491 - DNA, 25 bp, Homo sapien
ccagctgagacggtgaaggattcca

SEQ ID NO: 4700492 - DNA, 25 bp, Homo sapien
tcagatcaagagtgctcggcgggca

SEQ ID NO: 4700493 - DNA, 25 bp, Homo sapien
tagactgaccttgtttgatccacgg

SEQ ID NO: 4700494 - DNA, 25 bp, Homo sapien
cagtttcaatggttaggtttcctca

SEQ ID NO: 4700495 - DNA, 25 bp, Homo sapien
cctgtcccggatatggtgagtctca

SEQ ID NO: 4700496 - DNA, 25 bp, Homo sapien
tcagtaggtcaataaagctctcgtc

SEQ ID NO: 4700497 - DNA, 25 bp, Homo sapien
tattgcttctgtatcgcgctgactg

SEQ ID NO: 4700498 - DNA, 25 bp, Homo sapien
cagcctgctatgtccctgggagtca

SEQ ID NO: 4700499 - DNA, 25 bp, Homo sapien
tctagtaggcacagaagacgagttt

SEQ ID NO: 4700500 - DNA, 25 bp, Homo sapien
gagtttgtggcctcgactgcaggtc

SEQ ID NO: 4700501 - DNA, 25 bp, Homo sapien
gggcacctaaagatggctccaagcg

SEQ ID NO: 4700502 - DNA, 25 bp, Homo sapien
tctgaggatgctgagaacggtgtct

SEQ ID NO: 4700503 - DNA, 25 bp, Homo sapien
tactggaaatgagcccaagcacaca

SEQ ID NO: 4700504 - DNA, 25 bp, Homo sapien
ttttcaccttagcaacaatgggagc

SEQ ID NO: 4700505 - DNA, 25 bp, Homo sapien
gacaagtaggtaagaggacgccttc

SEQ ID NO: 4700506 - DNA, 25 bp, Homo sapien
agattattactacgatgattgacag

SEQ ID NO: 4700507 - DNA, 25 bp, Homo sapien
tgacagtcatgattggcagccggag

SEQ ID NO: 4700508 - DNA, 25 bp, Homo sapien
accacgggcgaggacgtgaagcctc

SEQ ID NO: 4700509 - DNA, 25 bp, Homo sapien
actgcctggagttggaaaagaaaca

SEQ ID NO: 4700510 - DNA, 25 bp, Homo sapien
ttaagtcataccttgggaggcctcc

SEQ ID NO: 4700511 - DNA, 25 bp, Homo sapien
tcagtagaagacacgcatgggctcg

SEQ ID NO: 4700512 - DNA, 25 bp, Homo sapien
gacggagccccagaattacatggca

SEQ ID NO: 4700513 - DNA, 25 bp, Homo sapien
ttcccaaatacagaggcgtggctgg

SEQ ID NO: 4700514 - DNA, 25 bp, Homo sapien
tcgaacggttgagagagatgcctcc

SEQ ID NO: 4700515 - DNA, 25 bp, Homo sapien
tcccggtgggtctaggcacaaggtc

SEQ ID NO: 4700516 - DNA, 25 bp, Homo sapien
gctgggatgccctcgaaggtgcctt

SEQ ID NO: 4700517 - DNA, 25 bp, Homo sapien
tctgcggacgcagaaattgaggctc

SEQ ID NO: 4700518 - DNA, 25 bp, Homo sapien
ccgccgccgcctgtcagtcaagcgc

SEQ ID NO: 4700519 - DNA, 25 bp, Homo sapien
gccgccgcctgtcagtcaagcgcgc

SEQ ID NO: 4700520 - DNA, 25 bp, Homo sapien
gccgcctgtcagtcaagcgcgcccc

SEQ ID NO: 4700521 - DNA, 25 bp, Homo sapien
agcgcgccccctctgaggcgacgcg

SEQ ID NO: 4700522 - DNA, 25 bp, Homo sapien
gcagccggtggcggcccggaactca

SEQ ID NO: 4700523 - DNA, 25 bp, Homo sapien
ccggcccacagaagcagccggtggc

SEQ ID NO: 4700524 - DNA, 25 bp, Homo sapien
ggccctgtcagcccggagccgggct

SEQ ID NO: 4700525 - DNA, 25 bp, Homo sapien
gggtcgccaatgctcagaggcccgg

SEQ ID NO: 4700526 - DNA, 25 bp, Homo sapien
cagggactccgtatccagtgagtgc

SEQ ID NO: 4700527 - DNA, 25 bp, Homo sapien
gggctgcttgatgggcagattcaga

SEQ ID NO: 4700528 - DNA, 25 bp, Homo sapien
cgtgagagctgcagacgttgacccc

SEQ ID NO: 4700529 - DNA, 25 bp, Homo sapien
ctggtggatgggctgcttgatgggc

SEQ ID NO: 4700530 - DNA, 25 bp, Homo sapien
gccctttccttagtagtgtccagta

SEQ ID NO: 4700531 - DNA, 25 bp, Homo sapien
gttatcactgggtcctctggcctca

SEQ ID NO: 4700532 - DNA, 25 bp, Homo sapien
ggagcagctcatctgtaccctggga

SEQ ID NO: 4700533 - DNA, 25 bp, Homo sapien
tcaattagatctgccacagcacagg

SEQ ID NO: 4700534 - DNA, 25 bp, Homo sapien
gtgggagcagggagcgggttttctg

SEQ ID NO: 4700535 - DNA, 25 bp, Homo sapien
agcgggttttctggaacaggcagcc

SEQ ID NO: 4700536 - DNA, 25 bp, Homo sapien
cagggagcgggttttctggaacagg

SEQ ID NO: 4700537 - DNA, 25 bp, Homo sapien
gagcagggagcgggttttctggaac

SEQ ID NO: 4700538 - DNA, 25 bp, Homo sapien
ctctgggtgacacgaagcccacagg

SEQ ID NO: 4700539 - DNA, 25 bp, Homo sapien
ctttgttgacagctgacagcgacgg

SEQ ID NO: 4700540 - DNA, 25 bp, Homo sapien
agcccacaggaagcggccagcattc

SEQ ID NO: 4700541 - DNA, 25 bp, Homo sapien
ggccagcattcgcatcctttgttga

SEQ ID NO: 4700542 - DNA, 25 bp, Homo sapien
ccccctgcggagtgaggtttgaaca

SEQ ID NO: 4700543 - DNA, 25 bp, Homo sapien
cataggtcttctcaagagcctctgg

SEQ ID NO: 4700544 - DNA, 25 bp, Homo sapien
ccagaccaccatgggagcaggccat

SEQ ID NO: 4700545 - DNA, 25 bp, Homo sapien
tgctggcagaccacttatcccacgt

SEQ ID NO: 4700546 - DNA, 25 bp, Homo sapien
ctatggagtcaaggtgagggcaaag

SEQ ID NO: 4700547 - DNA, 25 bp, Homo sapien
cttagatttgagcagcaagtcctct

SEQ ID NO: 4700548 - DNA, 25 bp, Homo sapien
tttgagcagcaagtcctctttggtc

SEQ ID NO: 4700549 - DNA, 25 bp, Homo sapien
ttagatttgagcagcaagtcctctt

SEQ ID NO: 4700550 - DNA, 25 bp, Homo sapien
tgcttgctataacaattcagatgac

SEQ ID NO: 4700551 - DNA, 25 bp, Homo sapien
gggtcacccaagtctgtacatgaag

SEQ ID NO: 4700552 - DNA, 25 bp, Homo sapien
tcttgaggaatattcaggtgccacc

SEQ ID NO: 4700553 - DNA, 25 bp, Homo sapien
tacataaaacacgtatgcctggatc

SEQ ID NO: 4700554 - DNA, 25 bp, Homo sapien
tgcagacaggcccataggtttggtc

SEQ ID NO: 4700555 - DNA, 25 bp, Homo sapien
caggcccataggtttggtccggtga

SEQ ID NO: 4700556 - DNA, 25 bp, Homo sapien
ttggtccggtgaccccacacgactg

SEQ ID NO: 4700557 - DNA, 25 bp, Homo sapien
agacaggcccataggtttggtccgg

SEQ ID NO: 4700558 - DNA, 25 bp, Homo sapien
cagtcacaggcatccgtcttgtcca

SEQ ID NO: 4700559 - DNA, 25 bp, Homo sapien
ttacccataattctaccactcagag

SEQ ID NO: 4700560 - DNA, 25 bp, Homo sapien
tgtcagctgtcagtgttgcagcccc

SEQ ID NO: 4700561 - DNA, 25 bp, Homo sapien
tactctttttagtaaccagtaatca

SEQ ID NO: 4700562 - DNA, 25 bp, Homo sapien
tctccgcagccaacataggggcagg

SEQ ID NO: 4700563 - DNA, 25 bp, Homo sapien
attctccgcagccaacataggggca

SEQ ID NO: 4700564 - DNA, 25 bp, Homo sapien
cgcagccaacataggggcaggcaac

SEQ ID NO: 4700565 - DNA, 25 bp, Homo sapien
ctgtgcatgaatggtgctgtggtca

SEQ ID NO: 4700566 - DNA, 25 bp, Homo sapien
tgagggctgctgcttatcaaatggt

SEQ ID NO: 4700567 - DNA, 25 bp, Homo sapien
gggctgctgcttatcaaatggtgca

SEQ ID NO: 4700568 - DNA, 25 bp, Homo sapien
gctgctgcttatcaaatggtgcaga

SEQ ID NO: 4700569 - DNA, 25 bp, Homo sapien
tgcttatcaaatggtgcagatgcaa

SEQ ID NO: 4700570 - DNA, 25 bp, Homo sapien
accacagtcggaacgtggtcaggtt

SEQ ID NO: 4700571 - DNA, 25 bp, Homo sapien
ccgctgctccaggaatacctccttc

SEQ ID NO: 4700572 - DNA, 25 bp, Homo sapien
acaggcgtaacaccacagtcggaac

SEQ ID NO: 4700573 - DNA, 25 bp, Homo sapien
aatacctccttctcacaggcgtaac

SEQ ID NO: 4700574 - DNA, 25 bp, Homo sapien
gtgaaaagagataggattggtggcc

SEQ ID NO: 4700575 - DNA, 25 bp, Homo sapien
actgtgaaaagagataggattggtg

SEQ ID NO: 4700576 - DNA, 25 bp, Homo sapien
tgggctgagccagtccagctgagca

SEQ ID NO: 4700577 - DNA, 25 bp, Homo sapien
ctgtgttaaagacccaaagtgagga

SEQ ID NO: 4700578 - DNA, 25 bp, Homo sapien
cagccacagcaataggaacagcttt

SEQ ID NO: 4700579 - DNA, 25 bp, Homo sapien
agccacagcaataggaacagctttc

SEQ ID NO: 4700580 - DNA, 25 bp, Homo sapien
ctcgaggtttcaggtcatcgtcctc

SEQ ID NO: 4700581 - DNA, 25 bp, Homo sapien
gaaaccttgcaagtcacatttggca

SEQ ID NO: 4700582 - DNA, 25 bp, Homo sapien
tgctcacaacagctgcggttacctg

SEQ ID NO: 4700583 - DNA, 25 bp, Homo sapien
aagaggacatggtggaagcgttcca

SEQ ID NO: 4700584 - DNA, 25 bp, Homo sapien
ttagctaggccagccaacttctggg

SEQ ID NO: 4700585 - DNA, 25 bp, Homo sapien
ccgaggttcttcatgcccgtgaggc

SEQ ID NO: 4700586 - DNA, 25 bp, Homo sapien
gagttcccgaggttcttcatgcccg

SEQ ID NO: 4700587 - DNA, 25 bp, Homo sapien
cagcgttcatgtagcaggagttccc

SEQ ID NO: 4700588 - DNA, 25 bp, Homo sapien
ttcatgtagcaggagttcccgaggt

SEQ ID NO: 4700589 - DNA, 25 bp, Homo sapien
tatctgtgcgcaccaggccgccaca

SEQ ID NO: 4700590 - DNA, 25 bp, Homo sapien
tctgtgcgcaccaggccgccacact

SEQ ID NO: 4700591 - DNA, 25 bp, Homo sapien
cttcttatctgtgcgcaccaggccg

SEQ ID NO: 4700592 - DNA, 25 bp, Homo sapien
ggcttcttatctgtgcgcaccaggc

SEQ ID NO: 4700593 - DNA, 25 bp, Homo sapien
tagcctcggaacattgggttgacca

SEQ ID NO: 4700594 - DNA, 25 bp, Homo sapien
ctgctgggcatagcctcggaacatt

SEQ ID NO: 4700595 - DNA, 25 bp, Homo sapien
cggaacattgggttgaccaacttga

SEQ ID NO: 4700596 - DNA, 25 bp, Homo sapien
gaccaacttgatcccatgagacaga

SEQ ID NO: 4700597 - DNA, 25 bp, Homo sapien
agaggatcccggctctctccactca

SEQ ID NO: 4700598 - DNA, 25 bp, Homo sapien
caggaggcaggggtcacgtagcagc

SEQ ID NO: 4700599 - DNA, 25 bp, Homo sapien
aggcaggggtcacgtagcagccaga

SEQ ID NO: 4700600 - DNA, 25 bp, Homo sapien
gagccagcctcatgtcacacatctg

SEQ ID NO: 4700601 - DNA, 25 bp, Homo sapien
tgctccgagtttgtacgctgctggc

SEQ ID NO: 4700602 - DNA, 25 bp, Homo sapien
gtgtcactcgaatctgagtcccgag

SEQ ID NO: 4700603 - DNA, 25 bp, Homo sapien
catcaggcagcgaaggaactcttgg

SEQ ID NO: 4700604 - DNA, 25 bp, Homo sapien
ggcccgcctcatctgggatcagcag

SEQ ID NO: 4700605 - DNA, 25 bp, Homo sapien
acagcttggcatggccctcgtggtg

SEQ ID NO: 4700606 - DNA, 25 bp, Homo sapien
gcgagaggagctgcgtaggtgagca

SEQ ID NO: 4700607 - DNA, 25 bp, Homo sapien
cgtaggtgagcatcattgtccggct

SEQ ID NO: 4700608 - DNA, 25 bp, Homo sapien
aggagctgcgtaggtgagcatcatt

SEQ ID NO: 4700609 - DNA, 25 bp, Homo sapien
tcttgagcacgtacgacggtgccat

SEQ ID NO: 4700610 - DNA, 25 bp, Homo sapien
ctttcttgagcacgtacgacggtgc

SEQ ID NO: 4700611 - DNA, 25 bp, Homo sapien
ttgagcacgtacgacggtgccatcc

SEQ ID NO: 4700612 - DNA, 25 bp, Homo sapien
gagcacgtacgacggtgccatcctc

SEQ ID NO: 4700613 - DNA, 25 bp, Homo sapien
ccagcctcaagctgacccaccctcc

SEQ ID NO: 4700614 - DNA, 25 bp, Homo sapien
gcctcaagctgacccaccctcccgt

SEQ ID NO: 4700615 - DNA, 25 bp, Homo sapien
agcctcaagctgacccaccctcccg

SEQ ID NO: 4700616 - DNA, 25 bp, Homo sapien
gaatggagccgtcaaagatgtctga

SEQ ID NO: 4700617 - DNA, 25 bp, Homo sapien
tctgagatgacgctgcggtagcgct

SEQ ID NO: 4700618 - DNA, 25 bp, Homo sapien
gtgagacactgcacaaggctgagaa

SEQ ID NO: 4700619 - DNA, 25 bp, Homo sapien
agatgtctgagatgacgctgcggta

SEQ ID NO: 4700620 - DNA, 25 bp, Homo sapien
gcttggccggcacattctggtagat

SEQ ID NO: 4700621 - DNA, 25 bp, Homo sapien
tgtactccacaatgaaggccagcca

SEQ ID NO: 4700622 - DNA, 25 bp, Homo sapien
tctggtagatggctgaatggagctt

SEQ ID NO: 4700623 - DNA, 25 bp, Homo sapien
gataagtcctggaacgtttccactg

SEQ ID NO: 4700624 - DNA, 25 bp, Homo sapien
caaagtagccaagaaatcccctgca

SEQ ID NO: 4700625 - DNA, 25 bp, Homo sapien
caagggactatccaatcctggccac

SEQ ID NO: 4700626 - DNA, 25 bp, Homo sapien
catattaagccaactcctctgcagg

SEQ ID NO: 4700627 - DNA, 25 bp, Homo sapien
ccatgtcgcccagtagtggcaaggt

SEQ ID NO: 4700628 - DNA, 25 bp, Homo sapien
actcatcagcggcaaagaaggcagc

SEQ ID NO: 4700629 - DNA, 25 bp, Homo sapien
ttccagggtgacgacaggcccccaa

SEQ ID NO: 4700630 - DNA, 25 bp, Homo sapien
cctttaactcatcagcggcaaagaa

SEQ ID NO: 4700631 - DNA, 25 bp, Homo sapien
tcttccagggtgacgacaggccccc

SEQ ID NO: 4700632 - DNA, 25 bp, Homo sapien
tcttacaccgctcacagctgtacat

SEQ ID NO: 4700633 - DNA, 25 bp, Homo sapien
tacaccgctcacagctgtacatgtt

SEQ ID NO: 4700634 - DNA, 25 bp, Homo sapien
ttacaccgctcacagctgtacatgt

SEQ ID NO: 4700635 - DNA, 25 bp, Homo sapien
ttcttacaccgctcacagctgtaca

SEQ ID NO: 4700636 - DNA, 25 bp, Homo sapien
catcagtgtccggcatcagggccag

SEQ ID NO: 4700637 - DNA, 25 bp, Homo sapien
atcagtgtccggcatcagggccagg

SEQ ID NO: 4700638 - DNA, 25 bp, Homo sapien
gcatcagtgtccggcatcagggcca

SEQ ID NO: 4700639 - DNA, 25 bp, Homo sapien
agcatcagtgtccggcatcagggcc

SEQ ID NO: 4700640 - DNA, 25 bp, Homo sapien
tgcagtacttcactccgttccgcag

SEQ ID NO: 4700641 - DNA, 25 bp, Homo sapien
cgcaggactttgcagtacttcactc

SEQ ID NO: 4700642 - DNA, 25 bp, Homo sapien
tttgcagtacttcactccgttccgc

SEQ ID NO: 4700643 - DNA, 25 bp, Homo sapien
ggactttgcagtacttcactccgtt

SEQ ID NO: 4700644 - DNA, 25 bp, Homo sapien
gacgtggctgttgatcttgaatgag

SEQ ID NO: 4700645 - DNA, 25 bp, Homo sapien
tgggatgtgcactccttggcaagga

SEQ ID NO: 4700646 - DNA, 25 bp, Homo sapien
cgaaagcgctttaggtgaatgcaca

SEQ ID NO: 4700647 - DNA, 25 bp, Homo sapien
tgagtacatcacctcgtgccgaaag

SEQ ID NO: 4700648 - DNA, 25 bp, Homo sapien
gcgttctgcaccaccgtctcgtgga

SEQ ID NO: 4700649 - DNA, 25 bp, Homo sapien
cattgatcacgttctggcagtaggc

SEQ ID NO: 4700650 - DNA, 25 bp, Homo sapien
cgtggacttctgtgacgtactggtc

SEQ ID NO: 4700651 - DNA, 25 bp, Homo sapien
tagaagagtacgtagccctcggcgt

SEQ ID NO: 4700652 - DNA, 25 bp, Homo sapien
gatggtgaggttcctccaccaggcc

SEQ ID NO: 4700653 - DNA, 25 bp, Homo sapien
ttccctggcttaatccaggcgctgt

SEQ ID NO: 4700654 - DNA, 25 bp, Homo sapien
tacacacacccagaaggcccatggg

SEQ ID NO: 4700655 - DNA, 25 bp, Homo sapien
gacggggatggtgaggttcctccac

SEQ ID NO: 4700656 - DNA, 25 bp, Homo sapien
aacttgttgagccactcgcgggaca

SEQ ID NO: 4700657 - DNA, 25 bp, Homo sapien
acgtagaaccgcagcaggctgggct

SEQ ID NO: 4700658 - DNA, 25 bp, Homo sapien
tcgcgggacacgtagaaccgcagca

SEQ ID NO: 4700659 - DNA, 25 bp, Homo sapien
gcctggctccgcgaaggtgttgaac

SEQ ID NO: 4700660 - DNA, 25 bp, Homo sapien
tctcccaccacagggggcgcctcac

SEQ ID NO: 4700661 - DNA, 25 bp, Homo sapien
cctgctctcccaccacagggggcgc

SEQ ID NO: 4700662 - DNA, 25 bp, Homo sapien
tgctctcccaccacagggggcgcct

SEQ ID NO: 4700663 - DNA, 25 bp, Homo sapien
ctctcccaccacagggggcgcctca

SEQ ID NO: 4700664 - DNA, 25 bp, Homo sapien
caggtcgtcgatgtagtggtatttg

SEQ ID NO: 4700665 - DNA, 25 bp, Homo sapien
gcaggatgaccaccaggtcgtcgat

SEQ ID NO: 4700666 - DNA, 25 bp, Homo sapien
tgaccaccaggtcgtcgatgtagtg

SEQ ID NO: 4700667 - DNA, 25 bp, Homo sapien
caccaggtcgtcgatgtagtggtat

SEQ ID NO: 4700668 - DNA, 25 bp, Homo sapien
tggcagatggagcacacgtacaggt

SEQ ID NO: 4700669 - DNA, 25 bp, Homo sapien
gatgaaggtgtcgatctcgatcctc

SEQ ID NO: 4700670 - DNA, 25 bp, Homo sapien
cttgatgaaggtgtcgatctcgatc

SEQ ID NO: 4700671 - DNA, 25 bp, Homo sapien
cacacgtacaggtggttcacggcgg

SEQ ID NO: 4700672 - DNA, 25 bp, Homo sapien
ccggcgactcctcggcctggaaggc

SEQ ID NO: 4700673 - DNA, 25 bp, Homo sapien
cccggaaccactgcatgctgatgca

SEQ ID NO: 4700674 - DNA, 25 bp, Homo sapien
tgctgatgcagtagatgacgcccgg

SEQ ID NO: 4700675 - DNA, 25 bp, Homo sapien
tgtccttccccttgacgaacgcctc

SEQ ID NO: 4700676 - DNA, 25 bp, Homo sapien
tgagccacccaatgctcctctgtgg

SEQ ID NO: 4700677 - DNA, 25 bp, Homo sapien
tctaatggatgaggcgcctgagcca

SEQ ID NO: 4700678 - DNA, 25 bp, Homo sapien
gggtcagcgtgaagtctctaatgga

SEQ ID NO: 4700679 - DNA, 25 bp, Homo sapien
agacacagcgggctcgggttcagcc

SEQ ID NO: 4700680 - DNA, 25 bp, Homo sapien
ttcctttgacctgtgcaatcctgct

SEQ ID NO: 4700681 - DNA, 25 bp, Homo sapien
tcctgctgttgtcaatgggcccggg

SEQ ID NO: 4700682 - DNA, 25 bp, Homo sapien
gcaatcctgctgttgtcaatgggcc

SEQ ID NO: 4700683 - DNA, 25 bp, Homo sapien
aatcctgctgttgtcaatgggcccg

SEQ ID NO: 4700684 - DNA, 25 bp, Homo sapien
caggctgttcaggtaggtccaggtc

SEQ ID NO: 4700685 - DNA, 25 bp, Homo sapien
tcctccgaaatctgcccgtagtcag

SEQ ID NO: 4700686 - DNA, 25 bp, Homo sapien
gcgtctcggcttcgatcttctgctc

SEQ ID NO: 4700687 - DNA, 25 bp, Homo sapien
acactctggcggatggcaatctcgg

SEQ ID NO: 4700688 - DNA, 25 bp, Homo sapien
gaggacccagagtgccatggaggga

SEQ ID NO: 4700689 - DNA, 25 bp, Homo sapien
gacccagagtgccatggagggacca

SEQ ID NO: 4700690 - DNA, 25 bp, Homo sapien
aaaaggacatgtgagggtctctgga

SEQ ID NO: 4700691 - DNA, 25 bp, Homo sapien
ctttggatgttcaaaaggacatgtg

SEQ ID NO: 4700692 - DNA, 25 bp, Homo sapien
tgtggggacacgggcactcagcagt

SEQ ID NO: 4700693 - DNA, 25 bp, Homo sapien
cacagagtcttggtcgtttcaacaa

SEQ ID NO: 4700694 - DNA, 25 bp, Homo sapien
gccgagctagcaagaggacagttgt

SEQ ID NO: 4700695 - DNA, 25 bp, Homo sapien
aatcgcacagtggagacgccgtgaa

SEQ ID NO: 4700696 - DNA, 25 bp, Homo sapien
cgggacttcagagccttcctggtga

SEQ ID NO: 4700697 - DNA, 25 bp, Homo sapien
cagaaatccaacctcctcctggtgt

SEQ ID NO: 4700698 - DNA, 25 bp, Homo sapien
gatgaactgctgaacttcgaggcaa

SEQ ID NO: 4700699 - DNA, 25 bp, Homo sapien
tggtgttccaatcagcaatgagtcc

SEQ ID NO: 4700700 - DNA, 25 bp, Homo sapien
gaggcaaattacagccaatccaggg

SEQ ID NO: 4700701 - DNA, 25 bp, Homo sapien
aatggccaagctgtgaggtatccct

SEQ ID NO: 4700702 - DNA, 25 bp, Homo sapien
ggctttggtgccttgctgtgctcag

SEQ ID NO: 4700703 - DNA, 25 bp, Homo sapien
tgtcttctttagcatcagctcggga

SEQ ID NO: 4700704 - DNA, 25 bp, Homo sapien
gctcgggaagctgcctttgcctcaa

SEQ ID NO: 4700705 - DNA, 25 bp, Homo sapien
gccccgtctgctttgatcctgatga

SEQ ID NO: 4700706 - DNA, 25 bp, Homo sapien
tttgaacacaaactagacagcacag

SEQ ID NO: 4700707 - DNA, 25 bp, Homo sapien
cagaagatccgaaaagtgaggcctc

SEQ ID NO: 4700708 - DNA, 25 bp, Homo sapien
ctgcagcgccggctttcagaaggct

SEQ ID NO: 4700709 - DNA, 25 bp, Homo sapien
agtttcttcctgcatgagatccaag

SEQ ID NO: 4700710 - DNA, 25 bp, Homo sapien
gagtttcttcctgcatgagatccaa

SEQ ID NO: 4700711 - DNA, 25 bp, Homo sapien
gtagtgcaagaactgtctccaaacc

SEQ ID NO: 4700712 - DNA, 25 bp, Homo sapien
caagaactgtctccaaacctcctaa

SEQ ID NO: 4700713 - DNA, 25 bp, Homo sapien
caaacctcctaaataaatcttccag

SEQ ID NO: 4700714 - DNA, 25 bp, Homo sapien
cctcctaaataaatcttccagacaa

SEQ ID NO: 4700715 - DNA, 25 bp, Homo sapien
gcccattcggccttgacttgagcac

SEQ ID NO: 4700716 - DNA, 25 bp, Homo sapien
agatggtatagtgacctccgccggg

SEQ ID NO: 4700717 - DNA, 25 bp, Homo sapien
ggacatctccggaccacaaaaggta

SEQ ID NO: 4700718 - DNA, 25 bp, Homo sapien
tcccgttagacctccagatggtata

SEQ ID NO: 4700719 - DNA, 25 bp, Homo sapien
agagccgcaccagcgctgagaagcc

SEQ ID NO: 4700720 - DNA, 25 bp, Homo sapien
aagtaggaagttcctgactcaccgg

SEQ ID NO: 4700721 - DNA, 25 bp, Homo sapien
catttccgcgggtgtggacatcaca

SEQ ID NO: 4700722 - DNA, 25 bp, Homo sapien
acatcacagaggtcgggagcattgg

SEQ ID NO: 4700723 - DNA, 25 bp, Homo sapien
gagctgtttcacgtggacaactcga

SEQ ID NO: 4700724 - DNA, 25 bp, Homo sapien
tggtatcaccagtgctcaagccggt

SEQ ID NO: 4700725 - DNA, 25 bp, Homo sapien
gacaactcgaaagggcagcagcctt

SEQ ID NO: 4700726 - DNA, 25 bp, Homo sapien
tcaagccggtactcctggtggcgtg

SEQ ID NO: 4700727 - DNA, 25 bp, Homo sapien
tgcggcttgtctaaccagcgcagcg

SEQ ID NO: 4700728 - DNA, 25 bp, Homo sapien
gcgcagcgcaaaggtctcgatgcct

SEQ ID NO: 4700729 - DNA, 25 bp, Homo sapien
gtggagataagcctgcggcttgtct

SEQ ID NO: 4700730 - DNA, 25 bp, Homo sapien
aggtctcgatgccttttggtaacat

SEQ ID NO: 4700731 - DNA, 25 bp, Homo sapien
ggtaactaggtggtcccctcaagca

SEQ ID NO: 4700732 - DNA, 25 bp, Homo sapien
caagaggaaccattggcctagagct

SEQ ID NO: 4700733 - DNA, 25 bp, Homo sapien
tcgtggtcctttgagggatcccgcc

SEQ ID NO: 4700734 - DNA, 25 bp, Homo sapien
caaggaagtcctatagaagccaaag

SEQ ID NO: 4700735 - DNA, 25 bp, Homo sapien
gatgtcatccgtgtgtcccagactg

SEQ ID NO: 4700736 - DNA, 25 bp, Homo sapien
gactgagcactcgatgtcatccgtg

SEQ ID NO: 4700737 - DNA, 25 bp, Homo sapien
tgaaagtgtcatcacgggtcccctg

SEQ ID NO: 4700738 - DNA, 25 bp, Homo sapien
gtccagcgcacatcaggcggactga

SEQ ID NO: 4700739 - DNA, 25 bp, Homo sapien
tgcggctccgcacttgagtttatta

SEQ ID NO: 4700740 - DNA, 25 bp, Homo sapien
ttataactgccggaaagccgcgaag

SEQ ID NO: 4700741 - DNA, 25 bp, Homo sapien
cctgctgcctaatgacctttctgtt

SEQ ID NO: 4700742 - DNA, 25 bp, Homo sapien
ggcatcttttagttgtaccctcgta

SEQ ID NO: 4700743 - DNA, 25 bp, Homo sapien
cagtaaacaagtgaatgggaaacct

SEQ ID NO: 4700744 - DNA, 25 bp, Homo sapien
gacaaactcatttccagtctgtgaa

SEQ ID NO: 4700745 - DNA, 25 bp, Homo sapien
aactcgaaaatagggcaagacgaca

SEQ ID NO: 4700746 - DNA, 25 bp, Homo sapien
tcaagggcaatgatacaatcctggc

SEQ ID NO: 4700747 - DNA, 25 bp, Homo sapien
taaattgtatactcattcacttggg

SEQ ID NO: 4700748 - DNA, 25 bp, Homo sapien
ggtgccaaagacttccctactcttg

SEQ ID NO: 4700749 - DNA, 25 bp, Homo sapien
gctacattaggtggttacagattgt

SEQ ID NO: 4700750 - DNA, 25 bp, Homo sapien
tatctagtatccaccatacactgag

SEQ ID NO: 4700751 - DNA, 25 bp, Homo sapien
aaaaggcagcagctaggcgtgcagt

SEQ ID NO: 4700752 - DNA, 25 bp, Homo sapien
tcctttactgtagcgttgctcactg

SEQ ID NO: 4700753 - DNA, 25 bp, Homo sapien
gactggcaggaatactcacgctagg

SEQ ID NO: 4700754 - DNA, 25 bp, Homo sapien
ttttcatggattctccctagagtca

SEQ ID NO: 4700755 - DNA, 25 bp, Homo sapien
aacaaagaagtgaagcgctggctgg

SEQ ID NO: 4700756 - DNA, 25 bp, Homo sapien
acaaagaagtgaagcgctggctggg

SEQ ID NO: 4700757 - DNA, 25 bp, Homo sapien
caaagaagtgaagcgctggctgggc

SEQ ID NO: 4700758 - DNA, 25 bp, Homo sapien
caacaaagaagtgaagcgctggctg

SEQ ID NO: 4700759 - DNA, 25 bp, Homo sapien
gtctctctggcgtgctttggttgca

SEQ ID NO: 4700760 - DNA, 25 bp, Homo sapien
gcttcaacgagttcatgacctccaa

SEQ ID NO: 4700761 - DNA, 25 bp, Homo sapien
ggtaagttctgctccggaatcctgt

SEQ ID NO: 4700762 - DNA, 25 bp, Homo sapien
gtctcccaagcagcaaaaggaaccc

SEQ ID NO: 4700763 - DNA, 25 bp, Homo sapien
tcttggatttagctgtataattcct

SEQ ID NO: 4700764 - DNA, 25 bp, Homo sapien
gtggtaaattgtccgagacatgaca

SEQ ID NO: 4700765 - DNA, 25 bp, Homo sapien
tgtgtcttggatttagctgtataat

SEQ ID NO: 4700766 - DNA, 25 bp, Homo sapien
acatttaagtggtaaattgtccgag

SEQ ID NO: 4700767 - DNA, 25 bp, Homo sapien
tagacatgttggtccttattcagcg

SEQ ID NO: 4700768 - DNA, 25 bp, Homo sapien
actgtagacatgttggtccttattc

SEQ ID NO: 4700769 - DNA, 25 bp, Homo sapien
tgttggtccttattcagcgtcttcc

SEQ ID NO: 4700770 - DNA, 25 bp, Homo sapien
catgttggtccttattcagcgtctt

SEQ ID NO: 4700771 - DNA, 25 bp, Homo sapien
ccacaaaatgaggtccatggctcag

SEQ ID NO: 4700772 - DNA, 25 bp, Homo sapien
ttttgtccacaaaatgaggtccatg

SEQ ID NO: 4700773 - DNA, 25 bp, Homo sapien
gcaggttgctgctcactgaataatg

SEQ ID NO: 4700774 - DNA, 25 bp, Homo sapien
gaatcgggatcggtgctgtgctgga

SEQ ID NO: 4700775 - DNA, 25 bp, Homo sapien
gcttacaaatggcatgacatgtggc

SEQ ID NO: 4700776 - DNA, 25 bp, Homo sapien
tattttgcctgtatccttctccttg

SEQ ID NO: 4700777 - DNA, 25 bp, Homo sapien
tgcatatgcacctcaagggctgggt

SEQ ID NO: 4700778 - DNA, 25 bp, Homo sapien
gacatgtggcaacttacttcatctc

SEQ ID NO: 4700779 - DNA, 25 bp, Homo sapien
gacatccttactctctgttttggga

SEQ ID NO: 4700780 - DNA, 25 bp, Homo sapien
tactcttaaccccttgaggtatgtc

SEQ ID NO: 4700781 - DNA, 25 bp, Homo sapien
tgccctttcaacgaggtggactaga

SEQ ID NO: 4700782 - DNA, 25 bp, Homo sapien
catgtccgcatcttactcttgtaaa

SEQ ID NO: 4700783 - DNA, 25 bp, Homo sapien
tagaggttcaatatttagatgttgt

SEQ ID NO: 4700784 - DNA, 25 bp, Homo sapien
gcagaactttcacgatggccgtaaa

SEQ ID NO: 4700785 - DNA, 25 bp, Homo sapien
gaagcagagggtactaatcaccagt

SEQ ID NO: 4700786 - DNA, 25 bp, Homo sapien
tgttttcccctttgcagaactttca

SEQ ID NO: 4700787 - DNA, 25 bp, Homo sapien
cagggcagcatgaagttatctccga

SEQ ID NO: 4700788 - DNA, 25 bp, Homo sapien
aaatgaatgattacgcagggcagca

SEQ ID NO: 4700789 - DNA, 25 bp, Homo sapien
ggacttggcacgctatgttcaggaa

SEQ ID NO: 4700790 - DNA, 25 bp, Homo sapien
tatctccgagaacatggcatcacag

SEQ ID NO: 4700791 - DNA, 25 bp, Homo sapien
tggactcagttcaaatgtagatggg

SEQ ID NO: 4700792 - DNA, 25 bp, Homo sapien
ttatagcttgtagaatggtcctgaa

SEQ ID NO: 4700793 - DNA, 25 bp, Homo sapien
gaaacctaagagcatatcctctggg

SEQ ID NO: 4700794 - DNA, 25 bp, Homo sapien
aaacatattgttggattgaggccag

SEQ ID NO: 4700795 - DNA, 25 bp, Homo sapien
ggccctgtgatctgcccttctcggc

SEQ ID NO: 4700796 - DNA, 25 bp, Homo sapien
ctggccctgtgatctgcccttctcg

SEQ ID NO: 4700797 - DNA, 25 bp, Homo sapien
tcctggccctgtgatctgcccttct

SEQ ID NO: 4700798 - DNA, 25 bp, Homo sapien
tctcctggccctgtgatctgccctt

SEQ ID NO: 4700799 - DNA, 25 bp, Homo sapien
tatacactaggtacttggtaaccag

SEQ ID NO: 4700800 - DNA, 25 bp, Homo sapien
tcagatgtggccgagatcaggcaag

SEQ ID NO: 4700801 - DNA, 25 bp, Homo sapien
tatttgcttgtagtatggaccccac

SEQ ID NO: 4700802 - DNA, 25 bp, Homo sapien
aaatgacggcaaatgtaagccaacc

SEQ ID NO: 4700803 - DNA, 25 bp, Homo sapien
caccatattgttaggaagcccaaac

SEQ ID NO: 4700804 - DNA, 25 bp, Homo sapien
gaatcacaaatagccgtgcgttttt

SEQ ID NO: 4700805 - DNA, 25 bp, Homo sapien
tagagtatggttaaagtgatgcccc

SEQ ID NO: 4700806 - DNA, 25 bp, Homo sapien
gggatgattgtttgaacacacgagt

SEQ ID NO: 4700807 - DNA, 25 bp, Homo sapien
tgcactttcaagaggcagccgtttg

SEQ ID NO: 4700808 - DNA, 25 bp, Homo sapien
cagccgtttgaggattgtctaccaa

SEQ ID NO: 4700809 - DNA, 25 bp, Homo sapien
aactgtactgggaacaatgcctgac

SEQ ID NO: 4700810 - DNA, 25 bp, Homo sapien
gaccctgatcgtggtgtgcactttc

SEQ ID NO: 4700811 - DNA, 25 bp, Homo sapien
acggttgctcggagaatagtttcca

SEQ ID NO: 4700812 - DNA, 25 bp, Homo sapien
tgctcggagaatagtttccagtggg

SEQ ID NO: 4700813 - DNA, 25 bp, Homo sapien
agctcttttcctgccgtccccggat

SEQ ID NO: 4700814 - DNA, 25 bp, Homo sapien
atgcgcacggtaaacgggcagccct

SEQ ID NO: 4700815 - DNA, 25 bp, Homo sapien
ttggaggtttatctgcaagaggttt

SEQ ID NO: 4700816 - DNA, 25 bp, Homo sapien
gttggaggtttatctgcaagaggtt

SEQ ID NO: 4700817 - DNA, 25 bp, Homo sapien
tgcccaacaaaggaagtagagttgg

SEQ ID NO: 4700818 - DNA, 25 bp, Homo sapien
caacaaaggaagtagagttggaggt

SEQ ID NO: 4700819 - DNA, 25 bp, Homo sapien
gagtggaacttctgtgccctctctg

SEQ ID NO: 4700820 - DNA, 25 bp, Homo sapien
ggccatagtctaatggtgcaatcac

SEQ ID NO: 4700821 - DNA, 25 bp, Homo sapien
cagtgcctcacagaacctagggaaa

SEQ ID NO: 4700822 - DNA, 25 bp, Homo sapien
cttttgtgaccaaacgtgttgggat

SEQ ID NO: 4700823 - DNA, 25 bp, Homo sapien
tagctccgctgaccctgtggtcgtt

SEQ ID NO: 4700824 - DNA, 25 bp, Homo sapien
cctaggaagtcgtcgaggagcctgt

SEQ ID NO: 4700825 - DNA, 25 bp, Homo sapien
cggctagctccgctgaccctgtggt

SEQ ID NO: 4700826 - DNA, 25 bp, Homo sapien
ttttcctggagattgcgacctagga

SEQ ID NO: 4700827 - DNA, 25 bp, Homo sapien
ggccagcctaggaccgcgggaggcg

SEQ ID NO: 4700828 - DNA, 25 bp, Homo sapien
cgcggccagcctaggaccgcgggag

SEQ ID NO: 4700829 - DNA, 25 bp, Homo sapien
cagccggaggcccgcggccagccta

SEQ ID NO: 4700830 - DNA, 25 bp, Homo sapien
ggccaggctcggccagcaactgcag

SEQ ID NO: 4700831 - DNA, 25 bp, Homo sapien
ccggtcagcccgaagaccccagcgc

SEQ ID NO: 4700832 - DNA, 25 bp, Homo sapien
ccgccccgtgccggtcagcccgaag

SEQ ID NO: 4700833 - DNA, 25 bp, Homo sapien
gccccgtgccggtcagcccgaagac

SEQ ID NO: 4700834 - DNA, 25 bp, Homo sapien
gtgccggtcagcccgaagaccccag

SEQ ID NO: 4700835 - DNA, 25 bp, Homo sapien
gaagaagccaaaggtgttcagatga

SEQ ID NO: 4700836 - DNA, 25 bp, Homo sapien
gaagccaaaggtgttcagatgaact

SEQ ID NO: 4700837 - DNA, 25 bp, Homo sapien
cagatgaactttatgcctcacatca

SEQ ID NO: 4700838 - DNA, 25 bp, Homo sapien
agccaaaggtgttcagatgaacttt

SEQ ID NO: 4700839 - DNA, 25 bp, Homo sapien
agtcacatccttgtcttcaggctca

SEQ ID NO: 4700840 - DNA, 25 bp, Homo sapien
tcagtgagaggctactgacattcac

SEQ ID NO: 4700841 - DNA, 25 bp, Homo sapien
tgagaggctactgacattcaccacc

SEQ ID NO: 4700842 - DNA, 25 bp, Homo sapien
cttcaggctcattcagtgagaggct

SEQ ID NO: 4700843 - DNA, 25 bp, Homo sapien
tcattctttgtacggtctaggctaa

SEQ ID NO: 4700844 - DNA, 25 bp, Homo sapien
ttgtacggtctaggctaaatccaat

SEQ ID NO: 4700845 - DNA, 25 bp, Homo sapien
ttctttgtacggtctaggctaaatc

SEQ ID NO: 4700846 - DNA, 25 bp, Homo sapien
catcattctttgtacggtctaggct

SEQ ID NO: 4700847 - DNA, 25 bp, Homo sapien
ttctggagatgtctaggattaaaag

SEQ ID NO: 4700848 - DNA, 25 bp, Homo sapien
gagatgtctaggattaaaagggtga

SEQ ID NO: 4700849 - DNA, 25 bp, Homo sapien
tgtctaggattaaaagggtgacaga

SEQ ID NO: 4700850 - DNA, 25 bp, Homo sapien
ctaggattaaaagggtgacagagac

SEQ ID NO: 4700851 - DNA, 25 bp, Homo sapien
agcaattacaaagtacgcagttgga

SEQ ID NO: 4700852 - DNA, 25 bp, Homo sapien
caaagtacgcagttggaagtatgct

SEQ ID NO: 4700853 - DNA, 25 bp, Homo sapien
caggcaagtctgagcacatgattcc

SEQ ID NO: 4700854 - DNA, 25 bp, Homo sapien
taccttaaaggctccctcagcaatt

SEQ ID NO: 4700855 - DNA, 25 bp, Homo sapien
cttctggtggagactttactcttac

SEQ ID NO: 4700856 - DNA, 25 bp, Homo sapien
cctggctctgaccaaggactttctc

SEQ ID NO: 4700857 - DNA, 25 bp, Homo sapien
tctgggtctggttgcctgctgaagc

SEQ ID NO: 4700858 - DNA, 25 bp, Homo sapien
aagatgatctttggtaactgggtac

SEQ ID NO: 4700859 - DNA, 25 bp, Homo sapien
tcactgcgaactccatctccctggt

SEQ ID NO: 4700860 - DNA, 25 bp, Homo sapien
actgcgaactccatctccctggtcc

SEQ ID NO: 4700861 - DNA, 25 bp, Homo sapien
tgcgaactccatctccctggtccaa

SEQ ID NO: 4700862 - DNA, 25 bp, Homo sapien
ctcactgcgaactccatctccctgg

SEQ ID NO: 4700863 - DNA, 25 bp, Homo sapien
aatccactgtacttcttttagactt

SEQ ID NO: 4700864 - DNA, 25 bp, Homo sapien
ttgaatccactgtacttcttttaga

SEQ ID NO: 4700865 - DNA, 25 bp, Homo sapien
ctttgaatccactgtacttctttta

SEQ ID NO: 4700866 - DNA, 25 bp, Homo sapien
gaatccactgtacttcttttagact

SEQ ID NO: 4700867 - DNA, 25 bp, Homo sapien
ctaaaaagacataatagtatgtttt

SEQ ID NO: 4700868 - DNA, 25 bp, Homo sapien
ccaccattattatgaacagaaaagg

SEQ ID NO: 4700869 - DNA, 25 bp, Homo sapien
acagaaaaggatttctctcccatgg

SEQ ID NO: 4700870 - DNA, 25 bp, Homo sapien
cagaaaaggatttctctcccatggc

SEQ ID NO: 4700871 - DNA, 25 bp, Homo sapien
ctgaaatgacactgccccaccatta

SEQ ID NO: 4700872 - DNA, 25 bp, Homo sapien
tctaggaggctttacacaaagagca

SEQ ID NO: 4700873 - DNA, 25 bp, Homo sapien
tatgctgcccctaaacactcatggg

SEQ ID NO: 4700874 - DNA, 25 bp, Homo sapien
gttggaaactgtaccgtgtcaccta

SEQ ID NO: 4700875 - DNA, 25 bp, Homo sapien
gtgactgatacagggcatacctaag

SEQ ID NO: 4700876 - DNA, 25 bp, Homo sapien
gatgtggttatctagtcttcaagct

SEQ ID NO: 4700877 - DNA, 25 bp, Homo sapien
cccacggcagagtttaaagagatat

SEQ ID NO: 4700878 - DNA, 25 bp, Homo sapien
taaattatcgactctcccacggcag

SEQ ID NO: 4700879 - DNA, 25 bp, Homo sapien
gaaagatacatagccacaacctcac

SEQ ID NO: 4700880 - DNA, 25 bp, Homo sapien
tgaatgtaaacttgtcacttggcaa

SEQ ID NO: 4700881 - DNA, 25 bp, Homo sapien
gaatgtaaacttgtcacttggcaat

SEQ ID NO: 4700882 - DNA, 25 bp, Homo sapien
ctgaatgtaaacttgtcacttggca

SEQ ID NO: 4700883 - DNA, 25 bp, Homo sapien
aatgtaaacttgtcacttggcaatt

SEQ ID NO: 4700884 - DNA, 25 bp, Homo sapien
aaaatctaatcttatacagaaacaa

SEQ ID NO: 4700885 - DNA, 25 bp, Homo sapien
tttatgctgacaaaatccacgtaga

SEQ ID NO: 4700886 - DNA, 25 bp, Homo sapien
cagaaacaaatctcccgttttatgc

SEQ ID NO: 4700887 - DNA, 25 bp, Homo sapien
aaaatccacgtagaacaatctccaa

SEQ ID NO: 4700888 - DNA, 25 bp, Homo sapien
ggagaggaatttctcctgctgagag

SEQ ID NO: 4700889 - DNA, 25 bp, Homo sapien
tgctgagaggtagctgtcaggattc

SEQ ID NO: 4700890 - DNA, 25 bp, Homo sapien
cgtcgttttcgaaggatatgaatcc

SEQ ID NO: 4700891 - DNA, 25 bp, Homo sapien
tcgaaggatatgaatccagatggtc

SEQ ID NO: 4700892 - DNA, 25 bp, Homo sapien
tggtgaaaggaagggccgccatcag

SEQ ID NO: 4700893 - DNA, 25 bp, Homo sapien
tgcatggaacaccaaggaaagagac

SEQ ID NO: 4700894 - DNA, 25 bp, Homo sapien
caaggaaagagacttggtgaaagga

SEQ ID NO: 4700895 - DNA, 25 bp, Homo sapien
cttggtgaaaggaagggccgccatc

SEQ ID NO: 4700896 - DNA, 25 bp, Homo sapien
tgggaggagatgtagtggtagtcaa

SEQ ID NO: 4700897 - DNA, 25 bp, Homo sapien
gggaggagatgtagtggtagtcaat

SEQ ID NO: 4700898 - DNA, 25 bp, Homo sapien
caacagcccagccttcgatagggaa

SEQ ID NO: 4700899 - DNA, 25 bp, Homo sapien
cagcccagccttcgatagggaagcc

SEQ ID NO: 4700900 - DNA, 25 bp, Homo sapien
tatgtagtacacaacagcccagcct

SEQ ID NO: 4700901 - DNA, 25 bp, Homo sapien
gagttatgtagtacacaacagccca

SEQ ID NO: 4700902 - DNA, 25 bp, Homo sapien
tgatgaagagtagcgcccctttcaa

SEQ ID NO: 4700903 - DNA, 25 bp, Homo sapien
aatggtgatgaagagtagcgcccct

SEQ ID NO: 4700904 - DNA, 25 bp, Homo sapien
tggtgatgaagagtagcgccccttt

SEQ ID NO: 4700905 - DNA, 25 bp, Homo sapien
ggtgatgaagagtagcgcccctttc

SEQ ID NO: 4700906 - DNA, 25 bp, Homo sapien
gagtggaatgacaatcatgaagatc

SEQ ID NO: 4700907 - DNA, 25 bp, Homo sapien
tggagtggaatgacaatcatgaaga

SEQ ID NO: 4700908 - DNA, 25 bp, Homo sapien
ggagtggaatgacaatcatgaagat

SEQ ID NO: 4700909 - DNA, 25 bp, Homo sapien
agtggaatgacaatcatgaagatct

SEQ ID NO: 4700910 - DNA, 25 bp, Homo sapien
tgatgtaggctacatttgccaggac

SEQ ID NO: 4700911 - DNA, 25 bp, Homo sapien
cacaacaggtcgaccagaaatagag

SEQ ID NO: 4700912 - DNA, 25 bp, Homo sapien
tgggaagaggatggcaccacaacac

SEQ ID NO: 4700913 - DNA, 25 bp, Homo sapien
agaaatagagagtccttccacaagc

SEQ ID NO: 4700914 - DNA, 25 bp, Homo sapien
gatgcttcttgtaaatgtctgattg

SEQ ID NO: 4700915 - DNA, 25 bp, Homo sapien
atgcttcttgtaaatgtctgattga

SEQ ID NO: 4700916 - DNA, 25 bp, Homo sapien
tgcttcttgtaaatgtctgattgac

SEQ ID NO: 4700917 - DNA, 25 bp, Homo sapien
agagcaagctgagcaacacaaaatg

SEQ ID NO: 4700918 - DNA, 25 bp, Homo sapien
aagctgagcaacacaaaatgagcac

SEQ ID NO: 4700919 - DNA, 25 bp, Homo sapien
tcagagcaagctgagcaacacaaaa

SEQ ID NO: 4700920 - DNA, 25 bp, Homo sapien
agcaagctgagcaacacaaaatgag

SEQ ID NO: 4700921 - DNA, 25 bp, Homo sapien
gcatcttgacaccataggctgcctc

SEQ ID NO: 4700922 - DNA, 25 bp, Homo sapien
tgcctccactcctccgcagtgccgc

SEQ ID NO: 4700923 - DNA, 25 bp, Homo sapien
ctccgcagtgccgcagcacgtgggt

SEQ ID NO: 4700924 - DNA, 25 bp, Homo sapien
atcttgacaccataggctgcctcca

SEQ ID NO: 4700925 - DNA, 25 bp, Homo sapien
cacactgggtgtacgataccatgga

SEQ ID NO: 4700926 - DNA, 25 bp, Homo sapien
tcacagcgaagtgttatctggccct

SEQ ID NO: 4700927 - DNA, 25 bp, Homo sapien
taccatggatccagagaccgttctg

SEQ ID NO: 4700928 - DNA, 25 bp, Homo sapien
tctgatttaggaggcatgactggaa

SEQ ID NO: 4700929 - DNA, 25 bp, Homo sapien
ctctctgctgaagaggtcccatgct

SEQ ID NO: 4700930 - DNA, 25 bp, Homo sapien
tctctgctgaagaggtcccatgctg

SEQ ID NO: 4700931 - DNA, 25 bp, Homo sapien
ggaaaactacaaatggcatgtctct

SEQ ID NO: 4700932 - DNA, 25 bp, Homo sapien
gaaggaaaactacaaatggcatgtc

SEQ ID NO: 4700933 - DNA, 25 bp, Homo sapien
ggaaggaaaactacaaatggcatgt

SEQ ID NO: 4700934 - DNA, 25 bp, Homo sapien
aaaactacaaatggcatgtctctca

SEQ ID NO: 4700935 - DNA, 25 bp, Homo sapien
taacaaatgcctcgcatggtcgcgg

SEQ ID NO: 4700936 - DNA, 25 bp, Homo sapien
tgtgagtctcagtgaccgaggacct

SEQ ID NO: 4700937 - DNA, 25 bp, Homo sapien
tacggtgtgtatctcgacgccagtc

SEQ ID NO: 4700938 - DNA, 25 bp, Homo sapien
tgcagccagccaaccgggattgttt

SEQ ID NO: 4700939 - DNA, 25 bp, Homo sapien
taaaaattagtgaggcatggtagtg

SEQ ID NO: 4700940 - DNA, 25 bp, Homo sapien
aaattagtgaggcatggtagtgcat

SEQ ID NO: 4700941 - DNA, 25 bp, Homo sapien
aaaaattagtgaggcatggtagtgc

SEQ ID NO: 4700942 - DNA, 25 bp, Homo sapien
tttaaaaattagtgaggcatggtag

SEQ ID NO: 4700943 - DNA, 25 bp, Homo sapien
ccaggagttcaagatcagcctgggc

SEQ ID NO: 4700944 - DNA, 25 bp, Homo sapien
tcagcctgggcaaaatggtgagact

SEQ ID NO: 4700945 - DNA, 25 bp, Homo sapien
actgaggcaggaggacagctagagg

SEQ ID NO: 4700946 - DNA, 25 bp, Homo sapien
agatcagcctgggcaaaatggtgag

SEQ ID NO: 4700947 - DNA, 25 bp, Homo sapien
gaggatctcttctgggaatgagtcc

SEQ ID NO: 4700948 - DNA, 25 bp, Homo sapien
tcctatccaaatcactgtagaaggg

SEQ ID NO: 4700949 - DNA, 25 bp, Homo sapien
ggaagtctcacatcatgcggctggt

SEQ ID NO: 4700950 - DNA, 25 bp, Homo sapien
gaatgagtccttctgggaagtctca

SEQ ID NO: 4700951 - DNA, 25 bp, Homo sapien
gagagacctctgcttttggatgtag

SEQ ID NO: 4700952 - DNA, 25 bp, Homo sapien
gtggtatcactggttaatggattat

SEQ ID NO: 4700953 - DNA, 25 bp, Homo sapien
gcttaaatgaactgagagtggtatc

SEQ ID NO: 4700954 - DNA, 25 bp, Homo sapien
tcagccggatgatatgagagacctc

SEQ ID NO: 4700955 - DNA, 25 bp, Homo sapien
ccaaaggcacccgagaaggtggtgt

SEQ ID NO: 4700956 - DNA, 25 bp, Homo sapien
tggtgtgcaaagggccacgctgatc

SEQ ID NO: 4700957 - DNA, 25 bp, Homo sapien
tcagactcagctcccgtcagtctct

SEQ ID NO: 4700958 - DNA, 25 bp, Homo sapien
ttctagagccataatgcaccaaagg

SEQ ID NO: 4700959 - DNA, 25 bp, Homo sapien
gaaaggctacgagtggtcaagaaca

SEQ ID NO: 4700960 - DNA, 25 bp, Homo sapien
gtttagttcacgagctgccctctgg

SEQ ID NO: 4700961 - DNA, 25 bp, Homo sapien
tctctcagtcaccagaaaggcacca

SEQ ID NO: 4700962 - DNA, 25 bp, Homo sapien
gaaagtctggcgaacagcttctctc

SEQ ID NO: 4700963 - DNA, 25 bp, Homo sapien
cctcatgtggaggagaattccttta

SEQ ID NO: 4700964 - DNA, 25 bp, Homo sapien
ggcatcgacctcctcatgtggagga

SEQ ID NO: 4700965 - DNA, 25 bp, Homo sapien
tccaggcatcgacctcctcatgtgg

SEQ ID NO: 4700966 - DNA, 25 bp, Homo sapien
atagcaatggttcttaatgggggtg

SEQ ID NO: 4700967 - DNA, 25 bp, Homo sapien
tgggcgggctatttctgacctcacc

SEQ ID NO: 4700968 - DNA, 25 bp, Homo sapien
gagcagcaaatacggtgaaagaatg

SEQ ID NO: 4700969 - DNA, 25 bp, Homo sapien
ccatgaggagcagcaaatacggtga

SEQ ID NO: 4700970 - DNA, 25 bp, Homo sapien
tgggagcgaaggctcaccaaggctg

SEQ ID NO: 4700971 - DNA, 25 bp, Homo sapien
gactgtggcgggctgggtgttgggc

SEQ ID NO: 4700972 - DNA, 25 bp, Homo sapien
ctgtggcgggctgggtgttgggctc

SEQ ID NO: 4700973 - DNA, 25 bp, Homo sapien
cggactgtggcgggctgggtgttgg

SEQ ID NO: 4700974 - DNA, 25 bp, Homo sapien
actgtggcgggctgggtgttgggct

SEQ ID NO: 4700975 - DNA, 25 bp, Homo sapien
gacttaggaacaccgacagcctgct

SEQ ID NO: 4700976 - DNA, 25 bp, Homo sapien
caaagatttccctgacttaggaaca

SEQ ID NO: 4700977 - DNA, 25 bp, Homo sapien
tccctgacttaggaacaccgacagc

SEQ ID NO: 4700978 - DNA, 25 bp, Homo sapien
gatttccctgacttaggaacaccga

SEQ ID NO: 4700979 - DNA, 25 bp, Homo sapien
accagcatgatgcagtgagcagcca

SEQ ID NO: 4700980 - DNA, 25 bp, Homo sapien
gctctgagcagggtgaaaccagcat

SEQ ID NO: 4700981 - DNA, 25 bp, Homo sapien
aagcagcgctgccatatgcatagga

SEQ ID NO: 4700982 - DNA, 25 bp, Homo sapien
gattagcccaataccaaatgtagca

SEQ ID NO: 4700983 - DNA, 25 bp, Homo sapien
tcaaagaccttgactctgcggaggc

SEQ ID NO: 4700984 - DNA, 25 bp, Homo sapien
caaagaggttaaggcactgcaggtc

SEQ ID NO: 4700985 - DNA, 25 bp, Homo sapien
tcctttatcagacagcagttggcgg

SEQ ID NO: 4700986 - DNA, 25 bp, Homo sapien
ggctttaggcaacaccacgatcagg

SEQ ID NO: 4700987 - DNA, 25 bp, Homo sapien
gaaaaatcaacggagaggggtcaca

SEQ ID NO: 4700988 - DNA, 25 bp, Homo sapien
ctgaaaaatcaacggagaggggtca

SEQ ID NO: 4700989 - DNA, 25 bp, Homo sapien
aaatcaacggagaggggtcacagcc

SEQ ID NO: 4700990 - DNA, 25 bp, Homo sapien
aaaatcaacggagaggggtcacagc

SEQ ID NO: 4700991 - DNA, 25 bp, Homo sapien
aaggaaaagtagctcaaagcggctg

SEQ ID NO: 4700992 - DNA, 25 bp, Homo sapien
gcttacatgatctcaaacagctggg

SEQ ID NO: 4700993 - DNA, 25 bp, Homo sapien
tgagagagctgcacatatcagggaa

SEQ ID NO: 4700994 - DNA, 25 bp, Homo sapien
cagctaacttcttatggagacaggg

SEQ ID NO: 4700995 - DNA, 25 bp, Homo sapien
aaccagtgacatgaccggaaccgtg

SEQ ID NO: 4700996 - DNA, 25 bp, Homo sapien
ccttcacagaggacaagacatgaga

SEQ ID NO: 4700997 - DNA, 25 bp, Homo sapien
gaagggcaccgaagcacaaattatg

SEQ ID NO: 4700998 - DNA, 25 bp, Homo sapien
gatatcgataatgaagtgctcccag

SEQ ID NO: 4700999 - DNA, 25 bp, Homo sapien
gcgcctgaacactggagattgaggt

SEQ ID NO: 4701000 - DNA, 25 bp, Homo sapien
ggcgcctgaacactggagattgagg

SEQ ID NO: 4701001 - DNA, 25 bp, Homo sapien
gtgggaggcgcctgaacactggaga

SEQ ID NO: 4701002 - DNA, 25 bp, Homo sapien
cgcctgaacactggagattgaggtt

SEQ ID NO: 4701003 - DNA, 25 bp, Homo sapien
tatggtgggagtatactgacatcac

SEQ ID NO: 4701004 - DNA, 25 bp, Homo sapien
gataccttctcagtcaagaggccac

SEQ ID NO: 4701005 - DNA, 25 bp, Homo sapien
tatctggaatcaagtccgctgggcg

SEQ ID NO: 4701006 - DNA, 25 bp, Homo sapien
ccatgagctggagttggcttgcaca

SEQ ID NO: 4701007 - DNA, 25 bp, Homo sapien
aaagtttcagctttgctaagttaat

SEQ ID NO: 4701008 - DNA, 25 bp, Homo sapien
gcaatgatcctagtgaagtatatgt

SEQ ID NO: 4701009 - DNA, 25 bp, Homo sapien
aatggaacagcgagtttgaggagaa

SEQ ID NO: 4701010 - DNA, 25 bp, Homo sapien
ttccactggaatggaacagcgagtt

SEQ ID NO: 4701011 - DNA, 25 bp, Homo sapien
gaaatgcaatgatcctagtgaagta

SEQ ID NO: 4701012 - DNA, 25 bp, Homo sapien
aaataaagagattagcaacactgtt

SEQ ID NO: 4701013 - DNA, 25 bp, Homo sapien
caaaataaagagattagcaacactg

SEQ ID NO: 4701014 - DNA, 25 bp, Homo sapien
ccaccccaaaataaagagattagca

SEQ ID NO: 4701015 - DNA, 25 bp, Homo sapien
cccaaaataaagagattagcaacac

SEQ ID NO: 4701016 - DNA, 25 bp, Homo sapien
taggggttatctgaagccggacgga

SEQ ID NO: 4701017 - DNA, 25 bp, Homo sapien
ttgtaggtaggggttatctgaagcc

SEQ ID NO: 4701018 - DNA, 25 bp, Homo sapien
tctgaagccggacggaatttatacc

SEQ ID NO: 4701019 - DNA, 25 bp, Homo sapien
gttatctgaagccggacggaattta

SEQ ID NO: 4701020 - DNA, 25 bp, Homo sapien
agtaaaggagacgatgctgcgaccc

SEQ ID NO: 4701021 - DNA, 25 bp, Homo sapien
gggaacctcccattacgactgtgga

SEQ ID NO: 4701022 - DNA, 25 bp, Homo sapien
caagcagagcttagcatgggccgag

SEQ ID NO: 4701023 - DNA, 25 bp, Homo sapien
caaagaaccccgtgttatgcggacg

SEQ ID NO: 4701024 - DNA, 25 bp, Homo sapien
tgtcaaagaagcaccaaaacaaaat

SEQ ID NO: 4701025 - DNA, 25 bp, Homo sapien
cgtgggccgcgttgtcaaagaagca

SEQ ID NO: 4701026 - DNA, 25 bp, Homo sapien
gaaagtcagtgttactttggactgt

SEQ ID NO: 4701027 - DNA, 25 bp, Homo sapien
ttggactgtgccctcatacccaggc

SEQ ID NO: 4701028 - DNA, 25 bp, Homo sapien
agactgggtggatgtccgtgtcacc

SEQ ID NO: 4701029 - DNA, 25 bp, Homo sapien
caccaaggcctatagggaacaatgg

SEQ ID NO: 4701030 - DNA, 25 bp, Homo sapien
aaagcccaggcacgagagcaagagg

SEQ ID NO: 4701031 - DNA, 25 bp, Homo sapien
aagtaaggcctacaggacgctctgc

SEQ ID NO: 4701032 - DNA, 25 bp, Homo sapien
gccaggaagcccgtcatgagatgca

SEQ ID NO: 4701033 - DNA, 25 bp, Homo sapien
tcatgctaggtcatcaaggaaaaag

SEQ ID NO: 4701034 - DNA, 25 bp, Homo sapien
ttcaagacaggcctcatgctaggtc

SEQ ID NO: 4701035 - DNA, 25 bp, Homo sapien
tcttattgctcttcggagcccacag

SEQ ID NO: 4701036 - DNA, 25 bp, Homo sapien
cacagaaggtgagctggtctatgag

SEQ ID NO: 4701037 - DNA, 25 bp, Homo sapien
tactgggtgtcaaaagccgcttggc

SEQ ID NO: 4701038 - DNA, 25 bp, Homo sapien
gtagcagaactaggcagagatactg

SEQ ID NO: 4701039 - DNA, 25 bp, Homo sapien
tctcttgcctcacagaaggtgagct

SEQ ID NO: 4701040 - DNA, 25 bp, Homo sapien
gccgttggtcaccttcttgactttc

SEQ ID NO: 4701041 - DNA, 25 bp, Homo sapien
cgttggtcaccttcttgactttctt

SEQ ID NO: 4701042 - DNA, 25 bp, Homo sapien
ccgttggtcaccttcttgactttct

SEQ ID NO: 4701043 - DNA, 25 bp, Homo sapien
cattcccgcctgaaagaggatccag

SEQ ID NO: 4701044 - DNA, 25 bp, Homo sapien
aacttgggacagtgagtgtgacccc

SEQ ID NO: 4701045 - DNA, 25 bp, Homo sapien
ttttggaagcaaccctacctagctg

SEQ ID NO: 4701046 - DNA, 25 bp, Homo sapien
caaaatcaggtttccgcggcactgt

SEQ ID NO: 4701047 - DNA, 25 bp, Homo sapien
cagaagtgaacacttagggtgcatt

SEQ ID NO: 4701048 - DNA, 25 bp, Homo sapien
ccaagtgaacttgaaaaaggtccag

SEQ ID NO: 4701049 - DNA, 25 bp, Homo sapien
aagtgaacacttagggtgcatttac

SEQ ID NO: 4701050 - DNA, 25 bp, Homo sapien
tgaaaaaggtccagaagtgaacact

SEQ ID NO: 4701051 - DNA, 25 bp, Homo sapien
tgcacaggaaaacaaagtgttaaaa

SEQ ID NO: 4701052 - DNA, 25 bp, Homo sapien
ctgcacaggaaaacaaagtgttaaa

SEQ ID NO: 4701053 - DNA, 25 bp, Homo sapien
tctgcttgcgggagaaacagcaaat

SEQ ID NO: 4701054 - DNA, 25 bp, Homo sapien
tggaatctgaacacccaacgctggc

SEQ ID NO: 4701055 - DNA, 25 bp, Homo sapien
tccgagcagggaggtttcatcacac

SEQ ID NO: 4701056 - DNA, 25 bp, Homo sapien
tgagtgagcccagacatacgcgtgg

SEQ ID NO: 4701057 - DNA, 25 bp, Homo sapien
gcagcgctttcagtccacaacagat

SEQ ID NO: 4701058 - DNA, 25 bp, Homo sapien
cagttacaatacagacatggccaga

SEQ ID NO: 4701059 - DNA, 25 bp, Homo sapien
ggactgtgaaactcaggctgcagga

SEQ ID NO: 4701060 - DNA, 25 bp, Homo sapien
caatggttctgctatgtgcatccga

SEQ ID NO: 4701061 - DNA, 25 bp, Homo sapien
gaagaccagcctatatggcccagag

SEQ ID NO: 4701062 - DNA, 25 bp, Homo sapien
tatcttacgtgctccaaaggctgac

SEQ ID NO: 4701063 - DNA, 25 bp, Homo sapien
ggaggaaatctcacccacacgaggt

SEQ ID NO: 4701064 - DNA, 25 bp, Homo sapien
ttagccggtgtacccagaatgagcc

SEQ ID NO: 4701065 - DNA, 25 bp, Homo sapien
tattttacacatttgcaacacggca

SEQ ID NO: 4701066 - DNA, 25 bp, Homo sapien
cacggcaagagaattcaccccgtac

SEQ ID NO: 4701067 - DNA, 25 bp, Homo sapien
tgcaacacggcaagagaattcaccc

SEQ ID NO: 4701068 - DNA, 25 bp, Homo sapien
cacatttgcaacacggcaagagaat

SEQ ID NO: 4701069 - DNA, 25 bp, Homo sapien
actccagcccatgggtagtggctgc

SEQ ID NO: 4701070 - DNA, 25 bp, Homo sapien
aactccagcccatgggtagtggctg

SEQ ID NO: 4701071 - DNA, 25 bp, Homo sapien
ctcccgctgagctggttctcgcttg

SEQ ID NO: 4701072 - DNA, 25 bp, Homo sapien
ggttctcgcttgtccccaccatcct

SEQ ID NO: 4701073 - DNA, 25 bp, Homo sapien
gagggatctggtgtagacctgggag

SEQ ID NO: 4701074 - DNA, 25 bp, Homo sapien
taacagttgaccagactgtgctgag

SEQ ID NO: 4701075 - DNA, 25 bp, Homo sapien
agttggagggatctggtgtagacct

SEQ ID NO: 4701076 - DNA, 25 bp, Homo sapien
agaatgtcccaaccttgaggaccaa

SEQ ID NO: 4701077 - DNA, 25 bp, Homo sapien
catatcttgagaactctcctatcct

SEQ ID NO: 4701078 - DNA, 25 bp, Homo sapien
aacgtcacctatgttttctgcatcc

SEQ ID NO: 4701079 - DNA, 25 bp, Homo sapien
gaggcatctccataacccagaaggc

SEQ ID NO: 4701080 - DNA, 25 bp, Homo sapien
gccgcctgaggtgttacccagcaaa

SEQ ID NO: 4701081 - DNA, 25 bp, Homo sapien
gcgcccagcaggagcggctgggccg

SEQ ID NO: 4701082 - DNA, 25 bp, Homo sapien
ttggggcgcccagcaggagcggctg

SEQ ID NO: 4701083 - DNA, 25 bp, Homo sapien
cggacccggttggggcgcccagcag

SEQ ID NO: 4701084 - DNA, 25 bp, Homo sapien
gggcgcccagcaggagcggctgggc

SEQ ID NO: 4701085 - DNA, 25 bp, Homo sapien
ggtcagctcctccacaacttcgggc

SEQ ID NO: 4701086 - DNA, 25 bp, Homo sapien
tcagctcctccacaacttcgggctt

SEQ ID NO: 4701087 - DNA, 25 bp, Homo sapien
ggcaacagcccctgcccgttgggac

SEQ ID NO: 4701088 - DNA, 25 bp, Homo sapien
tggcaacagcccctgcccgttggga

SEQ ID NO: 4701089 - DNA, 25 bp, Homo sapien
caacagcccctgcccgttgggacag

SEQ ID NO: 4701090 - DNA, 25 bp, Homo sapien
cctggcaacagcccctgcccgttgg

SEQ ID NO: 4701091 - DNA, 25 bp, Homo sapien
gagctgaagcgtgggcttggacaga

SEQ ID NO: 4701092 - DNA, 25 bp, Homo sapien
gcatggagctgaagcgtgggcttgg

SEQ ID NO: 4701093 - DNA, 25 bp, Homo sapien
ttgttccaagcatgaggggtgaggg

SEQ ID NO: 4701094 - DNA, 25 bp, Homo sapien
gtgaggggcatggagctgaagcgtg

SEQ ID NO: 4701095 - DNA, 25 bp, Homo sapien
gtagcagctcttgggatgtgagctc

SEQ ID NO: 4701096 - DNA, 25 bp, Homo sapien
ttccaggtagcagctcttgggatgt

SEQ ID NO: 4701097 - DNA, 25 bp, Homo sapien
agagggtgagaacagcccctgtgcc

SEQ ID NO: 4701098 - DNA, 25 bp, Homo sapien
agcagactagcacccgctcaggaaa

SEQ ID NO: 4701099 - DNA, 25 bp, Homo sapien
aaggagtccccagcgaatctcacaa

SEQ ID NO: 4701100 - DNA, 25 bp, Homo sapien
gccacatctggacttagcttgaagg

SEQ ID NO: 4701101 - DNA, 25 bp, Homo sapien
cccagcgaatctcacaaaacagcag

SEQ ID NO: 4701102 - DNA, 25 bp, Homo sapien
tctggacttagcttgaaggagtccc

SEQ ID NO: 4701103 - DNA, 25 bp, Homo sapien
gggattcaggcacagcagtcataga

SEQ ID NO: 4701104 - DNA, 25 bp, Homo sapien
tgggattcaggcacagcagtcatag

SEQ ID NO: 4701105 - DNA, 25 bp, Homo sapien
tacacgtaagagcaggcccctgctg

SEQ ID NO: 4701106 - DNA, 25 bp, Homo sapien
ctgcggaggccgctacacgtaagag

SEQ ID NO: 4701107 - DNA, 25 bp, Homo sapien
gcagagaaataggcactctctcatc

SEQ ID NO: 4701108 - DNA, 25 bp, Homo sapien
aacatccccagccttttaactccat

SEQ ID NO: 4701109 - DNA, 25 bp, Homo sapien
aatgcagagaaataggcactctctc

SEQ ID NO: 4701110 - DNA, 25 bp, Homo sapien
catccccagccttttaactccataa

SEQ ID NO: 4701111 - DNA, 25 bp, Homo sapien
ggagccagacacagaacaatccggc

SEQ ID NO: 4701112 - DNA, 25 bp, Homo sapien
agccagacacagaacaatccggcca

SEQ ID NO: 4701113 - DNA, 25 bp, Homo sapien
caggagccagacacagaacaatccg

SEQ ID NO: 4701114 - DNA, 25 bp, Homo sapien
agacacagaacaatccggccaccaa

SEQ ID NO: 4701115 - DNA, 25 bp, Homo sapien
agaaggaaagcattcgctgtttccc

SEQ ID NO: 4701116 - DNA, 25 bp, Homo sapien
aaagcattcgctgtttcccccacag

SEQ ID NO: 4701117 - DNA, 25 bp, Homo sapien
aggaaagcattcgctgtttccccca

SEQ ID NO: 4701118 - DNA, 25 bp, Homo sapien
gaaggaaagcattcgctgtttcccc

SEQ ID NO: 4701119 - DNA, 25 bp, Homo sapien
tgagatcatgttgcgctcaggcgca

SEQ ID NO: 4701120 - DNA, 25 bp, Homo sapien
ttttaattgagatcatgttgcgctc

SEQ ID NO: 4701121 - DNA, 25 bp, Homo sapien
atgttgcgctcaggcgcagcaaagg

SEQ ID NO: 4701122 - DNA, 25 bp, Homo sapien
cgctcaggcgcagcaaaggcctcat

SEQ ID NO: 4701123 - DNA, 25 bp, Homo sapien
tgcttccgaaacaccgaggtctggc

SEQ ID NO: 4701124 - DNA, 25 bp, Homo sapien
tcccctcccagaatgcagtggatct

SEQ ID NO: 4701125 - DNA, 25 bp, Homo sapien
gcagtggatctgcttccgaaacacc

SEQ ID NO: 4701126 - DNA, 25 bp, Homo sapien
ggatctgcttccgaaacaccgaggt

SEQ ID NO: 4701127 - DNA, 25 bp, Homo sapien
aggggtggaaccagcattggccact

SEQ ID NO: 4701128 - DNA, 25 bp, Homo sapien
gggtggaaccagcattggccactgc

SEQ ID NO: 4701129 - DNA, 25 bp, Homo sapien
caggggtggaaccagcattggccac

SEQ ID NO: 4701130 - DNA, 25 bp, Homo sapien
gtggaaccagcattggccactgcca

SEQ ID NO: 4701131 - DNA, 25 bp, Homo sapien
tggctgagcaaagccgctgcaggag

SEQ ID NO: 4701132 - DNA, 25 bp, Homo sapien
tcgccgcgcgttccccagcccttct

SEQ ID NO: 4701133 - DNA, 25 bp, Homo sapien
ccactgcctggctaaagggcagctg

SEQ ID NO: 4701134 - DNA, 25 bp, Homo sapien
gagctcccgggcactcctggctgag

SEQ ID NO: 4701135 - DNA, 25 bp, Homo sapien
ctgttgtacttattactcgatgccc

SEQ ID NO: 4701136 - DNA, 25 bp, Homo sapien
gctgttgtacttattactcgatgcc

SEQ ID NO: 4701137 - DNA, 25 bp, Homo sapien
tgctgttgtacttattactcgatgc

SEQ ID NO: 4701138 - DNA, 25 bp, Homo sapien
agagtaacgtgacagcagacgcagg

SEQ ID NO: 4701139 - DNA, 25 bp, Homo sapien
taaaatggagtgctcggcggcactg

SEQ ID NO: 4701140 - DNA, 25 bp, Homo sapien
gcggcactgcctccaagctcagagt

SEQ ID NO: 4701141 - DNA, 25 bp, Homo sapien
tccaagctcagagtaacgtgacagc

SEQ ID NO: 4701142 - DNA, 25 bp, Homo sapien
cttggacaagggcggcagcctcttc

SEQ ID NO: 4701143 - DNA, 25 bp, Homo sapien
gtcccacgaaagaggtcaactcctg

SEQ ID NO: 4701144 - DNA, 25 bp, Homo sapien
gaaagaggtcaactcctgagacctc

SEQ ID NO: 4701145 - DNA, 25 bp, Homo sapien
atttcccacaacgacaggccccgtg

SEQ ID NO: 4701146 - DNA, 25 bp, Homo sapien
acaagtaaatgagggtctggagcgc

SEQ ID NO: 4701147 - DNA, 25 bp, Homo sapien
gggcctttgggtttgagcagcacaa

SEQ ID NO: 4701148 - DNA, 25 bp, Homo sapien
cgagtgacccatcttactaaatcag

SEQ ID NO: 4701149 - DNA, 25 bp, Homo sapien
tttgggcctggccacgagtgaccca

SEQ ID NO: 4701150 - DNA, 25 bp, Homo sapien
cagcacaagaatagaaggcggggcc

SEQ ID NO: 4701151 - DNA, 25 bp, Homo sapien
cagaaaagtaggcttttagctcagg

SEQ ID NO: 4701152 - DNA, 25 bp, Homo sapien
tcccgggagatgggcagacattcgc

SEQ ID NO: 4701153 - DNA, 25 bp, Homo sapien
gcagacattcgctggggggcctccc

SEQ ID NO: 4701154 - DNA, 25 bp, Homo sapien
agtaggcttttagctcagggaaggt

SEQ ID NO: 4701155 - DNA, 25 bp, Homo sapien
cactgctggacctccttctcggtaa

SEQ ID NO: 4701156 - DNA, 25 bp, Homo sapien
catcggctgtcccagggaggcacag

SEQ ID NO: 4701157 - DNA, 25 bp, Homo sapien
ctgctgcccagtaagtcatcggctg

SEQ ID NO: 4701158 - DNA, 25 bp, Homo sapien
gtaagtcatcggctgtcccagggag

SEQ ID NO: 4701159 - DNA, 25 bp, Homo sapien
ccagtaagtcatcggctgtcccagg

SEQ ID NO: 4701160 - DNA, 25 bp, Homo sapien
cttctcaggtgggagaggaaaacca

SEQ ID NO: 4701161 - DNA, 25 bp, Homo sapien
gcgcttctcaggtgggagaggaaaa

SEQ ID NO: 4701162 - DNA, 25 bp, Homo sapien
ttctcaggtgggagaggaaaaccat

SEQ ID NO: 4701163 - DNA, 25 bp, Homo sapien
ctggcgcttctcaggtgggagagga

SEQ ID NO: 4701164 - DNA, 25 bp, Homo sapien
tttccatcatggactggtgcccgat

SEQ ID NO: 4701165 - DNA, 25 bp, Homo sapien
tgcccgatgacggtgtgtaccctgc

SEQ ID NO: 4701166 - DNA, 25 bp, Homo sapien
tccacgacggtgaattgggctcaag

SEQ ID NO: 4701167 - DNA, 25 bp, Homo sapien
acctttacaggcctgggatctgcca

SEQ ID NO: 4701168 - DNA, 25 bp, Homo sapien
cagacccacagtggaagggacagga

SEQ ID NO: 4701169 - DNA, 25 bp, Homo sapien
cttctgcttgattccagacccacag

SEQ ID NO: 4701170 - DNA, 25 bp, Homo sapien
ttcttccacatcttctgcttgattc

SEQ ID NO: 4701171 - DNA, 25 bp, Homo sapien
ttccagacccacagtggaagggaca

SEQ ID NO: 4701172 - DNA, 25 bp, Homo sapien
aagctgtggctccttgttcaaagag

SEQ ID NO: 4701173 - DNA, 25 bp, Homo sapien
ccaccaccaacatcgcctgcccggg

SEQ ID NO: 4701174 - DNA, 25 bp, Homo sapien
cctgcccggggcccaggaaagctgt

SEQ ID NO: 4701175 - DNA, 25 bp, Homo sapien
ggaaagctgtggctccttgttcaaa

SEQ ID NO: 4701176 - DNA, 25 bp, Homo sapien
tgcttgtagatcttctggaagcctg

SEQ ID NO: 4701177 - DNA, 25 bp, Homo sapien
gcttgtagatcttctggaagcctgc

SEQ ID NO: 4701178 - DNA, 25 bp, Homo sapien
tctggaagcctgccgcatccagctg

SEQ ID NO: 4701179 - DNA, 25 bp, Homo sapien
aattgcttgtagatcttctggaagc

SEQ ID NO: 4701180 - DNA, 25 bp, Homo sapien
gaactcggagaactcaattcgcccg

SEQ ID NO: 4701181 - DNA, 25 bp, Homo sapien
gcgcctggatgaactcggagaactc

SEQ ID NO: 4701182 - DNA, 25 bp, Homo sapien
gatgaactcggagaactcaattcgc

SEQ ID NO: 4701183 - DNA, 25 bp, Homo sapien
ttccccgtgaggtcaccgacagcgc

SEQ ID NO: 4701184 - DNA, 25 bp, Homo sapien
cagctgctgccacacagggccaagg

SEQ ID NO: 4701185 - DNA, 25 bp, Homo sapien
cacagggccaagggggcaggactta

SEQ ID NO: 4701186 - DNA, 25 bp, Homo sapien
cacacagggccaagggggcaggact

SEQ ID NO: 4701187 - DNA, 25 bp, Homo sapien
tgctgccacacagggccaagggggc

SEQ ID NO: 4701188 - DNA, 25 bp, Homo sapien
cattgtccaagtcgtagagcttgaa

SEQ ID NO: 4701189 - DNA, 25 bp, Homo sapien
tccaagtcgtagagcttgaaggccc

SEQ ID NO: 4701190 - DNA, 25 bp, Homo sapien
catcattgtccaagtcgtagagctt

SEQ ID NO: 4701191 - DNA, 25 bp, Homo sapien
ggtgatgtagccatcattgtccaag

SEQ ID NO: 4701192 - DNA, 25 bp, Homo sapien
atcatggcaaagatccggtccaccc

SEQ ID NO: 4701193 - DNA, 25 bp, Homo sapien
tccatcatggcaaagatccggtcca

SEQ ID NO: 4701194 - DNA, 25 bp, Homo sapien
cttatccatcatggcaaagatccgg

SEQ ID NO: 4701195 - DNA, 25 bp, Homo sapien
ctcttctcaggagtgttctcctcct

SEQ ID NO: 4701196 - DNA, 25 bp, Homo sapien
agcccgtcgtagagggacagcgcct

SEQ ID NO: 4701197 - DNA, 25 bp, Homo sapien
gacagcgcctgcacaatggacgggt

SEQ ID NO: 4701198 - DNA, 25 bp, Homo sapien
tctgccttggaaccctcctggaact

SEQ ID NO: 4701199 - DNA, 25 bp, Homo sapien
cacaatggacgggtctgccttggaa

SEQ ID NO: 4701200 - DNA, 25 bp, Homo sapien
tataacaaggcattcaacgtcactg

SEQ ID NO: 4701201 - DNA, 25 bp, Homo sapien
gacgtggacaagaacgctgatctct

SEQ ID NO: 4701202 - DNA, 25 bp, Homo sapien
gctgatctctggacaataccttgga

SEQ ID NO: 4701203 - DNA, 25 bp, Homo sapien
cactactagtgggaccgcaaaacag

SEQ ID NO: 4701204 - DNA, 25 bp, Homo sapien
taattcacttgctatccagggatgg

SEQ ID NO: 4701205 - DNA, 25 bp, Homo sapien
tggaagcctccgtgaagacatgtgg

SEQ ID NO: 4701206 - DNA, 25 bp, Homo sapien
taaacgtggcctgcttagatcatgg

SEQ ID NO: 4701207 - DNA, 25 bp, Homo sapien
taaatgctgaaaccgcgctgggaac

SEQ ID NO: 4701208 - DNA, 25 bp, Homo sapien
tgagcctggatgctaagatgccaag

SEQ ID NO: 4701209 - DNA, 25 bp, Homo sapien
caatgagcagaactgacttgcgcaa

SEQ ID NO: 4701210 - DNA, 25 bp, Homo sapien
gactcttgctcccatccaagggatg

SEQ ID NO: 4701211 - DNA, 25 bp, Homo sapien
catggacgacatacagcaggagctt

SEQ ID NO: 4701212 - DNA, 25 bp, Homo sapien
ctttctcttcaggaaactgggaaga

SEQ ID NO: 4701213 - DNA, 25 bp, Homo sapien
acattctttctcttcaggaaactgg

SEQ ID NO: 4701214 - DNA, 25 bp, Homo sapien
tctcttcaggaaactgggaagacaa

SEQ ID NO: 4701215 - DNA, 25 bp, Homo sapien
actgggaagacaacacccaaagcca

SEQ ID NO: 4701216 - DNA, 25 bp, Homo sapien
acaggttcctgccacatgcccagct

SEQ ID NO: 4701217 - DNA, 25 bp, Homo sapien
ggattacaggttcctgccacatgcc

SEQ ID NO: 4701218 - DNA, 25 bp, Homo sapien
ttacaggttcctgccacatgcccag

SEQ ID NO: 4701219 - DNA, 25 bp, Homo sapien
tcccaaagtactgcaattacaagcg

SEQ ID NO: 4701220 - DNA, 25 bp, Homo sapien
ccggtgacgtcgaagacgaaggcca

SEQ ID NO: 4701221 - DNA, 25 bp, Homo sapien
ctgcgttccagaatgcgcgaggcgc

SEQ ID NO: 4701222 - DNA, 25 bp, Homo sapien
tgcatcagttcgtcccacatggagc

SEQ ID NO: 4701223 - DNA, 25 bp, Homo sapien
gaggcgccatcgatcacctgcatca

SEQ ID NO: 4701224 - DNA, 25 bp, Homo sapien
cacgtggtgccccacttcctcgccc

SEQ ID NO: 4701225 - DNA, 25 bp, Homo sapien
ccacgtggtgccccacttcctcgcc

SEQ ID NO: 4701226 - DNA, 25 bp, Homo sapien
ctgaaacactgtggggtccgccgtg

SEQ ID NO: 4701227 - DNA, 25 bp, Homo sapien
tggggtccgccgtgagggtcactgg

SEQ ID NO: 4701228 - DNA, 25 bp, Homo sapien
ctgcacgtagagttctctcagctcc

SEQ ID NO: 4701229 - DNA, 25 bp, Homo sapien
gtagagttctctcagctccctctga

SEQ ID NO: 4701230 - DNA, 25 bp, Homo sapien
aaaagacgtagatgaaggatccggg

SEQ ID NO: 4701231 - DNA, 25 bp, Homo sapien
gggttggcaacctccacggcagcct

SEQ ID NO: 4701232 - DNA, 25 bp, Homo sapien
cgcgggcatccgaaaagacgtagat

SEQ ID NO: 4701233 - DNA, 25 bp, Homo sapien
ttccttcttgtgatagtctttggcg

SEQ ID NO: 4701234 - DNA, 25 bp, Homo sapien
aagccagaagcaagggatccgacag

SEQ ID NO: 4701235 - DNA, 25 bp, Homo sapien
cagaagcaagggatccgacaggtct

SEQ ID NO: 4701236 - DNA, 25 bp, Homo sapien
aaaagccagaagcaagggatccgac

SEQ ID NO: 4701237 - DNA, 25 bp, Homo sapien
caagggatccgacaggtcttccaaa

SEQ ID NO: 4701238 - DNA, 25 bp, Homo sapien
aggatgggtgcggtcgccacagtcc

SEQ ID NO: 4701239 - DNA, 25 bp, Homo sapien
gagctggtggcagcgatctcctcat

SEQ ID NO: 4701240 - DNA, 25 bp, Homo sapien
atctcctcataagccaggtagccag

SEQ ID NO: 4701241 - DNA, 25 bp, Homo sapien
ggcagcgatctcctcataagccagg

SEQ ID NO: 4701242 - DNA, 25 bp, Homo sapien
tgcctggaaacacggaagcacctgc

SEQ ID NO: 4701243 - DNA, 25 bp, Homo sapien
tttgcctggaaacacggaagcacct

SEQ ID NO: 4701244 - DNA, 25 bp, Homo sapien
ttgcctggaaacacggaagcacctg

SEQ ID NO: 4701245 - DNA, 25 bp, Homo sapien
ctctgagtgaacgcagatcccggca

SEQ ID NO: 4701246 - DNA, 25 bp, Homo sapien
tgggctctgagtgaacgcagatccc

SEQ ID NO: 4701247 - DNA, 25 bp, Homo sapien
aggagcaaggctgagtggcaggtgc

SEQ ID NO: 4701248 - DNA, 25 bp, Homo sapien
tggcaggtgcctgcggagcactggg

SEQ ID NO: 4701249 - DNA, 25 bp, Homo sapien
ccaggcttgccgaatgtctgggaac

SEQ ID NO: 4701250 - DNA, 25 bp, Homo sapien
ttcccaggcttgccgaatgtctggg

SEQ ID NO: 4701251 - DNA, 25 bp, Homo sapien
tcccaggcttgccgaatgtctggga

SEQ ID NO: 4701252 - DNA, 25 bp, Homo sapien
aggcttgccgaatgtctgggaacat

SEQ ID NO: 4701253 - DNA, 25 bp, Homo sapien
ggatcctcccagaacatttgacagc

SEQ ID NO: 4701254 - DNA, 25 bp, Homo sapien
agcagataaatcatccccgaggatc

SEQ ID NO: 4701255 - DNA, 25 bp, Homo sapien
accagcgagcctgcgatgcactggg

SEQ ID NO: 4701256 - DNA, 25 bp, Homo sapien
tgctcgacccttcgcagcagataaa

SEQ ID NO: 4701257 - DNA, 25 bp, Homo sapien
cccctcccatggattttaggcagca

SEQ ID NO: 4701258 - DNA, 25 bp, Homo sapien
aagtatgaggagctgatgccggcag

SEQ ID NO: 4701259 - DNA, 25 bp, Homo sapien
ttccaggtcgcccaaggccacccca

SEQ ID NO: 4701260 - DNA, 25 bp, Homo sapien
gattttaggcagcatacaaactttc

SEQ ID NO: 4701261 - DNA, 25 bp, Homo sapien
ggccctggcccactcaatgagatgg

SEQ ID NO: 4701262 - DNA, 25 bp, Homo sapien
cactcaatgagatggtgacctcctt

SEQ ID NO: 4701263 - DNA, 25 bp, Homo sapien
tggaggcctggatcgctgactccac

SEQ ID NO: 4701264 - DNA, 25 bp, Homo sapien
caggtgcaccttggaggcctggatc

SEQ ID NO: 4701265 - DNA, 25 bp, Homo sapien
cctgggcttccacctcagtcttggg

SEQ ID NO: 4701266 - DNA, 25 bp, Homo sapien
cttggggccaaagaggaggccagcc

SEQ ID NO: 4701267 - DNA, 25 bp, Homo sapien
gaggccagccccggggtggtccata

SEQ ID NO: 4701268 - DNA, 25 bp, Homo sapien
tctctttctttgtcccatcctgggc

SEQ ID NO: 4701269 - DNA, 25 bp, Homo sapien
gcttaaaggctacgaccttggccga

SEQ ID NO: 4701270 - DNA, 25 bp, Homo sapien
cacagccccggatgctcaggcttaa

SEQ ID NO: 4701271 - DNA, 25 bp, Homo sapien
aggctacgaccttggccgagtcagg

SEQ ID NO: 4701272 - DNA, 25 bp, Homo sapien
cccggatgctcaggcttaaaggcta

SEQ ID NO: 4701273 - DNA, 25 bp, Homo sapien
tgtgatcctcactgaatggcggcca

SEQ ID NO: 4701274 - DNA, 25 bp, Homo sapien
gaagtcaatgttgctgacgcctgtg

SEQ ID NO: 4701275 - DNA, 25 bp, Homo sapien
aagccggctcggaagtcaatgttgc

SEQ ID NO: 4701276 - DNA, 25 bp, Homo sapien
cactcgagggtgtggttgaggtcca

SEQ ID NO: 4701277 - DNA, 25 bp, Homo sapien
ctccaccgagtctaggcggccgggt

SEQ ID NO: 4701278 - DNA, 25 bp, Homo sapien
ccttcaggcccgtggaattgatcac

SEQ ID NO: 4701279 - DNA, 25 bp, Homo sapien
tgagctttgtgccagctccaccgag

SEQ ID NO: 4701280 - DNA, 25 bp, Homo sapien
acagctgatgggtggagccattgga

SEQ ID NO: 4701281 - DNA, 25 bp, Homo sapien
tgtaggacactccagagacacgaag

SEQ ID NO: 4701282 - DNA, 25 bp, Homo sapien
ccttcaccttgaggtagaagcgctc

SEQ ID NO: 4701283 - DNA, 25 bp, Homo sapien
gacactccagagacacgaaggaggg

SEQ ID NO: 4701284 - DNA, 25 bp, Homo sapien
cccactgtaggacactccagagaca

SEQ ID NO: 4701285 - DNA, 25 bp, Homo sapien
ctgtgcaccgagcaggagaccagca

SEQ ID NO: 4701286 - DNA, 25 bp, Homo sapien
tgaaagtgcctctcttcgcccagcc

SEQ ID NO: 4701287 - DNA, 25 bp, Homo sapien
agcctggcttcacctcgccgcagct

SEQ ID NO: 4701288 - DNA, 25 bp, Homo sapien
agccatggatcctgggggccatgct

SEQ ID NO: 4701289 - DNA, 25 bp, Homo sapien
aatctgggcctttgctcgcccggtc

SEQ ID NO: 4701290 - DNA, 25 bp, Homo sapien
tgacggctgtgcactcgtacgtgcc

SEQ ID NO: 4701291 - DNA, 25 bp, Homo sapien
ccctgctgacggctgtgcactcgta

SEQ ID NO: 4701292 - DNA, 25 bp, Homo sapien
tgtgacaacaatctgggcctttgct

SEQ ID NO: 4701293 - DNA, 25 bp, Homo sapien
cagctgggcaactcggcccgtcgag

SEQ ID NO: 4701294 - DNA, 25 bp, Homo sapien
tgtgaccccattggcattgctggcc

SEQ ID NO: 4701295 - DNA, 25 bp, Homo sapien
ggagccagacggatgcccttgtgac

SEQ ID NO: 4701296 - DNA, 25 bp, Homo sapien
cagtcccggacccacgtcaggttgt

SEQ ID NO: 4701297 - DNA, 25 bp, Homo sapien
gggcttggctctcacggctccagga

SEQ ID NO: 4701298 - DNA, 25 bp, Homo sapien
agggcttggctctcacggctccagg

SEQ ID NO: 4701299 - DNA, 25 bp, Homo sapien
gtggggtgtggggtatccagaggct

SEQ ID NO: 4701300 - DNA, 25 bp, Homo sapien
gagctggtgtggatgctgacctgtg

SEQ ID NO: 4701301 - DNA, 25 bp, Homo sapien
ttagtcgcctggcagctgtaattcc

SEQ ID NO: 4701302 - DNA, 25 bp, Homo sapien
ggtcagtgccaacctcattagtcgc

SEQ ID NO: 4701303 - DNA, 25 bp, Homo sapien
cagggttccctgtgcgtccacatgg

SEQ ID NO: 4701304 - DNA, 25 bp, Homo sapien
tgtagtagagggtgaccgtctcctg

SEQ ID NO: 4701305 - DNA, 25 bp, Homo sapien
ctcgataccagatgactcggggcgg

SEQ ID NO: 4701306 - DNA, 25 bp, Homo sapien
ccacggcatttacagcagagaccga

SEQ ID NO: 4701307 - DNA, 25 bp, Homo sapien
tttacagcagagaccgacggtgggt

SEQ ID NO: 4701308 - DNA, 25 bp, Homo sapien
accccagatgcctcacacaccaaca

SEQ ID NO: 4701309 - DNA, 25 bp, Homo sapien
tcaggggccaggatcatttcaagac

SEQ ID NO: 4701310 - DNA, 25 bp, Homo sapien
aactcattgacagcccggcaggtgt

SEQ ID NO: 4701311 - DNA, 25 bp, Homo sapien
tgcagaggcgtcacccaactcattg

SEQ ID NO: 4701312 - DNA, 25 bp, Homo sapien
cgccagctggatttctgcagaggcg

SEQ ID NO: 4701313 - DNA, 25 bp, Homo sapien
ccttcagccacacgatctcagggac

SEQ ID NO: 4701314 - DNA, 25 bp, Homo sapien
cgtcacactccagcgtcagggactg

SEQ ID NO: 4701315 - DNA, 25 bp, Homo sapien
ggccatacccgacacgttggccttg

SEQ ID NO: 4701316 - DNA, 25 bp, Homo sapien
actggaaagccgttcgcgtcacact

SEQ ID NO: 4701317 - DNA, 25 bp, Homo sapien
ttctctgcccggcaggagtagagcc

SEQ ID NO: 4701318 - DNA, 25 bp, Homo sapien
gagggactggccctcgtccaggagg

SEQ ID NO: 4701319 - DNA, 25 bp, Homo sapien
aggagtagagcccagaatcaccctc

SEQ ID NO: 4701320 - DNA, 25 bp, Homo sapien
cacaaggagatggaagtccctctgg

SEQ ID NO: 4701321 - DNA, 25 bp, Homo sapien
ggacccctgaggtccaacactgcag

SEQ ID NO: 4701322 - DNA, 25 bp, Homo sapien
tagcacctcctgagcggccccggct

SEQ ID NO: 4701323 - DNA, 25 bp, Homo sapien
tctgcaccggccaatcctagcacct

SEQ ID NO: 4701324 - DNA, 25 bp, Homo sapien
ccggctccaagcacggaaggagggg

SEQ ID NO: 4701325 - DNA, 25 bp, Homo sapien
acctgcaggtgagggcctcccggaa

SEQ ID NO: 4701326 - DNA, 25 bp, Homo sapien
ctggacctgcaggtgagggcctccc

SEQ ID NO: 4701327 - DNA, 25 bp, Homo sapien
tgcaggtgagggcctcccggaagga

SEQ ID NO: 4701328 - DNA, 25 bp, Homo sapien
aggtgagggcctcccggaaggacag

SEQ ID NO: 4701329 - DNA, 25 bp, Homo sapien
acgtgactgccggtgatcctgagaa

SEQ ID NO: 4701330 - DNA, 25 bp, Homo sapien
actgccggtgatcctgagaacctgg

SEQ ID NO: 4701331 - DNA, 25 bp, Homo sapien
tgactgccggtgatcctgagaacct

SEQ ID NO: 4701332 - DNA, 25 bp, Homo sapien
cacgcactggtatcgtccctcatcc

SEQ ID NO: 4701333 - DNA, 25 bp, Homo sapien
cctagtgtagaccaccttggtgctg

SEQ ID NO: 4701334 - DNA, 25 bp, Homo sapien
gcctcacacaggagctgcactaggt

SEQ ID NO: 4701335 - DNA, 25 bp, Homo sapien
taggtggtcctccatgacggccacc

SEQ ID NO: 4701336 - DNA, 25 bp, Homo sapien
gggtgggcactcctcgagcctcaca

SEQ ID NO: 4701337 - DNA, 25 bp, Homo sapien
ccaccggcgccctcgatggtaggtg

SEQ ID NO: 4701338 - DNA, 25 bp, Homo sapien
tccacggagtactgcaggacggctt

SEQ ID NO: 4701339 - DNA, 25 bp, Homo sapien
agccgcgactcgttgctctctgcca

SEQ ID NO: 4701340 - DNA, 25 bp, Homo sapien
ttcaccacgtatggtcttccaccgg

SEQ ID NO: 4701341 - DNA, 25 bp, Homo sapien
gggctgtcccacgatggtggtcacc

SEQ ID NO: 4701342 - DNA, 25 bp, Homo sapien
tgtcccacgatggtggtcacctgtc

SEQ ID NO: 4701343 - DNA, 25 bp, Homo sapien
caggggctgtcccacgatggtggtc

SEQ ID NO: 4701344 - DNA, 25 bp, Homo sapien
gctgtcccacgatggtggtcacctg

SEQ ID NO: 4701345 - DNA, 25 bp, Homo sapien
ggctgggcggccattctgcagccac

SEQ ID NO: 4701346 - DNA, 25 bp, Homo sapien
cagctccacatggtcaatgtgcagt

SEQ ID NO: 4701347 - DNA, 25 bp, Homo sapien
agtgcccgcctcattggtggcctgg

SEQ ID NO: 4701348 - DNA, 25 bp, Homo sapien
aatgtgcagtgtggtcccctgcgag

SEQ ID NO: 4701349 - DNA, 25 bp, Homo sapien
ccaatgatactgaccgatgggaact

SEQ ID NO: 4701350 - DNA, 25 bp, Homo sapien
tgttctcacccccaatgatactgac

SEQ ID NO: 4701351 - DNA, 25 bp, Homo sapien
ccccaatgatactgaccgatgggaa

SEQ ID NO: 4701352 - DNA, 25 bp, Homo sapien
tcacccccaatgatactgaccgatg

SEQ ID NO: 4701353 - DNA, 25 bp, Homo sapien
cagcacaagtgtagatgccctcgtc

SEQ ID NO: 4701354 - DNA, 25 bp, Homo sapien
aggttggtagcagcacaagtgtaga

SEQ ID NO: 4701355 - DNA, 25 bp, Homo sapien
ttggtagcagcacaagtgtagatgc

SEQ ID NO: 4701356 - DNA, 25 bp, Homo sapien
acaagtgtagatgccctcgtccctc

SEQ ID NO: 4701357 - DNA, 25 bp, Homo sapien
cagcactgccttgttgactgggcct

SEQ ID NO: 4701358 - DNA, 25 bp, Homo sapien
tgttgactgggcctggctcgatgtt

SEQ ID NO: 4701359 - DNA, 25 bp, Homo sapien
cactccaaggtcactgaggcatttt

SEQ ID NO: 4701360 - DNA, 25 bp, Homo sapien
ctccaaggtcactgaggcattttcc

SEQ ID NO: 4701361 - DNA, 25 bp, Homo sapien
tggtggcccttgaaccaggagacat

SEQ ID NO: 4701362 - DNA, 25 bp, Homo sapien
cccatccatgaagagacaggttggt

SEQ ID NO: 4701363 - DNA, 25 bp, Homo sapien
catgaagagacaggttggtggccct

SEQ ID NO: 4701364 - DNA, 25 bp, Homo sapien
gagacaggttggtggcccttgaacc

SEQ ID NO: 4701365 - DNA, 25 bp, Homo sapien
cagcatcagaaagctgggcttgctc

SEQ ID NO: 4701366 - DNA, 25 bp, Homo sapien
taggccataccgcagctctgtgcta

SEQ ID NO: 4701367 - DNA, 25 bp, Homo sapien
tctgtgctacctgccacattggatg

SEQ ID NO: 4701368 - DNA, 25 bp, Homo sapien
cattggatgccacacagcggtagct

SEQ ID NO: 4701369 - DNA, 25 bp, Homo sapien
ctgggggcaccggtggcattgcagg

SEQ ID NO: 4701370 - DNA, 25 bp, Homo sapien
gggtgttgaccaacacagggcctgg

SEQ ID NO: 4701371 - DNA, 25 bp, Homo sapien
tggcattgcaggtcagccggacagg

SEQ ID NO: 4701372 - DNA, 25 bp, Homo sapien
agccggacaggggtgttgaccaaca

SEQ ID NO: 4701373 - DNA, 25 bp, Homo sapien
tcccagagtcggaggcccgggcact

SEQ ID NO: 4701374 - DNA, 25 bp, Homo sapien
ggcccgggcactagccaaggtgagg

SEQ ID NO: 4701375 - DNA, 25 bp, Homo sapien
tgtggacttgcaggacaacatcctg

SEQ ID NO: 4701376 - DNA, 25 bp, Homo sapien
gccacgcaggagtacctcccagagt

SEQ ID NO: 4701377 - DNA, 25 bp, Homo sapien
gccactgactcattggccacaacgg

SEQ ID NO: 4701378 - DNA, 25 bp, Homo sapien
tggccacaacggacacattcagctc

SEQ ID NO: 4701379 - DNA, 25 bp, Homo sapien
gactcattggccacaacggacacat

SEQ ID NO: 4701380 - DNA, 25 bp, Homo sapien
agcaaggctttgtctgcggagaggt

SEQ ID NO: 4701381 - DNA, 25 bp, Homo sapien
ttcagtgcctcacaggtgtaatggc

SEQ ID NO: 4701382 - DNA, 25 bp, Homo sapien
tgcctcacaggtgtaatggcccgca

SEQ ID NO: 4701383 - DNA, 25 bp, Homo sapien
ctcacaggtgtaatggcccgcatcc

SEQ ID NO: 4701384 - DNA, 25 bp, Homo sapien
ggcccgcatcccacacatcggctct

SEQ ID NO: 4701385 - DNA, 25 bp, Homo sapien
gggacaccccggcattcgcaggaca

SEQ ID NO: 4701386 - DNA, 25 bp, Homo sapien
ccctctctcacagtcagggtgtggg

SEQ ID NO: 4701387 - DNA, 25 bp, Homo sapien
tctctcacagtcagggtgtgggatt

SEQ ID NO: 4701388 - DNA, 25 bp, Homo sapien
agcctggtagggtgcccctctctca

SEQ ID NO: 4701389 - DNA, 25 bp, Homo sapien
tgtcccaggtacaacagcctcccca

SEQ ID NO: 4701390 - DNA, 25 bp, Homo sapien
cacagccgacacgtgctggaggcca

SEQ ID NO: 4701391 - DNA, 25 bp, Homo sapien
cattcacaggtgtatgttccttcct

SEQ ID NO: 4701392 - DNA, 25 bp, Homo sapien
gctgctgttccccaccacgttgctg

SEQ ID NO: 4701393 - DNA, 25 bp, Homo sapien
cacagctgtagcgtccagtgtgggc

SEQ ID NO: 4701394 - DNA, 25 bp, Homo sapien
catgcaggctctgaccctggttctg

SEQ ID NO: 4701395 - DNA, 25 bp, Homo sapien
gggtttccctgtggcgttgcactcc

SEQ ID NO: 4701396 - DNA, 25 bp, Homo sapien
ccagtacggagagctcaaacttcct

SEQ ID NO: 4701397 - DNA, 25 bp, Homo sapien
tgggctgtgtgcttcatgctccttc

SEQ ID NO: 4701398 - DNA, 25 bp, Homo sapien
cccaactccacccaattgggagagt

SEQ ID NO: 4701399 - DNA, 25 bp, Homo sapien
ccccaactccacccaattgggagag

SEQ ID NO: 4701400 - DNA, 25 bp, Homo sapien
gggctgtgtgcttcatgctccttcc

SEQ ID NO: 4701401 - DNA, 25 bp, Homo sapien
tggcttcacagagcagagttaaggg

SEQ ID NO: 4701402 - DNA, 25 bp, Homo sapien
tgatgttggtcagcgggtccaagtc

SEQ ID NO: 4701403 - DNA, 25 bp, Homo sapien
ccctcggaaccagcggatggctgga

SEQ ID NO: 4701404 - DNA, 25 bp, Homo sapien
gcgggtccaagtctccaatgagctc

SEQ ID NO: 4701405 - DNA, 25 bp, Homo sapien
cgttgcttgccaggcatgagtagag

SEQ ID NO: 4701406 - DNA, 25 bp, Homo sapien
tccacactgaagttcctccgtgcct

SEQ ID NO: 4701407 - DNA, 25 bp, Homo sapien
cacctccacactgaagttcctccgt

SEQ ID NO: 4701408 - DNA, 25 bp, Homo sapien
ccagcctcgttgcttgccaggcatg

SEQ ID NO: 4701409 - DNA, 25 bp, Homo sapien
tccaagtcctcgttctcaatactgg

SEQ ID NO: 4701410 - DNA, 25 bp, Homo sapien
tgtccatcaaggaccttgatcacct

SEQ ID NO: 4701411 - DNA, 25 bp, Homo sapien
agatgggcagtctgtccatcaagga

SEQ ID NO: 4701412 - DNA, 25 bp, Homo sapien
ccaagtcctcgttctcaatactggg

SEQ ID NO: 4701413 - DNA, 25 bp, Homo sapien
gtgagcatctcccctagccagaggc

SEQ ID NO: 4701414 - DNA, 25 bp, Homo sapien
catctttgaaccatgtgagcttggg

SEQ ID NO: 4701415 - DNA, 25 bp, Homo sapien
gccagaggccggccatctttgaacc

SEQ ID NO: 4701416 - DNA, 25 bp, Homo sapien
ggtgagcatctcccctagccagagg

SEQ ID NO: 4701417 - DNA, 25 bp, Homo sapien
cagcgttggctgcaatgcaggagta

SEQ ID NO: 4701418 - DNA, 25 bp, Homo sapien
acactgagctggaagtgtttggtct

SEQ ID NO: 4701419 - DNA, 25 bp, Homo sapien
ttctccccaacagcgttggctgcaa

SEQ ID NO: 4701420 - DNA, 25 bp, Homo sapien
cagcactggacaggtttgcctggag

SEQ ID NO: 4701421 - DNA, 25 bp, Homo sapien
gacagtcacggtcacctcctcatct

SEQ ID NO: 4701422 - DNA, 25 bp, Homo sapien
gatgttcctggaggcctcaaacggg

SEQ ID NO: 4701423 - DNA, 25 bp, Homo sapien
ccagggcctcgcagatcagagagat

SEQ ID NO: 4701424 - DNA, 25 bp, Homo sapien
tgcactgtcctcggcccctcccagg

SEQ ID NO: 4701425 - DNA, 25 bp, Homo sapien
cacttccacatggtagtttttcacg

SEQ ID NO: 4701426 - DNA, 25 bp, Homo sapien
cacatggtagtttttcacggcctcc

SEQ ID NO: 4701427 - DNA, 25 bp, Homo sapien
ccgagctcattggtgaccacgcagg

SEQ ID NO: 4701428 - DNA, 25 bp, Homo sapien
ggcctccccgagctcattggtgacc

SEQ ID NO: 4701429 - DNA, 25 bp, Homo sapien
ctccgccaaggggtcgtctttggag

SEQ ID NO: 4701430 - DNA, 25 bp, Homo sapien
ccgccaaggggtcgtctttggagat

SEQ ID NO: 4701431 - DNA, 25 bp, Homo sapien
tcgtctttggagatggaagggggga

SEQ ID NO: 4701432 - DNA, 25 bp, Homo sapien
cttcacgccgacctccgccaagggg

SEQ ID NO: 4701433 - DNA, 25 bp, Homo sapien
tgctgttgaccttggtcttcacctc

SEQ ID NO: 4701434 - DNA, 25 bp, Homo sapien
aggtgctgttgaccttggtcttcac

SEQ ID NO: 4701435 - DNA, 25 bp, Homo sapien
aaggtcaaggtgctgttgaccttgg

SEQ ID NO: 4701436 - DNA, 25 bp, Homo sapien
gtcaaggtgctgttgaccttggtct

SEQ ID NO: 4701437 - DNA, 25 bp, Homo sapien
atccttgtaccagcggatggtgggc

SEQ ID NO: 4701438 - DNA, 25 bp, Homo sapien
catccttgtaccagcggatggtggg

SEQ ID NO: 4701439 - DNA, 25 bp, Homo sapien
tccatccttgtaccagcggatggtg

SEQ ID NO: 4701440 - DNA, 25 bp, Homo sapien
ctgtccatccttgtaccagcggatg

SEQ ID NO: 4701441 - DNA, 25 bp, Homo sapien
tcgtcctcgccagccacattggtgg

SEQ ID NO: 4701442 - DNA, 25 bp, Homo sapien
cacgttgaagtcctggtcgtcctcg

SEQ ID NO: 4701443 - DNA, 25 bp, Homo sapien
ggctggatctggagcagtcgccctt

SEQ ID NO: 4701444 - DNA, 25 bp, Homo sapien
cctggatgagcacgttgaagtcctg

SEQ ID NO: 4701445 - DNA, 25 bp, Homo sapien
tcctcccgggacaggatctcgaagg

SEQ ID NO: 4701446 - DNA, 25 bp, Homo sapien
tcgcgttggtgtcgcagtacaggta

SEQ ID NO: 4701447 - DNA, 25 bp, Homo sapien
gatctccctgtattccgtgactccg

SEQ ID NO: 4701448 - DNA, 25 bp, Homo sapien
gatctcgaaggctgcactgaaatca

SEQ ID NO: 4701449 - DNA, 25 bp, Homo sapien
ttgcacgagtacctcccggcgttct

SEQ ID NO: 4701450 - DNA, 25 bp, Homo sapien
tctgcccgcaccagggggatctgca

SEQ ID NO: 4701451 - DNA, 25 bp, Homo sapien
ccacctcgttggaggccttgcacga

SEQ ID NO: 4701452 - DNA, 25 bp, Homo sapien
accagcagctcgtagtgcagccagt

SEQ ID NO: 4701453 - DNA, 25 bp, Homo sapien
tgtgtcacccaggatcacaggtggg

SEQ ID NO: 4701454 - DNA, 25 bp, Homo sapien
ctgtgtcacccaggatcacaggtgg

SEQ ID NO: 4701455 - DNA, 25 bp, Homo sapien
gtgtcacccaggatcacaggtgggg

SEQ ID NO: 4701456 - DNA, 25 bp, Homo sapien
tggcattgactgtcacctcttccac

SEQ ID NO: 4701457 - DNA, 25 bp, Homo sapien
ctggcattgactgtcacctcttcca

SEQ ID NO: 4701458 - DNA, 25 bp, Homo sapien
aagacttgcccgtcctccaggacct

SEQ ID NO: 4701459 - DNA, 25 bp, Homo sapien
tgcaagacttgcccgtcctccagga

SEQ ID NO: 4701460 - DNA, 25 bp, Homo sapien
gggctcggggagaaaggcagcccat

SEQ ID NO: 4701461 - DNA, 25 bp, Homo sapien
caggacctgcagccgtgggctcggg

SEQ ID NO: 4701462 - DNA, 25 bp, Homo sapien
ggtgaagagcttctcagcggagccc

SEQ ID NO: 4701463 - DNA, 25 bp, Homo sapien
gaaccctgagggtgaagagcttctc

SEQ ID NO: 4701464 - DNA, 25 bp, Homo sapien
cctgagggtgaagagcttctcagcg

SEQ ID NO: 4701465 - DNA, 25 bp, Homo sapien
aagagcttctcagcggagcccgcct

SEQ ID NO: 4701466 - DNA, 25 bp, Homo sapien
gtttgggtgagcgtggacgtcgcaa

SEQ ID NO: 4701467 - DNA, 25 bp, Homo sapien
cctggctgtccttgtaccacgtgac

SEQ ID NO: 4701468 - DNA, 25 bp, Homo sapien
ggagggagacgctgctgttgaggat

SEQ ID NO: 4701469 - DNA, 25 bp, Homo sapien
gggcctggctgtccttgtaccacgt

SEQ ID NO: 4701470 - DNA, 25 bp, Homo sapien
gcattgagggcttcgcatgtgtaca

SEQ ID NO: 4701471 - DNA, 25 bp, Homo sapien
tacatcccggagtccgacagccgtg

SEQ ID NO: 4701472 - DNA, 25 bp, Homo sapien
agcttctggtctcggccggcagcat

SEQ ID NO: 4701473 - DNA, 25 bp, Homo sapien
accagcttctggtctcggccggcag

SEQ ID NO: 4701474 - DNA, 25 bp, Homo sapien
ttggctcagggagcgcatctgtctc

SEQ ID NO: 4701475 - DNA, 25 bp, Homo sapien
agctttgtccccgaccctcaccagg

SEQ ID NO: 4701476 - DNA, 25 bp, Homo sapien
tctgtctcgcagctcaggacagctt

SEQ ID NO: 4701477 - DNA, 25 bp, Homo sapien
agcgcatctgtctcgcagctcagga

SEQ ID NO: 4701478 - DNA, 25 bp, Homo sapien
gggctgggaggcgactttcctgcag

SEQ ID NO: 4701479 - DNA, 25 bp, Homo sapien
cctggacggtgagggtgaaggtccg

SEQ ID NO: 4701480 - DNA, 25 bp, Homo sapien
tttacagctgtataaacctttatcc

SEQ ID NO: 4701481 - DNA, 25 bp, Homo sapien
ttgctgactttacagctgtataaac

SEQ ID NO: 4701482 - DNA, 25 bp, Homo sapien
ggtgagggtgaaggtccgcacggcc

SEQ ID NO: 4701483 - DNA, 25 bp, Homo sapien
ttgctaggggctccacagtcacgtt

SEQ ID NO: 4701484 - DNA, 25 bp, Homo sapien
cagccctgggtgttgctaggggctc

SEQ ID NO: 4701485 - DNA, 25 bp, Homo sapien
ccctgggtgttgctaggggctccac

SEQ ID NO: 4701486 - DNA, 25 bp, Homo sapien
ggtgttgctaggggctccacagtca

SEQ ID NO: 4701487 - DNA, 25 bp, Homo sapien
gcagggaccccggacacatcacagg

SEQ ID NO: 4701488 - DNA, 25 bp, Homo sapien
gggaccccggacacatcacaggtca

SEQ ID NO: 4701489 - DNA, 25 bp, Homo sapien
ccaagtgaccgtgggtgcagggacc

SEQ ID NO: 4701490 - DNA, 25 bp, Homo sapien
tgtcttggggttctcaaatgttggg

SEQ ID NO: 4701491 - DNA, 25 bp, Homo sapien
cggaggaacggtgggcacagcagcg

SEQ ID NO: 4701492 - DNA, 25 bp, Homo sapien
cccacgtggagcctgcgtgagaggc

SEQ ID NO: 4701493 - DNA, 25 bp, Homo sapien
cacgtggagcctgcgtgagaggcac

SEQ ID NO: 4701494 - DNA, 25 bp, Homo sapien
ggcttctgccgtcatgcggaggaac

SEQ ID NO: 4701495 - DNA, 25 bp, Homo sapien
ggagaccacaccgtgcaccgcgctg

SEQ ID NO: 4701496 - DNA, 25 bp, Homo sapien
accacaccgtgcaccgcgctgctct

SEQ ID NO: 4701497 - DNA, 25 bp, Homo sapien
ccgggagaccacaccgtgcaccgcg

SEQ ID NO: 4701498 - DNA, 25 bp, Homo sapien
ccccgggagaccacaccgtgcaccg

SEQ ID NO: 4701499 - DNA, 25 bp, Homo sapien
gcctgggccggttgcaggcggctca

SEQ ID NO: 4701500 - DNA, 25 bp, Homo sapien
taccacgaagtccttgcgggcctca

SEQ ID NO: 4701501 - DNA, 25 bp, Homo sapien
actgctaccacgaagtccttgcggg

SEQ ID NO: 4701502 - DNA, 25 bp, Homo sapien
cagcactgctaccacgaagtccttg

SEQ ID NO: 4701503 - DNA, 25 bp, Homo sapien
gccaggccacgtccggcggcggctg

SEQ ID NO: 4701504 - DNA, 25 bp, Homo sapien
tcggcctcacagtccagccgcacct

SEQ ID NO: 4701505 - DNA, 25 bp, Homo sapien
atgtcctggcccagcgggctgccgt

SEQ ID NO: 4701506 - DNA, 25 bp, Homo sapien
gacatggtgctcccgcgccacgccc

SEQ ID NO: 4701507 - DNA, 25 bp, Homo sapien
acgcaggtgtaggcacccgcgtccg

SEQ ID NO: 4701508 - DNA, 25 bp, Homo sapien
ccggctgggttgtgggccacgcagg

SEQ ID NO: 4701509 - DNA, 25 bp, Homo sapien
aggcacccgcgtccgaggccctcag

SEQ ID NO: 4701510 - DNA, 25 bp, Homo sapien
ctggcgtcctccccggctgggttgt

SEQ ID NO: 4701511 - DNA, 25 bp, Homo sapien
aatctccgctataccctgggctggc

SEQ ID NO: 4701512 - DNA, 25 bp, Homo sapien
cgaatctccgctataccctgggctg

SEQ ID NO: 4701513 - DNA, 25 bp, Homo sapien
cccgaatctccgctataccctgggc

SEQ ID NO: 4701514 - DNA, 25 bp, Homo sapien
taccctgggctggcactattgtcct

SEQ ID NO: 4701515 - DNA, 25 bp, Homo sapien
aggccgtccttgagccagctcacgt

SEQ ID NO: 4701516 - DNA, 25 bp, Homo sapien
cagggtccccgagccgtctgctccc

SEQ ID NO: 4701517 - DNA, 25 bp, Homo sapien
ggggcaggccgtccttgagccagct

SEQ ID NO: 4701518 - DNA, 25 bp, Homo sapien
cagctcacgtggatgggcggggagc

SEQ ID NO: 4701519 - DNA, 25 bp, Homo sapien
ctgcaaggtgaagttcctgtccgcc

SEQ ID NO: 4701520 - DNA, 25 bp, Homo sapien
aaggtgaagttcctgtccgccacgc

SEQ ID NO: 4701521 - DNA, 25 bp, Homo sapien
ggcttgcggccacacaggtgaagat

SEQ ID NO: 4701522 - DNA, 25 bp, Homo sapien
gcgtctgccaattgcaccttggaaa

SEQ ID NO: 4701523 - DNA, 25 bp, Homo sapien
acacaggagtaggtccccgagtcac

SEQ ID NO: 4701524 - DNA, 25 bp, Homo sapien
acgtcattctggaactccaccggct

SEQ ID NO: 4701525 - DNA, 25 bp, Homo sapien
gcctcgcacgggagttccaccaggg

SEQ ID NO: 4701526 - DNA, 25 bp, Homo sapien
ttcatccacgacacgagaggcaggg

SEQ ID NO: 4701527 - DNA, 25 bp, Homo sapien
cgtccttatgccaggtgatgttggg

SEQ ID NO: 4701528 - DNA, 25 bp, Homo sapien
cctgagtcctcaatgtgagggggct

SEQ ID NO: 4701529 - DNA, 25 bp, Homo sapien
acagctctgtaggctggcctgagtc

SEQ ID NO: 4701530 - DNA, 25 bp, Homo sapien
cccggagcacccgtgtggctctgct

SEQ ID NO: 4701531 - DNA, 25 bp, Homo sapien
tgacccggaagctcttctcaattgc

SEQ ID NO: 4701532 - DNA, 25 bp, Homo sapien
ttgaaccctgacccggaagctcttc

SEQ ID NO: 4701533 - DNA, 25 bp, Homo sapien
ccggaagctcttctcaattgcacct

SEQ ID NO: 4701534 - DNA, 25 bp, Homo sapien
cctgacccggaagctcttctcaatt

SEQ ID NO: 4701535 - DNA, 25 bp, Homo sapien
agcacaatgccgtctcggtgccacg

SEQ ID NO: 4701536 - DNA, 25 bp, Homo sapien
ccacgtgatcttgggcgctggctct

SEQ ID NO: 4701537 - DNA, 25 bp, Homo sapien
caggccgaccacaaagcgggggcct

SEQ ID NO: 4701538 - DNA, 25 bp, Homo sapien
tccaccgaacactccaggaccagct

SEQ ID NO: 4701539 - DNA, 25 bp, Homo sapien
tccacgcggaaggcgacactagtgc

SEQ ID NO: 4701540 - DNA, 25 bp, Homo sapien
gctgcctgcggcgttgcgggctgtg

SEQ ID NO: 4701541 - DNA, 25 bp, Homo sapien
ccgggaattgtgtgtgggcgtcctc

SEQ ID NO: 4701542 - DNA, 25 bp, Homo sapien
tgcagctgtagtcgccgctgtcagc

SEQ ID NO: 4701543 - DNA, 25 bp, Homo sapien
tgtccttccgccagctcacgagggg

SEQ ID NO: 4701544 - DNA, 25 bp, Homo sapien
tggtcctgaccggatggtgggcacc

SEQ ID NO: 4701545 - DNA, 25 bp, Homo sapien
gtctggttcactgagacgttcactg

SEQ ID NO: 4701546 - DNA, 25 bp, Homo sapien
ctgagacgttcactgcaggtggtcc

SEQ ID NO: 4701547 - DNA, 25 bp, Homo sapien
ggcaaggactggctggattctcagg

SEQ ID NO: 4701548 - DNA, 25 bp, Homo sapien
caagacccgtaggtcacggccttga

SEQ ID NO: 4701549 - DNA, 25 bp, Homo sapien
cttgacgatcggagccagcagagtt

SEQ ID NO: 4701550 - DNA, 25 bp, Homo sapien
aggcagaggtagtggccggcgtcct

SEQ ID NO: 4701551 - DNA, 25 bp, Homo sapien
ccacagcaacctctcacaagctgat

SEQ ID NO: 4701552 - DNA, 25 bp, Homo sapien
caccacagcaacctctcacaagctg

SEQ ID NO: 4701553 - DNA, 25 bp, Homo sapien
gcccaccacagcaacctctcacaag

SEQ ID NO: 4701554 - DNA, 25 bp, Homo sapien
agggcccaccacagcaacctctcac

SEQ ID NO: 4701555 - DNA, 25 bp, Homo sapien
gggctgggggcgatggctggaggct

SEQ ID NO: 4701556 - DNA, 25 bp, Homo sapien
ggtgtgggcggtcagggtcaggttg

SEQ ID NO: 4701557 - DNA, 25 bp, Homo sapien
gaggggctgggggcgatggctggag

SEQ ID NO: 4701558 - DNA, 25 bp, Homo sapien
ctggggtgtgggcggtcagggtcag

SEQ ID NO: 4701559 - DNA, 25 bp, Homo sapien
tgtccgtccttccaccagaccacca

SEQ ID NO: 4701560 - DNA, 25 bp, Homo sapien
agcttctgtccgtccttccaccaga

SEQ ID NO: 4701561 - DNA, 25 bp, Homo sapien
ccaccaggggcttaggggagccgct

SEQ ID NO: 4701562 - DNA, 25 bp, Homo sapien
ttctgtccgtccttccaccagacca

SEQ ID NO: 4701563 - DNA, 25 bp, Homo sapien
ggtcacctggtagagcctgtgggcc

SEQ ID NO: 4701564 - DNA, 25 bp, Homo sapien
acctggtagagcctgtgggcctcgc

SEQ ID NO: 4701565 - DNA, 25 bp, Homo sapien
cacctcattgctcaccacgcattca

SEQ ID NO: 4701566 - DNA, 25 bp, Homo sapien
tcattgctcaccacgcattcaaact

SEQ ID NO: 4701567 - DNA, 25 bp, Homo sapien
ctgctgatcaacatgagagccttga

SEQ ID NO: 4701568 - DNA, 25 bp, Homo sapien
actgctgatcaacatgagagccttg

SEQ ID NO: 4701569 - DNA, 25 bp, Homo sapien
gctgatcaacatgagagccttgatc

SEQ ID NO: 4701570 - DNA, 25 bp, Homo sapien
tactgctgatcaacatgagagcctt

SEQ ID NO: 4701571 - DNA, 25 bp, Homo sapien
gggcacagggcactcacggccacag

SEQ ID NO: 4701572 - DNA, 25 bp, Homo sapien
cgggcacagggcactcacggccaca

SEQ ID NO: 4701573 - DNA, 25 bp, Homo sapien
cacagggcactcacggccacagggc

SEQ ID NO: 4701574 - DNA, 25 bp, Homo sapien
ctaaaacccaagacaaggcttgagg

SEQ ID NO: 4701575 - DNA, 25 bp, Homo sapien
taaaacccaagacaaggcttgaggc

SEQ ID NO: 4701576 - DNA, 25 bp, Homo sapien
gatggtgagacacgatagccactcc

SEQ ID NO: 4701577 - DNA, 25 bp, Homo sapien
tatacccgtgctgtgacatgtgagg

SEQ ID NO: 4701578 - DNA, 25 bp, Homo sapien
ggtgccatcatggtcacggtgaagt

SEQ ID NO: 4701579 - DNA, 25 bp, Homo sapien
cttgctccaggacacggtcggagct

SEQ ID NO: 4701580 - DNA, 25 bp, Homo sapien
tgcttgtgggctacgccggcagagt

SEQ ID NO: 4701581 - DNA, 25 bp, Homo sapien
tgcgggctgagcaggtgtagcggcc

SEQ ID NO: 4701582 - DNA, 25 bp, Homo sapien
aggtgtagcggcctgcgtggatggg

SEQ ID NO: 4701583 - DNA, 25 bp, Homo sapien
cagtgaggaagacgtgcttgtgggc

SEQ ID NO: 4701584 - DNA, 25 bp, Homo sapien
actgcccgaaccacgctgggcagcg

SEQ ID NO: 4701585 - DNA, 25 bp, Homo sapien
ctgccactgcccgaaccacgctggg

SEQ ID NO: 4701586 - DNA, 25 bp, Homo sapien
cagtagcgacgttgagcccttcctt

SEQ ID NO: 4701587 - DNA, 25 bp, Homo sapien
cttctgccaggtgatggtcggccgg

SEQ ID NO: 4701588 - DNA, 25 bp, Homo sapien
gctggcatgggcaatccgcagctgt

SEQ ID NO: 4701589 - DNA, 25 bp, Homo sapien
tggcactgcccgcactgttcttagc

SEQ ID NO: 4701590 - DNA, 25 bp, Homo sapien
tagcgatgcagagatagtttccagc

SEQ ID NO: 4701591 - DNA, 25 bp, Homo sapien
gggcaatccgcagctgtccgcctgg

SEQ ID NO: 4701592 - DNA, 25 bp, Homo sapien
catctttgtcccaggtgatgttggg

SEQ ID NO: 4701593 - DNA, 25 bp, Homo sapien
gagccttcggtggtggacaggtctg

SEQ ID NO: 4701594 - DNA, 25 bp, Homo sapien
aggccattctcgatcactggtggga

SEQ ID NO: 4701595 - DNA, 25 bp, Homo sapien
ccctcgccttgcaaggcaagaaggc

SEQ ID NO: 4701596 - DNA, 25 bp, Homo sapien
ggcccacggcgttctcagcggtaca

SEQ ID NO: 4701597 - DNA, 25 bp, Homo sapien
tctcagcggtacaggtataggtgcc

SEQ ID NO: 4701598 - DNA, 25 bp, Homo sapien
accaggatggtgaggtgcacgcggc

SEQ ID NO: 4701599 - DNA, 25 bp, Homo sapien
ggtacaggtataggtgcctgcgtcc

SEQ ID NO: 4701600 - DNA, 25 bp, Homo sapien
ggtcgttgacagtccagccaatgcg

SEQ ID NO: 4701601 - DNA, 25 bp, Homo sapien
gccggtcgttgacagtccagccaat

SEQ ID NO: 4701602 - DNA, 25 bp, Homo sapien
gtgactggccggtcgttgacagtcc

SEQ ID NO: 4701603 - DNA, 25 bp, Homo sapien
gttgacagtccagccaatgcgaggg

SEQ ID NO: 4701604 - DNA, 25 bp, Homo sapien
gacaagcagtaccatcaattgggca

SEQ ID NO: 4701605 - DNA, 25 bp, Homo sapien
cgcccagccgagagaaggattctaa

SEQ ID NO: 4701606 - DNA, 25 bp, Homo sapien
gctctggactagaacacaggcctcc

SEQ ID NO: 4701607 - DNA, 25 bp, Homo sapien
cacaggtgagcacgggtattccaca

SEQ ID NO: 4701608 - DNA, 25 bp, Homo sapien
ttctccgcccagcagacataggtcc

SEQ ID NO: 4701609 - DNA, 25 bp, Homo sapien
ccttcacgtggacgaagctgaccgc

SEQ ID NO: 4701610 - DNA, 25 bp, Homo sapien
ttctctggagacagcggcccgctgc

SEQ ID NO: 4701611 - DNA, 25 bp, Homo sapien
tgcgtgcggcccactctgttctccg

SEQ ID NO: 4701612 - DNA, 25 bp, Homo sapien
taggagaaagcctccccttgtagga

SEQ ID NO: 4701613 - DNA, 25 bp, Homo sapien
gcctccccttgtaggacaggagcct

SEQ ID NO: 4701614 - DNA, 25 bp, Homo sapien
tcctacaggttccaccaggtaggag

SEQ ID NO: 4701615 - DNA, 25 bp, Homo sapien
ccagtggatgtccggcactgggtct

SEQ ID NO: 4701616 - DNA, 25 bp, Homo sapien
tgccccgcagtggaaggccatcttt

SEQ ID NO: 4701617 - DNA, 25 bp, Homo sapien
gctgccccgcagtggaaggccatct

SEQ ID NO: 4701618 - DNA, 25 bp, Homo sapien
cccgcagtggaaggccatctttgat

SEQ ID NO: 4701619 - DNA, 25 bp, Homo sapien
ccccgcagtggaaggccatctttga

SEQ ID NO: 4701620 - DNA, 25 bp, Homo sapien
tgcaggacgaggatcaccactttct

SEQ ID NO: 4701621 - DNA, 25 bp, Homo sapien
ttcgccacgcccatctcattctctg

SEQ ID NO: 4701622 - DNA, 25 bp, Homo sapien
aggcactggtaccgtcccgcatcgt

SEQ ID NO: 4701623 - DNA, 25 bp, Homo sapien
actttcttcgccacgcccatctcat

SEQ ID NO: 4701624 - DNA, 25 bp, Homo sapien
gccaccgctgtccccgagcacactt

SEQ ID NO: 4701625 - DNA, 25 bp, Homo sapien
tgtccccgagcacacttcccacgtc

SEQ ID NO: 4701626 - DNA, 25 bp, Homo sapien
gagcacacttcccacgtccccactc

SEQ ID NO: 4701627 - DNA, 25 bp, Homo sapien
accgctgtccccgagcacacttccc

SEQ ID NO: 4701628 - DNA, 25 bp, Homo sapien
actggtaggagccaaaagggaaatg

SEQ ID NO: 4701629 - DNA, 25 bp, Homo sapien
tagaggatgaaagtatgccctgaga

SEQ ID NO: 4701630 - DNA, 25 bp, Homo sapien
ccagccagcaactgaacggcgagaa

SEQ ID NO: 4701631 - DNA, 25 bp, Homo sapien
cacagtggttttattagggatggct

SEQ ID NO: 4701632 - DNA, 25 bp, Homo sapien
agcgacgcagtcgtaggtgcctgca

SEQ ID NO: 4701633 - DNA, 25 bp, Homo sapien
cgcctgtagccattcaatggtgggt

SEQ ID NO: 4701634 - DNA, 25 bp, Homo sapien
tggcccgcaagggttgacccgcctg

SEQ ID NO: 4701635 - DNA, 25 bp, Homo sapien
gtcatccccagatctcactgtcatg

SEQ ID NO: 4701636 - DNA, 25 bp, Homo sapien
tgtgccagttaagcaggaacaacct

SEQ ID NO: 4701637 - DNA, 25 bp, Homo sapien
tgttccctgtccaagatgagcagca

SEQ ID NO: 4701638 - DNA, 25 bp, Homo sapien
tgtgtgatgcctgggacatgcactg

SEQ ID NO: 4701639 - DNA, 25 bp, Homo sapien
aatccccatcggcaagagatcctgc

SEQ ID NO: 4701640 - DNA, 25 bp, Homo sapien
tgagtgtggccacgccaaatttccg

SEQ ID NO: 4701641 - DNA, 25 bp, Homo sapien
aatttccggccatttatcaccccag

SEQ ID NO: 4701642 - DNA, 25 bp, Homo sapien
tgctgaccccggagtgtgcctcctg

SEQ ID NO: 4701643 - DNA, 25 bp, Homo sapien
tgcctcctgcatcacgctggtgttg

SEQ ID NO: 4701644 - DNA, 25 bp, Homo sapien
gggcgatggtgaccacgagcacccg

SEQ ID NO: 4701645 - DNA, 25 bp, Homo sapien
acgtgtgactcctgccggaacctgc

SEQ ID NO: 4701646 - DNA, 25 bp, Homo sapien
tgcccccagtcagagagtggccatt

SEQ ID NO: 4701647 - DNA, 25 bp, Homo sapien
ctgtagcaaactccacgtgtgactc

SEQ ID NO: 4701648 - DNA, 25 bp, Homo sapien
ctggcccacctgggggaggccctgt

SEQ ID NO: 4701649 - DNA, 25 bp, Homo sapien
ttgaagatctgcgtcagccaggctc

SEQ ID NO: 4701650 - DNA, 25 bp, Homo sapien
gccacctgggtcatcgtgagcagct

SEQ ID NO: 4701651 - DNA, 25 bp, Homo sapien
attgaccaccacgtcgaggagcagg

SEQ ID NO: 4701652 - DNA, 25 bp, Homo sapien
gggacaacgccattgaccaccacgt

SEQ ID NO: 4701653 - DNA, 25 bp, Homo sapien
cctgtctgcacaccccagggcttga

SEQ ID NO: 4701654 - DNA, 25 bp, Homo sapien
ctgtttgcacgtagtgctcctcaaa

SEQ ID NO: 4701655 - DNA, 25 bp, Homo sapien
tgtttgcacgtagtgctcctcaaag

SEQ ID NO: 4701656 - DNA, 25 bp, Homo sapien
cctctggatcaaaggccgagctgat

SEQ ID NO: 4701657 - DNA, 25 bp, Homo sapien
tgtgtggagcccacgaacagctggc

SEQ ID NO: 4701658 - DNA, 25 bp, Homo sapien
ggctgtagcgagctggaagcgcagg

SEQ ID NO: 4701659 - DNA, 25 bp, Homo sapien
cccgggccgcgttgtactggatgct

SEQ ID NO: 4701660 - DNA, 25 bp, Homo sapien
agccctcggggcagccgacctcgtt

SEQ ID NO: 4701661 - DNA, 25 bp, Homo sapien
tcggggcagccgacctcgttctcct

SEQ ID NO: 4701662 - DNA, 25 bp, Homo sapien
gggagtccagctcaaagccctcggg

SEQ ID NO: 4701663 - DNA, 25 bp, Homo sapien
cctcggggcagccgacctcgttctc

SEQ ID NO: 4701664 - DNA, 25 bp, Homo sapien
aagcggccgggtgcattaaggcagg

SEQ ID NO: 4701665 - DNA, 25 bp, Homo sapien
cgggtgcattaaggcaggcatggga

SEQ ID NO: 4701666 - DNA, 25 bp, Homo sapien
cggccgggtgcattaaggcaggcat

SEQ ID NO: 4701667 - DNA, 25 bp, Homo sapien
agaagcggccgggtgcattaaggca

SEQ ID NO: 4701668 - DNA, 25 bp, Homo sapien
cagcgctgtccctctcggcagaggt

SEQ ID NO: 4701669 - DNA, 25 bp, Homo sapien
cgagcaggttcacacagcgctgtcc

SEQ ID NO: 4701670 - DNA, 25 bp, Homo sapien
cagaggtgagcatcccacgcacact

SEQ ID NO: 4701671 - DNA, 25 bp, Homo sapien
gcggtaggacccgagcaggttcaca

SEQ ID NO: 4701672 - DNA, 25 bp, Homo sapien
ctcccccagttataccaggttggag

SEQ ID NO: 4701673 - DNA, 25 bp, Homo sapien
gttataccaggttggaggtcaacag

SEQ ID NO: 4701674 - DNA, 25 bp, Homo sapien
ctccatattctagcccttgggcaag

SEQ ID NO: 4701675 - DNA, 25 bp, Homo sapien
gctgagctctccatattctagccct

SEQ ID NO: 4701676 - DNA, 25 bp, Homo sapien
tgaccgcctggggtgttctcgcaga

SEQ ID NO: 4701677 - DNA, 25 bp, Homo sapien
ttgtagtgacagtcgtccaacccct

SEQ ID NO: 4701678 - DNA, 25 bp, Homo sapien
agtgacagtcgtccaacccctccag

SEQ ID NO: 4701679 - DNA, 25 bp, Homo sapien
tgacagtcgtccaacccctccaggc

SEQ ID NO: 4701680 - DNA, 25 bp, Homo sapien
tcagtgccccagttagatccattcc

SEQ ID NO: 4701681 - DNA, 25 bp, Homo sapien
tgaaattccccggaagatgacccca

SEQ ID NO: 4701682 - DNA, 25 bp, Homo sapien
tattctcagaactcaacagcactgg

SEQ ID NO: 4701683 - DNA, 25 bp, Homo sapien
cagtgagtgcaaagtgtcggctgct

SEQ ID NO: 4701684 - DNA, 25 bp, Homo sapien
ttgtggcactggtaggcgcaggcct

SEQ ID NO: 4701685 - DNA, 25 bp, Homo sapien
tccagtgaggtgcaggccttgccgt

SEQ ID NO: 4701686 - DNA, 25 bp, Homo sapien
attttgtccattccgctccagtgag

SEQ ID NO: 4701687 - DNA, 25 bp, Homo sapien
cctcggtggctgacggtggtcacat

SEQ ID NO: 4701688 - DNA, 25 bp, Homo sapien
gcctgatgaaaccaggagggcacca

SEQ ID NO: 4701689 - DNA, 25 bp, Homo sapien
tgcagactccgttctgcctgatgaa

SEQ ID NO: 4701690 - DNA, 25 bp, Homo sapien
ttctgcctgatgaaaccaggagggc

SEQ ID NO: 4701691 - DNA, 25 bp, Homo sapien
tgtgcagactccgttctgcctgatg

SEQ ID NO: 4701692 - DNA, 25 bp, Homo sapien
aatagtccacaccatcttggaagcc

SEQ ID NO: 4701693 - DNA, 25 bp, Homo sapien
ttctgaactcggtgggtgacacctg

SEQ ID NO: 4701694 - DNA, 25 bp, Homo sapien
aagagcccataacggcagtgtcccg

SEQ ID NO: 4701695 - DNA, 25 bp, Homo sapien
gggcaaagtgtcctgaagtcaaatg

SEQ ID NO: 4701696 - DNA, 25 bp, Homo sapien
ttcctcacgcggcactcgtcaaggt

SEQ ID NO: 4701697 - DNA, 25 bp, Homo sapien
gcaggcgtgctgacacaggttcctc

SEQ ID NO: 4701698 - DNA, 25 bp, Homo sapien
cctggcagttcttcccgctggggag

SEQ ID NO: 4701699 - DNA, 25 bp, Homo sapien
tgacacaggttcctcacgcggcact

SEQ ID NO: 4701700 - DNA, 25 bp, Homo sapien
tctggccgggtccacactcgatgct

SEQ ID NO: 4701701 - DNA, 25 bp, Homo sapien
tgttgaagcacatctggccgggtcc

SEQ ID NO: 4701702 - DNA, 25 bp, Homo sapien
actggtagctgccacgggtgttgaa

SEQ ID NO: 4701703 - DNA, 25 bp, Homo sapien
tgctctcctcctcgcactcgttgat

SEQ ID NO: 4701704 - DNA, 25 bp, Homo sapien
actttcgggatccatgccccaggga

SEQ ID NO: 4701705 - DNA, 25 bp, Homo sapien
tcttgatgagtgtccgtggccgctg

SEQ ID NO: 4701706 - DNA, 25 bp, Homo sapien
gctagcccgttttagagttcaacaa

SEQ ID NO: 4701707 - DNA, 25 bp, Homo sapien
taaggtccccatgtctccgtgtgtc

SEQ ID NO: 4701708 - DNA, 25 bp, Homo sapien
ccgcagcacgcacggtgagccggta

SEQ ID NO: 4701709 - DNA, 25 bp, Homo sapien
ggcgatgagcaagacgaagacgctt

SEQ ID NO: 4701710 - DNA, 25 bp, Homo sapien
tccagcatgctgagctcggtgcggt

SEQ ID NO: 4701711 - DNA, 25 bp, Homo sapien
gtgagcgcgcgacgggtgtagaccg

SEQ ID NO: 4701712 - DNA, 25 bp, Homo sapien
tcagaatgacaccaccaggtgtggc

SEQ ID NO: 4701713 - DNA, 25 bp, Homo sapien
agcaggtggcgtggaccaagcttct

SEQ ID NO: 4701714 - DNA, 25 bp, Homo sapien
gacctggaggtctgatccgggcttc

SEQ ID NO: 4701715 - DNA, 25 bp, Homo sapien
cagggtcgtgttgacccaaggtctc

SEQ ID NO: 4701716 - DNA, 25 bp, Homo sapien
cccaggttataagcacagggcccgg

SEQ ID NO: 4701717 - DNA, 25 bp, Homo sapien
cagggccggtgaccggggacacgtg

SEQ ID NO: 4701718 - DNA, 25 bp, Homo sapien
tggagccgctcagcgttcacagcca

SEQ ID NO: 4701719 - DNA, 25 bp, Homo sapien
ggactggcaggggtgcccatcccag

SEQ ID NO: 4701720 - DNA, 25 bp, Homo sapien
aagcgggtgctctcggctagggagt

SEQ ID NO: 4701721 - DNA, 25 bp, Homo sapien
tttgagcatcgggagccccttccct

SEQ ID NO: 4701722 - DNA, 25 bp, Homo sapien
cagtccccggcgagtggcgatcggg

SEQ ID NO: 4701723 - DNA, 25 bp, Homo sapien
ctggaatccggtgccaggcgtttga

SEQ ID NO: 4701724 - DNA, 25 bp, Homo sapien
aggtggctgccgccccctgcaggga

SEQ ID NO: 4701725 - DNA, 25 bp, Homo sapien
gaagggagccagggccaccatgccc

SEQ ID NO: 4701726 - DNA, 25 bp, Homo sapien
ggccaggtggctgccgccccctgca

SEQ ID NO: 4701727 - DNA, 25 bp, Homo sapien
tggctgccgccccctgcagggaagg

SEQ ID NO: 4701728 - DNA, 25 bp, Homo sapien
cacatcccccagaaagggccacggc

SEQ ID NO: 4701729 - DNA, 25 bp, Homo sapien
atcccccagaaagggccacggcagg

SEQ ID NO: 4701730 - DNA, 25 bp, Homo sapien
cagaaagggccacggcaggtttctc

SEQ ID NO: 4701731 - DNA, 25 bp, Homo sapien
ctggcaaatgcccactgccctccag

SEQ ID NO: 4701732 - DNA, 25 bp, Homo sapien
acccaatcagcacattcatcaacta

SEQ ID NO: 4701733 - DNA, 25 bp, Homo sapien
cacacacacgagaatacccaatcag

SEQ ID NO: 4701734 - DNA, 25 bp, Homo sapien
atacccaatcagcacattcatcaac

SEQ ID NO: 4701735 - DNA, 25 bp, Homo sapien
cacacacgagaatacccaatcagca

SEQ ID NO: 4701736 - DNA, 25 bp, Homo sapien
tgttttcacagtgcagtgaaccact

SEQ ID NO: 4701737 - DNA, 25 bp, Homo sapien
ttggaggcgtgagttcccggcgtct

SEQ ID NO: 4701738 - DNA, 25 bp, Homo sapien
ggattggaggcgtgagttcccggcg

SEQ ID NO: 4701739 - DNA, 25 bp, Homo sapien
ccggcgtctggaatctgttttcaca

SEQ ID NO: 4701740 - DNA, 25 bp, Homo sapien
ccatggcaactgcagccaggcaatt

SEQ ID NO: 4701741 - DNA, 25 bp, Homo sapien
catggcaactgcagccaggcaattg

SEQ ID NO: 4701742 - DNA, 25 bp, Homo sapien
atggcaactgcagccaggcaattgg

SEQ ID NO: 4701743 - DNA, 25 bp, Homo sapien
tggcaactgcagccaggcaattggc

SEQ ID NO: 4701744 - DNA, 25 bp, Homo sapien
agcgggatctccctgtgcccctgag

SEQ ID NO: 4701745 - DNA, 25 bp, Homo sapien
cctcatgaagtaggagttgtcattc

SEQ ID NO: 4701746 - DNA, 25 bp, Homo sapien
tgtcattcctattggggaggcagcc

SEQ ID NO: 4701747 - DNA, 25 bp, Homo sapien
gctccttgccaagcaccaggcaggg

SEQ ID NO: 4701748 - DNA, 25 bp, Homo sapien
aggatgtgaggaatgcacgcaggca

SEQ ID NO: 4701749 - DNA, 25 bp, Homo sapien
gagaggcatctcttggacctgatcc

SEQ ID NO: 4701750 - DNA, 25 bp, Homo sapien
cagcatcgagggaaggcggctgagg

SEQ ID NO: 4701751 - DNA, 25 bp, Homo sapien
aatgctgactgcagtcctaggctgg

SEQ ID NO: 4701752 - DNA, 25 bp, Homo sapien
gagtcgaggaacaacctgagtgacc

SEQ ID NO: 4701753 - DNA, 25 bp, Homo sapien
gggagtcgaggaacaacctgagtga

SEQ ID NO: 4701754 - DNA, 25 bp, Homo sapien
gcgggagtcgaggaacaacctgagt

SEQ ID NO: 4701755 - DNA, 25 bp, Homo sapien
ctggcgggagtcgaggaacaacctg

SEQ ID NO: 4701756 - DNA, 25 bp, Homo sapien
cagataggcaatgacgtcatagcct

SEQ ID NO: 4701757 - DNA, 25 bp, Homo sapien
ttcagccacacgaggatgcacgagg

SEQ ID NO: 4701758 - DNA, 25 bp, Homo sapien
agataggcaatgacgtcatagcctt

SEQ ID NO: 4701759 - DNA, 25 bp, Homo sapien
gatgcacgaggtgtccaggccgcca

SEQ ID NO: 4701760 - DNA, 25 bp, Homo sapien
gatgactcctatgggccctggatga

SEQ ID NO: 4701761 - DNA, 25 bp, Homo sapien
ggctgacagcatactctggagatgg

SEQ ID NO: 4701762 - DNA, 25 bp, Homo sapien
taagagtcctgaacagcacagccac

SEQ ID NO: 4701763 - DNA, 25 bp, Homo sapien
gccaggttcagtcgaagaggagcta

SEQ ID NO: 4701764 - DNA, 25 bp, Homo sapien
cctcgaagtcttccttctggccaat

SEQ ID NO: 4701765 - DNA, 25 bp, Homo sapien
tggccccaagcttcagtgccttctt

SEQ ID NO: 4701766 - DNA, 25 bp, Homo sapien
tttggccccaagcttcagtgccttc

SEQ ID NO: 4701767 - DNA, 25 bp, Homo sapien
ctttttggccccaagcttcagtgcc

SEQ ID NO: 4701768 - DNA, 25 bp, Homo sapien
tttctctactaaagaaactaggctg

SEQ ID NO: 4701769 - DNA, 25 bp, Homo sapien
ttaagagtcgagaaattcttggtac

SEQ ID NO: 4701770 - DNA, 25 bp, Homo sapien
cccagccaaggccttcaataatttt

SEQ ID NO: 4701771 - DNA, 25 bp, Homo sapien
aaagaaagcaattgggactaaggat

SEQ ID NO: 4701772 - DNA, 25 bp, Homo sapien
tcctgtggcgccgtgggacacatac

SEQ ID NO: 4701773 - DNA, 25 bp, Homo sapien
ctgtggcgccgtgggacacatactt

SEQ ID NO: 4701774 - DNA, 25 bp, Homo sapien
ctttcctgtggcgccgtgggacaca

SEQ ID NO: 4701775 - DNA, 25 bp, Homo sapien
tttcctgtggcgccgtgggacacat

SEQ ID NO: 4701776 - DNA, 25 bp, Homo sapien
agagagaaaatggccgcgcacgtct

SEQ ID NO: 4701777 - DNA, 25 bp, Homo sapien
aaatggccgcgcacgtctcctgctt

SEQ ID NO: 4701778 - DNA, 25 bp, Homo sapien
atagccgggaccaccgtccacactg

SEQ ID NO: 4701779 - DNA, 25 bp, Homo sapien
gtcagcgcaggcatccgccagccca

SEQ ID NO: 4701780 - DNA, 25 bp, Homo sapien
caggagccacaggatgggggttctg

SEQ ID NO: 4701781 - DNA, 25 bp, Homo sapien
ctgtcaggagccacaggatgggggt

SEQ ID NO: 4701782 - DNA, 25 bp, Homo sapien
ggagccacaggatgggggttctgga

SEQ ID NO: 4701783 - DNA, 25 bp, Homo sapien
agccacaggatgggggttctggagt

SEQ ID NO: 4701784 - DNA, 25 bp, Homo sapien
cagtgagtagcagctgagctcaaac

SEQ ID NO: 4701785 - DNA, 25 bp, Homo sapien
ggccagtgagtagcagctgagctca

SEQ ID NO: 4701786 - DNA, 25 bp, Homo sapien
tgagtagcagctgagctcaaaccgg

SEQ ID NO: 4701787 - DNA, 25 bp, Homo sapien
tggggggccagtgagtagcagctga

SEQ ID NO: 4701788 - DNA, 25 bp, Homo sapien
cactgccgtgacccagggagagtcc

SEQ ID NO: 4701789 - DNA, 25 bp, Homo sapien
actgccgtgacccagggagagtcca

SEQ ID NO: 4701790 - DNA, 25 bp, Homo sapien
cctgcactccatggcagaatggtgg

SEQ ID NO: 4701791 - DNA, 25 bp, Homo sapien
tggacggagcctgcactccatggca

SEQ ID NO: 4701792 - DNA, 25 bp, Homo sapien
gagcctgcactccatggcagaatgg

SEQ ID NO: 4701793 - DNA, 25 bp, Homo sapien
tggctggacggagcctgcactccat

SEQ ID NO: 4701794 - DNA, 25 bp, Homo sapien
ctccatcaggtcattgcggcccttg

SEQ ID NO: 4701795 - DNA, 25 bp, Homo sapien
gaaccggttgtagaattcaggcatc

SEQ ID NO: 4701796 - DNA, 25 bp, Homo sapien
tttgcgtactccatcaggtcattgc

SEQ ID NO: 4701797 - DNA, 25 bp, Homo sapien
cgtactccatcaggtcattgcggcc

SEQ ID NO: 4701798 - DNA, 25 bp, Homo sapien
atccatgctccacgggttcttggga

SEQ ID NO: 4701799 - DNA, 25 bp, Homo sapien
gaggttctcatccatgctccacggg

SEQ ID NO: 4701800 - DNA, 25 bp, Homo sapien
gtgcatgaggttctcatccatgctc

SEQ ID NO: 4701801 - DNA, 25 bp, Homo sapien
ggttctcatccatgctccacgggtt

SEQ ID NO: 4701802 - DNA, 25 bp, Homo sapien
ggggttctccaggattccagcctcg

SEQ ID NO: 4701803 - DNA, 25 bp, Homo sapien
ggttctccaggattccagcctcgta

SEQ ID NO: 4701804 - DNA, 25 bp, Homo sapien
cttggggttctccaggattccagcc

SEQ ID NO: 4701805 - DNA, 25 bp, Homo sapien
gttctccaggattccagcctcgtag

SEQ ID NO: 4701806 - DNA, 25 bp, Homo sapien
cagcaggaacgatgtttcccctgac

SEQ ID NO: 4701807 - DNA, 25 bp, Homo sapien
tctcagcaggaacgatgtttcccct

SEQ ID NO: 4701808 - DNA, 25 bp, Homo sapien
ggaacgatgtttcccctgactcaca

SEQ ID NO: 4701809 - DNA, 25 bp, Homo sapien
gcctctcagcaggaacgatgtttcc

SEQ ID NO: 4701810 - DNA, 25 bp, Homo sapien
ccaggtccagggatgcaagggtgcg

SEQ ID NO: 4701811 - DNA, 25 bp, Homo sapien
ccctcagcacaaagcccttggggag

SEQ ID NO: 4701812 - DNA, 25 bp, Homo sapien
ggtgcgtcctgacgttgagccccac

SEQ ID NO: 4701813 - DNA, 25 bp, Homo sapien
ccctgagctcatcccgagggggaca

SEQ ID NO: 4701814 - DNA, 25 bp, Homo sapien
atttgaaaacacatcaacctttatg

SEQ ID NO: 4701815 - DNA, 25 bp, Homo sapien
tttgaaaacacatcaacctttatgt

SEQ ID NO: 4701816 - DNA, 25 bp, Homo sapien
cagatgacataccagtccctggaca

SEQ ID NO: 4701817 - DNA, 25 bp, Homo sapien
agcctcgcttgccagaggcctggga

SEQ ID NO: 4701818 - DNA, 25 bp, Homo sapien
ccccacagctggaggtagaatagct

SEQ ID NO: 4701819 - DNA, 25 bp, Homo sapien
ttttcccctcaacttgatctcatct

SEQ ID NO: 4701820 - DNA, 25 bp, Homo sapien
cttttttgaactcgatctcgagaat

SEQ ID NO: 4701821 - DNA, 25 bp, Homo sapien
ctttggctgggtcctgggtcttcgt

SEQ ID NO: 4701822 - DNA, 25 bp, Homo sapien
ttttttgaactcgatctcgagaatg

SEQ ID NO: 4701823 - DNA, 25 bp, Homo sapien
ctgggtcctgggtcttcgtgtagag

SEQ ID NO: 4701824 - DNA, 25 bp, Homo sapien
tcattaccatggagcgagccatcgg

SEQ ID NO: 4701825 - DNA, 25 bp, Homo sapien
tgccaatcaggcctcaatagcggct

SEQ ID NO: 4701826 - DNA, 25 bp, Homo sapien
gaggctttattagccaggcgccgct

SEQ ID NO: 4701827 - DNA, 25 bp, Homo sapien
gggcttcactcaaggcgctgtcagc

SEQ ID NO: 4701828 - DNA, 25 bp, Homo sapien
ccatctgattgatgggggtgacacg

SEQ ID NO: 4701829 - DNA, 25 bp, Homo sapien
agcaggcgaggtgtcggcagcgtcc

SEQ ID NO: 4701830 - DNA, 25 bp, Homo sapien
gggtgacacggtgcccgctccagca

SEQ ID NO: 4701831 - DNA, 25 bp, Homo sapien
gaggtgtcggcagcgtccctgaatc

SEQ ID NO: 4701832 - DNA, 25 bp, Homo sapien
tgccacgtctgtcaggcggaccccg

SEQ ID NO: 4701833 - DNA, 25 bp, Homo sapien
tctgtcccaccagtcacccgggggc

SEQ ID NO: 4701834 - DNA, 25 bp, Homo sapien
gccgggagcaccttctgtcccacca

SEQ ID NO: 4701835 - DNA, 25 bp, Homo sapien
cccctgccacgtctgtcaggcggac

SEQ ID NO: 4701836 - DNA, 25 bp, Homo sapien
gcatttaggggctgtgaaattggaa

SEQ ID NO: 4701837 - DNA, 25 bp, Homo sapien
gaatttcacgctccaccattgtctt

SEQ ID NO: 4701838 - DNA, 25 bp, Homo sapien
gaaccaggccctgaactaattgaat

SEQ ID NO: 4701839 - DNA, 25 bp, Homo sapien
aatgcaataaaaacgctctccccca

SEQ ID NO: 4701840 - DNA, 25 bp, Homo sapien
ctcccgaaacgccttaaatggatgt

SEQ ID NO: 4701841 - DNA, 25 bp, Homo sapien
cagatatggactccaaatgactcct

SEQ ID NO: 4701842 - DNA, 25 bp, Homo sapien
tatggactccaaatgactccttcaa

SEQ ID NO: 4701843 - DNA, 25 bp, Homo sapien
atgtgacagatatggactccaaatg

SEQ ID NO: 4701844 - DNA, 25 bp, Homo sapien
atccttgacgttggtcaccttcaca

SEQ ID NO: 4701845 - DNA, 25 bp, Homo sapien
gacgttggtcaccttcacagggacc

SEQ ID NO: 4701846 - DNA, 25 bp, Homo sapien
tggtgggtggtgccatccttgacgt

SEQ ID NO: 4701847 - DNA, 25 bp, Homo sapien
gcgacttcgttcaggtacatgaaga

SEQ ID NO: 4701848 - DNA, 25 bp, Homo sapien
ttcccaagaggccggacagggctgc

SEQ ID NO: 4701849 - DNA, 25 bp, Homo sapien
tcagccacaaccattagctgcaacg

SEQ ID NO: 4701850 - DNA, 25 bp, Homo sapien
tcgtgctcgcccgagacggcggttc

SEQ ID NO: 4701851 - DNA, 25 bp, Homo sapien
ttagctgcaacggtccaggctcgtg

SEQ ID NO: 4701852 - DNA, 25 bp, Homo sapien
gtcaatacggcccacgccatgcttg

SEQ ID NO: 4701853 - DNA, 25 bp, Homo sapien
atgtcaatacggcccacgccatgct

SEQ ID NO: 4701854 - DNA, 25 bp, Homo sapien
cgatgtcaatacggcccacgccatg

SEQ ID NO: 4701855 - DNA, 25 bp, Homo sapien
acgatgtcaatacggcccacgccat

SEQ ID NO: 4701856 - DNA, 25 bp, Homo sapien
gatcaatccggtaccgtgttctccc

SEQ ID NO: 4701857 - DNA, 25 bp, Homo sapien
agtcttagaatcacggaaatgtcag

SEQ ID NO: 4701858 - DNA, 25 bp, Homo sapien
cagagcttgcattaggatcaatccg

SEQ ID NO: 4701859 - DNA, 25 bp, Homo sapien
gttctcccgactgttagctgccaac

SEQ ID NO: 4701860 - DNA, 25 bp, Homo sapien
atgagcatggtaaaggatggtgcct

SEQ ID NO: 4701861 - DNA, 25 bp, Homo sapien
gtgcctgctggggtctcgtagatac

SEQ ID NO: 4701862 - DNA, 25 bp, Homo sapien
ctaaatgagcatggtaaaggatggt

SEQ ID NO: 4701863 - DNA, 25 bp, Homo sapien
gatggtgcctgctggggtctcgtag

SEQ ID NO: 4701864 - DNA, 25 bp, Homo sapien
gattttgcgcacttcccggtccatg

SEQ ID NO: 4701865 - DNA, 25 bp, Homo sapien
ttttgcgcacttcccggtccatggt

SEQ ID NO: 4701866 - DNA, 25 bp, Homo sapien
gtttgattttgcgcacttcccggtc

SEQ ID NO: 4701867 - DNA, 25 bp, Homo sapien
cttgtttgattttgcgcacttcccg

SEQ ID NO: 4701868 - DNA, 25 bp, Homo sapien
cagggagaaataacgccagccaata

SEQ ID NO: 4701869 - DNA, 25 bp, Homo sapien
gagaaataacgccagccaataacca

SEQ ID NO: 4701870 - DNA, 25 bp, Homo sapien
gctgcaaggaacaatggcagggaga

SEQ ID NO: 4701871 - DNA, 25 bp, Homo sapien
aatggcagggagaaataacgccagc

SEQ ID NO: 4701872 - DNA, 25 bp, Homo sapien
acacctggcccttgaggacggacac

SEQ ID NO: 4701873 - DNA, 25 bp, Homo sapien
gagacagtggggactcccggccgag

SEQ ID NO: 4701874 - DNA, 25 bp, Homo sapien
ccttgaggacggacacctgcacttt

SEQ ID NO: 4701875 - DNA, 25 bp, Homo sapien
gactcccggccgaggatgtacacct

SEQ ID NO: 4701876 - DNA, 25 bp, Homo sapien
aactctagacccaagtgtccggcgg

SEQ ID NO: 4701877 - DNA, 25 bp, Homo sapien
tgatctcacagactcaagagacgct

SEQ ID NO: 4701878 - DNA, 25 bp, Homo sapien
tcaaaatgcctatgatgctccaggg

SEQ ID NO: 4701879 - DNA, 25 bp, Homo sapien
caagagcatttcctcaacccaggga

SEQ ID NO: 4701880 - DNA, 25 bp, Homo sapien
tcaggcactgaagccactaggagct

SEQ ID NO: 4701881 - DNA, 25 bp, Homo sapien
ctccacacctccacggcccctccag

SEQ ID NO: 4701882 - DNA, 25 bp, Homo sapien
aggcactgaagccactaggagcttg

SEQ ID NO: 4701883 - DNA, 25 bp, Homo sapien
cactgaagccactaggagcttgcat

SEQ ID NO: 4701884 - DNA, 25 bp, Homo sapien
cccggtggcatcagttggctcataa

SEQ ID NO: 4701885 - DNA, 25 bp, Homo sapien
tgaacccggtggcatcagttggctc

SEQ ID NO: 4701886 - DNA, 25 bp, Homo sapien
ttgatgaacccggtggcatcagttg

SEQ ID NO: 4701887 - DNA, 25 bp, Homo sapien
gaacccggtggcatcagttggctca

SEQ ID NO: 4701888 - DNA, 25 bp, Homo sapien
cttgtttaacctgccctgcaaagga

SEQ ID NO: 4701889 - DNA, 25 bp, Homo sapien
tactgtcggctatcaaagcatgctt

SEQ ID NO: 4701890 - DNA, 25 bp, Homo sapien
caaaggagctcatagtggagtccct

SEQ ID NO: 4701891 - DNA, 25 bp, Homo sapien
gatggcttccagctagacctacagc

SEQ ID NO: 4701892 - DNA, 25 bp, Homo sapien
gcctgagccgcatgcttgatttcca

SEQ ID NO: 4701893 - DNA, 25 bp, Homo sapien
gctgctggtgacaaacgaccctgtt

SEQ ID NO: 4701894 - DNA, 25 bp, Homo sapien
ggtacagctgacactcttactggtg

SEQ ID NO: 4701895 - DNA, 25 bp, Homo sapien
gagagtgtcccagagcagcttagtc

SEQ ID NO: 4701896 - DNA, 25 bp, Homo sapien
acacacactgggttcaattaattca

SEQ ID NO: 4701897 - DNA, 25 bp, Homo sapien
cacactgggttcaattaattcaggc

SEQ ID NO: 4701898 - DNA, 25 bp, Homo sapien
cacacactgggttcaattaattcag

SEQ ID NO: 4701899 - DNA, 25 bp, Homo sapien
cactgggttcaattaattcaggcag

SEQ ID NO: 4701900 - DNA, 25 bp, Homo sapien
cttgctctggagacgatgatattcc

SEQ ID NO: 4701901 - DNA, 25 bp, Homo sapien
agtgaccttgctctggagacgatga

SEQ ID NO: 4701902 - DNA, 25 bp, Homo sapien
gaccttgctctggagacgatgatat

SEQ ID NO: 4701903 - DNA, 25 bp, Homo sapien
cagtgaccttgctctggagacgatg

SEQ ID NO: 4701904 - DNA, 25 bp, Homo sapien
ttcgatgacaacgtttgcaggcttc

SEQ ID NO: 4701905 - DNA, 25 bp, Homo sapien
ttcccttcgatgacaacgtttgcag

SEQ ID NO: 4701906 - DNA, 25 bp, Homo sapien
cccttcccttcgatgacaacgtttg

SEQ ID NO: 4701907 - DNA, 25 bp, Homo sapien
ccttcgatgacaacgtttgcaggct

SEQ ID NO: 4701908 - DNA, 25 bp, Homo sapien
cccagcggtgagtgcctgtgttaca

SEQ ID NO: 4701909 - DNA, 25 bp, Homo sapien
cttttgcgagaaaccctcatggaca

SEQ ID NO: 4701910 - DNA, 25 bp, Homo sapien
gattggccagctcgagtcaggtgtc

SEQ ID NO: 4701911 - DNA, 25 bp, Homo sapien
ggtgtccatccacggtccaatcaga

SEQ ID NO: 4701912 - DNA, 25 bp, Homo sapien
gcagccccaccaggtgggctggttt

SEQ ID NO: 4701913 - DNA, 25 bp, Homo sapien
ctggatccaggtggcgctgacagca

SEQ ID NO: 4701914 - DNA, 25 bp, Homo sapien
agcttctggatccaggtggcgctga

SEQ ID NO: 4701915 - DNA, 25 bp, Homo sapien
agcagccccaccaggtgggctggtt

SEQ ID NO: 4701916 - DNA, 25 bp, Homo sapien
gtgcagatcagctcagcacccggct

SEQ ID NO: 4701917 - DNA, 25 bp, Homo sapien
gcgtgcagatcagctcagcacccgg

SEQ ID NO: 4701918 - DNA, 25 bp, Homo sapien
gaggcgtgcagatcagctcagcacc

SEQ ID NO: 4701919 - DNA, 25 bp, Homo sapien
ggcgtgcagatcagctcagcacccg

SEQ ID NO: 4701920 - DNA, 25 bp, Homo sapien
gatgagatatggattgcactgaccc

SEQ ID NO: 4701921 - DNA, 25 bp, Homo sapien
ttgcactgaccccagacgagccctt

SEQ ID NO: 4701922 - DNA, 25 bp, Homo sapien
tgaccccagacgagccctttcccca

SEQ ID NO: 4701923 - DNA, 25 bp, Homo sapien
tgagatatggattgcactgacccca

SEQ ID NO: 4701924 - DNA, 25 bp, Homo sapien
catgttccaatagccatcacttccg

SEQ ID NO: 4701925 - DNA, 25 bp, Homo sapien
atgttccaatagccatcacttccgc

SEQ ID NO: 4701926 - DNA, 25 bp, Homo sapien
ctgtgctcggaaggactgggtcggg

SEQ ID NO: 4701927 - DNA, 25 bp, Homo sapien
aatttgataggtcaccggatgtggg

SEQ ID NO: 4701928 - DNA, 25 bp, Homo sapien
gactgggtcgggatcagctctgagg

SEQ ID NO: 4701929 - DNA, 25 bp, Homo sapien
acttgcctcaatttgataggtcacc

SEQ ID NO: 4701930 - DNA, 25 bp, Homo sapien
ttccagttgagtccatgggcttggg

SEQ ID NO: 4701931 - DNA, 25 bp, Homo sapien
tggccctcttccagttgagtccatg

SEQ ID NO: 4701932 - DNA, 25 bp, Homo sapien
atcctggccctcttccagttgagtc

SEQ ID NO: 4701933 - DNA, 25 bp, Homo sapien
cctcttccagttgagtccatgggct

SEQ ID NO: 4701934 - DNA, 25 bp, Homo sapien
ggggccatgaacctcactgagcccc

SEQ ID NO: 4701935 - DNA, 25 bp, Homo sapien
gggctgcacaaagggccgtgtcact

SEQ ID NO: 4701936 - DNA, 25 bp, Homo sapien
aggggctgcacaaagggccgtgtca

SEQ ID NO: 4701937 - DNA, 25 bp, Homo sapien
tgcacaaagggccgtgtcactgacc

SEQ ID NO: 4701938 - DNA, 25 bp, Homo sapien
gcaggggctgcacaaagggccgtgt

SEQ ID NO: 4701939 - DNA, 25 bp, Homo sapien
taaatctgagggtggacctgcctcc

SEQ ID NO: 4701940 - DNA, 25 bp, Homo sapien
caaatagatcgatgggaaactgcca

SEQ ID NO: 4701941 - DNA, 25 bp, Homo sapien
cttggaccttgggagaaactgctga

SEQ ID NO: 4701942 - DNA, 25 bp, Homo sapien
cattgatccggctaaaccagggaga

SEQ ID NO: 4701943 - DNA, 25 bp, Homo sapien
gcgcgcgccttcacgcccagttaat

SEQ ID NO: 4701944 - DNA, 25 bp, Homo sapien
ggcgcgcgccttcacgcccagttaa

SEQ ID NO: 4701945 - DNA, 25 bp, Homo sapien
aggcgcgcgccttcacgcccagtta

SEQ ID NO: 4701946 - DNA, 25 bp, Homo sapien
aaagcaagttctgttcggccctggg

SEQ ID NO: 4701947 - DNA, 25 bp, Homo sapien
tgaagtagccaacgattgtgcggtg

SEQ ID NO: 4701948 - DNA, 25 bp, Homo sapien
gaaacctcttctgatcacgcaggcg

SEQ ID NO: 4701949 - DNA, 25 bp, Homo sapien
gagacgctggagcaaactgtccgac

SEQ ID NO: 4701950 - DNA, 25 bp, Homo sapien
ttccaaccttcttattggctctccg

SEQ ID NO: 4701951 - DNA, 25 bp, Homo sapien
cagggaggcacggaggtacccattt

SEQ ID NO: 4701952 - DNA, 25 bp, Homo sapien
gaggcacggaggtacccattttcca

SEQ ID NO: 4701953 - DNA, 25 bp, Homo sapien
aaccttcttattggctctccgtttg

SEQ ID NO: 4701954 - DNA, 25 bp, Homo sapien
ctggaatttcaagtgcagactaagg

SEQ ID NO: 4701955 - DNA, 25 bp, Homo sapien
aatttcaagtgcagactaaggagca

SEQ ID NO: 4701956 - DNA, 25 bp, Homo sapien
cttttccaatgtcaagtgtccactg

SEQ ID NO: 4701957 - DNA, 25 bp, Homo sapien
caatgtcaagtgtccactggaattt

SEQ ID NO: 4701958 - DNA, 25 bp, Homo sapien
atgaggatgggccaccgccacttcc

SEQ ID NO: 4701959 - DNA, 25 bp, Homo sapien
tgtcagtgtcccacatttgcgagga

SEQ ID NO: 4701960 - DNA, 25 bp, Homo sapien
gaaaagccagcgtggtgtcctctta

SEQ ID NO: 4701961 - DNA, 25 bp, Homo sapien
tgtcctcttacacggtccttaacaa

SEQ ID NO: 4701962 - DNA, 25 bp, Homo sapien
ctttgaaagggcattgggacagcat

SEQ ID NO: 4701963 - DNA, 25 bp, Homo sapien
tgtcggccgtttggaatctcagagg

SEQ ID NO: 4701964 - DNA, 25 bp, Homo sapien
tccccgaggcttggatgtggtcccg

SEQ ID NO: 4701965 - DNA, 25 bp, Homo sapien
gaacagtcgtggttcatcaaaagcc

SEQ ID NO: 4701966 - DNA, 25 bp, Homo sapien
atggcgtcttgacaggtccccgagg

SEQ ID NO: 4701967 - DNA, 25 bp, Homo sapien
agggaaagccgggacgctcgcagct

SEQ ID NO: 4701968 - DNA, 25 bp, Homo sapien
gctcgcagctggaggagtcgcgtct

SEQ ID NO: 4701969 - DNA, 25 bp, Homo sapien
gggtcagggcacgtgaccttcgacc

SEQ ID NO: 4701970 - DNA, 25 bp, Homo sapien
tgaccttcgaccgatcggaagtggg

SEQ ID NO: 4701971 - DNA, 25 bp, Homo sapien
cgccgacgccgccgacgccgccgct

SEQ ID NO: 4701972 - DNA, 25 bp, Homo sapien
ccgacgccgccgacgccgccgctcg

SEQ ID NO: 4701973 - DNA, 25 bp, Homo sapien
cgacgccgccgacgccgccgctcgg

SEQ ID NO: 4701974 - DNA, 25 bp, Homo sapien
gccgacgccgccgacgccgccgctc

SEQ ID NO: 4701975 - DNA, 25 bp, Homo sapien
ccccacaggagcgctctgcccctgc

SEQ ID NO: 4701976 - DNA, 25 bp, Homo sapien
tctgcccctgcaccagctccgccat

SEQ ID NO: 4701977 - DNA, 25 bp, Homo sapien
ccacaggagcgctctgcccctgcac

SEQ ID NO: 4701978 - DNA, 25 bp, Homo sapien
cgctctgcccctgcaccagctccgc

SEQ ID NO: 4701979 - DNA, 25 bp, Homo sapien
ctgccggacccggtgcagggcatcc

SEQ ID NO: 4701980 - DNA, 25 bp, Homo sapien
ggtgcagggcatccacgaagccctc

SEQ ID NO: 4701981 - DNA, 25 bp, Homo sapien
ggacccggtgcagggcatccacgaa

SEQ ID NO: 4701982 - DNA, 25 bp, Homo sapien
tgcagggcatccacgaagccctcgg

SEQ ID NO: 4701983 - DNA, 25 bp, Homo sapien
tactggaaagagatgtaaagaccat

SEQ ID NO: 4701984 - DNA, 25 bp, Homo sapien
catgaaaagtcagttatcagggaaa

SEQ ID NO: 4701985 - DNA, 25 bp, Homo sapien
agaccatatcttcaagcgcccgagt

SEQ ID NO: 4701986 - DNA, 25 bp, Homo sapien
ttcaagcgcccgagtgaagaccttc

SEQ ID NO: 4701987 - DNA, 25 bp, Homo sapien
gctaggcagtaaagtaacaattcat

SEQ ID NO: 4701988 - DNA, 25 bp, Homo sapien
tactgtactggttggcagctaggca

SEQ ID NO: 4701989 - DNA, 25 bp, Homo sapien
gaaagttctgggatccaatataatg

SEQ ID NO: 4701990 - DNA, 25 bp, Homo sapien
tactggttggcagctaggcagtaaa

SEQ ID NO: 4701991 - DNA, 25 bp, Homo sapien
ggcagtgactataattcttcccgga

SEQ ID NO: 4701992 - DNA, 25 bp, Homo sapien
tcccggacatagaaggccaacaagg

SEQ ID NO: 4701993 - DNA, 25 bp, Homo sapien
taggtcagcatttaccagagggtct

SEQ ID NO: 4701994 - DNA, 25 bp, Homo sapien
caaccactggctcaagagaagcgga

SEQ ID NO: 4701995 - DNA, 25 bp, Homo sapien
ttactgctccagtcaatggtgcatt

SEQ ID NO: 4701996 - DNA, 25 bp, Homo sapien
tctccattgggcttattactgctcc

SEQ ID NO: 4701997 - DNA, 25 bp, Homo sapien
cctgtctccattgggcttattactg

SEQ ID NO: 4701998 - DNA, 25 bp, Homo sapien
gccctgtctccattgggcttattac

SEQ ID NO: 4701999 - DNA, 25 bp, Homo sapien
cttggagatagtatggacctccagc

SEQ ID NO: 4702000 - DNA, 25 bp, Homo sapien
ccttggagatagtatggacctccag

SEQ ID NO: 4702001 - DNA, 25 bp, Homo sapien
agctgttaacattcagaaggaacac

SEQ ID NO: 4702002 - DNA, 25 bp, Homo sapien
cagcagggtcaactgagagtattac

SEQ ID NO: 4702003 - DNA, 25 bp, Homo sapien
ccaaaggatatacacggaggcttca

SEQ ID NO: 4702004 - DNA, 25 bp, Homo sapien
tacgatctgctagaaaaactgagcg

SEQ ID NO: 4702005 - DNA, 25 bp, Homo sapien
aactgagcgtgagacactttactgc

SEQ ID NO: 4702006 - DNA, 25 bp, Homo sapien
gtgccaaacattaactcactagact

SEQ ID NO: 4702007 - DNA, 25 bp, Homo sapien
tctactaccctatagaatggatgta

SEQ ID NO: 4702008 - DNA, 25 bp, Homo sapien
ttgatctccatgctcaagctagcct

SEQ ID NO: 4702009 - DNA, 25 bp, Homo sapien
tggatgtaaattacctgcttgtgcc

SEQ ID NO: 4702010 - DNA, 25 bp, Homo sapien
gcgcggcacagccacccagagaggt

SEQ ID NO: 4702011 - DNA, 25 bp, Homo sapien
gcggcacagccacccagagaggtcc

SEQ ID NO: 4702012 - DNA, 25 bp, Homo sapien
ctgcgcggcacagccacccagagag

SEQ ID NO: 4702013 - DNA, 25 bp, Homo sapien
gcacagccacccagagaggtcctgc

SEQ ID NO: 4702014 - DNA, 25 bp, Homo sapien
cctgctactcaacagggatcctgtt

SEQ ID NO: 4702015 - DNA, 25 bp, Homo sapien
tgttgattggcatggatacagcaag

SEQ ID NO: 4702016 - DNA, 25 bp, Homo sapien
cagcatcgagggtgtgggacccaac

SEQ ID NO: 4702017 - DNA, 25 bp, Homo sapien
tgaatgccatccacatatgtgtccc

SEQ ID NO: 4702018 - DNA, 25 bp, Homo sapien
caagaatatttgaaaggcctcatgt

SEQ ID NO: 4702019 - DNA, 25 bp, Homo sapien
taacttttctcacagggttcgctta

SEQ ID NO: 4702020 - DNA, 25 bp, Homo sapien
ggttcgcttatgcaacaaattcccc

SEQ ID NO: 4702021 - DNA, 25 bp, Homo sapien
gctcaaatgtgacaaacgggtctca

SEQ ID NO: 4702022 - DNA, 25 bp, Homo sapien
cactagaggtgtggaattattcaag

SEQ ID NO: 4702023 - DNA, 25 bp, Homo sapien
tgtactccgtatccatatactgagg

SEQ ID NO: 4702024 - DNA, 25 bp, Homo sapien
tccatcatccaagggccgtttttgt

SEQ ID NO: 4702025 - DNA, 25 bp, Homo sapien
tatactgaggggtccactagaggtg

SEQ ID NO: 4702026 - DNA, 25 bp, Homo sapien
gcaccaaatcgtagcttttctgtgg

SEQ ID NO: 4702027 - DNA, 25 bp, Homo sapien
gtgggaacttcaattcccatgcgca

SEQ ID NO: 4702028 - DNA, 25 bp, Homo sapien
gccatgcaccaaatcgtagcttttc

SEQ ID NO: 4702029 - DNA, 25 bp, Homo sapien
gagaaagtgggaacttcaattccca

SEQ ID NO: 4702030 - DNA, 25 bp, Homo sapien
aaaaacaagaattcctagagaccag

SEQ ID NO: 4702031 - DNA, 25 bp, Homo sapien
aaacaagaattcctagagaccagag

SEQ ID NO: 4702032 - DNA, 25 bp, Homo sapien
aaaacaagaattcctagagaccaga

SEQ ID NO: 4702033 - DNA, 25 bp, Homo sapien
gcctgagcagagtgtgatcccatcg

SEQ ID NO: 4702034 - DNA, 25 bp, Homo sapien
ccaggagttcaacggcgccactgca

SEQ ID NO: 4702035 - DNA, 25 bp, Homo sapien
ctctagcctgagcagagtgtgatcc

SEQ ID NO: 4702036 - DNA, 25 bp, Homo sapien
caggagttcaacggcgccactgcac

SEQ ID NO: 4702037 - DNA, 25 bp, Homo sapien
ctatgaactggaggatttaaaaacg

SEQ ID NO: 4702038 - DNA, 25 bp, Homo sapien
taatgggtacgaataagacctacta

SEQ ID NO: 4702039 - DNA, 25 bp, Homo sapien
cttaacatagggtttattcaggaca

SEQ ID NO: 4702040 - DNA, 25 bp, Homo sapien
cgttttccacgaggtgcttatttca

SEQ ID NO: 4702041 - DNA, 25 bp, Homo sapien
tagaaaagcagaggcagaccaagcg

SEQ ID NO: 4702042 - DNA, 25 bp, Homo sapien
tatgaagccctcctatagcaagaag

SEQ ID NO: 4702043 - DNA, 25 bp, Homo sapien
ggtcactgggccactctcttaagag

SEQ ID NO: 4702044 - DNA, 25 bp, Homo sapien
taggctcacagtcttgctgatggcg

SEQ ID NO: 4702045 - DNA, 25 bp, Homo sapien
gcttcaggttcccttctagctgtga

SEQ ID NO: 4702046 - DNA, 25 bp, Homo sapien
tctggcactcggcataattccctgg

SEQ ID NO: 4702047 - DNA, 25 bp, Homo sapien
tgccaggcccgggagtagtatttct

SEQ ID NO: 4702048 - DNA, 25 bp, Homo sapien
tatctatctggccttggtcaaacca

SEQ ID NO: 4702049 - DNA, 25 bp, Homo sapien
cgtgggttctggtccactgcgttgt

SEQ ID NO: 4702050 - DNA, 25 bp, Homo sapien
ctgtctcagccagaaaagccacaga

SEQ ID NO: 4702051 - DNA, 25 bp, Homo sapien
tggtaaaggatgtcaaagggccgat

SEQ ID NO: 4702052 - DNA, 25 bp, Homo sapien
gaaacaaagggcagtgctaccataa

SEQ ID NO: 4702053 - DNA, 25 bp, Homo sapien
gactcagcccctgaataatgttggg

SEQ ID NO: 4702054 - DNA, 25 bp, Homo sapien
gaatgtcaacgacagagtacctgtg

SEQ ID NO: 4702055 - DNA, 25 bp, Homo sapien
cattcctgagggaggtatgttggcc

SEQ ID NO: 4702056 - DNA, 25 bp, Homo sapien
tcctatttatgggtcaagctcagct

SEQ ID NO: 4702057 - DNA, 25 bp, Homo sapien
cggacccaccagagcagtccatgtg

SEQ ID NO: 4702058 - DNA, 25 bp, Homo sapien
gcagtccatgtgcagcggacactaa

SEQ ID NO: 4702059 - DNA, 25 bp, Homo sapien
cactaagaatgagcaactgcctttc

SEQ ID NO: 4702060 - DNA, 25 bp, Homo sapien
tgtgcagcggacactaagaatgagc

SEQ ID NO: 4702061 - DNA, 25 bp, Homo sapien
ccacagcagctgtagtcatgaggaa

SEQ ID NO: 4702062 - DNA, 25 bp, Homo sapien
gctgtagtcatgaggaacacgcaca

SEQ ID NO: 4702063 - DNA, 25 bp, Homo sapien
ttgttaaggactgctccacagcagc

SEQ ID NO: 4702064 - DNA, 25 bp, Homo sapien
ggatgcattgttaaggactgctcca

SEQ ID NO: 4702065 - DNA, 25 bp, Homo sapien
aagatggaaagagatccttctttct

SEQ ID NO: 4702066 - DNA, 25 bp, Homo sapien
ctcctgctctggatccaaactcaat

SEQ ID NO: 4702067 - DNA, 25 bp, Homo sapien
ggatccaaactcaatgtaaagatgg

SEQ ID NO: 4702068 - DNA, 25 bp, Homo sapien
gctctggatccaaactcaatgtaaa

SEQ ID NO: 4702069 - DNA, 25 bp, Homo sapien
ctttgatgtaccaaggcccctaact

SEQ ID NO: 4702070 - DNA, 25 bp, Homo sapien
cccaaactgcccatactggcaatgt

SEQ ID NO: 4702071 - DNA, 25 bp, Homo sapien
cttttgcagccattttaggtcccca

SEQ ID NO: 4702072 - DNA, 25 bp, Homo sapien
aactgcccatactggcaatgttgca

SEQ ID NO: 4702073 - DNA, 25 bp, Homo sapien
acagaatacagacttttgcagccat

SEQ ID NO: 4702074 - DNA, 25 bp, Homo sapien
tgtcaggcactttgaattcttccgt

SEQ ID NO: 4702075 - DNA, 25 bp, Homo sapien
aaccattttgtcaggcactttgaat

SEQ ID NO: 4702076 - DNA, 25 bp, Homo sapien
cattttgtcaggcactttgaattct

SEQ ID NO: 4702077 - DNA, 25 bp, Homo sapien
ggcactttgaattcttccgttatta

SEQ ID NO: 4702078 - DNA, 25 bp, Homo sapien
tgaacagggtcagaatacacgcccc

SEQ ID NO: 4702079 - DNA, 25 bp, Homo sapien
gacacttggctcacaatactacaca

SEQ ID NO: 4702080 - DNA, 25 bp, Homo sapien
caatactacacatcgagttggcccc

SEQ ID NO: 4702081 - DNA, 25 bp, Homo sapien
tttcaccacgcaggaatgactgaat

SEQ ID NO: 4702082 - DNA, 25 bp, Homo sapien
attttgcaaccagattctgcttgaa

SEQ ID NO: 4702083 - DNA, 25 bp, Homo sapien
ttctgcttgaatccgtgaaatctgc

SEQ ID NO: 4702084 - DNA, 25 bp, Homo sapien
caaccagattctgcttgaatccgtg

SEQ ID NO: 4702085 - DNA, 25 bp, Homo sapien
gaatccgtgaaatctgctcacctcc

SEQ ID NO: 4702086 - DNA, 25 bp, Homo sapien
ttccggtaagtacacagggcctctc

SEQ ID NO: 4702087 - DNA, 25 bp, Homo sapien
taagttgattagagcattcaggtgg

SEQ ID NO: 4702088 - DNA, 25 bp, Homo sapien
agtgactggcttactaatccagacc

SEQ ID NO: 4702089 - DNA, 25 bp, Homo sapien
tgaatgtacactcctgagaccctgg

SEQ ID NO: 4702090 - DNA, 25 bp, Homo sapien
cctgctcaggtaaaggaggtgttaa

SEQ ID NO: 4702091 - DNA, 25 bp, Homo sapien
ggtccatttcgacagcggtccacaa

SEQ ID NO: 4702092 - DNA, 25 bp, Homo sapien
tatgtcattatgaaagccaggtcca

SEQ ID NO: 4702093 - DNA, 25 bp, Homo sapien
tagatgcgggaatgagaatctcctg

SEQ ID NO: 4702094 - DNA, 25 bp, Homo sapien
gatgaccagacccactttagatgcg

SEQ ID NO: 4702095 - DNA, 25 bp, Homo sapien
gatacgaagaggcttgtctgctccc

SEQ ID NO: 4702096 - DNA, 25 bp, Homo sapien
ggatcatgaccatcttcacccctgt

SEQ ID NO: 4702097 - DNA, 25 bp, Homo sapien
tcccgtgggcaatgggccatcctgg

SEQ ID NO: 4702098 - DNA, 25 bp, Homo sapien
taaatgcatctccagtgatacgaag

SEQ ID NO: 4702099 - DNA, 25 bp, Homo sapien
ctctggcccgatggaagtgaacaac

SEQ ID NO: 4702100 - DNA, 25 bp, Homo sapien
atagaaaaagaaggcctctgaggga

SEQ ID NO: 4702101 - DNA, 25 bp, Homo sapien
tgcccaactgttcgcactgagagaa

SEQ ID NO: 4702102 - DNA, 25 bp, Homo sapien
accatcacagtactggagcccacgg

SEQ ID NO: 4702103 - DNA, 25 bp, Homo sapien
cgagagttgaaatcgccgcgtacac

SEQ ID NO: 4702104 - DNA, 25 bp, Homo sapien
tcctcccattcgagagttgaaatcg

SEQ ID NO: 4702105 - DNA, 25 bp, Homo sapien
ctcggataatctctagtaccatttc

SEQ ID NO: 4702106 - DNA, 25 bp, Homo sapien
gcgtacaccccgaaagtcagcttgg

SEQ ID NO: 4702107 - DNA, 25 bp, Homo sapien
cacccaccctaaggagccagagaat

SEQ ID NO: 4702108 - DNA, 25 bp, Homo sapien
gatagattctgaccccattgcaacc

SEQ ID NO: 4702109 - DNA, 25 bp, Homo sapien
tagccctagcggttctttaaaatgc

SEQ ID NO: 4702110 - DNA, 25 bp, Homo sapien
tgggcaactggttaacctctaaagc

SEQ ID NO: 4702111 - DNA, 25 bp, Homo sapien
tggatctttttgatcatttccccgt

SEQ ID NO: 4702112 - DNA, 25 bp, Homo sapien
attacaatccccacagcaaacctag

SEQ ID NO: 4702113 - DNA, 25 bp, Homo sapien
tcttcctattacaatccccacagca

SEQ ID NO: 4702114 - DNA, 25 bp, Homo sapien
tgaatcctcacaccagcatcattct

SEQ ID NO: 4702115 - DNA, 25 bp, Homo sapien
gatatgcgctgcatgctgacaccga

SEQ ID NO: 4702116 - DNA, 25 bp, Homo sapien
tcagctcgctgatgatatgcgctgc

SEQ ID NO: 4702117 - DNA, 25 bp, Homo sapien
gacaccgatccggagggcccatgac

SEQ ID NO: 4702118 - DNA, 25 bp, Homo sapien
ggctgtaagaatcagctcgctgatg

SEQ ID NO: 4702119 - DNA, 25 bp, Homo sapien
cacacttatcggctggcaccgtgta

SEQ ID NO: 4702120 - DNA, 25 bp, Homo sapien
gctggcaccgtgtatgttatctcct

SEQ ID NO: 4702121 - DNA, 25 bp, Homo sapien
ctttgcctatgacgaggccacactt

SEQ ID NO: 4702122 - DNA, 25 bp, Homo sapien
tgttatctcctggacgccaccaggg

SEQ ID NO: 4702123 - DNA, 25 bp, Homo sapien
tgaacacgaacccataccaactctg

SEQ ID NO: 4702124 - DNA, 25 bp, Homo sapien
cacacctgccggcaaatgaacacga

SEQ ID NO: 4702125 - DNA, 25 bp, Homo sapien
tcagtctaaaagacaacacggtttc

SEQ ID NO: 4702126 - DNA, 25 bp, Homo sapien
cattttgcaagagcataagcccaca

SEQ ID NO: 4702127 - DNA, 25 bp, Homo sapien
cgtgcgcccctgactgctggttgat

SEQ ID NO: 4702128 - DNA, 25 bp, Homo sapien
aactttctcatctatgagctgcctg

SEQ ID NO: 4702129 - DNA, 25 bp, Homo sapien
ctgatggtgaatctccgcaggttgg

SEQ ID NO: 4702130 - DNA, 25 bp, Homo sapien
gggttcctctgaagctccacgtgcg

SEQ ID NO: 4702131 - DNA, 25 bp, Homo sapien
tgactctcccgtcaacttaggctgg

SEQ ID NO: 4702132 - DNA, 25 bp, Homo sapien
ccttgaggtgcctgaaactaaagcc

SEQ ID NO: 4702133 - DNA, 25 bp, Homo sapien
aagccagagtcaatgaaagctgcct

SEQ ID NO: 4702134 - DNA, 25 bp, Homo sapien
tctgccattctacgtccccattgag

SEQ ID NO: 4702135 - DNA, 25 bp, Homo sapien
gtggctggctgaatggactctgtcc

SEQ ID NO: 4702136 - DNA, 25 bp, Homo sapien
ctccaggtgctccgagattggtccc

SEQ ID NO: 4702137 - DNA, 25 bp, Homo sapien
gtccgaaggctccaggtgctccgag

SEQ ID NO: 4702138 - DNA, 25 bp, Homo sapien
ctgaatggactctgtccgaaggctc

SEQ ID NO: 4702139 - DNA, 25 bp, Homo sapien
agccatgtttgggaagcacccggag

SEQ ID NO: 4702140 - DNA, 25 bp, Homo sapien
ggaagcacccggagctccttggagg

SEQ ID NO: 4702141 - DNA, 25 bp, Homo sapien
cttggcagccatgtttgggaagcac

SEQ ID NO: 4702142 - DNA, 25 bp, Homo sapien
gggaagcacccggagctccttggag

SEQ ID NO: 4702143 - DNA, 25 bp, Homo sapien
ctcacaggggtgctgtgggggttcc

SEQ ID NO: 4702144 - DNA, 25 bp, Homo sapien
acaggggtgctgtgggggttcccat

SEQ ID NO: 4702145 - DNA, 25 bp, Homo sapien
caggggtgctgtgggggttcccatt

SEQ ID NO: 4702146 - DNA, 25 bp, Homo sapien
gggtgctgtgggggttcccattcac

SEQ ID NO: 4702147 - DNA, 25 bp, Homo sapien
tggataacaagagggtcactcgttc

SEQ ID NO: 4702148 - DNA, 25 bp, Homo sapien
ctgggtcagaaaggccggaggacca

SEQ ID NO: 4702149 - DNA, 25 bp, Homo sapien
tgctgccacgcctggtaggtgctgc

SEQ ID NO: 4702150 - DNA, 25 bp, Homo sapien
tgccacgcctggtaggtgctgcccc

SEQ ID NO: 4702151 - DNA, 25 bp, Homo sapien
gctgctgccacgcctggtaggtgct

SEQ ID NO: 4702152 - DNA, 25 bp, Homo sapien
gccacgcctggtaggtgctgcccca

SEQ ID NO: 4702153 - DNA, 25 bp, Homo sapien
ggccacacacggctccgcagccctg

SEQ ID NO: 4702154 - DNA, 25 bp, Homo sapien
gctcctggccacacacggctccgca

SEQ ID NO: 4702155 - DNA, 25 bp, Homo sapien
gcagtcaggccttacgggctcctca

SEQ ID NO: 4702156 - DNA, 25 bp, Homo sapien
agtcaggccttacgggctcctcaca

SEQ ID NO: 4702157 - DNA, 25 bp, Homo sapien
ctgttttttgtaatagtcttcccag

SEQ ID NO: 4702158 - DNA, 25 bp, Homo sapien
cttcccaggccttgctgtagttggg

SEQ ID NO: 4702159 - DNA, 25 bp, Homo sapien
tgtaatagtcttcccaggccttgct

SEQ ID NO: 4702160 - DNA, 25 bp, Homo sapien
tagttgggctggctgctctgcggct

SEQ ID NO: 4702161 - DNA, 25 bp, Homo sapien
tctcttccaaccagcaagaaacatc

SEQ ID NO: 4702162 - DNA, 25 bp, Homo sapien
ctccaacccctagaagggccatgaa

SEQ ID NO: 4702163 - DNA, 25 bp, Homo sapien
ggtagccttcaacccgatctcttcc

SEQ ID NO: 4702164 - DNA, 25 bp, Homo sapien
gggccatgaacctggcgatgatgcc

SEQ ID NO: 4702165 - DNA, 25 bp, Homo sapien
tctggtgaccatgactcaacacccc

SEQ ID NO: 4702166 - DNA, 25 bp, Homo sapien
agcactctggtgaccatgactcaac

SEQ ID NO: 4702167 - DNA, 25 bp, Homo sapien
actctggtgaccatgactcaacacc

SEQ ID NO: 4702168 - DNA, 25 bp, Homo sapien
gcactctggtgaccatgactcaaca

SEQ ID NO: 4702169 - DNA, 25 bp, Homo sapien
atctgctctccctccggacggctgg

SEQ ID NO: 4702170 - DNA, 25 bp, Homo sapien
tatcgggagcggaggtgcactgggc

SEQ ID NO: 4702171 - DNA, 25 bp, Homo sapien
ggaaacacaggttatcgggagcgga

SEQ ID NO: 4702172 - DNA, 25 bp, Homo sapien
gctctccctccggacggctggaagg

SEQ ID NO: 4702173 - DNA, 25 bp, Homo sapien
gccattgtgtagtccggtggggagc

SEQ ID NO: 4702174 - DNA, 25 bp, Homo sapien
ctgcccaggccattgtgtagtccgg

SEQ ID NO: 4702175 - DNA, 25 bp, Homo sapien
ccattgtgtagtccggtggggagct

SEQ ID NO: 4702176 - DNA, 25 bp, Homo sapien
cccaggccattgtgtagtccggtgg

SEQ ID NO: 4702177 - DNA, 25 bp, Homo sapien
tgccctaacgtctgtccgtagaaag

SEQ ID NO: 4702178 - DNA, 25 bp, Homo sapien
gcctgccctaacgtctgtccgtaga

SEQ ID NO: 4702179 - DNA, 25 bp, Homo sapien
taacgtctgtccgtagaaagcgacc

SEQ ID NO: 4702180 - DNA, 25 bp, Homo sapien
cgtctgtccgtagaaagcgacctgc

SEQ ID NO: 4702181 - DNA, 25 bp, Homo sapien
gcctgactttgtaggtattgctcca

SEQ ID NO: 4702182 - DNA, 25 bp, Homo sapien
tccaagccactttctgttgcaacag

SEQ ID NO: 4702183 - DNA, 25 bp, Homo sapien
acagctctgaggcacattctggtgc

SEQ ID NO: 4702184 - DNA, 25 bp, Homo sapien
cgtaggctaaacacacgagcacatt

SEQ ID NO: 4702185 - DNA, 25 bp, Homo sapien
gttatctgtacaagatacactacag

SEQ ID NO: 4702186 - DNA, 25 bp, Homo sapien
gtaacttcagtacatttcaaacgga

SEQ ID NO: 4702187 - DNA, 25 bp, Homo sapien
tacactacagtaaacactggaaatc

SEQ ID NO: 4702188 - DNA, 25 bp, Homo sapien
ggaatgtccctcaggtcaattagaa

SEQ ID NO: 4702189 - DNA, 25 bp, Homo sapien
ggccaggacccccttggtagatgct

SEQ ID NO: 4702190 - DNA, 25 bp, Homo sapien
caggacccccttggtagatgctaca

SEQ ID NO: 4702191 - DNA, 25 bp, Homo sapien
gacccccttggtagatgctacagaa

SEQ ID NO: 4702192 - DNA, 25 bp, Homo sapien
cccttggtagatgctacagaaacac

SEQ ID NO: 4702193 - DNA, 25 bp, Homo sapien
gagaaatgaacttttgggcacaaga

SEQ ID NO: 4702194 - DNA, 25 bp, Homo sapien
acttttgggcacaagagccgatgcc

SEQ ID NO: 4702195 - DNA, 25 bp, Homo sapien
catggaattccgtaatgaactgaga

SEQ ID NO: 4702196 - DNA, 25 bp, Homo sapien
tctgagcatggaattccgtaatgaa

SEQ ID NO: 4702197 - DNA, 25 bp, Homo sapien
ttgcggtgacgcaagatcagcccat

SEQ ID NO: 4702198 - DNA, 25 bp, Homo sapien
ggtgacgcaagatcagcccatcttt

SEQ ID NO: 4702199 - DNA, 25 bp, Homo sapien
gtcacaggcttgcggtgacgcaaga

SEQ ID NO: 4702200 - DNA, 25 bp, Homo sapien
ggcttgcggtgacgcaagatcagcc

SEQ ID NO: 4702201 - DNA, 25 bp, Homo sapien
tgtggctgtgttccgtgagaatccg

SEQ ID NO: 4702202 - DNA, 25 bp, Homo sapien
gtgttccgtgagaatccgcttgtgt

SEQ ID NO: 4702203 - DNA, 25 bp, Homo sapien
gctgtgttccgtgagaatccgcttg

SEQ ID NO: 4702204 - DNA, 25 bp, Homo sapien
ccaggggcttcttgcgggctttgtc

SEQ ID NO: 4702205 - DNA, 25 bp, Homo sapien
tggaggtgctcttcacggagcttgc

SEQ ID NO: 4702206 - DNA, 25 bp, Homo sapien
gtgctcttcacggagcttgcgtgct

SEQ ID NO: 4702207 - DNA, 25 bp, Homo sapien
ctcttcacggagcttgcgtgcttcc

SEQ ID NO: 4702208 - DNA, 25 bp, Homo sapien
ttccttcttggtctggaggtgctct

SEQ ID NO: 4702209 - DNA, 25 bp, Homo sapien
ccatgaggtgttgtttcctgtggac

SEQ ID NO: 4702210 - DNA, 25 bp, Homo sapien
ggttctggccatgaggtgttgtttc

SEQ ID NO: 4702211 - DNA, 25 bp, Homo sapien
ctgggttctggccatgaggtgttgt

SEQ ID NO: 4702212 - DNA, 25 bp, Homo sapien
gttctggccatgaggtgttgtttcc

SEQ ID NO: 4702213 - DNA, 25 bp, Homo sapien
tagagaggccctcagtatatcggtc

SEQ ID NO: 4702214 - DNA, 25 bp, Homo sapien
tattcatgggcgttaatagagaggc

SEQ ID NO: 4702215 - DNA, 25 bp, Homo sapien
tatatcggtccattgtgggcggctc

SEQ ID NO: 4702216 - DNA, 25 bp, Homo sapien
gtaggacttgaataggcctcggccc

SEQ ID NO: 4702217 - DNA, 25 bp, Homo sapien
cctgaaccccggcttagagttagag

SEQ ID NO: 4702218 - DNA, 25 bp, Homo sapien
ggacccgcaagcccggagagcagta

SEQ ID NO: 4702219 - DNA, 25 bp, Homo sapien
gtgaccacgggctcggactgcggcc

SEQ ID NO: 4702220 - DNA, 25 bp, Homo sapien
gcttggattccgctggcgcagtgac

SEQ ID NO: 4702221 - DNA, 25 bp, Homo sapien
gtcccactgcgggaagccctcaggt

SEQ ID NO: 4702222 - DNA, 25 bp, Homo sapien
acgtcccactgcgggaagccctcag

SEQ ID NO: 4702223 - DNA, 25 bp, Homo sapien
gccacgtcccactgcgggaagccct

SEQ ID NO: 4702224 - DNA, 25 bp, Homo sapien
ccacgtcccactgcgggaagccctc

SEQ ID NO: 4702225 - DNA, 25 bp, Homo sapien
cctacttcttggcttctgggaagac

SEQ ID NO: 4702226 - DNA, 25 bp, Homo sapien
gggcctacttcttggcttctgggaa

SEQ ID NO: 4702227 - DNA, 25 bp, Homo sapien
ggcctacttcttggcttctgggaag

SEQ ID NO: 4702228 - DNA, 25 bp, Homo sapien
cggggcctacttcttggcttctggg

SEQ ID NO: 4702229 - DNA, 25 bp, Homo sapien
ggcagaaggcaggaccgttgggcag

SEQ ID NO: 4702230 - DNA, 25 bp, Homo sapien
tccactcatttttcgacgcagcttg

SEQ ID NO: 4702231 - DNA, 25 bp, Homo sapien
ggtcgcatcggctccctggccagag

SEQ ID NO: 4702232 - DNA, 25 bp, Homo sapien
tagggtcgccgaaccctccactcat

SEQ ID NO: 4702233 - DNA, 25 bp, Homo sapien
tgggacgcaaagggaggaaggcggc

SEQ ID NO: 4702234 - DNA, 25 bp, Homo sapien
ttcagaccctgcgtccgggtccgcc

SEQ ID NO: 4702235 - DNA, 25 bp, Homo sapien
ggccttcagaccctgcgtccgggtc

SEQ ID NO: 4702236 - DNA, 25 bp, Homo sapien
gttcctgccagtagtctccggcatc

SEQ ID NO: 4702237 - DNA, 25 bp, Homo sapien
aggaatcgccctggcagcctgtctc

SEQ ID NO: 4702238 - DNA, 25 bp, Homo sapien
gccaggtcgggggtcgagatgggcg

SEQ ID NO: 4702239 - DNA, 25 bp, Homo sapien
ggctggtcccggcctgagacagctt

SEQ ID NO: 4702240 - DNA, 25 bp, Homo sapien
tcgagatgggcggacaggaatcgcc

SEQ ID NO: 4702241 - DNA, 25 bp, Homo sapien
tcgggtgcgaaactcctccgcgggc

SEQ ID NO: 4702242 - DNA, 25 bp, Homo sapien
gtgcacggtcgggtgcgaaactcct

SEQ ID NO: 4702243 - DNA, 25 bp, Homo sapien
caactcggtcgctgtgcacggtcgg

SEQ ID NO: 4702244 - DNA, 25 bp, Homo sapien
gggccgcgccaactcggtcgctgtg

SEQ ID NO: 4702245 - DNA, 25 bp, Homo sapien
cgccagcggccgtacaggaagctgt

SEQ ID NO: 4702246 - DNA, 25 bp, Homo sapien
cacctcggcggtgaaggctgtcttg

SEQ ID NO: 4702247 - DNA, 25 bp, Homo sapien
ggaggtgataacctcggccagcgcc

SEQ ID NO: 4702248 - DNA, 25 bp, Homo sapien
tgcaggatgtcggaggtgataacct

SEQ ID NO: 4702249 - DNA, 25 bp, Homo sapien
taaagtgatcgcattcattcggctc

SEQ ID NO: 4702250 - DNA, 25 bp, Homo sapien
ttaaacggtgtccattgcggcgcgg

SEQ ID NO: 4702251 - DNA, 25 bp, Homo sapien
tcggctccattcgaaagaaattgct

SEQ ID NO: 4702252 - DNA, 25 bp, Homo sapien
gtaaattgtagctcaatgcggaggg

SEQ ID NO: 4702253 - DNA, 25 bp, Homo sapien
agaagatgccgaggccctcgccagg

SEQ ID NO: 4702254 - DNA, 25 bp, Homo sapien
gttcccgccttgatccacgtcttgg

SEQ ID NO: 4702255 - DNA, 25 bp, Homo sapien
cccacatgaggttgttgttcttgca

SEQ ID NO: 4702256 - DNA, 25 bp, Homo sapien
agctctgagcgatgatcacctccgc

SEQ ID NO: 4702257 - DNA, 25 bp, Homo sapien
tacgtgcacacttgatgtaggtcat

SEQ ID NO: 4702258 - DNA, 25 bp, Homo sapien
tctgctcctgttcgttacgtgcaca

SEQ ID NO: 4702259 - DNA, 25 bp, Homo sapien
ggcatcgatgaagtagcgcaccgtg

SEQ ID NO: 4702260 - DNA, 25 bp, Homo sapien
gatgctggtgccgatctggaccacc

SEQ ID NO: 4702261 - DNA, 25 bp, Homo sapien
gcagcagaaagcttcccatggaggt

SEQ ID NO: 4702262 - DNA, 25 bp, Homo sapien
atggagatgctcgtgacattcccaa

SEQ ID NO: 4702263 - DNA, 25 bp, Homo sapien
caatgccgtcaagttgagagctcca

SEQ ID NO: 4702264 - DNA, 25 bp, Homo sapien
tccatcatttctgatctgcagcaga

SEQ ID NO: 4702265 - DNA, 25 bp, Homo sapien
atccgagaagctactaggccctggc

SEQ ID NO: 4702266 - DNA, 25 bp, Homo sapien
tcagggacaaccaaaggaacccatc

SEQ ID NO: 4702267 - DNA, 25 bp, Homo sapien
cccaggggtcttagaaagagcttca

SEQ ID NO: 4702268 - DNA, 25 bp, Homo sapien
gggtgttgttattcagggacaacca

SEQ ID NO: 4702269 - DNA, 25 bp, Homo sapien
ggaactgagtcctgtaccacaaaat

SEQ ID NO: 4702270 - DNA, 25 bp, Homo sapien
tgtcccgacacaccaattaatagag

SEQ ID NO: 4702271 - DNA, 25 bp, Homo sapien
cagcgcccgagtctcttttgacaaa

SEQ ID NO: 4702272 - DNA, 25 bp, Homo sapien
tcagggctcagatgggcctaggttc

SEQ ID NO: 4702273 - DNA, 25 bp, Homo sapien
gccactatccgatgtgcccagagaa

SEQ ID NO: 4702274 - DNA, 25 bp, Homo sapien
ggaagaccctcagaccattgcagca

SEQ ID NO: 4702275 - DNA, 25 bp, Homo sapien
tctagaggtgtctgaaaccaggcca

SEQ ID NO: 4702276 - DNA, 25 bp, Homo sapien
cacaaaagatcgcatgggattccat

SEQ ID NO: 4702277 - DNA, 25 bp, Homo sapien
tcaccgcgtcctaggtcaatgacag

SEQ ID NO: 4702278 - DNA, 25 bp, Homo sapien
ttacacagagtccagttcaccgcgt

SEQ ID NO: 4702279 - DNA, 25 bp, Homo sapien
gaagcattcggatggatgaacacct

SEQ ID NO: 4702280 - DNA, 25 bp, Homo sapien
cagagaaccccgcaaatgatgttgg

SEQ ID NO: 4702281 - DNA, 25 bp, Homo sapien
tgttgtgtgagtttccgtaccacac

SEQ ID NO: 4702282 - DNA, 25 bp, Homo sapien
gcagttcctggtcaggtgggatcat

SEQ ID NO: 4702283 - DNA, 25 bp, Homo sapien
ctggtcctcctctagcccgggcaca

SEQ ID NO: 4702284 - DNA, 25 bp, Homo sapien
agtttccgtaccacaccagcagttc

SEQ ID NO: 4702285 - DNA, 25 bp, Homo sapien
caacaggcttatacggagcatctac

SEQ ID NO: 4702286 - DNA, 25 bp, Homo sapien
gaactagaactcaatccaggctcct

SEQ ID NO: 4702287 - DNA, 25 bp, Homo sapien
tagttgtcgagcaaatggtctctgc

SEQ ID NO: 4702288 - DNA, 25 bp, Homo sapien
cagacatcatcgacagggcaaggaa

SEQ ID NO: 4702289 - DNA, 25 bp, Homo sapien
gcttgtccagcgtgtggatgcgcat

SEQ ID NO: 4702290 - DNA, 25 bp, Homo sapien
cacgtggttgcgcagcgtggacgac

SEQ ID NO: 4702291 - DNA, 25 bp, Homo sapien
tggcagatgacgcatcgcatgcggc

SEQ ID NO: 4702292 - DNA, 25 bp, Homo sapien
aggttgctgcgcgagttgaagccgc

SEQ ID NO: 4702293 - DNA, 25 bp, Homo sapien
cggtgccgcgcgctcttctggtggg

SEQ ID NO: 4702294 - DNA, 25 bp, Homo sapien
caccatggccggcaggtggtgcgcg

SEQ ID NO: 4702295 - DNA, 25 bp, Homo sapien
cgagtgtgcctgcagcgcggtgctg

SEQ ID NO: 4702296 - DNA, 25 bp, Homo sapien
agctgcgagtaggcgctctggcaca

SEQ ID NO: 4702297 - DNA, 25 bp, Homo sapien
gggcgcaaccccagcgcgcggggct

SEQ ID NO: 4702298 - DNA, 25 bp, Homo sapien
tgcgacacgggccaaggcgggggtg

SEQ ID NO: 4702299 - DNA, 25 bp, Homo sapien
ctgagatccgcctccggggcgcaac

SEQ ID NO: 4702300 - DNA, 25 bp, Homo sapien
tggagggcgagtcgcgctgcggggc

SEQ ID NO: 4702301 - DNA, 25 bp, Homo sapien
gggtgagggacgccgccctcagtgt

SEQ ID NO: 4702302 - DNA, 25 bp, Homo sapien
ctgggtgagggacgccgccctcagt

SEQ ID NO: 4702303 - DNA, 25 bp, Homo sapien
tgggtgagggacgccgccctcagtg

SEQ ID NO: 4702304 - DNA, 25 bp, Homo sapien
gtgagggacgccgccctcagtgtcc

SEQ ID NO: 4702305 - DNA, 25 bp, Homo sapien
tcccagaggaggcggccgaacagcc

SEQ ID NO: 4702306 - DNA, 25 bp, Homo sapien
ccctcccagaggaggcggccgaaca

SEQ ID NO: 4702307 - DNA, 25 bp, Homo sapien
agaggaggcggccgaacagccgcac

SEQ ID NO: 4702308 - DNA, 25 bp, Homo sapien
ccagaggaggcggccgaacagccgc

SEQ ID NO: 4702309 - DNA, 25 bp, Homo sapien
gcgcacggcccgaatttgaggaaac

SEQ ID NO: 4702310 - DNA, 25 bp, Homo sapien
tgtcaaggttgcgtaaggactcccg

SEQ ID NO: 4702311 - DNA, 25 bp, Homo sapien
tacgggaatcctggtaaatgactgc

SEQ ID NO: 4702312 - DNA, 25 bp, Homo sapien
gaagccaccttaacctctcgggcag

SEQ ID NO: 4702313 - DNA, 25 bp, Homo sapien
gctcatccacagacatacatcccag

SEQ ID NO: 4702314 - DNA, 25 bp, Homo sapien
ctgctcatccacagacatacatccc

SEQ ID NO: 4702315 - DNA, 25 bp, Homo sapien
tcatccacagacatacatcccagca

SEQ ID NO: 4702316 - DNA, 25 bp, Homo sapien
atccacagacatacatcccagcagg

SEQ ID NO: 4702317 - DNA, 25 bp, Homo sapien
cctgccgcggccataagagggcgat

SEQ ID NO: 4702318 - DNA, 25 bp, Homo sapien
cctgccaggcagtcgatgacatgaa

SEQ ID NO: 4702319 - DNA, 25 bp, Homo sapien
tgacatgaatgctagtgccccgagg

SEQ ID NO: 4702320 - DNA, 25 bp, Homo sapien
gtgtcctctgagctcgcgtagcccg

SEQ ID NO: 4702321 - DNA, 25 bp, Homo sapien
cagtctctcgctaagaggcttgcga

SEQ ID NO: 4702322 - DNA, 25 bp, Homo sapien
gatgtttcttagtgtcgcggcccag

SEQ ID NO: 4702323 - DNA, 25 bp, Homo sapien
gcttgcgagccactggaagcctcat

SEQ ID NO: 4702324 - DNA, 25 bp, Homo sapien
cgcatgaatcctgtgtccgtagtga

SEQ ID NO: 4702325 - DNA, 25 bp, Homo sapien
gagagccctgaagccgctctctgaa

SEQ ID NO: 4702326 - DNA, 25 bp, Homo sapien
gccctgaagccgctctctgaagcct

SEQ ID NO: 4702327 - DNA, 25 bp, Homo sapien
gagccctgaagccgctctctgaagc

SEQ ID NO: 4702328 - DNA, 25 bp, Homo sapien
gctctctgaagcctcgactccccca

SEQ ID NO: 4702329 - DNA, 25 bp, Homo sapien
gatacaaagaaaggatacgagggta

SEQ ID NO: 4702330 - DNA, 25 bp, Homo sapien
ggatacgagggtaactcgaaatgac

SEQ ID NO: 4702331 - DNA, 25 bp, Homo sapien
gggtaactcgaaatgacttctctcc

SEQ ID NO: 4702332 - DNA, 25 bp, Homo sapien
ctgatgcaaggcgaagatacaaaga

SEQ ID NO: 4702333 - DNA, 25 bp, Homo sapien
tcttctcccatatacgttccatggc

SEQ ID NO: 4702334 - DNA, 25 bp, Homo sapien
ttcaaagctttcacacagatcaact

SEQ ID NO: 4702335 - DNA, 25 bp, Homo sapien
tcaacttgtttactctctccacaga

SEQ ID NO: 4702336 - DNA, 25 bp, Homo sapien
cagagccagcaacagatgcaatgag

SEQ ID NO: 4702337 - DNA, 25 bp, Homo sapien
ctctgtgattcgtcccactacgatg

SEQ ID NO: 4702338 - DNA, 25 bp, Homo sapien
actacgatgtctcctacttcaccaa

SEQ ID NO: 4702339 - DNA, 25 bp, Homo sapien
gattcgtcccactacgatgtctcct

SEQ ID NO: 4702340 - DNA, 25 bp, Homo sapien
gatgtctcctacttcaccaatgtat

SEQ ID NO: 4702341 - DNA, 25 bp, Homo sapien
tcccatgaatgaaatcgccagcctg

SEQ ID NO: 4702342 - DNA, 25 bp, Homo sapien
taaataaccagtaaggccagatgtg

SEQ ID NO: 4702343 - DNA, 25 bp, Homo sapien
taactacaagtggaatgactgtccc

SEQ ID NO: 4702344 - DNA, 25 bp, Homo sapien
cagcctgcctcgactttgtaaacac

SEQ ID NO: 4702345 - DNA, 25 bp, Homo sapien
ctcctccaggaaggttcatggacga

SEQ ID NO: 4702346 - DNA, 25 bp, Homo sapien
gcaagaccgaatccagcctggagtt

SEQ ID NO: 4702347 - DNA, 25 bp, Homo sapien
acgagagcagcaagaccgaatccag

SEQ ID NO: 4702348 - DNA, 25 bp, Homo sapien
gaaggttcatggacgagagcagcaa

SEQ ID NO: 4702349 - DNA, 25 bp, Homo sapien
tatgccaactgctccctctttcggg

SEQ ID NO: 4702350 - DNA, 25 bp, Homo sapien
catatgccaactgctccctctttcg

SEQ ID NO: 4702351 - DNA, 25 bp, Homo sapien
atgccaactgctccctctttcggga

SEQ ID NO: 4702352 - DNA, 25 bp, Homo sapien
gccaactgctccctctttcgggaga

SEQ ID NO: 4702353 - DNA, 25 bp, Homo sapien
tcattgcaagctcatcttctgcaga

SEQ ID NO: 4702354 - DNA, 25 bp, Homo sapien
cctctcattgcaagctcatcttctg

SEQ ID NO: 4702355 - DNA, 25 bp, Homo sapien
gcaagctcatcttctgcagatcttc

SEQ ID NO: 4702356 - DNA, 25 bp, Homo sapien
ttgcaagctcatcttctgcagatct

SEQ ID NO: 4702357 - DNA, 25 bp, Homo sapien
gatgacatggttcttccgtcagaga

SEQ ID NO: 4702358 - DNA, 25 bp, Homo sapien
gactcggatccctgcaaggatgaca

SEQ ID NO: 4702359 - DNA, 25 bp, Homo sapien
gcagagcccgacacttggtctaaga

SEQ ID NO: 4702360 - DNA, 25 bp, Homo sapien
gaaatgacttagcagcaggtcccaa

SEQ ID NO: 4702361 - DNA, 25 bp, Homo sapien
agccaggcatgacgcacgccggtaa

SEQ ID NO: 4702362 - DNA, 25 bp, Homo sapien
gctcctcgtgtgcaaagagacagct

SEQ ID NO: 4702363 - DNA, 25 bp, Homo sapien
caaagagacagctccgtcagagaac

SEQ ID NO: 4702364 - DNA, 25 bp, Homo sapien
tcagagaacactgcctggacctcag

SEQ ID NO: 4702365 - DNA, 25 bp, Homo sapien
ccatatttcaggctcctcgtgtgca

SEQ ID NO: 4702366 - DNA, 25 bp, Homo sapien
cacgatcagtttgtgggatgccagc

SEQ ID NO: 4702367 - DNA, 25 bp, Homo sapien
taagccagaactcatgtgccagaca

SEQ ID NO: 4702368 - DNA, 25 bp, Homo sapien
tatcacgaagctaggtcactgcaag

SEQ ID NO: 4702369 - DNA, 25 bp, Homo sapien
tgtctgcagccactccattaaggga

SEQ ID NO: 4702370 - DNA, 25 bp, Homo sapien
caccacatggcaaatcatgaaagtg

SEQ ID NO: 4702371 - DNA, 25 bp, Homo sapien
gcaccacatggcaaatcatgaaagt

SEQ ID NO: 4702372 - DNA, 25 bp, Homo sapien
ggcaccacatggcaaatcatgaaag

SEQ ID NO: 4702373 - DNA, 25 bp, Homo sapien
ggtttgcaatgaagccccctgcttc

SEQ ID NO: 4702374 - DNA, 25 bp, Homo sapien
atccagatgaagccgttgttaccga

SEQ ID NO: 4702375 - DNA, 25 bp, Homo sapien
cagatgaagccgttgttaccgagaa

SEQ ID NO: 4702376 - DNA, 25 bp, Homo sapien
atgaagccgttgttaccgagaatca

SEQ ID NO: 4702377 - DNA, 25 bp, Homo sapien
gaccaaaatacgtgaccagccacag

SEQ ID NO: 4702378 - DNA, 25 bp, Homo sapien
accaaaatacgtgaccagccacaga

SEQ ID NO: 4702379 - DNA, 25 bp, Homo sapien
aggaccaaaatacgtgaccagccac

SEQ ID NO: 4702380 - DNA, 25 bp, Homo sapien
aatacaaacaggaccaaaatacgtg

SEQ ID NO: 4702381 - DNA, 25 bp, Homo sapien
cagtacaggatgctggtatcataca

SEQ ID NO: 4702382 - DNA, 25 bp, Homo sapien
cgagatgatgcagttccgaagccgg

SEQ ID NO: 4702383 - DNA, 25 bp, Homo sapien
ggatatcacctctcgatcagcaaga

SEQ ID NO: 4702384 - DNA, 25 bp, Homo sapien
cctctgagttaccagcgagatgatg

SEQ ID NO: 4702385 - DNA, 25 bp, Homo sapien
ggaaaaggcatttgttcagaaaaga

SEQ ID NO: 4702386 - DNA, 25 bp, Homo sapien
gaaaaggcatttgttcagaaaagaa

SEQ ID NO: 4702387 - DNA, 25 bp, Homo sapien
atttctggctttaagatgtctttga

SEQ ID NO: 4702388 - DNA, 25 bp, Homo sapien
tctggcgtgtttccatcacaatctc

SEQ ID NO: 4702389 - DNA, 25 bp, Homo sapien
tctcctccattatttctggctttaa

SEQ ID NO: 4702390 - DNA, 25 bp, Homo sapien
ccaaaagcctctggcgtgtttccat

SEQ ID NO: 4702391 - DNA, 25 bp, Homo sapien
gatctctcgagtctttgctgagcca

SEQ ID NO: 4702392 - DNA, 25 bp, Homo sapien
gatgggagcccattcgactgtaaca

SEQ ID NO: 4702393 - DNA, 25 bp, Homo sapien
acccaggcttggtgttaggacagga

SEQ ID NO: 4702394 - DNA, 25 bp, Homo sapien
aaggtccacagtcccgtgcttctgg

SEQ ID NO: 4702395 - DNA, 25 bp, Homo sapien
caagcaggacagattaaggcagccc

SEQ ID NO: 4702396 - DNA, 25 bp, Homo sapien
cattcttcagcgagaactctggcgt

SEQ ID NO: 4702397 - DNA, 25 bp, Homo sapien
tggagtgtggtacgcgatttcagct

SEQ ID NO: 4702398 - DNA, 25 bp, Homo sapien
catctatggctacaaggaacacgca

SEQ ID NO: 4702399 - DNA, 25 bp, Homo sapien
agcctcctgagtagctgactacata

SEQ ID NO: 4702400 - DNA, 25 bp, Homo sapien
ctcctgagtagctgactacatacag

SEQ ID NO: 4702401 - DNA, 25 bp, Homo sapien
ctgcaactccgcctcccgaattcaa

SEQ ID NO: 4702402 - DNA, 25 bp, Homo sapien
gaattcaagcgattctcatgcctca

SEQ ID NO: 4702403 - DNA, 25 bp, Homo sapien
gctcaacatggtgaaacgatctcca

SEQ ID NO: 4702404 - DNA, 25 bp, Homo sapien
aagacgtctataaatatcaaaaaat

SEQ ID NO: 4702405 - DNA, 25 bp, Homo sapien
tgctcaacatggtgaaacgatctcc

SEQ ID NO: 4702406 - DNA, 25 bp, Homo sapien
gcctgctcaacatggtgaaacgatc

SEQ ID NO: 4702407 - DNA, 25 bp, Homo sapien
gacttcatctctgccgaaaaacaaa

SEQ ID NO: 4702408 - DNA, 25 bp, Homo sapien
gttactaccattgagactgtcctag

SEQ ID NO: 4702409 - DNA, 25 bp, Homo sapien
tagttagggctctgtcggaaggcat

SEQ ID NO: 4702410 - DNA, 25 bp, Homo sapien
ttaagacatctatagctgggctcag

SEQ ID NO: 4702411 - DNA, 25 bp, Homo sapien
tggctgagcccaagtctatagtgag

SEQ ID NO: 4702412 - DNA, 25 bp, Homo sapien
ggtcgatccatctaaagctgcaaca

SEQ ID NO: 4702413 - DNA, 25 bp, Homo sapien
ctagtaatacaacttgggataggaa

SEQ ID NO: 4702414 - DNA, 25 bp, Homo sapien
gcctggataacctcaaaaacatgac

SEQ ID NO: 4702415 - DNA, 25 bp, Homo sapien
gagacaccaagtgaggagggtaaat

SEQ ID NO: 4702416 - DNA, 25 bp, Homo sapien
cagatactggatgaacagcatgggc

SEQ ID NO: 4702417 - DNA, 25 bp, Homo sapien
tacacttaacaatggcgccctctag

SEQ ID NO: 4702418 - DNA, 25 bp, Homo sapien
ggtaatcaccattcagcagatactg

SEQ ID NO: 4702419 - DNA, 25 bp, Homo sapien
gaacctacatggaaggatgggcaat

SEQ ID NO: 4702420 - DNA, 25 bp, Homo sapien
tcttcacccgtaaatggaggtcata

SEQ ID NO: 4702421 - DNA, 25 bp, Homo sapien
gactgcattatgacacctccctaga

SEQ ID NO: 4702422 - DNA, 25 bp, Homo sapien
cactgctttaggtgctgagacacag

SEQ ID NO: 4702423 - DNA, 25 bp, Homo sapien
cacgggtcacccagatttcagcgag

SEQ ID NO: 4702424 - DNA, 25 bp, Homo sapien
gatcttccagaacggtcagcgagcg

SEQ ID NO: 4702425 - DNA, 25 bp, Homo sapien
gctctccggaaaaggacacgggtca

SEQ ID NO: 4702426 - DNA, 25 bp, Homo sapien
gatggtctttggctactcctccaga

SEQ ID NO: 4702427 - DNA, 25 bp, Homo sapien
catgcctcgatgattccttcttccc

SEQ ID NO: 4702428 - DNA, 25 bp, Homo sapien
aacattgcagtgtggacccccatgc

SEQ ID NO: 4702429 - DNA, 25 bp, Homo sapien
ctttgataaaatgcagggcaggcaa

SEQ ID NO: 4702430 - DNA, 25 bp, Homo sapien
ggcaggcaagcttggccttctttgg

SEQ ID NO: 4702431 - DNA, 25 bp, Homo sapien
gaactgtcgcaagtactgttgttca

SEQ ID NO: 4702432 - DNA, 25 bp, Homo sapien
aattggaaggaactgtcgcaagtac

SEQ ID NO: 4702433 - DNA, 25 bp, Homo sapien
ctgttgttcaaagttccttgaaggc

SEQ ID NO: 4702434 - DNA, 25 bp, Homo sapien
ggcctaagatgaatgcatgaggaaa

SEQ ID NO: 4702435 - DNA, 25 bp, Homo sapien
cgtattataagataacccaagtttg

SEQ ID NO: 4702436 - DNA, 25 bp, Homo sapien
aaaagacacttggaacatcacacaa

SEQ ID NO: 4702437 - DNA, 25 bp, Homo sapien
cttcagcaacaaacatccctatgtg

SEQ ID NO: 4702438 - DNA, 25 bp, Homo sapien
cattcagtgttagtacttcagcaac

SEQ ID NO: 4702439 - DNA, 25 bp, Homo sapien
ttacctggctctgtgcaatcaatgc

SEQ ID NO: 4702440 - DNA, 25 bp, Homo sapien
tctaatccgagagcaaatcttgtcg

SEQ ID NO: 4702441 - DNA, 25 bp, Homo sapien
ttcagttcgaaaacctgagagtcac

SEQ ID NO: 4702442 - DNA, 25 bp, Homo sapien
catcagatagtatagtcccctcgga

SEQ ID NO: 4702443 - DNA, 25 bp, Homo sapien
ggcagttccttgtgacatgcttggg

SEQ ID NO: 4702444 - DNA, 25 bp, Homo sapien
ggcatagacagggtactggattcta

SEQ ID NO: 4702445 - DNA, 25 bp, Homo sapien
aaactgatacttaggcctctcccca

SEQ ID NO: 4702446 - DNA, 25 bp, Homo sapien
ggcaatcaactaggccctacatagt

SEQ ID NO: 4702447 - DNA, 25 bp, Homo sapien
tccagcaactacctgtaatgagctt

SEQ ID NO: 4702448 - DNA, 25 bp, Homo sapien
taaactccggattgctagtaagttc

SEQ ID NO: 4702449 - DNA, 25 bp, Homo sapien
gaacttagtaagcatgcaacccaag

SEQ ID NO: 4702450 - DNA, 25 bp, Homo sapien
taaaagttattcgactactgcctgg

SEQ ID NO: 4702451 - DNA, 25 bp, Homo sapien
gacttccaacccacttgagggtcca

SEQ ID NO: 4702452 - DNA, 25 bp, Homo sapien
acccacttgagggtccatcagtgct

SEQ ID NO: 4702453 - DNA, 25 bp, Homo sapien
ttccaacccacttgagggtccatca

SEQ ID NO: 4702454 - DNA, 25 bp, Homo sapien
caacccacttgagggtccatcagtg

SEQ ID NO: 4702455 - DNA, 25 bp, Homo sapien
ttttcagtacgttgttcttatcttg

SEQ ID NO: 4702456 - DNA, 25 bp, Homo sapien
ccttttcagtacgttgttcttatct

SEQ ID NO: 4702457 - DNA, 25 bp, Homo sapien
tccttttcagtacgttgttcttatc

SEQ ID NO: 4702458 - DNA, 25 bp, Homo sapien
ttcagtacgttgttcttatcttgct

SEQ ID NO: 4702459 - DNA, 25 bp, Homo sapien
agcagtaaggctttgattgtggcag

SEQ ID NO: 4702460 - DNA, 25 bp, Homo sapien
tggagccaggagcagtaaggctttg

SEQ ID NO: 4702461 - DNA, 25 bp, Homo sapien
cagtaaggctttgattgtggcagat

SEQ ID NO: 4702462 - DNA, 25 bp, Homo sapien
ccaggagcagtaaggctttgattgt

SEQ ID NO: 4702463 - DNA, 25 bp, Homo sapien
catgtttgggctacttcagagaaga

SEQ ID NO: 4702464 - DNA, 25 bp, Homo sapien
tatagatatttggtaggcagcagga

SEQ ID NO: 4702465 - DNA, 25 bp, Homo sapien
gaagaccttgagtgccaagccaaag

SEQ ID NO: 4702466 - DNA, 25 bp, Homo sapien
ttttctgaggcaggacgagcagtcc

SEQ ID NO: 4702467 - DNA, 25 bp, Homo sapien
tcaaaggaaatacgtcctaccaggc

SEQ ID NO: 4702468 - DNA, 25 bp, Homo sapien
ggcacgtcttgctgaactcaaagga

SEQ ID NO: 4702469 - DNA, 25 bp, Homo sapien
tttccagagaccacgaacatgcaga

SEQ ID NO: 4702470 - DNA, 25 bp, Homo sapien
aatgctactactgaagcaggtcgac

SEQ ID NO: 4702471 - DNA, 25 bp, Homo sapien
gagcggcagactgccaggattccac

SEQ ID NO: 4702472 - DNA, 25 bp, Homo sapien
aagagcggcagactgccaggattcc

SEQ ID NO: 4702473 - DNA, 25 bp, Homo sapien
gcggcagactgccaggattccacca

SEQ ID NO: 4702474 - DNA, 25 bp, Homo sapien
ggaagagcggcagactgccaggatt

SEQ ID NO: 4702475 - DNA, 25 bp, Homo sapien
gcagatggaaagtcacagccctgat

SEQ ID NO: 4702476 - DNA, 25 bp, Homo sapien
tatgatattacagagtgctgctgct

SEQ ID NO: 4702477 - DNA, 25 bp, Homo sapien
cacacggaagcccttgaaggacagg

SEQ ID NO: 4702478 - DNA, 25 bp, Homo sapien
acctcgcagctagaactgccatctg

SEQ ID NO: 4702479 - DNA, 25 bp, Homo sapien
cttttctctgtgttttgacaaaaat

SEQ ID NO: 4702480 - DNA, 25 bp, Homo sapien
ttctctgtgttttgacaaaaattca

SEQ ID NO: 4702481 - DNA, 25 bp, Homo sapien
tctctgtgttttgacaaaaattcat

SEQ ID NO: 4702482 - DNA, 25 bp, Homo sapien
tttctctgtgttttgacaaaaattc

SEQ ID NO: 4702483 - DNA, 25 bp, Homo sapien
cataggcccaagattatgtctccag

SEQ ID NO: 4702484 - DNA, 25 bp, Homo sapien
aagtccctgtctactcataggccca

SEQ ID NO: 4702485 - DNA, 25 bp, Homo sapien
tcgacagctaccatatgaccagcga

SEQ ID NO: 4702486 - DNA, 25 bp, Homo sapien
ttaagactcaagtgtcatcgacagc

SEQ ID NO: 4702487 - DNA, 25 bp, Homo sapien
tggagaattactgtaccagtgccct

SEQ ID NO: 4702488 - DNA, 25 bp, Homo sapien
catgtgtttaaggtacgccactcaa

SEQ ID NO: 4702489 - DNA, 25 bp, Homo sapien
tattgtgacattgcgggaggagtcc

SEQ ID NO: 4702490 - DNA, 25 bp, Homo sapien
ggaggagtccaaaagcagctaagag

SEQ ID NO: 4702491 - DNA, 25 bp, Homo sapien
ctgctgcagggtgaatgtaccaaaa

SEQ ID NO: 4702492 - DNA, 25 bp, Homo sapien
gatgccactgcaagaggtgccttta

SEQ ID NO: 4702493 - DNA, 25 bp, Homo sapien
gacttatgaggaagacagattggtg

SEQ ID NO: 4702494 - DNA, 25 bp, Homo sapien
accagactagatgagcaaaggcagc

SEQ ID NO: 4702495 - DNA, 25 bp, Homo sapien
gacccaggggtacagaagtagcaaa

SEQ ID NO: 4702496 - DNA, 25 bp, Homo sapien
agtagcaaatgaacaaagtgtctac

SEQ ID NO: 4702497 - DNA, 25 bp, Homo sapien
gtgtctactacttagagcccactat

SEQ ID NO: 4702498 - DNA, 25 bp, Homo sapien
ttaaaaagggcaggtagagtgaaga

SEQ ID NO: 4702499 - DNA, 25 bp, Homo sapien
tcttaatctggtcctctgggccaga

SEQ ID NO: 4702500 - DNA, 25 bp, Homo sapien
gaaactgcagttgccacgctgaaaa

SEQ ID NO: 4702501 - DNA, 25 bp, Homo sapien
cactaactattgtaactctcatggg

SEQ ID NO: 4702502 - DNA, 25 bp, Homo sapien
aggtttgcagaagcaccattttcac

SEQ ID NO: 4702503 - DNA, 25 bp, Homo sapien
tggtgtcaccctgatcttaagtata

SEQ ID NO: 4702504 - DNA, 25 bp, Homo sapien
tcctggtggctccagttttctacca

SEQ ID NO: 4702505 - DNA, 25 bp, Homo sapien
cacatttggctacctgatgttgtcc

SEQ ID NO: 4702506 - DNA, 25 bp, Homo sapien
tcagggactccaattccacacacat

SEQ ID NO: 4702507 - DNA, 25 bp, Homo sapien
gggtccagtgtatgtccaactaaag

SEQ ID NO: 4702508 - DNA, 25 bp, Homo sapien
caaagatcttgaggtatgtgcacag

SEQ ID NO: 4702509 - DNA, 25 bp, Homo sapien
gcaaacattgtccagcaagagcctg

SEQ ID NO: 4702510 - DNA, 25 bp, Homo sapien
gacagatgaacctgacaggaggcct

SEQ ID NO: 4702511 - DNA, 25 bp, Homo sapien
caacctgcaccgcttttggcgagtt

SEQ ID NO: 4702512 - DNA, 25 bp, Homo sapien
gcgagtttcccagtacgcggtgcca

SEQ ID NO: 4702513 - DNA, 25 bp, Homo sapien
actccactttagaagccgcgcgcaa

SEQ ID NO: 4702514 - DNA, 25 bp, Homo sapien
ggaggtctttctccgcctggaagcg

SEQ ID NO: 4702515 - DNA, 25 bp, Homo sapien
accagcttcaggcagatctccaaca

SEQ ID NO: 4702516 - DNA, 25 bp, Homo sapien
tggaggacgaggacagccccttctt

SEQ ID NO: 4702517 - DNA, 25 bp, Homo sapien
tcttggatttgcagcccaccagctt

SEQ ID NO: 4702518 - DNA, 25 bp, Homo sapien
cttccagataacagctggaggacga

SEQ ID NO: 4702519 - DNA, 25 bp, Homo sapien
aaggcctggcgagttggctttctca

SEQ ID NO: 4702520 - DNA, 25 bp, Homo sapien
tggaaattccacaacgtgggatccc

SEQ ID NO: 4702521 - DNA, 25 bp, Homo sapien
tcaccatccggcgtggctctaccgg

SEQ ID NO: 4702522 - DNA, 25 bp, Homo sapien
tgggatcccagggatgttaaggcct

SEQ ID NO: 4702523 - DNA, 25 bp, Homo sapien
gacctcttcgtggtctgtagataag

SEQ ID NO: 4702524 - DNA, 25 bp, Homo sapien
tgttttcacaaacacgggtcgatct

SEQ ID NO: 4702525 - DNA, 25 bp, Homo sapien
tacatgatgcttaatggaaatcgca

SEQ ID NO: 4702526 - DNA, 25 bp, Homo sapien
agagtggtgctccttgtgtacatga

SEQ ID NO: 4702527 - DNA, 25 bp, Homo sapien
aaagtccattcatccccgccttagg

SEQ ID NO: 4702528 - DNA, 25 bp, Homo sapien
gacttggcaaagctgtgacctaaac

SEQ ID NO: 4702529 - DNA, 25 bp, Homo sapien
gatgatgatgcctaacactaactcg

SEQ ID NO: 4702530 - DNA, 25 bp, Homo sapien
gccaggtccatactaaatctccggt

SEQ ID NO: 4702531 - DNA, 25 bp, Homo sapien
gagaccctaggaacgctgtgtgagc

SEQ ID NO: 4702532 - DNA, 25 bp, Homo sapien
tctgtcttagaggtaaaaacacgga

SEQ ID NO: 4702533 - DNA, 25 bp, Homo sapien
ttttctagaaacctcagggcactgg

SEQ ID NO: 4702534 - DNA, 25 bp, Homo sapien
tcaaaacaatcctctaaggtggctg

SEQ ID NO: 4702535 - DNA, 25 bp, Homo sapien
ggtaaagccaccattttaggctgct

SEQ ID NO: 4702536 - DNA, 25 bp, Homo sapien
aaaactatgggtgggattggctgaa

SEQ ID NO: 4702537 - DNA, 25 bp, Homo sapien
tcactacgggaataacagagggtgc

SEQ ID NO: 4702538 - DNA, 25 bp, Homo sapien
tatacgcatcaaaacacacttagaa

SEQ ID NO: 4702539 - DNA, 25 bp, Homo sapien
ctttgcagggtagctggcagtttgc

SEQ ID NO: 4702540 - DNA, 25 bp, Homo sapien
gtagctggcagtttgcagctaacat

SEQ ID NO: 4702541 - DNA, 25 bp, Homo sapien
gatgtgctttgcagggtagctggca

SEQ ID NO: 4702542 - DNA, 25 bp, Homo sapien
agggtagctggcagtttgcagctaa

SEQ ID NO: 4702543 - DNA, 25 bp, Homo sapien
gcagtgtcatcgggggcaatgctgg

SEQ ID NO: 4702544 - DNA, 25 bp, Homo sapien
cagtgtcatcgggggcaatgctggg

SEQ ID NO: 4702545 - DNA, 25 bp, Homo sapien
tggcagtgtcatcgggggcaatgct

SEQ ID NO: 4702546 - DNA, 25 bp, Homo sapien
ggcagtgtcatcgggggcaatgctg

SEQ ID NO: 4702547 - DNA, 25 bp, Homo sapien
ttcccactagagtgcaaggcggcca

SEQ ID NO: 4702548 - DNA, 25 bp, Homo sapien
tgcccaacatcatagttcccactag

SEQ ID NO: 4702549 - DNA, 25 bp, Homo sapien
tcatagttcccactagagtgcaagg

SEQ ID NO: 4702550 - DNA, 25 bp, Homo sapien
gcacttgtgcccaacatcatagttc

SEQ ID NO: 4702551 - DNA, 25 bp, Homo sapien
tatcaaacattctgccgcatctgga

SEQ ID NO: 4702552 - DNA, 25 bp, Homo sapien
atacaactttggcagaccaggccca

SEQ ID NO: 4702553 - DNA, 25 bp, Homo sapien
gcctggccctaaacttacataattg

SEQ ID NO: 4702554 - DNA, 25 bp, Homo sapien
tggtgcgtcaacctcgtggccatga

SEQ ID NO: 4702555 - DNA, 25 bp, Homo sapien
tcagatgctactggccgctgaaggg

SEQ ID NO: 4702556 - DNA, 25 bp, Homo sapien
catacagtgcaacgaaaaggttggg

SEQ ID NO: 4702557 - DNA, 25 bp, Homo sapien
cttggagttccaacgagcggcttca

SEQ ID NO: 4702558 - DNA, 25 bp, Homo sapien
ctgggtccagcgagaaggttttcct

SEQ ID NO: 4702559 - DNA, 25 bp, Homo sapien
cagactgttgactggcgtgatgtag

SEQ ID NO: 4702560 - DNA, 25 bp, Homo sapien
caagaagctgccattgatcccgctg

SEQ ID NO: 4702561 - DNA, 25 bp, Homo sapien
agcagatactcagcggcattgcggg

SEQ ID NO: 4702562 - DNA, 25 bp, Homo sapien
tgtgattatagcctaagacccggag

SEQ ID NO: 4702563 - DNA, 25 bp, Homo sapien
cagcgagatggacctctggccagga

SEQ ID NO: 4702564 - DNA, 25 bp, Homo sapien
gatcctgtaatggtacaccctccct

SEQ ID NO: 4702565 - DNA, 25 bp, Homo sapien
cctcccttcgtatctcagcgagatg

SEQ ID NO: 4702566 - DNA, 25 bp, Homo sapien
cttgccatcagaagcagtgttgatc

SEQ ID NO: 4702567 - DNA, 25 bp, Homo sapien
caatccgacagcaggacctctggtt

SEQ ID NO: 4702568 - DNA, 25 bp, Homo sapien
ttatcaatccgacagcaggacctct

SEQ ID NO: 4702569 - DNA, 25 bp, Homo sapien
catcttcttggttgagctttcttgc

SEQ ID NO: 4702570 - DNA, 25 bp, Homo sapien
aacatcttcttggttgagctttctt

SEQ ID NO: 4702571 - DNA, 25 bp, Homo sapien
tgtgttcatccgcaggaagaagccc

SEQ ID NO: 4702572 - DNA, 25 bp, Homo sapien
gaatgtgttcatccgcaggaagaag

SEQ ID NO: 4702573 - DNA, 25 bp, Homo sapien
ccatgaatgtgttcatccgcaggaa

SEQ ID NO: 4702574 - DNA, 25 bp, Homo sapien
catgaatgtgttcatccgcaggaag

SEQ ID NO: 4702575 - DNA, 25 bp, Homo sapien
aactgcatgcgtgtatgcacgtatg

SEQ ID NO: 4702576 - DNA, 25 bp, Homo sapien
gtttggtaagctgtgggtttgatcc

SEQ ID NO: 4702577 - DNA, 25 bp, Homo sapien
cactgaaaactgcatgcgtgtatgc

SEQ ID NO: 4702578 - DNA, 25 bp, Homo sapien
tttggtaagctgtgggtttgatccc

SEQ ID NO: 4702579 - DNA, 25 bp, Homo sapien
ataacccaaaaagcaagctgacagg

SEQ ID NO: 4702580 - DNA, 25 bp, Homo sapien
tcagaatggaagaacgcagctccac

SEQ ID NO: 4702581 - DNA, 25 bp, Homo sapien
tcctgaagtacgtccctcagaatgg

SEQ ID NO: 4702582 - DNA, 25 bp, Homo sapien
catgggcggtgcaccctggtgttct

SEQ ID NO: 4702583 - DNA, 25 bp, Homo sapien
ctgattcactagaaaggtacccttg

SEQ ID NO: 4702584 - DNA, 25 bp, Homo sapien
aggaaggaacctccgcagacggtct

SEQ ID NO: 4702585 - DNA, 25 bp, Homo sapien
cagacggtctgctggatgacgctgt

SEQ ID NO: 4702586 - DNA, 25 bp, Homo sapien
cctcgagtgcggccctcacaggaag

SEQ ID NO: 4702587 - DNA, 25 bp, Homo sapien
tgacgctgtgggctcagaagtcccc

SEQ ID NO: 4702588 - DNA, 25 bp, Homo sapien
catgcatgaacctgaaggatgggac

SEQ ID NO: 4702589 - DNA, 25 bp, Homo sapien
tacgctatgcacctggttccatgaa

SEQ ID NO: 4702590 - DNA, 25 bp, Homo sapien
gaagaaagtagtgtcatgaatggca

SEQ ID NO: 4702591 - DNA, 25 bp, Homo sapien
gattagttccaggttttgagcagca

SEQ ID NO: 4702592 - DNA, 25 bp, Homo sapien
ataaccacacggtgacgtccacgca

SEQ ID NO: 4702593 - DNA, 25 bp, Homo sapien
cgttagcttcataaccacacggtga

SEQ ID NO: 4702594 - DNA, 25 bp, Homo sapien
gggagcggaagtcggcaccgctgag

SEQ ID NO: 4702595 - DNA, 25 bp, Homo sapien
tcggcaccgctgagggctgccgtta

SEQ ID NO: 4702596 - DNA, 25 bp, Homo sapien
gcttgctcagggtagccaaccatca

SEQ ID NO: 4702597 - DNA, 25 bp, Homo sapien
tggcaagggaatacttccttaccaa

SEQ ID NO: 4702598 - DNA, 25 bp, Homo sapien
tttcattggtgtggcaagggaatac

SEQ ID NO: 4702599 - DNA, 25 bp, Homo sapien
cataactgaatctactggcttgctc

SEQ ID NO: 4702600 - DNA, 25 bp, Homo sapien
gcccgtcggccaccgttgaatgatg

SEQ ID NO: 4702601 - DNA, 25 bp, Homo sapien
ttgaatgatgatgaaccaactcggc

SEQ ID NO: 4702602 - DNA, 25 bp, Homo sapien
tcacggccaccgtcaggctgtattt

SEQ ID NO: 4702603 - DNA, 25 bp, Homo sapien
ttcatggtgatgtccgtgcgttcca

SEQ ID NO: 4702604 - DNA, 25 bp, Homo sapien
tccatgcttgtcagctctcaccata

SEQ ID NO: 4702605 - DNA, 25 bp, Homo sapien
gaaacacactcggactatgagaatg

SEQ ID NO: 4702606 - DNA, 25 bp, Homo sapien
tcggactatgagaatgattccactc

SEQ ID NO: 4702607 - DNA, 25 bp, Homo sapien
tcaccatatgtggaaacacactcgg

SEQ ID NO: 4702608 - DNA, 25 bp, Homo sapien
ggcatgtggctgcaccagtctcaat

SEQ ID NO: 4702609 - DNA, 25 bp, Homo sapien
caggcacgtgctgaataagagcatc

SEQ ID NO: 4702610 - DNA, 25 bp, Homo sapien
tcaggtcagtcaaggagtccctaaa

SEQ ID NO: 4702611 - DNA, 25 bp, Homo sapien
gaaataatgtaagtcaacactaggg

SEQ ID NO: 4702612 - DNA, 25 bp, Homo sapien
atgcaaaatggagcttcagcgcata

SEQ ID NO: 4702613 - DNA, 25 bp, Homo sapien
gcaaaatggagcttcagcgcatact

SEQ ID NO: 4702614 - DNA, 25 bp, Homo sapien
gggctgcgttttgtgacagccacat

SEQ ID NO: 4702615 - DNA, 25 bp, Homo sapien
gcgcatactcgtcctgggctgcgtt

SEQ ID NO: 4702616 - DNA, 25 bp, Homo sapien
caaggagctgcaccaggttagggtg

SEQ ID NO: 4702617 - DNA, 25 bp, Homo sapien
caagaactcttccacctccatggtg

SEQ ID NO: 4702618 - DNA, 25 bp, Homo sapien
tgatctctttcatgactgcagcttc

SEQ ID NO: 4702619 - DNA, 25 bp, Homo sapien
aggttagggtgtttgatctctttca

SEQ ID NO: 4702620 - DNA, 25 bp, Homo sapien
tccaggtactccatggctgacgaga

SEQ ID NO: 4702621 - DNA, 25 bp, Homo sapien
tgccggttgcactccctcaggtagt

SEQ ID NO: 4702622 - DNA, 25 bp, Homo sapien
gtggccatgtacagcagcaccacgg

SEQ ID NO: 4702623 - DNA, 25 bp, Homo sapien
ctcaggtagtccaggaggttcccgt

SEQ ID NO: 4702624 - DNA, 25 bp, Homo sapien
ccagcatgggctgtgtaggtgtccc

SEQ ID NO: 4702625 - DNA, 25 bp, Homo sapien
aaaatcagctaccttcaccaagtgg

SEQ ID NO: 4702626 - DNA, 25 bp, Homo sapien
caggcagtttcgggcagcaagatct

SEQ ID NO: 4702627 - DNA, 25 bp, Homo sapien
taggtgtcccctgtcatcaacctgc

SEQ ID NO: 4702628 - DNA, 25 bp, Homo sapien
agacgtcggacttgatggagaactt

SEQ ID NO: 4702629 - DNA, 25 bp, Homo sapien
ggctctcgggtgcagtccatttgat

SEQ ID NO: 4702630 - DNA, 25 bp, Homo sapien
tctcgggtgcagtccatttgatggg

SEQ ID NO: 4702631 - DNA, 25 bp, Homo sapien
caggctctcgggtgcagtccatttg

SEQ ID NO: 4702632 - DNA, 25 bp, Homo sapien
caatagcttgtcatttgagggcgcg

SEQ ID NO: 4702633 - DNA, 25 bp, Homo sapien
gcgcggacgtcatggaaaactacaa

SEQ ID NO: 4702634 - DNA, 25 bp, Homo sapien
taccccacaaacatgctagaggagg

SEQ ID NO: 4702635 - DNA, 25 bp, Homo sapien
tatgtggtagaaggaacctggcgcc

SEQ ID NO: 4702636 - DNA, 25 bp, Homo sapien
ccttctgggcgctccatgcggtagt

SEQ ID NO: 4702637 - DNA, 25 bp, Homo sapien
gtaaggggacatgccataggtagca

SEQ ID NO: 4702638 - DNA, 25 bp, Homo sapien
tctagcagctcatacacctgggaca

SEQ ID NO: 4702639 - DNA, 25 bp, Homo sapien
atgctcgcatgagttcatagacctt

SEQ ID NO: 4702640 - DNA, 25 bp, Homo sapien
ctggaacattgtttcaaaggcttgg

SEQ ID NO: 4702641 - DNA, 25 bp, Homo sapien
ctggattcctggaacattgtttcaa

SEQ ID NO: 4702642 - DNA, 25 bp, Homo sapien
cgtctgagatactggattcctggaa

SEQ ID NO: 4702643 - DNA, 25 bp, Homo sapien
gagatactggattcctggaacattg

SEQ ID NO: 4702644 - DNA, 25 bp, Homo sapien
cactgcaggtaccccgggatgggta

SEQ ID NO: 4702645 - DNA, 25 bp, Homo sapien
ctgcaggtaccccgggatgggtact

SEQ ID NO: 4702646 - DNA, 25 bp, Homo sapien
tccctggcccttggagtgaggcatc

SEQ ID NO: 4702647 - DNA, 25 bp, Homo sapien
gaggtcctcgtcttggtgggcagct

SEQ ID NO: 4702648 - DNA, 25 bp, Homo sapien
gcatctcaggcacgtcagtggtgtc

SEQ ID NO: 4702649 - DNA, 25 bp, Homo sapien
ggcctgcagcaaggtactcacagcc

SEQ ID NO: 4702650 - DNA, 25 bp, Homo sapien
ggctttgtccagtcccttcacatgt

SEQ ID NO: 4702651 - DNA, 25 bp, Homo sapien
tgtacccagtctgcagtccattaga

SEQ ID NO: 4702652 - DNA, 25 bp, Homo sapien
taataagccccacgtgtcaacggtg

SEQ ID NO: 4702653 - DNA, 25 bp, Homo sapien
caggatcctctgtgaacccagatgc

SEQ ID NO: 4702654 - DNA, 25 bp, Homo sapien
gcagggatgaagaggccagggccgt

SEQ ID NO: 4702655 - DNA, 25 bp, Homo sapien
ccttcaagtaaaccagtgcagggat

SEQ ID NO: 4702656 - DNA, 25 bp, Homo sapien
gctgccttcaagtaaaccagtgcag

SEQ ID NO: 4702657 - DNA, 25 bp, Homo sapien
aggccagggccgtccagctttttgt

SEQ ID NO: 4702658 - DNA, 25 bp, Homo sapien
tcaaggcgctgaacaagttggtctt

SEQ ID NO: 4702659 - DNA, 25 bp, Homo sapien
gcgttactgtgcctcgggtcacctg

SEQ ID NO: 4702660 - DNA, 25 bp, Homo sapien
ccaaatgtggacgagtcaaactgtc

SEQ ID NO: 4702661 - DNA, 25 bp, Homo sapien
gggtgaaagccagtgccccgttgct

SEQ ID NO: 4702662 - DNA, 25 bp, Homo sapien
ggcttttgtctttgcgcccaggact

SEQ ID NO: 4702663 - DNA, 25 bp, Homo sapien
ctggcgggttttccgaagagacact

SEQ ID NO: 4702664 - DNA, 25 bp, Homo sapien
gcatcaaccagactcgtggcttttg

SEQ ID NO: 4702665 - DNA, 25 bp, Homo sapien
ggcagcgtcactgttcacagcatca

SEQ ID NO: 4702666 - DNA, 25 bp, Homo sapien
ctgtcgccgggcagatctgaagctc

SEQ ID NO: 4702667 - DNA, 25 bp, Homo sapien
ttcaccgaactgaggagcttgctga

SEQ ID NO: 4702668 - DNA, 25 bp, Homo sapien
gatggaatccacatagctcacgcag

SEQ ID NO: 4702669 - DNA, 25 bp, Homo sapien
gagttcctagagatggcgaggcaca

SEQ ID NO: 4702670 - DNA, 25 bp, Homo sapien
tatgcacacgccacttagaaaagag

SEQ ID NO: 4702671 - DNA, 25 bp, Homo sapien
ggattcacagtgcacgtcacaagag

SEQ ID NO: 4702672 - DNA, 25 bp, Homo sapien
aaacaaaatgcactggaccccgaga

SEQ ID NO: 4702673 - DNA, 25 bp, Homo sapien
aagacattcgcccagttcaagagtg

SEQ ID NO: 4702674 - DNA, 25 bp, Homo sapien
aggagccgactctggacacgcagtc

SEQ ID NO: 4702675 - DNA, 25 bp, Homo sapien
gagttgtcctatgtcttcgttcaga

SEQ ID NO: 4702676 - DNA, 25 bp, Homo sapien
ccacatctgacacgaggaagcggcc

SEQ ID NO: 4702677 - DNA, 25 bp, Homo sapien
gacacgcagtctcagcgcttagcgc

SEQ ID NO: 4702678 - DNA, 25 bp, Homo sapien
cctgagatgatctctgcggcccaag

SEQ ID NO: 4702679 - DNA, 25 bp, Homo sapien
tacgaggacgtttagagtttgcttc

SEQ ID NO: 4702680 - DNA, 25 bp, Homo sapien
cagggcactccgtttagaaaggcct

SEQ ID NO: 4702681 - DNA, 25 bp, Homo sapien
gctgggctggctgtaatacttggct

SEQ ID NO: 4702682 - DNA, 25 bp, Homo sapien
tccttgctgtaaggacggccctggc

SEQ ID NO: 4702683 - DNA, 25 bp, Homo sapien
gacaagacaatgattcctgaggctg

SEQ ID NO: 4702684 - DNA, 25 bp, Homo sapien
tggcacagggtgaacggacagattc

SEQ ID NO: 4702685 - DNA, 25 bp, Homo sapien
gagtcagaacatcacccggtatgaa

SEQ ID NO: 4702686 - DNA, 25 bp, Homo sapien
agtgacttatactcctcagtagcag

SEQ ID NO: 4702687 - DNA, 25 bp, Homo sapien
cagtgttttccatgctattagtgac

SEQ ID NO: 4702688 - DNA, 25 bp, Homo sapien
cattaaggggtgacagatctgagcc

SEQ ID NO: 4702689 - DNA, 25 bp, Homo sapien
tcagtagcagctctcaatccttggc

SEQ ID NO: 4702690 - DNA, 25 bp, Homo sapien
tcacaattaattggtggatttttat

SEQ ID NO: 4702691 - DNA, 25 bp, Homo sapien
tgtcacaattaattggtggattttt

SEQ ID NO: 4702692 - DNA, 25 bp, Homo sapien
ttagccttttagaaccacactgggc

SEQ ID NO: 4702693 - DNA, 25 bp, Homo sapien
ttattagccttttagaaccacactg

SEQ ID NO: 4702694 - DNA, 25 bp, Homo sapien
gatttacggtgctaagctgcccagg

SEQ ID NO: 4702695 - DNA, 25 bp, Homo sapien
tgcaggagaagaaccggcctaactg

SEQ ID NO: 4702696 - DNA, 25 bp, Homo sapien
taataaaacagtggcctagtcccag

SEQ ID NO: 4702697 - DNA, 25 bp, Homo sapien
cattttggtgagttgcgcttggcca

SEQ ID NO: 4702698 - DNA, 25 bp, Homo sapien
ttcaacaacagcgtccccaatggaa

SEQ ID NO: 4702699 - DNA, 25 bp, Homo sapien
tcatcagactacatcctgtgtgagg

SEQ ID NO: 4702700 - DNA, 25 bp, Homo sapien
tgtttttatcaacgcggtcagcact

SEQ ID NO: 4702701 - DNA, 25 bp, Homo sapien
agtcccagccacacggtgagcatag

SEQ ID NO: 4702702 - DNA, 25 bp, Homo sapien
ccacgtccgctaagccctgctgcat

SEQ ID NO: 4702703 - DNA, 25 bp, Homo sapien
acattggctattctgcccacgtccg

SEQ ID NO: 4702704 - DNA, 25 bp, Homo sapien
ggctattctgcccacgtccgctaag

SEQ ID NO: 4702705 - DNA, 25 bp, Homo sapien
tggcacattggctattctgcccacg

SEQ ID NO: 4702706 - DNA, 25 bp, Homo sapien
gggaggagctgcacccagggagagg

SEQ ID NO: 4702707 - DNA, 25 bp, Homo sapien
cctgcagcccatcacccacctgcag

SEQ ID NO: 4702708 - DNA, 25 bp, Homo sapien
cccacctgcagcccatcacccacct

SEQ ID NO: 4702709 - DNA, 25 bp, Homo sapien
ctgcagcccatcacccacctgcagc

SEQ ID NO: 4702710 - DNA, 25 bp, Homo sapien
cacctgcagcccatcacccacctgc

SEQ ID NO: 4702711 - DNA, 25 bp, Homo sapien
cattgtcacatagcagcagtaggtg

SEQ ID NO: 4702712 - DNA, 25 bp, Homo sapien
gtcattgtcacatagcagcagtagg

SEQ ID NO: 4702713 - DNA, 25 bp, Homo sapien
tcattgtcacatagcagcagtaggt

SEQ ID NO: 4702714 - DNA, 25 bp, Homo sapien
cagtcattgtcacatagcagcagta

SEQ ID NO: 4702715 - DNA, 25 bp, Homo sapien
actagctgcgtgtggataatctccc

SEQ ID NO: 4702716 - DNA, 25 bp, Homo sapien
gggtcggctgctgggaactagctgc

SEQ ID NO: 4702717 - DNA, 25 bp, Homo sapien
gataatctcccggtggcaccacgat

SEQ ID NO: 4702718 - DNA, 25 bp, Homo sapien
tgccatccacagctaacgggcactc

SEQ ID NO: 4702719 - DNA, 25 bp, Homo sapien
aaggagcccgccagtccttattgat

SEQ ID NO: 4702720 - DNA, 25 bp, Homo sapien
taaggagcccgccagtccttattga

SEQ ID NO: 4702721 - DNA, 25 bp, Homo sapien
cataaggagcccgccagtccttatt

SEQ ID NO: 4702722 - DNA, 25 bp, Homo sapien
tcataaggagcccgccagtccttat

SEQ ID NO: 4702723 - DNA, 25 bp, Homo sapien
gaggtccaggcctgctggctgtgag

SEQ ID NO: 4702724 - DNA, 25 bp, Homo sapien
cagaggtccaggcctgctggctgtg

SEQ ID NO: 4702725 - DNA, 25 bp, Homo sapien
ctgagtccagaggtccaggcctgct

SEQ ID NO: 4702726 - DNA, 25 bp, Homo sapien
ggtccaggcctgctggctgtgagct

SEQ ID NO: 4702727 - DNA, 25 bp, Homo sapien
ctgcctgagactcggagatcccgca

SEQ ID NO: 4702728 - DNA, 25 bp, Homo sapien
cacagagatgggataagatgggtcc

SEQ ID NO: 4702729 - DNA, 25 bp, Homo sapien
gatgggtccctgtcattgactccaa

SEQ ID NO: 4702730 - DNA, 25 bp, Homo sapien
gagatcccgcattctttgaatcagg

SEQ ID NO: 4702731 - DNA, 25 bp, Homo sapien
tgctgcagaaaccaagcgatgtctc

SEQ ID NO: 4702732 - DNA, 25 bp, Homo sapien
ctgcttttgccaaccgcaggctctt

SEQ ID NO: 4702733 - DNA, 25 bp, Homo sapien
tctccaagaaggccggctatgcgga

SEQ ID NO: 4702734 - DNA, 25 bp, Homo sapien
aaacacgactactgcccaggaagag

SEQ ID NO: 4702735 - DNA, 25 bp, Homo sapien
caaagtttctcagagcgcagcttca

SEQ ID NO: 4702736 - DNA, 25 bp, Homo sapien
tcagaatcgtgaggctgaccttgtc

SEQ ID NO: 4702737 - DNA, 25 bp, Homo sapien
gtaagtacttccacggcccaactga

SEQ ID NO: 4702738 - DNA, 25 bp, Homo sapien
gtctcaagtctaagccacgtgctca

SEQ ID NO: 4702739 - DNA, 25 bp, Homo sapien
cggccccgctcggctagggtgggcg

SEQ ID NO: 4702740 - DNA, 25 bp, Homo sapien
ccgctcggctagggtgggcgcggac

SEQ ID NO: 4702741 - DNA, 25 bp, Homo sapien
gccccgctcggctagggtgggcgcg

SEQ ID NO: 4702742 - DNA, 25 bp, Homo sapien
cccgctcggctagggtgggcgcgga

SEQ ID NO: 4702743 - DNA, 25 bp, Homo sapien
ccagccccagcagaagcgcagccgc

SEQ ID NO: 4702744 - DNA, 25 bp, Homo sapien
ccagcagaagcgcagccgccgccat

SEQ ID NO: 4702745 - DNA, 25 bp, Homo sapien
gccgcccgcggtgccagcagcgcca

SEQ ID NO: 4702746 - DNA, 25 bp, Homo sapien
gcccgcggtgccagcagcgccagcc

SEQ ID NO: 4702747 - DNA, 25 bp, Homo sapien
ctgcgccgtcatagcacgcgcccat

SEQ ID NO: 4702748 - DNA, 25 bp, Homo sapien
cgttctcgaacaccggcaggcagcg

SEQ ID NO: 4702749 - DNA, 25 bp, Homo sapien
ccgcacgtgtgcgaggcctgggcga

SEQ ID NO: 4702750 - DNA, 25 bp, Homo sapien
caaacgccgcgttctcgaacaccgg

SEQ ID NO: 4702751 - DNA, 25 bp, Homo sapien
aatgagcccccgcgcccgcggcgcc

SEQ ID NO: 4702752 - DNA, 25 bp, Homo sapien
tggcaatgagcccccgcgcccgcgg

SEQ ID NO: 4702753 - DNA, 25 bp, Homo sapien
gagcccccgcgcccgcggcgcccac

SEQ ID NO: 4702754 - DNA, 25 bp, Homo sapien
ctggcaatgagcccccgcgcccgcg

SEQ ID NO: 4702755 - DNA, 25 bp, Homo sapien
taggaggcgttgtggtggcgctggg

SEQ ID NO: 4702756 - DNA, 25 bp, Homo sapien
ctaggcggagggtgatgttgaccga

SEQ ID NO: 4702757 - DNA, 25 bp, Homo sapien
gctctgccaccaggtgctctcgtcc

SEQ ID NO: 4702758 - DNA, 25 bp, Homo sapien
tactgcacgccgaaggccatggacg

SEQ ID NO: 4702759 - DNA, 25 bp, Homo sapien
tcagcctcagacccccagtggagtg

SEQ ID NO: 4702760 - DNA, 25 bp, Homo sapien
cagcctcagacccccagtggagtgg

SEQ ID NO: 4702761 - DNA, 25 bp, Homo sapien
agcctcagacccccagtggagtggg

SEQ ID NO: 4702762 - DNA, 25 bp, Homo sapien
gaagcctctgctccaaacaggcgca

SEQ ID NO: 4702763 - DNA, 25 bp, Homo sapien
gatgtttaccaaggagtctgcgccg

SEQ ID NO: 4702764 - DNA, 25 bp, Homo sapien
tgctccgcacgctttcttttaaggg

SEQ ID NO: 4702765 - DNA, 25 bp, Homo sapien
ttagcgaatacacatctgggccagc

SEQ ID NO: 4702766 - DNA, 25 bp, Homo sapien
tcattctgcttggtcagtgccggat

SEQ ID NO: 4702767 - DNA, 25 bp, Homo sapien
tgattttatgactgtcccggtgtca

SEQ ID NO: 4702768 - DNA, 25 bp, Homo sapien
tgtgggccagcttgattttatgact

SEQ ID NO: 4702769 - DNA, 25 bp, Homo sapien
gaggacacagcttggcgctcctgct

SEQ ID NO: 4702770 - DNA, 25 bp, Homo sapien
cccagagcagcacagaagatgccca

SEQ ID NO: 4702771 - DNA, 25 bp, Homo sapien
agcacagaagatgcccagtcccctc

SEQ ID NO: 4702772 - DNA, 25 bp, Homo sapien
ttcccagagcagcacagaagatgcc

SEQ ID NO: 4702773 - DNA, 25 bp, Homo sapien
gcagcacagaagatgcccagtcccc

SEQ ID NO: 4702774 - DNA, 25 bp, Homo sapien
ctgcagccaggaaaacggggcccat

SEQ ID NO: 4702775 - DNA, 25 bp, Homo sapien
tcctcgaagttgtaggcgctgggcc

SEQ ID NO: 4702776 - DNA, 25 bp, Homo sapien
tcagggcgactggtgtggaacttca

SEQ ID NO: 4702777 - DNA, 25 bp, Homo sapien
tggaacttcagcctcacatacgtga

SEQ ID NO: 4702778 - DNA, 25 bp, Homo sapien
gagatgtcgctgaactcagaggtgc

SEQ ID NO: 4702779 - DNA, 25 bp, Homo sapien
gggcaggccctgttactaattcaca

SEQ ID NO: 4702780 - DNA, 25 bp, Homo sapien
tagaggcgctttccgtcatcacaga

SEQ ID NO: 4702781 - DNA, 25 bp, Homo sapien
cacggacttacagcgtgggacccag

SEQ ID NO: 4702782 - DNA, 25 bp, Homo sapien
catgggacaatgcagctagaggcgc

SEQ ID NO: 4702783 - DNA, 25 bp, Homo sapien
tgccgcccacagagaagtcggacac

SEQ ID NO: 4702784 - DNA, 25 bp, Homo sapien
aggagttcggtgctggtgacccact

SEQ ID NO: 4702785 - DNA, 25 bp, Homo sapien
caaacgtgttgagccggtctagaga

SEQ ID NO: 4702786 - DNA, 25 bp, Homo sapien
gcataatagtaggactggagcacct

SEQ ID NO: 4702787 - DNA, 25 bp, Homo sapien
gcagacactcgtgggcagcctcggc

SEQ ID NO: 4702788 - DNA, 25 bp, Homo sapien
cggtggtgttgtgctggcaccggca

SEQ ID NO: 4702789 - DNA, 25 bp, Homo sapien
cactcgctggcatgcccgttgcact

SEQ ID NO: 4702790 - DNA, 25 bp, Homo sapien
cgctcacagtctgtgccggtggtgt

SEQ ID NO: 4702791 - DNA, 25 bp, Homo sapien
caccagcctcgggtccctgatgccc

SEQ ID NO: 4702792 - DNA, 25 bp, Homo sapien
aacaccagcctcgggtccctgatgc

SEQ ID NO: 4702793 - DNA, 25 bp, Homo sapien
tggggagttcctttccccgcctgca

SEQ ID NO: 4702794 - DNA, 25 bp, Homo sapien
gagttcctttccccgcctgcaacac

SEQ ID NO: 4702795 - DNA, 25 bp, Homo sapien
tgtgctgcggaagagctcccgatca

SEQ ID NO: 4702796 - DNA, 25 bp, Homo sapien
gatagaaattctcctgacagcgctc

SEQ ID NO: 4702797 - DNA, 25 bp, Homo sapien
tcaaacgtgcattcctcggagcggc

SEQ ID NO: 4702798 - DNA, 25 bp, Homo sapien
gcatccgcgggtcccagtgatagaa

SEQ ID NO: 4702799 - DNA, 25 bp, Homo sapien
tcactgagcgagtggaacccgggca

SEQ ID NO: 4702800 - DNA, 25 bp, Homo sapien
cgtgggcttgcaggcgcaggtgcct

SEQ ID NO: 4702801 - DNA, 25 bp, Homo sapien
cctgtgtcatcgcactggaggtgta

SEQ ID NO: 4702802 - DNA, 25 bp, Homo sapien
gggcagacagcggtcacacttccag

SEQ ID NO: 4702803 - DNA, 25 bp, Homo sapien
gtgtccaggctgccagcgggattgc

SEQ ID NO: 4702804 - DNA, 25 bp, Homo sapien
gtccaggctgccagcgggattgcaa

SEQ ID NO: 4702805 - DNA, 25 bp, Homo sapien
gtcacataggttgccttccacattc

SEQ ID NO: 4702806 - DNA, 25 bp, Homo sapien
tgtcacataggttgccttccacatt

SEQ ID NO: 4702807 - DNA, 25 bp, Homo sapien
aatcgctgaggatgtgatgcacctg

SEQ ID NO: 4702808 - DNA, 25 bp, Homo sapien
ccttggagtggccatagcagaaaca

SEQ ID NO: 4702809 - DNA, 25 bp, Homo sapien
gcagtggacgcgcacaccttggagt

SEQ ID NO: 4702810 - DNA, 25 bp, Homo sapien
aaatcgctgaggatgtgatgcacct

SEQ ID NO: 4702811 - DNA, 25 bp, Homo sapien
gcgcatctctcggtcctgctttctg

SEQ ID NO: 4702812 - DNA, 25 bp, Homo sapien
tgtttcagctgatgcctcgctcctt

SEQ ID NO: 4702813 - DNA, 25 bp, Homo sapien
tttctgcgcggcttccagcagaggg

SEQ ID NO: 4702814 - DNA, 25 bp, Homo sapien
cagcgtcggccctgaggttcttctg

SEQ ID NO: 4702815 - DNA, 25 bp, Homo sapien
ctctccagggggtagcgggcaatga

SEQ ID NO: 4702816 - DNA, 25 bp, Homo sapien
cctctccagggggtagcgggcaatg

SEQ ID NO: 4702817 - DNA, 25 bp, Homo sapien
agcgagtgaccttaaggaggtgcct

SEQ ID NO: 4702818 - DNA, 25 bp, Homo sapien
gagtgaccttaaggaggtgcctctc

SEQ ID NO: 4702819 - DNA, 25 bp, Homo sapien
ggaggaccccatttgggctccattg

SEQ ID NO: 4702820 - DNA, 25 bp, Homo sapien
aggaccccatttgggctccattgtg

SEQ ID NO: 4702821 - DNA, 25 bp, Homo sapien
ggctcaggaggaccccatttgggct

SEQ ID NO: 4702822 - DNA, 25 bp, Homo sapien
tcaggaggaccccatttgggctcca

SEQ ID NO: 4702823 - DNA, 25 bp, Homo sapien
gcagagtggccatggaacagagtga

SEQ ID NO: 4702824 - DNA, 25 bp, Homo sapien
ggcctctgagcttggagcgcctgcc

SEQ ID NO: 4702825 - DNA, 25 bp, Homo sapien
cagcagagtggccatggaacagagt

SEQ ID NO: 4702826 - DNA, 25 bp, Homo sapien
gggcctctgagcttggagcgcctgc

SEQ ID NO: 4702827 - DNA, 25 bp, Homo sapien
gggcttgttgtgtgcagtatttcca

SEQ ID NO: 4702828 - DNA, 25 bp, Homo sapien
catgttggtggaacatgcgtgtgtc

SEQ ID NO: 4702829 - DNA, 25 bp, Homo sapien
tgtcaaggagtgaaataaaagtggc

SEQ ID NO: 4702830 - DNA, 25 bp, Homo sapien
tatttccactgtcctcgtaagaaca

SEQ ID NO: 4702831 - DNA, 25 bp, Homo sapien
aaggtcagtatgaggggctgcccat

SEQ ID NO: 4702832 - DNA, 25 bp, Homo sapien
gacaggctagagtgcctcagggaca

SEQ ID NO: 4702833 - DNA, 25 bp, Homo sapien
ccttccagcctcagctgtacaggga

SEQ ID NO: 4702834 - DNA, 25 bp, Homo sapien
tgcccatagctgaaccgctggtctc

SEQ ID NO: 4702835 - DNA, 25 bp, Homo sapien
gggccacgtcctcggaggtctcctg

SEQ ID NO: 4702836 - DNA, 25 bp, Homo sapien
gggccgggactgacgcggaggcgga

SEQ ID NO: 4702837 - DNA, 25 bp, Homo sapien
tcaggttggcgaggagccgctggaa

SEQ ID NO: 4702838 - DNA, 25 bp, Homo sapien
cggaggcggaggctggtcaggttgg

SEQ ID NO: 4702839 - DNA, 25 bp, Homo sapien
gatgtgagccggacctcagtcagga

SEQ ID NO: 4702840 - DNA, 25 bp, Homo sapien
cgtgtagccagtgggacatgaacaa

SEQ ID NO: 4702841 - DNA, 25 bp, Homo sapien
ttgtatcccggagcacaggattcac

SEQ ID NO: 4702842 - DNA, 25 bp, Homo sapien
agctggcatagggacccccctgtgg

SEQ ID NO: 4702843 - DNA, 25 bp, Homo sapien
tcgtacaggccgactggccagggca

SEQ ID NO: 4702844 - DNA, 25 bp, Homo sapien
gcaaacagcgttcacaggatgggcc

SEQ ID NO: 4702845 - DNA, 25 bp, Homo sapien
tggcccgcgaaagggttgccataga

SEQ ID NO: 4702846 - DNA, 25 bp, Homo sapien
gctctctgggatggtcgtacaggcc

SEQ ID NO: 4702847 - DNA, 25 bp, Homo sapien
ggtgcccaaagagccccagcgggtc

SEQ ID NO: 4702848 - DNA, 25 bp, Homo sapien
ccgtagaagccttcctgacagtgct

SEQ ID NO: 4702849 - DNA, 25 bp, Homo sapien
acgttcccgctacactggcactggt

SEQ ID NO: 4702850 - DNA, 25 bp, Homo sapien
agtgctcacagtggtcacccgtggt

SEQ ID NO: 4702851 - DNA, 25 bp, Homo sapien
ctggggtctggaggtaggtactcac

SEQ ID NO: 4702852 - DNA, 25 bp, Homo sapien
cctggggtctggaggtaggtactca

SEQ ID NO: 4702853 - DNA, 25 bp, Homo sapien
catctgctcactgaccgagccctgt

SEQ ID NO: 4702854 - DNA, 25 bp, Homo sapien
ctgcagtcccgtgcagtcacatgag

SEQ ID NO: 4702855 - DNA, 25 bp, Homo sapien
cagtcccgtgcagtcacatgaggca

SEQ ID NO: 4702856 - DNA, 25 bp, Homo sapien
gcatctgctcactgaccgagccctg

SEQ ID NO: 4702857 - DNA, 25 bp, Homo sapien
cccaggctggaggtcgaagaagcca

SEQ ID NO: 4702858 - DNA, 25 bp, Homo sapien
ccaggctggaggtcgaagaagccag

SEQ ID NO: 4702859 - DNA, 25 bp, Homo sapien
gaggtcgaagaagccagggtagcag

SEQ ID NO: 4702860 - DNA, 25 bp, Homo sapien
ctggaggtcgaagaagccagggtag

SEQ ID NO: 4702861 - DNA, 25 bp, Homo sapien
caggtgcactgtccagtcttgggat

SEQ ID NO: 4702862 - DNA, 25 bp, Homo sapien
gcaggtgcactgtccagtcttggga

SEQ ID NO: 4702863 - DNA, 25 bp, Homo sapien
agaagccgaagaaacccagctggca

SEQ ID NO: 4702864 - DNA, 25 bp, Homo sapien
tggagaagccgaagaaacccagctg

SEQ ID NO: 4702865 - DNA, 25 bp, Homo sapien
tagcaggacggacattgctggcagt

SEQ ID NO: 4702866 - DNA, 25 bp, Homo sapien
tgccgttctcgtggcactgggccga

SEQ ID NO: 4702867 - DNA, 25 bp, Homo sapien
aagaagttgtcgtggcagcggtcac

SEQ ID NO: 4702868 - DNA, 25 bp, Homo sapien
tgccgtctgccgtgaggaagaagtt

SEQ ID NO: 4702869 - DNA, 25 bp, Homo sapien
cccagcagaatgtctagtggtcccc

SEQ ID NO: 4702870 - DNA, 25 bp, Homo sapien
ttggagccacccctccgtcaaagtc

SEQ ID NO: 4702871 - DNA, 25 bp, Homo sapien
tgccacagtcggacccttggagcca

SEQ ID NO: 4702872 - DNA, 25 bp, Homo sapien
agggactgccacagtcggacccttg

SEQ ID NO: 4702873 - DNA, 25 bp, Homo sapien
ctcccgctctgcgctcctgctgtac

SEQ ID NO: 4702874 - DNA, 25 bp, Homo sapien
cctcccgctctgcgctcctgctgta

SEQ ID NO: 4702875 - DNA, 25 bp, Homo sapien
tgctccaggaaggcttcccgagccc

SEQ ID NO: 4702876 - DNA, 25 bp, Homo sapien
ctgctccaggaaggcttcccgagcc

SEQ ID NO: 4702877 - DNA, 25 bp, Homo sapien
ctcctcttccgaggactccagcact

SEQ ID NO: 4702878 - DNA, 25 bp, Homo sapien
agcgggcacccttgttcagcctctg

SEQ ID NO: 4702879 - DNA, 25 bp, Homo sapien
ctgggtgcaggtcttctgggatccg

SEQ ID NO: 4702880 - DNA, 25 bp, Homo sapien
gggcacagcgggcacccttgttcag

SEQ ID NO: 4702881 - DNA, 25 bp, Homo sapien
gtggctccatttggtcggctgactg

SEQ ID NO: 4702882 - DNA, 25 bp, Homo sapien
tggtcggctgactgggaccttcctg

SEQ ID NO: 4702883 - DNA, 25 bp, Homo sapien
ctgcgatcttggtggcggtgtctct

SEQ ID NO: 4702884 - DNA, 25 bp, Homo sapien
ttccctccagcagattccagagaag

SEQ ID NO: 4702885 - DNA, 25 bp, Homo sapien
aggcgagcagggccctccaagcagt

SEQ ID NO: 4702886 - DNA, 25 bp, Homo sapien
gattccagagaagcgcgtagctggt

SEQ ID NO: 4702887 - DNA, 25 bp, Homo sapien
tctgcgccaacttgctgcacggtgg

SEQ ID NO: 4702888 - DNA, 25 bp, Homo sapien
caaggccaggtacggggctgtatct

SEQ ID NO: 4702889 - DNA, 25 bp, Homo sapien
agtgctttctgggccgcctggacct

SEQ ID NO: 4702890 - DNA, 25 bp, Homo sapien
aacacgctttccgcttcaggcagca

SEQ ID NO: 4702891 - DNA, 25 bp, Homo sapien
gcagggagacaatgcgctcaggcag

SEQ ID NO: 4702892 - DNA, 25 bp, Homo sapien
cagggagacaatgcgctcaggcagg

SEQ ID NO: 4702893 - DNA, 25 bp, Homo sapien
gggagacaatgcgctcaggcagggc

SEQ ID NO: 4702894 - DNA, 25 bp, Homo sapien
agggagacaatgcgctcaggcaggg

SEQ ID NO: 4702895 - DNA, 25 bp, Homo sapien
cagtctggagggttcgggcagcctc

SEQ ID NO: 4702896 - DNA, 25 bp, Homo sapien
ggtcttcagcccgggacttctgagg

SEQ ID NO: 4702897 - DNA, 25 bp, Homo sapien
atgtgctgccatgatgcaactgtct

SEQ ID NO: 4702898 - DNA, 25 bp, Homo sapien
ctgtttgccgtagcgtcgcctgggc

SEQ ID NO: 4702899 - DNA, 25 bp, Homo sapien
ggagagagatgaggagaggctgggc

SEQ ID NO: 4702900 - DNA, 25 bp, Homo sapien
agagagatgaggagaggctgggcag

SEQ ID NO: 4702901 - DNA, 25 bp, Homo sapien
gagagagatgaggagaggctgggca

SEQ ID NO: 4702902 - DNA, 25 bp, Homo sapien
ctggagagagatgaggagaggctgg

SEQ ID NO: 4702903 - DNA, 25 bp, Homo sapien
gaagcctgggtcagggcggctctgg

SEQ ID NO: 4702904 - DNA, 25 bp, Homo sapien
ggaagcctgggtcagggcggctctg

SEQ ID NO: 4702905 - DNA, 25 bp, Homo sapien
agagtcctggctcccatgacagtca

SEQ ID NO: 4702906 - DNA, 25 bp, Homo sapien
gctcccatgacagtcactgtcgcag

SEQ ID NO: 4702907 - DNA, 25 bp, Homo sapien
gtcctggctcccatgacagtcactg

SEQ ID NO: 4702908 - DNA, 25 bp, Homo sapien
cagcagagtcctggctcccatgaca

SEQ ID NO: 4702909 - DNA, 25 bp, Homo sapien
gtgtatgggatagccacatgggcaa

SEQ ID NO: 4702910 - DNA, 25 bp, Homo sapien
acatgggcaagtccgaggtgagtga

SEQ ID NO: 4702911 - DNA, 25 bp, Homo sapien
caagtccgaggtgagtgatgtatga

SEQ ID NO: 4702912 - DNA, 25 bp, Homo sapien
aacagccaatgatgttagagtctcc

SEQ ID NO: 4702913 - DNA, 25 bp, Homo sapien
atggaaaaccaagagtctgatgtaa

SEQ ID NO: 4702914 - DNA, 25 bp, Homo sapien
catggaaaaccaagagtctgatgta

SEQ ID NO: 4702915 - DNA, 25 bp, Homo sapien
caaggagtctgtcactgacggagtc

SEQ ID NO: 4702916 - DNA, 25 bp, Homo sapien
ctgcaaggagtctgtcactgacgga

SEQ ID NO: 4702917 - DNA, 25 bp, Homo sapien
gagtctgtcactgacggagtctgcc

SEQ ID NO: 4702918 - DNA, 25 bp, Homo sapien
tgtcactgacggagtctgccttcct

SEQ ID NO: 4702919 - DNA, 25 bp, Homo sapien
gaaagaggggccgcgtttcccagca

SEQ ID NO: 4702920 - DNA, 25 bp, Homo sapien
tcctctccgcctgcttggtcttctt

SEQ ID NO: 4702921 - DNA, 25 bp, Homo sapien
aagaggggccgcgtttcccagcatc

SEQ ID NO: 4702922 - DNA, 25 bp, Homo sapien
cagcatcctctccgcctgcttggtc

SEQ ID NO: 4702923 - DNA, 25 bp, Homo sapien
ccccgtgaagtctctgagctaattg

SEQ ID NO: 4702924 - DNA, 25 bp, Homo sapien
cccgtgaagtctctgagctaattgc

SEQ ID NO: 4702925 - DNA, 25 bp, Homo sapien
ccgtgaagtctctgagctaattgcc

SEQ ID NO: 4702926 - DNA, 25 bp, Homo sapien
tgcgtgcttcagacgccagcacctg

SEQ ID NO: 4702927 - DNA, 25 bp, Homo sapien
cgtggcttgcgtctggctggtgagc

SEQ ID NO: 4702928 - DNA, 25 bp, Homo sapien
ctggcacggcggtgcgcctgtttcc

SEQ ID NO: 4702929 - DNA, 25 bp, Homo sapien
agcacctgctgggacgcctgttgga

SEQ ID NO: 4702930 - DNA, 25 bp, Homo sapien
ggcgatagggtaggggccctggcaa

SEQ ID NO: 4702931 - DNA, 25 bp, Homo sapien
gcaggaggcgatagggtaggggccc

SEQ ID NO: 4702932 - DNA, 25 bp, Homo sapien
ccaggggcaggaggcgatagggtag

SEQ ID NO: 4702933 - DNA, 25 bp, Homo sapien
gaggcgatagggtaggggccctggc

SEQ ID NO: 4702934 - DNA, 25 bp, Homo sapien
ctccagtgagatacgcgattcccgg

SEQ ID NO: 4702935 - DNA, 25 bp, Homo sapien
aagcagctctgacaaggtctcgatg

SEQ ID NO: 4702936 - DNA, 25 bp, Homo sapien
ggtctcgatgtccttctccagtgag

SEQ ID NO: 4702937 - DNA, 25 bp, Homo sapien
agatacgcgattcccggatctgctg

SEQ ID NO: 4702938 - DNA, 25 bp, Homo sapien
aggcgttctagtgcccactgagtct

SEQ ID NO: 4702939 - DNA, 25 bp, Homo sapien
gcccactgagtctcgttcagggcct

SEQ ID NO: 4702940 - DNA, 25 bp, Homo sapien
caggcgttctagtgcccactgagtc

SEQ ID NO: 4702941 - DNA, 25 bp, Homo sapien
tgagtttcctctgcaaggaccccgg

SEQ ID NO: 4702942 - DNA, 25 bp, Homo sapien
cctccaggttctgtttgtcggcgcg

SEQ ID NO: 4702943 - DNA, 25 bp, Homo sapien
ggtcactctcgaagccctggatctg

SEQ ID NO: 4702944 - DNA, 25 bp, Homo sapien
gcggatctcggcgaggtcactctcg

SEQ ID NO: 4702945 - DNA, 25 bp, Homo sapien
caggttctgtttgtcggcgcggatc

SEQ ID NO: 4702946 - DNA, 25 bp, Homo sapien
caccccctgggtcatgtaaacagca

SEQ ID NO: 4702947 - DNA, 25 bp, Homo sapien
tcggcagggagtgactatccacacg

SEQ ID NO: 4702948 - DNA, 25 bp, Homo sapien
gggcgagttcacagcagccggctcc

SEQ ID NO: 4702949 - DNA, 25 bp, Homo sapien
gaatgtctgtatgggcacacctgtg

SEQ ID NO: 4702950 - DNA, 25 bp, Homo sapien
tgtgcccgtttatgcatgtgcaggg

SEQ ID NO: 4702951 - DNA, 25 bp, Homo sapien
tgttattgacactggggtgtgcccg

SEQ ID NO: 4702952 - DNA, 25 bp, Homo sapien
tgagagtgtgcactcatgtccaggt

SEQ ID NO: 4702953 - DNA, 25 bp, Homo sapien
caggtgaactgggtacgcacactca

SEQ ID NO: 4702954 - DNA, 25 bp, Homo sapien
tcaattaaaggtcaactgggttgcc

SEQ ID NO: 4702955 - DNA, 25 bp, Homo sapien
aggaatgggccttgctctagccaga

SEQ ID NO: 4702956 - DNA, 25 bp, Homo sapien
agtgcacgcagcaacacaggtcagg

SEQ ID NO: 4702957 - DNA, 25 bp, Homo sapien
tgtgtggaccgtaagctgctgactg

SEQ ID NO: 4702958 - DNA, 25 bp, Homo sapien
gctgtgagttcgtctcgagcctgaa

SEQ ID NO: 4702959 - DNA, 25 bp, Homo sapien
taggctatctccaacacgtggcagc

SEQ ID NO: 4702960 - DNA, 25 bp, Homo sapien
agagatcctcattatcctgaacggg

SEQ ID NO: 4702961 - DNA, 25 bp, Homo sapien
ggacctgatgacatgtacacctggg

SEQ ID NO: 4702962 - DNA, 25 bp, Homo sapien
ttcggcctctccacctctgcccaga

SEQ ID NO: 4702963 - DNA, 25 bp, Homo sapien
ggcctctccacctctgcccagacat

SEQ ID NO: 4702964 - DNA, 25 bp, Homo sapien
cttcggcctctccacctctgcccag

SEQ ID NO: 4702965 - DNA, 25 bp, Homo sapien
tcggcctctccacctctgcccagac

SEQ ID NO: 4702966 - DNA, 25 bp, Homo sapien
gcagtgcggctgctgtgacaacagt

SEQ ID NO: 4702967 - DNA, 25 bp, Homo sapien
agctcaggatgcaggatagggtacc

SEQ ID NO: 4702968 - DNA, 25 bp, Homo sapien
gggagtcggcgctcaaacatcactg

SEQ ID NO: 4702969 - DNA, 25 bp, Homo sapien
cagtggcccgtcaaatcaattggaa

SEQ ID NO: 4702970 - DNA, 25 bp, Homo sapien
cacaggcgcctggtccgggctccgg

SEQ ID NO: 4702971 - DNA, 25 bp, Homo sapien
ccgccggctccaggcttcgcggacg

SEQ ID NO: 4702972 - DNA, 25 bp, Homo sapien
ccaggcttcgcggacgcggcgaggg

SEQ ID NO: 4702973 - DNA, 25 bp, Homo sapien
ctggtccgggctccggctagctgcg

SEQ ID NO: 4702974 - DNA, 25 bp, Homo sapien
aacctgttgctgagctcgcccgaca

SEQ ID NO: 4702975 - DNA, 25 bp, Homo sapien
ctctcctgccgggctttgagcaagc

SEQ ID NO: 4702976 - DNA, 25 bp, Homo sapien
ggctttgagcaagccgaacgccttc

SEQ ID NO: 4702977 - DNA, 25 bp, Homo sapien
cctctcctgccgggctttgagcaag

SEQ ID NO: 4702978 - DNA, 25 bp, Homo sapien
tttgagcaagccgaacgccttccct

SEQ ID NO: 4702979 - DNA, 25 bp, Homo sapien
atgaaatcctctgtagctgcggctc

SEQ ID NO: 4702980 - DNA, 25 bp, Homo sapien
catgaaatcctctgtagctgcggct

SEQ ID NO: 4702981 - DNA, 25 bp, Homo sapien
aacatgaaatcctctgtagctgcgg

SEQ ID NO: 4702982 - DNA, 25 bp, Homo sapien
ggaacatgaaatcctctgtagctgc

SEQ ID NO: 4702983 - DNA, 25 bp, Homo sapien
tatccagctccttaggatgggtcac

SEQ ID NO: 4702984 - DNA, 25 bp, Homo sapien
cctgttttatactgctgcctgccca

SEQ ID NO: 4702985 - DNA, 25 bp, Homo sapien
agcagctagaactacgggtgtatgc

SEQ ID NO: 4702986 - DNA, 25 bp, Homo sapien
tgcctccccggctagaatgtaggtt

SEQ ID NO: 4702987 - DNA, 25 bp, Homo sapien
tggatccttcttcggcagcctggga

SEQ ID NO: 4702988 - DNA, 25 bp, Homo sapien
cgcctccacttagctgacgctggat

SEQ ID NO: 4702989 - DNA, 25 bp, Homo sapien
tcattgcaatgcactgggcacggcc

SEQ ID NO: 4702990 - DNA, 25 bp, Homo sapien
cctagttggctctgtcgaggacttc

SEQ ID NO: 4702991 - DNA, 25 bp, Homo sapien
tcactgtacttctggtcacacagaa

SEQ ID NO: 4702992 - DNA, 25 bp, Homo sapien
ctcttcatcactgtacttctggtca

SEQ ID NO: 4702993 - DNA, 25 bp, Homo sapien
tcatcactgtacttctggtcacaca

SEQ ID NO: 4702994 - DNA, 25 bp, Homo sapien
tgtacttctggtcacacagaaactc

SEQ ID NO: 4702995 - DNA, 25 bp, Homo sapien
caggaataaatgcagggcagcccgc

SEQ ID NO: 4702996 - DNA, 25 bp, Homo sapien
ctggacaaaacagggccacagccta

SEQ ID NO: 4702997 - DNA, 25 bp, Homo sapien
gcaaggcttgctcacaaagagctga

SEQ ID NO: 4702998 - DNA, 25 bp, Homo sapien
acacaaacgtccattctccgcaggg

SEQ ID NO: 4702999 - DNA, 25 bp, Homo sapien
tctgaaaccaggaaaaaggcctgcc

SEQ ID NO: 4703000 - DNA, 25 bp, Homo sapien
caaagtggacatacagtttcccggg

SEQ ID NO: 4703001 - DNA, 25 bp, Homo sapien
ggtgtgctttttagcgtcccaggca

SEQ ID NO: 4703002 - DNA, 25 bp, Homo sapien
tcagatgggagcagtgtgtcaaacg

SEQ ID NO: 4703003 - DNA, 25 bp, Homo sapien
tctccatcatcctctttaaagacat

SEQ ID NO: 4703004 - DNA, 25 bp, Homo sapien
gggtcttggggacaccaagcttctc

SEQ ID NO: 4703005 - DNA, 25 bp, Homo sapien
catcatcctctttaaagacatcagg

SEQ ID NO: 4703006 - DNA, 25 bp, Homo sapien
tggggacaccaagcttctccatcat

SEQ ID NO: 4703007 - DNA, 25 bp, Homo sapien
acagccgaccgtttccccagcatca

SEQ ID NO: 4703008 - DNA, 25 bp, Homo sapien
tcatgttcacaaagtctcggtagga

SEQ ID NO: 4703009 - DNA, 25 bp, Homo sapien
ctcggtaggatatagtgtcactgac

SEQ ID NO: 4703010 - DNA, 25 bp, Homo sapien
ttcacaaagtctcggtaggatatag

SEQ ID NO: 4703011 - DNA, 25 bp, Homo sapien
caggggcctctctgcacagaatgat

SEQ ID NO: 4703012 - DNA, 25 bp, Homo sapien
ttttgccttcagagatcccaaggga

SEQ ID NO: 4703013 - DNA, 25 bp, Homo sapien
gaatgattttgccttcagagatccc

SEQ ID NO: 4703014 - DNA, 25 bp, Homo sapien
gggcctctctgcacagaatgatttt

SEQ ID NO: 4703015 - DNA, 25 bp, Homo sapien
ggcaggctagcaatgtctctctctg

SEQ ID NO: 4703016 - DNA, 25 bp, Homo sapien
tcagggcaggctagcaatgtctctc

SEQ ID NO: 4703017 - DNA, 25 bp, Homo sapien
ttggggctgctctcgttggcttttc

SEQ ID NO: 4703018 - DNA, 25 bp, Homo sapien
agggcaggctagcaatgtctctctc

SEQ ID NO: 4703019 - DNA, 25 bp, Homo sapien
catggcactgtccaaggaaacccga

SEQ ID NO: 4703020 - DNA, 25 bp, Homo sapien
gacccagagcccctttaaggcagat

SEQ ID NO: 4703021 - DNA, 25 bp, Homo sapien
gaacttggcttggagactttctgaa

SEQ ID NO: 4703022 - DNA, 25 bp, Homo sapien
gagatcacagtgtgtcaagaagggc

SEQ ID NO: 4703023 - DNA, 25 bp, Homo sapien
gggcagcggggccccgagtggctgt

SEQ ID NO: 4703024 - DNA, 25 bp, Homo sapien
gcagcggggccccgagtggctgtgt

SEQ ID NO: 4703025 - DNA, 25 bp, Homo sapien
tggaatgagtggggatcagctgggg

SEQ ID NO: 4703026 - DNA, 25 bp, Homo sapien
cagcggggccccgagtggctgtgtc

SEQ ID NO: 4703027 - DNA, 25 bp, Homo sapien
ttgaagggctcccaatgccaagctc

SEQ ID NO: 4703028 - DNA, 25 bp, Homo sapien
caatgccaagctcctttccttccca

SEQ ID NO: 4703029 - DNA, 25 bp, Homo sapien
cttcttgaagggctcccaatgccaa

SEQ ID NO: 4703030 - DNA, 25 bp, Homo sapien
ccaatgccaagctcctttccttccc

SEQ ID NO: 4703031 - DNA, 25 bp, Homo sapien
caggactggagggttccttctggta

SEQ ID NO: 4703032 - DNA, 25 bp, Homo sapien
ctctgctgccccagtaagggacagt

SEQ ID NO: 4703033 - DNA, 25 bp, Homo sapien
tcacttctgcctccgaagccctctg

SEQ ID NO: 4703034 - DNA, 25 bp, Homo sapien
taagggacagtagggctgcacgctg

SEQ ID NO: 4703035 - DNA, 25 bp, Homo sapien
aaaggtggaacagcactgagctgac

SEQ ID NO: 4703036 - DNA, 25 bp, Homo sapien
taaaaggtggaacagcactgagctg

SEQ ID NO: 4703037 - DNA, 25 bp, Homo sapien
aaaaggtggaacagcactgagctga

SEQ ID NO: 4703038 - DNA, 25 bp, Homo sapien
ctaaaaggtggaacagcactgagct

SEQ ID NO: 4703039 - DNA, 25 bp, Homo sapien
gaagcagagtcaggtttcaagcaga

SEQ ID NO: 4703040 - DNA, 25 bp, Homo sapien
tatcagaggtgactaaggagccgca

SEQ ID NO: 4703041 - DNA, 25 bp, Homo sapien
gaccgtgtatactgcacatgccagg

SEQ ID NO: 4703042 - DNA, 25 bp, Homo sapien
tggaccagggtcttcagagcaagtg

SEQ ID NO: 4703043 - DNA, 25 bp, Homo sapien
aatatgatgggtagtgaaggaaggc

SEQ ID NO: 4703044 - DNA, 25 bp, Homo sapien
gatgggtagtgaaggaaggctttat

SEQ ID NO: 4703045 - DNA, 25 bp, Homo sapien
gacactgaatatgatgggtagtgaa

SEQ ID NO: 4703046 - DNA, 25 bp, Homo sapien
agggacactgaatatgatgggtagt

SEQ ID NO: 4703047 - DNA, 25 bp, Homo sapien
taagagtcctagaaccaagagccac

SEQ ID NO: 4703048 - DNA, 25 bp, Homo sapien
gatggttgaagtcccaagaagctga

SEQ ID NO: 4703049 - DNA, 25 bp, Homo sapien
tgcaggctgtagagatgatatccca

SEQ ID NO: 4703050 - DNA, 25 bp, Homo sapien
gaagctgagcccttagccagagaag

SEQ ID NO: 4703051 - DNA, 25 bp, Homo sapien
ctagttcgcaatttgctgagcccag

SEQ ID NO: 4703052 - DNA, 25 bp, Homo sapien
gctagttcgcaatttgctgagccca

SEQ ID NO: 4703053 - DNA, 25 bp, Homo sapien
tgtgtcgaagcagccaacgctgcct

SEQ ID NO: 4703054 - DNA, 25 bp, Homo sapien
cagcggcgcgcagttgacctcgcat

SEQ ID NO: 4703055 - DNA, 25 bp, Homo sapien
cagttgacctcgcatttccggcgcg

SEQ ID NO: 4703056 - DNA, 25 bp, Homo sapien
aggccgctcgacagcaaacttcctc

SEQ ID NO: 4703057 - DNA, 25 bp, Homo sapien
gaatcatggcatccatctcgtctcc

SEQ ID NO: 4703058 - DNA, 25 bp, Homo sapien
tctcccgctcgggaatcatggcatc

SEQ ID NO: 4703059 - DNA, 25 bp, Homo sapien
cttcatctcccgctcgggaatcatg

SEQ ID NO: 4703060 - DNA, 25 bp, Homo sapien
cgctcgggaatcatggcatccatct

SEQ ID NO: 4703061 - DNA, 25 bp, Homo sapien
tagggaaattactttccgagcctca

SEQ ID NO: 4703062 - DNA, 25 bp, Homo sapien
cttcgtagggctgccgcgatgacta

SEQ ID NO: 4703063 - DNA, 25 bp, Homo sapien
ctcctctacgttaacgactacttcg

SEQ ID NO: 4703064 - DNA, 25 bp, Homo sapien
tttcagccccgcgtcaaatgtgact

SEQ ID NO: 4703065 - DNA, 25 bp, Homo sapien
agtcttctctgcatgatcccaattt

SEQ ID NO: 4703066 - DNA, 25 bp, Homo sapien
ttctctgcatgatcccaattttata

SEQ ID NO: 4703067 - DNA, 25 bp, Homo sapien
atgtaaaggggccataatagtcttc

SEQ ID NO: 4703068 - DNA, 25 bp, Homo sapien
gcatgatcccaattttatatgtgct

SEQ ID NO: 4703069 - DNA, 25 bp, Homo sapien
gactcgagcgttccttgggcaattc

SEQ ID NO: 4703070 - DNA, 25 bp, Homo sapien
caccagcgaagaccagaccatattt

SEQ ID NO: 4703071 - DNA, 25 bp, Homo sapien
gattctcaccttctttagcgctcta

SEQ ID NO: 4703072 - DNA, 25 bp, Homo sapien
ctattttgttgggatcatctccggg

SEQ ID NO: 4703073 - DNA, 25 bp, Homo sapien
gaggttatcacagctcaaggccagg

SEQ ID NO: 4703074 - DNA, 25 bp, Homo sapien
gggaatttcataggaactagcaagc

SEQ ID NO: 4703075 - DNA, 25 bp, Homo sapien
gccaggtgatggattgggaatttca

SEQ ID NO: 4703076 - DNA, 25 bp, Homo sapien
tattcactggacatcatgcacgcag

SEQ ID NO: 4703077 - DNA, 25 bp, Homo sapien
ctgctaccgtggaaggaagagttgc

SEQ ID NO: 4703078 - DNA, 25 bp, Homo sapien
aaagcttatgataggcaaatgggcg

SEQ ID NO: 4703079 - DNA, 25 bp, Homo sapien
tgtttccgtgacttgcaggacagca

SEQ ID NO: 4703080 - DNA, 25 bp, Homo sapien
gacagcaatactaccatcagccaga

SEQ ID NO: 4703081 - DNA, 25 bp, Homo sapien
agctatttgggtggccgaggcacga

SEQ ID NO: 4703082 - DNA, 25 bp, Homo sapien
gaggcacgagaattgcttgaaccca

SEQ ID NO: 4703083 - DNA, 25 bp, Homo sapien
ggcacgagaattgcttgaacccagg

SEQ ID NO: 4703084 - DNA, 25 bp, Homo sapien
ccagctatttgggtggccgaggcac

SEQ ID NO: 4703085 - DNA, 25 bp, Homo sapien
tactggaccacagttccattctgtt

SEQ ID NO: 4703086 - DNA, 25 bp, Homo sapien
cataaaacggaggacaaggaatgac

SEQ ID NO: 4703087 - DNA, 25 bp, Homo sapien
tgactcataaaacggaggacaagga

SEQ ID NO: 4703088 - DNA, 25 bp, Homo sapien
tgacaggatgatctgactcataaaa

SEQ ID NO: 4703089 - DNA, 25 bp, Homo sapien
gatgatctgactcataaaacggagg

SEQ ID NO: 4703090 - DNA, 25 bp, Homo sapien
gtagtagagccatcaccacatctgg

SEQ ID NO: 4703091 - DNA, 25 bp, Homo sapien
tctgcagcagcatacactatggcga

SEQ ID NO: 4703092 - DNA, 25 bp, Homo sapien
taggtaccaatccacagcacatcca

SEQ ID NO: 4703093 - DNA, 25 bp, Homo sapien
tctggagacgtttccagggtcccat

SEQ ID NO: 4703094 - DNA, 25 bp, Homo sapien
cagggctccataaagttcacaaata

SEQ ID NO: 4703095 - DNA, 25 bp, Homo sapien
gctgccataacagggctccataaag

SEQ ID NO: 4703096 - DNA, 25 bp, Homo sapien
tgtaactgaggtagtaatgatgctg

SEQ ID NO: 4703097 - DNA, 25 bp, Homo sapien
gaggtagtaatgatgctgtctctcc

SEQ ID NO: 4703098 - DNA, 25 bp, Homo sapien
tgtcgagcaaggatactaacttctg

SEQ ID NO: 4703099 - DNA, 25 bp, Homo sapien
tgttgaagccgcagatgctgccagc

SEQ ID NO: 4703100 - DNA, 25 bp, Homo sapien
gatactaacttctgttgaagccgca

SEQ ID NO: 4703101 - DNA, 25 bp, Homo sapien
ctgatcactttgtcgagcaaggata

SEQ ID NO: 4703102 - DNA, 25 bp, Homo sapien
agaaagtacttctggtgaatcacaa

SEQ ID NO: 4703103 - DNA, 25 bp, Homo sapien
tgaatcacaatttagtgtcatctgc

SEQ ID NO: 4703104 - DNA, 25 bp, Homo sapien
tcttgtatgcaaaggtgctttgctc

SEQ ID NO: 4703105 - DNA, 25 bp, Homo sapien
aagacaacgtgaaagaaggttcttg

SEQ ID NO: 4703106 - DNA, 25 bp, Homo sapien
accactacctgggcccactgtgtcc

SEQ ID NO: 4703107 - DNA, 25 bp, Homo sapien
caccactacctgggcccactgtgtc

SEQ ID NO: 4703108 - DNA, 25 bp, Homo sapien
acccagagagtgacagataaatgcc

SEQ ID NO: 4703109 - DNA, 25 bp, Homo sapien
gccacccctagacaatgagagccat

SEQ ID NO: 4703110 - DNA, 25 bp, Homo sapien
tgaactctagcctcatccaaaagca

SEQ ID NO: 4703111 - DNA, 25 bp, Homo sapien
caaagtacctatgtatgggtggagc

SEQ ID NO: 4703112 - DNA, 25 bp, Homo sapien
ctccagtagccaagattcccaatta

SEQ ID NO: 4703113 - DNA, 25 bp, Homo sapien
tccagtagccaagattcccaattaa

SEQ ID NO: 4703114 - DNA, 25 bp, Homo sapien
ccagtagccaagattcccaattaat

SEQ ID NO: 4703115 - DNA, 25 bp, Homo sapien
cacaggcaattcagctcgactagaa

SEQ ID NO: 4703116 - DNA, 25 bp, Homo sapien
tcccatgggcaaggagtcatcactc

SEQ ID NO: 4703117 - DNA, 25 bp, Homo sapien
ggtgatttccacttggtttgtatag

SEQ ID NO: 4703118 - DNA, 25 bp, Homo sapien
gtctacgacaactcccatgggcaag

SEQ ID NO: 4703119 - DNA, 25 bp, Homo sapien
tgttttgatgagagacttaacccca

SEQ ID NO: 4703120 - DNA, 25 bp, Homo sapien
ccttctaatgaaagtcgctctggtg

SEQ ID NO: 4703121 - DNA, 25 bp, Homo sapien
aagtaacatgagaactggagcagga

SEQ ID NO: 4703122 - DNA, 25 bp, Homo sapien
tggacaaagcacaccatctgttgaa

SEQ ID NO: 4703123 - DNA, 25 bp, Homo sapien
aactgttggtaaacgactggatgca

SEQ ID NO: 4703124 - DNA, 25 bp, Homo sapien
ggtattcccttactgataaagcagg

SEQ ID NO: 4703125 - DNA, 25 bp, Homo sapien
ttcatctccgaagtaaagtaatggc

SEQ ID NO: 4703126 - DNA, 25 bp, Homo sapien
gtgtgccttcctaagacagaccagg

SEQ ID NO: 4703127 - DNA, 25 bp, Homo sapien
gatgcaggaagagaatataccccta

SEQ ID NO: 4703128 - DNA, 25 bp, Homo sapien
gatatacaactcactgtgcactggg

SEQ ID NO: 4703129 - DNA, 25 bp, Homo sapien
tgctaaccttatacaaaccaactgg

SEQ ID NO: 4703130 - DNA, 25 bp, Homo sapien
ggtcatgcacagtgtatcatgcgta

SEQ ID NO: 4703131 - DNA, 25 bp, Homo sapien
taataatgcaagcaaacctattctg

SEQ ID NO: 4703132 - DNA, 25 bp, Homo sapien
ccttagaactgcagtgtagaaacag

SEQ ID NO: 4703133 - DNA, 25 bp, Homo sapien
tggttgttccaaattagctaagatg

SEQ ID NO: 4703134 - DNA, 25 bp, Homo sapien
gatatggaaccagctacaactaact

SEQ ID NO: 4703135 - DNA, 25 bp, Homo sapien
ggctccccagtgaccgtagcagatg

SEQ ID NO: 4703136 - DNA, 25 bp, Homo sapien
gatgacttcaaagatgaagaaccaa

SEQ ID NO: 4703137 - DNA, 25 bp, Homo sapien
agctgtcggagccactggaatatga

SEQ ID NO: 4703138 - DNA, 25 bp, Homo sapien
cagaagcatccagtttctgtggggc

SEQ ID NO: 4703139 - DNA, 25 bp, Homo sapien
accagatgatccaaaggagaatgaa

SEQ ID NO: 4703140 - DNA, 25 bp, Homo sapien
tgtgctttccagggtaggcttaaaa

SEQ ID NO: 4703141 - DNA, 25 bp, Homo sapien
ggcttaaaaccagatgatccaaagg

SEQ ID NO: 4703142 - DNA, 25 bp, Homo sapien
cagggtaggcttaaaaccagatgat

SEQ ID NO: 4703143 - DNA, 25 bp, Homo sapien
ctaaggttgactttgacagcagagg

SEQ ID NO: 4703144 - DNA, 25 bp, Homo sapien
gttgactttgacagcagaggttgag

SEQ ID NO: 4703145 - DNA, 25 bp, Homo sapien
tttcactaaggttgactttgacagc

SEQ ID NO: 4703146 - DNA, 25 bp, Homo sapien
cactaaggttgactttgacagcaga

SEQ ID NO: 4703147 - DNA, 25 bp, Homo sapien
tactgagaactcgttttgagagtga

SEQ ID NO: 4703148 - DNA, 25 bp, Homo sapien
gagaactcgttttgagagtgagcac

SEQ ID NO: 4703149 - DNA, 25 bp, Homo sapien
aattactgagaactcgttttgagag

SEQ ID NO: 4703150 - DNA, 25 bp, Homo sapien
ctcgttttgagagtgagcaccttct

SEQ ID NO: 4703151 - DNA, 25 bp, Homo sapien
caggagtagaggtagctgcagcagt

SEQ ID NO: 4703152 - DNA, 25 bp, Homo sapien
agtagaggtagctgcagcagtaaac

SEQ ID NO: 4703153 - DNA, 25 bp, Homo sapien
ctaacaggagtagaggtagctgcag

SEQ ID NO: 4703154 - DNA, 25 bp, Homo sapien
ggagtagaggtagctgcagcagtaa

SEQ ID NO: 4703155 - DNA, 25 bp, Homo sapien
cgacatcgggggtgcgctctgggag

SEQ ID NO: 4703156 - DNA, 25 bp, Homo sapien
ttcaatggcacggaactaggtggtg

SEQ ID NO: 4703157 - DNA, 25 bp, Homo sapien
ggacttcaatggcacggaactaggt

SEQ ID NO: 4703158 - DNA, 25 bp, Homo sapien
caatggcacggaactaggtggtgct

SEQ ID NO: 4703159 - DNA, 25 bp, Homo sapien
tttctgtaccattgagggcactggg

SEQ ID NO: 4703160 - DNA, 25 bp, Homo sapien
gggttatcctgggtgatttctgtac

SEQ ID NO: 4703161 - DNA, 25 bp, Homo sapien
cctgggtgatttctgtaccattgag

SEQ ID NO: 4703162 - DNA, 25 bp, Homo sapien
gctttgccgctggaggggttatcct

SEQ ID NO: 4703163 - DNA, 25 bp, Homo sapien
tgggcttatgacatgtgacacagca

SEQ ID NO: 4703164 - DNA, 25 bp, Homo sapien
tagtgctacttacccattggaaaag

SEQ ID NO: 4703165 - DNA, 25 bp, Homo sapien
tacaacgattaacactagagaggtc

SEQ ID NO: 4703166 - DNA, 25 bp, Homo sapien
caaacatctggtttgttagtgctac

SEQ ID NO: 4703167 - DNA, 25 bp, Homo sapien
ctgcaacagcaggctgaagtgactt

SEQ ID NO: 4703168 - DNA, 25 bp, Homo sapien
tgcaacagcaggctgaagtgacttt

SEQ ID NO: 4703169 - DNA, 25 bp, Homo sapien
caacagcaggctgaagtgactttgc

SEQ ID NO: 4703170 - DNA, 25 bp, Homo sapien
gcaacagcaggctgaagtgactttg

SEQ ID NO: 4703171 - DNA, 25 bp, Homo sapien
ttccagccattacaggatctgaatc

SEQ ID NO: 4703172 - DNA, 25 bp, Homo sapien
cagccattacaggatctgaatcttt

SEQ ID NO: 4703173 - DNA, 25 bp, Homo sapien
tccagccattacaggatctgaatct

SEQ ID NO: 4703174 - DNA, 25 bp, Homo sapien
ccagccattacaggatctgaatctt

SEQ ID NO: 4703175 - DNA, 25 bp, Homo sapien
ccaaaagaaaggtatgcaagtcatc

SEQ ID NO: 4703176 - DNA, 25 bp, Homo sapien
aaaagaaaggtatgcaagtcatctg

SEQ ID NO: 4703177 - DNA, 25 bp, Homo sapien
caaaagaaaggtatgcaagtcatct

SEQ ID NO: 4703178 - DNA, 25 bp, Homo sapien
ccagcaaagccctcaagtaaagttg

SEQ ID NO: 4703179 - DNA, 25 bp, Homo sapien
ggctacttatatctccatgaagcga

SEQ ID NO: 4703180 - DNA, 25 bp, Homo sapien
tgcagataaccagagtcacgatttc

SEQ ID NO: 4703181 - DNA, 25 bp, Homo sapien
tataaagcaaatgcagataaccaga

SEQ ID NO: 4703182 - DNA, 25 bp, Homo sapien
ggattacaaagacaggagggtgact

SEQ ID NO: 4703183 - DNA, 25 bp, Homo sapien
tgcaaaccccacagatgtcatgagg

SEQ ID NO: 4703184 - DNA, 25 bp, Homo sapien
agatgccagtgaacgcttcccgctg

SEQ ID NO: 4703185 - DNA, 25 bp, Homo sapien
taaggccagtgacacaatgattcgg

SEQ ID NO: 4703186 - DNA, 25 bp, Homo sapien
gaacatcattcacatcttggacagc

SEQ ID NO: 4703187 - DNA, 25 bp, Homo sapien
catactgatgaaggcgccgaatttc

SEQ ID NO: 4703188 - DNA, 25 bp, Homo sapien
tgttccagatgctgatcccactcca

SEQ ID NO: 4703189 - DNA, 25 bp, Homo sapien
cactccaagtctagaacatcattca

SEQ ID NO: 4703190 - DNA, 25 bp, Homo sapien
ggaagtctgtttgtaaaggcggagc

SEQ ID NO: 4703191 - DNA, 25 bp, Homo sapien
gagctgctgaagactatccaccagg

SEQ ID NO: 4703192 - DNA, 25 bp, Homo sapien
gtgttaaacagtgtctctcgctctg

SEQ ID NO: 4703193 - DNA, 25 bp, Homo sapien
ggttgatgatttcccgattgttggc

SEQ ID NO: 4703194 - DNA, 25 bp, Homo sapien
tgggaaggaacagccgaggacaggc

SEQ ID NO: 4703195 - DNA, 25 bp, Homo sapien
atttggtgtgagattctatggtggt

SEQ ID NO: 4703196 - DNA, 25 bp, Homo sapien
gagattctatggtggttttcaacaa

SEQ ID NO: 4703197 - DNA, 25 bp, Homo sapien
ggtgtgagattctatggtggttttc

SEQ ID NO: 4703198 - DNA, 25 bp, Homo sapien
aggatttggtgtgagattctatggt

SEQ ID NO: 4703199 - DNA, 25 bp, Homo sapien
cagtggatctcactggtggggtctt

SEQ ID NO: 4703200 - DNA, 25 bp, Homo sapien
gcctgtttcatgggggacagtttgg

SEQ ID NO: 4703201 - DNA, 25 bp, Homo sapien
tgtgcctgtttcatgggggacagtt

SEQ ID NO: 4703202 - DNA, 25 bp, Homo sapien
tgcctgtttcatgggggacagtttg

SEQ ID NO: 4703203 - DNA, 25 bp, Homo sapien
taaagcagaggctaggatccagctc

SEQ ID NO: 4703204 - DNA, 25 bp, Homo sapien
cataaaacttgaggactgcagaaaa

SEQ ID NO: 4703205 - DNA, 25 bp, Homo sapien
caaacccttgtgaatcagtgccata

SEQ ID NO: 4703206 - DNA, 25 bp, Homo sapien
tatcactatgtacaggcccagttac

SEQ ID NO: 4703207 - DNA, 25 bp, Homo sapien
ctcaaagcaagcccaaaagctaagt

SEQ ID NO: 4703208 - DNA, 25 bp, Homo sapien
actcaaagcaagcccaaaagctaag

SEQ ID NO: 4703209 - DNA, 25 bp, Homo sapien
acagaaaggctgatcgagacaggct

SEQ ID NO: 4703210 - DNA, 25 bp, Homo sapien
gagacagaaaggctgatcgagacag

SEQ ID NO: 4703211 - DNA, 25 bp, Homo sapien
agaaaggctgatcgagacaggctgg

SEQ ID NO: 4703212 - DNA, 25 bp, Homo sapien
gacagaaaggctgatcgagacaggc

SEQ ID NO: 4703213 - DNA, 25 bp, Homo sapien
gcatcttcactctccagagactggg

SEQ ID NO: 4703214 - DNA, 25 bp, Homo sapien
ctcgtcatctttacaggacgtccgt

SEQ ID NO: 4703215 - DNA, 25 bp, Homo sapien
caggacgtccgtgcatcttcactct

SEQ ID NO: 4703216 - DNA, 25 bp, Homo sapien
tctttacaggacgtccgtgcatctt

SEQ ID NO: 4703217 - DNA, 25 bp, Homo sapien
accatgaaccaggtgagatttagca

SEQ ID NO: 4703218 - DNA, 25 bp, Homo sapien
tagcaaaaggtgctgcatggggcaa

SEQ ID NO: 4703219 - DNA, 25 bp, Homo sapien
cacaccaggtgaagaaccatgaacc

SEQ ID NO: 4703220 - DNA, 25 bp, Homo sapien
gctggatggaaggagtgcgaaccac

SEQ ID NO: 4703221 - DNA, 25 bp, Homo sapien
ggaagtcactttgatgcaaagccct

SEQ ID NO: 4703222 - DNA, 25 bp, Homo sapien
cctgtcagtacagtgagccaatact

SEQ ID NO: 4703223 - DNA, 25 bp, Homo sapien
tactgaaagtgtgggggcacaacac

SEQ ID NO: 4703224 - DNA, 25 bp, Homo sapien
gatgcaaagccctgacactgtactg

SEQ ID NO: 4703225 - DNA, 25 bp, Homo sapien
catctgccgcctgagtgctgctgcg

SEQ ID NO: 4703226 - DNA, 25 bp, Homo sapien
gcattgtgctatcggccccttgagg

SEQ ID NO: 4703227 - DNA, 25 bp, Homo sapien
cacggttttcgtggcaagcattgtg

SEQ ID NO: 4703228 - DNA, 25 bp, Homo sapien
gactaggtgcaccatgtttcacggt

SEQ ID NO: 4703229 - DNA, 25 bp, Homo sapien
gacaagccactgacgaaatgttaag

SEQ ID NO: 4703230 - DNA, 25 bp, Homo sapien
gacttattagcgcttccttctgtaa

SEQ ID NO: 4703231 - DNA, 25 bp, Homo sapien
taactagtgataactgaagtccttg

SEQ ID NO: 4703232 - DNA, 25 bp, Homo sapien
aaagtttgggataatgacaagccac

SEQ ID NO: 4703233 - DNA, 25 bp, Homo sapien
ttcctgcacatttaccacttgaggg

SEQ ID NO: 4703234 - DNA, 25 bp, Homo sapien
cattcttcaacgttgattcagtcaa

SEQ ID NO: 4703235 - DNA, 25 bp, Homo sapien
catttaccacttgagggacattctt

SEQ ID NO: 4703236 - DNA, 25 bp, Homo sapien
gggttattcttcaattcctgcacat

SEQ ID NO: 4703237 - DNA, 25 bp, Homo sapien
ggccctttgctattgatccctccaa

SEQ ID NO: 4703238 - DNA, 25 bp, Homo sapien
catatatgagagagtggaacttatc

SEQ ID NO: 4703239 - DNA, 25 bp, Homo sapien
catctgtcgatggaaatataactgc

SEQ ID NO: 4703240 - DNA, 25 bp, Homo sapien
cttgggcgtttttgacatctgtcga

SEQ ID NO: 4703241 - DNA, 25 bp, Homo sapien
caataccagttttgggtaggataca

SEQ ID NO: 4703242 - DNA, 25 bp, Homo sapien
cagagaaaggcatgactaggtaaaa

SEQ ID NO: 4703243 - DNA, 25 bp, Homo sapien
gtaggatacagatgcatgggacccc

SEQ ID NO: 4703244 - DNA, 25 bp, Homo sapien
tgggaccccaatacaactgatttga

SEQ ID NO: 4703245 - DNA, 25 bp, Homo sapien
ggtcaacactgggtgaggtgttttg

SEQ ID NO: 4703246 - DNA, 25 bp, Homo sapien
agccactggggtcaacactgggtga

SEQ ID NO: 4703247 - DNA, 25 bp, Homo sapien
gtcaacactgggtgaggtgttttgg

SEQ ID NO: 4703248 - DNA, 25 bp, Homo sapien
ggcttggttagcagccactggggtc

SEQ ID NO: 4703249 - DNA, 25 bp, Homo sapien
ctggtgtaggcccagatggcttaag

SEQ ID NO: 4703250 - DNA, 25 bp, Homo sapien
gatgataactgaccggatgctggtg

SEQ ID NO: 4703251 - DNA, 25 bp, Homo sapien
tgtaggcccagatggcttaagggaa

SEQ ID NO: 4703252 - DNA, 25 bp, Homo sapien
agctttgtcaccagatgataactga

SEQ ID NO: 4703253 - DNA, 25 bp, Homo sapien
tctcggaaatttcttgcaagtcaca

SEQ ID NO: 4703254 - DNA, 25 bp, Homo sapien
gaagtgaacacctcgtaacaaaaga

SEQ ID NO: 4703255 - DNA, 25 bp, Homo sapien
cataaagctttaggccccggtcgag

SEQ ID NO: 4703256 - DNA, 25 bp, Homo sapien
aaaaacctctccaatgaagtccttg

SEQ ID NO: 4703257 - DNA, 25 bp, Homo sapien
gaagtcacagctgtttctatcttgg

SEQ ID NO: 4703258 - DNA, 25 bp, Homo sapien
tgaagtcacagctgtttctatcttg

SEQ ID NO: 4703259 - DNA, 25 bp, Homo sapien
aagtcacagctgtttctatcttggc

SEQ ID NO: 4703260 - DNA, 25 bp, Homo sapien
ttgaagtcacagctgtttctatctt

SEQ ID NO: 4703261 - DNA, 25 bp, Homo sapien
aagacggtgttggtgtgattatccc

SEQ ID NO: 4703262 - DNA, 25 bp, Homo sapien
tagaagacggtgttggtgtgattat

SEQ ID NO: 4703263 - DNA, 25 bp, Homo sapien
attagaagacggtgttggtgtgatt

SEQ ID NO: 4703264 - DNA, 25 bp, Homo sapien
gaagacggtgttggtgtgattatcc

SEQ ID NO: 4703265 - DNA, 25 bp, Homo sapien
catgagtaatgctactcaacacaga

SEQ ID NO: 4703266 - DNA, 25 bp, Homo sapien
tgagtaatgctactcaacacagagt

SEQ ID NO: 4703267 - DNA, 25 bp, Homo sapien
acacatgagtaatgctactcaacac

SEQ ID NO: 4703268 - DNA, 25 bp, Homo sapien
gagtaatgctactcaacacagagtc

SEQ ID NO: 4703269 - DNA, 25 bp, Homo sapien
tggatttttaacaacatgcatggga

SEQ ID NO: 4703270 - DNA, 25 bp, Homo sapien
accgcgcccagtctattgatggatt

SEQ ID NO: 4703271 - DNA, 25 bp, Homo sapien
caacatgcatgggatgagtgtgttt

SEQ ID NO: 4703272 - DNA, 25 bp, Homo sapien
ctattgatggatttttaacaacatg

SEQ ID NO: 4703273 - DNA, 25 bp, Homo sapien
gcgtccggctggcttgactctttag

SEQ ID NO: 4703274 - DNA, 25 bp, Homo sapien
tgctagatgcggcaggttctcctgg

SEQ ID NO: 4703275 - DNA, 25 bp, Homo sapien
tcaggaatggcctcataagaaggtt

SEQ ID NO: 4703276 - DNA, 25 bp, Homo sapien
ccaccagatgagaatgcgtccggct

SEQ ID NO: 4703277 - DNA, 25 bp, Homo sapien
aattaaaccctgagggcacgcctga

SEQ ID NO: 4703278 - DNA, 25 bp, Homo sapien
ggttttgtagaatcatctgcttggc

SEQ ID NO: 4703279 - DNA, 25 bp, Homo sapien
tcccagagtctctccagccaaagaa

SEQ ID NO: 4703280 - DNA, 25 bp, Homo sapien
cctgacgtcttggttggctgggtac

SEQ ID NO: 4703281 - DNA, 25 bp, Homo sapien
tacttgatgtttcgacggccacagg

SEQ ID NO: 4703282 - DNA, 25 bp, Homo sapien
ggtggtactgcctccgtcctggcat

SEQ ID NO: 4703283 - DNA, 25 bp, Homo sapien
taacagagtcagaagtttgcggagg

SEQ ID NO: 4703284 - DNA, 25 bp, Homo sapien
tgtgcttctgccagcggacataggc

SEQ ID NO: 4703285 - DNA, 25 bp, Homo sapien
gaagtgacggtaccaaatgctgctg

SEQ ID NO: 4703286 - DNA, 25 bp, Homo sapien
gcaggagcgttgctttggccaaaca

SEQ ID NO: 4703287 - DNA, 25 bp, Homo sapien
gagctactggtacttgaggcggcac

SEQ ID NO: 4703288 - DNA, 25 bp, Homo sapien
tgcccgaaggttgtctgtccaaaga

SEQ ID NO: 4703289 - DNA, 25 bp, Homo sapien
tatgatgacacttggactctcctgc

SEQ ID NO: 4703290 - DNA, 25 bp, Homo sapien
aaaacactggcagggcggtggacta

SEQ ID NO: 4703291 - DNA, 25 bp, Homo sapien
gtaacagatccagccaattaggcca

SEQ ID NO: 4703292 - DNA, 25 bp, Homo sapien
tgagaccacatgtgctccaagctgt

SEQ ID NO: 4703293 - DNA, 25 bp, Homo sapien
caccatgaaatcattgatccttgct

SEQ ID NO: 4703294 - DNA, 25 bp, Homo sapien
ctagagtctattgctgaagaattac

SEQ ID NO: 4703295 - DNA, 25 bp, Homo sapien
atcttgcccaccatgaaatcattga

SEQ ID NO: 4703296 - DNA, 25 bp, Homo sapien
gcttttctcctagagtctattgctg

SEQ ID NO: 4703297 - DNA, 25 bp, Homo sapien
gaccaaacacagaaccagtattact

SEQ ID NO: 4703298 - DNA, 25 bp, Homo sapien
accaaacacagaaccagtattacta

SEQ ID NO: 4703299 - DNA, 25 bp, Homo sapien
tgaccaaacacagaaccagtattac

SEQ ID NO: 4703300 - DNA, 25 bp, Homo sapien
ccactttattaactgccggactaat

SEQ ID NO: 4703301 - DNA, 25 bp, Homo sapien
taaatgctgtcagggcacaactggc

SEQ ID NO: 4703302 - DNA, 25 bp, Homo sapien
gactaggacagagcctatcttcaaa

SEQ ID NO: 4703303 - DNA, 25 bp, Homo sapien
gaatgacttagtcctctactaccag

SEQ ID NO: 4703304 - DNA, 25 bp, Homo sapien
gcattctcgtttggcacttgttggg

SEQ ID NO: 4703305 - DNA, 25 bp, Homo sapien
tcttcagtatcactaggacaggtct

SEQ ID NO: 4703306 - DNA, 25 bp, Homo sapien
gaaatgctaggtggccagttctggc

SEQ ID NO: 4703307 - DNA, 25 bp, Homo sapien
gcctatggcaccctagaagataatc

SEQ ID NO: 4703308 - DNA, 25 bp, Homo sapien
gcaggctactaggttttgaggcaat

SEQ ID NO: 4703309 - DNA, 25 bp, Homo sapien
tgaagacaagccatccctactaagt

SEQ ID NO: 4703310 - DNA, 25 bp, Homo sapien
gaagttatgacctacagaatccaag

SEQ ID NO: 4703311 - DNA, 25 bp, Homo sapien
taaataattccaatactgccagagt

SEQ ID NO: 4703312 - DNA, 25 bp, Homo sapien
tctggaaaccagttcaacaaggctt

SEQ ID NO: 4703313 - DNA, 25 bp, Homo sapien
cagtgctcacacctatgatgggctc

SEQ ID NO: 4703314 - DNA, 25 bp, Homo sapien
tcttctagagcaagaggcggcctct

SEQ ID NO: 4703315 - DNA, 25 bp, Homo sapien
cctcttgaacctggatgggactttg

SEQ ID NO: 4703316 - DNA, 25 bp, Homo sapien
atatcccatggaatgtatataccac

SEQ ID NO: 4703317 - DNA, 25 bp, Homo sapien
ttattgttgcacttacaagtctttc

SEQ ID NO: 4703318 - DNA, 25 bp, Homo sapien
agagctggaggatatgtatgctgaa

SEQ ID NO: 4703319 - DNA, 25 bp, Homo sapien
taaattattgttgcacttacaagtc

SEQ ID NO: 4703320 - DNA, 25 bp, Homo sapien
aatttttatatctgactgaggccag

SEQ ID NO: 4703321 - DNA, 25 bp, Homo sapien
cactaagggttgatctggaacagag

SEQ ID NO: 4703322 - DNA, 25 bp, Homo sapien
gaatgactccctccatctaatggag

SEQ ID NO: 4703323 - DNA, 25 bp, Homo sapien
ttttcctagagagtgagagctccca

SEQ ID NO: 4703324 - DNA, 25 bp, Homo sapien
tagcaagcaatctcaatgtgtggcc

SEQ ID NO: 4703325 - DNA, 25 bp, Homo sapien
gatggcattcacttggaagctgtgc

SEQ ID NO: 4703326 - DNA, 25 bp, Homo sapien
gataaacgtccatgacattttcacg

SEQ ID NO: 4703327 - DNA, 25 bp, Homo sapien
gatcatgggaaacgccacaggacaa

SEQ ID NO: 4703328 - DNA, 25 bp, Homo sapien
cagaaaccagatcatgggaaacgcc

SEQ ID NO: 4703329 - DNA, 25 bp, Homo sapien
atccctcatctacaaccgtgtaaga

SEQ ID NO: 4703330 - DNA, 25 bp, Homo sapien
ccctcatctacaaccgtgtaagaca

SEQ ID NO: 4703331 - DNA, 25 bp, Homo sapien
cccaatcctaagaggcctggggtgc

SEQ ID NO: 4703332 - DNA, 25 bp, Homo sapien
tccctcatctacaaccgtgtaagac

SEQ ID NO: 4703333 - DNA, 25 bp, Homo sapien
gacccaaacacgctaccactggaag

SEQ ID NO: 4703334 - DNA, 25 bp, Homo sapien
ccccactggccgagctgaatgggtt

SEQ ID NO: 4703335 - DNA, 25 bp, Homo sapien
tgtttccagacccaaacacgctacc

SEQ ID NO: 4703336 - DNA, 25 bp, Homo sapien
tggccgagctgaatgggtttttgtt

SEQ ID NO: 4703337 - DNA, 25 bp, Homo sapien
tcaagttcagcatgcttatggctgc

SEQ ID NO: 4703338 - DNA, 25 bp, Homo sapien
ttcagcatgcttatggctgcctgag

SEQ ID NO: 4703339 - DNA, 25 bp, Homo sapien
agttcagcatgcttatggctgcctg

SEQ ID NO: 4703340 - DNA, 25 bp, Homo sapien
gtcaagttcagcatgcttatggctg

SEQ ID NO: 4703341 - DNA, 25 bp, Homo sapien
ttctgctctccaaacgacgagctgg

SEQ ID NO: 4703342 - DNA, 25 bp, Homo sapien
tggcaaatccaccaaatgtcttggc

SEQ ID NO: 4703343 - DNA, 25 bp, Homo sapien
aaacccaaagccttgggatgccaca

SEQ ID NO: 4703344 - DNA, 25 bp, Homo sapien
ccactgtttccaaataggttagagg

SEQ ID NO: 4703345 - DNA, 25 bp, Homo sapien
cctagagatgtctccttccagatat

SEQ ID NO: 4703346 - DNA, 25 bp, Homo sapien
gtcctctccccggatgacctccagc

SEQ ID NO: 4703347 - DNA, 25 bp, Homo sapien
gacctccagcaggataattttataa

SEQ ID NO: 4703348 - DNA, 25 bp, Homo sapien
tccccggatgacctccagcaggata

SEQ ID NO: 4703349 - DNA, 25 bp, Homo sapien
ctcctgtcctctccccggatgacct

SEQ ID NO: 4703350 - DNA, 25 bp, Homo sapien
atggtgggcagcaaggccatcttca

SEQ ID NO: 4703351 - DNA, 25 bp, Homo sapien
caaggccatcttcagtccatcccac

SEQ ID NO: 4703352 - DNA, 25 bp, Homo sapien
agcaaggccatcttcagtccatccc

SEQ ID NO: 4703353 - DNA, 25 bp, Homo sapien
ggcagcaaggccatcttcagtccat

SEQ ID NO: 4703354 - DNA, 25 bp, Homo sapien
gtaatcacaacacaagcttctgcca

SEQ ID NO: 4703355 - DNA, 25 bp, Homo sapien
gctcgtgtttgggttaacattccgc

SEQ ID NO: 4703356 - DNA, 25 bp, Homo sapien
tggtaggctgcacaactgagaagat

SEQ ID NO: 4703357 - DNA, 25 bp, Homo sapien
gaagatacttttttgctaaggctcg

SEQ ID NO: 4703358 - DNA, 25 bp, Homo sapien
gagctattcctgatgcgggttccca

SEQ ID NO: 4703359 - DNA, 25 bp, Homo sapien
agacaagggtcaggtcacgcacagg

SEQ ID NO: 4703360 - DNA, 25 bp, Homo sapien
taactgggagcaccctctaaaggga

SEQ ID NO: 4703361 - DNA, 25 bp, Homo sapien
gaggacagccctagagttcagatgc

SEQ ID NO: 4703362 - DNA, 25 bp, Homo sapien
tgagcaaaacagaggcaaacaaaca

SEQ ID NO: 4703363 - DNA, 25 bp, Homo sapien
ggaagagaagacattgagcaatgag

SEQ ID NO: 4703364 - DNA, 25 bp, Homo sapien
aaagggaaaagaggatgttagcaat

SEQ ID NO: 4703365 - DNA, 25 bp, Homo sapien
caaacaaacagaaatagggagaaag

SEQ ID NO: 4703366 - DNA, 25 bp, Homo sapien
ggctgaaccgaatgctggcacccct

SEQ ID NO: 4703367 - DNA, 25 bp, Homo sapien
ccgtcgagcccagagggcttgtaaa

SEQ ID NO: 4703368 - DNA, 25 bp, Homo sapien
tttgcctcccgtcgagcccagaggg

SEQ ID NO: 4703369 - DNA, 25 bp, Homo sapien
gcagtgccctctccgaacactttgc

SEQ ID NO: 4703370 - DNA, 25 bp, Homo sapien
agtacaggcccctagtgctttttgg

SEQ ID NO: 4703371 - DNA, 25 bp, Homo sapien
gagggagttgttcacaaatttcaag

SEQ ID NO: 4703372 - DNA, 25 bp, Homo sapien
ttcttttcagagcaagagtacaggc

SEQ ID NO: 4703373 - DNA, 25 bp, Homo sapien
ctggagaggtacaggaatccttgag

SEQ ID NO: 4703374 - DNA, 25 bp, Homo sapien
tacaaagcagtagttaaggcagggc

SEQ ID NO: 4703375 - DNA, 25 bp, Homo sapien
cgggaggacctgtgcaactgaatac

SEQ ID NO: 4703376 - DNA, 25 bp, Homo sapien
cacacgaggcaatgagagcagcttc

SEQ ID NO: 4703377 - DNA, 25 bp, Homo sapien
caatcgggatttgtgtgagagccgc

SEQ ID NO: 4703378 - DNA, 25 bp, Homo sapien
acaaaggtggccaagggatctgctc

SEQ ID NO: 4703379 - DNA, 25 bp, Homo sapien
tcattggactttctcccaggagcgg

SEQ ID NO: 4703380 - DNA, 25 bp, Homo sapien
ccttcagggtcggagacaggctcat

SEQ ID NO: 4703381 - DNA, 25 bp, Homo sapien
ggtcaaggctctttccatacaaagg

SEQ ID NO: 4703382 - DNA, 25 bp, Homo sapien
cactcatgatccagggtgacaggct

SEQ ID NO: 4703383 - DNA, 25 bp, Homo sapien
cattggaacaccagggcatttggga

SEQ ID NO: 4703384 - DNA, 25 bp, Homo sapien
cactgtgtgacctatcagagcccct

SEQ ID NO: 4703385 - DNA, 25 bp, Homo sapien
cagagccccttgaattgtttgcaga

SEQ ID NO: 4703386 - DNA, 25 bp, Homo sapien
tctgttgggacagtgatccgaaagt

SEQ ID NO: 4703387 - DNA, 25 bp, Homo sapien
attctgactcgcgagcgtgccgaag

SEQ ID NO: 4703388 - DNA, 25 bp, Homo sapien
cgtgccgaaggatgtggtgttgctg

SEQ ID NO: 4703389 - DNA, 25 bp, Homo sapien
accagaagtctgttgggacagtgat

SEQ ID NO: 4703390 - DNA, 25 bp, Homo sapien
cctgtgcctgatccaaaaccagaga

SEQ ID NO: 4703391 - DNA, 25 bp, Homo sapien
tgtgcctgatccaaaaccagagaat

SEQ ID NO: 4703392 - DNA, 25 bp, Homo sapien
gtgcctgatccaaaaccagagaatc

SEQ ID NO: 4703393 - DNA, 25 bp, Homo sapien
ctcctgtgcctgatccaaaaccaga

SEQ ID NO: 4703394 - DNA, 25 bp, Homo sapien
gaaccacgtgcccagtcagctttta

SEQ ID NO: 4703395 - DNA, 25 bp, Homo sapien
gtgaaccacgtgcccagtcagcttt

SEQ ID NO: 4703396 - DNA, 25 bp, Homo sapien
aaatactaaacagactggtcaggta

SEQ ID NO: 4703397 - DNA, 25 bp, Homo sapien
ctaaacagactggtcaggtaaaaca

SEQ ID NO: 4703398 - DNA, 25 bp, Homo sapien
tctgtgccttgtcagtttactgcaa

SEQ ID NO: 4703399 - DNA, 25 bp, Homo sapien
tggattctaggcctggttctactgc

SEQ ID NO: 4703400 - DNA, 25 bp, Homo sapien
tgtaatgatacctaaattctgtgcc

SEQ ID NO: 4703401 - DNA, 25 bp, Homo sapien
ccaaggcctagtaagaccattatta

SEQ ID NO: 4703402 - DNA, 25 bp, Homo sapien
ccatgctaagtgtctgccctcctct

SEQ ID NO: 4703403 - DNA, 25 bp, Homo sapien
cacgcatccactcgaaagacaaagg

SEQ ID NO: 4703404 - DNA, 25 bp, Homo sapien
ttgtgggaagccctccgtgcctcca

SEQ ID NO: 4703405 - DNA, 25 bp, Homo sapien
taagagtgaagttaaagcacgcatc

SEQ ID NO: 4703406 - DNA, 25 bp, Homo sapien
gagttatttgacccaaagctgaacc

SEQ ID NO: 4703407 - DNA, 25 bp, Homo sapien
caaatccagcaagatccacacactt

SEQ ID NO: 4703408 - DNA, 25 bp, Homo sapien
acaaatccagcaagatccacacact

SEQ ID NO: 4703409 - DNA, 25 bp, Homo sapien
gcttttaattaaggtgagactcaaa

SEQ ID NO: 4703410 - DNA, 25 bp, Homo sapien
ttaatgcttttaattaaggtgagac

SEQ ID NO: 4703411 - DNA, 25 bp, Homo sapien
tttctctttgaaccacgcctcttaa

SEQ ID NO: 4703412 - DNA, 25 bp, Homo sapien
gaaccacgcctcttaagaaggcgag

SEQ ID NO: 4703413 - DNA, 25 bp, Homo sapien
ggcacctcctgccatattgctacag

SEQ ID NO: 4703414 - DNA, 25 bp, Homo sapien
ctgccatattgctacagagaagagc

SEQ ID NO: 4703415 - DNA, 25 bp, Homo sapien
ccaggctagacggtagtggtaccat

SEQ ID NO: 4703416 - DNA, 25 bp, Homo sapien
gctaagactgaattttaacgccatg

SEQ ID NO: 4703417 - DNA, 25 bp, Homo sapien
aacgccatgaaattttacacagaag

SEQ ID NO: 4703418 - DNA, 25 bp, Homo sapien
agcacagagggtggatcaacacatg

SEQ ID NO: 4703419 - DNA, 25 bp, Homo sapien
agcttcgccagccaccaaaaccctg

SEQ ID NO: 4703420 - DNA, 25 bp, Homo sapien
tcagcttcgccagccaccaaaaccc

SEQ ID NO: 4703421 - DNA, 25 bp, Homo sapien
cgccagccaccaaaaccctggacag

SEQ ID NO: 4703422 - DNA, 25 bp, Homo sapien
ccagccaccaaaaccctggacagac

SEQ ID NO: 4703423 - DNA, 25 bp, Homo sapien
tgcggttggtcccagggatcgaaag

SEQ ID NO: 4703424 - DNA, 25 bp, Homo sapien
gaggatgcggttggtcccagggatc

SEQ ID NO: 4703425 - DNA, 25 bp, Homo sapien
gatgcggttggtcccagggatcgaa

SEQ ID NO: 4703426 - DNA, 25 bp, Homo sapien
ctgaggatgcggttggtcccaggga

SEQ ID NO: 4703427 - DNA, 25 bp, Homo sapien
ctgctccagcatttctcggggaaga

SEQ ID NO: 4703428 - DNA, 25 bp, Homo sapien
tgatggcaacgtcggtctgaacagc

SEQ ID NO: 4703429 - DNA, 25 bp, Homo sapien
tatgtgttttgatggcaacgtcggt

SEQ ID NO: 4703430 - DNA, 25 bp, Homo sapien
ggtgtatgtgttttgatggcaacgt

SEQ ID NO: 4703431 - DNA, 25 bp, Homo sapien
tgttttgatggcaacgtcggtctga

SEQ ID NO: 4703432 - DNA, 25 bp, Homo sapien
gagggaaaacccaacatgaaatata

SEQ ID NO: 4703433 - DNA, 25 bp, Homo sapien
cagactgtttaatagtgggagggaa

SEQ ID NO: 4703434 - DNA, 25 bp, Homo sapien
cggaaacagactgtttaatagtggg

SEQ ID NO: 4703435 - DNA, 25 bp, Homo sapien
aacagactgtttaatagtgggaggg

SEQ ID NO: 4703436 - DNA, 25 bp, Homo sapien
tggatggtcctgatacacaatggct

SEQ ID NO: 4703437 - DNA, 25 bp, Homo sapien
tgagaccacggcacattcgatgctg

SEQ ID NO: 4703438 - DNA, 25 bp, Homo sapien
taggtgtggctaccaatgtcactgc

SEQ ID NO: 4703439 - DNA, 25 bp, Homo sapien
tctctggagtaggacacatggcacc

SEQ ID NO: 4703440 - DNA, 25 bp, Homo sapien
tcgaattctactttacaactgaggg

SEQ ID NO: 4703441 - DNA, 25 bp, Homo sapien
taatgccagagacctgacctagaag

SEQ ID NO: 4703442 - DNA, 25 bp, Homo sapien
gctgccacagagaacgcaaagctga

SEQ ID NO: 4703443 - DNA, 25 bp, Homo sapien
ccaagtgcctcgttctggttacaga

SEQ ID NO: 4703444 - DNA, 25 bp, Homo sapien
taaacaactaagtggcagtccagaa

SEQ ID NO: 4703445 - DNA, 25 bp, Homo sapien
aaatctccagcgaaagcctgagcgc

SEQ ID NO: 4703446 - DNA, 25 bp, Homo sapien
aaacacagattcaagggcctagcct

SEQ ID NO: 4703447 - DNA, 25 bp, Homo sapien
ccctgggtgggtatttatggctact

SEQ ID NO: 4703448 - DNA, 25 bp, Homo sapien
ttcctgaagtgagtgctgccggtca

SEQ ID NO: 4703449 - DNA, 25 bp, Homo sapien
acggcacctgcctcattttcacggg

SEQ ID NO: 4703450 - DNA, 25 bp, Homo sapien
caggctggacctttgcgggtccccg

SEQ ID NO: 4703451 - DNA, 25 bp, Homo sapien
tcagctgtgggatcagggaagactt

SEQ ID NO: 4703452 - DNA, 25 bp, Homo sapien
tatccaagggatgtgtagtgacgtt

SEQ ID NO: 4703453 - DNA, 25 bp, Homo sapien
caagagttttccttacgagaacact

SEQ ID NO: 4703454 - DNA, 25 bp, Homo sapien
cattccttgacattggtgatctata

SEQ ID NO: 4703455 - DNA, 25 bp, Homo sapien
tttaataggcatagggatactcggg

SEQ ID NO: 4703456 - DNA, 25 bp, Homo sapien
cgtgttaaccgcaatcactgtcatt

SEQ ID NO: 4703457 - DNA, 25 bp, Homo sapien
gtttgatccgtgttaaccgcaatca

SEQ ID NO: 4703458 - DNA, 25 bp, Homo sapien
aggtttgatccgtgttaaccgcaat

SEQ ID NO: 4703459 - DNA, 25 bp, Homo sapien
gatccgtgttaaccgcaatcactgt

SEQ ID NO: 4703460 - DNA, 25 bp, Homo sapien
cccgggcccacttggtataaatgag

SEQ ID NO: 4703461 - DNA, 25 bp, Homo sapien
gcccacttggtataaatgaggcaga

SEQ ID NO: 4703462 - DNA, 25 bp, Homo sapien
gggcccacttggtataaatgaggca

SEQ ID NO: 4703463 - DNA, 25 bp, Homo sapien
aatgaggcagatagatgaggtgggt

SEQ ID NO: 4703464 - DNA, 25 bp, Homo sapien
tttgaggctgtgcagcgccgtggcc

SEQ ID NO: 4703465 - DNA, 25 bp, Homo sapien
tgaggctgtgcagcgccgtggccgg

SEQ ID NO: 4703466 - DNA, 25 bp, Homo sapien
ttgaggctgtgcagcgccgtggccg

SEQ ID NO: 4703467 - DNA, 25 bp, Homo sapien
caggacggtgcttcctcttgcagct

SEQ ID NO: 4703468 - DNA, 25 bp, Homo sapien
caggcggagacggtgaaggccagaa

SEQ ID NO: 4703469 - DNA, 25 bp, Homo sapien
aaggcagccggccattgacgagtga

SEQ ID NO: 4703470 - DNA, 25 bp, Homo sapien
cccaggacggtgcttcctcttgcag

SEQ ID NO: 4703471 - DNA, 25 bp, Homo sapien
gagcgagcacccgtggatgcctcac

SEQ ID NO: 4703472 - DNA, 25 bp, Homo sapien
tctctgggagcgagcacccgtggat

SEQ ID NO: 4703473 - DNA, 25 bp, Homo sapien
ctccatctctgggagcgagcacccg

SEQ ID NO: 4703474 - DNA, 25 bp, Homo sapien
ccatctctgggagcgagcacccgtg

SEQ ID NO: 4703475 - DNA, 25 bp, Homo sapien
tcctgttgctaaggttcctcggcat

SEQ ID NO: 4703476 - DNA, 25 bp, Homo sapien
tgtcctgttgctaaggttcctcggc

SEQ ID NO: 4703477 - DNA, 25 bp, Homo sapien
agctgtcctgttgctaaggttcctc

SEQ ID NO: 4703478 - DNA, 25 bp, Homo sapien
ccccagttctaccagactgccctca

SEQ ID NO: 4703479 - DNA, 25 bp, Homo sapien
gccagggccccgattcttcttatgt

SEQ ID NO: 4703480 - DNA, 25 bp, Homo sapien
gaagaagggctaggaacaccctgga

SEQ ID NO: 4703481 - DNA, 25 bp, Homo sapien
cagcctccttgctcatgttggagca

SEQ ID NO: 4703482 - DNA, 25 bp, Homo sapien
taagaaccgtccttggtcgtggaga

SEQ ID NO: 4703483 - DNA, 25 bp, Homo sapien
gctcctttgtccacgggctattgcg

SEQ ID NO: 4703484 - DNA, 25 bp, Homo sapien
ttaatgaccgtttagccactgccgt

SEQ ID NO: 4703485 - DNA, 25 bp, Homo sapien
tgccaccccgaaaggcagtagcctt

SEQ ID NO: 4703486 - DNA, 25 bp, Homo sapien
tgcagatgagccacttgtaagagtc

SEQ ID NO: 4703487 - DNA, 25 bp, Homo sapien
tcagagcgctcctgtatgccatggg

SEQ ID NO: 4703488 - DNA, 25 bp, Homo sapien
tattcagagcatcggaggcaaagcc

SEQ ID NO: 4703489 - DNA, 25 bp, Homo sapien
caggccgcggtagtgatatatgcaa

SEQ ID NO: 4703490 - DNA, 25 bp, Homo sapien
tatttatgagtctgccggcgctcgc

SEQ ID NO: 4703491 - DNA, 25 bp, Homo sapien
ggcggccgcggcgaagcaggcggcg

SEQ ID NO: 4703492 - DNA, 25 bp, Homo sapien
ggccgcggcgaagcaggcggcggcg

SEQ ID NO: 4703493 - DNA, 25 bp, Homo sapien
gcggccggagcgcagccccgggacc

SEQ ID NO: 4703494 - DNA, 25 bp, Homo sapien
tcccaccaggtcctcggcggccgcg

SEQ ID NO: 4703495 - DNA, 25 bp, Homo sapien
ccgtccgggacggtatcagcggaga

SEQ ID NO: 4703496 - DNA, 25 bp, Homo sapien
cggtatcagcggagatgtcacgggc

SEQ ID NO: 4703497 - DNA, 25 bp, Homo sapien
tgtcacgggcggctattattcgctg

SEQ ID NO: 4703498 - DNA, 25 bp, Homo sapien
tattattcgctggtgcgcgcggtcg

SEQ ID NO: 4703499 - DNA, 25 bp, Homo sapien
aggatggccccaggttcaaaccctg

SEQ ID NO: 4703500 - DNA, 25 bp, Homo sapien
cctgcccagcagtagttaagacata

SEQ ID NO: 4703501 - DNA, 25 bp, Homo sapien
gctgtgtcagcatttcgtctggcta

SEQ ID NO: 4703502 - DNA, 25 bp, Homo sapien
ggaccacagggaactgatctgctca

SEQ ID NO: 4703503 - DNA, 25 bp, Homo sapien
ttccttttgagtgcccgcttcagaa

SEQ ID NO: 4703504 - DNA, 25 bp, Homo sapien
tgacaaacgaggcacagccgtctct

SEQ ID NO: 4703505 - DNA, 25 bp, Homo sapien
ggcacagccgtctcttccttttgag

SEQ ID NO: 4703506 - DNA, 25 bp, Homo sapien
catttgacaaacgaggcacagccgt

SEQ ID NO: 4703507 - DNA, 25 bp, Homo sapien
gcaccagatggagtgaacgacgtca

SEQ ID NO: 4703508 - DNA, 25 bp, Homo sapien
cctggaacttcgcaaaggacgggag

SEQ ID NO: 4703509 - DNA, 25 bp, Homo sapien
taaatagtttccgagcgcctggcag

SEQ ID NO: 4703510 - DNA, 25 bp, Homo sapien
tgagctctgatttccaccggaggga

SEQ ID NO: 4703511 - DNA, 25 bp, Homo sapien
ctcgctcaccccgagaaggccgatg

SEQ ID NO: 4703512 - DNA, 25 bp, Homo sapien
ggtgacctcgctcaccccgagaagg

SEQ ID NO: 4703513 - DNA, 25 bp, Homo sapien
cccgagaaggccgatgccagcccgg

SEQ ID NO: 4703514 - DNA, 25 bp, Homo sapien
tcaccccgagaaggccgatgccagc

SEQ ID NO: 4703515 - DNA, 25 bp, Homo sapien
cgtggcccgtgatgccgatgagctt

SEQ ID NO: 4703516 - DNA, 25 bp, Homo sapien
gaactcagcccggttgaggacgttg

SEQ ID NO: 4703517 - DNA, 25 bp, Homo sapien
catacagatatcgatggccagcagg

SEQ ID NO: 4703518 - DNA, 25 bp, Homo sapien
gagcagattcatgagcacctcctgg

SEQ ID NO: 4703519 - DNA, 25 bp, Homo sapien
gggcctgacagtgagtggcgggcgg

SEQ ID NO: 4703520 - DNA, 25 bp, Homo sapien
gcctgacagtgagtggcgggcggca

SEQ ID NO: 4703521 - DNA, 25 bp, Homo sapien
tcccgaggggcctgacagtgagtgg

SEQ ID NO: 4703522 - DNA, 25 bp, Homo sapien
ctgacagtgagtggcgggcggcagg

SEQ ID NO: 4703523 - DNA, 25 bp, Homo sapien
ctgcaagacattggtggcaaagact

SEQ ID NO: 4703524 - DNA, 25 bp, Homo sapien
caagacattggtggcaaagactttg

SEQ ID NO: 4703525 - DNA, 25 bp, Homo sapien
gcaagacattggtggcaaagacttt

SEQ ID NO: 4703526 - DNA, 25 bp, Homo sapien
gacattggtggcaaagactttgcaa

SEQ ID NO: 4703527 - DNA, 25 bp, Homo sapien
ggaatggcttgcctccacatgggcc

SEQ ID NO: 4703528 - DNA, 25 bp, Homo sapien
ggtggagggaatggcttgcctccac

SEQ ID NO: 4703529 - DNA, 25 bp, Homo sapien
gagggaatggcttgcctccacatgg

SEQ ID NO: 4703530 - DNA, 25 bp, Homo sapien
tggagggaatggcttgcctccacat

SEQ ID NO: 4703531 - DNA, 25 bp, Homo sapien
cgggcctggcgtggagggtggaagc

SEQ ID NO: 4703532 - DNA, 25 bp, Homo sapien
acaaggaaatcgatgcgggcctggc

SEQ ID NO: 4703533 - DNA, 25 bp, Homo sapien
gaaagacaaggaaatcgatgcgggc

SEQ ID NO: 4703534 - DNA, 25 bp, Homo sapien
tggccacaccgggaaagacaaggaa

SEQ ID NO: 4703535 - DNA, 25 bp, Homo sapien
actgagaccccttgttaatgtttgc

SEQ ID NO: 4703536 - DNA, 25 bp, Homo sapien
gatgttctccgtggtccaacccaat

SEQ ID NO: 4703537 - DNA, 25 bp, Homo sapien
caatgcccttttggaactgagaccc

SEQ ID NO: 4703538 - DNA, 25 bp, Homo sapien
gttaatgtttgccttgcctgagacc

SEQ ID NO: 4703539 - DNA, 25 bp, Homo sapien
ccagggaaccagagtgctggaggct

SEQ ID NO: 4703540 - DNA, 25 bp, Homo sapien
gaaccagagtgctggaggctcccag

SEQ ID NO: 4703541 - DNA, 25 bp, Homo sapien
gggaaccagagtgctggaggctccc

SEQ ID NO: 4703542 - DNA, 25 bp, Homo sapien
cagggaaccagagtgctggaggctc

SEQ ID NO: 4703543 - DNA, 25 bp, Homo sapien
ttgtctggcccaggttccaagacct

SEQ ID NO: 4703544 - DNA, 25 bp, Homo sapien
cagggtcaaaattgtctggcccagg

SEQ ID NO: 4703545 - DNA, 25 bp, Homo sapien
cctcaagacaagtaagagaggccag

SEQ ID NO: 4703546 - DNA, 25 bp, Homo sapien
tccaccacctcaagacaagtaagag

SEQ ID NO: 4703547 - DNA, 25 bp, Homo sapien
gggggttaaatctgaaggctctgga

SEQ ID NO: 4703548 - DNA, 25 bp, Homo sapien
cgagggaaggcagttcatggggagg

SEQ ID NO: 4703549 - DNA, 25 bp, Homo sapien
ttggcatcccttcgccccatgaagc

SEQ ID NO: 4703550 - DNA, 25 bp, Homo sapien
ggaagccagcttagaggggccagct

SEQ ID NO: 4703551 - DNA, 25 bp, Homo sapien
cgtgcccggcctttggagcatagat

SEQ ID NO: 4703552 - DNA, 25 bp, Homo sapien
gcctttggagcatagatttaataaa

SEQ ID NO: 4703553 - DNA, 25 bp, Homo sapien
gcccggcctttggagcatagattta

SEQ ID NO: 4703554 - DNA, 25 bp, Homo sapien
ccggcctttggagcatagatttaat

SEQ ID NO: 4703555 - DNA, 25 bp, Homo sapien
agggcaggtacagagtcggcaggga

SEQ ID NO: 4703556 - DNA, 25 bp, Homo sapien
tggcatcagcaggccagacagcacc

SEQ ID NO: 4703557 - DNA, 25 bp, Homo sapien
gtacagagtcggcagggagcccgtg

SEQ ID NO: 4703558 - DNA, 25 bp, Homo sapien
cccagggcaggtacagagtcggcag

SEQ ID NO: 4703559 - DNA, 25 bp, Homo sapien
caccagacggaactggaggtagccg

SEQ ID NO: 4703560 - DNA, 25 bp, Homo sapien
tgacaaagccggagaggacgtccgt

SEQ ID NO: 4703561 - DNA, 25 bp, Homo sapien
tggcggccgatcatcacgcgggaca

SEQ ID NO: 4703562 - DNA, 25 bp, Homo sapien
ggctgaggaagaacttggacaccat

SEQ ID NO: 4703563 - DNA, 25 bp, Homo sapien
gaaagtgctgccctaagctgtcgat

SEQ ID NO: 4703564 - DNA, 25 bp, Homo sapien
cctattaggtcacacggagtccggc

SEQ ID NO: 4703565 - DNA, 25 bp, Homo sapien
tgccaaacacgcttgtctccgggag

SEQ ID NO: 4703566 - DNA, 25 bp, Homo sapien
gatgaccgctaatggcaatggcacc

SEQ ID NO: 4703567 - DNA, 25 bp, Homo sapien
gccatgtcagcacatcgtgtcccag

SEQ ID NO: 4703568 - DNA, 25 bp, Homo sapien
cgggtctgctttgtgctaacggcca

SEQ ID NO: 4703569 - DNA, 25 bp, Homo sapien
gaagagtcagatcccgggtctgctt

SEQ ID NO: 4703570 - DNA, 25 bp, Homo sapien
tgccaccaggggcaacaacgccagg

SEQ ID NO: 4703571 - DNA, 25 bp, Homo sapien
aaatggagcgcgttgagccctgtgt

SEQ ID NO: 4703572 - DNA, 25 bp, Homo sapien
cttcaaatggagcgcgttgagccct

SEQ ID NO: 4703573 - DNA, 25 bp, Homo sapien
gcgcgttgagccctgtgtgtaccag

SEQ ID NO: 4703574 - DNA, 25 bp, Homo sapien
cgttgagccctgtgtgtaccaggca

SEQ ID NO: 4703575 - DNA, 25 bp, Homo sapien
gttccttttgacgttcctagcctca

SEQ ID NO: 4703576 - DNA, 25 bp, Homo sapien
aattgataagatccacctgggccca

SEQ ID NO: 4703577 - DNA, 25 bp, Homo sapien
aggtcctggagggttggctgcctgg

SEQ ID NO: 4703578 - DNA, 25 bp, Homo sapien
gttgagtgaattgataagatccacc

SEQ ID NO: 4703579 - DNA, 25 bp, Homo sapien
aaacgacggctcacctggcgtgggt

SEQ ID NO: 4703580 - DNA, 25 bp, Homo sapien
gcccggcctagacgagcgatcctaa

SEQ ID NO: 4703581 - DNA, 25 bp, Homo sapien
ctagacgagcgatcctaaaagatcc

SEQ ID NO: 4703582 - DNA, 25 bp, Homo sapien
agatccacgcaaagaaacgacggct

SEQ ID NO: 4703583 - DNA, 25 bp, Homo sapien
taaggacagataacatggcgagctc

SEQ ID NO: 4703584 - DNA, 25 bp, Homo sapien
aaatgtgcatgcttggagaaccaat

SEQ ID NO: 4703585 - DNA, 25 bp, Homo sapien
ctgtggcagacaatgaaataaggac

SEQ ID NO: 4703586 - DNA, 25 bp, Homo sapien
ttttataaggtaaaatgtgcatgct

SEQ ID NO: 4703587 - DNA, 25 bp, Homo sapien
cgcccacctaggctgccctaagtgc

SEQ ID NO: 4703588 - DNA, 25 bp, Homo sapien
ccgcccacctaggctgccctaagtg

SEQ ID NO: 4703589 - DNA, 25 bp, Homo sapien
tccgcccacctaggctgccctaagt

SEQ ID NO: 4703590 - DNA, 25 bp, Homo sapien
tcctgcctcagtgtctcgagtacct

SEQ ID NO: 4703591 - DNA, 25 bp, Homo sapien
caccatgcctggctaatttttgaat

SEQ ID NO: 4703592 - DNA, 25 bp, Homo sapien
accaccatgcctggctaatttttga

SEQ ID NO: 4703593 - DNA, 25 bp, Homo sapien
ggattacaggtgcataccaccatgc

SEQ ID NO: 4703594 - DNA, 25 bp, Homo sapien
tggtctggttccgcgggcgcggccg

SEQ ID NO: 4703595 - DNA, 25 bp, Homo sapien
ctggtctggttccgcgggcgcggcc

SEQ ID NO: 4703596 - DNA, 25 bp, Homo sapien
gaaagcagttatcctcagaaggcag

SEQ ID NO: 4703597 - DNA, 25 bp, Homo sapien
taaaggtaacccgatgaggaccaga

SEQ ID NO: 4703598 - DNA, 25 bp, Homo sapien
gagccctaatagatacccaaggcag

SEQ ID NO: 4703599 - DNA, 25 bp, Homo sapien
cactccgggtctactaagttctaga

SEQ ID NO: 4703600 - DNA, 25 bp, Homo sapien
taacagtatagagccagactgggcc

SEQ ID NO: 4703601 - DNA, 25 bp, Homo sapien
taaggcaagggcatgcaatcagcat

SEQ ID NO: 4703602 - DNA, 25 bp, Homo sapien
caaagggacccatgctggaaccagt

SEQ ID NO: 4703603 - DNA, 25 bp, Homo sapien
ccaacaagatggttgcgggaatgcc

SEQ ID NO: 4703604 - DNA, 25 bp, Homo sapien
cttgagataggctttgttctgccag

SEQ ID NO: 4703605 - DNA, 25 bp, Homo sapien
tacaagatgtgaaagaccgccagca

SEQ ID NO: 4703606 - DNA, 25 bp, Homo sapien
ggagtatctattgcctgacaagtca

SEQ ID NO: 4703607 - DNA, 25 bp, Homo sapien
aggaagacggtccagacggaagcca

SEQ ID NO: 4703608 - DNA, 25 bp, Homo sapien
ctaaatgtctacgaatacaggagtc

SEQ ID NO: 4703609 - DNA, 25 bp, Homo sapien
taacatgccgagatgctccctacag

SEQ ID NO: 4703610 - DNA, 25 bp, Homo sapien
tgggagataatcagccacgtggacc

SEQ ID NO: 4703611 - DNA, 25 bp, Homo sapien
gggaaaagagggcaacaataatcta

SEQ ID NO: 4703612 - DNA, 25 bp, Homo sapien
gaaagaatggtaagaatggtggccg

SEQ ID NO: 4703613 - DNA, 25 bp, Homo sapien
gtgaaagtgcttcacgccactcaac

SEQ ID NO: 4703614 - DNA, 25 bp, Homo sapien
ggagttggcatctaatgggaacaga

SEQ ID NO: 4703615 - DNA, 25 bp, Homo sapien
gtgcttcacgccactcaactgtaca

SEQ ID NO: 4703616 - DNA, 25 bp, Homo sapien
aaaactatctacaggctgctgcccg

SEQ ID NO: 4703617 - DNA, 25 bp, Homo sapien
tgttcaccattcaaagggcctcggc

SEQ ID NO: 4703618 - DNA, 25 bp, Homo sapien
ttctgcgtgggctcctataagaccc

SEQ ID NO: 4703619 - DNA, 25 bp, Homo sapien
gaaagcaggctgacccacaagttct

SEQ ID NO: 4703620 - DNA, 25 bp, Homo sapien
caggacactatcctcttcccaagga

SEQ ID NO: 4703621 - DNA, 25 bp, Homo sapien
ttggcccattcagtccaccgacagg

SEQ ID NO: 4703622 - DNA, 25 bp, Homo sapien
aaggacttctgaacacttggcccat

SEQ ID NO: 4703623 - DNA, 25 bp, Homo sapien
gaaaataccacattatgattcagga

SEQ ID NO: 4703624 - DNA, 25 bp, Homo sapien
gaggccatatttatacgtgcactga

SEQ ID NO: 4703625 - DNA, 25 bp, Homo sapien
aaaacctccctacatgaggccatat

SEQ ID NO: 4703626 - DNA, 25 bp, Homo sapien
cacttagtgtggcaggtctgttcac

SEQ ID NO: 4703627 - DNA, 25 bp, Homo sapien
cgtgcactgagcctagaaggataaa

SEQ ID NO: 4703628 - DNA, 25 bp, Homo sapien
gcagttttgccaccgaacaaaggag

SEQ ID NO: 4703629 - DNA, 25 bp, Homo sapien
ctactgcgttcagtttccattggct

SEQ ID NO: 4703630 - DNA, 25 bp, Homo sapien
tacagtcgctagcagttttgccacc

SEQ ID NO: 4703631 - DNA, 25 bp, Homo sapien
caccctactgcgttcagtttccatt

SEQ ID NO: 4703632 - DNA, 25 bp, Homo sapien
agcgaccacagcaaatggcagttct

SEQ ID NO: 4703633 - DNA, 25 bp, Homo sapien
tcagcagatagtggtggtgacacca

SEQ ID NO: 4703634 - DNA, 25 bp, Homo sapien
gcagatagtggtggtgacaccatca

SEQ ID NO: 4703635 - DNA, 25 bp, Homo sapien
ctggctgaactctctgcctccgggg

SEQ ID NO: 4703636 - DNA, 25 bp, Homo sapien
gctggctgaactctctgcctccggg

SEQ ID NO: 4703637 - DNA, 25 bp, Homo sapien
tgatgatccccaggtgtgccaccag

SEQ ID NO: 4703638 - DNA, 25 bp, Homo sapien
ctgatgcaatgctccttggcacaga

SEQ ID NO: 4703639 - DNA, 25 bp, Homo sapien
ccctgatgcaatgctccttggcaca

SEQ ID NO: 4703640 - DNA, 25 bp, Homo sapien
gcaccctgatgcaatgctccttggc

SEQ ID NO: 4703641 - DNA, 25 bp, Homo sapien
ccccaccgcgccagggtcaagtcca

SEQ ID NO: 4703642 - DNA, 25 bp, Homo sapien
gggctcagctatagcacaatccagg

SEQ ID NO: 4703643 - DNA, 25 bp, Homo sapien
aactctccaagaataaacagcctga

SEQ ID NO: 4703644 - DNA, 25 bp, Homo sapien
tgttccctaagagcgaggcactggc

SEQ ID NO: 4703645 - DNA, 25 bp, Homo sapien
aagcccaaatgggtgaggtccctgc

SEQ ID NO: 4703646 - DNA, 25 bp, Homo sapien
caagcattttatttacgccatgcca

SEQ ID NO: 4703647 - DNA, 25 bp, Homo sapien
ctgctttctggccaactgtacagat

SEQ ID NO: 4703648 - DNA, 25 bp, Homo sapien
tacagatgatgatcctggacagctt

SEQ ID NO: 4703649 - DNA, 25 bp, Homo sapien
taagtcagcccaggctcaacagctg

SEQ ID NO: 4703650 - DNA, 25 bp, Homo sapien
gaaatgtcatctagtaaggaaattt

SEQ ID NO: 4703651 - DNA, 25 bp, Homo sapien
ttatacttatcaaacaggctgagag

SEQ ID NO: 4703652 - DNA, 25 bp, Homo sapien
tgaggatctaatcgcgtctactgat

SEQ ID NO: 4703653 - DNA, 25 bp, Homo sapien
catccttgcccttggtaatttgccc

SEQ ID NO: 4703654 - DNA, 25 bp, Homo sapien
gagagtcgagtacttgcttttccca

SEQ ID NO: 4703655 - DNA, 25 bp, Homo sapien
ggagagggacatggaacagacacca

SEQ ID NO: 4703656 - DNA, 25 bp, Homo sapien
gatgcattcagctgttctttcaatc

SEQ ID NO: 4703657 - DNA, 25 bp, Homo sapien
agacaccatgcaaaaaggtcacaga

SEQ ID NO: 4703658 - DNA, 25 bp, Homo sapien
aaagaagcctgatgcattcagctgt

SEQ ID NO: 4703659 - DNA, 25 bp, Homo sapien
aggcggtggcatgcgccgggctgca

SEQ ID NO: 4703660 - DNA, 25 bp, Homo sapien
ccttgggtactatcacgatgttggg

SEQ ID NO: 4703661 - DNA, 25 bp, Homo sapien
gatcctgcttgtttgcccatcccgt

SEQ ID NO: 4703662 - DNA, 25 bp, Homo sapien
gacttcaagcttggcaggtttgcag

SEQ ID NO: 4703663 - DNA, 25 bp, Homo sapien
tggtttcctacatcagcagggaggc

SEQ ID NO: 4703664 - DNA, 25 bp, Homo sapien
tctagctggaaaccacttagggctg

SEQ ID NO: 4703665 - DNA, 25 bp, Homo sapien
caagactagcgctgcagtagccaaa

SEQ ID NO: 4703666 - DNA, 25 bp, Homo sapien
gagtcattgcataagctcctctggg

SEQ ID NO: 4703667 - DNA, 25 bp, Homo sapien
tgagtccccacgttgtgggcccact

SEQ ID NO: 4703668 - DNA, 25 bp, Homo sapien
tagtcgcacttttgtgttctccaaa

SEQ ID NO: 4703669 - DNA, 25 bp, Homo sapien
caagtagtcgcacttttgtgttctc

SEQ ID NO: 4703670 - DNA, 25 bp, Homo sapien
agcttccaagtagtcgcacttttgt

SEQ ID NO: 4703671 - DNA, 25 bp, Homo sapien
catagcatacgaccttagaaatgga

SEQ ID NO: 4703672 - DNA, 25 bp, Homo sapien
taattccatagcatacgaccttaga

SEQ ID NO: 4703673 - DNA, 25 bp, Homo sapien
tagcatacgaccttagaaatggaaa

SEQ ID NO: 4703674 - DNA, 25 bp, Homo sapien
tccatagcatacgaccttagaaatg

SEQ ID NO: 4703675 - DNA, 25 bp, Homo sapien
aatatctgggattacagttatgcag

SEQ ID NO: 4703676 - DNA, 25 bp, Homo sapien
ctcattctgccgcccaggttgcagt

SEQ ID NO: 4703677 - DNA, 25 bp, Homo sapien
attacagttatgcagcaccacgcct

SEQ ID NO: 4703678 - DNA, 25 bp, Homo sapien
gtctcattctgccgcccaggttgca

SEQ ID NO: 4703679 - DNA, 25 bp, Homo sapien
aactagacaggtcataatttaacca

SEQ ID NO: 4703680 - DNA, 25 bp, Homo sapien
caactagacaggtcataatttaacc

SEQ ID NO: 4703681 - DNA, 25 bp, Homo sapien
acacaactagacaggtcataattta

SEQ ID NO: 4703682 - DNA, 25 bp, Homo sapien
cacaactagacaggtcataatttaa

SEQ ID NO: 4703683 - DNA, 25 bp, Homo sapien
tgcggcagcgactccggcggctgag

SEQ ID NO: 4703684 - DNA, 25 bp, Homo sapien
actgattgactgtgtcggtttctgc

SEQ ID NO: 4703685 - DNA, 25 bp, Homo sapien
tttctgcaaacccggctgcggcagc

SEQ ID NO: 4703686 - DNA, 25 bp, Homo sapien
ctgcaaattggagacagatttctgc

SEQ ID NO: 4703687 - DNA, 25 bp, Homo sapien
tcgtgtcctactggctttccattca

SEQ ID NO: 4703688 - DNA, 25 bp, Homo sapien
ccatgactttggtccacctggcact

SEQ ID NO: 4703689 - DNA, 25 bp, Homo sapien
gcccatgactttggtccacctggca

SEQ ID NO: 4703690 - DNA, 25 bp, Homo sapien
accttcgtgtcctactggctttcca

SEQ ID NO: 4703691 - DNA, 25 bp, Homo sapien
gcttcttccgaggtcacaggctgag

SEQ ID NO: 4703692 - DNA, 25 bp, Homo sapien
tcacagatgcatgactctagcacga

SEQ ID NO: 4703693 - DNA, 25 bp, Homo sapien
gagtctatcaattcaggaaaagtcc

SEQ ID NO: 4703694 - DNA, 25 bp, Homo sapien
gagtcatgaaaacacttgtgggcaa

SEQ ID NO: 4703695 - DNA, 25 bp, Homo sapien
gcttttgaagggagtcttgtcacaa

SEQ ID NO: 4703696 - DNA, 25 bp, Homo sapien
agggagtcttgtcacaagggtgctc

SEQ ID NO: 4703697 - DNA, 25 bp, Homo sapien
gtgctggcagatgccacgagggtgc

SEQ ID NO: 4703698 - DNA, 25 bp, Homo sapien
gaaagccgtgttgcctggaagtggg

SEQ ID NO: 4703699 - DNA, 25 bp, Homo sapien
gagagaaggataacagtcggcttga

SEQ ID NO: 4703700 - DNA, 25 bp, Homo sapien
gggagagaaggataacagtcggctt

SEQ ID NO: 4703701 - DNA, 25 bp, Homo sapien
gagaaggataacagtcggcttgagc

SEQ ID NO: 4703702 - DNA, 25 bp, Homo sapien
gaaggataacagtcggcttgagccc

SEQ ID NO: 4703703 - DNA, 25 bp, Homo sapien
cgacagatctaagacgcccttttct

SEQ ID NO: 4703704 - DNA, 25 bp, Homo sapien
cagctgctttcagcgtcggaaattc

SEQ ID NO: 4703705 - DNA, 25 bp, Homo sapien
tccagctgctttcagcgtcggaaat

SEQ ID NO: 4703706 - DNA, 25 bp, Homo sapien
ggtcctggcccatacgacagatcta

SEQ ID NO: 4703707 - DNA, 25 bp, Homo sapien
caaaatccctgagtagaacacgtgg

SEQ ID NO: 4703708 - DNA, 25 bp, Homo sapien
ggagaaatttccagccagtgctaca

SEQ ID NO: 4703709 - DNA, 25 bp, Homo sapien
acttatgacttgaatgggagaggcc

SEQ ID NO: 4703710 - DNA, 25 bp, Homo sapien
tttaagacctgatcaagacccctgg

SEQ ID NO: 4703711 - DNA, 25 bp, Homo sapien
ccttttcggacaggctgagccgggc

SEQ ID NO: 4703712 - DNA, 25 bp, Homo sapien
tgtaggtgggtggtatacatttccc

SEQ ID NO: 4703713 - DNA, 25 bp, Homo sapien
tgctcagagacgtggcagaaattat

SEQ ID NO: 4703714 - DNA, 25 bp, Homo sapien
gaaattatgtgtcgcccaccgccct

SEQ ID NO: 4703715 - DNA, 25 bp, Homo sapien
caatgaacaggatttgctggtaatg

SEQ ID NO: 4703716 - DNA, 25 bp, Homo sapien
tgaacaggatttgctggtaatggct

SEQ ID NO: 4703717 - DNA, 25 bp, Homo sapien
atgaacaggatttgctggtaatggc

SEQ ID NO: 4703718 - DNA, 25 bp, Homo sapien
gaacaggatttgctggtaatggctg

SEQ ID NO: 4703719 - DNA, 25 bp, Homo sapien
ttttctgatgacttcggcgaacaca

SEQ ID NO: 4703720 - DNA, 25 bp, Homo sapien
gttttctgatgacttcggcgaacac

SEQ ID NO: 4703721 - DNA, 25 bp, Homo sapien
tttctgatgacttcggcgaacacat

SEQ ID NO: 4703722 - DNA, 25 bp, Homo sapien
ggttttctgatgacttcggcgaaca

SEQ ID NO: 4703723 - DNA, 25 bp, Homo sapien
aactcgaggttcaaggcggagctga

SEQ ID NO: 4703724 - DNA, 25 bp, Homo sapien
ggaaaagagcctcgttccactgtac

SEQ ID NO: 4703725 - DNA, 25 bp, Homo sapien
gggaaaagagcctcgttccactgta

SEQ ID NO: 4703726 - DNA, 25 bp, Homo sapien
aaggaactcgaggttcaaggcggag

SEQ ID NO: 4703727 - DNA, 25 bp, Homo sapien
cgtcttggtcattcatctggaactg

SEQ ID NO: 4703728 - DNA, 25 bp, Homo sapien
ccgtcttggtcattcatctggaact

SEQ ID NO: 4703729 - DNA, 25 bp, Homo sapien
gtcttggtcattcatctggaactgt

SEQ ID NO: 4703730 - DNA, 25 bp, Homo sapien
gtgggcgagacaatcccagcctgtt

SEQ ID NO: 4703731 - DNA, 25 bp, Homo sapien
gagtgggcgagacaatcccagcctg

SEQ ID NO: 4703732 - DNA, 25 bp, Homo sapien
ggcgagacaatcccagcctgttttc

SEQ ID NO: 4703733 - DNA, 25 bp, Homo sapien
tgggcgagacaatcccagcctgttt

SEQ ID NO: 4703734 - DNA, 25 bp, Homo sapien
gtccagatcgtcaaggcccttcagg

SEQ ID NO: 4703735 - DNA, 25 bp, Homo sapien
tccgcattgataatggtgggccgtg

SEQ ID NO: 4703736 - DNA, 25 bp, Homo sapien
cccttcaggttttccgcattgataa

SEQ ID NO: 4703737 - DNA, 25 bp, Homo sapien
agccatcatcggcatcggcgtccag

SEQ ID NO: 4703738 - DNA, 25 bp, Homo sapien
caaaagaagctaatggcttggccag

SEQ ID NO: 4703739 - DNA, 25 bp, Homo sapien
catccctggtaagtacatatggact

SEQ ID NO: 4703740 - DNA, 25 bp, Homo sapien
gcttggccaggaaggaacctctagt

SEQ ID NO: 4703741 - DNA, 25 bp, Homo sapien
catatggactttggtcctgcccgtc

SEQ ID NO: 4703742 - DNA, 25 bp, Homo sapien
gagagcgcctgccaacaggtattgg

SEQ ID NO: 4703743 - DNA, 25 bp, Homo sapien
ggcagaaagtatccatcacagagga

SEQ ID NO: 4703744 - DNA, 25 bp, Homo sapien
tgtgagttaccacttgccccaggca

SEQ ID NO: 4703745 - DNA, 25 bp, Homo sapien
tattgttgccacaggattaggaggt

SEQ ID NO: 4703746 - DNA, 25 bp, Homo sapien
gcctgccgtccttcacaacttcttc

SEQ ID NO: 4703747 - DNA, 25 bp, Homo sapien
ttggcctgccgtccttcacaacttc

SEQ ID NO: 4703748 - DNA, 25 bp, Homo sapien
ggcctgccgtccttcacaacttctt

SEQ ID NO: 4703749 - DNA, 25 bp, Homo sapien
tgccgtccttcacaacttcttcctc

SEQ ID NO: 4703750 - DNA, 25 bp, Homo sapien
gaagacgtggtctgcataacacacc

SEQ ID NO: 4703751 - DNA, 25 bp, Homo sapien
tgaagaggccgactatgcacaggac

SEQ ID NO: 4703752 - DNA, 25 bp, Homo sapien
gcctttttgggcacgacagccacaa

SEQ ID NO: 4703753 - DNA, 25 bp, Homo sapien
cactcatgctgatagggcaggaacg

SEQ ID NO: 4703754 - DNA, 25 bp, Homo sapien
ggactacaggcacctaccaccatgc

SEQ ID NO: 4703755 - DNA, 25 bp, Homo sapien
ggagtgcagtggcatgtggcgtgat

SEQ ID NO: 4703756 - DNA, 25 bp, Homo sapien
agtgcagtggcatgtggcgtgatct

SEQ ID NO: 4703757 - DNA, 25 bp, Homo sapien
tgcagtggcatgtggcgtgatctcg

SEQ ID NO: 4703758 - DNA, 25 bp, Homo sapien
aagcatttgcaagggcccggtaata

SEQ ID NO: 4703759 - DNA, 25 bp, Homo sapien
tacccacacacgtacgtggcgaggg

SEQ ID NO: 4703760 - DNA, 25 bp, Homo sapien
tatgctctgcacaagccagttgctc

SEQ ID NO: 4703761 - DNA, 25 bp, Homo sapien
tcgtctggacgcctcacaatggaag

SEQ ID NO: 4703762 - DNA, 25 bp, Homo sapien
gcagagctcattgacaactgccgct

SEQ ID NO: 4703763 - DNA, 25 bp, Homo sapien
agggtctggcgcctttcggaccaca

SEQ ID NO: 4703764 - DNA, 25 bp, Homo sapien
tcgagtccgcttagcgtccgcactg

SEQ ID NO: 4703765 - DNA, 25 bp, Homo sapien
acacgggacgcacccactgcttcag

SEQ ID NO: 4703766 - DNA, 25 bp, Homo sapien
aacttactgttcaatcagtttagaa

SEQ ID NO: 4703767 - DNA, 25 bp, Homo sapien
tcctggaagtaactgtagttacctg

SEQ ID NO: 4703768 - DNA, 25 bp, Homo sapien
cagtgtaaagagtctcatcaggttg

SEQ ID NO: 4703769 - DNA, 25 bp, Homo sapien
aggaaacaagtaccacagtgtaaag

SEQ ID NO: 4703770 - DNA, 25 bp, Homo sapien
ctgaatgaacttctgccttggtggg

SEQ ID NO: 4703771 - DNA, 25 bp, Homo sapien
accgcctcggacatctctgactgaa

SEQ ID NO: 4703772 - DNA, 25 bp, Homo sapien
ggactgttgccggaacatgctgccc

SEQ ID NO: 4703773 - DNA, 25 bp, Homo sapien
ggagatgccttctcagcacttggag

SEQ ID NO: 4703774 - DNA, 25 bp, Homo sapien
aaacatccccttgtctcctaacaag

SEQ ID NO: 4703775 - DNA, 25 bp, Homo sapien
ccgagaagctttcagagcctcaaac

SEQ ID NO: 4703776 - DNA, 25 bp, Homo sapien
ttcagagcctcaaacatccccttgt

SEQ ID NO: 4703777 - DNA, 25 bp, Homo sapien
cccttgtctcctaacaagagctgat

SEQ ID NO: 4703778 - DNA, 25 bp, Homo sapien
tgctgttgctctgtgccactgctgg

SEQ ID NO: 4703779 - DNA, 25 bp, Homo sapien
gacactgtgggtgcctcttctggga

SEQ ID NO: 4703780 - DNA, 25 bp, Homo sapien
aatgtggtgggggtctcttgggcag

SEQ ID NO: 4703781 - DNA, 25 bp, Homo sapien
tctgatacttgaactcctgtgcagg

SEQ ID NO: 4703782 - DNA, 25 bp, Homo sapien
ggtggtgtgggtaaaaggtgcgctg

SEQ ID NO: 4703783 - DNA, 25 bp, Homo sapien
cagtgctgcatcttgtacagctgct

SEQ ID NO: 4703784 - DNA, 25 bp, Homo sapien
ccacctgggatcgaagcccaacatc

SEQ ID NO: 4703785 - DNA, 25 bp, Homo sapien
cgtgatacgtgggtccatgtaggaa

SEQ ID NO: 4703786 - DNA, 25 bp, Homo sapien
caaaactgactagctgatcaaggcc

SEQ ID NO: 4703787 - DNA, 25 bp, Homo sapien
gagccagaccaaaatccaggtgtat

SEQ ID NO: 4703788 - DNA, 25 bp, Homo sapien
tgtgtacttgacaaagagccagacc

SEQ ID NO: 4703789 - DNA, 25 bp, Homo sapien
tgtttaactcgagaggacacccttg

SEQ ID NO: 4703790 - DNA, 25 bp, Homo sapien
gggtagcccttgctctgcagtgcca

SEQ ID NO: 4703791 - DNA, 25 bp, Homo sapien
gggcacacagttctgatcctcagag

SEQ ID NO: 4703792 - DNA, 25 bp, Homo sapien
agcgacagcctgtcccattgaggga

SEQ ID NO: 4703793 - DNA, 25 bp, Homo sapien
tagccaaggtgtcactcgacttcgg

SEQ ID NO: 4703794 - DNA, 25 bp, Homo sapien
cttccgagtgaggcagagaaagagc

SEQ ID NO: 4703795 - DNA, 25 bp, Homo sapien
gtgaggcagagaaagagctttcatt

SEQ ID NO: 4703796 - DNA, 25 bp, Homo sapien
ccgagtgaggcagagaaagagcttt

SEQ ID NO: 4703797 - DNA, 25 bp, Homo sapien
tgaggcagagaaagagctttcattc

SEQ ID NO: 4703798 - DNA, 25 bp, Homo sapien
gagttggccagagaggcatcgttct

SEQ ID NO: 4703799 - DNA, 25 bp, Homo sapien
tctcatctgggacaaagtcaggctc

SEQ ID NO: 4703800 - DNA, 25 bp, Homo sapien
aaagagatcgcgctgagcacttacg

SEQ ID NO: 4703801 - DNA, 25 bp, Homo sapien
tggctggtggctaacatcccaactg

SEQ ID NO: 4703802 - DNA, 25 bp, Homo sapien
ctctgtctgtaggtcgccgggatcc

SEQ ID NO: 4703803 - DNA, 25 bp, Homo sapien
tgaagtcgctgctttcggaggccgt

SEQ ID NO: 4703804 - DNA, 25 bp, Homo sapien
gctcttggcatctagaccgctgtgg

SEQ ID NO: 4703805 - DNA, 25 bp, Homo sapien
tttcggctctgtctgtcaaccacgg

SEQ ID NO: 4703806 - DNA, 25 bp, Homo sapien
tttactggaggcttcgggaaggtca

SEQ ID NO: 4703807 - DNA, 25 bp, Homo sapien
ctgccctcggagcagccaacttggc

SEQ ID NO: 4703808 - DNA, 25 bp, Homo sapien
tgcagccactaagacctccaggcaa

SEQ ID NO: 4703809 - DNA, 25 bp, Homo sapien
gttcaggtcaaactgtttcatggcc

SEQ ID NO: 4703810 - DNA, 25 bp, Homo sapien
ggacttccgcacttttctcaggccg

SEQ ID NO: 4703811 - DNA, 25 bp, Homo sapien
gcaacactcggtgggaatcctacct

SEQ ID NO: 4703812 - DNA, 25 bp, Homo sapien
ggccgcctctgatctaacacattgt

SEQ ID NO: 4703813 - DNA, 25 bp, Homo sapien
caacaggcgcctgagatctagcatc

SEQ ID NO: 4703814 - DNA, 25 bp, Homo sapien
caggcggcgctgcttcttggtcagg

SEQ ID NO: 4703815 - DNA, 25 bp, Homo sapien
tcgatgaagccttcgcccaccatag

SEQ ID NO: 4703816 - DNA, 25 bp, Homo sapien
cttggtcaggacttcgatgaagcct

SEQ ID NO: 4703817 - DNA, 25 bp, Homo sapien
gggctggacccgcaattttcaatga

SEQ ID NO: 4703818 - DNA, 25 bp, Homo sapien
tgccaggcacggtcacgtcaccttg

SEQ ID NO: 4703819 - DNA, 25 bp, Homo sapien
gctccagacataagttgttctgctt

SEQ ID NO: 4703820 - DNA, 25 bp, Homo sapien
tgcttttttgcaaatcgaggaggaa

SEQ ID NO: 4703821 - DNA, 25 bp, Homo sapien
ttgcaaatcgaggaggaatacggga

SEQ ID NO: 4703822 - DNA, 25 bp, Homo sapien
ttgaaagatcccagcgggtattact

SEQ ID NO: 4703823 - DNA, 25 bp, Homo sapien
ccatggatccggagcccagaaaaat

SEQ ID NO: 4703824 - DNA, 25 bp, Homo sapien
cacagaccactttttgaatggccat

SEQ ID NO: 4703825 - DNA, 25 bp, Homo sapien
tgaaagatcccagcgggtattacta

SEQ ID NO: 4703826 - DNA, 25 bp, Homo sapien
ctccgcagagccagtctcggtgctg

SEQ ID NO: 4703827 - DNA, 25 bp, Homo sapien
cagtctcggtgctgctgaaggcagt

SEQ ID NO: 4703828 - DNA, 25 bp, Homo sapien
gcagagccagtctcggtgctgctga

SEQ ID NO: 4703829 - DNA, 25 bp, Homo sapien
agccagtctcggtgctgctgaaggc

SEQ ID NO: 4703830 - DNA, 25 bp, Homo sapien
caagtctggtcctgatcttgatcct

SEQ ID NO: 4703831 - DNA, 25 bp, Homo sapien
acaccaaccccgatagagctcgtga

SEQ ID NO: 4703832 - DNA, 25 bp, Homo sapien
acaggatcttctatgggccccagac

SEQ ID NO: 4703833 - DNA, 25 bp, Homo sapien
aggatgcctgacaacttacgtgtgg

SEQ ID NO: 4703834 - DNA, 25 bp, Homo sapien
aggaggtcgcagacgactcccgaga

SEQ ID NO: 4703835 - DNA, 25 bp, Homo sapien
tggcttcagagtcccatatggggag

SEQ ID NO: 4703836 - DNA, 25 bp, Homo sapien
ggcactcaagtcaacgccactatct

SEQ ID NO: 4703837 - DNA, 25 bp, Homo sapien
tggctgtcggccttgggttccgcca

SEQ ID NO: 4703838 - DNA, 25 bp, Homo sapien
tgtttttcagagaacgctcgttgcc

SEQ ID NO: 4703839 - DNA, 25 bp, Homo sapien
cgtgaatctccaccccgttaacagg

SEQ ID NO: 4703840 - DNA, 25 bp, Homo sapien
gctcgttgccgatgggtcctggtct

SEQ ID NO: 4703841 - DNA, 25 bp, Homo sapien
tccaaattcaatgggtggcacaggc

SEQ ID NO: 4703842 - DNA, 25 bp, Homo sapien
cagaggcagaaccaggtggcaagct

SEQ ID NO: 4703843 - DNA, 25 bp, Homo sapien
aactggactcccagtaggaccagag

SEQ ID NO: 4703844 - DNA, 25 bp, Homo sapien
ggcatcctgaagtttaacaactgga

SEQ ID NO: 4703845 - DNA, 25 bp, Homo sapien
aggcagaaccaggtggcaagctgaa

SEQ ID NO: 4703846 - DNA, 25 bp, Homo sapien
cgctgcccaaatgatactcgttcat

SEQ ID NO: 4703847 - DNA, 25 bp, Homo sapien
gatactcgttcattcagcatatgca

SEQ ID NO: 4703848 - DNA, 25 bp, Homo sapien
ggaaacgctgcccaaatgatactcg

SEQ ID NO: 4703849 - DNA, 25 bp, Homo sapien
cattcagcatatgcactagcaccca

SEQ ID NO: 4703850 - DNA, 25 bp, Homo sapien
aggatggggatactctgtgttaacc

SEQ ID NO: 4703851 - DNA, 25 bp, Homo sapien
ccgccgcaggatggggatactctgt

SEQ ID NO: 4703852 - DNA, 25 bp, Homo sapien
gggagagaccgatggccctctggat

SEQ ID NO: 4703853 - DNA, 25 bp, Homo sapien
tctggatgtgatggtcccgccgcag

SEQ ID NO: 4703854 - DNA, 25 bp, Homo sapien
agctgtagttgaccccgctggaggc

SEQ ID NO: 4703855 - DNA, 25 bp, Homo sapien
ccaccgaaggagctgtagttgaccc

SEQ ID NO: 4703856 - DNA, 25 bp, Homo sapien
gatggaggctggatgcctgagccag

SEQ ID NO: 4703857 - DNA, 25 bp, Homo sapien
gggagttttcccaagccttgcgcgc

SEQ ID NO: 4703858 - DNA, 25 bp, Homo sapien
agaagcagaaggtgctacagaggcc

SEQ ID NO: 4703859 - DNA, 25 bp, Homo sapien
ggcatagaagcagaaggtgctacag

SEQ ID NO: 4703860 - DNA, 25 bp, Homo sapien
catagaagcagaaggtgctacagag

SEQ ID NO: 4703861 - DNA, 25 bp, Homo sapien
ctggcatagaagcagaaggtgctac

SEQ ID NO: 4703862 - DNA, 25 bp, Homo sapien
tctattggaattacatcactgagac

SEQ ID NO: 4703863 - DNA, 25 bp, Homo sapien
cagaaggatctattggaattacatc

SEQ ID NO: 4703864 - DNA, 25 bp, Homo sapien
ccacagtggagggtcagaaggatct

SEQ ID NO: 4703865 - DNA, 25 bp, Homo sapien
cacagtggagggtcagaaggatcta

SEQ ID NO: 4703866 - DNA, 25 bp, Homo sapien
gcacgcacctcagggaacgtaggga

SEQ ID NO: 4703867 - DNA, 25 bp, Homo sapien
gatcaagcctcactacttctcaatg

SEQ ID NO: 4703868 - DNA, 25 bp, Homo sapien
tgtacagaggctgctaggttccctg

SEQ ID NO: 4703869 - DNA, 25 bp, Homo sapien
gagggaaacagtctacaggtctgct

SEQ ID NO: 4703870 - DNA, 25 bp, Homo sapien
aggtatcgtttgaggaaccagccgg

SEQ ID NO: 4703871 - DNA, 25 bp, Homo sapien
tctgctgctgaggtatcgtttgagg

SEQ ID NO: 4703872 - DNA, 25 bp, Homo sapien
gccggggctgacttgcaaacacatg

SEQ ID NO: 4703873 - DNA, 25 bp, Homo sapien
gctgctgaggtatcgtttgaggaac

SEQ ID NO: 4703874 - DNA, 25 bp, Homo sapien
tccatgcctgggagtttaggccttt

SEQ ID NO: 4703875 - DNA, 25 bp, Homo sapien
catgcctgggagtttaggcctttct

SEQ ID NO: 4703876 - DNA, 25 bp, Homo sapien
ccatgcctgggagtttaggcctttc

SEQ ID NO: 4703877 - DNA, 25 bp, Homo sapien
gatgtgtgaagggagatcgggatct

SEQ ID NO: 4703878 - DNA, 25 bp, Homo sapien
agctgaagatctcctgggactggga

SEQ ID NO: 4703879 - DNA, 25 bp, Homo sapien
agatgtgtgaagggagatcgggatc

SEQ ID NO: 4703880 - DNA, 25 bp, Homo sapien
cttggttcccgctcatgggctggta

SEQ ID NO: 4703881 - DNA, 25 bp, Homo sapien
gccctcgtagaccagggcttggttc

SEQ ID NO: 4703882 - DNA, 25 bp, Homo sapien
tccaagggctgcatgcctgggaacg

SEQ ID NO: 4703883 - DNA, 25 bp, Homo sapien
tagggtgagccagactgcggcttca

SEQ ID NO: 4703884 - DNA, 25 bp, Homo sapien
gggaggatgacaaaaacatgggtgg

SEQ ID NO: 4703885 - DNA, 25 bp, Homo sapien
catgtggctcggcagatctgctgat

SEQ ID NO: 4703886 - DNA, 25 bp, Homo sapien
aatgcaaaggccatgtggctcggca

SEQ ID NO: 4703887 - DNA, 25 bp, Homo sapien
caaaggccatgtggctcggcagatc

SEQ ID NO: 4703888 - DNA, 25 bp, Homo sapien
tctattggaattacatcactgagac

SEQ ID NO: 4703889 - DNA, 25 bp, Homo sapien
cagaaggatctattggaattacatc

SEQ ID NO: 4703890 - DNA, 25 bp, Homo sapien
ccacagtggagggtcagaaggatct

SEQ ID NO: 4703891 - DNA, 25 bp, Homo sapien
cacagtggagggtcagaaggatcta

SEQ ID NO: 4703892 - DNA, 25 bp, Homo sapien
gaaagtcagaagtaatggcgaagcc

SEQ ID NO: 4703893 - DNA, 25 bp, Homo sapien
tgaaagctgcatcggacgtatatct

SEQ ID NO: 4703894 - DNA, 25 bp, Homo sapien
agccaagtcccaaaagatgaaagct

SEQ ID NO: 4703895 - DNA, 25 bp, Homo sapien
caccagatttatgggtgcacacggg

SEQ ID NO: 4703896 - DNA, 25 bp, Homo sapien
gacactcgggatgcagagcggcata

SEQ ID NO: 4703897 - DNA, 25 bp, Homo sapien
catgggcctgcacactgccaggata

SEQ ID NO: 4703898 - DNA, 25 bp, Homo sapien
actgccaggatagtgtgtcacacac

SEQ ID NO: 4703899 - DNA, 25 bp, Homo sapien
gcagggccctgtccaacatgggcct

SEQ ID NO: 4703900 - DNA, 25 bp, Homo sapien
tgagaaaacgggcaagactaagctg

SEQ ID NO: 4703901 - DNA, 25 bp, Homo sapien
tctgctaagggctgcgtctatcttc

SEQ ID NO: 4703902 - DNA, 25 bp, Homo sapien
caggcatgggaactaacagcgttaa

SEQ ID NO: 4703903 - DNA, 25 bp, Homo sapien
gtgtgtctcatccacatctctgcta

SEQ ID NO: 4703904 - DNA, 25 bp, Homo sapien
tcgatggcagaggcacgtcttcttg

SEQ ID NO: 4703905 - DNA, 25 bp, Homo sapien
cttcgatggcagaggcacgtcttct

SEQ ID NO: 4703906 - DNA, 25 bp, Homo sapien
ttcgatggcagaggcacgtcttctt

SEQ ID NO: 4703907 - DNA, 25 bp, Homo sapien
aaacgcaccaaagagcgaccgcaca

SEQ ID NO: 4703908 - DNA, 25 bp, Homo sapien
gcctgcataaagcaggacatgctct

SEQ ID NO: 4703909 - DNA, 25 bp, Homo sapien
gcacaggagagatcgcccaggattt

SEQ ID NO: 4703910 - DNA, 25 bp, Homo sapien
tgcacttcagattcatacacttcag

SEQ ID NO: 4703911 - DNA, 25 bp, Homo sapien
tggcagctgaatagactggggcagg

SEQ ID NO: 4703912 - DNA, 25 bp, Homo sapien
gggccccaacggagaggctctgccc

SEQ ID NO: 4703913 - DNA, 25 bp, Homo sapien
ctgctgcccggagccgtaccgaggc

SEQ ID NO: 4703914 - DNA, 25 bp, Homo sapien
gccgtaccgaggcagtggcatggtc

SEQ ID NO: 4703915 - DNA, 25 bp, Homo sapien
acacttactgaacaacccagggcag

SEQ ID NO: 4703916 - DNA, 25 bp, Homo sapien
acttactgaacaacccagggcagag

SEQ ID NO: 4703917 - DNA, 25 bp, Homo sapien
cacttactgaacaacccagggcaga

SEQ ID NO: 4703918 - DNA, 25 bp, Homo sapien
cattctgtttactgtcggcaaagtg

SEQ ID NO: 4703919 - DNA, 25 bp, Homo sapien
tactgtcggcaaagtggaagccttt

SEQ ID NO: 4703920 - DNA, 25 bp, Homo sapien
tcggcaaagtggaagcctttcatct

SEQ ID NO: 4703921 - DNA, 25 bp, Homo sapien
ttctgtttactgtcggcaaagtgga

SEQ ID NO: 4703922 - DNA, 25 bp, Homo sapien
tacaactacatagacacaggcgact

SEQ ID NO: 4703923 - DNA, 25 bp, Homo sapien
cagttccgctccatggtcggtgctg

SEQ ID NO: 4703924 - DNA, 25 bp, Homo sapien
aggcgactcttgtcccgtgaggctc

SEQ ID NO: 4703925 - DNA, 25 bp, Homo sapien
ggtgctgtccagctatctttttcac

SEQ ID NO: 4703926 - DNA, 25 bp, Homo sapien
gaatacacaacgtgtcaccacagaa

SEQ ID NO: 4703927 - DNA, 25 bp, Homo sapien
taagacagcccagaacgcagaaggg

SEQ ID NO: 4703928 - DNA, 25 bp, Homo sapien
cactcgggacggtccgtggatctct

SEQ ID NO: 4703929 - DNA, 25 bp, Homo sapien
caaagcctagcacatggaggaggca

SEQ ID NO: 4703930 - DNA, 25 bp, Homo sapien
tgttgcacgtagtgtccctgcacag

SEQ ID NO: 4703931 - DNA, 25 bp, Homo sapien
gttgcacgtagtgtccctgcacaga

SEQ ID NO: 4703932 - DNA, 25 bp, Homo sapien
ctgttgcacgtagtgtccctgcaca

SEQ ID NO: 4703933 - DNA, 25 bp, Homo sapien
ttgcacgtagtgtccctgcacagag

SEQ ID NO: 4703934 - DNA, 25 bp, Homo sapien
ctctaaccgctagggcatggctgtc

SEQ ID NO: 4703935 - DNA, 25 bp, Homo sapien
gagaaatgccttcgccaggagggac

SEQ ID NO: 4703936 - DNA, 25 bp, Homo sapien
cctaagtgtccagggctgaagggtc

SEQ ID NO: 4703937 - DNA, 25 bp, Homo sapien
tcttttggcgcttggagacgggcct

SEQ ID NO: 4703938 - DNA, 25 bp, Homo sapien
gaggcttgatcgctccggttcgctt

SEQ ID NO: 4703939 - DNA, 25 bp, Homo sapien
tttgacagcccgaggcttgatcgct

SEQ ID NO: 4703940 - DNA, 25 bp, Homo sapien
gctccggttcgcttcatctgggagg

SEQ ID NO: 4703941 - DNA, 25 bp, Homo sapien
ctccactttgacagcccgaggcttg

SEQ ID NO: 4703942 - DNA, 25 bp, Homo sapien
gagtgtcggctgtgtcgaggccgca

SEQ ID NO: 4703943 - DNA, 25 bp, Homo sapien
cacgcatttggacggtggatctggt

SEQ ID NO: 4703944 - DNA, 25 bp, Homo sapien
tctggtgaggctcccgagtgtcggc

SEQ ID NO: 4703945 - DNA, 25 bp, Homo sapien
aggagggaggtctctcagtctgggc

SEQ ID NO: 4703946 - DNA, 25 bp, Homo sapien
tccacagtcacggtaggagcagatg

SEQ ID NO: 4703947 - DNA, 25 bp, Homo sapien
tgggatgaaggagtcgtctgctttt

SEQ ID NO: 4703948 - DNA, 25 bp, Homo sapien
tgtttcgtatcaaagcaagcgggtc

SEQ ID NO: 4703949 - DNA, 25 bp, Homo sapien
caagcgggtcaatgccatatatcca

SEQ ID NO: 4703950 - DNA, 25 bp, Homo sapien
ctggctgcgcggcaggacagggagg

SEQ ID NO: 4703951 - DNA, 25 bp, Homo sapien
aaagcctcaaagtaaaatgaccctg

SEQ ID NO: 4703952 - DNA, 25 bp, Homo sapien
tgtgcctagggatgggcggctgggc

SEQ ID NO: 4703953 - DNA, 25 bp, Homo sapien
tacacatggagcttgcgtttttgtt

SEQ ID NO: 4703954 - DNA, 25 bp, Homo sapien
tcagctatacacatggagcttgcgt

SEQ ID NO: 4703955 - DNA, 25 bp, Homo sapien
catgatttgtctctggtgcccagca

SEQ ID NO: 4703956 - DNA, 25 bp, Homo sapien
gctgagaaacctgaactgtcccctt

SEQ ID NO: 4703957 - DNA, 25 bp, Homo sapien
caagcagccgcttgcagtgggagaa

SEQ ID NO: 4703958 - DNA, 25 bp, Homo sapien
tctgaagacaaacgagactgatgcc

SEQ ID NO: 4703959 - DNA, 25 bp, Homo sapien
accaggtaagagaaaagggctggag

SEQ ID NO: 4703960 - DNA, 25 bp, Homo sapien
taccaggtaagagaaaagggctgga

SEQ ID NO: 4703961 - DNA, 25 bp, Homo sapien
ataccaggtaagagaaaagggctgg

SEQ ID NO: 4703962 - DNA, 25 bp, Homo sapien
aataccaggtaagagaaaagggctg

SEQ ID NO: 4703963 - DNA, 25 bp, Homo sapien
cacggctggagagcactgatgtcaa

SEQ ID NO: 4703964 - DNA, 25 bp, Homo sapien
gcatctcagcgaagagactgcagct

SEQ ID NO: 4703965 - DNA, 25 bp, Homo sapien
gcaaaagtgagtgggttctgacccc

SEQ ID NO: 4703966 - DNA, 25 bp, Homo sapien
ggatggtggacaataccgcaaggcc

SEQ ID NO: 4703967 - DNA, 25 bp, Homo sapien
tcagcttccagaagctgtcactgac

SEQ ID NO: 4703968 - DNA, 25 bp, Homo sapien
gtgtgtgctcagcttccagaagctg

SEQ ID NO: 4703969 - DNA, 25 bp, Homo sapien
gtgtgctcagcttccagaagctgtc

SEQ ID NO: 4703970 - DNA, 25 bp, Homo sapien
ctgtgtgtgctcagcttccagaagc

SEQ ID NO: 4703971 - DNA, 25 bp, Homo sapien
agagctgccatgctgccgtagcagg

SEQ ID NO: 4703972 - DNA, 25 bp, Homo sapien
gggcagcctgcagctacttggcaca

SEQ ID NO: 4703973 - DNA, 25 bp, Homo sapien
caaatggcaagggagaaggctccac

SEQ ID NO: 4703974 - DNA, 25 bp, Homo sapien
cacaggggaaccaaatggcaaggga

SEQ ID NO: 4703975 - DNA, 25 bp, Homo sapien
caaaagcttgagtacagtgtcccct

SEQ ID NO: 4703976 - DNA, 25 bp, Homo sapien
tagatcacgggagaaaggcgtccac

SEQ ID NO: 4703977 - DNA, 25 bp, Homo sapien
tgaagagcaggtctcacatgcccga

SEQ ID NO: 4703978 - DNA, 25 bp, Homo sapien
tgcttaggtccgtcacatttcagaa

SEQ ID NO: 4703979 - DNA, 25 bp, Homo sapien
ctttcaaatatctggtctacatgga

SEQ ID NO: 4703980 - DNA, 25 bp, Homo sapien
aacaagctgcacattacacctctag

SEQ ID NO: 4703981 - DNA, 25 bp, Homo sapien
acattacacctctagccatcgtctg

SEQ ID NO: 4703982 - DNA, 25 bp, Homo sapien
aaatatctggtctacatggaaagac

SEQ ID NO: 4703983 - DNA, 25 bp, Homo sapien
gtgagtgtgccagcaccggcctggt

SEQ ID NO: 4703984 - DNA, 25 bp, Homo sapien
ggtgaatccacgattcgatttccca

SEQ ID NO: 4703985 - DNA, 25 bp, Homo sapien
gaaagggcgagggtgagtgtgccag

SEQ ID NO: 4703986 - DNA, 25 bp, Homo sapien
attcgatttcccatccaaggtaagt

SEQ ID NO: 4703987 - DNA, 25 bp, Homo sapien
atttaaataaggagaattctttcat

SEQ ID NO: 4703988 - DNA, 25 bp, Homo sapien
tttaaataaggagaattctttcata

SEQ ID NO: 4703989 - DNA, 25 bp, Homo sapien
ttaaataaggagaattctttcatat

SEQ ID NO: 4703990 - DNA, 25 bp, Homo sapien
tatttaaataaggagaattctttca

SEQ ID NO: 4703991 - DNA, 25 bp, Homo sapien
gctcgtttctcacggcaagtgacgg

SEQ ID NO: 4703992 - DNA, 25 bp, Homo sapien
tgaccagctcgtttctcacggcaag

SEQ ID NO: 4703993 - DNA, 25 bp, Homo sapien
tcctctgaccagctcgtttctcacg

SEQ ID NO: 4703994 - DNA, 25 bp, Homo sapien
ccagctcgtttctcacggcaagtga

SEQ ID NO: 4703995 - DNA, 25 bp, Homo sapien
tccgtttgagattttgtgagccacc

SEQ ID NO: 4703996 - DNA, 25 bp, Homo sapien
ccaaccttaggactagcctctttca

SEQ ID NO: 4703997 - DNA, 25 bp, Homo sapien
tttcagggctggtctccgtttgaga

SEQ ID NO: 4703998 - DNA, 25 bp, Homo sapien
taggactagcctctttcagggctgg

SEQ ID NO: 4703999 - DNA, 25 bp, Homo sapien
gtttctccgagtccacacagagccg

SEQ ID NO: 4704000 - DNA, 25 bp, Homo sapien
cctgctcaacgttcgattcaccgag

SEQ ID NO: 4704001 - DNA, 25 bp, Homo sapien
cgcgtttctccgagtccacacagag

SEQ ID NO: 4704002 - DNA, 25 bp, Homo sapien
ccaccgccctgctcaacgttcgatt

SEQ ID NO: 4704003 - DNA, 25 bp, Homo sapien
caagtccgggctgggctctcgtccc

SEQ ID NO: 4704004 - DNA, 25 bp, Homo sapien
gggctgggctctcgtccccggtgtc

SEQ ID NO: 4704005 - DNA, 25 bp, Homo sapien
cgggctgggctctcgtccccggtgt

SEQ ID NO: 4704006 - DNA, 25 bp, Homo sapien
ccccaagtccgggctgggctctcgt

SEQ ID NO: 4704007 - DNA, 25 bp, Homo sapien
ggctgcacgcgccacggagttctta

SEQ ID NO: 4704008 - DNA, 25 bp, Homo sapien
ccagggacccgcgtccggcactgac

SEQ ID NO: 4704009 - DNA, 25 bp, Homo sapien
cctagggctgcacgcgccacggagt

SEQ ID NO: 4704010 - DNA, 25 bp, Homo sapien
cgcgccacggagttcttacttcggg

SEQ ID NO: 4704011 - DNA, 25 bp, Homo sapien
cagggaccccaacctggccgagcct

SEQ ID NO: 4704012 - DNA, 25 bp, Homo sapien
ggtgccatctcagctgcttacagcc

SEQ ID NO: 4704013 - DNA, 25 bp, Homo sapien
ggcagctcctgggtgccatctcagc

SEQ ID NO: 4704014 - DNA, 25 bp, Homo sapien
ctgcttacagcccagggaccccaac

SEQ ID NO: 4704015 - DNA, 25 bp, Homo sapien
tgtagaaaagcgggctcaggcagac

SEQ ID NO: 4704016 - DNA, 25 bp, Homo sapien
agaaaagcgggctcaggcagacgcc

SEQ ID NO: 4704017 - DNA, 25 bp, Homo sapien
cttgtagaaaagcgggctcaggcag

SEQ ID NO: 4704018 - DNA, 25 bp, Homo sapien
tagaaaagcgggctcaggcagacgc

SEQ ID NO: 4704019 - DNA, 25 bp, Homo sapien
ctcaagttgatgtcagccgtcacca

SEQ ID NO: 4704020 - DNA, 25 bp, Homo sapien
gtcaccactacagggcgcttcaaaa

SEQ ID NO: 4704021 - DNA, 25 bp, Homo sapien
tgagtcgccacagccggctcagtaa

SEQ ID NO: 4704022 - DNA, 25 bp, Homo sapien
gccacaaggctcaagttgatgtcag

SEQ ID NO: 4704023 - DNA, 25 bp, Homo sapien
gtactgcccataatatacttcgtca

SEQ ID NO: 4704024 - DNA, 25 bp, Homo sapien
tgtaaaaagagatgtactgcccata

SEQ ID NO: 4704025 - DNA, 25 bp, Homo sapien
atgtggccaaatggcggcccactgt

SEQ ID NO: 4704026 - DNA, 25 bp, Homo sapien
gcccactgtcatccaagaagaagat

SEQ ID NO: 4704027 - DNA, 25 bp, Homo sapien
gggtaggggctactctcctgatgac

SEQ ID NO: 4704028 - DNA, 25 bp, Homo sapien
ctagagtactgtggcaagcaataaa

SEQ ID NO: 4704029 - DNA, 25 bp, Homo sapien
tttctgcctgtaagaaatgcactga

SEQ ID NO: 4704030 - DNA, 25 bp, Homo sapien
taaatgtatttgaggtcctgaaggg

SEQ ID NO: 4704031 - DNA, 25 bp, Homo sapien
ctccaattctgttccacaaaaaatt

SEQ ID NO: 4704032 - DNA, 25 bp, Homo sapien
gctccaattctgttccacaaaaaat

SEQ ID NO: 4704033 - DNA, 25 bp, Homo sapien
tccaattctgttccacaaaaaattg

SEQ ID NO: 4704034 - DNA, 25 bp, Homo sapien
ccaattctgttccacaaaaaattgc

SEQ ID NO: 4704035 - DNA, 25 bp, Homo sapien
ttctggactcagattaataaggcac

SEQ ID NO: 4704036 - DNA, 25 bp, Homo sapien
ttctaacctgcgcacattaaaaggg

SEQ ID NO: 4704037 - DNA, 25 bp, Homo sapien
tacaaccgatcatcacaatcagacg

SEQ ID NO: 4704038 - DNA, 25 bp, Homo sapien
tacgtgtaccaacgacaagggctga

SEQ ID NO: 4704039 - DNA, 25 bp, Homo sapien
ccatggcggcacaatgagaaaagtg

SEQ ID NO: 4704040 - DNA, 25 bp, Homo sapien
cactatctggtaggccatggggacc

SEQ ID NO: 4704041 - DNA, 25 bp, Homo sapien
aaaagtggagctccaacactatctg

SEQ ID NO: 4704042 - DNA, 25 bp, Homo sapien
ggaccacacaggcacgttgctactg

SEQ ID NO: 4704043 - DNA, 25 bp, Homo sapien
gacacaaggcctcatacagtcatca

SEQ ID NO: 4704044 - DNA, 25 bp, Homo sapien
agtcatcacccaatacacatctctt

SEQ ID NO: 4704045 - DNA, 25 bp, Homo sapien
gcaagggaaaacgtatgaggatgaa

SEQ ID NO: 4704046 - DNA, 25 bp, Homo sapien
ttcagaagcgatacaactgtgtggg

SEQ ID NO: 4704047 - DNA, 25 bp, Homo sapien
cttcaggtaggacaacacggccaat

SEQ ID NO: 4704048 - DNA, 25 bp, Homo sapien
caacacggccaatagattgaaaaat

SEQ ID NO: 4704049 - DNA, 25 bp, Homo sapien
tagccttgactgagtgatgagagca

SEQ ID NO: 4704050 - DNA, 25 bp, Homo sapien
ctgattccaaaagcattagccttga

SEQ ID NO: 4704051 - DNA, 25 bp, Homo sapien
gaaaaggtactgtctcacaaaacga

SEQ ID NO: 4704052 - DNA, 25 bp, Homo sapien
atctcagatcaacaaaccacccaga

SEQ ID NO: 4704053 - DNA, 25 bp, Homo sapien
aaaaggtactggaccatctcagatc

SEQ ID NO: 4704054 - DNA, 25 bp, Homo sapien
tctctgttctcgttaactaggaaga

SEQ ID NO: 4704055 - DNA, 25 bp, Homo sapien
aggaacaagcgacccctgtcagtgt

SEQ ID NO: 4704056 - DNA, 25 bp, Homo sapien
actgcacaggaacaagcgacccctg

SEQ ID NO: 4704057 - DNA, 25 bp, Homo sapien
gcgacccctgtcagtgttagccaga

SEQ ID NO: 4704058 - DNA, 25 bp, Homo sapien
aacaagcgacccctgtcagtgttag

SEQ ID NO: 4704059 - DNA, 25 bp, Homo sapien
ttggacaaagtctggtctccaagca

SEQ ID NO: 4704060 - DNA, 25 bp, Homo sapien
gtgccaggcatggacagctgcaaca

SEQ ID NO: 4704061 - DNA, 25 bp, Homo sapien
acagctgcaacacccagcacgagca

SEQ ID NO: 4704062 - DNA, 25 bp, Homo sapien
gagcacgtacgtgaacacacccatg

SEQ ID NO: 4704063 - DNA, 25 bp, Homo sapien
cggcctcatgcagcactggacatca

SEQ ID NO: 4704064 - DNA, 25 bp, Homo sapien
cctcatgcagcactggacatcagca

SEQ ID NO: 4704065 - DNA, 25 bp, Homo sapien
ggcctcatgcagcactggacatcag

SEQ ID NO: 4704066 - DNA, 25 bp, Homo sapien
tcatgcagcactggacatcagcacc

SEQ ID NO: 4704067 - DNA, 25 bp, Homo sapien
ctgtgacatctgcatctgccccata

SEQ ID NO: 4704068 - DNA, 25 bp, Homo sapien
cccctgtgacatctgcatctgcccc

SEQ ID NO: 4704069 - DNA, 25 bp, Homo sapien
cctgtgacatctgcatctgccccat

SEQ ID NO: 4704070 - DNA, 25 bp, Homo sapien
tgtgacatctgcatctgccccatac

SEQ ID NO: 4704071 - DNA, 25 bp, Homo sapien
aaagttagtgacagaaactctggcc

SEQ ID NO: 4704072 - DNA, 25 bp, Homo sapien
tccactgcgtggaaaagcgtaccca

SEQ ID NO: 4704073 - DNA, 25 bp, Homo sapien
cacctctagacattgtgagcttaga

SEQ ID NO: 4704074 - DNA, 25 bp, Homo sapien
cattgaggattggagtcttttcacc

SEQ ID NO: 4704075 - DNA, 25 bp, Homo sapien
tgctcgggcgagcaagtgacagaac

SEQ ID NO: 4704076 - DNA, 25 bp, Homo sapien
gctcgggcgagcaagtgacagaaca

SEQ ID NO: 4704077 - DNA, 25 bp, Homo sapien
ctcgggcgagcaagtgacagaacac

SEQ ID NO: 4704078 - DNA, 25 bp, Homo sapien
ctgctcgggcgagcaagtgacagaa

SEQ ID NO: 4704079 - DNA, 25 bp, Homo sapien
tagaatcaagtggacgtagaagaac

SEQ ID NO: 4704080 - DNA, 25 bp, Homo sapien
acgaccgggatgaccagcaaagcca

SEQ ID NO: 4704081 - DNA, 25 bp, Homo sapien
aatcaagtggacgtagaagaacagt

SEQ ID NO: 4704082 - DNA, 25 bp, Homo sapien
gaagaacagtaagtacaggacgacc

SEQ ID NO: 4704083 - DNA, 25 bp, Homo sapien
tggacatgatttggtcgtggggccc

SEQ ID NO: 4704084 - DNA, 25 bp, Homo sapien
acatgatttggtcgtggggcccaga

SEQ ID NO: 4704085 - DNA, 25 bp, Homo sapien
atgatttggtcgtggggcccagagc

SEQ ID NO: 4704086 - DNA, 25 bp, Homo sapien
gacatgatttggtcgtggggcccag

SEQ ID NO: 4704087 - DNA, 25 bp, Homo sapien
tccttaaggcgggtgaaactgccca

SEQ ID NO: 4704088 - DNA, 25 bp, Homo sapien
tctgatcaaatgctgcctctgggcc

SEQ ID NO: 4704089 - DNA, 25 bp, Homo sapien
caagactagggtgagccaaacaact

SEQ ID NO: 4704090 - DNA, 25 bp, Homo sapien
tgataccttctaccactgctgcgag

SEQ ID NO: 4704091 - DNA, 25 bp, Homo sapien
cctgagtgatccgagctagtcctcc

SEQ ID NO: 4704092 - DNA, 25 bp, Homo sapien
ctcagagtgacctgggacccaaagg

SEQ ID NO: 4704093 - DNA, 25 bp, Homo sapien
tgaccctgagtgatccgagctagtc

SEQ ID NO: 4704094 - DNA, 25 bp, Homo sapien
caggtttcccaaagacgttcctcag

SEQ ID NO: 4704095 - DNA, 25 bp, Homo sapien
aaacgtatctggaagtgggtcatcg

SEQ ID NO: 4704096 - DNA, 25 bp, Homo sapien
tgaagataccacagacaaggagccg

SEQ ID NO: 4704097 - DNA, 25 bp, Homo sapien
ggaaccacgaagctcactggcaatc

SEQ ID NO: 4704098 - DNA, 25 bp, Homo sapien
ttcaacaaatacaacctagcaaggg

SEQ ID NO: 4704099 - DNA, 25 bp, Homo sapien
tccaccagttattgacatctttgaa

SEQ ID NO: 4704100 - DNA, 25 bp, Homo sapien
gggtaacaggtcacctgttgctggt

SEQ ID NO: 4704101 - DNA, 25 bp, Homo sapien
tcctgggatcctttacaatccacca

SEQ ID NO: 4704102 - DNA, 25 bp, Homo sapien
aacaggtcacctgttgctggtggga

SEQ ID NO: 4704103 - DNA, 25 bp, Homo sapien
ttcagggagcgggtggtcatgccgt

SEQ ID NO: 4704104 - DNA, 25 bp, Homo sapien
accatgtccccgtgcctcacaggtc

SEQ ID NO: 4704105 - DNA, 25 bp, Homo sapien
gcgggtggtcatgccgtggaccagc

SEQ ID NO: 4704106 - DNA, 25 bp, Homo sapien
ccatgtccccgtgcctcacaggtct

SEQ ID NO: 4704107 - DNA, 25 bp, Homo sapien
tggagatgttatagtcaatgtagca

SEQ ID NO: 4704108 - DNA, 25 bp, Homo sapien
ccagaggttctgggcgggcatggag

SEQ ID NO: 4704109 - DNA, 25 bp, Homo sapien
tgttatagtcaatgtagcaggagac

SEQ ID NO: 4704110 - DNA, 25 bp, Homo sapien
cgggcatggagatgttatagtcaat

SEQ ID NO: 4704111 - DNA, 25 bp, Homo sapien
caaagggacaagtccccaagtgagg

SEQ ID NO: 4704112 - DNA, 25 bp, Homo sapien
gacaaagggacaagtccccaagtga

SEQ ID NO: 4704113 - DNA, 25 bp, Homo sapien
ccccaagtgagggaagctataaggg

SEQ ID NO: 4704114 - DNA, 25 bp, Homo sapien
gacaagtccccaagtgagggaagct

SEQ ID NO: 4704115 - DNA, 25 bp, Homo sapien
tgcacaaagcggacctctgagagga

SEQ ID NO: 4704116 - DNA, 25 bp, Homo sapien
tttaagacagcggaagtgttcacgt

SEQ ID NO: 4704117 - DNA, 25 bp, Homo sapien
gaagtgttcacgtgcacaaagcgga

SEQ ID NO: 4704118 - DNA, 25 bp, Homo sapien
gatggtcttccagacgtctgtgtca

SEQ ID NO: 4704119 - DNA, 25 bp, Homo sapien
gctcccgtgtccacttgggttggaa

SEQ ID NO: 4704120 - DNA, 25 bp, Homo sapien
ggcgtgatgggaaggccgtggctcc

SEQ ID NO: 4704121 - DNA, 25 bp, Homo sapien
ctggtgacaccgcaggagagtaaag

SEQ ID NO: 4704122 - DNA, 25 bp, Homo sapien
ctgtcagcaggtgccccttgtggga

SEQ ID NO: 4704123 - DNA, 25 bp, Homo sapien
gggacagcttctccccgacgatctc

SEQ ID NO: 4704124 - DNA, 25 bp, Homo sapien
cgccgtatcggtgctcctccacgtt

SEQ ID NO: 4704125 - DNA, 25 bp, Homo sapien
cgacgatctccagttgccgataccc

SEQ ID NO: 4704126 - DNA, 25 bp, Homo sapien
gttccacaccgtgctcccgtggtag

SEQ ID NO: 4704127 - DNA, 25 bp, Homo sapien
tgcagctccgagaatctcgccatga

SEQ ID NO: 4704128 - DNA, 25 bp, Homo sapien
gaggttcctgctgacgtccacctgc

SEQ ID NO: 4704129 - DNA, 25 bp, Homo sapien
atctcgccatgaagctgaggttcct

SEQ ID NO: 4704130 - DNA, 25 bp, Homo sapien
ctgctgacgtccacctgcgcaggtg

SEQ ID NO: 4704131 - DNA, 25 bp, Homo sapien
cagtaggcaatattggtgtccaggg

SEQ ID NO: 4704132 - DNA, 25 bp, Homo sapien
agtcatcacttctcagcgccagcat

SEQ ID NO: 4704133 - DNA, 25 bp, Homo sapien
agctgtacttgtgttccgagtcatc

SEQ ID NO: 4704134 - DNA, 25 bp, Homo sapien
ccagggtgacccactccagtgggct

SEQ ID NO: 4704135 - DNA, 25 bp, Homo sapien
tttgtaacagcagcgctgtccacgg

SEQ ID NO: 4704136 - DNA, 25 bp, Homo sapien
atgcaaagtgcgctcagagctcggg

SEQ ID NO: 4704137 - DNA, 25 bp, Homo sapien
cgacctacccgcctctgagggagga

SEQ ID NO: 4704138 - DNA, 25 bp, Homo sapien
gagcagatgactccactttgtaaca

SEQ ID NO: 4704139 - DNA, 25 bp, Homo sapien
cacgcactactttagcagagtgaaa

SEQ ID NO: 4704140 - DNA, 25 bp, Homo sapien
tccactaggccttactactactgtg

SEQ ID NO: 4704141 - DNA, 25 bp, Homo sapien
caggcacagcctagcatccactagg

SEQ ID NO: 4704142 - DNA, 25 bp, Homo sapien
gtggacaggtctgctcctactcaga

SEQ ID NO: 4704143 - DNA, 25 bp, Homo sapien
tatgtttccaagtaggtggatctga

SEQ ID NO: 4704144 - DNA, 25 bp, Homo sapien
tttcttcgccgtcggagcaggtacc

SEQ ID NO: 4704145 - DNA, 25 bp, Homo sapien
ctgagggaggtcatggacatttctt

SEQ ID NO: 4704146 - DNA, 25 bp, Homo sapien
tgcccgaaacccagatcactatgtt

SEQ ID NO: 4704147 - DNA, 25 bp, Homo sapien
tgcccagccaccggcacacagcgcc

SEQ ID NO: 4704148 - DNA, 25 bp, Homo sapien
ctgcccagccaccggcacacagcgc

SEQ ID NO: 4704149 - DNA, 25 bp, Homo sapien
gcccagccaccggcacacagcgccc

SEQ ID NO: 4704150 - DNA, 25 bp, Homo sapien
cccagccaccggcacacagcgcccc

SEQ ID NO: 4704151 - DNA, 25 bp, Homo sapien
gtagaggaagagtgtcttctccatc

SEQ ID NO: 4704152 - DNA, 25 bp, Homo sapien
tttggaaggtgagtgcgggcaggta

SEQ ID NO: 4704153 - DNA, 25 bp, Homo sapien
ttctccatcaggaagaacgggaggt

SEQ ID NO: 4704154 - DNA, 25 bp, Homo sapien
catcaggaagaacgggaggtagttc

SEQ ID NO: 4704155 - DNA, 25 bp, Homo sapien
gctgcgcatgggcttcccagcagag

SEQ ID NO: 4704156 - DNA, 25 bp, Homo sapien
cccatgtgtttgctgcgcatgggct

SEQ ID NO: 4704157 - DNA, 25 bp, Homo sapien
cggtccagccactgtctccgcagcc

SEQ ID NO: 4704158 - DNA, 25 bp, Homo sapien
gtgtttgctgcgcatgggcttccca

SEQ ID NO: 4704159 - DNA, 25 bp, Homo sapien
cgtgaaatgggtgaggttcgctgca

SEQ ID NO: 4704160 - DNA, 25 bp, Homo sapien
tccgctttcatctctgtcagccgcg

SEQ ID NO: 4704161 - DNA, 25 bp, Homo sapien
gacccggaggatgtcagtgtaacgt

SEQ ID NO: 4704162 - DNA, 25 bp, Homo sapien
tctcttctgaacctcacccattccc

SEQ ID NO: 4704163 - DNA, 25 bp, Homo sapien
tgttggacacgtggcacgcggagga

SEQ ID NO: 4704164 - DNA, 25 bp, Homo sapien
cagcgaagggccttgagttcatgtg

SEQ ID NO: 4704165 - DNA, 25 bp, Homo sapien
agagtgacttgtccccgtaggtgag

SEQ ID NO: 4704166 - DNA, 25 bp, Homo sapien
ccaccagggcgctgaagatgctcct

SEQ ID NO: 4704167 - DNA, 25 bp, Homo sapien
ccagcacgggtgttctttgccacac

SEQ ID NO: 4704168 - DNA, 25 bp, Homo sapien
catgtgttccactagaggccctgct

SEQ ID NO: 4704169 - DNA, 25 bp, Homo sapien
gagagcttttcaatgagacccccat

SEQ ID NO: 4704170 - DNA, 25 bp, Homo sapien
tacgtacattgaccaagacccttca

SEQ ID NO: 4704171 - DNA, 25 bp, Homo sapien
gacacaccttgaccactgacgagga

SEQ ID NO: 4704172 - DNA, 25 bp, Homo sapien
tgttgtcaatgactcctacgctggc

SEQ ID NO: 4704173 - DNA, 25 bp, Homo sapien
gacgaggaagatttcactcagccac

SEQ ID NO: 4704174 - DNA, 25 bp, Homo sapien
tcatgaaggaggatcgggtctgcca

SEQ ID NO: 4704175 - DNA, 25 bp, Homo sapien
tcacatgtgaacacccgtgtctggg

SEQ ID NO: 4704176 - DNA, 25 bp, Homo sapien
caaacctaatttcatgacccagtgg

SEQ ID NO: 4704177 - DNA, 25 bp, Homo sapien
tctgtcccggctggagaacagcgtc

SEQ ID NO: 4704178 - DNA, 25 bp, Homo sapien
ctggctgtggcacgcactggatcac

SEQ ID NO: 4704179 - DNA, 25 bp, Homo sapien
tggcttgaagctccgggccaggtaa

SEQ ID NO: 4704180 - DNA, 25 bp, Homo sapien
cccaaggttggatggatgcagaccc

SEQ ID NO: 4704181 - DNA, 25 bp, Homo sapien
cactgctagaagattccaccctggc

SEQ ID NO: 4704182 - DNA, 25 bp, Homo sapien
ggaagaaggcctgcaaagccgcagt

SEQ ID NO: 4704183 - DNA, 25 bp, Homo sapien
ccaggggtctggctttggaggtcca

SEQ ID NO: 4704184 - DNA, 25 bp, Homo sapien
agccaggggtctggctttggaggtc

SEQ ID NO: 4704185 - DNA, 25 bp, Homo sapien
caggggtctggctttggaggtccat

SEQ ID NO: 4704186 - DNA, 25 bp, Homo sapien
agagccaggggtctggctttggagg

SEQ ID NO: 4704187 - DNA, 25 bp, Homo sapien
tgaaccaattagattcttggcttgg

SEQ ID NO: 4704188 - DNA, 25 bp, Homo sapien
aggagatgagctgaaccaattagat

SEQ ID NO: 4704189 - DNA, 25 bp, Homo sapien
gagctgaaccaattagattcttggc

SEQ ID NO: 4704190 - DNA, 25 bp, Homo sapien
gatgagctgaaccaattagattctt

SEQ ID NO: 4704191 - DNA, 25 bp, Homo sapien
tgcgggaagggcgggtacagcagcg

SEQ ID NO: 4704192 - DNA, 25 bp, Homo sapien
ggaagggcgggtacagcagcggcgc

SEQ ID NO: 4704193 - DNA, 25 bp, Homo sapien
ctgcgggaagggcgggtacagcagc

SEQ ID NO: 4704194 - DNA, 25 bp, Homo sapien
cgggaagggcgggtacagcagcggc

SEQ ID NO: 4704195 - DNA, 25 bp, Homo sapien
gcgcggctgggtagagctgggcggg

SEQ ID NO: 4704196 - DNA, 25 bp, Homo sapien
cgcggctgggtagagctgggcgggc

SEQ ID NO: 4704197 - DNA, 25 bp, Homo sapien
ggcagagccacagtggtgagggagc

SEQ ID NO: 4704198 - DNA, 25 bp, Homo sapien
ggacaacagagtgagtgagaaggcc

SEQ ID NO: 4704199 - DNA, 25 bp, Homo sapien
acagagtgagtgagaaggccagcca

SEQ ID NO: 4704200 - DNA, 25 bp, Homo sapien
tggtgagggagctggcccagcctct

SEQ ID NO: 4704201 - DNA, 25 bp, Homo sapien
ccagcactgactccatcatgtagtc

SEQ ID NO: 4704202 - DNA, 25 bp, Homo sapien
gcacgccagccatcgggccattgta

SEQ ID NO: 4704203 - DNA, 25 bp, Homo sapien
acgatggcgatgagaccggtgagca

SEQ ID NO: 4704204 - DNA, 25 bp, Homo sapien
ctcgtgggagtagacgatggcgatg

SEQ ID NO: 4704205 - DNA, 25 bp, Homo sapien
tgaagagcaccagcgagcgggcctt

SEQ ID NO: 4704206 - DNA, 25 bp, Homo sapien
ggaaggtagagtgccaccaccacgt

SEQ ID NO: 4704207 - DNA, 25 bp, Homo sapien
ctggtagacacgaagaccccgaaga

SEQ ID NO: 4704208 - DNA, 25 bp, Homo sapien
ccacgtagatgacccagctggtaga

SEQ ID NO: 4704209 - DNA, 25 bp, Homo sapien
tcccgcagggaaaggtaatactggc

SEQ ID NO: 4704210 - DNA, 25 bp, Homo sapien
tggcatcctgatcgcctaagctggg

SEQ ID NO: 4704211 - DNA, 25 bp, Homo sapien
tagcagtgtgaagctccgcacggat

SEQ ID NO: 4704212 - DNA, 25 bp, Homo sapien
tgttgattgaccagacagagtggcc

SEQ ID NO: 4704213 - DNA, 25 bp, Homo sapien
tgtgagagtcagcagtccctctgca

SEQ ID NO: 4704214 - DNA, 25 bp, Homo sapien
gcaactctgcttattaggaaccttc

SEQ ID NO: 4704215 - DNA, 25 bp, Homo sapien
tctgcaacgctagatgtgttcacct

SEQ ID NO: 4704216 - DNA, 25 bp, Homo sapien
tatctggtgaagaaagtctcctctc

SEQ ID NO: 4704217 - DNA, 25 bp, Homo sapien
cggcaaggtgcgatgtatgtctaac

SEQ ID NO: 4704218 - DNA, 25 bp, Homo sapien
tcctgtagatagagggaggaaagcc

SEQ ID NO: 4704219 - DNA, 25 bp, Homo sapien
ggcccttgggttgtgtgaactgaaa

SEQ ID NO: 4704220 - DNA, 25 bp, Homo sapien
gaggactcgttccttgcagaggtca

SEQ ID NO: 4704221 - DNA, 25 bp, Homo sapien
agaatctgccctgtgccgcctggtt

SEQ ID NO: 4704222 - DNA, 25 bp, Homo sapien
ctgcgggaacccagttgtgctgccc

SEQ ID NO: 4704223 - DNA, 25 bp, Homo sapien
gcttgacaatctgggcaaggcttgt

SEQ ID NO: 4704224 - DNA, 25 bp, Homo sapien
agcggcttccagagcagatgctgtt

SEQ ID NO: 4704225 - DNA, 25 bp, Homo sapien
tctcaaatgagtggaggcctcctgg

SEQ ID NO: 4704226 - DNA, 25 bp, Homo sapien
ggtacgcaggtgacgccttagcagc

SEQ ID NO: 4704227 - DNA, 25 bp, Homo sapien
tccccttctgatgcatggaggatgg

SEQ ID NO: 4704228 - DNA, 25 bp, Homo sapien
cagagacctcatcagcagaccaagg

SEQ ID NO: 4704229 - DNA, 25 bp, Homo sapien
gacttgtcaactgttatttaagccc

SEQ ID NO: 4704230 - DNA, 25 bp, Homo sapien
tgtcaactgttatttaagcccttcc

SEQ ID NO: 4704231 - DNA, 25 bp, Homo sapien
cttgtcaactgttatttaagccctt

SEQ ID NO: 4704232 - DNA, 25 bp, Homo sapien
tttgacttgtcaactgttatttaag

SEQ ID NO: 4704233 - DNA, 25 bp, Homo sapien
tcatttgaatgcgagggatgactgc

SEQ ID NO: 4704234 - DNA, 25 bp, Homo sapien
tcccagttcatttgaatgcgaggga

SEQ ID NO: 4704235 - DNA, 25 bp, Homo sapien
ggatgactgctgacatatgagggct

SEQ ID NO: 4704236 - DNA, 25 bp, Homo sapien
ctgctgacatatgagggctggtgtt

SEQ ID NO: 4704237 - DNA, 25 bp, Homo sapien
tgaaagggcatgattataatggatt

SEQ ID NO: 4704238 - DNA, 25 bp, Homo sapien
catgaaagggcatgattataatgga

SEQ ID NO: 4704239 - DNA, 25 bp, Homo sapien
gaaagggcatgattataatggatta

SEQ ID NO: 4704240 - DNA, 25 bp, Homo sapien
acatgaaagggcatgattataatgg

SEQ ID NO: 4704241 - DNA, 25 bp, Homo sapien
tgtacatatttctctcctagctgtg

SEQ ID NO: 4704242 - DNA, 25 bp, Homo sapien
gggagctgcaaatatggaatcaagg

SEQ ID NO: 4704243 - DNA, 25 bp, Homo sapien
gaaaccagggttctcactgttgtgg

SEQ ID NO: 4704244 - DNA, 25 bp, Homo sapien
gactcctcagtaacactggagatgg

SEQ ID NO: 4704245 - DNA, 25 bp, Homo sapien
agcagggctagcgcagcagaggtgg

SEQ ID NO: 4704246 - DNA, 25 bp, Homo sapien
gagggtggcctgtcaaactgtgagt

SEQ ID NO: 4704247 - DNA, 25 bp, Homo sapien
gggtggcctgtcaaactgtgagttc

SEQ ID NO: 4704248 - DNA, 25 bp, Homo sapien
agggtggcctgtcaaactgtgagtt

SEQ ID NO: 4704249 - DNA, 25 bp, Homo sapien
ctgaattaatcctttctcatggccg

SEQ ID NO: 4704250 - DNA, 25 bp, Homo sapien
aattcgtctcttagtggaaggtggc

SEQ ID NO: 4704251 - DNA, 25 bp, Homo sapien
tggcttgtgggtgtttggcttctca

SEQ ID NO: 4704252 - DNA, 25 bp, Homo sapien
gacatcaggaccaccagtacattgg

SEQ ID NO: 4704253 - DNA, 25 bp, Homo sapien
ttttgccttgtggcaatttgctgta

SEQ ID NO: 4704254 - DNA, 25 bp, Homo sapien
attttgccttgtggcaatttgctgt

SEQ ID NO: 4704255 - DNA, 25 bp, Homo sapien
caagctgcgtgcacgtttattgtga

SEQ ID NO: 4704256 - DNA, 25 bp, Homo sapien
gaataacattcaagacccgtgagca

SEQ ID NO: 4704257 - DNA, 25 bp, Homo sapien
caaagcagacgtgtaagttcccctg

SEQ ID NO: 4704258 - DNA, 25 bp, Homo sapien
gaagaagatcatggctaaagaggca

SEQ ID NO: 4704259 - DNA, 25 bp, Homo sapien
gacaggtttccttggtcatagtgga

SEQ ID NO: 4704260 - DNA, 25 bp, Homo sapien
ggcaaaagtggctcctgaggtcctt

SEQ ID NO: 4704261 - DNA, 25 bp, Homo sapien
gcatcccacatcatttggcccagtg

SEQ ID NO: 4704262 - DNA, 25 bp, Homo sapien
gctcctgaggtcctttttgtagcac

SEQ ID NO: 4704263 - DNA, 25 bp, Homo sapien
cattagcattgtttccgtagatatt

SEQ ID NO: 4704264 - DNA, 25 bp, Homo sapien
aataggttgggctagttaactgcag

SEQ ID NO: 4704265 - DNA, 25 bp, Homo sapien
aggaataggttgggctagttaactg

SEQ ID NO: 4704266 - DNA, 25 bp, Homo sapien
agcattgtttccgtagatattaaat

SEQ ID NO: 4704267 - DNA, 25 bp, Homo sapien
tttcggttgtgccaagaggcccttc

SEQ ID NO: 4704268 - DNA, 25 bp, Homo sapien
taaacgtctagcttgatccaactcg

SEQ ID NO: 4704269 - DNA, 25 bp, Homo sapien
ccactaaggttaggattggcagcta

SEQ ID NO: 4704270 - DNA, 25 bp, Homo sapien
ggcccttctacactaaatggctcat

SEQ ID NO: 4704271 - DNA, 25 bp, Homo sapien
ctctcgggagtacagcactgacaga

SEQ ID NO: 4704272 - DNA, 25 bp, Homo sapien
tttggctctcgggagtacagcactg

SEQ ID NO: 4704273 - DNA, 25 bp, Homo sapien
ggctctcgggagtacagcactgaca

SEQ ID NO: 4704274 - DNA, 25 bp, Homo sapien
aaattgaattgttatctccttcaaa

SEQ ID NO: 4704275 - DNA, 25 bp, Homo sapien
ggagcacatctttggcgcatagggt

SEQ ID NO: 4704276 - DNA, 25 bp, Homo sapien
ggaaaagccgtttttcatagcgcat

SEQ ID NO: 4704277 - DNA, 25 bp, Homo sapien
tatttgtttgggctgatagacccgg

SEQ ID NO: 4704278 - DNA, 25 bp, Homo sapien
gggactgcggtccaaagtccatctc

SEQ ID NO: 4704279 - DNA, 25 bp, Homo sapien
tcttcccatttgtgaagaatcagaa

SEQ ID NO: 4704280 - DNA, 25 bp, Homo sapien
ttcccatttgtgaagaatcagaaaa

SEQ ID NO: 4704281 - DNA, 25 bp, Homo sapien
ctggtaacagttcacttttgattct

SEQ ID NO: 4704282 - DNA, 25 bp, Homo sapien
ttcttcccatttgtgaagaatcaga

SEQ ID NO: 4704283 - DNA, 25 bp, Homo sapien
gttcgtacagccacagcgttctcgg

SEQ ID NO: 4704284 - DNA, 25 bp, Homo sapien
gcgttctcggcgtatttgtgcaagg

SEQ ID NO: 4704285 - DNA, 25 bp, Homo sapien
tcgggtctgattgaaggcagttcgt

SEQ ID NO: 4704286 - DNA, 25 bp, Homo sapien
gagtgaccttgataacacatggcca

SEQ ID NO: 4704287 - DNA, 25 bp, Homo sapien
tggctgtgaggtttcctttgactcg

SEQ ID NO: 4704288 - DNA, 25 bp, Homo sapien
gagagtccactggatgttggctgtg

SEQ ID NO: 4704289 - DNA, 25 bp, Homo sapien
tgagagtccactggatgttggctgt

SEQ ID NO: 4704290 - DNA, 25 bp, Homo sapien
ttggctgtgaggtttcctttgactc

SEQ ID NO: 4704291 - DNA, 25 bp, Homo sapien
gacttttgatcttggctctcacacc

SEQ ID NO: 4704292 - DNA, 25 bp, Homo sapien
tcagccaccacctgcgttgtgtaca

SEQ ID NO: 4704293 - DNA, 25 bp, Homo sapien
tgtcactgagtgtcaagcagcctgc

SEQ ID NO: 4704294 - DNA, 25 bp, Homo sapien
catccgtgttagaggcagcatgagc

SEQ ID NO: 4704295 - DNA, 25 bp, Homo sapien
gtgcagcgtgtgctgtctagggctg

SEQ ID NO: 4704296 - DNA, 25 bp, Homo sapien
caggctgttggtgtgcctctggcac

SEQ ID NO: 4704297 - DNA, 25 bp, Homo sapien
tcttttcccaggatgactgtgcagc

SEQ ID NO: 4704298 - DNA, 25 bp, Homo sapien
tttgtcaagaggcatgggcagtatt

SEQ ID NO: 4704299 - DNA, 25 bp, Homo sapien
tggcaaacaccaagtgatgcctcgt

SEQ ID NO: 4704300 - DNA, 25 bp, Homo sapien
accaagtgatgcctcgtggcaggga

SEQ ID NO: 4704301 - DNA, 25 bp, Homo sapien
tgagtgcctccttgttggcaaacac

SEQ ID NO: 4704302 - DNA, 25 bp, Homo sapien
gggtagaatcagaacgatcttgaac

SEQ ID NO: 4704303 - DNA, 25 bp, Homo sapien
tcactgggcctgctaaagtggccac

SEQ ID NO: 4704304 - DNA, 25 bp, Homo sapien
accctcctgccagcgctgtagctcc

SEQ ID NO: 4704305 - DNA, 25 bp, Homo sapien
actgggcctgctaaagtggccacag

SEQ ID NO: 4704306 - DNA, 25 bp, Homo sapien
agaccctcctgccagcgctgtagct

SEQ ID NO: 4704307 - DNA, 25 bp, Homo sapien
cttgcagggcaaatgcgaattcttg

SEQ ID NO: 4704308 - DNA, 25 bp, Homo sapien
tactgggagcatgccctgtggtcat

SEQ ID NO: 4704309 - DNA, 25 bp, Homo sapien
ctgtggtcataaccccggtagcagg

SEQ ID NO: 4704310 - DNA, 25 bp, Homo sapien
aattcttgggtctaaggtgaagtgg

SEQ ID NO: 4704311 - DNA, 25 bp, Homo sapien
gaacttccgaaaatggctcgagccc

SEQ ID NO: 4704312 - DNA, 25 bp, Homo sapien
tggtaaatcttgatgcagacctcgt

SEQ ID NO: 4704313 - DNA, 25 bp, Homo sapien
tcgagtttaacgagaagcgtccact

SEQ ID NO: 4704314 - DNA, 25 bp, Homo sapien
gattcaatgactgtcgagcctgtgg

SEQ ID NO: 4704315 - DNA, 25 bp, Homo sapien
ggtttggattgagcatccttagcgg

SEQ ID NO: 4704316 - DNA, 25 bp, Homo sapien
gattgagcatccttagcgggtctgg

SEQ ID NO: 4704317 - DNA, 25 bp, Homo sapien
cctggaacttgggtttggattgagc

SEQ ID NO: 4704318 - DNA, 25 bp, Homo sapien
ctggccagacccaactgggccaggg

SEQ ID NO: 4704319 - DNA, 25 bp, Homo sapien
gcactcagtaagacctcactgtact

SEQ ID NO: 4704320 - DNA, 25 bp, Homo sapien
agtaagacctcactgtactgcagca

SEQ ID NO: 4704321 - DNA, 25 bp, Homo sapien
tcacagcactcagtaagacctcact

SEQ ID NO: 4704322 - DNA, 25 bp, Homo sapien
cagtaagacctcactgtactgcagc

SEQ ID NO: 4704323 - DNA, 25 bp, Homo sapien
cagttcattcacagcagccggagcg

SEQ ID NO: 4704324 - DNA, 25 bp, Homo sapien
agccacgcagggctccacagcgcca

SEQ ID NO: 4704325 - DNA, 25 bp, Homo sapien
aggtggggagccgaaagccacgcag

SEQ ID NO: 4704326 - DNA, 25 bp, Homo sapien
tcattcacagcagccggagcgagga

SEQ ID NO: 4704327 - DNA, 25 bp, Homo sapien
cttctttgagaaatgccacagatct

SEQ ID NO: 4704328 - DNA, 25 bp, Homo sapien
ccgtcttctttgagaaatgccacag

SEQ ID NO: 4704329 - DNA, 25 bp, Homo sapien
ctagttgccgtcttctttgagaaat

SEQ ID NO: 4704330 - DNA, 25 bp, Homo sapien
cgtcttctttgagaaatgccacaga

SEQ ID NO: 4704331 - DNA, 25 bp, Homo sapien
ttgtgtagaaagtgttaggcgctcc

SEQ ID NO: 4704332 - DNA, 25 bp, Homo sapien
gatgtggacatctccacccgtgttg

SEQ ID NO: 4704333 - DNA, 25 bp, Homo sapien
agtgttaggcgctccttcagagcag

SEQ ID NO: 4704334 - DNA, 25 bp, Homo sapien
cgtcatcgtgaaggacactgagtcc

SEQ ID NO: 4704335 - DNA, 25 bp, Homo sapien
cacagcggggtatgagatttgcaga

SEQ ID NO: 4704336 - DNA, 25 bp, Homo sapien
ccatttcctggctatgcgacctggg

SEQ ID NO: 4704337 - DNA, 25 bp, Homo sapien
tggggaaggcacttgacctcgctga

SEQ ID NO: 4704338 - DNA, 25 bp, Homo sapien
taggtttaatcaccaacctcatgtc

SEQ ID NO: 4704339 - DNA, 25 bp, Homo sapien
cagggagggcttgacgtcctgtggg

SEQ ID NO: 4704340 - DNA, 25 bp, Homo sapien
agtcctcctcgttcttcctgaaggc

SEQ ID NO: 4704341 - DNA, 25 bp, Homo sapien
gcacagggagggcttgacgtcctgt

SEQ ID NO: 4704342 - DNA, 25 bp, Homo sapien
tggggactccagtcctcctcgttct

SEQ ID NO: 4704343 - DNA, 25 bp, Homo sapien
ggctcagcttcattagccaacaggg

SEQ ID NO: 4704344 - DNA, 25 bp, Homo sapien
taccccatatgacaagaggctcagc

SEQ ID NO: 4704345 - DNA, 25 bp, Homo sapien
tataacgtgcctacaaaccagtaag

SEQ ID NO: 4704346 - DNA, 25 bp, Homo sapien
gatgtggagcaatgcacctctctta

SEQ ID NO: 4704347 - DNA, 25 bp, Homo sapien
gtgaggggctcgagctcactctgaa

SEQ ID NO: 4704348 - DNA, 25 bp, Homo sapien
tccagtgaggggctcgagctcactc

SEQ ID NO: 4704349 - DNA, 25 bp, Homo sapien
gaggggctcgagctcactctgaagc

SEQ ID NO: 4704350 - DNA, 25 bp, Homo sapien
cagtgaggggctcgagctcactctg

SEQ ID NO: 4704351 - DNA, 25 bp, Homo sapien
acagccagcccaagcatctcaacca

SEQ ID NO: 4704352 - DNA, 25 bp, Homo sapien
ccaagcatctcaaccacctccagct

SEQ ID NO: 4704353 - DNA, 25 bp, Homo sapien
tgtcacagcagctccgggacgctgg

SEQ ID NO: 4704354 - DNA, 25 bp, Homo sapien
agcagcccagctcgcactcatctgt

SEQ ID NO: 4704355 - DNA, 25 bp, Homo sapien
ttttaggaggccagccattcgcacg

SEQ ID NO: 4704356 - DNA, 25 bp, Homo sapien
gaagccaactttgccgaggcctccc

SEQ ID NO: 4704357 - DNA, 25 bp, Homo sapien
cattcgcacgcgatgatggatggtt

SEQ ID NO: 4704358 - DNA, 25 bp, Homo sapien
tttgctggcgggaaccaacgtctgg

SEQ ID NO: 4704359 - DNA, 25 bp, Homo sapien
acaaggtgcccttctcatctgtgcc

SEQ ID NO: 4704360 - DNA, 25 bp, Homo sapien
cactgttcggccatcaggtctgtgg

SEQ ID NO: 4704361 - DNA, 25 bp, Homo sapien
tgtgggcctgctgctacatcgagag

SEQ ID NO: 4704362 - DNA, 25 bp, Homo sapien
agcccctgcaaacctgacgggaggc

SEQ ID NO: 4704363 - DNA, 25 bp, Homo sapien
agcaccttcccagacacgcaggaag

SEQ ID NO: 4704364 - DNA, 25 bp, Homo sapien
tttcataaagcagcgccatgtgtgc

SEQ ID NO: 4704365 - DNA, 25 bp, Homo sapien
tctccgcgagctgttactggaatga

SEQ ID NO: 4704366 - DNA, 25 bp, Homo sapien
tgaagagcagactccctctgtggct

SEQ ID NO: 4704367 - DNA, 25 bp, Homo sapien
ctgggcctgcacctttatctgcaaa

SEQ ID NO: 4704368 - DNA, 25 bp, Homo sapien
agccctgggcctgcacctttatctg

SEQ ID NO: 4704369 - DNA, 25 bp, Homo sapien
gccctgggagatggcgggcagctgc

SEQ ID NO: 4704370 - DNA, 25 bp, Homo sapien
ccctgggagatggcgggcagctgct

SEQ ID NO: 4704371 - DNA, 25 bp, Homo sapien
ctgagctgtgcagcgtagaccagct

SEQ ID NO: 4704372 - DNA, 25 bp, Homo sapien
gcgtagaccagctcttgcacaggat

SEQ ID NO: 4704373 - DNA, 25 bp, Homo sapien
tgctcagtaaatggcgatgtgggtt

SEQ ID NO: 4704374 - DNA, 25 bp, Homo sapien
cagctcttgcacaggattagtgctc

SEQ ID NO: 4704375 - DNA, 25 bp, Homo sapien
tggatccagggctcacagtaggatg

SEQ ID NO: 4704376 - DNA, 25 bp, Homo sapien
cgtacagcaggacgcacacctggat

SEQ ID NO: 4704377 - DNA, 25 bp, Homo sapien
tatggtagggtgagcaccgaatccg

SEQ ID NO: 4704378 - DNA, 25 bp, Homo sapien
taggatgcacactgaatcccgggca

SEQ ID NO: 4704379 - DNA, 25 bp, Homo sapien
atgacctttgggcactcgggagccc

SEQ ID NO: 4704380 - DNA, 25 bp, Homo sapien
ctgcatgctgcgtcgccagcctcca

SEQ ID NO: 4704381 - DNA, 25 bp, Homo sapien
cccatgacctttgggcactcgggag

SEQ ID NO: 4704382 - DNA, 25 bp, Homo sapien
tgatgcccatgacctttgggcactc

SEQ ID NO: 4704383 - DNA, 25 bp, Homo sapien
cacagtacgtagaagccgatattgg

SEQ ID NO: 4704384 - DNA, 25 bp, Homo sapien
agaatcttctcttcacagtacgtag

SEQ ID NO: 4704385 - DNA, 25 bp, Homo sapien
cacccagatctaagagaatcttctc

SEQ ID NO: 4704386 - DNA, 25 bp, Homo sapien
ctttcacccagatctaagagaatct

SEQ ID NO: 4704387 - DNA, 25 bp, Homo sapien
caggaacttcagggcacagtgtgca

SEQ ID NO: 4704388 - DNA, 25 bp, Homo sapien
tctgctgaaaacctagacctagagg

SEQ ID NO: 4704389 - DNA, 25 bp, Homo sapien
catgctgccaggagataactaggac

SEQ ID NO: 4704390 - DNA, 25 bp, Homo sapien
ctgagggtgccatcgcatcagggca

SEQ ID NO: 4704391 - DNA, 25 bp, Homo sapien
gcatctggtcataggtctggcaagt

SEQ ID NO: 4704392 - DNA, 25 bp, Homo sapien
gacaggggcatctggtcataggtct

SEQ ID NO: 4704393 - DNA, 25 bp, Homo sapien
tcataggtctggcaagtgcccggcg

SEQ ID NO: 4704394 - DNA, 25 bp, Homo sapien
ccggcgggggtgtgcagaggatgct

SEQ ID NO: 4704395 - DNA, 25 bp, Homo sapien
aagtttgatggagaagtaggtggta

SEQ ID NO: 4704396 - DNA, 25 bp, Homo sapien
ggatgtttctctgactgcagggccg

SEQ ID NO: 4704397 - DNA, 25 bp, Homo sapien
ttggatgtttctctgactgcagggc

SEQ ID NO: 4704398 - DNA, 25 bp, Homo sapien
gaagtaggtggtattgtctgtgttt

SEQ ID NO: 4704399 - DNA, 25 bp, Homo sapien
ttgactttctgagggcacgctgcgt

SEQ ID NO: 4704400 - DNA, 25 bp, Homo sapien
tattgaccaggtcgccaagcagaag

SEQ ID NO: 4704401 - DNA, 25 bp, Homo sapien
cgttaggcttaatccaacagtcgaa

SEQ ID NO: 4704402 - DNA, 25 bp, Homo sapien
gaaagcctgggccatcctgttgact

SEQ ID NO: 4704403 - DNA, 25 bp, Homo sapien
aattttaagtagtctgattgtatgg

SEQ ID NO: 4704404 - DNA, 25 bp, Homo sapien
aacttttacatcttgttccaggaat

SEQ ID NO: 4704405 - DNA, 25 bp, Homo sapien
cgtattaattgcaaatgggctagac

SEQ ID NO: 4704406 - DNA, 25 bp, Homo sapien
tatggaagtgggtcgtattaattgc

SEQ ID NO: 4704407 - DNA, 25 bp, Homo sapien
tatgagatatgctactaaggcgttc

SEQ ID NO: 4704408 - DNA, 25 bp, Homo sapien
tggtaagtcccagctctagtgtcaa

SEQ ID NO: 4704409 - DNA, 25 bp, Homo sapien
gtttttgccctcacggagcctgtct

SEQ ID NO: 4704410 - DNA, 25 bp, Homo sapien
tctaggcactgttcggcgtggacca

SEQ ID NO: 4704411 - DNA, 25 bp, Homo sapien
tggtgccaggtgcatcagactcagt

SEQ ID NO: 4704412 - DNA, 25 bp, Homo sapien
gccaggtgcatcagactcagtgatt

SEQ ID NO: 4704413 - DNA, 25 bp, Homo sapien
gtttgatggtgccaggtgcatcaga

SEQ ID NO: 4704414 - DNA, 25 bp, Homo sapien
catcagactcagtgattaatctgac

SEQ ID NO: 4704415 - DNA, 25 bp, Homo sapien
ccacatccatcgtgaggtgggtgat

SEQ ID NO: 4704416 - DNA, 25 bp, Homo sapien
ggccatggggttaatcatactttta

SEQ ID NO: 4704417 - DNA, 25 bp, Homo sapien
ggccagtggtaggtgatttgattca

SEQ ID NO: 4704418 - DNA, 25 bp, Homo sapien
tatgagatggcaaatctctaggcta

SEQ ID NO: 4704419 - DNA, 25 bp, Homo sapien
ttagaagtgaacaaaagtatagggc

SEQ ID NO: 4704420 - DNA, 25 bp, Homo sapien
gaaatccattttcgccatttgaaaa

SEQ ID NO: 4704421 - DNA, 25 bp, Homo sapien
gaacaaaagtatagggctcttgaaa

SEQ ID NO: 4704422 - DNA, 25 bp, Homo sapien
tgtttctgatgcagcggagatgttg

SEQ ID NO: 4704423 - DNA, 25 bp, Homo sapien
ctgtgttcaaagggattactggctg

SEQ ID NO: 4704424 - DNA, 25 bp, Homo sapien
ggagggttaaaaatgttgataagca

SEQ ID NO: 4704425 - DNA, 25 bp, Homo sapien
agctcagcctccttgttttcgtacc

SEQ ID NO: 4704426 - DNA, 25 bp, Homo sapien
gtacccatttagatcagcagagacc

SEQ ID NO: 4704427 - DNA, 25 bp, Homo sapien
gcagagacctctctaatgacactct

SEQ ID NO: 4704428 - DNA, 25 bp, Homo sapien
ctagttcacgaaagcagcggttctg

SEQ ID NO: 4704429 - DNA, 25 bp, Homo sapien
tagttcacgaaagcagcggttctgt

SEQ ID NO: 4704430 - DNA, 25 bp, Homo sapien
cgaaagcagcggttctgtcctgtgc

SEQ ID NO: 4704431 - DNA, 25 bp, Homo sapien
ttcacgaaagcagcggttctgtcct

SEQ ID NO: 4704432 - DNA, 25 bp, Homo sapien
ttgttctctacgctaaaacttaatc

SEQ ID NO: 4704433 - DNA, 25 bp, Homo sapien
tctgtttggaacaattccatttcct

SEQ ID NO: 4704434 - DNA, 25 bp, Homo sapien
tcctctctgtagaaattgactggcc

SEQ ID NO: 4704435 - DNA, 25 bp, Homo sapien
ctctctgtagaaattgactggccat

SEQ ID NO: 4704436 - DNA, 25 bp, Homo sapien
tggaacgcagtcaagaaccaagaag

SEQ ID NO: 4704437 - DNA, 25 bp, Homo sapien
caagaagtatggagaggaggcctaa

SEQ ID NO: 4704438 - DNA, 25 bp, Homo sapien
ggaggcctaaccgaaagtgctgtta

SEQ ID NO: 4704439 - DNA, 25 bp, Homo sapien
gatcagtacttactctgggtgggta

SEQ ID NO: 4704440 - DNA, 25 bp, Homo sapien
tccactgtggtatgtttcaactctg

SEQ ID NO: 4704441 - DNA, 25 bp, Homo sapien
taatgccatggcctcgcgctagaag

SEQ ID NO: 4704442 - DNA, 25 bp, Homo sapien
gaccagttagcaagtaagtgtttcc

SEQ ID NO: 4704443 - DNA, 25 bp, Homo sapien
gcgctagaagcacattccactgtgg

SEQ ID NO: 4704444 - DNA, 25 bp, Homo sapien
tgcctcgggagagccagataatgtc

SEQ ID NO: 4704445 - DNA, 25 bp, Homo sapien
gaaataaactcatatggactccggc

SEQ ID NO: 4704446 - DNA, 25 bp, Homo sapien
gaataaaacgccctcttgcgatggt

SEQ ID NO: 4704447 - DNA, 25 bp, Homo sapien
agataatgtccagggagctcccaag

SEQ ID NO: 4704448 - DNA, 25 bp, Homo sapien
tcaaaggcagtaacacacagagctg

SEQ ID NO: 4704449 - DNA, 25 bp, Homo sapien
agggtcaggatcatctgtatcagag

SEQ ID NO: 4704450 - DNA, 25 bp, Homo sapien
cttcaaaggcagtaacacacagagc

SEQ ID NO: 4704451 - DNA, 25 bp, Homo sapien
catctgtatcagagtcttccacctt

SEQ ID NO: 4704452 - DNA, 25 bp, Homo sapien
cactttaggcggacaggagaactga

SEQ ID NO: 4704453 - DNA, 25 bp, Homo sapien
tcagggacggaacactttaggcgga

SEQ ID NO: 4704454 - DNA, 25 bp, Homo sapien
tgtagcctgtcagggacggaacact

SEQ ID NO: 4704455 - DNA, 25 bp, Homo sapien
ggagaactgattcgctcccctgctg

SEQ ID NO: 4704456 - DNA, 25 bp, Homo sapien
cagctctctaaagtctaatgggcct

SEQ ID NO: 4704457 - DNA, 25 bp, Homo sapien
tccctgcatggattgtctactgagg

SEQ ID NO: 4704458 - DNA, 25 bp, Homo sapien
catgtgtcgatttggtgattctgca

SEQ ID NO: 4704459 - DNA, 25 bp, Homo sapien
tctactgaggcaagatgtttggcga

SEQ ID NO: 4704460 - DNA, 25 bp, Homo sapien
tgtccatggacttgaaattggcttc

SEQ ID NO: 4704461 - DNA, 25 bp, Homo sapien
caatgagcctatatccatttgtata

SEQ ID NO: 4704462 - DNA, 25 bp, Homo sapien
ttttcaatgagcctatatccatttg

SEQ ID NO: 4704463 - DNA, 25 bp, Homo sapien
tccatgacattgttccaattgcatg

SEQ ID NO: 4704464 - DNA, 25 bp, Homo sapien
tcttgagaaaggaatagtgattttc

SEQ ID NO: 4704465 - DNA, 25 bp, Homo sapien
gaatcttgagaaaggaatagtgatt

SEQ ID NO: 4704466 - DNA, 25 bp, Homo sapien
ccttaaagaagcctttggtgaatct

SEQ ID NO: 4704467 - DNA, 25 bp, Homo sapien
taaagaagcctttggtgaatcttga

SEQ ID NO: 4704468 - DNA, 25 bp, Homo sapien
agcagatttgggaaagtttgagtaa

SEQ ID NO: 4704469 - DNA, 25 bp, Homo sapien
cagatttgggaaagtttgagtaagg

SEQ ID NO: 4704470 - DNA, 25 bp, Homo sapien
cagcagatttgggaaagtttgagta

SEQ ID NO: 4704471 - DNA, 25 bp, Homo sapien
gcagatttgggaaagtttgagtaag

SEQ ID NO: 4704472 - DNA, 25 bp, Homo sapien
caggctactttccatatctgggctc

SEQ ID NO: 4704473 - DNA, 25 bp, Homo sapien
cctctggatggacgtggttggtgat

SEQ ID NO: 4704474 - DNA, 25 bp, Homo sapien
gatgcgtgaatattccttcttggac

SEQ ID NO: 4704475 - DNA, 25 bp, Homo sapien
tcccaaagcaggctactttccatat

SEQ ID NO: 4704476 - DNA, 25 bp, Homo sapien
ctgctgattcaaagccattccaggc

SEQ ID NO: 4704477 - DNA, 25 bp, Homo sapien
ttctcgagtgcttagaaggatgcct

SEQ ID NO: 4704478 - DNA, 25 bp, Homo sapien
tagagcttctgtgctgactcttctg

SEQ ID NO: 4704479 - DNA, 25 bp, Homo sapien
cacattgcaggtgtcatcttctcag

SEQ ID NO: 4704480 - DNA, 25 bp, Homo sapien
tcctgctgaggttgaagttttctga

SEQ ID NO: 4704481 - DNA, 25 bp, Homo sapien
ctttagtgtcctgctgaggttgaag

SEQ ID NO: 4704482 - DNA, 25 bp, Homo sapien
taaaatcaatggagataaacctcag

SEQ ID NO: 4704483 - DNA, 25 bp, Homo sapien
cacaatgaggtggttaggctctgct

SEQ ID NO: 4704484 - DNA, 25 bp, Homo sapien
cgctttggggaactctgtatttggt

SEQ ID NO: 4704485 - DNA, 25 bp, Homo sapien
tatttggtgaagaggctcgactgtt

SEQ ID NO: 4704486 - DNA, 25 bp, Homo sapien
tggtgaagaggctcgactgttttgt

SEQ ID NO: 4704487 - DNA, 25 bp, Homo sapien
tcaccaggggtacactccacgcttt

SEQ ID NO: 4704488 - DNA, 25 bp, Homo sapien
caaagaaagcgcccttctgagaggc

SEQ ID NO: 4704489 - DNA, 25 bp, Homo sapien
tcaaagaaagcgcccttctgagagg

SEQ ID NO: 4704490 - DNA, 25 bp, Homo sapien
ttggagatgccaataccatttctgc

SEQ ID NO: 4704491 - DNA, 25 bp, Homo sapien
aagggaatttccttggtgaggtcat

SEQ ID NO: 4704492 - DNA, 25 bp, Homo sapien
gggtcacgtaggtcactagggccca

SEQ ID NO: 4704493 - DNA, 25 bp, Homo sapien
agaggctccatcttgggtcacgtag

SEQ ID NO: 4704494 - DNA, 25 bp, Homo sapien
acctcgaaaactccagaggctccat

SEQ ID NO: 4704495 - DNA, 25 bp, Homo sapien
tcttgggtcacgtaggtcactaggg

SEQ ID NO: 4704496 - DNA, 25 bp, Homo sapien
aatgggtttctaatggactcaggaa

SEQ ID NO: 4704497 - DNA, 25 bp, Homo sapien
caccaactttcctgataagggatct

SEQ ID NO: 4704498 - DNA, 25 bp, Homo sapien
tgataagggatctttgtggtcagcg

SEQ ID NO: 4704499 - DNA, 25 bp, Homo sapien
gtttctaatggactcaggaaagctc

SEQ ID NO: 4704500 - DNA, 25 bp, Homo sapien
gctagaatgagtcctcggtgagctt

SEQ ID NO: 4704501 - DNA, 25 bp, Homo sapien
tcacgatgtgattggcgcagctaga

SEQ ID NO: 4704502 - DNA, 25 bp, Homo sapien
tcgtgaagaccgcagctctattgct

SEQ ID NO: 4704503 - DNA, 25 bp, Homo sapien
ctattgctgctttcgattttacatt

SEQ ID NO: 4704504 - DNA, 25 bp, Homo sapien
ttctcatggagcaaactcggagtac

SEQ ID NO: 4704505 - DNA, 25 bp, Homo sapien
ttcagtaaacactcgtggaattgga

SEQ ID NO: 4704506 - DNA, 25 bp, Homo sapien
tacagagggagcgttcagtaaacac

SEQ ID NO: 4704507 - DNA, 25 bp, Homo sapien
gtggcaggaccaccttttgttcatg

SEQ ID NO: 4704508 - DNA, 25 bp, Homo sapien
cgctttccactcctcccacttccag

SEQ ID NO: 4704509 - DNA, 25 bp, Homo sapien
ctcccacttccaggtattccttggg

SEQ ID NO: 4704510 - DNA, 25 bp, Homo sapien
tcctcccacttccaggtattccttg

SEQ ID NO: 4704511 - DNA, 25 bp, Homo sapien
cacccgctttccactcctcccactt

SEQ ID NO: 4704512 - DNA, 25 bp, Homo sapien
caaatgtttccctgaacgatcaaca

SEQ ID NO: 4704513 - DNA, 25 bp, Homo sapien
ccagtacaaatgtttccctgaacga

SEQ ID NO: 4704514 - DNA, 25 bp, Homo sapien
cctgaacgatcaacacaatgacaac

SEQ ID NO: 4704515 - DNA, 25 bp, Homo sapien
gtttccctgaacgatcaacacaatg

SEQ ID NO: 4704516 - DNA, 25 bp, Homo sapien
ctgttagggaggtggtaagatgctg

SEQ ID NO: 4704517 - DNA, 25 bp, Homo sapien
tagggaggtggtaagatgctgtgcc

SEQ ID NO: 4704518 - DNA, 25 bp, Homo sapien
ttagggaggtggtaagatgctgtgc

SEQ ID NO: 4704519 - DNA, 25 bp, Homo sapien
gggaggtggtaagatgctgtgccca

SEQ ID NO: 4704520 - DNA, 25 bp, Homo sapien
tctgttcacttatgccaggccacga

SEQ ID NO: 4704521 - DNA, 25 bp, Homo sapien
tatgccaggccacgattttgattct

SEQ ID NO: 4704522 - DNA, 25 bp, Homo sapien
tcgctcactctgttcacttatgcca

SEQ ID NO: 4704523 - DNA, 25 bp, Homo sapien
ttttgattcttcgacaaactctttg

SEQ ID NO: 4704524 - DNA, 25 bp, Homo sapien
cacaaccagagcctgaataccagct

SEQ ID NO: 4704525 - DNA, 25 bp, Homo sapien
cagagcctgaataccagctgacaca

SEQ ID NO: 4704526 - DNA, 25 bp, Homo sapien
gggagcgatctgagcgcacaaccag

SEQ ID NO: 4704527 - DNA, 25 bp, Homo sapien
atctgagcgcacaaccagagcctga

SEQ ID NO: 4704528 - DNA, 25 bp, Homo sapien
gggggtcgctgcctaaacatcgcct

SEQ ID NO: 4704529 - DNA, 25 bp, Homo sapien
caccacggagcaacggtcttcttaa

SEQ ID NO: 4704530 - DNA, 25 bp, Homo sapien
caggaaggaaatattgcgcggctcg

SEQ ID NO: 4704531 - DNA, 25 bp, Homo sapien
tctggggggtcgctgcctaaacatc

SEQ ID NO: 4704532 - DNA, 25 bp, Homo sapien
tctcggtctgatccgggctgcgtaa

SEQ ID NO: 4704533 - DNA, 25 bp, Homo sapien
ggcttttatctctcggtctgatccg

SEQ ID NO: 4704534 - DNA, 25 bp, Homo sapien
tatctctcggtctgatccgggctgc

SEQ ID NO: 4704535 - DNA, 25 bp, Homo sapien
caccatcggggcttttatctctcgg

SEQ ID NO: 4704536 - DNA, 25 bp, Homo sapien
ctgagcgggaggtcgccgctaacaa

SEQ ID NO: 4704537 - DNA, 25 bp, Homo sapien
tgcactccgctccaagttaatgccg

SEQ ID NO: 4704538 - DNA, 25 bp, Homo sapien
gctaacaagtgcaaactttttggcc

SEQ ID NO: 4704539 - DNA, 25 bp, Homo sapien
taatgccgaggctaaatcctcttgc

SEQ ID NO: 4704540 - DNA, 25 bp, Homo sapien
aaaatgaaaccggcctggccaagct

SEQ ID NO: 4704541 - DNA, 25 bp, Homo sapien
ccaagctgcagcctctccccccgcc

SEQ ID NO: 4704542 - DNA, 25 bp, Homo sapien
aagctgcagcctctccccccgcccg

SEQ ID NO: 4704543 - DNA, 25 bp, Homo sapien
atgaaaccggcctggccaagctgca

SEQ ID NO: 4704544 - DNA, 25 bp, Homo sapien
tttgccgggccgctgtaagtggctc

SEQ ID NO: 4704545 - DNA, 25 bp, Homo sapien
cctctggggcgactccagttctcag

SEQ ID NO: 4704546 - DNA, 25 bp, Homo sapien
ttttgcatccgagcctttgccgggc

SEQ ID NO: 4704547 - DNA, 25 bp, Homo sapien
agcagccgccaccaaacaacttttg

SEQ ID NO: 4704548 - DNA, 25 bp, Homo sapien
gagaagtttccagccggactggccg

SEQ ID NO: 4704549 - DNA, 25 bp, Homo sapien
ggactggccgggagtttctctgtgc

SEQ ID NO: 4704550 - DNA, 25 bp, Homo sapien
acgccggccccaaaccagtgcctgc

SEQ ID NO: 4704551 - DNA, 25 bp, Homo sapien
gccggccccaaaccagtgcctgcgc

SEQ ID NO: 4704552 - DNA, 25 bp, Homo sapien
agacggccaacttactccggagcgg

SEQ ID NO: 4704553 - DNA, 25 bp, Homo sapien
gcaagccacggcagcaattaataat

SEQ ID NO: 4704554 - DNA, 25 bp, Homo sapien
tcgtcttcccaaagttgcgtgcaag

SEQ ID NO: 4704555 - DNA, 25 bp, Homo sapien
tcggcactgcctctcttaattaaaa

SEQ ID NO: 4704556 - DNA, 25 bp, Homo sapien
ttgaattagcgcctcccgagctggc

SEQ ID NO: 4704557 - DNA, 25 bp, Homo sapien
ttctctgtcttattgaattagcgcc

SEQ ID NO: 4704558 - DNA, 25 bp, Homo sapien
tgatagccagggtattaaaactcga

SEQ ID NO: 4704559 - DNA, 25 bp, Homo sapien
ctcgccgtgtgggaaacttgccgcg

SEQ ID NO: 4704560 - DNA, 25 bp, Homo sapien
gagagagagagagctcattagcaac

SEQ ID NO: 4704561 - DNA, 25 bp, Homo sapien
ctttcattgtaagaggggaggagag

SEQ ID NO: 4704562 - DNA, 25 bp, Homo sapien
gagagagagctcattagcaacaaca

SEQ ID NO: 4704563 - DNA, 25 bp, Homo sapien
gagagagagagctcattagcaacaa

SEQ ID NO: 4704564 - DNA, 25 bp, Homo sapien
gatctcagctctcaatccatccagg

SEQ ID NO: 4704565 - DNA, 25 bp, Homo sapien
tttctgagatctcagctctcaatcc

SEQ ID NO: 4704566 - DNA, 25 bp, Homo sapien
tctcagctctcaatccatccaggta

SEQ ID NO: 4704567 - DNA, 25 bp, Homo sapien
tgagatctcagctctcaatccatcc

SEQ ID NO: 4704568 - DNA, 25 bp, Homo sapien
gctggaaacatgttccctctttggg

SEQ ID NO: 4704569 - DNA, 25 bp, Homo sapien
aaaatcaggaggtgggcatgttagc

SEQ ID NO: 4704570 - DNA, 25 bp, Homo sapien
tctttcatatgagcttaaggtggca

SEQ ID NO: 4704571 - DNA, 25 bp, Homo sapien
ggctggtagccatcggcaacttatt

SEQ ID NO: 4704572 - DNA, 25 bp, Homo sapien
aaagggctcttaatgggtgacgtgc

SEQ ID NO: 4704573 - DNA, 25 bp, Homo sapien
ggtgacgtgctcaacacaacggcaa

SEQ ID NO: 4704574 - DNA, 25 bp, Homo sapien
tcccctggaggtgaatctgatcaaa

SEQ ID NO: 4704575 - DNA, 25 bp, Homo sapien
ggagaaaatccgcagggatcctgca

SEQ ID NO: 4704576 - DNA, 25 bp, Homo sapien
cagggacccgagcactgaagctttg

SEQ ID NO: 4704577 - DNA, 25 bp, Homo sapien
actcgcggcctcagcatggaaatgc

SEQ ID NO: 4704578 - DNA, 25 bp, Homo sapien
tgaagctttgcaaacagcgaggaac

SEQ ID NO: 4704579 - DNA, 25 bp, Homo sapien
gccgacacggaaaattcagagccag

SEQ ID NO: 4704580 - DNA, 25 bp, Homo sapien
gcagtctgcagaggcgcggcccaga

SEQ ID NO: 4704581 - DNA, 25 bp, Homo sapien
ggctgcgcagtctgcagaggcgcgg

SEQ ID NO: 4704582 - DNA, 25 bp, Homo sapien
gctgcgcagtctgcagaggcgcggc

SEQ ID NO: 4704583 - DNA, 25 bp, Homo sapien
tgcgcagtctgcagaggcgcggccc

SEQ ID NO: 4704584 - DNA, 25 bp, Homo sapien
tctgtggtcacccaggatttgcaga

SEQ ID NO: 4704585 - DNA, 25 bp, Homo sapien
tcaccttgacgtagtccttcaggcg

SEQ ID NO: 4704586 - DNA, 25 bp, Homo sapien
ccttgggctggcaggcgtagaactc

SEQ ID NO: 4704587 - DNA, 25 bp, Homo sapien
gcagatgtcatagtccccagaggcc

SEQ ID NO: 4704588 - DNA, 25 bp, Homo sapien
tcccacttggcctgggcaaacaaaa

SEQ ID NO: 4704589 - DNA, 25 bp, Homo sapien
ctcccacttggcctgggcaaacaaa

SEQ ID NO: 4704590 - DNA, 25 bp, Homo sapien
cacttggcctgggcaaacaaaagag

SEQ ID NO: 4704591 - DNA, 25 bp, Homo sapien
cccacttggcctgggcaaacaaaag

SEQ ID NO: 4704592 - DNA, 25 bp, Homo sapien
tagcctgaaggctgcggagctgaat

SEQ ID NO: 4704593 - DNA, 25 bp, Homo sapien
tcccgagggaactgaactagtggcc

SEQ ID NO: 4704594 - DNA, 25 bp, Homo sapien
tcatggtaccgtctgctggattgga

SEQ ID NO: 4704595 - DNA, 25 bp, Homo sapien
taagaggttgcaccacagaaaggat

SEQ ID NO: 4704596 - DNA, 25 bp, Homo sapien
gaatgacaacggctaacatctgcgt

SEQ ID NO: 4704597 - DNA, 25 bp, Homo sapien
acaatgaccctaggagtgtgtgctc

SEQ ID NO: 4704598 - DNA, 25 bp, Homo sapien
gaggactcctcgcaatggcatcagg

SEQ ID NO: 4704599 - DNA, 25 bp, Homo sapien
ctctagctagggaggcaagggacaa

SEQ ID NO: 4704600 - DNA, 25 bp, Homo sapien
gcagttatggccacagactatccag

SEQ ID NO: 4704601 - DNA, 25 bp, Homo sapien
gagccggcccatgagatcaagtcct

SEQ ID NO: 4704602 - DNA, 25 bp, Homo sapien
gagagggcctcggacttgactctga

SEQ ID NO: 4704603 - DNA, 25 bp, Homo sapien
tgacaagcctgagtaagaagctacc

SEQ ID NO: 4704604 - DNA, 25 bp, Homo sapien
tatttaagtccatcacacaggtggc

SEQ ID NO: 4704605 - DNA, 25 bp, Homo sapien
acatttgtaatcaaagcagagctgg

SEQ ID NO: 4704606 - DNA, 25 bp, Homo sapien
cgaggacttgcccatgtgggagatt

SEQ ID NO: 4704607 - DNA, 25 bp, Homo sapien
gatggcagcccatgatgaaatattt

SEQ ID NO: 4704608 - DNA, 25 bp, Homo sapien
gcctgccttctcaacggagtgatgt

SEQ ID NO: 4704609 - DNA, 25 bp, Homo sapien
gaaaatcaccgaggccataatcaca

SEQ ID NO: 4704610 - DNA, 25 bp, Homo sapien
gcaccgtgacactcctacattatgg

SEQ ID NO: 4704611 - DNA, 25 bp, Homo sapien
ctagcaatacaaggcgtggcgtccc

SEQ ID NO: 4704612 - DNA, 25 bp, Homo sapien
agcaaggacccatgggcgatggcaa

SEQ ID NO: 4704613 - DNA, 25 bp, Homo sapien
cctcggagtgcagccgggcttgcgc

SEQ ID NO: 4704614 - DNA, 25 bp, Homo sapien
cttgcgctcccgtgggctggatgtt

SEQ ID NO: 4704615 - DNA, 25 bp, Homo sapien
gatgttgggacacacgtagcacctg

SEQ ID NO: 4704616 - DNA, 25 bp, Homo sapien
gagggtctgcaccccgcatctgaaa

SEQ ID NO: 4704617 - DNA, 25 bp, Homo sapien
gtctgcaccccgcatctgaaaaggc

SEQ ID NO: 4704618 - DNA, 25 bp, Homo sapien
gggtctgcaccccgcatctgaaaag

SEQ ID NO: 4704619 - DNA, 25 bp, Homo sapien
tgcaccccgcatctgaaaaggccgt

SEQ ID NO: 4704620 - DNA, 25 bp, Homo sapien
tcaggtggccttgctgaaggacagg

SEQ ID NO: 4704621 - DNA, 25 bp, Homo sapien
aggtggccttgctgaaggacaggaa

SEQ ID NO: 4704622 - DNA, 25 bp, Homo sapien
gtggccttgctgaaggacaggaagc

SEQ ID NO: 4704623 - DNA, 25 bp, Homo sapien
caggtggccttgctgaaggacagga

SEQ ID NO: 4704624 - DNA, 25 bp, Homo sapien
ttccttgcaaggctggaatttacaa

SEQ ID NO: 4704625 - DNA, 25 bp, Homo sapien
ccttccttgcaaggctggaatttac

SEQ ID NO: 4704626 - DNA, 25 bp, Homo sapien
tccttgcaaggctggaatttacaat

SEQ ID NO: 4704627 - DNA, 25 bp, Homo sapien
ccttgcaaggctggaatttacaatt

SEQ ID NO: 4704628 - DNA, 25 bp, Homo sapien
ggttgtgacggcgagaggagggagg

SEQ ID NO: 4704629 - DNA, 25 bp, Homo sapien
gaaacatctgccgactggagggttg

SEQ ID NO: 4704630 - DNA, 25 bp, Homo sapien
ctggaaacatctgccgactggaggg

SEQ ID NO: 4704631 - DNA, 25 bp, Homo sapien
catctgccgactggagggttgtgac

SEQ ID NO: 4704632 - DNA, 25 bp, Homo sapien
tccaaggaccctgctctgagaatcc

SEQ ID NO: 4704633 - DNA, 25 bp, Homo sapien
tcacagcatctccttccaaggaccc

SEQ ID NO: 4704634 - DNA, 25 bp, Homo sapien
tgagaatccaagtccacatcccagc

SEQ ID NO: 4704635 - DNA, 25 bp, Homo sapien
cctgctctgagaatccaagtccaca

SEQ ID NO: 4704636 - DNA, 25 bp, Homo sapien
tcgccggcattgctgcgatcgccag

SEQ ID NO: 4704637 - DNA, 25 bp, Homo sapien
catgatcgccggcattgctgcgatc

SEQ ID NO: 4704638 - DNA, 25 bp, Homo sapien
cattgctgcgatcgccagcattcca

SEQ ID NO: 4704639 - DNA, 25 bp, Homo sapien
cagcaccatgatcgccggcattgct

SEQ ID NO: 4704640 - DNA, 25 bp, Homo sapien
tttcctcaatgcgtgcagaggtgtg

SEQ ID NO: 4704641 - DNA, 25 bp, Homo sapien
ctctgtggctacagggcctgtgctc

SEQ ID NO: 4704642 - DNA, 25 bp, Homo sapien
ccatttcctcaatgcgtgcagaggt

SEQ ID NO: 4704643 - DNA, 25 bp, Homo sapien
tcctcaatgcgtgcagaggtgtgca

SEQ ID NO: 4704644 - DNA, 25 bp, Homo sapien
tccagccgcgtgtagaggttgtcca

SEQ ID NO: 4704645 - DNA, 25 bp, Homo sapien
gctccacggtcttgttccacgaaag

SEQ ID NO: 4704646 - DNA, 25 bp, Homo sapien
tccatgcagtcctcggcgtagaact

SEQ ID NO: 4704647 - DNA, 25 bp, Homo sapien
tcgaaggtcatcaccacgtcgtcgg

SEQ ID NO: 4704648 - DNA, 25 bp, Homo sapien
gcatggctggactttcccagcggaa

SEQ ID NO: 4704649 - DNA, 25 bp, Homo sapien
tcagcatggctggactttcccagcg

SEQ ID NO: 4704650 - DNA, 25 bp, Homo sapien
cagcatggctggactttcccagcgg

SEQ ID NO: 4704651 - DNA, 25 bp, Homo sapien
agcatggctggactttcccagcgga

SEQ ID NO: 4704652 - DNA, 25 bp, Homo sapien
ctggccctgaggagcgatatggacc

SEQ ID NO: 4704653 - DNA, 25 bp, Homo sapien
ctgaggagcgatatggaccacaccg

SEQ ID NO: 4704654 - DNA, 25 bp, Homo sapien
gacactggccctgaggagcgatatg

SEQ ID NO: 4704655 - DNA, 25 bp, Homo sapien
ggagcgatatggaccacaccggcca

SEQ ID NO: 4704656 - DNA, 25 bp, Homo sapien
aagagcccacgggttgtgcaaagaa

SEQ ID NO: 4704657 - DNA, 25 bp, Homo sapien
gttaaaagagcccacgggttgtgca

SEQ ID NO: 4704658 - DNA, 25 bp, Homo sapien
gcccacgggttgtgcaaagaagaag

SEQ ID NO: 4704659 - DNA, 25 bp, Homo sapien
tcttccagtgttcaactgttaaaag

SEQ ID NO: 4704660 - DNA, 25 bp, Homo sapien
ccttgagggcaacagatagaacccc

SEQ ID NO: 4704661 - DNA, 25 bp, Homo sapien
tggacctctgctgtcaggttgtggc

SEQ ID NO: 4704662 - DNA, 25 bp, Homo sapien
cagccacgcccttgagggcaacaga

SEQ ID NO: 4704663 - DNA, 25 bp, Homo sapien
ccccgtcagttcattcacaggtgta

SEQ ID NO: 4704664 - DNA, 25 bp, Homo sapien
cacaggttggcgtgcaggttgcact

SEQ ID NO: 4704665 - DNA, 25 bp, Homo sapien
tgtgctcgcactcgcactgcaggct

SEQ ID NO: 4704666 - DNA, 25 bp, Homo sapien
gaccgggtgcggaaattcttcttgc

SEQ ID NO: 4704667 - DNA, 25 bp, Homo sapien
tgccctcgcgcatggagcacaggtt

SEQ ID NO: 4704668 - DNA, 25 bp, Homo sapien
ctggtggagggtgacggtgcacccc

SEQ ID NO: 4704669 - DNA, 25 bp, Homo sapien
tgagatttggggtctgctcccggct

SEQ ID NO: 4704670 - DNA, 25 bp, Homo sapien
ggtgacggtgcaccccagaagcatc

SEQ ID NO: 4704671 - DNA, 25 bp, Homo sapien
cgggagggacaacttgggtgggatg

SEQ ID NO: 4704672 - DNA, 25 bp, Homo sapien
gaagcaacttacgacggctgtgcag

SEQ ID NO: 4704673 - DNA, 25 bp, Homo sapien
cacagagaagcaacttacgacggct

SEQ ID NO: 4704674 - DNA, 25 bp, Homo sapien
acaccacagagaagcaacttacgac

SEQ ID NO: 4704675 - DNA, 25 bp, Homo sapien
ttacgacggctgtgcagaccagcgt

SEQ ID NO: 4704676 - DNA, 25 bp, Homo sapien
tagtaggggcccctgtcatggctgt

SEQ ID NO: 4704677 - DNA, 25 bp, Homo sapien
gagtagtaggggcccctgtcatggc

SEQ ID NO: 4704678 - DNA, 25 bp, Homo sapien
gacaggagtagtaggggcccctgtc

SEQ ID NO: 4704679 - DNA, 25 bp, Homo sapien
acaggagtagtaggggcccctgtca

SEQ ID NO: 4704680 - DNA, 25 bp, Homo sapien
tggctgggccaacctatgtctgaag

SEQ ID NO: 4704681 - DNA, 25 bp, Homo sapien
gccgtctggccacaatggtctggga

SEQ ID NO: 4704682 - DNA, 25 bp, Homo sapien
gatacaatgatacgagcacagccca

SEQ ID NO: 4704683 - DNA, 25 bp, Homo sapien
tgtggcaggctattggagcacccct

SEQ ID NO: 4704684 - DNA, 25 bp, Homo sapien
gaagagaagaaaccaagttatgcga

SEQ ID NO: 4704685 - DNA, 25 bp, Homo sapien
agaagaaaccaagttatgcgagggg

SEQ ID NO: 4704686 - DNA, 25 bp, Homo sapien
agagaagaaaccaagttatgcgagg

SEQ ID NO: 4704687 - DNA, 25 bp, Homo sapien
agaaaccaagttatgcgagggggtg

SEQ ID NO: 4704688 - DNA, 25 bp, Homo sapien
gcagccgtagatggcctggtccact

SEQ ID NO: 4704689 - DNA, 25 bp, Homo sapien
aggggcagccgtagatggcctggtc

SEQ ID NO: 4704690 - DNA, 25 bp, Homo sapien
ctgggaccacctgctcgagagaggg

SEQ ID NO: 4704691 - DNA, 25 bp, Homo sapien
gggcagccgtagatggcctggtcca

SEQ ID NO: 4704692 - DNA, 25 bp, Homo sapien
gagaaacaggttctttcgtctgtca

SEQ ID NO: 4704693 - DNA, 25 bp, Homo sapien
ggttctttcgtctgtcatggtccca

SEQ ID NO: 4704694 - DNA, 25 bp, Homo sapien
caggttctttcgtctgtcatggtcc

SEQ ID NO: 4704695 - DNA, 25 bp, Homo sapien
aacaggttctttcgtctgtcatggt

SEQ ID NO: 4704696 - DNA, 25 bp, Homo sapien
ctggaaaagtttgtagcccttggca

SEQ ID NO: 4704697 - DNA, 25 bp, Homo sapien
tcaataggcatcacttgaggagatt

SEQ ID NO: 4704698 - DNA, 25 bp, Homo sapien
tgggcttgagctggaaaagtttgta

SEQ ID NO: 4704699 - DNA, 25 bp, Homo sapien
tggaattcttcaataggcatcactt

SEQ ID NO: 4704700 - DNA, 25 bp, Homo sapien
tttggtgaggaaggtcaccatccct

SEQ ID NO: 4704701 - DNA, 25 bp, Homo sapien
catggtttcataccaaggaccacca

SEQ ID NO: 4704702 - DNA, 25 bp, Homo sapien
ggaggtgaatcccacattgtcaatg

SEQ ID NO: 4704703 - DNA, 25 bp, Homo sapien
aaggaccagacaagcccgtgactgc

SEQ ID NO: 4704704 - DNA, 25 bp, Homo sapien
ttggagtgaccgtagcattcgcagt

SEQ ID NO: 4704705 - DNA, 25 bp, Homo sapien
tgacgcaggtcaccacattcaggaa

SEQ ID NO: 4704706 - DNA, 25 bp, Homo sapien
tggcagtgctgacctcgcgtgttgt

SEQ ID NO: 4704707 - DNA, 25 bp, Homo sapien
tgccgagccgttgcggtagtagccc

SEQ ID NO: 4704708 - DNA, 25 bp, Homo sapien
acactgggtccacgtgagcccgcgg

SEQ ID NO: 4704709 - DNA, 25 bp, Homo sapien
ttgggatcaaacacgtcccagcccc

SEQ ID NO: 4704710 - DNA, 25 bp, Homo sapien
ggctacgtgtgggcgccgtcttctc

SEQ ID NO: 4704711 - DNA, 25 bp, Homo sapien
cgggcgcgcggtcagggctacgtgt

SEQ ID NO: 4704712 - DNA, 25 bp, Homo sapien
ggtagcagccctggcgccagtagtg

SEQ ID NO: 4704713 - DNA, 25 bp, Homo sapien
cagaagccggtctcgttgcaccggt

SEQ ID NO: 4704714 - DNA, 25 bp, Homo sapien
cacggagcctatctggttgcagtta

SEQ ID NO: 4704715 - DNA, 25 bp, Homo sapien
ttgcaccggtcgtgcacggagccta

SEQ ID NO: 4704716 - DNA, 25 bp, Homo sapien
cgggcaggcgcagcgctggttctgc

SEQ ID NO: 4704717 - DNA, 25 bp, Homo sapien
agctggtcgtcgtcgcacacgttgg

SEQ ID NO: 4704718 - DNA, 25 bp, Homo sapien
agcgcacgccggtgtagccgcgcgg

SEQ ID NO: 4704719 - DNA, 25 bp, Homo sapien
aggtgcctccgttctggcacagcag

SEQ ID NO: 4704720 - DNA, 25 bp, Homo sapien
cagcaggcagccgagcagggtggcg

SEQ ID NO: 4704721 - DNA, 25 bp, Homo sapien
gccccgggcgcgcggtcgcagtcca

SEQ ID NO: 4704722 - DNA, 25 bp, Homo sapien
ccgggcgcgcggtcgcagtccagac

SEQ ID NO: 4704723 - DNA, 25 bp, Homo sapien
agcaggcagccgagcagggtggcgg

SEQ ID NO: 4704724 - DNA, 25 bp, Homo sapien
tcagcgactggaattgtaggcaact

SEQ ID NO: 4704725 - DNA, 25 bp, Homo sapien
aaacgaaaccaaatcgcaggcgcgg

SEQ ID NO: 4704726 - DNA, 25 bp, Homo sapien
tctacagaacgaagtttccaggccc

SEQ ID NO: 4704727 - DNA, 25 bp, Homo sapien
gaaaacaggaccaagtcagcgactg

SEQ ID NO: 4704728 - DNA, 25 bp, Homo sapien
gaaggaggcggtggccgaattgtgg

SEQ ID NO: 4704729 - DNA, 25 bp, Homo sapien
atattggacttgaggctccggctgc

SEQ ID NO: 4704730 - DNA, 25 bp, Homo sapien
cggtggccgaattgtgggttcagct

SEQ ID NO: 4704731 - DNA, 25 bp, Homo sapien
tctgatattggacttgaggctccgg

SEQ ID NO: 4704732 - DNA, 25 bp, Homo sapien
gagccacaaacttggacaactgagg

SEQ ID NO: 4704733 - DNA, 25 bp, Homo sapien
gttatgctcagtgtctcaagaaggc

SEQ ID NO: 4704734 - DNA, 25 bp, Homo sapien
ccttcactatcctgagggtgacact

SEQ ID NO: 4704735 - DNA, 25 bp, Homo sapien
catcagtcctgcttacatctcactg

SEQ ID NO: 4704736 - DNA, 25 bp, Homo sapien
gccagagtcccactgccagccggcc

SEQ ID NO: 4704737 - DNA, 25 bp, Homo sapien
gaagggtacatggcaaccccctgcc

SEQ ID NO: 4704738 - DNA, 25 bp, Homo sapien
cagaagggtacatggcaaccccctg

SEQ ID NO: 4704739 - DNA, 25 bp, Homo sapien
gagccagagtcccactgccagccgg

SEQ ID NO: 4704740 - DNA, 25 bp, Homo sapien
tctggagcactttggccgcaggtgc

SEQ ID NO: 4704741 - DNA, 25 bp, Homo sapien
catctggagcactttggccgcaggt

SEQ ID NO: 4704742 - DNA, 25 bp, Homo sapien
gccatctggagcactttggccgcag

SEQ ID NO: 4704743 - DNA, 25 bp, Homo sapien
aagccatctggagcactttggccgc

SEQ ID NO: 4704744 - DNA, 25 bp, Homo sapien
gccctcatgttcctgctgggccaag

SEQ ID NO: 4704745 - DNA, 25 bp, Homo sapien
tcaacttataggcccatcttctcca

SEQ ID NO: 4704746 - DNA, 25 bp, Homo sapien
ttctccacgggtcccttgcaggctc

SEQ ID NO: 4704747 - DNA, 25 bp, Homo sapien
gggcccatgcgtcctttcttgggca

SEQ ID NO: 4704748 - DNA, 25 bp, Homo sapien
agccatttcctatgttcaccgtggc

SEQ ID NO: 4704749 - DNA, 25 bp, Homo sapien
atttcctatgttcaccgtggcccct

SEQ ID NO: 4704750 - DNA, 25 bp, Homo sapien
gctgtcagcgcagcgttgttgaaca

SEQ ID NO: 4704751 - DNA, 25 bp, Homo sapien
aggtgtgaagtgtggctcttcgctt

SEQ ID NO: 4704752 - DNA, 25 bp, Homo sapien
ttctatagacaaggaggtcagactg

SEQ ID NO: 4704753 - DNA, 25 bp, Homo sapien
tcgtgggaccatctagataagcttg

SEQ ID NO: 4704754 - DNA, 25 bp, Homo sapien
caggagaagtgtggttccgagaccc

SEQ ID NO: 4704755 - DNA, 25 bp, Homo sapien
ccaggaggaactctaggtgggacaa

SEQ ID NO: 4704756 - DNA, 25 bp, Homo sapien
agccacaaacctcccgtgcggggcg

SEQ ID NO: 4704757 - DNA, 25 bp, Homo sapien
ggacctgagccatatacagcagccc

SEQ ID NO: 4704758 - DNA, 25 bp, Homo sapien
tacagcagcccgctgctgtagtggc

SEQ ID NO: 4704759 - DNA, 25 bp, Homo sapien
cagccacaaacctcccgtgcggggc

SEQ ID NO: 4704760 - DNA, 25 bp, Homo sapien
tgaagattctgaaactcaagcctgt

SEQ ID NO: 4704761 - DNA, 25 bp, Homo sapien
gaagattctgaaactcaagcctgtg

SEQ ID NO: 4704762 - DNA, 25 bp, Homo sapien
gctcagaagcgtggtgccattatta

SEQ ID NO: 4704763 - DNA, 25 bp, Homo sapien
cattattaagacctgtgacaaaaac

SEQ ID NO: 4704764 - DNA, 25 bp, Homo sapien
cccaagcgtatataattgattgtga

SEQ ID NO: 4704765 - DNA, 25 bp, Homo sapien
agttgtagatgacagctgctacaga

SEQ ID NO: 4704766 - DNA, 25 bp, Homo sapien
gagacacgattctgatcatttgcag

SEQ ID NO: 4704767 - DNA, 25 bp, Homo sapien
aatgtacgaagcaacaattgatgga

SEQ ID NO: 4704768 - DNA, 25 bp, Homo sapien
gagaacaacctgaaccttggaggca

SEQ ID NO: 4704769 - DNA, 25 bp, Homo sapien
tgtgatgaagaggtcggaagaatct

SEQ ID NO: 4704770 - DNA, 25 bp, Homo sapien
ggtacctggcacatacgtcctcagc

SEQ ID NO: 4704771 - DNA, 25 bp, Homo sapien
gtcctcagctagtggttgctgtgat

SEQ ID NO: 4704772 - DNA, 25 bp, Homo sapien
gttctcctgtctcagcctctgaata

SEQ ID NO: 4704773 - DNA, 25 bp, Homo sapien
ttctcctgtctcagcctctgaatag

SEQ ID NO: 4704774 - DNA, 25 bp, Homo sapien
agtgcaacagcgtgatctcggttcc

SEQ ID NO: 4704775 - DNA, 25 bp, Homo sapien
gcaacagcgtgatctcggttccctg

SEQ ID NO: 4704776 - DNA, 25 bp, Homo sapien
tgtcaaaagggcacgagtgtctggt

SEQ ID NO: 4704777 - DNA, 25 bp, Homo sapien
tgtttggcaagcaagcacgtgcaag

SEQ ID NO: 4704778 - DNA, 25 bp, Homo sapien
gattcagtagaaggtgatggcgcca

SEQ ID NO: 4704779 - DNA, 25 bp, Homo sapien
gaaggtgtgaaatctaggccccgac

SEQ ID NO: 4704780 - DNA, 25 bp, Homo sapien
tattaagaggtcctaaaagatgggc

SEQ ID NO: 4704781 - DNA, 25 bp, Homo sapien
taaaagatgggcctgaaaagtgtct

SEQ ID NO: 4704782 - DNA, 25 bp, Homo sapien
taatcggctttgctctgtttgtgat

SEQ ID NO: 4704783 - DNA, 25 bp, Homo sapien
gaaataatcggctttgctctgtttg

SEQ ID NO: 4704784 - DNA, 25 bp, Homo sapien
ggacccctccggagccaggcgcgcc

SEQ ID NO: 4704785 - DNA, 25 bp, Homo sapien
cgggccgcaccaccgggatcctgag

SEQ ID NO: 4704786 - DNA, 25 bp, Homo sapien
ccctcatcgcaaagagccccggagc

SEQ ID NO: 4704787 - DNA, 25 bp, Homo sapien
gcttccccacgtcgggcacagcctg

SEQ ID NO: 4704788 - DNA, 25 bp, Homo sapien
agacctggctgaccgtgcggcgcac

SEQ ID NO: 4704789 - DNA, 25 bp, Homo sapien
ggttctgaaacatggagtcccgcac

SEQ ID NO: 4704790 - DNA, 25 bp, Homo sapien
tctccatgccggaacggatgtccgc

SEQ ID NO: 4704791 - DNA, 25 bp, Homo sapien
ttcctccatcgcgtgaggtccgggc

SEQ ID NO: 4704792 - DNA, 25 bp, Homo sapien
tggtttcccatcagcgggaagcgag

SEQ ID NO: 4704793 - DNA, 25 bp, Homo sapien
tttttaaaggcgcactgccctccag

SEQ ID NO: 4704794 - DNA, 25 bp, Homo sapien
cctccagcggcgcaagataaattcg

SEQ ID NO: 4704795 - DNA, 25 bp, Homo sapien
aattcgcctcgaggcttgctccctg

SEQ ID NO: 4704796 - DNA, 25 bp, Homo sapien
ctggacgtgggtccctgctgctcca

SEQ ID NO: 4704797 - DNA, 25 bp, Homo sapien
tcagagagcacgagcctggacgtgg

SEQ ID NO: 4704798 - DNA, 25 bp, Homo sapien
gcctggacgtgggtccctgctgctc

SEQ ID NO: 4704799 - DNA, 25 bp, Homo sapien
cagagagcacgagcctggacgtggg

SEQ ID NO: 4704800 - DNA, 25 bp, Homo sapien
gaagaacccacgaaggaaagccaga

SEQ ID NO: 4704801 - DNA, 25 bp, Homo sapien
cgaagaacccacgaaggaaagccag

SEQ ID NO: 4704802 - DNA, 25 bp, Homo sapien
aagaacccacgaaggaaagccagag

SEQ ID NO: 4704803 - DNA, 25 bp, Homo sapien
cagaggtaaaggctgccccctggct

SEQ ID NO: 4704804 - DNA, 25 bp, Homo sapien
cacttggttatggtggcaacttgca

SEQ ID NO: 4704805 - DNA, 25 bp, Homo sapien
aaaatacctgcttggatgtctcagt

SEQ ID NO: 4704806 - DNA, 25 bp, Homo sapien
gaaaacgggctaactgcacatcact

SEQ ID NO: 4704807 - DNA, 25 bp, Homo sapien
tttgtggccatgtaaaacaccgact

SEQ ID NO: 4704808 - DNA, 25 bp, Homo sapien
aatatttcttggccgtcaagaagtc

SEQ ID NO: 4704809 - DNA, 25 bp, Homo sapien
caacgctgaattctaaacttgtttc

SEQ ID NO: 4704810 - DNA, 25 bp, Homo sapien
aattcagcaacgctgaattctaaac

SEQ ID NO: 4704811 - DNA, 25 bp, Homo sapien
cactgggcacttgacaaaccttcaa

SEQ ID NO: 4704812 - DNA, 25 bp, Homo sapien
ccggtgaagggggcagctcggcttt

SEQ ID NO: 4704813 - DNA, 25 bp, Homo sapien
ccccagggtggtgacgagccggtga

SEQ ID NO: 4704814 - DNA, 25 bp, Homo sapien
agggtggtgacgagccggtgaaggg

SEQ ID NO: 4704815 - DNA, 25 bp, Homo sapien
gaggacagcaggctcctccggcagg

SEQ ID NO: 4704816 - DNA, 25 bp, Homo sapien
ggtctgcgcttaattaacgcttcaa

SEQ ID NO: 4704817 - DNA, 25 bp, Homo sapien
ttaattaacgcttcaaagccaaagc

SEQ ID NO: 4704818 - DNA, 25 bp, Homo sapien
aacctgagtgctgaggtctgcgctt

SEQ ID NO: 4704819 - DNA, 25 bp, Homo sapien
gtgctgaggtctgcgcttaattaac

SEQ ID NO: 4704820 - DNA, 25 bp, Homo sapien
ggcgaaagatttatacgatttgaag

SEQ ID NO: 4704821 - DNA, 25 bp, Homo sapien
cgaaagatttatacgatttgaagag

SEQ ID NO: 4704822 - DNA, 25 bp, Homo sapien
aaaggcgaaagatttatacgatttg

SEQ ID NO: 4704823 - DNA, 25 bp, Homo sapien
aaggcgaaagatttatacgatttga

SEQ ID NO: 4704824 - DNA, 25 bp, Homo sapien
agagctttcaggttcgcccaacagg

SEQ ID NO: 4704825 - DNA, 25 bp, Homo sapien
taagttttttggatctgcacagcgg

SEQ ID NO: 4704826 - DNA, 25 bp, Homo sapien
tgtgtgacctctataagcctcggct

SEQ ID NO: 4704827 - DNA, 25 bp, Homo sapien
tcaaatggtctacagccaggagcct

SEQ ID NO: 4704828 - DNA, 25 bp, Homo sapien
aaaataaaaacatgccgtatttcag

SEQ ID NO: 4704829 - DNA, 25 bp, Homo sapien
aagctgtcaacttcactacaatttc

SEQ ID NO: 4704830 - DNA, 25 bp, Homo sapien
aaacatgccgtatttcagtggaata

SEQ ID NO: 4704831 - DNA, 25 bp, Homo sapien
ttaaaaagctgtcaacttcactaca

SEQ ID NO: 4704832 - DNA, 25 bp, Homo sapien
tccagatgtggcatttgtctccctg

SEQ ID NO: 4704833 - DNA, 25 bp, Homo sapien
caatgccgcaggtggctctaggttt

SEQ ID NO: 4704834 - DNA, 25 bp, Homo sapien
tcctgcccaaatgacaagctgtgga

SEQ ID NO: 4704835 - DNA, 25 bp, Homo sapien
caagctgtggattatgcagatatct

SEQ ID NO: 4704836 - DNA, 25 bp, Homo sapien
cgcctgtcactacaggctgagatga

SEQ ID NO: 4704837 - DNA, 25 bp, Homo sapien
gaggcaggtggagagcggcacccaa

SEQ ID NO: 4704838 - DNA, 25 bp, Homo sapien
aacgcctgtcactacaggctgagat

SEQ ID NO: 4704839 - DNA, 25 bp, Homo sapien
tggagagcggcacccaatgcaccct

SEQ ID NO: 4704840 - DNA, 25 bp, Homo sapien
cggcggacacgctgtgtgtaaccga

SEQ ID NO: 4704841 - DNA, 25 bp, Homo sapien
tgttaggtccgaacacacggcggac

SEQ ID NO: 4704842 - DNA, 25 bp, Homo sapien
gccactccgcatgctgctttgtgga

SEQ ID NO: 4704843 - DNA, 25 bp, Homo sapien
tgtaaccgacgtgctgatctacgcg

SEQ ID NO: 4704844 - DNA, 25 bp, Homo sapien
gccctgagttgctgtcccagtaggg

SEQ ID NO: 4704845 - DNA, 25 bp, Homo sapien
cacataagaaggattgccctgagtt

SEQ ID NO: 4704846 - DNA, 25 bp, Homo sapien
ctgcacacataagaaggattgccct

SEQ ID NO: 4704847 - DNA, 25 bp, Homo sapien
cacacataagaaggattgccctgag

SEQ ID NO: 4704848 - DNA, 25 bp, Homo sapien
tgaccggtttagggggctcagtcag

SEQ ID NO: 4704849 - DNA, 25 bp, Homo sapien
gtgaccggtttagggggctcagtca

SEQ ID NO: 4704850 - DNA, 25 bp, Homo sapien
cagattccagcaacaaggcgagagt

SEQ ID NO: 4704851 - DNA, 25 bp, Homo sapien
tggcacgcgtgcagacataaaaagc

SEQ ID NO: 4704852 - DNA, 25 bp, Homo sapien
tcagtaacctgtcgccagattccag

SEQ ID NO: 4704853 - DNA, 25 bp, Homo sapien
gctgttagcggcgatgtatttctcc

SEQ ID NO: 4704854 - DNA, 25 bp, Homo sapien
agccccacgcttctctactgctctg

SEQ ID NO: 4704855 - DNA, 25 bp, Homo sapien
tcaagccccacgcttctctactgct

SEQ ID NO: 4704856 - DNA, 25 bp, Homo sapien
ccccacgcttctctactgctctgag

SEQ ID NO: 4704857 - DNA, 25 bp, Homo sapien
caagccccacgcttctctactgctc

SEQ ID NO: 4704858 - DNA, 25 bp, Homo sapien
taaatcctcggtcgctctttgctga

SEQ ID NO: 4704859 - DNA, 25 bp, Homo sapien
tggtgtcatcgttcatcggccaggc

SEQ ID NO: 4704860 - DNA, 25 bp, Homo sapien
cctggcgtaagacagagagacctgc

SEQ ID NO: 4704861 - DNA, 25 bp, Homo sapien
gggtctttaactcatcctggcgtaa

SEQ ID NO: 4704862 - DNA, 25 bp, Homo sapien
ggcagagaccgagccctgtatctgg

SEQ ID NO: 4704863 - DNA, 25 bp, Homo sapien
aagacttggtatcctcgcttgtaaa

SEQ ID NO: 4704864 - DNA, 25 bp, Homo sapien
tggcccacggcatactcagttatca

SEQ ID NO: 4704865 - DNA, 25 bp, Homo sapien
tatggagacgttcactgtaagcaca

SEQ ID NO: 4704866 - DNA, 25 bp, Homo sapien
ggaagagagtaccaactgccgacat

SEQ ID NO: 4704867 - DNA, 25 bp, Homo sapien
cgacatttgttctctggcatctggc

SEQ ID NO: 4704868 - DNA, 25 bp, Homo sapien
gacatagtgcagagggcaatgcgac

SEQ ID NO: 4704869 - DNA, 25 bp, Homo sapien
ggagacacaatcctgctaactgcag

SEQ ID NO: 4704870 - DNA, 25 bp, Homo sapien
taactttctgcaccgctgaggagtc

SEQ ID NO: 4704871 - DNA, 25 bp, Homo sapien
actttctgcaccgctgaggagtcat

SEQ ID NO: 4704872 - DNA, 25 bp, Homo sapien
ggaataactttctgcaccgctgagg

SEQ ID NO: 4704873 - DNA, 25 bp, Homo sapien
aataactttctgcaccgctgaggag

SEQ ID NO: 4704874 - DNA, 25 bp, Homo sapien
gtcaagccctcggatgtagagtcca

SEQ ID NO: 4704875 - DNA, 25 bp, Homo sapien
attaaaattaatgccgggcagactg

SEQ ID NO: 4704876 - DNA, 25 bp, Homo sapien
gccgggcagactgtagcttctttcc

SEQ ID NO: 4704877 - DNA, 25 bp, Homo sapien
ttcagggactcctccgtcaagccct

SEQ ID NO: 4704878 - DNA, 25 bp, Homo sapien
cgccccgcggttcattgcgatataa

SEQ ID NO: 4704879 - DNA, 25 bp, Homo sapien
atataattccgggtcagctcgtggg

SEQ ID NO: 4704880 - DNA, 25 bp, Homo sapien
ttgaacacgttccagcgtccgatgg

SEQ ID NO: 4704881 - DNA, 25 bp, Homo sapien
ggtagagcaagttctcccgggcagt

SEQ ID NO: 4704882 - DNA, 25 bp, Homo sapien
tgaggatgtggacccattgggacat

SEQ ID NO: 4704883 - DNA, 25 bp, Homo sapien
tgtgggccctcattagcactaggga

SEQ ID NO: 4704884 - DNA, 25 bp, Homo sapien
ttatctaagcgccaggccggtcgtg

SEQ ID NO: 4704885 - DNA, 25 bp, Homo sapien
gccggtcgtgcccttgttgacaatg

SEQ ID NO: 4704886 - DNA, 25 bp, Homo sapien
ttccatctggcccatgtgagacact

SEQ ID NO: 4704887 - DNA, 25 bp, Homo sapien
ggcccatgtgagacactgatgcgca

SEQ ID NO: 4704888 - DNA, 25 bp, Homo sapien
aggctcccaagcagaacagcggcag

SEQ ID NO: 4704889 - DNA, 25 bp, Homo sapien
actgagtgatggatgttcctgctgg

SEQ ID NO: 4704890 - DNA, 25 bp, Homo sapien
gatgccctgacaagaagtttgagtt

SEQ ID NO: 4704891 - DNA, 25 bp, Homo sapien
gcatccagcgtggtgaaagttctgg

SEQ ID NO: 4704892 - DNA, 25 bp, Homo sapien
gttctggatgccctgacaagaagtt

SEQ ID NO: 4704893 - DNA, 25 bp, Homo sapien
ccctgacaagaagtttgagtttatc

SEQ ID NO: 4704894 - DNA, 25 bp, Homo sapien
gtggcaactggctttatatctggac

SEQ ID NO: 4704895 - DNA, 25 bp, Homo sapien
tcattcagcaactccacgaaggcct

SEQ ID NO: 4704896 - DNA, 25 bp, Homo sapien
tttatatctggaccccaatgtggcc

SEQ ID NO: 4704897 - DNA, 25 bp, Homo sapien
tgtggccatttgttcatgcactcat

SEQ ID NO: 4704898 - DNA, 25 bp, Homo sapien
tctaaggatgctactcaggttgcac

SEQ ID NO: 4704899 - DNA, 25 bp, Homo sapien
caggctaattagtgctgatctaagg

SEQ ID NO: 4704900 - DNA, 25 bp, Homo sapien
ttccatggtctgaaggctttctgca

SEQ ID NO: 4704901 - DNA, 25 bp, Homo sapien
ttgggggtgtagaccaggctaatta

SEQ ID NO: 4704902 - DNA, 25 bp, Homo sapien
aggccactggcaccaacgtgaacgg

SEQ ID NO: 4704903 - DNA, 25 bp, Homo sapien
gcaccaacgtgaacggagctcagga

SEQ ID NO: 4704904 - DNA, 25 bp, Homo sapien
caggatgagaaatgacttcctcgcc

SEQ ID NO: 4704905 - DNA, 25 bp, Homo sapien
ggatgagaaatgacttcctcgccca

SEQ ID NO: 4704906 - DNA, 25 bp, Homo sapien
atgagatgatctggccaccgacggg

SEQ ID NO: 4704907 - DNA, 25 bp, Homo sapien
tctggccaccgacgggatgtatcag

SEQ ID NO: 4704908 - DNA, 25 bp, Homo sapien
tgttcctccacacgatgagatgatc

SEQ ID NO: 4704909 - DNA, 25 bp, Homo sapien
cgacgggatgtatcagggcctgcct

SEQ ID NO: 4704910 - DNA, 25 bp, Homo sapien
cgccaggcaaggtgggaacgagcat

SEQ ID NO: 4704911 - DNA, 25 bp, Homo sapien
agtgtctgaaggacggtgaggcctc

SEQ ID NO: 4704912 - DNA, 25 bp, Homo sapien
ggcctctccaggcaagagacacagg

SEQ ID NO: 4704913 - DNA, 25 bp, Homo sapien
ctccgccaggcaaggtgggaacgag

SEQ ID NO: 4704914 - DNA, 25 bp, Homo sapien
aaagagttggccgtctcatgtgctc

SEQ ID NO: 4704915 - DNA, 25 bp, Homo sapien
gagcacctacaacattccaggcagg

SEQ ID NO: 4704916 - DNA, 25 bp, Homo sapien
tgttcccaaaatccaggacgcactg

SEQ ID NO: 4704917 - DNA, 25 bp, Homo sapien
ctgcaagagtcgtgcccgggaaaga

SEQ ID NO: 4704918 - DNA, 25 bp, Homo sapien
tcacgggagttagttatgttgcttc

SEQ ID NO: 4704919 - DNA, 25 bp, Homo sapien
ctaaatccaggtagtgggttcacgg

SEQ ID NO: 4704920 - DNA, 25 bp, Homo sapien
gaaaggatcagaagcgaaagcggcc

SEQ ID NO: 4704921 - DNA, 25 bp, Homo sapien
gcggccagatggttagcgtgctaaa

SEQ ID NO: 4704922 - DNA, 25 bp, Homo sapien
gaggtcatttgcaacgtgttaacac

SEQ ID NO: 4704923 - DNA, 25 bp, Homo sapien
gttaacacttttcacaaggatgaat

SEQ ID NO: 4704924 - DNA, 25 bp, Homo sapien
caattagcagttccggcaccggtgc

SEQ ID NO: 4704925 - DNA, 25 bp, Homo sapien
gaaggcagcgctcggtgaagccaaa

SEQ ID NO: 4704926 - DNA, 25 bp, Homo sapien
aggctgggcctgagaccgtagatgg

SEQ ID NO: 4704927 - DNA, 25 bp, Homo sapien
cggggagttgctggcaccctcgcag

SEQ ID NO: 4704928 - DNA, 25 bp, Homo sapien
atgagcggtatccagaacacggcca

SEQ ID NO: 4704929 - DNA, 25 bp, Homo sapien
tgggaaacatcgatgggaaccacct

SEQ ID NO: 4704930 - DNA, 25 bp, Homo sapien
cacctttcccatgagcggtatccag

SEQ ID NO: 4704931 - DNA, 25 bp, Homo sapien
agaacacggccagtgaccggaacat

SEQ ID NO: 4704932 - DNA, 25 bp, Homo sapien
ctgcagcagatcaaagaagggtgtg

SEQ ID NO: 4704933 - DNA, 25 bp, Homo sapien
ccacagctgcaggtaccggtgctgc

SEQ ID NO: 4704934 - DNA, 25 bp, Homo sapien
cacagctgcaggtaccggtgctgca

SEQ ID NO: 4704935 - DNA, 25 bp, Homo sapien
acagctgcaggtaccggtgctgcag

SEQ ID NO: 4704936 - DNA, 25 bp, Homo sapien
cacttggcttcgactgtgtcatgtc

SEQ ID NO: 4704937 - DNA, 25 bp, Homo sapien
cttggcacttggcttcgactgtgtc

SEQ ID NO: 4704938 - DNA, 25 bp, Homo sapien
gcttcgactgtgtcatgtcctaaga

SEQ ID NO: 4704939 - DNA, 25 bp, Homo sapien
tgtcatgtcctaagatgtgccaggg

SEQ ID NO: 4704940 - DNA, 25 bp, Homo sapien
tcacgggcggcttgtacttcctcag

SEQ ID NO: 4704941 - DNA, 25 bp, Homo sapien
gtgtccagcttcacgggcggcttgt

SEQ ID NO: 4704942 - DNA, 25 bp, Homo sapien
gtacttcctcagctgactgctccgg

SEQ ID NO: 4704943 - DNA, 25 bp, Homo sapien
gactgctccgggtctcatacagctt

SEQ ID NO: 4704944 - DNA, 25 bp, Homo sapien
acggaggcagcgcactgacgggcgg

SEQ ID NO: 4704945 - DNA, 25 bp, Homo sapien
gcggcagggcgcatggtcattgaca

SEQ ID NO: 4704946 - DNA, 25 bp, Homo sapien
ttgacgtctgctgtgcacggaggca

SEQ ID NO: 4704947 - DNA, 25 bp, Homo sapien
cattgacatatgctggcagaggcca

SEQ ID NO: 4704948 - DNA, 25 bp, Homo sapien
ccatcaccgtgacaggctcaacttt

SEQ ID NO: 4704949 - DNA, 25 bp, Homo sapien
tcagcgtcgacatctgctcgtgagc

SEQ ID NO: 4704950 - DNA, 25 bp, Homo sapien
tccatttaggttatccatcaccgtg

SEQ ID NO: 4704951 - DNA, 25 bp, Homo sapien
ggaagcgcttttcccttcataatgg

SEQ ID NO: 4704952 - DNA, 25 bp, Homo sapien
ttgagaaccggaggaagcgctgtta

SEQ ID NO: 4704953 - DNA, 25 bp, Homo sapien
tcatcagtggcatccagtctttcgc

SEQ ID NO: 4704954 - DNA, 25 bp, Homo sapien
ttgtcatcggccataagcttttggg

SEQ ID NO: 4704955 - DNA, 25 bp, Homo sapien
ggatgtaccgtctgctttgtgtggc

SEQ ID NO: 4704956 - DNA, 25 bp, Homo sapien
tgttagcttaatagcttgggccatt

SEQ ID NO: 4704957 - DNA, 25 bp, Homo sapien
ttagcttaatagcttgggccattat

SEQ ID NO: 4704958 - DNA, 25 bp, Homo sapien
actgttagcttaatagcttgggcca

SEQ ID NO: 4704959 - DNA, 25 bp, Homo sapien
ctgttagcttaatagcttgggccat

SEQ ID NO: 4704960 - DNA, 25 bp, Homo sapien
gcacaaggtgcttatccagccacat

SEQ ID NO: 4704961 - DNA, 25 bp, Homo sapien
tagcacaaggtgcttatccagccac

SEQ ID NO: 4704962 - DNA, 25 bp, Homo sapien
tttctcaggtagcacaaggtgctta

SEQ ID NO: 4704963 - DNA, 25 bp, Homo sapien
caggtagcacaaggtgcttatccag

SEQ ID NO: 4704964 - DNA, 25 bp, Homo sapien
gaatttagacaatggggattcctta

SEQ ID NO: 4704965 - DNA, 25 bp, Homo sapien
attccagagctccaaattttactgc

SEQ ID NO: 4704966 - DNA, 25 bp, Homo sapien
tagacaatggggattccttaattac

SEQ ID NO: 4704967 - DNA, 25 bp, Homo sapien
caaattccagagctccaaattttac

SEQ ID NO: 4704968 - DNA, 25 bp, Homo sapien
gttcctccttgcgaggcggcaccag

SEQ ID NO: 4704969 - DNA, 25 bp, Homo sapien
gctgggttgaatggctctggtccac

SEQ ID NO: 4704970 - DNA, 25 bp, Homo sapien
tggagatgaggcattggccgttcct

SEQ ID NO: 4704971 - DNA, 25 bp, Homo sapien
tctggtccacaagctgaaaagcggg

SEQ ID NO: 4704972 - DNA, 25 bp, Homo sapien
ggcccctccagttgggcttatccag

SEQ ID NO: 4704973 - DNA, 25 bp, Homo sapien
tccagttgggcttatccagcttcat

SEQ ID NO: 4704974 - DNA, 25 bp, Homo sapien
tcccgatggcccctccagttgggct

SEQ ID NO: 4704975 - DNA, 25 bp, Homo sapien
gtatgtgacttcccgatggcccctc

SEQ ID NO: 4704976 - DNA, 25 bp, Homo sapien
gcctgatgtttacactgtgacacga

SEQ ID NO: 4704977 - DNA, 25 bp, Homo sapien
gtggcctgatgtttacactgtgaca

SEQ ID NO: 4704978 - DNA, 25 bp, Homo sapien
tgtttacactgtgacacgatcttcc

SEQ ID NO: 4704979 - DNA, 25 bp, Homo sapien
cactgtgacacgatcttcctgaggc

SEQ ID NO: 4704980 - DNA, 25 bp, Homo sapien
ctgggggaactgttcgtccttctgt

SEQ ID NO: 4704981 - DNA, 25 bp, Homo sapien
gaactgttcgtccttctgtccagct

SEQ ID NO: 4704982 - DNA, 25 bp, Homo sapien
ggggaactgttcgtccttctgtcca

SEQ ID NO: 4704983 - DNA, 25 bp, Homo sapien
ggaactgttcgtccttctgtccagc

SEQ ID NO: 4704984 - DNA, 25 bp, Homo sapien
cctccgtggggaacgtatcaaggtg

SEQ ID NO: 4704985 - DNA, 25 bp, Homo sapien
ttcccggtgggcttttaatgctctc

SEQ ID NO: 4704986 - DNA, 25 bp, Homo sapien
ctctctggcgatcggcctccgtggg

SEQ ID NO: 4704987 - DNA, 25 bp, Homo sapien
ggtgtagttgcccatccgcagggtc

SEQ ID NO: 4704988 - DNA, 25 bp, Homo sapien
ggctttcaaagcacgtcactgtcat

SEQ ID NO: 4704989 - DNA, 25 bp, Homo sapien
caacttggcctgcttgattgacggg

SEQ ID NO: 4704990 - DNA, 25 bp, Homo sapien
ggcagagccatggaatcgaccctta

SEQ ID NO: 4704991 - DNA, 25 bp, Homo sapien
tccagagtgggttgaccttccaaag

SEQ ID NO: 4704992 - DNA, 25 bp, Homo sapien
gatattgttgccctcttcacgtggt

SEQ ID NO: 4704993 - DNA, 25 bp, Homo sapien
gattcgaatgatacaggccaggcct

SEQ ID NO: 4704994 - DNA, 25 bp, Homo sapien
tagattttgccccttacgcgagtgc

SEQ ID NO: 4704995 - DNA, 25 bp, Homo sapien
tctgctctgcaaacagtggagttgg

SEQ ID NO: 4704996 - DNA, 25 bp, Homo sapien
ctgaacaggacccacgcaagagctt

SEQ ID NO: 4704997 - DNA, 25 bp, Homo sapien
gcttcttattccacgcagagccaga

SEQ ID NO: 4704998 - DNA, 25 bp, Homo sapien
gagtgtagacgcctgctaacggctt

SEQ ID NO: 4704999 - DNA, 25 bp, Homo sapien
caagagcttccgagtgcgagtgtag

SEQ ID NO: 4705000 - DNA, 25 bp, Homo sapien
aagccgctgcccgattccctttcag

SEQ ID NO: 4705001 - DNA, 25 bp, Homo sapien
taattacagcacagacccaactgtt

SEQ ID NO: 4705002 - DNA, 25 bp, Homo sapien
cgtgtccccggagtgatgacgctga

SEQ ID NO: 4705003 - DNA, 25 bp, Homo sapien
gagacaccgaattaattacagcaca

SEQ ID NO: 4705004 - DNA, 25 bp, Homo sapien
tgaacttgtgtcacttttactttgg

SEQ ID NO: 4705005 - DNA, 25 bp, Homo sapien
ctttaaaaaatgaacttgtgtcact

SEQ ID NO: 4705006 - DNA, 25 bp, Homo sapien
tgtgtcacttttactttgggtctgg

SEQ ID NO: 4705007 - DNA, 25 bp, Homo sapien
aaaatgaacttgtgtcacttttact

SEQ ID NO: 4705008 - DNA, 25 bp, Homo sapien
cggcagctctctgccggtccgcgcg

SEQ ID NO: 4705009 - DNA, 25 bp, Homo sapien
cctcggcggcagctctctgccggtc

SEQ ID NO: 4705010 - DNA, 25 bp, Homo sapien
gctgcccgcggctcatgactctcca

SEQ ID NO: 4705011 - DNA, 25 bp, Homo sapien
gcaccgtggacagcgcctccctgct

SEQ ID NO: 4705012 - DNA, 25 bp, Homo sapien
gaaacgcgaggatgttggaatctaa

SEQ ID NO: 4705013 - DNA, 25 bp, Homo sapien
ctgcgggcaccttggacggagttca

SEQ ID NO: 4705014 - DNA, 25 bp, Homo sapien
tgcgcattagatccaaaagggctca

SEQ ID NO: 4705015 - DNA, 25 bp, Homo sapien
aaagggctcagtgcgtcttctgcag

SEQ ID NO: 4705016 - DNA, 25 bp, Homo sapien
gaatggagtcgatcccaaagccatt

SEQ ID NO: 4705017 - DNA, 25 bp, Homo sapien
gagaatggagtcgatcccaaagcca

SEQ ID NO: 4705018 - DNA, 25 bp, Homo sapien
ggagagaatggagtcgatcccaaag

SEQ ID NO: 4705019 - DNA, 25 bp, Homo sapien
tgggagagaatggagtcgatcccaa

SEQ ID NO: 4705020 - DNA, 25 bp, Homo sapien
tccaggggcgaacggcagtccccga

SEQ ID NO: 4705021 - DNA, 25 bp, Homo sapien
gggcgaacggcagtccccgagcaag

SEQ ID NO: 4705022 - DNA, 25 bp, Homo sapien
aggggcgaacggcagtccccgagca

SEQ ID NO: 4705023 - DNA, 25 bp, Homo sapien
gcgaacggcagtccccgagcaaggg

SEQ ID NO: 4705024 - DNA, 25 bp, Homo sapien
tggcgaagagcagtcgctgctgctc

SEQ ID NO: 4705025 - DNA, 25 bp, Homo sapien
ccgtctccaaacagtcccttcctgg

SEQ ID NO: 4705026 - DNA, 25 bp, Homo sapien
ctggcgaagagcagtcgctgctgct

SEQ ID NO: 4705027 - DNA, 25 bp, Homo sapien
cccgtctccaaacagtcccttcctg

SEQ ID NO: 4705028 - DNA, 25 bp, Homo sapien
tgacggtgcgcgactgggccggggc

SEQ ID NO: 4705029 - DNA, 25 bp, Homo sapien
gaggtgacggtgcgcgactgggccg

SEQ ID NO: 4705030 - DNA, 25 bp, Homo sapien
aggtgacggtgcgcgactgggccgg

SEQ ID NO: 4705031 - DNA, 25 bp, Homo sapien
ggtgacggtgcgcgactgggccggg

SEQ ID NO: 4705032 - DNA, 25 bp, Homo sapien
tcagagtccgatgaggcgttgctgc

SEQ ID NO: 4705033 - DNA, 25 bp, Homo sapien
cccgctgctagagtagggtgcacag

SEQ ID NO: 4705034 - DNA, 25 bp, Homo sapien
cacaggccgcgagtggtttgcagtc

SEQ ID NO: 4705035 - DNA, 25 bp, Homo sapien
ttgtctctaaagtcctccgcggcct

SEQ ID NO: 4705036 - DNA, 25 bp, Homo sapien
tcttttatggtggagtttcattgtg

SEQ ID NO: 4705037 - DNA, 25 bp, Homo sapien
ttcttttatggtggagtttcattgt

SEQ ID NO: 4705038 - DNA, 25 bp, Homo sapien
agccgcgacgatggaaccggaccca

SEQ ID NO: 4705039 - DNA, 25 bp, Homo sapien
agaacccgaagctggcgagaactcc

SEQ ID NO: 4705040 - DNA, 25 bp, Homo sapien
gcagctccggggagaaagaacccga

SEQ ID NO: 4705041 - DNA, 25 bp, Homo sapien
ccctggagggataaacggagccgcg

SEQ ID NO: 4705042 - DNA, 25 bp, Homo sapien
tgcgtggctttttcaggcgcaccgg

SEQ ID NO: 4705043 - DNA, 25 bp, Homo sapien
ccagctgcgccagctgatggtcggt

SEQ ID NO: 4705044 - DNA, 25 bp, Homo sapien
ccctggagctggagatctcgcggtc

SEQ ID NO: 4705045 - DNA, 25 bp, Homo sapien
gcggcgagctccatgcggtcctgca

SEQ ID NO: 4705046 - DNA, 25 bp, Homo sapien
aataaacgcgtatggcgggatcagg

SEQ ID NO: 4705047 - DNA, 25 bp, Homo sapien
ctgggggccgaaataaacgcgtatg

SEQ ID NO: 4705048 - DNA, 25 bp, Homo sapien
tcagggctagggcatccagcgaccc

SEQ ID NO: 4705049 - DNA, 25 bp, Homo sapien
ccctccccactgcttggcccagaga

SEQ ID NO: 4705050 - DNA, 25 bp, Homo sapien
gacggccgtctgtcgcttccattta

SEQ ID NO: 4705051 - DNA, 25 bp, Homo sapien
actctgcgggtagaaataaggcgac

SEQ ID NO: 4705052 - DNA, 25 bp, Homo sapien
tccgctggagcgctgagtaattgcc

SEQ ID NO: 4705053 - DNA, 25 bp, Homo sapien
ataaggcgacgggaacatccgctgg

SEQ ID NO: 4705054 - DNA, 25 bp, Homo sapien
aacctgcgccctcagaaaggcgggc

SEQ ID NO: 4705055 - DNA, 25 bp, Homo sapien
gaaagggcgtcgaacctgcgccctc

SEQ ID NO: 4705056 - DNA, 25 bp, Homo sapien
cgaacctgcgccctcagaaaggcgg

SEQ ID NO: 4705057 - DNA, 25 bp, Homo sapien
ggcgtcgaacctgcgccctcagaaa

SEQ ID NO: 4705058 - DNA, 25 bp, Homo sapien
cctcagtggacttggcatttggccc

SEQ ID NO: 4705059 - DNA, 25 bp, Homo sapien
agagcggccgcgagagaggacgccg

SEQ ID NO: 4705060 - DNA, 25 bp, Homo sapien
tggacttggcatttggcccttcggg

SEQ ID NO: 4705061 - DNA, 25 bp, Homo sapien
ggctcccggacagagcggccgcgag

SEQ ID NO: 4705062 - DNA, 25 bp, Homo sapien
ctggagcgtagaaggggcgtgggag

SEQ ID NO: 4705063 - DNA, 25 bp, Homo sapien
ggaatcagccgcacccgctcctggg

SEQ ID NO: 4705064 - DNA, 25 bp, Homo sapien
gcctgggaatcagccgcacccgctc

SEQ ID NO: 4705065 - DNA, 25 bp, Homo sapien
ggcgtgggagagagcgaagcctggg

SEQ ID NO: 4705066 - DNA, 25 bp, Homo sapien
ctggcccaggtgctcgaggggtagg

SEQ ID NO: 4705067 - DNA, 25 bp, Homo sapien
ggtagggagacggggctccgcactc

SEQ ID NO: 4705068 - DNA, 25 bp, Homo sapien
tggcccaggtgctcgaggggtaggg

SEQ ID NO: 4705069 - DNA, 25 bp, Homo sapien
tagggagacggggctccgcactccc

SEQ ID NO: 4705070 - DNA, 25 bp, Homo sapien
ggctcatgggtcacgaataaataac

SEQ ID NO: 4705071 - DNA, 25 bp, Homo sapien
caggcgcctggtcatttgtaagaag

SEQ ID NO: 4705072 - DNA, 25 bp, Homo sapien
tacactttgcacacggtatgtacag

SEQ ID NO: 4705073 - DNA, 25 bp, Homo sapien
tgaggatggaaggaaaccgagtccc

SEQ ID NO: 4705074 - DNA, 25 bp, Homo sapien
gggaacaacgagctggcctcgctgt

SEQ ID NO: 4705075 - DNA, 25 bp, Homo sapien
cctcgggaccgtctgggagccgcta

SEQ ID NO: 4705076 - DNA, 25 bp, Homo sapien
ccttgtcgcggccagatgagtcggc

SEQ ID NO: 4705077 - DNA, 25 bp, Homo sapien
tctgggagccgctaggaaccagatg

SEQ ID NO: 4705078 - DNA, 25 bp, Homo sapien
tctcccctgagatgctagagctgcg

SEQ ID NO: 4705079 - DNA, 25 bp, Homo sapien
tgaactggaagcctcgagtctgact

SEQ ID NO: 4705080 - DNA, 25 bp, Homo sapien
tgaccgtggccctttggacgtgaac

SEQ ID NO: 4705081 - DNA, 25 bp, Homo sapien
caaaacttcccagcgctgagggtta

SEQ ID NO: 4705082 - DNA, 25 bp, Homo sapien
ggtggtgagagttggcaaggtgggc

SEQ ID NO: 4705083 - DNA, 25 bp, Homo sapien
gtggtgagagttggcaaggtgggcc

SEQ ID NO: 4705084 - DNA, 25 bp, Homo sapien
gatccttggaaggtctgagtggcca

SEQ ID NO: 4705085 - DNA, 25 bp, Homo sapien
gaaggtctgagtggccacgagaggg

SEQ ID NO: 4705086 - DNA, 25 bp, Homo sapien
aatgtgttctcaggctcgtggtccc

SEQ ID NO: 4705087 - DNA, 25 bp, Homo sapien
tttcttctggaaacacgaggttgca

SEQ ID NO: 4705088 - DNA, 25 bp, Homo sapien
gatgtgatgtaagaacgccctgcgc

SEQ ID NO: 4705089 - DNA, 25 bp, Homo sapien
tgtattgatcccatcagtgcccggc

SEQ ID NO: 4705090 - DNA, 25 bp, Homo sapien
tcatgttggtgaagacctggcttgc

SEQ ID NO: 4705091 - DNA, 25 bp, Homo sapien
cacatagatatacacaacccgagag

SEQ ID NO: 4705092 - DNA, 25 bp, Homo sapien
ggcctttcgttcagatagccagaca

SEQ ID NO: 4705093 - DNA, 25 bp, Homo sapien
taaatgtgggttcagtagctaggcc

SEQ ID NO: 4705094 - DNA, 25 bp, Homo sapien
aagtttgatcaaacgtcgtctcagg

SEQ ID NO: 4705095 - DNA, 25 bp, Homo sapien
tgatcactgtgtgtctgcgcaacgc

SEQ ID NO: 4705096 - DNA, 25 bp, Homo sapien
tgaaggacacgtccccagagaagga

SEQ ID NO: 4705097 - DNA, 25 bp, Homo sapien
ggcattggtgtcagtctttatcccc

SEQ ID NO: 4705098 - DNA, 25 bp, Homo sapien
cagcgtgaactctcggccgaatgta

SEQ ID NO: 4705099 - DNA, 25 bp, Homo sapien
tctctcaggtgcagaggtcggacgc

SEQ ID NO: 4705100 - DNA, 25 bp, Homo sapien
cgaatgtaattttgccaggccgcga

SEQ ID NO: 4705101 - DNA, 25 bp, Homo sapien
tagggagctacccagacaggcttta

SEQ ID NO: 4705102 - DNA, 25 bp, Homo sapien
tggtcctcggaccaagccagcggtt

SEQ ID NO: 4705103 - DNA, 25 bp, Homo sapien
tgtgcacgtcgcagatgagctccag

SEQ ID NO: 4705104 - DNA, 25 bp, Homo sapien
tggacacagacacgcggtggtcctc

SEQ ID NO: 4705105 - DNA, 25 bp, Homo sapien
caccatgaggcggaatgcagcgctg

SEQ ID NO: 4705106 - DNA, 25 bp, Homo sapien
gaccccagggatggcgggggatgac

SEQ ID NO: 4705107 - DNA, 25 bp, Homo sapien
ccagggatggcgggggatgacttac

SEQ ID NO: 4705108 - DNA, 25 bp, Homo sapien
aagaccccagggatggcgggggatg

SEQ ID NO: 4705109 - DNA, 25 bp, Homo sapien
ccccagggatggcgggggatgactt

SEQ ID NO: 4705110 - DNA, 25 bp, Homo sapien
ggtccttggaggcggcgaatttctc

SEQ ID NO: 4705111 - DNA, 25 bp, Homo sapien
tccttggaggcggcgaatttctcct

SEQ ID NO: 4705112 - DNA, 25 bp, Homo sapien
tggaggcggcgaatttctccttgca

SEQ ID NO: 4705113 - DNA, 25 bp, Homo sapien
cttggaggcggcgaatttctccttg

SEQ ID NO: 4705114 - DNA, 25 bp, Homo sapien
tctcattggtggtaaagccttcccc

SEQ ID NO: 4705115 - DNA, 25 bp, Homo sapien
cattagcatcgcaacccatgggaga

SEQ ID NO: 4705116 - DNA, 25 bp, Homo sapien
tgctgggtggtacagatgcccgacc

SEQ ID NO: 4705117 - DNA, 25 bp, Homo sapien
tcaggcgattgtccatggtcagtgc

SEQ ID NO: 4705118 - DNA, 25 bp, Homo sapien
tcactgagccaaacacatctgagag

SEQ ID NO: 4705119 - DNA, 25 bp, Homo sapien
ttaaaatcttccagcgtactaggtc

SEQ ID NO: 4705120 - DNA, 25 bp, Homo sapien
catgccctcagtggtgatgatggcc

SEQ ID NO: 4705121 - DNA, 25 bp, Homo sapien
taacagggtggaggccgttgatcat

SEQ ID NO: 4705122 - DNA, 25 bp, Homo sapien
tcttactagtgatagcgcccttcta

SEQ ID NO: 4705123 - DNA, 25 bp, Homo sapien
gctcagaagttggtaagccagctat

SEQ ID NO: 4705124 - DNA, 25 bp, Homo sapien
tgggatacacaaccctcaagagttg

SEQ ID NO: 4705125 - DNA, 25 bp, Homo sapien
caaagggtgtcttactagctcagaa

SEQ ID NO: 4705126 - DNA, 25 bp, Homo sapien
cttctgaaacaaggatttcagagtt

SEQ ID NO: 4705127 - DNA, 25 bp, Homo sapien
ttagttgcttctgaaacaaggattt

SEQ ID NO: 4705128 - DNA, 25 bp, Homo sapien
agttgcttctgaaacaaggatttca

SEQ ID NO: 4705129 - DNA, 25 bp, Homo sapien
cttgttttagttgcttctgaaacaa

SEQ ID NO: 4705130 - DNA, 25 bp, Homo sapien
agtttagtgtaagtgcaggatttcc

SEQ ID NO: 4705131 - DNA, 25 bp, Homo sapien
ttagtgtaagtgcaggatttcctga

SEQ ID NO: 4705132 - DNA, 25 bp, Homo sapien
cagcaaagtttagtgtaagtgcagg

SEQ ID NO: 4705133 - DNA, 25 bp, Homo sapien
gtagtcagcaaagtttagtgtaagt

SEQ ID NO: 4705134 - DNA, 25 bp, Homo sapien
tctttgagatatgtccaatcagcac

SEQ ID NO: 4705135 - DNA, 25 bp, Homo sapien
tcttctttgagatatgtccaatcag

SEQ ID NO: 4705136 - DNA, 25 bp, Homo sapien
cttctttgagatatgtccaatcagc

SEQ ID NO: 4705137 - DNA, 25 bp, Homo sapien
catcttctttgagatatgtccaatc

SEQ ID NO: 4705138 - DNA, 25 bp, Homo sapien
gatctctttacacaaactacagtgc

SEQ ID NO: 4705139 - DNA, 25 bp, Homo sapien
cggagccaaatgtggccattggaac

SEQ ID NO: 4705140 - DNA, 25 bp, Homo sapien
tgtgaatggcaagatctctttacac

SEQ ID NO: 4705141 - DNA, 25 bp, Homo sapien
agactgcctgtttgcgatctgtgaa

SEQ ID NO: 4705142 - DNA, 25 bp, Homo sapien
tctatatatcaaactctggcaggac

SEQ ID NO: 4705143 - DNA, 25 bp, Homo sapien
tatatatcaaactctggcaggactg

SEQ ID NO: 4705144 - DNA, 25 bp, Homo sapien
ccgggcaatgctgtcatggagcaaa

SEQ ID NO: 4705145 - DNA, 25 bp, Homo sapien
agctggatgccgggcaatgctgtca

SEQ ID NO: 4705146 - DNA, 25 bp, Homo sapien
gacaggagaatcacagaaagggcag

SEQ ID NO: 4705147 - DNA, 25 bp, Homo sapien
ttctctccactcgtgagggtccggc

SEQ ID NO: 4705148 - DNA, 25 bp, Homo sapien
ggtacatcagatgccacggaccaag

SEQ ID NO: 4705149 - DNA, 25 bp, Homo sapien
tttctagaaatgacgggacactgtg

SEQ ID NO: 4705150 - DNA, 25 bp, Homo sapien
caagcaatttaagttctggagcccg

SEQ ID NO: 4705151 - DNA, 25 bp, Homo sapien
gacagacccctggatactaaatgaa

SEQ ID NO: 4705152 - DNA, 25 bp, Homo sapien
taattgcacaagcttacagcaccag

SEQ ID NO: 4705153 - DNA, 25 bp, Homo sapien
actgtttagaagtgcctccaagggc

SEQ ID NO: 4705154 - DNA, 25 bp, Homo sapien
tcatctaggctaccacagttaagtc

SEQ ID NO: 4705155 - DNA, 25 bp, Homo sapien
tcttctaggaagtgagaccccactg

SEQ ID NO: 4705156 - DNA, 25 bp, Homo sapien
gaaaaacgtctggtgccattcccac

SEQ ID NO: 4705157 - DNA, 25 bp, Homo sapien
tcaatgagacatggactggctaaca

SEQ ID NO: 4705158 - DNA, 25 bp, Homo sapien
tgtgctttacatgcagcgcggcaat

SEQ ID NO: 4705159 - DNA, 25 bp, Homo sapien
ccagcgacttggtaaagaaacagag

SEQ ID NO: 4705160 - DNA, 25 bp, Homo sapien
taaaatatgattaccccacagggcc

SEQ ID NO: 4705161 - DNA, 25 bp, Homo sapien
tggagaaatggccaaccagcgactt

SEQ ID NO: 4705162 - DNA, 25 bp, Homo sapien
actttacattaggtgctgcaggaac

SEQ ID NO: 4705163 - DNA, 25 bp, Homo sapien
ccagtgttttaacaaatcctccaag

SEQ ID NO: 4705164 - DNA, 25 bp, Homo sapien
ctgcatccagcccaccccacccagt

SEQ ID NO: 4705165 - DNA, 25 bp, Homo sapien
ctataggcgtctgccatcacgcccg

SEQ ID NO: 4705166 - DNA, 25 bp, Homo sapien
cctccaagtctttctgatgcacatg

SEQ ID NO: 4705167 - DNA, 25 bp, Homo sapien
acttcaaacgatgggctggattaag

SEQ ID NO: 4705168 - DNA, 25 bp, Homo sapien
gggctggattaagctcaagtacacc

SEQ ID NO: 4705169 - DNA, 25 bp, Homo sapien
ctcaagtacaccaatggatgggagg

SEQ ID NO: 4705170 - DNA, 25 bp, Homo sapien
tattcaatgaacttcaaacgatggg

SEQ ID NO: 4705171 - DNA, 25 bp, Homo sapien
cgttgcggtcctctacgtacatgga

SEQ ID NO: 4705172 - DNA, 25 bp, Homo sapien
ggcagggcaccgttgcggtcctcta

SEQ ID NO: 4705173 - DNA, 25 bp, Homo sapien
agctactttcagggtggagacatgc

SEQ ID NO: 4705174 - DNA, 25 bp, Homo sapien
cagtgtgagcggatcctggaaccac

SEQ ID NO: 4705175 - DNA, 25 bp, Homo sapien
gagcgccgtattgaaatcgatgtcc

SEQ ID NO: 4705176 - DNA, 25 bp, Homo sapien
gaaatcgatgtcctcggtgaggatc

SEQ ID NO: 4705177 - DNA, 25 bp, Homo sapien
gggctctcggagcgccgtattgaaa

SEQ ID NO: 4705178 - DNA, 25 bp, Homo sapien
tattgaaatcgatgtcctcggtgag

SEQ ID NO: 4705179 - DNA, 25 bp, Homo sapien
tcctgatgactaagaatgtcgagca

SEQ ID NO: 4705180 - DNA, 25 bp, Homo sapien
gcagcagtacatgaagcatccaatt

SEQ ID NO: 4705181 - DNA, 25 bp, Homo sapien
tgttgctaaaacagctgcaagactt

SEQ ID NO: 4705182 - DNA, 25 bp, Homo sapien
tgtctctataaccaccctacgggtg

SEQ ID NO: 4705183 - DNA, 25 bp, Homo sapien
ggtgccctgtgctgatcatcttaga

SEQ ID NO: 4705184 - DNA, 25 bp, Homo sapien
gccactaagtgcaagatgagctccg

SEQ ID NO: 4705185 - DNA, 25 bp, Homo sapien
tccgtgatggagagaactggtaccc

SEQ ID NO: 4705186 - DNA, 25 bp, Homo sapien
taagtgcaagatgagctccgtgatg

SEQ ID NO: 4705187 - DNA, 25 bp, Homo sapien
gatgagctccgtgatggagagaact

SEQ ID NO: 4705188 - DNA, 25 bp, Homo sapien
tcaactgtactttccaaggcctggg

SEQ ID NO: 4705189 - DNA, 25 bp, Homo sapien
tgggtgggttcctcgcctgggccca

SEQ ID NO: 4705190 - DNA, 25 bp, Homo sapien
gccctggagatgaagatgaccgttc

SEQ ID NO: 4705191 - DNA, 25 bp, Homo sapien
catcagcgaaggagccaaatgcatc

SEQ ID NO: 4705192 - DNA, 25 bp, Homo sapien
tagagctcggagtaccaggtagaag

SEQ ID NO: 4705193 - DNA, 25 bp, Homo sapien
gactgctaacttccaagtgtgcaca

SEQ ID NO: 4705194 - DNA, 25 bp, Homo sapien
cccagtgaagatggtgggtttccag

SEQ ID NO: 4705195 - DNA, 25 bp, Homo sapien
catgcgggaactttgtctgcactga

SEQ ID NO: 4705196 - DNA, 25 bp, Homo sapien
ggtggaagccaaccccgactgtcat

SEQ ID NO: 4705197 - DNA, 25 bp, Homo sapien
ctgcgcaattaaggggtggaagcca

SEQ ID NO: 4705198 - DNA, 25 bp, Homo sapien
gggtggaagccaaccccgactgtca

SEQ ID NO: 4705199 - DNA, 25 bp, Homo sapien
tgcgcaattaaggggtggaagccaa

SEQ ID NO: 4705200 - DNA, 25 bp, Homo sapien
tgctccatttgacagcacactgtcc

SEQ ID NO: 4705201 - DNA, 25 bp, Homo sapien
gttgctccatttgacagcacactgt

SEQ ID NO: 4705202 - DNA, 25 bp, Homo sapien
ttgctccatttgacagcacactgtc

SEQ ID NO: 4705203 - DNA, 25 bp, Homo sapien
ggatctattttgctgcctccgtaag

SEQ ID NO: 4705204 - DNA, 25 bp, Homo sapien
aggcagagactgagtgctcgcctca

SEQ ID NO: 4705205 - DNA, 25 bp, Homo sapien
ctattttgctgcctccgtaaggcat

SEQ ID NO: 4705206 - DNA, 25 bp, Homo sapien
agtgctcgcctcacgtgtggcccgg

SEQ ID NO: 4705207 - DNA, 25 bp, Homo sapien
tcagccgtcacacaaggaccaggat

SEQ ID NO: 4705208 - DNA, 25 bp, Homo sapien
gcatttgtgctcgtcagccgtcaca

SEQ ID NO: 4705209 - DNA, 25 bp, Homo sapien
tttgagagcatttgtgctcgtcagc

SEQ ID NO: 4705210 - DNA, 25 bp, Homo sapien
ccaggattatcacaagttgatggcc

SEQ ID NO: 4705211 - DNA, 25 bp, Homo sapien
ccataggcaagaaagcggctgaggg

SEQ ID NO: 4705212 - DNA, 25 bp, Homo sapien
ccaaatcttttagataaccaagttg

SEQ ID NO: 4705213 - DNA, 25 bp, Homo sapien
cacagtagtgttccaggtctctgac

SEQ ID NO: 4705214 - DNA, 25 bp, Homo sapien
caagttgtaatccaaatattctggc

SEQ ID NO: 4705215 - DNA, 25 bp, Homo sapien
catttcccgtgagagggtgcttcag

SEQ ID NO: 4705216 - DNA, 25 bp, Homo sapien
gaatcaggtcagtgagatgccggca

SEQ ID NO: 4705217 - DNA, 25 bp, Homo sapien
tctgttcgcacttcggagtgtggcc

SEQ ID NO: 4705218 - DNA, 25 bp, Homo sapien
tcaaagagtgggacaatccagcgcc

SEQ ID NO: 4705219 - DNA, 25 bp, Homo sapien
ctaaaggggggatgatgacaatggc

SEQ ID NO: 4705220 - DNA, 25 bp, Homo sapien
taaaggggggatgatgacaatggca

SEQ ID NO: 4705221 - DNA, 25 bp, Homo sapien
aaaggggggatgatgacaatggcac

SEQ ID NO: 4705222 - DNA, 25 bp, Homo sapien
ctagacacgagtccgtgagttatag

SEQ ID NO: 4705223 - DNA, 25 bp, Homo sapien
cacgagtccgtgagttatagatgta

SEQ ID NO: 4705224 - DNA, 25 bp, Homo sapien
tatgggggtgcggaattcgcctgtc

SEQ ID NO: 4705225 - DNA, 25 bp, Homo sapien
ccgtgagttatagatgtagggctga

SEQ ID NO: 4705226 - DNA, 25 bp, Homo sapien
cgttgtcatctgtcgggtgcccacg

SEQ ID NO: 4705227 - DNA, 25 bp, Homo sapien
gtgggaatcaccaggtccccgtggc

SEQ ID NO: 4705228 - DNA, 25 bp, Homo sapien
gcaactgctgcggtgtaatagagac

SEQ ID NO: 4705229 - DNA, 25 bp, Homo sapien
cagcttctggattgaaatgtcagtc

SEQ ID NO: 4705230 - DNA, 25 bp, Homo sapien
caggatgggattaaccagtaggccc

SEQ ID NO: 4705231 - DNA, 25 bp, Homo sapien
ggttgccgcctttcggagcctcagt

SEQ ID NO: 4705232 - DNA, 25 bp, Homo sapien
gagggtcagtcaggtagtgcataca

SEQ ID NO: 4705233 - DNA, 25 bp, Homo sapien
catagcccggattgttctataagag

SEQ ID NO: 4705234 - DNA, 25 bp, Homo sapien
agctctgagtgcatggaaagagccc

SEQ ID NO: 4705235 - DNA, 25 bp, Homo sapien
tgtttgctcacgtctaagaatggga

SEQ ID NO: 4705236 - DNA, 25 bp, Homo sapien
cccttagatgttgaattacccttgg

SEQ ID NO: 4705237 - DNA, 25 bp, Homo sapien
gagcccacaggtttagtcttcactg

SEQ ID NO: 4705238 - DNA, 25 bp, Homo sapien
taaggcctcttggtgtctgagcccg

SEQ ID NO: 4705239 - DNA, 25 bp, Homo sapien
tgaccttacaggctccagagagaac

SEQ ID NO: 4705240 - DNA, 25 bp, Homo sapien
gtaggccacgttcccactaactgtc

SEQ ID NO: 4705241 - DNA, 25 bp, Homo sapien
gataggaccacgtttggcgagctca

SEQ ID NO: 4705242 - DNA, 25 bp, Homo sapien
tatatgcgcttgccaaagctagcac

SEQ ID NO: 4705243 - DNA, 25 bp, Homo sapien
gtatatgcgcttgccaaagctagca

SEQ ID NO: 4705244 - DNA, 25 bp, Homo sapien
tggagtcaggttcgctccccaaagg

SEQ ID NO: 4705245 - DNA, 25 bp, Homo sapien
aactctcagatgaatgcgtggagtc

SEQ ID NO: 4705246 - DNA, 25 bp, Homo sapien
tagacatgtaccatttgggtgccac

SEQ ID NO: 4705247 - DNA, 25 bp, Homo sapien
tgggtgccacttacaggaacctgga

SEQ ID NO: 4705248 - DNA, 25 bp, Homo sapien
ggcgacccgcgcgaccgaggatcgg

SEQ ID NO: 4705249 - DNA, 25 bp, Homo sapien
cagagcgcgtcagccggggaggtcg

SEQ ID NO: 4705250 - DNA, 25 bp, Homo sapien
cgacccgcgcgaccgaggatcgggt

SEQ ID NO: 4705251 - DNA, 25 bp, Homo sapien
gccgcagagcgcgtcagccggggag

SEQ ID NO: 4705252 - DNA, 25 bp, Homo sapien
aagttggagtgactccgtgagtgtc

SEQ ID NO: 4705253 - DNA, 25 bp, Homo sapien
tagagcgctcttcgctccacggagc

SEQ ID NO: 4705254 - DNA, 25 bp, Homo sapien
actccgtgagtgtcggtgccccgga

SEQ ID NO: 4705255 - DNA, 25 bp, Homo sapien
ctagagcgctcttcgctccacggag

SEQ ID NO: 4705256 - DNA, 25 bp, Homo sapien
cagtttctgacccagaggccggggt

SEQ ID NO: 4705257 - DNA, 25 bp, Homo sapien
tggggtccgagtgggcccacccaca

SEQ ID NO: 4705258 - DNA, 25 bp, Homo sapien
caccccgagacagctgtgcaggccc

SEQ ID NO: 4705259 - DNA, 25 bp, Homo sapien
ctccggacccctccatctttccatc

SEQ ID NO: 4705260 - DNA, 25 bp, Homo sapien
gacaacagaattttgccgagagcac

SEQ ID NO: 4705261 - DNA, 25 bp, Homo sapien
gagtttgccaagctcacacagtaag

SEQ ID NO: 4705262 - DNA, 25 bp, Homo sapien
aatagtagccccatatattgtgtgc

SEQ ID NO: 4705263 - DNA, 25 bp, Homo sapien
gaatgaaggtgcctatttcacagga

SEQ ID NO: 4705264 - DNA, 25 bp, Homo sapien
cttcctctgtggtcatttacaggag

SEQ ID NO: 4705265 - DNA, 25 bp, Homo sapien
tctgtggtcatttacaggagaagag

SEQ ID NO: 4705266 - DNA, 25 bp, Homo sapien
cctctgtggtcatttacaggagaag

SEQ ID NO: 4705267 - DNA, 25 bp, Homo sapien
gtggtcatttacaggagaagaggaa

SEQ ID NO: 4705268 - DNA, 25 bp, Homo sapien
gagcttgtacttctgctcgatgctg

SEQ ID NO: 4705269 - DNA, 25 bp, Homo sapien
tcgatgctgcgaagggattctttca

SEQ ID NO: 4705270 - DNA, 25 bp, Homo sapien
tccagagcggcggtgaaggtgagct

SEQ ID NO: 4705271 - DNA, 25 bp, Homo sapien
tgtcgtgggcgttctccctgcagtg

SEQ ID NO: 4705272 - DNA, 25 bp, Homo sapien
tggtagagaaacgaatgaaggactc

SEQ ID NO: 4705273 - DNA, 25 bp, Homo sapien
tctgggtccgggtcctaattctggc

SEQ ID NO: 4705274 - DNA, 25 bp, Homo sapien
gaaggactcattacatcatttaggt

SEQ ID NO: 4705275 - DNA, 25 bp, Homo sapien
ctaattctggcgcaaacgtccttcc

SEQ ID NO: 4705276 - DNA, 25 bp, Homo sapien
tgtaactacaacagagcattgcggg

SEQ ID NO: 4705277 - DNA, 25 bp, Homo sapien
caaaggtctacatctaaatcagggt

SEQ ID NO: 4705278 - DNA, 25 bp, Homo sapien
tgtgagaaattccagcgtgggccac

SEQ ID NO: 4705279 - DNA, 25 bp, Homo sapien
tccaggccagatgaacagacccatt

SEQ ID NO: 4705280 - DNA, 25 bp, Homo sapien
tgccagagtgcacggcctcaaagtg

SEQ ID NO: 4705281 - DNA, 25 bp, Homo sapien
tctgaggctgcttaagtcgttgctt

SEQ ID NO: 4705282 - DNA, 25 bp, Homo sapien
gttgcagtagtgttccatgtagctc

SEQ ID NO: 4705283 - DNA, 25 bp, Homo sapien
aacccgccggtctgtggagctgttg

SEQ ID NO: 4705284 - DNA, 25 bp, Homo sapien
tgctaacacccgtgagacacctggt

SEQ ID NO: 4705285 - DNA, 25 bp, Homo sapien
ttagaactggacacacagcacgctg

SEQ ID NO: 4705286 - DNA, 25 bp, Homo sapien
ctgccccatggtccgtagaaacctg

SEQ ID NO: 4705287 - DNA, 25 bp, Homo sapien
aggtgaacccatgctcccgggactt

SEQ ID NO: 4705288 - DNA, 25 bp, Homo sapien
gtgctgcagcaccttgcgcggcaac

SEQ ID NO: 4705289 - DNA, 25 bp, Homo sapien
gccgtagtggttccgggcctcgtca

SEQ ID NO: 4705290 - DNA, 25 bp, Homo sapien
gtgggcgatccattctttcattaag

SEQ ID NO: 4705291 - DNA, 25 bp, Homo sapien
ggcctcgtcacagctgaggtggttc

SEQ ID NO: 4705292 - DNA, 25 bp, Homo sapien
gggtttgaggctggcttttgtgagc

SEQ ID NO: 4705293 - DNA, 25 bp, Homo sapien
cacttgtgtttagtggccctgggct

SEQ ID NO: 4705294 - DNA, 25 bp, Homo sapien
ctgggtttgaggctggcttttgtga

SEQ ID NO: 4705295 - DNA, 25 bp, Homo sapien
ggacgagcggctcccctggtgctct

SEQ ID NO: 4705296 - DNA, 25 bp, Homo sapien
tcaaagaggacctaggtgacagttc

SEQ ID NO: 4705297 - DNA, 25 bp, Homo sapien
tcgactacgctgtgaaaaccaggtc

SEQ ID NO: 4705298 - DNA, 25 bp, Homo sapien
gtgacagttcagtgccctcctggga

SEQ ID NO: 4705299 - DNA, 25 bp, Homo sapien
taaacacgctgagttccacatgccg

SEQ ID NO: 4705300 - DNA, 25 bp, Homo sapien
ctgaggaagcaacaataatacagaa

SEQ ID NO: 4705301 - DNA, 25 bp, Homo sapien
tgaggaagcaacaataatacagaag

SEQ ID NO: 4705302 - DNA, 25 bp, Homo sapien
tactttttattcttgactgtctccc

SEQ ID NO: 4705303 - DNA, 25 bp, Homo sapien
gtggtagaatactttttattcttga

SEQ ID NO: 4705304 - DNA, 25 bp, Homo sapien
gaatactttttattcttgactgtct

SEQ ID NO: 4705305 - DNA, 25 bp, Homo sapien
tggtagaatactttttattcttgac

SEQ ID NO: 4705306 - DNA, 25 bp, Homo sapien
ttcagggataaatcccaggaaacca

SEQ ID NO: 4705307 - DNA, 25 bp, Homo sapien
ataaatcccaggaaaccaagtcagg

SEQ ID NO: 4705308 - DNA, 25 bp, Homo sapien
ggataaatcccaggaaaccaagtca

SEQ ID NO: 4705309 - DNA, 25 bp, Homo sapien
tttctttcagggataaatcccagga

SEQ ID NO: 4705310 - DNA, 25 bp, Homo sapien
aggcttactgcccagtgtcctttga

SEQ ID NO: 4705311 - DNA, 25 bp, Homo sapien
ttagaagccgacttgagacaggcat

SEQ ID NO: 4705312 - DNA, 25 bp, Homo sapien
gaggcttactgcccagtgtcctttg

SEQ ID NO: 4705313 - DNA, 25 bp, Homo sapien
ggcttactgcccagtgtcctttgat

SEQ ID NO: 4705314 - DNA, 25 bp, Homo sapien
tgtcaaggcagttgcttgtgtttaa

SEQ ID NO: 4705315 - DNA, 25 bp, Homo sapien
tcaaaagagtttgctgtccttctta

SEQ ID NO: 4705316 - DNA, 25 bp, Homo sapien
aatgtcaaggcagttgcttgtgttt

SEQ ID NO: 4705317 - DNA, 25 bp, Homo sapien
ctgtccttcttagaatgttctaaaa

SEQ ID NO: 4705318 - DNA, 25 bp, Homo sapien
tctcgctgaaagcactaagaggtgg

SEQ ID NO: 4705319 - DNA, 25 bp, Homo sapien
tttgggcagagcgaagacccggcca

SEQ ID NO: 4705320 - DNA, 25 bp, Homo sapien
ccacctcctgcggatactcttggag

SEQ ID NO: 4705321 - DNA, 25 bp, Homo sapien
agacccggccaggaccttggtgaga

SEQ ID NO: 4705322 - DNA, 25 bp, Homo sapien
ggagtcatgttgaaggtgcccaacc

SEQ ID NO: 4705323 - DNA, 25 bp, Homo sapien
catgcggcctgggtgtccttttact

SEQ ID NO: 4705324 - DNA, 25 bp, Homo sapien
tctgtgccatagaacaagataccag

SEQ ID NO: 4705325 - DNA, 25 bp, Homo sapien
cagatgtggagtattagtgacacca

SEQ ID NO: 4705326 - DNA, 25 bp, Homo sapien
tcacagagtgtccaacagatggcgc

SEQ ID NO: 4705327 - DNA, 25 bp, Homo sapien
tgggcactgcatggtatctcagacc

SEQ ID NO: 4705328 - DNA, 25 bp, Homo sapien
ccagccagttagtaattcacagagt

SEQ ID NO: 4705329 - DNA, 25 bp, Homo sapien
taatgcctcgtgtgcacctattggg

SEQ ID NO: 4705330 - DNA, 25 bp, Homo sapien
tagatctaagggaccacttgctgtt

SEQ ID NO: 4705331 - DNA, 25 bp, Homo sapien
taagcaggtggaaaaggaactcctc

SEQ ID NO: 4705332 - DNA, 25 bp, Homo sapien
agagagactgatctagatccccaga

SEQ ID NO: 4705333 - DNA, 25 bp, Homo sapien
ctaatagttgggctcagtgttcata

SEQ ID NO: 4705334 - DNA, 25 bp, Homo sapien
tgggatcaacttggagtcatctgaa

SEQ ID NO: 4705335 - DNA, 25 bp, Homo sapien
gatttaccgagcaaccacctgtgat

SEQ ID NO: 4705336 - DNA, 25 bp, Homo sapien
tagggaaatgcacctttaacagtca

SEQ ID NO: 4705337 - DNA, 25 bp, Homo sapien
gccggcaaagtggagctgtaaattt

SEQ ID NO: 4705338 - DNA, 25 bp, Homo sapien
tggatggagcccatcatactcagcc

SEQ ID NO: 4705339 - DNA, 25 bp, Homo sapien
cctctcacagggctttgtgttcgtg

SEQ ID NO: 4705340 - DNA, 25 bp, Homo sapien
caacctgatgcctactccttcaaaa

SEQ ID NO: 4705341 - DNA, 25 bp, Homo sapien
acagttcgacttcatctcactctgc

SEQ ID NO: 4705342 - DNA, 25 bp, Homo sapien
cccatattgaggtaacaatgcccat

SEQ ID NO: 4705343 - DNA, 25 bp, Homo sapien
gttatggccccctggaaagtgagca

SEQ ID NO: 4705344 - DNA, 25 bp, Homo sapien
cagtgacaatgtggttatggccccc

SEQ ID NO: 4705345 - DNA, 25 bp, Homo sapien
ccctggtggtcccatattgaggtaa

SEQ ID NO: 4705346 - DNA, 25 bp, Homo sapien
agcacgcccgcctatggagggctca

SEQ ID NO: 4705347 - DNA, 25 bp, Homo sapien
caggaagccccgtcacagggaggct

SEQ ID NO: 4705348 - DNA, 25 bp, Homo sapien
ttcatgctcagacaggccggtcagg

SEQ ID NO: 4705349 - DNA, 25 bp, Homo sapien
gagggggagatgtcacacagccaaa

SEQ ID NO: 4705350 - DNA, 25 bp, Homo sapien
tctgctgtccagagtggtgctgacg

SEQ ID NO: 4705351 - DNA, 25 bp, Homo sapien
ctgtccagagtggtgctgacggcca

SEQ ID NO: 4705352 - DNA, 25 bp, Homo sapien
tgctgtccagagtggtgctgacggc

SEQ ID NO: 4705353 - DNA, 25 bp, Homo sapien
ctctgctgtccagagtggtgctgac

SEQ ID NO: 4705354 - DNA, 25 bp, Homo sapien
tgatcaggtcgatgaagagttctcg

SEQ ID NO: 4705355 - DNA, 25 bp, Homo sapien
cacgagatgtgtggcttcattgcaa

SEQ ID NO: 4705356 - DNA, 25 bp, Homo sapien
tcagagctatcctgcgttagggccc

SEQ ID NO: 4705357 - DNA, 25 bp, Homo sapien
ttctcgggccaatgtcctccactgt

SEQ ID NO: 4705358 - DNA, 25 bp, Homo sapien
tgccctcatcactctaattttgacg

SEQ ID NO: 4705359 - DNA, 25 bp, Homo sapien
cagagtaggatcagtctttcccatg

SEQ ID NO: 4705360 - DNA, 25 bp, Homo sapien
tggccttgagcagagtaggatcagt

SEQ ID NO: 4705361 - DNA, 25 bp, Homo sapien
cactctaattttgacgtctttctcc

SEQ ID NO: 4705362 - DNA, 25 bp, Homo sapien
tgtcaaactgtccagatatggtgac

SEQ ID NO: 4705363 - DNA, 25 bp, Homo sapien
gattgacaagtccatctgggccggg

SEQ ID NO: 4705364 - DNA, 25 bp, Homo sapien
tcaacagctgactataaaactctgc

SEQ ID NO: 4705365 - DNA, 25 bp, Homo sapien
ccatgggccccacttctaagtttag

SEQ ID NO: 4705366 - DNA, 25 bp, Homo sapien
gcaggtgaagtacaggacagcgttc

SEQ ID NO: 4705367 - DNA, 25 bp, Homo sapien
ctctatgtacatcttggtgccagaa

SEQ ID NO: 4705368 - DNA, 25 bp, Homo sapien
tgctggctctgtcccgctgcgagtg

SEQ ID NO: 4705369 - DNA, 25 bp, Homo sapien
cgtctgctctatgtacatcttggtg

SEQ ID NO: 4705370 - DNA, 25 bp, Homo sapien
gggctcgtctgctctatgtacatct

SEQ ID NO: 4705371 - DNA, 25 bp, Homo sapien
gcttcagagatcaatactccgtgtt

SEQ ID NO: 4705372 - DNA, 25 bp, Homo sapien
cagatgcgagttgcaggaagtttca

SEQ ID NO: 4705373 - DNA, 25 bp, Homo sapien
ttttcacaatgtcggcaccctttca

SEQ ID NO: 4705374 - DNA, 25 bp, Homo sapien
ggcaccctttcaaataacagcactt

SEQ ID NO: 4705375 - DNA, 25 bp, Homo sapien
atttatagtggtactattcacaata

SEQ ID NO: 4705376 - DNA, 25 bp, Homo sapien
tgcccagccagggacacatcttgag

SEQ ID NO: 4705377 - DNA, 25 bp, Homo sapien
tactattcacaataggctggtcttg

SEQ ID NO: 4705378 - DNA, 25 bp, Homo sapien
cagccagggacacatcttgagtatt

SEQ ID NO: 4705379 - DNA, 25 bp, Homo sapien
ctggtggcagacaaagtgatgggga

SEQ ID NO: 4705380 - DNA, 25 bp, Homo sapien
gggcctctggggtgtcccattgatg

SEQ ID NO: 4705381 - DNA, 25 bp, Homo sapien
cagacaaagtgatggggaggccagt

SEQ ID NO: 4705382 - DNA, 25 bp, Homo sapien
ggggcctctggggtgtcccattgat

SEQ ID NO: 4705383 - DNA, 25 bp, Homo sapien
tgccatacagattgaaggccaggtg

SEQ ID NO: 4705384 - DNA, 25 bp, Homo sapien
tgctgaagctgccatacagattgaa

SEQ ID NO: 4705385 - DNA, 25 bp, Homo sapien
tttgagcgggtagaggcaccctgga

SEQ ID NO: 4705386 - DNA, 25 bp, Homo sapien
cagtgagttcggaggccaggagacg

SEQ ID NO: 4705387 - DNA, 25 bp, Homo sapien
ccaatgaagagagcgcgggagctca

SEQ ID NO: 4705388 - DNA, 25 bp, Homo sapien
aactttccaggacacaagacttcga

SEQ ID NO: 4705389 - DNA, 25 bp, Homo sapien
ttctaaccctcgacacttggagcgg

SEQ ID NO: 4705390 - DNA, 25 bp, Homo sapien
caaaatctggcggtgaacaagcagc

SEQ ID NO: 4705391 - DNA, 25 bp, Homo sapien
tccggagctgtccctcgcctgggtt

SEQ ID NO: 4705392 - DNA, 25 bp, Homo sapien
gtccggagctgtccctcgcctgggt

SEQ ID NO: 4705393 - DNA, 25 bp, Homo sapien
tgtccggagctgtccctcgcctggg

SEQ ID NO: 4705394 - DNA, 25 bp, Homo sapien
ctgtccggagctgtccctcgcctgg

SEQ ID NO: 4705395 - DNA, 25 bp, Homo sapien
aggagccagggagcctgctgtgaag

SEQ ID NO: 4705396 - DNA, 25 bp, Homo sapien
agccagggagcctgctgtgaagcca

SEQ ID NO: 4705397 - DNA, 25 bp, Homo sapien
ttcctaggaccgcaggaggagccag

SEQ ID NO: 4705398 - DNA, 25 bp, Homo sapien
ctttcctaggaccgcaggaggagcc

SEQ ID NO: 4705399 - DNA, 25 bp, Homo sapien
tcaaaccgaaaccaggtatagctct

SEQ ID NO: 4705400 - DNA, 25 bp, Homo sapien
gagtgattccattaatcaaaccgaa

SEQ ID NO: 4705401 - DNA, 25 bp, Homo sapien
caatggtctgcgctggttttgagtg

SEQ ID NO: 4705402 - DNA, 25 bp, Homo sapien
gtatagctctccaatgttccccaag

SEQ ID NO: 4705403 - DNA, 25 bp, Homo sapien
ggaaggactggggtctgtctggccc

SEQ ID NO: 4705404 - DNA, 25 bp, Homo sapien
gagcagggaaggactggggtctgtc

SEQ ID NO: 4705405 - DNA, 25 bp, Homo sapien
ggcagagtgagcagggaaggactgg

SEQ ID NO: 4705406 - DNA, 25 bp, Homo sapien
cagggaaggactggggtctgtctgg

SEQ ID NO: 4705407 - DNA, 25 bp, Homo sapien
tgcttaatccagatgctgagtcccg

SEQ ID NO: 4705408 - DNA, 25 bp, Homo sapien
ttctgatgcttaatccagatgctga

SEQ ID NO: 4705409 - DNA, 25 bp, Homo sapien
gatgcttaatccagatgctgagtcc

SEQ ID NO: 4705410 - DNA, 25 bp, Homo sapien
tgatgcttaatccagatgctgagtc

SEQ ID NO: 4705411 - DNA, 25 bp, Homo sapien
tgcacacggggctggtggtaggtgt

SEQ ID NO: 4705412 - DNA, 25 bp, Homo sapien
aggaggccagagcggttcatcttcc

SEQ ID NO: 4705413 - DNA, 25 bp, Homo sapien
gcaggaggccagagcggttcatctt

SEQ ID NO: 4705414 - DNA, 25 bp, Homo sapien
ctgcacacggggctggtggtaggtg

SEQ ID NO: 4705415 - DNA, 25 bp, Homo sapien
aatagagtgctaaggacagggctgt

SEQ ID NO: 4705416 - DNA, 25 bp, Homo sapien
tccagctccggctctcgtttgaggt

SEQ ID NO: 4705417 - DNA, 25 bp, Homo sapien
gctgttgcttggagcctggtctctg

SEQ ID NO: 4705418 - DNA, 25 bp, Homo sapien
ttgaggttggtccagtccaggcact

SEQ ID NO: 4705419 - DNA, 25 bp, Homo sapien
ggtcgggacagcacaatggggccct

SEQ ID NO: 4705420 - DNA, 25 bp, Homo sapien
ttgtggccaaggtgtcccaggagaa

SEQ ID NO: 4705421 - DNA, 25 bp, Homo sapien
gagtcggacagtggagagtccccat

SEQ ID NO: 4705422 - DNA, 25 bp, Homo sapien
acagtggtacgcatccatgcctggg

SEQ ID NO: 4705423 - DNA, 25 bp, Homo sapien
tacaggctgacggagtgctccagga

SEQ ID NO: 4705424 - DNA, 25 bp, Homo sapien
gccgaaggttttgccgcagatgtca

SEQ ID NO: 4705425 - DNA, 25 bp, Homo sapien
cgggtcccactatgggagcgtcgca

SEQ ID NO: 4705426 - DNA, 25 bp, Homo sapien
cacatgcacttcgagcccgtgaggg

SEQ ID NO: 4705427 - DNA, 25 bp, Homo sapien
caggctcacagcgtggccgaaggtt

SEQ ID NO: 4705428 - DNA, 25 bp, Homo sapien
tcaggactggacccggccgggatcc

SEQ ID NO: 4705429 - DNA, 25 bp, Homo sapien
ctcaggactggacccggccgggatc

SEQ ID NO: 4705430 - DNA, 25 bp, Homo sapien
tggtggaaacgcttgccgcagaact

SEQ ID NO: 4705431 - DNA, 25 bp, Homo sapien
cagcgtggacgagcgcttgaaggcc

SEQ ID NO: 4705432 - DNA, 25 bp, Homo sapien
cttgccgcacatgcggcactcgaag

SEQ ID NO: 4705433 - DNA, 25 bp, Homo sapien
caggtgggtggacagcgtggacgag

SEQ ID NO: 4705434 - DNA, 25 bp, Homo sapien
gtgtggatgtaggtgtgcttcttca

SEQ ID NO: 4705435 - DNA, 25 bp, Homo sapien
ctgtgtggatgtaggtgtgcttctt

SEQ ID NO: 4705436 - DNA, 25 bp, Homo sapien
gtaggtgtgcttcttcatgtcggac

SEQ ID NO: 4705437 - DNA, 25 bp, Homo sapien
gtggatgtaggtgtgcttcttcatg

SEQ ID NO: 4705438 - DNA, 25 bp, Homo sapien
gaagcctttggtgcacagctcacag

SEQ ID NO: 4705439 - DNA, 25 bp, Homo sapien
cgccgcaggtccaccttgcgctgga

SEQ ID NO: 4705440 - DNA, 25 bp, Homo sapien
ttgagattgtgctggctctcgcggt

SEQ ID NO: 4705441 - DNA, 25 bp, Homo sapien
attgtgctggctctcgcggtgccgc

SEQ ID NO: 4705442 - DNA, 25 bp, Homo sapien
cctggttgtggagctagaatcccca

SEQ ID NO: 4705443 - DNA, 25 bp, Homo sapien
aagaggccggctaaaatccaaggtg

SEQ ID NO: 4705444 - DNA, 25 bp, Homo sapien
cctgttatagccagaaagaggccgg

SEQ ID NO: 4705445 - DNA, 25 bp, Homo sapien
ggaaggcacttgagcacacctggaa

SEQ ID NO: 4705446 - DNA, 25 bp, Homo sapien
ctgtgttctggcggcaaacccgttg

SEQ ID NO: 4705447 - DNA, 25 bp, Homo sapien
gttctggcggcaaacccgttgcgaa

SEQ ID NO: 4705448 - DNA, 25 bp, Homo sapien
gtgttctggcggcaaacccgttgcg

SEQ ID NO: 4705449 - DNA, 25 bp, Homo sapien
tctggcggcaaacccgttgcgaaaa

SEQ ID NO: 4705450 - DNA, 25 bp, Homo sapien
ccgaatctacgtgtccaatgacgac

SEQ ID NO: 4705451 - DNA, 25 bp, Homo sapien
tgatatgagtcttttcctttcccat

SEQ ID NO: 4705452 - DNA, 25 bp, Homo sapien
aatgacgacaatgttgatatgagtc

SEQ ID NO: 4705453 - DNA, 25 bp, Homo sapien
cgaatctacgtgtccaatgacgaca

SEQ ID NO: 4705454 - DNA, 25 bp, Homo sapien
cgatgccaccgcatttatagatcag

SEQ ID NO: 4705455 - DNA, 25 bp, Homo sapien
ttgtcgatgccaccgcatttataga

SEQ ID NO: 4705456 - DNA, 25 bp, Homo sapien
gtcgatgccaccgcatttatagatc

SEQ ID NO: 4705457 - DNA, 25 bp, Homo sapien
ttttgtcgatgccaccgcatttata

SEQ ID NO: 4705458 - DNA, 25 bp, Homo sapien
atttccacaaggagatatcaatggt

SEQ ID NO: 4705459 - DNA, 25 bp, Homo sapien
atatcaatggtgataccacgttcac

SEQ ID NO: 4705460 - DNA, 25 bp, Homo sapien
taccacgttcacgctcagctttcag

SEQ ID NO: 4705461 - DNA, 25 bp, Homo sapien
tcaatggtgataccacgttcacgct

SEQ ID NO: 4705462 - DNA, 25 bp, Homo sapien
ttttgatgaagtctctgtgtcctgg

SEQ ID NO: 4705463 - DNA, 25 bp, Homo sapien
gtgtcctggggcatcaatgatagtc

SEQ ID NO: 4705464 - DNA, 25 bp, Homo sapien
gtcctggggcatcaatgatagtcac

SEQ ID NO: 4705465 - DNA, 25 bp, Homo sapien
gtttttgatgaagtctctgtgtcct

SEQ ID NO: 4705466 - DNA, 25 bp, Homo sapien
gtcagttgggcgagttggtggtagg

SEQ ID NO: 4705467 - DNA, 25 bp, Homo sapien
cgcaagggcttgtcagttgggcgag

SEQ ID NO: 4705468 - DNA, 25 bp, Homo sapien
gggcttgtcagttgggcgagttggt

SEQ ID NO: 4705469 - DNA, 25 bp, Homo sapien
tggcattgccatccttacgggtgac

SEQ ID NO: 4705470 - DNA, 25 bp, Homo sapien
gtgcatttcgacagattttacttcc

SEQ ID NO: 4705471 - DNA, 25 bp, Homo sapien
tacttccgttgtaacgttgactgga

SEQ ID NO: 4705472 - DNA, 25 bp, Homo sapien
atttcgacagattttacttccgttg

SEQ ID NO: 4705473 - DNA, 25 bp, Homo sapien
tcgacagattttacttccgttgtaa

SEQ ID NO: 4705474 - DNA, 25 bp, Homo sapien
tcaccagcaacgttgccacgacgaa

SEQ ID NO: 4705475 - DNA, 25 bp, Homo sapien
cagcaacgttgccacgacgaacatc

SEQ ID NO: 4705476 - DNA, 25 bp, Homo sapien
gcaacgttgccacgacgaacatcct

SEQ ID NO: 4705477 - DNA, 25 bp, Homo sapien
accagcaacgttgccacgacgaaca

SEQ ID NO: 4705478 - DNA, 25 bp, Homo sapien
atacaggggcatagccggcgcttat

SEQ ID NO: 4705479 - DNA, 25 bp, Homo sapien
aatacaggggcatagccggcgctta

SEQ ID NO: 4705480 - DNA, 25 bp, Homo sapien
tccaatacaggggcatagccggcgc

SEQ ID NO: 4705481 - DNA, 25 bp, Homo sapien
tagccggcgcttatttggcctggat

SEQ ID NO: 4705482 - DNA, 25 bp, Homo sapien
aatttagggccatcttccagctttt

SEQ ID NO: 4705483 - DNA, 25 bp, Homo sapien
cttcaagaatttagggccatcttcc

SEQ ID NO: 4705484 - DNA, 25 bp, Homo sapien
ttagggccatcttccagctttttac

SEQ ID NO: 4705485 - DNA, 25 bp, Homo sapien
gaatttagggccatcttccagcttt

SEQ ID NO: 4705486 - DNA, 25 bp, Homo sapien
aaaggtggatagtctgagaagctct

SEQ ID NO: 4705487 - DNA, 25 bp, Homo sapien
acgaacagcaaagcgacccaaaggt

SEQ ID NO: 4705488 - DNA, 25 bp, Homo sapien
tcacgaacagcaaagcgacccaaag

SEQ ID NO: 4705489 - DNA, 25 bp, Homo sapien
tatcacgaacagcaaagcgacccaa

SEQ ID NO: 4705490 - DNA, 25 bp, Homo sapien
tgagaccgttcttccaccactgatt

SEQ ID NO: 4705491 - DNA, 25 bp, Homo sapien
gaaggttttacgatgcattgttatc

SEQ ID NO: 4705492 - DNA, 25 bp, Homo sapien
cttaaaactgccacacgcaaaaaag

SEQ ID NO: 4705493 - DNA, 25 bp, Homo sapien
acagttctgagaccgttcttccacc

SEQ ID NO: 4705494 - DNA, 25 bp, Homo sapien
attaagcgagttagtccaccgggcg

SEQ ID NO: 4705495 - DNA, 25 bp, Homo sapien
cctccagggagcaaatggcccatgg

SEQ ID NO: 4705496 - DNA, 25 bp, Homo sapien
agtctctcctactagccagcgaggg

SEQ ID NO: 4705497 - DNA, 25 bp, Homo sapien
catgtcttcgggaaaacgaccgccg

SEQ ID NO: 4705498 - DNA, 25 bp, Homo sapien
caattgttccgcgaaggaatcgttc

SEQ ID NO: 4705499 - DNA, 25 bp, Homo sapien
aaaggcctcgcctcaattgttccgc

SEQ ID NO: 4705500 - DNA, 25 bp, Homo sapien
ccacaaagtactcccaaaggcctcg

SEQ ID NO: 4705501 - DNA, 25 bp, Homo sapien
gaaggaatcgttccgggctccctca

SEQ ID NO: 4705502 - DNA, 25 bp, Homo sapien
accactcccgggtactccacgcaca

SEQ ID NO: 4705503 - DNA, 25 bp, Homo sapien
tcttagccacatcacgcaccactcc

SEQ ID NO: 4705504 - DNA, 25 bp, Homo sapien
cgggagacgccttcctcgccgccca

SEQ ID NO: 4705505 - DNA, 25 bp, Homo sapien
cacaccatgcgtcgctcccgcctca

SEQ ID NO: 4705506 - DNA, 25 bp, Homo sapien
cagtcaatatgggaggcggacagcc

SEQ ID NO: 4705507 - DNA, 25 bp, Homo sapien
tctaaggttgactggaccatcggcg

SEQ ID NO: 4705508 - DNA, 25 bp, Homo sapien
gatgttacaggacgggatcccatag

SEQ ID NO: 4705509 - DNA, 25 bp, Homo sapien
tactgagatgcaaacgcctggatgg

SEQ ID NO: 4705510 - DNA, 25 bp, Homo sapien
tgaaatagccaatcgagatcagctt

SEQ ID NO: 4705511 - DNA, 25 bp, Homo sapien
attgtgcggtccaactccagccagt

SEQ ID NO: 4705512 - DNA, 25 bp, Homo sapien
tgttcccttccgtctagcgtcagct

SEQ ID NO: 4705513 - DNA, 25 bp, Homo sapien
gccgaaactattcttcctggcgaaa

SEQ ID NO: 4705514 - DNA, 25 bp, Homo sapien
aataaaagcctgacggtgatccagg

SEQ ID NO: 4705515 - DNA, 25 bp, Homo sapien
caataaaagcctgacggtgatccag

SEQ ID NO: 4705516 - DNA, 25 bp, Homo sapien
ataaaagcctgacggtgatccagga

SEQ ID NO: 4705517 - DNA, 25 bp, Homo sapien
agtacagctccagcctcttggtggg

SEQ ID NO: 4705518 - DNA, 25 bp, Homo sapien
ccggaagtacagctccagcctcttg

SEQ ID NO: 4705519 - DNA, 25 bp, Homo sapien
ggaagtacagctccagcctcttggt

SEQ ID NO: 4705520 - DNA, 25 bp, Homo sapien
gaagtacagctccagcctcttggtg

SEQ ID NO: 4705521 - DNA, 25 bp, Homo sapien
aatgtgacctcggagtgggcctcag

SEQ ID NO: 4705522 - DNA, 25 bp, Homo sapien
ccaaggatctccatgtcaaatgtga

SEQ ID NO: 4705523 - DNA, 25 bp, Homo sapien
tcgttctcttcctgatgcggagcag

SEQ ID NO: 4705524 - DNA, 25 bp, Homo sapien
atggtggagatgatgccaaggatct

SEQ ID NO: 4705525 - DNA, 25 bp, Homo sapien
cattgcaagagcagatttcagttac

SEQ ID NO: 4705526 - DNA, 25 bp, Homo sapien
tccactggtgcagatgacccacaca

SEQ ID NO: 4705527 - DNA, 25 bp, Homo sapien
tgcaggcagctaggatggccagccc

SEQ ID NO: 4705528 - DNA, 25 bp, Homo sapien
gatggccagccctgaaataaccaga

SEQ ID NO: 4705529 - DNA, 25 bp, Homo sapien
cagctcctggtggaaaaaggcctcc

SEQ ID NO: 4705530 - DNA, 25 bp, Homo sapien
tacattgacgtatgcttgccgcctg

SEQ ID NO: 4705531 - DNA, 25 bp, Homo sapien
tctctggtcggtagaagtagtccac

SEQ ID NO: 4705532 - DNA, 25 bp, Homo sapien
gcctgcttccgtatgcacagccaag

SEQ ID NO: 4705533 - DNA, 25 bp, Homo sapien
ccggaccatcccattttcaggatag

SEQ ID NO: 4705534 - DNA, 25 bp, Homo sapien
tcaggatagagaaccgaggctgcat

SEQ ID NO: 4705535 - DNA, 25 bp, Homo sapien
gtgcccggaccatcccattttcagg

SEQ ID NO: 4705536 - DNA, 25 bp, Homo sapien
attttcaggatagagaaccgaggct

SEQ ID NO: 4705537 - DNA, 25 bp, Homo sapien
caatacgtctgttgggtagtactac

SEQ ID NO: 4705538 - DNA, 25 bp, Homo sapien
atcacacaggccaccgcttactaag

SEQ ID NO: 4705539 - DNA, 25 bp, Homo sapien
gactgaggccaacctggcgatcaca

SEQ ID NO: 4705540 - DNA, 25 bp, Homo sapien
catgtcccacagtcacgttctttgc

SEQ ID NO: 4705541 - DNA, 25 bp, Homo sapien
cacgagcaaagcctgcagagtggga

SEQ ID NO: 4705542 - DNA, 25 bp, Homo sapien
cacagggacgtgaaataactggcag

SEQ ID NO: 4705543 - DNA, 25 bp, Homo sapien
gagatgcactcacagcgctgctgca

SEQ ID NO: 4705544 - DNA, 25 bp, Homo sapien
aatcaggacaccgttggcactgggc

SEQ ID NO: 4705545 - DNA, 25 bp, Homo sapien
tttctgacaagagtatgctgcttgt

SEQ ID NO: 4705546 - DNA, 25 bp, Homo sapien
aattttcacattgtgaaacaaaact

SEQ ID NO: 4705547 - DNA, 25 bp, Homo sapien
aaactagaaagacgggatcgagcct

SEQ ID NO: 4705548 - DNA, 25 bp, Homo sapien
agacgggatcgagcctgggccttct

SEQ ID NO: 4705549 - DNA, 25 bp, Homo sapien
acaaaactagaaagacgggatcgag

SEQ ID NO: 4705550 - DNA, 25 bp, Homo sapien
caaagatggcattgtgggggcgccg

SEQ ID NO: 4705551 - DNA, 25 bp, Homo sapien
gattctcacctgagatggggggatt

SEQ ID NO: 4705552 - DNA, 25 bp, Homo sapien
gatggggggattgttgtagccttcc

SEQ ID NO: 4705553 - DNA, 25 bp, Homo sapien
acaaagatggcattgtgggggcgcc

SEQ ID NO: 4705554 - DNA, 25 bp, Homo sapien
ccacgtctgggctgcagcctccagt

SEQ ID NO: 4705555 - DNA, 25 bp, Homo sapien
tctcctccacgtctgggctgcagcc

SEQ ID NO: 4705556 - DNA, 25 bp, Homo sapien
acgtctgggctgcagcctccagtgg

SEQ ID NO: 4705557 - DNA, 25 bp, Homo sapien
tcctccacgtctgggctgcagcctc

SEQ ID NO: 4705558 - DNA, 25 bp, Homo sapien
cttccggtccacggggttagtgcag

SEQ ID NO: 4705559 - DNA, 25 bp, Homo sapien
tccggtccacggggttagtgcagac

SEQ ID NO: 4705560 - DNA, 25 bp, Homo sapien
ttccggtccacggggttagtgcaga

SEQ ID NO: 4705561 - DNA, 25 bp, Homo sapien
ggggccaggcgcagcgcaggacttg

SEQ ID NO: 4705562 - DNA, 25 bp, Homo sapien
cggggccaggcgcagcgcaggactt

SEQ ID NO: 4705563 - DNA, 25 bp, Homo sapien
gggccaggcgcagcgcaggacttgc

SEQ ID NO: 4705564 - DNA, 25 bp, Homo sapien
gaagggaagcaagaccttgagcttg

SEQ ID NO: 4705565 - DNA, 25 bp, Homo sapien
catttcgggaccagatgggacggat

SEQ ID NO: 4705566 - DNA, 25 bp, Homo sapien
catgtaataggctatgaagggaagc

SEQ ID NO: 4705567 - DNA, 25 bp, Homo sapien
gagcttgtctgggtggacgctgatg

SEQ ID NO: 4705568 - DNA, 25 bp, Homo sapien
cgaggacttgataaatcttggcatc

SEQ ID NO: 4705569 - DNA, 25 bp, Homo sapien
gggtcatacccaaatcgaatccata

SEQ ID NO: 4705570 - DNA, 25 bp, Homo sapien
gtgtttcattccacaacggattcgg

SEQ ID NO: 4705571 - DNA, 25 bp, Homo sapien
tccacaacggattcggaaatcgagg

SEQ ID NO: 4705572 - DNA, 25 bp, Homo sapien
ctacaaaagagaatgctagaaactg

SEQ ID NO: 4705573 - DNA, 25 bp, Homo sapien
gaaaagattcttactacaaaagaga

SEQ ID NO: 4705574 - DNA, 25 bp, Homo sapien
ttccaaatgaaaagattcttactac

SEQ ID NO: 4705575 - DNA, 25 bp, Homo sapien
gcaggaagcaaagctttcaggaatt

SEQ ID NO: 4705576 - DNA, 25 bp, Homo sapien
gctttgctttgaccggcaagtcact

SEQ ID NO: 4705577 - DNA, 25 bp, Homo sapien
tgctgcgctttgctttgaccggcaa

SEQ ID NO: 4705578 - DNA, 25 bp, Homo sapien
taggtgctgcgctttgctttgaccg

SEQ ID NO: 4705579 - DNA, 25 bp, Homo sapien
gctgtagttgtaggtgctgcgcttt

SEQ ID NO: 4705580 - DNA, 25 bp, Homo sapien
tgagcttgtacttgctggaagctgg

SEQ ID NO: 4705581 - DNA, 25 bp, Homo sapien
agctggtttccgagcaccactcgtc

SEQ ID NO: 4705582 - DNA, 25 bp, Homo sapien
tacttgctggaagctggtttccgag

SEQ ID NO: 4705583 - DNA, 25 bp, Homo sapien
gctggaagctggtttccgagcacca

SEQ ID NO: 4705584 - DNA, 25 bp, Homo sapien
ccgaggccccggtgggcagagctgc

SEQ ID NO: 4705585 - DNA, 25 bp, Homo sapien
taaaaggaagcaaggtgccgaggcc

SEQ ID NO: 4705586 - DNA, 25 bp, Homo sapien
caagagggaagtcctcccctccatt

SEQ ID NO: 4705587 - DNA, 25 bp, Homo sapien
aggtgtcacccacaaggtgcccggc

SEQ ID NO: 4705588 - DNA, 25 bp, Homo sapien
tgggcaaccgcactgacggaaacgt

SEQ ID NO: 4705589 - DNA, 25 bp, Homo sapien
tgttgcagactccatgtaggctccc

SEQ ID NO: 4705590 - DNA, 25 bp, Homo sapien
tagttctagagtaaggataacggcc

SEQ ID NO: 4705591 - DNA, 25 bp, Homo sapien
tcattcccggagtggtcacgtggct

SEQ ID NO: 4705592 - DNA, 25 bp, Homo sapien
ttccacattcaagtcgcataactgg

SEQ ID NO: 4705593 - DNA, 25 bp, Homo sapien
tggtagaacatctgccgatagggtg

SEQ ID NO: 4705594 - DNA, 25 bp, Homo sapien
tgccgatagggtggcaaggcccctt

SEQ ID NO: 4705595 - DNA, 25 bp, Homo sapien
tcaagtcgcataactggtagaacat

SEQ ID NO: 4705596 - DNA, 25 bp, Homo sapien
gccccgtgagcgaagtctacagaga

SEQ ID NO: 4705597 - DNA, 25 bp, Homo sapien
cacacatgaagctggccgtgttacc

SEQ ID NO: 4705598 - DNA, 25 bp, Homo sapien
cccagggcgggtctctgctaagaga

SEQ ID NO: 4705599 - DNA, 25 bp, Homo sapien
cgtgttaccactgcacatgcttctg

SEQ ID NO: 4705600 - DNA, 25 bp, Homo sapien
cacccatcccgttctgtgcaggaat

SEQ ID NO: 4705601 - DNA, 25 bp, Homo sapien
atggtctgccggatcatgagggaca

SEQ ID NO: 4705602 - DNA, 25 bp, Homo sapien
tctgccccgtcattgcggtgaatga

SEQ ID NO: 4705603 - DNA, 25 bp, Homo sapien
tggtgtccctgagctcgtcgctggt

SEQ ID NO: 4705604 - DNA, 25 bp, Homo sapien
tgggctctggctcacaatgtcctcc

SEQ ID NO: 4705605 - DNA, 25 bp, Homo sapien
gcaagatgatgccacctgggtgcca

SEQ ID NO: 4705606 - DNA, 25 bp, Homo sapien
caaaggagatcaccaggcatcctgg

SEQ ID NO: 4705607 - DNA, 25 bp, Homo sapien
gtccccttagggacacctctgtctc

SEQ ID NO: 4705608 - DNA, 25 bp, Homo sapien
gggtccacacccttgattagattcc

SEQ ID NO: 4705609 - DNA, 25 bp, Homo sapien
ttagattcccaaagggggctgaatc

SEQ ID NO: 4705610 - DNA, 25 bp, Homo sapien
gaaagggtccacacccttgattaga

SEQ ID NO: 4705611 - DNA, 25 bp, Homo sapien
tctgggaaagggtccacacccttga

SEQ ID NO: 4705612 - DNA, 25 bp, Homo sapien
agctggtgggtaagtatggggtgga

SEQ ID NO: 4705613 - DNA, 25 bp, Homo sapien
agctgtagtttgacgggcacccagg

SEQ ID NO: 4705614 - DNA, 25 bp, Homo sapien
ggaagctgtagtttgacgggcaccc

SEQ ID NO: 4705615 - DNA, 25 bp, Homo sapien
ttgacgggcacccaggggaatcctg

SEQ ID NO: 4705616 - DNA, 25 bp, Homo sapien
cgtcttccccagactcgtacgtcag

SEQ ID NO: 4705617 - DNA, 25 bp, Homo sapien
ccagactcgtacgtcagctgctctt

SEQ ID NO: 4705618 - DNA, 25 bp, Homo sapien
tcgtacgtcagctgctcttttccgc

SEQ ID NO: 4705619 - DNA, 25 bp, Homo sapien
tccccagactcgtacgtcagctgct

SEQ ID NO: 4705620 - DNA, 25 bp, Homo sapien
tttcgttttcactgccgtcggatgg

SEQ ID NO: 4705621 - DNA, 25 bp, Homo sapien
tgtctccatttcgttttcactgccg

SEQ ID NO: 4705622 - DNA, 25 bp, Homo sapien
tccatttcgttttcactgccgtcgg

SEQ ID NO: 4705623 - DNA, 25 bp, Homo sapien
ctctgtctccatttcgttttcactg

SEQ ID NO: 4705624 - DNA, 25 bp, Homo sapien
tcatgagagccaagcgagactggcc

SEQ ID NO: 4705625 - DNA, 25 bp, Homo sapien
ccaaacggttgggatccagagctaa

SEQ ID NO: 4705626 - DNA, 25 bp, Homo sapien
gagaggcattgggtgcccactcact

SEQ ID NO: 4705627 - DNA, 25 bp, Homo sapien
gcatgtcacagccagtgctagggtc

SEQ ID NO: 4705628 - DNA, 25 bp, Homo sapien
gggcctttaagctcagccagtgtga

SEQ ID NO: 4705629 - DNA, 25 bp, Homo sapien
gcctttaagctcagccagtgtgagg

SEQ ID NO: 4705630 - DNA, 25 bp, Homo sapien
tcaccgagacactcagtggcagctc

SEQ ID NO: 4705631 - DNA, 25 bp, Homo sapien
cagtgtgaggtcaccctcaccgaga

SEQ ID NO: 4705632 - DNA, 25 bp, Homo sapien
tggtttgttcacagggcttggtgtc

SEQ ID NO: 4705633 - DNA, 25 bp, Homo sapien
caggtggcaaggtggcgggtggtaa

SEQ ID NO: 4705634 - DNA, 25 bp, Homo sapien
agaggcaggtggcaaggtggcgggt

SEQ ID NO: 4705635 - DNA, 25 bp, Homo sapien
cagtgccctgccttctggtttgttc

SEQ ID NO: 4705636 - DNA, 25 bp, Homo sapien
aacacaaccagttgcaggcgcccca

SEQ ID NO: 4705637 - DNA, 25 bp, Homo sapien
ccaacacaaccagttgcaggcgccc

SEQ ID NO: 4705638 - DNA, 25 bp, Homo sapien
gcccaacacaaccagttgcaggcgc

SEQ ID NO: 4705639 - DNA, 25 bp, Homo sapien
acacaaccagttgcaggcgccccat

SEQ ID NO: 4705640 - DNA, 25 bp, Homo sapien
cccatagaaatgagcgtgagtgccc

SEQ ID NO: 4705641 - DNA, 25 bp, Homo sapien
gcaaatgtaaattcaagaggcccag

SEQ ID NO: 4705642 - DNA, 25 bp, Homo sapien
tcctgcacaggaataggaggcagca

SEQ ID NO: 4705643 - DNA, 25 bp, Homo sapien
tccagatctgattgagcgagagagc

SEQ ID NO: 4705644 - DNA, 25 bp, Homo sapien
ggccgagcttcttattgacgccttc

SEQ ID NO: 4705645 - DNA, 25 bp, Homo sapien
gcttcttattgacgccttccacgaa

SEQ ID NO: 4705646 - DNA, 25 bp, Homo sapien
aggaggccgagcttcttattgacgc

SEQ ID NO: 4705647 - DNA, 25 bp, Homo sapien
caccttctgtgtacacggcgcccag

SEQ ID NO: 4705648 - DNA, 25 bp, Homo sapien
cagtcttcatccccgtaggtgctgt

SEQ ID NO: 4705649 - DNA, 25 bp, Homo sapien
ggcacccaaatgttgaggtacaggc

SEQ ID NO: 4705650 - DNA, 25 bp, Homo sapien
ccctggggcacccaaatgttgaggt

SEQ ID NO: 4705651 - DNA, 25 bp, Homo sapien
tcttcatccccgtaggtgctgtcct

SEQ ID NO: 4705652 - DNA, 25 bp, Homo sapien
ggccctgtctccagccggtcccctg

SEQ ID NO: 4705653 - DNA, 25 bp, Homo sapien
ctggtgaccccagacgccccgcctg

SEQ ID NO: 4705654 - DNA, 25 bp, Homo sapien
cctgtctccagccggtcccctgtcc

SEQ ID NO: 4705655 - DNA, 25 bp, Homo sapien
tggtgaccccagacgccccgcctgg

SEQ ID NO: 4705656 - DNA, 25 bp, Homo sapien
ccgacacggtagttgaaggtgacca

SEQ ID NO: 4705657 - DNA, 25 bp, Homo sapien
gaaggcgcctccatagatccagatc

SEQ ID NO: 4705658 - DNA, 25 bp, Homo sapien
tgttgaggaagttggccccatggcc

SEQ ID NO: 4705659 - DNA, 25 bp, Homo sapien
tccagatcataacgggcaggtcccg

SEQ ID NO: 4705660 - DNA, 25 bp, Homo sapien
ctcagggccgaaggcacccacgcac

SEQ ID NO: 4705661 - DNA, 25 bp, Homo sapien
gggagggggtgctagagaccagtgg

SEQ ID NO: 4705662 - DNA, 25 bp, Homo sapien
ggggtgctagagaccagtggcccag

SEQ ID NO: 4705663 - DNA, 25 bp, Homo sapien
gagggggtgctagagaccagtggcc

SEQ ID NO: 4705664 - DNA, 25 bp, Homo sapien
ggtgctagagaccagtggcccaggc

SEQ ID NO: 4705665 - DNA, 25 bp, Homo sapien
gaaggccgcgatattcctcttcacc

SEQ ID NO: 4705666 - DNA, 25 bp, Homo sapien
gcagactccccgaagagcgtgatgt

SEQ ID NO: 4705667 - DNA, 25 bp, Homo sapien
cctcttcacccaagcaatggccatg

SEQ ID NO: 4705668 - DNA, 25 bp, Homo sapien
ccatgtgctgatcccgaaggccata

SEQ ID NO: 4705669 - DNA, 25 bp, Homo sapien
gcttcctctcaacctgtggggcagg

SEQ ID NO: 4705670 - DNA, 25 bp, Homo sapien
cttcctctcaacctgtggggcaggc

SEQ ID NO: 4705671 - DNA, 25 bp, Homo sapien
ttcctctcaacctgtggggcaggcc

SEQ ID NO: 4705672 - DNA, 25 bp, Homo sapien
agcttcctctcaacctgtggggcag

SEQ ID NO: 4705673 - DNA, 25 bp, Homo sapien
tgaggcccttgttgtagggggagag

SEQ ID NO: 4705674 - DNA, 25 bp, Homo sapien
atgaggcccttgttgtagggggaga

SEQ ID NO: 4705675 - DNA, 25 bp, Homo sapien
gatgaggcccttgttgtagggggag

SEQ ID NO: 4705676 - DNA, 25 bp, Homo sapien
gcccagaagagtgggtttttctgga

SEQ ID NO: 4705677 - DNA, 25 bp, Homo sapien
agggccacgccgctctggctgatgg

SEQ ID NO: 4705678 - DNA, 25 bp, Homo sapien
tcagggccacgccgctctggctgat

SEQ ID NO: 4705679 - DNA, 25 bp, Homo sapien
tttttctggatgacccagggactca

SEQ ID NO: 4705680 - DNA, 25 bp, Homo sapien
ggctcggggatcagtaaccttcaga

SEQ ID NO: 4705681 - DNA, 25 bp, Homo sapien
ccttataggccagcgtcagggctcg

SEQ ID NO: 4705682 - DNA, 25 bp, Homo sapien
ctgccagcggcaccttataggccag

SEQ ID NO: 4705683 - DNA, 25 bp, Homo sapien
gcggcaccttataggccagcgtcag

SEQ ID NO: 4705684 - DNA, 25 bp, Homo sapien
tcagcggggatgaagtctccatcaa

SEQ ID NO: 4705685 - DNA, 25 bp, Homo sapien
tatatagtcgatgtcggcggcgttg

SEQ ID NO: 4705686 - DNA, 25 bp, Homo sapien
cgttggcgtacaggttgatcgggtc

SEQ ID NO: 4705687 - DNA, 25 bp, Homo sapien
tccatcaatgacagggacgaagccc

SEQ ID NO: 4705688 - DNA, 25 bp, Homo sapien
tgctggcgaagatgtggccgtccat

SEQ ID NO: 4705689 - DNA, 25 bp, Homo sapien
ttgcccttgttgatggcaggcatgt

SEQ ID NO: 4705690 - DNA, 25 bp, Homo sapien
tgtggccgtccatgttgttggtgcc

SEQ ID NO: 4705691 - DNA, 25 bp, Homo sapien
ttgttgatggcaggcatgtcgatgc

SEQ ID NO: 4705692 - DNA, 25 bp, Homo sapien
cccaggactcggtgtagacatcaaa

SEQ ID NO: 4705693 - DNA, 25 bp, Homo sapien
cactgaccagcttgtagaagtcctc

SEQ ID NO: 4705694 - DNA, 25 bp, Homo sapien
aaaggtcgtcttggcgcctctgagc

SEQ ID NO: 4705695 - DNA, 25 bp, Homo sapien
tctgagccccttggtgattgtgaac

SEQ ID NO: 4705696 - DNA, 25 bp, Homo sapien
aatgtcatctgcatggtcggccccc

SEQ ID NO: 4705697 - DNA, 25 bp, Homo sapien
gcttcccgaaaacgtactgaatgtc

SEQ ID NO: 4705698 - DNA, 25 bp, Homo sapien
tgtcatctgcatggtcggcccccac

SEQ ID NO: 4705699 - DNA, 25 bp, Homo sapien
cccgaaaacgtactgaatgtcatct

SEQ ID NO: 4705700 - DNA, 25 bp, Homo sapien
ggaagttggttctcaggctccgctt

SEQ ID NO: 4705701 - DNA, 25 bp, Homo sapien
ggtagccgctgttttccgtagtgta

SEQ ID NO: 4705702 - DNA, 25 bp, Homo sapien
catcttcttggtgatctccaggtag

SEQ ID NO: 4705703 - DNA, 25 bp, Homo sapien
ccgtagtgtagggttcccagtgtgt

SEQ ID NO: 4705704 - DNA, 25 bp, Homo sapien
ctcggagtcccctgtggggggcaca

SEQ ID NO: 4705705 - DNA, 25 bp, Homo sapien
ggggcacgggagtggcctcggagtc

SEQ ID NO: 4705706 - DNA, 25 bp, Homo sapien
tcggagtcccctgtggggggcacag

SEQ ID NO: 4705707 - DNA, 25 bp, Homo sapien
cggagtcacccgtgggcggcacggg

SEQ ID NO: 4705708 - DNA, 25 bp, Homo sapien
ccggagtcacccgtgggcggcacgg

SEQ ID NO: 4705709 - DNA, 25 bp, Homo sapien
gccccggagtcacccgtgggcggca

SEQ ID NO: 4705710 - DNA, 25 bp, Homo sapien
cccggagtcacccgtgggcggcacg

SEQ ID NO: 4705711 - DNA, 25 bp, Homo sapien
cggagtcacccgtgggcggcacggg

SEQ ID NO: 4705712 - DNA, 25 bp, Homo sapien
ccggagtcacccgtgggcggcacgg

SEQ ID NO: 4705713 - DNA, 25 bp, Homo sapien
gccccggagtcacccgtgggcggca

SEQ ID NO: 4705714 - DNA, 25 bp, Homo sapien
cccggagtcacccgtgggcggcacg

SEQ ID NO: 4705715 - DNA, 25 bp, Homo sapien
gcgccggagtcacccgtgggcggca

SEQ ID NO: 4705716 - DNA, 25 bp, Homo sapien
ggcacgggggcggtctcggagtcac

SEQ ID NO: 4705717 - DNA, 25 bp, Homo sapien
tctcggagtcacccgtgggggtcac

SEQ ID NO: 4705718 - DNA, 25 bp, Homo sapien
cggagtcacccgtgggcggcacggg

SEQ ID NO: 4705719 - DNA, 25 bp, Homo sapien
agagtcacccgtggggggcacaggg

SEQ ID NO: 4705720 - DNA, 25 bp, Homo sapien
ctaaaacctaatgactgcaggcatc

SEQ ID NO: 4705721 - DNA, 25 bp, Homo sapien
aggcatctgagcttccttggagtca

SEQ ID NO: 4705722 - DNA, 25 bp, Homo sapien
gcaggcatctgagcttccttggagt

SEQ ID NO: 4705723 - DNA, 25 bp, Homo sapien
ctgcaggcatctgagcttccttgga

SEQ ID NO: 4705724 - DNA, 25 bp, Homo sapien
tggcctcttgataccaaggctcatg

SEQ ID NO: 4705725 - DNA, 25 bp, Homo sapien
gtggcctcttgataccaaggctcat

SEQ ID NO: 4705726 - DNA, 25 bp, Homo sapien
tcttgataccaaggctcatgggacg

SEQ ID NO: 4705727 - DNA, 25 bp, Homo sapien
ctagcagtaacgaaatcccaggagc

SEQ ID NO: 4705728 - DNA, 25 bp, Homo sapien
tattcacaccgacgaaggagtgcac

SEQ ID NO: 4705729 - DNA, 25 bp, Homo sapien
tgcaccctgcggagatggttgggcc

SEQ ID NO: 4705730 - DNA, 25 bp, Homo sapien
tggttgggccgggtccatggcagga

SEQ ID NO: 4705731 - DNA, 25 bp, Homo sapien
gtggcagctccagccaccgcacagc

SEQ ID NO: 4705732 - DNA, 25 bp, Homo sapien
cgagacgctcggtggcagctccagc

SEQ ID NO: 4705733 - DNA, 25 bp, Homo sapien
ggtggcagctccagccaccgcacag

SEQ ID NO: 4705734 - DNA, 25 bp, Homo sapien
gcagctccagccaccgcacagccct

SEQ ID NO: 4705735 - DNA, 25 bp, Homo sapien
caaagccgtctcattcaagggtggg

SEQ ID NO: 4705736 - DNA, 25 bp, Homo sapien
ccagagcagcacaaagccgtctcat

SEQ ID NO: 4705737 - DNA, 25 bp, Homo sapien
cttatctgtacgagcttttcctggg

SEQ ID NO: 4705738 - DNA, 25 bp, Homo sapien
gcacaaagccgtctcattcaagggt

SEQ ID NO: 4705739 - DNA, 25 bp, Homo sapien
caggtggcaaggtggcgggtggtaa

SEQ ID NO: 4705740 - DNA, 25 bp, Homo sapien
tggtttgttcacagggcttggtgtc

SEQ ID NO: 4705741 - DNA, 25 bp, Homo sapien
agaggcaggtggcaaggtggcgggt

SEQ ID NO: 4705742 - DNA, 25 bp, Homo sapien
cagtgccctgccttctggtttgttc

SEQ ID NO: 4705743 - DNA, 25 bp, Homo sapien
ccaacacaaccagttgcaggcgccc

SEQ ID NO: 4705744 - DNA, 25 bp, Homo sapien
acacaaccagttgcaggcgccccat

SEQ ID NO: 4705745 - DNA, 25 bp, Homo sapien
aacacaaccagttgcaggcgcccca

SEQ ID NO: 4705746 - DNA, 25 bp, Homo sapien
gcccaacacaaccagttgcaggcgc

SEQ ID NO: 4705747 - DNA, 25 bp, Homo sapien
gtgtggagtagctcggctttcagct

SEQ ID NO: 4705748 - DNA, 25 bp, Homo sapien
tgtggagtagctcggctttcagctt

SEQ ID NO: 4705749 - DNA, 25 bp, Homo sapien
cagggctggaattggctatgtcctc

SEQ ID NO: 4705750 - DNA, 25 bp, Homo sapien
ccagttttccctgagccgccccttg

SEQ ID NO: 4705751 - DNA, 25 bp, Homo sapien
cagttttccctgagccgccccttgc

SEQ ID NO: 4705752 - DNA, 25 bp, Homo sapien
tcagcggggatgaagtctccatcaa

SEQ ID NO: 4705753 - DNA, 25 bp, Homo sapien
tccatcaatgacagggacgaagccc

SEQ ID NO: 4705754 - DNA, 25 bp, Homo sapien
tatatagtcgatgtcggcggcgttg

SEQ ID NO: 4705755 - DNA, 25 bp, Homo sapien
cgttggcgtacaggttgatcgggtc

SEQ ID NO: 4705756 - DNA, 25 bp, Homo sapien
tgtggccgtccatgttgttggtgcc

SEQ ID NO: 4705757 - DNA, 25 bp, Homo sapien
ttgttgatggcaggcatgtcgatgc

SEQ ID NO: 4705758 - DNA, 25 bp, Homo sapien
tgctggcgaagatgtggccgtccat

SEQ ID NO: 4705759 - DNA, 25 bp, Homo sapien
ttgcccttgttgatggcaggcatgt

SEQ ID NO: 4705760 - DNA, 25 bp, Homo sapien
aaaggtcgtcttggcgcctctgagc

SEQ ID NO: 4705761 - DNA, 25 bp, Homo sapien
cccaggactcggtgtagacatcaaa

SEQ ID NO: 4705762 - DNA, 25 bp, Homo sapien
cactgaccagcttgtagaagtcctc

SEQ ID NO: 4705763 - DNA, 25 bp, Homo sapien
tctgagccccttggtgattgtgaac

SEQ ID NO: 4705764 - DNA, 25 bp, Homo sapien
caggtaggcgtaggtcttggcactc

SEQ ID NO: 4705765 - DNA, 25 bp, Homo sapien
aaacaggtaggcgtaggtcttggca

SEQ ID NO: 4705766 - DNA, 25 bp, Homo sapien
tggatctcatctctatggtcggccc

SEQ ID NO: 4705767 - DNA, 25 bp, Homo sapien
ccatttggggtagacgggcatccga

SEQ ID NO: 4705768 - DNA, 25 bp, Homo sapien
ggcaaagggctccccaaagatgtac

SEQ ID NO: 4705769 - DNA, 25 bp, Homo sapien
gccggtagcccggagtggggtggca

SEQ ID NO: 4705770 - DNA, 25 bp, Homo sapien
gagtggggtggcaaagggctcccca

SEQ ID NO: 4705771 - DNA, 25 bp, Homo sapien
ctgtcttggggccggtagcccggag

SEQ ID NO: 4705772 - DNA, 25 bp, Homo sapien
cctgttttggcaaagttggtccagt

SEQ ID NO: 4705773 - DNA, 25 bp, Homo sapien
tgttttggcaaagttggtccagtag

SEQ ID NO: 4705774 - DNA, 25 bp, Homo sapien
ttttggcaaagttggtccagtaggc

SEQ ID NO: 4705775 - DNA, 25 bp, Homo sapien
ttggcaaagttggtccagtaggcgg

SEQ ID NO: 4705776 - DNA, 25 bp, Homo sapien
ggtagccgctgttttccgtagtgta

SEQ ID NO: 4705777 - DNA, 25 bp, Homo sapien
ccagtagcgcaggaagttggttctc

SEQ ID NO: 4705778 - DNA, 25 bp, Homo sapien
catcttcttggtgatctccaggtag

SEQ ID NO: 4705779 - DNA, 25 bp, Homo sapien
ccgtagtgtagggttcccagtgtgt

SEQ ID NO: 4705780 - DNA, 25 bp, Homo sapien
tgtgggcagcgccagataggtgagg

SEQ ID NO: 4705781 - DNA, 25 bp, Homo sapien
gtgggcagcgccagataggtgaggg

SEQ ID NO: 4705782 - DNA, 25 bp, Homo sapien
tgggcagcgccagataggtgagggt

SEQ ID NO: 4705783 - DNA, 25 bp, Homo sapien
ggagacgggagtggcctcagagtcc

SEQ ID NO: 4705784 - DNA, 25 bp, Homo sapien
gactcggagttgcctgtcgggggag

SEQ ID NO: 4705785 - DNA, 25 bp, Homo sapien
gggagacgggagtggcctcagagtc

SEQ ID NO: 4705786 - DNA, 25 bp, Homo sapien
agactcggagttgcctgtcggggga

SEQ ID NO: 4705787 - DNA, 25 bp, Homo sapien
gaggggcacaggggcatcctgagag

SEQ ID NO: 4705788 - DNA, 25 bp, Homo sapien
gtgaggggcacaggggcatcctgag

SEQ ID NO: 4705789 - DNA, 25 bp, Homo sapien
tgtgaggggcacaggggcatcctga

SEQ ID NO: 4705790 - DNA, 25 bp, Homo sapien
ttgtgaggggcacaggggcatcctg

SEQ ID NO: 4705791 - DNA, 25 bp, Homo sapien
agggggacacgggggcagcctcaga

SEQ ID NO: 4705792 - DNA, 25 bp, Homo sapien
gggacacgggggcagcctcagagtc

SEQ ID NO: 4705793 - DNA, 25 bp, Homo sapien
ctgagggggacacgggggcagcctc

SEQ ID NO: 4705794 - DNA, 25 bp, Homo sapien
gacacgggggcagcctcagagtcac

SEQ ID NO: 4705795 - DNA, 25 bp, Homo sapien
gtgggcacgggcctcagagtcaccc

SEQ ID NO: 4705796 - DNA, 25 bp, Homo sapien
tgcagcatctgagcttcctcggagt

SEQ ID NO: 4705797 - DNA, 25 bp, Homo sapien
acgggcctcagagtcacccgtaggg

SEQ ID NO: 4705798 - DNA, 25 bp, Homo sapien
tctcggcctcttgagaccaaggctg

SEQ ID NO: 4705799 - DNA, 25 bp, Homo sapien
tgacagtaaacatgcgctggcccga

SEQ ID NO: 4705800 - DNA, 25 bp, Homo sapien
gaaagtgctgaaacatgtcccctgt

SEQ ID NO: 4705801 - DNA, 25 bp, Homo sapien
ggtgtgttaaacacgcaacacagga

SEQ ID NO: 4705802 - DNA, 25 bp, Homo sapien
gaaggccacagccttacaatgaaag

SEQ ID NO: 4705803 - DNA, 25 bp, Homo sapien
atcattgttcatcaactacaaaagg

SEQ ID NO: 4705804 - DNA, 25 bp, Homo sapien
tgccgacgtaagggtttgagggtga

SEQ ID NO: 4705805 - DNA, 25 bp, Homo sapien
cagatgggtaacgtgccgacgtaag

SEQ ID NO: 4705806 - DNA, 25 bp, Homo sapien
tgacacatctcacgcatgtgcatga

SEQ ID NO: 4705807 - DNA, 25 bp, Homo sapien
tcccagctgagtcccatcgatgttg

SEQ ID NO: 4705808 - DNA, 25 bp, Homo sapien
gctttacgagaccatgcaagacggg

SEQ ID NO: 4705809 - DNA, 25 bp, Homo sapien
tctgcacccggtgagtgaggacagt

SEQ ID NO: 4705810 - DNA, 25 bp, Homo sapien
gattccatcatcagggccaactgag

SEQ ID NO: 4705811 - DNA, 25 bp, Homo sapien
gcagaaaggactcaagattgccaag

SEQ ID NO: 4705812 - DNA, 25 bp, Homo sapien
gtgaaggtcaagcacggagccagct

SEQ ID NO: 4705813 - DNA, 25 bp, Homo sapien
tgaagatccctgaaaacgccaacgt

SEQ ID NO: 4705814 - DNA, 25 bp, Homo sapien
tagccaagcacttatggaccagagt

SEQ ID NO: 4705815 - DNA, 25 bp, Homo sapien
catggacaaacacaacctggaggag

SEQ ID NO: 4705816 - DNA, 25 bp, Homo sapien
ctgcagattctctcagatgaccgga

SEQ ID NO: 4705817 - DNA, 25 bp, Homo sapien
tgtaatccgcaaggccatggacaaa

SEQ ID NO: 4705818 - DNA, 25 bp, Homo sapien
agccggaggactatgagctgctgca

SEQ ID NO: 4705819 - DNA, 25 bp, Homo sapien
cagtttacctctggacagtagagat

SEQ ID NO: 4705820 - DNA, 25 bp, Homo sapien
tgctgctacacaccaagtaaccagg

SEQ ID NO: 4705821 - DNA, 25 bp, Homo sapien
cacaccaagtaaccaggtcgttcct

SEQ ID NO: 4705822 - DNA, 25 bp, Homo sapien
agtagagatgaggtcacccctatcc

SEQ ID NO: 4705823 - DNA, 25 bp, Homo sapien
ccagggcctgacctgagtcagggta

SEQ ID NO: 4705824 - DNA, 25 bp, Homo sapien
cctgacctgagtcagggtacctggc

SEQ ID NO: 4705825 - DNA, 25 bp, Homo sapien
cagggcctgacctgagtcagggtac

SEQ ID NO: 4705826 - DNA, 25 bp, Homo sapien
gggcctgacctgagtcagggtacct

SEQ ID NO: 4705827 - DNA, 25 bp, Homo sapien
ctggccagctctgagttcagcctct

SEQ ID NO: 4705828 - DNA, 25 bp, Homo sapien
agctctgagttcagcctctcgcctg

SEQ ID NO: 4705829 - DNA, 25 bp, Homo sapien
ggccagctctgagttcagcctctcg

SEQ ID NO: 4705830 - DNA, 25 bp, Homo sapien
ctgagttcagcctctcgcctgtggg

SEQ ID NO: 4705831 - DNA, 25 bp, Homo sapien
ctagggcacgcaggcgacgagcaca

SEQ ID NO: 4705832 - DNA, 25 bp, Homo sapien
aggcactcgggtgctccactccact

SEQ ID NO: 4705833 - DNA, 25 bp, Homo sapien
agcgggaattcctggtcctgcctgt

SEQ ID NO: 4705834 - DNA, 25 bp, Homo sapien
tggcctggtacaagcgggaattcct

SEQ ID NO: 4705835 - DNA, 25 bp, Homo sapien
gatccagttacaagccacactctga

SEQ ID NO: 4705836 - DNA, 25 bp, Homo sapien
ctcttcgctggtcccctctcccggg

SEQ ID NO: 4705837 - DNA, 25 bp, Homo sapien
tgccttgcagtacccatctgtgtgt

SEQ ID NO: 4705838 - DNA, 25 bp, Homo sapien
ccgggaccgggcctgccttgcagta

SEQ ID NO: 4705839 - DNA, 25 bp, Homo sapien
tgggtagtgcccagtgtggaaggtc

SEQ ID NO: 4705840 - DNA, 25 bp, Homo sapien
aaatagccgcttgccgttcttcagg

SEQ ID NO: 4705841 - DNA, 25 bp, Homo sapien
agccctgaggagattgctgtctggc

SEQ ID NO: 4705842 - DNA, 25 bp, Homo sapien
aaggtctcagctggcggcaccgcct

SEQ ID NO: 4705843 - DNA, 25 bp, Homo sapien
ggagatggccgatggcccaccagct

SEQ ID NO: 4705844 - DNA, 25 bp, Homo sapien
tcctctgtgggcctacggatgtggg

SEQ ID NO: 4705845 - DNA, 25 bp, Homo sapien
tgaggcccctggcaccgcatgggca

SEQ ID NO: 4705846 - DNA, 25 bp, Homo sapien
tgtctgctccgcttcgcagaaggga

SEQ ID NO: 4705847 - DNA, 25 bp, Homo sapien
tgtcatctgtcacgatgttcaccag

SEQ ID NO: 4705848 - DNA, 25 bp, Homo sapien
ctgtcatctgtcacgatgttcacca

SEQ ID NO: 4705849 - DNA, 25 bp, Homo sapien
gctgtcatctgtcacgatgttcacc

SEQ ID NO: 4705850 - DNA, 25 bp, Homo sapien
atcagcgaaagggagcggagtgcac

SEQ ID NO: 4705851 - DNA, 25 bp, Homo sapien
ggagcggagtgcacagcgggccgct

SEQ ID NO: 4705852 - DNA, 25 bp, Homo sapien
atggcatcagcgaaagggagcggag

SEQ ID NO: 4705853 - DNA, 25 bp, Homo sapien
cgaaagggagcggagtgcacagcgg

SEQ ID NO: 4705854 - DNA, 25 bp, Homo sapien
ttggttcctcgcctgcaagctgagc

SEQ ID NO: 4705855 - DNA, 25 bp, Homo sapien
ccatggtttgcagaccgtggtgtca

SEQ ID NO: 4705856 - DNA, 25 bp, Homo sapien
catgggtgacacacacgggaggaaa

SEQ ID NO: 4705857 - DNA, 25 bp, Homo sapien
tgcggctgatgacactgcggtttgc

SEQ ID NO: 4705858 - DNA, 25 bp, Homo sapien
tctcgctttcgggtcgcgaggagct

SEQ ID NO: 4705859 - DNA, 25 bp, Homo sapien
cgggtcgcgaggagcttgcgcacag

SEQ ID NO: 4705860 - DNA, 25 bp, Homo sapien
agctgccgcagacaaaggtctcgct

SEQ ID NO: 4705861 - DNA, 25 bp, Homo sapien
cagacaaaggtctcgctttcgggtc

SEQ ID NO: 4705862 - DNA, 25 bp, Homo sapien
ctgcagctggaccttgtggtcccgg

SEQ ID NO: 4705863 - DNA, 25 bp, Homo sapien
cagctggaccttgtggtcccgggtg

SEQ ID NO: 4705864 - DNA, 25 bp, Homo sapien
ctgaagctgcagctggaccttgtgg

SEQ ID NO: 4705865 - DNA, 25 bp, Homo sapien
aagctgcagctggaccttgtggtcc

SEQ ID NO: 4705866 - DNA, 25 bp, Homo sapien
ggatcaattacagagggtctgtgca

SEQ ID NO: 4705867 - DNA, 25 bp, Homo sapien
cagacttgaccatgaactcccttat

SEQ ID NO: 4705868 - DNA, 25 bp, Homo sapien
ctggcatcccagaggtaaggcccag

SEQ ID NO: 4705869 - DNA, 25 bp, Homo sapien
cccagccggggatcaattacagagg

SEQ ID NO: 4705870 - DNA, 25 bp, Homo sapien
tttgtccaagatcagccagcaaagc

SEQ ID NO: 4705871 - DNA, 25 bp, Homo sapien
tcactgcaatgcatagtgggaaaaa

SEQ ID NO: 4705872 - DNA, 25 bp, Homo sapien
tgagctgagacttggggtctgtcct

SEQ ID NO: 4705873 - DNA, 25 bp, Homo sapien
caaaatcaatgtctgggtccaaact

SEQ ID NO: 4705874 - DNA, 25 bp, Homo sapien
gctcccaagatacagccagtgccag

SEQ ID NO: 4705875 - DNA, 25 bp, Homo sapien
ctagaatcagctctggcaccagctc

SEQ ID NO: 4705876 - DNA, 25 bp, Homo sapien
agagccagtcgctggcccagaacca

SEQ ID NO: 4705877 - DNA, 25 bp, Homo sapien
ccagaaccacagctagaatcagctc

SEQ ID NO: 4705878 - DNA, 25 bp, Homo sapien
gctgcaatggtagttctagcaccag

SEQ ID NO: 4705879 - DNA, 25 bp, Homo sapien
tgggcacctttatcacaaattgctg

SEQ ID NO: 4705880 - DNA, 25 bp, Homo sapien
caaattgctgcactagctgcaatgg

SEQ ID NO: 4705881 - DNA, 25 bp, Homo sapien
catcaaatccggagtttgggcacct

SEQ ID NO: 4705882 - DNA, 25 bp, Homo sapien
ccatcagcggaggtagatctagctc

SEQ ID NO: 4705883 - DNA, 25 bp, Homo sapien
ggagctagacccagtgccaagttca

SEQ ID NO: 4705884 - DNA, 25 bp, Homo sapien
ggcagcactggctctcgcatcagct

SEQ ID NO: 4705885 - DNA, 25 bp, Homo sapien
tagcttcagagctacaagcagctcc

SEQ ID NO: 4705886 - DNA, 25 bp, Homo sapien
gccacagctcctcacgctgctctac

SEQ ID NO: 4705887 - DNA, 25 bp, Homo sapien
cacagctcctcacgctgctctacaa

SEQ ID NO: 4705888 - DNA, 25 bp, Homo sapien
ccacagctcctcacgctgctctaca

SEQ ID NO: 4705889 - DNA, 25 bp, Homo sapien
acagctcctcacgctgctctacaac

SEQ ID NO: 4705890 - DNA, 25 bp, Homo sapien
gccaatgcactcagcgtgcactcag

SEQ ID NO: 4705891 - DNA, 25 bp, Homo sapien
cagcagccgggacattgccaatgca

SEQ ID NO: 4705892 - DNA, 25 bp, Homo sapien
atgcactcagcgtgcactcagccgg

SEQ ID NO: 4705893 - DNA, 25 bp, Homo sapien
agccgggacattgccaatgcactca

SEQ ID NO: 4705894 - DNA, 25 bp, Homo sapien
gctagagttagaatcagctccagaa

SEQ ID NO: 4705895 - DNA, 25 bp, Homo sapien
gagccagttctagatctagctccag

SEQ ID NO: 4705896 - DNA, 25 bp, Homo sapien
tcagctccagaataagagccagttc

SEQ ID NO: 4705897 - DNA, 25 bp, Homo sapien
tggcaccaggctagagttagaatca

SEQ ID NO: 4705898 - DNA, 25 bp, Homo sapien
ccttaggagattgctttaccagcat

SEQ ID NO: 4705899 - DNA, 25 bp, Homo sapien
caccttaggagattgctttaccagc

SEQ ID NO: 4705900 - DNA, 25 bp, Homo sapien
tgctctgtgcctgaggcacccagct

SEQ ID NO: 4705901 - DNA, 25 bp, Homo sapien
gcaccttaggagattgctttaccag

SEQ ID NO: 4705902 - DNA, 25 bp, Homo sapien
tattgatttgaacacttggttcatt

SEQ ID NO: 4705903 - DNA, 25 bp, Homo sapien
ttttaatattgatttgaacacttgg

SEQ ID NO: 4705904 - DNA, 25 bp, Homo sapien
gaatacagtggggccatctcgctca

SEQ ID NO: 4705905 - DNA, 25 bp, Homo sapien
gctcctgccctgctctgttattatt

SEQ ID NO: 4705906 - DNA, 25 bp, Homo sapien
attgtcgtgggtcccgcagtcactg

SEQ ID NO: 4705907 - DNA, 25 bp, Homo sapien
ctggctctgcggacgttttgctcat

SEQ ID NO: 4705908 - DNA, 25 bp, Homo sapien
agattgtcgtgggtcccgcagtcac

SEQ ID NO: 4705909 - DNA, 25 bp, Homo sapien
ctgagattgtcgtgggtcccgcagt

SEQ ID NO: 4705910 - DNA, 25 bp, Homo sapien
acgtgtttccgagcccagtctgctt

SEQ ID NO: 4705911 - DNA, 25 bp, Homo sapien
ggcgctctggttcccgctctctggg

SEQ ID NO: 4705912 - DNA, 25 bp, Homo sapien
tgcttttgcgccgtggcctcctgtc

SEQ ID NO: 4705913 - DNA, 25 bp, Homo sapien
cgttactggtttggcgcccgcggtg

SEQ ID NO: 4705914 - DNA, 25 bp, Homo sapien
ggattccgttgccacttgctgccat

SEQ ID NO: 4705915 - DNA, 25 bp, Homo sapien
ttcctggcctggtaccgcattcttg

SEQ ID NO: 4705916 - DNA, 25 bp, Homo sapien
tctccgaacaatccatggatgcttg

SEQ ID NO: 4705917 - DNA, 25 bp, Homo sapien
tgcacgatcagctcctatgcatctt

SEQ ID NO: 4705918 - DNA, 25 bp, Homo sapien
taagtatggcagtcatcgagcctgg

SEQ ID NO: 4705919 - DNA, 25 bp, Homo sapien
ctgccgtgcccccagagggctttgg

SEQ ID NO: 4705920 - DNA, 25 bp, Homo sapien
ccccagctggtaagtatggcagtca

SEQ ID NO: 4705921 - DNA, 25 bp, Homo sapien
gatttctccccgctgagctgggcag

SEQ ID NO: 4705922 - DNA, 25 bp, Homo sapien
actgaacttcacacactgctcccca

SEQ ID NO: 4705923 - DNA, 25 bp, Homo sapien
cactgctccccagctatgctttcct

SEQ ID NO: 4705924 - DNA, 25 bp, Homo sapien
tgctccccagctatgctttcctcct

SEQ ID NO: 4705925 - DNA, 25 bp, Homo sapien
tgggtggtcactgaacttcacacac

SEQ ID NO: 4705926 - DNA, 25 bp, Homo sapien
gctgccttcacacggcagggtttgc

SEQ ID NO: 4705927 - DNA, 25 bp, Homo sapien
tcacacggcagggtttgctttgcgc

SEQ ID NO: 4705928 - DNA, 25 bp, Homo sapien
agggtttgctttgcgcatcccatcc

SEQ ID NO: 4705929 - DNA, 25 bp, Homo sapien
ggcagggtttgctttgcgcatccca

SEQ ID NO: 4705930 - DNA, 25 bp, Homo sapien
aggatggcgcctggtacagctggtt

SEQ ID NO: 4705931 - DNA, 25 bp, Homo sapien
cgcccgtggcctgcacgttgggtgt

SEQ ID NO: 4705932 - DNA, 25 bp, Homo sapien
agccccgcccgtggcctgcacgttg

SEQ ID NO: 4705933 - DNA, 25 bp, Homo sapien
cagctggttttgggcagaagccccg

SEQ ID NO: 4705934 - DNA, 25 bp, Homo sapien
gacgctggccggtgagtgcaggcct

SEQ ID NO: 4705935 - DNA, 25 bp, Homo sapien
tggccgaggtgttgcggacgctggc

SEQ ID NO: 4705936 - DNA, 25 bp, Homo sapien
gcaggtgggcttggccgcgctgtgg

SEQ ID NO: 4705937 - DNA, 25 bp, Homo sapien
agggagccgctaccgcagggaatgc

SEQ ID NO: 4705938 - DNA, 25 bp, Homo sapien
ctggtccccaaatcaccttgttgtg

SEQ ID NO: 4705939 - DNA, 25 bp, Homo sapien
tcaccttgttgtggcaagtgccaga

SEQ ID NO: 4705940 - DNA, 25 bp, Homo sapien
ccaaatcaccttgttgtggcaagtg

SEQ ID NO: 4705941 - DNA, 25 bp, Homo sapien
caagtgccagaattgggcgctggcc

SEQ ID NO: 4705942 - DNA, 25 bp, Homo sapien
tgacccatagttatatacaccgcag

SEQ ID NO: 4705943 - DNA, 25 bp, Homo sapien
tagttatatacaccgcagcactcgt

SEQ ID NO: 4705944 - DNA, 25 bp, Homo sapien
aatctgtcgtgacccatagttatat

SEQ ID NO: 4705945 - DNA, 25 bp, Homo sapien
atatacaccgcagcactcgtaccag

SEQ ID NO: 4705946 - DNA, 25 bp, Homo sapien
tcgttttcggtgaaagggctcagag

SEQ ID NO: 4705947 - DNA, 25 bp, Homo sapien
agctaaagcccgtaccagccttgca

SEQ ID NO: 4705948 - DNA, 25 bp, Homo sapien
ctctgttgagctccgggaagccgtc

SEQ ID NO: 4705949 - DNA, 25 bp, Homo sapien
gctcagagttgcagctaaagcccgt

SEQ ID NO: 4705950 - DNA, 25 bp, Homo sapien
gcatgtccccgtcacagatgggtgc

SEQ ID NO: 4705951 - DNA, 25 bp, Homo sapien
cctgcatgtccccgtcacagatggg

SEQ ID NO: 4705952 - DNA, 25 bp, Homo sapien
gcagccacagtggtccctgcatgtc

SEQ ID NO: 4705953 - DNA, 25 bp, Homo sapien
tggcttctggggcatcttgggccag

SEQ ID NO: 4705954 - DNA, 25 bp, Homo sapien
tctaacagagcatcttacgtggatg

SEQ ID NO: 4705955 - DNA, 25 bp, Homo sapien
tccatttgatgacgtttagtgcacc

SEQ ID NO: 4705956 - DNA, 25 bp, Homo sapien
acccaagggccttgtggtgtctctc

SEQ ID NO: 4705957 - DNA, 25 bp, Homo sapien
tacgtggatgcagtgacatagatgc

SEQ ID NO: 4705958 - DNA, 25 bp, Homo sapien
tcagcatgcagagtgcacgaggaac

SEQ ID NO: 4705959 - DNA, 25 bp, Homo sapien
cacgaggaactcctgccaatgatgt

SEQ ID NO: 4705960 - DNA, 25 bp, Homo sapien
tgatgtagacacagacaactgcagg

SEQ ID NO: 4705961 - DNA, 25 bp, Homo sapien
ggagggaaagccctgccatgtgtcc

SEQ ID NO: 4705962 - DNA, 25 bp, Homo sapien
atgaggccgaggctgacggccagga

SEQ ID NO: 4705963 - DNA, 25 bp, Homo sapien
ggccgaggctgacggccaggagcag

SEQ ID NO: 4705964 - DNA, 25 bp, Homo sapien
agcaatgaggccgaggctgacggcc

SEQ ID NO: 4705965 - DNA, 25 bp, Homo sapien
tcctgaatctcctcgtctgaggcca

SEQ ID NO: 4705966 - DNA, 25 bp, Homo sapien
tgagggtcatgggtgtcaccgattc

SEQ ID NO: 4705967 - DNA, 25 bp, Homo sapien
accgattccagattcatctcaggga

SEQ ID NO: 4705968 - DNA, 25 bp, Homo sapien
ccgtcatggccttcagataccacgt

SEQ ID NO: 4705969 - DNA, 25 bp, Homo sapien
tgtccaccgtcatggccttcagata

SEQ ID NO: 4705970 - DNA, 25 bp, Homo sapien
tcccggagtccacgcatgtgagttg

SEQ ID NO: 4705971 - DNA, 25 bp, Homo sapien
tctccggttacgagacaaagactgt

SEQ ID NO: 4705972 - DNA, 25 bp, Homo sapien
caaccctgaggtgtggcatatgggc

SEQ ID NO: 4705973 - DNA, 25 bp, Homo sapien
caagtgcattggacctagggaaaga

SEQ ID NO: 4705974 - DNA, 25 bp, Homo sapien
actgcatgttttctgaaaggcctag

SEQ ID NO: 4705975 - DNA, 25 bp, Homo sapien
aaggaacaactgcatgttttctgaa

SEQ ID NO: 4705976 - DNA, 25 bp, Homo sapien
aactgcatgttttctgaaaggccta

SEQ ID NO: 4705977 - DNA, 25 bp, Homo sapien
gaacaactgcatgttttctgaaagg

SEQ ID NO: 4705978 - DNA, 25 bp, Homo sapien
cattctcttggcaagaatcttgccc

SEQ ID NO: 4705979 - DNA, 25 bp, Homo sapien
cttagtgtgctgaatatgcacattc

SEQ ID NO: 4705980 - DNA, 25 bp, Homo sapien
ttagtgtgctgaatatgcacattca

SEQ ID NO: 4705981 - DNA, 25 bp, Homo sapien
tctcttggcaagaatcttgccctta

SEQ ID NO: 4705982 - DNA, 25 bp, Homo sapien
tccttcacgcgtttcaggaagctct

SEQ ID NO: 4705983 - DNA, 25 bp, Homo sapien
cacgcgtttcaggaagctctctcgg

SEQ ID NO: 4705984 - DNA, 25 bp, Homo sapien
ttcacgcgtttcaggaagctctctc

SEQ ID NO: 4705985 - DNA, 25 bp, Homo sapien
ccttcacgcgtttcaggaagctctc

SEQ ID NO: 4705986 - DNA, 25 bp, Homo sapien
ttggttctcacagtgtgctgctctg

SEQ ID NO: 4705987 - DNA, 25 bp, Homo sapien
ggagcaggctggcgcttcagttgaa

SEQ ID NO: 4705988 - DNA, 25 bp, Homo sapien
gagcaggctggcgcttcagttgaat

SEQ ID NO: 4705989 - DNA, 25 bp, Homo sapien
gttctcacagtgtgctgctctgggt

SEQ ID NO: 4705990 - DNA, 25 bp, Homo sapien
gagccacatatgtctgtgccatggg

SEQ ID NO: 4705991 - DNA, 25 bp, Homo sapien
tgctgcccacgcatgtggaagctag

SEQ ID NO: 4705992 - DNA, 25 bp, Homo sapien
aagtttccaagctaggtctggcccg

SEQ ID NO: 4705993 - DNA, 25 bp, Homo sapien
gaggccagcgttcctgtgcagagcc

SEQ ID NO: 4705994 - DNA, 25 bp, Homo sapien
cttgggcggcgggaggagagagaaa

SEQ ID NO: 4705995 - DNA, 25 bp, Homo sapien
tgggcggcgggaggagagagaaagg

SEQ ID NO: 4705996 - DNA, 25 bp, Homo sapien
catcttgggcggcgggaggagagag

SEQ ID NO: 4705997 - DNA, 25 bp, Homo sapien
gggcggcgggaggagagagaaagga

SEQ ID NO: 4705998 - DNA, 25 bp, Homo sapien
ggctctcctagcgccaggaggagca

SEQ ID NO: 4705999 - DNA, 25 bp, Homo sapien
cggtgtctccgtgccacaccgagtg

SEQ ID NO: 4706000 - DNA, 25 bp, Homo sapien
atggcagcggatacagccggaacct

SEQ ID NO: 4706001 - DNA, 25 bp, Homo sapien
gtgccacggaactacagctcactca

SEQ ID NO: 4706002 - DNA, 25 bp, Homo sapien
gggaacaacgcattccgctctcggc

SEQ ID NO: 4706003 - DNA, 25 bp, Homo sapien
ccgcactgcggtgctccaggcctgc

SEQ ID NO: 4706004 - DNA, 25 bp, Homo sapien
cagcaagcccgagagacgctagggc

SEQ ID NO: 4706005 - DNA, 25 bp, Homo sapien
tccatctcaatgtctccgtgccaca

SEQ ID NO: 4706006 - DNA, 25 bp, Homo sapien
gggcgggctcagaactcgtcgctca

SEQ ID NO: 4706007 - DNA, 25 bp, Homo sapien
gagcatctcacattcagccgcacaa

SEQ ID NO: 4706008 - DNA, 25 bp, Homo sapien
taagctggcgagcagctttctgcaa

SEQ ID NO: 4706009 - DNA, 25 bp, Homo sapien
agagcaaggctaagcccgagaccac

SEQ ID NO: 4706010 - DNA, 25 bp, Homo sapien
aacaagggacgctgacagcacctgc

SEQ ID NO: 4706011 - DNA, 25 bp, Homo sapien
gctcctccaaaacaagggacgctga

SEQ ID NO: 4706012 - DNA, 25 bp, Homo sapien
tccaaaacaagggacgctgacagca

SEQ ID NO: 4706013 - DNA, 25 bp, Homo sapien
gcctccactcgcttcgtcgggggta

SEQ ID NO: 4706014 - DNA, 25 bp, Homo sapien
tgcttcttcacgacagctggggccg

SEQ ID NO: 4706015 - DNA, 25 bp, Homo sapien
tcttcacgacagctggggccggagc

SEQ ID NO: 4706016 - DNA, 25 bp, Homo sapien
cttcttcacgacagctggggccgga

SEQ ID NO: 4706017 - DNA, 25 bp, Homo sapien
cctgcttcttcacgacagctggggc

SEQ ID NO: 4706018 - DNA, 25 bp, Homo sapien
gaattgcagtcctagtacctcgctg

SEQ ID NO: 4706019 - DNA, 25 bp, Homo sapien
taaggactgcgaccactttacaccc

SEQ ID NO: 4706020 - DNA, 25 bp, Homo sapien
aacaagaagccaaggtgccacgaag

SEQ ID NO: 4706021 - DNA, 25 bp, Homo sapien
gccacgaagtacagcagaattgcag

SEQ ID NO: 4706022 - DNA, 25 bp, Homo sapien
tgcatcagcgatcttggtggtttaa

SEQ ID NO: 4706023 - DNA, 25 bp, Homo sapien
gcatcagcgatcttggtggtttaaa

SEQ ID NO: 4706024 - DNA, 25 bp, Homo sapien
caagttcatgtctggggccactagg

SEQ ID NO: 4706025 - DNA, 25 bp, Homo sapien
accgagtgaggctcaaattccatgt

SEQ ID NO: 4706026 - DNA, 25 bp, Homo sapien
catgtcaagttcatgtctggggcca

SEQ ID NO: 4706027 - DNA, 25 bp, Homo sapien
agggtgacaccgagtgaggctcaaa

SEQ ID NO: 4706028 - DNA, 25 bp, Homo sapien
ttcacaaagcgggtgaggtctcttt

SEQ ID NO: 4706029 - DNA, 25 bp, Homo sapien
cacaaagcgggtgaggtctcttttg

SEQ ID NO: 4706030 - DNA, 25 bp, Homo sapien
ccatttcacaaagcgggtgaggtct

SEQ ID NO: 4706031 - DNA, 25 bp, Homo sapien
atttcacaaagcgggtgaggtctct

SEQ ID NO: 4706032 - DNA, 25 bp, Homo sapien
cagccgcttatagaggatggctctc

SEQ ID NO: 4706033 - DNA, 25 bp, Homo sapien
tgtttggcggtccagggcctgggtg

SEQ ID NO: 4706034 - DNA, 25 bp, Homo sapien
gaggcactttcagccgcttatagag

SEQ ID NO: 4706035 - DNA, 25 bp, Homo sapien
gcttatagaggatggctctctgccg

SEQ ID NO: 4706036 - DNA, 25 bp, Homo sapien
taataacaaatgctggactgcggtc

SEQ ID NO: 4706037 - DNA, 25 bp, Homo sapien
taaggaatccttgcctgagaaactc

SEQ ID NO: 4706038 - DNA, 25 bp, Homo sapien
agaaactcctttccacgccacagaa

SEQ ID NO: 4706039 - DNA, 25 bp, Homo sapien
gactgcggtcctgctatatgactat

SEQ ID NO: 4706040 - DNA, 25 bp, Homo sapien
tctggtctgtacttgtgggccagct

SEQ ID NO: 4706041 - DNA, 25 bp, Homo sapien
ctctgcttcttctcttgctttgtct

SEQ ID NO: 4706042 - DNA, 25 bp, Homo sapien
cttcttctcggcccgggccaacagt

SEQ ID NO: 4706043 - DNA, 25 bp, Homo sapien
tgtacttgtgggccagcttaagcag

SEQ ID NO: 4706044 - DNA, 25 bp, Homo sapien
aggacaggtggtctcttcgttggga

SEQ ID NO: 4706045 - DNA, 25 bp, Homo sapien
tcgttgggacgtcccctttgccagc

SEQ ID NO: 4706046 - DNA, 25 bp, Homo sapien
tcgaaggacaggtggtctcttcgtt

SEQ ID NO: 4706047 - DNA, 25 bp, Homo sapien
acaggtggtctcttcgttgggacgt

SEQ ID NO: 4706048 - DNA, 25 bp, Homo sapien
cagtgttcaccctaaggtggggcct

SEQ ID NO: 4706049 - DNA, 25 bp, Homo sapien
tcaccctaaggtggggcctactcac

SEQ ID NO: 4706050 - DNA, 25 bp, Homo sapien
ttcaccctaaggtggggcctactca

SEQ ID NO: 4706051 - DNA, 25 bp, Homo sapien
caggccaagaaattttacatcactg

SEQ ID NO: 4706052 - DNA, 25 bp, Homo sapien
aggccaagaaattttacatcactgc

SEQ ID NO: 4706053 - DNA, 25 bp, Homo sapien
tcaggccaagaaattttacatcact

SEQ ID NO: 4706054 - DNA, 25 bp, Homo sapien
ggccaagaaattttacatcactgca

SEQ ID NO: 4706055 - DNA, 25 bp, Homo sapien
tgctctagtcacaagaagctgctgg

SEQ ID NO: 4706056 - DNA, 25 bp, Homo sapien
ggcctgctctagtcacaagaagctg

SEQ ID NO: 4706057 - DNA, 25 bp, Homo sapien
cctgctctagtcacaagaagctgct

SEQ ID NO: 4706058 - DNA, 25 bp, Homo sapien
tctagtcacaagaagctgctgggct

SEQ ID NO: 4706059 - DNA, 25 bp, Homo sapien
caccaaggtggtgacggtgttaact

SEQ ID NO: 4706060 - DNA, 25 bp, Homo sapien
ctcgatgggatccacgtcgtgtgca

SEQ ID NO: 4706061 - DNA, 25 bp, Homo sapien
ttctccaccaaggtggtgacggtgt

SEQ ID NO: 4706062 - DNA, 25 bp, Homo sapien
tcgtgtgcaatcaccaccagctgag

SEQ ID NO: 4706063 - DNA, 25 bp, Homo sapien
gatctgtgtcagtactgccctcacc

SEQ ID NO: 4706064 - DNA, 25 bp, Homo sapien
tgggttagcagtcaacaggcaaacg

SEQ ID NO: 4706065 - DNA, 25 bp, Homo sapien
cacttcggtcccatcactgacttgg

SEQ ID NO: 4706066 - DNA, 25 bp, Homo sapien
tcctggtactgccagaagcccttgg

SEQ ID NO: 4706067 - DNA, 25 bp, Homo sapien
agtgagagattcacatcattgcaag

SEQ ID NO: 4706068 - DNA, 25 bp, Homo sapien
cagtgagagattcacatcattgcaa

SEQ ID NO: 4706069 - DNA, 25 bp, Homo sapien
ggttaaaaagctcatggattcgcac

SEQ ID NO: 4706070 - DNA, 25 bp, Homo sapien
cagggttaaaaagctcatggattcg

SEQ ID NO: 4706071 - DNA, 25 bp, Homo sapien
ttgctcagggttaaaaagctcatgg

SEQ ID NO: 4706072 - DNA, 25 bp, Homo sapien
gctcagggttaaaaagctcatggat

SEQ ID NO: 4706073 - DNA, 25 bp, Homo sapien
gtattttgaccaaaagcagcaaatt

SEQ ID NO: 4706074 - DNA, 25 bp, Homo sapien
tgtattttgaccaaaagcagcaaat

SEQ ID NO: 4706075 - DNA, 25 bp, Homo sapien
attttacgacacagggcaggcaaga

SEQ ID NO: 4706076 - DNA, 25 bp, Homo sapien
gacccccattttacgacacagggca

SEQ ID NO: 4706077 - DNA, 25 bp, Homo sapien
tgataatgcagtaagggacccccat

SEQ ID NO: 4706078 - DNA, 25 bp, Homo sapien
cttgataatgcagtaagggaccccc

SEQ ID NO: 4706079 - DNA, 25 bp, Homo sapien
ctgtgtgaaggcgacagtggtgcag

SEQ ID NO: 4706080 - DNA, 25 bp, Homo sapien
gtggactagacgtcccagtcttgcc

SEQ ID NO: 4706081 - DNA, 25 bp, Homo sapien
gactagacgtcccagtcttgccttt

SEQ ID NO: 4706082 - DNA, 25 bp, Homo sapien
gtcttcctgtggactagacgtccca

SEQ ID NO: 4706083 - DNA, 25 bp, Homo sapien
gtgaggcatggattaaatgaactgg

SEQ ID NO: 4706084 - DNA, 25 bp, Homo sapien
caactgtgaggcatggattaaatga

SEQ ID NO: 4706085 - DNA, 25 bp, Homo sapien
aacaactgtgaggcatggattaaat

SEQ ID NO: 4706086 - DNA, 25 bp, Homo sapien
tgtgaggcatggattaaatgaactg

SEQ ID NO: 4706087 - DNA, 25 bp, Homo sapien
cacatggtttattcaggtgaagaaa

SEQ ID NO: 4706088 - DNA, 25 bp, Homo sapien
ttgcctcagatgcaatgctgaccac

SEQ ID NO: 4706089 - DNA, 25 bp, Homo sapien
tttgcctcagatgcaatgctgacca

SEQ ID NO: 4706090 - DNA, 25 bp, Homo sapien
tgcctcagatgcaatgctgaccaca

SEQ ID NO: 4706091 - DNA, 25 bp, Homo sapien
aaataccttttagctcaagacagtc

SEQ ID NO: 4706092 - DNA, 25 bp, Homo sapien
gccttagtttcccttttagaatgca

SEQ ID NO: 4706093 - DNA, 25 bp, Homo sapien
caaaaataccttttagctcaagaca

SEQ ID NO: 4706094 - DNA, 25 bp, Homo sapien
tgccttagtttcccttttagaatgc

SEQ ID NO: 4706095 - DNA, 25 bp, Homo sapien
ctcatcgtatctgtcattgtaattg

SEQ ID NO: 4706096 - DNA, 25 bp, Homo sapien
catcgtatctgtcattgtaattggt

SEQ ID NO: 4706097 - DNA, 25 bp, Homo sapien
cttagccaaagcgcctttgtcttcc

SEQ ID NO: 4706098 - DNA, 25 bp, Homo sapien
tccaccagcttagccaaagcgcctt

SEQ ID NO: 4706099 - DNA, 25 bp, Homo sapien
cagtattttggtgtaaagctgcctc

SEQ ID NO: 4706100 - DNA, 25 bp, Homo sapien
gaacttctcataggttaagccagcc

SEQ ID NO: 4706101 - DNA, 25 bp, Homo sapien
taagccagccagttatttgggagaa

SEQ ID NO: 4706102 - DNA, 25 bp, Homo sapien
gctgatcgtcagatagaacttctca

SEQ ID NO: 4706103 - DNA, 25 bp, Homo sapien
tcaaggttattagttgcgttaattc

SEQ ID NO: 4706104 - DNA, 25 bp, Homo sapien
ttattagttgcgttaattctgtttg

SEQ ID NO: 4706105 - DNA, 25 bp, Homo sapien
tattagttgcgttaattctgtttgg

SEQ ID NO: 4706106 - DNA, 25 bp, Homo sapien
aggttattagttgcgttaattctgt

SEQ ID NO: 4706107 - DNA, 25 bp, Homo sapien
caaaaagaggcagttagcttggctt

SEQ ID NO: 4706108 - DNA, 25 bp, Homo sapien
gacaaaaagaggcagttagcttggc

SEQ ID NO: 4706109 - DNA, 25 bp, Homo sapien
aaagacaaaaagaggcagttagctt

SEQ ID NO: 4706110 - DNA, 25 bp, Homo sapien
aaaagaggcagttagcttggcttac

SEQ ID NO: 4706111 - DNA, 25 bp, Homo sapien
ggacattgccaccccagtgacggcg

SEQ ID NO: 4706112 - DNA, 25 bp, Homo sapien
acattgccaccccagtgacggcgga

SEQ ID NO: 4706113 - DNA, 25 bp, Homo sapien
cattgccaccccagtgacggcggat

SEQ ID NO: 4706114 - DNA, 25 bp, Homo sapien
aggacattgccaccccagtgacggc

SEQ ID NO: 4706115 - DNA, 25 bp, Homo sapien
cttttcgagcttggcgatacgagcc

SEQ ID NO: 4706116 - DNA, 25 bp, Homo sapien
ccttttcgagcttggcgatacgagc

SEQ ID NO: 4706117 - DNA, 25 bp, Homo sapien
tttgccttttcgagcttggcgatac

SEQ ID NO: 4706118 - DNA, 25 bp, Homo sapien
tgccttttcgagcttggcgatacga

SEQ ID NO: 4706119 - DNA, 25 bp, Homo sapien
gagcagcccggcggaagccgctcgc

SEQ ID NO: 4706120 - DNA, 25 bp, Homo sapien
gggtgctcccgcagaaacgcccgca

SEQ ID NO: 4706121 - DNA, 25 bp, Homo sapien
gcacgtcgcccggcaactcgctcat

SEQ ID NO: 4706122 - DNA, 25 bp, Homo sapien
ttgcgggcgtccgtctggagccgca

SEQ ID NO: 4706123 - DNA, 25 bp, Homo sapien
cgtccgtctggagccgcaggctcgg

SEQ ID NO: 4706124 - DNA, 25 bp, Homo sapien
gcggctcgaactctgcatagtcgaa

SEQ ID NO: 4706125 - DNA, 25 bp, Homo sapien
tttttgccgcgggtgtagacctgga

SEQ ID NO: 4706126 - DNA, 25 bp, Homo sapien
gaccagccgctggtactttttgccg

SEQ ID NO: 4706127 - DNA, 25 bp, Homo sapien
cagggcagctcgtgacctgtcagga

SEQ ID NO: 4706128 - DNA, 25 bp, Homo sapien
ggctgtcctaattgccctgggcctc

SEQ ID NO: 4706129 - DNA, 25 bp, Homo sapien
tctgaaagagtaggggctgcagcac

SEQ ID NO: 4706130 - DNA, 25 bp, Homo sapien
agcactggcggagtccagcggaggg

SEQ ID NO: 4706131 - DNA, 25 bp, Homo sapien
cagcggaggggctgtcctaattgcc

SEQ ID NO: 4706132 - DNA, 25 bp, Homo sapien
gtgattccagcacccgggcgcccac

SEQ ID NO: 4706133 - DNA, 25 bp, Homo sapien
ggtgattccagcacccgggcgccca

SEQ ID NO: 4706134 - DNA, 25 bp, Homo sapien
aggtgattccagcacccgggcgccc

SEQ ID NO: 4706135 - DNA, 25 bp, Homo sapien
caggtgattccagcacccgggcgcc

SEQ ID NO: 4706136 - DNA, 25 bp, Homo sapien
agggaagaacccaacgctgttcaca

SEQ ID NO: 4706137 - DNA, 25 bp, Homo sapien
aacctcaggtgagcaaacgagctca

SEQ ID NO: 4706138 - DNA, 25 bp, Homo sapien
caagcctctactcatctgggaagca

SEQ ID NO: 4706139 - DNA, 25 bp, Homo sapien
tcaggtgacaaatcacaagcctcta

SEQ ID NO: 4706140 - DNA, 25 bp, Homo sapien
ccgcagggtgagtttgcagaacaac

SEQ ID NO: 4706141 - DNA, 25 bp, Homo sapien
cctcagcacgtgttctgggcacttg

SEQ ID NO: 4706142 - DNA, 25 bp, Homo sapien
ttgatgtgccgcagggtgagtttgc

SEQ ID NO: 4706143 - DNA, 25 bp, Homo sapien
gtgcctcagcacgtgttctgggcac

SEQ ID NO: 4706144 - DNA, 25 bp, Homo sapien
tcccagaaggcttcccgcgggcgag

SEQ ID NO: 4706145 - DNA, 25 bp, Homo sapien
caccgtccatctggtcctccctcct

SEQ ID NO: 4706146 - DNA, 25 bp, Homo sapien
gtcatcacttgcagctcccccctca

SEQ ID NO: 4706147 - DNA, 25 bp, Homo sapien
cctcctcctccggtgcaccaggcag

SEQ ID NO: 4706148 - DNA, 25 bp, Homo sapien
ctccgtgcttccaaggtcctttctg

SEQ ID NO: 4706149 - DNA, 25 bp, Homo sapien
tctcatcctctttgtctgtcaaaaa

SEQ ID NO: 4706150 - DNA, 25 bp, Homo sapien
tcctctttgtctgtcaaaaagtcat

SEQ ID NO: 4706151 - DNA, 25 bp, Homo sapien
tggaccagccctcggtacacggtcg

SEQ ID NO: 4706152 - DNA, 25 bp, Homo sapien
ttaacagctgcaggattagaccccg

SEQ ID NO: 4706153 - DNA, 25 bp, Homo sapien
gtcctgcttatctaccaaaggcggg

SEQ ID NO: 4706154 - DNA, 25 bp, Homo sapien
tcagaggagtacagtgcaatgccac

SEQ ID NO: 4706155 - DNA, 25 bp, Homo sapien
cagcctcagaggtgtcggtcaaata

SEQ ID NO: 4706156 - DNA, 25 bp, Homo sapien
tgaacttctttttcaacgagcccaa

SEQ ID NO: 4706157 - DNA, 25 bp, Homo sapien
aagctcttgggtttgcggtgatgac

SEQ ID NO: 4706158 - DNA, 25 bp, Homo sapien
ttaacctggctgtttacaggagctg

SEQ ID NO: 4706159 - DNA, 25 bp, Homo sapien
tgcggtgatgactcttgaacttctt

SEQ ID NO: 4706160 - DNA, 25 bp, Homo sapien
aggacacacggtttgatcaggagcg

SEQ ID NO: 4706161 - DNA, 25 bp, Homo sapien
ccttagagggcagcagatgtcatga

SEQ ID NO: 4706162 - DNA, 25 bp, Homo sapien
ccctgccttagagggcagcagatgt

SEQ ID NO: 4706163 - DNA, 25 bp, Homo sapien
gggacagccgatcattcagaggaca

SEQ ID NO: 4706164 - DNA, 25 bp, Homo sapien
gcagtcagcaccagttctgcaccag

SEQ ID NO: 4706165 - DNA, 25 bp, Homo sapien
gaggataagtgggatctaccaattg

SEQ ID NO: 4706166 - DNA, 25 bp, Homo sapien
gggaaacagatctaaatctcatttt

SEQ ID NO: 4706167 - DNA, 25 bp, Homo sapien
agcagcgcctccgtcctagtgggtg

SEQ ID NO: 4706168 - DNA, 25 bp, Homo sapien
caagtcacggtttctctgtggtcaa

SEQ ID NO: 4706169 - DNA, 25 bp, Homo sapien
cagggctgtctcttggtccacacct

SEQ ID NO: 4706170 - DNA, 25 bp, Homo sapien
cctgttagtgccgtatgacagcccc

SEQ ID NO: 4706171 - DNA, 25 bp, Homo sapien
tgtttcaacctcaccagggctgtct

SEQ ID NO: 4706172 - DNA, 25 bp, Homo sapien
caatggcttcaggacatgggttctc

SEQ ID NO: 4706173 - DNA, 25 bp, Homo sapien
cagattgtccgtttgctatgccgaa

SEQ ID NO: 4706174 - DNA, 25 bp, Homo sapien
tgagcaaggtctcgaaagcgcaggc

SEQ ID NO: 4706175 - DNA, 25 bp, Homo sapien
taaatgccacaagggtagtcgaaca

SEQ ID NO: 4706176 - DNA, 25 bp, Homo sapien
agaccagcttgcagagccgcagccg

SEQ ID NO: 4706177 - DNA, 25 bp, Homo sapien
tgggaagggctagtgagaccacaca

SEQ ID NO: 4706178 - DNA, 25 bp, Homo sapien
ttttagtagcttgaggcaaggtgga

SEQ ID NO: 4706179 - DNA, 25 bp, Homo sapien
ctgggagttttagtagcttgaggca

SEQ ID NO: 4706180 - DNA, 25 bp, Homo sapien
cagtgggaagggctagtgagaccac

SEQ ID NO: 4706181 - DNA, 25 bp, Homo sapien
gtgccaagtgttttattgggtaaca

SEQ ID NO: 4706182 - DNA, 25 bp, Homo sapien
ttggtgccaagtgttttattgggta

SEQ ID NO: 4706183 - DNA, 25 bp, Homo sapien
tggtgccaagtgttttattgggtaa

SEQ ID NO: 4706184 - DNA, 25 bp, Homo sapien
tgccaagtgttttattgggtaacac

SEQ ID NO: 4706185 - DNA, 25 bp, Homo sapien
gacttcttccagaccatgtcggtga

SEQ ID NO: 4706186 - DNA, 25 bp, Homo sapien
gaatcgatggctcagtctgctctgg

SEQ ID NO: 4706187 - DNA, 25 bp, Homo sapien
gaacatcgtgggcacagctctgatg

SEQ ID NO: 4706188 - DNA, 25 bp, Homo sapien
gatgttgtttctgccccgcattgta

SEQ ID NO: 4706189 - DNA, 25 bp, Homo sapien
gttctgatgttcatgaccctccttc

SEQ ID NO: 4706190 - DNA, 25 bp, Homo sapien
gaagagcatgtttgcgggcgtcccc

SEQ ID NO: 4706191 - DNA, 25 bp, Homo sapien
tgctcctagcagaatcccgttctga

SEQ ID NO: 4706192 - DNA, 25 bp, Homo sapien
ccccaaacagtacatgcagctcgga

SEQ ID NO: 4706193 - DNA, 25 bp, Homo sapien
caggtcattcggtactgggccatct

SEQ ID NO: 4706194 - DNA, 25 bp, Homo sapien
catccttgagggttcagtgtcactc

SEQ ID NO: 4706195 - DNA, 25 bp, Homo sapien
tctatgattaccgtgacaagggaag

SEQ ID NO: 4706196 - DNA, 25 bp, Homo sapien
aagggaagtctcgagcttggctgca

SEQ ID NO: 4706197 - DNA, 25 bp, Homo sapien
aactctgaggcctagacttatcgga

SEQ ID NO: 4706198 - DNA, 25 bp, Homo sapien
aattaacagccttatccccgcaggg

SEQ ID NO: 4706199 - DNA, 25 bp, Homo sapien
taaaagaatcccgttatgtcgacaa

SEQ ID NO: 4706200 - DNA, 25 bp, Homo sapien
taatgtgttcgtgtggctttgctag

SEQ ID NO: 4706201 - DNA, 25 bp, Homo sapien
ggccggcggcgcgagtcctggcgtt

SEQ ID NO: 4706202 - DNA, 25 bp, Homo sapien
cctggcgttgggtcgggtctgaggc

SEQ ID NO: 4706203 - DNA, 25 bp, Homo sapien
tccccgcacgtttttcctctcactg

SEQ ID NO: 4706204 - DNA, 25 bp, Homo sapien
gagcgcctcggcgtttggagctgct

SEQ ID NO: 4706205 - DNA, 25 bp, Homo sapien
ggccctctgtcccggctggacagcc

SEQ ID NO: 4706206 - DNA, 25 bp, Homo sapien
gccctctgtcccggctggacagccc

SEQ ID NO: 4706207 - DNA, 25 bp, Homo sapien
gggccctctgtcccggctggacagc

SEQ ID NO: 4706208 - DNA, 25 bp, Homo sapien
ggagccgcagccgacgcggagcgag

SEQ ID NO: 4706209 - DNA, 25 bp, Homo sapien
ggcgccgacgggcgagagccagcga

SEQ ID NO: 4706210 - DNA, 25 bp, Homo sapien
ccgcagcgggtgcgggcgccgacgg

SEQ ID NO: 4706211 - DNA, 25 bp, Homo sapien
ccgggcacttcctgtggaggccgca

SEQ ID NO: 4706212 - DNA, 25 bp, Homo sapien
gcgtacgggcgagcgtccacccctg

SEQ ID NO: 4706213 - DNA, 25 bp, Homo sapien
tagcgaccgcgtacgggcgagcgtc

SEQ ID NO: 4706214 - DNA, 25 bp, Homo sapien
gtacgggcgagcgtccacccctggc

SEQ ID NO: 4706215 - DNA, 25 bp, Homo sapien
gatcagtagcgaccgcgtacgggcg

SEQ ID NO: 4706216 - DNA, 25 bp, Homo sapien
gcgcctgcgattggaccctggccca

SEQ ID NO: 4706217 - DNA, 25 bp, Homo sapien
gggcgcctgcgattggaccctggcc

SEQ ID NO: 4706218 - DNA, 25 bp, Homo sapien
ctccccctgcgtggggcgcctgcga

SEQ ID NO: 4706219 - DNA, 25 bp, Homo sapien
gcctgcgattggaccctggcccaag

SEQ ID NO: 4706220 - DNA, 25 bp, Homo sapien
caaggccccaggattcagctggtac

SEQ ID NO: 4706221 - DNA, 25 bp, Homo sapien
ccccaggattcagctggtacaaaac

SEQ ID NO: 4706222 - DNA, 25 bp, Homo sapien
ttatcacatgcttgactttggtttc

SEQ ID NO: 4706223 - DNA, 25 bp, Homo sapien
tcacatgcttgactttggtttccat

SEQ ID NO: 4706224 - DNA, 25 bp, Homo sapien
gtcacagaaccacccggcatgggat

SEQ ID NO: 4706225 - DNA, 25 bp, Homo sapien
gaaccacccggcatgggatgcacag

SEQ ID NO: 4706226 - DNA, 25 bp, Homo sapien
agaaccacccggcatgggatgcaca

SEQ ID NO: 4706227 - DNA, 25 bp, Homo sapien
tcacagtcacagaaccacccggcat

SEQ ID NO: 4706228 - DNA, 25 bp, Homo sapien
caaccagattagtctccgcaagtgt

SEQ ID NO: 4706229 - DNA, 25 bp, Homo sapien
gctgccgcatcaggaagcttctcca

SEQ ID NO: 4706230 - DNA, 25 bp, Homo sapien
tccgcaagtgtcagcagcgaggaat

SEQ ID NO: 4706231 - DNA, 25 bp, Homo sapien
gattagtctccgcaagtgtcagcag

SEQ ID NO: 4706232 - DNA, 25 bp, Homo sapien
ctccagggcctgactggcgtaatgg

SEQ ID NO: 4706233 - DNA, 25 bp, Homo sapien
gcctgactggcgtaatggtcatcca

SEQ ID NO: 4706234 - DNA, 25 bp, Homo sapien
cgtaatggtcatccatgcattccac

SEQ ID NO: 4706235 - DNA, 25 bp, Homo sapien
gactggcgtaatggtcatccatgca

SEQ ID NO: 4706236 - DNA, 25 bp, Homo sapien
tcatccaggcactcaacaagaaggt

SEQ ID NO: 4706237 - DNA, 25 bp, Homo sapien
tcttccagagggaaaactaccctga

SEQ ID NO: 4706238 - DNA, 25 bp, Homo sapien
tggtgctgatgctctatccctccct

SEQ ID NO: 4706239 - DNA, 25 bp, Homo sapien
catatgttctaagttgtcggcacct

SEQ ID NO: 4706240 - DNA, 25 bp, Homo sapien
ttgttaaacagttctggtatgggtg

SEQ ID NO: 4706241 - DNA, 25 bp, Homo sapien
taaacagttctggtatgggtgtggt

SEQ ID NO: 4706242 - DNA, 25 bp, Homo sapien
ttaaacagttctggtatgggtgtgg

SEQ ID NO: 4706243 - DNA, 25 bp, Homo sapien
tgttttgttaaacagttctggtatg

SEQ ID NO: 4706244 - DNA, 25 bp, Homo sapien
cacagagatgtgggcgtgccgcagc

SEQ ID NO: 4706245 - DNA, 25 bp, Homo sapien
ctccccattccacgtgatgaacagc

SEQ ID NO: 4706246 - DNA, 25 bp, Homo sapien
agatgtgggcgtgccgcagcttcag

SEQ ID NO: 4706247 - DNA, 25 bp, Homo sapien
tccccattccacgtgatgaacagct

SEQ ID NO: 4706248 - DNA, 25 bp, Homo sapien
ctcttatcctcaatgacctcctgga

SEQ ID NO: 4706249 - DNA, 25 bp, Homo sapien
catcaccaggcagaggtacagagaa

SEQ ID NO: 4706250 - DNA, 25 bp, Homo sapien
tcctcaatgacctcctggaagctga

SEQ ID NO: 4706251 - DNA, 25 bp, Homo sapien
gagctcattgaactccatcaccagg

SEQ ID NO: 4706252 - DNA, 25 bp, Homo sapien
cgcggtgattctaaagctgggctcc

SEQ ID NO: 4706253 - DNA, 25 bp, Homo sapien
ccccagttagagtaggtctgctgca

SEQ ID NO: 4706254 - DNA, 25 bp, Homo sapien
gagacaagctccatcgagtacccag

SEQ ID NO: 4706255 - DNA, 25 bp, Homo sapien
gaagggcttcactcacaaagtctga

SEQ ID NO: 4706256 - DNA, 25 bp, Homo sapien
tgcaggtattccagcgcgtccagca

SEQ ID NO: 4706257 - DNA, 25 bp, Homo sapien
tggtgcaggtattccagcgcgtcca

SEQ ID NO: 4706258 - DNA, 25 bp, Homo sapien
ccaaatggtgcaggtattccagcgc

SEQ ID NO: 4706259 - DNA, 25 bp, Homo sapien
aatggtgcaggtattccagcgcgtc

SEQ ID NO: 4706260 - DNA, 25 bp, Homo sapien
tctgtcattagcacattggaactca

SEQ ID NO: 4706261 - DNA, 25 bp, Homo sapien
tcctccgcacgaatattccatttgg

SEQ ID NO: 4706262 - DNA, 25 bp, Homo sapien
caggtcctgcagtttgcagtggtca

SEQ ID NO: 4706263 - DNA, 25 bp, Homo sapien
ggctttgtctgtcattagcacattg

SEQ ID NO: 4706264 - DNA, 25 bp, Homo sapien
ttctcaactggaaccccagacaggg

SEQ ID NO: 4706265 - DNA, 25 bp, Homo sapien
gctggactccaaggacgcatgccat

SEQ ID NO: 4706266 - DNA, 25 bp, Homo sapien
tctgagtccatcagtccctggttgg

SEQ ID NO: 4706267 - DNA, 25 bp, Homo sapien
gaggcacgtgccaagaaactgtgca

SEQ ID NO: 4706268 - DNA, 25 bp, Homo sapien
tggtaaaagcaaggtgggatccctg

SEQ ID NO: 4706269 - DNA, 25 bp, Homo sapien
aagcaaggtgggatccctgagtcct

SEQ ID NO: 4706270 - DNA, 25 bp, Homo sapien
ctgttggtaaaagcaaggtgggatc

SEQ ID NO: 4706271 - DNA, 25 bp, Homo sapien
taaaagcaaggtgggatccctgagt

SEQ ID NO: 4706272 - DNA, 25 bp, Homo sapien
aggggccatccaggacttacgaaag

SEQ ID NO: 4706273 - DNA, 25 bp, Homo sapien
tgaaggtttccacatccgggatctg

SEQ ID NO: 4706274 - DNA, 25 bp, Homo sapien
ttcaggacggccttcaggctgcctg

SEQ ID NO: 4706275 - DNA, 25 bp, Homo sapien
tatcgttattcgatccgaggggtcg

SEQ ID NO: 4706276 - DNA, 25 bp, Homo sapien
ctggagcatcaagggcagaagattc

SEQ ID NO: 4706277 - DNA, 25 bp, Homo sapien
gcaaagcccagctgtgcagggataa

SEQ ID NO: 4706278 - DNA, 25 bp, Homo sapien
tactcgccgcagcacggtttgggag

SEQ ID NO: 4706279 - DNA, 25 bp, Homo sapien
gcagggataatcagggcatctgtga

SEQ ID NO: 4706280 - DNA, 25 bp, Homo sapien
tgaggcgttacaaagccaactagct

SEQ ID NO: 4706281 - DNA, 25 bp, Homo sapien
gacgcaggcaccatctgccggtgca

SEQ ID NO: 4706282 - DNA, 25 bp, Homo sapien
tcagagagacgcacgaggacttgaa

SEQ ID NO: 4706283 - DNA, 25 bp, Homo sapien
aatgctggccacgttgccttctaac

SEQ ID NO: 4706284 - DNA, 25 bp, Homo sapien
gaaggagcctctcaagaaggtgatg

SEQ ID NO: 4706285 - DNA, 25 bp, Homo sapien
cctctggaactaaacaataggatgc

SEQ ID NO: 4706286 - DNA, 25 bp, Homo sapien
ggaactaaacaataggatgccaagg

SEQ ID NO: 4706287 - DNA, 25 bp, Homo sapien
ttcagggcacgctccccctttgtgt

SEQ ID NO: 4706288 - DNA, 25 bp, Homo sapien
actaaacaataggatgccaaggcca

SEQ ID NO: 4706289 - DNA, 25 bp, Homo sapien
ccactggtcgtgcatgtggagcaag

SEQ ID NO: 4706290 - DNA, 25 bp, Homo sapien
cagccagagaatttctgcatgacct

SEQ ID NO: 4706291 - DNA, 25 bp, Homo sapien
tggacttcgggccagccagagaatt

SEQ ID NO: 4706292 - DNA, 25 bp, Homo sapien
gccctgagctggacttcgggccagc

SEQ ID NO: 4706293 - DNA, 25 bp, Homo sapien
ccagccagagaatttctgcatgacc

SEQ ID NO: 4706294 - DNA, 25 bp, Homo sapien
cagggactctgtcctggtcacagct

SEQ ID NO: 4706295 - DNA, 25 bp, Homo sapien
cctttgggatggggcccaacagctt

SEQ ID NO: 4706296 - DNA, 25 bp, Homo sapien
tttccccagggaggcaaagtctctc

SEQ ID NO: 4706297 - DNA, 25 bp, Homo sapien
cagcttccctagtttccccagggag

SEQ ID NO: 4706298 - DNA, 25 bp, Homo sapien
agctggacatcgaggaccctgtcat

SEQ ID NO: 4706299 - DNA, 25 bp, Homo sapien
ggacatcgaggaccctgtcatgtag

SEQ ID NO: 4706300 - DNA, 25 bp, Homo sapien
tgtagctccatggtcgtgaccacca

SEQ ID NO: 4706301 - DNA, 25 bp, Homo sapien
acatcgaggaccctgtcatgtagct

SEQ ID NO: 4706302 - DNA, 25 bp, Homo sapien
tctgaagagcactcagcagggtgga

SEQ ID NO: 4706303 - DNA, 25 bp, Homo sapien
gggttgtggtgatggctagcaggct

SEQ ID NO: 4706304 - DNA, 25 bp, Homo sapien
cttggcttccgggtggtgcaccagc

SEQ ID NO: 4706305 - DNA, 25 bp, Homo sapien
ctgtagaccatgacaagaagtggct

SEQ ID NO: 4706306 - DNA, 25 bp, Homo sapien
gccgctggcgcagacgtccctgctt

SEQ ID NO: 4706307 - DNA, 25 bp, Homo sapien
caggccgctggcgcagacgtccctg

SEQ ID NO: 4706308 - DNA, 25 bp, Homo sapien
cccaggccgctggcgcagacgtccc

SEQ ID NO: 4706309 - DNA, 25 bp, Homo sapien
ggccgctggcgcagacgtccctgct

SEQ ID NO: 4706310 - DNA, 25 bp, Homo sapien
tccgtggtttggagctctctttttc

SEQ ID NO: 4706311 - DNA, 25 bp, Homo sapien
tttcctggggcgctggagtgccaag

SEQ ID NO: 4706312 - DNA, 25 bp, Homo sapien
ctttccgtggtttggagctctcttt

SEQ ID NO: 4706313 - DNA, 25 bp, Homo sapien
cgggctttccgtggtttggagctct

SEQ ID NO: 4706314 - DNA, 25 bp, Homo sapien
agaagactccgcagctggcttctgc

SEQ ID NO: 4706315 - DNA, 25 bp, Homo sapien
ttccccatccgcagggtaggtggcc

SEQ ID NO: 4706316 - DNA, 25 bp, Homo sapien
agcagccagaagactccgcagctgg

SEQ ID NO: 4706317 - DNA, 25 bp, Homo sapien
aacacctggctgatgaggtccggga

SEQ ID NO: 4706318 - DNA, 25 bp, Homo sapien
cagccggatgctttgcaggagcagc

SEQ ID NO: 4706319 - DNA, 25 bp, Homo sapien
ggccagtccccggtaggcattgttc

SEQ ID NO: 4706320 - DNA, 25 bp, Homo sapien
aggcattgttcaccagcagggctct

SEQ ID NO: 4706321 - DNA, 25 bp, Homo sapien
ctggcacagccggatgctttgcagg

SEQ ID NO: 4706322 - DNA, 25 bp, Homo sapien
tgggagtgggttcattccctgcttt

SEQ ID NO: 4706323 - DNA, 25 bp, Homo sapien
gagccttctgcccaggacgggatgg

SEQ ID NO: 4706324 - DNA, 25 bp, Homo sapien
tgctttcccctgaaagggaagagcc

SEQ ID NO: 4706325 - DNA, 25 bp, Homo sapien
ttctgcccaggacgggatgggaccc

SEQ ID NO: 4706326 - DNA, 25 bp, Homo sapien
gaccagcagcatgcccacgttctcc

SEQ ID NO: 4706327 - DNA, 25 bp, Homo sapien
gcagcatgcccacgttctccaccac

SEQ ID NO: 4706328 - DNA, 25 bp, Homo sapien
agcatgcccacgttctccaccacct

SEQ ID NO: 4706329 - DNA, 25 bp, Homo sapien
cagcagcatgcccacgttctccacc

SEQ ID NO: 4706330 - DNA, 25 bp, Homo sapien
tggagcagggccttcatactactgg

SEQ ID NO: 4706331 - DNA, 25 bp, Homo sapien
gcctggtttgctgaaggcgctgctg

SEQ ID NO: 4706332 - DNA, 25 bp, Homo sapien
ctggtttgctgaaggcgctgctgtc

SEQ ID NO: 4706333 - DNA, 25 bp, Homo sapien
tggtttgctgaaggcgctgctgtca

SEQ ID NO: 4706334 - DNA, 25 bp, Homo sapien
aggcctggtttgctgaaggcgctgc

SEQ ID NO: 4706335 - DNA, 25 bp, Homo sapien
tattccagtcccccagacgtggtgc

SEQ ID NO: 4706336 - DNA, 25 bp, Homo sapien
ttccagtcccccagacgtggtgcac

SEQ ID NO: 4706337 - DNA, 25 bp, Homo sapien
ctattccagtcccccagacgtggtg

SEQ ID NO: 4706338 - DNA, 25 bp, Homo sapien
attccagtcccccagacgtggtgca

SEQ ID NO: 4706339 - DNA, 25 bp, Homo sapien
ccgtttaagattgattttggcccag

SEQ ID NO: 4706340 - DNA, 25 bp, Homo sapien
caagtcagttttcgtggacagtccc

SEQ ID NO: 4706341 - DNA, 25 bp, Homo sapien
caggagcagttactcatgtgactca

SEQ ID NO: 4706342 - DNA, 25 bp, Homo sapien
catagagatgggataataggcaggc

SEQ ID NO: 4706343 - DNA, 25 bp, Homo sapien
cactttttccgcgcaagaaaccagt

SEQ ID NO: 4706344 - DNA, 25 bp, Homo sapien
gcactttttccgcgcaagaaaccag

SEQ ID NO: 4706345 - DNA, 25 bp, Homo sapien
ctgggagaggtggctgcctccagcc

SEQ ID NO: 4706346 - DNA, 25 bp, Homo sapien
gagctgcttccccacccagtgggct

SEQ ID NO: 4706347 - DNA, 25 bp, Homo sapien
tgcttccccacccagtgggctggga

SEQ ID NO: 4706348 - DNA, 25 bp, Homo sapien
cttccccacccagtgggctgggaga

SEQ ID NO: 4706349 - DNA, 25 bp, Homo sapien
gccttgggcctctttattagtcacc

SEQ ID NO: 4706350 - DNA, 25 bp, Homo sapien
gaggctcagtgttgactctcatcta

SEQ ID NO: 4706351 - DNA, 25 bp, Homo sapien
tagaatggtctggaaggactgctct

SEQ ID NO: 4706352 - DNA, 25 bp, Homo sapien
ggcgaggtctatagagactgcagaa

SEQ ID NO: 4706353 - DNA, 25 bp, Homo sapien
tcctgtggccgtttgaactttgagc

SEQ ID NO: 4706354 - DNA, 25 bp, Homo sapien
aggcttctccccatagcacgaggat

SEQ ID NO: 4706355 - DNA, 25 bp, Homo sapien
cagctggccggcacaacaggtgtta

SEQ ID NO: 4706356 - DNA, 25 bp, Homo sapien
ccagggttggctggtgggtcaccca

SEQ ID NO: 4706357 - DNA, 25 bp, Homo sapien
tgcttcttccgagcgttgagcagag

SEQ ID NO: 4706358 - DNA, 25 bp, Homo sapien
cagtacacgtgtgtggaaggaaagc

SEQ ID NO: 4706359 - DNA, 25 bp, Homo sapien
gaaagacccaagtatgaggcctgtc

SEQ ID NO: 4706360 - DNA, 25 bp, Homo sapien
aagcgtgctgaagccagaaagaccc

SEQ ID NO: 4706361 - DNA, 25 bp, Homo sapien
ccatctaatctggagaagggacact

SEQ ID NO: 4706362 - DNA, 25 bp, Homo sapien
gggttcacaaggaatgccaggacct

SEQ ID NO: 4706363 - DNA, 25 bp, Homo sapien
gaggctgtgccaaagacatcgtggt

SEQ ID NO: 4706364 - DNA, 25 bp, Homo sapien
ccccttagaggaggcctaagccatc

SEQ ID NO: 4706365 - DNA, 25 bp, Homo sapien
cacaggcaaggattccggccacaca

SEQ ID NO: 4706366 - DNA, 25 bp, Homo sapien
agccacaggcaaggattccggccac

SEQ ID NO: 4706367 - DNA, 25 bp, Homo sapien
aaggattccggccacacagagggga

SEQ ID NO: 4706368 - DNA, 25 bp, Homo sapien
caggcaaggattccggccacacaga

SEQ ID NO: 4706369 - DNA, 25 bp, Homo sapien
agtaagaagacacggcctgtggctc

SEQ ID NO: 4706370 - DNA, 25 bp, Homo sapien
caagtaagaagacacggcctgtggc

SEQ ID NO: 4706371 - DNA, 25 bp, Homo sapien
agaagacacggcctgtggctccaaa

SEQ ID NO: 4706372 - DNA, 25 bp, Homo sapien
ggctcaagtaagaagacacggcctg

SEQ ID NO: 4706373 - DNA, 25 bp, Homo sapien
gaaaatcagccagctcagcagaggc

SEQ ID NO: 4706374 - DNA, 25 bp, Homo sapien
acggtcagaaaccacaagagctcct

SEQ ID NO: 4706375 - DNA, 25 bp, Homo sapien
gtcagaaaccacaagagctcctgaa

SEQ ID NO: 4706376 - DNA, 25 bp, Homo sapien
agctcctgaaaatcagccagctcag

SEQ ID NO: 4706377 - DNA, 25 bp, Homo sapien
tgtttcccacagaaggaataaatat

SEQ ID NO: 4706378 - DNA, 25 bp, Homo sapien
tcccacagaaggaataaatatttac

SEQ ID NO: 4706379 - DNA, 25 bp, Homo sapien
ctatcttgtttcccacagaaggaat

SEQ ID NO: 4706380 - DNA, 25 bp, Homo sapien
atcttgtttcccacagaaggaataa

SEQ ID NO: 4706381 - DNA, 25 bp, Homo sapien
gcctctggaagccaggggaaggagg

SEQ ID NO: 4706382 - DNA, 25 bp, Homo sapien
gcctctgcctctggaagccagggga

SEQ ID NO: 4706383 - DNA, 25 bp, Homo sapien
ctgcctctggaagccaggggaagga

SEQ ID NO: 4706384 - DNA, 25 bp, Homo sapien
ctctggaagccaggggaaggagggc

SEQ ID NO: 4706385 - DNA, 25 bp, Homo sapien
aagacatcggggcccacggccacca

SEQ ID NO: 4706386 - DNA, 25 bp, Homo sapien
gaagacatcggggcccacggccacc

SEQ ID NO: 4706387 - DNA, 25 bp, Homo sapien
agcacatagcgctctgtgtcctcct

SEQ ID NO: 4706388 - DNA, 25 bp, Homo sapien
gttggtgagcacatagcgctctgtg

SEQ ID NO: 4706389 - DNA, 25 bp, Homo sapien
ttgaggttggtgagcacatagcgct

SEQ ID NO: 4706390 - DNA, 25 bp, Homo sapien
atgttgaggttggtgagcacatagc

SEQ ID NO: 4706391 - DNA, 25 bp, Homo sapien
tgcacagtccagcgtggggcactca

SEQ ID NO: 4706392 - DNA, 25 bp, Homo sapien
gcacagtccagcgtggggcactcac

SEQ ID NO: 4706393 - DNA, 25 bp, Homo sapien
ctgcacagtccagcgtggggcactc

SEQ ID NO: 4706394 - DNA, 25 bp, Homo sapien
attcagactaccagatacaccagcc

SEQ ID NO: 4706395 - DNA, 25 bp, Homo sapien
ccacagacattggtcaccagccctg

SEQ ID NO: 4706396 - DNA, 25 bp, Homo sapien
tgtattcagactaccagatacacca

SEQ ID NO: 4706397 - DNA, 25 bp, Homo sapien
tattcagactaccagatacaccagc

SEQ ID NO: 4706398 - DNA, 25 bp, Homo sapien
accaggtgcacccgaaactgagccc

SEQ ID NO: 4706399 - DNA, 25 bp, Homo sapien
gacgggtcccgaagcagttctgccc

SEQ ID NO: 4706400 - DNA, 25 bp, Homo sapien
cagggacgggtcccgaagcagttct

SEQ ID NO: 4706401 - DNA, 25 bp, Homo sapien
caggctctgtcagaatgaccatctt

SEQ ID NO: 4706402 - DNA, 25 bp, Homo sapien
caggatccgtgtcgtcctcagggtt

SEQ ID NO: 4706403 - DNA, 25 bp, Homo sapien
tcagcagggacgaggtgaggttggc

SEQ ID NO: 4706404 - DNA, 25 bp, Homo sapien
tagtgatatagaggaccaggtcagc

SEQ ID NO: 4706405 - DNA, 25 bp, Homo sapien
cccacagacgctcagcagggacgag

SEQ ID NO: 4706406 - DNA, 25 bp, Homo sapien
accatcaggcaactccaggtcaaac

SEQ ID NO: 4706407 - DNA, 25 bp, Homo sapien
gcacctgccggttaccatcaggcaa

SEQ ID NO: 4706408 - DNA, 25 bp, Homo sapien
tgtcctcggtaatgaggcagctcca

SEQ ID NO: 4706409 - DNA, 25 bp, Homo sapien
gtgactcccaggtcgaagccagtgt

SEQ ID NO: 4706410 - DNA, 25 bp, Homo sapien
gcgcggcgccgtccgaagccatcac

SEQ ID NO: 4706411 - DNA, 25 bp, Homo sapien
ccgaagccatcacgtgtccgctggg

SEQ ID NO: 4706412 - DNA, 25 bp, Homo sapien
atcacgtgtccgctggggccgcagc

SEQ ID NO: 4706413 - DNA, 25 bp, Homo sapien
cgcgccgtcgtgctccaggccgaag

SEQ ID NO: 4706414 - DNA, 25 bp, Homo sapien
ctgagcaggctcagcagctgccggc

SEQ ID NO: 4706415 - DNA, 25 bp, Homo sapien
gagcaggctcagcagctgccggcgg

SEQ ID NO: 4706416 - DNA, 25 bp, Homo sapien
tgagcaggctcagcagctgccggcg

SEQ ID NO: 4706417 - DNA, 25 bp, Homo sapien
ggaacaggagttctcggcccgcgcc

SEQ ID NO: 4706418 - DNA, 25 bp, Homo sapien
aagactaaggctcctgccggcgcag

SEQ ID NO: 4706419 - DNA, 25 bp, Homo sapien
cgtttggaagcgtggccttttgtga

SEQ ID NO: 4706420 - DNA, 25 bp, Homo sapien
aggagccggctcttggctgggacca

SEQ ID NO: 4706421 - DNA, 25 bp, Homo sapien
gcgacaaggcccggctcaggcccgg

SEQ ID NO: 4706422 - DNA, 25 bp, Homo sapien
cgacaaggcccggctcaggcccggc

SEQ ID NO: 4706423 - DNA, 25 bp, Homo sapien
tgcgacaaggcccggctcaggcccg

SEQ ID NO: 4706424 - DNA, 25 bp, Homo sapien
ctgcgacaaggcccggctcaggccc

SEQ ID NO: 4706425 - DNA, 25 bp, Homo sapien
gcatccggcgggtgccccgcggacc

SEQ ID NO: 4706426 - DNA, 25 bp, Homo sapien
ctgcgcatccggcgggtgccccgcg

SEQ ID NO: 4706427 - DNA, 25 bp, Homo sapien
gtcccacacgcagcgcgcccgtcct

SEQ ID NO: 4706428 - DNA, 25 bp, Homo sapien
cgggtcccacacgcagcgcgcccgt

SEQ ID NO: 4706429 - DNA, 25 bp, Homo sapien
aaggccacgcggcactgctcgttgg

SEQ ID NO: 4706430 - DNA, 25 bp, Homo sapien
tgctccctggcgaaggtgcaggcga

SEQ ID NO: 4706431 - DNA, 25 bp, Homo sapien
caggtgctccctggcgaaggtgcag

SEQ ID NO: 4706432 - DNA, 25 bp, Homo sapien
gccttggggccgaaggccacgcggc

SEQ ID NO: 4706433 - DNA, 25 bp, Homo sapien
catgcacgttttgggggacgtgagc

SEQ ID NO: 4706434 - DNA, 25 bp, Homo sapien
gagctgggtgatgcggagggacctc

SEQ ID NO: 4706435 - DNA, 25 bp, Homo sapien
gacgtgagctgggtgatgcggaggg

SEQ ID NO: 4706436 - DNA, 25 bp, Homo sapien
atgcggagggacctcacagccaatc

SEQ ID NO: 4706437 - DNA, 25 bp, Homo sapien
tccagcgggtctgtgtggcaggaga

SEQ ID NO: 4706438 - DNA, 25 bp, Homo sapien
tccacgccacattctgtcccatcca

SEQ ID NO: 4706439 - DNA, 25 bp, Homo sapien
cacgccacattctgtcccatccagg

SEQ ID NO: 4706440 - DNA, 25 bp, Homo sapien
tctccacgccacattctgtcccatc

SEQ ID NO: 4706441 - DNA, 25 bp, Homo sapien
gagcggcagcgacccttggagcacc

SEQ ID NO: 4706442 - DNA, 25 bp, Homo sapien
cactgctgctatgggggtcagctcc

SEQ ID NO: 4706443 - DNA, 25 bp, Homo sapien
ttcggggaccccagctagaccagcg

SEQ ID NO: 4706444 - DNA, 25 bp, Homo sapien
caggagcgggagcaaggacttcggg

SEQ ID NO: 4706445 - DNA, 25 bp, Homo sapien
acatgcacgccccccaaaggcaggt

SEQ ID NO: 4706446 - DNA, 25 bp, Homo sapien
ctgagtgttgcacatctcggcctgg

SEQ ID NO: 4706447 - DNA, 25 bp, Homo sapien
gagtgttgcacatctcggcctggag

SEQ ID NO: 4706448 - DNA, 25 bp, Homo sapien
caccaacacatgcacgccccccaaa

SEQ ID NO: 4706449 - DNA, 25 bp, Homo sapien
agcgcagcggctggccgtcggtcct

SEQ ID NO: 4706450 - DNA, 25 bp, Homo sapien
gcgcactgttgcgacatgaactcca

SEQ ID NO: 4706451 - DNA, 25 bp, Homo sapien
tcggtcctggcgcactgttgcgaca

SEQ ID NO: 4706452 - DNA, 25 bp, Homo sapien
cagcaccccagtggtagaaggaggc

SEQ ID NO: 4706453 - DNA, 25 bp, Homo sapien
aagctgtctccacgcttcatgatga

SEQ ID NO: 4706454 - DNA, 25 bp, Homo sapien
gggtcccatcgaggaagctgtctcc

SEQ ID NO: 4706455 - DNA, 25 bp, Homo sapien
gggccacttggcatacaccgggtcc

SEQ ID NO: 4706456 - DNA, 25 bp, Homo sapien
atgatgaagctctcgccaatggccc

SEQ ID NO: 4706457 - DNA, 25 bp, Homo sapien
caggaagcaagcttagagggctcag

SEQ ID NO: 4706458 - DNA, 25 bp, Homo sapien
ttccgataggacaggtaggccccag

SEQ ID NO: 4706459 - DNA, 25 bp, Homo sapien
ctgagattctgggatccacaaaacc

SEQ ID NO: 4706460 - DNA, 25 bp, Homo sapien
cccaggagccttccgataggacagg

SEQ ID NO: 4706461 - DNA, 25 bp, Homo sapien
tggcacctgtcccatacctgctggg

SEQ ID NO: 4706462 - DNA, 25 bp, Homo sapien
tccatcctaccatcacagccaaatg

SEQ ID NO: 4706463 - DNA, 25 bp, Homo sapien
cctggcacctgtcccatacctgctg

SEQ ID NO: 4706464 - DNA, 25 bp, Homo sapien
ctggcacctgtcccatacctgctgg

SEQ ID NO: 4706465 - DNA, 25 bp, Homo sapien
tcaggttgggggtaactgtcagaaa

SEQ ID NO: 4706466 - DNA, 25 bp, Homo sapien
caatgtagacactggtcaggttggg

SEQ ID NO: 4706467 - DNA, 25 bp, Homo sapien
gcaatgtagacactggtcaggttgg

SEQ ID NO: 4706468 - DNA, 25 bp, Homo sapien
gtcaggttgggggtaactgtcagaa

SEQ ID NO: 4706469 - DNA, 25 bp, Homo sapien
agccggtcctcggtgagggccactc

SEQ ID NO: 4706470 - DNA, 25 bp, Homo sapien
agccacgacatagcgccctccgatc

SEQ ID NO: 4706471 - DNA, 25 bp, Homo sapien
ggtgttaggggagatgctcatcttc

SEQ ID NO: 4706472 - DNA, 25 bp, Homo sapien
agggccactctgtactcgacacgac

SEQ ID NO: 4706473 - DNA, 25 bp, Homo sapien
gaactgcagggccttctcccacggg

SEQ ID NO: 4706474 - DNA, 25 bp, Homo sapien
gatcccagaactgcagggccttctc

SEQ ID NO: 4706475 - DNA, 25 bp, Homo sapien
ctgatcccagaactgcagggccttc

SEQ ID NO: 4706476 - DNA, 25 bp, Homo sapien
actgcagggccttctcccacgggct

SEQ ID NO: 4706477 - DNA, 25 bp, Homo sapien
gaggttgccatactcctcgccatac

SEQ ID NO: 4706478 - DNA, 25 bp, Homo sapien
ggcgggtgaggttgccatactcctc

SEQ ID NO: 4706479 - DNA, 25 bp, Homo sapien
ctggaagtaggtgaaggtgatgtct

SEQ ID NO: 4706480 - DNA, 25 bp, Homo sapien
tggcttaggctggaagtaggtgaag

SEQ ID NO: 4706481 - DNA, 25 bp, Homo sapien
agggagggcagggttcgagcacgca

SEQ ID NO: 4706482 - DNA, 25 bp, Homo sapien
gcagggttcgagcacgcaggcctct

SEQ ID NO: 4706483 - DNA, 25 bp, Homo sapien
cactggacagtctccaccaactcct

SEQ ID NO: 4706484 - DNA, 25 bp, Homo sapien
gttcgagcacgcaggcctctggcca

SEQ ID NO: 4706485 - DNA, 25 bp, Homo sapien
ctccacgcagcgcactggccgctcc

SEQ ID NO: 4706486 - DNA, 25 bp, Homo sapien
ggcgctgcatgggccgaagtctccc

SEQ ID NO: 4706487 - DNA, 25 bp, Homo sapien
tgcatgggccgaagtctcccaccgc

SEQ ID NO: 4706488 - DNA, 25 bp, Homo sapien
gggttgcaggtttccagcgccacag

SEQ ID NO: 4706489 - DNA, 25 bp, Homo sapien
atgagctgggctctgacacctccca

SEQ ID NO: 4706490 - DNA, 25 bp, Homo sapien
tgatgtgcatgagctgggctctgac

SEQ ID NO: 4706491 - DNA, 25 bp, Homo sapien
tgtgcatgagctgggctctgacacc

SEQ ID NO: 4706492 - DNA, 25 bp, Homo sapien
aggtctcgttctccaaggccaggcc

SEQ ID NO: 4706493 - DNA, 25 bp, Homo sapien
gagccaggcccctcagtcactggag

SEQ ID NO: 4706494 - DNA, 25 bp, Homo sapien
acatgacatcccgacacagggctca

SEQ ID NO: 4706495 - DNA, 25 bp, Homo sapien
tggaggacatgacatcccgacacag

SEQ ID NO: 4706496 - DNA, 25 bp, Homo sapien
agcttctcatctacggagccaggcc

SEQ ID NO: 4706497 - DNA, 25 bp, Homo sapien
ctcagcagcatgagtgctcactgtg

SEQ ID NO: 4706498 - DNA, 25 bp, Homo sapien
cctcagcagcatgagtgctcactgt

SEQ ID NO: 4706499 - DNA, 25 bp, Homo sapien
ccgcaggagacggagcacgaccctg

SEQ ID NO: 4706500 - DNA, 25 bp, Homo sapien
gtccacacgtgtgcagcttgagccc

SEQ ID NO: 4706501 - DNA, 25 bp, Homo sapien
tgccgcaggggtccacacgtgtgca

SEQ ID NO: 4706502 - DNA, 25 bp, Homo sapien
agacggagcacgaccctgccgcagg

SEQ ID NO: 4706503 - DNA, 25 bp, Homo sapien
gtccatgcacaggaaacgcagctcc

SEQ ID NO: 4706504 - DNA, 25 bp, Homo sapien
tcctggacaggcaccctgagggcag

SEQ ID NO: 4706505 - DNA, 25 bp, Homo sapien
ttcctggacaggcaccctgagggca

SEQ ID NO: 4706506 - DNA, 25 bp, Homo sapien
cctggacaggcaccctgagggcaga

SEQ ID NO: 4706507 - DNA, 25 bp, Homo sapien
ctccgcaggtcaccgggcatggagc

SEQ ID NO: 4706508 - DNA, 25 bp, Homo sapien
caggtcaccgggcatggagccaagg

SEQ ID NO: 4706509 - DNA, 25 bp, Homo sapien
gcaggtcaccgggcatggagccaag

SEQ ID NO: 4706510 - DNA, 25 bp, Homo sapien
cgcaggtcaccgggcatggagccaa

SEQ ID NO: 4706511 - DNA, 25 bp, Homo sapien
caggatctcctcaccatcgtcctcc

SEQ ID NO: 4706512 - DNA, 25 bp, Homo sapien
tgcaggccgccagcttgtactgcca

SEQ ID NO: 4706513 - DNA, 25 bp, Homo sapien
gcactgggtgtccaacaggatctcc

SEQ ID NO: 4706514 - DNA, 25 bp, Homo sapien
catgggcccgggcacaatacaggat

SEQ ID NO: 4706515 - DNA, 25 bp, Homo sapien
tggccttggtcgagctgcacacagg

SEQ ID NO: 4706516 - DNA, 25 bp, Homo sapien
accgagcgtctagcagtgccaaggc

SEQ ID NO: 4706517 - DNA, 25 bp, Homo sapien
cagtcggcaatgagacaggggacac

SEQ ID NO: 4706518 - DNA, 25 bp, Homo sapien
aacatgccagcggtaggtgcagtcg

SEQ ID NO: 4706519 - DNA, 25 bp, Homo sapien
agggattccgagtgcccgctgtgct

SEQ ID NO: 4706520 - DNA, 25 bp, Homo sapien
cagccccatagggattccgagtgcc

SEQ ID NO: 4706521 - DNA, 25 bp, Homo sapien
cgatgagccaatgcctcctagactc

SEQ ID NO: 4706522 - DNA, 25 bp, Homo sapien
ttcctttcaggggacacgatgagcc

SEQ ID NO: 4706523 - DNA, 25 bp, Homo sapien
tggcagaaatcagctggcacaggcg

SEQ ID NO: 4706524 - DNA, 25 bp, Homo sapien
gtgtcacgccggcgctggatgccat

SEQ ID NO: 4706525 - DNA, 25 bp, Homo sapien
ggcaggtgtcacgccggcgctggat

SEQ ID NO: 4706526 - DNA, 25 bp, Homo sapien
tcaccggcttgggcaagtgctggca

SEQ ID NO: 4706527 - DNA, 25 bp, Homo sapien
agggcccagcccagcagccacgcac

SEQ ID NO: 4706528 - DNA, 25 bp, Homo sapien
tcgtggggcaccaggctgggcgtac

SEQ ID NO: 4706529 - DNA, 25 bp, Homo sapien
ggtggctgtggtccgtcctggagca

SEQ ID NO: 4706530 - DNA, 25 bp, Homo sapien
gtccgtcctggagcagcggcttctt

SEQ ID NO: 4706531 - DNA, 25 bp, Homo sapien
tggagcagcggcttcttcgtggggc

SEQ ID NO: 4706532 - DNA, 25 bp, Homo sapien
tggactgcactgagttttcctgggg

SEQ ID NO: 4706533 - DNA, 25 bp, Homo sapien
gcagctgcctgacaggaaggaggac

SEQ ID NO: 4706534 - DNA, 25 bp, Homo sapien
cagctgcctgacaggaaggaggaca

SEQ ID NO: 4706535 - DNA, 25 bp, Homo sapien
cagcagctgcctgacaggaaggagg

SEQ ID NO: 4706536 - DNA, 25 bp, Homo sapien
tgcagcagctgcctgacaggaagga

SEQ ID NO: 4706537 - DNA, 25 bp, Homo sapien
aggcacacaacccagggaccaagtg

SEQ ID NO: 4706538 - DNA, 25 bp, Homo sapien
ggaccaagtgcttgtgccagtcctt

SEQ ID NO: 4706539 - DNA, 25 bp, Homo sapien
cagggaccaagtgcttgtgccagtc

SEQ ID NO: 4706540 - DNA, 25 bp, Homo sapien
caacccagggaccaagtgcttgtgc

SEQ ID NO: 4706541 - DNA, 25 bp, Homo sapien
caagttacttccccttgatagtagt

SEQ ID NO: 4706542 - DNA, 25 bp, Homo sapien
tcaagttacttccccttgatagtag

SEQ ID NO: 4706543 - DNA, 25 bp, Homo sapien
ttcaagttacttccccttgatagta

SEQ ID NO: 4706544 - DNA, 25 bp, Homo sapien
cttcaagttacttccccttgatagt

SEQ ID NO: 4706545 - DNA, 25 bp, Homo sapien
cctgttggctcaaggtgctgcctgc

SEQ ID NO: 4706546 - DNA, 25 bp, Homo sapien
tgttggctcaaggtgctgcctgcca

SEQ ID NO: 4706547 - DNA, 25 bp, Homo sapien
ctgttggctcaaggtgctgcctgcc

SEQ ID NO: 4706548 - DNA, 25 bp, Homo sapien
tcaaggacgcggagggtcaccacct

SEQ ID NO: 4706549 - DNA, 25 bp, Homo sapien
aactctcaaggacgcggagggtcac

SEQ ID NO: 4706550 - DNA, 25 bp, Homo sapien
agaactctcaaggacgcggagggtc

SEQ ID NO: 4706551 - DNA, 25 bp, Homo sapien
ctgcagttgagagaactctcaagga

SEQ ID NO: 4706552 - DNA, 25 bp, Homo sapien
tctgtagaaggtttcaggagcaagc

SEQ ID NO: 4706553 - DNA, 25 bp, Homo sapien
ggagctgaaagtcatgtccaacagc

SEQ ID NO: 4706554 - DNA, 25 bp, Homo sapien
ggagcaagctggctcccataccgca

SEQ ID NO: 4706555 - DNA, 25 bp, Homo sapien
ccagcgtgttggtcttggagctgaa

SEQ ID NO: 4706556 - DNA, 25 bp, Homo sapien
ttgctgcacggtcccaaaaaggagg

SEQ ID NO: 4706557 - DNA, 25 bp, Homo sapien
gaaacaatggcatgcactgagcaga

SEQ ID NO: 4706558 - DNA, 25 bp, Homo sapien
ggcaacaaagataggctccacccat

SEQ ID NO: 4706559 - DNA, 25 bp, Homo sapien
caggacaaccgagagggctatcaga

SEQ ID NO: 4706560 - DNA, 25 bp, Homo sapien
gtcccagcgcccatgttggtggcca

SEQ ID NO: 4706561 - DNA, 25 bp, Homo sapien
ccagggcatggatggcaatccgtgc

SEQ ID NO: 4706562 - DNA, 25 bp, Homo sapien
cgtgcgtgcggagccacattaatga

SEQ ID NO: 4706563 - DNA, 25 bp, Homo sapien
acattaatgaagagccggcagcccc

SEQ ID NO: 4706564 - DNA, 25 bp, Homo sapien
taattagcactcacggaagccttcg

SEQ ID NO: 4706565 - DNA, 25 bp, Homo sapien
gggaagctgataccctgcagaacac

SEQ ID NO: 4706566 - DNA, 25 bp, Homo sapien
tgcaagggctcacagattccggatc

SEQ ID NO: 4706567 - DNA, 25 bp, Homo sapien
ggaccggccacaagtaataattagc

SEQ ID NO: 4706568 - DNA, 25 bp, Homo sapien
tggctgctctctgactcccagtaga

SEQ ID NO: 4706569 - DNA, 25 bp, Homo sapien
tctgactcccagtagagcacctgct

SEQ ID NO: 4706570 - DNA, 25 bp, Homo sapien
ctgctgcccatggaacgctgtggtc

SEQ ID NO: 4706571 - DNA, 25 bp, Homo sapien
ggaacgctgtggtcctcaagctgtg

SEQ ID NO: 4706572 - DNA, 25 bp, Homo sapien
actgagggtcctgcatctccggtac

SEQ ID NO: 4706573 - DNA, 25 bp, Homo sapien
ttcccttccaggactgagggtcctg

SEQ ID NO: 4706574 - DNA, 25 bp, Homo sapien
ggactgagggtcctgcatctccggt

SEQ ID NO: 4706575 - DNA, 25 bp, Homo sapien
cttccaggactgagggtcctgcatc

SEQ ID NO: 4706576 - DNA, 25 bp, Homo sapien
tggccagacacggaacaaatgttca

SEQ ID NO: 4706577 - DNA, 25 bp, Homo sapien
ctaagattggaaaaagttcgaattg

SEQ ID NO: 4706578 - DNA, 25 bp, Homo sapien
caaccccctagccttttggacattg

SEQ ID NO: 4706579 - DNA, 25 bp, Homo sapien
tggagaagactctaaagtagatacc

SEQ ID NO: 4706580 - DNA, 25 bp, Homo sapien
tcacaaagggctcggtagccggccg

SEQ ID NO: 4706581 - DNA, 25 bp, Homo sapien
cggccgcgtccgagccggcgcgctg

SEQ ID NO: 4706582 - DNA, 25 bp, Homo sapien
cctcacaaagggctcggtagccggc

SEQ ID NO: 4706583 - DNA, 25 bp, Homo sapien
ctcacaaagggctcggtagccggcc

SEQ ID NO: 4706584 - DNA, 25 bp, Homo sapien
gcgcagagctggcggacgccccggg

SEQ ID NO: 4706585 - DNA, 25 bp, Homo sapien
acacagccagcggtaccaccacgtc

SEQ ID NO: 4706586 - DNA, 25 bp, Homo sapien
aggcgacacagccagcggtaccacc

SEQ ID NO: 4706587 - DNA, 25 bp, Homo sapien
gcgacacagccagcggtaccaccac

SEQ ID NO: 4706588 - DNA, 25 bp, Homo sapien
acagccagcggtaccaccacgtcat

SEQ ID NO: 4706589 - DNA, 25 bp, Homo sapien
gtctctcctacaaagtcaaaagcgt

SEQ ID NO: 4706590 - DNA, 25 bp, Homo sapien
cagtctctcctacaaagtcaaaagc

SEQ ID NO: 4706591 - DNA, 25 bp, Homo sapien
tctcctacaaagtcaaaagcgtact

SEQ ID NO: 4706592 - DNA, 25 bp, Homo sapien
cctacaaagtcaaaagcgtacttgc

SEQ ID NO: 4706593 - DNA, 25 bp, Homo sapien
cagctcggctgtgcttcctgctgca

SEQ ID NO: 4706594 - DNA, 25 bp, Homo sapien
ctgacagctcggctgtgcttcctgc

SEQ ID NO: 4706595 - DNA, 25 bp, Homo sapien
gacagctcggctgtgcttcctgctg

SEQ ID NO: 4706596 - DNA, 25 bp, Homo sapien
tgacagctcggctgtgcttcctgct

SEQ ID NO: 4706597 - DNA, 25 bp, Homo sapien
tgatgcagttgaagaggccagagat

SEQ ID NO: 4706598 - DNA, 25 bp, Homo sapien
gttgaagaggccagagatcgcgcaa

SEQ ID NO: 4706599 - DNA, 25 bp, Homo sapien
tgttcagagggtggatggtgatgca

SEQ ID NO: 4706600 - DNA, 25 bp, Homo sapien
acacgccggccgcaatgttcagagg

SEQ ID NO: 4706601 - DNA, 25 bp, Homo sapien
cagtggatgctccagaaatgtctgg

SEQ ID NO: 4706602 - DNA, 25 bp, Homo sapien
cagagggcgagggccccagtatagt

SEQ ID NO: 4706603 - DNA, 25 bp, Homo sapien
ctcagtggatgctccagaaatgtct

SEQ ID NO: 4706604 - DNA, 25 bp, Homo sapien
ccccagtatagtggacttggcatct

SEQ ID NO: 4706605 - DNA, 25 bp, Homo sapien
tggccaccaaaagccgtcagtggca

SEQ ID NO: 4706606 - DNA, 25 bp, Homo sapien
tgtgtcctctgtctgctgttagtat

SEQ ID NO: 4706607 - DNA, 25 bp, Homo sapien
atggcactgctacaacgctgcggca

SEQ ID NO: 4706608 - DNA, 25 bp, Homo sapien
gctgttagtattatcgccatggcca

SEQ ID NO: 4706609 - DNA, 25 bp, Homo sapien
tcctagagggaagcccctgggcttc

SEQ ID NO: 4706610 - DNA, 25 bp, Homo sapien
cactcctagagggaagcccctgggc

SEQ ID NO: 4706611 - DNA, 25 bp, Homo sapien
cctcggagagcctctgctgaagact

SEQ ID NO: 4706612 - DNA, 25 bp, Homo sapien
tcggagagcctctgctgaagactcc

SEQ ID NO: 4706613 - DNA, 25 bp, Homo sapien
gccggtccaccttctccgccactgt

SEQ ID NO: 4706614 - DNA, 25 bp, Homo sapien
agaagggcgcctcacacagcaacaa

SEQ ID NO: 4706615 - DNA, 25 bp, Homo sapien
ttgcaaactcgatgaactggcagca

SEQ ID NO: 4706616 - DNA, 25 bp, Homo sapien
ccactgtgtttgcaaactcgatgaa

SEQ ID NO: 4706617 - DNA, 25 bp, Homo sapien
agagaggaactgaatacactgccca

SEQ ID NO: 4706618 - DNA, 25 bp, Homo sapien
ttccagtgactacggcacagcgaca

SEQ ID NO: 4706619 - DNA, 25 bp, Homo sapien
tagatgaacccactcttcggaaagg

SEQ ID NO: 4706620 - DNA, 25 bp, Homo sapien
ggcacgttttggcagctatgagcaa

SEQ ID NO: 4706621 - DNA, 25 bp, Homo sapien
ccctaaggacatgacactgcgtgta

SEQ ID NO: 4706622 - DNA, 25 bp, Homo sapien
caataatgaatacagctgccaccag

SEQ ID NO: 4706623 - DNA, 25 bp, Homo sapien
cagcgggcttcgagtaacattgttc

SEQ ID NO: 4706624 - DNA, 25 bp, Homo sapien
gcacacacatcagaagattagcagg

SEQ ID NO: 4706625 - DNA, 25 bp, Homo sapien
taaacagtaacgagatggtccagtg

SEQ ID NO: 4706626 - DNA, 25 bp, Homo sapien
tagcttcgcgggcaagttactcgga

SEQ ID NO: 4706627 - DNA, 25 bp, Homo sapien
gatcaaagcttgtccgaggtcagtc

SEQ ID NO: 4706628 - DNA, 25 bp, Homo sapien
gttactcggaatctccaccgcggag

SEQ ID NO: 4706629 - DNA, 25 bp, Homo sapien
agagcagagagtccgtacagcaccc

SEQ ID NO: 4706630 - DNA, 25 bp, Homo sapien
tagcaaaggcgatggcgttgcccag

SEQ ID NO: 4706631 - DNA, 25 bp, Homo sapien
tgatgacgatgggaacgaccgccat

SEQ ID NO: 4706632 - DNA, 25 bp, Homo sapien
agcacccccgtagcaaaggcgatgg

SEQ ID NO: 4706633 - DNA, 25 bp, Homo sapien
tgcccaggggctgggcctggcagac

SEQ ID NO: 4706634 - DNA, 25 bp, Homo sapien
ggcggagggaggaaggccctgccca

SEQ ID NO: 4706635 - DNA, 25 bp, Homo sapien
ccaggggctgggcctggcagacgca

SEQ ID NO: 4706636 - DNA, 25 bp, Homo sapien
caggggctgggcctggcagacgcac

SEQ ID NO: 4706637 - DNA, 25 bp, Homo sapien
cctctgctgctggatcctggcatag

SEQ ID NO: 4706638 - DNA, 25 bp, Homo sapien
gctgctggatcctggcataggagat

SEQ ID NO: 4706639 - DNA, 25 bp, Homo sapien
agggtctccgcgagcttctcctcat

SEQ ID NO: 4706640 - DNA, 25 bp, Homo sapien
cctccagggtctccgcgagcttctc

SEQ ID NO: 4706641 - DNA, 25 bp, Homo sapien
gtggacagtccaggcctcacttgga

SEQ ID NO: 4706642 - DNA, 25 bp, Homo sapien
ttcacttagcaagacccagtacctg

SEQ ID NO: 4706643 - DNA, 25 bp, Homo sapien
tgccaaggctgcagttccaggtacc

SEQ ID NO: 4706644 - DNA, 25 bp, Homo sapien
cagccgccggaagagacgttccttg

SEQ ID NO: 4706645 - DNA, 25 bp, Homo sapien
gccacgctttattgcttaagacgca

SEQ ID NO: 4706646 - DNA, 25 bp, Homo sapien
cacgctttattgcttaagacgcaca

SEQ ID NO: 4706647 - DNA, 25 bp, Homo sapien
cgctttattgcttaagacgcacaca

SEQ ID NO: 4706648 - DNA, 25 bp, Homo sapien
cggccacgctttattgcttaagacg

SEQ ID NO: 4706649 - DNA, 25 bp, Homo sapien
tcacacacaggcaccaaggcagaag

SEQ ID NO: 4706650 - DNA, 25 bp, Homo sapien
tgcctggcttccacactcacacaca

SEQ ID NO: 4706651 - DNA, 25 bp, Homo sapien
cacacaggcaccaaggcagaaggga

SEQ ID NO: 4706652 - DNA, 25 bp, Homo sapien
gtagttatttcctgggccagcggct

SEQ ID NO: 4706653 - DNA, 25 bp, Homo sapien
ggaggggcctgccctcagctgccat

SEQ ID NO: 4706654 - DNA, 25 bp, Homo sapien
cttccagccatggggggtcccatgt

SEQ ID NO: 4706655 - DNA, 25 bp, Homo sapien
atggggggtcccatgtcctgggagg

SEQ ID NO: 4706656 - DNA, 25 bp, Homo sapien
gggaggggcctgccctcagctgcca

SEQ ID NO: 4706657 - DNA, 25 bp, Homo sapien
cggcagccctactgtcccctcggag

SEQ ID NO: 4706658 - DNA, 25 bp, Homo sapien
caagacacggcagccctactgtccc

SEQ ID NO: 4706659 - DNA, 25 bp, Homo sapien
ctgtcccctcggagacctcggccct

SEQ ID NO: 4706660 - DNA, 25 bp, Homo sapien
cttcccaagacacggcagccctact

SEQ ID NO: 4706661 - DNA, 25 bp, Homo sapien
tgggtgccagagaccttctcccctg

SEQ ID NO: 4706662 - DNA, 25 bp, Homo sapien
ggtgccagagaccttctcccctggg

SEQ ID NO: 4706663 - DNA, 25 bp, Homo sapien
gtcacggaaggcaccaggtccgagt

SEQ ID NO: 4706664 - DNA, 25 bp, Homo sapien
cagccagggtcacggaaggcgccag

SEQ ID NO: 4706665 - DNA, 25 bp, Homo sapien
gccccttctcggtggctgcttctcg

SEQ ID NO: 4706666 - DNA, 25 bp, Homo sapien
ttgccccttctcggtggctgcttct

SEQ ID NO: 4706667 - DNA, 25 bp, Homo sapien
tgccccttctcggtggctgcttctc

SEQ ID NO: 4706668 - DNA, 25 bp, Homo sapien
aaggacaaagcgtggtttgggaatg

SEQ ID NO: 4706669 - DNA, 25 bp, Homo sapien
aggacaaagcgtggtttgggaatgt

SEQ ID NO: 4706670 - DNA, 25 bp, Homo sapien
gacgcctctaaagccaccgctcgct

SEQ ID NO: 4706671 - DNA, 25 bp, Homo sapien
ctaaagccaccgctcgcttcccggc

SEQ ID NO: 4706672 - DNA, 25 bp, Homo sapien
cccctctgcacgacgcctctaaagc

SEQ ID NO: 4706673 - DNA, 25 bp, Homo sapien
tctgcacgacgcctctaaagccacc

SEQ ID NO: 4706674 - DNA, 25 bp, Homo sapien
tcaggcatctggctgcccagcagcc

SEQ ID NO: 4706675 - DNA, 25 bp, Homo sapien
caggcatctggctgcccagcagccc

SEQ ID NO: 4706676 - DNA, 25 bp, Homo sapien
cagagtggccgagagccgtgacccc

SEQ ID NO: 4706677 - DNA, 25 bp, Homo sapien
cgagagccgtgaccccaggacagca

SEQ ID NO: 4706678 - DNA, 25 bp, Homo sapien
ctgcaagtgagcagagtggccgaga

SEQ ID NO: 4706679 - DNA, 25 bp, Homo sapien
caagtgagcagagtggccgagagcc

SEQ ID NO: 4706680 - DNA, 25 bp, Homo sapien
ttcaggctcgagaacacgatgtcca

SEQ ID NO: 4706681 - DNA, 25 bp, Homo sapien
tcgagaacacgatgtccacaggctc

SEQ ID NO: 4706682 - DNA, 25 bp, Homo sapien
tccttcaggctcgagaacacgatgt

SEQ ID NO: 4706683 - DNA, 25 bp, Homo sapien
ggctcgagaacacgatgtccacagg

SEQ ID NO: 4706684 - DNA, 25 bp, Homo sapien
cgagggctttactgagcatccagga

SEQ ID NO: 4706685 - DNA, 25 bp, Homo sapien
cacctgctcctgtccgtaaggctga

SEQ ID NO: 4706686 - DNA, 25 bp, Homo sapien
ttctcgaacattatctcaaggtgct

SEQ ID NO: 4706687 - DNA, 25 bp, Homo sapien
ggcagagtttccgggccacgctgct

SEQ ID NO: 4706688 - DNA, 25 bp, Homo sapien
tcaggccacctttgttctgagcagc

SEQ ID NO: 4706689 - DNA, 25 bp, Homo sapien
ggatctcaggccacctttgttctga

SEQ ID NO: 4706690 - DNA, 25 bp, Homo sapien
gggcagggatctcaggccacctttg

SEQ ID NO: 4706691 - DNA, 25 bp, Homo sapien
gccacctttgttctgagcagcctga

SEQ ID NO: 4706692 - DNA, 25 bp, Homo sapien
tgttttccaacacagagtcttgaac

SEQ ID NO: 4706693 - DNA, 25 bp, Homo sapien
tcctgggagcgctcatcattgccca

SEQ ID NO: 4706694 - DNA, 25 bp, Homo sapien
tctcttcctgggagcgctcatcatt

SEQ ID NO: 4706695 - DNA, 25 bp, Homo sapien
tgaacaatcactcgtgtggtctttt

SEQ ID NO: 4706696 - DNA, 25 bp, Homo sapien
gcgcggttcccatgcttcaaggtaa

SEQ ID NO: 4706697 - DNA, 25 bp, Homo sapien
catttccctcggaacagtggcctgg

SEQ ID NO: 4706698 - DNA, 25 bp, Homo sapien
agaagacgcaggctggaaagctcca

SEQ ID NO: 4706699 - DNA, 25 bp, Homo sapien
gctaggtgcccactcgtccagagtg

SEQ ID NO: 4706700 - DNA, 25 bp, Homo sapien
ctggcccagcgactgagggcgggca

SEQ ID NO: 4706701 - DNA, 25 bp, Homo sapien
gcccagcgactgagggcgggcatgg

SEQ ID NO: 4706702 - DNA, 25 bp, Homo sapien
ccagcgactgagggcgggcatggct

SEQ ID NO: 4706703 - DNA, 25 bp, Homo sapien
tggcccagcgactgagggcgggcat

SEQ ID NO: 4706704 - DNA, 25 bp, Homo sapien
caaaataggcagtgtccccatcggt

SEQ ID NO: 4706705 - DNA, 25 bp, Homo sapien
ggtccagagcaccacgagatctgcg

SEQ ID NO: 4706706 - DNA, 25 bp, Homo sapien
gagatctgcgttctcaagctcgcca

SEQ ID NO: 4706707 - DNA, 25 bp, Homo sapien
gctgtgctgtacatgaaggctgcct

SEQ ID NO: 4706708 - DNA, 25 bp, Homo sapien
ccattgtaggcggtgggctcgccca

SEQ ID NO: 4706709 - DNA, 25 bp, Homo sapien
cagcttgtggaagggcctaaagtcc

SEQ ID NO: 4706710 - DNA, 25 bp, Homo sapien
attgtaggcggtgggctcgcccact

SEQ ID NO: 4706711 - DNA, 25 bp, Homo sapien
taggcggtgggctcgcccacttcgg

SEQ ID NO: 4706712 - DNA, 25 bp, Homo sapien
agggaggcattggacctgctgcatt

SEQ ID NO: 4706713 - DNA, 25 bp, Homo sapien
gggatctggatcagtgacctctgcc

SEQ ID NO: 4706714 - DNA, 25 bp, Homo sapien
ctgctgcattctccgaggatgcttc

SEQ ID NO: 4706715 - DNA, 25 bp, Homo sapien
tccgaggatgcttcctgggatctgg

SEQ ID NO: 4706716 - DNA, 25 bp, Homo sapien
gagatgagccccgacagtggagttg

SEQ ID NO: 4706717 - DNA, 25 bp, Homo sapien
cagcaggtcacaggttctgttagcc

SEQ ID NO: 4706718 - DNA, 25 bp, Homo sapien
gccccgacagtggagttggttcctc

SEQ ID NO: 4706719 - DNA, 25 bp, Homo sapien
cacaggttctgttagccatgggcat

SEQ ID NO: 4706720 - DNA, 25 bp, Homo sapien
tccaggtggatctgccccttctggt

SEQ ID NO: 4706721 - DNA, 25 bp, Homo sapien
ccaggtggatctgccccttctggtc

SEQ ID NO: 4706722 - DNA, 25 bp, Homo sapien
ggtcgcaggtgccaaagggcctctt

SEQ ID NO: 4706723 - DNA, 25 bp, Homo sapien
atgaggtaatccttggggtcgcagg

SEQ ID NO: 4706724 - DNA, 25 bp, Homo sapien
aatccttggggtcgcaggtgccaaa

SEQ ID NO: 4706725 - DNA, 25 bp, Homo sapien
gtaatccttggggtcgcaggtgcca

SEQ ID NO: 4706726 - DNA, 25 bp, Homo sapien
tctggatattgggagcttggacctc

SEQ ID NO: 4706727 - DNA, 25 bp, Homo sapien
taatgtggtgccgagagaagccctt

SEQ ID NO: 4706728 - DNA, 25 bp, Homo sapien
caggatcccgtagaccaagtggaca

SEQ ID NO: 4706729 - DNA, 25 bp, Homo sapien
ttgatggcctccagtgaccggaacg

SEQ ID NO: 4706730 - DNA, 25 bp, Homo sapien
gtttcatcttggagtcgcagggccc

SEQ ID NO: 4706731 - DNA, 25 bp, Homo sapien
tggacaagggcctcattgcccttgg

SEQ ID NO: 4706732 - DNA, 25 bp, Homo sapien
gggcgcactggaagacttccatgtg

SEQ ID NO: 4706733 - DNA, 25 bp, Homo sapien
tagttgaggcggtcgggtttcatct

SEQ ID NO: 4706734 - DNA, 25 bp, Homo sapien
gcataaggtcctgcggcacttgcgt

SEQ ID NO: 4706735 - DNA, 25 bp, Homo sapien
cacctgtacacaaaaccctgactcc

SEQ ID NO: 4706736 - DNA, 25 bp, Homo sapien
tgagggcataaggtcctgcggcact

SEQ ID NO: 4706737 - DNA, 25 bp, Homo sapien
acccactgagggcataaggtcctgc

SEQ ID NO: 4706738 - DNA, 25 bp, Homo sapien
gcaaggccggcttcctctgggtagt

SEQ ID NO: 4706739 - DNA, 25 bp, Homo sapien
ccggcttcctctgggtagtaaaatg

SEQ ID NO: 4706740 - DNA, 25 bp, Homo sapien
ttgtggtagtgaacttccaggcgga

SEQ ID NO: 4706741 - DNA, 25 bp, Homo sapien
gagatatctggaggaccctggaccc

SEQ ID NO: 4706742 - DNA, 25 bp, Homo sapien
tgtccgtgcagtagccagtgaggat

SEQ ID NO: 4706743 - DNA, 25 bp, Homo sapien
tcactggcgtgtacaccagtcccag

SEQ ID NO: 4706744 - DNA, 25 bp, Homo sapien
tgtgtagtacaagcggatgcctgag

SEQ ID NO: 4706745 - DNA, 25 bp, Homo sapien
tctcccgtggtggaatggccatcac

SEQ ID NO: 4706746 - DNA, 25 bp, Homo sapien
gctgagaggcgaagatgtggatccc

SEQ ID NO: 4706747 - DNA, 25 bp, Homo sapien
gattgtcctggttcacgatctccca

SEQ ID NO: 4706748 - DNA, 25 bp, Homo sapien
cacctttctcccagtcaggtgtgtg

SEQ ID NO: 4706749 - DNA, 25 bp, Homo sapien
aagtgagggctgtagtgattgtcct

SEQ ID NO: 4706750 - DNA, 25 bp, Homo sapien
cgaccttcttcaacatgcggatctc

SEQ ID NO: 4706751 - DNA, 25 bp, Homo sapien
gaccgacacgaccttcttcaacatg

SEQ ID NO: 4706752 - DNA, 25 bp, Homo sapien
gacacgaccttcttcaacatgcgga

SEQ ID NO: 4706753 - DNA, 25 bp, Homo sapien
cggatggaccgacacgaccttcttc

SEQ ID NO: 4706754 - DNA, 25 bp, Homo sapien
tccactacaaggagcccagcagatt

SEQ ID NO: 4706755 - DNA, 25 bp, Homo sapien
gaaaagccaatgtgaccatcagcac

SEQ ID NO: 4706756 - DNA, 25 bp, Homo sapien
cagcagattcatgtgcgaaggtcac

SEQ ID NO: 4706757 - DNA, 25 bp, Homo sapien
cacaggctgagtgttcccgagcaag

SEQ ID NO: 4706758 - DNA, 25 bp, Homo sapien
cactgtggccagctcccggtcttct

SEQ ID NO: 4706759 - DNA, 25 bp, Homo sapien
actgtggccagctcccggtcttctg

SEQ ID NO: 4706760 - DNA, 25 bp, Homo sapien
gtgttgtacgtgcaggaggtgatga

SEQ ID NO: 4706761 - DNA, 25 bp, Homo sapien
actgccaagaggacgacatgggcca

SEQ ID NO: 4706762 - DNA, 25 bp, Homo sapien
gggaagccacagaactgcccacggg

SEQ ID NO: 4706763 - DNA, 25 bp, Homo sapien
tgtggccactgccaagaggacgaca

SEQ ID NO: 4706764 - DNA, 25 bp, Homo sapien
gggacgctggcaccgagggcctcaa

SEQ ID NO: 4706765 - DNA, 25 bp, Homo sapien
gggtagtagtgcacgtagttgacac

SEQ ID NO: 4706766 - DNA, 25 bp, Homo sapien
ctgcaggaagccggcgtccacagcg

SEQ ID NO: 4706767 - DNA, 25 bp, Homo sapien
gcgtccacagcgctcttgcagagct

SEQ ID NO: 4706768 - DNA, 25 bp, Homo sapien
gtagtagtgcacgtagttgacacac

SEQ ID NO: 4706769 - DNA, 25 bp, Homo sapien
cttggcgggtgggtaatggctgctg

SEQ ID NO: 4706770 - DNA, 25 bp, Homo sapien
accttggcgggtgggtaatggctgc

SEQ ID NO: 4706771 - DNA, 25 bp, Homo sapien
tcaccttggcgggtgggtaatggct

SEQ ID NO: 4706772 - DNA, 25 bp, Homo sapien
gtcaccttggcgggtgggtaatggc

SEQ ID NO: 4706773 - DNA, 25 bp, Homo sapien
tgtacagggccttcagtacgtcgcg

SEQ ID NO: 4706774 - DNA, 25 bp, Homo sapien
agatgggcgcgaagctgtacagggc

SEQ ID NO: 4706775 - DNA, 25 bp, Homo sapien
acggctgaggacttgttgcagtgca

SEQ ID NO: 4706776 - DNA, 25 bp, Homo sapien
tccagggaacagaggtgaactgctg

SEQ ID NO: 4706777 - DNA, 25 bp, Homo sapien
gggctcttccagtgtggagatgacc

SEQ ID NO: 4706778 - DNA, 25 bp, Homo sapien
ccccaccaatgctgacaacggtggg

SEQ ID NO: 4706779 - DNA, 25 bp, Homo sapien
gcccccaccaatgctgacaacggtg

SEQ ID NO: 4706780 - DNA, 25 bp, Homo sapien
caatgctgacaacggtggggccagc

SEQ ID NO: 4706781 - DNA, 25 bp, Homo sapien
tattggctcattagcccgcacggca

SEQ ID NO: 4706782 - DNA, 25 bp, Homo sapien
tccactcggtccagggtaggtcaac

SEQ ID NO: 4706783 - DNA, 25 bp, Homo sapien
ggaaatgtttaagcggcacccgcac

SEQ ID NO: 4706784 - DNA, 25 bp, Homo sapien
taactagctaaatgcctggtcctgc

SEQ ID NO: 4706785 - DNA, 25 bp, Homo sapien
gctcccaagtgcaccgcccggggac

SEQ ID NO: 4706786 - DNA, 25 bp, Homo sapien
ccgcccggggaccacatcacaaaag

SEQ ID NO: 4706787 - DNA, 25 bp, Homo sapien
agtgcaccgcccggggaccacatca

SEQ ID NO: 4706788 - DNA, 25 bp, Homo sapien
cacatcacaaaagacccaccttccc

SEQ ID NO: 4706789 - DNA, 25 bp, Homo sapien
aagctcatcacctgcgggctccatc

SEQ ID NO: 4706790 - DNA, 25 bp, Homo sapien
gctcatcacctgcgggctccatccc

SEQ ID NO: 4706791 - DNA, 25 bp, Homo sapien
tgcgctgccagaggtcctggccccg

SEQ ID NO: 4706792 - DNA, 25 bp, Homo sapien
caagctcatcacctgcgggctccat

SEQ ID NO: 4706793 - DNA, 25 bp, Homo sapien
ggagagagaacctggctgcgctccc

SEQ ID NO: 4706794 - DNA, 25 bp, Homo sapien
agagcccgggttccgctccaaattg

SEQ ID NO: 4706795 - DNA, 25 bp, Homo sapien
caaattgtttctcgtggctgcagct

SEQ ID NO: 4706796 - DNA, 25 bp, Homo sapien
ctgggcattgatgtgagcgcagcct

SEQ ID NO: 4706797 - DNA, 25 bp, Homo sapien
gcggtttggccatagacccctggat

SEQ ID NO: 4706798 - DNA, 25 bp, Homo sapien
tgaccacattcatctcacggcccat

SEQ ID NO: 4706799 - DNA, 25 bp, Homo sapien
tggcctgcttcctccgggtctgcgg

SEQ ID NO: 4706800 - DNA, 25 bp, Homo sapien
ggattgggccggtgaccacattcat

SEQ ID NO: 4706801 - DNA, 25 bp, Homo sapien
ttggctttcacacgcttcaggctga

SEQ ID NO: 4706802 - DNA, 25 bp, Homo sapien
tgttggctttcacacgcttcaggct

SEQ ID NO: 4706803 - DNA, 25 bp, Homo sapien
gggctgttggctttcacacgcttca

SEQ ID NO: 4706804 - DNA, 25 bp, Homo sapien
gctttcacacgcttcaggctgaagg

SEQ ID NO: 4706805 - DNA, 25 bp, Homo sapien
gggaccaaggccattcttcaggatg

SEQ ID NO: 4706806 - DNA, 25 bp, Homo sapien
tgttgatttggacgcggttcctgcc

SEQ ID NO: 4706807 - DNA, 25 bp, Homo sapien
ggcattgtctgccacagcgcacatg

SEQ ID NO: 4706808 - DNA, 25 bp, Homo sapien
cttgactgatcggtggcgggcttcc

SEQ ID NO: 4706809 - DNA, 25 bp, Homo sapien
ccaagatgggcggattttgcacccc

SEQ ID NO: 4706810 - DNA, 25 bp, Homo sapien
tggcctgcccagtcgtgttgtaaag

SEQ ID NO: 4706811 - DNA, 25 bp, Homo sapien
tgcccttgggcgagatataacttct

SEQ ID NO: 4706812 - DNA, 25 bp, Homo sapien
tttatgtccgtaggagggcaggcac

SEQ ID NO: 4706813 - DNA, 25 bp, Homo sapien
agggctgcttggcccctcaggagca

SEQ ID NO: 4706814 - DNA, 25 bp, Homo sapien
gggctgcttggcccctcaggagcat

SEQ ID NO: 4706815 - DNA, 25 bp, Homo sapien
ggcagcagggctgcttggcccctca

SEQ ID NO: 4706816 - DNA, 25 bp, Homo sapien
agcagggctgcttggcccctcagga

SEQ ID NO: 4706817 - DNA, 25 bp, Homo sapien
gagaaggagggctccctcttgcatt

SEQ ID NO: 4706818 - DNA, 25 bp, Homo sapien
gaaggagggctccctcttgcattct

SEQ ID NO: 4706819 - DNA, 25 bp, Homo sapien
tgagaaggagggctccctcttgcat

SEQ ID NO: 4706820 - DNA, 25 bp, Homo sapien
cctgagaaggagggctccctcttgc

SEQ ID NO: 4706821 - DNA, 25 bp, Homo sapien
tcagtcattcatactgacgtaggtg

SEQ ID NO: 4706822 - DNA, 25 bp, Homo sapien
cttcacatcttggatcacagccaca

SEQ ID NO: 4706823 - DNA, 25 bp, Homo sapien
agcacttcacatcttggatcacagc

SEQ ID NO: 4706824 - DNA, 25 bp, Homo sapien
cattcatactgacgtaggtggcaca

SEQ ID NO: 4706825 - DNA, 25 bp, Homo sapien
aaacagtgttaggccatggagtgga

SEQ ID NO: 4706826 - DNA, 25 bp, Homo sapien
tgctccggggaatgaggatctgcat

SEQ ID NO: 4706827 - DNA, 25 bp, Homo sapien
cagtgttaggccatggagtggagag

SEQ ID NO: 4706828 - DNA, 25 bp, Homo sapien
ggagtggagagggtgctccggggaa

SEQ ID NO: 4706829 - DNA, 25 bp, Homo sapien
tgagtatctggaagggcattcagat

SEQ ID NO: 4706830 - DNA, 25 bp, Homo sapien
gtttcctgccaaggctactcttcca

SEQ ID NO: 4706831 - DNA, 25 bp, Homo sapien
ctttcatccgtggtgggctgctgcc

SEQ ID NO: 4706832 - DNA, 25 bp, Homo sapien
gtgaccagtgactttcatccgtggt

SEQ ID NO: 4706833 - DNA, 25 bp, Homo sapien
caaatctcccgttatatatctgtga

SEQ ID NO: 4706834 - DNA, 25 bp, Homo sapien
cctgggagtccgatggttttcagca

SEQ ID NO: 4706835 - DNA, 25 bp, Homo sapien
catgatcacgaaggacactgagaaa

SEQ ID NO: 4706836 - DNA, 25 bp, Homo sapien
tttttgcactgcactaaggcaggag

SEQ ID NO: 4706837 - DNA, 25 bp, Homo sapien
gcctcgggcgactcaaaataagtgc

SEQ ID NO: 4706838 - DNA, 25 bp, Homo sapien
tgcagcctacaaactgggcctcggg

SEQ ID NO: 4706839 - DNA, 25 bp, Homo sapien
tcttgggggtggctctaccccatta

SEQ ID NO: 4706840 - DNA, 25 bp, Homo sapien
tacaaactgggcctcgggcgactca

SEQ ID NO: 4706841 - DNA, 25 bp, Homo sapien
tcaacgtacgtagaagaggagggca

SEQ ID NO: 4706842 - DNA, 25 bp, Homo sapien
tacatagaggaaacctgggctagcc

SEQ ID NO: 4706843 - DNA, 25 bp, Homo sapien
tgagatggccttcaggagcctaggt

SEQ ID NO: 4706844 - DNA, 25 bp, Homo sapien
tgacggcaggaacgtggacaagact

SEQ ID NO: 4706845 - DNA, 25 bp, Homo sapien
agctgtggccaggtataactttgcc

SEQ ID NO: 4706846 - DNA, 25 bp, Homo sapien
cccgagatatgagggagctttcgct

SEQ ID NO: 4706847 - DNA, 25 bp, Homo sapien
tgacgtggtgaggatctacagccgc

SEQ ID NO: 4706848 - DNA, 25 bp, Homo sapien
gatctacagccgcatcggcggagac

SEQ ID NO: 4706849 - DNA, 25 bp, Homo sapien
catgcagaattaccatggcaaccca

SEQ ID NO: 4706850 - DNA, 25 bp, Homo sapien
gcaggtcccaagatggtggccatgc

SEQ ID NO: 4706851 - DNA, 25 bp, Homo sapien
ttccagacgggcgacgtgcttgagc

SEQ ID NO: 4706852 - DNA, 25 bp, Homo sapien
tgagctgtcctatcctttgcaggtc

SEQ ID NO: 4706853 - DNA, 25 bp, Homo sapien
tgacccctctatctaggaactagtg

SEQ ID NO: 4706854 - DNA, 25 bp, Homo sapien
gggtgcgttgatgcatgggccacag

SEQ ID NO: 4706855 - DNA, 25 bp, Homo sapien
cacagaggtgaaatatattgccagg

SEQ ID NO: 4706856 - DNA, 25 bp, Homo sapien
gggcgtcccatagggaacagtgtcc

SEQ ID NO: 4706857 - DNA, 25 bp, Homo sapien
caggctccatctggttagtacaccc

SEQ ID NO: 4706858 - DNA, 25 bp, Homo sapien
catctagtgtttctcacgtgagccc

SEQ ID NO: 4706859 - DNA, 25 bp, Homo sapien
ggcccagggcaagtctctgtcaaca

SEQ ID NO: 4706860 - DNA, 25 bp, Homo sapien
ggcccagggcgagtctctatcaact

SEQ ID NO: 4706861 - DNA, 25 bp, Homo sapien
tccctcgggcccgagcgtggcccca

SEQ ID NO: 4706862 - DNA, 25 bp, Homo sapien
atgcttgaagccgagtccgcagtgg

SEQ ID NO: 4706863 - DNA, 25 bp, Homo sapien
cttgaagccgagtccgcagtggtgc

SEQ ID NO: 4706864 - DNA, 25 bp, Homo sapien
tgaaatgcttgaagccgagtccgca

SEQ ID NO: 4706865 - DNA, 25 bp, Homo sapien
tgtggcccatgctgcctggtatgtg

SEQ ID NO: 4706866 - DNA, 25 bp, Homo sapien
actgacttcctccaataggcttgga

SEQ ID NO: 4706867 - DNA, 25 bp, Homo sapien
aataggcttggagtcactgtcattt

SEQ ID NO: 4706868 - DNA, 25 bp, Homo sapien
ctgcctggtatgtggcaggtgctca

SEQ ID NO: 4706869 - DNA, 25 bp, Homo sapien
gcagctcgttgggatgagagcccca

SEQ ID NO: 4706870 - DNA, 25 bp, Homo sapien
tctgacgcacgcagagcaggtgcgc

SEQ ID NO: 4706871 - DNA, 25 bp, Homo sapien
tgtaggcagtccagcctttctcgct

SEQ ID NO: 4706872 - DNA, 25 bp, Homo sapien
ttgtgggccccttggtactctggca

SEQ ID NO: 4706873 - DNA, 25 bp, Homo sapien
ggacaccttgggtcagcctgtgctg

SEQ ID NO: 4706874 - DNA, 25 bp, Homo sapien
tgcctgctgtgaccccaacttggtg

SEQ ID NO: 4706875 - DNA, 25 bp, Homo sapien
acagcagtagctggcgatgcccatg

SEQ ID NO: 4706876 - DNA, 25 bp, Homo sapien
gggcccacgtcgaaatgcctgctgt

SEQ ID NO: 4706877 - DNA, 25 bp, Homo sapien
catggtgtgggcttccgtgctgagt

SEQ ID NO: 4706878 - DNA, 25 bp, Homo sapien
tgggaaggcatgcatctgagagacc

SEQ ID NO: 4706879 - DNA, 25 bp, Homo sapien
tgagtgggaaggcatgcatctgaga

SEQ ID NO: 4706880 - DNA, 25 bp, Homo sapien
cggggcatctcctcatgatgggtca

SEQ ID NO: 4706881 - DNA, 25 bp, Homo sapien
tgccctatggcccagttggctcgtc

SEQ ID NO: 4706882 - DNA, 25 bp, Homo sapien
tggcaagtaggcatgggtctcctct

SEQ ID NO: 4706883 - DNA, 25 bp, Homo sapien
tgtgactccgatcagtgtccgcgca

SEQ ID NO: 4706884 - DNA, 25 bp, Homo sapien
gagtgggcgtgacacattccttgcc

SEQ ID NO: 4706885 - DNA, 25 bp, Homo sapien
gcccaccaggaggtgtgcgaggagc

SEQ ID NO: 4706886 - DNA, 25 bp, Homo sapien
caccaggaggtgtgcgaggagcctc

SEQ ID NO: 4706887 - DNA, 25 bp, Homo sapien
caggaggtgtgcgaggagcctcatc

SEQ ID NO: 4706888 - DNA, 25 bp, Homo sapien
ggaggtgtgcgaggagcctcatctc

SEQ ID NO: 4706889 - DNA, 25 bp, Homo sapien
tctgtgtcggcatggggctctgcat

SEQ ID NO: 4706890 - DNA, 25 bp, Homo sapien
tgaggatgtcgtggcagcctcagct

SEQ ID NO: 4706891 - DNA, 25 bp, Homo sapien
tggcactgtctcagcaacggagccc

SEQ ID NO: 4706892 - DNA, 25 bp, Homo sapien
ggcttcttggccgtaaatggcactg

SEQ ID NO: 4706893 - DNA, 25 bp, Homo sapien
tgcttcgtcccctcggcggtgcagt

SEQ ID NO: 4706894 - DNA, 25 bp, Homo sapien
ctgcttcccgaagccgggcacgagg

SEQ ID NO: 4706895 - DNA, 25 bp, Homo sapien
gcttcctgtgcggacatctgcttcg

SEQ ID NO: 4706896 - DNA, 25 bp, Homo sapien
cggtgcagtgggaaactctgcttcc

SEQ ID NO: 4706897 - DNA, 25 bp, Homo sapien
catgcagctgtaggcacagtgagtg

SEQ ID NO: 4706898 - DNA, 25 bp, Homo sapien
cctgcgcgtccaatgtgcccctccc

SEQ ID NO: 4706899 - DNA, 25 bp, Homo sapien
agacccctgcgcgtccaatgtgccc

SEQ ID NO: 4706900 - DNA, 25 bp, Homo sapien
gtgcccctccctctggactgtgggg

SEQ ID NO: 4706901 - DNA, 25 bp, Homo sapien
agggctgcgttcttgttcagatgta

SEQ ID NO: 4706902 - DNA, 25 bp, Homo sapien
ttcattgagggctgcgttcttgttc

SEQ ID NO: 4706903 - DNA, 25 bp, Homo sapien
tcattgagggctgcgttcttgttca

SEQ ID NO: 4706904 - DNA, 25 bp, Homo sapien
ggatgtaactcgaggctctgcctgt

SEQ ID NO: 4706905 - DNA, 25 bp, Homo sapien
tcttctgtgagtcgggttccacttt

SEQ ID NO: 4706906 - DNA, 25 bp, Homo sapien
actgctggtgaacacggtccttggc

SEQ ID NO: 4706907 - DNA, 25 bp, Homo sapien
tgcctgttctctcggagtgctccgg

SEQ ID NO: 4706908 - DNA, 25 bp, Homo sapien
acaaatcctaagtgtttgtccaggg

SEQ ID NO: 4706909 - DNA, 25 bp, Homo sapien
tcagccccgttctctgatggacaaa

SEQ ID NO: 4706910 - DNA, 25 bp, Homo sapien
tggagcagccgtgccagggactggg

SEQ ID NO: 4706911 - DNA, 25 bp, Homo sapien
ctgctggcctgtgggccgcaacgcc

SEQ ID NO: 4706912 - DNA, 25 bp, Homo sapien
cagcagacaagtcggcaggaagtgc

SEQ ID NO: 4706913 - DNA, 25 bp, Homo sapien
tttcccagcagacaagtcggcagga

SEQ ID NO: 4706914 - DNA, 25 bp, Homo sapien
tcccagcagacaagtcggcaggaag

SEQ ID NO: 4706915 - DNA, 25 bp, Homo sapien
tcatttcccagcagacaagtcggca

SEQ ID NO: 4706916 - DNA, 25 bp, Homo sapien
gagggagcaacgtgtgaggggagcc

SEQ ID NO: 4706917 - DNA, 25 bp, Homo sapien
cctggatagagagcggccggggcca

SEQ ID NO: 4706918 - DNA, 25 bp, Homo sapien
ggagcaacgtgtgaggggagccctg

SEQ ID NO: 4706919 - DNA, 25 bp, Homo sapien
gtctgtgcgcctcactgaggaggcc

SEQ ID NO: 4706920 - DNA, 25 bp, Homo sapien
atcttcacgcttgctgggagcccct

SEQ ID NO: 4706921 - DNA, 25 bp, Homo sapien
agtggcctggtgacccgatcactgg

SEQ ID NO: 4706922 - DNA, 25 bp, Homo sapien
catcccctcggggttactgtgggag

SEQ ID NO: 4706923 - DNA, 25 bp, Homo sapien
gggcggacaagtcgctccctctcat

SEQ ID NO: 4706924 - DNA, 25 bp, Homo sapien
caaatgtcacttgtgtcaagatgag

SEQ ID NO: 4706925 - DNA, 25 bp, Homo sapien
cattggctgatcctcgtggacaaat

SEQ ID NO: 4706926 - DNA, 25 bp, Homo sapien
gatcctcgtggacaaatgtcacttg

SEQ ID NO: 4706927 - DNA, 25 bp, Homo sapien
cacttgtgtcaagatgagagaaccc

SEQ ID NO: 4706928 - DNA, 25 bp, Homo sapien
ctgtagccttctctcttgggcacag

SEQ ID NO: 4706929 - DNA, 25 bp, Homo sapien
catccgggctggtgtccctttttct

SEQ ID NO: 4706930 - DNA, 25 bp, Homo sapien
tcccggtggggggcacataccagca

SEQ ID NO: 4706931 - DNA, 25 bp, Homo sapien
cccggtggggggcacataccagcat

SEQ ID NO: 4706932 - DNA, 25 bp, Homo sapien
gtcccggtggggggcacataccagc

SEQ ID NO: 4706933 - DNA, 25 bp, Homo sapien
ttactgacggctgcaaaatctcttt

SEQ ID NO: 4706934 - DNA, 25 bp, Homo sapien
aaatcttgcaagcatgttactgacg

SEQ ID NO: 4706935 - DNA, 25 bp, Homo sapien
ggtaataagatcagcaaattaatcc

SEQ ID NO: 4706936 - DNA, 25 bp, Homo sapien
tttcgatttaggtaataagatcagc

SEQ ID NO: 4706937 - DNA, 25 bp, Homo sapien
agttctcgacgtcctgcaaagcagc

SEQ ID NO: 4706938 - DNA, 25 bp, Homo sapien
tcgcgcagaacaaagggatcaggtg

SEQ ID NO: 4706939 - DNA, 25 bp, Homo sapien
ccagatgcgatgtgctcagttaaca

SEQ ID NO: 4706940 - DNA, 25 bp, Homo sapien
gcaaagcagcgtccccagttctgtg

SEQ ID NO: 4706941 - DNA, 25 bp, Homo sapien
cagcagcatgggatgagtgagccct

SEQ ID NO: 4706942 - DNA, 25 bp, Homo sapien
agtgagccctttaaaggtggcctcg

SEQ ID NO: 4706943 - DNA, 25 bp, Homo sapien
aacagcagcatgggatgagtgagcc

SEQ ID NO: 4706944 - DNA, 25 bp, Homo sapien
acagcagcatgggatgagtgagccc

SEQ ID NO: 4706945 - DNA, 25 bp, Homo sapien
tcctcggagggattgatcagccacg

SEQ ID NO: 4706946 - DNA, 25 bp, Homo sapien
gcttgggtgccctgtagttgccaaa

SEQ ID NO: 4706947 - DNA, 25 bp, Homo sapien
atcagccacgtctgccgcaggaggt

SEQ ID NO: 4706948 - DNA, 25 bp, Homo sapien
tccttagactccacggaggagggct

SEQ ID NO: 4706949 - DNA, 25 bp, Homo sapien
catagcagctgtagaaattgtccac

SEQ ID NO: 4706950 - DNA, 25 bp, Homo sapien
ccagtgccagctaggaagcctgaaa

SEQ ID NO: 4706951 - DNA, 25 bp, Homo sapien
cagatgcatggacgcaggagaacca

SEQ ID NO: 4706952 - DNA, 25 bp, Homo sapien
tcactggagtgtggttccccgtggt

SEQ ID NO: 4706953 - DNA, 25 bp, Homo sapien
gattgctttcacaggcagcgtctgc

SEQ ID NO: 4706954 - DNA, 25 bp, Homo sapien
cggagcactgtgcagagacagctgc

SEQ ID NO: 4706955 - DNA, 25 bp, Homo sapien
cgctcctgtcttgggtgctgattgc

SEQ ID NO: 4706956 - DNA, 25 bp, Homo sapien
attggtccaggcgtttcccagggca

SEQ ID NO: 4706957 - DNA, 25 bp, Homo sapien
tatccccgctttttcctggtggaca

SEQ ID NO: 4706958 - DNA, 25 bp, Homo sapien
tgcagccacagcagcgctgagtgat

SEQ ID NO: 4706959 - DNA, 25 bp, Homo sapien
gaggcgccatctgtgcctggctcct

SEQ ID NO: 4706960 - DNA, 25 bp, Homo sapien
cagcagcgctgagtgatgcccagga

SEQ ID NO: 4706961 - DNA, 25 bp, Homo sapien
ccttgccccctaccactcttgtctc

SEQ ID NO: 4706962 - DNA, 25 bp, Homo sapien
tctgctggcagcggtcagtggtgct

SEQ ID NO: 4706963 - DNA, 25 bp, Homo sapien
ttgccccctaccactcttgtctcca

SEQ ID NO: 4706964 - DNA, 25 bp, Homo sapien
gctggcagcggtcagtggtgctggg

SEQ ID NO: 4706965 - DNA, 25 bp, Homo sapien
gcggagggagcctctcctcgtacag

SEQ ID NO: 4706966 - DNA, 25 bp, Homo sapien
ggagcctctcctcgtacagccaggg

SEQ ID NO: 4706967 - DNA, 25 bp, Homo sapien
cagaagggggtctagcaggccgggc

SEQ ID NO: 4706968 - DNA, 25 bp, Homo sapien
gaagaaaggcgctggcaactgtttg

SEQ ID NO: 4706969 - DNA, 25 bp, Homo sapien
cgcaggccggcggagagtgctgagc

SEQ ID NO: 4706970 - DNA, 25 bp, Homo sapien
ggcaaagagacttcgcctgctgagc

SEQ ID NO: 4706971 - DNA, 25 bp, Homo sapien
ctgtgagacgcaggccggcggagag

SEQ ID NO: 4706972 - DNA, 25 bp, Homo sapien
agagacttcgcctgctgagcctaag

SEQ ID NO: 4706973 - DNA, 25 bp, Homo sapien
ttgtgtggctcctacggccgcagag

SEQ ID NO: 4706974 - DNA, 25 bp, Homo sapien
ttggctctgtagtgcgtgtggttcg

SEQ ID NO: 4706975 - DNA, 25 bp, Homo sapien
tcgtgtgaggccttccttgtgtggc

SEQ ID NO: 4706976 - DNA, 25 bp, Homo sapien
cctacggccgcagaggtgccagcaa

SEQ ID NO: 4706977 - DNA, 25 bp, Homo sapien
tcaaaggttaagctctgtcctgtga

SEQ ID NO: 4706978 - DNA, 25 bp, Homo sapien
ggtggcggggacgtggccactgctt

SEQ ID NO: 4706979 - DNA, 25 bp, Homo sapien
gctggatcgggaccccctggtgtgg

SEQ ID NO: 4706980 - DNA, 25 bp, Homo sapien
tccccctgcggttgtgacttcctgg

SEQ ID NO: 4706981 - DNA, 25 bp, Homo sapien
cactgcttgggggatccccctgcgg

SEQ ID NO: 4706982 - DNA, 25 bp, Homo sapien
agcacgtacttgctgcgtgtctgat

SEQ ID NO: 4706983 - DNA, 25 bp, Homo sapien
ctccccagtgttgccgtgatgccag

SEQ ID NO: 4706984 - DNA, 25 bp, Homo sapien
tgctgcgtgtctgatctgcgccctc

SEQ ID NO: 4706985 - DNA, 25 bp, Homo sapien
ccagtgttgccgtgatgccagccgg

SEQ ID NO: 4706986 - DNA, 25 bp, Homo sapien
tgaaaccttgacgccctcctttgta

SEQ ID NO: 4706987 - DNA, 25 bp, Homo sapien
tttgtagccccgcacactcgctggg

SEQ ID NO: 4706988 - DNA, 25 bp, Homo sapien
cttgacgccctcctttgtagccccg

SEQ ID NO: 4706989 - DNA, 25 bp, Homo sapien
gccctcctttgtagccccgcacact

SEQ ID NO: 4706990 - DNA, 25 bp, Homo sapien
gggcagggcaggcgcttccactgcg

SEQ ID NO: 4706991 - DNA, 25 bp, Homo sapien
caggcgcttccactgcggctggaca

SEQ ID NO: 4706992 - DNA, 25 bp, Homo sapien
aggcgcttccactgcggctggacat

SEQ ID NO: 4706993 - DNA, 25 bp, Homo sapien
cagggcaggcgcttccactgcggct

SEQ ID NO: 4706994 - DNA, 25 bp, Homo sapien
cccaaaggaggtgcgatttctgcgt

SEQ ID NO: 4706995 - DNA, 25 bp, Homo sapien
tgccccaaaggaggtgcgatttctg

SEQ ID NO: 4706996 - DNA, 25 bp, Homo sapien
tcaccctgccccaaaggaggtgcga

SEQ ID NO: 4706997 - DNA, 25 bp, Homo sapien
cctgccccaaaggaggtgcgatttc

SEQ ID NO: 4706998 - DNA, 25 bp, Homo sapien
gtgggcttggagcagctgcgttcag

SEQ ID NO: 4706999 - DNA, 25 bp, Homo sapien
ggggcatgcgctccctggagtagca

SEQ ID NO: 4707000 - DNA, 25 bp, Homo sapien
tgggcttggagcagctgcgttcagc

SEQ ID NO: 4707001 - DNA, 25 bp, Homo sapien
agcttctgctggggcatgcgctccc

SEQ ID NO: 4707002 - DNA, 25 bp, Homo sapien
ctgtccgtgtttggccttgggttca

SEQ ID NO: 4707003 - DNA, 25 bp, Homo sapien
tgtccgtgtttggccttgggttcaa

SEQ ID NO: 4707004 - DNA, 25 bp, Homo sapien
gacgttggtcttatcgtgtccacga

SEQ ID NO: 4707005 - DNA, 25 bp, Homo sapien
tggacacagcggtttctatggaaac

SEQ ID NO: 4707006 - DNA, 25 bp, Homo sapien
tcccagagctgcatccgtctgtctg

SEQ ID NO: 4707007 - DNA, 25 bp, Homo sapien
catctgtgagagtgacgtggctcct

SEQ ID NO: 4707008 - DNA, 25 bp, Homo sapien
cagggcccagcgtcctgtaattggg

SEQ ID NO: 4707009 - DNA, 25 bp, Homo sapien
tcatttccatgctgttcgtgtcgtc

SEQ ID NO: 4707010 - DNA, 25 bp, Homo sapien
gaatgcgaatgacgggctgtccgcc

SEQ ID NO: 4707011 - DNA, 25 bp, Homo sapien
gctgttcgtgtcgtctccttgcgaa

SEQ ID NO: 4707012 - DNA, 25 bp, Homo sapien
tttggagctggccggagtgggtgtc

SEQ ID NO: 4707013 - DNA, 25 bp, Homo sapien
gctggccggagtgggtgtcggccat

SEQ ID NO: 4707014 - DNA, 25 bp, Homo sapien
gagctggccggagtgggtgtcggcc

SEQ ID NO: 4707015 - DNA, 25 bp, Homo sapien
tggagctggccggagtgggtgtcgg

SEQ ID NO: 4707016 - DNA, 25 bp, Homo sapien
cttcttgggtcagttgcaccaggtc

SEQ ID NO: 4707017 - DNA, 25 bp, Homo sapien
gccggtgctgatggccggcaccatc

SEQ ID NO: 4707018 - DNA, 25 bp, Homo sapien
tgaaggagcttaggtctccttcttg

SEQ ID NO: 4707019 - DNA, 25 bp, Homo sapien
tcttgggtcagttgcaccaggtctg

SEQ ID NO: 4707020 - DNA, 25 bp, Homo sapien
ccttagattcctggaggggtttgtg

SEQ ID NO: 4707021 - DNA, 25 bp, Homo sapien
gcgccaggatctggagcctcttggg

SEQ ID NO: 4707022 - DNA, 25 bp, Homo sapien
gggtccagggtgggcgccaggatct

SEQ ID NO: 4707023 - DNA, 25 bp, Homo sapien
ggcgccaggatctggagcctcttgg

SEQ ID NO: 4707024 - DNA, 25 bp, Homo sapien
aggacatggaggctcggagcatcca

SEQ ID NO: 4707025 - DNA, 25 bp, Homo sapien
tttggcctctggagcgcagctgtcc

SEQ ID NO: 4707026 - DNA, 25 bp, Homo sapien
tgcatggtagggacgtcggcccatc

SEQ ID NO: 4707027 - DNA, 25 bp, Homo sapien
tgacgtgcagaccactaaggcaggc

SEQ ID NO: 4707028 - DNA, 25 bp, Homo sapien
gcatttcaggctccgcaaatctggg

SEQ ID NO: 4707029 - DNA, 25 bp, Homo sapien
ggagtctccccgcttccagtgctgg

SEQ ID NO: 4707030 - DNA, 25 bp, Homo sapien
gcttccagtgctggccgcatttcag

SEQ ID NO: 4707031 - DNA, 25 bp, Homo sapien
gaaacatctcaatgtgggagtctcc

SEQ ID NO: 4707032 - DNA, 25 bp, Homo sapien
tgcaagtgcatttgccgtcctgagc

SEQ ID NO: 4707033 - DNA, 25 bp, Homo sapien
gagcctgctcactcatcgaattcca

SEQ ID NO: 4707034 - DNA, 25 bp, Homo sapien
cgaattccacgtggtcgtctgggag

SEQ ID NO: 4707035 - DNA, 25 bp, Homo sapien
tcggctggacacgtgctttgttgca

SEQ ID NO: 4707036 - DNA, 25 bp, Homo sapien
gcatgtcgtccgactccactgggag

SEQ ID NO: 4707037 - DNA, 25 bp, Homo sapien
cgacggccccgtggccggttgctgt

SEQ ID NO: 4707038 - DNA, 25 bp, Homo sapien
gccccgtggccggttgctgtgtcct

SEQ ID NO: 4707039 - DNA, 25 bp, Homo sapien
gagcagcgggcatgtcgtccgactc

SEQ ID NO: 4707040 - DNA, 25 bp, Homo sapien
atggcagtcggcagggcctaggcag

SEQ ID NO: 4707041 - DNA, 25 bp, Homo sapien
agggcaatggcagtcggcagggcct

SEQ ID NO: 4707042 - DNA, 25 bp, Homo sapien
ggaaggaagggcaatggcagtcggc

SEQ ID NO: 4707043 - DNA, 25 bp, Homo sapien
ggcaatggcagtcggcagggcctag

SEQ ID NO: 4707044 - DNA, 25 bp, Homo sapien
aggccccattgtccatcagctcccc

SEQ ID NO: 4707045 - DNA, 25 bp, Homo sapien
gggtcttccaggtcatttctgtgct

SEQ ID NO: 4707046 - DNA, 25 bp, Homo sapien
ttgtccatcagctccccagatgtca

SEQ ID NO: 4707047 - DNA, 25 bp, Homo sapien
catcagctccccagatgtcacaggg

SEQ ID NO: 4707048 - DNA, 25 bp, Homo sapien
gggggccgagcagcatagcggccat

SEQ ID NO: 4707049 - DNA, 25 bp, Homo sapien
agggggccgagcagcatagcggcca

SEQ ID NO: 4707050 - DNA, 25 bp, Homo sapien
ggccttggggagcagtggccttcct

SEQ ID NO: 4707051 - DNA, 25 bp, Homo sapien
gcctggtgggcttgttggcctgggc

SEQ ID NO: 4707052 - DNA, 25 bp, Homo sapien
tggccttcctctggtgtggcctgag

SEQ ID NO: 4707053 - DNA, 25 bp, Homo sapien
ggcagggcttgctgggttcgatggt

SEQ ID NO: 4707054 - DNA, 25 bp, Homo sapien
tgtgaggttgagtgaccgagggccc

SEQ ID NO: 4707055 - DNA, 25 bp, Homo sapien
ggtgtgaggttgagtgaccgagggc

SEQ ID NO: 4707056 - DNA, 25 bp, Homo sapien
gtgaggttgagtgaccgagggcccc

SEQ ID NO: 4707057 - DNA, 25 bp, Homo sapien
gagggtgtgaggttgagtgaccgag

SEQ ID NO: 4707058 - DNA, 25 bp, Homo sapien
gtccttgtctggcttgggggcatca

SEQ ID NO: 4707059 - DNA, 25 bp, Homo sapien
gcgggtccttgtctggcttgggggc

SEQ ID NO: 4707060 - DNA, 25 bp, Homo sapien
ggttggggtggtcactgcagttggg

SEQ ID NO: 4707061 - DNA, 25 bp, Homo sapien
gtcactgcagttggggggcgggtcc

SEQ ID NO: 4707062 - DNA, 25 bp, Homo sapien
ccctcccagcggttcccatagtgga

SEQ ID NO: 4707063 - DNA, 25 bp, Homo sapien
tagtggaggcgcagacccactacag

SEQ ID NO: 4707064 - DNA, 25 bp, Homo sapien
gagtcttcctgggccgttaggttca

SEQ ID NO: 4707065 - DNA, 25 bp, Homo sapien
cttggtgcagggtgcctttgtgtac

SEQ ID NO: 4707066 - DNA, 25 bp, Homo sapien
tgcaaaaccaaaccaggcaagcggt

SEQ ID NO: 4707067 - DNA, 25 bp, Homo sapien
tgccctcaccagattgtgggtgcct

SEQ ID NO: 4707068 - DNA, 25 bp, Homo sapien
tgggcccacaatggccttgccctca

SEQ ID NO: 4707069 - DNA, 25 bp, Homo sapien
aagcggttggaagtccgctcccgag

SEQ ID NO: 4707070 - DNA, 25 bp, Homo sapien
cagcccttctcccacgtgtgttgga

SEQ ID NO: 4707071 - DNA, 25 bp, Homo sapien
ctgatctaagttcaccagcgggagc

SEQ ID NO: 4707072 - DNA, 25 bp, Homo sapien
ctgttttgtactaaaacactcctgg

SEQ ID NO: 4707073 - DNA, 25 bp, Homo sapien
gccgggactgtagccgcagctgatc

SEQ ID NO: 4707074 - DNA, 25 bp, Homo sapien
gatttggacggacatagcctcgtgt

SEQ ID NO: 4707075 - DNA, 25 bp, Homo sapien
aagcctccggctcgtttgtgtggca

SEQ ID NO: 4707076 - DNA, 25 bp, Homo sapien
tcagcccgggtctcatgttcccaga

SEQ ID NO: 4707077 - DNA, 25 bp, Homo sapien
acagatggaaaagcgccactgcgtc

SEQ ID NO: 4707078 - DNA, 25 bp, Homo sapien
ggctgcagctcccatgctcggaccc

SEQ ID NO: 4707079 - DNA, 25 bp, Homo sapien
atgctcggacccagcaccagtgaca

SEQ ID NO: 4707080 - DNA, 25 bp, Homo sapien
ccagtgacatatgggtgttgatata

SEQ ID NO: 4707081 - DNA, 25 bp, Homo sapien
ccagcaccagtgacatatgggtgtt

SEQ ID NO: 4707082 - DNA, 25 bp, Homo sapien
gggggcgcccctctcagagtgccag

SEQ ID NO: 4707083 - DNA, 25 bp, Homo sapien
gggcgcccctctcagagtgccagct

SEQ ID NO: 4707084 - DNA, 25 bp, Homo sapien
ggggcgcccctctcagagtgccagc

SEQ ID NO: 4707085 - DNA, 25 bp, Homo sapien
tcctgggaccatgtgcgcaggctct

SEQ ID NO: 4707086 - DNA, 25 bp, Homo sapien
gcaccacccctgacaaggactttgg

SEQ ID NO: 4707087 - DNA, 25 bp, Homo sapien
tctcgctggtgtagtgaggtccctt

SEQ ID NO: 4707088 - DNA, 25 bp, Homo sapien
tgtctcccgttctgtgtggtggcaa

SEQ ID NO: 4707089 - DNA, 25 bp, Homo sapien
cccaaacctccctctccactttgtg

SEQ ID NO: 4707090 - DNA, 25 bp, Homo sapien
aaacctccctctccactttgtggag

SEQ ID NO: 4707091 - DNA, 25 bp, Homo sapien
caaacctccctctccactttgtgga

SEQ ID NO: 4707092 - DNA, 25 bp, Homo sapien
ccaaacctccctctccactttgtgg

SEQ ID NO: 4707093 - DNA, 25 bp, Homo sapien
caatgaggactagagtcaaggcgtc

SEQ ID NO: 4707094 - DNA, 25 bp, Homo sapien
gactagagtcaaggcgtcagaaagt

SEQ ID NO: 4707095 - DNA, 25 bp, Homo sapien
ggagaattccctgatgtccccagag

SEQ ID NO: 4707096 - DNA, 25 bp, Homo sapien
aattccctgatgtccccagagccaa

SEQ ID NO: 4707097 - DNA, 25 bp, Homo sapien
tccttgggagaaagtcagctggccg

SEQ ID NO: 4707098 - DNA, 25 bp, Homo sapien
tcattgcaccacctgtgctccttgg

SEQ ID NO: 4707099 - DNA, 25 bp, Homo sapien
tagaacgccagatcgtgctgaatcc

SEQ ID NO: 4707100 - DNA, 25 bp, Homo sapien
tggccgttggcaggtggagtctgta

SEQ ID NO: 4707101 - DNA, 25 bp, Homo sapien
tctcctgaaaatgggttcacatcag

SEQ ID NO: 4707102 - DNA, 25 bp, Homo sapien
tcctctcctgaaaatgggttcacat

SEQ ID NO: 4707103 - DNA, 25 bp, Homo sapien
aatgggttcacatcaggaacaggta

SEQ ID NO: 4707104 - DNA, 25 bp, Homo sapien
ctgaaaatgggttcacatcaggaac

SEQ ID NO: 4707105 - DNA, 25 bp, Homo sapien
agaatctgggagttgtgctcgtgga

SEQ ID NO: 4707106 - DNA, 25 bp, Homo sapien
gagttgtgctcgtggaagtggcgat

SEQ ID NO: 4707107 - DNA, 25 bp, Homo sapien
tctgggagttgtgctcgtggaagtg

SEQ ID NO: 4707108 - DNA, 25 bp, Homo sapien
ggaagtggcgatgggccggggctta

SEQ ID NO: 4707109 - DNA, 25 bp, Homo sapien
ccaccgagaaggagtctgccgcctt

SEQ ID NO: 4707110 - DNA, 25 bp, Homo sapien
accgagaaggagtctgccgcctttc

SEQ ID NO: 4707111 - DNA, 25 bp, Homo sapien
gtgccaccgagaaggagtctgccgc

SEQ ID NO: 4707112 - DNA, 25 bp, Homo sapien
aatgggtgccaccgagaaggagtct

SEQ ID NO: 4707113 - DNA, 25 bp, Homo sapien
ctgggctccgcggaggacatgcggt

SEQ ID NO: 4707114 - DNA, 25 bp, Homo sapien
ggcagcggggaccttccatcttcca

SEQ ID NO: 4707115 - DNA, 25 bp, Homo sapien
gggcagcggggaccttccatcttcc

SEQ ID NO: 4707116 - DNA, 25 bp, Homo sapien
tccgcggaggacatgcggttgggtg

SEQ ID NO: 4707117 - DNA, 25 bp, Homo sapien
tgtctggcctcctggcacgtggctc

SEQ ID NO: 4707118 - DNA, 25 bp, Homo sapien
cgtggctcagcgcagagaacaggtg

SEQ ID NO: 4707119 - DNA, 25 bp, Homo sapien
gcctgtctggcctcctggcacgtgg

SEQ ID NO: 4707120 - DNA, 25 bp, Homo sapien
gtggctcagcgcagagaacaggtgc

SEQ ID NO: 4707121 - DNA, 25 bp, Homo sapien
agtgagtgaggcctggttctcggtg

SEQ ID NO: 4707122 - DNA, 25 bp, Homo sapien
cctggttctcggtgtgcggtaagag

SEQ ID NO: 4707123 - DNA, 25 bp, Homo sapien
aggcctggttctcggtgtgcggtaa

SEQ ID NO: 4707124 - DNA, 25 bp, Homo sapien
gagtgaggcctggttctcggtgtgc

SEQ ID NO: 4707125 - DNA, 25 bp, Homo sapien
gcagcaggcggccagtatgttgccc

SEQ ID NO: 4707126 - DNA, 25 bp, Homo sapien
ctagtggaggtgcggccccgtgtcg

SEQ ID NO: 4707127 - DNA, 25 bp, Homo sapien
aggtgcggccccgtgtcgtcaggca

SEQ ID NO: 4707128 - DNA, 25 bp, Homo sapien
cccgtgtcgtcaggcagccgcagca

SEQ ID NO: 4707129 - DNA, 25 bp, Homo sapien
taatatacagcctgcgggttggcag

SEQ ID NO: 4707130 - DNA, 25 bp, Homo sapien
tgtttggttcataatatacagcctg

SEQ ID NO: 4707131 - DNA, 25 bp, Homo sapien
caagtgtttggttcataatatacag

SEQ ID NO: 4707132 - DNA, 25 bp, Homo sapien
cgggttggcagccagaagccatcac

SEQ ID NO: 4707133 - DNA, 25 bp, Homo sapien
tcaattttggtagccgagtccctac

SEQ ID NO: 4707134 - DNA, 25 bp, Homo sapien
ggaacttgtacctgcttgagggtca

SEQ ID NO: 4707135 - DNA, 25 bp, Homo sapien
tgtgtggccaagacctcaagagcag

SEQ ID NO: 4707136 - DNA, 25 bp, Homo sapien
ggaagcctatgggtctttgcctcaa

SEQ ID NO: 4707137 - DNA, 25 bp, Homo sapien
aagtgtatccagatgccgtctcagc

SEQ ID NO: 4707138 - DNA, 25 bp, Homo sapien
gtgtatccagatgccgtctcagcca

SEQ ID NO: 4707139 - DNA, 25 bp, Homo sapien
gacaagtgtatccagatgccgtctc

SEQ ID NO: 4707140 - DNA, 25 bp, Homo sapien
caagtgtatccagatgccgtctcag

SEQ ID NO: 4707141 - DNA, 25 bp, Homo sapien
cactgtccggacttgaacttgaggg

SEQ ID NO: 4707142 - DNA, 25 bp, Homo sapien
tggacccacgaagacaccattgagg

SEQ ID NO: 4707143 - DNA, 25 bp, Homo sapien
ccaggtgagagtggacccacgaaga

SEQ ID NO: 4707144 - DNA, 25 bp, Homo sapien
actgtccggacttgaacttgagggc

SEQ ID NO: 4707145 - DNA, 25 bp, Homo sapien
gggacaggccgcatcactacgtcca

SEQ ID NO: 4707146 - DNA, 25 bp, Homo sapien
gccgcatcactacgtccaggatgag

SEQ ID NO: 4707147 - DNA, 25 bp, Homo sapien
ggacaggccactggggtcgctggtg

SEQ ID NO: 4707148 - DNA, 25 bp, Homo sapien
gcatcactacgtccaggatgaggga

SEQ ID NO: 4707149 - DNA, 25 bp, Homo sapien
tgtgctctgcggtacagtggagctg

SEQ ID NO: 4707150 - DNA, 25 bp, Homo sapien
actagcaaggcagctgttgcacgca

SEQ ID NO: 4707151 - DNA, 25 bp, Homo sapien
cgtttttatctgctcggctgtgccc

SEQ ID NO: 4707152 - DNA, 25 bp, Homo sapien
gcagctgttgcacgcagcacagttg

SEQ ID NO: 4707153 - DNA, 25 bp, Homo sapien
cctcctccacgggagtaatcacttg

SEQ ID NO: 4707154 - DNA, 25 bp, Homo sapien
ggacctttatgtccacgagcacctg

SEQ ID NO: 4707155 - DNA, 25 bp, Homo sapien
cacttgtggctactggacctttatg

SEQ ID NO: 4707156 - DNA, 25 bp, Homo sapien
cacgggagtaatcacttgtggctac

SEQ ID NO: 4707157 - DNA, 25 bp, Homo sapien
gccagctggcgacgctggacgcaca

SEQ ID NO: 4707158 - DNA, 25 bp, Homo sapien
gtgccagctggcgacgctggacgca

SEQ ID NO: 4707159 - DNA, 25 bp, Homo sapien
agctggcgacgctggacgcacacca

SEQ ID NO: 4707160 - DNA, 25 bp, Homo sapien
tgaagtgccagctggcgacgctgga

SEQ ID NO: 4707161 - DNA, 25 bp, Homo sapien
cattgtcattgggatccgtccagct

SEQ ID NO: 4707162 - DNA, 25 bp, Homo sapien
gggatagttgccattgacagtgtgc

SEQ ID NO: 4707163 - DNA, 25 bp, Homo sapien
gcaactggtgcacggtaacatggct

SEQ ID NO: 4707164 - DNA, 25 bp, Homo sapien
tcctgtgacgtgaggacagtggtcc

SEQ ID NO: 4707165 - DNA, 25 bp, Homo sapien
caggcagatggacccctggaaaccc

SEQ ID NO: 4707166 - DNA, 25 bp, Homo sapien
ctctcatccaggctcggtggagcca

SEQ ID NO: 4707167 - DNA, 25 bp, Homo sapien
ctcatccaggctcggtggagccagg

SEQ ID NO: 4707168 - DNA, 25 bp, Homo sapien
ctcctctcatccaggctcggtggag

SEQ ID NO: 4707169 - DNA, 25 bp, Homo sapien
ttgctgcttaagggcggtctccgcc

SEQ ID NO: 4707170 - DNA, 25 bp, Homo sapien
gctgcttaagggcggtctccgccca

SEQ ID NO: 4707171 - DNA, 25 bp, Homo sapien
tgcttaagggcggtctccgcccact

SEQ ID NO: 4707172 - DNA, 25 bp, Homo sapien
cttaagggcggtctccgcccactgg

SEQ ID NO: 4707173 - DNA, 25 bp, Homo sapien
ggccggggcgtatttgttgcagtcc

SEQ ID NO: 4707174 - DNA, 25 bp, Homo sapien
ttgctgggccggggcgtatttgttg

SEQ ID NO: 4707175 - DNA, 25 bp, Homo sapien
tgggccggggcgtatttgttgcagt

SEQ ID NO: 4707176 - DNA, 25 bp, Homo sapien
tgctgggccggggcgtatttgttgc

SEQ ID NO: 4707177 - DNA, 25 bp, Homo sapien
gagcctgacggttctgctctgccag

SEQ ID NO: 4707178 - DNA, 25 bp, Homo sapien
gctgtggtcagcacttccaaatgga

SEQ ID NO: 4707179 - DNA, 25 bp, Homo sapien
gctgggacgttcaccacggtctgga

SEQ ID NO: 4707180 - DNA, 25 bp, Homo sapien
tgtggtcagcacttccaaatggagt

SEQ ID NO: 4707181 - DNA, 25 bp, Homo sapien
tccccatgtctcaccgtggcggtca

SEQ ID NO: 4707182 - DNA, 25 bp, Homo sapien
gcagcccttgtcatcgtccatggtt

SEQ ID NO: 4707183 - DNA, 25 bp, Homo sapien
agcccttgtcatcgtccatggtttc

SEQ ID NO: 4707184 - DNA, 25 bp, Homo sapien
accgtggcggtcagtggtggtgctg

SEQ ID NO: 4707185 - DNA, 25 bp, Homo sapien
ggactgggcagatggccgttccgcc

SEQ ID NO: 4707186 - DNA, 25 bp, Homo sapien
gctgtttctccacgaggactgggca

SEQ ID NO: 4707187 - DNA, 25 bp, Homo sapien
aagctgtttctccacgaggactggg

SEQ ID NO: 4707188 - DNA, 25 bp, Homo sapien
cagatggccgttccgccccagccaa

SEQ ID NO: 4707189 - DNA, 25 bp, Homo sapien
gcactcctcgtgggtctgtgtctcc

SEQ ID NO: 4707190 - DNA, 25 bp, Homo sapien
tgcactcctcgtgggtctgtgtctc

SEQ ID NO: 4707191 - DNA, 25 bp, Homo sapien
atgcactcctcgtgggtctgtgtct

SEQ ID NO: 4707192 - DNA, 25 bp, Homo sapien
cttaaaggttagggtggccagagtg

SEQ ID NO: 4707193 - DNA, 25 bp, Homo sapien
agcaacctcagccttgggtccggtc

SEQ ID NO: 4707194 - DNA, 25 bp, Homo sapien
tgattggctccagagcgaccacaga

SEQ ID NO: 4707195 - DNA, 25 bp, Homo sapien
tagaacctggaccttgaggctctga

SEQ ID NO: 4707196 - DNA, 25 bp, Homo sapien
gtggccatgatgcacctgcagcaac

SEQ ID NO: 4707197 - DNA, 25 bp, Homo sapien
gatttcagcctgattagatctgcgg

SEQ ID NO: 4707198 - DNA, 25 bp, Homo sapien
tagatctgcggctgccgatgaatgg

SEQ ID NO: 4707199 - DNA, 25 bp, Homo sapien
tcattgcagcgccagagcctggaca

SEQ ID NO: 4707200 - DNA, 25 bp, Homo sapien
gggctgacgtttccagggcacacta

SEQ ID NO: 4707201 - DNA, 25 bp, Homo sapien
cagtcttggccggaagggcctggag

SEQ ID NO: 4707202 - DNA, 25 bp, Homo sapien
actgtgcacatgaggagacttgccc

SEQ ID NO: 4707203 - DNA, 25 bp, Homo sapien
acatgaggagacttgcccgagctct

SEQ ID NO: 4707204 - DNA, 25 bp, Homo sapien
tagccagtcttggccggaagggcct

SEQ ID NO: 4707205 - DNA, 25 bp, Homo sapien
catgcgcaaaggcgggtcaggttca

SEQ ID NO: 4707206 - DNA, 25 bp, Homo sapien
aagggggacactcatgcgaggccat

SEQ ID NO: 4707207 - DNA, 25 bp, Homo sapien
tcatgcgaggccatgcgcaaaggcg

SEQ ID NO: 4707208 - DNA, 25 bp, Homo sapien
ggacactcatgcgaggccatgcgca

SEQ ID NO: 4707209 - DNA, 25 bp, Homo sapien
tatgcacgaagaaaacaccacccca

SEQ ID NO: 4707210 - DNA, 25 bp, Homo sapien
cagcaggtagagcagctccgcaccc

SEQ ID NO: 4707211 - DNA, 25 bp, Homo sapien
gaagaccttgatatgcacgaagaaa

SEQ ID NO: 4707212 - DNA, 25 bp, Homo sapien
gctggcccccgaagaccttgatatg

SEQ ID NO: 4707213 - DNA, 25 bp, Homo sapien
tccggaagcttgctaagggcaggga

SEQ ID NO: 4707214 - DNA, 25 bp, Homo sapien
tcctctaccagtgccgaggtggtgt

SEQ ID NO: 4707215 - DNA, 25 bp, Homo sapien
tgtagtgcgttgtgagtcgcgtttt

SEQ ID NO: 4707216 - DNA, 25 bp, Homo sapien
ttttggtagtcatcctgggaggtgc

SEQ ID NO: 4707217 - DNA, 25 bp, Homo sapien
ttgaatgaaccaaagctggaaagct

SEQ ID NO: 4707218 - DNA, 25 bp, Homo sapien
cagactgtgagaaaagctgagcgtg

SEQ ID NO: 4707219 - DNA, 25 bp, Homo sapien
tttgcagcagagctcgtttggaaat

SEQ ID NO: 4707220 - DNA, 25 bp, Homo sapien
tgtgagaaaagctgagcgtgaaacc

SEQ ID NO: 4707221 - DNA, 25 bp, Homo sapien
tcgtttggaaatcaggctgcacagg

SEQ ID NO: 4707222 - DNA, 25 bp, Homo sapien
tggctctgaacacgcacggctgggc

SEQ ID NO: 4707223 - DNA, 25 bp, Homo sapien
ctgggcggcggcctagcatgcagta

SEQ ID NO: 4707224 - DNA, 25 bp, Homo sapien
ggcggcggcctagcatgcagtaggt

SEQ ID NO: 4707225 - DNA, 25 bp, Homo sapien
taggtgcctcttattcggtgtctga

SEQ ID NO: 4707226 - DNA, 25 bp, Homo sapien
caattgcgctggagatagggcgctc

SEQ ID NO: 4707227 - DNA, 25 bp, Homo sapien
gaatgccctcatgttgacctcggag

SEQ ID NO: 4707228 - DNA, 25 bp, Homo sapien
aagaatcgcgccctctgcttgggtc

SEQ ID NO: 4707229 - DNA, 25 bp, Homo sapien
gctccagagagcgtgcgaatgccct

SEQ ID NO: 4707230 - DNA, 25 bp, Homo sapien
cttgccgccccatggtgacagaact

SEQ ID NO: 4707231 - DNA, 25 bp, Homo sapien
tcctgttgggcgtctcacgcgcact

SEQ ID NO: 4707232 - DNA, 25 bp, Homo sapien
ttgggcgtctcacgcgcacttgctc

SEQ ID NO: 4707233 - DNA, 25 bp, Homo sapien
cttgtgccttgccgccccatggtga

SEQ ID NO: 4707234 - DNA, 25 bp, Homo sapien
ccagcaccaggcgagaaagctcctt

SEQ ID NO: 4707235 - DNA, 25 bp, Homo sapien
ttccagcaccaggcgagaaagctcc

SEQ ID NO: 4707236 - DNA, 25 bp, Homo sapien
agcaccaggcgagaaagctccttga

SEQ ID NO: 4707237 - DNA, 25 bp, Homo sapien
agaaagctccttgaagtgcaggcat

SEQ ID NO: 4707238 - DNA, 25 bp, Homo sapien
tgctgcggcactgagtactttgggt

SEQ ID NO: 4707239 - DNA, 25 bp, Homo sapien
gctgcggcactgagtactttgggtc

SEQ ID NO: 4707240 - DNA, 25 bp, Homo sapien
ctgctgcggcactgagtactttggg

SEQ ID NO: 4707241 - DNA, 25 bp, Homo sapien
gctgctgcggcactgagtactttgg

SEQ ID NO: 4707242 - DNA, 25 bp, Homo sapien
ccttcaggcgtgcgtggatttcact

SEQ ID NO: 4707243 - DNA, 25 bp, Homo sapien
ttctccggaagccttcaggcgtgcg

SEQ ID NO: 4707244 - DNA, 25 bp, Homo sapien
gctggttcgcctggaatttccagaa

SEQ ID NO: 4707245 - DNA, 25 bp, Homo sapien
ctggtgctggttcgcctggaatttc

SEQ ID NO: 4707246 - DNA, 25 bp, Homo sapien
gtgctggttcgcctggaatttccag

SEQ ID NO: 4707247 - DNA, 25 bp, Homo sapien
gggcctggtgctggttcgcctggaa

SEQ ID NO: 4707248 - DNA, 25 bp, Homo sapien
tctttcttccgtccagacggtcacg

SEQ ID NO: 4707249 - DNA, 25 bp, Homo sapien
ctttcttccgtccagacggtcacgg

SEQ ID NO: 4707250 - DNA, 25 bp, Homo sapien
cttccgtccagacggtcacggggtg

SEQ ID NO: 4707251 - DNA, 25 bp, Homo sapien
ccgtccagacggtcacggggtgctt

SEQ ID NO: 4707252 - DNA, 25 bp, Homo sapien
cgatgcctttgggaacgcgttgtct

SEQ ID NO: 4707253 - DNA, 25 bp, Homo sapien
tcggccccagcttggttcatttgct

SEQ ID NO: 4707254 - DNA, 25 bp, Homo sapien
tcttgctgggatccgctggactgtc

SEQ ID NO: 4707255 - DNA, 25 bp, Homo sapien
tgcagcgatgcctttgggaacgcgt

SEQ ID NO: 4707256 - DNA, 25 bp, Homo sapien
ttcccgttttctccgcagataagtc

SEQ ID NO: 4707257 - DNA, 25 bp, Homo sapien
cagataagtccttgatcccctggct

SEQ ID NO: 4707258 - DNA, 25 bp, Homo sapien
gctattaagcggagacatgatttgg

SEQ ID NO: 4707259 - DNA, 25 bp, Homo sapien
ttgggaaataattggcggccgctat

SEQ ID NO: 4707260 - DNA, 25 bp, Homo sapien
tacttatgagagttcttcttccctc

SEQ ID NO: 4707261 - DNA, 25 bp, Homo sapien
ggtccctgagctttacttatgagag

SEQ ID NO: 4707262 - DNA, 25 bp, Homo sapien
ggctcgagcacccttcccatgacgg

SEQ ID NO: 4707263 - DNA, 25 bp, Homo sapien
ccagtgtggagtaggtggtccctga

SEQ ID NO: 4707264 - DNA, 25 bp, Homo sapien
tggcttgggagttcgcaggcaaacc

SEQ ID NO: 4707265 - DNA, 25 bp, Homo sapien
tgcagctggcttgggagttcgcagg

SEQ ID NO: 4707266 - DNA, 25 bp, Homo sapien
tacatcatgcaagcccgggtcttct

SEQ ID NO: 4707267 - DNA, 25 bp, Homo sapien
gtgggctccctggtgtacatcatgc

SEQ ID NO: 4707268 - DNA, 25 bp, Homo sapien
gggcacggtggaatccagctctcgt

SEQ ID NO: 4707269 - DNA, 25 bp, Homo sapien
gggcacggtggaatccagctctcgg

SEQ ID NO: 4707270 - DNA, 25 bp, Homo sapien
caggtgcagaggctcgtcctcgcag

SEQ ID NO: 4707271 - DNA, 25 bp, Homo sapien
gaagccgcagttcatccggcaggag

SEQ ID NO: 4707272 - DNA, 25 bp, Homo sapien
cacatgtgtctgtcaaagggaccag

SEQ ID NO: 4707273 - DNA, 25 bp, Homo sapien
ggacagcctcgtgatcgccactgcc

SEQ ID NO: 4707274 - DNA, 25 bp, Homo sapien
ccactgccacgcctctgtgggctcc

SEQ ID NO: 4707275 - DNA, 25 bp, Homo sapien
ggaccaggtacaccaaccacagggc

SEQ ID NO: 4707276 - DNA, 25 bp, Homo sapien
tagagagtcattggcgtagaacatg

SEQ ID NO: 4707277 - DNA, 25 bp, Homo sapien
gtcccacggtgcctgcttgcggctg

SEQ ID NO: 4707278 - DNA, 25 bp, Homo sapien
gggcacagtggagtcaccggtccca

SEQ ID NO: 4707279 - DNA, 25 bp, Homo sapien
ctaggctagagagtcattggcgtag

SEQ ID NO: 4707280 - DNA, 25 bp, Homo sapien
tcagctcgtctgcgccagcttcttt

SEQ ID NO: 4707281 - DNA, 25 bp, Homo sapien
cagctcgtctgcgccagcttctttg

SEQ ID NO: 4707282 - DNA, 25 bp, Homo sapien
gaggccagcggcatagggatgccgg

SEQ ID NO: 4707283 - DNA, 25 bp, Homo sapien
ggaccagaggccagcggcataggga

SEQ ID NO: 4707284 - DNA, 25 bp, Homo sapien
ctgctggatcctgcttccacgtcct

SEQ ID NO: 4707285 - DNA, 25 bp, Homo sapien
cctcattttcctcctgaattgccat

SEQ ID NO: 4707286 - DNA, 25 bp, Homo sapien
tggatcctgcttccacgtcctcatt

SEQ ID NO: 4707287 - DNA, 25 bp, Homo sapien
gatcctgcttccacgtcctcatttt

SEQ ID NO: 4707288 - DNA, 25 bp, Homo sapien
tacagaccttgagggaaactgttgg

SEQ ID NO: 4707289 - DNA, 25 bp, Homo sapien
gctccccacggtaccacaaggtaca

SEQ ID NO: 4707290 - DNA, 25 bp, Homo sapien
atgaatcacgtggaaggccctgcag

SEQ ID NO: 4707291 - DNA, 25 bp, Homo sapien
caaggtacagaccttgagggaaact

SEQ ID NO: 4707292 - DNA, 25 bp, Homo sapien
aggccgtaaaaagggccttgagatg

SEQ ID NO: 4707293 - DNA, 25 bp, Homo sapien
ttgagatggaccacactcgctctgg

SEQ ID NO: 4707294 - DNA, 25 bp, Homo sapien
gccttggttggcgtcagcaggaaaa

SEQ ID NO: 4707295 - DNA, 25 bp, Homo sapien
tctgggccatgacgcacgctgggtt

SEQ ID NO: 4707296 - DNA, 25 bp, Homo sapien
tcagcacctcgtggcagacccgtgg

SEQ ID NO: 4707297 - DNA, 25 bp, Homo sapien
caagtgggaagtgctcggcggacat

SEQ ID NO: 4707298 - DNA, 25 bp, Homo sapien
gcgttgagcctctgacagccgcgtt

SEQ ID NO: 4707299 - DNA, 25 bp, Homo sapien
ctgtcagcccggtgcctggcaagtg

SEQ ID NO: 4707300 - DNA, 25 bp, Homo sapien
ggccctggcaaagtcagcaggctga

SEQ ID NO: 4707301 - DNA, 25 bp, Homo sapien
caacatcctctgtccgagttccgga

SEQ ID NO: 4707302 - DNA, 25 bp, Homo sapien
cccgaatgccgtttcagctgagtga

SEQ ID NO: 4707303 - DNA, 25 bp, Homo sapien
ccggattagtgcctggctgcctgtc

SEQ ID NO: 4707304 - DNA, 25 bp, Homo sapien
agacccagggagatgcgtgatagaa

SEQ ID NO: 4707305 - DNA, 25 bp, Homo sapien
tccctgcagcagatgatgagtctga

SEQ ID NO: 4707306 - DNA, 25 bp, Homo sapien
ccttggaagactctgggcagcacca

SEQ ID NO: 4707307 - DNA, 25 bp, Homo sapien
ggaaagatcttgttgccagggcccc

SEQ ID NO: 4707308 - DNA, 25 bp, Homo sapien
tgtggtcgtggtcactagtgcctgt

SEQ ID NO: 4707309 - DNA, 25 bp, Homo sapien
acctggacactgcacgggtatagtg

SEQ ID NO: 4707310 - DNA, 25 bp, Homo sapien
ccctctcgccgccaagtggaaggtg

SEQ ID NO: 4707311 - DNA, 25 bp, Homo sapien
tctcgccgccaagtggaaggtgaag

SEQ ID NO: 4707312 - DNA, 25 bp, Homo sapien
gtgtagccgaggtccacaacacagg

SEQ ID NO: 4707313 - DNA, 25 bp, Homo sapien
aaaagcgacatggaagtgcccgaag

SEQ ID NO: 4707314 - DNA, 25 bp, Homo sapien
ccagtggatgttgatgaggtgcttg

SEQ ID NO: 4707315 - DNA, 25 bp, Homo sapien
ggtgcttggtgactgaaaagcgaca

SEQ ID NO: 4707316 - DNA, 25 bp, Homo sapien
tgactgcgtttcctaggagaccggg

SEQ ID NO: 4707317 - DNA, 25 bp, Homo sapien
gacttgagagaatcgaggcttccgt

SEQ ID NO: 4707318 - DNA, 25 bp, Homo sapien
taccgggagcagcttagaagaggtc

SEQ ID NO: 4707319 - DNA, 25 bp, Homo sapien
agagtgagtcaccagcgattccagg

SEQ ID NO: 4707320 - DNA, 25 bp, Homo sapien
tgcacagggccggtgaatgtcctat

SEQ ID NO: 4707321 - DNA, 25 bp, Homo sapien
caggtgccccgtggtgacagcacca

SEQ ID NO: 4707322 - DNA, 25 bp, Homo sapien
tgccgatcaggacctgggaaccagg

SEQ ID NO: 4707323 - DNA, 25 bp, Homo sapien
ggtgaatgtcctatgccgatcagga

SEQ ID NO: 4707324 - DNA, 25 bp, Homo sapien
tctgctcggctggactggcagctgc

SEQ ID NO: 4707325 - DNA, 25 bp, Homo sapien
gctcactggcagtctgtgtaagcag

SEQ ID NO: 4707326 - DNA, 25 bp, Homo sapien
catctccaaggtgtgatgggactct

SEQ ID NO: 4707327 - DNA, 25 bp, Homo sapien
tcttgctccctggtttaatctgctc

SEQ ID NO: 4707328 - DNA, 25 bp, Homo sapien
cccatccgcgcagaagagagacagg

SEQ ID NO: 4707329 - DNA, 25 bp, Homo sapien
ccgaggtgcccatccgcgcagaaga

SEQ ID NO: 4707330 - DNA, 25 bp, Homo sapien
tgagggccgactgggtccttgctgg

SEQ ID NO: 4707331 - DNA, 25 bp, Homo sapien
tgcccatccgcgcagaagagagaca

SEQ ID NO: 4707332 - DNA, 25 bp, Homo sapien
tgcagcaggtcttggtgttttttgg

SEQ ID NO: 4707333 - DNA, 25 bp, Homo sapien
gaatactggactgagacagtgccca

SEQ ID NO: 4707334 - DNA, 25 bp, Homo sapien
cactctggctgtatggaggttctct

SEQ ID NO: 4707335 - DNA, 25 bp, Homo sapien
tgaaaagtactgagaccttgcagca

SEQ ID NO: 4707336 - DNA, 25 bp, Homo sapien
gctggtgcacgtgcctgtcaccgtg

SEQ ID NO: 4707337 - DNA, 25 bp, Homo sapien
gtgctggtgcacgtgcctgtcaccg

SEQ ID NO: 4707338 - DNA, 25 bp, Homo sapien
tgctggtgcacgtgcctgtcaccgt

SEQ ID NO: 4707339 - DNA, 25 bp, Homo sapien
ctggtgcacgtgcctgtcaccgtgg

SEQ ID NO: 4707340 - DNA, 25 bp, Homo sapien
tgcttgaccctttcgggccgtggta

SEQ ID NO: 4707341 - DNA, 25 bp, Homo sapien
cactgcttgaccctttcgggccgtg

SEQ ID NO: 4707342 - DNA, 25 bp, Homo sapien
agcactgcttgaccctttcgggccg

SEQ ID NO: 4707343 - DNA, 25 bp, Homo sapien
actgcttgaccctttcgggccgtgg

SEQ ID NO: 4707344 - DNA, 25 bp, Homo sapien
ggaacatggcggtaaacctgagaac

SEQ ID NO: 4707345 - DNA, 25 bp, Homo sapien
ctggagcaggcacattcggagagac

SEQ ID NO: 4707346 - DNA, 25 bp, Homo sapien
gagagcccctctgaagcgaacagac

SEQ ID NO: 4707347 - DNA, 25 bp, Homo sapien
caggtctgtgaatatactaggaagc

SEQ ID NO: 4707348 - DNA, 25 bp, Homo sapien
gccgcagtgtatcacagtcccgagg

SEQ ID NO: 4707349 - DNA, 25 bp, Homo sapien
ggccgcagtgtatcacagtcccgag

SEQ ID NO: 4707350 - DNA, 25 bp, Homo sapien
aggccgcggtgtatcacagtcccga

SEQ ID NO: 4707351 - DNA, 25 bp, Homo sapien
ccgaggccgcagtgtatcacagtcc

SEQ ID NO: 4707352 - DNA, 25 bp, Homo sapien
taataggcaagggaatctacggagt

SEQ ID NO: 4707353 - DNA, 25 bp, Homo sapien
tgttcctgcaaccagtcccgaggcc

SEQ ID NO: 4707354 - DNA, 25 bp, Homo sapien
caagggaatctacggagttgataca

SEQ ID NO: 4707355 - DNA, 25 bp, Homo sapien
tacggagttgatacaagccttgttc

SEQ ID NO: 4707356 - DNA, 25 bp, Homo sapien
gcctcggagatgcgggcagcggcgc

SEQ ID NO: 4707357 - DNA, 25 bp, Homo sapien
gggcagcggcgcgacgcactgcggg

SEQ ID NO: 4707358 - DNA, 25 bp, Homo sapien
ctgggccgtgtctccatggcagcgc

SEQ ID NO: 4707359 - DNA, 25 bp, Homo sapien
ccggcggccgctgggccgtgtctcc

SEQ ID NO: 4707360 - DNA, 25 bp, Homo sapien
tcctccagccccctatcgtctgccc

SEQ ID NO: 4707361 - DNA, 25 bp, Homo sapien
gtcgcgtggcccgcggcccccatcc

SEQ ID NO: 4707362 - DNA, 25 bp, Homo sapien
atcgtctgcccgcatccccgggtcc

SEQ ID NO: 4707363 - DNA, 25 bp, Homo sapien
cgcgctctgggtcgccccatcctcc

SEQ ID NO: 4707364 - DNA, 25 bp, Homo sapien
tggacccaaacaaaaacgatgtcag

SEQ ID NO: 4707365 - DNA, 25 bp, Homo sapien
caaaaacgatgtcaggagaaaacaa

SEQ ID NO: 4707366 - DNA, 25 bp, Homo sapien
aaacaaacagggaagcatcgcaacc

SEQ ID NO: 4707367 - DNA, 25 bp, Homo sapien
aaacagggaagcatcgcaacccact

SEQ ID NO: 4707368 - DNA, 25 bp, Homo sapien
agggccgccttgctgctccgagcat

SEQ ID NO: 4707369 - DNA, 25 bp, Homo sapien
cggagacgccgccaggcgtcagccc

SEQ ID NO: 4707370 - DNA, 25 bp, Homo sapien
gcggcgcttgaaagggcgcgggttc

SEQ ID NO: 4707371 - DNA, 25 bp, Homo sapien
aacaggagccagcggcgcttgaaag

SEQ ID NO: 4707372 - DNA, 25 bp, Homo sapien
tggagagtgagacgggcgcccagtg

SEQ ID NO: 4707373 - DNA, 25 bp, Homo sapien
gggtggagagtgagacgggcgccca

SEQ ID NO: 4707374 - DNA, 25 bp, Homo sapien
gtggagagtgagacgggcgcccagt

SEQ ID NO: 4707375 - DNA, 25 bp, Homo sapien
ctgggtggagagtgagacgggcgcc

SEQ ID NO: 4707376 - DNA, 25 bp, Homo sapien
tctctgggggtcagcggcctagatc

SEQ ID NO: 4707377 - DNA, 25 bp, Homo sapien
cagcggcctagatcgagctacttac

SEQ ID NO: 4707378 - DNA, 25 bp, Homo sapien
cggcggcagtctgcagcgcagcatc

SEQ ID NO: 4707379 - DNA, 25 bp, Homo sapien
tgcagcgcagcatcaagtctctggg

SEQ ID NO: 4707380 - DNA, 25 bp, Homo sapien
tccagccccagcgtttgttcaggtc

SEQ ID NO: 4707381 - DNA, 25 bp, Homo sapien
ccagcgtttgttcaggtctcgtctc

SEQ ID NO: 4707382 - DNA, 25 bp, Homo sapien
gccccagcgtttgttcaggtctcgt

SEQ ID NO: 4707383 - DNA, 25 bp, Homo sapien
ggatccagccccagcgtttgttcag

SEQ ID NO: 4707384 - DNA, 25 bp, Homo sapien
aggagctccggtggcacgccccgca

SEQ ID NO: 4707385 - DNA, 25 bp, Homo sapien
tcagggcaacggctgttctgaccca

SEQ ID NO: 4707386 - DNA, 25 bp, Homo sapien
acgccccgcacgcatctgtccgggc

SEQ ID NO: 4707387 - DNA, 25 bp, Homo sapien
atctgtccgggccagctttcagggc

SEQ ID NO: 4707388 - DNA, 25 bp, Homo sapien
ctggaccactgagcttgaagagatg

SEQ ID NO: 4707389 - DNA, 25 bp, Homo sapien
cactgagcttgaagagatggatcca

SEQ ID NO: 4707390 - DNA, 25 bp, Homo sapien
gaccactgagcttgaagagatggat

SEQ ID NO: 4707391 - DNA, 25 bp, Homo sapien
agcttgaagagatggatccagtgcc

SEQ ID NO: 4707392 - DNA, 25 bp, Homo sapien
taaggatccctcgtttaactgaatg

SEQ ID NO: 4707393 - DNA, 25 bp, Homo sapien
gaattccgcccatttgcaggcaacg

SEQ ID NO: 4707394 - DNA, 25 bp, Homo sapien
gaattgacagggacgaggcgtcaca

SEQ ID NO: 4707395 - DNA, 25 bp, Homo sapien
taaattaacggacagctttcccagc

SEQ ID NO: 4707396 - DNA, 25 bp, Homo sapien
cgctggactcctgggaaccctgctg

SEQ ID NO: 4707397 - DNA, 25 bp, Homo sapien
tcccgctggactcctgggaaccctg

SEQ ID NO: 4707398 - DNA, 25 bp, Homo sapien
ctggactcctgggaaccctgctgtt

SEQ ID NO: 4707399 - DNA, 25 bp, Homo sapien
ccgctggactcctgggaaccctgct

SEQ ID NO: 4707400 - DNA, 25 bp, Homo sapien
ctgccagggggacacggccactcat

SEQ ID NO: 4707401 - DNA, 25 bp, Homo sapien
tactgtgagtaccacatgcttcggc

SEQ ID NO: 4707402 - DNA, 25 bp, Homo sapien
tgtgtccctagagacctcgagcttg

SEQ ID NO: 4707403 - DNA, 25 bp, Homo sapien
cgggcgtagccttcagacaaggcct

SEQ ID NO: 4707404 - DNA, 25 bp, Homo sapien
tgagcaaggaggtgtccctgtaccg

SEQ ID NO: 4707405 - DNA, 25 bp, Homo sapien
tgtcacaacagctgaccacggaggg

SEQ ID NO: 4707406 - DNA, 25 bp, Homo sapien
gtggtcctgggttcaggtgctcaca

SEQ ID NO: 4707407 - DNA, 25 bp, Homo sapien
tgtgcaccagtcacaccgcggctgt

SEQ ID NO: 4707408 - DNA, 25 bp, Homo sapien
tctgcgcttcttgggttcttacacc

SEQ ID NO: 4707409 - DNA, 25 bp, Homo sapien
tgtaatgcgacaaagctcctggtga

SEQ ID NO: 4707410 - DNA, 25 bp, Homo sapien
tatatacagtagttcgcctggagcc

SEQ ID NO: 4707411 - DNA, 25 bp, Homo sapien
ggtttaaaccaagcatctagcagtg

SEQ ID NO: 4707412 - DNA, 25 bp, Homo sapien
tagctttgacaagagacacctgcac

SEQ ID NO: 4707413 - DNA, 25 bp, Homo sapien
gagaagcacgaacagagtacaggca

SEQ ID NO: 4707414 - DNA, 25 bp, Homo sapien
gaatgcccagtctgtacagttgagc

SEQ ID NO: 4707415 - DNA, 25 bp, Homo sapien
ggatgaggccgtcagaatcacgtga

SEQ ID NO: 4707416 - DNA, 25 bp, Homo sapien
cacgtgaccgtgtgtgcatgctgag

SEQ ID NO: 4707417 - DNA, 25 bp, Homo sapien
ggggaatgcactttgacccagcagt

SEQ ID NO: 4707418 - DNA, 25 bp, Homo sapien
gttccacttctaggacgtttgcgaa

SEQ ID NO: 4707419 - DNA, 25 bp, Homo sapien
tctaggacgtttgcgaatgaacttg

SEQ ID NO: 4707420 - DNA, 25 bp, Homo sapien
ggacgtttgcgaatgaacttgcaca

SEQ ID NO: 4707421 - DNA, 25 bp, Homo sapien
ccatgcggcaatcctggaagtctga

SEQ ID NO: 4707422 - DNA, 25 bp, Homo sapien
gcagctccatgcggcaatcctggaa

SEQ ID NO: 4707423 - DNA, 25 bp, Homo sapien
caggactctcgcagaagggactcgg

SEQ ID NO: 4707424 - DNA, 25 bp, Homo sapien
ggcaatcctggaagtctgacttcaa

SEQ ID NO: 4707425 - DNA, 25 bp, Homo sapien
cttgctgtgggagtgtcagccggcg

SEQ ID NO: 4707426 - DNA, 25 bp, Homo sapien
atgtggagtgcttccttggcgggcc

SEQ ID NO: 4707427 - DNA, 25 bp, Homo sapien
tgctgtgggagtgtcagccggcggg

SEQ ID NO: 4707428 - DNA, 25 bp, Homo sapien
gcggatgtggagtgcttccttggcg

SEQ ID NO: 4707429 - DNA, 25 bp, Homo sapien
gtctgcgctgcctcccatgcttggg

SEQ ID NO: 4707430 - DNA, 25 bp, Homo sapien
cacaacccgtcctcaggggagtctg

SEQ ID NO: 4707431 - DNA, 25 bp, Homo sapien
gcattccagatttgcctctggagtt

SEQ ID NO: 4707432 - DNA, 25 bp, Homo sapien
acaggcattccagatttgcctctgg

SEQ ID NO: 4707433 - DNA, 25 bp, Homo sapien
cggtgacactcctggccagactgtg

SEQ ID NO: 4707434 - DNA, 25 bp, Homo sapien
agcgttgcaacgtgacctcagaccc

SEQ ID NO: 4707435 - DNA, 25 bp, Homo sapien
taagcggcttagtgccagctccttg

SEQ ID NO: 4707436 - DNA, 25 bp, Homo sapien
cagactgtgacccttctcatccaga

SEQ ID NO: 4707437 - DNA, 25 bp, Homo sapien
tgcagcgcggctcgccgaagaatga

SEQ ID NO: 4707438 - DNA, 25 bp, Homo sapien
ggctggcgtgcagcgcggctcgccg

SEQ ID NO: 4707439 - DNA, 25 bp, Homo sapien
cgtgcagcgcggctcgccgaagaat

SEQ ID NO: 4707440 - DNA, 25 bp, Homo sapien
gcggctcgccgaagaatgacagctc

SEQ ID NO: 4707441 - DNA, 25 bp, Homo sapien
gacatcctgtaactcttggcaaaaa

SEQ ID NO: 4707442 - DNA, 25 bp, Homo sapien
ggtaatcatggacccttctcctggg

SEQ ID NO: 4707443 - DNA, 25 bp, Homo sapien
gaacaagctgccctcttcgagacag

SEQ ID NO: 4707444 - DNA, 25 bp, Homo sapien
cctgaagtggcttgtgatgcgctca

SEQ ID NO: 4707445 - DNA, 25 bp, Homo sapien
tcacatccagagtagcactgttcct

SEQ ID NO: 4707446 - DNA, 25 bp, Homo sapien
cacatacagaatttgtcacatccag

SEQ ID NO: 4707447 - DNA, 25 bp, Homo sapien
cacgcctctgacagtcttttgggaa

SEQ ID NO: 4707448 - DNA, 25 bp, Homo sapien
gatgtgcatgcaagtttaccgtaac

SEQ ID NO: 4707449 - DNA, 25 bp, Homo sapien
tagtccggaaatgactgaaaccagg

SEQ ID NO: 4707450 - DNA, 25 bp, Homo sapien
cacgcgttgtcacagttagtccgga

SEQ ID NO: 4707451 - DNA, 25 bp, Homo sapien
ggattaatgacttcctcagcgccct

SEQ ID NO: 4707452 - DNA, 25 bp, Homo sapien
gaattcacacacgacagttgacagg

SEQ ID NO: 4707453 - DNA, 25 bp, Homo sapien
caggaatgccagagttagcctccca

SEQ ID NO: 4707454 - DNA, 25 bp, Homo sapien
atggcggctccggccaggaatgcca

SEQ ID NO: 4707455 - DNA, 25 bp, Homo sapien
gagttagcctcccaggcttgcgggt

SEQ ID NO: 4707456 - DNA, 25 bp, Homo sapien
gcctcccaggcttgcgggtggacat

SEQ ID NO: 4707457 - DNA, 25 bp, Homo sapien
cagctttcagctacagcacattcta

SEQ ID NO: 4707458 - DNA, 25 bp, Homo sapien
tcccagaggctgccatatggtcttt

SEQ ID NO: 4707459 - DNA, 25 bp, Homo sapien
gcttacaggtatagacagctttcag

SEQ ID NO: 4707460 - DNA, 25 bp, Homo sapien
tagggaaccccagttatataatata

SEQ ID NO: 4707461 - DNA, 25 bp, Homo sapien
gatgtgcgttctccgctcgtggtga

SEQ ID NO: 4707462 - DNA, 25 bp, Homo sapien
agcctgcaggtttccatacactgaa

SEQ ID NO: 4707463 - DNA, 25 bp, Homo sapien
ctaagcgaagggtcatcgcagcccc

SEQ ID NO: 4707464 - DNA, 25 bp, Homo sapien
tacactgaagcttttacctcaactt

SEQ ID NO: 4707465 - DNA, 25 bp, Homo sapien
tgttccatggtgtgcaggtctgctt

SEQ ID NO: 4707466 - DNA, 25 bp, Homo sapien
atgctaacccgatgaccccagaaaa

SEQ ID NO: 4707467 - DNA, 25 bp, Homo sapien
gaaggtgtgaactctgcagaaagtc

SEQ ID NO: 4707468 - DNA, 25 bp, Homo sapien
gaaaaccgtgtgagattcgtaccga

SEQ ID NO: 4707469 - DNA, 25 bp, Homo sapien
tttctggaccctgttagagcacaca

SEQ ID NO: 4707470 - DNA, 25 bp, Homo sapien
agggaggtgtgcacatgtcaagtgt

SEQ ID NO: 4707471 - DNA, 25 bp, Homo sapien
tccagggcaccacagacagaggacc

SEQ ID NO: 4707472 - DNA, 25 bp, Homo sapien
gctcaccgtgagctttctgactgtt

SEQ ID NO: 4707473 - DNA, 25 bp, Homo sapien
tacctcctgatgagctccatgttct

SEQ ID NO: 4707474 - DNA, 25 bp, Homo sapien
ccatgttcttagacgagctcttgag

SEQ ID NO: 4707475 - DNA, 25 bp, Homo sapien
tgtcactgggggtcataccccaacc

SEQ ID NO: 4707476 - DNA, 25 bp, Homo sapien
acgtctgagtgtggcttacctcctg

SEQ ID NO: 4707477 - DNA, 25 bp, Homo sapien
tttacaggtagacacggggccacgc

SEQ ID NO: 4707478 - DNA, 25 bp, Homo sapien
tctccactgtgcagcgttcctatgg

SEQ ID NO: 4707479 - DNA, 25 bp, Homo sapien
cctggccatggttggaggcctgcat

SEQ ID NO: 4707480 - DNA, 25 bp, Homo sapien
tatgggcgttctcaactgtccgtgc

SEQ ID NO: 4707481 - DNA, 25 bp, Homo sapien
aggacgaggcatgcactccggtgtc

SEQ ID NO: 4707482 - DNA, 25 bp, Homo sapien
acgaggcatgcactccggtgtccat

SEQ ID NO: 4707483 - DNA, 25 bp, Homo sapien
cccaggacgaggcatgcactccggt

SEQ ID NO: 4707484 - DNA, 25 bp, Homo sapien
ctccccacccaggacgaggcatgca

SEQ ID NO: 4707485 - DNA, 25 bp, Homo sapien
tcctcctgcccggcgtggtccttgc

SEQ ID NO: 4707486 - DNA, 25 bp, Homo sapien
tcctgcccggcgtggtccttgccag

SEQ ID NO: 4707487 - DNA, 25 bp, Homo sapien
cctgcccggcgtggtccttgccagg

SEQ ID NO: 4707488 - DNA, 25 bp, Homo sapien
ctcctgcccggcgtggtccttgcca

SEQ ID NO: 4707489 - DNA, 25 bp, Homo sapien
agggaaggtgtctgcagacgggacc

SEQ ID NO: 4707490 - DNA, 25 bp, Homo sapien
gaggggatgacatggtgtgaatgtg

SEQ ID NO: 4707491 - DNA, 25 bp, Homo sapien
tggacagttgagacactgagggtgg

SEQ ID NO: 4707492 - DNA, 25 bp, Homo sapien
gggaaggtgtctgcagacgggacca

SEQ ID NO: 4707493 - DNA, 25 bp, Homo sapien
gccctggttctttccagtgtctgtg

SEQ ID NO: 4707494 - DNA, 25 bp, Homo sapien
tgtgtggggctctcttgcacagacg

SEQ ID NO: 4707495 - DNA, 25 bp, Homo sapien
tctttcgagttggtctgcaggttgc

SEQ ID NO: 4707496 - DNA, 25 bp, Homo sapien
ttgcacagacgccttctggtttctt

SEQ ID NO: 4707497 - DNA, 25 bp, Homo sapien
gggcctcagcttagtcgtccgtaca

SEQ ID NO: 4707498 - DNA, 25 bp, Homo sapien
tctggtcgggaagctgtttgcctca

SEQ ID NO: 4707499 - DNA, 25 bp, Homo sapien
cactctgcaacagggtggctgtcct

SEQ ID NO: 4707500 - DNA, 25 bp, Homo sapien
tttgcgctcaggtggcattccggag

SEQ ID NO: 4707501 - DNA, 25 bp, Homo sapien
gacggccttgctaagctctcagcac

SEQ ID NO: 4707502 - DNA, 25 bp, Homo sapien
aagcactcggtagacgacggccttg

SEQ ID NO: 4707503 - DNA, 25 bp, Homo sapien
catctcttcacagcgaggtcagctg

SEQ ID NO: 4707504 - DNA, 25 bp, Homo sapien
ctctgtgtcgggtgtgcagacccca

SEQ ID NO: 4707505 - DNA, 25 bp, Homo sapien
ctagccactggctaggacgtcccgg

SEQ ID NO: 4707506 - DNA, 25 bp, Homo sapien
ctggagtgatgcaaggtcctcctcc

SEQ ID NO: 4707507 - DNA, 25 bp, Homo sapien
ggcccccagaatgtccttgcatgag

SEQ ID NO: 4707508 - DNA, 25 bp, Homo sapien
gttcgtccacgtggcaccctggagt

SEQ ID NO: 4707509 - DNA, 25 bp, Homo sapien
ctgggagaagcgaaggccatgtttg

SEQ ID NO: 4707510 - DNA, 25 bp, Homo sapien
tttgggcagacatgttctgaatgtc

SEQ ID NO: 4707511 - DNA, 25 bp, Homo sapien
cctggtgtccagacgtgatccttct

SEQ ID NO: 4707512 - DNA, 25 bp, Homo sapien
gacgtgatccttctgtttactttgt

SEQ ID NO: 4707513 - DNA, 25 bp, Homo sapien
acagtcactacaggagtagaggcag

SEQ ID NO: 4707514 - DNA, 25 bp, Homo sapien
aggtgacacggagtggtcaggctct

SEQ ID NO: 4707515 - DNA, 25 bp, Homo sapien
gttgacagtcactacaggagtagag

SEQ ID NO: 4707516 - DNA, 25 bp, Homo sapien
tccaaaaagttgacagtcactacag

SEQ ID NO: 4707517 - DNA, 25 bp, Homo sapien
tatctctgcagaataccgggtttga

SEQ ID NO: 4707518 - DNA, 25 bp, Homo sapien
ctataaaatggagccctcttcggcc

SEQ ID NO: 4707519 - DNA, 25 bp, Homo sapien
tctggttccggaaatacagtcagtg

SEQ ID NO: 4707520 - DNA, 25 bp, Homo sapien
gaaagattgtaaccacaacgccacc

SEQ ID NO: 4707521 - DNA, 25 bp, Homo sapien
cacaggagtcccgtcggcttattcc

SEQ ID NO: 4707522 - DNA, 25 bp, Homo sapien
ttcctcacaggagtcccgtcggctt

SEQ ID NO: 4707523 - DNA, 25 bp, Homo sapien
ccccatcgcatgaaggtggagagtg

SEQ ID NO: 4707524 - DNA, 25 bp, Homo sapien
cgtcggcttattccccatcgcatga

SEQ ID NO: 4707525 - DNA, 25 bp, Homo sapien
gatggagtgcgtttgctgaggacaa

SEQ ID NO: 4707526 - DNA, 25 bp, Homo sapien
tggtcccagggatggagtgcgtttg

SEQ ID NO: 4707527 - DNA, 25 bp, Homo sapien
gggccttgcccgcacagcaaagagc

SEQ ID NO: 4707528 - DNA, 25 bp, Homo sapien
cccagggatggagtgcgtttgctga

SEQ ID NO: 4707529 - DNA, 25 bp, Homo sapien
tctgcttttcattcaggtcctcctg

SEQ ID NO: 4707530 - DNA, 25 bp, Homo sapien
gcttttcattcaggtcctcctgtgc

SEQ ID NO: 4707531 - DNA, 25 bp, Homo sapien
ttctgcttttcattcaggtcctcct

SEQ ID NO: 4707532 - DNA, 25 bp, Homo sapien
ctaaagggggctgaatttctgcttt

SEQ ID NO: 4707533 - DNA, 25 bp, Homo sapien
tgcaggagagcaggtgcgctgtgca

SEQ ID NO: 4707534 - DNA, 25 bp, Homo sapien
ctgcaggagagcaggtgcgctgtgc

SEQ ID NO: 4707535 - DNA, 25 bp, Homo sapien
gcaggagagcaggtgcgctgtgcat

SEQ ID NO: 4707536 - DNA, 25 bp, Homo sapien
tctgctgaagcgccccgggacaggg

SEQ ID NO: 4707537 - DNA, 25 bp, Homo sapien
gtctgctgaagcgccccgggacagg

SEQ ID NO: 4707538 - DNA, 25 bp, Homo sapien
agggctgggcctgtagagccgggcc

SEQ ID NO: 4707539 - DNA, 25 bp, Homo sapien
agtctgctgaagcgccccgggacag

SEQ ID NO: 4707540 - DNA, 25 bp, Homo sapien
gggacagtcacgggagaggcagcgc

SEQ ID NO: 4707541 - DNA, 25 bp, Homo sapien
ggggccatgccccaggatagcccca

SEQ ID NO: 4707542 - DNA, 25 bp, Homo sapien
ggacagtcacgggagaggcagcgct

SEQ ID NO: 4707543 - DNA, 25 bp, Homo sapien
gttcagaaagcaggaggcatatgag

SEQ ID NO: 4707544 - DNA, 25 bp, Homo sapien
ggcatatgaggtcttaggtctagaa

SEQ ID NO: 4707545 - DNA, 25 bp, Homo sapien
aggaggcatatgaggtcttaggtct

SEQ ID NO: 4707546 - DNA, 25 bp, Homo sapien
ggttcagaaagcaggaggcatatga

SEQ ID NO: 4707547 - DNA, 25 bp, Homo sapien
gctcttagctctgcctccggtctgt

SEQ ID NO: 4707548 - DNA, 25 bp, Homo sapien
tggccccttgtcctggctcggcatg

SEQ ID NO: 4707549 - DNA, 25 bp, Homo sapien
tgcagtcctcggcatttgtggttgg

SEQ ID NO: 4707550 - DNA, 25 bp, Homo sapien
gctgcatgcccacgctttgctctta

SEQ ID NO: 4707551 - DNA, 25 bp, Homo sapien
cagtgatgttcaggagtcgccggct

SEQ ID NO: 4707552 - DNA, 25 bp, Homo sapien
tcgccggctggatctttctgagtgt

SEQ ID NO: 4707553 - DNA, 25 bp, Homo sapien
taatccggtattgtgggagacaact

SEQ ID NO: 4707554 - DNA, 25 bp, Homo sapien
tctgagtgtggcttgataaccagct

SEQ ID NO: 4707555 - DNA, 25 bp, Homo sapien
cctgattgagctcgcagtggagcca

SEQ ID NO: 4707556 - DNA, 25 bp, Homo sapien
tgctgttggctgtctgcgtctcgca

SEQ ID NO: 4707557 - DNA, 25 bp, Homo sapien
taaattgtaagtcttctggccactc

SEQ ID NO: 4707558 - DNA, 25 bp, Homo sapien
accctgttgtgtccgtgctgttggc

SEQ ID NO: 4707559 - DNA, 25 bp, Homo sapien
caccttgtagaggtgcccagctggt

SEQ ID NO: 4707560 - DNA, 25 bp, Homo sapien
tcagcgtttgccaagaatggccttg

SEQ ID NO: 4707561 - DNA, 25 bp, Homo sapien
tggcggagcatagggttttctttgc

SEQ ID NO: 4707562 - DNA, 25 bp, Homo sapien
tgtttttgttggtactgccaccttg

SEQ ID NO: 4707563 - DNA, 25 bp, Homo sapien
ctctggagatgccagccgcgggagc

SEQ ID NO: 4707564 - DNA, 25 bp, Homo sapien
ggcagtgatggccttgtgcgattcc

SEQ ID NO: 4707565 - DNA, 25 bp, Homo sapien
atgccagccgcgggagccctgtgca

SEQ ID NO: 4707566 - DNA, 25 bp, Homo sapien
ttgtgcgattcctggtgccaccagg

SEQ ID NO: 4707567 - DNA, 25 bp, Homo sapien
tggctgcttcactggtagagcttgg

SEQ ID NO: 4707568 - DNA, 25 bp, Homo sapien
caaacaagtccttgattagacatcc

SEQ ID NO: 4707569 - DNA, 25 bp, Homo sapien
attagacatccggtttcatttaacg

SEQ ID NO: 4707570 - DNA, 25 bp, Homo sapien
gtccttgattagacatccggtttca

SEQ ID NO: 4707571 - DNA, 25 bp, Homo sapien
ttatcaaacaagtccttgattagac

SEQ ID NO: 4707572 - DNA, 25 bp, Homo sapien
aaaccaagcacattgctaaatagca

SEQ ID NO: 4707573 - DNA, 25 bp, Homo sapien
aatagcaacattatacttggtaaac

SEQ ID NO: 4707574 - DNA, 25 bp, Homo sapien
atgtccaggcatttaggcttatggg

SEQ ID NO: 4707575 - DNA, 25 bp, Homo sapien
ggcatttaggcttatgggaagtaaa

SEQ ID NO: 4707576 - DNA, 25 bp, Homo sapien
tacaaaaggccttgctgagaggatt

SEQ ID NO: 4707577 - DNA, 25 bp, Homo sapien
ggtcagtgctggtccctgtatctag

SEQ ID NO: 4707578 - DNA, 25 bp, Homo sapien
cctttgttcggatgtgctctcgcca

SEQ ID NO: 4707579 - DNA, 25 bp, Homo sapien
gatggcctttctgtgaactcctggt

SEQ ID NO: 4707580 - DNA, 25 bp, Homo sapien
ggtgtttatataggtactgccaggt

SEQ ID NO: 4707581 - DNA, 25 bp, Homo sapien
tcacccgcatccctggagtggtgtt

SEQ ID NO: 4707582 - DNA, 25 bp, Homo sapien
ggacccgcaggcaacagttgcagga

SEQ ID NO: 4707583 - DNA, 25 bp, Homo sapien
gccaggttctggaatggaaggccat

SEQ ID NO: 4707584 - DNA, 25 bp, Homo sapien
caccaccttaatacctgattctaga

SEQ ID NO: 4707585 - DNA, 25 bp, Homo sapien
gaaacaccaccttaatacctgattc

SEQ ID NO: 4707586 - DNA, 25 bp, Homo sapien
gcagaaacaccaccttaatacctga

SEQ ID NO: 4707587 - DNA, 25 bp, Homo sapien
actgcagaaacaccaccttaatacc

SEQ ID NO: 4707588 - DNA, 25 bp, Homo sapien
tgcctccaggaccgtatctgctttg

SEQ ID NO: 4707589 - DNA, 25 bp, Homo sapien
tctgcctccaggaccgtatctgctt

SEQ ID NO: 4707590 - DNA, 25 bp, Homo sapien
ctgcctccaggaccgtatctgcttt

SEQ ID NO: 4707591 - DNA, 25 bp, Homo sapien
gcctccaggaccgtatctgctttgt

SEQ ID NO: 4707592 - DNA, 25 bp, Homo sapien
gggtgcccacatgggcatcgaactc

SEQ ID NO: 4707593 - DNA, 25 bp, Homo sapien
attcagcccatctgggatgatgggc

SEQ ID NO: 4707594 - DNA, 25 bp, Homo sapien
ttcagcccatctgggatgatgggcc

SEQ ID NO: 4707595 - DNA, 25 bp, Homo sapien
atgggccagggtgcccacatgggca

SEQ ID NO: 4707596 - DNA, 25 bp, Homo sapien
aggagcagtgttgggacggaagcag

SEQ ID NO: 4707597 - DNA, 25 bp, Homo sapien
gagcagtgttgggacggaagcaggc

SEQ ID NO: 4707598 - DNA, 25 bp, Homo sapien
caggagcagtgttgggacggaagca

SEQ ID NO: 4707599 - DNA, 25 bp, Homo sapien
ggagcagtgttgggacggaagcagg

SEQ ID NO: 4707600 - DNA, 25 bp, Homo sapien
gctttgtgtttccagggtgtcgtta

SEQ ID NO: 4707601 - DNA, 25 bp, Homo sapien
taacacggcgtccatgcaaataacc

SEQ ID NO: 4707602 - DNA, 25 bp, Homo sapien
gcacttttagctctaagagaacaca

SEQ ID NO: 4707603 - DNA, 25 bp, Homo sapien
gatttaattcaaaactcgctattgc

SEQ ID NO: 4707604 - DNA, 25 bp, Homo sapien
tgtggcccttcagcgccagggccat

SEQ ID NO: 4707605 - DNA, 25 bp, Homo sapien
gcagagcattttggccccatgaatg

SEQ ID NO: 4707606 - DNA, 25 bp, Homo sapien
gagggcactgagactcggtttccaa

SEQ ID NO: 4707607 - DNA, 25 bp, Homo sapien
gcaatgtgttcatgggtgacatgat

SEQ ID NO: 4707608 - DNA, 25 bp, Homo sapien
taatgtggccgataggataattggc

SEQ ID NO: 4707609 - DNA, 25 bp, Homo sapien
ataatagggccccagcgtacgtagt

SEQ ID NO: 4707610 - DNA, 25 bp, Homo sapien
taattggccaataggataatagggc

SEQ ID NO: 4707611 - DNA, 25 bp, Homo sapien
gttacaggtggccaatctaatgtgg

SEQ ID NO: 4707612 - DNA, 25 bp, Homo sapien
tgccagggtgggcttctggtggcac

SEQ ID NO: 4707613 - DNA, 25 bp, Homo sapien
cccgcttccaggaaccggttctctg

SEQ ID NO: 4707614 - DNA, 25 bp, Homo sapien
ctgccagggtgggcttctggtggca

SEQ ID NO: 4707615 - DNA, 25 bp, Homo sapien
ttccaggaaccggttctctgcccat

SEQ ID NO: 4707616 - DNA, 25 bp, Homo sapien
ctgcttgggtcacagccgccgcacc

SEQ ID NO: 4707617 - DNA, 25 bp, Homo sapien
gccgcaccttgcccacagggacttt

SEQ ID NO: 4707618 - DNA, 25 bp, Homo sapien
gcttgggtcacagccgccgcacctt

SEQ ID NO: 4707619 - DNA, 25 bp, Homo sapien
agccgccgcaccttgcccacaggga

SEQ ID NO: 4707620 - DNA, 25 bp, Homo sapien
gcacgggggtcttgacgatgcccac

SEQ ID NO: 4707621 - DNA, 25 bp, Homo sapien
ggggtcttgacgatgcccactgccc

SEQ ID NO: 4707622 - DNA, 25 bp, Homo sapien
ccctacagagcagcccctggtgcct

SEQ ID NO: 4707623 - DNA, 25 bp, Homo sapien
gcctctggggcacgggggtcttgac

SEQ ID NO: 4707624 - DNA, 25 bp, Homo sapien
ggtggtcagtagcacaagccttgtc

SEQ ID NO: 4707625 - DNA, 25 bp, Homo sapien
cccattagtctgttgtcgaggtttg

SEQ ID NO: 4707626 - DNA, 25 bp, Homo sapien
tcgaggtttgtctggctcagctcca

SEQ ID NO: 4707627 - DNA, 25 bp, Homo sapien
ggaaatggtcccttcaggacgcagg

SEQ ID NO: 4707628 - DNA, 25 bp, Homo sapien
ctgtgaccaagaaagtagtcagcat

SEQ ID NO: 4707629 - DNA, 25 bp, Homo sapien
caggaagagggcctgcggcttgcat

SEQ ID NO: 4707630 - DNA, 25 bp, Homo sapien
tgcacgcatttttccaggaagaggg

SEQ ID NO: 4707631 - DNA, 25 bp, Homo sapien
ctgcacgcatttttccaggaagagg

SEQ ID NO: 4707632 - DNA, 25 bp, Homo sapien
gaagagggcctgcggcttgcatcat

SEQ ID NO: 4707633 - DNA, 25 bp, Homo sapien
tgaaacgtaagggacccgacagcca

SEQ ID NO: 4707634 - DNA, 25 bp, Homo sapien
cagcacggagccgtgagccacagag

SEQ ID NO: 4707635 - DNA, 25 bp, Homo sapien
acggagccgtgagccacagagatgc

SEQ ID NO: 4707636 - DNA, 25 bp, Homo sapien
caccacggcgaggaaggcgcagaag

SEQ ID NO: 4707637 - DNA, 25 bp, Homo sapien
aggccccgttgggaagtgacactcg

SEQ ID NO: 4707638 - DNA, 25 bp, Homo sapien
gcatgcctgaatccctgagccgctg

SEQ ID NO: 4707639 - DNA, 25 bp, Homo sapien
cactcgggatttgagctctggcatg

SEQ ID NO: 4707640 - DNA, 25 bp, Homo sapien
tgcctgaatccctgagccgctgcgt

SEQ ID NO: 4707641 - DNA, 25 bp, Homo sapien
ccttgacaggtccaaactccagtgt

SEQ ID NO: 4707642 - DNA, 25 bp, Homo sapien
tcacgggtgtttatggtctcttgtc

SEQ ID NO: 4707643 - DNA, 25 bp, Homo sapien
tgtcagccctgtgaaactccgctgg

SEQ ID NO: 4707644 - DNA, 25 bp, Homo sapien
ggatcttcagatcgccactcaattt

SEQ ID NO: 4707645 - DNA, 25 bp, Homo sapien
gaagggaaacctctgagcatcaaac

SEQ ID NO: 4707646 - DNA, 25 bp, Homo sapien
ctagaagggaaacctctgagcatca

SEQ ID NO: 4707647 - DNA, 25 bp, Homo sapien
ggaaacctctgagcatcaaactcac

SEQ ID NO: 4707648 - DNA, 25 bp, Homo sapien
agggaaacctctgagcatcaaactc

SEQ ID NO: 4707649 - DNA, 25 bp, Homo sapien
gagcatagctttagccacatcccat

SEQ ID NO: 4707650 - DNA, 25 bp, Homo sapien
cagtcttagagtggacatttgggca

SEQ ID NO: 4707651 - DNA, 25 bp, Homo sapien
tcagcttggcaacatggctagcagc

SEQ ID NO: 4707652 - DNA, 25 bp, Homo sapien
catttgggcagaacatcatagcatc

SEQ ID NO: 4707653 - DNA, 25 bp, Homo sapien
ccttatgatgtcatctaaccttaac

SEQ ID NO: 4707654 - DNA, 25 bp, Homo sapien
cataactctctaaaagtcccatctc

SEQ ID NO: 4707655 - DNA, 25 bp, Homo sapien
tagggcccccaacccttatgatgtc

SEQ ID NO: 4707656 - DNA, 25 bp, Homo sapien
tactcactgtatgagtgttagggct

SEQ ID NO: 4707657 - DNA, 25 bp, Homo sapien
cctatatggtggcagggtcgagggc

SEQ ID NO: 4707658 - DNA, 25 bp, Homo sapien
ggtcgagggcggtgtctccgtggag

SEQ ID NO: 4707659 - DNA, 25 bp, Homo sapien
gcggtgtctccgtggagtgtgatga

SEQ ID NO: 4707660 - DNA, 25 bp, Homo sapien
gtcttgtagaccaccggcggtggct

SEQ ID NO: 4707661 - DNA, 25 bp, Homo sapien
tttcccggcttggccccgatacagc

SEQ ID NO: 4707662 - DNA, 25 bp, Homo sapien
ttcccggcttggccccgatacagcc

SEQ ID NO: 4707663 - DNA, 25 bp, Homo sapien
ccagctgattaggtggaagaaacac

SEQ ID NO: 4707664 - DNA, 25 bp, Homo sapien
cactccaaataattgacagcaaaac

SEQ ID NO: 4707665 - DNA, 25 bp, Homo sapien
tccaaataattgacagcaaaaccac

SEQ ID NO: 4707666 - DNA, 25 bp, Homo sapien
ggaaacactccagctgattaggtgg

SEQ ID NO: 4707667 - DNA, 25 bp, Homo sapien
catggccacatgaaactcagagaac

SEQ ID NO: 4707668 - DNA, 25 bp, Homo sapien
aagatctggtccctcggccgttcct

SEQ ID NO: 4707669 - DNA, 25 bp, Homo sapien
ggccgctgaacgcaatcatggccac

SEQ ID NO: 4707670 - DNA, 25 bp, Homo sapien
tcagagaacactcgagtaaagatct

SEQ ID NO: 4707671 - DNA, 25 bp, Homo sapien
gatgtggacatgagcccgaatttgt

SEQ ID NO: 4707672 - DNA, 25 bp, Homo sapien
ggttctgaagacagccggtgaggag

SEQ ID NO: 4707673 - DNA, 25 bp, Homo sapien
ggcacatgtgtgagagaagagaacc

SEQ ID NO: 4707674 - DNA, 25 bp, Homo sapien
cagccaacagatgtggacatgagcc

SEQ ID NO: 4707675 - DNA, 25 bp, Homo sapien
cctggcgggtaggaggcctcgccgg

SEQ ID NO: 4707676 - DNA, 25 bp, Homo sapien
gtgcttgtgcctgtagcgtgctgct

SEQ ID NO: 4707677 - DNA, 25 bp, Homo sapien
tggtgaggtgcttgtgcctgtagcg

SEQ ID NO: 4707678 - DNA, 25 bp, Homo sapien
cttgtgcctgtagcgtgctgctggc

SEQ ID NO: 4707679 - DNA, 25 bp, Homo sapien
gcagctccggccctgaaccctccat

SEQ ID NO: 4707680 - DNA, 25 bp, Homo sapien
tgcctttcacaatgacaggcccttc

SEQ ID NO: 4707681 - DNA, 25 bp, Homo sapien
gcctttcacaatgacaggcccttcc

SEQ ID NO: 4707682 - DNA, 25 bp, Homo sapien
ggtggggacactggtgcctttcaca

SEQ ID NO: 4707683 - DNA, 25 bp, Homo sapien
ggggacactggtgcctttcacaatg

SEQ ID NO: 4707684 - DNA, 25 bp, Homo sapien
aagcatgacccagcccaagactcag

SEQ ID NO: 4707685 - DNA, 25 bp, Homo sapien
gccgtggcagggacagactgcccac

SEQ ID NO: 4707686 - DNA, 25 bp, Homo sapien
tccaggcgaggaagcagaagcatga

SEQ ID NO: 4707687 - DNA, 25 bp, Homo sapien
gaaggaagccccactgtcccagcgt

SEQ ID NO: 4707688 - DNA, 25 bp, Homo sapien
tcattgcagactcaaacggcaggat

SEQ ID NO: 4707689 - DNA, 25 bp, Homo sapien
accaggggctcgtgttggcagctca

SEQ ID NO: 4707690 - DNA, 25 bp, Homo sapien
agaccaacgcaaaccgcagaggatg

SEQ ID NO: 4707691 - DNA, 25 bp, Homo sapien
ttgtggtgagcaacaccaggggctc

SEQ ID NO: 4707692 - DNA, 25 bp, Homo sapien
ctggctgcttcacagtgccggatgc

SEQ ID NO: 4707693 - DNA, 25 bp, Homo sapien
ttggtcttggtcaggggtacagacc

SEQ ID NO: 4707694 - DNA, 25 bp, Homo sapien
gggtacagaccagggccatcttcca

SEQ ID NO: 4707695 - DNA, 25 bp, Homo sapien
gccggatgcagtgctttgcttggtc

SEQ ID NO: 4707696 - DNA, 25 bp, Homo sapien
ctgcccttcctggggccgcccgctg

SEQ ID NO: 4707697 - DNA, 25 bp, Homo sapien
tcctggggccgcccgctggccccag

SEQ ID NO: 4707698 - DNA, 25 bp, Homo sapien
tgcccttcctggggccgcccgctgg

SEQ ID NO: 4707699 - DNA, 25 bp, Homo sapien
tggggccgcccgctggccccaggac

SEQ ID NO: 4707700 - DNA, 25 bp, Homo sapien
ttggcacagggacgtacagaggact

SEQ ID NO: 4707701 - DNA, 25 bp, Homo sapien
tacagaggacttcgagcagctggca

SEQ ID NO: 4707702 - DNA, 25 bp, Homo sapien
cagctggcagggactgcgatgacct

SEQ ID NO: 4707703 - DNA, 25 bp, Homo sapien
aggagacggccgcagtggccagggc

SEQ ID NO: 4707704 - DNA, 25 bp, Homo sapien
acagcaggcagtcagggcctgggca

SEQ ID NO: 4707705 - DNA, 25 bp, Homo sapien
tcaggacagcaggcagtcagggcct

SEQ ID NO: 4707706 - DNA, 25 bp, Homo sapien
aggacagcaggcagtcagggcctgg

SEQ ID NO: 4707707 - DNA, 25 bp, Homo sapien
gacagcaggcagtcagggcctgggc

SEQ ID NO: 4707708 - DNA, 25 bp, Homo sapien
cactgtctcaggagcgtccgctgga

SEQ ID NO: 4707709 - DNA, 25 bp, Homo sapien
gtcaccagggcaccgatagactcag

SEQ ID NO: 4707710 - DNA, 25 bp, Homo sapien
ccgatagactcagggagttcttttc

SEQ ID NO: 4707711 - DNA, 25 bp, Homo sapien
cagcaccaggactgttccgatgtca

SEQ ID NO: 4707712 - DNA, 25 bp, Homo sapien
gagctgagcacgtacaagccatttt

SEQ ID NO: 4707713 - DNA, 25 bp, Homo sapien
ctggtggtggctccaccggaacccg

SEQ ID NO: 4707714 - DNA, 25 bp, Homo sapien
accggaacccgcgagaagagctgag

SEQ ID NO: 4707715 - DNA, 25 bp, Homo sapien
ttttctcggatgagttataattttc

SEQ ID NO: 4707716 - DNA, 25 bp, Homo sapien
gcctcctggtcgaccgccaacttct

SEQ ID NO: 4707717 - DNA, 25 bp, Homo sapien
aggcctcctggtcgaccgccaactt

SEQ ID NO: 4707718 - DNA, 25 bp, Homo sapien
acttctcctgggaggcgtcccgcca

SEQ ID NO: 4707719 - DNA, 25 bp, Homo sapien
tgaggcctcctggtcgaccgccaac

SEQ ID NO: 4707720 - DNA, 25 bp, Homo sapien
cagcgggagggcgagccctgagtga

SEQ ID NO: 4707721 - DNA, 25 bp, Homo sapien
gcatctcctgccatcccaggacaca

SEQ ID NO: 4707722 - DNA, 25 bp, Homo sapien
gggactcggcgtgccaggaagggct

SEQ ID NO: 4707723 - DNA, 25 bp, Homo sapien
gagggactctgagggactcggcgtg

SEQ ID NO: 4707724 - DNA, 25 bp, Homo sapien
tggccctggacattttagggtgaac

SEQ ID NO: 4707725 - DNA, 25 bp, Homo sapien
cctggacattttagggtgaacactg

SEQ ID NO: 4707726 - DNA, 25 bp, Homo sapien
ctggacattttagggtgaacactga

SEQ ID NO: 4707727 - DNA, 25 bp, Homo sapien
gccctggacattttagggtgaacac

SEQ ID NO: 4707728 - DNA, 25 bp, Homo sapien
gtccatggccagctcgttcctccag

SEQ ID NO: 4707729 - DNA, 25 bp, Homo sapien
tggccagctcgttcctccaggagtt

SEQ ID NO: 4707730 - DNA, 25 bp, Homo sapien
cacgtccatggccagctcgttcctc

SEQ ID NO: 4707731 - DNA, 25 bp, Homo sapien
gagctttccggggggcacgtccatg

SEQ ID NO: 4707732 - DNA, 25 bp, Homo sapien
agcagtgccggttccctcctcagga

SEQ ID NO: 4707733 - DNA, 25 bp, Homo sapien
aggactctgaggtccgtgaagctca

SEQ ID NO: 4707734 - DNA, 25 bp, Homo sapien
agtgccggttccctcctcaggaaca

SEQ ID NO: 4707735 - DNA, 25 bp, Homo sapien
ggtccgtgaagctcaagctatgact

SEQ ID NO: 4707736 - DNA, 25 bp, Homo sapien
tctgccaggccaagtcccaagtgca

SEQ ID NO: 4707737 - DNA, 25 bp, Homo sapien
tcccaagtgcaagcttcactgacag

SEQ ID NO: 4707738 - DNA, 25 bp, Homo sapien
ctgggcaacggacggcaccatctgg

SEQ ID NO: 4707739 - DNA, 25 bp, Homo sapien
gcaccgtctgggcaacggacggcac

SEQ ID NO: 4707740 - DNA, 25 bp, Homo sapien
gtccgccagccgctgatcgggccac

SEQ ID NO: 4707741 - DNA, 25 bp, Homo sapien
tggaagacagccgtgtccgccagcc

SEQ ID NO: 4707742 - DNA, 25 bp, Homo sapien
ccagccgctgatcgggccacaaagg

SEQ ID NO: 4707743 - DNA, 25 bp, Homo sapien
ctggaagacagccgtgtccgccagc

SEQ ID NO: 4707744 - DNA, 25 bp, Homo sapien
agaggcggtgtccagcgccaagcca

SEQ ID NO: 4707745 - DNA, 25 bp, Homo sapien
gccggtagggagtggcgcatgggca

SEQ ID NO: 4707746 - DNA, 25 bp, Homo sapien
caccgtcctgctggttttgcaaaga

SEQ ID NO: 4707747 - DNA, 25 bp, Homo sapien
atcagagatgggtcccagcagccgg

SEQ ID NO: 4707748 - DNA, 25 bp, Homo sapien
tttattacagccactacgtgttggg

SEQ ID NO: 4707749 - DNA, 25 bp, Homo sapien
atggagccgccatccctttctgggc

SEQ ID NO: 4707750 - DNA, 25 bp, Homo sapien
gagttgagcttagaaggcctgttcc

SEQ ID NO: 4707751 - DNA, 25 bp, Homo sapien
tatactcgaatgcaaacctatggca

SEQ ID NO: 4707752 - DNA, 25 bp, Homo sapien
tgggtgcaggtaaactgcaaggcct

SEQ ID NO: 4707753 - DNA, 25 bp, Homo sapien
tgctggtgaaggcagcgttggtgat

SEQ ID NO: 4707754 - DNA, 25 bp, Homo sapien
ccctgagatgcggtcagggtcccca

SEQ ID NO: 4707755 - DNA, 25 bp, Homo sapien
ttttccccctgagatgcggtcaggg

SEQ ID NO: 4707756 - DNA, 25 bp, Homo sapien
tccacaaaaccgatcataaccaggc

SEQ ID NO: 4707757 - DNA, 25 bp, Homo sapien
tctgagcagggtccatttgtcaact

SEQ ID NO: 4707758 - DNA, 25 bp, Homo sapien
catttgtcaactgccccgtgcccat

SEQ ID NO: 4707759 - DNA, 25 bp, Homo sapien
cacaaaaccgatcataaccaggcat

SEQ ID NO: 4707760 - DNA, 25 bp, Homo sapien
tcttgaccatgcttacagggcttta

SEQ ID NO: 4707761 - DNA, 25 bp, Homo sapien
ctcttgaccatgcttacagggcttt

SEQ ID NO: 4707762 - DNA, 25 bp, Homo sapien
cctcttgaccatgcttacagggctt

SEQ ID NO: 4707763 - DNA, 25 bp, Homo sapien
cttgaccatgcttacagggctttat

SEQ ID NO: 4707764 - DNA, 25 bp, Homo sapien
aagccgttcttcgtttatggtccat

SEQ ID NO: 4707765 - DNA, 25 bp, Homo sapien
tccacggtcctcacccgctcaaggt

SEQ ID NO: 4707766 - DNA, 25 bp, Homo sapien
aaggtctggctctatatccgggcca

SEQ ID NO: 4707767 - DNA, 25 bp, Homo sapien
tctggctctatatccgggccacaag

SEQ ID NO: 4707768 - DNA, 25 bp, Homo sapien
ggtcctcacccgctcaaggtctggc

SEQ ID NO: 4707769 - DNA, 25 bp, Homo sapien
ccgtggtgcagccatccgtggtgca

SEQ ID NO: 4707770 - DNA, 25 bp, Homo sapien
gttcccacgatggtgtctgctcccg

SEQ ID NO: 4707771 - DNA, 25 bp, Homo sapien
tgctcccattgtgtctgctccggtg

SEQ ID NO: 4707772 - DNA, 25 bp, Homo sapien
ttcccatgatgtgggttcccacggt

SEQ ID NO: 4707773 - DNA, 25 bp, Homo sapien
attgggagtggggagccacattgga

SEQ ID NO: 4707774 - DNA, 25 bp, Homo sapien
tgggagtggggagccacattggaca

SEQ ID NO: 4707775 - DNA, 25 bp, Homo sapien
cccaagattgggagtggggagccac

SEQ ID NO: 4707776 - DNA, 25 bp, Homo sapien
caagattgggagtggggagccacat

SEQ ID NO: 4707777 - DNA, 25 bp, Homo sapien
tgaccatggtgcaggctgtctactc

SEQ ID NO: 4707778 - DNA, 25 bp, Homo sapien
gcaagaaagtcccatctgaaatcca

SEQ ID NO: 4707779 - DNA, 25 bp, Homo sapien
caaaaggcggttaacattgcacaca

SEQ ID NO: 4707780 - DNA, 25 bp, Homo sapien
ccccgactggtgaacattaatggag

SEQ ID NO: 4707781 - DNA, 25 bp, Homo sapien
tcctcctgcccgggagtgacagaga

SEQ ID NO: 4707782 - DNA, 25 bp, Homo sapien
cctcctgcccgggagtgacagagac

SEQ ID NO: 4707783 - DNA, 25 bp, Homo sapien
aggttccatcaggcagtggccgccc

SEQ ID NO: 4707784 - DNA, 25 bp, Homo sapien
gaggttccatcaggcagtggccgcc

SEQ ID NO: 4707785 - DNA, 25 bp, Homo sapien
ttttgggatcactggttcttgagtc

SEQ ID NO: 4707786 - DNA, 25 bp, Homo sapien
agggaggttccatcaggcagtggcc

SEQ ID NO: 4707787 - DNA, 25 bp, Homo sapien
cgcggaggccgcggcgcggcgagtt

SEQ ID NO: 4707788 - DNA, 25 bp, Homo sapien
cggaggccgcggcgcggcgagttgt

SEQ ID NO: 4707789 - DNA, 25 bp, Homo sapien
gcgcgcggaggccgcggcgcggcga

SEQ ID NO: 4707790 - DNA, 25 bp, Homo sapien
cggcggggagccggcggctgcggtg

SEQ ID NO: 4707791 - DNA, 25 bp, Homo sapien
tctgcgactaactcatgcccggccg

SEQ ID NO: 4707792 - DNA, 25 bp, Homo sapien
gtctgcgactaactcatgcccggcc

SEQ ID NO: 4707793 - DNA, 25 bp, Homo sapien
cgactaactcatgcccggccggcgg

SEQ ID NO: 4707794 - DNA, 25 bp, Homo sapien
tgcgactaactcatgcccggccggc

SEQ ID NO: 4707795 - DNA, 25 bp, Homo sapien
cgagcggcaggaaatgtttggtgtc

SEQ ID NO: 4707796 - DNA, 25 bp, Homo sapien
gcggcaggaaatgtttggtgtccat

SEQ ID NO: 4707797 - DNA, 25 bp, Homo sapien
gagcggcaggaaatgtttggtgtcc

SEQ ID NO: 4707798 - DNA, 25 bp, Homo sapien
agcggcaggaaatgtttggtgtcca

SEQ ID NO: 4707799 - DNA, 25 bp, Homo sapien
tgcccgtgctaccagccagagggag

SEQ ID NO: 4707800 - DNA, 25 bp, Homo sapien
ggccccgggacagtgcagcagaacc

SEQ ID NO: 4707801 - DNA, 25 bp, Homo sapien
gggaggccccgggacagtgcagcag

SEQ ID NO: 4707802 - DNA, 25 bp, Homo sapien
ctgcccgtgctaccagccagaggga

SEQ ID NO: 4707803 - DNA, 25 bp, Homo sapien
cggcgacctaggtccggctccaagt

SEQ ID NO: 4707804 - DNA, 25 bp, Homo sapien
cttgttctcagaaaggcggccaggc

SEQ ID NO: 4707805 - DNA, 25 bp, Homo sapien
gtgggcactgccagcgccaagcaag

SEQ ID NO: 4707806 - DNA, 25 bp, Homo sapien
gacaacaatcggctccttgttctca

SEQ ID NO: 4707807 - DNA, 25 bp, Homo sapien
gcattgctcaagaaggcagctgcgg

SEQ ID NO: 4707808 - DNA, 25 bp, Homo sapien
cgaggcgtgcatcgaggctcatgca

SEQ ID NO: 4707809 - DNA, 25 bp, Homo sapien
ttcgggtggtcggtgatacctgcca

SEQ ID NO: 4707810 - DNA, 25 bp, Homo sapien
tgggtgcctgcagaaagggatctga

SEQ ID NO: 4707811 - DNA, 25 bp, Homo sapien
caggaaggcaggtaggcagcctcct

SEQ ID NO: 4707812 - DNA, 25 bp, Homo sapien
acccaccaggtcagggcggcccaca

SEQ ID NO: 4707813 - DNA, 25 bp, Homo sapien
gcggcgctgtccactctcctatggg

SEQ ID NO: 4707814 - DNA, 25 bp, Homo sapien
atctcagccctggagaccacacatg

SEQ ID NO: 4707815 - DNA, 25 bp, Homo sapien
ccagtgcccatagagcgtcgaggga

SEQ ID NO: 4707816 - DNA, 25 bp, Homo sapien
gaaagtctcctacggaaggcagcac

SEQ ID NO: 4707817 - DNA, 25 bp, Homo sapien
caccagtgtgttgggacaggaagcc

SEQ ID NO: 4707818 - DNA, 25 bp, Homo sapien
cagacaccggtcagagtgggaagct

SEQ ID NO: 4707819 - DNA, 25 bp, Homo sapien
gcctctgaaggatgctcaccactgt

SEQ ID NO: 4707820 - DNA, 25 bp, Homo sapien
ctctgaaggatgctcaccactgtca

SEQ ID NO: 4707821 - DNA, 25 bp, Homo sapien
ggcctctgaaggatgctcaccactg

SEQ ID NO: 4707822 - DNA, 25 bp, Homo sapien
ctgaaggatgctcaccactgtcagg

SEQ ID NO: 4707823 - DNA, 25 bp, Homo sapien
acagcggatggatgggcaggtgcca

SEQ ID NO: 4707824 - DNA, 25 bp, Homo sapien
tttgacagcggatggatgggcaggt

SEQ ID NO: 4707825 - DNA, 25 bp, Homo sapien
tgatgcctttgacagcggatggatg

SEQ ID NO: 4707826 - DNA, 25 bp, Homo sapien
cctttgacagcggatggatgggcag

SEQ ID NO: 4707827 - DNA, 25 bp, Homo sapien
agcgtccgggaagtcttctgaccac

SEQ ID NO: 4707828 - DNA, 25 bp, Homo sapien
gaagtcttctgaccaccgaatcctg

SEQ ID NO: 4707829 - DNA, 25 bp, Homo sapien
caccgaatcctgcattgtgcctgag

SEQ ID NO: 4707830 - DNA, 25 bp, Homo sapien
tctgaccaccgaatcctgcattgtg

SEQ ID NO: 4707831 - DNA, 25 bp, Homo sapien
ccaacaggcccaccaatgacacccg

SEQ ID NO: 4707832 - DNA, 25 bp, Homo sapien
ccggcccaacaggcccaccaatgac

SEQ ID NO: 4707833 - DNA, 25 bp, Homo sapien
caacaggcccaccaatgacacccgg

SEQ ID NO: 4707834 - DNA, 25 bp, Homo sapien
gcccaacaggcccaccaatgacacc

SEQ ID NO: 4707835 - DNA, 25 bp, Homo sapien
ctgccacgccgcccggaggagacag

SEQ ID NO: 4707836 - DNA, 25 bp, Homo sapien
cccggccctgcactcgcgcacccat

SEQ ID NO: 4707837 - DNA, 25 bp, Homo sapien
tgccacgccgcccggaggagacagg

SEQ ID NO: 4707838 - DNA, 25 bp, Homo sapien
ccacgccgcccggaggagacaggcc

SEQ ID NO: 4707839 - DNA, 25 bp, Homo sapien
cttgacgtcactccctcgaggtggc

SEQ ID NO: 4707840 - DNA, 25 bp, Homo sapien
tggggcctgagcaccccacaaggga

SEQ ID NO: 4707841 - DNA, 25 bp, Homo sapien
gaagtagcaaggatcccgtgggccc

SEQ ID NO: 4707842 - DNA, 25 bp, Homo sapien
cgtgggcccagactaatgtcaccct

SEQ ID NO: 4707843 - DNA, 25 bp, Homo sapien
tgacgattaaccgacaccacagaca

SEQ ID NO: 4707844 - DNA, 25 bp, Homo sapien
acttgcccatcaggcgactgcttcc

SEQ ID NO: 4707845 - DNA, 25 bp, Homo sapien
cggaagccgtgacgattaaccgaca

SEQ ID NO: 4707846 - DNA, 25 bp, Homo sapien
taactcccggaagccgtgacgatta

SEQ ID NO: 4707847 - DNA, 25 bp, Homo sapien
caggcaaagactcgggcctgtcacc

SEQ ID NO: 4707848 - DNA, 25 bp, Homo sapien
tgctgcacatctgtttcccgcctcc

SEQ ID NO: 4707849 - DNA, 25 bp, Homo sapien
gggcaggcaaagactcgggcctgtc

SEQ ID NO: 4707850 - DNA, 25 bp, Homo sapien
ctgctgcacatctgtttcccgcctc

SEQ ID NO: 4707851 - DNA, 25 bp, Homo sapien
aggcaatcagtgtgactccgaaccc

SEQ ID NO: 4707852 - DNA, 25 bp, Homo sapien
cgtgcccacttagggaccacaggca

SEQ ID NO: 4707853 - DNA, 25 bp, Homo sapien
gacctccagggctaaacggaagagc

SEQ ID NO: 4707854 - DNA, 25 bp, Homo sapien
actccgaaccccaggcgaggaggag

SEQ ID NO: 4707855 - DNA, 25 bp, Homo sapien
aagaagatgggaattttaaggccat

SEQ ID NO: 4707856 - DNA, 25 bp, Homo sapien
ccctgctccagatgtaatctgggaa

SEQ ID NO: 4707857 - DNA, 25 bp, Homo sapien
catgggagaagacactcctggattc

SEQ ID NO: 4707858 - DNA, 25 bp, Homo sapien
tgggaattttaaggccatgggagaa

SEQ ID NO: 4707859 - DNA, 25 bp, Homo sapien
cacttctggggagtcgagcaggacc

SEQ ID NO: 4707860 - DNA, 25 bp, Homo sapien
acaggcacttctggggagtcgagca

SEQ ID NO: 4707861 - DNA, 25 bp, Homo sapien
gcaatcacaggcacttctggggagt

SEQ ID NO: 4707862 - DNA, 25 bp, Homo sapien
cttctggggagtcgagcaggaccat

SEQ ID NO: 4707863 - DNA, 25 bp, Homo sapien
caaggtactgttctgcgcctgaccc

SEQ ID NO: 4707864 - DNA, 25 bp, Homo sapien
gggtctcgacagctctctgacgcaa

SEQ ID NO: 4707865 - DNA, 25 bp, Homo sapien
caaattcacactcactacgggccag

SEQ ID NO: 4707866 - DNA, 25 bp, Homo sapien
gcctgaccccggctttaggctgggc

SEQ ID NO: 4707867 - DNA, 25 bp, Homo sapien
ggtgctgatgggagaatgcagctgt

SEQ ID NO: 4707868 - DNA, 25 bp, Homo sapien
agctgatgaccgagaaaggcgggcc

SEQ ID NO: 4707869 - DNA, 25 bp, Homo sapien
gggaggagttcacctgggtggagaa

SEQ ID NO: 4707870 - DNA, 25 bp, Homo sapien
gtgtggtgggcaccgacatggagtg

SEQ ID NO: 4707871 - DNA, 25 bp, Homo sapien
tactgtgcactagacccctgggtgt

SEQ ID NO: 4707872 - DNA, 25 bp, Homo sapien
tcagaccacggcaaactaactgcgg

SEQ ID NO: 4707873 - DNA, 25 bp, Homo sapien
tccacaagcaggaagtgtcgggcac

SEQ ID NO: 4707874 - DNA, 25 bp, Homo sapien
taactgagtcgctccatgtgccagg

SEQ ID NO: 4707875 - DNA, 25 bp, Homo sapien
cagctctgcagtcagcgccgaggac

SEQ ID NO: 4707876 - DNA, 25 bp, Homo sapien
gcagttttggttccgctgcctccac

SEQ ID NO: 4707877 - DNA, 25 bp, Homo sapien
gacccacaggcgcttcccgctgcag

SEQ ID NO: 4707878 - DNA, 25 bp, Homo sapien
cgtgcagtgacacagcagttttggt

SEQ ID NO: 4707879 - DNA, 25 bp, Homo sapien
ggcggggaccttgaggacgccattg

SEQ ID NO: 4707880 - DNA, 25 bp, Homo sapien
ccagggggggcttgatgtcctcgct

SEQ ID NO: 4707881 - DNA, 25 bp, Homo sapien
ctgacggggttcataggtgagctga

SEQ ID NO: 4707882 - DNA, 25 bp, Homo sapien
ggggcttgatgtcctcgctgctgct

SEQ ID NO: 4707883 - DNA, 25 bp, Homo sapien
cagcccctggcccccacagcagcgg

SEQ ID NO: 4707884 - DNA, 25 bp, Homo sapien
gcccctggcccccacagcagcggta

SEQ ID NO: 4707885 - DNA, 25 bp, Homo sapien
agcccctggcccccacagcagcggt

SEQ ID NO: 4707886 - DNA, 25 bp, Homo sapien
cccctggcccccacagcagcggtac

SEQ ID NO: 4707887 - DNA, 25 bp, Homo sapien
agaaccctggaatggcctcgcggag

SEQ ID NO: 4707888 - DNA, 25 bp, Homo sapien
tgtcccacagacgtgagaaccctgg

SEQ ID NO: 4707889 - DNA, 25 bp, Homo sapien
cctggaatggcctcgcggagccctg

SEQ ID NO: 4707890 - DNA, 25 bp, Homo sapien
accctgcaatggcctgacaaccctg

SEQ ID NO: 4707891 - DNA, 25 bp, Homo sapien
tccgctgccgcttgtcaatcaggca

SEQ ID NO: 4707892 - DNA, 25 bp, Homo sapien
caatcaggcagtccttgttgtcgcg

SEQ ID NO: 4707893 - DNA, 25 bp, Homo sapien
caggtgtaggtcaggtccttgcgca

SEQ ID NO: 4707894 - DNA, 25 bp, Homo sapien
cctcgcagctgtacactccatagtg

SEQ ID NO: 4707895 - DNA, 25 bp, Homo sapien
ggaacgagtccctcctggtggctgc

SEQ ID NO: 4707896 - DNA, 25 bp, Homo sapien
gggaatgctgcggaacgagtccctc

SEQ ID NO: 4707897 - DNA, 25 bp, Homo sapien
tgcctgcgcgtgcaggccccattgc

SEQ ID NO: 4707898 - DNA, 25 bp, Homo sapien
ccaacctgagatgctatcagcctgt

SEQ ID NO: 4707899 - DNA, 25 bp, Homo sapien
ctgagctgaggggtacggcacctcc

SEQ ID NO: 4707900 - DNA, 25 bp, Homo sapien
catctgagctgaggggtacggcacc

SEQ ID NO: 4707901 - DNA, 25 bp, Homo sapien
agctgaggggtacggcacctccact

SEQ ID NO: 4707902 - DNA, 25 bp, Homo sapien
gcatctgagctgaggggtacggcac

SEQ ID NO: 4707903 - DNA, 25 bp, Homo sapien
catgtttgcctccacgtaggtctcg

SEQ ID NO: 4707904 - DNA, 25 bp, Homo sapien
caccggcatgtcctcgttggcgctg

SEQ ID NO: 4707905 - DNA, 25 bp, Homo sapien
ttggcgctgctggtcgactccacct

SEQ ID NO: 4707906 - DNA, 25 bp, Homo sapien
gtaggtctcggtcttgggctccacg

SEQ ID NO: 4707907 - DNA, 25 bp, Homo sapien
aaagctgtttgtcggctgcttggca

SEQ ID NO: 4707908 - DNA, 25 bp, Homo sapien
tctgagaagtgtgggatccgcttgg

SEQ ID NO: 4707909 - DNA, 25 bp, Homo sapien
ggtgaaaagctgtttgtcggctgct

SEQ ID NO: 4707910 - DNA, 25 bp, Homo sapien
tgtgggatccgcttggcccactcca

SEQ ID NO: 4707911 - DNA, 25 bp, Homo sapien
cattaccgcatggaaagagagctgc

SEQ ID NO: 4707912 - DNA, 25 bp, Homo sapien
taccctgaaagaagtctgagcccgc

SEQ ID NO: 4707913 - DNA, 25 bp, Homo sapien
ccttggcaggcggaatactcaccat

SEQ ID NO: 4707914 - DNA, 25 bp, Homo sapien
catagagtacataggaggtcccagg

SEQ ID NO: 4707915 - DNA, 25 bp, Homo sapien
caccacacaaacatggcgacggaca

SEQ ID NO: 4707916 - DNA, 25 bp, Homo sapien
agctgttctctggatcggtctggtg

SEQ ID NO: 4707917 - DNA, 25 bp, Homo sapien
aagctgccagaacatgggaccacag

SEQ ID NO: 4707918 - DNA, 25 bp, Homo sapien
cctctctcagcaaaagccttggcta

SEQ ID NO: 4707919 - DNA, 25 bp, Homo sapien
gggacagccacagaaaccctctaac

SEQ ID NO: 4707920 - DNA, 25 bp, Homo sapien
tcgcagagatgccacgggatggctt

SEQ ID NO: 4707921 - DNA, 25 bp, Homo sapien
tcagagacatgcagccgcagagatc

SEQ ID NO: 4707922 - DNA, 25 bp, Homo sapien
ccactggagacaggtcagcaaggac

SEQ ID NO: 4707923 - DNA, 25 bp, Homo sapien
ccagaagcatgcatgagcagggccc

SEQ ID NO: 4707924 - DNA, 25 bp, Homo sapien
tcacgatggtgggaattgcaggtct

SEQ ID NO: 4707925 - DNA, 25 bp, Homo sapien
gaccttgggccttgaacctgcatgg

SEQ ID NO: 4707926 - DNA, 25 bp, Homo sapien
ggagtaaagtggtgtgctgtcccca

SEQ ID NO: 4707927 - DNA, 25 bp, Homo sapien
aattggacgtgtgcttcagtggacc

SEQ ID NO: 4707928 - DNA, 25 bp, Homo sapien
cgtggccctgcccaaacgctcaggg

SEQ ID NO: 4707929 - DNA, 25 bp, Homo sapien
tgcccaaacgctcagggcctctgct

SEQ ID NO: 4707930 - DNA, 25 bp, Homo sapien
cctcgtggccctgcccaaacgctca

SEQ ID NO: 4707931 - DNA, 25 bp, Homo sapien
ggccctgcccaaacgctcagggcct

SEQ ID NO: 4707932 - DNA, 25 bp, Homo sapien
gataccaggtcttactccaggctcc

SEQ ID NO: 4707933 - DNA, 25 bp, Homo sapien
cacggacagaacagtgcggagtctc

SEQ ID NO: 4707934 - DNA, 25 bp, Homo sapien
gctttaaacggctcagggtgcgctg

SEQ ID NO: 4707935 - DNA, 25 bp, Homo sapien
tatgtcctccaactcaagaggctgg

SEQ ID NO: 4707936 - DNA, 25 bp, Homo sapien
tcccgtccttcacggcgatggagcg

SEQ ID NO: 4707937 - DNA, 25 bp, Homo sapien
gtgggagaaggaggcgatgagcagc

SEQ ID NO: 4707938 - DNA, 25 bp, Homo sapien
ggtggccaggaggatcccgtccttc

SEQ ID NO: 4707939 - DNA, 25 bp, Homo sapien
cgctgttccggtggacgtgcagccc

SEQ ID NO: 4707940 - DNA, 25 bp, Homo sapien
tgacagctaaactgaggtgagccgc

SEQ ID NO: 4707941 - DNA, 25 bp, Homo sapien
agccgcagctgcacagagggcacag

SEQ ID NO: 4707942 - DNA, 25 bp, Homo sapien
cagacaccccgagagggagtgggct

SEQ ID NO: 4707943 - DNA, 25 bp, Homo sapien
cgaacccagtgagacacaccactgt

SEQ ID NO: 4707944 - DNA, 25 bp, Homo sapien
ttaaagaggacgatggcgcgcaggc

SEQ ID NO: 4707945 - DNA, 25 bp, Homo sapien
cagggttaaagaggacgatggcgcg

SEQ ID NO: 4707946 - DNA, 25 bp, Homo sapien
tcttggacacaagctccgtcagcac

SEQ ID NO: 4707947 - DNA, 25 bp, Homo sapien
ccatctgcatgtcccgcatcttgga

SEQ ID NO: 4707948 - DNA, 25 bp, Homo sapien
gaaccctcagctggggcgtgtctcg

SEQ ID NO: 4707949 - DNA, 25 bp, Homo sapien
aggaagaagccacaggtcagaaccc

SEQ ID NO: 4707950 - DNA, 25 bp, Homo sapien
ctcagctggggcgtgtctcgggcac

SEQ ID NO: 4707951 - DNA, 25 bp, Homo sapien
agaagccacaggtcagaaccctcag

SEQ ID NO: 4707952 - DNA, 25 bp, Homo sapien
gctgctctgggtacttgtgcttgca

SEQ ID NO: 4707953 - DNA, 25 bp, Homo sapien
taggcctccaaggacgcatagacct

SEQ ID NO: 4707954 - DNA, 25 bp, Homo sapien
tacttgtgcttgcagtaggcctcca

SEQ ID NO: 4707955 - DNA, 25 bp, Homo sapien
ctcggccgggttcgagagccccttg

SEQ ID NO: 4707956 - DNA, 25 bp, Homo sapien
caggcggagcaagagcttagcgaac

SEQ ID NO: 4707957 - DNA, 25 bp, Homo sapien
ttccaggcatttgagcccgatggag

SEQ ID NO: 4707958 - DNA, 25 bp, Homo sapien
aagtcatttggtgcggcgcctccag

SEQ ID NO: 4707959 - DNA, 25 bp, Homo sapien
atttgagcccgatggagcgcagagc

SEQ ID NO: 4707960 - DNA, 25 bp, Homo sapien
tgtccgtggacaataccaggctggg

SEQ ID NO: 4707961 - DNA, 25 bp, Homo sapien
tagttcttgccacgaaggctgctgc

SEQ ID NO: 4707962 - DNA, 25 bp, Homo sapien
tagggatccacaacgctgaaaggca

SEQ ID NO: 4707963 - DNA, 25 bp, Homo sapien
tcttttagacacaactggcagccag

SEQ ID NO: 4707964 - DNA, 25 bp, Homo sapien
cattcgaacccggatttcaccaaag

SEQ ID NO: 4707965 - DNA, 25 bp, Homo sapien
ctcggaaaaccgaaggtcagggctg

SEQ ID NO: 4707966 - DNA, 25 bp, Homo sapien
ggagggtccttatgtacttgcttac

SEQ ID NO: 4707967 - DNA, 25 bp, Homo sapien
tacatgtttacaccacacacctgcg

SEQ ID NO: 4707968 - DNA, 25 bp, Homo sapien
tcagagacaatcgtacggagaagcc

SEQ ID NO: 4707969 - DNA, 25 bp, Homo sapien
tctagaagcagaaacgaaacagtcc

SEQ ID NO: 4707970 - DNA, 25 bp, Homo sapien
taaggcattgctaaggattgggaac

SEQ ID NO: 4707971 - DNA, 25 bp, Homo sapien
tgaggccacgatgtttcagagacaa

SEQ ID NO: 4707972 - DNA, 25 bp, Homo sapien
cagaggcgtggatgcttaggcagcc

SEQ ID NO: 4707973 - DNA, 25 bp, Homo sapien
cagctgggtgacatcgtgtgttcct

SEQ ID NO: 4707974 - DNA, 25 bp, Homo sapien
ggtgacatcgtgtgttccttggccc

SEQ ID NO: 4707975 - DNA, 25 bp, Homo sapien
caggtgggaacactcgtgctccgca

SEQ ID NO: 4707976 - DNA, 25 bp, Homo sapien
atgcgactccgaggcctccggcaga

SEQ ID NO: 4707977 - DNA, 25 bp, Homo sapien
agctgtcaataaacaccggtggatg

SEQ ID NO: 4707978 - DNA, 25 bp, Homo sapien
catggaactgggcttccccttcagg

SEQ ID NO: 4707979 - DNA, 25 bp, Homo sapien
agacacgctcgtccacaccatggaa

SEQ ID NO: 4707980 - DNA, 25 bp, Homo sapien
atggcgggagccatggggcctcgac

SEQ ID NO: 4707981 - DNA, 25 bp, Homo sapien
gcctcgacaagcacaggccctgctg

SEQ ID NO: 4707982 - DNA, 25 bp, Homo sapien
gagccatggggcctcgacaagcaca

SEQ ID NO: 4707983 - DNA, 25 bp, Homo sapien
catggggcctcgacaagcacaggcc

SEQ ID NO: 4707984 - DNA, 25 bp, Homo sapien
gccagtgtcgcccagcgaagaacta

SEQ ID NO: 4707985 - DNA, 25 bp, Homo sapien
cagttgacactgacccacgtttgac

SEQ ID NO: 4707986 - DNA, 25 bp, Homo sapien
ttctgactgacctgtttatggccag

SEQ ID NO: 4707987 - DNA, 25 bp, Homo sapien
cacgtttgaccacggcagatcctgc

SEQ ID NO: 4707988 - DNA, 25 bp, Homo sapien
cccacttcttcgtagccagcagaga

SEQ ID NO: 4707989 - DNA, 25 bp, Homo sapien
attgatggcctcataggaaggtggc

SEQ ID NO: 4707990 - DNA, 25 bp, Homo sapien
gtagccagcagagacctccgagcac

SEQ ID NO: 4707991 - DNA, 25 bp, Homo sapien
ttgatggcctcataggaaggtggcc

SEQ ID NO: 4707992 - DNA, 25 bp, Homo sapien
agtgactgggtcagactggcagccc

SEQ ID NO: 4707993 - DNA, 25 bp, Homo sapien
tttccagctgaggagtgactgggtc

SEQ ID NO: 4707994 - DNA, 25 bp, Homo sapien
ctggagggtttccagctgaggagtg

SEQ ID NO: 4707995 - DNA, 25 bp, Homo sapien
gagtgactgggtcagactggcagcc

SEQ ID NO: 4707996 - DNA, 25 bp, Homo sapien
gtcaccatggcgtccaccctgatgc

SEQ ID NO: 4707997 - DNA, 25 bp, Homo sapien
accatggcgtccaccctgatgccca

SEQ ID NO: 4707998 - DNA, 25 bp, Homo sapien
ctaagctgtcaccatggcgtccacc

SEQ ID NO: 4707999 - DNA, 25 bp, Homo sapien
agctgtcaccatggcgtccaccctg

SEQ ID NO: 4708000 - DNA, 25 bp, Homo sapien
ccaagggagaaggagccaggagccc

SEQ ID NO: 4708001 - DNA, 25 bp, Homo sapien
ctgggagagggtggacctgccacct

SEQ ID NO: 4708002 - DNA, 25 bp, Homo sapien
ctccacgcccaagggagaaggagcc

SEQ ID NO: 4708003 - DNA, 25 bp, Homo sapien
ctcctccacgcccaagggagaagga

SEQ ID NO: 4708004 - DNA, 25 bp, Homo sapien
tcggagactccggatggagggcagt

SEQ ID NO: 4708005 - DNA, 25 bp, Homo sapien
caggcacggagacgtcggagactcc

SEQ ID NO: 4708006 - DNA, 25 bp, Homo sapien
cggagactccggatggagggcagtc

SEQ ID NO: 4708007 - DNA, 25 bp, Homo sapien
agaacaggcacggagacgtcggaga

SEQ ID NO: 4708008 - DNA, 25 bp, Homo sapien
tggagggtcaccaagctcattctcg

SEQ ID NO: 4708009 - DNA, 25 bp, Homo sapien
caagctcattctcgaagagtctcag

SEQ ID NO: 4708010 - DNA, 25 bp, Homo sapien
gagagtggcaggcaagccctctgcc

SEQ ID NO: 4708011 - DNA, 25 bp, Homo sapien
ctcgaagagtctcagagtgagagtg

SEQ ID NO: 4708012 - DNA, 25 bp, Homo sapien
tggaatcacgcagcacataactggg

SEQ ID NO: 4708013 - DNA, 25 bp, Homo sapien
cagaaatggttagtcgggcgtccac

SEQ ID NO: 4708014 - DNA, 25 bp, Homo sapien
caaagataacgaaattccctgcgga

SEQ ID NO: 4708015 - DNA, 25 bp, Homo sapien
tgccttaaggagatcagtgtgacgt

SEQ ID NO: 4708016 - DNA, 25 bp, Homo sapien
tggtaccgaaggctatgctgctgtt

SEQ ID NO: 4708017 - DNA, 25 bp, Homo sapien
ggcaggtccagttttgacaaacaag

SEQ ID NO: 4708018 - DNA, 25 bp, Homo sapien
cagttttgacaaacaaggtacgtgg

SEQ ID NO: 4708019 - DNA, 25 bp, Homo sapien
caaggtacgtggtaccgaaggctat

SEQ ID NO: 4708020 - DNA, 25 bp, Homo sapien
acctcctgcaccgtggccggagggc

SEQ ID NO: 4708021 - DNA, 25 bp, Homo sapien
agcacctcctgcaccgtggccggag

SEQ ID NO: 4708022 - DNA, 25 bp, Homo sapien
gcacctcctgcaccgtggccggagg

SEQ ID NO: 4708023 - DNA, 25 bp, Homo sapien
ccagcacctcctgcaccgtggccgg

SEQ ID NO: 4708024 - DNA, 25 bp, Homo sapien
ccccggagagcatccccacttccct

SEQ ID NO: 4708025 - DNA, 25 bp, Homo sapien
accccgagacaacttgcaggcactc

SEQ ID NO: 4708026 - DNA, 25 bp, Homo sapien
cttgcaggcactccccggagagcat

SEQ ID NO: 4708027 - DNA, 25 bp, Homo sapien
cccatccaccccgagacaacttgca

SEQ ID NO: 4708028 - DNA, 25 bp, Homo sapien
catagagcatctcatttgccaacac

SEQ ID NO: 4708029 - DNA, 25 bp, Homo sapien
acacggcatcttgcatgaggttgcc

SEQ ID NO: 4708030 - DNA, 25 bp, Homo sapien
tcatttgccaacacggcatcttgca

SEQ ID NO: 4708031 - DNA, 25 bp, Homo sapien
tgaggttgcctctgatgagggacca

SEQ ID NO: 4708032 - DNA, 25 bp, Homo sapien
gattgtatgctcacactcaggcagg

SEQ ID NO: 4708033 - DNA, 25 bp, Homo sapien
tgacagcttgaaggactgactcgct

SEQ ID NO: 4708034 - DNA, 25 bp, Homo sapien
tcatctgaataaagtggcaggctcc

SEQ ID NO: 4708035 - DNA, 25 bp, Homo sapien
tccggttctcgtgtgtcactgcagc

SEQ ID NO: 4708036 - DNA, 25 bp, Homo sapien
ggcctcttcccgtggagctgacagt

SEQ ID NO: 4708037 - DNA, 25 bp, Homo sapien
gggcctcttcccgtggagctgacag

SEQ ID NO: 4708038 - DNA, 25 bp, Homo sapien
ggggcctcttcccgtggagctgaca

SEQ ID NO: 4708039 - DNA, 25 bp, Homo sapien
tgcggggcctcttcccgtggagctg

SEQ ID NO: 4708040 - DNA, 25 bp, Homo sapien
gcatctgggtgcagagagagggccc

SEQ ID NO: 4708041 - DNA, 25 bp, Homo sapien
actgcatctgggtgcagagagaggg

SEQ ID NO: 4708042 - DNA, 25 bp, Homo sapien
cagagagagggcccgagtctgctcc

SEQ ID NO: 4708043 - DNA, 25 bp, Homo sapien
cccactgcatctgggtgcagagaga

SEQ ID NO: 4708044 - DNA, 25 bp, Homo sapien
ctcgagacgctcatggactccagca

SEQ ID NO: 4708045 - DNA, 25 bp, Homo sapien
tctgcgccattttattcacaggatc

SEQ ID NO: 4708046 - DNA, 25 bp, Homo sapien
tccagcaggaaagccgcacaagcac

SEQ ID NO: 4708047 - DNA, 25 bp, Homo sapien
caaatcctcgagacgctcatggact

SEQ ID NO: 4708048 - DNA, 25 bp, Homo sapien
taaaagcaaagaggtgaccagatgg

SEQ ID NO: 4708049 - DNA, 25 bp, Homo sapien
aggtgaccagatggtaaggaatcag

SEQ ID NO: 4708050 - DNA, 25 bp, Homo sapien
tttaaaagcaaagaggtgaccagat

SEQ ID NO: 4708051 - DNA, 25 bp, Homo sapien
ccagatggtaaggaatcagcagatg

SEQ ID NO: 4708052 - DNA, 25 bp, Homo sapien
gaatggagggttataatggatccaa

SEQ ID NO: 4708053 - DNA, 25 bp, Homo sapien
gacagcccaataaaggctcaaccta

SEQ ID NO: 4708054 - DNA, 25 bp, Homo sapien
ggtctaggaagacaccttgacagcc

SEQ ID NO: 4708055 - DNA, 25 bp, Homo sapien
tcgagagccaagcagatgaatggag

SEQ ID NO: 4708056 - DNA, 25 bp, Homo sapien
acagggtgacttggcctctgagcac

SEQ ID NO: 4708057 - DNA, 25 bp, Homo sapien
acacagggtgacttggcctctgagc

SEQ ID NO: 4708058 - DNA, 25 bp, Homo sapien
cagcacacagggtgacttggcctct

SEQ ID NO: 4708059 - DNA, 25 bp, Homo sapien
gcacacagggtgacttggcctctga

SEQ ID NO: 4708060 - DNA, 25 bp, Homo sapien
catcgtggttggtgcagttttgccc

SEQ ID NO: 4708061 - DNA, 25 bp, Homo sapien
tactctgaacagattgtgacatgac

SEQ ID NO: 4708062 - DNA, 25 bp, Homo sapien
ccccatcctccttgggtagggcaga

SEQ ID NO: 4708063 - DNA, 25 bp, Homo sapien
agttttgcccgcgtgctgagccatg

SEQ ID NO: 4708064 - DNA, 25 bp, Homo sapien
tggttgctcagcaaccaagatgtcg

SEQ ID NO: 4708065 - DNA, 25 bp, Homo sapien
tcgtgccctcatcggcacattgagg

SEQ ID NO: 4708066 - DNA, 25 bp, Homo sapien
ccctggggctctggttcgtgtcttg

SEQ ID NO: 4708067 - DNA, 25 bp, Homo sapien
cagcaaccaagatgtcgtgccctca

SEQ ID NO: 4708068 - DNA, 25 bp, Homo sapien
ggtccccgaccaggcacagcgtctc

SEQ ID NO: 4708069 - DNA, 25 bp, Homo sapien
accaggcacagcgtctccaggccag

SEQ ID NO: 4708070 - DNA, 25 bp, Homo sapien
gaagactctgggcattgcctgtcta

SEQ ID NO: 4708071 - DNA, 25 bp, Homo sapien
ggaggccacgtaggccagaagactc

SEQ ID NO: 4708072 - DNA, 25 bp, Homo sapien
gcatggttggacgttccactccatt

SEQ ID NO: 4708073 - DNA, 25 bp, Homo sapien
ctggcatggttggacgttccactcc

SEQ ID NO: 4708074 - DNA, 25 bp, Homo sapien
caccgccggaccaccaggtctctct

SEQ ID NO: 4708075 - DNA, 25 bp, Homo sapien
ccactccattgtcccagttccaccg

SEQ ID NO: 4708076 - DNA, 25 bp, Homo sapien
cacatcagcggagtggaaagagcag

SEQ ID NO: 4708077 - DNA, 25 bp, Homo sapien
aggcgggaaggaaatgacaggagca

SEQ ID NO: 4708078 - DNA, 25 bp, Homo sapien
gctcttcacatcagcggagtggaaa

SEQ ID NO: 4708079 - DNA, 25 bp, Homo sapien
caaggctcttcacatcagcggagtg

SEQ ID NO: 4708080 - DNA, 25 bp, Homo sapien
gctgcctcataaattcggttttcat

SEQ ID NO: 4708081 - DNA, 25 bp, Homo sapien
ctttaagaaagttcacatccgagaa

SEQ ID NO: 4708082 - DNA, 25 bp, Homo sapien
tggtcctttaagaaagttcacatcc

SEQ ID NO: 4708083 - DNA, 25 bp, Homo sapien
gcctcataaattcggttttcattaa

SEQ ID NO: 4708084 - DNA, 25 bp, Homo sapien
tcagtttccctaactgaccaggtct

SEQ ID NO: 4708085 - DNA, 25 bp, Homo sapien
actgaccaggtctcatggttccttc

SEQ ID NO: 4708086 - DNA, 25 bp, Homo sapien
gtttccctaactgaccaggtctcat

SEQ ID NO: 4708087 - DNA, 25 bp, Homo sapien
cctaactgaccaggtctcatggttc

SEQ ID NO: 4708088 - DNA, 25 bp, Homo sapien
gacatgtaagaaaacgtgactcagt

SEQ ID NO: 4708089 - DNA, 25 bp, Homo sapien
tgggtgaatctggtgtccggctcct

SEQ ID NO: 4708090 - DNA, 25 bp, Homo sapien
caaagtttgcatgcaggtgacagac

SEQ ID NO: 4708091 - DNA, 25 bp, Homo sapien
acaataggaccgtctccctggaggc

SEQ ID NO: 4708092 - DNA, 25 bp, Homo sapien
ctggttggagaagggcctggtgacc

SEQ ID NO: 4708093 - DNA, 25 bp, Homo sapien
ccctaagcatgtgtgagggtgacag

SEQ ID NO: 4708094 - DNA, 25 bp, Homo sapien
tgtgagggtgacaggacagatgcaa

SEQ ID NO: 4708095 - DNA, 25 bp, Homo sapien
acagatgcaagagctggttggagaa

SEQ ID NO: 4708096 - DNA, 25 bp, Homo sapien
ccgaggggcccggagagaacagact

SEQ ID NO: 4708097 - DNA, 25 bp, Homo sapien
gctgcctgagaaagtcggtgagagc

SEQ ID NO: 4708098 - DNA, 25 bp, Homo sapien
aaagtcggtgagagcccaagaaggt

SEQ ID NO: 4708099 - DNA, 25 bp, Homo sapien
atctcccggatctcccgcttcccga

SEQ ID NO: 4708100 - DNA, 25 bp, Homo sapien
cagggcttctgcagggcggctccca

SEQ ID NO: 4708101 - DNA, 25 bp, Homo sapien
atgccaggtcatggcagggcttctg

SEQ ID NO: 4708102 - DNA, 25 bp, Homo sapien
ctgcggaggatgccaggtcatggca

SEQ ID NO: 4708103 - DNA, 25 bp, Homo sapien
gcggctcccaggaccactggggtct

SEQ ID NO: 4708104 - DNA, 25 bp, Homo sapien
cccagggtgtggctggcggttgatc

SEQ ID NO: 4708105 - DNA, 25 bp, Homo sapien
gtggctggcggttgatctggggtta

SEQ ID NO: 4708106 - DNA, 25 bp, Homo sapien
ctggggcaccaaaggacttctgggg

SEQ ID NO: 4708107 - DNA, 25 bp, Homo sapien
cagggtgtggctggcggttgatctg

SEQ ID NO: 4708108 - DNA, 25 bp, Homo sapien
gagccgcacaggaaaccccattggg

SEQ ID NO: 4708109 - DNA, 25 bp, Homo sapien
ccattggggattggacggcacccct

SEQ ID NO: 4708110 - DNA, 25 bp, Homo sapien
tgtttctctggagaccgagggaacc

SEQ ID NO: 4708111 - DNA, 25 bp, Homo sapien
agaaactgcaaaaccatcgctgtcc

SEQ ID NO: 4708112 - DNA, 25 bp, Homo sapien
gaccacgatggaggtgcccttgagt

SEQ ID NO: 4708113 - DNA, 25 bp, Homo sapien
cacgatggaggtgcccttgagtcgc

SEQ ID NO: 4708114 - DNA, 25 bp, Homo sapien
tggaccacgatggaggtgcccttga

SEQ ID NO: 4708115 - DNA, 25 bp, Homo sapien
tccaccttagggcttgtttgctggt

SEQ ID NO: 4708116 - DNA, 25 bp, Homo sapien
ctgcattcttccatagggtgcgaat

SEQ ID NO: 4708117 - DNA, 25 bp, Homo sapien
tgcattcttccatagggtgcgaatt

SEQ ID NO: 4708118 - DNA, 25 bp, Homo sapien
cccagaaagctggtggcgtcgttct

SEQ ID NO: 4708119 - DNA, 25 bp, Homo sapien
ccttggcctcgttgttctactcaaa

SEQ ID NO: 4708120 - DNA, 25 bp, Homo sapien
gaataccaatggtatcagctctagt

SEQ ID NO: 4708121 - DNA, 25 bp, Homo sapien
gagtgcaaagtcctgataatcagga

SEQ ID NO: 4708122 - DNA, 25 bp, Homo sapien
cggtcctggccgtgggtcgtttctg

SEQ ID NO: 4708123 - DNA, 25 bp, Homo sapien
cctggccgtgggtcgtttctggatt

SEQ ID NO: 4708124 - DNA, 25 bp, Homo sapien
ccatggtcagactctgttgcagctg

SEQ ID NO: 4708125 - DNA, 25 bp, Homo sapien
gatttccatggtcagactctgttgc

SEQ ID NO: 4708126 - DNA, 25 bp, Homo sapien
ggcggagtccgtggagcccagtggg

SEQ ID NO: 4708127 - DNA, 25 bp, Homo sapien
cggtaaacaagctggcggagtccgt

SEQ ID NO: 4708128 - DNA, 25 bp, Homo sapien
agtcacaggcctgctggaacggctg

SEQ ID NO: 4708129 - DNA, 25 bp, Homo sapien
ttgtccaggaggccggtaaacaagc

SEQ ID NO: 4708130 - DNA, 25 bp, Homo sapien
agcacaccccggtgtacgcaaacag

SEQ ID NO: 4708131 - DNA, 25 bp, Homo sapien
gcgctccatggtcgctgacagttaa

SEQ ID NO: 4708132 - DNA, 25 bp, Homo sapien
acaccccggtgtacgcaaacagcag

SEQ ID NO: 4708133 - DNA, 25 bp, Homo sapien
agcagcacaccccggtgtacgcaaa

SEQ ID NO: 4708134 - DNA, 25 bp, Homo sapien
gtgtggtgcccttgcgctggcccac

SEQ ID NO: 4708135 - DNA, 25 bp, Homo sapien
ttgttgttccctgggcgctggaggc

SEQ ID NO: 4708136 - DNA, 25 bp, Homo sapien
ggtgcccttgcgctggcccacgatg

SEQ ID NO: 4708137 - DNA, 25 bp, Homo sapien
tgcttctctgtagcctcgctgtgct

SEQ ID NO: 4708138 - DNA, 25 bp, Homo sapien
aaagcgagttcctaactgcagctga

SEQ ID NO: 4708139 - DNA, 25 bp, Homo sapien
tgtaacgtgaagtgacaaagcgagt

SEQ ID NO: 4708140 - DNA, 25 bp, Homo sapien
tgcagctgattgtcgatcggcagag

SEQ ID NO: 4708141 - DNA, 25 bp, Homo sapien
gcagagactggcacactggagcagc

SEQ ID NO: 4708142 - DNA, 25 bp, Homo sapien
tggcctgggtacagtggcagccccg

SEQ ID NO: 4708143 - DNA, 25 bp, Homo sapien
tctcgttcacctgcgctggtggcct

SEQ ID NO: 4708144 - DNA, 25 bp, Homo sapien
ggttcttctcgttcacctgcgctgg

SEQ ID NO: 4708145 - DNA, 25 bp, Homo sapien
taaagccttggttcttctcgttcac

SEQ ID NO: 4708146 - DNA, 25 bp, Homo sapien
acacttgaagctccggatctcttcc

SEQ ID NO: 4708147 - DNA, 25 bp, Homo sapien
gggcacacttgaagctccggatctc

SEQ ID NO: 4708148 - DNA, 25 bp, Homo sapien
tggggcacacttgaagctccggatc

SEQ ID NO: 4708149 - DNA, 25 bp, Homo sapien
gcacacttgaagctccggatctctt

SEQ ID NO: 4708150 - DNA, 25 bp, Homo sapien
gatgccctgtacaaagcccatacaa

SEQ ID NO: 4708151 - DNA, 25 bp, Homo sapien
aaagcccatacaaagcggtgtgcat

SEQ ID NO: 4708152 - DNA, 25 bp, Homo sapien
acaaagcggtgtgcatgccagagag

SEQ ID NO: 4708153 - DNA, 25 bp, Homo sapien
catacaaagcggtgtgcatgccaga

SEQ ID NO: 4708154 - DNA, 25 bp, Homo sapien
gacagctgcaaatctggggacagtg

SEQ ID NO: 4708155 - DNA, 25 bp, Homo sapien
tgggacagctgcaaatctggggaca

SEQ ID NO: 4708156 - DNA, 25 bp, Homo sapien
cagctgcaaatctggggacagtggg

SEQ ID NO: 4708157 - DNA, 25 bp, Homo sapien
ggacagctgcaaatctggggacagt

SEQ ID NO: 4708158 - DNA, 25 bp, Homo sapien
cgagggccggcccgcggctgaccgc

SEQ ID NO: 4708159 - DNA, 25 bp, Homo sapien
tccgagggccggcccgcggctgacc

SEQ ID NO: 4708160 - DNA, 25 bp, Homo sapien
agggccggcccgcggctgaccgcat

SEQ ID NO: 4708161 - DNA, 25 bp, Homo sapien
gagcaaaccaaggaggcgccgggtc

SEQ ID NO: 4708162 - DNA, 25 bp, Homo sapien
gaatgctctgaacctgcatccggca

SEQ ID NO: 4708163 - DNA, 25 bp, Homo sapien
cagacttccgttagaatcccagcag

SEQ ID NO: 4708164 - DNA, 25 bp, Homo sapien
gaggagttccctctagctgcgcaag

SEQ ID NO: 4708165 - DNA, 25 bp, Homo sapien
tgaatgggcggtgaagaaactgacc

SEQ ID NO: 4708166 - DNA, 25 bp, Homo sapien
gagcggccatggcaaccatcaggtg

SEQ ID NO: 4708167 - DNA, 25 bp, Homo sapien
tctcatgtggacctgatggttcacc

SEQ ID NO: 4708168 - DNA, 25 bp, Homo sapien
caaggtcttcttggagtgcctggag

SEQ ID NO: 4708169 - DNA, 25 bp, Homo sapien
tgcttcccaagacaaaggccttgag

SEQ ID NO: 4708170 - DNA, 25 bp, Homo sapien
aggcgtccgaggttaggtttgccag

SEQ ID NO: 4708171 - DNA, 25 bp, Homo sapien
gaggcgtccgaggttaggtttgcca

SEQ ID NO: 4708172 - DNA, 25 bp, Homo sapien
gcagggaccgcaccactttaggagg

SEQ ID NO: 4708173 - DNA, 25 bp, Homo sapien
cgctccgctcgagtgaggtcctgcg

SEQ ID NO: 4708174 - DNA, 25 bp, Homo sapien
cccgttcttctttgtggcggcggct

SEQ ID NO: 4708175 - DNA, 25 bp, Homo sapien
cgggagggctcgactttggcccgcg

SEQ ID NO: 4708176 - DNA, 25 bp, Homo sapien
cggagcgcgctgcgcgctttccagc

SEQ ID NO: 4708177 - DNA, 25 bp, Homo sapien
gagcgcgctgcgcgctttccagcgg

SEQ ID NO: 4708178 - DNA, 25 bp, Homo sapien
ctttccagcgggtatggacgtccat

SEQ ID NO: 4708179 - DNA, 25 bp, Homo sapien
cgcgctgcgcgctttccagcgggta

SEQ ID NO: 4708180 - DNA, 25 bp, Homo sapien
ctctcatagacacacgcaggattaa

SEQ ID NO: 4708181 - DNA, 25 bp, Homo sapien
gctctacacctgctagcggctgatt

SEQ ID NO: 4708182 - DNA, 25 bp, Homo sapien
gacacttggcaaagcactgagagag

SEQ ID NO: 4708183 - DNA, 25 bp, Homo sapien
gattgtgccctcccgattaacggtg

SEQ ID NO: 4708184 - DNA, 25 bp, Homo sapien
ttctcctgcgtacccagtgagggaa

SEQ ID NO: 4708185 - DNA, 25 bp, Homo sapien
gccagcgagtagagggccccaaacc

SEQ ID NO: 4708186 - DNA, 25 bp, Homo sapien
atggcaagggagcacgcacaggcca

SEQ ID NO: 4708187 - DNA, 25 bp, Homo sapien
tgtgacaccacacaggatggcaagg

SEQ ID NO: 4708188 - DNA, 25 bp, Homo sapien
caagaacacgggtctaggaaacaga

SEQ ID NO: 4708189 - DNA, 25 bp, Homo sapien
gagacatctcggcaaataggctgag

SEQ ID NO: 4708190 - DNA, 25 bp, Homo sapien
agaaaccctattgccgaggtcctgg

SEQ ID NO: 4708191 - DNA, 25 bp, Homo sapien
gagctaatttccctacaagaacacg

SEQ ID NO: 4708192 - DNA, 25 bp, Homo sapien
gctgatgtcagggactggcttcaaa

SEQ ID NO: 4708193 - DNA, 25 bp, Homo sapien
gaatctcatggccaaacccatggga

SEQ ID NO: 4708194 - DNA, 25 bp, Homo sapien
tttgctgcgctgtgtctgagccttc

SEQ ID NO: 4708195 - DNA, 25 bp, Homo sapien
cccaggcagaacacgacctttgctg

SEQ ID NO: 4708196 - DNA, 25 bp, Homo sapien
ctggcgataatcctcccctatcact

SEQ ID NO: 4708197 - DNA, 25 bp, Homo sapien
gataatcctcccctatcactctttc

SEQ ID NO: 4708198 - DNA, 25 bp, Homo sapien
taatcctcccctatcactctttcct

SEQ ID NO: 4708199 - DNA, 25 bp, Homo sapien
ggcgataatcctcccctatcactct

SEQ ID NO: 4708200 - DNA, 25 bp, Homo sapien
tagggatggtctaggcgttccccat

SEQ ID NO: 4708201 - DNA, 25 bp, Homo sapien
agtgtgctacgttctgggacaggcc

SEQ ID NO: 4708202 - DNA, 25 bp, Homo sapien
tcgtacatgctcacagaaatgtgtg

SEQ ID NO: 4708203 - DNA, 25 bp, Homo sapien
gaaatgtgtggcgagttgaatgcaa

SEQ ID NO: 4708204 - DNA, 25 bp, Homo sapien
tgcatggtaacccacctaaacggct

SEQ ID NO: 4708205 - DNA, 25 bp, Homo sapien
cacacacacgtatatctgcaggaaa

SEQ ID NO: 4708206 - DNA, 25 bp, Homo sapien
gacagtgctgcacagcggttctcca

SEQ ID NO: 4708207 - DNA, 25 bp, Homo sapien
tgcttgcttgctggaaaggttctca

SEQ ID NO: 4708208 - DNA, 25 bp, Homo sapien
gaagtttgggggaaatgtcatgttc

SEQ ID NO: 4708209 - DNA, 25 bp, Homo sapien
tgggggaaatgtcatgttccagcag

SEQ ID NO: 4708210 - DNA, 25 bp, Homo sapien
agtttgggggaaatgtcatgttcca

SEQ ID NO: 4708211 - DNA, 25 bp, Homo sapien
tttgggggaaatgtcatgttccagc

SEQ ID NO: 4708212 - DNA, 25 bp, Homo sapien
agggctagtcaggatgccagctccg

SEQ ID NO: 4708213 - DNA, 25 bp, Homo sapien
cagtttggaactgaccagggctagt

SEQ ID NO: 4708214 - DNA, 25 bp, Homo sapien
aactgaccagggctagtcaggatgc

SEQ ID NO: 4708215 - DNA, 25 bp, Homo sapien
gagcagcagtttggaactgaccagg

SEQ ID NO: 4708216 - DNA, 25 bp, Homo sapien
gaagggcggctgtccctcctagttc

SEQ ID NO: 4708217 - DNA, 25 bp, Homo sapien
ggcacccgcagatgctcgcagaaat

SEQ ID NO: 4708218 - DNA, 25 bp, Homo sapien
cagatgctcgcagaaattgttcacg

SEQ ID NO: 4708219 - DNA, 25 bp, Homo sapien
tttgctctgtttgtaaagggccctg

SEQ ID NO: 4708220 - DNA, 25 bp, Homo sapien
tgggcttttgcctttgacttgagaa

SEQ ID NO: 4708221 - DNA, 25 bp, Homo sapien
gaaacgctgagtgccagtgcctggt

SEQ ID NO: 4708222 - DNA, 25 bp, Homo sapien
tggccccagcaaagaaggctttggt

SEQ ID NO: 4708223 - DNA, 25 bp, Homo sapien
tggtgaggctgcaccgcgcagccct

SEQ ID NO: 4708224 - DNA, 25 bp, Homo sapien
accttcaggagatctgctggctgag

SEQ ID NO: 4708225 - DNA, 25 bp, Homo sapien
tagaaccttcaggagatctgctggc

SEQ ID NO: 4708226 - DNA, 25 bp, Homo sapien
ctagaaccttcaggagatctgctgg

SEQ ID NO: 4708227 - DNA, 25 bp, Homo sapien
gaaccttcaggagatctgctggctg

SEQ ID NO: 4708228 - DNA, 25 bp, Homo sapien
cctttggaagatcgccgcgtggcgc

SEQ ID NO: 4708229 - DNA, 25 bp, Homo sapien
tgtaagcgacatccgggcctttgga

SEQ ID NO: 4708230 - DNA, 25 bp, Homo sapien
gctgagctgcgcgtctttggtgact

SEQ ID NO: 4708231 - DNA, 25 bp, Homo sapien
cgcgtggcgcaaaagcctgttgtct

SEQ ID NO: 4708232 - DNA, 25 bp, Homo sapien
ttaatcacgtccagataagcccaga

SEQ ID NO: 4708233 - DNA, 25 bp, Homo sapien
tcttagagctaatgctgcttcccgc

SEQ ID NO: 4708234 - DNA, 25 bp, Homo sapien
tcaaggcgatgaggttctccatcaa

SEQ ID NO: 4708235 - DNA, 25 bp, Homo sapien
gaggagctcattttagtccaggcca

SEQ ID NO: 4708236 - DNA, 25 bp, Homo sapien
cctacatcccccgtccctttctcat

SEQ ID NO: 4708237 - DNA, 25 bp, Homo sapien
ctctcagagacaaactcttcaaggt

SEQ ID NO: 4708238 - DNA, 25 bp, Homo sapien
tgtttcttgaaataactcgttctca

SEQ ID NO: 4708239 - DNA, 25 bp, Homo sapien
agctgcaaggcagagactcggtgcc

SEQ ID NO: 4708240 - DNA, 25 bp, Homo sapien
tcggtgcctcgaaggtgtttcttga

SEQ ID NO: 4708241 - DNA, 25 bp, Homo sapien
cagagtcattcttccgtcttaaaag

SEQ ID NO: 4708242 - DNA, 25 bp, Homo sapien
tctccgcagctcattaaaatgccgt

SEQ ID NO: 4708243 - DNA, 25 bp, Homo sapien
taaaagatcaaagaacgagttgcgc

SEQ ID NO: 4708244 - DNA, 25 bp, Homo sapien
cgccaccctgagtgccagagtcatt

SEQ ID NO: 4708245 - DNA, 25 bp, Homo sapien
aggaccatggcagccccacgtgatc

SEQ ID NO: 4708246 - DNA, 25 bp, Homo sapien
aacacatgccaggagcaatttgagg

SEQ ID NO: 4708247 - DNA, 25 bp, Homo sapien
tgtccatcgatcctggtggcaaagg

SEQ ID NO: 4708248 - DNA, 25 bp, Homo sapien
tgccggtgggccagccaaaagtgct

SEQ ID NO: 4708249 - DNA, 25 bp, Homo sapien
tttgaggtcattaaaaggcagaccc

SEQ ID NO: 4708250 - DNA, 25 bp, Homo sapien
tcacagttgttaggatggagaagtc

SEQ ID NO: 4708251 - DNA, 25 bp, Homo sapien
ccctgctcgttgtagatggagacca

SEQ ID NO: 4708252 - DNA, 25 bp, Homo sapien
ggcttccccgtgtggtcctcgtaga

SEQ ID NO: 4708253 - DNA, 25 bp, Homo sapien
tgctggataccctgctcgttgtaga

SEQ ID NO: 4708254 - DNA, 25 bp, Homo sapien
cgctgcggtcgaggaatttggtggt

SEQ ID NO: 4708255 - DNA, 25 bp, Homo sapien
tacagtcgaggatcaaggtgacatt

SEQ ID NO: 4708256 - DNA, 25 bp, Homo sapien
ggatccgggtgccaaacacgatgat

SEQ ID NO: 4708257 - DNA, 25 bp, Homo sapien
tgatgccattgatgtcgatcatggg

SEQ ID NO: 4708258 - DNA, 25 bp, Homo sapien
cgttcgaccagaagcctgccaggcg

SEQ ID NO: 4708259 - DNA, 25 bp, Homo sapien
agctgcagagtgagacctgcacggt

SEQ ID NO: 4708260 - DNA, 25 bp, Homo sapien
ctgccaggcgccagctgcagagtga

SEQ ID NO: 4708261 - DNA, 25 bp, Homo sapien
tgcagagtgagacctgcacggttcc

SEQ ID NO: 4708262 - DNA, 25 bp, Homo sapien
aattcataaggggagtccagaaaag

SEQ ID NO: 4708263 - DNA, 25 bp, Homo sapien
caagccagtgagcaacaaggtagtt

SEQ ID NO: 4708264 - DNA, 25 bp, Homo sapien
aagccagtgagcaacaaggtagttc

SEQ ID NO: 4708265 - DNA, 25 bp, Homo sapien
agccagtgagcaacaaggtagttct

SEQ ID NO: 4708266 - DNA, 25 bp, Homo sapien
gccagtgagcaacaaggtagttctg

SEQ ID NO: 4708267 - DNA, 25 bp, Homo sapien
cagaatctagatccacaggtgacct

SEQ ID NO: 4708268 - DNA, 25 bp, Homo sapien
gaagtggctgaatcatggccccgag

SEQ ID NO: 4708269 - DNA, 25 bp, Homo sapien
caccagtggatgctaaggagacagc

SEQ ID NO: 4708270 - DNA, 25 bp, Homo sapien
gtcccaggagatcatgcagagtgca

SEQ ID NO: 4708271 - DNA, 25 bp, Homo sapien
agcgccatccacttgcggggagggc

SEQ ID NO: 4708272 - DNA, 25 bp, Homo sapien
cgccatccacttgcggggagggcca

SEQ ID NO: 4708273 - DNA, 25 bp, Homo sapien
gaacgagacgctgaaaggggacaca

SEQ ID NO: 4708274 - DNA, 25 bp, Homo sapien
ggctctatggggctggagaacgaga

SEQ ID NO: 4708275 - DNA, 25 bp, Homo sapien
gcctctgtagcatgaaggcctgcag

SEQ ID NO: 4708276 - DNA, 25 bp, Homo sapien
cgaacatgcctctgtagcatgaagg

SEQ ID NO: 4708277 - DNA, 25 bp, Homo sapien
tctgtagcatgaaggcctgcaggaa

SEQ ID NO: 4708278 - DNA, 25 bp, Homo sapien
agcctttcccgaacatgcctctgta

SEQ ID NO: 4708279 - DNA, 25 bp, Homo sapien
gcctgcacttgtggcttgggcagtg

SEQ ID NO: 4708280 - DNA, 25 bp, Homo sapien
ggcagtgcacgcttgagctgctcct

SEQ ID NO: 4708281 - DNA, 25 bp, Homo sapien
actttcggagcagcgggcctgcaga

SEQ ID NO: 4708282 - DNA, 25 bp, Homo sapien
tccttctccacatcttgactttcgg

SEQ ID NO: 4708283 - DNA, 25 bp, Homo sapien
agactcgccacccaaagggtggtga

SEQ ID NO: 4708284 - DNA, 25 bp, Homo sapien
tcctcaaagactcgccacccaaagg

SEQ ID NO: 4708285 - DNA, 25 bp, Homo sapien
gactcgccacccaaagggtggtgac

SEQ ID NO: 4708286 - DNA, 25 bp, Homo sapien
caaagactcgccacccaaagggtgg

SEQ ID NO: 4708287 - DNA, 25 bp, Homo sapien
ccacggcacagttggcggccacgtt

SEQ ID NO: 4708288 - DNA, 25 bp, Homo sapien
tcgacggaagatgggtcggcggcca

SEQ ID NO: 4708289 - DNA, 25 bp, Homo sapien
gccacggcgggagcatgttgtcctt

SEQ ID NO: 4708290 - DNA, 25 bp, Homo sapien
gccagggtcattacggccattccgc

SEQ ID NO: 4708291 - DNA, 25 bp, Homo sapien
caacgatggcagccgcctacttcct

SEQ ID NO: 4708292 - DNA, 25 bp, Homo sapien
acgatggcagccgcctacttcctga

SEQ ID NO: 4708293 - DNA, 25 bp, Homo sapien
agccgcctacttcctgagccgcccc

SEQ ID NO: 4708294 - DNA, 25 bp, Homo sapien
gatggcagccgcctacttcctgagc

SEQ ID NO: 4708295 - DNA, 25 bp, Homo sapien
agccccatggctgcacgagctagcg

SEQ ID NO: 4708296 - DNA, 25 bp, Homo sapien
gctgcacgagctagcgctccttctg

SEQ ID NO: 4708297 - DNA, 25 bp, Homo sapien
gctccaagacagagcggatgcctcc

SEQ ID NO: 4708298 - DNA, 25 bp, Homo sapien
gagaagagggctctgtgatgtctgc

SEQ ID NO: 4708299 - DNA, 25 bp, Homo sapien
taagcaacatgacttctggatcaca

SEQ ID NO: 4708300 - DNA, 25 bp, Homo sapien
cactggtctcagtgcttgtgggcac

SEQ ID NO: 4708301 - DNA, 25 bp, Homo sapien
gcaggccctgcataaggtgctggca

SEQ ID NO: 4708302 - DNA, 25 bp, Homo sapien
ctaggtaacgaacacccacgaagcg

SEQ ID NO: 4708303 - DNA, 25 bp, Homo sapien
ccggtggtccgagacaaagagcagc

SEQ ID NO: 4708304 - DNA, 25 bp, Homo sapien
cagtcagggctgtagtgctcacagt

SEQ ID NO: 4708305 - DNA, 25 bp, Homo sapien
gtaatcataagctgcccggtggtcc

SEQ ID NO: 4708306 - DNA, 25 bp, Homo sapien
tcaggtactgcggtgtcacagtcag

SEQ ID NO: 4708307 - DNA, 25 bp, Homo sapien
ctcaccctcgccgtctccttccgtg

SEQ ID NO: 4708308 - DNA, 25 bp, Homo sapien
caccctcgccgtctccttccgtgta

SEQ ID NO: 4708309 - DNA, 25 bp, Homo sapien
tagtaataggtctcaccctcgccgt

SEQ ID NO: 4708310 - DNA, 25 bp, Homo sapien
gtaataggtctcaccctcgccgtct

SEQ ID NO: 4708311 - DNA, 25 bp, Homo sapien
ctcgccctcccctgcaccatggcct

SEQ ID NO: 4708312 - DNA, 25 bp, Homo sapien
gcaccatggcctcgaggggcccagc

SEQ ID NO: 4708313 - DNA, 25 bp, Homo sapien
cctgacacaacctctcctggcctcg

SEQ ID NO: 4708314 - DNA, 25 bp, Homo sapien
acacaacctctcctggcctcgccct

SEQ ID NO: 4708315 - DNA, 25 bp, Homo sapien
cacacccgtgcctgcatgccacatg

SEQ ID NO: 4708316 - DNA, 25 bp, Homo sapien
acacccgtgcctgcatgccacatgc

SEQ ID NO: 4708317 - DNA, 25 bp, Homo sapien
catcatacggtgagggcgtgtagta

SEQ ID NO: 4708318 - DNA, 25 bp, Homo sapien
tgtagtagtcctcactgggcacgta

SEQ ID NO: 4708319 - DNA, 25 bp, Homo sapien
acgtagtcatagtccccgatgccga

SEQ ID NO: 4708320 - DNA, 25 bp, Homo sapien
tcgccataggtgaggtcatcatacg

SEQ ID NO: 4708321 - DNA, 25 bp, Homo sapien
tagttctcgtcaaggttccggatcg

SEQ ID NO: 4708322 - DNA, 25 bp, Homo sapien
ttccggatcgtttcctcagtgaact

SEQ ID NO: 4708323 - DNA, 25 bp, Homo sapien
tggtatcctggttcgccggcattcc

SEQ ID NO: 4708324 - DNA, 25 bp, Homo sapien
cccttcatagatggtatcctggttc

SEQ ID NO: 4708325 - DNA, 25 bp, Homo sapien
cggctcgataatcgctggttctccc

SEQ ID NO: 4708326 - DNA, 25 bp, Homo sapien
ctcgataatcgctggttctcccttt

SEQ ID NO: 4708327 - DNA, 25 bp, Homo sapien
gctcgataatcgctggttctccctt

SEQ ID NO: 4708328 - DNA, 25 bp, Homo sapien
ggctcgataatcgctggttctccct

SEQ ID NO: 4708329 - DNA, 25 bp, Homo sapien
cgcagagaggtacgaccacgtgtta

SEQ ID NO: 4708330 - DNA, 25 bp, Homo sapien
ccaggtggttgctcgaagtgaccca

SEQ ID NO: 4708331 - DNA, 25 bp, Homo sapien
gcatcttttacacggaatgggccat

SEQ ID NO: 4708332 - DNA, 25 bp, Homo sapien
tgcaggaccggctttgatcagcacc

SEQ ID NO: 4708333 - DNA, 25 bp, Homo sapien
ccaggcgggccctcgatgagcatgc

SEQ ID NO: 4708334 - DNA, 25 bp, Homo sapien
gccaggcgggccctcgatgagcatg

SEQ ID NO: 4708335 - DNA, 25 bp, Homo sapien
caggcgggccctcgatgagcatgcc

SEQ ID NO: 4708336 - DNA, 25 bp, Homo sapien
tgggacccatggttcctggaggtcc

SEQ ID NO: 4708337 - DNA, 25 bp, Homo sapien
ccagtgggacccatggttcctggag

SEQ ID NO: 4708338 - DNA, 25 bp, Homo sapien
ttggccagtgggacccatggttcct

SEQ ID NO: 4708339 - DNA, 25 bp, Homo sapien
cccgacttggccagtgggacccatg

SEQ ID NO: 4708340 - DNA, 25 bp, Homo sapien
cggaggaggagcttggccgttgccc

SEQ ID NO: 4708341 - DNA, 25 bp, Homo sapien
agagctccagccatgccggtcctgg

SEQ ID NO: 4708342 - DNA, 25 bp, Homo sapien
gttgccccatctcacgcgaatctgg

SEQ ID NO: 4708343 - DNA, 25 bp, Homo sapien
ccatgccggtcctggctgggtaaga

SEQ ID NO: 4708344 - DNA, 25 bp, Homo sapien
cacaaaccggtcacggccagacggc

SEQ ID NO: 4708345 - DNA, 25 bp, Homo sapien
gcacaaaccggtcacggccagacgg

SEQ ID NO: 4708346 - DNA, 25 bp, Homo sapien
agatgaacaaggataacgtgaagtc

SEQ ID NO: 4708347 - DNA, 25 bp, Homo sapien
cgtagatgaacaaggataacgtgaa

SEQ ID NO: 4708348 - DNA, 25 bp, Homo sapien
acacccggaacaattccaaagaatg

SEQ ID NO: 4708349 - DNA, 25 bp, Homo sapien
ccaaagaatgggaacgtagatgaac

SEQ ID NO: 4708350 - DNA, 25 bp, Homo sapien
aggctgtgaaagcaacttccctctg

SEQ ID NO: 4708351 - DNA, 25 bp, Homo sapien
gtggtgaaaatccaatccccaggct

SEQ ID NO: 4708352 - DNA, 25 bp, Homo sapien
ggctgtgaaagcaacttccctctga

SEQ ID NO: 4708353 - DNA, 25 bp, Homo sapien
ctaagccacggtggtgaaaatccaa

SEQ ID NO: 4708354 - DNA, 25 bp, Homo sapien
ggaccgggcaggccatcggccccag

SEQ ID NO: 4708355 - DNA, 25 bp, Homo sapien
gttcctggaggaccgggcaggccat

SEQ ID NO: 4708356 - DNA, 25 bp, Homo sapien
ttcctggaggaccgggcaggccatc

SEQ ID NO: 4708357 - DNA, 25 bp, Homo sapien
atggttcctggaggaccgggcaggc

SEQ ID NO: 4708358 - DNA, 25 bp, Homo sapien
accatggggcctttggagcccgcat

SEQ ID NO: 4708359 - DNA, 25 bp, Homo sapien
gcctttggagcccgcatcgccgcca

SEQ ID NO: 4708360 - DNA, 25 bp, Homo sapien
catggggcctttggagcccgcatcg

SEQ ID NO: 4708361 - DNA, 25 bp, Homo sapien
tggggcctttggagcccgcatcgcc

SEQ ID NO: 4708362 - DNA, 25 bp, Homo sapien
ggtctccctgtgagacccatcgggc

SEQ ID NO: 4708363 - DNA, 25 bp, Homo sapien
aggtctccctgtgagacccatcggg

SEQ ID NO: 4708364 - DNA, 25 bp, Homo sapien
ctccctgtgagacccatcgggccag

SEQ ID NO: 4708365 - DNA, 25 bp, Homo sapien
ccaggtctccctgtgagacccatcg

SEQ ID NO: 4708366 - DNA, 25 bp, Homo sapien
cggctcgcccttcaaacctccgctc

SEQ ID NO: 4708367 - DNA, 25 bp, Homo sapien
ggctcgcccttcaaacctccgctcc

SEQ ID NO: 4708368 - DNA, 25 bp, Homo sapien
ccggctcgcccttcaaacctccgct

SEQ ID NO: 4708369 - DNA, 25 bp, Homo sapien
cagcgaaggcaaggatcccacatac

SEQ ID NO: 4708370 - DNA, 25 bp, Homo sapien
cagacagcgaaggcaaggatcccac

SEQ ID NO: 4708371 - DNA, 25 bp, Homo sapien
acagcgaaggcaaggatcccacata

SEQ ID NO: 4708372 - DNA, 25 bp, Homo sapien
gacagcgaaggcaaggatcccacat

SEQ ID NO: 4708373 - DNA, 25 bp, Homo sapien
gcgggccttgcacacctcgaggacc

SEQ ID NO: 4708374 - DNA, 25 bp, Homo sapien
ggccagtttgtccaggcattcctct

SEQ ID NO: 4708375 - DNA, 25 bp, Homo sapien
tggggccagtttgtccaggcattcc

SEQ ID NO: 4708376 - DNA, 25 bp, Homo sapien
cttggggccagtttgtccaggcatt

SEQ ID NO: 4708377 - DNA, 25 bp, Homo sapien
gggccagtttgtccaggcattcctc

SEQ ID NO: 4708378 - DNA, 25 bp, Homo sapien
cgatgatgggacattttaggctttc

SEQ ID NO: 4708379 - DNA, 25 bp, Homo sapien
caccatctggggtgatgtcgatgat

SEQ ID NO: 4708380 - DNA, 25 bp, Homo sapien
cagccatgttgttgaaagaagacca

SEQ ID NO: 4708381 - DNA, 25 bp, Homo sapien
cagggccctgtctcatgggtgtgca

SEQ ID NO: 4708382 - DNA, 25 bp, Homo sapien
tgtggcccttctcgcctggcaaccc

SEQ ID NO: 4708383 - DNA, 25 bp, Homo sapien
cctggcaacccagccaggccgtcga

SEQ ID NO: 4708384 - DNA, 25 bp, Homo sapien
cctgtggcccttctcgcctggcaac

SEQ ID NO: 4708385 - DNA, 25 bp, Homo sapien
ttctcgcctggcaacccagccaggc

SEQ ID NO: 4708386 - DNA, 25 bp, Homo sapien
ttctccatcgtctcccggaggtcct

SEQ ID NO: 4708387 - DNA, 25 bp, Homo sapien
tggtgggccggaaggaccagggtca

SEQ ID NO: 4708388 - DNA, 25 bp, Homo sapien
tttctccatcgtctcccggaggtcc

SEQ ID NO: 4708389 - DNA, 25 bp, Homo sapien
cctttctccatcgtctcccggaggt

SEQ ID NO: 4708390 - DNA, 25 bp, Homo sapien
cctgggcccaacttctccgtcgtca

SEQ ID NO: 4708391 - DNA, 25 bp, Homo sapien
tgggcccaacttctccgtcgtcacc

SEQ ID NO: 4708392 - DNA, 25 bp, Homo sapien
gctccccaggcagccccctgggccc

SEQ ID NO: 4708393 - DNA, 25 bp, Homo sapien
gggctccccaggcagccccctgggc

SEQ ID NO: 4708394 - DNA, 25 bp, Homo sapien
gagaattacagaggcttcaccccag

SEQ ID NO: 4708395 - DNA, 25 bp, Homo sapien
tgagattccgggagaactgcctgcc

SEQ ID NO: 4708396 - DNA, 25 bp, Homo sapien
ccaggtacgtggacttcaagtgccc

SEQ ID NO: 4708397 - DNA, 25 bp, Homo sapien
tagtcccaaatgagtctgcaggcac

SEQ ID NO: 4708398 - DNA, 25 bp, Homo sapien
taggatttaaactcgggcagaaatc

SEQ ID NO: 4708399 - DNA, 25 bp, Homo sapien
gatttaaactcgggcagaaatccca

SEQ ID NO: 4708400 - DNA, 25 bp, Homo sapien
ctctctgtcccctatgcccacttgg

SEQ ID NO: 4708401 - DNA, 25 bp, Homo sapien
ctgggggccccttcggcccaagcag

SEQ ID NO: 4708402 - DNA, 25 bp, Homo sapien
tgggggccccttcggcccaagcaga

SEQ ID NO: 4708403 - DNA, 25 bp, Homo sapien
cggctggccgtccatacccgtgaca

SEQ ID NO: 4708404 - DNA, 25 bp, Homo sapien
ggctggccgtccatacccgtgacac

SEQ ID NO: 4708405 - DNA, 25 bp, Homo sapien
gctggccgtccatacccgtgacacc

SEQ ID NO: 4708406 - DNA, 25 bp, Homo sapien
cgcctggattaccctgctgtcctgg

SEQ ID NO: 4708407 - DNA, 25 bp, Homo sapien
ctgggcgcctggattaccctgctgt

SEQ ID NO: 4708408 - DNA, 25 bp, Homo sapien
tgggcgcctggattaccctgctgtc

SEQ ID NO: 4708409 - DNA, 25 bp, Homo sapien
ggcgcctggattaccctgctgtcct

SEQ ID NO: 4708410 - DNA, 25 bp, Homo sapien
cctggaggaccaattgcaccctggg

SEQ ID NO: 4708411 - DNA, 25 bp, Homo sapien
ggaggaccaattgcaccctgggggc

SEQ ID NO: 4708412 - DNA, 25 bp, Homo sapien
tcctggaggaccaattgcaccctgg

SEQ ID NO: 4708413 - DNA, 25 bp, Homo sapien
ggaccaattgcaccctgggggcctg

SEQ ID NO: 4708414 - DNA, 25 bp, Homo sapien
caccgggcattcctggaaggcctgg

SEQ ID NO: 4708415 - DNA, 25 bp, Homo sapien
gggtccgtcagcaccgggcattcct

SEQ ID NO: 4708416 - DNA, 25 bp, Homo sapien
ggcattcctggaaggcctggtttcc

SEQ ID NO: 4708417 - DNA, 25 bp, Homo sapien
tcagcaccgggcattcctggaaggc

SEQ ID NO: 4708418 - DNA, 25 bp, Homo sapien
gggatgagaaggctccactctgctt

SEQ ID NO: 4708419 - DNA, 25 bp, Homo sapien
cacttacagagggtgtgggtgcaaa

SEQ ID NO: 4708420 - DNA, 25 bp, Homo sapien
tctcgtttgtgaaacagactcagca

SEQ ID NO: 4708421 - DNA, 25 bp, Homo sapien
agtatgcaaactcccatgtggccag

SEQ ID NO: 4708422 - DNA, 25 bp, Homo sapien
gagggccttctttgccagggtgtcc

SEQ ID NO: 4708423 - DNA, 25 bp, Homo sapien
tggagggccttctttgccagggtgt

SEQ ID NO: 4708424 - DNA, 25 bp, Homo sapien
ggagggccttctttgccagggtgtc

SEQ ID NO: 4708425 - DNA, 25 bp, Homo sapien
tcgaggacctgggtagccaatcgga

SEQ ID NO: 4708426 - DNA, 25 bp, Homo sapien
cttgactcctcgaggacctgggtag

SEQ ID NO: 4708427 - DNA, 25 bp, Homo sapien
actcctcgaggacctgggtagccaa

SEQ ID NO: 4708428 - DNA, 25 bp, Homo sapien
tcctcgaggacctgggtagccaatc

SEQ ID NO: 4708429 - DNA, 25 bp, Homo sapien
caggacgacctggagtggcgtgagt

SEQ ID NO: 4708430 - DNA, 25 bp, Homo sapien
cctggagtggcgtgagtctctctca

SEQ ID NO: 4708431 - DNA, 25 bp, Homo sapien
acgacctggagtggcgtgagtctct

SEQ ID NO: 4708432 - DNA, 25 bp, Homo sapien
ctccaggacgacctggagtggcgtg

SEQ ID NO: 4708433 - DNA, 25 bp, Homo sapien
gctcacagaagcagcgttatgcaat

SEQ ID NO: 4708434 - DNA, 25 bp, Homo sapien
tttaatcagataggcaagataagag

SEQ ID NO: 4708435 - DNA, 25 bp, Homo sapien
gcaaacacctttttagctcacagaa

SEQ ID NO: 4708436 - DNA, 25 bp, Homo sapien
ttagccatgtatgggagttggcaga

SEQ ID NO: 4708437 - DNA, 25 bp, Homo sapien
tatttcctctgaaacgcacaggaaa

SEQ ID NO: 4708438 - DNA, 25 bp, Homo sapien
tacttgcaaaatagaagagcaactt

SEQ ID NO: 4708439 - DNA, 25 bp, Homo sapien
acaggaaaatcgcaggtgtggctga

SEQ ID NO: 4708440 - DNA, 25 bp, Homo sapien
caatcagggttgagcctgctcagca

SEQ ID NO: 4708441 - DNA, 25 bp, Homo sapien
tgagaggcgagtggtttctaagcac

SEQ ID NO: 4708442 - DNA, 25 bp, Homo sapien
caaacacagcttgcgtattccaggg

SEQ ID NO: 4708443 - DNA, 25 bp, Homo sapien
ggcacactaatgtgggccagcatgg

SEQ ID NO: 4708444 - DNA, 25 bp, Homo sapien
gatgggacatggacctcaagatgga

SEQ ID NO: 4708445 - DNA, 25 bp, Homo sapien
tttgtgcccttcagaccacggatgc

SEQ ID NO: 4708446 - DNA, 25 bp, Homo sapien
cttctcgccctttgtgcccttcaga

SEQ ID NO: 4708447 - DNA, 25 bp, Homo sapien
gtgcccttcagaccacggatgccat

SEQ ID NO: 4708448 - DNA, 25 bp, Homo sapien
cctttgtgcccttcagaccacggat

SEQ ID NO: 4708449 - DNA, 25 bp, Homo sapien
gcccatgtctcctttaaacccagga

SEQ ID NO: 4708450 - DNA, 25 bp, Homo sapien
ctgcaagccagaaaagaggaggtga

SEQ ID NO: 4708451 - DNA, 25 bp, Homo sapien
ggaggtgagaagaccaccccccgca

SEQ ID NO: 4708452 - DNA, 25 bp, Homo sapien
aggtgagaagaccaccccccgcaca

SEQ ID NO: 4708453 - DNA, 25 bp, Homo sapien
gtgagaagaccaccccccgcacaca

SEQ ID NO: 4708454 - DNA, 25 bp, Homo sapien
cagaggaccggggtcaccattggga

SEQ ID NO: 4708455 - DNA, 25 bp, Homo sapien
cattgggacctccgcgaccctttgg

SEQ ID NO: 4708456 - DNA, 25 bp, Homo sapien
gggtcaccattgggacctccgcgac

SEQ ID NO: 4708457 - DNA, 25 bp, Homo sapien
cggggtcaccattgggacctccgcg

SEQ ID NO: 4708458 - DNA, 25 bp, Homo sapien
tccgtttccccggagcagagagaaa

SEQ ID NO: 4708459 - DNA, 25 bp, Homo sapien
ctgccagcacccatgaaatccaggg

SEQ ID NO: 4708460 - DNA, 25 bp, Homo sapien
gcacacgtcattatgcagaagccct

SEQ ID NO: 4708461 - DNA, 25 bp, Homo sapien
taatggccagcacggtattgctcca

SEQ ID NO: 4708462 - DNA, 25 bp, Homo sapien
ccttgtcttcctggataccctggta

SEQ ID NO: 4708463 - DNA, 25 bp, Homo sapien
cttcctggataccctggtaaccctg

SEQ ID NO: 4708464 - DNA, 25 bp, Homo sapien
ctttggtccttgtcttcctggatac

SEQ ID NO: 4708465 - DNA, 25 bp, Homo sapien
tggtccttgtcttcctggataccct

SEQ ID NO: 4708466 - DNA, 25 bp, Homo sapien
aggaaatccagggaatccaatagag

SEQ ID NO: 4708467 - DNA, 25 bp, Homo sapien
ggaaatccagggaatccaatagagc

SEQ ID NO: 4708468 - DNA, 25 bp, Homo sapien
gaaatccagggaatccaatagagcc

SEQ ID NO: 4708469 - DNA, 25 bp, Homo sapien
ttgctaggcaccgaggcagccgaac

SEQ ID NO: 4708470 - DNA, 25 bp, Homo sapien
ggcaccgaggcagccgaacaagctg

SEQ ID NO: 4708471 - DNA, 25 bp, Homo sapien
caacttgctaggcaccgaggcagcc

SEQ ID NO: 4708472 - DNA, 25 bp, Homo sapien
cgaggcagccgaacaagctgcctgc

SEQ ID NO: 4708473 - DNA, 25 bp, Homo sapien
gagtccaaggcctgaggaccatctc

SEQ ID NO: 4708474 - DNA, 25 bp, Homo sapien
taacaagcatccaggaccgctcctg

SEQ ID NO: 4708475 - DNA, 25 bp, Homo sapien
cactgtgatttcactaacaagcatc

SEQ ID NO: 4708476 - DNA, 25 bp, Homo sapien
tgtccccgccatatgccccgtggac

SEQ ID NO: 4708477 - DNA, 25 bp, Homo sapien
tcgctgcccccgcggtcctggcttt

SEQ ID NO: 4708478 - DNA, 25 bp, Homo sapien
ctgcccccgcggtcctggctttcca

SEQ ID NO: 4708479 - DNA, 25 bp, Homo sapien
ctcgctgcccccgcggtcctggctt

SEQ ID NO: 4708480 - DNA, 25 bp, Homo sapien
tgcccccgcggtcctggctttccag

SEQ ID NO: 4708481 - DNA, 25 bp, Homo sapien
cagtgatgccccgggggcctctttc

SEQ ID NO: 4708482 - DNA, 25 bp, Homo sapien
agtgatgccccgggggcctctttca

SEQ ID NO: 4708483 - DNA, 25 bp, Homo sapien
tgatgccccgggggcctctttcacc

SEQ ID NO: 4708484 - DNA, 25 bp, Homo sapien
ccagtgatgccccgggggcctcttt

SEQ ID NO: 4708485 - DNA, 25 bp, Homo sapien
gagggccagctgggccgtcacctcc

SEQ ID NO: 4708486 - DNA, 25 bp, Homo sapien
ccagctgggccgtcacctccggagt

SEQ ID NO: 4708487 - DNA, 25 bp, Homo sapien
cagctgggccgtcacctccggagtt

SEQ ID NO: 4708488 - DNA, 25 bp, Homo sapien
ggccagctgggccgtcacctccgga

SEQ ID NO: 4708489 - DNA, 25 bp, Homo sapien
ccaggaaatcctgtgggtccttggg

SEQ ID NO: 4708490 - DNA, 25 bp, Homo sapien
tcctgtgggtccttggggtccattg

SEQ ID NO: 4708491 - DNA, 25 bp, Homo sapien
tttggtccaggaaatcctgtgggtc

SEQ ID NO: 4708492 - DNA, 25 bp, Homo sapien
aatcctgtgggtccttggggtccat

SEQ ID NO: 4708493 - DNA, 25 bp, Homo sapien
ctcagagaaaacaggcgggttttgg

SEQ ID NO: 4708494 - DNA, 25 bp, Homo sapien
gcccagcaaggaagccattacttac

SEQ ID NO: 4708495 - DNA, 25 bp, Homo sapien
tcagagaaaacaggcgggttttgga

SEQ ID NO: 4708496 - DNA, 25 bp, Homo sapien
ctggcccagcaaggaagccattact

SEQ ID NO: 4708497 - DNA, 25 bp, Homo sapien
gtgtcctgggagtccatccttgcct

SEQ ID NO: 4708498 - DNA, 25 bp, Homo sapien
gggtgtcctgggagtccatccttgc

SEQ ID NO: 4708499 - DNA, 25 bp, Homo sapien
tgtcctgggagtccatccttgcctg

SEQ ID NO: 4708500 - DNA, 25 bp, Homo sapien
ggtgtcctgggagtccatccttgcc

SEQ ID NO: 4708501 - DNA, 25 bp, Homo sapien
cagccagccacgtcccccagcaccc

SEQ ID NO: 4708502 - DNA, 25 bp, Homo sapien
ccagaccccctggattggagctgga

SEQ ID NO: 4708503 - DNA, 25 bp, Homo sapien
cagaccccctggattggagctggaa

SEQ ID NO: 4708504 - DNA, 25 bp, Homo sapien
ctccagaccccctggattggagctg

SEQ ID NO: 4708505 - DNA, 25 bp, Homo sapien
tccagaccccctggattggagctgg

SEQ ID NO: 4708506 - DNA, 25 bp, Homo sapien
aaggggagtctctgactacaaagac

SEQ ID NO: 4708507 - DNA, 25 bp, Homo sapien
tgtgcccagcggagtgactagttag

SEQ ID NO: 4708508 - DNA, 25 bp, Homo sapien
ccatgtgcccagcggagtgactagt

SEQ ID NO: 4708509 - DNA, 25 bp, Homo sapien
tgcccagcggagtgactagttagag

SEQ ID NO: 4708510 - DNA, 25 bp, Homo sapien
tgggccaaatttcgaagggctgatg

SEQ ID NO: 4708511 - DNA, 25 bp, Homo sapien
gctgggccaaatttcgaagggctga

SEQ ID NO: 4708512 - DNA, 25 bp, Homo sapien
gagctgggccaaatttcgaagggct

SEQ ID NO: 4708513 - DNA, 25 bp, Homo sapien
ggccaaatttcgaagggctgatggg

SEQ ID NO: 4708514 - DNA, 25 bp, Homo sapien
ttatcaggcagcatgcgccgtgcag

SEQ ID NO: 4708515 - DNA, 25 bp, Homo sapien
ttgatccctagaaacctggctgcag

SEQ ID NO: 4708516 - DNA, 25 bp, Homo sapien
cactcggagaaggaacacagcgtgg

SEQ ID NO: 4708517 - DNA, 25 bp, Homo sapien
tgcacgtccccagatattcagagcc

SEQ ID NO: 4708518 - DNA, 25 bp, Homo sapien
tttgcaaactctaggagggctcgcc

SEQ ID NO: 4708519 - DNA, 25 bp, Homo sapien
gatcggagccttggttaagttttgc

SEQ ID NO: 4708520 - DNA, 25 bp, Homo sapien
gacagaatatgaccttagccctttg

SEQ ID NO: 4708521 - DNA, 25 bp, Homo sapien
cagctgtgggctagaatgatcgttt

SEQ ID NO: 4708522 - DNA, 25 bp, Homo sapien
ttatcatgtcaccaaacgctccttt

SEQ ID NO: 4708523 - DNA, 25 bp, Homo sapien
gacgcgattcgcctttatcatgtca

SEQ ID NO: 4708524 - DNA, 25 bp, Homo sapien
gcctctgcatctttaggccgacgcg

SEQ ID NO: 4708525 - DNA, 25 bp, Homo sapien
gtcaccaaacgctccttttctgagt

SEQ ID NO: 4708526 - DNA, 25 bp, Homo sapien
gtgcgtttgcactaatttcacgagg

SEQ ID NO: 4708527 - DNA, 25 bp, Homo sapien
ttcacgagggtaacgaagccacaca

SEQ ID NO: 4708528 - DNA, 25 bp, Homo sapien
agccaccgtgcgtttgcactaattt

SEQ ID NO: 4708529 - DNA, 25 bp, Homo sapien
tgcactaatttcacgagggtaacga

SEQ ID NO: 4708530 - DNA, 25 bp, Homo sapien
tggagggccggtcttgccttggaaa

SEQ ID NO: 4708531 - DNA, 25 bp, Homo sapien
ctggagggccggtcttgccttggaa

SEQ ID NO: 4708532 - DNA, 25 bp, Homo sapien
ggcctggagggccggtcttgccttg

SEQ ID NO: 4708533 - DNA, 25 bp, Homo sapien
cctggagggccggtcttgccttgga

SEQ ID NO: 4708534 - DNA, 25 bp, Homo sapien
ttcttttccagcaaggcccggaagc

SEQ ID NO: 4708535 - DNA, 25 bp, Homo sapien
cacgctcacccattgggcccgtttc

SEQ ID NO: 4708536 - DNA, 25 bp, Homo sapien
tggccacgctcacccattgggcccg

SEQ ID NO: 4708537 - DNA, 25 bp, Homo sapien
cgctcacccattgggcccgtttctc

SEQ ID NO: 4708538 - DNA, 25 bp, Homo sapien
cagagtttcatttgtgttaaccagg

SEQ ID NO: 4708539 - DNA, 25 bp, Homo sapien
taaaaacagagtttcatttgtgtta

SEQ ID NO: 4708540 - DNA, 25 bp, Homo sapien
cgccccccgagttcacaccattctg

SEQ ID NO: 4708541 - DNA, 25 bp, Homo sapien
ccccgagttcacaccattctgctgc

SEQ ID NO: 4708542 - DNA, 25 bp, Homo sapien
ccacgtaatcctggagggccatctt

SEQ ID NO: 4708543 - DNA, 25 bp, Homo sapien
accacgtaatcctggagggccatct

SEQ ID NO: 4708544 - DNA, 25 bp, Homo sapien
acgtaatcctggagggccatctttc

SEQ ID NO: 4708545 - DNA, 25 bp, Homo sapien
aaccacgtaatcctggagggccatc

SEQ ID NO: 4708546 - DNA, 25 bp, Homo sapien
tcattgcctttcagtccaagagctc

SEQ ID NO: 4708547 - DNA, 25 bp, Homo sapien
cattgcctttcagtccaagagctcc

SEQ ID NO: 4708548 - DNA, 25 bp, Homo sapien
gtctccctggaattccgatgggccc

SEQ ID NO: 4708549 - DNA, 25 bp, Homo sapien
ccctggaattccgatgggcccagcg

SEQ ID NO: 4708550 - DNA, 25 bp, Homo sapien
ccaggtctccctggaattccgatgg

SEQ ID NO: 4708551 - DNA, 25 bp, Homo sapien
tggaattccgatgggcccagcggct

SEQ ID NO: 4708552 - DNA, 25 bp, Homo sapien
ggccagctggacccgggagccccac

SEQ ID NO: 4708553 - DNA, 25 bp, Homo sapien
gccagctggacccgggagccccaca

SEQ ID NO: 4708554 - DNA, 25 bp, Homo sapien
ctggagaccgtctcggccagctggg

SEQ ID NO: 4708555 - DNA, 25 bp, Homo sapien
cctggagaccgtctcggccagctgg

SEQ ID NO: 4708556 - DNA, 25 bp, Homo sapien
cagccatgggtcactctggatttgc

SEQ ID NO: 4708557 - DNA, 25 bp, Homo sapien
agccatgggtcactctggatttgcc

SEQ ID NO: 4708558 - DNA, 25 bp, Homo sapien
tgttctcctttgtcccccttgcttc

SEQ ID NO: 4708559 - DNA, 25 bp, Homo sapien
tcctttctgccccggctccccgatc

SEQ ID NO: 4708560 - DNA, 25 bp, Homo sapien
tttctgccccggctccccgatctct

SEQ ID NO: 4708561 - DNA, 25 bp, Homo sapien
ttgcttcctttctgccccggctccc

SEQ ID NO: 4708562 - DNA, 25 bp, Homo sapien
gcctggctgtccgatggggccttga

SEQ ID NO: 4708563 - DNA, 25 bp, Homo sapien
tggctgtccgatggggccttgagga

SEQ ID NO: 4708564 - DNA, 25 bp, Homo sapien
gggcctggctgtccgatggggcctt

SEQ ID NO: 4708565 - DNA, 25 bp, Homo sapien
cctggctgtccgatggggccttgag

SEQ ID NO: 4708566 - DNA, 25 bp, Homo sapien
tttctgcccgaaaaggccctgctgg

SEQ ID NO: 4708567 - DNA, 25 bp, Homo sapien
cacctttctgcccgaaaaggccctg

SEQ ID NO: 4708568 - DNA, 25 bp, Homo sapien
cctttctgcccgaaaaggccctgct

SEQ ID NO: 4708569 - DNA, 25 bp, Homo sapien
tctgcccgaaaaggccctgctggcc

SEQ ID NO: 4708570 - DNA, 25 bp, Homo sapien
ctggcccacgtctcctgtctcaccc

SEQ ID NO: 4708571 - DNA, 25 bp, Homo sapien
cacccttctcgcctggaggtcctgg

SEQ ID NO: 4708572 - DNA, 25 bp, Homo sapien
tctggcccacgtctcctgtctcacc

SEQ ID NO: 4708573 - DNA, 25 bp, Homo sapien
tgtctcacccttctcgcctggaggt

SEQ ID NO: 4708574 - DNA, 25 bp, Homo sapien
caccagggtttcctattccacctgg

SEQ ID NO: 4708575 - DNA, 25 bp, Homo sapien
gcaccagggtttcctattccacctg

SEQ ID NO: 4708576 - DNA, 25 bp, Homo sapien
gctcacctgcttcgccaggctcgcc

SEQ ID NO: 4708577 - DNA, 25 bp, Homo sapien
ccgctcggccatatcccacccctcc

SEQ ID NO: 4708578 - DNA, 25 bp, Homo sapien
ccacgtcgccgcccagagcaaggtg

SEQ ID NO: 4708579 - DNA, 25 bp, Homo sapien
gaggaaagaggccagtgtcaagtcc

SEQ ID NO: 4708580 - DNA, 25 bp, Homo sapien
caagtcctcagagccaaccacgtcg

SEQ ID NO: 4708581 - DNA, 25 bp, Homo sapien
aaagaggccagtgtcaagtcctcag

SEQ ID NO: 4708582 - DNA, 25 bp, Homo sapien
ttgggaccatcatctccgggagggc

SEQ ID NO: 4708583 - DNA, 25 bp, Homo sapien
cagggggtccggcagcacctgaagg

SEQ ID NO: 4708584 - DNA, 25 bp, Homo sapien
cacctgaagggcctgactcgccctt

SEQ ID NO: 4708585 - DNA, 25 bp, Homo sapien
ggaccatcatctccgggagggcctt

SEQ ID NO: 4708586 - DNA, 25 bp, Homo sapien
caacacatggaatggtcttgaagct

SEQ ID NO: 4708587 - DNA, 25 bp, Homo sapien
ccaacacatggaatggtcttgaagc

SEQ ID NO: 4708588 - DNA, 25 bp, Homo sapien
aggctctccgggggggccaggatct

SEQ ID NO: 4708589 - DNA, 25 bp, Homo sapien
ggctctccgggggggccaggatctc

SEQ ID NO: 4708590 - DNA, 25 bp, Homo sapien
gctctccgggggggccaggatctcc

SEQ ID NO: 4708591 - DNA, 25 bp, Homo sapien
ccaggctctccgggggggccaggat

SEQ ID NO: 4708592 - DNA, 25 bp, Homo sapien
catctcctttgtcaccagggggacc

SEQ ID NO: 4708593 - DNA, 25 bp, Homo sapien
tctcctttgtcaccagggggaccat

SEQ ID NO: 4708594 - DNA, 25 bp, Homo sapien
tcatctcctttgtcaccagggggac

SEQ ID NO: 4708595 - DNA, 25 bp, Homo sapien
catcatctcctttgtcaccaggggg

SEQ ID NO: 4708596 - DNA, 25 bp, Homo sapien
tcctggaggccccgatggacctggt

SEQ ID NO: 4708597 - DNA, 25 bp, Homo sapien
cctggaggccccgatggacctggtt

SEQ ID NO: 4708598 - DNA, 25 bp, Homo sapien
ttcctggaggccccgatggacctgg

SEQ ID NO: 4708599 - DNA, 25 bp, Homo sapien
tttcctggaggccccgatggacctg

SEQ ID NO: 4708600 - DNA, 25 bp, Homo sapien
ctccctgtctgccttcggggcctgc

SEQ ID NO: 4708601 - DNA, 25 bp, Homo sapien
tctctccctgtctgccttcggggcc

SEQ ID NO: 4708602 - DNA, 25 bp, Homo sapien
cctgtctgccttcggggcctgcggg

SEQ ID NO: 4708603 - DNA, 25 bp, Homo sapien
ccctgtctgccttcggggcctgcgg

SEQ ID NO: 4708604 - DNA, 25 bp, Homo sapien
gggtgacggcgtcccatcttctgca

SEQ ID NO: 4708605 - DNA, 25 bp, Homo sapien
tgacagaatagcctcccgtgtgctc

SEQ ID NO: 4708606 - DNA, 25 bp, Homo sapien
aggccccaagccaactgcatgggtg

SEQ ID NO: 4708607 - DNA, 25 bp, Homo sapien
agacacggtcaccatcggacacggt

SEQ ID NO: 4708608 - DNA, 25 bp, Homo sapien
ggcagaatgaggtccggagctctag

SEQ ID NO: 4708609 - DNA, 25 bp, Homo sapien
tgcaggacggcggagggcagaatga

SEQ ID NO: 4708610 - DNA, 25 bp, Homo sapien
gacggcggagggcagaatgaggtcc

SEQ ID NO: 4708611 - DNA, 25 bp, Homo sapien
aggtccggagctctaggctccaggc

SEQ ID NO: 4708612 - DNA, 25 bp, Homo sapien
agggatccctcgaaggccatccggt

SEQ ID NO: 4708613 - DNA, 25 bp, Homo sapien
ctcgaaggccatccggtccgggctt

SEQ ID NO: 4708614 - DNA, 25 bp, Homo sapien
tcccaggagggccttccaagccggc

SEQ ID NO: 4708615 - DNA, 25 bp, Homo sapien
atccctcgaaggccatccggtccgg

SEQ ID NO: 4708616 - DNA, 25 bp, Homo sapien
cgtccgggcctggggatcctgggag

SEQ ID NO: 4708617 - DNA, 25 bp, Homo sapien
tggggatcctgggagaccttgttct

SEQ ID NO: 4708618 - DNA, 25 bp, Homo sapien
gggatcctgggagaccttgttctcc

SEQ ID NO: 4708619 - DNA, 25 bp, Homo sapien
cctggggatcctgggagaccttgtt

SEQ ID NO: 4708620 - DNA, 25 bp, Homo sapien
accagaatctcctttgaggccggga

SEQ ID NO: 4708621 - DNA, 25 bp, Homo sapien
gaccagaatctcctttgaggccggg

SEQ ID NO: 4708622 - DNA, 25 bp, Homo sapien
ggaccagaatctcctttgaggccgg

SEQ ID NO: 4708623 - DNA, 25 bp, Homo sapien
ttctcaccctgttcacccggaggac

SEQ ID NO: 4708624 - DNA, 25 bp, Homo sapien
tgagcccgatcaggcctggatgacc

SEQ ID NO: 4708625 - DNA, 25 bp, Homo sapien
ccagggagaccacggtcgcccttct

SEQ ID NO: 4708626 - DNA, 25 bp, Homo sapien
tgttctcccttaggaccggaggagc

SEQ ID NO: 4708627 - DNA, 25 bp, Homo sapien
ctctaattctcgtggttgccgggcc

SEQ ID NO: 4708628 - DNA, 25 bp, Homo sapien
gacacaggggtgctttccccgctgg

SEQ ID NO: 4708629 - DNA, 25 bp, Homo sapien
caatgccgccaagaccatggtttgg

SEQ ID NO: 4708630 - DNA, 25 bp, Homo sapien
aggtgagcaaacagggtggacacag

SEQ ID NO: 4708631 - DNA, 25 bp, Homo sapien
gaggcccaatcgggccagaaggacc

SEQ ID NO: 4708632 - DNA, 25 bp, Homo sapien
ccaggaggcccaatcgggccagaag

SEQ ID NO: 4708633 - DNA, 25 bp, Homo sapien
aggaggcccaatcgggccagaagga

SEQ ID NO: 4708634 - DNA, 25 bp, Homo sapien
gcccaggaggcccaatcgggccaga

SEQ ID NO: 4708635 - DNA, 25 bp, Homo sapien
cgaggagcccttagcaccttttgga

SEQ ID NO: 4708636 - DNA, 25 bp, Homo sapien
cctggctgggcagcatgttacttac

SEQ ID NO: 4708637 - DNA, 25 bp, Homo sapien
ttggcctggctgggcagcatgttac

SEQ ID NO: 4708638 - DNA, 25 bp, Homo sapien
cttccaggcattggcctggctgggc

SEQ ID NO: 4708639 - DNA, 25 bp, Homo sapien
ggcctggctgggcagcatgttactt

SEQ ID NO: 4708640 - DNA, 25 bp, Homo sapien
cctgcctcacccttcgggccagttg

SEQ ID NO: 4708641 - DNA, 25 bp, Homo sapien
tgcctcacccttcgggccagttgga

SEQ ID NO: 4708642 - DNA, 25 bp, Homo sapien
tggcctgcctcacccttcgggccag

SEQ ID NO: 4708643 - DNA, 25 bp, Homo sapien
tgggtggcctgcctcacccttcggg

SEQ ID NO: 4708644 - DNA, 25 bp, Homo sapien
gcaacctgggctacatggacatctg

SEQ ID NO: 4708645 - DNA, 25 bp, Homo sapien
ggacagaacaggagcagcggtgggt

SEQ ID NO: 4708646 - DNA, 25 bp, Homo sapien
tggcaacctgggctacatggacatc

SEQ ID NO: 4708647 - DNA, 25 bp, Homo sapien
cctgggctacatggacatctgtccg

SEQ ID NO: 4708648 - DNA, 25 bp, Homo sapien
aagatctcttccatgccgtccgcgt

SEQ ID NO: 4708649 - DNA, 25 bp, Homo sapien
atgttccgccgcgtcctggatgcct

SEQ ID NO: 4708650 - DNA, 25 bp, Homo sapien
gttgagagagccgaagatctcttcc

SEQ ID NO: 4708651 - DNA, 25 bp, Homo sapien
cgtagtccacgtagttctcgccatt

SEQ ID NO: 4708652 - DNA, 25 bp, Homo sapien
tgtcagggaagacgcatgtcgaccc

SEQ ID NO: 4708653 - DNA, 25 bp, Homo sapien
aatccctggagcatccttggttagg

SEQ ID NO: 4708654 - DNA, 25 bp, Homo sapien
gaagttgcagtaaaccttgaaggaa

SEQ ID NO: 4708655 - DNA, 25 bp, Homo sapien
cccttcggacttcttgtcagggaag

SEQ ID NO: 4708656 - DNA, 25 bp, Homo sapien
actgcgagctcatgaaggagaggcc

SEQ ID NO: 4708657 - DNA, 25 bp, Homo sapien
gggccacgcgacaactgcgagctca

SEQ ID NO: 4708658 - DNA, 25 bp, Homo sapien
aggagaggccgttcaagctgatgca

SEQ ID NO: 4708659 - DNA, 25 bp, Homo sapien
gacaactgcgagctcatgaaggaga

SEQ ID NO: 4708660 - DNA, 25 bp, Homo sapien
ccttgtgccaagaaggccagaaaag

SEQ ID NO: 4708661 - DNA, 25 bp, Homo sapien
cttgtgccaagaaggccagaaaagg

SEQ ID NO: 4708662 - DNA, 25 bp, Homo sapien
cccacgcttgaattcactgaaccag

SEQ ID NO: 4708663 - DNA, 25 bp, Homo sapien
cacgcttgaattcactgaaccagga

SEQ ID NO: 4708664 - DNA, 25 bp, Homo sapien
ccacgcttgaattcactgaaccagg

SEQ ID NO: 4708665 - DNA, 25 bp, Homo sapien
ttcccacgcttgaattcactgaacc

SEQ ID NO: 4708666 - DNA, 25 bp, Homo sapien
tgctctttgggccagcgggccattt

SEQ ID NO: 4708667 - DNA, 25 bp, Homo sapien
tactgactataccaggtggaaggct

SEQ ID NO: 4708668 - DNA, 25 bp, Homo sapien
ctctttgggccagcgggccatttta

SEQ ID NO: 4708669 - DNA, 25 bp, Homo sapien
gggacccccgcttgtactgactata

SEQ ID NO: 4708670 - DNA, 25 bp, Homo sapien
tgggctactcgggctgaaggctgca

SEQ ID NO: 4708671 - DNA, 25 bp, Homo sapien
ggaaatgggctactcgggctgaagg

SEQ ID NO: 4708672 - DNA, 25 bp, Homo sapien
aacaggacgagaggtggaaatgggc

SEQ ID NO: 4708673 - DNA, 25 bp, Homo sapien
gaacaggacgagaggtggaaatggg

SEQ ID NO: 4708674 - DNA, 25 bp, Homo sapien
ccacgtatgatattcacagagctag

SEQ ID NO: 4708675 - DNA, 25 bp, Homo sapien
gaaataaggccgtggaaagatccta

SEQ ID NO: 4708676 - DNA, 25 bp, Homo sapien
tcctaaagtaagctgatgtgttccc

SEQ ID NO: 4708677 - DNA, 25 bp, Homo sapien
tgtgttccctgggtcgtcccttcac

SEQ ID NO: 4708678 - DNA, 25 bp, Homo sapien
gaaaagtgaataccaaccgacaggc

SEQ ID NO: 4708679 - DNA, 25 bp, Homo sapien
gggaactacctggaaacgcactgta

SEQ ID NO: 4708680 - DNA, 25 bp, Homo sapien
tcattcctgaaacgcagagctctgc

SEQ ID NO: 4708681 - DNA, 25 bp, Homo sapien
gctgcccagtgtgcgcttgataaag

SEQ ID NO: 4708682 - DNA, 25 bp, Homo sapien
tgccaggccactgactggtagcagt

SEQ ID NO: 4708683 - DNA, 25 bp, Homo sapien
gtcatctgtaccacacccacagggt

SEQ ID NO: 4708684 - DNA, 25 bp, Homo sapien
taggacatctcctcgtcgttggagc

SEQ ID NO: 4708685 - DNA, 25 bp, Homo sapien
ggccttgtcgtagctgcccgtggct

SEQ ID NO: 4708686 - DNA, 25 bp, Homo sapien
ccgaagtcattgaacatgatgtcca

SEQ ID NO: 4708687 - DNA, 25 bp, Homo sapien
cgatctccagaaccgtcttctggta

SEQ ID NO: 4708688 - DNA, 25 bp, Homo sapien
gtgtcgatctccagaaccgtcttct

SEQ ID NO: 4708689 - DNA, 25 bp, Homo sapien
tttctgtgacgcttcaccgaagtca

SEQ ID NO: 4708690 - DNA, 25 bp, Homo sapien
tagcccatgaagcaagccggcccca

SEQ ID NO: 4708691 - DNA, 25 bp, Homo sapien
ctagcccatgaagcaagccggcccc

SEQ ID NO: 4708692 - DNA, 25 bp, Homo sapien
agcccatgaagcaagccggccccac

SEQ ID NO: 4708693 - DNA, 25 bp, Homo sapien
cgggacactcacgaacgaatggcat

SEQ ID NO: 4708694 - DNA, 25 bp, Homo sapien
tattcacgaacaggatgggtcgggc

SEQ ID NO: 4708695 - DNA, 25 bp, Homo sapien
tatagtgtccaaatctggcagtccc

SEQ ID NO: 4708696 - DNA, 25 bp, Homo sapien
catgctgaggtcacgaggttgctct

SEQ ID NO: 4708697 - DNA, 25 bp, Homo sapien
gatagatagcaccacaagagagcca

SEQ ID NO: 4708698 - DNA, 25 bp, Homo sapien
tcataacagccctcgggagtggacg

SEQ ID NO: 4708699 - DNA, 25 bp, Homo sapien
aatttattgcacgttcttggccagg

SEQ ID NO: 4708700 - DNA, 25 bp, Homo sapien
taatcagaacggtactgcaacccag

SEQ ID NO: 4708701 - DNA, 25 bp, Homo sapien
catggcatgactgaacggcttggaa

SEQ ID NO: 4708702 - DNA, 25 bp, Homo sapien
tacttggaaaagacgtgctgcaggc

SEQ ID NO: 4708703 - DNA, 25 bp, Homo sapien
caagagcgagacttactttccaggg

SEQ ID NO: 4708704 - DNA, 25 bp, Homo sapien
tttggaaaatccacgctggcggtgt

SEQ ID NO: 4708705 - DNA, 25 bp, Homo sapien
taagatatcctttcctgggcattac

SEQ ID NO: 4708706 - DNA, 25 bp, Homo sapien
tggaaacacccaactcgatttattg

SEQ ID NO: 4708707 - DNA, 25 bp, Homo sapien
catgtctagcggattttttgaaacc

SEQ ID NO: 4708708 - DNA, 25 bp, Homo sapien
tgtatttcaaaaggcctgatgtcct

SEQ ID NO: 4708709 - DNA, 25 bp, Homo sapien
aacctttgacgactgtgagcgtcca

SEQ ID NO: 4708710 - DNA, 25 bp, Homo sapien
cttctggattcgatggcaaggacct

SEQ ID NO: 4708711 - DNA, 25 bp, Homo sapien
tggcaaggaccttcagacccatcaa

SEQ ID NO: 4708712 - DNA, 25 bp, Homo sapien
gacccatcaacctttgacgactgtg

SEQ ID NO: 4708713 - DNA, 25 bp, Homo sapien
cccaggaggtctgatcccgtgcttc

SEQ ID NO: 4708714 - DNA, 25 bp, Homo sapien
tcctgggaggtgtgatcacatgcct

SEQ ID NO: 4708715 - DNA, 25 bp, Homo sapien
catgcctgctggtgatagagaggca

SEQ ID NO: 4708716 - DNA, 25 bp, Homo sapien
cgtgctccctgtgaggtctgatcct

SEQ ID NO: 4708717 - DNA, 25 bp, Homo sapien
atgacatttgccgtgggacagggtt

SEQ ID NO: 4708718 - DNA, 25 bp, Homo sapien
tgtctcccccatgacatttgccgtg

SEQ ID NO: 4708719 - DNA, 25 bp, Homo sapien
agctggaccaatgtggactggcggc

SEQ ID NO: 4708720 - DNA, 25 bp, Homo sapien
ctggaccaatgtggactggcggcat

SEQ ID NO: 4708721 - DNA, 25 bp, Homo sapien
ggcttttagctaccagttctgaggg

SEQ ID NO: 4708722 - DNA, 25 bp, Homo sapien
tttggaatccaggtgactaagggcc

SEQ ID NO: 4708723 - DNA, 25 bp, Homo sapien
ttctctgtgagtcttgcccatggca

SEQ ID NO: 4708724 - DNA, 25 bp, Homo sapien
gcaggttcattggagtctatgtcaa

SEQ ID NO: 4708725 - DNA, 25 bp, Homo sapien
caagccggtgctgcaaagacgcagg

SEQ ID NO: 4708726 - DNA, 25 bp, Homo sapien
tggcactggatcaggctcccgtcca

SEQ ID NO: 4708727 - DNA, 25 bp, Homo sapien
ccagcatgcagggagttggttgcaa

SEQ ID NO: 4708728 - DNA, 25 bp, Homo sapien
ttggttgcaaccctagaggacattg

SEQ ID NO: 4708729 - DNA, 25 bp, Homo sapien
ttcagtcaaggccatggtccacagg

SEQ ID NO: 4708730 - DNA, 25 bp, Homo sapien
tcagtcaaggccatggtccacagga

SEQ ID NO: 4708731 - DNA, 25 bp, Homo sapien
cttcagtcaaggccatggtccacag

SEQ ID NO: 4708732 - DNA, 25 bp, Homo sapien
tgacattgatcgtggcacaggctct

SEQ ID NO: 4708733 - DNA, 25 bp, Homo sapien
gacttgactttgctggccacgtcca

SEQ ID NO: 4708734 - DNA, 25 bp, Homo sapien
catgctctgaatttgggacctggcc

SEQ ID NO: 4708735 - DNA, 25 bp, Homo sapien
taggtgccacatcgacctcactggg

SEQ ID NO: 4708736 - DNA, 25 bp, Homo sapien
ggctcagaccatggcgcctactagg

SEQ ID NO: 4708737 - DNA, 25 bp, Homo sapien
tggtccaccacgagcaggctcagac

SEQ ID NO: 4708738 - DNA, 25 bp, Homo sapien
ctagggtttttggaagccatccctg

SEQ ID NO: 4708739 - DNA, 25 bp, Homo sapien
gccatccctggttctgagttcagag

SEQ ID NO: 4708740 - DNA, 25 bp, Homo sapien
taactcacccataacataaccagtg

SEQ ID NO: 4708741 - DNA, 25 bp, Homo sapien
tcacccctggctcactggtcagaac

SEQ ID NO: 4708742 - DNA, 25 bp, Homo sapien
ggtcagaacaagtgtagaccacttt

SEQ ID NO: 4708743 - DNA, 25 bp, Homo sapien
aatgaatacttaataatgtaggata

SEQ ID NO: 4708744 - DNA, 25 bp, Homo sapien
gcctggatctgctccgctgggtcct

SEQ ID NO: 4708745 - DNA, 25 bp, Homo sapien
gtagttgttgtggtgtgtcagaatc

SEQ ID NO: 4708746 - DNA, 25 bp, Homo sapien
gagaaggggtagttgttgtggtgtg

SEQ ID NO: 4708747 - DNA, 25 bp, Homo sapien
catctccgacaccttgtagctgtag

SEQ ID NO: 4708748 - DNA, 25 bp, Homo sapien
tttccccgacttccagttgatgccg

SEQ ID NO: 4708749 - DNA, 25 bp, Homo sapien
ggtgacagctggcataccaccaggc

SEQ ID NO: 4708750 - DNA, 25 bp, Homo sapien
aggctccctgatagtgcacggcaca

SEQ ID NO: 4708751 - DNA, 25 bp, Homo sapien
aacgtgtgaggctctcatgcatgag

SEQ ID NO: 4708752 - DNA, 25 bp, Homo sapien
ctttggtacaacgtgtgaggctctc

SEQ ID NO: 4708753 - DNA, 25 bp, Homo sapien
tctcatgcatgagtcccaagggacc

SEQ ID NO: 4708754 - DNA, 25 bp, Homo sapien
tgaggctctcatgcatgagtcccaa

SEQ ID NO: 4708755 - DNA, 25 bp, Homo sapien
ttcttgatgagggattcacgtgcac

SEQ ID NO: 4708756 - DNA, 25 bp, Homo sapien
cttgatgagggattcacgtgcacac

SEQ ID NO: 4708757 - DNA, 25 bp, Homo sapien
ctttgttcttgatgagggattcacg

SEQ ID NO: 4708758 - DNA, 25 bp, Homo sapien
tgttcttgatgagggattcacgtgc

SEQ ID NO: 4708759 - DNA, 25 bp, Homo sapien
gagttgagtcgagcagagaaaaggc

SEQ ID NO: 4708760 - DNA, 25 bp, Homo sapien
cacctggagagttgagtcgagcaga

SEQ ID NO: 4708761 - DNA, 25 bp, Homo sapien
ccacctggagagttgagtcgagcag

SEQ ID NO: 4708762 - DNA, 25 bp, Homo sapien
ggagagttgagtcgagcagagaaaa

SEQ ID NO: 4708763 - DNA, 25 bp, Homo sapien
cagcagggtggcagcgcccaggacc

SEQ ID NO: 4708764 - DNA, 25 bp, Homo sapien
agcagggtggcagcgcccaggaccc

SEQ ID NO: 4708765 - DNA, 25 bp, Homo sapien
gaatggtgagcttgtcagagccctc

SEQ ID NO: 4708766 - DNA, 25 bp, Homo sapien
aggcagccccggacagcctcggaga

SEQ ID NO: 4708767 - DNA, 25 bp, Homo sapien
gccccggacagcctcggagaatggt

SEQ ID NO: 4708768 - DNA, 25 bp, Homo sapien
tctctttccattggtgcctgcctct

SEQ ID NO: 4708769 - DNA, 25 bp, Homo sapien
caatttccaaagacactgacttgag

SEQ ID NO: 4708770 - DNA, 25 bp, Homo sapien
atttccaaagacactgacttgagga

SEQ ID NO: 4708771 - DNA, 25 bp, Homo sapien
ttccaaagacactgacttgaggaaa

SEQ ID NO: 4708772 - DNA, 25 bp, Homo sapien
ctgcaatttccaaagacactgactt

SEQ ID NO: 4708773 - DNA, 25 bp, Homo sapien
caggtggtcctgccttcccaggagg

SEQ ID NO: 4708774 - DNA, 25 bp, Homo sapien
cgttgggcccaggtggtcctgcctt

SEQ ID NO: 4708775 - DNA, 25 bp, Homo sapien
ggtcctgccttcccaggaggtccag

SEQ ID NO: 4708776 - DNA, 25 bp, Homo sapien
tgggcccaggtggtcctgccttccc

SEQ ID NO: 4708777 - DNA, 25 bp, Homo sapien
cttgaagccgcttctcactcttgtc

SEQ ID NO: 4708778 - DNA, 25 bp, Homo sapien
ggccttgaagccgcttctcactctt

SEQ ID NO: 4708779 - DNA, 25 bp, Homo sapien
ttgaagccgcttctcactcttgtcc

SEQ ID NO: 4708780 - DNA, 25 bp, Homo sapien
aagggccttgaagccgcttctcact

SEQ ID NO: 4708781 - DNA, 25 bp, Homo sapien
aggcacggctggggctccccaggtg

SEQ ID NO: 4708782 - DNA, 25 bp, Homo sapien
ctgtcaggcacggctggggctcccc

SEQ ID NO: 4708783 - DNA, 25 bp, Homo sapien
cacggctggggctccccaggtgctc

SEQ ID NO: 4708784 - DNA, 25 bp, Homo sapien
tgtcaggcacggctggggctcccca

SEQ ID NO: 4708785 - DNA, 25 bp, Homo sapien
caatggcgtcgtatgaccctggact

SEQ ID NO: 4708786 - DNA, 25 bp, Homo sapien
caaggaaacgggcaagcaaccattt

SEQ ID NO: 4708787 - DNA, 25 bp, Homo sapien
cggccttctggcgtagattataaat

SEQ ID NO: 4708788 - DNA, 25 bp, Homo sapien
gaagcagggccataggcgtctgtat

SEQ ID NO: 4708789 - DNA, 25 bp, Homo sapien
cagccgctcaggaagtgccctcggt

SEQ ID NO: 4708790 - DNA, 25 bp, Homo sapien
gaagtgccctcggtctagcaggtcc

SEQ ID NO: 4708791 - DNA, 25 bp, Homo sapien
tcaggaagtgccctcggtctagcag

SEQ ID NO: 4708792 - DNA, 25 bp, Homo sapien
cgctcaggaagtgccctcggtctag

SEQ ID NO: 4708793 - DNA, 25 bp, Homo sapien
gactgtccccgaccaggagaataga

SEQ ID NO: 4708794 - DNA, 25 bp, Homo sapien
atctctgactgtccccgaccaggag

SEQ ID NO: 4708795 - DNA, 25 bp, Homo sapien
ctgactgtccccgaccaggagaata

SEQ ID NO: 4708796 - DNA, 25 bp, Homo sapien
ctgtccccgaccaggagaatagaga

SEQ ID NO: 4708797 - DNA, 25 bp, Homo sapien
agaggggaggcaacaagccccaagc

SEQ ID NO: 4708798 - DNA, 25 bp, Homo sapien
agcaggagagcacccaacctctccc

SEQ ID NO: 4708799 - DNA, 25 bp, Homo sapien
tggacttttacccaccggtcatctc

SEQ ID NO: 4708800 - DNA, 25 bp, Homo sapien
gagcagcatttgtagttggcagagc

SEQ ID NO: 4708801 - DNA, 25 bp, Homo sapien
cttgtacgtggcccagtcccggtag

SEQ ID NO: 4708802 - DNA, 25 bp, Homo sapien
ttgtacgtggcccagtcccggtaga

SEQ ID NO: 4708803 - DNA, 25 bp, Homo sapien
gtccaccaggtctacacggagctcg

SEQ ID NO: 4708804 - DNA, 25 bp, Homo sapien
aaagtccaccaggtctacacggagc

SEQ ID NO: 4708805 - DNA, 25 bp, Homo sapien
aagtccaccaggtctacacggagct

SEQ ID NO: 4708806 - DNA, 25 bp, Homo sapien
caccaggtctacacggagctcgctg

SEQ ID NO: 4708807 - DNA, 25 bp, Homo sapien
ttgttgtggaacgtcagggaatctc

SEQ ID NO: 4708808 - DNA, 25 bp, Homo sapien
aaggactggttgttgtggaacgtca

SEQ ID NO: 4708809 - DNA, 25 bp, Homo sapien
cggtgttaagatcattgtcctggtc

SEQ ID NO: 4708810 - DNA, 25 bp, Homo sapien
cacagcacaatttccggtgttaaga

SEQ ID NO: 4708811 - DNA, 25 bp, Homo sapien
caccttgtagctataattgtatcct

SEQ ID NO: 4708812 - DNA, 25 bp, Homo sapien
gaggtagcgaccattcaggtttgac

SEQ ID NO: 4708813 - DNA, 25 bp, Homo sapien
tttccccgacttccagttgatgcca

SEQ ID NO: 4708814 - DNA, 25 bp, Homo sapien
caggtttgacacatggcagtttttg

SEQ ID NO: 4708815 - DNA, 25 bp, Homo sapien
tccgcacagcaagacaaacccaatt

SEQ ID NO: 4708816 - DNA, 25 bp, Homo sapien
caactatgtgtggaggcgtcctgac

SEQ ID NO: 4708817 - DNA, 25 bp, Homo sapien
cccaatttagaatcacgacatgtgt

SEQ ID NO: 4708818 - DNA, 25 bp, Homo sapien
tacaaaccgtagggccaagctccca

SEQ ID NO: 4708819 - DNA, 25 bp, Homo sapien
gtagcgagcagatcccacgaatacc

SEQ ID NO: 4708820 - DNA, 25 bp, Homo sapien
ttgcttcggcttgtgaggaagtagc

SEQ ID NO: 4708821 - DNA, 25 bp, Homo sapien
tgtaaccactctctccgttttgatg

SEQ ID NO: 4708822 - DNA, 25 bp, Homo sapien
ccgttttgatgagggagtcacaggc

SEQ ID NO: 4708823 - DNA, 25 bp, Homo sapien
cagggcagctttgggatggacactc

SEQ ID NO: 4708824 - DNA, 25 bp, Homo sapien
ccaaacagccgtacaagggtcagca

SEQ ID NO: 4708825 - DNA, 25 bp, Homo sapien
gacacaagctcctgcactaatacac

SEQ ID NO: 4708826 - DNA, 25 bp, Homo sapien
gcttgcctgagagaagcgggtggaa

SEQ ID NO: 4708827 - DNA, 25 bp, Homo sapien
agaggaaacagtgcactctcccccg

SEQ ID NO: 4708828 - DNA, 25 bp, Homo sapien
tcaggtttgacagcttgctagtttc

SEQ ID NO: 4708829 - DNA, 25 bp, Homo sapien
tgtgtcctgatcttcatggcgcacc

SEQ ID NO: 4708830 - DNA, 25 bp, Homo sapien
catgacttgtgtagggcttagacca

SEQ ID NO: 4708831 - DNA, 25 bp, Homo sapien
tgccatcatgcattccagggagaac

SEQ ID NO: 4708832 - DNA, 25 bp, Homo sapien
gctgaagcgtgaggccacagtgcat

SEQ ID NO: 4708833 - DNA, 25 bp, Homo sapien
ggacccaggtctacgagaaaagaga

SEQ ID NO: 4708834 - DNA, 25 bp, Homo sapien
gaggaggtctgacgccaggtctcat

SEQ ID NO: 4708835 - DNA, 25 bp, Homo sapien
gctaatttgtcctacaaaaggagtc

SEQ ID NO: 4708836 - DNA, 25 bp, Homo sapien
tttacagtggcggtttcaatgtcag

SEQ ID NO: 4708837 - DNA, 25 bp, Homo sapien
aaaaggagtctagtcctcaggcaag

SEQ ID NO: 4708838 - DNA, 25 bp, Homo sapien
gctctgaggactgctaactggctat

SEQ ID NO: 4708839 - DNA, 25 bp, Homo sapien
gtctttcttcactaagtgattagtg

SEQ ID NO: 4708840 - DNA, 25 bp, Homo sapien
tttcttcactaagtgattagtgtca

SEQ ID NO: 4708841 - DNA, 25 bp, Homo sapien
tcttcactaagtgattagtgtcatt

SEQ ID NO: 4708842 - DNA, 25 bp, Homo sapien
ctttcttcactaagtgattagtgtc

SEQ ID NO: 4708843 - DNA, 25 bp, Homo sapien
tatcttgctagttgtgctctacttg

SEQ ID NO: 4708844 - DNA, 25 bp, Homo sapien
gtttaactgaaacctactatcttgc

SEQ ID NO: 4708845 - DNA, 25 bp, Homo sapien
cacataatgtactcatatataaggt

SEQ ID NO: 4708846 - DNA, 25 bp, Homo sapien
catttgactgtatctctttgtgtaa

SEQ ID NO: 4708847 - DNA, 25 bp, Homo sapien
ctggtgtttgcagagccccagaaca

SEQ ID NO: 4708848 - DNA, 25 bp, Homo sapien
ccccagaacatcctcgcaccctgct

SEQ ID NO: 4708849 - DNA, 25 bp, Homo sapien
cgctggtgtttgcagagccccagaa

SEQ ID NO: 4708850 - DNA, 25 bp, Homo sapien
tgtccgctggtgtttgcagagcccc

SEQ ID NO: 4708851 - DNA, 25 bp, Homo sapien
gaagtaatgttcagagccaggtgcc

SEQ ID NO: 4708852 - DNA, 25 bp, Homo sapien
cgtgcatgatgcaaattcggtggag

SEQ ID NO: 4708853 - DNA, 25 bp, Homo sapien
aaagcgtcgggctgaatgcagatgc

SEQ ID NO: 4708854 - DNA, 25 bp, Homo sapien
tgatggtaaaagtcacacgtgcatg

SEQ ID NO: 4708855 - DNA, 25 bp, Homo sapien
aggccgacgctgacctccaaatagt

SEQ ID NO: 4708856 - DNA, 25 bp, Homo sapien
ccttcgtaagggttgataagcacct

SEQ ID NO: 4708857 - DNA, 25 bp, Homo sapien
acctcaccttttctagctggtaggg

SEQ ID NO: 4708858 - DNA, 25 bp, Homo sapien
tccaaatagtcccaagcatgaattg

SEQ ID NO: 4708859 - DNA, 25 bp, Homo sapien
gaggtgacttaatggtgaccatggc

SEQ ID NO: 4708860 - DNA, 25 bp, Homo sapien
tgatggaggtgacttaatggtgacc

SEQ ID NO: 4708861 - DNA, 25 bp, Homo sapien
acttaatggtgaccatggctggctg

SEQ ID NO: 4708862 - DNA, 25 bp, Homo sapien
agtatgatggaggtgacttaatggt

SEQ ID NO: 4708863 - DNA, 25 bp, Homo sapien
tggaagatgattgaaacctgcacct

SEQ ID NO: 4708864 - DNA, 25 bp, Homo sapien
gaagatgattgaaacctgcacctgg

SEQ ID NO: 4708865 - DNA, 25 bp, Homo sapien
ggaagatgattgaaacctgcacctg

SEQ ID NO: 4708866 - DNA, 25 bp, Homo sapien
aaagatgaacctccagccgagagcg

SEQ ID NO: 4708867 - DNA, 25 bp, Homo sapien
tgatgctctcccactaatggttagc

SEQ ID NO: 4708868 - DNA, 25 bp, Homo sapien
tttattcaggtaagctgacgcatcc

SEQ ID NO: 4708869 - DNA, 25 bp, Homo sapien
tgacgcatcctgttagctgagctaa

SEQ ID NO: 4708870 - DNA, 25 bp, Homo sapien
gactgcccgggatagagaagcatgc

SEQ ID NO: 4708871 - DNA, 25 bp, Homo sapien
cagcttccccaagcggtgcgggact

SEQ ID NO: 4708872 - DNA, 25 bp, Homo sapien
ttccagcttccccaagcggtgcggg

SEQ ID NO: 4708873 - DNA, 25 bp, Homo sapien
cggtgcgggactgcccgggatagag

SEQ ID NO: 4708874 - DNA, 25 bp, Homo sapien
cctcattctgcttgtctgacgttct

SEQ ID NO: 4708875 - DNA, 25 bp, Homo sapien
gcttgtctgacgttctttagtatct

SEQ ID NO: 4708876 - DNA, 25 bp, Homo sapien
tatctgttaaggcttgtagggcccc

SEQ ID NO: 4708877 - DNA, 25 bp, Homo sapien
tttcacgcccaaatgtcctggtcat

SEQ ID NO: 4708878 - DNA, 25 bp, Homo sapien
tccggagaaacgctcccatttggag

SEQ ID NO: 4708879 - DNA, 25 bp, Homo sapien
cccgcggtgcagattctcggcaaag

SEQ ID NO: 4708880 - DNA, 25 bp, Homo sapien
ctgccgtcgacaaaatgattctcct

SEQ ID NO: 4708881 - DNA, 25 bp, Homo sapien
gattctcggcaaagaatcaaagctc

SEQ ID NO: 4708882 - DNA, 25 bp, Homo sapien
cagggtgtgccgtattcatagccgt

SEQ ID NO: 4708883 - DNA, 25 bp, Homo sapien
catagccgtttgtcccaattggaaa

SEQ ID NO: 4708884 - DNA, 25 bp, Homo sapien
caagagcatgatatttacagccgca

SEQ ID NO: 4708885 - DNA, 25 bp, Homo sapien
gaaggcgttcgagagcaaaatagca

SEQ ID NO: 4708886 - DNA, 25 bp, Homo sapien
cctgaaatccctgcttactgtttct

SEQ ID NO: 4708887 - DNA, 25 bp, Homo sapien
tgccccaaaacattccccgcctgcc

SEQ ID NO: 4708888 - DNA, 25 bp, Homo sapien
gaaatccctgcttactgtttctcct

SEQ ID NO: 4708889 - DNA, 25 bp, Homo sapien
ccccaaaacattccccgcctgccag

SEQ ID NO: 4708890 - DNA, 25 bp, Homo sapien
ccgagagcccagacgaaggggtagt

SEQ ID NO: 4708891 - DNA, 25 bp, Homo sapien
accctgaccccgctgaccgagagcc

SEQ ID NO: 4708892 - DNA, 25 bp, Homo sapien
ggacctgcttttctgtccagaagga

SEQ ID NO: 4708893 - DNA, 25 bp, Homo sapien
tggagggggacctgcttttctgtcc

SEQ ID NO: 4708894 - DNA, 25 bp, Homo sapien
gctgttgttttctaacacagtttgg

SEQ ID NO: 4708895 - DNA, 25 bp, Homo sapien
ttgttttctaacacagtttggtctg

SEQ ID NO: 4708896 - DNA, 25 bp, Homo sapien
tgttgttttctaacacagtttggtc

SEQ ID NO: 4708897 - DNA, 25 bp, Homo sapien
ttgctgttgttttctaacacagttt

SEQ ID NO: 4708898 - DNA, 25 bp, Homo sapien
tcaactgacccgtggcatacacgca

SEQ ID NO: 4708899 - DNA, 25 bp, Homo sapien
catacacgcatgagcgtgctgagca

SEQ ID NO: 4708900 - DNA, 25 bp, Homo sapien
catggtccagatctcaactgacccg

SEQ ID NO: 4708901 - DNA, 25 bp, Homo sapien
aaagcaagctgcgtctgcaggcgag

SEQ ID NO: 4708902 - DNA, 25 bp, Homo sapien
ggaggagagatgctaccatggcaca

SEQ ID NO: 4708903 - DNA, 25 bp, Homo sapien
gctgggacaagctgagccagaggga

SEQ ID NO: 4708904 - DNA, 25 bp, Homo sapien
aggccacaatctcctccaggtagct

SEQ ID NO: 4708905 - DNA, 25 bp, Homo sapien
atggcacagaagcacccggtagccc

SEQ ID NO: 4708906 - DNA, 25 bp, Homo sapien
ctggcagccgccacaaccaaggtgg

SEQ ID NO: 4708907 - DNA, 25 bp, Homo sapien
cagggatgtcccatctgacacccac

SEQ ID NO: 4708908 - DNA, 25 bp, Homo sapien
gataccaaagaggatgctggtgcct

SEQ ID NO: 4708909 - DNA, 25 bp, Homo sapien
atgtcccatctgacacccaccaggg

SEQ ID NO: 4708910 - DNA, 25 bp, Homo sapien
ggtgggagacaggagccgaacagcc

SEQ ID NO: 4708911 - DNA, 25 bp, Homo sapien
acaggagccgaacagcccacgggag

SEQ ID NO: 4708912 - DNA, 25 bp, Homo sapien
tgggagacaggagccgaacagccca

SEQ ID NO: 4708913 - DNA, 25 bp, Homo sapien
gagacaggagccgaacagcccacgg

SEQ ID NO: 4708914 - DNA, 25 bp, Homo sapien
ttcagtgcaagacccgggtgcaagc

SEQ ID NO: 4708915 - DNA, 25 bp, Homo sapien
ttgacgttcagtgcaagacccgggt

SEQ ID NO: 4708916 - DNA, 25 bp, Homo sapien
acgttcagtgcaagacccgggtgca

SEQ ID NO: 4708917 - DNA, 25 bp, Homo sapien
ctgagttgacgttcagtgcaagacc

SEQ ID NO: 4708918 - DNA, 25 bp, Homo sapien
tgtgtccttgcaaagggatggctga

SEQ ID NO: 4708919 - DNA, 25 bp, Homo sapien
ctgggcacgacagggaggcaggcct

SEQ ID NO: 4708920 - DNA, 25 bp, Homo sapien
caggcctggtagcaccagatccagg

SEQ ID NO: 4708921 - DNA, 25 bp, Homo sapien
tgtccttgcaaagggatggctgaag

SEQ ID NO: 4708922 - DNA, 25 bp, Homo sapien
tgagccttttccctcgatagaactt

SEQ ID NO: 4708923 - DNA, 25 bp, Homo sapien
tgaggtcacagacggtcagcaaagg

SEQ ID NO: 4708924 - DNA, 25 bp, Homo sapien
ttccctcgatagaactttctggccc

SEQ ID NO: 4708925 - DNA, 25 bp, Homo sapien
ggtcacagacggtcagcaaaggaga

SEQ ID NO: 4708926 - DNA, 25 bp, Homo sapien
gaagaccaatgtgacaatcaatcgg

SEQ ID NO: 4708927 - DNA, 25 bp, Homo sapien
aatcggcagcgcctgtttcttgctc

SEQ ID NO: 4708928 - DNA, 25 bp, Homo sapien
gtgacaatcaatcggcagcgcctgt

SEQ ID NO: 4708929 - DNA, 25 bp, Homo sapien
tcagaggccccgaagaccaatgtga

SEQ ID NO: 4708930 - DNA, 25 bp, Homo sapien
tcatctcgccatcccgcttgtgtaa

SEQ ID NO: 4708931 - DNA, 25 bp, Homo sapien
tcatcatctcgccatcccgcttgtg

SEQ ID NO: 4708932 - DNA, 25 bp, Homo sapien
atagccatcatcatctcgccatccc

SEQ ID NO: 4708933 - DNA, 25 bp, Homo sapien
tagccatcatcatctcgccatcccg

SEQ ID NO: 4708934 - DNA, 25 bp, Homo sapien
gctgcaagatgtggcagccgaaccc

SEQ ID NO: 4708935 - DNA, 25 bp, Homo sapien
cagggcactggaagctagacacaag

SEQ ID NO: 4708936 - DNA, 25 bp, Homo sapien
tctcatggcagatggccagaggtct

SEQ ID NO: 4708937 - DNA, 25 bp, Homo sapien
ggcagccgaacccaaccttaatgtc

SEQ ID NO: 4708938 - DNA, 25 bp, Homo sapien
ccactccatgacaggccgtggtgta

SEQ ID NO: 4708939 - DNA, 25 bp, Homo sapien
gctctgaatgatggttttgagcttc

SEQ ID NO: 4708940 - DNA, 25 bp, Homo sapien
ctgcccccactccatgacaggccgt

SEQ ID NO: 4708941 - DNA, 25 bp, Homo sapien
ctctgaatgatggttttgagcttca

SEQ ID NO: 4708942 - DNA, 25 bp, Homo sapien
caggaaacaggggacttcgctcttc

SEQ ID NO: 4708943 - DNA, 25 bp, Homo sapien
caggggacttcgctcttcaaagtgc

SEQ ID NO: 4708944 - DNA, 25 bp, Homo sapien
acttcgctcttcaaagtgcctctca

SEQ ID NO: 4708945 - DNA, 25 bp, Homo sapien
gaaacaggggacttcgctcttcaaa

SEQ ID NO: 4708946 - DNA, 25 bp, Homo sapien
tctctccgaggacgattaggccatg

SEQ ID NO: 4708947 - DNA, 25 bp, Homo sapien
aatgaaagccgtgtctggcactccg

SEQ ID NO: 4708948 - DNA, 25 bp, Homo sapien
cacccgataaagtcagtcagtctct

SEQ ID NO: 4708949 - DNA, 25 bp, Homo sapien
tactccatgtgtgaccttgaacggg

SEQ ID NO: 4708950 - DNA, 25 bp, Homo sapien
tactgctcggatgacgggaagccag

SEQ ID NO: 4708951 - DNA, 25 bp, Homo sapien
gcacttcttggctgtactgctcgga

SEQ ID NO: 4708952 - DNA, 25 bp, Homo sapien
ggaagccagtgcagacgccgagttt

SEQ ID NO: 4708953 - DNA, 25 bp, Homo sapien
agccagtgcagacgccgagtttgtt

SEQ ID NO: 4708954 - DNA, 25 bp, Homo sapien
ctgacagatgaccaacacctgaacc

SEQ ID NO: 4708955 - DNA, 25 bp, Homo sapien
aacacctgaacctttccgcaagaca

SEQ ID NO: 4708956 - DNA, 25 bp, Homo sapien
aagatactgacgaggctgtgttgcc

SEQ ID NO: 4708957 - DNA, 25 bp, Homo sapien
agagctgtgcgaggaaaagatactg

SEQ ID NO: 4708958 - DNA, 25 bp, Homo sapien
tatgggctacttcgcgttcatggca

SEQ ID NO: 4708959 - DNA, 25 bp, Homo sapien
cattggcaaatccttgcgggcgtga

SEQ ID NO: 4708960 - DNA, 25 bp, Homo sapien
cctaggtgcacgcttaagattcaga

SEQ ID NO: 4708961 - DNA, 25 bp, Homo sapien
gtgatcagctgcattgaggcccagg

SEQ ID NO: 4708962 - DNA, 25 bp, Homo sapien
tttaactgtgggtgcttatctacac

SEQ ID NO: 4708963 - DNA, 25 bp, Homo sapien
catctgttattaagtcgatttttgg

SEQ ID NO: 4708964 - DNA, 25 bp, Homo sapien
gatttttggataacctttctggtgc

SEQ ID NO: 4708965 - DNA, 25 bp, Homo sapien
ttctggtgctgtgaatcccacttta

SEQ ID NO: 4708966 - DNA, 25 bp, Homo sapien
tctttctcgaagataattcctcttg

SEQ ID NO: 4708967 - DNA, 25 bp, Homo sapien
ccagctctttctcgaagataattcc

SEQ ID NO: 4708968 - DNA, 25 bp, Homo sapien
ggtcgcccagctctttctcgaagat

SEQ ID NO: 4708969 - DNA, 25 bp, Homo sapien
gaaaggtcgcccagctctttctcga

SEQ ID NO: 4708970 - DNA, 25 bp, Homo sapien
aagggcccgtgggtgattgtggtga

SEQ ID NO: 4708971 - DNA, 25 bp, Homo sapien
atgatgatggtggacgtggcacggg

SEQ ID NO: 4708972 - DNA, 25 bp, Homo sapien
agggcccgtgggtgactgtggtggt

SEQ ID NO: 4708973 - DNA, 25 bp, Homo sapien
tggtgaaggtgcacctggcacaggg

SEQ ID NO: 4708974 - DNA, 25 bp, Homo sapien
ggcccatgggtgactgtggtgatga

SEQ ID NO: 4708975 - DNA, 25 bp, Homo sapien
cattgagaggttgtaagtaattctg

SEQ ID NO: 4708976 - DNA, 25 bp, Homo sapien
aagtaattctgccactgagggtctc

SEQ ID NO: 4708977 - DNA, 25 bp, Homo sapien
ttgagaggttgtaagtaattctgcc

SEQ ID NO: 4708978 - DNA, 25 bp, Homo sapien
agtaattctgccactgagggtctca

SEQ ID NO: 4708979 - DNA, 25 bp, Homo sapien
cctggggacaatctcctcagacatc

SEQ ID NO: 4708980 - DNA, 25 bp, Homo sapien
cccggggaccctgcacatcctgggc

SEQ ID NO: 4708981 - DNA, 25 bp, Homo sapien
atctcctcagacatccaggactgaa

SEQ ID NO: 4708982 - DNA, 25 bp, Homo sapien
ccatccgagcaggtggagaactgcc

SEQ ID NO: 4708983 - DNA, 25 bp, Homo sapien
aaaacacccagggtgacaatgtcat

SEQ ID NO: 4708984 - DNA, 25 bp, Homo sapien
tttgtgtatcctcccaaaacaccca

SEQ ID NO: 4708985 - DNA, 25 bp, Homo sapien
gtgacaatgtcatagggcacagcct

SEQ ID NO: 4708986 - DNA, 25 bp, Homo sapien
cccaaaacacccagggtgacaatgt

SEQ ID NO: 4708987 - DNA, 25 bp, Homo sapien
catcagcctcgtccattattaagtg

SEQ ID NO: 4708988 - DNA, 25 bp, Homo sapien
tcagcctcgtccattattaagtggg

SEQ ID NO: 4708989 - DNA, 25 bp, Homo sapien
gtcatcagcctcgtccattattaag

SEQ ID NO: 4708990 - DNA, 25 bp, Homo sapien
gctgtcatcagcctcgtccattatt

SEQ ID NO: 4708991 - DNA, 25 bp, Homo sapien
cccaggtcctgtgatctggtttcta

SEQ ID NO: 4708992 - DNA, 25 bp, Homo sapien
tgaaatgcacatcgcctgagtgagt

SEQ ID NO: 4708993 - DNA, 25 bp, Homo sapien
caggtcctgtgatctggtttctaag

SEQ ID NO: 4708994 - DNA, 25 bp, Homo sapien
ctgcagcaggtgatcagtgaaatgc

SEQ ID NO: 4708995 - DNA, 25 bp, Homo sapien
aggtggtgagcgcagcagcccaaaa

SEQ ID NO: 4708996 - DNA, 25 bp, Homo sapien
gatgcaccctggaatctgccccagt

SEQ ID NO: 4708997 - DNA, 25 bp, Homo sapien
agcagatgcaccctggaatctgccc

SEQ ID NO: 4708998 - DNA, 25 bp, Homo sapien
agagcagatgcaccctggaatctgc

SEQ ID NO: 4708999 - DNA, 25 bp, Homo sapien
ctgagcttctgctgtgcggcccttg

SEQ ID NO: 4709000 - DNA, 25 bp, Homo sapien
tttccaaacataaggtcagtttggc

SEQ ID NO: 4709001 - DNA, 25 bp, Homo sapien
ctttccaaacataaggtcagtttgg

SEQ ID NO: 4709002 - DNA, 25 bp, Homo sapien
gcttccagatctcagaactggacgc

SEQ ID NO: 4709003 - DNA, 25 bp, Homo sapien
tcagtttggcttccagatctcagaa

SEQ ID NO: 4709004 - DNA, 25 bp, Homo sapien
agcgtttttccgctataccaggttg

SEQ ID NO: 4709005 - DNA, 25 bp, Homo sapien
accaggttgtctttcgaggattagg

SEQ ID NO: 4709006 - DNA, 25 bp, Homo sapien
tgtatcttcctgtaccagcgttttt

SEQ ID NO: 4709007 - DNA, 25 bp, Homo sapien
tgaattccacctttgtagccaagag

SEQ ID NO: 4709008 - DNA, 25 bp, Homo sapien
aagaggctccgcgaagacttgagtg

SEQ ID NO: 4709009 - DNA, 25 bp, Homo sapien
tctgtgtttaagatgaagaggctcc

SEQ ID NO: 4709010 - DNA, 25 bp, Homo sapien
ggcaattgcttgacctccacgacgt

SEQ ID NO: 4709011 - DNA, 25 bp, Homo sapien
gatgccaatgcatggaaatgaagca

SEQ ID NO: 4709012 - DNA, 25 bp, Homo sapien
aaattccaggagctatgccgggcaa

SEQ ID NO: 4709013 - DNA, 25 bp, Homo sapien
tgacagtgtcccttggtatctaacg

SEQ ID NO: 4709014 - DNA, 25 bp, Homo sapien
tgcagcacggctctttgtagcctac

SEQ ID NO: 4709015 - DNA, 25 bp, Homo sapien
tatctaacgtgcttgtgcacctggc

SEQ ID NO: 4709016 - DNA, 25 bp, Homo sapien
tctgggcaagctcaccagcgacttc

SEQ ID NO: 4709017 - DNA, 25 bp, Homo sapien
catgttgccgtttttgcccatcttc

SEQ ID NO: 4709018 - DNA, 25 bp, Homo sapien
tcctcgtcatcaaacgcaacggtgg

SEQ ID NO: 4709019 - DNA, 25 bp, Homo sapien
tcctctcgtcgaaaacatgttgccg

SEQ ID NO: 4709020 - DNA, 25 bp, Homo sapien
agcaccaaaccctgctccgtggtct

SEQ ID NO: 4709021 - DNA, 25 bp, Homo sapien
cctggcgttgcccatcctcctgtct

SEQ ID NO: 4709022 - DNA, 25 bp, Homo sapien
tcagtcgtgcacttgccggtgttca

SEQ ID NO: 4709023 - DNA, 25 bp, Homo sapien
tctcagttccctggcgttgcccatc

SEQ ID NO: 4709024 - DNA, 25 bp, Homo sapien
cgaagcctccgctctgcatatttat

SEQ ID NO: 4709025 - DNA, 25 bp, Homo sapien
acgcctggattcagcacccggagcg

SEQ ID NO: 4709026 - DNA, 25 bp, Homo sapien
tgggtgccaaaagtttgctcggaag

SEQ ID NO: 4709027 - DNA, 25 bp, Homo sapien
catatttatcgcgtcccggttccgg

SEQ ID NO: 4709028 - DNA, 25 bp, Homo sapien
gctgccacctccaacgacctggcat

SEQ ID NO: 4709029 - DNA, 25 bp, Homo sapien
cgctgccacctccaacgacctggca

SEQ ID NO: 4709030 - DNA, 25 bp, Homo sapien
ggctgaggagcttccgggccgggtg

SEQ ID NO: 4709031 - DNA, 25 bp, Homo sapien
ttgagtgagttcagtgcccatcagg

SEQ ID NO: 4709032 - DNA, 25 bp, Homo sapien
cagtgcccatcaggatgaggaagag

SEQ ID NO: 4709033 - DNA, 25 bp, Homo sapien
gctgaggagcttccgggccgggtgc

SEQ ID NO: 4709034 - DNA, 25 bp, Homo sapien
taaggtcccgccacctctgaaaatg

SEQ ID NO: 4709035 - DNA, 25 bp, Homo sapien
ggtcttggctatccggctctcactc

SEQ ID NO: 4709036 - DNA, 25 bp, Homo sapien
gacaagcccgtttgaaatgcccacg

SEQ ID NO: 4709037 - DNA, 25 bp, Homo sapien
tgcccaaagggaggatgagccactc

SEQ ID NO: 4709038 - DNA, 25 bp, Homo sapien
ggcaaaacaagggaagctcgttcag

SEQ ID NO: 4709039 - DNA, 25 bp, Homo sapien
agcgtgggcttccaggcaaaacaag

SEQ ID NO: 4709040 - DNA, 25 bp, Homo sapien
agggaagctcgttcagtgtcttctc

SEQ ID NO: 4709041 - DNA, 25 bp, Homo sapien
gcgtgggcttccaggcaaaacaagg

SEQ ID NO: 4709042 - DNA, 25 bp, Homo sapien
tgaatgcatctgtccagcaacagtg

SEQ ID NO: 4709043 - DNA, 25 bp, Homo sapien
gcttcagggtgccattaaggcttgg

SEQ ID NO: 4709044 - DNA, 25 bp, Homo sapien
ggcagcttgccactaatcaggacct

SEQ ID NO: 4709045 - DNA, 25 bp, Homo sapien
ctctgagggtaagcgggacgacata

SEQ ID NO: 4709046 - DNA, 25 bp, Homo sapien
gcaagattccgaaagcacaattatc

SEQ ID NO: 4709047 - DNA, 25 bp, Homo sapien
aagggacacattcccctgagacagc

SEQ ID NO: 4709048 - DNA, 25 bp, Homo sapien
tttccaaaatcccaacacattagga

SEQ ID NO: 4709049 - DNA, 25 bp, Homo sapien
ggataactggcctccaatgcaagat

SEQ ID NO: 4709050 - DNA, 25 bp, Homo sapien
cggttggtgtttgattgagtgtctc

SEQ ID NO: 4709051 - DNA, 25 bp, Homo sapien
gtcgtaggccatccatcaacggttg

SEQ ID NO: 4709052 - DNA, 25 bp, Homo sapien
ccatcaacggttggtgtttgattga

SEQ ID NO: 4709053 - DNA, 25 bp, Homo sapien
acagccttgcgtgtcgtaggccatc

SEQ ID NO: 4709054 - DNA, 25 bp, Homo sapien
gcggctccaacctgcacctgagcgg

SEQ ID NO: 4709055 - DNA, 25 bp, Homo sapien
tggttttgaaagggtcgtcagataa

SEQ ID NO: 4709056 - DNA, 25 bp, Homo sapien
tttccgcggtgattcgagggtccca

SEQ ID NO: 4709057 - DNA, 25 bp, Homo sapien
agagacggcgccgtcctgcctactg

SEQ ID NO: 4709058 - DNA, 25 bp, Homo sapien
atccccgcagagggtccgctttggg

SEQ ID NO: 4709059 - DNA, 25 bp, Homo sapien
aaaggttgccggcagagagacggcg

SEQ ID NO: 4709060 - DNA, 25 bp, Homo sapien
cgcggggactccagctgggggcacg

SEQ ID NO: 4709061 - DNA, 25 bp, Homo sapien
cgtcccggggcttctcccatcctca

SEQ ID NO: 4709062 - DNA, 25 bp, Homo sapien
ggcggcgcggggactccagctgggg

SEQ ID NO: 4709063 - DNA, 25 bp, Homo sapien
gctgggggcacggcccgcggccctc

SEQ ID NO: 4709064 - DNA, 25 bp, Homo sapien
gccctgcgccctgccttgcccggct

SEQ ID NO: 4709065 - DNA, 25 bp, Homo sapien
ggctgcgtccctccgggctcctccg

SEQ ID NO: 4709066 - DNA, 25 bp, Homo sapien
ccatcgccgcgccttccccgggcgc

SEQ ID NO: 4709067 - DNA, 25 bp, Homo sapien
gccaggtggcctctgcccgccgcgc

SEQ ID NO: 4709068 - DNA, 25 bp, Homo sapien
gcgcctggctgtgtccccgcgcccc

SEQ ID NO: 4709069 - DNA, 25 bp, Homo sapien
gcggcgggcaggggcgcctggctgt

SEQ ID NO: 4709070 - DNA, 25 bp, Homo sapien
ggcaggggcgcctggctgtgtcccc

SEQ ID NO: 4709071 - DNA, 25 bp, Homo sapien
cttcaggcggcgggcaccgcggcgg

SEQ ID NO: 4709072 - DNA, 25 bp, Homo sapien
cttggtggtgttgaggcccaccagc

SEQ ID NO: 4709073 - DNA, 25 bp, Homo sapien
ggacatccagttagtgatcatggcc

SEQ ID NO: 4709074 - DNA, 25 bp, Homo sapien
acatcgcgcctcgagctgcctccag

SEQ ID NO: 4709075 - DNA, 25 bp, Homo sapien
gtgctgcggtccagcgtcccgccgc

SEQ ID NO: 4709076 - DNA, 25 bp, Homo sapien
gcgaccactgtgcagatacacctgc

SEQ ID NO: 4709077 - DNA, 25 bp, Homo sapien
ctcagctgttttgtgcgggcatccc

SEQ ID NO: 4709078 - DNA, 25 bp, Homo sapien
catcccgtgaacacatggtctgctg

SEQ ID NO: 4709079 - DNA, 25 bp, Homo sapien
aacacatggtctgctgtggagcgac

SEQ ID NO: 4709080 - DNA, 25 bp, Homo sapien
tgggtccgcctgtccaagacctcta

SEQ ID NO: 4709081 - DNA, 25 bp, Homo sapien
ctatggattgagacatgttctgcac

SEQ ID NO: 4709082 - DNA, 25 bp, Homo sapien
tggccaggtgttgcttatgactctc

SEQ ID NO: 4709083 - DNA, 25 bp, Homo sapien
ttctccacgtactgcaagtctctct

SEQ ID NO: 4709084 - DNA, 25 bp, Homo sapien
tagctcactagcctgcctgaaacag

SEQ ID NO: 4709085 - DNA, 25 bp, Homo sapien
aatgaaataccgttgaagaactagc

SEQ ID NO: 4709086 - DNA, 25 bp, Homo sapien
gttgaagaactagctcactagcctg

SEQ ID NO: 4709087 - DNA, 25 bp, Homo sapien
ctagcctgcctgaaacagacagcca

SEQ ID NO: 4709088 - DNA, 25 bp, Homo sapien
cactgcagcattgaaaaaactcttt

SEQ ID NO: 4709089 - DNA, 25 bp, Homo sapien
tattcatgaaatgcagctacagtcg

SEQ ID NO: 4709090 - DNA, 25 bp, Homo sapien
tacagtcgcatgcaaaggaggatcc

SEQ ID NO: 4709091 - DNA, 25 bp, Homo sapien
cttaaggttacatgctttgagtcac

SEQ ID NO: 4709092 - DNA, 25 bp, Homo sapien
tgcatgcaagaactctcacaccctg

SEQ ID NO: 4709093 - DNA, 25 bp, Homo sapien
cgatgcatgcaagaactctcacacc

SEQ ID NO: 4709094 - DNA, 25 bp, Homo sapien
aggttaaaataagctggttcagtgc

SEQ ID NO: 4709095 - DNA, 25 bp, Homo sapien
ctggttcagtgcgatgcatgcaaga

SEQ ID NO: 4709096 - DNA, 25 bp, Homo sapien
gaagttcatcgtagtcataggcgcc

SEQ ID NO: 4709097 - DNA, 25 bp, Homo sapien
ccaacacaggtatcaaaggcctaag

SEQ ID NO: 4709098 - DNA, 25 bp, Homo sapien
tcttgcagctcgttaagcactgacg

SEQ ID NO: 4709099 - DNA, 25 bp, Homo sapien
tagtttttgcatgcatgcacggagc

SEQ ID NO: 4709100 - DNA, 25 bp, Homo sapien
gtctctcaaggtagacctgcccagg

SEQ ID NO: 4709101 - DNA, 25 bp, Homo sapien
gctctgaacaatgccctaggatggg

SEQ ID NO: 4709102 - DNA, 25 bp, Homo sapien
tctgagatgttattgccagccctat

SEQ ID NO: 4709103 - DNA, 25 bp, Homo sapien
tccctaagcctgtgcgtgtgccgga

SEQ ID NO: 4709104 - DNA, 25 bp, Homo sapien
gctgggaacttggacaaaccgatgt

SEQ ID NO: 4709105 - DNA, 25 bp, Homo sapien
cctgcaatccgggaagacttaagct

SEQ ID NO: 4709106 - DNA, 25 bp, Homo sapien
ctggaagaagtctgcaaagctggga

SEQ ID NO: 4709107 - DNA, 25 bp, Homo sapien
aaaccgatgtccaaaatgcagatga

SEQ ID NO: 4709108 - DNA, 25 bp, Homo sapien
ctcttccagaatgcacgagcctcgg

SEQ ID NO: 4709109 - DNA, 25 bp, Homo sapien
tgaagggccaaacgctcctgattct

SEQ ID NO: 4709110 - DNA, 25 bp, Homo sapien
agttcagaggccatccacgtgtggg

SEQ ID NO: 4709111 - DNA, 25 bp, Homo sapien
cacccggtgatttggactgaggctg

SEQ ID NO: 4709112 - DNA, 25 bp, Homo sapien
ccggttatcgccttcaggggcgaga

SEQ ID NO: 4709113 - DNA, 25 bp, Homo sapien
cgagccggaggtcttgacagtcacg

SEQ ID NO: 4709114 - DNA, 25 bp, Homo sapien
gacagtcacggggtcactgatgccc

SEQ ID NO: 4709115 - DNA, 25 bp, Homo sapien
tgtcatccaggatccgaacctcgag

SEQ ID NO: 4709116 - DNA, 25 bp, Homo sapien
gggtgtaaggtacagacaaagcagt

SEQ ID NO: 4709117 - DNA, 25 bp, Homo sapien
gtgtggcgttagatacagacagagc

SEQ ID NO: 4709118 - DNA, 25 bp, Homo sapien
tacagacagagcagtccagccctgg

SEQ ID NO: 4709119 - DNA, 25 bp, Homo sapien
aaggtacagacaaagcagtccagtc

SEQ ID NO: 4709120 - DNA, 25 bp, Homo sapien
aaaacgataacttgactagtgctcc

SEQ ID NO: 4709121 - DNA, 25 bp, Homo sapien
agcaaacagccggggcttccaggag

SEQ ID NO: 4709122 - DNA, 25 bp, Homo sapien
cctcgctgcgctgtgcaaagcaaac

SEQ ID NO: 4709123 - DNA, 25 bp, Homo sapien
tgcaaagcaaacagccggggcttcc

SEQ ID NO: 4709124 - DNA, 25 bp, Homo sapien
agatctggcactgccgtcccaaatg

SEQ ID NO: 4709125 - DNA, 25 bp, Homo sapien
tagagctggacgatgggcacagatc

SEQ ID NO: 4709126 - DNA, 25 bp, Homo sapien
aaatgcctctgatgcagcccccggg

SEQ ID NO: 4709127 - DNA, 25 bp, Homo sapien
aagtgggaagcggatgctatttaag

SEQ ID NO: 4709128 - DNA, 25 bp, Homo sapien
caagcaatctcgtccctgtgctggg

SEQ ID NO: 4709129 - DNA, 25 bp, Homo sapien
tttgaaggctcggcctgaagctgca

SEQ ID NO: 4709130 - DNA, 25 bp, Homo sapien
cctggccaggtaaggcttcgccggc

SEQ ID NO: 4709131 - DNA, 25 bp, Homo sapien
ctcttccgaaggatgcaacctggat

SEQ ID NO: 4709132 - DNA, 25 bp, Homo sapien
acaccagcatcaacttgctaaggat

SEQ ID NO: 4709133 - DNA, 25 bp, Homo sapien
gcatcaacttgctaaggatttttaa

SEQ ID NO: 4709134 - DNA, 25 bp, Homo sapien
catcaacttgctaaggatttttaaa

SEQ ID NO: 4709135 - DNA, 25 bp, Homo sapien
ccagcatcaacttgctaaggatttt

SEQ ID NO: 4709136 - DNA, 25 bp, Homo sapien
gtgctatcagagaaaggatggccca

SEQ ID NO: 4709137 - DNA, 25 bp, Homo sapien
gacacagctattgtgctatcagaga

SEQ ID NO: 4709138 - DNA, 25 bp, Homo sapien
tgtgctatcagagaaaggatggccc

SEQ ID NO: 4709139 - DNA, 25 bp, Homo sapien
ctgttccttgggcgggaagctgttc

SEQ ID NO: 4709140 - DNA, 25 bp, Homo sapien
tggaacaggcttgtgtggaaagctg

SEQ ID NO: 4709141 - DNA, 25 bp, Homo sapien
gcgggaagctgttccccgacttgga

SEQ ID NO: 4709142 - DNA, 25 bp, Homo sapien
gggtggaacaggcttgtgtggaaag

SEQ ID NO: 4709143 - DNA, 25 bp, Homo sapien
catgaggtcgatgtccgagtggcca

SEQ ID NO: 4709144 - DNA, 25 bp, Homo sapien
tatgcatagtggaccttggtacccc

SEQ ID NO: 4709145 - DNA, 25 bp, Homo sapien
tgttgtaaccggcatagtccaggct

SEQ ID NO: 4709146 - DNA, 25 bp, Homo sapien
gatagaaccgttgtagaccacctgc

SEQ ID NO: 4709147 - DNA, 25 bp, Homo sapien
gaaacacggaggtaatgccatccct

SEQ ID NO: 4709148 - DNA, 25 bp, Homo sapien
caatgggatgcgagttacactagcc

SEQ ID NO: 4709149 - DNA, 25 bp, Homo sapien
tacgcgagttcaaacaatgtgggca

SEQ ID NO: 4709150 - DNA, 25 bp, Homo sapien
ggcgagcccttcctatctgcggtta

SEQ ID NO: 4709151 - DNA, 25 bp, Homo sapien
tggctactacagacgtcagctttgt

SEQ ID NO: 4709152 - DNA, 25 bp, Homo sapien
cgtcagctttgtctgactgcgccat

SEQ ID NO: 4709153 - DNA, 25 bp, Homo sapien
ggactcggttccactggctactaca

SEQ ID NO: 4709154 - DNA, 25 bp, Homo sapien
ctcagacattcttggactcggttcc

SEQ ID NO: 4709155 - DNA, 25 bp, Homo sapien
caggctcggcagtcccaggtttgca

SEQ ID NO: 4709156 - DNA, 25 bp, Homo sapien
ccagcaggccggttgaaggcaggaa

SEQ ID NO: 4709157 - DNA, 25 bp, Homo sapien
tgggctgctgcgtaatctccccgtg

SEQ ID NO: 4709158 - DNA, 25 bp, Homo sapien
aggtttgcacccagagctgcggctc

SEQ ID NO: 4709159 - DNA, 25 bp, Homo sapien
actctcttggcgttaaactcgtgtg

SEQ ID NO: 4709160 - DNA, 25 bp, Homo sapien
tcttggcgttaaactcgtgtgtttc

SEQ ID NO: 4709161 - DNA, 25 bp, Homo sapien
cacagaaactctcttggcgttaaac

SEQ ID NO: 4709162 - DNA, 25 bp, Homo sapien
ctcagtgtccacagaaactctcttg

SEQ ID NO: 4709163 - DNA, 25 bp, Homo sapien
tgtctccattgagacctcacaatgg

SEQ ID NO: 4709164 - DNA, 25 bp, Homo sapien
gagcccatcagacagcggcagctgt

SEQ ID NO: 4709165 - DNA, 25 bp, Homo sapien
gacagcggcagctgtctccattgag

SEQ ID NO: 4709166 - DNA, 25 bp, Homo sapien
ccattgagacctcacaatggagcca

SEQ ID NO: 4709167 - DNA, 25 bp, Homo sapien
tgagcgagtccaaaggacctttgct

SEQ ID NO: 4709168 - DNA, 25 bp, Homo sapien
tgggacaggaccatgagcgagtcca

SEQ ID NO: 4709169 - DNA, 25 bp, Homo sapien
gctggccggaagtgtggctgggaca

SEQ ID NO: 4709170 - DNA, 25 bp, Homo sapien
agaggtgaacgtcagcaggccagta

SEQ ID NO: 4709171 - DNA, 25 bp, Homo sapien
cacgcttgtgtgatgatgagaagcc

SEQ ID NO: 4709172 - DNA, 25 bp, Homo sapien
caataccttgacgtccggtgctgcc

SEQ ID NO: 4709173 - DNA, 25 bp, Homo sapien
gattctccccatcatgatggtgcat

SEQ ID NO: 4709174 - DNA, 25 bp, Homo sapien
tgatggtgcatctcgttctcggcaa

SEQ ID NO: 4709175 - DNA, 25 bp, Homo sapien
ttggtggaggcggaaacatccgtat

SEQ ID NO: 4709176 - DNA, 25 bp, Homo sapien
ccttcctgggcttcaagtctttctg

SEQ ID NO: 4709177 - DNA, 25 bp, Homo sapien
tgtgaaatgacctggtgctctctgg

SEQ ID NO: 4709178 - DNA, 25 bp, Homo sapien
tatcatactccagccagtttgtgaa

SEQ ID NO: 4709179 - DNA, 25 bp, Homo sapien
agccctgcttgtgccacatctgggc

SEQ ID NO: 4709180 - DNA, 25 bp, Homo sapien
gagccctgcttgtgccacatctggg

SEQ ID NO: 4709181 - DNA, 25 bp, Homo sapien
cccccctgagccctgcttgtgccac

SEQ ID NO: 4709182 - DNA, 25 bp, Homo sapien
cctgagccctgcttgtgccacatct

SEQ ID NO: 4709183 - DNA, 25 bp, Homo sapien
tcctggaacagagacgacaccttgc

SEQ ID NO: 4709184 - DNA, 25 bp, Homo sapien
tcccggcggcaggaggatgaagact

SEQ ID NO: 4709185 - DNA, 25 bp, Homo sapien
cagagacgacaccttgcagaaagca

SEQ ID NO: 4709186 - DNA, 25 bp, Homo sapien
gatgaagacttgtgagagctggtta

SEQ ID NO: 4709187 - DNA, 25 bp, Homo sapien
cggcatgacaaaatctggaaccagt

SEQ ID NO: 4709188 - DNA, 25 bp, Homo sapien
catgacaaaatctggaaccagtggg

SEQ ID NO: 4709189 - DNA, 25 bp, Homo sapien
gtgggcaccttgatctcccgcagct

SEQ ID NO: 4709190 - DNA, 25 bp, Homo sapien
tgacaaaatctggaaccagtgggca

SEQ ID NO: 4709191 - DNA, 25 bp, Homo sapien
tttctgccggaataatgaagacagg

SEQ ID NO: 4709192 - DNA, 25 bp, Homo sapien
tgaagacaggtacatttttcagcca

SEQ ID NO: 4709193 - DNA, 25 bp, Homo sapien
gaagctgccgatgtgtcttgttccc

SEQ ID NO: 4709194 - DNA, 25 bp, Homo sapien
taattcgggccagcggtgaaagctt

SEQ ID NO: 4709195 - DNA, 25 bp, Homo sapien
ggcttgcttggtggttgaatcgtac

SEQ ID NO: 4709196 - DNA, 25 bp, Homo sapien
tgttgccatcaatgttcagcctcca

SEQ ID NO: 4709197 - DNA, 25 bp, Homo sapien
gacagacctaggaatagtactttgc

SEQ ID NO: 4709198 - DNA, 25 bp, Homo sapien
ccactggtgtaaatgcaagagctga

SEQ ID NO: 4709199 - DNA, 25 bp, Homo sapien
agcgcctcgccgctgaattcagtgt

SEQ ID NO: 4709200 - DNA, 25 bp, Homo sapien
gttcatttgagtccctagcgcctcg

SEQ ID NO: 4709201 - DNA, 25 bp, Homo sapien
gatgattcatctgcagctggctgca

SEQ ID NO: 4709202 - DNA, 25 bp, Homo sapien
ccatctccgaggtatccattgccag

SEQ ID NO: 4709203 - DNA, 25 bp, Homo sapien
cacagaccttctcggctgctggaga

SEQ ID NO: 4709204 - DNA, 25 bp, Homo sapien
tggtccgggactggttcatacagct

SEQ ID NO: 4709205 - DNA, 25 bp, Homo sapien
tggagagtcagctcaagcaggacct

SEQ ID NO: 4709206 - DNA, 25 bp, Homo sapien
aatttgcagatgtccagaggctgcc

SEQ ID NO: 4709207 - DNA, 25 bp, Homo sapien
ttaaattcccacttaggatggcgct

SEQ ID NO: 4709208 - DNA, 25 bp, Homo sapien
tggcccgccggtgatgaattgctcc

SEQ ID NO: 4709209 - DNA, 25 bp, Homo sapien
tctcatgatggatgacttagggagg

SEQ ID NO: 4709210 - DNA, 25 bp, Homo sapien
tggcgcttaaaaggcatttccgggc

SEQ ID NO: 4709211 - DNA, 25 bp, Homo sapien
tgtgaccgagaaagcaaagtaatta

SEQ ID NO: 4709212 - DNA, 25 bp, Homo sapien
tgaccgagaaagcaaagtaattatt

SEQ ID NO: 4709213 - DNA, 25 bp, Homo sapien
agtaattatttaagtgacggctcat

SEQ ID NO: 4709214 - DNA, 25 bp, Homo sapien
ctgtgaccgagaaagcaaagtaatt

SEQ ID NO: 4709215 - DNA, 25 bp, Homo sapien
cagaaggcgggctgggaaacaggac

SEQ ID NO: 4709216 - DNA, 25 bp, Homo sapien
gcctctacctccgatactgatgcta

SEQ ID NO: 4709217 - DNA, 25 bp, Homo sapien
tgaccacacggtcactggtgaggga

SEQ ID NO: 4709218 - DNA, 25 bp, Homo sapien
tactgatgctaaatgaccacacggt

SEQ ID NO: 4709219 - DNA, 25 bp, Homo sapien
aagggactgcgcatctcattggcca

SEQ ID NO: 4709220 - DNA, 25 bp, Homo sapien
tcacgcacatagaaactgctctggg

SEQ ID NO: 4709221 - DNA, 25 bp, Homo sapien
cagtgccaggcctgcgttcgtcctg

SEQ ID NO: 4709222 - DNA, 25 bp, Homo sapien
aagccgctgcaagtgctggcctcta

SEQ ID NO: 4709223 - DNA, 25 bp, Homo sapien
ctggaggcaggtgaagcaaacccca

SEQ ID NO: 4709224 - DNA, 25 bp, Homo sapien
ctgcgttacgctatggtgacctgaa

SEQ ID NO: 4709225 - DNA, 25 bp, Homo sapien
tctaaaatggaaacactggaagtgg

SEQ ID NO: 4709226 - DNA, 25 bp, Homo sapien
aagtgggtcccgaggtctcatccaa

SEQ ID NO: 4709227 - DNA, 25 bp, Homo sapien
tgggtcaccaagaccccaaaagctc

SEQ ID NO: 4709228 - DNA, 25 bp, Homo sapien
gaccgagtggctctgactgggtcac

SEQ ID NO: 4709229 - DNA, 25 bp, Homo sapien
gcagctgatcctgtgaccgagtggc

SEQ ID NO: 4709230 - DNA, 25 bp, Homo sapien
agaccccaaaagctcctacagcagg

SEQ ID NO: 4709231 - DNA, 25 bp, Homo sapien
agacttgttgccgaatactcccggg

SEQ ID NO: 4709232 - DNA, 25 bp, Homo sapien
aataaaagcctgctgcccaacgtgc

SEQ ID NO: 4709233 - DNA, 25 bp, Homo sapien
gaagctggttgaactccgtcacgtg

SEQ ID NO: 4709234 - DNA, 25 bp, Homo sapien
tctggactctggatcgggacaatca

SEQ ID NO: 4709235 - DNA, 25 bp, Homo sapien
ccacccaaagggctcgcgtgggttg

SEQ ID NO: 4709236 - DNA, 25 bp, Homo sapien
tgattgggctgccgagtctggggag

SEQ ID NO: 4709237 - DNA, 25 bp, Homo sapien
ggctcgcgtgggttggaggtggctg

SEQ ID NO: 4709238 - DNA, 25 bp, Homo sapien
gtggggtcagggcatctgattgggc

SEQ ID NO: 4709239 - DNA, 25 bp, Homo sapien
gctgatatgtatcaagggaacaaga

SEQ ID NO: 4709240 - DNA, 25 bp, Homo sapien
ttgggaagacacattccttgattta

SEQ ID NO: 4709241 - DNA, 25 bp, Homo sapien
gatacagggtgcctaataaaagcct

SEQ ID NO: 4709242 - DNA, 25 bp, Homo sapien
tttcttttgaaagcgatacagggtg

SEQ ID NO: 4709243 - DNA, 25 bp, Homo sapien
tctgctctcccgaggtttctgttca

SEQ ID NO: 4709244 - DNA, 25 bp, Homo sapien
tgttggtgtcagagatgacggaatt

SEQ ID NO: 4709245 - DNA, 25 bp, Homo sapien
tctcccgaggtttctgttcatcgct

SEQ ID NO: 4709246 - DNA, 25 bp, Homo sapien
tctctgcgaagaaaacggactgctg

SEQ ID NO: 4709247 - DNA, 25 bp, Homo sapien
ccttgaaccccgctctggcagttgt

SEQ ID NO: 4709248 - DNA, 25 bp, Homo sapien
gactggggccttgaaccccgctctg

SEQ ID NO: 4709249 - DNA, 25 bp, Homo sapien
tgaaccccgctctggcagttgtgtg

SEQ ID NO: 4709250 - DNA, 25 bp, Homo sapien
gggaataggtatgcagatgggtggg

SEQ ID NO: 4709251 - DNA, 25 bp, Homo sapien
tctcggcagctggtcttcctgacgc

SEQ ID NO: 4709252 - DNA, 25 bp, Homo sapien
gcctctgaggcacgggatgtttgtc

SEQ ID NO: 4709253 - DNA, 25 bp, Homo sapien
tgttgcctgcttaagtgagatgcac

SEQ ID NO: 4709254 - DNA, 25 bp, Homo sapien
ttcctgacgcacacggacggagcag

SEQ ID NO: 4709255 - DNA, 25 bp, Homo sapien
tgcttggcggatgcaatgagatgcc

SEQ ID NO: 4709256 - DNA, 25 bp, Homo sapien
gtgcttggcctcaccgactggctga

SEQ ID NO: 4709257 - DNA, 25 bp, Homo sapien
gccacaggtgttccggccgtgcttg

SEQ ID NO: 4709258 - DNA, 25 bp, Homo sapien
tcaccgactggctgagtgtgtgaga

SEQ ID NO: 4709259 - DNA, 25 bp, Homo sapien
gagtgagtgccaatgacatgatttc

SEQ ID NO: 4709260 - DNA, 25 bp, Homo sapien
ggagtgagtgccaatgacatgattt

SEQ ID NO: 4709261 - DNA, 25 bp, Homo sapien
tggagtgagtgccaatgacatgatt

SEQ ID NO: 4709262 - DNA, 25 bp, Homo sapien
agtgagtgccaatgacatgatttct

SEQ ID NO: 4709263 - DNA, 25 bp, Homo sapien
acatcaccattgcccacacattgct

SEQ ID NO: 4709264 - DNA, 25 bp, Homo sapien
ggttctccaagagtgagttgctctc

SEQ ID NO: 4709265 - DNA, 25 bp, Homo sapien
gggttctccaagagtgagttgctct

SEQ ID NO: 4709266 - DNA, 25 bp, Homo sapien
tccaagagtgggttgcccgcttgtg

SEQ ID NO: 4709267 - DNA, 25 bp, Homo sapien
gttctccaagagtgggttgcccgct

SEQ ID NO: 4709268 - DNA, 25 bp, Homo sapien
tgggttgcccgcttgtgaaccagag

SEQ ID NO: 4709269 - DNA, 25 bp, Homo sapien
caagagtgggttgcccgcttgtgaa

SEQ ID NO: 4709270 - DNA, 25 bp, Homo sapien
tgtcattctcgtcagcgagatcgat

SEQ ID NO: 4709271 - DNA, 25 bp, Homo sapien
cattctcgtcagcgagatcgatgcc

SEQ ID NO: 4709272 - DNA, 25 bp, Homo sapien
tcattctcgtcagcgagatcgatgc

SEQ ID NO: 4709273 - DNA, 25 bp, Homo sapien
ctgtcattctcgtcagcgagatcga

SEQ ID NO: 4709274 - DNA, 25 bp, Homo sapien
ttctaggctccttcccatgcacaga

SEQ ID NO: 4709275 - DNA, 25 bp, Homo sapien
ggcagtcagatgtccttgcaggaga

SEQ ID NO: 4709276 - DNA, 25 bp, Homo sapien
agagcctggagaaccactggcatcc

SEQ ID NO: 4709277 - DNA, 25 bp, Homo sapien
gagactggggagaggccacacttct

SEQ ID NO: 4709278 - DNA, 25 bp, Homo sapien
ctttggagctcctccgacagcatct

SEQ ID NO: 4709279 - DNA, 25 bp, Homo sapien
gagctctgagtcaaaagcaggaaca

SEQ ID NO: 4709280 - DNA, 25 bp, Homo sapien
tctgagtcaaaagcaggaacaccac

SEQ ID NO: 4709281 - DNA, 25 bp, Homo sapien
gcatctcacatccagcagagctctg

SEQ ID NO: 4709282 - DNA, 25 bp, Homo sapien
gtgtgggatgcatcggtggatgcct

SEQ ID NO: 4709283 - DNA, 25 bp, Homo sapien
tgtgtgggatgcatcggtggatgcc

SEQ ID NO: 4709284 - DNA, 25 bp, Homo sapien
tgggatgcatcggtggatgcctttt

SEQ ID NO: 4709285 - DNA, 25 bp, Homo sapien
tgtgggatgcatcggtggatgcctt

SEQ ID NO: 4709286 - DNA, 25 bp, Homo sapien
gtcaatgctgccgactctatttgtc

SEQ ID NO: 4709287 - DNA, 25 bp, Homo sapien
gagcaaaatggcctcagcacgttcg

SEQ ID NO: 4709288 - DNA, 25 bp, Homo sapien
gcacgttcgctgaccgccagtgact

SEQ ID NO: 4709289 - DNA, 25 bp, Homo sapien
gctgccgactctatttgtcaggagc

SEQ ID NO: 4709290 - DNA, 25 bp, Homo sapien
tctccgccaggatatgtgggcatgg

SEQ ID NO: 4709291 - DNA, 25 bp, Homo sapien
atatgtgggcatggcagtagaagcc

SEQ ID NO: 4709292 - DNA, 25 bp, Homo sapien
tcaacaaagcaacttcgaatctccg

SEQ ID NO: 4709293 - DNA, 25 bp, Homo sapien
gcaacttcgaatctccgccaggata

SEQ ID NO: 4709294 - DNA, 25 bp, Homo sapien
tctgggccagctgcggatttgctcc

SEQ ID NO: 4709295 - DNA, 25 bp, Homo sapien
attccatcagtagcccataagaagg

SEQ ID NO: 4709296 - DNA, 25 bp, Homo sapien
tcacagctcgtagaggctgagccag

SEQ ID NO: 4709297 - DNA, 25 bp, Homo sapien
tgccagcccgcgagagagctgtgct

SEQ ID NO: 4709298 - DNA, 25 bp, Homo sapien
caggagcttgtactcatcccactgt

SEQ ID NO: 4709299 - DNA, 25 bp, Homo sapien
caaatggagggaagtctgactcggg

SEQ ID NO: 4709300 - DNA, 25 bp, Homo sapien
tctagcgccttctgccatgctttgc

SEQ ID NO: 4709301 - DNA, 25 bp, Homo sapien
gctttgccacccaggagcttgtact

SEQ ID NO: 4709302 - DNA, 25 bp, Homo sapien
agggtggacgctgtgttgcccattc

SEQ ID NO: 4709303 - DNA, 25 bp, Homo sapien
tctttgcagagtgagaaagtgggct

SEQ ID NO: 4709304 - DNA, 25 bp, Homo sapien
tgacactcaggtgcggtgcccaggc

SEQ ID NO: 4709305 - DNA, 25 bp, Homo sapien
gcccattctctgacactcaggtgcg

SEQ ID NO: 4709306 - DNA, 25 bp, Homo sapien
gaactttgtattggaggatgacacc

SEQ ID NO: 4709307 - DNA, 25 bp, Homo sapien
ggtggccccatgagcgcttgatgct

SEQ ID NO: 4709308 - DNA, 25 bp, Homo sapien
ggatgacaccaaacagctgactggc

SEQ ID NO: 4709309 - DNA, 25 bp, Homo sapien
ttacttttggccacgctacctggtg

SEQ ID NO: 4709310 - DNA, 25 bp, Homo sapien
aggagagcatccaatcatctccacg

SEQ ID NO: 4709311 - DNA, 25 bp, Homo sapien
gagagagccatagaaggcgttaaag

SEQ ID NO: 4709312 - DNA, 25 bp, Homo sapien
cacgcagatgctgccccggagagag

SEQ ID NO: 4709313 - DNA, 25 bp, Homo sapien
agcagagattcagcgccgacttgtc

SEQ ID NO: 4709314 - DNA, 25 bp, Homo sapien
tctgggtcccgactgacgctggcgc

SEQ ID NO: 4709315 - DNA, 25 bp, Homo sapien
tggcgcagcttgagtcctccacact

SEQ ID NO: 4709316 - DNA, 25 bp, Homo sapien
ccgactgacgctggcgcagcttgag

SEQ ID NO: 4709317 - DNA, 25 bp, Homo sapien
gctgggatttcctctgggtcccgac

SEQ ID NO: 4709318 - DNA, 25 bp, Homo sapien
cacgctcgagcttcagagacgcttt

SEQ ID NO: 4709319 - DNA, 25 bp, Homo sapien
tggacatgacgctgtcccgaaggcg

SEQ ID NO: 4709320 - DNA, 25 bp, Homo sapien
ttcacactgccagaggcgcaagagc

SEQ ID NO: 4709321 - DNA, 25 bp, Homo sapien
ccgaaggcgcagaggcgacagcgcc

SEQ ID NO: 4709322 - DNA, 25 bp, Homo sapien
aaacgatcctggaattcagctccgt

SEQ ID NO: 4709323 - DNA, 25 bp, Homo sapien
cagctgctgccaagcttcggaaacg

SEQ ID NO: 4709324 - DNA, 25 bp, Homo sapien
caagcttcggaaacgatcctggaat

SEQ ID NO: 4709325 - DNA, 25 bp, Homo sapien
ctggaattcagctccgtcagggctt

SEQ ID NO: 4709326 - DNA, 25 bp, Homo sapien
tgaggtctgatgtgaatggcatgca

SEQ ID NO: 4709327 - DNA, 25 bp, Homo sapien
gcacgggagatgaggctccggctct

SEQ ID NO: 4709328 - DNA, 25 bp, Homo sapien
gaatggcatgcaagcctctggccag

SEQ ID NO: 4709329 - DNA, 25 bp, Homo sapien
ctgagtgttgactctgcgccgggca

SEQ ID NO: 4709330 - DNA, 25 bp, Homo sapien
tgatgttattgtcctggggacagac

SEQ ID NO: 4709331 - DNA, 25 bp, Homo sapien
tctgtccttggtggttggtgagggc

SEQ ID NO: 4709332 - DNA, 25 bp, Homo sapien
ctgatgttattgtcctggggacaga

SEQ ID NO: 4709333 - DNA, 25 bp, Homo sapien
atgttattgtcctggggacagactc

SEQ ID NO: 4709334 - DNA, 25 bp, Homo sapien
gagtgagtctgctggcaccgcccga

SEQ ID NO: 4709335 - DNA, 25 bp, Homo sapien
cacggaggaacctgagagtgagtct

SEQ ID NO: 4709336 - DNA, 25 bp, Homo sapien
gagtctgctggcaccgcccgaggct

SEQ ID NO: 4709337 - DNA, 25 bp, Homo sapien
accggctccacggaggaacctgaga

SEQ ID NO: 4709338 - DNA, 25 bp, Homo sapien
agggcctcacttgggagcacgcagt

SEQ ID NO: 4709339 - DNA, 25 bp, Homo sapien
gcctcacttgggagcacgcagtgtg

SEQ ID NO: 4709340 - DNA, 25 bp, Homo sapien
ggcctcacttgggagcacgcagtgt

SEQ ID NO: 4709341 - DNA, 25 bp, Homo sapien
gggcctcacttgggagcacgcagtg

SEQ ID NO: 4709342 - DNA, 25 bp, Homo sapien
tggccacacggaattcatgcagatg

SEQ ID NO: 4709343 - DNA, 25 bp, Homo sapien
agtccagcggaggagtcagtgcata

SEQ ID NO: 4709344 - DNA, 25 bp, Homo sapien
ggaatcttccagtaggatccggaca

SEQ ID NO: 4709345 - DNA, 25 bp, Homo sapien
ttcaagctgagggccggatcttgcc

SEQ ID NO: 4709346 - DNA, 25 bp, Homo sapien
tgggacgttcatggaacccacgcct

SEQ ID NO: 4709347 - DNA, 25 bp, Homo sapien
ggtgggacgttcatggaacccacgc

SEQ ID NO: 4709348 - DNA, 25 bp, Homo sapien
gggacgttcatggaacccacgcctg

SEQ ID NO: 4709349 - DNA, 25 bp, Homo sapien
gtgggacgttcatggaacccacgcc

SEQ ID NO: 4709350 - DNA, 25 bp, Homo sapien
gagtggccctcttgccatttgcttg

SEQ ID NO: 4709351 - DNA, 25 bp, Homo sapien
catttgcttggatcccacggatggc

SEQ ID NO: 4709352 - DNA, 25 bp, Homo sapien
agggctgactgtcccggctttgtcc

SEQ ID NO: 4709353 - DNA, 25 bp, Homo sapien
cccagggaagcagcgagggctgact

SEQ ID NO: 4709354 - DNA, 25 bp, Homo sapien
cgaacacattctcccagtcgttgtt

SEQ ID NO: 4709355 - DNA, 25 bp, Homo sapien
agtcacggggcacccgaacacattc

SEQ ID NO: 4709356 - DNA, 25 bp, Homo sapien
ggtgacagtcacggggcacccgaac

SEQ ID NO: 4709357 - DNA, 25 bp, Homo sapien
gggcacccgaacacattctcccagt

SEQ ID NO: 4709358 - DNA, 25 bp, Homo sapien
cgggagttggaggactgggatctgt

SEQ ID NO: 4709359 - DNA, 25 bp, Homo sapien
tgagaagaatgtgttccttcctgct

SEQ ID NO: 4709360 - DNA, 25 bp, Homo sapien
ggcagcctgggcttgattccatctt

SEQ ID NO: 4709361 - DNA, 25 bp, Homo sapien
tgggatctgtcccatcccgtggcct

SEQ ID NO: 4709362 - DNA, 25 bp, Homo sapien
ctgggccagcccttccagttagggc

SEQ ID NO: 4709363 - DNA, 25 bp, Homo sapien
ggccctgcggcttgcctctggagaa

SEQ ID NO: 4709364 - DNA, 25 bp, Homo sapien
agggaggagttgtctgtgagactcc

SEQ ID NO: 4709365 - DNA, 25 bp, Homo sapien
gggccttcgtttccctctgcagact

SEQ ID NO: 4709366 - DNA, 25 bp, Homo sapien
ccagtttggtgaagttggatggaag

SEQ ID NO: 4709367 - DNA, 25 bp, Homo sapien
tagatttcggcgaatcaatgcctac

SEQ ID NO: 4709368 - DNA, 25 bp, Homo sapien
gctgggaaaaccacggtgcggtctc

SEQ ID NO: 4709369 - DNA, 25 bp, Homo sapien
ctgtggcatagatttcggcgaatca

SEQ ID NO: 4709370 - DNA, 25 bp, Homo sapien
atggctccctgaggaggtggcagac

SEQ ID NO: 4709371 - DNA, 25 bp, Homo sapien
gccccatggctccctgaggaggtgg

SEQ ID NO: 4709372 - DNA, 25 bp, Homo sapien
ggctccctgaggaggtggcagacac

SEQ ID NO: 4709373 - DNA, 25 bp, Homo sapien
cccatggctccctgaggaggtggca

SEQ ID NO: 4709374 - DNA, 25 bp, Homo sapien
gagcagagccgtcccacaggcagag

SEQ ID NO: 4709375 - DNA, 25 bp, Homo sapien
gggcagagccattccacgagcagag

SEQ ID NO: 4709376 - DNA, 25 bp, Homo sapien
agagctgctcaaggctgtccaccca

SEQ ID NO: 4709377 - DNA, 25 bp, Homo sapien
catgaccacgaatcgctgggcacag

SEQ ID NO: 4709378 - DNA, 25 bp, Homo sapien
tccttgcagttgggtctctggttgg

SEQ ID NO: 4709379 - DNA, 25 bp, Homo sapien
cttgcacaaggctggctggtaccca

SEQ ID NO: 4709380 - DNA, 25 bp, Homo sapien
ggtacccatgctgcacgagtgaggc

SEQ ID NO: 4709381 - DNA, 25 bp, Homo sapien
ggctggtacccatgctgcacgagtg

SEQ ID NO: 4709382 - DNA, 25 bp, Homo sapien
gaatgtggccttattctgccggtgt

SEQ ID NO: 4709383 - DNA, 25 bp, Homo sapien
gcgggccgccatgaatgtggcctta

SEQ ID NO: 4709384 - DNA, 25 bp, Homo sapien
tggccttattctgccggtgttcact

SEQ ID NO: 4709385 - DNA, 25 bp, Homo sapien
tattctgccggtgttcactgagtgc

SEQ ID NO: 4709386 - DNA, 25 bp, Homo sapien
cacccctgaagtctctgcgctctat

SEQ ID NO: 4709387 - DNA, 25 bp, Homo sapien
ccacccctgaagtctctgcgctcta

SEQ ID NO: 4709388 - DNA, 25 bp, Homo sapien
tgcttcttgttggcctgtggtctgt

SEQ ID NO: 4709389 - DNA, 25 bp, Homo sapien
gaatgtgtgggagagctcccagcca

SEQ ID NO: 4709390 - DNA, 25 bp, Homo sapien
ggctcagagcggaatgtgtgggaga

SEQ ID NO: 4709391 - DNA, 25 bp, Homo sapien
gtcctcacctcggtgaggctcagag

SEQ ID NO: 4709392 - DNA, 25 bp, Homo sapien
taattggggttgtgtccaacagcct

SEQ ID NO: 4709393 - DNA, 25 bp, Homo sapien
agcttgggtgtctttgcgaacctgt

SEQ ID NO: 4709394 - DNA, 25 bp, Homo sapien
gtgtctttgcgaacctgtcagtaat

SEQ ID NO: 4709395 - DNA, 25 bp, Homo sapien
ccttgaaggtcacctcgagagccaa

SEQ ID NO: 4709396 - DNA, 25 bp, Homo sapien
agacgcaagctgagaggcgaagcca

SEQ ID NO: 4709397 - DNA, 25 bp, Homo sapien
tctgagcccaggctgtcgtcccggg

SEQ ID NO: 4709398 - DNA, 25 bp, Homo sapien
gaagccacaagcctgactctgagcc

SEQ ID NO: 4709399 - DNA, 25 bp, Homo sapien
aagctgagaggcgaagccacaagcc

SEQ ID NO: 4709400 - DNA, 25 bp, Homo sapien
tccagcagcggccacaggaaggaca

SEQ ID NO: 4709401 - DNA, 25 bp, Homo sapien
ctgtgttgtggtcacgcacctccag

SEQ ID NO: 4709402 - DNA, 25 bp, Homo sapien
tgtggtcacgcacctccagcagcgg

SEQ ID NO: 4709403 - DNA, 25 bp, Homo sapien
gtgttgtggtcacgcacctccagca

SEQ ID NO: 4709404 - DNA, 25 bp, Homo sapien
tgctgtccgctagatggcgctgcgt

SEQ ID NO: 4709405 - DNA, 25 bp, Homo sapien
tatgccggaaagatgcaggtgttgc

SEQ ID NO: 4709406 - DNA, 25 bp, Homo sapien
tggcggctcccttaaactttcagcg

SEQ ID NO: 4709407 - DNA, 25 bp, Homo sapien
tcggtggctccaaagaacacaggct

SEQ ID NO: 4709408 - DNA, 25 bp, Homo sapien
ggatcccagggtctctctagacatt

SEQ ID NO: 4709409 - DNA, 25 bp, Homo sapien
catcatccgtccagcactggatccc

SEQ ID NO: 4709410 - DNA, 25 bp, Homo sapien
agcactggatcccagggtctctcta

SEQ ID NO: 4709411 - DNA, 25 bp, Homo sapien
ctgcatcatccgtccagcactggat

SEQ ID NO: 4709412 - DNA, 25 bp, Homo sapien
gggtgaagatgtcttgtctagaggc

SEQ ID NO: 4709413 - DNA, 25 bp, Homo sapien
ggggtgaagatgtcttgtctagagg

SEQ ID NO: 4709414 - DNA, 25 bp, Homo sapien
cagatgcgggccttgtttgccctcc

SEQ ID NO: 4709415 - DNA, 25 bp, Homo sapien
ggtagagacagacggcctgtgccct

SEQ ID NO: 4709416 - DNA, 25 bp, Homo sapien
gcagcacgacgctgcaggctctagg

SEQ ID NO: 4709417 - DNA, 25 bp, Homo sapien
caagcccgctgctgtactccagatg

SEQ ID NO: 4709418 - DNA, 25 bp, Homo sapien
tgtgcagaccctctagcctgagaag

SEQ ID NO: 4709419 - DNA, 25 bp, Homo sapien
tacaggcatacgcacacatgtgcag

SEQ ID NO: 4709420 - DNA, 25 bp, Homo sapien
gcagacgcagcatagaagccctgat

SEQ ID NO: 4709421 - DNA, 25 bp, Homo sapien
caagtgacacacaatagcctctctg

SEQ ID NO: 4709422 - DNA, 25 bp, Homo sapien
ccctgcagagtgaaggatagcccgg

SEQ ID NO: 4709423 - DNA, 25 bp, Homo sapien
atagcccgggtttgggaaccatgtg

SEQ ID NO: 4709424 - DNA, 25 bp, Homo sapien
agcttcgtgcacagaccatgacagg

SEQ ID NO: 4709425 - DNA, 25 bp, Homo sapien
cctgtgatctgctccgggttgggtt

SEQ ID NO: 4709426 - DNA, 25 bp, Homo sapien
gagggggagcgaaggtgcgagttcc

SEQ ID NO: 4709427 - DNA, 25 bp, Homo sapien
agaaacctgaaagtgttggctggca

SEQ ID NO: 4709428 - DNA, 25 bp, Homo sapien
ggcgcggagcgggtagagagggagg

SEQ ID NO: 4709429 - DNA, 25 bp, Homo sapien
aagtggagaaggagcaggcgcggag

SEQ ID NO: 4709430 - DNA, 25 bp, Homo sapien
agtgcagctcggaacagagccagca

SEQ ID NO: 4709431 - DNA, 25 bp, Homo sapien
ccacggatgcccaaagtgcagctcg

SEQ ID NO: 4709432 - DNA, 25 bp, Homo sapien
ttgaagccaccccacaaggagcaag

SEQ ID NO: 4709433 - DNA, 25 bp, Homo sapien
gctcgactccatgcatgctgtttga

SEQ ID NO: 4709434 - DNA, 25 bp, Homo sapien
tagtcctcagacatgttaatatgag

SEQ ID NO: 4709435 - DNA, 25 bp, Homo sapien
ggcagcgtcgacctcagggaagctt

SEQ ID NO: 4709436 - DNA, 25 bp, Homo sapien
caatcagtgaaaggcgtgttctaga

SEQ ID NO: 4709437 - DNA, 25 bp, Homo sapien
ttctagaataccagccttagtcctc

SEQ ID NO: 4709438 - DNA, 25 bp, Homo sapien
tgtagtgaatcagagactcgatcgg

SEQ ID NO: 4709439 - DNA, 25 bp, Homo sapien
gtggaacaacttgctagattgagtc

SEQ ID NO: 4709440 - DNA, 25 bp, Homo sapien
gactcgatcggaatctgtggcgttg

SEQ ID NO: 4709441 - DNA, 25 bp, Homo sapien
tttgttggcaaatccttgggctgta

SEQ ID NO: 4709442 - DNA, 25 bp, Homo sapien
ttagctgcagctgccttcgtctctg

SEQ ID NO: 4709443 - DNA, 25 bp, Homo sapien
tctctgcacatgcctttagctgcag

SEQ ID NO: 4709444 - DNA, 25 bp, Homo sapien
gcctttagctgcagctgccttcgtc

SEQ ID NO: 4709445 - DNA, 25 bp, Homo sapien
tgcacatgcctttagctgcagctgc

SEQ ID NO: 4709446 - DNA, 25 bp, Homo sapien
cttcagttagctctggagcctcgtt

SEQ ID NO: 4709447 - DNA, 25 bp, Homo sapien
agaagacgccgacattttgctggat

SEQ ID NO: 4709448 - DNA, 25 bp, Homo sapien
ccgaagaagacgccgacattttgct

SEQ ID NO: 4709449 - DNA, 25 bp, Homo sapien
agttagctctggagcctcgttctca

SEQ ID NO: 4709450 - DNA, 25 bp, Homo sapien
aagcttgggtgcaattaatatttca

SEQ ID NO: 4709451 - DNA, 25 bp, Homo sapien
aggccgtgagcagtctgcagctctc

SEQ ID NO: 4709452 - DNA, 25 bp, Homo sapien
gcctggcctccaaagaatgcccgga

SEQ ID NO: 4709453 - DNA, 25 bp, Homo sapien
cctccaaagaatgcccggatggtta

SEQ ID NO: 4709454 - DNA, 25 bp, Homo sapien
gccgggcaggccgtgagcagtctgc

SEQ ID NO: 4709455 - DNA, 25 bp, Homo sapien
ggcgtcaggcgtgtcctcgtctgta

SEQ ID NO: 4709456 - DNA, 25 bp, Homo sapien
tgcgttagggatgatggagggtgcc

SEQ ID NO: 4709457 - DNA, 25 bp, Homo sapien
ccgtgcagacggcatcacagctggg

SEQ ID NO: 4709458 - DNA, 25 bp, Homo sapien
cctcttttaggtcagtatgttctcc

SEQ ID NO: 4709459 - DNA, 25 bp, Homo sapien
tgcggaaccgacaccagatgtggcc

SEQ ID NO: 4709460 - DNA, 25 bp, Homo sapien
agatgtggccccgcatggcaccggc

SEQ ID NO: 4709461 - DNA, 25 bp, Homo sapien
cctgggaggctgcggaaccgacacc

SEQ ID NO: 4709462 - DNA, 25 bp, Homo sapien
ggaggctgcggaaccgacaccagat

SEQ ID NO: 4709463 - DNA, 25 bp, Homo sapien
gactgatctgtccatccatgtcctg

SEQ ID NO: 4709464 - DNA, 25 bp, Homo sapien
tcgcagacacctgagcgatgagcct

SEQ ID NO: 4709465 - DNA, 25 bp, Homo sapien
gacacctgagcgatgagccttctgg

SEQ ID NO: 4709466 - DNA, 25 bp, Homo sapien
ccctgagccaccaaggtgtgatgct

SEQ ID NO: 4709467 - DNA, 25 bp, Homo sapien
gatacctcgggcatcagatggcctt

SEQ ID NO: 4709468 - DNA, 25 bp, Homo sapien
ggtgtggccagatacctcgggcatc

SEQ ID NO: 4709469 - DNA, 25 bp, Homo sapien
tctgctgggcaccacggtaaggggg

SEQ ID NO: 4709470 - DNA, 25 bp, Homo sapien
ggccagatacctcgggcatcagatg

SEQ ID NO: 4709471 - DNA, 25 bp, Homo sapien
gcggcggcctgggcagcagggggag

SEQ ID NO: 4709472 - DNA, 25 bp, Homo sapien
tgtggcggcggcctgggcagcaggg

SEQ ID NO: 4709473 - DNA, 25 bp, Homo sapien
tggcggcggcctgggcagcaggggg

SEQ ID NO: 4709474 - DNA, 25 bp, Homo sapien
ctgtggcggcggcctgggcagcagg

SEQ ID NO: 4709475 - DNA, 25 bp, Homo sapien
aagaagggcggctgctgacgctgac

SEQ ID NO: 4709476 - DNA, 25 bp, Homo sapien
aaagggcccggcaatcttgtctgga

SEQ ID NO: 4709477 - DNA, 25 bp, Homo sapien
ttcaggctttgtaaagggcccggca

SEQ ID NO: 4709478 - DNA, 25 bp, Homo sapien
cttgtctggatggtaatttgcagtg

SEQ ID NO: 4709479 - DNA, 25 bp, Homo sapien
tgggaataataccaccgtggccctc

SEQ ID NO: 4709480 - DNA, 25 bp, Homo sapien
atgggaataataccaccgtggccct

SEQ ID NO: 4709481 - DNA, 25 bp, Homo sapien
gatgggacagactttccagacacca

SEQ ID NO: 4709482 - DNA, 25 bp, Homo sapien
cacgtctctcaagcgccggacggga

SEQ ID NO: 4709483 - DNA, 25 bp, Homo sapien
ctgggatgggacagactttccagac

SEQ ID NO: 4709484 - DNA, 25 bp, Homo sapien
gggacagactttccagacaccacgt

SEQ ID NO: 4709485 - DNA, 25 bp, Homo sapien
caccggggtcaaccacagcagcctc

SEQ ID NO: 4709486 - DNA, 25 bp, Homo sapien
tgtggggctccaccggggtcaacca

SEQ ID NO: 4709487 - DNA, 25 bp, Homo sapien
acccaggatgcagactcgcctgcag

SEQ ID NO: 4709488 - DNA, 25 bp, Homo sapien
gggcctcacccatgggacccaggat

SEQ ID NO: 4709489 - DNA, 25 bp, Homo sapien
agctcagccgagtcatggggagacg

SEQ ID NO: 4709490 - DNA, 25 bp, Homo sapien
ctcgctcagcactacagcatcccac

SEQ ID NO: 4709491 - DNA, 25 bp, Homo sapien
agcactacagcatcccaccctccca

SEQ ID NO: 4709492 - DNA, 25 bp, Homo sapien
tcagccgagtcatggggagacgtgg

SEQ ID NO: 4709493 - DNA, 25 bp, Homo sapien
ggcagggcaccatcattccctgcgt

SEQ ID NO: 4709494 - DNA, 25 bp, Homo sapien
ccccgtcatgaaggcaggcatggga

SEQ ID NO: 4709495 - DNA, 25 bp, Homo sapien
cgccggcccccgtgtaatgggactg

SEQ ID NO: 4709496 - DNA, 25 bp, Homo sapien
catgtaaaaggctctagtggaagcg

SEQ ID NO: 4709497 - DNA, 25 bp, Homo sapien
tcgcatatggcccattggagcttac

SEQ ID NO: 4709498 - DNA, 25 bp, Homo sapien
tgctcccatcgcatatggcccattg

SEQ ID NO: 4709499 - DNA, 25 bp, Homo sapien
catatggcccattggagcttaccac

SEQ ID NO: 4709500 - DNA, 25 bp, Homo sapien
tcccatcgcatatggcccattggag

SEQ ID NO: 4709501 - DNA, 25 bp, Homo sapien
ctactctttagacccctgaggcacc

SEQ ID NO: 4709502 - DNA, 25 bp, Homo sapien
cacgctgggtgtggccgcctctggc

SEQ ID NO: 4709503 - DNA, 25 bp, Homo sapien
agctgcacaatccatggagcacgct

SEQ ID NO: 4709504 - DNA, 25 bp, Homo sapien
ctgcacaatccatggagcacgctgg

SEQ ID NO: 4709505 - DNA, 25 bp, Homo sapien
gcacaatccatggagcacgctgggt

SEQ ID NO: 4709506 - DNA, 25 bp, Homo sapien
tagataaagaccaggatttctttga

SEQ ID NO: 4709507 - DNA, 25 bp, Homo sapien
ggtagactcaggttgcataaagaag

SEQ ID NO: 4709508 - DNA, 25 bp, Homo sapien
tggactgtaggtctttgaactggac

SEQ ID NO: 4709509 - DNA, 25 bp, Homo sapien
ctttgatgagtgcatttcggcggtt

SEQ ID NO: 4709510 - DNA, 25 bp, Homo sapien
tcagcaactccaagagctaaccttg

SEQ ID NO: 4709511 - DNA, 25 bp, Homo sapien
gattctcttctgagtcacagtcagc

SEQ ID NO: 4709512 - DNA, 25 bp, Homo sapien
caagagctaaccttggccccagttt

SEQ ID NO: 4709513 - DNA, 25 bp, Homo sapien
aacacagggcgcttggattctcttc

SEQ ID NO: 4709514 - DNA, 25 bp, Homo sapien
cagggtgtgtgcccgaggctggcgg

SEQ ID NO: 4709515 - DNA, 25 bp, Homo sapien
tgaccatgtgaccttgaaagtcttc

SEQ ID NO: 4709516 - DNA, 25 bp, Homo sapien
ccagggtgtgtgcccgaggctggcg

SEQ ID NO: 4709517 - DNA, 25 bp, Homo sapien
ggagggaacagtttctaggaactgc

SEQ ID NO: 4709518 - DNA, 25 bp, Homo sapien
gagggaacagtttctaggaactgcc

SEQ ID NO: 4709519 - DNA, 25 bp, Homo sapien
actccggaagccgtgcccgtggctg

SEQ ID NO: 4709520 - DNA, 25 bp, Homo sapien
cgcactccggaagccgtgcccgtgg

SEQ ID NO: 4709521 - DNA, 25 bp, Homo sapien
ggccgcactccggaagccgtgcccg

SEQ ID NO: 4709522 - DNA, 25 bp, Homo sapien
ggcggccgcactccggaagccgtgc

SEQ ID NO: 4709523 - DNA, 25 bp, Homo sapien
ctgcgcccgcgtcccacgtcccggg

SEQ ID NO: 4709524 - DNA, 25 bp, Homo sapien
cctgcgcccgcgtcccacgtcccgg

SEQ ID NO: 4709525 - DNA, 25 bp, Homo sapien
tgcagggccagcgcgctccgccctc

SEQ ID NO: 4709526 - DNA, 25 bp, Homo sapien
taatgtatagctatcctggacagca

SEQ ID NO: 4709527 - DNA, 25 bp, Homo sapien
caacaatgcgagaggagctctttca

SEQ ID NO: 4709528 - DNA, 25 bp, Homo sapien
agaaaaccggcccaagtcagtgtct

SEQ ID NO: 4709529 - DNA, 25 bp, Homo sapien
gcagatctgatgctggctgaagtga

SEQ ID NO: 4709530 - DNA, 25 bp, Homo sapien
acttacacaccgaggcattctctct

SEQ ID NO: 4709531 - DNA, 25 bp, Homo sapien
tacacaccgaggcattctctctctg

SEQ ID NO: 4709532 - DNA, 25 bp, Homo sapien
agtgttcccacacggcccagagatc

SEQ ID NO: 4709533 - DNA, 25 bp, Homo sapien
actccacttacacaccgaggcattc

SEQ ID NO: 4709534 - DNA, 25 bp, Homo sapien
tatggacactgaactccccttggct

SEQ ID NO: 4709535 - DNA, 25 bp, Homo sapien
aattgcagtgcaaagcggttcttgt

SEQ ID NO: 4709536 - DNA, 25 bp, Homo sapien
aaactggccagtatgttttgcctct

SEQ ID NO: 4709537 - DNA, 25 bp, Homo sapien
tcagcagtgggcgaaaactggccag

SEQ ID NO: 4709538 - DNA, 25 bp, Homo sapien
gatcagcacgccgtcatgcgtaggt

SEQ ID NO: 4709539 - DNA, 25 bp, Homo sapien
aaaaggatgactagaaacccaggat

SEQ ID NO: 4709540 - DNA, 25 bp, Homo sapien
gcggtacccatgagacaacgtctgc

SEQ ID NO: 4709541 - DNA, 25 bp, Homo sapien
tccaaagttggcaagcggtacccat

SEQ ID NO: 4709542 - DNA, 25 bp, Homo sapien
gcagctacaaacagcgatagctgcc

SEQ ID NO: 4709543 - DNA, 25 bp, Homo sapien
tgcagctacaaacagcgatagctgc

SEQ ID NO: 4709544 - DNA, 25 bp, Homo sapien
gggcgatgctttatttctctaccgg

SEQ ID NO: 4709545 - DNA, 25 bp, Homo sapien
cgatgctttatttctctaccggctt

SEQ ID NO: 4709546 - DNA, 25 bp, Homo sapien
atgctttatttctctaccggcttca

SEQ ID NO: 4709547 - DNA, 25 bp, Homo sapien
ggcgatgctttatttctctaccggc

SEQ ID NO: 4709548 - DNA, 25 bp, Homo sapien
cgcgctgcagagtgctgataagcat

SEQ ID NO: 4709549 - DNA, 25 bp, Homo sapien
caacgcgggtggctccttgtgcacg

SEQ ID NO: 4709550 - DNA, 25 bp, Homo sapien
gagcagccccgtcgcgctgcagagt

SEQ ID NO: 4709551 - DNA, 25 bp, Homo sapien
ccacagacagccaacgcgggtggct

SEQ ID NO: 4709552 - DNA, 25 bp, Homo sapien
agcgctggcgctccttttgatccca

SEQ ID NO: 4709553 - DNA, 25 bp, Homo sapien
ttgccggcttcgtgctgccctcgtt

SEQ ID NO: 4709554 - DNA, 25 bp, Homo sapien
tgatcccacctttattctgtgctgc

SEQ ID NO: 4709555 - DNA, 25 bp, Homo sapien
tggacgttcatcttcgctaaccggg

SEQ ID NO: 4709556 - DNA, 25 bp, Homo sapien
gactgcgcctttagggccaaaaatg

SEQ ID NO: 4709557 - DNA, 25 bp, Homo sapien
caaaaatgtccggatttcctgctcg

SEQ ID NO: 4709558 - DNA, 25 bp, Homo sapien
tcggacgcctgtgccgcactcatga

SEQ ID NO: 4709559 - DNA, 25 bp, Homo sapien
agctcagcagatgtgtccgcccggc

SEQ ID NO: 4709560 - DNA, 25 bp, Homo sapien
agagagaggggtcttgtggccgccg

SEQ ID NO: 4709561 - DNA, 25 bp, Homo sapien
tctggctgttgaggccaggcggcaa

SEQ ID NO: 4709562 - DNA, 25 bp, Homo sapien
tcttgtggccgccggtctggctgtt

SEQ ID NO: 4709563 - DNA, 25 bp, Homo sapien
gaggccaggcggcaaaagtggaccc

SEQ ID NO: 4709564 - DNA, 25 bp, Homo sapien
tacgcttccttttgcagcccagcag

SEQ ID NO: 4709565 - DNA, 25 bp, Homo sapien
cgcttccttttgcagcccagcagtg

SEQ ID NO: 4709566 - DNA, 25 bp, Homo sapien
ctctacgcttccttttgcagcccag

SEQ ID NO: 4709567 - DNA, 25 bp, Homo sapien
cttccttttgcagcccagcagtggg

SEQ ID NO: 4709568 - DNA, 25 bp, Homo sapien
aggtctcgcctctcatggccgggct

SEQ ID NO: 4709569 - DNA, 25 bp, Homo sapien
ctcgcctctcatggccgggctcagc

SEQ ID NO: 4709570 - DNA, 25 bp, Homo sapien
gacatgcgagtgtcgccagggcccc

SEQ ID NO: 4709571 - DNA, 25 bp, Homo sapien
cctgtgacatgcgagtgtcgccagg

SEQ ID NO: 4709572 - DNA, 25 bp, Homo sapien
tctctttctcgtctaggcgccttgc

SEQ ID NO: 4709573 - DNA, 25 bp, Homo sapien
gagctctctttctcgtctaggcgcc

SEQ ID NO: 4709574 - DNA, 25 bp, Homo sapien
agagctctctttctcgtctaggcgc

SEQ ID NO: 4709575 - DNA, 25 bp, Homo sapien
gctctctttctcgtctaggcgcctt

SEQ ID NO: 4709576 - DNA, 25 bp, Homo sapien
cttcttcctgcacgcagccctgggc

SEQ ID NO: 4709577 - DNA, 25 bp, Homo sapien
tgcacgcagccctgggctccctgca

SEQ ID NO: 4709578 - DNA, 25 bp, Homo sapien
cttcctgcacgcagccctgggctcc

SEQ ID NO: 4709579 - DNA, 25 bp, Homo sapien
gcacgcagccctgggctccctgcac

SEQ ID NO: 4709580 - DNA, 25 bp, Homo sapien
actggcgggcccctgtctttccagt

SEQ ID NO: 4709581 - DNA, 25 bp, Homo sapien
tcagcactggcgggcccctgtcttt

SEQ ID NO: 4709582 - DNA, 25 bp, Homo sapien
cagggccgcgtcctggctcgcggca

SEQ ID NO: 4709583 - DNA, 25 bp, Homo sapien
gctcttcagcactggcgggcccctg

SEQ ID NO: 4709584 - DNA, 25 bp, Homo sapien
tgggactccctggggaatggattcc

SEQ ID NO: 4709585 - DNA, 25 bp, Homo sapien
cctggggaatggattcccttcggag

SEQ ID NO: 4709586 - DNA, 25 bp, Homo sapien
gaatggattcccttcggaggcagag

SEQ ID NO: 4709587 - DNA, 25 bp, Homo sapien
ctgtcatcagacagggagccggggc

SEQ ID NO: 4709588 - DNA, 25 bp, Homo sapien
aagcccttcggccagatgtgggacc

SEQ ID NO: 4709589 - DNA, 25 bp, Homo sapien
tgtgaaaggttcctctggcgcctcc

SEQ ID NO: 4709590 - DNA, 25 bp, Homo sapien
actctggtgggcgaagtcgctccag

SEQ ID NO: 4709591 - DNA, 25 bp, Homo sapien
tggctgaacagaccagctgtgccct

SEQ ID NO: 4709592 - DNA, 25 bp, Homo sapien
tctctctcgctcccgacgccccccc

SEQ ID NO: 4709593 - DNA, 25 bp, Homo sapien
ctctctcgctcccgacgccccccct

SEQ ID NO: 4709594 - DNA, 25 bp, Homo sapien
gtctctctcgctcccgacgcccccc

SEQ ID NO: 4709595 - DNA, 25 bp, Homo sapien
gagacaccctttccaaagtggaaga

SEQ ID NO: 4709596 - DNA, 25 bp, Homo sapien
tgggggctgaagaggccagcctgcc

SEQ ID NO: 4709597 - DNA, 25 bp, Homo sapien
cccaggagacaccctttccaaagtg

SEQ ID NO: 4709598 - DNA, 25 bp, Homo sapien
ggtgggggctgaagaggccagcctg

SEQ ID NO: 4709599 - DNA, 25 bp, Homo sapien
ccactgtcctccgtggaggtgtcgc

SEQ ID NO: 4709600 - DNA, 25 bp, Homo sapien
gagctcctcctgtcatgcaaactca

SEQ ID NO: 4709601 - DNA, 25 bp, Homo sapien
catccctgttgacccttcgtcgata

SEQ ID NO: 4709602 - DNA, 25 bp, Homo sapien
tggcgtcactgcccaaggcgtcctg

SEQ ID NO: 4709603 - DNA, 25 bp, Homo sapien
tgggagcttcccaacggacatcttg

SEQ ID NO: 4709604 - DNA, 25 bp, Homo sapien
aagattggacatgaacccacccagg

SEQ ID NO: 4709605 - DNA, 25 bp, Homo sapien
tttgacatgcaacagggagtagcca

SEQ ID NO: 4709606 - DNA, 25 bp, Homo sapien
gaacctggctgtgatggtaagaacc

SEQ ID NO: 4709607 - DNA, 25 bp, Homo sapien
tagagccgcagattcagtcctaacc

SEQ ID NO: 4709608 - DNA, 25 bp, Homo sapien
tggcatctcgcagtgttctaagggc

SEQ ID NO: 4709609 - DNA, 25 bp, Homo sapien
aatacctctgaattgtgagcctgcc

SEQ ID NO: 4709610 - DNA, 25 bp, Homo sapien
gatctaacggaacgctcaacgggtg

SEQ ID NO: 4709611 - DNA, 25 bp, Homo sapien
cttatcaatcaggtttctcaacaca

SEQ ID NO: 4709612 - DNA, 25 bp, Homo sapien
taccagtaacccctctgtgtttagc

SEQ ID NO: 4709613 - DNA, 25 bp, Homo sapien
caatttgggatggaaatgctttcca

SEQ ID NO: 4709614 - DNA, 25 bp, Homo sapien
ggccctgaagccaggatctatgtaa

SEQ ID NO: 4709615 - DNA, 25 bp, Homo sapien
agcagggaatctctcgccgtcccga

SEQ ID NO: 4709616 - DNA, 25 bp, Homo sapien
ggtcccagcagggaatctctcgccg

SEQ ID NO: 4709617 - DNA, 25 bp, Homo sapien
ccagcagggaatctctcgccgtccc

SEQ ID NO: 4709618 - DNA, 25 bp, Homo sapien
gacggtcccagcagggaatctctcg

SEQ ID NO: 4709619 - DNA, 25 bp, Homo sapien
tggacctgcagtgcttaaaccccgt

SEQ ID NO: 4709620 - DNA, 25 bp, Homo sapien
cgcctcccgccaagtgagctgtgaa

SEQ ID NO: 4709621 - DNA, 25 bp, Homo sapien
aaaagtccaatcgttgcctgccgag

SEQ ID NO: 4709622 - DNA, 25 bp, Homo sapien
cataaagttagccagatctcgggtc

SEQ ID NO: 4709623 - DNA, 25 bp, Homo sapien
ccacagcgctgtccccaggcggctg

SEQ ID NO: 4709624 - DNA, 25 bp, Homo sapien
gccgagcggcctccccttccgtcgc

SEQ ID NO: 4709625 - DNA, 25 bp, Homo sapien
ccggaggagccacagcgctgtcccc

SEQ ID NO: 4709626 - DNA, 25 bp, Homo sapien
ttccgtcgccatccgcgcggggccg

SEQ ID NO: 4709627 - DNA, 25 bp, Homo sapien
gcgccgagtattcggggcagcgcgg

SEQ ID NO: 4709628 - DNA, 25 bp, Homo sapien
gcagcgcggccgaggatgtcgccat

SEQ ID NO: 4709629 - DNA, 25 bp, Homo sapien
gggcagcgcggccgaggatgtcgcc

SEQ ID NO: 4709630 - DNA, 25 bp, Homo sapien
ccgcgccgagtattcggggcagcgc

SEQ ID NO: 4709631 - DNA, 25 bp, Homo sapien
gcgccgagtcccgaatgcaccacgc

SEQ ID NO: 4709632 - DNA, 25 bp, Homo sapien
gagtcccgaatgcaccacgcccgct

SEQ ID NO: 4709633 - DNA, 25 bp, Homo sapien
agatagaggtcctggcgccgagtcc

SEQ ID NO: 4709634 - DNA, 25 bp, Homo sapien
gaagtagatagaggtcctggcgccg

SEQ ID NO: 4709635 - DNA, 25 bp, Homo sapien
gactcgcggatcataagggccgtcg

SEQ ID NO: 4709636 - DNA, 25 bp, Homo sapien
cggtgctgtcctccgactcgcggat

SEQ ID NO: 4709637 - DNA, 25 bp, Homo sapien
gagaaagcccaaccagcgcgacggg

SEQ ID NO: 4709638 - DNA, 25 bp, Homo sapien
atcataagggccgtcgcgcttccaa

SEQ ID NO: 4709639 - DNA, 25 bp, Homo sapien
cctatccatggtgaggcggtggcct

SEQ ID NO: 4709640 - DNA, 25 bp, Homo sapien
cagcggagcgcgcagtttcgaccgc

SEQ ID NO: 4709641 - DNA, 25 bp, Homo sapien
caactcggctgggcgcccagtgtta

SEQ ID NO: 4709642 - DNA, 25 bp, Homo sapien
ctgtgctacgtcaggcaggaccgag

SEQ ID NO: 4709643 - DNA, 25 bp, Homo sapien
cacagggaccttttcaggaaacaga

SEQ ID NO: 4709644 - DNA, 25 bp, Homo sapien
cgaccttgctcctgggtaagcctgg

SEQ ID NO: 4709645 - DNA, 25 bp, Homo sapien
tggaagcacagggaccttttcagga

SEQ ID NO: 4709646 - DNA, 25 bp, Homo sapien
ggctggagccaggttctgatcccga

SEQ ID NO: 4709647 - DNA, 25 bp, Homo sapien
gtctcccaccggtggcagcagagac

SEQ ID NO: 4709648 - DNA, 25 bp, Homo sapien
ccttctgtgacaccgaggtggggag

SEQ ID NO: 4709649 - DNA, 25 bp, Homo sapien
agagacaggcagagcgcagttcccg

SEQ ID NO: 4709650 - DNA, 25 bp, Homo sapien
ggaggaggagcgacgctgcgtctcc

SEQ ID NO: 4709651 - DNA, 25 bp, Homo sapien
ggactcgggcatcgaagaggcttct

SEQ ID NO: 4709652 - DNA, 25 bp, Homo sapien
tgtgccgacagccagctttgtgtcc

SEQ ID NO: 4709653 - DNA, 25 bp, Homo sapien
gggctcattcaaaatcttgtcgttg

SEQ ID NO: 4709654 - DNA, 25 bp, Homo sapien
agaggcttctcacggaaaacagttc

SEQ ID NO: 4709655 - DNA, 25 bp, Homo sapien
ctctgtattcccatgtggaggagga

SEQ ID NO: 4709656 - DNA, 25 bp, Homo sapien
ctatcaagggctgtgagcgccacac

SEQ ID NO: 4709657 - DNA, 25 bp, Homo sapien
tccgccaagctgaggaataaactcc

SEQ ID NO: 4709658 - DNA, 25 bp, Homo sapien
tccatttctgaacccgtggagtcct

SEQ ID NO: 4709659 - DNA, 25 bp, Homo sapien
ctggtaggaaccaagcttgtgatgt

SEQ ID NO: 4709660 - DNA, 25 bp, Homo sapien
tgatgtcccccaggtctcccctggt

SEQ ID NO: 4709661 - DNA, 25 bp, Homo sapien
gtaggaaccaagcttgtgatgtccc

SEQ ID NO: 4709662 - DNA, 25 bp, Homo sapien
gtgatgtcccccaggtctcccctgg

SEQ ID NO: 4709663 - DNA, 25 bp, Homo sapien
cctctcggtgcgtgacaggcgagtc

SEQ ID NO: 4709664 - DNA, 25 bp, Homo sapien
cagcagcatcaacagagaaccacat

SEQ ID NO: 4709665 - DNA, 25 bp, Homo sapien
ggcgacctccatcttgccaaggtca

SEQ ID NO: 4709666 - DNA, 25 bp, Homo sapien
caggcgagtcatccacatttgcggt

SEQ ID NO: 4709667 - DNA, 25 bp, Homo sapien
ttcccgaggctttgcggatgaggcc

SEQ ID NO: 4709668 - DNA, 25 bp, Homo sapien
tgtcctcttcccgaggctttgcgga

SEQ ID NO: 4709669 - DNA, 25 bp, Homo sapien
aacatgacgccaaaaggacattctg

SEQ ID NO: 4709670 - DNA, 25 bp, Homo sapien
cccatatggatgtgtggacatccaa

SEQ ID NO: 4709671 - DNA, 25 bp, Homo sapien
tcttcccgaaggaatcctaatagaa

SEQ ID NO: 4709672 - DNA, 25 bp, Homo sapien
cctcttcccgaaggaatcctaatag

SEQ ID NO: 4709673 - DNA, 25 bp, Homo sapien
catgcctcgtctcgtggcttaaccc

SEQ ID NO: 4709674 - DNA, 25 bp, Homo sapien
tcgtctcgtggcttaacccctccta

SEQ ID NO: 4709675 - DNA, 25 bp, Homo sapien
aggcggctcccaaagatgtacggct

SEQ ID NO: 4709676 - DNA, 25 bp, Homo sapien
gccggttgcggcttataaacaagat

SEQ ID NO: 4709677 - DNA, 25 bp, Homo sapien
gtcacgggccatgttctcaatcagg

SEQ ID NO: 4709678 - DNA, 25 bp, Homo sapien
tcaatcaggtacgagaactgccggt

SEQ ID NO: 4709679 - DNA, 25 bp, Homo sapien
ttctccttggcccgggtgatggccg

SEQ ID NO: 4709680 - DNA, 25 bp, Homo sapien
gcaggcgatagagagcctcaacctg

SEQ ID NO: 4709681 - DNA, 25 bp, Homo sapien
ctgcaggcgatagagagcctcaacc

SEQ ID NO: 4709682 - DNA, 25 bp, Homo sapien
tgatggccgtctggaagagcctgca

SEQ ID NO: 4709683 - DNA, 25 bp, Homo sapien
cactgaggtcctaactgcagccaag

SEQ ID NO: 4709684 - DNA, 25 bp, Homo sapien
gaagcggcccacctgaaaggcattt

SEQ ID NO: 4709685 - DNA, 25 bp, Homo sapien
aaacgcacatggcaacgttggtccg

SEQ ID NO: 4709686 - DNA, 25 bp, Homo sapien
taagtaacaacgactgaggatgccg

SEQ ID NO: 4709687 - DNA, 25 bp, Homo sapien
ttctgctctccggatcaggcacaga

SEQ ID NO: 4709688 - DNA, 25 bp, Homo sapien
tctgctctccggatcaggcacagag

SEQ ID NO: 4709689 - DNA, 25 bp, Homo sapien
cttctgctctccggatcaggcacag

SEQ ID NO: 4709690 - DNA, 25 bp, Homo sapien
caggaacagggctgactcattttca

SEQ ID NO: 4709691 - DNA, 25 bp, Homo sapien
caggtctcatccaggaacagggctg

SEQ ID NO: 4709692 - DNA, 25 bp, Homo sapien
gcaggtctcatccaggaacagggct

SEQ ID NO: 4709693 - DNA, 25 bp, Homo sapien
tcatccaggaacagggctgactcat

SEQ ID NO: 4709694 - DNA, 25 bp, Homo sapien
agggcctggactcctcgcactgcag

SEQ ID NO: 4709695 - DNA, 25 bp, Homo sapien
gggcctggactcctcgcactgcagc

SEQ ID NO: 4709696 - DNA, 25 bp, Homo sapien
cacagccgccctttataccgctggg

SEQ ID NO: 4709697 - DNA, 25 bp, Homo sapien
acggccgcctgacaggtcgcttgct

SEQ ID NO: 4709698 - DNA, 25 bp, Homo sapien
ctccggagtctgagtccacggccgc

SEQ ID NO: 4709699 - DNA, 25 bp, Homo sapien
cctttataccgctgggctcagggtc

SEQ ID NO: 4709700 - DNA, 25 bp, Homo sapien
atcctgaatctcctcgtctgaggcc

SEQ ID NO: 4709701 - DNA, 25 bp, Homo sapien
agcaatgaggccaaggctgacggcc

SEQ ID NO: 4709702 - DNA, 25 bp, Homo sapien
cctgaatctcctcgtctgaggccag

SEQ ID NO: 4709703 - DNA, 25 bp, Homo sapien
cctgcagggcagcaatgaggccaag

SEQ ID NO: 4709704 - DNA, 25 bp, Homo sapien
tgagggtcatgggtgtcaccgattc

SEQ ID NO: 4709705 - DNA, 25 bp, Homo sapien
tgtccaccgtcatggccttcagata

SEQ ID NO: 4709706 - DNA, 25 bp, Homo sapien
accgattccagattcatctcaggga

SEQ ID NO: 4709707 - DNA, 25 bp, Homo sapien
ccgtcatggccttcagataccacgt

SEQ ID NO: 4709708 - DNA, 25 bp, Homo sapien
ggagccatgcgggtgaaatcacaca

SEQ ID NO: 4709709 - DNA, 25 bp, Homo sapien
caggtgagcgctacacagggatttc

SEQ ID NO: 4709710 - DNA, 25 bp, Homo sapien
cagacattccctagtcggaggagga

SEQ ID NO: 4709711 - DNA, 25 bp, Homo sapien
cagtttgccctcaagcattgcagga

SEQ ID NO: 4709712 - DNA, 25 bp, Homo sapien
aatgtggccccgagtctgccacagg

SEQ ID NO: 4709713 - DNA, 25 bp, Homo sapien
ggccctggagcaaccatgctgcaat

SEQ ID NO: 4709714 - DNA, 25 bp, Homo sapien
ttctctgcatctcagacccaggcac

SEQ ID NO: 4709715 - DNA, 25 bp, Homo sapien
tggaaaacagaagccccctggcaaa

SEQ ID NO: 4709716 - DNA, 25 bp, Homo sapien
gccgtgtattttcccggctcgtcag

SEQ ID NO: 4709717 - DNA, 25 bp, Homo sapien
ggccgtgtattttcccggctcgtca

SEQ ID NO: 4709718 - DNA, 25 bp, Homo sapien
gatcccgggacagcgtgcgttgcca

SEQ ID NO: 4709719 - DNA, 25 bp, Homo sapien
acatcccaaaccagtgagtcacggg

SEQ ID NO: 4709720 - DNA, 25 bp, Homo sapien
caggaacctgatgtacccaagaggc

SEQ ID NO: 4709721 - DNA, 25 bp, Homo sapien
cacattcctgaattagccaccaggg

SEQ ID NO: 4709722 - DNA, 25 bp, Homo sapien
cagtaaaagatgtagtggtccttca

SEQ ID NO: 4709723 - DNA, 25 bp, Homo sapien
acctgatgatgtatgccacgtgctt

SEQ ID NO: 4709724 - DNA, 25 bp, Homo sapien
acagtaaaagatgtagtggtccttc

SEQ ID NO: 4709725 - DNA, 25 bp, Homo sapien
atgatgtatgccacgtgcttgcccc

SEQ ID NO: 4709726 - DNA, 25 bp, Homo sapien
ggaacgcgctcaaggatgacactgc

SEQ ID NO: 4709727 - DNA, 25 bp, Homo sapien
tgtgtgacctttgaacccctgtgcc

SEQ ID NO: 4709728 - DNA, 25 bp, Homo sapien
atccctgagcatctcccggagtgag

SEQ ID NO: 4709729 - DNA, 25 bp, Homo sapien
gacagggacagcactgatgagtcac

SEQ ID NO: 4709730 - DNA, 25 bp, Homo sapien
atgaggatgctctccgtgctgagtc

SEQ ID NO: 4709731 - DNA, 25 bp, Homo sapien
tgaggatgctctccgtgctgagtcc

SEQ ID NO: 4709732 - DNA, 25 bp, Homo sapien
aattagacgcagcacagttatgcgc

SEQ ID NO: 4709733 - DNA, 25 bp, Homo sapien
cagcacagttatgcgcccgtgcaat

SEQ ID NO: 4709734 - DNA, 25 bp, Homo sapien
agcacaggcgttaggagaccccagg

SEQ ID NO: 4709735 - DNA, 25 bp, Homo sapien
ccccaggaatgcagtcaggaccggg

SEQ ID NO: 4709736 - DNA, 25 bp, Homo sapien
ctaatcgctccctggagagcaggtt

SEQ ID NO: 4709737 - DNA, 25 bp, Homo sapien
taatcgctccctggagagcaggttt

SEQ ID NO: 4709738 - DNA, 25 bp, Homo sapien
aatgtcctctaaagctgttcactca

SEQ ID NO: 4709739 - DNA, 25 bp, Homo sapien
atgtcctctaaagctgttcactcac

SEQ ID NO: 4709740 - DNA, 25 bp, Homo sapien
gaccttgggcgagtctccaaactct

SEQ ID NO: 4709741 - DNA, 25 bp, Homo sapien
cagagctccctgctgagtgaagtgg

SEQ ID NO: 4709742 - DNA, 25 bp, Homo sapien
cctctagattggagcggatggagca

SEQ ID NO: 4709743 - DNA, 25 bp, Homo sapien
atctgacacagcgagcacaggcacg

SEQ ID NO: 4709744 - DNA, 25 bp, Homo sapien
tgaagctctttatggagaaccagga

SEQ ID NO: 4709745 - DNA, 25 bp, Homo sapien
ctgtgaatgacggaggtgctggatg

SEQ ID NO: 4709746 - DNA, 25 bp, Homo sapien
ggtgcagccagccgcgttctgcagg

SEQ ID NO: 4709747 - DNA, 25 bp, Homo sapien
gggagctttttccatgtccctgtga

SEQ ID NO: 4709748 - DNA, 25 bp, Homo sapien
cattggtagtaaccagtgactctac

SEQ ID NO: 4709749 - DNA, 25 bp, Homo sapien
gtcaagataagctggatacattttc

SEQ ID NO: 4709750 - DNA, 25 bp, Homo sapien
ctttttccagtcaagataagctgga

SEQ ID NO: 4709751 - DNA, 25 bp, Homo sapien
tttcccgcattggtagtaaccagtg

SEQ ID NO: 4709752 - DNA, 25 bp, Homo sapien
tgttctctttatagtgactctaaac

SEQ ID NO: 4709753 - DNA, 25 bp, Homo sapien
ctgtgttctctttatagtgactcta

SEQ ID NO: 4709754 - DNA, 25 bp, Homo sapien
tagtgactctaaacacatgatggta

SEQ ID NO: 4709755 - DNA, 25 bp, Homo sapien
agtgactctaaacacatgatggtac

SEQ ID NO: 4709756 - DNA, 25 bp, Homo sapien
tgtgctgccgacctcggcaggtcac

SEQ ID NO: 4709757 - DNA, 25 bp, Homo sapien
tgctgccgacctcggcaggtcactg

SEQ ID NO: 4709758 - DNA, 25 bp, Homo sapien
gtgctgccgacctcggcaggtcact

SEQ ID NO: 4709759 - DNA, 25 bp, Homo sapien
aggccgagcgtgacacccaggaaca

SEQ ID NO: 4709760 - DNA, 25 bp, Homo sapien
ggccgagcgtgacacccaggaacag

SEQ ID NO: 4709761 - DNA, 25 bp, Homo sapien
caggccgagcgtgacacccaggaac

SEQ ID NO: 4709762 - DNA, 25 bp, Homo sapien
caccatggccttcacgtaccaggtc

SEQ ID NO: 4709763 - DNA, 25 bp, Homo sapien
gaaagtccttatcgaccaccatggc

SEQ ID NO: 4709764 - DNA, 25 bp, Homo sapien
tcctgtcctccggaaagtccttatc

SEQ ID NO: 4709765 - DNA, 25 bp, Homo sapien
tccggaaagtccttatcgaccacca

SEQ ID NO: 4709766 - DNA, 25 bp, Homo sapien
ctccgtcttccgcatcaggattttc

SEQ ID NO: 4709767 - DNA, 25 bp, Homo sapien
tcctccgtcttccgcatcaggattt

SEQ ID NO: 4709768 - DNA, 25 bp, Homo sapien
ccgtcttccgcatcaggattttctt

SEQ ID NO: 4709769 - DNA, 25 bp, Homo sapien
tccgtcttccgcatcaggattttct

SEQ ID NO: 4709770 - DNA, 25 bp, Homo sapien
gctggtgcatccggggttgggcatg

SEQ ID NO: 4709771 - DNA, 25 bp, Homo sapien
ctggtgcatccggggttgggcatgg

SEQ ID NO: 4709772 - DNA, 25 bp, Homo sapien
tggtgcatccggggttgggcatggg

SEQ ID NO: 4709773 - DNA, 25 bp, Homo sapien
ttgcagtaaaagacgtagtcgtccg

SEQ ID NO: 4709774 - DNA, 25 bp, Homo sapien
gcagtaaaagacgtagtcgtccgtc

SEQ ID NO: 4709775 - DNA, 25 bp, Homo sapien
acgtagtcgtccgtcccgggcagct

SEQ ID NO: 4709776 - DNA, 25 bp, Homo sapien
tttcccatgtagcgcaggcccccac

SEQ ID NO: 4709777 - DNA, 25 bp, Homo sapien
aggtgaggtggccaggtgagccaag

SEQ ID NO: 4709778 - DNA, 25 bp, Homo sapien
aggtgagccaaggtggggacagcgg

SEQ ID NO: 4709779 - DNA, 25 bp, Homo sapien
ggccaggtgagccaaggtggggaca

SEQ ID NO: 4709780 - DNA, 25 bp, Homo sapien
ccaaggtggggacagcggcacggcc

SEQ ID NO: 4709781 - DNA, 25 bp, Homo sapien
gcctccaggttggtattaggattcc

SEQ ID NO: 4709782 - DNA, 25 bp, Homo sapien
tccaggttggtattaggattcctac

SEQ ID NO: 4709783 - DNA, 25 bp, Homo sapien
ggcctccaggttggtattaggattc

SEQ ID NO: 4709784 - DNA, 25 bp, Homo sapien
cctccaggttggtattaggattcct

SEQ ID NO: 4709785 - DNA, 25 bp, Homo sapien
acacggggtactgggcacagccgtc

SEQ ID NO: 4709786 - DNA, 25 bp, Homo sapien
gggaacacggggtactgggcacagc

SEQ ID NO: 4709787 - DNA, 25 bp, Homo sapien
ggggtactgggcacagccgtcctca

SEQ ID NO: 4709788 - DNA, 25 bp, Homo sapien
cggggtactgggcacagccgtcctc

SEQ ID NO: 4709789 - DNA, 25 bp, Homo sapien
taggtccaggtggtccgggctctgt

SEQ ID NO: 4709790 - DNA, 25 bp, Homo sapien
ctctggaggtgcagacccgggggct

SEQ ID NO: 4709791 - DNA, 25 bp, Homo sapien
gggtcatggctggagggtaggtcca

SEQ ID NO: 4709792 - DNA, 25 bp, Homo sapien
tggtggtagggtgggctctggaggt

SEQ ID NO: 4709793 - DNA, 25 bp, Homo sapien
tgggggagaagctctttatttggag

SEQ ID NO: 4709794 - DNA, 25 bp, Homo sapien
tgggggcggtgggaaccagcctggc

SEQ ID NO: 4709795 - DNA, 25 bp, Homo sapien
ggcttgcagcaccaggatcaggctc

SEQ ID NO: 4709796 - DNA, 25 bp, Homo sapien
gcctctgggcttgcagcaccaggat

SEQ ID NO: 4709797 - DNA, 25 bp, Homo sapien
aggctcagctctccggtcagcaggg

SEQ ID NO: 4709798 - DNA, 25 bp, Homo sapien
agtatcgagcagcatagcctcgtta

SEQ ID NO: 4709799 - DNA, 25 bp, Homo sapien
ttgtcgtagtcagtatcgagcagca

SEQ ID NO: 4709800 - DNA, 25 bp, Homo sapien
tgtcgtagtcagtatcgagcagcat

SEQ ID NO: 4709801 - DNA, 25 bp, Homo sapien
gcagcatagcctcgttatataacct

SEQ ID NO: 4709802 - DNA, 25 bp, Homo sapien
ggccagcactgaggacagctgtgtc

SEQ ID NO: 4709803 - DNA, 25 bp, Homo sapien
tcagaggccagcactgaggacagct

SEQ ID NO: 4709804 - DNA, 25 bp, Homo sapien
aggccagcactgaggacagctgtgt

SEQ ID NO: 4709805 - DNA, 25 bp, Homo sapien
agaggccagcactgaggacagctgt

SEQ ID NO: 4709806 - DNA, 25 bp, Homo sapien
tgcggctgtgggtggctctgagctc

SEQ ID NO: 4709807 - DNA, 25 bp, Homo sapien
gtgggtggctctgagctctggagcc

SEQ ID NO: 4709808 - DNA, 25 bp, Homo sapien
gctgtgggtggctctgagctctgga

SEQ ID NO: 4709809 - DNA, 25 bp, Homo sapien
ggctgtgggtggctctgagctctgg

SEQ ID NO: 4709810 - DNA, 25 bp, Homo sapien
gccacgcccagggtgagcaggaggc

SEQ ID NO: 4709811 - DNA, 25 bp, Homo sapien
ggccgggacaccacagaccagggcc

SEQ ID NO: 4709812 - DNA, 25 bp, Homo sapien
gacaccacagaccagggccacgccc

SEQ ID NO: 4709813 - DNA, 25 bp, Homo sapien
acgcccagggtgagcaggaggcaca

SEQ ID NO: 4709814 - DNA, 25 bp, Homo sapien
agctccaggtcctgcttggtctggg

SEQ ID NO: 4709815 - DNA, 25 bp, Homo sapien
tcctgcttggtctgggggatgtcca

SEQ ID NO: 4709816 - DNA, 25 bp, Homo sapien
caggtcctgcttggtctgggggatg

SEQ ID NO: 4709817 - DNA, 25 bp, Homo sapien
cctgcttggtctgggggatgtccat

SEQ ID NO: 4709818 - DNA, 25 bp, Homo sapien
cttcagtgtcgccatgagggagatg

SEQ ID NO: 4709819 - DNA, 25 bp, Homo sapien
gagggagatgttgttggtcgccatg

SEQ ID NO: 4709820 - DNA, 25 bp, Homo sapien
tcgccatggccatggagtgccaggt

SEQ ID NO: 4709821 - DNA, 25 bp, Homo sapien
gttggtcgccatggccatggagtgc

SEQ ID NO: 4709822 - DNA, 25 bp, Homo sapien
caacagtgaggtgatgtggaccctc

SEQ ID NO: 4709823 - DNA, 25 bp, Homo sapien
catctgtgcagaacgatctccaggt

SEQ ID NO: 4709824 - DNA, 25 bp, Homo sapien
gaacgatctccaggttgtcctcggg

SEQ ID NO: 4709825 - DNA, 25 bp, Homo sapien
gcaacagtgaggtgatgtggaccct

SEQ ID NO: 4709826 - DNA, 25 bp, Homo sapien
tcttctcaacacagctgttgttctc

SEQ ID NO: 4709827 - DNA, 25 bp, Homo sapien
cttctcaacacagctgttgttctcc

SEQ ID NO: 4709828 - DNA, 25 bp, Homo sapien
ggttgaccggagtaaacactctgac

SEQ ID NO: 4709829 - DNA, 25 bp, Homo sapien
gccctccaggtaaaagatgcctctg

SEQ ID NO: 4709830 - DNA, 25 bp, Homo sapien
gccaagaattagtgcttcccctgcc

SEQ ID NO: 4709831 - DNA, 25 bp, Homo sapien
cacatccagtcatgtcatgccaaga

SEQ ID NO: 4709832 - DNA, 25 bp, Homo sapien
attgttaggaagaattcagtggacc

SEQ ID NO: 4709833 - DNA, 25 bp, Homo sapien
agtggaccaaggacatgctgtaagc

SEQ ID NO: 4709834 - DNA, 25 bp, Homo sapien
tgaggggataagaggccccagaccc

SEQ ID NO: 4709835 - DNA, 25 bp, Homo sapien
ggagctcagcctaagaccagagctg

SEQ ID NO: 4709836 - DNA, 25 bp, Homo sapien
gggagatggcacaggaacagggcac

SEQ ID NO: 4709837 - DNA, 25 bp, Homo sapien
ggagatggcacaggaacagggcaca

SEQ ID NO: 4709838 - DNA, 25 bp, Homo sapien
agcgtggcctcgttcgccaccgtat

SEQ ID NO: 4709839 - DNA, 25 bp, Homo sapien
gtatcgagcagcgtggcctcgttcg

SEQ ID NO: 4709840 - DNA, 25 bp, Homo sapien
ttgtcgtagtcagtatcgagcagcg

SEQ ID NO: 4709841 - DNA, 25 bp, Homo sapien
tgtcgtagtcagtatcgagcagcgt

SEQ ID NO: 4709842 - DNA, 25 bp, Homo sapien
tactggcacatcatgctctggatgg

SEQ ID NO: 4709843 - DNA, 25 bp, Homo sapien
actggcacatcatgctctggatggg

SEQ ID NO: 4709844 - DNA, 25 bp, Homo sapien
tggagaaaaactcagcctggccggg

SEQ ID NO: 4709845 - DNA, 25 bp, Homo sapien
tgtcagaggactcgatgaaccgctg

SEQ ID NO: 4709846 - DNA, 25 bp, Homo sapien
gacagcatcataggtttcagggcgt

SEQ ID NO: 4709847 - DNA, 25 bp, Homo sapien
tgtctacagcgtcacaggagagcac

SEQ ID NO: 4709848 - DNA, 25 bp, Homo sapien
ctgtggaagaggctgggtcagtcct

SEQ ID NO: 4709849 - DNA, 25 bp, Homo sapien
gaagaggctgggtcagtcctgggcc

SEQ ID NO: 4709850 - DNA, 25 bp, Homo sapien
ccctggggcttccatgagagctggg

SEQ ID NO: 4709851 - DNA, 25 bp, Homo sapien
cccctggggcttccatgagagctgg

SEQ ID NO: 4709852 - DNA, 25 bp, Homo sapien
caagtaccataggtgcctgggcagg

SEQ ID NO: 4709853 - DNA, 25 bp, Homo sapien
gggcctgaaagccctgatgaatccc

SEQ ID NO: 4709854 - DNA, 25 bp, Homo sapien
catctgtttcaagtccagcaagtac

SEQ ID NO: 4709855 - DNA, 25 bp, Homo sapien
tgcatgatctcatcgtcctccacca

SEQ ID NO: 4709856 - DNA, 25 bp, Homo sapien
ggctcgggctaagaaagaggcagct

SEQ ID NO: 4709857 - DNA, 25 bp, Homo sapien
ggacagtggaggtgtcagcgagaga

SEQ ID NO: 4709858 - DNA, 25 bp, Homo sapien
tgtcagcgagagaagagacagctgg

SEQ ID NO: 4709859 - DNA, 25 bp, Homo sapien
tgaggctgggcgtgtcctaggcaga

SEQ ID NO: 4709860 - DNA, 25 bp, Homo sapien
ggaggcaggaccaggcaggagctca

SEQ ID NO: 4709861 - DNA, 25 bp, Homo sapien
ccaggaggcaggaccaggcaggagc

SEQ ID NO: 4709862 - DNA, 25 bp, Homo sapien
aggaggcaggaccaggcaggagctc

SEQ ID NO: 4709863 - DNA, 25 bp, Homo sapien
gaggcaggaccaggcaggagctcac

SEQ ID NO: 4709864 - DNA, 25 bp, Homo sapien
tgggcttgaggacacccccttaaga

SEQ ID NO: 4709865 - DNA, 25 bp, Homo sapien
tgaggacacccccttaagaatgtgg

SEQ ID NO: 4709866 - DNA, 25 bp, Homo sapien
ggacacccccttaagaatgtggcac

SEQ ID NO: 4709867 - DNA, 25 bp, Homo sapien
gaagagcagggtgtttcgggggagc

SEQ ID NO: 4709868 - DNA, 25 bp, Homo sapien
aaggggatggcgacacagatgacca

SEQ ID NO: 4709869 - DNA, 25 bp, Homo sapien
gatgaccacgtcatcgtcttctgag

SEQ ID NO: 4709870 - DNA, 25 bp, Homo sapien
ctccccatggccgtggtgcaggtgt

SEQ ID NO: 4709871 - DNA, 25 bp, Homo sapien
gggtttattaataacctctgccaga

SEQ ID NO: 4709872 - DNA, 25 bp, Homo sapien
tccggttctgccaggcggtggcctg

SEQ ID NO: 4709873 - DNA, 25 bp, Homo sapien
tctccaccagaagctgcccatgggt

SEQ ID NO: 4709874 - DNA, 25 bp, Homo sapien
ttttgtagataagaaacttgaggta

SEQ ID NO: 4709875 - DNA, 25 bp, Homo sapien
tgcccatgggtctgtaggagctccg

SEQ ID NO: 4709876 - DNA, 25 bp, Homo sapien
tcttaacaacacagcgtgcatgagg

SEQ ID NO: 4709877 - DNA, 25 bp, Homo sapien
tgtgttccatccctgtttacagcca

SEQ ID NO: 4709878 - DNA, 25 bp, Homo sapien
cagctaggtagttgtcatgtagcac

SEQ ID NO: 4709879 - DNA, 25 bp, Homo sapien
taccatcagagaaaacgagatgcca

SEQ ID NO: 4709880 - DNA, 25 bp, Homo sapien
cattagtggctgcatcgtggctgtg

SEQ ID NO: 4709881 - DNA, 25 bp, Homo sapien
tggccctgtgtcagctccgggcttg

SEQ ID NO: 4709882 - DNA, 25 bp, Homo sapien
aggctcagcccaagggtccgcatta

SEQ ID NO: 4709883 - DNA, 25 bp, Homo sapien
ctccgggcttgcactgccaggctgg

SEQ ID NO: 4709884 - DNA, 25 bp, Homo sapien
agttaccctggaaacgctggatcca

SEQ ID NO: 4709885 - DNA, 25 bp, Homo sapien
gtctcctctttaagtagctccctgt

SEQ ID NO: 4709886 - DNA, 25 bp, Homo sapien
gtgagccgtctcctctttaagtagc

SEQ ID NO: 4709887 - DNA, 25 bp, Homo sapien
acgctggatccagaatggtggcaga

SEQ ID NO: 4709888 - DNA, 25 bp, Homo sapien
gagcctgagcaagccctccgtgtgt

SEQ ID NO: 4709889 - DNA, 25 bp, Homo sapien
gctcattttcctgcaactggactgt

SEQ ID NO: 4709890 - DNA, 25 bp, Homo sapien
ctcattttcctgcaactggactgtc

SEQ ID NO: 4709891 - DNA, 25 bp, Homo sapien
gagctcattttcctgcaactggact

SEQ ID NO: 4709892 - DNA, 25 bp, Homo sapien
ctgagctcattttcctgcaactgga

SEQ ID NO: 4709893 - DNA, 25 bp, Homo sapien
ctgtacgtggtagagttgtctgttt

SEQ ID NO: 4709894 - DNA, 25 bp, Homo sapien
ttctgtacgtggtagagttgtctgt

SEQ ID NO: 4709895 - DNA, 25 bp, Homo sapien
gattctgtacgtggtagagttgtct

SEQ ID NO: 4709896 - DNA, 25 bp, Homo sapien
agattctgtacgtggtagagttgtc

SEQ ID NO: 4709897 - DNA, 25 bp, Homo sapien
cgtctccacggacagatgcagacct

SEQ ID NO: 4709898 - DNA, 25 bp, Homo sapien
catgatgtagtagtggtccgtctcc

SEQ ID NO: 4709899 - DNA, 25 bp, Homo sapien
gagctgggtggttgcgcccttttta

SEQ ID NO: 4709900 - DNA, 25 bp, Homo sapien
aggccccgtgacatcagcgtggaca

SEQ ID NO: 4709901 - DNA, 25 bp, Homo sapien
gatcatcagggcttctgggttttca

SEQ ID NO: 4709902 - DNA, 25 bp, Homo sapien
tataaacgcttctaagatcatcagg

SEQ ID NO: 4709903 - DNA, 25 bp, Homo sapien
ggaaatgaacgtccggagaaaagca

SEQ ID NO: 4709904 - DNA, 25 bp, Homo sapien
gaaaatgtgctcattaccaaggtga

SEQ ID NO: 4709905 - DNA, 25 bp, Homo sapien
catgctctcgggtaggctgggatct

SEQ ID NO: 4709906 - DNA, 25 bp, Homo sapien
ccacggtggcagagacgacatttga

SEQ ID NO: 4709907 - DNA, 25 bp, Homo sapien
caaccgtgcagatgccagagagcag

SEQ ID NO: 4709908 - DNA, 25 bp, Homo sapien
gactcatagcagactcaaggttgtg

SEQ ID NO: 4709909 - DNA, 25 bp, Homo sapien
ccatgctcagggtgagcaggaggca

SEQ ID NO: 4709910 - DNA, 25 bp, Homo sapien
tttgggagctccacgtcctgcttgg

SEQ ID NO: 4709911 - DNA, 25 bp, Homo sapien
cctgcttggtctgggggatgtccct

SEQ ID NO: 4709912 - DNA, 25 bp, Homo sapien
gatgtccctggcctggatggcacag

SEQ ID NO: 4709913 - DNA, 25 bp, Homo sapien
gccacagcgaggtgatgttgaccct

SEQ ID NO: 4709914 - DNA, 25 bp, Homo sapien
cacagcgaggtgatgttgaccctca

SEQ ID NO: 4709915 - DNA, 25 bp, Homo sapien
ccacagcgaggtgatgttgaccctc

SEQ ID NO: 4709916 - DNA, 25 bp, Homo sapien
ggccacagcgaggtgatgttgaccc

SEQ ID NO: 4709917 - DNA, 25 bp, Homo sapien
tactggcacatcgtgtggtggtcag

SEQ ID NO: 4709918 - DNA, 25 bp, Homo sapien
acagagatctttcttgtcccgcgac

SEQ ID NO: 4709919 - DNA, 25 bp, Homo sapien
ccccatgcagaagaacacgtagctc

SEQ ID NO: 4709920 - DNA, 25 bp, Homo sapien
tcctgtcgtctagtctgtgtccaac

SEQ ID NO: 4709921 - DNA, 25 bp, Homo sapien
gtccccagggcggtctctagggctc

SEQ ID NO: 4709922 - DNA, 25 bp, Homo sapien
ggtctctagggctcctggcctgtag

SEQ ID NO: 4709923 - DNA, 25 bp, Homo sapien
gtctacagtgtcacggaaggagagc

SEQ ID NO: 4709924 - DNA, 25 bp, Homo sapien
gtgtctacagtgtcacggaaggaga

SEQ ID NO: 4709925 - DNA, 25 bp, Homo sapien
tgaccttgtcgtctgcctctagggt

SEQ ID NO: 4709926 - DNA, 25 bp, Homo sapien
tccatgaccttgtcgtctgcctcta

SEQ ID NO: 4709927 - DNA, 25 bp, Homo sapien
ccgcctgggtaacgtccaggaagat

SEQ ID NO: 4709928 - DNA, 25 bp, Homo sapien
gatccacatgtgcacgggcagggtc

SEQ ID NO: 4709929 - DNA, 25 bp, Homo sapien
tccagggctgtcataaacgcagatg

SEQ ID NO: 4709930 - DNA, 25 bp, Homo sapien
aagaatctgcgactcttaggctgca

SEQ ID NO: 4709931 - DNA, 25 bp, Homo sapien
gcttccgagtcttgcccgacagttg

SEQ ID NO: 4709932 - DNA, 25 bp, Homo sapien
ctcagaacgagggttagggccacag

SEQ ID NO: 4709933 - DNA, 25 bp, Homo sapien
cctcagaacggtgacccccttgtgg

SEQ ID NO: 4709934 - DNA, 25 bp, Homo sapien
ctcagaacggtgacccccttgtggc

SEQ ID NO: 4709935 - DNA, 25 bp, Homo sapien
gagccgttccacggggaccctgtga

SEQ ID NO: 4709936 - DNA, 25 bp, Homo sapien
agccgttccacggggaccctgtgag

SEQ ID NO: 4709937 - DNA, 25 bp, Homo sapien
tcggcgtggtaaggggccttctgca

SEQ ID NO: 4709938 - DNA, 25 bp, Homo sapien
agtagttgctggatacagctgggtt

SEQ ID NO: 4709939 - DNA, 25 bp, Homo sapien
ggtttgcatttcacaggcccctgtc

SEQ ID NO: 4709940 - DNA, 25 bp, Homo sapien
aggagaagaccggacccgtgcctgc

SEQ ID NO: 4709941 - DNA, 25 bp, Homo sapien
gaggtccatagaggcttctggaact

SEQ ID NO: 4709942 - DNA, 25 bp, Homo sapien
gagagatggccacgcgtgaggtcca

SEQ ID NO: 4709943 - DNA, 25 bp, Homo sapien
acaccgcgtgcacctccaggatggg

SEQ ID NO: 4709944 - DNA, 25 bp, Homo sapien
ccatagaggcttctggaacttgcag

SEQ ID NO: 4709945 - DNA, 25 bp, Homo sapien
gagtttcacggaatgtcatggcccc

SEQ ID NO: 4709946 - DNA, 25 bp, Homo sapien
tcagtgatggtccttggtgacaccg

SEQ ID NO: 4709947 - DNA, 25 bp, Homo sapien
ggagtaggtcttcgagctgccgttt

SEQ ID NO: 4709948 - DNA, 25 bp, Homo sapien
ctctcatgtcatgttctgggccggg

SEQ ID NO: 4709949 - DNA, 25 bp, Homo sapien
cagcaggagcgggcctttctccagg

SEQ ID NO: 4709950 - DNA, 25 bp, Homo sapien
cggctgtaccggtacctcttccaga

SEQ ID NO: 4709951 - DNA, 25 bp, Homo sapien
ccggctgtaccggtacctcttccag

SEQ ID NO: 4709952 - DNA, 25 bp, Homo sapien
ggctgtaccggtacctcttccagag

SEQ ID NO: 4709953 - DNA, 25 bp, Homo sapien
gctgtaccggtacctcttccagagc

SEQ ID NO: 4709954 - DNA, 25 bp, Homo sapien
ccagaacagcacgaagtccacgtcc

SEQ ID NO: 4709955 - DNA, 25 bp, Homo sapien
ccgccgtccctggtccggatggagt

SEQ ID NO: 4709956 - DNA, 25 bp, Homo sapien
ggagagcgagcctcagggggtcggc

SEQ ID NO: 4709957 - DNA, 25 bp, Homo sapien
accaggtctgcgtggttggctgcca

SEQ ID NO: 4709958 - DNA, 25 bp, Homo sapien
caccgtgcggtgtgtctacgactga

SEQ ID NO: 4709959 - DNA, 25 bp, Homo sapien
tcgggattccctggcttacatcggg

SEQ ID NO: 4709960 - DNA, 25 bp, Homo sapien
gtctaactgccttcggagctgtggg

SEQ ID NO: 4709961 - DNA, 25 bp, Homo sapien
gaagcttgttgtcggtgtcactgcg

SEQ ID NO: 4709962 - DNA, 25 bp, Homo sapien
caactgggttggatggacggtgatg

SEQ ID NO: 4709963 - DNA, 25 bp, Homo sapien
tggtactggccttgcaactgggttg

SEQ ID NO: 4709964 - DNA, 25 bp, Homo sapien
cttggtactggccttgcaactgggt

SEQ ID NO: 4709965 - DNA, 25 bp, Homo sapien
tgagccttggtactggccttgcaac

SEQ ID NO: 4709966 - DNA, 25 bp, Homo sapien
agctgatgcacgatgcctctctcct

SEQ ID NO: 4709967 - DNA, 25 bp, Homo sapien
ccgggccagctgatgcacgatgcct

SEQ ID NO: 4709968 - DNA, 25 bp, Homo sapien
agaccccgggccagctgatgcacga

SEQ ID NO: 4709969 - DNA, 25 bp, Homo sapien
gccagctgatgcacgatgcctctct

SEQ ID NO: 4709970 - DNA, 25 bp, Homo sapien
ctgacgaagcatacgtgcatgctgc

SEQ ID NO: 4709971 - DNA, 25 bp, Homo sapien
cgaagcatacgtgcatgctgccgcc

SEQ ID NO: 4709972 - DNA, 25 bp, Homo sapien
catacgtgcatgctgccgccctcga

SEQ ID NO: 4709973 - DNA, 25 bp, Homo sapien
aagcatacgtgcatgctgccgccct

SEQ ID NO: 4709974 - DNA, 25 bp, Homo sapien
cccacaggttggtgatctcatcatc

SEQ ID NO: 4709975 - DNA, 25 bp, Homo sapien
cctcaaagcgcacgtaaagaatgag

SEQ ID NO: 4709976 - DNA, 25 bp, Homo sapien
cacccacaggttggtgatctcatca

SEQ ID NO: 4709977 - DNA, 25 bp, Homo sapien
aaagcgcacgtaaagaatgaggttg

SEQ ID NO: 4709978 - DNA, 25 bp, Homo sapien
ttcccagccatttggggtcctccag

SEQ ID NO: 4709979 - DNA, 25 bp, Homo sapien
ttctccacgtactccaagtatcttc

SEQ ID NO: 4709980 - DNA, 25 bp, Homo sapien
ttctgcaggtggaatttctccacgt

SEQ ID NO: 4709981 - DNA, 25 bp, Homo sapien
catctatgttgaagaccggggcttt

SEQ ID NO: 4709982 - DNA, 25 bp, Homo sapien
tagaaaagtcatctcagccggcgag

SEQ ID NO: 4709983 - DNA, 25 bp, Homo sapien
caaagacagctctaatccctgaaga

SEQ ID NO: 4709984 - DNA, 25 bp, Homo sapien
cactgtctgcgtatgtgtaggctga

SEQ ID NO: 4709985 - DNA, 25 bp, Homo sapien
atattccacaaactgcaaagcaagg

SEQ ID NO: 4709986 - DNA, 25 bp, Homo sapien
tcctgggctgcgatgaggctcagcc

SEQ ID NO: 4709987 - DNA, 25 bp, Homo sapien
taacggtgtggggatcgaactcctg

SEQ ID NO: 4709988 - DNA, 25 bp, Homo sapien
gcataacggtgtggggatcgaactc

SEQ ID NO: 4709989 - DNA, 25 bp, Homo sapien
tctgcataacggtgtggggatcgaa

SEQ ID NO: 4709990 - DNA, 25 bp, Homo sapien
ttcaagtgttcaatattccggacga

SEQ ID NO: 4709991 - DNA, 25 bp, Homo sapien
gaaatcaaatattaggctgccgttc

SEQ ID NO: 4709992 - DNA, 25 bp, Homo sapien
aatattccggacgaagaccctcagg

SEQ ID NO: 4709993 - DNA, 25 bp, Homo sapien
ctttaatccgattcaggtcatctga

SEQ ID NO: 4709994 - DNA, 25 bp, Homo sapien
cttctctgtcttctcgcagaccacg

SEQ ID NO: 4709995 - DNA, 25 bp, Homo sapien
tagtcagtctccgagacggccactg

SEQ ID NO: 4709996 - DNA, 25 bp, Homo sapien
tgaacagcctgtagtcagtctccga

SEQ ID NO: 4709997 - DNA, 25 bp, Homo sapien
gaaggtgatgaacagcctgtagtca

SEQ ID NO: 4709998 - DNA, 25 bp, Homo sapien
gacggccactgtgttctggccctca

SEQ ID NO: 4709999 - DNA, 25 bp, Homo sapien
atagagcgccagcgtgtgggtctcg

SEQ ID NO: 4710000 - DNA, 25 bp, Homo sapien
cgtgtgggtctcggtcccgttcctg

SEQ ID NO: 4710001 - DNA, 25 bp, Homo sapien
catagagcgccagcgtgtgggtctc

SEQ ID NO: 4710002 - DNA, 25 bp, Homo sapien
tgtgggtctcggtcccgttcctgaa

SEQ ID NO: 4710003 - DNA, 25 bp, Homo sapien
atctgctcaggaaggagggttccag

SEQ ID NO: 4710004 - DNA, 25 bp, Homo sapien
tcaaatctgctcaggaaggagggtt

SEQ ID NO: 4710005 - DNA, 25 bp, Homo sapien
cttcaaatctgctcaggaaggaggg

SEQ ID NO: 4710006 - DNA, 25 bp, Homo sapien
caaatctgctcaggaaggagggttc

SEQ ID NO: 4710007 - DNA, 25 bp, Homo sapien
ctttgttggtcaagtcgatgatatt

SEQ ID NO: 4710008 - DNA, 25 bp, Homo sapien
tggtcaagtcgatgatattttgtga

SEQ ID NO: 4710009 - DNA, 25 bp, Homo sapien
atgatattttgtgagccaagtccgt

SEQ ID NO: 4710010 - DNA, 25 bp, Homo sapien
gagccaagtccgtacttttcgcagg

SEQ ID NO: 4710011 - DNA, 25 bp, Homo sapien
gcgggctcctgtaatgcttggagta

SEQ ID NO: 4710012 - DNA, 25 bp, Homo sapien
gctcctgtaatgcttggagtagcag

SEQ ID NO: 4710013 - DNA, 25 bp, Homo sapien
ggctcctgtaatgcttggagtagca

SEQ ID NO: 4710014 - DNA, 25 bp, Homo sapien
ctgtaatgcttggagtagcagggat

SEQ ID NO: 4710015 - DNA, 25 bp, Homo sapien
ggaaccctcgtgcagaaatgcagag

SEQ ID NO: 4710016 - DNA, 25 bp, Homo sapien
gtacatccactcctttaccctcagg

SEQ ID NO: 4710017 - DNA, 25 bp, Homo sapien
cagaggcgtatctctgggaggctca

SEQ ID NO: 4710018 - DNA, 25 bp, Homo sapien
ggtgccttcagaggcgtatctctgg

SEQ ID NO: 4710019 - DNA, 25 bp, Homo sapien
tgttgatgaagaacctgaagcgccc

SEQ ID NO: 4710020 - DNA, 25 bp, Homo sapien
cgtccttcgggtccaaggtgttgat

SEQ ID NO: 4710021 - DNA, 25 bp, Homo sapien
cagagtcgttggaggccaatgctga

SEQ ID NO: 4710022 - DNA, 25 bp, Homo sapien
tgaagcgcccaccaggtttgatctg

SEQ ID NO: 4710023 - DNA, 25 bp, Homo sapien
ccacagcatggaggcgccgccacct

SEQ ID NO: 4710024 - DNA, 25 bp, Homo sapien
cttgcagagcgcgtgcagtagaggc

SEQ ID NO: 4710025 - DNA, 25 bp, Homo sapien
gcacctgggctcgtgggcatttcag

SEQ ID NO: 4710026 - DNA, 25 bp, Homo sapien
cacctgcccgctgccgtcagcacag

SEQ ID NO: 4710027 - DNA, 25 bp, Homo sapien
gctctctcgccgtcgaagtctgatg

SEQ ID NO: 4710028 - DNA, 25 bp, Homo sapien
ccgtcgaagtctgatgttggcatgg

SEQ ID NO: 4710029 - DNA, 25 bp, Homo sapien
gaaaggaggtcaatgctctctcgcc

SEQ ID NO: 4710030 - DNA, 25 bp, Homo sapien
aggtcaatgctctctcgccgtcgaa

SEQ ID NO: 4710031 - DNA, 25 bp, Homo sapien
ctctgccattgggaacgctgctggg

SEQ ID NO: 4710032 - DNA, 25 bp, Homo sapien
cttgggctctgccattgggaacgct

SEQ ID NO: 4710033 - DNA, 25 bp, Homo sapien
gcagcagcagcggttgaatttgcag

SEQ ID NO: 4710034 - DNA, 25 bp, Homo sapien
cagatcttgtgcaaggtgaggaaga

SEQ ID NO: 4710035 - DNA, 25 bp, Homo sapien
ctgtggggaggggaggggatactgc

SEQ ID NO: 4710036 - DNA, 25 bp, Homo sapien
ggggaggggaggggatactgctcac

SEQ ID NO: 4710037 - DNA, 25 bp, Homo sapien
tggggaggggaggggatactgctca

SEQ ID NO: 4710038 - DNA, 25 bp, Homo sapien
tgtggggaggggaggggatactgct

SEQ ID NO: 4710039 - DNA, 25 bp, Homo sapien
gggggaggggaggggatagtgctga

SEQ ID NO: 4710040 - DNA, 25 bp, Homo sapien
ggggaggggaggggatagtgctgac

SEQ ID NO: 4710041 - DNA, 25 bp, Homo sapien
tgtggggaggggaggggatagtgct

SEQ ID NO: 4710042 - DNA, 25 bp, Homo sapien
ctgtggggaggggaggggatagtgc

SEQ ID NO: 4710043 - DNA, 25 bp, Homo sapien
ggggaggggaggggatagtgctgac

SEQ ID NO: 4710044 - DNA, 25 bp, Homo sapien
tgtggggaggggaggggatagtgct

SEQ ID NO: 4710045 - DNA, 25 bp, Homo sapien
ctgtggggaggggaggggatagtgc

SEQ ID NO: 4710046 - DNA, 25 bp, Homo sapien
ggggaggggaggggatagtgctgac

SEQ ID NO: 4710047 - DNA, 25 bp, Homo sapien
ggggaggggatagtgctgacctggg

SEQ ID NO: 4710048 - DNA, 25 bp, Homo sapien
ggaggggaggggatagtgctgacct

SEQ ID NO: 4710049 - DNA, 25 bp, Homo sapien
ggtagggggaggggatagtgctgac

SEQ ID NO: 4710050 - DNA, 25 bp, Homo sapien
gaggaggggaggggatagtgctgac

SEQ ID NO: 4710051 - DNA, 25 bp, Homo sapien
cttggcctcggaagtgggactctgt

SEQ ID NO: 4710052 - DNA, 25 bp, Homo sapien
aagtgggactctgttggatgtcagg

SEQ ID NO: 4710053 - DNA, 25 bp, Homo sapien
cgagaggccgagtccgctcgcagtc

SEQ ID NO: 4710054 - DNA, 25 bp, Homo sapien
ggcccacccgcgagaggccgagtcc

SEQ ID NO: 4710055 - DNA, 25 bp, Homo sapien
gccgagtccgctcgcagtcagcagg

SEQ ID NO: 4710056 - DNA, 25 bp, Homo sapien
acactgcacggctggtgggcccacc

SEQ ID NO: 4710057 - DNA, 25 bp, Homo sapien
catgacggtgtcacctgcttttaca

SEQ ID NO: 4710058 - DNA, 25 bp, Homo sapien
gcctgacatcacacatgacggtgtc

SEQ ID NO: 4710059 - DNA, 25 bp, Homo sapien
tgcttttacaagtatgtccgggctc

SEQ ID NO: 4710060 - DNA, 25 bp, Homo sapien
tctccttggcttgtgaggtctgcag

SEQ ID NO: 4710061 - DNA, 25 bp, Homo sapien
tggaattcacatcccgtgcaatgtg

SEQ ID NO: 4710062 - DNA, 25 bp, Homo sapien
atttattgagctgatgaacgcgcag

SEQ ID NO: 4710063 - DNA, 25 bp, Homo sapien
gcagctgcattgagatggaattcac

SEQ ID NO: 4710064 - DNA, 25 bp, Homo sapien
cacatcccgtgcaatgtgattggtg

SEQ ID NO: 4710065 - DNA, 25 bp, Homo sapien
ccctgcagtggttcccggtgcccag

SEQ ID NO: 4710066 - DNA, 25 bp, Homo sapien
ctccttaatgtccgggggctccttg

SEQ ID NO: 4710067 - DNA, 25 bp, Homo sapien
cagtggttcccggtgcccaggtcat

SEQ ID NO: 4710068 - DNA, 25 bp, Homo sapien
tgtgtgtctcctcggcccacagtgt

SEQ ID NO: 4710069 - DNA, 25 bp, Homo sapien
atcccggaataacccagtcctggtg

SEQ ID NO: 4710070 - DNA, 25 bp, Homo sapien
tggcctcacggtcttggtgcctgga

SEQ ID NO: 4710071 - DNA, 25 bp, Homo sapien
gcaccctaatttgagcgaggcttac

SEQ ID NO: 4710072 - DNA, 25 bp, Homo sapien
tctcagcactgcgaaatcccggaat

SEQ ID NO: 4710073 - DNA, 25 bp, Homo sapien
ctgaaggacgaggtggagagcatct

SEQ ID NO: 4710074 - DNA, 25 bp, Homo sapien
tgaaggacgaggtggagagcatctt

SEQ ID NO: 4710075 - DNA, 25 bp, Homo sapien
gaaggacgaggtggagagcatcttc

SEQ ID NO: 4710076 - DNA, 25 bp, Homo sapien
cctgaaggacgaggtggagagcatc

SEQ ID NO: 4710077 - DNA, 25 bp, Homo sapien
agaagcgagtgggagccgccacctt

SEQ ID NO: 4710078 - DNA, 25 bp, Homo sapien
cagctcggacccgacccgagggaga

SEQ ID NO: 4710079 - DNA, 25 bp, Homo sapien
gtggcatgcggcctggcagctcgga

SEQ ID NO: 4710080 - DNA, 25 bp, Homo sapien
gcgcattggccgtcgtcaaactcga

SEQ ID NO: 4710081 - DNA, 25 bp, Homo sapien
ctctcccacagctatgggaggcacc

SEQ ID NO: 4710082 - DNA, 25 bp, Homo sapien
cctctcccacagctatgggaggcac

SEQ ID NO: 4710083 - DNA, 25 bp, Homo sapien
ccctctcccacagctatgggaggca

SEQ ID NO: 4710084 - DNA, 25 bp, Homo sapien
tctcccacagctatgggaggcacca

SEQ ID NO: 4710085 - DNA, 25 bp, Homo sapien
gacatttttgatctgtggccgagga

SEQ ID NO: 4710086 - DNA, 25 bp, Homo sapien
cctgaactgaggagcgactgacagc

SEQ ID NO: 4710087 - DNA, 25 bp, Homo sapien
tgaaaacagcctgcacgtccctgaa

SEQ ID NO: 4710088 - DNA, 25 bp, Homo sapien
catcacggcctcatgtgtgaaggtg

SEQ ID NO: 4710089 - DNA, 25 bp, Homo sapien
gccacagcagttgtgaaaaggaaca

SEQ ID NO: 4710090 - DNA, 25 bp, Homo sapien
tgctgccagcaccaatgtccagcca

SEQ ID NO: 4710091 - DNA, 25 bp, Homo sapien
agagagggccctcgtcttctgctgc

SEQ ID NO: 4710092 - DNA, 25 bp, Homo sapien
gccacagcagctgacactctgcggt

SEQ ID NO: 4710093 - DNA, 25 bp, Homo sapien
ttgttcaaggcttcgaggccagcag

SEQ ID NO: 4710094 - DNA, 25 bp, Homo sapien
ccaggccggcccttgttcaaggctt

SEQ ID NO: 4710095 - DNA, 25 bp, Homo sapien
ccttgttcaaggcttcgaggccagc

SEQ ID NO: 4710096 - DNA, 25 bp, Homo sapien
cggcccttgttcaaggcttcgaggc

SEQ ID NO: 4710097 - DNA, 25 bp, Homo sapien
gaggacccctggtggtctgcagttc

SEQ ID NO: 4710098 - DNA, 25 bp, Homo sapien
gtcccccactgaagtgagttttggc

SEQ ID NO: 4710099 - DNA, 25 bp, Homo sapien
tgtcccccactgaagtgagttttgg

SEQ ID NO: 4710100 - DNA, 25 bp, Homo sapien
cttccaggggtcttgcatctttcct

SEQ ID NO: 4710101 - DNA, 25 bp, Homo sapien
gcgccctcgcggacgcgcgcagccc

SEQ ID NO: 4710102 - DNA, 25 bp, Homo sapien
gggcgccctcgcggacgcgcgcagc

SEQ ID NO: 4710103 - DNA, 25 bp, Homo sapien
gcgtcgggcgccctcgcggacgcgc

SEQ ID NO: 4710104 - DNA, 25 bp, Homo sapien
gtcgggcgccctcgcggacgcgcgc

SEQ ID NO: 4710105 - DNA, 25 bp, Homo sapien
tgtccaggagcgcgccgtcccccgc

SEQ ID NO: 4710106 - DNA, 25 bp, Homo sapien
tcccggaagcggtagcgcggcggca

SEQ ID NO: 4710107 - DNA, 25 bp, Homo sapien
tcgttctggaaggacgggtcgccca

SEQ ID NO: 4710108 - DNA, 25 bp, Homo sapien
ctgtcgtcgttctggaaggacgggt

SEQ ID NO: 4710109 - DNA, 25 bp, Homo sapien
ccggaagcggtagcgcggcggcaag

SEQ ID NO: 4710110 - DNA, 25 bp, Homo sapien
ctgtgagtcactgcagtacacagga

SEQ ID NO: 4710111 - DNA, 25 bp, Homo sapien
ggccaggcagacgacccctggtctc

SEQ ID NO: 4710112 - DNA, 25 bp, Homo sapien
ccaggcagacgacccctggtctcca

SEQ ID NO: 4710113 - DNA, 25 bp, Homo sapien
gagtcactgcagtacacaggaaggg

SEQ ID NO: 4710114 - DNA, 25 bp, Homo sapien
tgccagaggctctactcccggggga

SEQ ID NO: 4710115 - DNA, 25 bp, Homo sapien
gggaaacaggaagcccgagtcctgc

SEQ ID NO: 4710116 - DNA, 25 bp, Homo sapien
aacaggaagcccgagtcctgcccgc

SEQ ID NO: 4710117 - DNA, 25 bp, Homo sapien
gccagaggctctactcccgggggaa

SEQ ID NO: 4710118 - DNA, 25 bp, Homo sapien
acagtggccgctgttgtgatgagcg

SEQ ID NO: 4710119 - DNA, 25 bp, Homo sapien
cttcctgcactctgcaagttcactg

SEQ ID NO: 4710120 - DNA, 25 bp, Homo sapien
aagttcactgcctcggagagccacg

SEQ ID NO: 4710121 - DNA, 25 bp, Homo sapien
ggagagccacgcccgtcactgactg

SEQ ID NO: 4710122 - DNA, 25 bp, Homo sapien
ccagcttcctgcactctgcaagttc

SEQ ID NO: 4710123 - DNA, 25 bp, Homo sapien
ggcagccggacaccaggcctgcaag

SEQ ID NO: 4710124 - DNA, 25 bp, Homo sapien
cctggcactgaaggcggtgatgcct

SEQ ID NO: 4710125 - DNA, 25 bp, Homo sapien
gggcagccggacaccaggcctgcaa

SEQ ID NO: 4710126 - DNA, 25 bp, Homo sapien
tgatgcctttgatggacttgccaga

SEQ ID NO: 4710127 - DNA, 25 bp, Homo sapien
atccaaggtgtgttttgaaggtggc

SEQ ID NO: 4710128 - DNA, 25 bp, Homo sapien
tgtgttttgaaggtggcactggcta

SEQ ID NO: 4710129 - DNA, 25 bp, Homo sapien
tttgaaggtggcactggctagactt

SEQ ID NO: 4710130 - DNA, 25 bp, Homo sapien
gaccaggtggatccaaggtgtgttt

SEQ ID NO: 4710131 - DNA, 25 bp, Homo sapien
ttcggcatcgagcagcagtcccaga

SEQ ID NO: 4710132 - DNA, 25 bp, Homo sapien
cttcggcatcgagcagcagtcccag

SEQ ID NO: 4710133 - DNA, 25 bp, Homo sapien
cggcatcgagcagcagtcccagaag

SEQ ID NO: 4710134 - DNA, 25 bp, Homo sapien
tcggcatcgagcagcagtcccagaa

SEQ ID NO: 4710135 - DNA, 25 bp, Homo sapien
atggagtgcccacagccggctgcag

SEQ ID NO: 4710136 - DNA, 25 bp, Homo sapien
tacaggatgagagttatgtgacaag

SEQ ID NO: 4710137 - DNA, 25 bp, Homo sapien
aagagaacatctgtgccgtgttgtc

SEQ ID NO: 4710138 - DNA, 25 bp, Homo sapien
tgacaagagaacatctgtgccgtgt

SEQ ID NO: 4710139 - DNA, 25 bp, Homo sapien
ttgccctcggacggcgagcgcggca

SEQ ID NO: 4710140 - DNA, 25 bp, Homo sapien
ctcggacggcgagcgcggcagcttg

SEQ ID NO: 4710141 - DNA, 25 bp, Homo sapien
ccgccttgccctcggacggcgagcg

SEQ ID NO: 4710142 - DNA, 25 bp, Homo sapien
gcgcggcagcttggcccgcgccatc

SEQ ID NO: 4710143 - DNA, 25 bp, Homo sapien
gcagcagcgggctgagcccgtgagg

SEQ ID NO: 4710144 - DNA, 25 bp, Homo sapien
cacgtcgctgcccacggagcccccg

SEQ ID NO: 4710145 - DNA, 25 bp, Homo sapien
gtcgctgcccacggagcccccgccg

SEQ ID NO: 4710146 - DNA, 25 bp, Homo sapien
cggcagcagcgggctgagcccgtga

SEQ ID NO: 4710147 - DNA, 25 bp, Homo sapien
cccaaagtggcgctggcaccaacaa

SEQ ID NO: 4710148 - DNA, 25 bp, Homo sapien
tggcgctggcaccaacaagatcggg

SEQ ID NO: 4710149 - DNA, 25 bp, Homo sapien
aagtggcgctggcaccaacaagatc

SEQ ID NO: 4710150 - DNA, 25 bp, Homo sapien
tgtctcccccaaagtggcgctggca

SEQ ID NO: 4710151 - DNA, 25 bp, Homo sapien
gagtccaggctgaaatcttctacag

SEQ ID NO: 4710152 - DNA, 25 bp, Homo sapien
gaggagtccaggctgaaatcttcta

SEQ ID NO: 4710153 - DNA, 25 bp, Homo sapien
caggctgaaatcttctacaggaagc

SEQ ID NO: 4710154 - DNA, 25 bp, Homo sapien
gtccaggctgaaatcttctacagga

SEQ ID NO: 4710155 - DNA, 25 bp, Homo sapien
gcgggtactgggaggtgccggtggc

SEQ ID NO: 4710156 - DNA, 25 bp, Homo sapien
ccatttcccaagttcaggctcctct

SEQ ID NO: 4710157 - DNA, 25 bp, Homo sapien
tggatgctcaacagccgtgagtgct

SEQ ID NO: 4710158 - DNA, 25 bp, Homo sapien
aacagccgtgagtgctgagtgctcg

SEQ ID NO: 4710159 - DNA, 25 bp, Homo sapien
tgagtgctcggtggtttctgctgct

SEQ ID NO: 4710160 - DNA, 25 bp, Homo sapien
tgctggtgccgtgcatggaacagta

SEQ ID NO: 4710161 - DNA, 25 bp, Homo sapien
ggtgcctgggagctccacgcaggcc

SEQ ID NO: 4710162 - DNA, 25 bp, Homo sapien
tgccggctggctcttaggcaggtgc

SEQ ID NO: 4710163 - DNA, 25 bp, Homo sapien
gtgcctgggagctccacgcaggcct

SEQ ID NO: 4710164 - DNA, 25 bp, Homo sapien
tgccagtctgcatttcggctggtgg

SEQ ID NO: 4710165 - DNA, 25 bp, Homo sapien
ggccggtgagactcatgggcatgtg

SEQ ID NO: 4710166 - DNA, 25 bp, Homo sapien
ctctgccagtctgcatttcggctgg

SEQ ID NO: 4710167 - DNA, 25 bp, Homo sapien
aggagcaagacgcagggccggtgag

SEQ ID NO: 4710168 - DNA, 25 bp, Homo sapien
gggaaagcaggggacccgctcatgg

SEQ ID NO: 4710169 - DNA, 25 bp, Homo sapien
tggggccacactctccgcttcctgt

SEQ ID NO: 4710170 - DNA, 25 bp, Homo sapien
gaaagcaggggacccgctcatggca

SEQ ID NO: 4710171 - DNA, 25 bp, Homo sapien
aggtgtggaccacgggcagaggcgg

SEQ ID NO: 4710172 - DNA, 25 bp, Homo sapien
acagatggcaccctccacgtggagg

SEQ ID NO: 4710173 - DNA, 25 bp, Homo sapien
tccacgtggaggcagagaaacgctg

SEQ ID NO: 4710174 - DNA, 25 bp, Homo sapien
gctgtgggccccaatctgggtagcc

SEQ ID NO: 4710175 - DNA, 25 bp, Homo sapien
ggcagactccctgagaaactggagc

SEQ ID NO: 4710176 - DNA, 25 bp, Homo sapien
ccccgtggacctggtgcagctggac

SEQ ID NO: 4710177 - DNA, 25 bp, Homo sapien
tccccgtggacctggtgcagctgga

SEQ ID NO: 4710178 - DNA, 25 bp, Homo sapien
ctccccgtggacctggtgcagctgg

SEQ ID NO: 4710179 - DNA, 25 bp, Homo sapien
caatcgaatctgagaatttgatgtc

SEQ ID NO: 4710180 - DNA, 25 bp, Homo sapien
gattaaaacattcgatgtttcccaa

SEQ ID NO: 4710181 - DNA, 25 bp, Homo sapien
taagtggtgtggaccaggtgtgtgc

SEQ ID NO: 4710182 - DNA, 25 bp, Homo sapien
cccaacatctccgaaagtgattaaa

SEQ ID NO: 4710183 - DNA, 25 bp, Homo sapien
ggtaaagttgcccatatggccctgg

SEQ ID NO: 4710184 - DNA, 25 bp, Homo sapien
taggacctgcgtcatacaggctgtc

SEQ ID NO: 4710185 - DNA, 25 bp, Homo sapien
caagtgctcagaacatgccgtagga

SEQ ID NO: 4710186 - DNA, 25 bp, Homo sapien
gtgctcaggacaccgcaagtgctca

SEQ ID NO: 4710187 - DNA, 25 bp, Homo sapien
ccttgaaggtgttctcgttgacgta

SEQ ID NO: 4710188 - DNA, 25 bp, Homo sapien
agccgctccttgaaggtgttctcgt

SEQ ID NO: 4710189 - DNA, 25 bp, Homo sapien
cgttgacgtagaactccacctggac

SEQ ID NO: 4710190 - DNA, 25 bp, Homo sapien
tgttctcgttgacgtagaactccac

SEQ ID NO: 4710191 - DNA, 25 bp, Homo sapien
gtcatcgagcaggacgcgcacaatg

SEQ ID NO: 4710192 - DNA, 25 bp, Homo sapien
gacgcgcacaatgtagagcaggcag

SEQ ID NO: 4710193 - DNA, 25 bp, Homo sapien
aagttgaacagccggatcctcaggc

SEQ ID NO: 4710194 - DNA, 25 bp, Homo sapien
gagcaggacgcgcacaatgtagagc

SEQ ID NO: 4710195 - DNA, 25 bp, Homo sapien
actgcaaggacttgctgcccgaggg

SEQ ID NO: 4710196 - DNA, 25 bp, Homo sapien
gcttccacaggctcgggttcatggg

SEQ ID NO: 4710197 - DNA, 25 bp, Homo sapien
cactgcaaggacttgctgcccgagg

SEQ ID NO: 4710198 - DNA, 25 bp, Homo sapien
tgcccgagggcttccacaggctcgg

SEQ ID NO: 4710199 - DNA, 25 bp, Homo sapien
tctcggaggacgagtcattgaagga

SEQ ID NO: 4710200 - DNA, 25 bp, Homo sapien
cagttgatctcggaggacgagtcat

SEQ ID NO: 4710201 - DNA, 25 bp, Homo sapien
ggacgagtcattgaaggagtagttc

SEQ ID NO: 4710202 - DNA, 25 bp, Homo sapien
tgaaggagtagttctgctttgggca

SEQ ID NO: 4710203 - DNA, 25 bp, Homo sapien
gatcgcccacagtgtcatctttctc

SEQ ID NO: 4710204 - DNA, 25 bp, Homo sapien
ctggatcgcccacagtgtcatcttt

SEQ ID NO: 4710205 - DNA, 25 bp, Homo sapien
ggatcgcccacagtgtcatctttct

SEQ ID NO: 4710206 - DNA, 25 bp, Homo sapien
tggatcgcccacagtgtcatctttc

SEQ ID NO: 4710207 - DNA, 25 bp, Homo sapien
tgagaagcatcgtctccaggaagct

SEQ ID NO: 4710208 - DNA, 25 bp, Homo sapien
gaggtagatgagaagcatcgtctcc

SEQ ID NO: 4710209 - DNA, 25 bp, Homo sapien
ggaagcttattatggccacgatgac

SEQ ID NO: 4710210 - DNA, 25 bp, Homo sapien
ctccaggaagcttattatggccacg

SEQ ID NO: 4710211 - DNA, 25 bp, Homo sapien
aggacgaaggacacgcggaagatct

SEQ ID NO: 4710212 - DNA, 25 bp, Homo sapien
gatcatctccaggacgaaggacacg

SEQ ID NO: 4710213 - DNA, 25 bp, Homo sapien
cacgcggaagatctgctcccagatg

SEQ ID NO: 4710214 - DNA, 25 bp, Homo sapien
gaagggcagagtgttgatcatctcc

SEQ ID NO: 4710215 - DNA, 25 bp, Homo sapien
ctgtgaaggggacaggtcagggctg

SEQ ID NO: 4710216 - DNA, 25 bp, Homo sapien
agggcccgcactcctggcagctggg

SEQ ID NO: 4710217 - DNA, 25 bp, Homo sapien
ctccagggcccgcactcctggcagc

SEQ ID NO: 4710218 - DNA, 25 bp, Homo sapien
cagggcccgcactcctggcagctgg

SEQ ID NO: 4710219 - DNA, 25 bp, Homo sapien
aatcatgttttccagcgcgtgcttg

SEQ ID NO: 4710220 - DNA, 25 bp, Homo sapien
tcatgttttccagcgcgtgcttggc

SEQ ID NO: 4710221 - DNA, 25 bp, Homo sapien
aacaggttccgcagcggcggccaga

SEQ ID NO: 4710222 - DNA, 25 bp, Homo sapien
agcagttcagaaagacggggatgaa

SEQ ID NO: 4710223 - DNA, 25 bp, Homo sapien
catggctgactgtgtccgcaggatg

SEQ ID NO: 4710224 - DNA, 25 bp, Homo sapien
ccgtgaaaacgaggcacagcagggt

SEQ ID NO: 4710225 - DNA, 25 bp, Homo sapien
actgtgtccgcaggatggcacggtg

SEQ ID NO: 4710226 - DNA, 25 bp, Homo sapien
cccgtgaaaacgaggcacagcaggg

SEQ ID NO: 4710227 - DNA, 25 bp, Homo sapien
agaaggtgacgatgcagaagtagaa

SEQ ID NO: 4710228 - DNA, 25 bp, Homo sapien
gagggccacgcagatcatgatgacc

SEQ ID NO: 4710229 - DNA, 25 bp, Homo sapien
agcagctgcgatggccagatcttgg

SEQ ID NO: 4710230 - DNA, 25 bp, Homo sapien
cagatcttgggcgtgacgtcaccgt

SEQ ID NO: 4710231 - DNA, 25 bp, Homo sapien
aagagcagtgcaggtgtgatgcctg

SEQ ID NO: 4710232 - DNA, 25 bp, Homo sapien
cctggagtcaccttgtcttgtttgt

SEQ ID NO: 4710233 - DNA, 25 bp, Homo sapien
tttaagatggtgttgagatggcatc

SEQ ID NO: 4710234 - DNA, 25 bp, Homo sapien
tgtgatgcctgcaggacctggtgca

SEQ ID NO: 4710235 - DNA, 25 bp, Homo sapien
gttctcgtgacgatggcgcatttgt

SEQ ID NO: 4710236 - DNA, 25 bp, Homo sapien
aatcagttctcgtgacgatggcgca

SEQ ID NO: 4710237 - DNA, 25 bp, Homo sapien
tggcgcatttgttccgtgaatttcc

SEQ ID NO: 4710238 - DNA, 25 bp, Homo sapien
gatggcgcatttgttccgtgaattt

SEQ ID NO: 4710239 - DNA, 25 bp, Homo sapien
ctgctgggctgtcggtcacttgtca

SEQ ID NO: 4710240 - DNA, 25 bp, Homo sapien
caggctgctgggctgtcggtcactt

SEQ ID NO: 4710241 - DNA, 25 bp, Homo sapien
ggctgctgggctgtcggtcacttgt

SEQ ID NO: 4710242 - DNA, 25 bp, Homo sapien
ctgggctgtcggtcacttgtcacca

SEQ ID NO: 4710243 - DNA, 25 bp, Homo sapien
caggtgagaaacaggtgagcaccag

SEQ ID NO: 4710244 - DNA, 25 bp, Homo sapien
gaaacaggtgagcaccagcgaccag

SEQ ID NO: 4710245 - DNA, 25 bp, Homo sapien
aacaggtgagcaccagcgaccaggc

SEQ ID NO: 4710246 - DNA, 25 bp, Homo sapien
gagaaacaggtgagcaccagcgacc

SEQ ID NO: 4710247 - DNA, 25 bp, Homo sapien
catccagaggtagacgagctcctcg

SEQ ID NO: 4710248 - DNA, 25 bp, Homo sapien
aggaagtccatgagaaggtcgatct

SEQ ID NO: 4710249 - DNA, 25 bp, Homo sapien
ggcggctgtagttgccccctgactt

SEQ ID NO: 4710250 - DNA, 25 bp, Homo sapien
acaggaccacgtgcttctccgtctg

SEQ ID NO: 4710251 - DNA, 25 bp, Homo sapien
ttggctcgcatgaggtcctggtctt

SEQ ID NO: 4710252 - DNA, 25 bp, Homo sapien
ctgcaggactctgcgcacctggaca

SEQ ID NO: 4710253 - DNA, 25 bp, Homo sapien
gtagatgacccgctgggaccacaga

SEQ ID NO: 4710254 - DNA, 25 bp, Homo sapien
ggaccacagagggatctgcaggact

SEQ ID NO: 4710255 - DNA, 25 bp, Homo sapien
tgctgaggatgaagcaggcctcccc

SEQ ID NO: 4710256 - DNA, 25 bp, Homo sapien
gctgaggatgaagcaggcctcccca

SEQ ID NO: 4710257 - DNA, 25 bp, Homo sapien
gcccaggcgcgcaggatggtctggt

SEQ ID NO: 4710258 - DNA, 25 bp, Homo sapien
caggtttgaggatctggacgtagag

SEQ ID NO: 4710259 - DNA, 25 bp, Homo sapien
cagcaaacttgacgtgaaacttgtt

SEQ ID NO: 4710260 - DNA, 25 bp, Homo sapien
tctggacgtagagggggcagttggg

SEQ ID NO: 4710261 - DNA, 25 bp, Homo sapien
gccagcatggcgtacttgcactcct

SEQ ID NO: 4710262 - DNA, 25 bp, Homo sapien
ccgggcagatgcagttcagcgccag

SEQ ID NO: 4710263 - DNA, 25 bp, Homo sapien
gaggtcgccgggcagatgcagttca

SEQ ID NO: 4710264 - DNA, 25 bp, Homo sapien
gcgccagcatggcgtacttgcactc

SEQ ID NO: 4710265 - DNA, 25 bp, Homo sapien
tcttgccctcgtactcgcggaagaa

SEQ ID NO: 4710266 - DNA, 25 bp, Homo sapien
aaggccgcgtaggtgaagctcttgc

SEQ ID NO: 4710267 - DNA, 25 bp, Homo sapien
tgcggatgtggtacacctcgttgcc

SEQ ID NO: 4710268 - DNA, 25 bp, Homo sapien
gcggaagaacttgctgtcacccatg

SEQ ID NO: 4710269 - DNA, 25 bp, Homo sapien
gggccccgggttcagcaggatgctc

SEQ ID NO: 4710270 - DNA, 25 bp, Homo sapien
ttcagcccgatgaggcacacgccat

SEQ ID NO: 4710271 - DNA, 25 bp, Homo sapien
agaagcaggtgtcagaggcggccag

SEQ ID NO: 4710272 - DNA, 25 bp, Homo sapien
atgatgctgtgcacgggcaggcggg

SEQ ID NO: 4710273 - DNA, 25 bp, Homo sapien
ccgagccgttctccgtgggcagtgc

SEQ ID NO: 4710274 - DNA, 25 bp, Homo sapien
tgcgtaggccggtgctctgtgccct

SEQ ID NO: 4710275 - DNA, 25 bp, Homo sapien
ccagttccaggacgggcgcgatgct

SEQ ID NO: 4710276 - DNA, 25 bp, Homo sapien
atcctccgactggtcgctcagcagg

SEQ ID NO: 4710277 - DNA, 25 bp, Homo sapien
gttgggagggtagcccttcacatac

SEQ ID NO: 4710278 - DNA, 25 bp, Homo sapien
gggagctgccgatgtagggcgagtt

SEQ ID NO: 4710279 - DNA, 25 bp, Homo sapien
ttgtccagccgcaggcagcagaagg

SEQ ID NO: 4710280 - DNA, 25 bp, Homo sapien
cttgtccagccgcaggcagcagaag

SEQ ID NO: 4710281 - DNA, 25 bp, Homo sapien
tgaagttgtacagcccattgccggc

SEQ ID NO: 4710282 - DNA, 25 bp, Homo sapien
tcttgaacccgtaggccttggcgtc

SEQ ID NO: 4710283 - DNA, 25 bp, Homo sapien
tccttgcgggatctgtagtaggccc

SEQ ID NO: 4710284 - DNA, 25 bp, Homo sapien
ccgtctctgccgagacgatgatcag

SEQ ID NO: 4710285 - DNA, 25 bp, Homo sapien
atgtagtagaccatggggaagcagc

SEQ ID NO: 4710286 - DNA, 25 bp, Homo sapien
agccctccatgtagtagaccatggg

SEQ ID NO: 4710287 - DNA, 25 bp, Homo sapien
cagagccctccatgtagtagaccat

SEQ ID NO: 4710288 - DNA, 25 bp, Homo sapien
tgtagtagaccatggggaagcagca

SEQ ID NO: 4710289 - DNA, 25 bp, Homo sapien
ttggcgtccgccatgtagtcctcct

SEQ ID NO: 4710290 - DNA, 25 bp, Homo sapien
tcggcgctcatggtgctctccttgt

SEQ ID NO: 4710291 - DNA, 25 bp, Homo sapien
cacgttgacgatggtcttggcgtcc

SEQ ID NO: 4710292 - DNA, 25 bp, Homo sapien
ggttgtccgcatagatgatgccaca

SEQ ID NO: 4710293 - DNA, 25 bp, Homo sapien
tggcgcggaactgcatgaagcgcat

SEQ ID NO: 4710294 - DNA, 25 bp, Homo sapien
catgaagcgcatgttggaagggtgg

SEQ ID NO: 4710295 - DNA, 25 bp, Homo sapien
ccttggcgcggaactgcatgaagcg

SEQ ID NO: 4710296 - DNA, 25 bp, Homo sapien
gtccttggcgcggaactgcatgaag

SEQ ID NO: 4710297 - DNA, 25 bp, Homo sapien
cggcgaacggcaggcggaacatgaa

SEQ ID NO: 4710298 - DNA, 25 bp, Homo sapien
cagtgtgtccaacatgctgatgctg

SEQ ID NO: 4710299 - DNA, 25 bp, Homo sapien
acatgctgatgctgaagacgcggcc

SEQ ID NO: 4710300 - DNA, 25 bp, Homo sapien
ggttggagccattctctcgctccct

SEQ ID NO: 4710301 - DNA, 25 bp, Homo sapien
ggtgatcatgtagtccttcacgaag

SEQ ID NO: 4710302 - DNA, 25 bp, Homo sapien
gcccggcgtggtgtccaggcccagc

SEQ ID NO: 4710303 - DNA, 25 bp, Homo sapien
gatggtgatcatgtagtccttcacg

SEQ ID NO: 4710304 - DNA, 25 bp, Homo sapien
tgatcatgtagtccttcacgaagga

SEQ ID NO: 4710305 - DNA, 25 bp, Homo sapien
tgcggatccacaggtcgccctcggt

SEQ ID NO: 4710306 - DNA, 25 bp, Homo sapien
gtggctctctgtccggtagatgcca

SEQ ID NO: 4710307 - DNA, 25 bp, Homo sapien
tctctgtccggtagatgccaatggg

SEQ ID NO: 4710308 - DNA, 25 bp, Homo sapien
aggcggccgtacgtgcggatccaca

SEQ ID NO: 4710309 - DNA, 25 bp, Homo sapien
gacaggggctgccacagtcccagcc

SEQ ID NO: 4710310 - DNA, 25 bp, Homo sapien
agtcccagcccccaggctgccccag

SEQ ID NO: 4710311 - DNA, 25 bp, Homo sapien
aggacaggggctgccacagtcccag

SEQ ID NO: 4710312 - DNA, 25 bp, Homo sapien
tcccagcccccaggctgccccagaa

SEQ ID NO: 4710313 - DNA, 25 bp, Homo sapien
gatgagccctgatccctcttgcaaa

SEQ ID NO: 4710314 - DNA, 25 bp, Homo sapien
tggtcaagggattcgccaggctgct

SEQ ID NO: 4710315 - DNA, 25 bp, Homo sapien
aagaggtaggcatcccacctgggtg

SEQ ID NO: 4710316 - DNA, 25 bp, Homo sapien
gaagctgcgatgttctggtgctccg

SEQ ID NO: 4710317 - DNA, 25 bp, Homo sapien
cctggcgctcagagcgccggtacag

SEQ ID NO: 4710318 - DNA, 25 bp, Homo sapien
tcttgcgccgtagcagtgggtgctc

SEQ ID NO: 4710319 - DNA, 25 bp, Homo sapien
ctgcttgggcgccttgcggctcagc

SEQ ID NO: 4710320 - DNA, 25 bp, Homo sapien
cagggccccttcacttcccgtgtgt

SEQ ID NO: 4710321 - DNA, 25 bp, Homo sapien
gcgagtcggtcaccagaaaggcagt

SEQ ID NO: 4710322 - DNA, 25 bp, Homo sapien
agagaatatcagcaagcgaggtgcg

SEQ ID NO: 4710323 - DNA, 25 bp, Homo sapien
gggcggccggcacagtgggcgggtg

SEQ ID NO: 4710324 - DNA, 25 bp, Homo sapien
agctgcacgggaggccggccaccag

SEQ ID NO: 4710325 - DNA, 25 bp, Homo sapien
aatatcccaggtttacccgattcat

SEQ ID NO: 4710326 - DNA, 25 bp, Homo sapien
ctggctgttaaatttgctacgtcct

SEQ ID NO: 4710327 - DNA, 25 bp, Homo sapien
cgattcatgacatcactggctgtta

SEQ ID NO: 4710328 - DNA, 25 bp, Homo sapien
caggtttacccgattcatgacatca

SEQ ID NO: 4710329 - DNA, 25 bp, Homo sapien
gccggcggtgaagggttggcgagcc

SEQ ID NO: 4710330 - DNA, 25 bp, Homo sapien
gagccccgttgtgcggtggtcggca

SEQ ID NO: 4710331 - DNA, 25 bp, Homo sapien
ttgtgcggtggtcggcacccgccag

SEQ ID NO: 4710332 - DNA, 25 bp, Homo sapien
gccgggatggcgcagcaaggctgcc

SEQ ID NO: 4710333 - DNA, 25 bp, Homo sapien
tgtcccacagggtgagaacggtcct

SEQ ID NO: 4710334 - DNA, 25 bp, Homo sapien
gctttgtgacgagcacccagtggga

SEQ ID NO: 4710335 - DNA, 25 bp, Homo sapien
gatggtcgcagaggactagcttcgc

SEQ ID NO: 4710336 - DNA, 25 bp, Homo sapien
ccatctgatggtgtctacgggaagc

SEQ ID NO: 4710337 - DNA, 25 bp, Homo sapien
tgctaggtggcatcgcagcaaaggg

SEQ ID NO: 4710338 - DNA, 25 bp, Homo sapien
ctctggtgctaggtggcatcgcagc

SEQ ID NO: 4710339 - DNA, 25 bp, Homo sapien
catcgcagcaaaggggtggccctga

SEQ ID NO: 4710340 - DNA, 25 bp, Homo sapien
ctggtgctaggtggcatcgcagcaa

SEQ ID NO: 4710341 - DNA, 25 bp, Homo sapien
agctgagtctttccggccttcctga

SEQ ID NO: 4710342 - DNA, 25 bp, Homo sapien
gacacagccgggcagacgtcacccc

SEQ ID NO: 4710343 - DNA, 25 bp, Homo sapien
gatgagctgagtctttccggccttc

SEQ ID NO: 4710344 - DNA, 25 bp, Homo sapien
tccctgaccgacacctgtcccatct

SEQ ID NO: 4710345 - DNA, 25 bp, Homo sapien
ggtgttctggtggtcgttcatctcg

SEQ ID NO: 4710346 - DNA, 25 bp, Homo sapien
ggctccagcctcgtgtcgggcggag

SEQ ID NO: 4710347 - DNA, 25 bp, Homo sapien
gatgaggacgtaggagagggtgttc

SEQ ID NO: 4710348 - DNA, 25 bp, Homo sapien
tcgggcggagggttgatgaggacgt

SEQ ID NO: 4710349 - DNA, 25 bp, Homo sapien
ggttgcaggacgacagcttgtggct

SEQ ID NO: 4710350 - DNA, 25 bp, Homo sapien
ccagggggtcggagcggatgagata

SEQ ID NO: 4710351 - DNA, 25 bp, Homo sapien
ctgctcttccggctctgggagctgc

SEQ ID NO: 4710352 - DNA, 25 bp, Homo sapien
tcagagctgtgtctcgtcgcgagtc

SEQ ID NO: 4710353 - DNA, 25 bp, Homo sapien
ttcagaaaggtcctcggcgacaggg

SEQ ID NO: 4710354 - DNA, 25 bp, Homo sapien
gatcccaggaacgtgatagacccca

SEQ ID NO: 4710355 - DNA, 25 bp, Homo sapien
agatgagttctgtgccactgcgggc

SEQ ID NO: 4710356 - DNA, 25 bp, Homo sapien
ccttggaaacacgagcagggcgact

SEQ ID NO: 4710357 - DNA, 25 bp, Homo sapien
tcactgttcgttgcgagtaagcact

SEQ ID NO: 4710358 - DNA, 25 bp, Homo sapien
gacaagctgctctacccatttagga

SEQ ID NO: 4710359 - DNA, 25 bp, Homo sapien
ggaaaattgcattcccatgggacgt

SEQ ID NO: 4710360 - DNA, 25 bp, Homo sapien
taatgattgacagaagcgtccctgc

SEQ ID NO: 4710361 - DNA, 25 bp, Homo sapien
tgagtcgtgtacataaggagggaac

SEQ ID NO: 4710362 - DNA, 25 bp, Homo sapien
cagctgccggaagattctggagcca

SEQ ID NO: 4710363 - DNA, 25 bp, Homo sapien
tatatatcgtgttcgacacagccgc

SEQ ID NO: 4710364 - DNA, 25 bp, Homo sapien
tgcttctgtggagcgcggacattcc

SEQ ID NO: 4710365 - DNA, 25 bp, Homo sapien
tcatttaaagtaggcaagccgagcc

SEQ ID NO: 4710366 - DNA, 25 bp, Homo sapien
cagctgtaatctcgtgactatggga

SEQ ID NO: 4710367 - DNA, 25 bp, Homo sapien
aagatgatgacttctggcacgcggt

SEQ ID NO: 4710368 - DNA, 25 bp, Homo sapien
gcaaagcctgtcttccgctagaaca

SEQ ID NO: 4710369 - DNA, 25 bp, Homo sapien
aaacaagccgattattcacaatgcc

SEQ ID NO: 4710370 - DNA, 25 bp, Homo sapien
taaatcaaacaagccgattattcac

SEQ ID NO: 4710371 - DNA, 25 bp, Homo sapien
ttattcacaatgccatatcccattg

SEQ ID NO: 4710372 - DNA, 25 bp, Homo sapien
cccagtagtaaatcaaacaagccga

SEQ ID NO: 4710373 - DNA, 25 bp, Homo sapien
gatcacttgggccttggagttccag

SEQ ID NO: 4710374 - DNA, 25 bp, Homo sapien
tggctcacacccatgattccaggac

SEQ ID NO: 4710375 - DNA, 25 bp, Homo sapien
acttgggccttggagttccagacca

SEQ ID NO: 4710376 - DNA, 25 bp, Homo sapien
ggctcacacccatgattccaggact

SEQ ID NO: 4710377 - DNA, 25 bp, Homo sapien
gaatccgttcatgaaccgtcgtctg

SEQ ID NO: 4710378 - DNA, 25 bp, Homo sapien
cagaacccgagagcgttcattccgg

SEQ ID NO: 4710379 - DNA, 25 bp, Homo sapien
ggtacttgtctgtcggaatccgttc

SEQ ID NO: 4710380 - DNA, 25 bp, Homo sapien
gctgataacttgagccggactcagt

SEQ ID NO: 4710381 - DNA, 25 bp, Homo sapien
gatgccgagcgcctttgaaatgccc

SEQ ID NO: 4710382 - DNA, 25 bp, Homo sapien
tctgtaacggttagagaaaagcata

SEQ ID NO: 4710383 - DNA, 25 bp, Homo sapien
actttttaaggcaaactggatctcg

SEQ ID NO: 4710384 - DNA, 25 bp, Homo sapien
gccctggtttgtcttcattcgtatt

SEQ ID NO: 4710385 - DNA, 25 bp, Homo sapien
gaaaccatcagtacgctgcagcagg

SEQ ID NO: 4710386 - DNA, 25 bp, Homo sapien
tcaggccggagcactttgcaaagga

SEQ ID NO: 4710387 - DNA, 25 bp, Homo sapien
aaaggagtactctcagcacaacggg

SEQ ID NO: 4710388 - DNA, 25 bp, Homo sapien
tcaacagctgtgagaccaagtccag

SEQ ID NO: 4710389 - DNA, 25 bp, Homo sapien
ttcagagccgtggactctcctcagg

SEQ ID NO: 4710390 - DNA, 25 bp, Homo sapien
cttccttcatgtaggcagggccgat

SEQ ID NO: 4710391 - DNA, 25 bp, Homo sapien
aagagtcggccaaactgcaggagga

SEQ ID NO: 4710392 - DNA, 25 bp, Homo sapien
gagcacgatttcatgggtgaggccc

SEQ ID NO: 4710393 - DNA, 25 bp, Homo sapien
cactgatacctgtaggccatgggat

SEQ ID NO: 4710394 - DNA, 25 bp, Homo sapien
gctgacttgccagagactcctgtgg

SEQ ID NO: 4710395 - DNA, 25 bp, Homo sapien
tcttatgggtgcactcggccttagc

SEQ ID NO: 4710396 - DNA, 25 bp, Homo sapien
tgtggctctacagtcccgggatctt

SEQ ID NO: 4710397 - DNA, 25 bp, Homo sapien
tgcgccctgccagctcttcttattg

SEQ ID NO: 4710398 - DNA, 25 bp, Homo sapien
ccctgccagctcttcttattgcatt

SEQ ID NO: 4710399 - DNA, 25 bp, Homo sapien
gccagctcttcttattgcattgatc

SEQ ID NO: 4710400 - DNA, 25 bp, Homo sapien
ctgccagctcttcttattgcattga

SEQ ID NO: 4710401 - DNA, 25 bp, Homo sapien
gtcaattttagagtaagtgctacgt

SEQ ID NO: 4710402 - DNA, 25 bp, Homo sapien
caattttagagtaagtgctacgtgg

SEQ ID NO: 4710403 - DNA, 25 bp, Homo sapien
ttttagagtaagtgctacgtggtgc

SEQ ID NO: 4710404 - DNA, 25 bp, Homo sapien
tagagtaagtgctacgtggtgctga

SEQ ID NO: 4710405 - DNA, 25 bp, Homo sapien
tacaggtccgctatcgacgagagca

SEQ ID NO: 4710406 - DNA, 25 bp, Homo sapien
gttccaggcaaagtacgtaatccag

SEQ ID NO: 4710407 - DNA, 25 bp, Homo sapien
ttacccagtgtagccatgaagccca

SEQ ID NO: 4710408 - DNA, 25 bp, Homo sapien
gaagagacatcacatgcagagaccg

SEQ ID NO: 4710409 - DNA, 25 bp, Homo sapien
aataagaggctcacgcaggatggtt

SEQ ID NO: 4710410 - DNA, 25 bp, Homo sapien
ccccatgtgaggctgtattagcgcg

SEQ ID NO: 4710411 - DNA, 25 bp, Homo sapien
gaactagaaggttgtgtggccccat

SEQ ID NO: 4710412 - DNA, 25 bp, Homo sapien
taccggagcctttggttagtaagca

SEQ ID NO: 4710413 - DNA, 25 bp, Homo sapien
agcgagctgtactgccgtgtctgca

SEQ ID NO: 4710414 - DNA, 25 bp, Homo sapien
tatgagcaggagcacattaagccgc

SEQ ID NO: 4710415 - DNA, 25 bp, Homo sapien
gccgcctgttatcaagcttctcctg

SEQ ID NO: 4710416 - DNA, 25 bp, Homo sapien
cagagaccctttctacgttgaccag

SEQ ID NO: 4710417 - DNA, 25 bp, Homo sapien
tttgtgccgcgtccgcacagggtcg

SEQ ID NO: 4710418 - DNA, 25 bp, Homo sapien
agatcgccgccaacctgcagtggat

SEQ ID NO: 4710419 - DNA, 25 bp, Homo sapien
ggcttccgctcctatttcgggagtg

SEQ ID NO: 4710420 - DNA, 25 bp, Homo sapien
tgcagtggatctgcgccaaggccta

SEQ ID NO: 4710421 - DNA, 25 bp, Homo sapien
tggtatgtgaatgacggactgcctg

SEQ ID NO: 4710422 - DNA, 25 bp, Homo sapien
tccgtgtgctcagtcttccgaaggc

SEQ ID NO: 4710423 - DNA, 25 bp, Homo sapien
tactggagcttctagatagggcagc

SEQ ID NO: 4710424 - DNA, 25 bp, Homo sapien
tgaattgaagcctgcacgtgggttg

SEQ ID NO: 4710425 - DNA, 25 bp, Homo sapien
gtgcccagcctgataaaacctattt

SEQ ID NO: 4710426 - DNA, 25 bp, Homo sapien
caccggccaccaacctcagctaact

SEQ ID NO: 4710427 - DNA, 25 bp, Homo sapien
taagcacccacagctatcatcatac

SEQ ID NO: 4710428 - DNA, 25 bp, Homo sapien
tattttttaagcacccacagctatc

SEQ ID NO: 4710429 - DNA, 25 bp, Homo sapien
ctgaacgcaggggataagtgtcttt

SEQ ID NO: 4710430 - DNA, 25 bp, Homo sapien
aaatagaagatacttcctcggctgg

SEQ ID NO: 4710431 - DNA, 25 bp, Homo sapien
tctgacacgttttcatgataaacac

SEQ ID NO: 4710432 - DNA, 25 bp, Homo sapien
caccacattactagaacaaggaaaa

SEQ ID NO: 4710433 - DNA, 25 bp, Homo sapien
gaagcattatagcagccctgataat

SEQ ID NO: 4710434 - DNA, 25 bp, Homo sapien
actttaatgacatagagacttcttc

SEQ ID NO: 4710435 - DNA, 25 bp, Homo sapien
cctcaactgttctgccctggtcaaa

SEQ ID NO: 4710436 - DNA, 25 bp, Homo sapien
ccactgaggtctggcgtcagcatgg

SEQ ID NO: 4710437 - DNA, 25 bp, Homo sapien
tattttgctagtgaggagtccaggg

SEQ ID NO: 4710438 - DNA, 25 bp, Homo sapien
aatatacgtgttcccgttgcaaggc

SEQ ID NO: 4710439 - DNA, 25 bp, Homo sapien
tccagaggaaacagtaacgaagtgc

SEQ ID NO: 4710440 - DNA, 25 bp, Homo sapien
gggccatttcggactaggtcacgag

SEQ ID NO: 4710441 - DNA, 25 bp, Homo sapien
gatttaaaagatggcatcccctcca

SEQ ID NO: 4710442 - DNA, 25 bp, Homo sapien
tatatgggacctacctggatagcgc

SEQ ID NO: 4710443 - DNA, 25 bp, Homo sapien
catgaagagagggtccatatgcccg

SEQ ID NO: 4710444 - DNA, 25 bp, Homo sapien
taacaaatagagctagggaaggcca

SEQ ID NO: 4710445 - DNA, 25 bp, Homo sapien
tactgcatgtgcctctttatgaatg

SEQ ID NO: 4710446 - DNA, 25 bp, Homo sapien
aataatgtaatcaagcagctggtcc

SEQ ID NO: 4710447 - DNA, 25 bp, Homo sapien
tggagtcccggacactgctgatgct

SEQ ID NO: 4710448 - DNA, 25 bp, Homo sapien
gatgtgagacatccacgacttctgt

SEQ ID NO: 4710449 - DNA, 25 bp, Homo sapien
atagaatgcgttaagaagtgttccc

SEQ ID NO: 4710450 - DNA, 25 bp, Homo sapien
taatcctttcaatatgccgctgaag

SEQ ID NO: 4710451 - DNA, 25 bp, Homo sapien
gccgctgaagtttgccagtactttg

SEQ ID NO: 4710452 - DNA, 25 bp, Homo sapien
tatgaagggctcgtattagttcttc

SEQ ID NO: 4710453 - DNA, 25 bp, Homo sapien
tgctctggctagatcttaatagaag

SEQ ID NO: 4710454 - DNA, 25 bp, Homo sapien
gatcttaatagaagggacaaaagtg

SEQ ID NO: 4710455 - DNA, 25 bp, Homo sapien
tcttcatataggatcatataatctg

SEQ ID NO: 4710456 - DNA, 25 bp, Homo sapien
cattcactagttctaacagatcttc

SEQ ID NO: 4710457 - DNA, 25 bp, Homo sapien
tgtagctttcactgccttaatcttg

SEQ ID NO: 4710458 - DNA, 25 bp, Homo sapien
gactgttttggctagtcagggtccc

SEQ ID NO: 4710459 - DNA, 25 bp, Homo sapien
atctatctgtggtaaggtaagggcc

SEQ ID NO: 4710460 - DNA, 25 bp, Homo sapien
agtgccacattgcttactatagctg

SEQ ID NO: 4710461 - DNA, 25 bp, Homo sapien
ttaagcagtcacagcaatgcgggac

SEQ ID NO: 4710462 - DNA, 25 bp, Homo sapien
tattttcttgtgtggtgaggccgca

SEQ ID NO: 4710463 - DNA, 25 bp, Homo sapien
ccaagtggaataagctgccgtgaac

SEQ ID NO: 4710464 - DNA, 25 bp, Homo sapien
gcaagtcagcatgagagtcctccct

SEQ ID NO: 4710465 - DNA, 25 bp, Homo sapien
cacagaggccaatgtccctaagtct

SEQ ID NO: 4710466 - DNA, 25 bp, Homo sapien
tccttagggttcatagacatggtgt

SEQ ID NO: 4710467 - DNA, 25 bp, Homo sapien
ggtccgactcccttgcatacttgta

SEQ ID NO: 4710468 - DNA, 25 bp, Homo sapien
ggatctgagcctgccccgagggatt

SEQ ID NO: 4710469 - DNA, 25 bp, Homo sapien
tacaagtcatgagatcaggcagtcg

SEQ ID NO: 4710470 - DNA, 25 bp, Homo sapien
cccttcccagtggtagacaggatgc

SEQ ID NO: 4710471 - DNA, 25 bp, Homo sapien
caggcagtcgtccagtagggatcga

SEQ ID NO: 4710472 - DNA, 25 bp, Homo sapien
cacggtctcttggaggttgttagtc

SEQ ID NO: 4710473 - DNA, 25 bp, Homo sapien
tatgtgttactagacctgtcgccag

SEQ ID NO: 4710474 - DNA, 25 bp, Homo sapien
gatgagctgacggaaatcttcaaga

SEQ ID NO: 4710475 - DNA, 25 bp, Homo sapien
tcttcccttgaggtggcgccatgga

SEQ ID NO: 4710476 - DNA, 25 bp, Homo sapien
gagcacacctgtaagttatcctggc

SEQ ID NO: 4710477 - DNA, 25 bp, Homo sapien
agcgcacctggacacgaacacgtgt

SEQ ID NO: 4710478 - DNA, 25 bp, Homo sapien
gaaggcagcgtcatgcctgtagctc

SEQ ID NO: 4710479 - DNA, 25 bp, Homo sapien
cctgcgctgagaggagcaccgccag

SEQ ID NO: 4710480 - DNA, 25 bp, Homo sapien
tggtcctcggaggagcctcacgagc

SEQ ID NO: 4710481 - DNA, 25 bp, Homo sapien
tccctgggtggctgatcaattgtca

SEQ ID NO: 4710482 - DNA, 25 bp, Homo sapien
gctgatggccatccgcgttagtggc

SEQ ID NO: 4710483 - DNA, 25 bp, Homo sapien
tggtctgagactgaatgaggccctg

SEQ ID NO: 4710484 - DNA, 25 bp, Homo sapien
gactctggcgtcctaggtttggtga

SEQ ID NO: 4710485 - DNA, 25 bp, Homo sapien
taggaattactacgcgggcgccact

SEQ ID NO: 4710486 - DNA, 25 bp, Homo sapien
tggactcggcagaagtagtgctaac

SEQ ID NO: 4710487 - DNA, 25 bp, Homo sapien
ggctaatcgctagacaatcccctgt

SEQ ID NO: 4710488 - DNA, 25 bp, Homo sapien
gaagcactacaaagcgtctgagcag

SEQ ID NO: 4710489 - DNA, 25 bp, Homo sapien
tgatgcctgcgcagggacacaggga

SEQ ID NO: 4710490 - DNA, 25 bp, Homo sapien
caggcccgggaacgcaggatgagga

SEQ ID NO: 4710491 - DNA, 25 bp, Homo sapien
ccacaggctttcagacccgttctct

SEQ ID NO: 4710492 - DNA, 25 bp, Homo sapien
gacattcgggacgtgtccagctcca

SEQ ID NO: 4710493 - DNA, 25 bp, Homo sapien
ccaggtcctctaggccccctccagt

SEQ ID NO: 4710494 - DNA, 25 bp, Homo sapien
gccccctccagtctcgcctgctgct

SEQ ID NO: 4710495 - DNA, 25 bp, Homo sapien
ctccagtctcgcctgctgctggcac

SEQ ID NO: 4710496 - DNA, 25 bp, Homo sapien
gtggggcaggccaggtcctctaggc

SEQ ID NO: 4710497 - DNA, 25 bp, Homo sapien
cggtgatgacattaaccgtcacgta

SEQ ID NO: 4710498 - DNA, 25 bp, Homo sapien
agtgtggactctggccggatgggat

SEQ ID NO: 4710499 - DNA, 25 bp, Homo sapien
cacagagggctgtgcacacggtgat

SEQ ID NO: 4710500 - DNA, 25 bp, Homo sapien
taaccgtcacgtacttggcagaggc

SEQ ID NO: 4710501 - DNA, 25 bp, Homo sapien
gggcagctgcttggtccgatcccgg

SEQ ID NO: 4710502 - DNA, 25 bp, Homo sapien
gttttccagcaagcctggcccggct

SEQ ID NO: 4710503 - DNA, 25 bp, Homo sapien
ttgttttccagcaagcctggcccgg

SEQ ID NO: 4710504 - DNA, 25 bp, Homo sapien
tgcttggtccgatcccggggcttgt

SEQ ID NO: 4710505 - DNA, 25 bp, Homo sapien
acccctgtggcgaggccctaggaga

SEQ ID NO: 4710506 - DNA, 25 bp, Homo sapien
gttagacgcattcccactgggcggc

SEQ ID NO: 4710507 - DNA, 25 bp, Homo sapien
ttccccatcttcacttgcaaaacaa

SEQ ID NO: 4710508 - DNA, 25 bp, Homo sapien
cacacaggccagtgagcggtggccg

SEQ ID NO: 4710509 - DNA, 25 bp, Homo sapien
gggcacctatgcagggaccttgtaa

SEQ ID NO: 4710510 - DNA, 25 bp, Homo sapien
tgtaaacaattaggccactggcagc

SEQ ID NO: 4710511 - DNA, 25 bp, Homo sapien
cgagggaccgagtactagagctgct

SEQ ID NO: 4710512 - DNA, 25 bp, Homo sapien
tactgaactgctactgttgcctgag

SEQ ID NO: 4710513 - DNA, 25 bp, Homo sapien
ctcccagcagggcattcgtgcgggc

SEQ ID NO: 4710514 - DNA, 25 bp, Homo sapien
aacagctgcgggactggcatccgct

SEQ ID NO: 4710515 - DNA, 25 bp, Homo sapien
cctttgtcctgtcccttagagggtg

SEQ ID NO: 4710516 - DNA, 25 bp, Homo sapien
gaagccaggtctcgaggtgttaacg

SEQ ID NO: 4710517 - DNA, 25 bp, Homo sapien
cagcagcagtcaaggcgggatcctt

SEQ ID NO: 4710518 - DNA, 25 bp, Homo sapien
ccatgtcacgtatagttgccagtcc

SEQ ID NO: 4710519 - DNA, 25 bp, Homo sapien
tctggcagaacaaacacgtccgagt

SEQ ID NO: 4710520 - DNA, 25 bp, Homo sapien
tgcagcctttgagggtaacggccag

SEQ ID NO: 4710521 - DNA, 25 bp, Homo sapien
gtcacctccccagtcaagatataga

SEQ ID NO: 4710522 - DNA, 25 bp, Homo sapien
aaatacgtatagtcatgtagtcacc

SEQ ID NO: 4710523 - DNA, 25 bp, Homo sapien
acatcaggcttatagcatatgaaga

SEQ ID NO: 4710524 - DNA, 25 bp, Homo sapien
ttaacatcaggcttatagcatatga

SEQ ID NO: 4710525 - DNA, 25 bp, Homo sapien
agtccgcaccagataaacagcggcg

SEQ ID NO: 4710526 - DNA, 25 bp, Homo sapien
ggtggtctctctgcgcgagggagga

SEQ ID NO: 4710527 - DNA, 25 bp, Homo sapien
gctgggacccctgtagtcacctggg

SEQ ID NO: 4710528 - DNA, 25 bp, Homo sapien
agtggacgcggcttcagcggacttc

SEQ ID NO: 4710529 - DNA, 25 bp, Homo sapien
aagccgcctagggacctggctgaac

SEQ ID NO: 4710530 - DNA, 25 bp, Homo sapien
taccgccggctctgatggctgatgc

SEQ ID NO: 4710531 - DNA, 25 bp, Homo sapien
aagggctgatacacggaattgtgga

SEQ ID NO: 4710532 - DNA, 25 bp, Homo sapien
tgttccttagtgcagttaccgccgg

SEQ ID NO: 4710533 - DNA, 25 bp, Homo sapien
tttcgacatgttgcttgccgaggct

SEQ ID NO: 4710534 - DNA, 25 bp, Homo sapien
gtttcgacatgttgcttgccgaggc

SEQ ID NO: 4710535 - DNA, 25 bp, Homo sapien
cctgatgggcaggactatactctga

SEQ ID NO: 4710536 - DNA, 25 bp, Homo sapien
ggagtgcagcggtaagaccacagct

SEQ ID NO: 4710537 - DNA, 25 bp, Homo sapien
tgcatttcactttgagacaagcgcc

SEQ ID NO: 4710538 - DNA, 25 bp, Homo sapien
aaattgtagcacacacgcagctgct

SEQ ID NO: 4710539 - DNA, 25 bp, Homo sapien
cctagagttaggtcagggttcaggc

SEQ ID NO: 4710540 - DNA, 25 bp, Homo sapien
gcagggtgttttagcctgtagcacc

SEQ ID NO: 4710541 - DNA, 25 bp, Homo sapien
tcctttcggcaaagccacttggaat

SEQ ID NO: 4710542 - DNA, 25 bp, Homo sapien
tccagtgggacactcagctcagcat

SEQ ID NO: 4710543 - DNA, 25 bp, Homo sapien
tgtccagggaatgaccttggctgac

SEQ ID NO: 4710544 - DNA, 25 bp, Homo sapien
taggaagcaccagaaccctgaggct

SEQ ID NO: 4710545 - DNA, 25 bp, Homo sapien
gacgcagagctgaatagaacctaaa

SEQ ID NO: 4710546 - DNA, 25 bp, Homo sapien
tctgtggccaagatcaagggcctag

SEQ ID NO: 4710547 - DNA, 25 bp, Homo sapien
ctctgttgctgaaaagtggaatcca

SEQ ID NO: 4710548 - DNA, 25 bp, Homo sapien
tccgtgatcttggaagggcctgtcc

SEQ ID NO: 4710549 - DNA, 25 bp, Homo sapien
gctcggtcaagatgggccacgtgct

SEQ ID NO: 4710550 - DNA, 25 bp, Homo sapien
gccgctgcgtcgatggtgatattga

SEQ ID NO: 4710551 - DNA, 25 bp, Homo sapien
caggtaggcgggagcttccctgcgt

SEQ ID NO: 4710552 - DNA, 25 bp, Homo sapien
tgttaacgtattactcagagtcacc

SEQ ID NO: 4710553 - DNA, 25 bp, Homo sapien
aaatctctggccgtaaaccgtgctc

SEQ ID NO: 4710554 - DNA, 25 bp, Homo sapien
ctaatttatcggcagcttctgtgga

SEQ ID NO: 4710555 - DNA, 25 bp, Homo sapien
tgcctacagtacctgggcgttcgcg

SEQ ID NO: 4710556 - DNA, 25 bp, Homo sapien
gacgtgtacatcaagacgcgctggc

SEQ ID NO: 4710557 - DNA, 25 bp, Homo sapien
agcctgttcactgcggcgctctggg

SEQ ID NO: 4710558 - DNA, 25 bp, Homo sapien
aacgagctgctcgtctatggcatcc

SEQ ID NO: 4710559 - DNA, 25 bp, Homo sapien
gcctccccccagggtcagctgcggg

SEQ ID NO: 4710560 - DNA, 25 bp, Homo sapien
cgacgcctccccccagggtcagctg

SEQ ID NO: 4710561 - DNA, 25 bp, Homo sapien
acgcctccccccagggtcagctgcg

SEQ ID NO: 4710562 - DNA, 25 bp, Homo sapien
gccgacgcctccccccagggtcagc

SEQ ID NO: 4710563 - DNA, 25 bp, Homo sapien
gcgtttgagtggcaccgccatggcc

SEQ ID NO: 4710564 - DNA, 25 bp, Homo sapien
agctccgccgagtcgcgtttgagtg

SEQ ID NO: 4710565 - DNA, 25 bp, Homo sapien
tctgcagaaacgcagggacccggat

SEQ ID NO: 4710566 - DNA, 25 bp, Homo sapien
cgttgcgtctctgcggccccgagga

SEQ ID NO: 4710567 - DNA, 25 bp, Homo sapien
gctacggctcccacgctaggccaaa

SEQ ID NO: 4710568 - DNA, 25 bp, Homo sapien
cggccgcgcccgagagccccttcac

SEQ ID NO: 4710569 - DNA, 25 bp, Homo sapien
ggcgacgcgtgaaccacgccctcag

SEQ ID NO: 4710570 - DNA, 25 bp, Homo sapien
ggtggccgtcgagggacggcgctac

SEQ ID NO: 4710571 - DNA, 25 bp, Homo sapien
cgggtcgcagacacctcagtccggg

SEQ ID NO: 4710572 - DNA, 25 bp, Homo sapien
ggaccagacctgctcccggtccctg

SEQ ID NO: 4710573 - DNA, 25 bp, Homo sapien
ggccttcgcacacggccccgcgagg

SEQ ID NO: 4710574 - DNA, 25 bp, Homo sapien
aggccgcgcaggaggccttcgcaca

SEQ ID NO: 4710575 - DNA, 25 bp, Homo sapien
accgggcctcgcagctacacacccg

SEQ ID NO: 4710576 - DNA, 25 bp, Homo sapien
gcctcgcagctacacacccgatccg

SEQ ID NO: 4710577 - DNA, 25 bp, Homo sapien
ggcccaccgggcctcgcagctacac

SEQ ID NO: 4710578 - DNA, 25 bp, Homo sapien
tgccgacgtcgccgccggcccaccg

SEQ ID NO: 4710579 - DNA, 25 bp, Homo sapien
ccttgaatttgaagggccacccact

SEQ ID NO: 4710580 - DNA, 25 bp, Homo sapien
cctgcagccaatgacgggcctggtg

SEQ ID NO: 4710581 - DNA, 25 bp, Homo sapien
gaaccaggcgtgaggacactaacac

SEQ ID NO: 4710582 - DNA, 25 bp, Homo sapien
tcagggcggccctggtccaaaggac

SEQ ID NO: 4710583 - DNA, 25 bp, Homo sapien
cctggtggcctttgctcgtccagat

SEQ ID NO: 4710584 - DNA, 25 bp, Homo sapien
gaactcctgctcatgtcgggtaaag

SEQ ID NO: 4710585 - DNA, 25 bp, Homo sapien
cgtccagatgttcctcgaactcctg

SEQ ID NO: 4710586 - DNA, 25 bp, Homo sapien
tcatgtcgggtaaaggcggctctct

SEQ ID NO: 4710587 - DNA, 25 bp, Homo sapien
tgccgccagccatcggtaaagaaaa

SEQ ID NO: 4710588 - DNA, 25 bp, Homo sapien
gccgccagccatcggtaaagaaaac

SEQ ID NO: 4710589 - DNA, 25 bp, Homo sapien
tatttgccgccagccatcggtaaag

SEQ ID NO: 4710590 - DNA, 25 bp, Homo sapien
tttgccgccagccatcggtaaagaa

SEQ ID NO: 4710591 - DNA, 25 bp, Homo sapien
gaatgacaggcgtgaactagcgctt

SEQ ID NO: 4710592 - DNA, 25 bp, Homo sapien
caagagatctgaggccggaatgaca

SEQ ID NO: 4710593 - DNA, 25 bp, Homo sapien
aggccatgttgccagccaggtcgcc

SEQ ID NO: 4710594 - DNA, 25 bp, Homo sapien
ctcaatagctaaacgtgtggatctg

SEQ ID NO: 4710595 - DNA, 25 bp, Homo sapien
gggtgaccacctgctttacacgcca

SEQ ID NO: 4710596 - DNA, 25 bp, Homo sapien
gggcgccatctcacggtgccggcgt

SEQ ID NO: 4710597 - DNA, 25 bp, Homo sapien
cagcacgcgaaaagtcgagtgacgg

SEQ ID NO: 4710598 - DNA, 25 bp, Homo sapien
tatctttggttagtttgtctctaat

SEQ ID NO: 4710599 - DNA, 25 bp, Homo sapien
caggtgtgagccctgatccatggac

SEQ ID NO: 4710600 - DNA, 25 bp, Homo sapien
tgagccctgatccatggacatgcga

SEQ ID NO: 4710601 - DNA, 25 bp, Homo sapien
tgatccatggacatgcgaccaccct

SEQ ID NO: 4710602 - DNA, 25 bp, Homo sapien
tgggccaggtgtgagccctgatcca

SEQ ID NO: 4710603 - DNA, 25 bp, Homo sapien
gaccatatgtctgacatggcacttg

SEQ ID NO: 4710604 - DNA, 25 bp, Homo sapien
gaagaccatatgtctgacatggcac

SEQ ID NO: 4710605 - DNA, 25 bp, Homo sapien
tatgtctgacatggcacttgccacc

SEQ ID NO: 4710606 - DNA, 25 bp, Homo sapien
ctgtatgaagaccatatgtctgaca

SEQ ID NO: 4710607 - DNA, 25 bp, Homo sapien
agtacgcgcattggcagctttgttc

SEQ ID NO: 4710608 - DNA, 25 bp, Homo sapien
cattggcagctttgttctgacggcc

SEQ ID NO: 4710609 - DNA, 25 bp, Homo sapien
ctttaaaagtacgcgcattggcagc

SEQ ID NO: 4710610 - DNA, 25 bp, Homo sapien
gcagctttgttctgacggccacacc

SEQ ID NO: 4710611 - DNA, 25 bp, Homo sapien
ggcagtgggttcacctgaccctgtt

SEQ ID NO: 4710612 - DNA, 25 bp, Homo sapien
tttagcagcagaagcttcaaggcct

SEQ ID NO: 4710613 - DNA, 25 bp, Homo sapien
ggcctatgaaccacttttgactcag

SEQ ID NO: 4710614 - DNA, 25 bp, Homo sapien
accatgaccggcctatgaaccactt

SEQ ID NO: 4710615 - DNA, 25 bp, Homo sapien
acagctgcaccctttgggaattcag

SEQ ID NO: 4710616 - DNA, 25 bp, Homo sapien
atcaacacagacaaggcgacaaggg

SEQ ID NO: 4710617 - DNA, 25 bp, Homo sapien
cagacaaggcgacaaggggacagct

SEQ ID NO: 4710618 - DNA, 25 bp, Homo sapien
ggggacagctgcaccctttgggaat

SEQ ID NO: 4710619 - DNA, 25 bp, Homo sapien
cccaagattgaaggcgcctcccaga

SEQ ID NO: 4710620 - DNA, 25 bp, Homo sapien
gtcctgaagggcgagtaggagctcg

SEQ ID NO: 4710621 - DNA, 25 bp, Homo sapien
ggcgagtaggagctcggaagatgga

SEQ ID NO: 4710622 - DNA, 25 bp, Homo sapien
gggcagcccaagattgaaggcgcct

SEQ ID NO: 4710623 - DNA, 25 bp, Homo sapien
cggagacacaggccaccaacaggcg

SEQ ID NO: 4710624 - DNA, 25 bp, Homo sapien
gagacacaggccaccaacaggcggg

SEQ ID NO: 4710625 - DNA, 25 bp, Homo sapien
acacaggccaccaacaggcgggggt

SEQ ID NO: 4710626 - DNA, 25 bp, Homo sapien
agcggagacacaggccaccaacagg

SEQ ID NO: 4710627 - DNA, 25 bp, Homo sapien
tacttgcgctgtgcacgcatggact

SEQ ID NO: 4710628 - DNA, 25 bp, Homo sapien
atggactgggtcacgaggccaaaac

SEQ ID NO: 4710629 - DNA, 25 bp, Homo sapien
tcacgaggccaaaacccacggtggc

SEQ ID NO: 4710630 - DNA, 25 bp, Homo sapien
acccacggtggccacggcaagagag

SEQ ID NO: 4710631 - DNA, 25 bp, Homo sapien
tgaacttgaagtcgcactggctctg

SEQ ID NO: 4710632 - DNA, 25 bp, Homo sapien
tcagcccagaaactgtgcagagtcc

SEQ ID NO: 4710633 - DNA, 25 bp, Homo sapien
gaagccagcacagtttcgcagaaaa

SEQ ID NO: 4710634 - DNA, 25 bp, Homo sapien
tctatctggttgcaggacagtcaca

SEQ ID NO: 4710635 - DNA, 25 bp, Homo sapien
atttatttgggcctgacagttttat

SEQ ID NO: 4710636 - DNA, 25 bp, Homo sapien
ccaggtggaaagagagctggttctc

SEQ ID NO: 4710637 - DNA, 25 bp, Homo sapien
aacagcctcaccgtctctcagaaga

SEQ ID NO: 4710638 - DNA, 25 bp, Homo sapien
ctgcgttggaagtggccaacgccag

SEQ ID NO: 4710639 - DNA, 25 bp, Homo sapien
gagggtggcgatggcgggacgcagg

SEQ ID NO: 4710640 - DNA, 25 bp, Homo sapien
ttggaagtggccaacgccaggcctg

SEQ ID NO: 4710641 - DNA, 25 bp, Homo sapien
gctcctccctgcgaggggtgctttc

SEQ ID NO: 4710642 - DNA, 25 bp, Homo sapien
cgagctcctccctgcgaggggtgct

SEQ ID NO: 4710643 - DNA, 25 bp, Homo sapien
gagctcctccctgcgaggggtgctt

SEQ ID NO: 4710644 - DNA, 25 bp, Homo sapien
tcctccctgcgaggggtgctttcag

SEQ ID NO: 4710645 - DNA, 25 bp, Homo sapien
agtgtcttccttccagggacatcac

SEQ ID NO: 4710646 - DNA, 25 bp, Homo sapien
cacacgcgggtttgtcctttggctg

SEQ ID NO: 4710647 - DNA, 25 bp, Homo sapien
tgcacctggctgcggcatgccagtg

SEQ ID NO: 4710648 - DNA, 25 bp, Homo sapien
ctgcgagcgccgcagccaggcccac

SEQ ID NO: 4710649 - DNA, 25 bp, Homo sapien
cacctcctctgcttgcagggtgcat

SEQ ID NO: 4710650 - DNA, 25 bp, Homo sapien
ccacgccacctcctctgcttgcagg

SEQ ID NO: 4710651 - DNA, 25 bp, Homo sapien
caggcccacgccacctcctctgctt

SEQ ID NO: 4710652 - DNA, 25 bp, Homo sapien
ctgtggagccgtggcagggtgacag

SEQ ID NO: 4710653 - DNA, 25 bp, Homo sapien
cagggtgacaggcagccggggtccc

SEQ ID NO: 4710654 - DNA, 25 bp, Homo sapien
gggtgacaggcagccggggtcccag

SEQ ID NO: 4710655 - DNA, 25 bp, Homo sapien
ggcagggtgacaggcagccggggtc

SEQ ID NO: 4710656 - DNA, 25 bp, Homo sapien
cgtgccgttctgtcgatgccctgat

SEQ ID NO: 4710657 - DNA, 25 bp, Homo sapien
taaatggcgagcgtgccgttctgtc

SEQ ID NO: 4710658 - DNA, 25 bp, Homo sapien
tgtcgatgccctgatcgggccctgg

SEQ ID NO: 4710659 - DNA, 25 bp, Homo sapien
gagtggcccacgctggcgtggccgc

SEQ ID NO: 4710660 - DNA, 25 bp, Homo sapien
gcacctgcgtgctccgagaggtcct

SEQ ID NO: 4710661 - DNA, 25 bp, Homo sapien
ggcctcagcacctgcgtgctccgag

SEQ ID NO: 4710662 - DNA, 25 bp, Homo sapien
accagccaggaatggggaccgtcct

SEQ ID NO: 4710663 - DNA, 25 bp, Homo sapien
gcgtgctccgagaggtcctccacat

SEQ ID NO: 4710664 - DNA, 25 bp, Homo sapien
cttggggatcgcaaaggcagccgcc

SEQ ID NO: 4710665 - DNA, 25 bp, Homo sapien
gaccttggggatcgcaaaggcagcc

SEQ ID NO: 4710666 - DNA, 25 bp, Homo sapien
ggagaccttggggatcgcaaaggca

SEQ ID NO: 4710667 - DNA, 25 bp, Homo sapien
tgggagaccttggggatcgcaaagg

SEQ ID NO: 4710668 - DNA, 25 bp, Homo sapien
ctgggctttggaggacgaggactct

SEQ ID NO: 4710669 - DNA, 25 bp, Homo sapien
tgcagaatccctcaatcgtgcttaa

SEQ ID NO: 4710670 - DNA, 25 bp, Homo sapien
tcgtgcttaagctactgggctttgg

SEQ ID NO: 4710671 - DNA, 25 bp, Homo sapien
ggaggacgaggactcttgggcacat

SEQ ID NO: 4710672 - DNA, 25 bp, Homo sapien
agccggacgggtcctccgatgactt

SEQ ID NO: 4710673 - DNA, 25 bp, Homo sapien
cagccggacgggtcctccgatgact

SEQ ID NO: 4710674 - DNA, 25 bp, Homo sapien
aaggacggcgaagccggaatgccgg

SEQ ID NO: 4710675 - DNA, 25 bp, Homo sapien
gcatcctcgttgtagaagcagcagc

SEQ ID NO: 4710676 - DNA, 25 bp, Homo sapien
tggaaagaaggacggcgaagccgga

SEQ ID NO: 4710677 - DNA, 25 bp, Homo sapien
gcccaggtcttgcatcctcgttgta

SEQ ID NO: 4710678 - DNA, 25 bp, Homo sapien
gggcagacagcaccaactctacgga

SEQ ID NO: 4710679 - DNA, 25 bp, Homo sapien
aagcctggggcagacagcaccaact

SEQ ID NO: 4710680 - DNA, 25 bp, Homo sapien
agcaccaactctacggaatgccggg

SEQ ID NO: 4710681 - DNA, 25 bp, Homo sapien
gacagcaccaactctacggaatgcc

SEQ ID NO: 4710682 - DNA, 25 bp, Homo sapien
cccacgggacgagtggtctttgtca

SEQ ID NO: 4710683 - DNA, 25 bp, Homo sapien
aagtccggtgccagattgggtcccg

SEQ ID NO: 4710684 - DNA, 25 bp, Homo sapien
gagtcgccccaaatctctcgatggc

SEQ ID NO: 4710685 - DNA, 25 bp, Homo sapien
tgggtcccggaattctactgacgag

SEQ ID NO: 4710686 - DNA, 25 bp, Homo sapien
cctggaggctgtcgtccacgtacat

SEQ ID NO: 4710687 - DNA, 25 bp, Homo sapien
tccctggaggctgtcgtccacgtac

SEQ ID NO: 4710688 - DNA, 25 bp, Homo sapien
cagtgccgggggttgaacagccctc

SEQ ID NO: 4710689 - DNA, 25 bp, Homo sapien
cctccctggaggctgtcgtccacgt

SEQ ID NO: 4710690 - DNA, 25 bp, Homo sapien
tcacccgtgtttaaaagagcagttg

SEQ ID NO: 4710691 - DNA, 25 bp, Homo sapien
ttccacttttccctggttatcagag

SEQ ID NO: 4710692 - DNA, 25 bp, Homo sapien
gtcagacgcgctcatcatcccaaat

SEQ ID NO: 4710693 - DNA, 25 bp, Homo sapien
gatggattgttgactgctggccact

SEQ ID NO: 4710694 - DNA, 25 bp, Homo sapien
ggaactgcagagactcccggcaggt

SEQ ID NO: 4710695 - DNA, 25 bp, Homo sapien
tcttttgtccacgagtggccctgtg

SEQ ID NO: 4710696 - DNA, 25 bp, Homo sapien
gacctttggtggctcacgggttgaa

SEQ ID NO: 4710697 - DNA, 25 bp, Homo sapien
ttgctcccaaggtcttttgtccacg

SEQ ID NO: 4710698 - DNA, 25 bp, Homo sapien
gcagcaggttccgctgagggaccct

SEQ ID NO: 4710699 - DNA, 25 bp, Homo sapien
gacattctcgggtgcaccaggccct

SEQ ID NO: 4710700 - DNA, 25 bp, Homo sapien
ctgtgaagtggatttgacattctcg

SEQ ID NO: 4710701 - DNA, 25 bp, Homo sapien
gccctgaccgcctggtcatatccag

SEQ ID NO: 4710702 - DNA, 25 bp, Homo sapien
acactggcgaagaccctggggcagc

SEQ ID NO: 4710703 - DNA, 25 bp, Homo sapien
tgaccccgctgtttccaggccgtgg

SEQ ID NO: 4710704 - DNA, 25 bp, Homo sapien
ccaggccgtggtcccacactggcga

SEQ ID NO: 4710705 - DNA, 25 bp, Homo sapien
cgcagcccaggcctcgtgcacattc

SEQ ID NO: 4710706 - DNA, 25 bp, Homo sapien
atctccatcggctgcctgcggtgga

SEQ ID NO: 4710707 - DNA, 25 bp, Homo sapien
tgcggtggaatcaccgacacaggct

SEQ ID NO: 4710708 - DNA, 25 bp, Homo sapien
catcggctgcctgcggtggaatcac

SEQ ID NO: 4710709 - DNA, 25 bp, Homo sapien
ggctgcctgcggtggaatcaccgac

SEQ ID NO: 4710710 - DNA, 25 bp, Homo sapien
caggttcaccaaattgtcaattaag

SEQ ID NO: 4710711 - DNA, 25 bp, Homo sapien
gggattttgcaaacaggttcaccaa

SEQ ID NO: 4710712 - DNA, 25 bp, Homo sapien
cccctggggagcgattgaggccaag

SEQ ID NO: 4710713 - DNA, 25 bp, Homo sapien
cgcacaggccgccatcgatcggggc

SEQ ID NO: 4710714 - DNA, 25 bp, Homo sapien
cccaggcccgtggggaagatggatg

SEQ ID NO: 4710715 - DNA, 25 bp, Homo sapien
tcacccaggcccgtggggaagatgg

SEQ ID NO: 4710716 - DNA, 25 bp, Homo sapien
tgtcacccaggcccgtggggaagat

SEQ ID NO: 4710717 - DNA, 25 bp, Homo sapien
gtgtcacccaggcccgtggggaaga

SEQ ID NO: 4710718 - DNA, 25 bp, Homo sapien
tcactcgagcgtgccgggcctgggc

SEQ ID NO: 4710719 - DNA, 25 bp, Homo sapien
gccgggtcccatggggtcacagtgg

SEQ ID NO: 4710720 - DNA, 25 bp, Homo sapien
tggagtcactcgagcgtgccgggcc

SEQ ID NO: 4710721 - DNA, 25 bp, Homo sapien
tgggtggagtcactcgagcgtgccg

SEQ ID NO: 4710722 - DNA, 25 bp, Homo sapien
cctgcctggaccccttctgtgtggc

SEQ ID NO: 4710723 - DNA, 25 bp, Homo sapien
tcagtgcctgtgacctgcctggacc

SEQ ID NO: 4710724 - DNA, 25 bp, Homo sapien
tgcctggaccccttctgtgtggccc

SEQ ID NO: 4710725 - DNA, 25 bp, Homo sapien
cctggaccccttctgtgtggcccac

SEQ ID NO: 4710726 - DNA, 25 bp, Homo sapien
tgctcatcctgggtatcatcagcca

SEQ ID NO: 4710727 - DNA, 25 bp, Homo sapien
cttgctcatcctgggtatcatcagc

SEQ ID NO: 4710728 - DNA, 25 bp, Homo sapien
gctcatcctgggtatcatcagccag

SEQ ID NO: 4710729 - DNA, 25 bp, Homo sapien
ctcatcctgggtatcatcagccagg

SEQ ID NO: 4710730 - DNA, 25 bp, Homo sapien
gctggggtccagggagcccacattc

SEQ ID NO: 4710731 - DNA, 25 bp, Homo sapien
tcaacccggctgagcctgtggctct

SEQ ID NO: 4710732 - DNA, 25 bp, Homo sapien
cctgtggctctggtttcagggcggt

SEQ ID NO: 4710733 - DNA, 25 bp, Homo sapien
ctgagcctgtggctctggtttcagg

SEQ ID NO: 4710734 - DNA, 25 bp, Homo sapien
ctgccgagttctccgtaaggagatg

SEQ ID NO: 4710735 - DNA, 25 bp, Homo sapien
tgcaaccctaagcacacgagccctg

SEQ ID NO: 4710736 - DNA, 25 bp, Homo sapien
gaggcccctgccgagttctccgtaa

SEQ ID NO: 4710737 - DNA, 25 bp, Homo sapien
gcccctgccgagttctccgtaagga

SEQ ID NO: 4710738 - DNA, 25 bp, Homo sapien
agacatcgtgaagagcccagctcgg

SEQ ID NO: 4710739 - DNA, 25 bp, Homo sapien
gctctgttgattgtgaagcccacga

SEQ ID NO: 4710740 - DNA, 25 bp, Homo sapien
tgcctacaatgctggcgctcttcct

SEQ ID NO: 4710741 - DNA, 25 bp, Homo sapien
ttggcacccgcggagtacgactctc

SEQ ID NO: 4710742 - DNA, 25 bp, Homo sapien
cagtctgagacttggcatccttgcc

SEQ ID NO: 4710743 - DNA, 25 bp, Homo sapien
aggaagagcctctgacgcctggtca

SEQ ID NO: 4710744 - DNA, 25 bp, Homo sapien
tccttgcccgtgagccaggagtagg

SEQ ID NO: 4710745 - DNA, 25 bp, Homo sapien
gggactcagcacaaggggcctctgc

SEQ ID NO: 4710746 - DNA, 25 bp, Homo sapien
gcatctggggcttccttgcccccag

SEQ ID NO: 4710747 - DNA, 25 bp, Homo sapien
ccccacaaagatctcaatgccccag

SEQ ID NO: 4710748 - DNA, 25 bp, Homo sapien
cacaaagatctcaatgccccaggca

SEQ ID NO: 4710749 - DNA, 25 bp, Homo sapien
tcccacggacttgaggggcatctgg

SEQ ID NO: 4710750 - DNA, 25 bp, Homo sapien
caccgttttgtctgattccggcaag

SEQ ID NO: 4710751 - DNA, 25 bp, Homo sapien
tcaccgttttgtctgattccggcaa

SEQ ID NO: 4710752 - DNA, 25 bp, Homo sapien
ggtggcccagggacgtggccggcca

SEQ ID NO: 4710753 - DNA, 25 bp, Homo sapien
cactgcgaagaaggcaggccctggt

SEQ ID NO: 4710754 - DNA, 25 bp, Homo sapien
ctggtggccgcctggaccatccaac

SEQ ID NO: 4710755 - DNA, 25 bp, Homo sapien
gacgtggccggccactgcgaagaag

SEQ ID NO: 4710756 - DNA, 25 bp, Homo sapien
cggcgagagcggatgtgggaagagc

SEQ ID NO: 4710757 - DNA, 25 bp, Homo sapien
ctcggtccagggcagcaatatgatt

SEQ ID NO: 4710758 - DNA, 25 bp, Homo sapien
ctgggaagggcatcccggcgagagc

SEQ ID NO: 4710759 - DNA, 25 bp, Homo sapien
ccttgggttgcccagagggctgcct

SEQ ID NO: 4710760 - DNA, 25 bp, Homo sapien
cagcgcgacgggcatggacttcttg

SEQ ID NO: 4710761 - DNA, 25 bp, Homo sapien
aacggttagttggaatgcagtgttc

SEQ ID NO: 4710762 - DNA, 25 bp, Homo sapien
tcttgggtgcggcaatgacacggtt

SEQ ID NO: 4710763 - DNA, 25 bp, Homo sapien
tcttgtcactgaaatgaacggttag

SEQ ID NO: 4710764 - DNA, 25 bp, Homo sapien
cctggatcttggccatgctcatgag

SEQ ID NO: 4710765 - DNA, 25 bp, Homo sapien
ttatccctggatcttggccatgctc

SEQ ID NO: 4710766 - DNA, 25 bp, Homo sapien
atccctggatcttggccatgctcat

SEQ ID NO: 4710767 - DNA, 25 bp, Homo sapien
tggatcttggccatgctcatgagca

SEQ ID NO: 4710768 - DNA, 25 bp, Homo sapien
ccctgcacctcacacgagggagctg

SEQ ID NO: 4710769 - DNA, 25 bp, Homo sapien
tctgacctatccacggggagcagcg

SEQ ID NO: 4710770 - DNA, 25 bp, Homo sapien
tgaggtagaccacgctcagttctga

SEQ ID NO: 4710771 - DNA, 25 bp, Homo sapien
gctggatgaggtagaccacgctcag

SEQ ID NO: 4710772 - DNA, 25 bp, Homo sapien
gtgaaatagatgggaaagcaaccag

SEQ ID NO: 4710773 - DNA, 25 bp, Homo sapien
tggtgggacggaggtcaggcctgtg

SEQ ID NO: 4710774 - DNA, 25 bp, Homo sapien
tcagtggaaagagttccaccaggga

SEQ ID NO: 4710775 - DNA, 25 bp, Homo sapien
caaccaggaacagatcagtggaaag

SEQ ID NO: 4710776 - DNA, 25 bp, Homo sapien
ctgcaaggagggtctgctgagcatg

SEQ ID NO: 4710777 - DNA, 25 bp, Homo sapien
aaggagggtctgctgagcatgggcc

SEQ ID NO: 4710778 - DNA, 25 bp, Homo sapien
ggagggtctgctgagcatgggccat

SEQ ID NO: 4710779 - DNA, 25 bp, Homo sapien
gcaaggagggtctgctgagcatggg

SEQ ID NO: 4710780 - DNA, 25 bp, Homo sapien
aggccagagagtgtcgctgatgaaa

SEQ ID NO: 4710781 - DNA, 25 bp, Homo sapien
cagagagtgtcgctgatgaaaatgt

SEQ ID NO: 4710782 - DNA, 25 bp, Homo sapien
agcccagttcctcccgaagctgagg

SEQ ID NO: 4710783 - DNA, 25 bp, Homo sapien
agctgaggccagagagtgtcgctga

SEQ ID NO: 4710784 - DNA, 25 bp, Homo sapien
gtgcgtctccccaggggccggcaca

SEQ ID NO: 4710785 - DNA, 25 bp, Homo sapien
cccatggaggagagctgtctacctg

SEQ ID NO: 4710786 - DNA, 25 bp, Homo sapien
acagccctctgtccttgggcagcag

SEQ ID NO: 4710787 - DNA, 25 bp, Homo sapien
agcagccagtcctgtctccgggtgc

SEQ ID NO: 4710788 - DNA, 25 bp, Homo sapien
ctagcatctgccccatctccgcaca

SEQ ID NO: 4710789 - DNA, 25 bp, Homo sapien
tagcatctgccccatctccgcacac

SEQ ID NO: 4710790 - DNA, 25 bp, Homo sapien
acaggacgggcttcagatgtgcact

SEQ ID NO: 4710791 - DNA, 25 bp, Homo sapien
tggcacaggacgggcttcagatgtg

SEQ ID NO: 4710792 - DNA, 25 bp, Homo sapien
ctggcacaggacgggcttcagatgt

SEQ ID NO: 4710793 - DNA, 25 bp, Homo sapien
gcacaggacgggcttcagatgtgca

SEQ ID NO: 4710794 - DNA, 25 bp, Homo sapien
aggacgagctccacgtgacgcaggc

SEQ ID NO: 4710795 - DNA, 25 bp, Homo sapien
cagacccaggacgagctccacgtga

SEQ ID NO: 4710796 - DNA, 25 bp, Homo sapien
caggcacaggactggcttcaggtgt

SEQ ID NO: 4710797 - DNA, 25 bp, Homo sapien
acgtgacgcaggcacaggactggct

SEQ ID NO: 4710798 - DNA, 25 bp, Homo sapien
tgtcgccggcacaggacgggctcca

SEQ ID NO: 4710799 - DNA, 25 bp, Homo sapien
cacaggacgggctccaggtgacgcc

SEQ ID NO: 4710800 - DNA, 25 bp, Homo sapien
caggacgggcaccaggtgatgcagg

SEQ ID NO: 4710801 - DNA, 25 bp, Homo sapien
gacgggctccaggtgtggcacagga

SEQ ID NO: 4710802 - DNA, 25 bp, Homo sapien
catctgccgagtccttgccggtact

SEQ ID NO: 4710803 - DNA, 25 bp, Homo sapien
tttgtgttgccatgaataccgtcca

SEQ ID NO: 4710804 - DNA, 25 bp, Homo sapien
ttgggagcgtagctctactgaggca

SEQ ID NO: 4710805 - DNA, 25 bp, Homo sapien
gctccgggatgaatttgcgctggaa

SEQ ID NO: 4710806 - DNA, 25 bp, Homo sapien
ggccttacagccacgtccagggagc

SEQ ID NO: 4710807 - DNA, 25 bp, Homo sapien
ccagggagccgtctccgctgtgtca

SEQ ID NO: 4710808 - DNA, 25 bp, Homo sapien
gaagtaagacgggatggtttgctaa

SEQ ID NO: 4710809 - DNA, 25 bp, Homo sapien
ggtttgctaagagggccttacagcc

SEQ ID NO: 4710810 - DNA, 25 bp, Homo sapien
cccagaaatggcttaatgtagcccc

SEQ ID NO: 4710811 - DNA, 25 bp, Homo sapien
gcccagaaatggcttaatgtagccc

SEQ ID NO: 4710812 - DNA, 25 bp, Homo sapien
ccagaaatggcttaatgtagccccg

SEQ ID NO: 4710813 - DNA, 25 bp, Homo sapien
tcttgtctactcgactaggctgcag

SEQ ID NO: 4710814 - DNA, 25 bp, Homo sapien
gttgggagctggacacatccgacat

SEQ ID NO: 4710815 - DNA, 25 bp, Homo sapien
catccgacatctcttgaaggaaggg

SEQ ID NO: 4710816 - DNA, 25 bp, Homo sapien
tggagccatggcagttcattcctgt

SEQ ID NO: 4710817 - DNA, 25 bp, Homo sapien
tagtcacggtcacgcagctgagtga

SEQ ID NO: 4710818 - DNA, 25 bp, Homo sapien
ttgcgtgggatagtcacggtcacgc

SEQ ID NO: 4710819 - DNA, 25 bp, Homo sapien
cggtcacgcagctgagtgacaggcc

SEQ ID NO: 4710820 - DNA, 25 bp, Homo sapien
gtgacaggccgggatgggtgtccag

SEQ ID NO: 4710821 - DNA, 25 bp, Homo sapien
cctggaacacttcccagacatcccg

SEQ ID NO: 4710822 - DNA, 25 bp, Homo sapien
ctcatgggtgctaccccagtccagg

SEQ ID NO: 4710823 - DNA, 25 bp, Homo sapien
ctctgtccgtcacctgccctgggcc

SEQ ID NO: 4710824 - DNA, 25 bp, Homo sapien
tgccccggacttctcccctctcatg

SEQ ID NO: 4710825 - DNA, 25 bp, Homo sapien
acacacttctgagaccctggccaag

SEQ ID NO: 4710826 - DNA, 25 bp, Homo sapien
accctggccaagatcgggactctaa

SEQ ID NO: 4710827 - DNA, 25 bp, Homo sapien
aagatcgggactctaacctgccccg

SEQ ID NO: 4710828 - DNA, 25 bp, Homo sapien
gtcaccgcagccaaagctagccccg

SEQ ID NO: 4710829 - DNA, 25 bp, Homo sapien
tggtcaacaggtcaaagaagcactc

SEQ ID NO: 4710830 - DNA, 25 bp, Homo sapien
ctctggaacttggtcaacaggtcaa

SEQ ID NO: 4710831 - DNA, 25 bp, Homo sapien
tcaaagaagcactcctcgtccgaag

SEQ ID NO: 4710832 - DNA, 25 bp, Homo sapien
aagaagcactcctcgtccgaagacg

SEQ ID NO: 4710833 - DNA, 25 bp, Homo sapien
cctggccatcgtccaggggacaacg

SEQ ID NO: 4710834 - DNA, 25 bp, Homo sapien
tccaggggacaacgctggtcgtcca

SEQ ID NO: 4710835 - DNA, 25 bp, Homo sapien
cagccccggcctggccatcgtccag

SEQ ID NO: 4710836 - DNA, 25 bp, Homo sapien
cggcctggccatcgtccaggggaca

SEQ ID NO: 4710837 - DNA, 25 bp, Homo sapien
ctcggaggtgccctgcattgctgtg

SEQ ID NO: 4710838 - DNA, 25 bp, Homo sapien
ctgtgggtgattcgcagccccggca

SEQ ID NO: 4710839 - DNA, 25 bp, Homo sapien
atgttgaagaagtcgtcccccggct

SEQ ID NO: 4710840 - DNA, 25 bp, Homo sapien
aggtcgaagaattcctcggtctggg

SEQ ID NO: 4710841 - DNA, 25 bp, Homo sapien
agcgtgcactgttcacgggcttccc

SEQ ID NO: 4710842 - DNA, 25 bp, Homo sapien
gtcagcagcggtggttccagaggcc

SEQ ID NO: 4710843 - DNA, 25 bp, Homo sapien
agaggccagcgtgcactgttcacgg

SEQ ID NO: 4710844 - DNA, 25 bp, Homo sapien
gggctggtcagcagcggtggttcca

SEQ ID NO: 4710845 - DNA, 25 bp, Homo sapien
gacacagtgcagttggcggcctcac

SEQ ID NO: 4710846 - DNA, 25 bp, Homo sapien
ggacacagtgcagttggcggcctca

SEQ ID NO: 4710847 - DNA, 25 bp, Homo sapien
tggacacagtgcagttggcggcctc

SEQ ID NO: 4710848 - DNA, 25 bp, Homo sapien
tggtgggcagcgctggtcatcgatc

SEQ ID NO: 4710849 - DNA, 25 bp, Homo sapien
gctgctcgtccatgcgcttagcctg

SEQ ID NO: 4710850 - DNA, 25 bp, Homo sapien
gctgaagaagtcctcgtccggcatg

SEQ ID NO: 4710851 - DNA, 25 bp, Homo sapien
gaggtccacccgctgctcgtccatg

SEQ ID NO: 4710852 - DNA, 25 bp, Homo sapien
gaccggcgtccaggagtgggggcag

SEQ ID NO: 4710853 - DNA, 25 bp, Homo sapien
tgagaccggcgtccaggagtggggg

SEQ ID NO: 4710854 - DNA, 25 bp, Homo sapien
ctgtgagaccggcgtccaggagtgg

SEQ ID NO: 4710855 - DNA, 25 bp, Homo sapien
tgtgagaccggcgtccaggagtggg

SEQ ID NO: 4710856 - DNA, 25 bp, Homo sapien
cagtgcctgtcctcggcaatggcct

SEQ ID NO: 4710857 - DNA, 25 bp, Homo sapien
tgcctgtcctcggcaatggcctcgg

SEQ ID NO: 4710858 - DNA, 25 bp, Homo sapien
gggtcggggaggccgtggggctgca

SEQ ID NO: 4710859 - DNA, 25 bp, Homo sapien
gcaatggcctcgggaggacgtggct

SEQ ID NO: 4710860 - DNA, 25 bp, Homo sapien
cccgggatggaagcacgccctccca

SEQ ID NO: 4710861 - DNA, 25 bp, Homo sapien
ccgggatggaagcacgccctcccac

SEQ ID NO: 4710862 - DNA, 25 bp, Homo sapien
aggatgcgggagtctgacagcacca

SEQ ID NO: 4710863 - DNA, 25 bp, Homo sapien
agacagcagggtttcacatttggca

SEQ ID NO: 4710864 - DNA, 25 bp, Homo sapien
cagcagggtttcacatttggcaggg

SEQ ID NO: 4710865 - DNA, 25 bp, Homo sapien
gacagcaccaggtcggggccgacat

SEQ ID NO: 4710866 - DNA, 25 bp, Homo sapien
ttgacaacatggcacagacgtgagc

SEQ ID NO: 4710867 - DNA, 25 bp, Homo sapien
tcctaggatcccgaacttggtgccc

SEQ ID NO: 4710868 - DNA, 25 bp, Homo sapien
tctgctttagagataggcccggctc

SEQ ID NO: 4710869 - DNA, 25 bp, Homo sapien
ggttgagctgagtgaagcctcccca

SEQ ID NO: 4710870 - DNA, 25 bp, Homo sapien
tggaccctgtgtgcgtgtaccacca

SEQ ID NO: 4710871 - DNA, 25 bp, Homo sapien
ctgggccctgcacggttacttggac

SEQ ID NO: 4710872 - DNA, 25 bp, Homo sapien
tgctgcgcttccctggctgtgcgcg

SEQ ID NO: 4710873 - DNA, 25 bp, Homo sapien
cagaggctgtcccagccagtagcgt

SEQ ID NO: 4710874 - DNA, 25 bp, Homo sapien
cacagcgtctctccaagcaggttcc

SEQ ID NO: 4710875 - DNA, 25 bp, Homo sapien
acagcgtctctccaagcaggttcct

SEQ ID NO: 4710876 - DNA, 25 bp, Homo sapien
tcacagcgtctctccaagcaggttc

SEQ ID NO: 4710877 - DNA, 25 bp, Homo sapien
cagcgtctctccaagcaggttcctc

SEQ ID NO: 4710878 - DNA, 25 bp, Homo sapien
aattagagcaaggagagccgcttgg

SEQ ID NO: 4710879 - DNA, 25 bp, Homo sapien
cccctcctcttacggatggggagat

SEQ ID NO: 4710880 - DNA, 25 bp, Homo sapien
aggagagccgcttgggccaacccct

SEQ ID NO: 4710881 - DNA, 25 bp, Homo sapien
ctggaagtgcagaattagagcaagg

SEQ ID NO: 4710882 - DNA, 25 bp, Homo sapien
aactgtcctcttctcggctgagcca

SEQ ID NO: 4710883 - DNA, 25 bp, Homo sapien
tcctcttctcggctgagccaccggc

SEQ ID NO: 4710884 - DNA, 25 bp, Homo sapien
tcttctcggctgagccaccggcacc

SEQ ID NO: 4710885 - DNA, 25 bp, Homo sapien
aaactgtcctcttctcggctgagcc

SEQ ID NO: 4710886 - DNA, 25 bp, Homo sapien
cacatccggcccgtgggaggccggg

SEQ ID NO: 4710887 - DNA, 25 bp, Homo sapien
ggcgtgggctttgcctcgattaccc

SEQ ID NO: 4710888 - DNA, 25 bp, Homo sapien
agccaacaaccctctattattccca

SEQ ID NO: 4710889 - DNA, 25 bp, Homo sapien
ggactgccagctcacatccggcccg

SEQ ID NO: 4710890 - DNA, 25 bp, Homo sapien
gttctgggcagcgtaaccttcagca

SEQ ID NO: 4710891 - DNA, 25 bp, Homo sapien
ttccctcggtggacagcgctctgga

SEQ ID NO: 4710892 - DNA, 25 bp, Homo sapien
ttatgaaagcgagcaaacacagcag

SEQ ID NO: 4710893 - DNA, 25 bp, Homo sapien
cttgtctgtgcgcaggatgttcccg

SEQ ID NO: 4710894 - DNA, 25 bp, Homo sapien
tatcgaagagatcctgacggccaga

SEQ ID NO: 4710895 - DNA, 25 bp, Homo sapien
ggcacacaggccagcgtctgaagtg

SEQ ID NO: 4710896 - DNA, 25 bp, Homo sapien
caggtgcttggtggtacctggccct

SEQ ID NO: 4710897 - DNA, 25 bp, Homo sapien
tctctagcgtggaacttttttgccc

SEQ ID NO: 4710898 - DNA, 25 bp, Homo sapien
aggttgctgagtcgcgtgcagcccc

SEQ ID NO: 4710899 - DNA, 25 bp, Homo sapien
ggacagacccgtatctgacgctaca

SEQ ID NO: 4710900 - DNA, 25 bp, Homo sapien
taccagctcgtctacacctgcaagg

SEQ ID NO: 4710901 - DNA, 25 bp, Homo sapien
taaataaacagcacgggtgacccgc

SEQ ID NO: 4710902 - DNA, 25 bp, Homo sapien
cagagctccgacctggaagatggct

SEQ ID NO: 4710903 - DNA, 25 bp, Homo sapien
ccagtccttggcgaagtggcctaat

SEQ ID NO: 4710904 - DNA, 25 bp, Homo sapien
taaggtaaggcacggacagtgccca

SEQ ID NO: 4710905 - DNA, 25 bp, Homo sapien
gcctaatgggacatcttgactctct

SEQ ID NO: 4710906 - DNA, 25 bp, Homo sapien
tagcaggttgttctgggcatggagg

SEQ ID NO: 4710907 - DNA, 25 bp, Homo sapien
agcctagcaggttgttctgggcatg

SEQ ID NO: 4710908 - DNA, 25 bp, Homo sapien
gcctagcaggttgttctgggcatgg

SEQ ID NO: 4710909 - DNA, 25 bp, Homo sapien
cctagcaggttgttctgggcatgga

SEQ ID NO: 4710910 - DNA, 25 bp, Homo sapien
tcaagccgcgtccaaaatttatcaa

SEQ ID NO: 4710911 - DNA, 25 bp, Homo sapien
gtgctgcggtcacgaaggacgctta

SEQ ID NO: 4710912 - DNA, 25 bp, Homo sapien
ttagctatggacagtcagggtctcc

SEQ ID NO: 4710913 - DNA, 25 bp, Homo sapien
caagccgtcgtgtttgcacattcgc

SEQ ID NO: 4710914 - DNA, 25 bp, Homo sapien
gggataacgaggataacgacacttc

SEQ ID NO: 4710915 - DNA, 25 bp, Homo sapien
gataacgacacttctggaagggacg

SEQ ID NO: 4710916 - DNA, 25 bp, Homo sapien
cgacacttctggaagggacgtttct

SEQ ID NO: 4710917 - DNA, 25 bp, Homo sapien
ggatgcctcatgatggggataacga

SEQ ID NO: 4710918 - DNA, 25 bp, Homo sapien
gaccccgagagtggcctcagtcctc

SEQ ID NO: 4710919 - DNA, 25 bp, Homo sapien
ttgggggaccccgagagtggcctca

SEQ ID NO: 4710920 - DNA, 25 bp, Homo sapien
ggggaccccgagagtggcctcagtc

SEQ ID NO: 4710921 - DNA, 25 bp, Homo sapien
ggaccccgagagtggcctcagtcct

SEQ ID NO: 4710922 - DNA, 25 bp, Homo sapien
ggcagcccacacgctgaagtgcaca

SEQ ID NO: 4710923 - DNA, 25 bp, Homo sapien
tggcagcccacacgctgaagtgcac

SEQ ID NO: 4710924 - DNA, 25 bp, Homo sapien
gcagcccacacgctgaagtgcacag

SEQ ID NO: 4710925 - DNA, 25 bp, Homo sapien
gagcccaggaggacccctaactgtc

SEQ ID NO: 4710926 - DNA, 25 bp, Homo sapien
gagagcccaggaggacccctaactg

SEQ ID NO: 4710927 - DNA, 25 bp, Homo sapien
tgtggcattcccgagagcccaggag

SEQ ID NO: 4710928 - DNA, 25 bp, Homo sapien
ctggaatgtggcattcccgagagcc

SEQ ID NO: 4710929 - DNA, 25 bp, Homo sapien
tgcacactcgctcatgttgatggtg

SEQ ID NO: 4710930 - DNA, 25 bp, Homo sapien
gcctggtgccagctccggttcgctc

SEQ ID NO: 4710931 - DNA, 25 bp, Homo sapien
gatggccccggcctgcacactcgct

SEQ ID NO: 4710932 - DNA, 25 bp, Homo sapien
agctccggttcgctccctggcaggg

SEQ ID NO: 4710933 - DNA, 25 bp, Homo sapien
cagggaagtcactaaggtccgcgtt

SEQ ID NO: 4710934 - DNA, 25 bp, Homo sapien
cttccgatatggttagagaacatgg

SEQ ID NO: 4710935 - DNA, 25 bp, Homo sapien
tatgtgtgttcactcctaaggacac

SEQ ID NO: 4710936 - DNA, 25 bp, Homo sapien
gccgatatctgttaccgatttttag

SEQ ID NO: 4710937 - DNA, 25 bp, Homo sapien
caaagtcctgcagaagcggatggca

SEQ ID NO: 4710938 - DNA, 25 bp, Homo sapien
ataggagggccacatgtggcgacca

SEQ ID NO: 4710939 - DNA, 25 bp, Homo sapien
tatgaacagggaaccggagccttcc

SEQ ID NO: 4710940 - DNA, 25 bp, Homo sapien
ggagatacctgagcccaggacgtcc

SEQ ID NO: 4710941 - DNA, 25 bp, Homo sapien
tgtcacaagacaagaggacgcgctt

SEQ ID NO: 4710942 - DNA, 25 bp, Homo sapien
caggcactcggaattcaaaggcgga

SEQ ID NO: 4710943 - DNA, 25 bp, Homo sapien
cctagtgggcagtgattggaaaccg

SEQ ID NO: 4710944 - DNA, 25 bp, Homo sapien
ttatgtgctatgtgcccagcccggt

SEQ ID NO: 4710945 - DNA, 25 bp, Homo sapien
cagccccaagaacccgagccccgca

SEQ ID NO: 4710946 - DNA, 25 bp, Homo sapien
agccccaagaacccgagccccgcag

SEQ ID NO: 4710947 - DNA, 25 bp, Homo sapien
ccaagaacccgagccccgcagcaac

SEQ ID NO: 4710948 - DNA, 25 bp, Homo sapien
ccccaagaacccgagccccgcagca

SEQ ID NO: 4710949 - DNA, 25 bp, Homo sapien
tccaatgtggttactttggtttcaa

SEQ ID NO: 4710950 - DNA, 25 bp, Homo sapien
atgccacgcgaagcccattatccaa

SEQ ID NO: 4710951 - DNA, 25 bp, Homo sapien
gataggcaccaccactactaaaccg

SEQ ID NO: 4710952 - DNA, 25 bp, Homo sapien
attctgagatgccacgcgaagccca

SEQ ID NO: 4710953 - DNA, 25 bp, Homo sapien
ttcacaggtatatgtgtagctcaac

SEQ ID NO: 4710954 - DNA, 25 bp, Homo sapien
acactttgtttccactcagggtaca

SEQ ID NO: 4710955 - DNA, 25 bp, Homo sapien
tggcatgctaattacaactaacagt

SEQ ID NO: 4710956 - DNA, 25 bp, Homo sapien
gcatgttaaaactgcgggaccaccc

SEQ ID NO: 4710957 - DNA, 25 bp, Homo sapien
actaaggtatttcgcttcatatctc

SEQ ID NO: 4710958 - DNA, 25 bp, Homo sapien
taaggtatttcgcttcatatctcga

SEQ ID NO: 4710959 - DNA, 25 bp, Homo sapien
aggtatttcgcttcatatctcgatc

SEQ ID NO: 4710960 - DNA, 25 bp, Homo sapien
aaggtatttcgcttcatatctcgat

SEQ ID NO: 4710961 - DNA, 25 bp, Homo sapien
taacattaacttagcaacttgataa

SEQ ID NO: 4710962 - DNA, 25 bp, Homo sapien
ttattaacattaacttagcaacttg

SEQ ID NO: 4710963 - DNA, 25 bp, Homo sapien
tattaacattaacttagcaacttga

SEQ ID NO: 4710964 - DNA, 25 bp, Homo sapien
cattaacttagcaacttgataattt

SEQ ID NO: 4710965 - DNA, 25 bp, Homo sapien
tctttgctgtcaaatcgagcagtag

SEQ ID NO: 4710966 - DNA, 25 bp, Homo sapien
cttgatgtctggcagtcacagatac

SEQ ID NO: 4710967 - DNA, 25 bp, Homo sapien
cccatgcttttccaacgtaagcaga

SEQ ID NO: 4710968 - DNA, 25 bp, Homo sapien
tccaacgtaagcagaatttcatctt

SEQ ID NO: 4710969 - DNA, 25 bp, Homo sapien
agtttgtacacaaaagctggtgtac

SEQ ID NO: 4710970 - DNA, 25 bp, Homo sapien
gtcagtttgtacacaaaagctggtg

SEQ ID NO: 4710971 - DNA, 25 bp, Homo sapien
tcagtttgtacacaaaagctggtgt

SEQ ID NO: 4710972 - DNA, 25 bp, Homo sapien
cagtttgtacacaaaagctggtgta

SEQ ID NO: 4710973 - DNA, 25 bp, Homo sapien
gacgcttgggctttgcgtgccaggg

SEQ ID NO: 4710974 - DNA, 25 bp, Homo sapien
ctttgcgtgccaggggacacctcct

SEQ ID NO: 4710975 - DNA, 25 bp, Homo sapien
ccaggggacacctcctacccttcat

SEQ ID NO: 4710976 - DNA, 25 bp, Homo sapien
agacatttcagggacgcttgggctt

SEQ ID NO: 4710977 - DNA, 25 bp, Homo sapien
cagccagtaaggcaaccaccgtgtc

SEQ ID NO: 4710978 - DNA, 25 bp, Homo sapien
accacatcagccagtaaggcaacca

SEQ ID NO: 4710979 - DNA, 25 bp, Homo sapien
gccagtaaggcaaccaccgtgtcca

SEQ ID NO: 4710980 - DNA, 25 bp, Homo sapien
acatcagccagtaaggcaaccaccg

SEQ ID NO: 4710981 - DNA, 25 bp, Homo sapien
aaacgccagcggctgggatccacac

SEQ ID NO: 4710982 - DNA, 25 bp, Homo sapien
tcaaacgccagcggctgggatccac

SEQ ID NO: 4710983 - DNA, 25 bp, Homo sapien
ctcaaacgccagcggctgggatcca

SEQ ID NO: 4710984 - DNA, 25 bp, Homo sapien
caaacgccagcggctgggatccaca

SEQ ID NO: 4710985 - DNA, 25 bp, Homo sapien
cgaggtgcccttccgaaatcaaaga

SEQ ID NO: 4710986 - DNA, 25 bp, Homo sapien
tgcccttccgaaatcaaagaaccaa

SEQ ID NO: 4710987 - DNA, 25 bp, Homo sapien
gtccgaggtgcccttccgaaatcaa

SEQ ID NO: 4710988 - DNA, 25 bp, Homo sapien
gtgcccttccgaaatcaaagaacca

SEQ ID NO: 4710989 - DNA, 25 bp, Homo sapien
tgtgctggcctgagtgtcgcctgtt

SEQ ID NO: 4710990 - DNA, 25 bp, Homo sapien
tgagtgtcgcctgttggtggctgtt

SEQ ID NO: 4710991 - DNA, 25 bp, Homo sapien
gacccacagcttgtgtgctggcctg

SEQ ID NO: 4710992 - DNA, 25 bp, Homo sapien
gagctaggggacctgggcctcacat

SEQ ID NO: 4710993 - DNA, 25 bp, Homo sapien
aggccgcaggttcaggtcctccagc

SEQ ID NO: 4710994 - DNA, 25 bp, Homo sapien
ggtcaggccgcaggttcaggtcctc

SEQ ID NO: 4710995 - DNA, 25 bp, Homo sapien
tgggtcaggccgcaggttcaggtcc

SEQ ID NO: 4710996 - DNA, 25 bp, Homo sapien
tcaggccgcaggttcaggtcctcca

SEQ ID NO: 4710997 - DNA, 25 bp, Homo sapien
ggcattctcgagtttgacattttac

SEQ ID NO: 4710998 - DNA, 25 bp, Homo sapien
cctggtgtcccgaggaccactgttc

SEQ ID NO: 4710999 - DNA, 25 bp, Homo sapien
gggcattctcgagtttgacatttta

SEQ ID NO: 4711000 - DNA, 25 bp, Homo sapien
ccgaggaccactgttcgagatgcgg

SEQ ID NO: 4711001 - DNA, 25 bp, Homo sapien
gcaaggacaacatcacggaggcacc

SEQ ID NO: 4711002 - DNA, 25 bp, Homo sapien
ctgcaaggacaacatcacggaggca

SEQ ID NO: 4711003 - DNA, 25 bp, Homo sapien
aaggacaacatcacggaggcaccct

SEQ ID NO: 4711004 - DNA, 25 bp, Homo sapien
aggacaacatcacggaggcaccctc

SEQ ID NO: 4711005 - DNA, 25 bp, Homo sapien
tacgaacattgtataaacagcagac

SEQ ID NO: 4711006 - DNA, 25 bp, Homo sapien
actctggcaatagcagctgcgtgcg

SEQ ID NO: 4711007 - DNA, 25 bp, Homo sapien
caagaatgttctaagctgagtgcgg

SEQ ID NO: 4711008 - DNA, 25 bp, Homo sapien
tgggaaaatccgacgcaagctgata

SEQ ID NO: 4711009 - DNA, 25 bp, Homo sapien
ctgtggggcagaaacggtggaggcc

SEQ ID NO: 4711010 - DNA, 25 bp, Homo sapien
gcagaaacggtggaggccaactgtg

SEQ ID NO: 4711011 - DNA, 25 bp, Homo sapien
agaaacggtggaggccaactgtgtt

SEQ ID NO: 4711012 - DNA, 25 bp, Homo sapien
gggcagaaacggtggaggccaactg

SEQ ID NO: 4711013 - DNA, 25 bp, Homo sapien
cacctctcggttgatctttgctacg

SEQ ID NO: 4711014 - DNA, 25 bp, Homo sapien
cggtcgggagtgtagtagttcctca

SEQ ID NO: 4711015 - DNA, 25 bp, Homo sapien
ccagcaccatgcggtcgggagtgta

SEQ ID NO: 4711016 - DNA, 25 bp, Homo sapien
tctgtcaatatccacggcctctgcg

SEQ ID NO: 4711017 - DNA, 25 bp, Homo sapien
cagtccaaccatgatgtgcgtgagc

SEQ ID NO: 4711018 - DNA, 25 bp, Homo sapien
ctctccagtccaaccatgatgtgcg

SEQ ID NO: 4711019 - DNA, 25 bp, Homo sapien
caaccatgatgtgcgtgagctcggg

SEQ ID NO: 4711020 - DNA, 25 bp, Homo sapien
tgacattggacatgtctctttctag

SEQ ID NO: 4711021 - DNA, 25 bp, Homo sapien
caacactgcaaaggggatgaagtcc

SEQ ID NO: 4711022 - DNA, 25 bp, Homo sapien
catcatgttcaacactgcaaagggg

SEQ ID NO: 4711023 - DNA, 25 bp, Homo sapien
tgttcaacactgcaaaggggatgaa

SEQ ID NO: 4711024 - DNA, 25 bp, Homo sapien
cttgccgggcccaccagccgagaag

SEQ ID NO: 4711025 - DNA, 25 bp, Homo sapien
ggtcgcgttatacatccagtggtgc

SEQ ID NO: 4711026 - DNA, 25 bp, Homo sapien
cagtgtcctcgtagctgtggtggta

SEQ ID NO: 4711027 - DNA, 25 bp, Homo sapien
tgggtcggcgctggcatggatgcaa

SEQ ID NO: 4711028 - DNA, 25 bp, Homo sapien
aaggaggccagtgtcctcgtagctg

SEQ ID NO: 4711029 - DNA, 25 bp, Homo sapien
tgatgatttctaccatttctcgaac

SEQ ID NO: 4711030 - DNA, 25 bp, Homo sapien
aactcctttgtgatgatttctacca

SEQ ID NO: 4711031 - DNA, 25 bp, Homo sapien
ttgtgatgatttctaccatttctcg

SEQ ID NO: 4711032 - DNA, 25 bp, Homo sapien
cctttgtgatgatttctaccatttc

SEQ ID NO: 4711033 - DNA, 25 bp, Homo sapien
tacaacgtggctgtctcctgtcaga

SEQ ID NO: 4711034 - DNA, 25 bp, Homo sapien
tcacctcacagaggcggctgagaag

SEQ ID NO: 4711035 - DNA, 25 bp, Homo sapien
tacgcctggaaatggcgccacactg

SEQ ID NO: 4711036 - DNA, 25 bp, Homo sapien
tagtaaacagggacgcatggtggct

SEQ ID NO: 4711037 - DNA, 25 bp, Homo sapien
gtcaggtgagcacacacccgccccg

SEQ ID NO: 4711038 - DNA, 25 bp, Homo sapien
cactcgagcaatggcaaaacgccat

SEQ ID NO: 4711039 - DNA, 25 bp, Homo sapien
aggtgagcacacacccgccccgtgc

SEQ ID NO: 4711040 - DNA, 25 bp, Homo sapien
accccccactcgagcaatggcaaaa

SEQ ID NO: 4711041 - DNA, 25 bp, Homo sapien
ctttctggagcgagtggccagcacc

SEQ ID NO: 4711042 - DNA, 25 bp, Homo sapien
cacatcctcgaagatcacaggcctg

SEQ ID NO: 4711043 - DNA, 25 bp, Homo sapien
gtcagctgcgtcttggctcgttcca

SEQ ID NO: 4711044 - DNA, 25 bp, Homo sapien
tgcctccccacatcctcgaagatca

SEQ ID NO: 4711045 - DNA, 25 bp, Homo sapien
ctgcgggagggcgagacggcctcct

SEQ ID NO: 4711046 - DNA, 25 bp, Homo sapien
cggcctgcgggagggcgagacggcc

SEQ ID NO: 4711047 - DNA, 25 bp, Homo sapien
gcgggagggcgagacggcctcctct

SEQ ID NO: 4711048 - DNA, 25 bp, Homo sapien
ctgagcctggccgaggcctgcggca

SEQ ID NO: 4711049 - DNA, 25 bp, Homo sapien
gaggctggacactcgcttgaggatt

SEQ ID NO: 4711050 - DNA, 25 bp, Homo sapien
cagcaacggtacagcggcattccga

SEQ ID NO: 4711051 - DNA, 25 bp, Homo sapien
tttctacagaaaacgaggcccgaga

SEQ ID NO: 4711052 - DNA, 25 bp, Homo sapien
ccagaagagtccgatgcacatacaa

SEQ ID NO: 4711053 - DNA, 25 bp, Homo sapien
cgagctccgtgtctgatgaactcac

SEQ ID NO: 4711054 - DNA, 25 bp, Homo sapien
agaagagcgagctccgtgtctgatg

SEQ ID NO: 4711055 - DNA, 25 bp, Homo sapien
gaagagcgagctccgtgtctgatga

SEQ ID NO: 4711056 - DNA, 25 bp, Homo sapien
gagcgagctccgtgtctgatgaact

SEQ ID NO: 4711057 - DNA, 25 bp, Homo sapien
taaaaatataggacaaagccaccca

SEQ ID NO: 4711058 - DNA, 25 bp, Homo sapien
aaagccacccaagaagagttacact

SEQ ID NO: 4711059 - DNA, 25 bp, Homo sapien
gccacccaagaagagttacacttac

SEQ ID NO: 4711060 - DNA, 25 bp, Homo sapien
gacaaagccacccaagaagagttac

SEQ ID NO: 4711061 - DNA, 25 bp, Homo sapien
aaggcagccactgggtgtagccaag

SEQ ID NO: 4711062 - DNA, 25 bp, Homo sapien
gagtccacaagtgacagacgttgag

SEQ ID NO: 4711063 - DNA, 25 bp, Homo sapien
tgacagacgttgagttctcagtaaa

SEQ ID NO: 4711064 - DNA, 25 bp, Homo sapien
caagggtgagtccacaagtgacaga

SEQ ID NO: 4711065 - DNA, 25 bp, Homo sapien
agggggcggctggtctgtaccactc

SEQ ID NO: 4711066 - DNA, 25 bp, Homo sapien
catcagtaaacacacggagggggcg

SEQ ID NO: 4711067 - DNA, 25 bp, Homo sapien
gggcggctggtctgtaccactcact

SEQ ID NO: 4711068 - DNA, 25 bp, Homo sapien
gcggctggtctgtaccactcactca

SEQ ID NO: 4711069 - DNA, 25 bp, Homo sapien
gcagagggcaaacgcgtgtcacacg

SEQ ID NO: 4711070 - DNA, 25 bp, Homo sapien
aaacgcgtgtcacacgagcgcgcca

SEQ ID NO: 4711071 - DNA, 25 bp, Homo sapien
tagtgcagagggcaaacgcgtgtca

SEQ ID NO: 4711072 - DNA, 25 bp, Homo sapien
gagggcaaacgcgtgtcacacgagc

SEQ ID NO: 4711073 - DNA, 25 bp, Homo sapien
ggaagagccggtacgtcctgggcag

SEQ ID NO: 4711074 - DNA, 25 bp, Homo sapien
tcatacgtgggcaggtcagtcaggt

SEQ ID NO: 4711075 - DNA, 25 bp, Homo sapien
catcttagaagcgactctcttcaca

SEQ ID NO: 4711076 - DNA, 25 bp, Homo sapien
tgccggcttccctcggagcatctta

SEQ ID NO: 4711077 - DNA, 25 bp, Homo sapien
gatgccagctctttattaccaggga

SEQ ID NO: 4711078 - DNA, 25 bp, Homo sapien
caaaagaatgcaaaccgcgtgggtg

SEQ ID NO: 4711079 - DNA, 25 bp, Homo sapien
gatactgactccactgatcggcaca

SEQ ID NO: 4711080 - DNA, 25 bp, Homo sapien
tcagaggtgagtcctggtacccagc

SEQ ID NO: 4711081 - DNA, 25 bp, Homo sapien
aacaaacacccagtctcttgataaa

SEQ ID NO: 4711082 - DNA, 25 bp, Homo sapien
aattagccgggtgtctgttgtccca

SEQ ID NO: 4711083 - DNA, 25 bp, Homo sapien
tattagcagcatcttaaaaagtagg

SEQ ID NO: 4711084 - DNA, 25 bp, Homo sapien
aaatgagtctcttgggccaggcgtg

SEQ ID NO: 4711085 - DNA, 25 bp, Homo sapien
ccttgcggaagggaaccatgtcaga

SEQ ID NO: 4711086 - DNA, 25 bp, Homo sapien
ttctcgcgggaggtcacaggaatcc

SEQ ID NO: 4711087 - DNA, 25 bp, Homo sapien
cacggcgtttctgtatagtcggcga

SEQ ID NO: 4711088 - DNA, 25 bp, Homo sapien
tctgtaaatcaagcgtctcgggcac

SEQ ID NO: 4711089 - DNA, 25 bp, Homo sapien
aaacccattctgagtttgcgggccg

SEQ ID NO: 4711090 - DNA, 25 bp, Homo sapien
ttagggacatacattggaacctcgc

SEQ ID NO: 4711091 - DNA, 25 bp, Homo sapien
gatccggttgacgtagatacacctg

SEQ ID NO: 4711092 - DNA, 25 bp, Homo sapien
gcaggtgcgatcacatccagggcaa

SEQ ID NO: 4711093 - DNA, 25 bp, Homo sapien
tgtttcacttgatcatttagcccag

SEQ ID NO: 4711094 - DNA, 25 bp, Homo sapien
tctgtccctcggtcagctcgtgtga

SEQ ID NO: 4711095 - DNA, 25 bp, Homo sapien
gactgccacgacttttgattcaaga

SEQ ID NO: 4711096 - DNA, 25 bp, Homo sapien
ggcgtgtcccgctggatccatttgt

SEQ ID NO: 4711097 - DNA, 25 bp, Homo sapien
cgttggttcagaggttggtagcact

SEQ ID NO: 4711098 - DNA, 25 bp, Homo sapien
tgtaggagcacggttagactcactg

SEQ ID NO: 4711099 - DNA, 25 bp, Homo sapien
taaaaggctgcactttccgtgagca

SEQ ID NO: 4711100 - DNA, 25 bp, Homo sapien
tcactgttaaggaagctggatgcac

SEQ ID NO: 4711101 - DNA, 25 bp, Homo sapien
aaactgaccgtgtgatgtttgattt

SEQ ID NO: 4711102 - DNA, 25 bp, Homo sapien
ggttgaaaactgaccgtgtgatgtt

SEQ ID NO: 4711103 - DNA, 25 bp, Homo sapien
atccaggttgaaaactgaccgtgtg

SEQ ID NO: 4711104 - DNA, 25 bp, Homo sapien
gctcagggtggtcatccaggttgaa

SEQ ID NO: 4711105 - DNA, 25 bp, Homo sapien
cctgatgaggaccatgggtgatttt

SEQ ID NO: 4711106 - DNA, 25 bp, Homo sapien
ctgtggcctgatgaggaccatgggt

SEQ ID NO: 4711107 - DNA, 25 bp, Homo sapien
gtgattttgtgtacccaaagcgctg

SEQ ID NO: 4711108 - DNA, 25 bp, Homo sapien
tgggtgattttgtgtacccaaagcg

SEQ ID NO: 4711109 - DNA, 25 bp, Homo sapien
agaccccaacccctgctctgcacca

SEQ ID NO: 4711110 - DNA, 25 bp, Homo sapien
tctgggccctcgccgtgtttgaacc

SEQ ID NO: 4711111 - DNA, 25 bp, Homo sapien
ccatctgggccctcgccgtgtttga

SEQ ID NO: 4711112 - DNA, 25 bp, Homo sapien
tgggccctcgccgtgtttgaacctg

SEQ ID NO: 4711113 - DNA, 25 bp, Homo sapien
gagccacatggtcggtagtaaccag

SEQ ID NO: 4711114 - DNA, 25 bp, Homo sapien
tcattcattgaagccggagctgtct

SEQ ID NO: 4711115 - DNA, 25 bp, Homo sapien
gtcggtagtaaccagggcctctcca

SEQ ID NO: 4711116 - DNA, 25 bp, Homo sapien
caggagagccacatggtcggtagta

SEQ ID NO: 4711117 - DNA, 25 bp, Homo sapien
tccaccatcctttcagattctggat

SEQ ID NO: 4711118 - DNA, 25 bp, Homo sapien
tggaaagactgaatctttgactcag

SEQ ID NO: 4711119 - DNA, 25 bp, Homo sapien
tcctcaccgcccatcgtaatgaatt

SEQ ID NO: 4711120 - DNA, 25 bp, Homo sapien
ttctggatggaaagactgaatcttt

SEQ ID NO: 4711121 - DNA, 25 bp, Homo sapien
caggaggcgcctgttggaaactcac

SEQ ID NO: 4711122 - DNA, 25 bp, Homo sapien
tgctggacgcctggtgagatgcaca

SEQ ID NO: 4711123 - DNA, 25 bp, Homo sapien
aactcgatttggtggatcttgtccc

SEQ ID NO: 4711124 - DNA, 25 bp, Homo sapien
gaaactcactttccgagctaagcga

SEQ ID NO: 4711125 - DNA, 25 bp, Homo sapien
gacagtgtaactgcaaacgtgtgcc

SEQ ID NO: 4711126 - DNA, 25 bp, Homo sapien
tcctgaagtagggacacagcaagcg

SEQ ID NO: 4711127 - DNA, 25 bp, Homo sapien
ccagaaagggctttgagtgcctcct

SEQ ID NO: 4711128 - DNA, 25 bp, Homo sapien
tccgagttccgagatggagcagttg

SEQ ID NO: 4711129 - DNA, 25 bp, Homo sapien
aagtcaaaaggatcgtaaggcagga

SEQ ID NO: 4711130 - DNA, 25 bp, Homo sapien
gaaatggtttctaatcagcctgcta

SEQ ID NO: 4711131 - DNA, 25 bp, Homo sapien
gaagaatcagtcctggagagaggct

SEQ ID NO: 4711132 - DNA, 25 bp, Homo sapien
tatgcaagtttattatcctcaccgc

SEQ ID NO: 4711133 - DNA, 25 bp, Homo sapien
cagcccaacggaagaatgcgaggag

SEQ ID NO: 4711134 - DNA, 25 bp, Homo sapien
gaaagagccagcgtaaacagggcga

SEQ ID NO: 4711135 - DNA, 25 bp, Homo sapien
cccgcttgtggccttgattgaagaa

SEQ ID NO: 4711136 - DNA, 25 bp, Homo sapien
tcagctgggcggagtagccgttctc

SEQ ID NO: 4711137 - DNA, 25 bp, Homo sapien
tggtgccacgtcagccggactgaag

SEQ ID NO: 4711138 - DNA, 25 bp, Homo sapien
ggttctttgaactcgcgagcggcaa

SEQ ID NO: 4711139 - DNA, 25 bp, Homo sapien
tttggaaagggcaaacaatgacacc

SEQ ID NO: 4711140 - DNA, 25 bp, Homo sapien
gcctcgaccactgggaagaagcaga

SEQ ID NO: 4711141 - DNA, 25 bp, Homo sapien
catggctaatgggaggagctgaccc

SEQ ID NO: 4711142 - DNA, 25 bp, Homo sapien
cagagacttggagaatggagaaacc

SEQ ID NO: 4711143 - DNA, 25 bp, Homo sapien
tgaaaaagggcacacagcgtctcag

SEQ ID NO: 4711144 - DNA, 25 bp, Homo sapien
cataatgtggtacagcagtggtcac

SEQ ID NO: 4711145 - DNA, 25 bp, Homo sapien
gaccagatgcgtcccaagatgttga

SEQ ID NO: 4711146 - DNA, 25 bp, Homo sapien
tcatgccagtgagggacgtcagact

SEQ ID NO: 4711147 - DNA, 25 bp, Homo sapien
taaaagtgatctacatgaggaactg

SEQ ID NO: 4711148 - DNA, 25 bp, Homo sapien
tagcctatggcagaaaaaatgtctg

SEQ ID NO: 4711149 - DNA, 25 bp, Homo sapien
tgtgtcagtcagtgaggaccctccc

SEQ ID NO: 4711150 - DNA, 25 bp, Homo sapien
gattcctttgatggcgggctctctt

SEQ ID NO: 4711151 - DNA, 25 bp, Homo sapien
ttgtgtgagcggaacaaggagccct

SEQ ID NO: 4711152 - DNA, 25 bp, Homo sapien
gcctgccgcaagacacaggtaagat

SEQ ID NO: 4711153 - DNA, 25 bp, Homo sapien
tctgcgcctgttgccgcagggaaca

SEQ ID NO: 4711154 - DNA, 25 bp, Homo sapien
accttttcccggagcgcaaggccag

SEQ ID NO: 4711155 - DNA, 25 bp, Homo sapien
tctgagcccagactgtgtgtccggg

SEQ ID NO: 4711156 - DNA, 25 bp, Homo sapien
aggcttcaccactgggaagagcggc

SEQ ID NO: 4711157 - DNA, 25 bp, Homo sapien
tccgagcaccgacgcctgatttatg

SEQ ID NO: 4711158 - DNA, 25 bp, Homo sapien
gcctcgttaactgggatgcgtccgg

SEQ ID NO: 4711159 - DNA, 25 bp, Homo sapien
gcccggcgtgatacagcctcgttaa

SEQ ID NO: 4711160 - DNA, 25 bp, Homo sapien
ggtgtccgggcagagtgtcgtggtc

SEQ ID NO: 4711161 - DNA, 25 bp, Homo sapien
atgtgggagagaggtacagactggg

SEQ ID NO: 4711162 - DNA, 25 bp, Homo sapien
gagagaggtacagactggggcgggc

SEQ ID NO: 4711163 - DNA, 25 bp, Homo sapien
gaggtacagactggggcgggcacag

SEQ ID NO: 4711164 - DNA, 25 bp, Homo sapien
gagaggtacagactggggcgggcac

SEQ ID NO: 4711165 - DNA, 25 bp, Homo sapien
tgttcgccgtctgtagggtgctcca

SEQ ID NO: 4711166 - DNA, 25 bp, Homo sapien
ccaaagctgtgaaggatttgctcac

SEQ ID NO: 4711167 - DNA, 25 bp, Homo sapien
tcccaccttctcagggacgtctggg

SEQ ID NO: 4711168 - DNA, 25 bp, Homo sapien
ttgaagacagagtggcccgggtacc

SEQ ID NO: 4711169 - DNA, 25 bp, Homo sapien
gatgggacaggcaggtgccgggtga

SEQ ID NO: 4711170 - DNA, 25 bp, Homo sapien
gggatgggacaggcaggtgccgggt

SEQ ID NO: 4711171 - DNA, 25 bp, Homo sapien
tgggacaggcaggtgccgggtgacc

SEQ ID NO: 4711172 - DNA, 25 bp, Homo sapien
ctgagcgtgggggatgggacaggca

SEQ ID NO: 4711173 - DNA, 25 bp, Homo sapien
ataggacaggttaccccagcgccgc

SEQ ID NO: 4711174 - DNA, 25 bp, Homo sapien
ccagataggacaggttaccccagcg

SEQ ID NO: 4711175 - DNA, 25 bp, Homo sapien
ggcccagataggacaggttacccca

SEQ ID NO: 4711176 - DNA, 25 bp, Homo sapien
agataggacaggttaccccagcgcc

SEQ ID NO: 4711177 - DNA, 25 bp, Homo sapien
ctccttctcattttggggcggaggg

SEQ ID NO: 4711178 - DNA, 25 bp, Homo sapien
aggcagccatcccacatcgcagccc

SEQ ID NO: 4711179 - DNA, 25 bp, Homo sapien
cagcccccaatctcgtggttttgtg

SEQ ID NO: 4711180 - DNA, 25 bp, Homo sapien
tgctccaacggtgaacaggcctggt

SEQ ID NO: 4711181 - DNA, 25 bp, Homo sapien
tgctgggctgtcgtgggccccttgg

SEQ ID NO: 4711182 - DNA, 25 bp, Homo sapien
ccctgctgcccgctgtctccggagc

SEQ ID NO: 4711183 - DNA, 25 bp, Homo sapien
cctgctgcccgctgtctccggagcg

SEQ ID NO: 4711184 - DNA, 25 bp, Homo sapien
ctgctgcccgctgtctccggagcgg

SEQ ID NO: 4711185 - DNA, 25 bp, Homo sapien
gacagccgttcccatgtcgggtgag

SEQ ID NO: 4711186 - DNA, 25 bp, Homo sapien
tccacgggccttctgtcggtcagat

SEQ ID NO: 4711187 - DNA, 25 bp, Homo sapien
tgagggcattgttttcccggctgcg

SEQ ID NO: 4711188 - DNA, 25 bp, Homo sapien
ttttcacactccaaacagcctgcgg

SEQ ID NO: 4711189 - DNA, 25 bp, Homo sapien
cagggagctccagaccaaaggagcg

SEQ ID NO: 4711190 - DNA, 25 bp, Homo sapien
agctccagaccaaaggagcggcggt

SEQ ID NO: 4711191 - DNA, 25 bp, Homo sapien
cagcttccacgctggctgggacagg

SEQ ID NO: 4711192 - DNA, 25 bp, Homo sapien
gtcagcggcagggagctccagacca

SEQ ID NO: 4711193 - DNA, 25 bp, Homo sapien
gctgtggctttcaagtgaggcccac

SEQ ID NO: 4711194 - DNA, 25 bp, Homo sapien
tgctgtggctttcaagtgaggccca

SEQ ID NO: 4711195 - DNA, 25 bp, Homo sapien
ctgctgtggctttcaagtgaggccc

SEQ ID NO: 4711196 - DNA, 25 bp, Homo sapien
ctgtggggcccggagctccgagggg

SEQ ID NO: 4711197 - DNA, 25 bp, Homo sapien
ggctgcgtttgacggcctcgagttt

SEQ ID NO: 4711198 - DNA, 25 bp, Homo sapien
tgtgggccgggctgcgtttgacggc

SEQ ID NO: 4711199 - DNA, 25 bp, Homo sapien
gcgtttgacggcctcgagtttccca

SEQ ID NO: 4711200 - DNA, 25 bp, Homo sapien
tgacggcctcgagtttcccaggcag

SEQ ID NO: 4711201 - DNA, 25 bp, Homo sapien
gaaataccagcagctttaacgagcg

SEQ ID NO: 4711202 - DNA, 25 bp, Homo sapien
taccagcagctttaacgagcggctg

SEQ ID NO: 4711203 - DNA, 25 bp, Homo sapien
cagctttaacgagcggctggctttg

SEQ ID NO: 4711204 - DNA, 25 bp, Homo sapien
ctgaggaggaaataccagcagcttt

SEQ ID NO: 4711205 - DNA, 25 bp, Homo sapien
atatccagaactttccggatctttc

SEQ ID NO: 4711206 - DNA, 25 bp, Homo sapien
aggcatatccagaactttccggatc

SEQ ID NO: 4711207 - DNA, 25 bp, Homo sapien
gcatatccagaactttccggatctt

SEQ ID NO: 4711208 - DNA, 25 bp, Homo sapien
ccttcatgtgcaggcatatccagaa

SEQ ID NO: 4711209 - DNA, 25 bp, Homo sapien
cagtgcagttttcatccccagcgca

SEQ ID NO: 4711210 - DNA, 25 bp, Homo sapien
agcctcgtaaaagccctggcagacg

SEQ ID NO: 4711211 - DNA, 25 bp, Homo sapien
gttttcatccccagcgcacaggtgg

SEQ ID NO: 4711212 - DNA, 25 bp, Homo sapien
tacccagcctcgtaaaagccctggc

SEQ ID NO: 4711213 - DNA, 25 bp, Homo sapien
ctcaaaatcccgtggcccttctggt

SEQ ID NO: 4711214 - DNA, 25 bp, Homo sapien
tctgccagcctcagatgtaaaatgg

SEQ ID NO: 4711215 - DNA, 25 bp, Homo sapien
ggaagtcgtgcggaaccgctccctc

SEQ ID NO: 4711216 - DNA, 25 bp, Homo sapien
cctgtgagtgcccatcagccgtggg

SEQ ID NO: 4711217 - DNA, 25 bp, Homo sapien
cacaggtgatacttcctgggcaggt

SEQ ID NO: 4711218 - DNA, 25 bp, Homo sapien
tgactcttcaaaatcggacccgcct

SEQ ID NO: 4711219 - DNA, 25 bp, Homo sapien
tggtgatacctcctctaggtgggtg

SEQ ID NO: 4711220 - DNA, 25 bp, Homo sapien
ggaagctctggaccatttactgaga

SEQ ID NO: 4711221 - DNA, 25 bp, Homo sapien
actttcaaacgagaagtagtcccag

SEQ ID NO: 4711222 - DNA, 25 bp, Homo sapien
aatttcagtcgccagttgtcgccga

SEQ ID NO: 4711223 - DNA, 25 bp, Homo sapien
cggcaaccgccagagccggatcctt

SEQ ID NO: 4711224 - DNA, 25 bp, Homo sapien
cgcagccccggctcaaacttttggc

SEQ ID NO: 4711225 - DNA, 25 bp, Homo sapien
gtcaggtgtgagatttgtcctgctt

SEQ ID NO: 4711226 - DNA, 25 bp, Homo sapien
gcctgcagaagtgaggccagattct

SEQ ID NO: 4711227 - DNA, 25 bp, Homo sapien
tgtttccagagtgctcagcatttgg

SEQ ID NO: 4711228 - DNA, 25 bp, Homo sapien
aggccgcctgcactggctgtttcca

SEQ ID NO: 4711229 - DNA, 25 bp, Homo sapien
taacgcgggcttatgagcgtgcctg

SEQ ID NO: 4711230 - DNA, 25 bp, Homo sapien
ggacaccgaatgggccactctcttc

SEQ ID NO: 4711231 - DNA, 25 bp, Homo sapien
cgcaccatccgtaacgcgggcttat

SEQ ID NO: 4711232 - DNA, 25 bp, Homo sapien
acagctgtccatggggtactcccgg

SEQ ID NO: 4711233 - DNA, 25 bp, Homo sapien
gagctggcatcctcatgatgtctct

SEQ ID NO: 4711234 - DNA, 25 bp, Homo sapien
tggcatcctcatgatgtctctgagc

SEQ ID NO: 4711235 - DNA, 25 bp, Homo sapien
agctggcatcctcatgatgtctctg

SEQ ID NO: 4711236 - DNA, 25 bp, Homo sapien
tgagctggcatcctcatgatgtctc

SEQ ID NO: 4711237 - DNA, 25 bp, Homo sapien
ctgccttgggcggtgaacagactgt

SEQ ID NO: 4711238 - DNA, 25 bp, Homo sapien
cagcagggtacccgccacaggacgt

SEQ ID NO: 4711239 - DNA, 25 bp, Homo sapien
cacaggtcagatgttttttacagtc

SEQ ID NO: 4711240 - DNA, 25 bp, Homo sapien
aggggccctactcctaggtggtctg

SEQ ID NO: 4711241 - DNA, 25 bp, Homo sapien
cttggtgcagcagaacctgaggccc

SEQ ID NO: 4711242 - DNA, 25 bp, Homo sapien
tttataagtggagaaaggcagatgg

SEQ ID NO: 4711243 - DNA, 25 bp, Homo sapien
ccccacggtgtgcccgatggtcagg

SEQ ID NO: 4711244 - DNA, 25 bp, Homo sapien
ggacgtggaggctgcgtaggaggca

SEQ ID NO: 4711245 - DNA, 25 bp, Homo sapien
ttacttcacgagcagaattccccgt

SEQ ID NO: 4711246 - DNA, 25 bp, Homo sapien
tatgttcgtgctccgtgttacttca

SEQ ID NO: 4711247 - DNA, 25 bp, Homo sapien
gctccgtgttacttcacgagcagaa

SEQ ID NO: 4711248 - DNA, 25 bp, Homo sapien
ctgcttatgttcgtgctccgtgtta

SEQ ID NO: 4711249 - DNA, 25 bp, Homo sapien
gacccgaatagctcgcagatgtgcg

SEQ ID NO: 4711250 - DNA, 25 bp, Homo sapien
cccggagacccgaatagctcgcaga

SEQ ID NO: 4711251 - DNA, 25 bp, Homo sapien
ggagacccgaatagctcgcagatgt

SEQ ID NO: 4711252 - DNA, 25 bp, Homo sapien
cgaatagctcgcagatgtgcggtac

SEQ ID NO: 4711253 - DNA, 25 bp, Homo sapien
tgtttggatcttctcaaaacctaag

SEQ ID NO: 4711254 - DNA, 25 bp, Homo sapien
gctgtttggatcttctcaaaaccta

SEQ ID NO: 4711255 - DNA, 25 bp, Homo sapien
ctgtttggatcttctcaaaacctaa

SEQ ID NO: 4711256 - DNA, 25 bp, Homo sapien
caaggcccacgtgagaggaccctgg

SEQ ID NO: 4711257 - DNA, 25 bp, Homo sapien
aggcccacgtgagaggaccctggat

SEQ ID NO: 4711258 - DNA, 25 bp, Homo sapien
cacgtgagaggaccctggatcatcc

SEQ ID NO: 4711259 - DNA, 25 bp, Homo sapien
cccacgtgagaggaccctggatcat

SEQ ID NO: 4711260 - DNA, 25 bp, Homo sapien
gcagaggttccctgctcgggaggag

SEQ ID NO: 4711261 - DNA, 25 bp, Homo sapien
cttcttgcagctgacgggtcccagc

SEQ ID NO: 4711262 - DNA, 25 bp, Homo sapien
tcttgcagctgacgggtcccagcag

SEQ ID NO: 4711263 - DNA, 25 bp, Homo sapien
ctgctcgggaggagccattccacgg

SEQ ID NO: 4711264 - DNA, 25 bp, Homo sapien
ccctcaggggacttgttgaagccca

SEQ ID NO: 4711265 - DNA, 25 bp, Homo sapien
cctggtctggttggtccgcagcggc

SEQ ID NO: 4711266 - DNA, 25 bp, Homo sapien
aggggacttgttgaagcccagctcc

SEQ ID NO: 4711267 - DNA, 25 bp, Homo sapien
cctggggtcctaggtgcctctgacc

SEQ ID NO: 4711268 - DNA, 25 bp, Homo sapien
catagccccactgtacaggtgagaa

SEQ ID NO: 4711269 - DNA, 25 bp, Homo sapien
cagcagagtcgcctgagaacccagc

SEQ ID NO: 4711270 - DNA, 25 bp, Homo sapien
agtgtggacgcagcagagtcgcctg

SEQ ID NO: 4711271 - DNA, 25 bp, Homo sapien
tagccccactgtacaggtgagaaca

SEQ ID NO: 4711272 - DNA, 25 bp, Homo sapien
tgcacctggggtgcgaaggcctctc

SEQ ID NO: 4711273 - DNA, 25 bp, Homo sapien
ggctgttgtgatgacgagtcagaca

SEQ ID NO: 4711274 - DNA, 25 bp, Homo sapien
cctcggctgcccagtcgtttgctgt

SEQ ID NO: 4711275 - DNA, 25 bp, Homo sapien
gtcgtttgctgttaccccttgctgc

SEQ ID NO: 4711276 - DNA, 25 bp, Homo sapien
gccggcgccagatcttcctgggcct

SEQ ID NO: 4711277 - DNA, 25 bp, Homo sapien
gaacatggtgaccaaacagtgcagg

SEQ ID NO: 4711278 - DNA, 25 bp, Homo sapien
ggaaggggcttgaacatggtgacca

SEQ ID NO: 4711279 - DNA, 25 bp, Homo sapien
gcaggggccggcgccagatcttcct

SEQ ID NO: 4711280 - DNA, 25 bp, Homo sapien
tgccgggggatttatcttgcaggga

SEQ ID NO: 4711281 - DNA, 25 bp, Homo sapien
gggatttatcttgcagggagaaggg

SEQ ID NO: 4711282 - DNA, 25 bp, Homo sapien
tagggctgccgggggatttatcttg

SEQ ID NO: 4711283 - DNA, 25 bp, Homo sapien
cgggggatttatcttgcagggagaa

SEQ ID NO: 4711284 - DNA, 25 bp, Homo sapien
tcattccccagctcggggtgggcag

SEQ ID NO: 4711285 - DNA, 25 bp, Homo sapien
ggtgggcagctcttcccttccatct

SEQ ID NO: 4711286 - DNA, 25 bp, Homo sapien
ttcccttccatctcggggtggggca

SEQ ID NO: 4711287 - DNA, 25 bp, Homo sapien
agaggcccgggagctgctcattccc

SEQ ID NO: 4711288 - DNA, 25 bp, Homo sapien
tccctttgtccctggccccggcagc

SEQ ID NO: 4711289 - DNA, 25 bp, Homo sapien
cctggccccggcagccaggcactga

SEQ ID NO: 4711290 - DNA, 25 bp, Homo sapien
agccaggcactgagaaccagcatac

SEQ ID NO: 4711291 - DNA, 25 bp, Homo sapien
ccggcagccaggcactgagaaccag

SEQ ID NO: 4711292 - DNA, 25 bp, Homo sapien
gaggacaaaggagggaagaggccag

SEQ ID NO: 4711293 - DNA, 25 bp, Homo sapien
tcaggaggacaaaggagggaagagg

SEQ ID NO: 4711294 - DNA, 25 bp, Homo sapien
ggaggacaaaggagggaagaggcca

SEQ ID NO: 4711295 - DNA, 25 bp, Homo sapien
gacaaaggagggaagaggccaggac

SEQ ID NO: 4711296 - DNA, 25 bp, Homo sapien
gagcaaagaaaagaccgaggaagga

SEQ ID NO: 4711297 - DNA, 25 bp, Homo sapien
tttcgggctgtgataagggactgtc

SEQ ID NO: 4711298 - DNA, 25 bp, Homo sapien
gcacagcagaatattcgacgagcaa

SEQ ID NO: 4711299 - DNA, 25 bp, Homo sapien
agggagccgtgcccactggtgtcca

SEQ ID NO: 4711300 - DNA, 25 bp, Homo sapien
agccgggccccaactgtgacactgg

SEQ ID NO: 4711301 - DNA, 25 bp, Homo sapien
accagccgggccccaactgtgacac

SEQ ID NO: 4711302 - DNA, 25 bp, Homo sapien
tgacactggccagtagccacggctc

SEQ ID NO: 4711303 - DNA, 25 bp, Homo sapien
ggagaggtcagctgaaaccagccgg

SEQ ID NO: 4711304 - DNA, 25 bp, Homo sapien
cagaagattaactccatagcctttg

SEQ ID NO: 4711305 - DNA, 25 bp, Homo sapien
gcatcagaatgcgactcctgcttcc

SEQ ID NO: 4711306 - DNA, 25 bp, Homo sapien
tgagctctcacgatgttccaagaaa

SEQ ID NO: 4711307 - DNA, 25 bp, Homo sapien
ggcacacaagcacaaagcatcagaa

SEQ ID NO: 4711308 - DNA, 25 bp, Homo sapien
cagaccactgaacccctgaaagcgg

SEQ ID NO: 4711309 - DNA, 25 bp, Homo sapien
atatggtagccccagaatctcggtg

SEQ ID NO: 4711310 - DNA, 25 bp, Homo sapien
gaacccctgaaagcggatatggtag

SEQ ID NO: 4711311 - DNA, 25 bp, Homo sapien
gaaagcggatatggtagccccagaa

SEQ ID NO: 4711312 - DNA, 25 bp, Homo sapien
gggcgggcgctaccattgtcccatt

SEQ ID NO: 4711313 - DNA, 25 bp, Homo sapien
gatttcgcagcgtgactcctgtggg

SEQ ID NO: 4711314 - DNA, 25 bp, Homo sapien
catggtttaccgagtgctgtgagca

SEQ ID NO: 4711315 - DNA, 25 bp, Homo sapien
tcgccacgctggatcttctccgagg

SEQ ID NO: 4711316 - DNA, 25 bp, Homo sapien
gcagaagcacaggccacacacgccc

SEQ ID NO: 4711317 - DNA, 25 bp, Homo sapien
ggcagaagcacaggccacacacgcc

SEQ ID NO: 4711318 - DNA, 25 bp, Homo sapien
tggcagaagcacaggccacacacgc

SEQ ID NO: 4711319 - DNA, 25 bp, Homo sapien
ctggcagaagcacaggccacacacg

SEQ ID NO: 4711320 - DNA, 25 bp, Homo sapien
aggcccggagctccggacccggcag

SEQ ID NO: 4711321 - DNA, 25 bp, Homo sapien
caggcccggagctccggacccggca

SEQ ID NO: 4711322 - DNA, 25 bp, Homo sapien
atgcggacgtgcaggcgggcatctg

SEQ ID NO: 4711323 - DNA, 25 bp, Homo sapien
ccaagatgctgtcaactgctggcag

SEQ ID NO: 4711324 - DNA, 25 bp, Homo sapien
gatgcaggcacacatgcggacgtgc

SEQ ID NO: 4711325 - DNA, 25 bp, Homo sapien
catctgcgctaaggcacacagggtc

SEQ ID NO: 4711326 - DNA, 25 bp, Homo sapien
cagacactggaaccatgagatgagg

SEQ ID NO: 4711327 - DNA, 25 bp, Homo sapien
tgagatgaggcaggccaggtcccat

SEQ ID NO: 4711328 - DNA, 25 bp, Homo sapien
cactggaaccatgagatgaggcagg

SEQ ID NO: 4711329 - DNA, 25 bp, Homo sapien
ctgacagacactggaaccatgagat

SEQ ID NO: 4711330 - DNA, 25 bp, Homo sapien
gggacagcagacaccttagctgtga

SEQ ID NO: 4711331 - DNA, 25 bp, Homo sapien
gtgacacacagcatgggccgtctcc

SEQ ID NO: 4711332 - DNA, 25 bp, Homo sapien
ttcgccgtgatctcaggagggccac

SEQ ID NO: 4711333 - DNA, 25 bp, Homo sapien
gaagccgggctcatgttccccgtga

SEQ ID NO: 4711334 - DNA, 25 bp, Homo sapien
gaggccgagttcactttcgccgtga

SEQ ID NO: 4711335 - DNA, 25 bp, Homo sapien
caagaacaggaagccgggctcatgt

SEQ ID NO: 4711336 - DNA, 25 bp, Homo sapien
atctgctggccgtagccctgctgac

SEQ ID NO: 4711337 - DNA, 25 bp, Homo sapien
gagaattgtggccacagctatgagg

SEQ ID NO: 4711338 - DNA, 25 bp, Homo sapien
tcaggggtgctgagaattgtggcca

SEQ ID NO: 4711339 - DNA, 25 bp, Homo sapien
gagaatctgctggccgtagccctgc

SEQ ID NO: 4711340 - DNA, 25 bp, Homo sapien
cctgcctggccgcacctgcccccca

SEQ ID NO: 4711341 - DNA, 25 bp, Homo sapien
ggccgcttcccctgcctggccgcac

SEQ ID NO: 4711342 - DNA, 25 bp, Homo sapien
cgcttcccctgcctggccgcacctg

SEQ ID NO: 4711343 - DNA, 25 bp, Homo sapien
ctgcctggccgcacctgccccccat

SEQ ID NO: 4711344 - DNA, 25 bp, Homo sapien
ctgccccccatggccgccctccctg

SEQ ID NO: 4711345 - DNA, 25 bp, Homo sapien
cccatggccgccctccctgcctggc

SEQ ID NO: 4711346 - DNA, 25 bp, Homo sapien
ccccccatggccgccctccctgcct

SEQ ID NO: 4711347 - DNA, 25 bp, Homo sapien
ccccatggccgccctccctgcctgg

SEQ ID NO: 4711348 - DNA, 25 bp, Homo sapien
tcacacacggactgtggcgtacaca

SEQ ID NO: 4711349 - DNA, 25 bp, Homo sapien
cgtactgaagcctgcgtccgaattt

SEQ ID NO: 4711350 - DNA, 25 bp, Homo sapien
tccattgtacagacggtctacccgg

SEQ ID NO: 4711351 - DNA, 25 bp, Homo sapien
ttctcgggaatggaatcacacacgg

SEQ ID NO: 4711352 - DNA, 25 bp, Homo sapien
tgaccgcagtctcagtcacagcctg

SEQ ID NO: 4711353 - DNA, 25 bp, Homo sapien
gggccgctgaccgcagtctcagtca

SEQ ID NO: 4711354 - DNA, 25 bp, Homo sapien
gcagtctcagtcacagcctgggagc

SEQ ID NO: 4711355 - DNA, 25 bp, Homo sapien
acggggccgctgaccgcagtctcag

SEQ ID NO: 4711356 - DNA, 25 bp, Homo sapien
tgtcccgtataagagcagcacagcc

SEQ ID NO: 4711357 - DNA, 25 bp, Homo sapien
ccggggtgtcccgtataagagcagc

SEQ ID NO: 4711358 - DNA, 25 bp, Homo sapien
cagttccaggctccgggcagcatct

SEQ ID NO: 4711359 - DNA, 25 bp, Homo sapien
tcctgttgtgagaggctccccactg

SEQ ID NO: 4711360 - DNA, 25 bp, Homo sapien
acccagatgcttggcaggtgctgtg

SEQ ID NO: 4711361 - DNA, 25 bp, Homo sapien
ggcaggggctgggtccctgctcgac

SEQ ID NO: 4711362 - DNA, 25 bp, Homo sapien
gtggcaggggctgggtccctgctcg

SEQ ID NO: 4711363 - DNA, 25 bp, Homo sapien
tcacccagatgcttggcaggtgctg

SEQ ID NO: 4711364 - DNA, 25 bp, Homo sapien
caggctcagcctgcgaaccacctgg

SEQ ID NO: 4711365 - DNA, 25 bp, Homo sapien
ggctcagcctgcgaaccacctggcc

SEQ ID NO: 4711366 - DNA, 25 bp, Homo sapien
ctcagcctgcgaaccacctggccct

SEQ ID NO: 4711367 - DNA, 25 bp, Homo sapien
cccaggctcagcctgcgaaccacct

SEQ ID NO: 4711368 - DNA, 25 bp, Homo sapien
caggcccacccgatgctgctcgact

SEQ ID NO: 4711369 - DNA, 25 bp, Homo sapien
tgcaggaggcacgaacctgttccca

SEQ ID NO: 4711370 - DNA, 25 bp, Homo sapien
cgatgctgctcgactcagtagcctg

SEQ ID NO: 4711371 - DNA, 25 bp, Homo sapien
acagcttgcaggaggcacgaacctg

SEQ ID NO: 4711372 - DNA, 25 bp, Homo sapien
ctgcgctgggttcagcacgtgcttc

SEQ ID NO: 4711373 - DNA, 25 bp, Homo sapien
gggccttcgtcgaggcaggtcttgg

SEQ ID NO: 4711374 - DNA, 25 bp, Homo sapien
cacaggcctgcgctgggttcagcac

SEQ ID NO: 4711375 - DNA, 25 bp, Homo sapien
caggcctgcgctgggttcagcacgt

SEQ ID NO: 4711376 - DNA, 25 bp, Homo sapien
ccgtccacgtgggacttaggtctca

SEQ ID NO: 4711377 - DNA, 25 bp, Homo sapien
tgcttcctggccataagctcatctg

SEQ ID NO: 4711378 - DNA, 25 bp, Homo sapien
ttcctggccataagctcatctgttt

SEQ ID NO: 4711379 - DNA, 25 bp, Homo sapien
aacacagggacatgacgcttacacc

SEQ ID NO: 4711380 - DNA, 25 bp, Homo sapien
catgacgcttacacccatctggaaa

SEQ ID NO: 4711381 - DNA, 25 bp, Homo sapien
cacggggtccttgtgcccggtgcgc

SEQ ID NO: 4711382 - DNA, 25 bp, Homo sapien
ctccacggggtccttgtgcccggtg

SEQ ID NO: 4711383 - DNA, 25 bp, Homo sapien
gtccttgtgcccggtgcgccctccc

SEQ ID NO: 4711384 - DNA, 25 bp, Homo sapien
gggtccttgtgcccggtgcgccctc

SEQ ID NO: 4711385 - DNA, 25 bp, Homo sapien
cggccggcgctgggaatgggaagcc

SEQ ID NO: 4711386 - DNA, 25 bp, Homo sapien
ggccggcgctgggaatgggaagccg

SEQ ID NO: 4711387 - DNA, 25 bp, Homo sapien
gccggcgctgggaatgggaagccga

SEQ ID NO: 4711388 - DNA, 25 bp, Homo sapien
agcagtgctcaacctgcacaaccac

SEQ ID NO: 4711389 - DNA, 25 bp, Homo sapien
ggtttcgctggtgcacgaagacgtc

SEQ ID NO: 4711390 - DNA, 25 bp, Homo sapien
gctggtgcacgaagacgtccaattc

SEQ ID NO: 4711391 - DNA, 25 bp, Homo sapien
cctgcacaaccacacgctaccaggt

SEQ ID NO: 4711392 - DNA, 25 bp, Homo sapien
agctgcctggtgggaaccggccggg

SEQ ID NO: 4711393 - DNA, 25 bp, Homo sapien
gcagcatcagaggcgggtcccccat

SEQ ID NO: 4711394 - DNA, 25 bp, Homo sapien
gggcccttaggaattcctgactgca

SEQ ID NO: 4711395 - DNA, 25 bp, Homo sapien
gcccttaggaattcctgactgcacg

SEQ ID NO: 4711396 - DNA, 25 bp, Homo sapien
ccttaggaattcctgactgcacgtc

SEQ ID NO: 4711397 - DNA, 25 bp, Homo sapien
ctcaggggcccttaggaattcctga

SEQ ID NO: 4711398 - DNA, 25 bp, Homo sapien
gtctgagggtgactccgcccagctc

SEQ ID NO: 4711399 - DNA, 25 bp, Homo sapien
tgcaccgtctgagggtgactccgcc

SEQ ID NO: 4711400 - DNA, 25 bp, Homo sapien
tccagcgggttcgtgcaggggtcga

SEQ ID NO: 4711401 - DNA, 25 bp, Homo sapien
caggtgcaccgtctgagggtgactc

SEQ ID NO: 4711402 - DNA, 25 bp, Homo sapien
atctgactggccaaggatgcacggg

SEQ ID NO: 4711403 - DNA, 25 bp, Homo sapien
gtttgtccttagaaccagaggccca

SEQ ID NO: 4711404 - DNA, 25 bp, Homo sapien
tccctatagacccattgaggcaggt

SEQ ID NO: 4711405 - DNA, 25 bp, Homo sapien
tgcgggtgagacctccaggtgaggc

SEQ ID NO: 4711406 - DNA, 25 bp, Homo sapien
ctgtgagttcccttccccagagccc

SEQ ID NO: 4711407 - DNA, 25 bp, Homo sapien
ccttccccagagcccagtgtccccg

SEQ ID NO: 4711408 - DNA, 25 bp, Homo sapien
tccccagagcccagtgtccccgttc

SEQ ID NO: 4711409 - DNA, 25 bp, Homo sapien
cagagcccagtgtccccgttcccgc

SEQ ID NO: 4711410 - DNA, 25 bp, Homo sapien
gggctccctggatgggctcagactc

SEQ ID NO: 4711411 - DNA, 25 bp, Homo sapien
ctggatgggctcagactcggcactg

SEQ ID NO: 4711412 - DNA, 25 bp, Homo sapien
tgggctcagactcggcactgggcct

SEQ ID NO: 4711413 - DNA, 25 bp, Homo sapien
agactcggcactgggcctgcctctc

SEQ ID NO: 4711414 - DNA, 25 bp, Homo sapien
tgccgccaccaccaggcaatgctgc

SEQ ID NO: 4711415 - DNA, 25 bp, Homo sapien
gtgccgccaccaccaggcaatgctg

SEQ ID NO: 4711416 - DNA, 25 bp, Homo sapien
aggtgccgccaccaccaggcaatgc

SEQ ID NO: 4711417 - DNA, 25 bp, Homo sapien
ccgccaccaccaggcaatgctgcct

SEQ ID NO: 4711418 - DNA, 25 bp, Homo sapien
aacaggctccacagttccgcggctg

SEQ ID NO: 4711419 - DNA, 25 bp, Homo sapien
aaacaggctccacagttccgcggct

SEQ ID NO: 4711420 - DNA, 25 bp, Homo sapien
cagttccgcggctgcaccaggtcat

SEQ ID NO: 4711421 - DNA, 25 bp, Homo sapien
ccacagttccgcggctgcaccaggt

SEQ ID NO: 4711422 - DNA, 25 bp, Homo sapien
ctcaggacgtaggaaccatgagtac

SEQ ID NO: 4711423 - DNA, 25 bp, Homo sapien
caggtcctttgggcccaaagcctgt

SEQ ID NO: 4711424 - DNA, 25 bp, Homo sapien
gtgccaggagagctttgaagcaccc

SEQ ID NO: 4711425 - DNA, 25 bp, Homo sapien
gatcttccagccaacatccgtctcc

SEQ ID NO: 4711426 - DNA, 25 bp, Homo sapien
cccgtggctccatgaacctggggat

SEQ ID NO: 4711427 - DNA, 25 bp, Homo sapien
ctgagtggctctcccagtgttcaca

SEQ ID NO: 4711428 - DNA, 25 bp, Homo sapien
tcgaggtgcacagggcggtgtccga

SEQ ID NO: 4711429 - DNA, 25 bp, Homo sapien
gggcggtgtccgaagccaggattct

SEQ ID NO: 4711430 - DNA, 25 bp, Homo sapien
tgcagcttcttcctcgaggtgcaca

SEQ ID NO: 4711431 - DNA, 25 bp, Homo sapien
ggctgttcccacgatccatcccggg

SEQ ID NO: 4711432 - DNA, 25 bp, Homo sapien
tgttcagtggccccgtggctgttcc

SEQ ID NO: 4711433 - DNA, 25 bp, Homo sapien
gtggctgttcccacgatccatcccg

SEQ ID NO: 4711434 - DNA, 25 bp, Homo sapien
gtggccccgtggctgttcccacgat

SEQ ID NO: 4711435 - DNA, 25 bp, Homo sapien
actgtgacacgcctcggttgggcag

SEQ ID NO: 4711436 - DNA, 25 bp, Homo sapien
gacacgcctcggttgggcagctggg

SEQ ID NO: 4711437 - DNA, 25 bp, Homo sapien
tgtgacacgcctcggttgggcagct

SEQ ID NO: 4711438 - DNA, 25 bp, Homo sapien
tcactgtgacacgcctcggttgggc

SEQ ID NO: 4711439 - DNA, 25 bp, Homo sapien
cctacagatatgcgggcagacatgg

SEQ ID NO: 4711440 - DNA, 25 bp, Homo sapien
tcctacagatatgcgggcagacatg

SEQ ID NO: 4711441 - DNA, 25 bp, Homo sapien
tggtcctacagatatgcgggcagac

SEQ ID NO: 4711442 - DNA, 25 bp, Homo sapien
ggtcctacagatatgcgggcagaca

SEQ ID NO: 4711443 - DNA, 25 bp, Homo sapien
cgggtggctgtgtgcctcctcggcc

SEQ ID NO: 4711444 - DNA, 25 bp, Homo sapien
tgtgtgcctcctcggccccagacat

SEQ ID NO: 4711445 - DNA, 25 bp, Homo sapien
aggcctcggtgctccctggccccgg

SEQ ID NO: 4711446 - DNA, 25 bp, Homo sapien
cctggccccgggtggctgtgtgcct

SEQ ID NO: 4711447 - DNA, 25 bp, Homo sapien
taaacgttcactctctcggtgtctg

SEQ ID NO: 4711448 - DNA, 25 bp, Homo sapien
tcctgacacgttcactctgtcggtg

SEQ ID NO: 4711449 - DNA, 25 bp, Homo sapien
tgggaggtgagacgacgcctcctct

SEQ ID NO: 4711450 - DNA, 25 bp, Homo sapien
gtgagatggcgcctcctgtccttcc

SEQ ID NO: 4711451 - DNA, 25 bp, Homo sapien
tggcaccgagggtgtgaggagcctc

SEQ ID NO: 4711452 - DNA, 25 bp, Homo sapien
cctctcctgggacaaaggccgaggg

SEQ ID NO: 4711453 - DNA, 25 bp, Homo sapien
gcaccgagggtgtgaggagcctctc

SEQ ID NO: 4711454 - DNA, 25 bp, Homo sapien
ccctggcaccgagggtgtgaggagc

SEQ ID NO: 4711455 - DNA, 25 bp, Homo sapien
tgtccttatcacaggctgcactccc

SEQ ID NO: 4711456 - DNA, 25 bp, Homo sapien
gcacagcagcctgcgcggaaacgct

SEQ ID NO: 4711457 - DNA, 25 bp, Homo sapien
aaaaggcggacgtgcagccggccat

SEQ ID NO: 4711458 - DNA, 25 bp, Homo sapien
gagccagggacaaaaggcggacgtg

SEQ ID NO: 4711459 - DNA, 25 bp, Homo sapien
agggctgcagccgggcccatagtcc

SEQ ID NO: 4711460 - DNA, 25 bp, Homo sapien
gtcgggggagggctgcagccgggcc

SEQ ID NO: 4711461 - DNA, 25 bp, Homo sapien
ggagggctgcagccgggcccatagt

SEQ ID NO: 4711462 - DNA, 25 bp, Homo sapien
ggggagggctgcagccgggcccata

SEQ ID NO: 4711463 - DNA, 25 bp, Homo sapien
ttgtccggggccccagccgtagctg

SEQ ID NO: 4711464 - DNA, 25 bp, Homo sapien
ggggccccagccgtagctgctactg

SEQ ID NO: 4711465 - DNA, 25 bp, Homo sapien
tccggggccccagccgtagctgcta

SEQ ID NO: 4711466 - DNA, 25 bp, Homo sapien
ggccccagccgtagctgctactggg

SEQ ID NO: 4711467 - DNA, 25 bp, Homo sapien
gcctccctggggttgatttcctaga

SEQ ID NO: 4711468 - DNA, 25 bp, Homo sapien
ggttgatttcctagagctcctacac

SEQ ID NO: 4711469 - DNA, 25 bp, Homo sapien
tggggttgatttcctagagctccta

SEQ ID NO: 4711470 - DNA, 25 bp, Homo sapien
tccctggggttgatttcctagagct

SEQ ID NO: 4711471 - DNA, 25 bp, Homo sapien
tcagcagaccggttgtgaggttgcc

SEQ ID NO: 4711472 - DNA, 25 bp, Homo sapien
ttgccgcgtaggcaccatgggcagt

SEQ ID NO: 4711473 - DNA, 25 bp, Homo sapien
gggtaaggatggatacctctcggta

SEQ ID NO: 4711474 - DNA, 25 bp, Homo sapien
tctcggtagctgatgcggggctcac

SEQ ID NO: 4711475 - DNA, 25 bp, Homo sapien
caatcccttgagacgtgggccatgt

SEQ ID NO: 4711476 - DNA, 25 bp, Homo sapien
gctgagcgtttgaccacatcggtgg

SEQ ID NO: 4711477 - DNA, 25 bp, Homo sapien
tagtccgtgccgatggcctctgcgg

SEQ ID NO: 4711478 - DNA, 25 bp, Homo sapien
cactgggttgcattctagtccgtgc

SEQ ID NO: 4711479 - DNA, 25 bp, Homo sapien
tctacggaagatgtcagagcgtttc

SEQ ID NO: 4711480 - DNA, 25 bp, Homo sapien
gagcgtttccctagcaatgttttag

SEQ ID NO: 4711481 - DNA, 25 bp, Homo sapien
ccctagcaatgttttagaagttact

SEQ ID NO: 4711482 - DNA, 25 bp, Homo sapien
tgctttttcacctctacggaagatg

SEQ ID NO: 4711483 - DNA, 25 bp, Homo sapien
aatggaatgacaccctggcaggagc

SEQ ID NO: 4711484 - DNA, 25 bp, Homo sapien
ctgagtgattccattgacaagagat

SEQ ID NO: 4711485 - DNA, 25 bp, Homo sapien
gcggcatggacgagccctgagtgat

SEQ ID NO: 4711486 - DNA, 25 bp, Homo sapien
tagtggttaccaaggaccgcaggag

SEQ ID NO: 4711487 - DNA, 25 bp, Homo sapien
caaggcccatccgtacagtgagaca

SEQ ID NO: 4711488 - DNA, 25 bp, Homo sapien
gcagggattcaaacagacgcgcaat

SEQ ID NO: 4711489 - DNA, 25 bp, Homo sapien
cactgctgagccgtaaagaggaatg

SEQ ID NO: 4711490 - DNA, 25 bp, Homo sapien
tgagtgcattgacaagccaaggccc

SEQ ID NO: 4711491 - DNA, 25 bp, Homo sapien
tccagcttctgggatcccgctcctg

SEQ ID NO: 4711492 - DNA, 25 bp, Homo sapien
agcttctgggatcccgctcctgcag

SEQ ID NO: 4711493 - DNA, 25 bp, Homo sapien
tcagcgccacgaacggggctggtcc

SEQ ID NO: 4711494 - DNA, 25 bp, Homo sapien
tcgcgtgtcccttcggggtcctcag

SEQ ID NO: 4711495 - DNA, 25 bp, Homo sapien
tgcaggctccgtggatgtccccagc

SEQ ID NO: 4711496 - DNA, 25 bp, Homo sapien
ggctccgtggatgtccccagcagca

SEQ ID NO: 4711497 - DNA, 25 bp, Homo sapien
tgtgctgcaggctccgtggatgtcc

SEQ ID NO: 4711498 - DNA, 25 bp, Homo sapien
ggtgagagcgcagtgtgggctcagg

SEQ ID NO: 4711499 - DNA, 25 bp, Homo sapien
cagcctgggggcttagctttgaaca

SEQ ID NO: 4711500 - DNA, 25 bp, Homo sapien
agcctgggggcttagctttgaacat

SEQ ID NO: 4711501 - DNA, 25 bp, Homo sapien
ttggccacaccccaggggaccggca

SEQ ID NO: 4711502 - DNA, 25 bp, Homo sapien
gagggcagactaagcccctggcaga

SEQ ID NO: 4711503 - DNA, 25 bp, Homo sapien
cactgctccagctgatggcgtggag

SEQ ID NO: 4711504 - DNA, 25 bp, Homo sapien
cacggatgtggtggaaccttcccat

SEQ ID NO: 4711505 - DNA, 25 bp, Homo sapien
agtccatggccttgtgggctggctt

SEQ ID NO: 4711506 - DNA, 25 bp, Homo sapien
gaggaagggcggctttttatgctcc

SEQ ID NO: 4711507 - DNA, 25 bp, Homo sapien
tcccagccggacttcctgtgtgtgt

SEQ ID NO: 4711508 - DNA, 25 bp, Homo sapien
gctccgtcctgggtaatcgggattg

SEQ ID NO: 4711509 - DNA, 25 bp, Homo sapien
aggagcctcccttgcagccgtgcag

SEQ ID NO: 4711510 - DNA, 25 bp, Homo sapien
ggactggagatggaccctagccctt

SEQ ID NO: 4711511 - DNA, 25 bp, Homo sapien
ctcaggcccactggccgcctggagg

SEQ ID NO: 4711512 - DNA, 25 bp, Homo sapien
actggagatggaccctagcccttgc

SEQ ID NO: 4711513 - DNA, 25 bp, Homo sapien
ctgggactggagatggaccctagcc

SEQ ID NO: 4711514 - DNA, 25 bp, Homo sapien
ctgatgctgctggagcccaggcgtg

SEQ ID NO: 4711515 - DNA, 25 bp, Homo sapien
atgctgctggagcccaggcgtggcc

SEQ ID NO: 4711516 - DNA, 25 bp, Homo sapien
tgatgctgctggagcccaggcgtgg

SEQ ID NO: 4711517 - DNA, 25 bp, Homo sapien
gctgctggagcccaggcgtggccat

SEQ ID NO: 4711518 - DNA, 25 bp, Homo sapien
ccagccaagctgaactttgctgcca

SEQ ID NO: 4711519 - DNA, 25 bp, Homo sapien
gggcccagccaagctgaactttgct

SEQ ID NO: 4711520 - DNA, 25 bp, Homo sapien
gcccagccaagctgaactttgctgc

SEQ ID NO: 4711521 - DNA, 25 bp, Homo sapien
gcgggcccagccaagctgaactttg

SEQ ID NO: 4711522 - DNA, 25 bp, Homo sapien
acaccgcagggcgtagcgcgaagcc

SEQ ID NO: 4711523 - DNA, 25 bp, Homo sapien
agccctcgggacaccgcagggcgta

SEQ ID NO: 4711524 - DNA, 25 bp, Homo sapien
cgggacaccgcagggcgtagcgcga

SEQ ID NO: 4711525 - DNA, 25 bp, Homo sapien
ctcgggacaccgcagggcgtagcgc

SEQ ID NO: 4711526 - DNA, 25 bp, Homo sapien
gggcccccgttgggttgctcatcca

SEQ ID NO: 4711527 - DNA, 25 bp, Homo sapien
tggattcacactgctcatcctggct

SEQ ID NO: 4711528 - DNA, 25 bp, Homo sapien
catcctggctacagatgtggctttg

SEQ ID NO: 4711529 - DNA, 25 bp, Homo sapien
cccccgttgggttgctcatccactg

SEQ ID NO: 4711530 - DNA, 25 bp, Homo sapien
agtcatccctaagcccgagccccac

SEQ ID NO: 4711531 - DNA, 25 bp, Homo sapien
agcaagtcatccctaagcccgagcc

SEQ ID NO: 4711532 - DNA, 25 bp, Homo sapien
gcaagtcatccctaagcccgagccc

SEQ ID NO: 4711533 - DNA, 25 bp, Homo sapien
ccagcaagtcatccctaagcccgag

SEQ ID NO: 4711534 - DNA, 25 bp, Homo sapien
tcagtcatcccccggacaggggcag

SEQ ID NO: 4711535 - DNA, 25 bp, Homo sapien
aatcagtcatcccccggacaggggc

SEQ ID NO: 4711536 - DNA, 25 bp, Homo sapien
agtcatcccccggacaggggcagga

SEQ ID NO: 4711537 - DNA, 25 bp, Homo sapien
gaatcagtcatcccccggacagggg

SEQ ID NO: 4711538 - DNA, 25 bp, Homo sapien
gagagtctcctcacaccagaggtcc

SEQ ID NO: 4711539 - DNA, 25 bp, Homo sapien
aggcatcaggcaccctcaccggggt

SEQ ID NO: 4711540 - DNA, 25 bp, Homo sapien
acagtcagggccatcgcagaacact

SEQ ID NO: 4711541 - DNA, 25 bp, Homo sapien
tccctgggctggtcacctctcttct

SEQ ID NO: 4711542 - DNA, 25 bp, Homo sapien
cgccggatccggggcgcgcacgcgc

SEQ ID NO: 4711543 - DNA, 25 bp, Homo sapien
gccggatccggggcgcgcacgcgcc

SEQ ID NO: 4711544 - DNA, 25 bp, Homo sapien
gtggaccagcagtccggtccccgtg

SEQ ID NO: 4711545 - DNA, 25 bp, Homo sapien
cgagccggtgctgcaagccccattt

SEQ ID NO: 4711546 - DNA, 25 bp, Homo sapien
aagtcatgttttcccgaggccagag

SEQ ID NO: 4711547 - DNA, 25 bp, Homo sapien
ccgtggtgctctccgagccggtgct

SEQ ID NO: 4711548 - DNA, 25 bp, Homo sapien
cagtttgcacttgctccgcgaggcc

SEQ ID NO: 4711549 - DNA, 25 bp, Homo sapien
gggcacaaagcatgacccctaagtc

SEQ ID NO: 4711550 - DNA, 25 bp, Homo sapien
tgacccctaagtctccccgcagatg

SEQ ID NO: 4711551 - DNA, 25 bp, Homo sapien
cccaggacgcgggtgcagtttgcac

SEQ ID NO: 4711552 - DNA, 25 bp, Homo sapien
ggggtggccttctcctctgggtggc

SEQ ID NO: 4711553 - DNA, 25 bp, Homo sapien
ggcctgtgcctccaggcggggtggc

SEQ ID NO: 4711554 - DNA, 25 bp, Homo sapien
cctgtgcctccaggcggggtggcct

SEQ ID NO: 4711555 - DNA, 25 bp, Homo sapien
gcggggtggccttctcctctgggtg

SEQ ID NO: 4711556 - DNA, 25 bp, Homo sapien
tctgtgccgcccactgccaacacca

SEQ ID NO: 4711557 - DNA, 25 bp, Homo sapien
ccggtaggcgtgctctgtgccgccc

SEQ ID NO: 4711558 - DNA, 25 bp, Homo sapien
gggccggtaggcgtgctctgtgccg

SEQ ID NO: 4711559 - DNA, 25 bp, Homo sapien
ccgggccggtaggcgtgctctgtgc

SEQ ID NO: 4711560 - DNA, 25 bp, Homo sapien
ggtacacacgctgcacgaacgactc

SEQ ID NO: 4711561 - DNA, 25 bp, Homo sapien
cggtgcccgtcgcaggtggtgagga

SEQ ID NO: 4711562 - DNA, 25 bp, Homo sapien
tgcacgaacgactcggagacagggt

SEQ ID NO: 4711563 - DNA, 25 bp, Homo sapien
acagggtccccgtgagcccggacag

SEQ ID NO: 4711564 - DNA, 25 bp, Homo sapien
agaggagagggtgtgcccggcctac

SEQ ID NO: 4711565 - DNA, 25 bp, Homo sapien
cagaggagagggtgtgcccggccta

SEQ ID NO: 4711566 - DNA, 25 bp, Homo sapien
acactccgcatggagcagaggcagt

SEQ ID NO: 4711567 - DNA, 25 bp, Homo sapien
ggtgctggccgggactcaagccaca

SEQ ID NO: 4711568 - DNA, 25 bp, Homo sapien
tcccctctcagagtgcacagggtca

SEQ ID NO: 4711569 - DNA, 25 bp, Homo sapien
tggccgggactcaagccacagcagg

SEQ ID NO: 4711570 - DNA, 25 bp, Homo sapien
cacgcgtagcgaggcctggcagggg

SEQ ID NO: 4711571 - DNA, 25 bp, Homo sapien
gctgcggcggtaggcggtcctatag

SEQ ID NO: 4711572 - DNA, 25 bp, Homo sapien
agggctgcggcggtaggcggtccta

SEQ ID NO: 4711573 - DNA, 25 bp, Homo sapien
gcggtaggcggtcctatagatggtt

SEQ ID NO: 4711574 - DNA, 25 bp, Homo sapien
accgggcgccgagggacatagccct

SEQ ID NO: 4711575 - DNA, 25 bp, Homo sapien
tggtcaccagctcagttgggtcccc

SEQ ID NO: 4711576 - DNA, 25 bp, Homo sapien
tggaagattggggaacagtcgccct

SEQ ID NO: 4711577 - DNA, 25 bp, Homo sapien
ggtgctctgcggcaaggtggtgctt

SEQ ID NO: 4711578 - DNA, 25 bp, Homo sapien
acacagctccctccgttccggcatg

SEQ ID NO: 4711579 - DNA, 25 bp, Homo sapien
acagctccctccgttccggcatggc

SEQ ID NO: 4711580 - DNA, 25 bp, Homo sapien
cacagctccctccgttccggcatgg

SEQ ID NO: 4711581 - DNA, 25 bp, Homo sapien
gacacagctccctccgttccggcat

SEQ ID NO: 4711582 - DNA, 25 bp, Homo sapien
ctgactggcaagtgtcaccccgcca

SEQ ID NO: 4711583 - DNA, 25 bp, Homo sapien
tgactggcaagtgtcaccccgccat

SEQ ID NO: 4711584 - DNA, 25 bp, Homo sapien
gactggcaagtgtcaccccgccatc

SEQ ID NO: 4711585 - DNA, 25 bp, Homo sapien
cactggcaccagtaactgccggcgg

SEQ ID NO: 4711586 - DNA, 25 bp, Homo sapien
gagtgtaccgtctgcagacaggctg

SEQ ID NO: 4711587 - DNA, 25 bp, Homo sapien
ccggcggtgttgacgcagcgctggg

SEQ ID NO: 4711588 - DNA, 25 bp, Homo sapien
cctcctagcactgcattcatccaca

SEQ ID NO: 4711589 - DNA, 25 bp, Homo sapien
tgcctaacagccacacggcaatgtc

SEQ ID NO: 4711590 - DNA, 25 bp, Homo sapien
ctgatatgaggctccgggcaacctg

SEQ ID NO: 4711591 - DNA, 25 bp, Homo sapien
cgccttccgcccagattccagtgcc

SEQ ID NO: 4711592 - DNA, 25 bp, Homo sapien
ccttcttggctgatatgaggctccg

SEQ ID NO: 4711593 - DNA, 25 bp, Homo sapien
ggtacgagtttgaagtgtcacagcg

SEQ ID NO: 4711594 - DNA, 25 bp, Homo sapien
tgtcacagcgcgtaccaaaagtaat

SEQ ID NO: 4711595 - DNA, 25 bp, Homo sapien
caaaagtaataatgtcccgtcgcca

SEQ ID NO: 4711596 - DNA, 25 bp, Homo sapien
aagtaataatgtcccgtcgccagcg

SEQ ID NO: 4711597 - DNA, 25 bp, Homo sapien
ccgtggacggcgcattattactcac

SEQ ID NO: 4711598 - DNA, 25 bp, Homo sapien
gccgtggacggcgcattattactca

SEQ ID NO: 4711599 - DNA, 25 bp, Homo sapien
tgccgtggacggcgcattattactc

SEQ ID NO: 4711600 - DNA, 25 bp, Homo sapien
tctcagggctatgccgcctaagtac

SEQ ID NO: 4711601 - DNA, 25 bp, Homo sapien
gctgaggtctcagcggcgttttcga

SEQ ID NO: 4711602 - DNA, 25 bp, Homo sapien
aggtctcagggctatgccgcctaag

SEQ ID NO: 4711603 - DNA, 25 bp, Homo sapien
ggctatgccgcctaagtacgtcggg

SEQ ID NO: 4711604 - DNA, 25 bp, Homo sapien
gccaggcgctgggtcacggccggcc

SEQ ID NO: 4711605 - DNA, 25 bp, Homo sapien
tgcgggcagagccaggcgctgggtc

SEQ ID NO: 4711606 - DNA, 25 bp, Homo sapien
caggcgctgggtcacggccggccgg

SEQ ID NO: 4711607 - DNA, 25 bp, Homo sapien
ggcgctgggtcacggccggccggct

SEQ ID NO: 4711608 - DNA, 25 bp, Homo sapien
ttcttccttcattgcactgtccact

SEQ ID NO: 4711609 - DNA, 25 bp, Homo sapien
cctgcctacccccccgatgcctcac

SEQ ID NO: 4711610 - DNA, 25 bp, Homo sapien
tacccccccgatgcctcacctcctc

SEQ ID NO: 4711611 - DNA, 25 bp, Homo sapien
gcctacccccccgatgcctcacctc

SEQ ID NO: 4711612 - DNA, 25 bp, Homo sapien
ctacccccccgatgcctcacctcct

SEQ ID NO: 4711613 - DNA, 25 bp, Homo sapien
cctctgctgttgtgaagacctgccc

SEQ ID NO: 4711614 - DNA, 25 bp, Homo sapien
catgtcccaggagactacggagcct

SEQ ID NO: 4711615 - DNA, 25 bp, Homo sapien
gctgccgtggcagaaaagcttgccg

SEQ ID NO: 4711616 - DNA, 25 bp, Homo sapien
ggctgtcaagcttggttcctccggc

SEQ ID NO: 4711617 - DNA, 25 bp, Homo sapien
tgctggaaggagtgcaccaggaggc

SEQ ID NO: 4711618 - DNA, 25 bp, Homo sapien
agcccatgctccagtgcctgcgagg

SEQ ID NO: 4711619 - DNA, 25 bp, Homo sapien
ctcagggagtcgatgcggccgagct

SEQ ID NO: 4711620 - DNA, 25 bp, Homo sapien
ggaaggaaatctgctcgctcaggga

SEQ ID NO: 4711621 - DNA, 25 bp, Homo sapien
ctagggttggatgaggcgaaggtca

SEQ ID NO: 4711622 - DNA, 25 bp, Homo sapien
ccaagcctgggtagcccctctaggc

SEQ ID NO: 4711623 - DNA, 25 bp, Homo sapien
cagctagatctgactggccccttgg

SEQ ID NO: 4711624 - DNA, 25 bp, Homo sapien
cgaaggtcagagatcactgctcccc

SEQ ID NO: 4711625 - DNA, 25 bp, Homo sapien
ctgcagggcggcgtgaggggctcag

SEQ ID NO: 4711626 - DNA, 25 bp, Homo sapien
gcagggcggcgtgaggggctcagtc

SEQ ID NO: 4711627 - DNA, 25 bp, Homo sapien
tcagtccagcctggggcgctgggca

SEQ ID NO: 4711628 - DNA, 25 bp, Homo sapien
gggctcagtccagcctggggcgctg

SEQ ID NO: 4711629 - DNA, 25 bp, Homo sapien
cagtcaccccgaggtggtttctgga

SEQ ID NO: 4711630 - DNA, 25 bp, Homo sapien
ttctggacccccagcatgttgggca

SEQ ID NO: 4711631 - DNA, 25 bp, Homo sapien
ggtttctggacccccagcatgttgg

SEQ ID NO: 4711632 - DNA, 25 bp, Homo sapien
tcagtcaccccgaggtggtttctgg

SEQ ID NO: 4711633 - DNA, 25 bp, Homo sapien
ggtagccaggggtggattcacagag

SEQ ID NO: 4711634 - DNA, 25 bp, Homo sapien
cctggccttgggatgccgttggggt

SEQ ID NO: 4711635 - DNA, 25 bp, Homo sapien
gcagggagctcgtaccttccctcag

SEQ ID NO: 4711636 - DNA, 25 bp, Homo sapien
gatgccgttggggtagccagggtgg

SEQ ID NO: 4711637 - DNA, 25 bp, Homo sapien
ggcccccagtccatccactgacaca

SEQ ID NO: 4711638 - DNA, 25 bp, Homo sapien
aggcccccagtccatccactgacac

SEQ ID NO: 4711639 - DNA, 25 bp, Homo sapien
caggcccccagtccatccactgaca

SEQ ID NO: 4711640 - DNA, 25 bp, Homo sapien
ccaccaggccccctttgccagctgg

SEQ ID NO: 4711641 - DNA, 25 bp, Homo sapien
tttgccagctggcacccagcagtgg

SEQ ID NO: 4711642 - DNA, 25 bp, Homo sapien
ccagctggcacccagcagtgggtct

SEQ ID NO: 4711643 - DNA, 25 bp, Homo sapien
cccacgactgcccgctccaccaggc

SEQ ID NO: 4711644 - DNA, 25 bp, Homo sapien
ctatccaggagtggacccacatcac

SEQ ID NO: 4711645 - DNA, 25 bp, Homo sapien
cggtggaggcgacgctgtgtcttcc

SEQ ID NO: 4711646 - DNA, 25 bp, Homo sapien
ggtgtcgcctaacgggcaagtgtgc

SEQ ID NO: 4711647 - DNA, 25 bp, Homo sapien
tatactacttccatcgatgggtggg

SEQ ID NO: 4711648 - DNA, 25 bp, Homo sapien
aatgtgttagcttcccaaatgtggc

SEQ ID NO: 4711649 - DNA, 25 bp, Homo sapien
aggcaacagggtcaccgtgtgctgc

SEQ ID NO: 4711650 - DNA, 25 bp, Homo sapien
gaaattaggtctcaccctcttcagg

SEQ ID NO: 4711651 - DNA, 25 bp, Homo sapien
ctggcaggagtcttccggctcagag

SEQ ID NO: 4711652 - DNA, 25 bp, Homo sapien
ggtgaaaccgtctccatgctgtcaa

SEQ ID NO: 4711653 - DNA, 25 bp, Homo sapien
tgagcaacgttcagcgtccgagtca

SEQ ID NO: 4711654 - DNA, 25 bp, Homo sapien
aaaattcggatgtcccaggtgggct

SEQ ID NO: 4711655 - DNA, 25 bp, Homo sapien
tcaggcgggttcctctaaaacagcc

SEQ ID NO: 4711656 - DNA, 25 bp, Homo sapien
gtttgcaccatttggccaactcgag

SEQ ID NO: 4711657 - DNA, 25 bp, Homo sapien
caactcgagcttggtgtcccagtgg

SEQ ID NO: 4711658 - DNA, 25 bp, Homo sapien
gtgtcccagtggcaatcttatttga

SEQ ID NO: 4711659 - DNA, 25 bp, Homo sapien
tttggccaactcgagcttggtgtcc

SEQ ID NO: 4711660 - DNA, 25 bp, Homo sapien
ggccccgcggctcgctcggcctcag

SEQ ID NO: 4711661 - DNA, 25 bp, Homo sapien
gcccggcccgcagcggccgccgctc

SEQ ID NO: 4711662 - DNA, 25 bp, Homo sapien
ctgcgcgggccccgcggctcgctcg

SEQ ID NO: 4711663 - DNA, 25 bp, Homo sapien
cgggccccgcggctcgctcggcctc

SEQ ID NO: 4711664 - DNA, 25 bp, Homo sapien
caggcgcttggagaaggggcagaag

SEQ ID NO: 4711665 - DNA, 25 bp, Homo sapien
aagagcaccaggtgcgccaggcgcc

SEQ ID NO: 4711666 - DNA, 25 bp, Homo sapien
ctgcaggcgcttggagaaggggcag

SEQ ID NO: 4711667 - DNA, 25 bp, Homo sapien
ggagaaggggcagaagagcaccagg

SEQ ID NO: 4711668 - DNA, 25 bp, Homo sapien
ctgggagggcatcccatccgaggcc

SEQ ID NO: 4711669 - DNA, 25 bp, Homo sapien
atccgaggccgggccccggatgatt

SEQ ID NO: 4711670 - DNA, 25 bp, Homo sapien
gccccggatgattggagcctgatgg

SEQ ID NO: 4711671 - DNA, 25 bp, Homo sapien
gtctgggagggcatcccatccgagg

SEQ ID NO: 4711672 - DNA, 25 bp, Homo sapien
ggcctggcacagatggacgggcaaa

SEQ ID NO: 4711673 - DNA, 25 bp, Homo sapien
cctggctcccgggcctggcacagat

SEQ ID NO: 4711674 - DNA, 25 bp, Homo sapien
tggcacagatggacgggcaaagctt

SEQ ID NO: 4711675 - DNA, 25 bp, Homo sapien
cgggcaaagcttgagtgtggaggtg

SEQ ID NO: 4711676 - DNA, 25 bp, Homo sapien
gagaggccccactgctggctccaag

SEQ ID NO: 4711677 - DNA, 25 bp, Homo sapien
tgctggctccaagcactccctgtgg

SEQ ID NO: 4711678 - DNA, 25 bp, Homo sapien
tcagagaggccccactgctggctcc

SEQ ID NO: 4711679 - DNA, 25 bp, Homo sapien
gcttgggggccagcttcccctcaga

SEQ ID NO: 4711680 - DNA, 25 bp, Homo sapien
atcctggaagcctttaagagacgca

SEQ ID NO: 4711681 - DNA, 25 bp, Homo sapien
tcctggaagcctttaagagacgcag

SEQ ID NO: 4711682 - DNA, 25 bp, Homo sapien
tggaagcctttaagagacgcaggcg

SEQ ID NO: 4711683 - DNA, 25 bp, Homo sapien
agcctttaagagacgcaggcgggcc

SEQ ID NO: 4711684 - DNA, 25 bp, Homo sapien
cgctccgagtaggacgagtagtgca

SEQ ID NO: 4711685 - DNA, 25 bp, Homo sapien
agacatggccgcgacagcgctccga

SEQ ID NO: 4711686 - DNA, 25 bp, Homo sapien
agtagtgcacgtacaccagccagct

SEQ ID NO: 4711687 - DNA, 25 bp, Homo sapien
atgaccacctggcagacatggccgc

SEQ ID NO: 4711688 - DNA, 25 bp, Homo sapien
tagcagtaattacatcaggcctggg

SEQ ID NO: 4711689 - DNA, 25 bp, Homo sapien
tgacagtctcaagggtacccctggg

SEQ ID NO: 4711690 - DNA, 25 bp, Homo sapien
cgccccacgggaggtgatggaggga

SEQ ID NO: 4711691 - DNA, 25 bp, Homo sapien
aggctcaagcgctccgttgtcagag

SEQ ID NO: 4711692 - DNA, 25 bp, Homo sapien
ccctgcccggaatagtaagtgagac

SEQ ID NO: 4711693 - DNA, 25 bp, Homo sapien
gaccatccaggcattggccggtgaa

SEQ ID NO: 4711694 - DNA, 25 bp, Homo sapien
aggagtcagacacgagccatagggc

SEQ ID NO: 4711695 - DNA, 25 bp, Homo sapien
tggactgcgtcttccatctgaaggg

SEQ ID NO: 4711696 - DNA, 25 bp, Homo sapien
ctggcagacggagcccgagatgatc

SEQ ID NO: 4711697 - DNA, 25 bp, Homo sapien
gagcccgagatgatccccttgcggt

SEQ ID NO: 4711698 - DNA, 25 bp, Homo sapien
ctccaccatatgcagctcacacagg

SEQ ID NO: 4711699 - DNA, 25 bp, Homo sapien
gatgatccccttgcggtactggtca

SEQ ID NO: 4711700 - DNA, 25 bp, Homo sapien
agaggtcctccgtgcagacatcccc

SEQ ID NO: 4711701 - DNA, 25 bp, Homo sapien
ggccacagaggtcctccgtgcagac

SEQ ID NO: 4711702 - DNA, 25 bp, Homo sapien
cacagaggtcctccgtgcagacatc

SEQ ID NO: 4711703 - DNA, 25 bp, Homo sapien
gccacagaggtcctccgtgcagaca

SEQ ID NO: 4711704 - DNA, 25 bp, Homo sapien
tgagggtcatctcccggaattcctt

SEQ ID NO: 4711705 - DNA, 25 bp, Homo sapien
tggttacatccttgtcccgccagag

SEQ ID NO: 4711706 - DNA, 25 bp, Homo sapien
catccgaccgggccttggagtcgag

SEQ ID NO: 4711707 - DNA, 25 bp, Homo sapien
gggtctcctcaatgccacacttgat

SEQ ID NO: 4711708 - DNA, 25 bp, Homo sapien
ggaggacgcagccagcaatgtgtca

SEQ ID NO: 4711709 - DNA, 25 bp, Homo sapien
ttgatgtctgggagcacgacctggc

SEQ ID NO: 4711710 - DNA, 25 bp, Homo sapien
agcccacagctacacgggtggagga

SEQ ID NO: 4711711 - DNA, 25 bp, Homo sapien
gacacacggcccttgactgcaggag

SEQ ID NO: 4711712 - DNA, 25 bp, Homo sapien
ctggccaaccagcgccggcagggaa

SEQ ID NO: 4711713 - DNA, 25 bp, Homo sapien
tggccaaccagcgccggcagggaag

SEQ ID NO: 4711714 - DNA, 25 bp, Homo sapien
tgagcaccagcgagtgatgggcctc

SEQ ID NO: 4711715 - DNA, 25 bp, Homo sapien
ccgctcagcgtggtacaggtgcgca

SEQ ID NO: 4711716 - DNA, 25 bp, Homo sapien
catgtagaaagtcccgtaagagccg

SEQ ID NO: 4711717 - DNA, 25 bp, Homo sapien
caggaactcgttacgctgcagcagg

SEQ ID NO: 4711718 - DNA, 25 bp, Homo sapien
acatcttctgacaggattccttgag

SEQ ID NO: 4711719 - DNA, 25 bp, Homo sapien
atgtccgcctttgctccgagctggg

SEQ ID NO: 4711720 - DNA, 25 bp, Homo sapien
cttggaggactctcctgccgggatg

SEQ ID NO: 4711721 - DNA, 25 bp, Homo sapien
ctggaatccagagccctgacggtag

SEQ ID NO: 4711722 - DNA, 25 bp, Homo sapien
gactcacacattgcggagcagagcc

SEQ ID NO: 4711723 - DNA, 25 bp, Homo sapien
tcctagggaatgagttgtacatctc

SEQ ID NO: 4711724 - DNA, 25 bp, Homo sapien
ctcaccttggactaacacctgaggg

SEQ ID NO: 4711725 - DNA, 25 bp, Homo sapien
gagcccgccctgaagaaaggtgttg

SEQ ID NO: 4711726 - DNA, 25 bp, Homo sapien
agaaccgcgtggctgtttttgaact

SEQ ID NO: 4711727 - DNA, 25 bp, Homo sapien
tgccctgctgtcattacagggatgg

SEQ ID NO: 4711728 - DNA, 25 bp, Homo sapien
gaataaaggtacagatagaggcctc

SEQ ID NO: 4711729 - DNA, 25 bp, Homo sapien
cactcagggtgtttgcagcctcaga

SEQ ID NO: 4711730 - DNA, 25 bp, Homo sapien
gccccgtgaacgtttgaatgtttga

SEQ ID NO: 4711731 - DNA, 25 bp, Homo sapien
gctcagcgttctgccccgtgaacgt

SEQ ID NO: 4711732 - DNA, 25 bp, Homo sapien
cagagattagagaggctatgtctac

SEQ ID NO: 4711733 - DNA, 25 bp, Homo sapien
gaggctatgtctacgctcagcgttc

SEQ ID NO: 4711734 - DNA, 25 bp, Homo sapien
taggattacagactatgcctggcta

SEQ ID NO: 4711735 - DNA, 25 bp, Homo sapien
tccagctaattttcaccgtgttgcc

SEQ ID NO: 4711736 - DNA, 25 bp, Homo sapien
ttttagacaggttctgtctctgtta

SEQ ID NO: 4711737 - DNA, 25 bp, Homo sapien
caggttctgtctctgttatccaggc

SEQ ID NO: 4711738 - DNA, 25 bp, Homo sapien
cgtctgtcgagtctcctgttgtgtc

SEQ ID NO: 4711739 - DNA, 25 bp, Homo sapien
cccgtctgtcgagtctcctgttgtg

SEQ ID NO: 4711740 - DNA, 25 bp, Homo sapien
ctcccgtctgtcgagtctcctgttg

SEQ ID NO: 4711741 - DNA, 25 bp, Homo sapien
tctgtcgagtctcctgttgtgtcct

SEQ ID NO: 4711742 - DNA, 25 bp, Homo sapien
cagggcgagctgggaccaaggggct

SEQ ID NO: 4711743 - DNA, 25 bp, Homo sapien
tcagggcgagctgggaccaaggggc

SEQ ID NO: 4711744 - DNA, 25 bp, Homo sapien
agggcgagctgggaccaaggggctc

SEQ ID NO: 4711745 - DNA, 25 bp, Homo sapien
ctcagggcgagctgggaccaagggg

SEQ ID NO: 4711746 - DNA, 25 bp, Homo sapien
ttcagagccatataaacgggtctcc

SEQ ID NO: 4711747 - DNA, 25 bp, Homo sapien
gacgctgtcctctcagcacgggtga

SEQ ID NO: 4711748 - DNA, 25 bp, Homo sapien
tccagaaaacaacctgcggacgctg

SEQ ID NO: 4711749 - DNA, 25 bp, Homo sapien
tggtggtgaccctcactccagaaaa

SEQ ID NO: 4711750 - DNA, 25 bp, Homo sapien
ctgaaggctccaggcctaagtgtcc

SEQ ID NO: 4711751 - DNA, 25 bp, Homo sapien
ggctgcagcataagctctgtgagtg

SEQ ID NO: 4711752 - DNA, 25 bp, Homo sapien
agatatccaaaaccgcagttcctga

SEQ ID NO: 4711753 - DNA, 25 bp, Homo sapien
ccttgttgcatggacgtgctccttg

SEQ ID NO: 4711754 - DNA, 25 bp, Homo sapien
ggctgttcagctttgcacaagtctg

SEQ ID NO: 4711755 - DNA, 25 bp, Homo sapien
catcccgccatgatcttgaagaagc

SEQ ID NO: 4711756 - DNA, 25 bp, Homo sapien
gacgtgacagtcaccggcgtctgga

SEQ ID NO: 4711757 - DNA, 25 bp, Homo sapien
tctgtgggcagaacatgtagcccca

SEQ ID NO: 4711758 - DNA, 25 bp, Homo sapien
tgggcgtgctccgaggccacctgct

SEQ ID NO: 4711759 - DNA, 25 bp, Homo sapien
aggactcccgcccctgaccagaggg

SEQ ID NO: 4711760 - DNA, 25 bp, Homo sapien
tcactccagaggactggcagtgctg

SEQ ID NO: 4711761 - DNA, 25 bp, Homo sapien
gcctccctggcaggactcccgcccc

SEQ ID NO: 4711762 - DNA, 25 bp, Homo sapien
gaagtgctcaagttcgctgtaaacg

SEQ ID NO: 4711763 - DNA, 25 bp, Homo sapien
ggctcacctgtcctagaacgtcgta

SEQ ID NO: 4711764 - DNA, 25 bp, Homo sapien
gtttcactgcatgagagtctgccag

SEQ ID NO: 4711765 - DNA, 25 bp, Homo sapien
tataaaaggagtcgcagatcgcagc

SEQ ID NO: 4711766 - DNA, 25 bp, Homo sapien
gcacggccactgacacatccatgtt

SEQ ID NO: 4711767 - DNA, 25 bp, Homo sapien
cactgacacatccatgtttggtgca

SEQ ID NO: 4711768 - DNA, 25 bp, Homo sapien
ttgactcctggcacggccactgaca

SEQ ID NO: 4711769 - DNA, 25 bp, Homo sapien
gccaagagcttgactcctggcacgg

SEQ ID NO: 4711770 - DNA, 25 bp, Homo sapien
ccacattgacatggttcattttcat

SEQ ID NO: 4711771 - DNA, 25 bp, Homo sapien
ccagtgccatggattccagtgccgc

SEQ ID NO: 4711772 - DNA, 25 bp, Homo sapien
ccctgttgtgaggaaagtaggtctg

SEQ ID NO: 4711773 - DNA, 25 bp, Homo sapien
ctgccagtgccatggattccagtgc

SEQ ID NO: 4711774 - DNA, 25 bp, Homo sapien
gttgtgaggaaagtaggtctggagg

SEQ ID NO: 4711775 - DNA, 25 bp, Homo sapien
tcataagactataactagagctatg

SEQ ID NO: 4711776 - DNA, 25 bp, Homo sapien
catctaaaatgcctatccaaagaac

SEQ ID NO: 4711777 - DNA, 25 bp, Homo sapien
ggcatctaaaatgcctatccaaaga

SEQ ID NO: 4711778 - DNA, 25 bp, Homo sapien
gagctatgctaaagcttcatatttc

SEQ ID NO: 4711779 - DNA, 25 bp, Homo sapien
atgtggaaggacctactctataata

SEQ ID NO: 4711780 - DNA, 25 bp, Homo sapien
gccaaaaggcatgggaaaaaagaca

SEQ ID NO: 4711781 - DNA, 25 bp, Homo sapien
gtggctgagagcgtgcgctcctccc

SEQ ID NO: 4711782 - DNA, 25 bp, Homo sapien
ctccggcgacgactgggcggggcga

SEQ ID NO: 4711783 - DNA, 25 bp, Homo sapien
ggcgtggctgagagcgtgcgctcct

SEQ ID NO: 4711784 - DNA, 25 bp, Homo sapien
tccggcgacgactgggcggggcgaa

SEQ ID NO: 4711785 - DNA, 25 bp, Homo sapien
ccagggccttggattgggggcggag

SEQ ID NO: 4711786 - DNA, 25 bp, Homo sapien
cctgcgcaggcggaggtgtcgggtt

SEQ ID NO: 4711787 - DNA, 25 bp, Homo sapien
cggaggtgtcgggttctaagaggcg

SEQ ID NO: 4711788 - DNA, 25 bp, Homo sapien
cgcaggcggaggtgtcgggttctaa

SEQ ID NO: 4711789 - DNA, 25 bp, Homo sapien
ggcagggcccggatctgggggcgag

SEQ ID NO: 4711790 - DNA, 25 bp, Homo sapien
atctgggggcgaggcctagggaccg

SEQ ID NO: 4711791 - DNA, 25 bp, Homo sapien
tgcgcagttacggacggaggggcag

SEQ ID NO: 4711792 - DNA, 25 bp, Homo sapien
ctgcgcagttacggacggaggggca

SEQ ID NO: 4711793 - DNA, 25 bp, Homo sapien
gcgcaggcgcaggcggaagggcggg

SEQ ID NO: 4711794 - DNA, 25 bp, Homo sapien
cgcaggcgcaggcggaagggcggga

SEQ ID NO: 4711795 - DNA, 25 bp, Homo sapien
cgggtgcttggcagccacggcgtcg

SEQ ID NO: 4711796 - DNA, 25 bp, Homo sapien
cacggcgtcgtccacccgggacaga

SEQ ID NO: 4711797 - DNA, 25 bp, Homo sapien
tgcttggcagccacggcgtcgtcca

SEQ ID NO: 4711798 - DNA, 25 bp, Homo sapien
ccacggcgtcgtccacccgggacag

SEQ ID NO: 4711799 - DNA, 25 bp, Homo sapien
cactcttccctgacgagggcacccc

SEQ ID NO: 4711800 - DNA, 25 bp, Homo sapien
tctggggtttgaggcccgcgtccca

SEQ ID NO: 4711801 - DNA, 25 bp, Homo sapien
accctgggcgcttggacacgtccca

SEQ ID NO: 4711802 - DNA, 25 bp, Homo sapien
gccctgagccccttagcaagagagt

SEQ ID NO: 4711803 - DNA, 25 bp, Homo sapien
ctgccctcttccttcaccgcctctc

SEQ ID NO: 4711804 - DNA, 25 bp, Homo sapien
ggcgggtgaaggctcgatcccctgc

SEQ ID NO: 4711805 - DNA, 25 bp, Homo sapien
cgggtgaaggctcgatcccctgccc

SEQ ID NO: 4711806 - DNA, 25 bp, Homo sapien
gaggcgggtgaaggctcgatcccct

SEQ ID NO: 4711807 - DNA, 25 bp, Homo sapien
actggcatgcggcatactccccgag

SEQ ID NO: 4711808 - DNA, 25 bp, Homo sapien
tcatgaaggcgtgtgactggcatgc

SEQ ID NO: 4711809 - DNA, 25 bp, Homo sapien
tggcatgcggcatactccccgagtc

SEQ ID NO: 4711810 - DNA, 25 bp, Homo sapien
ctgtgacgaaggtgaaaacgccctt

SEQ ID NO: 4711811 - DNA, 25 bp, Homo sapien
tgtacccggggatagccagggccca

SEQ ID NO: 4711812 - DNA, 25 bp, Homo sapien
ggcaggtgacttggcgccccctgct

SEQ ID NO: 4711813 - DNA, 25 bp, Homo sapien
aagagccgaggtccccatcaacctg

SEQ ID NO: 4711814 - DNA, 25 bp, Homo sapien
gggtgcgttctctcccagccgcagg

SEQ ID NO: 4711815 - DNA, 25 bp, Homo sapien
ggctccactgcaaagggtatggaaa

SEQ ID NO: 4711816 - DNA, 25 bp, Homo sapien
gctccactgcaaagggtatggaaac

SEQ ID NO: 4711817 - DNA, 25 bp, Homo sapien
gaaccgggcacaggctacttcctga

SEQ ID NO: 4711818 - DNA, 25 bp, Homo sapien
cttcccaggctaagagaaccgggca

SEQ ID NO: 4711819 - DNA, 25 bp, Homo sapien
gtcagagtcagggacgcagaaccac

SEQ ID NO: 4711820 - DNA, 25 bp, Homo sapien
tacttcctgacagacgtggtgggtg

SEQ ID NO: 4711821 - DNA, 25 bp, Homo sapien
cagaggttgttgcatttctccgact

SEQ ID NO: 4711822 - DNA, 25 bp, Homo sapien
tcgtcaccccgtagctgaccacaga

SEQ ID NO: 4711823 - DNA, 25 bp, Homo sapien
aggaagagccagaggttgttgcatt

SEQ ID NO: 4711824 - DNA, 25 bp, Homo sapien
gagccagaggttgttgcatttctcc

SEQ ID NO: 4711825 - DNA, 25 bp, Homo sapien
catgaaggctgtgttccagactcct

SEQ ID NO: 4711826 - DNA, 25 bp, Homo sapien
gcatgaaggctgtgttccagactcc

SEQ ID NO: 4711827 - DNA, 25 bp, Homo sapien
ggcatgaaggctgtgttccagactc

SEQ ID NO: 4711828 - DNA, 25 bp, Homo sapien
gggcatgaaggctgtgttccagact

SEQ ID NO: 4711829 - DNA, 25 bp, Homo sapien
cagcagccatctgcaggtgtttgtc

SEQ ID NO: 4711830 - DNA, 25 bp, Homo sapien
gcaggtgtttgtcaggcctggccac

SEQ ID NO: 4711831 - DNA, 25 bp, Homo sapien
aggcctggccacacatgcggacaga

SEQ ID NO: 4711832 - DNA, 25 bp, Homo sapien
ccacacatgcggacagaggatacga

SEQ ID NO: 4711833 - DNA, 25 bp, Homo sapien
ggaaatgacagagtgtacaggcccc

SEQ ID NO: 4711834 - DNA, 25 bp, Homo sapien
agtgcagaacatgcatcccaatacc

SEQ ID NO: 4711835 - DNA, 25 bp, Homo sapien
acagagtgtacaggccccttcgacc

SEQ ID NO: 4711836 - DNA, 25 bp, Homo sapien
tggcagtgcagaacatgcatcccaa

SEQ ID NO: 4711837 - DNA, 25 bp, Homo sapien
cttggacttgttggagatgcagggg

SEQ ID NO: 4711838 - DNA, 25 bp, Homo sapien
caccttggacttgttggagatgcag

SEQ ID NO: 4711839 - DNA, 25 bp, Homo sapien
tcaccttggacttgttggagatgca

SEQ ID NO: 4711840 - DNA, 25 bp, Homo sapien
accttggacttgttggagatgcagg

SEQ ID NO: 4711841 - DNA, 25 bp, Homo sapien
gataagccatttattaaccccacgc

SEQ ID NO: 4711842 - DNA, 25 bp, Homo sapien
attaaccccacgcccctagcaccag

SEQ ID NO: 4711843 - DNA, 25 bp, Homo sapien
ggagagaaggataagccatttatta

SEQ ID NO: 4711844 - DNA, 25 bp, Homo sapien
tattaaccccacgcccctagcacca

SEQ ID NO: 4711845 - DNA, 25 bp, Homo sapien
ttgtttttcacctggtcaggtggaa

SEQ ID NO: 4711846 - DNA, 25 bp, Homo sapien
tgatttgtttttcacctggtcaggt

SEQ ID NO: 4711847 - DNA, 25 bp, Homo sapien
ctgatttgtttttcacctggtcagg

SEQ ID NO: 4711848 - DNA, 25 bp, Homo sapien
atttgtttttcacctggtcaggtgg

SEQ ID NO: 4711849 - DNA, 25 bp, Homo sapien
tacaacgggctagctctgcctctgg

SEQ ID NO: 4711850 - DNA, 25 bp, Homo sapien
ccatgatggacttgtggaggttccg

SEQ ID NO: 4711851 - DNA, 25 bp, Homo sapien
tgactttggctaatagatgagtggg

SEQ ID NO: 4711852 - DNA, 25 bp, Homo sapien
tgtgtgtaggcttgcccactcagaa

SEQ ID NO: 4711853 - DNA, 25 bp, Homo sapien
aaggtgaggcgtggcagctgagctg

SEQ ID NO: 4711854 - DNA, 25 bp, Homo sapien
cctggcaaggtgaggcgtggcagct

SEQ ID NO: 4711855 - DNA, 25 bp, Homo sapien
tcaataaactttctttccagtgcct

SEQ ID NO: 4711856 - DNA, 25 bp, Homo sapien
tctttccagtgcctggcaaggtgag

SEQ ID NO: 4711857 - DNA, 25 bp, Homo sapien
ctgaagccactgtcaacttgagctt

SEQ ID NO: 4711858 - DNA, 25 bp, Homo sapien
aagccactgtcaacttgagcttcct

SEQ ID NO: 4711859 - DNA, 25 bp, Homo sapien
cgacgacaacaccacaaaaaacaga

SEQ ID NO: 4711860 - DNA, 25 bp, Homo sapien
acgacgacaacaccacaaaaaacag

SEQ ID NO: 4711861 - DNA, 25 bp, Homo sapien
tttagtgggcgcatggctgcccaga

SEQ ID NO: 4711862 - DNA, 25 bp, Homo sapien
gacacaatggccgaagctggtgcag

SEQ ID NO: 4711863 - DNA, 25 bp, Homo sapien
ccttcctgagcatcctggcactgga

SEQ ID NO: 4711864 - DNA, 25 bp, Homo sapien
tgaggcagatttgggaacagagacc

SEQ ID NO: 4711865 - DNA, 25 bp, Homo sapien
tattctgatactgccttacgggacc

SEQ ID NO: 4711866 - DNA, 25 bp, Homo sapien
aaactccatgcactgggtaacctgg

SEQ ID NO: 4711867 - DNA, 25 bp, Homo sapien
tcctggcagctgctcgaggcttagg

SEQ ID NO: 4711868 - DNA, 25 bp, Homo sapien
ggccgagcctcctaaaacgattctg

SEQ ID NO: 4711869 - DNA, 25 bp, Homo sapien
cctggagctgagtgatggtcttcag

SEQ ID NO: 4711870 - DNA, 25 bp, Homo sapien
tgctcttccacatctgtctcactgt

SEQ ID NO: 4711871 - DNA, 25 bp, Homo sapien
agctcctgggtctgctcttccacat

SEQ ID NO: 4711872 - DNA, 25 bp, Homo sapien
tggagctgagtgatggtcttcagct

SEQ ID NO: 4711873 - DNA, 25 bp, Homo sapien
cacaaaaagttgtgcacccagaaac

SEQ ID NO: 4711874 - DNA, 25 bp, Homo sapien
cctgcacggccctaaatgcattaat

SEQ ID NO: 4711875 - DNA, 25 bp, Homo sapien
cgggaaagggagactggtcacggcg

SEQ ID NO: 4711876 - DNA, 25 bp, Homo sapien
ggccagatttgtttcacgttacaca

SEQ ID NO: 4711877 - DNA, 25 bp, Homo sapien
ccccttggatctggagtgcccgaca

SEQ ID NO: 4711878 - DNA, 25 bp, Homo sapien
ttgctgcgcaggagggccagcgtgg

SEQ ID NO: 4711879 - DNA, 25 bp, Homo sapien
gatgttgctgcgcaggagggccagc

SEQ ID NO: 4711880 - DNA, 25 bp, Homo sapien
tggatctggagtgcccgacactgct

SEQ ID NO: 4711881 - DNA, 25 bp, Homo sapien
gggcacaggtcctagcagagcccct

SEQ ID NO: 4711882 - DNA, 25 bp, Homo sapien
cacagatgccaagccctcgggttgg

SEQ ID NO: 4711883 - DNA, 25 bp, Homo sapien
cacatgccccctggatccagaaaga

SEQ ID NO: 4711884 - DNA, 25 bp, Homo sapien
ggtgggaaacctgcccaccggatgc

SEQ ID NO: 4711885 - DNA, 25 bp, Homo sapien
agagagccgcgggaccccatcctgg

SEQ ID NO: 4711886 - DNA, 25 bp, Homo sapien
catcctggccatccaagttcggagg

SEQ ID NO: 4711887 - DNA, 25 bp, Homo sapien
ctgcttccacgaggagcagagagcc

SEQ ID NO: 4711888 - DNA, 25 bp, Homo sapien
catccaagttcggaggcgacgtggt

SEQ ID NO: 4711889 - DNA, 25 bp, Homo sapien
ctagagcgggccctttgcgcacccg

SEQ ID NO: 4711890 - DNA, 25 bp, Homo sapien
tgtatcccacgctagcccagtagcg

SEQ ID NO: 4711891 - DNA, 25 bp, Homo sapien
tcttgtatcccacgctagcccagta

SEQ ID NO: 4711892 - DNA, 25 bp, Homo sapien
tatcccacgctagcccagtagcgag

SEQ ID NO: 4711893 - DNA, 25 bp, Homo sapien
cgccagtcgcaaaggcaagtttttc

SEQ ID NO: 4711894 - DNA, 25 bp, Homo sapien
cagtgcgccagtcgcaaaggcaagt

SEQ ID NO: 4711895 - DNA, 25 bp, Homo sapien
aggcaagtttttcccgcaggccttg

SEQ ID NO: 4711896 - DNA, 25 bp, Homo sapien
cggcagtgcgccagtcgcaaaggca

SEQ ID NO: 4711897 - DNA, 25 bp, Homo sapien
gttgggtctcgaggcccctcctgcc

SEQ ID NO: 4711898 - DNA, 25 bp, Homo sapien
ggttgggtctcgaggcccctcctgc

SEQ ID NO: 4711899 - DNA, 25 bp, Homo sapien
tccgtccctcgtcggctccgcaaca

SEQ ID NO: 4711900 - DNA, 25 bp, Homo sapien
ctccgtccctcgtcggctccgcaac

SEQ ID NO: 4711901 - DNA, 25 bp, Homo sapien
ccgtccctcgtcggctccgcaacat

SEQ ID NO: 4711902 - DNA, 25 bp, Homo sapien
ggtggaggctcgtggcaaccccaca

SEQ ID NO: 4711903 - DNA, 25 bp, Homo sapien
tcgggaagggcaccgcccactcgtg

SEQ ID NO: 4711904 - DNA, 25 bp, Homo sapien
accgcccactcgtggttgcgtaggg

SEQ ID NO: 4711905 - DNA, 25 bp, Homo sapien
ggcgggtggaggctcgtggcaaccc

SEQ ID NO: 4711906 - DNA, 25 bp, Homo sapien
catgttcacgcggtcgaagacgtac

SEQ ID NO: 4711907 - DNA, 25 bp, Homo sapien
tcgaagacgtacttgcgcagcttct

SEQ ID NO: 4711908 - DNA, 25 bp, Homo sapien
tcagtaggttgtgcatgttcacgcg

SEQ ID NO: 4711909 - DNA, 25 bp, Homo sapien
gcgccgccgcaccaggtggatcagt

SEQ ID NO: 4711910 - DNA, 25 bp, Homo sapien
ctggggcggaccgagggcgcagtga

SEQ ID NO: 4711911 - DNA, 25 bp, Homo sapien
cagcaggtggatgttctggctggtg

SEQ ID NO: 4711912 - DNA, 25 bp, Homo sapien
cgatgttgttctccagctggcggat

SEQ ID NO: 4711913 - DNA, 25 bp, Homo sapien
tgtcttcagataatccagcaggtcc

SEQ ID NO: 4711914 - DNA, 25 bp, Homo sapien
ccagcaggtccaaatacagcaggtg

SEQ ID NO: 4711915 - DNA, 25 bp, Homo sapien
tgcaggacctgtctgactctcagag

SEQ ID NO: 4711916 - DNA, 25 bp, Homo sapien
cagcggaccctcaaaggtgcaagga

SEQ ID NO: 4711917 - DNA, 25 bp, Homo sapien
gaattctgatataccccacgatatg

SEQ ID NO: 4711918 - DNA, 25 bp, Homo sapien
taatacgtgcaagaaagtccgaaga

SEQ ID NO: 4711919 - DNA, 25 bp, Homo sapien
tcggactgctggctgcctttggcct

SEQ ID NO: 4711920 - DNA, 25 bp, Homo sapien
ggactgctggctgcctttggcctcg

SEQ ID NO: 4711921 - DNA, 25 bp, Homo sapien
aatcggactgctggctgcctttggc

SEQ ID NO: 4711922 - DNA, 25 bp, Homo sapien
gactgctggctgcctttggcctcgt

SEQ ID NO: 4711923 - DNA, 25 bp, Homo sapien
ctatctacagcccatctggagtagg

SEQ ID NO: 4711924 - DNA, 25 bp, Homo sapien
tctacagcccatctggagtaggttc

SEQ ID NO: 4711925 - DNA, 25 bp, Homo sapien
tctccctatctacagcccatctgga

SEQ ID NO: 4711926 - DNA, 25 bp, Homo sapien
ctggagtaggttctgctttgtggca

SEQ ID NO: 4711927 - DNA, 25 bp, Homo sapien
gtgtgtatgttctaaacagaagaag

SEQ ID NO: 4711928 - DNA, 25 bp, Homo sapien
aagaaggcgctaccagaggaacaga

SEQ ID NO: 4711929 - DNA, 25 bp, Homo sapien
taaacagaagaaggcgctaccagag

SEQ ID NO: 4711930 - DNA, 25 bp, Homo sapien
catgcccaggccgggaataattgtt

SEQ ID NO: 4711931 - DNA, 25 bp, Homo sapien
ttttgtaactacaagtataggccag

SEQ ID NO: 4711932 - DNA, 25 bp, Homo sapien
tttttgtaactacaagtataggcca

SEQ ID NO: 4711933 - DNA, 25 bp, Homo sapien
gatagctttgctatagtggtttgtt

SEQ ID NO: 4711934 - DNA, 25 bp, Homo sapien
catacgtgctcaggatagctttgct

SEQ ID NO: 4711935 - DNA, 25 bp, Homo sapien
tcttcatatccgacagctctgagca

SEQ ID NO: 4711936 - DNA, 25 bp, Homo sapien
tctgagcagtagttgaccacgaggt

SEQ ID NO: 4711937 - DNA, 25 bp, Homo sapien
cgtgatcatcatggcatcttgggac

SEQ ID NO: 4711938 - DNA, 25 bp, Homo sapien
tcttgggacatgatcttcatatccg

SEQ ID NO: 4711939 - DNA, 25 bp, Homo sapien
catccgaagatccaagagggctggc

SEQ ID NO: 4711940 - DNA, 25 bp, Homo sapien
cgaagatccaagagggctggccctg

SEQ ID NO: 4711941 - DNA, 25 bp, Homo sapien
ttgaccccatccgaagatccaagag

SEQ ID NO: 4711942 - DNA, 25 bp, Homo sapien
ccccatccgaagatccaagagggct

SEQ ID NO: 4711943 - DNA, 25 bp, Homo sapien
catccgaagatccaagagggctggc

SEQ ID NO: 4711944 - DNA, 25 bp, Homo sapien
ttgaccccatccgaagatccaagag

SEQ ID NO: 4711945 - DNA, 25 bp, Homo sapien
cgaagatccaagagggctggccctg

SEQ ID NO: 4711946 - DNA, 25 bp, Homo sapien
tgagctcaccttgaccccatccgaa

SEQ ID NO: 4711947 - DNA, 25 bp, Homo sapien
cccatccgaagatccaagagggctg

SEQ ID NO: 4711948 - DNA, 25 bp, Homo sapien
atccgaagatccaagagggctggcc

SEQ ID NO: 4711949 - DNA, 25 bp, Homo sapien
ttgaccccatccgaagatccaagag

SEQ ID NO: 4711950 - DNA, 25 bp, Homo sapien
tgagctcaccttgaccccatccgaa

SEQ ID NO: 4711951 - DNA, 25 bp, Homo sapien
atccgaagatccaagagggctggcc

SEQ ID NO: 4711952 - DNA, 25 bp, Homo sapien
ttgaccccatccgaagatccaagag

SEQ ID NO: 4711953 - DNA, 25 bp, Homo sapien
ccccatccgaagatccaagagggct

SEQ ID NO: 4711954 - DNA, 25 bp, Homo sapien
tgaccccatccgaagatccaagagg

SEQ ID NO: 4711955 - DNA, 25 bp, Homo sapien
gggccccagccctgggccctgagct

SEQ ID NO: 4711956 - DNA, 25 bp, Homo sapien
ggccccagccctgggccctgagctc

SEQ ID NO: 4711957 - DNA, 25 bp, Homo sapien
ccccagccctgggccctgagctcac

SEQ ID NO: 4711958 - DNA, 25 bp, Homo sapien
ggggccccagccctgggccctgagc

SEQ ID NO: 4711959 - DNA, 25 bp, Homo sapien
atccgaagatccaagagggctggcc

SEQ ID NO: 4711960 - DNA, 25 bp, Homo sapien
ttgaccccatccgaagatccaagag

SEQ ID NO: 4711961 - DNA, 25 bp, Homo sapien
ccccatccgaagatccaagagggct

SEQ ID NO: 4711962 - DNA, 25 bp, Homo sapien
tgaccccatccgaagatccaagagg

SEQ ID NO: 4711963 - DNA, 25 bp, Homo sapien
catccgaagatccaagagggctggc

SEQ ID NO: 4711964 - DNA, 25 bp, Homo sapien
ttgaccccatccgaagatccaagag

SEQ ID NO: 4711965 - DNA, 25 bp, Homo sapien
cgaagatccaagagggctggccctg

SEQ ID NO: 4711966 - DNA, 25 bp, Homo sapien
ccccatccgaagatccaagagggct

SEQ ID NO: 4711967 - DNA, 25 bp, Homo sapien
taatggcagtaaagccagcgggcgg

SEQ ID NO: 4711968 - DNA, 25 bp, Homo sapien
ccttactagactttggaactgcatc

SEQ ID NO: 4711969 - DNA, 25 bp, Homo sapien
ccagcgggcggttggccatgctcac

SEQ ID NO: 4711970 - DNA, 25 bp, Homo sapien
tcaacaaggcccctaatggcagtaa

SEQ ID NO: 4711971 - DNA, 25 bp, Homo sapien
tcttctgctggttgagccggttctc

SEQ ID NO: 4711972 - DNA, 25 bp, Homo sapien
aggacgcctccctttgcctcatgtt

SEQ ID NO: 4711973 - DNA, 25 bp, Homo sapien
tccttcgtgtggatcttgtcgatca

SEQ ID NO: 4711974 - DNA, 25 bp, Homo sapien
gcccggcgctcctcgatgaaggacg

SEQ ID NO: 4711975 - DNA, 25 bp, Homo sapien
atttcagggtctccgtgctcatcag

SEQ ID NO: 4711976 - DNA, 25 bp, Homo sapien
catcaggttcgaggggaagtccaag

SEQ ID NO: 4711977 - DNA, 25 bp, Homo sapien
cagggtctccgtgctcatcaggttc

SEQ ID NO: 4711978 - DNA, 25 bp, Homo sapien
tctccgtgctcatcaggttcgaggg

SEQ ID NO: 4711979 - DNA, 25 bp, Homo sapien
acgcccgactggtattccatttctg

SEQ ID NO: 4711980 - DNA, 25 bp, Homo sapien
cagcagtcacgcccgactggtattc

SEQ ID NO: 4711981 - DNA, 25 bp, Homo sapien
gcagtcacgcccgactggtattcca

SEQ ID NO: 4711982 - DNA, 25 bp, Homo sapien
tcacgcccgactggtattccatttc

SEQ ID NO: 4711983 - DNA, 25 bp, Homo sapien
ccattctctgggagcgccaggggca

SEQ ID NO: 4711984 - DNA, 25 bp, Homo sapien
ctcctgccattctctgggagcgcca

SEQ ID NO: 4711985 - DNA, 25 bp, Homo sapien
ctgccattctctgggagcgccaggg

SEQ ID NO: 4711986 - DNA, 25 bp, Homo sapien
cattctctgggagcgccaggggcat

SEQ ID NO: 4711987 - DNA, 25 bp, Homo sapien
caagcttgtgtcagggcagtggtta

SEQ ID NO: 4711988 - DNA, 25 bp, Homo sapien
taaggagatcatcactgaaggacgt

SEQ ID NO: 4711989 - DNA, 25 bp, Homo sapien
gataaccccatgtagagataaggag

SEQ ID NO: 4711990 - DNA, 25 bp, Homo sapien
gcacacgaccctaatggcaggcaga

SEQ ID NO: 4711991 - DNA, 25 bp, Homo sapien
gatggagctaggcttctggcggaac

SEQ ID NO: 4711992 - DNA, 25 bp, Homo sapien
atggagctaggcttctggcggaact

SEQ ID NO: 4711993 - DNA, 25 bp, Homo sapien
tgatggagctaggcttctggcggaa

SEQ ID NO: 4711994 - DNA, 25 bp, Homo sapien
ctgatggagctaggcttctggcgga

SEQ ID NO: 4711995 - DNA, 25 bp, Homo sapien
tgttggcagtgggtatactcccagc

SEQ ID NO: 4711996 - DNA, 25 bp, Homo sapien
tgtgtgcaagtggagtcccctggcc

SEQ ID NO: 4711997 - DNA, 25 bp, Homo sapien
gcagtgggtatactcccagctccca

SEQ ID NO: 4711998 - DNA, 25 bp, Homo sapien
gactcagaagctcaggtgtgtgcaa

SEQ ID NO: 4711999 - DNA, 25 bp, Homo sapien
ccagtcctgagttgggtgctgtgcc

SEQ ID NO: 4712000 - DNA, 25 bp, Homo sapien
ccgagagccatggtgggccacccag

SEQ ID NO: 4712001 - DNA, 25 bp, Homo sapien
gggcacaggcccgagagccatggtg

SEQ ID NO: 4712002 - DNA, 25 bp, Homo sapien
ctgcagaaggcaatagggacacagc

SEQ ID NO: 4712003 - DNA, 25 bp, Homo sapien
ctgggtcgcaggcaagttaatgccc

SEQ ID NO: 4712004 - DNA, 25 bp, Homo sapien
catcagccggacatagaggttgtcg

SEQ ID NO: 4712005 - DNA, 25 bp, Homo sapien
caagttaatgcccatcagccggaca

SEQ ID NO: 4712006 - DNA, 25 bp, Homo sapien
tgtcgatgcccatctggatggtcag

SEQ ID NO: 4712007 - DNA, 25 bp, Homo sapien
tgtaggccgggaggagggtctcatc

SEQ ID NO: 4712008 - DNA, 25 bp, Homo sapien
ctgtaggccgggaggagggtctcat

SEQ ID NO: 4712009 - DNA, 25 bp, Homo sapien
ctcgcagtacgccagcttgctgttc

SEQ ID NO: 4712010 - DNA, 25 bp, Homo sapien
gtacgtgagcttcccctcgcagtac

SEQ ID NO: 4712011 - DNA, 25 bp, Homo sapien
ccagcttgctgttcaaatcgagggt

SEQ ID NO: 4712012 - DNA, 25 bp, Homo sapien
ctgtcagccaggtacgtgagcttcc

SEQ ID NO: 4712013 - DNA, 25 bp, Homo sapien
aagcccccttcagccgtgcagacac

SEQ ID NO: 4712014 - DNA, 25 bp, Homo sapien
tgcagggcaaagcccccttcagccg

SEQ ID NO: 4712015 - DNA, 25 bp, Homo sapien
gcaaagcccccttcagccgtgcaga

SEQ ID NO: 4712016 - DNA, 25 bp, Homo sapien
gggcaaagcccccttcagccgtgca

SEQ ID NO: 4712017 - DNA, 25 bp, Homo sapien
ttctccatcagagtcgaggactcca

SEQ ID NO: 4712018 - DNA, 25 bp, Homo sapien
tcagagtcgaggactccagggtgtc

SEQ ID NO: 4712019 - DNA, 25 bp, Homo sapien
tccagggtgtccctcacctttgtgt

SEQ ID NO: 4712020 - DNA, 25 bp, Homo sapien
gggtgtccctcacctttgtgtcgcc

SEQ ID NO: 4712021 - DNA, 25 bp, Homo sapien
ggcatcactaagtcacctccatcaa

SEQ ID NO: 4712022 - DNA, 25 bp, Homo sapien
acaaggtatttcagtggctttagcc

SEQ ID NO: 4712023 - DNA, 25 bp, Homo sapien
taaagtcctgcaggtacaactgatg

SEQ ID NO: 4712024 - DNA, 25 bp, Homo sapien
caggatgtcccggtgggatgggagc

SEQ ID NO: 4712025 - DNA, 25 bp, Homo sapien
tccgggcccgtctggcatggcatgc

SEQ ID NO: 4712026 - DNA, 25 bp, Homo sapien
ctctcctccgggcccgtctggcatg

SEQ ID NO: 4712027 - DNA, 25 bp, Homo sapien
agccctggtgcctctcctccgggcc

SEQ ID NO: 4712028 - DNA, 25 bp, Homo sapien
tcctccgggcccgtctggcatggca

SEQ ID NO: 4712029 - DNA, 25 bp, Homo sapien
tcgcacacggggctagcccagctag

SEQ ID NO: 4712030 - DNA, 25 bp, Homo sapien
agggacagccccagcgtgccgggag

SEQ ID NO: 4712031 - DNA, 25 bp, Homo sapien
cattcgcagcggctcacgctgccct

SEQ ID NO: 4712032 - DNA, 25 bp, Homo sapien
gccctgcctagcctttcccgcagaa

SEQ ID NO: 4712033 - DNA, 25 bp, Homo sapien
ctgcctcttgatctcggcgcgcgaa

SEQ ID NO: 4712034 - DNA, 25 bp, Homo sapien
cgcgaagggacgtagctgtggtcca

SEQ ID NO: 4712035 - DNA, 25 bp, Homo sapien
agcttcccctcgattagccgctgcg

SEQ ID NO: 4712036 - DNA, 25 bp, Homo sapien
gcgcgcgaagggacgtagctgtggt

SEQ ID NO: 4712037 - DNA, 25 bp, Homo sapien
gtttatttgtgtagcaaagcaggga

SEQ ID NO: 4712038 - DNA, 25 bp, Homo sapien
ttatttgtgtagcaaagcagggagc

SEQ ID NO: 4712039 - DNA, 25 bp, Homo sapien
tttgtgtagcaaagcagggagcggg

SEQ ID NO: 4712040 - DNA, 25 bp, Homo sapien
tatttgtgtagcaaagcagggagcg

SEQ ID NO: 4712041 - DNA, 25 bp, Homo sapien
cgggctgcctccttacgcagaacct

SEQ ID NO: 4712042 - DNA, 25 bp, Homo sapien
gcacgcggttctggcgcgcagttcc

SEQ ID NO: 4712043 - DNA, 25 bp, Homo sapien
gcgtgtcccgtgctcctctccgaga

SEQ ID NO: 4712044 - DNA, 25 bp, Homo sapien
cccggtcgccccagcgtccgcagca

SEQ ID NO: 4712045 - DNA, 25 bp, Homo sapien
cgccgccatcttggcgccggctcgg

SEQ ID NO: 4712046 - DNA, 25 bp, Homo sapien
tcttggcgccggctcggcgggacgg

SEQ ID NO: 4712047 - DNA, 25 bp, Homo sapien
gccatcttggcgccggctcggcggg

SEQ ID NO: 4712048 - DNA, 25 bp, Homo sapien
ttggcgccggctcggcgggacggga

SEQ ID NO: 4712049 - DNA, 25 bp, Homo sapien
gccggcgcggccagaggccggggtc

SEQ ID NO: 4712050 - DNA, 25 bp, Homo sapien
gcagccccgagcggcgactcgggaa

SEQ ID NO: 4712051 - DNA, 25 bp, Homo sapien
tcgggaacctcagccgcggctgctc

SEQ ID NO: 4712052 - DNA, 25 bp, Homo sapien
aaggggtgcgactggcaccatgtcc

SEQ ID NO: 4712053 - DNA, 25 bp, Homo sapien
ccgctcggacgtcccagcccgggcg

SEQ ID NO: 4712054 - DNA, 25 bp, Homo sapien
tcccagcccgggcgcggccggcgag

SEQ ID NO: 4712055 - DNA, 25 bp, Homo sapien
cttcccgctcggacgtcccagcccg

SEQ ID NO: 4712056 - DNA, 25 bp, Homo sapien
tcggacgtcccagcccgggcgcggc

SEQ ID NO: 4712057 - DNA, 25 bp, Homo sapien
tctgcaacgcctggttcatggactg

SEQ ID NO: 4712058 - DNA, 25 bp, Homo sapien
actgcagcccggcggggatgttctt

SEQ ID NO: 4712059 - DNA, 25 bp, Homo sapien
cgcctctgcaacgcctggttcatgg

SEQ ID NO: 4712060 - DNA, 25 bp, Homo sapien
gttgtactgcacccccttggcgaag

SEQ ID NO: 4712061 - DNA, 25 bp, Homo sapien
ccttcctacgagaaatgggatgtct

SEQ ID NO: 4712062 - DNA, 25 bp, Homo sapien
gaaaaatcccgctgaaagcgccaag

SEQ ID NO: 4712063 - DNA, 25 bp, Homo sapien
gaaagagcccgcaagatggaaaaac

SEQ ID NO: 4712064 - DNA, 25 bp, Homo sapien
gatgtctcctacagtcgcaagtcag

SEQ ID NO: 4712065 - DNA, 25 bp, Homo sapien
tcaaaacagggaaccacataaaagc

SEQ ID NO: 4712066 - DNA, 25 bp, Homo sapien
aatgtcaaaacagggaaccacataa

SEQ ID NO: 4712067 - DNA, 25 bp, Homo sapien
caatgtcaaaacagggaaccacata

SEQ ID NO: 4712068 - DNA, 25 bp, Homo sapien
tgtcaaaacagggaaccacataaaa

SEQ ID NO: 4712069 - DNA, 25 bp, Homo sapien
acctcatagaaacatacggaaatgg

SEQ ID NO: 4712070 - DNA, 25 bp, Homo sapien
caaaaaactggataggcgtagcgtc

SEQ ID NO: 4712071 - DNA, 25 bp, Homo sapien
gcgtagcgtcctaaaacctcataga

SEQ ID NO: 4712072 - DNA, 25 bp, Homo sapien
tggataggcgtagcgtcctaaaacc

SEQ ID NO: 4712073 - DNA, 25 bp, Homo sapien
tcttaaaattctacattaccatgga

SEQ ID NO: 4712074 - DNA, 25 bp, Homo sapien
gtctttctgatcattagttcttaaa

SEQ ID NO: 4712075 - DNA, 25 bp, Homo sapien
cacggaggctctaaggctcccctta

SEQ ID NO: 4712076 - DNA, 25 bp, Homo sapien
cattaccatggaaatatcacggagg

SEQ ID NO: 4712077 - DNA, 25 bp, Homo sapien
cacggcacgcgaattcatgaacttg

SEQ ID NO: 4712078 - DNA, 25 bp, Homo sapien
tctccgtgcacacggcacgcgaatt

SEQ ID NO: 4712079 - DNA, 25 bp, Homo sapien
aggaactacggcctctctccgtgca

SEQ ID NO: 4712080 - DNA, 25 bp, Homo sapien
taaggaaggcgacatcttcactgtc

SEQ ID NO: 4712081 - DNA, 25 bp, Homo sapien
gtgagggtggcccgagtggtctgca

SEQ ID NO: 4712082 - DNA, 25 bp, Homo sapien
tgagggtggcccgagtggtctgcag

SEQ ID NO: 4712083 - DNA, 25 bp, Homo sapien
ggtgagggtggcccgagtggtctgc

SEQ ID NO: 4712084 - DNA, 25 bp, Homo sapien
tagatgctcagacttatctttaaga

SEQ ID NO: 4712085 - DNA, 25 bp, Homo sapien
ctagatgctcagacttatctttaag

SEQ ID NO: 4712086 - DNA, 25 bp, Homo sapien
gatgctcagacttatctttaagaag

SEQ ID NO: 4712087 - DNA, 25 bp, Homo sapien
gctcagacttatctttaagaagttg

SEQ ID NO: 4712088 - DNA, 25 bp, Homo sapien
tagagtataagaaaagccaatacgg

SEQ ID NO: 4712089 - DNA, 25 bp, Homo sapien
gagtataagaaaagccaatacggcc

SEQ ID NO: 4712090 - DNA, 25 bp, Homo sapien
ctagagtataagaaaagccaatacg

SEQ ID NO: 4712091 - DNA, 25 bp, Homo sapien
agagtataagaaaagccaatacggc

SEQ ID NO: 4712092 - DNA, 25 bp, Homo sapien
catcaaaatcttctttgtcgtcgta

SEQ ID NO: 4712093 - DNA, 25 bp, Homo sapien
tcaaaatcttctttgtcgtcgtatg

SEQ ID NO: 4712094 - DNA, 25 bp, Homo sapien
aaaatcttctttgtcgtcgtatgtt

SEQ ID NO: 4712095 - DNA, 25 bp, Homo sapien
caaaatcttctttgtcgtcgtatgt

SEQ ID NO: 4712096 - DNA, 25 bp, Homo sapien
cataatccgtttctgttcctaaacg

SEQ ID NO: 4712097 - DNA, 25 bp, Homo sapien
acgcaatggattgtttgtcttcaac

SEQ ID NO: 4712098 - DNA, 25 bp, Homo sapien
ttactgaacacaaacgcaatggatt

SEQ ID NO: 4712099 - DNA, 25 bp, Homo sapien
cacaaacgcaatggattgtttgtct

SEQ ID NO: 4712100 - DNA, 25 bp, Homo sapien
caaatagtcaagccttctccccagc

SEQ ID NO: 4712101 - DNA, 25 bp, Homo sapien
tcaaatagtcaagccttctccccag

SEQ ID NO: 4712102 - DNA, 25 bp, Homo sapien
ttaccagacagccaagcattaagca

SEQ ID NO: 4712103 - DNA, 25 bp, Homo sapien
cattaagcacgttccagtcacgtga

SEQ ID NO: 4712104 - DNA, 25 bp, Homo sapien
ccaagcattaagcacgttccagtca

SEQ ID NO: 4712105 - DNA, 25 bp, Homo sapien
ttattttccttaccagacagccaag

SEQ ID NO: 4712106 - DNA, 25 bp, Homo sapien
cccggcctgctaagtcccatttcta

SEQ ID NO: 4712107 - DNA, 25 bp, Homo sapien
tgcccggcctgctaagtcccatttc

SEQ ID NO: 4712108 - DNA, 25 bp, Homo sapien
gcccggcctgctaagtcccatttct

SEQ ID NO: 4712109 - DNA, 25 bp, Homo sapien
ttggctctgtagatggcaacagtga

SEQ ID NO: 4712110 - DNA, 25 bp, Homo sapien
gaggccgcggaagatggtgaaattg

SEQ ID NO: 4712111 - DNA, 25 bp, Homo sapien
gatggtgaaattgagggaaacaaag

SEQ ID NO: 4712112 - DNA, 25 bp, Homo sapien
aggatgccaaaagcgccaaggaggc

SEQ ID NO: 4712113 - DNA, 25 bp, Homo sapien
catttgaagatgataaagcagcttt

SEQ ID NO: 4712114 - DNA, 25 bp, Homo sapien
ttcatttgaagatgataaagcagct

SEQ ID NO: 4712115 - DNA, 25 bp, Homo sapien
tcatttgaagatgataaagcagctt

SEQ ID NO: 4712116 - DNA, 25 bp, Homo sapien
gatggccgatctatttccctgcact

SEQ ID NO: 4712117 - DNA, 25 bp, Homo sapien
caaatctaaagggtgtgcatgcact

SEQ ID NO: 4712118 - DNA, 25 bp, Homo sapien
tcaaagtgccccagaaccaaaatgg

SEQ ID NO: 4712119 - DNA, 25 bp, Homo sapien
ggtttaagcaacctctcctacagtg

SEQ ID NO: 4712120 - DNA, 25 bp, Homo sapien
cagctcattccaacttgtgcctccc

SEQ ID NO: 4712121 - DNA, 25 bp, Homo sapien
cattccaacttgtgcctcccgggtt

SEQ ID NO: 4712122 - DNA, 25 bp, Homo sapien
gatctcagctcattccaacttgtgc

SEQ ID NO: 4712123 - DNA, 25 bp, Homo sapien
cgatctcagctcattccaacttgtg

SEQ ID NO: 4712124 - DNA, 25 bp, Homo sapien
taggactatagctagagcagctttc

SEQ ID NO: 4712125 - DNA, 25 bp, Homo sapien
tacctagtgtcttgtttccaactcc

SEQ ID NO: 4712126 - DNA, 25 bp, Homo sapien
gatgtgtctcttatacaccacatag

SEQ ID NO: 4712127 - DNA, 25 bp, Homo sapien
cacattctttcgagctggtgagttc

SEQ ID NO: 4712128 - DNA, 25 bp, Homo sapien
acatgcggtggtcccgtctccgggt

SEQ ID NO: 4712129 - DNA, 25 bp, Homo sapien
aaccaacgcgctgacgtcccttggt

SEQ ID NO: 4712130 - DNA, 25 bp, Homo sapien
ccacgcgctgtgcttcccggtggtt

SEQ ID NO: 4712131 - DNA, 25 bp, Homo sapien
agagcgcagagacggtcacagcgac

SEQ ID NO: 4712132 - DNA, 25 bp, Homo sapien
gctgggcccgcgagagaacggcggc

SEQ ID NO: 4712133 - DNA, 25 bp, Homo sapien
gcatagcctcgctgggcccgcgaga

SEQ ID NO: 4712134 - DNA, 25 bp, Homo sapien
gccatccacgtccgtcccgcggccc

SEQ ID NO: 4712135 - DNA, 25 bp, Homo sapien
ccgaggtccacggcctgagcggcgg

SEQ ID NO: 4712136 - DNA, 25 bp, Homo sapien
cgggctcgcagagactgcccgggcc

SEQ ID NO: 4712137 - DNA, 25 bp, Homo sapien
ccgggctcgcagagactgcccgggc

SEQ ID NO: 4712138 - DNA, 25 bp, Homo sapien
agccccaagcggagccgcaggcgct

SEQ ID NO: 4712139 - DNA, 25 bp, Homo sapien
gcggcccggcctgtggagagcacag

SEQ ID NO: 4712140 - DNA, 25 bp, Homo sapien
gcacagcagccccaagcggagccgc

SEQ ID NO: 4712141 - DNA, 25 bp, Homo sapien
cctctcccgcggagaacttggagaa

SEQ ID NO: 4712142 - DNA, 25 bp, Homo sapien
ggctccgcgcttctcccggccgagc

SEQ ID NO: 4712143 - DNA, 25 bp, Homo sapien
aggaggctccgcgcttctcccggcc

SEQ ID NO: 4712144 - DNA, 25 bp, Homo sapien
gcagccaggaggctccgcgcttctc

SEQ ID NO: 4712145 - DNA, 25 bp, Homo sapien
ggaggctccgcgcttctcccggccg

SEQ ID NO: 4712146 - DNA, 25 bp, Homo sapien
gcgctgcggcaaaacctccagaggg

SEQ ID NO: 4712147 - DNA, 25 bp, Homo sapien
atttcctcgcccatcctaggtacct

SEQ ID NO: 4712148 - DNA, 25 bp, Homo sapien
ctaggtacctcaacgcgccaacttt

SEQ ID NO: 4712149 - DNA, 25 bp, Homo sapien
gccaactttcaacgcctctggtcat

SEQ ID NO: 4712150 - DNA, 25 bp, Homo sapien
tgttcctgtctccccggatcactat

SEQ ID NO: 4712151 - DNA, 25 bp, Homo sapien
gctgtcttgcccgtgttcctgtctc

SEQ ID NO: 4712152 - DNA, 25 bp, Homo sapien
gatctcctgtgtggggatgtactcc

SEQ ID NO: 4712153 - DNA, 25 bp, Homo sapien
ggtgccacagcgctgtcttgcccgt

SEQ ID NO: 4712154 - DNA, 25 bp, Homo sapien
ggggaggggtctatcccaccatcaa

SEQ ID NO: 4712155 - DNA, 25 bp, Homo sapien
cttattactgtttctggtggtggag

SEQ ID NO: 4712156 - DNA, 25 bp, Homo sapien
ggcaaggctcaaacaaaggtcttat

SEQ ID NO: 4712157 - DNA, 25 bp, Homo sapien
gacacgaactttccacaagggcaag

SEQ ID NO: 4712158 - DNA, 25 bp, Homo sapien
caggccctagagagcagcagatgcc

SEQ ID NO: 4712159 - DNA, 25 bp, Homo sapien
taagtaatcactgagggcggaggcc

SEQ ID NO: 4712160 - DNA, 25 bp, Homo sapien
catggagtacgcttctgctgacagg

SEQ ID NO: 4712161 - DNA, 25 bp, Homo sapien
ctgacaggtgcgaatgaatgggccc

SEQ ID NO: 4712162 - DNA, 25 bp, Homo sapien
tttgtctactacatcccagacttca

SEQ ID NO: 4712163 - DNA, 25 bp, Homo sapien
tgtctactacatcccagacttcaac

SEQ ID NO: 4712164 - DNA, 25 bp, Homo sapien
cagacttcaaccttcacgatgtcat

SEQ ID NO: 4712165 - DNA, 25 bp, Homo sapien
atcccagacttcaaccttcacgatg

SEQ ID NO: 4712166 - DNA, 25 bp, Homo sapien
tggaacaccaggtcagcacgggcca

SEQ ID NO: 4712167 - DNA, 25 bp, Homo sapien
tctggaacaccaggtcagcacgggc

SEQ ID NO: 4712168 - DNA, 25 bp, Homo sapien
cgggccacaagagtccagcgcaatg

SEQ ID NO: 4712169 - DNA, 25 bp, Homo sapien
cacgggccacaagagtccagcgcaa

SEQ ID NO: 4712170 - DNA, 25 bp, Homo sapien
gggatgaggacaatgatagggcggt

SEQ ID NO: 4712171 - DNA, 25 bp, Homo sapien
cacaggcagatctgatagcttctcc

SEQ ID NO: 4712172 - DNA, 25 bp, Homo sapien
agatctgatagcttctcctcacagt

SEQ ID NO: 4712173 - DNA, 25 bp, Homo sapien
aggacaatgatagggcggtgggtgg

SEQ ID NO: 4712174 - DNA, 25 bp, Homo sapien
ttacagtgcccagttatgaacccca

SEQ ID NO: 4712175 - DNA, 25 bp, Homo sapien
tcaccacgatgtaacccagtcaggg

SEQ ID NO: 4712176 - DNA, 25 bp, Homo sapien
gaggattgtcggctcacctgaggct

SEQ ID NO: 4712177 - DNA, 25 bp, Homo sapien
gactctcccggtgggtgctaacagg

SEQ ID NO: 4712178 - DNA, 25 bp, Homo sapien
tggagtcacggactgggacaacaaa

SEQ ID NO: 4712179 - DNA, 25 bp, Homo sapien
cttggagtcacggactgggacaaca

SEQ ID NO: 4712180 - DNA, 25 bp, Homo sapien
ctgaggataaaggctccagaccatc

SEQ ID NO: 4712181 - DNA, 25 bp, Homo sapien
agtcttggagtcacggactgggaca

SEQ ID NO: 4712182 - DNA, 25 bp, Homo sapien
tcaaggcaacaaccagcccgggagg

SEQ ID NO: 4712183 - DNA, 25 bp, Homo sapien
ccagccctgaaatggcctcgggagg

SEQ ID NO: 4712184 - DNA, 25 bp, Homo sapien
tgagcgcacggactctcaaggcaac

SEQ ID NO: 4712185 - DNA, 25 bp, Homo sapien
gcctacagccctacaccaggagggt

SEQ ID NO: 4712186 - DNA, 25 bp, Homo sapien
ctttaagccgtcgcctcgctttttg

SEQ ID NO: 4712187 - DNA, 25 bp, Homo sapien
ccgtcgcctcgctttttgcattttc

SEQ ID NO: 4712188 - DNA, 25 bp, Homo sapien
aagccgtcgcctcgctttttgcatt

SEQ ID NO: 4712189 - DNA, 25 bp, Homo sapien
ttaagccgtcgcctcgctttttgca

SEQ ID NO: 4712190 - DNA, 25 bp, Homo sapien
tgtacacgtccaggaactcagcatc

SEQ ID NO: 4712191 - DNA, 25 bp, Homo sapien
gtcgaacatcatgaccaccccgttg

SEQ ID NO: 4712192 - DNA, 25 bp, Homo sapien
cgttgcagttcttgtacacgtccag

SEQ ID NO: 4712193 - DNA, 25 bp, Homo sapien
cactgcttggtaatgtcgaacatca

SEQ ID NO: 4712194 - DNA, 25 bp, Homo sapien
ccccataggcacaggcatagtcgtt

SEQ ID NO: 4712195 - DNA, 25 bp, Homo sapien
agtgccccttgtggctgagctgcca

SEQ ID NO: 4712196 - DNA, 25 bp, Homo sapien
gatgctgctctaaccattatctgct

SEQ ID NO: 4712197 - DNA, 25 bp, Homo sapien
tccctcggtcctgcagaacgatgct

SEQ ID NO: 4712198 - DNA, 25 bp, Homo sapien
tgccttgccccagatgccttttgca

SEQ ID NO: 4712199 - DNA, 25 bp, Homo sapien
ttgcttccgccaagtctcagatggg

SEQ ID NO: 4712200 - DNA, 25 bp, Homo sapien
atggaaggtgcgtgccttgccccag

SEQ ID NO: 4712201 - DNA, 25 bp, Homo sapien
ttccgccaagtctcagatgggtttt

SEQ ID NO: 4712202 - DNA, 25 bp, Homo sapien
catgaagacggaggtcgcggggagc

SEQ ID NO: 4712203 - DNA, 25 bp, Homo sapien
tcatgaagacggaggtcgcggggag

SEQ ID NO: 4712204 - DNA, 25 bp, Homo sapien
ggtaagcgcctttgccgcgtcttct

SEQ ID NO: 4712205 - DNA, 25 bp, Homo sapien
cctttgccgcgtcttctcaggctgg

SEQ ID NO: 4712206 - DNA, 25 bp, Homo sapien
ggtctccgggcccacaggtaagcgc

SEQ ID NO: 4712207 - DNA, 25 bp, Homo sapien
ggcccacaggtaagcgcctttgccg

SEQ ID NO: 4712208 - DNA, 25 bp, Homo sapien
cagagcattgctaccataggcatcg

SEQ ID NO: 4712209 - DNA, 25 bp, Homo sapien
agagcattgctaccataggcatcgc

SEQ ID NO: 4712210 - DNA, 25 bp, Homo sapien
cgtggtgcttgaagccgctgtctga

SEQ ID NO: 4712211 - DNA, 25 bp, Homo sapien
ctcctgcctctcgtggctgtgaagg

SEQ ID NO: 4712212 - DNA, 25 bp, Homo sapien
cctctcgtggctgtgaagggcctgc

SEQ ID NO: 4712213 - DNA, 25 bp, Homo sapien
tgaagccgctgtctgagccagtgtt

SEQ ID NO: 4712214 - DNA, 25 bp, Homo sapien
ccaaatggcttgtgaagaaataacc

SEQ ID NO: 4712215 - DNA, 25 bp, Homo sapien
cagagtctgcctggcgtggaactgc

SEQ ID NO: 4712216 - DNA, 25 bp, Homo sapien
ttaagcagacatctcctggcacgga

SEQ ID NO: 4712217 - DNA, 25 bp, Homo sapien
tacacgcagtcatttaaacgggccc

SEQ ID NO: 4712218 - DNA, 25 bp, Homo sapien
tcatttccaacatccaacccagcag

SEQ ID NO: 4712219 - DNA, 25 bp, Homo sapien
ctggcttagtttcagccctgcgacg

SEQ ID NO: 4712220 - DNA, 25 bp, Homo sapien
agaagcatgcctcgtgcatgcagag

SEQ ID NO: 4712221 - DNA, 25 bp, Homo sapien
ccaggcccgaggatggtggctgctt

SEQ ID NO: 4712222 - DNA, 25 bp, Homo sapien
gcacttttggaagctcccggagaat

SEQ ID NO: 4712223 - DNA, 25 bp, Homo sapien
tcgatgaagtcacgcacgtcgtccg

SEQ ID NO: 4712224 - DNA, 25 bp, Homo sapien
atgtcccggtagtttcccagcacgc

SEQ ID NO: 4712225 - DNA, 25 bp, Homo sapien
tccggcaggatgactcggtgctcgc

SEQ ID NO: 4712226 - DNA, 25 bp, Homo sapien
ggcccacagctgtgggtccgcactg

SEQ ID NO: 4712227 - DNA, 25 bp, Homo sapien
agctaagccgagtgcccttctgcag

SEQ ID NO: 4712228 - DNA, 25 bp, Homo sapien
agccctgctaagcagctaagccgag

SEQ ID NO: 4712229 - DNA, 25 bp, Homo sapien
agagaaagacccttgccctggtgcc

SEQ ID NO: 4712230 - DNA, 25 bp, Homo sapien
cttatgaaggtactttaggccgaag

SEQ ID NO: 4712231 - DNA, 25 bp, Homo sapien
cttcatggaagactcagcatagcgg

SEQ ID NO: 4712232 - DNA, 25 bp, Homo sapien
aagactcagcatagcggaagtagga

SEQ ID NO: 4712233 - DNA, 25 bp, Homo sapien
tactttaggccgaagctgttcttca

SEQ ID NO: 4712234 - DNA, 25 bp, Homo sapien
actccaccccacgtggtgagtgctt

SEQ ID NO: 4712235 - DNA, 25 bp, Homo sapien
tccaccccacgtggtgagtgcttac

SEQ ID NO: 4712236 - DNA, 25 bp, Homo sapien
ctccaccccacgtggtgagtgctta

SEQ ID NO: 4712237 - DNA, 25 bp, Homo sapien
cactccaccccacgtggtgagtgct

SEQ ID NO: 4712238 - DNA, 25 bp, Homo sapien
aggtgcagtagaacgctgggccctt

SEQ ID NO: 4712239 - DNA, 25 bp, Homo sapien
ggcaggtgcagtagaacgctgggcc

SEQ ID NO: 4712240 - DNA, 25 bp, Homo sapien
tgcagtagaacgctgggcccttgcc

SEQ ID NO: 4712241 - DNA, 25 bp, Homo sapien
gcaggcaggtgcagtagaacgctgg

SEQ ID NO: 4712242 - DNA, 25 bp, Homo sapien
ggttcaagcctcatcatttgctggg

SEQ ID NO: 4712243 - DNA, 25 bp, Homo sapien
gaaagtgagtttagtccgtaggcca

SEQ ID NO: 4712244 - DNA, 25 bp, Homo sapien
gatgtgaacagcgagtacctcggtg

SEQ ID NO: 4712245 - DNA, 25 bp, Homo sapien
ttttgacacaagcaccagggaaatg

SEQ ID NO: 4712246 - DNA, 25 bp, Homo sapien
tcccccagacccagtcggggcagcc

SEQ ID NO: 4712247 - DNA, 25 bp, Homo sapien
gtcccccagacccagtcggggcagc

SEQ ID NO: 4712248 - DNA, 25 bp, Homo sapien
ggcgaggaggttcaggtcccccaga

SEQ ID NO: 4712249 - DNA, 25 bp, Homo sapien
gcgaggaggttcaggtcccccagac

SEQ ID NO: 4712250 - DNA, 25 bp, Homo sapien
tttcctgggcaagcctgacatcctt

SEQ ID NO: 4712251 - DNA, 25 bp, Homo sapien
ttcttctgacaccaggacgacagca

SEQ ID NO: 4712252 - DNA, 25 bp, Homo sapien
ttctgacaccaggacgacagcacag

SEQ ID NO: 4712253 - DNA, 25 bp, Homo sapien
ccctttcctgggcaagcctgacatc

SEQ ID NO: 4712254 - DNA, 25 bp, Homo sapien
ggacaagtctgactgccgccttcct

SEQ ID NO: 4712255 - DNA, 25 bp, Homo sapien
caaaccattagggaatggagcagct

SEQ ID NO: 4712256 - DNA, 25 bp, Homo sapien
ggagctctctaaggagtaatcaacc

SEQ ID NO: 4712257 - DNA, 25 bp, Homo sapien
agtgccggcacaggacaagtctgac

SEQ ID NO: 4712258 - DNA, 25 bp, Homo sapien
tattacattaggtactacggtcagg

SEQ ID NO: 4712259 - DNA, 25 bp, Homo sapien
tttaggtgacataaagaaggcctga

SEQ ID NO: 4712260 - DNA, 25 bp, Homo sapien
gcaaaaggatagtcacacacagctc

SEQ ID NO: 4712261 - DNA, 25 bp, Homo sapien
tgagacaggcgaggacatcagatct

SEQ ID NO: 4712262 - DNA, 25 bp, Homo sapien
tttagaacagggtcatgctatatta

SEQ ID NO: 4712263 - DNA, 25 bp, Homo sapien
tagaacagggtcatgctatattata

SEQ ID NO: 4712264 - DNA, 25 bp, Homo sapien
ttagaacagggtcatgctatattat

SEQ ID NO: 4712265 - DNA, 25 bp, Homo sapien
aaatgaaatacaaacgccggagcct

SEQ ID NO: 4712266 - DNA, 25 bp, Homo sapien
gtcagtcacaggcataaacctcaac

SEQ ID NO: 4712267 - DNA, 25 bp, Homo sapien
tcagcaactcatggagctctgcgct

SEQ ID NO: 4712268 - DNA, 25 bp, Homo sapien
tggctgctcactttagattcaaatg

SEQ ID NO: 4712269 - DNA, 25 bp, Homo sapien
ctcctccagcgtggcgtccatgtcc

SEQ ID NO: 4712270 - DNA, 25 bp, Homo sapien
gcccatggccctgcaccacggccac

SEQ ID NO: 4712271 - DNA, 25 bp, Homo sapien
cttggtgcagcccatggccctgcac

SEQ ID NO: 4712272 - DNA, 25 bp, Homo sapien
ggtgcagcccatggccctgcaccac

SEQ ID NO: 4712273 - DNA, 25 bp, Homo sapien
agcccatggccctgcaccacggcca

SEQ ID NO: 4712274 - DNA, 25 bp, Homo sapien
tccacccgtgcccaaaggtgactaa

SEQ ID NO: 4712275 - DNA, 25 bp, Homo sapien
cacccgtgcccaaaggtgactaatt

SEQ ID NO: 4712276 - DNA, 25 bp, Homo sapien
ctgggggcagtgcaaacctgagtcc

SEQ ID NO: 4712277 - DNA, 25 bp, Homo sapien
ggcagtgcaaacctgagtcctcctc

SEQ ID NO: 4712278 - DNA, 25 bp, Homo sapien
acggtcagcggtactcagagtggca

SEQ ID NO: 4712279 - DNA, 25 bp, Homo sapien
acctggccacggtcagcggtactca

SEQ ID NO: 4712280 - DNA, 25 bp, Homo sapien
agcacctggccacggtcagcggtac

SEQ ID NO: 4712281 - DNA, 25 bp, Homo sapien
tggccacggtcagcggtactcagag

SEQ ID NO: 4712282 - DNA, 25 bp, Homo sapien
caccaagcccctagctgtacaggag

SEQ ID NO: 4712283 - DNA, 25 bp, Homo sapien
agagacctccatgtcctggcctgta

SEQ ID NO: 4712284 - DNA, 25 bp, Homo sapien
tgtatgcctcttcaacacagggagc

SEQ ID NO: 4712285 - DNA, 25 bp, Homo sapien
tcaggagggccactgattccgtggt

SEQ ID NO: 4712286 - DNA, 25 bp, Homo sapien
tggttcaacagagaagcgcccatgc

SEQ ID NO: 4712287 - DNA, 25 bp, Homo sapien
tgccaggattggttcaacagagaag

SEQ ID NO: 4712288 - DNA, 25 bp, Homo sapien
acagccagatccaaggtgacccaca

SEQ ID NO: 4712289 - DNA, 25 bp, Homo sapien
agccagatccaaggtgacccacagg

SEQ ID NO: 4712290 - DNA, 25 bp, Homo sapien
ttggtggagcacgtgcggccatcgc

SEQ ID NO: 4712291 - DNA, 25 bp, Homo sapien
acgtgcggccatcgcagcatccagc

SEQ ID NO: 4712292 - DNA, 25 bp, Homo sapien
tgcggccatcgcagcatccagctga

SEQ ID NO: 4712293 - DNA, 25 bp, Homo sapien
ggagcacgtgcggccatcgcagcat

SEQ ID NO: 4712294 - DNA, 25 bp, Homo sapien
aagtcacttcggatctgttctgagg

SEQ ID NO: 4712295 - DNA, 25 bp, Homo sapien
cagcgtacatgtgtccagctcccct

SEQ ID NO: 4712296 - DNA, 25 bp, Homo sapien
cagaggtggccagatggcagcaact

SEQ ID NO: 4712297 - DNA, 25 bp, Homo sapien
gcaactggaccttcccgtgagcggg

SEQ ID NO: 4712298 - DNA, 25 bp, Homo sapien
gaaagagcagcagtgccaaagggtg

SEQ ID NO: 4712299 - DNA, 25 bp, Homo sapien
ggacgcatggccacggctgcgagcc

SEQ ID NO: 4712300 - DNA, 25 bp, Homo sapien
ccacggctgcgagcctccatcatct

SEQ ID NO: 4712301 - DNA, 25 bp, Homo sapien
cggggatgggctctgcccgttggcc

SEQ ID NO: 4712302 - DNA, 25 bp, Homo sapien
gagcccggggatgggctctgcccgt

SEQ ID NO: 4712303 - DNA, 25 bp, Homo sapien
cagggcctctgagggtggtacaggg

SEQ ID NO: 4712304 - DNA, 25 bp, Homo sapien
ggggcggcattgaggggcagctgtg

SEQ ID NO: 4712305 - DNA, 25 bp, Homo sapien
tggggtgtgccggggctggagctcc

SEQ ID NO: 4712306 - DNA, 25 bp, Homo sapien
ggcacagaggatggtggggcggcat

SEQ ID NO: 4712307 - DNA, 25 bp, Homo sapien
gagatgatgctgcgccgtggggcgg

SEQ ID NO: 4712308 - DNA, 25 bp, Homo sapien
gatgatgctgcgccgtggggcgggg

SEQ ID NO: 4712309 - DNA, 25 bp, Homo sapien
tagagatgatgctgcgccgtggggc

SEQ ID NO: 4712310 - DNA, 25 bp, Homo sapien
ctagagatgatgctgcgccgtgggg

SEQ ID NO: 4712311 - DNA, 25 bp, Homo sapien
tggaggggctgcctcggtggcaggt

SEQ ID NO: 4712312 - DNA, 25 bp, Homo sapien
ctcggtggcaggtgacgtcccaaac

SEQ ID NO: 4712313 - DNA, 25 bp, Homo sapien
ctgcctcggtggcaggtgacgtccc

SEQ ID NO: 4712314 - DNA, 25 bp, Homo sapien
tgcctcggtggcaggtgacgtccca

SEQ ID NO: 4712315 - DNA, 25 bp, Homo sapien
gtggagcgctccgaaatccaggacc

SEQ ID NO: 4712316 - DNA, 25 bp, Homo sapien
cacccgggatgtgcccacgggactg

SEQ ID NO: 4712317 - DNA, 25 bp, Homo sapien
gcccacgggactgggacaagcagga

SEQ ID NO: 4712318 - DNA, 25 bp, Homo sapien
caagcaggaagaagcgtggagcgct

SEQ ID NO: 4712319 - DNA, 25 bp, Homo sapien
gatgccgggtcctcttcactcggca

SEQ ID NO: 4712320 - DNA, 25 bp, Homo sapien
gtgaacagtgatgccgggtcctctt

SEQ ID NO: 4712321 - DNA, 25 bp, Homo sapien
ctgtgaacagtgatgccgggtcctc

SEQ ID NO: 4712322 - DNA, 25 bp, Homo sapien
gggtcctcttcactcggcaccagaa

SEQ ID NO: 4712323 - DNA, 25 bp, Homo sapien
gtcaggaacaaagtcctccacactc

SEQ ID NO: 4712324 - DNA, 25 bp, Homo sapien
cggtccaggcggtcgtcaggaacaa

SEQ ID NO: 4712325 - DNA, 25 bp, Homo sapien
ccaggcggtcgtcaggaacaaagtc

SEQ ID NO: 4712326 - DNA, 25 bp, Homo sapien
tccacactctggaccgttgctgggc

SEQ ID NO: 4712327 - DNA, 25 bp, Homo sapien
ccacagcaatgggtgaggctgaggt

SEQ ID NO: 4712328 - DNA, 25 bp, Homo sapien
tgaacctcccatatgacctgcagtg

SEQ ID NO: 4712329 - DNA, 25 bp, Homo sapien
tgtggagccgcacaagtgggcgctc

SEQ ID NO: 4712330 - DNA, 25 bp, Homo sapien
ttgtgtatttctggaggaagccgct

SEQ ID NO: 4712331 - DNA, 25 bp, Homo sapien
ggttgccgcccagggcctccccatc

SEQ ID NO: 4712332 - DNA, 25 bp, Homo sapien
gttgccgcccagggcctccccatca

SEQ ID NO: 4712333 - DNA, 25 bp, Homo sapien
tggctggtcttcgaggtccacatcg

SEQ ID NO: 4712334 - DNA, 25 bp, Homo sapien
gctggtcttcgaggtccacatcgtc

SEQ ID NO: 4712335 - DNA, 25 bp, Homo sapien
ggtcttcgaggtccacatcgtcctg

SEQ ID NO: 4712336 - DNA, 25 bp, Homo sapien
gtggctggtcttcgaggtccacatc

SEQ ID NO: 4712337 - DNA, 25 bp, Homo sapien
gtcttgactggggacggggcctgca

SEQ ID NO: 4712338 - DNA, 25 bp, Homo sapien
tcgaaagagtgatgtcttgactggg

SEQ ID NO: 4712339 - DNA, 25 bp, Homo sapien
tggggacggggcctgcaggcagcgg

SEQ ID NO: 4712340 - DNA, 25 bp, Homo sapien
gggcctgcaggcagcgggggactcc

SEQ ID NO: 4712341 - DNA, 25 bp, Homo sapien
gggcagggccttttgtgggagctgc

SEQ ID NO: 4712342 - DNA, 25 bp, Homo sapien
tgggagctgccacttctgcttcctc

SEQ ID NO: 4712343 - DNA, 25 bp, Homo sapien
ctggggcagggccttttgtgggagc

SEQ ID NO: 4712344 - DNA, 25 bp, Homo sapien
ggagctggggcagggccttttgtgg

SEQ ID NO: 4712345 - DNA, 25 bp, Homo sapien
cccctccgtggcttcgaagctggta

SEQ ID NO: 4712346 - DNA, 25 bp, Homo sapien
tccgtggcttcgaagctggtatgga

SEQ ID NO: 4712347 - DNA, 25 bp, Homo sapien
ctgtgcgaacagagacaccgcctgg

SEQ ID NO: 4712348 - DNA, 25 bp, Homo sapien
gggtgctgcggtcctcgtgggagct

SEQ ID NO: 4712349 - DNA, 25 bp, Homo sapien
ctggtgctgctgcgcttctccggac

SEQ ID NO: 4712350 - DNA, 25 bp, Homo sapien
cttccccggctccatctcagcaggg

SEQ ID NO: 4712351 - DNA, 25 bp, Homo sapien
ctccatctcagcagggggcctggtg

SEQ ID NO: 4712352 - DNA, 25 bp, Homo sapien
gggcctggtgctgctgcgcttctcc

SEQ ID NO: 4712353 - DNA, 25 bp, Homo sapien
tcggggtcatccatgacgaaggaca

SEQ ID NO: 4712354 - DNA, 25 bp, Homo sapien
cctcgctctcaaagtcggggtcatc

SEQ ID NO: 4712355 - DNA, 25 bp, Homo sapien
cgctctcaaagtcggggtcatccat

SEQ ID NO: 4712356 - DNA, 25 bp, Homo sapien
catccatgacgaaggacagcatttg

SEQ ID NO: 4712357 - DNA, 25 bp, Homo sapien
gtccgagtcattcttcagtctgaag

SEQ ID NO: 4712358 - DNA, 25 bp, Homo sapien
gggtcatctcgcacgggaaagtcat

SEQ ID NO: 4712359 - DNA, 25 bp, Homo sapien
tcatcctcgtcagtcacatcggagg

SEQ ID NO: 4712360 - DNA, 25 bp, Homo sapien
cagcccgaagaggtccgagtcattc

SEQ ID NO: 4712361 - DNA, 25 bp, Homo sapien
caggctgaccgcactctggtgcccc

SEQ ID NO: 4712362 - DNA, 25 bp, Homo sapien
ccagcaggctgaccgcactctggtg

SEQ ID NO: 4712363 - DNA, 25 bp, Homo sapien
tccagcaggctgaccgcactctggt

SEQ ID NO: 4712364 - DNA, 25 bp, Homo sapien
agcaggctgaccgcactctggtgcc

SEQ ID NO: 4712365 - DNA, 25 bp, Homo sapien
cagacagtggctcaaactcaggcca

SEQ ID NO: 4712366 - DNA, 25 bp, Homo sapien
agtggctcaaactcaggccaacggg

SEQ ID NO: 4712367 - DNA, 25 bp, Homo sapien
gacagacagtggctcaaactcaggc

SEQ ID NO: 4712368 - DNA, 25 bp, Homo sapien
gacagtggctcaaactcaggccaac

SEQ ID NO: 4712369 - DNA, 25 bp, Homo sapien
tgccaggaaggggagtagccagtac

SEQ ID NO: 4712370 - DNA, 25 bp, Homo sapien
aggatggggcgccatggagtcacag

SEQ ID NO: 4712371 - DNA, 25 bp, Homo sapien
tcctggcctgccaggaaggggagta

SEQ ID NO: 4712372 - DNA, 25 bp, Homo sapien
tcccaggaccgcatgccacccagtc

SEQ ID NO: 4712373 - DNA, 25 bp, Homo sapien
gcctccagctcatcggcagccgtcc

SEQ ID NO: 4712374 - DNA, 25 bp, Homo sapien
ggaaagcctccagctcatcggcagc

SEQ ID NO: 4712375 - DNA, 25 bp, Homo sapien
aggaaagcctccagctcatcggcag

SEQ ID NO: 4712376 - DNA, 25 bp, Homo sapien
aagcctccagctcatcggcagccgt

SEQ ID NO: 4712377 - DNA, 25 bp, Homo sapien
cctcgtagtcgccacccccagggtg

SEQ ID NO: 4712378 - DNA, 25 bp, Homo sapien
ctcctcgtagtcgccacccccaggg

SEQ ID NO: 4712379 - DNA, 25 bp, Homo sapien
agctcagaagcgcacacggcagcca

SEQ ID NO: 4712380 - DNA, 25 bp, Homo sapien
gggcagcggcaaaggcgatggtaca

SEQ ID NO: 4712381 - DNA, 25 bp, Homo sapien
caccgagcctggctgaagccagctg

SEQ ID NO: 4712382 - DNA, 25 bp, Homo sapien
gaggcaaatgcctccccaggcagtg

SEQ ID NO: 4712383 - DNA, 25 bp, Homo sapien
acatccctgagaaacactggcggct

SEQ ID NO: 4712384 - DNA, 25 bp, Homo sapien
gtcacatccctgagaaacactggcg

SEQ ID NO: 4712385 - DNA, 25 bp, Homo sapien
tcacatccctgagaaacactggcgg

SEQ ID NO: 4712386 - DNA, 25 bp, Homo sapien
cagtcacatccctgagaaacactgg

SEQ ID NO: 4712387 - DNA, 25 bp, Homo sapien
cggccggaagcggaaccataggcat

SEQ ID NO: 4712388 - DNA, 25 bp, Homo sapien
ctcccggccggaagcggaaccatag

SEQ ID NO: 4712389 - DNA, 25 bp, Homo sapien
ctgcggccccagatgagcgcggagg

SEQ ID NO: 4712390 - DNA, 25 bp, Homo sapien
ggccccagatgagcgcggagggcaa

SEQ ID NO: 4712391 - DNA, 25 bp, Homo sapien
ctgggccgccctttagggtgagtct

SEQ ID NO: 4712392 - DNA, 25 bp, Homo sapien
ccaggagaggcctcacatgctgcct

SEQ ID NO: 4712393 - DNA, 25 bp, Homo sapien
ttagggtgagtctgcacacccgtgt

SEQ ID NO: 4712394 - DNA, 25 bp, Homo sapien
ggtctcgccagccttctagcgtggg

SEQ ID NO: 4712395 - DNA, 25 bp, Homo sapien
ctgagcgggggcgcagctgaggcca

SEQ ID NO: 4712396 - DNA, 25 bp, Homo sapien
aacaggagtgctttatggtctgagt

SEQ ID NO: 4712397 - DNA, 25 bp, Homo sapien
acaggagtgctttatggtctgagtg

SEQ ID NO: 4712398 - DNA, 25 bp, Homo sapien
aaacaggagtgctttatggtctgag

SEQ ID NO: 4712399 - DNA, 25 bp, Homo sapien
agacctcagtgtctaagcaggagtc

SEQ ID NO: 4712400 - DNA, 25 bp, Homo sapien
acacagacctcagtgtctaagcagg

SEQ ID NO: 4712401 - DNA, 25 bp, Homo sapien
cagacctcagtgtctaagcaggagt

SEQ ID NO: 4712402 - DNA, 25 bp, Homo sapien
acagacctcagtgtctaagcaggag

SEQ ID NO: 4712403 - DNA, 25 bp, Homo sapien
ccaggtcggctcctctgtgtccccg

SEQ ID NO: 4712404 - DNA, 25 bp, Homo sapien
tgtgtccccggcactgctgcgtccc

SEQ ID NO: 4712405 - DNA, 25 bp, Homo sapien
ttccaggcagcagcgcggatcctgg

SEQ ID NO: 4712406 - DNA, 25 bp, Homo sapien
gcgtccccggcacgggcagaagctt

SEQ ID NO: 4712407 - DNA, 25 bp, Homo sapien
gccatcgagccgcgagctcgtggca

SEQ ID NO: 4712408 - DNA, 25 bp, Homo sapien
ctgagctgcgcaccaggcctggaag

SEQ ID NO: 4712409 - DNA, 25 bp, Homo sapien
ccctagggtttgcaaggcagtccca

SEQ ID NO: 4712410 - DNA, 25 bp, Homo sapien
aaggcagtcccaagccatcgagccg

SEQ ID NO: 4712411 - DNA, 25 bp, Homo sapien
cccagctgtccaggcgcccgtcctg

SEQ ID NO: 4712412 - DNA, 25 bp, Homo sapien
ctgcgggaggaacccagctgtccag

SEQ ID NO: 4712413 - DNA, 25 bp, Homo sapien
acccagctgtccaggcgcccgtcct

SEQ ID NO: 4712414 - DNA, 25 bp, Homo sapien
ggaggaacccagctgtccaggcgcc

SEQ ID NO: 4712415 - DNA, 25 bp, Homo sapien
cgggcctgggccgagaacgcgggcg

SEQ ID NO: 4712416 - DNA, 25 bp, Homo sapien
cgagaacgcgggcgcttcctccatg

SEQ ID NO: 4712417 - DNA, 25 bp, Homo sapien
cgcttcctccatgccggggtcagaa

SEQ ID NO: 4712418 - DNA, 25 bp, Homo sapien
acgcgggcgcttcctccatgccggg

SEQ ID NO: 4712419 - DNA, 25 bp, Homo sapien
ctggggggagacgcgggtcagggcg

SEQ ID NO: 4712420 - DNA, 25 bp, Homo sapien
caggccccgctactcccccacgctg

SEQ ID NO: 4712421 - DNA, 25 bp, Homo sapien
gggtcgccaccttgatgtcctggta

SEQ ID NO: 4712422 - DNA, 25 bp, Homo sapien
tgatgtcctggtacacggtcgacac

SEQ ID NO: 4712423 - DNA, 25 bp, Homo sapien
cctggtacacggtcgacaccagcag

SEQ ID NO: 4712424 - DNA, 25 bp, Homo sapien
gccaccttgatgtcctggtacacgg

SEQ ID NO: 4712425 - DNA, 25 bp, Homo sapien
cttgttgaaaggcgcgggctcagca

SEQ ID NO: 4712426 - DNA, 25 bp, Homo sapien
gcagtggcgcttgttgaaaggcgcg

SEQ ID NO: 4712427 - DNA, 25 bp, Homo sapien
tggcgcttgttgaaaggcgcgggct

SEQ ID NO: 4712428 - DNA, 25 bp, Homo sapien
cgcttgttgaaaggcgcgggctcag

SEQ ID NO: 4712429 - DNA, 25 bp, Homo sapien
cggcttcgcgggtccgggcgcgcgg

SEQ ID NO: 4712430 - DNA, 25 bp, Homo sapien
gcgtggctcggcttcgcgggtccgg

SEQ ID NO: 4712431 - DNA, 25 bp, Homo sapien
gcggcggcgtggctcggcttcgcgg

SEQ ID NO: 4712432 - DNA, 25 bp, Homo sapien
gcgcggcggcgtggctcggcttcgc

SEQ ID NO: 4712433 - DNA, 25 bp, Homo sapien
tgcggctgcaacttgatgggatgca

SEQ ID NO: 4712434 - DNA, 25 bp, Homo sapien
ccccgctgcggctgcaacttgatgg

SEQ ID NO: 4712435 - DNA, 25 bp, Homo sapien
acttgatgggatgcagctcgttggc

SEQ ID NO: 4712436 - DNA, 25 bp, Homo sapien
gcttgatgtccaggcggcagcgcac

SEQ ID NO: 4712437 - DNA, 25 bp, Homo sapien
tgggcccgcaggaccgcgagccccg

SEQ ID NO: 4712438 - DNA, 25 bp, Homo sapien
tcacgctcgcggtaccttccgaagt

SEQ ID NO: 4712439 - DNA, 25 bp, Homo sapien
atgcgccttggactgggccccgaga

SEQ ID NO: 4712440 - DNA, 25 bp, Homo sapien
acagtgcggcgtagcgtctgggaga

SEQ ID NO: 4712441 - DNA, 25 bp, Homo sapien
cccgagagctcctcggacggatagg

SEQ ID NO: 4712442 - DNA, 25 bp, Homo sapien
cgcgcaggtcattgtcagtgatggt

SEQ ID NO: 4712443 - DNA, 25 bp, Homo sapien
ctcggtggcgcgcaggtcattgtca

SEQ ID NO: 4712444 - DNA, 25 bp, Homo sapien
tcagtgatggtgatctcgggcgtca

SEQ ID NO: 4712445 - DNA, 25 bp, Homo sapien
tgatggtgatctcgggcgtcacgta

SEQ ID NO: 4712446 - DNA, 25 bp, Homo sapien
gcccgcgggccgcgagtccagcagt

SEQ ID NO: 4712447 - DNA, 25 bp, Homo sapien
tcgcggcaaaactgcagtacgtggc

SEQ ID NO: 4712448 - DNA, 25 bp, Homo sapien
cgacacgcgcgatgcgcgagaaagc

SEQ ID NO: 4712449 - DNA, 25 bp, Homo sapien
aggaagcactctgccggttcgtaga

SEQ ID NO: 4712450 - DNA, 25 bp, Homo sapien
tgcaccgggccgctgtcgcggcaaa

SEQ ID NO: 4712451 - DNA, 25 bp, Homo sapien
cagggccggtgtccccggtggcgcg

SEQ ID NO: 4712452 - DNA, 25 bp, Homo sapien
gttggcccgtggctgcgtggcgcgg

SEQ ID NO: 4712453 - DNA, 25 bp, Homo sapien
cggtggcgcggtgccgggtcccacg

SEQ ID NO: 4712454 - DNA, 25 bp, Homo sapien
cttgcgcactgttggcccgtggctg

SEQ ID NO: 4712455 - DNA, 25 bp, Homo sapien
ggccgcgcggggctgccggccgcca

SEQ ID NO: 4712456 - DNA, 25 bp, Homo sapien
ctccgcgccgggggcggccgcgcgg

SEQ ID NO: 4712457 - DNA, 25 bp, Homo sapien
cgcgcggggctgccggccgccagcg

SEQ ID NO: 4712458 - DNA, 25 bp, Homo sapien
cggggctgccggccgccagcgctac

SEQ ID NO: 4712459 - DNA, 25 bp, Homo sapien
cccggcggtggcgtcaggatcagcg

SEQ ID NO: 4712460 - DNA, 25 bp, Homo sapien
tcggaggcggccatgatcatgcaca

SEQ ID NO: 4712461 - DNA, 25 bp, Homo sapien
aactcgtggcgcaggaagacgccgc

SEQ ID NO: 4712462 - DNA, 25 bp, Homo sapien
gcgtgaagcgcctgttggcctcgac

SEQ ID NO: 4712463 - DNA, 25 bp, Homo sapien
gacgaactcgcaaagctgctcgtag

SEQ ID NO: 4712464 - DNA, 25 bp, Homo sapien
ggaaggcgaagggcctgtgaggaac

SEQ ID NO: 4712465 - DNA, 25 bp, Homo sapien
gggaaggcgaagggcctgtgaggaa

SEQ ID NO: 4712466 - DNA, 25 bp, Homo sapien
tcttctggggatcctcgagggcgag

SEQ ID NO: 4712467 - DNA, 25 bp, Homo sapien
agcaccgagggcgaggaccgacttc

SEQ ID NO: 4712468 - DNA, 25 bp, Homo sapien
cggggagcaccgagggcgaggaccg

SEQ ID NO: 4712469 - DNA, 25 bp, Homo sapien
cgagggcgaggaccgacttcttctg

SEQ ID NO: 4712470 - DNA, 25 bp, Homo sapien
agtgaaggcagagctcggcggtcct

SEQ ID NO: 4712471 - DNA, 25 bp, Homo sapien
cagtagtgacccctccgagtgaagg

SEQ ID NO: 4712472 - DNA, 25 bp, Homo sapien
tctgtgcagtagtgacccctccgag

SEQ ID NO: 4712473 - DNA, 25 bp, Homo sapien
gtgacccctccgagtgaaggcagag

SEQ ID NO: 4712474 - DNA, 25 bp, Homo sapien
aaccggagtcggggaggctccagcg

SEQ ID NO: 4712475 - DNA, 25 bp, Homo sapien
ctcgcgcacacggacgcacagaggt

SEQ ID NO: 4712476 - DNA, 25 bp, Homo sapien
acagactgggctttggttacgtcgg

SEQ ID NO: 4712477 - DNA, 25 bp, Homo sapien
tccagcgaggaggcaacacagccgc

SEQ ID NO: 4712478 - DNA, 25 bp, Homo sapien
acagaggtcgaccagggtgttctcc

SEQ ID NO: 4712479 - DNA, 25 bp, Homo sapien
ctgcagcggctggaggcgaagggac

SEQ ID NO: 4712480 - DNA, 25 bp, Homo sapien
ggagacttgcatatcggcctgaaga

SEQ ID NO: 4712481 - DNA, 25 bp, Homo sapien
acggcagggcgcgtggcgtggttag

SEQ ID NO: 4712482 - DNA, 25 bp, Homo sapien
ttagtgtgctggctccgaccagcgg

SEQ ID NO: 4712483 - DNA, 25 bp, Homo sapien
ttcgaaagctcttgccccctggaaa

SEQ ID NO: 4712484 - DNA, 25 bp, Homo sapien
ggacctctcgggacaggtcaagccc

SEQ ID NO: 4712485 - DNA, 25 bp, Homo sapien
tcgggtgggcttccacgcttaccaa

SEQ ID NO: 4712486 - DNA, 25 bp, Homo sapien
tccaggagggcccttgcgtttggcc

SEQ ID NO: 4712487 - DNA, 25 bp, Homo sapien
tgtcccgcacgtagtccgaagacca

SEQ ID NO: 4712488 - DNA, 25 bp, Homo sapien
tctccaccgcccgaaggcctcgctc

SEQ ID NO: 4712489 - DNA, 25 bp, Homo sapien
ccctgacctcctgtcccgcacgtag

SEQ ID NO: 4712490 - DNA, 25 bp, Homo sapien
caccgcccgaaggactccctctctt

SEQ ID NO: 4712491 - DNA, 25 bp, Homo sapien
acggggcagttaggcggcccgcgag

SEQ ID NO: 4712492 - DNA, 25 bp, Homo sapien
cggggcagttaggcggcccgcgagg

SEQ ID NO: 4712493 - DNA, 25 bp, Homo sapien
cgtggaatcgggaatgggtggtgat

SEQ ID NO: 4712494 - DNA, 25 bp, Homo sapien
gtggtgatgaaatccagccaacgga

SEQ ID NO: 4712495 - DNA, 25 bp, Homo sapien
agttcctctccagcggggtccggtg

SEQ ID NO: 4712496 - DNA, 25 bp, Homo sapien
tccagccaacggagaagttcctctc

SEQ ID NO: 4712497 - DNA, 25 bp, Homo sapien
cgtgctgaccaatcgcaatccagtt

SEQ ID NO: 4712498 - DNA, 25 bp, Homo sapien
cacgtgctgaccaatcgcaatccag

SEQ ID NO: 4712499 - DNA, 25 bp, Homo sapien
cgaggcacgtgctgaccaatcgcaa

SEQ ID NO: 4712500 - DNA, 25 bp, Homo sapien
tgaccaatcgcaatccagttccttg

SEQ ID NO: 4712501 - DNA, 25 bp, Homo sapien
atcccgtcggggaatgcttcccaag

SEQ ID NO: 4712502 - DNA, 25 bp, Homo sapien
gcgcctcagccaattgtaccgccga

SEQ ID NO: 4712503 - DNA, 25 bp, Homo sapien
cagcgcctcagccaattgtaccgcc

SEQ ID NO: 4712504 - DNA, 25 bp, Homo sapien
ctgcgagagcgacgaccaatcccgt

SEQ ID NO: 4712505 - DNA, 25 bp, Homo sapien
gccgcttgtactgcgggaggcgggc

SEQ ID NO: 4712506 - DNA, 25 bp, Homo sapien
cgacccgggggccgcttgtactgcg

SEQ ID NO: 4712507 - DNA, 25 bp, Homo sapien
ccgggggccgcttgtactgcgggag

SEQ ID NO: 4712508 - DNA, 25 bp, Homo sapien
gggccgcttgtactgcgggaggcgg

SEQ ID NO: 4712509 - DNA, 25 bp, Homo sapien
ttgtagccgcgcacgatctccttgc

SEQ ID NO: 4712510 - DNA, 25 bp, Homo sapien
catcaggaatgagagcgaggtccgc

SEQ ID NO: 4712511 - DNA, 25 bp, Homo sapien
gactcggatcagcacatacttgaag

SEQ ID NO: 4712512 - DNA, 25 bp, Homo sapien
tgaagacgccgtcggagtcgatgtc

SEQ ID NO: 4712513 - DNA, 25 bp, Homo sapien
cttgtcctgactctggtgggagatg

SEQ ID NO: 4712514 - DNA, 25 bp, Homo sapien
catggaatagccgtacacgtgaatc

SEQ ID NO: 4712515 - DNA, 25 bp, Homo sapien
ttgcttctgcatgtcgcccgacact

SEQ ID NO: 4712516 - DNA, 25 bp, Homo sapien
agacactcacagtcgcagccttgct

SEQ ID NO: 4712517 - DNA, 25 bp, Homo sapien
ggaatgcaggaacacaatgggccct

SEQ ID NO: 4712518 - DNA, 25 bp, Homo sapien
ctcaggtctggcgtgtgctccatgg

SEQ ID NO: 4712519 - DNA, 25 bp, Homo sapien
ggctctgccgccgaccctgggagaa

SEQ ID NO: 4712520 - DNA, 25 bp, Homo sapien
agtgctggaggacagctagagccca

SEQ ID NO: 4712521 - DNA, 25 bp, Homo sapien
gcctgaggcgcccagagggacgcac

SEQ ID NO: 4712522 - DNA, 25 bp, Homo sapien
cgcccagagggacgcacgtgggtct

SEQ ID NO: 4712523 - DNA, 25 bp, Homo sapien
tgaggcgcccagagggacgcacgtg

SEQ ID NO: 4712524 - DNA, 25 bp, Homo sapien
ccagagggacgcacgtgggtctcat

SEQ ID NO: 4712525 - DNA, 25 bp, Homo sapien
cacaccagaagcgagtgtgggaaag

SEQ ID NO: 4712526 - DNA, 25 bp, Homo sapien
agaggcgacctccacaggcaagcaa

SEQ ID NO: 4712527 - DNA, 25 bp, Homo sapien
aagagaagacgcctgctggcactac

SEQ ID NO: 4712528 - DNA, 25 bp, Homo sapien
cttcaacccgatacccggctctggg

SEQ ID NO: 4712529 - DNA, 25 bp, Homo sapien
tctcagttgaaatggcgtgctgggc

SEQ ID NO: 4712530 - DNA, 25 bp, Homo sapien
cgtcgttagcccaggtgacctcgta

SEQ ID NO: 4712531 - DNA, 25 bp, Homo sapien
cgtagtcggggtacttggctttgat

SEQ ID NO: 4712532 - DNA, 25 bp, Homo sapien
tgacctcgtagtcggggtacttggc

SEQ ID NO: 4712533 - DNA, 25 bp, Homo sapien
agggccagccctgcaagaggagtgc

SEQ ID NO: 4712534 - DNA, 25 bp, Homo sapien
gcaaaggcgggggctctgaagtggc

SEQ ID NO: 4712535 - DNA, 25 bp, Homo sapien
caagaggagtgcaggcaaaggcggg

SEQ ID NO: 4712536 - DNA, 25 bp, Homo sapien
acagcacgtcaccagaggctgccgc

SEQ ID NO: 4712537 - DNA, 25 bp, Homo sapien
ggcaacacgtttaattctgtggcca

SEQ ID NO: 4712538 - DNA, 25 bp, Homo sapien
gaggtggtgacgcagggtgcaggaa

SEQ ID NO: 4712539 - DNA, 25 bp, Homo sapien
cccccggaggtggtgacgcagggtg

SEQ ID NO: 4712540 - DNA, 25 bp, Homo sapien
ccggaggtggtgacgcagggtgcag

SEQ ID NO: 4712541 - DNA, 25 bp, Homo sapien
ggtggtgacgcagggtgcaggaagc

SEQ ID NO: 4712542 - DNA, 25 bp, Homo sapien
caggctgtggaggatcacgccgtca

SEQ ID NO: 4712543 - DNA, 25 bp, Homo sapien
aggtgctgtccggtgccagatacag

SEQ ID NO: 4712544 - DNA, 25 bp, Homo sapien
tcattcattcgtcctgagcagccag

SEQ ID NO: 4712545 - DNA, 25 bp, Homo sapien
agccaggtgctgtccggtgccagat

SEQ ID NO: 4712546 - DNA, 25 bp, Homo sapien
ggagcagtgcggccacacagggtgc

SEQ ID NO: 4712547 - DNA, 25 bp, Homo sapien
ccaggaacaggaccaaggcgggcag

SEQ ID NO: 4712548 - DNA, 25 bp, Homo sapien
caggaacaggaccaaggcgggcagc

SEQ ID NO: 4712549 - DNA, 25 bp, Homo sapien
aggaacaggaccaaggcgggcagca

SEQ ID NO: 4712550 - DNA, 25 bp, Homo sapien
ctgcagtggttggggacccaggccc

SEQ ID NO: 4712551 - DNA, 25 bp, Homo sapien
tgcagtggttggggacccaggccca

SEQ ID NO: 4712552 - DNA, 25 bp, Homo sapien
cagtggttggggacccaggcccagc

SEQ ID NO: 4712553 - DNA, 25 bp, Homo sapien
gcagtggttggggacccaggcccag

SEQ ID NO: 4712554 - DNA, 25 bp, Homo sapien
tcacacacgaagttgcacacggcct

SEQ ID NO: 4712555 - DNA, 25 bp, Homo sapien
gtcacacacgaagttgcacacggcc

SEQ ID NO: 4712556 - DNA, 25 bp, Homo sapien
cacacacgaagttgcacacggcctg

SEQ ID NO: 4712557 - DNA, 25 bp, Homo sapien
gcctgaggtactaatgtcccgccag

SEQ ID NO: 4712558 - DNA, 25 bp, Homo sapien
agctgtagcctgaggtactaatgtc

SEQ ID NO: 4712559 - DNA, 25 bp, Homo sapien
aggtactaatgtcccgccagccgca

SEQ ID NO: 4712560 - DNA, 25 bp, Homo sapien
tcctgctcgaagtcacaggcgaagg

SEQ ID NO: 4712561 - DNA, 25 bp, Homo sapien
aggagggtattgggacaggggcgca

SEQ ID NO: 4712562 - DNA, 25 bp, Homo sapien
ggagggtattgggacaggggcgcac

SEQ ID NO: 4712563 - DNA, 25 bp, Homo sapien
ggtgagaggtcaggagacggggcag

SEQ ID NO: 4712564 - DNA, 25 bp, Homo sapien
ggtgggttccaacggccatgtacca

SEQ ID NO: 4712565 - DNA, 25 bp, Homo sapien
gcctctcgcagggttggcgagcgca

SEQ ID NO: 4712566 - DNA, 25 bp, Homo sapien
cgcgtggtaccagagcctcagcttg

SEQ ID NO: 4712567 - DNA, 25 bp, Homo sapien
tccagaggccgcgtggtaccagagc

SEQ ID NO: 4712568 - DNA, 25 bp, Homo sapien
cttgggcaccccccacgagccttgg

SEQ ID NO: 4712569 - DNA, 25 bp, Homo sapien
ccttgggcaccccccacgagccttg

SEQ ID NO: 4712570 - DNA, 25 bp, Homo sapien
ggcctgtggtcactgccaactcctg

SEQ ID NO: 4712571 - DNA, 25 bp, Homo sapien
cccggatgcggcctgtggtcactgc

SEQ ID NO: 4712572 - DNA, 25 bp, Homo sapien
gaagtcaccccggatgcggcctgtg

SEQ ID NO: 4712573 - DNA, 25 bp, Homo sapien
gtcagggtctctgcgccatgggtca

SEQ ID NO: 4712574 - DNA, 25 bp, Homo sapien
tcatctagagccacagcgcccctgt

SEQ ID NO: 4712575 - DNA, 25 bp, Homo sapien
cccagaactctaggtcatctagagc

SEQ ID NO: 4712576 - DNA, 25 bp, Homo sapien
agtcccagaactctaggtcatctag

SEQ ID NO: 4712577 - DNA, 25 bp, Homo sapien
acagtcccagaactctaggtcatct

SEQ ID NO: 4712578 - DNA, 25 bp, Homo sapien
agttgtcttccccgtcgcacagctg

SEQ ID NO: 4712579 - DNA, 25 bp, Homo sapien
tctcatcagacaggtccccgcagtt

SEQ ID NO: 4712580 - DNA, 25 bp, Homo sapien
gttgtcttccccgtcgcacagctgc

SEQ ID NO: 4712581 - DNA, 25 bp, Homo sapien
gcagttgtcttccccgtcgcacagc

SEQ ID NO: 4712582 - DNA, 25 bp, Homo sapien
accagccttccgagcggttccatgg

SEQ ID NO: 4712583 - DNA, 25 bp, Homo sapien
cactgttccggctgtggtcacggcg

SEQ ID NO: 4712584 - DNA, 25 bp, Homo sapien
caccagcgcggtggttccgggacca

SEQ ID NO: 4712585 - DNA, 25 bp, Homo sapien
caggcctgtctcaaagtcggtggct

SEQ ID NO: 4712586 - DNA, 25 bp, Homo sapien
cttggaattcggggctggagagtat

SEQ ID NO: 4712587 - DNA, 25 bp, Homo sapien
ctgaggcttggaattcggggctgga

SEQ ID NO: 4712588 - DNA, 25 bp, Homo sapien
caggctcggccacggagaccaggaa

SEQ ID NO: 4712589 - DNA, 25 bp, Homo sapien
gccaggctcggccacggagaccagg

SEQ ID NO: 4712590 - DNA, 25 bp, Homo sapien
gacccactcaggtactgatagaaga

SEQ ID NO: 4712591 - DNA, 25 bp, Homo sapien
tcagacccactcaggtactgataga

SEQ ID NO: 4712592 - DNA, 25 bp, Homo sapien
ccactcaggtactgatagaagacca

SEQ ID NO: 4712593 - DNA, 25 bp, Homo sapien
agcctcagacccactcaggtactga

SEQ ID NO: 4712594 - DNA, 25 bp, Homo sapien
tctggatgtcaacacggtctcggac

SEQ ID NO: 4712595 - DNA, 25 bp, Homo sapien
gggtaggcgctctggatgtcaacac

SEQ ID NO: 4712596 - DNA, 25 bp, Homo sapien
taggcgctctggatgtcaacacggt

SEQ ID NO: 4712597 - DNA, 25 bp, Homo sapien
tcaacacggtctcggacccaggcgg

SEQ ID NO: 4712598 - DNA, 25 bp, Homo sapien
caggatgaggtcgtccagacccacg

SEQ ID NO: 4712599 - DNA, 25 bp, Homo sapien
gacaggatgaggtcgtccagaccca

SEQ ID NO: 4712600 - DNA, 25 bp, Homo sapien
atgaggtcgtccagacccacgacgc

SEQ ID NO: 4712601 - DNA, 25 bp, Homo sapien
gaggtcgtccagacccacgacgccc

SEQ ID NO: 4712602 - DNA, 25 bp, Homo sapien
aggaggcagcggctgcagggtggac

SEQ ID NO: 4712603 - DNA, 25 bp, Homo sapien
ctggagccgcgagctgggcggcagg

SEQ ID NO: 4712604 - DNA, 25 bp, Homo sapien
tggagccgcgagctgggcggcaggg

SEQ ID NO: 4712605 - DNA, 25 bp, Homo sapien
ggcagcggctgcagggtggacacct

SEQ ID NO: 4712606 - DNA, 25 bp, Homo sapien
tcctcgaagtcacacagttgttccg

SEQ ID NO: 4712607 - DNA, 25 bp, Homo sapien
gctcctcgaagtcacacagttgttc

SEQ ID NO: 4712608 - DNA, 25 bp, Homo sapien
ctcgaagtcacacagttgttccggg

SEQ ID NO: 4712609 - DNA, 25 bp, Homo sapien
tcacacagttgttccgggggcacac

SEQ ID NO: 4712610 - DNA, 25 bp, Homo sapien
gtctgcaggaggttgagccccttta

SEQ ID NO: 4712611 - DNA, 25 bp, Homo sapien
tctgcaggaggttgagcccctttac

SEQ ID NO: 4712612 - DNA, 25 bp, Homo sapien
agcctcgggggactcaaagtctgtg

SEQ ID NO: 4712613 - DNA, 25 bp, Homo sapien
cccagcctcgggggactcaaagtct

SEQ ID NO: 4712614 - DNA, 25 bp, Homo sapien
ccagcctcgggggactcaaagtctg

SEQ ID NO: 4712615 - DNA, 25 bp, Homo sapien
cctcgggggactcaaagtctgtggt

SEQ ID NO: 4712616 - DNA, 25 bp, Homo sapien
agcagctgcactggacccctggctc

SEQ ID NO: 4712617 - DNA, 25 bp, Homo sapien
gcagctgcactggacccctggctct

SEQ ID NO: 4712618 - DNA, 25 bp, Homo sapien
taaataataagccaggtggagttca

SEQ ID NO: 4712619 - DNA, 25 bp, Homo sapien
tggctctgtaaataataagccaggt

SEQ ID NO: 4712620 - DNA, 25 bp, Homo sapien
gacccgggcctcagcgcctagctgc

SEQ ID NO: 4712621 - DNA, 25 bp, Homo sapien
ataataagccaggtggagttcacag

SEQ ID NO: 4712622 - DNA, 25 bp, Homo sapien
cagggaacttgcggagtgtggcggt

SEQ ID NO: 4712623 - DNA, 25 bp, Homo sapien
gccagggaacttgcggagtgtggcg

SEQ ID NO: 4712624 - DNA, 25 bp, Homo sapien
ctggccagggaacttgcggagtgtg

SEQ ID NO: 4712625 - DNA, 25 bp, Homo sapien
gggaacttgcggagtgtggcggtac

SEQ ID NO: 4712626 - DNA, 25 bp, Homo sapien
tcccgggagccgttgtccaccacaa

SEQ ID NO: 4712627 - DNA, 25 bp, Homo sapien
gctcccgggagccgttgtccaccac

SEQ ID NO: 4712628 - DNA, 25 bp, Homo sapien
ggaccttgtccaccttccagatgcc

SEQ ID NO: 4712629 - DNA, 25 bp, Homo sapien
cgggagccgttgtccaccacaacta

SEQ ID NO: 4712630 - DNA, 25 bp, Homo sapien
gtcagggccatccaagtccaccaaa

SEQ ID NO: 4712631 - DNA, 25 bp, Homo sapien
tgtggggctacagtccctcagggtc

SEQ ID NO: 4712632 - DNA, 25 bp, Homo sapien
agtccctcagggtcacgttgtccac

SEQ ID NO: 4712633 - DNA, 25 bp, Homo sapien
tggtcagggccatccaagtccacca

SEQ ID NO: 4712634 - DNA, 25 bp, Homo sapien
ctggaggagtgtaaggggagcaccc

SEQ ID NO: 4712635 - DNA, 25 bp, Homo sapien
ccctgagaaggtggaagctccgggg

SEQ ID NO: 4712636 - DNA, 25 bp, Homo sapien
tgagaaggtggaagctccggggtcc

SEQ ID NO: 4712637 - DNA, 25 bp, Homo sapien
cctggaggagtgtaaggggagcacc

SEQ ID NO: 4712638 - DNA, 25 bp, Homo sapien
gggggtggggccaggtggcgtcaca

SEQ ID NO: 4712639 - DNA, 25 bp, Homo sapien
ggtggggccaggtggcgtcacacac

SEQ ID NO: 4712640 - DNA, 25 bp, Homo sapien
ctgggggtggggccaggtggcgtca

SEQ ID NO: 4712641 - DNA, 25 bp, Homo sapien
gggtggggccaggtggcgtcacaca

SEQ ID NO: 4712642 - DNA, 25 bp, Homo sapien
acccagcgccagtgtgtgtctgaga

SEQ ID NO: 4712643 - DNA, 25 bp, Homo sapien
cacccagcgccagtgtgtgtctgag

SEQ ID NO: 4712644 - DNA, 25 bp, Homo sapien
ctgtggggtccaggagcacaaagtg

SEQ ID NO: 4712645 - DNA, 25 bp, Homo sapien
gtggggtccaggagcacaaagtggc

SEQ ID NO: 4712646 - DNA, 25 bp, Homo sapien
tgtggggtccaggagcacaaagtgg

SEQ ID NO: 4712647 - DNA, 25 bp, Homo sapien
tggtaccagaagctgagacactccg

SEQ ID NO: 4712648 - DNA, 25 bp, Homo sapien
gaggtggtaccagaagctgagacac

SEQ ID NO: 4712649 - DNA, 25 bp, Homo sapien
taccagaagctgagacactccgtgg

SEQ ID NO: 4712650 - DNA, 25 bp, Homo sapien
agacactccgtgggtgctgctggca

SEQ ID NO: 4712651 - DNA, 25 bp, Homo sapien
tcctgtgccttgatgggtgtcagag

SEQ ID NO: 4712652 - DNA, 25 bp, Homo sapien
tctctcctgtgccttgatgggtgtc

SEQ ID NO: 4712653 - DNA, 25 bp, Homo sapien
cctgtgccttgatgggtgtcagagc

SEQ ID NO: 4712654 - DNA, 25 bp, Homo sapien
tctcctgtgccttgatgggtgtcag

SEQ ID NO: 4712655 - DNA, 25 bp, Homo sapien
ctccccttcccgtctcatggctagg

SEQ ID NO: 4712656 - DNA, 25 bp, Homo sapien
ctgggtgcctgaccgcgaccacagg

SEQ ID NO: 4712657 - DNA, 25 bp, Homo sapien
aggcctcgtgccagcggttgccctg

SEQ ID NO: 4712658 - DNA, 25 bp, Homo sapien
ttcccgtctcatggctaggcgcaga

SEQ ID NO: 4712659 - DNA, 25 bp, Homo sapien
atggtgccgtggtatccgtcccgga

SEQ ID NO: 4712660 - DNA, 25 bp, Homo sapien
ggccacatcgtccagcgccatggtg

SEQ ID NO: 4712661 - DNA, 25 bp, Homo sapien
atggcccgaggcattggcctgccgc

SEQ ID NO: 4712662 - DNA, 25 bp, Homo sapien
cttgggctgtctcagtggtatggtc

SEQ ID NO: 4712663 - DNA, 25 bp, Homo sapien
tggccagcccctcaatccctgcccc

SEQ ID NO: 4712664 - DNA, 25 bp, Homo sapien
gcccctcaatccctgcccctgccag

SEQ ID NO: 4712665 - DNA, 25 bp, Homo sapien
tggaggtgccagcatcagcctgcca

SEQ ID NO: 4712666 - DNA, 25 bp, Homo sapien
ggtgccagcatcagcctgccagccc

SEQ ID NO: 4712667 - DNA, 25 bp, Homo sapien
cagaaggtcagacaagcaggctggg

SEQ ID NO: 4712668 - DNA, 25 bp, Homo sapien
gtagtgcgtctgggcttgtgtccac

SEQ ID NO: 4712669 - DNA, 25 bp, Homo sapien
gaggtcagggaggccgtctggcccc

SEQ ID NO: 4712670 - DNA, 25 bp, Homo sapien
tctggccccggggtagtgcgtctgg

SEQ ID NO: 4712671 - DNA, 25 bp, Homo sapien
tgggctgcggaggctcccgtggtac

SEQ ID NO: 4712672 - DNA, 25 bp, Homo sapien
ctgggctgcggaggctcccgtggta

SEQ ID NO: 4712673 - DNA, 25 bp, Homo sapien
caagcccgccgtgggcactgaggct

SEQ ID NO: 4712674 - DNA, 25 bp, Homo sapien
aggcgccaggcaagcccgccgtggg

SEQ ID NO: 4712675 - DNA, 25 bp, Homo sapien
ggctcgctcggcctgcacgtccatg

SEQ ID NO: 4712676 - DNA, 25 bp, Homo sapien
tcctccaggtagacccgcagggtgc

SEQ ID NO: 4712677 - DNA, 25 bp, Homo sapien
agggcagcctcagcgggtccaggca

SEQ ID NO: 4712678 - DNA, 25 bp, Homo sapien
catccagagccacgtaggagtgtgc

SEQ ID NO: 4712679 - DNA, 25 bp, Homo sapien
cagagccacgtaggagtgtgccacg

SEQ ID NO: 4712680 - DNA, 25 bp, Homo sapien
taggagtgtgccacgcctgcggcca

SEQ ID NO: 4712681 - DNA, 25 bp, Homo sapien
cacgtaggagtgtgccacgcctgcg

SEQ ID NO: 4712682 - DNA, 25 bp, Homo sapien
aagccctgggcaccacgactacgaa

SEQ ID NO: 4712683 - DNA, 25 bp, Homo sapien
cacgactacgaagggaaagggctag

SEQ ID NO: 4712684 - DNA, 25 bp, Homo sapien
gggaaagggctaggcaggcacccca

SEQ ID NO: 4712685 - DNA, 25 bp, Homo sapien
ggtgagtggtgctgccccacggccc

SEQ ID NO: 4712686 - DNA, 25 bp, Homo sapien
ccagtcccagctgtatccgcccagg

SEQ ID NO: 4712687 - DNA, 25 bp, Homo sapien
ccccagtcccagctgtatccgccca

SEQ ID NO: 4712688 - DNA, 25 bp, Homo sapien
tcccagctgtatccgcccaggccgg

SEQ ID NO: 4712689 - DNA, 25 bp, Homo sapien
cccagctgtatccgcccaggccggg

SEQ ID NO: 4712690 - DNA, 25 bp, Homo sapien
ctgcctctgtgcccagggtgtggtc

SEQ ID NO: 4712691 - DNA, 25 bp, Homo sapien
tgtgcccagggtgtggtccacaggg

SEQ ID NO: 4712692 - DNA, 25 bp, Homo sapien
gcctctgtgcccagggtgtggtcca

SEQ ID NO: 4712693 - DNA, 25 bp, Homo sapien
tctgtgcccagggtgtggtccacag

SEQ ID NO: 4712694 - DNA, 25 bp, Homo sapien
aggaaaacccatgtggtaccagaag

SEQ ID NO: 4712695 - DNA, 25 bp, Homo sapien
gtggccggcagaggctcgctgcgca

SEQ ID NO: 4712696 - DNA, 25 bp, Homo sapien
ggcccagcacgccagtttcaaagaa

SEQ ID NO: 4712697 - DNA, 25 bp, Homo sapien
ccatgtggtaccagaagcggaggca

SEQ ID NO: 4712698 - DNA, 25 bp, Homo sapien
ctgcacgcctaaccaggggcgggct

SEQ ID NO: 4712699 - DNA, 25 bp, Homo sapien
caggcacccattggcccagccggac

SEQ ID NO: 4712700 - DNA, 25 bp, Homo sapien
tgctgcccccgttgcccaggcaccc

SEQ ID NO: 4712701 - DNA, 25 bp, Homo sapien
gggctcctgcacgcctaaccagggg

SEQ ID NO: 4712702 - DNA, 25 bp, Homo sapien
tgtgcagcagtaccttcagctcccc

SEQ ID NO: 4712703 - DNA, 25 bp, Homo sapien
gtgccgccgatgcccgcctgcgccc

SEQ ID NO: 4712704 - DNA, 25 bp, Homo sapien
tccttggcactggctacctccacct

SEQ ID NO: 4712705 - DNA, 25 bp, Homo sapien
gccgatgcccgcctgcgccccacac

SEQ ID NO: 4712706 - DNA, 25 bp, Homo sapien
ccagatactccacgtcatccagggc

SEQ ID NO: 4712707 - DNA, 25 bp, Homo sapien
gccagatactccacgtcatccaggg

SEQ ID NO: 4712708 - DNA, 25 bp, Homo sapien
cagccagatactccacgtcatccag

SEQ ID NO: 4712709 - DNA, 25 bp, Homo sapien
agccagatactccacgtcatccagg

SEQ ID NO: 4712710 - DNA, 25 bp, Homo sapien
ggtattggttctgctaccacaagga

SEQ ID NO: 4712711 - DNA, 25 bp, Homo sapien
atggccccaggcgagattctttccc

SEQ ID NO: 4712712 - DNA, 25 bp, Homo sapien
acactggtaagcctggcaaaccccg

SEQ ID NO: 4712713 - DNA, 25 bp, Homo sapien
tagggacatgtgagccctccaaagc

SEQ ID NO: 4712714 - DNA, 25 bp, Homo sapien
catgagcaataggagggcactgcca

SEQ ID NO: 4712715 - DNA, 25 bp, Homo sapien
caccaggagcatgagcaataggagg

SEQ ID NO: 4712716 - DNA, 25 bp, Homo sapien
acagacccgggtgcggctgtgttcc

SEQ ID NO: 4712717 - DNA, 25 bp, Homo sapien
cacagacccgggtgcggctgtgttc

SEQ ID NO: 4712718 - DNA, 25 bp, Homo sapien
gaaaaggatgttgtcaaagccaggg

SEQ ID NO: 4712719 - DNA, 25 bp, Homo sapien
cgcattgaaaaggatgttgtcaaag

SEQ ID NO: 4712720 - DNA, 25 bp, Homo sapien
cattgaaaaggatgttgtcaaagcc

SEQ ID NO: 4712721 - DNA, 25 bp, Homo sapien
ttgaaaaggatgttgtcaaagccag

SEQ ID NO: 4712722 - DNA, 25 bp, Homo sapien
acagatgccgggagggtgacaccat

SEQ ID NO: 4712723 - DNA, 25 bp, Homo sapien
cactggtgacagatgccgggagggt

SEQ ID NO: 4712724 - DNA, 25 bp, Homo sapien
cagatgccgggagggtgacaccatc

SEQ ID NO: 4712725 - DNA, 25 bp, Homo sapien
ctacggatcactggtgacagatgcc

SEQ ID NO: 4712726 - DNA, 25 bp, Homo sapien
gggtctgaccaagtgctggatgtca

SEQ ID NO: 4712727 - DNA, 25 bp, Homo sapien
tcacagagcaacagagtcagcacag

SEQ ID NO: 4712728 - DNA, 25 bp, Homo sapien
catgggccagggtgtttattcacag

SEQ ID NO: 4712729 - DNA, 25 bp, Homo sapien
ctggctagggtctgaccaagtgctg

SEQ ID NO: 4712730 - DNA, 25 bp, Homo sapien
tcatgactgatgcccgggagtgggc

SEQ ID NO: 4712731 - DNA, 25 bp, Homo sapien
tgatgcccgggagtgggctgccggg

SEQ ID NO: 4712732 - DNA, 25 bp, Homo sapien
ccatctgcgtggacagttggtgggc

SEQ ID NO: 4712733 - DNA, 25 bp, Homo sapien
atctgcgtggacagttggtgggcac

SEQ ID NO: 4712734 - DNA, 25 bp, Homo sapien
gggcctagggcgaaatgaacacaaa

SEQ ID NO: 4712735 - DNA, 25 bp, Homo sapien
acacaaagcctcgaaatcagtgcgc

SEQ ID NO: 4712736 - DNA, 25 bp, Homo sapien
gacattggaaagcccatcgagaagg

SEQ ID NO: 4712737 - DNA, 25 bp, Homo sapien
tccagctgatctcgttccgccggtt

SEQ ID NO: 4712738 - DNA, 25 bp, Homo sapien
tgttgagtccttagccgaacggagc

SEQ ID NO: 4712739 - DNA, 25 bp, Homo sapien
tgcgcccggccacaagagattattt

SEQ ID NO: 4712740 - DNA, 25 bp, Homo sapien
tagaattacagttgtctcctccgcg

SEQ ID NO: 4712741 - DNA, 25 bp, Homo sapien
agcaaggtttgtatggacggagcca

SEQ ID NO: 4712742 - DNA, 25 bp, Homo sapien
gcccgaagtcggaagaatccaggaa

SEQ ID NO: 4712743 - DNA, 25 bp, Homo sapien
tatccatcatgccttggtgcaggga

SEQ ID NO: 4712744 - DNA, 25 bp, Homo sapien
taactggtagacagactggtgcaac

SEQ ID NO: 4712745 - DNA, 25 bp, Homo sapien
taggagggagtgcaaacaaacgacc

SEQ ID NO: 4712746 - DNA, 25 bp, Homo sapien
tgcgcttaggtccttctaggttccc

SEQ ID NO: 4712747 - DNA, 25 bp, Homo sapien
tgccagggccctgcgcttaggtcct

SEQ ID NO: 4712748 - DNA, 25 bp, Homo sapien
cagggccctgcgcttaggtccttct

SEQ ID NO: 4712749 - DNA, 25 bp, Homo sapien
gccctgcgcttaggtccttctaggt

SEQ ID NO: 4712750 - DNA, 25 bp, Homo sapien
gctgcagcctccgagggaagctggt

SEQ ID NO: 4712751 - DNA, 25 bp, Homo sapien
gtgctgcagcctccgagggaagctg

SEQ ID NO: 4712752 - DNA, 25 bp, Homo sapien
ctgtgctgcagcctccgagggaagc

SEQ ID NO: 4712753 - DNA, 25 bp, Homo sapien
tgcagcctccgagggaagctggttt

SEQ ID NO: 4712754 - DNA, 25 bp, Homo sapien
cacaccgagagcttgcctctttttc

SEQ ID NO: 4712755 - DNA, 25 bp, Homo sapien
aatagccgcagtccacttgctcaca

SEQ ID NO: 4712756 - DNA, 25 bp, Homo sapien
ctcaaatagccgcagtccacttgct

SEQ ID NO: 4712757 - DNA, 25 bp, Homo sapien
tccacttgctcacaccgagagcttg

SEQ ID NO: 4712758 - DNA, 25 bp, Homo sapien
caggggattcccacgtgggctcctt

SEQ ID NO: 4712759 - DNA, 25 bp, Homo sapien
tcaggggattcccacgtgggctcct

SEQ ID NO: 4712760 - DNA, 25 bp, Homo sapien
gggactcgccttgtttgctggctgg

SEQ ID NO: 4712761 - DNA, 25 bp, Homo sapien
gactcgccttgtttgctggctggaa

SEQ ID NO: 4712762 - DNA, 25 bp, Homo sapien
tggaagctgtgacaccttggcctgg

SEQ ID NO: 4712763 - DNA, 25 bp, Homo sapien
cttggaagctgtgacaccttggcct

SEQ ID NO: 4712764 - DNA, 25 bp, Homo sapien
attcagaccctgagaccacgggact

SEQ ID NO: 4712765 - DNA, 25 bp, Homo sapien
tccaagcattcagaccctgagacca

SEQ ID NO: 4712766 - DNA, 25 bp, Homo sapien
aagtctcctccaagcattcagaccc

SEQ ID NO: 4712767 - DNA, 25 bp, Homo sapien
tgagaccacgggactcctcaaggat

SEQ ID NO: 4712768 - DNA, 25 bp, Homo sapien
ccgcacacccgagaggtgagccggg

SEQ ID NO: 4712769 - DNA, 25 bp, Homo sapien
cacacccgagaggtgagccgggagc

SEQ ID NO: 4712770 - DNA, 25 bp, Homo sapien
tgccgcacacccgagaggtgagccg

SEQ ID NO: 4712771 - DNA, 25 bp, Homo sapien
ctgccgcacacccgagaggtgagcc

SEQ ID NO: 4712772 - DNA, 25 bp, Homo sapien
tcccttccccaggtgcggcgagaca

SEQ ID NO: 4712773 - DNA, 25 bp, Homo sapien
cgcgctaattgggtcccttccccag

SEQ ID NO: 4712774 - DNA, 25 bp, Homo sapien
ttttcctcaaagagcgcgccggggc

SEQ ID NO: 4712775 - DNA, 25 bp, Homo sapien
gcgagacagcgaggcccttgcttcc

SEQ ID NO: 4712776 - DNA, 25 bp, Homo sapien
cagcgtgcgccgattggtcggcgct

SEQ ID NO: 4712777 - DNA, 25 bp, Homo sapien
tgcgccgattggtcggcgctgagac

SEQ ID NO: 4712778 - DNA, 25 bp, Homo sapien
aggagccgcagcgtgcgccgattgg

SEQ ID NO: 4712779 - DNA, 25 bp, Homo sapien
gagccgcagcgtgcgccgattggtc

SEQ ID NO: 4712780 - DNA, 25 bp, Homo sapien
tcgcagcgcgcccggaactaagggc

SEQ ID NO: 4712781 - DNA, 25 bp, Homo sapien
ccaacggtcgcagcgcgcccggaac

SEQ ID NO: 4712782 - DNA, 25 bp, Homo sapien
cagcgcgcccggaactaagggcccg

SEQ ID NO: 4712783 - DNA, 25 bp, Homo sapien
cggtcgcagcgcgcccggaactaag

SEQ ID NO: 4712784 - DNA, 25 bp, Homo sapien
gcacgcagccggctgagggtgcggg

SEQ ID NO: 4712785 - DNA, 25 bp, Homo sapien
ccggctgagggtgcggggcttcggg

SEQ ID NO: 4712786 - DNA, 25 bp, Homo sapien
agcacgcagccggctgagggtgcgg

SEQ ID NO: 4712787 - DNA, 25 bp, Homo sapien
gcagccggctgagggtgcggggctt

SEQ ID NO: 4712788 - DNA, 25 bp, Homo sapien
ggcgctggcaaactcaggggtcgga

SEQ ID NO: 4712789 - DNA, 25 bp, Homo sapien
cgctggcaaactcaggggtcggagg

SEQ ID NO: 4712790 - DNA, 25 bp, Homo sapien
cccgacccctggctggggggcgctg

SEQ ID NO: 4712791 - DNA, 25 bp, Homo sapien
gggcgctggcaaactcaggggtcgg

SEQ ID NO: 4712792 - DNA, 25 bp, Homo sapien
ttcaggccaggagttcgagaccagc

SEQ ID NO: 4712793 - DNA, 25 bp, Homo sapien
gctgaggttggaggatcacttcagg

SEQ ID NO: 4712794 - DNA, 25 bp, Homo sapien
acttcaggccaggagttcgagacca

SEQ ID NO: 4712795 - DNA, 25 bp, Homo sapien
tgaggttggaggatcacttcaggcc

SEQ ID NO: 4712796 - DNA, 25 bp, Homo sapien
actcacacacgcggtgaccggctga

SEQ ID NO: 4712797 - DNA, 25 bp, Homo sapien
cacacgcggtgaccggctgaacgag

SEQ ID NO: 4712798 - DNA, 25 bp, Homo sapien
ggtgaccggctgaacgagcgtgcgg

SEQ ID NO: 4712799 - DNA, 25 bp, Homo sapien
ctcacacacgcggtgaccggctgaa

SEQ ID NO: 4712800 - DNA, 25 bp, Homo sapien
gacacacagactgagacctggtgcg

SEQ ID NO: 4712801 - DNA, 25 bp, Homo sapien
ctctcagtggcctacacacgaggca

SEQ ID NO: 4712802 - DNA, 25 bp, Homo sapien
acctcctccggcttagactagggag

SEQ ID NO: 4712803 - DNA, 25 bp, Homo sapien
tgtacgtatcataagagacgtgagg

SEQ ID NO: 4712804 - DNA, 25 bp, Homo sapien
gtgaggaaaacgaagcaccactgtg

SEQ ID NO: 4712805 - DNA, 25 bp, Homo sapien
tggcgtgggtcacccggccccagag

SEQ ID NO: 4712806 - DNA, 25 bp, Homo sapien
agtgaggaaaacgaagcaccactgt

SEQ ID NO: 4712807 - DNA, 25 bp, Homo sapien
ccactgtgtgcccgacacggtggcg

SEQ ID NO: 4712808 - DNA, 25 bp, Homo sapien
tccaggcaggctgttaggtcagctc

SEQ ID NO: 4712809 - DNA, 25 bp, Homo sapien
tggcccattccaacatttaaatgac

SEQ ID NO: 4712810 - DNA, 25 bp, Homo sapien
ggccttgctgttctacttgagcctg

SEQ ID NO: 4712811 - DNA, 25 bp, Homo sapien
gacagtagatgctgaccgctctgtg

SEQ ID NO: 4712812 - DNA, 25 bp, Homo sapien
gccagggctagctctaagtatgctc

SEQ ID NO: 4712813 - DNA, 25 bp, Homo sapien
tcatgaggacccgaaacccactgct

SEQ ID NO: 4712814 - DNA, 25 bp, Homo sapien
gaaccagggccggtcatgaggaccc

SEQ ID NO: 4712815 - DNA, 25 bp, Homo sapien
ggcacgtgtcacctgatgctcgcct

SEQ ID NO: 4712816 - DNA, 25 bp, Homo sapien
gtgcactccctttagctaccacggg

SEQ ID NO: 4712817 - DNA, 25 bp, Homo sapien
tagctaccacgggttcccctccagc

SEQ ID NO: 4712818 - DNA, 25 bp, Homo sapien
ggagctggctagtgcactcccttta

SEQ ID NO: 4712819 - DNA, 25 bp, Homo sapien
ctggagctggctagtgcactccctt

SEQ ID NO: 4712820 - DNA, 25 bp, Homo sapien
gtgcactccctttagctaccacggg

SEQ ID NO: 4712821 - DNA, 25 bp, Homo sapien
ggagctggctagtgcactcccttta

SEQ ID NO: 4712822 - DNA, 25 bp, Homo sapien
tagctaccacgggttcccctccagc

SEQ ID NO: 4712823 - DNA, 25 bp, Homo sapien
ctggagctggctagtgcactccctt

SEQ ID NO: 4712824 - DNA, 25 bp, Homo sapien
gagagctgtgacccccgcgaacaaa

SEQ ID NO: 4712825 - DNA, 25 bp, Homo sapien
gagctgtgacccccgcgaacaaagc

SEQ ID NO: 4712826 - DNA, 25 bp, Homo sapien
agagctgtgacccccgcgaacaaag

SEQ ID NO: 4712827 - DNA, 25 bp, Homo sapien
agctgtgacccccgcgaacaaagcc

SEQ ID NO: 4712828 - DNA, 25 bp, Homo sapien
ccagggggggtcacgctagctgcag

SEQ ID NO: 4712829 - DNA, 25 bp, Homo sapien
ggggggtcacgctagctgcagccat

SEQ ID NO: 4712830 - DNA, 25 bp, Homo sapien
caggcggagcacaggtacttggctt

SEQ ID NO: 4712831 - DNA, 25 bp, Homo sapien
ggcctgcggaggacgtttctgcagg

SEQ ID NO: 4712832 - DNA, 25 bp, Homo sapien
gctggccaggcagaaggagcagtac

SEQ ID NO: 4712833 - DNA, 25 bp, Homo sapien
gaggatgctggccaggcagaaggag

SEQ ID NO: 4712834 - DNA, 25 bp, Homo sapien
ctgaggatgctggccaggcagaagg

SEQ ID NO: 4712835 - DNA, 25 bp, Homo sapien
gatgctggccaggcagaaggagcag

SEQ ID NO: 4712836 - DNA, 25 bp, Homo sapien
tatatgccctcgtgaacacaggcag

SEQ ID NO: 4712837 - DNA, 25 bp, Homo sapien
atgccttcttcatatatgccctcgt

SEQ ID NO: 4712838 - DNA, 25 bp, Homo sapien
ttcatatatgccctcgtgaacacag

SEQ ID NO: 4712839 - DNA, 25 bp, Homo sapien
gccttcttcatatatgccctcgtga

SEQ ID NO: 4712840 - DNA, 25 bp, Homo sapien
cactgggacagacggccggcaggct

SEQ ID NO: 4712841 - DNA, 25 bp, Homo sapien
atcactgggacagacggccggcagg

SEQ ID NO: 4712842 - DNA, 25 bp, Homo sapien
cctgcgggcagcattatctgggaag

SEQ ID NO: 4712843 - DNA, 25 bp, Homo sapien
ctccctgcgggcagcattatctggg

SEQ ID NO: 4712844 - DNA, 25 bp, Homo sapien
ggacgactcccgactgctggagctt

SEQ ID NO: 4712845 - DNA, 25 bp, Homo sapien
cccagtgagaggaacgtgcaggaca

SEQ ID NO: 4712846 - DNA, 25 bp, Homo sapien
tctaaggagcagctccgtctcttcc

SEQ ID NO: 4712847 - DNA, 25 bp, Homo sapien
tccacagacatcagacaggcttcag

SEQ ID NO: 4712848 - DNA, 25 bp, Homo sapien
ggaggaaagcacatcttgttcaccc

SEQ ID NO: 4712849 - DNA, 25 bp, Homo sapien
ggaaagcacatcttgttcaccccag

SEQ ID NO: 4712850 - DNA, 25 bp, Homo sapien
gaggaaagcacatcttgttcacccc

SEQ ID NO: 4712851 - DNA, 25 bp, Homo sapien
gaaagcacatcttgttcaccccaga

SEQ ID NO: 4712852 - DNA, 25 bp, Homo sapien
taccgctccgtgtccaggacgcaat

SEQ ID NO: 4712853 - DNA, 25 bp, Homo sapien
ccgtgtccaggacgcaatccccgtg

SEQ ID NO: 4712854 - DNA, 25 bp, Homo sapien
ctaccgctccgtgtccaggacgcaa

SEQ ID NO: 4712855 - DNA, 25 bp, Homo sapien
gctccgtgtccaggacgcaatcccc

SEQ ID NO: 4712856 - DNA, 25 bp, Homo sapien
agtctcactctagggcagtgccctg

SEQ ID NO: 4712857 - DNA, 25 bp, Homo sapien
taggagtctcactctagggcagtgc

SEQ ID NO: 4712858 - DNA, 25 bp, Homo sapien
gtaggagtctcactctagggcagtg

SEQ ID NO: 4712859 - DNA, 25 bp, Homo sapien
ggagtctcactctagggcagtgccc

SEQ ID NO: 4712860 - DNA, 25 bp, Homo sapien
tttgcatcgcacgtcgtggctgagg

SEQ ID NO: 4712861 - DNA, 25 bp, Homo sapien
gaaagctttgcatcgcacgtcgtgg

SEQ ID NO: 4712862 - DNA, 25 bp, Homo sapien
cgtcgtggctgagggcggtctggca

SEQ ID NO: 4712863 - DNA, 25 bp, Homo sapien
agctttgcatcgcacgtcgtggctg

SEQ ID NO: 4712864 - DNA, 25 bp, Homo sapien
tggcatggcgcatagcacccctact

SEQ ID NO: 4712865 - DNA, 25 bp, Homo sapien
tgggcaatgaccaagctgcatctct

SEQ ID NO: 4712866 - DNA, 25 bp, Homo sapien
gacactcctcagtcctctcaaaggg

SEQ ID NO: 4712867 - DNA, 25 bp, Homo sapien
cacagccgtttgtgcggcagagcca

SEQ ID NO: 4712868 - DNA, 25 bp, Homo sapien
gacacaaggcgatgtagcgctggct

SEQ ID NO: 4712869 - DNA, 25 bp, Homo sapien
cacaaggcgatgtagcgctggcttg

SEQ ID NO: 4712870 - DNA, 25 bp, Homo sapien
gggacacaaggcgatgtagcgctgg

SEQ ID NO: 4712871 - DNA, 25 bp, Homo sapien
ccggggacacaaggcgatgtagcgc

SEQ ID NO: 4712872 - DNA, 25 bp, Homo sapien
ttcaccaaggcggaccaggcctttg

SEQ ID NO: 4712873 - DNA, 25 bp, Homo sapien
tccgggcactcgtgctccaggtggc

SEQ ID NO: 4712874 - DNA, 25 bp, Homo sapien
gacattcggtcagcatgagcgggca

SEQ ID NO: 4712875 - DNA, 25 bp, Homo sapien
tccaggtggcgctccttttcaccaa

SEQ ID NO: 4712876 - DNA, 25 bp, Homo sapien
agtcagacttgagcaactgtcttga

SEQ ID NO: 4712877 - DNA, 25 bp, Homo sapien
gcgaagtcagacttgagcaactgtc

SEQ ID NO: 4712878 - DNA, 25 bp, Homo sapien
caacgctttggggaaggcgaagtca

SEQ ID NO: 4712879 - DNA, 25 bp, Homo sapien
ggaaggcgaagtcagacttgagcaa

SEQ ID NO: 4712880 - DNA, 25 bp, Homo sapien
cccgggggatcttcttcttgccgca

SEQ ID NO: 4712881 - DNA, 25 bp, Homo sapien
tgccgcagccgtcacaagttaaggg

SEQ ID NO: 4712882 - DNA, 25 bp, Homo sapien
tcttcttgccgcagccgtcacaagt

SEQ ID NO: 4712883 - DNA, 25 bp, Homo sapien
acttggggcagacctcgtggtgcgc

SEQ ID NO: 4712884 - DNA, 25 bp, Homo sapien
cccgccctgcggtcctccaaggagg

SEQ ID NO: 4712885 - DNA, 25 bp, Homo sapien
ccctcacgtccaacacatgggcccc

SEQ ID NO: 4712886 - DNA, 25 bp, Homo sapien
acgtccaacacatgggccccgccct

SEQ ID NO: 4712887 - DNA, 25 bp, Homo sapien
atgggccccgccctgcggtcctcca

SEQ ID NO: 4712888 - DNA, 25 bp, Homo sapien
tccatgacccaacgttacaggggct

SEQ ID NO: 4712889 - DNA, 25 bp, Homo sapien
catccatgacccaacgttacagggg

SEQ ID NO: 4712890 - DNA, 25 bp, Homo sapien
cgcatccatgacccaacgttacagg

SEQ ID NO: 4712891 - DNA, 25 bp, Homo sapien
gcatccatgacccaacgttacaggg

SEQ ID NO: 4712892 - DNA, 25 bp, Homo sapien
aagagggctcgggactcagccacct

SEQ ID NO: 4712893 - DNA, 25 bp, Homo sapien
gaagagggctcgggactcagccacc

SEQ ID NO: 4712894 - DNA, 25 bp, Homo sapien
gcccccggcccactcaggagagcgg

SEQ ID NO: 4712895 - DNA, 25 bp, Homo sapien
ccggcccactcaggagagcggccgc

SEQ ID NO: 4712896 - DNA, 25 bp, Homo sapien
tcataagatgtacttccaagaacaa

SEQ ID NO: 4712897 - DNA, 25 bp, Homo sapien
taagatgtacttccaagaacaaaaa

SEQ ID NO: 4712898 - DNA, 25 bp, Homo sapien
aaagagcttcgaagaaacaggtggc

SEQ ID NO: 4712899 - DNA, 25 bp, Homo sapien
gaacaaaaagagcttcgaagaaaca

SEQ ID NO: 4712900 - DNA, 25 bp, Homo sapien
caataaaaaatgtccgcgcgtgttc

SEQ ID NO: 4712901 - DNA, 25 bp, Homo sapien
gcaaatttctgaacgaccgcacggc

SEQ ID NO: 4712902 - DNA, 25 bp, Homo sapien
gacggtgctcccacaatgcttatgg

SEQ ID NO: 4712903 - DNA, 25 bp, Homo sapien
caacctacggttggctggatccacg

SEQ ID NO: 4712904 - DNA, 25 bp, Homo sapien
cagagactaacactgtggtatctga

SEQ ID NO: 4712905 - DNA, 25 bp, Homo sapien
atacaacaggaacatcgaaccaggg

SEQ ID NO: 4712906 - DNA, 25 bp, Homo sapien
aacatcgaaccagggaagaaacaga

SEQ ID NO: 4712907 - DNA, 25 bp, Homo sapien
taacactgtggtatctgacatgggt

SEQ ID NO: 4712908 - DNA, 25 bp, Homo sapien
gcaagggactcgacacttgccacaa

SEQ ID NO: 4712909 - DNA, 25 bp, Homo sapien
tggaatctgcaagggactcgacact

SEQ ID NO: 4712910 - DNA, 25 bp, Homo sapien
cagccgatggcgtggaatctgcaag

SEQ ID NO: 4712911 - DNA, 25 bp, Homo sapien
cacttgccacaagtcttgacgtggt

SEQ ID NO: 4712912 - DNA, 25 bp, Homo sapien
ggatgaggggtggcccccaacctca

SEQ ID NO: 4712913 - DNA, 25 bp, Homo sapien
caggatgaggggtggcccccaacct

SEQ ID NO: 4712914 - DNA, 25 bp, Homo sapien
tcctcgagggtcctgacctcaaggg

SEQ ID NO: 4712915 - DNA, 25 bp, Homo sapien
cagtactcctcgagggtcctgacct

SEQ ID NO: 4712916 - DNA, 25 bp, Homo sapien
tactcctcgagggtcctgacctcaa

SEQ ID NO: 4712917 - DNA, 25 bp, Homo sapien
agtactcctcgagggtcctgacctc

SEQ ID NO: 4712918 - DNA, 25 bp, Homo sapien
aaaagctactcatgactgggcatgg

SEQ ID NO: 4712919 - DNA, 25 bp, Homo sapien
aaaaagctactcatgactgggcatg

SEQ ID NO: 4712920 - DNA, 25 bp, Homo sapien
actgcatccctgcctggctgacaca

SEQ ID NO: 4712921 - DNA, 25 bp, Homo sapien
tgcatccctgcctggctgacacagc

SEQ ID NO: 4712922 - DNA, 25 bp, Homo sapien
tcataccactgcatccctgcctggc

SEQ ID NO: 4712923 - DNA, 25 bp, Homo sapien
tccctgcctggctgacacagcaaaa

SEQ ID NO: 4712924 - DNA, 25 bp, Homo sapien
atccaccattcggctcccacccggg

SEQ ID NO: 4712925 - DNA, 25 bp, Homo sapien
gaccccgcgtggctctggtctccca

SEQ ID NO: 4712926 - DNA, 25 bp, Homo sapien
cccgcgtggctctggtctcccaaga

SEQ ID NO: 4712927 - DNA, 25 bp, Homo sapien
accccgcgtggctctggtctcccaa

SEQ ID NO: 4712928 - DNA, 25 bp, Homo sapien
cgcgtggctctggtctcccaagagg

SEQ ID NO: 4712929 - DNA, 25 bp, Homo sapien
gacgcagacaatgttctcaaaagtg

SEQ ID NO: 4712930 - DNA, 25 bp, Homo sapien
aaagtggccgtcttcttctccaggc

SEQ ID NO: 4712931 - DNA, 25 bp, Homo sapien
tgcaggcctcggcagtcatggccac

SEQ ID NO: 4712932 - DNA, 25 bp, Homo sapien
acctcccggttcaggacgcagacaa

SEQ ID NO: 4712933 - DNA, 25 bp, Homo sapien
tcagggcttcaatcttgtcttggtc

SEQ ID NO: 4712934 - DNA, 25 bp, Homo sapien
ctcagggcttcaatcttgtcttggt

SEQ ID NO: 4712935 - DNA, 25 bp, Homo sapien
actcagggcttcaatcttgtcttgg

SEQ ID NO: 4712936 - DNA, 25 bp, Homo sapien
tactcagggcttcaatcttgtcttg

SEQ ID NO: 4712937 - DNA, 25 bp, Homo sapien
gaccccatcgtaggtggatgcctcc

SEQ ID NO: 4712938 - DNA, 25 bp, Homo sapien
agcttcctggcgcttcctggcgaag

SEQ ID NO: 4712939 - DNA, 25 bp, Homo sapien
gaagtctgagatcttccagatgaag

SEQ ID NO: 4712940 - DNA, 25 bp, Homo sapien
gggtatgcggccagccacagcttcc

SEQ ID NO: 4712941 - DNA, 25 bp, Homo sapien
tgacccttcacccaacgcttagtgc

SEQ ID NO: 4712942 - DNA, 25 bp, Homo sapien
cgtggcagggcctccacaatgctga

SEQ ID NO: 4712943 - DNA, 25 bp, Homo sapien
ccaacgcttagtgcagagctcccag

SEQ ID NO: 4712944 - DNA, 25 bp, Homo sapien
ccaagaagaccacctccgtggcagg

SEQ ID NO: 4712945 - DNA, 25 bp, Homo sapien
cgtcctagtcctccaccacatgccc

SEQ ID NO: 4712946 - DNA, 25 bp, Homo sapien
tcctagtcctccaccacatgcccag

SEQ ID NO: 4712947 - DNA, 25 bp, Homo sapien
tcctctccacctcgtgcccccaggc

SEQ ID NO: 4712948 - DNA, 25 bp, Homo sapien
ccccgtcctagtcctccaccacatg

SEQ ID NO: 4712949 - DNA, 25 bp, Homo sapien
gagccacatggcgagatccactaaa

SEQ ID NO: 4712950 - DNA, 25 bp, Homo sapien
taaatgcagtggttgggacctcggc

SEQ ID NO: 4712951 - DNA, 25 bp, Homo sapien
gcatttctaagaatcccaaatgtaa

SEQ ID NO: 4712952 - DNA, 25 bp, Homo sapien
gagattacagacgctcgacaccaca

SEQ ID NO: 4712953 - DNA, 25 bp, Homo sapien
ttgtagccgtacctgctggtgtaga

SEQ ID NO: 4712954 - DNA, 25 bp, Homo sapien
cttgtagccgtacctgctggtgtag

SEQ ID NO: 4712955 - DNA, 25 bp, Homo sapien
tgccgtcgccgttcaggtagatacg

SEQ ID NO: 4712956 - DNA, 25 bp, Homo sapien
cagggcgtcattcgggcccttcatc

SEQ ID NO: 4712957 - DNA, 25 bp, Homo sapien
cttctggttgaagggccaccgcagc

SEQ ID NO: 4712958 - DNA, 25 bp, Homo sapien
agagggacaggtgtgttcctcgccc

SEQ ID NO: 4712959 - DNA, 25 bp, Homo sapien
atgaagtcacgtcgggcctgaaggc

SEQ ID NO: 4712960 - DNA, 25 bp, Homo sapien
gcctgaaggcgtcaatcacgtgctc

SEQ ID NO: 4712961 - DNA, 25 bp, Homo sapien
tctggtcgagcagcattaaggtcac

SEQ ID NO: 4712962 - DNA, 25 bp, Homo sapien
tgatgaagatggcatcgtcccgcac

SEQ ID NO: 4712963 - DNA, 25 bp, Homo sapien
cagtgaacttggctgcaggccgaca

SEQ ID NO: 4712964 - DNA, 25 bp, Homo sapien
gaacttggctgcaggccgacaccct

SEQ ID NO: 4712965 - DNA, 25 bp, Homo sapien
tcccaagcgcccaagcgcggcccct

SEQ ID NO: 4712966 - DNA, 25 bp, Homo sapien
ctgcccacttgtacagtgagaccct

SEQ ID NO: 4712967 - DNA, 25 bp, Homo sapien
gcagcttgtgctgggaagcacccga

SEQ ID NO: 4712968 - DNA, 25 bp, Homo sapien
ttctgcctgtcatgcccgagggaca

SEQ ID NO: 4712969 - DNA, 25 bp, Homo sapien
gggatgtgctcccactctgagtgtc

SEQ ID NO: 4712970 - DNA, 25 bp, Homo sapien
ttcactgcacaggacagcaagggca

SEQ ID NO: 4712971 - DNA, 25 bp, Homo sapien
gaatggtttaataactctgtcttcg

SEQ ID NO: 4712972 - DNA, 25 bp, Homo sapien
tcccacacagtggtctgagcagagg

SEQ ID NO: 4712973 - DNA, 25 bp, Homo sapien
tgtcttcgtgagctggatggcaagc

SEQ ID NO: 4712974 - DNA, 25 bp, Homo sapien
ggcaagctctcacactttacccgca

SEQ ID NO: 4712975 - DNA, 25 bp, Homo sapien
taccaaccagcagaataagacccag

SEQ ID NO: 4712976 - DNA, 25 bp, Homo sapien
cagccagtgcctagggaattgttcc

SEQ ID NO: 4712977 - DNA, 25 bp, Homo sapien
aattccaacaacacgaagcacgggc

SEQ ID NO: 4712978 - DNA, 25 bp, Homo sapien
gacatcaacaggcaattcgcacggg

SEQ ID NO: 4712979 - DNA, 25 bp, Homo sapien
gatgtgtagacttaacgcaattcca

SEQ ID NO: 4712980 - DNA, 25 bp, Homo sapien
catggattgtctgactcaacacaga

SEQ ID NO: 4712981 - DNA, 25 bp, Homo sapien
gagaccctgtctccggctgggtgca

SEQ ID NO: 4712982 - DNA, 25 bp, Homo sapien
caaagtaagctgtgggataggaagc

SEQ ID NO: 4712983 - DNA, 25 bp, Homo sapien
caaaaatccccgtgggtaacatgat

SEQ ID NO: 4712984 - DNA, 25 bp, Homo sapien
aacccagccattgaaaaacatcttg

SEQ ID NO: 4712985 - DNA, 25 bp, Homo sapien
aaccctagaagcaaactagaagtag

SEQ ID NO: 4712986 - DNA, 25 bp, Homo sapien
aacttgctcaacctgataaaacagc

SEQ ID NO: 4712987 - DNA, 25 bp, Homo sapien
gatggtcattcctccagtttctgac

SEQ ID NO: 4712988 - DNA, 25 bp, Homo sapien
caccctttacactccatgaatggca

SEQ ID NO: 4712989 - DNA, 25 bp, Homo sapien
gatatcccagttccttccacaaagg

SEQ ID NO: 4712990 - DNA, 25 bp, Homo sapien
aggactgggcatggacaccgttcag

SEQ ID NO: 4712991 - DNA, 25 bp, Homo sapien
gaagtcccagagtaaggtgccagcg

SEQ ID NO: 4712992 - DNA, 25 bp, Homo sapien
gagagggccaagctcatcttattat

SEQ ID NO: 4712993 - DNA, 25 bp, Homo sapien
gtctcgtctaaatcaaacatgggtg

SEQ ID NO: 4712994 - DNA, 25 bp, Homo sapien
ttcaaaccgtagcattccatccctg

SEQ ID NO: 4712995 - DNA, 25 bp, Homo sapien
gatgaacattatgccatggccccag

SEQ ID NO: 4712996 - DNA, 25 bp, Homo sapien
tggccccaggtagatgcaccctgaa

SEQ ID NO: 4712997 - DNA, 25 bp, Homo sapien
caaccaaacgccaggcttgggagga

SEQ ID NO: 4712998 - DNA, 25 bp, Homo sapien
aaggaccattcataccaagattagg

SEQ ID NO: 4712999 - DNA, 25 bp, Homo sapien
cgcctgggcagaatgtcacgatgga

SEQ ID NO: 4713000 - DNA, 25 bp, Homo sapien
tgtgccgccaatggcaggccgtgtc

SEQ ID NO: 4713001 - DNA, 25 bp, Homo sapien
ggtctaccagatcttcctgagcctg

SEQ ID NO: 4713002 - DNA, 25 bp, Homo sapien
tgagggcagccgttggtgggtttca

SEQ ID NO: 4713003 - DNA, 25 bp, Homo sapien
agggtggcaggactgtgggaggcca

SEQ ID NO: 4713004 - DNA, 25 bp, Homo sapien
gggaggccaagggtagcaccaccaa

SEQ ID NO: 4713005 - DNA, 25 bp, Homo sapien
tgtgggaggccaagggtagcaccac

SEQ ID NO: 4713006 - DNA, 25 bp, Homo sapien
ggaggccaagggtagcaccaccaag

SEQ ID NO: 4713007 - DNA, 25 bp, Homo sapien
cccagcgagccagctgccaggagca

SEQ ID NO: 4713008 - DNA, 25 bp, Homo sapien
ccaggagcagagtcaagagggtcgc

SEQ ID NO: 4713009 - DNA, 25 bp, Homo sapien
tctggcccagcgagccagctgccag

SEQ ID NO: 4713010 - DNA, 25 bp, Homo sapien
agagtcaagagggtcgcagtcccag

SEQ ID NO: 4713011 - DNA, 25 bp, Homo sapien
ctgcaggaaacggcaagcggagccc

SEQ ID NO: 4713012 - DNA, 25 bp, Homo sapien
aggaaacggcaagcggagcccacag

SEQ ID NO: 4713013 - DNA, 25 bp, Homo sapien
aaacggcaagcggagcccacagcca

SEQ ID NO: 4713014 - DNA, 25 bp, Homo sapien
gcaggaaacggcaagcggagcccac

SEQ ID NO: 4713015 - DNA, 25 bp, Homo sapien
ttcggaaggtactgacagccatggc

SEQ ID NO: 4713016 - DNA, 25 bp, Homo sapien
ctttcggaaggtactgacagccatg

SEQ ID NO: 4713017 - DNA, 25 bp, Homo sapien
agtgtggtggcctcggcccggtggc

SEQ ID NO: 4713018 - DNA, 25 bp, Homo sapien
agctttcggaaggtactgacagcca

SEQ ID NO: 4713019 - DNA, 25 bp, Homo sapien
gcggggaggaggcaccacaggctgg

SEQ ID NO: 4713020 - DNA, 25 bp, Homo sapien
cacaggctgggagaccccaaccagg

SEQ ID NO: 4713021 - DNA, 25 bp, Homo sapien
gggcggggaggaggcaccacaggct

SEQ ID NO: 4713022 - DNA, 25 bp, Homo sapien
gagaccccaaccaggaatcctagtc

SEQ ID NO: 4713023 - DNA, 25 bp, Homo sapien
aagcggccgaggacccctgtgtctc

SEQ ID NO: 4713024 - DNA, 25 bp, Homo sapien
aagcaggaagcggccgaggacccct

SEQ ID NO: 4713025 - DNA, 25 bp, Homo sapien
ctccatagagctggcgcacctgcca

SEQ ID NO: 4713026 - DNA, 25 bp, Homo sapien
tggcgcacctgccagcagatcccat

SEQ ID NO: 4713027 - DNA, 25 bp, Homo sapien
catgtcagagagccacagtggctgc

SEQ ID NO: 4713028 - DNA, 25 bp, Homo sapien
ccatgtcagagagccacagtggctg

SEQ ID NO: 4713029 - DNA, 25 bp, Homo sapien
gccatgtcagagagccacagtggct

SEQ ID NO: 4713030 - DNA, 25 bp, Homo sapien
tagccatgtcagagagccacagtgg

SEQ ID NO: 4713031 - DNA, 25 bp, Homo sapien
gtctcagcgacaaccacgtgcacag

SEQ ID NO: 4713032 - DNA, 25 bp, Homo sapien
gaaactctggtagtcggtctcagcg

SEQ ID NO: 4713033 - DNA, 25 bp, Homo sapien
cccgctccaggtacaggacagcgaa

SEQ ID NO: 4713034 - DNA, 25 bp, Homo sapien
tacaggacagcgaaactctggtagt

SEQ ID NO: 4713035 - DNA, 25 bp, Homo sapien
agcgcctgcctggtcacagaggctg

SEQ ID NO: 4713036 - DNA, 25 bp, Homo sapien
agcttgagcgcctgcctggtcacag

SEQ ID NO: 4713037 - DNA, 25 bp, Homo sapien
tgcagagcttgagcgcctgcctggt

SEQ ID NO: 4713038 - DNA, 25 bp, Homo sapien
agtgtgcagagcttgagcgcctgcc

SEQ ID NO: 4713039 - DNA, 25 bp, Homo sapien
tcccacaccaggcctgtctgtcact

SEQ ID NO: 4713040 - DNA, 25 bp, Homo sapien
gctcccacaccaggcctgtctgtca

SEQ ID NO: 4713041 - DNA, 25 bp, Homo sapien
tctggaaacggggtctgtgtgtccc

SEQ ID NO: 4713042 - DNA, 25 bp, Homo sapien
gctctggaaacggggtctgtgtgtc

SEQ ID NO: 4713043 - DNA, 25 bp, Homo sapien
cagggcagacagggttcctggggtc

SEQ ID NO: 4713044 - DNA, 25 bp, Homo sapien
ctgcagggcagacagggttcctggg

SEQ ID NO: 4713045 - DNA, 25 bp, Homo sapien
tgcagggcagacagggttcctgggg

SEQ ID NO: 4713046 - DNA, 25 bp, Homo sapien
gcagggcagacagggttcctggggt

SEQ ID NO: 4713047 - DNA, 25 bp, Homo sapien
tggtcctcagtcaggtgggcctcct

SEQ ID NO: 4713048 - DNA, 25 bp, Homo sapien
accgagtcgctcacagggagcgagc

SEQ ID NO: 4713049 - DNA, 25 bp, Homo sapien
tggggaagtagaagatctggtcctc

SEQ ID NO: 4713050 - DNA, 25 bp, Homo sapien
tgctcaaacccactcaggaccgagt

SEQ ID NO: 4713051 - DNA, 25 bp, Homo sapien
ctggggacctgctggggacactcac

SEQ ID NO: 4713052 - DNA, 25 bp, Homo sapien
agctggggacctgctggggacactc

SEQ ID NO: 4713053 - DNA, 25 bp, Homo sapien
ctgagctggggacctgctggggaca

SEQ ID NO: 4713054 - DNA, 25 bp, Homo sapien
ggggtggctgagctggggacctgct

SEQ ID NO: 4713055 - DNA, 25 bp, Homo sapien
cgtccaggacgtggaactggtctgc

SEQ ID NO: 4713056 - DNA, 25 bp, Homo sapien
gagactcagccggtggcagtggccc

SEQ ID NO: 4713057 - DNA, 25 bp, Homo sapien
gcagcagagacgagactcagccggt

SEQ ID NO: 4713058 - DNA, 25 bp, Homo sapien
tcaccacgccgccatgcttgccccg

SEQ ID NO: 4713059 - DNA, 25 bp, Homo sapien
gccgccatgcttgccccgctgtgca

SEQ ID NO: 4713060 - DNA, 25 bp, Homo sapien
acaggcagcgggcaccccactggtg

SEQ ID NO: 4713061 - DNA, 25 bp, Homo sapien
ggtctgagacatttaataagtaggt

SEQ ID NO: 4713062 - DNA, 25 bp, Homo sapien
tggggcagccggcagaagatcccct

SEQ ID NO: 4713063 - DNA, 25 bp, Homo sapien
aagtaggtaccactccacccactgt

SEQ ID NO: 4713064 - DNA, 25 bp, Homo sapien
cttcccactctccgggcaaagacct

SEQ ID NO: 4713065 - DNA, 25 bp, Homo sapien
ctcttcccactctccgggcaaagac

SEQ ID NO: 4713066 - DNA, 25 bp, Homo sapien
tcccggcctgtcctctgctcaccct

SEQ ID NO: 4713067 - DNA, 25 bp, Homo sapien
tctcttcccactctccgggcaaaga

SEQ ID NO: 4713068 - DNA, 25 bp, Homo sapien
ccagcctgggcaagactgagatctc

SEQ ID NO: 4713069 - DNA, 25 bp, Homo sapien
ctccagcctgggcaagactgagatc

SEQ ID NO: 4713070 - DNA, 25 bp, Homo sapien
actccagcctgggcaagactgagat

SEQ ID NO: 4713071 - DNA, 25 bp, Homo sapien
agcctgggcaagactgagatctcat

SEQ ID NO: 4713072 - DNA, 25 bp, Homo sapien
tggaggtggcccgagcaggcgagga

SEQ ID NO: 4713073 - DNA, 25 bp, Homo sapien
cctgtggccatgaggccggggtgga

SEQ ID NO: 4713074 - DNA, 25 bp, Homo sapien
tggggcctgcagagcacccaggcaa

SEQ ID NO: 4713075 - DNA, 25 bp, Homo sapien
tggagcaagaacaggaccagggagg

SEQ ID NO: 4713076 - DNA, 25 bp, Homo sapien
atgcctgaaccgcagcgtgggccgt

SEQ ID NO: 4713077 - DNA, 25 bp, Homo sapien
tccttggaagctctgcatcgggggc

SEQ ID NO: 4713078 - DNA, 25 bp, Homo sapien
tttccttggaagctctgcatcgggg

SEQ ID NO: 4713079 - DNA, 25 bp, Homo sapien
caggactttcagcaaggagagccac

SEQ ID NO: 4713080 - DNA, 25 bp, Homo sapien
ggactttcagcaaggagagccacag

SEQ ID NO: 4713081 - DNA, 25 bp, Homo sapien
cgccagggacactggcaagaaccag

SEQ ID NO: 4713082 - DNA, 25 bp, Homo sapien
gcaagaaccagagcctactctgggt

SEQ ID NO: 4713083 - DNA, 25 bp, Homo sapien
ccagggacactggcaagaaccagag

SEQ ID NO: 4713084 - DNA, 25 bp, Homo sapien
ggcaagaaccagagcctactctggg

SEQ ID NO: 4713085 - DNA, 25 bp, Homo sapien
tcatcacttagctcaaaagttgcgg

SEQ ID NO: 4713086 - DNA, 25 bp, Homo sapien
tgcggtgaaagcgttcagcagcgcc

SEQ ID NO: 4713087 - DNA, 25 bp, Homo sapien
tgtgctccggcctgaagctgttgcc

SEQ ID NO: 4713088 - DNA, 25 bp, Homo sapien
tcaaagcggccatcatcacttagct

SEQ ID NO: 4713089 - DNA, 25 bp, Homo sapien
cgggatcctcctcacccgcttggaa

SEQ ID NO: 4713090 - DNA, 25 bp, Homo sapien
acttttttgtatactccccagctgg

SEQ ID NO: 4713091 - DNA, 25 bp, Homo sapien
ctcacccgcttggaacggcagggac

SEQ ID NO: 4713092 - DNA, 25 bp, Homo sapien
gacagggcccatggcgcacctgagc

SEQ ID NO: 4713093 - DNA, 25 bp, Homo sapien
agtgctaggattacaggtgtgcgcg

SEQ ID NO: 4713094 - DNA, 25 bp, Homo sapien
cgcgcccggcccccaaagtgctagg

SEQ ID NO: 4713095 - DNA, 25 bp, Homo sapien
tgctaggattacaggtgtgcgcgac

SEQ ID NO: 4713096 - DNA, 25 bp, Homo sapien
aaagtgctaggattacaggtgtgcg

SEQ ID NO: 4713097 - DNA, 25 bp, Homo sapien
ctgcgcccggcccctaaagtgctgg

SEQ ID NO: 4713098 - DNA, 25 bp, Homo sapien
actgcgcccggcccctaaagtgctg

SEQ ID NO: 4713099 - DNA, 25 bp, Homo sapien
tcagccacttattcagagggaccca

SEQ ID NO: 4713100 - DNA, 25 bp, Homo sapien
cgggagtggccaagcgtcatgagtg

SEQ ID NO: 4713101 - DNA, 25 bp, Homo sapien
tcatgagtggagatggtgtctaact

SEQ ID NO: 4713102 - DNA, 25 bp, Homo sapien
caggtccatgctgaggtgggcccct

SEQ ID NO: 4713103 - DNA, 25 bp, Homo sapien
gggctgccggtatcagcacataaga

SEQ ID NO: 4713104 - DNA, 25 bp, Homo sapien
gccggtatcagcacataagaccatg

SEQ ID NO: 4713105 - DNA, 25 bp, Homo sapien
cagcacataagaccatgtgtcacag

SEQ ID NO: 4713106 - DNA, 25 bp, Homo sapien
ccacaccgtggtccacagtgaactg

SEQ ID NO: 4713107 - DNA, 25 bp, Homo sapien
acagcatcagggcgaactgggtgta

SEQ ID NO: 4713108 - DNA, 25 bp, Homo sapien
gcgaactgggtgtagtcgctgtcca

SEQ ID NO: 4713109 - DNA, 25 bp, Homo sapien
aactgggtgtagtcgctgtccacca

SEQ ID NO: 4713110 - DNA, 25 bp, Homo sapien
tgtagtcgctgtccaccacccgggt

SEQ ID NO: 4713111 - DNA, 25 bp, Homo sapien
gctgatcctgaggacggccagcctg

SEQ ID NO: 4713112 - DNA, 25 bp, Homo sapien
tcctgaggacggccagcctgctcgt

SEQ ID NO: 4713113 - DNA, 25 bp, Homo sapien
gcaggctgatcctgaggacggccag

SEQ ID NO: 4713114 - DNA, 25 bp, Homo sapien
atcctgaggacggccagcctgctcg

SEQ ID NO: 4713115 - DNA, 25 bp, Homo sapien
tcacatctgggaagacgatgttgtc

SEQ ID NO: 4713116 - DNA, 25 bp, Homo sapien
cgatgttgtcatccgagaggccctg

SEQ ID NO: 4713117 - DNA, 25 bp, Homo sapien
cagcgtcccgggaggcagcaaccag

SEQ ID NO: 4713118 - DNA, 25 bp, Homo sapien
gaagacgatgttgtcatccgagagg

SEQ ID NO: 4713119 - DNA, 25 bp, Homo sapien
gcatgcctgcaggtgaaccatgtta

SEQ ID NO: 4713120 - DNA, 25 bp, Homo sapien
ccagcatgcctgcaggtgaaccatg

SEQ ID NO: 4713121 - DNA, 25 bp, Homo sapien
tgcccagcatgcctgcaggtgaacc

SEQ ID NO: 4713122 - DNA, 25 bp, Homo sapien
cagcatgcctgcaggtgaaccatgt

SEQ ID NO: 4713123 - DNA, 25 bp, Homo sapien
cctgggtagacactgggtccagctc

SEQ ID NO: 4713124 - DNA, 25 bp, Homo sapien
gctgagctccctgggtagacactgg

SEQ ID NO: 4713125 - DNA, 25 bp, Homo sapien
agctcctctagggtcaaccaaactc

SEQ ID NO: 4713126 - DNA, 25 bp, Homo sapien
ggtcaaccaaactcattcctgcggg

SEQ ID NO: 4713127 - DNA, 25 bp, Homo sapien
ggctggggctgccacccagggcagg

SEQ ID NO: 4713128 - DNA, 25 bp, Homo sapien
agggcaggctgctgaggtccagggc

SEQ ID NO: 4713129 - DNA, 25 bp, Homo sapien
caggctgctgaggtccagggcacct

SEQ ID NO: 4713130 - DNA, 25 bp, Homo sapien
acccagggcaggctgctgaggtcca

SEQ ID NO: 4713131 - DNA, 25 bp, Homo sapien
ccttgggggccgcggctgtctgagt

SEQ ID NO: 4713132 - DNA, 25 bp, Homo sapien
tcgccctcccacaagaagagtcagg

SEQ ID NO: 4713133 - DNA, 25 bp, Homo sapien
cccacaagaagagtcaggccttggg

SEQ ID NO: 4713134 - DNA, 25 bp, Homo sapien
cctcccacaagaagagtcaggcctt

SEQ ID NO: 4713135 - DNA, 25 bp, Homo sapien
cacgggtagacagcatgtgtgccag

SEQ ID NO: 4713136 - DNA, 25 bp, Homo sapien
tatgcacatgtaaaggaccagaggc

SEQ ID NO: 4713137 - DNA, 25 bp, Homo sapien
gccagtctgtacacgtttgctcatg

SEQ ID NO: 4713138 - DNA, 25 bp, Homo sapien
aatcagaagggcacggtgggcatcc

SEQ ID NO: 4713139 - DNA, 25 bp, Homo sapien
ctgtccccatgggcccccagactca

SEQ ID NO: 4713140 - DNA, 25 bp, Homo sapien
ccctgtccccatgggcccccagact

SEQ ID NO: 4713141 - DNA, 25 bp, Homo sapien
tgtccctgtccccatgggcccccag

SEQ ID NO: 4713142 - DNA, 25 bp, Homo sapien
ctgtccctgtccccatgggccccca

SEQ ID NO: 4713143 - DNA, 25 bp, Homo sapien
gggcacaaaggaggggcaggtggct

SEQ ID NO: 4713144 - DNA, 25 bp, Homo sapien
gatggagtcgggatggaggacaaag

SEQ ID NO: 4713145 - DNA, 25 bp, Homo sapien
gcagtgggtctaggggaaggggctg

SEQ ID NO: 4713146 - DNA, 25 bp, Homo sapien
gagatggagtcgggatggaggacaa

SEQ ID NO: 4713147 - DNA, 25 bp, Homo sapien
gagctcgcacagctgtgaggcaggg

SEQ ID NO: 4713148 - DNA, 25 bp, Homo sapien
tctgggcttggtgcatttattcagg

SEQ ID NO: 4713149 - DNA, 25 bp, Homo sapien
tttattcaggtttgagagctgagga

SEQ ID NO: 4713150 - DNA, 25 bp, Homo sapien
tgggccggacaggagctgcttcatc

SEQ ID NO: 4713151 - DNA, 25 bp, Homo sapien
gggccatagtgtgcccagagaagga

SEQ ID NO: 4713152 - DNA, 25 bp, Homo sapien
gtcagcggtcgccttgctcctgtct

SEQ ID NO: 4713153 - DNA, 25 bp, Homo sapien
tgcccaacccaaggtcatagtggtc

SEQ ID NO: 4713154 - DNA, 25 bp, Homo sapien
acactggccagagacagccggctgg

SEQ ID NO: 4713155 - DNA, 25 bp, Homo sapien
gtctctgtccgtcttccagttccag

SEQ ID NO: 4713156 - DNA, 25 bp, Homo sapien
tctgtccgtcttccagttccagaat

SEQ ID NO: 4713157 - DNA, 25 bp, Homo sapien
tctctgtccgtcttccagttccaga

SEQ ID NO: 4713158 - DNA, 25 bp, Homo sapien
tgtctctgtccgtcttccagttcca

SEQ ID NO: 4713159 - DNA, 25 bp, Homo sapien
tgcttcccaaccccgctgaccctgt

SEQ ID NO: 4713160 - DNA, 25 bp, Homo sapien
ctgcttcccaaccccgctgaccctg

SEQ ID NO: 4713161 - DNA, 25 bp, Homo sapien
tctcctgtggtcaccgtcgcaggca

SEQ ID NO: 4713162 - DNA, 25 bp, Homo sapien
gtggcctgtctgtggtcaccgtcac

SEQ ID NO: 4713163 - DNA, 25 bp, Homo sapien
gcctgtctgtggtcaccgtcactgt

SEQ ID NO: 4713164 - DNA, 25 bp, Homo sapien
ggtcaccgtcgcaggcacaggctct

SEQ ID NO: 4713165 - DNA, 25 bp, Homo sapien
ggatgcctggtccaccaacacagct

SEQ ID NO: 4713166 - DNA, 25 bp, Homo sapien
agtcagtgcccagcggcctcgtgct

SEQ ID NO: 4713167 - DNA, 25 bp, Homo sapien
gggatgcctggtccaccaacacagc

SEQ ID NO: 4713168 - DNA, 25 bp, Homo sapien
acacagctctgagctccatagtcag

SEQ ID NO: 4713169 - DNA, 25 bp, Homo sapien
gcagggagctacagcctaggtttcc

SEQ ID NO: 4713170 - DNA, 25 bp, Homo sapien
tttccatgtcgagccagaggaggtc

SEQ ID NO: 4713171 - DNA, 25 bp, Homo sapien
gtttcttgcaaacatccagtcatgg

SEQ ID NO: 4713172 - DNA, 25 bp, Homo sapien
ttcctctgccgagcagggagtggca

SEQ ID NO: 4713173 - DNA, 25 bp, Homo sapien
tctctccaggacaccacgtgacatt

SEQ ID NO: 4713174 - DNA, 25 bp, Homo sapien
ccagtgttgggacgtcgagtcagct

SEQ ID NO: 4713175 - DNA, 25 bp, Homo sapien
acagatcagggagttcctgcgtgcc

SEQ ID NO: 4713176 - DNA, 25 bp, Homo sapien
cgctggcgtcctaattctcatggtc

SEQ ID NO: 4713177 - DNA, 25 bp, Homo sapien
aataggaagatccaagtcaaaagct

SEQ ID NO: 4713178 - DNA, 25 bp, Homo sapien
gatgtaataggaagatccaagtcaa

SEQ ID NO: 4713179 - DNA, 25 bp, Homo sapien
aacaaagatgtaataggaagatcca

SEQ ID NO: 4713180 - DNA, 25 bp, Homo sapien
gaagatccaagtcaaaagctgactc

SEQ ID NO: 4713181 - DNA, 25 bp, Homo sapien
tgccctgaggcgtcagcaggatcag

SEQ ID NO: 4713182 - DNA, 25 bp, Homo sapien
ccctgaggcgtcagcaggatcaggc

SEQ ID NO: 4713183 - DNA, 25 bp, Homo sapien
gccctgaggcgtcagcaggatcagg

SEQ ID NO: 4713184 - DNA, 25 bp, Homo sapien
cctgaggcgtcagcaggatcaggcc

SEQ ID NO: 4713185 - DNA, 25 bp, Homo sapien
tgtgacggcagaagacaccgtgcga

SEQ ID NO: 4713186 - DNA, 25 bp, Homo sapien
atcctcggagctgtcgccccgaagg

SEQ ID NO: 4713187 - DNA, 25 bp, Homo sapien
gggtcagggtgtgacggcagaagac

SEQ ID NO: 4713188 - DNA, 25 bp, Homo sapien
gacaccgtgcgagagtccactgtgt

SEQ ID NO: 4713189 - DNA, 25 bp, Homo sapien
ctgcagggggcaggactctggggca

SEQ ID NO: 4713190 - DNA, 25 bp, Homo sapien
gggggcaggactctggggcagcagc

SEQ ID NO: 4713191 - DNA, 25 bp, Homo sapien
tgcagggggcaggactctggggcag

SEQ ID NO: 4713192 - DNA, 25 bp, Homo sapien
cagggggcaggactctggggcagca

SEQ ID NO: 4713193 - DNA, 25 bp, Homo sapien
ctggcgctgtggctggaccgtcccc

SEQ ID NO: 4713194 - DNA, 25 bp, Homo sapien
cagatcttgtggaaaggcaagttca

SEQ ID NO: 4713195 - DNA, 25 bp, Homo sapien
aggcaagttcaggcccctctggggg

SEQ ID NO: 4713196 - DNA, 25 bp, Homo sapien
tggcgctgtggctggaccgtcccca

SEQ ID NO: 4713197 - DNA, 25 bp, Homo sapien
acaggggtcctggcccagcgtttgc

SEQ ID NO: 4713198 - DNA, 25 bp, Homo sapien
tgagctggctgcttctccgggacag

SEQ ID NO: 4713199 - DNA, 25 bp, Homo sapien
ggtcctggcccagcgtttgcagggt

SEQ ID NO: 4713200 - DNA, 25 bp, Homo sapien
cctccaagggggttctgagctggct

SEQ ID NO: 4713201 - DNA, 25 bp, Homo sapien
tctccctcaggtctaaatccagctc

SEQ ID NO: 4713202 - DNA, 25 bp, Homo sapien
caacctccccgcatcagtgtggtct

SEQ ID NO: 4713203 - DNA, 25 bp, Homo sapien
tcggcgtagcctccatctcgtcatt

SEQ ID NO: 4713204 - DNA, 25 bp, Homo sapien
ttctcctggcgcttggtctcggcgt

SEQ ID NO: 4713205 - DNA, 25 bp, Homo sapien
ctagagtgagaggagggagaagcag

SEQ ID NO: 4713206 - DNA, 25 bp, Homo sapien
agagtgagaggagggagaagcagag

SEQ ID NO: 4713207 - DNA, 25 bp, Homo sapien
tagagtgagaggagggagaagcaga

SEQ ID NO: 4713208 - DNA, 25 bp, Homo sapien
agtgagaggagggagaagcagagac

SEQ ID NO: 4713209 - DNA, 25 bp, Homo sapien
tcccccggctaggactgtgcaaggt

SEQ ID NO: 4713210 - DNA, 25 bp, Homo sapien
ggcaggagggaccttcgcagagcct

SEQ ID NO: 4713211 - DNA, 25 bp, Homo sapien
tcctggcacgccagatttctcccct

SEQ ID NO: 4713212 - DNA, 25 bp, Homo sapien
aagggctgggcagttgccagctcct

SEQ ID NO: 4713213 - DNA, 25 bp, Homo sapien
gatcatgcttcggttcaggacggac

SEQ ID NO: 4713214 - DNA, 25 bp, Homo sapien
ccatatggtcgttggcgcctggaga

SEQ ID NO: 4713215 - DNA, 25 bp, Homo sapien
gagaccatatggtcgttggcgcctg

SEQ ID NO: 4713216 - DNA, 25 bp, Homo sapien
gagctggaagagctaacaggatcat

SEQ ID NO: 4713217 - DNA, 25 bp, Homo sapien
gtggccgggtagcatcccaggcaga

SEQ ID NO: 4713218 - DNA, 25 bp, Homo sapien
aggccaaggtgagggagtgagtccc

SEQ ID NO: 4713219 - DNA, 25 bp, Homo sapien
ggagcccgtcttcttcctggattct

SEQ ID NO: 4713220 - DNA, 25 bp, Homo sapien
gaggcgcatgcctatgtagcagcag

SEQ ID NO: 4713221 - DNA, 25 bp, Homo sapien
acatgagagcaggagtgagtcggat

SEQ ID NO: 4713222 - DNA, 25 bp, Homo sapien
tgagagcaggagtgagtcggatggg

SEQ ID NO: 4713223 - DNA, 25 bp, Homo sapien
atgtacatgagagcaggagtgagtc

SEQ ID NO: 4713224 - DNA, 25 bp, Homo sapien
ctgggaaatgtacatgagagcagga

SEQ ID NO: 4713225 - DNA, 25 bp, Homo sapien
ggtgggtgagcgctgccgctggtct

SEQ ID NO: 4713226 - DNA, 25 bp, Homo sapien
ggattctgttgggactgagcttccc

SEQ ID NO: 4713227 - DNA, 25 bp, Homo sapien
aggcacatgtggtgggccctctctg

SEQ ID NO: 4713228 - DNA, 25 bp, Homo sapien
ctggtctgaaggtgagcccgggtgg

SEQ ID NO: 4713229 - DNA, 25 bp, Homo sapien
gagtttggtcctgaaacgcccagca

SEQ ID NO: 4713230 - DNA, 25 bp, Homo sapien
tagagaaacttgatctggcccgcag

SEQ ID NO: 4713231 - DNA, 25 bp, Homo sapien
tgaggagacccctatttatgggcca

SEQ ID NO: 4713232 - DNA, 25 bp, Homo sapien
cccacagggcgcttatgcaagaggc

SEQ ID NO: 4713233 - DNA, 25 bp, Homo sapien
cccatccacagtgtgtgatgagtag

SEQ ID NO: 4713234 - DNA, 25 bp, Homo sapien
ccagtcccatccacagtgtgtgatg

SEQ ID NO: 4713235 - DNA, 25 bp, Homo sapien
gcagggccagtcccatccacagtgt

SEQ ID NO: 4713236 - DNA, 25 bp, Homo sapien
tccacagtgtgtgatgagtagccat

SEQ ID NO: 4713237 - DNA, 25 bp, Homo sapien
ggctgcacggagacctgggcctccg

SEQ ID NO: 4713238 - DNA, 25 bp, Homo sapien
ctgctggaagttgggctgcacggag

SEQ ID NO: 4713239 - DNA, 25 bp, Homo sapien
ctgcacggagacctgggcctccggt

SEQ ID NO: 4713240 - DNA, 25 bp, Homo sapien
cttgtcctgctggaagttgggctgc

SEQ ID NO: 4713241 - DNA, 25 bp, Homo sapien
gcactgcgggacttcgctcactcct

SEQ ID NO: 4713242 - DNA, 25 bp, Homo sapien
agggagggcttctcgcgggcagcct

SEQ ID NO: 4713243 - DNA, 25 bp, Homo sapien
ctgacagggtcctgtagcccttggg

SEQ ID NO: 4713244 - DNA, 25 bp, Homo sapien
gaacgtgcgctcgtgtgtcctctgg

SEQ ID NO: 4713245 - DNA, 25 bp, Homo sapien
gcccttcatgtccacaaccagggaa

SEQ ID NO: 4713246 - DNA, 25 bp, Homo sapien
tgccgtctactcctccggtctccaa

SEQ ID NO: 4713247 - DNA, 25 bp, Homo sapien
ggcgcctctgccgtctactcctccg

SEQ ID NO: 4713248 - DNA, 25 bp, Homo sapien
tccggacccacctgcgcctacctgc

SEQ ID NO: 4713249 - DNA, 25 bp, Homo sapien
ccgcgctgaaccagcgccccaggaa

SEQ ID NO: 4713250 - DNA, 25 bp, Homo sapien
cagacttgcacatggacaacgccgc

SEQ ID NO: 4713251 - DNA, 25 bp, Homo sapien
tgcacatggacaacgccgccttctt

SEQ ID NO: 4713252 - DNA, 25 bp, Homo sapien
gcgaggcccgcgctgaaccagcgcc

SEQ ID NO: 4713253 - DNA, 25 bp, Homo sapien
agccgagggaccccgcgggctgcag

SEQ ID NO: 4713254 - DNA, 25 bp, Homo sapien
aggagccgagggaccccgcgggctg

SEQ ID NO: 4713255 - DNA, 25 bp, Homo sapien
ggagccgagggaccccgcgggctgc

SEQ ID NO: 4713256 - DNA, 25 bp, Homo sapien
ccgagggaccccgcgggctgcagca

SEQ ID NO: 4713257 - DNA, 25 bp, Homo sapien
ggctggcccagagtcgtcccggcaa

SEQ ID NO: 4713258 - DNA, 25 bp, Homo sapien
ggcccagagtcgtcccggcaagtgt

SEQ ID NO: 4713259 - DNA, 25 bp, Homo sapien
ctggcccagagtcgtcccggcaagt

SEQ ID NO: 4713260 - DNA, 25 bp, Homo sapien
gcccagagtcgtcccggcaagtgtc

SEQ ID NO: 4713261 - DNA, 25 bp, Homo sapien
acacttgtgcatgggtagtcacgcc

SEQ ID NO: 4713262 - DNA, 25 bp, Homo sapien
cctgacaagacaatggtgggctcca

SEQ ID NO: 4713263 - DNA, 25 bp, Homo sapien
ggcctgacaagacaatggtgggctc

SEQ ID NO: 4713264 - DNA, 25 bp, Homo sapien
catgggtagtcacgcccaggcctgg

SEQ ID NO: 4713265 - DNA, 25 bp, Homo sapien
gcagaagtcgctgccagaaccggaa

SEQ ID NO: 4713266 - DNA, 25 bp, Homo sapien
tgaagaggtttccccgtgggagcca

SEQ ID NO: 4713267 - DNA, 25 bp, Homo sapien
tgccagaaccggaagtgaagaggtt

SEQ ID NO: 4713268 - DNA, 25 bp, Homo sapien
gcagccgcagaagtcgctgccagaa

SEQ ID NO: 4713269 - DNA, 25 bp, Homo sapien
agagacaaccctgtcggggactcag

SEQ ID NO: 4713270 - DNA, 25 bp, Homo sapien
aagagacaaccctgtcggggactca

SEQ ID NO: 4713271 - DNA, 25 bp, Homo sapien
gagacaaccctgtcggggactcagc

SEQ ID NO: 4713272 - DNA, 25 bp, Homo sapien
gtagagggtggccatgcggaagtcc

SEQ ID NO: 4713273 - DNA, 25 bp, Homo sapien
gccatgcggaagtcctcgccagggc

SEQ ID NO: 4713274 - DNA, 25 bp, Homo sapien
ggtcgtagtcggtctccaccactga

SEQ ID NO: 4713275 - DNA, 25 bp, Homo sapien
ggctgtacagcagcgcgtactggtc

SEQ ID NO: 4713276 - DNA, 25 bp, Homo sapien
tgggcggcgtccacggggcacgtac

SEQ ID NO: 4713277 - DNA, 25 bp, Homo sapien
gcgggggggatgctgtgtgccctgc

SEQ ID NO: 4713278 - DNA, 25 bp, Homo sapien
tggcctcagcgggggggatgctgtg

SEQ ID NO: 4713279 - DNA, 25 bp, Homo sapien
ctcagcgggggggatgctgtgtgcc

SEQ ID NO: 4713280 - DNA, 25 bp, Homo sapien
ccttgcagaaggcggtgaatttctc

SEQ ID NO: 4713281 - DNA, 25 bp, Homo sapien
gccttgcagaaggcggtgaatttct

SEQ ID NO: 4713282 - DNA, 25 bp, Homo sapien
ccatgggcaccctctaccctatgcc

SEQ ID NO: 4713283 - DNA, 25 bp, Homo sapien
cctctgccaagagcaggctgtccac

SEQ ID NO: 4713284 - DNA, 25 bp, Homo sapien
ccccatggagggggctcctcatgaa

SEQ ID NO: 4713285 - DNA, 25 bp, Homo sapien
ggctgtccacccctaggaggctgtg

SEQ ID NO: 4713286 - DNA, 25 bp, Homo sapien
cctgttcctcccgtaacgcagagct

SEQ ID NO: 4713287 - DNA, 25 bp, Homo sapien
gtcgtcagaaccccagacttaggcc

SEQ ID NO: 4713288 - DNA, 25 bp, Homo sapien
ctgtcgtcagaaccccagacttagg

SEQ ID NO: 4713289 - DNA, 25 bp, Homo sapien
gttcctcccgtaacgcagagctcgt

SEQ ID NO: 4713290 - DNA, 25 bp, Homo sapien
ggttgggtggatgtgtgttgaatga

SEQ ID NO: 4713291 - DNA, 25 bp, Homo sapien
tggactgcagccatcgggaaggatg

SEQ ID NO: 4713292 - DNA, 25 bp, Homo sapien
catcgggaaggatgggtctgcagca

SEQ ID NO: 4713293 - DNA, 25 bp, Homo sapien
gggccctgatccatcccatcgcaga

SEQ ID NO: 4713294 - DNA, 25 bp, Homo sapien
ccgctgagagagcaagatccatccc

SEQ ID NO: 4713295 - DNA, 25 bp, Homo sapien
tgagccccgctgagagagcaagatc

SEQ ID NO: 4713296 - DNA, 25 bp, Homo sapien
ggatggaggactgcagtctacccca

SEQ ID NO: 4713297 - DNA, 25 bp, Homo sapien
cactccagtcgatggagcaggtgcg

SEQ ID NO: 4713298 - DNA, 25 bp, Homo sapien
cagggttgctttggcggggagccgg

SEQ ID NO: 4713299 - DNA, 25 bp, Homo sapien
ggagtttattgtgcaggatgaagcc

SEQ ID NO: 4713300 - DNA, 25 bp, Homo sapien
ttccggagtttattgtgcaggatga

SEQ ID NO: 4713301 - DNA, 25 bp, Homo sapien
acatccagagcgtgggggtcacctg

SEQ ID NO: 4713302 - DNA, 25 bp, Homo sapien
gcacctgcctaagggattagctgag

SEQ ID NO: 4713303 - DNA, 25 bp, Homo sapien
tgatcaagttgcaccctgcagcgct

SEQ ID NO: 4713304 - DNA, 25 bp, Homo sapien
tccgagcctcaaaatgcttggtgcc

SEQ ID NO: 4713305 - DNA, 25 bp, Homo sapien
tctgtaggctttacgcccctgaggt

SEQ ID NO: 4713306 - DNA, 25 bp, Homo sapien
gggaactgatcagcagagcccgaag

SEQ ID NO: 4713307 - DNA, 25 bp, Homo sapien
gagggaactgatcagcagagcccga

SEQ ID NO: 4713308 - DNA, 25 bp, Homo sapien
gcaaggagggaactgatcagcagag

SEQ ID NO: 4713309 - DNA, 25 bp, Homo sapien
aactgatcagcagagcccgaagcat

SEQ ID NO: 4713310 - DNA, 25 bp, Homo sapien
gctggcatcaaagttggcctggatg

SEQ ID NO: 4713311 - DNA, 25 bp, Homo sapien
gcctggatggggacctgggcctggc

SEQ ID NO: 4713312 - DNA, 25 bp, Homo sapien
ggcctggatggggacctgggcctgg

SEQ ID NO: 4713313 - DNA, 25 bp, Homo sapien
ctggctggcatcaaagttggcctgg

SEQ ID NO: 4713314 - DNA, 25 bp, Homo sapien
gagatgaggaggaaacagggctggg

SEQ ID NO: 4713315 - DNA, 25 bp, Homo sapien
tggagatgaggaggaaacagggctg

SEQ ID NO: 4713316 - DNA, 25 bp, Homo sapien
atgaggaggaaacagggctgggcac

SEQ ID NO: 4713317 - DNA, 25 bp, Homo sapien
agatgaggaggaaacagggctgggc

SEQ ID NO: 4713318 - DNA, 25 bp, Homo sapien
tactccagtcagacggagcgggtga

SEQ ID NO: 4713319 - DNA, 25 bp, Homo sapien
gaggctgcagtcttccccagccaac

SEQ ID NO: 4713320 - DNA, 25 bp, Homo sapien
gcctcagtacatgagcaactggccc

SEQ ID NO: 4713321 - DNA, 25 bp, Homo sapien
ggcacaggcaaccaacttgtcccta

SEQ ID NO: 4713322 - DNA, 25 bp, Homo sapien
tgtacacatctcgaccccgatgcag

SEQ ID NO: 4713323 - DNA, 25 bp, Homo sapien
tgctgtacacatctcgaccccgatg

SEQ ID NO: 4713324 - DNA, 25 bp, Homo sapien
tacacatctcgaccccgatgcagaa

SEQ ID NO: 4713325 - DNA, 25 bp, Homo sapien
ggctgctgtacacatctcgaccccg

SEQ ID NO: 4713326 - DNA, 25 bp, Homo sapien
catctgacaccaccccgaccatgta

SEQ ID NO: 4713327 - DNA, 25 bp, Homo sapien
accaccccgaccatgtaccaggtgc

SEQ ID NO: 4713328 - DNA, 25 bp, Homo sapien
caccccgaccatgtaccaggtgccc

SEQ ID NO: 4713329 - DNA, 25 bp, Homo sapien
tgacaccaccccgaccatgtaccag

SEQ ID NO: 4713330 - DNA, 25 bp, Homo sapien
gagggccaggtcaccattccccaag

SEQ ID NO: 4713331 - DNA, 25 bp, Homo sapien
agggccaggtcaccattccccaagg

SEQ ID NO: 4713332 - DNA, 25 bp, Homo sapien
tctgatgggctcgtgtggtcactta

SEQ ID NO: 4713333 - DNA, 25 bp, Homo sapien
gacatgggactttaggatgacctta

SEQ ID NO: 4713334 - DNA, 25 bp, Homo sapien
tgctggccatcctctgaggctgagt

SEQ ID NO: 4713335 - DNA, 25 bp, Homo sapien
tcgaggacccgtggtctgacctcaa

SEQ ID NO: 4713336 - DNA, 25 bp, Homo sapien
tccattttctggcacccgccatggg

SEQ ID NO: 4713337 - DNA, 25 bp, Homo sapien
cccggtacagcaccctcggtgaagg

SEQ ID NO: 4713338 - DNA, 25 bp, Homo sapien
gcaccctcggtgaaggtcgtgtcca

SEQ ID NO: 4713339 - DNA, 25 bp, Homo sapien
gaaggtcgtgtccattttctggcac

SEQ ID NO: 4713340 - DNA, 25 bp, Homo sapien
cccgagcgtggcacccctcacgccc

SEQ ID NO: 4713341 - DNA, 25 bp, Homo sapien
gccccaggtgccaatccagcagtcc

SEQ ID NO: 4713342 - DNA, 25 bp, Homo sapien
tggaggagcgagagccgctgacccc

SEQ ID NO: 4713343 - DNA, 25 bp, Homo sapien
gccaatccagcagtccatgcagcct

SEQ ID NO: 4713344 - DNA, 25 bp, Homo sapien
cactcggatgtcactcagggccatg

SEQ ID NO: 4713345 - DNA, 25 bp, Homo sapien
aaggccactcggatgtcactcaggg

SEQ ID NO: 4713346 - DNA, 25 bp, Homo sapien
tgcagccactggttccgcaggcccc

SEQ ID NO: 4713347 - DNA, 25 bp, Homo sapien
gagaaggccactcggatgtcactca

SEQ ID NO: 4713348 - DNA, 25 bp, Homo sapien
tccgcgtgcagaaagggctggtgca

SEQ ID NO: 4713349 - DNA, 25 bp, Homo sapien
acaggggtgacatcccagacccgaa

SEQ ID NO: 4713350 - DNA, 25 bp, Homo sapien
cttccgcgtgcagaaagggctggtg

SEQ ID NO: 4713351 - DNA, 25 bp, Homo sapien
gcaggcacaggggtgacatcccaga

SEQ ID NO: 4713352 - DNA, 25 bp, Homo sapien
agacaccaggagccagcggttccac

SEQ ID NO: 4713353 - DNA, 25 bp, Homo sapien
tgcatcttctgggcgccttcgggaa

SEQ ID NO: 4713354 - DNA, 25 bp, Homo sapien
acttggggcgccagtagctgcatct

SEQ ID NO: 4713355 - DNA, 25 bp, Homo sapien
ttctgggcgccttcgggaaacagct

SEQ ID NO: 4713356 - DNA, 25 bp, Homo sapien
ttcgggaaacagctcgggcgctcga

SEQ ID NO: 4713357 - DNA, 25 bp, Homo sapien
ccgggcacttctgtcccgaatctga

SEQ ID NO: 4713358 - DNA, 25 bp, Homo sapien
tgggtctgccccgggcacttctgtc

SEQ ID NO: 4713359 - DNA, 25 bp, Homo sapien
tctgtcccgaatctgagatcagtgg

SEQ ID NO: 4713360 - DNA, 25 bp, Homo sapien
aatctgagatcagtggagtgaccag

SEQ ID NO: 4713361 - DNA, 25 bp, Homo sapien
ccgggagagcgcgcccgcacactgg

SEQ ID NO: 4713362 - DNA, 25 bp, Homo sapien
cgggagagcgcgcccgcacactggt

SEQ ID NO: 4713363 - DNA, 25 bp, Homo sapien
gctggacccctcactgcaaaacaag

SEQ ID NO: 4713364 - DNA, 25 bp, Homo sapien
gctccgcatggccatggtctactca

SEQ ID NO: 4713365 - DNA, 25 bp, Homo sapien
ctgtcgtccctagctgccccgaagg

SEQ ID NO: 4713366 - DNA, 25 bp, Homo sapien
tgctgcggctcggatccgcccgggt

SEQ ID NO: 4713367 - DNA, 25 bp, Homo sapien
gcccccaagaaacgcacagcgccac

SEQ ID NO: 4713368 - DNA, 25 bp, Homo sapien
cccccaagaaacgcacagcgccaca

SEQ ID NO: 4713369 - DNA, 25 bp, Homo sapien
tgcccccaagaaacgcacagcgcca

SEQ ID NO: 4713370 - DNA, 25 bp, Homo sapien
gcagagttttatgcggctcctcctg

SEQ ID NO: 4713371 - DNA, 25 bp, Homo sapien
gagttgggagcgcttcgttggtctc

SEQ ID NO: 4713372 - DNA, 25 bp, Homo sapien
gttggtctccggaacagccaggcct

SEQ ID NO: 4713373 - DNA, 25 bp, Homo sapien
tccactctccgtggacaggccctgg

SEQ ID NO: 4713374 - DNA, 25 bp, Homo sapien
cagctagtaggctattttccttcaa

SEQ ID NO: 4713375 - DNA, 25 bp, Homo sapien
tccttcaaattcttcgagacttgtc

SEQ ID NO: 4713376 - DNA, 25 bp, Homo sapien
cttcgagacttgtctgtaaaagaca

SEQ ID NO: 4713377 - DNA, 25 bp, Homo sapien
gctgaactaggtacattacagctag

SEQ ID NO: 4713378 - DNA, 25 bp, Homo sapien
gccccggctccaagtccagccgagt

SEQ ID NO: 4713379 - DNA, 25 bp, Homo sapien
gctccaagtccagccgagtccaggt

SEQ ID NO: 4713380 - DNA, 25 bp, Homo sapien
agtccaggttccctccgtggctctg

SEQ ID NO: 4713381 - DNA, 25 bp, Homo sapien
aagtccagccgagtccaggttccct

SEQ ID NO: 4713382 - DNA, 25 bp, Homo sapien
ggagccgggtgcaggccagtcgcgg

SEQ ID NO: 4713383 - DNA, 25 bp, Homo sapien
ggctcctgcgcggaagaacgacttc

SEQ ID NO: 4713384 - DNA, 25 bp, Homo sapien
agtcgcgggcttagggagcttgcgc

SEQ ID NO: 4713385 - DNA, 25 bp, Homo sapien
cgcggaagaacgacttccggagccg

SEQ ID NO: 4713386 - DNA, 25 bp, Homo sapien
ccttcgcagtagcacacgaagcggg

SEQ ID NO: 4713387 - DNA, 25 bp, Homo sapien
gctttcctccccttcgcagtagcac

SEQ ID NO: 4713388 - DNA, 25 bp, Homo sapien
tttcctccccttcgcagtagcacac

SEQ ID NO: 4713389 - DNA, 25 bp, Homo sapien
tccccttcgcagtagcacacgaagc

SEQ ID NO: 4713390 - DNA, 25 bp, Homo sapien
cggggccgcccgcggagctccctgc

SEQ ID NO: 4713391 - DNA, 25 bp, Homo sapien
ggccgcccgcggagctccctgcacc

SEQ ID NO: 4713392 - DNA, 25 bp, Homo sapien
ctgtcaggcggggccgcccgcggag

SEQ ID NO: 4713393 - DNA, 25 bp, Homo sapien
ctccctgcacccctacctccccgcg

SEQ ID NO: 4713394 - DNA, 25 bp, Homo sapien
tgctccaaagctccgcggcgtcggt

SEQ ID NO: 4713395 - DNA, 25 bp, Homo sapien
ggccgccaggctgtccggcgtgaag

SEQ ID NO: 4713396 - DNA, 25 bp, Homo sapien
gctgtccggcgtgaagcaggtgctc

SEQ ID NO: 4713397 - DNA, 25 bp, Homo sapien
ccgccaggctgtccggcgtgaagca

SEQ ID NO: 4713398 - DNA, 25 bp, Homo sapien
cccagagccctagccaatgggagga

SEQ ID NO: 4713399 - DNA, 25 bp, Homo sapien
tcccagatgtctgtcgccccataga

SEQ ID NO: 4713400 - DNA, 25 bp, Homo sapien
aatgggaggactacagctacagggc

SEQ ID NO: 4713401 - DNA, 25 bp, Homo sapien
gggcttgtcacgagctgcctggaac

SEQ ID NO: 4713402 - DNA, 25 bp, Homo sapien
ggggtgatgtcctcagccgcactca

SEQ ID NO: 4713403 - DNA, 25 bp, Homo sapien
gtgatgtcctcagccgcactcaggc

SEQ ID NO: 4713404 - DNA, 25 bp, Homo sapien
ctgaaccggggggtgatgtcctcag

SEQ ID NO: 4713405 - DNA, 25 bp, Homo sapien
tcagccgcactcaggccaaaacggg

SEQ ID NO: 4713406 - DNA, 25 bp, Homo sapien
gagaggtgcggagagctgtggcaga

SEQ ID NO: 4713407 - DNA, 25 bp, Homo sapien
aggagaggtgcggagagctgtggca

SEQ ID NO: 4713408 - DNA, 25 bp, Homo sapien
ggagaggtgcggagagctgtggcag

SEQ ID NO: 4713409 - DNA, 25 bp, Homo sapien
ccccctgaaagcgtcagggatgctc

SEQ ID NO: 4713410 - DNA, 25 bp, Homo sapien
cgagggcccccctgaaagcgtcagg

SEQ ID NO: 4713411 - DNA, 25 bp, Homo sapien
caggctccacacgcgttttgccagg

SEQ ID NO: 4713412 - DNA, 25 bp, Homo sapien
ggcccagtgtcagcgcccgcagcct

SEQ ID NO: 4713413 - DNA, 25 bp, Homo sapien
tcttcctcgggctgacagctgtctc

SEQ ID NO: 4713414 - DNA, 25 bp, Homo sapien
taagaagagctgaggccctgcaggc

SEQ ID NO: 4713415 - DNA, 25 bp, Homo sapien
gcaggccgggggctcttcctcgggc

SEQ ID NO: 4713416 - DNA, 25 bp, Homo sapien
ctcgggctgacagctgtctcttctg

SEQ ID NO: 4713417 - DNA, 25 bp, Homo sapien
acaaccttctccgaatagataggca

SEQ ID NO: 4713418 - DNA, 25 bp, Homo sapien
tacttgagtcacaggcggacatgcc

SEQ ID NO: 4713419 - DNA, 25 bp, Homo sapien
tagataggcattctctctggagcgt

SEQ ID NO: 4713420 - DNA, 25 bp, Homo sapien
tgagttccaggttaaagagcacagc

SEQ ID NO: 4713421 - DNA, 25 bp, Homo sapien
ttgatgagcgactctcctggacacc

SEQ ID NO: 4713422 - DNA, 25 bp, Homo sapien
gggttgatgagcgactctcctggac

SEQ ID NO: 4713423 - DNA, 25 bp, Homo sapien
gaacccggggttgatgagcgactct

SEQ ID NO: 4713424 - DNA, 25 bp, Homo sapien
cctggacaccgcctcctgactccag

SEQ ID NO: 4713425 - DNA, 25 bp, Homo sapien
ctgggagggaagaggggtgtcacta

SEQ ID NO: 4713426 - DNA, 25 bp, Homo sapien
ggagggaagaggggtgtcactatgg

SEQ ID NO: 4713427 - DNA, 25 bp, Homo sapien
agggaagaggggtgtcactatggca

SEQ ID NO: 4713428 - DNA, 25 bp, Homo sapien
tgggagggaagaggggtgtcactat

SEQ ID NO: 4713429 - DNA, 25 bp, Homo sapien
atcgaagtccacgccaccagctggt

SEQ ID NO: 4713430 - DNA, 25 bp, Homo sapien
cgaagtccacgccaccagctggttt

SEQ ID NO: 4713431 - DNA, 25 bp, Homo sapien
tctcatcgaagtccacgccaccagc

SEQ ID NO: 4713432 - DNA, 25 bp, Homo sapien
tcatcgaagtccacgccaccagctg

SEQ ID NO: 4713433 - DNA, 25 bp, Homo sapien
tgatgggggcctcaaagactgcctc

SEQ ID NO: 4713434 - DNA, 25 bp, Homo sapien
gagccgtgttagtcctggcccagga

SEQ ID NO: 4713435 - DNA, 25 bp, Homo sapien
gcctctcccctcataggcggactcc

SEQ ID NO: 4713436 - DNA, 25 bp, Homo sapien
aaggaatttgaggagccgtgttagt

SEQ ID NO: 4713437 - DNA, 25 bp, Homo sapien
ttagatgtgggaacgcaatctgggt

SEQ ID NO: 4713438 - DNA, 25 bp, Homo sapien
aatgtggccgcctggttgaggccca

SEQ ID NO: 4713439 - DNA, 25 bp, Homo sapien
aacgcaatctgggtgctgcgtggcc

SEQ ID NO: 4713440 - DNA, 25 bp, Homo sapien
tctccctcccttagatgtgggaacg

SEQ ID NO: 4713441 - DNA, 25 bp, Homo sapien
agaccatgggcctgaacaacgcggt

SEQ ID NO: 4713442 - DNA, 25 bp, Homo sapien
tgaccatccagcacatcgtggcgga

SEQ ID NO: 4713443 - DNA, 25 bp, Homo sapien
tacacacgcgatgagtgagtgctgg

SEQ ID NO: 4713444 - DNA, 25 bp, Homo sapien
tgccgctgtgcatggtgatctcctg

SEQ ID NO: 4713445 - DNA, 25 bp, Homo sapien
cactgggaatgtccttgtgccagcc

SEQ ID NO: 4713446 - DNA, 25 bp, Homo sapien
ttgctcatgctctcgccactgggaa

SEQ ID NO: 4713447 - DNA, 25 bp, Homo sapien
catagaggttggtcccaggcatctc

SEQ ID NO: 4713448 - DNA, 25 bp, Homo sapien
cattcagctgcgaggctccatggtc

SEQ ID NO: 4713449 - DNA, 25 bp, Homo sapien
tggcggctgccgtgatttgagaatc

SEQ ID NO: 4713450 - DNA, 25 bp, Homo sapien
tttagcttccggcaaagagctgagc

SEQ ID NO: 4713451 - DNA, 25 bp, Homo sapien
gggcccagcctatagtcagcggtgt

SEQ ID NO: 4713452 - DNA, 25 bp, Homo sapien
atccacagttcattccgggaccagg

SEQ ID NO: 4713453 - DNA, 25 bp, Homo sapien
tctgggtctggccacgcctgggacc

SEQ ID NO: 4713454 - DNA, 25 bp, Homo sapien
ctgcattgagatctccaggacgtct

SEQ ID NO: 4713455 - DNA, 25 bp, Homo sapien
gctcagggtgaccccgcagggccat

SEQ ID NO: 4713456 - DNA, 25 bp, Homo sapien
aggtcccgtgcagcagagtggcaac

SEQ ID NO: 4713457 - DNA, 25 bp, Homo sapien
tctgagaggctttcgttctgaccca

SEQ ID NO: 4713458 - DNA, 25 bp, Homo sapien
agccccgtttgccagctcgcaggtt

SEQ ID NO: 4713459 - DNA, 25 bp, Homo sapien
tcgcaggttcccacgcacgattggg

SEQ ID NO: 4713460 - DNA, 25 bp, Homo sapien
gcccagggtcctcaaggagcaagct

SEQ ID NO: 4713461 - DNA, 25 bp, Homo sapien
atccaccgggaagctggcccacagt

SEQ ID NO: 4713462 - DNA, 25 bp, Homo sapien
gagcttgtgtcctgatcatcacgat

SEQ ID NO: 4713463 - DNA, 25 bp, Homo sapien
tgcctgggtccgcacaaacccaggg

SEQ ID NO: 4713464 - DNA, 25 bp, Homo sapien
tgatcatcacgatgctcacacacca

SEQ ID NO: 4713465 - DNA, 25 bp, Homo sapien
agctggccaatggtctgctcttggt

SEQ ID NO: 4713466 - DNA, 25 bp, Homo sapien
tcaagccaacccatgaagcaggtgg

SEQ ID NO: 4713467 - DNA, 25 bp, Homo sapien
gccattagccacagggaaagcgggt

SEQ ID NO: 4713468 - DNA, 25 bp, Homo sapien
gaccatgcttgacccagaatgtggg

SEQ ID NO: 4713469 - DNA, 25 bp, Homo sapien
ccctggcggcagtaagaggcagatt

SEQ ID NO: 4713470 - DNA, 25 bp, Homo sapien
ggagactggcttgacctaagcaaca

SEQ ID NO: 4713471 - DNA, 25 bp, Homo sapien
ctggcttgacctaagcaacatgttt

SEQ ID NO: 4713472 - DNA, 25 bp, Homo sapien
gcttgacctaagcaacatgttttgg

SEQ ID NO: 4713473 - DNA, 25 bp, Homo sapien
gcaggctgggggaaaattgttcacc

SEQ ID NO: 4713474 - DNA, 25 bp, Homo sapien
gggaggcgaggcctgtcgtctcctt

SEQ ID NO: 4713475 - DNA, 25 bp, Homo sapien
ggaggcgaggcctgtcgtctccttt

SEQ ID NO: 4713476 - DNA, 25 bp, Homo sapien
gaacgggtgggtaattctagagaca

SEQ ID NO: 4713477 - DNA, 25 bp, Homo sapien
gaacctttgtgccaggacacctcct

SEQ ID NO: 4713478 - DNA, 25 bp, Homo sapien
gcacctctcctgttcggtttagacc

SEQ ID NO: 4713479 - DNA, 25 bp, Homo sapien
atggagaaccgtagagcgcaggaac

SEQ ID NO: 4713480 - DNA, 25 bp, Homo sapien
gggctcccctgtgtcatccgacccg

SEQ ID NO: 4713481 - DNA, 25 bp, Homo sapien
tcccctgtgtcatccgacccggtgc

SEQ ID NO: 4713482 - DNA, 25 bp, Homo sapien
cctgtgtcatccgacccggtgcaca

SEQ ID NO: 4713483 - DNA, 25 bp, Homo sapien
tgtgtcatccgacccggtgcacatg

SEQ ID NO: 4713484 - DNA, 25 bp, Homo sapien
ttcatggcttcttccgccgggagcg

SEQ ID NO: 4713485 - DNA, 25 bp, Homo sapien
tcttccgccgggagcgcgtctggct

SEQ ID NO: 4713486 - DNA, 25 bp, Homo sapien
cttcttccgccgggagcgcgtctgg

SEQ ID NO: 4713487 - DNA, 25 bp, Homo sapien
gccgggagcgcgtctggctcaggcc

SEQ ID NO: 4713488 - DNA, 25 bp, Homo sapien
tggcctcgcggtgccatgctgcccc

SEQ ID NO: 4713489 - DNA, 25 bp, Homo sapien
ggcgctgaaggatggcgacgccgct

SEQ ID NO: 4713490 - DNA, 25 bp, Homo sapien
ctccttggcatccgcctcttcttcc

SEQ ID NO: 4713491 - DNA, 25 bp, Homo sapien
cgctgctcccgacgcggagcccgga

SEQ ID NO: 4713492 - DNA, 25 bp, Homo sapien
cagagaccgcaggtgccgagacacc

SEQ ID NO: 4713493 - DNA, 25 bp, Homo sapien
cggccccagagaccgcaggtgccga

SEQ ID NO: 4713494 - DNA, 25 bp, Homo sapien
cccagagaccgcaggtgccgagaca

SEQ ID NO: 4713495 - DNA, 25 bp, Homo sapien
gccccagagaccgcaggtgccgaga

SEQ ID NO: 4713496 - DNA, 25 bp, Homo sapien
cggcccaaacccagccggacttctg

SEQ ID NO: 4713497 - DNA, 25 bp, Homo sapien
ccagaagggagcgcatcctggagaa

SEQ ID NO: 4713498 - DNA, 25 bp, Homo sapien
agaagggagcgcatcctggagaagc

SEQ ID NO: 4713499 - DNA, 25 bp, Homo sapien
cagaagggagcgcatcctggagaag

SEQ ID NO: 4713500 - DNA, 25 bp, Homo sapien
cctgtgtctctgtgcgctcgcgagg

SEQ ID NO: 4713501 - DNA, 25 bp, Homo sapien
gctcgcgaggctaggcccacacagg

SEQ ID NO: 4713502 - DNA, 25 bp, Homo sapien
cggcgctcctgtgtctctgtgcgct

SEQ ID NO: 4713503 - DNA, 25 bp, Homo sapien
tctctgtgcgctcgcgaggctaggc

SEQ ID NO: 4713504 - DNA, 25 bp, Homo sapien
gggccgttctgtgttcctgtatttg

SEQ ID NO: 4713505 - DNA, 25 bp, Homo sapien
cggggccgttctgtgttcctgtatt

SEQ ID NO: 4713506 - DNA, 25 bp, Homo sapien
ggccgttctgtgttcctgtatttgc

SEQ ID NO: 4713507 - DNA, 25 bp, Homo sapien
atggctggcccgagggaatgttcct

SEQ ID NO: 4713508 - DNA, 25 bp, Homo sapien
tggcagcctagagtagctgcaggat

SEQ ID NO: 4713509 - DNA, 25 bp, Homo sapien
ccagatctgcgttggtgaccaaggc

SEQ ID NO: 4713510 - DNA, 25 bp, Homo sapien
caaggccagactgaaggttgggtcc

SEQ ID NO: 4713511 - DNA, 25 bp, Homo sapien
gacaaggagaacgacacaggcattg

SEQ ID NO: 4713512 - DNA, 25 bp, Homo sapien
cctgtgatgttccaggtgaggccca

SEQ ID NO: 4713513 - DNA, 25 bp, Homo sapien
catgtttatctacaagtggccggca

SEQ ID NO: 4713514 - DNA, 25 bp, Homo sapien
tctccagccttagccagtgcaggtc

SEQ ID NO: 4713515 - DNA, 25 bp, Homo sapien
acggccagcctcggtggaccttctt

SEQ ID NO: 4713516 - DNA, 25 bp, Homo sapien
cccacggccagcctcggtggacctt

SEQ ID NO: 4713517 - DNA, 25 bp, Homo sapien
aggcccacggccagcctcggtggac

SEQ ID NO: 4713518 - DNA, 25 bp, Homo sapien
ggccagcctcggtggaccttcttca

SEQ ID NO: 4713519 - DNA, 25 bp, Homo sapien
tggtcgggatggactggtgcggccc

SEQ ID NO: 4713520 - DNA, 25 bp, Homo sapien
acgcgctgacctgttgatgctctgg

SEQ ID NO: 4713521 - DNA, 25 bp, Homo sapien
tcaaaaggttggagcaggctagcct

SEQ ID NO: 4713522 - DNA, 25 bp, Homo sapien
cagccctggccggtcctcaaaaggt

SEQ ID NO: 4713523 - DNA, 25 bp, Homo sapien
aaccagcagttcagatccgggatgc

SEQ ID NO: 4713524 - DNA, 25 bp, Homo sapien
aagagcacacatgcggccggcgcag

SEQ ID NO: 4713525 - DNA, 25 bp, Homo sapien
ggaggccgacgcagacggagaggcc

SEQ ID NO: 4713526 - DNA, 25 bp, Homo sapien
tccccagagaagtgctctcaagagc

SEQ ID NO: 4713527 - DNA, 25 bp, Homo sapien
aaggaaaaggaacatctcagccggg

SEQ ID NO: 4713528 - DNA, 25 bp, Homo sapien
agttccaaggaaaaggaacatctca

SEQ ID NO: 4713529 - DNA, 25 bp, Homo sapien
ttccaaggaaaaggaacatctcagc

SEQ ID NO: 4713530 - DNA, 25 bp, Homo sapien
gaaaaggaacatctcagccgggcgt

SEQ ID NO: 4713531 - DNA, 25 bp, Homo sapien
gcagctgaagcggaaatgtgagaca

SEQ ID NO: 4713532 - DNA, 25 bp, Homo sapien
cgtctgcctttgagggtgcctgcca

SEQ ID NO: 4713533 - DNA, 25 bp, Homo sapien
tgaaatcaggctagtgagtggccct

SEQ ID NO: 4713534 - DNA, 25 bp, Homo sapien
gatcctggcatctttactggactgg

SEQ ID NO: 4713535 - DNA, 25 bp, Homo sapien
tcccaggcacgtcataggcaaagcc

SEQ ID NO: 4713536 - DNA, 25 bp, Homo sapien
ggacgttgccccacgttgagtccca

SEQ ID NO: 4713537 - DNA, 25 bp, Homo sapien
tcccgctggtgctggagtacgcact

SEQ ID NO: 4713538 - DNA, 25 bp, Homo sapien
tagcggtcggacttcaggttctggc

SEQ ID NO: 4713539 - DNA, 25 bp, Homo sapien
cggacggaagtagatggagggggtg

SEQ ID NO: 4713540 - DNA, 25 bp, Homo sapien
cgcaccgagcgcttgactccgtttt

SEQ ID NO: 4713541 - DNA, 25 bp, Homo sapien
gctggtccccgcaccgagcgcttga

SEQ ID NO: 4713542 - DNA, 25 bp, Homo sapien
gcacagtcccggagtgggcgccttc

SEQ ID NO: 4713543 - DNA, 25 bp, Homo sapien
gcttgactccgttttggctcctggt

SEQ ID NO: 4713544 - DNA, 25 bp, Homo sapien
ctggatggtatgaaaagcccttgtt

SEQ ID NO: 4713545 - DNA, 25 bp, Homo sapien
aaggctctggatggtatgaaaagcc

SEQ ID NO: 4713546 - DNA, 25 bp, Homo sapien
tgtttcatctgcacggtgggttcag

SEQ ID NO: 4713547 - DNA, 25 bp, Homo sapien
tgcacggtgggttcagttccatgcg

SEQ ID NO: 4713548 - DNA, 25 bp, Homo sapien
accagaccaggttccgggatgccat

SEQ ID NO: 4713549 - DNA, 25 bp, Homo sapien
gcatggccacctttgcgctaaccaa

SEQ ID NO: 4713550 - DNA, 25 bp, Homo sapien
aagacttggacggagacctcctggt

SEQ ID NO: 4713551 - DNA, 25 bp, Homo sapien
caaccggccagagtgcattgaagag

SEQ ID NO: 4713552 - DNA, 25 bp, Homo sapien
cgcgtccggtccgagactcgagaca

SEQ ID NO: 4713553 - DNA, 25 bp, Homo sapien
agactcgagacagggcccagcccca

SEQ ID NO: 4713554 - DNA, 25 bp, Homo sapien
cccagactctgtccgggttctctct

SEQ ID NO: 4713555 - DNA, 25 bp, Homo sapien
gactctgtccgggttctctctgacc

SEQ ID NO: 4713556 - DNA, 25 bp, Homo sapien
aggcgcgcggccaagtcgggcggcg

SEQ ID NO: 4713557 - DNA, 25 bp, Homo sapien
agcagcgcggctcgtggctccggcg

SEQ ID NO: 4713558 - DNA, 25 bp, Homo sapien
cgccggcagtgctcgcgcagcgcct

SEQ ID NO: 4713559 - DNA, 25 bp, Homo sapien
cgctgcagccgggcgcgcacgtcct

SEQ ID NO: 4713560 - DNA, 25 bp, Homo sapien
gccgtgtctcggggtcgctgcggct

SEQ ID NO: 4713561 - DNA, 25 bp, Homo sapien
cagcgccgccgtgtctcggggtcgc

SEQ ID NO: 4713562 - DNA, 25 bp, Homo sapien
gcgccgccgtgtctcggggtcgctg

SEQ ID NO: 4713563 - DNA, 25 bp, Homo sapien
gccgccgtgtctcggggtcgctgcg

SEQ ID NO: 4713564 - DNA, 25 bp, Homo sapien
agccccacacggtacatacccttgg

SEQ ID NO: 4713565 - DNA, 25 bp, Homo sapien
tggtacagggtcttccggctgggca

SEQ ID NO: 4713566 - DNA, 25 bp, Homo sapien
cggccaccttgttcagagaaatctg

SEQ ID NO: 4713567 - DNA, 25 bp, Homo sapien
gccgaatccgctccgcctgcagctg

SEQ ID NO: 4713568 - DNA, 25 bp, Homo sapien
caggggacggtgcagcgggtcccgt

SEQ ID NO: 4713569 - DNA, 25 bp, Homo sapien
gggacggtgcagcgggtcccgtggc

SEQ ID NO: 4713570 - DNA, 25 bp, Homo sapien
ggtgcagcgggtcccgtggcgctca

SEQ ID NO: 4713571 - DNA, 25 bp, Homo sapien
acggtgcagcgggtcccgtggcgct

SEQ ID NO: 4713572 - DNA, 25 bp, Homo sapien
ctccgggccgaggtagggcaggcag

SEQ ID NO: 4713573 - DNA, 25 bp, Homo sapien
cctccgggccgaggtagggcaggca

SEQ ID NO: 4713574 - DNA, 25 bp, Homo sapien
atgtcccggtctgtgccggggttgg

SEQ ID NO: 4713575 - DNA, 25 bp, Homo sapien
caatgtcccggtctgtgccggggtt

SEQ ID NO: 4713576 - DNA, 25 bp, Homo sapien
gcaatgtcccggtctgtgccggggt

SEQ ID NO: 4713577 - DNA, 25 bp, Homo sapien
ggcaatgtcccggtctgtgccgggg

SEQ ID NO: 4713578 - DNA, 25 bp, Homo sapien
gcatcggggttcggggtccagtgtc

SEQ ID NO: 4713579 - DNA, 25 bp, Homo sapien
cagagccggcatcggggttcggggt

SEQ ID NO: 4713580 - DNA, 25 bp, Homo sapien
cggcatcggggttcggggtccagtg

SEQ ID NO: 4713581 - DNA, 25 bp, Homo sapien
cggccgcgagtacgcctggccctgc

SEQ ID NO: 4713582 - DNA, 25 bp, Homo sapien
tgagccggccgcgagtacgcctggc

SEQ ID NO: 4713583 - DNA, 25 bp, Homo sapien
gaggcgcggtgagccggccgcgagt

SEQ ID NO: 4713584 - DNA, 25 bp, Homo sapien
ctgcaagggaggcgcggtgagccgg

SEQ ID NO: 4713585 - DNA, 25 bp, Homo sapien
gagtgaactcgctggtcatgacgta

SEQ ID NO: 4713586 - DNA, 25 bp, Homo sapien
tgctcaaacatgaccacgttggcgg

SEQ ID NO: 4713587 - DNA, 25 bp, Homo sapien
gaagaagttgtgctccctgaagaac

SEQ ID NO: 4713588 - DNA, 25 bp, Homo sapien
cttgccatcaaaggtcacagcaggc

SEQ ID NO: 4713589 - DNA, 25 bp, Homo sapien
agtctgcgccctgcaacacacagaa

SEQ ID NO: 4713590 - DNA, 25 bp, Homo sapien
cagccgcaccaggatgttgtccaca

SEQ ID NO: 4713591 - DNA, 25 bp, Homo sapien
acagtacacgtgcacaaactccact

SEQ ID NO: 4713592 - DNA, 25 bp, Homo sapien
ttgtggtcctccagcgcgcagtaga

SEQ ID NO: 4713593 - DNA, 25 bp, Homo sapien
cagatgttgcctgcattgtacagca

SEQ ID NO: 4713594 - DNA, 25 bp, Homo sapien
tggtgaccgccttaaggaagcctcg

SEQ ID NO: 4713595 - DNA, 25 bp, Homo sapien
tagctgtgcggtctcaggactgatc

SEQ ID NO: 4713596 - DNA, 25 bp, Homo sapien
tcccgtcggaggcacgtagctgtgc

SEQ ID NO: 4713597 - DNA, 25 bp, Homo sapien
ggcggctctggccggcaatccgcag

SEQ ID NO: 4713598 - DNA, 25 bp, Homo sapien
ccggcaatccgcagccacctgctgc

SEQ ID NO: 4713599 - DNA, 25 bp, Homo sapien
gctctggccggcaatccgcagccac

SEQ ID NO: 4713600 - DNA, 25 bp, Homo sapien
ctggccggcaatccgcagccacctg

SEQ ID NO: 4713601 - DNA, 25 bp, Homo sapien
gaaacagatcagatatggcaccgct

SEQ ID NO: 4713602 - DNA, 25 bp, Homo sapien
tgatcacagagccttacagcagctg

SEQ ID NO: 4713603 - DNA, 25 bp, Homo sapien
gagcacggcttgtgcctgatctcca

SEQ ID NO: 4713604 - DNA, 25 bp, Homo sapien
acaggatggcagaaggacactacag

SEQ ID NO: 4713605 - DNA, 25 bp, Homo sapien
acacatcaaacacaaacttctccat

SEQ ID NO: 4713606 - DNA, 25 bp, Homo sapien
ttagcggctttaccagattcccctc

SEQ ID NO: 4713607 - DNA, 25 bp, Homo sapien
ttcttcacagccacgtgtggcttca

SEQ ID NO: 4713608 - DNA, 25 bp, Homo sapien
ttagcaaaccggaacacatcaaaca

SEQ ID NO: 4713609 - DNA, 25 bp, Homo sapien
aaagggctagtcacccacgtcccag

SEQ ID NO: 4713610 - DNA, 25 bp, Homo sapien
tcccatgggcagcaagtctagggag

SEQ ID NO: 4713611 - DNA, 25 bp, Homo sapien
ggccaggagacctctcctaaccatg

SEQ ID NO: 4713612 - DNA, 25 bp, Homo sapien
gtttttgctcctgagacgccaggga

SEQ ID NO: 4713613 - DNA, 25 bp, Homo sapien
ctcccgcagcacttccaaggcagca

SEQ ID NO: 4713614 - DNA, 25 bp, Homo sapien
cccgcagcacttccaaggcagcaaa

SEQ ID NO: 4713615 - DNA, 25 bp, Homo sapien
tcccgcagcacttccaaggcagcaa

SEQ ID NO: 4713616 - DNA, 25 bp, Homo sapien
gcccaccggtagtgctgggtgagca

SEQ ID NO: 4713617 - DNA, 25 bp, Homo sapien
cctggcgagcggtgcggggactgtc

SEQ ID NO: 4713618 - DNA, 25 bp, Homo sapien
cccgcagagcccaccggtagtgctg

SEQ ID NO: 4713619 - DNA, 25 bp, Homo sapien
gggcatccaggaagcgggccccggc

SEQ ID NO: 4713620 - DNA, 25 bp, Homo sapien
ctggctccccacagctcctgtctca

SEQ ID NO: 4713621 - DNA, 25 bp, Homo sapien
tccccacagctcctgtctcagcaag

SEQ ID NO: 4713622 - DNA, 25 bp, Homo sapien
cccacagctcctgtctcagcaagct

SEQ ID NO: 4713623 - DNA, 25 bp, Homo sapien
acagctcctgtctcagcaagctcat

SEQ ID NO: 4713624 - DNA, 25 bp, Homo sapien
cgataggagactgagctctacacac

SEQ ID NO: 4713625 - DNA, 25 bp, Homo sapien
gtcccgataggagactgagctctac

SEQ ID NO: 4713626 - DNA, 25 bp, Homo sapien
cagtcccgataggagactgagctct

SEQ ID NO: 4713627 - DNA, 25 bp, Homo sapien
ccccagtcccgataggagactgagc

SEQ ID NO: 4713628 - DNA, 25 bp, Homo sapien
cacagatggccggagggtctccatt

SEQ ID NO: 4713629 - DNA, 25 bp, Homo sapien
agagtaagacaccaagggcgatatc

SEQ ID NO: 4713630 - DNA, 25 bp, Homo sapien
caccaagggcgatatctcacagatg

SEQ ID NO: 4713631 - DNA, 25 bp, Homo sapien
cagatggccggagggtctccatttg

SEQ ID NO: 4713632 - DNA, 25 bp, Homo sapien
ttaaccgaggtagagctgtgccgtc

SEQ ID NO: 4713633 - DNA, 25 bp, Homo sapien
caccccaacccatatcttggaaagt

SEQ ID NO: 4713634 - DNA, 25 bp, Homo sapien
ccatatcttggaaagtcttctgcaa

SEQ ID NO: 4713635 - DNA, 25 bp, Homo sapien
ccagatagggatgggcagctctcac

SEQ ID NO: 4713636 - DNA, 25 bp, Homo sapien
tccccaggtgcgatcccaggtctgc

SEQ ID NO: 4713637 - DNA, 25 bp, Homo sapien
gtccccaggtgcgatcccaggtctg

SEQ ID NO: 4713638 - DNA, 25 bp, Homo sapien
acagtccccaggtgcgatcccaggt

SEQ ID NO: 4713639 - DNA, 25 bp, Homo sapien
agtccccaggtgcgatcccaggtct

SEQ ID NO: 4713640 - DNA, 25 bp, Homo sapien
acgagcaggggacaatggccaagta

SEQ ID NO: 4713641 - DNA, 25 bp, Homo sapien
gagcaggggacaatggccaagtacc

SEQ ID NO: 4713642 - DNA, 25 bp, Homo sapien
gcaggggacaatggccaagtaccca

SEQ ID NO: 4713643 - DNA, 25 bp, Homo sapien
ctggagacgagcaggggacaatggc

SEQ ID NO: 4713644 - DNA, 25 bp, Homo sapien
ggaactcccggccttgcaggtacac

SEQ ID NO: 4713645 - DNA, 25 bp, Homo sapien
aactcccggccttgcaggtacactt

SEQ ID NO: 4713646 - DNA, 25 bp, Homo sapien
tcccggccttgcaggtacacttcta

SEQ ID NO: 4713647 - DNA, 25 bp, Homo sapien
ggccttgcaggtacacttctaaacc

SEQ ID NO: 4713648 - DNA, 25 bp, Homo sapien
tgcaccaaatatggaggctgcgtcc

SEQ ID NO: 4713649 - DNA, 25 bp, Homo sapien
taaaccgaccatggaagaggctgag

SEQ ID NO: 4713650 - DNA, 25 bp, Homo sapien
ggtgtccaggccaagcttctcagag

SEQ ID NO: 4713651 - DNA, 25 bp, Homo sapien
gattagtcagcaaccatcacagagg

SEQ ID NO: 4713652 - DNA, 25 bp, Homo sapien
catcctcacgtggttagcagggaaa

SEQ ID NO: 4713653 - DNA, 25 bp, Homo sapien
tgagcatgcagaagcctgccctgga

SEQ ID NO: 4713654 - DNA, 25 bp, Homo sapien
ttgtcagtccctggagtaccccaag

SEQ ID NO: 4713655 - DNA, 25 bp, Homo sapien
cgaggttcctgaccgcaggttgtct

SEQ ID NO: 4713656 - DNA, 25 bp, Homo sapien
caaaaacattagcaacggagcgcct

SEQ ID NO: 4713657 - DNA, 25 bp, Homo sapien
gcttgagatgactgcgcttcctgca

SEQ ID NO: 4713658 - DNA, 25 bp, Homo sapien
tgtgacacttgctggtacccaaatg

SEQ ID NO: 4713659 - DNA, 25 bp, Homo sapien
tagcacgtggctcgtctaactctgt

SEQ ID NO: 4713660 - DNA, 25 bp, Homo sapien
tgcgcctggaccggcgccgagcgag

SEQ ID NO: 4713661 - DNA, 25 bp, Homo sapien
ctgcgcctggaccggcgccgagcga

SEQ ID NO: 4713662 - DNA, 25 bp, Homo sapien
gcgcctggaccggcgccgagcgagg

SEQ ID NO: 4713663 - DNA, 25 bp, Homo sapien
gagctaagctggctgcgccgcatct

SEQ ID NO: 4713664 - DNA, 25 bp, Homo sapien
gctaagctggctgcgccgcatctca

SEQ ID NO: 4713665 - DNA, 25 bp, Homo sapien
ccgagctaagctggctgcgccgcat

SEQ ID NO: 4713666 - DNA, 25 bp, Homo sapien
cccgagctaagctggctgcgccgca

SEQ ID NO: 4713667 - DNA, 25 bp, Homo sapien
cgcgtggtcaccggcaagaagccca

SEQ ID NO: 4713668 - DNA, 25 bp, Homo sapien
gccgcgtggtcaccggcaagaagcc

SEQ ID NO: 4713669 - DNA, 25 bp, Homo sapien
ctggccgcgtggtcaccggcaagaa

SEQ ID NO: 4713670 - DNA, 25 bp, Homo sapien
cgtggtcaccggcaagaagcccagg

SEQ ID NO: 4713671 - DNA, 25 bp, Homo sapien
catgttggcagagagtcccagcgtc

SEQ ID NO: 4713672 - DNA, 25 bp, Homo sapien
tttgcccacgccctcacgggagacg

SEQ ID NO: 4713673 - DNA, 25 bp, Homo sapien
cttgggcgccgtcctgggctggtgc

SEQ ID NO: 4713674 - DNA, 25 bp, Homo sapien
acgtggttcgcctcatgggcctgga

SEQ ID NO: 4713675 - DNA, 25 bp, Homo sapien
gcagcgccgtcaacagcccgcccat

SEQ ID NO: 4713676 - DNA, 25 bp, Homo sapien
catcacacggatacgcgactgcgcg

SEQ ID NO: 4713677 - DNA, 25 bp, Homo sapien
cacggatacgcgactgcgcgtgcgc

SEQ ID NO: 4713678 - DNA, 25 bp, Homo sapien
aacagcccgcccatcacacggatac

SEQ ID NO: 4713679 - DNA, 25 bp, Homo sapien
ctgagaggaaccgagagctccgctt

SEQ ID NO: 4713680 - DNA, 25 bp, Homo sapien
tgagaggaaccgagagctccgcttc

SEQ ID NO: 4713681 - DNA, 25 bp, Homo sapien
gagaggaaccgagagctccgcttct

SEQ ID NO: 4713682 - DNA, 25 bp, Homo sapien
agaggaaccgagagctccgcttctc

SEQ ID NO: 4713683 - DNA, 25 bp, Homo sapien
ccactggcggcgtcaggaagtccga

SEQ ID NO: 4713684 - DNA, 25 bp, Homo sapien
ctacagtggtggcgacggcccaagg

SEQ ID NO: 4713685 - DNA, 25 bp, Homo sapien
ccgcccactggcggcgtcaggaagt

SEQ ID NO: 4713686 - DNA, 25 bp, Homo sapien
tacagtggtggcgacggcccaaggg

SEQ ID NO: 4713687 - DNA, 25 bp, Homo sapien
accgagatgaagtcccgatgaggcg

SEQ ID NO: 4713688 - DNA, 25 bp, Homo sapien
agcgtcaccgagatgaagtcccgat

SEQ ID NO: 4713689 - DNA, 25 bp, Homo sapien
tgttgtcatagttctcgccaaagct

SEQ ID NO: 4713690 - DNA, 25 bp, Homo sapien
catagttctcgccaaagctcagcgt

SEQ ID NO: 4713691 - DNA, 25 bp, Homo sapien
gcgcctggggagtcgagtccgcccg

SEQ ID NO: 4713692 - DNA, 25 bp, Homo sapien
gctgccccaaccaggaacgcacatt

SEQ ID NO: 4713693 - DNA, 25 bp, Homo sapien
tgccccaaccaggaacgcacatttg

SEQ ID NO: 4713694 - DNA, 25 bp, Homo sapien
aggaacgcacatttgcccctttttg

SEQ ID NO: 4713695 - DNA, 25 bp, Homo sapien
ggaggaagagaatcatattccgctg

SEQ ID NO: 4713696 - DNA, 25 bp, Homo sapien
tggtcagccaagttgatgtagaaga

SEQ ID NO: 4713697 - DNA, 25 bp, Homo sapien
tcatattccgctgcaatctcgacag

SEQ ID NO: 4713698 - DNA, 25 bp, Homo sapien
gctgcaatctcgacagttgcttcca

SEQ ID NO: 4713699 - DNA, 25 bp, Homo sapien
cgttttcaagtacacgtgtttctga

SEQ ID NO: 4713700 - DNA, 25 bp, Homo sapien
caacacagatatcgttttcaagtac

SEQ ID NO: 4713701 - DNA, 25 bp, Homo sapien
tttcaagtacacgtgtttctgatac

SEQ ID NO: 4713702 - DNA, 25 bp, Homo sapien
caatcaaccctcaacacagatatcg

SEQ ID NO: 4713703 - DNA, 25 bp, Homo sapien
caggtggttacatacagctctacct

SEQ ID NO: 4713704 - DNA, 25 bp, Homo sapien
atcaaattaacatctgtgttctagc

SEQ ID NO: 4713705 - DNA, 25 bp, Homo sapien
ccagagacctagaaagtagtcagac

SEQ ID NO: 4713706 - DNA, 25 bp, Homo sapien
tcgttgccatatatgcctcctggag

SEQ ID NO: 4713707 - DNA, 25 bp, Homo sapien
gctaatgagtgctacgaaatttgtg

SEQ ID NO: 4713708 - DNA, 25 bp, Homo sapien
aagcccaccagctgacttactctat

SEQ ID NO: 4713709 - DNA, 25 bp, Homo sapien
tttgtgtggttatttaggctgagtg

SEQ ID NO: 4713710 - DNA, 25 bp, Homo sapien
ttttccaaacacacgctaatgagtg

SEQ ID NO: 4713711 - DNA, 25 bp, Homo sapien
gtcggtgtccgccttctgaggagct

SEQ ID NO: 4713712 - DNA, 25 bp, Homo sapien
ctggttttaacccagcaatttctgg

SEQ ID NO: 4713713 - DNA, 25 bp, Homo sapien
tggtaagacgggtggatttgctggt

SEQ ID NO: 4713714 - DNA, 25 bp, Homo sapien
aagttctcagggtcggtgtccgcct

SEQ ID NO: 4713715 - DNA, 25 bp, Homo sapien
tcagaagtaaaaccggaactggcca

SEQ ID NO: 4713716 - DNA, 25 bp, Homo sapien
ggtctgtcttattcaacactgcaca

SEQ ID NO: 4713717 - DNA, 25 bp, Homo sapien
aaaaccggaactggccatggctggt

SEQ ID NO: 4713718 - DNA, 25 bp, Homo sapien
ggcctcttgagaggaaacaggtctg

SEQ ID NO: 4713719 - DNA, 25 bp, Homo sapien
acattgccgacacgagaatgcccag

SEQ ID NO: 4713720 - DNA, 25 bp, Homo sapien
atccacgaaaagcaggcgccagttt

SEQ ID NO: 4713721 - DNA, 25 bp, Homo sapien
aaaagcaggcgccagtttctgactg

SEQ ID NO: 4713722 - DNA, 25 bp, Homo sapien
gcattggaaacattgccgacacgag

SEQ ID NO: 4713723 - DNA, 25 bp, Homo sapien
tggaaggtcggaacaaactattaga

SEQ ID NO: 4713724 - DNA, 25 bp, Homo sapien
aactattagaattatgtcactaaga

SEQ ID NO: 4713725 - DNA, 25 bp, Homo sapien
caaactattagaattatgtcactaa

SEQ ID NO: 4713726 - DNA, 25 bp, Homo sapien
ccacagtggaaggtcggaacaaact

SEQ ID NO: 4713727 - DNA, 25 bp, Homo sapien
cttggcttgggggtctaatctgcag

SEQ ID NO: 4713728 - DNA, 25 bp, Homo sapien
gtccccgctggatgtgtctttgtgt

SEQ ID NO: 4713729 - DNA, 25 bp, Homo sapien
gtcttggcttgggggtctaatctgc

SEQ ID NO: 4713730 - DNA, 25 bp, Homo sapien
tggtccccgctggatgtgtctttgt

SEQ ID NO: 4713731 - DNA, 25 bp, Homo sapien
tgtcctctgcggatctccttccggg

SEQ ID NO: 4713732 - DNA, 25 bp, Homo sapien
gatctccttccgggcggggatccac

SEQ ID NO: 4713733 - DNA, 25 bp, Homo sapien
ctgatgactgtcctctgcggatctc

SEQ ID NO: 4713734 - DNA, 25 bp, Homo sapien
cgcaatcttgtttttcggaacatca

SEQ ID NO: 4713735 - DNA, 25 bp, Homo sapien
atctcagacacaatgcgtttccgca

SEQ ID NO: 4713736 - DNA, 25 bp, Homo sapien
tacagagcatacactgtcagtttca

SEQ ID NO: 4713737 - DNA, 25 bp, Homo sapien
atcaagccctgagcggcggcgtgca

SEQ ID NO: 4713738 - DNA, 25 bp, Homo sapien
gccctgctcaggctcgatcaccgct

SEQ ID NO: 4713739 - DNA, 25 bp, Homo sapien
tcttcttgaagggagctcggtgccc

SEQ ID NO: 4713740 - DNA, 25 bp, Homo sapien
gctcttcttgaagggagctcggtgc

SEQ ID NO: 4713741 - DNA, 25 bp, Homo sapien
tctgctcttcttgaagggagctcgg

SEQ ID NO: 4713742 - DNA, 25 bp, Homo sapien
cacgtcctctcaggaaaggttctga

SEQ ID NO: 4713743 - DNA, 25 bp, Homo sapien
tcattgatgccgcagagattgctac

SEQ ID NO: 4713744 - DNA, 25 bp, Homo sapien
cacgcccggccaacattgactaatg

SEQ ID NO: 4713745 - DNA, 25 bp, Homo sapien
gattgacacgtgtgtaacggcacca

SEQ ID NO: 4713746 - DNA, 25 bp, Homo sapien
tagtaggggggagagagcacaggcc

SEQ ID NO: 4713747 - DNA, 25 bp, Homo sapien
agtaggggggagagagcacaggcca

SEQ ID NO: 4713748 - DNA, 25 bp, Homo sapien
ctagtaggggggagagagcacaggc

SEQ ID NO: 4713749 - DNA, 25 bp, Homo sapien
gtaggggggagagagcacaggccat

SEQ ID NO: 4713750 - DNA, 25 bp, Homo sapien
gcggtatcctttccatgcatgcagg

SEQ ID NO: 4713751 - DNA, 25 bp, Homo sapien
caaaccactcactgaaggacctgga

SEQ ID NO: 4713752 - DNA, 25 bp, Homo sapien
tgtccagcgcgtcgatcagtgtgag

SEQ ID NO: 4713753 - DNA, 25 bp, Homo sapien
tcatggccccatgcaaacttgcggt

SEQ ID NO: 4713754 - DNA, 25 bp, Homo sapien
gtgtaacttcttcgacacccacttc

SEQ ID NO: 4713755 - DNA, 25 bp, Homo sapien
ccaggatgcggatcgtgctctcaaa

SEQ ID NO: 4713756 - DNA, 25 bp, Homo sapien
caaagtgtaacttcttcgacaccca

SEQ ID NO: 4713757 - DNA, 25 bp, Homo sapien
tcaaacaggttgacgtccacgtcct

SEQ ID NO: 4713758 - DNA, 25 bp, Homo sapien
ttgaatgcgagtccaccatctccct

SEQ ID NO: 4713759 - DNA, 25 bp, Homo sapien
aaacaggaagacagtcacgtcccca

SEQ ID NO: 4713760 - DNA, 25 bp, Homo sapien
gggtaactgcttgaatgcgagtcca

SEQ ID NO: 4713761 - DNA, 25 bp, Homo sapien
tcacgaatatgagctcagaaacaga

SEQ ID NO: 4713762 - DNA, 25 bp, Homo sapien
accctttcatgcagttcagtggaga

SEQ ID NO: 4713763 - DNA, 25 bp, Homo sapien
tttcatgcagttcagtggagacact

SEQ ID NO: 4713764 - DNA, 25 bp, Homo sapien
cctttcatgcagttcagtggagaca

SEQ ID NO: 4713765 - DNA, 25 bp, Homo sapien
ctacaccctttcatgcagttcagtg

SEQ ID NO: 4713766 - DNA, 25 bp, Homo sapien
caggcattagccgatttccaaaatc

SEQ ID NO: 4713767 - DNA, 25 bp, Homo sapien
ggtgggcaactccagtaccgatgtt

SEQ ID NO: 4713768 - DNA, 25 bp, Homo sapien
acagtgctgtcggaggtccaccgtg

SEQ ID NO: 4713769 - DNA, 25 bp, Homo sapien
tcacatccgagtaaggaatcttgga

SEQ ID NO: 4713770 - DNA, 25 bp, Homo sapien
agacgggagagctcccggaactcca

SEQ ID NO: 4713771 - DNA, 25 bp, Homo sapien
tgagacgggagagctcccggaactc

SEQ ID NO: 4713772 - DNA, 25 bp, Homo sapien
ctgtgagacgggagagctcccggaa

SEQ ID NO: 4713773 - DNA, 25 bp, Homo sapien
tgtgagacgggagagctcccggaac

SEQ ID NO: 4713774 - DNA, 25 bp, Homo sapien
gggaggcgcatccagccagaaagcc

SEQ ID NO: 4713775 - DNA, 25 bp, Homo sapien
gaggcgcatccagccagaaagcctg

SEQ ID NO: 4713776 - DNA, 25 bp, Homo sapien
ccaggggaggcgcatccagccagaa

SEQ ID NO: 4713777 - DNA, 25 bp, Homo sapien
aggggaggcgcatccagccagaaag

SEQ ID NO: 4713778 - DNA, 25 bp, Homo sapien
ctgcacgcctgcaacagcatgtaac

SEQ ID NO: 4713779 - DNA, 25 bp, Homo sapien
atgtaacagcaccgacctgcacatc

SEQ ID NO: 4713780 - DNA, 25 bp, Homo sapien
aatgtaacagcaccgacctgcacat

SEQ ID NO: 4713781 - DNA, 25 bp, Homo sapien
cctgcacgcctgcaagtgtgaatgt

SEQ ID NO: 4713782 - DNA, 25 bp, Homo sapien
tgcacgcctgcaacagcatgaatgt

SEQ ID NO: 4713783 - DNA, 25 bp, Homo sapien
ctgcacgcctgcaacagcatgaatg

SEQ ID NO: 4713784 - DNA, 25 bp, Homo sapien
tgcacgcctgcaacagtgtgaatgt

SEQ ID NO: 4713785 - DNA, 25 bp, Homo sapien
tgcaacagcatgaatgtaacaccac

SEQ ID NO: 4713786 - DNA, 25 bp, Homo sapien
tgcacgcctgcaacagcatgaatgt

SEQ ID NO: 4713787 - DNA, 25 bp, Homo sapien
tgtaacaccactgacctgcacgcct

SEQ ID NO: 4713788 - DNA, 25 bp, Homo sapien
gcaacagcgtgaatgtgtgtaacac

SEQ ID NO: 4713789 - DNA, 25 bp, Homo sapien
ctgcacgcctgcaacagtgtgaatg

SEQ ID NO: 4713790 - DNA, 25 bp, Homo sapien
tgcacgcctgcaacagtgtgaatgt

SEQ ID NO: 4713791 - DNA, 25 bp, Homo sapien
acagtgtgaatgtaacaccaccgac

SEQ ID NO: 4713792 - DNA, 25 bp, Homo sapien
tgcacgcctgcaacagcgttgtgtg

SEQ ID NO: 4713793 - DNA, 25 bp, Homo sapien
caatagcgtgaatgtgtgtaccact

SEQ ID NO: 4713794 - DNA, 25 bp, Homo sapien
tgtgactgcactcacacgaggaact

SEQ ID NO: 4713795 - DNA, 25 bp, Homo sapien
aaaggacaaatcgtgtgtgactgca

SEQ ID NO: 4713796 - DNA, 25 bp, Homo sapien
cttaaagacgctgagtgaaaggagc

SEQ ID NO: 4713797 - DNA, 25 bp, Homo sapien
tgaaaggagcccaaataaaaggata

SEQ ID NO: 4713798 - DNA, 25 bp, Homo sapien
tctgaagcatctttcgcgtatgaag

SEQ ID NO: 4713799 - DNA, 25 bp, Homo sapien
gcatctttcgcgtatgaagcttaaa

SEQ ID NO: 4713800 - DNA, 25 bp, Homo sapien
gccacgcagcagatattcagcctga

SEQ ID NO: 4713801 - DNA, 25 bp, Homo sapien
gattaaacaaaaagtggcctagcca

SEQ ID NO: 4713802 - DNA, 25 bp, Homo sapien
catgattaaaaacagggactcgaac

SEQ ID NO: 4713803 - DNA, 25 bp, Homo sapien
ttgctctaaagagggctgtgtccag

SEQ ID NO: 4713804 - DNA, 25 bp, Homo sapien
gtaccgggatgttagggcacgccca

SEQ ID NO: 4713805 - DNA, 25 bp, Homo sapien
gctgcagtgaaaacgccttctaaat

SEQ ID NO: 4713806 - DNA, 25 bp, Homo sapien
ggcctggctgcctatccctgtgtac

SEQ ID NO: 4713807 - DNA, 25 bp, Homo sapien
gatgatattaaacgcctcggctcca

SEQ ID NO: 4713808 - DNA, 25 bp, Homo sapien
agagcccaccaggcctggccgtcag

SEQ ID NO: 4713809 - DNA, 25 bp, Homo sapien
gagagcccaccaggcctggccgtca

SEQ ID NO: 4713810 - DNA, 25 bp, Homo sapien
cccaccaggcctggccgtcagccat

SEQ ID NO: 4713811 - DNA, 25 bp, Homo sapien
agcccaccaggcctggccgtcagcc

SEQ ID NO: 4713812 - DNA, 25 bp, Homo sapien
atggctcctggtggccgtaccacac

SEQ ID NO: 4713813 - DNA, 25 bp, Homo sapien
gatggctctcatcccttactcgaag

SEQ ID NO: 4713814 - DNA, 25 bp, Homo sapien
tgcaacgcacctgaatgtcactgct

SEQ ID NO: 4713815 - DNA, 25 bp, Homo sapien
gtcactgctcccaacgggtggtcac

SEQ ID NO: 4713816 - DNA, 25 bp, Homo sapien
caggccgtggatgtgctgtgtcacc

SEQ ID NO: 4713817 - DNA, 25 bp, Homo sapien
ccagcgtgaatacgcccaggtgggt

SEQ ID NO: 4713818 - DNA, 25 bp, Homo sapien
tactcatagtagctgtcggccctgg

SEQ ID NO: 4713819 - DNA, 25 bp, Homo sapien
gccctggatccactgcttcagcagg

SEQ ID NO: 4713820 - DNA, 25 bp, Homo sapien
gccacggtgagaggtgaatgaatac

SEQ ID NO: 4713821 - DNA, 25 bp, Homo sapien
gcctggcacggctgcggtttcctga

SEQ ID NO: 4713822 - DNA, 25 bp, Homo sapien
cctgggcccacacaagtacagcagg

SEQ ID NO: 4713823 - DNA, 25 bp, Homo sapien
tggcccttgccggacagaaggtgcc

SEQ ID NO: 4713824 - DNA, 25 bp, Homo sapien
ctgtggacaccagcagtcatctcac

SEQ ID NO: 4713825 - DNA, 25 bp, Homo sapien
ggtgagcttactgggctcggagtgc

SEQ ID NO: 4713826 - DNA, 25 bp, Homo sapien
tgaagcggccgtgggcaagctcccc

SEQ ID NO: 4713827 - DNA, 25 bp, Homo sapien
agcaggtgcgttctgacaccctcga

SEQ ID NO: 4713828 - DNA, 25 bp, Homo sapien
cctcgatggcttccacgtagtcttc

SEQ ID NO: 4713829 - DNA, 25 bp, Homo sapien
tggaatcagagggtctcttcagccc

SEQ ID NO: 4713830 - DNA, 25 bp, Homo sapien
gaatcagagggtctcttcagcccca

SEQ ID NO: 4713831 - DNA, 25 bp, Homo sapien
ctggaatcagagggtctcttcagcc

SEQ ID NO: 4713832 - DNA, 25 bp, Homo sapien
ggaatcagagggtctcttcagcccc

SEQ ID NO: 4713833 - DNA, 25 bp, Homo sapien
ctggcaggaagcacaccaggtggtc

SEQ ID NO: 4713834 - DNA, 25 bp, Homo sapien
gaagtgcacgatctcgggactcagc

SEQ ID NO: 4713835 - DNA, 25 bp, Homo sapien
tgccggttcatctggtaacaagtct

SEQ ID NO: 4713836 - DNA, 25 bp, Homo sapien
taaaggttgaagtgcacgatctcgg

SEQ ID NO: 4713837 - DNA, 25 bp, Homo sapien
gtggtagacgcccagagccagcgtc

SEQ ID NO: 4713838 - DNA, 25 bp, Homo sapien
cagccccagtcctggtatttgcggt

SEQ ID NO: 4713839 - DNA, 25 bp, Homo sapien
cgtgtgaatcggctgaagctctgca

SEQ ID NO: 4713840 - DNA, 25 bp, Homo sapien
cctgtgacgcggtacaggtagaaca

SEQ ID NO: 4713841 - DNA, 25 bp, Homo sapien
tctggccgcagcaggttgtgcctgt

SEQ ID NO: 4713842 - DNA, 25 bp, Homo sapien
ctcaagtgaccacgacagaaaccgc

SEQ ID NO: 4713843 - DNA, 25 bp, Homo sapien
gcgtgacctaaaacagggcctggtc

SEQ ID NO: 4713844 - DNA, 25 bp, Homo sapien
catgggtgcgtgtgcctcctaaact

SEQ ID NO: 4713845 - DNA, 25 bp, Homo sapien
tctgggtcccacaaccatgaagctc

SEQ ID NO: 4713846 - DNA, 25 bp, Homo sapien
tggaagaatagccacccgaggggac

SEQ ID NO: 4713847 - DNA, 25 bp, Homo sapien
tccatcttgtccctaggctcgggct

SEQ ID NO: 4713848 - DNA, 25 bp, Homo sapien
tgggtcatcggagaagagcaagaac

SEQ ID NO: 4713849 - DNA, 25 bp, Homo sapien
agaacagatacttgagcgtctcccc

SEQ ID NO: 4713850 - DNA, 25 bp, Homo sapien
caggtttgggtcatcggagaagagc

SEQ ID NO: 4713851 - DNA, 25 bp, Homo sapien
ctaggcaggggtccagataggcaga

SEQ ID NO: 4713852 - DNA, 25 bp, Homo sapien
gcctctgcccacccgaagtccccac

SEQ ID NO: 4713853 - DNA, 25 bp, Homo sapien
tgcccacccgaagtccccacaccag

SEQ ID NO: 4713854 - DNA, 25 bp, Homo sapien
tgcctctgcccacccgaagtcccca

SEQ ID NO: 4713855 - DNA, 25 bp, Homo sapien
gcccacccgaagtccccacaccagc

SEQ ID NO: 4713856 - DNA, 25 bp, Homo sapien
ctgattaaagcagagacgaggagga

SEQ ID NO: 4713857 - DNA, 25 bp, Homo sapien
gcctgggccacttggcggttgccgg

SEQ ID NO: 4713858 - DNA, 25 bp, Homo sapien
cacttggcggttgccggtgctacgt

SEQ ID NO: 4713859 - DNA, 25 bp, Homo sapien
ggccacttggcggttgccggtgcta

SEQ ID NO: 4713860 - DNA, 25 bp, Homo sapien
cgcatcacaccaagactgacggcct

SEQ ID NO: 4713861 - DNA, 25 bp, Homo sapien
cccgcatcacaccaagactgacggc

SEQ ID NO: 4713862 - DNA, 25 bp, Homo sapien
caccaagactgacggcctcacttgt

SEQ ID NO: 4713863 - DNA, 25 bp, Homo sapien
tcacaccaagactgacggcctcact

SEQ ID NO: 4713864 - DNA, 25 bp, Homo sapien
gaggaagcaggcggaggctccagcg

SEQ ID NO: 4713865 - DNA, 25 bp, Homo sapien
gcaggcggaggctccagcggcccag

SEQ ID NO: 4713866 - DNA, 25 bp, Homo sapien
gaagcaggcggaggctccagcggcc

SEQ ID NO: 4713867 - DNA, 25 bp, Homo sapien
aggaagcaggcggaggctccagcgg

SEQ ID NO: 4713868 - DNA, 25 bp, Homo sapien
gcttcagcaatcgtgagtcatgatt

SEQ ID NO: 4713869 - DNA, 25 bp, Homo sapien
tgctcaggcttcagcaatcgtgagt

SEQ ID NO: 4713870 - DNA, 25 bp, Homo sapien
ctcaggcttcagcaatcgtgagtca

SEQ ID NO: 4713871 - DNA, 25 bp, Homo sapien
caggcttcagcaatcgtgagtcatg

SEQ ID NO: 4713872 - DNA, 25 bp, Homo sapien
atctgaggcttcacgagcccgggca

SEQ ID NO: 4713873 - DNA, 25 bp, Homo sapien
agcccctccagacccttggattggg

SEQ ID NO: 4713874 - DNA, 25 bp, Homo sapien
tcggtcaccccagtaccagggacca

SEQ ID NO: 4713875 - DNA, 25 bp, Homo sapien
tggattggggacatctgaggcttca

SEQ ID NO: 4713876 - DNA, 25 bp, Homo sapien
tgagtccagcttgtaaacaccagag

SEQ ID NO: 4713877 - DNA, 25 bp, Homo sapien
ttatctccaccgaaaagacccattc

SEQ ID NO: 4713878 - DNA, 25 bp, Homo sapien
gcaaatcaacttttatctccaccga

SEQ ID NO: 4713879 - DNA, 25 bp, Homo sapien
tgagctagacggacttgccgtccag

SEQ ID NO: 4713880 - DNA, 25 bp, Homo sapien
ttccgtggttgaggcgcggaagctg

SEQ ID NO: 4713881 - DNA, 25 bp, Homo sapien
gtctcaaggctcctcatggagtggg

SEQ ID NO: 4713882 - DNA, 25 bp, Homo sapien
catcatcggcgagtgggtaaaggca

SEQ ID NO: 4713883 - DNA, 25 bp, Homo sapien
tggaggccaccatcatcggcgagtg

SEQ ID NO: 4713884 - DNA, 25 bp, Homo sapien
gcatcaatgcctgggccgtggacaa

SEQ ID NO: 4713885 - DNA, 25 bp, Homo sapien
tatcgcttggacaaaccctgggttg

SEQ ID NO: 4713886 - DNA, 25 bp, Homo sapien
cttctacactgggaacgagggcgac

SEQ ID NO: 4713887 - DNA, 25 bp, Homo sapien
taaggttacaggttaccagcacagg

SEQ ID NO: 4713888 - DNA, 25 bp, Homo sapien
gggcccaggagacggcgctcagtat

SEQ ID NO: 4713889 - DNA, 25 bp, Homo sapien
caggagacggcgctcagtatacgga

SEQ ID NO: 4713890 - DNA, 25 bp, Homo sapien
gcccaggagacggcgctcagtatac

SEQ ID NO: 4713891 - DNA, 25 bp, Homo sapien
agacggcgctcagtatacggaggac

SEQ ID NO: 4713892 - DNA, 25 bp, Homo sapien
gtctccccgcgaggccgtgggcaaa

SEQ ID NO: 4713893 - DNA, 25 bp, Homo sapien
ggcgctccctgacaacatggcggcg

SEQ ID NO: 4713894 - DNA, 25 bp, Homo sapien
ggctggagccgagtctgaaagcccc

SEQ ID NO: 4713895 - DNA, 25 bp, Homo sapien
tgccgtccgacgacaggaggcgaaa

SEQ ID NO: 4713896 - DNA, 25 bp, Homo sapien
tgtgtgtgcgcgcaagagtcgtcac

SEQ ID NO: 4713897 - DNA, 25 bp, Homo sapien
tttaataggaccgaacgcgtcgtgc

SEQ ID NO: 4713898 - DNA, 25 bp, Homo sapien
tcacccacagtcagcgatatttcgg

SEQ ID NO: 4713899 - DNA, 25 bp, Homo sapien
tctgcgtggccatgtaacttgggac

SEQ ID NO: 4713900 - DNA, 25 bp, Homo sapien
tcagcaccgcgccaatgttgacgat

SEQ ID NO: 4713901 - DNA, 25 bp, Homo sapien
tgaatcttccaggagccgtgccgct

SEQ ID NO: 4713902 - DNA, 25 bp, Homo sapien
tggttcacggcctcgcggaacatct

SEQ ID NO: 4713903 - DNA, 25 bp, Homo sapien
gaacatctgctcgtgcttccgcgtg

SEQ ID NO: 4713904 - DNA, 25 bp, Homo sapien
aagggggcacggaaaggatggaatg

SEQ ID NO: 4713905 - DNA, 25 bp, Homo sapien
gtggggttgcaggatggaggagagg

SEQ ID NO: 4713906 - DNA, 25 bp, Homo sapien
cacggaaaggatggaatgaaactgg

SEQ ID NO: 4713907 - DNA, 25 bp, Homo sapien
gggcacggaaaggatggaatgaaac

SEQ ID NO: 4713908 - DNA, 25 bp, Homo sapien
tgcattgcagatccttgcagcctca

SEQ ID NO: 4713909 - DNA, 25 bp, Homo sapien
atgccctgatgcctctcgcgtgtgc

SEQ ID NO: 4713910 - DNA, 25 bp, Homo sapien
agctccgacaggcaaaatcccagga

SEQ ID NO: 4713911 - DNA, 25 bp, Homo sapien
tgcagcctcattggaattcagcagg

SEQ ID NO: 4713912 - DNA, 25 bp, Homo sapien
cgggggtgtgttccgtgagtggtag

SEQ ID NO: 4713913 - DNA, 25 bp, Homo sapien
gtgtgttccgtgagtggtagctgca

SEQ ID NO: 4713914 - DNA, 25 bp, Homo sapien
tggccgggggtgtgttccgtgagtg

SEQ ID NO: 4713915 - DNA, 25 bp, Homo sapien
ggggtgtgttccgtgagtggtagct

SEQ ID NO: 4713916 - DNA, 25 bp, Homo sapien
ccagcacgggtatgcggtagaagcc

SEQ ID NO: 4713917 - DNA, 25 bp, Homo sapien
ggtagaagccggctgtgtaggagac

SEQ ID NO: 4713918 - DNA, 25 bp, Homo sapien
atggacatgcgggtggtcagcccca

SEQ ID NO: 4713919 - DNA, 25 bp, Homo sapien
gatggctaactaggatggcgtagac

SEQ ID NO: 4713920 - DNA, 25 bp, Homo sapien
tggtggcaaggcaggctgtgcttga

SEQ ID NO: 4713921 - DNA, 25 bp, Homo sapien
tagtgtagagactgtggtaaggcca

SEQ ID NO: 4713922 - DNA, 25 bp, Homo sapien
ttttgggcacaggttggttgtagtg

SEQ ID NO: 4713923 - DNA, 25 bp, Homo sapien
tctgacctggccttgccggttcatg

SEQ ID NO: 4713924 - DNA, 25 bp, Homo sapien
ggatgatgtggttccagctgtagac

SEQ ID NO: 4713925 - DNA, 25 bp, Homo sapien
aaaccacacgctggactggtgggag

SEQ ID NO: 4713926 - DNA, 25 bp, Homo sapien
gcgtctccaggcgtttctgagccgc

SEQ ID NO: 4713927 - DNA, 25 bp, Homo sapien
cagctgtagacacgcatcatctcaa

SEQ ID NO: 4713928 - DNA, 25 bp, Homo sapien
cagggactgacacgaaggagatttc

SEQ ID NO: 4713929 - DNA, 25 bp, Homo sapien
caaaagcgagtgaaatgagccgagg

SEQ ID NO: 4713930 - DNA, 25 bp, Homo sapien
gtggtgctgaccatgcacgatggaa

SEQ ID NO: 4713931 - DNA, 25 bp, Homo sapien
gagatttcgactaatggcaaaagcg

SEQ ID NO: 4713932 - DNA, 25 bp, Homo sapien
cagggtgggcgggaagggtgacgag

SEQ ID NO: 4713933 - DNA, 25 bp, Homo sapien
ctccagggagcgaggggcatgggca

SEQ ID NO: 4713934 - DNA, 25 bp, Homo sapien
ggactcaggacagggtgggcgggaa

SEQ ID NO: 4713935 - DNA, 25 bp, Homo sapien
agggtgacgagtcccaagcccggct

SEQ ID NO: 4713936 - DNA, 25 bp, Homo sapien
gaagccagctctgacacgaaacatg

SEQ ID NO: 4713937 - DNA, 25 bp, Homo sapien
gggtcagtgtgtcctagaaccaggt

SEQ ID NO: 4713938 - DNA, 25 bp, Homo sapien
ggccctaagtccgatgaagccagct

SEQ ID NO: 4713939 - DNA, 25 bp, Homo sapien
ggtctgtagccgagaaccagctctg

SEQ ID NO: 4713940 - DNA, 25 bp, Homo sapien
tgaggggcctgtcgagcgctggggt

SEQ ID NO: 4713941 - DNA, 25 bp, Homo sapien
gtgaggggcctgtcgagcgctgggg

SEQ ID NO: 4713942 - DNA, 25 bp, Homo sapien
aagcaggcagttgggtgcgcagggg

SEQ ID NO: 4713943 - DNA, 25 bp, Homo sapien
aaagcaggcagttgggtgcgcaggg

SEQ ID NO: 4713944 - DNA, 25 bp, Homo sapien
agtgaaagcaggcagttgggtgcgc

SEQ ID NO: 4713945 - DNA, 25 bp, Homo sapien
tgaaagcaggcagttgggtgcgcag

SEQ ID NO: 4713946 - DNA, 25 bp, Homo sapien
ggtgtgtgtgtggcgctggagctgc

SEQ ID NO: 4713947 - DNA, 25 bp, Homo sapien
gctgcatggaggcaagcctgagcct

SEQ ID NO: 4713948 - DNA, 25 bp, Homo sapien
tggcgcaagtaagggtgagcatgca

SEQ ID NO: 4713949 - DNA, 25 bp, Homo sapien
gcgcacctgagcgtgtgtccaggtg

SEQ ID NO: 4713950 - DNA, 25 bp, Homo sapien
gtctgtgctggctggcgcaagtaag

SEQ ID NO: 4713951 - DNA, 25 bp, Homo sapien
gcatgcacatgaggagcgcacctga

SEQ ID NO: 4713952 - DNA, 25 bp, Homo sapien
tggaaacggtcgctctcgggagaaa

SEQ ID NO: 4713953 - DNA, 25 bp, Homo sapien
cagcatgggagggttagtccacaaa

SEQ ID NO: 4713954 - DNA, 25 bp, Homo sapien
caacctgtgtcagtcctgagtggga

SEQ ID NO: 4713955 - DNA, 25 bp, Homo sapien
cgcatatgcgcccaagagggtgtgt

SEQ ID NO: 4713956 - DNA, 25 bp, Homo sapien
atgacggcgctaaagcaatcacacc

SEQ ID NO: 4713957 - DNA, 25 bp, Homo sapien
cagaagaagattataaacggttgaa

SEQ ID NO: 4713958 - DNA, 25 bp, Homo sapien
ggttgaaaatgacggcgctaaagca

SEQ ID NO: 4713959 - DNA, 25 bp, Homo sapien
tataaacggttgaaaatgacggcgc

SEQ ID NO: 4713960 - DNA, 25 bp, Homo sapien
cagttggtcgaggttttcatagttc

SEQ ID NO: 4713961 - DNA, 25 bp, Homo sapien
tgttgtcataggacagttggtcgag

SEQ ID NO: 4713962 - DNA, 25 bp, Homo sapien
cttgggtccgcgcttgttgtcatag

SEQ ID NO: 4713963 - DNA, 25 bp, Homo sapien
tgggtccgcgcttgttgtcatagga

SEQ ID NO: 4713964 - DNA, 25 bp, Homo sapien
tctgaggtttgattccgcaggcccc

SEQ ID NO: 4713965 - DNA, 25 bp, Homo sapien
tgagcatgcaagctgaagtggaccc

SEQ ID NO: 4713966 - DNA, 25 bp, Homo sapien
agattcgcatgcacttcccggagag

SEQ ID NO: 4713967 - DNA, 25 bp, Homo sapien
tggcgtgcacgtccatgcatatata

SEQ ID NO: 4713968 - DNA, 25 bp, Homo sapien
cctccagctctttcgcctccatcag

SEQ ID NO: 4713969 - DNA, 25 bp, Homo sapien
agggccgtcacgttcttggtccctg

SEQ ID NO: 4713970 - DNA, 25 bp, Homo sapien
tcagcagggccgtcacgttcttggt

SEQ ID NO: 4713971 - DNA, 25 bp, Homo sapien
agctctttcgcctccatcagcaggg

SEQ ID NO: 4713972 - DNA, 25 bp, Homo sapien
gacaagcccgtcttcttgacgcaat

SEQ ID NO: 4713973 - DNA, 25 bp, Homo sapien
gcctgacagacaagcccgtcttctt

SEQ ID NO: 4713974 - DNA, 25 bp, Homo sapien
ccgtcttcttgacgcaattcaggtc

SEQ ID NO: 4713975 - DNA, 25 bp, Homo sapien
acagacaagcccgtcttcttgacgc

SEQ ID NO: 4713976 - DNA, 25 bp, Homo sapien
tgagctctgccagtgtgcttgcagg

SEQ ID NO: 4713977 - DNA, 25 bp, Homo sapien
caggcatgtgtggtcttgagctctg

SEQ ID NO: 4713978 - DNA, 25 bp, Homo sapien
cttgcaggcatgtgtggtcttgagc

SEQ ID NO: 4713979 - DNA, 25 bp, Homo sapien
ctgccagtgtgcttgcaggtgggcc

SEQ ID NO: 4713980 - DNA, 25 bp, Homo sapien
tggggttagatgctggcccccttac

SEQ ID NO: 4713981 - DNA, 25 bp, Homo sapien
ggagcagggatggggttagatgctg

SEQ ID NO: 4713982 - DNA, 25 bp, Homo sapien
gatggggttagatgctggccccctt

SEQ ID NO: 4713983 - DNA, 25 bp, Homo sapien
gcagggatggggttagatgctggcc

SEQ ID NO: 4713984 - DNA, 25 bp, Homo sapien
ctcctagagcgaagcctgcagacct

SEQ ID NO: 4713985 - DNA, 25 bp, Homo sapien
aggcgctgcggcccagaacccagga

SEQ ID NO: 4713986 - DNA, 25 bp, Homo sapien
gggatgacgggccaggactccagca

SEQ ID NO: 4713987 - DNA, 25 bp, Homo sapien
ccaggcctccgttgctggctcttac

SEQ ID NO: 4713988 - DNA, 25 bp, Homo sapien
tcagcatcgcggctgcgcggtatac

SEQ ID NO: 4713989 - DNA, 25 bp, Homo sapien
agggcgttccccgagatctcgcgct

SEQ ID NO: 4713990 - DNA, 25 bp, Homo sapien
acacgtacccggagcccgtcatgtt

SEQ ID NO: 4713991 - DNA, 25 bp, Homo sapien
ctgcgcggtatacagtggcagcatc

SEQ ID NO: 4713992 - DNA, 25 bp, Homo sapien
ggcgagcatgcgactcagagcccgt

SEQ ID NO: 4713993 - DNA, 25 bp, Homo sapien
cgagcatgcgactcagagcccgtgg

SEQ ID NO: 4713994 - DNA, 25 bp, Homo sapien
aggcgagcatgcgactcagagcccg

SEQ ID NO: 4713995 - DNA, 25 bp, Homo sapien
ctaggcgagcatgcgactcagagcc

SEQ ID NO: 4713996 - DNA, 25 bp, Homo sapien
ccagatgttggtgttgcccacgcag

SEQ ID NO: 4713997 - DNA, 25 bp, Homo sapien
tctcgaggagctcgtgcacggcctg

SEQ ID NO: 4713998 - DNA, 25 bp, Homo sapien
cgtcgctgatgtgggccgactcgtt

SEQ ID NO: 4713999 - DNA, 25 bp, Homo sapien
gccgactcgttcttgccgttgatga

SEQ ID NO: 4714000 - DNA, 25 bp, Homo sapien
tcattgaactccacgcgaccagtca

SEQ ID NO: 4714001 - DNA, 25 bp, Homo sapien
gatgctgtagttggcgaacttccgg

SEQ ID NO: 4714002 - DNA, 25 bp, Homo sapien
ccgcatacttggaagacatcagcac

SEQ ID NO: 4714003 - DNA, 25 bp, Homo sapien
gtagatgcccacttgcaccagcttg

SEQ ID NO: 4714004 - DNA, 25 bp, Homo sapien
gtgggagtatgagatggagggtggc

SEQ ID NO: 4714005 - DNA, 25 bp, Homo sapien
ggagtatgagatggagggtggccac

SEQ ID NO: 4714006 - DNA, 25 bp, Homo sapien
agtatgagatggagggtggccacgc

SEQ ID NO: 4714007 - DNA, 25 bp, Homo sapien
gtggccacgcaggggtcttggcccc

SEQ ID NO: 4714008 - DNA, 25 bp, Homo sapien
tggtggacatctggtaccctcgagg

SEQ ID NO: 4714009 - DNA, 25 bp, Homo sapien
gatgatcttcctgtcattagggatg

SEQ ID NO: 4714010 - DNA, 25 bp, Homo sapien
tggtaccctcgaggcttctctgtct

SEQ ID NO: 4714011 - DNA, 25 bp, Homo sapien
cctggccagatgatcttcctgtcat

SEQ ID NO: 4714012 - DNA, 25 bp, Homo sapien
ggggacactgagggaggtctgtggg

SEQ ID NO: 4714013 - DNA, 25 bp, Homo sapien
gatcaccttcttgactgggtcgccg

SEQ ID NO: 4714014 - DNA, 25 bp, Homo sapien
tgacgtacacgaagggctcctggtg

SEQ ID NO: 4714015 - DNA, 25 bp, Homo sapien
tgggtcgccgttgactgtgaactcc

SEQ ID NO: 4714016 - DNA, 25 bp, Homo sapien
tgcatgtcccatcactcagcgtggg

SEQ ID NO: 4714017 - DNA, 25 bp, Homo sapien
ccagcttgatgagcaggtcgatgca

SEQ ID NO: 4714018 - DNA, 25 bp, Homo sapien
tagcaacactgaggcaccgtgtggc

SEQ ID NO: 4714019 - DNA, 25 bp, Homo sapien
tgtgtgccgaacttgccatctgcca

SEQ ID NO: 4714020 - DNA, 25 bp, Homo sapien
taggtgaagttcatggtccgtgcca

SEQ ID NO: 4714021 - DNA, 25 bp, Homo sapien
ggttagcggcgccacgatcatgtct

SEQ ID NO: 4714022 - DNA, 25 bp, Homo sapien
gaaaactcgatgtactgcgcgcgct

SEQ ID NO: 4714023 - DNA, 25 bp, Homo sapien
tcttgaccagaatagtcaggccctg

SEQ ID NO: 4714024 - DNA, 25 bp, Homo sapien
ctcgttgtttatggttagcggcgcc

SEQ ID NO: 4714025 - DNA, 25 bp, Homo sapien
tggaacggctgcatgaacgagtcca

SEQ ID NO: 4714026 - DNA, 25 bp, Homo sapien
atgaacgagtccagcgtgctccggg

SEQ ID NO: 4714027 - DNA, 25 bp, Homo sapien
gtccagcaggtacagcatcacggcc

SEQ ID NO: 4714028 - DNA, 25 bp, Homo sapien
tcacggccaccacgtgcaccgacag

SEQ ID NO: 4714029 - DNA, 25 bp, Homo sapien
gcgggcgggagagagggcgggagag

SEQ ID NO: 4714030 - DNA, 25 bp, Homo sapien
tgcggggcgcagagggcgggcggga

SEQ ID NO: 4714031 - DNA, 25 bp, Homo sapien
gggagagagggcgggagaggcggcc

SEQ ID NO: 4714032 - DNA, 25 bp, Homo sapien
ctgcggggcgcagagggcgggcggg

SEQ ID NO: 4714033 - DNA, 25 bp, Homo sapien
gctgttcaccttgaaccggccgaag

SEQ ID NO: 4714034 - DNA, 25 bp, Homo sapien
ctgttcaccttgaaccggccgaagg

SEQ ID NO: 4714035 - DNA, 25 bp, Homo sapien
cttccccgatgccggagttgagcag

SEQ ID NO: 4714036 - DNA, 25 bp, Homo sapien
ttccccgatgccggagttgagcagg

SEQ ID NO: 4714037 - DNA, 25 bp, Homo sapien
ccaggttggcggtgtaggaggccac

SEQ ID NO: 4714038 - DNA, 25 bp, Homo sapien
ccaggatgcgcgctgagaagcttct

SEQ ID NO: 4714039 - DNA, 25 bp, Homo sapien
tcgttgatgcccgtgatgcgctcct

SEQ ID NO: 4714040 - DNA, 25 bp, Homo sapien
atgatcatggcaaagccggcccaca

SEQ ID NO: 4714041 - DNA, 25 bp, Homo sapien
cctggcgccggaagtagatatccac

SEQ ID NO: 4714042 - DNA, 25 bp, Homo sapien
actctcgtagttgtgcttctccata

SEQ ID NO: 4714043 - DNA, 25 bp, Homo sapien
tggcgtagataaacttgtccgaggg

SEQ ID NO: 4714044 - DNA, 25 bp, Homo sapien
catatgccggtacatggtgctcagc

SEQ ID NO: 4714045 - DNA, 25 bp, Homo sapien
gacagggagacgttctgcttccagg

SEQ ID NO: 4714046 - DNA, 25 bp, Homo sapien
gaagcccgagcggaaaaacagctct

SEQ ID NO: 4714047 - DNA, 25 bp, Homo sapien
gtcaccaggtcgcacttctgcgagg

SEQ ID NO: 4714048 - DNA, 25 bp, Homo sapien
gagtcccagatgaaggcatgcagct

SEQ ID NO: 4714049 - DNA, 25 bp, Homo sapien
gagtcacattcctgataccgaaccc

SEQ ID NO: 4714050 - DNA, 25 bp, Homo sapien
tctcaaaagtaagggtcgcaggggc

SEQ ID NO: 4714051 - DNA, 25 bp, Homo sapien
gaacccacgtcttgtccaggtcttc

SEQ ID NO: 4714052 - DNA, 25 bp, Homo sapien
gcgttgctgcgcgagtcacattcct

SEQ ID NO: 4714053 - DNA, 25 bp, Homo sapien
ccttgtgccgcttgtaggcaatctc

SEQ ID NO: 4714054 - DNA, 25 bp, Homo sapien
tgcttccggcgagcatccttgtgcc

SEQ ID NO: 4714055 - DNA, 25 bp, Homo sapien
gccacacgttaacggcggcaaaggc

SEQ ID NO: 4714056 - DNA, 25 bp, Homo sapien
taggcaatctcgatgaaaatcagga

SEQ ID NO: 4714057 - DNA, 25 bp, Homo sapien
gccagtgccacggccttcggggatg

SEQ ID NO: 4714058 - DNA, 25 bp, Homo sapien
ctgtgcccgccagtgctggcagcgg

SEQ ID NO: 4714059 - DNA, 25 bp, Homo sapien
caggtggcctgtgcccgccagtgct

SEQ ID NO: 4714060 - DNA, 25 bp, Homo sapien
gtggcctgtgcccgccagtgctggc

SEQ ID NO: 4714061 - DNA, 25 bp, Homo sapien
cgccagtgctggcagcggccaggtc

SEQ ID NO: 4714062 - DNA, 25 bp, Homo sapien
tagatggctagggtggtggccacac

SEQ ID NO: 4714063 - DNA, 25 bp, Homo sapien
gaatatgtataagtgattagatggc

SEQ ID NO: 4714064 - DNA, 25 bp, Homo sapien
tataagtgattagatggctagggtg

SEQ ID NO: 4714065 - DNA, 25 bp, Homo sapien
aaaatgaatatgtataagtgattag

SEQ ID NO: 4714066 - DNA, 25 bp, Homo sapien
gtcaggctctgctctaccactcttt

SEQ ID NO: 4714067 - DNA, 25 bp, Homo sapien
ctacgcctcttgaagctggaagcca

SEQ ID NO: 4714068 - DNA, 25 bp, Homo sapien
gaggtgatagccctaaatgtggctt

SEQ ID NO: 4714069 - DNA, 25 bp, Homo sapien
tctttttagggtcaggctctgctct

SEQ ID NO: 4714070 - DNA, 25 bp, Homo sapien
tctcaatagcgcgtcgcggcagcac

SEQ ID NO: 4714071 - DNA, 25 bp, Homo sapien
ttggttttgcaaagcgccgcgtcca

SEQ ID NO: 4714072 - DNA, 25 bp, Homo sapien
gcgcgtcgcggcagcactgtgtctt

SEQ ID NO: 4714073 - DNA, 25 bp, Homo sapien
tccctatgacgggaacacagctgca

SEQ ID NO: 4714074 - DNA, 25 bp, Homo sapien
ccccgtggtgctccggggctctgcg

SEQ ID NO: 4714075 - DNA, 25 bp, Homo sapien
atacacagacaaggcgcccgttagc

SEQ ID NO: 4714076 - DNA, 25 bp, Homo sapien
tggaccggccagccggccaaccggc

SEQ ID NO: 4714077 - DNA, 25 bp, Homo sapien
aggcgcccgttagccccacgctggg

SEQ ID NO: 4714078 - DNA, 25 bp, Homo sapien
cccgtgatatcagtgggatggtact

SEQ ID NO: 4714079 - DNA, 25 bp, Homo sapien
ggtgctgaccgagggatctgagagg

SEQ ID NO: 4714080 - DNA, 25 bp, Homo sapien
tgagcgggcccgtgatatcagtggg

SEQ ID NO: 4714081 - DNA, 25 bp, Homo sapien
ctgagaggttgagcgggcccgtgat

SEQ ID NO: 4714082 - DNA, 25 bp, Homo sapien
atcagtgtccttggccgggctaact

SEQ ID NO: 4714083 - DNA, 25 bp, Homo sapien
tccttggccgggctaactgggcagg

SEQ ID NO: 4714084 - DNA, 25 bp, Homo sapien
tgtccttggccgggctaactgggca

SEQ ID NO: 4714085 - DNA, 25 bp, Homo sapien
tggccgggctaactgggcaggtggg

SEQ ID NO: 4714086 - DNA, 25 bp, Homo sapien
gggctcagccctctcgagtctggag

SEQ ID NO: 4714087 - DNA, 25 bp, Homo sapien
agctgggaagtcagggacggccgtg

SEQ ID NO: 4714088 - DNA, 25 bp, Homo sapien
aggctgcagaggagcgcaggcgccc

SEQ ID NO: 4714089 - DNA, 25 bp, Homo sapien
ctgccccgtcctcagccgctccggt

SEQ ID NO: 4714090 - DNA, 25 bp, Homo sapien
accactgcatacaccgggaggtggg

SEQ ID NO: 4714091 - DNA, 25 bp, Homo sapien
agggttgaagacagtcccgagccag

SEQ ID NO: 4714092 - DNA, 25 bp, Homo sapien
ttctgtacaaggtggcgggccggtc

SEQ ID NO: 4714093 - DNA, 25 bp, Homo sapien
cccgtgcccaaggtgcagggcaggg

SEQ ID NO: 4714094 - DNA, 25 bp, Homo sapien
ggcgctgccctgcaggtgctctcgt

SEQ ID NO: 4714095 - DNA, 25 bp, Homo sapien
cgtgtcccagaatgcactgctgagg

SEQ ID NO: 4714096 - DNA, 25 bp, Homo sapien
gcccgcccgtgtcccagaatgcact

SEQ ID NO: 4714097 - DNA, 25 bp, Homo sapien
aatgcactgctgaggagcatgccca

SEQ ID NO: 4714098 - DNA, 25 bp, Homo sapien
gcgtcatcgctgagcgccttgtgcg

SEQ ID NO: 4714099 - DNA, 25 bp, Homo sapien
ggctgcgcgtgcagacgtgcgtcat

SEQ ID NO: 4714100 - DNA, 25 bp, Homo sapien
ccttgtgcgcgtcatggctgcgcgt

SEQ ID NO: 4714101 - DNA, 25 bp, Homo sapien
acggcgcgccgaactagcgcgtcat

SEQ ID NO: 4714102 - DNA, 25 bp, Homo sapien
cttgaccagctcgttgttgtagttc

SEQ ID NO: 4714103 - DNA, 25 bp, Homo sapien
acttgaccagctcgttgttgtagtt

SEQ ID NO: 4714104 - DNA, 25 bp, Homo sapien
ctccccgtcccggctgcgccgctca

SEQ ID NO: 4714105 - DNA, 25 bp, Homo sapien
tccccgtcccggctgcgccgctcac

SEQ ID NO: 4714106 - DNA, 25 bp, Homo sapien
cctccggcacggagggctctgctca

SEQ ID NO: 4714107 - DNA, 25 bp, Homo sapien
tgcgagccagcgagggctcgggcca

SEQ ID NO: 4714108 - DNA, 25 bp, Homo sapien
gcaccccgctgcgagccgggaaccc

SEQ ID NO: 4714109 - DNA, 25 bp, Homo sapien
tcagccgcgcgatgcccgcagcgag

SEQ ID NO: 4714110 - DNA, 25 bp, Homo sapien
agctcctcccgcttctggcacagct

SEQ ID NO: 4714111 - DNA, 25 bp, Homo sapien
gcagccgctgcttctcgtcctcctc

SEQ ID NO: 4714112 - DNA, 25 bp, Homo sapien
cggcacagctcctcccgcttctggc

SEQ ID NO: 4714113 - DNA, 25 bp, Homo sapien
tcctcctggatctgccggcacagct

SEQ ID NO: 4714114 - DNA, 25 bp, Homo sapien
ggtcgaactcgttgcgagaggcaat

SEQ ID NO: 4714115 - DNA, 25 bp, Homo sapien
tccggtcgaactcgttgcgagaggc

SEQ ID NO: 4714116 - DNA, 25 bp, Homo sapien
tctccgcgatggtccggtcgaactc

SEQ ID NO: 4714117 - DNA, 25 bp, Homo sapien
gatggtccggtcgaactcgttgcga

SEQ ID NO: 4714118 - DNA, 25 bp, Homo sapien
cctatcccctgatgctcggcctggc

SEQ ID NO: 4714119 - DNA, 25 bp, Homo sapien
gtcctgacgccttgccgtggcaaca

SEQ ID NO: 4714120 - DNA, 25 bp, Homo sapien
ccagccggtcctgacgccttgccgt

SEQ ID NO: 4714121 - DNA, 25 bp, Homo sapien
gagccccagccggtcctgacgcctt

SEQ ID NO: 4714122 - DNA, 25 bp, Homo sapien
cggtcctgacgccttgccgtggcaa

SEQ ID NO: 4714123 - DNA, 25 bp, Homo sapien
gcccgaaatgccagcgaggcacaga

SEQ ID NO: 4714124 - DNA, 25 bp, Homo sapien
cccgaaatgccagcgaggcacagac

SEQ ID NO: 4714125 - DNA, 25 bp, Homo sapien
tgcccgaaatgccagcgaggcacag

SEQ ID NO: 4714126 - DNA, 25 bp, Homo sapien
ctgcccgaaatgccagcgaggcaca

SEQ ID NO: 4714127 - DNA, 25 bp, Homo sapien
tcttccctccggaatctgacccaaa

SEQ ID NO: 4714128 - DNA, 25 bp, Homo sapien
aagccaggctgggttagcactggcc

SEQ ID NO: 4714129 - DNA, 25 bp, Homo sapien
tgtgtgggggaaggcggaagcccaa

SEQ ID NO: 4714130 - DNA, 25 bp, Homo sapien
gttagcactggcccgtgctgggtgc

SEQ ID NO: 4714131 - DNA, 25 bp, Homo sapien
tgttggtaaggtcctaagccccagc

SEQ ID NO: 4714132 - DNA, 25 bp, Homo sapien
ctgttggtaaggtcctaagccccag

SEQ ID NO: 4714133 - DNA, 25 bp, Homo sapien
aagtgagaaggttgttaatgttcac

SEQ ID NO: 4714134 - DNA, 25 bp, Homo sapien
gaagtgagaaggttgttaatgttca

SEQ ID NO: 4714135 - DNA, 25 bp, Homo sapien
gggccagagaagtgagaaggttgtt

SEQ ID NO: 4714136 - DNA, 25 bp, Homo sapien
cagagaagtgagaaggttgttaatg

SEQ ID NO: 4714137 - DNA, 25 bp, Homo sapien
cagcttccctcttgagaacgctgag

SEQ ID NO: 4714138 - DNA, 25 bp, Homo sapien
cccagcttccctcttgagaacgctg

SEQ ID NO: 4714139 - DNA, 25 bp, Homo sapien
ccagcttccctcttgagaacgctga

SEQ ID NO: 4714140 - DNA, 25 bp, Homo sapien
ctgtgtgagcatgaagcgaggaccc

SEQ ID NO: 4714141 - DNA, 25 bp, Homo sapien
aagaacaaagatgctctgagcacac

SEQ ID NO: 4714142 - DNA, 25 bp, Homo sapien
tggtgctcagacaaccagagcctcc

SEQ ID NO: 4714143 - DNA, 25 bp, Homo sapien
acagtgagggaaggtagctgctgcc

SEQ ID NO: 4714144 - DNA, 25 bp, Homo sapien
gaacccctctgacacttggaaactg

SEQ ID NO: 4714145 - DNA, 25 bp, Homo sapien
ggtttgatgccagtcaggtgccaca

SEQ ID NO: 4714146 - DNA, 25 bp, Homo sapien
gagaggctctctagtctgaaggcac

SEQ ID NO: 4714147 - DNA, 25 bp, Homo sapien
gaataagagcacgattagagtcctg

SEQ ID NO: 4714148 - DNA, 25 bp, Homo sapien
cgccgggcctcgcgacccagtctct

SEQ ID NO: 4714149 - DNA, 25 bp, Homo sapien
ccgggcctcgcgacccagtctctcc

SEQ ID NO: 4714150 - DNA, 25 bp, Homo sapien
gccgggcctcgcgacccagtctctc

SEQ ID NO: 4714151 - DNA, 25 bp, Homo sapien
ggcgccgggcctcgcgacccagtct

SEQ ID NO: 4714152 - DNA, 25 bp, Homo sapien
gagggatttatgtgagcagccagac

SEQ ID NO: 4714153 - DNA, 25 bp, Homo sapien
gctctcagagaaaatgcgacgcctt

SEQ ID NO: 4714154 - DNA, 25 bp, Homo sapien
cacgtaagacctccggctgtaagga

SEQ ID NO: 4714155 - DNA, 25 bp, Homo sapien
tccgccataagggaaagacccgctc

SEQ ID NO: 4714156 - DNA, 25 bp, Homo sapien
gcacaaacaaatatcaccaggggct

SEQ ID NO: 4714157 - DNA, 25 bp, Homo sapien
caaatatcaccaggggctcgttaat

SEQ ID NO: 4714158 - DNA, 25 bp, Homo sapien
tatcaccaggggctcgttaatcaga

SEQ ID NO: 4714159 - DNA, 25 bp, Homo sapien
ccaggggctcgttaatcagattcac

SEQ ID NO: 4714160 - DNA, 25 bp, Homo sapien
ccacctctgaaggtgcatgagataa

SEQ ID NO: 4714161 - DNA, 25 bp, Homo sapien
atttactgcacctagacgccaggca

SEQ ID NO: 4714162 - DNA, 25 bp, Homo sapien
tattagagagggcaaccggagcccc

SEQ ID NO: 4714163 - DNA, 25 bp, Homo sapien
ccccactcacggacgttctctcaaa

SEQ ID NO: 4714164 - DNA, 25 bp, Homo sapien
agggggccactggtgcgcagcctgg

SEQ ID NO: 4714165 - DNA, 25 bp, Homo sapien
ggcattctagatggggtcccgggag

SEQ ID NO: 4714166 - DNA, 25 bp, Homo sapien
gtgctgggggtggtcacacagccgt

SEQ ID NO: 4714167 - DNA, 25 bp, Homo sapien
ggacagagcagcacgtatcagctgg

SEQ ID NO: 4714168 - DNA, 25 bp, Homo sapien
gctgccagctggttccctgccccgt

SEQ ID NO: 4714169 - DNA, 25 bp, Homo sapien
ggctgccagctggttccctgccccg

SEQ ID NO: 4714170 - DNA, 25 bp, Homo sapien
ctggacagagttggagctaggccac

SEQ ID NO: 4714171 - DNA, 25 bp, Homo sapien
ttggagctaggccactagaccaccc

SEQ ID NO: 4714172 - DNA, 25 bp, Homo sapien
gagagggctgtatgtccctcacgcc

SEQ ID NO: 4714173 - DNA, 25 bp, Homo sapien
tgtccctcacgccacactgtgtgtg

SEQ ID NO: 4714174 - DNA, 25 bp, Homo sapien
cccgtggatgctcagcggccaggca

SEQ ID NO: 4714175 - DNA, 25 bp, Homo sapien
cttgttaactagttaagcactatgc

SEQ ID NO: 4714176 - DNA, 25 bp, Homo sapien
gctagttacagtgtaggcaccccgg

SEQ ID NO: 4714177 - DNA, 25 bp, Homo sapien
tgccatgcctcgcctggaggctcag

SEQ ID NO: 4714178 - DNA, 25 bp, Homo sapien
tgcggcgcggctaccccggcggagg

SEQ ID NO: 4714179 - DNA, 25 bp, Homo sapien
agcccgagcccgagcgcgacccccg

SEQ ID NO: 4714180 - DNA, 25 bp, Homo sapien
gagcccgagcgagaccccgagcccg

SEQ ID NO: 4714181 - DNA, 25 bp, Homo sapien
gccggagcccgagcgagaccccgag

SEQ ID NO: 4714182 - DNA, 25 bp, Homo sapien
tcgaggaactgggagcaattaagcc

SEQ ID NO: 4714183 - DNA, 25 bp, Homo sapien
cagaacaaaggccaagtcgaggaac

SEQ ID NO: 4714184 - DNA, 25 bp, Homo sapien
aaatgtcaggctggcatcagagctc

SEQ ID NO: 4714185 - DNA, 25 bp, Homo sapien
tcagagctccgagaacatgcacacg

SEQ ID NO: 4714186 - DNA, 25 bp, Homo sapien
gggtcacagcagttcgaagtcctgg

SEQ ID NO: 4714187 - DNA, 25 bp, Homo sapien
aactcaattttgttcagcccttggg

SEQ ID NO: 4714188 - DNA, 25 bp, Homo sapien
gaagtcctgggcacatgtaatgcag

SEQ ID NO: 4714189 - DNA, 25 bp, Homo sapien
aggacacaggatgcccctactaggg

SEQ ID NO: 4714190 - DNA, 25 bp, Homo sapien
ccctgtactctgaggagcggaacta

SEQ ID NO: 4714191 - DNA, 25 bp, Homo sapien
agcggaactacagccagatgcggat

SEQ ID NO: 4714192 - DNA, 25 bp, Homo sapien
tagaagaggccaatgccggtcaact

SEQ ID NO: 4714193 - DNA, 25 bp, Homo sapien
tccctcagtacctccagaaggaagg

SEQ ID NO: 4714194 - DNA, 25 bp, Homo sapien
aaagaagcggttgcttgttggccct

SEQ ID NO: 4714195 - DNA, 25 bp, Homo sapien
cctgaacttgaataaatacccttgg

SEQ ID NO: 4714196 - DNA, 25 bp, Homo sapien
caatacttgataaagaatgatctgc

SEQ ID NO: 4714197 - DNA, 25 bp, Homo sapien
cttagccggtctttcccagcatctg

SEQ ID NO: 4714198 - DNA, 25 bp, Homo sapien
ggtaccgacgctgatgtcggacgta

SEQ ID NO: 4714199 - DNA, 25 bp, Homo sapien
tggtgtctggcacgccctttggcga

SEQ ID NO: 4714200 - DNA, 25 bp, Homo sapien
gacgctggtgagctggtccgtgagc

SEQ ID NO: 4714201 - DNA, 25 bp, Homo sapien
aagcccgctcaggttggtgtctggc

SEQ ID NO: 4714202 - DNA, 25 bp, Homo sapien
ttcaccttctccagagagttcctgg

SEQ ID NO: 4714203 - DNA, 25 bp, Homo sapien
tagtcctctggccacggggaaaagc

SEQ ID NO: 4714204 - DNA, 25 bp, Homo sapien
cagagagttcctggtagtcctctgg

SEQ ID NO: 4714205 - DNA, 25 bp, Homo sapien
ctggtagtcctctggccacggggaa

SEQ ID NO: 4714206 - DNA, 25 bp, Homo sapien
caagtgtgcaaaccagcatagctgc

SEQ ID NO: 4714207 - DNA, 25 bp, Homo sapien
gcagctactcaatgtggccatctag

SEQ ID NO: 4714208 - DNA, 25 bp, Homo sapien
tagtggttgcctgttagaacgcgcg

SEQ ID NO: 4714209 - DNA, 25 bp, Homo sapien
tatttcagctttatgggccacgtgg

SEQ ID NO: 4714210 - DNA, 25 bp, Homo sapien
ccatgcttcctgtcgtgggagatga

SEQ ID NO: 4714211 - DNA, 25 bp, Homo sapien
catgcttcctgtcgtgggagatgaa

SEQ ID NO: 4714212 - DNA, 25 bp, Homo sapien
tgaagtgtggctcggtggatggccc

SEQ ID NO: 4714213 - DNA, 25 bp, Homo sapien
atgcttcctgtcgtgggagatgaag

SEQ ID NO: 4714214 - DNA, 25 bp, Homo sapien
tgcatgaaacctcgcactggagcct

SEQ ID NO: 4714215 - DNA, 25 bp, Homo sapien
gaaccaagcgctaggtccttgcatg

SEQ ID NO: 4714216 - DNA, 25 bp, Homo sapien
gctcggatgcattcaggcagaacca

SEQ ID NO: 4714217 - DNA, 25 bp, Homo sapien
tctgctcggaaaggacgtaacaagc

SEQ ID NO: 4714218 - DNA, 25 bp, Homo sapien
aataatcttggacccagcacgtccg

SEQ ID NO: 4714219 - DNA, 25 bp, Homo sapien
cactgcctgtgttcgtccgccaggt

SEQ ID NO: 4714220 - DNA, 25 bp, Homo sapien
gatgagtgatcgctctcagcgcggt

SEQ ID NO: 4714221 - DNA, 25 bp, Homo sapien
tcgcggtgcccaaattaatcaataa

SEQ ID NO: 4714222 - DNA, 25 bp, Homo sapien
acccggcctcgaccttgctccgctt

SEQ ID NO: 4714223 - DNA, 25 bp, Homo sapien
ctggaccggagaccccacacgagct

SEQ ID NO: 4714224 - DNA, 25 bp, Homo sapien
cgaccgctgcgtcgcagcaagagcg

SEQ ID NO: 4714225 - DNA, 25 bp, Homo sapien
ggagaccccacacgagctccaagcg

SEQ ID NO: 4714226 - DNA, 25 bp, Homo sapien
tcagggtcgaaggtaccgtccttga

SEQ ID NO: 4714227 - DNA, 25 bp, Homo sapien
ggaccatctccttgatctgcacgaa

SEQ ID NO: 4714228 - DNA, 25 bp, Homo sapien
gaagccgtacttttccaggttgtca

SEQ ID NO: 4714229 - DNA, 25 bp, Homo sapien
gaagtccttttcgatggcaggcgcc

SEQ ID NO: 4714230 - DNA, 25 bp, Homo sapien
gggtagagctggaagagctttccct

SEQ ID NO: 4714231 - DNA, 25 bp, Homo sapien
ggtagagctggaagagctttccctc

SEQ ID NO: 4714232 - DNA, 25 bp, Homo sapien
taatagaaatgagatgagggcaggc

SEQ ID NO: 4714233 - DNA, 25 bp, Homo sapien
aaatgagatgagggcaggccgcccc

SEQ ID NO: 4714234 - DNA, 25 bp, Homo sapien
tttaatagaaatgagatgagggcag

SEQ ID NO: 4714235 - DNA, 25 bp, Homo sapien
atgagatgagggcaggccgcccctc

SEQ ID NO: 4714236 - DNA, 25 bp, Homo sapien
tcctggccacgggaaggtgagtccc

SEQ ID NO: 4714237 - DNA, 25 bp, Homo sapien
catttcgtctgccagtgcttcgccg

SEQ ID NO: 4714238 - DNA, 25 bp, Homo sapien
agagcagccctcatcgggagcacat

SEQ ID NO: 4714239 - DNA, 25 bp, Homo sapien
catcaacggcctaactgagaacact

SEQ ID NO: 4714240 - DNA, 25 bp, Homo sapien
cacagtctaggctctggaggccgga

SEQ ID NO: 4714241 - DNA, 25 bp, Homo sapien
gagtctcagatgaaggcgcaggcaa

SEQ ID NO: 4714242 - DNA, 25 bp, Homo sapien
cagttcaacctgtaacggcccaagg

SEQ ID NO: 4714243 - DNA, 25 bp, Homo sapien
tctgagagcccctgtttgttaagga

SEQ ID NO: 4714244 - DNA, 25 bp, Homo sapien
ctcctgaagaacaggactgctgaaa

SEQ ID NO: 4714245 - DNA, 25 bp, Homo sapien
gaaaatgggtgatatcaacaaactc

SEQ ID NO: 4714246 - DNA, 25 bp, Homo sapien
cttttctggcagtaccctgggggct

SEQ ID NO: 4714247 - DNA, 25 bp, Homo sapien
gggctcctgaagaacaggactgctg

SEQ ID NO: 4714248 - DNA, 25 bp, Homo sapien
aaaactgtcctgttgtcgaagcttc

SEQ ID NO: 4714249 - DNA, 25 bp, Homo sapien
tcctgttgtcgaagcttctcccctg

SEQ ID NO: 4714250 - DNA, 25 bp, Homo sapien
actgtcctgttgtcgaagcttctcc

SEQ ID NO: 4714251 - DNA, 25 bp, Homo sapien
ctaaaaactgtcctgttgtcgaagc

SEQ ID NO: 4714252 - DNA, 25 bp, Homo sapien
aatggcaaacggtcaggccacgtga

SEQ ID NO: 4714253 - DNA, 25 bp, Homo sapien
atttgctgtaatccttaaatggcaa

SEQ ID NO: 4714254 - DNA, 25 bp, Homo sapien
aattacaaatagaatcatttgctgt

SEQ ID NO: 4714255 - DNA, 25 bp, Homo sapien
cttaaatggcaaacggtcaggccac

SEQ ID NO: 4714256 - DNA, 25 bp, Homo sapien
caaaggagactcaaactcgggctgg

SEQ ID NO: 4714257 - DNA, 25 bp, Homo sapien
ggagaactcttgcacctactatgag

SEQ ID NO: 4714258 - DNA, 25 bp, Homo sapien
cccgtttggccagagtgcactcaag

SEQ ID NO: 4714259 - DNA, 25 bp, Homo sapien
aaagcacatgcagcagggatgggcc

SEQ ID NO: 4714260 - DNA, 25 bp, Homo sapien
tacctagcacttgcggactgaagca

SEQ ID NO: 4714261 - DNA, 25 bp, Homo sapien
gataactgccgttaagaacagccgt

SEQ ID NO: 4714262 - DNA, 25 bp, Homo sapien
catggtgcgggtcatttcagccggt

SEQ ID NO: 4714263 - DNA, 25 bp, Homo sapien
gaagccctgggatgaactgtagtta

SEQ ID NO: 4714264 - DNA, 25 bp, Homo sapien
gccgcggcctcaccggccagccgcg

SEQ ID NO: 4714265 - DNA, 25 bp, Homo sapien
gcctcaccggccagccgcgcagcga

SEQ ID NO: 4714266 - DNA, 25 bp, Homo sapien
gccgcgcagcgacgcccccgcccgc

SEQ ID NO: 4714267 - DNA, 25 bp, Homo sapien
gcccgccgcccgcgagtcccggctc

SEQ ID NO: 4714268 - DNA, 25 bp, Homo sapien
ctccccggggctgtagacgacgcgg

SEQ ID NO: 4714269 - DNA, 25 bp, Homo sapien
gctgatctcgaagagctgcactcgc

SEQ ID NO: 4714270 - DNA, 25 bp, Homo sapien
ctgtagacgacgcggccgtggctca

SEQ ID NO: 4714271 - DNA, 25 bp, Homo sapien
aggcgcacgcgcacggtcccagcca

SEQ ID NO: 4714272 - DNA, 25 bp, Homo sapien
tcccgggcggcgaagacagcgactc

SEQ ID NO: 4714273 - DNA, 25 bp, Homo sapien
gggagggtcgcaggcctgcgtgcgc

SEQ ID NO: 4714274 - DNA, 25 bp, Homo sapien
agcaggtgtctgcaccccgccggga

SEQ ID NO: 4714275 - DNA, 25 bp, Homo sapien
cggcgaggcctgctggcgggtggca

SEQ ID NO: 4714276 - DNA, 25 bp, Homo sapien
cagggagcccgttttcactggccag

SEQ ID NO: 4714277 - DNA, 25 bp, Homo sapien
tccaaagtgaaacctgtcccgagct

SEQ ID NO: 4714278 - DNA, 25 bp, Homo sapien
catcctaagggtccaggttctgtga

SEQ ID NO: 4714279 - DNA, 25 bp, Homo sapien
gatggccccgttttgcacatacacc

SEQ ID NO: 4714280 - DNA, 25 bp, Homo sapien
taaataaatgtctcaacacacgttg

SEQ ID NO: 4714281 - DNA, 25 bp, Homo sapien
tctcaacacacgttggagggaggtg

SEQ ID NO: 4714282 - DNA, 25 bp, Homo sapien
ccttattccagtcaaactgcagaca

SEQ ID NO: 4714283 - DNA, 25 bp, Homo sapien
aacaccccttattccagtcaaactg

SEQ ID NO: 4714284 - DNA, 25 bp, Homo sapien
acctgcctcacctgtggtctcccca

SEQ ID NO: 4714285 - DNA, 25 bp, Homo sapien
cagcaggccccacctgtggcccagg

SEQ ID NO: 4714286 - DNA, 25 bp, Homo sapien
ctcacctgtggtctccccagcaggc

SEQ ID NO: 4714287 - DNA, 25 bp, Homo sapien
cacctgtggtctccccagcaggccc

SEQ ID NO: 4714288 - DNA, 25 bp, Homo sapien
ccaggcaggaggagtaccggtgtgc

SEQ ID NO: 4714289 - DNA, 25 bp, Homo sapien
aggagtaccggtgtgccgagcgccc

SEQ ID NO: 4714290 - DNA, 25 bp, Homo sapien
tgtgccgagcgcccagggtcagcca

SEQ ID NO: 4714291 - DNA, 25 bp, Homo sapien
taccggtgtgccgagcgcccagggt

SEQ ID NO: 4714292 - DNA, 25 bp, Homo sapien
gtcagggccaaagatggccacctcc

SEQ ID NO: 4714293 - DNA, 25 bp, Homo sapien
ctgagtcagggccaaagatggccac

SEQ ID NO: 4714294 - DNA, 25 bp, Homo sapien
gggtcacgtgaggaaaaggtgactc

SEQ ID NO: 4714295 - DNA, 25 bp, Homo sapien
gtgaggaaaaggtgactcagactct

SEQ ID NO: 4714296 - DNA, 25 bp, Homo sapien
cagaagctggtcacaagggaggaca

SEQ ID NO: 4714297 - DNA, 25 bp, Homo sapien
cagaggtggcactgttctgtggcca

SEQ ID NO: 4714298 - DNA, 25 bp, Homo sapien
gatgtgtgtccagaaaccatgatga

SEQ ID NO: 4714299 - DNA, 25 bp, Homo sapien
ggcagacacagtgttccacagtcag

SEQ ID NO: 4714300 - DNA, 25 bp, Homo sapien
ctcagctgcctacaggagacactcg

SEQ ID NO: 4714301 - DNA, 25 bp, Homo sapien
tcagctgcctacaggagacactcgg

SEQ ID NO: 4714302 - DNA, 25 bp, Homo sapien
agctcagctgcctacaggagacact

SEQ ID NO: 4714303 - DNA, 25 bp, Homo sapien
gctcagctgcctacaggagacactc

SEQ ID NO: 4714304 - DNA, 25 bp, Homo sapien
gccacttcagaggacatctgcccat

SEQ ID NO: 4714305 - DNA, 25 bp, Homo sapien
ccaacgctcatccagatgatggctg

SEQ ID NO: 4714306 - DNA, 25 bp, Homo sapien
cccagattggtaaccttggctccca

SEQ ID NO: 4714307 - DNA, 25 bp, Homo sapien
gcctgaccagcacaaaacgacgtct

SEQ ID NO: 4714308 - DNA, 25 bp, Homo sapien
tgggaaggccagtgagcaagcagcc

SEQ ID NO: 4714309 - DNA, 25 bp, Homo sapien
gggtcctgggaaggccagtgagcaa

SEQ ID NO: 4714310 - DNA, 25 bp, Homo sapien
tcctgggaaggccagtgagcaagca

SEQ ID NO: 4714311 - DNA, 25 bp, Homo sapien
ggaaggccagtgagcaagcagccca

SEQ ID NO: 4714312 - DNA, 25 bp, Homo sapien
caggcccctgcttgctgccagcaca

SEQ ID NO: 4714313 - DNA, 25 bp, Homo sapien
aggggatggctgcatgagccccagc

SEQ ID NO: 4714314 - DNA, 25 bp, Homo sapien
cccagccagccgacggcccaggccc

SEQ ID NO: 4714315 - DNA, 25 bp, Homo sapien
tgcaaaggggatggctgcatgagcc

SEQ ID NO: 4714316 - DNA, 25 bp, Homo sapien
agaccccgcaggaacctatgcaggt

SEQ ID NO: 4714317 - DNA, 25 bp, Homo sapien
actacccacgctgtgtcattagcct

SEQ ID NO: 4714318 - DNA, 25 bp, Homo sapien
gcgacagggaactgttgaagtaacc

SEQ ID NO: 4714319 - DNA, 25 bp, Homo sapien
attagccttgttggagaccccgcag

SEQ ID NO: 4714320 - DNA, 25 bp, Homo sapien
cactcgggaactggctcccaaactt

SEQ ID NO: 4714321 - DNA, 25 bp, Homo sapien
cagggcccacaaccctgggacaaga

SEQ ID NO: 4714322 - DNA, 25 bp, Homo sapien
cacccagcgcctatgagaaagccat

SEQ ID NO: 4714323 - DNA, 25 bp, Homo sapien
ccaggataagagtgggcactgcagc

SEQ ID NO: 4714324 - DNA, 25 bp, Homo sapien
cagagacaggagggaggtggggggc

SEQ ID NO: 4714325 - DNA, 25 bp, Homo sapien
gcagagacaggagggaggtgggggg

SEQ ID NO: 4714326 - DNA, 25 bp, Homo sapien
gctgtgctctccagcgggcaggctc

SEQ ID NO: 4714327 - DNA, 25 bp, Homo sapien
ctgtgctctccagcgggcaggctcc

SEQ ID NO: 4714328 - DNA, 25 bp, Homo sapien
ggaccagttggtcatcaccaggcct

SEQ ID NO: 4714329 - DNA, 25 bp, Homo sapien
caggaccagttggtcatcaccaggc

SEQ ID NO: 4714330 - DNA, 25 bp, Homo sapien
ccaggaccagttggtcatcaccagg

SEQ ID NO: 4714331 - DNA, 25 bp, Homo sapien
tcccaggaccagttggtcatcacca

SEQ ID NO: 4714332 - DNA, 25 bp, Homo sapien
gcaggcactggtacctggctgcctt

SEQ ID NO: 4714333 - DNA, 25 bp, Homo sapien
gagagcaggcactggtacctggctg

SEQ ID NO: 4714334 - DNA, 25 bp, Homo sapien
gagcaggcactggtacctggctgcc

SEQ ID NO: 4714335 - DNA, 25 bp, Homo sapien
caggcactggtacctggctgccttc

SEQ ID NO: 4714336 - DNA, 25 bp, Homo sapien
ggtgcacgatcttcccgaaaggacc

SEQ ID NO: 4714337 - DNA, 25 bp, Homo sapien
tggtgcacgatcttcccgaaaggac

SEQ ID NO: 4714338 - DNA, 25 bp, Homo sapien
ctggtgcacgatcttcccgaaagga

SEQ ID NO: 4714339 - DNA, 25 bp, Homo sapien
caagatatagaacacgaggctgcac

SEQ ID NO: 4714340 - DNA, 25 bp, Homo sapien
ccttggaaaaccgtggcgtgtggat

SEQ ID NO: 4714341 - DNA, 25 bp, Homo sapien
tatagaacacgaggctgcacttgtg

SEQ ID NO: 4714342 - DNA, 25 bp, Homo sapien
gatatagaacacgaggctgcacttg

SEQ ID NO: 4714343 - DNA, 25 bp, Homo sapien
atgagggtggggacccaccaaggag

SEQ ID NO: 4714344 - DNA, 25 bp, Homo sapien
gacgctgggatgaagcagtgcctgc

SEQ ID NO: 4714345 - DNA, 25 bp, Homo sapien
catgagggtggggacccaccaagga

SEQ ID NO: 4714346 - DNA, 25 bp, Homo sapien
aggacgctgggatgaagcagtgcct

SEQ ID NO: 4714347 - DNA, 25 bp, Homo sapien
ccctcagccctgccacgccctgccc

SEQ ID NO: 4714348 - DNA, 25 bp, Homo sapien
ggcccctcagccctgccacgccctg

SEQ ID NO: 4714349 - DNA, 25 bp, Homo sapien
tgtggcattgggacaggcccctcag

SEQ ID NO: 4714350 - DNA, 25 bp, Homo sapien
ctgtggcattgggacaggcccctca

SEQ ID NO: 4714351 - DNA, 25 bp, Homo sapien
gaggggcttagcaggtgtgcgcagg

SEQ ID NO: 4714352 - DNA, 25 bp, Homo sapien
gggcttagcaggtgtgcgcaggctg

SEQ ID NO: 4714353 - DNA, 25 bp, Homo sapien
ccagggaggggcttagcaggtgtgc

SEQ ID NO: 4714354 - DNA, 25 bp, Homo sapien
cttagcaggtgtgcgcaggctggat

SEQ ID NO: 4714355 - DNA, 25 bp, Homo sapien
cacatagccgcggagatcagtgctg

SEQ ID NO: 4714356 - DNA, 25 bp, Homo sapien
cttcttggtggcagaggccacgttg

SEQ ID NO: 4714357 - DNA, 25 bp, Homo sapien
tggctgtgaggaccacgctgcccgt

SEQ ID NO: 4714358 - DNA, 25 bp, Homo sapien
ccccaccacatagccgcggagatca

SEQ ID NO: 4714359 - DNA, 25 bp, Homo sapien
tcaacgtcggcatgcagctgcagtg

SEQ ID NO: 4714360 - DNA, 25 bp, Homo sapien
gactggttctcaacgtcggcatgca

SEQ ID NO: 4714361 - DNA, 25 bp, Homo sapien
tgtccttgcctgactggttctcaac

SEQ ID NO: 4714362 - DNA, 25 bp, Homo sapien
gcagcagactggccaccacagggct

SEQ ID NO: 4714363 - DNA, 25 bp, Homo sapien
tacgtcgtggatccagcgcttggcc

SEQ ID NO: 4714364 - DNA, 25 bp, Homo sapien
ctgtaagtagtagtcgatgtggatg

SEQ ID NO: 4714365 - DNA, 25 bp, Homo sapien
cagcgcttggccttataggacactt

SEQ ID NO: 4714366 - DNA, 25 bp, Homo sapien
acctccgcaatggtccgtacgtcgt

SEQ ID NO: 4714367 - DNA, 25 bp, Homo sapien
ctggacaggattgaggtggggcatg

SEQ ID NO: 4714368 - DNA, 25 bp, Homo sapien
tggacaggattgaggtggggcatga

SEQ ID NO: 4714369 - DNA, 25 bp, Homo sapien
ggacaggattgaggtggggcatgag

SEQ ID NO: 4714370 - DNA, 25 bp, Homo sapien
agaccgggagggtcacagtagcttc

SEQ ID NO: 4714371 - DNA, 25 bp, Homo sapien
caatattgccaatgaagaccgggag

SEQ ID NO: 4714372 - DNA, 25 bp, Homo sapien
ctgccgctgcgaatggctcttggtg

SEQ ID NO: 4714373 - DNA, 25 bp, Homo sapien
gctcactggggcatggttcacagca

SEQ ID NO: 4714374 - DNA, 25 bp, Homo sapien
ctgttgaaatgcacaagggagggtg

SEQ ID NO: 4714375 - DNA, 25 bp, Homo sapien
tgttgaaatgcacaagggagggtgc

SEQ ID NO: 4714376 - DNA, 25 bp, Homo sapien
ggagggtgcagcgggtgtgaggcag

SEQ ID NO: 4714377 - DNA, 25 bp, Homo sapien
gggtgcagcgggtgtgaggcagggc

SEQ ID NO: 4714378 - DNA, 25 bp, Homo sapien
ctctgcaaagtaggggacagtggca

SEQ ID NO: 4714379 - DNA, 25 bp, Homo sapien
tctggaggaagaatcaaggtgctgg

SEQ ID NO: 4714380 - DNA, 25 bp, Homo sapien
gggtagccccaagaactgtactctg

SEQ ID NO: 4714381 - DNA, 25 bp, Homo sapien
ccaagaactgtactctggaggaaga

SEQ ID NO: 4714382 - DNA, 25 bp, Homo sapien
tgccaagccctggctgtcgactcac

SEQ ID NO: 4714383 - DNA, 25 bp, Homo sapien
caggctgggttccacgccgccgcag

SEQ ID NO: 4714384 - DNA, 25 bp, Homo sapien
gcagctctgctcataagacggtggg

SEQ ID NO: 4714385 - DNA, 25 bp, Homo sapien
gccgcagctctgctcataagacggt

SEQ ID NO: 4714386 - DNA, 25 bp, Homo sapien
cgccgcagctctgctcataagacgg

SEQ ID NO: 4714387 - DNA, 25 bp, Homo sapien
tatttacaggagttgtctctccagg

SEQ ID NO: 4714388 - DNA, 25 bp, Homo sapien
ggagttgtctctccaggtcccagct

SEQ ID NO: 4714389 - DNA, 25 bp, Homo sapien
tgttttatttacaggagttgtctct

SEQ ID NO: 4714390 - DNA, 25 bp, Homo sapien
caggagttgtctctccaggtcccag

SEQ ID NO: 4714391 - DNA, 25 bp, Homo sapien
caaacaccaaggttgcgtgaggccc

SEQ ID NO: 4714392 - DNA, 25 bp, Homo sapien
gacgtgtccttaggcggctctggaa

SEQ ID NO: 4714393 - DNA, 25 bp, Homo sapien
tcctctgttaaagggagccagcccc

SEQ ID NO: 4714394 - DNA, 25 bp, Homo sapien
gaacctgggtgcctaaacgcaacag

SEQ ID NO: 4714395 - DNA, 25 bp, Homo sapien
taagtccatttatgacaggccgagc

SEQ ID NO: 4714396 - DNA, 25 bp, Homo sapien
gaaggtcaatctgggtgacacccga

SEQ ID NO: 4714397 - DNA, 25 bp, Homo sapien
tatctcaagtccagcatagacagcg

SEQ ID NO: 4714398 - DNA, 25 bp, Homo sapien
tagacagcgcacatagacagaaaag

SEQ ID NO: 4714399 - DNA, 25 bp, Homo sapien
gggcggggccgatcgcctacgtctg

SEQ ID NO: 4714400 - DNA, 25 bp, Homo sapien
tcgcggcccagagtcggggcggggc

SEQ ID NO: 4714401 - DNA, 25 bp, Homo sapien
cgcctcgcggcccagagtcggggcg

SEQ ID NO: 4714402 - DNA, 25 bp, Homo sapien
ggcggggccgatcgcctacgtctgc

SEQ ID NO: 4714403 - DNA, 25 bp, Homo sapien
tgcctacctactgtccagaaggcca

SEQ ID NO: 4714404 - DNA, 25 bp, Homo sapien
gcaattaatgaaccctgacccagga

SEQ ID NO: 4714405 - DNA, 25 bp, Homo sapien
gacaacagtgatcacatgcctacct

SEQ ID NO: 4714406 - DNA, 25 bp, Homo sapien
catttcccaggtttagtgacaacag

SEQ ID NO: 4714407 - DNA, 25 bp, Homo sapien
aggagttcaagactgaagtgagcca

SEQ ID NO: 4714408 - DNA, 25 bp, Homo sapien
cagcagggccacagagcaagaccac

SEQ ID NO: 4714409 - DNA, 25 bp, Homo sapien
agggccacagagcaagaccacctat

SEQ ID NO: 4714410 - DNA, 25 bp, Homo sapien
ttcaagactgaagtgagccatgatg

SEQ ID NO: 4714411 - DNA, 25 bp, Homo sapien
tactggccattctgacgcaggtgca

SEQ ID NO: 4714412 - DNA, 25 bp, Homo sapien
gaggtcagcaaagaccatacttggc

SEQ ID NO: 4714413 - DNA, 25 bp, Homo sapien
tccttggttcccaatatggatgata

SEQ ID NO: 4714414 - DNA, 25 bp, Homo sapien
gccattctgacgcaggtgcagatga

SEQ ID NO: 4714415 - DNA, 25 bp, Homo sapien
aagaaattaagctatgcccaaataa

SEQ ID NO: 4714416 - DNA, 25 bp, Homo sapien
tgaaagacaattgcgtaaagcagca

SEQ ID NO: 4714417 - DNA, 25 bp, Homo sapien
gggaatgcaatcaagagcgccagta

SEQ ID NO: 4714418 - DNA, 25 bp, Homo sapien
ctataaatctgcgtagatgggcaca

SEQ ID NO: 4714419 - DNA, 25 bp, Homo sapien
gacacttgtgtatcagtctgcagca

SEQ ID NO: 4714420 - DNA, 25 bp, Homo sapien
aataaaggcgcaagccaattccggc

SEQ ID NO: 4714421 - DNA, 25 bp, Homo sapien
tcaaaactaggacacaagggcttct

SEQ ID NO: 4714422 - DNA, 25 bp, Homo sapien
tcatgtggctcccagtgcagaagct

SEQ ID NO: 4714423 - DNA, 25 bp, Homo sapien
caggagccattctatagtaatgcca

SEQ ID NO: 4714424 - DNA, 25 bp, Homo sapien
cagtcaatgcaaagagtacgaatgc

SEQ ID NO: 4714425 - DNA, 25 bp, Homo sapien
caagtgtccacagatgcggccgggc

SEQ ID NO: 4714426 - DNA, 25 bp, Homo sapien
tacgattttgctgtcccaaacagaa

SEQ ID NO: 4714427 - DNA, 25 bp, Homo sapien
tccataggtaagattcctgggtcct

SEQ ID NO: 4714428 - DNA, 25 bp, Homo sapien
tgaaaatagttaacggccaggcgca

SEQ ID NO: 4714429 - DNA, 25 bp, Homo sapien
taagcagcctctaccagtgaggttg

SEQ ID NO: 4714430 - DNA, 25 bp, Homo sapien
tgaggttgccagtgtagtgcctgaa

SEQ ID NO: 4714431 - DNA, 25 bp, Homo sapien
aacacaggagaagctaccttagata

SEQ ID NO: 4714432 - DNA, 25 bp, Homo sapien
taccttagatacaagaaccagggaa

SEQ ID NO: 4714433 - DNA, 25 bp, Homo sapien
aacaaaagataattgcagatgatga

SEQ ID NO: 4714434 - DNA, 25 bp, Homo sapien
gagaagctaccttagatacaagaac

SEQ ID NO: 4714435 - DNA, 25 bp, Homo sapien
ggattctgagcagtccactccagca

SEQ ID NO: 4714436 - DNA, 25 bp, Homo sapien
ggatcttgtcaagaatcgacaccta

SEQ ID NO: 4714437 - DNA, 25 bp, Homo sapien
ctgtagcttcaaagaaagtccccaa

SEQ ID NO: 4714438 - DNA, 25 bp, Homo sapien
caagccaactatcagaacaagaacc

SEQ ID NO: 4714439 - DNA, 25 bp, Homo sapien
aggagacgcaccaacaaaacaccat

SEQ ID NO: 4714440 - DNA, 25 bp, Homo sapien
agggaggagacgcaccaacaaaaca

SEQ ID NO: 4714441 - DNA, 25 bp, Homo sapien
gggaggagacgcaccaacaaaacac

SEQ ID NO: 4714442 - DNA, 25 bp, Homo sapien
ccagggaggagacgcaccaacaaaa

SEQ ID NO: 4714443 - DNA, 25 bp, Homo sapien
catctcacgaaatggaggctgcccc

SEQ ID NO: 4714444 - DNA, 25 bp, Homo sapien
caattgttgactgcggccaactgca

SEQ ID NO: 4714445 - DNA, 25 bp, Homo sapien
gagaaatcacagtagcccagctcgg

SEQ ID NO: 4714446 - DNA, 25 bp, Homo sapien
ctgaaagctccacgcactgggcatg

SEQ ID NO: 4714447 - DNA, 25 bp, Homo sapien
tgtggacggggactacacaggctcc

SEQ ID NO: 4714448 - DNA, 25 bp, Homo sapien
tggagtctcccaatgaacacgcaga

SEQ ID NO: 4714449 - DNA, 25 bp, Homo sapien
cccacacgtgtggacggggactaca

SEQ ID NO: 4714450 - DNA, 25 bp, Homo sapien
agtctcccaatgaacacgcagacag

SEQ ID NO: 4714451 - DNA, 25 bp, Homo sapien
ctttaagcaggagaccagcacccag

SEQ ID NO: 4714452 - DNA, 25 bp, Homo sapien
tttaagcaggagaccagcacccagc

SEQ ID NO: 4714453 - DNA, 25 bp, Homo sapien
ggcgtcttgggtgcagtcgtggagt

SEQ ID NO: 4714454 - DNA, 25 bp, Homo sapien
gctgtgggagcgtcttgggtggtgt

SEQ ID NO: 4714455 - DNA, 25 bp, Homo sapien
ggagtccagtgcacgtgctgtggga

SEQ ID NO: 4714456 - DNA, 25 bp, Homo sapien
tgcagtcgtggagtgcacgtgctgt

SEQ ID NO: 4714457 - DNA, 25 bp, Homo sapien
gtgcacgtgctgtggggggcgtctt

SEQ ID NO: 4714458 - DNA, 25 bp, Homo sapien
agtgcacgtgctgtggggggcgtct

SEQ ID NO: 4714459 - DNA, 25 bp, Homo sapien
tgcacgtgctgtggggggcgtcttg

SEQ ID NO: 4714460 - DNA, 25 bp, Homo sapien
tcacatctgtatgtagccggagccc

SEQ ID NO: 4714461 - DNA, 25 bp, Homo sapien
agccggagccctggaagaatcctgg

SEQ ID NO: 4714462 - DNA, 25 bp, Homo sapien
agaaggggcgcagcacgaacacaag

SEQ ID NO: 4714463 - DNA, 25 bp, Homo sapien
cgaacacaaggactaaggggccacg

SEQ ID NO: 4714464 - DNA, 25 bp, Homo sapien
tgcgggtctcacacatcaagaggtg

SEQ ID NO: 4714465 - DNA, 25 bp, Homo sapien
caggtcctgctagtattggctccgg

SEQ ID NO: 4714466 - DNA, 25 bp, Homo sapien
taaagggcagcatgtgttacggtgc

SEQ ID NO: 4714467 - DNA, 25 bp, Homo sapien
tttggtctcagaacagggctcgatg

SEQ ID NO: 4714468 - DNA, 25 bp, Homo sapien
attagtcaggcgtaatggccgggcg

SEQ ID NO: 4714469 - DNA, 25 bp, Homo sapien
aattagtcaggcgtaatggccgggc

SEQ ID NO: 4714470 - DNA, 25 bp, Homo sapien
ttagtcaggcgtaatggccgggcgc

SEQ ID NO: 4714471 - DNA, 25 bp, Homo sapien
tagtcaggcgtaatggccgggcgcg

SEQ ID NO: 4714472 - DNA, 25 bp, Homo sapien
ttttttaagatacacaacagtgttg

SEQ ID NO: 4714473 - DNA, 25 bp, Homo sapien
gtccagtcaggcaagtcctggtggc

SEQ ID NO: 4714474 - DNA, 25 bp, Homo sapien
gcccggacgaaagagggagactcca

SEQ ID NO: 4714475 - DNA, 25 bp, Homo sapien
tatatagtaacagcacaatctaccc

SEQ ID NO: 4714476 - DNA, 25 bp, Homo sapien
acactgaggcagctggctaagtact

SEQ ID NO: 4714477 - DNA, 25 bp, Homo sapien
cactgaggcagctggctaagtactg

SEQ ID NO: 4714478 - DNA, 25 bp, Homo sapien
ccaaaagaatttgtgggatgtgtaa

SEQ ID NO: 4714479 - DNA, 25 bp, Homo sapien
gctaaatacaattctcagggttcca

SEQ ID NO: 4714480 - DNA, 25 bp, Homo sapien
tagatgctggttacagacacgcggc

SEQ ID NO: 4714481 - DNA, 25 bp, Homo sapien
caaagtaacccctgcacacttagat

SEQ ID NO: 4714482 - DNA, 25 bp, Homo sapien
aggcggcacacagaagtaaagcctc

SEQ ID NO: 4714483 - DNA, 25 bp, Homo sapien
ctttagcagaagctgatctaagctg

SEQ ID NO: 4714484 - DNA, 25 bp, Homo sapien
ggaaggcggcacacagaagtaaagc

SEQ ID NO: 4714485 - DNA, 25 bp, Homo sapien
cctctttagcagaagctgatctaag

SEQ ID NO: 4714486 - DNA, 25 bp, Homo sapien
gaaagacgccccatgttgaaggatc

SEQ ID NO: 4714487 - DNA, 25 bp, Homo sapien
aagaacagttccacgctgggcacaa

SEQ ID NO: 4714488 - DNA, 25 bp, Homo sapien
ttgaaggatcagagaccacaccgtg

SEQ ID NO: 4714489 - DNA, 25 bp, Homo sapien
cccagtgtgggataaagagtccagc

SEQ ID NO: 4714490 - DNA, 25 bp, Homo sapien
cagaacaagcggtcactgtcagtca

SEQ ID NO: 4714491 - DNA, 25 bp, Homo sapien
gatgcagaacaagcggtcactgtca

SEQ ID NO: 4714492 - DNA, 25 bp, Homo sapien
ggatgcagaacaagcggtcactgtc

SEQ ID NO: 4714493 - DNA, 25 bp, Homo sapien
tgcagaacaagcggtcactgtcagt

SEQ ID NO: 4714494 - DNA, 25 bp, Homo sapien
gggccaggaaacacagggcccagtc

SEQ ID NO: 4714495 - DNA, 25 bp, Homo sapien
ctgcccaggggagacagggcgcttc

SEQ ID NO: 4714496 - DNA, 25 bp, Homo sapien
ccaggggagacagggcgcttcgcat

SEQ ID NO: 4714497 - DNA, 25 bp, Homo sapien
cagggccaggaaacacagggcccag

SEQ ID NO: 4714498 - DNA, 25 bp, Homo sapien
cacacaccatgcaacgtgcttctga

SEQ ID NO: 4714499 - DNA, 25 bp, Homo sapien
tgagcattgttcactgccgtccgac

SEQ ID NO: 4714500 - DNA, 25 bp, Homo sapien
gcaggcgcctgagcattgttcactg

SEQ ID NO: 4714501 - DNA, 25 bp, Homo sapien
catgcaacgtgcttctgaccagcgc

SEQ ID NO: 4714502 - DNA, 25 bp, Homo sapien
agcaacagacactgcgcactggagc

SEQ ID NO: 4714503 - DNA, 25 bp, Homo sapien
ccagcagcaacagacactgcgcact

SEQ ID NO: 4714504 - DNA, 25 bp, Homo sapien
gcagcaacagacactgcgcactgga

SEQ ID NO: 4714505 - DNA, 25 bp, Homo sapien
gcaacagacactgcgcactggagca

SEQ ID NO: 4714506 - DNA, 25 bp, Homo sapien
tgtgtggggggtatcggccagcgtc

SEQ ID NO: 4714507 - DNA, 25 bp, Homo sapien
ctgtgtggggggtatcggccagcgt

SEQ ID NO: 4714508 - DNA, 25 bp, Homo sapien
gggtatcggccagcgtcctgtgcca

SEQ ID NO: 4714509 - DNA, 25 bp, Homo sapien
gggtatcggccagcgtcctgagcca

SEQ ID NO: 4714510 - DNA, 25 bp, Homo sapien
atcggccagcgtcctgagccactgt

SEQ ID NO: 4714511 - DNA, 25 bp, Homo sapien
gccagcgtcctgagccactgtgtgg

SEQ ID NO: 4714512 - DNA, 25 bp, Homo sapien
ggccagcgtcctgagccactgtgtg

SEQ ID NO: 4714513 - DNA, 25 bp, Homo sapien
gccagcgtcctgagccactgtgtgg

SEQ ID NO: 4714514 - DNA, 25 bp, Homo sapien
gccagcgtcctgtgccactgtgtgg

SEQ ID NO: 4714515 - DNA, 25 bp, Homo sapien
cctggtgggtatcggccagcgtcct

SEQ ID NO: 4714516 - DNA, 25 bp, Homo sapien
agccggcctcagctgtgcgcctcct

SEQ ID NO: 4714517 - DNA, 25 bp, Homo sapien
gaagggcacggagccggcctcagct

SEQ ID NO: 4714518 - DNA, 25 bp, Homo sapien
cacggagccggcctcagctgtgcgc

SEQ ID NO: 4714519 - DNA, 25 bp, Homo sapien
caggaagaagggcacggagccggcc

SEQ ID NO: 4714520 - DNA, 25 bp, Homo sapien
cttcttcccctcgccagcaggggtc

SEQ ID NO: 4714521 - DNA, 25 bp, Homo sapien
ttcttcccctcgccagcaggggtca

SEQ ID NO: 4714522 - DNA, 25 bp, Homo sapien
gggtcagagcaaaccccagctccag

SEQ ID NO: 4714523 - DNA, 25 bp, Homo sapien
ggtcagagcaaaccccagctccagg

SEQ ID NO: 4714524 - DNA, 25 bp, Homo sapien
gcctctgggtcagaagtaccagaag

SEQ ID NO: 4714525 - DNA, 25 bp, Homo sapien
tgcctctgggtcagaagtaccagaa

SEQ ID NO: 4714526 - DNA, 25 bp, Homo sapien
tctgggtcagaagtaccagaaggca

SEQ ID NO: 4714527 - DNA, 25 bp, Homo sapien
tgtgcctctgggtcagaagtaccag

SEQ ID NO: 4714528 - DNA, 25 bp, Homo sapien
tgtctctgcatgctaccaggaggct

SEQ ID NO: 4714529 - DNA, 25 bp, Homo sapien
cctgaaacagactgagggtgcacct

SEQ ID NO: 4714530 - DNA, 25 bp, Homo sapien
tcagcgatacctggtgttaggcagc

SEQ ID NO: 4714531 - DNA, 25 bp, Homo sapien
tcctcagcgcttgtgacagtggcct

SEQ ID NO: 4714532 - DNA, 25 bp, Homo sapien
actccccgggatggtccaggactcg

SEQ ID NO: 4714533 - DNA, 25 bp, Homo sapien
gggatggtccaggactcgccaaccc

SEQ ID NO: 4714534 - DNA, 25 bp, Homo sapien
aggccaggtcggctctgcatgccct

SEQ ID NO: 4714535 - DNA, 25 bp, Homo sapien
ggccaggtcggctctgcatgccctg

SEQ ID NO: 4714536 - DNA, 25 bp, Homo sapien
taggaacaactgagggaggcacact

SEQ ID NO: 4714537 - DNA, 25 bp, Homo sapien
tgatgtgatactggagaaagccctc

SEQ ID NO: 4714538 - DNA, 25 bp, Homo sapien
tctgggctgacttggtaacaccgga

SEQ ID NO: 4714539 - DNA, 25 bp, Homo sapien
gaggctgcaaaaacccgggtgtcca

SEQ ID NO: 4714540 - DNA, 25 bp, Homo sapien
gcagctcggttttcacacagcaatc

SEQ ID NO: 4714541 - DNA, 25 bp, Homo sapien
ccagcagctcggttttcacacagca

SEQ ID NO: 4714542 - DNA, 25 bp, Homo sapien
tcccagcagctcggttttcacacag

SEQ ID NO: 4714543 - DNA, 25 bp, Homo sapien
cagcagctcggttttcacacagcaa

SEQ ID NO: 4714544 - DNA, 25 bp, Homo sapien
tctgggtgtactttaagacaaggat

SEQ ID NO: 4714545 - DNA, 25 bp, Homo sapien
gacaaggatatacaggatttttgct

SEQ ID NO: 4714546 - DNA, 25 bp, Homo sapien
taggaatgggatagattagaaacta

SEQ ID NO: 4714547 - DNA, 25 bp, Homo sapien
taccataaacctaggtgaagcaaag

SEQ ID NO: 4714548 - DNA, 25 bp, Homo sapien
taggggtagcggcagaggcgggcag

SEQ ID NO: 4714549 - DNA, 25 bp, Homo sapien
ccagtgggtggacgagaacccacag

SEQ ID NO: 4714550 - DNA, 25 bp, Homo sapien
gaacccacaggcacagcgaggccat

SEQ ID NO: 4714551 - DNA, 25 bp, Homo sapien
gcagaggcgggcagcggtcaccaca

SEQ ID NO: 4714552 - DNA, 25 bp, Homo sapien
tctctgctgagccttcatcggcagc

SEQ ID NO: 4714553 - DNA, 25 bp, Homo sapien
gtttctctgctgagccttcatcggc

SEQ ID NO: 4714554 - DNA, 25 bp, Homo sapien
gtgggcctctcctgcctgtttctct

SEQ ID NO: 4714555 - DNA, 25 bp, Homo sapien
tctgctgagccttcatcggcagcca

SEQ ID NO: 4714556 - DNA, 25 bp, Homo sapien
cagagtgctggtagtcctcaagggc

SEQ ID NO: 4714557 - DNA, 25 bp, Homo sapien
taagatgtatccgttgctgccgatg

SEQ ID NO: 4714558 - DNA, 25 bp, Homo sapien
cagtgacgtggttttgcttcgccgc

SEQ ID NO: 4714559 - DNA, 25 bp, Homo sapien
tccgagttagtgtgttggtgccatc

SEQ ID NO: 4714560 - DNA, 25 bp, Homo sapien
aggccgtggcctccttgaaaggatc

SEQ ID NO: 4714561 - DNA, 25 bp, Homo sapien
gatctgacacgtttctacagagagc

SEQ ID NO: 4714562 - DNA, 25 bp, Homo sapien
tgaaagccccaatgtccaaagcaga

SEQ ID NO: 4714563 - DNA, 25 bp, Homo sapien
gctgagtcttccctagctggagtga

SEQ ID NO: 4714564 - DNA, 25 bp, Homo sapien
ctggtgtggagggggttcggcacct

SEQ ID NO: 4714565 - DNA, 25 bp, Homo sapien
tggtgtggagggggttcggcacctc

SEQ ID NO: 4714566 - DNA, 25 bp, Homo sapien
ggttcggcacctcgactgtgtcctg

SEQ ID NO: 4714567 - DNA, 25 bp, Homo sapien
gttcggcacctcgactgtgtcctgg

SEQ ID NO: 4714568 - DNA, 25 bp, Homo sapien
aggttcggcacctcgactgtgtcct

SEQ ID NO: 4714569 - DNA, 25 bp, Homo sapien
cacctcgactgtgtcctggtgtgga

SEQ ID NO: 4714570 - DNA, 25 bp, Homo sapien
tgtgccctggtgtggagggggttcg

SEQ ID NO: 4714571 - DNA, 25 bp, Homo sapien
actgtgccctggtgtggagggggtt

SEQ ID NO: 4714572 - DNA, 25 bp, Homo sapien
gccctggtgtggagggggttcggca

SEQ ID NO: 4714573 - DNA, 25 bp, Homo sapien
ctcgactgtgccctggtgtggaggg

SEQ ID NO: 4714574 - DNA, 25 bp, Homo sapien
tacagagcacactccgggtgcaggg

SEQ ID NO: 4714575 - DNA, 25 bp, Homo sapien
cagatacagagcacactccgggtgc

SEQ ID NO: 4714576 - DNA, 25 bp, Homo sapien
gcaccctaccgccacagtctctgcc

SEQ ID NO: 4714577 - DNA, 25 bp, Homo sapien
ccacagatacagagcacactccggg

SEQ ID NO: 4714578 - DNA, 25 bp, Homo sapien
atgaaggcacctcacacacggaaca

SEQ ID NO: 4714579 - DNA, 25 bp, Homo sapien
cactaatgaaggcacctcacacacg

SEQ ID NO: 4714580 - DNA, 25 bp, Homo sapien
taatgaaggcacctcacacacggaa

SEQ ID NO: 4714581 - DNA, 25 bp, Homo sapien
gtccactaatgaaggcacctcacac

SEQ ID NO: 4714582 - DNA, 25 bp, Homo sapien
actttttccccgagggatgaatgct

SEQ ID NO: 4714583 - DNA, 25 bp, Homo sapien
tactttttccccgagggatgaatgc

SEQ ID NO: 4714584 - DNA, 25 bp, Homo sapien
ctttttccccgagggatgaatgctc

SEQ ID NO: 4714585 - DNA, 25 bp, Homo sapien
cactggttctgaggtagcgactgat

SEQ ID NO: 4714586 - DNA, 25 bp, Homo sapien
tttggttccttatgatctctagctt

SEQ ID NO: 4714587 - DNA, 25 bp, Homo sapien
tgtctgtgattttgtggtggccatg

SEQ ID NO: 4714588 - DNA, 25 bp, Homo sapien
gctgctgtcgtccaaagtcagaaat

SEQ ID NO: 4714589 - DNA, 25 bp, Homo sapien
caaagagcagagacagttgccgggt

SEQ ID NO: 4714590 - DNA, 25 bp, Homo sapien
gcagagacagttgccgggtcctctt

SEQ ID NO: 4714591 - DNA, 25 bp, Homo sapien
gagcagagacagttgccgggtcctc

SEQ ID NO: 4714592 - DNA, 25 bp, Homo sapien
aagagcagagacagttgccgggtcc

SEQ ID NO: 4714593 - DNA, 25 bp, Homo sapien
acaacaactaggtgctcgaagctct

SEQ ID NO: 4714594 - DNA, 25 bp, Homo sapien
tgggaaatgcggaacaggacactga

SEQ ID NO: 4714595 - DNA, 25 bp, Homo sapien
cactgagattagagagcggcgtcgc

SEQ ID NO: 4714596 - DNA, 25 bp, Homo sapien
gcagtactagctaagcgtgggccat

SEQ ID NO: 4714597 - DNA, 25 bp, Homo sapien
gaacaggtcgaagagaatcacagcc

SEQ ID NO: 4714598 - DNA, 25 bp, Homo sapien
gaagaaaggcttacaaccggatgag

SEQ ID NO: 4714599 - DNA, 25 bp, Homo sapien
taagaattacagctgcccatgggaa

SEQ ID NO: 4714600 - DNA, 25 bp, Homo sapien
gagcgagaattcactcacctggagg

SEQ ID NO: 4714601 - DNA, 25 bp, Homo sapien
ttcattcggcacagtgtccccgagg

SEQ ID NO: 4714602 - DNA, 25 bp, Homo sapien
cgttttgcacacgacactttgctga

SEQ ID NO: 4714603 - DNA, 25 bp, Homo sapien
gatgctgctatcaacgtgggtgtac

SEQ ID NO: 4714604 - DNA, 25 bp, Homo sapien
ggctgagtcacacgtcactgcgttt

SEQ ID NO: 4714605 - DNA, 25 bp, Homo sapien
taagtgcacggttccatggtattaa

SEQ ID NO: 4714606 - DNA, 25 bp, Homo sapien
ctagggacctcctttaagtggaatg

SEQ ID NO: 4714607 - DNA, 25 bp, Homo sapien
catcagttggacgactctagggacc

SEQ ID NO: 4714608 - DNA, 25 bp, Homo sapien
tctttccatcttgtcaaactgaagc

SEQ ID NO: 4714609 - DNA, 25 bp, Homo sapien
tccctgccatcagagacaccgtcct

SEQ ID NO: 4714610 - DNA, 25 bp, Homo sapien
cctgccatcagagacaccgtcctcc

SEQ ID NO: 4714611 - DNA, 25 bp, Homo sapien
tgtagaactgttccctgccatcaga

SEQ ID NO: 4714612 - DNA, 25 bp, Homo sapien
ctgtagaactgttccctgccatcag

SEQ ID NO: 4714613 - DNA, 25 bp, Homo sapien
ccaggcataggacagtgtggaacag

SEQ ID NO: 4714614 - DNA, 25 bp, Homo sapien
gagcaaagactctcgccaactggca

SEQ ID NO: 4714615 - DNA, 25 bp, Homo sapien
acaaggaagaaaggcgacaggctcc

SEQ ID NO: 4714616 - DNA, 25 bp, Homo sapien
gtgcacgggaaacacagcagtctgc

SEQ ID NO: 4714617 - DNA, 25 bp, Homo sapien
agatgggatctggcacaggagaatc

SEQ ID NO: 4714618 - DNA, 25 bp, Homo sapien
cagatgggatctggcacaggagaat

SEQ ID NO: 4714619 - DNA, 25 bp, Homo sapien
gcagatgggatctggcacaggagaa

SEQ ID NO: 4714620 - DNA, 25 bp, Homo sapien
ctgcagatgggatctggcacaggag

SEQ ID NO: 4714621 - DNA, 25 bp, Homo sapien
gaagaggagccgcttcagtcctgca

SEQ ID NO: 4714622 - DNA, 25 bp, Homo sapien
tgagccagacggctgggattcagcg

SEQ ID NO: 4714623 - DNA, 25 bp, Homo sapien
gaaagtgtttgagcacgtggctgaa

SEQ ID NO: 4714624 - DNA, 25 bp, Homo sapien
aaaactgcaggacggctggcagtaa

SEQ ID NO: 4714625 - DNA, 25 bp, Homo sapien
aacacggagcaaacattatcacccc

SEQ ID NO: 4714626 - DNA, 25 bp, Homo sapien
cacggagcaaacattatcaccccac

SEQ ID NO: 4714627 - DNA, 25 bp, Homo sapien
aaaacacggagcaaacattatcacc

SEQ ID NO: 4714628 - DNA, 25 bp, Homo sapien
aaacacggagcaaacattatcaccc

SEQ ID NO: 4714629 - DNA, 25 bp, Homo sapien
ctttttcttaggaaccaggctatag

SEQ ID NO: 4714630 - DNA, 25 bp, Homo sapien
tgctcttaaacatctcaatcaccgt

SEQ ID NO: 4714631 - DNA, 25 bp, Homo sapien
caatcaccgtcctctgttttaatac

SEQ ID NO: 4714632 - DNA, 25 bp, Homo sapien
cagtggaatgagttatgctcttaaa

SEQ ID NO: 4714633 - DNA, 25 bp, Homo sapien
gatcagtgcgcatcatgaacaaact

SEQ ID NO: 4714634 - DNA, 25 bp, Homo sapien
tgatcttggacacgaacactctgcc

SEQ ID NO: 4714635 - DNA, 25 bp, Homo sapien
ggcaggtgtataccccaaggcagga

SEQ ID NO: 4714636 - DNA, 25 bp, Homo sapien
ctatggcagaggagcttcatggcac

SEQ ID NO: 4714637 - DNA, 25 bp, Homo sapien
ttctgggcgcgatcagcctccgaca

SEQ ID NO: 4714638 - DNA, 25 bp, Homo sapien
tgctctgcaccatggccgtcgtcct

SEQ ID NO: 4714639 - DNA, 25 bp, Homo sapien
tccgacatgctctccttggaagtcc

SEQ ID NO: 4714640 - DNA, 25 bp, Homo sapien
tcctctgagtcgtcctcatccgagt

SEQ ID NO: 4714641 - DNA, 25 bp, Homo sapien
tcagccccaggcatgactcagcaat

SEQ ID NO: 4714642 - DNA, 25 bp, Homo sapien
cccaggcatgactcagcaatgaaga

SEQ ID NO: 4714643 - DNA, 25 bp, Homo sapien
gccccaggcatgactcagcaatgaa

SEQ ID NO: 4714644 - DNA, 25 bp, Homo sapien
agccccaggcatgactcagcaatga

SEQ ID NO: 4714645 - DNA, 25 bp, Homo sapien
tactggagccaacagatcaactctt

SEQ ID NO: 4714646 - DNA, 25 bp, Homo sapien
gaaattgattagtacctgggagttc

SEQ ID NO: 4714647 - DNA, 25 bp, Homo sapien
gagttctgacactacagacaaggtc

SEQ ID NO: 4714648 - DNA, 25 bp, Homo sapien
tcaaaagacaaaatcggctgggcgt

SEQ ID NO: 4714649 - DNA, 25 bp, Homo sapien
aactgtaccgttgtcatacatgcaa

SEQ ID NO: 4714650 - DNA, 25 bp, Homo sapien
tggtggccacacaggtacgtcattc

SEQ ID NO: 4714651 - DNA, 25 bp, Homo sapien
tctgttaacctagtaaatcctggtc

SEQ ID NO: 4714652 - DNA, 25 bp, Homo sapien
catcctacacggttagcactcagga

SEQ ID NO: 4714653 - DNA, 25 bp, Homo sapien
aacacctgtatgagggtgctggcag

SEQ ID NO: 4714654 - DNA, 25 bp, Homo sapien
ggcaacacctgtatgagggtgctgg

SEQ ID NO: 4714655 - DNA, 25 bp, Homo sapien
caacacctgtatgagggtgctggca

SEQ ID NO: 4714656 - DNA, 25 bp, Homo sapien
gcaacacctgtatgagggtgctggc

SEQ ID NO: 4714657 - DNA, 25 bp, Homo sapien
tccccggtgtccacggactcctgct

SEQ ID NO: 4714658 - DNA, 25 bp, Homo sapien
cccggtgtccacggactcctgctcc

SEQ ID NO: 4714659 - DNA, 25 bp, Homo sapien
cctccccggtgtccacggactcctg

SEQ ID NO: 4714660 - DNA, 25 bp, Homo sapien
ctccccggtgtccacggactcctgc

SEQ ID NO: 4714661 - DNA, 25 bp, Homo sapien
gcttgatccagggactgtcggtctt

SEQ ID NO: 4714662 - DNA, 25 bp, Homo sapien
tcttgagaaatttcttcttaatgct

SEQ ID NO: 4714663 - DNA, 25 bp, Homo sapien
ctggctggcttgatccagggactgt

SEQ ID NO: 4714664 - DNA, 25 bp, Homo sapien
tcttcttaatgctggattccgaact

SEQ ID NO: 4714665 - DNA, 25 bp, Homo sapien
gagggcaccgctgggcttctttcta

SEQ ID NO: 4714666 - DNA, 25 bp, Homo sapien
agggcaccgctgggcttctttctac

SEQ ID NO: 4714667 - DNA, 25 bp, Homo sapien
cgagggcaccgctgggcttctttct

SEQ ID NO: 4714668 - DNA, 25 bp, Homo sapien
tgactcggagatccagggagtccag

SEQ ID NO: 4714669 - DNA, 25 bp, Homo sapien
tcctggtgccgtctgctcagcgctt

SEQ ID NO: 4714670 - DNA, 25 bp, Homo sapien
tctgcttgtgaagacagaattcctt

SEQ ID NO: 4714671 - DNA, 25 bp, Homo sapien
tccagagaaacttccatgtaccctg

SEQ ID NO: 4714672 - DNA, 25 bp, Homo sapien
gcctgtctcttctacacactgatga

SEQ ID NO: 4714673 - DNA, 25 bp, Homo sapien
ccaatcgctgactgaccaatcggcg

SEQ ID NO: 4714674 - DNA, 25 bp, Homo sapien
tacacactgatgatctacatcaaga

SEQ ID NO: 4714675 - DNA, 25 bp, Homo sapien
gactgaacaggccaatcgctgactg

SEQ ID NO: 4714676 - DNA, 25 bp, Homo sapien
agacgccatccagcgccacttgacc

SEQ ID NO: 4714677 - DNA, 25 bp, Homo sapien
cagacgccatccagcgccacttgac

SEQ ID NO: 4714678 - DNA, 25 bp, Homo sapien
atccagcgccacttgaccactgcct

SEQ ID NO: 4714679 - DNA, 25 bp, Homo sapien
gccatccagcgccacttgaccactg

SEQ ID NO: 4714680 - DNA, 25 bp, Homo sapien
cacgctgccgtcaaggactctgtgc

SEQ ID NO: 4714681 - DNA, 25 bp, Homo sapien
ttcctaatcatgtgctgcccgaggt

SEQ ID NO: 4714682 - DNA, 25 bp, Homo sapien
agcctcgcctctggatcacccaaac

SEQ ID NO: 4714683 - DNA, 25 bp, Homo sapien
ctgtgcaggaggcacttcctaatca

SEQ ID NO: 4714684 - DNA, 25 bp, Homo sapien
gacacatgtcagctcatgcaatcct

SEQ ID NO: 4714685 - DNA, 25 bp, Homo sapien
acacatgtcagctcatgcaatcctg

SEQ ID NO: 4714686 - DNA, 25 bp, Homo sapien
cacatgtcagctcatgcaatcctga

SEQ ID NO: 4714687 - DNA, 25 bp, Homo sapien
acatgtcagctcatgcaatcctgac

SEQ ID NO: 4714688 - DNA, 25 bp, Homo sapien
cagagaggcacttcctggaggccgt

SEQ ID NO: 4714689 - DNA, 25 bp, Homo sapien
cggtgtttccatccggcagctgcag

SEQ ID NO: 4714690 - DNA, 25 bp, Homo sapien
ggtccacgctctctgtagccatgca

SEQ ID NO: 4714691 - DNA, 25 bp, Homo sapien
tgtggtgatctctcgactcttcggt

SEQ ID NO: 4714692 - DNA, 25 bp, Homo sapien
tgctgggctgggctttctcactcac

SEQ ID NO: 4714693 - DNA, 25 bp, Homo sapien
ctgggctgggctttctcactcactc

SEQ ID NO: 4714694 - DNA, 25 bp, Homo sapien
tcgaggggctgtcggggcccctgct

SEQ ID NO: 4714695 - DNA, 25 bp, Homo sapien
gggctgggctttctcactcactcct

SEQ ID NO: 4714696 - DNA, 25 bp, Homo sapien
taatcgagctgaagatggatccgct

SEQ ID NO: 4714697 - DNA, 25 bp, Homo sapien
gagcgccctacgcaaaaggcttgga

SEQ ID NO: 4714698 - DNA, 25 bp, Homo sapien
gacgacactaatggccacgtgctga

SEQ ID NO: 4714699 - DNA, 25 bp, Homo sapien
caggaaactcgtggaagcaacagcc

SEQ ID NO: 4714700 - DNA, 25 bp, Homo sapien
cacagcaggccagtgagtctggagg

SEQ ID NO: 4714701 - DNA, 25 bp, Homo sapien
ctctcacgggcctcacctgtatcac

SEQ ID NO: 4714702 - DNA, 25 bp, Homo sapien
gcaggccagtgagtctggaggcgcc

SEQ ID NO: 4714703 - DNA, 25 bp, Homo sapien
atcacctgggcgacggccgatgctg

SEQ ID NO: 4714704 - DNA, 25 bp, Homo sapien
cacgccaacaggcaccagggtgagg

SEQ ID NO: 4714705 - DNA, 25 bp, Homo sapien
aagaggaggcgaaccagtggttctc

SEQ ID NO: 4714706 - DNA, 25 bp, Homo sapien
gcatcaggagaaacggggaacactt

SEQ ID NO: 4714707 - DNA, 25 bp, Homo sapien
tgctgaatcagaaaccccggccacg

SEQ ID NO: 4714708 - DNA, 25 bp, Homo sapien
caacgccagtgtcggagtctgagta

SEQ ID NO: 4714709 - DNA, 25 bp, Homo sapien
ccggaaacgtggagatacagagaga

SEQ ID NO: 4714710 - DNA, 25 bp, Homo sapien
agtctgagtaaaggcatgtgcaccg

SEQ ID NO: 4714711 - DNA, 25 bp, Homo sapien
tcacagggaagcacgtgtcacacgg

SEQ ID NO: 4714712 - DNA, 25 bp, Homo sapien
gccacagatgagaggcgctgacgca

SEQ ID NO: 4714713 - DNA, 25 bp, Homo sapien
gaggcgctgacgcagacgtcgccta

SEQ ID NO: 4714714 - DNA, 25 bp, Homo sapien
gaggtgggaaaagccgtcacatagg

SEQ ID NO: 4714715 - DNA, 25 bp, Homo sapien
agccgtcacatagggagcccgctgg

SEQ ID NO: 4714716 - DNA, 25 bp, Homo sapien
gagggttccaaaggctaactgcgcc

SEQ ID NO: 4714717 - DNA, 25 bp, Homo sapien
cagacctttgaccatggactaggca

SEQ ID NO: 4714718 - DNA, 25 bp, Homo sapien
tttgaaacaagtgagaggctctgca

SEQ ID NO: 4714719 - DNA, 25 bp, Homo sapien
tggcagaacatgcagcgagtgacat

SEQ ID NO: 4714720 - DNA, 25 bp, Homo sapien
agggggccaggcgcgaccacatcca

SEQ ID NO: 4714721 - DNA, 25 bp, Homo sapien
agggggccagacgcgaccacatcca

SEQ ID NO: 4714722 - DNA, 25 bp, Homo sapien
ccagacgcgaccacatccaccagat

SEQ ID NO: 4714723 - DNA, 25 bp, Homo sapien
aggcgcgaccacatccaccagatcc

SEQ ID NO: 4714724 - DNA, 25 bp, Homo sapien
ttgaccacgctgtttgtgcaccggc

SEQ ID NO: 4714725 - DNA, 25 bp, Homo sapien
gctgtgcagaagtagccacagccag

SEQ ID NO: 4714726 - DNA, 25 bp, Homo sapien
gtcttcacacagcacgaggagcggg

SEQ ID NO: 4714727 - DNA, 25 bp, Homo sapien
agcactggtgcttcaccatgcggcc

SEQ ID NO: 4714728 - DNA, 25 bp, Homo sapien
cgtcctagtcatctccaaaagcggt

SEQ ID NO: 4714729 - DNA, 25 bp, Homo sapien
gctgctggaccacccgacagcaggt

SEQ ID NO: 4714730 - DNA, 25 bp, Homo sapien
agacggacaccagacctgggccagc

SEQ ID NO: 4714731 - DNA, 25 bp, Homo sapien
tgaacactggagacctccagacgga

SEQ ID NO: 4714732 - DNA, 25 bp, Homo sapien
tatcgtcacctctttggccttggag

SEQ ID NO: 4714733 - DNA, 25 bp, Homo sapien
gaaacggtgagagatgctgctctcg

SEQ ID NO: 4714734 - DNA, 25 bp, Homo sapien
tggtgtctgctttagctatcgtcac

SEQ ID NO: 4714735 - DNA, 25 bp, Homo sapien
caatagctggcgttattgactcgag

SEQ ID NO: 4714736 - DNA, 25 bp, Homo sapien
ctgcagcttgtcgtcctccgagagt

SEQ ID NO: 4714737 - DNA, 25 bp, Homo sapien
tgcagcttgtcgtcctccgagagtg

SEQ ID NO: 4714738 - DNA, 25 bp, Homo sapien
tttccgagtcgagggcgatgagagc

SEQ ID NO: 4714739 - DNA, 25 bp, Homo sapien
gccgggagttggcctcccaagccca

SEQ ID NO: 4714740 - DNA, 25 bp, Homo sapien
ccgttggatcaaagccctcgggcac

SEQ ID NO: 4714741 - DNA, 25 bp, Homo sapien
cctcgggcacgtgggaggctgcacc

SEQ ID NO: 4714742 - DNA, 25 bp, Homo sapien
ggcttttacacaacacgacgacaga

SEQ ID NO: 4714743 - DNA, 25 bp, Homo sapien
taaaaactgcggacaagaaactgcg

SEQ ID NO: 4714744 - DNA, 25 bp, Homo sapien
cactacagaagatgtcctgggcggt

SEQ ID NO: 4714745 - DNA, 25 bp, Homo sapien
cacaagatctggtcgcttaagagtc

SEQ ID NO: 4714746 - DNA, 25 bp, Homo sapien
ctttgggtggaagcgaagcttcttg

SEQ ID NO: 4714747 - DNA, 25 bp, Homo sapien
tgggtggaagcgaagcttcttgggt

SEQ ID NO: 4714748 - DNA, 25 bp, Homo sapien
ttgggtggaagcgaagcttcttggg

SEQ ID NO: 4714749 - DNA, 25 bp, Homo sapien
tgctttgggtggaagcgaagcttct

SEQ ID NO: 4714750 - DNA, 25 bp, Homo sapien
acgatgaacgtcagagaaatcaagc

SEQ ID NO: 4714751 - DNA, 25 bp, Homo sapien
acgtactgtccagtaaagggcttct

SEQ ID NO: 4714752 - DNA, 25 bp, Homo sapien
tacttgacgtactgtccagtaaagg

SEQ ID NO: 4714753 - DNA, 25 bp, Homo sapien
cagagacgatgaacgtcagagaaat

SEQ ID NO: 4714754 - DNA, 25 bp, Homo sapien
gcatgtggcagatgtccacgtgtcc

SEQ ID NO: 4714755 - DNA, 25 bp, Homo sapien
agatgtccacgtgtccagcctctgc

SEQ ID NO: 4714756 - DNA, 25 bp, Homo sapien
gcgtgcagtggagagcgcttattct

SEQ ID NO: 4714757 - DNA, 25 bp, Homo sapien
gagagcgcttattctggtgctccat

SEQ ID NO: 4714758 - DNA, 25 bp, Homo sapien
acagcagacggtgcgccccgtcgct

SEQ ID NO: 4714759 - DNA, 25 bp, Homo sapien
tatgactccggaaacgggggacaga

SEQ ID NO: 4714760 - DNA, 25 bp, Homo sapien
agacggtgcgccccgtcgctctctc

SEQ ID NO: 4714761 - DNA, 25 bp, Homo sapien
gggcacagcagacggtgcgccccgt

SEQ ID NO: 4714762 - DNA, 25 bp, Homo sapien
agcccctcgaccttgggcttcccag

SEQ ID NO: 4714763 - DNA, 25 bp, Homo sapien
cccaggaatggacctgctccctgtg

SEQ ID NO: 4714764 - DNA, 25 bp, Homo sapien
tgtgttcgggaacagcacgaggtcc

SEQ ID NO: 4714765 - DNA, 25 bp, Homo sapien
ctgtgaagatggagccacgcctctc

SEQ ID NO: 4714766 - DNA, 25 bp, Homo sapien
cgcctctctgaaaggcggagtcagc

SEQ ID NO: 4714767 - DNA, 25 bp, Homo sapien
agccagaacgctgatgtccccagca

SEQ ID NO: 4714768 - DNA, 25 bp, Homo sapien
ccgatgaaaacatgagtgtctgtgg

SEQ ID NO: 4714769 - DNA, 25 bp, Homo sapien
gaaatcttgcaacacgagggaccag

SEQ ID NO: 4714770 - DNA, 25 bp, Homo sapien
cagaaactgcagacacggcatgaaa

SEQ ID NO: 4714771 - DNA, 25 bp, Homo sapien
atgccagtcctaccagccgctcggt

SEQ ID NO: 4714772 - DNA, 25 bp, Homo sapien
gcgctggcagaaggcggtgcgggtg

SEQ ID NO: 4714773 - DNA, 25 bp, Homo sapien
tggagccttcgccaacgtcctgggc

SEQ ID NO: 4714774 - DNA, 25 bp, Homo sapien
gccccctgagtgctgcatgccagtc

SEQ ID NO: 4714775 - DNA, 25 bp, Homo sapien
gaggctctgacggacggcgcccttc

SEQ ID NO: 4714776 - DNA, 25 bp, Homo sapien
ggcgcccttcccaggctcgcgagca

SEQ ID NO: 4714777 - DNA, 25 bp, Homo sapien
cctccgcgaggctctgacggacggc

SEQ ID NO: 4714778 - DNA, 25 bp, Homo sapien
gcactccccgccaacggctacccat

SEQ ID NO: 4714779 - DNA, 25 bp, Homo sapien
ggactccaaggtcgaagccgccggc

SEQ ID NO: 4714780 - DNA, 25 bp, Homo sapien
tgggactccaaggtcgaagccgccg

SEQ ID NO: 4714781 - DNA, 25 bp, Homo sapien
ctgggactccaaggtcgaagccgcc

SEQ ID NO: 4714782 - DNA, 25 bp, Homo sapien
cgcaagcggagcggctgacactgac

SEQ ID NO: 4714783 - DNA, 25 bp, Homo sapien
tgatttagtactcgccaaaataagt

SEQ ID NO: 4714784 - DNA, 25 bp, Homo sapien
tagtactcgccaaaataagtggaaa

SEQ ID NO: 4714785 - DNA, 25 bp, Homo sapien
aaaatcctgatttccagtagcatgc

SEQ ID NO: 4714786 - DNA, 25 bp, Homo sapien
aataagtggaaaatcctgatttcca

SEQ ID NO: 4714787 - DNA, 25 bp, Homo sapien
gggtcctctggtcttctgagcaggt

SEQ ID NO: 4714788 - DNA, 25 bp, Homo sapien
agcaggtgtcaatattagcgcccgc

SEQ ID NO: 4714789 - DNA, 25 bp, Homo sapien
ttctgagcaggtgtcaatattagcg

SEQ ID NO: 4714790 - DNA, 25 bp, Homo sapien
caacggggtcctctggtcttctgag

SEQ ID NO: 4714791 - DNA, 25 bp, Homo sapien
cagccttgatgaggtacttcactgc

SEQ ID NO: 4714792 - DNA, 25 bp, Homo sapien
ccagccttgatgaggtacttcactg

SEQ ID NO: 4714793 - DNA, 25 bp, Homo sapien
tgtggccgtatatagtaagttttga

SEQ ID NO: 4714794 - DNA, 25 bp, Homo sapien
tgttttcattactgtggccgtatat

SEQ ID NO: 4714795 - DNA, 25 bp, Homo sapien
ctctgggtctcttgagactccgtat

SEQ ID NO: 4714796 - DNA, 25 bp, Homo sapien
tgagactccgtataaactttagaag

SEQ ID NO: 4714797 - DNA, 25 bp, Homo sapien
cagaagcgggtcatctacggacggt

SEQ ID NO: 4714798 - DNA, 25 bp, Homo sapien
tcaacagatcgtactgagggagctg

SEQ ID NO: 4714799 - DNA, 25 bp, Homo sapien
tacgaacgtgagtgcgtgacaggca

SEQ ID NO: 4714800 - DNA, 25 bp, Homo sapien
gggagctgctttgccgcgcatgaaa

SEQ ID NO: 4714801 - DNA, 25 bp, Homo sapien
tatcggtcacatcgtacaggatttg

SEQ ID NO: 4714802 - DNA, 25 bp, Homo sapien
catcgtatggatggactgaatgtgc

SEQ ID NO: 4714803 - DNA, 25 bp, Homo sapien
ggctgagtaacatcccatcgtatgg

SEQ ID NO: 4714804 - DNA, 25 bp, Homo sapien
catccatgctgttcataggtcaaaa

SEQ ID NO: 4714805 - DNA, 25 bp, Homo sapien
ccttatctcggtggagtccgtgtag

SEQ ID NO: 4714806 - DNA, 25 bp, Homo sapien
tatctcggtggagtccgtgtagcag

SEQ ID NO: 4714807 - DNA, 25 bp, Homo sapien
gagtccgtgtagcagtcatagagtt

SEQ ID NO: 4714808 - DNA, 25 bp, Homo sapien
cggtggagtccgtgtagcagtcata

SEQ ID NO: 4714809 - DNA, 25 bp, Homo sapien
tcccactttggtctgggagtcgtag

SEQ ID NO: 4714810 - DNA, 25 bp, Homo sapien
tcgtaggcatcgtaactgggattac

SEQ ID NO: 4714811 - DNA, 25 bp, Homo sapien
tgcccagattgggaacaccctctca

SEQ ID NO: 4714812 - DNA, 25 bp, Homo sapien
ggagaccaaatagatcacacctatc

SEQ ID NO: 4714813 - DNA, 25 bp, Homo sapien
ctgagtgcgggatccaggagaaccc

SEQ ID NO: 4714814 - DNA, 25 bp, Homo sapien
tctaccatgcgggtggggtactgtc

SEQ ID NO: 4714815 - DNA, 25 bp, Homo sapien
ggagaacccggtgtctaccatgcgg

SEQ ID NO: 4714816 - DNA, 25 bp, Homo sapien
aacccggtgtctaccatgcgggtgg

SEQ ID NO: 4714817 - DNA, 25 bp, Homo sapien
tactggaccacttcgtagtggcctt

SEQ ID NO: 4714818 - DNA, 25 bp, Homo sapien
agccaggtgcaaacacgtagagccc

SEQ ID NO: 4714819 - DNA, 25 bp, Homo sapien
gtgcaaacacgtagagccctctgcg

SEQ ID NO: 4714820 - DNA, 25 bp, Homo sapien
catctgtccatttgaaagcaggtac

SEQ ID NO: 4714821 - DNA, 25 bp, Homo sapien
cgtggagggtccgagctggccctga

SEQ ID NO: 4714822 - DNA, 25 bp, Homo sapien
gtgtggaagaggacgctggagggcc

SEQ ID NO: 4714823 - DNA, 25 bp, Homo sapien
cctgtgtgtggaaggcgatgccgtg

SEQ ID NO: 4714824 - DNA, 25 bp, Homo sapien
cgatgccgtggagggtccgagctgg

SEQ ID NO: 4714825 - DNA, 25 bp, Homo sapien
aatggcacacacacgggagctgaaa

SEQ ID NO: 4714826 - DNA, 25 bp, Homo sapien
caacacagctgcgtgcaacgagtct

SEQ ID NO: 4714827 - DNA, 25 bp, Homo sapien
ttcagcctccaatggtggctccgtg

SEQ ID NO: 4714828 - DNA, 25 bp, Homo sapien
gaaacttcgtaagcccaggccagac

SEQ ID NO: 4714829 - DNA, 25 bp, Homo sapien
tctgtggcccagatcatgggtgtcc

SEQ ID NO: 4714830 - DNA, 25 bp, Homo sapien
ttgtctcggatgttgatgtcagagc

SEQ ID NO: 4714831 - DNA, 25 bp, Homo sapien
atcatgggtgtccagcctccgtcat

SEQ ID NO: 4714832 - DNA, 25 bp, Homo sapien
tcacgaggtccacgtgcttgtactc

SEQ ID NO: 4714833 - DNA, 25 bp, Homo sapien
agcacagtgccgggccgatgctgcc

SEQ ID NO: 4714834 - DNA, 25 bp, Homo sapien
tgccgggccgatgctgccacaggaa

SEQ ID NO: 4714835 - DNA, 25 bp, Homo sapien
atctgcatccagcacaggacagcca

SEQ ID NO: 4714836 - DNA, 25 bp, Homo sapien
ccacagcacagtgccgggccgatgc

SEQ ID NO: 4714837 - DNA, 25 bp, Homo sapien
caggtgtggtcgtgggcgcctataa

SEQ ID NO: 4714838 - DNA, 25 bp, Homo sapien
cccagctctatggaaggctgaggcg

SEQ ID NO: 4714839 - DNA, 25 bp, Homo sapien
aagaccagtctggccaacacggtaa

SEQ ID NO: 4714840 - DNA, 25 bp, Homo sapien
ggcagatcacctgaggtcggggttc

SEQ ID NO: 4714841 - DNA, 25 bp, Homo sapien
caatttagtgggtttatttgtggct

SEQ ID NO: 4714842 - DNA, 25 bp, Homo sapien
gagaggaagtgtcagccctccctcc

SEQ ID NO: 4714843 - DNA, 25 bp, Homo sapien
cagtggtccctgtttctaggtggga

SEQ ID NO: 4714844 - DNA, 25 bp, Homo sapien
aacaatgaatggcaagggcccgtgc

SEQ ID NO: 4714845 - DNA, 25 bp, Homo sapien
ccacggaggaggcactgcagctcag

SEQ ID NO: 4714846 - DNA, 25 bp, Homo sapien
gaatgaggtagaaaccccctggata

SEQ ID NO: 4714847 - DNA, 25 bp, Homo sapien
gatacagtcatggaagccctgcagc

SEQ ID NO: 4714848 - DNA, 25 bp, Homo sapien
cccgcagtgggaaagaactccggtg

SEQ ID NO: 4714849 - DNA, 25 bp, Homo sapien
ctcagggctcctctcttcatggtgc

SEQ ID NO: 4714850 - DNA, 25 bp, Homo sapien
ttctcttccttctgccggctcaggg

SEQ ID NO: 4714851 - DNA, 25 bp, Homo sapien
ttccttctgccggctcagggctcct

SEQ ID NO: 4714852 - DNA, 25 bp, Homo sapien
gctcagggctcctctcttcatggtg

SEQ ID NO: 4714853 - DNA, 25 bp, Homo sapien
aggccgaccagccacactagggccg

SEQ ID NO: 4714854 - DNA, 25 bp, Homo sapien
cagcatcagagagctaacagctctg

SEQ ID NO: 4714855 - DNA, 25 bp, Homo sapien
atgcttccattctgggggaacagcc

SEQ ID NO: 4714856 - DNA, 25 bp, Homo sapien
tcttcctccaaggtacccgccacag

SEQ ID NO: 4714857 - DNA, 25 bp, Homo sapien
gaaagctgcccatggtgagagccct

SEQ ID NO: 4714858 - DNA, 25 bp, Homo sapien
ttctataaaaccgagacacgcagac

SEQ ID NO: 4714859 - DNA, 25 bp, Homo sapien
cctggctactggcagtctctgaaaa

SEQ ID NO: 4714860 - DNA, 25 bp, Homo sapien
gggcacttcaggcaacgaaaatggg

SEQ ID NO: 4714861 - DNA, 25 bp, Homo sapien
ccatgtgcccggggagaggctctgg

SEQ ID NO: 4714862 - DNA, 25 bp, Homo sapien
gcccatgtgcccggggagaggctct

SEQ ID NO: 4714863 - DNA, 25 bp, Homo sapien
gcagcccatgtgcccggggagaggc

SEQ ID NO: 4714864 - DNA, 25 bp, Homo sapien
catgtgcccggggagaggctctgga

SEQ ID NO: 4714865 - DNA, 25 bp, Homo sapien
gccgcccagtgcaggcaaatgttct

SEQ ID NO: 4714866 - DNA, 25 bp, Homo sapien
tatgtccacgcagccggagaacgcc

SEQ ID NO: 4714867 - DNA, 25 bp, Homo sapien
gagaacgccgcccagtgcaggcaaa

SEQ ID NO: 4714868 - DNA, 25 bp, Homo sapien
ctatgtccacgcagccggagaacgc

SEQ ID NO: 4714869 - DNA, 25 bp, Homo sapien
acagtcgtagcggttctcccgggcg

SEQ ID NO: 4714870 - DNA, 25 bp, Homo sapien
cagtggcgagtctccgtggatgttc

SEQ ID NO: 4714871 - DNA, 25 bp, Homo sapien
ttctcccgggcggcaatgtgcagtg

SEQ ID NO: 4714872 - DNA, 25 bp, Homo sapien
tgttcacggcgtggaggtcgcactt

SEQ ID NO: 4714873 - DNA, 25 bp, Homo sapien
catctgaatcccgagaaagaaagag

SEQ ID NO: 4714874 - DNA, 25 bp, Homo sapien
atctgcagagcgctccacacctgag

SEQ ID NO: 4714875 - DNA, 25 bp, Homo sapien
acctgagagttgaggctcgcacact

SEQ ID NO: 4714876 - DNA, 25 bp, Homo sapien
aggtgacatctgaatcccgagaaag

SEQ ID NO: 4714877 - DNA, 25 bp, Homo sapien
ggacgtcacgcagttctgagagacg

SEQ ID NO: 4714878 - DNA, 25 bp, Homo sapien
gatgcgctcgtagcctcgagcgatg

SEQ ID NO: 4714879 - DNA, 25 bp, Homo sapien
tggctcgctgtccacggcgttgaca

SEQ ID NO: 4714880 - DNA, 25 bp, Homo sapien
tgatatttctgtcgatgttcatggg

SEQ ID NO: 4714881 - DNA, 25 bp, Homo sapien
tgctggaggagcagtcgtcgatgca

SEQ ID NO: 4714882 - DNA, 25 bp, Homo sapien
tgagctggccgcacatgcagttgct

SEQ ID NO: 4714883 - DNA, 25 bp, Homo sapien
tgtcgtaccagcagcgcatgctgag

SEQ ID NO: 4714884 - DNA, 25 bp, Homo sapien
gctggccgcacatgcagttgctgga

SEQ ID NO: 4714885 - DNA, 25 bp, Homo sapien
cacctgagcccacgcacacgaggcc

SEQ ID NO: 4714886 - DNA, 25 bp, Homo sapien
ctgagcccacgcacacgaggccgcc

SEQ ID NO: 4714887 - DNA, 25 bp, Homo sapien
gagcccacgcacacgaggccgccct

SEQ ID NO: 4714888 - DNA, 25 bp, Homo sapien
gcccacgcacacgaggccgccctca

SEQ ID NO: 4714889 - DNA, 25 bp, Homo sapien
ggtcacagacgcctgcactgttttt

SEQ ID NO: 4714890 - DNA, 25 bp, Homo sapien
agggaatccgcagccatgtcctcgg

SEQ ID NO: 4714891 - DNA, 25 bp, Homo sapien
ggctcacgaccctgactcgggtgct

SEQ ID NO: 4714892 - DNA, 25 bp, Homo sapien
cactgtttttgcagacccggaccag

SEQ ID NO: 4714893 - DNA, 25 bp, Homo sapien
cctagggaaaaactccatgtgtacg

SEQ ID NO: 4714894 - DNA, 25 bp, Homo sapien
gctgctctgaacaattagggcgctc

SEQ ID NO: 4714895 - DNA, 25 bp, Homo sapien
tagggcgctcctcagaacattcctt

SEQ ID NO: 4714896 - DNA, 25 bp, Homo sapien
gcccagtgtggcttaaacggacata

SEQ ID NO: 4714897 - DNA, 25 bp, Homo sapien
tgagaccattctgtacgacgcgatt

SEQ ID NO: 4714898 - DNA, 25 bp, Homo sapien
cattcgaagatcaagggaggctccg

SEQ ID NO: 4714899 - DNA, 25 bp, Homo sapien
ccagcaggagcacgcgtggttgcat

SEQ ID NO: 4714900 - DNA, 25 bp, Homo sapien
acgcgatttcggcagttcctccagc

SEQ ID NO: 4714901 - DNA, 25 bp, Homo sapien
cctgagaagcgttgggacatcacct

SEQ ID NO: 4714902 - DNA, 25 bp, Homo sapien
gaatccagggaaaggagacgcagct

SEQ ID NO: 4714903 - DNA, 25 bp, Homo sapien
cacctcactgttagggaagcccaga

SEQ ID NO: 4714904 - DNA, 25 bp, Homo sapien
gaaaactggttctgtatccgaagcg

SEQ ID NO: 4714905 - DNA, 25 bp, Homo sapien
gtcccgcgtccggtagagctgcagc

SEQ ID NO: 4714906 - DNA, 25 bp, Homo sapien
tcccgcgtccggtagagctgcagcc

SEQ ID NO: 4714907 - DNA, 25 bp, Homo sapien
atgtcctgcagggaccgcacgcccc

SEQ ID NO: 4714908 - DNA, 25 bp, Homo sapien
aaggtgcctggtgggatgtcctgca

SEQ ID NO: 4714909 - DNA, 25 bp, Homo sapien
tcgcagacaaaggtgcctggtggga

SEQ ID NO: 4714910 - DNA, 25 bp, Homo sapien
gcagggaccgcacgccccagcccat

SEQ ID NO: 4714911 - DNA, 25 bp, Homo sapien
ggtaagaatcttcctctcgaacgtc

SEQ ID NO: 4714912 - DNA, 25 bp, Homo sapien
tattgtcgagatcaaagaggtaaga

SEQ ID NO: 4714913 - DNA, 25 bp, Homo sapien
ctcgaacgtcggcttctgagtctga

SEQ ID NO: 4714914 - DNA, 25 bp, Homo sapien
gtctgaaatcagctccccaacatac

SEQ ID NO: 4714915 - DNA, 25 bp, Homo sapien
agttcgcagcagaggagcctcacaa

SEQ ID NO: 4714916 - DNA, 25 bp, Homo sapien
gagagaaggcgacatctgtggcaca

SEQ ID NO: 4714917 - DNA, 25 bp, Homo sapien
aggcgagtcgttccacagcaaggct

SEQ ID NO: 4714918 - DNA, 25 bp, Homo sapien
acaacacagcctttgtgaggatatg

SEQ ID NO: 4714919 - DNA, 25 bp, Homo sapien
cgtgggtcagagctgtagcagacac

SEQ ID NO: 4714920 - DNA, 25 bp, Homo sapien
aacaagaaccgtacctgggcctgtg

SEQ ID NO: 4714921 - DNA, 25 bp, Homo sapien
tcctggcacccagagattttggcgc

SEQ ID NO: 4714922 - DNA, 25 bp, Homo sapien
tagcagacacctaggaggctttggt

SEQ ID NO: 4714923 - DNA, 25 bp, Homo sapien
gcgccaagttgatgggagatttgaa

SEQ ID NO: 4714924 - DNA, 25 bp, Homo sapien
ccaagttgatgggagatttgaacaa

SEQ ID NO: 4714925 - DNA, 25 bp, Homo sapien
ttccacctaggtttcgggcaagcac

SEQ ID NO: 4714926 - DNA, 25 bp, Homo sapien
aagcacaccatggagagggctccct

SEQ ID NO: 4714927 - DNA, 25 bp, Homo sapien
cctgtgtggagaaagtgctgccgca

SEQ ID NO: 4714928 - DNA, 25 bp, Homo sapien
tggagtggacctcactacaggtgct

SEQ ID NO: 4714929 - DNA, 25 bp, Homo sapien
gctcacttcacttcgccagaggcaa

SEQ ID NO: 4714930 - DNA, 25 bp, Homo sapien
tccagtggcaacgtctgtgagacca

SEQ ID NO: 4714931 - DNA, 25 bp, Homo sapien
gtctgtgacacaaatctctgcccga

SEQ ID NO: 4714932 - DNA, 25 bp, Homo sapien
caattccggaactagcaacggcgca

SEQ ID NO: 4714933 - DNA, 25 bp, Homo sapien
gactaagaatctataggcgacccct

SEQ ID NO: 4714934 - DNA, 25 bp, Homo sapien
cacgaaggtcttgataagcagcaaa

SEQ ID NO: 4714935 - DNA, 25 bp, Homo sapien
cagcccgaggcccggcacgcccaac

SEQ ID NO: 4714936 - DNA, 25 bp, Homo sapien
gcgcacactgggccgagtgggtggc

SEQ ID NO: 4714937 - DNA, 25 bp, Homo sapien
aggcccggcacgcccaacccctgct

SEQ ID NO: 4714938 - DNA, 25 bp, Homo sapien
cgcccaacccctgctgcgcacactg

SEQ ID NO: 4714939 - DNA, 25 bp, Homo sapien
caccaataggagaaaggaggccggg

SEQ ID NO: 4714940 - DNA, 25 bp, Homo sapien
ctggcaccaataggagaaaggaggc

SEQ ID NO: 4714941 - DNA, 25 bp, Homo sapien
tggcaccaataggagaaaggaggcc

SEQ ID NO: 4714942 - DNA, 25 bp, Homo sapien
gcaccaataggagaaaggaggccgg

SEQ ID NO: 4714943 - DNA, 25 bp, Homo sapien
tcccacccgaggacccatggggctg

SEQ ID NO: 4714944 - DNA, 25 bp, Homo sapien
cttccagcgcggtggaatgtggaca

SEQ ID NO: 4714945 - DNA, 25 bp, Homo sapien
tgcgggccgttcccttgacggcgtc

SEQ ID NO: 4714946 - DNA, 25 bp, Homo sapien
gacggcgtccccatggggcttccag

SEQ ID NO: 4714947 - DNA, 25 bp, Homo sapien
gcgtcgatgcagtaaacctccccgt

SEQ ID NO: 4714948 - DNA, 25 bp, Homo sapien
gtggttgatgaaccggctgacgttc

SEQ ID NO: 4714949 - DNA, 25 bp, Homo sapien
tgaacacgcgcacgggcaccaggtt

SEQ ID NO: 4714950 - DNA, 25 bp, Homo sapien
ctgacgttcccgtagaaccgcgcgt

SEQ ID NO: 4714951 - DNA, 25 bp, Homo sapien
tgaagagcttgcctttgatgtccca

SEQ ID NO: 4714952 - DNA, 25 bp, Homo sapien
ggagccgcagcggcagctgaagagc

SEQ ID NO: 4714953 - DNA, 25 bp, Homo sapien
gggccagggccgcgctcgagtgccg

SEQ ID NO: 4714954 - DNA, 25 bp, Homo sapien
agagcttgcctttgatgtcccagaa

SEQ ID NO: 4714955 - DNA, 25 bp, Homo sapien
cggcagccgcggagctggtgtcggg

SEQ ID NO: 4714956 - DNA, 25 bp, Homo sapien
cggagctggtgtcgggcaagccgtc

SEQ ID NO: 4714957 - DNA, 25 bp, Homo sapien
agccgcggagctggtgtcgggcaag

SEQ ID NO: 4714958 - DNA, 25 bp, Homo sapien
tggtgtcgggcaagccgtcctcctg

SEQ ID NO: 4714959 - DNA, 25 bp, Homo sapien
gaaacttcgcaacgacaaatcagca

SEQ ID NO: 4714960 - DNA, 25 bp, Homo sapien
aaaatcaacagaaggtgccagcgtc

SEQ ID NO: 4714961 - DNA, 25 bp, Homo sapien
gagcagctcgcgctaacggtggctt

SEQ ID NO: 4714962 - DNA, 25 bp, Homo sapien
gaccctttcggttgcgtgcggaatc

SEQ ID NO: 4714963 - DNA, 25 bp, Homo sapien
tatttcacgtggtgagtagaaacca

SEQ ID NO: 4714964 - DNA, 25 bp, Homo sapien
aaaaagtatatgacctgccaggcca

SEQ ID NO: 4714965 - DNA, 25 bp, Homo sapien
aaccccactgttactgcactaatta

SEQ ID NO: 4714966 - DNA, 25 bp, Homo sapien
tattcacgctacaagactaacatct

SEQ ID NO: 4714967 - DNA, 25 bp, Homo sapien
ggaaacagaacaagaaatggtcaga

SEQ ID NO: 4714968 - DNA, 25 bp, Homo sapien
ttattgatttcattggaaacagaac

SEQ ID NO: 4714969 - DNA, 25 bp, Homo sapien
tttttattgatttcattggaaacag

SEQ ID NO: 4714970 - DNA, 25 bp, Homo sapien
tattgatttcattggaaacagaaca

SEQ ID NO: 4714971 - DNA, 25 bp, Homo sapien
cccacagcgcaaaggccctgtaagg

SEQ ID NO: 4714972 - DNA, 25 bp, Homo sapien
tctggtttagggacaaggcggtcac

SEQ ID NO: 4714973 - DNA, 25 bp, Homo sapien
gcgcaaaggccctgtaaggtctctt

SEQ ID NO: 4714974 - DNA, 25 bp, Homo sapien
tcttcctcccaagccgagtctggtt

SEQ ID NO: 4714975 - DNA, 25 bp, Homo sapien
tgggtggcctctgctcacaacccat

SEQ ID NO: 4714976 - DNA, 25 bp, Homo sapien
ctgggtggcctctgctcacaaccca

SEQ ID NO: 4714977 - DNA, 25 bp, Homo sapien
tgatgatccagggggcttcctaggg

SEQ ID NO: 4714978 - DNA, 25 bp, Homo sapien
ggcttcctaggggatgcgatcaggc

SEQ ID NO: 4714979 - DNA, 25 bp, Homo sapien
tccagggggcttcctaggggatgcg

SEQ ID NO: 4714980 - DNA, 25 bp, Homo sapien
ttcctaggggatgcgatcaggcagc

SEQ ID NO: 4714981 - DNA, 25 bp, Homo sapien
tttgttcacaattgccttgcctggc

SEQ ID NO: 4714982 - DNA, 25 bp, Homo sapien
ttggctgaatatgaagctgggcatg

SEQ ID NO: 4714983 - DNA, 25 bp, Homo sapien
tctgcataggtgtccccttgagtct

SEQ ID NO: 4714984 - DNA, 25 bp, Homo sapien
aagtccaatcctcctattgagatta

SEQ ID NO: 4714985 - DNA, 25 bp, Homo sapien
tgaacgtgaatgtgcgtctgtcccc

SEQ ID NO: 4714986 - DNA, 25 bp, Homo sapien
tagaaaaacgcgttagctccctgca

SEQ ID NO: 4714987 - DNA, 25 bp, Homo sapien
caattgcgagggctaaatcccagca

SEQ ID NO: 4714988 - DNA, 25 bp, Homo sapien
caagaactggttgatggcctcagct

SEQ ID NO: 4714989 - DNA, 25 bp, Homo sapien
atgtaacgatgaggaccctccagtc

SEQ ID NO: 4714990 - DNA, 25 bp, Homo sapien
tgtaacgatgaggaccctccagtcc

SEQ ID NO: 4714991 - DNA, 25 bp, Homo sapien
tgggtcccaaagatgtaacgatgag

SEQ ID NO: 4714992 - DNA, 25 bp, Homo sapien
tctgggtcccaaagatgtaacgatg

SEQ ID NO: 4714993 - DNA, 25 bp, Homo sapien
aaaatatctcggtggagcacagcgc

SEQ ID NO: 4714994 - DNA, 25 bp, Homo sapien
acttaaccagagtgaagggccaccg

SEQ ID NO: 4714995 - DNA, 25 bp, Homo sapien
cataagtggcatcaggagaggatct

SEQ ID NO: 4714996 - DNA, 25 bp, Homo sapien
tgagactggagtgcctctaccacag

SEQ ID NO: 4714997 - DNA, 25 bp, Homo sapien
cttcttcgggtggatgatgagctaa

SEQ ID NO: 4714998 - DNA, 25 bp, Homo sapien
ggaatgtcatgaccaatggcctcag

SEQ ID NO: 4714999 - DNA, 25 bp, Homo sapien
cttgaaagtgtgcttcataggcctc

SEQ ID NO: 4715000 - DNA, 25 bp, Homo sapien
taggcctccaactatgggaatgtca

SEQ ID NO: 4715001 - DNA, 25 bp, Homo sapien
gttttggtttgattgtctccagtgc

SEQ ID NO: 4715002 - DNA, 25 bp, Homo sapien
gaaccagttttggtttgattgtctc

SEQ ID NO: 4715003 - DNA, 25 bp, Homo sapien
gattagtgttgccaaagaaccagtt

SEQ ID NO: 4715004 - DNA, 25 bp, Homo sapien
tgcccagagggttgccattctgatt

SEQ ID NO: 4715005 - DNA, 25 bp, Homo sapien
tcaggtcacaaagttcccctctagt

SEQ ID NO: 4715006 - DNA, 25 bp, Homo sapien
tctttgcgtacaattcagatctggt

SEQ ID NO: 4715007 - DNA, 25 bp, Homo sapien
tttggatatccaggttatgctagcc

SEQ ID NO: 4715008 - DNA, 25 bp, Homo sapien
tgtgcactgcactattctcatcagg

SEQ ID NO: 4715009 - DNA, 25 bp, Homo sapien
tccagaattttgtgttcaccgttcc

SEQ ID NO: 4715010 - DNA, 25 bp, Homo sapien
cctcccggacttccgcatctcagag

SEQ ID NO: 4715011 - DNA, 25 bp, Homo sapien
ttaattctacaaataataacaggca

SEQ ID NO: 4715012 - DNA, 25 bp, Homo sapien
aggcactagggctctgtggaagaca

SEQ ID NO: 4715013 - DNA, 25 bp, Homo sapien
gaaggtcacaaattggacagactgg

SEQ ID NO: 4715014 - DNA, 25 bp, Homo sapien
ttcagttgttcctgcgatgtcccct

SEQ ID NO: 4715015 - DNA, 25 bp, Homo sapien
tggtcacagcccttgcggtgggagg

SEQ ID NO: 4715016 - DNA, 25 bp, Homo sapien
tgtcccctgtagatctcaactctgt

SEQ ID NO: 4715017 - DNA, 25 bp, Homo sapien
ggtgtagacagctcggtcggtgagg

SEQ ID NO: 4715018 - DNA, 25 bp, Homo sapien
gtgtagacagctcggtcggtgagga

SEQ ID NO: 4715019 - DNA, 25 bp, Homo sapien
aggtgtagacagctcggtcggtgag

SEQ ID NO: 4715020 - DNA, 25 bp, Homo sapien
gaagtccctacagcaggtgtagaca

SEQ ID NO: 4715021 - DNA, 25 bp, Homo sapien
aagtccctacagcaggtgtagacag

SEQ ID NO: 4715022 - DNA, 25 bp, Homo sapien
aggaagtccctacagcaggtgtaga

SEQ ID NO: 4715023 - DNA, 25 bp, Homo sapien
gaagtgcctacagcaggtgtagaca

SEQ ID NO: 4715024 - DNA, 25 bp, Homo sapien
tgaggcagtgcctactgcgggtgta

SEQ ID NO: 4715025 - DNA, 25 bp, Homo sapien
agtgaggcagtgcctactgcgggtg

SEQ ID NO: 4715026 - DNA, 25 bp, Homo sapien
ctcggtcagtgaggaagtgtctata

SEQ ID NO: 4715027 - DNA, 25 bp, Homo sapien
cggtcagtgaggaagtgtctatagc

SEQ ID NO: 4715028 - DNA, 25 bp, Homo sapien
cacttaggatgcattcagaggcgaa

SEQ ID NO: 4715029 - DNA, 25 bp, Homo sapien
agagggaggcagtccgcacagttcc

SEQ ID NO: 4715030 - DNA, 25 bp, Homo sapien
gtccgcacagttccgagcagaggcg

SEQ ID NO: 4715031 - DNA, 25 bp, Homo sapien
ggtccctcgggctgccgtgtggagt

SEQ ID NO: 4715032 - DNA, 25 bp, Homo sapien
tttacacagcgctcacttcgtgcag

SEQ ID NO: 4715033 - DNA, 25 bp, Homo sapien
tttgtacaaagcacagcaaccattt

SEQ ID NO: 4715034 - DNA, 25 bp, Homo sapien
ggacctgaagctcgctcgcaaggcg

SEQ ID NO: 4715035 - DNA, 25 bp, Homo sapien
ggagctgaccgttttgtacaaagca

SEQ ID NO: 4715036 - DNA, 25 bp, Homo sapien
gaacctgtcacggtcactgccattc

SEQ ID NO: 4715037 - DNA, 25 bp, Homo sapien
ttgcaggccacgccccgttagggaa

SEQ ID NO: 4715038 - DNA, 25 bp, Homo sapien
cctctgaccgccttgcaggccacgc

SEQ ID NO: 4715039 - DNA, 25 bp, Homo sapien
cgttagggaacctgtcacggtcact

SEQ ID NO: 4715040 - DNA, 25 bp, Homo sapien
gggccccgcgtgcatccccggccca

SEQ ID NO: 4715041 - DNA, 25 bp, Homo sapien
gggaccgcagcggacctcgcccggc

SEQ ID NO: 4715042 - DNA, 25 bp, Homo sapien
caggcgctcagagcggagcagccac

SEQ ID NO: 4715043 - DNA, 25 bp, Homo sapien
cgcggggcgcgccaggcgctcagag

SEQ ID NO: 4715044 - DNA, 25 bp, Homo sapien
cggggcccccatagcggccgcccag

SEQ ID NO: 4715045 - DNA, 25 bp, Homo sapien
gcccagctcgtccccgaagcggacc

SEQ ID NO: 4715046 - DNA, 25 bp, Homo sapien
ccagctcgtccccgaagcggaccat

SEQ ID NO: 4715047 - DNA, 25 bp, Homo sapien
gggcccccatagcggccgcccagct

SEQ ID NO: 4715048 - DNA, 25 bp, Homo sapien
cgcgctgcgcgatcgattgcttgta

SEQ ID NO: 4715049 - DNA, 25 bp, Homo sapien
attgcttgtagaggacccgctggcc

SEQ ID NO: 4715050 - DNA, 25 bp, Homo sapien
cgcgatcgattgcttgtagaggacc

SEQ ID NO: 4715051 - DNA, 25 bp, Homo sapien
tccgcgcgcgctgcgcgatcgattg

SEQ ID NO: 4715052 - DNA, 25 bp, Homo sapien
tcctcgctgaagacgaagagcgagc

SEQ ID NO: 4715053 - DNA, 25 bp, Homo sapien
tatttgcggacgacgttgtcctcgc

SEQ ID NO: 4715054 - DNA, 25 bp, Homo sapien
tgacggtgaagcagttctgcttgac

SEQ ID NO: 4715055 - DNA, 25 bp, Homo sapien
gatgcgcttcgcgtatttgcggacg

SEQ ID NO: 4715056 - DNA, 25 bp, Homo sapien
cgcccggccccgcccggcaggatat

SEQ ID NO: 4715057 - DNA, 25 bp, Homo sapien
ctgcagccaggcgcgcgcacggccg

SEQ ID NO: 4715058 - DNA, 25 bp, Homo sapien
ccagctcagcccgcacacgcaggca

SEQ ID NO: 4715059 - DNA, 25 bp, Homo sapien
cagctcagcccgcacacgcaggcac

SEQ ID NO: 4715060 - DNA, 25 bp, Homo sapien
catgggcgttttgtccccatcaggg

SEQ ID NO: 4715061 - DNA, 25 bp, Homo sapien
gacatgggcgttttgtccccatcag

SEQ ID NO: 4715062 - DNA, 25 bp, Homo sapien
atgggcgttttgtccccatcaggga

SEQ ID NO: 4715063 - DNA, 25 bp, Homo sapien
tgggcgttttgtccccatcagggag

SEQ ID NO: 4715064 - DNA, 25 bp, Homo sapien
ctgtctccccttctgcactcctggg

SEQ ID NO: 4715065 - DNA, 25 bp, Homo sapien
ctggtgcctcacctccaggacaggc

SEQ ID NO: 4715066 - DNA, 25 bp, Homo sapien
aggctccctgtctccccttctgcac

SEQ ID NO: 4715067 - DNA, 25 bp, Homo sapien
tccctgtctccccttctgcactcct

SEQ ID NO: 4715068 - DNA, 25 bp, Homo sapien
gccgcagcagacagagatcttcaca

SEQ ID NO: 4715069 - DNA, 25 bp, Homo sapien
gtggggccgcagcagacagagatct

SEQ ID NO: 4715070 - DNA, 25 bp, Homo sapien
gcagacagagatcttcacaggaaac

SEQ ID NO: 4715071 - DNA, 25 bp, Homo sapien
cagacagagatcttcacaggaaact

SEQ ID NO: 4715072 - DNA, 25 bp, Homo sapien
aagggtccatcatgacccgtgctga

SEQ ID NO: 4715073 - DNA, 25 bp, Homo sapien
ggtccatcatgacccgtgctgactc

SEQ ID NO: 4715074 - DNA, 25 bp, Homo sapien
ccaagggtccatcatgacccgtgct

SEQ ID NO: 4715075 - DNA, 25 bp, Homo sapien
acccgtgctgactcgcccatgctct

SEQ ID NO: 4715076 - DNA, 25 bp, Homo sapien
ctcctgtcctgtggtggagctggcc

SEQ ID NO: 4715077 - DNA, 25 bp, Homo sapien
tggcccaaggcttggctggcagtac

SEQ ID NO: 4715078 - DNA, 25 bp, Homo sapien
gtggagctggcccaaggcttggctg

SEQ ID NO: 4715079 - DNA, 25 bp, Homo sapien
ggctcctcctgtcctgtggtggagc

SEQ ID NO: 4715080 - DNA, 25 bp, Homo sapien
gttccagccgttccgcaggtaagag

SEQ ID NO: 4715081 - DNA, 25 bp, Homo sapien
gatgattttgatccctgcctcgaag

SEQ ID NO: 4715082 - DNA, 25 bp, Homo sapien
tgtgaggacgaccacgaagtccatg

SEQ ID NO: 4715083 - DNA, 25 bp, Homo sapien
gatcccgatgaaatagggctccgtg

SEQ ID NO: 4715084 - DNA, 25 bp, Homo sapien
gcaggctaacaaagggtgccccaaa

SEQ ID NO: 4715085 - DNA, 25 bp, Homo sapien
caggctaacaaagggtgccccaaag

SEQ ID NO: 4715086 - DNA, 25 bp, Homo sapien
tggacagacacagggccagagagct

SEQ ID NO: 4715087 - DNA, 25 bp, Homo sapien
ggctggacagacacagggccagaga

SEQ ID NO: 4715088 - DNA, 25 bp, Homo sapien
ctggctggacagacacagggccaga

SEQ ID NO: 4715089 - DNA, 25 bp, Homo sapien
gagcagagggcaggatggtggatgg

SEQ ID NO: 4715090 - DNA, 25 bp, Homo sapien
cctatgccgctgtgcaccacaccag

SEQ ID NO: 4715091 - DNA, 25 bp, Homo sapien
cgactgctctctggtcatccgtcca

SEQ ID NO: 4715092 - DNA, 25 bp, Homo sapien
tctggggcacgcctatgccgctgtg

SEQ ID NO: 4715093 - DNA, 25 bp, Homo sapien
gggcacgcccatgccgcaactcatc

SEQ ID NO: 4715094 - DNA, 25 bp, Homo sapien
ggtccatgctccaacgtgtcctggc

SEQ ID NO: 4715095 - DNA, 25 bp, Homo sapien
ccagctcggtccatgctccaacgtg

SEQ ID NO: 4715096 - DNA, 25 bp, Homo sapien
tcggtccatgctccaacgtgtcctg

SEQ ID NO: 4715097 - DNA, 25 bp, Homo sapien
agctcggtccatgctccaacgtgtc

SEQ ID NO: 4715098 - DNA, 25 bp, Homo sapien
ccccgctccaccggttccagccaca

SEQ ID NO: 4715099 - DNA, 25 bp, Homo sapien
cagcccccgctccaccggttccagc

SEQ ID NO: 4715100 - DNA, 25 bp, Homo sapien
tcagcccccgctccaccggttccag

SEQ ID NO: 4715101 - DNA, 25 bp, Homo sapien
gcccccgctccaccggttccagcca

SEQ ID NO: 4715102 - DNA, 25 bp, Homo sapien
ccagaagcctgcttgcagttgccat

SEQ ID NO: 4715103 - DNA, 25 bp, Homo sapien
ggcactggttctcacccagaagcct

SEQ ID NO: 4715104 - DNA, 25 bp, Homo sapien
caggcactggttctcacccagaagc

SEQ ID NO: 4715105 - DNA, 25 bp, Homo sapien
acccagaagcctgcttgcagttgcc

SEQ ID NO: 4715106 - DNA, 25 bp, Homo sapien
tgtaccagccggcacagctgcacca

SEQ ID NO: 4715107 - DNA, 25 bp, Homo sapien
ttgtaccagccggcacagctgcacc

SEQ ID NO: 4715108 - DNA, 25 bp, Homo sapien
catcttgtaccagccggcacagctg

SEQ ID NO: 4715109 - DNA, 25 bp, Homo sapien
ctgcatcttgtaccagccggcacag

SEQ ID NO: 4715110 - DNA, 25 bp, Homo sapien
tcaatacaaaccacttaggaatagc

SEQ ID NO: 4715111 - DNA, 25 bp, Homo sapien
taaatgcctcaatcgaaatgccgcc

SEQ ID NO: 4715112 - DNA, 25 bp, Homo sapien
gcaacctccaggtaccgtaatcaca

SEQ ID NO: 4715113 - DNA, 25 bp, Homo sapien
cactctgggttttacatgccttaca

SEQ ID NO: 4715114 - DNA, 25 bp, Homo sapien
caggaactgaatccagaagcgctca

SEQ ID NO: 4715115 - DNA, 25 bp, Homo sapien
cacagagcggcttgccaggtgagag

SEQ ID NO: 4715116 - DNA, 25 bp, Homo sapien
acaggaatgttcacaatcacccaca

SEQ ID NO: 4715117 - DNA, 25 bp, Homo sapien
aatccagaagcgctcacaggaatgt

SEQ ID NO: 4715118 - DNA, 25 bp, Homo sapien
ggaagtaaaggtttccacattgagc

SEQ ID NO: 4715119 - DNA, 25 bp, Homo sapien
gtcagttccagccgtggcaaggatc

SEQ ID NO: 4715120 - DNA, 25 bp, Homo sapien
tcgcaggtcgaagtcagttccagcc

SEQ ID NO: 4715121 - DNA, 25 bp, Homo sapien
cacagccctcagtgttcgcaggtcg

SEQ ID NO: 4715122 - DNA, 25 bp, Homo sapien
cctcagtgttcgcaggtcgaagtca

SEQ ID NO: 4715123 - DNA, 25 bp, Homo sapien
ttgcccatgtagaactccaggccaa

SEQ ID NO: 4715124 - DNA, 25 bp, Homo sapien
atctgcaggagtggaaccatggcct

SEQ ID NO: 4715125 - DNA, 25 bp, Homo sapien
gggaaacaggccttgtggaacttgc

SEQ ID NO: 4715126 - DNA, 25 bp, Homo sapien
gccaatgatggcaaacatgaggatg

SEQ ID NO: 4715127 - DNA, 25 bp, Homo sapien
actggaacaccgtcaagatggcaaa

SEQ ID NO: 4715128 - DNA, 25 bp, Homo sapien
tgccacaggggaagtcacccacggg

SEQ ID NO: 4715129 - DNA, 25 bp, Homo sapien
ttgggtcctggccagtactcccggc

SEQ ID NO: 4715130 - DNA, 25 bp, Homo sapien
tggcaaacaggatattgtcaaagtt

SEQ ID NO: 4715131 - DNA, 25 bp, Homo sapien
ggcccagggccaagacgccactcac

SEQ ID NO: 4715132 - DNA, 25 bp, Homo sapien
cagaggcaccagctcaggaggtcca

SEQ ID NO: 4715133 - DNA, 25 bp, Homo sapien
ctaaatggacccccagaggcaccag

SEQ ID NO: 4715134 - DNA, 25 bp, Homo sapien
ccccagaggcaccagctcaggaggt

SEQ ID NO: 4715135 - DNA, 25 bp, Homo sapien
cgaaggagtcaactccaggaggacc

SEQ ID NO: 4715136 - DNA, 25 bp, Homo sapien
ccagagcagctagcagtgctactat

SEQ ID NO: 4715137 - DNA, 25 bp, Homo sapien
gacccacctcaggagtctgagctga

SEQ ID NO: 4715138 - DNA, 25 bp, Homo sapien
tgctactatcgtccttgccaacaga

SEQ ID NO: 4715139 - DNA, 25 bp, Homo sapien
cccagggcacaagtaacaagctcta

SEQ ID NO: 4715140 - DNA, 25 bp, Homo sapien
tccatgaacgcatgaggcacagggc

SEQ ID NO: 4715141 - DNA, 25 bp, Homo sapien
tcaagaagcttgataaacgagctca

SEQ ID NO: 4715142 - DNA, 25 bp, Homo sapien
aggcacacgtggaccaagcttcacc

SEQ ID NO: 4715143 - DNA, 25 bp, Homo sapien
cgctgtgtgatcgcggtactgatcg

SEQ ID NO: 4715144 - DNA, 25 bp, Homo sapien
cagtgctgatcatgttctccaaaca

SEQ ID NO: 4715145 - DNA, 25 bp, Homo sapien
agtgctgatcatgttctccaaacac

SEQ ID NO: 4715146 - DNA, 25 bp, Homo sapien
cgtggtgctgatcatgttctccgaa

SEQ ID NO: 4715147 - DNA, 25 bp, Homo sapien
gatcgcggtgctgatcatgttctcc

SEQ ID NO: 4715148 - DNA, 25 bp, Homo sapien
tcccaggatgctgtgtgatcgcggt

SEQ ID NO: 4715149 - DNA, 25 bp, Homo sapien
ggtcgtggtgctgatcatgttctcc

SEQ ID NO: 4715150 - DNA, 25 bp, Homo sapien
atgaagtagagccagttccaggtgt

SEQ ID NO: 4715151 - DNA, 25 bp, Homo sapien
aagtagagccagttccaggtgttgc

SEQ ID NO: 4715152 - DNA, 25 bp, Homo sapien
gttccaggtgttgccggccgcatcg

SEQ ID NO: 4715153 - DNA, 25 bp, Homo sapien
ggttgagcatgaagaaggagccgat

SEQ ID NO: 4715154 - DNA, 25 bp, Homo sapien
ccgcctgagccttcacagccgtcat

SEQ ID NO: 4715155 - DNA, 25 bp, Homo sapien
gccccgcctgagccttcacagccgt

SEQ ID NO: 4715156 - DNA, 25 bp, Homo sapien
cccagccccgcctgagccttcacag

SEQ ID NO: 4715157 - DNA, 25 bp, Homo sapien
ccagccccgcctgagccttcacagc

SEQ ID NO: 4715158 - DNA, 25 bp, Homo sapien
aagatccactccaggtacccgttga

SEQ ID NO: 4715159 - DNA, 25 bp, Homo sapien
caggtacccgttgagctctcgctcg

SEQ ID NO: 4715160 - DNA, 25 bp, Homo sapien
ggcggttctccaccctctctcgctc

SEQ ID NO: 4715161 - DNA, 25 bp, Homo sapien
acccgttgagctctcgctcgatctg

SEQ ID NO: 4715162 - DNA, 25 bp, Homo sapien
tcctcctcggccagcatgacttcct

SEQ ID NO: 4715163 - DNA, 25 bp, Homo sapien
cgtccaaaggggacttctcctctgc

SEQ ID NO: 4715164 - DNA, 25 bp, Homo sapien
tgtcctcctcggccagcatgacttc

SEQ ID NO: 4715165 - DNA, 25 bp, Homo sapien
caaaggggacttctcctctgcattc

SEQ ID NO: 4715166 - DNA, 25 bp, Homo sapien
ccctcctctgcgtggatcaggtcat

SEQ ID NO: 4715167 - DNA, 25 bp, Homo sapien
ttcttggtggccgctctcttcagca

SEQ ID NO: 4715168 - DNA, 25 bp, Homo sapien
ctctgcgtggatcaggtcatttctg

SEQ ID NO: 4715169 - DNA, 25 bp, Homo sapien
ctcttcttggtggccgctctcttca

SEQ ID NO: 4715170 - DNA, 25 bp, Homo sapien
gagcctgcaggcgtttgggcaagaa

SEQ ID NO: 4715171 - DNA, 25 bp, Homo sapien
cctgcaggcgtttgggcaagaaggg

SEQ ID NO: 4715172 - DNA, 25 bp, Homo sapien
aaaggagcctgcaggcgtttgggca

SEQ ID NO: 4715173 - DNA, 25 bp, Homo sapien
tttgggcaagaaggggcgtccaaca

SEQ ID NO: 4715174 - DNA, 25 bp, Homo sapien
cagcagacgagcaactgaacaactc

SEQ ID NO: 4715175 - DNA, 25 bp, Homo sapien
cagacgatcagcagacgagcaactg

SEQ ID NO: 4715176 - DNA, 25 bp, Homo sapien
tccacatcagcaacgccaggttgca

SEQ ID NO: 4715177 - DNA, 25 bp, Homo sapien
gactccacatcagcaacgccaggtt

SEQ ID NO: 4715178 - DNA, 25 bp, Homo sapien
aggaagacaagcaacaaattctcca

SEQ ID NO: 4715179 - DNA, 25 bp, Homo sapien
ggaagacaagcaacaaattctccaa

SEQ ID NO: 4715180 - DNA, 25 bp, Homo sapien
aaattctccaaaggggactctgtgg

SEQ ID NO: 4715181 - DNA, 25 bp, Homo sapien
tctccaaaggggactctgtggccat

SEQ ID NO: 4715182 - DNA, 25 bp, Homo sapien
caggttctcagtggcacaaaagagc

SEQ ID NO: 4715183 - DNA, 25 bp, Homo sapien
tggcacaaaagagcaggggcagtgt

SEQ ID NO: 4715184 - DNA, 25 bp, Homo sapien
ggttctcagtggcacaaaagagcag

SEQ ID NO: 4715185 - DNA, 25 bp, Homo sapien
tcagtggcacaaaagagcaggggca

SEQ ID NO: 4715186 - DNA, 25 bp, Homo sapien
tccacttcacagctgagggaaccaa

SEQ ID NO: 4715187 - DNA, 25 bp, Homo sapien
tcacagacaattgtgccagtgaccc

SEQ ID NO: 4715188 - DNA, 25 bp, Homo sapien
cccacagacgcactctggaggacac

SEQ ID NO: 4715189 - DNA, 25 bp, Homo sapien
gccccagccggtcacagacaattgt

SEQ ID NO: 4715190 - DNA, 25 bp, Homo sapien
tgtcttcccgctcttgaggctggcg

SEQ ID NO: 4715191 - DNA, 25 bp, Homo sapien
ttcctccggaagtatgacgagctct

SEQ ID NO: 4715192 - DNA, 25 bp, Homo sapien
cagcaccacccagtagaagctctga

SEQ ID NO: 4715193 - DNA, 25 bp, Homo sapien
caccatgcgccggataaaaaaccgg

SEQ ID NO: 4715194 - DNA, 25 bp, Homo sapien
gccgccgcggctggttgtaatgcac

SEQ ID NO: 4715195 - DNA, 25 bp, Homo sapien
acagggtcgtggtaagccgccgcgg

SEQ ID NO: 4715196 - DNA, 25 bp, Homo sapien
cgcggctggttgtaatgcaccatgg

SEQ ID NO: 4715197 - DNA, 25 bp, Homo sapien
aagccgccgcggctggttgtaatgc

SEQ ID NO: 4715198 - DNA, 25 bp, Homo sapien
gccccagggcatggaccagggtttc

SEQ ID NO: 4715199 - DNA, 25 bp, Homo sapien
cagggcatggaccagggtttccaga

SEQ ID NO: 4715200 - DNA, 25 bp, Homo sapien
ggggtagccccagggcatggaccag

SEQ ID NO: 4715201 - DNA, 25 bp, Homo sapien
gtagccccagggcatggaccagggt

SEQ ID NO: 4715202 - DNA, 25 bp, Homo sapien
gccagaaaatcaccaggcactcaag

SEQ ID NO: 4715203 - DNA, 25 bp, Homo sapien
tctgacaccagccagaaaatcacca

SEQ ID NO: 4715204 - DNA, 25 bp, Homo sapien
tgacaccagccagaaaatcaccagg

SEQ ID NO: 4715205 - DNA, 25 bp, Homo sapien
ctgtagcaagcctggcctctgacac

SEQ ID NO: 4715206 - DNA, 25 bp, Homo sapien
catggctctgccaggtcagcagggg

SEQ ID NO: 4715207 - DNA, 25 bp, Homo sapien
ttcacgtttgctgccccgagggtag

SEQ ID NO: 4715208 - DNA, 25 bp, Homo sapien
ggcactgtggctgacttgtattctg

SEQ ID NO: 4715209 - DNA, 25 bp, Homo sapien
cactgcactcctctccagcacgagg

SEQ ID NO: 4715210 - DNA, 25 bp, Homo sapien
ttgtattctgttcacgtttgctgcc

SEQ ID NO: 4715211 - DNA, 25 bp, Homo sapien
gagacccaggaaaacaaactctgca

SEQ ID NO: 4715212 - DNA, 25 bp, Homo sapien
ctgtgaggaagagacccaggaaaac

SEQ ID NO: 4715213 - DNA, 25 bp, Homo sapien
gacccaggaaaacaaactctgcaaa

SEQ ID NO: 4715214 - DNA, 25 bp, Homo sapien
aagagacccaggaaaacaaactctg

SEQ ID NO: 4715215 - DNA, 25 bp, Homo sapien
cagttgaaggaggaccggaagtagc

SEQ ID NO: 4715216 - DNA, 25 bp, Homo sapien
gaggaccggaagtagcttctgggcc

SEQ ID NO: 4715217 - DNA, 25 bp, Homo sapien
ccggaagtagcttctgggccccagg

SEQ ID NO: 4715218 - DNA, 25 bp, Homo sapien
tgaaggaggaccggaagtagcttct

SEQ ID NO: 4715219 - DNA, 25 bp, Homo sapien
ctgcaggaaaggatacagcctgggc

SEQ ID NO: 4715220 - DNA, 25 bp, Homo sapien
tgcaggaaaggatacagcctgggcc

SEQ ID NO: 4715221 - DNA, 25 bp, Homo sapien
cctgggcccctgatcaggcctctca

SEQ ID NO: 4715222 - DNA, 25 bp, Homo sapien
aggaaaggatacagcctgggcccct

SEQ ID NO: 4715223 - DNA, 25 bp, Homo sapien
gatggcattagccttgggtgcaccg

SEQ ID NO: 4715224 - DNA, 25 bp, Homo sapien
tagccttgggtgcaccgtatctgca

SEQ ID NO: 4715225 - DNA, 25 bp, Homo sapien
caacgggatggcattagccttgggt

SEQ ID NO: 4715226 - DNA, 25 bp, Homo sapien
ctgcaacgggatggcattagccttg

SEQ ID NO: 4715227 - DNA, 25 bp, Homo sapien
tttgaagatcctcagcaggcggagg

SEQ ID NO: 4715228 - DNA, 25 bp, Homo sapien
agaccacttcaaagacgctccccac

SEQ ID NO: 4715229 - DNA, 25 bp, Homo sapien
gagggcccgcagcacactgatccca

SEQ ID NO: 4715230 - DNA, 25 bp, Homo sapien
gatcccaaaggagcttcccggcttg

SEQ ID NO: 4715231 - DNA, 25 bp, Homo sapien
gaagcaagtcccacaactgttgtca

SEQ ID NO: 4715232 - DNA, 25 bp, Homo sapien
caggaagagctacaccggaacctac

SEQ ID NO: 4715233 - DNA, 25 bp, Homo sapien
tgtagggtgacaccacgcagactct

SEQ ID NO: 4715234 - DNA, 25 bp, Homo sapien
caagtgtctcagaccagtgccatgt

SEQ ID NO: 4715235 - DNA, 25 bp, Homo sapien
ccagcagggcgaagaccacaatgaa

SEQ ID NO: 4715236 - DNA, 25 bp, Homo sapien
gagcaagaagagcaggctgatgatg

SEQ ID NO: 4715237 - DNA, 25 bp, Homo sapien
gcagggcgaagaccacaatgaacag

SEQ ID NO: 4715238 - DNA, 25 bp, Homo sapien
gcaagaagagcaggctgatgatgga

SEQ ID NO: 4715239 - DNA, 25 bp, Homo sapien
ttggttgtgggagtctcatcctgga

SEQ ID NO: 4715240 - DNA, 25 bp, Homo sapien
tgtgggagtctcatcctggaagttg

SEQ ID NO: 4715241 - DNA, 25 bp, Homo sapien
cggcagggaaggtgtcgaagttggt

SEQ ID NO: 4715242 - DNA, 25 bp, Homo sapien
gaaggtgtcgaagttggttgtggga

SEQ ID NO: 4715243 - DNA, 25 bp, Homo sapien
tgcttccctcgtttgaggaacactg

SEQ ID NO: 4715244 - DNA, 25 bp, Homo sapien
gggcccccggacctggagatctgca

SEQ ID NO: 4715245 - DNA, 25 bp, Homo sapien
atccagcttccttcaccgtaggggc

SEQ ID NO: 4715246 - DNA, 25 bp, Homo sapien
acactgtgtctgaaaagtcagtgat

SEQ ID NO: 4715247 - DNA, 25 bp, Homo sapien
tgaccaagggtaggatcagcagccc

SEQ ID NO: 4715248 - DNA, 25 bp, Homo sapien
catcagtaaggccagtcatgggcag

SEQ ID NO: 4715249 - DNA, 25 bp, Homo sapien
tcagtctcagacatggcatccaagt

SEQ ID NO: 4715250 - DNA, 25 bp, Homo sapien
gcatccaagtatgtttcatgggaca

SEQ ID NO: 4715251 - DNA, 25 bp, Homo sapien
gaggactgtggtgcaaattaggaca

SEQ ID NO: 4715252 - DNA, 25 bp, Homo sapien
agctgacgggtcataggctccagcc

SEQ ID NO: 4715253 - DNA, 25 bp, Homo sapien
tcgtctaatttggtctgaagggtct

SEQ ID NO: 4715254 - DNA, 25 bp, Homo sapien
gacttcctcccttcgagagagtggg

SEQ ID NO: 4715255 - DNA, 25 bp, Homo sapien
ccaccatgagcacagctgaagctgc

SEQ ID NO: 4715256 - DNA, 25 bp, Homo sapien
cctgggatctcaggaccctggtcca

SEQ ID NO: 4715257 - DNA, 25 bp, Homo sapien
tcccaaccccattcagaagcagggg

SEQ ID NO: 4715258 - DNA, 25 bp, Homo sapien
tcccaccctgggatctcaggaccct

SEQ ID NO: 4715259 - DNA, 25 bp, Homo sapien
gtgcctaggtgatgaattcttctgc

SEQ ID NO: 4715260 - DNA, 25 bp, Homo sapien
gcctaggtgatgaattcttctgcaa

SEQ ID NO: 4715261 - DNA, 25 bp, Homo sapien
ataggaccctaatcaatctcttctg

SEQ ID NO: 4715262 - DNA, 25 bp, Homo sapien
gagactaaagataggaccctaatca

SEQ ID NO: 4715263 - DNA, 25 bp, Homo sapien
ttattgttatagaggttctgttgga

SEQ ID NO: 4715264 - DNA, 25 bp, Homo sapien
gttattgttatagaggttctgttgg

SEQ ID NO: 4715265 - DNA, 25 bp, Homo sapien
taagttcattccttctttgttgact

SEQ ID NO: 4715266 - DNA, 25 bp, Homo sapien
taagtgctgttgctctaaagtctgt

SEQ ID NO: 4715267 - DNA, 25 bp, Homo sapien
gagtatcaaagtcccccgctattac

SEQ ID NO: 4715268 - DNA, 25 bp, Homo sapien
cgctattactgtgttgccgtctata

SEQ ID NO: 4715269 - DNA, 25 bp, Homo sapien
taagtagggttggggtttcatcatg

SEQ ID NO: 4715270 - DNA, 25 bp, Homo sapien
caatggatggcgcgatcttggttca

SEQ ID NO: 4715271 - DNA, 25 bp, Homo sapien
ctgcaactttcacctcctgagttta

SEQ ID NO: 4715272 - DNA, 25 bp, Homo sapien
caactttcacctcctgagtttaagt

SEQ ID NO: 4715273 - DNA, 25 bp, Homo sapien
tggtgctaatcattcctgtgcaagc

SEQ ID NO: 4715274 - DNA, 25 bp, Homo sapien
tatacctggcaggaactgctcgtgc

SEQ ID NO: 4715275 - DNA, 25 bp, Homo sapien
tgctcgtgccaattccagtggatgg

SEQ ID NO: 4715276 - DNA, 25 bp, Homo sapien
tacccttcagagtggttctaccaac

SEQ ID NO: 4715277 - DNA, 25 bp, Homo sapien
gaaaagggagctcccaacaggagaa

SEQ ID NO: 4715278 - DNA, 25 bp, Homo sapien
aagggagctcccaacaggagaagga

SEQ ID NO: 4715279 - DNA, 25 bp, Homo sapien
ccagaaatgaaaagggagctcccaa

SEQ ID NO: 4715280 - DNA, 25 bp, Homo sapien
aatgaaaagggagctcccaacagga

SEQ ID NO: 4715281 - DNA, 25 bp, Homo sapien
gccgccttgcgattcgatcccgtga

SEQ ID NO: 4715282 - DNA, 25 bp, Homo sapien
gattcgatcccgtgatacatcactg

SEQ ID NO: 4715283 - DNA, 25 bp, Homo sapien
gtgtcaggacaatgaagtaaaagga

SEQ ID NO: 4715284 - DNA, 25 bp, Homo sapien
acatgcctttgctgacgccgccttg

SEQ ID NO: 4715285 - DNA, 25 bp, Homo sapien
tctgccccagccccacagaaggata

SEQ ID NO: 4715286 - DNA, 25 bp, Homo sapien
ctgccccagccccacagaaggatac

SEQ ID NO: 4715287 - DNA, 25 bp, Homo sapien
ttggtcagctcttgggcgttggcca

SEQ ID NO: 4715288 - DNA, 25 bp, Homo sapien
ttgtccacagcgatggccagaaaga

SEQ ID NO: 4715289 - DNA, 25 bp, Homo sapien
tcttgggcgttggccaggttgtcca

SEQ ID NO: 4715290 - DNA, 25 bp, Homo sapien
acagcgatggccagaaagacattca

SEQ ID NO: 4715291 - DNA, 25 bp, Homo sapien
gcggcgatggagatgttcgcggcag

SEQ ID NO: 4715292 - DNA, 25 bp, Homo sapien
ggcgatggagatgttcgcggcagac

SEQ ID NO: 4715293 - DNA, 25 bp, Homo sapien
cgatggagatgttcgcggcagacat

SEQ ID NO: 4715294 - DNA, 25 bp, Homo sapien
tttggccttttgcagagcaagcttc

SEQ ID NO: 4715295 - DNA, 25 bp, Homo sapien
ctccagccatttccaagtgactttc

SEQ ID NO: 4715296 - DNA, 25 bp, Homo sapien
cagccatttccaagtgactttcaaa

SEQ ID NO: 4715297 - DNA, 25 bp, Homo sapien
gccatttccaagtgactttcaaagg

SEQ ID NO: 4715298 - DNA, 25 bp, Homo sapien
catttccaagtgactttcaaaggct

SEQ ID NO: 4715299 - DNA, 25 bp, Homo sapien
cacgctggagacagatgagctgcga

SEQ ID NO: 4715300 - DNA, 25 bp, Homo sapien
gtgagttcacgctggagacagatga

SEQ ID NO: 4715301 - DNA, 25 bp, Homo sapien
cagtacctcgagcttgctttacaaa

SEQ ID NO: 4715302 - DNA, 25 bp, Homo sapien
gatgagctgcgagatacagtacctc

SEQ ID NO: 4715303 - DNA, 25 bp, Homo sapien
ggagtttccgtgtctctgccttggg

SEQ ID NO: 4715304 - DNA, 25 bp, Homo sapien
gcggaccagccatccatgagcactt

SEQ ID NO: 4715305 - DNA, 25 bp, Homo sapien
tgagcacttccccatgagaagctgc

SEQ ID NO: 4715306 - DNA, 25 bp, Homo sapien
ttcccaagtggacaacagctctctg

SEQ ID NO: 4715307 - DNA, 25 bp, Homo sapien
ctcgtggaaagactgagcccagctc

SEQ ID NO: 4715308 - DNA, 25 bp, Homo sapien
cggatggatgcaggatccagcatgc

SEQ ID NO: 4715309 - DNA, 25 bp, Homo sapien
cagcatgctttcttgccccaggaga

SEQ ID NO: 4715310 - DNA, 25 bp, Homo sapien
gcagcaaacagtgctcgtggaaaga

SEQ ID NO: 4715311 - DNA, 25 bp, Homo sapien
ccttgcattcaggtgtggctccttc

SEQ ID NO: 4715312 - DNA, 25 bp, Homo sapien
attcaggtgtggctccttctcgccc

SEQ ID NO: 4715313 - DNA, 25 bp, Homo sapien
tgcattcaggtgtggctccttctcg

SEQ ID NO: 4715314 - DNA, 25 bp, Homo sapien
gcattcaggtgtggctccttctcgc

SEQ ID NO: 4715315 - DNA, 25 bp, Homo sapien
tgactacaccaacaatgagggccat

SEQ ID NO: 4715316 - DNA, 25 bp, Homo sapien
tcgccagggagaaacctcatctgag

SEQ ID NO: 4715317 - DNA, 25 bp, Homo sapien
gccttggcggcagcagtgactacac

SEQ ID NO: 4715318 - DNA, 25 bp, Homo sapien
catcgccagggagaaacctcatctg

SEQ ID NO: 4715319 - DNA, 25 bp, Homo sapien
atgtcgggccgcaggtggcgcgtag

SEQ ID NO: 4715320 - DNA, 25 bp, Homo sapien
gggtccatctcgctgtacagcgcct

SEQ ID NO: 4715321 - DNA, 25 bp, Homo sapien
accgagcgcgccttggccgagttct

SEQ ID NO: 4715322 - DNA, 25 bp, Homo sapien
gttctgcagccgtagctggctggcc

SEQ ID NO: 4715323 - DNA, 25 bp, Homo sapien
cccccgcgcgccgtcgcggcccagc

SEQ ID NO: 4715324 - DNA, 25 bp, Homo sapien
gcgcgccgtcgcggcccagctccac

SEQ ID NO: 4715325 - DNA, 25 bp, Homo sapien
cccgcgcgccgtcgcggcccagctc

SEQ ID NO: 4715326 - DNA, 25 bp, Homo sapien
cgcgcgccgtcgcggcccagctcca

SEQ ID NO: 4715327 - DNA, 25 bp, Homo sapien
tgcgcggagggtcgacgccctcggg

SEQ ID NO: 4715328 - DNA, 25 bp, Homo sapien
tgccggtggtgcctgcgcggagggt

SEQ ID NO: 4715329 - DNA, 25 bp, Homo sapien
gtcttgtccttgtcgcggtgccggt

SEQ ID NO: 4715330 - DNA, 25 bp, Homo sapien
gcagcctcaggtcgggctttgcctc

SEQ ID NO: 4715331 - DNA, 25 bp, Homo sapien
ggcgcactccttgctcggatcctgg

SEQ ID NO: 4715332 - DNA, 25 bp, Homo sapien
cttgctcggatcctggtgccggtgc

SEQ ID NO: 4715333 - DNA, 25 bp, Homo sapien
gcgccggcgcactccttgctcggat

SEQ ID NO: 4715334 - DNA, 25 bp, Homo sapien
actccttgctcggatcctggtgccg

SEQ ID NO: 4715335 - DNA, 25 bp, Homo sapien
ccgctcgggggccgccgcggtgccg

SEQ ID NO: 4715336 - DNA, 25 bp, Homo sapien
tcgggggccgccgcggtgccgcgcg

SEQ ID NO: 4715337 - DNA, 25 bp, Homo sapien
cttgtgccgggcccggtgccgccgc

SEQ ID NO: 4715338 - DNA, 25 bp, Homo sapien
ttgtgccgggcccggtgccgccgcg

SEQ ID NO: 4715339 - DNA, 25 bp, Homo sapien
agctccttttccttgtcggcttcca

SEQ ID NO: 4715340 - DNA, 25 bp, Homo sapien
gtggcctccttctccgtggtctcct

SEQ ID NO: 4715341 - DNA, 25 bp, Homo sapien
ttgtcggcttccactatctcagcct

SEQ ID NO: 4715342 - DNA, 25 bp, Homo sapien
gctggtggttccggagctccttttc

SEQ ID NO: 4715343 - DNA, 25 bp, Homo sapien
caggccctcacggggttggtgagtc

SEQ ID NO: 4715344 - DNA, 25 bp, Homo sapien
tggtcttggccactggaccactgtt

SEQ ID NO: 4715345 - DNA, 25 bp, Homo sapien
gtcttggccactggaccactgttac

SEQ ID NO: 4715346 - DNA, 25 bp, Homo sapien
cccaggccctcacggggttggtgag

SEQ ID NO: 4715347 - DNA, 25 bp, Homo sapien
ctggttggtttgtggccagtgggta

SEQ ID NO: 4715348 - DNA, 25 bp, Homo sapien
tggtctccaggtcacagtgtggctc

SEQ ID NO: 4715349 - DNA, 25 bp, Homo sapien
gggacccacagtcacagtcccactg

SEQ ID NO: 4715350 - DNA, 25 bp, Homo sapien
gcagtgtgtgcatgggacccacagt

SEQ ID NO: 4715351 - DNA, 25 bp, Homo sapien
gtgcatgggacccacagtcacagtc

SEQ ID NO: 4715352 - DNA, 25 bp, Homo sapien
tatgtacaatagtgttcgggtctgg

SEQ ID NO: 4715353 - DNA, 25 bp, Homo sapien
ggctgactgcccatgcgagtgacgt

SEQ ID NO: 4715354 - DNA, 25 bp, Homo sapien
gtcagcatcactgggatatgtacaa

SEQ ID NO: 4715355 - DNA, 25 bp, Homo sapien
gattgtctgcatcctctggctgttc

SEQ ID NO: 4715356 - DNA, 25 bp, Homo sapien
tgcacacatctgtgtgtggagatcc

SEQ ID NO: 4715357 - DNA, 25 bp, Homo sapien
catgcacacatctgtgtgtggagat

SEQ ID NO: 4715358 - DNA, 25 bp, Homo sapien
cacacatctgtgtgtggagatccgt

SEQ ID NO: 4715359 - DNA, 25 bp, Homo sapien
aaacacggacatgcacacatctgtg

SEQ ID NO: 4715360 - DNA, 25 bp, Homo sapien
cacacgtctgtgtgtgcggatgcat

SEQ ID NO: 4715361 - DNA, 25 bp, Homo sapien
gatctgtctgcaaacatgggcacgc

SEQ ID NO: 4715362 - DNA, 25 bp, Homo sapien
ggaattgtgcgccagtccacaggcc

SEQ ID NO: 4715363 - DNA, 25 bp, Homo sapien
gcaagagagaatgtcatgcacatgt

SEQ ID NO: 4715364 - DNA, 25 bp, Homo sapien
ctgtggtatgcccaaaagacagact

SEQ ID NO: 4715365 - DNA, 25 bp, Homo sapien
gattccaaccctatgacagtctaga

SEQ ID NO: 4715366 - DNA, 25 bp, Homo sapien
tccaacgcttaaaacaaatgagctg

SEQ ID NO: 4715367 - DNA, 25 bp, Homo sapien
gacagactattaatccaacgcttaa

SEQ ID NO: 4715368 - DNA, 25 bp, Homo sapien
gaaaacaattcgaatgacagtggat

SEQ ID NO: 4715369 - DNA, 25 bp, Homo sapien
ggaagaaaacaattcgaatgacagt

SEQ ID NO: 4715370 - DNA, 25 bp, Homo sapien
agaaaacaattcgaatgacagtgga

SEQ ID NO: 4715371 - DNA, 25 bp, Homo sapien
aagaggcacacgtttttttcaagtg

SEQ ID NO: 4715372 - DNA, 25 bp, Homo sapien
agttcagctttgagactcgggctgg

SEQ ID NO: 4715373 - DNA, 25 bp, Homo sapien
gttcagctttgagactcgggctggc

SEQ ID NO: 4715374 - DNA, 25 bp, Homo sapien
agagcctggtgagaccttcccactg

SEQ ID NO: 4715375 - DNA, 25 bp, Homo sapien
cagagcctggtgagaccttcccact

SEQ ID NO: 4715376 - DNA, 25 bp, Homo sapien
gaagcccagagcctggtgagacctt

SEQ ID NO: 4715377 - DNA, 25 bp, Homo sapien
gcccagagcctggtgagaccttccc

SEQ ID NO: 4715378 - DNA, 25 bp, Homo sapien
gagcccagcacccgtggctgtggac

SEQ ID NO: 4715379 - DNA, 25 bp, Homo sapien
gttggcaacaacaccgagcccagca

SEQ ID NO: 4715380 - DNA, 25 bp, Homo sapien
ctcttgctgcaccaacgttggcaac

SEQ ID NO: 4715381 - DNA, 25 bp, Homo sapien
tgtggacccctctgccgcgctgagg

SEQ ID NO: 4715382 - DNA, 25 bp, Homo sapien
cagaacatggagctgtatgggacga

SEQ ID NO: 4715383 - DNA, 25 bp, Homo sapien
gcttaaacagaacatggagctgtat

SEQ ID NO: 4715384 - DNA, 25 bp, Homo sapien
aacatggagctgtatgggacgatag

SEQ ID NO: 4715385 - DNA, 25 bp, Homo sapien
ctcctcatcacgtcatccgcttcca

SEQ ID NO: 4715386 - DNA, 25 bp, Homo sapien
tgttcctgggcgagtctgtgcgcac

SEQ ID NO: 4715387 - DNA, 25 bp, Homo sapien
gagaatgaccacctcgaagtacctc

SEQ ID NO: 4715388 - DNA, 25 bp, Homo sapien
caaggcgatgaccacgagaatgacc

SEQ ID NO: 4715389 - DNA, 25 bp, Homo sapien
cctcgaagtacctcatggtcacgat

SEQ ID NO: 4715390 - DNA, 25 bp, Homo sapien
caccagtgaaaatgtaatccaggta

SEQ ID NO: 4715391 - DNA, 25 bp, Homo sapien
gaaaatgtaatccaggtatttcaga

SEQ ID NO: 4715392 - DNA, 25 bp, Homo sapien
agacaccagtgaaaatgtaatccag

SEQ ID NO: 4715393 - DNA, 25 bp, Homo sapien
ccagtgaaaatgtaatccaggtatt

SEQ ID NO: 4715394 - DNA, 25 bp, Homo sapien
gaaagcaaacgccaccagggcgcca

SEQ ID NO: 4715395 - DNA, 25 bp, Homo sapien
cagaatgttccacaagtcccggaaa

SEQ ID NO: 4715396 - DNA, 25 bp, Homo sapien
cacaagtcccggaaataggctccag

SEQ ID NO: 4715397 - DNA, 25 bp, Homo sapien
ctgaccacaatgaagtccagaatgt

SEQ ID NO: 4715398 - DNA, 25 bp, Homo sapien
gcttgggcagccgtttgatggtctt

SEQ ID NO: 4715399 - DNA, 25 bp, Homo sapien
gactctcagagacttgatggtattg

SEQ ID NO: 4715400 - DNA, 25 bp, Homo sapien
ttgggcagccgtttgatggtcttga

SEQ ID NO: 4715401 - DNA, 25 bp, Homo sapien
gggccgcaggacacgaaggactctc

SEQ ID NO: 4715402 - DNA, 25 bp, Homo sapien
tctgtgcagtagaaaaacttccctt

SEQ ID NO: 4715403 - DNA, 25 bp, Homo sapien
tgaagagctgcaccgcaatgacggc

SEQ ID NO: 4715404 - DNA, 25 bp, Homo sapien
caatgacggcaaatatgaacatgaa

SEQ ID NO: 4715405 - DNA, 25 bp, Homo sapien
gagcatgtagacaatcaagatgttg

SEQ ID NO: 4715406 - DNA, 25 bp, Homo sapien
cccagagcacattgtcgtagtgaaa

SEQ ID NO: 4715407 - DNA, 25 bp, Homo sapien
cgtagtgaaagtcgtatttcttcca

SEQ ID NO: 4715408 - DNA, 25 bp, Homo sapien
tggacactgtgaacagcgtcagcag

SEQ ID NO: 4715409 - DNA, 25 bp, Homo sapien
acactgtgaacagcgtcagcagagc

SEQ ID NO: 4715410 - DNA, 25 bp, Homo sapien
caaagccacaaagatgttgacgaag

SEQ ID NO: 4715411 - DNA, 25 bp, Homo sapien
tgctcctcataggtggcatccacgg

SEQ ID NO: 4715412 - DNA, 25 bp, Homo sapien
ctccatgcggtacccagggcttgga

SEQ ID NO: 4715413 - DNA, 25 bp, Homo sapien
gtagaccacgtagaagatggacagc

SEQ ID NO: 4715414 - DNA, 25 bp, Homo sapien
agcaggcctcaaccagccaaatccg

SEQ ID NO: 4715415 - DNA, 25 bp, Homo sapien
aggcctcaaccagccaaatccggtc

SEQ ID NO: 4715416 - DNA, 25 bp, Homo sapien
caagcaggcctcaaccagccaaatc

SEQ ID NO: 4715417 - DNA, 25 bp, Homo sapien
tccaagcaggcctcaaccagccaaa

SEQ ID NO: 4715418 - DNA, 25 bp, Homo sapien
ggggagaaaggagcacagagactca

SEQ ID NO: 4715419 - DNA, 25 bp, Homo sapien
cagagactcagaagcagaaaaccta

SEQ ID NO: 4715420 - DNA, 25 bp, Homo sapien
ctgtaaggggagaaaggagcacaga

SEQ ID NO: 4715421 - DNA, 25 bp, Homo sapien
gcacagagactcagaagcagaaaac

SEQ ID NO: 4715422 - DNA, 25 bp, Homo sapien
cacaaatgtccacgtcttatactgg

SEQ ID NO: 4715423 - DNA, 25 bp, Homo sapien
catgatgaagtattcaaagggcggg

SEQ ID NO: 4715424 - DNA, 25 bp, Homo sapien
cagtgttgagggctatcatggccat

SEQ ID NO: 4715425 - DNA, 25 bp, Homo sapien
tatactggaacgactgccggttttg

SEQ ID NO: 4715426 - DNA, 25 bp, Homo sapien
caaagggaaacaggattccacaggc

SEQ ID NO: 4715427 - DNA, 25 bp, Homo sapien
ggttagatcccaatccctagcagcg

SEQ ID NO: 4715428 - DNA, 25 bp, Homo sapien
ctttggctcatgcagggaggaagaa

SEQ ID NO: 4715429 - DNA, 25 bp, Homo sapien
tcagcctcagggttagatcccaatc

SEQ ID NO: 4715430 - DNA, 25 bp, Homo sapien
agcatcagctcgtactcatagggtg

SEQ ID NO: 4715431 - DNA, 25 bp, Homo sapien
cagcaccccaaaggcgatgatcttc

SEQ ID NO: 4715432 - DNA, 25 bp, Homo sapien
tcttcagcacgcattccatggagaa

SEQ ID NO: 4715433 - DNA, 25 bp, Homo sapien
tggatgtgaacacgatgttcaggca

SEQ ID NO: 4715434 - DNA, 25 bp, Homo sapien
agtaatacttcccaacacagtgaca

SEQ ID NO: 4715435 - DNA, 25 bp, Homo sapien
gcaatctctgttactaaaatatcag

SEQ ID NO: 4715436 - DNA, 25 bp, Homo sapien
ttcccaacacagtgacaaagtcaaa

SEQ ID NO: 4715437 - DNA, 25 bp, Homo sapien
agacattccaggcatctctgaaata

SEQ ID NO: 4715438 - DNA, 25 bp, Homo sapien
gcacagcagacggagctccgctctg

SEQ ID NO: 4715439 - DNA, 25 bp, Homo sapien
agcagacggagctccgctctgtctc

SEQ ID NO: 4715440 - DNA, 25 bp, Homo sapien
tgcagcagaaggctggccacaggac

SEQ ID NO: 4715441 - DNA, 25 bp, Homo sapien
tggggggaacgggatgatgaacacc

SEQ ID NO: 4715442 - DNA, 25 bp, Homo sapien
ctaggcaggcacaaacggctggtca

SEQ ID NO: 4715443 - DNA, 25 bp, Homo sapien
taggcaggcacaaacggctggtcag

SEQ ID NO: 4715444 - DNA, 25 bp, Homo sapien
aggcaggcacaaacggctggtcagg

SEQ ID NO: 4715445 - DNA, 25 bp, Homo sapien
ggacacctgcctaggagtacagttg

SEQ ID NO: 4715446 - DNA, 25 bp, Homo sapien
tattttcactacgttagcagagacc

SEQ ID NO: 4715447 - DNA, 25 bp, Homo sapien
gttaccgatgggcactcagatgcct

SEQ ID NO: 4715448 - DNA, 25 bp, Homo sapien
gcagagaccctaacaactggcacat

SEQ ID NO: 4715449 - DNA, 25 bp, Homo sapien
cacgcagcgccacgccgtgcacctg

SEQ ID NO: 4715450 - DNA, 25 bp, Homo sapien
cacacgcagcgccacgccgtgcacc

SEQ ID NO: 4715451 - DNA, 25 bp, Homo sapien
agagcaagggacagaagcacacgca

SEQ ID NO: 4715452 - DNA, 25 bp, Homo sapien
agaagcacacgcagcgccacgccgt

SEQ ID NO: 4715453 - DNA, 25 bp, Homo sapien
cacagatgttcgagcacagcgtggc

SEQ ID NO: 4715454 - DNA, 25 bp, Homo sapien
cagccacagatgttcgagcacagcg

SEQ ID NO: 4715455 - DNA, 25 bp, Homo sapien
cagatgttcgagcacagcgtggcag

SEQ ID NO: 4715456 - DNA, 25 bp, Homo sapien
atgttcgagcacagcgtggcaggcc

SEQ ID NO: 4715457 - DNA, 25 bp, Homo sapien
tagctccgtaatctgcttgtgccag

SEQ ID NO: 4715458 - DNA, 25 bp, Homo sapien
ctgcttgtgccagggaaagaaaatc

SEQ ID NO: 4715459 - DNA, 25 bp, Homo sapien
ctgtagctccgtaatctgcttgtgc

SEQ ID NO: 4715460 - DNA, 25 bp, Homo sapien
cgtaatctgcttgtgccagggaaag

SEQ ID NO: 4715461 - DNA, 25 bp, Homo sapien
cttgaattactgtactggcacatcc

SEQ ID NO: 4715462 - DNA, 25 bp, Homo sapien
tgaattactgtactggcacatccct

SEQ ID NO: 4715463 - DNA, 25 bp, Homo sapien
cagggcacttgaattactgtactgg

SEQ ID NO: 4715464 - DNA, 25 bp, Homo sapien
gcacttgaattactgtactggcaca

SEQ ID NO: 4715465 - DNA, 25 bp, Homo sapien
gcagagaagaggaattgttctctga

SEQ ID NO: 4715466 - DNA, 25 bp, Homo sapien
cagagaagaggaattgttctctgac

SEQ ID NO: 4715467 - DNA, 25 bp, Homo sapien
ctgcagagaagaggaattgttctct

SEQ ID NO: 4715468 - DNA, 25 bp, Homo sapien
tgcagagaagaggaattgttctctg

SEQ ID NO: 4715469 - DNA, 25 bp, Homo sapien
agcttgatcagccgcgcagctcgaa

SEQ ID NO: 4715470 - DNA, 25 bp, Homo sapien
cagcaggatgcggatggtgtagccc

SEQ ID NO: 4715471 - DNA, 25 bp, Homo sapien
cgcagctcgaaagaggcggaggaag

SEQ ID NO: 4715472 - DNA, 25 bp, Homo sapien
gcggatggtgtagccctggcggagc

SEQ ID NO: 4715473 - DNA, 25 bp, Homo sapien
ggcaatgagcagacacacgtagggc

SEQ ID NO: 4715474 - DNA, 25 bp, Homo sapien
gcaatgagcagacacacgtagggca

SEQ ID NO: 4715475 - DNA, 25 bp, Homo sapien
gttgttgtggcggttgatgctggtg

SEQ ID NO: 4715476 - DNA, 25 bp, Homo sapien
ggcggttgatgctggtgtcatcatc

SEQ ID NO: 4715477 - DNA, 25 bp, Homo sapien
cggttgatgctggtgtcatcatcca

SEQ ID NO: 4715478 - DNA, 25 bp, Homo sapien
ttgtggcggttgatgctggtgtcat

SEQ ID NO: 4715479 - DNA, 25 bp, Homo sapien
aaagtcacttccacactcggtggca

SEQ ID NO: 4715480 - DNA, 25 bp, Homo sapien
ctcggtggcattggcctgctcatca

SEQ ID NO: 4715481 - DNA, 25 bp, Homo sapien
gacgaagtagaagtaggcaaagtca

SEQ ID NO: 4715482 - DNA, 25 bp, Homo sapien
gcaggacagcatgatctcgtgccag

SEQ ID NO: 4715483 - DNA, 25 bp, Homo sapien
tgagctgtaccgagacaagacgtgg

SEQ ID NO: 4715484 - DNA, 25 bp, Homo sapien
aggagatgtgggagaagcctgagct

SEQ ID NO: 4715485 - DNA, 25 bp, Homo sapien
aagcctgagctgtaccgagacaaga

SEQ ID NO: 4715486 - DNA, 25 bp, Homo sapien
taccgagacaagacgtggcactggg

SEQ ID NO: 4715487 - DNA, 25 bp, Homo sapien
caaagtcgccatctctggggaaaca

SEQ ID NO: 4715488 - DNA, 25 bp, Homo sapien
catgtcggccctttctctggctaac

SEQ ID NO: 4715489 - DNA, 25 bp, Homo sapien
tctctggctaacaaagtcgccatct

SEQ ID NO: 4715490 - DNA, 25 bp, Homo sapien
gaaacaagggccatcagcatggact

SEQ ID NO: 4715491 - DNA, 25 bp, Homo sapien
gctggaagttaaggaacagttgccc

SEQ ID NO: 4715492 - DNA, 25 bp, Homo sapien
caccacagtggatgaccttctagaa

SEQ ID NO: 4715493 - DNA, 25 bp, Homo sapien
cagttgcccctggaaatgtaaccct

SEQ ID NO: 4715494 - DNA, 25 bp, Homo sapien
tccacggatgtcaaggaagggccca

SEQ ID NO: 4715495 - DNA, 25 bp, Homo sapien
gatgatctgttcaatgcggagcata

SEQ ID NO: 4715496 - DNA, 25 bp, Homo sapien
gaaatccgcaaatgacactgtgctg

SEQ ID NO: 4715497 - DNA, 25 bp, Homo sapien
gaagcagctaatgtgtaccatgcaa

SEQ ID NO: 4715498 - DNA, 25 bp, Homo sapien
ggagcatagggtacggaaatccgca

SEQ ID NO: 4715499 - DNA, 25 bp, Homo sapien
gaagagactgtcctgctccaataaa

SEQ ID NO: 4715500 - DNA, 25 bp, Homo sapien
tccctaccatcgtttattgaagaga

SEQ ID NO: 4715501 - DNA, 25 bp, Homo sapien
tttcaaagtttggtagtgtgatgcc

SEQ ID NO: 4715502 - DNA, 25 bp, Homo sapien
taaatctgcatggtccttttcacaa

SEQ ID NO: 4715503 - DNA, 25 bp, Homo sapien
ctgttgtgcaaccatgaataccatc

SEQ ID NO: 4715504 - DNA, 25 bp, Homo sapien
gtagaatgtgtcagaacgctcttcc

SEQ ID NO: 4715505 - DNA, 25 bp, Homo sapien
tgttgtgcaaccatgaataccatcc

SEQ ID NO: 4715506 - DNA, 25 bp, Homo sapien
attgtagaatgtgtcagaacgctct

SEQ ID NO: 4715507 - DNA, 25 bp, Homo sapien
tattcagcccagacccggatgaact

SEQ ID NO: 4715508 - DNA, 25 bp, Homo sapien
aagtggtgaggacctaggatggaag

SEQ ID NO: 4715509 - DNA, 25 bp, Homo sapien
gggtcgtattcagcccagacccgga

SEQ ID NO: 4715510 - DNA, 25 bp, Homo sapien
acgcagccgggtcgtattcagccca

SEQ ID NO: 4715511 - DNA, 25 bp, Homo sapien
gtctgaccacgtcctgccggccctc

SEQ ID NO: 4715512 - DNA, 25 bp, Homo sapien
tgccggccctcccccagtaagggca

SEQ ID NO: 4715513 - DNA, 25 bp, Homo sapien
catgaggggtctgaccacgtcctgc

SEQ ID NO: 4715514 - DNA, 25 bp, Homo sapien
ggggtctgaccacgtcctgccggcc

SEQ ID NO: 4715515 - DNA, 25 bp, Homo sapien
cagggcaaacatattgctgcatcgg

SEQ ID NO: 4715516 - DNA, 25 bp, Homo sapien
tgctgcatcggacatgacagggttc

SEQ ID NO: 4715517 - DNA, 25 bp, Homo sapien
caagccacggaaattgtcatataca

SEQ ID NO: 4715518 - DNA, 25 bp, Homo sapien
atgacagggttctcgcaagccacgg

SEQ ID NO: 4715519 - DNA, 25 bp, Homo sapien
cctgtccctcccagcatgaagtaag

SEQ ID NO: 4715520 - DNA, 25 bp, Homo sapien
tgtccctcccagcatgaagtaagta

SEQ ID NO: 4715521 - DNA, 25 bp, Homo sapien
tgtgaatgtgcctgagcctgtccct

SEQ ID NO: 4715522 - DNA, 25 bp, Homo sapien
acaggtcctgtgtgaatgtgcctga

SEQ ID NO: 4715523 - DNA, 25 bp, Homo sapien
caacgggtggcgcaatacaacgcaa

SEQ ID NO: 4715524 - DNA, 25 bp, Homo sapien
tacaacgcaacaaactgtacatatc

SEQ ID NO: 4715525 - DNA, 25 bp, Homo sapien
tcttccctaagccaacgggtggcgc

SEQ ID NO: 4715526 - DNA, 25 bp, Homo sapien
ctacgagggcagttcttccctaagc

SEQ ID NO: 4715527 - DNA, 25 bp, Homo sapien
tctcgagagctcggaggaaaaaccg

SEQ ID NO: 4715528 - DNA, 25 bp, Homo sapien
aaaccgggcaagtcggctgcttcct

SEQ ID NO: 4715529 - DNA, 25 bp, Homo sapien
accgggcaagtcggctgcttccttg

SEQ ID NO: 4715530 - DNA, 25 bp, Homo sapien
gagagctcggaggaaaaaccgggca

SEQ ID NO: 4715531 - DNA, 25 bp, Homo sapien
gggcaagtcctgcttcaagcccaga

SEQ ID NO: 4715532 - DNA, 25 bp, Homo sapien
tgcttcaagcccagagacgcccgag

SEQ ID NO: 4715533 - DNA, 25 bp, Homo sapien
gcaagtcctgcttcaagcccagaga

SEQ ID NO: 4715534 - DNA, 25 bp, Homo sapien
agtcctgcttcaagcccagagacgc

SEQ ID NO: 4715535 - DNA, 25 bp, Homo sapien
cccagaggcggggacatgtgtttca

SEQ ID NO: 4715536 - DNA, 25 bp, Homo sapien
tctcaaacatgtcattgtaactgat

SEQ ID NO: 4715537 - DNA, 25 bp, Homo sapien
catgtcattgtaactgatgcgccca

SEQ ID NO: 4715538 - DNA, 25 bp, Homo sapien
gcaactcgagcagggcatttcttcc

SEQ ID NO: 4715539 - DNA, 25 bp, Homo sapien
tagggctttgttctgagcccagaac

SEQ ID NO: 4715540 - DNA, 25 bp, Homo sapien
caatctctgtcaaacaagtggtctg

SEQ ID NO: 4715541 - DNA, 25 bp, Homo sapien
acaatctctgtcaaacaagtggtct

SEQ ID NO: 4715542 - DNA, 25 bp, Homo sapien
gggccagacccagagggctggacag

SEQ ID NO: 4715543 - DNA, 25 bp, Homo sapien
ccagagggctggacagctccatcca

SEQ ID NO: 4715544 - DNA, 25 bp, Homo sapien
agggccagacccagagggctggaca

SEQ ID NO: 4715545 - DNA, 25 bp, Homo sapien
gagggctggacagctccatccatac

SEQ ID NO: 4715546 - DNA, 25 bp, Homo sapien
agagcccatctctgcgcaaggcagc

SEQ ID NO: 4715547 - DNA, 25 bp, Homo sapien
gagatgctcgatgtcactaaaaggc

SEQ ID NO: 4715548 - DNA, 25 bp, Homo sapien
gcctgggagagatgctcgatgtcac

SEQ ID NO: 4715549 - DNA, 25 bp, Homo sapien
gagcccatctctgcgcaaggcagct

SEQ ID NO: 4715550 - DNA, 25 bp, Homo sapien
gcctgtggctgaatgtaggagtgta

SEQ ID NO: 4715551 - DNA, 25 bp, Homo sapien
cctgtggctgaatgtaggagtgtag

SEQ ID NO: 4715552 - DNA, 25 bp, Homo sapien
tggctgaatgtaggagtgtagcctt

SEQ ID NO: 4715553 - DNA, 25 bp, Homo sapien
tgtggctgaatgtaggagtgtagcc

SEQ ID NO: 4715554 - DNA, 25 bp, Homo sapien
agtgccgtccggatgagggccatca

SEQ ID NO: 4715555 - DNA, 25 bp, Homo sapien
tcatgtcctcgttggagatgggcat

SEQ ID NO: 4715556 - DNA, 25 bp, Homo sapien
ttgatctccagtgccgtccggatga

SEQ ID NO: 4715557 - DNA, 25 bp, Homo sapien
ccatcagcgtggacgtgaagtgaac

SEQ ID NO: 4715558 - DNA, 25 bp, Homo sapien
tccagaatgtcacgccaatggcatc

SEQ ID NO: 4715559 - DNA, 25 bp, Homo sapien
ttgagtcgacccctcgtcctactgg

SEQ ID NO: 4715560 - DNA, 25 bp, Homo sapien
ggtgaattcatacgcccatgtgcct

SEQ ID NO: 4715561 - DNA, 25 bp, Homo sapien
caccgtcaaggtgtgcaacagctga

SEQ ID NO: 4715562 - DNA, 25 bp, Homo sapien
cctcaactccgcgtcacactgatgc

SEQ ID NO: 4715563 - DNA, 25 bp, Homo sapien
tcaactccgcgtcacactgatgctg

SEQ ID NO: 4715564 - DNA, 25 bp, Homo sapien
cttctggggcagattggcccacaca

SEQ ID NO: 4715565 - DNA, 25 bp, Homo sapien
cagattggcccacacaacggaaatc

SEQ ID NO: 4715566 - DNA, 25 bp, Homo sapien
ggtgggggctgggggcatttctcac

SEQ ID NO: 4715567 - DNA, 25 bp, Homo sapien
aggtgggggctgggggcatttctca

SEQ ID NO: 4715568 - DNA, 25 bp, Homo sapien
cagtaaaggtgggggctgggggcat

SEQ ID NO: 4715569 - DNA, 25 bp, Homo sapien
ctagggctcctccagatgctgacct

SEQ ID NO: 4715570 - DNA, 25 bp, Homo sapien
ggctcctccagatgctgacctggcc

SEQ ID NO: 4715571 - DNA, 25 bp, Homo sapien
ctcctccagatgctgacctggccct

SEQ ID NO: 4715572 - DNA, 25 bp, Homo sapien
cctccagatgctgacctggccctcc

SEQ ID NO: 4715573 - DNA, 25 bp, Homo sapien
gtagaagtcgaatatcatcagagct

SEQ ID NO: 4715574 - DNA, 25 bp, Homo sapien
ctgcttgtagaagtcgaatatcatc

SEQ ID NO: 4715575 - DNA, 25 bp, Homo sapien
gcttgtagaagtcgaatatcatcag

SEQ ID NO: 4715576 - DNA, 25 bp, Homo sapien
ttgtagaagtcgaatatcatcagag

SEQ ID NO: 4715577 - DNA, 25 bp, Homo sapien
tcctcggagcacagccggctgtgtc

SEQ ID NO: 4715578 - DNA, 25 bp, Homo sapien
gaaaacccgggctcctcggagcaca

SEQ ID NO: 4715579 - DNA, 25 bp, Homo sapien
ctcctcggagcacagccggctgtgt

SEQ ID NO: 4715580 - DNA, 25 bp, Homo sapien
ctcggagcacagccggctgtgtctg

SEQ ID NO: 4715581 - DNA, 25 bp, Homo sapien
cctgaccgccccacagggatctctg

SEQ ID NO: 4715582 - DNA, 25 bp, Homo sapien
catcctgggtcctttgagtgcccca

SEQ ID NO: 4715583 - DNA, 25 bp, Homo sapien
gggatctctgtggagtggccacgct

SEQ ID NO: 4715584 - DNA, 25 bp, Homo sapien
agactctttgatgccactctcttgg

SEQ ID NO: 4715585 - DNA, 25 bp, Homo sapien
gcatggaggccgctcgaccctggct

SEQ ID NO: 4715586 - DNA, 25 bp, Homo sapien
ggcccctccgggttatgctctgcat

SEQ ID NO: 4715587 - DNA, 25 bp, Homo sapien
atggaggccgctcgaccctggctct

SEQ ID NO: 4715588 - DNA, 25 bp, Homo sapien
tatgctctgcatctgaacgtccaca

SEQ ID NO: 4715589 - DNA, 25 bp, Homo sapien
ggcaccagggtcagcgggaatgcag

SEQ ID NO: 4715590 - DNA, 25 bp, Homo sapien
gcaccagggtcagcgggaatgcagg

SEQ ID NO: 4715591 - DNA, 25 bp, Homo sapien
ccagggtcagcgggaatgcaggcat

SEQ ID NO: 4715592 - DNA, 25 bp, Homo sapien
accagggtcagcgggaatgcaggca

SEQ ID NO: 4715593 - DNA, 25 bp, Homo sapien
tgtgggcaaaggactgagagtgggc

SEQ ID NO: 4715594 - DNA, 25 bp, Homo sapien
ctgtgggcaaaggactgagagtggg

SEQ ID NO: 4715595 - DNA, 25 bp, Homo sapien
gtgctgcaaagatgagtcccacggg

SEQ ID NO: 4715596 - DNA, 25 bp, Homo sapien
tggtggtggtgcgacgacgcctggc

SEQ ID NO: 4715597 - DNA, 25 bp, Homo sapien
gcttcctgtccctgcggcggtggca

SEQ ID NO: 4715598 - DNA, 25 bp, Homo sapien
catccatatcggcagacaggctggg

SEQ ID NO: 4715599 - DNA, 25 bp, Homo sapien
tgccggcgctctcgttcccgccggc

SEQ ID NO: 4715600 - DNA, 25 bp, Homo sapien
ccccaaagcggtcgcaggagtagaa

SEQ ID NO: 4715601 - DNA, 25 bp, Homo sapien
cggcagcctgtaggcccctctcccg

SEQ ID NO: 4715602 - DNA, 25 bp, Homo sapien
cagctgttggcgacgttgggtggct

SEQ ID NO: 4715603 - DNA, 25 bp, Homo sapien
gtgtgcgggggagggcgatggtcag

SEQ ID NO: 4715604 - DNA, 25 bp, Homo sapien
agggcgatggtcagggtcaggccca

SEQ ID NO: 4715605 - DNA, 25 bp, Homo sapien
ggtgctagcaccagatgttgacagc

SEQ ID NO: 4715606 - DNA, 25 bp, Homo sapien
ctgagccccggcgaagtggatgggt

SEQ ID NO: 4715607 - DNA, 25 bp, Homo sapien
agttggccgtcttgtaggtgatgct

SEQ ID NO: 4715608 - DNA, 25 bp, Homo sapien
gaggagttggccgtcttgtaggtga

SEQ ID NO: 4715609 - DNA, 25 bp, Homo sapien
gccacagcctcctcgaaagtgagag

SEQ ID NO: 4715610 - DNA, 25 bp, Homo sapien
gtcagagccaattcgagagccaggg

SEQ ID NO: 4715611 - DNA, 25 bp, Homo sapien
ttgtgttcggaaagcccacggctga

SEQ ID NO: 4715612 - DNA, 25 bp, Homo sapien
tcagggaggacacgtaggaagtcct

SEQ ID NO: 4715613 - DNA, 25 bp, Homo sapien
taaccgttgggcacgcggcggagag

SEQ ID NO: 4715614 - DNA, 25 bp, Homo sapien
tcccagggtgcagtggtaaccgttg

SEQ ID NO: 4715615 - DNA, 25 bp, Homo sapien
cggccacccgagctgagtcccaggg

SEQ ID NO: 4715616 - DNA, 25 bp, Homo sapien
ggtagctgtgccgtgctcggccacc

SEQ ID NO: 4715617 - DNA, 25 bp, Homo sapien
ccggctgccccgtgtggatgataaa

SEQ ID NO: 4715618 - DNA, 25 bp, Homo sapien
aacagggctttattcgtcgtctaga

SEQ ID NO: 4715619 - DNA, 25 bp, Homo sapien
cccaggacacgggatttggactcct

SEQ ID NO: 4715620 - DNA, 25 bp, Homo sapien
gggacagagagagccgcatcctcta

SEQ ID NO: 4715621 - DNA, 25 bp, Homo sapien
gctgccatcgcgagtacttttcaca

SEQ ID NO: 4715622 - DNA, 25 bp, Homo sapien
cacttggtcaagagcagcagagcca

SEQ ID NO: 4715623 - DNA, 25 bp, Homo sapien
tgagcattcgctgacactggcgggc

SEQ ID NO: 4715624 - DNA, 25 bp, Homo sapien
gagtctcctcgcataagccacaaag

SEQ ID NO: 4715625 - DNA, 25 bp, Homo sapien
gaattgcagcacttgtagaaggtgg

SEQ ID NO: 4715626 - DNA, 25 bp, Homo sapien
tgaagtaagcacgaggatgtttgca

SEQ ID NO: 4715627 - DNA, 25 bp, Homo sapien
catcagctcgtctgcagagcgagtc

SEQ ID NO: 4715628 - DNA, 25 bp, Homo sapien
gcagagcgagtctgaagctgcatga

SEQ ID NO: 4715629 - DNA, 25 bp, Homo sapien
ggatacacgattcacactgccagct

SEQ ID NO: 4715630 - DNA, 25 bp, Homo sapien
taaacagcacatacttagttatggg

SEQ ID NO: 4715631 - DNA, 25 bp, Homo sapien
cttagttatgggtctccgtctccta

SEQ ID NO: 4715632 - DNA, 25 bp, Homo sapien
tgactagcagataggccacatttcc

SEQ ID NO: 4715633 - DNA, 25 bp, Homo sapien
ctaaattaagtttacaagcaacagt

SEQ ID NO: 4715634 - DNA, 25 bp, Homo sapien
tactaaattaagtttacaagcaaca

SEQ ID NO: 4715635 - DNA, 25 bp, Homo sapien
atttagagacatttaatgtactcag

SEQ ID NO: 4715636 - DNA, 25 bp, Homo sapien
tttaatgtactcagttttgcaaaca

SEQ ID NO: 4715637 - DNA, 25 bp, Homo sapien
agacgcaggtgcaggccagaagcca

SEQ ID NO: 4715638 - DNA, 25 bp, Homo sapien
tgcagacgcaggtgcaggccagaag

SEQ ID NO: 4715639 - DNA, 25 bp, Homo sapien
atcccctgagacagagactcccgag

SEQ ID NO: 4715640 - DNA, 25 bp, Homo sapien
cttgtccatcccctgagacagagac

SEQ ID NO: 4715641 - DNA, 25 bp, Homo sapien
tggtgaggcaggtggaggttccagc

SEQ ID NO: 4715642 - DNA, 25 bp, Homo sapien
aggcaggtggaggttccagcccttg

SEQ ID NO: 4715643 - DNA, 25 bp, Homo sapien
gaatgttgttggtgaggcaggtgga

SEQ ID NO: 4715644 - DNA, 25 bp, Homo sapien
caggtggaggttccagcccttggcc

SEQ ID NO: 4715645 - DNA, 25 bp, Homo sapien
tggggcagaccagtggcaatcaatc

SEQ ID NO: 4715646 - DNA, 25 bp, Homo sapien
ctgatgaaggggagcccggggctgg

SEQ ID NO: 4715647 - DNA, 25 bp, Homo sapien
ggctggagccctgacccagctctgg

SEQ ID NO: 4715648 - DNA, 25 bp, Homo sapien
gacccagctctggggcagaccagtg

SEQ ID NO: 4715649 - DNA, 25 bp, Homo sapien
tgccttgggcggcaacactacagtg

SEQ ID NO: 4715650 - DNA, 25 bp, Homo sapien
cggcaacactacagtgcactcactg

SEQ ID NO: 4715651 - DNA, 25 bp, Homo sapien
gagtgctgccttgggcggcaacact

SEQ ID NO: 4715652 - DNA, 25 bp, Homo sapien
gggcggcaacactacagtgcactca

SEQ ID NO: 4715653 - DNA, 25 bp, Homo sapien
ggatgcagtggcgagatgacgtgct

SEQ ID NO: 4715654 - DNA, 25 bp, Homo sapien
gagaagtgtggtcactgactccaag

SEQ ID NO: 4715655 - DNA, 25 bp, Homo sapien
ccaggtcaggatgcagtggcgagat

SEQ ID NO: 4715656 - DNA, 25 bp, Homo sapien
tgagaagtgtggtcactgactccaa

SEQ ID NO: 4715657 - DNA, 25 bp, Homo sapien
ttcctgcctcttgaaggccagctca

SEQ ID NO: 4715658 - DNA, 25 bp, Homo sapien
ctcccaggcctcttcctgcctcttg

SEQ ID NO: 4715659 - DNA, 25 bp, Homo sapien
tcttcctgcctcttgaaggccagct

SEQ ID NO: 4715660 - DNA, 25 bp, Homo sapien
cctcttcctgcctcttgaaggccag

SEQ ID NO: 4715661 - DNA, 25 bp, Homo sapien
cgacaatgtgatccctgcgctgggc

SEQ ID NO: 4715662 - DNA, 25 bp, Homo sapien
acgcagcttggcctcaaggataaag

SEQ ID NO: 4715663 - DNA, 25 bp, Homo sapien
agcttggcctcaaggataaagccag

SEQ ID NO: 4715664 - DNA, 25 bp, Homo sapien
ttggcctcaaggataaagccagggt

SEQ ID NO: 4715665 - DNA, 25 bp, Homo sapien
cgtcatcctccagcatggccgtctg

SEQ ID NO: 4715666 - DNA, 25 bp, Homo sapien
cggcctgtgccccgtcatcctccag

SEQ ID NO: 4715667 - DNA, 25 bp, Homo sapien
catcctccagcatggccgtctggac

SEQ ID NO: 4715668 - DNA, 25 bp, Homo sapien
gccccgtcatcctccagcatggccg

SEQ ID NO: 4715669 - DNA, 25 bp, Homo sapien
gggagcctggaagcacacgggctgg

SEQ ID NO: 4715670 - DNA, 25 bp, Homo sapien
gaagcacacgggctggctcccctcg

SEQ ID NO: 4715671 - DNA, 25 bp, Homo sapien
agcacacgggctggctcccctcgct

SEQ ID NO: 4715672 - DNA, 25 bp, Homo sapien
agcctggaagcacacgggctggctc

SEQ ID NO: 4715673 - DNA, 25 bp, Homo sapien
attgtgcacaccgtagaggggctag

SEQ ID NO: 4715674 - DNA, 25 bp, Homo sapien
acattctagtagaaggttctcttca

SEQ ID NO: 4715675 - DNA, 25 bp, Homo sapien
gagagggcacattctagtagaaggt

SEQ ID NO: 4715676 - DNA, 25 bp, Homo sapien
gctagagagggcacattctagtaga

SEQ ID NO: 4715677 - DNA, 25 bp, Homo sapien
ccgctgggccacaggtgaacagtgc

SEQ ID NO: 4715678 - DNA, 25 bp, Homo sapien
tcaggtcccagtgccttcctgctcc

SEQ ID NO: 4715679 - DNA, 25 bp, Homo sapien
tccaaggctcctcgtcgggtgccag

SEQ ID NO: 4715680 - DNA, 25 bp, Homo sapien
cacaccggccctgtgggccccccat

SEQ ID NO: 4715681 - DNA, 25 bp, Homo sapien
ccaggccgatattttggaaatttcg

SEQ ID NO: 4715682 - DNA, 25 bp, Homo sapien
acgacgccgccgtgcggttcggaca

SEQ ID NO: 4715683 - DNA, 25 bp, Homo sapien
tctctcaaaatcagcgtctggattt

SEQ ID NO: 4715684 - DNA, 25 bp, Homo sapien
tttcgactgaaatggagcccgccat

SEQ ID NO: 4715685 - DNA, 25 bp, Homo sapien
ccaggtgtcccggagcgtctccctg

SEQ ID NO: 4715686 - DNA, 25 bp, Homo sapien
aggtgtcccggagcgtctccctgtc

SEQ ID NO: 4715687 - DNA, 25 bp, Homo sapien
caggtgtcccggagcgtctccctgt

SEQ ID NO: 4715688 - DNA, 25 bp, Homo sapien
ctttgcctcggcggccccaggtgtc

SEQ ID NO: 4715689 - DNA, 25 bp, Homo sapien
tcttcacaccggacgcggccccagg

SEQ ID NO: 4715690 - DNA, 25 bp, Homo sapien
gcagcagcgtctccctgtcttcaca

SEQ ID NO: 4715691 - DNA, 25 bp, Homo sapien
tccctgtcttcacaccggacgcggc

SEQ ID NO: 4715692 - DNA, 25 bp, Homo sapien
ccgcccaagccgccatgaagggacg

SEQ ID NO: 4715693 - DNA, 25 bp, Homo sapien
tgacccgcccaagccgccatgaagg

SEQ ID NO: 4715694 - DNA, 25 bp, Homo sapien
tgggggtgacccgcccaagccgcca

SEQ ID NO: 4715695 - DNA, 25 bp, Homo sapien
gggtgacccgcccaagccgccatga

SEQ ID NO: 4715696 - DNA, 25 bp, Homo sapien
cagaaacaaactcgcattcgtaacc

SEQ ID NO: 4715697 - DNA, 25 bp, Homo sapien
ccccagaaacaaactcgcattcgta

SEQ ID NO: 4715698 - DNA, 25 bp, Homo sapien
caaactcgcattcgtaaccggcatc

SEQ ID NO: 4715699 - DNA, 25 bp, Homo sapien
tcgtaaccggcatcttggccttgcg

SEQ ID NO: 4715700 - DNA, 25 bp, Homo sapien
tatatatccctagggcatgacaaaa

SEQ ID NO: 4715701 - DNA, 25 bp, Homo sapien
gacaacatgaatgacctttgcttcg

SEQ ID NO: 4715702 - DNA, 25 bp, Homo sapien
gtgcttagacatttttccaacagaa

SEQ ID NO: 4715703 - DNA, 25 bp, Homo sapien
gccacatgactaggctgcaaagttt

SEQ ID NO: 4715704 - DNA, 25 bp, Homo sapien
aataatcggtgactagttaatttat

SEQ ID NO: 4715705 - DNA, 25 bp, Homo sapien
cattgctgtaaaaataatcggtgac

SEQ ID NO: 4715706 - DNA, 25 bp, Homo sapien
tcacattgctgtaaaaataatcggt

SEQ ID NO: 4715707 - DNA, 25 bp, Homo sapien
taatcggtgactagttaatttataa

SEQ ID NO: 4715708 - DNA, 25 bp, Homo sapien
gctgcactcctaggacatttataca

SEQ ID NO: 4715709 - DNA, 25 bp, Homo sapien
gtggaagtgtcttgtatggccataa

SEQ ID NO: 4715710 - DNA, 25 bp, Homo sapien
tttttcaggcttggtggaagtgtct

SEQ ID NO: 4715711 - DNA, 25 bp, Homo sapien
taacccgttgacctaagctagctca

SEQ ID NO: 4715712 - DNA, 25 bp, Homo sapien
tcggggctattcgttttaacaatga

SEQ ID NO: 4715713 - DNA, 25 bp, Homo sapien
tgcagatgtactcattaaagtcggg

SEQ ID NO: 4715714 - DNA, 25 bp, Homo sapien
aggtgcagatgtactcattaaagtc

SEQ ID NO: 4715715 - DNA, 25 bp, Homo sapien
gggctattcgttttaacaatgacca

SEQ ID NO: 4715716 - DNA, 25 bp, Homo sapien
gactccattacagagttggacatcc

SEQ ID NO: 4715717 - DNA, 25 bp, Homo sapien
tagtgtctgtactctaactataaag

SEQ ID NO: 4715718 - DNA, 25 bp, Homo sapien
ttacagagttggacatcctcagaaa

SEQ ID NO: 4715719 - DNA, 25 bp, Homo sapien
tgtctgtactctaactataaagaga

SEQ ID NO: 4715720 - DNA, 25 bp, Homo sapien
cttggagtgggggtcttgtcttggt

SEQ ID NO: 4715721 - DNA, 25 bp, Homo sapien
ttgccagctgattgattctatgtgg

SEQ ID NO: 4715722 - DNA, 25 bp, Homo sapien
tctatgtggattgttttccttggag

SEQ ID NO: 4715723 - DNA, 25 bp, Homo sapien
gccagctgattgattctatgtggat

SEQ ID NO: 4715724 - DNA, 25 bp, Homo sapien
tgttggagatagtcaggcgtctgat

SEQ ID NO: 4715725 - DNA, 25 bp, Homo sapien
catatgcacggagtgcctttgcacc

SEQ ID NO: 4715726 - DNA, 25 bp, Homo sapien
gagtcttctgtagagtaggattagc

SEQ ID NO: 4715727 - DNA, 25 bp, Homo sapien
tagattggttcctcaatgttggaca

SEQ ID NO: 4715728 - DNA, 25 bp, Homo sapien
ggccccgatctggttcccgcactgc

SEQ ID NO: 4715729 - DNA, 25 bp, Homo sapien
ccccgatctggttcccgcactgccc

SEQ ID NO: 4715730 - DNA, 25 bp, Homo sapien
cgatctggttcccgcactgcccgat

SEQ ID NO: 4715731 - DNA, 25 bp, Homo sapien
cttggccccgatctggttcccgcac

SEQ ID NO: 4715732 - DNA, 25 bp, Homo sapien
ccgccccgccactgctaacatcttc

SEQ ID NO: 4715733 - DNA, 25 bp, Homo sapien
cagccacccagttccaccgtccccg

SEQ ID NO: 4715734 - DNA, 25 bp, Homo sapien
gggcaccgccccgccactgctaaca

SEQ ID NO: 4715735 - DNA, 25 bp, Homo sapien
ggccgcctcgccagccacccagttc

SEQ ID NO: 4715736 - DNA, 25 bp, Homo sapien
tcgtggtggtgcacgttgatgcgct

SEQ ID NO: 4715737 - DNA, 25 bp, Homo sapien
gcctcgtggtggtgcacgttgatgc

SEQ ID NO: 4715738 - DNA, 25 bp, Homo sapien
tggcctcgtggtggtgcacgttgat

SEQ ID NO: 4715739 - DNA, 25 bp, Homo sapien
cgctggcctcgtggtggtgcacgtt

SEQ ID NO: 4715740 - DNA, 25 bp, Homo sapien
ggtggtgcacattgggtgggggaag

SEQ ID NO: 4715741 - DNA, 25 bp, Homo sapien
tggtgcacattgggtgggggaagga

SEQ ID NO: 4715742 - DNA, 25 bp, Homo sapien
gtggtgcacattgggtgggggaagg

SEQ ID NO: 4715743 - DNA, 25 bp, Homo sapien
gggagggcatgagcgaggggagggc

SEQ ID NO: 4715744 - DNA, 25 bp, Homo sapien
gagggcatgagcgaggggagggccg

SEQ ID NO: 4715745 - DNA, 25 bp, Homo sapien
gggcgggagggcatgagcgagggga

SEQ ID NO: 4715746 - DNA, 25 bp, Homo sapien
cgggagggcatgagcgaggggaggg

SEQ ID NO: 4715747 - DNA, 25 bp, Homo sapien
ttgtctggcctgaggacctgcccga

SEQ ID NO: 4715748 - DNA, 25 bp, Homo sapien
gtctggcctgaggacctgcccgaag

SEQ ID NO: 4715749 - DNA, 25 bp, Homo sapien
ggcctgaggacctgcccgaagggcc

SEQ ID NO: 4715750 - DNA, 25 bp, Homo sapien
ctggcctgaggacctgcccgaaggg

SEQ ID NO: 4715751 - DNA, 25 bp, Homo sapien
ttaagagaggcagattgagcgactc

SEQ ID NO: 4715752 - DNA, 25 bp, Homo sapien
cccgaagcccgtttaagagaggcag

SEQ ID NO: 4715753 - DNA, 25 bp, Homo sapien
taagagaggcagattgagcgactcg

SEQ ID NO: 4715754 - DNA, 25 bp, Homo sapien
aagagaggcagattgagcgactcga

SEQ ID NO: 4715755 - DNA, 25 bp, Homo sapien
gccaggtatacggtcatcagtggtc

SEQ ID NO: 4715756 - DNA, 25 bp, Homo sapien
cagtggtcaccaccataatgcagaa

SEQ ID NO: 4715757 - DNA, 25 bp, Homo sapien
taagacagcacagccggtcactcga

SEQ ID NO: 4715758 - DNA, 25 bp, Homo sapien
ctgtaagacagcacagccggtcact

SEQ ID NO: 4715759 - DNA, 25 bp, Homo sapien
tgctgatgaggagggtaaccatccc

SEQ ID NO: 4715760 - DNA, 25 bp, Homo sapien
cttgctgatgaggagggtaaccatc

SEQ ID NO: 4715761 - DNA, 25 bp, Homo sapien
gatgaggagggtaaccatcccagac

SEQ ID NO: 4715762 - DNA, 25 bp, Homo sapien
ctgatgaggagggtaaccatcccag

SEQ ID NO: 4715763 - DNA, 25 bp, Homo sapien
tgaacattgctgtaaactgctctga

SEQ ID NO: 4715764 - DNA, 25 bp, Homo sapien
tgctgtaaactgctctgagacacac

SEQ ID NO: 4715765 - DNA, 25 bp, Homo sapien
ctgaacattgctgtaaactgctctg

SEQ ID NO: 4715766 - DNA, 25 bp, Homo sapien
cattgctgtaaactgctctgagaca

SEQ ID NO: 4715767 - DNA, 25 bp, Homo sapien
tctcggcctcggtgaattccatctc

SEQ ID NO: 4715768 - DNA, 25 bp, Homo sapien
cggcctcggtgaattccatctcatc

SEQ ID NO: 4715769 - DNA, 25 bp, Homo sapien
caggtcattcatgttgctctcggcc

SEQ ID NO: 4715770 - DNA, 25 bp, Homo sapien
ctctcggcctcggtgaattccatct

SEQ ID NO: 4715771 - DNA, 25 bp, Homo sapien
ctcctcagcatactcctcatcctcc

SEQ ID NO: 4715772 - DNA, 25 bp, Homo sapien
tcctcctcagcatactcctcatcct

SEQ ID NO: 4715773 - DNA, 25 bp, Homo sapien
ttggccgtggcatcctgatattgct

SEQ ID NO: 4715774 - DNA, 25 bp, Homo sapien
cctccttggccgtggcatcctgata

SEQ ID NO: 4715775 - DNA, 25 bp, Homo sapien
gtcaaaactgcacactataaaagtg

SEQ ID NO: 4715776 - DNA, 25 bp, Homo sapien
gaatactttattagtcaaaactgca

SEQ ID NO: 4715777 - DNA, 25 bp, Homo sapien
gcgtagtgacacatagctgtcacaa

SEQ ID NO: 4715778 - DNA, 25 bp, Homo sapien
cacaaatgaacaagtgcgtagtgac

SEQ ID NO: 4715779 - DNA, 25 bp, Homo sapien
cagggcatccccaagttcacgtgaa

SEQ ID NO: 4715780 - DNA, 25 bp, Homo sapien
gaacaggttttccaccacgtcgctg

SEQ ID NO: 4715781 - DNA, 25 bp, Homo sapien
tacatgggataagccaaggcttgcc

SEQ ID NO: 4715782 - DNA, 25 bp, Homo sapien
ccatgctgagccctcctggagccac

SEQ ID NO: 4715783 - DNA, 25 bp, Homo sapien
catctgtgcctttggagggactgcc

SEQ ID NO: 4715784 - DNA, 25 bp, Homo sapien
gggaagcagcatttgtgagcacctg

SEQ ID NO: 4715785 - DNA, 25 bp, Homo sapien
aaaccccatctgtgcctttggaggg

SEQ ID NO: 4715786 - DNA, 25 bp, Homo sapien
caggtcctgttcagaaaccccatct

SEQ ID NO: 4715787 - DNA, 25 bp, Homo sapien
tcaggcgtttttctcactggttgcc

SEQ ID NO: 4715788 - DNA, 25 bp, Homo sapien
aggcgtttttctcactggttgccgc

SEQ ID NO: 4715789 - DNA, 25 bp, Homo sapien
gcgtttttctcactggttgccgcca

SEQ ID NO: 4715790 - DNA, 25 bp, Homo sapien
cgtttttctcactggttgccgccag

SEQ ID NO: 4715791 - DNA, 25 bp, Homo sapien
gagcccgtatcagagcagagtggcc

SEQ ID NO: 4715792 - DNA, 25 bp, Homo sapien
agaaggtgacaccaggcagaaacca

SEQ ID NO: 4715793 - DNA, 25 bp, Homo sapien
cgtggaagaaggtgacaccaggcag

SEQ ID NO: 4715794 - DNA, 25 bp, Homo sapien
agagcccgtatcagagcagagtggc

SEQ ID NO: 4715795 - DNA, 25 bp, Homo sapien
gaatataaggagatccgtttgtaca

SEQ ID NO: 4715796 - DNA, 25 bp, Homo sapien
atccgtttgtacattttgctctcgt

SEQ ID NO: 4715797 - DNA, 25 bp, Homo sapien
cgtttgtacattttgctctcgtgca

SEQ ID NO: 4715798 - DNA, 25 bp, Homo sapien
cttgaatataaggagatccgtttgt

SEQ ID NO: 4715799 - DNA, 25 bp, Homo sapien
ccattaattaactggtcggaagtga

SEQ ID NO: 4715800 - DNA, 25 bp, Homo sapien
cagtgtcctgcgaggacttggtcct

SEQ ID NO: 4715801 - DNA, 25 bp, Homo sapien
agtctccagtccattaattaactgg

SEQ ID NO: 4715802 - DNA, 25 bp, Homo sapien
attaactggtcggaagtgagtcccg

SEQ ID NO: 4715803 - DNA, 25 bp, Homo sapien
tctgaagggatgcacggattcacga

SEQ ID NO: 4715804 - DNA, 25 bp, Homo sapien
cgcatcggaaggcagtcgtctgaag

SEQ ID NO: 4715805 - DNA, 25 bp, Homo sapien
cagtcgtctgaagggatgcacggat

SEQ ID NO: 4715806 - DNA, 25 bp, Homo sapien
aaggcagtcgtctgaagggatgcac

SEQ ID NO: 4715807 - DNA, 25 bp, Homo sapien
ggcagtggcccatagaggaaacagc

SEQ ID NO: 4715808 - DNA, 25 bp, Homo sapien
gcaacttgacctctgggatgtgagt

SEQ ID NO: 4715809 - DNA, 25 bp, Homo sapien
acagtgaccccagtacaagtttatg

SEQ ID NO: 4715810 - DNA, 25 bp, Homo sapien
tgcagatacgtgctaaagaggctgg

SEQ ID NO: 4715811 - DNA, 25 bp, Homo sapien
tctacgtgtttcttgggcagaggac

SEQ ID NO: 4715812 - DNA, 25 bp, Homo sapien
cagctgtcgcactgccatgggttct

SEQ ID NO: 4715813 - DNA, 25 bp, Homo sapien
tcaacgggacagacatgggacaagt

SEQ ID NO: 4715814 - DNA, 25 bp, Homo sapien
tgggacaagtgtgcctgatcatggt

SEQ ID NO: 4715815 - DNA, 25 bp, Homo sapien
ttcatggagcggaaaggctcgagaa

SEQ ID NO: 4715816 - DNA, 25 bp, Homo sapien
tcgaatcacaggtttataaaatcca

SEQ ID NO: 4715817 - DNA, 25 bp, Homo sapien
gcaagctgtcccagagttcatggag

SEQ ID NO: 4715818 - DNA, 25 bp, Homo sapien
gcaactgaggatgctcgaatcacag

SEQ ID NO: 4715819 - DNA, 25 bp, Homo sapien
ttttttgtttgcgaggccacaggga

SEQ ID NO: 4715820 - DNA, 25 bp, Homo sapien
tcttttttgtttgcgaggccacagg

SEQ ID NO: 4715821 - DNA, 25 bp, Homo sapien
ttttgtttgcgaggccacagggaaa

SEQ ID NO: 4715822 - DNA, 25 bp, Homo sapien
ttcttttttgtttgcgaggccacag

SEQ ID NO: 4715823 - DNA, 25 bp, Homo sapien
cacccatggaccgaagcatcttgtt

SEQ ID NO: 4715824 - DNA, 25 bp, Homo sapien
tgaaggtcatgtaggagacgaaaga

SEQ ID NO: 4715825 - DNA, 25 bp, Homo sapien
agcatcttgttagatgagggccgcc

SEQ ID NO: 4715826 - DNA, 25 bp, Homo sapien
tggcaaacgcgagcagatgaaggtc

SEQ ID NO: 4715827 - DNA, 25 bp, Homo sapien
aagttgcaagctttaatgtacccat

SEQ ID NO: 4715828 - DNA, 25 bp, Homo sapien
cagcttccccagtcgttcctgagga

SEQ ID NO: 4715829 - DNA, 25 bp, Homo sapien
cacagcttccccagtcgttcctgag

SEQ ID NO: 4715830 - DNA, 25 bp, Homo sapien
agcctcggggaccatgaagccacag

SEQ ID NO: 4715831 - DNA, 25 bp, Homo sapien
gcagcctcggggaccatgaagccac

SEQ ID NO: 4715832 - DNA, 25 bp, Homo sapien
tctatgttgctaagtaaagggtggc

SEQ ID NO: 4715833 - DNA, 25 bp, Homo sapien
cacaaccaaagagatgatagtcaga

SEQ ID NO: 4715834 - DNA, 25 bp, Homo sapien
catgtaattatatacgagccactct

SEQ ID NO: 4715835 - DNA, 25 bp, Homo sapien
ggaataccattcaccaacagaaagg

SEQ ID NO: 4715836 - DNA, 25 bp, Homo sapien
cgccatggttcagcacagacgctct

SEQ ID NO: 4715837 - DNA, 25 bp, Homo sapien
ctctggtggcgccatggttcagcac

SEQ ID NO: 4715838 - DNA, 25 bp, Homo sapien
agcacagacgctcttgctcacagtt

SEQ ID NO: 4715839 - DNA, 25 bp, Homo sapien
ggttcagcacagacgctcttgctca

SEQ ID NO: 4715840 - DNA, 25 bp, Homo sapien
ttaagggaagcgcttccactttctg

SEQ ID NO: 4715841 - DNA, 25 bp, Homo sapien
ctgggctttcggacttgccagaatg

SEQ ID NO: 4715842 - DNA, 25 bp, Homo sapien
gaaagctgggctttcggacttgcca

SEQ ID NO: 4715843 - DNA, 25 bp, Homo sapien
aagggaagcgcttccactttctggg

SEQ ID NO: 4715844 - DNA, 25 bp, Homo sapien
acaaggcttagacattcgtccagta

SEQ ID NO: 4715845 - DNA, 25 bp, Homo sapien
caaggcttagacattcgtccagtat

SEQ ID NO: 4715846 - DNA, 25 bp, Homo sapien
aaggcttagacattcgtccagtatg

SEQ ID NO: 4715847 - DNA, 25 bp, Homo sapien
cacaaggcttagacattcgtccagt

SEQ ID NO: 4715848 - DNA, 25 bp, Homo sapien
aaggggctacaagaggcagttggaa

SEQ ID NO: 4715849 - DNA, 25 bp, Homo sapien
ctgggctgtgactacttccaggaag

SEQ ID NO: 4715850 - DNA, 25 bp, Homo sapien
tgggctgtgactacttccaggaagg

SEQ ID NO: 4715851 - DNA, 25 bp, Homo sapien
gaaggggctacaagaggcagttgga

SEQ ID NO: 4715852 - DNA, 25 bp, Homo sapien
atgcacaaggtcctcttactgttcc

SEQ ID NO: 4715853 - DNA, 25 bp, Homo sapien
tgtagtgtggaaacaaattattcat

SEQ ID NO: 4715854 - DNA, 25 bp, Homo sapien
attcatgcacaaggtcctcttactg

SEQ ID NO: 4715855 - DNA, 25 bp, Homo sapien
attattcatgcacaaggtcctctta

SEQ ID NO: 4715856 - DNA, 25 bp, Homo sapien
aaaagtcactgggttctctaagaag

SEQ ID NO: 4715857 - DNA, 25 bp, Homo sapien
aggatttcacagatttaaggtgcaa

SEQ ID NO: 4715858 - DNA, 25 bp, Homo sapien
cagatttaaggtgcaaaaagtcact

SEQ ID NO: 4715859 - DNA, 25 bp, Homo sapien
caaaaagtcactgggttctctaaga

SEQ ID NO: 4715860 - DNA, 25 bp, Homo sapien
ttctttttctgccctcttgggcttc

SEQ ID NO: 4715861 - DNA, 25 bp, Homo sapien
gccctcttgggcttctgaaatgaaa

SEQ ID NO: 4715862 - DNA, 25 bp, Homo sapien
tttttctgccctcttgggcttctga

SEQ ID NO: 4715863 - DNA, 25 bp, Homo sapien
tgccctcttgggcttctgaaatgaa

SEQ ID NO: 4715864 - DNA, 25 bp, Homo sapien
cattttccgttccccagcattggca

SEQ ID NO: 4715865 - DNA, 25 bp, Homo sapien
ccgttccccagcattggcaggttct

SEQ ID NO: 4715866 - DNA, 25 bp, Homo sapien
ttttccgttccccagcattggcagg

SEQ ID NO: 4715867 - DNA, 25 bp, Homo sapien
caggttctgggactggtggctgtgg

SEQ ID NO: 4715868 - DNA, 25 bp, Homo sapien
agatgcacctggcatgaggcgtgcc

SEQ ID NO: 4715869 - DNA, 25 bp, Homo sapien
gatgagtttcgtctcctccactgga

SEQ ID NO: 4715870 - DNA, 25 bp, Homo sapien
acagaggcagatgagtttcgtctcc

SEQ ID NO: 4715871 - DNA, 25 bp, Homo sapien
aggagcatggcccctgtccacagat

SEQ ID NO: 4715872 - DNA, 25 bp, Homo sapien
cacaccaagatatgcacctggccac

SEQ ID NO: 4715873 - DNA, 25 bp, Homo sapien
tcacaccaagatatgcacctggcca

SEQ ID NO: 4715874 - DNA, 25 bp, Homo sapien
tgtagtgacagaagcaggaaactcc

SEQ ID NO: 4715875 - DNA, 25 bp, Homo sapien
attcgagacgggcagcacaagctgc

SEQ ID NO: 4715876 - DNA, 25 bp, Homo sapien
ctgcggagtgcaggccacctctacg

SEQ ID NO: 4715877 - DNA, 25 bp, Homo sapien
cctctacggccaggaaacggattct

SEQ ID NO: 4715878 - DNA, 25 bp, Homo sapien
ttacgtagatcagcgatacgatgat

SEQ ID NO: 4715879 - DNA, 25 bp, Homo sapien
gtagatcagcgatacgatgattcca

SEQ ID NO: 4715880 - DNA, 25 bp, Homo sapien
acgtagatcagcgatacgatgattc

SEQ ID NO: 4715881 - DNA, 25 bp, Homo sapien
gtttacgtagatcagcgatacgatg

SEQ ID NO: 4715882 - DNA, 25 bp, Homo sapien
ctgtgtaaacgcccatgaacctaag

SEQ ID NO: 4715883 - DNA, 25 bp, Homo sapien
cgcccatgaacctaagattacaaga

SEQ ID NO: 4715884 - DNA, 25 bp, Homo sapien
aacgcccatgaacctaagattacaa

SEQ ID NO: 4715885 - DNA, 25 bp, Homo sapien
tccactgtgtaaacgcccatgaacc

SEQ ID NO: 4715886 - DNA, 25 bp, Homo sapien
atcttcacctgttgaattcataagt

SEQ ID NO: 4715887 - DNA, 25 bp, Homo sapien
ttcacctgttgaattcataagttca

SEQ ID NO: 4715888 - DNA, 25 bp, Homo sapien
cacctgttgaattcataagttcatg

SEQ ID NO: 4715889 - DNA, 25 bp, Homo sapien
ctgacaaagttgatttatcaagttg

SEQ ID NO: 4715890 - DNA, 25 bp, Homo sapien
gactggaaaaaagggtatgggatca

SEQ ID NO: 4715891 - DNA, 25 bp, Homo sapien
ctggaaaaaagggtatgggatcatc

SEQ ID NO: 4715892 - DNA, 25 bp, Homo sapien
ggaaaaaagggtatgggatcatcac

SEQ ID NO: 4715893 - DNA, 25 bp, Homo sapien
aacatgagactggaaaaaagggtat

SEQ ID NO: 4715894 - DNA, 25 bp, Homo sapien
tccttctaaagtaacatcctctcaa

SEQ ID NO: 4715895 - DNA, 25 bp, Homo sapien
tctaaagtaacatcctctcaaggcc

SEQ ID NO: 4715896 - DNA, 25 bp, Homo sapien
tcacttgatatcaggagtcgaggcg

SEQ ID NO: 4715897 - DNA, 25 bp, Homo sapien
ttccattagtagaaagccttcctaa

SEQ ID NO: 4715898 - DNA, 25 bp, Homo sapien
tgtgtctgaataaggcaccaatttt

SEQ ID NO: 4715899 - DNA, 25 bp, Homo sapien
tgcttgtgtctgaataaggcaccaa

SEQ ID NO: 4715900 - DNA, 25 bp, Homo sapien
tgaataaggcaccaattttaagctg

SEQ ID NO: 4715901 - DNA, 25 bp, Homo sapien
tccttttgcttgtgtctgaataagg

SEQ ID NO: 4715902 - DNA, 25 bp, Homo sapien
ggacagtacttgttctcaagggaat

SEQ ID NO: 4715903 - DNA, 25 bp, Homo sapien
taagtatgtgtgctactgaggcaag

SEQ ID NO: 4715904 - DNA, 25 bp, Homo sapien
tcacagaggccgtgccaatctctct

SEQ ID NO: 4715905 - DNA, 25 bp, Homo sapien
acttaagtatgtgtgctactgaggc

SEQ ID NO: 4715906 - DNA, 25 bp, Homo sapien
gtatgtgtgctactgaggcaagcat

SEQ ID NO: 4715907 - DNA, 25 bp, Homo sapien
taaacaaaaggtcatatgcacaaac

SEQ ID NO: 4715908 - DNA, 25 bp, Homo sapien
tacagacagtgactcattatactgc

SEQ ID NO: 4715909 - DNA, 25 bp, Homo sapien
taagaatgctcatgccctgtgactc

SEQ ID NO: 4715910 - DNA, 25 bp, Homo sapien
tttacatcgagggtaataagaatgc

SEQ ID NO: 4715911 - DNA, 25 bp, Homo sapien
tcccagctaataggaggtctttcat

SEQ ID NO: 4715912 - DNA, 25 bp, Homo sapien
atcccagctaataggaggtctttca

SEQ ID NO: 4715913 - DNA, 25 bp, Homo sapien
cccagctaataggaggtctttcatt

SEQ ID NO: 4715914 - DNA, 25 bp, Homo sapien
cttagcccagacttcccgtgtcctt

SEQ ID NO: 4715915 - DNA, 25 bp, Homo sapien
tagcccagacttcccgtgtcctttc

SEQ ID NO: 4715916 - DNA, 25 bp, Homo sapien
tgtctcttagcccagacttcccgtg

SEQ ID NO: 4715917 - DNA, 25 bp, Homo sapien
tttgctgtctcttagcccagacttc

SEQ ID NO: 4715918 - DNA, 25 bp, Homo sapien
gtcttgatctgcaggtgtctgactt

SEQ ID NO: 4715919 - DNA, 25 bp, Homo sapien
ctgtgccagggtgcaagctgagcac

SEQ ID NO: 4715920 - DNA, 25 bp, Homo sapien
tgctgtggtcttgatctgcaggtgt

SEQ ID NO: 4715921 - DNA, 25 bp, Homo sapien
tgtgccagggtgcaagctgagcact

SEQ ID NO: 4715922 - DNA, 25 bp, Homo sapien
taagtagtgcttgtgctcatctcct

SEQ ID NO: 4715923 - DNA, 25 bp, Homo sapien
gtgcttgtgctcatctccttggctg

SEQ ID NO: 4715924 - DNA, 25 bp, Homo sapien
ccagtaagtagtgcttgtgctcatc

SEQ ID NO: 4715925 - DNA, 25 bp, Homo sapien
ctaggccagtaagtagtgcttgtgc

SEQ ID NO: 4715926 - DNA, 25 bp, Homo sapien
gggaaagctacaagcagcaaacagt

SEQ ID NO: 4715927 - DNA, 25 bp, Homo sapien
ctagggctctactgggccggcgtct

SEQ ID NO: 4715928 - DNA, 25 bp, Homo sapien
tcctggagaggcttcgatgcccctc

SEQ ID NO: 4715929 - DNA, 25 bp, Homo sapien
gcttgcagtggcctataaagcctcc

SEQ ID NO: 4715930 - DNA, 25 bp, Homo sapien
gagccctcgtggaggtcaaagccac

SEQ ID NO: 4715931 - DNA, 25 bp, Homo sapien
ttctcactgccttttgtctgcccag

SEQ ID NO: 4715932 - DNA, 25 bp, Homo sapien
tgctgtgtggaagttcactcctgcc

SEQ ID NO: 4715933 - DNA, 25 bp, Homo sapien
tccaccaccccgagatcacatttct

SEQ ID NO: 4715934 - DNA, 25 bp, Homo sapien
ctggagacggtgtttgtcatgggcc

SEQ ID NO: 4715935 - DNA, 25 bp, Homo sapien
tggagacggtgtttgtcatgggcct

SEQ ID NO: 4715936 - DNA, 25 bp, Homo sapien
ggagacggtgtttgtcatgggcctg

SEQ ID NO: 4715937 - DNA, 25 bp, Homo sapien
gtccagagtgttgccaggacccagg

SEQ ID NO: 4715938 - DNA, 25 bp, Homo sapien
gagtccagagtgttgccaggaccca

SEQ ID NO: 4715939 - DNA, 25 bp, Homo sapien
gtgtggagtccagagtgttgccagg

SEQ ID NO: 4715940 - DNA, 25 bp, Homo sapien
tggagtccagagtgttgccaggacc

SEQ ID NO: 4715941 - DNA, 25 bp, Homo sapien
ctgagtcactcctgcagccttgctc

SEQ ID NO: 4715942 - DNA, 25 bp, Homo sapien
ttcttcctgagtcactcctgcagcc

SEQ ID NO: 4715943 - DNA, 25 bp, Homo sapien
ttcctgagtcactcctgcagccttg

SEQ ID NO: 4715944 - DNA, 25 bp, Homo sapien
cttcttcctgagtcactcctgcagc

SEQ ID NO: 4715945 - DNA, 25 bp, Homo sapien
ccaagggccattaggctctcagcat

SEQ ID NO: 4715946 - DNA, 25 bp, Homo sapien
tgtgccaagggccattaggctctca

SEQ ID NO: 4715947 - DNA, 25 bp, Homo sapien
tgccaagggccattaggctctcagc

SEQ ID NO: 4715948 - DNA, 25 bp, Homo sapien
caagggccattaggctctcagcatg

SEQ ID NO: 4715949 - DNA, 25 bp, Homo sapien
aagaacacagtggcgcaggctgggt

SEQ ID NO: 4715950 - DNA, 25 bp, Homo sapien
agttctttattgattggtgtgccgt

SEQ ID NO: 4715951 - DNA, 25 bp, Homo sapien
ctttattgattggtgtgccgttttc

SEQ ID NO: 4715952 - DNA, 25 bp, Homo sapien
tattgattggtgtgccgttttctct

SEQ ID NO: 4715953 - DNA, 25 bp, Homo sapien
ggatggagtctgacacgcggacaaa

SEQ ID NO: 4715954 - DNA, 25 bp, Homo sapien
tgctgcggtggcggcaaaggaggga

SEQ ID NO: 4715955 - DNA, 25 bp, Homo sapien
gtctgacacgcggacaaaggctcct

SEQ ID NO: 4715956 - DNA, 25 bp, Homo sapien
ctgcggtggcggcaaaggagggatg

SEQ ID NO: 4715957 - DNA, 25 bp, Homo sapien
cagcccccggagacttaaatacagg

SEQ ID NO: 4715958 - DNA, 25 bp, Homo sapien
ccagcccccggagacttaaatacag

SEQ ID NO: 4715959 - DNA, 25 bp, Homo sapien
ccagggtgggcagcggccctgcctc

SEQ ID NO: 4715960 - DNA, 25 bp, Homo sapien
ggtgggcagcggccctgcctcctac

SEQ ID NO: 4715961 - DNA, 25 bp, Homo sapien
aatgtgccggcccagggtgggcagc

SEQ ID NO: 4715962 - DNA, 25 bp, Homo sapien
agggtgggcagcggccctgcctcct

SEQ ID NO: 4715963 - DNA, 25 bp, Homo sapien
gaagagatccgacatcaagtgccca

SEQ ID NO: 4715964 - DNA, 25 bp, Homo sapien
gagatccgacatcaagtgcccacct

SEQ ID NO: 4715965 - DNA, 25 bp, Homo sapien
tgttgaagagatccgacatcaagtg

SEQ ID NO: 4715966 - DNA, 25 bp, Homo sapien
ttgaagagatccgacatcaagtgcc

SEQ ID NO: 4715967 - DNA, 25 bp, Homo sapien
tgaagagttcagtcacatgcgaccg

SEQ ID NO: 4715968 - DNA, 25 bp, Homo sapien
gaagagttcagtcacatgcgaccgg

SEQ ID NO: 4715969 - DNA, 25 bp, Homo sapien
agagttcagtcacatgcgaccggtg

SEQ ID NO: 4715970 - DNA, 25 bp, Homo sapien
gggtgaagagttcagtcacatgcga

SEQ ID NO: 4715971 - DNA, 25 bp, Homo sapien
gaccgctcttggcagtcgaagaaga

SEQ ID NO: 4715972 - DNA, 25 bp, Homo sapien
cagggcttccagcatgtgccctagg

SEQ ID NO: 4715973 - DNA, 25 bp, Homo sapien
cttggaccgctcttggcagtcgaag

SEQ ID NO: 4715974 - DNA, 25 bp, Homo sapien
cttggcagtcgaagaagattctcct

SEQ ID NO: 4715975 - DNA, 25 bp, Homo sapien
cttctccagctttcgctccttcatg

SEQ ID NO: 4715976 - DNA, 25 bp, Homo sapien
ttctccagctttcgctccttcatgc

SEQ ID NO: 4715977 - DNA, 25 bp, Homo sapien
ccagctttcgctccttcatgctgcg

SEQ ID NO: 4715978 - DNA, 25 bp, Homo sapien
ggcggatggactctagcagagtggc

SEQ ID NO: 4715979 - DNA, 25 bp, Homo sapien
cctgagctagccatgctctgacagt

SEQ ID NO: 4715980 - DNA, 25 bp, Homo sapien
gaagtccagagctctacagtttgaa

SEQ ID NO: 4715981 - DNA, 25 bp, Homo sapien
aatccacccgagtgcactgagcacg

SEQ ID NO: 4715982 - DNA, 25 bp, Homo sapien
tgagcacgccagaaatcaggtggcc

SEQ ID NO: 4715983 - DNA, 25 bp, Homo sapien
cctctgccctagaagtgagaagtcc

SEQ ID NO: 4715984 - DNA, 25 bp, Homo sapien
ctgaaggagatgcgctgctgctgct

SEQ ID NO: 4715985 - DNA, 25 bp, Homo sapien
ctgctgtcgtcctgcctggcgcctt

SEQ ID NO: 4715986 - DNA, 25 bp, Homo sapien
tgctgtcgtcctgcctggcgccttg

SEQ ID NO: 4715987 - DNA, 25 bp, Homo sapien
ctgctgctgtcgtcctgcctggcgc

SEQ ID NO: 4715988 - DNA, 25 bp, Homo sapien
ctacaggggccgcggttgagggtgg

SEQ ID NO: 4715989 - DNA, 25 bp, Homo sapien
gtggtgttagtaccccatcttgtag

SEQ ID NO: 4715990 - DNA, 25 bp, Homo sapien
ggtggtgttagtaccccatcttgta

SEQ ID NO: 4715991 - DNA, 25 bp, Homo sapien
gaacatggatctcaggcacctggcc

SEQ ID NO: 4715992 - DNA, 25 bp, Homo sapien
ccaggtcggcactgtacatgaggtc

SEQ ID NO: 4715993 - DNA, 25 bp, Homo sapien
cactgtacatgaggtcgttggcaat

SEQ ID NO: 4715994 - DNA, 25 bp, Homo sapien
gcaggtaggatggaacatggatctc

SEQ ID NO: 4715995 - DNA, 25 bp, Homo sapien
gatggacaagggggcatcaaacagc

SEQ ID NO: 4715996 - DNA, 25 bp, Homo sapien
atggacaagggggcatcaaacagct

SEQ ID NO: 4715997 - DNA, 25 bp, Homo sapien
tgatggacaagggggcatcaaacag

SEQ ID NO: 4715998 - DNA, 25 bp, Homo sapien
tggacaagggggcatcaaacagctt

SEQ ID NO: 4715999 - DNA, 25 bp, Homo sapien
acatgggggtcaggcaagctgacac

SEQ ID NO: 4716000 - DNA, 25 bp, Homo sapien
ggggtcaggcaagctgacacccgct

SEQ ID NO: 4716001 - DNA, 25 bp, Homo sapien
tgagcccatgttcctctcccacatc

SEQ ID NO: 4716002 - DNA, 25 bp, Homo sapien
gtcaggcaagctgacacccgctgtc

SEQ ID NO: 4716003 - DNA, 25 bp, Homo sapien
ctgggtccccactaagccaggccgg

SEQ ID NO: 4716004 - DNA, 25 bp, Homo sapien
gccctgggtccccactaagccaggc

SEQ ID NO: 4716005 - DNA, 25 bp, Homo sapien
tgccctgggtccccactaagccagg

SEQ ID NO: 4716006 - DNA, 25 bp, Homo sapien
tggtgctcacgcacacaggaaagtc

SEQ ID NO: 4716007 - DNA, 25 bp, Homo sapien
ttggtgctcacgcacacaggaaagt

SEQ ID NO: 4716008 - DNA, 25 bp, Homo sapien
agtccctcttctgcatcgtcctcgg

SEQ ID NO: 4716009 - DNA, 25 bp, Homo sapien
aaggagctgacagagctgatgttgc

SEQ ID NO: 4716010 - DNA, 25 bp, Homo sapien
ggtcctgggcgcccgtgaagatgga

SEQ ID NO: 4716011 - DNA, 25 bp, Homo sapien
cggtgcttgctctggatcctgtggc

SEQ ID NO: 4716012 - DNA, 25 bp, Homo sapien
cagggtacttggcactggagaacac

SEQ ID NO: 4716013 - DNA, 25 bp, Homo sapien
tggagccatattcctgcaggcgccc

SEQ ID NO: 4716014 - DNA, 25 bp, Homo sapien
tgggccaaggagaccttctctccaa

SEQ ID NO: 4716015 - DNA, 25 bp, Homo sapien
gcccttgatcttctcaatcttggcc

SEQ ID NO: 4716016 - DNA, 25 bp, Homo sapien
tcaatcttggcctgggccaaggaga

SEQ ID NO: 4716017 - DNA, 25 bp, Homo sapien
aggagaccttctctccaatggcctg

SEQ ID NO: 4716018 - DNA, 25 bp, Homo sapien
ccatggagaagatcacagaggctgg

SEQ ID NO: 4716019 - DNA, 25 bp, Homo sapien
caggccctcaggcaagggctctgaa

SEQ ID NO: 4716020 - DNA, 25 bp, Homo sapien
tcctgcttctaacagcagagctgcc

SEQ ID NO: 4716021 - DNA, 25 bp, Homo sapien
ggccaggccctcaggcaagggctct

SEQ ID NO: 4716022 - DNA, 25 bp, Homo sapien
atccagggggcctctacaaggataa

SEQ ID NO: 4716023 - DNA, 25 bp, Homo sapien
tccagggggcctctacaaggataat

SEQ ID NO: 4716024 - DNA, 25 bp, Homo sapien
tgcagggtcgaggagttgacggtgc

SEQ ID NO: 4716025 - DNA, 25 bp, Homo sapien
ttgacggtgctgagttccctgcact

SEQ ID NO: 4716026 - DNA, 25 bp, Homo sapien
cggtgctgagttccctgcactctca

SEQ ID NO: 4716027 - DNA, 25 bp, Homo sapien
aggagttgacggtgctgagttccct

SEQ ID NO: 4716028 - DNA, 25 bp, Homo sapien
caagtgtctgatgctttaaggcaca

SEQ ID NO: 4716029 - DNA, 25 bp, Homo sapien
tccatgttctttggccgcagcaagg

SEQ ID NO: 4716030 - DNA, 25 bp, Homo sapien
tgttccccagatgtgccaagtgcat

SEQ ID NO: 4716031 - DNA, 25 bp, Homo sapien
tgcatctcatggaacgccatttccc

SEQ ID NO: 4716032 - DNA, 25 bp, Homo sapien
caaagttaactctgatgcgtgtgta

SEQ ID NO: 4716033 - DNA, 25 bp, Homo sapien
ctgcaaagttaactctgatgcgtgt

SEQ ID NO: 4716034 - DNA, 25 bp, Homo sapien
aagttaactctgatgcgtgtgtaac

SEQ ID NO: 4716035 - DNA, 25 bp, Homo sapien
gttaactctgatgcgtgtgtaacac

SEQ ID NO: 4716036 - DNA, 25 bp, Homo sapien
aggcagaggcgcgactggggttcat

SEQ ID NO: 4716037 - DNA, 25 bp, Homo sapien
cctgtgtggtgcgcagggatgagaa

SEQ ID NO: 4716038 - DNA, 25 bp, Homo sapien
cgggcacgagcgagcctgtgtggtg

SEQ ID NO: 4716039 - DNA, 25 bp, Homo sapien
tgagaaggcagaggcgcgactgggg

SEQ ID NO: 4716040 - DNA, 25 bp, Homo sapien
ccttcggtaggtgcataagctctgc

SEQ ID NO: 4716041 - DNA, 25 bp, Homo sapien
gggagaggccttcatctgctgtaaa

SEQ ID NO: 4716042 - DNA, 25 bp, Homo sapien
taagctctgcattcgaggtccacag

SEQ ID NO: 4716043 - DNA, 25 bp, Homo sapien
tcccacaaaggagaagggctgatca

SEQ ID NO: 4716044 - DNA, 25 bp, Homo sapien
cactctcttggagccaccacagaaa

SEQ ID NO: 4716045 - DNA, 25 bp, Homo sapien
tcaatcagcagggaccgtgcactct

SEQ ID NO: 4716046 - DNA, 25 bp, Homo sapien
agcaccacagaaaacagagccacca

SEQ ID NO: 4716047 - DNA, 25 bp, Homo sapien
ccacagaaaacagaggtgcatccag

SEQ ID NO: 4716048 - DNA, 25 bp, Homo sapien
acagcctgcaatgctaatttgccag

SEQ ID NO: 4716049 - DNA, 25 bp, Homo sapien
cctgtcgtcgtttcctctgaatgtc

SEQ ID NO: 4716050 - DNA, 25 bp, Homo sapien
caggagctcacctgcctgcgtcact

SEQ ID NO: 4716051 - DNA, 25 bp, Homo sapien
catcctcgttccctatctgtcacca

SEQ ID NO: 4716052 - DNA, 25 bp, Homo sapien
gagctcctcagtctaagccaagtgg

SEQ ID NO: 4716053 - DNA, 25 bp, Homo sapien
tccgaaggctgctctactgattggt

SEQ ID NO: 4716054 - DNA, 25 bp, Homo sapien
cccacgcggttcatgctagcaatta

SEQ ID NO: 4716055 - DNA, 25 bp, Homo sapien
gattctgggatagacatgaggacca

SEQ ID NO: 4716056 - DNA, 25 bp, Homo sapien
gaccacgagaggcacctgagtcagg

SEQ ID NO: 4716057 - DNA, 25 bp, Homo sapien
gagaggcacctgagtcaggcagtca

SEQ ID NO: 4716058 - DNA, 25 bp, Homo sapien
cacgagaggcacctgagtcaggcag

SEQ ID NO: 4716059 - DNA, 25 bp, Homo sapien
gaggcacctgagtcaggcagtcaca

SEQ ID NO: 4716060 - DNA, 25 bp, Homo sapien
gcttcccatgacgagcctcacagta

SEQ ID NO: 4716061 - DNA, 25 bp, Homo sapien
tgcagtaataacctacataacccgg

SEQ ID NO: 4716062 - DNA, 25 bp, Homo sapien
gacggcagtgcctgctcatgaagtg

SEQ ID NO: 4716063 - DNA, 25 bp, Homo sapien
caaatcaatggttgtgcacggttta

SEQ ID NO: 4716064 - DNA, 25 bp, Homo sapien
gccctccaatgggaggaaaagcatg

SEQ ID NO: 4716065 - DNA, 25 bp, Homo sapien
gcaggaaaacgtgaaggaataggcc

SEQ ID NO: 4716066 - DNA, 25 bp, Homo sapien
tgcaggaaaacgtgaaggaataggc

SEQ ID NO: 4716067 - DNA, 25 bp, Homo sapien
agggaagccagatgggttccccagg

SEQ ID NO: 4716068 - DNA, 25 bp, Homo sapien
gactcccaggagtaaaagcttccaa

SEQ ID NO: 4716069 - DNA, 25 bp, Homo sapien
ggactcccaggagtaaaagcttcca

SEQ ID NO: 4716070 - DNA, 25 bp, Homo sapien
ttccaagttgggctctcacttcagc

SEQ ID NO: 4716071 - DNA, 25 bp, Homo sapien
gcacggcataggtctgacctgccag

SEQ ID NO: 4716072 - DNA, 25 bp, Homo sapien
ggcacggcataggtctgacctgcca

SEQ ID NO: 4716073 - DNA, 25 bp, Homo sapien
cataggtctgacctgccagggagtg

SEQ ID NO: 4716074 - DNA, 25 bp, Homo sapien
gggcacggcataggtctgacctgcc

SEQ ID NO: 4716075 - DNA, 25 bp, Homo sapien
agagccacccacgaccaacggcacg

SEQ ID NO: 4716076 - DNA, 25 bp, Homo sapien
gtcagagccacccacgaccaacggc

SEQ ID NO: 4716077 - DNA, 25 bp, Homo sapien
tcagagccacccacgaccaacggca

SEQ ID NO: 4716078 - DNA, 25 bp, Homo sapien
agccacccacgaccaacggcacgcc

SEQ ID NO: 4716079 - DNA, 25 bp, Homo sapien
tctccaaactgagaactagcactgc

SEQ ID NO: 4716080 - DNA, 25 bp, Homo sapien
caaactgagaactagcactgctgag

SEQ ID NO: 4716081 - DNA, 25 bp, Homo sapien
tccaaactgagaactagcactgctg

SEQ ID NO: 4716082 - DNA, 25 bp, Homo sapien
ccaaactgagaactagcactgctga

SEQ ID NO: 4716083 - DNA, 25 bp, Homo sapien
tgtttttgggcagcagatatcctag

SEQ ID NO: 4716084 - DNA, 25 bp, Homo sapien
gatatcctagaatggactctgacct

SEQ ID NO: 4716085 - DNA, 25 bp, Homo sapien
cctctttcagcagacggtattttct

SEQ ID NO: 4716086 - DNA, 25 bp, Homo sapien
tatggccccttcttcctatatctgg

SEQ ID NO: 4716087 - DNA, 25 bp, Homo sapien
tatgtaaacctaaattagatctgtt

SEQ ID NO: 4716088 - DNA, 25 bp, Homo sapien
tcatactttgtctttatgtaaacct

SEQ ID NO: 4716089 - DNA, 25 bp, Homo sapien
acctaaattagatctgtttttgata

SEQ ID NO: 4716090 - DNA, 25 bp, Homo sapien
tttatgtaaacctaaattagatctg

SEQ ID NO: 4716091 - DNA, 25 bp, Homo sapien
gttgtcttccgagcgtcaggccgcc

SEQ ID NO: 4716092 - DNA, 25 bp, Homo sapien
tgccttcccctcaagctcagggcca

SEQ ID NO: 4716093 - DNA, 25 bp, Homo sapien
gtcctttgtcccatcgctgccttcc

SEQ ID NO: 4716094 - DNA, 25 bp, Homo sapien
tcttcctagacctccgtcctttgtc

SEQ ID NO: 4716095 - DNA, 25 bp, Homo sapien
tgccctccagccctacgccttgacc

SEQ ID NO: 4716096 - DNA, 25 bp, Homo sapien
cctacgccttgacccgctttcctgc

SEQ ID NO: 4716097 - DNA, 25 bp, Homo sapien
cagccctacgccttgacccgctttc

SEQ ID NO: 4716098 - DNA, 25 bp, Homo sapien
tccagccctacgccttgacccgctt

SEQ ID NO: 4716099 - DNA, 25 bp, Homo sapien
catcatataccaagcctggctgtgt

SEQ ID NO: 4716100 - DNA, 25 bp, Homo sapien
tcacaaatgcactgctaggcaccac

SEQ ID NO: 4716101 - DNA, 25 bp, Homo sapien
tgtatatgctccacgatgcctgtga

SEQ ID NO: 4716102 - DNA, 25 bp, Homo sapien
taaagatttcctaggagctgcaatg

SEQ ID NO: 4716103 - DNA, 25 bp, Homo sapien
caggcggaggacacgtgggaggttt

SEQ ID NO: 4716104 - DNA, 25 bp, Homo sapien
tatttctcactaagggaacatccaa

SEQ ID NO: 4716105 - DNA, 25 bp, Homo sapien
agagcaggcggaggacacgtgggag

SEQ ID NO: 4716106 - DNA, 25 bp, Homo sapien
ctgggtcttccacaattgccgtgct

SEQ ID NO: 4716107 - DNA, 25 bp, Homo sapien
ccacaagcagcttggtgcctctgaa

SEQ ID NO: 4716108 - DNA, 25 bp, Homo sapien
ggaggggagactagagaggtgggta

SEQ ID NO: 4716109 - DNA, 25 bp, Homo sapien
agacaagaccacaagcagcttggtg

SEQ ID NO: 4716110 - DNA, 25 bp, Homo sapien
gggtaggaatactggattccactga

SEQ ID NO: 4716111 - DNA, 25 bp, Homo sapien
cctggtgttttacgtacataatctc

SEQ ID NO: 4716112 - DNA, 25 bp, Homo sapien
ggatgtcacgcttagccctcctgct

SEQ ID NO: 4716113 - DNA, 25 bp, Homo sapien
cgtgctggatgtcacgcttagccct

SEQ ID NO: 4716114 - DNA, 25 bp, Homo sapien
tgctctgtgccgggttaggcacctg

SEQ ID NO: 4716115 - DNA, 25 bp, Homo sapien
aatattaccatctttcccttttgtg

SEQ ID NO: 4716116 - DNA, 25 bp, Homo sapien
tctttcccttttgtgattggagaaa

SEQ ID NO: 4716117 - DNA, 25 bp, Homo sapien
taccatctttcccttttgtgattgg

SEQ ID NO: 4716118 - DNA, 25 bp, Homo sapien
ccatctttcccttttgtgattggag

SEQ ID NO: 4716119 - DNA, 25 bp, Homo sapien
gaagccataaatgcatccttctcgg

SEQ ID NO: 4716120 - DNA, 25 bp, Homo sapien
ggcctgccctctgtagggtgagaaa

SEQ ID NO: 4716121 - DNA, 25 bp, Homo sapien
cactggagaccttacagctctcctg

SEQ ID NO: 4716122 - DNA, 25 bp, Homo sapien
cctgccctctgtagggtgagaaagg

SEQ ID NO: 4716123 - DNA, 25 bp, Homo sapien
ggagaccttacagctctcctgtcac

SEQ ID NO: 4716124 - DNA, 25 bp, Homo sapien
gtctggagggcccagacagaatccc

SEQ ID NO: 4716125 - DNA, 25 bp, Homo sapien
ggagggcccagacagaatcccttac

SEQ ID NO: 4716126 - DNA, 25 bp, Homo sapien
catcgtggccctctgggtgtctgga

SEQ ID NO: 4716127 - DNA, 25 bp, Homo sapien
tgggtgtctggagggcccagacaga

SEQ ID NO: 4716128 - DNA, 25 bp, Homo sapien
tattcccattgaggactggtgggga

SEQ ID NO: 4716129 - DNA, 25 bp, Homo sapien
tttattggtcatttggataatctat

SEQ ID NO: 4716130 - DNA, 25 bp, Homo sapien
ccccataatatatgagggttttggt

SEQ ID NO: 4716131 - DNA, 25 bp, Homo sapien
aagtgcctgttcaagccttttgtgt

SEQ ID NO: 4716132 - DNA, 25 bp, Homo sapien
tattcattctagtgtgaaatggtat

SEQ ID NO: 4716133 - DNA, 25 bp, Homo sapien
tgtcaccgctccagaagagagctcg

SEQ ID NO: 4716134 - DNA, 25 bp, Homo sapien
ttagcagaaggcctctggacccatc

SEQ ID NO: 4716135 - DNA, 25 bp, Homo sapien
aagagagctcgagttgctacttcgt

SEQ ID NO: 4716136 - DNA, 25 bp, Homo sapien
agttgctacttcgttagcagaaggc

SEQ ID NO: 4716137 - DNA, 25 bp, Homo sapien
ctaagcaaaataagacatgtgaagg

SEQ ID NO: 4716138 - DNA, 25 bp, Homo sapien
caacttgactaacaaaattaccact

SEQ ID NO: 4716139 - DNA, 25 bp, Homo sapien
ccacttgatttagcattagaaaatt

SEQ ID NO: 4716140 - DNA, 25 bp, Homo sapien
aatggtataatgttagcttatgcca

SEQ ID NO: 4716141 - DNA, 25 bp, Homo sapien
tgccttgatcttcctgataatgcag

SEQ ID NO: 4716142 - DNA, 25 bp, Homo sapien
cctgataatgcaggagaccgcaggt

SEQ ID NO: 4716143 - DNA, 25 bp, Homo sapien
cattggcaacattaaacttcactcc

SEQ ID NO: 4716144 - DNA, 25 bp, Homo sapien
ttcactccaaactctccccctggtc

SEQ ID NO: 4716145 - DNA, 25 bp, Homo sapien
taaccagatatcaaaaccgcatgct

SEQ ID NO: 4716146 - DNA, 25 bp, Homo sapien
tagtctctcccactatgtgagggcc

SEQ ID NO: 4716147 - DNA, 25 bp, Homo sapien
tgcaatgggctgaacgtgtatgtct

SEQ ID NO: 4716148 - DNA, 25 bp, Homo sapien
gaatctaactaaaccttgcaatggg

SEQ ID NO: 4716149 - DNA, 25 bp, Homo sapien
ccgttggccgcggccatcggcccca

SEQ ID NO: 4716150 - DNA, 25 bp, Homo sapien
cgttggccgcggccatcggccccac

SEQ ID NO: 4716151 - DNA, 25 bp, Homo sapien
tcgccccgttggccgcggccatcgg

SEQ ID NO: 4716152 - DNA, 25 bp, Homo sapien
gccccgttggccgcggccatcggcc

SEQ ID NO: 4716153 - DNA, 25 bp, Homo sapien
cgacagcgcgctccggatgaagttg

SEQ ID NO: 4716154 - DNA, 25 bp, Homo sapien
cccgtggtgcggccctgacggtcgc

SEQ ID NO: 4716155 - DNA, 25 bp, Homo sapien
atgaagttgggcgggtagctgcgct

SEQ ID NO: 4716156 - DNA, 25 bp, Homo sapien
gaagttgggcgggtagctgcgctgg

SEQ ID NO: 4716157 - DNA, 25 bp, Homo sapien
gccggtgggtcgccggtgctcgcgg

SEQ ID NO: 4716158 - DNA, 25 bp, Homo sapien
gtcgccggtgctcgcggggcgcggt

SEQ ID NO: 4716159 - DNA, 25 bp, Homo sapien
tgggtcgccggtgctcgcggggcgc

SEQ ID NO: 4716160 - DNA, 25 bp, Homo sapien
ggtgggtcgccggtgctcgcggggc

SEQ ID NO: 4716161 - DNA, 25 bp, Homo sapien
cgcctcccggccggtcctgctgcgg

SEQ ID NO: 4716162 - DNA, 25 bp, Homo sapien
cggcgcctcccggccggtcctgctg

SEQ ID NO: 4716163 - DNA, 25 bp, Homo sapien
gcgcctcccggccggtcctgctgcg

SEQ ID NO: 4716164 - DNA, 25 bp, Homo sapien
ccgcggcgcctcccggccggtcctg

SEQ ID NO: 4716165 - DNA, 25 bp, Homo sapien
aacaggcttggcctacactgtatct

SEQ ID NO: 4716166 - DNA, 25 bp, Homo sapien
tgaattaatcgttttcagtaggagg

SEQ ID NO: 4716167 - DNA, 25 bp, Homo sapien
gcctacactgtatctgtccacactg

SEQ ID NO: 4716168 - DNA, 25 bp, Homo sapien
taggagggggctgaatcccttatta

SEQ ID NO: 4716169 - DNA, 25 bp, Homo sapien
cacagtaagacaactgtgagtaata

SEQ ID NO: 4716170 - DNA, 25 bp, Homo sapien
tactgtcctgaaatatcctgctgct

SEQ ID NO: 4716171 - DNA, 25 bp, Homo sapien
gagtaataacacacattgtatactg

SEQ ID NO: 4716172 - DNA, 25 bp, Homo sapien
gcttataaagtgtttggtcacagta

SEQ ID NO: 4716173 - DNA, 25 bp, Homo sapien
aatcaggggagcgtgttcttctata

SEQ ID NO: 4716174 - DNA, 25 bp, Homo sapien
ttctgttggaatcaggggagcgtgt

SEQ ID NO: 4716175 - DNA, 25 bp, Homo sapien
tgttcttctataatcccctggctga

SEQ ID NO: 4716176 - DNA, 25 bp, Homo sapien
gtgttcttctataatcccctggctg

SEQ ID NO: 4716177 - DNA, 25 bp, Homo sapien
tacactcccattgagtcaggggcca

SEQ ID NO: 4716178 - DNA, 25 bp, Homo sapien
acactcccattgagtcaggggccac

SEQ ID NO: 4716179 - DNA, 25 bp, Homo sapien
gttatacactcccattgagtcaggg

SEQ ID NO: 4716180 - DNA, 25 bp, Homo sapien
ggtagttatacactcccattgagtc

SEQ ID NO: 4716181 - DNA, 25 bp, Homo sapien
cattgtataaagtcccctggagcca

SEQ ID NO: 4716182 - DNA, 25 bp, Homo sapien
attgtataaagtcccctggagccag

SEQ ID NO: 4716183 - DNA, 25 bp, Homo sapien
tgcaagttgtagtggaagtaagcat

SEQ ID NO: 4716184 - DNA, 25 bp, Homo sapien
ctgcaagttgtagtggaagtaagca

SEQ ID NO: 4716185 - DNA, 25 bp, Homo sapien
ctgggctgctttgccaacacttctt

SEQ ID NO: 4716186 - DNA, 25 bp, Homo sapien
gtgtttctgggctgctttgccaaca

SEQ ID NO: 4716187 - DNA, 25 bp, Homo sapien
tgctttgccaacacttcttcctctg

SEQ ID NO: 4716188 - DNA, 25 bp, Homo sapien
tcactcctcctcttcatgtgtttct

SEQ ID NO: 4716189 - DNA, 25 bp, Homo sapien
cacctccagcgtgcttggagctgca

SEQ ID NO: 4716190 - DNA, 25 bp, Homo sapien
gaacacctccagcgtgcttggagct

SEQ ID NO: 4716191 - DNA, 25 bp, Homo sapien
gagctgcactgtcacgcttcgcccc

SEQ ID NO: 4716192 - DNA, 25 bp, Homo sapien
ttcagctgctcgttctgccatctgc

SEQ ID NO: 4716193 - DNA, 25 bp, Homo sapien
aacacctcgttttgaacttctagct

SEQ ID NO: 4716194 - DNA, 25 bp, Homo sapien
aggcatggagcagattcttcctagc

SEQ ID NO: 4716195 - DNA, 25 bp, Homo sapien
aagaatagagggaacgcagaggcac

SEQ ID NO: 4716196 - DNA, 25 bp, Homo sapien
aaaggcatggagcagattcttccta

SEQ ID NO: 4716197 - DNA, 25 bp, Homo sapien
gaagtcatggtctagaagcctcctt

SEQ ID NO: 4716198 - DNA, 25 bp, Homo sapien
cgtgtatgacctgcgagagccaaat

SEQ ID NO: 4716199 - DNA, 25 bp, Homo sapien
ttccacctagaacttgtacaagcac

SEQ ID NO: 4716200 - DNA, 25 bp, Homo sapien
agctaccgcatactggagtccctgg

SEQ ID NO: 4716201 - DNA, 25 bp, Homo sapien
catttctgtacagcttcccatgtgc

SEQ ID NO: 4716202 - DNA, 25 bp, Homo sapien
tcatttctgtacagcttcccatgtg

SEQ ID NO: 4716203 - DNA, 25 bp, Homo sapien
ccccactcatttctgtacagcttcc

SEQ ID NO: 4716204 - DNA, 25 bp, Homo sapien
ccactcatttctgtacagcttccca

SEQ ID NO: 4716205 - DNA, 25 bp, Homo sapien
tgcattataaaggaccatctcctgt

SEQ ID NO: 4716206 - DNA, 25 bp, Homo sapien
cacactgcattataaaggaccatct

SEQ ID NO: 4716207 - DNA, 25 bp, Homo sapien
tctattgcagcacagatcacactgc

SEQ ID NO: 4716208 - DNA, 25 bp, Homo sapien
caggctcaataaaggctggtagaat

SEQ ID NO: 4716209 - DNA, 25 bp, Homo sapien
caccgtggccctataaggtgaaact

SEQ ID NO: 4716210 - DNA, 25 bp, Homo sapien
tatttcatggaatccccaccgtggc

SEQ ID NO: 4716211 - DNA, 25 bp, Homo sapien
taagtactagctgacatgcatagag

SEQ ID NO: 4716212 - DNA, 25 bp, Homo sapien
tcactgccgtctatccttggaaact

SEQ ID NO: 4716213 - DNA, 25 bp, Homo sapien
cagtattacagacacaataaatttt

SEQ ID NO: 4716214 - DNA, 25 bp, Homo sapien
gattccagatagtggtggacacaga

SEQ ID NO: 4716215 - DNA, 25 bp, Homo sapien
ttcgttttcaccatctcagagattc

SEQ ID NO: 4716216 - DNA, 25 bp, Homo sapien
gataatgtgctaggaattgtttgaa

SEQ ID NO: 4716217 - DNA, 25 bp, Homo sapien
tgcttcactggctaagtaaatcata

SEQ ID NO: 4716218 - DNA, 25 bp, Homo sapien
tcaggtaaacctgacaatgttaagg

SEQ ID NO: 4716219 - DNA, 25 bp, Homo sapien
tacaactgataccttgagtaacaca

SEQ ID NO: 4716220 - DNA, 25 bp, Homo sapien
ggaactactggtcataaatatgccc

SEQ ID NO: 4716221 - DNA, 25 bp, Homo sapien
tgaaggacaggtgccaactcagaag

SEQ ID NO: 4716222 - DNA, 25 bp, Homo sapien
gcttctctaaattgtccaacgaccg

SEQ ID NO: 4716223 - DNA, 25 bp, Homo sapien
agaagccgccgtttgctcaatgtcc

SEQ ID NO: 4716224 - DNA, 25 bp, Homo sapien
ccgagcatttttccggaaggctggg

SEQ ID NO: 4716225 - DNA, 25 bp, Homo sapien
gctacattccaacgtataaaccgat

SEQ ID NO: 4716226 - DNA, 25 bp, Homo sapien
gattttactcgttttggatactcga

SEQ ID NO: 4716227 - DNA, 25 bp, Homo sapien
cgattttactcgttttggatactcg

SEQ ID NO: 4716228 - DNA, 25 bp, Homo sapien
tcataagctacattccaacgtataa

SEQ ID NO: 4716229 - DNA, 25 bp, Homo sapien
tcgggaaggcggcttcgggcccgca

SEQ ID NO: 4716230 - DNA, 25 bp, Homo sapien
ccggcagcggcgtcgaggggtgcct

SEQ ID NO: 4716231 - DNA, 25 bp, Homo sapien
gagaggaaaaagaacggaaatcgca

SEQ ID NO: 4716232 - DNA, 25 bp, Homo sapien
aggacgcgcagaacgcccccgtgaa

SEQ ID NO: 4716233 - DNA, 25 bp, Homo sapien
tcagcggttccgaaagcaaacctgg

SEQ ID NO: 4716234 - DNA, 25 bp, Homo sapien
gcgtcttcttcagtgcgtgctgcga

SEQ ID NO: 4716235 - DNA, 25 bp, Homo sapien
gggtctcggcgagagcaaagcgcgt

SEQ ID NO: 4716236 - DNA, 25 bp, Homo sapien
acgctgtcgctgtcatcggcgtcat

SEQ ID NO: 4716237 - DNA, 25 bp, Homo sapien
ggtgcctggacgacccggagcaggg

SEQ ID NO: 4716238 - DNA, 25 bp, Homo sapien
gaagcactcggccgacgctgtcgct

SEQ ID NO: 4716239 - DNA, 25 bp, Homo sapien
cccggtgcctggacgacccggagca

SEQ ID NO: 4716240 - DNA, 25 bp, Homo sapien
cgacgcctggtctgcccggccagtg

SEQ ID NO: 4716241 - DNA, 25 bp, Homo sapien
ttccaaacaggtggacccgaagctc

SEQ ID NO: 4716242 - DNA, 25 bp, Homo sapien
ccggccagtgcttggtgtcgttggt

SEQ ID NO: 4716243 - DNA, 25 bp, Homo sapien
tccgttccgcgagccgggcaaggca

SEQ ID NO: 4716244 - DNA, 25 bp, Homo sapien
tcccctgacgccgagtaacacttaa

SEQ ID NO: 4716245 - DNA, 25 bp, Homo sapien
acagagcagcttccctcaaagcggc

SEQ ID NO: 4716246 - DNA, 25 bp, Homo sapien
ttttcagaacgtcctcagaaccgca

SEQ ID NO: 4716247 - DNA, 25 bp, Homo sapien
caagaaattccaagagacgggatgg

SEQ ID NO: 4716248 - DNA, 25 bp, Homo sapien
tatatgtatatttatagccttttat

SEQ ID NO: 4716249 - DNA, 25 bp, Homo sapien
tatatatgtatatttatagcctttt

SEQ ID NO: 4716250 - DNA, 25 bp, Homo sapien
tatatatatgtatatttatagcctt

SEQ ID NO: 4716251 - DNA, 25 bp, Homo sapien
tgtatatttatagccttttattttc

SEQ ID NO: 4716252 - DNA, 25 bp, Homo sapien
taaaatggattacttctgctatcta

SEQ ID NO: 4716253 - DNA, 25 bp, Homo sapien
aatggattacttctgctatctataa

SEQ ID NO: 4716254 - DNA, 25 bp, Homo sapien
aaatggattacttctgctatctata

SEQ ID NO: 4716255 - DNA, 25 bp, Homo sapien
ggattacttctgctatctataataa

SEQ ID NO: 4716256 - DNA, 25 bp, Homo sapien
cattaaagatggcacgtcagacaca

SEQ ID NO: 4716257 - DNA, 25 bp, Homo sapien
cactcacgttcatagtaccccagga

SEQ ID NO: 4716258 - DNA, 25 bp, Homo sapien
gaacatgtttggcatcggaggctgt

SEQ ID NO: 4716259 - DNA, 25 bp, Homo sapien
gaagcattttgcactagacttagga

SEQ ID NO: 4716260 - DNA, 25 bp, Homo sapien
agatgcacacgcccagtatgggccg

SEQ ID NO: 4716261 - DNA, 25 bp, Homo sapien
gaggaacgtaatccagctgtttctt

SEQ ID NO: 4716262 - DNA, 25 bp, Homo sapien
tttttagaggaacgtaatccagctg

SEQ ID NO: 4716263 - DNA, 25 bp, Homo sapien
gtatgggccgcgcaaggtggagtga

SEQ ID NO: 4716264 - DNA, 25 bp, Homo sapien
tccgcccaaaggggcggccagcgat

SEQ ID NO: 4716265 - DNA, 25 bp, Homo sapien
gccctgcggactcggccagggaact

SEQ ID NO: 4716266 - DNA, 25 bp, Homo sapien
gcggccagcgatgtcagcccagagc

SEQ ID NO: 4716267 - DNA, 25 bp, Homo sapien
gaactgggcgtgggcgatactaaaa

SEQ ID NO: 4716268 - DNA, 25 bp, Homo sapien
gcaaaattgtccgacaggcttgacg

SEQ ID NO: 4716269 - DNA, 25 bp, Homo sapien
aaattgtccgacaggcttgacggtc

SEQ ID NO: 4716270 - DNA, 25 bp, Homo sapien
tccgacaggcttgacggtcgctgga

SEQ ID NO: 4716271 - DNA, 25 bp, Homo sapien
tgtccgacaggcttgacggtcgctg

SEQ ID NO: 4716272 - DNA, 25 bp, Homo sapien
gcagcccctgtacccgctcccctga

SEQ ID NO: 4716273 - DNA, 25 bp, Homo sapien
tctgcgcagcccctgtacccgctcc

SEQ ID NO: 4716274 - DNA, 25 bp, Homo sapien
atccgcctcccggtggcgacgccag

SEQ ID NO: 4716275 - DNA, 25 bp, Homo sapien
cggtggcgacgccagacccttgccc

SEQ ID NO: 4716276 - DNA, 25 bp, Homo sapien
tgctttcttcggtgccccggcatag

SEQ ID NO: 4716277 - DNA, 25 bp, Homo sapien
ctgctttcttcggtgccccggcata

SEQ ID NO: 4716278 - DNA, 25 bp, Homo sapien
cagcagagcgtaagggcgtctcccg

SEQ ID NO: 4716279 - DNA, 25 bp, Homo sapien
gaggatgcgggtgcagcagagcgta

SEQ ID NO: 4716280 - DNA, 25 bp, Homo sapien
ccggagaaagctgccattgtcgaac

SEQ ID NO: 4716281 - DNA, 25 bp, Homo sapien
gccggagaaagctgccattgtcgaa

SEQ ID NO: 4716282 - DNA, 25 bp, Homo sapien
cgggcatcttcagaggccgccgcag

SEQ ID NO: 4716283 - DNA, 25 bp, Homo sapien
aatgaaggcgcagatgccgctgagc

SEQ ID NO: 4716284 - DNA, 25 bp, Homo sapien
ctaatgaaggcgcagatgccgctga

SEQ ID NO: 4716285 - DNA, 25 bp, Homo sapien
ggctttgccggctgccgggcatctt

SEQ ID NO: 4716286 - DNA, 25 bp, Homo sapien
cccggctggagcgactgctctagga

SEQ ID NO: 4716287 - DNA, 25 bp, Homo sapien
agccccggctggagcgactgctcta

SEQ ID NO: 4716288 - DNA, 25 bp, Homo sapien
tcctctcccaggacatcgattttac

SEQ ID NO: 4716289 - DNA, 25 bp, Homo sapien
cgtcttccccatcggagtcccggag

SEQ ID NO: 4716290 - DNA, 25 bp, Homo sapien
ttgcaacaacgtccggcaaagatgc

SEQ ID NO: 4716291 - DNA, 25 bp, Homo sapien
tgccttcgccttttataaaagcttc

SEQ ID NO: 4716292 - DNA, 25 bp, Homo sapien
agaccatgtgtggtggacgcctccc

SEQ ID NO: 4716293 - DNA, 25 bp, Homo sapien
ttcttcccctacctcggagcggtgc

SEQ ID NO: 4716294 - DNA, 25 bp, Homo sapien
tcattggtagagtctgtccttaccc

SEQ ID NO: 4716295 - DNA, 25 bp, Homo sapien
tttgtaaaggaatgtgtaaccgtga

SEQ ID NO: 4716296 - DNA, 25 bp, Homo sapien
ggtaatcacccattttcattggtag

SEQ ID NO: 4716297 - DNA, 25 bp, Homo sapien
taggaggctgaaatgtacacggttg

SEQ ID NO: 4716298 - DNA, 25 bp, Homo sapien
gaaatgcacccactctataagggct

SEQ ID NO: 4716299 - DNA, 25 bp, Homo sapien
acataccagtatgggcccagtttga

SEQ ID NO: 4716300 - DNA, 25 bp, Homo sapien
tgtccccttgtagcaatggttctcc

SEQ ID NO: 4716301 - DNA, 25 bp, Homo sapien
ggagagctcacacggagtcctctgt

SEQ ID NO: 4716302 - DNA, 25 bp, Homo sapien
taataaagcgaaagggacaactgtc

SEQ ID NO: 4716303 - DNA, 25 bp, Homo sapien
cccattcctttagtgtgggctgtgc

SEQ ID NO: 4716304 - DNA, 25 bp, Homo sapien
caggagataacggaaagagttccca

SEQ ID NO: 4716305 - DNA, 25 bp, Homo sapien
caattaatcatgtagaccactccca

SEQ ID NO: 4716306 - DNA, 25 bp, Homo sapien
catgtcataaaatggtgacacttac

SEQ ID NO: 4716307 - DNA, 25 bp, Homo sapien
ttatttcatgtcataaaatggtgac

SEQ ID NO: 4716308 - DNA, 25 bp, Homo sapien
ttcatgtcataaaatggtgacactt

SEQ ID NO: 4716309 - DNA, 25 bp, Homo sapien
ccttttatttcatgtcataaaatgg

SEQ ID NO: 4716310 - DNA, 25 bp, Homo sapien
actttcatgttcagtatatgtaaac

SEQ ID NO: 4716311 - DNA, 25 bp, Homo sapien
tcagtatatgtaaactccaaagcca

SEQ ID NO: 4716312 - DNA, 25 bp, Homo sapien
taatcattatatctctgcaatcagc

SEQ ID NO: 4716313 - DNA, 25 bp, Homo sapien
tatattggaattcgtaactaaagta

SEQ ID NO: 4716314 - DNA, 25 bp, Homo sapien
ccttttgataagaaatgcctctagt

SEQ ID NO: 4716315 - DNA, 25 bp, Homo sapien
atccttttgataagaaatgcctcta

SEQ ID NO: 4716316 - DNA, 25 bp, Homo sapien
tattatccaatccttttgataagaa

SEQ ID NO: 4716317 - DNA, 25 bp, Homo sapien
ccaatccttttgataagaaatgcct

SEQ ID NO: 4716318 - DNA, 25 bp, Homo sapien
cacagtagctataaacagctgttta

SEQ ID NO: 4716319 - DNA, 25 bp, Homo sapien
ctgtttctgtcacagtagctataaa

SEQ ID NO: 4716320 - DNA, 25 bp, Homo sapien
tagctataaacagctgtttaaggat

SEQ ID NO: 4716321 - DNA, 25 bp, Homo sapien
ctgtcacagtagctataaacagctg

SEQ ID NO: 4716322 - DNA, 25 bp, Homo sapien
ctggacaatcacttgttgtgatttg

SEQ ID NO: 4716323 - DNA, 25 bp, Homo sapien
atagagctcatggacaccctggaca

SEQ ID NO: 4716324 - DNA, 25 bp, Homo sapien
cctccagatcatagagctcatggac

SEQ ID NO: 4716325 - DNA, 25 bp, Homo sapien
caatcgatttgttctctcagtgtca

SEQ ID NO: 4716326 - DNA, 25 bp, Homo sapien
tatctgataaactggctcctatggg

SEQ ID NO: 4716327 - DNA, 25 bp, Homo sapien
tagaaatgggttgcaatcaatgaac

SEQ ID NO: 4716328 - DNA, 25 bp, Homo sapien
cacttgtgaacacacaagagtagac

SEQ ID NO: 4716329 - DNA, 25 bp, Homo sapien
atgagctcattgtgtattgatttgc

SEQ ID NO: 4716330 - DNA, 25 bp, Homo sapien
tgcatcaggaagcataatgttcagc

SEQ ID NO: 4716331 - DNA, 25 bp, Homo sapien
cagagagcagaaggtaacatttcaa

SEQ ID NO: 4716332 - DNA, 25 bp, Homo sapien
cacaggtttgttctagctgcaaccc

SEQ ID NO: 4716333 - DNA, 25 bp, Homo sapien
gctgcaaccctaaagaaagttgtgc

SEQ ID NO: 4716334 - DNA, 25 bp, Homo sapien
ttatgacctccatgcagtgattgtc

SEQ ID NO: 4716335 - DNA, 25 bp, Homo sapien
cagccttatgacctccatgcagtga

SEQ ID NO: 4716336 - DNA, 25 bp, Homo sapien
ccttatgacctccatgcagtgattg

SEQ ID NO: 4716337 - DNA, 25 bp, Homo sapien
ttcagccttatgacctccatgcagt

SEQ ID NO: 4716338 - DNA, 25 bp, Homo sapien
cttcaaatgtgattgtaacaatact

SEQ ID NO: 4716339 - DNA, 25 bp, Homo sapien
ttgcatttcctggtacttcaaatgt

SEQ ID NO: 4716340 - DNA, 25 bp, Homo sapien
tattaagatgttcttcctttgcatt

SEQ ID NO: 4716341 - DNA, 25 bp, Homo sapien
gaataaacatattaagatgttcttc

SEQ ID NO: 4716342 - DNA, 25 bp, Homo sapien
acatacaatgtactcactacacagg

SEQ ID NO: 4716343 - DNA, 25 bp, Homo sapien
ttaattcattctttcgtggattctc

SEQ ID NO: 4716344 - DNA, 25 bp, Homo sapien
gggccaggtacttttgcctgagtca

SEQ ID NO: 4716345 - DNA, 25 bp, Homo sapien
tcattctttcgtggattctcagcaa

SEQ ID NO: 4716346 - DNA, 25 bp, Homo sapien
ctcaagagaatcgctaaagtattaa

SEQ ID NO: 4716347 - DNA, 25 bp, Homo sapien
aagagaatcgctaaagtattaaaga

SEQ ID NO: 4716348 - DNA, 25 bp, Homo sapien
gagaatcgctaaagtattaaagacc

SEQ ID NO: 4716349 - DNA, 25 bp, Homo sapien
tcaagagaatcgctaaagtattaaa

SEQ ID NO: 4716350 - DNA, 25 bp, Homo sapien
tcagattctttcgtcctacggggtg

SEQ ID NO: 4716351 - DNA, 25 bp, Homo sapien
cagattctttcgtcctacggggtgt

SEQ ID NO: 4716352 - DNA, 25 bp, Homo sapien
taacacatatatactaggtcctagg

SEQ ID NO: 4716353 - DNA, 25 bp, Homo sapien
caaagaatccatgaaaaatagataa

SEQ ID NO: 4716354 - DNA, 25 bp, Homo sapien
atactaggtcctaggtattacccat

SEQ ID NO: 4716355 - DNA, 25 bp, Homo sapien
cagggatagagccttaataacacat

SEQ ID NO: 4716356 - DNA, 25 bp, Homo sapien
aggatatgtgtttgaatgtgcatat

SEQ ID NO: 4716357 - DNA, 25 bp, Homo sapien
tatagacagatatataggtacaaat

SEQ ID NO: 4716358 - DNA, 25 bp, Homo sapien
atagacagatatataggtacaaata

SEQ ID NO: 4716359 - DNA, 25 bp, Homo sapien
aaggatatgtgtttgaatgtgcata

SEQ ID NO: 4716360 - DNA, 25 bp, Homo sapien
ctgaatcccatagccctttggctgt

SEQ ID NO: 4716361 - DNA, 25 bp, Homo sapien
cagatccactaaaccaaatgaaatt

SEQ ID NO: 4716362 - DNA, 25 bp, Homo sapien
tctgttagagagacctcagccatga

SEQ ID NO: 4716363 - DNA, 25 bp, Homo sapien
tcagccatgaatctagtgataggcg

SEQ ID NO: 4716364 - DNA, 25 bp, Homo sapien
tcaaggtgaggttgtgttcctggca

SEQ ID NO: 4716365 - DNA, 25 bp, Homo sapien
cctggcacatgctgaagttttttct

SEQ ID NO: 4716366 - DNA, 25 bp, Homo sapien
ctgatcaaggtgaggttgtgttcct

SEQ ID NO: 4716367 - DNA, 25 bp, Homo sapien
gtgttcctggcacatgctgaagttt

SEQ ID NO: 4716368 - DNA, 25 bp, Homo sapien
agggaaatgggaagctgctattcaa

SEQ ID NO: 4716369 - DNA, 25 bp, Homo sapien
ggaacgcagctcctcaccagcaacg

SEQ ID NO: 4716370 - DNA, 25 bp, Homo sapien
agggagaatgactttgacgagctga

SEQ ID NO: 4716371 - DNA, 25 bp, Homo sapien
tggagggagaatgactttgacgagc

SEQ ID NO: 4716372 - DNA, 25 bp, Homo sapien
tccaaaggaacgcagcgcctctcct

SEQ ID NO: 4716373 - DNA, 25 bp, Homo sapien
atctaatacattagagagatcaact

SEQ ID NO: 4716374 - DNA, 25 bp, Homo sapien
caaaggcatgaagatctaatacatt

SEQ ID NO: 4716375 - DNA, 25 bp, Homo sapien
cagagagactatcaaaggcatgaag

SEQ ID NO: 4716376 - DNA, 25 bp, Homo sapien
gatctaatacattagagagatcaac

SEQ ID NO: 4716377 - DNA, 25 bp, Homo sapien
aaaattcatagaagtgggcaaatgg

SEQ ID NO: 4716378 - DNA, 25 bp, Homo sapien
catagaagtgggcaaatggtgtaag

SEQ ID NO: 4716379 - DNA, 25 bp, Homo sapien
gaaaactaacgtgagcagttggaaa

SEQ ID NO: 4716380 - DNA, 25 bp, Homo sapien
gcaaatggtgtaagatttgaatcac

SEQ ID NO: 4716381 - DNA, 25 bp, Homo sapien
aaattcccaccatccgaatagacat

SEQ ID NO: 4716382 - DNA, 25 bp, Homo sapien
gaggagtcaaataaccaatgtacaa

SEQ ID NO: 4716383 - DNA, 25 bp, Homo sapien
ctcatttaattgaatccaatgattc

SEQ ID NO: 4716384 - DNA, 25 bp, Homo sapien
gattcaaatcaggtgagaataaata

SEQ ID NO: 4716385 - DNA, 25 bp, Homo sapien
tatcttaggactgaccaactgtgcc

SEQ ID NO: 4716386 - DNA, 25 bp, Homo sapien
tactcgtggcaacaatactgtgtta

SEQ ID NO: 4716387 - DNA, 25 bp, Homo sapien
tcaacagtctatcacatactcgtac

SEQ ID NO: 4716388 - DNA, 25 bp, Homo sapien
gacaaattcccatcttattactcca

SEQ ID NO: 4716389 - DNA, 25 bp, Homo sapien
aatttttccctatgtctaaaggctg

SEQ ID NO: 4716390 - DNA, 25 bp, Homo sapien
tttccctatgtctaaaggctgcttt

SEQ ID NO: 4716391 - DNA, 25 bp, Homo sapien
tttttccctatgtctaaaggctgct

SEQ ID NO: 4716392 - DNA, 25 bp, Homo sapien
atttttccctatgtctaaaggctgc

SEQ ID NO: 4716393 - DNA, 25 bp, Homo sapien
ttgctgagtctattagctgctgagc

SEQ ID NO: 4716394 - DNA, 25 bp, Homo sapien
cagtagagactgagtggaactagac

SEQ ID NO: 4716395 - DNA, 25 bp, Homo sapien
tggctgcctgttgctgagtctatta

SEQ ID NO: 4716396 - DNA, 25 bp, Homo sapien
gaatttctccagtagagactgagtg

SEQ ID NO: 4716397 - DNA, 25 bp, Homo sapien
gagttaccctctcgagtgtttggaa

SEQ ID NO: 4716398 - DNA, 25 bp, Homo sapien
tctcgagtgtttggaagtcttttct

SEQ ID NO: 4716399 - DNA, 25 bp, Homo sapien
atttctgtactgagttaccctctcg

SEQ ID NO: 4716400 - DNA, 25 bp, Homo sapien
ttaagattcctcaatatacttcaga

SEQ ID NO: 4716401 - DNA, 25 bp, Homo sapien
ttctaagatttgtcctagtccattt

SEQ ID NO: 4716402 - DNA, 25 bp, Homo sapien
tctaagatttgtcctagtccattta

SEQ ID NO: 4716403 - DNA, 25 bp, Homo sapien
ctaagatttgtcctagtccatttat

SEQ ID NO: 4716404 - DNA, 25 bp, Homo sapien
aaataagcatacccaaatacatctg

SEQ ID NO: 4716405 - DNA, 25 bp, Homo sapien
acaggaaataagcatacccaaatac

SEQ ID NO: 4716406 - DNA, 25 bp, Homo sapien
caggaaataagcatacccaaataca

SEQ ID NO: 4716407 - DNA, 25 bp, Homo sapien
ggaaataagcatacccaaatacatc

SEQ ID NO: 4716408 - DNA, 25 bp, Homo sapien
gaagcagctcaaccttataccttaa

SEQ ID NO: 4716409 - DNA, 25 bp, Homo sapien
tcttgaagcagctcaaccttatacc

SEQ ID NO: 4716410 - DNA, 25 bp, Homo sapien
taacgttcttgaagcagctcaacct

SEQ ID NO: 4716411 - DNA, 25 bp, Homo sapien
gcagctcaaccttataccttaagtt

SEQ ID NO: 4716412 - DNA, 25 bp, Homo sapien
ctgttttattaatgagaatggcatc

SEQ ID NO: 4716413 - DNA, 25 bp, Homo sapien
gaatggcatctgccaaagcaacttg

SEQ ID NO: 4716414 - DNA, 25 bp, Homo sapien
tctggaaccaggtctgttttattaa

SEQ ID NO: 4716415 - DNA, 25 bp, Homo sapien
tgtcgttcttaatttctttacatct

SEQ ID NO: 4716416 - DNA, 25 bp, Homo sapien
tatatcaggatattgcccaaatgtc

SEQ ID NO: 4716417 - DNA, 25 bp, Homo sapien
gaatgctagataacaaagtagatga

SEQ ID NO: 4716418 - DNA, 25 bp, Homo sapien
ttatctctgtaaagaatccagttga

SEQ ID NO: 4716419 - DNA, 25 bp, Homo sapien
gctatacttcagaagatatatcagg

SEQ ID NO: 4716420 - DNA, 25 bp, Homo sapien
tagcttcattgataaggccatcagg

SEQ ID NO: 4716421 - DNA, 25 bp, Homo sapien
ctagtagcttcattgataaggccat

SEQ ID NO: 4716422 - DNA, 25 bp, Homo sapien
cattgataaggccatcaggtttctc

SEQ ID NO: 4716423 - DNA, 25 bp, Homo sapien
gcttcattgataaggccatcaggtt

SEQ ID NO: 4716424 - DNA, 25 bp, Homo sapien
ttagagcccaagtggtagttttcat

SEQ ID NO: 4716425 - DNA, 25 bp, Homo sapien
cactgacttagagcccaagtggtag

SEQ ID NO: 4716426 - DNA, 25 bp, Homo sapien
tgacttagagcccaagtggtagttt

SEQ ID NO: 4716427 - DNA, 25 bp, Homo sapien
gacactgacttagagcccaagtggt

SEQ ID NO: 4716428 - DNA, 25 bp, Homo sapien
ctgaatagtttggaacctcagagca

SEQ ID NO: 4716429 - DNA, 25 bp, Homo sapien
cattccatgccaaaagaccaagttt

SEQ ID NO: 4716430 - DNA, 25 bp, Homo sapien
tagagaatgaggctgctaacagacc

SEQ ID NO: 4716431 - DNA, 25 bp, Homo sapien
ttggcctgaggctacaacaagtcct

SEQ ID NO: 4716432 - DNA, 25 bp, Homo sapien
ggccacagggtaccatttctcagct

SEQ ID NO: 4716433 - DNA, 25 bp, Homo sapien
cagggtaccatttctcagctttact

SEQ ID NO: 4716434 - DNA, 25 bp, Homo sapien
agctttacttgtgatgggctggctc

SEQ ID NO: 4716435 - DNA, 25 bp, Homo sapien
cagctttacttgtgatgggctggct

SEQ ID NO: 4716436 - DNA, 25 bp, Homo sapien
ccatattttgaatccacaatagtta

SEQ ID NO: 4716437 - DNA, 25 bp, Homo sapien
tttgaatccacaatagttatgatac

SEQ ID NO: 4716438 - DNA, 25 bp, Homo sapien
attttgaatccacaatagttatgat

SEQ ID NO: 4716439 - DNA, 25 bp, Homo sapien
taatccatattttgaatccacaata

SEQ ID NO: 4716440 - DNA, 25 bp, Homo sapien
taaatatcactccctaattcagcat

SEQ ID NO: 4716441 - DNA, 25 bp, Homo sapien
aatatcactccctaattcagcatca

SEQ ID NO: 4716442 - DNA, 25 bp, Homo sapien
tatcactccctaattcagcatcaac

SEQ ID NO: 4716443 - DNA, 25 bp, Homo sapien
aaatatcactccctaattcagcatc

SEQ ID NO: 4716444 - DNA, 25 bp, Homo sapien
gtacctgtaacttgaaaagactgcc

SEQ ID NO: 4716445 - DNA, 25 bp, Homo sapien
tccagccaatcaaacactaggagat

SEQ ID NO: 4716446 - DNA, 25 bp, Homo sapien
caatcaggagatggactaactcggg

SEQ ID NO: 4716447 - DNA, 25 bp, Homo sapien
cacaagtggcaaagaacccattctg

SEQ ID NO: 4716448 - DNA, 25 bp, Homo sapien
gaaagttagaagcaagaaacattaa

SEQ ID NO: 4716449 - DNA, 25 bp, Homo sapien
acaatttgtataaaagctttctctg

SEQ ID NO: 4716450 - DNA, 25 bp, Homo sapien
ctctgaaaagctgaatcgtgtttaa

SEQ ID NO: 4716451 - DNA, 25 bp, Homo sapien
gaatgttccatctttacccaaacaa

SEQ ID NO: 4716452 - DNA, 25 bp, Homo sapien
ggacaactgtacttagaggtagaac

SEQ ID NO: 4716453 - DNA, 25 bp, Homo sapien
tctgctcttcctacatgtccttatt

SEQ ID NO: 4716454 - DNA, 25 bp, Homo sapien
gggacttgaacattaatagattttg

SEQ ID NO: 4716455 - DNA, 25 bp, Homo sapien
gagattccggaactaataccccatg

SEQ ID NO: 4716456 - DNA, 25 bp, Homo sapien
tttgcatcaaattctcaatagctct

SEQ ID NO: 4716457 - DNA, 25 bp, Homo sapien
ttttgcatcaaattctcaatagctc

SEQ ID NO: 4716458 - DNA, 25 bp, Homo sapien
ggaaactttatctgaccaagtatct

SEQ ID NO: 4716459 - DNA, 25 bp, Homo sapien
tatttgagtgctactatgtgttggg

SEQ ID NO: 4716460 - DNA, 25 bp, Homo sapien
tgggtaactcttctagggtctatgg

SEQ ID NO: 4716461 - DNA, 25 bp, Homo sapien
tctagggtctatggtagactagtga

SEQ ID NO: 4716462 - DNA, 25 bp, Homo sapien
aatgaagcaaactgtgtaaattcag

SEQ ID NO: 4716463 - DNA, 25 bp, Homo sapien
tgaagcaaactgtgtaaattcagtt

SEQ ID NO: 4716464 - DNA, 25 bp, Homo sapien
caatgaagcaaactgtgtaaattca

SEQ ID NO: 4716465 - DNA, 25 bp, Homo sapien
atgaagcaaactgtgtaaattcagt

SEQ ID NO: 4716466 - DNA, 25 bp, Homo sapien
accttggctgacagctaaggatttc

SEQ ID NO: 4716467 - DNA, 25 bp, Homo sapien
ccgtttctaagttccagccactctt

SEQ ID NO: 4716468 - DNA, 25 bp, Homo sapien
aacagcagaggcaaccgtttctaag

SEQ ID NO: 4716469 - DNA, 25 bp, Homo sapien
ttggctgacagctaaggatttctcc

SEQ ID NO: 4716470 - DNA, 25 bp, Homo sapien
agatgaggataactcaataatggag

SEQ ID NO: 4716471 - DNA, 25 bp, Homo sapien
tagcttatgtccattagccaaaaaa

SEQ ID NO: 4716472 - DNA, 25 bp, Homo sapien
catgcagcctcgatatctaaattac

SEQ ID NO: 4716473 - DNA, 25 bp, Homo sapien
ttaacaaacagcactctttagctta

SEQ ID NO: 4716474 - DNA, 25 bp, Homo sapien
taaaatgaccgctactcttttacta

SEQ ID NO: 4716475 - DNA, 25 bp, Homo sapien
gaccgctactcttttactatgttgc

SEQ ID NO: 4716476 - DNA, 25 bp, Homo sapien
tgaccgctactcttttactatgttg

SEQ ID NO: 4716477 - DNA, 25 bp, Homo sapien
aaatgaccgctactcttttactatg

SEQ ID NO: 4716478 - DNA, 25 bp, Homo sapien
atatagttcagaagtgttgtcttcc

SEQ ID NO: 4716479 - DNA, 25 bp, Homo sapien
aggcccgagcggcacgtttgaaata

SEQ ID NO: 4716480 - DNA, 25 bp, Homo sapien
cagtgagcaatacgggaaaggcccg

SEQ ID NO: 4716481 - DNA, 25 bp, Homo sapien
tgagcaatacgggaaaggcccgagc

SEQ ID NO: 4716482 - DNA, 25 bp, Homo sapien
cccgagcggcacgtttgaaatacat

SEQ ID NO: 4716483 - DNA, 25 bp, Homo sapien
tgttttggacaagaaatttgttcat

SEQ ID NO: 4716484 - DNA, 25 bp, Homo sapien
atttgttcatcttctcagcagagca

SEQ ID NO: 4716485 - DNA, 25 bp, Homo sapien
aatttgttcatcttctcagcagagc

SEQ ID NO: 4716486 - DNA, 25 bp, Homo sapien
tttggacaagaaatttgttcatctt

SEQ ID NO: 4716487 - DNA, 25 bp, Homo sapien
taacttggtaagaggtcacagagac

SEQ ID NO: 4716488 - DNA, 25 bp, Homo sapien
aacttggtaagaggtcacagagaca

SEQ ID NO: 4716489 - DNA, 25 bp, Homo sapien
ataacttggtaagaggtcacagaga

SEQ ID NO: 4716490 - DNA, 25 bp, Homo sapien
tcttggcgccgaggccagacttttc

SEQ ID NO: 4716491 - DNA, 25 bp, Homo sapien
aattcaggacaatcctcctccgcag

SEQ ID NO: 4716492 - DNA, 25 bp, Homo sapien
tcaggacaatcctcctccgcaggat

SEQ ID NO: 4716493 - DNA, 25 bp, Homo sapien
tgataattgtgactgggatcttggc

SEQ ID NO: 4716494 - DNA, 25 bp, Homo sapien
gcacgtccctacctcagctgaaccg

SEQ ID NO: 4716495 - DNA, 25 bp, Homo sapien
gaaccgctgggaccaacacgccgta

SEQ ID NO: 4716496 - DNA, 25 bp, Homo sapien
acgccgtaccgcagccgcgcacgcc

SEQ ID NO: 4716497 - DNA, 25 bp, Homo sapien
cgtccctacctcagctgaaccgctg

SEQ ID NO: 4716498 - DNA, 25 bp, Homo sapien
ccaatgggattagagaccaaataac

SEQ ID NO: 4716499 - DNA, 25 bp, Homo sapien
aattgacaggttgaccaaaaggagg

SEQ ID NO: 4716500 - DNA, 25 bp, Homo sapien
taatcatcctctcaaaattgacagg

SEQ ID NO: 4716501 - DNA, 25 bp, Homo sapien
cttgtaacaagtagtgagtctcagc

SEQ ID NO: 4716502 - DNA, 25 bp, Homo sapien
ctcttatctagctgtggcaagtaaa

SEQ ID NO: 4716503 - DNA, 25 bp, Homo sapien
gcaatagctactggtttagaggaaa

SEQ ID NO: 4716504 - DNA, 25 bp, Homo sapien
tattcaagtgtcatatagtcgtctt

SEQ ID NO: 4716505 - DNA, 25 bp, Homo sapien
ggccagaggccaatggcttgtattc

SEQ ID NO: 4716506 - DNA, 25 bp, Homo sapien
gtgatccatcctcctcgcctcctaa

SEQ ID NO: 4716507 - DNA, 25 bp, Homo sapien
tggtgatccatcctcctcgcctcct

SEQ ID NO: 4716508 - DNA, 25 bp, Homo sapien
gacctggtgatccatcctcctcgcc

SEQ ID NO: 4716509 - DNA, 25 bp, Homo sapien
acctggtgatccatcctcctcgcct

SEQ ID NO: 4716510 - DNA, 25 bp, Homo sapien
gaagaagtacttacacatttgttct

SEQ ID NO: 4716511 - DNA, 25 bp, Homo sapien
tatgtatcattcgttgagtctcagt

SEQ ID NO: 4716512 - DNA, 25 bp, Homo sapien
atggtacaccgtggaccgaagcctc

SEQ ID NO: 4716513 - DNA, 25 bp, Homo sapien
tcagaggagttcatccgaaaggctg

SEQ ID NO: 4716514 - DNA, 25 bp, Homo sapien
tacattttacacatccagcagtggg

SEQ ID NO: 4716515 - DNA, 25 bp, Homo sapien
tatagcacaggttagagcagcacgc

SEQ ID NO: 4716516 - DNA, 25 bp, Homo sapien
tatcttgagtttgaggccgggcttc

SEQ ID NO: 4716517 - DNA, 25 bp, Homo sapien
ttctccggagaaaagcattcacgcc

SEQ ID NO: 4716518 - DNA, 25 bp, Homo sapien
tacgaatccctggggtgattcccga

SEQ ID NO: 4716519 - DNA, 25 bp, Homo sapien
cgacagacgaggtttgcgcttggct

SEQ ID NO: 4716520 - DNA, 25 bp, Homo sapien
ttcgggcagatggagcttccggcct

SEQ ID NO: 4716521 - DNA, 25 bp, Homo sapien
tctgccccagtatcgggaggccagt

SEQ ID NO: 4716522 - DNA, 25 bp, Homo sapien
gaaatgcggaagtttccagcgccga

SEQ ID NO: 4716523 - DNA, 25 bp, Homo sapien
cgaggccggacgagtccattcgcgt

SEQ ID NO: 4716524 - DNA, 25 bp, Homo sapien
tgataggcgcctgggtaaccgtgtt

SEQ ID NO: 4716525 - DNA, 25 bp, Homo sapien
ttgggcgcgccacggagtgtctcat

SEQ ID NO: 4716526 - DNA, 25 bp, Homo sapien
tcaagatcaacaggtaagacgcccc

SEQ ID NO: 4716527 - DNA, 25 bp, Homo sapien
ttcctttgaggcaagtctgagcgcg

SEQ ID NO: 4716528 - DNA, 25 bp, Homo sapien
tataccctggtccaaaggagccatg

SEQ ID NO: 4716529 - DNA, 25 bp, Homo sapien
cagaaagagcttggctcctggtggc

SEQ ID NO: 4716530 - DNA, 25 bp, Homo sapien
gcaagccttctgtcgtcctgagcaa

SEQ ID NO: 4716531 - DNA, 25 bp, Homo sapien
tgccatcattaacattacaatcagc

SEQ ID NO: 4716532 - DNA, 25 bp, Homo sapien
gccatcattaacattacaatcagct

SEQ ID NO: 4716533 - DNA, 25 bp, Homo sapien
aataattttgggcataacgaccaga

SEQ ID NO: 4716534 - DNA, 25 bp, Homo sapien
ccagagcacaatgagctacagagag

SEQ ID NO: 4716535 - DNA, 25 bp, Homo sapien
tatctgcaaagataatacaagcata

SEQ ID NO: 4716536 - DNA, 25 bp, Homo sapien
cataacgaccagagcacaatgagct

SEQ ID NO: 4716537 - DNA, 25 bp, Homo sapien
tgaaataaccttctaccagggtgaa

SEQ ID NO: 4716538 - DNA, 25 bp, Homo sapien
cacatttagaatcggttccttccag

SEQ ID NO: 4716539 - DNA, 25 bp, Homo sapien
gaaaacgtagtaacatgtagttgcc

SEQ ID NO: 4716540 - DNA, 25 bp, Homo sapien
gatgtgttctagaccaaagaccaac

SEQ ID NO: 4716541 - DNA, 25 bp, Homo sapien
agtcagcagcagaaaggctctctgg

SEQ ID NO: 4716542 - DNA, 25 bp, Homo sapien
cagcagcagaaaggctctctgggct

SEQ ID NO: 4716543 - DNA, 25 bp, Homo sapien
ccagtcagcagcagaaaggctctct

SEQ ID NO: 4716544 - DNA, 25 bp, Homo sapien
tcagcagcagaaaggctctctgggc

SEQ ID NO: 4716545 - DNA, 25 bp, Homo sapien
tcaagcttgactctctcgtttgctc

SEQ ID NO: 4716546 - DNA, 25 bp, Homo sapien
tgctgccacgggtagaaatactttt

SEQ ID NO: 4716547 - DNA, 25 bp, Homo sapien
ctttggcagacctttttgagttctc

SEQ ID NO: 4716548 - DNA, 25 bp, Homo sapien
tctcgtttgctcagggaggcccagt

SEQ ID NO: 4716549 - DNA, 25 bp, Homo sapien
gccaaacaagtacagctgaagcacc

SEQ ID NO: 4716550 - DNA, 25 bp, Homo sapien
tcacaaggatttggatgtgggagct

SEQ ID NO: 4716551 - DNA, 25 bp, Homo sapien
tgtctgatagataaaaactgtgttg

SEQ ID NO: 4716552 - DNA, 25 bp, Homo sapien
ttgctgttgtctgatagataaaaac

SEQ ID NO: 4716553 - DNA, 25 bp, Homo sapien
actgcaaacagaacacgggtcactg

SEQ ID NO: 4716554 - DNA, 25 bp, Homo sapien
tactgacattgtgaatcgcactgca

SEQ ID NO: 4716555 - DNA, 25 bp, Homo sapien
ggaaagatcaattgtttcttggcct

SEQ ID NO: 4716556 - DNA, 25 bp, Homo sapien
aacagaacacgggtcactgttgttt

SEQ ID NO: 4716557 - DNA, 25 bp, Homo sapien
caaggacagatctcgaataaaaaca

SEQ ID NO: 4716558 - DNA, 25 bp, Homo sapien
aaaatatttggtgcattaacagatt

SEQ ID NO: 4716559 - DNA, 25 bp, Homo sapien
gacagacagggattgtccaggtaat

SEQ ID NO: 4716560 - DNA, 25 bp, Homo sapien
taacagattttggacttcacagggc

SEQ ID NO: 4716561 - DNA, 25 bp, Homo sapien
gatgattatgcaagatttgaaccag

SEQ ID NO: 4716562 - DNA, 25 bp, Homo sapien
gattactgtgtaagttagcatgaga

SEQ ID NO: 4716563 - DNA, 25 bp, Homo sapien
acagcctgacaggtttggaactctg

SEQ ID NO: 4716564 - DNA, 25 bp, Homo sapien
tcactccaccatatgtttagcaggg

SEQ ID NO: 4716565 - DNA, 25 bp, Homo sapien
ggctttgtgcccaacatgtggctcc

SEQ ID NO: 4716566 - DNA, 25 bp, Homo sapien
gtgggtgttggctttgtgcccaaca

SEQ ID NO: 4716567 - DNA, 25 bp, Homo sapien
cttgcccttgaccaaaagccttgtc

SEQ ID NO: 4716568 - DNA, 25 bp, Homo sapien
cagccattttggctgccggccatac

SEQ ID NO: 4716569 - DNA, 25 bp, Homo sapien
tccagccattttggctgccggccat

SEQ ID NO: 4716570 - DNA, 25 bp, Homo sapien
catccagccattttggctgccggcc

SEQ ID NO: 4716571 - DNA, 25 bp, Homo sapien
atccagccattttggctgccggcca

SEQ ID NO: 4716572 - DNA, 25 bp, Homo sapien
gattgatctgcttggagattcttgt

SEQ ID NO: 4716573 - DNA, 25 bp, Homo sapien
ttccttgagggtcaaaagccaggga

SEQ ID NO: 4716574 - DNA, 25 bp, Homo sapien
cttccagggctgtttggtttcctag

SEQ ID NO: 4716575 - DNA, 25 bp, Homo sapien
gagtagctcgtggtgctgattgatc

SEQ ID NO: 4716576 - DNA, 25 bp, Homo sapien
tatgaagcaattcttttccacgtgg

SEQ ID NO: 4716577 - DNA, 25 bp, Homo sapien
tagcttaatatgtgtgtagggcctc

SEQ ID NO: 4716578 - DNA, 25 bp, Homo sapien
gagccaatatacaaccccaccaggg

SEQ ID NO: 4716579 - DNA, 25 bp, Homo sapien
ctttccagacacacagagccaatat

SEQ ID NO: 4716580 - DNA, 25 bp, Homo sapien
cttatcttgaagaggttaggttact

SEQ ID NO: 4716581 - DNA, 25 bp, Homo sapien
gcttatcttgaagaggttaggttac

SEQ ID NO: 4716582 - DNA, 25 bp, Homo sapien
cgctcagtttccggtaaccgccatt

SEQ ID NO: 4716583 - DNA, 25 bp, Homo sapien
acttattacttcgaaaccacttctg

SEQ ID NO: 4716584 - DNA, 25 bp, Homo sapien
tccgctcagtttccggtaaccgcca

SEQ ID NO: 4716585 - DNA, 25 bp, Homo sapien
ttattacttcgaaaccacttctgcc

SEQ ID NO: 4716586 - DNA, 25 bp, Homo sapien
gcttaggaaatccatctccataatg

SEQ ID NO: 4716587 - DNA, 25 bp, Homo sapien
agtctgcttaggaaatccatctcca

SEQ ID NO: 4716588 - DNA, 25 bp, Homo sapien
ttaggaaatccatctccataatgtt

SEQ ID NO: 4716589 - DNA, 25 bp, Homo sapien
tctgcttaggaaatccatctccata

SEQ ID NO: 4716590 - DNA, 25 bp, Homo sapien
ctggtatcgtgttgtaatgtcagaa

SEQ ID NO: 4716591 - DNA, 25 bp, Homo sapien
aagaccaagtgcgttctgaccttcg

SEQ ID NO: 4716592 - DNA, 25 bp, Homo sapien
tcaatggcccacttgctgatacaaa

SEQ ID NO: 4716593 - DNA, 25 bp, Homo sapien
ctttccttaaaatgagaagccgtag

SEQ ID NO: 4716594 - DNA, 25 bp, Homo sapien
gaagccgtaggttttcgttgcatta

SEQ ID NO: 4716595 - DNA, 25 bp, Homo sapien
gctcagtatgccctacccagtagat

SEQ ID NO: 4716596 - DNA, 25 bp, Homo sapien
cagtggccaactcaggagctcagta

SEQ ID NO: 4716597 - DNA, 25 bp, Homo sapien
aattccgtgagaacaactgcctgtg

SEQ ID NO: 4716598 - DNA, 25 bp, Homo sapien
ccacctcatggtttattagagtgca

SEQ ID NO: 4716599 - DNA, 25 bp, Homo sapien
cagcttgaagcccttactctggtat

SEQ ID NO: 4716600 - DNA, 25 bp, Homo sapien
tctggtatgtgatttcaaagcgatg

SEQ ID NO: 4716601 - DNA, 25 bp, Homo sapien
tcttgcctcttcaacagcgctttgt

SEQ ID NO: 4716602 - DNA, 25 bp, Homo sapien
caggaagtagggcatattttgccta

SEQ ID NO: 4716603 - DNA, 25 bp, Homo sapien
tgcaaaccgtaaatctgaagaatgt

SEQ ID NO: 4716604 - DNA, 25 bp, Homo sapien
tatttgcaaaccgtaaatctgaaga

SEQ ID NO: 4716605 - DNA, 25 bp, Homo sapien
tgaagaatgtctgatatccagaatc

SEQ ID NO: 4716606 - DNA, 25 bp, Homo sapien
tctgaagaatgtctgatatccagaa

SEQ ID NO: 4716607 - DNA, 25 bp, Homo sapien
tatactctcacctactgggaggctg

SEQ ID NO: 4716608 - DNA, 25 bp, Homo sapien
tgtacctatactctcacctactggg

SEQ ID NO: 4716609 - DNA, 25 bp, Homo sapien
cgtgtacctatactctcacctactg

SEQ ID NO: 4716610 - DNA, 25 bp, Homo sapien
tatggtggcgtgtacctatactctc

SEQ ID NO: 4716611 - DNA, 25 bp, Homo sapien
tggcaacttaatgattggggtcctg

SEQ ID NO: 4716612 - DNA, 25 bp, Homo sapien
caacttaatgattggggtcctgaat

SEQ ID NO: 4716613 - DNA, 25 bp, Homo sapien
tgtggcaacttaatgattggggtcc

SEQ ID NO: 4716614 - DNA, 25 bp, Homo sapien
aaatgtggcaacttaatgattgggg

SEQ ID NO: 4716615 - DNA, 25 bp, Homo sapien
tttagtgacctatcgcactgcacag

SEQ ID NO: 4716616 - DNA, 25 bp, Homo sapien
cactgcacagtgaccagagttaata

SEQ ID NO: 4716617 - DNA, 25 bp, Homo sapien
tgtcagcagcctcaaatggtcttct

SEQ ID NO: 4716618 - DNA, 25 bp, Homo sapien
tctcaggcgggaggaatacgtttta

SEQ ID NO: 4716619 - DNA, 25 bp, Homo sapien
tggtgttgtatcagaattgcatgtt

SEQ ID NO: 4716620 - DNA, 25 bp, Homo sapien
attgtttggctgaaagagcttattt

SEQ ID NO: 4716621 - DNA, 25 bp, Homo sapien
tgctagtagtttactatcaaaacaa

SEQ ID NO: 4716622 - DNA, 25 bp, Homo sapien
aattgcttgatcttgggcagtggag

SEQ ID NO: 4716623 - DNA, 25 bp, Homo sapien
ttctctgttctttcgccatctaccg

SEQ ID NO: 4716624 - DNA, 25 bp, Homo sapien
tgttctttcgccatctaccgtctca

SEQ ID NO: 4716625 - DNA, 25 bp, Homo sapien
tcaaccgttccagtcaactttcttc

SEQ ID NO: 4716626 - DNA, 25 bp, Homo sapien
tctcacttccggctgttttcctctt

SEQ ID NO: 4716627 - DNA, 25 bp, Homo sapien
cactctgcagattggtgacatgctg

SEQ ID NO: 4716628 - DNA, 25 bp, Homo sapien
tcaagtgcccacaggatccagatga

SEQ ID NO: 4716629 - DNA, 25 bp, Homo sapien
tggtggcatctgttcactctggaga

SEQ ID NO: 4716630 - DNA, 25 bp, Homo sapien
taaatgaatgccttgttctggtggc

SEQ ID NO: 4716631 - DNA, 25 bp, Homo sapien
gagaaatgctgaacaataggacaca

SEQ ID NO: 4716632 - DNA, 25 bp, Homo sapien
tgtatgtaagttgaagcccaagaaa

SEQ ID NO: 4716633 - DNA, 25 bp, Homo sapien
agaaaaagggagaaatgctgaacaa

SEQ ID NO: 4716634 - DNA, 25 bp, Homo sapien
tgggaggggttccacctaagctcta

SEQ ID NO: 4716635 - DNA, 25 bp, Homo sapien
ttgagtaaccaccagtcagataaaa

SEQ ID NO: 4716636 - DNA, 25 bp, Homo sapien
cctttagtgtggtcgcatgtgtcag

SEQ ID NO: 4716637 - DNA, 25 bp, Homo sapien
cattatcctctctcagttacaggcc

SEQ ID NO: 4716638 - DNA, 25 bp, Homo sapien
taaagtgcgattaatatttcctgtg

SEQ ID NO: 4716639 - DNA, 25 bp, Homo sapien
gaacctatccccgagaatgaggagg

SEQ ID NO: 4716640 - DNA, 25 bp, Homo sapien
gaggactgagtaccactgagtggac

SEQ ID NO: 4716641 - DNA, 25 bp, Homo sapien
tatatgtagggttcggtaccatccg

SEQ ID NO: 4716642 - DNA, 25 bp, Homo sapien
tcaggaatgcctgtgatgcaccggg

SEQ ID NO: 4716643 - DNA, 25 bp, Homo sapien
tacagatagtagatgaggttcctct

SEQ ID NO: 4716644 - DNA, 25 bp, Homo sapien
gcagacttgggctgtagatcgataa

SEQ ID NO: 4716645 - DNA, 25 bp, Homo sapien
aaactgttaccaagctgggacctca

SEQ ID NO: 4716646 - DNA, 25 bp, Homo sapien
cagaggtgacgcagaagtggaaaat

SEQ ID NO: 4716647 - DNA, 25 bp, Homo sapien
ccagtctagtctttaacttgtgagc

SEQ ID NO: 4716648 - DNA, 25 bp, Homo sapien
tccctttgcaactcatgctttgtgt

SEQ ID NO: 4716649 - DNA, 25 bp, Homo sapien
cgctcgtaatgttttgtaaggcact

SEQ ID NO: 4716650 - DNA, 25 bp, Homo sapien
taacactatccaaggtggcacctct

SEQ ID NO: 4716651 - DNA, 25 bp, Homo sapien
gaagacagatgcatcatcctggcct

SEQ ID NO: 4716652 - DNA, 25 bp, Homo sapien
gtggatacatttgcttcatgagtgc

SEQ ID NO: 4716653 - DNA, 25 bp, Homo sapien
acagtggatacatttgcttcatgag

SEQ ID NO: 4716654 - DNA, 25 bp, Homo sapien
tttgcttcatgagtgcaggaaccat

SEQ ID NO: 4716655 - DNA, 25 bp, Homo sapien
cagtggatacatttgcttcatgagt

SEQ ID NO: 4716656 - DNA, 25 bp, Homo sapien
ctgtgtccacctagcctgtaagtgc

SEQ ID NO: 4716657 - DNA, 25 bp, Homo sapien
tgtgtccacctagcctgtaagtgcc

SEQ ID NO: 4716658 - DNA, 25 bp, Homo sapien
gtgtccacctagcctgtaagtgccc

SEQ ID NO: 4716659 - DNA, 25 bp, Homo sapien
tgtccacctagcctgtaagtgcccc

SEQ ID NO: 4716660 - DNA, 25 bp, Homo sapien
cccttctcagcaggttataacaggt

SEQ ID NO: 4716661 - DNA, 25 bp, Homo sapien
gttccatctggtaaataattgccgg

SEQ ID NO: 4716662 - DNA, 25 bp, Homo sapien
aattgccggagttgcattcctgtgc

SEQ ID NO: 4716663 - DNA, 25 bp, Homo sapien
ggcacaagctaactgctgtacagca

SEQ ID NO: 4716664 - DNA, 25 bp, Homo sapien
caagttgtccgtgttctgagtagca

SEQ ID NO: 4716665 - DNA, 25 bp, Homo sapien
tgtatcgctgactcttcagacgcag

SEQ ID NO: 4716666 - DNA, 25 bp, Homo sapien
taaatgcaccctcaatggcacagaa

SEQ ID NO: 4716667 - DNA, 25 bp, Homo sapien
caactaacgggcatggattcaaacc

SEQ ID NO: 4716668 - DNA, 25 bp, Homo sapien
tgtgtaaccacgctacctccaatag

SEQ ID NO: 4716669 - DNA, 25 bp, Homo sapien
tatggagcaatacacgtgacaagcc

SEQ ID NO: 4716670 - DNA, 25 bp, Homo sapien
atactggcggtatagaattctcccc

SEQ ID NO: 4716671 - DNA, 25 bp, Homo sapien
caaccatgtgagctgctgagtctcc

SEQ ID NO: 4716672 - DNA, 25 bp, Homo sapien
cagctgacaataaagctttggaaaa

SEQ ID NO: 4716673 - DNA, 25 bp, Homo sapien
ttgtccccagactatgagtttctgc

SEQ ID NO: 4716674 - DNA, 25 bp, Homo sapien
tcaaagcagaatttcggagaaggtc

SEQ ID NO: 4716675 - DNA, 25 bp, Homo sapien
tcctgtaagtaattgccttggctcc

SEQ ID NO: 4716676 - DNA, 25 bp, Homo sapien
aggctgctaccaactgccatccttg

SEQ ID NO: 4716677 - DNA, 25 bp, Homo sapien
taccttgtacttgaagcaggggcca

SEQ ID NO: 4716678 - DNA, 25 bp, Homo sapien
ggctcctgcaaatcttttaccttgt

SEQ ID NO: 4716679 - DNA, 25 bp, Homo sapien
tcctccaccgccgacaaggctgcta

SEQ ID NO: 4716680 - DNA, 25 bp, Homo sapien
agccagtgcacccggtcgagggcac

SEQ ID NO: 4716681 - DNA, 25 bp, Homo sapien
cagtgcacccggtcgagggcactat

SEQ ID NO: 4716682 - DNA, 25 bp, Homo sapien
gtgcacccggtcgagggcactattt

SEQ ID NO: 4716683 - DNA, 25 bp, Homo sapien
gcacccggtcgagggcactatttat

SEQ ID NO: 4716684 - DNA, 25 bp, Homo sapien
tcgccttgtgaagtttgatggctct

SEQ ID NO: 4716685 - DNA, 25 bp, Homo sapien
aaaaaagactgagcgtgtgtaacgc

SEQ ID NO: 4716686 - DNA, 25 bp, Homo sapien
cagaggcaagcatgtcgccttgtga

SEQ ID NO: 4716687 - DNA, 25 bp, Homo sapien
cttcgctgtgaactgtggaaaagca

SEQ ID NO: 4716688 - DNA, 25 bp, Homo sapien
caggtggcctcgggtcgccctccgc

SEQ ID NO: 4716689 - DNA, 25 bp, Homo sapien
ctcgggtcgccctccgccaactccg

SEQ ID NO: 4716690 - DNA, 25 bp, Homo sapien
ccgccaactccgaggtggcttcggc

SEQ ID NO: 4716691 - DNA, 25 bp, Homo sapien
ccaactccgaggtggcttcggccgg

SEQ ID NO: 4716692 - DNA, 25 bp, Homo sapien
gctttgggcaacacgcagtggcgct

SEQ ID NO: 4716693 - DNA, 25 bp, Homo sapien
cacgagcgtgacctagtgaaggcct

SEQ ID NO: 4716694 - DNA, 25 bp, Homo sapien
ggtcccgtggaactttcagaggcaa

SEQ ID NO: 4716695 - DNA, 25 bp, Homo sapien
cgttaacaatttatggcgtccgcca

SEQ ID NO: 4716696 - DNA, 25 bp, Homo sapien
gggagagccccggttgaccactgga

SEQ ID NO: 4716697 - DNA, 25 bp, Homo sapien
atagggagagccccggttgaccact

SEQ ID NO: 4716698 - DNA, 25 bp, Homo sapien
catagggagagccccggttgaccac

SEQ ID NO: 4716699 - DNA, 25 bp, Homo sapien
agagccccggttgaccactggacag

SEQ ID NO: 4716700 - DNA, 25 bp, Homo sapien
tgttaattctgactggttcaccctt

SEQ ID NO: 4716701 - DNA, 25 bp, Homo sapien
taaaatttgacttggttagtggcaa

SEQ ID NO: 4716702 - DNA, 25 bp, Homo sapien
tatattgcagatataacctcttttg

SEQ ID NO: 4716703 - DNA, 25 bp, Homo sapien
tgtgtttgatatctgcataatattt

SEQ ID NO: 4716704 - DNA, 25 bp, Homo sapien
tctcctttacccaaatggagccaca

SEQ ID NO: 4716705 - DNA, 25 bp, Homo sapien
atctcctttacccaaatggagccac

SEQ ID NO: 4716706 - DNA, 25 bp, Homo sapien
gggttcttagccatccccaaatgat

SEQ ID NO: 4716707 - DNA, 25 bp, Homo sapien
tctgacctcacatccagtttgacca

SEQ ID NO: 4716708 - DNA, 25 bp, Homo sapien
tgataaagtagccttagtactgtgg

SEQ ID NO: 4716709 - DNA, 25 bp, Homo sapien
gaagtgttgtaaacctctgacctca

SEQ ID NO: 4716710 - DNA, 25 bp, Homo sapien
gtcctggcttaaagcggttgttcac

SEQ ID NO: 4716711 - DNA, 25 bp, Homo sapien
tggcttaaagcggttgttcacatgt

SEQ ID NO: 4716712 - DNA, 25 bp, Homo sapien
tcctggcttaaagcggttgttcaca

SEQ ID NO: 4716713 - DNA, 25 bp, Homo sapien
cttaaagcggttgttcacatgttga

SEQ ID NO: 4716714 - DNA, 25 bp, Homo sapien
tacctatacttttcggccagacact

SEQ ID NO: 4716715 - DNA, 25 bp, Homo sapien
acttttcggccagacacttcaaggg

SEQ ID NO: 4716716 - DNA, 25 bp, Homo sapien
ggttcggagcatgggttctagaatc

SEQ ID NO: 4716717 - DNA, 25 bp, Homo sapien
tcaaggggatctgattcgatgtagg

SEQ ID NO: 4716718 - DNA, 25 bp, Homo sapien
ggagtgtgatcctggtgctgtctct

SEQ ID NO: 4716719 - DNA, 25 bp, Homo sapien
agaacgggacggcagagcaatgact

SEQ ID NO: 4716720 - DNA, 25 bp, Homo sapien
ccagagaacgggacggcagagcaat

SEQ ID NO: 4716721 - DNA, 25 bp, Homo sapien
tttctcccagagaacgggacggcag

SEQ ID NO: 4716722 - DNA, 25 bp, Homo sapien
tcttagacttagatgtgatttgaaa

SEQ ID NO: 4716723 - DNA, 25 bp, Homo sapien
ggcttttattatgggagcagcacac

SEQ ID NO: 4716724 - DNA, 25 bp, Homo sapien
cacataagaccatcattggttctca

SEQ ID NO: 4716725 - DNA, 25 bp, Homo sapien
tagaagtcttagacttagatgtgat

SEQ ID NO: 4716726 - DNA, 25 bp, Homo sapien
tatcttggaagtgcgtaaaactgct

SEQ ID NO: 4716727 - DNA, 25 bp, Homo sapien
tattatgtagaagtgcatttccaga

SEQ ID NO: 4716728 - DNA, 25 bp, Homo sapien
agatttctggagtgtggatcgaaga

SEQ ID NO: 4716729 - DNA, 25 bp, Homo sapien
ttcataccagcagtagggtctcaac

SEQ ID NO: 4716730 - DNA, 25 bp, Homo sapien
ggtgttttgccgacgataatggggc

SEQ ID NO: 4716731 - DNA, 25 bp, Homo sapien
ttttgccgacgataatggggcatct

SEQ ID NO: 4716732 - DNA, 25 bp, Homo sapien
tttgccgacgataatggggcatctc

SEQ ID NO: 4716733 - DNA, 25 bp, Homo sapien
gccgggtgttttgccgacgataatg

SEQ ID NO: 4716734 - DNA, 25 bp, Homo sapien
gaatccaaatccagggcttctctat

SEQ ID NO: 4716735 - DNA, 25 bp, Homo sapien
cagggcttctctattaggaggctcc

SEQ ID NO: 4716736 - DNA, 25 bp, Homo sapien
agggcttctctattaggaggctcca

SEQ ID NO: 4716737 - DNA, 25 bp, Homo sapien
ctgaatccaaatccagggcttctct

SEQ ID NO: 4716738 - DNA, 25 bp, Homo sapien
cactaccgcatctggtgcagagagg

SEQ ID NO: 4716739 - DNA, 25 bp, Homo sapien
cattctgtagtcttcgtacttctta

SEQ ID NO: 4716740 - DNA, 25 bp, Homo sapien
gggctagttctgtgtcatgtatgta

SEQ ID NO: 4716741 - DNA, 25 bp, Homo sapien
ttcgtacttcttatcttcactattg

SEQ ID NO: 4716742 - DNA, 25 bp, Homo sapien
gaatctctgtgagttgattgaatgg

SEQ ID NO: 4716743 - DNA, 25 bp, Homo sapien
ccagtgcccagacttctgggaggat

SEQ ID NO: 4716744 - DNA, 25 bp, Homo sapien
gggaggatctggctgctactcagta

SEQ ID NO: 4716745 - DNA, 25 bp, Homo sapien
tgctactcagtatggcggttgagga

SEQ ID NO: 4716746 - DNA, 25 bp, Homo sapien
aaaggcggtcagagagggtgatagc

SEQ ID NO: 4716747 - DNA, 25 bp, Homo sapien
gaacaggctccttacatactttgct

SEQ ID NO: 4716748 - DNA, 25 bp, Homo sapien
gctgcagtctcatttgcttgtggca

SEQ ID NO: 4716749 - DNA, 25 bp, Homo sapien
tacctctctaccatagaactcttac

SEQ ID NO: 4716750 - DNA, 25 bp, Homo sapien
aggtgcctgccgaagacccctgtca

SEQ ID NO: 4716751 - DNA, 25 bp, Homo sapien
aaggtctccccgctgacttcctgta

SEQ ID NO: 4716752 - DNA, 25 bp, Homo sapien
tttgacagtcctcgcagtccgcctg

SEQ ID NO: 4716753 - DNA, 25 bp, Homo sapien
cagtccgcctgagagagtagagaag

SEQ ID NO: 4716754 - DNA, 25 bp, Homo sapien
tgtaaaagcgtaagattcccatttg

SEQ ID NO: 4716755 - DNA, 25 bp, Homo sapien
ctgtaaaagcgtaagattcccattt

SEQ ID NO: 4716756 - DNA, 25 bp, Homo sapien
gtcttcttgcagtgactgagaatta

SEQ ID NO: 4716757 - DNA, 25 bp, Homo sapien
cttgcagtgactgagaattagctga

SEQ ID NO: 4716758 - DNA, 25 bp, Homo sapien
taacgattttgtcagctgtcaaccg

SEQ ID NO: 4716759 - DNA, 25 bp, Homo sapien
ggaatgtcaaggaacccaggagtga

SEQ ID NO: 4716760 - DNA, 25 bp, Homo sapien
tcatggcgaagagcactgtatctca

SEQ ID NO: 4716761 - DNA, 25 bp, Homo sapien
aatgggcaggcacctttgaaaaggc

SEQ ID NO: 4716762 - DNA, 25 bp, Homo sapien
tcgcgtctgtctcctagtgtcatag

SEQ ID NO: 4716763 - DNA, 25 bp, Homo sapien
tggcctgtgaacctctagaagacag

SEQ ID NO: 4716764 - DNA, 25 bp, Homo sapien
tagggaccactgacgcagcaaattc

SEQ ID NO: 4716765 - DNA, 25 bp, Homo sapien
gcaaattcagttcagcccggatagt

SEQ ID NO: 4716766 - DNA, 25 bp, Homo sapien
cacttgatacgttgtaaggtttctg

SEQ ID NO: 4716767 - DNA, 25 bp, Homo sapien
tcagattccgtaacacttgatacgt

SEQ ID NO: 4716768 - DNA, 25 bp, Homo sapien
tctcaaccttcatcagattccgtaa

SEQ ID NO: 4716769 - DNA, 25 bp, Homo sapien
tccgtaacacttgatacgttgtaag

SEQ ID NO: 4716770 - DNA, 25 bp, Homo sapien
catttaggggactgtacatttcctc

SEQ ID NO: 4716771 - DNA, 25 bp, Homo sapien
tacatttcctcatggggcatgcagt

SEQ ID NO: 4716772 - DNA, 25 bp, Homo sapien
cttgacattgtttcatttaggggac

SEQ ID NO: 4716773 - DNA, 25 bp, Homo sapien
tcactggcaatcacggagacttgac

SEQ ID NO: 4716774 - DNA, 25 bp, Homo sapien
ggtcacccctagatgtgatcacttc

SEQ ID NO: 4716775 - DNA, 25 bp, Homo sapien
caggtcacccctagatgtgatcact

SEQ ID NO: 4716776 - DNA, 25 bp, Homo sapien
cttgtaaccaggtcacccctagatg

SEQ ID NO: 4716777 - DNA, 25 bp, Homo sapien
gtaaccaggtcacccctagatgtga

SEQ ID NO: 4716778 - DNA, 25 bp, Homo sapien
acagcatgcaacacacagatccagc

SEQ ID NO: 4716779 - DNA, 25 bp, Homo sapien
cagctctgttgtgtcgtccacagca

SEQ ID NO: 4716780 - DNA, 25 bp, Homo sapien
gttgtgtcgtccacagcatgcaaca

SEQ ID NO: 4716781 - DNA, 25 bp, Homo sapien
cgtccacagcatgcaacacacagat

SEQ ID NO: 4716782 - DNA, 25 bp, Homo sapien
tttaattagtgaagaccgagtagca

SEQ ID NO: 4716783 - DNA, 25 bp, Homo sapien
tgatcacatcttggcatacccctgc

SEQ ID NO: 4716784 - DNA, 25 bp, Homo sapien
tcagtccagggaatatgccaacctc

SEQ ID NO: 4716785 - DNA, 25 bp, Homo sapien
gctagacaggcacaggagcagtatt

SEQ ID NO: 4716786 - DNA, 25 bp, Homo sapien
tgtaatcttacagaggaccagggct

SEQ ID NO: 4716787 - DNA, 25 bp, Homo sapien
tactgaataaatgcccgcagcactg

SEQ ID NO: 4716788 - DNA, 25 bp, Homo sapien
cagccctgccagagactaaagtgag

SEQ ID NO: 4716789 - DNA, 25 bp, Homo sapien
gaaagatgatcttggcgtcacccac

SEQ ID NO: 4716790 - DNA, 25 bp, Homo sapien
ttgatggtgatcaagagccagctgc

SEQ ID NO: 4716791 - DNA, 25 bp, Homo sapien
gctacttgatggtgatcaagagcca

SEQ ID NO: 4716792 - DNA, 25 bp, Homo sapien
tacagctacttgatggtgatcaaga

SEQ ID NO: 4716793 - DNA, 25 bp, Homo sapien
cacctttacagctacttgatggtga

SEQ ID NO: 4716794 - DNA, 25 bp, Homo sapien
gacattccgatcagcaggccagttt

SEQ ID NO: 4716795 - DNA, 25 bp, Homo sapien
gcaggccagtttgtgacgcgtgcat

SEQ ID NO: 4716796 - DNA, 25 bp, Homo sapien
tcagcagacattccgatcagcaggc

SEQ ID NO: 4716797 - DNA, 25 bp, Homo sapien
gatcagcaggccagtttgtgacgcg

SEQ ID NO: 4716798 - DNA, 25 bp, Homo sapien
caggtttctcataggagtaggctcc

SEQ ID NO: 4716799 - DNA, 25 bp, Homo sapien
gcacacttcagattgcttcttccac

SEQ ID NO: 4716800 - DNA, 25 bp, Homo sapien
taggagtaggctccatgtaagactt

SEQ ID NO: 4716801 - DNA, 25 bp, Homo sapien
gtgcacacttcagattgcttcttcc

SEQ ID NO: 4716802 - DNA, 25 bp, Homo sapien
cagtccagatgggagatgaaatcca

SEQ ID NO: 4716803 - DNA, 25 bp, Homo sapien
cggtggaaggggtacagtccagatg

SEQ ID NO: 4716804 - DNA, 25 bp, Homo sapien
ggtacagtccagatgggagatgaaa

SEQ ID NO: 4716805 - DNA, 25 bp, Homo sapien
gtccagatgggagatgaaatccaaa

SEQ ID NO: 4716806 - DNA, 25 bp, Homo sapien
tgatggggttgccttgttcagcact

SEQ ID NO: 4716807 - DNA, 25 bp, Homo sapien
agagttgctcccagccgctgatggg

SEQ ID NO: 4716808 - DNA, 25 bp, Homo sapien
ggagtaagccatgttcttgctcccc

SEQ ID NO: 4716809 - DNA, 25 bp, Homo sapien
tgttcagcactttttagcaccaggg

SEQ ID NO: 4716810 - DNA, 25 bp, Homo sapien
tccctggctcaagggattcttttgc

SEQ ID NO: 4716811 - DNA, 25 bp, Homo sapien
cagtggcacgatctgcaacctcctc

SEQ ID NO: 4716812 - DNA, 25 bp, Homo sapien
ctcctccctggctcaagggattctt

SEQ ID NO: 4716813 - DNA, 25 bp, Homo sapien
cctggctcaagggattcttttgcct

SEQ ID NO: 4716814 - DNA, 25 bp, Homo sapien
ggcagatgctgggctttttaacctc

SEQ ID NO: 4716815 - DNA, 25 bp, Homo sapien
acggcagatgctgggctttttaacc

SEQ ID NO: 4716816 - DNA, 25 bp, Homo sapien
ttctgacacggcagatgctgggctt

SEQ ID NO: 4716817 - DNA, 25 bp, Homo sapien
cagatgctgggctttttaacctctt

SEQ ID NO: 4716818 - DNA, 25 bp, Homo sapien
tgacccatgggatgacagttgcgat

SEQ ID NO: 4716819 - DNA, 25 bp, Homo sapien
gcccacatatgcacctcctttggtg

SEQ ID NO: 4716820 - DNA, 25 bp, Homo sapien
gaaaggatggctctacattgcagct

SEQ ID NO: 4716821 - DNA, 25 bp, Homo sapien
ttgcgatgcagcttgaaaggatggc

SEQ ID NO: 4716822 - DNA, 25 bp, Homo sapien
gattggagccatcctatccttctgg

SEQ ID NO: 4716823 - DNA, 25 bp, Homo sapien
aggtgattaccccttcatcagggag

SEQ ID NO: 4716824 - DNA, 25 bp, Homo sapien
aatgttgtggacctgaaccagtgcc

SEQ ID NO: 4716825 - DNA, 25 bp, Homo sapien
tcagtgtagctggaaaagccacgca

SEQ ID NO: 4716826 - DNA, 25 bp, Homo sapien
ctttgaactgtggtgcaaacccatt

SEQ ID NO: 4716827 - DNA, 25 bp, Homo sapien
cactaagtggcaagaaattctcacc

SEQ ID NO: 4716828 - DNA, 25 bp, Homo sapien
catgattgtagcctgatagtttcct

SEQ ID NO: 4716829 - DNA, 25 bp, Homo sapien
tgtgtgatcaaagcaatcagccatt

SEQ ID NO: 4716830 - DNA, 25 bp, Homo sapien
tttcaccagatcctccatcctactt

SEQ ID NO: 4716831 - DNA, 25 bp, Homo sapien
gatggggtggcgcagacgtgtaatc

SEQ ID NO: 4716832 - DNA, 25 bp, Homo sapien
gccagatggggtggcgcagacgtgt

SEQ ID NO: 4716833 - DNA, 25 bp, Homo sapien
cggtgtggggaacatagccagactc

SEQ ID NO: 4716834 - DNA, 25 bp, Homo sapien
cttgagacgctggtataaattctgg

SEQ ID NO: 4716835 - DNA, 25 bp, Homo sapien
ctgggtgcttatagtctggtacaaa

SEQ ID NO: 4716836 - DNA, 25 bp, Homo sapien
ataatgacaccgggtagttttattg

SEQ ID NO: 4716837 - DNA, 25 bp, Homo sapien
aataaatcagggactcataagtgcc

SEQ ID NO: 4716838 - DNA, 25 bp, Homo sapien
cataagtgcctaatttatgttgatg

SEQ ID NO: 4716839 - DNA, 25 bp, Homo sapien
gcatattttgagtgatcaccttctc

SEQ ID NO: 4716840 - DNA, 25 bp, Homo sapien
cagtgatgacaacaagcagtgcccc

SEQ ID NO: 4716841 - DNA, 25 bp, Homo sapien
catctggtcagcaaggtatatggac

SEQ ID NO: 4716842 - DNA, 25 bp, Homo sapien
cactgatggagacccggagaagact

SEQ ID NO: 4716843 - DNA, 25 bp, Homo sapien
tgacaccgggtgagttcagaaggcc

SEQ ID NO: 4716844 - DNA, 25 bp, Homo sapien
agacatcctccacgctaaaatgaag

SEQ ID NO: 4716845 - DNA, 25 bp, Homo sapien
gaagttggctccttactttatgccc

SEQ ID NO: 4716846 - DNA, 25 bp, Homo sapien
ggcccacagcttgacttttaaccac

SEQ ID NO: 4716847 - DNA, 25 bp, Homo sapien
cctttgctcatagctcatgggaagc

SEQ ID NO: 4716848 - DNA, 25 bp, Homo sapien
tatggattcctttttaccgtgtcac

SEQ ID NO: 4716849 - DNA, 25 bp, Homo sapien
ggcctgggccagacaaagtataaaa

SEQ ID NO: 4716850 - DNA, 25 bp, Homo sapien
tgtattccatactaaagccatgaag

SEQ ID NO: 4716851 - DNA, 25 bp, Homo sapien
atcattggtaacttgggcctgggcc

SEQ ID NO: 4716852 - DNA, 25 bp, Homo sapien
ggagcccttttgtaagttctcagcc

SEQ ID NO: 4716853 - DNA, 25 bp, Homo sapien
ccttgagattgatgtctgcagagcc

SEQ ID NO: 4716854 - DNA, 25 bp, Homo sapien
gagccgtcatctgctaagtgtccag

SEQ ID NO: 4716855 - DNA, 25 bp, Homo sapien
taggaactctggtccacccttgaga

SEQ ID NO: 4716856 - DNA, 25 bp, Homo sapien
gagaggagaggttaccacttgctaa

SEQ ID NO: 4716857 - DNA, 25 bp, Homo sapien
tgcgcaaggacgtttcagctcttct

SEQ ID NO: 4716858 - DNA, 25 bp, Homo sapien
taagggaatcctcattgcgcaagga

SEQ ID NO: 4716859 - DNA, 25 bp, Homo sapien
cataggagttggacattggttgtgc

SEQ ID NO: 4716860 - DNA, 25 bp, Homo sapien
caaggcagtccccattggagctgac

SEQ ID NO: 4716861 - DNA, 25 bp, Homo sapien
ggcagtccccattggagctgacttc

SEQ ID NO: 4716862 - DNA, 25 bp, Homo sapien
cagtccccattggagctgacttcca

SEQ ID NO: 4716863 - DNA, 25 bp, Homo sapien
aaggcagtccccattggagctgact

SEQ ID NO: 4716864 - DNA, 25 bp, Homo sapien
tacacaaacatcgacggtcccaaaa

SEQ ID NO: 4716865 - DNA, 25 bp, Homo sapien
ctttacacaaacatcgacggtccca

SEQ ID NO: 4716866 - DNA, 25 bp, Homo sapien
aaacatcgacggtcccaaaattctg

SEQ ID NO: 4716867 - DNA, 25 bp, Homo sapien
ctgcctttacacaaacatcgacggt

SEQ ID NO: 4716868 - DNA, 25 bp, Homo sapien
ggggcttgtgagacagtctcttcct

SEQ ID NO: 4716869 - DNA, 25 bp, Homo sapien
agtctcttcctctgactatgacaat

SEQ ID NO: 4716870 - DNA, 25 bp, Homo sapien
gcttgtgagacagtctcttcctctg

SEQ ID NO: 4716871 - DNA, 25 bp, Homo sapien
cagtctcttcctctgactatgacaa

SEQ ID NO: 4716872 - DNA, 25 bp, Homo sapien
ggtatggacaatcgctggtacgacc

SEQ ID NO: 4716873 - DNA, 25 bp, Homo sapien
gacaatcgctggtacgaccattgga

SEQ ID NO: 4716874 - DNA, 25 bp, Homo sapien
cacaggtatggacaatcgctggtac

SEQ ID NO: 4716875 - DNA, 25 bp, Homo sapien
gctggtacgaccattggattgtcca

SEQ ID NO: 4716876 - DNA, 25 bp, Homo sapien
tgcactctcctcgatatcccttggt

SEQ ID NO: 4716877 - DNA, 25 bp, Homo sapien
tctgaatctgcatattgcactctcc

SEQ ID NO: 4716878 - DNA, 25 bp, Homo sapien
ctcgatatcccttggtctgcgaagg

SEQ ID NO: 4716879 - DNA, 25 bp, Homo sapien
gcatattgcactctcctcgatatcc

SEQ ID NO: 4716880 - DNA, 25 bp, Homo sapien
gtttgggtgacaggcgataaagtaa

SEQ ID NO: 4716881 - DNA, 25 bp, Homo sapien
tgacaggcgataaagtaaaggacat

SEQ ID NO: 4716882 - DNA, 25 bp, Homo sapien
gagtttgggtgacaggcgataaagt

SEQ ID NO: 4716883 - DNA, 25 bp, Homo sapien
ggtgacaggcgataaagtaaaggac

SEQ ID NO: 4716884 - DNA, 25 bp, Homo sapien
tggtaatgagctttgatataccttc

SEQ ID NO: 4716885 - DNA, 25 bp, Homo sapien
gatataccttccagtcagtactgtt

SEQ ID NO: 4716886 - DNA, 25 bp, Homo sapien
ctgttggtaatgagctttgatatac

SEQ ID NO: 4716887 - DNA, 25 bp, Homo sapien
taatgagctttgatataccttccag

SEQ ID NO: 4716888 - DNA, 25 bp, Homo sapien
atgtagtcatggacatccacaagag

SEQ ID NO: 4716889 - DNA, 25 bp, Homo sapien
tcaattgcttgatgttagctctctc

SEQ ID NO: 4716890 - DNA, 25 bp, Homo sapien
tcatggacatccacaagaggaaggg

SEQ ID NO: 4716891 - DNA, 25 bp, Homo sapien
ggagtcaattgcttgatgttagctc

SEQ ID NO: 4716892 - DNA, 25 bp, Homo sapien
tcttggtgtagtggatctgatagtt

SEQ ID NO: 4716893 - DNA, 25 bp, Homo sapien
ttacaacgcgcttgggtggagatgc

SEQ ID NO: 4716894 - DNA, 25 bp, Homo sapien
tcagaaatcttggtgtagtggatct

SEQ ID NO: 4716895 - DNA, 25 bp, Homo sapien
atttatttacaacgcgcttgggtgg

SEQ ID NO: 4716896 - DNA, 25 bp, Homo sapien
aaaggattgttaccattgtcccatc

SEQ ID NO: 4716897 - DNA, 25 bp, Homo sapien
cagggggtagaatgtatcttttgca

SEQ ID NO: 4716898 - DNA, 25 bp, Homo sapien
tggcagggggtagaatgtatctttt

SEQ ID NO: 4716899 - DNA, 25 bp, Homo sapien
ttgtcccatctgcagtgagaattta

SEQ ID NO: 4716900 - DNA, 25 bp, Homo sapien
ctctgcagagcaatgtgttcgctgt

SEQ ID NO: 4716901 - DNA, 25 bp, Homo sapien
cctgggatgtgcaacagagggattc

SEQ ID NO: 4716902 - DNA, 25 bp, Homo sapien
cagagggattccatccgactggagg

SEQ ID NO: 4716903 - DNA, 25 bp, Homo sapien
agagcaatgtgttcgctgtgctagc

SEQ ID NO: 4716904 - DNA, 25 bp, Homo sapien
ctgccagagtacactgtgacttgaa

SEQ ID NO: 4716905 - DNA, 25 bp, Homo sapien
tgccagagtacactgtgacttgaac

SEQ ID NO: 4716906 - DNA, 25 bp, Homo sapien
ctctcatactctcccctgcatgcat

SEQ ID NO: 4716907 - DNA, 25 bp, Homo sapien
tgcatgcatgacttccagggttggg

SEQ ID NO: 4716908 - DNA, 25 bp, Homo sapien
cagggttgggggaagctgaacaaag

SEQ ID NO: 4716909 - DNA, 25 bp, Homo sapien
ccaaccctctcatactctcccctgc

SEQ ID NO: 4716910 - DNA, 25 bp, Homo sapien
tcctggtaatcatgagatctgcaat

SEQ ID NO: 4716911 - DNA, 25 bp, Homo sapien
tacgccctgttcatcggctaagcca

SEQ ID NO: 4716912 - DNA, 25 bp, Homo sapien
tgcaatggcagggtctacgccctgt

SEQ ID NO: 4716913 - DNA, 25 bp, Homo sapien
ggtaatcatgagatctgcaatggca

SEQ ID NO: 4716914 - DNA, 25 bp, Homo sapien
cgccagtcacgtggggcgagaccat

SEQ ID NO: 4716915 - DNA, 25 bp, Homo sapien
tggcgccagtcacgtggggcgagac

SEQ ID NO: 4716916 - DNA, 25 bp, Homo sapien
gcaggaagatggcgccagtcacgtg

SEQ ID NO: 4716917 - DNA, 25 bp, Homo sapien
gaagatggcgccagtcacgtggggc

SEQ ID NO: 4716918 - DNA, 25 bp, Homo sapien
agtgcggccgagctgcttgtcaaaa

SEQ ID NO: 4716919 - DNA, 25 bp, Homo sapien
gcaaagctgattctggagtgctgga

SEQ ID NO: 4716920 - DNA, 25 bp, Homo sapien
tccagagctagtgaatcatggtgtc

SEQ ID NO: 4716921 - DNA, 25 bp, Homo sapien
gatgactcattgtcgtgtgcttcca

SEQ ID NO: 4716922 - DNA, 25 bp, Homo sapien
tgagggaggccgaagggttgcagcc

SEQ ID NO: 4716923 - DNA, 25 bp, Homo sapien
gggctggggttcacatggaggctgg

SEQ ID NO: 4716924 - DNA, 25 bp, Homo sapien
ctcccctgagctacatacagtgttt

SEQ ID NO: 4716925 - DNA, 25 bp, Homo sapien
gctacatacagtgtttagagcttag

SEQ ID NO: 4716926 - DNA, 25 bp, Homo sapien
atgagttacgatgattcctttgatc

SEQ ID NO: 4716927 - DNA, 25 bp, Homo sapien
gttacgatgattcctttgatctctg

SEQ ID NO: 4716928 - DNA, 25 bp, Homo sapien
gagttacgatgattcctttgatctc

SEQ ID NO: 4716929 - DNA, 25 bp, Homo sapien
ttacgatgattcctttgatctctgc

SEQ ID NO: 4716930 - DNA, 25 bp, Homo sapien
cacttgatgagggtggtgttcattt

SEQ ID NO: 4716931 - DNA, 25 bp, Homo sapien
ccacttgatgagggtggtgttcatt

SEQ ID NO: 4716932 - DNA, 25 bp, Homo sapien
tcatccacttgatgagggtggtgtt

SEQ ID NO: 4716933 - DNA, 25 bp, Homo sapien
gtcatccacttgatgagggtggtgt

SEQ ID NO: 4716934 - DNA, 25 bp, Homo sapien
cttttgatgagtccgtcccgtgaca

SEQ ID NO: 4716935 - DNA, 25 bp, Homo sapien
gagtccgtcccgtgacagcatccgt

SEQ ID NO: 4716936 - DNA, 25 bp, Homo sapien
tgatgagtccgtcccgtgacagcat

SEQ ID NO: 4716937 - DNA, 25 bp, Homo sapien
tttgatgagtccgtcccgtgacagc

SEQ ID NO: 4716938 - DNA, 25 bp, Homo sapien
cctccaaatctgactctcattgtag

SEQ ID NO: 4716939 - DNA, 25 bp, Homo sapien
gagggtcagagaaatggcatttcct

SEQ ID NO: 4716940 - DNA, 25 bp, Homo sapien
attaacagttttcctcggtgacttg

SEQ ID NO: 4716941 - DNA, 25 bp, Homo sapien
atctgactctcattgtaggattaac

SEQ ID NO: 4716942 - DNA, 25 bp, Homo sapien
gtgtttgctcagcctcatgtttgta

SEQ ID NO: 4716943 - DNA, 25 bp, Homo sapien
tgtttgctcagcctcatgtttgtat

SEQ ID NO: 4716944 - DNA, 25 bp, Homo sapien
cagtctgggcaaggaatcggatatt

SEQ ID NO: 4716945 - DNA, 25 bp, Homo sapien
taatagggacacttaggctggcctg

SEQ ID NO: 4716946 - DNA, 25 bp, Homo sapien
tatgcttatcctctgtcagtctggg

SEQ ID NO: 4716947 - DNA, 25 bp, Homo sapien
gatcactcagcagttgaacaagcat

SEQ ID NO: 4716948 - DNA, 25 bp, Homo sapien
agttcaagacctgcgtggccatcat

SEQ ID NO: 4716949 - DNA, 25 bp, Homo sapien
gagttcaagacctgcgtggccatca

SEQ ID NO: 4716950 - DNA, 25 bp, Homo sapien
caagacctgcgtggccatcatggtg

SEQ ID NO: 4716951 - DNA, 25 bp, Homo sapien
ttcaagacctgcgtggccatcatgg

SEQ ID NO: 4716952 - DNA, 25 bp, Homo sapien
taatcccctgagctacaaattttct

SEQ ID NO: 4716953 - DNA, 25 bp, Homo sapien
ttttgggatcttttgctaccctcag

SEQ ID NO: 4716954 - DNA, 25 bp, Homo sapien
gacttcttgggcatattaaaatgtc

SEQ ID NO: 4716955 - DNA, 25 bp, Homo sapien
gctaccctcagggatctgacttctt

SEQ ID NO: 4716956 - DNA, 25 bp, Homo sapien
agacttgtgtaagtcctgggctgtc

SEQ ID NO: 4716957 - DNA, 25 bp, Homo sapien
ggctgagtaagaaatcccctgtaaa

SEQ ID NO: 4716958 - DNA, 25 bp, Homo sapien
ccctgtaaagtgctgatgtactcca

SEQ ID NO: 4716959 - DNA, 25 bp, Homo sapien
ttgaagtggtccagtagcatcccag

SEQ ID NO: 4716960 - DNA, 25 bp, Homo sapien
tctgttcccgtggtgtctctgcttt

SEQ ID NO: 4716961 - DNA, 25 bp, Homo sapien
ctctgttcccgtggtgtctctgctt

SEQ ID NO: 4716962 - DNA, 25 bp, Homo sapien
gagcctccagtgaagctgaatgaag

SEQ ID NO: 4716963 - DNA, 25 bp, Homo sapien
ttagagcctccagtgaagctgaatg

SEQ ID NO: 4716964 - DNA, 25 bp, Homo sapien
gcctccagtgaagctgaatgaagct

SEQ ID NO: 4716965 - DNA, 25 bp, Homo sapien
tagagcctccagtgaagctgaatga

SEQ ID NO: 4716966 - DNA, 25 bp, Homo sapien
gatgtgatcatgagttgaatgctcg

SEQ ID NO: 4716967 - DNA, 25 bp, Homo sapien
cagggtctagatgttcatggaagtg

SEQ ID NO: 4716968 - DNA, 25 bp, Homo sapien
agtccagctctgttgttgccgtgaa

SEQ ID NO: 4716969 - DNA, 25 bp, Homo sapien
gctcggtgtctctaacagggtctag

SEQ ID NO: 4716970 - DNA, 25 bp, Homo sapien
ggaagccagggcgagcggtaggtgt

SEQ ID NO: 4716971 - DNA, 25 bp, Homo sapien
cggaagccagggcgagcggtaggtg

SEQ ID NO: 4716972 - DNA, 25 bp, Homo sapien
agcggtaggtgtctggtcacacaga

SEQ ID NO: 4716973 - DNA, 25 bp, Homo sapien
gccagagcgtgccccagttcttcac

SEQ ID NO: 4716974 - DNA, 25 bp, Homo sapien
tctggcgttggcaatgtcgtggacc

SEQ ID NO: 4716975 - DNA, 25 bp, Homo sapien
gatggccaccgtcagtgatgggctc

SEQ ID NO: 4716976 - DNA, 25 bp, Homo sapien
tacaacttttcgaatccatctggcg

SEQ ID NO: 4716977 - DNA, 25 bp, Homo sapien
gaaggcttcatgctcctctgtgatg

SEQ ID NO: 4716978 - DNA, 25 bp, Homo sapien
gctgtgtgggcatttcacatagctc

SEQ ID NO: 4716979 - DNA, 25 bp, Homo sapien
cttcttgtaggggagaacgatgcct

SEQ ID NO: 4716980 - DNA, 25 bp, Homo sapien
ggtgtctgatgtgcaaacaagctca

SEQ ID NO: 4716981 - DNA, 25 bp, Homo sapien
cccattttttcctgcgagggctgtg

SEQ ID NO: 4716982 - DNA, 25 bp, Homo sapien
ggtgcctggcatcgtgcagtgttct

SEQ ID NO: 4716983 - DNA, 25 bp, Homo sapien
caggtgcctggcatcgtgcagtgtt

SEQ ID NO: 4716984 - DNA, 25 bp, Homo sapien
acggagggtcagcttcgtactcctc

SEQ ID NO: 4716985 - DNA, 25 bp, Homo sapien
tgcccacacggagggtcagcttcgt

SEQ ID NO: 4716986 - DNA, 25 bp, Homo sapien
catgggattcaggtgtggcagtgag

SEQ ID NO: 4716987 - DNA, 25 bp, Homo sapien
caatgctgatgttatcttcatggga

SEQ ID NO: 4716988 - DNA, 25 bp, Homo sapien
tatcttcatgggattcaggtgtggc

SEQ ID NO: 4716989 - DNA, 25 bp, Homo sapien
ttcaatgctgatgttatcttcatgg

SEQ ID NO: 4716990 - DNA, 25 bp, Homo sapien
gcaggaagctgacccattcttgagg

SEQ ID NO: 4716991 - DNA, 25 bp, Homo sapien
acaggaaagtttatcaagtggattc

SEQ ID NO: 4716992 - DNA, 25 bp, Homo sapien
cttgaggttttggattcgttgccac

SEQ ID NO: 4716993 - DNA, 25 bp, Homo sapien
tctcttgcagttgtcaaaggcctct

SEQ ID NO: 4716994 - DNA, 25 bp, Homo sapien
ttctcttcagccctaatgtgaacca

SEQ ID NO: 4716995 - DNA, 25 bp, Homo sapien
taatgtgaaccattcctaaacagtg

SEQ ID NO: 4716996 - DNA, 25 bp, Homo sapien
gaattttagcaattggagtcttatg

SEQ ID NO: 4716997 - DNA, 25 bp, Homo sapien
tggagtcttatgcaatgtatagaaa

SEQ ID NO: 4716998 - DNA, 25 bp, Homo sapien
gatggccgtgttatatttaggtggt

SEQ ID NO: 4716999 - DNA, 25 bp, Homo sapien
tcgatccgtagatgttctatttaga

SEQ ID NO: 4717000 - DNA, 25 bp, Homo sapien
gcctaaaatgttcaatcttgattgt

SEQ ID NO: 4717001 - DNA, 25 bp, Homo sapien
aacatgtgcaactttgagtaggcat

SEQ ID NO: 4717002 - DNA, 25 bp, Homo sapien
cagtctggactgttgtaaccttagg

SEQ ID NO: 4717003 - DNA, 25 bp, Homo sapien
tgaccttagtgatgcagagttcctg

SEQ ID NO: 4717004 - DNA, 25 bp, Homo sapien
ccaagttacctgacgggtgagaaga

SEQ ID NO: 4717005 - DNA, 25 bp, Homo sapien
tcctcccaatccaaaacgtaactga

SEQ ID NO: 4717006 - DNA, 25 bp, Homo sapien
gctttacagagaaaccctacgggca

SEQ ID NO: 4717007 - DNA, 25 bp, Homo sapien
tatcgcaccgcattttgacgctttg

SEQ ID NO: 4717008 - DNA, 25 bp, Homo sapien
tgcatcgagtcgcattaatggcgct

SEQ ID NO: 4717009 - DNA, 25 bp, Homo sapien
taatggcgcttttgagaacgcgtcg

SEQ ID NO: 4717010 - DNA, 25 bp, Homo sapien
tcagttaaggtgtcatttgaggccc

SEQ ID NO: 4717011 - DNA, 25 bp, Homo sapien
caagagatccggaggtttcagcgca

SEQ ID NO: 4717012 - DNA, 25 bp, Homo sapien
ttgaggccctctatatcgcagcacg

SEQ ID NO: 4717013 - DNA, 25 bp, Homo sapien
cacgttaaatgactcgcgtccagct

SEQ ID NO: 4717014 - DNA, 25 bp, Homo sapien
tgcaaccgcaacactcccgtaggtt

SEQ ID NO: 4717015 - DNA, 25 bp, Homo sapien
taggttcgagttctcccggagctga

SEQ ID NO: 4717016 - DNA, 25 bp, Homo sapien
ccaaatgtcgggataaaagcggcct

SEQ ID NO: 4717017 - DNA, 25 bp, Homo sapien
gagctgagcttctgcggccaaatgt

SEQ ID NO: 4717018 - DNA, 25 bp, Homo sapien
gccccgcgagcaccgccgcgttctg

SEQ ID NO: 4717019 - DNA, 25 bp, Homo sapien
cccaccctcactcccgctggtcctc

SEQ ID NO: 4717020 - DNA, 25 bp, Homo sapien
gccgcgttctggagcgccgcagtct

SEQ ID NO: 4717021 - DNA, 25 bp, Homo sapien
tctggagcgccgcagtctccagccg

SEQ ID NO: 4717022 - DNA, 25 bp, Homo sapien
cagcaggccaacgagagcttggaga

SEQ ID NO: 4717023 - DNA, 25 bp, Homo sapien
tactgccgcttcaaggactgcacct

SEQ ID NO: 4717024 - DNA, 25 bp, Homo sapien
catggcgtcctgtcctggctcaagg

SEQ ID NO: 4717025 - DNA, 25 bp, Homo sapien
atcctcatcatcgagcggcagcggg

SEQ ID NO: 4717026 - DNA, 25 bp, Homo sapien
acctgtttcatggtgagtcaacggg

SEQ ID NO: 4717027 - DNA, 25 bp, Homo sapien
aagtgaggcggactcacctgtttca

SEQ ID NO: 4717028 - DNA, 25 bp, Homo sapien
ccctagcttcggagaaaggctttca

SEQ ID NO: 4717029 - DNA, 25 bp, Homo sapien
tccgccatgctttccaggcctgaag

SEQ ID NO: 4717030 - DNA, 25 bp, Homo sapien
ctccaggggagtgtcctcggacacc

SEQ ID NO: 4717031 - DNA, 25 bp, Homo sapien
tggtgcgatgagaagaaagatctgt

SEQ ID NO: 4717032 - DNA, 25 bp, Homo sapien
tgtcctcggacaccttagactgtgg

SEQ ID NO: 4717033 - DNA, 25 bp, Homo sapien
cttagactgtggtgcgatgagaaga

SEQ ID NO: 4717034 - DNA, 25 bp, Homo sapien
gcactaaggtctcttccaaacccca

SEQ ID NO: 4717035 - DNA, 25 bp, Homo sapien
gggacggctctttccttggtcactg

SEQ ID NO: 4717036 - DNA, 25 bp, Homo sapien
caggagtcccgaggtgagttgacac

SEQ ID NO: 4717037 - DNA, 25 bp, Homo sapien
tccttgcggccgcaatggactgccg

SEQ ID NO: 4717038 - DNA, 25 bp, Homo sapien
ttggcctggccggtttgcacgcagt

SEQ ID NO: 4717039 - DNA, 25 bp, Homo sapien
tcctgtggatctgggacggtttggc

SEQ ID NO: 4717040 - DNA, 25 bp, Homo sapien
tctaggaaccagagttctactgcca

SEQ ID NO: 4717041 - DNA, 25 bp, Homo sapien
caggaaaaacgagagtgtgttccac

SEQ ID NO: 4717042 - DNA, 25 bp, Homo sapien
gggtcgcctgtgctcatctcctagt

SEQ ID NO: 4717043 - DNA, 25 bp, Homo sapien
tacgctgtccagaaaaacggaggca

SEQ ID NO: 4717044 - DNA, 25 bp, Homo sapien
tccaaaaagcacgtgtacaggtctc

SEQ ID NO: 4717045 - DNA, 25 bp, Homo sapien
gactgaagaacgacttggagacggc

SEQ ID NO: 4717046 - DNA, 25 bp, Homo sapien
tgagagccctgagatagtgtccgtg

SEQ ID NO: 4717047 - DNA, 25 bp, Homo sapien
caactcccaaggtccctagcttgcc

SEQ ID NO: 4717048 - DNA, 25 bp, Homo sapien
tcaactcccaaggtccctagcttgc

SEQ ID NO: 4717049 - DNA, 25 bp, Homo sapien
accctgtgggttagagcgacccgca

SEQ ID NO: 4717050 - DNA, 25 bp, Homo sapien
tttacggtctcggagttcacagggc

SEQ ID NO: 4717051 - DNA, 25 bp, Homo sapien
tcaaggtcaactaccaggaagggtc

SEQ ID NO: 4717052 - DNA, 25 bp, Homo sapien
ctgagaggacgtggcgtgaaaccct

SEQ ID NO: 4717053 - DNA, 25 bp, Homo sapien
cgtgaatgttcttcccggctctgct

SEQ ID NO: 4717054 - DNA, 25 bp, Homo sapien
cctgcgtgaatgttcttcccggctc

SEQ ID NO: 4717055 - DNA, 25 bp, Homo sapien
ggagccgcctgcgtgaatgttcttc

SEQ ID NO: 4717056 - DNA, 25 bp, Homo sapien
gccgcctgcgtgaatgttcttcccg

SEQ ID NO: 4717057 - DNA, 25 bp, Homo sapien
gcgtgaatgttcttcccggctctgc

SEQ ID NO: 4717058 - DNA, 25 bp, Homo sapien
cccctggaggctagtggaggtaaat

SEQ ID NO: 4717059 - DNA, 25 bp, Homo sapien
taaatgcgtgaagtcggcgttttcc

SEQ ID NO: 4717060 - DNA, 25 bp, Homo sapien
gagccgcctgcgtgaatgttcttcc

SEQ ID NO: 4717061 - DNA, 25 bp, Homo sapien
ctagtggaggtaaatgcgtgaagtc

SEQ ID NO: 4717062 - DNA, 25 bp, Homo sapien
gagccgcctgcgtgaatgttcttcc

SEQ ID NO: 4717063 - DNA, 25 bp, Homo sapien
aatgcgtgaagtcggcgttttccct

SEQ ID NO: 4717064 - DNA, 25 bp, Homo sapien
cgtgaatgttcttcccggctctgct

SEQ ID NO: 4717065 - DNA, 25 bp, Homo sapien
ctagtggaggtaaatgcgtgaagtc

SEQ ID NO: 4717066 - DNA, 25 bp, Homo sapien
gagccgcctgcgtgaatgttcttcc

SEQ ID NO: 4717067 - DNA, 25 bp, Homo sapien
aatgcgtgaagtcggcgttttccct

SEQ ID NO: 4717068 - DNA, 25 bp, Homo sapien
cgtgaatgttcttcccggctctgct

SEQ ID NO: 4717069 - DNA, 25 bp, Homo sapien
tggcttcccggttgaaaggaatatc

SEQ ID NO: 4717070 - DNA, 25 bp, Homo sapien
ttgaaaggaatatcctctgcagctc

SEQ ID NO: 4717071 - DNA, 25 bp, Homo sapien
tcccggttgaaaggaatatcctctg

SEQ ID NO: 4717072 - DNA, 25 bp, Homo sapien
tctgcttggcttcccggttgaaagg

SEQ ID NO: 4717073 - DNA, 25 bp, Homo sapien
catctgctgcagctattatggcagg

SEQ ID NO: 4717074 - DNA, 25 bp, Homo sapien
agggcactgcaaaagccagcgcggc

SEQ ID NO: 4717075 - DNA, 25 bp, Homo sapien
aggaaagggcactgcaaaagccagc

SEQ ID NO: 4717076 - DNA, 25 bp, Homo sapien
tctgctgcagctattatggcaggga

SEQ ID NO: 4717077 - DNA, 25 bp, Homo sapien
gggcttgaccctcagtgagtagaag

SEQ ID NO: 4717078 - DNA, 25 bp, Homo sapien
gaggatacacccataggtagtgggc

SEQ ID NO: 4717079 - DNA, 25 bp, Homo sapien
cctgaccagacagcgggttccagtg

SEQ ID NO: 4717080 - DNA, 25 bp, Homo sapien
aataaaatgcattcccgttgtggcc

SEQ ID NO: 4717081 - DNA, 25 bp, Homo sapien
tagctggacccagatacctttgttt

SEQ ID NO: 4717082 - DNA, 25 bp, Homo sapien
tggtgacttgttctgagcctagctg

SEQ ID NO: 4717083 - DNA, 25 bp, Homo sapien
agcctagctggacccagataccttt

SEQ ID NO: 4717084 - DNA, 25 bp, Homo sapien
gtgacttgttctgagcctagctgga

SEQ ID NO: 4717085 - DNA, 25 bp, Homo sapien
ctctgtcattccgattttggtatgt

SEQ ID NO: 4717086 - DNA, 25 bp, Homo sapien
ctctctgtcattccgattttggtat

SEQ ID NO: 4717087 - DNA, 25 bp, Homo sapien
tctctctgtcattccgattttggta

SEQ ID NO: 4717088 - DNA, 25 bp, Homo sapien
tctgtcattccgattttggtatgtg

SEQ ID NO: 4717089 - DNA, 25 bp, Homo sapien
tggatttccccctgagagtcacatc

SEQ ID NO: 4717090 - DNA, 25 bp, Homo sapien
gtcacatccgagagcccatcttggg

SEQ ID NO: 4717091 - DNA, 25 bp, Homo sapien
cgagagcccatcttgggctgacact

SEQ ID NO: 4717092 - DNA, 25 bp, Homo sapien
ctgagagtcacatccgagagcccat

SEQ ID NO: 4717093 - DNA, 25 bp, Homo sapien
gtgctcctcgagccaatggcgccat

SEQ ID NO: 4717094 - DNA, 25 bp, Homo sapien
ctgtgctcctcgagccaatggcgcc

SEQ ID NO: 4717095 - DNA, 25 bp, Homo sapien
agcaccgggcggacactctgtgctc

SEQ ID NO: 4717096 - DNA, 25 bp, Homo sapien
cagcaccgggcggacactctgtgct

SEQ ID NO: 4717097 - DNA, 25 bp, Homo sapien
gctttaggcacccaggaaatttctg

SEQ ID NO: 4717098 - DNA, 25 bp, Homo sapien
ccagagacatttatcagacagggaa

SEQ ID NO: 4717099 - DNA, 25 bp, Homo sapien
ttatctaatagccacaaggtagggc

SEQ ID NO: 4717100 - DNA, 25 bp, Homo sapien
tattgaaacctcgtaactcagtgag

SEQ ID NO: 4717101 - DNA, 25 bp, Homo sapien
gctggtccaggcctgagaggcaaca

SEQ ID NO: 4717102 - DNA, 25 bp, Homo sapien
gcggatttccgggatttcagacacc

SEQ ID NO: 4717103 - DNA, 25 bp, Homo sapien
gcaacagctgctggaaaatttggtg

SEQ ID NO: 4717104 - DNA, 25 bp, Homo sapien
agtaataatcgcctgcttctgcgga

SEQ ID NO: 4717105 - DNA, 25 bp, Homo sapien
tcaaagtgagaatgacatttccttt

SEQ ID NO: 4717106 - DNA, 25 bp, Homo sapien
ttcaaagtgagaatgacatttcctt

SEQ ID NO: 4717107 - DNA, 25 bp, Homo sapien
tagggcccttcgtcattcttcggag

SEQ ID NO: 4717108 - DNA, 25 bp, Homo sapien
tgacacggaatctgaccaaggctgg

SEQ ID NO: 4717109 - DNA, 25 bp, Homo sapien
tgtgatcggagaaaataccaaggac

SEQ ID NO: 4717110 - DNA, 25 bp, Homo sapien
cacgaatctacgcaagtagggccct

SEQ ID NO: 4717111 - DNA, 25 bp, Homo sapien
gagcaagcagtccatcagatgggag

SEQ ID NO: 4717112 - DNA, 25 bp, Homo sapien
catacccttgatcttgctacctgag

SEQ ID NO: 4717113 - DNA, 25 bp, Homo sapien
tacctggttgttagactgctgggaa

SEQ ID NO: 4717114 - DNA, 25 bp, Homo sapien
cagtctttaacgtttgaggcagaac

SEQ ID NO: 4717115 - DNA, 25 bp, Homo sapien
gggaaatcctatgtccgcaatccca

SEQ ID NO: 4717116 - DNA, 25 bp, Homo sapien
gattcgaacagcctggcggagagaa

SEQ ID NO: 4717117 - DNA, 25 bp, Homo sapien
gcgacgggtcgcgtatttgattacg

SEQ ID NO: 4717118 - DNA, 25 bp, Homo sapien
gagagaattgtctcccgcagtctcc

SEQ ID NO: 4717119 - DNA, 25 bp, Homo sapien
tacaaatgggaatcccagtgcctgg

SEQ ID NO: 4717120 - DNA, 25 bp, Homo sapien
ttgttgcgggcctactatgtactca

SEQ ID NO: 4717121 - DNA, 25 bp, Homo sapien
taaacagatcctactcgagaggtct

SEQ ID NO: 4717122 - DNA, 25 bp, Homo sapien
tatgtactcagtgcaatgataccca

SEQ ID NO: 4717123 - DNA, 25 bp, Homo sapien
catacctcgggtttagattctggac

SEQ ID NO: 4717124 - DNA, 25 bp, Homo sapien
gacttgtagtcgacttggccacctg

SEQ ID NO: 4717125 - DNA, 25 bp, Homo sapien
gaaagaaggatgtcgctgtacgccc

SEQ ID NO: 4717126 - DNA, 25 bp, Homo sapien
tgcttgtttcccagtccgcgagata

SEQ ID NO: 4717127 - DNA, 25 bp, Homo sapien
agctttatgcctcccacatttgcac

SEQ ID NO: 4717128 - DNA, 25 bp, Homo sapien
tcatccggtccccaagtatcagctt

SEQ ID NO: 4717129 - DNA, 25 bp, Homo sapien
tcaaaggccttcagtgtaactctct

SEQ ID NO: 4717130 - DNA, 25 bp, Homo sapien
ggatgcaggcccagtcacaactctc

SEQ ID NO: 4717131 - DNA, 25 bp, Homo sapien
tcagatgccaccatggcccagccca

SEQ ID NO: 4717132 - DNA, 25 bp, Homo sapien
ctttcacagcccagtgatcttgtgg

SEQ ID NO: 4717133 - DNA, 25 bp, Homo sapien
cctttcacagcccagtgatcttgtg

SEQ ID NO: 4717134 - DNA, 25 bp, Homo sapien
ccaaagttgtgggttgcggacagtc

SEQ ID NO: 4717135 - DNA, 25 bp, Homo sapien
tccaaagttgtgggttgcggacagt

SEQ ID NO: 4717136 - DNA, 25 bp, Homo sapien
gtccaaagttgtgggttgcggacag

SEQ ID NO: 4717137 - DNA, 25 bp, Homo sapien
agtccaaagttgtgggttgcggaca

SEQ ID NO: 4717138 - DNA, 25 bp, Homo sapien
atttttcaggagtaacaggtcactg

SEQ ID NO: 4717139 - DNA, 25 bp, Homo sapien
cccgtacccgctgcacaaaagtaag

SEQ ID NO: 4717140 - DNA, 25 bp, Homo sapien
cgtacccgctgcacaaaagtaagaa

SEQ ID NO: 4717141 - DNA, 25 bp, Homo sapien
tttcaggagtaacaggtcactgctg

SEQ ID NO: 4717142 - DNA, 25 bp, Homo sapien
gagtgtcatccttggaccacttaac

SEQ ID NO: 4717143 - DNA, 25 bp, Homo sapien
cttgggtagagtgtcatccttggac

SEQ ID NO: 4717144 - DNA, 25 bp, Homo sapien
aaaactctgattggtcaggcttggg

SEQ ID NO: 4717145 - DNA, 25 bp, Homo sapien
ctctgattggtcaggcttgggtaga

SEQ ID NO: 4717146 - DNA, 25 bp, Homo sapien
gatgcaggcacaaggtgtagataag

SEQ ID NO: 4717147 - DNA, 25 bp, Homo sapien
cttggtgagtaagatgcaggcacaa

SEQ ID NO: 4717148 - DNA, 25 bp, Homo sapien
ttggtgagtaagatgcaggcacaag

SEQ ID NO: 4717149 - DNA, 25 bp, Homo sapien
atgaagtaggctccttggaaacgtg

SEQ ID NO: 4717150 - DNA, 25 bp, Homo sapien
caaggtagaggcattaatgaagtag

SEQ ID NO: 4717151 - DNA, 25 bp, Homo sapien
tagaggcattaatgaagtaggctcc

SEQ ID NO: 4717152 - DNA, 25 bp, Homo sapien
ggcattaatgaagtaggctccttgg

SEQ ID NO: 4717153 - DNA, 25 bp, Homo sapien
acctggaactggtgagccgtcccag

SEQ ID NO: 4717154 - DNA, 25 bp, Homo sapien
agctctaggttttgccctggtgtta

SEQ ID NO: 4717155 - DNA, 25 bp, Homo sapien
taagactcagaattaggattccagt

SEQ ID NO: 4717156 - DNA, 25 bp, Homo sapien
agtagtttttcattacttcacaggg

SEQ ID NO: 4717157 - DNA, 25 bp, Homo sapien
tgttgtaattgcgtggtttctttcc

SEQ ID NO: 4717158 - DNA, 25 bp, Homo sapien
aagacaactgtgcaagcagtgttgt

SEQ ID NO: 4717159 - DNA, 25 bp, Homo sapien
tccactggctttaccatttcccatt

SEQ ID NO: 4717160 - DNA, 25 bp, Homo sapien
tgatttctgttgatataagttttcc

SEQ ID NO: 4717161 - DNA, 25 bp, Homo sapien
catgcctaactaagtcataggaact

SEQ ID NO: 4717162 - DNA, 25 bp, Homo sapien
gctgcaataacctcctcatgcctaa

SEQ ID NO: 4717163 - DNA, 25 bp, Homo sapien
catggatgcttgtactataattttt

SEQ ID NO: 4717164 - DNA, 25 bp, Homo sapien
aactaggtctccttgcattacatgg

SEQ ID NO: 4717165 - DNA, 25 bp, Homo sapien
cactgagatactgtgggtcagcatc

SEQ ID NO: 4717166 - DNA, 25 bp, Homo sapien
tctagtaatggcatacgagctgttt

SEQ ID NO: 4717167 - DNA, 25 bp, Homo sapien
cgagctgttttagactgactttcca

SEQ ID NO: 4717168 - DNA, 25 bp, Homo sapien
taagttgtgactatgcagagaagaa

SEQ ID NO: 4717169 - DNA, 25 bp, Homo sapien
tggaagtttcttactccactcaggg

SEQ ID NO: 4717170 - DNA, 25 bp, Homo sapien
gaagtttcttactccactcagggct

SEQ ID NO: 4717171 - DNA, 25 bp, Homo sapien
tggaacacgaagaattgcaactttg

SEQ ID NO: 4717172 - DNA, 25 bp, Homo sapien
acacgaagaattgcaactttgctgg

SEQ ID NO: 4717173 - DNA, 25 bp, Homo sapien
aagcaaacgtccctgaagcccatgg

SEQ ID NO: 4717174 - DNA, 25 bp, Homo sapien
caaggttgtgggtaacaatttgaag

SEQ ID NO: 4717175 - DNA, 25 bp, Homo sapien
tcttcttcaagggttggactacaag

SEQ ID NO: 4717176 - DNA, 25 bp, Homo sapien
ctggagagatctcttcttcaagggt

SEQ ID NO: 4717177 - DNA, 25 bp, Homo sapien
gttgcaggttaaatttcctcagaaa

SEQ ID NO: 4717178 - DNA, 25 bp, Homo sapien
cgcatgagaagtaggagtggtgaga

SEQ ID NO: 4717179 - DNA, 25 bp, Homo sapien
taaatttcctcagaaacgcatgaga

SEQ ID NO: 4717180 - DNA, 25 bp, Homo sapien
tgtgtgagtcagctgtcattgagta

SEQ ID NO: 4717181 - DNA, 25 bp, Homo sapien
gcctcttctggaataaataatgatt

SEQ ID NO: 4717182 - DNA, 25 bp, Homo sapien
ggaaatctccttgagttactctgat

SEQ ID NO: 4717183 - DNA, 25 bp, Homo sapien
ctgcctcttctggaataaataatga

SEQ ID NO: 4717184 - DNA, 25 bp, Homo sapien
actctgatctaagatgtgtacacag

SEQ ID NO: 4717185 - DNA, 25 bp, Homo sapien
tatgactttcttcgtattttaccca

SEQ ID NO: 4717186 - DNA, 25 bp, Homo sapien
agcaacaacctgaatattaagcatg

SEQ ID NO: 4717187 - DNA, 25 bp, Homo sapien
tatattctaggtcaggtctgagctc

SEQ ID NO: 4717188 - DNA, 25 bp, Homo sapien
tgagctcatgcctccaaatatgact

SEQ ID NO: 4717189 - DNA, 25 bp, Homo sapien
tggattggtatggcccccctccctg

SEQ ID NO: 4717190 - DNA, 25 bp, Homo sapien
tgttaggctgccccactggcttgct

SEQ ID NO: 4717191 - DNA, 25 bp, Homo sapien
ctaggtccgaggcaggccgccgaat

SEQ ID NO: 4717192 - DNA, 25 bp, Homo sapien
ccgccgaatgtgtggctggttctca

SEQ ID NO: 4717193 - DNA, 25 bp, Homo sapien
tgactgtgacttggatgccagattt

SEQ ID NO: 4717194 - DNA, 25 bp, Homo sapien
ggatgccagatttatccaatttctg

SEQ ID NO: 4717195 - DNA, 25 bp, Homo sapien
tgtttagtaaacaaatcgaatgtac

SEQ ID NO: 4717196 - DNA, 25 bp, Homo sapien
aacaaatcgaatgtactgctgctca

SEQ ID NO: 4717197 - DNA, 25 bp, Homo sapien
actaaagggcatgccgttttcagac

SEQ ID NO: 4717198 - DNA, 25 bp, Homo sapien
tgggaggttttactaaagggcatgc

SEQ ID NO: 4717199 - DNA, 25 bp, Homo sapien
tcagactcttttcatacctaaaaaa

SEQ ID NO: 4717200 - DNA, 25 bp, Homo sapien
catgttctgttgctatccagaagga

SEQ ID NO: 4717201 - DNA, 25 bp, Homo sapien
tgttccaactgcaacaactcacttc

SEQ ID NO: 4717202 - DNA, 25 bp, Homo sapien
cagatcctcagaagggtctagctct

SEQ ID NO: 4717203 - DNA, 25 bp, Homo sapien
ttccgctagaatattcacctccatc

SEQ ID NO: 4717204 - DNA, 25 bp, Homo sapien
gggctcagggtgataccacaaaggg

SEQ ID NO: 4717205 - DNA, 25 bp, Homo sapien
taaacactgaaggtagtttttgatg

SEQ ID NO: 4717206 - DNA, 25 bp, Homo sapien
gagcatggtcaatttcagggctgtg

SEQ ID NO: 4717207 - DNA, 25 bp, Homo sapien
tttgatgagcatggtcaatttcagg

SEQ ID NO: 4717208 - DNA, 25 bp, Homo sapien
aggtagtttttgatgagcatggtca

SEQ ID NO: 4717209 - DNA, 25 bp, Homo sapien
ttactttgtggtaagtaccagtctc

SEQ ID NO: 4717210 - DNA, 25 bp, Homo sapien
actttgtggtaagtaccagtctcca

SEQ ID NO: 4717211 - DNA, 25 bp, Homo sapien
tgtggtaagtaccagtctccatgtc

SEQ ID NO: 4717212 - DNA, 25 bp, Homo sapien
tcacaacagggcttttactttgtgg

SEQ ID NO: 4717213 - DNA, 25 bp, Homo sapien
ccctgatatcttatcaccttgggcc

SEQ ID NO: 4717214 - DNA, 25 bp, Homo sapien
aaccctgatatcttatcaccttggg

SEQ ID NO: 4717215 - DNA, 25 bp, Homo sapien
gaactgaaccctgatatcttatcac

SEQ ID NO: 4717216 - DNA, 25 bp, Homo sapien
tctggaactgaaccctgatatctta

SEQ ID NO: 4717217 - DNA, 25 bp, Homo sapien
tgtggctggaaagatcagtgtgcat

SEQ ID NO: 4717218 - DNA, 25 bp, Homo sapien
aacaatcttgcatttgtcctttatg

SEQ ID NO: 4717219 - DNA, 25 bp, Homo sapien
cctttatgtgcttagaggatgttaa

SEQ ID NO: 4717220 - DNA, 25 bp, Homo sapien
gagtggtttccgattccagggcctg

SEQ ID NO: 4717221 - DNA, 25 bp, Homo sapien
tctcagatttgcatctttgaaccat

SEQ ID NO: 4717222 - DNA, 25 bp, Homo sapien
tctctcagatttgcatctttgaacc

SEQ ID NO: 4717223 - DNA, 25 bp, Homo sapien
accctgtctctcagatttgcatctt

SEQ ID NO: 4717224 - DNA, 25 bp, Homo sapien
tgtctctcagatttgcatctttgaa

SEQ ID NO: 4717225 - DNA, 25 bp, Homo sapien
taccagctgtgtgcctgaaggcgag

SEQ ID NO: 4717226 - DNA, 25 bp, Homo sapien
gtcagtgtttctgaaggcttccatt

SEQ ID NO: 4717227 - DNA, 25 bp, Homo sapien
tgtggtactaaactgagaacagcac

SEQ ID NO: 4717228 - DNA, 25 bp, Homo sapien
tccattctctctcgcatgggaggag

SEQ ID NO: 4717229 - DNA, 25 bp, Homo sapien
tatccggaaggattgcccttgggcc

SEQ ID NO: 4717230 - DNA, 25 bp, Homo sapien
tttgtgatgttttgctagaaccaat

SEQ ID NO: 4717231 - DNA, 25 bp, Homo sapien
cccttgggccttattttgatcactg

SEQ ID NO: 4717232 - DNA, 25 bp, Homo sapien
tccaacttcatgacaaacgtgaatt

SEQ ID NO: 4717233 - DNA, 25 bp, Homo sapien
tgaagtttgccttgcaaagtaggca

SEQ ID NO: 4717234 - DNA, 25 bp, Homo sapien
gatgggacgctaagtgaagtttgcc

SEQ ID NO: 4717235 - DNA, 25 bp, Homo sapien
taagtgaagtttgccttgcaaagta

SEQ ID NO: 4717236 - DNA, 25 bp, Homo sapien
gacgctaagtgaagtttgccttgca

SEQ ID NO: 4717237 - DNA, 25 bp, Homo sapien
taagtagtctccgacccatcctgtt

SEQ ID NO: 4717238 - DNA, 25 bp, Homo sapien
tgattttatagccatcacctagctg

SEQ ID NO: 4717239 - DNA, 25 bp, Homo sapien
ttctgcacaacactcatatgctgag

SEQ ID NO: 4717240 - DNA, 25 bp, Homo sapien
caagaaagtactgcgtgatgcttag

SEQ ID NO: 4717241 - DNA, 25 bp, Homo sapien
catacctcttgttcccgctctgagt

SEQ ID NO: 4717242 - DNA, 25 bp, Homo sapien
agctttggaagtcgcagagctcagc

SEQ ID NO: 4717243 - DNA, 25 bp, Homo sapien
ggacaagctttggaagtcgcagagc

SEQ ID NO: 4717244 - DNA, 25 bp, Homo sapien
ctccctcggggacaagctttggaag

SEQ ID NO: 4717245 - DNA, 25 bp, Homo sapien
taaagaacgtgaggggctcaggtga

SEQ ID NO: 4717246 - DNA, 25 bp, Homo sapien
ctaaagaacgtgaggggctcaggtg

SEQ ID NO: 4717247 - DNA, 25 bp, Homo sapien
agaacgtgaggggctcaggtgatcc

SEQ ID NO: 4717248 - DNA, 25 bp, Homo sapien
aagaacgtgaggggctcaggtgatc

SEQ ID NO: 4717249 - DNA, 25 bp, Homo sapien
aactggttttagagggctcatgatg

SEQ ID NO: 4717250 - DNA, 25 bp, Homo sapien
taaactggttttagagggctcatga

SEQ ID NO: 4717251 - DNA, 25 bp, Homo sapien
gatgtttctgaaacccatgacagtg

SEQ ID NO: 4717252 - DNA, 25 bp, Homo sapien
aatgtttgcatgtgctgagagggtc

SEQ ID NO: 4717253 - DNA, 25 bp, Homo sapien
catgccttgtccactcaacctcctt

SEQ ID NO: 4717254 - DNA, 25 bp, Homo sapien
tgcttcctacagtgagtcttggccc

SEQ ID NO: 4717255 - DNA, 25 bp, Homo sapien
gagggtaattcgtcccatgccttgt

SEQ ID NO: 4717256 - DNA, 25 bp, Homo sapien
gattcctggagggtaattcgtccca

SEQ ID NO: 4717257 - DNA, 25 bp, Homo sapien
cctcagcaaggcttttagttacctc

SEQ ID NO: 4717258 - DNA, 25 bp, Homo sapien
gggatgctcgtcctcttatatctac

SEQ ID NO: 4717259 - DNA, 25 bp, Homo sapien
tagttacctcttgcccataactttg

SEQ ID NO: 4717260 - DNA, 25 bp, Homo sapien
cattgtcttaggcagatcctctctt

SEQ ID NO: 4717261 - DNA, 25 bp, Homo sapien
gtaagaaatgcccaataaccaagaa

SEQ ID NO: 4717262 - DNA, 25 bp, Homo sapien
taagaaatgcccaataaccaagaag

SEQ ID NO: 4717263 - DNA, 25 bp, Homo sapien
gcattccttaggagagcccttggta

SEQ ID NO: 4717264 - DNA, 25 bp, Homo sapien
ttccttaggagagcccttggtataa

SEQ ID NO: 4717265 - DNA, 25 bp, Homo sapien
aatgtcctgtcatacatccctggtg

SEQ ID NO: 4717266 - DNA, 25 bp, Homo sapien
gacaccctcgagtatactagctgca

SEQ ID NO: 4717267 - DNA, 25 bp, Homo sapien
tgttgatagacatgtcaagacaccc

SEQ ID NO: 4717268 - DNA, 25 bp, Homo sapien
tccctggtgccacatgatggtaggc

SEQ ID NO: 4717269 - DNA, 25 bp, Homo sapien
gctttcagttcaaaggtgacctttc

SEQ ID NO: 4717270 - DNA, 25 bp, Homo sapien
tacaggctaccggttcttcctctaa

SEQ ID NO: 4717271 - DNA, 25 bp, Homo sapien
ccagggaagctcctatccagaggtt

SEQ ID NO: 4717272 - DNA, 25 bp, Homo sapien
gaaagacgagcttggtgtcacacag

SEQ ID NO: 4717273 - DNA, 25 bp, Homo sapien
cagggcagcttggacagatgacggg

SEQ ID NO: 4717274 - DNA, 25 bp, Homo sapien
cagcttggacagatgacgggccaga

SEQ ID NO: 4717275 - DNA, 25 bp, Homo sapien
ggcagcttggacagatgacgggcca

SEQ ID NO: 4717276 - DNA, 25 bp, Homo sapien
agcttggacagatgacgggccagat

SEQ ID NO: 4717277 - DNA, 25 bp, Homo sapien
catctgtggaggctggcttaacctg

SEQ ID NO: 4717278 - DNA, 25 bp, Homo sapien
ccaggagtcgtaaaagttgggctag

SEQ ID NO: 4717279 - DNA, 25 bp, Homo sapien
taaaagttgggctagattctgtcat

SEQ ID NO: 4717280 - DNA, 25 bp, Homo sapien
ggctggcttaacctgccattcttca

SEQ ID NO: 4717281 - DNA, 25 bp, Homo sapien
caatagatcagtaactgtagttgtg

SEQ ID NO: 4717282 - DNA, 25 bp, Homo sapien
ctgtagttgtgttaaacatctagaa

SEQ ID NO: 4717283 - DNA, 25 bp, Homo sapien
gagtgatgtccgtttcacgctcctt

SEQ ID NO: 4717284 - DNA, 25 bp, Homo sapien
tccggctagactggtcctgagtgat

SEQ ID NO: 4717285 - DNA, 25 bp, Homo sapien
agacctgactgaccatgtgcaagca

SEQ ID NO: 4717286 - DNA, 25 bp, Homo sapien
acccggagtggtgggatagtgccac

SEQ ID NO: 4717287 - DNA, 25 bp, Homo sapien
tgtaactggatacgaataacaaact

SEQ ID NO: 4717288 - DNA, 25 bp, Homo sapien
acttgcagtagggaaaatggaccga

SEQ ID NO: 4717289 - DNA, 25 bp, Homo sapien
cttgcccccaagtgtggtgccactt

SEQ ID NO: 4717290 - DNA, 25 bp, Homo sapien
gcacttccaggttatcagcccagct

SEQ ID NO: 4717291 - DNA, 25 bp, Homo sapien
tccttgagcacttccaggttatcag

SEQ ID NO: 4717292 - DNA, 25 bp, Homo sapien
tgccacttccgggttccttgagcac

SEQ ID NO: 4717293 - DNA, 25 bp, Homo sapien
cttgctgttgcaccggccttctcca

SEQ ID NO: 4717294 - DNA, 25 bp, Homo sapien
agtaggtacccctcttgagtccttg

SEQ ID NO: 4717295 - DNA, 25 bp, Homo sapien
ttctccacaggacatcagtaacttc

SEQ ID NO: 4717296 - DNA, 25 bp, Homo sapien
gagtccttgctgttgcaccggcctt

SEQ ID NO: 4717297 - DNA, 25 bp, Homo sapien
tggaccttcactataataggttgag

SEQ ID NO: 4717298 - DNA, 25 bp, Homo sapien
cttctggaccttcactataataggt

SEQ ID NO: 4717299 - DNA, 25 bp, Homo sapien
ccttcactataataggttgagtcca

SEQ ID NO: 4717300 - DNA, 25 bp, Homo sapien
ctggcttctggaccttcactataat

SEQ ID NO: 4717301 - DNA, 25 bp, Homo sapien
tgtcctctataattgtagaatccca

SEQ ID NO: 4717302 - DNA, 25 bp, Homo sapien
tccaaccactttctggtcccaggct

SEQ ID NO: 4717303 - DNA, 25 bp, Homo sapien
cacagcctgtcctctataattgtag

SEQ ID NO: 4717304 - DNA, 25 bp, Homo sapien
cctctataattgtagaatcccattt

SEQ ID NO: 4717305 - DNA, 25 bp, Homo sapien
cagcagagggatccctcatgcaaat

SEQ ID NO: 4717306 - DNA, 25 bp, Homo sapien
agagggatccctcatgcaaatagga

SEQ ID NO: 4717307 - DNA, 25 bp, Homo sapien
gcagagggatccctcatgcaaatag

SEQ ID NO: 4717308 - DNA, 25 bp, Homo sapien
gagggatccctcatgcaaataggat

SEQ ID NO: 4717309 - DNA, 25 bp, Homo sapien
agtctcagaaagttggctctcattg

SEQ ID NO: 4717310 - DNA, 25 bp, Homo sapien
cagtctcagaaagttggctctcatt

SEQ ID NO: 4717311 - DNA, 25 bp, Homo sapien
tctcagaaagttggctctcattggc

SEQ ID NO: 4717312 - DNA, 25 bp, Homo sapien
gtctcagaaagttggctctcattgg

SEQ ID NO: 4717313 - DNA, 25 bp, Homo sapien
gaagagtccaggttcttatgatgcc

SEQ ID NO: 4717314 - DNA, 25 bp, Homo sapien
agaccacacatgtccttggtcagag

SEQ ID NO: 4717315 - DNA, 25 bp, Homo sapien
tgaagaccacacatgtccttggtca

SEQ ID NO: 4717316 - DNA, 25 bp, Homo sapien
gccaggagacggaacaggctctgaa

SEQ ID NO: 4717317 - DNA, 25 bp, Homo sapien
acttgttatctttcgaaaataggct

SEQ ID NO: 4717318 - DNA, 25 bp, Homo sapien
ctgttttttatagtggctatgctaa

SEQ ID NO: 4717319 - DNA, 25 bp, Homo sapien
catactgttttttatagtggctatg

SEQ ID NO: 4717320 - DNA, 25 bp, Homo sapien
ctttcgaaaataggctttctaactg

SEQ ID NO: 4717321 - DNA, 25 bp, Homo sapien
gttgcccttagaacttctctcagag

SEQ ID NO: 4717322 - DNA, 25 bp, Homo sapien
aagacagatggatccccggaggctc

SEQ ID NO: 4717323 - DNA, 25 bp, Homo sapien
ggaggctctttaggcttttcgttgc

SEQ ID NO: 4717324 - DNA, 25 bp, Homo sapien
ggtatccttgtgacagccaccaaat

SEQ ID NO: 4717325 - DNA, 25 bp, Homo sapien
agatggtctctatggcgaggtctcc

SEQ ID NO: 4717326 - DNA, 25 bp, Homo sapien
gtgagacaatctgccacaagaggtg

SEQ ID NO: 4717327 - DNA, 25 bp, Homo sapien
cgaggtctcctctagcgcataggct

SEQ ID NO: 4717328 - DNA, 25 bp, Homo sapien
gagtgttatccccaaccatagcaca

SEQ ID NO: 4717329 - DNA, 25 bp, Homo sapien
ttgtcaacatattgcaggtgcacac

SEQ ID NO: 4717330 - DNA, 25 bp, Homo sapien
tggaacctgatataaccattcctgt

SEQ ID NO: 4717331 - DNA, 25 bp, Homo sapien
tcctgttgtaatctaaagccttgtc

SEQ ID NO: 4717332 - DNA, 25 bp, Homo sapien
aaaagaggcgaagccaactgggaag

SEQ ID NO: 4717333 - DNA, 25 bp, Homo sapien
tccttgcagatctgaagttcccttc

SEQ ID NO: 4717334 - DNA, 25 bp, Homo sapien
gaatgcatggttgtttttgctagcc

SEQ ID NO: 4717335 - DNA, 25 bp, Homo sapien
ttttttggtatttcacatggcagca

SEQ ID NO: 4717336 - DNA, 25 bp, Homo sapien
tgggccatctttgcgaaatatctta

SEQ ID NO: 4717337 - DNA, 25 bp, Homo sapien
cagtgtcagggtccagtcatggaga

SEQ ID NO: 4717338 - DNA, 25 bp, Homo sapien
aaagcatgtagaaacagattgggag

SEQ ID NO: 4717339 - DNA, 25 bp, Homo sapien
acagtgtcagggtccagtcatggag

SEQ ID NO: 4717340 - DNA, 25 bp, Homo sapien
cagattgggagaaggcattgggctt

SEQ ID NO: 4717341 - DNA, 25 bp, Homo sapien
agacctattaacaagtaattggcct

SEQ ID NO: 4717342 - DNA, 25 bp, Homo sapien
tgcagtccttggctcggaaaagtct

SEQ ID NO: 4717343 - DNA, 25 bp, Homo sapien
gaaaagtcttgttggcgaagtctga

SEQ ID NO: 4717344 - DNA, 25 bp, Homo sapien
ggaaagtcacccagtttaactatga

SEQ ID NO: 4717345 - DNA, 25 bp, Homo sapien
gtctgatactgaaaagtaatcttct

SEQ ID NO: 4717346 - DNA, 25 bp, Homo sapien
ttcaaatgggaccgtttccaaatga

SEQ ID NO: 4717347 - DNA, 25 bp, Homo sapien
tcaaatgggaccgtttccaaatgac

SEQ ID NO: 4717348 - DNA, 25 bp, Homo sapien
tcaggaaatccaaaaatgagcatgc

SEQ ID NO: 4717349 - DNA, 25 bp, Homo sapien
tggaaaccatggcaattgagaagcc

SEQ ID NO: 4717350 - DNA, 25 bp, Homo sapien
tccatctgtcatctctgcgcttccc

SEQ ID NO: 4717351 - DNA, 25 bp, Homo sapien
gagaagcctccggtttcattcaaca

SEQ ID NO: 4717352 - DNA, 25 bp, Homo sapien
tccctctccgcatttggtctctttg

SEQ ID NO: 4717353 - DNA, 25 bp, Homo sapien
tcactcctctctgcgaataggcatg

SEQ ID NO: 4717354 - DNA, 25 bp, Homo sapien
ggtaggcacttgatccaaattgggc

SEQ ID NO: 4717355 - DNA, 25 bp, Homo sapien
caaattgggcaaactaggttcttgc

SEQ ID NO: 4717356 - DNA, 25 bp, Homo sapien
gatgaataccgatcctgctcttgtt

SEQ ID NO: 4717357 - DNA, 25 bp, Homo sapien
catgtcttggaatgctcgtgccagc

SEQ ID NO: 4717358 - DNA, 25 bp, Homo sapien
gatgctccacctgatgacccatttg

SEQ ID NO: 4717359 - DNA, 25 bp, Homo sapien
ggcaccttcctaaagatggatgctc

SEQ ID NO: 4717360 - DNA, 25 bp, Homo sapien
gaaatatagcagctgcatgtcttgg

SEQ ID NO: 4717361 - DNA, 25 bp, Homo sapien
ttgtgaacttgatctgtaagaaatt

SEQ ID NO: 4717362 - DNA, 25 bp, Homo sapien
tgatctgtaagaaatttgccatgta

SEQ ID NO: 4717363 - DNA, 25 bp, Homo sapien
tgaacttgatctgtaagaaatttgc

SEQ ID NO: 4717364 - DNA, 25 bp, Homo sapien
cttgatctgtaagaaatttgccatg

SEQ ID NO: 4717365 - DNA, 25 bp, Homo sapien
aatatactttccatatgatgagccc

SEQ ID NO: 4717366 - DNA, 25 bp, Homo sapien
tgcttttggagtatccccaggaggg

SEQ ID NO: 4717367 - DNA, 25 bp, Homo sapien
gaagcagccagtttccctacagaat

SEQ ID NO: 4717368 - DNA, 25 bp, Homo sapien
tccatatgatgagcccagagaagca

SEQ ID NO: 4717369 - DNA, 25 bp, Homo sapien
tcatgccttcttcactgggcagatt

SEQ ID NO: 4717370 - DNA, 25 bp, Homo sapien
tcctcttccctgtccgctaaaggga

SEQ ID NO: 4717371 - DNA, 25 bp, Homo sapien
ttggtattgtcttctgggtccctca

SEQ ID NO: 4717372 - DNA, 25 bp, Homo sapien
ctgtccgctaaagggaatttggtat

SEQ ID NO: 4717373 - DNA, 25 bp, Homo sapien
caagatattgcactacagtaccaca

SEQ ID NO: 4717374 - DNA, 25 bp, Homo sapien
cacatggtagctaggttttttaagg

SEQ ID NO: 4717375 - DNA, 25 bp, Homo sapien
ggatcccaagctgattgatatttga

SEQ ID NO: 4717376 - DNA, 25 bp, Homo sapien
tattctggacaagatcccatgcatc

SEQ ID NO: 4717377 - DNA, 25 bp, Homo sapien
gtttatcctcctgaactgccacaca

SEQ ID NO: 4717378 - DNA, 25 bp, Homo sapien
ctcctgaactgccacacactctctg

SEQ ID NO: 4717379 - DNA, 25 bp, Homo sapien
cctgaactgccacacactctctgaa

SEQ ID NO: 4717380 - DNA, 25 bp, Homo sapien
ctgtttatcctcctgaactgccaca

SEQ ID NO: 4717381 - DNA, 25 bp, Homo sapien
tactgcatgcaggtaacaccgaaca

SEQ ID NO: 4717382 - DNA, 25 bp, Homo sapien
catggacagactgcctggaacacag

SEQ ID NO: 4717383 - DNA, 25 bp, Homo sapien
cccaggattcggaggcctagaggta

SEQ ID NO: 4717384 - DNA, 25 bp, Homo sapien
caagaggtggagtgataacatggac

SEQ ID NO: 4717385 - DNA, 25 bp, Homo sapien
tgttcgggtagattggcccctgctg

SEQ ID NO: 4717386 - DNA, 25 bp, Homo sapien
cccatattccaccataaatattcat

SEQ ID NO: 4717387 - DNA, 25 bp, Homo sapien
ttcattttaacactcaaacgatccc

SEQ ID NO: 4717388 - DNA, 25 bp, Homo sapien
acgatccccagctgttcgggtagat

SEQ ID NO: 4717389 - DNA, 25 bp, Homo sapien
gaaataccatccaattctgtaaatg

SEQ ID NO: 4717390 - DNA, 25 bp, Homo sapien
tgaacatcttggaaataccatccaa

SEQ ID NO: 4717391 - DNA, 25 bp, Homo sapien
aatggcaagaggttggcttctgaac

SEQ ID NO: 4717392 - DNA, 25 bp, Homo sapien
ctgcattgcaaaatggcaagaggtt

SEQ ID NO: 4717393 - DNA, 25 bp, Homo sapien
agtccttgacaacactgaaggtttt

SEQ ID NO: 4717394 - DNA, 25 bp, Homo sapien
cagtagtcacagtccacagttgtca

SEQ ID NO: 4717395 - DNA, 25 bp, Homo sapien
caaagtccttgacaacactgaaggt

SEQ ID NO: 4717396 - DNA, 25 bp, Homo sapien
aaagtccttgacaacactgaaggtt

SEQ ID NO: 4717397 - DNA, 25 bp, Homo sapien
tattggctatttcaatctcaggcag

SEQ ID NO: 4717398 - DNA, 25 bp, Homo sapien
ggctatttcaatctcaggcagcttc

SEQ ID NO: 4717399 - DNA, 25 bp, Homo sapien
gctattggctatttcaatctcaggc

SEQ ID NO: 4717400 - DNA, 25 bp, Homo sapien
caggcagagctattggctatttcaa

SEQ ID NO: 4717401 - DNA, 25 bp, Homo sapien
tcaaggtttcatggcctgaactgcc

SEQ ID NO: 4717402 - DNA, 25 bp, Homo sapien
ttcaatggaacaggaagttgagggc

SEQ ID NO: 4717403 - DNA, 25 bp, Homo sapien
aactgcctgaactactgcagtttca

SEQ ID NO: 4717404 - DNA, 25 bp, Homo sapien
aagttgagggcaccagagcgcaagt

SEQ ID NO: 4717405 - DNA, 25 bp, Homo sapien
gaatgggccatgcatattgacagcc

SEQ ID NO: 4717406 - DNA, 25 bp, Homo sapien
agttgaatgggccatgcatattgac

SEQ ID NO: 4717407 - DNA, 25 bp, Homo sapien
aggaagagttgaatgggccatgcat

SEQ ID NO: 4717408 - DNA, 25 bp, Homo sapien
atgggccatgcatattgacagccac

SEQ ID NO: 4717409 - DNA, 25 bp, Homo sapien
cctcgtggtacccaagttgctgctg

SEQ ID NO: 4717410 - DNA, 25 bp, Homo sapien
gactggtgctgccaagctgtcggct

SEQ ID NO: 4717411 - DNA, 25 bp, Homo sapien
agctgtcggctgaacacaggccttt

SEQ ID NO: 4717412 - DNA, 25 bp, Homo sapien
ctttccgagcaggtttggccctcgt

SEQ ID NO: 4717413 - DNA, 25 bp, Homo sapien
gagttcattgatttgatacagcttc

SEQ ID NO: 4717414 - DNA, 25 bp, Homo sapien
tcgaaagggtacgcagggctgtccc

SEQ ID NO: 4717415 - DNA, 25 bp, Homo sapien
tcttgaaagtgttaaaagacttcag

SEQ ID NO: 4717416 - DNA, 25 bp, Homo sapien
caagcctgtgcccggtgggtcgaaa

SEQ ID NO: 4717417 - DNA, 25 bp, Homo sapien
tcaatttcccaagtgcctcttccat

SEQ ID NO: 4717418 - DNA, 25 bp, Homo sapien
ttcagccatgtgatcaatttcccaa

SEQ ID NO: 4717419 - DNA, 25 bp, Homo sapien
agccatgtgatcaatttcccaagtg

SEQ ID NO: 4717420 - DNA, 25 bp, Homo sapien
tgatcaatttcccaagtgcctcttc

SEQ ID NO: 4717421 - DNA, 25 bp, Homo sapien
cacatgctgagttatacgaggaaca

SEQ ID NO: 4717422 - DNA, 25 bp, Homo sapien
gactatttcttcctaaagcagcctg

SEQ ID NO: 4717423 - DNA, 25 bp, Homo sapien
gaacattaatgggacgcttcctggg

SEQ ID NO: 4717424 - DNA, 25 bp, Homo sapien
cttcctgggatagaaaacgatggcc

SEQ ID NO: 4717425 - DNA, 25 bp, Homo sapien
gcttttccctatttgactcttgaag

SEQ ID NO: 4717426 - DNA, 25 bp, Homo sapien
gctgctgataatcagaagagtcatc

SEQ ID NO: 4717427 - DNA, 25 bp, Homo sapien
ggaaggttgtctgaatcctggatca

SEQ ID NO: 4717428 - DNA, 25 bp, Homo sapien
aaggccattccaagtgcttttccct

SEQ ID NO: 4717429 - DNA, 25 bp, Homo sapien
acagctctggactacagggcccaat

SEQ ID NO: 4717430 - DNA, 25 bp, Homo sapien
ttaacagctctggactacagggccc

SEQ ID NO: 4717431 - DNA, 25 bp, Homo sapien
aattttaacagctctggactacagg

SEQ ID NO: 4717432 - DNA, 25 bp, Homo sapien
ctctggactacagggcccaattgcc

SEQ ID NO: 4717433 - DNA, 25 bp, Homo sapien
cattttcctggtgtgttaggagttt

SEQ ID NO: 4717434 - DNA, 25 bp, Homo sapien
tcacattttcctggtgtgttaggag

SEQ ID NO: 4717435 - DNA, 25 bp, Homo sapien
agaagtcttcctgaattttagcagg

SEQ ID NO: 4717436 - DNA, 25 bp, Homo sapien
gaagtcttcctgaattttagcagga

SEQ ID NO: 4717437 - DNA, 25 bp, Homo sapien
gttaatgaatgaaacccaaccatca

SEQ ID NO: 4717438 - DNA, 25 bp, Homo sapien
ttaatgaatgaaacccaaccatcat

SEQ ID NO: 4717439 - DNA, 25 bp, Homo sapien
ctgttaatgaatgaaacccaaccat

SEQ ID NO: 4717440 - DNA, 25 bp, Homo sapien
tgttaatgaatgaaacccaaccatc

SEQ ID NO: 4717441 - DNA, 25 bp, Homo sapien
gttgaaggggagcacctaagcacct

SEQ ID NO: 4717442 - DNA, 25 bp, Homo sapien
tcatgctcactcttaaatgttcatt

SEQ ID NO: 4717443 - DNA, 25 bp, Homo sapien
tggtcattcctcgtatccaaagtgg

SEQ ID NO: 4717444 - DNA, 25 bp, Homo sapien
tcttggtcattcctcgtatccaaag

SEQ ID NO: 4717445 - DNA, 25 bp, Homo sapien
attcctcgtatccaaagtggccctt

SEQ ID NO: 4717446 - DNA, 25 bp, Homo sapien
tccatccaccttgcgatttctcttc

SEQ ID NO: 4717447 - DNA, 25 bp, Homo sapien
atccaccttgcgatttctcttccag

SEQ ID NO: 4717448 - DNA, 25 bp, Homo sapien
tcttccagccttcacacattttttc

SEQ ID NO: 4717449 - DNA, 25 bp, Homo sapien
tccaatttcaccaatgtgtccccat

SEQ ID NO: 4717450 - DNA, 25 bp, Homo sapien
gaaggcagcacgtctgtatttatca

SEQ ID NO: 4717451 - DNA, 25 bp, Homo sapien
gcctctctgtgtccggaaggcagca

SEQ ID NO: 4717452 - DNA, 25 bp, Homo sapien
tgcaaagcagctccgatatccttac

SEQ ID NO: 4717453 - DNA, 25 bp, Homo sapien
cctgcagtgcagaataccagtgcct

SEQ ID NO: 4717454 - DNA, 25 bp, Homo sapien
cttgtctgatggctccctcatttca

SEQ ID NO: 4717455 - DNA, 25 bp, Homo sapien
ttattcgagttcattgttaaatcta

SEQ ID NO: 4717456 - DNA, 25 bp, Homo sapien
ttcgagttcattgttaaatctatta

SEQ ID NO: 4717457 - DNA, 25 bp, Homo sapien
gcttgtctgatggctccctcatttc

SEQ ID NO: 4717458 - DNA, 25 bp, Homo sapien
tatgggaattagtatgaagttctat

SEQ ID NO: 4717459 - DNA, 25 bp, Homo sapien
tgggaattagtatgaagttctattt

SEQ ID NO: 4717460 - DNA, 25 bp, Homo sapien
atgggaattagtatgaagttctatt

SEQ ID NO: 4717461 - DNA, 25 bp, Homo sapien
ttatgggaattagtatgaagttcta

SEQ ID NO: 4717462 - DNA, 25 bp, Homo sapien
ctgccatccctttgagggtgtctgg

SEQ ID NO: 4717463 - DNA, 25 bp, Homo sapien
cttgttgtggccagctgccatccct

SEQ ID NO: 4717464 - DNA, 25 bp, Homo sapien
gctctgagcagccttgttgtggcca

SEQ ID NO: 4717465 - DNA, 25 bp, Homo sapien
gcagccttgttgtggccagctgcca

SEQ ID NO: 4717466 - DNA, 25 bp, Homo sapien
gaatgaccttgattacaaatgcctg

SEQ ID NO: 4717467 - DNA, 25 bp, Homo sapien
agaatgaccttgattacaaatgcct

SEQ ID NO: 4717468 - DNA, 25 bp, Homo sapien
aagaatgaccttgattacaaatgcc

SEQ ID NO: 4717469 - DNA, 25 bp, Homo sapien
gcagtgccggagaagctaggaatct

SEQ ID NO: 4717470 - DNA, 25 bp, Homo sapien
gtttcttgattaggccccggagcca

SEQ ID NO: 4717471 - DNA, 25 bp, Homo sapien
ggccttggcggcatcttcagtggta

SEQ ID NO: 4717472 - DNA, 25 bp, Homo sapien
ttcagtggtacctcgagcagtgccg

SEQ ID NO: 4717473 - DNA, 25 bp, Homo sapien
ttctccctcggatgctttcatctca

SEQ ID NO: 4717474 - DNA, 25 bp, Homo sapien
gaaaagttataacacctgtaatgta

SEQ ID NO: 4717475 - DNA, 25 bp, Homo sapien
gatttagatttacagttcccgaggc

SEQ ID NO: 4717476 - DNA, 25 bp, Homo sapien
cgaggcagtctgattctgaggaaaa

SEQ ID NO: 4717477 - DNA, 25 bp, Homo sapien
acaacagcttcttatgaactttcag

SEQ ID NO: 4717478 - DNA, 25 bp, Homo sapien
catggcaaccctgaggaagctaagc

SEQ ID NO: 4717479 - DNA, 25 bp, Homo sapien
gaagctaagcttgcttctagagaac

SEQ ID NO: 4717480 - DNA, 25 bp, Homo sapien
tgcttctagagaacacaacagcttc

SEQ ID NO: 4717481 - DNA, 25 bp, Homo sapien
tatgccagttcttgccttccataat

SEQ ID NO: 4717482 - DNA, 25 bp, Homo sapien
ttgccttccataatttaagctgtct

SEQ ID NO: 4717483 - DNA, 25 bp, Homo sapien
gccttccataatttaagctgtctgt

SEQ ID NO: 4717484 - DNA, 25 bp, Homo sapien
agttcttgccttccataatttaagc

SEQ ID NO: 4717485 - DNA, 25 bp, Homo sapien
ggtttgatattccacgtagtcctgt

SEQ ID NO: 4717486 - DNA, 25 bp, Homo sapien
ttttgttggaagtaagcattttgac

SEQ ID NO: 4717487 - DNA, 25 bp, Homo sapien
gaccaacctggtttgatattccacg

SEQ ID NO: 4717488 - DNA, 25 bp, Homo sapien
gaagtaagcattttgaccaacctgg

SEQ ID NO: 4717489 - DNA, 25 bp, Homo sapien
caagatgcctccaagaactgtccta

SEQ ID NO: 4717490 - DNA, 25 bp, Homo sapien
tggagacttcccaagatgcctccaa

SEQ ID NO: 4717491 - DNA, 25 bp, Homo sapien
aatttttttagacatcgcagagtca

SEQ ID NO: 4717492 - DNA, 25 bp, Homo sapien
ttagacatcgcagagtcaggtccat

SEQ ID NO: 4717493 - DNA, 25 bp, Homo sapien
cttgatcctcagtggttttggtggt

SEQ ID NO: 4717494 - DNA, 25 bp, Homo sapien
tggttttggtggttggagagatcat

SEQ ID NO: 4717495 - DNA, 25 bp, Homo sapien
gtggttttggtggttggagagatca

SEQ ID NO: 4717496 - DNA, 25 bp, Homo sapien
atcctcagtggttttggtggttgga

SEQ ID NO: 4717497 - DNA, 25 bp, Homo sapien
gatggtggttacatcagcatctccc

SEQ ID NO: 4717498 - DNA, 25 bp, Homo sapien
atggtggttacatcagcatctccca

SEQ ID NO: 4717499 - DNA, 25 bp, Homo sapien
agatggtggttacatcagcatctcc

SEQ ID NO: 4717500 - DNA, 25 bp, Homo sapien
tagatggtggttacatcagcatctc

SEQ ID NO: 4717501 - DNA, 25 bp, Homo sapien
taaggccacttacaagacagcgtag

SEQ ID NO: 4717502 - DNA, 25 bp, Homo sapien
tagaaattccttgctcctggggtga

SEQ ID NO: 4717503 - DNA, 25 bp, Homo sapien
agctgtttactaaaaacacaccaag

SEQ ID NO: 4717504 - DNA, 25 bp, Homo sapien
cagcgtagggacaactccacagaaa

SEQ ID NO: 4717505 - DNA, 25 bp, Homo sapien
tgaaactcggaaaagttgcaggtcc

SEQ ID NO: 4717506 - DNA, 25 bp, Homo sapien
tttaagatgattctacctttcccca

SEQ ID NO: 4717507 - DNA, 25 bp, Homo sapien
gggccttactcatcacaagtagcag

SEQ ID NO: 4717508 - DNA, 25 bp, Homo sapien
tactagagccttgaggcccacactg

SEQ ID NO: 4717509 - DNA, 25 bp, Homo sapien
cacattttgccaaccaaatatacta

SEQ ID NO: 4717510 - DNA, 25 bp, Homo sapien
acattttgccaaccaaatatactac

SEQ ID NO: 4717511 - DNA, 25 bp, Homo sapien
tcacattttgccaaccaaatatact

SEQ ID NO: 4717512 - DNA, 25 bp, Homo sapien
tgagcgataacacatgcagttcccc

SEQ ID NO: 4717513 - DNA, 25 bp, Homo sapien
gaagtgccaggttgattatccagct

SEQ ID NO: 4717514 - DNA, 25 bp, Homo sapien
cacgtgatgtgtgacgagatgtcca

SEQ ID NO: 4717515 - DNA, 25 bp, Homo sapien
gcttttggtgccgaggtcaatgaca

SEQ ID NO: 4717516 - DNA, 25 bp, Homo sapien
aggataacacttactttcctcttca

SEQ ID NO: 4717517 - DNA, 25 bp, Homo sapien
tcaggctgtgattcaccagttagtt

SEQ ID NO: 4717518 - DNA, 25 bp, Homo sapien
gattcaccagttagttcctgccctt

SEQ ID NO: 4717519 - DNA, 25 bp, Homo sapien
gattcacaggataacacttactttc

SEQ ID NO: 4717520 - DNA, 25 bp, Homo sapien
gggatacagatgaccaagcttatta

SEQ ID NO: 4717521 - DNA, 25 bp, Homo sapien
taatggtgtccagtcactggtgcta

SEQ ID NO: 4717522 - DNA, 25 bp, Homo sapien
tttgctgcctctgtttgtctcttgg

SEQ ID NO: 4717523 - DNA, 25 bp, Homo sapien
cagatgaccaagcttattagggtta

SEQ ID NO: 4717524 - DNA, 25 bp, Homo sapien
attctgtgaaatacagagccagact

SEQ ID NO: 4717525 - DNA, 25 bp, Homo sapien
gctagaatcatgtaaggaaagtaat

SEQ ID NO: 4717526 - DNA, 25 bp, Homo sapien
gtgaaatacagagccagacttcttc

SEQ ID NO: 4717527 - DNA, 25 bp, Homo sapien
tcacaattgctagaatcatgtaagg

SEQ ID NO: 4717528 - DNA, 25 bp, Homo sapien
ctgagttcacccacactggtgagag

SEQ ID NO: 4717529 - DNA, 25 bp, Homo sapien
gggcgctcagcagcagtaggcagca

SEQ ID NO: 4717530 - DNA, 25 bp, Homo sapien
agtctgcttcccgtattaagctcct

SEQ ID NO: 4717531 - DNA, 25 bp, Homo sapien
gacagtttcttgcacacagtctgct

SEQ ID NO: 4717532 - DNA, 25 bp, Homo sapien
tgattaacgtctgtagcaacactag

SEQ ID NO: 4717533 - DNA, 25 bp, Homo sapien
tggaaaactaacagatggccatgca

SEQ ID NO: 4717534 - DNA, 25 bp, Homo sapien
tattttgcaaatgagcccagatgga

SEQ ID NO: 4717535 - DNA, 25 bp, Homo sapien
cactagttttcctgtggtagcatca

SEQ ID NO: 4717536 - DNA, 25 bp, Homo sapien
gacatattcatcaactcactttgga

SEQ ID NO: 4717537 - DNA, 25 bp, Homo sapien
ttttacctccagcacaactgtgctc

SEQ ID NO: 4717538 - DNA, 25 bp, Homo sapien
ctctgacatattcatcaactcactt

SEQ ID NO: 4717539 - DNA, 25 bp, Homo sapien
atttttacctccagcacaactgtgc

SEQ ID NO: 4717540 - DNA, 25 bp, Homo sapien
aacaacagctcccaaactgccaata

SEQ ID NO: 4717541 - DNA, 25 bp, Homo sapien
ttgcatacataagcaggaacaacag

SEQ ID NO: 4717542 - DNA, 25 bp, Homo sapien
atgtgtcacacggtcacgcagcagg

SEQ ID NO: 4717543 - DNA, 25 bp, Homo sapien
ccaaactgccaatatccttctcaat

SEQ ID NO: 4717544 - DNA, 25 bp, Homo sapien
tctgcatggtgtttcatcctccagg

SEQ ID NO: 4717545 - DNA, 25 bp, Homo sapien
gtgtctgcatggtgtttcatcctcc

SEQ ID NO: 4717546 - DNA, 25 bp, Homo sapien
tctccacgttccatagtagggtttc

SEQ ID NO: 4717547 - DNA, 25 bp, Homo sapien
gggtctctccacgttccatagtagg

SEQ ID NO: 4717548 - DNA, 25 bp, Homo sapien
acaggagcggcacactaaggaagca

SEQ ID NO: 4717549 - DNA, 25 bp, Homo sapien
cccagaagtgaaccataagagggcc

SEQ ID NO: 4717550 - DNA, 25 bp, Homo sapien
cagaagtgaaccataagagggccca

SEQ ID NO: 4717551 - DNA, 25 bp, Homo sapien
agtgaaccataagagggcccacagg

SEQ ID NO: 4717552 - DNA, 25 bp, Homo sapien
ggtttccgctgtgtggttgagccag

SEQ ID NO: 4717553 - DNA, 25 bp, Homo sapien
aggtttccgctgtgtggttgagcca

SEQ ID NO: 4717554 - DNA, 25 bp, Homo sapien
caggtttccgctgtgtggttgagcc

SEQ ID NO: 4717555 - DNA, 25 bp, Homo sapien
tcattccaggcttttgttcatcaaa

SEQ ID NO: 4717556 - DNA, 25 bp, Homo sapien
ccttcaacaggatagcttctgtaga

SEQ ID NO: 4717557 - DNA, 25 bp, Homo sapien
tcaaaatagtagcaagtagtggcat

SEQ ID NO: 4717558 - DNA, 25 bp, Homo sapien
tcttctgaccagaatgaccttcaac

SEQ ID NO: 4717559 - DNA, 25 bp, Homo sapien
tcaatgtcaacagagaagcactggg

SEQ ID NO: 4717560 - DNA, 25 bp, Homo sapien
ttgcttggaacccacaaagctggtc

SEQ ID NO: 4717561 - DNA, 25 bp, Homo sapien
gctgggaccaagaggcttccaggta

SEQ ID NO: 4717562 - DNA, 25 bp, Homo sapien
ttccaggtagtgagtgtgtgaagtt

SEQ ID NO: 4717563 - DNA, 25 bp, Homo sapien
gtaatggatagggaatacacagtgc

SEQ ID NO: 4717564 - DNA, 25 bp, Homo sapien
gagggcataccccagtaccaggttg

SEQ ID NO: 4717565 - DNA, 25 bp, Homo sapien
gaagccctgaatgttacctgtacag

SEQ ID NO: 4717566 - DNA, 25 bp, Homo sapien
gaataagcgattttgacgaagaccc

SEQ ID NO: 4717567 - DNA, 25 bp, Homo sapien
agccaaaggcatctcgtagagagaa

SEQ ID NO: 4717568 - DNA, 25 bp, Homo sapien
tagaaatggtgtcaatcaggagaaa

SEQ ID NO: 4717569 - DNA, 25 bp, Homo sapien
cacactaaatggatgggagccaaag

SEQ ID NO: 4717570 - DNA, 25 bp, Homo sapien
taagccagtaagacgaaacagttgg

SEQ ID NO: 4717571 - DNA, 25 bp, Homo sapien
ggcctctgggtaaggacctgaaaca

SEQ ID NO: 4717572 - DNA, 25 bp, Homo sapien
tcaactgactgcatgatcactaaac

SEQ ID NO: 4717573 - DNA, 25 bp, Homo sapien
caagaatctattgatgctgatggcc

SEQ ID NO: 4717574 - DNA, 25 bp, Homo sapien
tcactaaacaacaagaatctattga

SEQ ID NO: 4717575 - DNA, 25 bp, Homo sapien
cacggatgctgttggaagtcctgcc

SEQ ID NO: 4717576 - DNA, 25 bp, Homo sapien
ttccaccaagaagctcgtaagcctc

SEQ ID NO: 4717577 - DNA, 25 bp, Homo sapien
cagttgcgctaatgcctctgaagcc

SEQ ID NO: 4717578 - DNA, 25 bp, Homo sapien
gggaacacatatttccacggatgct

SEQ ID NO: 4717579 - DNA, 25 bp, Homo sapien
tggagagaccgctcaatgtcccaac

SEQ ID NO: 4717580 - DNA, 25 bp, Homo sapien
tgacttggagagaccgctcaatgtc

SEQ ID NO: 4717581 - DNA, 25 bp, Homo sapien
agagaccgctcaatgtcccaaccaa

SEQ ID NO: 4717582 - DNA, 25 bp, Homo sapien
gacttggagagaccgctcaatgtcc

SEQ ID NO: 4717583 - DNA, 25 bp, Homo sapien
gcacagacatagcccgtgtgactta

SEQ ID NO: 4717584 - DNA, 25 bp, Homo sapien
cagacatagcccgtgtgacttagtt

SEQ ID NO: 4717585 - DNA, 25 bp, Homo sapien
catagcccgtgtgacttagttggca

SEQ ID NO: 4717586 - DNA, 25 bp, Homo sapien
gcccgtgtgacttagttggcatttg

SEQ ID NO: 4717587 - DNA, 25 bp, Homo sapien
ttgaattaaaccataggccaaactg

SEQ ID NO: 4717588 - DNA, 25 bp, Homo sapien
ttatatttccaagggcagatcgtag

SEQ ID NO: 4717589 - DNA, 25 bp, Homo sapien
gatcgtagaacactaggcctgcttt

SEQ ID NO: 4717590 - DNA, 25 bp, Homo sapien
ggccaaactgatacatagacaaatg

SEQ ID NO: 4717591 - DNA, 25 bp, Homo sapien
tggtttccctggattctcatctgag

SEQ ID NO: 4717592 - DNA, 25 bp, Homo sapien
gttggtttccctggattctcatctg

SEQ ID NO: 4717593 - DNA, 25 bp, Homo sapien
gtttccctggattctcatctgagcc

SEQ ID NO: 4717594 - DNA, 25 bp, Homo sapien
agaagttggtttccctggattctca

SEQ ID NO: 4717595 - DNA, 25 bp, Homo sapien
ggcagggtggagatagggcagaaaa

SEQ ID NO: 4717596 - DNA, 25 bp, Homo sapien
ggctgggcagggtggagatagggca

SEQ ID NO: 4717597 - DNA, 25 bp, Homo sapien
tgggcagggtggagatagggcagaa

SEQ ID NO: 4717598 - DNA, 25 bp, Homo sapien
gcagggtggagatagggcagaaaac

SEQ ID NO: 4717599 - DNA, 25 bp, Homo sapien
gccttatgggcaggaaacgtcaacc

SEQ ID NO: 4717600 - DNA, 25 bp, Homo sapien
cctgtagtgccagaaggagtgctga

SEQ ID NO: 4717601 - DNA, 25 bp, Homo sapien
tactaggtccgtcactagcagcagc

SEQ ID NO: 4717602 - DNA, 25 bp, Homo sapien
gaggagatgcccacctttcgatggc

SEQ ID NO: 4717603 - DNA, 25 bp, Homo sapien
tgctgcatttccaccagccattttc

SEQ ID NO: 4717604 - DNA, 25 bp, Homo sapien
ggtttcagaaccatgttattcttcc

SEQ ID NO: 4717605 - DNA, 25 bp, Homo sapien
ttttcttctgcaacctgtaggtttc

SEQ ID NO: 4717606 - DNA, 25 bp, Homo sapien
agccattttcttctgcaacctgtag

SEQ ID NO: 4717607 - DNA, 25 bp, Homo sapien
gtcacaaggtggacataggggttcc

SEQ ID NO: 4717608 - DNA, 25 bp, Homo sapien
gtgtctttggaagtcacaaggtgga

SEQ ID NO: 4717609 - DNA, 25 bp, Homo sapien
taaatgcaagtccacgaatgcctgg

SEQ ID NO: 4717610 - DNA, 25 bp, Homo sapien
cttgaacggttccatgcagtttctc

SEQ ID NO: 4717611 - DNA, 25 bp, Homo sapien
tctgtactcactttcaattcctcat

SEQ ID NO: 4717612 - DNA, 25 bp, Homo sapien
cttgacaatctagaaatatcatctg

SEQ ID NO: 4717613 - DNA, 25 bp, Homo sapien
caaaacttgacaatctagaaatatc

SEQ ID NO: 4717614 - DNA, 25 bp, Homo sapien
catctgtactcactttcaattcctc

SEQ ID NO: 4717615 - DNA, 25 bp, Homo sapien
gtaagaacacgacatccaacctcat

SEQ ID NO: 4717616 - DNA, 25 bp, Homo sapien
tctgtaagaacacgacatccaacct

SEQ ID NO: 4717617 - DNA, 25 bp, Homo sapien
tttctctgtaagaacacgacatcca

SEQ ID NO: 4717618 - DNA, 25 bp, Homo sapien
tctctgtaagaacacgacatccaac

SEQ ID NO: 4717619 - DNA, 25 bp, Homo sapien
tcctgctttccacttataacttcca

SEQ ID NO: 4717620 - DNA, 25 bp, Homo sapien
cttataacttccatggcccagctgc

SEQ ID NO: 4717621 - DNA, 25 bp, Homo sapien
cctgctttccacttataacttccat

SEQ ID NO: 4717622 - DNA, 25 bp, Homo sapien
catttattatattgctcagtgcccc

SEQ ID NO: 4717623 - DNA, 25 bp, Homo sapien
tgaacttgcatacgctccacaaggc

SEQ ID NO: 4717624 - DNA, 25 bp, Homo sapien
cacggcgcaggatgagaaataggct

SEQ ID NO: 4717625 - DNA, 25 bp, Homo sapien
tgctccaagctcataactgccactg

SEQ ID NO: 4717626 - DNA, 25 bp, Homo sapien
gagaaaaagagatcccttagatact

SEQ ID NO: 4717627 - DNA, 25 bp, Homo sapien
tgtctggtcaccaagacaagagaaa

SEQ ID NO: 4717628 - DNA, 25 bp, Homo sapien
gaagctctctggtaagtaagtctcc

SEQ ID NO: 4717629 - DNA, 25 bp, Homo sapien
tcagcagtcgctttgtatactccag

SEQ ID NO: 4717630 - DNA, 25 bp, Homo sapien
agaaaaaaaaatgtgtcctattcat

SEQ ID NO: 4717631 - DNA, 25 bp, Homo sapien
gaagaggcacagaaaaaaaaatgtg

SEQ ID NO: 4717632 - DNA, 25 bp, Homo sapien
gagcaccttgcttttggaagaggca

SEQ ID NO: 4717633 - DNA, 25 bp, Homo sapien
gcacagaaaaaaaaatgtgtcctat

SEQ ID NO: 4717634 - DNA, 25 bp, Homo sapien
gagaaaaagtttcagccggcacgac

SEQ ID NO: 4717635 - DNA, 25 bp, Homo sapien
tagtccacgaagtaaacagagaggt

SEQ ID NO: 4717636 - DNA, 25 bp, Homo sapien
tactacgcgctattactacggctgc

SEQ ID NO: 4717637 - DNA, 25 bp, Homo sapien
caggcggaggcacagttaaattcca

SEQ ID NO: 4717638 - DNA, 25 bp, Homo sapien
cagcggcggtgtggttcgcccggga

SEQ ID NO: 4717639 - DNA, 25 bp, Homo sapien
gcagcggcggtgtggttcgcccggg

SEQ ID NO: 4717640 - DNA, 25 bp, Homo sapien
aggacccgcgcaccaccgggcagcg

SEQ ID NO: 4717641 - DNA, 25 bp, Homo sapien
acccgcgcaccaccgggcagcggcg

SEQ ID NO: 4717642 - DNA, 25 bp, Homo sapien
agcagcgaagcgcacacagcacaca

SEQ ID NO: 4717643 - DNA, 25 bp, Homo sapien
tgtttgattgccgtgacatgacgcg

SEQ ID NO: 4717644 - DNA, 25 bp, Homo sapien
acagacatgtttgattgccgtgaca

SEQ ID NO: 4717645 - DNA, 25 bp, Homo sapien
attgccgtgacatgacgcgcgcgag

SEQ ID NO: 4717646 - DNA, 25 bp, Homo sapien
gctgttgcacattcaaacttcgggc

SEQ ID NO: 4717647 - DNA, 25 bp, Homo sapien
ggctcgcctttcctgcaaagtcagg

SEQ ID NO: 4717648 - DNA, 25 bp, Homo sapien
ttgttccgcgtcctccaggtaagga

SEQ ID NO: 4717649 - DNA, 25 bp, Homo sapien
ccttgtcctccgatcgattgcgtgg

SEQ ID NO: 4717650 - DNA, 25 bp, Homo sapien
acatggatattggatgtccagaagg

SEQ ID NO: 4717651 - DNA, 25 bp, Homo sapien
ggatgtccagaaggaaagccctctc

SEQ ID NO: 4717652 - DNA, 25 bp, Homo sapien
gatgtccagaaggaaagccctctcc

SEQ ID NO: 4717653 - DNA, 25 bp, Homo sapien
agtgcatacttttgactctgcagaa

SEQ ID NO: 4717654 - DNA, 25 bp, Homo sapien
tgagggtttagagctcacacctgct

SEQ ID NO: 4717655 - DNA, 25 bp, Homo sapien
aagtggcctaaatacatctgctgtg

SEQ ID NO: 4717656 - DNA, 25 bp, Homo sapien
tagttccctgcgtgaggacacgggt

SEQ ID NO: 4717657 - DNA, 25 bp, Homo sapien
cgtggaaattctgcaagagcgggaa

SEQ ID NO: 4717658 - DNA, 25 bp, Homo sapien
tgatcatctcacactgcgactgtgg

SEQ ID NO: 4717659 - DNA, 25 bp, Homo sapien
tcctgtggacccgagagagtgatca

SEQ ID NO: 4717660 - DNA, 25 bp, Homo sapien
tgattttcacccgtgcggtcggaaa

SEQ ID NO: 4717661 - DNA, 25 bp, Homo sapien
catcatgttgcttaatgggaggtgg

SEQ ID NO: 4717662 - DNA, 25 bp, Homo sapien
tgctcagcagtaccagacttcaggt

SEQ ID NO: 4717663 - DNA, 25 bp, Homo sapien
tactcagtgcagatctgtggccaaa

SEQ ID NO: 4717664 - DNA, 25 bp, Homo sapien
gcagcttgctccttttatcgtggca

SEQ ID NO: 4717665 - DNA, 25 bp, Homo sapien
taatgagcatttattgttgtaaagc

SEQ ID NO: 4717666 - DNA, 25 bp, Homo sapien
agctcttttagccaggtaagttcag

SEQ ID NO: 4717667 - DNA, 25 bp, Homo sapien
gagcatttattgttgtaaagctctt

SEQ ID NO: 4717668 - DNA, 25 bp, Homo sapien
tttagccaggtaagttcagggctat

SEQ ID NO: 4717669 - DNA, 25 bp, Homo sapien
tcatggcactggttttctaagttac

SEQ ID NO: 4717670 - DNA, 25 bp, Homo sapien
catctgcctgtaggatattgggtag

SEQ ID NO: 4717671 - DNA, 25 bp, Homo sapien
caagatttgattcatactggagcaa

SEQ ID NO: 4717672 - DNA, 25 bp, Homo sapien
ctggagcaaatgttgaattcaaaac

SEQ ID NO: 4717673 - DNA, 25 bp, Homo sapien
cataagacccctggcctctttggcc

SEQ ID NO: 4717674 - DNA, 25 bp, Homo sapien
tcataagacccctggcctctttggc

SEQ ID NO: 4717675 - DNA, 25 bp, Homo sapien
aagtctgcaaactctccttgactga

SEQ ID NO: 4717676 - DNA, 25 bp, Homo sapien
agtctgcaaactctccttgactgat

SEQ ID NO: 4717677 - DNA, 25 bp, Homo sapien
ttgccttcctgttacgtggcaactt

SEQ ID NO: 4717678 - DNA, 25 bp, Homo sapien
tgccttcctgttacgtggcaacttc

SEQ ID NO: 4717679 - DNA, 25 bp, Homo sapien
tcttgactcctgtttcctccatgga

SEQ ID NO: 4717680 - DNA, 25 bp, Homo sapien
cttgccttcctgttacgtggcaact

SEQ ID NO: 4717681 - DNA, 25 bp, Homo sapien
tttccggtttaatgtcagccctgtg

SEQ ID NO: 4717682 - DNA, 25 bp, Homo sapien
ttccggtttaatgtcagccctgtgt

SEQ ID NO: 4717683 - DNA, 25 bp, Homo sapien
tccggtttaatgtcagccctgtgta

SEQ ID NO: 4717684 - DNA, 25 bp, Homo sapien
tactgaataagctcctggcgatgag

SEQ ID NO: 4717685 - DNA, 25 bp, Homo sapien
cacttcttttggtatactgaataag

SEQ ID NO: 4717686 - DNA, 25 bp, Homo sapien
gatgagggaagacaccgctttgttt

SEQ ID NO: 4717687 - DNA, 25 bp, Homo sapien
tactatggggtccttatgtctgaat

SEQ ID NO: 4717688 - DNA, 25 bp, Homo sapien
tctcagggaaaatcatagaacctac

SEQ ID NO: 4717689 - DNA, 25 bp, Homo sapien
tcagggttcgggtgagcatcagaaa

SEQ ID NO: 4717690 - DNA, 25 bp, Homo sapien
ccaagaggttcagattccggttcca

SEQ ID NO: 4717691 - DNA, 25 bp, Homo sapien
tgggaatcaagaagctcctttcgct

SEQ ID NO: 4717692 - DNA, 25 bp, Homo sapien
tccagtggccttccattgtaagtgt

SEQ ID NO: 4717693 - DNA, 25 bp, Homo sapien
caaaaatcggccctgatgaccactc

SEQ ID NO: 4717694 - DNA, 25 bp, Homo sapien
tgctggattcccacctccttgcctt

SEQ ID NO: 4717695 - DNA, 25 bp, Homo sapien
cacttgaacatggtctataaggcca

SEQ ID NO: 4717696 - DNA, 25 bp, Homo sapien
tgtgtgctgacaggatgtgatggac

SEQ ID NO: 4717697 - DNA, 25 bp, Homo sapien
tagtggtaatgtgcatgtctttcca

SEQ ID NO: 4717698 - DNA, 25 bp, Homo sapien
gagcccctgcccgttagtggtaatg

SEQ ID NO: 4717699 - DNA, 25 bp, Homo sapien
tgtagtagcttcagtaaatcctaac

SEQ ID NO: 4717700 - DNA, 25 bp, Homo sapien
atcctaacccatgatgcacaccgag

SEQ ID NO: 4717701 - DNA, 25 bp, Homo sapien
catccagacttagtggtgcctggtg

SEQ ID NO: 4717702 - DNA, 25 bp, Homo sapien
tgaggacatccagacttagtggtgc

SEQ ID NO: 4717703 - DNA, 25 bp, Homo sapien
tgctgctgaggacatccagacttag

SEQ ID NO: 4717704 - DNA, 25 bp, Homo sapien
ctgttgctgctgaggacatccagac

SEQ ID NO: 4717705 - DNA, 25 bp, Homo sapien
ctttttggagtcttgtattgttcat

SEQ ID NO: 4717706 - DNA, 25 bp, Homo sapien
gctctttatagaactaagaacccaa

SEQ ID NO: 4717707 - DNA, 25 bp, Homo sapien
aattgaattaatgtagctccagtaa

SEQ ID NO: 4717708 - DNA, 25 bp, Homo sapien
tccagtaataagtataactaacatc

SEQ ID NO: 4717709 - DNA, 25 bp, Homo sapien
tatgtaagtactatctaattgaatt

SEQ ID NO: 4717710 - DNA, 25 bp, Homo sapien
tgtgatttctgatagccggcctgct

SEQ ID NO: 4717711 - DNA, 25 bp, Homo sapien
tgatgaagagactagcagctcgctg

SEQ ID NO: 4717712 - DNA, 25 bp, Homo sapien
tctccgtatttctgtgtgcaactgg

SEQ ID NO: 4717713 - DNA, 25 bp, Homo sapien
ccggcctgctgatagtggtaaggta

SEQ ID NO: 4717714 - DNA, 25 bp, Homo sapien
tatgtctgagctgtaatcactcttt

SEQ ID NO: 4717715 - DNA, 25 bp, Homo sapien
tattgattgttatactcacatgatc

SEQ ID NO: 4717716 - DNA, 25 bp, Homo sapien
caggaagcgttgtacataagtgaaa

SEQ ID NO: 4717717 - DNA, 25 bp, Homo sapien
gaaagaaattatgtctgagctgtaa

SEQ ID NO: 4717718 - DNA, 25 bp, Homo sapien
aggaggaatcagatattaagcatgt

SEQ ID NO: 4717719 - DNA, 25 bp, Homo sapien
gaggaggaatcagatattaagcatg

SEQ ID NO: 4717720 - DNA, 25 bp, Homo sapien
ggaggaatcagatattaagcatgta

SEQ ID NO: 4717721 - DNA, 25 bp, Homo sapien
cttaatgcgaagcacctgtagtgac

SEQ ID NO: 4717722 - DNA, 25 bp, Homo sapien
ggaaagcccgccctaactgcagcat

SEQ ID NO: 4717723 - DNA, 25 bp, Homo sapien
cctctttaactctgtgctgtcttgg

SEQ ID NO: 4717724 - DNA, 25 bp, Homo sapien
gtgctgtcttggtttagaagcttaa

SEQ ID NO: 4717725 - DNA, 25 bp, Homo sapien
tttcagctgacccaataacatcctt

SEQ ID NO: 4717726 - DNA, 25 bp, Homo sapien
ttttcagctgacccaataacatcct

SEQ ID NO: 4717727 - DNA, 25 bp, Homo sapien
taatgtccattgagaaacgtcagga

SEQ ID NO: 4717728 - DNA, 25 bp, Homo sapien
tattgcagtccagtaaacaatgact

SEQ ID NO: 4717729 - DNA, 25 bp, Homo sapien
tggagatgaaactgtcgggcaagat

SEQ ID NO: 4717730 - DNA, 25 bp, Homo sapien
caatgactaatcctggaaaccaggc

SEQ ID NO: 4717731 - DNA, 25 bp, Homo sapien
gactcgatacttatttatggtgctc

SEQ ID NO: 4717732 - DNA, 25 bp, Homo sapien
atggtgctcagccagttatgcccac

SEQ ID NO: 4717733 - DNA, 25 bp, Homo sapien
gctttgactcttggtgactcgatac

SEQ ID NO: 4717734 - DNA, 25 bp, Homo sapien
tgctcagccagttatgcccacgtac

SEQ ID NO: 4717735 - DNA, 25 bp, Homo sapien
tgtttcccgagacacagaatgcttc

SEQ ID NO: 4717736 - DNA, 25 bp, Homo sapien
tcttccagcattagcctggccctga

SEQ ID NO: 4717737 - DNA, 25 bp, Homo sapien
tgggcagcccacaaataaacttagt

SEQ ID NO: 4717738 - DNA, 25 bp, Homo sapien
tgaagcccctctttcgagggtctct

SEQ ID NO: 4717739 - DNA, 25 bp, Homo sapien
ttggatatatatatgtccttgtata

SEQ ID NO: 4717740 - DNA, 25 bp, Homo sapien
ctgtctcactcctttagaatcacac

SEQ ID NO: 4717741 - DNA, 25 bp, Homo sapien
ctgagagatcgcagttatttggata

SEQ ID NO: 4717742 - DNA, 25 bp, Homo sapien
tgattaaaaagggattgctctgaga

SEQ ID NO: 4717743 - DNA, 25 bp, Homo sapien
catttaacaaagcagcgtgtgggac

SEQ ID NO: 4717744 - DNA, 25 bp, Homo sapien
ttggtcgcaattcagccaaaagctt

SEQ ID NO: 4717745 - DNA, 25 bp, Homo sapien
cttgggcacagatggagaggcattt

SEQ ID NO: 4717746 - DNA, 25 bp, Homo sapien
ggaaaaagcagcactccggtgcctg

SEQ ID NO: 4717747 - DNA, 25 bp, Homo sapien
tggtggcatactccagtagtcctgg

SEQ ID NO: 4717748 - DNA, 25 bp, Homo sapien
cgagaccacccgaggcaagatggtg

SEQ ID NO: 4717749 - DNA, 25 bp, Homo sapien
aggagtccgagaccacccgaggcaa

SEQ ID NO: 4717750 - DNA, 25 bp, Homo sapien
ggcatactccagtagtcctggctac

SEQ ID NO: 4717751 - DNA, 25 bp, Homo sapien
aaataaaggttggtcctatgatcct

SEQ ID NO: 4717752 - DNA, 25 bp, Homo sapien
tccttctggtcgtttttcaatgcct

SEQ ID NO: 4717753 - DNA, 25 bp, Homo sapien
aaaacgtgctgcttatggtgataaa

SEQ ID NO: 4717754 - DNA, 25 bp, Homo sapien
aaagtgccagttggtaaaacgtgct

SEQ ID NO: 4717755 - DNA, 25 bp, Homo sapien
taacagctactgattccatgaccca

SEQ ID NO: 4717756 - DNA, 25 bp, Homo sapien
aacacctgcttcatgactggctcag

SEQ ID NO: 4717757 - DNA, 25 bp, Homo sapien
tatggagtgcagatgcttgtaacac

SEQ ID NO: 4717758 - DNA, 25 bp, Homo sapien
taaacttcataggaacctgaacctg

SEQ ID NO: 4717759 - DNA, 25 bp, Homo sapien
acgtcgcggtgtctgttcacttcca

SEQ ID NO: 4717760 - DNA, 25 bp, Homo sapien
ggccacgtcgcggtgtctgttcact

SEQ ID NO: 4717761 - DNA, 25 bp, Homo sapien
tggtctcatggccacgtcgcggtgt

SEQ ID NO: 4717762 - DNA, 25 bp, Homo sapien
tcatggccacgtcgcggtgtctgtt

SEQ ID NO: 4717763 - DNA, 25 bp, Homo sapien
gagccatactttctagcctgaggta

SEQ ID NO: 4717764 - DNA, 25 bp, Homo sapien
ccatgtctcatcagagccatacttt

SEQ ID NO: 4717765 - DNA, 25 bp, Homo sapien
taaaatccatccgatgtcacaggcc

SEQ ID NO: 4717766 - DNA, 25 bp, Homo sapien
ctagcctgaggtagatcattacgta

SEQ ID NO: 4717767 - DNA, 25 bp, Homo sapien
tctttatgagcatagagaactctgg

SEQ ID NO: 4717768 - DNA, 25 bp, Homo sapien
gagtgtgtccatcacaggtgtacag

SEQ ID NO: 4717769 - DNA, 25 bp, Homo sapien
tcattttacagtattggccccaagt

SEQ ID NO: 4717770 - DNA, 25 bp, Homo sapien
gagctttgttgcactatcggtcaca

SEQ ID NO: 4717771 - DNA, 25 bp, Homo sapien
tcataagtaccggagcctaggcgac

SEQ ID NO: 4717772 - DNA, 25 bp, Homo sapien
ttaactaagtaatgatcgctgaatt

SEQ ID NO: 4717773 - DNA, 25 bp, Homo sapien
aagtaatgatcgctgaattttcctc

SEQ ID NO: 4717774 - DNA, 25 bp, Homo sapien
tccatcaggaaaggattcgtaatca

SEQ ID NO: 4717775 - DNA, 25 bp, Homo sapien
gaaaattctgccctgatggtcccat

SEQ ID NO: 4717776 - DNA, 25 bp, Homo sapien
gatccagctcaactctgatgtctct

SEQ ID NO: 4717777 - DNA, 25 bp, Homo sapien
taagatccagctcaactctgatgtc

SEQ ID NO: 4717778 - DNA, 25 bp, Homo sapien
tggaaaattctgccctgatggtccc

SEQ ID NO: 4717779 - DNA, 25 bp, Homo sapien
ctcgcgcgggtcctttgttctgtca

SEQ ID NO: 4717780 - DNA, 25 bp, Homo sapien
tctctcgcgcgggtcctttgttctg

SEQ ID NO: 4717781 - DNA, 25 bp, Homo sapien
tctcgcgcgggtcctttgttctgtc

SEQ ID NO: 4717782 - DNA, 25 bp, Homo sapien
ctctctctcgcgcgggtcctttgtt

SEQ ID NO: 4717783 - DNA, 25 bp, Homo sapien
tcaaataccaaaaatggtattctgt

SEQ ID NO: 4717784 - DNA, 25 bp, Homo sapien
catcatcaaataccaaaaatggtat

SEQ ID NO: 4717785 - DNA, 25 bp, Homo sapien
tcatcatcaaataccaaaaatggta

SEQ ID NO: 4717786 - DNA, 25 bp, Homo sapien
caaataccaaaaatggtattctgtg

SEQ ID NO: 4717787 - DNA, 25 bp, Homo sapien
gttctttgggatatgtacctatatt

SEQ ID NO: 4717788 - DNA, 25 bp, Homo sapien
aagtgtttccattggtatccccaga

SEQ ID NO: 4717789 - DNA, 25 bp, Homo sapien
tatccccagaatagtcctgtgaagg

SEQ ID NO: 4717790 - DNA, 25 bp, Homo sapien
gatattgtaccttgaactcttccaa

SEQ ID NO: 4717791 - DNA, 25 bp, Homo sapien
gggtcgctgactagacagaaccaca

SEQ ID NO: 4717792 - DNA, 25 bp, Homo sapien
acacagaacaggcataaaccgggaa

SEQ ID NO: 4717793 - DNA, 25 bp, Homo sapien
cataaaccgggaatgttctgggcac

SEQ ID NO: 4717794 - DNA, 25 bp, Homo sapien
gtctgtaggttggtgatagtcttac

SEQ ID NO: 4717795 - DNA, 25 bp, Homo sapien
tgattactcactggtgtctatttca

SEQ ID NO: 4717796 - DNA, 25 bp, Homo sapien
gattactcactggtgtctatttcat

SEQ ID NO: 4717797 - DNA, 25 bp, Homo sapien
tagctttaggatagtgccagacaaa

SEQ ID NO: 4717798 - DNA, 25 bp, Homo sapien
cactgtggtacatataagcaacttt

SEQ ID NO: 4717799 - DNA, 25 bp, Homo sapien
cctgatctcctatgttaccaatgtg

SEQ ID NO: 4717800 - DNA, 25 bp, Homo sapien
tggttgcaagtcataagcctgaggc

SEQ ID NO: 4717801 - DNA, 25 bp, Homo sapien
taaattattaacacccgaatctcaa

SEQ ID NO: 4717802 - DNA, 25 bp, Homo sapien
taacacccgaatctcaaactgtacc

SEQ ID NO: 4717803 - DNA, 25 bp, Homo sapien
gtaaattattaacacccgaatctca

SEQ ID NO: 4717804 - DNA, 25 bp, Homo sapien
tattaacacccgaatctcaaactgt

SEQ ID NO: 4717805 - DNA, 25 bp, Homo sapien
gctctgaacaggacgctccaagtgg

SEQ ID NO: 4717806 - DNA, 25 bp, Homo sapien
ctagagaccctcaggtcgccttggg

SEQ ID NO: 4717807 - DNA, 25 bp, Homo sapien
cgagcgcttggcagacaagcccctg

SEQ ID NO: 4717808 - DNA, 25 bp, Homo sapien
cccctggattgttgctagagaccct

SEQ ID NO: 4717809 - DNA, 25 bp, Homo sapien
cctttgagaacccccgtggcttgct

SEQ ID NO: 4717810 - DNA, 25 bp, Homo sapien
tgagaacccccgtggcttgctcttt

SEQ ID NO: 4717811 - DNA, 25 bp, Homo sapien
tgtatgccaggctgtgttaaccctt

SEQ ID NO: 4717812 - DNA, 25 bp, Homo sapien
gtgtatgccaggctgtgttaaccct

SEQ ID NO: 4717813 - DNA, 25 bp, Homo sapien
ggttgtcatccggtttgtagcctga

SEQ ID NO: 4717814 - DNA, 25 bp, Homo sapien
gcctgacttcttcggcctgtcacgt

SEQ ID NO: 4717815 - DNA, 25 bp, Homo sapien
tcatccggtttgtagcctgacttct

SEQ ID NO: 4717816 - DNA, 25 bp, Homo sapien
ggtttgtagcctgacttcttcggcc

SEQ ID NO: 4717817 - DNA, 25 bp, Homo sapien
gctttgaagggcgaggaccgggcga

SEQ ID NO: 4717818 - DNA, 25 bp, Homo sapien
gaagggcgaggaccgggcgaaggca

SEQ ID NO: 4717819 - DNA, 25 bp, Homo sapien
caagctttgaagggcgaggaccggg

SEQ ID NO: 4717820 - DNA, 25 bp, Homo sapien
tgaagggcgaggaccgggcgaaggc

SEQ ID NO: 4717821 - DNA, 25 bp, Homo sapien
ttctggtctttggataaggaggaag

SEQ ID NO: 4717822 - DNA, 25 bp, Homo sapien
tggcctgcctctgtgtagtgtcccc

SEQ ID NO: 4717823 - DNA, 25 bp, Homo sapien
tgatggccagctaagccagtccacc

SEQ ID NO: 4717824 - DNA, 25 bp, Homo sapien
gcttctgatgtgcttttgctcaaaa

SEQ ID NO: 4717825 - DNA, 25 bp, Homo sapien
cctctttgtcccctagagcttctga

SEQ ID NO: 4717826 - DNA, 25 bp, Homo sapien
tagtattgatcccattttatagaag

SEQ ID NO: 4717827 - DNA, 25 bp, Homo sapien
tgtctagtccaccaccactggacgg

SEQ ID NO: 4717828 - DNA, 25 bp, Homo sapien
ggtctttagcctctcaaacacgatg

SEQ ID NO: 4717829 - DNA, 25 bp, Homo sapien
ggtccagcatgatacctgccagtct

SEQ ID NO: 4717830 - DNA, 25 bp, Homo sapien
gattcattccttatcccttggccca

SEQ ID NO: 4717831 - DNA, 25 bp, Homo sapien
caacagagttgtaaagctagcagct

SEQ ID NO: 4717832 - DNA, 25 bp, Homo sapien
ggcaacagagttgtaaagctagcag

SEQ ID NO: 4717833 - DNA, 25 bp, Homo sapien
caggcaacagagttgtaaagctagc

SEQ ID NO: 4717834 - DNA, 25 bp, Homo sapien
aacagagttgtaaagctagcagctc

SEQ ID NO: 4717835 - DNA, 25 bp, Homo sapien
ccttggttgcatggtgattacgatc

SEQ ID NO: 4717836 - DNA, 25 bp, Homo sapien
ctaaatggttgccacactggagctg

SEQ ID NO: 4717837 - DNA, 25 bp, Homo sapien
tacgatcggtgctcttggattagac

SEQ ID NO: 4717838 - DNA, 25 bp, Homo sapien
ggtggcaagcctagaagtactgatc

SEQ ID NO: 4717839 - DNA, 25 bp, Homo sapien
gacctctagggagtaaaacatactg

SEQ ID NO: 4717840 - DNA, 25 bp, Homo sapien
caaagtttggactcaggcaagtgca

SEQ ID NO: 4717841 - DNA, 25 bp, Homo sapien
caataggagcgttgactggaacatg

SEQ ID NO: 4717842 - DNA, 25 bp, Homo sapien
cattgcatgatgacgtgaactcaac

SEQ ID NO: 4717843 - DNA, 25 bp, Homo sapien
aaggaaccatgcacctgaagtttgg

SEQ ID NO: 4717844 - DNA, 25 bp, Homo sapien
caaggaaccatgcacctgaagtttg

SEQ ID NO: 4717845 - DNA, 25 bp, Homo sapien
tgagtatgcaatacagaggaggaga

SEQ ID NO: 4717846 - DNA, 25 bp, Homo sapien
ctgagtatgcaatacagaggaggag

SEQ ID NO: 4717847 - DNA, 25 bp, Homo sapien
agtatgcaatacagaggaggagaag

SEQ ID NO: 4717848 - DNA, 25 bp, Homo sapien
gagtatgcaatacagaggaggagaa

SEQ ID NO: 4717849 - DNA, 25 bp, Homo sapien
ctatgtgctttgaagttgtccaggg

SEQ ID NO: 4717850 - DNA, 25 bp, Homo sapien
ccaggctgacaggacgttgggcata

SEQ ID NO: 4717851 - DNA, 25 bp, Homo sapien
ggtccaggctgacaggacgttgggc

SEQ ID NO: 4717852 - DNA, 25 bp, Homo sapien
ccagggtccaggctgacaggacgtt

SEQ ID NO: 4717853 - DNA, 25 bp, Homo sapien
tggacccttggtcctgaagaggctt

SEQ ID NO: 4717854 - DNA, 25 bp, Homo sapien
acccttggtcctgaagaggcttttg

SEQ ID NO: 4717855 - DNA, 25 bp, Homo sapien
cttggtcctgaagaggcttttgcaa

SEQ ID NO: 4717856 - DNA, 25 bp, Homo sapien
ctggacccttggtcctgaagaggct

SEQ ID NO: 4717857 - DNA, 25 bp, Homo sapien
tctgccaattcatgattcacaatag

SEQ ID NO: 4717858 - DNA, 25 bp, Homo sapien
tgtgaccagggtgagcatccacagg

SEQ ID NO: 4717859 - DNA, 25 bp, Homo sapien
ggctaaagggaccacacagcactct

SEQ ID NO: 4717860 - DNA, 25 bp, Homo sapien
agcctctgccaattcatgattcaca

SEQ ID NO: 4717861 - DNA, 25 bp, Homo sapien
aatcagctgggtgcaagtgagtttt

SEQ ID NO: 4717862 - DNA, 25 bp, Homo sapien
cagctgggtgcaagtgagttttgtt

SEQ ID NO: 4717863 - DNA, 25 bp, Homo sapien
ctgagggaacgtggcttctctgcgg

SEQ ID NO: 4717864 - DNA, 25 bp, Homo sapien
ttggaactcgtttgagttgttgaaa

SEQ ID NO: 4717865 - DNA, 25 bp, Homo sapien
gctgagcagttccacgtggagcttt

SEQ ID NO: 4717866 - DNA, 25 bp, Homo sapien
ccttccagttcatttccgacagaca

SEQ ID NO: 4717867 - DNA, 25 bp, Homo sapien
gttcatttccgacagacacgaggga

SEQ ID NO: 4717868 - DNA, 25 bp, Homo sapien
tggtctggtagaatctcctgcactg

SEQ ID NO: 4717869 - DNA, 25 bp, Homo sapien
ctttgccattagatacctggatatt

SEQ ID NO: 4717870 - DNA, 25 bp, Homo sapien
tgccattagatacctggatatttcc

SEQ ID NO: 4717871 - DNA, 25 bp, Homo sapien
tactttgccattagatacctggata

SEQ ID NO: 4717872 - DNA, 25 bp, Homo sapien
ctgtactttgccattagatacctgg

SEQ ID NO: 4717873 - DNA, 25 bp, Homo sapien
gttttccatggataatttgcttctt

SEQ ID NO: 4717874 - DNA, 25 bp, Homo sapien
gtatctgtaatcttcagaacgctca

SEQ ID NO: 4717875 - DNA, 25 bp, Homo sapien
cttggccagcccgatgtatctgtaa

SEQ ID NO: 4717876 - DNA, 25 bp, Homo sapien
ctcaagaagagtgctaaattcagat

SEQ ID NO: 4717877 - DNA, 25 bp, Homo sapien
tgtgagaaacattccccacttcgga

SEQ ID NO: 4717878 - DNA, 25 bp, Homo sapien
taattctgtatagcgtttgccaccc

SEQ ID NO: 4717879 - DNA, 25 bp, Homo sapien
gagaaacccggcctgagatgattga

SEQ ID NO: 4717880 - DNA, 25 bp, Homo sapien
gattgatgcccctacaaaacctttg

SEQ ID NO: 4717881 - DNA, 25 bp, Homo sapien
ctgtctttgggggagattgtgctca

SEQ ID NO: 4717882 - DNA, 25 bp, Homo sapien
ggggagattgtgctcactatcctgg

SEQ ID NO: 4717883 - DNA, 25 bp, Homo sapien
aagaacaacgttctttgtgcatgtg

SEQ ID NO: 4717884 - DNA, 25 bp, Homo sapien
cagggccaaaggagaagttgttgga

SEQ ID NO: 4717885 - DNA, 25 bp, Homo sapien
tggccaagggacaacaccatcaatc

SEQ ID NO: 4717886 - DNA, 25 bp, Homo sapien
cagggagtcatgtacaggacctgga

SEQ ID NO: 4717887 - DNA, 25 bp, Homo sapien
gcagaggaaatcatctgacccaaca

SEQ ID NO: 4717888 - DNA, 25 bp, Homo sapien
ggacctggaatatctgcagaggaaa

SEQ ID NO: 4717889 - DNA, 25 bp, Homo sapien
agtttcagcagctatgtagtgcccc

SEQ ID NO: 4717890 - DNA, 25 bp, Homo sapien
caagtattggcactctgctttagac

SEQ ID NO: 4717891 - DNA, 25 bp, Homo sapien
cccaccaagtattggcactctgctt

SEQ ID NO: 4717892 - DNA, 25 bp, Homo sapien
ttcagcagctatgtagtgccccacc

SEQ ID NO: 4717893 - DNA, 25 bp, Homo sapien
gttgtccaggcaactttcctgcgac

SEQ ID NO: 4717894 - DNA, 25 bp, Homo sapien
tcctttgtactgtgttagcagactg

SEQ ID NO: 4717895 - DNA, 25 bp, Homo sapien
ctttcctgcgactgtaaatggcagt

SEQ ID NO: 4717896 - DNA, 25 bp, Homo sapien
tcctgcgactgtaaatggcagtgtt

SEQ ID NO: 4717897 - DNA, 25 bp, Homo sapien
caaacagtcttatggcaattgcaga

SEQ ID NO: 4717898 - DNA, 25 bp, Homo sapien
tgcaggatgaactcgagcaaacagt

SEQ ID NO: 4717899 - DNA, 25 bp, Homo sapien
cacaaagcaacaaacggttttagtg

SEQ ID NO: 4717900 - DNA, 25 bp, Homo sapien
cacaacttggtgtgttgcacaaagc

SEQ ID NO: 4717901 - DNA, 25 bp, Homo sapien
gcaagttcatcaattgaaagcccat

SEQ ID NO: 4717902 - DNA, 25 bp, Homo sapien
cttgtggctccacaaatgtctgcat

SEQ ID NO: 4717903 - DNA, 25 bp, Homo sapien
caattacagtaggaagtcagctgcg

SEQ ID NO: 4717904 - DNA, 25 bp, Homo sapien
tgtctgcatggtgaacaattacagt

SEQ ID NO: 4717905 - DNA, 25 bp, Homo sapien
tggaatcaacgcattcccaagaaga

SEQ ID NO: 4717906 - DNA, 25 bp, Homo sapien
tgctggaacgaaaggtggtaaatct

SEQ ID NO: 4717907 - DNA, 25 bp, Homo sapien
gaggagctgagatttattcccagtc

SEQ ID NO: 4717908 - DNA, 25 bp, Homo sapien
cccataactgctaaatggaggagct

SEQ ID NO: 4717909 - DNA, 25 bp, Homo sapien
gaatgcataaaacatgggtcctaga

SEQ ID NO: 4717910 - DNA, 25 bp, Homo sapien
taatcctcccacgtagaaaagtggc

SEQ ID NO: 4717911 - DNA, 25 bp, Homo sapien
gattcccatagtgcgggatgacagg

SEQ ID NO: 4717912 - DNA, 25 bp, Homo sapien
taagcttttcaaggattgaggccgt

SEQ ID NO: 4717913 - DNA, 25 bp, Homo sapien
gaatcgttgctgtagctccaagtaa

SEQ ID NO: 4717914 - DNA, 25 bp, Homo sapien
gagcatgttgctaccacctaaaaaa

SEQ ID NO: 4717915 - DNA, 25 bp, Homo sapien
gatggttccacattggtccagcagt

SEQ ID NO: 4717916 - DNA, 25 bp, Homo sapien
tgcctcatggtcacagaatcgttgc

SEQ ID NO: 4717917 - DNA, 25 bp, Homo sapien
tgagcaaagtcactctgttaaacgg

SEQ ID NO: 4717918 - DNA, 25 bp, Homo sapien
ataatccacaggctgagcaaagtca

SEQ ID NO: 4717919 - DNA, 25 bp, Homo sapien
tcattataatccacaggctgagcaa

SEQ ID NO: 4717920 - DNA, 25 bp, Homo sapien
tgttaaacggtggactcaggactca

SEQ ID NO: 4717921 - DNA, 25 bp, Homo sapien
tccacctactgggaggcactaagct

SEQ ID NO: 4717922 - DNA, 25 bp, Homo sapien
gaaaccacatgcctgattgtagcct

SEQ ID NO: 4717923 - DNA, 25 bp, Homo sapien
taacctctgctactggatgcctgaa

SEQ ID NO: 4717924 - DNA, 25 bp, Homo sapien
tggtatcgccgtactgcagggagtt

SEQ ID NO: 4717925 - DNA, 25 bp, Homo sapien
tggcagtttgcactaagaatcggac

SEQ ID NO: 4717926 - DNA, 25 bp, Homo sapien
ggagagacgcagaaacaactctgtg

SEQ ID NO: 4717927 - DNA, 25 bp, Homo sapien
ggacttctgaagtgcaagagattga

SEQ ID NO: 4717928 - DNA, 25 bp, Homo sapien
tacaaagcacaaaagccttggtttc

SEQ ID NO: 4717929 - DNA, 25 bp, Homo sapien
gtctctatgggaaccactctgtgcc

SEQ ID NO: 4717930 - DNA, 25 bp, Homo sapien
ggaggcacatccgagagctctgaag

SEQ ID NO: 4717931 - DNA, 25 bp, Homo sapien
tttggtctctatgggaaccactctg

SEQ ID NO: 4717932 - DNA, 25 bp, Homo sapien
catccgagagctctgaagcctgggc

SEQ ID NO: 4717933 - DNA, 25 bp, Homo sapien
cacccagaggccgtgcagtgtagtg

SEQ ID NO: 4717934 - DNA, 25 bp, Homo sapien
tagatatttggaagtaggtgggacc

SEQ ID NO: 4717935 - DNA, 25 bp, Homo sapien
gaatcagaggttctggtttgactct

SEQ ID NO: 4717936 - DNA, 25 bp, Homo sapien
ggaacaggcagtcccagtgtgcata

SEQ ID NO: 4717937 - DNA, 25 bp, Homo sapien
aagatgtgctggcttgtctactcac

SEQ ID NO: 4717938 - DNA, 25 bp, Homo sapien
agagccaaggtcttaacccagtgcg

SEQ ID NO: 4717939 - DNA, 25 bp, Homo sapien
gatgatattgctacccactgttgca

SEQ ID NO: 4717940 - DNA, 25 bp, Homo sapien
cagtgcgtggttcatccctcctaag

SEQ ID NO: 4717941 - DNA, 25 bp, Homo sapien
tagccataggcaaccatcaagtgac

SEQ ID NO: 4717942 - DNA, 25 bp, Homo sapien
gaacagtcatgtacaagtgattgag

SEQ ID NO: 4717943 - DNA, 25 bp, Homo sapien
tttctgcaagtctcctagccatagg

SEQ ID NO: 4717944 - DNA, 25 bp, Homo sapien
ttatggacacttcggttgtttgcac

SEQ ID NO: 4717945 - DNA, 25 bp, Homo sapien
aatgcattggaactctagattgctt

SEQ ID NO: 4717946 - DNA, 25 bp, Homo sapien
tgcttttggcagtatctctagattg

SEQ ID NO: 4717947 - DNA, 25 bp, Homo sapien
tatacacagcaaagctacagatttg

SEQ ID NO: 4717948 - DNA, 25 bp, Homo sapien
ttggttaggtatatttgcagctatt

SEQ ID NO: 4717949 - DNA, 25 bp, Homo sapien
gtacttgatgtaattccaattttta

SEQ ID NO: 4717950 - DNA, 25 bp, Homo sapien
gcatttctataagcatgtcctttat

SEQ ID NO: 4717951 - DNA, 25 bp, Homo sapien
tgagcaagggtgatcttttaggggt

SEQ ID NO: 4717952 - DNA, 25 bp, Homo sapien
gcttgcttgattcaattgccaagac

SEQ ID NO: 4717953 - DNA, 25 bp, Homo sapien
ctgcttgcttgattcaattgccaag

SEQ ID NO: 4717954 - DNA, 25 bp, Homo sapien
ttgatgtagtgctcccccaatttcc

SEQ ID NO: 4717955 - DNA, 25 bp, Homo sapien
gatctagccatccagcagagctacc

SEQ ID NO: 4717956 - DNA, 25 bp, Homo sapien
ggtagtatagggatgatcaggcagt

SEQ ID NO: 4717957 - DNA, 25 bp, Homo sapien
attgcactagttttgtgctgtttgg

SEQ ID NO: 4717958 - DNA, 25 bp, Homo sapien
caatataattataccctttcagtta

SEQ ID NO: 4717959 - DNA, 25 bp, Homo sapien
aatataattataccctttcagttat

SEQ ID NO: 4717960 - DNA, 25 bp, Homo sapien
gatagaggcaatgcaatacataata

SEQ ID NO: 4717961 - DNA, 25 bp, Homo sapien
tggctcagtcatagaagtctacagc

SEQ ID NO: 4717962 - DNA, 25 bp, Homo sapien
tgagattcctgtactatgcaaatag

SEQ ID NO: 4717963 - DNA, 25 bp, Homo sapien
ataggtgcaccaccaagaccagtta

SEQ ID NO: 4717964 - DNA, 25 bp, Homo sapien
ggcacccctgtgtactttaagatgt

SEQ ID NO: 4717965 - DNA, 25 bp, Homo sapien
tacatgacctttggaactgaaacct

SEQ ID NO: 4717966 - DNA, 25 bp, Homo sapien
tgagtaagctgtgcctagtcattca

SEQ ID NO: 4717967 - DNA, 25 bp, Homo sapien
gcctcagcacatagaagaatttcag

SEQ ID NO: 4717968 - DNA, 25 bp, Homo sapien
gctagaaagctatgtcagtcaggtt

SEQ ID NO: 4717969 - DNA, 25 bp, Homo sapien
tggcagacccccataactctcccca

SEQ ID NO: 4717970 - DNA, 25 bp, Homo sapien
gcagacccccataactctccccagg

SEQ ID NO: 4717971 - DNA, 25 bp, Homo sapien
tgtggcagacccccataactctccc

SEQ ID NO: 4717972 - DNA, 25 bp, Homo sapien
actgtggcagacccccataactctc

SEQ ID NO: 4717973 - DNA, 25 bp, Homo sapien
acctgtgtccatgaactacgtgagt

SEQ ID NO: 4717974 - DNA, 25 bp, Homo sapien
cctgtgtccatgaactacgtgagtt

SEQ ID NO: 4717975 - DNA, 25 bp, Homo sapien
cacctgtgtccatgaactacgtgag

SEQ ID NO: 4717976 - DNA, 25 bp, Homo sapien
tcacctgtgtccatgaactacgtga

SEQ ID NO: 4717977 - DNA, 25 bp, Homo sapien
gtgggatcctaagtgattcgcagtc

SEQ ID NO: 4717978 - DNA, 25 bp, Homo sapien
aaccgagggtgggatcctaagtgat

SEQ ID NO: 4717979 - DNA, 25 bp, Homo sapien
ttctttccacatggctgccagttca

SEQ ID NO: 4717980 - DNA, 25 bp, Homo sapien
caaaaagctgattcgcagagtattc

SEQ ID NO: 4717981 - DNA, 25 bp, Homo sapien
gcatcatttggtcctaatcttagta

SEQ ID NO: 4717982 - DNA, 25 bp, Homo sapien
ggatttgcatcatttggtcctaatc

SEQ ID NO: 4717983 - DNA, 25 bp, Homo sapien
gagctgttacttcacagcttgtcac

SEQ ID NO: 4717984 - DNA, 25 bp, Homo sapien
caaggccacatctgctctggcaagg

SEQ ID NO: 4717985 - DNA, 25 bp, Homo sapien
cagaggtagccgtgagctgaaatca

SEQ ID NO: 4717986 - DNA, 25 bp, Homo sapien
aggtagccgtgagctgaaatcacgc

SEQ ID NO: 4717987 - DNA, 25 bp, Homo sapien
gcagaggtagccgtgagctgaaatc

SEQ ID NO: 4717988 - DNA, 25 bp, Homo sapien
gaggcagaggtagccgtgagctgaa

SEQ ID NO: 4717989 - DNA, 25 bp, Homo sapien
agtaagatcttttagaaatggaatc

SEQ ID NO: 4717990 - DNA, 25 bp, Homo sapien
agatcttttagaaatggaatcttaa

SEQ ID NO: 4717991 - DNA, 25 bp, Homo sapien
aagtaagatcttttagaaatggaat

SEQ ID NO: 4717992 - DNA, 25 bp, Homo sapien
taagatcttttagaaatggaatctt

SEQ ID NO: 4717993 - DNA, 25 bp, Homo sapien
ctattgatagattagcttcttcggt

SEQ ID NO: 4717994 - DNA, 25 bp, Homo sapien
cttcttcggtctcttcacagtttca

SEQ ID NO: 4717995 - DNA, 25 bp, Homo sapien
agcttcttcggtctcttcacagttt

SEQ ID NO: 4717996 - DNA, 25 bp, Homo sapien
attgatagattagcttcttcggtct

SEQ ID NO: 4717997 - DNA, 25 bp, Homo sapien
ctgaagagttatccaatggcttgaa

SEQ ID NO: 4717998 - DNA, 25 bp, Homo sapien
cttgaatgggtcctttaggagaaca

SEQ ID NO: 4717999 - DNA, 25 bp, Homo sapien
acatttttagccctgctcacacact

SEQ ID NO: 4718000 - DNA, 25 bp, Homo sapien
gttatccaatggcttgaatgggtcc

SEQ ID NO: 4718001 - DNA, 25 bp, Homo sapien
aggaaatgccgtaattgcaagtgaa

SEQ ID NO: 4718002 - DNA, 25 bp, Homo sapien
aaaggaaatgccgtaattgcaagtg

SEQ ID NO: 4718003 - DNA, 25 bp, Homo sapien
ttccaaaggaaatgccgtaattgca

SEQ ID NO: 4718004 - DNA, 25 bp, Homo sapien
tgccgtaattgcaagtgaaaaagca

SEQ ID NO: 4718005 - DNA, 25 bp, Homo sapien
agtcctctccggcaccagatacaat

SEQ ID NO: 4718006 - DNA, 25 bp, Homo sapien
ggatgctgggtcagtaaaattcctc

SEQ ID NO: 4718007 - DNA, 25 bp, Homo sapien
ccggcaccagatacaatctccaaga

SEQ ID NO: 4718008 - DNA, 25 bp, Homo sapien
gagccagtcctctccggcaccagat

SEQ ID NO: 4718009 - DNA, 25 bp, Homo sapien
caatgtgtagccaagggtaagaatc

SEQ ID NO: 4718010 - DNA, 25 bp, Homo sapien
cgttgatcttgctaggaactgcaga

SEQ ID NO: 4718011 - DNA, 25 bp, Homo sapien
gtaagaatcactgccttggagacag

SEQ ID NO: 4718012 - DNA, 25 bp, Homo sapien
cttctgcgttgatcttgctaggaac

SEQ ID NO: 4718013 - DNA, 25 bp, Homo sapien
tggcatggccaggacgcttcccaac

SEQ ID NO: 4718014 - DNA, 25 bp, Homo sapien
gcatggccaggacgcttcccaactg

SEQ ID NO: 4718015 - DNA, 25 bp, Homo sapien
tccaggattcgttctgctataatgc

SEQ ID NO: 4718016 - DNA, 25 bp, Homo sapien
tggccaggacgcttcccaactgtgc

SEQ ID NO: 4718017 - DNA, 25 bp, Homo sapien
catctggaaagccagaaatttagct

SEQ ID NO: 4718018 - DNA, 25 bp, Homo sapien
ccatctggaaagccagaaatttagc

SEQ ID NO: 4718019 - DNA, 25 bp, Homo sapien
ctggaaagccagaaatttagctttg

SEQ ID NO: 4718020 - DNA, 25 bp, Homo sapien
tctggaaagccagaaatttagcttt

SEQ ID NO: 4718021 - DNA, 25 bp, Homo sapien
tctgatgggatgagttgcaaagtca

SEQ ID NO: 4718022 - DNA, 25 bp, Homo sapien
aatagtttccatcctctgatgggat

SEQ ID NO: 4718023 - DNA, 25 bp, Homo sapien
tcaaattctttctcgcacgagtctg

SEQ ID NO: 4718024 - DNA, 25 bp, Homo sapien
cgagtctggattgggaactctttct

SEQ ID NO: 4718025 - DNA, 25 bp, Homo sapien
ggcttaagtctaagtgggctgcaaa

SEQ ID NO: 4718026 - DNA, 25 bp, Homo sapien
catgtagggacaactttattggcac

SEQ ID NO: 4718027 - DNA, 25 bp, Homo sapien
gctgtgaaggatgctgtgatgacca

SEQ ID NO: 4718028 - DNA, 25 bp, Homo sapien
tactcaacatgattcagctaagggc

SEQ ID NO: 4718029 - DNA, 25 bp, Homo sapien
gtgaccatggaagagtgtaagactg

SEQ ID NO: 4718030 - DNA, 25 bp, Homo sapien
taagactgattgtctcctgtaagct

SEQ ID NO: 4718031 - DNA, 25 bp, Homo sapien
agagtgtaagactgattgtctcctg

SEQ ID NO: 4718032 - DNA, 25 bp, Homo sapien
tttgtgaccatggaagagtgtaaga

SEQ ID NO: 4718033 - DNA, 25 bp, Homo sapien
agcagtatctgaagtaggggctttg

SEQ ID NO: 4718034 - DNA, 25 bp, Homo sapien
aaggacaggaagaggagcagtatct

SEQ ID NO: 4718035 - DNA, 25 bp, Homo sapien
caggaagaggagcagtatctgaagt

SEQ ID NO: 4718036 - DNA, 25 bp, Homo sapien
gagcagtatctgaagtaggggcttt

SEQ ID NO: 4718037 - DNA, 25 bp, Homo sapien
gaagccttgcatcaattcagcttag

SEQ ID NO: 4718038 - DNA, 25 bp, Homo sapien
gtctctatgacaagttccctcaggg

SEQ ID NO: 4718039 - DNA, 25 bp, Homo sapien
ccctttcctcccctagctctagcac

SEQ ID NO: 4718040 - DNA, 25 bp, Homo sapien
tcaattcagcttagtgtctctatga

SEQ ID NO: 4718041 - DNA, 25 bp, Homo sapien
gtctttagcttgatactggagtcat

SEQ ID NO: 4718042 - DNA, 25 bp, Homo sapien
tctttagcttgatactggagtcatt

SEQ ID NO: 4718043 - DNA, 25 bp, Homo sapien
cctttaaggcatgtctttagcttga

SEQ ID NO: 4718044 - DNA, 25 bp, Homo sapien
tttagcttgatactggagtcatttc

SEQ ID NO: 4718045 - DNA, 25 bp, Homo sapien
aaatgcgttctcatcagaattcctg

SEQ ID NO: 4718046 - DNA, 25 bp, Homo sapien
gccacaataagaggccaccttccga

SEQ ID NO: 4718047 - DNA, 25 bp, Homo sapien
tgtgcttcttactgcatggagggta

SEQ ID NO: 4718048 - DNA, 25 bp, Homo sapien
ggttacatccaacagccacaataag

SEQ ID NO: 4718049 - DNA, 25 bp, Homo sapien
tcaaagggacatatatagaagaaaa

SEQ ID NO: 4718050 - DNA, 25 bp, Homo sapien
agggacatatatagaagaaaaggaa

SEQ ID NO: 4718051 - DNA, 25 bp, Homo sapien
caaagggacatatatagaagaaaag

SEQ ID NO: 4718052 - DNA, 25 bp, Homo sapien
aaagggacatatatagaagaaaagg

SEQ ID NO: 4718053 - DNA, 25 bp, Homo sapien
tatcacagggctcatgagcagcttc

SEQ ID NO: 4718054 - DNA, 25 bp, Homo sapien
tagaattgcagacctcagaacatgt

SEQ ID NO: 4718055 - DNA, 25 bp, Homo sapien
ggcccatcccacactcactactaga

SEQ ID NO: 4718056 - DNA, 25 bp, Homo sapien
gaacatgtcttgatgacatctttca

SEQ ID NO: 4718057 - DNA, 25 bp, Homo sapien
taatcttcttcgggggcaaatttgc

SEQ ID NO: 4718058 - DNA, 25 bp, Homo sapien
cgtatggcgaaaggtacagccagtg

SEQ ID NO: 4718059 - DNA, 25 bp, Homo sapien
cttcttcgggggcaaatttgccaca

SEQ ID NO: 4718060 - DNA, 25 bp, Homo sapien
aaatttgccacagccacgtatggcg

SEQ ID NO: 4718061 - DNA, 25 bp, Homo sapien
aatcagagtgttaggtttcccaggt

SEQ ID NO: 4718062 - DNA, 25 bp, Homo sapien
cctgtgggtagtcagcggagaacca

SEQ ID NO: 4718063 - DNA, 25 bp, Homo sapien
tgtgtggttcctctaaggactcctg

SEQ ID NO: 4718064 - DNA, 25 bp, Homo sapien
ggagaaccagaactcctagttgcat

SEQ ID NO: 4718065 - DNA, 25 bp, Homo sapien
acaatgagtggctaagacacttaac

SEQ ID NO: 4718066 - DNA, 25 bp, Homo sapien
catttgctgtaggtagaagaagcta

SEQ ID NO: 4718067 - DNA, 25 bp, Homo sapien
taaggaccctgcttaggagatgaaa

SEQ ID NO: 4718068 - DNA, 25 bp, Homo sapien
tctaagattttagcagttggcttaa

SEQ ID NO: 4718069 - DNA, 25 bp, Homo sapien
cctcgttagtcacttaaagggtgct

SEQ ID NO: 4718070 - DNA, 25 bp, Homo sapien
tctggatacagattaccctcgttag

SEQ ID NO: 4718071 - DNA, 25 bp, Homo sapien
tatggaagacacgataagtatagtc

SEQ ID NO: 4718072 - DNA, 25 bp, Homo sapien
ggctctgtggttacggtcccaaaca

SEQ ID NO: 4718073 - DNA, 25 bp, Homo sapien
cattgccttgaatagatactgctgt

SEQ ID NO: 4718074 - DNA, 25 bp, Homo sapien
taggctttgggagcaacatacagtc

SEQ ID NO: 4718075 - DNA, 25 bp, Homo sapien
aacactaggttatgctgaggtaaca

SEQ ID NO: 4718076 - DNA, 25 bp, Homo sapien
tgtatcagtcaggttaacactaggt

SEQ ID NO: 4718077 - DNA, 25 bp, Homo sapien
ttgcccctggaaactgcaagtaccc

SEQ ID NO: 4718078 - DNA, 25 bp, Homo sapien
gatagttgcatcagcgctaactgct

SEQ ID NO: 4718079 - DNA, 25 bp, Homo sapien
ggtagagagatgcttgttgcccctg

SEQ ID NO: 4718080 - DNA, 25 bp, Homo sapien
ggcggtggcaacagcaacgatagtt

SEQ ID NO: 4718081 - DNA, 25 bp, Homo sapien
tggtaacttgtcgtgcggagcgaac

SEQ ID NO: 4718082 - DNA, 25 bp, Homo sapien
accatgggcacgtccgcgctctggg

SEQ ID NO: 4718083 - DNA, 25 bp, Homo sapien
tcggaaggactggtaacttgtcgtg

SEQ ID NO: 4718084 - DNA, 25 bp, Homo sapien
aaggactggtaacttgtcgtgcgga

SEQ ID NO: 4718085 - DNA, 25 bp, Homo sapien
cgaggcgtaggtctccgtttgccca

SEQ ID NO: 4718086 - DNA, 25 bp, Homo sapien
gaggcgtaggtctccgtttgcccac

SEQ ID NO: 4718087 - DNA, 25 bp, Homo sapien
cttagagcagtgtttgaccaacaac

SEQ ID NO: 4718088 - DNA, 25 bp, Homo sapien
gaattagcctacatattcaccactt

SEQ ID NO: 4718089 - DNA, 25 bp, Homo sapien
caaaaacgatttgattatgtccatg

SEQ ID NO: 4718090 - DNA, 25 bp, Homo sapien
cttatttccatgactcagaagaatt

SEQ ID NO: 4718091 - DNA, 25 bp, Homo sapien
tattacgctgttgtggaaatgtgat

SEQ ID NO: 4718092 - DNA, 25 bp, Homo sapien
cccaattccagtgcacaaatggtcg

SEQ ID NO: 4718093 - DNA, 25 bp, Homo sapien
cacaaatggtcgctgtattacgctg

SEQ ID NO: 4718094 - DNA, 25 bp, Homo sapien
aagactgtgttgacggcagtgatga

SEQ ID NO: 4718095 - DNA, 25 bp, Homo sapien
gaatctgacttcgtgtgcaacaatg

SEQ ID NO: 4718096 - DNA, 25 bp, Homo sapien
gcaacaatggccagtgtgttcccag

SEQ ID NO: 4718097 - DNA, 25 bp, Homo sapien
gagatcctgactgcgaagatggttc

SEQ ID NO: 4718098 - DNA, 25 bp, Homo sapien
tgttcccagccgatggaagtgtgat

SEQ ID NO: 4718099 - DNA, 25 bp, Homo sapien
tgtggcgcccattctactcagtgta

SEQ ID NO: 4718100 - DNA, 25 bp, Homo sapien
actcagtgtatcccagtgtcctgga

SEQ ID NO: 4718101 - DNA, 25 bp, Homo sapien
gaaaatgattgtgacagtggagaag

SEQ ID NO: 4718102 - DNA, 25 bp, Homo sapien
tgccgcatacatgaaatcagctgtg

SEQ ID NO: 4718103 - DNA, 25 bp, Homo sapien
tgtggcgcccatgagttccagtgca

SEQ ID NO: 4718104 - DNA, 25 bp, Homo sapien
tgtagtcccgacgagttcacctgct

SEQ ID NO: 4718105 - DNA, 25 bp, Homo sapien
aatataacatgtagtcccgacgagt

SEQ ID NO: 4718106 - DNA, 25 bp, Homo sapien
ggaactttgtatgcaatggccagga

SEQ ID NO: 4718107 - DNA, 25 bp, Homo sapien
tctggtgtccttagagcatgctgcc

SEQ ID NO: 4718108 - DNA, 25 bp, Homo sapien
gatgtgaatacctatgcctgccagc

SEQ ID NO: 4718109 - DNA, 25 bp, Homo sapien
tatatactaggcaccggaataccca

SEQ ID NO: 4718110 - DNA, 25 bp, Homo sapien
tacagtctatctcgaagaggtccct

SEQ ID NO: 4718111 - DNA, 25 bp, Homo sapien
tctacttccgcactgttaacctggc

SEQ ID NO: 4718112 - DNA, 25 bp, Homo sapien
accacagcagtatcagaggtcagtg

SEQ ID NO: 4718113 - DNA, 25 bp, Homo sapien
aaaagggacttctgccgcatgggcc

SEQ ID NO: 4718114 - DNA, 25 bp, Homo sapien
cctctgtagggatcaatgtgaccac

SEQ ID NO: 4718115 - DNA, 25 bp, Homo sapien
tcaatggttgggacaatggcaatag

SEQ ID NO: 4718116 - DNA, 25 bp, Homo sapien
tttctagacagtattgccacctctg

SEQ ID NO: 4718117 - DNA, 25 bp, Homo sapien
tgtgctatagtgtataccacctgta

SEQ ID NO: 4718118 - DNA, 25 bp, Homo sapien
gccacctctggccaaatatgcactt

SEQ ID NO: 4718119 - DNA, 25 bp, Homo sapien
gatgataggctcaacaccaggaagg

SEQ ID NO: 4718120 - DNA, 25 bp, Homo sapien
tgcctccctgattgggcagggatga

SEQ ID NO: 4718121 - DNA, 25 bp, Homo sapien
tctgcctgtgggatatctgtttggc

SEQ ID NO: 4718122 - DNA, 25 bp, Homo sapien
gggatatctgtttggctgcctccct

SEQ ID NO: 4718123 - DNA, 25 bp, Homo sapien
gtctcttgtatatccagcatataat

SEQ ID NO: 4718124 - DNA, 25 bp, Homo sapien
tctcttgtatatccagcatataatt

SEQ ID NO: 4718125 - DNA, 25 bp, Homo sapien
cgctagaatggtagatcttccaaca

SEQ ID NO: 4718126 - DNA, 25 bp, Homo sapien
cagacgctagaatggtagatcttcc

SEQ ID NO: 4718127 - DNA, 25 bp, Homo sapien
ggtagatcttccaacaacttgcact

SEQ ID NO: 4718128 - DNA, 25 bp, Homo sapien
tcttccaacaacttgcactgtgtgc

SEQ ID NO: 4718129 - DNA, 25 bp, Homo sapien
gaatcttgcaaactaggaatcactt

SEQ ID NO: 4718130 - DNA, 25 bp, Homo sapien
caactccaggagtgtaatattggct

SEQ ID NO: 4718131 - DNA, 25 bp, Homo sapien
tctgcatccgtacaatgagtgaatg

SEQ ID NO: 4718132 - DNA, 25 bp, Homo sapien
tatagtcgtggtcaattatcttcca

SEQ ID NO: 4718133 - DNA, 25 bp, Homo sapien
gaggtttgacatcacagactttaca

SEQ ID NO: 4718134 - DNA, 25 bp, Homo sapien
tcaaactaatgccaagtgaaagcca

SEQ ID NO: 4718135 - DNA, 25 bp, Homo sapien
tgtgcttaggcattgtttgggttgc

SEQ ID NO: 4718136 - DNA, 25 bp, Homo sapien
gtgaaagccattccctaacagtgtt

SEQ ID NO: 4718137 - DNA, 25 bp, Homo sapien
gatatcatgcccagaacaggagacc

SEQ ID NO: 4718138 - DNA, 25 bp, Homo sapien
aaggacaaatctctggtatcgaagg

SEQ ID NO: 4718139 - DNA, 25 bp, Homo sapien
tatcctaccctgagagccaatgcaa

SEQ ID NO: 4718140 - DNA, 25 bp, Homo sapien
tatcgaaggaaggtggcaatattac

SEQ ID NO: 4718141 - DNA, 25 bp, Homo sapien
taaaaatgctgcagtctaactctgg

SEQ ID NO: 4718142 - DNA, 25 bp, Homo sapien
tgacaatggttgcagcccactcatt

SEQ ID NO: 4718143 - DNA, 25 bp, Homo sapien
taactctggtcttggcacttcataa

SEQ ID NO: 4718144 - DNA, 25 bp, Homo sapien
tcataaagtaagtgtcaagccaggt

SEQ ID NO: 4718145 - DNA, 25 bp, Homo sapien
tatcttaaggatgcagggctagtgt

SEQ ID NO: 4718146 - DNA, 25 bp, Homo sapien
gaaaccaagtgatcatctcagtagg

SEQ ID NO: 4718147 - DNA, 25 bp, Homo sapien
tgactgctctcaccctaagatcagg

SEQ ID NO: 4718148 - DNA, 25 bp, Homo sapien
cagcaaactagaaatcgaagggtac

SEQ ID NO: 4718149 - DNA, 25 bp, Homo sapien
caactgtcccgataatgttacaaaa

SEQ ID NO: 4718150 - DNA, 25 bp, Homo sapien
gaagacctgaacttaagaatgtagc

SEQ ID NO: 4718151 - DNA, 25 bp, Homo sapien
taatatgtgtttagcagttgcagga

SEQ ID NO: 4718152 - DNA, 25 bp, Homo sapien
gagccggaggccacaatcctaagca

SEQ ID NO: 4718153 - DNA, 25 bp, Homo sapien
aacttgctcgcttccattcttcatg

SEQ ID NO: 4718154 - DNA, 25 bp, Homo sapien
ttcatgttacatgtccccactggcc

SEQ ID NO: 4718155 - DNA, 25 bp, Homo sapien
gatatttgcaacttgctcgcttcca

SEQ ID NO: 4718156 - DNA, 25 bp, Homo sapien
ccattcttcatgttacatgtcccca

SEQ ID NO: 4718157 - DNA, 25 bp, Homo sapien
gagcactgctgttatgcctgacact

SEQ ID NO: 4718158 - DNA, 25 bp, Homo sapien
tgtactctctggacctacttaatta

SEQ ID NO: 4718159 - DNA, 25 bp, Homo sapien
tcttcagcccatgaggaaaaaacag

SEQ ID NO: 4718160 - DNA, 25 bp, Homo sapien
gcctgacactgttcctagagcatgg

SEQ ID NO: 4718161 - DNA, 25 bp, Homo sapien
ccttaacagaatagagtacgccatg

SEQ ID NO: 4718162 - DNA, 25 bp, Homo sapien
gatgatttgtgaactcaggctggct

SEQ ID NO: 4718163 - DNA, 25 bp, Homo sapien
cagtagctttaccattgagataggc

SEQ ID NO: 4718164 - DNA, 25 bp, Homo sapien
tcttctactgcatggaaccaagctc

SEQ ID NO: 4718165 - DNA, 25 bp, Homo sapien
gcaactggtagaacttgtcaatcaa

SEQ ID NO: 4718166 - DNA, 25 bp, Homo sapien
gagcacataactcaatggaaagcct

SEQ ID NO: 4718167 - DNA, 25 bp, Homo sapien
ggaaagcctccttcgctgcaactgg

SEQ ID NO: 4718168 - DNA, 25 bp, Homo sapien
tgtcaatcaaggttccaaagaccct

SEQ ID NO: 4718169 - DNA, 25 bp, Homo sapien
gaaacaagcctggagtgactaagtc

SEQ ID NO: 4718170 - DNA, 25 bp, Homo sapien
cattgtgcatagtcccaaagctgca

SEQ ID NO: 4718171 - DNA, 25 bp, Homo sapien
tattctaagtagcaggtgacaccat

SEQ ID NO: 4718172 - DNA, 25 bp, Homo sapien
tcatttgctggacctggatacacct

SEQ ID NO: 4718173 - DNA, 25 bp, Homo sapien
ccctgatgggtcatttggagccttc

SEQ ID NO: 4718174 - DNA, 25 bp, Homo sapien
ggatgggtccattgtctactctttt

SEQ ID NO: 4718175 - DNA, 25 bp, Homo sapien
tcctacaagggatgggtccattgtc

SEQ ID NO: 4718176 - DNA, 25 bp, Homo sapien
ggagccttcagagtcctacaaggga

SEQ ID NO: 4718177 - DNA, 25 bp, Homo sapien
catggctggcctattcctggctttt

SEQ ID NO: 4718178 - DNA, 25 bp, Homo sapien
tattcctggcttttgtcgcctttaa

SEQ ID NO: 4718179 - DNA, 25 bp, Homo sapien
gcttttgtcgcctttaacacaagca

SEQ ID NO: 4718180 - DNA, 25 bp, Homo sapien
ttgtcgcctttaacacaagcaatca

SEQ ID NO: 4718181 - DNA, 25 bp, Homo sapien
cagaattctatttgtaggcttttgc

SEQ ID NO: 4718182 - DNA, 25 bp, Homo sapien
gcttttgccattgctaaattcattg

SEQ ID NO: 4718183 - DNA, 25 bp, Homo sapien
agaattctatttgtaggcttttgcc

SEQ ID NO: 4718184 - DNA, 25 bp, Homo sapien
tgccattgctaaattcattgctcat

SEQ ID NO: 4718185 - DNA, 25 bp, Homo sapien
cctgcagcatacgtaatccctttct

SEQ ID NO: 4718186 - DNA, 25 bp, Homo sapien
cagtactgatcgatgctcatttaaa

SEQ ID NO: 4718187 - DNA, 25 bp, Homo sapien
aaagaagcaatatgatgaactgcct

SEQ ID NO: 4718188 - DNA, 25 bp, Homo sapien
tgatcgatgctcatttaaaagaagc

SEQ ID NO: 4718189 - DNA, 25 bp, Homo sapien
tcaaatatcaatcacagagctgtac

SEQ ID NO: 4718190 - DNA, 25 bp, Homo sapien
gtgatttaaaactggcatgctgcga

SEQ ID NO: 4718191 - DNA, 25 bp, Homo sapien
aaaatcgttcacctccgctctcatg

SEQ ID NO: 4718192 - DNA, 25 bp, Homo sapien
acaggacctgggacagaagcattcc

SEQ ID NO: 4718193 - DNA, 25 bp, Homo sapien
gggagccctcgtcactgcagtaatg

SEQ ID NO: 4718194 - DNA, 25 bp, Homo sapien
tgcatcaaacgcagcactcaggcat

SEQ ID NO: 4718195 - DNA, 25 bp, Homo sapien
gcacatttgccttccttggtagagc

SEQ ID NO: 4718196 - DNA, 25 bp, Homo sapien
ctggaggcttggtcagagagaacct

SEQ ID NO: 4718197 - DNA, 25 bp, Homo sapien
gaatagggcactaacctggagctag

SEQ ID NO: 4718198 - DNA, 25 bp, Homo sapien
gacattcaactgtgactacgtaggc

SEQ ID NO: 4718199 - DNA, 25 bp, Homo sapien
ggctagtcgcctgacctatctgaca

SEQ ID NO: 4718200 - DNA, 25 bp, Homo sapien
taggtggtactaactcatctgtgag

SEQ ID NO: 4718201 - DNA, 25 bp, Homo sapien
tacatcgaggaagacgaagacggcg

SEQ ID NO: 4718202 - DNA, 25 bp, Homo sapien
tggacagagggcaactataactact

SEQ ID NO: 4718203 - DNA, 25 bp, Homo sapien
tcctaagagcgaggttgaccgacat

SEQ ID NO: 4718204 - DNA, 25 bp, Homo sapien
agctaagcctgtgcgacgactacga

SEQ ID NO: 4718205 - DNA, 25 bp, Homo sapien
atattccaagtgatgaaaggtcatc

SEQ ID NO: 4718206 - DNA, 25 bp, Homo sapien
tattccaagtgatgaaaggtcatcc

SEQ ID NO: 4718207 - DNA, 25 bp, Homo sapien
cagggcaagttaaagctgtagaaac

SEQ ID NO: 4718208 - DNA, 25 bp, Homo sapien
tacggcatgaactcactccttcaaa

SEQ ID NO: 4718209 - DNA, 25 bp, Homo sapien
agttttccagggcaagttaaagctg

SEQ ID NO: 4718210 - DNA, 25 bp, Homo sapien
aaccaaacaggaaactacggcatga

SEQ ID NO: 4718211 - DNA, 25 bp, Homo sapien
ccatctagggagaaatggcttggcc

SEQ ID NO: 4718212 - DNA, 25 bp, Homo sapien
tcacacatagcctcctagcagaaga

SEQ ID NO: 4718213 - DNA, 25 bp, Homo sapien
aaagccagtgtgcagaatgatcaaa

SEQ ID NO: 4718214 - DNA, 25 bp, Homo sapien
gagccaaggaacaagaaacagatca

SEQ ID NO: 4718215 - DNA, 25 bp, Homo sapien
gctgaaggcttatgagtataccacc

SEQ ID NO: 4718216 - DNA, 25 bp, Homo sapien
gcagacatacacaaaggccatttcg

SEQ ID NO: 4718217 - DNA, 25 bp, Homo sapien
gaccaaccttagtcagaatcccaga

SEQ ID NO: 4718218 - DNA, 25 bp, Homo sapien
taccagctgtatgcttttaggcaag

SEQ ID NO: 4718219 - DNA, 25 bp, Homo sapien
ttctgccctgcagcatgaccaaggg

SEQ ID NO: 4718220 - DNA, 25 bp, Homo sapien
tagttgagttcctacagccgtggct

SEQ ID NO: 4718221 - DNA, 25 bp, Homo sapien
gaatgttctgggtgtgtactcctca

SEQ ID NO: 4718222 - DNA, 25 bp, Homo sapien
tatgagtagtaatggcctcccactg

SEQ ID NO: 4718223 - DNA, 25 bp, Homo sapien
tatctattacataatgggtgcccgg

SEQ ID NO: 4718224 - DNA, 25 bp, Homo sapien
ggtgcccggatcatggtagctctta

SEQ ID NO: 4718225 - DNA, 25 bp, Homo sapien
ggccaagtgagcctcttcaagcctc

SEQ ID NO: 4718226 - DNA, 25 bp, Homo sapien
cttattgggagggttaactgataca

SEQ ID NO: 4718227 - DNA, 25 bp, Homo sapien
gagttacagtgaacaaacttccctg

SEQ ID NO: 4718228 - DNA, 25 bp, Homo sapien
caatggttcccacgagtctagttta

SEQ ID NO: 4718229 - DNA, 25 bp, Homo sapien
ttgataaccatatgtgtgccaagca

SEQ ID NO: 4718230 - DNA, 25 bp, Homo sapien
taacaatactggagtgaggcacgat

SEQ ID NO: 4718231 - DNA, 25 bp, Homo sapien
tggccgcctcaatgcagattctcta

SEQ ID NO: 4718232 - DNA, 25 bp, Homo sapien
gatatttaaggtgtcaggctctctg

SEQ ID NO: 4718233 - DNA, 25 bp, Homo sapien
aagcttcagggaaagcctggccgcc

SEQ ID NO: 4718234 - DNA, 25 bp, Homo sapien
attaacatgcatgggtgagaaccac

SEQ ID NO: 4718235 - DNA, 25 bp, Homo sapien
ggttgaaaactgtgtggcactaccc

SEQ ID NO: 4718236 - DNA, 25 bp, Homo sapien
gcaaagcttccatgtatagcaccag

SEQ ID NO: 4718237 - DNA, 25 bp, Homo sapien
taagtgtcttgaggcgttccctgcc

SEQ ID NO: 4718238 - DNA, 25 bp, Homo sapien
aattgccaaccacaatctacatggg

SEQ ID NO: 4718239 - DNA, 25 bp, Homo sapien
gaaactgaacccctacttttcatca

SEQ ID NO: 4718240 - DNA, 25 bp, Homo sapien
actcaaggtagattaaagattcaaa

SEQ ID NO: 4718241 - DNA, 25 bp, Homo sapien
aagcaatgggaaaagaactccattt

SEQ ID NO: 4718242 - DNA, 25 bp, Homo sapien
gacctcaaaactctaagaatcctgg

SEQ ID NO: 4718243 - DNA, 25 bp, Homo sapien
agctatttgtggcagtagcaagcaa

SEQ ID NO: 4718244 - DNA, 25 bp, Homo sapien
caaagtcgtttgtcaggaattgtca

SEQ ID NO: 4718245 - DNA, 25 bp, Homo sapien
tatggcttatagtctcaggtgagga

SEQ ID NO: 4718246 - DNA, 25 bp, Homo sapien
tgtttgctgtcccatttaaatgtct

SEQ ID NO: 4718247 - DNA, 25 bp, Homo sapien
tgtctgaggactgctacctgtgagg

SEQ ID NO: 4718248 - DNA, 25 bp, Homo sapien
tcctgtaacatagcctcaagatggt

SEQ ID NO: 4718249 - DNA, 25 bp, Homo sapien
ctttgttatggtggtctccagcgga

SEQ ID NO: 4718250 - DNA, 25 bp, Homo sapien
gaggaggtatgcatctacagaatct

SEQ ID NO: 4718251 - DNA, 25 bp, Homo sapien
ggcagctcatctgacctctgaagag

SEQ ID NO: 4718252 - DNA, 25 bp, Homo sapien
tatctacacgggtgatacccacagc

SEQ ID NO: 4718253 - DNA, 25 bp, Homo sapien
gatgaatacgtagctcaaagggaga

SEQ ID NO: 4718254 - DNA, 25 bp, Homo sapien
caaggttgggctacatcactgtgac

SEQ ID NO: 4718255 - DNA, 25 bp, Homo sapien
ggtctgtgtggagtcagaaatgcaa

SEQ ID NO: 4718256 - DNA, 25 bp, Homo sapien
ggaatgggggatgttcattgattgg

SEQ ID NO: 4718257 - DNA, 25 bp, Homo sapien
tgagtcatgaattgagggtctgtgt

SEQ ID NO: 4718258 - DNA, 25 bp, Homo sapien
gaaaacagttctcatgctctcagcc

SEQ ID NO: 4718259 - DNA, 25 bp, Homo sapien
tgttatatgtgggatctgggaagcc

SEQ ID NO: 4718260 - DNA, 25 bp, Homo sapien
tgcaagacacgaaggcaagagcctg

SEQ ID NO: 4718261 - DNA, 25 bp, Homo sapien
cagggtagatagaagaagcaagctc

SEQ ID NO: 4718262 - DNA, 25 bp, Homo sapien
caaggaacatgaacgagactggcat

SEQ ID NO: 4718263 - DNA, 25 bp, Homo sapien
acatgtaatcagtgacttattttat

SEQ ID NO: 4718264 - DNA, 25 bp, Homo sapien
agccattctcgtgatcagccttctg

SEQ ID NO: 4718265 - DNA, 25 bp, Homo sapien
tcacatgtaatcagtgacttatttt

SEQ ID NO: 4718266 - DNA, 25 bp, Homo sapien
aagccattctcgtgatcagccttct

SEQ ID NO: 4718267 - DNA, 25 bp, Homo sapien
cagtatggaccatgtgacatagcac

SEQ ID NO: 4718268 - DNA, 25 bp, Homo sapien
taattgtccatgttgatagagctcc

SEQ ID NO: 4718269 - DNA, 25 bp, Homo sapien
catcttcagggaacatcggaacagg

SEQ ID NO: 4718270 - DNA, 25 bp, Homo sapien
gacacttacggttatcacaaacaga

SEQ ID NO: 4718271 - DNA, 25 bp, Homo sapien
tgaaaccacaggattacactggcct

SEQ ID NO: 4718272 - DNA, 25 bp, Homo sapien
gaaagaccattcaagtggccccagg

SEQ ID NO: 4718273 - DNA, 25 bp, Homo sapien
gagagactcactttactgtatcaac

SEQ ID NO: 4718274 - DNA, 25 bp, Homo sapien
cactggcctaaggtgttgcctttag

SEQ ID NO: 4718275 - DNA, 25 bp, Homo sapien
taatgatgacttcatgcccaacaca

SEQ ID NO: 4718276 - DNA, 25 bp, Homo sapien
tgtctaatgatgacttcatgcccaa

SEQ ID NO: 4718277 - DNA, 25 bp, Homo sapien
catgcccaacacattggaacttgat

SEQ ID NO: 4718278 - DNA, 25 bp, Homo sapien
cattggaacttgatgactggatgtt

SEQ ID NO: 4718279 - DNA, 25 bp, Homo sapien
gaaaaactgcacttgagcctcactg

SEQ ID NO: 4718280 - DNA, 25 bp, Homo sapien
tacagtagttaaattagagggcatc

SEQ ID NO: 4718281 - DNA, 25 bp, Homo sapien
gggtccatatctctcaaccgaaaag

SEQ ID NO: 4718282 - DNA, 25 bp, Homo sapien
gaaaagagcttcctcagactactgg

SEQ ID NO: 4718283 - DNA, 25 bp, Homo sapien
ggaatgcctcaaacgtaccactatg

SEQ ID NO: 4718284 - DNA, 25 bp, Homo sapien
gatctaacttaggtaaggtcccaga

SEQ ID NO: 4718285 - DNA, 25 bp, Homo sapien
taaggaacctactgaaacccataca

SEQ ID NO: 4718286 - DNA, 25 bp, Homo sapien
tctgactaatactcatggccagctg

SEQ ID NO: 4718287 - DNA, 25 bp, Homo sapien
caatggtgggcatccaaagacaaca

SEQ ID NO: 4718288 - DNA, 25 bp, Homo sapien
tcactttggtgacagggattggaac

SEQ ID NO: 4718289 - DNA, 25 bp, Homo sapien
tcatgatgcagttaccaggagaaag

SEQ ID NO: 4718290 - DNA, 25 bp, Homo sapien
actggccaaggaaaaatcatgatgc

SEQ ID NO: 4718291 - DNA, 25 bp, Homo sapien
cttgggctccaaaccagacctacta

SEQ ID NO: 4718292 - DNA, 25 bp, Homo sapien
tgtccacatgatatgatatggctgc

SEQ ID NO: 4718293 - DNA, 25 bp, Homo sapien
gaaccactgccatagaagaatttga

SEQ ID NO: 4718294 - DNA, 25 bp, Homo sapien
gaagttgggacctggactctctgct

SEQ ID NO: 4718295 - DNA, 25 bp, Homo sapien
gggctaacactagggagaatccagg

SEQ ID NO: 4718296 - DNA, 25 bp, Homo sapien
ggcttaatgggaaatctacctccag

SEQ ID NO: 4718297 - DNA, 25 bp, Homo sapien
gcttgcctgtagcatggaggacaca

SEQ ID NO: 4718298 - DNA, 25 bp, Homo sapien
ggcttgtacaacttaggatcccctg

SEQ ID NO: 4718299 - DNA, 25 bp, Homo sapien
catgagaaaacaagcaggtaaaact

SEQ ID NO: 4718300 - DNA, 25 bp, Homo sapien
taacgcctggtaataaatagggcaa

SEQ ID NO: 4718301 - DNA, 25 bp, Homo sapien
gagctgtctctactatagggcagaa

SEQ ID NO: 4718302 - DNA, 25 bp, Homo sapien
aaaactagttcaaaggaggatacag

SEQ ID NO: 4718303 - DNA, 25 bp, Homo sapien
tcataggctgttatctgtggtatca

SEQ ID NO: 4718304 - DNA, 25 bp, Homo sapien
tatctgtggtatcatccagggcatc

SEQ ID NO: 4718305 - DNA, 25 bp, Homo sapien
gggcatcatcatcggtacaaacata

SEQ ID NO: 4718306 - DNA, 25 bp, Homo sapien
tccagggcatcatcatcggtacaaa

SEQ ID NO: 4718307 - DNA, 25 bp, Homo sapien
gagcagacaccagaataacacagaa

SEQ ID NO: 4718308 - DNA, 25 bp, Homo sapien
ggagcagacaccagaataacacaga

SEQ ID NO: 4718309 - DNA, 25 bp, Homo sapien
aggagcagacaccagaataacacag

SEQ ID NO: 4718310 - DNA, 25 bp, Homo sapien
gcagacaccagaataacacagaagc

SEQ ID NO: 4718311 - DNA, 25 bp, Homo sapien
gttacagccatcagcgcttttgcag

SEQ ID NO: 4718312 - DNA, 25 bp, Homo sapien
tccacccacacccttatattgggtg

SEQ ID NO: 4718313 - DNA, 25 bp, Homo sapien
tgtgagaatccatgtcaaaagttac

SEQ ID NO: 4718314 - DNA, 25 bp, Homo sapien
cacacccttatattgggtgatgtga

SEQ ID NO: 4718315 - DNA, 25 bp, Homo sapien
gggtcctggtagtcggtaggctgga

SEQ ID NO: 4718316 - DNA, 25 bp, Homo sapien
ctgggaaggattcaatacaccgtgg

SEQ ID NO: 4718317 - DNA, 25 bp, Homo sapien
tggtagtcggtaggctggagtagtc

SEQ ID NO: 4718318 - DNA, 25 bp, Homo sapien
ggattcaatacaccgtggcaggagg

SEQ ID NO: 4718319 - DNA, 25 bp, Homo sapien
aaattccactttactgtgcccacga

SEQ ID NO: 4718320 - DNA, 25 bp, Homo sapien
catggaacctaatccataaaacagc

SEQ ID NO: 4718321 - DNA, 25 bp, Homo sapien
ttcaaacaaaatctagcatggaacc

SEQ ID NO: 4718322 - DNA, 25 bp, Homo sapien
agctaggtaggcagctgtgaacccc

SEQ ID NO: 4718323 - DNA, 25 bp, Homo sapien
ggttggtcccaccatatatgattgg

SEQ ID NO: 4718324 - DNA, 25 bp, Homo sapien
cactttatatatctggttggtccca

SEQ ID NO: 4718325 - DNA, 25 bp, Homo sapien
gaatcaactcattcaactacacttt

SEQ ID NO: 4718326 - DNA, 25 bp, Homo sapien
tcagactatgctcactgaagatgtc

SEQ ID NO: 4718327 - DNA, 25 bp, Homo sapien
aacacatatacagagtaccccaatt

SEQ ID NO: 4718328 - DNA, 25 bp, Homo sapien
tgcttactactcagtgtaacagagg

SEQ ID NO: 4718329 - DNA, 25 bp, Homo sapien
caattaccagtatggtggaccctac

SEQ ID NO: 4718330 - DNA, 25 bp, Homo sapien
tactcagtgtaacagaggagacagc

SEQ ID NO: 4718331 - DNA, 25 bp, Homo sapien
cagaaaaaatcattccatcttgctc

SEQ ID NO: 4718332 - DNA, 25 bp, Homo sapien
gaaaaaatcattccatcttgctctt

SEQ ID NO: 4718333 - DNA, 25 bp, Homo sapien
tcttttctgcattgggaaacagaac

SEQ ID NO: 4718334 - DNA, 25 bp, Homo sapien
aatcattccatcttgctcttaactc

SEQ ID NO: 4718335 - DNA, 25 bp, Homo sapien
tgactttgtttgcaacttccaggtc

SEQ ID NO: 4718336 - DNA, 25 bp, Homo sapien
ttgactttgtttgcaacttccaggt

SEQ ID NO: 4718337 - DNA, 25 bp, Homo sapien
ttttcagtgcagctttgactttgtt

SEQ ID NO: 4718338 - DNA, 25 bp, Homo sapien
tctacaagtgtttttgcaaaacaac

SEQ ID NO: 4718339 - DNA, 25 bp, Homo sapien
cttcataccaacatgctctacaagt

SEQ ID NO: 4718340 - DNA, 25 bp, Homo sapien
gctctacaagtgtttttgcaaaaca

SEQ ID NO: 4718341 - DNA, 25 bp, Homo sapien
cataccaacatgctctacaagtgtt

SEQ ID NO: 4718342 - DNA, 25 bp, Homo sapien
ctgtaaaatatactgaagcttagtg

SEQ ID NO: 4718343 - DNA, 25 bp, Homo sapien
gtgaacatcacataataagatatat

SEQ ID NO: 4718344 - DNA, 25 bp, Homo sapien
aatatactgaagcttagtgaacatc

SEQ ID NO: 4718345 - DNA, 25 bp, Homo sapien
tactgaagcttagtgaacatcacat

SEQ ID NO: 4718346 - DNA, 25 bp, Homo sapien
ttgctctattaaccacttcagaact

SEQ ID NO: 4718347 - DNA, 25 bp, Homo sapien
aaccacttcagaactagatgtcctg

SEQ ID NO: 4718348 - DNA, 25 bp, Homo sapien
ttaaccacttcagaactagatgtcc

SEQ ID NO: 4718349 - DNA, 25 bp, Homo sapien
ctattaaccacttcagaactagatg

SEQ ID NO: 4718350 - DNA, 25 bp, Homo sapien
atgtcagacaccaacacacacgcag

SEQ ID NO: 4718351 - DNA, 25 bp, Homo sapien
tctagcaccacttcttgggcgtgtt

SEQ ID NO: 4718352 - DNA, 25 bp, Homo sapien
attctaggagctcccgtctgcggac

SEQ ID NO: 4718353 - DNA, 25 bp, Homo sapien
ttcatggtaggctgaacgtctccag

SEQ ID NO: 4718354 - DNA, 25 bp, Homo sapien
tctcgtactgtatgtgcaggatctc

SEQ ID NO: 4718355 - DNA, 25 bp, Homo sapien
gtacaataggaccttccttccatat

SEQ ID NO: 4718356 - DNA, 25 bp, Homo sapien
ttcaatgatttctcgtactgtatgt

SEQ ID NO: 4718357 - DNA, 25 bp, Homo sapien
gcttagtaagtacaataggaccttc

SEQ ID NO: 4718358 - DNA, 25 bp, Homo sapien
tgccttgcgctgaactccagctaga

SEQ ID NO: 4718359 - DNA, 25 bp, Homo sapien
tgggctactaccaggagcaaatcag

SEQ ID NO: 4718360 - DNA, 25 bp, Homo sapien
ggcttggcttactcctaacaagagt

SEQ ID NO: 4718361 - DNA, 25 bp, Homo sapien
tgatacacctgcctaactcatgggc

SEQ ID NO: 4718362 - DNA, 25 bp, Homo sapien
ctgtggtgtccactcttacggtagt

SEQ ID NO: 4718363 - DNA, 25 bp, Homo sapien
tgaagtagggttaaggcgtgtgcgt

SEQ ID NO: 4718364 - DNA, 25 bp, Homo sapien
aatcaacccatccatggtgctgaag

SEQ ID NO: 4718365 - DNA, 25 bp, Homo sapien
atgaagtagggttaaggcgtgtgcg

SEQ ID NO: 4718366 - DNA, 25 bp, Homo sapien
tacaatcaaatgccgccagtaaaac

SEQ ID NO: 4718367 - DNA, 25 bp, Homo sapien
caatcaaatgccgccagtaaaacca

SEQ ID NO: 4718368 - DNA, 25 bp, Homo sapien
atacaatcaaatgccgccagtaaaa

SEQ ID NO: 4718369 - DNA, 25 bp, Homo sapien
atcaaatgccgccagtaaaaccaaa

SEQ ID NO: 4718370 - DNA, 25 bp, Homo sapien
agtgcaatctggcatcatttaccca

SEQ ID NO: 4718371 - DNA, 25 bp, Homo sapien
tccaggcagtaattcccatatttaa

SEQ ID NO: 4718372 - DNA, 25 bp, Homo sapien
ggtcataaggaaaactactatcaag

SEQ ID NO: 4718373 - DNA, 25 bp, Homo sapien
gtagagaactatcacaatacaatgt

SEQ ID NO: 4718374 - DNA, 25 bp, Homo sapien
agccaccttttcaacataagtcttc

SEQ ID NO: 4718375 - DNA, 25 bp, Homo sapien
acataagtcttcattgttttcacaa

SEQ ID NO: 4718376 - DNA, 25 bp, Homo sapien
cataagtcttcattgttttcacaat

SEQ ID NO: 4718377 - DNA, 25 bp, Homo sapien
attagccaccttttcaacataagtc

SEQ ID NO: 4718378 - DNA, 25 bp, Homo sapien
catggccactctggcgccatcgtgt

SEQ ID NO: 4718379 - DNA, 25 bp, Homo sapien
atgccacaggcagtgcatggccact

SEQ ID NO: 4718380 - DNA, 25 bp, Homo sapien
cgcttcgcggatggcttcaatcatt

SEQ ID NO: 4718381 - DNA, 25 bp, Homo sapien
tgtgtgccaggtagaccaccgcttc

SEQ ID NO: 4718382 - DNA, 25 bp, Homo sapien
tacgtgggtggctaccatcaggaaa

SEQ ID NO: 4718383 - DNA, 25 bp, Homo sapien
tacacgcatgctaagttccaaatga

SEQ ID NO: 4718384 - DNA, 25 bp, Homo sapien
gcctcagaaccgtgggatactgtat

SEQ ID NO: 4718385 - DNA, 25 bp, Homo sapien
tcatcaaaccataagcttacgtggg

SEQ ID NO: 4718386 - DNA, 25 bp, Homo sapien
agaatactttatgcaccaatgagtg

SEQ ID NO: 4718387 - DNA, 25 bp, Homo sapien
aagaatactttatgcaccaatgagt

SEQ ID NO: 4718388 - DNA, 25 bp, Homo sapien
taacactgcctttatgggcaaagca

SEQ ID NO: 4718389 - DNA, 25 bp, Homo sapien
gaggccgatggtcaggcataaaaga

SEQ ID NO: 4718390 - DNA, 25 bp, Homo sapien
tagtgtgacacttggtggatccagg

SEQ ID NO: 4718391 - DNA, 25 bp, Homo sapien
aggtgatacccaagtagacagcaaa

SEQ ID NO: 4718392 - DNA, 25 bp, Homo sapien
tctgggcaacagttatggaaaacct

SEQ ID NO: 4718393 - DNA, 25 bp, Homo sapien
gaaatctccttttgcaccaagaatg

SEQ ID NO: 4718394 - DNA, 25 bp, Homo sapien
tgtaagcaggaaatagctacctctt

SEQ ID NO: 4718395 - DNA, 25 bp, Homo sapien
ccatgaagggcacatgcacaggctt

SEQ ID NO: 4718396 - DNA, 25 bp, Homo sapien
tctaacactttgtccagagttcggt

SEQ ID NO: 4718397 - DNA, 25 bp, Homo sapien
cactttgtccagagttcggtgatct

SEQ ID NO: 4718398 - DNA, 25 bp, Homo sapien
ttgtccagagttcggtgatctgctg

SEQ ID NO: 4718399 - DNA, 25 bp, Homo sapien
gctgtacctctaacactttgtccag

SEQ ID NO: 4718400 - DNA, 25 bp, Homo sapien
ttgtcattgtatgcgtactccacga

SEQ ID NO: 4718401 - DNA, 25 bp, Homo sapien
ctgatgcttccgcatgccgcagcat

SEQ ID NO: 4718402 - DNA, 25 bp, Homo sapien
cgtactccacgatggctgatgcttc

SEQ ID NO: 4718403 - DNA, 25 bp, Homo sapien
cctcacgtggcctttaaaacttctg

SEQ ID NO: 4718404 - DNA, 25 bp, Homo sapien
acaatatttctcgaatatttggctt

SEQ ID NO: 4718405 - DNA, 25 bp, Homo sapien
aacaatatttctcgaatatttggct

SEQ ID NO: 4718406 - DNA, 25 bp, Homo sapien
cttaacaatatttctcgaatatttg

SEQ ID NO: 4718407 - DNA, 25 bp, Homo sapien
caatatttctcgaatatttggcttt

SEQ ID NO: 4718408 - DNA, 25 bp, Homo sapien
tcacacgagttgaatcgtgtgcaaa

SEQ ID NO: 4718409 - DNA, 25 bp, Homo sapien
ctggatcacacgagttgaatcgtgt

SEQ ID NO: 4718410 - DNA, 25 bp, Homo sapien
gatcacacgagttgaatcgtgtgca

SEQ ID NO: 4718411 - DNA, 25 bp, Homo sapien
actggatcacacgagttgaatcgtg

SEQ ID NO: 4718412 - DNA, 25 bp, Homo sapien
aatcactcattaactttactctttt

SEQ ID NO: 4718413 - DNA, 25 bp, Homo sapien
tttcccttgaatcaacttctgcaaa

SEQ ID NO: 4718414 - DNA, 25 bp, Homo sapien
ttgaatcaacttctgcaaatcactc

SEQ ID NO: 4718415 - DNA, 25 bp, Homo sapien
caacttctgcaaatcactcattaac

SEQ ID NO: 4718416 - DNA, 25 bp, Homo sapien
caacaatgtcatagttggttttatc

SEQ ID NO: 4718417 - DNA, 25 bp, Homo sapien
cccgaacaacaatgtcatagttggt

SEQ ID NO: 4718418 - DNA, 25 bp, Homo sapien
ctgctttgcccgaacaacaatgtca

SEQ ID NO: 4718419 - DNA, 25 bp, Homo sapien
caatgtcatagttggttttatcact

SEQ ID NO: 4718420 - DNA, 25 bp, Homo sapien
ttgctttctgagcagtttgtacatt

SEQ ID NO: 4718421 - DNA, 25 bp, Homo sapien
tttgctttctgagcagtttgtacat

SEQ ID NO: 4718422 - DNA, 25 bp, Homo sapien
tccttgtcttaaggctgctgtccct

SEQ ID NO: 4718423 - DNA, 25 bp, Homo sapien
ctaggggatggcactgagaaaacca

SEQ ID NO: 4718424 - DNA, 25 bp, Homo sapien
caaaggagcagtgttaagacacgct

SEQ ID NO: 4718425 - DNA, 25 bp, Homo sapien
taagcagcccttaggcagggtaaaa

SEQ ID NO: 4718426 - DNA, 25 bp, Homo sapien
catcgcttctaccatctggctggaa

SEQ ID NO: 4718427 - DNA, 25 bp, Homo sapien
tattcttgaactgctttacaccctt

SEQ ID NO: 4718428 - DNA, 25 bp, Homo sapien
ccaccttctttagcaactttccttg

SEQ ID NO: 4718429 - DNA, 25 bp, Homo sapien
tgatttgtccccttgctgcttattc

SEQ ID NO: 4718430 - DNA, 25 bp, Homo sapien
ttttcttgtgctgtctttgtactct

SEQ ID NO: 4718431 - DNA, 25 bp, Homo sapien
gtactctttcctgtgaattgctttt

SEQ ID NO: 4718432 - DNA, 25 bp, Homo sapien
ctttgtactctttcctgtgaattgc

SEQ ID NO: 4718433 - DNA, 25 bp, Homo sapien
tttgtactctttcctgtgaattgct

SEQ ID NO: 4718434 - DNA, 25 bp, Homo sapien
caatcactgcagttctcttcatcaa

SEQ ID NO: 4718435 - DNA, 25 bp, Homo sapien
caaaaccaaaaacaatcactgcagt

SEQ ID NO: 4718436 - DNA, 25 bp, Homo sapien
tgcagttctcttcatcaaataagag

SEQ ID NO: 4718437 - DNA, 25 bp, Homo sapien
cactgcagttctcttcatcaaataa

SEQ ID NO: 4718438 - DNA, 25 bp, Homo sapien
gaattgctaacctgtaccccgtgag

SEQ ID NO: 4718439 - DNA, 25 bp, Homo sapien
tgtcctttcggcagacagattcagg

SEQ ID NO: 4718440 - DNA, 25 bp, Homo sapien
tgtgtccttttgacgcggcccaact

SEQ ID NO: 4718441 - DNA, 25 bp, Homo sapien
caaataatgctagctccagccaggg

SEQ ID NO: 4718442 - DNA, 25 bp, Homo sapien
cgcccggccagtcccgcccttcttg

SEQ ID NO: 4718443 - DNA, 25 bp, Homo sapien
gcagggtgcgaacccctcccaagag

SEQ ID NO: 4718444 - DNA, 25 bp, Homo sapien
agtcccaaactcctagcccagaaag

SEQ ID NO: 4718445 - DNA, 25 bp, Homo sapien
agagaccttcccgacttccagcgcc

SEQ ID NO: 4718446 - DNA, 25 bp, Homo sapien
cgaccgctgagcctgccacactcac

SEQ ID NO: 4718447 - DNA, 25 bp, Homo sapien
agcggatcccgaccgcctctccgct

SEQ ID NO: 4718448 - DNA, 25 bp, Homo sapien
agacagctcgcgcagcggatcccga

SEQ ID NO: 4718449 - DNA, 25 bp, Homo sapien
cgcacacgtgggaccgagacagctc

SEQ ID NO: 4718450 - DNA, 25 bp, Homo sapien
acgtgggaccgagacagctcgcgca

SEQ ID NO: 4718451 - DNA, 25 bp, Homo sapien
cttatcttagtgatctttaggctcc

SEQ ID NO: 4718452 - DNA, 25 bp, Homo sapien
tgtaaatataccttacctgttggaa

SEQ ID NO: 4718453 - DNA, 25 bp, Homo sapien
tcttactttgtgagggtgacacgcc

SEQ ID NO: 4718454 - DNA, 25 bp, Homo sapien
aaataggcagcatggttcacaaatc

SEQ ID NO: 4718455 - DNA, 25 bp, Homo sapien
aggataaggcttgtatggtgaccac

SEQ ID NO: 4718456 - DNA, 25 bp, Homo sapien
caggataaggcttgtatggtgacca

SEQ ID NO: 4718457 - DNA, 25 bp, Homo sapien
tcaggataaggcttgtatggtgacc

SEQ ID NO: 4718458 - DNA, 25 bp, Homo sapien
agttacagtgagttccagagtggga

SEQ ID NO: 4718459 - DNA, 25 bp, Homo sapien
catccagaaggcagccactcttctt

SEQ ID NO: 4718460 - DNA, 25 bp, Homo sapien
atccagaaggcagccactcttcttg

SEQ ID NO: 4718461 - DNA, 25 bp, Homo sapien
tgtgaacagttacagtgagttccag

SEQ ID NO: 4718462 - DNA, 25 bp, Homo sapien
tctggatgattagtggatcaaaagg

SEQ ID NO: 4718463 - DNA, 25 bp, Homo sapien
gtctatctcactgccgctccttggt

SEQ ID NO: 4718464 - DNA, 25 bp, Homo sapien
gatgccacatatttttgtgcatatt

SEQ ID NO: 4718465 - DNA, 25 bp, Homo sapien
taaagcagcagtccatgagagcgtc

SEQ ID NO: 4718466 - DNA, 25 bp, Homo sapien
tgtattctctcacagatcgagaggc

SEQ ID NO: 4718467 - DNA, 25 bp, Homo sapien
gcagcctgggtagttggtcatttta

SEQ ID NO: 4718468 - DNA, 25 bp, Homo sapien
tgcagatgcattgccccaatctctg

SEQ ID NO: 4718469 - DNA, 25 bp, Homo sapien
tcttccgctgtgtctatgtcttctc

SEQ ID NO: 4718470 - DNA, 25 bp, Homo sapien
tctcggtctggcttggaggaaagcc

SEQ ID NO: 4718471 - DNA, 25 bp, Homo sapien
tctccaggaggtcataagaactctt

SEQ ID NO: 4718472 - DNA, 25 bp, Homo sapien
gagacatgcattcctgagctttgga

SEQ ID NO: 4718473 - DNA, 25 bp, Homo sapien
tttctctctcgagtctccaggaggt

SEQ ID NO: 4718474 - DNA, 25 bp, Homo sapien
gaccttctctctcctctgtcaccca

SEQ ID NO: 4718475 - DNA, 25 bp, Homo sapien
tttgaccttctctctcctctgtcac

SEQ ID NO: 4718476 - DNA, 25 bp, Homo sapien
ttgtcccaggccctttgaccttctc

SEQ ID NO: 4718477 - DNA, 25 bp, Homo sapien
accttctctctcctctgtcacccat

SEQ ID NO: 4718478 - DNA, 25 bp, Homo sapien
tggaagggcatggtgttgaagatat

SEQ ID NO: 4718479 - DNA, 25 bp, Homo sapien
ggggtggaagggcatggtgttgaag

SEQ ID NO: 4718480 - DNA, 25 bp, Homo sapien
ctattgtaccctcacccacggtggg

SEQ ID NO: 4718481 - DNA, 25 bp, Homo sapien
ggtggaagggcatggtgttgaagat

SEQ ID NO: 4718482 - DNA, 25 bp, Homo sapien
agtctgctggttagcatgttccatc

SEQ ID NO: 4718483 - DNA, 25 bp, Homo sapien
tctgctggttagcatgttccatctg

SEQ ID NO: 4718484 - DNA, 25 bp, Homo sapien
gtctgctggttagcatgttccatct

SEQ ID NO: 4718485 - DNA, 25 bp, Homo sapien
tgctgactaggactataagctggct

SEQ ID NO: 4718486 - DNA, 25 bp, Homo sapien
tgactaggactataagctggctgtg

SEQ ID NO: 4718487 - DNA, 25 bp, Homo sapien
gactaggactataagctggctgtgt

SEQ ID NO: 4718488 - DNA, 25 bp, Homo sapien
gctgactaggactataagctggctg

SEQ ID NO: 4718489 - DNA, 25 bp, Homo sapien
ggtgtctccgcaaaagcagttgctg

SEQ ID NO: 4718490 - DNA, 25 bp, Homo sapien
gctctggtgtctccgcaaaagcagt

SEQ ID NO: 4718491 - DNA, 25 bp, Homo sapien
gatcgtaagcaatttgggtccaaac

SEQ ID NO: 4718492 - DNA, 25 bp, Homo sapien
cagttgctgggccaacgtagtgccg

SEQ ID NO: 4718493 - DNA, 25 bp, Homo sapien
ctgtgtgaacagtcaggctctgctg

SEQ ID NO: 4718494 - DNA, 25 bp, Homo sapien
ggctctgctggtatgcagctgatgt

SEQ ID NO: 4718495 - DNA, 25 bp, Homo sapien
aaagcttctcctgcaacttcagaat

SEQ ID NO: 4718496 - DNA, 25 bp, Homo sapien
ctgtagggccaaaagcttctcctgc

SEQ ID NO: 4718497 - DNA, 25 bp, Homo sapien
gcttctcctgcaacttcagaatttg

SEQ ID NO: 4718498 - DNA, 25 bp, Homo sapien
ttcagaatttgttccttggtctcct

SEQ ID NO: 4718499 - DNA, 25 bp, Homo sapien
tcctgtcgcttatgctcctgctcca

SEQ ID NO: 4718500 - DNA, 25 bp, Homo sapien
cctgtcgcttatgctcctgctccat

SEQ ID NO: 4718501 - DNA, 25 bp, Homo sapien
tttctcctgtcgcttatgctcctgc

SEQ ID NO: 4718502 - DNA, 25 bp, Homo sapien
tctcctgtcgcttatgctcctgctc

SEQ ID NO: 4718503 - DNA, 25 bp, Homo sapien
gcttactacctaagaaataactgct

SEQ ID NO: 4718504 - DNA, 25 bp, Homo sapien
cttactacctaagaaataactgctt

SEQ ID NO: 4718505 - DNA, 25 bp, Homo sapien
gatccaacattatcatcggctgtca

SEQ ID NO: 4718506 - DNA, 25 bp, Homo sapien
gggggatccaacattatcatcggct

SEQ ID NO: 4718507 - DNA, 25 bp, Homo sapien
tttgggggatccaacattatcatcg

SEQ ID NO: 4718508 - DNA, 25 bp, Homo sapien
gggatccaacattatcatcggctgt

SEQ ID NO: 4718509 - DNA, 25 bp, Homo sapien
gtttgtcatacatagcacttattgt

SEQ ID NO: 4718510 - DNA, 25 bp, Homo sapien
cctcctggactcaattttataaatc

SEQ ID NO: 4718511 - DNA, 25 bp, Homo sapien
aaatccttgattggttggtgaggtc

SEQ ID NO: 4718512 - DNA, 25 bp, Homo sapien
gaatgtgtaatataagggccagatc

SEQ ID NO: 4718513 - DNA, 25 bp, Homo sapien
tttataaatccttgattggttggtg

SEQ ID NO: 4718514 - DNA, 25 bp, Homo sapien
gtttctcatattctacaatcccggc

SEQ ID NO: 4718515 - DNA, 25 bp, Homo sapien
tttttttcaagtcctcaatggtcat

SEQ ID NO: 4718516 - DNA, 25 bp, Homo sapien
tctgtttctcatattctacaatccc

SEQ ID NO: 4718517 - DNA, 25 bp, Homo sapien
agtcctcaatggtcatctgatcaaa

SEQ ID NO: 4718518 - DNA, 25 bp, Homo sapien
ttcagcatccagctgggcagtatat

SEQ ID NO: 4718519 - DNA, 25 bp, Homo sapien
caagatttcacatcttctttgtctt

SEQ ID NO: 4718520 - DNA, 25 bp, Homo sapien
tccagctgggcagtatatttatcct

SEQ ID NO: 4718521 - DNA, 25 bp, Homo sapien
cagcatccagctgggcagtatattt

SEQ ID NO: 4718522 - DNA, 25 bp, Homo sapien
cctagtcaatagctggtggattctc

SEQ ID NO: 4718523 - DNA, 25 bp, Homo sapien
taaagtagccaacctggaggtgagg

SEQ ID NO: 4718524 - DNA, 25 bp, Homo sapien
gggccttgtagtaagcctagtcaat

SEQ ID NO: 4718525 - DNA, 25 bp, Homo sapien
aaacttcagggcattaagcttcttc

SEQ ID NO: 4718526 - DNA, 25 bp, Homo sapien
ctcctctttgccgactgtcaaaatc

SEQ ID NO: 4718527 - DNA, 25 bp, Homo sapien
ctctttgccgactgtcaaaatccta

SEQ ID NO: 4718528 - DNA, 25 bp, Homo sapien
ccactcctctttgccgactgtcaaa

SEQ ID NO: 4718529 - DNA, 25 bp, Homo sapien
tacaacccactcctctttgccgact

SEQ ID NO: 4718530 - DNA, 25 bp, Homo sapien
ggctacaaacagcactttccctgac

SEQ ID NO: 4718531 - DNA, 25 bp, Homo sapien
tattggctacaaacagcactttccc

SEQ ID NO: 4718532 - DNA, 25 bp, Homo sapien
ttattggctacaaacagcactttcc

SEQ ID NO: 4718533 - DNA, 25 bp, Homo sapien
ttggctacaaacagcactttccctg

SEQ ID NO: 4718534 - DNA, 25 bp, Homo sapien
tcccttccttggcaaagagaggagt

SEQ ID NO: 4718535 - DNA, 25 bp, Homo sapien
gcacctggtaccaatgagtcagagg

SEQ ID NO: 4718536 - DNA, 25 bp, Homo sapien
ggcactgcacctggtaccaatgagt

SEQ ID NO: 4718537 - DNA, 25 bp, Homo sapien
cactgcacctggtaccaatgagtca

SEQ ID NO: 4718538 - DNA, 25 bp, Homo sapien
tggagaaacaagaattagtgtcatt

SEQ ID NO: 4718539 - DNA, 25 bp, Homo sapien
gattacaaatagtagatagcatggg

SEQ ID NO: 4718540 - DNA, 25 bp, Homo sapien
aggccatggatgagcccagactgcc

SEQ ID NO: 4718541 - DNA, 25 bp, Homo sapien
acatcaaaccagaacgccaggccat

SEQ ID NO: 4718542 - DNA, 25 bp, Homo sapien
ctgcatagggtgaatgtaacatctg

SEQ ID NO: 4718543 - DNA, 25 bp, Homo sapien
caatgacctggaactgcatagggtg

SEQ ID NO: 4718544 - DNA, 25 bp, Homo sapien
caagaaccacgctactctgctgcaa

SEQ ID NO: 4718545 - DNA, 25 bp, Homo sapien
gacaaaatccttcaagaaccacgct

SEQ ID NO: 4718546 - DNA, 25 bp, Homo sapien
caaccatctggctaagtcttaactt

SEQ ID NO: 4718547 - DNA, 25 bp, Homo sapien
tccaggcaaacaaccatctggctaa

SEQ ID NO: 4718548 - DNA, 25 bp, Homo sapien
ggcaaacaaccatctggctaagtct

SEQ ID NO: 4718549 - DNA, 25 bp, Homo sapien
caaacaaccatctggctaagtctta

SEQ ID NO: 4718550 - DNA, 25 bp, Homo sapien
tgctgtgtatttgactgttccagcc

SEQ ID NO: 4718551 - DNA, 25 bp, Homo sapien
gtttgctgtgtatttgactgttcca

SEQ ID NO: 4718552 - DNA, 25 bp, Homo sapien
gctgtgtatttgactgttccagcca

SEQ ID NO: 4718553 - DNA, 25 bp, Homo sapien
tttgctgtgtatttgactgttccag

SEQ ID NO: 4718554 - DNA, 25 bp, Homo sapien
tccactgtagcaccctggagactgg

SEQ ID NO: 4718555 - DNA, 25 bp, Homo sapien
gattgaccccatagaaacattgctg

SEQ ID NO: 4718556 - DNA, 25 bp, Homo sapien
tggagactggacagattgaccccat

SEQ ID NO: 4718557 - DNA, 25 bp, Homo sapien
gctgcctgaagtattcatccactgt

SEQ ID NO: 4718558 - DNA, 25 bp, Homo sapien
aaaatagcacaaaaaatcaccatgc

SEQ ID NO: 4718559 - DNA, 25 bp, Homo sapien
taaaatagcacaaaaaatcaccatg

SEQ ID NO: 4718560 - DNA, 25 bp, Homo sapien
aatagcacaaaaaatcaccatgcat

SEQ ID NO: 4718561 - DNA, 25 bp, Homo sapien
ctaaaatagcacaaaaaatcaccat

SEQ ID NO: 4718562 - DNA, 25 bp, Homo sapien
tctgtcatctgagtccccaggcccc

SEQ ID NO: 4718563 - DNA, 25 bp, Homo sapien
tgtcatctgagtccccaggcccccc

SEQ ID NO: 4718564 - DNA, 25 bp, Homo sapien
tcatctgagtccccaggccccccat

SEQ ID NO: 4718565 - DNA, 25 bp, Homo sapien
cttgtctgtcatctgagtccccagg

SEQ ID NO: 4718566 - DNA, 25 bp, Homo sapien
cgtagagctgttcatcagaaaaagg

SEQ ID NO: 4718567 - DNA, 25 bp, Homo sapien
tctggagaagtgttccacgtagagc

SEQ ID NO: 4718568 - DNA, 25 bp, Homo sapien
tggatgtcgctgaatgtcgggaaca

SEQ ID NO: 4718569 - DNA, 25 bp, Homo sapien
tgtcgctgaatgtcgggaacatcat

SEQ ID NO: 4718570 - DNA, 25 bp, Homo sapien
ttcagtgggcaaatgagcacctaga

SEQ ID NO: 4718571 - DNA, 25 bp, Homo sapien
gagcacctagattggcatgcctgaa

SEQ ID NO: 4718572 - DNA, 25 bp, Homo sapien
gattggcatgcctgaagtcgggcct

SEQ ID NO: 4718573 - DNA, 25 bp, Homo sapien
catccacaatcaccacaggaaaggt

SEQ ID NO: 4718574 - DNA, 25 bp, Homo sapien
tgaagataactctctagcatccgtt

SEQ ID NO: 4718575 - DNA, 25 bp, Homo sapien
ggttcggaaatgatcacatctacag

SEQ ID NO: 4718576 - DNA, 25 bp, Homo sapien
cagcatgtatcccattggttcggaa

SEQ ID NO: 4718577 - DNA, 25 bp, Homo sapien
cctcaggaagtgagacgtcttcagt

SEQ ID NO: 4718578 - DNA, 25 bp, Homo sapien
ttttttaaaatcaagtaatctctga

SEQ ID NO: 4718579 - DNA, 25 bp, Homo sapien
ttttaaaatcaagtaatctctgatc

SEQ ID NO: 4718580 - DNA, 25 bp, Homo sapien
tttaaaatcaagtaatctctgatct

SEQ ID NO: 4718581 - DNA, 25 bp, Homo sapien
ttaaaatcaagtaatctctgatcta

SEQ ID NO: 4718582 - DNA, 25 bp, Homo sapien
tcctgctttggaaggcttcttggct

SEQ ID NO: 4718583 - DNA, 25 bp, Homo sapien
tcaattcttctcttgggttccacgg

SEQ ID NO: 4718584 - DNA, 25 bp, Homo sapien
tcttgggttccacggagcctgggtc

SEQ ID NO: 4718585 - DNA, 25 bp, Homo sapien
cagggggacacctttcaattcttct

SEQ ID NO: 4718586 - DNA, 25 bp, Homo sapien
tgctactggcaaacctactctccaa

SEQ ID NO: 4718587 - DNA, 25 bp, Homo sapien
caagctgctactggcaaacctactc

SEQ ID NO: 4718588 - DNA, 25 bp, Homo sapien
agctgctactggcaaacctactctc

SEQ ID NO: 4718589 - DNA, 25 bp, Homo sapien
tactggcaaacctactctccaagtc

SEQ ID NO: 4718590 - DNA, 25 bp, Homo sapien
gaaaagtctcatacacccaaactca

SEQ ID NO: 4718591 - DNA, 25 bp, Homo sapien
tatggagtcaacgtgattacttggc

SEQ ID NO: 4718592 - DNA, 25 bp, Homo sapien
gcaaaagagggttcatcaattccgt

SEQ ID NO: 4718593 - DNA, 25 bp, Homo sapien
gttgatctagtcttgaaaagtctca

SEQ ID NO: 4718594 - DNA, 25 bp, Homo sapien
cagcaccttgtacatataggataaa

SEQ ID NO: 4718595 - DNA, 25 bp, Homo sapien
agcaccttgtacatataggataaaa

SEQ ID NO: 4718596 - DNA, 25 bp, Homo sapien
tctcttgcagcaccttgtacatata

SEQ ID NO: 4718597 - DNA, 25 bp, Homo sapien
ctctcttgcagcaccttgtacatat

SEQ ID NO: 4718598 - DNA, 25 bp, Homo sapien
cattaggctctgacaatctttccct

SEQ ID NO: 4718599 - DNA, 25 bp, Homo sapien
gctcacttacgtcaaaaccaaccat

SEQ ID NO: 4718600 - DNA, 25 bp, Homo sapien
caaacatgccagagttgtctacttg

SEQ ID NO: 4718601 - DNA, 25 bp, Homo sapien
agttgtctacttgtctcttggttcc

SEQ ID NO: 4718602 - DNA, 25 bp, Homo sapien
gcttcaactgcataaactgtcctag

SEQ ID NO: 4718603 - DNA, 25 bp, Homo sapien
tgatccacaaccaacatctagaacc

SEQ ID NO: 4718604 - DNA, 25 bp, Homo sapien
tactgtactgaactggcttcaactg

SEQ ID NO: 4718605 - DNA, 25 bp, Homo sapien
gctccagcctgtacagcaaaaaatg

SEQ ID NO: 4718606 - DNA, 25 bp, Homo sapien
gtacgttgtccttagtcctgagcca

SEQ ID NO: 4718607 - DNA, 25 bp, Homo sapien
ccctgggccaggaatcatgtccctt

SEQ ID NO: 4718608 - DNA, 25 bp, Homo sapien
tacttcattctgtgctccctcatga

SEQ ID NO: 4718609 - DNA, 25 bp, Homo sapien
tcctgagccatccagtaatgactga

SEQ ID NO: 4718610 - DNA, 25 bp, Homo sapien
tccaaaaatcacatagcgaaatgtc

SEQ ID NO: 4718611 - DNA, 25 bp, Homo sapien
aaatcacatagcgaaatgtcagttt

SEQ ID NO: 4718612 - DNA, 25 bp, Homo sapien
catagcgaaatgtcagtttatcaac

SEQ ID NO: 4718613 - DNA, 25 bp, Homo sapien
tcacatagcgaaatgtcagtttatc

SEQ ID NO: 4718614 - DNA, 25 bp, Homo sapien
tctgctgttgagaaatgcagccata

SEQ ID NO: 4718615 - DNA, 25 bp, Homo sapien
ctgtggtaagtggctgtcctcacaa

SEQ ID NO: 4718616 - DNA, 25 bp, Homo sapien
tcaatgtgattctggaggacggctc

SEQ ID NO: 4718617 - DNA, 25 bp, Homo sapien
cacaaaatcttgcatcatgttctgc

SEQ ID NO: 4718618 - DNA, 25 bp, Homo sapien
ccactggctgaacgctgagtattcc

SEQ ID NO: 4718619 - DNA, 25 bp, Homo sapien
ggctgaacgctgagtattccttttt

SEQ ID NO: 4718620 - DNA, 25 bp, Homo sapien
cttcggtccactggctgaacgctga

SEQ ID NO: 4718621 - DNA, 25 bp, Homo sapien
cagacgctgcttcggtccactggct

SEQ ID NO: 4718622 - DNA, 25 bp, Homo sapien
ctgcaaggataaaaagtagatccat

SEQ ID NO: 4718623 - DNA, 25 bp, Homo sapien
aaaaagtagatccatttcttcacct

SEQ ID NO: 4718624 - DNA, 25 bp, Homo sapien
taaaaagtagatccatttcttcacc

SEQ ID NO: 4718625 - DNA, 25 bp, Homo sapien
tctcttcctgcacacatgagacctg

SEQ ID NO: 4718626 - DNA, 25 bp, Homo sapien
cctgcacacatgagacctgccctgt

SEQ ID NO: 4718627 - DNA, 25 bp, Homo sapien
tcttcctgcacacatgagacctgcc

SEQ ID NO: 4718628 - DNA, 25 bp, Homo sapien
gctctcttcctgcacacatgagacc

SEQ ID NO: 4718629 - DNA, 25 bp, Homo sapien
ttggaccccatagccaaccagtaga

SEQ ID NO: 4718630 - DNA, 25 bp, Homo sapien
gatgttctgcttacaccattggacc

SEQ ID NO: 4718631 - DNA, 25 bp, Homo sapien
gctgttgaccagagggtaactcagc

SEQ ID NO: 4718632 - DNA, 25 bp, Homo sapien
tgagtctctgacactgccacagttg

SEQ ID NO: 4718633 - DNA, 25 bp, Homo sapien
caacagccttggtcccatatgctga

SEQ ID NO: 4718634 - DNA, 25 bp, Homo sapien
aacatgaggactttggaagcaacag

SEQ ID NO: 4718635 - DNA, 25 bp, Homo sapien
aagcaacagccttggtcccatatgc

SEQ ID NO: 4718636 - DNA, 25 bp, Homo sapien
ccttggtcccatatgctgaaagcag

SEQ ID NO: 4718637 - DNA, 25 bp, Homo sapien
tacaaacgatggaaagtggaagttc

SEQ ID NO: 4718638 - DNA, 25 bp, Homo sapien
caaacgatggaaagtggaagttcta

SEQ ID NO: 4718639 - DNA, 25 bp, Homo sapien
acaaacgatggaaagtggaagttct

SEQ ID NO: 4718640 - DNA, 25 bp, Homo sapien
cacagttgtgggctgtaggagatta

SEQ ID NO: 4718641 - DNA, 25 bp, Homo sapien
gctgtctctttgagcaaacaccctg

SEQ ID NO: 4718642 - DNA, 25 bp, Homo sapien
actgagcttgtgtggcagtcccagg

SEQ ID NO: 4718643 - DNA, 25 bp, Homo sapien
tagcagaagtgcaaggactgagctt

SEQ ID NO: 4718644 - DNA, 25 bp, Homo sapien
ctctcaaaaatctcctccactttgg

SEQ ID NO: 4718645 - DNA, 25 bp, Homo sapien
tggtttccttctcccattcaaccat

SEQ ID NO: 4718646 - DNA, 25 bp, Homo sapien
atctcctccactttggtttccttct

SEQ ID NO: 4718647 - DNA, 25 bp, Homo sapien
cactttggtttccttctcccattca

SEQ ID NO: 4718648 - DNA, 25 bp, Homo sapien
agcatgagactcaaccttcagtaaa

SEQ ID NO: 4718649 - DNA, 25 bp, Homo sapien
cagcatgagactcaaccttcagtaa

SEQ ID NO: 4718650 - DNA, 25 bp, Homo sapien
gcatgagactcaaccttcagtaaag

SEQ ID NO: 4718651 - DNA, 25 bp, Homo sapien
gcccatccgactaacagcagatctg

SEQ ID NO: 4718652 - DNA, 25 bp, Homo sapien
cagcagatctgtcagcagaaactct

SEQ ID NO: 4718653 - DNA, 25 bp, Homo sapien
atccgactaacagcagatctgtcag

SEQ ID NO: 4718654 - DNA, 25 bp, Homo sapien
catccgactaacagcagatctgtca

SEQ ID NO: 4718655 - DNA, 25 bp, Homo sapien
tgtagtgccagctctcaaccaaaag

SEQ ID NO: 4718656 - DNA, 25 bp, Homo sapien
ttcgaaacaagcagagagcaagcct

SEQ ID NO: 4718657 - DNA, 25 bp, Homo sapien
cagtggccatgcattcggtagttaa

SEQ ID NO: 4718658 - DNA, 25 bp, Homo sapien
ggtctgtgaccctctagtggagcat

SEQ ID NO: 4718659 - DNA, 25 bp, Homo sapien
aaagaatcaaatgctctatggtggg

SEQ ID NO: 4718660 - DNA, 25 bp, Homo sapien
atcaaatgctctatggtggggggca

SEQ ID NO: 4718661 - DNA, 25 bp, Homo sapien
ggtggggggcagagcgccaaagagt

SEQ ID NO: 4718662 - DNA, 25 bp, Homo sapien
gtggggggcagagcgccaaagagtt

SEQ ID NO: 4718663 - DNA, 25 bp, Homo sapien
tatcagcaactcttcacggtaaaac

SEQ ID NO: 4718664 - DNA, 25 bp, Homo sapien
agcaactcttcacggtaaaacactg

SEQ ID NO: 4718665 - DNA, 25 bp, Homo sapien
cttattaaaacgctggtgcactggg

SEQ ID NO: 4718666 - DNA, 25 bp, Homo sapien
tgaccccttccacttttatcagcaa

SEQ ID NO: 4718667 - DNA, 25 bp, Homo sapien
agaggggataaagagggattttcat

SEQ ID NO: 4718668 - DNA, 25 bp, Homo sapien
catggggaagaggggataaagaggg

SEQ ID NO: 4718669 - DNA, 25 bp, Homo sapien
catctgtgacagaagcatggggaag

SEQ ID NO: 4718670 - DNA, 25 bp, Homo sapien
gggataaagagggattttcatcagc

SEQ ID NO: 4718671 - DNA, 25 bp, Homo sapien
cctcatgtccatgtgaagggagttg

SEQ ID NO: 4718672 - DNA, 25 bp, Homo sapien
tgctgtgtcaaagatgagtgtcgtg

SEQ ID NO: 4718673 - DNA, 25 bp, Homo sapien
agcgggattctgaccgtatttcaca

SEQ ID NO: 4718674 - DNA, 25 bp, Homo sapien
ctaaattgttgctagggcgaaatgg

SEQ ID NO: 4718675 - DNA, 25 bp, Homo sapien
ggcgagctcctctaggataattatg

SEQ ID NO: 4718676 - DNA, 25 bp, Homo sapien
tctgaaactccaatcaccttgaact

SEQ ID NO: 4718677 - DNA, 25 bp, Homo sapien
taatgcataagtcgcaaatctgctg

SEQ ID NO: 4718678 - DNA, 25 bp, Homo sapien
gatgtactgcattaaaggcgagctc

SEQ ID NO: 4718679 - DNA, 25 bp, Homo sapien
aggcaaacagtactcttttctggaa

SEQ ID NO: 4718680 - DNA, 25 bp, Homo sapien
ttgactatagcaggcaaacagtact

SEQ ID NO: 4718681 - DNA, 25 bp, Homo sapien
gcaaacagtactcttttctggaagc

SEQ ID NO: 4718682 - DNA, 25 bp, Homo sapien
tatagcaggcaaacagtactctttt

SEQ ID NO: 4718683 - DNA, 25 bp, Homo sapien
gtccgcctcctcccctgctggttgc

SEQ ID NO: 4718684 - DNA, 25 bp, Homo sapien
ccgcctcctcccctgctggttgcac

SEQ ID NO: 4718685 - DNA, 25 bp, Homo sapien
cttcgcgtccgcctcctcccctgct

SEQ ID NO: 4718686 - DNA, 25 bp, Homo sapien
gcgtccgcctcctcccctgctggtt

SEQ ID NO: 4718687 - DNA, 25 bp, Homo sapien
ggccgaaagagctgctcctccgtca

SEQ ID NO: 4718688 - DNA, 25 bp, Homo sapien
ctccagccgcagagatttccggctg

SEQ ID NO: 4718689 - DNA, 25 bp, Homo sapien
tcctccgtcacaaagcgcagttgca

SEQ ID NO: 4718690 - DNA, 25 bp, Homo sapien
ttgcacactgtactgcaggcgcgcg

SEQ ID NO: 4718691 - DNA, 25 bp, Homo sapien
taccacattggccttgggagttgag

SEQ ID NO: 4718692 - DNA, 25 bp, Homo sapien
tctttcctgacagcgagtgctgctg

SEQ ID NO: 4718693 - DNA, 25 bp, Homo sapien
ggttctgccacgtgctctttcctga

SEQ ID NO: 4718694 - DNA, 25 bp, Homo sapien
tgacgcctagaatctcagcacggga

SEQ ID NO: 4718695 - DNA, 25 bp, Homo sapien
ggagtgaccgtttccccatcagcat

SEQ ID NO: 4718696 - DNA, 25 bp, Homo sapien
aggaatggagtgaccgtttccccat

SEQ ID NO: 4718697 - DNA, 25 bp, Homo sapien
agagaagccccttcttgggtaattg

SEQ ID NO: 4718698 - DNA, 25 bp, Homo sapien
ttgatgagcgagagaagccccttct

SEQ ID NO: 4718699 - DNA, 25 bp, Homo sapien
gatagacttcgatcccacatctgcc

SEQ ID NO: 4718700 - DNA, 25 bp, Homo sapien
tatgaaagtgatagacttcgatccc

SEQ ID NO: 4718701 - DNA, 25 bp, Homo sapien
gaggttgatgttgttatgaaagtga

SEQ ID NO: 4718702 - DNA, 25 bp, Homo sapien
gaaagtgatagacttcgatcccaca

SEQ ID NO: 4718703 - DNA, 25 bp, Homo sapien
agttccccagttattgtacagtaca

SEQ ID NO: 4718704 - DNA, 25 bp, Homo sapien
cctgccaattttgagaggacatgat

SEQ ID NO: 4718705 - DNA, 25 bp, Homo sapien
tacctagaaggtacgaaagccctga

SEQ ID NO: 4718706 - DNA, 25 bp, Homo sapien
aaagctagcctgagttcaagtctga

SEQ ID NO: 4718707 - DNA, 25 bp, Homo sapien
tatgacataggtctatccaggccca

SEQ ID NO: 4718708 - DNA, 25 bp, Homo sapien
ttatttgcacccagctagggcagcg

SEQ ID NO: 4718709 - DNA, 25 bp, Homo sapien
gctttcatgttcgatcacgcaggga

SEQ ID NO: 4718710 - DNA, 25 bp, Homo sapien
gaacagagggaatcaagtgcacgaa

SEQ ID NO: 4718711 - DNA, 25 bp, Homo sapien
cataaaccgtgctatacagtacaag

SEQ ID NO: 4718712 - DNA, 25 bp, Homo sapien
ccatctaaagagaggtgcataaacc

SEQ ID NO: 4718713 - DNA, 25 bp, Homo sapien
gattcatgattacggcactaaaacc

SEQ ID NO: 4718714 - DNA, 25 bp, Homo sapien
ctacaaatcaaaggcagtcaatgct

SEQ ID NO: 4718715 - DNA, 25 bp, Homo sapien
tgtcctaatttagaacaaaccatga

SEQ ID NO: 4718716 - DNA, 25 bp, Homo sapien
tgtaaacacttcctatgcacaatga

SEQ ID NO: 4718717 - DNA, 25 bp, Homo sapien
tatagtatcactcaaaggatggcgg

SEQ ID NO: 4718718 - DNA, 25 bp, Homo sapien
gaaaggagagccaaaatgaagagtg

SEQ ID NO: 4718719 - DNA, 25 bp, Homo sapien
gatgcacttcgataagtacctgctt

SEQ ID NO: 4718720 - DNA, 25 bp, Homo sapien
ggctgggtgtaactctctaggatct

SEQ ID NO: 4718721 - DNA, 25 bp, Homo sapien
gactttatagcagactcctgcccca

SEQ ID NO: 4718722 - DNA, 25 bp, Homo sapien
tagatccacggtcactcaaagaggg

SEQ ID NO: 4718723 - DNA, 25 bp, Homo sapien
gccaaatgggcatgcctccagtgta

SEQ ID NO: 4718724 - DNA, 25 bp, Homo sapien
taatagccgaggtacgatgatccct

SEQ ID NO: 4718725 - DNA, 25 bp, Homo sapien
gcagtggtcccaaatacagaatcag

SEQ ID NO: 4718726 - DNA, 25 bp, Homo sapien
taacagtgaggtgtgccagttacac

SEQ ID NO: 4718727 - DNA, 25 bp, Homo sapien
tgttcagcacagatagaatttgaca

SEQ ID NO: 4718728 - DNA, 25 bp, Homo sapien
aatttgacaacagtcgaccttcagg

SEQ ID NO: 4718729 - DNA, 25 bp, Homo sapien
tcttgacacctgaaactaagggaaa

SEQ ID NO: 4718730 - DNA, 25 bp, Homo sapien
tcaacttaagcccaatatcaacagg

SEQ ID NO: 4718731 - DNA, 25 bp, Homo sapien
ctggaaaaatacgctttaatattct

SEQ ID NO: 4718732 - DNA, 25 bp, Homo sapien
taagctggaaaaatacgctttaata

SEQ ID NO: 4718733 - DNA, 25 bp, Homo sapien
agctggaaaaatacgctttaatatt

SEQ ID NO: 4718734 - DNA, 25 bp, Homo sapien
gctggaaaaatacgctttaatattc

SEQ ID NO: 4718735 - DNA, 25 bp, Homo sapien
taggtatttcctgtagcgctgcact

SEQ ID NO: 4718736 - DNA, 25 bp, Homo sapien
catgcagcccactggaaatgcctgg

SEQ ID NO: 4718737 - DNA, 25 bp, Homo sapien
gattcaggaggcttggttgcacgcc

SEQ ID NO: 4718738 - DNA, 25 bp, Homo sapien
cagtctcgagaacaggctgcatgca

SEQ ID NO: 4718739 - DNA, 25 bp, Homo sapien
cagctggagattaacatgcattacc

SEQ ID NO: 4718740 - DNA, 25 bp, Homo sapien
ggatcttaacacaaactcttcatgg

SEQ ID NO: 4718741 - DNA, 25 bp, Homo sapien
cagtgagaggtaaaagggcttccat

SEQ ID NO: 4718742 - DNA, 25 bp, Homo sapien
tgtacagtgtacagccaccatgagc

SEQ ID NO: 4718743 - DNA, 25 bp, Homo sapien
tttatccagatttccaggagacacg

SEQ ID NO: 4718744 - DNA, 25 bp, Homo sapien
ctttatccagatttccaggagacac

SEQ ID NO: 4718745 - DNA, 25 bp, Homo sapien
gagacacggcatttaaatcaccaaa

SEQ ID NO: 4718746 - DNA, 25 bp, Homo sapien
ttccaggagacacggcatttaaatc

SEQ ID NO: 4718747 - DNA, 25 bp, Homo sapien
tcttagcatttcagaggcattccac

SEQ ID NO: 4718748 - DNA, 25 bp, Homo sapien
gaacaaatgtgtagccttcctaggt

SEQ ID NO: 4718749 - DNA, 25 bp, Homo sapien
tatacatttattccaaggtccaggg

SEQ ID NO: 4718750 - DNA, 25 bp, Homo sapien
tcttcacagtagctaccttgggagc

SEQ ID NO: 4718751 - DNA, 25 bp, Homo sapien
cacccacaaaagtccaacttcatag

SEQ ID NO: 4718752 - DNA, 25 bp, Homo sapien
tgctgtcgtaagcacccacaaaagt

SEQ ID NO: 4718753 - DNA, 25 bp, Homo sapien
tccccacttctaagctctttaggga

SEQ ID NO: 4718754 - DNA, 25 bp, Homo sapien
gctctttagggaaattgctgtcgta

SEQ ID NO: 4718755 - DNA, 25 bp, Homo sapien
gggaagaaagccacgcataggaagc

SEQ ID NO: 4718756 - DNA, 25 bp, Homo sapien
aatgggacacggagccaattctctg

SEQ ID NO: 4718757 - DNA, 25 bp, Homo sapien
tggcaagcgtattaagaggcatcct

SEQ ID NO: 4718758 - DNA, 25 bp, Homo sapien
gaagctaatgagcagggatcccaga

SEQ ID NO: 4718759 - DNA, 25 bp, Homo sapien
tcgcaattgaacacttaaagactct

SEQ ID NO: 4718760 - DNA, 25 bp, Homo sapien
caccaaatggaattctttcactgag

SEQ ID NO: 4718761 - DNA, 25 bp, Homo sapien
gcagaaagattctaaacagccataa

SEQ ID NO: 4718762 - DNA, 25 bp, Homo sapien
gaaaatggctaaagaggtggcttag

SEQ ID NO: 4718763 - DNA, 25 bp, Homo sapien
aactgacaccttttccaaagcaagc

SEQ ID NO: 4718764 - DNA, 25 bp, Homo sapien
tttaactgacaccttttccaaagca

SEQ ID NO: 4718765 - DNA, 25 bp, Homo sapien
ctgacaccttttccaaagcaagcac

SEQ ID NO: 4718766 - DNA, 25 bp, Homo sapien
taactgacaccttttccaaagcaag

SEQ ID NO: 4718767 - DNA, 25 bp, Homo sapien
tgtaataatagtatccacttataga

SEQ ID NO: 4718768 - DNA, 25 bp, Homo sapien
gtaataatagtatccacttatagat

SEQ ID NO: 4718769 - DNA, 25 bp, Homo sapien
tcatttgtaacacaggtgtaataat

SEQ ID NO: 4718770 - DNA, 25 bp, Homo sapien
gtgtaataatagtatccacttatag

SEQ ID NO: 4718771 - DNA, 25 bp, Homo sapien
ccttcacactgtgtgactggctcac

SEQ ID NO: 4718772 - DNA, 25 bp, Homo sapien
cttcacactgtgtgactggctcaca

SEQ ID NO: 4718773 - DNA, 25 bp, Homo sapien
tgattcgacaaggtataaactaccc

SEQ ID NO: 4718774 - DNA, 25 bp, Homo sapien
aaaacatagaactgtgcctcgcaca

SEQ ID NO: 4718775 - DNA, 25 bp, Homo sapien
agtagaacgtatctcaaagacttgc

SEQ ID NO: 4718776 - DNA, 25 bp, Homo sapien
tgttcttggagaccgggaaagagtc

SEQ ID NO: 4718777 - DNA, 25 bp, Homo sapien
tatttagactgaagtgtaattctgg

SEQ ID NO: 4718778 - DNA, 25 bp, Homo sapien
ttaggaaccatggttttaatcaata

SEQ ID NO: 4718779 - DNA, 25 bp, Homo sapien
gaggctgacttggttaggaaccatg

SEQ ID NO: 4718780 - DNA, 25 bp, Homo sapien
tcttgcaataactccacagtccctc

SEQ ID NO: 4718781 - DNA, 25 bp, Homo sapien
catgactgctataggagtctctcct

SEQ ID NO: 4718782 - DNA, 25 bp, Homo sapien
gcactgcgtaaggttaagtcccgaa

SEQ ID NO: 4718783 - DNA, 25 bp, Homo sapien
tggaaggagccaaagctagcagcac

SEQ ID NO: 4718784 - DNA, 25 bp, Homo sapien
tcgtcgtagagtagacggatcaggt

SEQ ID NO: 4718785 - DNA, 25 bp, Homo sapien
cctcggccttctgttaaaatataat

SEQ ID NO: 4718786 - DNA, 25 bp, Homo sapien
ctcggccttctgttaaaatataata

SEQ ID NO: 4718787 - DNA, 25 bp, Homo sapien
tcggccttctgttaaaatataataa

SEQ ID NO: 4718788 - DNA, 25 bp, Homo sapien
aagccaattatcctcaactcaggga

SEQ ID NO: 4718789 - DNA, 25 bp, Homo sapien
agatacctgcaacagatctctgtgg

SEQ ID NO: 4718790 - DNA, 25 bp, Homo sapien
ccaaccacaggtagacgtaagggca

SEQ ID NO: 4718791 - DNA, 25 bp, Homo sapien
gagggcaggcaagtgatgatctact

SEQ ID NO: 4718792 - DNA, 25 bp, Homo sapien
tcatagggtttcagtgcttgcatca

SEQ ID NO: 4718793 - DNA, 25 bp, Homo sapien
tgcctggcggctttaggaaaactgg

SEQ ID NO: 4718794 - DNA, 25 bp, Homo sapien
gaaccatgttgtcatcacactggca

SEQ ID NO: 4718795 - DNA, 25 bp, Homo sapien
tcatcacattgtcaagccacgcagc

SEQ ID NO: 4718796 - DNA, 25 bp, Homo sapien
ctcttgggtatacaacaaggagttg

SEQ ID NO: 4718797 - DNA, 25 bp, Homo sapien
tatgaacctctatgtataagttttg

SEQ ID NO: 4718798 - DNA, 25 bp, Homo sapien
cctctatgtataagttttgtgtgga

SEQ ID NO: 4718799 - DNA, 25 bp, Homo sapien
tcacgtgtgatcctttgtacctggc

SEQ ID NO: 4718800 - DNA, 25 bp, Homo sapien
gcagctatagtaaactctgaaatag

SEQ ID NO: 4718801 - DNA, 25 bp, Homo sapien
tttactaggcagctatagtaaactc

SEQ ID NO: 4718802 - DNA, 25 bp, Homo sapien
tctgaaatagaattgttcttagttc

SEQ ID NO: 4718803 - DNA, 25 bp, Homo sapien
aatagttgaacttattgcatataat

SEQ ID NO: 4718804 - DNA, 25 bp, Homo sapien
gacgtgtatcttcgcagagtctggg

SEQ ID NO: 4718805 - DNA, 25 bp, Homo sapien
gacattggcaaagtcgacacggttg

SEQ ID NO: 4718806 - DNA, 25 bp, Homo sapien
tctgggcaaaggcacttacagcggc

SEQ ID NO: 4718807 - DNA, 25 bp, Homo sapien
cctgggccaggtgattaagcgacgt

SEQ ID NO: 4718808 - DNA, 25 bp, Homo sapien
aatccaattaagttgggattctgtt

SEQ ID NO: 4718809 - DNA, 25 bp, Homo sapien
caatccaattaagttgggattctgt

SEQ ID NO: 4718810 - DNA, 25 bp, Homo sapien
tccaattaagttgggattctgtttc

SEQ ID NO: 4718811 - DNA, 25 bp, Homo sapien
atccaattaagttgggattctgttt

SEQ ID NO: 4718812 - DNA, 25 bp, Homo sapien
aatttcgaatggcttgggtcaaggc

SEQ ID NO: 4718813 - DNA, 25 bp, Homo sapien
tatcattctctgtggaatattgttc

SEQ ID NO: 4718814 - DNA, 25 bp, Homo sapien
tttgcaaaatttcgaatggcttggg

SEQ ID NO: 4718815 - DNA, 25 bp, Homo sapien
gctttttgcaaaatttcgaatggct

SEQ ID NO: 4718816 - DNA, 25 bp, Homo sapien
tttatacggttgactggcctgctag

SEQ ID NO: 4718817 - DNA, 25 bp, Homo sapien
ggaggttggcctagcaattacagat

SEQ ID NO: 4718818 - DNA, 25 bp, Homo sapien
ttactgctaatggaaaccgcatctg

SEQ ID NO: 4718819 - DNA, 25 bp, Homo sapien
catacatttcaaggtggccgggaac

SEQ ID NO: 4718820 - DNA, 25 bp, Homo sapien
ttactacagttttgctctaggctgc

SEQ ID NO: 4718821 - DNA, 25 bp, Homo sapien
taggctgctttcacgcaatattctg

SEQ ID NO: 4718822 - DNA, 25 bp, Homo sapien
gaacaaaagcatccgtactcgtctg

SEQ ID NO: 4718823 - DNA, 25 bp, Homo sapien
gaatcattctagattgcaatgtcac

SEQ ID NO: 4718824 - DNA, 25 bp, Homo sapien
tggtcacagttacacatccatttca

SEQ ID NO: 4718825 - DNA, 25 bp, Homo sapien
ctggtacatcccatggtcacagtta

SEQ ID NO: 4718826 - DNA, 25 bp, Homo sapien
catgtttgcacagagttatcagctt

SEQ ID NO: 4718827 - DNA, 25 bp, Homo sapien
ccatttcaggatagactcatgtttg

SEQ ID NO: 4718828 - DNA, 25 bp, Homo sapien
tatacacacactgaaacctcaagag

SEQ ID NO: 4718829 - DNA, 25 bp, Homo sapien
caggtaaggttcacaactggtatac

SEQ ID NO: 4718830 - DNA, 25 bp, Homo sapien
tccatgaggatgaaataactaccac

SEQ ID NO: 4718831 - DNA, 25 bp, Homo sapien
tagaactataccaccattgcactgg

SEQ ID NO: 4718832 - DNA, 25 bp, Homo sapien
gaattggaaaagatgttgattctga

SEQ ID NO: 4718833 - DNA, 25 bp, Homo sapien
tgaattggaaaagatgttgattctg

SEQ ID NO: 4718834 - DNA, 25 bp, Homo sapien
aattggaaaagatgttgattctgac

SEQ ID NO: 4718835 - DNA, 25 bp, Homo sapien
ctcgattcggtaatggtagtgccat

SEQ ID NO: 4718836 - DNA, 25 bp, Homo sapien
tatcaggctaaattgaagattcaca

SEQ ID NO: 4718837 - DNA, 25 bp, Homo sapien
gaatagcgccagaatgtttgccaca

SEQ ID NO: 4718838 - DNA, 25 bp, Homo sapien
ccatcagttggagtagagggagaat

SEQ ID NO: 4718839 - DNA, 25 bp, Homo sapien
caatgaagcaaattctgatgtggga

SEQ ID NO: 4718840 - DNA, 25 bp, Homo sapien
gatgtgggatactcagaacgagagt

SEQ ID NO: 4718841 - DNA, 25 bp, Homo sapien
gacaatgaagcaaattctgatgtgg

SEQ ID NO: 4718842 - DNA, 25 bp, Homo sapien
tactcagaacgagagtaggagtagg

SEQ ID NO: 4718843 - DNA, 25 bp, Homo sapien
agtaccatctggcagagaagagatt

SEQ ID NO: 4718844 - DNA, 25 bp, Homo sapien
ctcacagtgctctctataaagactc

SEQ ID NO: 4718845 - DNA, 25 bp, Homo sapien
taaagactctgcagtgacttgatat

SEQ ID NO: 4718846 - DNA, 25 bp, Homo sapien
gatatcctcaaaggtagtaccatct

SEQ ID NO: 4718847 - DNA, 25 bp, Homo sapien
ctgttaccgtgacaacagaacagaa

SEQ ID NO: 4718848 - DNA, 25 bp, Homo sapien
tgatgttggctttgggcaattacag

SEQ ID NO: 4718849 - DNA, 25 bp, Homo sapien
gtctgttgaccacttcctgtgaaac

SEQ ID NO: 4718850 - DNA, 25 bp, Homo sapien
tacagtttgctcaacagatgtgcct

SEQ ID NO: 4718851 - DNA, 25 bp, Homo sapien
atccactttctgcataggcttgtac

SEQ ID NO: 4718852 - DNA, 25 bp, Homo sapien
tctgttgcatgggttgttgtctcat

SEQ ID NO: 4718853 - DNA, 25 bp, Homo sapien
tgtcttcttgcagacgattaagagg

SEQ ID NO: 4718854 - DNA, 25 bp, Homo sapien
ggaatctggcttgacacgaatccca

SEQ ID NO: 4718855 - DNA, 25 bp, Homo sapien
tgttgtctcatagccatatactgca

SEQ ID NO: 4718856 - DNA, 25 bp, Homo sapien
acacatggtttcatattaagagcag

SEQ ID NO: 4718857 - DNA, 25 bp, Homo sapien
tagtttcttactctatcccaacagt

SEQ ID NO: 4718858 - DNA, 25 bp, Homo sapien
tcatcactgaggaatttaaacaata

SEQ ID NO: 4718859 - DNA, 25 bp, Homo sapien
gaggtaaaatagagctatctcatca

SEQ ID NO: 4718860 - DNA, 25 bp, Homo sapien
tgcaaatcttgcattaacaggttgg

SEQ ID NO: 4718861 - DNA, 25 bp, Homo sapien
tttaaagcaccatatgcaaatcttg

SEQ ID NO: 4718862 - DNA, 25 bp, Homo sapien
tcttgcattaacaggttggtctgct

SEQ ID NO: 4718863 - DNA, 25 bp, Homo sapien
ggttggtctgctaatttctatgtag

SEQ ID NO: 4718864 - DNA, 25 bp, Homo sapien
ttcctggggatgttataaactgagc

SEQ ID NO: 4718865 - DNA, 25 bp, Homo sapien
gaagtcactgaataatgtcctttcc

SEQ ID NO: 4718866 - DNA, 25 bp, Homo sapien
tgaattgccctagtttgaaaaagag

SEQ ID NO: 4718867 - DNA, 25 bp, Homo sapien
aactgagctcattctatgtatttcc

SEQ ID NO: 4718868 - DNA, 25 bp, Homo sapien
aggtagtggttgtacagagtgcttc

SEQ ID NO: 4718869 - DNA, 25 bp, Homo sapien
tagtgcccaatctcctggttcgtag

SEQ ID NO: 4718870 - DNA, 25 bp, Homo sapien
gactgggtccagtttgtgttcctga

SEQ ID NO: 4718871 - DNA, 25 bp, Homo sapien
ttcctgacagtgtcgaaggtagtgg

SEQ ID NO: 4718872 - DNA, 25 bp, Homo sapien
cctttgaaaacgctcagaaacactg

SEQ ID NO: 4718873 - DNA, 25 bp, Homo sapien
ccaagcctggtagcatggtaaacag

SEQ ID NO: 4718874 - DNA, 25 bp, Homo sapien
tgtctactgcgacagattctgaaag

SEQ ID NO: 4718875 - DNA, 25 bp, Homo sapien
gcaggctgcctggtatgagtgttta

SEQ ID NO: 4718876 - DNA, 25 bp, Homo sapien
tgttatcctgtgtacattacaaaaa

SEQ ID NO: 4718877 - DNA, 25 bp, Homo sapien
tatgttatcctgtgtacattacaaa

SEQ ID NO: 4718878 - DNA, 25 bp, Homo sapien
gttatcctgtgtacattacaaaaaa

SEQ ID NO: 4718879 - DNA, 25 bp, Homo sapien
tttatgttatcctgtgtacattaca

SEQ ID NO: 4718880 - DNA, 25 bp, Homo sapien
gcctgagtctggtttccaattcaca

SEQ ID NO: 4718881 - DNA, 25 bp, Homo sapien
tttcatgccatatgtaagacaggtg

SEQ ID NO: 4718882 - DNA, 25 bp, Homo sapien
gtcacatattgtctccatgcctgag

SEQ ID NO: 4718883 - DNA, 25 bp, Homo sapien
cagaccaatgtttcacaaaagcagt

SEQ ID NO: 4718884 - DNA, 25 bp, Homo sapien
tactagacagagcaagggttgacca

SEQ ID NO: 4718885 - DNA, 25 bp, Homo sapien
gagggagactacacataaaatgcag

SEQ ID NO: 4718886 - DNA, 25 bp, Homo sapien
gccctagtgagctgtattgtacaac

SEQ ID NO: 4718887 - DNA, 25 bp, Homo sapien
cacttgagtgatgttatggcagccc

SEQ ID NO: 4718888 - DNA, 25 bp, Homo sapien
gtcaatcttataatatgaactttac

SEQ ID NO: 4718889 - DNA, 25 bp, Homo sapien
gaaatggaattagtcaatcttataa

SEQ ID NO: 4718890 - DNA, 25 bp, Homo sapien
gctaatgaacagaagacatatcata

SEQ ID NO: 4718891 - DNA, 25 bp, Homo sapien
caatattgcttcctttgctaatgaa

SEQ ID NO: 4718892 - DNA, 25 bp, Homo sapien
gctaggaagactgccaaaaactaac

SEQ ID NO: 4718893 - DNA, 25 bp, Homo sapien
ctcgggctagatcgcctagaaattc

SEQ ID NO: 4718894 - DNA, 25 bp, Homo sapien
ccagctaggaagactgccaaaaact

SEQ ID NO: 4718895 - DNA, 25 bp, Homo sapien
aactaacccacctcgggctagatcg

SEQ ID NO: 4718896 - DNA, 25 bp, Homo sapien
agtggacagaccgtcagacttttgc

SEQ ID NO: 4718897 - DNA, 25 bp, Homo sapien
ccgtcagacttttgcagcgtctcaa

SEQ ID NO: 4718898 - DNA, 25 bp, Homo sapien
gacttttgcagcgtctcaatcgcca

SEQ ID NO: 4718899 - DNA, 25 bp, Homo sapien
gagagcttctgtgagtggacagacc

SEQ ID NO: 4718900 - DNA, 25 bp, Homo sapien
tgcaatgactacttaagggaatata

SEQ ID NO: 4718901 - DNA, 25 bp, Homo sapien
cagaaggtaagcacaattttgataa

SEQ ID NO: 4718902 - DNA, 25 bp, Homo sapien
caatggtgccagttaactctaatta

SEQ ID NO: 4718903 - DNA, 25 bp, Homo sapien
gtaggtaacggacattcccacaatg

SEQ ID NO: 4718904 - DNA, 25 bp, Homo sapien
aaaatgaggcccagaaccttcagtc

SEQ ID NO: 4718905 - DNA, 25 bp, Homo sapien
caatttatgatttagtgtaggaaac

SEQ ID NO: 4718906 - DNA, 25 bp, Homo sapien
ggaaacagacggttcatggtaatct

SEQ ID NO: 4718907 - DNA, 25 bp, Homo sapien
tcatggtaatctgtctgaggagttt

SEQ ID NO: 4718908 - DNA, 25 bp, Homo sapien
aggtatcagaatcagcatgaaggca

SEQ ID NO: 4718909 - DNA, 25 bp, Homo sapien
ggtatcagaatcagcatgaaggcaa

SEQ ID NO: 4718910 - DNA, 25 bp, Homo sapien
gatgagaccacggtagtcacctggg

SEQ ID NO: 4718911 - DNA, 25 bp, Homo sapien
tcacctgggcggaactcccttgagt

SEQ ID NO: 4718912 - DNA, 25 bp, Homo sapien
ttgagttgccgatcagataggttcc

SEQ ID NO: 4718913 - DNA, 25 bp, Homo sapien
ttgtcctcctgtgacgcccatctga

SEQ ID NO: 4718914 - DNA, 25 bp, Homo sapien
ctaaagctagccattcctgagagtt

SEQ ID NO: 4718915 - DNA, 25 bp, Homo sapien
gctttttaccataacctctcaagag

SEQ ID NO: 4718916 - DNA, 25 bp, Homo sapien
tattatcttcaacgccacctcctaa

SEQ ID NO: 4718917 - DNA, 25 bp, Homo sapien
cctgagagtttggtgtatatgtttt

SEQ ID NO: 4718918 - DNA, 25 bp, Homo sapien
tctaccgaatatgacagtggcccca

SEQ ID NO: 4718919 - DNA, 25 bp, Homo sapien
tggccccacttaactgtgcttaaaa

SEQ ID NO: 4718920 - DNA, 25 bp, Homo sapien
taaatactttgagagatgcgggaca

SEQ ID NO: 4718921 - DNA, 25 bp, Homo sapien
caagcaggatgattcaggatgcccc

SEQ ID NO: 4718922 - DNA, 25 bp, Homo sapien
agccaaagccagagtcatgcacaag

SEQ ID NO: 4718923 - DNA, 25 bp, Homo sapien
cagagtcatgcacaagtaacaggta

SEQ ID NO: 4718924 - DNA, 25 bp, Homo sapien
gcacaagtaacaggtaactcctaaa

SEQ ID NO: 4718925 - DNA, 25 bp, Homo sapien
caaagccagagtcatgcacaagtaa

SEQ ID NO: 4718926 - DNA, 25 bp, Homo sapien
gagtcacttgccctgacaacagagg

SEQ ID NO: 4718927 - DNA, 25 bp, Homo sapien
gaaaaaccgagtaaccacacacatg

SEQ ID NO: 4718928 - DNA, 25 bp, Homo sapien
cacacacatgtacgttaagtctcga

SEQ ID NO: 4718929 - DNA, 25 bp, Homo sapien
tgggccactgttccaggtattagac

SEQ ID NO: 4718930 - DNA, 25 bp, Homo sapien
taaccagttgggcatccttaagctg

SEQ ID NO: 4718931 - DNA, 25 bp, Homo sapien
tgagtacttcccttgagcattatgt

SEQ ID NO: 4718932 - DNA, 25 bp, Homo sapien
agattttcggctcaactggtacttc

SEQ ID NO: 4718933 - DNA, 25 bp, Homo sapien
tagctgggaccagtacaaaatgaga

SEQ ID NO: 4718934 - DNA, 25 bp, Homo sapien
aagtggcaggcgtctttttcatttg

SEQ ID NO: 4718935 - DNA, 25 bp, Homo sapien
tttccctgagagcataaaggtcgaa

SEQ ID NO: 4718936 - DNA, 25 bp, Homo sapien
tggtataaatgccaacagtagttta

SEQ ID NO: 4718937 - DNA, 25 bp, Homo sapien
cataaaggtcgaagtggcaggcgtc

SEQ ID NO: 4718938 - DNA, 25 bp, Homo sapien
gcacctgagcgggatagacatgttg

SEQ ID NO: 4718939 - DNA, 25 bp, Homo sapien
tgctccattggtatagacagtatcg

SEQ ID NO: 4718940 - DNA, 25 bp, Homo sapien
ctgagcgggatagacatgttgtacc

SEQ ID NO: 4718941 - DNA, 25 bp, Homo sapien
tagacagtatcgcttccttccacat

SEQ ID NO: 4718942 - DNA, 25 bp, Homo sapien
tagtgttatgcctgaacttcttgag

SEQ ID NO: 4718943 - DNA, 25 bp, Homo sapien
tgtgaggacagcataagtgtaatag

SEQ ID NO: 4718944 - DNA, 25 bp, Homo sapien
tagcagtagggtcctggctctcttg

SEQ ID NO: 4718945 - DNA, 25 bp, Homo sapien
gaataatatgaaggctaacatagca

SEQ ID NO: 4718946 - DNA, 25 bp, Homo sapien
tattaggagagttctttgtaacagg

SEQ ID NO: 4718947 - DNA, 25 bp, Homo sapien
taggagagttctttgtaacaggagg

SEQ ID NO: 4718948 - DNA, 25 bp, Homo sapien
agtattaggagagttctttgtaaca

SEQ ID NO: 4718949 - DNA, 25 bp, Homo sapien
ggagagttctttgtaacaggaggct

SEQ ID NO: 4718950 - DNA, 25 bp, Homo sapien
ttgtctggtcttccctattgccagc

SEQ ID NO: 4718951 - DNA, 25 bp, Homo sapien
ttagctcatccatttaacaagactg

SEQ ID NO: 4718952 - DNA, 25 bp, Homo sapien
agctcatccatttaacaagactgtt

SEQ ID NO: 4718953 - DNA, 25 bp, Homo sapien
aacaagactgtttgtctggtcttcc

SEQ ID NO: 4718954 - DNA, 25 bp, Homo sapien
atgccatatttggttgatgccaaga

SEQ ID NO: 4718955 - DNA, 25 bp, Homo sapien
tgccatatttggttgatgccaagat

SEQ ID NO: 4718956 - DNA, 25 bp, Homo sapien
gatgtggcatatcttggttgatgcc

SEQ ID NO: 4718957 - DNA, 25 bp, Homo sapien
gttgatgccaagatgtggcatatct

SEQ ID NO: 4718958 - DNA, 25 bp, Homo sapien
aggtttggatatccccatgaaatat

SEQ ID NO: 4718959 - DNA, 25 bp, Homo sapien
gtttggatatccccatgaaatatat

SEQ ID NO: 4718960 - DNA, 25 bp, Homo sapien
caggtttggatatccccatgaaata

SEQ ID NO: 4718961 - DNA, 25 bp, Homo sapien
ggtttggatatccccatgaaatata

SEQ ID NO: 4718962 - DNA, 25 bp, Homo sapien
gcccctcaggatgcctcattcatat

SEQ ID NO: 4718963 - DNA, 25 bp, Homo sapien
acaagttgcatttttcgcccctcag

SEQ ID NO: 4718964 - DNA, 25 bp, Homo sapien
ctgtaagctatatgtggaaaaattt

SEQ ID NO: 4718965 - DNA, 25 bp, Homo sapien
taatccattaatccaccttgctgaa

SEQ ID NO: 4718966 - DNA, 25 bp, Homo sapien
tcagagggcttatagcacttcacag

SEQ ID NO: 4718967 - DNA, 25 bp, Homo sapien
tagaaagcctatcagttcacaaggg

SEQ ID NO: 4718968 - DNA, 25 bp, Homo sapien
gggcataggaggttcaaggatcact

SEQ ID NO: 4718969 - DNA, 25 bp, Homo sapien
gacttagcactgagttactacgcag

SEQ ID NO: 4718970 - DNA, 25 bp, Homo sapien
ttcacagaaagcaaacctcttgacc

SEQ ID NO: 4718971 - DNA, 25 bp, Homo sapien
gattcacagaaagcaaacctcttga

SEQ ID NO: 4718972 - DNA, 25 bp, Homo sapien
tcatgtccatcaatgctaggattca

SEQ ID NO: 4718973 - DNA, 25 bp, Homo sapien
catcaatgctaggattcacagaaag

SEQ ID NO: 4718974 - DNA, 25 bp, Homo sapien
cactggaatatactggggagcttca

SEQ ID NO: 4718975 - DNA, 25 bp, Homo sapien
actggaatatactggggagcttcaa

SEQ ID NO: 4718976 - DNA, 25 bp, Homo sapien
ctggaatatactggggagcttcaaa

SEQ ID NO: 4718977 - DNA, 25 bp, Homo sapien
gagataggaacactatttccatcac

SEQ ID NO: 4718978 - DNA, 25 bp, Homo sapien
ttgttagtgataggcactctctcaa

SEQ ID NO: 4718979 - DNA, 25 bp, Homo sapien
tagtgataggcactctctcaaaacc

SEQ ID NO: 4718980 - DNA, 25 bp, Homo sapien
tatttccatcacactcttgttagtg

SEQ ID NO: 4718981 - DNA, 25 bp, Homo sapien
aggtcactgtcgagcctgtgtccga

SEQ ID NO: 4718982 - DNA, 25 bp, Homo sapien
ctgtgtccgacccagtctctgatgt

SEQ ID NO: 4718983 - DNA, 25 bp, Homo sapien
tgcttgactagccacagatgtttgt

SEQ ID NO: 4718984 - DNA, 25 bp, Homo sapien
tgtaccacctgcgtaggcactgctg

SEQ ID NO: 4718985 - DNA, 25 bp, Homo sapien
tccagcctggatgacagagcaagac

SEQ ID NO: 4718986 - DNA, 25 bp, Homo sapien
gtgagccaagatcattccactgcac

SEQ ID NO: 4718987 - DNA, 25 bp, Homo sapien
ttgaacctgggaggcagaggttgcg

SEQ ID NO: 4718988 - DNA, 25 bp, Homo sapien
tcaggaggctgcagcaggagagtca

SEQ ID NO: 4718989 - DNA, 25 bp, Homo sapien
caaagcaagagacatgatccagtgg

SEQ ID NO: 4718990 - DNA, 25 bp, Homo sapien
cacatgagatgatagaaaagttacg

SEQ ID NO: 4718991 - DNA, 25 bp, Homo sapien
tacgtattaatgttgtcctgctgcc

SEQ ID NO: 4718992 - DNA, 25 bp, Homo sapien
gcccggccaaatacttgaagcttat

SEQ ID NO: 4718993 - DNA, 25 bp, Homo sapien
ggcacaggagggagactagctaaat

SEQ ID NO: 4718994 - DNA, 25 bp, Homo sapien
aatgatcaaggccaggaaagcactc

SEQ ID NO: 4718995 - DNA, 25 bp, Homo sapien
agtcagcagctttcaccacttggga

SEQ ID NO: 4718996 - DNA, 25 bp, Homo sapien
taaggcagtttgtcatcgtcgcacg

SEQ ID NO: 4718997 - DNA, 25 bp, Homo sapien
aaataattgataactatagtcatcc

SEQ ID NO: 4718998 - DNA, 25 bp, Homo sapien
gtctgtggaacccacccaggtacca

SEQ ID NO: 4718999 - DNA, 25 bp, Homo sapien
caactgtctgtggaacccacccagg

SEQ ID NO: 4719000 - DNA, 25 bp, Homo sapien
caacccctcaactgtctgtggaacc

SEQ ID NO: 4719001 - DNA, 25 bp, Homo sapien
cacttaacagaaatggaacctatag

SEQ ID NO: 4719002 - DNA, 25 bp, Homo sapien
ttaactctgactcttgtgataacac

SEQ ID NO: 4719003 - DNA, 25 bp, Homo sapien
cctataggactagaagtcaggtctg

SEQ ID NO: 4719004 - DNA, 25 bp, Homo sapien
caagacatcacttggctataataat

SEQ ID NO: 4719005 - DNA, 25 bp, Homo sapien
aaaccacaagacctgaatgccctct

SEQ ID NO: 4719006 - DNA, 25 bp, Homo sapien
accatgagtcctctgtccattctga

SEQ ID NO: 4719007 - DNA, 25 bp, Homo sapien
taattccatttcgacctttacatcc

SEQ ID NO: 4719008 - DNA, 25 bp, Homo sapien
tccatttgctacatcagctgtatca

SEQ ID NO: 4719009 - DNA, 25 bp, Homo sapien
tacagcagcttattacaacccacat

SEQ ID NO: 4719010 - DNA, 25 bp, Homo sapien
tgcagtgtaggaaagcgaagcgctc

SEQ ID NO: 4719011 - DNA, 25 bp, Homo sapien
gcaacttaggatggaacatagccct

SEQ ID NO: 4719012 - DNA, 25 bp, Homo sapien
taaaagagctgcaattacaactggc

SEQ ID NO: 4719013 - DNA, 25 bp, Homo sapien
tggatccagaagcaactcccaagtg

SEQ ID NO: 4719014 - DNA, 25 bp, Homo sapien
gaaggacagcattcttagcagggca

SEQ ID NO: 4719015 - DNA, 25 bp, Homo sapien
cacttggcccatatgttaatctgga

SEQ ID NO: 4719016 - DNA, 25 bp, Homo sapien
gccatgcatagtacagaaatgagca

SEQ ID NO: 4719017 - DNA, 25 bp, Homo sapien
taagtacctatttatgccatgcata

SEQ ID NO: 4719018 - DNA, 25 bp, Homo sapien
tttgccacgcaaatatgtgctgcag

SEQ ID NO: 4719019 - DNA, 25 bp, Homo sapien
caacattagccttggacaactgaaa

SEQ ID NO: 4719020 - DNA, 25 bp, Homo sapien
gcctgtcagtttttcgtaataccca

SEQ ID NO: 4719021 - DNA, 25 bp, Homo sapien
tcaaccatgaagacctagacctatt

SEQ ID NO: 4719022 - DNA, 25 bp, Homo sapien
taagatagatgaccttcacagggct

SEQ ID NO: 4719023 - DNA, 25 bp, Homo sapien
taaagccaagtctcaaacagaggtc

SEQ ID NO: 4719024 - DNA, 25 bp, Homo sapien
tcacagcccgatactagctccagag

SEQ ID NO: 4719025 - DNA, 25 bp, Homo sapien
tgacaaaagtattaggaggtgatcc

SEQ ID NO: 4719026 - DNA, 25 bp, Homo sapien
gccaagaatattaaagcaccggata

SEQ ID NO: 4719027 - DNA, 25 bp, Homo sapien
gcttgggctttagtgttaaacagac

SEQ ID NO: 4719028 - DNA, 25 bp, Homo sapien
aaacagaccacagctcaaatcctag

SEQ ID NO: 4719029 - DNA, 25 bp, Homo sapien
ccggatattaaggtgtaaagcagta

SEQ ID NO: 4719030 - DNA, 25 bp, Homo sapien
caccctagtgagatattgtaatgag

SEQ ID NO: 4719031 - DNA, 25 bp, Homo sapien
tctccagacagcaaagtataattcc

SEQ ID NO: 4719032 - DNA, 25 bp, Homo sapien
tagagttcgtgagaatcctttcagt

SEQ ID NO: 4719033 - DNA, 25 bp, Homo sapien
caaaagacatggatttagagcctat

SEQ ID NO: 4719034 - DNA, 25 bp, Homo sapien
gatcagtcagaggtgacattctcct

SEQ ID NO: 4719035 - DNA, 25 bp, Homo sapien
ccaagaagtcatacctggaccagta

SEQ ID NO: 4719036 - DNA, 25 bp, Homo sapien
cccaggtcatttccgggcatgtgta

SEQ ID NO: 4719037 - DNA, 25 bp, Homo sapien
tgtacagccttttaaatacccagga

SEQ ID NO: 4719038 - DNA, 25 bp, Homo sapien
tatccacgatgccattagaaaaagc

SEQ ID NO: 4719039 - DNA, 25 bp, Homo sapien
gaccaattgttattggccctggtaa

SEQ ID NO: 4719040 - DNA, 25 bp, Homo sapien
tgatcatcacttctagcaactgcaa

SEQ ID NO: 4719041 - DNA, 25 bp, Homo sapien
tacagtccttccacctagaaaagca

SEQ ID NO: 4719042 - DNA, 25 bp, Homo sapien
cttcccaaagaaactagagtatcct

SEQ ID NO: 4719043 - DNA, 25 bp, Homo sapien
gaaatggaggttacagcttcagctt

SEQ ID NO: 4719044 - DNA, 25 bp, Homo sapien
tagcagattgagtgtttatcttccc

SEQ ID NO: 4719045 - DNA, 25 bp, Homo sapien
gaaactagagtatcctccatggctg

SEQ ID NO: 4719046 - DNA, 25 bp, Homo sapien
tggaaggcctgtctttaaagtactg

SEQ ID NO: 4719047 - DNA, 25 bp, Homo sapien
gtttttacagcaccaccgaaagcta

SEQ ID NO: 4719048 - DNA, 25 bp, Homo sapien
attggttgggatgggaagttggtag

SEQ ID NO: 4719049 - DNA, 25 bp, Homo sapien
tggtttttacagcaccaccgaaagc

SEQ ID NO: 4719050 - DNA, 25 bp, Homo sapien
cttctggtttttacagcaccaccga

SEQ ID NO: 4719051 - DNA, 25 bp, Homo sapien
cagagccaaactcaacgtattctct

SEQ ID NO: 4719052 - DNA, 25 bp, Homo sapien
caacgtattctctaccataaaatgc

SEQ ID NO: 4719053 - DNA, 25 bp, Homo sapien
gccaaactcaacgtattctctacca

SEQ ID NO: 4719054 - DNA, 25 bp, Homo sapien
gtattctctaccataaaatgccaga

SEQ ID NO: 4719055 - DNA, 25 bp, Homo sapien
gtacttagtatgatgagagccacag

SEQ ID NO: 4719056 - DNA, 25 bp, Homo sapien
gtcaacaagtaattaatctatgtac

SEQ ID NO: 4719057 - DNA, 25 bp, Homo sapien
aacttcaaatcactttgtggaatta

SEQ ID NO: 4719058 - DNA, 25 bp, Homo sapien
cacagaagatatcacgtatctttta

SEQ ID NO: 4719059 - DNA, 25 bp, Homo sapien
caatctattacggttgctaggagtc

SEQ ID NO: 4719060 - DNA, 25 bp, Homo sapien
ttattattacatccggcctggtcac

SEQ ID NO: 4719061 - DNA, 25 bp, Homo sapien
gcttaccgtgaaaagaaaaccatga

SEQ ID NO: 4719062 - DNA, 25 bp, Homo sapien
tgctgtgcaacctaaaagggtatgc

SEQ ID NO: 4719063 - DNA, 25 bp, Homo sapien
taacaaagggacaaaatgctaaaca

SEQ ID NO: 4719064 - DNA, 25 bp, Homo sapien
atgtgatactgattagaactgacta

SEQ ID NO: 4719065 - DNA, 25 bp, Homo sapien
gattagaactgactataagagtaac

SEQ ID NO: 4719066 - DNA, 25 bp, Homo sapien
ataagagtaacctcagttaaacacg

SEQ ID NO: 4719067 - DNA, 25 bp, Homo sapien
gaactgactataagagtaacctcag

SEQ ID NO: 4719068 - DNA, 25 bp, Homo sapien
caggtagggtggacttcaagaattt

SEQ ID NO: 4719069 - DNA, 25 bp, Homo sapien
gaagccatcatatgcaaagattctg

SEQ ID NO: 4719070 - DNA, 25 bp, Homo sapien
tgaaaatggctcaatcggctcgatt

SEQ ID NO: 4719071 - DNA, 25 bp, Homo sapien
cctccaacttggaagcaggtagggt

SEQ ID NO: 4719072 - DNA, 25 bp, Homo sapien
cactgggtctcatgctgagttcaaa

SEQ ID NO: 4719073 - DNA, 25 bp, Homo sapien
gaaatgaacccatcaagttagggac

SEQ ID NO: 4719074 - DNA, 25 bp, Homo sapien
ttctactagaaaaagacactgggtc

SEQ ID NO: 4719075 - DNA, 25 bp, Homo sapien
gtcagtggcagagctcgaattcaca

SEQ ID NO: 4719076 - DNA, 25 bp, Homo sapien
gactctgacgaagaggcaatgagga

SEQ ID NO: 4719077 - DNA, 25 bp, Homo sapien
tcataagacattaagaccacgttcc

SEQ ID NO: 4719078 - DNA, 25 bp, Homo sapien
gatcccacagatacgaaatgtagac

SEQ ID NO: 4719079 - DNA, 25 bp, Homo sapien
tgttctgtgggacactgtgataact

SEQ ID NO: 4719080 - DNA, 25 bp, Homo sapien
catctccctttttgttgaaggtgag

SEQ ID NO: 4719081 - DNA, 25 bp, Homo sapien
acatctccctttttgttgaaggtga

SEQ ID NO: 4719082 - DNA, 25 bp, Homo sapien
tacatctccctttttgttgaaggtg

SEQ ID NO: 4719083 - DNA, 25 bp, Homo sapien
tccctgaagatactaaaccacaaaa

SEQ ID NO: 4719084 - DNA, 25 bp, Homo sapien
ctaagagaaggaacctcctcattcc

SEQ ID NO: 4719085 - DNA, 25 bp, Homo sapien
caaaatgagtagcaaactttgaagg

SEQ ID NO: 4719086 - DNA, 25 bp, Homo sapien
tcataccagtctggcctcagtcaaa

SEQ ID NO: 4719087 - DNA, 25 bp, Homo sapien
tcatttcgggattcctacattaacc

SEQ ID NO: 4719088 - DNA, 25 bp, Homo sapien
taggtctctgctagaatgtttttga

SEQ ID NO: 4719089 - DNA, 25 bp, Homo sapien
caatggaaatctaagtcatttcggg

SEQ ID NO: 4719090 - DNA, 25 bp, Homo sapien
tgattcccaaatatcgttatgtcct

SEQ ID NO: 4719091 - DNA, 25 bp, Homo sapien
tgaccaagcactctaaagcaaaggc

SEQ ID NO: 4719092 - DNA, 25 bp, Homo sapien
caaaggcaagcagtactagctgggt

SEQ ID NO: 4719093 - DNA, 25 bp, Homo sapien
taaaagtcaacaacagcaggcatct

SEQ ID NO: 4719094 - DNA, 25 bp, Homo sapien
ttagccagaggccagtacatagcca

SEQ ID NO: 4719095 - DNA, 25 bp, Homo sapien
cagaaaacctgagctatacatgagt

SEQ ID NO: 4719096 - DNA, 25 bp, Homo sapien
aatggcataaggtctgaaactgtcc

SEQ ID NO: 4719097 - DNA, 25 bp, Homo sapien
ggagcttcaccatccaaaagtgttc

SEQ ID NO: 4719098 - DNA, 25 bp, Homo sapien
tacataacatagtcccttctaggaa

SEQ ID NO: 4719099 - DNA, 25 bp, Homo sapien
aatggatgttaagactgtttgccgc

SEQ ID NO: 4719100 - DNA, 25 bp, Homo sapien
taacaaggccccacaagtgaacaac

SEQ ID NO: 4719101 - DNA, 25 bp, Homo sapien
ggaaaagttcaccaacgtatgagga

SEQ ID NO: 4719102 - DNA, 25 bp, Homo sapien
tgtttgccgcacaaagaaaatacag

SEQ ID NO: 4719103 - DNA, 25 bp, Homo sapien
taacagtcgccaggactacggtgac

SEQ ID NO: 4719104 - DNA, 25 bp, Homo sapien
cttgattcacaaggcaacggttgct

SEQ ID NO: 4719105 - DNA, 25 bp, Homo sapien
tacggtgactatggcgcttgattca

SEQ ID NO: 4719106 - DNA, 25 bp, Homo sapien
cttggctgtggattattgtggtgtt

SEQ ID NO: 4719107 - DNA, 25 bp, Homo sapien
tcccggagccacgagagagtaacgg

SEQ ID NO: 4719108 - DNA, 25 bp, Homo sapien
tggcgaggcccaggagtcgtggtgc

SEQ ID NO: 4719109 - DNA, 25 bp, Homo sapien
gccagctttgtacagagacgtcccg

SEQ ID NO: 4719110 - DNA, 25 bp, Homo sapien
gtgaaacgagggctgcctgtcccag

SEQ ID NO: 4719111 - DNA, 25 bp, Homo sapien
tgaagaaagtccttgtacccttcgc

SEQ ID NO: 4719112 - DNA, 25 bp, Homo sapien
catcccactagtgctgtttcaagag

SEQ ID NO: 4719113 - DNA, 25 bp, Homo sapien
tcaagagtgacttctcacgagatct

SEQ ID NO: 4719114 - DNA, 25 bp, Homo sapien
gtttccgtgagacctcccagtcatg

SEQ ID NO: 4719115 - DNA, 25 bp, Homo sapien
ccagcacagaaagatgattatagaa

SEQ ID NO: 4719116 - DNA, 25 bp, Homo sapien
ggaattacatttttactccagcaca

SEQ ID NO: 4719117 - DNA, 25 bp, Homo sapien
tacaaaccagctgattactcggcag

SEQ ID NO: 4719118 - DNA, 25 bp, Homo sapien
gttgactacctttgcttaacaccaa

SEQ ID NO: 4719119 - DNA, 25 bp, Homo sapien
tatggacacgtggagataaggaaca

SEQ ID NO: 4719120 - DNA, 25 bp, Homo sapien
gaacagggaagcactagtcctagag

SEQ ID NO: 4719121 - DNA, 25 bp, Homo sapien
ttgcgtagaatgagccaaaaggaac

SEQ ID NO: 4719122 - DNA, 25 bp, Homo sapien
tctaatacttactgaggaccggcta

SEQ ID NO: 4719123 - DNA, 25 bp, Homo sapien
ctatactatcagtaggcaaacacca

SEQ ID NO: 4719124 - DNA, 25 bp, Homo sapien
gcaaacaccaggatgtgtgtcccct

SEQ ID NO: 4719125 - DNA, 25 bp, Homo sapien
gatgtgtgtcccctggaagtgcaga

SEQ ID NO: 4719126 - DNA, 25 bp, Homo sapien
gtgtcccctggaagtgcagagtcag

SEQ ID NO: 4719127 - DNA, 25 bp, Homo sapien
actgctacacgtcccataactgcta

SEQ ID NO: 4719128 - DNA, 25 bp, Homo sapien
gagcaaagggcggctctgtagctcc

SEQ ID NO: 4719129 - DNA, 25 bp, Homo sapien
cttcagtgctttccatcgctgcaac

SEQ ID NO: 4719130 - DNA, 25 bp, Homo sapien
gctgcaactgctacacgtcccataa

SEQ ID NO: 4719131 - DNA, 25 bp, Homo sapien
attccttcctttttcaatgtagact

SEQ ID NO: 4719132 - DNA, 25 bp, Homo sapien
tcctttttcaatgtagactttatct

SEQ ID NO: 4719133 - DNA, 25 bp, Homo sapien
cacaaggacacaattccttcctttt

SEQ ID NO: 4719134 - DNA, 25 bp, Homo sapien
caattccttcctttttcaatgtaga

SEQ ID NO: 4719135 - DNA, 25 bp, Homo sapien
gtgctgggtcaccataactcttcta

SEQ ID NO: 4719136 - DNA, 25 bp, Homo sapien
gaccaatggatggttagtaacctga

SEQ ID NO: 4719137 - DNA, 25 bp, Homo sapien
ctcttgggttcttaatggccgataa

SEQ ID NO: 4719138 - DNA, 25 bp, Homo sapien
cctgaaaaatggatccctcttgggt

SEQ ID NO: 4719139 - DNA, 25 bp, Homo sapien
ttctatctctgaggagttgctgaca

SEQ ID NO: 4719140 - DNA, 25 bp, Homo sapien
ggccacaaatggtgagtccttctat

SEQ ID NO: 4719141 - DNA, 25 bp, Homo sapien
ggtgagtccttctatctctgaggag

SEQ ID NO: 4719142 - DNA, 25 bp, Homo sapien
atcctgtcaggccacaaatggtgag

SEQ ID NO: 4719143 - DNA, 25 bp, Homo sapien
taggctcgttgactatgaacaaatt

SEQ ID NO: 4719144 - DNA, 25 bp, Homo sapien
cgttgactatgaacaaattagaagc

SEQ ID NO: 4719145 - DNA, 25 bp, Homo sapien
gaacaaattagaagcagttttattc

SEQ ID NO: 4719146 - DNA, 25 bp, Homo sapien
ctgtaggctcgttgactatgaacaa

SEQ ID NO: 4719147 - DNA, 25 bp, Homo sapien
ccagtgctttactcttcctggcttg

SEQ ID NO: 4719148 - DNA, 25 bp, Homo sapien
cagtgctttactcttcctggcttgg

SEQ ID NO: 4719149 - DNA, 25 bp, Homo sapien
gaggtacccgagcacgggaataata

SEQ ID NO: 4719150 - DNA, 25 bp, Homo sapien
cagttctcaaagaggtacccgagca

SEQ ID NO: 4719151 - DNA, 25 bp, Homo sapien
acccgagcacgggaataataatggc

SEQ ID NO: 4719152 - DNA, 25 bp, Homo sapien
ctcaaagaggtacccgagcacggga

SEQ ID NO: 4719153 - DNA, 25 bp, Homo sapien
tgcttagaataaggattcagtggga

SEQ ID NO: 4719154 - DNA, 25 bp, Homo sapien
agtgttctgcttagaataaggattc

SEQ ID NO: 4719155 - DNA, 25 bp, Homo sapien
tctgcttagaataaggattcagtgg

SEQ ID NO: 4719156 - DNA, 25 bp, Homo sapien
tgttctgcttagaataaggattcag

SEQ ID NO: 4719157 - DNA, 25 bp, Homo sapien
gattccgtaagtcctggcaaagagg

SEQ ID NO: 4719158 - DNA, 25 bp, Homo sapien
catccttgattatgggatgagtgtc

SEQ ID NO: 4719159 - DNA, 25 bp, Homo sapien
tcttaagtgaataggagaagtattt

SEQ ID NO: 4719160 - DNA, 25 bp, Homo sapien
gaatggacagataagagattccgta

SEQ ID NO: 4719161 - DNA, 25 bp, Homo sapien
tttgttatgaaagtgaacgagatgc

SEQ ID NO: 4719162 - DNA, 25 bp, Homo sapien
tgtcctgaggtcgttcacattagct

SEQ ID NO: 4719163 - DNA, 25 bp, Homo sapien
agtgaacgagatgctgtttactctc

SEQ ID NO: 4719164 - DNA, 25 bp, Homo sapien
atgactgtcctgaggtcgttcacat

SEQ ID NO: 4719165 - DNA, 25 bp, Homo sapien
tcagagaagggattacactctccaa

SEQ ID NO: 4719166 - DNA, 25 bp, Homo sapien
tctcagggtctggaaagtgcatact

SEQ ID NO: 4719167 - DNA, 25 bp, Homo sapien
tcaggcttgcccacctgggtttggt

SEQ ID NO: 4719168 - DNA, 25 bp, Homo sapien
tacaagcctgagtacagaggccact

SEQ ID NO: 4719169 - DNA, 25 bp, Homo sapien
taccggacagttgggaaatagcaca

SEQ ID NO: 4719170 - DNA, 25 bp, Homo sapien
ttaacaatgactagagatgaccctc

SEQ ID NO: 4719171 - DNA, 25 bp, Homo sapien
gcctgtgtccaatgtctctagagag

SEQ ID NO: 4719172 - DNA, 25 bp, Homo sapien
ttaaaagttctaatgccagggcacc

SEQ ID NO: 4719173 - DNA, 25 bp, Homo sapien
gggaagccaaattaatagccagaag

SEQ ID NO: 4719174 - DNA, 25 bp, Homo sapien
agccaaattaatagccagaaggttc

SEQ ID NO: 4719175 - DNA, 25 bp, Homo sapien
cagaataattgggaagccaaattaa

SEQ ID NO: 4719176 - DNA, 25 bp, Homo sapien
taattgggaagccaaattaatagcc

SEQ ID NO: 4719177 - DNA, 25 bp, Homo sapien
gggtcactgcttggccctgggcttt

SEQ ID NO: 4719178 - DNA, 25 bp, Homo sapien
ccagatgactctgcacaatccgcaa

SEQ ID NO: 4719179 - DNA, 25 bp, Homo sapien
tgcacaatccgcaaagaccttcatt

SEQ ID NO: 4719180 - DNA, 25 bp, Homo sapien
cgcaaagaccttcatttgtcccagc

SEQ ID NO: 4719181 - DNA, 25 bp, Homo sapien
ctattgtctttacagtcacatggat

SEQ ID NO: 4719182 - DNA, 25 bp, Homo sapien
tacagtcacatggatatgtttgcct

SEQ ID NO: 4719183 - DNA, 25 bp, Homo sapien
ctagagctgttgagatatgagacct

SEQ ID NO: 4719184 - DNA, 25 bp, Homo sapien
gagatatgagaccttcactattgtc

SEQ ID NO: 4719185 - DNA, 25 bp, Homo sapien
taacaatcacacctgctgaggttcc

SEQ ID NO: 4719186 - DNA, 25 bp, Homo sapien
gtaggtaggacccaggctttcgcca

SEQ ID NO: 4719187 - DNA, 25 bp, Homo sapien
tgctgaggttccgtaggtaggaccc

SEQ ID NO: 4719188 - DNA, 25 bp, Homo sapien
ggctttcgccaatgagacactgctg

SEQ ID NO: 4719189 - DNA, 25 bp, Homo sapien
tgcggtctctgctaattgcaacctc

SEQ ID NO: 4719190 - DNA, 25 bp, Homo sapien
ggtgcggtctctgctaattgcaacc

SEQ ID NO: 4719191 - DNA, 25 bp, Homo sapien
tggtgcggtctctgctaattgcaac

SEQ ID NO: 4719192 - DNA, 25 bp, Homo sapien
gtgcggtctctgctaattgcaacct

SEQ ID NO: 4719193 - DNA, 25 bp, Homo sapien
tgttcctcatacatagattcagtac

SEQ ID NO: 4719194 - DNA, 25 bp, Homo sapien
agtaaatagtatagggactcctcct

SEQ ID NO: 4719195 - DNA, 25 bp, Homo sapien
tccgggatacaccagtaaacaggta

SEQ ID NO: 4719196 - DNA, 25 bp, Homo sapien
taactatctggtgaattatccggga

SEQ ID NO: 4719197 - DNA, 25 bp, Homo sapien
aattggaaacgctgtcttgtaatgt

SEQ ID NO: 4719198 - DNA, 25 bp, Homo sapien
ctggatagggaagacaagagtctat

SEQ ID NO: 4719199 - DNA, 25 bp, Homo sapien
tggatagggaagacaagagtctatg

SEQ ID NO: 4719200 - DNA, 25 bp, Homo sapien
gatagggaagacaagagtctatgac

SEQ ID NO: 4719201 - DNA, 25 bp, Homo sapien
ggatagggaagacaagagtctatga

SEQ ID NO: 4719202 - DNA, 25 bp, Homo sapien
cccgtgcaccattccaagtccctct

SEQ ID NO: 4719203 - DNA, 25 bp, Homo sapien
ttctttccccccgtgcaccattcca

SEQ ID NO: 4719204 - DNA, 25 bp, Homo sapien
ttccccccgtgcaccattccaagtc

SEQ ID NO: 4719205 - DNA, 25 bp, Homo sapien
cccccgtgcaccattccaagtccct

SEQ ID NO: 4719206 - DNA, 25 bp, Homo sapien
tccatgtcctctgcgttttccactt

SEQ ID NO: 4719207 - DNA, 25 bp, Homo sapien
tgtcctctgcgttttccactttctg

SEQ ID NO: 4719208 - DNA, 25 bp, Homo sapien
tccactttctgcccaagttctccat

SEQ ID NO: 4719209 - DNA, 25 bp, Homo sapien
tcttccatgtcctctgcgttttcca

SEQ ID NO: 4719210 - DNA, 25 bp, Homo sapien
tctcttagaccttatgatttgaata

SEQ ID NO: 4719211 - DNA, 25 bp, Homo sapien
cactttctctctcttagaccttatg

SEQ ID NO: 4719212 - DNA, 25 bp, Homo sapien
gaccttatgatttgaataagtgcaa

SEQ ID NO: 4719213 - DNA, 25 bp, Homo sapien
tgatttgaataagtgcaaaatgtct

SEQ ID NO: 4719214 - DNA, 25 bp, Homo sapien
tggtgaacagttaggcaaggccttc

SEQ ID NO: 4719215 - DNA, 25 bp, Homo sapien
cctatgacctgttagcctcctgaca

SEQ ID NO: 4719216 - DNA, 25 bp, Homo sapien
tgtacaacagtggaggacactaatt

SEQ ID NO: 4719217 - DNA, 25 bp, Homo sapien
gaagcagaatttgcccactgaccac

SEQ ID NO: 4719218 - DNA, 25 bp, Homo sapien
gagggcagagatcatagccatcgat

SEQ ID NO: 4719219 - DNA, 25 bp, Homo sapien
tatgaaagtgtcatgatagcagatg

SEQ ID NO: 4719220 - DNA, 25 bp, Homo sapien
catagccatcgattatgaaagtgtc

SEQ ID NO: 4719221 - DNA, 25 bp, Homo sapien
tcatgatagcagatgatgtgcctct

SEQ ID NO: 4719222 - DNA, 25 bp, Homo sapien
tcggcaaggacccaaccagtaaata

SEQ ID NO: 4719223 - DNA, 25 bp, Homo sapien
ccagtaaatatcactgtgggaacgc

SEQ ID NO: 4719224 - DNA, 25 bp, Homo sapien
gcaaggacccaaccagtaaatatca

SEQ ID NO: 4719225 - DNA, 25 bp, Homo sapien
ctgtgggaacgctaacatggaaact

SEQ ID NO: 4719226 - DNA, 25 bp, Homo sapien
gtctctgtctttcgctggaaaaggc

SEQ ID NO: 4719227 - DNA, 25 bp, Homo sapien
ctggtatgtctctgtctttcgctgg

SEQ ID NO: 4719228 - DNA, 25 bp, Homo sapien
tatcctggtatgtctctgtctttcg

SEQ ID NO: 4719229 - DNA, 25 bp, Homo sapien
tatgtctctgtctttcgctggaaaa

SEQ ID NO: 4719230 - DNA, 25 bp, Homo sapien
tccagcaattaaccaaaacaaacag

SEQ ID NO: 4719231 - DNA, 25 bp, Homo sapien
ttccagcaattaaccaaaacaaaca

SEQ ID NO: 4719232 - DNA, 25 bp, Homo sapien
cagcaattaaccaaaacaaacagcc

SEQ ID NO: 4719233 - DNA, 25 bp, Homo sapien
cattccagcaattaaccaaaacaaa

SEQ ID NO: 4719234 - DNA, 25 bp, Homo sapien
tagtgggctctcctaggcatttgaa

SEQ ID NO: 4719235 - DNA, 25 bp, Homo sapien
cactctatgggtctgggcacttgtt

SEQ ID NO: 4719236 - DNA, 25 bp, Homo sapien
gaggtgttgctagccataacccagc

SEQ ID NO: 4719237 - DNA, 25 bp, Homo sapien
tttgaatagtgtccctgcgagtggc

SEQ ID NO: 4719238 - DNA, 25 bp, Homo sapien
caacaattctttcttccaggttctc

SEQ ID NO: 4719239 - DNA, 25 bp, Homo sapien
cttccaaatatccaacaacaattct

SEQ ID NO: 4719240 - DNA, 25 bp, Homo sapien
ccttccaaatatccaacaacaattc

SEQ ID NO: 4719241 - DNA, 25 bp, Homo sapien
ccaggttctcttcctctcccttcat

SEQ ID NO: 4719242 - DNA, 25 bp, Homo sapien
tgctcataaaatgcagcactaggag

SEQ ID NO: 4719243 - DNA, 25 bp, Homo sapien
cactaggagcctgatcagagaggac

SEQ ID NO: 4719244 - DNA, 25 bp, Homo sapien
aatgcagcactaggagcctgatcag

SEQ ID NO: 4719245 - DNA, 25 bp, Homo sapien
ggagcctgatcagagaggacacagc

SEQ ID NO: 4719246 - DNA, 25 bp, Homo sapien
tcatgtgtccttgtagccagctttt

SEQ ID NO: 4719247 - DNA, 25 bp, Homo sapien
aaggaggtgataccatccagggatg

SEQ ID NO: 4719248 - DNA, 25 bp, Homo sapien
tgtagccagcttttatccaggaagg

SEQ ID NO: 4719249 - DNA, 25 bp, Homo sapien
gggaaggtggctccacccacctcta

SEQ ID NO: 4719250 - DNA, 25 bp, Homo sapien
tgctcttgggaagacaccttcagct

SEQ ID NO: 4719251 - DNA, 25 bp, Homo sapien
aagtgtacgctctggaacggatggc

SEQ ID NO: 4719252 - DNA, 25 bp, Homo sapien
ggaagttgccaacgctgagctgagc

SEQ ID NO: 4719253 - DNA, 25 bp, Homo sapien
ttgctgcgctccgttggcatctggg

SEQ ID NO: 4719254 - DNA, 25 bp, Homo sapien
cacaaaggctaaaacgcaggtacat

SEQ ID NO: 4719255 - DNA, 25 bp, Homo sapien
tcataggcaaatttgagaataaccc

SEQ ID NO: 4719256 - DNA, 25 bp, Homo sapien
tataatgatataacaggactttgcc

SEQ ID NO: 4719257 - DNA, 25 bp, Homo sapien
gaataacccattgacaattgtaggg

SEQ ID NO: 4719258 - DNA, 25 bp, Homo sapien
cattcatctgtatcccagggagcag

SEQ ID NO: 4719259 - DNA, 25 bp, Homo sapien
taccctttcaattgacgagtgtcgg

SEQ ID NO: 4719260 - DNA, 25 bp, Homo sapien
gcagagccctcaaataagaaatgta

SEQ ID NO: 4719261 - DNA, 25 bp, Homo sapien
ttacagtcgaatggcactgcaggct

SEQ ID NO: 4719262 - DNA, 25 bp, Homo sapien
catgtataaaagctttaattaaatc

SEQ ID NO: 4719263 - DNA, 25 bp, Homo sapien
tataaaagctttaattaaatctgat

SEQ ID NO: 4719264 - DNA, 25 bp, Homo sapien
acatgtataaaagctttaattaaat

SEQ ID NO: 4719265 - DNA, 25 bp, Homo sapien
tgtataaaagctttaattaaatctg

SEQ ID NO: 4719266 - DNA, 25 bp, Homo sapien
taaatccaggctacagctctggccc

SEQ ID NO: 4719267 - DNA, 25 bp, Homo sapien
cagggagacattcatttttactgcc

SEQ ID NO: 4719268 - DNA, 25 bp, Homo sapien
agctggacttgaacattccctcccg

SEQ ID NO: 4719269 - DNA, 25 bp, Homo sapien
tgttttaaaccgacaggctgaagga

SEQ ID NO: 4719270 - DNA, 25 bp, Homo sapien
ggctactgtgcttgacggctggtaa

SEQ ID NO: 4719271 - DNA, 25 bp, Homo sapien
tgggagataccccacaggacctgta

SEQ ID NO: 4719272 - DNA, 25 bp, Homo sapien
gaacgtgtcctatcctgaggctgca

SEQ ID NO: 4719273 - DNA, 25 bp, Homo sapien
gcagctatcaggaaagacccacggt

SEQ ID NO: 4719274 - DNA, 25 bp, Homo sapien
tacgccctctttagagtccctcttg

SEQ ID NO: 4719275 - DNA, 25 bp, Homo sapien
ctggagcctggttcacaagcagctc

SEQ ID NO: 4719276 - DNA, 25 bp, Homo sapien
ccatggtttctaaagttgagcttct

SEQ ID NO: 4719277 - DNA, 25 bp, Homo sapien
gctgcaggtgcctctattgcttacg

SEQ ID NO: 4719278 - DNA, 25 bp, Homo sapien
gctgtgagcatgcatatgttaggcc

SEQ ID NO: 4719279 - DNA, 25 bp, Homo sapien
ttgtttaggccaagtgacacgaccc

SEQ ID NO: 4719280 - DNA, 25 bp, Homo sapien
cacttgtaaaggaagcctggtgtgc

SEQ ID NO: 4719281 - DNA, 25 bp, Homo sapien
gaagggtggtactttacaagcagcc

SEQ ID NO: 4719282 - DNA, 25 bp, Homo sapien
gaccacactatgctttggacatgga

SEQ ID NO: 4719283 - DNA, 25 bp, Homo sapien
gaaaagacagtcctcctggtcacat

SEQ ID NO: 4719284 - DNA, 25 bp, Homo sapien
gattcctgcaaagctagctctgcca

SEQ ID NO: 4719285 - DNA, 25 bp, Homo sapien
tggcaagcaacatcaaggtcctggg

SEQ ID NO: 4719286 - DNA, 25 bp, Homo sapien
agagctggctaggacagcggtccac

SEQ ID NO: 4719287 - DNA, 25 bp, Homo sapien
ggctcgaggaacttgaaggtaaatc

SEQ ID NO: 4719288 - DNA, 25 bp, Homo sapien
cacggtgctgatctgcaagaaggta

SEQ ID NO: 4719289 - DNA, 25 bp, Homo sapien
aagaaggtagcatcttcagccccgc

SEQ ID NO: 4719290 - DNA, 25 bp, Homo sapien
aaaacatcaaaactggcctggccca

SEQ ID NO: 4719291 - DNA, 25 bp, Homo sapien
ctgtaatgcccgagtgagtcgagaa

SEQ ID NO: 4719292 - DNA, 25 bp, Homo sapien
cccgagtgagtcgagaaggctctgt

SEQ ID NO: 4719293 - DNA, 25 bp, Homo sapien
taatgcccgagtgagtcgagaaggc

SEQ ID NO: 4719294 - DNA, 25 bp, Homo sapien
gacaggcggcacaattctctgggaa

SEQ ID NO: 4719295 - DNA, 25 bp, Homo sapien
aggagctgacaggcggcacaattct

SEQ ID NO: 4719296 - DNA, 25 bp, Homo sapien
actaggcagtcctcaaacgaaggca

SEQ ID NO: 4719297 - DNA, 25 bp, Homo sapien
acgaaggcaccacactgcaggagct

SEQ ID NO: 4719298 - DNA, 25 bp, Homo sapien
cctaccctagactctcccgtcggca

SEQ ID NO: 4719299 - DNA, 25 bp, Homo sapien
ctaccctagactctcccgtcggcat

SEQ ID NO: 4719300 - DNA, 25 bp, Homo sapien
gattgcagcgctagtgatcaaaaca

SEQ ID NO: 4719301 - DNA, 25 bp, Homo sapien
tagcaatagtgaagagcaagtactc

SEQ ID NO: 4719302 - DNA, 25 bp, Homo sapien
gcctaggatcagttgtatggatgcc

SEQ ID NO: 4719303 - DNA, 25 bp, Homo sapien
gacaacctgtatctagaaccctaaa

SEQ ID NO: 4719304 - DNA, 25 bp, Homo sapien
gagctgtatacctcttcttgctcat

SEQ ID NO: 4719305 - DNA, 25 bp, Homo sapien
ccgctgttcctaggtggaatcttca

SEQ ID NO: 4719306 - DNA, 25 bp, Homo sapien
ggtggaatcttcaacagttttggcc

SEQ ID NO: 4719307 - DNA, 25 bp, Homo sapien
gaagacctgagctgtatacctcttc

SEQ ID NO: 4719308 - DNA, 25 bp, Homo sapien
ctggaatgtggagatgtatagtttc

SEQ ID NO: 4719309 - DNA, 25 bp, Homo sapien
tggcagtatcatcaggaggaaaacg

SEQ ID NO: 4719310 - DNA, 25 bp, Homo sapien
gttccttggactgatcttgactttg

SEQ ID NO: 4719311 - DNA, 25 bp, Homo sapien
ctgatcttgactttgatacctggag

SEQ ID NO: 4719312 - DNA, 25 bp, Homo sapien
acggtcccttttgctaatgatgata

SEQ ID NO: 4719313 - DNA, 25 bp, Homo sapien
ttgctaatgatgataaagcagcccc

SEQ ID NO: 4719314 - DNA, 25 bp, Homo sapien
tctgtgatgacaggttaaagagttc

SEQ ID NO: 4719315 - DNA, 25 bp, Homo sapien
ttttagtcacggagtcactagtgtc

SEQ ID NO: 4719316 - DNA, 25 bp, Homo sapien
aaatactagtggctccacacttcca

SEQ ID NO: 4719317 - DNA, 25 bp, Homo sapien
aacatctcaccaccgctcaccacca

SEQ ID NO: 4719318 - DNA, 25 bp, Homo sapien
tccacagccaactgccaacatctca

SEQ ID NO: 4719319 - DNA, 25 bp, Homo sapien
cacttccacagccaactgccaacat

SEQ ID NO: 4719320 - DNA, 25 bp, Homo sapien
ctatgttaaaggacaatctcagcat

SEQ ID NO: 4719321 - DNA, 25 bp, Homo sapien
gcaatcttttgaccagggctacttg

SEQ ID NO: 4719322 - DNA, 25 bp, Homo sapien
caatcttttgaccagggctacttgg

SEQ ID NO: 4719323 - DNA, 25 bp, Homo sapien
tagtgggtaaccagtgaacacttgc

SEQ ID NO: 4719324 - DNA, 25 bp, Homo sapien
cattgcacatagtgggtaaccagtg

SEQ ID NO: 4719325 - DNA, 25 bp, Homo sapien
gaattctcgtggcatgctgataatc

SEQ ID NO: 4719326 - DNA, 25 bp, Homo sapien
ttgtaggaattctcgtggcatgctg

SEQ ID NO: 4719327 - DNA, 25 bp, Homo sapien
tgtcattccacctgcgccttgaagg

SEQ ID NO: 4719328 - DNA, 25 bp, Homo sapien
tagagccctggccaatgaaaaaacc

SEQ ID NO: 4719329 - DNA, 25 bp, Homo sapien
tttcaaaactcaagggactgccagc

SEQ ID NO: 4719330 - DNA, 25 bp, Homo sapien
gcttgggcacaagaactcctgtcat

SEQ ID NO: 4719331 - DNA, 25 bp, Homo sapien
ctttgcagtattgaagaaggagctg

SEQ ID NO: 4719332 - DNA, 25 bp, Homo sapien
tgtttctggctgataggacttcagg

SEQ ID NO: 4719333 - DNA, 25 bp, Homo sapien
catggacatggataccatttggttg

SEQ ID NO: 4719334 - DNA, 25 bp, Homo sapien
gctgctgggtatagggaggctgtgt

SEQ ID NO: 4719335 - DNA, 25 bp, Homo sapien
gtccaaccctgttctctagctgctg

SEQ ID NO: 4719336 - DNA, 25 bp, Homo sapien
gacacttcagagatttcactggaca

SEQ ID NO: 4719337 - DNA, 25 bp, Homo sapien
gctgctgatctgcagttgacacttc

SEQ ID NO: 4719338 - DNA, 25 bp, Homo sapien
tttctaggtccaaccctgttctcta

SEQ ID NO: 4719339 - DNA, 25 bp, Homo sapien
gagacaatcaagaccagctttcagt

SEQ ID NO: 4719340 - DNA, 25 bp, Homo sapien
caaaagagacacttggactcagttc

SEQ ID NO: 4719341 - DNA, 25 bp, Homo sapien
cagggcaagagctgtgtgtccgtct

SEQ ID NO: 4719342 - DNA, 25 bp, Homo sapien
gcaaattgaattcggcttctgagac

SEQ ID NO: 4719343 - DNA, 25 bp, Homo sapien
gagaacctgccatactcacacttgc

SEQ ID NO: 4719344 - DNA, 25 bp, Homo sapien
gagagaacctgccatactcacactt

SEQ ID NO: 4719345 - DNA, 25 bp, Homo sapien
acctgattggaagagagaacctgcc

SEQ ID NO: 4719346 - DNA, 25 bp, Homo sapien
ctttccaaacctgattggaagagag

SEQ ID NO: 4719347 - DNA, 25 bp, Homo sapien
ctgtgaagggaggtttggcggcgac

SEQ ID NO: 4719348 - DNA, 25 bp, Homo sapien
tgtctgtgaagggaggtttggcggc

SEQ ID NO: 4719349 - DNA, 25 bp, Homo sapien
gtgaagggaggtttggcggcgacac

SEQ ID NO: 4719350 - DNA, 25 bp, Homo sapien
tctgtgaagggaggtttggcggcga

SEQ ID NO: 4719351 - DNA, 25 bp, Homo sapien
gggttgtgagggctcccctgtacat

SEQ ID NO: 4719352 - DNA, 25 bp, Homo sapien
ctgtgagtggaggtaactgggagga

SEQ ID NO: 4719353 - DNA, 25 bp, Homo sapien
ggtggtacggccccagcagctgttc

SEQ ID NO: 4719354 - DNA, 25 bp, Homo sapien
tgtacattatgtcctggagaagggt

SEQ ID NO: 4719355 - DNA, 25 bp, Homo sapien
ggctgatgttcacggtctgtctcct

SEQ ID NO: 4719356 - DNA, 25 bp, Homo sapien
tgttcacggtctgtctcctaagtgc

SEQ ID NO: 4719357 - DNA, 25 bp, Homo sapien
cgcttcaggctgatgttcacggtct

SEQ ID NO: 4719358 - DNA, 25 bp, Homo sapien
ttcaggctgatgttcacggtctgtc

SEQ ID NO: 4719359 - DNA, 25 bp, Homo sapien
aggtggtgaggcctgaaaatgctta

SEQ ID NO: 4719360 - DNA, 25 bp, Homo sapien
agtcctccaaagaggtggtgaggcc

SEQ ID NO: 4719361 - DNA, 25 bp, Homo sapien
ggtggtgaggcctgaaaatgcttac

SEQ ID NO: 4719362 - DNA, 25 bp, Homo sapien
cacagtcctccaaagaggtggtgag

SEQ ID NO: 4719363 - DNA, 25 bp, Homo sapien
gcgtcagcttccatacaagttgcat

SEQ ID NO: 4719364 - DNA, 25 bp, Homo sapien
gcaaggctgagcttctgttgtgtgc

SEQ ID NO: 4719365 - DNA, 25 bp, Homo sapien
caaggctgagcttctgttgtgtgcg

SEQ ID NO: 4719366 - DNA, 25 bp, Homo sapien
tctgttgtgtgcgtcagcttccata

SEQ ID NO: 4719367 - DNA, 25 bp, Homo sapien
gtgaaggggatgctaggtggggcac

SEQ ID NO: 4719368 - DNA, 25 bp, Homo sapien
aacaggtggtgaaggggatgctagg

SEQ ID NO: 4719369 - DNA, 25 bp, Homo sapien
ctagaaacaggtggtgaaggggatg

SEQ ID NO: 4719370 - DNA, 25 bp, Homo sapien
tgaaggggatgctaggtggggcaca

SEQ ID NO: 4719371 - DNA, 25 bp, Homo sapien
cctccagctgtgctggtttgactga

SEQ ID NO: 4719372 - DNA, 25 bp, Homo sapien
accagtcaagcccacatccatagcc

SEQ ID NO: 4719373 - DNA, 25 bp, Homo sapien
gactgactgccagtcaagcccacgt

SEQ ID NO: 4719374 - DNA, 25 bp, Homo sapien
acgtcaactggtgttgactgaccac

SEQ ID NO: 4719375 - DNA, 25 bp, Homo sapien
aaggccaccagttgtcaataatgca

SEQ ID NO: 4719376 - DNA, 25 bp, Homo sapien
gccaccagttgtcaataatgcacca

SEQ ID NO: 4719377 - DNA, 25 bp, Homo sapien
ccagttgtcaataatgcaccaaggg

SEQ ID NO: 4719378 - DNA, 25 bp, Homo sapien
tgaaaggccaccagttgtcaataat

SEQ ID NO: 4719379 - DNA, 25 bp, Homo sapien
gagctgctttgtaaatctgcgttgg

SEQ ID NO: 4719380 - DNA, 25 bp, Homo sapien
gtaaatctgcgttggagtcattcat

SEQ ID NO: 4719381 - DNA, 25 bp, Homo sapien
gctttgtaaatctgcgttggagtca

SEQ ID NO: 4719382 - DNA, 25 bp, Homo sapien
cgggcagatctgcaaccactgagct

SEQ ID NO: 4719383 - DNA, 25 bp, Homo sapien
tcctcatgcaggcttgctctcatag

SEQ ID NO: 4719384 - DNA, 25 bp, Homo sapien
cacactgtgaattcacgtataagta

SEQ ID NO: 4719385 - DNA, 25 bp, Homo sapien
gaaccggtattacccacacactgtg

SEQ ID NO: 4719386 - DNA, 25 bp, Homo sapien
gcaggcttgctctcatagaaaaggg

SEQ ID NO: 4719387 - DNA, 25 bp, Homo sapien
ggttccatagagtgccctgggagac

SEQ ID NO: 4719388 - DNA, 25 bp, Homo sapien
tggatgccttcaatggaaacagctt

SEQ ID NO: 4719389 - DNA, 25 bp, Homo sapien
gatagtacatgagttctggatgcct

SEQ ID NO: 4719390 - DNA, 25 bp, Homo sapien
taagtgagagccacgttagtcagtg

SEQ ID NO: 4719391 - DNA, 25 bp, Homo sapien
tgtcatttaatccagcagttgatcg

SEQ ID NO: 4719392 - DNA, 25 bp, Homo sapien
tatgtcatttaatccagcagttgat

SEQ ID NO: 4719393 - DNA, 25 bp, Homo sapien
gtcatttaatccagcagttgatcgc

SEQ ID NO: 4719394 - DNA, 25 bp, Homo sapien
tcatttaatccagcagttgatcgca

SEQ ID NO: 4719395 - DNA, 25 bp, Homo sapien
gaatcaactgagaactgtcaaattt

SEQ ID NO: 4719396 - DNA, 25 bp, Homo sapien
aaattctaatggcttattcatactt

SEQ ID NO: 4719397 - DNA, 25 bp, Homo sapien
atcaactgagaactgtcaaatttaa

SEQ ID NO: 4719398 - DNA, 25 bp, Homo sapien
ttttaaattctaatggcttattcat

SEQ ID NO: 4719399 - DNA, 25 bp, Homo sapien
cagcctgctacctgcttaaggagga

SEQ ID NO: 4719400 - DNA, 25 bp, Homo sapien
ggttgggtacactgaatttctggca

SEQ ID NO: 4719401 - DNA, 25 bp, Homo sapien
cacacccagctcaggaatcagaagg

SEQ ID NO: 4719402 - DNA, 25 bp, Homo sapien
taacataactgcgagggttgggtac

SEQ ID NO: 4719403 - DNA, 25 bp, Homo sapien
agcagcatctctaggggaagtggcc

SEQ ID NO: 4719404 - DNA, 25 bp, Homo sapien
gcagggactgcacggtgaggcaatc

SEQ ID NO: 4719405 - DNA, 25 bp, Homo sapien
ctgaatagaggtcaggcccgggtcc

SEQ ID NO: 4719406 - DNA, 25 bp, Homo sapien
actgcacggtgaggcaatctgtgag

SEQ ID NO: 4719407 - DNA, 25 bp, Homo sapien
tccaacagtgtgagtccatacaact

SEQ ID NO: 4719408 - DNA, 25 bp, Homo sapien
tctggcatcaaagacgggcaattct

SEQ ID NO: 4719409 - DNA, 25 bp, Homo sapien
gaggtctttgcaaggaatttcacgg

SEQ ID NO: 4719410 - DNA, 25 bp, Homo sapien
aatttcacggctagggttacttctg

SEQ ID NO: 4719411 - DNA, 25 bp, Homo sapien
tgactttgggcatctagttagcaga

SEQ ID NO: 4719412 - DNA, 25 bp, Homo sapien
aactgtgacgaataaagatctttct

SEQ ID NO: 4719413 - DNA, 25 bp, Homo sapien
tcatcttccttgatcaactgtgacg

SEQ ID NO: 4719414 - DNA, 25 bp, Homo sapien
ctttctgaagtagtgactttgggca

SEQ ID NO: 4719415 - DNA, 25 bp, Homo sapien
tagactggacattctgggctgaaac

SEQ ID NO: 4719416 - DNA, 25 bp, Homo sapien
tgaaacctgaatgaagcgatggagc

SEQ ID NO: 4719417 - DNA, 25 bp, Homo sapien
tactgtgcagaataccggaagagga

SEQ ID NO: 4719418 - DNA, 25 bp, Homo sapien
tactctgtagggatgatgcacacct

SEQ ID NO: 4719419 - DNA, 25 bp, Homo sapien
ccctgggtcctgaaaagagcctatc

SEQ ID NO: 4719420 - DNA, 25 bp, Homo sapien
cactgtctgcaaacttcccacgtag

SEQ ID NO: 4719421 - DNA, 25 bp, Homo sapien
cataaatgcatatttccctgggtcc

SEQ ID NO: 4719422 - DNA, 25 bp, Homo sapien
gaaaagagcctatctcactgtctgc

SEQ ID NO: 4719423 - DNA, 25 bp, Homo sapien
cagcaggagtatggaaagtagatgt

SEQ ID NO: 4719424 - DNA, 25 bp, Homo sapien
caggagtatggaaagtagatgttta

SEQ ID NO: 4719425 - DNA, 25 bp, Homo sapien
aggagtatggaaagtagatgtttaa

SEQ ID NO: 4719426 - DNA, 25 bp, Homo sapien
tatgcatcaccttgtagggatccct

SEQ ID NO: 4719427 - DNA, 25 bp, Homo sapien
gaaaacgaggcacaatcaaaggcct

SEQ ID NO: 4719428 - DNA, 25 bp, Homo sapien
tgtctccaatgagcacagtccatct

SEQ ID NO: 4719429 - DNA, 25 bp, Homo sapien
tctgggccacgcatgtttatgcatc

SEQ ID NO: 4719430 - DNA, 25 bp, Homo sapien
cactgtccaggattgcattagtctt

SEQ ID NO: 4719431 - DNA, 25 bp, Homo sapien
tgttgcaagaatgatgaggactgtc

SEQ ID NO: 4719432 - DNA, 25 bp, Homo sapien
tgctcacggtatacagattccatct

SEQ ID NO: 4719433 - DNA, 25 bp, Homo sapien
gattccatctcacaagcactgtcca

SEQ ID NO: 4719434 - DNA, 25 bp, Homo sapien
ggttctcattgacgccactcaaagg

SEQ ID NO: 4719435 - DNA, 25 bp, Homo sapien
gcagcgctgcatggtgcctgattta

SEQ ID NO: 4719436 - DNA, 25 bp, Homo sapien
cactggtccttagccctgaatgcac

SEQ ID NO: 4719437 - DNA, 25 bp, Homo sapien
tcaaaggaactggtcactcgtggtc

SEQ ID NO: 4719438 - DNA, 25 bp, Homo sapien
gaagatactgcccatggatatcaat

SEQ ID NO: 4719439 - DNA, 25 bp, Homo sapien
ccatggatatcaatgacatagctca

SEQ ID NO: 4719440 - DNA, 25 bp, Homo sapien
acagatcagagagccaagatacaaa

SEQ ID NO: 4719441 - DNA, 25 bp, Homo sapien
tatcaatgacatagctcaactgaag

SEQ ID NO: 4719442 - DNA, 25 bp, Homo sapien
ggaacgtattctaaagcgcacacct

SEQ ID NO: 4719443 - DNA, 25 bp, Homo sapien
tttgagcaacgcctaatgttacctt

SEQ ID NO: 4719444 - DNA, 25 bp, Homo sapien
tatgagggcacagaacttgtctgtc

SEQ ID NO: 4719445 - DNA, 25 bp, Homo sapien
gatctaacctagtgcctgacacgca

SEQ ID NO: 4719446 - DNA, 25 bp, Homo sapien
ctagataggggaccgatactctttc

SEQ ID NO: 4719447 - DNA, 25 bp, Homo sapien
tcatgtccatgacaactgttaatct

SEQ ID NO: 4719448 - DNA, 25 bp, Homo sapien
ctttcatgtccatgacaactgttaa

SEQ ID NO: 4719449 - DNA, 25 bp, Homo sapien
gataggggaccgatactctttcatg

SEQ ID NO: 4719450 - DNA, 25 bp, Homo sapien
tagggaacttgggtctgtgtagcgt

SEQ ID NO: 4719451 - DNA, 25 bp, Homo sapien
gaatgtgccttcacatgctttctta

SEQ ID NO: 4719452 - DNA, 25 bp, Homo sapien
gtgtagcgtttggtacatcctggaa

SEQ ID NO: 4719453 - DNA, 25 bp, Homo sapien
ccttcacatgctttcttagggaact

SEQ ID NO: 4719454 - DNA, 25 bp, Homo sapien
ctttggtactgtcagaaactagtaa

SEQ ID NO: 4719455 - DNA, 25 bp, Homo sapien
ctgagaataatctttggtactgtca

SEQ ID NO: 4719456 - DNA, 25 bp, Homo sapien
tccctgagaataatctttggtactg

SEQ ID NO: 4719457 - DNA, 25 bp, Homo sapien
tttggtactgtcagaaactagtaaa

SEQ ID NO: 4719458 - DNA, 25 bp, Homo sapien
tgtgacatatagctaaaatgacttc

SEQ ID NO: 4719459 - DNA, 25 bp, Homo sapien
gagatatttactaggcaaaccatcg

SEQ ID NO: 4719460 - DNA, 25 bp, Homo sapien
cactgaattcaggtagagtagaaac

SEQ ID NO: 4719461 - DNA, 25 bp, Homo sapien
gggtccatcctacacccatgttgct

SEQ ID NO: 4719462 - DNA, 25 bp, Homo sapien
gaaactggaaagctcctgccattct

SEQ ID NO: 4719463 - DNA, 25 bp, Homo sapien
ggaaactggaaagctcctgccattc

SEQ ID NO: 4719464 - DNA, 25 bp, Homo sapien
aaactggaaagctcctgccattctt

SEQ ID NO: 4719465 - DNA, 25 bp, Homo sapien
gtgtccagatgcgtccgctggtgtt

SEQ ID NO: 4719466 - DNA, 25 bp, Homo sapien
gcctgtgtggctccgcaagtggatc

SEQ ID NO: 4719467 - DNA, 25 bp, Homo sapien
tttggcgcggtcactggagttactg

SEQ ID NO: 4719468 - DNA, 25 bp, Homo sapien
gatgctggcacaaatacggcttctc

SEQ ID NO: 4719469 - DNA, 25 bp, Homo sapien
ttttggtggttgagaaggaccttga

SEQ ID NO: 4719470 - DNA, 25 bp, Homo sapien
tagatggtagaggacattgttcaca

SEQ ID NO: 4719471 - DNA, 25 bp, Homo sapien
tggtagaggacattgttcacaacag

SEQ ID NO: 4719472 - DNA, 25 bp, Homo sapien
gaggacattgttcacaacagaatga

SEQ ID NO: 4719473 - DNA, 25 bp, Homo sapien
cattgttcacaacagaatgatctag

SEQ ID NO: 4719474 - DNA, 25 bp, Homo sapien
gacacgccaagactgtagcctggtt

SEQ ID NO: 4719475 - DNA, 25 bp, Homo sapien
acacttaggtctgaagtgagcttgt

SEQ ID NO: 4719476 - DNA, 25 bp, Homo sapien
cttaggtctgaagtgagcttgtggt

SEQ ID NO: 4719477 - DNA, 25 bp, Homo sapien
tggttttagacacgccaagactgta

SEQ ID NO: 4719478 - DNA, 25 bp, Homo sapien
ctttcctgatcgggtttccatacca

SEQ ID NO: 4719479 - DNA, 25 bp, Homo sapien
tttcctgatcgggtttccataccat

SEQ ID NO: 4719480 - DNA, 25 bp, Homo sapien
aattcacgacgtagaggggacaagg

SEQ ID NO: 4719481 - DNA, 25 bp, Homo sapien
aaagcaagggaattcacgacgtaga

SEQ ID NO: 4719482 - DNA, 25 bp, Homo sapien
agcaagggaattcacgacgtagagg

SEQ ID NO: 4719483 - DNA, 25 bp, Homo sapien
ggaattcacgacgtagaggggacaa

SEQ ID NO: 4719484 - DNA, 25 bp, Homo sapien
ttagtggctgtgccaaatgaagacg

SEQ ID NO: 4719485 - DNA, 25 bp, Homo sapien
agtggctgtgccaaatgaagacgac

SEQ ID NO: 4719486 - DNA, 25 bp, Homo sapien
gggagagagagcataggctggagtt

SEQ ID NO: 4719487 - DNA, 25 bp, Homo sapien
agagagagcataggctggagttagt

SEQ ID NO: 4719488 - DNA, 25 bp, Homo sapien
gtcacaagctgattgagcccccata

SEQ ID NO: 4719489 - DNA, 25 bp, Homo sapien
catatcttccctggcaaatcgtcta

SEQ ID NO: 4719490 - DNA, 25 bp, Homo sapien
tggcaaatcgtctaagagctccatc

SEQ ID NO: 4719491 - DNA, 25 bp, Homo sapien
gctccatccttgagaacttgccctg

SEQ ID NO: 4719492 - DNA, 25 bp, Homo sapien
gctgagctcaccaattattccccgg

SEQ ID NO: 4719493 - DNA, 25 bp, Homo sapien
tgctgaatggtgtaattggcctgcc

SEQ ID NO: 4719494 - DNA, 25 bp, Homo sapien
caatgtcctgatgtttcgccaaacc

SEQ ID NO: 4719495 - DNA, 25 bp, Homo sapien
tattccccggttgctatcagagcca

SEQ ID NO: 4719496 - DNA, 25 bp, Homo sapien
aatattgaagtgacgactgctcccc

SEQ ID NO: 4719497 - DNA, 25 bp, Homo sapien
aactggcagtgagagtatgctggaa

SEQ ID NO: 4719498 - DNA, 25 bp, Homo sapien
cctgctggagatgtgccgcttgttc

SEQ ID NO: 4719499 - DNA, 25 bp, Homo sapien
tatgctggaatattgaagtgacgac

SEQ ID NO: 4719500 - DNA, 25 bp, Homo sapien
cataagacattagggcaaactctgc

SEQ ID NO: 4719501 - DNA, 25 bp, Homo sapien
tcataagacattagggcaaactctg

SEQ ID NO: 4719502 - DNA, 25 bp, Homo sapien
ccatctcccaactgttagtgactca

SEQ ID NO: 4719503 - DNA, 25 bp, Homo sapien
actcagccagagtaaaagtcagctc

SEQ ID NO: 4719504 - DNA, 25 bp, Homo sapien
ctcccaactgttagtgactcagcca

SEQ ID NO: 4719505 - DNA, 25 bp, Homo sapien
ctcagccagagtaaaagtcagctct

SEQ ID NO: 4719506 - DNA, 25 bp, Homo sapien
gttcctggtacagaaactgtaaata

SEQ ID NO: 4719507 - DNA, 25 bp, Homo sapien
tgtaaataagcccttcggagacagt

SEQ ID NO: 4719508 - DNA, 25 bp, Homo sapien
cgagacaccaaggatgatggttcct

SEQ ID NO: 4719509 - DNA, 25 bp, Homo sapien
gggccttccacatcacttgagtcag

SEQ ID NO: 4719510 - DNA, 25 bp, Homo sapien
tgctttgtcaccaaggtgtagtgtg

SEQ ID NO: 4719511 - DNA, 25 bp, Homo sapien
tgtcaccaaggtgtagtgtgatgaa

SEQ ID NO: 4719512 - DNA, 25 bp, Homo sapien
tttgtcaccaaggtgtagtgtgatg

SEQ ID NO: 4719513 - DNA, 25 bp, Homo sapien
tcaccaaggtgtagtgtgatgaaat

SEQ ID NO: 4719514 - DNA, 25 bp, Homo sapien
ccttggtgagtctagccctatgaaa

SEQ ID NO: 4719515 - DNA, 25 bp, Homo sapien
aaccttggtgagtctagccctatga

SEQ ID NO: 4719516 - DNA, 25 bp, Homo sapien
cacaaaccttggtgagtctagccct

SEQ ID NO: 4719517 - DNA, 25 bp, Homo sapien
caaaccttggtgagtctagccctat

SEQ ID NO: 4719518 - DNA, 25 bp, Homo sapien
taatgtaaaggtcgcactgctcact

SEQ ID NO: 4719519 - DNA, 25 bp, Homo sapien
caatcaggtcctggcgggccatatg

SEQ ID NO: 4719520 - DNA, 25 bp, Homo sapien
tggaaccatccctagaagattttgg

SEQ ID NO: 4719521 - DNA, 25 bp, Homo sapien
gggaaatcaggcacatttggaacca

SEQ ID NO: 4719522 - DNA, 25 bp, Homo sapien
tcatgacataggaaatcacagaaat

SEQ ID NO: 4719523 - DNA, 25 bp, Homo sapien
ccaaaatctgtgttactgctcatga

SEQ ID NO: 4719524 - DNA, 25 bp, Homo sapien
ccacacttgtccaagaggacagagc

SEQ ID NO: 4719525 - DNA, 25 bp, Homo sapien
aactttatatttccacacttgtcca

SEQ ID NO: 4719526 - DNA, 25 bp, Homo sapien
caatcaggcccaagagtaacatcac

SEQ ID NO: 4719527 - DNA, 25 bp, Homo sapien
gagaacttgtttaatcgcccagcaa

SEQ ID NO: 4719528 - DNA, 25 bp, Homo sapien
gaatgcttacaactcccaagccggg

SEQ ID NO: 4719529 - DNA, 25 bp, Homo sapien
taatggcagaatgacggcttagttc

SEQ ID NO: 4719530 - DNA, 25 bp, Homo sapien
ttcagaagtttgcaaggcattcatc

SEQ ID NO: 4719531 - DNA, 25 bp, Homo sapien
taatagttcttttatacaagtacat

SEQ ID NO: 4719532 - DNA, 25 bp, Homo sapien
tgcaaggcattcatcttgactaccc

SEQ ID NO: 4719533 - DNA, 25 bp, Homo sapien
tacatatttcagaagtttgcaaggc

SEQ ID NO: 4719534 - DNA, 25 bp, Homo sapien
tcatgacagcgaaaggccagttgac

SEQ ID NO: 4719535 - DNA, 25 bp, Homo sapien
catccagctggtgaggaggtctaat

SEQ ID NO: 4719536 - DNA, 25 bp, Homo sapien
tgaagcccgctgtagaagttcccat

SEQ ID NO: 4719537 - DNA, 25 bp, Homo sapien
gaattgaaccaggaacactagcagt

SEQ ID NO: 4719538 - DNA, 25 bp, Homo sapien
tatcacagtaggatccacaggcatc

SEQ ID NO: 4719539 - DNA, 25 bp, Homo sapien
tctaaatagcacacgcttcgagcga

SEQ ID NO: 4719540 - DNA, 25 bp, Homo sapien
gtgactttgggacagtgacttctcc

SEQ ID NO: 4719541 - DNA, 25 bp, Homo sapien
cacagttttatggatgtctggtacc

SEQ ID NO: 4719542 - DNA, 25 bp, Homo sapien
tactacacggtttctctcgacagcc

SEQ ID NO: 4719543 - DNA, 25 bp, Homo sapien
gcaagctctacgctgctctgctgaa

SEQ ID NO: 4719544 - DNA, 25 bp, Homo sapien
agaaagatgaactcgggcagcagcc

SEQ ID NO: 4719545 - DNA, 25 bp, Homo sapien
gaactgaagcgctcttttgttgcag

SEQ ID NO: 4719546 - DNA, 25 bp, Homo sapien
caaacagttggcaagcaactgggaa

SEQ ID NO: 4719547 - DNA, 25 bp, Homo sapien
tcaaacagttggcaagcaactggga

SEQ ID NO: 4719548 - DNA, 25 bp, Homo sapien
ctcaaacagttggcaagcaactggg

SEQ ID NO: 4719549 - DNA, 25 bp, Homo sapien
aaacagttggcaagcaactgggaat

SEQ ID NO: 4719550 - DNA, 25 bp, Homo sapien
tgctgtttcactctgaaattcatag

SEQ ID NO: 4719551 - DNA, 25 bp, Homo sapien
ctgctgtttcactctgaaattcata

SEQ ID NO: 4719552 - DNA, 25 bp, Homo sapien
gcacttaggcacttctcagatggtt

SEQ ID NO: 4719553 - DNA, 25 bp, Homo sapien
tacagcagcctgctaaaatgtcagc

SEQ ID NO: 4719554 - DNA, 25 bp, Homo sapien
tctaaagacttgctatgcctaggca

SEQ ID NO: 4719555 - DNA, 25 bp, Homo sapien
caaaacatgttaaatagcggctcgg

SEQ ID NO: 4719556 - DNA, 25 bp, Homo sapien
taattagcatcacggctgtacgagc

SEQ ID NO: 4719557 - DNA, 25 bp, Homo sapien
caaatacggctgtcatcacatcaag

SEQ ID NO: 4719558 - DNA, 25 bp, Homo sapien
tgcatccctgtaggaacacacttat

SEQ ID NO: 4719559 - DNA, 25 bp, Homo sapien
ccccattagtttttggagcagccaa

SEQ ID NO: 4719560 - DNA, 25 bp, Homo sapien
taacactgtagcatcatgtgctgac

SEQ ID NO: 4719561 - DNA, 25 bp, Homo sapien
tgtaatgaatcttagtcactaacac

SEQ ID NO: 4719562 - DNA, 25 bp, Homo sapien
tagtcactaacactgtagcatcatg

SEQ ID NO: 4719563 - DNA, 25 bp, Homo sapien
ctgacattatcaaaagctgctcaaa

SEQ ID NO: 4719564 - DNA, 25 bp, Homo sapien
taagaagggagaactaccgattgat

SEQ ID NO: 4719565 - DNA, 25 bp, Homo sapien
gaaatgcccagattatgcaagtaca

SEQ ID NO: 4719566 - DNA, 25 bp, Homo sapien
tactcaaacaaatacgtcacagcag

SEQ ID NO: 4719567 - DNA, 25 bp, Homo sapien
tttgaacattcgtgcactgctggta

SEQ ID NO: 4719568 - DNA, 25 bp, Homo sapien
tacttaaatttccacatctggccac

SEQ ID NO: 4719569 - DNA, 25 bp, Homo sapien
tcctacttaaatttccacatctggc

SEQ ID NO: 4719570 - DNA, 25 bp, Homo sapien
cctacttaaatttccacatctggcc

SEQ ID NO: 4719571 - DNA, 25 bp, Homo sapien
cttaaatttccacatctggccacat

SEQ ID NO: 4719572 - DNA, 25 bp, Homo sapien
ctgattgagctgtggtaggattccc

SEQ ID NO: 4719573 - DNA, 25 bp, Homo sapien
tggttttgagcacactattctactg

SEQ ID NO: 4719574 - DNA, 25 bp, Homo sapien
tcccaggagataatcaggtacggct

SEQ ID NO: 4719575 - DNA, 25 bp, Homo sapien
caatgactcagttattggagggctg

SEQ ID NO: 4719576 - DNA, 25 bp, Homo sapien
agagatcactaatgttccgccccgt

SEQ ID NO: 4719577 - DNA, 25 bp, Homo sapien
gatattatgagtccttgcaacagag

SEQ ID NO: 4719578 - DNA, 25 bp, Homo sapien
tccgccccgtcagatatctttgagt

SEQ ID NO: 4719579 - DNA, 25 bp, Homo sapien
taaacacagtctcgcaatcacagct

SEQ ID NO: 4719580 - DNA, 25 bp, Homo sapien
tcttggccaagagcgacatttgctt

SEQ ID NO: 4719581 - DNA, 25 bp, Homo sapien
tttgactttccagactcccgagaca

SEQ ID NO: 4719582 - DNA, 25 bp, Homo sapien
aaaattgggccatctctgtgtctac

SEQ ID NO: 4719583 - DNA, 25 bp, Homo sapien
tgtgtaaaagaaccatagagtgcgg

SEQ ID NO: 4719584 - DNA, 25 bp, Homo sapien
tcttatctttgatgctgataggtac

SEQ ID NO: 4719585 - DNA, 25 bp, Homo sapien
ggtacgccttctgcagaacacatgc

SEQ ID NO: 4719586 - DNA, 25 bp, Homo sapien
ggcaccgtgggtgggaaatcctctg

SEQ ID NO: 4719587 - DNA, 25 bp, Homo sapien
tgatgctgataggtacgccttctgc

SEQ ID NO: 4719588 - DNA, 25 bp, Homo sapien
gcaacaagtttctccagtaccccag

SEQ ID NO: 4719589 - DNA, 25 bp, Homo sapien
caaggtacagaggaacactttcaac

SEQ ID NO: 4719590 - DNA, 25 bp, Homo sapien
tatgtacctgtatgttagcactcag

SEQ ID NO: 4719591 - DNA, 25 bp, Homo sapien
tctctcccgatttttcaaggtacag

SEQ ID NO: 4719592 - DNA, 25 bp, Homo sapien
aacgttgggaggcatgggcttcaaa

SEQ ID NO: 4719593 - DNA, 25 bp, Homo sapien
acaatttctaatttgccattttcat

SEQ ID NO: 4719594 - DNA, 25 bp, Homo sapien
tcattttaaaagtcaccctgagaat

SEQ ID NO: 4719595 - DNA, 25 bp, Homo sapien
tttccctttgccatcctccttgaaa

SEQ ID NO: 4719596 - DNA, 25 bp, Homo sapien
tcattctttgggagaaaaattatta

SEQ ID NO: 4719597 - DNA, 25 bp, Homo sapien
gctgatgtcatcaagccccacaatc

SEQ ID NO: 4719598 - DNA, 25 bp, Homo sapien
cctgttagtaatttatggaaggctg

SEQ ID NO: 4719599 - DNA, 25 bp, Homo sapien
catcaagccccacaatcctgagaga

SEQ ID NO: 4719600 - DNA, 25 bp, Homo sapien
tatggaaggctgatgtcatcaagcc

SEQ ID NO: 4719601 - DNA, 25 bp, Homo sapien
agatgcttctgcaaagtcctgctcc

SEQ ID NO: 4719602 - DNA, 25 bp, Homo sapien
caccagatgcttctgcaaagtcctg

SEQ ID NO: 4719603 - DNA, 25 bp, Homo sapien
cagatgcttctgcaaagtcctgctc

SEQ ID NO: 4719604 - DNA, 25 bp, Homo sapien
ccagatgcttctgcaaagtcctgct

SEQ ID NO: 4719605 - DNA, 25 bp, Homo sapien
gtattattaagcatctggaccctcc

SEQ ID NO: 4719606 - DNA, 25 bp, Homo sapien
tctgcagtcctttgtcctcaccaca

SEQ ID NO: 4719607 - DNA, 25 bp, Homo sapien
gtcgcatatacttactgcaatggca

SEQ ID NO: 4719608 - DNA, 25 bp, Homo sapien
ccctttttaccctgtcgcatatact

SEQ ID NO: 4719609 - DNA, 25 bp, Homo sapien
ggaaataattgcatctccgagtaag

SEQ ID NO: 4719610 - DNA, 25 bp, Homo sapien
ggagccccagacacataacttgagt

SEQ ID NO: 4719611 - DNA, 25 bp, Homo sapien
aagacagaggacagaatcggaatgg

SEQ ID NO: 4719612 - DNA, 25 bp, Homo sapien
tctaatgcactatggtgtcttagga

SEQ ID NO: 4719613 - DNA, 25 bp, Homo sapien
tctagaacaccacgttaggactgtg

SEQ ID NO: 4719614 - DNA, 25 bp, Homo sapien
taggactgtggccattaatctgtac

SEQ ID NO: 4719615 - DNA, 25 bp, Homo sapien
aaaagacgcagataagggtgactcc

SEQ ID NO: 4719616 - DNA, 25 bp, Homo sapien
tgtacatctcaatccatgcacagga

SEQ ID NO: 4719617 - DNA, 25 bp, Homo sapien
aatgtaccacttgtcaaaacagtgc

SEQ ID NO: 4719618 - DNA, 25 bp, Homo sapien
taccacttgtcaaaacagtgctgag

SEQ ID NO: 4719619 - DNA, 25 bp, Homo sapien
cagtgctgagcaggctctacagcat

SEQ ID NO: 4719620 - DNA, 25 bp, Homo sapien
cacttgtcaaaacagtgctgagcag

SEQ ID NO: 4719621 - DNA, 25 bp, Homo sapien
caatcctgctacacagtccaggcct

SEQ ID NO: 4719622 - DNA, 25 bp, Homo sapien
tcctgctacacagtccaggcctgac

SEQ ID NO: 4719623 - DNA, 25 bp, Homo sapien
atcctgctacacagtccaggcctga

SEQ ID NO: 4719624 - DNA, 25 bp, Homo sapien
aatcctgctacacagtccaggcctg

SEQ ID NO: 4719625 - DNA, 25 bp, Homo sapien
ccataccttggttacctcacttcta

SEQ ID NO: 4719626 - DNA, 25 bp, Homo sapien
gcccctcaacacaggaatttatcca

SEQ ID NO: 4719627 - DNA, 25 bp, Homo sapien
atttatccataccttggttacctca

SEQ ID NO: 4719628 - DNA, 25 bp, Homo sapien
ctctttggcccctcaacacaggaat

SEQ ID NO: 4719629 - DNA, 25 bp, Homo sapien
tatttccttattgcataagctttta

SEQ ID NO: 4719630 - DNA, 25 bp, Homo sapien
ttttgttgaaaagtaagacatgaat

SEQ ID NO: 4719631 - DNA, 25 bp, Homo sapien
gaaaagtaagacatgaatacacaca

SEQ ID NO: 4719632 - DNA, 25 bp, Homo sapien
cacactgtacagctgcaccacaata

SEQ ID NO: 4719633 - DNA, 25 bp, Homo sapien
cctcttgacggagcaacctgaggct

SEQ ID NO: 4719634 - DNA, 25 bp, Homo sapien
aatacctcttgacggagcaacctga

SEQ ID NO: 4719635 - DNA, 25 bp, Homo sapien
tacctcttgacggagcaacctgagg

SEQ ID NO: 4719636 - DNA, 25 bp, Homo sapien
aaatacctcttgacggagcaacctg

SEQ ID NO: 4719637 - DNA, 25 bp, Homo sapien
gtgtacatagccactctttgaccaa

SEQ ID NO: 4719638 - DNA, 25 bp, Homo sapien
taagtggaaaagtaacatgctggcc

SEQ ID NO: 4719639 - DNA, 25 bp, Homo sapien
tgacattagcaatgacgtcagtagg

SEQ ID NO: 4719640 - DNA, 25 bp, Homo sapien
gggccactgttgtatgtgtacatag

SEQ ID NO: 4719641 - DNA, 25 bp, Homo sapien
catatgtggctagtgagagtgcaaa

SEQ ID NO: 4719642 - DNA, 25 bp, Homo sapien
tccgtggatgcttcccaatcaatgg

SEQ ID NO: 4719643 - DNA, 25 bp, Homo sapien
gcttccttgctaacccactggctga

SEQ ID NO: 4719644 - DNA, 25 bp, Homo sapien
gacaagacaagttgaccagaaggcc

SEQ ID NO: 4719645 - DNA, 25 bp, Homo sapien
gtttaataatctcttcacttgggca

SEQ ID NO: 4719646 - DNA, 25 bp, Homo sapien
aacaaagtcctgctccaaaatgcgg

SEQ ID NO: 4719647 - DNA, 25 bp, Homo sapien
taaagaccgtgttttcacataatgt

SEQ ID NO: 4719648 - DNA, 25 bp, Homo sapien
aaaatgcggtttgactctctctaag

SEQ ID NO: 4719649 - DNA, 25 bp, Homo sapien
taagcacagtgatctcagagacaat

SEQ ID NO: 4719650 - DNA, 25 bp, Homo sapien
taaatatcatgttactgcccaagag

SEQ ID NO: 4719651 - DNA, 25 bp, Homo sapien
cttcacacagtgcaaataacagaat

SEQ ID NO: 4719652 - DNA, 25 bp, Homo sapien
gttttcagatcagaagaacacaggt

SEQ ID NO: 4719653 - DNA, 25 bp, Homo sapien
tggcattctcgcaatgtatcagctt

SEQ ID NO: 4719654 - DNA, 25 bp, Homo sapien
taacctggcattctcgcaatgtatc

SEQ ID NO: 4719655 - DNA, 25 bp, Homo sapien
acctggcattctcgcaatgtatcag

SEQ ID NO: 4719656 - DNA, 25 bp, Homo sapien
atataacctggcattctcgcaatgt

SEQ ID NO: 4719657 - DNA, 25 bp, Homo sapien
gagtggactctcatgtggatcagca

SEQ ID NO: 4719658 - DNA, 25 bp, Homo sapien
tcgatccagcggcagcaatgcttgc

SEQ ID NO: 4719659 - DNA, 25 bp, Homo sapien
gaagcaagtgaagtcctcccctttg

SEQ ID NO: 4719660 - DNA, 25 bp, Homo sapien
cttgtatcttcgagggcaaccggcc

SEQ ID NO: 4719661 - DNA, 25 bp, Homo sapien
gcccgagctccgggtggtgaaggtg

SEQ ID NO: 4719662 - DNA, 25 bp, Homo sapien
ccgagctccgggtggtgaaggtgcg

SEQ ID NO: 4719663 - DNA, 25 bp, Homo sapien
cccgagctccgggtggtgaaggtgc

SEQ ID NO: 4719664 - DNA, 25 bp, Homo sapien
gtggtgaaggtgcgcatgggcatgg

SEQ ID NO: 4719665 - DNA, 25 bp, Homo sapien
tccaggcgttcggtcttgaacaggc

SEQ ID NO: 4719666 - DNA, 25 bp, Homo sapien
actcctccaggcgttcggtcttgaa

SEQ ID NO: 4719667 - DNA, 25 bp, Homo sapien
ttcggtcttgaacaggccggccgac

SEQ ID NO: 4719668 - DNA, 25 bp, Homo sapien
gcgttcggtcttgaacaggccggcc

SEQ ID NO: 4719669 - DNA, 25 bp, Homo sapien
taaggagatcccctagatcaaggcc

SEQ ID NO: 4719670 - DNA, 25 bp, Homo sapien
gagagtggctactttccgtgccaaa

SEQ ID NO: 4719671 - DNA, 25 bp, Homo sapien
cgaagccctcgacccgttgatgtag

SEQ ID NO: 4719672 - DNA, 25 bp, Homo sapien
tgctccagctgttgcatgcgctcgt

SEQ ID NO: 4719673 - DNA, 25 bp, Homo sapien
ctttccgtcagactcaaggtcgtgg

SEQ ID NO: 4719674 - DNA, 25 bp, Homo sapien
atgcttgaggccgactgactttccg

SEQ ID NO: 4719675 - DNA, 25 bp, Homo sapien
gccaaagactcacgcgaaataaggg

SEQ ID NO: 4719676 - DNA, 25 bp, Homo sapien
tcaaggtcgtggacgccaaagactc

SEQ ID NO: 4719677 - DNA, 25 bp, Homo sapien
acttctggtgattggttaatttgga

SEQ ID NO: 4719678 - DNA, 25 bp, Homo sapien
tccatttccatatgctcatctgatc

SEQ ID NO: 4719679 - DNA, 25 bp, Homo sapien
gatcctactgatattacttctggtg

SEQ ID NO: 4719680 - DNA, 25 bp, Homo sapien
tgctcatctgatcctactgatatta

SEQ ID NO: 4719681 - DNA, 25 bp, Homo sapien
gactgatctggttgcatgctgtaga

SEQ ID NO: 4719682 - DNA, 25 bp, Homo sapien
tgctgtagagacctggcttgctgga

SEQ ID NO: 4719683 - DNA, 25 bp, Homo sapien
ggtgaaatgagtcccagtcgctgaa

SEQ ID NO: 4719684 - DNA, 25 bp, Homo sapien
tgccctctgtaagctaggactgatc

SEQ ID NO: 4719685 - DNA, 25 bp, Homo sapien
tgctggtgaccactagattgttgca

SEQ ID NO: 4719686 - DNA, 25 bp, Homo sapien
aatggacttgcactgaggcccaaag

SEQ ID NO: 4719687 - DNA, 25 bp, Homo sapien
gaccactagattgttgcagctgcct

SEQ ID NO: 4719688 - DNA, 25 bp, Homo sapien
ttttccaatggacttgcactgaggc

SEQ ID NO: 4719689 - DNA, 25 bp, Homo sapien
acaaatgaatcaggttagctttcat

SEQ ID NO: 4719690 - DNA, 25 bp, Homo sapien
taaaaacaaatgaatcaggttagct

SEQ ID NO: 4719691 - DNA, 25 bp, Homo sapien
aaacaaatgaatcaggttagctttc

SEQ ID NO: 4719692 - DNA, 25 bp, Homo sapien
aaaaacaaatgaatcaggttagctt

SEQ ID NO: 4719693 - DNA, 25 bp, Homo sapien
acaatcggataatgtcgctagactg

SEQ ID NO: 4719694 - DNA, 25 bp, Homo sapien
cgctagactgtacagtattaagcat

SEQ ID NO: 4719695 - DNA, 25 bp, Homo sapien
gataatgtcgctagactgtacagta

SEQ ID NO: 4719696 - DNA, 25 bp, Homo sapien
tgtcgctagactgtacagtattaag

SEQ ID NO: 4719697 - DNA, 25 bp, Homo sapien
ttcaaacctctattagttgccactt

SEQ ID NO: 4719698 - DNA, 25 bp, Homo sapien
cacaatatttttctacggccattca

SEQ ID NO: 4719699 - DNA, 25 bp, Homo sapien
tcagcagctgatgaaaactctgctt

SEQ ID NO: 4719700 - DNA, 25 bp, Homo sapien
tctattagttgccacttcagcagct

SEQ ID NO: 4719701 - DNA, 25 bp, Homo sapien
tttattggaaagacgagcttttagc

SEQ ID NO: 4719702 - DNA, 25 bp, Homo sapien
tggaaagacgagcttttagcaactt

SEQ ID NO: 4719703 - DNA, 25 bp, Homo sapien
tctttattggaaagacgagctttta

SEQ ID NO: 4719704 - DNA, 25 bp, Homo sapien
tattggaaagacgagcttttagcaa

SEQ ID NO: 4719705 - DNA, 25 bp, Homo sapien
cttttaagatgtccccgatatgctg

SEQ ID NO: 4719706 - DNA, 25 bp, Homo sapien
atgtccccgatatgctgagatacag

SEQ ID NO: 4719707 - DNA, 25 bp, Homo sapien
taagatgtccccgatatgctgagat

SEQ ID NO: 4719708 - DNA, 25 bp, Homo sapien
gatgtccccgatatgctgagataca

SEQ ID NO: 4719709 - DNA, 25 bp, Homo sapien
cactgaccatccctcagtttataga

SEQ ID NO: 4719710 - DNA, 25 bp, Homo sapien
tagcctctaggagaggatccttcct

SEQ ID NO: 4719711 - DNA, 25 bp, Homo sapien
aacactgaccatccctcagtttata

SEQ ID NO: 4719712 - DNA, 25 bp, Homo sapien
gctctctctgtagcctctaggagag

SEQ ID NO: 4719713 - DNA, 25 bp, Homo sapien
aaagcaaatgcactgaaggtaatat

SEQ ID NO: 4719714 - DNA, 25 bp, Homo sapien
aaatgcactgaaggtaatatcaaaa

SEQ ID NO: 4719715 - DNA, 25 bp, Homo sapien
aagcaaatgcactgaaggtaatatc

SEQ ID NO: 4719716 - DNA, 25 bp, Homo sapien
gcaaatgcactgaaggtaatatcaa

SEQ ID NO: 4719717 - DNA, 25 bp, Homo sapien
tatttctggtcttccgtcgttcaca

SEQ ID NO: 4719718 - DNA, 25 bp, Homo sapien
ttctggtcttccgtcgttcacagga

SEQ ID NO: 4719719 - DNA, 25 bp, Homo sapien
tttatttctggtcttccgtcgttca

SEQ ID NO: 4719720 - DNA, 25 bp, Homo sapien
gtcttccgtcgttcacaggaaccat

SEQ ID NO: 4719721 - DNA, 25 bp, Homo sapien
agccaggtagtccagaatgactgtg

SEQ ID NO: 4719722 - DNA, 25 bp, Homo sapien
caggtagtccagaatgactgtgctc

SEQ ID NO: 4719723 - DNA, 25 bp, Homo sapien
tagtccagaatgactgtgctccatg

SEQ ID NO: 4719724 - DNA, 25 bp, Homo sapien
ggtagtccagaatgactgtgctcca

SEQ ID NO: 4719725 - DNA, 25 bp, Homo sapien
tggctggccagttttcccaaaacca

SEQ ID NO: 4719726 - DNA, 25 bp, Homo sapien
gatcagatacttgtagatatgctgc

SEQ ID NO: 4719727 - DNA, 25 bp, Homo sapien
tatggctggccagttttcccaaaac

SEQ ID NO: 4719728 - DNA, 25 bp, Homo sapien
cagatacttgtagatatgctgcgtt

SEQ ID NO: 4719729 - DNA, 25 bp, Homo sapien
ccccgtcagtggtggatgggataaa

SEQ ID NO: 4719730 - DNA, 25 bp, Homo sapien
ccaaaaagatatatgcactcgtgtg

SEQ ID NO: 4719731 - DNA, 25 bp, Homo sapien
gacatggaatgaacctaggtgcccc

SEQ ID NO: 4719732 - DNA, 25 bp, Homo sapien
tacgtaacatgactgcacgtcctgc

SEQ ID NO: 4719733 - DNA, 25 bp, Homo sapien
tcattcacgaagctgcactgagcag

SEQ ID NO: 4719734 - DNA, 25 bp, Homo sapien
gttctgcttatctcagtagccttca

SEQ ID NO: 4719735 - DNA, 25 bp, Homo sapien
aatggattatgctctgttctgctta

SEQ ID NO: 4719736 - DNA, 25 bp, Homo sapien
atttctcgggctgaaatgctcattc

SEQ ID NO: 4719737 - DNA, 25 bp, Homo sapien
tggtgacagcttccaaaggtgtatg

SEQ ID NO: 4719738 - DNA, 25 bp, Homo sapien
tccaaaggtgtatgaatgtttacca

SEQ ID NO: 4719739 - DNA, 25 bp, Homo sapien
gaatgtttaccattgagatgttctg

SEQ ID NO: 4719740 - DNA, 25 bp, Homo sapien
gagatgttctgtgagatgtcgttca

SEQ ID NO: 4719741 - DNA, 25 bp, Homo sapien
tataccaaccaatgtaatgttctgg

SEQ ID NO: 4719742 - DNA, 25 bp, Homo sapien
taagcaggcattattacggctgtct

SEQ ID NO: 4719743 - DNA, 25 bp, Homo sapien
ttgacttgcacaataatcacacgag

SEQ ID NO: 4719744 - DNA, 25 bp, Homo sapien
cagagacgttaaggagcttgcctat

SEQ ID NO: 4719745 - DNA, 25 bp, Homo sapien
aaacaccccaagttatagctggcca

SEQ ID NO: 4719746 - DNA, 25 bp, Homo sapien
caaagagagagtgttcccaggctgt

SEQ ID NO: 4719747 - DNA, 25 bp, Homo sapien
taaggaggatgagctctaatggcca

SEQ ID NO: 4719748 - DNA, 25 bp, Homo sapien
cctgacagatgaggtgaaccctgat

SEQ ID NO: 4719749 - DNA, 25 bp, Homo sapien
taaaccagctgtttcagtgtagcac

SEQ ID NO: 4719750 - DNA, 25 bp, Homo sapien
cctgttttgggacacactgtaagca

SEQ ID NO: 4719751 - DNA, 25 bp, Homo sapien
tcagtctactgagccctagggcatg

SEQ ID NO: 4719752 - DNA, 25 bp, Homo sapien
aaggcatagccggttaagtacagta

SEQ ID NO: 4719753 - DNA, 25 bp, Homo sapien
taaatcaccccttagaaacctcaga

SEQ ID NO: 4719754 - DNA, 25 bp, Homo sapien
tcagatttcatgagatccaaaggtc

SEQ ID NO: 4719755 - DNA, 25 bp, Homo sapien
gcctttgcttttgaggacatcatca

SEQ ID NO: 4719756 - DNA, 25 bp, Homo sapien
cagaaacgccaatggacccttgtgg

SEQ ID NO: 4719757 - DNA, 25 bp, Homo sapien
agccacctggctcaagaagaaaaaa

SEQ ID NO: 4719758 - DNA, 25 bp, Homo sapien
gcactcaccctgcttcttaactttt

SEQ ID NO: 4719759 - DNA, 25 bp, Homo sapien
gtcatcaggaaaatgagccacctgg

SEQ ID NO: 4719760 - DNA, 25 bp, Homo sapien
gcctggcccgcactcaccctgcttc

SEQ ID NO: 4719761 - DNA, 25 bp, Homo sapien
tcaaaatggatccaaactccttggc

SEQ ID NO: 4719762 - DNA, 25 bp, Homo sapien
tatgaattatccaactccttgaggg

SEQ ID NO: 4719763 - DNA, 25 bp, Homo sapien
gtttaactgcccacttgtttgtatg

SEQ ID NO: 4719764 - DNA, 25 bp, Homo sapien
gcccacttgtttgtatgaattatcc

SEQ ID NO: 4719765 - DNA, 25 bp, Homo sapien
aattatccaactccttgagggaaag

SEQ ID NO: 4719766 - DNA, 25 bp, Homo sapien
tatcaaccctgagaattcactagca

SEQ ID NO: 4719767 - DNA, 25 bp, Homo sapien
tgacaggcatttcaaggtgtatcaa

SEQ ID NO: 4719768 - DNA, 25 bp, Homo sapien
gcatttcaaggtgtatcaaccctga

SEQ ID NO: 4719769 - DNA, 25 bp, Homo sapien
gaagcagcactacttctgacaggca

SEQ ID NO: 4719770 - DNA, 25 bp, Homo sapien
tcatactcagcatttaccactgtgg

SEQ ID NO: 4719771 - DNA, 25 bp, Homo sapien
cataaggacagttccagtcggtctt

SEQ ID NO: 4719772 - DNA, 25 bp, Homo sapien
gggcatgatcttgctaacctagctc

SEQ ID NO: 4719773 - DNA, 25 bp, Homo sapien
agggcagcgctacctgtatccggag

SEQ ID NO: 4719774 - DNA, 25 bp, Homo sapien
tcagccacgttgttctgaggagcca

SEQ ID NO: 4719775 - DNA, 25 bp, Homo sapien
catagtgggactcgatgtgctgcca

SEQ ID NO: 4719776 - DNA, 25 bp, Homo sapien
ctgggtgacctggaatcgcggcttc

SEQ ID NO: 4719777 - DNA, 25 bp, Homo sapien
gtatgtgaccctgacatgcctccag

SEQ ID NO: 4719778 - DNA, 25 bp, Homo sapien
aagtccaataagttatccatggtgt

SEQ ID NO: 4719779 - DNA, 25 bp, Homo sapien
tatccaatgtcactaatgactcctt

SEQ ID NO: 4719780 - DNA, 25 bp, Homo sapien
gccaagacggtcaaatatccaatgt

SEQ ID NO: 4719781 - DNA, 25 bp, Homo sapien
taatgactcctttcaggcaaagtcc

SEQ ID NO: 4719782 - DNA, 25 bp, Homo sapien
gccagacccaagagtgcatattgaa

SEQ ID NO: 4719783 - DNA, 25 bp, Homo sapien
acggtgaaatacactctgggttgcc

SEQ ID NO: 4719784 - DNA, 25 bp, Homo sapien
cagggcaacggttaccttaggcaga

SEQ ID NO: 4719785 - DNA, 25 bp, Homo sapien
tatatctgttagaaaccagggcaac

SEQ ID NO: 4719786 - DNA, 25 bp, Homo sapien
ttcacacagaaccagcggaaacaaa

SEQ ID NO: 4719787 - DNA, 25 bp, Homo sapien
tgcaaacctttacaggttgcacctg

SEQ ID NO: 4719788 - DNA, 25 bp, Homo sapien
tcatcgtggcggattctttttctgc

SEQ ID NO: 4719789 - DNA, 25 bp, Homo sapien
tcaaactttctcagaacgaccttca

SEQ ID NO: 4719790 - DNA, 25 bp, Homo sapien
ttctcgcctcccaaacacctccagc

SEQ ID NO: 4719791 - DNA, 25 bp, Homo sapien
cctccagcaagtcggagggcgcgaa

SEQ ID NO: 4719792 - DNA, 25 bp, Homo sapien
cacctccagcaagtcggagggcgcg

SEQ ID NO: 4719793 - DNA, 25 bp, Homo sapien
cgcgaacgcggagccagaaaccctt

SEQ ID NO: 4719794 - DNA, 25 bp, Homo sapien
aaacccggcccaagtgccgtgtgtg

SEQ ID NO: 4719795 - DNA, 25 bp, Homo sapien
ccttcagagcgctccgcgggctgtg

SEQ ID NO: 4719796 - DNA, 25 bp, Homo sapien
ggctgtgcctccttcggaaatgaaa

SEQ ID NO: 4719797 - DNA, 25 bp, Homo sapien
gatttccacaacaaagcccggcgtg

SEQ ID NO: 4719798 - DNA, 25 bp, Homo sapien
ataatgtttctaaaaagttcagttg

SEQ ID NO: 4719799 - DNA, 25 bp, Homo sapien
gctcattctcccctgctacacacat

SEQ ID NO: 4719800 - DNA, 25 bp, Homo sapien
tggaccctcggcatcagctcattct

SEQ ID NO: 4719801 - DNA, 25 bp, Homo sapien
gttgcgactttgtgcctcgcctgtc

SEQ ID NO: 4719802 - DNA, 25 bp, Homo sapien
cccgggcggcgcagtgtggacgcgg

SEQ ID NO: 4719803 - DNA, 25 bp, Homo sapien
gttccgtcgccggtgtgaccctgga

SEQ ID NO: 4719804 - DNA, 25 bp, Homo sapien
tggctaattgctgccggcgggttcc

SEQ ID NO: 4719805 - DNA, 25 bp, Homo sapien
atgctggctaattgctgccggcggg

SEQ ID NO: 4719806 - DNA, 25 bp, Homo sapien
gcgggctcgcgggtcactaggctgg

SEQ ID NO: 4719807 - DNA, 25 bp, Homo sapien
ttcgaaggccgagcttgtgtctccc

SEQ ID NO: 4719808 - DNA, 25 bp, Homo sapien
gcagccgggcgaggagtgtggatgt

SEQ ID NO: 4719809 - DNA, 25 bp, Homo sapien
ggctggccaattcgaaggccgagct

SEQ ID NO: 4719810 - DNA, 25 bp, Homo sapien
aagaaagtctgctcctagtagttca

SEQ ID NO: 4719811 - DNA, 25 bp, Homo sapien
agttcatcacatgtattgccacaga

SEQ ID NO: 4719812 - DNA, 25 bp, Homo sapien
cacagatgcaaggacttccatcttg

SEQ ID NO: 4719813 - DNA, 25 bp, Homo sapien
gggaatctaggtatgtaatgcacac

SEQ ID NO: 4719814 - DNA, 25 bp, Homo sapien
ggcctttctgcagttgacagtatta

SEQ ID NO: 4719815 - DNA, 25 bp, Homo sapien
ctgcagttgacagtattattcacca

SEQ ID NO: 4719816 - DNA, 25 bp, Homo sapien
aatatcctccaggtaggcctttctg

SEQ ID NO: 4719817 - DNA, 25 bp, Homo sapien
ccaggtaggcctttctgcagttgac

SEQ ID NO: 4719818 - DNA, 25 bp, Homo sapien
gtgatgaggacttgatcagcacata

SEQ ID NO: 4719819 - DNA, 25 bp, Homo sapien
gatgaggacttgatcagcacataca

SEQ ID NO: 4719820 - DNA, 25 bp, Homo sapien
acatacagtctctgaagcactttcc

SEQ ID NO: 4719821 - DNA, 25 bp, Homo sapien
gaggacttgatcagcacatacagtc

SEQ ID NO: 4719822 - DNA, 25 bp, Homo sapien
tggatgtttctggcatcagcttcca

SEQ ID NO: 4719823 - DNA, 25 bp, Homo sapien
gggcagttcagctggcccttgtgcc

SEQ ID NO: 4719824 - DNA, 25 bp, Homo sapien
aggcctgaagggctatgtgtggcca

SEQ ID NO: 4719825 - DNA, 25 bp, Homo sapien
tgatcaagaccatcgcaggcctgaa

SEQ ID NO: 4719826 - DNA, 25 bp, Homo sapien
aagggctatgtgtggccatgggcag

SEQ ID NO: 4719827 - DNA, 25 bp, Homo sapien
gaagtctcggtcctctgatttcagg

SEQ ID NO: 4719828 - DNA, 25 bp, Homo sapien
acaggctgggtacagatgtctgtag

SEQ ID NO: 4719829 - DNA, 25 bp, Homo sapien
tttttgtgcatgaaattgcttgcta

SEQ ID NO: 4719830 - DNA, 25 bp, Homo sapien
ttgcttgctatatgatctgattttg

SEQ ID NO: 4719831 - DNA, 25 bp, Homo sapien
attcctttggaataagctactgtca

SEQ ID NO: 4719832 - DNA, 25 bp, Homo sapien
tgtcacctttaagagttccctgagt

SEQ ID NO: 4719833 - DNA, 25 bp, Homo sapien
agttccctgagtagccggacatggt

SEQ ID NO: 4719834 - DNA, 25 bp, Homo sapien
gtcattcctttggaataagctactg

SEQ ID NO: 4719835 - DNA, 25 bp, Homo sapien
ttttggaatcactgtccttagaaac

SEQ ID NO: 4719836 - DNA, 25 bp, Homo sapien
cttactgcctttacctagtggattc

SEQ ID NO: 4719837 - DNA, 25 bp, Homo sapien
actgtccttagaaacagctgcttac

SEQ ID NO: 4719838 - DNA, 25 bp, Homo sapien
actgcctttacctagtggattcacc

SEQ ID NO: 4719839 - DNA, 25 bp, Homo sapien
tattgcagcaataagagtcctgtcc

SEQ ID NO: 4719840 - DNA, 25 bp, Homo sapien
taagtacactggttcacgtctttgc

SEQ ID NO: 4719841 - DNA, 25 bp, Homo sapien
gatgtttcctagcatctgtgtagct

SEQ ID NO: 4719842 - DNA, 25 bp, Homo sapien
tcaattttcaacagataggcactca

SEQ ID NO: 4719843 - DNA, 25 bp, Homo sapien
aaaagtgtaggaaggagagctagca

SEQ ID NO: 4719844 - DNA, 25 bp, Homo sapien
aggaaaggccgttgaaaatgcttcg

SEQ ID NO: 4719845 - DNA, 25 bp, Homo sapien
aaatgcttcggtggtgaacttcgga

SEQ ID NO: 4719846 - DNA, 25 bp, Homo sapien
tctaaggtgtcattgaaaagtgtag

SEQ ID NO: 4719847 - DNA, 25 bp, Homo sapien
cataacggtcttgtcactggaaaat

SEQ ID NO: 4719848 - DNA, 25 bp, Homo sapien
actgccataacggtcttgtcactgg

SEQ ID NO: 4719849 - DNA, 25 bp, Homo sapien
gccataacggtcttgtcactggaaa

SEQ ID NO: 4719850 - DNA, 25 bp, Homo sapien
accaactgccataacggtcttgtca

SEQ ID NO: 4719851 - DNA, 25 bp, Homo sapien
caaaatgttgatgcatgcactgctc

SEQ ID NO: 4719852 - DNA, 25 bp, Homo sapien
tagtatctccgccagaccttgaggt

SEQ ID NO: 4719853 - DNA, 25 bp, Homo sapien
tcttgagagaacatggtgccacagg

SEQ ID NO: 4719854 - DNA, 25 bp, Homo sapien
gctccaagggtaggtttctgttata

SEQ ID NO: 4719855 - DNA, 25 bp, Homo sapien
atttgcttcacttcagtgtacacca

SEQ ID NO: 4719856 - DNA, 25 bp, Homo sapien
tcattgccattgggtggtggcagtt

SEQ ID NO: 4719857 - DNA, 25 bp, Homo sapien
gctgtttcagtggaccttgaaatta

SEQ ID NO: 4719858 - DNA, 25 bp, Homo sapien
agtgtacaccatcccgctccatttg

SEQ ID NO: 4719859 - DNA, 25 bp, Homo sapien
gattcaccgattctgtgcttgaatc

SEQ ID NO: 4719860 - DNA, 25 bp, Homo sapien
ggattcaccgattctgtgcttgaat

SEQ ID NO: 4719861 - DNA, 25 bp, Homo sapien
ttcaccgattctgtgcttgaatcca

SEQ ID NO: 4719862 - DNA, 25 bp, Homo sapien
tggattcaccgattctgtgcttgaa

SEQ ID NO: 4719863 - DNA, 25 bp, Homo sapien
aaaggaagttgcagaaaccttgcca

SEQ ID NO: 4719864 - DNA, 25 bp, Homo sapien
ccttgccaagaaaatagacagcaaa

SEQ ID NO: 4719865 - DNA, 25 bp, Homo sapien
ccatctgtctattttcctaaaagga

SEQ ID NO: 4719866 - DNA, 25 bp, Homo sapien
ttcagcagtaccaataacttgggtt

SEQ ID NO: 4719867 - DNA, 25 bp, Homo sapien
tatccttgtgcaaggagcatgttaa

SEQ ID NO: 4719868 - DNA, 25 bp, Homo sapien
ccttgtgcaaggagcatgttaatct

SEQ ID NO: 4719869 - DNA, 25 bp, Homo sapien
gttatccttgtgcaaggagcatgtt

SEQ ID NO: 4719870 - DNA, 25 bp, Homo sapien
ttgtgcaaggagcatgttaatcttc

SEQ ID NO: 4719871 - DNA, 25 bp, Homo sapien
ctggatatcgcacagtgcatagagc

SEQ ID NO: 4719872 - DNA, 25 bp, Homo sapien
atttccaaaggttcttggatcttga

SEQ ID NO: 4719873 - DNA, 25 bp, Homo sapien
attttgcctggatatcgcacagtgc

SEQ ID NO: 4719874 - DNA, 25 bp, Homo sapien
tgaaatatggtcctgtagagtctgc

SEQ ID NO: 4719875 - DNA, 25 bp, Homo sapien
ttcttaggcctccagtaggcagcct

SEQ ID NO: 4719876 - DNA, 25 bp, Homo sapien
tgccttcttaggcctccagtaggca

SEQ ID NO: 4719877 - DNA, 25 bp, Homo sapien
taggcctccagtaggcagcctgaga

SEQ ID NO: 4719878 - DNA, 25 bp, Homo sapien
gcctccagtaggcagcctgagatac

SEQ ID NO: 4719879 - DNA, 25 bp, Homo sapien
tccgatgctctagctgaagaagaag

SEQ ID NO: 4719880 - DNA, 25 bp, Homo sapien
gtggtgtctgctacccaaatccagc

SEQ ID NO: 4719881 - DNA, 25 bp, Homo sapien
agctccgatgctctagctgaagaag

SEQ ID NO: 4719882 - DNA, 25 bp, Homo sapien
agaagaagaatctcctgcaactcct

SEQ ID NO: 4719883 - DNA, 25 bp, Homo sapien
ctggttccaactgaaagatgctgtc

SEQ ID NO: 4719884 - DNA, 25 bp, Homo sapien
tgctgtcaagcaaaagacattggct

SEQ ID NO: 4719885 - DNA, 25 bp, Homo sapien
aggactctctcgtcccacaggacag

SEQ ID NO: 4719886 - DNA, 25 bp, Homo sapien
gcaagcctggttccaactgaaagat

SEQ ID NO: 4719887 - DNA, 25 bp, Homo sapien
aaagtccatgtatgtgagatgataa

SEQ ID NO: 4719888 - DNA, 25 bp, Homo sapien
aagaaaaagtccatgtatgtgagat

SEQ ID NO: 4719889 - DNA, 25 bp, Homo sapien
gatctctaaagaaaaagtccatgta

SEQ ID NO: 4719890 - DNA, 25 bp, Homo sapien
agacagtgctaagatctctaaagaa

SEQ ID NO: 4719891 - DNA, 25 bp, Homo sapien
catttaagacacaaggcaaagaccc

SEQ ID NO: 4719892 - DNA, 25 bp, Homo sapien
cagcccagggaaggtctcttgcaga

SEQ ID NO: 4719893 - DNA, 25 bp, Homo sapien
tatttgcactgagacctagaggaag

SEQ ID NO: 4719894 - DNA, 25 bp, Homo sapien
gtcattgttgccttgctatgccctg

SEQ ID NO: 4719895 - DNA, 25 bp, Homo sapien
aagaagtgatcatgtttaattgatc

SEQ ID NO: 4719896 - DNA, 25 bp, Homo sapien
aggaagaagtgatcatgtttaattg

SEQ ID NO: 4719897 - DNA, 25 bp, Homo sapien
gaagaagtgatcatgtttaattgat

SEQ ID NO: 4719898 - DNA, 25 bp, Homo sapien
ggaagaagtgatcatgtttaattga

SEQ ID NO: 4719899 - DNA, 25 bp, Homo sapien
gaagaaatagcttatcctgaatctg

SEQ ID NO: 4719900 - DNA, 25 bp, Homo sapien
ctggctgctgacatgacttcgcagg

SEQ ID NO: 4719901 - DNA, 25 bp, Homo sapien
catcccatcattagaagtctggctt

SEQ ID NO: 4719902 - DNA, 25 bp, Homo sapien
taactttgccgattatcatgaagaa

SEQ ID NO: 4719903 - DNA, 25 bp, Homo sapien
tcgcaggtctggtaatctgataact

SEQ ID NO: 4719904 - DNA, 25 bp, Homo sapien
gaacacatatgaagagccaaagccc

SEQ ID NO: 4719905 - DNA, 25 bp, Homo sapien
tgaacacatatgaagagccaaagcc

SEQ ID NO: 4719906 - DNA, 25 bp, Homo sapien
cttcatggaggacaacttccccaag

SEQ ID NO: 4719907 - DNA, 25 bp, Homo sapien
ctgaaagagatgctgaaattttttc

SEQ ID NO: 4719908 - DNA, 25 bp, Homo sapien
gcttcatggaggacaacttccccaa

SEQ ID NO: 4719909 - DNA, 25 bp, Homo sapien
catggaggacaacttccccaaggac

SEQ ID NO: 4719910 - DNA, 25 bp, Homo sapien
taggaacgctgataagaagaccgct

SEQ ID NO: 4719911 - DNA, 25 bp, Homo sapien
tacaatagcaaaaagggttccaggc

SEQ ID NO: 4719912 - DNA, 25 bp, Homo sapien
cgggtccggttctcagttctaatca

SEQ ID NO: 4719913 - DNA, 25 bp, Homo sapien
gaagaccgcttacagctgcggaggt

SEQ ID NO: 4719914 - DNA, 25 bp, Homo sapien
cgactcgaagaggagaataatccct

SEQ ID NO: 4719915 - DNA, 25 bp, Homo sapien
gacttgaaagggcacccgttctgca

SEQ ID NO: 4719916 - DNA, 25 bp, Homo sapien
gaagcttcaggctttcgcggctgct

SEQ ID NO: 4719917 - DNA, 25 bp, Homo sapien
gaggctccgcgtgaaagtttccaaa

SEQ ID NO: 4719918 - DNA, 25 bp, Homo sapien
cagcgcacaatagcggcgacagcca

SEQ ID NO: 4719919 - DNA, 25 bp, Homo sapien
agcagtccccgggtcgcccagccca

SEQ ID NO: 4719920 - DNA, 25 bp, Homo sapien
ggccgagcccagcgcacaatagcgg

SEQ ID NO: 4719921 - DNA, 25 bp, Homo sapien
gcccagcgcacaatagcggcgacag

SEQ ID NO: 4719922 - DNA, 25 bp, Homo sapien
aaaaccttgagtggcctgatgctgc

SEQ ID NO: 4719923 - DNA, 25 bp, Homo sapien
cacatgtcacatggatcttggagga

SEQ ID NO: 4719924 - DNA, 25 bp, Homo sapien
tcagttggtgcatacatgtccagca

SEQ ID NO: 4719925 - DNA, 25 bp, Homo sapien
aagataacattcacacggccagcca

SEQ ID NO: 4719926 - DNA, 25 bp, Homo sapien
ctcctggcagattgcactccagtgt

SEQ ID NO: 4719927 - DNA, 25 bp, Homo sapien
cagaacgggcctgaacatttgaaca

SEQ ID NO: 4719928 - DNA, 25 bp, Homo sapien
tgtggtgagtttaatttgagcaagc

SEQ ID NO: 4719929 - DNA, 25 bp, Homo sapien
actgaacacaatacaccccagctgg

SEQ ID NO: 4719930 - DNA, 25 bp, Homo sapien
cttgtacagtttttgtgtaaggaca

SEQ ID NO: 4719931 - DNA, 25 bp, Homo sapien
tattccattggatagagatacaata

SEQ ID NO: 4719932 - DNA, 25 bp, Homo sapien
atccataccacagcatgcagcagtg

SEQ ID NO: 4719933 - DNA, 25 bp, Homo sapien
tccaataataaattgggcacttaga

SEQ ID NO: 4719934 - DNA, 25 bp, Homo sapien
cacatctggtatagtagaaagtgcc

SEQ ID NO: 4719935 - DNA, 25 bp, Homo sapien
tgttgaggccctgcattaatcccct

SEQ ID NO: 4719936 - DNA, 25 bp, Homo sapien
tccaggaagaatatttgcagcacat

SEQ ID NO: 4719937 - DNA, 25 bp, Homo sapien
gctttataatggctggctagtgtca

SEQ ID NO: 4719938 - DNA, 25 bp, Homo sapien
ttaaataactcaaagttctgcgtgg

SEQ ID NO: 4719939 - DNA, 25 bp, Homo sapien
taatgtccgtgtgagtcagtcttcc

SEQ ID NO: 4719940 - DNA, 25 bp, Homo sapien
tttcacctggtgtactcttgatacc

SEQ ID NO: 4719941 - DNA, 25 bp, Homo sapien
cacatctcacatggttattcagcct

SEQ ID NO: 4719942 - DNA, 25 bp, Homo sapien
ttcactcttacgttacctgcctggc

SEQ ID NO: 4719943 - DNA, 25 bp, Homo sapien
gccgccgtaaggatggcagttataa

SEQ ID NO: 4719944 - DNA, 25 bp, Homo sapien
tatcaacggtggtctgaaaccaaga

SEQ ID NO: 4719945 - DNA, 25 bp, Homo sapien
tcccgattgcccagtactttgtcca

SEQ ID NO: 4719946 - DNA, 25 bp, Homo sapien
agaactagaggcagcgagcaaaacc

SEQ ID NO: 4719947 - DNA, 25 bp, Homo sapien
tcaagggatatgaacaaagcagggt

SEQ ID NO: 4719948 - DNA, 25 bp, Homo sapien
tatagcatggatcaagtagtttctc

SEQ ID NO: 4719949 - DNA, 25 bp, Homo sapien
gaaacagatacttcctctagtgaga

SEQ ID NO: 4719950 - DNA, 25 bp, Homo sapien
tggtcgcttctctgcctcatctctg

SEQ ID NO: 4719951 - DNA, 25 bp, Homo sapien
cagtgccacctttacctggtacaca

SEQ ID NO: 4719952 - DNA, 25 bp, Homo sapien
gcctgagatcctccaattttgcctc

SEQ ID NO: 4719953 - DNA, 25 bp, Homo sapien
tccttcctccagaccctgaagtagt

SEQ ID NO: 4719954 - DNA, 25 bp, Homo sapien
gaaaaattccgctatcacacaggcc

SEQ ID NO: 4719955 - DNA, 25 bp, Homo sapien
gaaggaaaaattccgctatcacaca

SEQ ID NO: 4719956 - DNA, 25 bp, Homo sapien
accccagatcccagaacctgacacc

SEQ ID NO: 4719957 - DNA, 25 bp, Homo sapien
cctgacaccaagttctaagaaggaa

SEQ ID NO: 4719958 - DNA, 25 bp, Homo sapien
aaccaccctgcttgtagaacctggg

SEQ ID NO: 4719959 - DNA, 25 bp, Homo sapien
gactccataccatagtacctgctgg

SEQ ID NO: 4719960 - DNA, 25 bp, Homo sapien
tacctgctgggttattgcaaccacc

SEQ ID NO: 4719961 - DNA, 25 bp, Homo sapien
tgggccaagtccatgccagttcctg

SEQ ID NO: 4719962 - DNA, 25 bp, Homo sapien
gcagagatttccctatgccctggat

SEQ ID NO: 4719963 - DNA, 25 bp, Homo sapien
ggagagcccactgcttcttgatgca

SEQ ID NO: 4719964 - DNA, 25 bp, Homo sapien
catccagggagtactaatcaaggct

SEQ ID NO: 4719965 - DNA, 25 bp, Homo sapien
tcacacagatcataagggcagcagc

SEQ ID NO: 4719966 - DNA, 25 bp, Homo sapien
taagttgggcctgatcttcgacgtc

SEQ ID NO: 4719967 - DNA, 25 bp, Homo sapien
cttcgacgtcaacgccagttaagag

SEQ ID NO: 4719968 - DNA, 25 bp, Homo sapien
cagccaccaaagatggcctgagagc

SEQ ID NO: 4719969 - DNA, 25 bp, Homo sapien
aactcccaggagaaacgagttctga

SEQ ID NO: 4719970 - DNA, 25 bp, Homo sapien
ttagtgcatttcacgtagtaacaag

SEQ ID NO: 4719971 - DNA, 25 bp, Homo sapien
ggtctataatagtggagttgagtat

SEQ ID NO: 4719972 - DNA, 25 bp, Homo sapien
aaagtggatgattggtctataatag

SEQ ID NO: 4719973 - DNA, 25 bp, Homo sapien
gagctaacagctaatagatccttgt

SEQ ID NO: 4719974 - DNA, 25 bp, Homo sapien
tttgaagaatgcttggtctttgtaa

SEQ ID NO: 4719975 - DNA, 25 bp, Homo sapien
ttgaagaatgcttggtctttgtaac

SEQ ID NO: 4719976 - DNA, 25 bp, Homo sapien
tgaagaatgcttggtctttgtaacc

SEQ ID NO: 4719977 - DNA, 25 bp, Homo sapien
gaagaatgcttggtctttgtaaccc

SEQ ID NO: 4719978 - DNA, 25 bp, Homo sapien
caagggacccaggagggcttgaact

SEQ ID NO: 4719979 - DNA, 25 bp, Homo sapien
gccctgcttcaatgagctgataaga

SEQ ID NO: 4719980 - DNA, 25 bp, Homo sapien
gagcatatactcagatgtggcagca

SEQ ID NO: 4719981 - DNA, 25 bp, Homo sapien
gctttagtggtattaggccaaggga

SEQ ID NO: 4719982 - DNA, 25 bp, Homo sapien
gatacttgaagacctacggtatgga

SEQ ID NO: 4719983 - DNA, 25 bp, Homo sapien
ttggatactcaagtgacaggaaccc

SEQ ID NO: 4719984 - DNA, 25 bp, Homo sapien
tatgatcctcaggagaataaccagc

SEQ ID NO: 4719985 - DNA, 25 bp, Homo sapien
cctaggctggtctcataagttcaag

SEQ ID NO: 4719986 - DNA, 25 bp, Homo sapien
cctaatgctctgtggacgctgttct

SEQ ID NO: 4719987 - DNA, 25 bp, Homo sapien
gtgaaattgcgaggacaggcagcac

SEQ ID NO: 4719988 - DNA, 25 bp, Homo sapien
tgagcatcaagcctggtgtcaccca

SEQ ID NO: 4719989 - DNA, 25 bp, Homo sapien
ccctgaagtcagtacggtggatgcc

SEQ ID NO: 4719990 - DNA, 25 bp, Homo sapien
taattaagtcacagttcctcacggc

SEQ ID NO: 4719991 - DNA, 25 bp, Homo sapien
tttcaccaaggagcgtaagcatgtc

SEQ ID NO: 4719992 - DNA, 25 bp, Homo sapien
caaggaagtattacgcaaagcaggg

SEQ ID NO: 4719993 - DNA, 25 bp, Homo sapien
tctatacttgggtgaagctcagcag

SEQ ID NO: 4719994 - DNA, 25 bp, Homo sapien
atatgttccctgagaatcttgtcca

SEQ ID NO: 4719995 - DNA, 25 bp, Homo sapien
aatatgttccctgagaatcttgtcc

SEQ ID NO: 4719996 - DNA, 25 bp, Homo sapien
tatgttccctgagaatcttgtccag

SEQ ID NO: 4719997 - DNA, 25 bp, Homo sapien
tacaaaactaagcgtgaagaagtga

SEQ ID NO: 4719998 - DNA, 25 bp, Homo sapien
aaactaagcgtgaagaagtgaagcc

SEQ ID NO: 4719999 - DNA, 25 bp, Homo sapien
ctcccagcgatccagagatgaacat

SEQ ID NO: 4720000 - DNA, 25 bp, Homo sapien
cctcccagcgatccagagatgaaca

SEQ ID NO: 4720001 - DNA, 25 bp, Homo sapien
caaatatggacttgttgaaagaaga

SEQ ID NO: 4720002 - DNA, 25 bp, Homo sapien
gacttgttgaaagaagagaaagcat

SEQ ID NO: 4720003 - DNA, 25 bp, Homo sapien
aaatattcaaatatggacttgttga

SEQ ID NO: 4720004 - DNA, 25 bp, Homo sapien
agcattttaacttcggggagcaagg

SEQ ID NO: 4720005 - DNA, 25 bp, Homo sapien
gatgcaaccatgaaaatcgttcaga

SEQ ID NO: 4720006 - DNA, 25 bp, Homo sapien
cgtcctgggcttgattgtcttttgc

SEQ ID NO: 4720007 - DNA, 25 bp, Homo sapien
catcatgtggtgagcagacactgtt

SEQ ID NO: 4720008 - DNA, 25 bp, Homo sapien
tattcagatggcataaacgtcctgg

SEQ ID NO: 4720009 - DNA, 25 bp, Homo sapien
aagttgaagactgggaaatattccg

SEQ ID NO: 4720010 - DNA, 25 bp, Homo sapien
gaagatcatagaagttgaagactgg

SEQ ID NO: 4720011 - DNA, 25 bp, Homo sapien
tgggcctttacatggccacagtcct

SEQ ID NO: 4720012 - DNA, 25 bp, Homo sapien
ggaaatattccgcaagctgggcctt

SEQ ID NO: 4720013 - DNA, 25 bp, Homo sapien
gaaccctttccgatttgccatggga

SEQ ID NO: 4720014 - DNA, 25 bp, Homo sapien
tatttcatagtcgtacgaaagaacc

SEQ ID NO: 4720015 - DNA, 25 bp, Homo sapien
gcttgcaatccactccattgtaatt

SEQ ID NO: 4720016 - DNA, 25 bp, Homo sapien
ccattgtaattctcccgctgatata

SEQ ID NO: 4720017 - DNA, 25 bp, Homo sapien
tattgcacagttgaatgacctggac

SEQ ID NO: 4720018 - DNA, 25 bp, Homo sapien
cgattcgtgttacccgttggtgcaa

SEQ ID NO: 4720019 - DNA, 25 bp, Homo sapien
aacaatcaacatggatgggactgcg

SEQ ID NO: 4720020 - DNA, 25 bp, Homo sapien
cctggacttgggcattgggcagatc

SEQ ID NO: 4720021 - DNA, 25 bp, Homo sapien
tgcccgccgaggatgtcaccctgat

SEQ ID NO: 4720022 - DNA, 25 bp, Homo sapien
acatctgccagcatcggagctgctg

SEQ ID NO: 4720023 - DNA, 25 bp, Homo sapien
ccgaggatgtcaccctgatcattgc

SEQ ID NO: 4720024 - DNA, 25 bp, Homo sapien
tgggcctgcccgccgaggatgtcac

SEQ ID NO: 4720025 - DNA, 25 bp, Homo sapien
caagaagtcttatgtcaatggaggc

SEQ ID NO: 4720026 - DNA, 25 bp, Homo sapien
gaccatggtcaacgtccttggtgat

SEQ ID NO: 4720027 - DNA, 25 bp, Homo sapien
caatggaggctttgcagtagacaag

SEQ ID NO: 4720028 - DNA, 25 bp, Homo sapien
gacaacgaagactcagacaccaaga

SEQ ID NO: 4720029 - DNA, 25 bp, Homo sapien
tattaaagcataccctgattcttag

SEQ ID NO: 4720030 - DNA, 25 bp, Homo sapien
cttagaagagccatgggaagtgtgc

SEQ ID NO: 4720031 - DNA, 25 bp, Homo sapien
ggcttatactcaggcagtaggccag

SEQ ID NO: 4720032 - DNA, 25 bp, Homo sapien
taggccagctgcagtgtttgctttg

SEQ ID NO: 4720033 - DNA, 25 bp, Homo sapien
caggccttgttaaattagctttggg

SEQ ID NO: 4720034 - DNA, 25 bp, Homo sapien
gaagtgtacctctctgcaatcctag

SEQ ID NO: 4720035 - DNA, 25 bp, Homo sapien
aatgatcgggacatttctcaatggc

SEQ ID NO: 4720036 - DNA, 25 bp, Homo sapien
tgcacagtgccacaaaactcctaag

SEQ ID NO: 4720037 - DNA, 25 bp, Homo sapien
tcgcatcatcttctttcgcttcggg

SEQ ID NO: 4720038 - DNA, 25 bp, Homo sapien
cagagttgcatcatctgagcatttc

SEQ ID NO: 4720039 - DNA, 25 bp, Homo sapien
ttaccaagtgttagcacaatgtcgc

SEQ ID NO: 4720040 - DNA, 25 bp, Homo sapien
cacttgagggaatgcgatgcagagt

SEQ ID NO: 4720041 - DNA, 25 bp, Homo sapien
tatggaaacttcaagagggcacggg

SEQ ID NO: 4720042 - DNA, 25 bp, Homo sapien
caattttgttaactgcagggctggg

SEQ ID NO: 4720043 - DNA, 25 bp, Homo sapien
cagggtcctgcgcaatactgagcac

SEQ ID NO: 4720044 - DNA, 25 bp, Homo sapien
aatacaagttgagtgggtccatgcg

SEQ ID NO: 4720045 - DNA, 25 bp, Homo sapien
ttccaatttcagtgagtgtccgttc

SEQ ID NO: 4720046 - DNA, 25 bp, Homo sapien
gtcatcccaataaaacaagtatgat

SEQ ID NO: 4720047 - DNA, 25 bp, Homo sapien
tgccactgcctacggtctgttcctg

SEQ ID NO: 4720048 - DNA, 25 bp, Homo sapien
tgtttatctcagttcaaaattccaa

SEQ ID NO: 4720049 - DNA, 25 bp, Homo sapien
cctctcctgagacttatagcgtaac

SEQ ID NO: 4720050 - DNA, 25 bp, Homo sapien
gcttacgtaagcagccctctcctga

SEQ ID NO: 4720051 - DNA, 25 bp, Homo sapien
tgggataccaattcattagtgctgc

SEQ ID NO: 4720052 - DNA, 25 bp, Homo sapien
cttacttttgatgactacttagagg

SEQ ID NO: 4720053 - DNA, 25 bp, Homo sapien
acttatggtgttatattggtgctca

SEQ ID NO: 4720054 - DNA, 25 bp, Homo sapien
tatatacactttatacaggtagcct

SEQ ID NO: 4720055 - DNA, 25 bp, Homo sapien
gaaccaatccctatgattacagtga

SEQ ID NO: 4720056 - DNA, 25 bp, Homo sapien
ttgggaggttcaacttggatatacc

SEQ ID NO: 4720057 - DNA, 25 bp, Homo sapien
cagtttaaactacgctccagaggag

SEQ ID NO: 4720058 - DNA, 25 bp, Homo sapien
cattggcagtcctatctgtagaacc

SEQ ID NO: 4720059 - DNA, 25 bp, Homo sapien
tagtggacttcacgtaaatcaagcc

SEQ ID NO: 4720060 - DNA, 25 bp, Homo sapien
caaagaattgctggaacgaaggagt

SEQ ID NO: 4720061 - DNA, 25 bp, Homo sapien
tctttcatgttcaaaacaaacatgc

SEQ ID NO: 4720062 - DNA, 25 bp, Homo sapien
ctttcatgttcaaaacaaacatgca

SEQ ID NO: 4720063 - DNA, 25 bp, Homo sapien
attagacatcagtgactcaacacag

SEQ ID NO: 4720064 - DNA, 25 bp, Homo sapien
tcttcatgattctccttaagctttc

SEQ ID NO: 4720065 - DNA, 25 bp, Homo sapien
tggtttaaaggggattagacatcag

SEQ ID NO: 4720066 - DNA, 25 bp, Homo sapien
taaaggggattagacatcagtgact

SEQ ID NO: 4720067 - DNA, 25 bp, Homo sapien
agtatttcttcagagggtagcttgg

SEQ ID NO: 4720068 - DNA, 25 bp, Homo sapien
gggtagcttggtctttcaatgatat

SEQ ID NO: 4720069 - DNA, 25 bp, Homo sapien
agagggtagcttggtctttcaatga

SEQ ID NO: 4720070 - DNA, 25 bp, Homo sapien
gagggtagcttggtctttcaatgat

SEQ ID NO: 4720071 - DNA, 25 bp, Homo sapien
ctcatggatattcttccatgtggac

SEQ ID NO: 4720072 - DNA, 25 bp, Homo sapien
tgggatgtcagaagactgcataccc

SEQ ID NO: 4720073 - DNA, 25 bp, Homo sapien
gactgcataccctctcatggatatt

SEQ ID NO: 4720074 - DNA, 25 bp, Homo sapien
tcagaagactgcataccctctcatg

SEQ ID NO: 4720075 - DNA, 25 bp, Homo sapien
tttaacaccccactgtcaacattag

SEQ ID NO: 4720076 - DNA, 25 bp, Homo sapien
ctcccacacattaataatgggagac

SEQ ID NO: 4720077 - DNA, 25 bp, Homo sapien
acaccccactgtcaacattagacag

SEQ ID NO: 4720078 - DNA, 25 bp, Homo sapien
ccacacattaataatgggagacttt

SEQ ID NO: 4720079 - DNA, 25 bp, Homo sapien
cagagttcagttcaattgttgagtt

SEQ ID NO: 4720080 - DNA, 25 bp, Homo sapien
agagttcagttcaattgttgagttc

SEQ ID NO: 4720081 - DNA, 25 bp, Homo sapien
gttcagttcaattgttgagttctca

SEQ ID NO: 4720082 - DNA, 25 bp, Homo sapien
agttcagttcaattgttgagttctc

SEQ ID NO: 4720083 - DNA, 25 bp, Homo sapien
gctctaaagccaacgggcaatgtgt

SEQ ID NO: 4720084 - DNA, 25 bp, Homo sapien
cagagaaagagtggtcctgatattg

SEQ ID NO: 4720085 - DNA, 25 bp, Homo sapien
tctgccctagtgatcgctctaaagc

SEQ ID NO: 4720086 - DNA, 25 bp, Homo sapien
ctgatattgctggtatgaaaagaac

SEQ ID NO: 4720087 - DNA, 25 bp, Homo sapien
tctatctcatattcagtgacaaggg

SEQ ID NO: 4720088 - DNA, 25 bp, Homo sapien
tgaggcaattcttccgttggccaga

SEQ ID NO: 4720089 - DNA, 25 bp, Homo sapien
tgctggcctagcagattgagtatca

SEQ ID NO: 4720090 - DNA, 25 bp, Homo sapien
taaccacagatttaacgtgctcccc

SEQ ID NO: 4720091 - DNA, 25 bp, Homo sapien
cctactagagagtgctgtttggcaa

SEQ ID NO: 4720092 - DNA, 25 bp, Homo sapien
ctctggcctgctctccagacatatg

SEQ ID NO: 4720093 - DNA, 25 bp, Homo sapien
gctctccagacatatgcaaatgtat

SEQ ID NO: 4720094 - DNA, 25 bp, Homo sapien
ctagagagtgctgtttggcaaataa

SEQ ID NO: 4720095 - DNA, 25 bp, Homo sapien
tcaggcaaacagatgggtgcttgcc

SEQ ID NO: 4720096 - DNA, 25 bp, Homo sapien
caggcaaacagatgggtgcttgcca

SEQ ID NO: 4720097 - DNA, 25 bp, Homo sapien
taaacatgatgatgagtcactcctt

SEQ ID NO: 4720098 - DNA, 25 bp, Homo sapien
aatgctggtaggtggcaaatgaagc

SEQ ID NO: 4720099 - DNA, 25 bp, Homo sapien
ccccttgtttactggatgaagactt

SEQ ID NO: 4720100 - DNA, 25 bp, Homo sapien
tcccgtggaaatcagcatccccttg

SEQ ID NO: 4720101 - DNA, 25 bp, Homo sapien
ctttacgttagctgcaaggctgtca

SEQ ID NO: 4720102 - DNA, 25 bp, Homo sapien
tacgttagctgcaaggctgtcaaga

SEQ ID NO: 4720103 - DNA, 25 bp, Homo sapien
cgttagctgcaaggctgtcaagaga

SEQ ID NO: 4720104 - DNA, 25 bp, Homo sapien
ttacgttagctgcaaggctgtcaag

SEQ ID NO: 4720105 - DNA, 25 bp, Homo sapien
gcttcagatagagttggcttcccac

SEQ ID NO: 4720106 - DNA, 25 bp, Homo sapien
tttgccatccagaaaaacggaaagc

SEQ ID NO: 4720107 - DNA, 25 bp, Homo sapien
gaacactttgccttcatctaactgc

SEQ ID NO: 4720108 - DNA, 25 bp, Homo sapien
ggcttcccacctcgctgacatgaaa

SEQ ID NO: 4720109 - DNA, 25 bp, Homo sapien
cttctcgttggaaacggaaagtctg

SEQ ID NO: 4720110 - DNA, 25 bp, Homo sapien
tctcgttggaaacggaaagtctgaa

SEQ ID NO: 4720111 - DNA, 25 bp, Homo sapien
ttctcgttggaaacggaaagtctga

SEQ ID NO: 4720112 - DNA, 25 bp, Homo sapien
ccatatcctcactattgcaaaatgc

SEQ ID NO: 4720113 - DNA, 25 bp, Homo sapien
catccatatcctcactattgcaaaa

SEQ ID NO: 4720114 - DNA, 25 bp, Homo sapien
ctcatccatatcctcactattgcaa

SEQ ID NO: 4720115 - DNA, 25 bp, Homo sapien
ttccaccctcatccatatcctcact

SEQ ID NO: 4720116 - DNA, 25 bp, Homo sapien
ctggtagaatattgagagggcgccc

SEQ ID NO: 4720117 - DNA, 25 bp, Homo sapien
gaaatattggttcatgtgatgtaga

SEQ ID NO: 4720118 - DNA, 25 bp, Homo sapien
acaacaaatggaggcttgcttcctc

SEQ ID NO: 4720119 - DNA, 25 bp, Homo sapien
tgatgtagataaaggcctccgtgac

SEQ ID NO: 4720120 - DNA, 25 bp, Homo sapien
tattatgccaggactagccccattg

SEQ ID NO: 4720121 - DNA, 25 bp, Homo sapien
tgagtctagacccacaggaaccttc

SEQ ID NO: 4720122 - DNA, 25 bp, Homo sapien
tgcactcctccagacatatcagcgg

SEQ ID NO: 4720123 - DNA, 25 bp, Homo sapien
tattggtgagtaagcaattgcgctc

SEQ ID NO: 4720124 - DNA, 25 bp, Homo sapien
gtctgggtcccatttctgttcagtt

SEQ ID NO: 4720125 - DNA, 25 bp, Homo sapien
ccaaagtatttggagaagcttcaca

SEQ ID NO: 4720126 - DNA, 25 bp, Homo sapien
tagtacacatggatgccctaagacg

SEQ ID NO: 4720127 - DNA, 25 bp, Homo sapien
tctggcacaagagtacctgaggaca

SEQ ID NO: 4720128 - DNA, 25 bp, Homo sapien
taggaccctacatgagatctgggat

SEQ ID NO: 4720129 - DNA, 25 bp, Homo sapien
agaaaggtggccccatgtttactgc

SEQ ID NO: 4720130 - DNA, 25 bp, Homo sapien
caaagacggaccatgaatacaatcc

SEQ ID NO: 4720131 - DNA, 25 bp, Homo sapien
gaccatgaatacaatccgagcatca

SEQ ID NO: 4720132 - DNA, 25 bp, Homo sapien
acaatccgagcatcagcctcagcaa

SEQ ID NO: 4720133 - DNA, 25 bp, Homo sapien
cacaatagccaagatttggaatcaa

SEQ ID NO: 4720134 - DNA, 25 bp, Homo sapien
acaatagccaagatttggaatcaac

SEQ ID NO: 4720135 - DNA, 25 bp, Homo sapien
tcacaatagccaagatttggaatca

SEQ ID NO: 4720136 - DNA, 25 bp, Homo sapien
tggaaactgttgttcataagatcac

SEQ ID NO: 4720137 - DNA, 25 bp, Homo sapien
aaatccggtcatttctatcactaga

SEQ ID NO: 4720138 - DNA, 25 bp, Homo sapien
tgcttccagctacatcatgctgcca

SEQ ID NO: 4720139 - DNA, 25 bp, Homo sapien
catgctgccaaacgtatgtaccaaa

SEQ ID NO: 4720140 - DNA, 25 bp, Homo sapien
gatggctgtccttgtagaaaactct

SEQ ID NO: 4720141 - DNA, 25 bp, Homo sapien
aaaactctattttgggagcaatgcc

SEQ ID NO: 4720142 - DNA, 25 bp, Homo sapien
ggctgtccttgtagaaaactctatt

SEQ ID NO: 4720143 - DNA, 25 bp, Homo sapien
gaaaactctattttgggagcaatgc

SEQ ID NO: 4720144 - DNA, 25 bp, Homo sapien
tcaggaataaaacgttcaggtccca

SEQ ID NO: 4720145 - DNA, 25 bp, Homo sapien
gcccagatgagcatgaatcacttac

SEQ ID NO: 4720146 - DNA, 25 bp, Homo sapien
accctgtcaggaataaaacgttcag

SEQ ID NO: 4720147 - DNA, 25 bp, Homo sapien
tctcctaatagaagcccagatgagc

SEQ ID NO: 4720148 - DNA, 25 bp, Homo sapien
cagagccgtcttcatgagcacctcc

SEQ ID NO: 4720149 - DNA, 25 bp, Homo sapien
tcctagggtgcgaaggtgtcagctt

SEQ ID NO: 4720150 - DNA, 25 bp, Homo sapien
tccctacacctcctagggtgcgaag

SEQ ID NO: 4720151 - DNA, 25 bp, Homo sapien
tgtgttttcttcgtagtaggccaac

SEQ ID NO: 4720152 - DNA, 25 bp, Homo sapien
cattaccacgattgctccctgacac

SEQ ID NO: 4720153 - DNA, 25 bp, Homo sapien
attaccacgattgctccctgacacc

SEQ ID NO: 4720154 - DNA, 25 bp, Homo sapien
accacgattgctccctgacaccagc

SEQ ID NO: 4720155 - DNA, 25 bp, Homo sapien
ttaccacgattgctccctgacacca

SEQ ID NO: 4720156 - DNA, 25 bp, Homo sapien
caaaatttaatagattggcagaaaa

SEQ ID NO: 4720157 - DNA, 25 bp, Homo sapien
tcatattaagctaatttagaaacgg

SEQ ID NO: 4720158 - DNA, 25 bp, Homo sapien
tagaaacggatttactgccacatta

SEQ ID NO: 4720159 - DNA, 25 bp, Homo sapien
cccattttgacaggccaaatttatt

SEQ ID NO: 4720160 - DNA, 25 bp, Homo sapien
ctggaggaactagctgtattaattc

SEQ ID NO: 4720161 - DNA, 25 bp, Homo sapien
cagccaagcccatctatatatagaa

SEQ ID NO: 4720162 - DNA, 25 bp, Homo sapien
tgattcaaattttacgtaggctgtc

SEQ ID NO: 4720163 - DNA, 25 bp, Homo sapien
aaagagcagagttttgaatctgtga

SEQ ID NO: 4720164 - DNA, 25 bp, Homo sapien
ggtatgtaacagaatcaaaaatgtg

SEQ ID NO: 4720165 - DNA, 25 bp, Homo sapien
acagctccaggatctactgcacttt

SEQ ID NO: 4720166 - DNA, 25 bp, Homo sapien
tttccaaaaggtctactacagctcc

SEQ ID NO: 4720167 - DNA, 25 bp, Homo sapien
agctccaggatctactgcactttca

SEQ ID NO: 4720168 - DNA, 25 bp, Homo sapien
caaaaggtctactacagctccagga

SEQ ID NO: 4720169 - DNA, 25 bp, Homo sapien
gagacctccgctgctgcattatggg

SEQ ID NO: 4720170 - DNA, 25 bp, Homo sapien
gcagcaggcttttacaggttgacat

SEQ ID NO: 4720171 - DNA, 25 bp, Homo sapien
gatcatactgggatagggtaggcct

SEQ ID NO: 4720172 - DNA, 25 bp, Homo sapien
gcaaggagcgattcataaactaggc

SEQ ID NO: 4720173 - DNA, 25 bp, Homo sapien
gttggtctccaggtactgattcatg

SEQ ID NO: 4720174 - DNA, 25 bp, Homo sapien
ttcatgaggtagaccccgaggtaca

SEQ ID NO: 4720175 - DNA, 25 bp, Homo sapien
tcaaatctcatgctctcctgaatca

SEQ ID NO: 4720176 - DNA, 25 bp, Homo sapien
aacgcagagggaaagctgttggtct

SEQ ID NO: 4720177 - DNA, 25 bp, Homo sapien
cgctgggcgtctccgcttcgagcag

SEQ ID NO: 4720178 - DNA, 25 bp, Homo sapien
agcctctgtttggtccggccaggtc

SEQ ID NO: 4720179 - DNA, 25 bp, Homo sapien
accaggtgtcacaatcgcgctctcg

SEQ ID NO: 4720180 - DNA, 25 bp, Homo sapien
gcagcaggtttgagttccagtccct

SEQ ID NO: 4720181 - DNA, 25 bp, Homo sapien
catctcattgattatggcaccagga

SEQ ID NO: 4720182 - DNA, 25 bp, Homo sapien
ggagcacacactggccattactgaa

SEQ ID NO: 4720183 - DNA, 25 bp, Homo sapien
tactgtggagtcaacgatgacacca

SEQ ID NO: 4720184 - DNA, 25 bp, Homo sapien
tgatgtcaacctaaaccagcagcca

SEQ ID NO: 4720185 - DNA, 25 bp, Homo sapien
gcccggatctgcagctccaccacca

SEQ ID NO: 4720186 - DNA, 25 bp, Homo sapien
cccggatctgcagctccaccaccac

SEQ ID NO: 4720187 - DNA, 25 bp, Homo sapien
cgcccggatctgcagctccaccacc

SEQ ID NO: 4720188 - DNA, 25 bp, Homo sapien
tgccgagccttggaccaatttttct

SEQ ID NO: 4720189 - DNA, 25 bp, Homo sapien
ttgtgccgagccttggaccaatttt

SEQ ID NO: 4720190 - DNA, 25 bp, Homo sapien
ggcgaaaggactggaatgagaagat

SEQ ID NO: 4720191 - DNA, 25 bp, Homo sapien
cgagccttggaccaatttttcttag

SEQ ID NO: 4720192 - DNA, 25 bp, Homo sapien
agcaaatgttcccagaagcttcccc

SEQ ID NO: 4720193 - DNA, 25 bp, Homo sapien
agcttccccagtcccacgcccttgt

SEQ ID NO: 4720194 - DNA, 25 bp, Homo sapien
ctagagcaaatgttcccagaagctt

SEQ ID NO: 4720195 - DNA, 25 bp, Homo sapien
agaagcttccccagtcccacgccct

SEQ ID NO: 4720196 - DNA, 25 bp, Homo sapien
gaagcgtggcgttgccagggacact

SEQ ID NO: 4720197 - DNA, 25 bp, Homo sapien
ttccagaaggcggaagcgtggcgtt

SEQ ID NO: 4720198 - DNA, 25 bp, Homo sapien
ctggagtgcaggcttccagaaggcg

SEQ ID NO: 4720199 - DNA, 25 bp, Homo sapien
aaggcggaagcgtggcgttgccagg

SEQ ID NO: 4720200 - DNA, 25 bp, Homo sapien
tagcagccatcctgcaaccatgatg

SEQ ID NO: 4720201 - DNA, 25 bp, Homo sapien
atcctgcaaccatgatgtaagaagc

SEQ ID NO: 4720202 - DNA, 25 bp, Homo sapien
catattttgatgtgatgtccagagc

SEQ ID NO: 4720203 - DNA, 25 bp, Homo sapien
tcttcatatgagagccacaagtgaa

SEQ ID NO: 4720204 - DNA, 25 bp, Homo sapien
tgagatgacaaatcagcgggtagac

SEQ ID NO: 4720205 - DNA, 25 bp, Homo sapien
cacagatgttatttaaagccacagg

SEQ ID NO: 4720206 - DNA, 25 bp, Homo sapien
cgggtagacatgagtctggagcaca

SEQ ID NO: 4720207 - DNA, 25 bp, Homo sapien
tgattgacacggagaagacccaaag

SEQ ID NO: 4720208 - DNA, 25 bp, Homo sapien
caggaagcccttcttatgcgttcgc

SEQ ID NO: 4720209 - DNA, 25 bp, Homo sapien
tcgctactagcggtactgatcctaa

SEQ ID NO: 4720210 - DNA, 25 bp, Homo sapien
ttaggcttaaacaagatacgcaggc

SEQ ID NO: 4720211 - DNA, 25 bp, Homo sapien
tgatctcgggcatgctgggtctact

SEQ ID NO: 4720212 - DNA, 25 bp, Homo sapien
tttcggtatagggaacaccagataa

SEQ ID NO: 4720213 - DNA, 25 bp, Homo sapien
tagggaacaccagataacaatatat

SEQ ID NO: 4720214 - DNA, 25 bp, Homo sapien
cggtatagggaacaccagataacaa

SEQ ID NO: 4720215 - DNA, 25 bp, Homo sapien
caccagataacaatatataacgcta

SEQ ID NO: 4720216 - DNA, 25 bp, Homo sapien
ctaacaaacgtttctccacccacag

SEQ ID NO: 4720217 - DNA, 25 bp, Homo sapien
gcgccattagcggttaggtttgcag

SEQ ID NO: 4720218 - DNA, 25 bp, Homo sapien
acagcgccattagcggttaggtttg

SEQ ID NO: 4720219 - DNA, 25 bp, Homo sapien
cacccacagcgccattagcggttag

SEQ ID NO: 4720220 - DNA, 25 bp, Homo sapien
gccaagtctgttggcagtggcagtt

SEQ ID NO: 4720221 - DNA, 25 bp, Homo sapien
gcgtcgcggccagtagagggattct

SEQ ID NO: 4720222 - DNA, 25 bp, Homo sapien
gcaggttccattcacgccaagtctg

SEQ ID NO: 4720223 - DNA, 25 bp, Homo sapien
ttgtaggacccggagcagccggaca

SEQ ID NO: 4720224 - DNA, 25 bp, Homo sapien
gatgctttataattcaggcagatcc

SEQ ID NO: 4720225 - DNA, 25 bp, Homo sapien
tatagtgtactacctttaagacaac

SEQ ID NO: 4720226 - DNA, 25 bp, Homo sapien
gcttgatttcaaggaacagatagga

SEQ ID NO: 4720227 - DNA, 25 bp, Homo sapien
ggcagatccttgaactgttactcag

SEQ ID NO: 4720228 - DNA, 25 bp, Homo sapien
taatcattatgtccaaagcgttggg

SEQ ID NO: 4720229 - DNA, 25 bp, Homo sapien
tacaccacgcctagcaatattctta

SEQ ID NO: 4720230 - DNA, 25 bp, Homo sapien
tctcagaacttcaaatgacctaatc

SEQ ID NO: 4720231 - DNA, 25 bp, Homo sapien
gaaaatgctacagtctttatccttt

SEQ ID NO: 4720232 - DNA, 25 bp, Homo sapien
gaaatgcttacgctatgaattcaca

SEQ ID NO: 4720233 - DNA, 25 bp, Homo sapien
taagaatttgcgttcactgctagtg

SEQ ID NO: 4720234 - DNA, 25 bp, Homo sapien
tggtacatagaatatcatgcaccct

SEQ ID NO: 4720235 - DNA, 25 bp, Homo sapien
attcacaggaagcagtacatactag

SEQ ID NO: 4720236 - DNA, 25 bp, Homo sapien
ctgcagcttaaactcggtggtacat

SEQ ID NO: 4720237 - DNA, 25 bp, Homo sapien
tccccagaatccagattatcttcag

SEQ ID NO: 4720238 - DNA, 25 bp, Homo sapien
tattctatcagtacagctctctgca

SEQ ID NO: 4720239 - DNA, 25 bp, Homo sapien
tggttataatgcgttctttttctcc

SEQ ID NO: 4720240 - DNA, 25 bp, Homo sapien
ttttaatgtgctgctaggttttttg

SEQ ID NO: 4720241 - DNA, 25 bp, Homo sapien
tcttgacacttttatgggtgctgca

SEQ ID NO: 4720242 - DNA, 25 bp, Homo sapien
tttcttgacacttttatgggtgctg

SEQ ID NO: 4720243 - DNA, 25 bp, Homo sapien
tgacacttttatgggtgctgcactt

SEQ ID NO: 4720244 - DNA, 25 bp, Homo sapien
catgtcctattctacaaaaatgatt

SEQ ID NO: 4720245 - DNA, 25 bp, Homo sapien
aacatacttgtatcccactgctact

SEQ ID NO: 4720246 - DNA, 25 bp, Homo sapien
tgtttcatcacattaaaagcaataa

SEQ ID NO: 4720247 - DNA, 25 bp, Homo sapien
ttatatggatatgtacatgtcctat

SEQ ID NO: 4720248 - DNA, 25 bp, Homo sapien
gatgccataatttgcacttaaaggc

SEQ ID NO: 4720249 - DNA, 25 bp, Homo sapien
gattgggtctgttgtgggaaccact

SEQ ID NO: 4720250 - DNA, 25 bp, Homo sapien
aattacatagttagccgtactttag

SEQ ID NO: 4720251 - DNA, 25 bp, Homo sapien
cccaggatttgcctgtaagcattca

SEQ ID NO: 4720252 - DNA, 25 bp, Homo sapien
cagtacacgctgcttacaaaaggta

SEQ ID NO: 4720253 - DNA, 25 bp, Homo sapien
ttctggatggtgctaacaactgcta

SEQ ID NO: 4720254 - DNA, 25 bp, Homo sapien
taagggctctacaaagcatactggc

SEQ ID NO: 4720255 - DNA, 25 bp, Homo sapien
ttctacagtttatcagggcctgagg

SEQ ID NO: 4720256 - DNA, 25 bp, Homo sapien
gttacagtgacccaattatgccact

SEQ ID NO: 4720257 - DNA, 25 bp, Homo sapien
caggagttcaacgttacagtgaccc

SEQ ID NO: 4720258 - DNA, 25 bp, Homo sapien
caacgttacagtgacccaattatgc

SEQ ID NO: 4720259 - DNA, 25 bp, Homo sapien
gttcaacgttacagtgacccaatta

SEQ ID NO: 4720260 - DNA, 25 bp, Homo sapien
agtattgcataaactgaaaccagcc

SEQ ID NO: 4720261 - DNA, 25 bp, Homo sapien
tatgtgcaaaactttgggctaagtg

SEQ ID NO: 4720262 - DNA, 25 bp, Homo sapien
gaaggccggtatggctaccatagca

SEQ ID NO: 4720263 - DNA, 25 bp, Homo sapien
cctaaagtaatgaatgtatgtgcaa

SEQ ID NO: 4720264 - DNA, 25 bp, Homo sapien
catttattagaacagtcattcagaa

SEQ ID NO: 4720265 - DNA, 25 bp, Homo sapien
ttaagatcatttattagaacagtca

SEQ ID NO: 4720266 - DNA, 25 bp, Homo sapien
gttttaagatcatttattagaacag

SEQ ID NO: 4720267 - DNA, 25 bp, Homo sapien
atttattagaacagtcattcagaag

SEQ ID NO: 4720268 - DNA, 25 bp, Homo sapien
atggagcaggccctgtgaaggacca

SEQ ID NO: 4720269 - DNA, 25 bp, Homo sapien
gaaggaccaagaacaaagtaatagc

SEQ ID NO: 4720270 - DNA, 25 bp, Homo sapien
gcagaaaggaaggtgggatggagca

SEQ ID NO: 4720271 - DNA, 25 bp, Homo sapien
caggccctgtgaaggaccaagaaca

SEQ ID NO: 4720272 - DNA, 25 bp, Homo sapien
tgttttaaaggttcagacatcgctg

SEQ ID NO: 4720273 - DNA, 25 bp, Homo sapien
gcttctaaatgcaaggactaggagg

SEQ ID NO: 4720274 - DNA, 25 bp, Homo sapien
ggcaataacgacttgtaagacggct

SEQ ID NO: 4720275 - DNA, 25 bp, Homo sapien
catttcttagtgtaaaggcagcagt

SEQ ID NO: 4720276 - DNA, 25 bp, Homo sapien
tcatggagtaactgaagctttctgg

SEQ ID NO: 4720277 - DNA, 25 bp, Homo sapien
gtttctgttccggagaatgtttcca

SEQ ID NO: 4720278 - DNA, 25 bp, Homo sapien
cggagaatgtttccagcaccccttt

SEQ ID NO: 4720279 - DNA, 25 bp, Homo sapien
ttgtaggaaagcatatacatagggc

SEQ ID NO: 4720280 - DNA, 25 bp, Homo sapien
taatgtaacttagcccaaatcacca

SEQ ID NO: 4720281 - DNA, 25 bp, Homo sapien
aacacacacaggtctgagtcttcct

SEQ ID NO: 4720282 - DNA, 25 bp, Homo sapien
tcaccaagttggtagtacatttcca

SEQ ID NO: 4720283 - DNA, 25 bp, Homo sapien
ggacctataagataccagaacaccc

SEQ ID NO: 4720284 - DNA, 25 bp, Homo sapien
agtggtggtgttatctgcccagcaa

SEQ ID NO: 4720285 - DNA, 25 bp, Homo sapien
cattcatagccttgcagtggtggtg

SEQ ID NO: 4720286 - DNA, 25 bp, Homo sapien
gacgaggttcaggagagactgtccc

SEQ ID NO: 4720287 - DNA, 25 bp, Homo sapien
tccaccaaactcagtcgacgaggtt

SEQ ID NO: 4720288 - DNA, 25 bp, Homo sapien
tcttgataaccgtctctggtttatc

SEQ ID NO: 4720289 - DNA, 25 bp, Homo sapien
atattccaggactggctttgtttgg

SEQ ID NO: 4720290 - DNA, 25 bp, Homo sapien
gaggctccccagtcaggtcatcaat

SEQ ID NO: 4720291 - DNA, 25 bp, Homo sapien
gtttggtcttcataagcctttagtc

SEQ ID NO: 4720292 - DNA, 25 bp, Homo sapien
atgttatagactcggccactggcgg

SEQ ID NO: 4720293 - DNA, 25 bp, Homo sapien
gttgaattcaatgttatagactcgg

SEQ ID NO: 4720294 - DNA, 25 bp, Homo sapien
tatagactcggccactggcgggatg

SEQ ID NO: 4720295 - DNA, 25 bp, Homo sapien
tcaatgttatagactcggccactgg

SEQ ID NO: 4720296 - DNA, 25 bp, Homo sapien
agccagctatactgggtgagatttt

SEQ ID NO: 4720297 - DNA, 25 bp, Homo sapien
gaaagccttggctaacacgccaatt

SEQ ID NO: 4720298 - DNA, 25 bp, Homo sapien
aatgaaagccttggctaacacgcca

SEQ ID NO: 4720299 - DNA, 25 bp, Homo sapien
tgagtttcccttggtcaatgaaagc

SEQ ID NO: 4720300 - DNA, 25 bp, Homo sapien
ttcccttggtcaatgaaagccttgg

SEQ ID NO: 4720301 - DNA, 25 bp, Homo sapien
cattccaggcacctcggaacgagtt

SEQ ID NO: 4720302 - DNA, 25 bp, Homo sapien
tctgaatggcatactcatctgaaaa

SEQ ID NO: 4720303 - DNA, 25 bp, Homo sapien
acaaaggttatggccgggaacagtg

SEQ ID NO: 4720304 - DNA, 25 bp, Homo sapien
agtaagtgcatttgttttatcccat

SEQ ID NO: 4720305 - DNA, 25 bp, Homo sapien
tcaatataggtcataaacctaaatg

SEQ ID NO: 4720306 - DNA, 25 bp, Homo sapien
tagacctctaccatgcataaaaatt

SEQ ID NO: 4720307 - DNA, 25 bp, Homo sapien
aatgaagttagacctctaccatgca

SEQ ID NO: 4720308 - DNA, 25 bp, Homo sapien
ctaaatgtaagtgctaaagctacta

SEQ ID NO: 4720309 - DNA, 25 bp, Homo sapien
gatcaacgtccttaatcattaggga

SEQ ID NO: 4720310 - DNA, 25 bp, Homo sapien
ggccaataagcccatgaacacatga

SEQ ID NO: 4720311 - DNA, 25 bp, Homo sapien
tactacttcacattcacgaacatgg

SEQ ID NO: 4720312 - DNA, 25 bp, Homo sapien
taaacgggcataggatctgaataca

SEQ ID NO: 4720313 - DNA, 25 bp, Homo sapien
gctaactggtgcaagaagcctggtt

SEQ ID NO: 4720314 - DNA, 25 bp, Homo sapien
tctaaatccctcgttgccagttgaa

SEQ ID NO: 4720315 - DNA, 25 bp, Homo sapien
tagaatggcgcatcctttccctaag

SEQ ID NO: 4720316 - DNA, 25 bp, Homo sapien
aattactccttgatgcgtgggctac

SEQ ID NO: 4720317 - DNA, 25 bp, Homo sapien
gaatcatacactttacaagggctaa

SEQ ID NO: 4720318 - DNA, 25 bp, Homo sapien
aaaaaaccactcatagtctgatcac

SEQ ID NO: 4720319 - DNA, 25 bp, Homo sapien
gactgctaatgagaacagcgtttct

SEQ ID NO: 4720320 - DNA, 25 bp, Homo sapien
tcctatgtgtagtctaataatctgt

SEQ ID NO: 4720321 - DNA, 25 bp, Homo sapien
cactttgataattatggacccagtt

SEQ ID NO: 4720322 - DNA, 25 bp, Homo sapien
tctcagttataattgctctgtgaac

SEQ ID NO: 4720323 - DNA, 25 bp, Homo sapien
ccttacttggctggaaggatggtct

SEQ ID NO: 4720324 - DNA, 25 bp, Homo sapien
gacccagtttctgctaccagatcta

SEQ ID NO: 4720325 - DNA, 25 bp, Homo sapien
cacacctcatatctgaatgagctta

SEQ ID NO: 4720326 - DNA, 25 bp, Homo sapien
gactacactaggaatcggcagccct

SEQ ID NO: 4720327 - DNA, 25 bp, Homo sapien
agtttcatgttacccaaatcaacca

SEQ ID NO: 4720328 - DNA, 25 bp, Homo sapien
taactagaaatcctaaaacatggag

SEQ ID NO: 4720329 - DNA, 25 bp, Homo sapien
tgaagcatccagaaagagttcctgt

SEQ ID NO: 4720330 - DNA, 25 bp, Homo sapien
gcaaggagctctacacacatggatc

SEQ ID NO: 4720331 - DNA, 25 bp, Homo sapien
taaacggcccttcatggtcaagtgt

SEQ ID NO: 4720332 - DNA, 25 bp, Homo sapien
gatagctttacacccaatcaagggc

SEQ ID NO: 4720333 - DNA, 25 bp, Homo sapien
gacagtattcatgaccaggcttacc

SEQ ID NO: 4720334 - DNA, 25 bp, Homo sapien
gatccacggatagttgcctgaatga

SEQ ID NO: 4720335 - DNA, 25 bp, Homo sapien
gacaagctccctggattctactaga

SEQ ID NO: 4720336 - DNA, 25 bp, Homo sapien
tgtgagcacctagtgaaatcagttg

SEQ ID NO: 4720337 - DNA, 25 bp, Homo sapien
agtgacctgcccgactcagccccca

SEQ ID NO: 4720338 - DNA, 25 bp, Homo sapien
gtgacctgcccgactcagcccccaa

SEQ ID NO: 4720339 - DNA, 25 bp, Homo sapien
gacctgcccgactcagcccccaaag

SEQ ID NO: 4720340 - DNA, 25 bp, Homo sapien
caagtgacctgcccgactcagcccc

SEQ ID NO: 4720341 - DNA, 25 bp, Homo sapien
actgcgcctcgctaattgtttttga

SEQ ID NO: 4720342 - DNA, 25 bp, Homo sapien
gcgcctcgctaattgtttttgaatt

SEQ ID NO: 4720343 - DNA, 25 bp, Homo sapien
ctgcgcctcgctaattgtttttgaa

SEQ ID NO: 4720344 - DNA, 25 bp, Homo sapien
ccactgcgcctcgctaattgttttt

SEQ ID NO: 4720345 - DNA, 25 bp, Homo sapien
gcacgttgaacaagctgcggctcag

SEQ ID NO: 4720346 - DNA, 25 bp, Homo sapien
agattgttaactgcctttcgtgccg

SEQ ID NO: 4720347 - DNA, 25 bp, Homo sapien
gaaccatgcacaagaatagccttcg

SEQ ID NO: 4720348 - DNA, 25 bp, Homo sapien
taatgacagtcttccaaaggcacca

SEQ ID NO: 4720349 - DNA, 25 bp, Homo sapien
agcagcccgaggtctctgtcccggg

SEQ ID NO: 4720350 - DNA, 25 bp, Homo sapien
catctctgaacttcgagctcgacct

SEQ ID NO: 4720351 - DNA, 25 bp, Homo sapien
ttcgagctcgacctaactttccagt

SEQ ID NO: 4720352 - DNA, 25 bp, Homo sapien
ccgcgaagtccgacccgggtgacag

SEQ ID NO: 4720353 - DNA, 25 bp, Homo sapien
agtgtgtagtgatgcgcgacgacac

SEQ ID NO: 4720354 - DNA, 25 bp, Homo sapien
cagctcgaagtgtgtagtgatgcgc

SEQ ID NO: 4720355 - DNA, 25 bp, Homo sapien
ctcgaagtgtgtagtgatgcgcgac

SEQ ID NO: 4720356 - DNA, 25 bp, Homo sapien
ttcagctcgaagtgtgtagtgatgc

SEQ ID NO: 4720357 - DNA, 25 bp, Homo sapien
gctcgcagcagccgcgcggacgccc

SEQ ID NO: 4720358 - DNA, 25 bp, Homo sapien
gcagcagccgcgcggacgcccccat

SEQ ID NO: 4720359 - DNA, 25 bp, Homo sapien
gatcaccgctcgcagcagccgcgcg

SEQ ID NO: 4720360 - DNA, 25 bp, Homo sapien
tcgcagcagccgcgcggacgccccc

SEQ ID NO: 4720361 - DNA, 25 bp, Homo sapien
cggcgttcccggaagtgagccgaca

SEQ ID NO: 4720362 - DNA, 25 bp, Homo sapien
cgcgggaccccgctgttgcgtccgc

SEQ ID NO: 4720363 - DNA, 25 bp, Homo sapien
cgcgctcacccgctcggcagcctgc

SEQ ID NO: 4720364 - DNA, 25 bp, Homo sapien
tgttgcgtccgcctctcggctaccc

SEQ ID NO: 4720365 - DNA, 25 bp, Homo sapien
gtgagactcttttataaataacgta

SEQ ID NO: 4720366 - DNA, 25 bp, Homo sapien
tgagactcttttataaataacgtaa

SEQ ID NO: 4720367 - DNA, 25 bp, Homo sapien
taccttcttgcgtcagattcatgag

SEQ ID NO: 4720368 - DNA, 25 bp, Homo sapien
gattcatgagccagtcctatcacct

SEQ ID NO: 4720369 - DNA, 25 bp, Homo sapien
tagattgtagcaccacaaggcaggg

SEQ ID NO: 4720370 - DNA, 25 bp, Homo sapien
tgattcttgggcacagcgctctgtt

SEQ ID NO: 4720371 - DNA, 25 bp, Homo sapien
atccttcttgatgacataggagttg

SEQ ID NO: 4720372 - DNA, 25 bp, Homo sapien
catccttcttgatgacataggagtt

SEQ ID NO: 4720373 - DNA, 25 bp, Homo sapien
ggccacatgctctagctcatccttc

SEQ ID NO: 4720374 - DNA, 25 bp, Homo sapien
cttggccacatgctctagctcatcc

SEQ ID NO: 4720375 - DNA, 25 bp, Homo sapien
tcagcaatggtcttgatgttctgga

SEQ ID NO: 4720376 - DNA, 25 bp, Homo sapien
tgatgttctggaaggaagcctcaca

SEQ ID NO: 4720377 - DNA, 25 bp, Homo sapien
atgttctggaaggaagcctcacaag

SEQ ID NO: 4720378 - DNA, 25 bp, Homo sapien
tggtcttgatgttctggaaggaagc

SEQ ID NO: 4720379 - DNA, 25 bp, Homo sapien
agatggcctgattcatgccatgcag

SEQ ID NO: 4720380 - DNA, 25 bp, Homo sapien
gccatgcagtgggtacacgtccaca

SEQ ID NO: 4720381 - DNA, 25 bp, Homo sapien
cctgattcatgccatgcagtgggta

SEQ ID NO: 4720382 - DNA, 25 bp, Homo sapien
tcatgccatgcagtgggtacacgtc

SEQ ID NO: 4720383 - DNA, 25 bp, Homo sapien
cattcatgagcaggtggatgatctc

SEQ ID NO: 4720384 - DNA, 25 bp, Homo sapien
tgatgatggcattcactaggactcg

SEQ ID NO: 4720385 - DNA, 25 bp, Homo sapien
gtgcatggtcatgggtttcttgcca

SEQ ID NO: 4720386 - DNA, 25 bp, Homo sapien
ttcttgccattattgtggccatgca

SEQ ID NO: 4720387 - DNA, 25 bp, Homo sapien
tggggcactgtgttttgtggaaatg

SEQ ID NO: 4720388 - DNA, 25 bp, Homo sapien
gggcactgtgttttgtggaaatgct

SEQ ID NO: 4720389 - DNA, 25 bp, Homo sapien
caccctgcactgtgaagcaggtact

SEQ ID NO: 4720390 - DNA, 25 bp, Homo sapien
ctgcactgtgaagcaggtacttggc

SEQ ID NO: 4720391 - DNA, 25 bp, Homo sapien
ccctgcactgtgaagcaggtacttg

SEQ ID NO: 4720392 - DNA, 25 bp, Homo sapien
gcactgtgaagcaggtacttggcat

SEQ ID NO: 4720393 - DNA, 25 bp, Homo sapien
tgttgcatggcatggaccacatgcc

SEQ ID NO: 4720394 - DNA, 25 bp, Homo sapien
gttgcatggcatggaccacatgcca

SEQ ID NO: 4720395 - DNA, 25 bp, Homo sapien
ctgttgcatggcatggaccacatgc

SEQ ID NO: 4720396 - DNA, 25 bp, Homo sapien
tgcatggcatggaccacatgccacc

SEQ ID NO: 4720397 - DNA, 25 bp, Homo sapien
cttgaagggccttgaatgagtcctg

SEQ ID NO: 4720398 - DNA, 25 bp, Homo sapien
tctgactctggaatcaaaccctgat

SEQ ID NO: 4720399 - DNA, 25 bp, Homo sapien
agacgttcatatgggttgttgctgc

SEQ ID NO: 4720400 - DNA, 25 bp, Homo sapien
caaaagttgatatggcagacgttca

SEQ ID NO: 4720401 - DNA, 25 bp, Homo sapien
aagaagatatttatgcagccaacag

SEQ ID NO: 4720402 - DNA, 25 bp, Homo sapien
agaagatatttatgcagccaacaga

SEQ ID NO: 4720403 - DNA, 25 bp, Homo sapien
caaataagtaaagtggtcgatttat

SEQ ID NO: 4720404 - DNA, 25 bp, Homo sapien
taaagtggtcgatttatgttgtatg

SEQ ID NO: 4720405 - DNA, 25 bp, Homo sapien
ctgcctcagctctacctcaaccctg

SEQ ID NO: 4720406 - DNA, 25 bp, Homo sapien
tcgatttatgttgtatgttctcagt

SEQ ID NO: 4720407 - DNA, 25 bp, Homo sapien
cctcattagttcatgtctgcatcta

SEQ ID NO: 4720408 - DNA, 25 bp, Homo sapien
gtggtttcctcattagttcatgtct

SEQ ID NO: 4720409 - DNA, 25 bp, Homo sapien
tcattccatggctccttcatttcta

SEQ ID NO: 4720410 - DNA, 25 bp, Homo sapien
ttctttgtggtttcctcattagttc

SEQ ID NO: 4720411 - DNA, 25 bp, Homo sapien
acaagctgctccaatggtggatgaa

SEQ ID NO: 4720412 - DNA, 25 bp, Homo sapien
gctccaatggtggatgaagattcca

SEQ ID NO: 4720413 - DNA, 25 bp, Homo sapien
ttgttggtgccaacaagctgctcca

SEQ ID NO: 4720414 - DNA, 25 bp, Homo sapien
aagctgctccaatggtggatgaaga

SEQ ID NO: 4720415 - DNA, 25 bp, Homo sapien
gaccgatcactttcccttaagcaga

SEQ ID NO: 4720416 - DNA, 25 bp, Homo sapien
tgattgattgactgcgctgtaatgg

SEQ ID NO: 4720417 - DNA, 25 bp, Homo sapien
ttaagcagaacttacaggccaccat

SEQ ID NO: 4720418 - DNA, 25 bp, Homo sapien
aatggtaatacctttgccctgagct

SEQ ID NO: 4720419 - DNA, 25 bp, Homo sapien
tcaaggtataggaaggatgagccag

SEQ ID NO: 4720420 - DNA, 25 bp, Homo sapien
tttttccctcgagagagccggtggc

SEQ ID NO: 4720421 - DNA, 25 bp, Homo sapien
ctacacctggaattacccttgggct

SEQ ID NO: 4720422 - DNA, 25 bp, Homo sapien
gagtaactgcagcattgcatcccct

SEQ ID NO: 4720423 - DNA, 25 bp, Homo sapien
gtgacagagcgagattccactcaaa

SEQ ID NO: 4720424 - DNA, 25 bp, Homo sapien
cagagcgagattccactcaaaaaaa

SEQ ID NO: 4720425 - DNA, 25 bp, Homo sapien
acagagcgagattccactcaaaaaa

SEQ ID NO: 4720426 - DNA, 25 bp, Homo sapien
ctggtgacagagcgagattccactc

SEQ ID NO: 4720427 - DNA, 25 bp, Homo sapien
caactggattatggccactggctct

SEQ ID NO: 4720428 - DNA, 25 bp, Homo sapien
gaaaggcttgccttaattgggctac

SEQ ID NO: 4720429 - DNA, 25 bp, Homo sapien
cctgggacaaagtcagaattctcga

SEQ ID NO: 4720430 - DNA, 25 bp, Homo sapien
tctcgacccatttcggaaaggcttg

SEQ ID NO: 4720431 - DNA, 25 bp, Homo sapien
gtggcagggaatattcaggtagata

SEQ ID NO: 4720432 - DNA, 25 bp, Homo sapien
aactgtcctttttcggttatcatgg

SEQ ID NO: 4720433 - DNA, 25 bp, Homo sapien
tcacgtgcttgcatacttggagatc

SEQ ID NO: 4720434 - DNA, 25 bp, Homo sapien
ggttatcatggtaccgatgctgtat

SEQ ID NO: 4720435 - DNA, 25 bp, Homo sapien
ggaagtcctgcttgcacacacggta

SEQ ID NO: 4720436 - DNA, 25 bp, Homo sapien
gtcctgcttgcacacacggtatgag

SEQ ID NO: 4720437 - DNA, 25 bp, Homo sapien
gggctcgtagctgccgtttcccagc

SEQ ID NO: 4720438 - DNA, 25 bp, Homo sapien
ttgcacacacggtatgaggtatggg

SEQ ID NO: 4720439 - DNA, 25 bp, Homo sapien
agggatgaaatccacggtgaggacc

SEQ ID NO: 4720440 - DNA, 25 bp, Homo sapien
agatttttcaatttggctccaggac

SEQ ID NO: 4720441 - DNA, 25 bp, Homo sapien
tgcccctaatcactatggacagctc

SEQ ID NO: 4720442 - DNA, 25 bp, Homo sapien
cagagctttgtgcagacgggtctgc

SEQ ID NO: 4720443 - DNA, 25 bp, Homo sapien
acagttagtgacagtagttgcaccc

SEQ ID NO: 4720444 - DNA, 25 bp, Homo sapien
ctcttttagaaaggcccaagagatt

SEQ ID NO: 4720445 - DNA, 25 bp, Homo sapien
tgttgagttttaggtggcttacagt

SEQ ID NO: 4720446 - DNA, 25 bp, Homo sapien
taaaatactgttggataatcactgg

SEQ ID NO: 4720447 - DNA, 25 bp, Homo sapien
tggttgtgtctaggaagtgtgaatc

SEQ ID NO: 4720448 - DNA, 25 bp, Homo sapien
ctgctctcggtgagcggtgggtctc

SEQ ID NO: 4720449 - DNA, 25 bp, Homo sapien
ggctgtgtggttgtgtctaggaagt

SEQ ID NO: 4720450 - DNA, 25 bp, Homo sapien
tgtctaggaagtgtgaatctccagt

SEQ ID NO: 4720451 - DNA, 25 bp, Homo sapien
gctggaagctttgcccacagatgtg

SEQ ID NO: 4720452 - DNA, 25 bp, Homo sapien
aagctttgcccacagatgtggactg

SEQ ID NO: 4720453 - DNA, 25 bp, Homo sapien
cagagtgggtgagatggctggcttt

SEQ ID NO: 4720454 - DNA, 25 bp, Homo sapien
cgccagctggaagctttgcccacag

SEQ ID NO: 4720455 - DNA, 25 bp, Homo sapien
tctgccaggcgagaccattagaagc

SEQ ID NO: 4720456 - DNA, 25 bp, Homo sapien
tgcggttcatccacagaattgctct

SEQ ID NO: 4720457 - DNA, 25 bp, Homo sapien
catgtgcagtcgagattgagaacca

SEQ ID NO: 4720458 - DNA, 25 bp, Homo sapien
tactcttggactgatgccatcgccc

SEQ ID NO: 4720459 - DNA, 25 bp, Homo sapien
cagtcgtgctgctagaacagtctcg

SEQ ID NO: 4720460 - DNA, 25 bp, Homo sapien
aacagtctcgtagctgcagttcagc

SEQ ID NO: 4720461 - DNA, 25 bp, Homo sapien
ccttacctggaggaagaatgtgcct

SEQ ID NO: 4720462 - DNA, 25 bp, Homo sapien
catgagtcctgcagtgctaagcaaa

SEQ ID NO: 4720463 - DNA, 25 bp, Homo sapien
gagctcaaatccagaactaaggggc

SEQ ID NO: 4720464 - DNA, 25 bp, Homo sapien
aatccagaactaaggggcacattgc

SEQ ID NO: 4720465 - DNA, 25 bp, Homo sapien
ctagtgccgctgacgttcgaactca

SEQ ID NO: 4720466 - DNA, 25 bp, Homo sapien
gctgacgttcgaactcagatctgcc

SEQ ID NO: 4720467 - DNA, 25 bp, Homo sapien
ggtgtggttccagccctgcatttgg

SEQ ID NO: 4720468 - DNA, 25 bp, Homo sapien
gcagattactataagcagtagaggg

SEQ ID NO: 4720469 - DNA, 25 bp, Homo sapien
gccgttccttgtacaagctctggaa

SEQ ID NO: 4720470 - DNA, 25 bp, Homo sapien
tcaatgtagggtggcacatagaggc

SEQ ID NO: 4720471 - DNA, 25 bp, Homo sapien
gggtagcttgaagcgagagattcca

SEQ ID NO: 4720472 - DNA, 25 bp, Homo sapien
aagcgagagattccagcgttttggg

SEQ ID NO: 4720473 - DNA, 25 bp, Homo sapien
gcttgaagcgagagattccagcgtt

SEQ ID NO: 4720474 - DNA, 25 bp, Homo sapien
tagcttgaagcgagagattccagcg

SEQ ID NO: 4720475 - DNA, 25 bp, Homo sapien
agtccgtcgaggactgtcctacttg

SEQ ID NO: 4720476 - DNA, 25 bp, Homo sapien
ggactgtcctacttgtctgatctgt

SEQ ID NO: 4720477 - DNA, 25 bp, Homo sapien
ttagctgctccagtccgtcgaggac

SEQ ID NO: 4720478 - DNA, 25 bp, Homo sapien
gagtgggttagctgctccagtccgt

SEQ ID NO: 4720479 - DNA, 25 bp, Homo sapien
aagaggactgtttgaatgcttagca

SEQ ID NO: 4720480 - DNA, 25 bp, Homo sapien
ttagcacataatatgctttgtacat

SEQ ID NO: 4720481 - DNA, 25 bp, Homo sapien
agaggactgtttgaatgcttagcac

SEQ ID NO: 4720482 - DNA, 25 bp, Homo sapien
cttagcacataatatgctttgtaca

SEQ ID NO: 4720483 - DNA, 25 bp, Homo sapien
tatattgtaaaattgcttgccccgc

SEQ ID NO: 4720484 - DNA, 25 bp, Homo sapien
tctattctatacagaaagaagtctg

SEQ ID NO: 4720485 - DNA, 25 bp, Homo sapien
catctctggttagttgcctatcttg

SEQ ID NO: 4720486 - DNA, 25 bp, Homo sapien
ttctgcttcccaaggtgataggatt

SEQ ID NO: 4720487 - DNA, 25 bp, Homo sapien
ccttcccagaaagggcctggatcca

SEQ ID NO: 4720488 - DNA, 25 bp, Homo sapien
tccactctcccactgctgattcctt

SEQ ID NO: 4720489 - DNA, 25 bp, Homo sapien
tgattccttcccagaaagggcctgg

SEQ ID NO: 4720490 - DNA, 25 bp, Homo sapien
ttccttcccagaaagggcctggatc

SEQ ID NO: 4720491 - DNA, 25 bp, Homo sapien
tggctggactggtagtggccatgga

SEQ ID NO: 4720492 - DNA, 25 bp, Homo sapien
tgatagttctgggccactaagtttt

SEQ ID NO: 4720493 - DNA, 25 bp, Homo sapien
cattagtaaatctaaggaccttgat

SEQ ID NO: 4720494 - DNA, 25 bp, Homo sapien
ggtagtggccatggatgtgtctttt

SEQ ID NO: 4720495 - DNA, 25 bp, Homo sapien
tcccagcatggtaaccagtggtggt

SEQ ID NO: 4720496 - DNA, 25 bp, Homo sapien
ggatttcttgctaacttggcctggg

SEQ ID NO: 4720497 - DNA, 25 bp, Homo sapien
taaagaatcccatgcgacctgggca

SEQ ID NO: 4720498 - DNA, 25 bp, Homo sapien
gatgctgtggatagtctggatttct

SEQ ID NO: 4720499 - DNA, 25 bp, Homo sapien
ctgccaatcacaactcctattccct

SEQ ID NO: 4720500 - DNA, 25 bp, Homo sapien
tgccaatcacaactcctattccctg

SEQ ID NO: 4720501 - DNA, 25 bp, Homo sapien
tctgccaatcacaactcctattccc

SEQ ID NO: 4720502 - DNA, 25 bp, Homo sapien
gccaatcacaactcctattccctga

SEQ ID NO: 4720503 - DNA, 25 bp, Homo sapien
gcatcccttggatgaagctgactta

SEQ ID NO: 4720504 - DNA, 25 bp, Homo sapien
tcccttggatgaagctgacttaatt

SEQ ID NO: 4720505 - DNA, 25 bp, Homo sapien
ttggatgaagctgacttaattgtgg

SEQ ID NO: 4720506 - DNA, 25 bp, Homo sapien
ccttggatgaagctgacttaattgt

SEQ ID NO: 4720507 - DNA, 25 bp, Homo sapien
gtgccctctgctggttgttgacaac

SEQ ID NO: 4720508 - DNA, 25 bp, Homo sapien
ctctgctggttgttgacaactcaac

SEQ ID NO: 4720509 - DNA, 25 bp, Homo sapien
gaagcatcaatccatttttagaagt

SEQ ID NO: 4720510 - DNA, 25 bp, Homo sapien
gggctcagaacttagaagcatcaat

SEQ ID NO: 4720511 - DNA, 25 bp, Homo sapien
tcaacccaggtatcttgaagagcca

SEQ ID NO: 4720512 - DNA, 25 bp, Homo sapien
aggtatcttgaagagccactgttcc

SEQ ID NO: 4720513 - DNA, 25 bp, Homo sapien
ctgttccttggaagaggggtgtata

SEQ ID NO: 4720514 - DNA, 25 bp, Homo sapien
tattttatgcctcttgaaatggatg

SEQ ID NO: 4720515 - DNA, 25 bp, Homo sapien
ggccatgtgtaggagagttgtaatt

SEQ ID NO: 4720516 - DNA, 25 bp, Homo sapien
gtctgcgtagtctccttggccaggg

SEQ ID NO: 4720517 - DNA, 25 bp, Homo sapien
ctggtccaatcaactatggtctgcg

SEQ ID NO: 4720518 - DNA, 25 bp, Homo sapien
ccaatcaactatggtctgcgtagtc

SEQ ID NO: 4720519 - DNA, 25 bp, Homo sapien
gactcaggttgatatggaacatatt

SEQ ID NO: 4720520 - DNA, 25 bp, Homo sapien
ccatggggaaatactggtcaatcat

SEQ ID NO: 4720521 - DNA, 25 bp, Homo sapien
agactcaggttgatatggaacatat

SEQ ID NO: 4720522 - DNA, 25 bp, Homo sapien
agaaaagcggctagaggaaggcacc

SEQ ID NO: 4720523 - DNA, 25 bp, Homo sapien
tttaggagttgggtcattcagttgt

SEQ ID NO: 4720524 - DNA, 25 bp, Homo sapien
cagcaggaagtccagatttaggagt

SEQ ID NO: 4720525 - DNA, 25 bp, Homo sapien
ttcagttgtttccttacagaaaagc

SEQ ID NO: 4720526 - DNA, 25 bp, Homo sapien
aatcaagcaaggcaaggttcctata

SEQ ID NO: 4720527 - DNA, 25 bp, Homo sapien
caaggcaaggttcctatatccacag

SEQ ID NO: 4720528 - DNA, 25 bp, Homo sapien
ctggcagtctgcatgcaatcaagca

SEQ ID NO: 4720529 - DNA, 25 bp, Homo sapien
caagcaaggcaaggttcctatatcc

SEQ ID NO: 4720530 - DNA, 25 bp, Homo sapien
gaacaactttacacagcacattaaa

SEQ ID NO: 4720531 - DNA, 25 bp, Homo sapien
gaaggaactctaacttcacactgta

SEQ ID NO: 4720532 - DNA, 25 bp, Homo sapien
gatggcttcagagtagaacaacttt

SEQ ID NO: 4720533 - DNA, 25 bp, Homo sapien
ggaactctaacttcacactgtaggg

SEQ ID NO: 4720534 - DNA, 25 bp, Homo sapien
gcctccaccaccacaggggacagag

SEQ ID NO: 4720535 - DNA, 25 bp, Homo sapien
caggggtccaaaatttggagactga

SEQ ID NO: 4720536 - DNA, 25 bp, Homo sapien
tggcctccaccaccacaggggacag

SEQ ID NO: 4720537 - DNA, 25 bp, Homo sapien
ctccaccaccacaggggacagagct

SEQ ID NO: 4720538 - DNA, 25 bp, Homo sapien
agctgtggccattcaagtatgctat

SEQ ID NO: 4720539 - DNA, 25 bp, Homo sapien
catggagtcaccgttgtcaaacgtt

SEQ ID NO: 4720540 - DNA, 25 bp, Homo sapien
gagtcaccgttgtcaaacgttacaa

SEQ ID NO: 4720541 - DNA, 25 bp, Homo sapien
tggccattcaagtatgctatttctg

SEQ ID NO: 4720542 - DNA, 25 bp, Homo sapien
aattttctcttgagacaactctctt

SEQ ID NO: 4720543 - DNA, 25 bp, Homo sapien
atatttttcacagttaactgggcac

SEQ ID NO: 4720544 - DNA, 25 bp, Homo sapien
tgagaattttctcttgagacaactc

SEQ ID NO: 4720545 - DNA, 25 bp, Homo sapien
aatatatttttcacagttaactggg

SEQ ID NO: 4720546 - DNA, 25 bp, Homo sapien
acagtggcacacatgacaaacccac

SEQ ID NO: 4720547 - DNA, 25 bp, Homo sapien
tggcacacatgacaaacccacaggc

SEQ ID NO: 4720548 - DNA, 25 bp, Homo sapien
cctccacagtggcacacatgacaaa

SEQ ID NO: 4720549 - DNA, 25 bp, Homo sapien
agtggcacacatgacaaacccacag

SEQ ID NO: 4720550 - DNA, 25 bp, Homo sapien
ttcattcaatacttcagcatgcata

SEQ ID NO: 4720551 - DNA, 25 bp, Homo sapien
tcattcaatacttcagcatgcatat

SEQ ID NO: 4720552 - DNA, 25 bp, Homo sapien
ggagggcaaaaatcctctaccagtc

SEQ ID NO: 4720553 - DNA, 25 bp, Homo sapien
ggtactccttcaatgccatgtcagg

SEQ ID NO: 4720554 - DNA, 25 bp, Homo sapien
gagttgccttaagtacctggagcca

SEQ ID NO: 4720555 - DNA, 25 bp, Homo sapien
ctagtaagtccaatgcctgagtttc

SEQ ID NO: 4720556 - DNA, 25 bp, Homo sapien
ttgatagtgggtttgtcagcatcat

SEQ ID NO: 4720557 - DNA, 25 bp, Homo sapien
gatagtttatcaattcaagtccagt

SEQ ID NO: 4720558 - DNA, 25 bp, Homo sapien
tttgatagtgggtttgtcagcatca

SEQ ID NO: 4720559 - DNA, 25 bp, Homo sapien
tcaattcaagtccagtcttatgaat

SEQ ID NO: 4720560 - DNA, 25 bp, Homo sapien
gacatgctgaagtaccgaggaggta

SEQ ID NO: 4720561 - DNA, 25 bp, Homo sapien
aactgatgtagagacaaggacatgc

SEQ ID NO: 4720562 - DNA, 25 bp, Homo sapien
tgtctacttgattaataccccttgc

SEQ ID NO: 4720563 - DNA, 25 bp, Homo sapien
gccttcaggaaagtacatcttccct

SEQ ID NO: 4720564 - DNA, 25 bp, Homo sapien
tctagctattgcctgtccctgggct

SEQ ID NO: 4720565 - DNA, 25 bp, Homo sapien
gactctccaggaccagatagctgtt

SEQ ID NO: 4720566 - DNA, 25 bp, Homo sapien
ttttctggcgtttcagtggaaagcc

SEQ ID NO: 4720567 - DNA, 25 bp, Homo sapien
cattacttctggtaagtggctctta

SEQ ID NO: 4720568 - DNA, 25 bp, Homo sapien
tactgagtgcctatggaattctggg

SEQ ID NO: 4720569 - DNA, 25 bp, Homo sapien
gaaaaaagccaattcgagtcactta

SEQ ID NO: 4720570 - DNA, 25 bp, Homo sapien
tctttctcgtcatgtacttccagga

SEQ ID NO: 4720571 - DNA, 25 bp, Homo sapien
tatgagtgtatgtttaaggcagtgt

SEQ ID NO: 4720572 - DNA, 25 bp, Homo sapien
cttcacgcccaagacggtgctcctg

SEQ ID NO: 4720573 - DNA, 25 bp, Homo sapien
tcacgcccaagacggtgctcctgat

SEQ ID NO: 4720574 - DNA, 25 bp, Homo sapien
ccaagacggtgctcctgatcgccat

SEQ ID NO: 4720575 - DNA, 25 bp, Homo sapien
acgcccaagacggtgctcctgatcg

SEQ ID NO: 4720576 - DNA, 25 bp, Homo sapien
ggattttgccattagtaaactgaag

SEQ ID NO: 4720577 - DNA, 25 bp, Homo sapien
cagtaactgctatggtagtagagat

SEQ ID NO: 4720578 - DNA, 25 bp, Homo sapien
gctatataattgtcccttgaagtgg

SEQ ID NO: 4720579 - DNA, 25 bp, Homo sapien
tctttcagggtgtgcagcttcagaa

SEQ ID NO: 4720580 - DNA, 25 bp, Homo sapien
cattgctcagaagaagtgggtatac

SEQ ID NO: 4720581 - DNA, 25 bp, Homo sapien
catttaatatggctggaacgtaggt

SEQ ID NO: 4720582 - DNA, 25 bp, Homo sapien
gaggacctcttagaaacagtggtac

SEQ ID NO: 4720583 - DNA, 25 bp, Homo sapien
tacaaatacaatggtggtgcagtgg

SEQ ID NO: 4720584 - DNA, 25 bp, Homo sapien
cggcaaactgaaccatctcatgatc

SEQ ID NO: 4720585 - DNA, 25 bp, Homo sapien
tgagaagtttactgctctctcttat

SEQ ID NO: 4720586 - DNA, 25 bp, Homo sapien
gggatgagaagtttactgctctctc

SEQ ID NO: 4720587 - DNA, 25 bp, Homo sapien
catctcccggcaaactgaaccatct

SEQ ID NO: 4720588 - DNA, 25 bp, Homo sapien
ggctaacctgagattcacatcagct

SEQ ID NO: 4720589 - DNA, 25 bp, Homo sapien
tagaacatgaggtgaagtcgaatac

SEQ ID NO: 4720590 - DNA, 25 bp, Homo sapien
gttggtttgcctatgttagaacatg

SEQ ID NO: 4720591 - DNA, 25 bp, Homo sapien
ccagtggctaacctgagattcacat

SEQ ID NO: 4720592 - DNA, 25 bp, Homo sapien
ggtcttttcaaggtattgtgcaaat

SEQ ID NO: 4720593 - DNA, 25 bp, Homo sapien
gtattgtgcaaatctctcatgctca

SEQ ID NO: 4720594 - DNA, 25 bp, Homo sapien
ttggctatcaggctcgcagtattct

SEQ ID NO: 4720595 - DNA, 25 bp, Homo sapien
caggctcgcagtattcttgaaggtc

SEQ ID NO: 4720596 - DNA, 25 bp, Homo sapien
cagtttgtgccccacctatagatac

SEQ ID NO: 4720597 - DNA, 25 bp, Homo sapien
gtatttccagtttgtgccccaccta

SEQ ID NO: 4720598 - DNA, 25 bp, Homo sapien
tttccagtttgtgccccacctatag

SEQ ID NO: 4720599 - DNA, 25 bp, Homo sapien
gtgccccacctatagatactacaga

SEQ ID NO: 4720600 - DNA, 25 bp, Homo sapien
tatgagcggttcctttctaataccc

SEQ ID NO: 4720601 - DNA, 25 bp, Homo sapien
cacatgtcgggagttattatgatga

SEQ ID NO: 4720602 - DNA, 25 bp, Homo sapien
cattagtaccacaataattgatcga

SEQ ID NO: 4720603 - DNA, 25 bp, Homo sapien
tccttttcgagaacgtgcattatca

SEQ ID NO: 4720604 - DNA, 25 bp, Homo sapien
ctgtacggggttgtgtgatgaaact

SEQ ID NO: 4720605 - DNA, 25 bp, Homo sapien
tacggggttgtgtgatgaaactgtg

SEQ ID NO: 4720606 - DNA, 25 bp, Homo sapien
ggttgtgtgatgaaactgtgatata

SEQ ID NO: 4720607 - DNA, 25 bp, Homo sapien
cggggttgtgtgatgaaactgtgat

SEQ ID NO: 4720608 - DNA, 25 bp, Homo sapien
gcttcacaagattaaaatagggtat

SEQ ID NO: 4720609 - DNA, 25 bp, Homo sapien
tttggacaggcaggtgttaaatgct

SEQ ID NO: 4720610 - DNA, 25 bp, Homo sapien
aaatgcttcacaagattaaaatagg

SEQ ID NO: 4720611 - DNA, 25 bp, Homo sapien
gacaggcaggtgttaaatgcttcac

SEQ ID NO: 4720612 - DNA, 25 bp, Homo sapien
gaaagtcgcggtaggatggtggctc

SEQ ID NO: 4720613 - DNA, 25 bp, Homo sapien
gtctgaaagtcgcggtaggatggtg

SEQ ID NO: 4720614 - DNA, 25 bp, Homo sapien
ctgaaagtcgcggtaggatggtggc

SEQ ID NO: 4720615 - DNA, 25 bp, Homo sapien
tgaaagtcgcggtaggatggtggct

SEQ ID NO: 4720616 - DNA, 25 bp, Homo sapien
ctcttatattctttatatcctttac

SEQ ID NO: 4720617 - DNA, 25 bp, Homo sapien
cgcttcactcctagcggttttgaaa

SEQ ID NO: 4720618 - DNA, 25 bp, Homo sapien
cttctcgcttcactcctagcggttt

SEQ ID NO: 4720619 - DNA, 25 bp, Homo sapien
cactcctagcggttttgaaatcctc

SEQ ID NO: 4720620 - DNA, 25 bp, Homo sapien
ctagcggttttgaaatcctctttat

SEQ ID NO: 4720621 - DNA, 25 bp, Homo sapien
atcttggtccacattccttgaatac

SEQ ID NO: 4720622 - DNA, 25 bp, Homo sapien
tatactccagtgatagctattgagg

SEQ ID NO: 4720623 - DNA, 25 bp, Homo sapien
tgaggagtatcctgaaacatgaggg

SEQ ID NO: 4720624 - DNA, 25 bp, Homo sapien
tagtcatggttatagtccacgtggg

SEQ ID NO: 4720625 - DNA, 25 bp, Homo sapien
tccacgtgggaaaatggcatatgct

SEQ ID NO: 4720626 - DNA, 25 bp, Homo sapien
atgctacctattaaaccatatccta

SEQ ID NO: 4720627 - DNA, 25 bp, Homo sapien
caaggactgcaaaactctattctgc

SEQ ID NO: 4720628 - DNA, 25 bp, Homo sapien
atcagttgaacgcaaatcaaccact

SEQ ID NO: 4720629 - DNA, 25 bp, Homo sapien
cagttgaacgcaaatcaaccacttt

SEQ ID NO: 4720630 - DNA, 25 bp, Homo sapien
tgcatcagttgaacgcaaatcaacc

SEQ ID NO: 4720631 - DNA, 25 bp, Homo sapien
tagatcggtggaattcaaacccaca

SEQ ID NO: 4720632 - DNA, 25 bp, Homo sapien
gatcggtggaattcaaacccacaaa

SEQ ID NO: 4720633 - DNA, 25 bp, Homo sapien
tagttaacagctaaataccctaatc

SEQ ID NO: 4720634 - DNA, 25 bp, Homo sapien
gctagatcggtggaattcaaaccca

SEQ ID NO: 4720635 - DNA, 25 bp, Homo sapien
gcaattcaacataaaaaattacctc

SEQ ID NO: 4720636 - DNA, 25 bp, Homo sapien
gaagccctggcagcattgaagctgc

SEQ ID NO: 4720637 - DNA, 25 bp, Homo sapien
gccctggcagcattgaagctgctcc

SEQ ID NO: 4720638 - DNA, 25 bp, Homo sapien
tttgcaattcaacataaaaaattac

SEQ ID NO: 4720639 - DNA, 25 bp, Homo sapien
agaggtcttgacctctgtctttaga

SEQ ID NO: 4720640 - DNA, 25 bp, Homo sapien
gtaaaaagaggtcttgacctctgtc

SEQ ID NO: 4720641 - DNA, 25 bp, Homo sapien
tacagtccaatgcttactcagccat

SEQ ID NO: 4720642 - DNA, 25 bp, Homo sapien
acagtccaatgcttactcagccatt

SEQ ID NO: 4720643 - DNA, 25 bp, Homo sapien
gatctcccatgtcgtgacgtattac

SEQ ID NO: 4720644 - DNA, 25 bp, Homo sapien
gggatgatctcccatgtcgtgacgt

SEQ ID NO: 4720645 - DNA, 25 bp, Homo sapien
tttgggatgatctcccatgtcgtga

SEQ ID NO: 4720646 - DNA, 25 bp, Homo sapien
caggctttgggatgatctcccatgt

SEQ ID NO: 4720647 - DNA, 25 bp, Homo sapien
tttcaagccaatcaaaaacctctgt

SEQ ID NO: 4720648 - DNA, 25 bp, Homo sapien
ctggtttcaagccaatcaaaaacct

SEQ ID NO: 4720649 - DNA, 25 bp, Homo sapien
taacttccagaaactggtttcaagc

SEQ ID NO: 4720650 - DNA, 25 bp, Homo sapien
gaaactggtttcaagccaatcaaaa

SEQ ID NO: 4720651 - DNA, 25 bp, Homo sapien
taattgcaggagacacactagtact

SEQ ID NO: 4720652 - DNA, 25 bp, Homo sapien
tgagcaggcgcagtaattacagtct

SEQ ID NO: 4720653 - DNA, 25 bp, Homo sapien
tctactaataacatctggcctggcc

SEQ ID NO: 4720654 - DNA, 25 bp, Homo sapien
aaattcgccatagaccttattcagg

SEQ ID NO: 4720655 - DNA, 25 bp, Homo sapien
ctgatccagaacttctggcccaagg

SEQ ID NO: 4720656 - DNA, 25 bp, Homo sapien
acttctggcccaaggacatcttggt

SEQ ID NO: 4720657 - DNA, 25 bp, Homo sapien
ccagaacttctggcccaaggacatc

SEQ ID NO: 4720658 - DNA, 25 bp, Homo sapien
gcccaaggacatcttggtgcagtgg

SEQ ID NO: 4720659 - DNA, 25 bp, Homo sapien
taagataattacctccatccatgtt

SEQ ID NO: 4720660 - DNA, 25 bp, Homo sapien
caataaacatacaggtggaggtatc

SEQ ID NO: 4720661 - DNA, 25 bp, Homo sapien
ggtagataccccatagtgggaatgc

SEQ ID NO: 4720662 - DNA, 25 bp, Homo sapien
tagttctatatttaggtctctgaga

SEQ ID NO: 4720663 - DNA, 25 bp, Homo sapien
cagcattataagcaggtgtatactt

SEQ ID NO: 4720664 - DNA, 25 bp, Homo sapien
tgttcatttatatcgctggccagca

SEQ ID NO: 4720665 - DNA, 25 bp, Homo sapien
taagtacctttgtgtccttgttcat

SEQ ID NO: 4720666 - DNA, 25 bp, Homo sapien
tagcttgtagttccatgtactgtaa

SEQ ID NO: 4720667 - DNA, 25 bp, Homo sapien
tagaaattcttggtaataggagtaa

SEQ ID NO: 4720668 - DNA, 25 bp, Homo sapien
actgagttttaccttcttattgaag

SEQ ID NO: 4720669 - DNA, 25 bp, Homo sapien
gagtaaaggttgttgttgacaaaga

SEQ ID NO: 4720670 - DNA, 25 bp, Homo sapien
ttgacaaagaaacttgaaactgagt

SEQ ID NO: 4720671 - DNA, 25 bp, Homo sapien
tcctgatggtgtatcaatttaaaat

SEQ ID NO: 4720672 - DNA, 25 bp, Homo sapien
gaatcctgatggtgtatcaatttaa

SEQ ID NO: 4720673 - DNA, 25 bp, Homo sapien
gggtgaatcctgatggtgtatcaat

SEQ ID NO: 4720674 - DNA, 25 bp, Homo sapien
ttgagggtgaatcctgatggtgtat

SEQ ID NO: 4720675 - DNA, 25 bp, Homo sapien
cttatgtcactcatacaggaaagct

SEQ ID NO: 4720676 - DNA, 25 bp, Homo sapien
ggagcaatgtaggggataatactgc

SEQ ID NO: 4720677 - DNA, 25 bp, Homo sapien
catcaaacaaattaattgcacaaca

SEQ ID NO: 4720678 - DNA, 25 bp, Homo sapien
atgtaggggataatactgccttttg

SEQ ID NO: 4720679 - DNA, 25 bp, Homo sapien
tcaaacaaattaattgcacaacaat

SEQ ID NO: 4720680 - DNA, 25 bp, Homo sapien
agttaccaagttcctggcttttgca

SEQ ID NO: 4720681 - DNA, 25 bp, Homo sapien
tagttaccaagttcctggcttttgc

SEQ ID NO: 4720682 - DNA, 25 bp, Homo sapien
tgtattaagcttttattaggttaga

SEQ ID NO: 4720683 - DNA, 25 bp, Homo sapien
cacttttctgaatatcctctgcgtt

SEQ ID NO: 4720684 - DNA, 25 bp, Homo sapien
catgcaatgctaagttcttcttttg

SEQ ID NO: 4720685 - DNA, 25 bp, Homo sapien
tagtatatcttagttacaagtgatg

SEQ ID NO: 4720686 - DNA, 25 bp, Homo sapien
ggaagacatgcaatgctaagttctt

SEQ ID NO: 4720687 - DNA, 25 bp, Homo sapien
gactgcatttcccaactgtttactg

SEQ ID NO: 4720688 - DNA, 25 bp, Homo sapien
tatactcaggtagtgactgcatttc

SEQ ID NO: 4720689 - DNA, 25 bp, Homo sapien
tccttatactcaggtagtgactgca

SEQ ID NO: 4720690 - DNA, 25 bp, Homo sapien
ttttatccttatactcaggtagtga

SEQ ID NO: 4720691 - DNA, 25 bp, Homo sapien
ggatatatttgccaatagtctctac

SEQ ID NO: 4720692 - DNA, 25 bp, Homo sapien
ctactgtagagccagctcttaggca

SEQ ID NO: 4720693 - DNA, 25 bp, Homo sapien
tttgccaatagtctctactgtagag

SEQ ID NO: 4720694 - DNA, 25 bp, Homo sapien
caatagtctctactgtagagccagc

SEQ ID NO: 4720695 - DNA, 25 bp, Homo sapien
gaggcctgtgcaatcaaccgtgaga

SEQ ID NO: 4720696 - DNA, 25 bp, Homo sapien
tcctcgaaacggaactggctccagt

SEQ ID NO: 4720697 - DNA, 25 bp, Homo sapien
tgtaggcttcgaccttctccgaggc

SEQ ID NO: 4720698 - DNA, 25 bp, Homo sapien
ttcacgagaaaaccgaaccagcagg

SEQ ID NO: 4720699 - DNA, 25 bp, Homo sapien
gtcggccggaccctgctccctgtct

SEQ ID NO: 4720700 - DNA, 25 bp, Homo sapien
tgtgaccccaggctagtcctccgcg

SEQ ID NO: 4720701 - DNA, 25 bp, Homo sapien
aatggcggtcggccggaccctgctc

SEQ ID NO: 4720702 - DNA, 25 bp, Homo sapien
cctccgcgttgtgcaatggcggtcg

SEQ ID NO: 4720703 - DNA, 25 bp, Homo sapien
ggggggccatttgcctgtgagtggt

SEQ ID NO: 4720704 - DNA, 25 bp, Homo sapien
gcaaccaataggaagtgtgggatgg

SEQ ID NO: 4720705 - DNA, 25 bp, Homo sapien
gggccatttgcctgtgagtggtcca

SEQ ID NO: 4720706 - DNA, 25 bp, Homo sapien
accaataggaagtgtgggatggcca

SEQ ID NO: 4720707 - DNA, 25 bp, Homo sapien
cagacaggaccagaacagttgagta

SEQ ID NO: 4720708 - DNA, 25 bp, Homo sapien
ccttgtacattgtggtctcttggaa

SEQ ID NO: 4720709 - DNA, 25 bp, Homo sapien
gactttgcagtaaccagaatactgg

SEQ ID NO: 4720710 - DNA, 25 bp, Homo sapien
tttcatcactcacccatttcgtggg

SEQ ID NO: 4720711 - DNA, 25 bp, Homo sapien
tttgcacatgtgtttattgcgtcac

SEQ ID NO: 4720712 - DNA, 25 bp, Homo sapien
tatcacacaccgtggcctgtttggg

SEQ ID NO: 4720713 - DNA, 25 bp, Homo sapien
gcacatgtgtttattgcgtcactat

SEQ ID NO: 4720714 - DNA, 25 bp, Homo sapien
gacatttgcacatgtgtttattgcg

SEQ ID NO: 4720715 - DNA, 25 bp, Homo sapien
taagtttcttagacactggaactga

SEQ ID NO: 4720716 - DNA, 25 bp, Homo sapien
ccaatccgattgtttgcaatgagta

SEQ ID NO: 4720717 - DNA, 25 bp, Homo sapien
tacattggtttagtgtccaatccga

SEQ ID NO: 4720718 - DNA, 25 bp, Homo sapien
ccctagcttgaaaagtacttgagtt

SEQ ID NO: 4720719 - DNA, 25 bp, Homo sapien
gaattgatgggacctgatagaagca

SEQ ID NO: 4720720 - DNA, 25 bp, Homo sapien
tgtcattaagaatatgtgtgaatat

SEQ ID NO: 4720721 - DNA, 25 bp, Homo sapien
gaatattatacgagatgtgcacaat

SEQ ID NO: 4720722 - DNA, 25 bp, Homo sapien
cattttcttacacatcaaataaaaa

SEQ ID NO: 4720723 - DNA, 25 bp, Homo sapien
ttttggtacaaccaacatggcaaca

SEQ ID NO: 4720724 - DNA, 25 bp, Homo sapien
catgttgttgtagctgtggtaatgc

SEQ ID NO: 4720725 - DNA, 25 bp, Homo sapien
tctcagacagggttaacttcagctc

SEQ ID NO: 4720726 - DNA, 25 bp, Homo sapien
tattagccaatgcactgtagagttg

SEQ ID NO: 4720727 - DNA, 25 bp, Homo sapien
ttgttgatgaaggatggcacaattt

SEQ ID NO: 4720728 - DNA, 25 bp, Homo sapien
tctttgttgatgaaggatggcacaa

SEQ ID NO: 4720729 - DNA, 25 bp, Homo sapien
tatctttgttgatgaaggatggcac

SEQ ID NO: 4720730 - DNA, 25 bp, Homo sapien
gtttctgtatctttgttgatgaagg

SEQ ID NO: 4720731 - DNA, 25 bp, Homo sapien
catagtacttttgactctccctgac

SEQ ID NO: 4720732 - DNA, 25 bp, Homo sapien
tatattcatgtcaaagagcactcag

SEQ ID NO: 4720733 - DNA, 25 bp, Homo sapien
gtaccataattttaccaaggctctg

SEQ ID NO: 4720734 - DNA, 25 bp, Homo sapien
tacagttggacaccttaaagtacca

SEQ ID NO: 4720735 - DNA, 25 bp, Homo sapien
gggcaccaaggaactctcgggtgaa

SEQ ID NO: 4720736 - DNA, 25 bp, Homo sapien
gtccggtgagattcccagtgagact

SEQ ID NO: 4720737 - DNA, 25 bp, Homo sapien
aggaactctcgggtgaagcagcttc

SEQ ID NO: 4720738 - DNA, 25 bp, Homo sapien
gctttccctccgtccggtgagattc

SEQ ID NO: 4720739 - DNA, 25 bp, Homo sapien
taatttaataacttcctccatccat

SEQ ID NO: 4720740 - DNA, 25 bp, Homo sapien
aatttaataacttcctccatccatg

SEQ ID NO: 4720741 - DNA, 25 bp, Homo sapien
tggaaaattggttcagtagtaaaca

SEQ ID NO: 4720742 - DNA, 25 bp, Homo sapien
gaaaattggttcagtagtaaacaga

SEQ ID NO: 4720743 - DNA, 25 bp, Homo sapien
aggtcgggacgttgcagcctttcag

SEQ ID NO: 4720744 - DNA, 25 bp, Homo sapien
tctctcctggaggtcgggacgttgc

SEQ ID NO: 4720745 - DNA, 25 bp, Homo sapien
tttaaggcaagggtgccagctccac

SEQ ID NO: 4720746 - DNA, 25 bp, Homo sapien
cggtcttttgtatcccttgggctat

SEQ ID NO: 4720747 - DNA, 25 bp, Homo sapien
catgcaggacattagggtagctttg

SEQ ID NO: 4720748 - DNA, 25 bp, Homo sapien
ccaagactatgagatggtcagatgc

SEQ ID NO: 4720749 - DNA, 25 bp, Homo sapien
tgtttgctgcacctggtaagaggtg

SEQ ID NO: 4720750 - DNA, 25 bp, Homo sapien
cagtaggcccacttagcattggtca

SEQ ID NO: 4720751 - DNA, 25 bp, Homo sapien
gggccatcgtgatcttcaaaaagtc

SEQ ID NO: 4720752 - DNA, 25 bp, Homo sapien
cagatgtttatgctttcctttcagg

SEQ ID NO: 4720753 - DNA, 25 bp, Homo sapien
tgacagtcggtgctacattggatct

SEQ ID NO: 4720754 - DNA, 25 bp, Homo sapien
ggcaactcatacctgatcccaatga

SEQ ID NO: 4720755 - DNA, 25 bp, Homo sapien
actaagcccagctgagggaactccc

SEQ ID NO: 4720756 - DNA, 25 bp, Homo sapien
gacccacgtggctactgcatttgaa

SEQ ID NO: 4720757 - DNA, 25 bp, Homo sapien
taagataacctaactagaagctccc

SEQ ID NO: 4720758 - DNA, 25 bp, Homo sapien
ctacatcaggatcagttggaaccag

SEQ ID NO: 4720759 - DNA, 25 bp, Homo sapien
gccccgtgaaggcttgagctgaaat

SEQ ID NO: 4720760 - DNA, 25 bp, Homo sapien
gagcactgactgagctgggtcacct

SEQ ID NO: 4720761 - DNA, 25 bp, Homo sapien
ccaatcagttgcacatctcagggat

SEQ ID NO: 4720762 - DNA, 25 bp, Homo sapien
tcctaaagaattggctccttggctg

SEQ ID NO: 4720763 - DNA, 25 bp, Homo sapien
gaaaacttgcaggtcaggacagatg

SEQ ID NO: 4720764 - DNA, 25 bp, Homo sapien
gccaatgggacatacgggacatcat

SEQ ID NO: 4720765 - DNA, 25 bp, Homo sapien
cattatgggagctctacagggagaa

SEQ ID NO: 4720766 - DNA, 25 bp, Homo sapien
caactaaactgtcaaaagccgaaga

SEQ ID NO: 4720767 - DNA, 25 bp, Homo sapien
ctcagtgagtgaagtcaggataaac

SEQ ID NO: 4720768 - DNA, 25 bp, Homo sapien
tataataagatgacttcaccctgcc

SEQ ID NO: 4720769 - DNA, 25 bp, Homo sapien
gctggttggaaaaatgaacatctcg

SEQ ID NO: 4720770 - DNA, 25 bp, Homo sapien
tgatgctgtaaaaccccaatatggt

SEQ ID NO: 4720771 - DNA, 25 bp, Homo sapien
aatgtcatcaagactatgtgtgaaa

SEQ ID NO: 4720772 - DNA, 25 bp, Homo sapien
tgtgtgaaaattagacaagatgtgc

SEQ ID NO: 4720773 - DNA, 25 bp, Homo sapien
tctaataattagtgggacctgacag

SEQ ID NO: 4720774 - DNA, 25 bp, Homo sapien
gacttcagcatagaaagtgtcattt

SEQ ID NO: 4720775 - DNA, 25 bp, Homo sapien
catactgctgtagctctggtaatga

SEQ ID NO: 4720776 - DNA, 25 bp, Homo sapien
gctccggtggcaaattagcaatgaa

SEQ ID NO: 4720777 - DNA, 25 bp, Homo sapien
catttctcaaacagtgccacgtagg

SEQ ID NO: 4720778 - DNA, 25 bp, Homo sapien
tggttgcctctcagatagggctgcc

SEQ ID NO: 4720779 - DNA, 25 bp, Homo sapien
gggcaccaaggaactctcgggtgaa

SEQ ID NO: 4720780 - DNA, 25 bp, Homo sapien
gctttccctccgtccggtgagattc

SEQ ID NO: 4720781 - DNA, 25 bp, Homo sapien
gtccggtgagattcccagtgagact

SEQ ID NO: 4720782 - DNA, 25 bp, Homo sapien
aggaactctcgggtgaagcagcttc

SEQ ID NO: 4720783 - DNA, 25 bp, Homo sapien
taataacatcgtccttccatttggc

SEQ ID NO: 4720784 - DNA, 25 bp, Homo sapien
gtccttccatttggccgcgactgct

SEQ ID NO: 4720785 - DNA, 25 bp, Homo sapien
taacatcgtccttccatttggccgc

SEQ ID NO: 4720786 - DNA, 25 bp, Homo sapien
taatttaataacatcgtccttccat

SEQ ID NO: 4720787 - DNA, 25 bp, Homo sapien
gaaaattggttcagtagtaaacaga

SEQ ID NO: 4720788 - DNA, 25 bp, Homo sapien
tggaaaattggttcagtagtaaaca

SEQ ID NO: 4720789 - DNA, 25 bp, Homo sapien
caggtggaacaagaacaggcgaggc

SEQ ID NO: 4720790 - DNA, 25 bp, Homo sapien
ctagcaggtggaacaagaacaggcg

SEQ ID NO: 4720791 - DNA, 25 bp, Homo sapien
ggtggaacaagaacaggcgaggcat

SEQ ID NO: 4720792 - DNA, 25 bp, Homo sapien
tagcaggtggaacaagaacaggcga

SEQ ID NO: 4720793 - DNA, 25 bp, Homo sapien
gaggtctgggtgttgcagcctttca

SEQ ID NO: 4720794 - DNA, 25 bp, Homo sapien
tcaacccttagggtaggcactattc

SEQ ID NO: 4720795 - DNA, 25 bp, Homo sapien
aatgagtacaccagagtaagccaca

SEQ ID NO: 4720796 - DNA, 25 bp, Homo sapien
gtttgccagaactggtctttcatca

SEQ ID NO: 4720797 - DNA, 25 bp, Homo sapien
gaatagtattgaagcaactcaagtg

SEQ ID NO: 4720798 - DNA, 25 bp, Homo sapien
tgcaatgagtaccacaccataaagg

SEQ ID NO: 4720799 - DNA, 25 bp, Homo sapien
tcccttaactatgacagactccaca

SEQ ID NO: 4720800 - DNA, 25 bp, Homo sapien
taggtaacgcaatgttataaactgc

SEQ ID NO: 4720801 - DNA, 25 bp, Homo sapien
tcggcttatgggaactttctcacag

SEQ ID NO: 4720802 - DNA, 25 bp, Homo sapien
gaaccacatggagtgtagataagtt

SEQ ID NO: 4720803 - DNA, 25 bp, Homo sapien
ccacatggagtgtagataagttttc

SEQ ID NO: 4720804 - DNA, 25 bp, Homo sapien
catggagtgtagataagttttcctc

SEQ ID NO: 4720805 - DNA, 25 bp, Homo sapien
gagtgtagataagttttcctccaac

SEQ ID NO: 4720806 - DNA, 25 bp, Homo sapien
ccttctcctaatatactttctcata

SEQ ID NO: 4720807 - DNA, 25 bp, Homo sapien
ttgttcataatgaaacctgtttctt

SEQ ID NO: 4720808 - DNA, 25 bp, Homo sapien
gttcataatgaaacctgtttcttat

SEQ ID NO: 4720809 - DNA, 25 bp, Homo sapien
tttgttcataatgaaacctgtttct

SEQ ID NO: 4720810 - DNA, 25 bp, Homo sapien
tctaaaagttatttagagcacctcc

SEQ ID NO: 4720811 - DNA, 25 bp, Homo sapien
cacagagagaggaaatctaaaagtt

SEQ ID NO: 4720812 - DNA, 25 bp, Homo sapien
atctaaaagttatttagagcacctc

SEQ ID NO: 4720813 - DNA, 25 bp, Homo sapien
aaaccatgattcaagtcaataattc

SEQ ID NO: 4720814 - DNA, 25 bp, Homo sapien
ttgagatttgattggtaagcatgat

SEQ ID NO: 4720815 - DNA, 25 bp, Homo sapien
gattcaagtcaataattctgtgctt

SEQ ID NO: 4720816 - DNA, 25 bp, Homo sapien
tgtgctttgagatttgattggtaag

SEQ ID NO: 4720817 - DNA, 25 bp, Homo sapien
aagtgatcattcctcttggcagctg

SEQ ID NO: 4720818 - DNA, 25 bp, Homo sapien
tcaaaagtgatcattcctcttggca

SEQ ID NO: 4720819 - DNA, 25 bp, Homo sapien
ttggcagctgcaatttactcttttc

SEQ ID NO: 4720820 - DNA, 25 bp, Homo sapien
aaaagtgatcattcctcttggcagc

SEQ ID NO: 4720821 - DNA, 25 bp, Homo sapien
tcatcagcaatttgtgacaaagcct

SEQ ID NO: 4720822 - DNA, 25 bp, Homo sapien
tgacaggctctaacaccgtatgagc

SEQ ID NO: 4720823 - DNA, 25 bp, Homo sapien
gggtcatcagcaatttgtgacaaag

SEQ ID NO: 4720824 - DNA, 25 bp, Homo sapien
tgattgctatattccttgacaggct

SEQ ID NO: 4720825 - DNA, 25 bp, Homo sapien
ttttcctcaggagaagtaatatact

SEQ ID NO: 4720826 - DNA, 25 bp, Homo sapien
gtccccaatctcacacttaaacatt

SEQ ID NO: 4720827 - DNA, 25 bp, Homo sapien
agaagtaatatacttcccagaggaa

SEQ ID NO: 4720828 - DNA, 25 bp, Homo sapien
tcaggagaagtaatatacttcccag

SEQ ID NO: 4720829 - DNA, 25 bp, Homo sapien
ggtgaggataaagcttaatggaaca

SEQ ID NO: 4720830 - DNA, 25 bp, Homo sapien
taatggaacaatcgggaccaggaag

SEQ ID NO: 4720831 - DNA, 25 bp, Homo sapien
catagcccaagtcatactggtaggt

SEQ ID NO: 4720832 - DNA, 25 bp, Homo sapien
tccatagcccaagtcatactggtag

SEQ ID NO: 4720833 - DNA, 25 bp, Homo sapien
gaccacgcaatctgcatggccattt

SEQ ID NO: 4720834 - DNA, 25 bp, Homo sapien
ccagctgttaaagagatggctgcaa

SEQ ID NO: 4720835 - DNA, 25 bp, Homo sapien
aatatttgaggaattcccgagacca

SEQ ID NO: 4720836 - DNA, 25 bp, Homo sapien
aggaattcccgagaccacgcaatct

SEQ ID NO: 4720837 - DNA, 25 bp, Homo sapien
tgaaaccatttatgctctgcagtac

SEQ ID NO: 4720838 - DNA, 25 bp, Homo sapien
gtctgctctgaaaccatttatgctc

SEQ ID NO: 4720839 - DNA, 25 bp, Homo sapien
ttcacaccccttggccgctgaggga

SEQ ID NO: 4720840 - DNA, 25 bp, Homo sapien
ctgagggagacggaagtggcctctc

SEQ ID NO: 4720841 - DNA, 25 bp, Homo sapien
ccagatgcatctggctagatgtgcc

SEQ ID NO: 4720842 - DNA, 25 bp, Homo sapien
tggtgccacctgagatcacctggac

SEQ ID NO: 4720843 - DNA, 25 bp, Homo sapien
gatgcatctggctagatgtgccttc

SEQ ID NO: 4720844 - DNA, 25 bp, Homo sapien
ggtgccacctgagatcacctggacc

SEQ ID NO: 4720845 - DNA, 25 bp, Homo sapien
catcctttaactatgtgtacattca

SEQ ID NO: 4720846 - DNA, 25 bp, Homo sapien
gcatcctttaactatgtgtacattc

SEQ ID NO: 4720847 - DNA, 25 bp, Homo sapien
ggcatcctttaactatgtgtacatt

SEQ ID NO: 4720848 - DNA, 25 bp, Homo sapien
atcctttaactatgtgtacattcat

SEQ ID NO: 4720849 - DNA, 25 bp, Homo sapien
caagacttagcagttgaaaatgtgc

SEQ ID NO: 4720850 - DNA, 25 bp, Homo sapien
gaagagtctgctccgagacagggcc

SEQ ID NO: 4720851 - DNA, 25 bp, Homo sapien
gaccacatcatgagaggaagagtct

SEQ ID NO: 4720852 - DNA, 25 bp, Homo sapien
taccaaatcacagagggaccacatc

SEQ ID NO: 4720853 - DNA, 25 bp, Homo sapien
tggagagttcaggcagtctccggat

SEQ ID NO: 4720854 - DNA, 25 bp, Homo sapien
gccatccattcatggagagttcagg

SEQ ID NO: 4720855 - DNA, 25 bp, Homo sapien
catggagagttcaggcagtctccgg

SEQ ID NO: 4720856 - DNA, 25 bp, Homo sapien
ttcatggagagttcaggcagtctcc

SEQ ID NO: 4720857 - DNA, 25 bp, Homo sapien
cattgaaggacaacacctgtgggaa

SEQ ID NO: 4720858 - DNA, 25 bp, Homo sapien
ggacaacacctgtgggaactcccag

SEQ ID NO: 4720859 - DNA, 25 bp, Homo sapien
agccagaaagcacatcaggaaacct

SEQ ID NO: 4720860 - DNA, 25 bp, Homo sapien
ccagccagaaagcacatcaggaaac

SEQ ID NO: 4720861 - DNA, 25 bp, Homo sapien
tccttccatgcagaagtagggatgg

SEQ ID NO: 4720862 - DNA, 25 bp, Homo sapien
ccttccatgcagaagtagggatggg

SEQ ID NO: 4720863 - DNA, 25 bp, Homo sapien
cttccatgcagaagtagggatgggc

SEQ ID NO: 4720864 - DNA, 25 bp, Homo sapien
taaactcatctcttagagctctgac

SEQ ID NO: 4720865 - DNA, 25 bp, Homo sapien
aacaattcaaggctgatctccttag

SEQ ID NO: 4720866 - DNA, 25 bp, Homo sapien
ccttagctgcaaggatgcacagaga

SEQ ID NO: 4720867 - DNA, 25 bp, Homo sapien
gagctctgacatatgtaccatgaga

SEQ ID NO: 4720868 - DNA, 25 bp, Homo sapien
agcaaattgcttaaggctaactcac

SEQ ID NO: 4720869 - DNA, 25 bp, Homo sapien
tgtctcggcttttgcatatgtctca

SEQ ID NO: 4720870 - DNA, 25 bp, Homo sapien
tgagctcccctacatactagctgtg

SEQ ID NO: 4720871 - DNA, 25 bp, Homo sapien
tgaagcaggaggagataagcattcc

SEQ ID NO: 4720872 - DNA, 25 bp, Homo sapien
gatgaagaccggcatgtgctccgaa

SEQ ID NO: 4720873 - DNA, 25 bp, Homo sapien
cactgccgggaagtctgatgaagac

SEQ ID NO: 4720874 - DNA, 25 bp, Homo sapien
caggacatgttatggagcacgatgc

SEQ ID NO: 4720875 - DNA, 25 bp, Homo sapien
cacagtgacggacttctgccggttc

SEQ ID NO: 4720876 - DNA, 25 bp, Homo sapien
atccagcaacttggccttcactagg

SEQ ID NO: 4720877 - DNA, 25 bp, Homo sapien
caatccagcaacttggccttcacta

SEQ ID NO: 4720878 - DNA, 25 bp, Homo sapien
tgcaatccagcaacttggccttcac

SEQ ID NO: 4720879 - DNA, 25 bp, Homo sapien
cttgcaatccagcaacttggccttc

SEQ ID NO: 4720880 - DNA, 25 bp, Homo sapien
gtaattaaaacagatctgacattct

SEQ ID NO: 4720881 - DNA, 25 bp, Homo sapien
attaaaacagatctgacattctagc

SEQ ID NO: 4720882 - DNA, 25 bp, Homo sapien
ctgcagtaattaaaacagatctgac

SEQ ID NO: 4720883 - DNA, 25 bp, Homo sapien
cagtaattaaaacagatctgacatt

SEQ ID NO: 4720884 - DNA, 25 bp, Homo sapien
agggcgacctcagcgacaggcagct

SEQ ID NO: 4720885 - DNA, 25 bp, Homo sapien
gggcgacctcagcgacaggcagctc

SEQ ID NO: 4720886 - DNA, 25 bp, Homo sapien
cagggcgacctcagcgacaggcagc

SEQ ID NO: 4720887 - DNA, 25 bp, Homo sapien
ggcgacctcagcgacaggcagctca

SEQ ID NO: 4720888 - DNA, 25 bp, Homo sapien
tccaaagactgcaaggccatgcagt

SEQ ID NO: 4720889 - DNA, 25 bp, Homo sapien
ccatgcagtggctccagcaaaggct

SEQ ID NO: 4720890 - DNA, 25 bp, Homo sapien
gccatgcagtggctccagcaaaggc

SEQ ID NO: 4720891 - DNA, 25 bp, Homo sapien
cacattgtatggtcccggtatgcat

SEQ ID NO: 4720892 - DNA, 25 bp, Homo sapien
gtatgaattgtatggtcttgtatcc

SEQ ID NO: 4720893 - DNA, 25 bp, Homo sapien
tgcaaggtttgttccttactaaggc

SEQ ID NO: 4720894 - DNA, 25 bp, Homo sapien
tcccggtatgcatagtccagtatga

SEQ ID NO: 4720895 - DNA, 25 bp, Homo sapien
attcataagcatgaactccttttga

SEQ ID NO: 4720896 - DNA, 25 bp, Homo sapien
atttttcatgctttcattcatagat

SEQ ID NO: 4720897 - DNA, 25 bp, Homo sapien
tgtacaattaggcaacagaaccttt

SEQ ID NO: 4720898 - DNA, 25 bp, Homo sapien
ctctgtacaattaggcaacagaacc

SEQ ID NO: 4720899 - DNA, 25 bp, Homo sapien
caattaggcaacagaacctttgcat

SEQ ID NO: 4720900 - DNA, 25 bp, Homo sapien
tacaattaggcaacagaacctttgc

SEQ ID NO: 4720901 - DNA, 25 bp, Homo sapien
actgtgccactcgagcaccctgtga

SEQ ID NO: 4720902 - DNA, 25 bp, Homo sapien
tcactgacagcagggtgatttggca

SEQ ID NO: 4720903 - DNA, 25 bp, Homo sapien
caaaccctaacagtcccatgcgact

SEQ ID NO: 4720904 - DNA, 25 bp, Homo sapien
tgaccagagttagaggccactcact

SEQ ID NO: 4720905 - DNA, 25 bp, Homo sapien
gaagaagagcttccttatgggaaac

SEQ ID NO: 4720906 - DNA, 25 bp, Homo sapien
tgggtctggacttgtagtctgaatg

SEQ ID NO: 4720907 - DNA, 25 bp, Homo sapien
agagcttccttatgggaaaccacac

SEQ ID NO: 4720908 - DNA, 25 bp, Homo sapien
gaatgtgttagaggacgctcccagg

SEQ ID NO: 4720909 - DNA, 25 bp, Homo sapien
agagccggcgctcacgaggagcggg

SEQ ID NO: 4720910 - DNA, 25 bp, Homo sapien
agcgctgcctggcaagcccggagcc

SEQ ID NO: 4720911 - DNA, 25 bp, Homo sapien
aggagatcgcgctgactgacatggc

SEQ ID NO: 4720912 - DNA, 25 bp, Homo sapien
ggcagtgcgagagccaagagccggc

SEQ ID NO: 4720913 - DNA, 25 bp, Homo sapien
gggctcctttcgcccgctgcaggga

SEQ ID NO: 4720914 - DNA, 25 bp, Homo sapien
tcgctccgcccagcgtcgggattgg

SEQ ID NO: 4720915 - DNA, 25 bp, Homo sapien
attggcgcccagacacagtagatga

SEQ ID NO: 4720916 - DNA, 25 bp, Homo sapien
aggcgaccggtacgcaaacctccag

SEQ ID NO: 4720917 - DNA, 25 bp, Homo sapien
gaggtcagcctactaggcacaatgc

SEQ ID NO: 4720918 - DNA, 25 bp, Homo sapien
ctgtgtagtctgtagaggtcagcct

SEQ ID NO: 4720919 - DNA, 25 bp, Homo sapien
cagtggagctaggtctgtgtagtct

SEQ ID NO: 4720920 - DNA, 25 bp, Homo sapien
tccgctggctggatccaccaggaag

SEQ ID NO: 4720921 - DNA, 25 bp, Homo sapien
tccaggatccctgaacggaatttat

SEQ ID NO: 4720922 - DNA, 25 bp, Homo sapien
taagtaagtctcttcctgcgctaag

SEQ ID NO: 4720923 - DNA, 25 bp, Homo sapien
cgccagctgcttgctagtaacatga

SEQ ID NO: 4720924 - DNA, 25 bp, Homo sapien
cttgtgtaagttatcccagctgcag

SEQ ID NO: 4720925 - DNA, 25 bp, Homo sapien
aagatagagaagtagtattagttcc

SEQ ID NO: 4720926 - DNA, 25 bp, Homo sapien
agatagagaagtagtattagttcca

SEQ ID NO: 4720927 - DNA, 25 bp, Homo sapien
gatagagaagtagtattagttccat

SEQ ID NO: 4720928 - DNA, 25 bp, Homo sapien
tattcagaacaaaccccactgtaag

SEQ ID NO: 4720929 - DNA, 25 bp, Homo sapien
agacttgaagtcaccctatgaagac

SEQ ID NO: 4720930 - DNA, 25 bp, Homo sapien
acacagagccatgttctacagtatg

SEQ ID NO: 4720931 - DNA, 25 bp, Homo sapien
gagcacctatttgatagtcactgga

SEQ ID NO: 4720932 - DNA, 25 bp, Homo sapien
tgaagaaacagtgtctccaacagag

SEQ ID NO: 4720933 - DNA, 25 bp, Homo sapien
gaggtttcgagattcagatgccctg

SEQ ID NO: 4720934 - DNA, 25 bp, Homo sapien
ggaaattccggcagtgtaccttgac

SEQ ID NO: 4720935 - DNA, 25 bp, Homo sapien
taccttgactgctagctaccctgtg

SEQ ID NO: 4720936 - DNA, 25 bp, Homo sapien
tttaggaccataccaagaagagtca

SEQ ID NO: 4720937 - DNA, 25 bp, Homo sapien
cctttaggaccataccaagaagagt

SEQ ID NO: 4720938 - DNA, 25 bp, Homo sapien
ttcctttaggaccataccaagaaga

SEQ ID NO: 4720939 - DNA, 25 bp, Homo sapien
ctttaggaccataccaagaagagtc

SEQ ID NO: 4720940 - DNA, 25 bp, Homo sapien
tgcagccctatccatgccatggcaa

SEQ ID NO: 4720941 - DNA, 25 bp, Homo sapien
catgccatggcaaccaccgaggcat

SEQ ID NO: 4720942 - DNA, 25 bp, Homo sapien
ccatggcaaccaccgaggcatccat

SEQ ID NO: 4720943 - DNA, 25 bp, Homo sapien
tatccatgccatggcaaccaccgag

SEQ ID NO: 4720944 - DNA, 25 bp, Homo sapien
cagtgccccacatcaatctgttaca

SEQ ID NO: 4720945 - DNA, 25 bp, Homo sapien
cagtgctatagaggccttacttaaa

SEQ ID NO: 4720946 - DNA, 25 bp, Homo sapien
tcaacaagaagccatctacccagtt

SEQ ID NO: 4720947 - DNA, 25 bp, Homo sapien
gagtagagtgtgctatttcgacaca

SEQ ID NO: 4720948 - DNA, 25 bp, Homo sapien
atttagtcacaaaaaggaacgcagt

SEQ ID NO: 4720949 - DNA, 25 bp, Homo sapien
ttatgttcggtgaaaaaagccagcc

SEQ ID NO: 4720950 - DNA, 25 bp, Homo sapien
caaaaaggaacgcagtgctgatata

SEQ ID NO: 4720951 - DNA, 25 bp, Homo sapien
gaaataggaagtttctgctaatggg

SEQ ID NO: 4720952 - DNA, 25 bp, Homo sapien
ggtgtagttagaaccatgagtgcac

SEQ ID NO: 4720953 - DNA, 25 bp, Homo sapien
gcactattttggatgaacaccagga

SEQ ID NO: 4720954 - DNA, 25 bp, Homo sapien
aggtagttcagaccattcgagggtg

SEQ ID NO: 4720955 - DNA, 25 bp, Homo sapien
ccattcgagggtgtagttagaacca

SEQ ID NO: 4720956 - DNA, 25 bp, Homo sapien
taaagagttttgatttcagaggagg

SEQ ID NO: 4720957 - DNA, 25 bp, Homo sapien
tcatgtctctttaattaaagagttt

SEQ ID NO: 4720958 - DNA, 25 bp, Homo sapien
aaattagaatgccttctcctcatgg

SEQ ID NO: 4720959 - DNA, 25 bp, Homo sapien
gagttttgatttcagaggagggtac

SEQ ID NO: 4720960 - DNA, 25 bp, Homo sapien
gaggtagatgaaaaccagagggcca

SEQ ID NO: 4720961 - DNA, 25 bp, Homo sapien
gtcttagaggaaagagccaccccag

SEQ ID NO: 4720962 - DNA, 25 bp, Homo sapien
agaggaaagagccaccccagtcttt

SEQ ID NO: 4720963 - DNA, 25 bp, Homo sapien
aggtagatgaaaaccagagggccac

SEQ ID NO: 4720964 - DNA, 25 bp, Homo sapien
tgtaacatatctgtcagacagccag

SEQ ID NO: 4720965 - DNA, 25 bp, Homo sapien
atttcagaaattacagcattgcttg

SEQ ID NO: 4720966 - DNA, 25 bp, Homo sapien
taacctgctattccttttcaggcaa

SEQ ID NO: 4720967 - DNA, 25 bp, Homo sapien
gatcctctaagaccaaggcatgtaa

SEQ ID NO: 4720968 - DNA, 25 bp, Homo sapien
ttccttctaagaacttccacctgag

SEQ ID NO: 4720969 - DNA, 25 bp, Homo sapien
cagcgtcagcattccacatgggtgt

SEQ ID NO: 4720970 - DNA, 25 bp, Homo sapien
agacaagcgggcactactacctgag

SEQ ID NO: 4720971 - DNA, 25 bp, Homo sapien
tggcactataaacctttcgcaaagg

SEQ ID NO: 4720972 - DNA, 25 bp, Homo sapien
tacagcaatgctaagtagtcaaggc

SEQ ID NO: 4720973 - DNA, 25 bp, Homo sapien
taattggcactatggaaatcctgca

SEQ ID NO: 4720974 - DNA, 25 bp, Homo sapien
gggtaactcggctacagtaacagct

SEQ ID NO: 4720975 - DNA, 25 bp, Homo sapien
taagaggtttgctcagggtcttgca

SEQ ID NO: 4720976 - DNA, 25 bp, Homo sapien
taaatgtaacctaccagtgagtcca

SEQ ID NO: 4720977 - DNA, 25 bp, Homo sapien
gctctacgtggtgtcagtgggatca

SEQ ID NO: 4720978 - DNA, 25 bp, Homo sapien
tatcttcagtaggttagtccaggca

SEQ ID NO: 4720979 - DNA, 25 bp, Homo sapien
tataggataacaatttgggctgggc

SEQ ID NO: 4720980 - DNA, 25 bp, Homo sapien
caacatgtaagcaaactaaggccca

SEQ ID NO: 4720981 - DNA, 25 bp, Homo sapien
ccaaaccgtatcaacatgtaagcaa

SEQ ID NO: 4720982 - DNA, 25 bp, Homo sapien
tgaagttagataaattgctcacatc

SEQ ID NO: 4720983 - DNA, 25 bp, Homo sapien
aactaaggcccagtgaagttagata

SEQ ID NO: 4720984 - DNA, 25 bp, Homo sapien
atcaaaaggtcacataaatggcaga

SEQ ID NO: 4720985 - DNA, 25 bp, Homo sapien
gcagaatttttagatgcacaacttg

SEQ ID NO: 4720986 - DNA, 25 bp, Homo sapien
aatcaaaaggtcacataaatggcag

SEQ ID NO: 4720987 - DNA, 25 bp, Homo sapien
tctggggcagaatttttagatgcac

SEQ ID NO: 4720988 - DNA, 25 bp, Homo sapien
tccttaagaactatgtccacttgcc

SEQ ID NO: 4720989 - DNA, 25 bp, Homo sapien
tgtagggttccttaagaactatgtc

SEQ ID NO: 4720990 - DNA, 25 bp, Homo sapien
tagggttccttaagaactatgtcca

SEQ ID NO: 4720991 - DNA, 25 bp, Homo sapien
taagaactatgtccacttgccacat

SEQ ID NO: 4720992 - DNA, 25 bp, Homo sapien
ggcactacagtagaacctcaatatt

SEQ ID NO: 4720993 - DNA, 25 bp, Homo sapien
gattagatttctttccaacggttgc

SEQ ID NO: 4720994 - DNA, 25 bp, Homo sapien
tccctgacactgtacatacactttc

SEQ ID NO: 4720995 - DNA, 25 bp, Homo sapien
aaagttgcttctgacggcactacag

SEQ ID NO: 4720996 - DNA, 25 bp, Homo sapien
tctttggtccctcaggtcattgggc

SEQ ID NO: 4720997 - DNA, 25 bp, Homo sapien
gaccacaggtcctccacaaggaatt

SEQ ID NO: 4720998 - DNA, 25 bp, Homo sapien
gactgcagagatgctcccacaaagt
